United States Patent Application Publication US 2020/0095579 A1 - sequence listing, part 10

SEQ ID NO: 136625 - DNA, 20 bp, Artificial Sequence
  Description of Artificial Sequence: Synthetic oligonucleotide
  Target: LAMA2; (+) strand; PAM type: NRG; PAM sequence: AAG
aatagaaacaaatcaaagaa

SEQ ID NO: 136626 - DNA, 20 bp, Artificial Sequence
  Description of Artificial Sequence: Synthetic oligonucleotide
  Target: LAMA2; (+) strand; PAM type: NRG; PAM sequence: AAG
aaatcaaagaaaagaattga

SEQ ID NO: 136627 - DNA, 20 bp, Artificial Sequence
  Description of Artificial Sequence: Synthetic oligonucleotide
  Target: LAMA2; (+) strand; PAM type: NRG; PAM sequence: TAG
atcctaaatgtaaattttat

SEQ ID NO: 136628 - DNA, 20 bp, Artificial Sequence
  Description of Artificial Sequence: Synthetic oligonucleotide
  Target: LAMA2; (+) strand; PAM type: NRG; PAM sequence: TAG
gtaaattttattagtgtctt

SEQ ID NO: 136629 - DNA, 20 bp, Artificial Sequence
  Description of Artificial Sequence: Synthetic oligonucleotide
  Target: LAMA2; (+) strand; PAM type: NRG; PAM sequence: TGG
tattagtgtctttagtttta

SEQ ID NO: 136630 - DNA, 20 bp, Artificial Sequence
  Description of Artificial Sequence: Synthetic oligonucleotide
  Target: LAMA2; (+) strand; PAM type: NRG; PAM sequence: TAG
agtgtctttagttttatggt

SEQ ID NO: 136631 - DNA, 20 bp, Artificial Sequence
  Description of Artificial Sequence: Synthetic oligonucleotide
  Target: LAMA2; (+) strand; PAM type: NRG; PAM sequence: AAG
tatggttagaaaactctatg

SEQ ID NO: 136632 - DNA, 20 bp, Artificial Sequence
  Description of Artificial Sequence: Synthetic oligonucleotide
  Target: LAMA2; (+) strand; PAM type: NRG; PAM sequence: TGG
aaaactctatgaagcaacaa

SEQ ID NO: 136633 - DNA, 20 bp, Artificial Sequence
  Description of Artificial Sequence: Synthetic oligonucleotide
  Target: LAMA2; (+) strand; PAM type: NRG; PAM sequence: TGG
tctatgaagcaacaatggca

SEQ ID NO: 136634 - DNA, 20 bp, Artificial Sequence
  Description of Artificial Sequence: Synthetic oligonucleotide
  Target: LAMA2; (+) strand; PAM type: NRG; PAM sequence: GAG
tgaagcaacaatggcatggt

SEQ ID NO: 136635 - DNA, 20 bp, Artificial Sequence
  Description of Artificial Sequence: Synthetic oligonucleotide
  Target: LAMA2; (+) strand; PAM type: NRG; PAM sequence: AGG
gaagcaacaatggcatggtg

SEQ ID NO: 136636 - DNA, 20 bp, Artificial Sequence
  Description of Artificial Sequence: Synthetic oligonucleotide
  Target: LAMA2; (+) strand; PAM type: NRG; PAM sequence: GGG
aagcaacaatggcatggtga

SEQ ID NO: 136637 - DNA, 20 bp, Artificial Sequence
  Description of Artificial Sequence: Synthetic oligonucleotide
  Target: LAMA2; (+) strand; PAM type: NRG; PAM sequence: AAG
acaatggcatggtgagggat

SEQ ID NO: 136638 - DNA, 20 bp, Artificial Sequence
  Description of Artificial Sequence: Synthetic oligonucleotide
  Target: LAMA2; (+) strand; PAM type: NRG; PAM sequence: AAG
ataagttatttgttttatta

SEQ ID NO: 136639 - DNA, 20 bp, Artificial Sequence
  Description of Artificial Sequence: Synthetic oligonucleotide
  Target: LAMA2; (+) strand; PAM type: NRG; PAM sequence: AAG
gttttattaaagatttaaat

SEQ ID NO: 136640 - DNA, 20 bp, Artificial Sequence
  Description of Artificial Sequence: Synthetic oligonucleotide
  Target: LAMA2; (+) strand; PAM type: NRG; PAM sequence: AAG
agatttaaataagctttacc

SEQ ID NO: 136641 - DNA, 20 bp, Artificial Sequence
  Description of Artificial Sequence: Synthetic oligonucleotide
  Target: LAMA2; (+) strand; PAM type: NRG; PAM sequence: AGG
gatttaaataagctttacca

SEQ ID NO: 136642 - DNA, 20 bp, Artificial Sequence
  Description of Artificial Sequence: Synthetic oligonucleotide
  Target: LAMA2; (+) strand; PAM type: NRG; PAM sequence: CAG
aaataagctttaccaaggac

SEQ ID NO: 136643 - DNA, 20 bp, Artificial Sequence
  Description of Artificial Sequence: Synthetic oligonucleotide
  Target: LAMA2; (+) strand; PAM type: NRG; PAM sequence: TGG
ctttaccaaggaccagattt

SEQ ID NO: 136644 - DNA, 20 bp, Artificial Sequence
  Description of Artificial Sequence: Synthetic oligonucleotide
  Target: LAMA2; (+) strand; PAM type: NRG; PAM sequence: TAG
accagattttggttctactt

SEQ ID NO: 136645 - DNA, 20 bp, Artificial Sequence
  Description of Artificial Sequence: Synthetic oligonucleotide
  Target: LAMA2; (+) strand; PAM type: NRG; PAM sequence: AGG
ccagattttggttctacttt

SEQ ID NO: 136646 - DNA, 20 bp, Artificial Sequence
  Description of Artificial Sequence: Synthetic oligonucleotide
  Target: LAMA2; (+) strand; PAM type: NRG; PAM sequence: AAG
gttctactttaggccctgac

SEQ ID NO: 136647 - DNA, 20 bp, Artificial Sequence
  Description of Artificial Sequence: Synthetic oligonucleotide
  Target: LAMA2; (+) strand; PAM type: NRG; PAM sequence: AAG
ctactttaggccctgacaag

SEQ ID NO: 136648 - DNA, 20 bp, Artificial Sequence
  Description of Artificial Sequence: Synthetic oligonucleotide
  Target: LAMA2; (+) strand; PAM type: NRG; PAM sequence: AAG
gccctgacaagaagtcttgt

SEQ ID NO: 136649 - DNA, 20 bp, Artificial Sequence
  Description of Artificial Sequence: Synthetic oligonucleotide
  Target: LAMA2; (+) strand; PAM type: NRG; PAM sequence: AAG
gaagtcttgtaagcttttta

SEQ ID NO: 136650 - DNA, 20 bp, Artificial Sequence
  Description of Artificial Sequence: Synthetic oligonucleotide
  Target: LAMA2; (+) strand; PAM type: NRG; PAM sequence: GAG
agtcttgtaagctttttaaa

SEQ ID NO: 136651 - DNA, 20 bp, Artificial Sequence
  Description of Artificial Sequence: Synthetic oligonucleotide
  Target: LAMA2; (+) strand; PAM type: NRG; PAM sequence: TAG
aaagagctcacttcaaatca

SEQ ID NO: 136652 - DNA, 20 bp, Artificial Sequence
  Description of Artificial Sequence: Synthetic oligonucleotide
  Target: LAMA2; (+) strand; PAM type: NRG; PAM sequence: GAG
acatatcatttatcttctct

SEQ ID NO: 136653 - DNA, 20 bp, Artificial Sequence
  Description of Artificial Sequence: Synthetic oligonucleotide
  Target: LAMA2; (+) strand; PAM type: NRG; PAM sequence: AAG
gcacttccttcatttttata

SEQ ID NO: 136654 - DNA, 20 bp, Artificial Sequence
  Description of Artificial Sequence: Synthetic oligonucleotide
  Target: LAMA2; (+) strand; PAM type: NRG; PAM sequence: TGG
cttccttcatttttataaag

SEQ ID NO: 136655 - DNA, 20 bp, Artificial Sequence
  Description of Artificial Sequence: Synthetic oligonucleotide
  Target: LAMA2; (+) strand; PAM type: NRG; PAM sequence: AAG
cttcatttttataaagtgga

SEQ ID NO: 136656 - DNA, 20 bp, Artificial Sequence
  Description of Artificial Sequence: Synthetic oligonucleotide
  Target: LAMA2; (+) strand; PAM type: NRG; PAM sequence: TGG
aattaataaaatttatacaa

SEQ ID NO: 136657 - DNA, 20 bp, Artificial Sequence
  Description of Artificial Sequence: Synthetic oligonucleotide
  Target: LAMA2; (+) strand; PAM type: NRG; PAM sequence: GGG
attaataaaatttatacaat

SEQ ID NO: 136658 - DNA, 20 bp, Artificial Sequence
  Description of Artificial Sequence: Synthetic oligonucleotide
  Target: LAMA2; (+) strand; PAM type: NRG; PAM sequence: TGG
aatttatacaatgggttata

SEQ ID NO: 136659 - DNA, 20 bp, Artificial Sequence
  Description of Artificial Sequence: Synthetic oligonucleotide
  Target: LAMA2; (+) strand; PAM type: NRG; PAM sequence: GGG
atttatacaatgggttatat

SEQ ID NO: 136660 - DNA, 20 bp, Artificial Sequence
  Description of Artificial Sequence: Synthetic oligonucleotide
  Target: LAMA2; (+) strand; PAM type: NRG; PAM sequence: AAG
tatgggaattaaataatatg

SEQ ID NO: 136661 - DNA, 20 bp, Artificial Sequence
  Description of Artificial Sequence: Synthetic oligonucleotide
  Target: LAMA2; (+) strand; PAM type: NRG; PAM sequence: TAG
attaaataatatgaagaata

SEQ ID NO: 136662 - DNA, 20 bp, Artificial Sequence
  Description of Artificial Sequence: Synthetic oligonucleotide
  Target: LAMA2; (+) strand; PAM type: NRG; PAM sequence: TAG
ataatatgaagaatatagaa

SEQ ID NO: 136663 - DNA, 20 bp, Artificial Sequence
  Description of Artificial Sequence: Synthetic oligonucleotide
  Target: LAMA2; (+) strand; PAM type: NRG; PAM sequence: CAG
tgaagaatatagaatagctt

SEQ ID NO: 136664 - DNA, 20 bp, Artificial Sequence
  Description of Artificial Sequence: Synthetic oligonucleotide
  Target: LAMA2; (+) strand; PAM type: NRG; PAM sequence: TAG
tgtactctgtaatccctttg

SEQ ID NO: 136665 - DNA, 20 bp, Artificial Sequence
  Description of Artificial Sequence: Synthetic oligonucleotide
  Target: LAMA2; (+) strand; PAM type: NRG; PAM sequence: TGG
tctttatttatttaattatg

SEQ ID NO: 136666 - DNA, 20 bp, Artificial Sequence
  Description of Artificial Sequence: Synthetic oligonucleotide
  Target: LAMA2; (+) strand; PAM type: NRG; PAM sequence: GGG
ctttatttatttaattatgt

SEQ ID NO: 136667 - DNA, 20 bp, Artificial Sequence
  Description of Artificial Sequence: Synthetic oligonucleotide
  Target: LAMA2; (+) strand; PAM type: NRG; PAM sequence: TGG
atttaattatgtgggataat

SEQ ID NO: 136668 - DNA, 20 bp, Artificial Sequence
  Description of Artificial Sequence: Synthetic oligonucleotide
  Target: LAMA2; (+) strand; PAM type: NRG; PAM sequence: AAG
ttttctgaacatacaacata

SEQ ID NO: 136669 - DNA, 20 bp, Artificial Sequence
  Description of Artificial Sequence: Synthetic oligonucleotide
  Target: LAMA2; (+) strand; PAM type: NRG; PAM sequence: TGG
taaagaaaatactttatccc

SEQ ID NO: 136670 - DNA, 20 bp, Artificial Sequence
  Description of Artificial Sequence: Synthetic oligonucleotide
  Target: LAMA2; (+) strand; PAM type: NRG; PAM sequence: TGG
ttatccctggtctcttttct

SEQ ID NO: 136671 - DNA, 20 bp, Artificial Sequence
  Description of Artificial Sequence: Synthetic oligonucleotide
  Target: LAMA2; (+) strand; PAM type: NRG; PAM sequence: GAG
ggcttcctcccatgattgct

SEQ ID NO: 136672 - DNA, 20 bp, Artificial Sequence
  Description of Artificial Sequence: Synthetic oligonucleotide
  Target: LAMA2; (+) strand; PAM type: NRG; PAM sequence: AGG
gcttcctcccatgattgctg

SEQ ID NO: 136673 - DNA, 20 bp, Artificial Sequence
  Description of Artificial Sequence: Synthetic oligonucleotide
  Target: LAMA2; (+) strand; PAM type: NRG; PAM sequence: TGG
ctcccatgattgctgaggcc

SEQ ID NO: 136674 - DNA, 20 bp, Artificial Sequence
  Description of Artificial Sequence: Synthetic oligonucleotide
  Target: LAMA2; (+) strand; PAM type: NRG; PAM sequence: GGG
tcccatgattgctgaggcct

SEQ ID NO: 136675 - DNA, 20 bp, Artificial Sequence
  Description of Artificial Sequence: Synthetic oligonucleotide
  Target: LAMA2; (+) strand; PAM type: NRG; PAM sequence: AAG
atgattgctgaggcctggga

SEQ ID NO: 136676 - DNA, 20 bp, Artificial Sequence
  Description of Artificial Sequence: Synthetic oligonucleotide
  Target: LAMA2; (+) strand; PAM type: NRG; PAM sequence: CAG
tgctgaggcctgggaaagta

SEQ ID NO: 136677 - DNA, 20 bp, Artificial Sequence
  Description of Artificial Sequence: Synthetic oligonucleotide
  Target: LAMA2; (+) strand; PAM type: NRG; PAM sequence: AGG
gctgaggcctgggaaagtac

SEQ ID NO: 136678 - DNA, 20 bp, Artificial Sequence
  Description of Artificial Sequence: Synthetic oligonucleotide
  Target: LAMA2; (+) strand; PAM type: NRG; PAM sequence: TGG
ggcctgggaaagtacaggcc

SEQ ID NO: 136679 - DNA, 20 bp, Artificial Sequence
  Description of Artificial Sequence: Synthetic oligonucleotide
  Target: LAMA2; (+) strand; PAM type: NRG; PAM sequence: CAG
caggcctggcctgctccaat

SEQ ID NO: 136680 - DNA, 20 bp, Artificial Sequence
  Description of Artificial Sequence: Synthetic oligonucleotide
  Target: LAMA2; (+) strand; PAM type: NRG; PAM sequence: AGG
aggcctggcctgctccaatc

SEQ ID NO: 136681 - DNA, 20 bp, Artificial Sequence
  Description of Artificial Sequence: Synthetic oligonucleotide
  Target: LAMA2; (+) strand; PAM type: NRG; PAM sequence: CAG
cctgctccaatcaggtcttt

SEQ ID NO: 136682 - DNA, 20 bp, Artificial Sequence
  Description of Artificial Sequence: Synthetic oligonucleotide
  Target: LAMA2; (+) strand; PAM type: NRG; PAM sequence: AGG
ctgctccaatcaggtctttc

SEQ ID NO: 136683 - DNA, 20 bp, Artificial Sequence
  Description of Artificial Sequence: Synthetic oligonucleotide
  Target: LAMA2; (+) strand; PAM type: NRG; PAM sequence: GGG
tgctccaatcaggtctttca

SEQ ID NO: 136684 - DNA, 20 bp, Artificial Sequence
  Description of Artificial Sequence: Synthetic oligonucleotide
  Target: LAMA2; (+) strand; PAM type: NRG; PAM sequence: CAG
tccaatcaggtctttcaggg

SEQ ID NO: 136685 - DNA, 20 bp, Artificial Sequence
  Description of Artificial Sequence: Synthetic oligonucleotide
  Target: LAMA2; (+) strand; PAM type: NRG; PAM sequence: AAG
aggtctttcagggcagacca

SEQ ID NO: 136686 - DNA, 20 bp, Artificial Sequence
  Description of Artificial Sequence: Synthetic oligonucleotide
  Target: LAMA2; (+) strand; PAM type: NRG; PAM sequence: CAG
tctttcagggcagaccaaag

SEQ ID NO: 136687 - DNA, 20 bp, Artificial Sequence
  Description of Artificial Sequence: Synthetic oligonucleotide
  Target: LAMA2; (+) strand; PAM type: NRG; PAM sequence: AGG
ctttcagggcagaccaaagc

SEQ ID NO: 136688 - DNA, 20 bp, Artificial Sequence
  Description of Artificial Sequence: Synthetic oligonucleotide
  Target: LAMA2; (+) strand; PAM type: NRG; PAM sequence: GGG
tttcagggcagaccaaagca

SEQ ID NO: 136689 - DNA, 20 bp, Artificial Sequence
  Description of Artificial Sequence: Synthetic oligonucleotide
  Target: LAMA2; (+) strand; PAM type: NRG; PAM sequence: CAG
gggcagaccaaagcagggca

SEQ ID NO: 136690 - DNA, 20 bp, Artificial Sequence
  Description of Artificial Sequence: Synthetic oligonucleotide
  Target: LAMA2; (+) strand; PAM type: NRG; PAM sequence: AGG
ggcagaccaaagcagggcac

SEQ ID NO: 136691 - DNA, 20 bp, Artificial Sequence
  Description of Artificial Sequence: Synthetic oligonucleotide
  Target: LAMA2; (+) strand; PAM type: NRG; PAM sequence: GGG
gcagaccaaagcagggcaca

SEQ ID NO: 136692 - DNA, 20 bp, Artificial Sequence
  Description of Artificial Sequence: Synthetic oligonucleotide
  Target: LAMA2; (+) strand; PAM type: NRG; PAM sequence: GAG
agaccaaagcagggcacagg

SEQ ID NO: 136693 - DNA, 20 bp, Artificial Sequence
  Description of Artificial Sequence: Synthetic oligonucleotide
  Target: LAMA2; (+) strand; PAM type: NRG; PAM sequence: CAG
tcttacccatacctgcaaaa

SEQ ID NO: 136694 - DNA, 20 bp, Artificial Sequence
  Description of Artificial Sequence: Synthetic oligonucleotide
  Target: LAMA2; (+) strand; PAM type: NRG; PAM sequence: AGG
cttacccatacctgcaaaac

SEQ ID NO: 136695 - DNA, 20 bp, Artificial Sequence
  Description of Artificial Sequence: Synthetic oligonucleotide
  Target: LAMA2; (+) strand; PAM type: NRG; PAM sequence: GAG
catacctgcaaaacaggaat

SEQ ID NO: 136696 - DNA, 20 bp, Artificial Sequence
  Description of Artificial Sequence: Synthetic oligonucleotide
  Target: LAMA2; (+) strand; PAM type: NRG; PAM sequence: AGG
atacctgcaaaacaggaatg

SEQ ID NO: 136697 - DNA, 20 bp, Artificial Sequence
  Description of Artificial Sequence: Synthetic oligonucleotide
  Target: LAMA2; (+) strand; PAM type: NRG; PAM sequence: TGG
gcaaaacaggaatgaggcca

SEQ ID NO: 136698 - DNA, 20 bp, Artificial Sequence
  Description of Artificial Sequence: Synthetic oligonucleotide
  Target: LAMA2; (+) strand; PAM type: NRG; PAM sequence: CAG
aacaggaatgaggccatggt

SEQ ID NO: 136699 - DNA, 20 bp, Artificial Sequence
  Description of Artificial Sequence: Synthetic oligonucleotide
  Target: LAMA2; (+) strand; PAM type: NRG; PAM sequence: AGG
acaggaatgaggccatggtc

SEQ ID NO: 136700 - DNA, 20 bp, Artificial Sequence
  Description of Artificial Sequence: Synthetic oligonucleotide
  Target: LAMA2; (+) strand; PAM type: NRG; PAM sequence: GGG
caggaatgaggccatggtca

SEQ ID NO: 136701 - DNA, 20 bp, Artificial Sequence
  Description of Artificial Sequence: Synthetic oligonucleotide
  Target: LAMA2; (+) strand; PAM type: NRG; PAM sequence: CAG
aatgaggccatggtcagggt

SEQ ID NO: 136702 - DNA, 20 bp, Artificial Sequence
  Description of Artificial Sequence: Synthetic oligonucleotide
  Target: LAMA2; (+) strand; PAM type: NRG; PAM sequence: TAG
gccatggtcagggtcagaac

SEQ ID NO: 136703 - DNA, 20 bp, Artificial Sequence
  Description of Artificial Sequence: Synthetic oligonucleotide
  Target: LAMA2; (+) strand; PAM type: NRG; PAM sequence: CAG
tggtcagggtcagaactagt

SEQ ID NO: 136704 - DNA, 20 bp, Artificial Sequence
  Description of Artificial Sequence: Synthetic oligonucleotide
  Target: LAMA2; (+) strand; PAM type: NRG; PAM sequence: GAG
ggtcagaactagtcagtgct

SEQ ID NO: 136705 - DNA, 20 bp, Artificial Sequence
  Description of Artificial Sequence: Synthetic oligonucleotide
  Target: LAMA2; (+) strand; PAM type: NRG; PAM sequence: AGG
gtcagaactagtcagtgctg

SEQ ID NO: 136706 - DNA, 20 bp, Artificial Sequence
  Description of Artificial Sequence: Synthetic oligonucleotide
  Target: LAMA2; (+) strand; PAM type: NRG; PAM sequence: GGG
tcagaactagtcagtgctga

SEQ ID NO: 136707 - DNA, 20 bp, Artificial Sequence
  Description of Artificial Sequence: Synthetic oligonucleotide
  Target: LAMA2; (+) strand; PAM type: NRG; PAM sequence: GAG
agaactagtcagtgctgagg

SEQ ID NO: 136708 - DNA, 20 bp, Artificial Sequence
  Description of Artificial Sequence: Synthetic oligonucleotide
  Target: LAMA2; (+) strand; PAM type: NRG; PAM sequence: AGG
gaactagtcagtgctgaggg

SEQ ID NO: 136709 - DNA, 20 bp, Artificial Sequence
  Description of Artificial Sequence: Synthetic oligonucleotide
  Target: LAMA2; (+) strand; PAM type: NRG; PAM sequence: GAG
actagtcagtgctgagggag

SEQ ID NO: 136710 - DNA, 20 bp, Artificial Sequence
  Description of Artificial Sequence: Synthetic oligonucleotide
  Target: LAMA2; (+) strand; PAM type: NRG; PAM sequence: AGG
ctagtcagtgctgagggagg

SEQ ID NO: 136711 - DNA, 20 bp, Artificial Sequence
  Description of Artificial Sequence: Synthetic oligonucleotide
  Target: LAMA2; (+) strand; PAM type: NRG; PAM sequence: GAG
gagggaggaggcaaaaatcc

SEQ ID NO: 136712 - DNA, 20 bp, Artificial Sequence
  Description of Artificial Sequence: Synthetic oligonucleotide
  Target: LAMA2; (+) strand; PAM type: NRG; PAM sequence: GAG
gggaggaggcaaaaatccga

SEQ ID NO: 136713 - DNA, 20 bp, Artificial Sequence
  Description of Artificial Sequence: Synthetic oligonucleotide
  Target: LAMA2; (+) strand; PAM type: NRG; PAM sequence: AAG
aggcaaaaatccgagagaaa

SEQ ID NO: 136714 - DNA, 20 bp, Artificial Sequence
  Description of Artificial Sequence: Synthetic oligonucleotide
  Target: LAMA2; (+) strand; PAM type: NRG; PAM sequence: TGG
gagaaaaagtgacaatgccc

SEQ ID NO: 136715 - DNA, 20 bp, Artificial Sequence
  Description of Artificial Sequence: Synthetic oligonucleotide
  Target: LAMA2; (+) strand; PAM type: NRG; PAM sequence: AAG
aaagtgacaatgccctggtg

SEQ ID NO: 136716 - DNA, 20 bp, Artificial Sequence
  Description of Artificial Sequence: Synthetic oligonucleotide
  Target: LAMA2; (+) strand; PAM type: NRG; PAM sequence: TAG
acaatgccctggtgaagttt

SEQ ID NO: 136717 - DNA, 20 bp, Artificial Sequence
  Description of Artificial Sequence: Synthetic oligonucleotide
  Target: LAMA2; (+) strand; PAM type: NRG; PAM sequence: TAG
tggtgaagttttagaaatgt

SEQ ID NO: 136718 - DNA, 20 bp, Artificial Sequence
  Description of Artificial Sequence: Synthetic oligonucleotide
  Target: LAMA2; (+) strand; PAM type: NRG; PAM sequence: GAG
agaaatgttagcacctgcct

SEQ ID NO: 136719 - DNA, 20 bp, Artificial Sequence
  Description of Artificial Sequence: Synthetic oligonucleotide
  Target: LAMA2; (+) strand; PAM type: NRG; PAM sequence: TGG
atgttagcacctgcctgaga

SEQ ID NO: 136720 - DNA, 20 bp, Artificial Sequence
  Description of Artificial Sequence: Synthetic oligonucleotide
  Target: LAMA2; (+) strand; PAM type: NRG; PAM sequence: AAG
gcctgagatggcttttgtgt

SEQ ID NO: 136721 - DNA, 20 bp, Artificial Sequence
  Description of Artificial Sequence: Synthetic oligonucleotide
  Target: LAMA2; (+) strand; PAM type: NRG; PAM sequence: AAG
gagatggcttttgtgtaagt

SEQ ID NO: 136722 - DNA, 20 bp, Artificial Sequence
  Description of Artificial Sequence: Synthetic oligonucleotide
  Target: LAMA2; (+) strand; PAM type: NRG; PAM sequence: TGG
tggcttttgtgtaagtaagc

SEQ ID NO: 136723 - DNA, 20 bp, Artificial Sequence
  Description of Artificial Sequence: Synthetic oligonucleotide
  Target: LAMA2; (+) strand; PAM type: NRG; PAM sequence: AAG
aagtaagctggctgtctttg

SEQ ID NO: 136724 - DNA, 20 bp, Artificial Sequence
  Description of Artificial Sequence: Synthetic oligonucleotide
  Target: LAMA2; (+) strand; PAM type: NRG; PAM sequence: AGG
agtaagctggctgtctttga

SEQ ID NO: 136725 - DNA, 20 bp, Artificial Sequence
  Description of Artificial Sequence: Synthetic oligonucleotide
  Target: LAMA2; (+) strand; PAM type: NRG; PAM sequence: GGG
gtaagctggctgtctttgaa

SEQ ID NO: 136726 - DNA, 20 bp, Artificial Sequence
  Description of Artificial Sequence: Synthetic oligonucleotide
  Target: LAMA2; (+) strand; PAM type: NRG; PAM sequence: GGG
taagctggctgtctttgaag

SEQ ID NO: 136727 - DNA, 20 bp, Artificial Sequence
  Description of Artificial Sequence: Synthetic oligonucleotide
  Target: LAMA2; (+) strand; PAM type: NRG; PAM sequence: GGG
aagctggctgtctttgaagg

SEQ ID NO: 136728 - DNA, 20 bp, Artificial Sequence
  Description of Artificial Sequence: Synthetic oligonucleotide
  Target: LAMA2; (+) strand; PAM type: NRG; PAM sequence: CAG
ctggctgtctttgaaggggg

SEQ ID NO: 136729 - DNA, 20 bp, Artificial Sequence
  Description of Artificial Sequence: Synthetic oligonucleotide
  Target: LAMA2; (+) strand; PAM type: NRG; PAM sequence: TGG
ctgtctttgaagggggcaga

SEQ ID NO: 136730 - DNA, 20 bp, Artificial Sequence
  Description of Artificial Sequence: Synthetic oligonucleotide
  Target: LAMA2; (+) strand; PAM type: NRG; PAM sequence: GAG
gtctttgaagggggcagatg

SEQ ID NO: 136731 - DNA, 20 bp, Artificial Sequence
  Description of Artificial Sequence: Synthetic oligonucleotide
  Target: LAMA2; (+) strand; PAM type: NRG; PAM sequence: TAG
ttgaagggggcagatggagc

SEQ ID NO: 136732 - DNA, 20 bp, Artificial Sequence
  Description of Artificial Sequence: Synthetic oligonucleotide
  Target: LAMA2; (+) strand; PAM type: NRG; PAM sequence: AAG
actgcttaaactcatcatat

SEQ ID NO: 136733 - DNA, 20 bp, Artificial Sequence
  Description of Artificial Sequence: Synthetic oligonucleotide
  Target: LAMA2; (+) strand; PAM type: NRG; PAM sequence: GAG
cttaaactcatcatataagc

SEQ ID NO: 136734 - DNA, 20 bp, Artificial Sequence
  Description of Artificial Sequence: Synthetic oligonucleotide
  Target: LAMA2; (+) strand; PAM type: NRG; PAM sequence: AAG
aactcatcatataagcgagc

SEQ ID NO: 136735 - DNA, 20 bp, Artificial Sequence
  Description of Artificial Sequence: Synthetic oligonucleotide
  Target: LAMA2; (+) strand; PAM type: NRG; PAM sequence: GAG
ctcatcatataagcgagcaa

SEQ ID NO: 136736 - DNA, 20 bp, Artificial Sequence
  Description of Artificial Sequence: Synthetic oligonucleotide
  Target: LAMA2; (+) strand; PAM type: NRG; PAM sequence: AAG
atcatataagcgagcaagag

SEQ ID NO: 136737 - DNA, 20 bp, Artificial Sequence
  Description of Artificial Sequence: Synthetic oligonucleotide
  Target: LAMA2; (+) strand; PAM type: NRG; PAM sequence: CAG
taattttgctctcctttaaa

SEQ ID NO: 136738 - DNA, 20 bp, Artificial Sequence
  Description of Artificial Sequence: Synthetic oligonucleotide
  Target: LAMA2; (+) strand; PAM type: NRG; PAM sequence: CAG
tctcctttaaacagaattcc

SEQ ID NO: 136739 - DNA, 20 bp, Artificial Sequence
  Description of Artificial Sequence: Synthetic oligonucleotide
  Target: LAMA2; (+) strand; PAM type: NRG; PAM sequence: AAG
tactgtaaattaaattttta

SEQ ID NO: 136740 - DNA, 20 bp, Artificial Sequence
  Description of Artificial Sequence: Synthetic oligonucleotide
  Target: LAMA2; (+) strand; PAM type: NRG; PAM sequence: TGG
aaattaaatttttaaagaac

SEQ ID NO: 136741 - DNA, 20 bp, Artificial Sequence
  Description of Artificial Sequence: Synthetic oligonucleotide
  Target: LAMA2; (+) strand; PAM type: NRG; PAM sequence: GAG
attaaatttttaaagaactg

SEQ ID NO: 136742 - DNA, 20 bp, Artificial Sequence
  Description of Artificial Sequence: Synthetic oligonucleotide
  Target: LAMA2; (+) strand; PAM type: NRG; PAM sequence: AAG
atttttaaagaactggagaa

SEQ ID NO: 136743 - DNA, 20 bp, Artificial Sequence
  Description of Artificial Sequence: Synthetic oligonucleotide
  Target: LAMA2; (+) strand; PAM type: NRG; PAM sequence: CAG
ccactaaaacaaattactaa

SEQ ID NO: 136744 - DNA, 20 bp, Artificial Sequence
  Description of Artificial Sequence: Synthetic oligonucleotide
  Target: LAMA2; (+) strand; PAM type: NRG; PAM sequence: AAG
aattactaacagtgacaaat

SEQ ID NO: 136745 - DNA, 20 bp, Artificial Sequence
  Description of Artificial Sequence: Synthetic oligonucleotide
  Target: LAMA2; (+) strand; PAM type: NRG; PAM sequence: CAG
tactaacagtgacaaataag

SEQ ID NO: 136746 - DNA, 20 bp, Artificial Sequence
  Description of Artificial Sequence: Synthetic oligonucleotide
  Target: LAMA2; (+) strand; PAM type: NRG; PAM sequence: AAG
agtgctttatgttaatatgt

SEQ ID NO: 136747 - DNA, 20 bp, Artificial Sequence
  Description of Artificial Sequence: Synthetic oligonucleotide
  Target: LAMA2; (+) strand; PAM type: NRG; PAM sequence: TAG
atgtaagtgcaccattgtat

SEQ ID NO: 136748 - DNA, 20 bp, Artificial Sequence
  Description of Artificial Sequence: Synthetic oligonucleotide
  Target: LAMA2; (+) strand; PAM type: NRG; PAM sequence: AAG
ccattctcatgctactaata

SEQ ID NO: 136749 - DNA, 20 bp, Artificial Sequence
  Description of Artificial Sequence: Synthetic oligonucleotide
  Target: LAMA2; (+) strand; PAM type: NRG; PAM sequence: AAG
ctactaataaagacataccc

SEQ ID NO: 136750 - DNA, 20 bp, Artificial Sequence
  Description of Artificial Sequence: Synthetic oligonucleotide
  Target: LAMA2; (+) strand; PAM type: NRG; PAM sequence: TGG
aataaagacatacccaagac

SEQ ID NO: 136751 - DNA, 20 bp, Artificial Sequence
  Description of Artificial Sequence: Synthetic oligonucleotide
  Target: LAMA2; (+) strand; PAM type: NRG; PAM sequence: TAG
acccaagactggataattta

SEQ ID NO: 136752 - DNA, 20 bp, Artificial Sequence
  Description of Artificial Sequence: Synthetic oligonucleotide
  Target: LAMA2; (+) strand; PAM type: NRG; PAM sequence: GAG
ccaagactggataatttata

SEQ ID NO: 136753 - DNA, 20 bp, Artificial Sequence
  Description of Artificial Sequence: Synthetic oligonucleotide
  Target: LAMA2; (+) strand; PAM type: NRG; PAM sequence: TAG
ggataatttatagagaaaaa

SEQ ID NO: 136754 - DNA, 20 bp, Artificial Sequence
  Description of Artificial Sequence: Synthetic oligonucleotide
  Target: LAMA2; (+) strand; PAM type: NRG; PAM sequence: AGG
gataatttatagagaaaaat

SEQ ID NO: 136755 - DNA, 20 bp, Artificial Sequence
  Description of Artificial Sequence: Synthetic oligonucleotide
  Target: LAMA2; (+) strand; PAM type: NRG; PAM sequence: TAG
atagagaaaaataggtttaa

SEQ ID NO: 136756 - DNA, 20 bp, Artificial Sequence
  Description of Artificial Sequence: Synthetic oligonucleotide
  Target: LAMA2; (+) strand; PAM type: NRG; PAM sequence: CAG
aaataggtttaatagactca

SEQ ID NO: 136757 - DNA, 20 bp, Artificial Sequence
  Description of Artificial Sequence: Synthetic oligonucleotide
  Target: LAMA2; (+) strand; PAM type: NRG; PAM sequence: TGG
aatagactcacagttccaca

SEQ ID NO: 136758 - DNA, 20 bp, Artificial Sequence
  Description of Artificial Sequence: Synthetic oligonucleotide
  Target: LAMA2; (+) strand; PAM type: NRG; PAM sequence: TGG
gactcacagttccacatggc

SEQ ID NO: 136759 - DNA, 20 bp, Artificial Sequence
  Description of Artificial Sequence: Synthetic oligonucleotide
  Target: LAMA2; (+) strand; PAM type: NRG; PAM sequence: GGG
actcacagttccacatggct

SEQ ID NO: 136760 - DNA, 20 bp, Artificial Sequence
  Description of Artificial Sequence: Synthetic oligonucleotide
  Target: LAMA2; (+) strand; PAM type: NRG; PAM sequence: GGG
ctcacagttccacatggctg

SEQ ID NO: 136761 - DNA, 20 bp, Artificial Sequence
  Description of Artificial Sequence: Synthetic oligonucleotide
  Target: LAMA2; (+) strand; PAM type: NRG; PAM sequence: GAG
cacagttccacatggctggg

SEQ ID NO: 136762 - DNA, 20 bp, Artificial Sequence
  Description of Artificial Sequence: Synthetic oligonucleotide
  Target: LAMA2; (+) strand; PAM type: NRG; PAM sequence: AGG
acagttccacatggctgggg

SEQ ID NO: 136763 - DNA, 20 bp, Artificial Sequence
  Description of Artificial Sequence: Synthetic oligonucleotide
  Target: LAMA2; (+) strand; PAM type: NRG; PAM sequence: TGG
ctggggaggtctcacaatca

SEQ ID NO: 136764 - DNA, 20 bp, Artificial Sequence
  Description of Artificial Sequence: Synthetic oligonucleotide
  Target: LAMA2; (+) strand; PAM type: NRG; PAM sequence: TGG
gggaggtctcacaatcatgg

SEQ ID NO: 136765 - DNA, 20 bp, Artificial Sequence
  Description of Artificial Sequence: Synthetic oligonucleotide
  Target: LAMA2; (+) strand; PAM type: NRG; PAM sequence: AAG
aggtctcacaatcatggtgg

SEQ ID NO: 136766 - DNA, 20 bp, Artificial Sequence
  Description of Artificial Sequence: Synthetic oligonucleotide
  Target: LAMA2; (+) strand; PAM type: NRG; PAM sequence: AGG
ggtctcacaatcatggtgga

SEQ ID NO: 136767 - DNA, 20 bp, Artificial Sequence
  Description of Artificial Sequence: Synthetic oligonucleotide
  Target: LAMA2; (+) strand; PAM type: NRG; PAM sequence: AAG
cacaatcatggtggaaggca

SEQ ID NO: 136768 - DNA, 20 bp, Artificial Sequence
  Description of Artificial Sequence: Synthetic oligonucleotide
  Target: LAMA2; (+) strand; PAM type: NRG; PAM sequence: AAG
aatcatggtggaaggcaaag

SEQ ID NO: 136769 - DNA, 20 bp, Artificial Sequence
  Description of Artificial Sequence: Synthetic oligonucleotide
  Target: LAMA2; (+) strand; PAM type: NRG; PAM sequence: AAG
tggaaggcaaagaagtaaca

SEQ ID NO: 136770 - DNA, 20 bp, Artificial Sequence
  Description of Artificial Sequence: Synthetic oligonucleotide
  Target: LAMA2; (+) strand; PAM type: NRG; PAM sequence: AGG
ggaaggcaaagaagtaacaa

SEQ ID NO: 136771 - DNA, 20 bp, Artificial Sequence
  Description of Artificial Sequence: Synthetic oligonucleotide
  Target: LAMA2; (+) strand; PAM type: NRG; PAM sequence: CAG
aggcaaagaagtaacaaagg

SEQ ID NO: 136772 - DNA, 20 bp, Artificial Sequence
  Description of Artificial Sequence: Synthetic oligonucleotide
  Target: LAMA2; (+) strand; PAM type: NRG; PAM sequence: AGG
ggcaaagaagtaacaaaggc

SEQ ID NO: 136773 - DNA, 20 bp, Artificial Sequence
  Description of Artificial Sequence: Synthetic oligonucleotide
  Target: LAMA2; (+) strand; PAM type: NRG; PAM sequence: TGG
taacaaaggcaggtcttaca

SEQ ID NO: 136774 - DNA, 20 bp, Artificial Sequence
  Description of Artificial Sequence: Synthetic oligonucleotide
  Target: LAMA2; (+) strand; PAM type: NRG; PAM sequence: TGG
caaaggcaggtcttacatgg

SEQ ID NO: 136775 - DNA, 20 bp, Artificial Sequence
  Description of Artificial Sequence: Synthetic oligonucleotide
  Target: LAMA2; (+) strand; PAM type: NRG; PAM sequence: CAG
aggcaggtcttacatggtgg

SEQ ID NO: 136776 - DNA, 20 bp, Artificial Sequence
  Description of Artificial Sequence: Synthetic oligonucleotide
  Target: LAMA2; (+) strand; PAM type: NRG; PAM sequence: AGG
ggcaggtcttacatggtggc

SEQ ID NO: 136777 - DNA, 20 bp, Artificial Sequence
  Description of Artificial Sequence: Synthetic oligonucleotide
  Target: LAMA2; (+) strand; PAM type: NRG; PAM sequence: AAG
ggtcttacatggtggcaggc

SEQ ID NO: 136778 - DNA, 20 bp, Artificial Sequence
  Description of Artificial Sequence: Synthetic oligonucleotide
  Target: LAMA2; (+) strand; PAM type: NRG; PAM sequence: GAG
tcttacatggtggcaggcaa

SEQ ID NO: 136779 - DNA, 20 bp, Artificial Sequence
  Description of Artificial Sequence: Synthetic oligonucleotide
  Target: LAMA2; (+) strand; PAM type: NRG; PAM sequence: GAG
ttacatggtggcaggcaaga

SEQ ID NO: 136780 - DNA, 20 bp, Artificial Sequence
  Description of Artificial Sequence: Synthetic oligonucleotide
  Target: LAMA2; (+) strand; PAM type: NRG; PAM sequence: CAG
ggcaggcaagagagcatgtg

SEQ ID NO: 136781 - DNA, 20 bp, Artificial Sequence
  Description of Artificial Sequence: Synthetic oligonucleotide
  Target: LAMA2; (+) strand; PAM type: NRG; PAM sequence: AGG
gcaggcaagagagcatgtgc

SEQ ID NO: 136782 - DNA, 20 bp, Artificial Sequence
  Description of Artificial Sequence: Synthetic oligonucleotide
  Target: LAMA2; (+) strand; PAM type: NRG; PAM sequence: GGG
caggcaagagagcatgtgca

SEQ ID NO: 136783 - DNA, 20 bp, Artificial Sequence
  Description of Artificial Sequence: Synthetic oligonucleotide
  Target: LAMA2; (+) strand; PAM type: NRG; PAM sequence: GGG
aggcaagagagcatgtgcag

SEQ ID NO: 136784 - DNA, 20 bp, Artificial Sequence
  Description of Artificial Sequence: Synthetic oligonucleotide
  Target: LAMA2; (+) strand; PAM type: NRG; PAM sequence: CAG
actgcactttataaaatcgc

SEQ ID NO: 136785 - DNA, 20 bp, Artificial Sequence
  Description of Artificial Sequence: Synthetic oligonucleotide
  Target: LAMA2; (+) strand; PAM type: NRG; PAM sequence: GAG
ataaaatcgccagatattat

SEQ ID NO: 136786 - DNA, 20 bp, Artificial Sequence
  Description of Artificial Sequence: Synthetic oligonucleotide
  Target: LAMA2; (+) strand; PAM type: NRG; PAM sequence: GAG
tgagacttatttactatcac

SEQ ID NO: 136787 - DNA, 20 bp, Artificial Sequence
  Description of Artificial Sequence: Synthetic oligonucleotide
  Target: LAMA2; (+) strand; PAM type: NRG; PAM sequence: CAG
cttatttactatcacgagaa

SEQ ID NO: 136788 - DNA, 20 bp, Artificial Sequence
  Description of Artificial Sequence: Synthetic oligonucleotide
  Target: LAMA2; (+) strand; PAM type: NRG; PAM sequence: GAG
tactatcacgagaacagcat

SEQ ID NO: 136789 - DNA, 20 bp, Artificial Sequence
  Description of Artificial Sequence: Synthetic oligonucleotide
  Target: LAMA2; (+) strand; PAM type: NRG; PAM sequence: TGG
cgtgtccctcccacaacaca

SEQ ID NO: 136790 - DNA, 20 bp, Artificial Sequence
  Description of Artificial Sequence: Synthetic oligonucleotide
  Target: LAMA2; (+) strand; PAM type: NRG; PAM sequence: GGG
gtgtccctcccacaacacat

SEQ ID NO: 136791 - DNA, 20 bp, Artificial Sequence
  Description of Artificial Sequence: Synthetic oligonucleotide
  Target: LAMA2; (+) strand; PAM type: NRG; PAM sequence: GGG
tgtccctcccacaacacatg

SEQ ID NO: 136792 - DNA, 20 bp, Artificial Sequence
  Description of Artificial Sequence: Synthetic oligonucleotide
  Target: LAMA2; (+) strand; PAM type: NRG; PAM sequence: CAG
cccacaacacatggggatta

SEQ ID NO: 136793 - DNA, 20 bp, Artificial Sequence
  Description of Artificial Sequence: Synthetic oligonucleotide
  Target: LAMA2; (+) strand; PAM type: NRG; PAM sequence: AGG
ccacaacacatggggattac

SEQ ID NO: 136794 - DNA, 20 bp, Artificial Sequence
  Description of Artificial Sequence: Synthetic oligonucleotide
  Target: LAMA2; (+) strand; PAM type: NRG; PAM sequence: AAG
gattacaggcgctacaattc

SEQ ID NO: 136795 - DNA, 20 bp, Artificial Sequence
  Description of Artificial Sequence: Synthetic oligonucleotide
  Target: LAMA2; (+) strand; PAM type: NRG; PAM sequence: GAG
caggcgctacaattcaagat

SEQ ID NO: 136796 - DNA, 20 bp, Artificial Sequence
  Description of Artificial Sequence: Synthetic oligonucleotide
  Target: LAMA2; (+) strand; PAM type: NRG; PAM sequence: TGG
ctacaattcaagatgagatt

SEQ ID NO: 136797 - DNA, 20 bp, Artificial Sequence
  Description of Artificial Sequence: Synthetic oligonucleotide
  Target: LAMA2; (+) strand; PAM type: NRG; PAM sequence: GGG
tacaattcaagatgagattt

SEQ ID NO: 136798 - DNA, 20 bp, Artificial Sequence
  Description of Artificial Sequence: Synthetic oligonucleotide
  Target: LAMA2; (+) strand; PAM type: NRG; PAM sequence: TAG
aattcaagatgagatttggg

SEQ ID NO: 136799 - DNA, 20 bp, Artificial Sequence
  Description of Artificial Sequence: Synthetic oligonucleotide
  Target: LAMA2; (+) strand; PAM type: NRG; PAM sequence: AGG
attcaagatgagatttgggt

SEQ ID NO: 136800 - DNA, 20 bp, Artificial Sequence
  Description of Artificial Sequence: Synthetic oligonucleotide
  Target: LAMA2; (+) strand; PAM type: NRG; PAM sequence: GGG
ttcaagatgagatttgggta

SEQ ID NO: 136801 - DNA, 20 bp, Artificial Sequence
  Description of Artificial Sequence: Synthetic oligonucleotide
  Target: LAMA2; (+) strand; PAM type: NRG; PAM sequence: CAG
atgagatttgggtagggaca

SEQ ID NO: 136802 - DNA, 20 bp, Artificial Sequence
  Description of Artificial Sequence: Synthetic oligonucleotide
  Target: LAMA2; (+) strand; PAM type: NRG; PAM sequence: TAG
cctatatgtatctgtatcta

SEQ ID NO: 136803 - DNA, 20 bp, Artificial Sequence
  Description of Artificial Sequence: Synthetic oligonucleotide
  Target: LAMA2; (+) strand; PAM type: NRG; PAM sequence: CAG
tctatagccacatctatatc

SEQ ID NO: 136804 - DNA, 20 bp, Artificial Sequence
  Description of Artificial Sequence: Synthetic oligonucleotide
  Target: LAMA2; (+) strand; PAM type: NRG; PAM sequence: CAG
cttatatgttgaaacaatta

SEQ ID NO: 136805 - DNA, 20 bp, Artificial Sequence
  Description of Artificial Sequence: Synthetic oligonucleotide
  Target: LAMA2; (+) strand; PAM type: NRG; PAM sequence: AAG
gttgaaacaattacagattc

SEQ ID NO: 136806 - DNA, 20 bp, Artificial Sequence
  Description of Artificial Sequence: Synthetic oligonucleotide
  Target: LAMA2; (+) strand; PAM type: NRG; PAM sequence: AAG
gactcactcatcatttacat

SEQ ID NO: 136807 - DNA, 20 bp, Artificial Sequence
  Description of Artificial Sequence: Synthetic oligonucleotide
  Target: LAMA2; (+) strand; PAM type: NRG; PAM sequence: CAG
tcatcatttacataagcttt

SEQ ID NO: 136808 - DNA, 20 bp, Artificial Sequence
  Description of Artificial Sequence: Synthetic oligonucleotide
  Target: LAMA2; (+) strand; PAM type: NRG; PAM sequence: CAG
tcatttacataagctttcag

SEQ ID NO: 136809 - DNA, 20 bp, Artificial Sequence
  Description of Artificial Sequence: Synthetic oligonucleotide
  Target: LAMA2; (+) strand; PAM type: NRG; PAM sequence: GAG
atttacataagctttcagca

SEQ ID NO: 136810 - DNA, 20 bp, Artificial Sequence
  Description of Artificial Sequence: Synthetic oligonucleotide
  Target: LAMA2; (+) strand; PAM type: NRG; PAM sequence: GAG
ttacataagctttcagcaga

SEQ ID NO: 136811 - DNA, 20 bp, Artificial Sequence
  Description of Artificial Sequence: Synthetic oligonucleotide
  Target: LAMA2; (+) strand; PAM type: NRG; PAM sequence: CAG
tctttcttcattttccctaa

SEQ ID NO: 136812 - DNA, 20 bp, Artificial Sequence
  Description of Artificial Sequence: Synthetic oligonucleotide
  Target: LAMA2; (+) strand; PAM type: NRG; PAM sequence: CAG
tctatttctccttgaaaatt

SEQ ID NO: 136813 - DNA, 20 bp, Artificial Sequence
  Description of Artificial Sequence: Synthetic oligonucleotide
  Target: LAMA2; (+) strand; PAM type: NRG; PAM sequence: AAG
tctccttgaaaattcagctc

SEQ ID NO: 136814 - DNA, 20 bp, Artificial Sequence
  Description of Artificial Sequence: Synthetic oligonucleotide
  Target: LAMA2; (+) strand; PAM type: NRG; PAM sequence: AAG
tcaagattacttcccatgat

SEQ ID NO: 136815 - DNA, 20 bp, Artificial Sequence
  Description of Artificial Sequence: Synthetic oligonucleotide
  Target: LAMA2; (+) strand; PAM type: NRG; PAM sequence: TAG
ttcccatgataagcccatct

SEQ ID NO: 136816 - DNA, 20 bp, Artificial Sequence
  Description of Artificial Sequence: Synthetic oligonucleotide
  Target: LAMA2; (+) strand; PAM type: NRG; PAM sequence: CAG
cttagtaatatttttattct

SEQ ID NO: 136817 - DNA, 20 bp, Artificial Sequence
  Description of Artificial Sequence: Synthetic oligonucleotide
  Target: LAMA2; (+) strand; PAM type: NRG; PAM sequence: TGG
ttctcagatcctttactgtc

SEQ ID NO: 136818 - DNA, 20 bp, Artificial Sequence
  Description of Artificial Sequence: Synthetic oligonucleotide
  Target: LAMA2; (+) strand; PAM type: NRG; PAM sequence: AAG
tgctcaaaacatatttgatg

SEQ ID NO: 136819 - DNA, 20 bp, Artificial Sequence
  Description of Artificial Sequence: Synthetic oligonucleotide
  Target: LAMA2; (+) strand; PAM type: NRG; PAM sequence: AGG
gctcaaaacatatttgatga

SEQ ID NO: 136820 - DNA, 20 bp, Artificial Sequence
  Description of Artificial Sequence: Synthetic oligonucleotide
  Target: LAMA2; (+) strand; PAM type: NRG; PAM sequence: TAG
aaacatatttgatgaaggaa

SEQ ID NO: 136821 - DNA, 20 bp, Artificial Sequence
  Description of Artificial Sequence: Synthetic oligonucleotide
  Target: LAMA2; (+) strand; PAM type: NRG; PAM sequence: TGG
ttgtaccgttaaatgcaaaa

SEQ ID NO: 136822 - DNA, 20 bp, Artificial Sequence
  Description of Artificial Sequence: Synthetic oligonucleotide
  Target: LAMA2; (+) strand; PAM type: NRG; PAM sequence: TAG
aatggtgatgaatgacaaaa

SEQ ID NO: 136823 - DNA, 20 bp, Artificial Sequence
  Description of Artificial Sequence: Synthetic oligonucleotide
  Target: LAMA2; (+) strand; PAM type: NRG; PAM sequence: AAG
gtgatgaatgacaaaataga

SEQ ID NO: 136824 - DNA, 20 bp, Artificial Sequence
  Description of Artificial Sequence: Synthetic oligonucleotide
  Target: LAMA2; (+) strand; PAM type: NRG; PAM sequence: CAG
tgacaaaatagaaagatata

SEQ ID NO: 136825 - DNA, 20 bp, Artificial Sequence
  Description of Artificial Sequence: Synthetic oligonucleotide
  Target: LAMA2; (+) strand; PAM type: NRG; PAM sequence: TAG
tcgcatatcatttattaacc

SEQ ID NO: 136826 - DNA, 20 bp, Artificial Sequence
  Description of Artificial Sequence: Synthetic oligonucleotide
  Target: LAMA2; (+) strand; PAM type: NRG; PAM sequence: AAG
acctagaaaataaaatgtct

SEQ ID NO: 136827 - DNA, 20 bp, Artificial Sequence
  Description of Artificial Sequence: Synthetic oligonucleotide
  Target: LAMA2; (+) strand; PAM type: NRG; PAM sequence: TAG
agaaaataaaatgtctaaga

SEQ ID NO: 136828 - DNA, 20 bp, Artificial Sequence
  Description of Artificial Sequence: Synthetic oligonucleotide
  Target: LAMA2; (+) strand; PAM type: NRG; PAM sequence: TGG
aaaatgtctaagatagataa

SEQ ID NO: 136829 - DNA, 20 bp, Artificial Sequence
  Description of Artificial Sequence: Synthetic oligonucleotide
  Target: LAMA2; (+) strand; PAM type: NRG; PAM sequence: TGG
gtctaagatagataatggcg

SEQ ID NO: 136830 - DNA, 20 bp, Artificial Sequence
  Description of Artificial Sequence: Synthetic oligonucleotide
  Target: LAMA2; (+) strand; PAM type: NRG; PAM sequence: GAG
ctaagatagataatggcgtg

SEQ ID NO: 136831 - DNA, 20 bp, Artificial Sequence
  Description of Artificial Sequence: Synthetic oligonucleotide
  Target: LAMA2; (+) strand; PAM type: NRG; PAM sequence: TAG
gacaaacgtcacaaaattgt

SEQ ID NO: 136832 - DNA, 20 bp, Artificial Sequence
  Description of Artificial Sequence: Synthetic oligonucleotide
  Target: LAMA2; (+) strand; PAM type: NRG; PAM sequence: AGG
acaaacgtcacaaaattgtt

SEQ ID NO: 136833 - DNA, 20 bp, Artificial Sequence
  Description of Artificial Sequence: Synthetic oligonucleotide
  Target: LAMA2; (+) strand; PAM type: NRG; PAM sequence: AAG
aacgtcacaaaattgttagg

SEQ ID NO: 136834 - DNA, 20 bp, Artificial Sequence
  Description of Artificial Sequence: Synthetic oligonucleotide
  Target: LAMA2; (+) strand; PAM type: NRG; PAM sequence: AAG
attgttaggaagttttcact

SEQ ID NO: 136835 - DNA, 20 bp, Artificial Sequence
  Description of Artificial Sequence: Synthetic oligonucleotide
  Target: LAMA2; (+) strand; PAM type: NRG; PAM sequence: AGG
ttgttaggaagttttcacta

SEQ ID NO: 136836 - DNA, 20 bp, Artificial Sequence
  Description of Artificial Sequence: Synthetic oligonucleotide
  Target: LAMA2; (+) strand; PAM type: NRG; PAM sequence: TGG
tttcactaaggcttatatca

SEQ ID NO: 136837 - DNA, 20 bp, Artificial Sequence
  Description of Artificial Sequence: Synthetic oligonucleotide
  Target: LAMA2; (+) strand; PAM type: NRG; PAM sequence: AAG
ctaaggcttatatcatggaa

SEQ ID NO: 136838 - DNA, 20 bp, Artificial Sequence
  Description of Artificial Sequence: Synthetic oligonucleotide
  Target: LAMA2; (+) strand; PAM type: NRG; PAM sequence: AAG
tggaaaagataaaaaaaaat

SEQ ID NO: 136839 - DNA, 20 bp, Artificial Sequence
  Description of Artificial Sequence: Synthetic oligonucleotide
  Target: LAMA2; (+) strand; PAM type: NRG; PAM sequence: AGG
ggaaaagataaaaaaaaata

SEQ ID NO: 136840 - DNA, 20 bp, Artificial Sequence
  Description of Artificial Sequence: Synthetic oligonucleotide
  Target: LAMA2; (+) strand; PAM type: NRG; PAM sequence: TGG
ataaggtaaaaacttttaaa

SEQ ID NO: 136841 - DNA, 20 bp, Artificial Sequence
  Description of Artificial Sequence: Synthetic oligonucleotide
  Target: LAMA2; (+) strand; PAM type: NRG; PAM sequence: TAG
tctctaaccaacaattacat

SEQ ID NO: 136842 - DNA, 20 bp, Artificial Sequence
  Description of Artificial Sequence: Synthetic oligonucleotide
  Target: LAMA2; (+) strand; PAM type: NRG; PAM sequence: CAG
ctttccttatgtcacactga

SEQ ID NO: 136843 - DNA, 20 bp, Artificial Sequence
  Description of Artificial Sequence: Synthetic oligonucleotide
  Target: LAMA2; (+) strand; PAM type: NRG; PAM sequence: TGG
gacagaatgtctcattgtgt

SEQ ID NO: 136844 - DNA, 20 bp, Artificial Sequence
  Description of Artificial Sequence: Synthetic oligonucleotide
  Target: LAMA2; (+) strand; PAM type: NRG; PAM sequence: GGG
acagaatgtctcattgtgtt

SEQ ID NO: 136845 - DNA, 20 bp, Artificial Sequence
  Description of Artificial Sequence: Synthetic oligonucleotide
  Target: LAMA2; (+) strand; PAM type: NRG; PAM sequence: GGG
cagaatgtctcattgtgttg

SEQ ID NO: 136846 - DNA, 20 bp, Artificial Sequence
  Description of Artificial Sequence: Synthetic oligonucleotide
  Target: LAMA2; (+) strand; PAM type: NRG; PAM sequence: CAG
atgtctcattgtgttggggc

SEQ ID NO: 136847 - DNA, 20 bp, Artificial Sequence
  Description of Artificial Sequence: Synthetic oligonucleotide
  Target: LAMA2; (+) strand; PAM type: NRG; PAM sequence: GAG
gtctcattgtgttggggcca

SEQ ID NO: 136848 - DNA, 20 bp, Artificial Sequence
  Description of Artificial Sequence: Synthetic oligonucleotide
  Target: LAMA2; (+) strand; PAM type: NRG; PAM sequence: GAG
ctcattgtgttggggccaga

SEQ ID NO: 136849 - DNA, 20 bp, Artificial Sequence
  Description of Artificial Sequence: Synthetic oligonucleotide
  Target: LAMA2; (+) strand; PAM type: NRG; PAM sequence: CAG
tgtgttggggccagagagca

SEQ ID NO: 136850 - DNA, 20 bp, Artificial Sequence
  Description of Artificial Sequence: Synthetic oligonucleotide
  Target: LAMA2; (+) strand; PAM type: NRG; PAM sequence: GAG
tgttggggccagagagcaca

SEQ ID NO: 136851 - DNA, 20 bp, Artificial Sequence
  Description of Artificial Sequence: Synthetic oligonucleotide
  Target: LAMA2; (+) strand; PAM type: NRG; PAM sequence: GAG
gggccagagagcacagagat

SEQ ID NO: 136852 - DNA, 20 bp, Artificial Sequence
  Description of Artificial Sequence: Synthetic oligonucleotide
  Target: LAMA2; (+) strand; PAM type: NRG; PAM sequence: AGG
ggccagagagcacagagatg

SEQ ID NO: 136853 - DNA, 20 bp, Artificial Sequence
  Description of Artificial Sequence: Synthetic oligonucleotide
  Target: LAMA2; (+) strand; PAM type: NRG; PAM sequence: GGG
gccagagagcacagagatga

SEQ ID NO: 136854 - DNA, 20 bp, Artificial Sequence
  Description of Artificial Sequence: Synthetic oligonucleotide
  Target: LAMA2; (+) strand; PAM type: NRG; PAM sequence: GGG
ccagagagcacagagatgag

SEQ ID NO: 136855 - DNA, 20 bp, Artificial Sequence
  Description of Artificial Sequence: Synthetic oligonucleotide
  Target: LAMA2; (+) strand; PAM type: NRG; PAM sequence: GGG
cagagagcacagagatgagg

SEQ ID NO: 136856 - DNA, 20 bp, Artificial Sequence
  Description of Artificial Sequence: Synthetic oligonucleotide
  Target: LAMA2; (+) strand; PAM type: NRG; PAM sequence: GGG
agagagcacagagatgaggg

SEQ ID NO: 136857 - DNA, 20 bp, Artificial Sequence
  Description of Artificial Sequence: Synthetic oligonucleotide
  Target: LAMA2; (+) strand; PAM type: NRG; PAM sequence: CAG
tgaggggggaataaatgtat

SEQ ID NO: 136858 - DNA, 20 bp, Artificial Sequence
  Description of Artificial Sequence: Synthetic oligonucleotide
  Target: LAMA2; (+) strand; PAM type: NRG; PAM sequence: AGG
gaggggggaataaatgtatc

SEQ ID NO: 136859 - DNA, 20 bp, Artificial Sequence
  Description of Artificial Sequence: Synthetic oligonucleotide
  Target: LAMA2; (+) strand; PAM type: NRG; PAM sequence: GAG
atgtatcaggaacaataaat

SEQ ID NO: 136860 - DNA, 20 bp, Artificial Sequence
  Description of Artificial Sequence: Synthetic oligonucleotide
  Target: LAMA2; (+) strand; PAM type: NRG; PAM sequence: TAG
atcaggaacaataaatgaga

SEQ ID NO: 136861 - DNA, 20 bp, Artificial Sequence
  Description of Artificial Sequence: Synthetic oligonucleotide
  Target: LAMA2; (+) strand; PAM type: NRG; PAM sequence: AAG
caataaatgagatagtgatt

SEQ ID NO: 136862 - DNA, 20 bp, Artificial Sequence
  Description of Artificial Sequence: Synthetic oligonucleotide
  Target: LAMA2; (+) strand; PAM type: NRG; PAM sequence: AAG
gagatagtgattaagtgaaa

SEQ ID NO: 136863 - DNA, 20 bp, Artificial Sequence
  Description of Artificial Sequence: Synthetic oligonucleotide
  Target: LAMA2; (+) strand; PAM type: NRG; PAM sequence: AAG
tagtgattaagtgaaaaagt

SEQ ID NO: 136864 - DNA, 20 bp, Artificial Sequence
  Description of Artificial Sequence: Synthetic oligonucleotide
  Target: LAMA2; (+) strand; PAM type: NRG; PAM sequence: TGG
agtgaaaaagtaagtaccat

SEQ ID NO: 136865 - DNA, 20 bp, Artificial Sequence
  Description of Artificial Sequence: Synthetic oligonucleotide
  Target: LAMA2; (+) strand; PAM type: NRG; PAM sequence: CAG
agtaagtaccattggcaaat

SEQ ID NO: 136866 - DNA, 20 bp, Artificial Sequence
  Description of Artificial Sequence: Synthetic oligonucleotide
  Target: LAMA2; (+) strand; PAM type: NRG; PAM sequence: AGG
gtaagtaccattggcaaatc

SEQ ID NO: 136867 - DNA, 20 bp, Artificial Sequence
  Description of Artificial Sequence: Synthetic oligonucleotide
  Target: LAMA2; (+) strand; PAM type: NRG; PAM sequence: TGG
attggcaaatcaggaaaaat

SEQ ID NO: 136868 - DNA, 20 bp, Artificial Sequence
  Description of Artificial Sequence: Synthetic oligonucleotide
  Target: LAMA2; (+) strand; PAM type: NRG; PAM sequence: GGG
ttggcaaatcaggaaaaatt

SEQ ID NO: 136869 - DNA, 20 bp, Artificial Sequence
  Description of Artificial Sequence: Synthetic oligonucleotide
  Target: LAMA2; (+) strand; PAM type: NRG; PAM sequence: CAG
aaattgggaacctcaacttt

SEQ ID NO: 136870 - DNA, 20 bp, Artificial Sequence
  Description of Artificial Sequence: Synthetic oligonucleotide
  Target: LAMA2; (+) strand; PAM type: NRG; PAM sequence: AAG
ggaacctcaactttcagctg

SEQ ID NO: 136871 - DNA, 20 bp, Artificial Sequence
  Description of Artificial Sequence: Synthetic oligonucleotide
  Target: LAMA2; (+) strand; PAM type: NRG; PAM sequence: AAG
tttcagctgaagaaaaacac

SEQ ID NO: 136872 - DNA, 20 bp, Artificial Sequence
  Description of Artificial Sequence: Synthetic oligonucleotide
  Target: LAMA2; (+) strand; PAM type: NRG; PAM sequence: AGG
ttcagctgaagaaaaacaca

SEQ ID NO: 136873 - DNA, 20 bp, Artificial Sequence
  Description of Artificial Sequence: Synthetic oligonucleotide
  Target: LAMA2; (+) strand; PAM type: NRG; PAM sequence: CAG
agctgaagaaaaacacaagg

SEQ ID NO: 136874 - DNA, 20 bp, Artificial Sequence
  Description of Artificial Sequence: Synthetic oligonucleotide
  Target: LAMA2; (+) strand; PAM type: NRG; PAM sequence: AGG
gctgaagaaaaacacaaggc

SEQ ID NO: 136875 - DNA, 20 bp, Artificial Sequence
  Description of Artificial Sequence: Synthetic oligonucleotide
  Target: LAMA2; (+) strand; PAM type: NRG; PAM sequence: GAG
tgaagaaaaacacaaggcag

SEQ ID NO: 136876 - DNA, 20 bp, Artificial Sequence
  Description of Artificial Sequence: Synthetic oligonucleotide
  Target: LAMA2; (+) strand; PAM type: NRG; PAM sequence: AGG
gaagaaaaacacaaggcagg

SEQ ID NO: 136877 - DNA, 20 bp, Artificial Sequence
  Description of Artificial Sequence: Synthetic oligonucleotide
  Target: LAMA2; (+) strand; PAM type: NRG; PAM sequence: CAG
aaaaacacaaggcaggaggc

SEQ ID NO: 136878 - DNA, 20 bp, Artificial Sequence
  Description of Artificial Sequence: Synthetic oligonucleotide
  Target: LAMA2; (+) strand; PAM type: NRG; PAM sequence: GAG
cacaaggcaggaggccagat

SEQ ID NO: 136879 - DNA, 20 bp, Artificial Sequence
  Description of Artificial Sequence: Synthetic oligonucleotide
  Target: LAMA2; (+) strand; PAM type: NRG; PAM sequence: GAG
caaggcaggaggccagatga

SEQ ID NO: 136880 - DNA, 20 bp, Artificial Sequence
  Description of Artificial Sequence: Synthetic oligonucleotide
  Target: LAMA2; (+) strand; PAM type: NRG; PAM sequence: TGG
gcaggaggccagatgagagt

SEQ ID NO: 136881 - DNA, 20 bp, Artificial Sequence
  Description of Artificial Sequence: Synthetic oligonucleotide
  Target: LAMA2; (+) strand; PAM type: NRG; PAM sequence: GGG
caggaggccagatgagagtt

SEQ ID NO: 136882 - DNA, 20 bp, Artificial Sequence
  Description of Artificial Sequence: Synthetic oligonucleotide
  Target: LAMA2; (+) strand; PAM type: NRG; PAM sequence: GGG
aggaggccagatgagagttg

SEQ ID NO: 136883 - DNA, 20 bp, Artificial Sequence
  Description of Artificial Sequence: Synthetic oligonucleotide
  Target: LAMA2; (+) strand; PAM type: NRG; PAM sequence: GGG
ggaggccagatgagagttgg

SEQ ID NO: 136884 - DNA, 20 bp, Artificial Sequence
  Description of Artificial Sequence: Synthetic oligonucleotide
  Target: LAMA2; (+) strand; PAM type: NRG; PAM sequence: TGG
agagttgggggtcactattt

SEQ ID NO: 136885 - DNA, 20 bp, Artificial Sequence
  Description of Artificial Sequence: Synthetic oligonucleotide
  Target: LAMA2; (+) strand; PAM type: NRG; PAM sequence: GAG
agttgggggtcactattttg

SEQ ID NO: 136886 - DNA, 20 bp, Artificial Sequence
  Description of Artificial Sequence: Synthetic oligonucleotide
  Target: LAMA2; (+) strand; PAM type: NRG; PAM sequence: AGG
gttgggggtcactattttgg

SEQ ID NO: 136887 - DNA, 20 bp, Artificial Sequence
  Description of Artificial Sequence: Synthetic oligonucleotide
  Target: LAMA2; (+) strand; PAM type: NRG; PAM sequence: CAG
gggtcactattttggaggaa

SEQ ID NO: 136888 - DNA, 20 bp, Artificial Sequence
  Description of Artificial Sequence: Synthetic oligonucleotide
  Target: LAMA2; (+) strand; PAM type: NRG; PAM sequence: AGG
ggtcactattttggaggaac

SEQ ID NO: 136889 - DNA, 20 bp, Artificial Sequence
  Description of Artificial Sequence: Synthetic oligonucleotide
  Target: LAMA2; (+) strand; PAM type: NRG; PAM sequence: AAG
tattttggaggaacaggatt

SEQ ID NO: 136890 - DNA, 20 bp, Artificial Sequence
  Description of Artificial Sequence: Synthetic oligonucleotide
  Target: LAMA2; (+) strand; PAM type: NRG; PAM sequence: AGG
attttggaggaacaggatta

SEQ ID NO: 136891 - DNA, 20 bp, Artificial Sequence
  Description of Artificial Sequence: Synthetic oligonucleotide
  Target: LAMA2; (+) strand; PAM type: NRG; PAM sequence: GGG
ttttggaggaacaggattaa

SEQ ID NO: 136892 - DNA, 20 bp, Artificial Sequence
  Description of Artificial Sequence: Synthetic oligonucleotide
  Target: LAMA2; (+) strand; PAM type: NRG; PAM sequence: AAG
acaggattaagggattttta

SEQ ID NO: 136893 - DNA, 20 bp, Artificial Sequence
  Description of Artificial Sequence: Synthetic oligonucleotide
  Target: LAMA2; (+) strand; PAM type: NRG; PAM sequence: AAG
atttttaaagacatatgtat

SEQ ID NO: 136894 - DNA, 20 bp, Artificial Sequence
  Description of Artificial Sequence: Synthetic oligonucleotide
  Target: LAMA2; (+) strand; PAM type: NRG; PAM sequence: AGG
tttttaaagacatatgtata

SEQ ID NO: 136895 - DNA, 20 bp, Artificial Sequence
  Description of Artificial Sequence: Synthetic oligonucleotide
  Target: LAMA2; (+) strand; PAM type: NRG; PAM sequence: GAG
tttaaagacatatgtataag

SEQ ID NO: 136896 - DNA, 20 bp, Artificial Sequence
  Description of Artificial Sequence: Synthetic oligonucleotide
  Target: LAMA2; (+) strand; PAM type: NRG; PAM sequence: AGG
ttaaagacatatgtataagg

SEQ ID NO: 136897 - DNA, 20 bp, Artificial Sequence
  Description of Artificial Sequence: Synthetic oligonucleotide
  Target: LAMA2; (+) strand; PAM type: NRG; PAM sequence: GGG
taaagacatatgtataagga

SEQ ID NO: 136898 - DNA, 20 bp, Artificial Sequence
  Description of Artificial Sequence: Synthetic oligonucleotide
  Target: LAMA2; (+) strand; PAM type: NRG; PAM sequence: GAG
aagacatatgtataaggagg

SEQ ID NO: 136899 - DNA, 20 bp, Artificial Sequence
  Description of Artificial Sequence: Synthetic oligonucleotide
  Target: LAMA2; (+) strand; PAM type: NRG; PAM sequence: AAG
atatgtataaggagggagaa

SEQ ID NO: 136900 - DNA, 20 bp, Artificial Sequence
  Description of Artificial Sequence: Synthetic oligonucleotide
  Target: LAMA2; (+) strand; PAM type: NRG; PAM sequence: AAG
gtataaggagggagaaaaga

SEQ ID NO: 136901 - DNA, 20 bp, Artificial Sequence
  Description of Artificial Sequence: Synthetic oligonucleotide
  Target: LAMA2; (+) strand; PAM type: NRG; PAM sequence: AAG
aggagggagaaaagaaagaa

SEQ ID NO: 136902 - DNA, 20 bp, Artificial Sequence
  Description of Artificial Sequence: Synthetic oligonucleotide
  Target: LAMA2; (+) strand; PAM type: NRG; PAM sequence: TGG
aaaagaaagaaaagattctt

SEQ ID NO: 136903 - DNA, 20 bp, Artificial Sequence
  Description of Artificial Sequence: Synthetic oligonucleotide
  Target: LAMA2; (+) strand; PAM type: NRG; PAM sequence: GGG
aaagaaagaaaagattcttt

SEQ ID NO: 136904 - DNA, 20 bp, Artificial Sequence
  Description of Artificial Sequence: Synthetic oligonucleotide
  Target: LAMA2; (+) strand; PAM type: NRG; PAM sequence: GGG
aagaaagaaaagattctttg

SEQ ID NO: 136905 - DNA, 20 bp, Artificial Sequence
  Description of Artificial Sequence: Synthetic oligonucleotide
  Target: LAMA2; (+) strand; PAM type: NRG; PAM sequence: GGG
agaaagaaaagattctttgg

SEQ ID NO: 136906 - DNA, 20 bp, Artificial Sequence
  Description of Artificial Sequence: Synthetic oligonucleotide
  Target: LAMA2; (+) strand; PAM type: NRG; PAM sequence: CAG
aagaaaagattctttggggg

SEQ ID NO: 136907 - DNA, 20 bp, Artificial Sequence
  Description of Artificial Sequence: Synthetic oligonucleotide
  Target: LAMA2; (+) strand; PAM type: NRG; PAM sequence: TGG
attctttgggggcagctctt

SEQ ID NO: 136908 - DNA, 20 bp, Artificial Sequence
  Description of Artificial Sequence: Synthetic oligonucleotide
  Target: LAMA2; (+) strand; PAM type: NRG; PAM sequence: GGG
ttctttgggggcagctcttt

SEQ ID NO: 136909 - DNA, 20 bp, Artificial Sequence
  Description of Artificial Sequence: Synthetic oligonucleotide
  Target: LAMA2; (+) strand; PAM type: NRG; PAM sequence: GAG
ctttgggggcagctctttgg

SEQ ID NO: 136910 - DNA, 20 bp, Artificial Sequence
  Description of Artificial Sequence: Synthetic oligonucleotide
  Target: LAMA2; (+) strand; PAM type: NRG; PAM sequence: AAG
gcagctctttgggagatctt

SEQ ID NO: 136911 - DNA, 20 bp, Artificial Sequence
  Description of Artificial Sequence: Synthetic oligonucleotide
  Target: LAMA2; (+) strand; PAM type: NRG; PAM sequence: GAG
gggagatcttaagaatgact

SEQ ID NO: 136912 - DNA, 20 bp, Artificial Sequence
  Description of Artificial Sequence: Synthetic oligonucleotide
  Target: LAMA2; (+) strand; PAM type: NRG; PAM sequence: AAG
atcttaagaatgactgagac

SEQ ID NO: 136913 - DNA, 20 bp, Artificial Sequence
  Description of Artificial Sequence: Synthetic oligonucleotide
  Target: LAMA2; (+) strand; PAM type: NRG; PAM sequence: GAG
gaatgactgagacaagaact

SEQ ID NO: 136914 - DNA, 20 bp, Artificial Sequence
  Description of Artificial Sequence: Synthetic oligonucleotide
  Target: LAMA2; (+) strand; PAM type: NRG; PAM sequence: TGG
cttttgaattcatttacctg

SEQ ID NO: 136915 - DNA, 20 bp, Artificial Sequence
  Description of Artificial Sequence: Synthetic oligonucleotide
  Target: LAMA2; (+) strand; PAM type: NRG; PAM sequence: TGG
catttacctgtggaattttt

SEQ ID NO: 136916 - DNA, 20 bp, Artificial Sequence
  Description of Artificial Sequence: Synthetic oligonucleotide
  Target: LAMA2; (+) strand; PAM type: NRG; PAM sequence: GAG
tttacctgtggaattttttg

SEQ ID NO: 136917 - DNA, 20 bp, Artificial Sequence
  Description of Artificial Sequence: Synthetic oligonucleotide
  Target: LAMA2; (+) strand; PAM type: NRG; PAM sequence: AAG
tttttggagtgattacaata

SEQ ID NO: 136918 - DNA, 20 bp, Artificial Sequence
  Description of Artificial Sequence: Synthetic oligonucleotide
  Target: LAMA2; (+) strand; PAM type: NRG; PAM sequence: CAG
gtactattatctttttttaa

SEQ ID NO: 136919 - DNA, 20 bp, Artificial Sequence
  Description of Artificial Sequence: Synthetic oligonucleotide
  Target: LAMA2; (+) strand; PAM type: NRG; PAM sequence: AAG
attatctttttttaacagaa

SEQ ID NO: 136920 - DNA, 20 bp, Artificial Sequence
  Description of Artificial Sequence: Synthetic oligonucleotide
  Target: LAMA2; (+) strand; PAM type: NRG; PAM sequence: TAG
taacagaaaagaaaacttaa

SEQ ID NO: 136921 - DNA, 20 bp, Artificial Sequence
  Description of Artificial Sequence: Synthetic oligonucleotide
  Target: LAMA2; (+) strand; PAM type: NRG; PAM sequence: AAG
gtttctttcaatgcaattct

SEQ ID NO: 136922 - DNA, 20 bp, Artificial Sequence
  Description of Artificial Sequence: Synthetic oligonucleotide
  Target: LAMA2; (+) strand; PAM type: NRG; PAM sequence: AGG
tttctttcaatgcaattcta

SEQ ID NO: 136923 - DNA, 20 bp, Artificial Sequence
  Description of Artificial Sequence: Synthetic oligonucleotide
  Target: LAMA2; (+) strand; PAM type: NRG; PAM sequence: CAG
aatgcaattctaaggccaac

SEQ ID NO: 136924 - DNA, 20 bp, Artificial Sequence
  Description of Artificial Sequence: Synthetic oligonucleotide
  Target: LAMA2; (+) strand; PAM type: NRG; PAM sequence: AGG
atgcaattctaaggccaacc

SEQ ID NO: 136925 - DNA, 20 bp, Artificial Sequence
  Description of Artificial Sequence: Synthetic oligonucleotide
  Target: LAMA2; (+) strand; PAM type: NRG; PAM sequence: AAG
ctaaggccaaccaggtccgc

SEQ ID NO: 136926 - DNA, 20 bp, Artificial Sequence
  Description of Artificial Sequence: Synthetic oligonucleotide
  Target: LAMA2; (+) strand; PAM type: NRG; PAM sequence: AGG
taaggccaaccaggtccgca

SEQ ID NO: 136927 - DNA, 20 bp, Artificial Sequence
  Description of Artificial Sequence: Synthetic oligonucleotide
  Target: LAMA2; (+) strand; PAM type: NRG; PAM sequence: TAG
ggccaaccaggtccgcaagg

SEQ ID NO: 136928 - DNA, 20 bp, Artificial Sequence
  Description of Artificial Sequence: Synthetic oligonucleotide
  Target: LAMA2; (+) strand; PAM type: NRG; PAM sequence: TAG
ccaggtccgcaaggtagcac

SEQ ID NO: 136929 - DNA, 20 bp, Artificial Sequence
  Description of Artificial Sequence: Synthetic oligonucleotide
  Target: LAMA2; (+) strand; PAM type: NRG; PAM sequence: TGG
aggtagcactagatctatgc

SEQ ID NO: 136930 - DNA, 20 bp, Artificial Sequence
  Description of Artificial Sequence: Synthetic oligonucleotide
  Target: LAMA2; (+) strand; PAM type: NRG; PAM sequence: TAG
gctggtttcataaaacattg

SEQ ID NO: 136931 - DNA, 20 bp, Artificial Sequence
  Description of Artificial Sequence: Synthetic oligonucleotide
  Target: LAMA2; (+) strand; PAM type: NRG; PAM sequence: CAG
aaaacattgtagatgccatt

SEQ ID NO: 136932 - DNA, 20 bp, Artificial Sequence
  Description of Artificial Sequence: Synthetic oligonucleotide
  Target: LAMA2; (+) strand; PAM type: NRG; PAM sequence: TAG
acattgtagatgccattcag

SEQ ID NO: 136933 - DNA, 20 bp, Artificial Sequence
  Description of Artificial Sequence: Synthetic oligonucleotide
  Target: LAMA2; (+) strand; PAM type: NRG; PAM sequence: GAG
attgtagatgccattcagta

SEQ ID NO: 136934 - DNA, 20 bp, Artificial Sequence
  Description of Artificial Sequence: Synthetic oligonucleotide
  Target: LAMA2; (+) strand; PAM type: NRG; PAM sequence: AAG
tgccattcagtagagtgatt

SEQ ID NO: 136935 - DNA, 20 bp, Artificial Sequence
  Description of Artificial Sequence: Synthetic oligonucleotide
  Target: LAMA2; (+) strand; PAM type: NRG; PAM sequence: GAG
ccattcagtagagtgattaa

SEQ ID NO: 136936 - DNA, 20 bp, Artificial Sequence
  Description of Artificial Sequence: Synthetic oligonucleotide
  Target: LAMA2; (+) strand; PAM type: NRG; PAM sequence: AGG
cattcagtagagtgattaag

SEQ ID NO: 136937 - DNA, 20 bp, Artificial Sequence
  Description of Artificial Sequence: Synthetic oligonucleotide
  Target: LAMA2; (+) strand; PAM type: NRG; PAM sequence: TAG
cagtagagtgattaagagga

SEQ ID NO: 136938 - DNA, 20 bp, Artificial Sequence
  Description of Artificial Sequence: Synthetic oligonucleotide
  Target: LAMA2; (+) strand; PAM type: NRG; PAM sequence: TGG
gtgattaagaggatagactc

SEQ ID NO: 136939 - DNA, 20 bp, Artificial Sequence
  Description of Artificial Sequence: Synthetic oligonucleotide
  Target: LAMA2; (+) strand; PAM type: NRG; PAM sequence: GAG
gattaagaggatagactctg

SEQ ID NO: 136940 - DNA, 20 bp, Artificial Sequence
  Description of Artificial Sequence: Synthetic oligonucleotide
  Target: LAMA2; (+) strand; PAM type: NRG; PAM sequence: CAG
aagaggatagactctggagc

SEQ ID NO: 136941 - DNA, 20 bp, Artificial Sequence
  Description of Artificial Sequence: Synthetic oligonucleotide
  Target: LAMA2; (+) strand; PAM type: NRG; PAM sequence: TGG
actctggagccagattgctt

SEQ ID NO: 136942 - DNA, 20 bp, Artificial Sequence
  Description of Artificial Sequence: Synthetic oligonucleotide
  Target: LAMA2; (+) strand; PAM type: NRG; PAM sequence: TAG
gattgctttggttcaaatca

SEQ ID NO: 136943 - DNA, 20 bp, Artificial Sequence
  Description of Artificial Sequence: Synthetic oligonucleotide
  Target: LAMA2; (+) strand; PAM type: NRG; PAM sequence: TAG
atcatagctctgctacttgc

SEQ ID NO: 136944 - DNA, 20 bp, Artificial Sequence
  Description of Artificial Sequence: Synthetic oligonucleotide
  Target: LAMA2; (+) strand; PAM type: NRG; PAM sequence: CAG
tgctacttgctagctgtaat

SEQ ID NO: 136945 - DNA, 20 bp, Artificial Sequence
  Description of Artificial Sequence: Synthetic oligonucleotide
  Target: LAMA2; (+) strand; PAM type: NRG; PAM sequence: AGG
gctacttgctagctgtaatc

SEQ ID NO: 136946 - DNA, 20 bp, Artificial Sequence
  Description of Artificial Sequence: Synthetic oligonucleotide
  Target: LAMA2; (+) strand; PAM type: NRG; PAM sequence: GAG
tacttgctagctgtaatcag

SEQ ID NO: 136947 - DNA, 20 bp, Artificial Sequence
  Description of Artificial Sequence: Synthetic oligonucleotide
  Target: LAMA2; (+) strand; PAM type: NRG; PAM sequence: GAG
tgctagctgtaatcaggagc

SEQ ID NO: 136948 - DNA, 20 bp, Artificial Sequence
  Description of Artificial Sequence: Synthetic oligonucleotide
  Target: LAMA2; (+) strand; PAM type: NRG; PAM sequence: TAG
tctctgccttcttaataaaa

SEQ ID NO: 136949 - DNA, 20 bp, Artificial Sequence
  Description of Artificial Sequence: Synthetic oligonucleotide
  Target: LAMA2; (+) strand; PAM type: NRG; PAM sequence: GAG
tctgccttcttaataaaata

SEQ ID NO: 136950 - DNA, 20 bp, Artificial Sequence
  Description of Artificial Sequence: Synthetic oligonucleotide
  Target: LAMA2; (+) strand; PAM type: NRG; PAM sequence: TAG
tcttaataaaatagagataa

SEQ ID NO: 136951 - DNA, 20 bp, Artificial Sequence
  Description of Artificial Sequence: Synthetic oligonucleotide
  Target: LAMA2; (+) strand; PAM type: NRG; PAM sequence: TGG
taataaaatagagataatag

SEQ ID NO: 136952 - DNA, 20 bp, Artificial Sequence
  Description of Artificial Sequence: Synthetic oligonucleotide
  Target: LAMA2; (+) strand; PAM type: NRG; PAM sequence: AAG
atagagataatagtggtatg

SEQ ID NO: 136953 - DNA, 20 bp, Artificial Sequence
  Description of Artificial Sequence: Synthetic oligonucleotide
  Target: LAMA2; (+) strand; PAM type: NRG; PAM sequence: TGG
atagtggtatgaagctcatg

SEQ ID NO: 136954 - DNA, 20 bp, Artificial Sequence
  Description of Artificial Sequence: Synthetic oligonucleotide
  Target: LAMA2; (+) strand; PAM type: NRG; PAM sequence: TAG
gctcatgtggatgttttgtg

SEQ ID NO: 136955 - DNA, 20 bp, Artificial Sequence
  Description of Artificial Sequence: Synthetic oligonucleotide
  Target: LAMA2; (+) strand; PAM type: NRG; PAM sequence: TAG
ttttgtgtagcaaatcattg

SEQ ID NO: 136956 - DNA, 20 bp, Artificial Sequence
  Description of Artificial Sequence: Synthetic oligonucleotide
  Target: LAMA2; (+) strand; PAM type: NRG; PAM sequence: AGG
tttgtgtagcaaatcattgt

SEQ ID NO: 136957 - DNA, 20 bp, Artificial Sequence
  Description of Artificial Sequence: Synthetic oligonucleotide
  Target: LAMA2; (+) strand; PAM type: NRG; PAM sequence: CAG
gtagcaaatcattgtaggaa

SEQ ID NO: 136958 - DNA, 20 bp, Artificial Sequence
  Description of Artificial Sequence: Synthetic oligonucleotide
  Target: LAMA2; (+) strand; PAM type: NRG; PAM sequence: TAG
gtaggaacagtgtctgacaa

SEQ ID NO: 136959 - DNA, 20 bp, Artificial Sequence
  Description of Artificial Sequence: Synthetic oligonucleotide
  Target: LAMA2; (+) strand; PAM type: NRG; PAM sequence: TGG
cagtgtctgacaatagtgct

SEQ ID NO: 136960 - DNA, 20 bp, Artificial Sequence
  Description of Artificial Sequence: Synthetic oligonucleotide
  Target: LAMA2; (+) strand; PAM type: NRG; PAM sequence: TGG
ttgcaaacattcaacgatgc

SEQ ID NO: 136961 - DNA, 20 bp, Artificial Sequence
  Description of Artificial Sequence: Synthetic oligonucleotide
  Target: LAMA2; (+) strand; PAM type: NRG; PAM sequence: CAG
ataattattattattatatg

SEQ ID NO: 136962 - DNA, 20 bp, Artificial Sequence
  Description of Artificial Sequence: Synthetic oligonucleotide
  Target: LAMA2; (+) strand; PAM type: NRG; PAM sequence: CAG
attattatatgcagatgata

SEQ ID NO: 136963 - DNA, 20 bp, Artificial Sequence
  Description of Artificial Sequence: Synthetic oligonucleotide
  Target: LAMA2; (+) strand; PAM type: NRG; PAM sequence: GAG
tgatacagacaaacatttat

SEQ ID NO: 136964 - DNA, 20 bp, Artificial Sequence
  Description of Artificial Sequence: Synthetic oligonucleotide
  Target: LAMA2; (+) strand; PAM type: NRG; PAM sequence: GAG
gtttattttacaaatacatt

SEQ ID NO: 136965 - DNA, 20 bp, Artificial Sequence
  Description of Artificial Sequence: Synthetic oligonucleotide
  Target: LAMA2; (+) strand; PAM type: NRG; PAM sequence: AAG
ctctgtccctactatgtgcc

SEQ ID NO: 136966 - DNA, 20 bp, Artificial Sequence
  Description of Artificial Sequence: Synthetic oligonucleotide
  Target: LAMA2; (+) strand; PAM type: NRG; PAM sequence: GAG
cctactatgtgccaagcttt

SEQ ID NO: 136967 - DNA, 20 bp, Artificial Sequence
  Description of Artificial Sequence: Synthetic oligonucleotide
  Target: LAMA2; (+) strand; PAM type: NRG; PAM sequence: AGG
ctactatgtgccaagctttg

SEQ ID NO: 136968 - DNA, 20 bp, Artificial Sequence
  Description of Artificial Sequence: Synthetic oligonucleotide
  Target: LAMA2; (+) strand; PAM type: NRG; PAM sequence: AAG
atgtgccaagctttgaggat

SEQ ID NO: 136969 - DNA, 20 bp, Artificial Sequence
  Description of Artificial Sequence: Synthetic oligonucleotide
  Target: LAMA2; (+) strand; PAM type: NRG; PAM sequence: AGG
tgtgccaagctttgaggata

SEQ ID NO: 136970 - DNA, 20 bp, Artificial Sequence
  Description of Artificial Sequence: Synthetic oligonucleotide
  Target: LAMA2; (+) strand; PAM type: NRG; PAM sequence: CAG
gccaagctttgaggataagg

SEQ ID NO: 136971 - DNA, 20 bp, Artificial Sequence
  Description of Artificial Sequence: Synthetic oligonucleotide
  Target: LAMA2; (+) strand; PAM type: NRG; PAM sequence: AAG
aaggcagaaaatacaaattc

SEQ ID NO: 136972 - DNA, 20 bp, Artificial Sequence
  Description of Artificial Sequence: Synthetic oligonucleotide
  Target: LAMA2; (+) strand; PAM type: NRG; PAM sequence: TAG
gaaaatacaaattcaagatc

SEQ ID NO: 136973 - DNA, 20 bp, Artificial Sequence
  Description of Artificial Sequence: Synthetic oligonucleotide
  Target: LAMA2; (+) strand; PAM type: NRG; PAM sequence: GAG
aaatacaaattcaagatcta

SEQ ID NO: 136974 - DNA, 20 bp, Artificial Sequence
  Description of Artificial Sequence: Synthetic oligonucleotide
  Target: LAMA2; (+) strand; PAM type: NRG; PAM sequence: TGG
aattcaagatctagagatct

SEQ ID NO: 136975 - DNA, 20 bp, Artificial Sequence
  Description of Artificial Sequence: Synthetic oligonucleotide
  Target: LAMA2; (+) strand; PAM type: NRG; PAM sequence: AAG
atctagagatcttggtaaaa

SEQ ID NO: 136976 - DNA, 20 bp, Artificial Sequence
  Description of Artificial Sequence: Synthetic oligonucleotide
  Target: LAMA2; (+) strand; PAM type: NRG; PAM sequence: AGG
tctagagatcttggtaaaaa

SEQ ID NO: 136977 - DNA, 20 bp, Artificial Sequence
  Description of Artificial Sequence: Synthetic oligonucleotide
  Target: LAMA2; (+) strand; PAM type: NRG; PAM sequence: CAG
agagatcttggtaaaaaagg

SEQ ID NO: 136978 - DNA, 20 bp, Artificial Sequence
  Description of Artificial Sequence: Synthetic oligonucleotide
  Target: LAMA2; (+) strand; PAM type: NRG; PAM sequence: AAG
aaggcagaaaacacaaactc

SEQ ID NO: 136979 - DNA, 20 bp, Artificial Sequence
  Description of Artificial Sequence: Synthetic oligonucleotide
  Target: LAMA2; (+) strand; PAM type: NRG; PAM sequence: TAG
gaaaacacaaactcaagatc

SEQ ID NO: 136980 - DNA, 20 bp, Artificial Sequence
  Description of Artificial Sequence: Synthetic oligonucleotide
  Target: LAMA2; (+) strand; PAM type: NRG; PAM sequence: AGG
aaaacacaaactcaagatct

SEQ ID NO: 136981 - DNA, 20 bp, Artificial Sequence
  Description of Artificial Sequence: Synthetic oligonucleotide
  Target: LAMA2; (+) strand; PAM type: NRG; PAM sequence: GGG
aaacacaaactcaagatcta

SEQ ID NO: 136982 - DNA, 20 bp, Artificial Sequence
  Description of Artificial Sequence: Synthetic oligonucleotide
  Target: LAMA2; (+) strand; PAM type: NRG; PAM sequence: CAG
aactcaagatctagggatct

SEQ ID NO: 136983 - DNA, 20 bp, Artificial Sequence
  Description of Artificial Sequence: Synthetic oligonucleotide
  Target: LAMA2; (+) strand; PAM type: NRG; PAM sequence: AAG
agggatctcagtaaaatatc

SEQ ID NO: 136984 - DNA, 20 bp, Artificial Sequence
  Description of Artificial Sequence: Synthetic oligonucleotide
  Target: LAMA2; (+) strand; PAM type: NRG; PAM sequence: GAG
tcagtaaaatatcaagccat

SEQ ID NO: 136985 - DNA, 20 bp, Artificial Sequence
  Description of Artificial Sequence: Synthetic oligonucleotide
  Target: LAMA2; (+) strand; PAM type: NRG; PAM sequence: TAG
aaatatcaagccatgagatt

SEQ ID NO: 136986 - DNA, 20 bp, Artificial Sequence
  Description of Artificial Sequence: Synthetic oligonucleotide
  Target: LAMA2; (+) strand; PAM type: NRG; PAM sequence: CAG
atcaagccatgagatttagt

SEQ ID NO: 136987 - DNA, 20 bp, Artificial Sequence
  Description of Artificial Sequence: Synthetic oligonucleotide
  Target: LAMA2; (+) strand; PAM type: NRG; PAM sequence: AGG
tcaagccatgagatttagtc

SEQ ID NO: 136988 - DNA, 20 bp, Artificial Sequence
  Description of Artificial Sequence: Synthetic oligonucleotide
  Target: LAMA2; (+) strand; PAM type: NRG; PAM sequence: AAG
agccatgagatttagtcagg

SEQ ID NO: 136989 - DNA, 20 bp, Artificial Sequence
  Description of Artificial Sequence: Synthetic oligonucleotide
  Target: LAMA2; (+) strand; PAM type: NRG; PAM sequence: AGG
gccatgagatttagtcagga

SEQ ID NO: 136990 - DNA, 20 bp, Artificial Sequence
  Description of Artificial Sequence: Synthetic oligonucleotide
  Target: LAMA2; (+) strand; PAM type: NRG; PAM sequence: CAG
tctctctctctctttcttga

SEQ ID NO: 136991 - DNA, 20 bp, Artificial Sequence
  Description of Artificial Sequence: Synthetic oligonucleotide
  Target: LAMA2; (+) strand; PAM type: NRG; PAM sequence: GAG
tctctctctctttcttgaca

SEQ ID NO: 136992 - DNA, 20 bp, Artificial Sequence
  Description of Artificial Sequence: Synthetic oligonucleotide
  Target: LAMA2; (+) strand; PAM type: NRG; PAM sequence: CAG
cagagtcttcctctgtctcc

SEQ ID NO: 136993 - DNA, 20 bp, Artificial Sequence
  Description of Artificial Sequence: Synthetic oligonucleotide
  Target: LAMA2; (+) strand; PAM type: NRG; PAM sequence: AGG
agagtcttcctctgtctccc

SEQ ID NO: 136994 - DNA, 20 bp, Artificial Sequence
  Description of Artificial Sequence: Synthetic oligonucleotide
  Target: LAMA2; (+) strand; PAM type: NRG; PAM sequence: TGG
tcttcctctgtctcccaggc

SEQ ID NO: 136995 - DNA, 20 bp, Artificial Sequence
  Description of Artificial Sequence: Synthetic oligonucleotide
  Target: LAMA2; (+) strand; PAM type: NRG; PAM sequence: GAG
ttcctctgtctcccaggctg

SEQ ID NO: 136996 - DNA, 20 bp, Artificial Sequence
  Description of Artificial Sequence: Synthetic oligonucleotide
  Target: LAMA2; (+) strand; PAM type: NRG; PAM sequence: CAG
ctgtctcccaggctggagtg

SEQ ID NO: 136997 - DNA, 20 bp, Artificial Sequence
  Description of Artificial Sequence: Synthetic oligonucleotide
  Target: LAMA2; (+) strand; PAM type: NRG; PAM sequence: CAG
ggagtgcagtgatgtgatct

SEQ ID NO: 136998 - DNA, 20 bp, Artificial Sequence
  Description of Artificial Sequence: Synthetic oligonucleotide
  Target: LAMA2; (+) strand; PAM type: NRG; PAM sequence: CGG
tcactgcaacctccacctcc

SEQ ID NO: 136999 - DNA, 20 bp, Artificial Sequence
  Description of Artificial Sequence: Synthetic oligonucleotide
  Target: LAMA2; (+) strand; PAM type: NRG; PAM sequence: GGG
cactgcaacctccacctccc

SEQ ID NO: 137000 - DNA, 20 bp, Artificial Sequence
  Description of Artificial Sequence: Synthetic oligonucleotide
  Target: LAMA2; (+) strand; PAM type: NRG; PAM sequence: AAG
aacctccacctcccgggctc

SEQ ID NO: 137001 - DNA, 20 bp, Artificial Sequence
  Description of Artificial Sequence: Synthetic oligonucleotide
  Target: LAMA2; (+) strand; PAM type: NRG; PAM sequence: CAG
ctcaagcaattctcctgcct

SEQ ID NO: 137002 - DNA, 20 bp, Artificial Sequence
  Description of Artificial Sequence: Synthetic oligonucleotide
  Target: LAMA2; (+) strand; PAM type: NRG; PAM sequence: AGG
tcaagcaattctcctgcctc

SEQ ID NO: 137003 - DNA, 20 bp, Artificial Sequence
  Description of Artificial Sequence: Synthetic oligonucleotide
  Target: LAMA2; (+) strand; PAM type: NRG; PAM sequence: AAG
ttctcctgcctcaggtttcc

SEQ ID NO: 137004 - DNA, 20 bp, Artificial Sequence
  Description of Artificial Sequence: Synthetic oligonucleotide
  Target: LAMA2; (+) strand; PAM type: NRG; PAM sequence: TAG
tcctgcctcaggtttccaag

SEQ ID NO: 137005 - DNA, 20 bp, Artificial Sequence
  Description of Artificial Sequence: Synthetic oligonucleotide
  Target: LAMA2; (+) strand; PAM type: NRG; PAM sequence: TGG
gcctcaggtttccaagtagc

SEQ ID NO: 137006 - DNA, 20 bp, Artificial Sequence
  Description of Artificial Sequence: Synthetic oligonucleotide
  Target: LAMA2; (+) strand; PAM type: NRG; PAM sequence: GGG
cctcaggtttccaagtagct

SEQ ID NO: 137007 - DNA, 20 bp, Artificial Sequence
  Description of Artificial Sequence: Synthetic oligonucleotide
  Target: LAMA2; (+) strand; PAM type: NRG; PAM sequence: CAG
tttccaagtagctgggatta

SEQ ID NO: 137008 - DNA, 20 bp, Artificial Sequence
  Description of Artificial Sequence: Synthetic oligonucleotide
  Target: LAMA2; (+) strand; PAM type: NRG; PAM sequence: TAG
cctgctaatttttgtatttt

SEQ ID NO: 137009 - DNA, 20 bp, Artificial Sequence
  Description of Artificial Sequence: Synthetic oligonucleotide
  Target: LAMA2; (+) strand; PAM type: NRG; PAM sequence: TAG
gctaatttttgtatttttag

SEQ ID NO: 137010 - DNA, 20 bp, Artificial Sequence
  Description of Artificial Sequence: Synthetic oligonucleotide
  Target: LAMA2; (+) strand; PAM type: NRG; PAM sequence: GAG
taatttttgtatttttagta

SEQ ID NO: 137011 - DNA, 20 bp, Artificial Sequence
  Description of Artificial Sequence: Synthetic oligonucleotide
  Target: LAMA2; (+) strand; PAM type: NRG; PAM sequence: CAG
ttttgtatttttagtagaga

SEQ ID NO: 137012 - DNA, 20 bp, Artificial Sequence
  Description of Artificial Sequence: Synthetic oligonucleotide
  Target: LAMA2; (+) strand; PAM type: NRG; PAM sequence: AGG
tttgtatttttagtagagac

SEQ ID NO: 137013 - DNA, 20 bp, Artificial Sequence
  Description of Artificial Sequence: Synthetic oligonucleotide
  Target: LAMA2; (+) strand; PAM type: NRG; PAM sequence: GGG
ttgtatttttagtagagaca

SEQ ID NO: 137014 - DNA, 20 bp, Artificial Sequence
  Description of Artificial Sequence: Synthetic oligonucleotide
  Target: LAMA2; (+) strand; PAM type: NRG; PAM sequence: TGG
gagacagggtttcaccatgt

SEQ ID NO: 137015 - DNA, 20 bp, Artificial Sequence
  Description of Artificial Sequence: Synthetic oligonucleotide
  Target: LAMA2; (+) strand; PAM type: NRG; PAM sequence: CAG
cagggtttcaccatgttggc

SEQ ID NO: 137016 - DNA, 20 bp, Artificial Sequence
  Description of Artificial Sequence: Synthetic oligonucleotide
  Target: LAMA2; (+) strand; PAM type: NRG; PAM sequence: TGG
tttcaccatgttggccagac

SEQ ID NO: 137017 - DNA, 20 bp, Artificial Sequence
  Description of Artificial Sequence: Synthetic oligonucleotide
  Target: LAMA2; (+) strand; PAM type: NRG; PAM sequence: AAG
ggtcttgaactcctgacctc

SEQ ID NO: 137018 - DNA, 20 bp, Artificial Sequence
  Description of Artificial Sequence: Synthetic oligonucleotide
  Target: LAMA2; (+) strand; PAM type: NRG; PAM sequence: CAG
ctcaagtgatccgcccacct

SEQ ID NO: 137019 - DNA, 20 bp, Artificial Sequence
  Description of Artificial Sequence: Synthetic oligonucleotide
  Target: LAMA2; (+) strand; PAM type: NRG; PAM sequence: AAG
ccgcccacctcagcctccca

SEQ ID NO: 137020 - DNA, 20 bp, Artificial Sequence
  Description of Artificial Sequence: Synthetic oligonucleotide
  Target: LAMA2; (+) strand; PAM type: NRG; PAM sequence: TGG
acctcagcctcccaaagtgc

SEQ ID NO: 137021 - DNA, 20 bp, Artificial Sequence
  Description of Artificial Sequence: Synthetic oligonucleotide
  Target: LAMA2; (+) strand; PAM type: NRG; PAM sequence: GGG
cctcagcctcccaaagtgct

SEQ ID NO: 137022 - DNA, 20 bp, Artificial Sequence
  Description of Artificial Sequence: Synthetic oligonucleotide
  Target: LAMA2; (+) strand; PAM type: NRG; PAM sequence: CAG
ctcccaaagtgctgggatta

SEQ ID NO: 137023 - DNA, 20 bp, Artificial Sequence
  Description of Artificial Sequence: Synthetic oligonucleotide
  Target: LAMA2; (+) strand; PAM type: NRG; PAM sequence: AGG
tcccaaagtgctgggattac

SEQ ID NO: 137024 - DNA, 20 bp, Artificial Sequence
  Description of Artificial Sequence: Synthetic oligonucleotide
  Target: LAMA2; (+) strand; PAM type: NRG; PAM sequence: GAG
agtgctgggattacaggcgt

SEQ ID NO: 137025 - DNA, 20 bp, Artificial Sequence
  Description of Artificial Sequence: Synthetic oligonucleotide
  Target: LAMA2; (+) strand; PAM type: NRG; PAM sequence: CGG
caggcgtgagtcaccacacc

SEQ ID NO: 137026 - DNA, 20 bp, Artificial Sequence
  Description of Artificial Sequence: Synthetic oligonucleotide
  Target: LAMA2; (+) strand; PAM type: NRG; PAM sequence: GAG
cgtgagtcaccacacccggc

SEQ ID NO: 137027 - DNA, 20 bp, Artificial Sequence
  Description of Artificial Sequence: Synthetic oligonucleotide
  Target: LAMA2; (+) strand; PAM type: NRG; PAM sequence: AGG
gtgagtcaccacacccggcg

SEQ ID NO: 137028 - DNA, 20 bp, Artificial Sequence
  Description of Artificial Sequence: Synthetic oligonucleotide
  Target: LAMA2; (+) strand; PAM type: NRG; PAM sequence: CAG
ggcgaggaatgactttctat

SEQ ID NO: 137029 - DNA, 20 bp, Artificial Sequence
  Description of Artificial Sequence: Synthetic oligonucleotide
  Target: LAMA2; (+) strand; PAM type: NRG; PAM sequence: AAG
gaggaatgactttctatcag

SEQ ID NO: 137030 - DNA, 20 bp, Artificial Sequence
  Description of Artificial Sequence: Synthetic oligonucleotide
  Target: LAMA2; (+) strand; PAM type: NRG; PAM sequence: TAG
tatcagaagttgaattgata

SEQ ID NO: 137031 - DNA, 20 bp, Artificial Sequence
  Description of Artificial Sequence: Synthetic oligonucleotide
  Target: LAMA2; (+) strand; PAM type: NRG; PAM sequence: TGG
tgaattgatatagacctact

SEQ ID NO: 137032 - DNA, 20 bp, Artificial Sequence
  Description of Artificial Sequence: Synthetic oligonucleotide
  Target: LAMA2; (+) strand; PAM type: NRG; PAM sequence: TAG
agacctacttggcacatata

SEQ ID NO: 137033 - DNA, 20 bp, Artificial Sequence
  Description of Artificial Sequence: Synthetic oligonucleotide
  Target: LAMA2; (+) strand; PAM type: NRG; PAM sequence: GAG
acctacttggcacatatata

SEQ ID NO: 137034 - DNA, 20 bp, Artificial Sequence
  Description of Artificial Sequence: Synthetic oligonucleotide
  Target: LAMA2; (+) strand; PAM type: NRG; PAM sequence: TAG
tatatagagctgaaacaacc

SEQ ID NO: 137035 - DNA, 20 bp, Artificial Sequence
  Description of Artificial Sequence: Synthetic oligonucleotide
  Target: LAMA2; (+) strand; PAM type: NRG; PAM sequence: TGG
tagagctgaaacaacctaga

SEQ ID NO: 137036 - DNA, 20 bp, Artificial Sequence
  Description of Artificial Sequence: Synthetic oligonucleotide
  Target: LAMA2; (+) strand; PAM type: NRG; PAM sequence: CGG
gctgaaacaacctagatggt

SEQ ID NO: 137037 - DNA, 20 bp, Artificial Sequence
  Description of Artificial Sequence: Synthetic oligonucleotide
  Target: LAMA2; (+) strand; PAM type: NRG; PAM sequence: TAG
cggcatattttctccataaa

SEQ ID NO: 137038 - DNA, 20 bp, Artificial Sequence
  Description of Artificial Sequence: Synthetic oligonucleotide
  Target: LAMA2; (+) strand; PAM type: NRG; PAM sequence: GAG
gcatattttctccataaata

SEQ ID NO: 137039 - DNA, 20 bp, Artificial Sequence
  Description of Artificial Sequence: Synthetic oligonucleotide
  Target: LAMA2; (+) strand; PAM type: NRG; PAM sequence: AAG
atttcaaatgtactttctcc

SEQ ID NO: 137040 - DNA, 20 bp, Artificial Sequence
  Description of Artificial Sequence: Synthetic oligonucleotide
  Target: LAMA2; (+) strand; PAM type: NRG; PAM sequence: CAG
aaatgtactttctccaagaa

SEQ ID NO: 137041 - DNA, 20 bp, Artificial Sequence
  Description of Artificial Sequence: Synthetic oligonucleotide
  Target: LAMA2; (+) strand; PAM type: NRG; PAM sequence: CAG
ttctccaagaacagattttt

SEQ ID NO: 137042 - DNA, 20 bp, Artificial Sequence
  Description of Artificial Sequence: Synthetic oligonucleotide
  Target: LAMA2; (+) strand; PAM type: NRG; PAM sequence: AAG
aagaacagatttttcagtta

SEQ ID NO: 137043 - DNA, 20 bp, Artificial Sequence
  Description of Artificial Sequence: Synthetic oligonucleotide
  Target: LAMA2; (+) strand; PAM type: NRG; PAM sequence: GAG
gaacagatttttcagttaaa

SEQ ID NO: 137044 - DNA, 20 bp, Artificial Sequence
  Description of Artificial Sequence: Synthetic oligonucleotide
  Target: LAMA2; (+) strand; PAM type: NRG; PAM sequence: TGG
cagatttttcagttaaagag

SEQ ID NO: 137045 - DNA, 20 bp, Artificial Sequence
  Description of Artificial Sequence: Synthetic oligonucleotide
  Target: LAMA2; (+) strand; PAM type: NRG; PAM sequence: GAG
gttaaagagtggcttttgat

SEQ ID NO: 137046 - DNA, 20 bp, Artificial Sequence
  Description of Artificial Sequence: Synthetic oligonucleotide
  Target: LAMA2; (+) strand; PAM type: NRG; PAM sequence: AAG
ttgctatactgttattgaaa

SEQ ID NO: 137047 - DNA, 20 bp, Artificial Sequence
  Description of Artificial Sequence: Synthetic oligonucleotide
  Target: LAMA2; (+) strand; PAM type: NRG; PAM sequence: AGG
tgctatactgttattgaaaa

SEQ ID NO: 137048 - DNA, 20 bp, Artificial Sequence
  Description of Artificial Sequence: Synthetic oligonucleotide
  Target: LAMA2; (+) strand; PAM type: NRG; PAM sequence: GGG
gctatactgttattgaaaaa

SEQ ID NO: 137049 - DNA, 20 bp, Artificial Sequence
  Description of Artificial Sequence: Synthetic oligonucleotide
  Target: LAMA2; (+) strand; PAM type: NRG; PAM sequence: TAG
ggtctataatatgcaaatgc

SEQ ID NO: 137050 - DNA, 20 bp, Artificial Sequence
  Description of Artificial Sequence: Synthetic oligonucleotide
  Target: LAMA2; (+) strand; PAM type: NRG; PAM sequence: AAG
gcaaatgctagacatgtatg

SEQ ID NO: 137051 - DNA, 20 bp, Artificial Sequence
  Description of Artificial Sequence: Synthetic oligonucleotide
  Target: LAMA2; (+) strand; PAM type: NRG; PAM sequence: CAG
gcacaattgacattaactta

SEQ ID NO: 137052 - DNA, 20 bp, Artificial Sequence
  Description of Artificial Sequence: Synthetic oligonucleotide
  Target: LAMA2; (+) strand; PAM type: NRG; PAM sequence: AGG
cacaattgacattaacttac

SEQ ID NO: 137053 - DNA, 20 bp, Artificial Sequence
  Description of Artificial Sequence: Synthetic oligonucleotide
  Target: LAMA2; (+) strand; PAM type: NRG; PAM sequence: AAG
aattgacattaacttacagg

SEQ ID NO: 137054 - DNA, 20 bp, Artificial Sequence
  Description of Artificial Sequence: Synthetic oligonucleotide
  Target: LAMA2; (+) strand; PAM type: NRG; PAM sequence: AAG
acattaacttacaggaagaa

SEQ ID NO: 137055 - DNA, 20 bp, Artificial Sequence
  Description of Artificial Sequence: Synthetic oligonucleotide
  Target: LAMA2; (+) strand; PAM type: NRG; PAM sequence: GAG
attaacttacaggaagaaaa

SEQ ID NO: 137056 - DNA, 20 bp, Artificial Sequence
  Description of Artificial Sequence: Synthetic oligonucleotide
  Target: LAMA2; (+) strand; PAM type: NRG; PAM sequence: TGG
ggaagaaaagagactgaatt

SEQ ID NO: 137057 - DNA, 20 bp, Artificial Sequence
  Description of Artificial Sequence: Synthetic oligonucleotide
  Target: LAMA2; (+) strand; PAM type: NRG; PAM sequence: CAG
aagagactgaatttggttct

SEQ ID NO: 137058 - DNA, 20 bp, Artificial Sequence
  Description of Artificial Sequence: Synthetic oligonucleotide
  Target: LAMA2; (+) strand; PAM type: NRG; PAM sequence: GAG
gagactgaatttggttctca

SEQ ID NO: 137059 - DNA, 20 bp, Artificial Sequence
  Description of Artificial Sequence: Synthetic oligonucleotide
  Target: LAMA2; (+) strand; PAM type: NRG; PAM sequence: AGG
agactgaatttggttctcag

SEQ ID NO: 137060 - DNA, 20 bp, Artificial Sequence
  Description of Artificial Sequence: Synthetic oligonucleotide
  Target: LAMA2; (+) strand; PAM type: NRG; PAM sequence: GGG
gactgaatttggttctcaga

SEQ ID NO: 137061 - DNA, 20 bp, Artificial Sequence
  Description of Artificial Sequence: Synthetic oligonucleotide
  Target: LAMA2; (+) strand; PAM type: NRG; PAM sequence: CAG
agggaataaaaaaatctccc

SEQ ID NO: 137062 - DNA, 20 bp, Artificial Sequence
  Description of Artificial Sequence: Synthetic oligonucleotide
  Target: LAMA2; (+) strand; PAM type: NRG; PAM sequence: TAG
aatctccccagccctacact

SEQ ID NO: 137063 - DNA, 20 bp, Artificial Sequence
  Description of Artificial Sequence: Synthetic oligonucleotide
  Target: LAMA2; (+) strand; PAM type: NRG; PAM sequence: TGG
tccccagccctacacttaga

SEQ ID NO: 137064 - DNA, 20 bp, Artificial Sequence
  Description of Artificial Sequence: Synthetic oligonucleotide
  Target: LAMA2; (+) strand; PAM type: NRG; PAM sequence: GAG
ctacacttagatggacctct

SEQ ID NO: 137065 - DNA, 20 bp, Artificial Sequence
  Description of Artificial Sequence: Synthetic oligonucleotide
  Target: LAMA2; (+) strand; PAM type: NRG; PAM sequence: AAG
ctctgagatcgtatctatga

SEQ ID NO: 137066 - DNA, 20 bp, Artificial Sequence
  Description of Artificial Sequence: Synthetic oligonucleotide
  Target: LAMA2; (+) strand; PAM type: NRG; PAM sequence: AAG
taaaaacttctattatatct

SEQ ID NO: 137067 - DNA, 20 bp, Artificial Sequence
  Description of Artificial Sequence: Synthetic oligonucleotide
  Target: LAMA2; (+) strand; PAM type: NRG; PAM sequence: TGG
tatatctaagacataattac

SEQ ID NO: 137068 - DNA, 20 bp, Artificial Sequence
  Description of Artificial Sequence: Synthetic oligonucleotide
  Target: LAMA2; (+) strand; PAM type: NRG; PAM sequence: TGG
taattactggtgtatgatca

SEQ ID NO: 137069 - DNA, 20 bp, Artificial Sequence
  Description of Artificial Sequence: Synthetic oligonucleotide
  Target: LAMA2; (+) strand; PAM type: NRG; PAM sequence: TGG
atgatcatggaccactataa

SEQ ID NO: 137070 - DNA, 20 bp, Artificial Sequence
  Description of Artificial Sequence: Synthetic oligonucleotide
  Target: LAMA2; (+) strand; PAM type: NRG; PAM sequence: TGG
ccactataatggcttgtttc

SEQ ID NO: 137071 - DNA, 20 bp, Artificial Sequence
  Description of Artificial Sequence: Synthetic oligonucleotide
  Target: LAMA2; (+) strand; PAM type: NRG; PAM sequence: TGG
atattgctttattatattgc

SEQ ID NO: 137072 - DNA, 20 bp, Artificial Sequence
  Description of Artificial Sequence: Synthetic oligonucleotide
  Target: LAMA2; (+) strand; PAM type: NRG; PAM sequence: TGG
tgctttattatattgctgga

SEQ ID NO: 137073 - DNA, 20 bp, Artificial Sequence
  Description of Artificial Sequence: Synthetic oligonucleotide
  Target: LAMA2; (+) strand; PAM type: NRG; PAM sequence: TGG
tattatattgctggatggca

SEQ ID NO: 137074 - DNA, 20 bp, Artificial Sequence
  Description of Artificial Sequence: Synthetic oligonucleotide
  Target: LAMA2; (+) strand; PAM type: NRG; PAM sequence: AAG
atattgctggatggcatgga

SEQ ID NO: 137075 - DNA, 20 bp, Artificial Sequence
  Description of Artificial Sequence: Synthetic oligonucleotide
  Target: LAMA2; (+) strand; PAM type: NRG; PAM sequence: CAG
ttgctggatggcatggaaag

SEQ ID NO: 137076 - DNA, 20 bp, Artificial Sequence
  Description of Artificial Sequence: Synthetic oligonucleotide
  Target: LAMA2; (+) strand; PAM type: NRG; PAM sequence: TGG
gcatggaaagcagtaaaaat

SEQ ID NO: 137077 - DNA, 20 bp, Artificial Sequence
  Description of Artificial Sequence: Synthetic oligonucleotide
  Target: LAMA2; (+) strand; PAM type: NRG; PAM sequence: AAG
cagtaaaaattggtattcca

SEQ ID NO: 137078 - DNA, 20 bp, Artificial Sequence
  Description of Artificial Sequence: Synthetic oligonucleotide
  Target: LAMA2; (+) strand; PAM type: NRG; PAM sequence: TAG
taaacattatctatcttctc

SEQ ID NO: 137079 - DNA, 20 bp, Artificial Sequence
  Description of Artificial Sequence: Synthetic oligonucleotide
  Target: LAMA2; (+) strand; PAM type: NRG; PAM sequence: TGG
attatctatcttctctagtc

SEQ ID NO: 137080 - DNA, 20 bp, Artificial Sequence
  Description of Artificial Sequence: Synthetic oligonucleotide
  Target: LAMA2; (+) strand; PAM type: NRG; PAM sequence: GGG
ttatctatcttctctagtct

SEQ ID NO: 137081 - DNA, 20 bp, Artificial Sequence
  Description of Artificial Sequence: Synthetic oligonucleotide
  Target: LAMA2; (+) strand; PAM type: NRG; PAM sequence: AAG
atcttctctagtctgggata

SEQ ID NO: 137082 - DNA, 20 bp, Artificial Sequence
  Description of Artificial Sequence: Synthetic oligonucleotide
  Target: LAMA2; (+) strand; PAM type: NRG; PAM sequence: AAG
ttctctagtctgggataaag

SEQ ID NO: 137083 - DNA, 20 bp, Artificial Sequence
  Description of Artificial Sequence: Synthetic oligonucleotide
  Target: LAMA2; (+) strand; PAM type: NRG; PAM sequence: AAG
tttaataattatttacactg

SEQ ID NO: 137084 - DNA, 20 bp, Artificial Sequence
  Description of Artificial Sequence: Synthetic oligonucleotide
  Target: LAMA2; (+) strand; PAM type: NRG; PAM sequence: AGG
ttaataattatttacactga

SEQ ID NO: 137085 - DNA, 20 bp, Artificial Sequence
  Description of Artificial Sequence: Synthetic oligonucleotide
  Target: LAMA2; (+) strand; PAM type: NRG; PAM sequence: TAG
tatttacactgaaggataat

SEQ ID NO: 137086 - DNA, 20 bp, Artificial Sequence
  Description of Artificial Sequence: Synthetic oligonucleotide
  Target: LAMA2; (+) strand; PAM type: NRG; PAM sequence: GAG
tttacactgaaggataatta

SEQ ID NO: 137087 - DNA, 20 bp, Artificial Sequence
  Description of Artificial Sequence: Synthetic oligonucleotide
  Target: LAMA2; (+) strand; PAM type: NRG; PAM sequence: TAG
catgaaaaaatatatttgca

SEQ ID NO: 137088 - DNA, 20 bp, Artificial Sequence
  Description of Artificial Sequence: Synthetic oligonucleotide
  Target: LAMA2; (+) strand; PAM type: NRG; PAM sequence: CAG
aatatatttgcatagttgtg

SEQ ID NO: 137089 - DNA, 20 bp, Artificial Sequence
  Description of Artificial Sequence: Synthetic oligonucleotide
  Target: LAMA2; (+) strand; PAM type: NRG; PAM sequence: TAG
atgcaattatgtcttgatac

SEQ ID NO: 137090 - DNA, 20 bp, Artificial Sequence
  Description of Artificial Sequence: Synthetic oligonucleotide
  Target: LAMA2; (+) strand; PAM type: NRG; PAM sequence: TGG
tagatataaaatatctgaaa

SEQ ID NO: 137091 - DNA, 20 bp, Artificial Sequence
  Description of Artificial Sequence: Synthetic oligonucleotide
  Target: LAMA2; (+) strand; PAM type: NRG; PAM sequence: AAG
atataaaatatctgaaatgg

SEQ ID NO: 137092 - DNA, 20 bp, Artificial Sequence
  Description of Artificial Sequence: Synthetic oligonucleotide
  Target: LAMA2; (+) strand; PAM type: NRG; PAM sequence: TGG
aaaatatctgaaatggaaga

SEQ ID NO: 137093 - DNA, 20 bp, Artificial Sequence
  Description of Artificial Sequence: Synthetic oligonucleotide
  Target: LAMA2; (+) strand; PAM type: NRG; PAM sequence: AAG
atatctgaaatggaagatgg

SEQ ID NO: 137094 - DNA, 20 bp, Artificial Sequence
  Description of Artificial Sequence: Synthetic oligonucleotide
  Target: LAMA2; (+) strand; PAM type: NRG; PAM sequence: TAG
gaaatggaagatggaagatt

SEQ ID NO: 137095 - DNA, 20 bp, Artificial Sequence
  Description of Artificial Sequence: Synthetic oligonucleotide
  Target: LAMA2; (+) strand; PAM type: NRG; PAM sequence: TGG
atggaagatggaagatttag

SEQ ID NO: 137096 - DNA, 20 bp, Artificial Sequence
  Description of Artificial Sequence: Synthetic oligonucleotide
  Target: LAMA2; (+) strand; PAM type: NRG; PAM sequence: GGG
tggaagatggaagatttagt

SEQ ID NO: 137097 - DNA, 20 bp, Artificial Sequence
  Description of Artificial Sequence: Synthetic oligonucleotide
  Target: LAMA2; (+) strand; PAM type: NRG; PAM sequence: CAG
tcttttaccaataacttcaa

SEQ ID NO: 137098 - DNA, 20 bp, Artificial Sequence
  Description of Artificial Sequence: Synthetic oligonucleotide
  Target: LAMA2; (+) strand; PAM type: NRG; PAM sequence: AAG
tttaccaataacttcaacag

SEQ ID NO: 137099 - DNA, 20 bp, Artificial Sequence
  Description of Artificial Sequence: Synthetic oligonucleotide
  Target: LAMA2; (+) strand; PAM type: NRG; PAM sequence: TAG
tcaacagaagatttgtgttt

SEQ ID NO: 137100 - DNA, 20 bp, Artificial Sequence
  Description of Artificial Sequence: Synthetic oligonucleotide
  Target: LAMA2; (+) strand; PAM type: NRG; PAM sequence: TAG
ttgtgttttagaatgtgtcc

SEQ ID NO: 137101 - DNA, 20 bp, Artificial Sequence
  Description of Artificial Sequence: Synthetic oligonucleotide
  Target: LAMA2; (+) strand; PAM type: NRG; PAM sequence: GAG
gtgttttagaatgtgtccta

SEQ ID NO: 137102 - DNA, 20 bp, Artificial Sequence
  Description of Artificial Sequence: Synthetic oligonucleotide
  Target: LAMA2; (+) strand; PAM type: NRG; PAM sequence: CAG
tttagaatgtgtcctagaga

SEQ ID NO: 137103 - DNA, 20 bp, Artificial Sequence
  Description of Artificial Sequence: Synthetic oligonucleotide
  Target: LAMA2; (+) strand; PAM type: NRG; PAM sequence: AGG
ttagaatgtgtcctagagac

SEQ ID NO: 137104 - DNA, 20 bp, Artificial Sequence
  Description of Artificial Sequence: Synthetic oligonucleotide
  Target: LAMA2; (+) strand; PAM type: NRG; PAM sequence: TAG
tagagacaggaccttcttcc

SEQ ID NO: 137105 - DNA, 20 bp, Artificial Sequence
  Description of Artificial Sequence: Synthetic oligonucleotide
  Target: LAMA2; (+) strand; PAM type: NRG; PAM sequence: TAG
ccttcttcctagctaaatat

SEQ ID NO: 137106 - DNA, 20 bp, Artificial Sequence
  Description of Artificial Sequence: Synthetic oligonucleotide
  Target: LAMA2; (+) strand; PAM type: NRG; PAM sequence: GAG
ttcttcctagctaaatatta

SEQ ID NO: 137107 - DNA, 20 bp, Artificial Sequence
  Description of Artificial Sequence: Synthetic oligonucleotide
  Target: LAMA2; (+) strand; PAM type: NRG; PAM sequence: AAG
attagagataaaaaattaaa

SEQ ID NO: 137108 - DNA, 20 bp, Artificial Sequence
  Description of Artificial Sequence: Synthetic oligonucleotide
  Target: LAMA2; (+) strand; PAM type: NRG; PAM sequence: GAG
tagagataaaaaattaaaaa

SEQ ID NO: 137109 - DNA, 20 bp, Artificial Sequence
  Description of Artificial Sequence: Synthetic oligonucleotide
  Target: LAMA2; (+) strand; PAM type: NRG; PAM sequence: AGG
agagataaaaaattaaaaag

SEQ ID NO: 137110 - DNA, 20 bp, Artificial Sequence
  Description of Artificial Sequence: Synthetic oligonucleotide
  Target: LAMA2; (+) strand; PAM type: NRG; PAM sequence: AAG
aaaaattaaaaagaggctta

SEQ ID NO: 137111 - DNA, 20 bp, Artificial Sequence
  Description of Artificial Sequence: Synthetic oligonucleotide
  Target: LAMA2; (+) strand; PAM type: NRG; PAM sequence: AAG
gaggcttaaagtccatactt

SEQ ID NO: 137112 - DNA, 20 bp, Artificial Sequence
  Description of Artificial Sequence: Synthetic oligonucleotide
  Target: LAMA2; (+) strand; PAM type: NRG; PAM sequence: CAG
taaagtccatacttaagacc

SEQ ID NO: 137113 - DNA, 20 bp, Artificial Sequence
  Description of Artificial Sequence: Synthetic oligonucleotide
  Target: LAMA2; (+) strand; PAM type: NRG; PAM sequence: AAG
gtccatacttaagacccaga

SEQ ID NO: 137114 - DNA, 20 bp, Artificial Sequence
  Description of Artificial Sequence: Synthetic oligonucleotide
  Target: LAMA2; (+) strand; PAM type: NRG; PAM sequence: TAG
ttaagacccagaaagaaaaa

SEQ ID NO: 137115 - DNA, 20 bp, Artificial Sequence
  Description of Artificial Sequence: Synthetic oligonucleotide
  Target: LAMA2; (+) strand; PAM type: NRG; PAM sequence: TAG
agtattcttttgataacaca

SEQ ID NO: 137116 - DNA, 20 bp, Artificial Sequence
  Description of Artificial Sequence: Synthetic oligonucleotide
  Target: LAMA2; (+) strand; PAM type: NRG; PAM sequence: TAG
gataacacatagtatttatg

SEQ ID NO: 137117 - DNA, 20 bp, Artificial Sequence
  Description of Artificial Sequence: Synthetic oligonucleotide
  Target: LAMA2; (+) strand; PAM type: NRG; PAM sequence: CAG
tatgtagtatactgaattgt

SEQ ID NO: 137118 - DNA, 20 bp, Artificial Sequence
  Description of Artificial Sequence: Synthetic oligonucleotide
  Target: LAMA2; (+) strand; PAM type: NRG; PAM sequence: AGG
atgtagtatactgaattgtc

SEQ ID NO: 137119 - DNA, 20 bp, Artificial Sequence
  Description of Artificial Sequence: Synthetic oligonucleotide
  Target: LAMA2; (+) strand; PAM type: NRG; PAM sequence: TGG
tatcattaattatctcatgt

SEQ ID NO: 137120 - DNA, 20 bp, Artificial Sequence
  Description of Artificial Sequence: Synthetic oligonucleotide
  Target: LAMA2; (+) strand; PAM type: NRG; PAM sequence: GGG
atcattaattatctcatgtt

SEQ ID NO: 137121 - DNA, 20 bp, Artificial Sequence
  Description of Artificial Sequence: Synthetic oligonucleotide
  Target: LAMA2; (+) strand; PAM type: NRG; PAM sequence: TGG
caaaatcctaactttgtttc

SEQ ID NO: 137122 - DNA, 20 bp, Artificial Sequence
  Description of Artificial Sequence: Synthetic oligonucleotide
  Target: LAMA2; (+) strand; PAM type: NRG; PAM sequence: CAG
cttcatttgtccatcttttt

SEQ ID NO: 137123 - DNA, 20 bp, Artificial Sequence
  Description of Artificial Sequence: Synthetic oligonucleotide
  Target: LAMA2; (+) strand; PAM type: NRG; PAM sequence: AGG
ttcatttgtccatctttttc

SEQ ID NO: 137124 - DNA, 20 bp, Artificial Sequence
  Description of Artificial Sequence: Synthetic oligonucleotide
  Target: LAMA2; (+) strand; PAM type: NRG; PAM sequence: TGG
atcacgaccaatgcaacatg

SEQ ID NO: 137125 - DNA, 20 bp, Artificial Sequence
  Description of Artificial Sequence: Synthetic oligonucleotide
  Target: LAMA2; (+) strand; PAM type: NRG; PAM sequence: GAG
cacgaccaatgcaacatgtg

SEQ ID NO: 137126 - DNA, 20 bp, Artificial Sequence
  Description of Artificial Sequence: Synthetic oligonucleotide
  Target: LAMA2; (+) strand; PAM type: NRG; PAM sequence: AAG
caatgcaacatgtggagaaa

SEQ ID NO: 137127 - DNA, 20 bp, Artificial Sequence
  Description of Artificial Sequence: Synthetic oligonucleotide
  Target: LAMA2; (+) strand; PAM type: NRG; PAM sequence: AGG
aatgcaacatgtggagaaaa

SEQ ID NO: 137128 - DNA, 20 bp, Artificial Sequence
  Description of Artificial Sequence: Synthetic oligonucleotide
  Target: LAMA2; (+) strand; PAM type: NRG; PAM sequence: TGG
acctgaaatgtactgcaaat

SEQ ID NO: 137129 - DNA, 20 bp, Artificial Sequence
  Description of Artificial Sequence: Synthetic oligonucleotide
  Target: LAMA2; (+) strand; PAM type: NRG; PAM sequence: TAG
tgaaatgtactgcaaattgg

SEQ ID NO: 137130 - DNA, 20 bp, Artificial Sequence
  Description of Artificial Sequence: Synthetic oligonucleotide
  Target: LAMA2; (+) strand; PAM type: NRG; PAM sequence: TGG
aaattggtagaacatgtccc

SEQ ID NO: 137131 - DNA, 20 bp, Artificial Sequence
  Description of Artificial Sequence: Synthetic oligonucleotide
  Target: LAMA2; (+) strand; PAM type: NRG; PAM sequence: GGG
aattggtagaacatgtccct

SEQ ID NO: 137132 - DNA, 20 bp, Artificial Sequence
  Description of Artificial Sequence: Synthetic oligonucleotide
  Target: LAMA2; (+) strand; PAM type: NRG; PAM sequence: CAG
tggtagaacatgtccctggg

SEQ ID NO: 137133 - DNA, 20 bp, Artificial Sequence
  Description of Artificial Sequence: Synthetic oligonucleotide
  Target: LAMA2; (+) strand; PAM type: NRG; PAM sequence: GAG
catgtccctgggcagcctgt

SEQ ID NO: 137134 - DNA, 20 bp, Artificial Sequence
  Description of Artificial Sequence: Synthetic oligonucleotide
  Target: LAMA2; (+) strand; PAM type: NRG; PAM sequence: AGG
atgtccctgggcagcctgtg

SEQ ID NO: 137135 - DNA, 20 bp, Artificial Sequence
  Description of Artificial Sequence: Synthetic oligonucleotide
  Target: LAMA2; (+) strand; PAM type: NRG; PAM sequence: CAG
ggcagcctgtgaggaacccg

SEQ ID NO: 137136 - DNA, 20 bp, Artificial Sequence
  Description of Artificial Sequence: Synthetic oligonucleotide
  Target: LAMA2; (+) strand; PAM type: NRG; PAM sequence: CAG
tgtcgaatctgcaatcaaaa

SEQ ID NO: 137137 - DNA, 20 bp, Artificial Sequence
  Description of Artificial Sequence: Synthetic oligonucleotide
  Target: LAMA2; (+) strand; PAM type: NRG; PAM sequence: CAG
cgaatctgcaatcaaaacag

SEQ ID NO: 137138 - DNA, 20 bp, Artificial Sequence
  Description of Artificial Sequence: Synthetic oligonucleotide
  Target: LAMA2; (+) strand; PAM type: NRG; PAM sequence: TAG
aatccaaaccgtatgtattt

SEQ ID NO: 137139 - DNA, 20 bp, Artificial Sequence
  Description of Artificial Sequence: Synthetic oligonucleotide
  Target: LAMA2; (+) strand; PAM type: NRG; PAM sequence: TAG
accgtatgtattttagtgtg

SEQ ID NO: 137140 - DNA, 20 bp, Artificial Sequence
  Description of Artificial Sequence: Synthetic oligonucleotide
  Target: LAMA2; (+) strand; PAM type: NRG; PAM sequence: AGG
ccgtatgtattttagtgtgt

SEQ ID NO: 137141 - DNA, 20 bp, Artificial Sequence
  Description of Artificial Sequence: Synthetic oligonucleotide
  Target: LAMA2; (+) strand; PAM type: NRG; PAM sequence: TGG
tattttagtgtgtaggtgtg

SEQ ID NO: 137142 - DNA, 20 bp, Artificial Sequence
  Description of Artificial Sequence: Synthetic oligonucleotide
  Target: LAMA2; (+) strand; PAM type: NRG; PAM sequence: TGG
agtgtgtaggtgtgtggcgc

SEQ ID NO: 137143 - DNA, 20 bp, Artificial Sequence
  Description of Artificial Sequence: Synthetic oligonucleotide
  Target: LAMA2; (+) strand; PAM type: NRG; PAM sequence: GGG
gtgtgtaggtgtgtggcgct

SEQ ID NO: 137144 - DNA, 20 bp, Artificial Sequence
  Description of Artificial Sequence: Synthetic oligonucleotide
  Target: LAMA2; (+) strand; PAM type: NRG; PAM sequence: TAG
tgtaggtgtgtggcgctggg

SEQ ID NO: 137145 - DNA, 20 bp, Artificial Sequence
  Description of Artificial Sequence: Synthetic oligonucleotide
  Target: LAMA2; (+) strand; PAM type: NRG; PAM sequence: AGG
gtaggtgtgtggcgctgggt

SEQ ID NO: 137146 - DNA, 20 bp, Artificial Sequence
  Description of Artificial Sequence: Synthetic oligonucleotide
  Target: LAMA2; (+) strand; PAM type: NRG; PAM sequence: GAG
tgggtaggatctataattgt

SEQ ID NO: 137147 - DNA, 20 bp, Artificial Sequence
  Description of Artificial Sequence: Synthetic oligonucleotide
  Target: LAMA2; (+) strand; PAM type: NRG; PAM sequence: GAG
atctataattgtgagatgtt

SEQ ID NO: 137148 - DNA, 20 bp, Artificial Sequence
  Description of Artificial Sequence: Synthetic oligonucleotide
  Target: LAMA2; (+) strand; PAM type: NRG; PAM sequence: AGG
tctataattgtgagatgttg

SEQ ID NO: 137149 - DNA, 20 bp, Artificial Sequence
  Description of Artificial Sequence: Synthetic oligonucleotide
  Target: LAMA2; (+) strand; PAM type: NRG; PAM sequence: AAG
aattgtgagatgttgaggcc

SEQ ID NO: 137150 - DNA, 20 bp, Artificial Sequence
  Description of Artificial Sequence: Synthetic oligonucleotide
  Target: LAMA2; (+) strand; PAM type: NRG; PAM sequence: AAG
ggccaagttgcattaaattc

SEQ ID NO: 137151 - DNA, 20 bp, Artificial Sequence
  Description of Artificial Sequence: Synthetic oligonucleotide
  Target: LAMA2; (+) strand; PAM type: NRG; PAM sequence: AGG
gccaagttgcattaaattca

SEQ ID NO: 137152 - DNA, 20 bp, Artificial Sequence
  Description of Artificial Sequence: Synthetic oligonucleotide
  Target: LAMA2; (+) strand; PAM type: NRG; PAM sequence: GGG
ccaagttgcattaaattcaa

SEQ ID NO: 137153 - DNA, 20 bp, Artificial Sequence
  Description of Artificial Sequence: Synthetic oligonucleotide
  Target: LAMA2; (+) strand; PAM type: NRG; PAM sequence: AAG
attcaagggtttgtaatact

SEQ ID NO: 137154 - DNA, 20 bp, Artificial Sequence
  Description of Artificial Sequence: Synthetic oligonucleotide
  Target: LAMA2; (+) strand; PAM type: NRG; PAM sequence: TAG
tttgtaatactaagaattcc

SEQ ID NO: 137155 - DNA, 20 bp, Artificial Sequence
  Description of Artificial Sequence: Synthetic oligonucleotide
  Target: LAMA2; (+) strand; PAM type: NRG; PAM sequence: AAG
ctagaattctttttaccatt

SEQ ID NO: 137156 - DNA, 20 bp, Artificial Sequence
  Description of Artificial Sequence: Synthetic oligonucleotide
  Target: LAMA2; (+) strand; PAM type: NRG; PAM sequence: GAG
agaattctttttaccattaa

SEQ ID NO: 137157 - DNA, 20 bp, Artificial Sequence
  Description of Artificial Sequence: Synthetic oligonucleotide
  Target: LAMA2; (+) strand; PAM type: NRG; PAM sequence: TGG
taccattaagagcttcttcc

SEQ ID NO: 137158 - DNA, 20 bp, Artificial Sequence
  Description of Artificial Sequence: Synthetic oligonucleotide
  Target: LAMA2; (+) strand; PAM type: NRG; PAM sequence: CAG
cctggcccctctctgtcatt

SEQ ID NO: 137159 - DNA, 20 bp, Artificial Sequence
  Description of Artificial Sequence: Synthetic oligonucleotide
  Target: LAMA2; (+) strand; PAM type: NRG; PAM sequence: TGG
tgtcattcagcaaacattat

SEQ ID NO: 137160 - DNA, 20 bp, Artificial Sequence
  Description of Artificial Sequence: Synthetic oligonucleotide
  Target: LAMA2; (+) strand; PAM type: NRG; PAM sequence: GAG
tcattcagcaaacattattg

SEQ ID NO: 137161 - DNA, 20 bp, Artificial Sequence
  Description of Artificial Sequence: Synthetic oligonucleotide
  Target: LAMA2; (+) strand; PAM type: NRG; PAM sequence: AAG
tggagttcctgctatgtgct

SEQ ID NO: 137162 - DNA, 20 bp, Artificial Sequence
  Description of Artificial Sequence: Synthetic oligonucleotide
  Target: LAMA2; (+) strand; PAM type: NRG; PAM sequence: CAG
ttcctgctatgtgctaagta

SEQ ID NO: 137163 - DNA, 20 bp, Artificial Sequence
  Description of Artificial Sequence: Synthetic oligonucleotide
  Target: LAMA2; (+) strand; PAM type: NRG; PAM sequence: TGG
tatgtgctaagtacagtgat

SEQ ID NO: 137164 - DNA, 20 bp, Artificial Sequence
  Description of Artificial Sequence: Synthetic oligonucleotide
  Target: LAMA2; (+) strand; PAM type: NRG; PAM sequence: GAG
tgtgctaagtacagtgattg

SEQ ID NO: 137165 - DNA, 20 bp, Artificial Sequence
  Description of Artificial Sequence: Synthetic oligonucleotide
  Target: LAMA2; (+) strand; PAM type: NRG; PAM sequence: CAG
agtgattggagatgattcgc

SEQ ID NO: 137166 - DNA, 20 bp, Artificial Sequence
  Description of Artificial Sequence: Synthetic oligonucleotide
  Target: LAMA2; (+) strand; PAM type: NRG; PAM sequence: AAG
tggagatgattcgccagctg

SEQ ID NO: 137167 - DNA, 20 bp, Artificial Sequence
  Description of Artificial Sequence: Synthetic oligonucleotide
  Target: LAMA2; (+) strand; PAM type: NRG; PAM sequence: AGG
ggagatgattcgccagctga

SEQ ID NO: 137168 - DNA, 20 bp, Artificial Sequence
  Description of Artificial Sequence: Synthetic oligonucleotide
  Target: LAMA2; (+) strand; PAM type: NRG; PAM sequence: TGG
attcgccagctgaaggcctg

SEQ ID NO: 137169 - DNA, 20 bp, Artificial Sequence
  Description of Artificial Sequence: Synthetic oligonucleotide
  Target: LAMA2; (+) strand; PAM type: NRG; PAM sequence: CAG
cgccagctgaaggcctgtgg

SEQ ID NO: 137170 - DNA, 20 bp, Artificial Sequence
  Description of Artificial Sequence: Synthetic oligonucleotide
  Target: LAMA2; (+) strand; PAM type: NRG; PAM sequence: TGG
tgaaggcctgtggcagtcat

SEQ ID NO: 137171 - DNA, 20 bp, Artificial Sequence
  Description of Artificial Sequence: Synthetic oligonucleotide
  Target: LAMA2; (+) strand; PAM type: NRG; PAM sequence: GGG
gaaggcctgtggcagtcatt

SEQ ID NO: 137172 - DNA, 20 bp, Artificial Sequence
  Description of Artificial Sequence: Synthetic oligonucleotide
  Target: LAMA2; (+) strand; PAM type: NRG; PAM sequence: CAG
gtcattgggtttactaactc

SEQ ID NO: 137173 - DNA, 20 bp, Artificial Sequence
  Description of Artificial Sequence: Synthetic oligonucleotide
  Target: LAMA2; (+) strand; PAM type: NRG; PAM sequence: AAG
tttactaactccagatacca

SEQ ID NO: 137174 - DNA, 20 bp, Artificial Sequence
  Description of Artificial Sequence: Synthetic oligonucleotide
  Target: LAMA2; (+) strand; PAM type: NRG; PAM sequence: TGG
actaactccagataccaaag

SEQ ID NO: 137175 - DNA, 20 bp, Artificial Sequence
  Description of Artificial Sequence: Synthetic oligonucleotide
  Target: LAMA2; (+) strand; PAM type: NRG; PAM sequence: GAG
cagataccaaagtggtttct

SEQ ID NO: 137176 - DNA, 20 bp, Artificial Sequence
  Description of Artificial Sequence: Synthetic oligonucleotide
  Target: LAMA2; (+) strand; PAM type: NRG; PAM sequence: AGG
agataccaaagtggtttctg

SEQ ID NO: 137177 - DNA, 20 bp, Artificial Sequence
  Description of Artificial Sequence: Synthetic oligonucleotide
  Target: LAMA2; (+) strand; PAM type: NRG; PAM sequence: GGG
gataccaaagtggtttctga

SEQ ID NO: 137178 - DNA, 20 bp, Artificial Sequence
  Description of Artificial Sequence: Synthetic oligonucleotide
  Target: LAMA2; (+) strand; PAM type: NRG; PAM sequence: TGG
caaagtggtttctgagggtg

SEQ ID NO: 137179 - DNA, 20 bp, Artificial Sequence
  Description of Artificial Sequence: Synthetic oligonucleotide
  Target: LAMA2; (+) strand; PAM type: NRG; PAM sequence: CAG
tgagggtgtggttattaact

SEQ ID NO: 137180 - DNA, 20 bp, Artificial Sequence
  Description of Artificial Sequence: Synthetic oligonucleotide
  Target: LAMA2; (+) strand; PAM type: NRG; PAM sequence: AGG
gagggtgtggttattaactc

SEQ ID NO: 137181 - DNA, 20 bp, Artificial Sequence
  Description of Artificial Sequence: Synthetic oligonucleotide
  Target: LAMA2; (+) strand; PAM type: NRG; PAM sequence: TGG
ctcaggctgtcatcattcat

SEQ ID NO: 137182 - DNA, 20 bp, Artificial Sequence
  Description of Artificial Sequence: Synthetic oligonucleotide
  Target: LAMA2; (+) strand; PAM type: NRG; PAM sequence: CAG
ttcattggtaatttatgtgc

SEQ ID NO: 137183 - DNA, 20 bp, Artificial Sequence
  Description of Artificial Sequence: Synthetic oligonucleotide
  Target: LAMA2; (+) strand; PAM type: NRG; PAM sequence: GAG
atgtgccagatattgtgcct

SEQ ID NO: 137184 - DNA, 20 bp, Artificial Sequence
  Description of Artificial Sequence: Synthetic oligonucleotide
  Target: LAMA2; (+) strand; PAM type: NRG; PAM sequence: CAG
cagatattgtgcctgagatc

SEQ ID NO: 137185 - DNA, 20 bp, Artificial Sequence
  Description of Artificial Sequence: Synthetic oligonucleotide
  Target: LAMA2; (+) strand; PAM type: NRG; PAM sequence: AGG
agatattgtgcctgagatcc

SEQ ID NO: 137186 - DNA, 20 bp, Artificial Sequence
  Description of Artificial Sequence: Synthetic oligonucleotide
  Target: LAMA2; (+) strand; PAM type: NRG; PAM sequence: GAG
atattgtgcctgagatccag

SEQ ID NO: 137187 - DNA, 20 bp, Artificial Sequence
  Description of Artificial Sequence: Synthetic oligonucleotide
  Target: LAMA2; (+) strand; PAM type: NRG; PAM sequence: AGG
tattgtgcctgagatccagg

SEQ ID NO: 137188 - DNA, 20 bp, Artificial Sequence
  Description of Artificial Sequence: Synthetic oligonucleotide
  Target: LAMA2; (+) strand; PAM type: NRG; PAM sequence: AAG
gcctgagatccaggaggaat

SEQ ID NO: 137189 - DNA, 20 bp, Artificial Sequence
  Description of Artificial Sequence: Synthetic oligonucleotide
  Target: LAMA2; (+) strand; PAM type: NRG; PAM sequence: AGG
cctgagatccaggaggaata

SEQ ID NO: 137190 - DNA, 20 bp, Artificial Sequence
  Description of Artificial Sequence: Synthetic oligonucleotide
  Target: LAMA2; (+) strand; PAM type: NRG; PAM sequence: TAG
gagatccaggaggaataagg

SEQ ID NO: 137191 - DNA, 20 bp, Artificial Sequence
  Description of Artificial Sequence: Synthetic oligonucleotide
  Target: LAMA2; (+) strand; PAM type: NRG; PAM sequence: AGG
agatccaggaggaataaggt

SEQ ID NO: 137192 - DNA, 20 bp, Artificial Sequence
  Description of Artificial Sequence: Synthetic oligonucleotide
  Target: LAMA2; (+) strand; PAM type: NRG; PAM sequence: GAG
taaggtaggatatcgtcttt

SEQ ID NO: 137193 - DNA, 20 bp, Artificial Sequence
  Description of Artificial Sequence: Synthetic oligonucleotide
  Target: LAMA2; (+) strand; PAM type: NRG; PAM sequence: TAG
gtctttgagctactgatata

SEQ ID NO: 137194 - DNA, 20 bp, Artificial Sequence
  Description of Artificial Sequence: Synthetic oligonucleotide
  Target: LAMA2; (+) strand; PAM type: NRG; PAM sequence: TGG
tgagctactgatatatagtg

SEQ ID NO: 137195 - DNA, 20 bp, Artificial Sequence
  Description of Artificial Sequence: Synthetic oligonucleotide
  Target: LAMA2; (+) strand; PAM type: NRG; PAM sequence: AAG
ctactgatatatagtgtggt

SEQ ID NO: 137196 - DNA, 20 bp, Artificial Sequence
  Description of Artificial Sequence: Synthetic oligonucleotide
  Target: LAMA2; (+) strand; PAM type: NRG; PAM sequence: AAG
tatatagtgtggtaagtaca

SEQ ID NO: 137197 - DNA, 20 bp, Artificial Sequence
  Description of Artificial Sequence: Synthetic oligonucleotide
  Target: LAMA2; (+) strand; PAM type: NRG; PAM sequence: AGG
atatagtgtggtaagtacaa

SEQ ID NO: 137198 - DNA, 20 bp, Artificial Sequence
  Description of Artificial Sequence: Synthetic oligonucleotide
  Target: LAMA2; (+) strand; PAM type: NRG; PAM sequence: AAG
agtgtggtaagtacaaagga

SEQ ID NO: 137199 - DNA, 20 bp, Artificial Sequence
  Description of Artificial Sequence: Synthetic oligonucleotide
  Target: LAMA2; (+) strand; PAM type: NRG; PAM sequence: GAG
gtaagtacaaaggaaagaat

SEQ ID NO: 137200 - DNA, 20 bp, Artificial Sequence
  Description of Artificial Sequence: Synthetic oligonucleotide
  Target: LAMA2; (+) strand; PAM type: NRG; PAM sequence: CAG
tacaaaggaaagaatgagca

SEQ ID NO: 137201 - DNA, 20 bp, Artificial Sequence
  Description of Artificial Sequence: Synthetic oligonucleotide
  Target: LAMA2; (+) strand; PAM type: NRG; PAM sequence: CAG
agaatgagcacagcgttctg

SEQ ID NO: 137202 - DNA, 20 bp, Artificial Sequence
  Description of Artificial Sequence: Synthetic oligonucleotide
  Target: LAMA2; (+) strand; PAM type: NRG; PAM sequence: AAG
atgagcacagcgttctgcag

SEQ ID NO: 137203 - DNA, 20 bp, Artificial Sequence
  Description of Artificial Sequence: Synthetic oligonucleotide
  Target: LAMA2; (+) strand; PAM type: NRG; PAM sequence: GAG
gagcacagcgttctgcagaa

SEQ ID NO: 137204 - DNA, 20 bp, Artificial Sequence
  Description of Artificial Sequence: Synthetic oligonucleotide
  Target: LAMA2; (+) strand; PAM type: NRG; PAM sequence: GAG
gcacagcgttctgcagaaga

SEQ ID NO: 137205 - DNA, 20 bp, Artificial Sequence
  Description of Artificial Sequence: Synthetic oligonucleotide
  Target: LAMA2; (+) strand; PAM type: NRG; PAM sequence: GAG
acagcgttctgcagaagaga

SEQ ID NO: 137206 - DNA, 20 bp, Artificial Sequence
  Description of Artificial Sequence: Synthetic oligonucleotide
  Target: LAMA2; (+) strand; PAM type: NRG; PAM sequence: AGG
cagcgttctgcagaagagag

SEQ ID NO: 137207 - DNA, 20 bp, Artificial Sequence
  Description of Artificial Sequence: Synthetic oligonucleotide
  Target: LAMA2; (+) strand; PAM type: NRG; PAM sequence: TGG
gttctgcagaagagagagga

SEQ ID NO: 137208 - DNA, 20 bp, Artificial Sequence
  Description of Artificial Sequence: Synthetic oligonucleotide
  Target: LAMA2; (+) strand; PAM type: NRG; PAM sequence: AAG
gaagagagaggatggccaca

SEQ ID NO: 137209 - DNA, 20 bp, Artificial Sequence
  Description of Artificial Sequence: Synthetic oligonucleotide
  Target: LAMA2; (+) strand; PAM type: NRG; PAM sequence: AGG
aagagagaggatggccacaa

SEQ ID NO: 137210 - DNA, 20 bp, Artificial Sequence
  Description of Artificial Sequence: Synthetic oligonucleotide
  Target: LAMA2; (+) strand; PAM type: NRG; PAM sequence: TGG
agaggatggccacaaaggct

SEQ ID NO: 137211 - DNA, 20 bp, Artificial Sequence
  Description of Artificial Sequence: Synthetic oligonucleotide
  Target: LAMA2; (+) strand; PAM type: NRG; PAM sequence: AAG
tggccacaaaggcttggtgt

SEQ ID NO: 137212 - DNA, 20 bp, Artificial Sequence
  Description of Artificial Sequence: Synthetic oligonucleotide
  Target: LAMA2; (+) strand; PAM type: NRG; PAM sequence: AAG
acaaaggcttggtgtaagta

SEQ ID NO: 137213 - DNA, 20 bp, Artificial Sequence
  Description of Artificial Sequence: Synthetic oligonucleotide
  Target: LAMA2; (+) strand; PAM type: NRG; PAM sequence: AGG
caaaggcttggtgtaagtaa

SEQ ID NO: 137214 - DNA, 20 bp, Artificial Sequence
  Description of Artificial Sequence: Synthetic oligonucleotide
  Target: LAMA2; (+) strand; PAM type: NRG; PAM sequence: CAG
tggtgtaagtaaaggcttgc

SEQ ID NO: 137215 - DNA, 20 bp, Artificial Sequence
  Description of Artificial Sequence: Synthetic oligonucleotide
  Target: LAMA2; (+) strand; PAM type: NRG; PAM sequence: AAG
tgtaagtaaaggcttgccag

SEQ ID NO: 137216 - DNA, 20 bp, Artificial Sequence
  Description of Artificial Sequence: Synthetic oligonucleotide
  Target: LAMA2; (+) strand; PAM type: NRG; PAM sequence: AGG
gtaagtaaaggcttgccaga

SEQ ID NO: 137217 - DNA, 20 bp, Artificial Sequence
  Description of Artificial Sequence: Synthetic oligonucleotide
  Target: LAMA2; (+) strand; PAM type: NRG; PAM sequence: GAG
aagtaaaggcttgccagaag

SEQ ID NO: 137218 - DNA, 20 bp, Artificial Sequence
  Description of Artificial Sequence: Synthetic oligonucleotide
  Target: LAMA2; (+) strand; PAM type: NRG; PAM sequence: AAG
tgccagaaggagcgatatcc

SEQ ID NO: 137219 - DNA, 20 bp, Artificial Sequence
  Description of Artificial Sequence: Synthetic oligonucleotide
  Target: LAMA2; (+) strand; PAM type: NRG; PAM sequence: AAG
cgatatccaagctgatgacc

SEQ ID NO: 137220 - DNA, 20 bp, Artificial Sequence
  Description of Artificial Sequence: Synthetic oligonucleotide
  Target: LAMA2; (+) strand; PAM type: NRG; PAM sequence: AGG
gatatccaagctgatgacca

SEQ ID NO: 137221 - DNA, 20 bp, Artificial Sequence
  Description of Artificial Sequence: Synthetic oligonucleotide
  Target: LAMA2; (+) strand; PAM type: NRG; PAM sequence: GAG
aagctgatgaccaaggacat

SEQ ID NO: 137222 - DNA, 20 bp, Artificial Sequence
  Description of Artificial Sequence: Synthetic oligonucleotide
  Target: LAMA2; (+) strand; PAM type: NRG; PAM sequence: AAG
accaaggacatgagctaaac

SEQ ID NO: 137223 - DNA, 20 bp, Artificial Sequence
  Description of Artificial Sequence: Synthetic oligonucleotide
  Target: LAMA2; (+) strand; PAM type: NRG; PAM sequence: AGG
ccaaggacatgagctaaaca

SEQ ID NO: 137224 - DNA, 20 bp, Artificial Sequence
  Description of Artificial Sequence: Synthetic oligonucleotide
  Target: LAMA2; (+) strand; PAM type: NRG; PAM sequence: GGG
caaggacatgagctaaacaa

SEQ ID NO: 137225 - DNA, 20 bp, Artificial Sequence
  Description of Artificial Sequence: Synthetic oligonucleotide
  Target: LAMA2; (+) strand; PAM type: NRG; PAM sequence: GAG
catgagctaaacaagggtat

SEQ ID NO: 137226 - DNA, 20 bp, Artificial Sequence
  Description of Artificial Sequence: Synthetic oligonucleotide
  Target: LAMA2; (+) strand; PAM type: NRG; PAM sequence: CAG
aaacaagggtatgagataaa

SEQ ID NO: 137227 - DNA, 20 bp, Artificial Sequence
  Description of Artificial Sequence: Synthetic oligonucleotide
  Target: LAMA2; (+) strand; PAM type: NRG; PAM sequence: AGG
aacaagggtatgagataaac

SEQ ID NO: 137228 - DNA, 20 bp, Artificial Sequence
  Description of Artificial Sequence: Synthetic oligonucleotide
  Target: LAMA2; (+) strand; PAM type: NRG; PAM sequence: AAG
gggtatgagataaacaggta

SEQ ID NO: 137229 - DNA, 20 bp, Artificial Sequence
  Description of Artificial Sequence: Synthetic oligonucleotide
  Target: LAMA2; (+) strand; PAM type: NRG; PAM sequence: GAG
gtatgagataaacaggtaaa

SEQ ID NO: 137230 - DNA, 20 bp, Artificial Sequence
  Description of Artificial Sequence: Synthetic oligonucleotide
  Target: LAMA2; (+) strand; PAM type: NRG; PAM sequence: AGG
tatgagataaacaggtaaag

SEQ ID NO: 137231 - DNA, 20 bp, Artificial Sequence
  Description of Artificial Sequence: Synthetic oligonucleotide
  Target: LAMA2; (+) strand; PAM type: NRG; PAM sequence: GAG
agataaacaggtaaagaggt

SEQ ID NO: 137232 - DNA, 20 bp, Artificial Sequence
  Description of Artificial Sequence: Synthetic oligonucleotide
  Target: LAMA2; (+) strand; PAM type: NRG; PAM sequence: AGG
gataaacaggtaaagaggtg

SEQ ID NO: 137233 - DNA, 20 bp, Artificial Sequence
  Description of Artificial Sequence: Synthetic oligonucleotide
  Target: LAMA2; (+) strand; PAM type: NRG; PAM sequence: GGG
ataaacaggtaaagaggtga

SEQ ID NO: 137234 - DNA, 20 bp, Artificial Sequence
  Description of Artificial Sequence: Synthetic oligonucleotide
  Target: LAMA2; (+) strand; PAM type: NRG; PAM sequence: GAG
aaacaggtaaagaggtgagg

SEQ ID NO: 137235 - DNA, 20 bp, Artificial Sequence
  Description of Artificial Sequence: Synthetic oligonucleotide
  Target: LAMA2; (+) strand; PAM type: NRG; PAM sequence: AGG
aacaggtaaagaggtgaggg

SEQ ID NO: 137236 - DNA, 20 bp, Artificial Sequence
  Description of Artificial Sequence: Synthetic oligonucleotide
  Target: LAMA2; (+) strand; PAM type: NRG; PAM sequence: GGG
acaggtaaagaggtgaggga

SEQ ID NO: 137237 - DNA, 20 bp, Artificial Sequence
  Description of Artificial Sequence: Synthetic oligonucleotide
  Target: LAMA2; (+) strand; PAM type: NRG; PAM sequence: GGG
caggtaaagaggtgagggag

SEQ ID NO: 137238 - DNA, 20 bp, Artificial Sequence
  Description of Artificial Sequence: Synthetic oligonucleotide
  Target: LAMA2; (+) strand; PAM type: NRG; PAM sequence: AAG
gtaaagaggtgagggagggg

SEQ ID NO: 137239 - DNA, 20 bp, Artificial Sequence
  Description of Artificial Sequence: Synthetic oligonucleotide
  Target: LAMA2; (+) strand; PAM type: NRG; PAM sequence: GAG
aaagaggtgagggaggggaa

SEQ ID NO: 137240 - DNA, 20 bp, Artificial Sequence
  Description of Artificial Sequence: Synthetic oligonucleotide
  Target: LAMA2; (+) strand; PAM type: NRG; PAM sequence: AGG
aagaggtgagggaggggaag

SEQ ID NO: 137241 - DNA, 20 bp, Artificial Sequence
  Description of Artificial Sequence: Synthetic oligonucleotide
  Target: LAMA2; (+) strand; PAM type: NRG; PAM sequence: GAG
gaggtgagggaggggaagag

SEQ ID NO: 137242 - DNA, 20 bp, Artificial Sequence
  Description of Artificial Sequence: Synthetic oligonucleotide
  Target: LAMA2; (+) strand; PAM type: NRG; PAM sequence: AAG
gtgagggaggggaagaggag

SEQ ID NO: 137243 - DNA, 20 bp, Artificial Sequence
  Description of Artificial Sequence: Synthetic oligonucleotide
  Target: LAMA2; (+) strand; PAM type: NRG; PAM sequence: CAG
gggaagaggagaagtcatgc

SEQ ID NO: 137244 - DNA, 20 bp, Artificial Sequence
  Description of Artificial Sequence: Synthetic oligonucleotide
  Target: LAMA2; (+) strand; PAM type: NRG; PAM sequence: AGG
ggaagaggagaagtcatgcc

SEQ ID NO: 137245 - DNA, 20 bp, Artificial Sequence
  Description of Artificial Sequence: Synthetic oligonucleotide
  Target: LAMA2; (+) strand; PAM type: NRG; PAM sequence: AAG
agaggagaagtcatgccagg

SEQ ID NO: 137246 - DNA, 20 bp, Artificial Sequence
  Description of Artificial Sequence: Synthetic oligonucleotide
  Target: LAMA2; (+) strand; PAM type: NRG; PAM sequence: GAG
aggagaagtcatgccaggaa

SEQ ID NO: 137247 - DNA, 20 bp, Artificial Sequence
  Description of Artificial Sequence: Synthetic oligonucleotide
  Target: LAMA2; (+) strand; PAM type: NRG; PAM sequence: CAG
gtcatgccaggaagagaaat

SEQ ID NO: 137248 - DNA, 20 bp, Artificial Sequence
  Description of Artificial Sequence: Synthetic oligonucleotide
  Target: LAMA2; (+) strand; PAM type: NRG; PAM sequence: TAG
ccaggaagagaaatcagaat

SEQ ID NO: 137249 - DNA, 20 bp, Artificial Sequence
  Description of Artificial Sequence: Synthetic oligonucleotide
  Target: LAMA2; (+) strand; PAM type: NRG; PAM sequence: CAG
gaagagaaatcagaattaga

SEQ ID NO: 137250 - DNA, 20 bp, Artificial Sequence
  Description of Artificial Sequence: Synthetic oligonucleotide
  Target: LAMA2; (+) strand; PAM type: NRG; PAM sequence: TAG
cagaattagacagaaaatcc

SEQ ID NO: 137251 - DNA, 20 bp, Artificial Sequence
  Description of Artificial Sequence: Synthetic oligonucleotide
  Target: LAMA2; (+) strand; PAM type: NRG; PAM sequence: CGG
gacagaaaatcctagttact

SEQ ID NO: 137252 - DNA, 20 bp, Artificial Sequence
  Description of Artificial Sequence: Synthetic oligonucleotide
  Target: LAMA2; (+) strand; PAM type: NRG; PAM sequence: GGG
acagaaaatcctagttactc

SEQ ID NO: 137253 - DNA, 20 bp, Artificial Sequence
  Description of Artificial Sequence: Synthetic oligonucleotide
  Target: LAMA2; (+) strand; PAM type: NRG; PAM sequence: GGG
cagaaaatcctagttactcg

SEQ ID NO: 137254 - DNA, 20 bp, Artificial Sequence
  Description of Artificial Sequence: Synthetic oligonucleotide
  Target: LAMA2; (+) strand; PAM type: NRG; PAM sequence: GAG
gaaaatcctagttactcggg

SEQ ID NO: 137255 - DNA, 20 bp, Artificial Sequence
  Description of Artificial Sequence: Synthetic oligonucleotide
  Target: LAMA2; (+) strand; PAM type: NRG; PAM sequence: AAG
ctagttactcggggagctac

SEQ ID NO: 137256 - DNA, 20 bp, Artificial Sequence
  Description of Artificial Sequence: Synthetic oligonucleotide
  Target: LAMA2; (+) strand; PAM type: NRG; PAM sequence: TAG
gttactcggggagctacaag

SEQ ID NO: 137257 - DNA, 20 bp, Artificial Sequence
  Description of Artificial Sequence: Synthetic oligonucleotide
  Target: LAMA2; (+) strand; PAM type: NRG; PAM sequence: AGG
ttactcggggagctacaagt

SEQ ID NO: 137258 - DNA, 20 bp, Artificial Sequence
  Description of Artificial Sequence: Synthetic oligonucleotide
  Target: LAMA2; (+) strand; PAM type: NRG; PAM sequence: TAG
gagctacaagtaggaatgac

SEQ ID NO: 137259 - DNA, 20 bp, Artificial Sequence
  Description of Artificial Sequence: Synthetic oligonucleotide
  Target: LAMA2; (+) strand; PAM type: NRG; PAM sequence: AAG
gtaggaatgactagaactga

SEQ ID NO: 137260 - DNA, 20 bp, Artificial Sequence
  Description of Artificial Sequence: Synthetic oligonucleotide
  Target: LAMA2; (+) strand; PAM type: NRG; PAM sequence: AAG
gactagaactgaaagtgcca

SEQ ID NO: 137261 - DNA, 20 bp, Artificial Sequence
  Description of Artificial Sequence: Synthetic oligonucleotide
  Target: LAMA2; (+) strand; PAM type: NRG; PAM sequence: AGG
actagaactgaaagtgccaa

SEQ ID NO: 137262 - DNA, 20 bp, Artificial Sequence
  Description of Artificial Sequence: Synthetic oligonucleotide
  Target: LAMA2; (+) strand; PAM type: NRG; PAM sequence: GGG
ctagaactgaaagtgccaaa

SEQ ID NO: 137263 - DNA, 20 bp, Artificial Sequence
  Description of Artificial Sequence: Synthetic oligonucleotide
  Target: LAMA2; (+) strand; PAM type: NRG; PAM sequence: CAG
gaactgaaagtgccaaaggg

SEQ ID NO: 137264 - DNA, 20 bp, Artificial Sequence
  Description of Artificial Sequence: Synthetic oligonucleotide
  Target: LAMA2; (+) strand; PAM type: NRG; PAM sequence: GAG
actgaaagtgccaaagggca

SEQ ID NO: 137265 - DNA, 20 bp, Artificial Sequence
  Description of Artificial Sequence: Synthetic oligonucleotide
  Target: LAMA2; (+) strand; PAM type: NRG; PAM sequence: GAG
tgaaagtgccaaagggcaga

SEQ ID NO: 137266 - DNA, 20 bp, Artificial Sequence
  Description of Artificial Sequence: Synthetic oligonucleotide
  Target: LAMA2; (+) strand; PAM type: NRG; PAM sequence: TAG
aagtgccaaagggcagagag

SEQ ID NO: 137267 - DNA, 20 bp, Artificial Sequence
  Description of Artificial Sequence: Synthetic oligonucleotide
  Target: LAMA2; (+) strand; PAM type: NRG; PAM sequence: GAG
gtgccaaagggcagagagta

SEQ ID NO: 137268 - DNA, 20 bp, Artificial Sequence
  Description of Artificial Sequence: Synthetic oligonucleotide
  Target: LAMA2; (+) strand; PAM type: NRG; PAM sequence: GAG
aaagggcagagagtagagat

SEQ ID NO: 137269 - DNA, 20 bp, Artificial Sequence
  Description of Artificial Sequence: Synthetic oligonucleotide
  Target: LAMA2; (+) strand; PAM type: NRG; PAM sequence: TAG
gcagagagtagagatgagac

SEQ ID NO: 137270 - DNA, 20 bp, Artificial Sequence
  Description of Artificial Sequence: Synthetic oligonucleotide
  Target: LAMA2; (+) strand; PAM type: NRG; PAM sequence: GAG
agagagtagagatgagacta

SEQ ID NO: 137271 - DNA, 20 bp, Artificial Sequence
  Description of Artificial Sequence: Synthetic oligonucleotide
  Target: LAMA2; (+) strand; PAM type: NRG; PAM sequence: AAG
tagagatgagactagagcaa

SEQ ID NO: 137272 - DNA, 20 bp, Artificial Sequence
  Description of Artificial Sequence: Synthetic oligonucleotide
  Target: LAMA2; (+) strand; PAM type: NRG; PAM sequence: AGG
agagatgagactagagcaaa

SEQ ID NO: 137273 - DNA, 20 bp, Artificial Sequence
  Description of Artificial Sequence: Synthetic oligonucleotide
  Target: LAMA2; (+) strand; PAM type: NRG; PAM sequence: TGG
atgagactagagcaaaaggc

SEQ ID NO: 137274 - DNA, 20 bp, Artificial Sequence
  Description of Artificial Sequence: Synthetic oligonucleotide
  Target: LAMA2; (+) strand; PAM type: NRG; PAM sequence: GAG
gagactagagcaaaaggctg

SEQ ID NO: 137275 - DNA, 20 bp, Artificial Sequence
  Description of Artificial Sequence: Synthetic oligonucleotide
  Target: LAMA2; (+) strand; PAM type: NRG; PAM sequence: CAG
ctagagcaaaaggctggagc

SEQ ID NO: 137276 - DNA, 20 bp, Artificial Sequence
  Description of Artificial Sequence: Synthetic oligonucleotide
  Target: LAMA2; (+) strand; PAM type: NRG; PAM sequence: AAG
aaggctggagccagattatg

SEQ ID NO: 137277 - DNA, 20 bp, Artificial Sequence
  Description of Artificial Sequence: Synthetic oligonucleotide
  Target: LAMA2; (+) strand; PAM type: NRG; PAM sequence: AGG
aggctggagccagattatga

SEQ ID NO: 137278 - DNA, 20 bp, Artificial Sequence
  Description of Artificial Sequence: Synthetic oligonucleotide
  Target: LAMA2; (+) strand; PAM type: NRG; PAM sequence: CAG
atgaaggcatttaacaacca

SEQ ID NO: 137279 - DNA, 20 bp, Artificial Sequence
  Description of Artificial Sequence: Synthetic oligonucleotide
  Target: LAMA2; (+) strand; PAM type: NRG; PAM sequence: AGG
tgaaggcatttaacaaccac

SEQ ID NO: 137280 - DNA, 20 bp, Artificial Sequence
  Description of Artificial Sequence: Synthetic oligonucleotide
  Target: LAMA2; (+) strand; PAM type: NRG; PAM sequence: GAG
aaggcatttaacaaccacag

SEQ ID NO: 137281 - DNA, 20 bp, Artificial Sequence
  Description of Artificial Sequence: Synthetic oligonucleotide
  Target: LAMA2; (+) strand; PAM type: NRG; PAM sequence: AAG
gcatttaacaaccacaggag

SEQ ID NO: 137282 - DNA, 20 bp, Artificial Sequence
  Description of Artificial Sequence: Synthetic oligonucleotide
  Target: LAMA2; (+) strand; PAM type: NRG; PAM sequence: TAG
caaccacaggagaagtgatt

SEQ ID NO: 137283 - DNA, 20 bp, Artificial Sequence
  Description of Artificial Sequence: Synthetic oligonucleotide
  Target: LAMA2; (+) strand; PAM type: NRG; PAM sequence: AGG
aaccacaggagaagtgattt

SEQ ID NO: 137284 - DNA, 20 bp, Artificial Sequence
  Description of Artificial Sequence: Synthetic oligonucleotide
  Target: LAMA2; (+) strand; PAM type: NRG; PAM sequence: GGG
accacaggagaagtgattta

SEQ ID NO: 137285 - DNA, 20 bp, Artificial Sequence
  Description of Artificial Sequence: Synthetic oligonucleotide
  Target: LAMA2; (+) strand; PAM type: NRG; PAM sequence: GAG
cacaggagaagtgatttagg

SEQ ID NO: 137286 - DNA, 20 bp, Artificial Sequence
  Description of Artificial Sequence: Synthetic oligonucleotide
  Target: LAMA2; (+) strand; PAM type: NRG; PAM sequence: GAG
caggagaagtgatttaggga

SEQ ID NO: 137287 - DNA, 20 bp, Artificial Sequence
  Description of Artificial Sequence: Synthetic oligonucleotide
  Target: LAMA2; (+) strand; PAM type: NRG; PAM sequence: AGG
aggagaagtgatttagggag

SEQ ID NO: 137288 - DNA, 20 bp, Artificial Sequence
  Description of Artificial Sequence: Synthetic oligonucleotide
  Target: LAMA2; (+) strand; PAM type: NRG; PAM sequence: AAG
ttagggagaggcaccatgta

SEQ ID NO: 137289 - DNA, 20 bp, Artificial Sequence
  Description of Artificial Sequence: Synthetic oligonucleotide
  Target: LAMA2; (+) strand; PAM type: NRG; PAM sequence: CAG
accatgtaaagccctctttc

SEQ ID NO: 137290 - DNA, 20 bp, Artificial Sequence
  Description of Artificial Sequence: Synthetic oligonucleotide
  Target: LAMA2; (+) strand; PAM type: NRG; PAM sequence: CAG
tttccagcctctatgaacca

SEQ ID NO: 137291 - DNA, 20 bp, Artificial Sequence
  Description of Artificial Sequence: Synthetic oligonucleotide
  Target: LAMA2; (+) strand; PAM type: NRG; PAM sequence: CAG
tatgaaccacagtgatacct

SEQ ID NO: 137292 - DNA, 20 bp, Artificial Sequence
  Description of Artificial Sequence: Synthetic oligonucleotide
  Target: LAMA2; (+) strand; PAM type: NRG; PAM sequence: CAG
tcattgatgtatttattcaa

SEQ ID NO: 137293 - DNA, 20 bp, Artificial Sequence
  Description of Artificial Sequence: Synthetic oligonucleotide
  Target: LAMA2; (+) strand; PAM type: NRG; PAM sequence: AGG
cattgatgtatttattcaac

SEQ ID NO: 137294 - DNA, 20 bp, Artificial Sequence
  Description of Artificial Sequence: Synthetic oligonucleotide
  Target: LAMA2; (+) strand; PAM type: NRG; PAM sequence: TAG
ggcctttgaacacctcctac

SEQ ID NO: 137295 - DNA, 20 bp, Artificial Sequence
  Description of Artificial Sequence: Synthetic oligonucleotide
  Target: LAMA2; (+) strand; PAM type: NRG; PAM sequence: AAG
ttgaacacctcctactagca

SEQ ID NO: 137296 - DNA, 20 bp, Artificial Sequence
  Description of Artificial Sequence: Synthetic oligonucleotide
  Target: LAMA2; (+) strand; PAM type: NRG; PAM sequence: TGG
ctactagcaaagcattgtat

SEQ ID NO: 137297 - DNA, 20 bp, Artificial Sequence
  Description of Artificial Sequence: Synthetic oligonucleotide
  Target: LAMA2; (+) strand; PAM type: NRG; PAM sequence: GAG
actagcaaagcattgtattg

SEQ ID NO: 137298 - DNA, 20 bp, Artificial Sequence
  Description of Artificial Sequence: Synthetic oligonucleotide
  Target: LAMA2; (+) strand; PAM type: NRG; PAM sequence: CAG
attacacataacccctgatt

SEQ ID NO: 137299 - DNA, 20 bp, Artificial Sequence
  Description of Artificial Sequence: Synthetic oligonucleotide
  Target: LAMA2; (+) strand; PAM type: NRG; PAM sequence: GAG
tacacataacccctgattca

SEQ ID NO: 137300 - DNA, 20 bp, Artificial Sequence
  Description of Artificial Sequence: Synthetic oligonucleotide
  Target: LAMA2; (+) strand; PAM type: NRG; PAM sequence: AGG
acacataacccctgattcag

SEQ ID NO: 137301 - DNA, 20 bp, Artificial Sequence
  Description of Artificial Sequence: Synthetic oligonucleotide
  Target: LAMA2; (+) strand; PAM type: NRG; PAM sequence: TAG
aacccctgattcagaggacc

SEQ ID NO: 137302 - DNA, 20 bp, Artificial Sequence
  Description of Artificial Sequence: Synthetic oligonucleotide
  Target: LAMA2; (+) strand; PAM type: NRG; PAM sequence: GAG
cccctgattcagaggaccta

SEQ ID NO: 137303 - DNA, 20 bp, Artificial Sequence
  Description of Artificial Sequence: Synthetic oligonucleotide
  Target: LAMA2; (+) strand; PAM type: NRG; PAM sequence: AGG
ccctgattcagaggacctag

SEQ ID NO: 137304 - DNA, 20 bp, Artificial Sequence
  Description of Artificial Sequence: Synthetic oligonucleotide
  Target: LAMA2; (+) strand; PAM type: NRG; PAM sequence: GGG
cctgattcagaggacctaga

SEQ ID NO: 137305 - DNA, 20 bp, Artificial Sequence
  Description of Artificial Sequence: Synthetic oligonucleotide
  Target: LAMA2; (+) strand; PAM type: NRG; PAM sequence: GGG
ctgattcagaggacctagag

SEQ ID NO: 137306 - DNA, 20 bp, Artificial Sequence
  Description of Artificial Sequence: Synthetic oligonucleotide
  Target: LAMA2; (+) strand; PAM type: NRG; PAM sequence: TAG
cagaggacctagaggggaaa

SEQ ID NO: 137307 - DNA, 20 bp, Artificial Sequence
  Description of Artificial Sequence: Synthetic oligonucleotide
  Target: LAMA2; (+) strand; PAM type: NRG; PAM sequence: GAG
gaggacctagaggggaaata

SEQ ID NO: 137308 - DNA, 20 bp, Artificial Sequence
  Description of Artificial Sequence: Synthetic oligonucleotide
  Target: LAMA2; (+) strand; PAM type: NRG; PAM sequence: AGG
aggacctagaggggaaatag

SEQ ID NO: 137309 - DNA, 20 bp, Artificial Sequence
  Description of Artificial Sequence: Synthetic oligonucleotide
  Target: LAMA2; (+) strand; PAM type: NRG; PAM sequence: AAG
tagaggggaaatagaggcaa

SEQ ID NO: 137310 - DNA, 20 bp, Artificial Sequence
  Description of Artificial Sequence: Synthetic oligonucleotide
  Target: LAMA2; (+) strand; PAM type: NRG; PAM sequence: AAG
gggaaatagaggcaaaagaa

SEQ ID NO: 137311 - DNA, 20 bp, Artificial Sequence
  Description of Artificial Sequence: Synthetic oligonucleotide
  Target: LAMA2; (+) strand; PAM type: NRG; PAM sequence: CAG
aggcaaaagaaaagtaaatt

SEQ ID NO: 137312 - DNA, 20 bp, Artificial Sequence
  Description of Artificial Sequence: Synthetic oligonucleotide
  Target: LAMA2; (+) strand; PAM type: NRG; PAM sequence: TAG
aataacatgaatgctccatg

SEQ ID NO: 137313 - DNA, 20 bp, Artificial Sequence
  Description of Artificial Sequence: Synthetic oligonucleotide
  Target: LAMA2; (+) strand; PAM type: NRG; PAM sequence: AAG
aatgctccatgtagatgcta

SEQ ID NO: 137314 - DNA, 20 bp, Artificial Sequence
  Description of Artificial Sequence: Synthetic oligonucleotide
  Target: LAMA2; (+) strand; PAM type: NRG; PAM sequence: AAG
gtagatgctaaagtcatcta

SEQ ID NO: 137315 - DNA, 20 bp, Artificial Sequence
  Description of Artificial Sequence: Synthetic oligonucleotide
  Target: LAMA2; (+) strand; PAM type: NRG; PAM sequence: TGG
taaagtcatctaaagatttc

SEQ ID NO: 137316 - DNA, 20 bp, Artificial Sequence
  Description of Artificial Sequence: Synthetic oligonucleotide
  Target: LAMA2; (+) strand; PAM type: NRG; PAM sequence: AAG
tcatctaaagatttctggct

SEQ ID NO: 137317 - DNA, 20 bp, Artificial Sequence
  Description of Artificial Sequence: Synthetic oligonucleotide
  Target: LAMA2; (+) strand; PAM type: NRG; PAM sequence: TAG
atatatatataaaatatata

SEQ ID NO: 137318 - DNA, 20 bp, Artificial Sequence
  Description of Artificial Sequence: Synthetic oligonucleotide
  Target: LAMA2; (+) strand; PAM type: NRG; PAM sequence: CAG
tatatataaaatatatatag

SEQ ID NO: 137319 - DNA, 20 bp, Artificial Sequence
  Description of Artificial Sequence: Synthetic oligonucleotide
  Target: LAMA2; (+) strand; PAM type: NRG; PAM sequence: AGG
atatataaaatatatatagc

SEQ ID NO: 137320 - DNA, 20 bp, Artificial Sequence
  Description of Artificial Sequence: Synthetic oligonucleotide
  Target: LAMA2; (+) strand; PAM type: NRG; PAM sequence: TAG
tataaaatatatatagcagg

SEQ ID NO: 137321 - DNA, 20 bp, Artificial Sequence
  Description of Artificial Sequence: Synthetic oligonucleotide
  Target: LAMA2; (+) strand; PAM type: NRG; PAM sequence: AAG
acttatatgtaatctacata

SEQ ID NO: 137322 - DNA, 20 bp, Artificial Sequence
  Description of Artificial Sequence: Synthetic oligonucleotide
  Target: LAMA2; (+) strand; PAM type: NRG; PAM sequence: AGG
cttatatgtaatctacataa

SEQ ID NO: 137323 - DNA, 20 bp, Artificial Sequence
  Description of Artificial Sequence: Synthetic oligonucleotide
  Target: LAMA2; (+) strand; PAM type: NRG; PAM sequence: CAG
tttatattatttttaatgaa

SEQ ID NO: 137324 - DNA, 20 bp, Artificial Sequence
  Description of Artificial Sequence: Synthetic oligonucleotide
  Target: LAMA2; (+) strand; PAM type: NRG; PAM sequence: GAG
tttatttttattttgttttt

SEQ ID NO: 137325 - DNA, 20 bp, Artificial Sequence
  Description of Artificial Sequence: Synthetic oligonucleotide
  Target: LAMA2; (+) strand; PAM type: NRG; PAM sequence: AGG
ttatttttattttgtttttg

SEQ ID NO: 137326 - DNA, 20 bp, Artificial Sequence
  Description of Artificial Sequence: Synthetic oligonucleotide
  Target: LAMA2; (+) strand; PAM type: NRG; PAM sequence: CAG
tttttattttgtttttgagg

SEQ ID NO: 137327 - DNA, 20 bp, Artificial Sequence
  Description of Artificial Sequence: Synthetic oligonucleotide
  Target: LAMA2; (+) strand; PAM type: NRG; PAM sequence: CAG
cagaatctcactctgtcacc

SEQ ID NO: 137328 - DNA, 20 bp, Artificial Sequence
  Description of Artificial Sequence: Synthetic oligonucleotide
  Target: LAMA2; (+) strand; PAM type: NRG; PAM sequence: AGG
agaatctcactctgtcaccc

SEQ ID NO: 137329 - DNA, 20 bp, Artificial Sequence
  Description of Artificial Sequence: Synthetic oligonucleotide
  Target: LAMA2; (+) strand; PAM type: NRG; PAM sequence: TGG
tctcactctgtcacccaggc

SEQ ID NO: 137330 - DNA, 20 bp, Artificial Sequence
  Description of Artificial Sequence: Synthetic oligonucleotide
  Target: LAMA2; (+) strand; PAM type: NRG; PAM sequence: GAG
tcactctgtcacccaggctg

SEQ ID NO: 137331 - DNA, 20 bp, Artificial Sequence
  Description of Artificial Sequence: Synthetic oligonucleotide
  Target: LAMA2; (+) strand; PAM type: NRG; PAM sequence: CAG
ctgtcacccaggctggagtg

SEQ ID NO: 137332 - DNA, 20 bp, Artificial Sequence
  Description of Artificial Sequence: Synthetic oligonucleotide
  Target: LAMA2; (+) strand; PAM type: NRG; PAM sequence: TGG
tcacccaggctggagtgcag

SEQ ID NO: 137333 - DNA, 20 bp, Artificial Sequence
  Description of Artificial Sequence: Synthetic oligonucleotide
  Target: LAMA2; (+) strand; PAM type: NRG; PAM sequence: CAG
ggagtgcagtggtgcgatct

SEQ ID NO: 137334 - DNA, 20 bp, Artificial Sequence
  Description of Artificial Sequence: Synthetic oligonucleotide
  Target: LAMA2; (+) strand; PAM type: NRG; PAM sequence: CGG
tcactgcaaccgccatctcc

SEQ ID NO: 137335 - DNA, 20 bp, Artificial Sequence
  Description of Artificial Sequence: Synthetic oligonucleotide
  Target: LAMA2; (+) strand; PAM type: NRG; PAM sequence: GGG
cactgcaaccgccatctccc

SEQ ID NO: 137336 - DNA, 20 bp, Artificial Sequence
  Description of Artificial Sequence: Synthetic oligonucleotide
  Target: LAMA2; (+) strand; PAM type: NRG; PAM sequence: AAG
aaccgccatctcccgggttc

SEQ ID NO: 137337 - DNA, 20 bp, Artificial Sequence
  Description of Artificial Sequence: Synthetic oligonucleotide
  Target: LAMA2; (+) strand; PAM type: NRG; PAM sequence: CAG
ttcaagcaattctcctgcct

SEQ ID NO: 137338 - DNA, 20 bp, Artificial Sequence
  Description of Artificial Sequence: Synthetic oligonucleotide
  Target: LAMA2; (+) strand; PAM type: NRG; PAM sequence: GAG
ttctcctgcctcagcctccc

SEQ ID NO: 137339 - DNA, 20 bp, Artificial Sequence
  Description of Artificial Sequence: Synthetic oligonucleotide
  Target: LAMA2; (+) strand; PAM type: NRG; PAM sequence: TAG
tcctgcctcagcctcccgag

SEQ ID NO: 137340 - DNA, 20 bp, Artificial Sequence
  Description of Artificial Sequence: Synthetic oligonucleotide
  Target: LAMA2; (+) strand; PAM type: NRG; PAM sequence: TGG
gcctcagcctcccgagtagc

SEQ ID NO: 137341 - DNA, 20 bp, Artificial Sequence
  Description of Artificial Sequence: Synthetic oligonucleotide
  Target: LAMA2; (+) strand; PAM type: NRG; PAM sequence: CAG
cctcccgagtagctggatta

SEQ ID NO: 137342 - DNA, 20 bp, Artificial Sequence
  Description of Artificial Sequence: Synthetic oligonucleotide
  Target: LAMA2; (+) strand; PAM type: NRG; PAM sequence: AGG
ctcccgagtagctggattac

SEQ ID NO: 137343 - DNA, 20 bp, Artificial Sequence
  Description of Artificial Sequence: Synthetic oligonucleotide
  Target: LAMA2; (+) strand; PAM type: NRG; PAM sequence: TGG
caggcacgtgacaccatgcc

SEQ ID NO: 137344 - DNA, 20 bp, Artificial Sequence
  Description of Artificial Sequence: Synthetic oligonucleotide
  Target: LAMA2; (+) strand; PAM type: NRG; PAM sequence: AAG
ctggctattttttgtatttc

SEQ ID NO: 137345 - DNA, 20 bp, Artificial Sequence
  Description of Artificial Sequence: Synthetic oligonucleotide
  Target: LAMA2; (+) strand; PAM type: NRG; PAM sequence: TAG
gctattttttgtatttcaag

SEQ ID NO: 137346 - DNA, 20 bp, Artificial Sequence
  Description of Artificial Sequence: Synthetic oligonucleotide
  Target: LAMA2; (+) strand; PAM type: NRG; PAM sequence: TGG
ttttgtatttcaagtagaaa

SEQ ID NO: 137347 - DNA, 20 bp, Artificial Sequence
  Description of Artificial Sequence: Synthetic oligonucleotide
  Target: LAMA2; (+) strand; PAM type: NRG; PAM sequence: GGG
tttgtatttcaagtagaaat

SEQ ID NO: 137348 - DNA, 20 bp, Artificial Sequence
  Description of Artificial Sequence: Synthetic oligonucleotide
  Target: LAMA2; (+) strand; PAM type: NRG; PAM sequence: GGG
ttgtatttcaagtagaaatg

SEQ ID NO: 137349 - DNA, 20 bp, Artificial Sequence
  Description of Artificial Sequence: Synthetic oligonucleotide
  Target: LAMA2; (+) strand; PAM type: NRG; PAM sequence: TGG
gaaatggggttttaccatgt

SEQ ID NO: 137350 - DNA, 20 bp, Artificial Sequence
  Description of Artificial Sequence: Synthetic oligonucleotide
  Target: LAMA2; (+) strand; PAM type: NRG; PAM sequence: CAG
tggggttttaccatgttggc

SEQ ID NO: 137351 - DNA, 20 bp, Artificial Sequence
  Description of Artificial Sequence: Synthetic oligonucleotide
  Target: LAMA2; (+) strand; PAM type: NRG; PAM sequence: AGG
ggggttttaccatgttggcc

SEQ ID NO: 137352 - DNA, 20 bp, Artificial Sequence
  Description of Artificial Sequence: Synthetic oligonucleotide
  Target: LAMA2; (+) strand; PAM type: NRG; PAM sequence: TGG
ttttaccatgttggccaggc

SEQ ID NO: 137353 - DNA, 20 bp, Artificial Sequence
  Description of Artificial Sequence: Synthetic oligonucleotide
  Target: LAMA2; (+) strand; PAM type: NRG; PAM sequence: AAG
ggtctcaaactcctgacctc

SEQ ID NO: 137354 - DNA, 20 bp, Artificial Sequence
  Description of Artificial Sequence: Synthetic oligonucleotide
  Target: LAMA2; (+) strand; PAM type: NRG; PAM sequence: CAG
cctcaagtgatcacccgctt

SEQ ID NO: 137355 - DNA, 20 bp, Artificial Sequence
  Description of Artificial Sequence: Synthetic oligonucleotide
  Target: LAMA2; (+) strand; PAM type: NRG; PAM sequence: TAG
cacccgcttcagcctcccaa

SEQ ID NO: 137356 - DNA, 20 bp, Artificial Sequence
  Description of Artificial Sequence: Synthetic oligonucleotide
  Target: LAMA2; (+) strand; PAM type: NRG; PAM sequence: AAG
tttcatatataatatattaa

SEQ ID NO: 137357 - DNA, 20 bp, Artificial Sequence
  Description of Artificial Sequence: Synthetic oligonucleotide
  Target: LAMA2; (+) strand; PAM type: NRG; PAM sequence: AGG
ttcatatataatatattaaa

SEQ ID NO: 137358 - DNA, 20 bp, Artificial Sequence
  Description of Artificial Sequence: Synthetic oligonucleotide
  Target: LAMA2; (+) strand; PAM type: NRG; PAM sequence: TAG
atatataatatattaaaagg

SEQ ID NO: 137359 - DNA, 20 bp, Artificial Sequence
  Description of Artificial Sequence: Synthetic oligonucleotide
  Target: LAMA2; (+) strand; PAM type: NRG; PAM sequence: TAG
aggtagatatatattatatg

SEQ ID NO: 137360 - DNA, 20 bp, Artificial Sequence
  Description of Artificial Sequence: Synthetic oligonucleotide
  Target: LAMA2; (+) strand; PAM type: NRG; PAM sequence: GAG
gtagatatatattatatgta

SEQ ID NO: 137361 - DNA, 20 bp, Artificial Sequence
  Description of Artificial Sequence: Synthetic oligonucleotide
  Target: LAMA2; (+) strand; PAM type: NRG; PAM sequence: GAG
agatatatattatatgtaga

SEQ ID NO: 137362 - DNA, 20 bp, Artificial Sequence
  Description of Artificial Sequence: Synthetic oligonucleotide
  Target: LAMA2; (+) strand; PAM type: NRG; PAM sequence: TAG
agatatattttacatatcta

SEQ ID NO: 137363 - DNA, 20 bp, Artificial Sequence
  Description of Artificial Sequence: Synthetic oligonucleotide
  Target: LAMA2; (+) strand; PAM type: NRG; PAM sequence: TAG
catatctatagatcgatcta

SEQ ID NO: 137364 - DNA, 20 bp, Artificial Sequence
  Description of Artificial Sequence: Synthetic oligonucleotide
  Target: LAMA2; (+) strand; PAM type: NRG; PAM sequence: TAG
tctatagatatctatatcta

SEQ ID NO: 137365 - DNA, 20 bp, Artificial Sequence
  Description of Artificial Sequence: Synthetic oligonucleotide
  Target: LAMA2; (+) strand; PAM type: NRG; PAM sequence: TAG
tatatctatagatcgatcta

SEQ ID NO: 137366 - DNA, 20 bp, Artificial Sequence
  Description of Artificial Sequence: Synthetic oligonucleotide
  Target: LAMA2; (+) strand; PAM type: NRG; PAM sequence: TAG
tctatagatatctatatcta

SEQ ID NO: 137367 - DNA, 20 bp, Artificial Sequence
  Description of Artificial Sequence: Synthetic oligonucleotide
  Target: LAMA2; (+) strand; PAM type: NRG; PAM sequence: TAG
tagatatctatatctataga

SEQ ID NO: 137368 - DNA, 20 bp, Artificial Sequence
  Description of Artificial Sequence: Synthetic oligonucleotide
  Target: LAMA2; (+) strand; PAM type: NRG; PAM sequence: TAG
tatatctatagatagatata

SEQ ID NO: 137369 - DNA, 20 bp, Artificial Sequence
  Description of Artificial Sequence: Synthetic oligonucleotide
  Target: LAMA2; (+) strand; PAM type: NRG; PAM sequence: GAG
tatctatagatagatatata

SEQ ID NO: 137370 - DNA, 20 bp, Artificial Sequence
  Description of Artificial Sequence: Synthetic oligonucleotide
  Target: LAMA2; (+) strand; PAM type: NRG; PAM sequence: AGG
atctatagatagatatatag

SEQ ID NO: 137371 - DNA, 20 bp, Artificial Sequence
  Description of Artificial Sequence: Synthetic oligonucleotide
  Target: LAMA2; (+) strand; PAM type: NRG; PAM sequence: CAG
atagatagatatatagaggc

SEQ ID NO: 137372 - DNA, 20 bp, Artificial Sequence
  Description of Artificial Sequence: Synthetic oligonucleotide
  Target: LAMA2; (+) strand; PAM type: NRG; PAM sequence: AAG
atagatatatagaggccaga

SEQ ID NO: 137373 - DNA, 20 bp, Artificial Sequence
  Description of Artificial Sequence: Synthetic oligonucleotide
  Target: LAMA2; (+) strand; PAM type: NRG; PAM sequence: TGG
ccagaaagtaaatgaattga

SEQ ID NO: 137374 - DNA, 20 bp, Artificial Sequence
  Description of Artificial Sequence: Synthetic oligonucleotide
  Target: LAMA2; (+) strand; PAM type: NRG; PAM sequence: TAG
taaatgaattgatggattat

SEQ ID NO: 137375 - DNA, 20 bp, Artificial Sequence
  Description of Artificial Sequence: Synthetic oligonucleotide
  Target: LAMA2; (+) strand; PAM type: NRG; PAM sequence: CAG
aattgatggattattagttt

SEQ ID NO: 137376 - DNA, 20 bp, Artificial Sequence
  Description of Artificial Sequence: Synthetic oligonucleotide
  Target: LAMA2; (+) strand; PAM type: NRG; PAM sequence: AGG
attgatggattattagtttc

SEQ ID NO: 137377 - DNA, 20 bp, Artificial Sequence
  Description of Artificial Sequence: Synthetic oligonucleotide
  Target: LAMA2; (+) strand; PAM type: NRG; PAM sequence: TAG
attattagtttcaggttcat

SEQ ID NO: 137378 - DNA, 20 bp, Artificial Sequence
  Description of Artificial Sequence: Synthetic oligonucleotide
  Target: LAMA2; (+) strand; PAM type: NRG; PAM sequence: AGG
ttattagtttcaggttcatt

SEQ ID NO: 137379 - DNA, 20 bp, Artificial Sequence
  Description of Artificial Sequence: Synthetic oligonucleotide
  Target: LAMA2; (+) strand; PAM type: NRG; PAM sequence: AAG
tagtttcaggttcattaggc

SEQ ID NO: 137380 - DNA, 20 bp, Artificial Sequence
  Description of Artificial Sequence: Synthetic oligonucleotide
  Target: LAMA2; (+) strand; PAM type: NRG; PAM sequence: AAG
gttcattaggcaagatgata

SEQ ID NO: 137381 - DNA, 20 bp, Artificial Sequence
  Description of Artificial Sequence: Synthetic oligonucleotide
  Target: LAMA2; (+) strand; PAM type: NRG; PAM sequence: TGG
ggcaagatgataaagcctga

SEQ ID NO: 137382 - DNA, 20 bp, Artificial Sequence
  Description of Artificial Sequence: Synthetic oligonucleotide
  Target: LAMA2; (+) strand; PAM type: NRG; PAM sequence: GAG
caagatgataaagcctgatg

SEQ ID NO: 137383 - DNA, 20 bp, Artificial Sequence
  Description of Artificial Sequence: Synthetic oligonucleotide
  Target: LAMA2; (+) strand; PAM type: NRG; PAM sequence: AGG
aagatgataaagcctgatgg

SEQ ID NO: 137384 - DNA, 20 bp, Artificial Sequence
  Description of Artificial Sequence: Synthetic oligonucleotide
  Target: LAMA2; (+) strand; PAM type: NRG; PAM sequence: GGG
agatgataaagcctgatgga

SEQ ID NO: 137385 - DNA, 20 bp, Artificial Sequence
  Description of Artificial Sequence: Synthetic oligonucleotide
  Target: LAMA2; (+) strand; PAM type: NRG; PAM sequence: TGG
tgatggagggaaaccaccat

SEQ ID NO: 137386 - DNA, 20 bp, Artificial Sequence
  Description of Artificial Sequence: Synthetic oligonucleotide
  Target: LAMA2; (+) strand; PAM type: NRG; PAM sequence: CAG
gagggaaaccaccattggtt

SEQ ID NO: 137387 - DNA, 20 bp, Artificial Sequence
  Description of Artificial Sequence: Synthetic oligonucleotide
  Target: LAMA2; (+) strand; PAM type: NRG; PAM sequence: GAG
gggaaaccaccattggttca

SEQ ID NO: 137388 - DNA, 20 bp, Artificial Sequence
  Description of Artificial Sequence: Synthetic oligonucleotide
  Target: LAMA2; (+) strand; PAM type: NRG; PAM sequence: TGG
accaccattggttcagagac

SEQ ID NO: 137389 - DNA, 20 bp, Artificial Sequence
  Description of Artificial Sequence: Synthetic oligonucleotide
  Target: LAMA2; (+) strand; PAM type: NRG; PAM sequence: TGG
accattggttcagagactgg

SEQ ID NO: 137390 - DNA, 20 bp, Artificial Sequence
  Description of Artificial Sequence: Synthetic oligonucleotide
  Target: LAMA2; (+) strand; PAM type: NRG; PAM sequence: AAG
gtggccttgaaaatttcatg

SEQ ID NO: 137391 - DNA, 20 bp, Artificial Sequence
  Description of Artificial Sequence: Synthetic oligonucleotide
  Target: LAMA2; (+) strand; PAM type: NRG; PAM sequence: GAG
gaaaatttcatgaagaatat

SEQ ID NO: 137392 - DNA, 20 bp, Artificial Sequence
  Description of Artificial Sequence: Synthetic oligonucleotide
  Target: LAMA2; (+) strand; PAM type: NRG; PAM sequence: AAG
atttcatgaagaatatgaga

SEQ ID NO: 137393 - DNA, 20 bp, Artificial Sequence
  Description of Artificial Sequence: Synthetic oligonucleotide
  Target: LAMA2; (+) strand; PAM type: NRG; PAM sequence: CAG
atgaagaatatgagaaagcc

SEQ ID NO: 137394 - DNA, 20 bp, Artificial Sequence
  Description of Artificial Sequence: Synthetic oligonucleotide
  Target: LAMA2; (+) strand; PAM type: NRG; PAM sequence: AGG
tgaagaatatgagaaagccc

SEQ ID NO: 137395 - DNA, 20 bp, Artificial Sequence
  Description of Artificial Sequence: Synthetic oligonucleotide
  Target: LAMA2; (+) strand; PAM type: NRG; PAM sequence: GGG
gaagaatatgagaaagccca

SEQ ID NO: 137396 - DNA, 20 bp, Artificial Sequence
  Description of Artificial Sequence: Synthetic oligonucleotide
  Target: LAMA2; (+) strand; PAM type: NRG; PAM sequence: GGG
aagaatatgagaaagcccag

SEQ ID NO: 137397 - DNA, 20 bp, Artificial Sequence
  Description of Artificial Sequence: Synthetic oligonucleotide
  Target: LAMA2; (+) strand; PAM type: NRG; PAM sequence: CGG
agaaagcccaggggcatgaa

SEQ ID NO: 137398 - DNA, 20 bp, Artificial Sequence
  Description of Artificial Sequence: Synthetic oligonucleotide
  Target: LAMA2; (+) strand; PAM type: NRG; PAM sequence: GAG
aaagcccaggggcatgaacg

SEQ ID NO: 137399 - DNA, 20 bp, Artificial Sequence
  Description of Artificial Sequence: Synthetic oligonucleotide
  Target: LAMA2; (+) strand; PAM type: NRG; PAM sequence: TGG
caggggcatgaacggagttg

SEQ ID NO: 137400 - DNA, 20 bp, Artificial Sequence
  Description of Artificial Sequence: Synthetic oligonucleotide
  Target: LAMA2; (+) strand; PAM type: NRG; PAM sequence: GGG
aggggcatgaacggagttgt

SEQ ID NO: 137401 - DNA, 20 bp, Artificial Sequence
  Description of Artificial Sequence: Synthetic oligonucleotide
  Target: LAMA2; (+) strand; PAM type: NRG; PAM sequence: GGG
ggggcatgaacggagttgtg

SEQ ID NO: 137402 - DNA, 20 bp, Artificial Sequence
  Description of Artificial Sequence: Synthetic oligonucleotide
  Target: LAMA2; (+) strand; PAM type: NRG; PAM sequence: GAG
ggcatgaacggagttgtggg

SEQ ID NO: 137403 - DNA, 20 bp, Artificial Sequence
  Description of Artificial Sequence: Synthetic oligonucleotide
  Target: LAMA2; (+) strand; PAM type: NRG; PAM sequence: AGG
gcatgaacggagttgtgggg

SEQ ID NO: 137404 - DNA, 20 bp, Artificial Sequence
  Description of Artificial Sequence: Synthetic oligonucleotide
  Target: LAMA2; (+) strand; PAM type: NRG; PAM sequence: GAG
atgaacggagttgtggggag

SEQ ID NO: 137405 - DNA, 20 bp, Artificial Sequence
  Description of Artificial Sequence: Synthetic oligonucleotide
  Target: LAMA2; (+) strand; PAM type: NRG; PAM sequence: AGG
tgaacggagttgtggggagg

SEQ ID NO: 137406 - DNA, 20 bp, Artificial Sequence
  Description of Artificial Sequence: Synthetic oligonucleotide
  Target: LAMA2; (+) strand; PAM type: NRG; PAM sequence: GAG
gagttgtggggaggaggtgc

SEQ ID NO: 137407 - DNA, 20 bp, Artificial Sequence
  Description of Artificial Sequence: Synthetic oligonucleotide
  Target: LAMA2; (+) strand; PAM type: NRG; PAM sequence: TAG
ggggaggaggtgcgagtgtg

SEQ ID NO: 137408 - DNA, 20 bp, Artificial Sequence
  Description of Artificial Sequence: Synthetic oligonucleotide
  Target: LAMA2; (+) strand; PAM type: NRG; PAM sequence: TAG
cgagtgtgtagatgtgtgtt

SEQ ID NO: 137409 - DNA, 20 bp, Artificial Sequence
  Description of Artificial Sequence: Synthetic oligonucleotide
  Target: LAMA2; (+) strand; PAM type: NRG; PAM sequence: AGG
gagtgtgtagatgtgtgttt

SEQ ID NO: 137410 - DNA, 20 bp, Artificial Sequence
  Description of Artificial Sequence: Synthetic oligonucleotide
  Target: LAMA2; (+) strand; PAM type: NRG; PAM sequence: TGG
gtgtagatgtgtgtttagga

SEQ ID NO: 137411 - DNA, 20 bp, Artificial Sequence
  Description of Artificial Sequence: Synthetic oligonucleotide
  Target: LAMA2; (+) strand; PAM type: NRG; PAM sequence: GGG
tgtagatgtgtgtttaggat

SEQ ID NO: 137412 - DNA, 20 bp, Artificial Sequence
  Description of Artificial Sequence: Synthetic oligonucleotide
  Target: LAMA2; (+) strand; PAM type: NRG; PAM sequence: CAG
tgtgtttaggatgggctgtg

SEQ ID NO: 137413 - DNA, 20 bp, Artificial Sequence
  Description of Artificial Sequence: Synthetic oligonucleotide
  Target: LAMA2; (+) strand; PAM type: NRG; PAM sequence: CGG
tttaggatgggctgtgcaga

SEQ ID NO: 137414 - DNA, 20 bp, Artificial Sequence
  Description of Artificial Sequence: Synthetic oligonucleotide
  Target: LAMA2; (+) strand; PAM type: NRG; PAM sequence: GGG
ttaggatgggctgtgcagac

SEQ ID NO: 137415 - DNA, 20 bp, Artificial Sequence
  Description of Artificial Sequence: Synthetic oligonucleotide
  Target: LAMA2; (+) strand; PAM type: NRG; PAM sequence: GGG
taggatgggctgtgcagacg

SEQ ID NO: 137416 - DNA, 20 bp, Artificial Sequence
  Description of Artificial Sequence: Synthetic oligonucleotide
  Target: LAMA2; (+) strand; PAM type: NRG; PAM sequence: GAG
ggatgggctgtgcagacggg

SEQ ID NO: 137417 - DNA, 20 bp, Artificial Sequence
  Description of Artificial Sequence: Synthetic oligonucleotide
  Target: LAMA2; (+) strand; PAM type: NRG; PAM sequence: TAG
gctgtgcagacggggagaat

SEQ ID NO: 137418 - DNA, 20 bp, Artificial Sequence
  Description of Artificial Sequence: Synthetic oligonucleotide
  Target: LAMA2; (+) strand; PAM type: NRG; PAM sequence: GAG
tgtgcagacggggagaatta

SEQ ID NO: 137419 - DNA, 20 bp, Artificial Sequence
  Description of Artificial Sequence: Synthetic oligonucleotide
  Target: LAMA2; (+) strand; PAM type: NRG; PAM sequence: GAG
tgcagacggggagaattaga

SEQ ID NO: 137420 - DNA, 20 bp, Artificial Sequence
  Description of Artificial Sequence: Synthetic oligonucleotide
  Target: LAMA2; (+) strand; PAM type: NRG; PAM sequence: AAG
gataaaatatgtaaaaccat

SEQ ID NO: 137421 - DNA, 20 bp, Artificial Sequence
  Description of Artificial Sequence: Synthetic oligonucleotide
  Target: LAMA2; (+) strand; PAM type: NRG; PAM sequence: CAG
taagtgtgtgtatatgtatg

SEQ ID NO: 137422 - DNA, 20 bp, Artificial Sequence
  Description of Artificial Sequence: Synthetic oligonucleotide
  Target: LAMA2; (+) strand; PAM type: NRG; PAM sequence: AGG
aagtgtgtgtatatgtatgc

SEQ ID NO: 137423 - DNA, 20 bp, Artificial Sequence
  Description of Artificial Sequence: Synthetic oligonucleotide
  Target: LAMA2; (+) strand; PAM type: NRG; PAM sequence: TAG
caggtatatatatatatatg

SEQ ID NO: 137424 - DNA, 20 bp, Artificial Sequence
  Description of Artificial Sequence: Synthetic oligonucleotide
  Target: LAMA2; (+) strand; PAM type: NRG; PAM sequence: GAG
ggtatatatatatatatgta

SEQ ID NO: 137425 - DNA, 20 bp, Artificial Sequence
  Description of Artificial Sequence: Synthetic oligonucleotide
  Target: LAMA2; (+) strand; PAM type: NRG; PAM sequence: GAG
tatatatatatatatgtaga

SEQ ID NO: 137426 - DNA, 20 bp, Artificial Sequence
  Description of Artificial Sequence: Synthetic oligonucleotide
  Target: LAMA2; (+) strand; PAM type: NRG; PAM sequence: GAG
tatatatatatatgtagaga

SEQ ID NO: 137427 - DNA, 20 bp, Artificial Sequence
  Description of Artificial Sequence: Synthetic oligonucleotide
  Target: LAMA2; (+) strand; PAM type: NRG; PAM sequence: GAG
tatatatatatgtagagaga

SEQ ID NO: 137428 - DNA, 20 bp, Artificial Sequence
  Description of Artificial Sequence: Synthetic oligonucleotide
  Target: LAMA2; (+) strand; PAM type: NRG; PAM sequence: GAG
tatatatatgtagagagaga

SEQ ID NO: 137429 - DNA, 20 bp, Artificial Sequence
  Description of Artificial Sequence: Synthetic oligonucleotide
  Target: LAMA2; (+) strand; PAM type: NRG; PAM sequence: GAG
tatatatgtagagagagaga

SEQ ID NO: 137430 - DNA, 20 bp, Artificial Sequence
  Description of Artificial Sequence: Synthetic oligonucleotide
  Target: LAMA2; (+) strand; PAM type: NRG; PAM sequence: AAG
tatgtagagagagagagaga

SEQ ID NO: 137431 - DNA, 20 bp, Artificial Sequence
  Description of Artificial Sequence: Synthetic oligonucleotide
  Target: LAMA2; (+) strand; PAM type: NRG; PAM sequence: AGG
atgtagagagagagagagaa

SEQ ID NO: 137432 - DNA, 20 bp, Artificial Sequence
  Description of Artificial Sequence: Synthetic oligonucleotide
  Target: LAMA2; (+) strand; PAM type: NRG; PAM sequence: GAG
gtagagagagagagagaaag

SEQ ID NO: 137433 - DNA, 20 bp, Artificial Sequence
  Description of Artificial Sequence: Synthetic oligonucleotide
  Target: LAMA2; (+) strand; PAM type: NRG; PAM sequence: AGG
tagagagagagagagaaagg

SEQ ID NO: 137434 - DNA, 20 bp, Artificial Sequence
  Description of Artificial Sequence: Synthetic oligonucleotide
  Target: LAMA2; (+) strand; PAM type: NRG; PAM sequence: AAG
taacgtgaatacttaatgcc

SEQ ID NO: 137435 - DNA, 20 bp, Artificial Sequence
  Description of Artificial Sequence: Synthetic oligonucleotide
  Target: LAMA2; (+) strand; PAM type: NRG; PAM sequence: GAG
gtgaatacttaatgccaagt

SEQ ID NO: 137436 - DNA, 20 bp, Artificial Sequence
  Description of Artificial Sequence: Synthetic oligonucleotide
  Target: LAMA2; (+) strand; PAM type: NRG; PAM sequence: AGG
tgaatacttaatgccaagtg

SEQ ID NO: 137437 - DNA, 20 bp, Artificial Sequence
  Description of Artificial Sequence: Synthetic oligonucleotide
  Target: LAMA2; (+) strand; PAM type: NRG; PAM sequence: TGG
ccaagtgaggtgaactatga

SEQ ID NO: 137438 - DNA, 20 bp, Artificial Sequence
  Description of Artificial Sequence: Synthetic oligonucleotide
  Target: LAMA2; (+) strand; PAM type: NRG; PAM sequence: GGG
caagtgaggtgaactatgat

SEQ ID NO: 137439 - DNA, 20 bp, Artificial Sequence
  Description of Artificial Sequence: Synthetic oligonucleotide
  Target: LAMA2; (+) strand; PAM type: NRG; PAM sequence: GGG
aagtgaggtgaactatgatg

SEQ ID NO: 137440 - DNA, 20 bp, Artificial Sequence
  Description of Artificial Sequence: Synthetic oligonucleotide
  Target: LAMA2; (+) strand; PAM type: NRG; PAM sequence: GGG
agtgaggtgaactatgatgg

SEQ ID NO: 137441 - DNA, 20 bp, Artificial Sequence
  Description of Artificial Sequence: Synthetic oligonucleotide
  Target: LAMA2; (+) strand; PAM type: NRG; PAM sequence: AAG
ggtgaactatgatgggggta

SEQ ID NO: 137442 - DNA, 20 bp, Artificial Sequence
  Description of Artificial Sequence: Synthetic oligonucleotide
  Target: LAMA2; (+) strand; PAM type: NRG; PAM sequence: TAG
atattattttaaaatttgct

SEQ ID NO: 137443 - DNA, 20 bp, Artificial Sequence
  Description of Artificial Sequence: Synthetic oligonucleotide
  Target: LAMA2; (+) strand; PAM type: NRG; PAM sequence: TAG
cctttttttttttttttttt

SEQ ID NO: 137444 - DNA, 20 bp, Artificial Sequence
  Description of Artificial Sequence: Synthetic oligonucleotide
  Target: LAMA2; (+) strand; PAM type: NRG; PAM sequence: AGG
cttttttttttttttttttt

SEQ ID NO: 137445 - DNA, 20 bp, Artificial Sequence
  Description of Artificial Sequence: Synthetic oligonucleotide
  Target: LAMA2; (+) strand; PAM type: NRG; PAM sequence: CAG
tttttttttttttttttagg

SEQ ID NO: 137446 - DNA, 20 bp, Artificial Sequence
  Description of Artificial Sequence: Synthetic oligonucleotide
  Target: LAMA2; (+) strand; PAM type: NRG; PAM sequence: GAG
tttttttttttttttaggca

SEQ ID NO: 137447 - DNA, 20 bp, Artificial Sequence
  Description of Artificial Sequence: Synthetic oligonucleotide
  Target: LAMA2; (+) strand; PAM type: NRG; PAM sequence: CAG
cagagtttcgctctgtcgcc

SEQ ID NO: 137448 - DNA, 20 bp, Artificial Sequence
  Description of Artificial Sequence: Synthetic oligonucleotide
  Target: LAMA2; (+) strand; PAM type: NRG; PAM sequence: AGG
agagtttcgctctgtcgccc

SEQ ID NO: 137449 - DNA, 20 bp, Artificial Sequence
  Description of Artificial Sequence: Synthetic oligonucleotide
  Target: LAMA2; (+) strand; PAM type: NRG; PAM sequence: CAG
tcgctctgtcgcccaggctg

SEQ ID NO: 137450 - DNA, 20 bp, Artificial Sequence
  Description of Artificial Sequence: Synthetic oligonucleotide
  Target: LAMA2; (+) strand; PAM type: NRG; PAM sequence: CAG
ctgtcgcccaggctgcagtg

SEQ ID NO: 137451 - DNA, 20 bp, Artificial Sequence
  Description of Artificial Sequence: Synthetic oligonucleotide
  Target: LAMA2; (+) strand; PAM type: NRG; PAM sequence: TGG
tcgcccaggctgcagtgcag

SEQ ID NO: 137452 - DNA, 20 bp, Artificial Sequence
  Description of Artificial Sequence: Synthetic oligonucleotide
  Target: LAMA2; (+) strand; PAM type: NRG; PAM sequence: CGG
gcagtgcagtggcgcgatct

SEQ ID NO: 137453 - DNA, 20 bp, Artificial Sequence
  Description of Artificial Sequence: Synthetic oligonucleotide
  Target: LAMA2; (+) strand; PAM type: NRG; PAM sequence: AAG
gcgcgatctcggctcactgc

SEQ ID NO: 137454 - DNA, 20 bp, Artificial Sequence
  Description of Artificial Sequence: Synthetic oligonucleotide
  Target: LAMA2; (+) strand; PAM type: NRG; PAM sequence: CGG
tcactgcaagctccgcctcc

SEQ ID NO: 137455 - DNA, 20 bp, Artificial Sequence
  Description of Artificial Sequence: Synthetic oligonucleotide
  Target: LAMA2; (+) strand; PAM type: NRG; PAM sequence: GGG
cactgcaagctccgcctccc

SEQ ID NO: 137456 - DNA, 20 bp, Artificial Sequence
  Description of Artificial Sequence: Synthetic oligonucleotide
  Target: LAMA2; (+) strand; PAM type: NRG; PAM sequence: CAG
ttcacgccattctcttgcct

SEQ ID NO: 137457 - DNA, 20 bp, Artificial Sequence
  Description of Artificial Sequence: Synthetic oligonucleotide
  Target: LAMA2; (+) strand; PAM type: NRG; PAM sequence: CAG
ttctcttgcctcagcctccc

SEQ ID NO: 137458 - DNA, 20 bp, Artificial Sequence
  Description of Artificial Sequence: Synthetic oligonucleotide
  Target: LAMA2; (+) strand; PAM type: NRG; PAM sequence: CAG
tcttgcctcagcctccccag

SEQ ID NO: 137459 - DNA, 20 bp, Artificial Sequence
  Description of Artificial Sequence: Synthetic oligonucleotide
  Target: LAMA2; (+) strand; PAM type: NRG; PAM sequence: TGG
gcctcagcctccccagcagc

SEQ ID NO: 137460 - DNA, 20 bp, Artificial Sequence
  Description of Artificial Sequence: Synthetic oligonucleotide
  Target: LAMA2; (+) strand; PAM type: NRG; PAM sequence: GGG
cctcagcctccccagcagct

SEQ ID NO: 137461 - DNA, 20 bp, Artificial Sequence
  Description of Artificial Sequence: Synthetic oligonucleotide
  Target: LAMA2; (+) strand; PAM type: NRG; PAM sequence: CAG
ctccccagcagctgggactg

SEQ ID NO: 137462 - DNA, 20 bp, Artificial Sequence
  Description of Artificial Sequence: Synthetic oligonucleotide
  Target: LAMA2; (+) strand; PAM type: NRG; PAM sequence: AGG
tccccagcagctgggactgc

SEQ ID NO: 137463 - DNA, 20 bp, Artificial Sequence
  Description of Artificial Sequence: Synthetic oligonucleotide
  Target: LAMA2; (+) strand; PAM type: NRG; PAM sequence: CGG
caggcgcacgttgccacgcc

SEQ ID NO: 137464 - DNA, 20 bp, Artificial Sequence
  Description of Artificial Sequence: Synthetic oligonucleotide
  Target: LAMA2; (+) strand; PAM type: NRG; PAM sequence: TAG
tttttttttttttgtatttt

SEQ ID NO: 137465 - DNA, 20 bp, Artificial Sequence
  Description of Artificial Sequence: Synthetic oligonucleotide
  Target: LAMA2; (+) strand; PAM type: NRG; PAM sequence: GAG
ttttttttgtatttttagtt

SEQ ID NO: 137466 - DNA, 20 bp, Artificial Sequence
  Description of Artificial Sequence: Synthetic oligonucleotide
  Target: LAMA2; (+) strand; PAM type: NRG; PAM sequence: CGG
ttttgtatttttagttgaga

SEQ ID NO: 137467 - DNA, 20 bp, Artificial Sequence
  Description of Artificial Sequence: Synthetic oligonucleotide
  Target: LAMA2; (+) strand; PAM type: NRG; PAM sequence: GGG
tttgtatttttagttgagac

SEQ ID NO: 137468 - DNA, 20 bp, Artificial Sequence
  Description of Artificial Sequence: Synthetic oligonucleotide
  Target: LAMA2; (+) strand; PAM type: NRG; PAM sequence: GGG
ttgtatttttagttgagacg

SEQ ID NO: 137469 - DNA, 20 bp, Artificial Sequence
  Description of Artificial Sequence: Synthetic oligonucleotide
  Target: LAMA2; (+) strand; PAM type: NRG; PAM sequence: TAG
gagacggggtttcaccgtgt

SEQ ID NO: 137470 - DNA, 20 bp, Artificial Sequence
  Description of Artificial Sequence: Synthetic oligonucleotide
  Target: LAMA2; (+) strand; PAM type: NRG; PAM sequence: TAG
cggggtttcaccgtgttagc

SEQ ID NO: 137471 - DNA, 20 bp, Artificial Sequence
  Description of Artificial Sequence: Synthetic oligonucleotide
  Target: LAMA2; (+) strand; PAM type: NRG; PAM sequence: CGG
tttcaccgtgttagctagca

SEQ ID NO: 137472 - DNA, 20 bp, Artificial Sequence
  Description of Artificial Sequence: Synthetic oligonucleotide
  Target: LAMA2; (+) strand; PAM type: NRG; PAM sequence: CGG
atctcgtgatatgcccgcct

SEQ ID NO: 137473 - DNA, 20 bp, Artificial Sequence
  Description of Artificial Sequence: Synthetic oligonucleotide
  Target: LAMA2; (+) strand; PAM type: NRG; PAM sequence: AAG
atgcccgcctcggcctccca

SEQ ID NO: 137474 - DNA, 20 bp, Artificial Sequence
  Description of Artificial Sequence: Synthetic oligonucleotide
  Target: LAMA2; (+) strand; PAM type: NRG; PAM sequence: TGG
gcctcggcctcccaaagtgc

SEQ ID NO: 137475 - DNA, 20 bp, Artificial Sequence
  Description of Artificial Sequence: Synthetic oligonucleotide
  Target: LAMA2; (+) strand; PAM type: NRG; PAM sequence: GGG
cctcggcctcccaaagtgct

SEQ ID NO: 137476 - DNA, 20 bp, Artificial Sequence
  Description of Artificial Sequence: Synthetic oligonucleotide
  Target: LAMA2; (+) strand; PAM type: NRG; PAM sequence: CAG
ctcccaaagtgctgggatta

SEQ ID NO: 137477 - DNA, 20 bp, Artificial Sequence
  Description of Artificial Sequence: Synthetic oligonucleotide
  Target: LAMA2; (+) strand; PAM type: NRG; PAM sequence: AGG
tcccaaagtgctgggattac

SEQ ID NO: 137478 - DNA, 20 bp, Artificial Sequence
  Description of Artificial Sequence: Synthetic oligonucleotide
  Target: LAMA2; (+) strand; PAM type: NRG; PAM sequence: GAG
agtgctgggattacaggcgt

SEQ ID NO: 137479 - DNA, 20 bp, Artificial Sequence
  Description of Artificial Sequence: Synthetic oligonucleotide
  Target: LAMA2; (+) strand; PAM type: NRG; PAM sequence: CGG
caggcgtgagccaccgcgcc

SEQ ID NO: 137480 - DNA, 20 bp, Artificial Sequence
  Description of Artificial Sequence: Synthetic oligonucleotide
  Target: LAMA2; (+) strand; PAM type: NRG; PAM sequence: TAG
cttttctctgtctttttaaa

SEQ ID NO: 137481 - DNA, 20 bp, Artificial Sequence
  Description of Artificial Sequence: Synthetic oligonucleotide
  Target: LAMA2; (+) strand; PAM type: NRG; PAM sequence: TAG
ttttaaatagaccttatttt

SEQ ID NO: 137482 - DNA, 20 bp, Artificial Sequence
  Description of Artificial Sequence: Synthetic oligonucleotide
  Target: LAMA2; (+) strand; PAM type: NRG; PAM sequence: GAG
ttaaatagaccttattttta

SEQ ID NO: 137483 - DNA, 20 bp, Artificial Sequence
  Description of Artificial Sequence: Synthetic oligonucleotide
  Target: LAMA2; (+) strand; PAM type: NRG; PAM sequence: CAG
aatagaccttatttttagag

SEQ ID NO: 137484 - DNA, 20 bp, Artificial Sequence
  Description of Artificial Sequence: Synthetic oligonucleotide
  Target: LAMA2; (+) strand; PAM type: NRG; PAM sequence: GAG
ccttatttttagagcagttt

SEQ ID NO: 137485 - DNA, 20 bp, Artificial Sequence
  Description of Artificial Sequence: Synthetic oligonucleotide
  Target: LAMA2; (+) strand; PAM type: NRG; PAM sequence: AGG
cttatttttagagcagtttg

SEQ ID NO: 137486 - DNA, 20 bp, Artificial Sequence
  Description of Artificial Sequence: Synthetic oligonucleotide
  Target: LAMA2; (+) strand; PAM type: NRG; PAM sequence: CAG
ttagagcagtttgaggttca

SEQ ID NO: 137487 - DNA, 20 bp, Artificial Sequence
  Description of Artificial Sequence: Synthetic oligonucleotide
  Target: LAMA2; (+) strand; PAM type: NRG; PAM sequence: AAG
ttgaggttcacagcaaaatt

SEQ ID NO: 137488 - DNA, 20 bp, Artificial Sequence
  Description of Artificial Sequence: Synthetic oligonucleotide
  Target: LAMA2; (+) strand; PAM type: NRG; PAM sequence: GAG
gaggttcacagcaaaattaa

SEQ ID NO: 137489 - DNA, 20 bp, Artificial Sequence
  Description of Artificial Sequence: Synthetic oligonucleotide
  Target: LAMA2; (+) strand; PAM type: NRG; PAM sequence: AGG
aggttcacagcaaaattaag

SEQ ID NO: 137490 - DNA, 20 bp, Artificial Sequence
  Description of Artificial Sequence: Synthetic oligonucleotide
  Target: LAMA2; (+) strand; PAM type: NRG; PAM sequence: AAG
tcacagcaaaattaagagga

SEQ ID NO: 137491 - DNA, 20 bp, Artificial Sequence
  Description of Artificial Sequence: Synthetic oligonucleotide
  Target: LAMA2; (+) strand; PAM type: NRG; PAM sequence: CAG
gcaaaattaagaggaaagta

SEQ ID NO: 137492 - DNA, 20 bp, Artificial Sequence
  Description of Artificial Sequence: Synthetic oligonucleotide
  Target: LAMA2; (+) strand; PAM type: NRG; PAM sequence: TGG
cccccgccccaacacatgcg

SEQ ID NO: 137493 - DNA, 20 bp, Artificial Sequence
  Description of Artificial Sequence: Synthetic oligonucleotide
  Target: LAMA2; (+) strand; PAM type: NRG; PAM sequence: CAG
ccattaccaaaatccccctc

SEQ ID NO: 137494 - DNA, 20 bp, Artificial Sequence
  Description of Artificial Sequence: Synthetic oligonucleotide
  Target: LAMA2; (+) strand; PAM type: NRG; PAM sequence: GAG
attaccaaaatccccctcca

SEQ ID NO: 137495 - DNA, 20 bp, Artificial Sequence
  Description of Artificial Sequence: Synthetic oligonucleotide
  Target: LAMA2; (+) strand; PAM type: NRG; PAM sequence: CAG
ccagagtgctacatttgtta

SEQ ID NO: 137496 - DNA, 20 bp, Artificial Sequence
  Description of Artificial Sequence: Synthetic oligonucleotide
  Target: LAMA2; (+) strand; PAM type: NRG; PAM sequence: CAG
ccatgaacctacattgacaa

SEQ ID NO: 137497 - DNA, 20 bp, Artificial Sequence
  Description of Artificial Sequence: Synthetic oligonucleotide
  Target: LAMA2; (+) strand; PAM type: NRG; PAM sequence: TAG
acagcatcacccaaacttca

SEQ ID NO: 137498 - DNA, 20 bp, Artificial Sequence
  Description of Artificial Sequence: Synthetic oligonucleotide
  Target: LAMA2; (+) strand; PAM type: NRG; PAM sequence: TAG
ccaaacttcatagactgcat

SEQ ID NO: 137499 - DNA, 20 bp, Artificial Sequence
  Description of Artificial Sequence: Synthetic oligonucleotide
  Target: LAMA2; (+) strand; PAM type: NRG; PAM sequence: AGG
caaacttcatagactgcatt

SEQ ID NO: 137500 - DNA, 20 bp, Artificial Sequence
  Description of Artificial Sequence: Synthetic oligonucleotide
  Target: LAMA2; (+) strand; PAM type: NRG; PAM sequence: GGG
aaacttcatagactgcatta

SEQ ID NO: 137501 - DNA, 20 bp, Artificial Sequence
  Description of Artificial Sequence: Synthetic oligonucleotide
  Target: LAMA2; (+) strand; PAM type: NRG; PAM sequence: TGG
actgcattagggtttacttt

SEQ ID NO: 137502 - DNA, 20 bp, Artificial Sequence
  Description of Artificial Sequence: Synthetic oligonucleotide
  Target: LAMA2; (+) strand; PAM type: NRG; PAM sequence: TGG
gcattagggtttacttttgg

SEQ ID NO: 137503 - DNA, 20 bp, Artificial Sequence
  Description of Artificial Sequence: Synthetic oligonucleotide
  Target: LAMA2; (+) strand; PAM type: NRG; PAM sequence: TGG
ttttggtggtgtacctttta

SEQ ID NO: 137504 - DNA, 20 bp, Artificial Sequence
  Description of Artificial Sequence: Synthetic oligonucleotide
  Target: LAMA2; (+) strand; PAM type: NRG; PAM sequence: GGG
tttggtggtgtaccttttat

SEQ ID NO: 137505 - DNA, 20 bp, Artificial Sequence
  Description of Artificial Sequence: Synthetic oligonucleotide
  Target: LAMA2; (+) strand; PAM type: NRG; PAM sequence: TGG
tggtgtaccttttatgggtt

SEQ ID NO: 137506 - DNA, 20 bp, Artificial Sequence
  Description of Artificial Sequence: Synthetic oligonucleotide
  Target: LAMA2; (+) strand; PAM type: NRG; PAM sequence: TAG
taatgatatatatctaccat

SEQ ID NO: 137507 - DNA, 20 bp, Artificial Sequence
  Description of Artificial Sequence: Synthetic oligonucleotide
  Target: LAMA2; (+) strand; PAM type: NRG; PAM sequence: GAG
atgatatatatctaccatta

SEQ ID NO: 137508 - DNA, 20 bp, Artificial Sequence
  Description of Artificial Sequence: Synthetic oligonucleotide
  Target: LAMA2; (+) strand; PAM type: NRG; PAM sequence: AAG
taccattagagtatcacgca

SEQ ID NO: 137509 - DNA, 20 bp, Artificial Sequence
  Description of Artificial Sequence: Synthetic oligonucleotide
  Target: LAMA2; (+) strand; PAM type: NRG; PAM sequence: TAG
cattagagtatcacgcaaag

SEQ ID NO: 137510 - DNA, 20 bp, Artificial Sequence
  Description of Artificial Sequence: Synthetic oligonucleotide
  Target: LAMA2; (+) strand; PAM type: NRG; PAM sequence: GAG
aattataaaatgtataaaat

SEQ ID NO: 137511 - DNA, 20 bp, Artificial Sequence
  Description of Artificial Sequence: Synthetic oligonucleotide
  Target: LAMA2; (+) strand; PAM type: NRG; PAM sequence: GAG
ttataaaatgtataaaatga

SEQ ID NO: 137512 - DNA, 20 bp, Artificial Sequence
  Description of Artificial Sequence: Synthetic oligonucleotide
  Target: LAMA2; (+) strand; PAM type: NRG; PAM sequence: AAG
tttacattttttatcccaaa

SEQ ID NO: 137513 - DNA, 20 bp, Artificial Sequence
  Description of Artificial Sequence: Synthetic oligonucleotide
  Target: LAMA2; (+) strand; PAM type: NRG; PAM sequence: AAG
tatcccaaaaagaaaattga

SEQ ID NO: 137514 - DNA, 20 bp, Artificial Sequence
  Description of Artificial Sequence: Synthetic oligonucleotide
  Target: LAMA2; (+) strand; PAM type: NRG; PAM sequence: AGG
atcccaaaaagaaaattgaa

SEQ ID NO: 137515 - DNA, 20 bp, Artificial Sequence
  Description of Artificial Sequence: Synthetic oligonucleotide
  Target: LAMA2; (+) strand; PAM type: NRG; PAM sequence: TGG
aggcattgtgccttttttct

SEQ ID NO: 137516 - DNA, 20 bp, Artificial Sequence
  Description of Artificial Sequence: Synthetic oligonucleotide
  Target: LAMA2; (+) strand; PAM type: NRG; PAM sequence: GAG
gcattgtgccttttttcttg

SEQ ID NO: 137517 - DNA, 20 bp, Artificial Sequence
  Description of Artificial Sequence: Synthetic oligonucleotide
  Target: LAMA2; (+) strand; PAM type: NRG; PAM sequence: TGG
tgtgccttttttcttggagc

SEQ ID NO: 137518 - DNA, 20 bp, Artificial Sequence
  Description of Artificial Sequence: Synthetic oligonucleotide
  Target: LAMA2; (+) strand; PAM type: NRG; PAM sequence: AAG
ttttttcttggagctggtta

SEQ ID NO: 137519 - DNA, 20 bp, Artificial Sequence
  Description of Artificial Sequence: Synthetic oligonucleotide
  Target: LAMA2; (+) strand; PAM type: NRG; PAM sequence: GAG
ttttcttggagctggttaaa

SEQ ID NO: 137520 - DNA, 20 bp, Artificial Sequence
  Description of Artificial Sequence: Synthetic oligonucleotide
  Target: LAMA2; (+) strand; PAM type: NRG; PAM sequence: GAG
ttcttggagctggttaaaga

SEQ ID NO: 137521 - DNA, 20 bp, Artificial Sequence
  Description of Artificial Sequence: Synthetic oligonucleotide
  Target: LAMA2; (+) strand; PAM type: NRG; PAM sequence: AGG
tcttggagctggttaaagag

SEQ ID NO: 137522 - DNA, 20 bp, Artificial Sequence
  Description of Artificial Sequence: Synthetic oligonucleotide
  Target: LAMA2; (+) strand; PAM type: NRG; PAM sequence: TAG
tggttaaagagaggcatgca

SEQ ID NO: 137523 - DNA, 20 bp, Artificial Sequence
  Description of Artificial Sequence: Synthetic oligonucleotide
  Target: LAMA2; (+) strand; PAM type: NRG; PAM sequence: TAG
agtcccctcattatataatt

SEQ ID NO: 137524 - DNA, 20 bp, Artificial Sequence
  Description of Artificial Sequence: Synthetic oligonucleotide
  Target: LAMA2; (+) strand; PAM type: NRG; PAM sequence: AGG
gtcccctcattatataattt

SEQ ID NO: 137525 - DNA, 20 bp, Artificial Sequence
  Description of Artificial Sequence: Synthetic oligonucleotide
  Target: LAMA2; (+) strand; PAM type: NRG; PAM sequence: CAG
cattatataatttaggaatg

SEQ ID NO: 137526 - DNA, 20 bp, Artificial Sequence
  Description of Artificial Sequence: Synthetic oligonucleotide
  Target: LAMA2; (+) strand; PAM type: NRG; PAM sequence: CAG
cagaaaacattactatattt

SEQ ID NO: 137527 - DNA, 20 bp, Artificial Sequence
  Description of Artificial Sequence: Synthetic oligonucleotide
  Target: LAMA2; (+) strand; PAM type: NRG; PAM sequence: TAG
gacacttgtttgattaaaat

SEQ ID NO: 137528 - DNA, 20 bp, Artificial Sequence
  Description of Artificial Sequence: Synthetic oligonucleotide
  Target: LAMA2; (+) strand; PAM type: NRG; PAM sequence: TGG
acttgtttgattaaaattag

SEQ ID NO: 137529 - DNA, 20 bp, Artificial Sequence
  Description of Artificial Sequence: Synthetic oligonucleotide
  Target: LAMA2; (+) strand; PAM type: NRG; PAM sequence: CAG
attagtggtcgtgtgtatca

SEQ ID NO: 137530 - DNA, 20 bp, Artificial Sequence
  Description of Artificial Sequence: Synthetic oligonucleotide
  Target: LAMA2; (+) strand; PAM type: NRG; PAM sequence: CAG
tcgtgtgtatcacagaatat

SEQ ID NO: 137531 - DNA, 20 bp, Artificial Sequence
  Description of Artificial Sequence: Synthetic oligonucleotide
  Target: LAMA2; (+) strand; PAM type: NRG; PAM sequence: AAG
agaatatcagaaaacatgtt

SEQ ID NO: 137532 - DNA, 20 bp, Artificial Sequence
  Description of Artificial Sequence: Synthetic oligonucleotide
  Target: LAMA2; (+) strand; PAM type: NRG; PAM sequence: AAG
gaaaacatgttaagacacca

SEQ ID NO: 137533 - DNA, 20 bp, Artificial Sequence
  Description of Artificial Sequence: Synthetic oligonucleotide
  Target: LAMA2; (+) strand; PAM type: NRG; PAM sequence: AAG
aacatgttaagacaccaaag

SEQ ID NO: 137534 - DNA, 20 bp, Artificial Sequence
  Description of Artificial Sequence: Synthetic oligonucleotide
  Target: LAMA2; (+) strand; PAM type: NRG; PAM sequence: AGG
acatgttaagacaccaaaga

SEQ ID NO: 137535 - DNA, 20 bp, Artificial Sequence
  Description of Artificial Sequence: Synthetic oligonucleotide
  Target: LAMA2; (+) strand; PAM type: NRG; PAM sequence: CAG
acaccaaagaaggcaaccac

SEQ ID NO: 137536 - DNA, 20 bp, Artificial Sequence
  Description of Artificial Sequence: Synthetic oligonucleotide
  Target: LAMA2; (+) strand; PAM type: NRG; PAM sequence: TGG
acctttcctattaatgactc

SEQ ID NO: 137537 - DNA, 20 bp, Artificial Sequence
  Description of Artificial Sequence: Synthetic oligonucleotide
  Target: LAMA2; (+) strand; PAM type: NRG; PAM sequence: GAG
gttttgttttgttttatttt

SEQ ID NO: 137538 - DNA, 20 bp, Artificial Sequence
  Description of Artificial Sequence: Synthetic oligonucleotide
  Target: LAMA2; (+) strand; PAM type: NRG; PAM sequence: CGG
tgttttgttttattttgaga

SEQ ID NO: 137539 - DNA, 20 bp, Artificial Sequence
  Description of Artificial Sequence: Synthetic oligonucleotide
  Target: LAMA2; (+) strand; PAM type: NRG; PAM sequence: GAG
ttttgttttattttgagacg

SEQ ID NO: 137540 - DNA, 20 bp, Artificial Sequence
  Description of Artificial Sequence: Synthetic oligonucleotide
  Target: LAMA2; (+) strand; PAM type: NRG; PAM sequence: CAG
ggagttttgctcttgttgcc

SEQ ID NO: 137541 - DNA, 20 bp, Artificial Sequence
  Description of Artificial Sequence: Synthetic oligonucleotide
  Target: LAMA2; (+) strand; PAM type: NRG; PAM sequence: AGG
gagttttgctcttgttgccc

SEQ ID NO: 137542 - DNA, 20 bp, Artificial Sequence
  Description of Artificial Sequence: Synthetic oligonucleotide
  Target: LAMA2; (+) strand; PAM type: NRG; PAM sequence: TGG
tttgctcttgttgcccaggc

SEQ ID NO: 137543 - DNA, 20 bp, Artificial Sequence
  Description of Artificial Sequence: Synthetic oligonucleotide
  Target: LAMA2; (+) strand; PAM type: NRG; PAM sequence: GAG
tgctcttgttgcccaggctg

SEQ ID NO: 137544 - DNA, 20 bp, Artificial Sequence
  Description of Artificial Sequence: Synthetic oligonucleotide
  Target: LAMA2; (+) strand; PAM type: NRG; PAM sequence: TGG
ttgcccaggctggagtgcaa

SEQ ID NO: 137545 - DNA, 20 bp, Artificial Sequence
  Description of Artificial Sequence: Synthetic oligonucleotide
  Target: LAMA2; (+) strand; PAM type: NRG; PAM sequence: CGG
ggagtgcaatggcacgacct

SEQ ID NO: 137546 - DNA, 20 bp, Artificial Sequence
  Description of Artificial Sequence: Synthetic oligonucleotide
  Target: LAMA2; (+) strand; PAM type: NRG; PAM sequence: CGG
tcaccgcaacctccgcctcc

SEQ ID NO: 137547 - DNA, 20 bp, Artificial Sequence
  Description of Artificial Sequence: Synthetic oligonucleotide
  Target: LAMA2; (+) strand; PAM type: NRG; PAM sequence: GGG
caccgcaacctccgcctccc

SEQ ID NO: 137548 - DNA, 20 bp, Artificial Sequence
  Description of Artificial Sequence: Synthetic oligonucleotide
  Target: LAMA2; (+) strand; PAM type: NRG; PAM sequence: AAG
aacctccgcctcccgggttc

SEQ ID NO: 137549 - DNA, 20 bp, Artificial Sequence
  Description of Artificial Sequence: Synthetic oligonucleotide
  Target: LAMA2; (+) strand; PAM type: NRG; PAM sequence: GAG
cctccgcctcccgggttcaa

SEQ ID NO: 137550 - DNA, 20 bp, Artificial Sequence
  Description of Artificial Sequence: Synthetic oligonucleotide
  Target: LAMA2; (+) strand; PAM type: NRG; PAM sequence: CAG
ttcaagagattcttctgcct

SEQ ID NO: 137551 - DNA, 20 bp, Artificial Sequence
  Description of Artificial Sequence: Synthetic oligonucleotide
  Target: LAMA2; (+) strand; PAM type: NRG; PAM sequence: GAG
ttcttctgcctcagcctcct

SEQ ID NO: 137552 - DNA, 20 bp, Artificial Sequence
  Description of Artificial Sequence: Synthetic oligonucleotide
  Target: LAMA2; (+) strand; PAM type: NRG; PAM sequence: GAG
cttctgcctcagcctcctga

SEQ ID NO: 137553 - DNA, 20 bp, Artificial Sequence
  Description of Artificial Sequence: Synthetic oligonucleotide
  Target: LAMA2; (+) strand; PAM type: NRG; PAM sequence: AGG
ttctgcctcagcctcctgag

SEQ ID NO: 137554 - DNA, 20 bp, Artificial Sequence
  Description of Artificial Sequence: Synthetic oligonucleotide
  Target: LAMA2; (+) strand; PAM type: NRG; PAM sequence: CGG
gaggcatgcgccaccatgcc

SEQ ID NO: 137555 - DNA, 20 bp, Artificial Sequence
  Description of Artificial Sequence: Synthetic oligonucleotide
  Target: LAMA2; (+) strand; PAM type: NRG; PAM sequence: TAG
cccggctaattttgtatttt

SEQ ID NO: 137556 - DNA, 20 bp, Artificial Sequence
  Description of Artificial Sequence: Synthetic oligonucleotide
  Target: LAMA2; (+) strand; PAM type: NRG; PAM sequence: TAG
ggctaattttgtatttttag

SEQ ID NO: 137557 - DNA, 20 bp, Artificial Sequence
  Description of Artificial Sequence: Synthetic oligonucleotide
  Target: LAMA2; (+) strand; PAM type: NRG; PAM sequence: GAG
ctaattttgtatttttagta

SEQ ID NO: 137558 - DNA, 20 bp, Artificial Sequence
  Description of Artificial Sequence: Synthetic oligonucleotide
  Target: LAMA2; (+) strand; PAM type: NRG; PAM sequence: GAG
tttgtatttttagtagagac

SEQ ID NO: 137559 - DNA, 20 bp, Artificial Sequence
  Description of Artificial Sequence: Synthetic oligonucleotide
  Target: LAMA2; (+) strand; PAM type: NRG; PAM sequence: AGG
ttgtatttttagtagagacg

SEQ ID NO: 137560 - DNA, 20 bp, Artificial Sequence
  Description of Artificial Sequence: Synthetic oligonucleotide
  Target: LAMA2; (+) strand; PAM type: NRG; PAM sequence: TGG
gagacgaggtttctccatgt

SEQ ID NO: 137561 - DNA, 20 bp, Artificial Sequence
  Description of Artificial Sequence: Synthetic oligonucleotide
  Target: LAMA2; (+) strand; PAM type: NRG; PAM sequence: TAG
cgaggtttctccatgttggt

SEQ ID NO: 137562 - DNA, 20 bp, Artificial Sequence
  Description of Artificial Sequence: Synthetic oligonucleotide
  Target: LAMA2; (+) strand; PAM type: NRG; PAM sequence: AGG
gaggtttctccatgttggtt

SEQ ID NO: 137563 - DNA, 20 bp, Artificial Sequence
  Description of Artificial Sequence: Synthetic oligonucleotide
  Target: LAMA2; (+) strand; PAM type: NRG; PAM sequence: TGG
tttctccatgttggttaggc

SEQ ID NO: 137564 - DNA, 20 bp, Artificial Sequence
  Description of Artificial Sequence: Synthetic oligonucleotide
  Target: LAMA2; (+) strand; PAM type: NRG; PAM sequence: CAG
gttaggctggtcccgaactc

SEQ ID NO: 137565 - DNA, 20 bp, Artificial Sequence
  Description of Artificial Sequence: Synthetic oligonucleotide
  Target: LAMA2; (+) strand; PAM type: NRG; PAM sequence: CAG
tggtcccgaactccagacct

SEQ ID NO: 137566 - DNA, 20 bp, Artificial Sequence
  Description of Artificial Sequence: Synthetic oligonucleotide
  Target: LAMA2; (+) strand; PAM type: NRG; PAM sequence: CGG
ctcagttgatccaactgcct

SEQ ID NO: 137567 - DNA, 20 bp, Artificial Sequence
  Description of Artificial Sequence: Synthetic oligonucleotide
  Target: LAMA2; (+) strand; PAM type: NRG; PAM sequence: AAG
ccaactgcctcggcctccca

SEQ ID NO: 137568 - DNA, 20 bp, Artificial Sequence
  Description of Artificial Sequence: Synthetic oligonucleotide
  Target: LAMA2; (+) strand; PAM type: NRG; PAM sequence: TGG
gcctcggcctcccaaagtgc

SEQ ID NO: 137569 - DNA, 20 bp, Artificial Sequence
  Description of Artificial Sequence: Synthetic oligonucleotide
  Target: LAMA2; (+) strand; PAM type: NRG; PAM sequence: GGG
cctcggcctcccaaagtgct

SEQ ID NO: 137570 - DNA, 20 bp, Artificial Sequence
  Description of Artificial Sequence: Synthetic oligonucleotide
  Target: LAMA2; (+) strand; PAM type: NRG; PAM sequence: CAG
ctcccaaagtgctgggatta

SEQ ID NO: 137571 - DNA, 20 bp, Artificial Sequence
  Description of Artificial Sequence: Synthetic oligonucleotide
  Target: LAMA2; (+) strand; PAM type: NRG; PAM sequence: GAG
agtgctgggattacagacat

SEQ ID NO: 137572 - DNA, 20 bp, Artificial Sequence
  Description of Artificial Sequence: Synthetic oligonucleotide
  Target: LAMA2; (+) strand; PAM type: NRG; PAM sequence: CGG
cagacatgagccactgcgcc

SEQ ID NO: 137573 - DNA, 20 bp, Artificial Sequence
  Description of Artificial Sequence: Synthetic oligonucleotide
  Target: LAMA2; (+) strand; PAM type: NRG; PAM sequence: TGG
ccactgcgcccggccgactc

SEQ ID NO: 137574 - DNA, 20 bp, Artificial Sequence
  Description of Artificial Sequence: Synthetic oligonucleotide
  Target: LAMA2; (+) strand; PAM type: NRG; PAM sequence: CGG
gccgactctggtgaatttct

SEQ ID NO: 137575 - DNA, 20 bp, Artificial Sequence
  Description of Artificial Sequence: Synthetic oligonucleotide
  Target: LAMA2; (+) strand; PAM type: NRG; PAM sequence: AAG
ctggtgaatttctcggatgt

SEQ ID NO: 137576 - DNA, 20 bp, Artificial Sequence
  Description of Artificial Sequence: Synthetic oligonucleotide
  Target: LAMA2; (+) strand; PAM type: NRG; PAM sequence: TGG
ttctcggatgtaagttgtta

SEQ ID NO: 137577 - DNA, 20 bp, Artificial Sequence
  Description of Artificial Sequence: Synthetic oligonucleotide
  Target: LAMA2; (+) strand; PAM type: NRG; PAM sequence: TAG
aagttgttatggtatgtgtg

SEQ ID NO: 137578 - DNA, 20 bp, Artificial Sequence
  Description of Artificial Sequence: Synthetic oligonucleotide
  Target: LAMA2; (+) strand; PAM type: NRG; PAM sequence: AGG
agttgttatggtatgtgtgt

SEQ ID NO: 137579 - DNA, 20 bp, Artificial Sequence
  Description of Artificial Sequence: Synthetic oligonucleotide
  Target: LAMA2; (+) strand; PAM type: NRG; PAM sequence: GAG
ttgttatggtatgtgtgtag

SEQ ID NO: 137580 - DNA, 20 bp, Artificial Sequence
  Description of Artificial Sequence: Synthetic oligonucleotide
  Target: LAMA2; (+) strand; PAM type: NRG; PAM sequence: TGG
ttatggtatgtgtgtaggag

SEQ ID NO: 137581 - DNA, 20 bp, Artificial Sequence
  Description of Artificial Sequence: Synthetic oligonucleotide
  Target: LAMA2; (+) strand; PAM type: NRG; PAM sequence: GGG
tatggtatgtgtgtaggagt

SEQ ID NO: 137582 - DNA, 20 bp, Artificial Sequence
  Description of Artificial Sequence: Synthetic oligonucleotide
  Target: LAMA2; (+) strand; PAM type: NRG; PAM sequence: GGG
atggtatgtgtgtaggagtg

SEQ ID NO: 137583 - DNA, 20 bp, Artificial Sequence
  Description of Artificial Sequence: Synthetic oligonucleotide
  Target: LAMA2; (+) strand; PAM type: NRG; PAM sequence: GAG
ggtatgtgtgtaggagtggg

SEQ ID NO: 137584 - DNA, 20 bp, Artificial Sequence
  Description of Artificial Sequence: Synthetic oligonucleotide
  Target: LAMA2; (+) strand; PAM type: NRG; PAM sequence: TAG
gtgtgtaggagtggggagta

SEQ ID NO: 137585 - DNA, 20 bp, Artificial Sequence
  Description of Artificial Sequence: Synthetic oligonucleotide
  Target: LAMA2; (+) strand; PAM type: NRG; PAM sequence: TAG
ttgcatacccatgtgtttgc

SEQ ID NO: 137586 - DNA, 20 bp, Artificial Sequence
  Description of Artificial Sequence: Synthetic oligonucleotide
  Target: LAMA2; (+) strand; PAM type: NRG; PAM sequence: TAG
tgtgtttgctagctcttgta

SEQ ID NO: 137587 - DNA, 20 bp, Artificial Sequence
  Description of Artificial Sequence: Synthetic oligonucleotide
  Target: LAMA2; (+) strand; PAM type: NRG; PAM sequence: AAG
ctagctcttgtatagaatgt

SEQ ID NO: 137588 - DNA, 20 bp, Artificial Sequence
  Description of Artificial Sequence: Synthetic oligonucleotide
  Target: LAMA2; (+) strand; PAM type: NRG; PAM sequence: GAG
agctcttgtatagaatgtaa

SEQ ID NO: 137589 - DNA, 20 bp, Artificial Sequence
  Description of Artificial Sequence: Synthetic oligonucleotide
  Target: LAMA2; (+) strand; PAM type: NRG; PAM sequence: AGG
gctcttgtatagaatgtaag

SEQ ID NO: 137590 - DNA, 20 bp, Artificial Sequence
  Description of Artificial Sequence: Synthetic oligonucleotide
  Target: LAMA2; (+) strand; PAM type: NRG; PAM sequence: AAG
ttgtatagaatgtaagagga

SEQ ID NO: 137591 - DNA, 20 bp, Artificial Sequence
  Description of Artificial Sequence: Synthetic oligonucleotide
  Target: LAMA2; (+) strand; PAM type: NRG; PAM sequence: AGG
tgtatagaatgtaagaggaa

SEQ ID NO: 137592 - DNA, 20 bp, Artificial Sequence
  Description of Artificial Sequence: Synthetic oligonucleotide
  Target: LAMA2; (+) strand; PAM type: NRG; PAM sequence: CAG
taagaggaaaggacatatgt

SEQ ID NO: 137593 - DNA, 20 bp, Artificial Sequence
  Description of Artificial Sequence: Synthetic oligonucleotide
  Target: LAMA2; (+) strand; PAM type: NRG; PAM sequence: GAG
agaggaaaggacatatgtca

SEQ ID NO: 137594 - DNA, 20 bp, Artificial Sequence
  Description of Artificial Sequence: Synthetic oligonucleotide
  Target: LAMA2; (+) strand; PAM type: NRG; PAM sequence: AAG
agccctttgcttttatgtaa

SEQ ID NO: 137595 - DNA, 20 bp, Artificial Sequence
  Description of Artificial Sequence: Synthetic oligonucleotide
  Target: LAMA2; (+) strand; PAM type: NRG; PAM sequence: AAG
tttgcttttatgtaaaagcc

SEQ ID NO: 137596 - DNA, 20 bp, Artificial Sequence
  Description of Artificial Sequence: Synthetic oligonucleotide
  Target: LAMA2; (+) strand; PAM type: NRG; PAM sequence: AGG
ttgcttttatgtaaaagcca

SEQ ID NO: 137597 - DNA, 20 bp, Artificial Sequence
  Description of Artificial Sequence: Synthetic oligonucleotide
  Target: LAMA2; (+) strand; PAM type: NRG; PAM sequence: GGG
tgcttttatgtaaaagccaa

SEQ ID NO: 137598 - DNA, 20 bp, Artificial Sequence
  Description of Artificial Sequence: Synthetic oligonucleotide
  Target: LAMA2; (+) strand; PAM type: NRG; PAM sequence: GAG
cttttatgtaaaagccaagg

SEQ ID NO: 137599 - DNA, 20 bp, Artificial Sequence
  Description of Artificial Sequence: Synthetic oligonucleotide
  Target: LAMA2; (+) strand; PAM type: NRG; PAM sequence: CAG
atgtaaaagccaagggagtt

SEQ ID NO: 137600 - DNA, 20 bp, Artificial Sequence
  Description of Artificial Sequence: Synthetic oligonucleotide
  Target: LAMA2; (+) strand; PAM type: NRG; PAM sequence: AGG
tgtaaaagccaagggagttc

SEQ ID NO: 137601 - DNA, 20 bp, Artificial Sequence
  Description of Artificial Sequence: Synthetic oligonucleotide
  Target: LAMA2; (+) strand; PAM type: NRG; PAM sequence: TGG
gccaagggagttcaggtaaa

SEQ ID NO: 137602 - DNA, 20 bp, Artificial Sequence
  Description of Artificial Sequence: Synthetic oligonucleotide
  Target: LAMA2; (+) strand; PAM type: NRG; PAM sequence: GAG
caagggagttcaggtaaatg

SEQ ID NO: 137603 - DNA, 20 bp, Artificial Sequence
  Description of Artificial Sequence: Synthetic oligonucleotide
  Target: LAMA2; (+) strand; PAM type: NRG; PAM sequence: AAG
gagttcaggtaaatggagtc

SEQ ID NO: 137604 - DNA, 20 bp, Artificial Sequence
  Description of Artificial Sequence: Synthetic oligonucleotide
  Target: LAMA2; (+) strand; PAM type: NRG; PAM sequence: AGG
agttcaggtaaatggagtca

SEQ ID NO: 137605 - DNA, 20 bp, Artificial Sequence
  Description of Artificial Sequence: Synthetic oligonucleotide
  Target: LAMA2; (+) strand; PAM type: NRG; PAM sequence: AAG
taaatggagtcaaggcaata

SEQ ID NO: 137606 - DNA, 20 bp, Artificial Sequence
  Description of Artificial Sequence: Synthetic oligonucleotide
  Target: LAMA2; (+) strand; PAM type: NRG; PAM sequence: AGG
aaatggagtcaaggcaataa

SEQ ID NO: 137607 - DNA, 20 bp, Artificial Sequence
  Description of Artificial Sequence: Synthetic oligonucleotide
  Target: LAMA2; (+) strand; PAM type: NRG; PAM sequence: GGG
aatggagtcaaggcaataaa

SEQ ID NO: 137608 - DNA, 20 bp, Artificial Sequence
  Description of Artificial Sequence: Synthetic oligonucleotide
  Target: LAMA2; (+) strand; PAM type: NRG; PAM sequence: CAG
gtcaaggcaataaagggaaa

SEQ ID NO: 137609 - DNA, 20 bp, Artificial Sequence
  Description of Artificial Sequence: Synthetic oligonucleotide
  Target: LAMA2; (+) strand; PAM type: NRG; PAM sequence: AAG
aataaagggaaacagatttc

SEQ ID NO: 137610 - DNA, 20 bp, Artificial Sequence
  Description of Artificial Sequence: Synthetic oligonucleotide
  Target: LAMA2; (+) strand; PAM type: NRG; PAM sequence: AGG
ataaagggaaacagatttca

SEQ ID NO: 137611 - DNA, 20 bp, Artificial Sequence
  Description of Artificial Sequence: Synthetic oligonucleotide
  Target: LAMA2; (+) strand; PAM type: NRG; PAM sequence: GGG
taaagggaaacagatttcaa

SEQ ID NO: 137612 - DNA, 20 bp, Artificial Sequence
  Description of Artificial Sequence: Synthetic oligonucleotide
  Target: LAMA2; (+) strand; PAM type: NRG; PAM sequence: CAG
agatttcaagggaaaaaaat

SEQ ID NO: 137613 - DNA, 20 bp, Artificial Sequence
  Description of Artificial Sequence: Synthetic oligonucleotide
  Target: LAMA2; (+) strand; PAM type: NRG; PAM sequence: AGG
gatttcaagggaaaaaaatc

SEQ ID NO: 137614 - DNA, 20 bp, Artificial Sequence
  Description of Artificial Sequence: Synthetic oligonucleotide
  Target: LAMA2; (+) strand; PAM type: NRG; PAM sequence: GAG
gggaaaaaaatcaggaaaat

SEQ ID NO: 137615 - DNA, 20 bp, Artificial Sequence
  Description of Artificial Sequence: Synthetic oligonucleotide
  Target: LAMA2; (+) strand; PAM type: NRG; PAM sequence: AGG
ggaaaaaaatcaggaaaatg

SEQ ID NO: 137616 - DNA, 20 bp, Artificial Sequence
  Description of Artificial Sequence: Synthetic oligonucleotide
  Target: LAMA2; (+) strand; PAM type: NRG; PAM sequence: TAG
aaatcaggaaaatgaggcat

SEQ ID NO: 137617 - DNA, 20 bp, Artificial Sequence
  Description of Artificial Sequence: Synthetic oligonucleotide
  Target: LAMA2; (+) strand; PAM type: NRG; PAM sequence: AGG
aatcaggaaaatgaggcatt

SEQ ID NO: 137618 - DNA, 20 bp, Artificial Sequence
  Description of Artificial Sequence: Synthetic oligonucleotide
  Target: LAMA2; (+) strand; PAM type: NRG; PAM sequence: AAG
gaggcattaggtatgtgatg

SEQ ID NO: 137619 - DNA, 20 bp, Artificial Sequence
  Description of Artificial Sequence: Synthetic oligonucleotide
  Target: LAMA2; (+) strand; PAM type: NRG; PAM sequence: AGG
aggcattaggtatgtgatga

SEQ ID NO: 137620 - DNA, 20 bp, Artificial Sequence
  Description of Artificial Sequence: Synthetic oligonucleotide
  Target: LAMA2; (+) strand; PAM type: NRG; PAM sequence: AAG
attaggtatgtgatgaagga

SEQ ID NO: 137621 - DNA, 20 bp, Artificial Sequence
  Description of Artificial Sequence: Synthetic oligonucleotide
  Target: LAMA2; (+) strand; PAM type: NRG; PAM sequence: TAG
gtgatgaaggaaagaatttt

SEQ ID NO: 137622 - DNA, 20 bp, Artificial Sequence
  Description of Artificial Sequence: Synthetic oligonucleotide
  Target: LAMA2; (+) strand; PAM type: NRG; PAM sequence: AGG
tgatgaaggaaagaattttt

SEQ ID NO: 137623 - DNA, 20 bp, Artificial Sequence
  Description of Artificial Sequence: Synthetic oligonucleotide
  Target: LAMA2; (+) strand; PAM type: NRG; PAM sequence: AAG
tgaaggaaagaatttttagg

SEQ ID NO: 137624 - DNA, 20 bp, Artificial Sequence
  Description of Artificial Sequence: Synthetic oligonucleotide
  Target: LAMA2; (+) strand; PAM type: NRG; PAM sequence: AAG
aaagaatttttaggaagaaa

SEQ ID NO: 137625 - DNA, 20 bp, Artificial Sequence
  Description of Artificial Sequence: Synthetic oligonucleotide
  Target: LAMA2; (+) strand; PAM type: NRG; PAM sequence: CAG
tttttaggaagaaaaagtaa

SEQ ID NO: 137626 - DNA, 20 bp, Artificial Sequence
  Description of Artificial Sequence: Synthetic oligonucleotide
  Target: LAMA2; (+) strand; PAM type: NRG; PAM sequence: AAG
taacagttttaaatgcttcg

SEQ ID NO: 137627 - DNA, 20 bp, Artificial Sequence
  Description of Artificial Sequence: Synthetic oligonucleotide
  Target: LAMA2; (+) strand; PAM type: NRG; PAM sequence: GAG
taaatgcttcgaagataatt

SEQ ID NO: 137628 - DNA, 20 bp, Artificial Sequence
  Description of Artificial Sequence: Synthetic oligonucleotide
  Target: LAMA2; (+) strand; PAM type: NRG; PAM sequence: AAG
tgcttcgaagataattgagt

SEQ ID NO: 137629 - DNA, 20 bp, Artificial Sequence
  Description of Artificial Sequence: Synthetic oligonucleotide
  Target: LAMA2; (+) strand; PAM type: NRG; PAM sequence: AAG
cgaagataattgagtaagaa

SEQ ID NO: 137630 - DNA, 20 bp, Artificial Sequence
  Description of Artificial Sequence: Synthetic oligonucleotide
  Target: LAMA2; (+) strand; PAM type: NRG; PAM sequence: TAG
tgagtaagaaaagcataaaa

SEQ ID NO: 137631 - DNA, 20 bp, Artificial Sequence
  Description of Artificial Sequence: Synthetic oligonucleotide
  Target: LAMA2; (+) strand; PAM type: NRG; PAM sequence: AGG
gagtaagaaaagcataaaat

SEQ ID NO: 137632 - DNA, 20 bp, Artificial Sequence
  Description of Artificial Sequence: Synthetic oligonucleotide
  Target: LAMA2; (+) strand; PAM type: NRG; PAM sequence: TGG
ttcccttgcttttgacaaca

SEQ ID NO: 137633 - DNA, 20 bp, Artificial Sequence
  Description of Artificial Sequence: Synthetic oligonucleotide
  Target: LAMA2; (+) strand; PAM type: NRG; PAM sequence: AAG
atccattgaacacctttcta

SEQ ID NO: 137634 - DNA, 20 bp, Artificial Sequence
  Description of Artificial Sequence: Synthetic oligonucleotide
  Target: LAMA2; (+) strand; PAM type: NRG; PAM sequence: CAG
gaacacctttctaaagtact

SEQ ID NO: 137635 - DNA, 20 bp, Artificial Sequence
  Description of Artificial Sequence: Synthetic oligonucleotide
  Target: LAMA2; (+) strand; PAM type: NRG; PAM sequence: CAG
cacctttctaaagtactcag

SEQ ID NO: 137636 - DNA, 20 bp, Artificial Sequence
  Description of Artificial Sequence: Synthetic oligonucleotide
  Target: LAMA2; (+) strand; PAM type: NRG; PAM sequence: TAG
taaagtactcagcagattca

SEQ ID NO: 137637 - DNA, 20 bp, Artificial Sequence
  Description of Artificial Sequence: Synthetic oligonucleotide
  Target: LAMA2; (+) strand; PAM type: NRG; PAM sequence: TGG
agtactcagcagattcatag

SEQ ID NO: 137638 - DNA, 20 bp, Artificial Sequence
  Description of Artificial Sequence: Synthetic oligonucleotide
  Target: LAMA2; (+) strand; PAM type: NRG; PAM sequence: AAG
ctcagcagattcatagtggc

SEQ ID NO: 137639 - DNA, 20 bp, Artificial Sequence
  Description of Artificial Sequence: Synthetic oligonucleotide
  Target: LAMA2; (+) strand; PAM type: NRG; PAM sequence: GAG
cagcagattcatagtggcaa

SEQ ID NO: 137640 - DNA, 20 bp, Artificial Sequence
  Description of Artificial Sequence: Synthetic oligonucleotide
  Target: LAMA2; (+) strand; PAM type: NRG; PAM sequence: AGG
agcagattcatagtggcaag

SEQ ID NO: 137641 - DNA, 20 bp, Artificial Sequence
  Description of Artificial Sequence: Synthetic oligonucleotide
  Target: LAMA2; (+) strand; PAM type: NRG; PAM sequence: AAG
tagtggcaagaggcacactg

SEQ ID NO: 137642 - DNA, 20 bp, Artificial Sequence
  Description of Artificial Sequence: Synthetic oligonucleotide
  Target: LAMA2; (+) strand; PAM type: NRG; PAM sequence: GAG
gtggcaagaggcacactgaa

SEQ ID NO: 137643 - DNA, 20 bp, Artificial Sequence
  Description of Artificial Sequence: Synthetic oligonucleotide
  Target: LAMA2; (+) strand; PAM type: NRG; PAM sequence: AGG
tggcaagaggcacactgaag

SEQ ID NO: 137644 - DNA, 20 bp, Artificial Sequence
  Description of Artificial Sequence: Synthetic oligonucleotide
  Target: LAMA2; (+) strand; PAM type: NRG; PAM sequence: AAG
gaggtaataaatgaatgatg

SEQ ID NO: 137645 - DNA, 20 bp, Artificial Sequence
  Description of Artificial Sequence: Synthetic oligonucleotide
  Target: LAMA2; (+) strand; PAM type: NRG; PAM sequence: AAG
gtaataaatgaatgatgaag

SEQ ID NO: 137646 - DNA, 20 bp, Artificial Sequence
  Description of Artificial Sequence: Synthetic oligonucleotide
  Target: LAMA2; (+) strand; PAM type: NRG; PAM sequence: AAG
ataaatgaatgatgaagaag

SEQ ID NO: 137647 - DNA, 20 bp, Artificial Sequence
  Description of Artificial Sequence: Synthetic oligonucleotide
  Target: LAMA2; (+) strand; PAM type: NRG; PAM sequence: GAG
aaatgaatgatgaagaagaa

SEQ ID NO: 137648 - DNA, 20 bp, Artificial Sequence
  Description of Artificial Sequence: Synthetic oligonucleotide
  Target: LAMA2; (+) strand; PAM type: NRG; PAM sequence: AGG
aatgaatgatgaagaagaag

SEQ ID NO: 137649 - DNA, 20 bp, Artificial Sequence
  Description of Artificial Sequence: Synthetic oligonucleotide
  Target: LAMA2; (+) strand; PAM type: NRG; PAM sequence: GGG
atgaatgatgaagaagaaga

SEQ ID NO: 137650 - DNA, 20 bp, Artificial Sequence
  Description of Artificial Sequence: Synthetic oligonucleotide
  Target: LAMA2; (+) strand; PAM type: NRG; PAM sequence: GGG
tgaatgatgaagaagaagag

SEQ ID NO: 137651 - DNA, 20 bp, Artificial Sequence
  Description of Artificial Sequence: Synthetic oligonucleotide
  Target: LAMA2; (+) strand; PAM type: NRG; PAM sequence: TAG
tgaagaagaagaggggacta

SEQ ID NO: 137652 - DNA, 20 bp, Artificial Sequence
  Description of Artificial Sequence: Synthetic oligonucleotide
  Target: LAMA2; (+) strand; PAM type: NRG; PAM sequence: AAG
gactatagaaatattctgtc

SEQ ID NO: 137653 - DNA, 20 bp, Artificial Sequence
  Description of Artificial Sequence: Synthetic oligonucleotide
  Target: LAMA2; (+) strand; PAM type: NRG; PAM sequence: AAG
gtcaagtatccttgatgtga

SEQ ID NO: 137654 - DNA, 20 bp, Artificial Sequence
  Description of Artificial Sequence: Synthetic oligonucleotide
  Target: LAMA2; (+) strand; PAM type: NRG; PAM sequence: GAG
caagtatccttgatgtgaaa

SEQ ID NO: 137655 - DNA, 20 bp, Artificial Sequence
  Description of Artificial Sequence: Synthetic oligonucleotide
  Target: LAMA2; (+) strand; PAM type: NRG; PAM sequence: AAG
ccttgatgtgaaagagaatg

SEQ ID NO: 137656 - DNA, 20 bp, Artificial Sequence
  Description of Artificial Sequence: Synthetic oligonucleotide
  Target: LAMA2; (+) strand; PAM type: NRG; PAM sequence: AGG
cttgatgtgaaagagaatga

SEQ ID NO: 137657 - DNA, 20 bp, Artificial Sequence
  Description of Artificial Sequence: Synthetic oligonucleotide
  Target: LAMA2; (+) strand; PAM type: NRG; PAM sequence: CAG
atgtgaaagagaatgaagga

SEQ ID NO: 137658 - DNA, 20 bp, Artificial Sequence
  Description of Artificial Sequence: Synthetic oligonucleotide
  Target: LAMA2; (+) strand; PAM type: NRG; PAM sequence: GAG
gtgaaagagaatgaaggaca

SEQ ID NO: 137659 - DNA, 20 bp, Artificial Sequence
  Description of Artificial Sequence: Synthetic oligonucleotide
  Target: LAMA2; (+) strand; PAM type: NRG; PAM sequence: AGG
tgaaagagaatgaaggacag

SEQ ID NO: 137660 - DNA, 20 bp, Artificial Sequence
  Description of Artificial Sequence: Synthetic oligonucleotide
  Target: LAMA2; (+) strand; PAM type: NRG; PAM sequence: GAG
aaagagaatgaaggacagag

SEQ ID NO: 137661 - DNA, 20 bp, Artificial Sequence
  Description of Artificial Sequence: Synthetic oligonucleotide
  Target: LAMA2; (+) strand; PAM type: NRG; PAM sequence: AGG
aagagaatgaaggacagagg

SEQ ID NO: 137662 - DNA, 20 bp, Artificial Sequence
  Description of Artificial Sequence: Synthetic oligonucleotide
  Target: LAMA2; (+) strand; PAM type: NRG; PAM sequence: TGG
atgaaggacagaggaggttg

SEQ ID NO: 137663 - DNA, 20 bp, Artificial Sequence
  Description of Artificial Sequence: Synthetic oligonucleotide
  Target: LAMA2; (+) strand; PAM type: NRG; PAM sequence: GAG
gaaggacagaggaggttgtg

SEQ ID NO: 137664 - DNA, 20 bp, Artificial Sequence
  Description of Artificial Sequence: Synthetic oligonucleotide
  Target: LAMA2; (+) strand; PAM type: NRG; PAM sequence: AAG
gaggaggttgtggagttgca

SEQ ID NO: 137665 - DNA, 20 bp, Artificial Sequence
  Description of Artificial Sequence: Synthetic oligonucleotide
  Target: LAMA2; (+) strand; PAM type: NRG; PAM sequence: AGG
aggaggttgtggagttgcaa

SEQ ID NO: 137666 - DNA, 20 bp, Artificial Sequence
  Description of Artificial Sequence: Synthetic oligonucleotide
  Target: LAMA2; (+) strand; PAM type: NRG; PAM sequence: AAG
tggagttgcaaaggttttca

SEQ ID NO: 137667 - DNA, 20 bp, Artificial Sequence
  Description of Artificial Sequence: Synthetic oligonucleotide
  Target: LAMA2; (+) strand; PAM type: NRG; PAM sequence: AAG
ttgcaaaggttttcaaagat

SEQ ID NO: 137668 - DNA, 20 bp, Artificial Sequence
  Description of Artificial Sequence: Synthetic oligonucleotide
  Target: LAMA2; (+) strand; PAM type: NRG; PAM sequence: GAG
gcaaaggttttcaaagataa

SEQ ID NO: 137669 - DNA, 20 bp, Artificial Sequence
  Description of Artificial Sequence: Synthetic oligonucleotide
  Target: LAMA2; (+) strand; PAM type: NRG; PAM sequence: GAG
ttcaaagataagagacattt

SEQ ID NO: 137670 - DNA, 20 bp, Artificial Sequence
  Description of Artificial Sequence: Synthetic oligonucleotide
  Target: LAMA2; (+) strand; PAM type: NRG; PAM sequence: TGG
aagataagagacatttgagt

SEQ ID NO: 137671 - DNA, 20 bp, Artificial Sequence
  Description of Artificial Sequence: Synthetic oligonucleotide
  Target: LAMA2; (+) strand; PAM type: NRG; PAM sequence: TAG
aagagacatttgagttggtt

SEQ ID NO: 137672 - DNA, 20 bp, Artificial Sequence
  Description of Artificial Sequence: Synthetic oligonucleotide
  Target: LAMA2; (+) strand; PAM type: NRG; PAM sequence: TGG
tttgagttggtttagatgct

SEQ ID NO: 137673 - DNA, 20 bp, Artificial Sequence
  Description of Artificial Sequence: Synthetic oligonucleotide
  Target: LAMA2; (+) strand; PAM type: NRG; PAM sequence: GGG
ttgagttggtttagatgctt

SEQ ID NO: 137674 - DNA, 20 bp, Artificial Sequence
  Description of Artificial Sequence: Synthetic oligonucleotide
  Target: LAMA2; (+) strand; PAM type: NRG; PAM sequence: GGG
tgagttggtttagatgcttg

SEQ ID NO: 137675 - DNA, 20 bp, Artificial Sequence
  Description of Artificial Sequence: Synthetic oligonucleotide
  Target: LAMA2; (+) strand; PAM type: NRG; PAM sequence: GGG
gagttggtttagatgcttgg

SEQ ID NO: 137676 - DNA, 20 bp, Artificial Sequence
  Description of Artificial Sequence: Synthetic oligonucleotide
  Target: LAMA2; (+) strand; PAM type: NRG; PAM sequence: GGG
agttggtttagatgcttggg

SEQ ID NO: 137677 - DNA, 20 bp, Artificial Sequence
  Description of Artificial Sequence: Synthetic oligonucleotide
  Target: LAMA2; (+) strand; PAM type: NRG; PAM sequence: AAG
ggtttagatgcttgggggga

SEQ ID NO: 137678 - DNA, 20 bp, Artificial Sequence
  Description of Artificial Sequence: Synthetic oligonucleotide
  Target: LAMA2; (+) strand; PAM type: NRG; PAM sequence: AGG
gtttagatgcttggggggaa

SEQ ID NO: 137679 - DNA, 20 bp, Artificial Sequence
  Description of Artificial Sequence: Synthetic oligonucleotide
  Target: LAMA2; (+) strand; PAM type: NRG; PAM sequence: CAG
tagatgcttggggggaaagg

SEQ ID NO: 137680 - DNA, 20 bp, Artificial Sequence
  Description of Artificial Sequence: Synthetic oligonucleotide
  Target: LAMA2; (+) strand; PAM type: NRG; PAM sequence: AGG
agatgcttggggggaaaggc

SEQ ID NO: 137681 - DNA, 20 bp, Artificial Sequence
  Description of Artificial Sequence: Synthetic oligonucleotide
  Target: LAMA2; (+) strand; PAM type: NRG; PAM sequence: GGG
gatgcttggggggaaaggca

SEQ ID NO: 137682 - DNA, 20 bp, Artificial Sequence
  Description of Artificial Sequence: Synthetic oligonucleotide
  Target: LAMA2; (+) strand; PAM type: NRG; PAM sequence: AAG
gcttggggggaaaggcaggg

SEQ ID NO: 137683 - DNA, 20 bp, Artificial Sequence
  Description of Artificial Sequence: Synthetic oligonucleotide
  Target: LAMA2; (+) strand; PAM type: NRG; PAM sequence: AAG
ggggaaaggcagggaagttg

SEQ ID NO: 137684 - DNA, 20 bp, Artificial Sequence
  Description of Artificial Sequence: Synthetic oligonucleotide
  Target: LAMA2; (+) strand; PAM type: NRG; PAM sequence: AAG
aggcagggaagttgaagacc

SEQ ID NO: 137685 - DNA, 20 bp, Artificial Sequence
  Description of Artificial Sequence: Synthetic oligonucleotide
  Target: LAMA2; (+) strand; PAM type: NRG; PAM sequence: TGG
cagggaagttgaagaccaag

SEQ ID NO: 137686 - DNA, 20 bp, Artificial Sequence
  Description of Artificial Sequence: Synthetic oligonucleotide
  Target: LAMA2; (+) strand; PAM type: NRG; PAM sequence: TGG
ggaagttgaagaccaagtgg

SEQ ID NO: 137687 - DNA, 20 bp, Artificial Sequence
  Description of Artificial Sequence: Synthetic oligonucleotide
  Target: LAMA2; (+) strand; PAM type: NRG; PAM sequence: TGG
agttgaagaccaagtggtgg

SEQ ID NO: 137688 - DNA, 20 bp, Artificial Sequence
  Description of Artificial Sequence: Synthetic oligonucleotide
  Target: LAMA2; (+) strand; PAM type: NRG; PAM sequence: GGG
gttgaagaccaagtggtggt

SEQ ID NO: 137689 - DNA, 20 bp, Artificial Sequence
  Description of Artificial Sequence: Synthetic oligonucleotide
  Target: LAMA2; (+) strand; PAM type: NRG; PAM sequence: TGG
agaccaagtggtggtgggca

SEQ ID NO: 137690 - DNA, 20 bp, Artificial Sequence
  Description of Artificial Sequence: Synthetic oligonucleotide
  Target: LAMA2; (+) strand; PAM type: NRG; PAM sequence: TAG
tggtgggcatggtgtctctc

SEQ ID NO: 137691 - DNA, 20 bp, Artificial Sequence
  Description of Artificial Sequence: Synthetic oligonucleotide
  Target: LAMA2; (+) strand; PAM type: NRG; PAM sequence: AAG
tgggcatggtgtctctctag

SEQ ID NO: 137692 - DNA, 20 bp, Artificial Sequence
  Description of Artificial Sequence: Synthetic oligonucleotide
  Target: LAMA2; (+) strand; PAM type: NRG; PAM sequence: TGG
tctctagaagtaaaaacata

SEQ ID NO: 137693 - DNA, 20 bp, Artificial Sequence
  Description of Artificial Sequence: Synthetic oligonucleotide
  Target: LAMA2; (+) strand; PAM type: NRG; PAM sequence: GGG
ctctagaagtaaaaacatat

SEQ ID NO: 137694 - DNA, 20 bp, Artificial Sequence
  Description of Artificial Sequence: Synthetic oligonucleotide
  Target: LAMA2; (+) strand; PAM type: NRG; PAM sequence: AAG
gtaaaaacatatgggtcatt

SEQ ID NO: 137695 - DNA, 20 bp, Artificial Sequence
  Description of Artificial Sequence: Synthetic oligonucleotide
  Target: LAMA2; (+) strand; PAM type: NRG; PAM sequence: TAG
aacatatgggtcattaagca

SEQ ID NO: 137696 - DNA, 20 bp, Artificial Sequence
  Description of Artificial Sequence: Synthetic oligonucleotide
  Target: LAMA2; (+) strand; PAM type: NRG; PAM sequence: AGG
acatatgggtcattaagcat

SEQ ID NO: 137697 - DNA, 20 bp, Artificial Sequence
  Description of Artificial Sequence: Synthetic oligonucleotide
  Target: LAMA2; (+) strand; PAM type: NRG; PAM sequence: TAG
cataggcaaaaaccttatat

SEQ ID NO: 137698 - DNA, 20 bp, Artificial Sequence
  Description of Artificial Sequence: Synthetic oligonucleotide
  Target: LAMA2; (+) strand; PAM type: NRG; PAM sequence: AAG
aggcaaaaaccttatattag

SEQ ID NO: 137699 - DNA, 20 bp, Artificial Sequence
  Description of Artificial Sequence: Synthetic oligonucleotide
  Target: LAMA2; (+) strand; PAM type: NRG; PAM sequence: CAG
atacttttaactcaccaaat

SEQ ID NO: 137700 - DNA, 20 bp, Artificial Sequence
  Description of Artificial Sequence: Synthetic oligonucleotide
  Target: LAMA2; (+) strand; PAM type: NRG; PAM sequence: AAG
ttttaactcaccaaatcaga

SEQ ID NO: 137701 - DNA, 20 bp, Artificial Sequence
  Description of Artificial Sequence: Synthetic oligonucleotide
  Target: LAMA2; (+) strand; PAM type: NRG; PAM sequence: AAG
taactcaccaaatcagaaag

SEQ ID NO: 137702 - DNA, 20 bp, Artificial Sequence
  Description of Artificial Sequence: Synthetic oligonucleotide
  Target: LAMA2; (+) strand; PAM type: NRG; PAM sequence: AAG
tcaccaaatcagaaagaaga

SEQ ID NO: 137703 - DNA, 20 bp, Artificial Sequence
  Description of Artificial Sequence: Synthetic oligonucleotide
  Target: LAMA2; (+) strand; PAM type: NRG; PAM sequence: TAG
cagaaagaagaaagaatgaa

SEQ ID NO: 137704 - DNA, 20 bp, Artificial Sequence
  Description of Artificial Sequence: Synthetic oligonucleotide
  Target: LAMA2; (+) strand; PAM type: NRG; PAM sequence: CAG
aaagaagaaagaatgaatag

SEQ ID NO: 137705 - DNA, 20 bp, Artificial Sequence
  Description of Artificial Sequence: Synthetic oligonucleotide
  Target: LAMA2; (+) strand; PAM type: NRG; PAM sequence: CAG
gaagaaagaatgaatagcag

SEQ ID NO: 137706 - DNA, 20 bp, Artificial Sequence
  Description of Artificial Sequence: Synthetic oligonucleotide
  Target: LAMA2; (+) strand; PAM type: NRG; PAM sequence: CAG
aaagaatgaatagcagcagt

SEQ ID NO: 137707 - DNA, 20 bp, Artificial Sequence
  Description of Artificial Sequence: Synthetic oligonucleotide
  Target: LAMA2; (+) strand; PAM type: NRG; PAM sequence: CAG
gaatgaatagcagcagtcag

SEQ ID NO: 137708 - DNA, 20 bp, Artificial Sequence
  Description of Artificial Sequence: Synthetic oligonucleotide
  Target: LAMA2; (+) strand; PAM type: NRG; PAM sequence: AAG
gaatagcagcagtcagcaga

SEQ ID NO: 137709 - DNA, 20 bp, Artificial Sequence
  Description of Artificial Sequence: Synthetic oligonucleotide
  Target: LAMA2; (+) strand; PAM type: NRG; PAM sequence: TGG
cagcagtcagcagaaagtgt

SEQ ID NO: 137710 - DNA, 20 bp, Artificial Sequence
  Description of Artificial Sequence: Synthetic oligonucleotide
  Target: LAMA2; (+) strand; PAM type: NRG; PAM sequence: GGG
agcagtcagcagaaagtgtt

SEQ ID NO: 137711 - DNA, 20 bp, Artificial Sequence
  Description of Artificial Sequence: Synthetic oligonucleotide
  Target: LAMA2; (+) strand; PAM type: NRG; PAM sequence: GAG
cagtcagcagaaagtgttgg

SEQ ID NO: 137712 - DNA, 20 bp, Artificial Sequence
  Description of Artificial Sequence: Synthetic oligonucleotide
  Target: LAMA2; (+) strand; PAM type: NRG; PAM sequence: AAG
atgatcttgatttcttcatt

SEQ ID NO: 137713 - DNA, 20 bp, Artificial Sequence
  Description of Artificial Sequence: Synthetic oligonucleotide
  Target: LAMA2; (+) strand; PAM type: NRG; PAM sequence: TGG
tcttcattaagatgtaaatc

SEQ ID NO: 137714 - DNA, 20 bp, Artificial Sequence
  Description of Artificial Sequence: Synthetic oligonucleotide
  Target: LAMA2; (+) strand; PAM type: NRG; PAM sequence: GGG
cttcattaagatgtaaatct

SEQ ID NO: 137715 - DNA, 20 bp, Artificial Sequence
  Description of Artificial Sequence: Synthetic oligonucleotide
  Target: LAMA2; (+) strand; PAM type: NRG; PAM sequence: GAG
gtaaatctgggttacctgct

SEQ ID NO: 137716 - DNA, 20 bp, Artificial Sequence
  Description of Artificial Sequence: Synthetic oligonucleotide
  Target: LAMA2; (+) strand; PAM type: NRG; PAM sequence: AGG
taaatctgggttacctgctg

SEQ ID NO: 137717 - DNA, 20 bp, Artificial Sequence
  Description of Artificial Sequence: Synthetic oligonucleotide
  Target: LAMA2; (+) strand; PAM type: NRG; PAM sequence: AAG
tctgggttacctgctgagga

SEQ ID NO: 137718 - DNA, 20 bp, Artificial Sequence
  Description of Artificial Sequence: Synthetic oligonucleotide
  Target: LAMA2; (+) strand; PAM type: NRG; PAM sequence: AAG
gggttacctgctgaggaaag

SEQ ID NO: 137719 - DNA, 20 bp, Artificial Sequence
  Description of Artificial Sequence: Synthetic oligonucleotide
  Target: LAMA2; (+) strand; PAM type: NRG; PAM sequence: TAG
tgaggaaagaagcaaacatt

SEQ ID NO: 137720 - DNA, 20 bp, Artificial Sequence
  Description of Artificial Sequence: Synthetic oligonucleotide
  Target: LAMA2; (+) strand; PAM type: NRG; PAM sequence: GAG
gaagcaaacatttagattat

SEQ ID NO: 137721 - DNA, 20 bp, Artificial Sequence
  Description of Artificial Sequence: Synthetic oligonucleotide
  Target: LAMA2; (+) strand; PAM type: NRG; PAM sequence: CAG
catttagattatgagcctct

SEQ ID NO: 137722 - DNA, 20 bp, Artificial Sequence
  Description of Artificial Sequence: Synthetic oligonucleotide
  Target: LAMA2; (+) strand; PAM type: NRG; PAM sequence: AGG
atttagattatgagcctctc

SEQ ID NO: 137723 - DNA, 20 bp, Artificial Sequence
  Description of Artificial Sequence: Synthetic oligonucleotide
  Target: LAMA2; (+) strand; PAM type: NRG; PAM sequence: GGG
tttagattatgagcctctca

SEQ ID NO: 137724 - DNA, 20 bp, Artificial Sequence
  Description of Artificial Sequence: Synthetic oligonucleotide
  Target: LAMA2; (+) strand; PAM type: NRG; PAM sequence: GGG
ttagattatgagcctctcag

SEQ ID NO: 137725 - DNA, 20 bp, Artificial Sequence
  Description of Artificial Sequence: Synthetic oligonucleotide
  Target: LAMA2; (+) strand; PAM type: NRG; PAM sequence: TAG
ttatgagcctctcaggggaa

SEQ ID NO: 137726 - DNA, 20 bp, Artificial Sequence
  Description of Artificial Sequence: Synthetic oligonucleotide
  Target: LAMA2; (+) strand; PAM type: NRG; PAM sequence: AGG
tatgagcctctcaggggaat

SEQ ID NO: 137727 - DNA, 20 bp, Artificial Sequence
  Description of Artificial Sequence: Synthetic oligonucleotide
  Target: LAMA2; (+) strand; PAM type: NRG; PAM sequence: GAG
tgagcctctcaggggaatag

SEQ ID NO: 137728 - DNA, 20 bp, Artificial Sequence
  Description of Artificial Sequence: Synthetic oligonucleotide
  Target: LAMA2; (+) strand; PAM type: NRG; PAM sequence: AGG
gagcctctcaggggaatagg

SEQ ID NO: 137729 - DNA, 20 bp, Artificial Sequence
  Description of Artificial Sequence: Synthetic oligonucleotide
  Target: LAMA2; (+) strand; PAM type: NRG; PAM sequence: GGG
agcctctcaggggaatagga

SEQ ID NO: 137730 - DNA, 20 bp, Artificial Sequence
  Description of Artificial Sequence: Synthetic oligonucleotide
  Target: LAMA2; (+) strand; PAM type: NRG; PAM sequence: GGG
gcctctcaggggaataggag

SEQ ID NO: 137731 - DNA, 20 bp, Artificial Sequence
  Description of Artificial Sequence: Synthetic oligonucleotide
  Target: LAMA2; (+) strand; PAM type: NRG; PAM sequence: GAG
gggaataggaggggatcact

SEQ ID NO: 137732 - DNA, 20 bp, Artificial Sequence
  Description of Artificial Sequence: Synthetic oligonucleotide
  Target: LAMA2; (+) strand; PAM type: NRG; PAM sequence: CAG
ggggatcactgagccgtaat

SEQ ID NO: 137733 - DNA, 20 bp, Artificial Sequence
  Description of Artificial Sequence: Synthetic oligonucleotide
  Target: LAMA2; (+) strand; PAM type: NRG; PAM sequence: AAG
actgagccgtaatcagaata

SEQ ID NO: 137734 - DNA, 20 bp, Artificial Sequence
  Description of Artificial Sequence: Synthetic oligonucleotide
  Target: LAMA2; (+) strand; PAM type: NRG; PAM sequence: TGG
gagccgtaatcagaataaag

SEQ ID NO: 137735 - DNA, 20 bp, Artificial Sequence
  Description of Artificial Sequence: Synthetic oligonucleotide
  Target: LAMA2; (+) strand; PAM type: NRG; PAM sequence: TGG
aataaagtggcaattccata

SEQ ID NO: 137736 - DNA, 20 bp, Artificial Sequence
  Description of Artificial Sequence: Synthetic oligonucleotide
  Target: LAMA2; (+) strand; PAM type: NRG; PAM sequence: GAG
taaagtggcaattccatatg

SEQ ID NO: 137737 - DNA, 20 bp, Artificial Sequence
  Description of Artificial Sequence: Synthetic oligonucleotide
  Target: LAMA2; (+) strand; PAM type: NRG; PAM sequence: AAG
attccatatggagtaaaata

SEQ ID NO: 137738 - DNA, 20 bp, Artificial Sequence
  Description of Artificial Sequence: Synthetic oligonucleotide
  Target: LAMA2; (+) strand; PAM type: NRG; PAM sequence: TGG
aaaataaagaatcaaacgtg

SEQ ID NO: 137739 - DNA, 20 bp, Artificial Sequence
  Description of Artificial Sequence: Synthetic oligonucleotide
  Target: LAMA2; (+) strand; PAM type: NRG; PAM sequence: TGG
aacgtgtggactgatactct

SEQ ID NO: 137740 - DNA, 20 bp, Artificial Sequence
  Description of Artificial Sequence: Synthetic oligonucleotide
  Target: LAMA2; (+) strand; PAM type: NRG; PAM sequence: GAG
cgtgtggactgatactcttg

SEQ ID NO: 137741 - DNA, 20 bp, Artificial Sequence
  Description of Artificial Sequence: Synthetic oligonucleotide
  Target: LAMA2; (+) strand; PAM type: NRG; PAM sequence: CAG
ctgatactcttggagcatta

SEQ ID NO: 137742 - DNA, 20 bp, Artificial Sequence
  Description of Artificial Sequence: Synthetic oligonucleotide
  Target: LAMA2; (+) strand; PAM type: NRG; PAM sequence: AGG
tgatactcttggagcattac

SEQ ID NO: 137743 - DNA, 20 bp, Artificial Sequence
  Description of Artificial Sequence: Synthetic oligonucleotide
  Target: LAMA2; (+) strand; PAM type: NRG; PAM sequence: GGG
gatactcttggagcattaca

SEQ ID NO: 137744 - DNA, 20 bp, Artificial Sequence
  Description of Artificial Sequence: Synthetic oligonucleotide
  Target: LAMA2; (+) strand; PAM type: NRG; PAM sequence: AAG
ctcttggagcattacaggga

SEQ ID NO: 137745 - DNA, 20 bp, Artificial Sequence
  Description of Artificial Sequence: Synthetic oligonucleotide
  Target: LAMA2; (+) strand; PAM type: NRG; PAM sequence: TAG
ttggagcattacagggaaag

SEQ ID NO: 137746 - DNA, 20 bp, Artificial Sequence
  Description of Artificial Sequence: Synthetic oligonucleotide
  Target: LAMA2; (+) strand; PAM type: NRG; PAM sequence: TGG
gcattacagggaaagtagaa

SEQ ID NO: 137747 - DNA, 20 bp, Artificial Sequence
  Description of Artificial Sequence: Synthetic oligonucleotide
  Target: LAMA2; (+) strand; PAM type: NRG; PAM sequence: AAG
tacagggaaagtagaatgga

SEQ ID NO: 137748 - DNA, 20 bp, Artificial Sequence
  Description of Artificial Sequence: Synthetic oligonucleotide
  Target: LAMA2; (+) strand; PAM type: NRG; PAM sequence: GAG
cagggaaagtagaatggaaa

SEQ ID NO: 137749 - DNA, 20 bp, Artificial Sequence
  Description of Artificial Sequence: Synthetic oligonucleotide
  Target: LAMA2; (+) strand; PAM type: NRG; PAM sequence: AAG
ggaaagtagaatggaaagag

SEQ ID NO: 137750 - DNA, 20 bp, Artificial Sequence
  Description of Artificial Sequence: Synthetic oligonucleotide
  Target: LAMA2; (+) strand; PAM type: NRG; PAM sequence: TGG
agtagaatggaaagagaaga

SEQ ID NO: 137751 - DNA, 20 bp, Artificial Sequence
  Description of Artificial Sequence: Synthetic oligonucleotide
  Target: LAMA2; (+) strand; PAM type: NRG; PAM sequence: AAG
gaatggaaagagaagatggc

SEQ ID NO: 137752 - DNA, 20 bp, Artificial Sequence
  Description of Artificial Sequence: Synthetic oligonucleotide
  Target: LAMA2; (+) strand; PAM type: NRG; PAM sequence: AAG
agaagatggcaagaaaattg

SEQ ID NO: 137753 - DNA, 20 bp, Artificial Sequence
  Description of Artificial Sequence: Synthetic oligonucleotide
  Target: LAMA2; (+) strand; PAM type: NRG; PAM sequence: AAG
atggcaagaaaattgaagaa

SEQ ID NO: 137754 - DNA, 20 bp, Artificial Sequence
  Description of Artificial Sequence: Synthetic oligonucleotide
  Target: LAMA2; (+) strand; PAM type: NRG; PAM sequence: AGG
tggcaagaaaattgaagaaa

SEQ ID NO: 137755 - DNA, 20 bp, Artificial Sequence
  Description of Artificial Sequence: Synthetic oligonucleotide
  Target: LAMA2; (+) strand; PAM type: NRG; PAM sequence: CAG
aagaaaattgaagaaaaggt

SEQ ID NO: 137756 - DNA, 20 bp, Artificial Sequence
  Description of Artificial Sequence: Synthetic oligonucleotide
  Target: LAMA2; (+) strand; PAM type: NRG; PAM sequence: AAG
aaattgaagaaaaggtcaga

SEQ ID NO: 137757 - DNA, 20 bp, Artificial Sequence
  Description of Artificial Sequence: Synthetic oligonucleotide
  Target: LAMA2; (+) strand; PAM type: NRG; PAM sequence: TGG
tcagaaagtaaatgaattga

SEQ ID NO: 137758 - DNA, 20 bp, Artificial Sequence
  Description of Artificial Sequence: Synthetic oligonucleotide
  Target: LAMA2; (+) strand; PAM type: NRG; PAM sequence: TAG
taaatgaattgatggattat

SEQ ID NO: 137759 - DNA, 20 bp, Artificial Sequence
  Description of Artificial Sequence: Synthetic oligonucleotide
  Target: LAMA2; (+) strand; PAM type: NRG; PAM sequence: CAG
aattgatggattattagttt

SEQ ID NO: 137760 - DNA, 20 bp, Artificial Sequence
  Description of Artificial Sequence: Synthetic oligonucleotide
  Target: LAMA2; (+) strand; PAM type: NRG; PAM sequence: AGG
attgatggattattagtttc

SEQ ID NO: 137761 - DNA, 20 bp, Artificial Sequence
  Description of Artificial Sequence: Synthetic oligonucleotide
  Target: LAMA2; (+) strand; PAM type: NRG; PAM sequence: TAG
attattagtttcaggttcat

SEQ ID NO: 137762 - DNA, 20 bp, Artificial Sequence
  Description of Artificial Sequence: Synthetic oligonucleotide
  Target: LAMA2; (+) strand; PAM type: NRG; PAM sequence: AGG
ttattagtttcaggttcatt

SEQ ID NO: 137763 - DNA, 20 bp, Artificial Sequence
  Description of Artificial Sequence: Synthetic oligonucleotide
  Target: LAMA2; (+) strand; PAM type: NRG; PAM sequence: AAG
tagtttcaggttcattaggc

SEQ ID NO: 137764 - DNA, 20 bp, Artificial Sequence
  Description of Artificial Sequence: Synthetic oligonucleotide
  Target: LAMA2; (+) strand; PAM type: NRG; PAM sequence: AAG
gttcattaggcaagatgaca

SEQ ID NO: 137765 - DNA, 20 bp, Artificial Sequence
  Description of Artificial Sequence: Synthetic oligonucleotide
  Target: LAMA2; (+) strand; PAM type: NRG; PAM sequence: TGG
ggcaagatgacaaagcctga

SEQ ID NO: 137766 - DNA, 20 bp, Artificial Sequence
  Description of Artificial Sequence: Synthetic oligonucleotide
  Target: LAMA2; (+) strand; PAM type: NRG; PAM sequence: GAG
caagatgacaaagcctgatg

SEQ ID NO: 137767 - DNA, 20 bp, Artificial Sequence
  Description of Artificial Sequence: Synthetic oligonucleotide
  Target: LAMA2; (+) strand; PAM type: NRG; PAM sequence: AGG
aagatgacaaagcctgatgg

SEQ ID NO: 137768 - DNA, 20 bp, Artificial Sequence
  Description of Artificial Sequence: Synthetic oligonucleotide
  Target: LAMA2; (+) strand; PAM type: NRG; PAM sequence: GGG
agatgacaaagcctgatgga

SEQ ID NO: 137769 - DNA, 20 bp, Artificial Sequence
  Description of Artificial Sequence: Synthetic oligonucleotide
  Target: LAMA2; (+) strand; PAM type: NRG; PAM sequence: TGG
tgatggagggaaactaccat

SEQ ID NO: 137770 - DNA, 20 bp, Artificial Sequence
  Description of Artificial Sequence: Synthetic oligonucleotide
  Target: LAMA2; (+) strand; PAM type: NRG; PAM sequence: CAG
gagggaaactaccattggtt

SEQ ID NO: 137771 - DNA, 20 bp, Artificial Sequence
  Description of Artificial Sequence: Synthetic oligonucleotide
  Target: LAMA2; (+) strand; PAM type: NRG; PAM sequence: AGG
agggaaactaccattggttc

SEQ ID NO: 137772 - DNA, 20 bp, Artificial Sequence
  Description of Artificial Sequence: Synthetic oligonucleotide
  Target: LAMA2; (+) strand; PAM type: NRG; PAM sequence: GGG
gggaaactaccattggttca

SEQ ID NO: 137773 - DNA, 20 bp, Artificial Sequence
  Description of Artificial Sequence: Synthetic oligonucleotide
  Target: LAMA2; (+) strand; PAM type: NRG; PAM sequence: TGG
actaccattggttcagggac

SEQ ID NO: 137774 - DNA, 20 bp, Artificial Sequence
  Description of Artificial Sequence: Synthetic oligonucleotide
  Target: LAMA2; (+) strand; PAM type: NRG; PAM sequence: TGG
accattggttcagggactgg

SEQ ID NO: 137775 - DNA, 20 bp, Artificial Sequence
  Description of Artificial Sequence: Synthetic oligonucleotide
  Target: LAMA2; (+) strand; PAM type: NRG; PAM sequence: TAG
tggtggccttgaaaatttca

SEQ ID NO: 137776 - DNA, 20 bp, Artificial Sequence
  Description of Artificial Sequence: Synthetic oligonucleotide
  Target: LAMA2; (+) strand; PAM type: NRG; PAM sequence: GAG
gtggccttgaaaatttcata

SEQ ID NO: 137777 - DNA, 20 bp, Artificial Sequence
  Description of Artificial Sequence: Synthetic oligonucleotide
  Target: LAMA2; (+) strand; PAM type: NRG; PAM sequence: GAG
gaaaatttcatagagaatgt

SEQ ID NO: 137778 - DNA, 20 bp, Artificial Sequence
  Description of Artificial Sequence: Synthetic oligonucleotide
  Target: LAMA2; (+) strand; PAM type: NRG; PAM sequence: AAG
atttcatagagaatgtgaga

SEQ ID NO: 137779 - DNA, 20 bp, Artificial Sequence
  Description of Artificial Sequence: Synthetic oligonucleotide
  Target: LAMA2; (+) strand; PAM type: NRG; PAM sequence: CAG
atagagaatgtgagaaagcc

SEQ ID NO: 137780 - DNA, 20 bp, Artificial Sequence
  Description of Artificial Sequence: Synthetic oligonucleotide
  Target: LAMA2; (+) strand; PAM type: NRG; PAM sequence: AGG
tagagaatgtgagaaagccc

SEQ ID NO: 137781 - DNA, 20 bp, Artificial Sequence
  Description of Artificial Sequence: Synthetic oligonucleotide
  Target: LAMA2; (+) strand; PAM type: NRG; PAM sequence: GGG
agagaatgtgagaaagccca

SEQ ID NO: 137782 - DNA, 20 bp, Artificial Sequence
  Description of Artificial Sequence: Synthetic oligonucleotide
  Target: LAMA2; (+) strand; PAM type: NRG; PAM sequence: GGG
gagaatgtgagaaagcccag

SEQ ID NO: 137783 - DNA, 20 bp, Artificial Sequence
  Description of Artificial Sequence: Synthetic oligonucleotide
  Target: LAMA2; (+) strand; PAM type: NRG; PAM sequence: CGG
agaaagcccaggggcatgaa

SEQ ID NO: 137784 - DNA, 20 bp, Artificial Sequence
  Description of Artificial Sequence: Synthetic oligonucleotide
  Target: LAMA2; (+) strand; PAM type: NRG; PAM sequence: GAG
aaagcccaggggcatgaacg

SEQ ID NO: 137785 - DNA, 20 bp, Artificial Sequence
  Description of Artificial Sequence: Synthetic oligonucleotide
  Target: LAMA2; (+) strand; PAM type: NRG; PAM sequence: TGG
caggggcatgaacggagttg

SEQ ID NO: 137786 - DNA, 20 bp, Artificial Sequence
  Description of Artificial Sequence: Synthetic oligonucleotide
  Target: LAMA2; (+) strand; PAM type: NRG; PAM sequence: GGG
aggggcatgaacggagttgt

SEQ ID NO: 137787 - DNA, 20 bp, Artificial Sequence
  Description of Artificial Sequence: Synthetic oligonucleotide
  Target: LAMA2; (+) strand; PAM type: NRG; PAM sequence: GGG
ggggcatgaacggagttgtg

SEQ ID NO: 137788 - DNA, 20 bp, Artificial Sequence
  Description of Artificial Sequence: Synthetic oligonucleotide
  Target: LAMA2; (+) strand; PAM type: NRG; PAM sequence: GAG
ggcatgaacggagttgtggg

SEQ ID NO: 137789 - DNA, 20 bp, Artificial Sequence
  Description of Artificial Sequence: Synthetic oligonucleotide
  Target: LAMA2; (+) strand; PAM type: NRG; PAM sequence: AGG
gcatgaacggagttgtgggg

SEQ ID NO: 137790 - DNA, 20 bp, Artificial Sequence
  Description of Artificial Sequence: Synthetic oligonucleotide
  Target: LAMA2; (+) strand; PAM type: NRG; PAM sequence: GAG
atgaacggagttgtggggag

SEQ ID NO: 137791 - DNA, 20 bp, Artificial Sequence
  Description of Artificial Sequence: Synthetic oligonucleotide
  Target: LAMA2; (+) strand; PAM type: NRG; PAM sequence: AGG
tgaacggagttgtggggagg

SEQ ID NO: 137792 - DNA, 20 bp, Artificial Sequence
  Description of Artificial Sequence: Synthetic oligonucleotide
  Target: LAMA2; (+) strand; PAM type: NRG; PAM sequence: GAG
gagttgtggggaggaggtgc

SEQ ID NO: 137793 - DNA, 20 bp, Artificial Sequence
  Description of Artificial Sequence: Synthetic oligonucleotide
  Target: LAMA2; (+) strand; PAM type: NRG; PAM sequence: TAG
ggggaggaggtgcgagtgtg

SEQ ID NO: 137794 - DNA, 20 bp, Artificial Sequence
  Description of Artificial Sequence: Synthetic oligonucleotide
  Target: LAMA2; (+) strand; PAM type: NRG; PAM sequence: TAG
cgagtgtgtagacgtgtatt

SEQ ID NO: 137795 - DNA, 20 bp, Artificial Sequence
  Description of Artificial Sequence: Synthetic oligonucleotide
  Target: LAMA2; (+) strand; PAM type: NRG; PAM sequence: AGG
gagtgtgtagacgtgtattt

SEQ ID NO: 137796 - DNA, 20 bp, Artificial Sequence
  Description of Artificial Sequence: Synthetic oligonucleotide
  Target: LAMA2; (+) strand; PAM type: NRG; PAM sequence: TGG
gtgtagacgtgtatttagga

SEQ ID NO: 137797 - DNA, 20 bp, Artificial Sequence
  Description of Artificial Sequence: Synthetic oligonucleotide
  Target: LAMA2; (+) strand; PAM type: NRG; PAM sequence: CAG
tgtatttaggatggactgtg

SEQ ID NO: 137798 - DNA, 20 bp, Artificial Sequence
  Description of Artificial Sequence: Synthetic oligonucleotide
  Target: LAMA2; (+) strand; PAM type: NRG; PAM sequence: CAG
tttaggatggactgtgcaga

SEQ ID NO: 137799 - DNA, 20 bp, Artificial Sequence
  Description of Artificial Sequence: Synthetic oligonucleotide
  Target: LAMA2; (+) strand; PAM type: NRG; PAM sequence: AGG
ttaggatggactgtgcagac

SEQ ID NO: 137800 - DNA, 20 bp, Artificial Sequence
  Description of Artificial Sequence: Synthetic oligonucleotide
  Target: LAMA2; (+) strand; PAM type: NRG; PAM sequence: GGG
taggatggactgtgcagaca

SEQ ID NO: 137801 - DNA, 20 bp, Artificial Sequence
  Description of Artificial Sequence: Synthetic oligonucleotide
  Target: LAMA2; (+) strand; PAM type: NRG; PAM sequence: GAG
ggatggactgtgcagacagg

SEQ ID NO: 137802 - DNA, 20 bp, Artificial Sequence
  Description of Artificial Sequence: Synthetic oligonucleotide
  Target: LAMA2; (+) strand; PAM type: NRG; PAM sequence: TAG
actgtgcagacagggagaat

SEQ ID NO: 137803 - DNA, 20 bp, Artificial Sequence
  Description of Artificial Sequence: Synthetic oligonucleotide
  Target: LAMA2; (+) strand; PAM type: NRG; PAM sequence: GAG
tgtgcagacagggagaatta

SEQ ID NO: 137804 - DNA, 20 bp, Artificial Sequence
  Description of Artificial Sequence: Synthetic oligonucleotide
  Target: LAMA2; (+) strand; PAM type: NRG; PAM sequence: GAG
tgcagacagggagaattaga

SEQ ID NO: 137805 - DNA, 20 bp, Artificial Sequence
  Description of Artificial Sequence: Synthetic oligonucleotide
  Target: LAMA2; (+) strand; PAM type: NRG; PAM sequence: AAG
gataaaatatgtaaaaccat

SEQ ID NO: 137806 - DNA, 20 bp, Artificial Sequence
  Description of Artificial Sequence: Synthetic oligonucleotide
  Target: LAMA2; (+) strand; PAM type: NRG; PAM sequence: CAG
taagtgtgtgtatatgtatg

SEQ ID NO: 137807 - DNA, 20 bp, Artificial Sequence
  Description of Artificial Sequence: Synthetic oligonucleotide
  Target: LAMA2; (+) strand; PAM type: NRG; PAM sequence: AGG
aagtgtgtgtatatgtatgc

SEQ ID NO: 137808 - DNA, 20 bp, Artificial Sequence
  Description of Artificial Sequence: Synthetic oligonucleotide
  Target: LAMA2; (+) strand; PAM type: NRG; PAM sequence: AAG
tataaataatatacacatat

SEQ ID NO: 137809 - DNA, 20 bp, Artificial Sequence
  Description of Artificial Sequence: Synthetic oligonucleotide
  Target: LAMA2; (+) strand; PAM type: NRG; PAM sequence: TAG
tgtgtatataatatttacac

SEQ ID NO: 137810 - DNA, 20 bp, Artificial Sequence
  Description of Artificial Sequence: Synthetic oligonucleotide
  Target: LAMA2; (+) strand; PAM type: NRG; PAM sequence: AAG
tatataatatttacactaga

SEQ ID NO: 137811 - DNA, 20 bp, Artificial Sequence
  Description of Artificial Sequence: Synthetic oligonucleotide
  Target: LAMA2; (+) strand; PAM type: NRG; PAM sequence: AGG
atataatatttacactagaa

SEQ ID NO: 137812 - DNA, 20 bp, Artificial Sequence
  Description of Artificial Sequence: Synthetic oligonucleotide
  Target: LAMA2; (+) strand; PAM type: NRG; PAM sequence: AAG
aatatttacactagaaaggc

SEQ ID NO: 137813 - DNA, 20 bp, Artificial Sequence
  Description of Artificial Sequence: Synthetic oligonucleotide
  Target: LAMA2; (+) strand; PAM type: NRG; PAM sequence: AAG
acactagaaaggcaagaaat

SEQ ID NO: 137814 - DNA, 20 bp, Artificial Sequence
  Description of Artificial Sequence: Synthetic oligonucleotide
  Target: LAMA2; (+) strand; PAM type: NRG; PAM sequence: TGG
aatgtatccaatcataaaaa

SEQ ID NO: 137815 - DNA, 20 bp, Artificial Sequence
  Description of Artificial Sequence: Synthetic oligonucleotide
  Target: LAMA2; (+) strand; PAM type: NRG; PAM sequence: GGG
atgtatccaatcataaaaat

SEQ ID NO: 137816 - DNA, 20 bp, Artificial Sequence
  Description of Artificial Sequence: Synthetic oligonucleotide
  Target: LAMA2; (+) strand; PAM type: NRG; PAM sequence: TGG
atccaatcataaaaatggga

SEQ ID NO: 137817 - DNA, 20 bp, Artificial Sequence
  Description of Artificial Sequence: Synthetic oligonucleotide
  Target: LAMA2; (+) strand; PAM type: NRG; PAM sequence: GAG
ccaatcataaaaatgggatg

SEQ ID NO: 137818 - DNA, 20 bp, Artificial Sequence
  Description of Artificial Sequence: Synthetic oligonucleotide
  Target: LAMA2; (+) strand; PAM type: NRG; PAM sequence: AGG
caatcataaaaatgggatgg

SEQ ID NO: 137819 - DNA, 20 bp, Artificial Sequence
  Description of Artificial Sequence: Synthetic oligonucleotide
  Target: LAMA2; (+) strand; PAM type: NRG; PAM sequence: AAG
tgggatggaggaatgatgca

SEQ ID NO: 137820 - DNA, 20 bp, Artificial Sequence
  Description of Artificial Sequence: Synthetic oligonucleotide
  Target: LAMA2; (+) strand; PAM type: NRG; PAM sequence: TGG
tggaggaatgatgcaaagat

SEQ ID NO: 137821 - DNA, 20 bp, Artificial Sequence
  Description of Artificial Sequence: Synthetic oligonucleotide
  Target: LAMA2; (+) strand; PAM type: NRG; PAM sequence: GGG
ggaggaatgatgcaaagatt

SEQ ID NO: 137822 - DNA, 20 bp, Artificial Sequence
  Description of Artificial Sequence: Synthetic oligonucleotide
  Target: LAMA2; (+) strand; PAM type: NRG; PAM sequence: GGG
gaggaatgatgcaaagattg

SEQ ID NO: 137823 - DNA, 20 bp, Artificial Sequence
  Description of Artificial Sequence: Synthetic oligonucleotide
  Target: LAMA2; (+) strand; PAM type: NRG; PAM sequence: TAG
gaatgatgcaaagattgggg

SEQ ID NO: 137824 - DNA, 20 bp, Artificial Sequence
  Description of Artificial Sequence: Synthetic oligonucleotide
  Target: LAMA2; (+) strand; PAM type: NRG; PAM sequence: TAG
gattggggtagaaaataatt

SEQ ID NO: 137825 - DNA, 20 bp, Artificial Sequence
  Description of Artificial Sequence: Synthetic oligonucleotide
  Target: LAMA2; (+) strand; PAM type: NRG; PAM sequence: TGG
cactcaattatttttattct

SEQ ID NO: 137826 - DNA, 20 bp, Artificial Sequence
  Description of Artificial Sequence: Synthetic oligonucleotide
  Target: LAMA2; (+) strand; PAM type: NRG; PAM sequence: TGG
caattatttttattcttggc

SEQ ID NO: 137827 - DNA, 20 bp, Artificial Sequence
  Description of Artificial Sequence: Synthetic oligonucleotide
  Target: LAMA2; (+) strand; PAM type: NRG; PAM sequence: TGG
tttattcttggctggaaaaa

SEQ ID NO: 137828 - DNA, 20 bp, Artificial Sequence
  Description of Artificial Sequence: Synthetic oligonucleotide
  Target: LAMA2; (+) strand; PAM type: NRG; PAM sequence: GAG
tcttggctggaaaaatggat

SEQ ID NO: 137829 - DNA, 20 bp, Artificial Sequence
  Description of Artificial Sequence: Synthetic oligonucleotide
  Target: LAMA2; (+) strand; PAM type: NRG; PAM sequence: CAG
aaatggatgagatgcattgt

SEQ ID NO: 137830 - DNA, 20 bp, Artificial Sequence
  Description of Artificial Sequence: Synthetic oligonucleotide
  Target: LAMA2; (+) strand; PAM type: NRG; PAM sequence: GAG
atgagatgcattgtcagatt

SEQ ID NO: 137831 - DNA, 20 bp, Artificial Sequence
  Description of Artificial Sequence: Synthetic oligonucleotide
  Target: LAMA2; (+) strand; PAM type: NRG; PAM sequence: AAG
cattgtcagattgagtccaa

SEQ ID NO: 137832 - DNA, 20 bp, Artificial Sequence
  Description of Artificial Sequence: Synthetic oligonucleotide
  Target: LAMA2; (+) strand; PAM type: NRG; PAM sequence: AAG
tctgtctttcaccctcttga

SEQ ID NO: 137833 - DNA, 20 bp, Artificial Sequence
  Description of Artificial Sequence: Synthetic oligonucleotide
  Target: LAMA2; (+) strand; PAM type: NRG; PAM sequence: CAG
cctcttgaaagttctacatt

SEQ ID NO: 137834 - DNA, 20 bp, Artificial Sequence
  Description of Artificial Sequence: Synthetic oligonucleotide
  Target: LAMA2; (+) strand; PAM type: NRG; PAM sequence: GAG
tcttgaaagttctacattca

SEQ ID NO: 137835 - DNA, 20 bp, Artificial Sequence
  Description of Artificial Sequence: Synthetic oligonucleotide
  Target: LAMA2; (+) strand; PAM type: NRG; PAM sequence: TGG
tcagagtatcttttgtctcg

SEQ ID NO: 137836 - DNA, 20 bp, Artificial Sequence
  Description of Artificial Sequence: Synthetic oligonucleotide
  Target: LAMA2; (+) strand; PAM type: NRG; PAM sequence: AAG
gagtatcttttgtctcgtgg

SEQ ID NO: 137837 - DNA, 20 bp, Artificial Sequence
  Description of Artificial Sequence: Synthetic oligonucleotide
  Target: LAMA2; (+) strand; PAM type: NRG; PAM sequence: CAG
tcgtggaagataaatatatt

SEQ ID NO: 137838 - DNA, 20 bp, Artificial Sequence
  Description of Artificial Sequence: Synthetic oligonucleotide
  Target: LAMA2; (+) strand; PAM type: NRG; PAM sequence: CAG
caaaaatgaatcaattattt

SEQ ID NO: 137839 - DNA, 20 bp, Artificial Sequence
  Description of Artificial Sequence: Synthetic oligonucleotide
  Target: LAMA2; (+) strand; PAM type: NRG; PAM sequence: AAG
atgaatcaattatttcagta

SEQ ID NO: 137840 - DNA, 20 bp, Artificial Sequence
  Description of Artificial Sequence: Synthetic oligonucleotide
  Target: LAMA2; (+) strand; PAM type: NRG; PAM sequence: AAG
atcaattatttcagtaaagc

SEQ ID NO: 137841 - DNA, 20 bp, Artificial Sequence
  Description of Artificial Sequence: Synthetic oligonucleotide
  Target: LAMA2; (+) strand; PAM type: NRG; PAM sequence: AGG
tcaattatttcagtaaagca

SEQ ID NO: 137842 - DNA, 20 bp, Artificial Sequence
  Description of Artificial Sequence: Synthetic oligonucleotide
  Target: LAMA2; (+) strand; PAM type: NRG; PAM sequence: AAG
cagtaaagcaaggtgtatat

SEQ ID NO: 137843 - DNA, 20 bp, Artificial Sequence
  Description of Artificial Sequence: Synthetic oligonucleotide
  Target: LAMA2; (+) strand; PAM type: NRG; PAM sequence: TAG
tccccatttttatttacctg

SEQ ID NO: 137844 - DNA, 20 bp, Artificial Sequence
  Description of Artificial Sequence: Synthetic oligonucleotide
  Target: LAMA2; (+) strand; PAM type: NRG; PAM sequence: CAG
acctgtagtgttttctaaac

SEQ ID NO: 137845 - DNA, 20 bp, Artificial Sequence
  Description of Artificial Sequence: Synthetic oligonucleotide
  Target: LAMA2; (+) strand; PAM type: NRG; PAM sequence: CAG
agtgttttctaaaccagtca

SEQ ID NO: 137846 - DNA, 20 bp, Artificial Sequence
  Description of Artificial Sequence: Synthetic oligonucleotide
  Target: LAMA2; (+) strand; PAM type: NRG; PAM sequence: TGG
tttctaaaccagtcacagtc

SEQ ID NO: 137847 - DNA, 20 bp, Artificial Sequence
  Description of Artificial Sequence: Synthetic oligonucleotide
  Target: LAMA2; (+) strand; PAM type: NRG; PAM sequence: GAG
tattattattattattattt

SEQ ID NO: 137848 - DNA, 20 bp, Artificial Sequence
  Description of Artificial Sequence: Synthetic oligonucleotide
  Target: LAMA2; (+) strand; PAM type: NRG; PAM sequence: TGG
attattattattatttgaga

SEQ ID NO: 137849 - DNA, 20 bp, Artificial Sequence
  Description of Artificial Sequence: Synthetic oligonucleotide
  Target: LAMA2; (+) strand; PAM type: NRG; PAM sequence: GAG
tattattattatttgagatg

SEQ ID NO: 137850 - DNA, 20 bp, Artificial Sequence
  Description of Artificial Sequence: Synthetic oligonucleotide
  Target: LAMA2; (+) strand; PAM type: NRG; PAM sequence: CGG
tggagtctcactctgtcacc

SEQ ID NO: 137851 - DNA, 20 bp, Artificial Sequence
  Description of Artificial Sequence: Synthetic oligonucleotide
  Target: LAMA2; (+) strand; PAM type: NRG; PAM sequence: GGG
ggagtctcactctgtcaccc

SEQ ID NO: 137852 - DNA, 20 bp, Artificial Sequence
  Description of Artificial Sequence: Synthetic oligonucleotide
  Target: LAMA2; (+) strand; PAM type: NRG; PAM sequence: TGG
tctcactctgtcacccgggc

SEQ ID NO: 137853 - DNA, 20 bp, Artificial Sequence
  Description of Artificial Sequence: Synthetic oligonucleotide
  Target: LAMA2; (+) strand; PAM type: NRG; PAM sequence: GAG
tcactctgtcacccgggctg

SEQ ID NO: 137854 - DNA, 20 bp, Artificial Sequence
  Description of Artificial Sequence: Synthetic oligonucleotide
  Target: LAMA2; (+) strand; PAM type: NRG; PAM sequence: CAG
ctgtcacccgggctggagtg

SEQ ID NO: 137855 - DNA, 20 bp, Artificial Sequence
  Description of Artificial Sequence: Synthetic oligonucleotide
  Target: LAMA2; (+) strand; PAM type: NRG; PAM sequence: TGG
tcacccgggctggagtgcag

SEQ ID NO: 137856 - DNA, 20 bp, Artificial Sequence
  Description of Artificial Sequence: Synthetic oligonucleotide
  Target: LAMA2; (+) strand; PAM type: NRG; PAM sequence: TGG
ggagtgcagtggcacaatct

SEQ ID NO: 137857 - DNA, 20 bp, Artificial Sequence
  Description of Artificial Sequence: Synthetic oligonucleotide
  Target: LAMA2; (+) strand; PAM type: NRG; PAM sequence: CAG
tcactgcaaccttcgcctcc

SEQ ID NO: 137858 - DNA, 20 bp, Artificial Sequence
  Description of Artificial Sequence: Synthetic oligonucleotide
  Target: LAMA2; (+) strand; PAM type: NRG; PAM sequence: AGG
cactgcaaccttcgcctccc

SEQ ID NO: 137859 - DNA, 20 bp, Artificial Sequence
  Description of Artificial Sequence: Synthetic oligonucleotide
  Target: LAMA2; (+) strand; PAM type: NRG; PAM sequence: AAG
aaccttcgcctcccaggttc

SEQ ID NO: 137860 - DNA, 20 bp, Artificial Sequence
  Description of Artificial Sequence: Synthetic oligonucleotide
  Target: LAMA2; (+) strand; PAM type: NRG; PAM sequence: AAG
cccaggttcaagcgattctc

SEQ ID NO: 137861 - DNA, 20 bp, Artificial Sequence
  Description of Artificial Sequence: Synthetic oligonucleotide
  Target: LAMA2; (+) strand; PAM type: NRG; PAM sequence: CAG
ttcaagcgattctcaagcct

SEQ ID NO: 137862 - DNA, 20 bp, Artificial Sequence
  Description of Artificial Sequence: Synthetic oligonucleotide
  Target: LAMA2; (+) strand; PAM type: NRG; PAM sequence: GAG
ttctcaagcctcagcctcct

SEQ ID NO: 137863 - DNA, 20 bp, Artificial Sequence
  Description of Artificial Sequence: Synthetic oligonucleotide
  Target: LAMA2; (+) strand; PAM type: NRG; PAM sequence: TAG
tcaagcctcagcctcctgag

SEQ ID NO: 137864 - DNA, 20 bp, Artificial Sequence
  Description of Artificial Sequence: Synthetic oligonucleotide
  Target: LAMA2; (+) strand; PAM type: NRG; PAM sequence: TGG
gcctcagcctcctgagtagc

SEQ ID NO: 137865 - DNA, 20 bp, Artificial Sequence
  Description of Artificial Sequence: Synthetic oligonucleotide
  Target: LAMA2; (+) strand; PAM type: NRG; PAM sequence: GGG
cctcagcctcctgagtagct

SEQ ID NO: 137866 - DNA, 20 bp, Artificial Sequence
  Description of Artificial Sequence: Synthetic oligonucleotide
  Target: LAMA2; (+) strand; PAM type: NRG; PAM sequence: TGG
cacgcgtgtgccactgcgtc

SEQ ID NO: 137867 - DNA, 20 bp, Artificial Sequence
  Description of Artificial Sequence: Synthetic oligonucleotide
  Target: LAMA2; (+) strand; PAM type: NRG; PAM sequence: TAG
ggctaatttttttgtatttt

SEQ ID NO: 137868 - DNA, 20 bp, Artificial Sequence
  Description of Artificial Sequence: Synthetic oligonucleotide
  Target: LAMA2; (+) strand; PAM type: NRG; PAM sequence: TAG
taatttttttgtatttttag

SEQ ID NO: 137869 - DNA, 20 bp, Artificial Sequence
  Description of Artificial Sequence: Synthetic oligonucleotide
  Target: LAMA2; (+) strand; PAM type: NRG; PAM sequence: GAG
atttttttgtatttttagta

SEQ ID NO: 137870 - DNA, 20 bp, Artificial Sequence
  Description of Artificial Sequence: Synthetic oligonucleotide
  Target: LAMA2; (+) strand; PAM type: NRG; PAM sequence: TGG
ttttgtatttttagtagaga

SEQ ID NO: 137871 - DNA, 20 bp, Artificial Sequence
  Description of Artificial Sequence: Synthetic oligonucleotide
  Target: LAMA2; (+) strand; PAM type: NRG; PAM sequence: GAG
ttgtatttttagtagagatg

SEQ ID NO: 137872 - DNA, 20 bp, Artificial Sequence
  Description of Artificial Sequence: Synthetic oligonucleotide
  Target: LAMA2; (+) strand; PAM type: NRG; PAM sequence: TGG
gagatggagtttcaccgtgt

SEQ ID NO: 137873 - DNA, 20 bp, Artificial Sequence
  Description of Artificial Sequence: Synthetic oligonucleotide
  Target: LAMA2; (+) strand; PAM type: NRG; PAM sequence: CAG
tggagtttcaccgtgttggc

SEQ ID NO: 137874 - DNA, 20 bp, Artificial Sequence
  Description of Artificial Sequence: Synthetic oligonucleotide
  Target: LAMA2; (+) strand; PAM type: NRG; PAM sequence: AGG
ggagtttcaccgtgttggcc

SEQ ID NO: 137875 - DNA, 20 bp, Artificial Sequence
  Description of Artificial Sequence: Synthetic oligonucleotide
  Target: LAMA2; (+) strand; PAM type: NRG; PAM sequence: TGG
tttcaccgtgttggccaggc

SEQ ID NO: 137876 - DNA, 20 bp, Artificial Sequence
  Description of Artificial Sequence: Synthetic oligonucleotide
  Target: LAMA2; (+) strand; PAM type: NRG; PAM sequence: TGG
ttcacatgatctacctgcct

SEQ ID NO: 137877 - DNA, 20 bp, Artificial Sequence
  Description of Artificial Sequence: Synthetic oligonucleotide
  Target: LAMA2; (+) strand; PAM type: NRG; PAM sequence: AAG
ctacctgccttggcctccca

SEQ ID NO: 137878 - DNA, 20 bp, Artificial Sequence
  Description of Artificial Sequence: Synthetic oligonucleotide
  Target: LAMA2; (+) strand; PAM type: NRG; PAM sequence: TGG
gccttggcctcccaaagtgc

SEQ ID NO: 137879 - DNA, 20 bp, Artificial Sequence
  Description of Artificial Sequence: Synthetic oligonucleotide
  Target: LAMA2; (+) strand; PAM type: NRG; PAM sequence: GGG
ccttggcctcccaaagtgct

SEQ ID NO: 137880 - DNA, 20 bp, Artificial Sequence
  Description of Artificial Sequence: Synthetic oligonucleotide
  Target: LAMA2; (+) strand; PAM type: NRG; PAM sequence: CAG
ctcccaaagtgctgggatta

SEQ ID NO: 137881 - DNA, 20 bp, Artificial Sequence
  Description of Artificial Sequence: Synthetic oligonucleotide
  Target: LAMA2; (+) strand; PAM type: NRG; PAM sequence: AGG
tcccaaagtgctgggattac

SEQ ID NO: 137882 - DNA, 20 bp, Artificial Sequence
  Description of Artificial Sequence: Synthetic oligonucleotide
  Target: LAMA2; (+) strand; PAM type: NRG; PAM sequence: GAG
agtgctgggattacaggtgt

SEQ ID NO: 137883 - DNA, 20 bp, Artificial Sequence
  Description of Artificial Sequence: Synthetic oligonucleotide
  Target: LAMA2; (+) strand; PAM type: NRG; PAM sequence: TGG
caggtgtgagccaccgcgcc

SEQ ID NO: 137884 - DNA, 20 bp, Artificial Sequence
  Description of Artificial Sequence: Synthetic oligonucleotide
  Target: LAMA2; (+) strand; PAM type: NRG; PAM sequence: CAG
catgattatttttaaatgac

SEQ ID NO: 137885 - DNA, 20 bp, Artificial Sequence
  Description of Artificial Sequence: Synthetic oligonucleotide
  Target: LAMA2; (+) strand; PAM type: NRG; PAM sequence: CAG
ccagattcattccacatttc

SEQ ID NO: 137886 - DNA, 20 bp, Artificial Sequence
  Description of Artificial Sequence: Synthetic oligonucleotide
  Target: LAMA2; (+) strand; PAM type: NRG; PAM sequence: TAG
tccagattatgctttgatac

SEQ ID NO: 137887 - DNA, 20 bp, Artificial Sequence
  Description of Artificial Sequence: Synthetic oligonucleotide
  Target: LAMA2; (+) strand; PAM type: NRG; PAM sequence: TAG
atgctttgatactagaaatt

SEQ ID NO: 137888 - DNA, 20 bp, Artificial Sequence
  Description of Artificial Sequence: Synthetic oligonucleotide
  Target: LAMA2; (+) strand; PAM type: NRG; PAM sequence: AAG
tttgatactagaaatttaga

SEQ ID NO: 137889 - DNA, 20 bp, Artificial Sequence
  Description of Artificial Sequence: Synthetic oligonucleotide
  Target: LAMA2; (+) strand; PAM type: NRG; PAM sequence: AAG
tagaaagaataaaaccccac

SEQ ID NO: 137890 - DNA, 20 bp, Artificial Sequence
  Description of Artificial Sequence: Synthetic oligonucleotide
  Target: LAMA2; (+) strand; PAM type: NRG; PAM sequence: TAG
accccacaagaataaaaatc

SEQ ID NO: 137891 - DNA, 20 bp, Artificial Sequence
  Description of Artificial Sequence: Synthetic oligonucleotide
  Target: LAMA2; (+) strand; PAM type: NRG; PAM sequence: TAG
tcaactgcatgaatatattt

SEQ ID NO: 137892 - DNA, 20 bp, Artificial Sequence
  Description of Artificial Sequence: Synthetic oligonucleotide
  Target: LAMA2; (+) strand; PAM type: NRG; PAM sequence: AAG
gcatgaatatattttagtaa

SEQ ID NO: 137893 - DNA, 20 bp, Artificial Sequence
  Description of Artificial Sequence: Synthetic oligonucleotide
  Target: LAMA2; (+) strand; PAM type: NRG; PAM sequence: TGG
gaatatattttagtaaaagt

SEQ ID NO: 137894 - DNA, 20 bp, Artificial Sequence
  Description of Artificial Sequence: Synthetic oligonucleotide
  Target: LAMA2; (+) strand; PAM type: NRG; PAM sequence: GAG
atatattttagtaaaagttg

SEQ ID NO: 137895 - DNA, 20 bp, Artificial Sequence
  Description of Artificial Sequence: Synthetic oligonucleotide
  Target: LAMA2; (+) strand; PAM type: NRG; PAM sequence: CAG
tttagtaaaagttggagcaa

SEQ ID NO: 137896 - DNA, 20 bp, Artificial Sequence
  Description of Artificial Sequence: Synthetic oligonucleotide
  Target: LAMA2; (+) strand; PAM type: NRG; PAM sequence: CAG
atgataaaattccacaaatt

SEQ ID NO: 137897 - DNA, 20 bp, Artificial Sequence
  Description of Artificial Sequence: Synthetic oligonucleotide
  Target: LAMA2; (+) strand; PAM type: NRG; PAM sequence: GAG
ccacaaattcagtgaactct

SEQ ID NO: 137898 - DNA, 20 bp, Artificial Sequence
  Description of Artificial Sequence: Synthetic oligonucleotide
  Target: LAMA2; (+) strand; PAM type: NRG; PAM sequence: TGG
gtgaactctgagaataaata

SEQ ID NO: 137899 - DNA, 20 bp, Artificial Sequence
  Description of Artificial Sequence: Synthetic oligonucleotide
  Target: LAMA2; (+) strand; PAM type: NRG; PAM sequence: AAG
aactctgagaataaatatgg

SEQ ID NO: 137900 - DNA, 20 bp, Artificial Sequence
  Description of Artificial Sequence: Synthetic oligonucleotide
  Target: LAMA2; (+) strand; PAM type: NRG; PAM sequence: AGG
actctgagaataaatatgga

SEQ ID NO: 137901 - DNA, 20 bp, Artificial Sequence
  Description of Artificial Sequence: Synthetic oligonucleotide
  Target: LAMA2; (+) strand; PAM type: NRG; PAM sequence: CAG
gaataaatatggaaggtccg

SEQ ID NO: 137902 - DNA, 20 bp, Artificial Sequence
  Description of Artificial Sequence: Synthetic oligonucleotide
  Target: LAMA2; (+) strand; PAM type: NRG; PAM sequence: AAG
ccgcagttaattatcctgca

SEQ ID NO: 137903 - DNA, 20 bp, Artificial Sequence
  Description of Artificial Sequence: Synthetic oligonucleotide
  Target: LAMA2; (+) strand; PAM type: NRG; PAM sequence: TAG
aaccttgaactttctgttaa

SEQ ID NO: 137904 - DNA, 20 bp, Artificial Sequence
  Description of Artificial Sequence: Synthetic oligonucleotide
  Target: LAMA2; (+) strand; PAM type: NRG; PAM sequence: AAG
agactttgcttcccaattaa

SEQ ID NO: 137905 - DNA, 20 bp, Artificial Sequence
  Description of Artificial Sequence: Synthetic oligonucleotide
  Target: LAMA2; (+) strand; PAM type: NRG; PAM sequence: TAG
tttgcttcccaattaaaagc

SEQ ID NO: 137906 - DNA, 20 bp, Artificial Sequence
  Description of Artificial Sequence: Synthetic oligonucleotide
  Target: LAMA2; (+) strand; PAM type: NRG; PAM sequence: CAG
gcttcccaattaaaagctag

SEQ ID NO: 137907 - DNA, 20 bp, Artificial Sequence
  Description of Artificial Sequence: Synthetic oligonucleotide
  Target: LAMA2; (+) strand; PAM type: NRG; PAM sequence: AAG
attaaaagctagcagtttga

SEQ ID NO: 137908 - DNA, 20 bp, Artificial Sequence
  Description of Artificial Sequence: Synthetic oligonucleotide
  Target: LAMA2; (+) strand; PAM type: NRG; PAM sequence: AGG
ttaaaagctagcagtttgaa

SEQ ID NO: 137909 - DNA, 20 bp, Artificial Sequence
  Description of Artificial Sequence: Synthetic oligonucleotide
  Target: LAMA2; (+) strand; PAM type: NRG; PAM sequence: CAG
gtttgaaaggtttacctcat

SEQ ID NO: 137910 - DNA, 20 bp, Artificial Sequence
  Description of Artificial Sequence: Synthetic oligonucleotide
  Target: LAMA2; (+) strand; PAM type: NRG; PAM sequence: CAG
ctcatcagcgattccctatc

SEQ ID NO: 137911 - DNA, 20 bp, Artificial Sequence
  Description of Artificial Sequence: Synthetic oligonucleotide
  Target: LAMA2; (+) strand; PAM type: NRG; PAM sequence: CAG
gcgattccctatccagtttt

SEQ ID NO: 137912 - DNA, 20 bp, Artificial Sequence
  Description of Artificial Sequence: Synthetic oligonucleotide
  Target: LAMA2; (+) strand; PAM type: NRG; PAM sequence: CAG
ccctatccagttttcagatg

SEQ ID NO: 137913 - DNA, 20 bp, Artificial Sequence
  Description of Artificial Sequence: Synthetic oligonucleotide
  Target: LAMA2; (+) strand; PAM type: NRG; PAM sequence: TAG
atccagttttcagatgcagt

SEQ ID NO: 137914 - DNA, 20 bp, Artificial Sequence
  Description of Artificial Sequence: Synthetic oligonucleotide
  Target: LAMA2; (+) strand; PAM type: NRG; PAM sequence: TGG
tttcagatgcagttagccct

SEQ ID NO: 137915 - DNA, 20 bp, Artificial Sequence
  Description of Artificial Sequence: Synthetic oligonucleotide
  Target: LAMA2; (+) strand; PAM type: NRG; PAM sequence: GAG
cttgcatatttatccctgtt

SEQ ID NO: 137916 - DNA, 20 bp, Artificial Sequence
  Description of Artificial Sequence: Synthetic oligonucleotide
  Target: LAMA2; (+) strand; PAM type: NRG; PAM sequence: AGG
ttgcatatttatccctgttg

SEQ ID NO: 137917 - DNA, 20 bp, Artificial Sequence
  Description of Artificial Sequence: Synthetic oligonucleotide
  Target: LAMA2; (+) strand; PAM type: NRG; PAM sequence: AAG
gtttctatctccttttaaat

SEQ ID NO: 137918 - DNA, 20 bp, Artificial Sequence
  Description of Artificial Sequence: Synthetic oligonucleotide
  Target: LAMA2; (+) strand; PAM type: NRG; PAM sequence: AGG
tttctatctccttttaaata

SEQ ID NO: 137919 - DNA, 20 bp, Artificial Sequence
  Description of Artificial Sequence: Synthetic oligonucleotide
  Target: LAMA2; (+) strand; PAM type: NRG; PAM sequence: GGG
ttctatctccttttaaataa

SEQ ID NO: 137920 - DNA, 20 bp, Artificial Sequence
  Description of Artificial Sequence: Synthetic oligonucleotide
  Target: LAMA2; (+) strand; PAM type: NRG; PAM sequence: CAG
gaactttgccaacaattcgt

SEQ ID NO: 137921 - DNA, 20 bp, Artificial Sequence
  Description of Artificial Sequence: Synthetic oligonucleotide
  Target: LAMA2; (+) strand; PAM type: NRG; PAM sequence: TAG
ttatgattaaactttcataa

SEQ ID NO: 137922 - DNA, 20 bp, Artificial Sequence
  Description of Artificial Sequence: Synthetic oligonucleotide
  Target: LAMA2; (+) strand; PAM type: NRG; PAM sequence: AGG
tatgattaaactttcataat

SEQ ID NO: 137923 - DNA, 20 bp, Artificial Sequence
  Description of Artificial Sequence: Synthetic oligonucleotide
  Target: LAMA2; (+) strand; PAM type: NRG; PAM sequence: GGG
atgattaaactttcataata

SEQ ID NO: 137924 - DNA, 20 bp, Artificial Sequence
  Description of Artificial Sequence: Synthetic oligonucleotide
  Target: LAMA2; (+) strand; PAM type: NRG; PAM sequence: TGG
aactttcataatagggatta

SEQ ID NO: 137925 - DNA, 20 bp, Artificial Sequence
  Description of Artificial Sequence: Synthetic oligonucleotide
  Target: LAMA2; (+) strand; PAM type: NRG; PAM sequence: CAG
ttaattgttgattcatctcc

SEQ ID NO: 137926 - DNA, 20 bp, Artificial Sequence
  Description of Artificial Sequence: Synthetic oligonucleotide
  Target: LAMA2; (+) strand; PAM type: NRG; PAM sequence: CAG
tttgtgactaattctcttat

SEQ ID NO: 137927 - DNA, 20 bp, Artificial Sequence
  Description of Artificial Sequence: Synthetic oligonucleotide
  Target: LAMA2; (+) strand; PAM type: NRG; PAM sequence: GAG
ttctcttatcagtttgacct

SEQ ID NO: 137928 - DNA, 20 bp, Artificial Sequence
  Description of Artificial Sequence: Synthetic oligonucleotide
  Target: LAMA2; (+) strand; PAM type: NRG; PAM sequence: AGG
tctcttatcagtttgacctg

SEQ ID NO: 137929 - DNA, 20 bp, Artificial Sequence
  Description of Artificial Sequence: Synthetic oligonucleotide
  Target: LAMA2; (+) strand; PAM type: NRG; PAM sequence: TGG
cttatcagtttgacctgagg

SEQ ID NO: 137930 - DNA, 20 bp, Artificial Sequence
  Description of Artificial Sequence: Synthetic oligonucleotide
  Target: LAMA2; (+) strand; PAM type: NRG; PAM sequence: CAG
atcagtttgacctgaggtgg

SEQ ID NO: 137931 - DNA, 20 bp, Artificial Sequence
  Description of Artificial Sequence: Synthetic oligonucleotide
  Target: LAMA2; (+) strand; PAM type: NRG; PAM sequence: TAG
cagataccacaatttcctat

SEQ ID NO: 137932 - DNA, 20 bp, Artificial Sequence
  Description of Artificial Sequence: Synthetic oligonucleotide
  Target: LAMA2; (+) strand; PAM type: NRG; PAM sequence: AAG
aacttctctcacaattacct

SEQ ID NO: 137933 - DNA, 20 bp, Artificial Sequence
  Description of Artificial Sequence: Synthetic oligonucleotide
  Target: LAMA2; (+) strand; PAM type: NRG; PAM sequence: GAG
cttctctcacaattacctaa

SEQ ID NO: 137934 - DNA, 20 bp, Artificial Sequence
  Description of Artificial Sequence: Synthetic oligonucleotide
  Target: LAMA2; (+) strand; PAM type: NRG; PAM sequence: TAG
taagagccatgaatttgatt

SEQ ID NO: 137935 - DNA, 20 bp, Artificial Sequence
  Description of Artificial Sequence: Synthetic oligonucleotide
  Target: LAMA2; (+) strand; PAM type: NRG; PAM sequence: TGG
ccatgaatttgatttagaaa

SEQ ID NO: 137936 - DNA, 20 bp, Artificial Sequence
  Description of Artificial Sequence: Synthetic oligonucleotide
  Target: LAMA2; (+) strand; PAM type: NRG; PAM sequence: GGG
catgaatttgatttagaaat

SEQ ID NO: 137937 - DNA, 20 bp, Artificial Sequence
  Description of Artificial Sequence: Synthetic oligonucleotide
  Target: LAMA2; (+) strand; PAM type: NRG; PAM sequence: GGG
atgaatttgatttagaaatg

SEQ ID NO: 137938 - DNA, 20 bp, Artificial Sequence
  Description of Artificial Sequence: Synthetic oligonucleotide
  Target: LAMA2; (+) strand; PAM type: NRG; PAM sequence: AAG
taaacgcacaatctgtaaaa

SEQ ID NO: 137939 - DNA, 20 bp, Artificial Sequence
  Description of Artificial Sequence: Synthetic oligonucleotide
  Target: LAMA2; (+) strand; PAM type: NRG; PAM sequence: CAG
cacaatctgtaaaaaagatt

SEQ ID NO: 137940 - DNA, 20 bp, Artificial Sequence
  Description of Artificial Sequence: Synthetic oligonucleotide
  Target: LAMA2; (+) strand; PAM type: NRG; PAM sequence: AGG
acaatctgtaaaaaagattc

SEQ ID NO: 137941 - DNA, 20 bp, Artificial Sequence
  Description of Artificial Sequence: Synthetic oligonucleotide
  Target: LAMA2; (+) strand; PAM type: NRG; PAM sequence: GAG
aatctgtaaaaaagattcag

SEQ ID NO: 137942 - DNA, 20 bp, Artificial Sequence
  Description of Artificial Sequence: Synthetic oligonucleotide
  Target: LAMA2; (+) strand; PAM type: NRG; PAM sequence: AGG
atctgtaaaaaagattcagg

SEQ ID NO: 137943 - DNA, 20 bp, Artificial Sequence
  Description of Artificial Sequence: Synthetic oligonucleotide
  Target: LAMA2; (+) strand; PAM type: NRG; PAM sequence: TGG
aaaagattcaggaggatgtt

SEQ ID NO: 137944 - DNA, 20 bp, Artificial Sequence
  Description of Artificial Sequence: Synthetic oligonucleotide
  Target: LAMA2; (+) strand; PAM type: NRG; PAM sequence: GGG
aaagattcaggaggatgttt

SEQ ID NO: 137945 - DNA, 20 bp, Artificial Sequence
  Description of Artificial Sequence: Synthetic oligonucleotide
  Target: LAMA2; (+) strand; PAM type: NRG; PAM sequence: CAG
ctgtgatatttatttttctt

SEQ ID NO: 137946 - DNA, 20 bp, Artificial Sequence
  Description of Artificial Sequence: Synthetic oligonucleotide
  Target: LAMA2; (+) strand; PAM type: NRG; PAM sequence: AAG
tgatatttatttttcttcag

SEQ ID NO: 137947 - DNA, 20 bp, Artificial Sequence
  Description of Artificial Sequence: Synthetic oligonucleotide
  Target: LAMA2; (+) strand; PAM type: NRG; PAM sequence: AAG
tatttatttttcttcagaag

SEQ ID NO: 137948 - DNA, 20 bp, Artificial Sequence
  Description of Artificial Sequence: Synthetic oligonucleotide
  Target: LAMA2; (+) strand; PAM type: NRG; PAM sequence: TGG
tgccaacaatatttcattta

SEQ ID NO: 137949 - DNA, 20 bp, Artificial Sequence
  Description of Artificial Sequence: Synthetic oligonucleotide
  Target: LAMA2; (+) strand; PAM type: NRG; PAM sequence: CAG
gattccccatatgccaattt

SEQ ID NO: 137950 - DNA, 20 bp, Artificial Sequence
  Description of Artificial Sequence: Synthetic oligonucleotide
  Target: LAMA2; (+) strand; PAM type: NRG; PAM sequence: CAG
tcagcaccctcttatttcac

SEQ ID NO: 137951 - DNA, 20 bp, Artificial Sequence
  Description of Artificial Sequence: Synthetic oligonucleotide
  Target: LAMA2; (+) strand; PAM type: NRG; PAM sequence: AGG
cagcaccctcttatttcacc

SEQ ID NO: 137952 - DNA, 20 bp, Artificial Sequence
  Description of Artificial Sequence: Synthetic oligonucleotide
  Target: LAMA2; (+) strand; PAM type: NRG; PAM sequence: GGG
agcaccctcttatttcacca

SEQ ID NO: 137953 - DNA, 20 bp, Artificial Sequence
  Description of Artificial Sequence: Synthetic oligonucleotide
  Target: LAMA2; (+) strand; PAM type: NRG; PAM sequence: TGG
tttcaccagggtcatttatt

SEQ ID NO: 137954 - DNA, 20 bp, Artificial Sequence
  Description of Artificial Sequence: Synthetic oligonucleotide
  Target: LAMA2; (+) strand; PAM type: NRG; PAM sequence: TAG
agggtcatttatttggtatt

SEQ ID NO: 137955 - DNA, 20 bp, Artificial Sequence
  Description of Artificial Sequence: Synthetic oligonucleotide
  Target: LAMA2; (+) strand; PAM type: NRG; PAM sequence: AAG
tgatatttgctgtcatcata

SEQ ID NO: 137956 - DNA, 20 bp, Artificial Sequence
  Description of Artificial Sequence: Synthetic oligonucleotide
  Target: LAMA2; (+) strand; PAM type: NRG; PAM sequence: TAG
taaagacctgacatcttccc

SEQ ID NO: 137957 - DNA, 20 bp, Artificial Sequence
  Description of Artificial Sequence: Synthetic oligonucleotide
  Target: LAMA2; (+) strand; PAM type: NRG; PAM sequence: AAG
gacatcttccctagcttcaa

SEQ ID NO: 137958 - DNA, 20 bp, Artificial Sequence
  Description of Artificial Sequence: Synthetic oligonucleotide
  Target: LAMA2; (+) strand; PAM type: NRG; PAM sequence: CAG
tgctaacatttaaatatatt

SEQ ID NO: 137959 - DNA, 20 bp, Artificial Sequence
  Description of Artificial Sequence: Synthetic oligonucleotide
  Target: LAMA2; (+) strand; PAM type: NRG; PAM sequence: GAG
aaattttacttttcattaat

SEQ ID NO: 137960 - DNA, 20 bp, Artificial Sequence
  Description of Artificial Sequence: Synthetic oligonucleotide
  Target: LAMA2; (+) strand; PAM type: NRG; PAM sequence: CAG
tttacttttcattaatgaga

SEQ ID NO: 137961 - DNA, 20 bp, Artificial Sequence
  Description of Artificial Sequence: Synthetic oligonucleotide
  Target: LAMA2; (+) strand; PAM type: NRG; PAM sequence: AGG
ttacttttcattaatgagac

SEQ ID NO: 137962 - DNA, 20 bp, Artificial Sequence
  Description of Artificial Sequence: Synthetic oligonucleotide
  Target: LAMA2; (+) strand; PAM type: NRG; PAM sequence: AAG
cttttcattaatgagacagg

SEQ ID NO: 137963 - DNA, 20 bp, Artificial Sequence
  Description of Artificial Sequence: Synthetic oligonucleotide
  Target: LAMA2; (+) strand; PAM type: NRG; PAM sequence: TGG
gacaggaagcctcatctcta

SEQ ID NO: 137964 - DNA, 20 bp, Artificial Sequence
  Description of Artificial Sequence: Synthetic oligonucleotide
  Target: LAMA2; (+) strand; PAM type: NRG; PAM sequence: TGG
ggactgctaacatgatgatt

SEQ ID NO: 137965 - DNA, 20 bp, Artificial Sequence
  Description of Artificial Sequence: Synthetic oligonucleotide
  Target: LAMA2; (+) strand; PAM type: NRG; PAM sequence: TGG
ctgctaacatgatgatttgg

SEQ ID NO: 137966 - DNA, 20 bp, Artificial Sequence
  Description of Artificial Sequence: Synthetic oligonucleotide
  Target: LAMA2; (+) strand; PAM type: NRG; PAM sequence: AAG
tgatgatttggtggaaaata

SEQ ID NO: 137967 - DNA, 20 bp, Artificial Sequence
  Description of Artificial Sequence: Synthetic oligonucleotide
  Target: LAMA2; (+) strand; PAM type: NRG; PAM sequence: CAG
atttggtggaaaataaagtc

SEQ ID NO: 137968 - DNA, 20 bp, Artificial Sequence
  Description of Artificial Sequence: Synthetic oligonucleotide
  Target: LAMA2; (+) strand; PAM type: NRG; PAM sequence: CAG
ggtggaaaataaagtccagc

SEQ ID NO: 137969 - DNA, 20 bp, Artificial Sequence
  Description of Artificial Sequence: Synthetic oligonucleotide
  Target: LAMA2; (+) strand; PAM type: NRG; PAM sequence: AAG
ataaagtccagccagctgtt

SEQ ID NO: 137970 - DNA, 20 bp, Artificial Sequence
  Description of Artificial Sequence: Synthetic oligonucleotide
  Target: LAMA2; (+) strand; PAM type: NRG; PAM sequence: TGG
aaaaaatttaccaataataa

SEQ ID NO: 137971 - DNA, 20 bp, Artificial Sequence
  Description of Artificial Sequence: Synthetic oligonucleotide
  Target: LAMA2; (+) strand; PAM type: NRG; PAM sequence: CAG
tatttttgccctgtcttgta

SEQ ID NO: 137972 - DNA, 20 bp, Artificial Sequence
  Description of Artificial Sequence: Synthetic oligonucleotide
  Target: LAMA2; (+) strand; PAM type: NRG; PAM sequence: AAG
ctgtcttgtacagtcatatt

SEQ ID NO: 137973 - DNA, 20 bp, Artificial Sequence
  Description of Artificial Sequence: Synthetic oligonucleotide
  Target: LAMA2; (+) strand; PAM type: NRG; PAM sequence: TGG
gcaatatgaatatccatatc

SEQ ID NO: 137974 - DNA, 20 bp, Artificial Sequence
  Description of Artificial Sequence: Synthetic oligonucleotide
  Target: LAMA2; (+) strand; PAM type: NRG; PAM sequence: TAG
atgaatatccatatctggaa

SEQ ID NO: 137975 - DNA, 20 bp, Artificial Sequence
  Description of Artificial Sequence: Synthetic oligonucleotide
  Target: LAMA2; (+) strand; PAM type: NRG; PAM sequence: AGG
tgaatatccatatctggaat

SEQ ID NO: 137976 - DNA, 20 bp, Artificial Sequence
  Description of Artificial Sequence: Synthetic oligonucleotide
  Target: LAMA2; (+) strand; PAM type: NRG; PAM sequence: TAG
taggactataataccataaa

SEQ ID NO: 137977 - DNA, 20 bp, Artificial Sequence
  Description of Artificial Sequence: Synthetic oligonucleotide
  Target: LAMA2; (+) strand; PAM type: NRG; PAM sequence: TAG
accataaatagcttaaaaca

SEQ ID NO: 137978 - DNA, 20 bp, Artificial Sequence
  Description of Artificial Sequence: Synthetic oligonucleotide
  Target: LAMA2; (+) strand; PAM type: NRG; PAM sequence: CAG
aaacatagtcttcatgtttt

SEQ ID NO: 137979 - DNA, 20 bp, Artificial Sequence
  Description of Artificial Sequence: Synthetic oligonucleotide
  Target: LAMA2; (+) strand; PAM type: NRG; PAM sequence: CAG
gttttcagtaaatgttatga

SEQ ID NO: 137980 - DNA, 20 bp, Artificial Sequence
  Description of Artificial Sequence: Synthetic oligonucleotide
  Target: LAMA2; (+) strand; PAM type: NRG; PAM sequence: TAG
aaatctgaaaatgccaaatt

SEQ ID NO: 137981 - DNA, 20 bp, Artificial Sequence
  Description of Artificial Sequence: Synthetic oligonucleotide
  Target: LAMA2; (+) strand; PAM type: NRG; PAM sequence: CAG
tgccaaatttagtgaatatt

SEQ ID NO: 137982 - DNA, 20 bp, Artificial Sequence
  Description of Artificial Sequence: Synthetic oligonucleotide
  Target: LAMA2; (+) strand; PAM type: NRG; PAM sequence: TGG
cagctttttaaattttgaaa

SEQ ID NO: 137983 - DNA, 20 bp, Artificial Sequence
  Description of Artificial Sequence: Synthetic oligonucleotide
  Target: LAMA2; (+) strand; PAM type: NRG; PAM sequence: GAG
gctttttaaattttgaaatg

SEQ ID NO: 137984 - DNA, 20 bp, Artificial Sequence
  Description of Artificial Sequence: Synthetic oligonucleotide
  Target: LAMA2; (+) strand; PAM type: NRG; PAM sequence: TAG
tggagtctcactctgtcacc

SEQ ID NO: 137985 - DNA, 20 bp, Artificial Sequence
  Description of Artificial Sequence: Synthetic oligonucleotide
  Target: LAMA2; (+) strand; PAM type: NRG; PAM sequence: AGG
ggagtctcactctgtcacct

SEQ ID NO: 137986 - DNA, 20 bp, Artificial Sequence
  Description of Artificial Sequence: Synthetic oligonucleotide
  Target: LAMA2; (+) strand; PAM type: NRG; PAM sequence: TGG
tctcactctgtcacctaggc

SEQ ID NO: 137987 - DNA, 20 bp, Artificial Sequence
  Description of Artificial Sequence: Synthetic oligonucleotide
  Target: LAMA2; (+) strand; PAM type: NRG; PAM sequence: GAG
tcactctgtcacctaggctg

SEQ ID NO: 137988 - DNA, 20 bp, Artificial Sequence
  Description of Artificial Sequence: Synthetic oligonucleotide
  Target: LAMA2; (+) strand; PAM type: NRG; PAM sequence: TGG
tcacctaggctggagtgcaa

SEQ ID NO: 137989 - DNA, 20 bp, Artificial Sequence
  Description of Artificial Sequence: Synthetic oligonucleotide
  Target: LAMA2; (+) strand; PAM type: NRG; PAM sequence: TGG
ggagtgcaatggcgtgatct

SEQ ID NO: 137990 - DNA, 20 bp, Artificial Sequence
  Description of Artificial Sequence: Synthetic oligonucleotide
  Target: LAMA2; (+) strand; PAM type: NRG; PAM sequence: TGG
tcactgcaacctctacctcc

SEQ ID NO: 137991 - DNA, 20 bp, Artificial Sequence
  Description of Artificial Sequence: Synthetic oligonucleotide
  Target: LAMA2; (+) strand; PAM type: NRG; PAM sequence: GGG
cactgcaacctctacctcct

SEQ ID NO: 137992 - DNA, 20 bp, Artificial Sequence
  Description of Artificial Sequence: Synthetic oligonucleotide
  Target: LAMA2; (+) strand; PAM type: NRG; PAM sequence: AAG
aacctctacctcctgggttc

SEQ ID NO: 137993 - DNA, 20 bp, Artificial Sequence
  Description of Artificial Sequence: Synthetic oligonucleotide
  Target: LAMA2; (+) strand; PAM type: NRG; PAM sequence: CAG
ttcaagtgattctcctgcct

SEQ ID NO: 137994 - DNA, 20 bp, Artificial Sequence
  Description of Artificial Sequence: Synthetic oligonucleotide
  Target: LAMA2; (+) strand; PAM type: NRG; PAM sequence: AAG
ttctcctgcctcagcctccc

SEQ ID NO: 137995 - DNA, 20 bp, Artificial Sequence
  Description of Artificial Sequence: Synthetic oligonucleotide
  Target: LAMA2; (+) strand; PAM type: NRG; PAM sequence: TAG
tcctgcctcagcctcccaag

SEQ ID NO: 137996 - DNA, 20 bp, Artificial Sequence
  Description of Artificial Sequence: Synthetic oligonucleotide
  Target: LAMA2; (+) strand; PAM type: NRG; PAM sequence: TGG
gcctcagcctcccaagtagc

SEQ ID NO: 137997 - DNA, 20 bp, Artificial Sequence
  Description of Artificial Sequence: Synthetic oligonucleotide
  Target: LAMA2; (+) strand; PAM type: NRG; PAM sequence: GGG
cctcagcctcccaagtagct

SEQ ID NO: 137998 - DNA, 20 bp, Artificial Sequence
  Description of Artificial Sequence: Synthetic oligonucleotide
  Target: LAMA2; (+) strand; PAM type: NRG; PAM sequence: CAG
ctcccaagtagctgggaata

SEQ ID NO: 137999 - DNA, 20 bp, Artificial Sequence
  Description of Artificial Sequence: Synthetic oligonucleotide
  Target: LAMA2; (+) strand; PAM type: NRG; PAM sequence: AGG
tcccaagtagctgggaatac

SEQ ID NO: 138000 - DNA, 20 bp, Artificial Sequence
  Description of Artificial Sequence: Synthetic oligonucleotide
  Target: LAMA2; (+) strand; PAM type: NRG; PAM sequence: TAG
ctatttttttttttttttca

SEQ ID NO: 138001 - DNA, 20 bp, Artificial Sequence
  Description of Artificial Sequence: Synthetic oligonucleotide
  Target: LAMA2; (+) strand; PAM type: NRG; PAM sequence: GAG
atttttttttttttttcata

SEQ ID NO: 138002 - DNA, 20 bp, Artificial Sequence
  Description of Artificial Sequence: Synthetic oligonucleotide
  Target: LAMA2; (+) strand; PAM type: NRG; PAM sequence: TGG
ttttttttttttcatagaga

SEQ ID NO: 138003 - DNA, 20 bp, Artificial Sequence
  Description of Artificial Sequence: Synthetic oligonucleotide
  Target: LAMA2; (+) strand; PAM type: NRG; PAM sequence: GGG
tttttttttttcatagagat

SEQ ID NO: 138004 - DNA, 20 bp, Artificial Sequence
  Description of Artificial Sequence: Synthetic oligonucleotide
  Target: LAMA2; (+) strand; PAM type: NRG; PAM sequence: GGG
ttttttttttcatagagatg

SEQ ID NO: 138005 - DNA, 20 bp, Artificial Sequence
  Description of Artificial Sequence: Synthetic oligonucleotide
  Target: LAMA2; (+) strand; PAM type: NRG; PAM sequence: TGG
gagatggggtttcactgtgt

SEQ ID NO: 138006 - DNA, 20 bp, Artificial Sequence
  Description of Artificial Sequence: Synthetic oligonucleotide
  Target: LAMA2; (+) strand; PAM type: NRG; PAM sequence: CAG
tggggtttcactgtgttggc

SEQ ID NO: 138007 - DNA, 20 bp, Artificial Sequence
  Description of Artificial Sequence: Synthetic oligonucleotide
  Target: LAMA2; (+) strand; PAM type: NRG; PAM sequence: AGG
ggggtttcactgtgttggcc

SEQ ID NO: 138008 - DNA, 20 bp, Artificial Sequence
  Description of Artificial Sequence: Synthetic oligonucleotide
  Target: LAMA2; (+) strand; PAM type: NRG; PAM sequence: TGG
tttcactgtgttggccaggc

SEQ ID NO: 138009 - DNA, 20 bp, Artificial Sequence
  Description of Artificial Sequence: Synthetic oligonucleotide
  Target: LAMA2; (+) strand; PAM type: NRG; PAM sequence: CAG
tggtcttgaactcctgacct

SEQ ID NO: 138010 - DNA, 20 bp, Artificial Sequence
  Description of Artificial Sequence: Synthetic oligonucleotide
  Target: LAMA2; (+) strand; PAM type: NRG; PAM sequence: AGG
ggtcttgaactcctgacctc

SEQ ID NO: 138011 - DNA, 20 bp, Artificial Sequence
  Description of Artificial Sequence: Synthetic oligonucleotide
  Target: LAMA2; (+) strand; PAM type: NRG; PAM sequence: CAG
ctcaggtgatctgcccacct

SEQ ID NO: 138012 - DNA, 20 bp, Artificial Sequence
  Description of Artificial Sequence: Synthetic oligonucleotide
  Target: LAMA2; (+) strand; PAM type: NRG; PAM sequence: AAG
ctgcccacctcagcctccca

SEQ ID NO: 138013 - DNA, 20 bp, Artificial Sequence
  Description of Artificial Sequence: Synthetic oligonucleotide
  Target: LAMA2; (+) strand; PAM type: NRG; PAM sequence: TGG
acctcagcctcccaaagtgc

SEQ ID NO: 138014 - DNA, 20 bp, Artificial Sequence
  Description of Artificial Sequence: Synthetic oligonucleotide
  Target: LAMA2; (+) strand; PAM type: NRG; PAM sequence: GGG
cctcagcctcccaaagtgct

SEQ ID NO: 138015 - DNA, 20 bp, Artificial Sequence
  Description of Artificial Sequence: Synthetic oligonucleotide
  Target: LAMA2; (+) strand; PAM type: NRG; PAM sequence: CAG
ctcccaaagtgctgggatta

SEQ ID NO: 138016 - DNA, 20 bp, Artificial Sequence
  Description of Artificial Sequence: Synthetic oligonucleotide
  Target: LAMA2; (+) strand; PAM type: NRG; PAM sequence: AGG
tcccaaagtgctgggattac

SEQ ID NO: 138017 - DNA, 20 bp, Artificial Sequence
  Description of Artificial Sequence: Synthetic oligonucleotide
  Target: LAMA2; (+) strand; PAM type: NRG; PAM sequence: GAG
agtgctgggattacaggtgt

SEQ ID NO: 138018 - DNA, 20 bp, Artificial Sequence
  Description of Artificial Sequence: Synthetic oligonucleotide
  Target: LAMA2; (+) strand; PAM type: NRG; PAM sequence: TGG
caggtgtgagccactgcacc

SEQ ID NO: 138019 - DNA, 20 bp, Artificial Sequence
  Description of Artificial Sequence: Synthetic oligonucleotide
  Target: LAMA2; (+) strand; PAM type: NRG; PAM sequence: CAG
cactgcacctggccaatatt

SEQ ID NO: 138020 - DNA, 20 bp, Artificial Sequence
  Description of Artificial Sequence: Synthetic oligonucleotide
  Target: LAMA2; (+) strand; PAM type: NRG; PAM sequence: AAG
ttaataaaatttttctttta

SEQ ID NO: 138021 - DNA, 20 bp, Artificial Sequence
  Description of Artificial Sequence: Synthetic oligonucleotide
  Target: LAMA2; (+) strand; PAM type: NRG; PAM sequence: CAG
aagatgattttactttctat

SEQ ID NO: 138022 - DNA, 20 bp, Artificial Sequence
  Description of Artificial Sequence: Synthetic oligonucleotide
  Target: LAMA2; (+) strand; PAM type: NRG; PAM sequence: GAG
tatcagattcctattgcatt

SEQ ID NO: 138023 - DNA, 20 bp, Artificial Sequence
  Description of Artificial Sequence: Synthetic oligonucleotide
  Target: LAMA2; (+) strand; PAM type: NRG; PAM sequence: AGG
atcagattcctattgcattg

SEQ ID NO: 138024 - DNA, 20 bp, Artificial Sequence
  Description of Artificial Sequence: Synthetic oligonucleotide
  Target: LAMA2; (+) strand; PAM type: NRG; PAM sequence: TAG
ttcctattgcattgaggact

SEQ ID NO: 138025 - DNA, 20 bp, Artificial Sequence
  Description of Artificial Sequence: Synthetic oligonucleotide
  Target: LAMA2; (+) strand; PAM type: NRG; PAM sequence: AAG
gttttttcaaatgttttacc

SEQ ID NO: 138026 - DNA, 20 bp, Artificial Sequence
  Description of Artificial Sequence: Synthetic oligonucleotide
  Target: LAMA2; (+) strand; PAM type: NRG; PAM sequence: AAG
accaagtacaacttgtctct

SEQ ID NO: 138027 - DNA, 20 bp, Artificial Sequence
  Description of Artificial Sequence: Synthetic oligonucleotide
  Target: LAMA2; (+) strand; PAM type: NRG; PAM sequence: CAG
cttgtctctaagattcaaaa

SEQ ID NO: 138028 - DNA, 20 bp, Artificial Sequence
  Description of Artificial Sequence: Synthetic oligonucleotide
  Target: LAMA2; (+) strand; PAM type: NRG; PAM sequence: TAG
aaaacagtgtacattttgaa

SEQ ID NO: 138029 - DNA, 20 bp, Artificial Sequence
  Description of Artificial Sequence: Synthetic oligonucleotide
  Target: LAMA2; (+) strand; PAM type: NRG; PAM sequence: TGG
tttatgtatatgcataataa

SEQ ID NO: 138030 - DNA, 20 bp, Artificial Sequence
  Description of Artificial Sequence: Synthetic oligonucleotide
  Target: LAMA2; (+) strand; PAM type: NRG; PAM sequence: TAG
tgtatatgcataataatggt

SEQ ID NO: 138031 - DNA, 20 bp, Artificial Sequence
  Description of Artificial Sequence: Synthetic oligonucleotide
  Target: LAMA2; (+) strand; PAM type: NRG; PAM sequence: CAG
aataatggttagaatgctca

SEQ ID NO: 138032 - DNA, 20 bp, Artificial Sequence
  Description of Artificial Sequence: Synthetic oligonucleotide
  Target: LAMA2; (+) strand; PAM type: NRG; PAM sequence: CAG
ctcacagttatactgttcat

SEQ ID NO: 138033 - DNA, 20 bp, Artificial Sequence
  Description of Artificial Sequence: Synthetic oligonucleotide
  Target: LAMA2; (+) strand; PAM type: NRG; PAM sequence: CAG
catcagtaaccctgtgaata

SEQ ID NO: 138034 - DNA, 20 bp, Artificial Sequence
  Description of Artificial Sequence: Synthetic oligonucleotide
  Target: LAMA2; (+) strand; PAM type: NRG; PAM sequence: AGG
atcagtaaccctgtgaatac

SEQ ID NO: 138035 - DNA, 20 bp, Artificial Sequence
  Description of Artificial Sequence: Synthetic oligonucleotide
  Target: LAMA2; (+) strand; PAM type: NRG; PAM sequence: GGG
tcagtaaccctgtgaataca

SEQ ID NO: 138036 - DNA, 20 bp, Artificial Sequence
  Description of Artificial Sequence: Synthetic oligonucleotide
  Target: LAMA2; (+) strand; PAM type: NRG; PAM sequence: AAG
tgaatacagggttcacatcc

SEQ ID NO: 138037 - DNA, 20 bp, Artificial Sequence
  Description of Artificial Sequence: Synthetic oligonucleotide
  Target: LAMA2; (+) strand; PAM type: NRG; PAM sequence: TGG
cacatccaagatgttctcac

SEQ ID NO: 138038 - DNA, 20 bp, Artificial Sequence
  Description of Artificial Sequence: Synthetic oligonucleotide
  Target: LAMA2; (+) strand; PAM type: NRG; PAM sequence: TGG
aagatgttctcactggtccg

SEQ ID NO: 138039 - DNA, 20 bp, Artificial Sequence
  Description of Artificial Sequence: Synthetic oligonucleotide
  Target: LAMA2; (+) strand; PAM type: NRG; PAM sequence: AAG
gttctcactggtccgtggca

SEQ ID NO: 138040 - DNA, 20 bp, Artificial Sequence
  Description of Artificial Sequence: Synthetic oligonucleotide
  Target: LAMA2; (+) strand; PAM type: NRG; PAM sequence: AAG
tcactggtccgtggcaaagt

SEQ ID NO: 138041 - DNA, 20 bp, Artificial Sequence
  Description of Artificial Sequence: Synthetic oligonucleotide
  Target: LAMA2; (+) strand; PAM type: NRG; PAM sequence: GAG
ccgtggcaaagtaagaaaat

SEQ ID NO: 138042 - DNA, 20 bp, Artificial Sequence
  Description of Artificial Sequence: Synthetic oligonucleotide
  Target: LAMA2; (+) strand; PAM type: NRG; PAM sequence: TAG
ttccacatttttcataaaaa

SEQ ID NO: 138043 - DNA, 20 bp, Artificial Sequence
  Description of Artificial Sequence: Synthetic oligonucleotide
  Target: LAMA2; (+) strand; PAM type: NRG; PAM sequence: AAG
acatttttcataaaaataga

SEQ ID NO: 138044 - DNA, 20 bp, Artificial Sequence
  Description of Artificial Sequence: Synthetic oligonucleotide
  Target: LAMA2; (+) strand; PAM type: NRG; PAM sequence: AGG
catttttcataaaaatagaa

SEQ ID NO: 138045 - DNA, 20 bp, Artificial Sequence
  Description of Artificial Sequence: Synthetic oligonucleotide
  Target: LAMA2; (+) strand; PAM type: NRG; PAM sequence: TGG
tgtcctccattttgatatta

SEQ ID NO: 138046 - DNA, 20 bp, Artificial Sequence
  Description of Artificial Sequence: Synthetic oligonucleotide
  Target: LAMA2; (+) strand; PAM type: NRG; PAM sequence: GGG
gtcctccattttgatattat

SEQ ID NO: 138047 - DNA, 20 bp, Artificial Sequence
  Description of Artificial Sequence: Synthetic oligonucleotide
  Target: LAMA2; (+) strand; PAM type: NRG; PAM sequence: TGG
tgggttttaaaaactaatga

SEQ ID NO: 138048 - DNA, 20 bp, Artificial Sequence
  Description of Artificial Sequence: Synthetic oligonucleotide
  Target: LAMA2; (+) strand; PAM type: NRG; PAM sequence: TAG
aatgatgctttattaaatga

SEQ ID NO: 138049 - DNA, 20 bp, Artificial Sequence
  Description of Artificial Sequence: Synthetic oligonucleotide
  Target: LAMA2; (+) strand; PAM type: NRG; PAM sequence: TGG
attaaatgatagaaatatat

SEQ ID NO: 138050 - DNA, 20 bp, Artificial Sequence
  Description of Artificial Sequence: Synthetic oligonucleotide
  Target: LAMA2; (+) strand; PAM type: NRG; PAM sequence: GAG
taaatgatagaaatatattg

SEQ ID NO: 138051 - DNA, 20 bp, Artificial Sequence
  Description of Artificial Sequence: Synthetic oligonucleotide
  Target: LAMA2; (+) strand; PAM type: NRG; PAM sequence: AGG
aaatgatagaaatatattgg

SEQ ID NO: 138052 - DNA, 20 bp, Artificial Sequence
  Description of Artificial Sequence: Synthetic oligonucleotide
  Target: LAMA2; (+) strand; PAM type: NRG; PAM sequence: TGG
tattggaggttattattact

SEQ ID NO: 138053 - DNA, 20 bp, Artificial Sequence
  Description of Artificial Sequence: Synthetic oligonucleotide
  Target: LAMA2; (+) strand; PAM type: NRG; PAM sequence: AAG
tattattacttggaaaaact

SEQ ID NO: 138054 - DNA, 20 bp, Artificial Sequence
  Description of Artificial Sequence: Synthetic oligonucleotide
  Target: LAMA2; (+) strand; PAM type: NRG; PAM sequence: GAG
ttattacttggaaaaactaa

SEQ ID NO: 138055 - DNA, 20 bp, Artificial Sequence
  Description of Artificial Sequence: Synthetic oligonucleotide
  Target: LAMA2; (+) strand; PAM type: NRG; PAM sequence: TAG
tacttggaaaaactaagagc

SEQ ID NO: 138056 - DNA, 20 bp, Artificial Sequence
  Description of Artificial Sequence: Synthetic oligonucleotide
  Target: LAMA2; (+) strand; PAM type: NRG; PAM sequence: TGG
ttctctgaaaattatgaatc

SEQ ID NO: 138057 - DNA, 20 bp, Artificial Sequence
  Description of Artificial Sequence: Synthetic oligonucleotide
  Target: LAMA2; (+) strand; PAM type: NRG; PAM sequence: GAG
aatctggaaaccactgctgt

SEQ ID NO: 138058 - DNA, 20 bp, Artificial Sequence
  Description of Artificial Sequence: Synthetic oligonucleotide
  Target: LAMA2; (+) strand; PAM type: NRG; PAM sequence: CGG
ctggaaaccactgctgtgag

SEQ ID NO: 138059 - DNA, 20 bp, Artificial Sequence
  Description of Artificial Sequence: Synthetic oligonucleotide
  Target: LAMA2; (+) strand; PAM type: NRG; PAM sequence: TAG
gagcggaattttgttattcc

SEQ ID NO: 138060 - DNA, 20 bp, Artificial Sequence
  Description of Artificial Sequence: Synthetic oligonucleotide
  Target: LAMA2; (+) strand; PAM type: NRG; PAM sequence: CAG
gaattttgttattcctagat

SEQ ID NO: 138061 - DNA, 20 bp, Artificial Sequence
  Description of Artificial Sequence: Synthetic oligonucleotide
  Target: LAMA2; (+) strand; PAM type: NRG; PAM sequence: GAG
attttgttattcctagatca

SEQ ID NO: 138062 - DNA, 20 bp, Artificial Sequence
  Description of Artificial Sequence: Synthetic oligonucleotide
  Target: LAMA2; (+) strand; PAM type: NRG; PAM sequence: TGG
aatgttgaatgatttgtctg

SEQ ID NO: 138063 - DNA, 20 bp, Artificial Sequence
  Description of Artificial Sequence: Synthetic oligonucleotide
  Target: LAMA2; (+) strand; PAM type: NRG; PAM sequence: CAG
ttgaatgatttgtctgtggt

SEQ ID NO: 138064 - DNA, 20 bp, Artificial Sequence
  Description of Artificial Sequence: Synthetic oligonucleotide
  Target: LAMA2; (+) strand; PAM type: NRG; PAM sequence: AAG
tctgtggtcagttacgtact

SEQ ID NO: 138065 - DNA, 20 bp, Artificial Sequence
  Description of Artificial Sequence: Synthetic oligonucleotide
  Target: LAMA2; (+) strand; PAM type: NRG; PAM sequence: TGG
gtggtcagttacgtactaag

SEQ ID NO: 138066 - DNA, 20 bp, Artificial Sequence
  Description of Artificial Sequence: Synthetic oligonucleotide
  Target: LAMA2; (+) strand; PAM type: NRG; PAM sequence: TGG
gtcagttacgtactaagtgg

SEQ ID NO: 138067 - DNA, 20 bp, Artificial Sequence
  Description of Artificial Sequence: Synthetic oligonucleotide
  Target: LAMA2; (+) strand; PAM type: NRG; PAM sequence: GAG
cagttacgtactaagtggtg

SEQ ID NO: 138068 - DNA, 20 bp, Artificial Sequence
  Description of Artificial Sequence: Synthetic oligonucleotide
  Target: LAMA2; (+) strand; PAM type: NRG; PAM sequence: CAG
tacgtactaagtggtggagc

SEQ ID NO: 138069 - DNA, 20 bp, Artificial Sequence
  Description of Artificial Sequence: Synthetic oligonucleotide
  Target: LAMA2; (+) strand; PAM type: NRG; PAM sequence: AGG
acgtactaagtggtggagcc

SEQ ID NO: 138070 - DNA, 20 bp, Artificial Sequence
  Description of Artificial Sequence: Synthetic oligonucleotide
  Target: LAMA2; (+) strand; PAM type: NRG; PAM sequence: GAG
gtactaagtggtggagccag

SEQ ID NO: 138071 - DNA, 20 bp, Artificial Sequence
  Description of Artificial Sequence: Synthetic oligonucleotide
  Target: LAMA2; (+) strand; PAM type: NRG; PAM sequence: AGG
tactaagtggtggagccagg

SEQ ID NO: 138072 - DNA, 20 bp, Artificial Sequence
  Description of Artificial Sequence: Synthetic oligonucleotide
  Target: LAMA2; (+) strand; PAM type: NRG; PAM sequence: CAG
ggtggagccaggaggaatat

SEQ ID NO: 138073 - DNA, 20 bp, Artificial Sequence
  Description of Artificial Sequence: Synthetic oligonucleotide
  Target: LAMA2; (+) strand; PAM type: NRG; PAM sequence: CAG
aatatcagctacccgtgtgc

SEQ ID NO: 138074 - DNA, 20 bp, Artificial Sequence
  Description of Artificial Sequence: Synthetic oligonucleotide
  Target: LAMA2; (+) strand; PAM type: NRG; PAM sequence: TGG
acccgtgtgccagcacctca

SEQ ID NO: 138075 - DNA, 20 bp, Artificial Sequence
  Description of Artificial Sequence: Synthetic oligonucleotide
  Target: LAMA2; (+) strand; PAM type: NRG; PAM sequence: TAG
cctctcatcaccattattat

SEQ ID NO: 138076 - DNA, 20 bp, Artificial Sequence
  Description of Artificial Sequence: Synthetic oligonucleotide
  Target: LAMA2; (+) strand; PAM type: NRG; PAM sequence: TGG
accattattattagaataca

SEQ ID NO: 138077 - DNA, 20 bp, Artificial Sequence
  Description of Artificial Sequence: Synthetic oligonucleotide
  Target: LAMA2; (+) strand; PAM type: NRG; PAM sequence: TAG
ttattattagaatacatggc

SEQ ID NO: 138078 - DNA, 20 bp, Artificial Sequence
  Description of Artificial Sequence: Synthetic oligonucleotide
  Target: LAMA2; (+) strand; PAM type: NRG; PAM sequence: TAG
acatggctagattgcaatat

SEQ ID NO: 138079 - DNA, 20 bp, Artificial Sequence
  Description of Artificial Sequence: Synthetic oligonucleotide
  Target: LAMA2; (+) strand; PAM type: NRG; PAM sequence: AGG
catggctagattgcaatatt

SEQ ID NO: 138080 - DNA, 20 bp, Artificial Sequence
  Description of Artificial Sequence: Synthetic oligonucleotide
  Target: LAMA2; (+) strand; PAM type: NRG; PAM sequence: TAG
ggctagattgcaatattagg

SEQ ID NO: 138081 - DNA, 20 bp, Artificial Sequence
  Description of Artificial Sequence: Synthetic oligonucleotide
  Target: LAMA2; (+) strand; PAM type: NRG; PAM sequence: AGG
gctagattgcaatattaggt

SEQ ID NO: 138082 - DNA, 20 bp, Artificial Sequence
  Description of Artificial Sequence: Synthetic oligonucleotide
  Target: LAMA2; (+) strand; PAM type: NRG; PAM sequence: GAG
caatattaggtaggcaaatt

SEQ ID NO: 138083 - DNA, 20 bp, Artificial Sequence
  Description of Artificial Sequence: Synthetic oligonucleotide
  Target: LAMA2; (+) strand; PAM type: NRG; PAM sequence: GAG
atattaggtaggcaaattga

SEQ ID NO: 138084 - DNA, 20 bp, Artificial Sequence
  Description of Artificial Sequence: Synthetic oligonucleotide
  Target: LAMA2; (+) strand; PAM type: NRG; PAM sequence: TAG
gagtccatgtttgttcctca

SEQ ID NO: 138085 - DNA, 20 bp, Artificial Sequence
  Description of Artificial Sequence: Synthetic oligonucleotide
  Target: LAMA2; (+) strand; PAM type: NRG; PAM sequence: GAG
atgtgatttgttccttatgt

SEQ ID NO: 138086 - DNA, 20 bp, Artificial Sequence
  Description of Artificial Sequence: Synthetic oligonucleotide
  Target: LAMA2; (+) strand; PAM type: NRG; PAM sequence: AGG
tgtgatttgttccttatgtg

SEQ ID NO: 138087 - DNA, 20 bp, Artificial Sequence
  Description of Artificial Sequence: Synthetic oligonucleotide
  Target: LAMA2; (+) strand; PAM type: NRG; PAM sequence: AAG
ggtattccttcaaatttaaa

SEQ ID NO: 138088 - DNA, 20 bp, Artificial Sequence
  Description of Artificial Sequence: Synthetic oligonucleotide
  Target: LAMA2; (+) strand; PAM type: NRG; PAM sequence: AGG
gtattccttcaaatttaaaa

SEQ ID NO: 138089 - DNA, 20 bp, Artificial Sequence
  Description of Artificial Sequence: Synthetic oligonucleotide
  Target: LAMA2; (+) strand; PAM type: NRG; PAM sequence: AAG
aggattgtgttctaatctaa

SEQ ID NO: 138090 - DNA, 20 bp, Artificial Sequence
  Description of Artificial Sequence: Synthetic oligonucleotide
  Target: LAMA2; (+) strand; PAM type: NRG; PAM sequence: AGG
ggattgtgttctaatctaaa

SEQ ID NO: 138091 - DNA, 20 bp, Artificial Sequence
  Description of Artificial Sequence: Synthetic oligonucleotide
  Target: LAMA2; (+) strand; PAM type: NRG; PAM sequence: AAG
taatctaaaaggtcattcat

SEQ ID NO: 138092 - DNA, 20 bp, Artificial Sequence
  Description of Artificial Sequence: Synthetic oligonucleotide
  Target: LAMA2; (+) strand; PAM type: NRG; PAM sequence: CAG
actcattcgaaacatcttcc

SEQ ID NO: 138093 - DNA, 20 bp, Artificial Sequence
  Description of Artificial Sequence: Synthetic oligonucleotide
  Target: LAMA2; (+) strand; PAM type: NRG; PAM sequence: TAG
gaaacatcttcccagatact

SEQ ID NO: 138094 - DNA, 20 bp, Artificial Sequence
  Description of Artificial Sequence: Synthetic oligonucleotide
  Target: LAMA2; (+) strand; PAM type: NRG; PAM sequence: AAG
cttagttttatgaaattctc

SEQ ID NO: 138095 - DNA, 20 bp, Artificial Sequence
  Description of Artificial Sequence: Synthetic oligonucleotide
  Target: LAMA2; (+) strand; PAM type: NRG; PAM sequence: AAG
ttctcaagactgacacccca

SEQ ID NO: 138096 - DNA, 20 bp, Artificial Sequence
  Description of Artificial Sequence: Synthetic oligonucleotide
  Target: LAMA2; (+) strand; PAM type: NRG; PAM sequence: CAG
tccttaatctataataaaca

SEQ ID NO: 138097 - DNA, 20 bp, Artificial Sequence
  Description of Artificial Sequence: Synthetic oligonucleotide
  Target: LAMA2; (+) strand; PAM type: NRG; PAM sequence: AGG
ccttaatctataataaacac

SEQ ID NO: 138098 - DNA, 20 bp, Artificial Sequence
  Description of Artificial Sequence: Synthetic oligonucleotide
  Target: LAMA2; (+) strand; PAM type: NRG; PAM sequence: GAG
ttaatctataataaacacag

SEQ ID NO: 138099 - DNA, 20 bp, Artificial Sequence
  Description of Artificial Sequence: Synthetic oligonucleotide
  Target: LAMA2; (+) strand; PAM type: NRG; PAM sequence: CAG
ctataataaacacaggagta

SEQ ID NO: 138100 - DNA, 20 bp, Artificial Sequence
  Description of Artificial Sequence: Synthetic oligonucleotide
  Target: LAMA2; (+) strand; PAM type: NRG; PAM sequence: AGG
tataataaacacaggagtac

SEQ ID NO: 138101 - DNA, 20 bp, Artificial Sequence
  Description of Artificial Sequence: Synthetic oligonucleotide
  Target: LAMA2; (+) strand; PAM type: NRG; PAM sequence: GGG
ataataaacacaggagtaca

SEQ ID NO: 138102 - DNA, 20 bp, Artificial Sequence
  Description of Artificial Sequence: Synthetic oligonucleotide
  Target: LAMA2; (+) strand; PAM type: NRG; PAM sequence: AAG
ataaacacaggagtacaggg

SEQ ID NO: 138103 - DNA, 20 bp, Artificial Sequence
  Description of Artificial Sequence: Synthetic oligonucleotide
  Target: LAMA2; (+) strand; PAM type: NRG; PAM sequence: TGG
ccactttgtttacatttcta

SEQ ID NO: 138104 - DNA, 20 bp, Artificial Sequence
  Description of Artificial Sequence: Synthetic oligonucleotide
  Target: LAMA2; (+) strand; PAM type: NRG; PAM sequence: GGG
cactttgtttacatttctat

SEQ ID NO: 138105 - DNA, 20 bp, Artificial Sequence
  Description of Artificial Sequence: Synthetic oligonucleotide
  Target: LAMA2; (+) strand; PAM type: NRG; PAM sequence: TAG
gggcaaatgtgccgactttc

SEQ ID NO: 138106 - DNA, 20 bp, Artificial Sequence
  Description of Artificial Sequence: Synthetic oligonucleotide
  Target: LAMA2; (+) strand; PAM type: NRG; PAM sequence: GAG
aaatgtgccgactttctagt

SEQ ID NO: 138107 - DNA, 20 bp, Artificial Sequence
  Description of Artificial Sequence: Synthetic oligonucleotide
  Target: LAMA2; (+) strand; PAM type: NRG; PAM sequence: GAG
ccgactttctagtgagatgt

SEQ ID NO: 138108 - DNA, 20 bp, Artificial Sequence
  Description of Artificial Sequence: Synthetic oligonucleotide
  Target: LAMA2; (+) strand; PAM type: NRG; PAM sequence: AGG
cgactttctagtgagatgtg

SEQ ID NO: 138109 - DNA, 20 bp, Artificial Sequence
  Description of Artificial Sequence: Synthetic oligonucleotide
  Target: LAMA2; (+) strand; PAM type: NRG; PAM sequence: AAG
tagtgagatgtgaggaattt

SEQ ID NO: 138110 - DNA, 20 bp, Artificial Sequence
  Description of Artificial Sequence: Synthetic oligonucleotide
  Target: LAMA2; (+) strand; PAM type: NRG; PAM sequence: CAG
gaatttaagtgcccttactg

SEQ ID NO: 138111 - DNA, 20 bp, Artificial Sequence
  Description of Artificial Sequence: Synthetic oligonucleotide
  Target: LAMA2; (+) strand; PAM type: NRG; PAM sequence: TGG
aagtgcccttactgcagcct

SEQ ID NO: 138112 - DNA, 20 bp, Artificial Sequence
  Description of Artificial Sequence: Synthetic oligonucleotide
  Target: LAMA2; (+) strand; PAM type: NRG; PAM sequence: GGG
agtgcccttactgcagcctt

SEQ ID NO: 138113 - DNA, 20 bp, Artificial Sequence
  Description of Artificial Sequence: Synthetic oligonucleotide
  Target: LAMA2; (+) strand; PAM type: NRG; PAM sequence: TAG
ccttactgcagccttgggaa

SEQ ID NO: 138114 - DNA, 20 bp, Artificial Sequence
  Description of Artificial Sequence: Synthetic oligonucleotide
  Target: LAMA2; (+) strand; PAM type: NRG; PAM sequence: CAG
tgcagccttgggaatagaaa

SEQ ID NO: 138115 - DNA, 20 bp, Artificial Sequence
  Description of Artificial Sequence: Synthetic oligonucleotide
  Target: LAMA2; (+) strand; PAM type: NRG; PAM sequence: AGG
gcagccttgggaatagaaac

SEQ ID NO: 138116 - DNA, 20 bp, Artificial Sequence
  Description of Artificial Sequence: Synthetic oligonucleotide
  Target: LAMA2; (+) strand; PAM type: NRG; PAM sequence: CAG
aatagaaacaggatcatcaa

SEQ ID NO: 138117 - DNA, 20 bp, Artificial Sequence
  Description of Artificial Sequence: Synthetic oligonucleotide
  Target: LAMA2; (+) strand; PAM type: NRG; PAM sequence: GAG
tgccatcctcacccatgcat

SEQ ID NO: 138118 - DNA, 20 bp, Artificial Sequence
  Description of Artificial Sequence: Synthetic oligonucleotide
  Target: LAMA2; (+) strand; PAM type: NRG; PAM sequence: AAG
atcctcacccatgcatgagc

SEQ ID NO: 138119 - DNA, 20 bp, Artificial Sequence
  Description of Artificial Sequence: Synthetic oligonucleotide
  Target: LAMA2; (+) strand; PAM type: NRG; PAM sequence: AGG
tcctcacccatgcatgagca

SEQ ID NO: 138120 - DNA, 20 bp, Artificial Sequence
  Description of Artificial Sequence: Synthetic oligonucleotide
  Target: LAMA2; (+) strand; PAM type: NRG; PAM sequence: TAG
atgcatgagcaaggcctgtt

SEQ ID NO: 138121 - DNA, 20 bp, Artificial Sequence
  Description of Artificial Sequence: Synthetic oligonucleotide
  Target: LAMA2; (+) strand; PAM type: NRG; PAM sequence: GAG
gcatgagcaaggcctgttta

SEQ ID NO: 138122 - DNA, 20 bp, Artificial Sequence
  Description of Artificial Sequence: Synthetic oligonucleotide
  Target: LAMA2; (+) strand; PAM type: NRG; PAM sequence: GAG
atgagcaaggcctgtttaga

SEQ ID NO: 138123 - DNA, 20 bp, Artificial Sequence
  Description of Artificial Sequence: Synthetic oligonucleotide
  Target: LAMA2; (+) strand; PAM type: NRG; PAM sequence: AGG
tgagcaaggcctgtttagag

SEQ ID NO: 138124 - DNA, 20 bp, Artificial Sequence
  Description of Artificial Sequence: Synthetic oligonucleotide
  Target: LAMA2; (+) strand; PAM type: NRG; PAM sequence: GGG
gagcaaggcctgtttagaga

SEQ ID NO: 138125 - DNA, 20 bp, Artificial Sequence
  Description of Artificial Sequence: Synthetic oligonucleotide
  Target: LAMA2; (+) strand; PAM type: NRG; PAM sequence: GAG
gcaaggcctgtttagagagg

SEQ ID NO: 138126 - DNA, 20 bp, Artificial Sequence
  Description of Artificial Sequence: Synthetic oligonucleotide
  Target: LAMA2; (+) strand; PAM type: NRG; PAM sequence: AAG
ggcctgtttagagagggaga

SEQ ID NO: 138127 - DNA, 20 bp, Artificial Sequence
  Description of Artificial Sequence: Synthetic oligonucleotide
  Target: LAMA2; (+) strand; PAM type: NRG; PAM sequence: AAG
tttagagagggagaaagaaa

SEQ ID NO: 138128 - DNA, 20 bp, Artificial Sequence
  Description of Artificial Sequence: Synthetic oligonucleotide
  Target: LAMA2; (+) strand; PAM type: NRG; PAM sequence: TGG
gaaaaagaccttatattact

SEQ ID NO: 138129 - DNA, 20 bp, Artificial Sequence
  Description of Artificial Sequence: Synthetic oligonucleotide
  Target: LAMA2; (+) strand; PAM type: NRG; PAM sequence: GAG
ccttatattacttggaaaat

SEQ ID NO: 138130 - DNA, 20 bp, Artificial Sequence
  Description of Artificial Sequence: Synthetic oligonucleotide
  Target: LAMA2; (+) strand; PAM type: NRG; PAM sequence: AAG
tatattacttggaaaatgag

SEQ ID NO: 138131 - DNA, 20 bp, Artificial Sequence
  Description of Artificial Sequence: Synthetic oligonucleotide
  Target: LAMA2; (+) strand; PAM type: NRG; PAM sequence: AAG
tacttggaaaatgagaagca

SEQ ID NO: 138132 - DNA, 20 bp, Artificial Sequence
  Description of Artificial Sequence: Synthetic oligonucleotide
  Target: LAMA2; (+) strand; PAM type: NRG; PAM sequence: TAG
aaaatgagaagcaaagattt

SEQ ID NO: 138133 - DNA, 20 bp, Artificial Sequence
  Description of Artificial Sequence: Synthetic oligonucleotide
  Target: LAMA2; (+) strand; PAM type: NRG; PAM sequence: AAG
gagaagcaaagattttagac

SEQ ID NO: 138134 - DNA, 20 bp, Artificial Sequence
  Description of Artificial Sequence: Synthetic oligonucleotide
  Target: LAMA2; (+) strand; PAM type: NRG; PAM sequence: TGG
tttagacaagaaccaatgac

SEQ ID NO: 138135 - DNA, 20 bp, Artificial Sequence
  Description of Artificial Sequence: Synthetic oligonucleotide
  Target: LAMA2; (+) strand; PAM type: NRG; PAM sequence: GGG
ttagacaagaaccaatgact

SEQ ID NO: 138136 - DNA, 20 bp, Artificial Sequence
  Description of Artificial Sequence: Synthetic oligonucleotide
  Target: LAMA2; (+) strand; PAM type: NRG; PAM sequence: GAG
actgggaaccaaaatgcaat

SEQ ID NO: 138137 - DNA, 20 bp, Artificial Sequence
  Description of Artificial Sequence: Synthetic oligonucleotide
  Target: LAMA2; (+) strand; PAM type: NRG; PAM sequence: AGG
ctgggaaccaaaatgcaatg

SEQ ID NO: 138138 - DNA, 20 bp, Artificial Sequence
  Description of Artificial Sequence: Synthetic oligonucleotide
  Target: LAMA2; (+) strand; PAM type: NRG; PAM sequence: GGG
tgggaaccaaaatgcaatga

SEQ ID NO: 138139 - DNA, 20 bp, Artificial Sequence
  Description of Artificial Sequence: Synthetic oligonucleotide
  Target: LAMA2; (+) strand; PAM type: NRG; PAM sequence: TGG
accaaaatgcaatgagggct

SEQ ID NO: 138140 - DNA, 20 bp, Artificial Sequence
  Description of Artificial Sequence: Synthetic oligonucleotide
  Target: LAMA2; (+) strand; PAM type: NRG; PAM sequence: CAG
aaaatgcaatgagggcttgg

SEQ ID NO: 138141 - DNA, 20 bp, Artificial Sequence
  Description of Artificial Sequence: Synthetic oligonucleotide
  Target: LAMA2; (+) strand; PAM type: NRG; PAM sequence: CAG
gcaatgagggcttggcagcc

SEQ ID NO: 138142 - DNA, 20 bp, Artificial Sequence
  Description of Artificial Sequence: Synthetic oligonucleotide
  Target: LAMA2; (+) strand; PAM type: NRG; PAM sequence: AGG
caatgagggcttggcagccc

SEQ ID NO: 138143 - DNA, 20 bp, Artificial Sequence
  Description of Artificial Sequence: Synthetic oligonucleotide
  Target: LAMA2; (+) strand; PAM type: NRG; PAM sequence: GAG
atgagggcttggcagcccag

SEQ ID NO: 138144 - DNA, 20 bp, Artificial Sequence
  Description of Artificial Sequence: Synthetic oligonucleotide
  Target: LAMA2; (+) strand; PAM type: NRG; PAM sequence: TAG
agggcttggcagcccaggag

SEQ ID NO: 138145 - DNA, 20 bp, Artificial Sequence
  Description of Artificial Sequence: Synthetic oligonucleotide
  Target: LAMA2; (+) strand; PAM type: NRG; PAM sequence: TGG
gcttggcagcccaggagtag

SEQ ID NO: 138146 - DNA, 20 bp, Artificial Sequence
  Description of Artificial Sequence: Synthetic oligonucleotide
  Target: LAMA2; (+) strand; PAM type: NRG; PAM sequence: GAG
ggagtagtggctgctgttgt

SEQ ID NO: 138147 - DNA, 20 bp, Artificial Sequence
  Description of Artificial Sequence: Synthetic oligonucleotide
  Target: LAMA2; (+) strand; PAM type: NRG; PAM sequence: TGG
ggctgctgttgtgagacaca

SEQ ID NO: 138148 - DNA, 20 bp, Artificial Sequence
  Description of Artificial Sequence: Synthetic oligonucleotide
  Target: LAMA2; (+) strand; PAM type: NRG; PAM sequence: GAG
ctgctgttgtgagacacatg

SEQ ID NO: 138149 - DNA, 20 bp, Artificial Sequence
  Description of Artificial Sequence: Synthetic oligonucleotide
  Target: LAMA2; (+) strand; PAM type: NRG; PAM sequence: TGG
tgagacacatggagctaaaa

SEQ ID NO: 138150 - DNA, 20 bp, Artificial Sequence
  Description of Artificial Sequence: Synthetic oligonucleotide
  Target: LAMA2; (+) strand; PAM type: NRG; PAM sequence: GGG
gagacacatggagctaaaat

SEQ ID NO: 138151 - DNA, 20 bp, Artificial Sequence
  Description of Artificial Sequence: Synthetic oligonucleotide
  Target: LAMA2; (+) strand; PAM type: NRG; PAM sequence: GAG
gacacatggagctaaaatgg

SEQ ID NO: 138152 - DNA, 20 bp, Artificial Sequence
  Description of Artificial Sequence: Synthetic oligonucleotide
  Target: LAMA2; (+) strand; PAM type: NRG; PAM sequence: GAG
cacatggagctaaaatggga

SEQ ID NO: 138153 - DNA, 20 bp, Artificial Sequence
  Description of Artificial Sequence: Synthetic oligonucleotide
  Target: LAMA2; (+) strand; PAM type: NRG; PAM sequence: GAG
ggagctaaaatgggagagat

SEQ ID NO: 138154 - DNA, 20 bp, Artificial Sequence
  Description of Artificial Sequence: Synthetic oligonucleotide
  Target: LAMA2; (+) strand; PAM type: NRG; PAM sequence: GAG
tgggagagatgagaaactgt

SEQ ID NO: 138155 - DNA, 20 bp, Artificial Sequence
  Description of Artificial Sequence: Synthetic oligonucleotide
  Target: LAMA2; (+) strand; PAM type: NRG; PAM sequence: GAG
gatgagaaactgtgagcttt

SEQ ID NO: 138156 - DNA, 20 bp, Artificial Sequence
  Description of Artificial Sequence: Synthetic oligonucleotide
  Target: LAMA2; (+) strand; PAM type: NRG; PAM sequence: AGG
atgagaaactgtgagctttg

SEQ ID NO: 138157 - DNA, 20 bp, Artificial Sequence
  Description of Artificial Sequence: Synthetic oligonucleotide
  Target: LAMA2; (+) strand; PAM type: NRG; PAM sequence: AAG
ctgtgagctttgaggattgt

SEQ ID NO: 138158 - DNA, 20 bp, Artificial Sequence
  Description of Artificial Sequence: Synthetic oligonucleotide
  Target: LAMA2; (+) strand; PAM type: NRG; PAM sequence: AAG
tgagctttgaggattgtaag

SEQ ID NO: 138159 - DNA, 20 bp, Artificial Sequence
  Description of Artificial Sequence: Synthetic oligonucleotide
  Target: LAMA2; (+) strand; PAM type: NRG; PAM sequence: AGG
gagctttgaggattgtaaga

SEQ ID NO: 138160 - DNA, 20 bp, Artificial Sequence
  Description of Artificial Sequence: Synthetic oligonucleotide
  Target: LAMA2; (+) strand; PAM type: NRG; PAM sequence: AAG
ctttgaggattgtaagaagg

SEQ ID NO: 138161 - DNA, 20 bp, Artificial Sequence
  Description of Artificial Sequence: Synthetic oligonucleotide
  Target: LAMA2; (+) strand; PAM type: NRG; PAM sequence: AGG
tttgaggattgtaagaagga

SEQ ID NO: 138162 - DNA, 20 bp, Artificial Sequence
  Description of Artificial Sequence: Synthetic oligonucleotide
  Target: LAMA2; (+) strand; PAM type: NRG; PAM sequence: GGG
ttgaggattgtaagaaggaa

SEQ ID NO: 138163 - DNA, 20 bp, Artificial Sequence
  Description of Artificial Sequence: Synthetic oligonucleotide
  Target: LAMA2; (+) strand; PAM type: NRG; PAM sequence: GAG
gaggattgtaagaaggaagg

SEQ ID NO: 138164 - DNA, 20 bp, Artificial Sequence
  Description of Artificial Sequence: Synthetic oligonucleotide
  Target: LAMA2; (+) strand; PAM type: NRG; PAM sequence: AAG
gaaggaagggagctgcaaca

SEQ ID NO: 138165 - DNA, 20 bp, Artificial Sequence
  Description of Artificial Sequence: Synthetic oligonucleotide
  Target: LAMA2; (+) strand; PAM type: NRG; PAM sequence: AGG
aaggaagggagctgcaacaa

SEQ ID NO: 138166 - DNA, 20 bp, Artificial Sequence
  Description of Artificial Sequence: Synthetic oligonucleotide
  Target: LAMA2; (+) strand; PAM type: NRG; PAM sequence: CAG
gggagctgcaacaaaggtca

SEQ ID NO: 138167 - DNA, 20 bp, Artificial Sequence
  Description of Artificial Sequence: Synthetic oligonucleotide
  Target: LAMA2; (+) strand; PAM type: NRG; PAM sequence: AGG
ggagctgcaacaaaggtcac

SEQ ID NO: 138168 - DNA, 20 bp, Artificial Sequence
  Description of Artificial Sequence: Synthetic oligonucleotide
  Target: LAMA2; (+) strand; PAM type: NRG; PAM sequence: TGG
caacaaaggtcacaggtctg

SEQ ID NO: 138169 - DNA, 20 bp, Artificial Sequence
  Description of Artificial Sequence: Synthetic oligonucleotide
  Target: LAMA2; (+) strand; PAM type: NRG; PAM sequence: GGG
aacaaaggtcacaggtctgt

SEQ ID NO: 138170 - DNA, 20 bp, Artificial Sequence
  Description of Artificial Sequence: Synthetic oligonucleotide
  Target: LAMA2; (+) strand; PAM type: NRG; PAM sequence: GGG
acaaaggtcacaggtctgtg

SEQ ID NO: 138171 - DNA, 20 bp, Artificial Sequence
  Description of Artificial Sequence: Synthetic oligonucleotide
  Target: LAMA2; (+) strand; PAM type: NRG; PAM sequence: TGG
tcccttttgattttcacaat

SEQ ID NO: 138172 - DNA, 20 bp, Artificial Sequence
  Description of Artificial Sequence: Synthetic oligonucleotide
  Target: LAMA2; (+) strand; PAM type: NRG; PAM sequence: TGG
tggtcctgttcttatatgtc

SEQ ID NO: 138173 - DNA, 20 bp, Artificial Sequence
  Description of Artificial Sequence: Synthetic oligonucleotide
  Target: LAMA2; (+) strand; PAM type: NRG; PAM sequence: GGG
ggtcctgttcttatatgtct

SEQ ID NO: 138174 - DNA, 20 bp, Artificial Sequence
  Description of Artificial Sequence: Synthetic oligonucleotide
  Target: LAMA2; (+) strand; PAM type: NRG; PAM sequence: AAG
gttcttatatgtctgggtga

SEQ ID NO: 138175 - DNA, 20 bp, Artificial Sequence
  Description of Artificial Sequence: Synthetic oligonucleotide
  Target: LAMA2; (+) strand; PAM type: NRG; PAM sequence: AAG
ttatatgtctgggtgaaagt

SEQ ID NO: 138176 - DNA, 20 bp, Artificial Sequence
  Description of Artificial Sequence: Synthetic oligonucleotide
  Target: LAMA2; (+) strand; PAM type: NRG; PAM sequence: AGG
tatatgtctgggtgaaagta

SEQ ID NO: 138177 - DNA, 20 bp, Artificial Sequence
  Description of Artificial Sequence: Synthetic oligonucleotide
  Target: LAMA2; (+) strand; PAM type: NRG; PAM sequence: GGG
atatgtctgggtgaaagtaa

SEQ ID NO: 138178 - DNA, 20 bp, Artificial Sequence
  Description of Artificial Sequence: Synthetic oligonucleotide
  Target: LAMA2; (+) strand; PAM type: NRG; PAM sequence: AAG
tgtctgggtgaaagtaaggg

SEQ ID NO: 138179 - DNA, 20 bp, Artificial Sequence
  Description of Artificial Sequence: Synthetic oligonucleotide
  Target: LAMA2; (+) strand; PAM type: NRG; PAM sequence: TGG
tgaaagtaagggaagatctg

SEQ ID NO: 138180 - DNA, 20 bp, Artificial Sequence
  Description of Artificial Sequence: Synthetic oligonucleotide
  Target: LAMA2; (+) strand; PAM type: NRG; PAM sequence: TGG
aagggaagatctgtggtttt

SEQ ID NO: 138181 - DNA, 20 bp, Artificial Sequence
  Description of Artificial Sequence: Synthetic oligonucleotide
  Target: LAMA2; (+) strand; PAM type: NRG; PAM sequence: TAG
ggaagatctgtggtttttgg

SEQ ID NO: 138182 - DNA, 20 bp, Artificial Sequence
  Description of Artificial Sequence: Synthetic oligonucleotide
  Target: LAMA2; (+) strand; PAM type: NRG; PAM sequence: AGG
gaagatctgtggtttttggt

SEQ ID NO: 138183 - DNA, 20 bp, Artificial Sequence
  Description of Artificial Sequence: Synthetic oligonucleotide
  Target: LAMA2; (+) strand; PAM type: NRG; PAM sequence: TAG
atctgtggtttttggtagga

SEQ ID NO: 138184 - DNA, 20 bp, Artificial Sequence
  Description of Artificial Sequence: Synthetic oligonucleotide
  Target: LAMA2; (+) strand; PAM type: NRG; PAM sequence: GAG
ctgtggtttttggtaggata

SEQ ID NO: 138185 - DNA, 20 bp, Artificial Sequence
  Description of Artificial Sequence: Synthetic oligonucleotide
  Target: LAMA2; (+) strand; PAM type: NRG; PAM sequence: AAG
ccttccttgccattattgta

SEQ ID NO: 138186 - DNA, 20 bp, Artificial Sequence
  Description of Artificial Sequence: Synthetic oligonucleotide
  Target: LAMA2; (+) strand; PAM type: NRG; PAM sequence: TAG
tattgtaaagattcctccac

SEQ ID NO: 138187 - DNA, 20 bp, Artificial Sequence
  Description of Artificial Sequence: Synthetic oligonucleotide
  Target: LAMA2; (+) strand; PAM type: NRG; PAM sequence: GAG
ttgtaaagattcctccacta

SEQ ID NO: 138188 - DNA, 20 bp, Artificial Sequence
  Description of Artificial Sequence: Synthetic oligonucleotide
  Target: LAMA2; (+) strand; PAM type: NRG; PAM sequence: TAG
aaagattcctccactagagt

SEQ ID NO: 138189 - DNA, 20 bp, Artificial Sequence
  Description of Artificial Sequence: Synthetic oligonucleotide
  Target: LAMA2; (+) strand; PAM type: NRG; PAM sequence: TGG
tccactagagttagtgatga

SEQ ID NO: 138190 - DNA, 20 bp, Artificial Sequence
  Description of Artificial Sequence: Synthetic oligonucleotide
  Target: LAMA2; (+) strand; PAM type: NRG; PAM sequence: CAG
agagttagtgatgatggcaa

SEQ ID NO: 138191 - DNA, 20 bp, Artificial Sequence
  Description of Artificial Sequence: Synthetic oligonucleotide
  Target: LAMA2; (+) strand; PAM type: NRG; PAM sequence: CGG
tgatggcaacagacaaatgc

SEQ ID NO: 138192 - DNA, 20 bp, Artificial Sequence
  Description of Artificial Sequence: Synthetic oligonucleotide
  Target: LAMA2; (+) strand; PAM type: NRG; PAM sequence: GAG
gcaacagacaaatgccggat

SEQ ID NO: 138193 - DNA, 20 bp, Artificial Sequence
  Description of Artificial Sequence: Synthetic oligonucleotide
  Target: LAMA2; (+) strand; PAM type: NRG; PAM sequence: GAG
aacagacaaatgccggatga

SEQ ID NO: 138194 - DNA, 20 bp, Artificial Sequence
  Description of Artificial Sequence: Synthetic oligonucleotide
  Target: LAMA2; (+) strand; PAM type: NRG; PAM sequence: AGG
acagacaaatgccggatgag

SEQ ID NO: 138195 - DNA, 20 bp, Artificial Sequence
  Description of Artificial Sequence: Synthetic oligonucleotide
  Target: LAMA2; (+) strand; PAM type: NRG; PAM sequence: TGG
caaatgccggatgagaggtt

SEQ ID NO: 138196 - DNA, 20 bp, Artificial Sequence
  Description of Artificial Sequence: Synthetic oligonucleotide
  Target: LAMA2; (+) strand; PAM type: NRG; PAM sequence: GGG
aaatgccggatgagaggttt

SEQ ID NO: 138197 - DNA, 20 bp, Artificial Sequence
  Description of Artificial Sequence: Synthetic oligonucleotide
  Target: LAMA2; (+) strand; PAM type: NRG; PAM sequence: TAG
ttatctctcatattattaaa

SEQ ID NO: 138198 - DNA, 20 bp, Artificial Sequence
  Description of Artificial Sequence: Synthetic oligonucleotide
  Target: LAMA2; (+) strand; PAM type: NRG; PAM sequence: TAG
ctcatattattaaatagtga

SEQ ID NO: 138199 - DNA, 20 bp, Artificial Sequence
  Description of Artificial Sequence: Synthetic oligonucleotide
  Target: LAMA2; (+) strand; PAM type: NRG; PAM sequence: TGG
attaaatagtgatagaaaat

SEQ ID NO: 138200 - DNA, 20 bp, Artificial Sequence
  Description of Artificial Sequence: Synthetic oligonucleotide
  Target: LAMA2; (+) strand; PAM type: NRG; PAM sequence: AAG
aatagtgatagaaaattggc

SEQ ID NO: 138201 - DNA, 20 bp, Artificial Sequence
  Description of Artificial Sequence: Synthetic oligonucleotide
  Target: LAMA2; (+) strand; PAM type: NRG; PAM sequence: AAG
gatagaaaattggcaagtta

SEQ ID NO: 138202 - DNA, 20 bp, Artificial Sequence
  Description of Artificial Sequence: Synthetic oligonucleotide
  Target: LAMA2; (+) strand; PAM type: NRG; PAM sequence: TGG
aaaattggcaagttaaagac

SEQ ID NO: 138203 - DNA, 20 bp, Artificial Sequence
  Description of Artificial Sequence: Synthetic oligonucleotide
  Target: LAMA2; (+) strand; PAM type: NRG; PAM sequence: AAG
agttaaagactggccgcaaa

SEQ ID NO: 138204 - DNA, 20 bp, Artificial Sequence
  Description of Artificial Sequence: Synthetic oligonucleotide
  Target: LAMA2; (+) strand; PAM type: NRG; PAM sequence: AAG
tggccgcaaaaagcttctgt

SEQ ID NO: 138205 - DNA, 20 bp, Artificial Sequence
  Description of Artificial Sequence: Synthetic oligonucleotide
  Target: LAMA2; (+) strand; PAM type: NRG; PAM sequence: AGG
ggccgcaaaaagcttctgta

SEQ ID NO: 138206 - DNA, 20 bp, Artificial Sequence
  Description of Artificial Sequence: Synthetic oligonucleotide
  Target: LAMA2; (+) strand; PAM type: NRG; PAM sequence: GGG
gccgcaaaaagcttctgtaa

SEQ ID NO: 138207 - DNA, 20 bp, Artificial Sequence
  Description of Artificial Sequence: Synthetic oligonucleotide
  Target: LAMA2; (+) strand; PAM type: NRG; PAM sequence: AAG
aaaaagcttctgtaagggcc

SEQ ID NO: 138208 - DNA, 20 bp, Artificial Sequence
  Description of Artificial Sequence: Synthetic oligonucleotide
  Target: LAMA2; (+) strand; PAM type: NRG; PAM sequence: AGG
aaaagcttctgtaagggcca

SEQ ID NO: 138209 - DNA, 20 bp, Artificial Sequence
  Description of Artificial Sequence: Synthetic oligonucleotide
  Target: LAMA2; (+) strand; PAM type: NRG; PAM sequence: GGG
aaagcttctgtaagggccaa

SEQ ID NO: 138210 - DNA, 20 bp, Artificial Sequence
  Description of Artificial Sequence: Synthetic oligonucleotide
  Target: LAMA2; (+) strand; PAM type: NRG; PAM sequence: AAG
aacttctcttttgccctctg

SEQ ID NO: 138211 - DNA, 20 bp, Artificial Sequence
  Description of Artificial Sequence: Synthetic oligonucleotide
  Target: LAMA2; (+) strand; PAM type: NRG; PAM sequence: AGG
acttctcttttgccctctga

SEQ ID NO: 138212 - DNA, 20 bp, Artificial Sequence
  Description of Artificial Sequence: Synthetic oligonucleotide
  Target: LAMA2; (+) strand; PAM type: NRG; PAM sequence: AAG
gctgaaaaatcaactgaaaa

SEQ ID NO: 138213 - DNA, 20 bp, Artificial Sequence
  Description of Artificial Sequence: Synthetic oligonucleotide
  Target: LAMA2; (+) strand; PAM type: NRG; PAM sequence: TAG
aaaaatcaactgaaaaaagt

SEQ ID NO: 138214 - DNA, 20 bp, Artificial Sequence
  Description of Artificial Sequence: Synthetic oligonucleotide
  Target: LAMA2; (+) strand; PAM type: NRG; PAM sequence: TGG
tcaactgaaaaaagttagct

SEQ ID NO: 138215 - DNA, 20 bp, Artificial Sequence
  Description of Artificial Sequence: Synthetic oligonucleotide
  Target: LAMA2; (+) strand; PAM type: NRG; PAM sequence: TAG
actgaaaaaagttagcttgg

SEQ ID NO: 138216 - DNA, 20 bp, Artificial Sequence
  Description of Artificial Sequence: Synthetic oligonucleotide
  Target: LAMA2; (+) strand; PAM type: NRG; PAM sequence: AGG
ctgaaaaaagttagcttggt

SEQ ID NO: 138217 - DNA, 20 bp, Artificial Sequence
  Description of Artificial Sequence: Synthetic oligonucleotide
  Target: LAMA2; (+) strand; PAM type: NRG; PAM sequence: AAG
aaagttagcttggtaggtga

SEQ ID NO: 138218 - DNA, 20 bp, Artificial Sequence
  Description of Artificial Sequence: Synthetic oligonucleotide
  Target: LAMA2; (+) strand; PAM type: NRG; PAM sequence: AGG
aagttagcttggtaggtgaa

SEQ ID NO: 138219 - DNA, 20 bp, Artificial Sequence
  Description of Artificial Sequence: Synthetic oligonucleotide
  Target: LAMA2; (+) strand; PAM type: NRG; PAM sequence: TAG
aaaatgtattttaacatgca

SEQ ID NO: 138220 - DNA, 20 bp, Artificial Sequence
  Description of Artificial Sequence: Synthetic oligonucleotide
  Target: LAMA2; (+) strand; PAM type: NRG; PAM sequence: TGG
gtattttaacatgcatagca

SEQ ID NO: 138221 - DNA, 20 bp, Artificial Sequence
  Description of Artificial Sequence: Synthetic oligonucleotide
  Target: LAMA2; (+) strand; PAM type: NRG; PAM sequence: AAG
ttttaacatgcatagcatgg

SEQ ID NO: 138222 - DNA, 20 bp, Artificial Sequence
  Description of Artificial Sequence: Synthetic oligonucleotide
  Target: LAMA2; (+) strand; PAM type: NRG; PAM sequence: CAG
tgcatagcatggaagaatca

SEQ ID NO: 138223 - DNA, 20 bp, Artificial Sequence
  Description of Artificial Sequence: Synthetic oligonucleotide
  Target: LAMA2; (+) strand; PAM type: NRG; PAM sequence: AGG
gcatagcatggaagaatcac

SEQ ID NO: 138224 - DNA, 20 bp, Artificial Sequence
  Description of Artificial Sequence: Synthetic oligonucleotide
  Target: LAMA2; (+) strand; PAM type: NRG; PAM sequence: GAG
atagcatggaagaatcacag

SEQ ID NO: 138225 - DNA, 20 bp, Artificial Sequence
  Description of Artificial Sequence: Synthetic oligonucleotide
  Target: LAMA2; (+) strand; PAM type: NRG; PAM sequence: AGG
tagcatggaagaatcacagg

SEQ ID NO: 138226 - DNA, 20 bp, Artificial Sequence
  Description of Artificial Sequence: Synthetic oligonucleotide
  Target: LAMA2; (+) strand; PAM type: NRG; PAM sequence: TAG
atgattacccaataacccaa

SEQ ID NO: 138227 - DNA, 20 bp, Artificial Sequence
  Description of Artificial Sequence: Synthetic oligonucleotide
  Target: LAMA2; (+) strand; PAM type: NRG; PAM sequence: AGG
tgattacccaataacccaat

SEQ ID NO: 138228 - DNA, 20 bp, Artificial Sequence
  Description of Artificial Sequence: Synthetic oligonucleotide
  Target: LAMA2; (+) strand; PAM type: NRG; PAM sequence: GAG
attacccaataacccaatag

SEQ ID NO: 138229 - DNA, 20 bp, Artificial Sequence
  Description of Artificial Sequence: Synthetic oligonucleotide
  Target: LAMA2; (+) strand; PAM type: NRG; PAM sequence: TAG
ccaataacccaataggagca

SEQ ID NO: 138230 - DNA, 20 bp, Artificial Sequence
  Description of Artificial Sequence: Synthetic oligonucleotide
  Target: LAMA2; (+) strand; PAM type: NRG; PAM sequence: TAG
acccaataggagcatagatg

SEQ ID NO: 138231 - DNA, 20 bp, Artificial Sequence
  Description of Artificial Sequence: Synthetic oligonucleotide
  Target: LAMA2; (+) strand; PAM type: NRG; PAM sequence: CGG
tgtagatatacccttcttca

SEQ ID NO: 138232 - DNA, 20 bp, Artificial Sequence
  Description of Artificial Sequence: Synthetic oligonucleotide
  Target: LAMA2; (+) strand; PAM type: NRG; PAM sequence: GGG
gtagatatacccttcttcac

SEQ ID NO: 138233 - DNA, 20 bp, Artificial Sequence
  Description of Artificial Sequence: Synthetic oligonucleotide
  Target: LAMA2; (+) strand; PAM type: NRG; PAM sequence: GGG
tagatatacccttcttcacg

SEQ ID NO: 138234 - DNA, 20 bp, Artificial Sequence
  Description of Artificial Sequence: Synthetic oligonucleotide
  Target: LAMA2; (+) strand; PAM type: NRG; PAM sequence: GGG
agatatacccttcttcacgg

SEQ ID NO: 138235 - DNA, 20 bp, Artificial Sequence
  Description of Artificial Sequence: Synthetic oligonucleotide
  Target: LAMA2; (+) strand; PAM type: NRG; PAM sequence: GAG
atatacccttcttcacgggg

SEQ ID NO: 138236 - DNA, 20 bp, Artificial Sequence
  Description of Artificial Sequence: Synthetic oligonucleotide
  Target: LAMA2; (+) strand; PAM type: NRG; PAM sequence: AGG
tatacccttcttcacggggg

SEQ ID NO: 138237 - DNA, 20 bp, Artificial Sequence
  Description of Artificial Sequence: Synthetic oligonucleotide
  Target: LAMA2; (+) strand; PAM type: NRG; PAM sequence: GGG
atacccttcttcacggggga

SEQ ID NO: 138238 - DNA, 20 bp, Artificial Sequence
  Description of Artificial Sequence: Synthetic oligonucleotide
  Target: LAMA2; (+) strand; PAM type: NRG; PAM sequence: AAG
cccttcttcacgggggaggg

SEQ ID NO: 138239 - DNA, 20 bp, Artificial Sequence
  Description of Artificial Sequence: Synthetic oligonucleotide
  Target: LAMA2; (+) strand; PAM type: NRG; PAM sequence: TGG
tcttcacgggggagggaaga

SEQ ID NO: 138240 - DNA, 20 bp, Artificial Sequence
  Description of Artificial Sequence: Synthetic oligonucleotide
  Target: LAMA2; (+) strand; PAM type: NRG; PAM sequence: GGG
cttcacgggggagggaagat

SEQ ID NO: 138241 - DNA, 20 bp, Artificial Sequence
  Description of Artificial Sequence: Synthetic oligonucleotide
  Target: LAMA2; (+) strand; PAM type: NRG; PAM sequence: GGG
ttcacgggggagggaagatg

SEQ ID NO: 138242 - DNA, 20 bp, Artificial Sequence
  Description of Artificial Sequence: Synthetic oligonucleotide
  Target: LAMA2; (+) strand; PAM type: NRG; PAM sequence: TGG
gagggaagatggggaaaata

SEQ ID NO: 138243 - DNA, 20 bp, Artificial Sequence
  Description of Artificial Sequence: Synthetic oligonucleotide
  Target: LAMA2; (+) strand; PAM type: NRG; PAM sequence: TGG
atggggaaaatatggcaatt

SEQ ID NO: 138244 - DNA, 20 bp, Artificial Sequence
  Description of Artificial Sequence: Synthetic oligonucleotide
  Target: LAMA2; (+) strand; PAM type: NRG; PAM sequence: TAG
aaatatggcaatttggaaaa

SEQ ID NO: 138245 - DNA, 20 bp, Artificial Sequence
  Description of Artificial Sequence: Synthetic oligonucleotide
  Target: LAMA2; (+) strand; PAM type: NRG; PAM sequence: TAG
gaaaatagtaaatgattttt

SEQ ID NO: 138246 - DNA, 20 bp, Artificial Sequence
  Description of Artificial Sequence: Synthetic oligonucleotide
  Target: LAMA2; (+) strand; PAM type: NRG; PAM sequence: AGG
aaaatagtaaatgatttttt

SEQ ID NO: 138247 - DNA, 20 bp, Artificial Sequence
  Description of Artificial Sequence: Synthetic oligonucleotide
  Target: LAMA2; (+) strand; PAM type: NRG; PAM sequence: GGG
aaatagtaaatgatttttta

SEQ ID NO: 138248 - DNA, 20 bp, Artificial Sequence
  Description of Artificial Sequence: Synthetic oligonucleotide
  Target: LAMA2; (+) strand; PAM type: NRG; PAM sequence: GGG
aatagtaaatgattttttag

SEQ ID NO: 138249 - DNA, 20 bp, Artificial Sequence
  Description of Artificial Sequence: Synthetic oligonucleotide
  Target: LAMA2; (+) strand; PAM type: NRG; PAM sequence: AAG
atgattttttaggggaattc

SEQ ID NO: 138250 - DNA, 20 bp, Artificial Sequence
  Description of Artificial Sequence: Synthetic oligonucleotide
  Target: LAMA2; (+) strand; PAM type: NRG; PAM sequence: TGG
gggaattcaagaacctacaa

SEQ ID NO: 138251 - DNA, 20 bp, Artificial Sequence
  Description of Artificial Sequence: Synthetic oligonucleotide
  Target: LAMA2; (+) strand; PAM type: NRG; PAM sequence: TGG
ttcaagaacctacaatggcc

SEQ ID NO: 138252 - DNA, 20 bp, Artificial Sequence
  Description of Artificial Sequence: Synthetic oligonucleotide
  Target: LAMA2; (+) strand; PAM type: NRG; PAM sequence: GGG
tcaagaacctacaatggcct

SEQ ID NO: 138253 - DNA, 20 bp, Artificial Sequence
  Description of Artificial Sequence: Synthetic oligonucleotide
  Target: LAMA2; (+) strand; PAM type: NRG; PAM sequence: AAG
acctacaatggcctgggaca

SEQ ID NO: 138254 - DNA, 20 bp, Artificial Sequence
  Description of Artificial Sequence: Synthetic oligonucleotide
  Target: LAMA2; (+) strand; PAM type: NRG; PAM sequence: TGG
tggcctgggacaaagtctgt

SEQ ID NO: 138255 - DNA, 20 bp, Artificial Sequence
  Description of Artificial Sequence: Synthetic oligonucleotide
  Target: LAMA2; (+) strand; PAM type: NRG; PAM sequence: GGG
ggcctgggacaaagtctgtt

SEQ ID NO: 138256 - DNA, 20 bp, Artificial Sequence
  Description of Artificial Sequence: Synthetic oligonucleotide
  Target: LAMA2; (+) strand; PAM type: NRG; PAM sequence: CAG
gacaaagtctgttgggccca

SEQ ID NO: 138257 - DNA, 20 bp, Artificial Sequence
  Description of Artificial Sequence: Synthetic oligonucleotide
  Target: LAMA2; (+) strand; PAM type: NRG; PAM sequence: GAG
caaagtctgttgggcccaca

SEQ ID NO: 138258 - DNA, 20 bp, Artificial Sequence
  Description of Artificial Sequence: Synthetic oligonucleotide
  Target: LAMA2; (+) strand; PAM type: NRG; PAM sequence: CAG
agtctgttgggcccacagag

SEQ ID NO: 138259 - DNA, 20 bp, Artificial Sequence
  Description of Artificial Sequence: Synthetic oligonucleotide
  Target: LAMA2; (+) strand; PAM type: NRG; PAM sequence: TAG
tgttgggcccacagagcaga

SEQ ID NO: 138260 - DNA, 20 bp, Artificial Sequence
  Description of Artificial Sequence: Synthetic oligonucleotide
  Target: LAMA2; (+) strand; PAM type: NRG; PAM sequence: TGG
tgggcccacagagcagatag

SEQ ID NO: 138261 - DNA, 20 bp, Artificial Sequence
  Description of Artificial Sequence: Synthetic oligonucleotide
  Target: LAMA2; (+) strand; PAM type: NRG; PAM sequence: AAG
cagatagtggtttgtaacaa

SEQ ID NO: 138262 - DNA, 20 bp, Artificial Sequence
  Description of Artificial Sequence: Synthetic oligonucleotide
  Target: LAMA2; (+) strand; PAM type: NRG; PAM sequence: CAG
gtttgtaacaaaagtctgtt

SEQ ID NO: 138263 - DNA, 20 bp, Artificial Sequence
  Description of Artificial Sequence: Synthetic oligonucleotide
  Target: LAMA2; (+) strand; PAM type: NRG; PAM sequence: AGG
tttgtaacaaaagtctgttc

SEQ ID NO: 138264 - DNA, 20 bp, Artificial Sequence
  Description of Artificial Sequence: Synthetic oligonucleotide
  Target: LAMA2; (+) strand; PAM type: NRG; PAM sequence: CAG
agtctgttcaggtgtgccga

SEQ ID NO: 138265 - DNA, 20 bp, Artificial Sequence
  Description of Artificial Sequence: Synthetic oligonucleotide
  Target: LAMA2; (+) strand; PAM type: NRG; PAM sequence: CAG
tcaggtgtgccgacagactt

SEQ ID NO: 138266 - DNA, 20 bp, Artificial Sequence
  Description of Artificial Sequence: Synthetic oligonucleotide
  Target: LAMA2; (+) strand; PAM type: NRG; PAM sequence: GAG
agtctctcttcatgtgaaat

SEQ ID NO: 138267 - DNA, 20 bp, Artificial Sequence
  Description of Artificial Sequence: Synthetic oligonucleotide
  Target: LAMA2; (+) strand; PAM type: NRG; PAM sequence: AAG
agttaaattaatgaaaactt

SEQ ID NO: 138268 - DNA, 20 bp, Artificial Sequence
  Description of Artificial Sequence: Synthetic oligonucleotide
  Target: LAMA2; (+) strand; PAM type: NRG; PAM sequence: AAG
aaattaatgaaaacttaagc

SEQ ID NO: 138269 - DNA, 20 bp, Artificial Sequence
  Description of Artificial Sequence: Synthetic oligonucleotide
  Target: LAMA2; (+) strand; PAM type: NRG; PAM sequence: GAG
attaatgaaaacttaagcaa

SEQ ID NO: 138270 - DNA, 20 bp, Artificial Sequence
  Description of Artificial Sequence: Synthetic oligonucleotide
  Target: LAMA2; (+) strand; PAM type: NRG; PAM sequence: AGG
ttaatgaaaacttaagcaag

SEQ ID NO: 138271 - DNA, 20 bp, Artificial Sequence
  Description of Artificial Sequence: Synthetic oligonucleotide
  Target: LAMA2; (+) strand; PAM type: NRG; PAM sequence: GGG
taatgaaaacttaagcaaga

SEQ ID NO: 138272 - DNA, 20 bp, Artificial Sequence
  Description of Artificial Sequence: Synthetic oligonucleotide
  Target: LAMA2; (+) strand; PAM type: NRG; PAM sequence: CAG
gaaaacttaagcaagagggc

SEQ ID NO: 138273 - DNA, 20 bp, Artificial Sequence
  Description of Artificial Sequence: Synthetic oligonucleotide
  Target: LAMA2; (+) strand; PAM type: NRG; PAM sequence: GAG
aaacttaagcaagagggcca

SEQ ID NO: 138274 - DNA, 20 bp, Artificial Sequence
  Description of Artificial Sequence: Synthetic oligonucleotide
  Target: LAMA2; (+) strand; PAM type: NRG; PAM sequence: AGG
aacttaagcaagagggccag

SEQ ID NO: 138275 - DNA, 20 bp, Artificial Sequence
  Description of Artificial Sequence: Synthetic oligonucleotide
  Target: LAMA2; (+) strand; PAM type: NRG; PAM sequence: TGG
ccagaggaaacttttcctcc

SEQ ID NO: 138276 - DNA, 20 bp, Artificial Sequence
  Description of Artificial Sequence: Synthetic oligonucleotide
  Target: LAMA2; (+) strand; PAM type: NRG; PAM sequence: TGG
gaggaaacttttcctcctgg

SEQ ID NO: 138277 - DNA, 20 bp, Artificial Sequence
  Description of Artificial Sequence: Synthetic oligonucleotide
  Target: LAMA2; (+) strand; PAM type: NRG; PAM sequence: GGG
aggaaacttttcctcctggt

SEQ ID NO: 138278 - DNA, 20 bp, Artificial Sequence
  Description of Artificial Sequence: Synthetic oligonucleotide
  Target: LAMA2; (+) strand; PAM type: NRG; PAM sequence: CAG
acttttcctcctggtgggat

SEQ ID NO: 138279 - DNA, 20 bp, Artificial Sequence
  Description of Artificial Sequence: Synthetic oligonucleotide
  Target: LAMA2; (+) strand; PAM type: NRG; PAM sequence: AAG
tcctggtgggatcagactgt

SEQ ID NO: 138280 - DNA, 20 bp, Artificial Sequence
  Description of Artificial Sequence: Synthetic oligonucleotide
  Target: LAMA2; (+) strand; PAM type: NRG; PAM sequence: TAG
tggtgggatcagactgtaag

SEQ ID NO: 138281 - DNA, 20 bp, Artificial Sequence
  Description of Artificial Sequence: Synthetic oligonucleotide
  Target: LAMA2; (+) strand; PAM type: NRG; PAM sequence: CGG
gatcagactgtaagtagata

SEQ ID NO: 138282 - DNA, 20 bp, Artificial Sequence
  Description of Artificial Sequence: Synthetic oligonucleotide
  Target: LAMA2; (+) strand; PAM type: NRG; PAM sequence: GGG
atcagactgtaagtagatac

SEQ ID NO: 138283 - DNA, 20 bp, Artificial Sequence
  Description of Artificial Sequence: Synthetic oligonucleotide
  Target: LAMA2; (+) strand; PAM type: NRG; PAM sequence: GAG
cagactgtaagtagatacgg

SEQ ID NO: 138284 - DNA, 20 bp, Artificial Sequence
  Description of Artificial Sequence: Synthetic oligonucleotide
  Target: LAMA2; (+) strand; PAM type: NRG; PAM sequence: CAG
gtaagtagatacgggagtat

SEQ ID NO: 138285 - DNA, 20 bp, Artificial Sequence
  Description of Artificial Sequence: Synthetic oligonucleotide
  Target: LAMA2; (+) strand; PAM type: NRG; PAM sequence: GAG
aagtagatacgggagtatca

SEQ ID NO: 138286 - DNA, 20 bp, Artificial Sequence
  Description of Artificial Sequence: Synthetic oligonucleotide
  Target: LAMA2; (+) strand; PAM type: NRG; PAM sequence: CAG
tatcagagtaaaacttattt

SEQ ID NO: 138287 - DNA, 20 bp, Artificial Sequence
  Description of Artificial Sequence: Synthetic oligonucleotide
  Target: LAMA2; (+) strand; PAM type: NRG; PAM sequence: TGG
aaacttatttcagcatttgc

SEQ ID NO: 138288 - DNA, 20 bp, Artificial Sequence
  Description of Artificial Sequence: Synthetic oligonucleotide
  Target: LAMA2; (+) strand; PAM type: NRG; PAM sequence: AAG
ttcagcatttgctggtctcc

SEQ ID NO: 138289 - DNA, 20 bp, Artificial Sequence
  Description of Artificial Sequence: Synthetic oligonucleotide
  Target: LAMA2; (+) strand; PAM type: NRG; PAM sequence: GAG
cagcatttgctggtctccaa

SEQ ID NO: 138290 - DNA, 20 bp, Artificial Sequence
  Description of Artificial Sequence: Synthetic oligonucleotide
  Target: LAMA2; (+) strand; PAM type: NRG; PAM sequence: CAG
agcctttaatttaaaataat

SEQ ID NO: 138291 - DNA, 20 bp, Artificial Sequence
  Description of Artificial Sequence: Synthetic oligonucleotide
  Target: LAMA2; (+) strand; PAM type: NRG; PAM sequence: CAG
atttaaaataatcagcatac

SEQ ID NO: 138292 - DNA, 20 bp, Artificial Sequence
  Description of Artificial Sequence: Synthetic oligonucleotide
  Target: LAMA2; (+) strand; PAM type: NRG; PAM sequence: CGG
ataccagcatgctatatttt

SEQ ID NO: 138293 - DNA, 20 bp, Artificial Sequence
  Description of Artificial Sequence: Synthetic oligonucleotide
  Target: LAMA2; (+) strand; PAM type: NRG; PAM sequence: GGG
taccagcatgctatattttc

SEQ ID NO: 138294 - DNA, 20 bp, Artificial Sequence
  Description of Artificial Sequence: Synthetic oligonucleotide
  Target: LAMA2; (+) strand; PAM type: NRG; PAM sequence: TGG
catgctatattttcgggtat

SEQ ID NO: 138295 - DNA, 20 bp, Artificial Sequence
  Description of Artificial Sequence: Synthetic oligonucleotide
  Target: LAMA2; (+) strand; PAM type: NRG; PAM sequence: GAG
attttcgggtattggtttct

SEQ ID NO: 138296 - DNA, 20 bp, Artificial Sequence
  Description of Artificial Sequence: Synthetic oligonucleotide
  Target: LAMA2; (+) strand; PAM type: NRG; PAM sequence: TAG
ttctgagcctcaatatctca

SEQ ID NO: 138297 - DNA, 20 bp, Artificial Sequence
  Description of Artificial Sequence: Synthetic oligonucleotide
  Target: LAMA2; (+) strand; PAM type: NRG; PAM sequence: CAG
atctcatagaatgaatttaa

SEQ ID NO: 138298 - DNA, 20 bp, Artificial Sequence
  Description of Artificial Sequence: Synthetic oligonucleotide
  Target: LAMA2; (+) strand; PAM type: NRG; PAM sequence: CAG
acagcattttatgttaaaac

SEQ ID NO: 138299 - DNA, 20 bp, Artificial Sequence
  Description of Artificial Sequence: Synthetic oligonucleotide
  Target: LAMA2; (+) strand; PAM type: NRG; PAM sequence: TGG
tgttaaaaccagatatatat

SEQ ID NO: 138300 - DNA, 20 bp, Artificial Sequence
  Description of Artificial Sequence: Synthetic oligonucleotide
  Target: LAMA2; (+) strand; PAM type: NRG; PAM sequence: CAG
cttaataataatgaatgtgt

SEQ ID NO: 138301 - DNA, 20 bp, Artificial Sequence
  Description of Artificial Sequence: Synthetic oligonucleotide
  Target: LAMA2; (+) strand; PAM type: NRG; PAM sequence: AAG
aataataatgaatgtgtcag

SEQ ID NO: 138302 - DNA, 20 bp, Artificial Sequence
  Description of Artificial Sequence: Synthetic oligonucleotide
  Target: LAMA2; (+) strand; PAM type: NRG; PAM sequence: AGG
ataataatgaatgtgtcaga

SEQ ID NO: 138303 - DNA, 20 bp, Artificial Sequence
  Description of Artificial Sequence: Synthetic oligonucleotide
  Target: LAMA2; (+) strand; PAM type: NRG; PAM sequence: GGG
taataatgaatgtgtcagaa

SEQ ID NO: 138304 - DNA, 20 bp, Artificial Sequence
  Description of Artificial Sequence: Synthetic oligonucleotide
  Target: LAMA2; (+) strand; PAM type: NRG; PAM sequence: AAG
aatgaatgtgtcagaagggc

SEQ ID NO: 138305 - DNA, 20 bp, Artificial Sequence
  Description of Artificial Sequence: Synthetic oligonucleotide
  Target: LAMA2; (+) strand; PAM type: NRG; PAM sequence: AAG
tgtcagaagggcaagtgttc

SEQ ID NO: 138306 - DNA, 20 bp, Artificial Sequence
  Description of Artificial Sequence: Synthetic oligonucleotide
  Target: LAMA2; (+) strand; PAM type: NRG; PAM sequence: AAG
ttcaagtgtatttcaaccac

SEQ ID NO: 138307 - DNA, 20 bp, Artificial Sequence
  Description of Artificial Sequence: Synthetic oligonucleotide
  Target: LAMA2; (+) strand; PAM type: NRG; PAM sequence: CAG
agtgtatttcaaccacaagt

SEQ ID NO: 138308 - DNA, 20 bp, Artificial Sequence
  Description of Artificial Sequence: Synthetic oligonucleotide
  Target: LAMA2; (+) strand; PAM type: NRG; PAM sequence: AGG
gtgtatttcaaccacaagtc

SEQ ID NO: 138309 - DNA, 20 bp, Artificial Sequence
  Description of Artificial Sequence: Synthetic oligonucleotide
  Target: LAMA2; (+) strand; PAM type: NRG; PAM sequence: AAG
gattttatgtttctgttaac

SEQ ID NO: 138310 - DNA, 20 bp, Artificial Sequence
  Description of Artificial Sequence: Synthetic oligonucleotide
  Target: LAMA2; (+) strand; PAM type: NRG; PAM sequence: AGG
attttatgtttctgttaaca

SEQ ID NO: 138311 - DNA, 20 bp, Artificial Sequence
  Description of Artificial Sequence: Synthetic oligonucleotide
  Target: LAMA2; (+) strand; PAM type: NRG; PAM sequence: TGG
gtttctgttaacaaggttga

SEQ ID NO: 138312 - DNA, 20 bp, Artificial Sequence
  Description of Artificial Sequence: Synthetic oligonucleotide
  Target: LAMA2; (+) strand; PAM type: NRG; PAM sequence: TAG
taacaaggttgatggcatac

SEQ ID NO: 138313 - DNA, 20 bp, Artificial Sequence
  Description of Artificial Sequence: Synthetic oligonucleotide
  Target: LAMA2; (+) strand; PAM type: NRG; PAM sequence: GAG
acaaggttgatggcatacta

SEQ ID NO: 138314 - DNA, 20 bp, Artificial Sequence
  Description of Artificial Sequence: Synthetic oligonucleotide
  Target: LAMA2; (+) strand; PAM type: NRG; PAM sequence: TAG
gcatactagagctgtctcaa

SEQ ID NO: 138315 - DNA, 20 bp, Artificial Sequence
  Description of Artificial Sequence: Synthetic oligonucleotide
  Target: LAMA2; (+) strand; PAM type: NRG; PAM sequence: TAG
actagagctgtctcaatagt

SEQ ID NO: 138316 - DNA, 20 bp, Artificial Sequence
  Description of Artificial Sequence: Synthetic oligonucleotide
  Target: LAMA2; (+) strand; PAM type: NRG; PAM sequence: AAG
tgcttttttgaatgattgac

SEQ ID NO: 138317 - DNA, 20 bp, Artificial Sequence
  Description of Artificial Sequence: Synthetic oligonucleotide
  Target: LAMA2; (+) strand; PAM type: NRG; PAM sequence: TAG
tgaatgattgacaagtcaat

SEQ ID NO: 138318 - DNA, 20 bp, Artificial Sequence
  Description of Artificial Sequence: Synthetic oligonucleotide
  Target: LAMA2; (+) strand; PAM type: NRG; PAM sequence: TAG
atctttacacttaatttctg

SEQ ID NO: 138319 - DNA, 20 bp, Artificial Sequence
  Description of Artificial Sequence: Synthetic oligonucleotide
  Target: LAMA2; (+) strand; PAM type: NRG; PAM sequence: TGG
acctttaaaattgcccattt

SEQ ID NO: 138320 - DNA, 20 bp, Artificial Sequence
  Description of Artificial Sequence: Synthetic oligonucleotide
  Target: LAMA2; (+) strand; PAM type: NRG; PAM sequence: TGG
aaattgcccattttggttaa

SEQ ID NO: 138321 - DNA, 20 bp, Artificial Sequence
  Description of Artificial Sequence: Synthetic oligonucleotide
  Target: LAMA2; (+) strand; PAM type: NRG; PAM sequence: CAG
tgcccattttggttaatggc

SEQ ID NO: 138322 - DNA, 20 bp, Artificial Sequence
  Description of Artificial Sequence: Synthetic oligonucleotide
  Target: LAMA2; (+) strand; PAM type: NRG; PAM sequence: GAG
cccattttggttaatggcca

SEQ ID NO: 138323 - DNA, 20 bp, Artificial Sequence
  Description of Artificial Sequence: Synthetic oligonucleotide
  Target: LAMA2; (+) strand; PAM type: NRG; PAM sequence: CAG
ttaatggccagagtgctgac

SEQ ID NO: 138324 - DNA, 20 bp, Artificial Sequence
  Description of Artificial Sequence: Synthetic oligonucleotide
  Target: LAMA2; (+) strand; PAM type: NRG; PAM sequence: CAG
ctgaccagctcattcccctg

SEQ ID NO: 138325 - DNA, 20 bp, Artificial Sequence
  Description of Artificial Sequence: Synthetic oligonucleotide
  Target: LAMA2; (+) strand; PAM type: NRG; PAM sequence: AAG
agctcattcccctgcagcct

SEQ ID NO: 138326 - DNA, 20 bp, Artificial Sequence
  Description of Artificial Sequence: Synthetic oligonucleotide
  Target: LAMA2; (+) strand; PAM type: NRG; PAM sequence: TGG
acatttcctgctaccttgta

SEQ ID NO: 138327 - DNA, 20 bp, Artificial Sequence
  Description of Artificial Sequence: Synthetic oligonucleotide
  Target: LAMA2; (+) strand; PAM type: NRG; PAM sequence: GAG
gctaccttgtatggtgctat

SEQ ID NO: 138328 - DNA, 20 bp, Artificial Sequence
  Description of Artificial Sequence: Synthetic oligonucleotide
  Target: LAMA2; (+) strand; PAM type: NRG; PAM sequence: CAG
ccttgtatggtgctatgaga

SEQ ID NO: 138329 - DNA, 20 bp, Artificial Sequence
  Description of Artificial Sequence: Synthetic oligonucleotide
  Target: LAMA2; (+) strand; PAM type: NRG; PAM sequence: AAG
ctatgagacagctgtcattg

SEQ ID NO: 138330 - DNA, 20 bp, Artificial Sequence
  Description of Artificial Sequence: Synthetic oligonucleotide
  Target: LAMA2; (+) strand; PAM type: NRG; PAM sequence: GAG
gtcattgaagaaattctgtt

SEQ ID NO: 138331 - DNA, 20 bp, Artificial Sequence
  Description of Artificial Sequence: Synthetic oligonucleotide
  Target: LAMA2; (+) strand; PAM type: NRG; PAM sequence: TGG
aatgtttgatattcacatga

SEQ ID NO: 138332 - DNA, 20 bp, Artificial Sequence
  Description of Artificial Sequence: Synthetic oligonucleotide
  Target: LAMA2; (+) strand; PAM type: NRG; PAM sequence: AAG
aaccatttttttttacttta

SEQ ID NO: 138333 - DNA, 20 bp, Artificial Sequence
  Description of Artificial Sequence: Synthetic oligonucleotide
  Target: LAMA2; (+) strand; PAM type: NRG; PAM sequence: AAG
ttttttttactttaaagaaa

SEQ ID NO: 138334 - DNA, 20 bp, Artificial Sequence
  Description of Artificial Sequence: Synthetic oligonucleotide
  Target: LAMA2; (+) strand; PAM type: NRG; PAM sequence: TAG
ttaaagaaaaagctataaac

SEQ ID NO: 138335 - DNA, 20 bp, Artificial Sequence
  Description of Artificial Sequence: Synthetic oligonucleotide
  Target: LAMA2; (+) strand; PAM type: NRG; PAM sequence: TAG
atatgatgctgctaactcaa

SEQ ID NO: 138336 - DNA, 20 bp, Artificial Sequence
  Description of Artificial Sequence: Synthetic oligonucleotide
  Target: LAMA2; (+) strand; PAM type: NRG; PAM sequence: GAG
atgatgctgctaactcaata

SEQ ID NO: 138337 - DNA, 20 bp, Artificial Sequence
  Description of Artificial Sequence: Synthetic oligonucleotide
  Target: LAMA2; (+) strand; PAM type: NRG; PAM sequence: GAG
gatgctgctaactcaataga

SEQ ID NO: 138338 - DNA, 20 bp, Artificial Sequence
  Description of Artificial Sequence: Synthetic oligonucleotide
  Target: LAMA2; (+) strand; PAM type: NRG; PAM sequence: TGG
ccgattacaaatgctattga

SEQ ID NO: 138339 - DNA, 20 bp, Artificial Sequence
  Description of Artificial Sequence: Synthetic oligonucleotide
  Target: LAMA2; (+) strand; PAM type: NRG; PAM sequence: AAG
ttacaaatgctattgatgga

SEQ ID NO: 138340 - DNA, 20 bp, Artificial Sequence
  Description of Artificial Sequence: Synthetic oligonucleotide
  Target: LAMA2; (+) strand; PAM type: NRG; PAM sequence: TGG
ctattgatggaaagaacact

SEQ ID NO: 138341 - DNA, 20 bp, Artificial Sequence
  Description of Artificial Sequence: Synthetic oligonucleotide
  Target: LAMA2; (+) strand; PAM type: NRG; PAM sequence: TGG
ttgatggaaagaacacttgg

SEQ ID NO: 138342 - DNA, 20 bp, Artificial Sequence
  Description of Artificial Sequence: Synthetic oligonucleotide
  Target: LAMA2; (+) strand; PAM type: NRG; PAM sequence: CAG
atggaaagaacacttggtgg

SEQ ID NO: 138343 - DNA, 20 bp, Artificial Sequence
  Description of Artificial Sequence: Synthetic oligonucleotide
  Target: LAMA2; (+) strand; PAM type: NRG; PAM sequence: GAG
ggaaagaacacttggtggca

SEQ ID NO: 138344 - DNA, 20 bp, Artificial Sequence
  Description of Artificial Sequence: Synthetic oligonucleotide
  Target: LAMA2; (+) strand; PAM type: NRG; PAM sequence: CAG
aacacttggtggcagagtcc

SEQ ID NO: 138345 - DNA, 20 bp, Artificial Sequence
  Description of Artificial Sequence: Synthetic oligonucleotide
  Target: LAMA2; (+) strand; PAM type: NRG; PAM sequence: AAG
ggtggcagagtcccagtatt

SEQ ID NO: 138346 - DNA, 20 bp, Artificial Sequence
  Description of Artificial Sequence: Synthetic oligonucleotide
  Target: LAMA2; (+) strand; PAM type: NRG; PAM sequence: TGG
cagagtcccagtattaagaa

SEQ ID NO: 138347 - DNA, 20 bp, Artificial Sequence
  Description of Artificial Sequence: Synthetic oligonucleotide
  Target: LAMA2; (+) strand; PAM type: NRG; PAM sequence: TGG
ccattatgtgacaattaccc

SEQ ID NO: 138348 - DNA, 20 bp, Artificial Sequence
  Description of Artificial Sequence: Synthetic oligonucleotide
  Target: LAMA2; (+) strand; PAM type: NRG; PAM sequence: CAG
tgacaattaccctggattta

SEQ ID NO: 138349 - DNA, 20 bp, Artificial Sequence
  Description of Artificial Sequence: Synthetic oligonucleotide
  Target: LAMA2; (+) strand; PAM type: NRG; PAM sequence: CAG
caattaccctggatttacag

SEQ ID NO: 138350 - DNA, 20 bp, Artificial Sequence
  Description of Artificial Sequence: Synthetic oligonucleotide
  Target: LAMA2; (+) strand; PAM type: NRG; PAM sequence: AGG
aattaccctggatttacagc

SEQ ID NO: 138351 - DNA, 20 bp, Artificial Sequence
  Description of Artificial Sequence: Synthetic oligonucleotide
  Target: LAMA2; (+) strand; PAM type: NRG; PAM sequence: TAG
ccctggatttacagcaggta

SEQ ID NO: 138352 - DNA, 20 bp, Artificial Sequence
  Description of Artificial Sequence: Synthetic oligonucleotide
  Target: LAMA2; (+) strand; PAM type: NRG; PAM sequence: TAG
ttttacatttgctatttgtt

SEQ ID NO: 138353 - DNA, 20 bp, Artificial Sequence
  Description of Artificial Sequence: Synthetic oligonucleotide
  Target: LAMA2; (+) strand; PAM type: NRG; PAM sequence: TAG
acatttgctatttgtttagt

SEQ ID NO: 138354 - DNA, 20 bp, Artificial Sequence
  Description of Artificial Sequence: Synthetic oligonucleotide
  Target: LAMA2; (+) strand; PAM type: NRG; PAM sequence: TGG
tttgctatttgtttagttag

SEQ ID NO: 138355 - DNA, 20 bp, Artificial Sequence
  Description of Artificial Sequence: Synthetic oligonucleotide
  Target: LAMA2; (+) strand; PAM type: NRG; PAM sequence: TGG
tttgtttagttagtggtttg

SEQ ID NO: 138356 - DNA, 20 bp, Artificial Sequence
  Description of Artificial Sequence: Synthetic oligonucleotide
  Target: LAMA2; (+) strand; PAM type: NRG; PAM sequence: GGG
ttgtttagttagtggtttgt

SEQ ID NO: 138357 - DNA, 20 bp, Artificial Sequence
  Description of Artificial Sequence: Synthetic oligonucleotide
  Target: LAMA2; (+) strand; PAM type: NRG; PAM sequence: AAG
agttagtggtttgtgggtga

SEQ ID NO: 138358 - DNA, 20 bp, Artificial Sequence
  Description of Artificial Sequence: Synthetic oligonucleotide
  Target: LAMA2; (+) strand; PAM type: NRG; PAM sequence: AGG
gttagtggtttgtgggtgaa

SEQ ID NO: 138359 - DNA, 20 bp, Artificial Sequence
  Description of Artificial Sequence: Synthetic oligonucleotide
  Target: LAMA2; (+) strand; PAM type: NRG; PAM sequence: AAG
ctctccattgttttcttgat

SEQ ID NO: 138360 - DNA, 20 bp, Artificial Sequence
  Description of Artificial Sequence: Synthetic oligonucleotide
  Target: LAMA2; (+) strand; PAM type: NRG; PAM sequence: AAG
ttttcttgataagatgaaca

SEQ ID NO: 138361 - DNA, 20 bp, Artificial Sequence
  Description of Artificial Sequence: Synthetic oligonucleotide
  Target: LAMA2; (+) strand; PAM type: NRG; PAM sequence: AGG
tttcttgataagatgaacaa

SEQ ID NO: 138362 - DNA, 20 bp, Artificial Sequence
  Description of Artificial Sequence: Synthetic oligonucleotide
  Target: LAMA2; (+) strand; PAM type: NRG; PAM sequence: GGG
ttcttgataagatgaacaaa

SEQ ID NO: 138363 - DNA, 20 bp, Artificial Sequence
  Description of Artificial Sequence: Synthetic oligonucleotide
  Target: LAMA2; (+) strand; PAM type: NRG; PAM sequence: TAG
aacaaagggtcctattcata

SEQ ID NO: 138364 - DNA, 20 bp, Artificial Sequence
  Description of Artificial Sequence: Synthetic oligonucleotide
  Target: LAMA2; (+) strand; PAM type: NRG; PAM sequence: GAG
tatagcgtattgttatttac

SEQ ID NO: 138365 - DNA, 20 bp, Artificial Sequence
  Description of Artificial Sequence: Synthetic oligonucleotide
  Target: LAMA2; (+) strand; PAM type: NRG; PAM sequence: CAG
tattgttatttacgagtatt

SEQ ID NO: 138366 - DNA, 20 bp, Artificial Sequence
  Description of Artificial Sequence: Synthetic oligonucleotide
  Target: LAMA2; (+) strand; PAM type: NRG; PAM sequence: AAG
gtattcagcatttaattata

SEQ ID NO: 138367 - DNA, 20 bp, Artificial Sequence
  Description of Artificial Sequence: Synthetic oligonucleotide
  Target: LAMA2; (+) strand; PAM type: NRG; PAM sequence: TGG
attataaagcacaattcaaa

SEQ ID NO: 138368 - DNA, 20 bp, Artificial Sequence
  Description of Artificial Sequence: Synthetic oligonucleotide
  Target: LAMA2; (+) strand; PAM type: NRG; PAM sequence: AAG
ataaagcacaattcaaatgg

SEQ ID NO: 138369 - DNA, 20 bp, Artificial Sequence
  Description of Artificial Sequence: Synthetic oligonucleotide
  Target: LAMA2; (+) strand; PAM type: NRG; PAM sequence: AAG
aattcaaatggaagcacgtg

SEQ ID NO: 138370 - DNA, 20 bp, Artificial Sequence
  Description of Artificial Sequence: Synthetic oligonucleotide
  Target: LAMA2; (+) strand; PAM type: NRG; PAM sequence: GAG
ttcaaatggaagcacgtgaa

SEQ ID NO: 138371 - DNA, 20 bp, Artificial Sequence
  Description of Artificial Sequence: Synthetic oligonucleotide
  Target: LAMA2; (+) strand; PAM type: NRG; PAM sequence: TAG
atggaagcacgtgaagagct

SEQ ID NO: 138372 - DNA, 20 bp, Artificial Sequence
  Description of Artificial Sequence: Synthetic oligonucleotide
  Target: LAMA2; (+) strand; PAM type: NRG; PAM sequence: TAG
tgaagagcttagaaatgaat

SEQ ID NO: 138373 - DNA, 20 bp, Artificial Sequence
  Description of Artificial Sequence: Synthetic oligonucleotide
  Target: LAMA2; (+) strand; PAM type: NRG; PAM sequence: AGG
gaagagcttagaaatgaatt

SEQ ID NO: 138374 - DNA, 20 bp, Artificial Sequence
  Description of Artificial Sequence: Synthetic oligonucleotide
  Target: LAMA2; (+) strand; PAM type: NRG; PAM sequence: TAG
attaggtgctaactctgttt

SEQ ID NO: 138375 - DNA, 20 bp, Artificial Sequence
  Description of Artificial Sequence: Synthetic oligonucleotide
  Target: LAMA2; (+) strand; PAM type: NRG; PAM sequence: TAG
ggtgctaactctgttttagc

SEQ ID NO: 138376 - DNA, 20 bp, Artificial Sequence
  Description of Artificial Sequence: Synthetic oligonucleotide
  Target: LAMA2; (+) strand; PAM type: NRG; PAM sequence: TGG
ctaactctgttttagctagc

SEQ ID NO: 138377 - DNA, 20 bp, Artificial Sequence
  Description of Artificial Sequence: Synthetic oligonucleotide
  Target: LAMA2; (+) strand; PAM type: NRG; PAM sequence: TGG
tggacttaatgatgaaaata

SEQ ID NO: 138378 - DNA, 20 bp, Artificial Sequence
  Description of Artificial Sequence: Synthetic oligonucleotide
  Target: LAMA2; (+) strand; PAM type: NRG; PAM sequence: TAG
tttacataacaaaaatataa

SEQ ID NO: 138379 - DNA, 20 bp, Artificial Sequence
  Description of Artificial Sequence: Synthetic oligonucleotide
  Target: LAMA2; (+) strand; PAM type: NRG; PAM sequence: TGG
cattgctcccactgtgctga

SEQ ID NO: 138380 - DNA, 20 bp, Artificial Sequence
  Description of Artificial Sequence: Synthetic oligonucleotide
  Target: LAMA2; (+) strand; PAM type: NRG; PAM sequence: AAG
gctgatggtgtgtgcactta

SEQ ID NO: 138381 - DNA, 20 bp, Artificial Sequence
  Description of Artificial Sequence: Synthetic oligonucleotide
  Target: LAMA2; (+) strand; PAM type: NRG; PAM sequence: AGG
ctgatggtgtgtgcacttaa

SEQ ID NO: 138382 - DNA, 20 bp, Artificial Sequence
  Description of Artificial Sequence: Synthetic oligonucleotide
  Target: LAMA2; (+) strand; PAM type: NRG; PAM sequence: TGG
tgtgtgcacttaaaggttct

SEQ ID NO: 138383 - DNA, 20 bp, Artificial Sequence
  Description of Artificial Sequence: Synthetic oligonucleotide
  Target: LAMA2; (+) strand; PAM type: NRG; PAM sequence: AAG
cttaaaggttcttggataac

SEQ ID NO: 138384 - DNA, 20 bp, Artificial Sequence
  Description of Artificial Sequence: Synthetic oligonucleotide
  Target: LAMA2; (+) strand; PAM type: NRG; PAM sequence: AGG
ttaaaggttcttggataaca

SEQ ID NO: 138385 - DNA, 20 bp, Artificial Sequence
  Description of Artificial Sequence: Synthetic oligonucleotide
  Target: LAMA2; (+) strand; PAM type: NRG; PAM sequence: GAG
tcttggataacaaggctctt

SEQ ID NO: 138386 - DNA, 20 bp, Artificial Sequence
  Description of Artificial Sequence: Synthetic oligonucleotide
  Target: LAMA2; (+) strand; PAM type: NRG; PAM sequence: GAG
gcaaattgcctctcattact

SEQ ID NO: 138387 - DNA, 20 bp, Artificial Sequence
  Description of Artificial Sequence: Synthetic oligonucleotide
  Target: LAMA2; (+) strand; PAM type: NRG; PAM sequence: GAG
aaattgcctctcattactga

SEQ ID NO: 138388 - DNA, 20 bp, Artificial Sequence
  Description of Artificial Sequence: Synthetic oligonucleotide
  Target: LAMA2; (+) strand; PAM type: NRG; PAM sequence: GAG
gcctctcattactgagagct

SEQ ID NO: 138389 - DNA, 20 bp, Artificial Sequence
  Description of Artificial Sequence: Synthetic oligonucleotide
  Target: LAMA2; (+) strand; PAM type: NRG; PAM sequence: AAG
ctcattactgagagctgaga

SEQ ID NO: 138390 - DNA, 20 bp, Artificial Sequence
  Description of Artificial Sequence: Synthetic oligonucleotide
  Target: LAMA2; (+) strand; PAM type: NRG; PAM sequence: CAG
gagagctgagaaagttttga

SEQ ID NO: 138391 - DNA, 20 bp, Artificial Sequence
  Description of Artificial Sequence: Synthetic oligonucleotide
  Target: LAMA2; (+) strand; PAM type: NRG; PAM sequence: AAG
aagttttgacagttgctttc

SEQ ID NO: 138392 - DNA, 20 bp, Artificial Sequence
  Description of Artificial Sequence: Synthetic oligonucleotide
  Target: LAMA2; (+) strand; PAM type: NRG; PAM sequence: TGG
agttgctttcaagttaaact

SEQ ID NO: 138393 - DNA, 20 bp, Artificial Sequence
  Description of Artificial Sequence: Synthetic oligonucleotide
  Target: LAMA2; (+) strand; PAM type: NRG; PAM sequence: GGG
gttgctttcaagttaaactt

SEQ ID NO: 138394 - DNA, 20 bp, Artificial Sequence
  Description of Artificial Sequence: Synthetic oligonucleotide
  Target: LAMA2; (+) strand; PAM type: NRG; PAM sequence: AAG
taaacttgggtgactaaatg

SEQ ID NO: 138395 - DNA, 20 bp, Artificial Sequence
  Description of Artificial Sequence: Synthetic oligonucleotide
  Target: LAMA2; (+) strand; PAM type: NRG; PAM sequence: AAG
gggtgactaaatgaagtaac

SEQ ID NO: 138396 - DNA, 20 bp, Artificial Sequence
  Description of Artificial Sequence: Synthetic oligonucleotide
  Target: LAMA2; (+) strand; PAM type: NRG; PAM sequence: TAG
aaatgaagtaacaagctttg

SEQ ID NO: 138397 - DNA, 20 bp, Artificial Sequence
  Description of Artificial Sequence: Synthetic oligonucleotide
  Target: LAMA2; (+) strand; PAM type: NRG; PAM sequence: CGG
tagttatacaaaattgatgc

SEQ ID NO: 138398 - DNA, 20 bp, Artificial Sequence
  Description of Artificial Sequence: Synthetic oligonucleotide
  Target: LAMA2; (+) strand; PAM type: NRG; PAM sequence: AAG
ttatacaaaattgatgccgg

SEQ ID NO: 138399 - DNA, 20 bp, Artificial Sequence
  Description of Artificial Sequence: Synthetic oligonucleotide
  Target: LAMA2; (+) strand; PAM type: NRG; PAM sequence: AAG
attgatgccggaagttgttc

SEQ ID NO: 138400 - DNA, 20 bp, Artificial Sequence
  Description of Artificial Sequence: Synthetic oligonucleotide
  Target: LAMA2; (+) strand; PAM type: NRG; PAM sequence: TAG
ttgttcaagtttgtcttgca

SEQ ID NO: 138401 - DNA, 20 bp, Artificial Sequence
  Description of Artificial Sequence: Synthetic oligonucleotide
  Target: LAMA2; (+) strand; PAM type: NRG; PAM sequence: AGG
tgttcaagtttgtcttgcat

SEQ ID NO: 138402 - DNA, 20 bp, Artificial Sequence
  Description of Artificial Sequence: Synthetic oligonucleotide
  Target: LAMA2; (+) strand; PAM type: NRG; PAM sequence: TGG
aagtttgtcttgcataggcc

SEQ ID NO: 138403 - DNA, 20 bp, Artificial Sequence
  Description of Artificial Sequence: Synthetic oligonucleotide
  Target: LAMA2; (+) strand; PAM type: NRG; PAM sequence: GGG
agtttgtcttgcataggcct

SEQ ID NO: 138404 - DNA, 20 bp, Artificial Sequence
  Description of Artificial Sequence: Synthetic oligonucleotide
  Target: LAMA2; (+) strand; PAM type: NRG; PAM sequence: CAG
ttccttctcttcacaatatt

SEQ ID NO: 138405 - DNA, 20 bp, Artificial Sequence
  Description of Artificial Sequence: Synthetic oligonucleotide
  Target: LAMA2; (+) strand; PAM type: NRG; PAM sequence: AGG
tccttctcttcacaatattc

SEQ ID NO: 138406 - DNA, 20 bp, Artificial Sequence
  Description of Artificial Sequence: Synthetic oligonucleotide
  Target: LAMA2; (+) strand; PAM type: NRG; PAM sequence: CAG
tctcttcacaatattcaggt

SEQ ID NO: 138407 - DNA, 20 bp, Artificial Sequence
  Description of Artificial Sequence: Synthetic oligonucleotide
  Target: LAMA2; (+) strand; PAM type: NRG; PAM sequence: AGG
ctcttcacaatattcaggtc

SEQ ID NO: 138408 - DNA, 20 bp, Artificial Sequence
  Description of Artificial Sequence: Synthetic oligonucleotide
  Target: LAMA2; (+) strand; PAM type: NRG; PAM sequence: AAG
acaatattcaggtcaggctg

SEQ ID NO: 138409 - DNA, 20 bp, Artificial Sequence
  Description of Artificial Sequence: Synthetic oligonucleotide
  Target: LAMA2; (+) strand; PAM type: NRG; PAM sequence: CAG
gtcaggctgaagttattaat

SEQ ID NO: 138410 - DNA, 20 bp, Artificial Sequence
  Description of Artificial Sequence: Synthetic oligonucleotide
  Target: LAMA2; (+) strand; PAM type: NRG; PAM sequence: AGG
tcaggctgaagttattaatc

SEQ ID NO: 138411 - DNA, 20 bp, Artificial Sequence
  Description of Artificial Sequence: Synthetic oligonucleotide
  Target: LAMA2; (+) strand; PAM type: NRG; PAM sequence: CAG
agttattaatcaggaatcgc

SEQ ID NO: 138412 - DNA, 20 bp, Artificial Sequence
  Description of Artificial Sequence: Synthetic oligonucleotide
  Target: LAMA2; (+) strand; PAM type: NRG; PAM sequence: TAG
cgccagcacctcaaattatt

SEQ ID NO: 138413 - DNA, 20 bp, Artificial Sequence
  Description of Artificial Sequence: Synthetic oligonucleotide
  Target: LAMA2; (+) strand; PAM type: NRG; PAM sequence: AGG
gccagcacctcaaattattt

SEQ ID NO: 138414 - DNA, 20 bp, Artificial Sequence
  Description of Artificial Sequence: Synthetic oligonucleotide
  Target: LAMA2; (+) strand; PAM type: NRG; PAM sequence: TAG
aaattatttaggcttgcaat

SEQ ID NO: 138415 - DNA, 20 bp, Artificial Sequence
  Description of Artificial Sequence: Synthetic oligonucleotide
  Target: LAMA2; (+) strand; PAM type: NRG; PAM sequence: AGG
aattatttaggcttgcaatt

SEQ ID NO: 138416 - DNA, 20 bp, Artificial Sequence
  Description of Artificial Sequence: Synthetic oligonucleotide
  Target: LAMA2; (+) strand; PAM type: NRG; PAM sequence: TGG
atttaggcttgcaattagga

SEQ ID NO: 138417 - DNA, 20 bp, Artificial Sequence
  Description of Artificial Sequence: Synthetic oligonucleotide
  Target: LAMA2; (+) strand; PAM type: NRG; PAM sequence: AAG
aggcttgcaattaggatgga

SEQ ID NO: 138418 - DNA, 20 bp, Artificial Sequence
  Description of Artificial Sequence: Synthetic oligonucleotide
  Target: LAMA2; (+) strand; PAM type: NRG; PAM sequence: TGG
cttgcaattaggatggaaag

SEQ ID NO: 138419 - DNA, 20 bp, Artificial Sequence
  Description of Artificial Sequence: Synthetic oligonucleotide
  Target: LAMA2; (+) strand; PAM type: NRG; PAM sequence: CAG
ttgtatgcctaaataatgtg

SEQ ID NO: 138420 - DNA, 20 bp, Artificial Sequence
  Description of Artificial Sequence: Synthetic oligonucleotide
  Target: LAMA2; (+) strand; PAM type: NRG; PAM sequence: AGG
tgtatgcctaaataatgtgc

SEQ ID NO: 138421 - DNA, 20 bp, Artificial Sequence
  Description of Artificial Sequence: Synthetic oligonucleotide
  Target: LAMA2; (+) strand; PAM type: NRG; PAM sequence: GGG
gtatgcctaaataatgtgca

SEQ ID NO: 138422 - DNA, 20 bp, Artificial Sequence
  Description of Artificial Sequence: Synthetic oligonucleotide
  Target: LAMA2; (+) strand; PAM type: NRG; PAM sequence: GGG
tatgcctaaataatgtgcag

SEQ ID NO: 138423 - DNA, 20 bp, Artificial Sequence
  Description of Artificial Sequence: Synthetic oligonucleotide
  Target: LAMA2; (+) strand; PAM type: NRG; PAM sequence: TGG
taaataatgtgcaggggtga

SEQ ID NO: 138424 - DNA, 20 bp, Artificial Sequence
  Description of Artificial Sequence: Synthetic oligonucleotide
  Target: LAMA2; (+) strand; PAM type: NRG; PAM sequence: CAG
taatgtgcaggggtgatggt

SEQ ID NO: 138425 - DNA, 20 bp, Artificial Sequence
  Description of Artificial Sequence: Synthetic oligonucleotide
  Target: LAMA2; (+) strand; PAM type: NRG; PAM sequence: AGG
aatgtgcaggggtgatggtc

SEQ ID NO: 138426 - DNA, 20 bp, Artificial Sequence
  Description of Artificial Sequence: Synthetic oligonucleotide
  Target: LAMA2; (+) strand; PAM type: NRG; PAM sequence: TAG
tgcaggggtgatggtcagga

SEQ ID NO: 138427 - DNA, 20 bp, Artificial Sequence
  Description of Artificial Sequence: Synthetic oligonucleotide
  Target: LAMA2; (+) strand; PAM type: NRG; PAM sequence: CAG
atggtcaggatagttaatga

SEQ ID NO: 138428 - DNA, 20 bp, Artificial Sequence
  Description of Artificial Sequence: Synthetic oligonucleotide
  Target: LAMA2; (+) strand; PAM type: NRG; PAM sequence: AAG
gacagacaccatacactgta

SEQ ID NO: 138429 - DNA, 20 bp, Artificial Sequence
  Description of Artificial Sequence: Synthetic oligonucleotide
  Target: LAMA2; (+) strand; PAM type: NRG; PAM sequence: AGG
acagacaccatacactgtaa

SEQ ID NO: 138430 - DNA, 20 bp, Artificial Sequence
  Description of Artificial Sequence: Synthetic oligonucleotide
  Target: LAMA2; (+) strand; PAM type: NRG; PAM sequence: TGG
accatacactgtaaaggtca

SEQ ID NO: 138431 - DNA, 20 bp, Artificial Sequence
  Description of Artificial Sequence: Synthetic oligonucleotide
  Target: LAMA2; (+) strand; PAM type: NRG; PAM sequence: AAG
gtaaaggtcatggtttttat

SEQ ID NO: 138432 - DNA, 20 bp, Artificial Sequence
  Description of Artificial Sequence: Synthetic oligonucleotide
  Target: LAMA2; (+) strand; PAM type: NRG; PAM sequence: TGG
ttttataagttatcactgtg

SEQ ID NO: 138433 - DNA, 20 bp, Artificial Sequence
  Description of Artificial Sequence: Synthetic oligonucleotide
  Target: LAMA2; (+) strand; PAM type: NRG; PAM sequence: GGG
tttataagttatcactgtgt

SEQ ID NO: 138434 - DNA, 20 bp, Artificial Sequence
  Description of Artificial Sequence: Synthetic oligonucleotide
  Target: LAMA2; (+) strand; PAM type: NRG; PAM sequence: GGG
ttataagttatcactgtgtg

SEQ ID NO: 138435 - DNA, 20 bp, Artificial Sequence
  Description of Artificial Sequence: Synthetic oligonucleotide
  Target: LAMA2; (+) strand; PAM type: NRG; PAM sequence: AAG
taagttatcactgtgtgggg

SEQ ID NO: 138436 - DNA, 20 bp, Artificial Sequence
  Description of Artificial Sequence: Synthetic oligonucleotide
  Target: LAMA2; (+) strand; PAM type: NRG; PAM sequence: CAG
tcactgtgtggggaagcccc

SEQ ID NO: 138437 - DNA, 20 bp, Artificial Sequence
  Description of Artificial Sequence: Synthetic oligonucleotide
  Target: LAMA2; (+) strand; PAM type: NRG; PAM sequence: CAG
tgtgtggggaagcccccagc

SEQ ID NO: 138438 - DNA, 20 bp, Artificial Sequence
  Description of Artificial Sequence: Synthetic oligonucleotide
  Target: LAMA2; (+) strand; PAM type: NRG; PAM sequence: TGG
gtggggaagcccccagccag

SEQ ID NO: 138439 - DNA, 20 bp, Artificial Sequence
  Description of Artificial Sequence: Synthetic oligonucleotide
  Target: LAMA2; (+) strand; PAM type: NRG; PAM sequence: GGG
tggggaagcccccagccagt

SEQ ID NO: 138440 - DNA, 20 bp, Artificial Sequence
  Description of Artificial Sequence: Synthetic oligonucleotide
  Target: LAMA2; (+) strand; PAM type: NRG; PAM sequence: CAG
gaagcccccagccagtgggc

SEQ ID NO: 138441 - DNA, 20 bp, Artificial Sequence
  Description of Artificial Sequence: Synthetic oligonucleotide
  Target: LAMA2; (+) strand; PAM type: NRG; PAM sequence: CAG
ccccagccagtgggccagat

SEQ ID NO: 138442 - DNA, 20 bp, Artificial Sequence
  Description of Artificial Sequence: Synthetic oligonucleotide
  Target: LAMA2; (+) strand; PAM type: NRG; PAM sequence: AAG
ccagtgggccagatcagcac

SEQ ID NO: 138443 - DNA, 20 bp, Artificial Sequence
  Description of Artificial Sequence: Synthetic oligonucleotide
  Target: LAMA2; (+) strand; PAM type: NRG; PAM sequence: TGG
agcacaagacattttcctaa

SEQ ID NO: 138444 - DNA, 20 bp, Artificial Sequence
  Description of Artificial Sequence: Synthetic oligonucleotide
  Target: LAMA2; (+) strand; PAM type: NRG; PAM sequence: CAG
taatggatgccatttgccac

SEQ ID NO: 138445 - DNA, 20 bp, Artificial Sequence
  Description of Artificial Sequence: Synthetic oligonucleotide
  Target: LAMA2; (+) strand; PAM type: NRG; PAM sequence: GAG
atgccatttgccaccagcat

SEQ ID NO: 138446 - DNA, 20 bp, Artificial Sequence
  Description of Artificial Sequence: Synthetic oligonucleotide
  Target: LAMA2; (+) strand; PAM type: NRG; PAM sequence: CAG
tgagtacaatctccctcctc

SEQ ID NO: 138447 - DNA, 20 bp, Artificial Sequence
  Description of Artificial Sequence: Synthetic oligonucleotide
  Target: LAMA2; (+) strand; PAM type: NRG; PAM sequence: TAG
aatctccctcctccagtgtc

SEQ ID NO: 138448 - DNA, 20 bp, Artificial Sequence
  Description of Artificial Sequence: Synthetic oligonucleotide
  Target: LAMA2; (+) strand; PAM type: NRG; PAM sequence: AGG
atctccctcctccagtgtct

SEQ ID NO: 138449 - DNA, 20 bp, Artificial Sequence
  Description of Artificial Sequence: Synthetic oligonucleotide
  Target: LAMA2; (+) strand; PAM type: NRG; PAM sequence: TGG
tccagtgtctaggttcattt

SEQ ID NO: 138450 - DNA, 20 bp, Artificial Sequence
  Description of Artificial Sequence: Synthetic oligonucleotide
  Target: LAMA2; (+) strand; PAM type: NRG; PAM sequence: GAG
gtgtctaggttcattttggt

SEQ ID NO: 138451 - DNA, 20 bp, Artificial Sequence
  Description of Artificial Sequence: Synthetic oligonucleotide
  Target: LAMA2; (+) strand; PAM type: NRG; PAM sequence: AGG
tgtctaggttcattttggtg

SEQ ID NO: 138452 - DNA, 20 bp, Artificial Sequence
  Description of Artificial Sequence: Synthetic oligonucleotide
  Target: LAMA2; (+) strand; PAM type: NRG; PAM sequence: GGG
gtctaggttcattttggtga

SEQ ID NO: 138453 - DNA, 20 bp, Artificial Sequence
  Description of Artificial Sequence: Synthetic oligonucleotide
  Target: LAMA2; (+) strand; PAM type: NRG; PAM sequence: AAG
ggtgagggctgcatatattc

SEQ ID NO: 138454 - DNA, 20 bp, Artificial Sequence
  Description of Artificial Sequence: Synthetic oligonucleotide
  Target: LAMA2; (+) strand; PAM type: NRG; PAM sequence: GAG
tgagggctgcatatattcaa

SEQ ID NO: 138455 - DNA, 20 bp, Artificial Sequence
  Description of Artificial Sequence: Synthetic oligonucleotide
  Target: LAMA2; (+) strand; PAM type: NRG; PAM sequence: CAG
ctgcatatattcaagagcca

SEQ ID NO: 138456 - DNA, 20 bp, Artificial Sequence
  Description of Artificial Sequence: Synthetic oligonucleotide
  Target: LAMA2; (+) strand; PAM type: NRG; PAM sequence: AAG
atatattcaagagccacaga

SEQ ID NO: 138457 - DNA, 20 bp, Artificial Sequence
  Description of Artificial Sequence: Synthetic oligonucleotide
  Target: LAMA2; (+) strand; PAM type: NRG; PAM sequence: TGG
attcaagagccacagaaagc

SEQ ID NO: 138458 - DNA, 20 bp, Artificial Sequence
  Description of Artificial Sequence: Synthetic oligonucleotide
  Target: LAMA2; (+) strand; PAM type: NRG; PAM sequence: TGG
aagagccacagaaagctggc

SEQ ID NO: 138459 - DNA, 20 bp, Artificial Sequence
  Description of Artificial Sequence: Synthetic oligonucleotide
  Target: LAMA2; (+) strand; PAM type: NRG; PAM sequence: GAG
gagccacagaaagctggctg

SEQ ID NO: 138460 - DNA, 20 bp, Artificial Sequence
  Description of Artificial Sequence: Synthetic oligonucleotide
  Target: LAMA2; (+) strand; PAM type: NRG; PAM sequence: AAG
gaaagctggctggagcaaac

SEQ ID NO: 138461 - DNA, 20 bp, Artificial Sequence
  Description of Artificial Sequence: Synthetic oligonucleotide
  Target: LAMA2; (+) strand; PAM type: NRG; PAM sequence: TGG
gctggctggagcaaacaagc

SEQ ID NO: 138462 - DNA, 20 bp, Artificial Sequence
  Description of Artificial Sequence: Synthetic oligonucleotide
  Target: LAMA2; (+) strand; PAM type: NRG; PAM sequence: TGG
ggctggagcaaacaagctgg

SEQ ID NO: 138463 - DNA, 20 bp, Artificial Sequence
  Description of Artificial Sequence: Synthetic oligonucleotide
  Target: LAMA2; (+) strand; PAM type: NRG; PAM sequence: CGG
aaacaagctggtggattgca

SEQ ID NO: 138464 - DNA, 20 bp, Artificial Sequence
  Description of Artificial Sequence: Synthetic oligonucleotide
  Target: LAMA2; (+) strand; PAM type: NRG; PAM sequence: TAG
caagctggtggattgcacgg

SEQ ID NO: 138465 - DNA, 20 bp, Artificial Sequence
  Description of Artificial Sequence: Synthetic oligonucleotide
  Target: LAMA2; (+) strand; PAM type: NRG; PAM sequence: TGG
agacctgccttccacccata

SEQ ID NO: 138466 - DNA, 20 bp, Artificial Sequence
  Description of Artificial Sequence: Synthetic oligonucleotide
  Target: LAMA2; (+) strand; PAM type: NRG; PAM sequence: GGG
gacctgccttccacccatat

SEQ ID NO: 138467 - DNA, 20 bp, Artificial Sequence
  Description of Artificial Sequence: Synthetic oligonucleotide
  Target: LAMA2; (+) strand; PAM type: NRG; PAM sequence: CGG
tccacccatatgggcctcct

SEQ ID NO: 138468 - DNA, 20 bp, Artificial Sequence
  Description of Artificial Sequence: Synthetic oligonucleotide
  Target: LAMA2; (+) strand; PAM type: NRG; PAM sequence: GGG
ccacccatatgggcctcctc

SEQ ID NO: 138469 - DNA, 20 bp, Artificial Sequence
  Description of Artificial Sequence: Synthetic oligonucleotide
  Target: LAMA2; (+) strand; PAM type: NRG; PAM sequence: GAG
tatgggcctcctcgggatat

SEQ ID NO: 138470 - DNA, 20 bp, Artificial Sequence
  Description of Artificial Sequence: Synthetic oligonucleotide
  Target: LAMA2; (+) strand; PAM type: NRG; PAM sequence: AGG
atgggcctcctcgggatatg

SEQ ID NO: 138471 - DNA, 20 bp, Artificial Sequence
  Description of Artificial Sequence: Synthetic oligonucleotide
  Target: LAMA2; (+) strand; PAM type: NRG; PAM sequence: TGG
ctcctcgggatatgaggaac

SEQ ID NO: 138472 - DNA, 20 bp, Artificial Sequence
  Description of Artificial Sequence: Synthetic oligonucleotide
  Target: LAMA2; (+) strand; PAM type: NRG; PAM sequence: TGG
ctcgggatatgaggaactgg

SEQ ID NO: 138473 - DNA, 20 bp, Artificial Sequence
  Description of Artificial Sequence: Synthetic oligonucleotide
  Target: LAMA2; (+) strand; PAM type: NRG; PAM sequence: CGG
gggatatgaggaactggtgg

SEQ ID NO: 138474 - DNA, 20 bp, Artificial Sequence
  Description of Artificial Sequence: Synthetic oligonucleotide
  Target: LAMA2; (+) strand; PAM type: NRG; PAM sequence: CAG
atatgaggaactggtggcgg

SEQ ID NO: 138475 - DNA, 20 bp, Artificial Sequence
  Description of Artificial Sequence: Synthetic oligonucleotide
  Target: LAMA2; (+) strand; PAM type: NRG; PAM sequence: AGG
tatgaggaactggtggcggc

SEQ ID NO: 138476 - DNA, 20 bp, Artificial Sequence
  Description of Artificial Sequence: Synthetic oligonucleotide
  Target: LAMA2; (+) strand; PAM type: NRG; PAM sequence: GGG
atgaggaactggtggcggca

SEQ ID NO: 138477 - DNA, 20 bp, Artificial Sequence
  Description of Artificial Sequence: Synthetic oligonucleotide
  Target: LAMA2; (+) strand; PAM type: NRG; PAM sequence: GGG
tgaggaactggtggcggcag

SEQ ID NO: 138478 - DNA, 20 bp, Artificial Sequence
  Description of Artificial Sequence: Synthetic oligonucleotide
  Target: LAMA2; (+) strand; PAM type: NRG; PAM sequence: CAG
aactggtggcggcaggggct

SEQ ID NO: 138479 - DNA, 20 bp, Artificial Sequence
  Description of Artificial Sequence: Synthetic oligonucleotide
  Target: LAMA2; (+) strand; PAM type: NRG; PAM sequence: CAG
gcggcaggggctcagtgctg

SEQ ID NO: 138480 - DNA, 20 bp, Artificial Sequence
  Description of Artificial Sequence: Synthetic oligonucleotide
  Target: LAMA2; (+) strand; PAM type: NRG; PAM sequence: TGG
ctgcagcttatatcaccaaa

SEQ ID NO: 138481 - DNA, 20 bp, Artificial Sequence
  Description of Artificial Sequence: Synthetic oligonucleotide
  Target: LAMA2; (+) strand; PAM type: NRG; PAM sequence: TGG
gcttatatcaccaaatggca

SEQ ID NO: 138482 - DNA, 20 bp, Artificial Sequence
  Description of Artificial Sequence: Synthetic oligonucleotide
  Target: LAMA2; (+) strand; PAM type: NRG; PAM sequence: CAG
tttctaccctcactaatata

SEQ ID NO: 138483 - DNA, 20 bp, Artificial Sequence
  Description of Artificial Sequence: Synthetic oligonucleotide
  Target: LAMA2; (+) strand; PAM type: NRG; PAM sequence: CAG
ctaccctcactaatatacag

SEQ ID NO: 138484 - DNA, 20 bp, Artificial Sequence
  Description of Artificial Sequence: Synthetic oligonucleotide
  Target: LAMA2; (+) strand; PAM type: NRG; PAM sequence: CAG
aatatacagcagctgaatgt

SEQ ID NO: 138485 - DNA, 20 bp, Artificial Sequence
  Description of Artificial Sequence: Synthetic oligonucleotide
  Target: LAMA2; (+) strand; PAM type: NRG; PAM sequence: GAG
agcagctgaatgtcagtcct

SEQ ID NO: 138486 - DNA, 20 bp, Artificial Sequence
  Description of Artificial Sequence: Synthetic oligonucleotide
  Target: LAMA2; (+) strand; PAM type: NRG; PAM sequence: CAG
cctgagttaataatatttct

SEQ ID NO: 138487 - DNA, 20 bp, Artificial Sequence
  Description of Artificial Sequence: Synthetic oligonucleotide
  Target: LAMA2; (+) strand; PAM type: NRG; PAM sequence: AGG
ctgagttaataatatttctc

SEQ ID NO: 138488 - DNA, 20 bp, Artificial Sequence
  Description of Artificial Sequence: Synthetic oligonucleotide
  Target: LAMA2; (+) strand; PAM type: NRG; PAM sequence: AAG
agttaataatatttctcagg

SEQ ID NO: 138489 - DNA, 20 bp, Artificial Sequence
  Description of Artificial Sequence: Synthetic oligonucleotide
  Target: LAMA2; (+) strand; PAM type: NRG; PAM sequence: CAG
taatatttctcaggaagtct

SEQ ID NO: 138490 - DNA, 20 bp, Artificial Sequence
  Description of Artificial Sequence: Synthetic oligonucleotide
  Target: LAMA2; (+) strand; PAM type: NRG; PAM sequence: GAG
atatttctcaggaagtctca

SEQ ID NO: 138491 - DNA, 20 bp, Artificial Sequence
  Description of Artificial Sequence: Synthetic oligonucleotide
  Target: LAMA2; (+) strand; PAM type: NRG; PAM sequence: CAG
aggaagtctcagagcactat

SEQ ID NO: 138492 - DNA, 20 bp, Artificial Sequence
  Description of Artificial Sequence: Synthetic oligonucleotide
  Target: LAMA2; (+) strand; PAM type: NRG; PAM sequence: GAG
gaagtctcagagcactatca

SEQ ID NO: 138493 - DNA, 20 bp, Artificial Sequence
  Description of Artificial Sequence: Synthetic oligonucleotide
  Target: LAMA2; (+) strand; PAM type: NRG; PAM sequence: TGG
ctcagagcactatcagagaa

SEQ ID NO: 138494 - DNA, 20 bp, Artificial Sequence
  Description of Artificial Sequence: Synthetic oligonucleotide
  Target: LAMA2; (+) strand; PAM type: NRG; PAM sequence: CAG
agagcactatcagagaatgg

SEQ ID NO: 138495 - DNA, 20 bp, Artificial Sequence
  Description of Artificial Sequence: Synthetic oligonucleotide
  Target: LAMA2; (+) strand; PAM type: NRG; PAM sequence: AGG
gagcactatcagagaatggc

SEQ ID NO: 138496 - DNA, 20 bp, Artificial Sequence
  Description of Artificial Sequence: Synthetic oligonucleotide
  Target: LAMA2; (+) strand; PAM type: NRG; PAM sequence: GGG
agcactatcagagaatggca

SEQ ID NO: 138497 - DNA, 20 bp, Artificial Sequence
  Description of Artificial Sequence: Synthetic oligonucleotide
  Target: LAMA2; (+) strand; PAM type: NRG; PAM sequence: AAG
ctatcagagaatggcagggc

SEQ ID NO: 138498 - DNA, 20 bp, Artificial Sequence
  Description of Artificial Sequence: Synthetic oligonucleotide
  Target: LAMA2; (+) strand; PAM type: NRG; PAM sequence: TAG
cacactgatcaatcatgctt

SEQ ID NO: 138499 - DNA, 20 bp, Artificial Sequence
  Description of Artificial Sequence: Synthetic oligonucleotide
  Target: LAMA2; (+) strand; PAM type: NRG; PAM sequence: AGG
acactgatcaatcatgcttt

SEQ ID NO: 138500 - DNA, 20 bp, Artificial Sequence
  Description of Artificial Sequence: Synthetic oligonucleotide
  Target: LAMA2; (+) strand; PAM type: NRG; PAM sequence: TGG
aatcctgtgcatgaatcccc

SEQ ID NO: 138501 - DNA, 20 bp, Artificial Sequence
  Description of Artificial Sequence: Synthetic oligonucleotide
  Target: LAMA2; (+) strand; PAM type: NRG; PAM sequence: GGG
atcctgtgcatgaatcccct

SEQ ID NO: 138502 - DNA, 20 bp, Artificial Sequence
  Description of Artificial Sequence: Synthetic oligonucleotide
  Target: LAMA2; (+) strand; PAM type: NRG; PAM sequence: GGG
tcctgtgcatgaatcccctg

SEQ ID NO: 138503 - DNA, 20 bp, Artificial Sequence
  Description of Artificial Sequence: Synthetic oligonucleotide
  Target: LAMA2; (+) strand; PAM type: NRG; PAM sequence: TAG
catgaatcccctggggatct

SEQ ID NO: 138504 - DNA, 20 bp, Artificial Sequence
  Description of Artificial Sequence: Synthetic oligonucleotide
  Target: LAMA2; (+) strand; PAM type: NRG; PAM sequence: TGG
tggggatcttagcctcaaaa

SEQ ID NO: 138505 - DNA, 20 bp, Artificial Sequence
  Description of Artificial Sequence: Synthetic oligonucleotide
  Target: LAMA2; (+) strand; PAM type: NRG; PAM sequence: AAG
actgcataccactcctgata

SEQ ID NO: 138506 - DNA, 20 bp, Artificial Sequence
  Description of Artificial Sequence: Synthetic oligonucleotide
  Target: LAMA2; (+) strand; PAM type: NRG; PAM sequence: TGG
aagacaactttgtcctttat

SEQ ID NO: 138507 - DNA, 20 bp, Artificial Sequence
  Description of Artificial Sequence: Synthetic oligonucleotide
  Target: LAMA2; (+) strand; PAM type: NRG; PAM sequence: AAG
ctttgtcctttattggtcac

SEQ ID NO: 138508 - DNA, 20 bp, Artificial Sequence
  Description of Artificial Sequence: Synthetic oligonucleotide
  Target: LAMA2; (+) strand; PAM type: NRG; PAM sequence: GAG
ttgtcctttattggtcacaa

SEQ ID NO: 138509 - DNA, 20 bp, Artificial Sequence
  Description of Artificial Sequence: Synthetic oligonucleotide
  Target: LAMA2; (+) strand; PAM type: NRG; PAM sequence: AAG
ccccttcatgtgatcattga

SEQ ID NO: 138510 - DNA, 20 bp, Artificial Sequence
  Description of Artificial Sequence: Synthetic oligonucleotide
  Target: LAMA2; (+) strand; PAM type: NRG; PAM sequence: TAG
tcatgtgatcattgaaagtc

SEQ ID NO: 138511 - DNA, 20 bp, Artificial Sequence
  Description of Artificial Sequence: Synthetic oligonucleotide
  Target: LAMA2; (+) strand; PAM type: NRG; PAM sequence: AAG
gaaagtctagtctcccaatc

SEQ ID NO: 138512 - DNA, 20 bp, Artificial Sequence
  Description of Artificial Sequence: Synthetic oligonucleotide
  Target: LAMA2; (+) strand; PAM type: NRG; PAM sequence: GAG
aagtctagtctcccaatcaa

SEQ ID NO: 138513 - DNA, 20 bp, Artificial Sequence
  Description of Artificial Sequence: Synthetic oligonucleotide
  Target: LAMA2; (+) strand; PAM type: NRG; PAM sequence: GAG
ctagtctcccaatcaagagt

SEQ ID NO: 138514 - DNA, 20 bp, Artificial Sequence
  Description of Artificial Sequence: Synthetic oligonucleotide
  Target: LAMA2; (+) strand; PAM type: NRG; PAM sequence: CAG
gagtctgctgtgcattgact

SEQ ID NO: 138515 - DNA, 20 bp, Artificial Sequence
  Description of Artificial Sequence: Synthetic oligonucleotide
  Target: LAMA2; (+) strand; PAM type: NRG; PAM sequence: AGG
agtctgctgtgcattgactc

SEQ ID NO: 138516 - DNA, 20 bp, Artificial Sequence
  Description of Artificial Sequence: Synthetic oligonucleotide
  Target: LAMA2; (+) strand; PAM type: NRG; PAM sequence: CAG
gcattgactcaggtcatctc

SEQ ID NO: 138517 - DNA, 20 bp, Artificial Sequence
  Description of Artificial Sequence: Synthetic oligonucleotide
  Target: LAMA2; (+) strand; PAM type: NRG; PAM sequence: AGG
cattgactcaggtcatctcc

SEQ ID NO: 138518 - DNA, 20 bp, Artificial Sequence
  Description of Artificial Sequence: Synthetic oligonucleotide
  Target: LAMA2; (+) strand; PAM type: NRG; PAM sequence: GGG
attgactcaggtcatctcca

SEQ ID NO: 138519 - DNA, 20 bp, Artificial Sequence
  Description of Artificial Sequence: Synthetic oligonucleotide
  Target: LAMA2; (+) strand; PAM type: NRG; PAM sequence: CAG
actcaggtcatctccaggga

SEQ ID NO: 138520 - DNA, 20 bp, Artificial Sequence
  Description of Artificial Sequence: Synthetic oligonucleotide
  Target: LAMA2; (+) strand; PAM type: NRG; PAM sequence: AGG
ctcaggtcatctccagggac

SEQ ID NO: 138521 - DNA, 20 bp, Artificial Sequence
  Description of Artificial Sequence: Synthetic oligonucleotide
  Target: LAMA2; (+) strand; PAM type: NRG; PAM sequence: TGG
ataatgatgctttattgttc

SEQ ID NO: 138522 - DNA, 20 bp, Artificial Sequence
  Description of Artificial Sequence: Synthetic oligonucleotide
  Target: LAMA2; (+) strand; PAM type: NRG; PAM sequence: TAG
ttattctccatttattcttt

SEQ ID NO: 138523 - DNA, 20 bp, Artificial Sequence
  Description of Artificial Sequence: Synthetic oligonucleotide
  Target: LAMA2; (+) strand; PAM type: NRG; PAM sequence: TAG
ttattcttttagattgcaca

SEQ ID NO: 138524 - DNA, 20 bp, Artificial Sequence
  Description of Artificial Sequence: Synthetic oligonucleotide
  Target: LAMA2; (+) strand; PAM type: NRG; PAM sequence: TGG
ttagattgcacatagaacaa

SEQ ID NO: 138525 - DNA, 20 bp, Artificial Sequence
  Description of Artificial Sequence: Synthetic oligonucleotide
  Target: LAMA2; (+) strand; PAM type: NRG; PAM sequence: GGG
tagattgcacatagaacaat

SEQ ID NO: 138526 - DNA, 20 bp, Artificial Sequence
  Description of Artificial Sequence: Synthetic oligonucleotide
  Target: LAMA2; (+) strand; PAM type: NRG; PAM sequence: GGG
agattgcacatagaacaatg

SEQ ID NO: 138527 - DNA, 20 bp, Artificial Sequence
  Description of Artificial Sequence: Synthetic oligonucleotide
  Target: LAMA2; (+) strand; PAM type: NRG; PAM sequence: TAG
taatttgcacaaatcactta

SEQ ID NO: 138528 - DNA, 20 bp, Artificial Sequence
  Description of Artificial Sequence: Synthetic oligonucleotide
  Target: LAMA2; (+) strand; PAM type: NRG; PAM sequence: GAG
aatcacttatagtactcttt

SEQ ID NO: 138529 - DNA, 20 bp, Artificial Sequence
  Description of Artificial Sequence: Synthetic oligonucleotide
  Target: LAMA2; (+) strand; PAM type: NRG; PAM sequence: CAG
atagtactctttgagctgaa

SEQ ID NO: 138530 - DNA, 20 bp, Artificial Sequence
  Description of Artificial Sequence: Synthetic oligonucleotide
  Target: LAMA2; (+) strand; PAM type: NRG; PAM sequence: TGG
tatttacctgttatcaaaca

SEQ ID NO: 138531 - DNA, 20 bp, Artificial Sequence
  Description of Artificial Sequence: Synthetic oligonucleotide
  Target: LAMA2; (+) strand; PAM type: NRG; PAM sequence: CAG
ttacctgttatcaaacatgg

SEQ ID NO: 138532 - DNA, 20 bp, Artificial Sequence
  Description of Artificial Sequence: Synthetic oligonucleotide
  Target: LAMA2; (+) strand; PAM type: NRG; PAM sequence: TGG
ttcccctcctaatttacaac

SEQ ID NO: 138533 - DNA, 20 bp, Artificial Sequence
  Description of Artificial Sequence: Synthetic oligonucleotide
  Target: LAMA2; (+) strand; PAM type: NRG; PAM sequence: TGG
cctcctaatttacaactgga

SEQ ID NO: 138534 - DNA, 20 bp, Artificial Sequence
  Description of Artificial Sequence: Synthetic oligonucleotide
  Target: LAMA2; (+) strand; PAM type: NRG; PAM sequence: AAG
caactggatggcgcaaccac

SEQ ID NO: 138535 - DNA, 20 bp, Artificial Sequence
  Description of Artificial Sequence: Synthetic oligonucleotide
  Target: LAMA2; (+) strand; PAM type: NRG; PAM sequence: CAG
cttgcctgtttttatcaatt

SEQ ID NO: 138536 - DNA, 20 bp, Artificial Sequence
  Description of Artificial Sequence: Synthetic oligonucleotide
  Target: LAMA2; (+) strand; PAM type: NRG; PAM sequence: AAG
cctgtttttatcaattcagc

SEQ ID NO: 138537 - DNA, 20 bp, Artificial Sequence
  Description of Artificial Sequence: Synthetic oligonucleotide
  Target: LAMA2; (+) strand; PAM type: NRG; PAM sequence: AAG
tttatcaattcagcaagtca

SEQ ID NO: 138538 - DNA, 20 bp, Artificial Sequence
  Description of Artificial Sequence: Synthetic oligonucleotide
  Target: LAMA2; (+) strand; PAM type: NRG; PAM sequence: GAG
tatcaattcagcaagtcaaa

SEQ ID NO: 138539 - DNA, 20 bp, Artificial Sequence
  Description of Artificial Sequence: Synthetic oligonucleotide
  Target: LAMA2; (+) strand; PAM type: NRG; PAM sequence: AAG
aagtcaaagagtttacctga

SEQ ID NO: 138540 - DNA, 20 bp, Artificial Sequence
  Description of Artificial Sequence: Synthetic oligonucleotide
  Target: LAMA2; (+) strand; PAM type: NRG; PAM sequence: CAG
ttacctgaaagcctattttt

SEQ ID NO: 138541 - DNA, 20 bp, Artificial Sequence
  Description of Artificial Sequence: Synthetic oligonucleotide
  Target: LAMA2; (+) strand; PAM type: NRG; PAM sequence: CAG
ctcactcatccattcccaca

SEQ ID NO: 138542 - DNA, 20 bp, Artificial Sequence
  Description of Artificial Sequence: Synthetic oligonucleotide
  Target: LAMA2; (+) strand; PAM type: NRG; PAM sequence: AAG
ccattcccacacagtatctt

SEQ ID NO: 138543 - DNA, 20 bp, Artificial Sequence
  Description of Artificial Sequence: Synthetic oligonucleotide
  Target: LAMA2; (+) strand; PAM type: NRG; PAM sequence: TGG
acagtatcttaagaattatg

SEQ ID NO: 138544 - DNA, 20 bp, Artificial Sequence
  Description of Artificial Sequence: Synthetic oligonucleotide
  Target: LAMA2; (+) strand; PAM type: NRG; PAM sequence: TAG
tgttttctcttcctcccatt

SEQ ID NO: 138545 - DNA, 20 bp, Artificial Sequence
  Description of Artificial Sequence: Synthetic oligonucleotide
  Target: LAMA2; (+) strand; PAM type: NRG; PAM sequence: TGG
cttcctcccatttagtttaa

SEQ ID NO: 138546 - DNA, 20 bp, Artificial Sequence
  Description of Artificial Sequence: Synthetic oligonucleotide
  Target: LAMA2; (+) strand; PAM type: NRG; PAM sequence: GAG
tcctcccatttagtttaatg

SEQ ID NO: 138547 - DNA, 20 bp, Artificial Sequence
  Description of Artificial Sequence: Synthetic oligonucleotide
  Target: LAMA2; (+) strand; PAM type: NRG; PAM sequence: AGG
cctcccatttagtttaatgg

SEQ ID NO: 138548 - DNA, 20 bp, Artificial Sequence
  Description of Artificial Sequence: Synthetic oligonucleotide
  Target: LAMA2; (+) strand; PAM type: NRG; PAM sequence: AAG
ccatttagtttaatggaggt

SEQ ID NO: 138549 - DNA, 20 bp, Artificial Sequence
  Description of Artificial Sequence: Synthetic oligonucleotide
  Target: LAMA2; (+) strand; PAM type: NRG; PAM sequence: GAG
tagtttaatggaggtaagat

SEQ ID NO: 138550 - DNA, 20 bp, Artificial Sequence
  Description of Artificial Sequence: Synthetic oligonucleotide
  Target: LAMA2; (+) strand; PAM type: NRG; PAM sequence: AAG
gtaagatgagtgaatatgcc

SEQ ID NO: 138551 - DNA, 20 bp, Artificial Sequence
  Description of Artificial Sequence: Synthetic oligonucleotide
  Target: LAMA2; (+) strand; PAM type: NRG; PAM sequence: AAG
atgcttcattcatcataaca

SEQ ID NO: 138552 - DNA, 20 bp, Artificial Sequence
  Description of Artificial Sequence: Synthetic oligonucleotide
  Target: LAMA2; (+) strand; PAM type: NRG; PAM sequence: CAG
cattcatcataacaaagtgc

SEQ ID NO: 138553 - DNA, 20 bp, Artificial Sequence
  Description of Artificial Sequence: Synthetic oligonucleotide
  Target: LAMA2; (+) strand; PAM type: NRG; PAM sequence: CAG
ccagaattctgtatataacc

SEQ ID NO: 138554 - DNA, 20 bp, Artificial Sequence
  Description of Artificial Sequence: Synthetic oligonucleotide
  Target: LAMA2; (+) strand; PAM type: NRG; PAM sequence: AGG
cagaattctgtatataaccc

SEQ ID NO: 138555 - DNA, 20 bp, Artificial Sequence
  Description of Artificial Sequence: Synthetic oligonucleotide
  Target: LAMA2; (+) strand; PAM type: NRG; PAM sequence: AAG
cccaggtctacctgactcca

SEQ ID NO: 138556 - DNA, 20 bp, Artificial Sequence
  Description of Artificial Sequence: Synthetic oligonucleotide
  Target: LAMA2; (+) strand; PAM type: NRG; PAM sequence: AAG
tccaaagtctgaaattcacc

SEQ ID NO: 138557 - DNA, 20 bp, Artificial Sequence
  Description of Artificial Sequence: Synthetic oligonucleotide
  Target: LAMA2; (+) strand; PAM type: NRG; PAM sequence: TGG
aaagtctgaaattcaccaag

SEQ ID NO: 138558 - DNA, 20 bp, Artificial Sequence
  Description of Artificial Sequence: Synthetic oligonucleotide
  Target: LAMA2; (+) strand; PAM type: NRG; PAM sequence: TGG
tgaaattcaccaagtggaat

SEQ ID NO: 138559 - DNA, 20 bp, Artificial Sequence
  Description of Artificial Sequence: Synthetic oligonucleotide
  Target: LAMA2; (+) strand; PAM type: NRG; PAM sequence: CAG
ttcaccaagtggaattggta

SEQ ID NO: 138560 - DNA, 20 bp, Artificial Sequence
  Description of Artificial Sequence: Synthetic oligonucleotide
  Target: LAMA2; (+) strand; PAM type: NRG; PAM sequence: GAG
caccaagtggaattggtaca

SEQ ID NO: 138561 - DNA, 20 bp, Artificial Sequence
  Description of Artificial Sequence: Synthetic oligonucleotide
  Target: LAMA2; (+) strand; PAM type: NRG; PAM sequence: CAG
gttcaaattgtcccatattc

SEQ ID NO: 138562 - DNA, 20 bp, Artificial Sequence
  Description of Artificial Sequence: Synthetic oligonucleotide
  Target: LAMA2; (+) strand; PAM type: NRG; PAM sequence: AGG
ttcaaattgtcccatattcc

SEQ ID NO: 138563 - DNA, 20 bp, Artificial Sequence
  Description of Artificial Sequence: Synthetic oligonucleotide
  Target: LAMA2; (+) strand; PAM type: NRG; PAM sequence: TGG
aattgtcccatattccagga

SEQ ID NO: 138564 - DNA, 20 bp, Artificial Sequence
  Description of Artificial Sequence: Synthetic oligonucleotide
  Target: LAMA2; (+) strand; PAM type: NRG; PAM sequence: CAG
atccatatccttatttattc

SEQ ID NO: 138565 - DNA, 20 bp, Artificial Sequence
  Description of Artificial Sequence: Synthetic oligonucleotide
  Target: LAMA2; (+) strand; PAM type: NRG; PAM sequence: TAG
aaatcaacctactgtgtgtg

SEQ ID NO: 138566 - DNA, 20 bp, Artificial Sequence
  Description of Artificial Sequence: Synthetic oligonucleotide
  Target: LAMA2; (+) strand; PAM type: NRG; PAM sequence: AAG
tcaacctactgtgtgtgtag

SEQ ID NO: 138567 - DNA, 20 bp, Artificial Sequence
  Description of Artificial Sequence: Synthetic oligonucleotide
  Target: LAMA2; (+) strand; PAM type: NRG; PAM sequence: AAG
acctactgtgtgtgtagaag

SEQ ID NO: 138568 - DNA, 20 bp, Artificial Sequence
  Description of Artificial Sequence: Synthetic oligonucleotide
  Target: LAMA2; (+) strand; PAM type: NRG; PAM sequence: AGG
cctactgtgtgtgtagaaga

SEQ ID NO: 138569 - DNA, 20 bp, Artificial Sequence
  Description of Artificial Sequence: Synthetic oligonucleotide
  Target: LAMA2; (+) strand; PAM type: NRG; PAM sequence: GGG
ctactgtgtgtgtagaagaa

SEQ ID NO: 138570 - DNA, 20 bp, Artificial Sequence
  Description of Artificial Sequence: Synthetic oligonucleotide
  Target: LAMA2; (+) strand; PAM type: NRG; PAM sequence: GGG
tactgtgtgtgtagaagaag

SEQ ID NO: 138571 - DNA, 20 bp, Artificial Sequence
  Description of Artificial Sequence: Synthetic oligonucleotide
  Target: LAMA2; (+) strand; PAM type: NRG; PAM sequence: AAG
gtgtagaagaaggggaattc

SEQ ID NO: 138572 - DNA, 20 bp, Artificial Sequence
  Description of Artificial Sequence: Synthetic oligonucleotide
  Target: LAMA2; (+) strand; PAM type: NRG; PAM sequence: AAG
tccttatttctacttgactc

SEQ ID NO: 138573 - DNA, 20 bp, Artificial Sequence
  Description of Artificial Sequence: Synthetic oligonucleotide
  Target: LAMA2; (+) strand; PAM type: NRG; PAM sequence: TAG
cttgactcaagattttaatt

SEQ ID NO: 138574 - DNA, 20 bp, Artificial Sequence
  Description of Artificial Sequence: Synthetic oligonucleotide
  Target: LAMA2; (+) strand; PAM type: NRG; PAM sequence: CAG
actcaagattttaatttagt

SEQ ID NO: 138575 - DNA, 20 bp, Artificial Sequence
  Description of Artificial Sequence: Synthetic oligonucleotide
  Target: LAMA2; (+) strand; PAM type: NRG; PAM sequence: TAG
ttttaatttagtcagttatt

SEQ ID NO: 138576 - DNA, 20 bp, Artificial Sequence
  Description of Artificial Sequence: Synthetic oligonucleotide
  Target: LAMA2; (+) strand; PAM type: NRG; PAM sequence: AAG
cagttatttagtgatgtgaa

SEQ ID NO: 138577 - DNA, 20 bp, Artificial Sequence
  Description of Artificial Sequence: Synthetic oligonucleotide
  Target: LAMA2; (+) strand; PAM type: NRG; PAM sequence: CAG
tagtgatgtgaaaagttaaa

SEQ ID NO: 138578 - DNA, 20 bp, Artificial Sequence
  Description of Artificial Sequence: Synthetic oligonucleotide
  Target: LAMA2; (+) strand; PAM type: NRG; PAM sequence: AGG
agtgatgtgaaaagttaaac

SEQ ID NO: 138579 - DNA, 20 bp, Artificial Sequence
  Description of Artificial Sequence: Synthetic oligonucleotide
  Target: LAMA2; (+) strand; PAM type: NRG; PAM sequence: AAG
gttaaacaggttttgtaatc

SEQ ID NO: 138580 - DNA, 20 bp, Artificial Sequence
  Description of Artificial Sequence: Synthetic oligonucleotide
  Target: LAMA2; (+) strand; PAM type: NRG; PAM sequence: TGG
tttgtaatcaagtttcgtga

SEQ ID NO: 138581 - DNA, 20 bp, Artificial Sequence
  Description of Artificial Sequence: Synthetic oligonucleotide
  Target: LAMA2; (+) strand; PAM type: NRG; PAM sequence: CAG
agtttcgtgatggaacttct

SEQ ID NO: 138582 - DNA, 20 bp, Artificial Sequence
  Description of Artificial Sequence: Synthetic oligonucleotide
  Target: LAMA2; (+) strand; PAM type: NRG; PAM sequence: AAG
cgtgatggaacttctcagac

SEQ ID NO: 138583 - DNA, 20 bp, Artificial Sequence
  Description of Artificial Sequence: Synthetic oligonucleotide
  Target: LAMA2; (+) strand; PAM type: NRG; PAM sequence: AAG
atggaacttctcagacaaga

SEQ ID NO: 138584 - DNA, 20 bp, Artificial Sequence
  Description of Artificial Sequence: Synthetic oligonucleotide
  Target: LAMA2; (+) strand; PAM type: NRG; PAM sequence: GAG
ggaacttctcagacaagaaa

SEQ ID NO: 138585 - DNA, 20 bp, Artificial Sequence
  Description of Artificial Sequence: Synthetic oligonucleotide
  Target: LAMA2; (+) strand; PAM type: NRG; PAM sequence: CAG
tctcagacaagaaagagctt

SEQ ID NO: 138586 - DNA, 20 bp, Artificial Sequence
  Description of Artificial Sequence: Synthetic oligonucleotide
  Target: LAMA2; (+) strand; PAM type: NRG; PAM sequence: TGG
agagcttcagacttccaatt

SEQ ID NO: 138587 - DNA, 20 bp, Artificial Sequence
  Description of Artificial Sequence: Synthetic oligonucleotide
  Target: LAMA2; (+) strand; PAM type: NRG; PAM sequence: CAG
tcagacttccaatttggcct

SEQ ID NO: 138588 - DNA, 20 bp, Artificial Sequence
  Description of Artificial Sequence: Synthetic oligonucleotide
  Target: LAMA2; (+) strand; PAM type: NRG; PAM sequence: AGG
cagacttccaatttggcctc

SEQ ID NO: 138589 - DNA, 20 bp, Artificial Sequence
  Description of Artificial Sequence: Synthetic oligonucleotide
  Target: LAMA2; (+) strand; PAM type: NRG; PAM sequence: TGG
tccaatttggcctcaggctt

SEQ ID NO: 138590 - DNA, 20 bp, Artificial Sequence
  Description of Artificial Sequence: Synthetic oligonucleotide
  Target: LAMA2; (+) strand; PAM type: NRG; PAM sequence: GAG
gctttggaataacaaactgt

SEQ ID NO: 138591 - DNA, 20 bp, Artificial Sequence
  Description of Artificial Sequence: Synthetic oligonucleotide
  Target: LAMA2; (+) strand; PAM type: NRG; PAM sequence: CAG
acatgtttataatacttatt

SEQ ID NO: 138592 - DNA, 20 bp, Artificial Sequence
  Description of Artificial Sequence: Synthetic oligonucleotide
  Target: LAMA2; (+) strand; PAM type: NRG; PAM sequence: TGG
ttataatacttattcagcta

SEQ ID NO: 138593 - DNA, 20 bp, Artificial Sequence
  Description of Artificial Sequence: Synthetic oligonucleotide
  Target: LAMA2; (+) strand; PAM type: NRG; PAM sequence: TGG
aatacttattcagctatgga

SEQ ID NO: 138594 - DNA, 20 bp, Artificial Sequence
  Description of Artificial Sequence: Synthetic oligonucleotide
  Target: LAMA2; (+) strand; PAM type: NRG; PAM sequence: TGG
gatggtatattgtactgcac

SEQ ID NO: 138595 - DNA, 20 bp, Artificial Sequence
  Description of Artificial Sequence: Synthetic oligonucleotide
  Target: LAMA2; (+) strand; PAM type: NRG; PAM sequence: CAG
atattgtactgcactggcaa

SEQ ID NO: 138596 - DNA, 20 bp, Artificial Sequence
  Description of Artificial Sequence: Synthetic oligonucleotide
  Target: LAMA2; (+) strand; PAM type: NRG; PAM sequence: GAG
attgtactgcactggcaaca

SEQ ID NO: 138597 - DNA, 20 bp, Artificial Sequence
  Description of Artificial Sequence: Synthetic oligonucleotide
  Target: LAMA2; (+) strand; PAM type: NRG; PAM sequence: TGG
cactggcaacagagaaaatg

SEQ ID NO: 138598 - DNA, 20 bp, Artificial Sequence
  Description of Artificial Sequence: Synthetic oligonucleotide
  Target: LAMA2; (+) strand; PAM type: NRG; PAM sequence: CAG
cacaataatcctgaataaac

SEQ ID NO: 138599 - DNA, 20 bp, Artificial Sequence
  Description of Artificial Sequence: Synthetic oligonucleotide
  Target: LAMA2; (+) strand; PAM type: NRG; PAM sequence: TAG
atattaatattcctattgca

SEQ ID NO: 138600 - DNA, 20 bp, Artificial Sequence
  Description of Artificial Sequence: Synthetic oligonucleotide
  Target: LAMA2; (+) strand; PAM type: NRG; PAM sequence: AAG
atattcctattgcatagttg

SEQ ID NO: 138601 - DNA, 20 bp, Artificial Sequence
  Description of Artificial Sequence: Synthetic oligonucleotide
  Target: LAMA2; (+) strand; PAM type: NRG; PAM sequence: TAG
agttgaagaacactgtgctt

SEQ ID NO: 138602 - DNA, 20 bp, Artificial Sequence
  Description of Artificial Sequence: Synthetic oligonucleotide
  Target: LAMA2; (+) strand; PAM type: NRG; PAM sequence: AAG
aagaacactgtgctttagaa

SEQ ID NO: 138603 - DNA, 20 bp, Artificial Sequence
  Description of Artificial Sequence: Synthetic oligonucleotide
  Target: LAMA2; (+) strand; PAM type: NRG; PAM sequence: CAG
cactgtgctttagaaaagtt

SEQ ID NO: 138604 - DNA, 20 bp, Artificial Sequence
  Description of Artificial Sequence: Synthetic oligonucleotide
  Target: LAMA2; (+) strand; PAM type: NRG; PAM sequence: TGG
tttagaaaagttcagtgact

SEQ ID NO: 138605 - DNA, 20 bp, Artificial Sequence
  Description of Artificial Sequence: Synthetic oligonucleotide
  Target: LAMA2; (+) strand; PAM type: NRG; PAM sequence: AAG
gtgacttggccttctttcta

SEQ ID NO: 138606 - DNA, 20 bp, Artificial Sequence
  Description of Artificial Sequence: Synthetic oligonucleotide
  Target: LAMA2; (+) strand; PAM type: NRG; PAM sequence: TGG
cttctttctaaagcttatta

SEQ ID NO: 138607 - DNA, 20 bp, Artificial Sequence
  Description of Artificial Sequence: Synthetic oligonucleotide
  Target: LAMA2; (+) strand; PAM type: NRG; PAM sequence: GGG
ttctttctaaagcttattat

SEQ ID NO: 138608 - DNA, 20 bp, Artificial Sequence
  Description of Artificial Sequence: Synthetic oligonucleotide
  Target: LAMA2; (+) strand; PAM type: NRG; PAM sequence: CAG
tttctaaagcttattatggg

SEQ ID NO: 138609 - DNA, 20 bp, Artificial Sequence
  Description of Artificial Sequence: Synthetic oligonucleotide
  Target: LAMA2; (+) strand; PAM type: NRG; PAM sequence: AGG
ttctaaagcttattatgggc

SEQ ID NO: 138610 - DNA, 20 bp, Artificial Sequence
  Description of Artificial Sequence: Synthetic oligonucleotide
  Target: LAMA2; (+) strand; PAM type: NRG; PAM sequence: GGG
tctaaagcttattatgggca

SEQ ID NO: 138611 - DNA, 20 bp, Artificial Sequence
  Description of Artificial Sequence: Synthetic oligonucleotide
  Target: LAMA2; (+) strand; PAM type: NRG; PAM sequence: TGG
aagcttattatgggcagggc

SEQ ID NO: 138612 - DNA, 20 bp, Artificial Sequence
  Description of Artificial Sequence: Synthetic oligonucleotide
  Target: LAMA2; (+) strand; PAM type: NRG; PAM sequence: GGG
agcttattatgggcagggct

SEQ ID NO: 138613 - DNA, 20 bp, Artificial Sequence
  Description of Artificial Sequence: Synthetic oligonucleotide
  Target: LAMA2; (+) strand; PAM type: NRG; PAM sequence: GGG
gcttattatgggcagggctg

SEQ ID NO: 138614 - DNA, 20 bp, Artificial Sequence
  Description of Artificial Sequence: Synthetic oligonucleotide
  Target: LAMA2; (+) strand; PAM type: NRG; PAM sequence: TAG
cagggctggggcaacatgaa

SEQ ID NO: 138615 - DNA, 20 bp, Artificial Sequence
  Description of Artificial Sequence: Synthetic oligonucleotide
  Target: LAMA2; (+) strand; PAM type: NRG; PAM sequence: CAG
caacatgaatagtctgaatc

SEQ ID NO: 138616 - DNA, 20 bp, Artificial Sequence
  Description of Artificial Sequence: Synthetic oligonucleotide
  Target: LAMA2; (+) strand; PAM type: NRG; PAM sequence: TGG
aaatacactatcttttctaa

SEQ ID NO: 138617 - DNA, 20 bp, Artificial Sequence
  Description of Artificial Sequence: Synthetic oligonucleotide
  Target: LAMA2; (+) strand; PAM type: NRG; PAM sequence: GGG
aatacactatcttttctaat

SEQ ID NO: 138618 - DNA, 20 bp, Artificial Sequence
  Description of Artificial Sequence: Synthetic oligonucleotide
  Target: LAMA2; (+) strand; PAM type: NRG; PAM sequence: AAG
tcttttctaatgggtatctg

SEQ ID NO: 138619 - DNA, 20 bp, Artificial Sequence
  Description of Artificial Sequence: Synthetic oligonucleotide
  Target: LAMA2; (+) strand; PAM type: NRG; PAM sequence: TAG
ggtatctgaagacataatcc

SEQ ID NO: 138620 - DNA, 20 bp, Artificial Sequence
  Description of Artificial Sequence: Synthetic oligonucleotide
  Target: LAMA2; (+) strand; PAM type: NRG; PAM sequence: AGG
gtatctgaagacataatcct

SEQ ID NO: 138621 - DNA, 20 bp, Artificial Sequence
  Description of Artificial Sequence: Synthetic oligonucleotide
  Target: LAMA2; (+) strand; PAM type: NRG; PAM sequence: GGG
tatctgaagacataatccta

SEQ ID NO: 138622 - DNA, 20 bp, Artificial Sequence
  Description of Artificial Sequence: Synthetic oligonucleotide
  Target: LAMA2; (+) strand; PAM type: NRG; PAM sequence: GAG
tctgaagacataatcctagg

SEQ ID NO: 138623 - DNA, 20 bp, Artificial Sequence
  Description of Artificial Sequence: Synthetic oligonucleotide
  Target: LAMA2; (+) strand; PAM type: NRG; PAM sequence: CAG
agacataatcctagggagct

SEQ ID NO: 138624 - DNA, 20 bp, Artificial Sequence
  Description of Artificial Sequence: Synthetic oligonucleotide
  Target: LAMA2; (+) strand; PAM type: NRG; PAM sequence: AGG
gacataatcctagggagctc

SEQ ID NO: 138625 - DNA, 20 bp, Artificial Sequence
  Description of Artificial Sequence: Synthetic oligonucleotide
  Target: LAMA2; (+) strand; PAM type: NRG; PAM sequence: AAG
aatttttattatatattttc

SEQ ID NO: 138626 - DNA, 20 bp, Artificial Sequence
  Description of Artificial Sequence: Synthetic oligonucleotide
  Target: LAMA2; (+) strand; PAM type: NRG; PAM sequence: AGG
atttttattatatattttca

SEQ ID NO: 138627 - DNA, 20 bp, Artificial Sequence
  Description of Artificial Sequence: Synthetic oligonucleotide
  Target: LAMA2; (+) strand; PAM type: NRG; PAM sequence: GGG
tttttattatatattttcaa

SEQ ID NO: 138628 - DNA, 20 bp, Artificial Sequence
  Description of Artificial Sequence: Synthetic oligonucleotide
  Target: LAMA2; (+) strand; PAM type: NRG; PAM sequence: TAG
attttcaagggctccaaatg

SEQ ID NO: 138629 - DNA, 20 bp, Artificial Sequence
  Description of Artificial Sequence: Synthetic oligonucleotide
  Target: LAMA2; (+) strand; PAM type: NRG; PAM sequence: CAG
caagggctccaaatgtagtt

SEQ ID NO: 138630 - DNA, 20 bp, Artificial Sequence
  Description of Artificial Sequence: Synthetic oligonucleotide
  Target: LAMA2; (+) strand; PAM type: NRG; PAM sequence: AGG
aagggctccaaatgtagttc

SEQ ID NO: 138631 - DNA, 20 bp, Artificial Sequence
  Description of Artificial Sequence: Synthetic oligonucleotide
  Target: LAMA2; (+) strand; PAM type: NRG; PAM sequence: AAG
tccaaatgtagttcaggttc

SEQ ID NO: 138632 - DNA, 20 bp, Artificial Sequence
  Description of Artificial Sequence: Synthetic oligonucleotide
  Target: LAMA2; (+) strand; PAM type: NRG; PAM sequence: TGG
aatattgcactatcttctcc

SEQ ID NO: 138633 - DNA, 20 bp, Artificial Sequence
  Description of Artificial Sequence: Synthetic oligonucleotide
  Target: LAMA2; (+) strand; PAM type: NRG; PAM sequence: TGG
ctatcttctcctggcttcta

SEQ ID NO: 138634 - DNA, 20 bp, Artificial Sequence
  Description of Artificial Sequence: Synthetic oligonucleotide
  Target: LAMA2; (+) strand; PAM type: NRG; PAM sequence: GGG
tatcttctcctggcttctat

SEQ ID NO: 138635 - DNA, 20 bp, Artificial Sequence
  Description of Artificial Sequence: Synthetic oligonucleotide
  Target: LAMA2; (+) strand; PAM type: NRG; PAM sequence: TAG
ctggcttctatgggataata

SEQ ID NO: 138636 - DNA, 20 bp, Artificial Sequence
  Description of Artificial Sequence: Synthetic oligonucleotide
  Target: LAMA2; (+) strand; PAM type: NRG; PAM sequence: AAG
caacaacctgtttcgttata

SEQ ID NO: 138637 - DNA, 20 bp, Artificial Sequence
  Description of Artificial Sequence: Synthetic oligonucleotide
  Target: LAMA2; (+) strand; PAM type: NRG; PAM sequence: CAG
caacctgtttcgttataaag

SEQ ID NO: 138638 - DNA, 20 bp, Artificial Sequence
  Description of Artificial Sequence: Synthetic oligonucleotide
  Target: LAMA2; (+) strand; PAM type: NRG; PAM sequence: AGG
aacctgtttcgttataaagc

SEQ ID NO: 138639 - DNA, 20 bp, Artificial Sequence
  Description of Artificial Sequence: Synthetic oligonucleotide
  Target: LAMA2; (+) strand; PAM type: NRG; PAM sequence: GGG
acctgtttcgttataaagca

SEQ ID NO: 138640 - DNA, 20 bp, Artificial Sequence
  Description of Artificial Sequence: Synthetic oligonucleotide
  Target: LAMA2; (+) strand; PAM type: NRG; PAM sequence: GGG
cctgtttcgttataaagcag

SEQ ID NO: 138641 - DNA, 20 bp, Artificial Sequence
  Description of Artificial Sequence: Synthetic oligonucleotide
  Target: LAMA2; (+) strand; PAM type: NRG; PAM sequence: TAG
ttcgttataaagcaggggac

SEQ ID NO: 138642 - DNA, 20 bp, Artificial Sequence
  Description of Artificial Sequence: Synthetic oligonucleotide
  Target: LAMA2; (+) strand; PAM type: NRG; PAM sequence: TAG
ggactagaaccctcattttc

SEQ ID NO: 138643 - DNA, 20 bp, Artificial Sequence
  Description of Artificial Sequence: Synthetic oligonucleotide
  Target: LAMA2; (+) strand; PAM type: NRG; PAM sequence: TAG
cctcattttctagtatactc

SEQ ID NO: 138644 - DNA, 20 bp, Artificial Sequence
  Description of Artificial Sequence: Synthetic oligonucleotide
  Target: LAMA2; (+) strand; PAM type: NRG; PAM sequence: TGG
actctagtgtgcctctaaaa

SEQ ID NO: 138645 - DNA, 20 bp, Artificial Sequence
  Description of Artificial Sequence: Synthetic oligonucleotide
  Target: LAMA2; (+) strand; PAM type: NRG; PAM sequence: AAG
agtgtgcctctaaaatggca

SEQ ID NO: 138646 - DNA, 20 bp, Artificial Sequence
  Description of Artificial Sequence: Synthetic oligonucleotide
  Target: LAMA2; (+) strand; PAM type: NRG; PAM sequence: AAG
tcttttctacctaccgcatg

SEQ ID NO: 138647 - DNA, 20 bp, Artificial Sequence
  Description of Artificial Sequence: Synthetic oligonucleotide
  Target: LAMA2; (+) strand; PAM type: NRG; PAM sequence: AGG
cttttctacctaccgcatga

SEQ ID NO: 138648 - DNA, 20 bp, Artificial Sequence
  Description of Artificial Sequence: Synthetic oligonucleotide
  Target: LAMA2; (+) strand; PAM type: NRG; PAM sequence: TAG
cctaccgcatgaaggattaa

SEQ ID NO: 138649 - DNA, 20 bp, Artificial Sequence
  Description of Artificial Sequence: Synthetic oligonucleotide
  Target: LAMA2; (+) strand; PAM type: NRG; PAM sequence: AGG
ctaccgcatgaaggattaat

SEQ ID NO: 138650 - DNA, 20 bp, Artificial Sequence
  Description of Artificial Sequence: Synthetic oligonucleotide
  Target: LAMA2; (+) strand; PAM type: NRG; PAM sequence: AAG
attaataggttattcaaaat

SEQ ID NO: 138651 - DNA, 20 bp, Artificial Sequence
  Description of Artificial Sequence: Synthetic oligonucleotide
  Target: LAMA2; (+) strand; PAM type: NRG; PAM sequence: GAG
taggttattcaaaataagat

SEQ ID NO: 138652 - DNA, 20 bp, Artificial Sequence
  Description of Artificial Sequence: Synthetic oligonucleotide
  Target: LAMA2; (+) strand; PAM type: NRG; PAM sequence: TGG
aagatgagctattatccaac

SEQ ID NO: 138653 - DNA, 20 bp, Artificial Sequence
  Description of Artificial Sequence: Synthetic oligonucleotide
  Target: LAMA2; (+) strand; PAM type: NRG; PAM sequence: GGG
agatgagctattatccaact

SEQ ID NO: 138654 - DNA, 20 bp, Artificial Sequence
  Description of Artificial Sequence: Synthetic oligonucleotide
  Target: LAMA2; (+) strand; PAM type: NRG; PAM sequence: AAG
tattatccaactgggattaa

SEQ ID NO: 138655 - DNA, 20 bp, Artificial Sequence
  Description of Artificial Sequence: Synthetic oligonucleotide
  Target: LAMA2; (+) strand; PAM type: NRG; PAM sequence: AGG
attatccaactgggattaaa

SEQ ID NO: 138656 - DNA, 20 bp, Artificial Sequence
  Description of Artificial Sequence: Synthetic oligonucleotide
  Target: LAMA2; (+) strand; PAM type: NRG; PAM sequence: CAG
atccaactgggattaaaagg

SEQ ID NO: 138657 - DNA, 20 bp, Artificial Sequence
  Description of Artificial Sequence: Synthetic oligonucleotide
  Target: LAMA2; (+) strand; PAM type: NRG; PAM sequence: TAG
ggcagtaaaattataatgaa

SEQ ID NO: 138658 - DNA, 20 bp, Artificial Sequence
  Description of Artificial Sequence: Synthetic oligonucleotide
  Target: LAMA2; (+) strand; PAM type: NRG; PAM sequence: AGG
gcagtaaaattataatgaat

SEQ ID NO: 138659 - DNA, 20 bp, Artificial Sequence
  Description of Artificial Sequence: Synthetic oligonucleotide
  Target: LAMA2; (+) strand; PAM type: NRG; PAM sequence: CAG
atgtttgtttgtcatttatt

SEQ ID NO: 138660 - DNA, 20 bp, Artificial Sequence
  Description of Artificial Sequence: Synthetic oligonucleotide
  Target: LAMA2; (+) strand; PAM type: NRG; PAM sequence: AAG
ttgtttgtcatttattcagc

SEQ ID NO: 138661 - DNA, 20 bp, Artificial Sequence
  Description of Artificial Sequence: Synthetic oligonucleotide
  Target: LAMA2; (+) strand; PAM type: NRG; PAM sequence: GAG
gtttgtcatttattcagcaa

SEQ ID NO: 138662 - DNA, 20 bp, Artificial Sequence
  Description of Artificial Sequence: Synthetic oligonucleotide
  Target: LAMA2; (+) strand; PAM type: NRG; PAM sequence: TAG
caagagacttgaccatttat

SEQ ID NO: 138663 - DNA, 20 bp, Artificial Sequence
  Description of Artificial Sequence: Synthetic oligonucleotide
  Target: LAMA2; (+) strand; PAM type: NRG; PAM sequence: AAG
tcttttgtataaatttcaac

SEQ ID NO: 138664 - DNA, 20 bp, Artificial Sequence
  Description of Artificial Sequence: Synthetic oligonucleotide
  Target: LAMA2; (+) strand; PAM type: NRG; PAM sequence: CAG
gtataaatttcaacaagtgc

SEQ ID NO: 138665 - DNA, 20 bp, Artificial Sequence
  Description of Artificial Sequence: Synthetic oligonucleotide
  Target: LAMA2; (+) strand; PAM type: NRG; PAM sequence: TGG
tattgttgttgataaatgct

SEQ ID NO: 138666 - DNA, 20 bp, Artificial Sequence
  Description of Artificial Sequence: Synthetic oligonucleotide
  Target: LAMA2; (+) strand; PAM type: NRG; PAM sequence: TAG
tgtgacacattttcataaat

SEQ ID NO: 138667 - DNA, 20 bp, Artificial Sequence
  Description of Artificial Sequence: Synthetic oligonucleotide
  Target: LAMA2; (+) strand; PAM type: NRG; PAM sequence: CAG
aattagtatcttaaacataa

SEQ ID NO: 138668 - DNA, 20 bp, Artificial Sequence
  Description of Artificial Sequence: Synthetic oligonucleotide
  Target: LAMA2; (+) strand; PAM type: NRG; PAM sequence: TAG
tttatttgattaaatcacta

SEQ ID NO: 138669 - DNA, 20 bp, Artificial Sequence
  Description of Artificial Sequence: Synthetic oligonucleotide
  Target: LAMA2; (+) strand; PAM type: NRG; PAM sequence: CAG
gattaaatcactatagatta

SEQ ID NO: 138670 - DNA, 20 bp, Artificial Sequence
  Description of Artificial Sequence: Synthetic oligonucleotide
  Target: LAMA2; (+) strand; PAM type: NRG; PAM sequence: TGG
taaatcactatagattacag

SEQ ID NO: 138671 - DNA, 20 bp, Artificial Sequence
  Description of Artificial Sequence: Synthetic oligonucleotide
  Target: LAMA2; (+) strand; PAM type: NRG; PAM sequence: GGG
aaatcactatagattacagt

SEQ ID NO: 138672 - DNA, 20 bp, Artificial Sequence
  Description of Artificial Sequence: Synthetic oligonucleotide
  Target: LAMA2; (+) strand; PAM type: NRG; PAM sequence: AAG
ttttttacattttaacattc

SEQ ID NO: 138673 - DNA, 20 bp, Artificial Sequence
  Description of Artificial Sequence: Synthetic oligonucleotide
  Target: LAMA2; (+) strand; PAM type: NRG; PAM sequence: AAG
tacattttaacattcaagat

SEQ ID NO: 138674 - DNA, 20 bp, Artificial Sequence
  Description of Artificial Sequence: Synthetic oligonucleotide
  Target: LAMA2; (+) strand; PAM type: NRG; PAM sequence: TAG
ttaacattcaagataagcac

SEQ ID NO: 138675 - DNA, 20 bp, Artificial Sequence
  Description of Artificial Sequence: Synthetic oligonucleotide
  Target: LAMA2; (+) strand; PAM type: NRG; PAM sequence: TAG
aagataagcactagaaaaaa

SEQ ID NO: 138676 - DNA, 20 bp, Artificial Sequence
  Description of Artificial Sequence: Synthetic oligonucleotide
  Target: LAMA2; (+) strand; PAM type: NRG; PAM sequence: TGG
agaaaaaatagcaatttgtt

SEQ ID NO: 138677 - DNA, 20 bp, Artificial Sequence
  Description of Artificial Sequence: Synthetic oligonucleotide
  Target: LAMA2; (+) strand; PAM type: NRG; PAM sequence: AAG
aaaaatagcaatttgtttgg

SEQ ID NO: 138678 - DNA, 20 bp, Artificial Sequence
  Description of Artificial Sequence: Synthetic oligonucleotide
  Target: LAMA2; (+) strand; PAM type: NRG; PAM sequence: AAG
atagcaatttgtttggaaga

SEQ ID NO: 138679 - DNA, 20 bp, Artificial Sequence
  Description of Artificial Sequence: Synthetic oligonucleotide
  Target: LAMA2; (+) strand; PAM type: NRG; PAM sequence: TAG
gcaatttgtttggaagaaag

SEQ ID NO: 138680 - DNA, 20 bp, Artificial Sequence
  Description of Artificial Sequence: Synthetic oligonucleotide
  Target: LAMA2; (+) strand; PAM type: NRG; PAM sequence: AAG
aaagtagctacttattttat

SEQ ID NO: 138681 - DNA, 20 bp, Artificial Sequence
  Description of Artificial Sequence: Synthetic oligonucleotide
  Target: LAMA2; (+) strand; PAM type: NRG; PAM sequence: TAG
gtagctacttattttataag

SEQ ID NO: 138682 - DNA, 20 bp, Artificial Sequence
  Description of Artificial Sequence: Synthetic oligonucleotide
  Target: LAMA2; (+) strand; PAM type: NRG; PAM sequence: TAG
ttttataagtagattgttct

SEQ ID NO: 138683 - DNA, 20 bp, Artificial Sequence
  Description of Artificial Sequence: Synthetic oligonucleotide
  Target: LAMA2; (+) strand; PAM type: NRG; PAM sequence: AAG
gttcttagatacgtattact

SEQ ID NO: 138684 - DNA, 20 bp, Artificial Sequence
  Description of Artificial Sequence: Synthetic oligonucleotide
  Target: LAMA2; (+) strand; PAM type: NRG; PAM sequence: AGG
ttcttagatacgtattacta

SEQ ID NO: 138685 - DNA, 20 bp, Artificial Sequence
  Description of Artificial Sequence: Synthetic oligonucleotide
  Target: LAMA2; (+) strand; PAM type: NRG; PAM sequence: GGG
tcttagatacgtattactaa

SEQ ID NO: 138686 - DNA, 20 bp, Artificial Sequence
  Description of Artificial Sequence: Synthetic oligonucleotide
  Target: LAMA2; (+) strand; PAM type: NRG; PAM sequence: TAG
tttctcattctatttactca

SEQ ID NO: 138687 - DNA, 20 bp, Artificial Sequence
  Description of Artificial Sequence: Synthetic oligonucleotide
  Target: LAMA2; (+) strand; PAM type: NRG; PAM sequence: GAG
atttactcatagcatatttt

SEQ ID NO: 138688 - DNA, 20 bp, Artificial Sequence
  Description of Artificial Sequence: Synthetic oligonucleotide
  Target: LAMA2; (+) strand; PAM type: NRG; PAM sequence: AAG
actcatagcatattttgagc

SEQ ID NO: 138689 - DNA, 20 bp, Artificial Sequence
  Description of Artificial Sequence: Synthetic oligonucleotide
  Target: LAMA2; (+) strand; PAM type: NRG; PAM sequence: TAG
tcatgctgtgcctcaacttc

SEQ ID NO: 138690 - DNA, 20 bp, Artificial Sequence
  Description of Artificial Sequence: Synthetic oligonucleotide
  Target: LAMA2; (+) strand; PAM type: NRG; PAM sequence: TAG
ctgtgcctcaacttctagat

SEQ ID NO: 138691 - DNA, 20 bp, Artificial Sequence
  Description of Artificial Sequence: Synthetic oligonucleotide
  Target: LAMA2; (+) strand; PAM type: NRG; PAM sequence: CAG
tgcctcaacttctagattag

SEQ ID NO: 138692 - DNA, 20 bp, Artificial Sequence
  Description of Artificial Sequence: Synthetic oligonucleotide
  Target: LAMA2; (+) strand; PAM type: NRG; PAM sequence: TGG
gactaaatattacaatatct

SEQ ID NO: 138693 - DNA, 20 bp, Artificial Sequence
  Description of Artificial Sequence: Synthetic oligonucleotide
  Target: LAMA2; (+) strand; PAM type: NRG; PAM sequence: AAG
aaatattacaatatcttggc

SEQ ID NO: 138694 - DNA, 20 bp, Artificial Sequence
  Description of Artificial Sequence: Synthetic oligonucleotide
  Target: LAMA2; (+) strand; PAM type: NRG; PAM sequence: AAG
atatcttggcaagaaaatta

SEQ ID NO: 138695 - DNA, 20 bp, Artificial Sequence
  Description of Artificial Sequence: Synthetic oligonucleotide
  Target: LAMA2; (+) strand; PAM type: NRG; PAM sequence: TGG
gaaaattaaagtaatgataa

SEQ ID NO: 138696 - DNA, 20 bp, Artificial Sequence
  Description of Artificial Sequence: Synthetic oligonucleotide
  Target: LAMA2; (+) strand; PAM type: NRG; PAM sequence: TAG
aagtaatgataatggcaata

SEQ ID NO: 138697 - DNA, 20 bp, Artificial Sequence
  Description of Artificial Sequence: Synthetic oligonucleotide
  Target: LAMA2; (+) strand; PAM type: NRG; PAM sequence: CAG
taaattccatctcacaatta

SEQ ID NO: 138698 - DNA, 20 bp, Artificial Sequence
  Description of Artificial Sequence: Synthetic oligonucleotide
  Target: LAMA2; (+) strand; PAM type: NRG; PAM sequence: AAG
ctcacaattacagctattaa

SEQ ID NO: 138699 - DNA, 20 bp, Artificial Sequence
  Description of Artificial Sequence: Synthetic oligonucleotide
  Target: LAMA2; (+) strand; PAM type: NRG; PAM sequence: AGG
tcacaattacagctattaaa

SEQ ID NO: 138700 - DNA, 20 bp, Artificial Sequence
  Description of Artificial Sequence: Synthetic oligonucleotide
  Target: LAMA2; (+) strand; PAM type: NRG; PAM sequence: TAG
ttacagctattaaaaggatc

SEQ ID NO: 138701 - DNA, 20 bp, Artificial Sequence
  Description of Artificial Sequence: Synthetic oligonucleotide
  Target: LAMA2; (+) strand; PAM type: NRG; PAM sequence: GAG
acagctattaaaaggatcta

SEQ ID NO: 138702 - DNA, 20 bp, Artificial Sequence
  Description of Artificial Sequence: Synthetic oligonucleotide
  Target: LAMA2; (+) strand; PAM type: NRG; PAM sequence: CAG
ctattaaaaggatctagagt

SEQ ID NO: 138703 - DNA, 20 bp, Artificial Sequence
  Description of Artificial Sequence: Synthetic oligonucleotide
  Target: LAMA2; (+) strand; PAM type: NRG; PAM sequence: AAG
ctagagtcagcatgaactta

SEQ ID NO: 138704 - DNA, 20 bp, Artificial Sequence
  Description of Artificial Sequence: Synthetic oligonucleotide
  Target: LAMA2; (+) strand; PAM type: NRG; PAM sequence: AAG
gtcagcatgaacttaaagaa

SEQ ID NO: 138705 - DNA, 20 bp, Artificial Sequence
  Description of Artificial Sequence: Synthetic oligonucleotide
  Target: LAMA2; (+) strand; PAM type: NRG; PAM sequence: CAG
aaagaaaagcttaactgttc

SEQ ID NO: 138706 - DNA, 20 bp, Artificial Sequence
  Description of Artificial Sequence: Synthetic oligonucleotide
  Target: LAMA2; (+) strand; PAM type: NRG; PAM sequence: AAG
caaaaatatacaacaattta

SEQ ID NO: 138707 - DNA, 20 bp, Artificial Sequence
  Description of Artificial Sequence: Synthetic oligonucleotide
  Target: LAMA2; (+) strand; PAM type: NRG; PAM sequence: AGG
aaaaatatacaacaatttaa

SEQ ID NO: 138708 - DNA, 20 bp, Artificial Sequence
  Description of Artificial Sequence: Synthetic oligonucleotide
  Target: LAMA2; (+) strand; PAM type: NRG; PAM sequence: GAG
aaatatacaacaatttaaag

SEQ ID NO: 138709 - DNA, 20 bp, Artificial Sequence
  Description of Artificial Sequence: Synthetic oligonucleotide
  Target: LAMA2; (+) strand; PAM type: NRG; PAM sequence: CAG
atacaacaatttaaaggaga

SEQ ID NO: 138710 - DNA, 20 bp, Artificial Sequence
  Description of Artificial Sequence: Synthetic oligonucleotide
  Target: LAMA2; (+) strand; PAM type: NRG; PAM sequence: TAG
caatttaaaggagacagtaa

SEQ ID NO: 138711 - DNA, 20 bp, Artificial Sequence
  Description of Artificial Sequence: Synthetic oligonucleotide
  Target: LAMA2; (+) strand; PAM type: NRG; PAM sequence: AGG
aatttaaaggagacagtaat

SEQ ID NO: 138712 - DNA, 20 bp, Artificial Sequence
  Description of Artificial Sequence: Synthetic oligonucleotide
  Target: LAMA2; (+) strand; PAM type: NRG; PAM sequence: GGG
atttaaaggagacagtaata

SEQ ID NO: 138713 - DNA, 20 bp, Artificial Sequence
  Description of Artificial Sequence: Synthetic oligonucleotide
  Target: LAMA2; (+) strand; PAM type: NRG; PAM sequence: AAG
atagggactcaaacgttaat

SEQ ID NO: 138714 - DNA, 20 bp, Artificial Sequence
  Description of Artificial Sequence: Synthetic oligonucleotide
  Target: LAMA2; (+) strand; PAM type: NRG; PAM sequence: TAG
atgtctaaaacattctattt

SEQ ID NO: 138715 - DNA, 20 bp, Artificial Sequence
  Description of Artificial Sequence: Synthetic oligonucleotide
  Target: LAMA2; (+) strand; PAM type: NRG; PAM sequence: CAG
tattttagtctttttcctac

SEQ ID NO: 138716 - DNA, 20 bp, Artificial Sequence
  Description of Artificial Sequence: Synthetic oligonucleotide
  Target: LAMA2; (+) strand; PAM type: NRG; PAM sequence: CAG
tttttcctaccagatttcac

SEQ ID NO: 138717 - DNA, 20 bp, Artificial Sequence
  Description of Artificial Sequence: Synthetic oligonucleotide
  Target: LAMA2; (+) strand; PAM type: NRG; PAM sequence: TAG
tatttatttcttttaaaatc

SEQ ID NO: 138718 - DNA, 20 bp, Artificial Sequence
  Description of Artificial Sequence: Synthetic oligonucleotide
  Target: LAMA2; (+) strand; PAM type: NRG; PAM sequence: CAG
tcatgccctttgatttgttt

SEQ ID NO: 138719 - DNA, 20 bp, Artificial Sequence
  Description of Artificial Sequence: Synthetic oligonucleotide
  Target: LAMA2; (+) strand; PAM type: NRG; PAM sequence: AAG
tgccctttgatttgtttcag

SEQ ID NO: 138720 - DNA, 20 bp, Artificial Sequence
  Description of Artificial Sequence: Synthetic oligonucleotide
  Target: LAMA2; (+) strand; PAM type: NRG; PAM sequence: AAG
ctttgatttgtttcagaaga

SEQ ID NO: 138721 - DNA, 20 bp, Artificial Sequence
  Description of Artificial Sequence: Synthetic oligonucleotide
  Target: LAMA2; (+) strand; PAM type: NRG; PAM sequence: TGG
tgtttcagaagaaagctgat

SEQ ID NO: 138722 - DNA, 20 bp, Artificial Sequence
  Description of Artificial Sequence: Synthetic oligonucleotide
  Target: LAMA2; (+) strand; PAM type: NRG; PAM sequence: CAG
ttcagaagaaagctgattgg

SEQ ID NO: 138723 - DNA, 20 bp, Artificial Sequence
  Description of Artificial Sequence: Synthetic oligonucleotide
  Target: LAMA2; (+) strand; PAM type: NRG; PAM sequence: AGG
tcagaagaaagctgattggc

SEQ ID NO: 138724 - DNA, 20 bp, Artificial Sequence
  Description of Artificial Sequence: Synthetic oligonucleotide
  Target: LAMA2; (+) strand; PAM type: NRG; PAM sequence: CGG
gaagaaagctgattggcagg

SEQ ID NO: 138725 - DNA, 20 bp, Artificial Sequence
  Description of Artificial Sequence: Synthetic oligonucleotide
  Target: LAMA2; (+) strand; PAM type: NRG; PAM sequence: GGG
aagaaagctgattggcaggc

SEQ ID NO: 138726 - DNA, 20 bp, Artificial Sequence
  Description of Artificial Sequence: Synthetic oligonucleotide
  Target: LAMA2; (+) strand; PAM type: NRG; PAM sequence: GGG
agaaagctgattggcaggcg

SEQ ID NO: 138727 - DNA, 20 bp, Artificial Sequence
  Description of Artificial Sequence: Synthetic oligonucleotide
  Target: LAMA2; (+) strand; PAM type: NRG; PAM sequence: CAG
gattggcaggcggggtaaaa

SEQ ID NO: 138728 - DNA, 20 bp, Artificial Sequence
  Description of Artificial Sequence: Synthetic oligonucleotide
  Target: LAMA2; (+) strand; PAM type: NRG; PAM sequence: GAG
ttggcaggcggggtaaaaca

SEQ ID NO: 138729 - DNA, 20 bp, Artificial Sequence
  Description of Artificial Sequence: Synthetic oligonucleotide
  Target: LAMA2; (+) strand; PAM type: NRG; PAM sequence: AGG
tggcaggcggggtaaaacag

SEQ ID NO: 138730 - DNA, 20 bp, Artificial Sequence
  Description of Artificial Sequence: Synthetic oligonucleotide
  Target: LAMA2; (+) strand; PAM type: NRG; PAM sequence: GGG
ggcaggcggggtaaaacaga

SEQ ID NO: 138731 - DNA, 20 bp, Artificial Sequence
  Description of Artificial Sequence: Synthetic oligonucleotide
  Target: LAMA2; (+) strand; PAM type: NRG; PAM sequence: GAG
caggcggggtaaaacagagg

SEQ ID NO: 138732 - DNA, 20 bp, Artificial Sequence
  Description of Artificial Sequence: Synthetic oligonucleotide
  Target: LAMA2; (+) strand; PAM type: NRG; PAM sequence: AGG
aggcggggtaaaacagaggg

SEQ ID NO: 138733 - DNA, 20 bp, Artificial Sequence
  Description of Artificial Sequence: Synthetic oligonucleotide
  Target: LAMA2; (+) strand; PAM type: NRG; PAM sequence: CAG
cggggtaaaacagagggagg

SEQ ID NO: 138734 - DNA, 20 bp, Artificial Sequence
  Description of Artificial Sequence: Synthetic oligonucleotide
  Target: LAMA2; (+) strand; PAM type: NRG; PAM sequence: CAG
aacagagggaggcagctttt

SEQ ID NO: 138735 - DNA, 20 bp, Artificial Sequence
  Description of Artificial Sequence: Synthetic oligonucleotide
  Target: LAMA2; (+) strand; PAM type: NRG; PAM sequence: TAG
agagggaggcagcttttcag

SEQ ID NO: 138736 - DNA, 20 bp, Artificial Sequence
  Description of Artificial Sequence: Synthetic oligonucleotide
  Target: LAMA2; (+) strand; PAM type: NRG; PAM sequence: GAG
agacttttcaaacacatatt

SEQ ID NO: 138737 - DNA, 20 bp, Artificial Sequence
  Description of Artificial Sequence: Synthetic oligonucleotide
  Target: LAMA2; (+) strand; PAM type: NRG; PAM sequence: AGG
gacttttcaaacacatattg

SEQ ID NO: 138738 - DNA, 20 bp, Artificial Sequence
  Description of Artificial Sequence: Synthetic oligonucleotide
  Target: LAMA2; (+) strand; PAM type: NRG; PAM sequence: TGG
attgaggtgatactcactcc

SEQ ID NO: 138739 - DNA, 20 bp, Artificial Sequence
  Description of Artificial Sequence: Synthetic oligonucleotide
  Target: LAMA2; (+) strand; PAM type: NRG; PAM sequence: CAG
atactcactcctggctaatc

SEQ ID NO: 138740 - DNA, 20 bp, Artificial Sequence
  Description of Artificial Sequence: Synthetic oligonucleotide
  Target: LAMA2; (+) strand; PAM type: NRG; PAM sequence: AGG
tactcactcctggctaatcc

SEQ ID NO: 138741 - DNA, 20 bp, Artificial Sequence
  Description of Artificial Sequence: Synthetic oligonucleotide
  Target: LAMA2; (+) strand; PAM type: NRG; PAM sequence: TAG
aatccaggaatgccattaat

SEQ ID NO: 138742 - DNA, 20 bp, Artificial Sequence
  Description of Artificial Sequence: Synthetic oligonucleotide
  Target: LAMA2; (+) strand; PAM type: NRG; PAM sequence: AAG
aggaatgccattaattagtt

SEQ ID NO: 138743 - DNA, 20 bp, Artificial Sequence
  Description of Artificial Sequence: Synthetic oligonucleotide
  Target: LAMA2; (+) strand; PAM type: NRG; PAM sequence: TAG
agttaagctcatgtcttaac

SEQ ID NO: 138744 - DNA, 20 bp, Artificial Sequence
  Description of Artificial Sequence: Synthetic oligonucleotide
  Target: LAMA2; (+) strand; PAM type: NRG; PAM sequence: AGG
gttaagctcatgtcttaact

SEQ ID NO: 138745 - DNA, 20 bp, Artificial Sequence
  Description of Artificial Sequence: Synthetic oligonucleotide
  Target: LAMA2; (+) strand; PAM type: NRG; PAM sequence: GAG
taagctcatgtcttaactag

SEQ ID NO: 138746 - DNA, 20 bp, Artificial Sequence
  Description of Artificial Sequence: Synthetic oligonucleotide
  Target: LAMA2; (+) strand; PAM type: NRG; PAM sequence: AAG
ctaggagtcttctcctcaat

SEQ ID NO: 138747 - DNA, 20 bp, Artificial Sequence
  Description of Artificial Sequence: Synthetic oligonucleotide
  Target: LAMA2; (+) strand; PAM type: NRG; PAM sequence: TGG
aagcaattcacttctcttcc

SEQ ID NO: 138748 - DNA, 20 bp, Artificial Sequence
  Description of Artificial Sequence: Synthetic oligonucleotide
  Target: LAMA2; (+) strand; PAM type: NRG; PAM sequence: AAG
ctggtctatccctcaaaact

SEQ ID NO: 138749 - DNA, 20 bp, Artificial Sequence
  Description of Artificial Sequence: Synthetic oligonucleotide
  Target: LAMA2; (+) strand; PAM type: NRG; PAM sequence: AAG
taagaatgcgtttaccaaac

SEQ ID NO: 138750 - DNA, 20 bp, Artificial Sequence
  Description of Artificial Sequence: Synthetic oligonucleotide
  Target: LAMA2; (+) strand; PAM type: NRG; PAM sequence: CAG
taccaaacaagattatctta

SEQ ID NO: 138751 - DNA, 20 bp, Artificial Sequence
  Description of Artificial Sequence: Synthetic oligonucleotide
  Target: LAMA2; (+) strand; PAM type: NRG; PAM sequence: CAG
acaagattatcttacagcta

SEQ ID NO: 138752 - DNA, 20 bp, Artificial Sequence
  Description of Artificial Sequence: Synthetic oligonucleotide
  Target: LAMA2; (+) strand; PAM type: NRG; PAM sequence: GAG
aagattatcttacagctaca

SEQ ID NO: 138753 - DNA, 20 bp, Artificial Sequence
  Description of Artificial Sequence: Synthetic oligonucleotide
  Target: LAMA2; (+) strand; PAM type: NRG; PAM sequence: CAG
tattttattcactgatcttg

SEQ ID NO: 138754 - DNA, 20 bp, Artificial Sequence
  Description of Artificial Sequence: Synthetic oligonucleotide
  Target: LAMA2; (+) strand; PAM type: NRG; PAM sequence: GAG
ttttattcactgatcttgca

SEQ ID NO: 138755 - DNA, 20 bp, Artificial Sequence
  Description of Artificial Sequence: Synthetic oligonucleotide
  Target: LAMA2; (+) strand; PAM type: NRG; PAM sequence: TGG
cttgcagagaaaaatttgtt

SEQ ID NO: 138756 - DNA, 20 bp, Artificial Sequence
  Description of Artificial Sequence: Synthetic oligonucleotide
  Target: LAMA2; (+) strand; PAM type: NRG; PAM sequence: AAG
agagaaaaatttgtttggac

SEQ ID NO: 138757 - DNA, 20 bp, Artificial Sequence
  Description of Artificial Sequence: Synthetic oligonucleotide
  Target: LAMA2; (+) strand; PAM type: NRG; PAM sequence: CAG
aatttgtttggacaagttaa

SEQ ID NO: 138758 - DNA, 20 bp, Artificial Sequence
  Description of Artificial Sequence: Synthetic oligonucleotide
  Target: LAMA2; (+) strand; PAM type: NRG; PAM sequence: TGG
gacaagttaacagttttaac

SEQ ID NO: 138759 - DNA, 20 bp, Artificial Sequence
  Description of Artificial Sequence: Synthetic oligonucleotide
  Target: LAMA2; (+) strand; PAM type: NRG; PAM sequence: TAG
tttaactggaatttatgttt

SEQ ID NO: 138760 - DNA, 20 bp, Artificial Sequence
  Description of Artificial Sequence: Synthetic oligonucleotide
  Target: LAMA2; (+) strand; PAM type: NRG; PAM sequence: AGG
ttaactggaatttatgtttt

SEQ ID NO: 138761 - DNA, 20 bp, Artificial Sequence
  Description of Artificial Sequence: Synthetic oligonucleotide
  Target: LAMA2; (+) strand; PAM type: NRG; PAM sequence: GAG
aactggaatttatgttttag

SEQ ID NO: 138762 - DNA, 20 bp, Artificial Sequence
  Description of Artificial Sequence: Synthetic oligonucleotide
  Target: LAMA2; (+) strand; PAM type: NRG; PAM sequence: AGG
actggaatttatgttttagg

SEQ ID NO: 138763 - DNA, 20 bp, Artificial Sequence
  Description of Artificial Sequence: Synthetic oligonucleotide
  Target: LAMA2; (+) strand; PAM type: NRG; PAM sequence: GAG
tggaatttatgttttaggag

SEQ ID NO: 138764 - DNA, 20 bp, Artificial Sequence
  Description of Artificial Sequence: Synthetic oligonucleotide
  Target: LAMA2; (+) strand; PAM type: NRG; PAM sequence: AGG
ggaatttatgttttaggagg

SEQ ID NO: 138765 - DNA, 20 bp, Artificial Sequence
  Description of Artificial Sequence: Synthetic oligonucleotide
  Target: LAMA2; (+) strand; PAM type: NRG; PAM sequence: TAG
tgcaaatattactatacttt

SEQ ID NO: 138766 - DNA, 20 bp, Artificial Sequence
  Description of Artificial Sequence: Synthetic oligonucleotide
  Target: LAMA2; (+) strand; PAM type: NRG; PAM sequence: TAG
acttttagaatccatgtgaa

SEQ ID NO: 138767 - DNA, 20 bp, Artificial Sequence
  Description of Artificial Sequence: Synthetic oligonucleotide
  Target: LAMA2; (+) strand; PAM type: NRG; PAM sequence: AAG
tataaaatgatttttctcta

SEQ ID NO: 138768 - DNA, 20 bp, Artificial Sequence
  Description of Artificial Sequence: Synthetic oligonucleotide
  Target: LAMA2; (+) strand; PAM type: NRG; PAM sequence: TAG
aatgatttttctctaaagcc

SEQ ID NO: 138769 - DNA, 20 bp, Artificial Sequence
  Description of Artificial Sequence: Synthetic oligonucleotide
  Target: LAMA2; (+) strand; PAM type: NRG; PAM sequence: TGG
gcctagaatcattaatgtaa

SEQ ID NO: 138770 - DNA, 20 bp, Artificial Sequence
  Description of Artificial Sequence: Synthetic oligonucleotide
  Target: LAMA2; (+) strand; PAM type: NRG; PAM sequence: TGG
ataataaaacataaaatacg

SEQ ID NO: 138771 - DNA, 20 bp, Artificial Sequence
  Description of Artificial Sequence: Synthetic oligonucleotide
  Target: LAMA2; (+) strand; PAM type: NRG; PAM sequence: AAG
tggaaatactttatatattc

SEQ ID NO: 138772 - DNA, 20 bp, Artificial Sequence
  Description of Artificial Sequence: Synthetic oligonucleotide
  Target: LAMA2; (+) strand; PAM type: NRG; PAM sequence: AAG
acaatcatttaaacatatta

SEQ ID NO: 138773 - DNA, 20 bp, Artificial Sequence
  Description of Artificial Sequence: Synthetic oligonucleotide
  Target: LAMA2; (+) strand; PAM type: NRG; PAM sequence: AGG
caatcatttaaacatattaa

SEQ ID NO: 138774 - DNA, 20 bp, Artificial Sequence
  Description of Artificial Sequence: Synthetic oligonucleotide
  Target: LAMA2; (+) strand; PAM type: NRG; PAM sequence: CAG
attaaaggtgatccaatttt

SEQ ID NO: 138775 - DNA, 20 bp, Artificial Sequence
  Description of Artificial Sequence: Synthetic oligonucleotide
  Target: LAMA2; (+) strand; PAM type: NRG; PAM sequence: AAG
tgatccaattttcagtcttg

SEQ ID NO: 138776 - DNA, 20 bp, Artificial Sequence
  Description of Artificial Sequence: Synthetic oligonucleotide
  Target: LAMA2; (+) strand; PAM type: NRG; PAM sequence: AGG
gatccaattttcagtcttga

SEQ ID NO: 138777 - DNA, 20 bp, Artificial Sequence
  Description of Artificial Sequence: Synthetic oligonucleotide
  Target: LAMA2; (+) strand; PAM type: NRG; PAM sequence: AAG
ccaattttcagtcttgaagg

SEQ ID NO: 138778 - DNA, 20 bp, Artificial Sequence
  Description of Artificial Sequence: Synthetic oligonucleotide
  Target: LAMA2; (+) strand; PAM type: NRG; PAM sequence: AGG
caattttcagtcttgaagga

SEQ ID NO: 138779 - DNA, 20 bp, Artificial Sequence
  Description of Artificial Sequence: Synthetic oligonucleotide
  Target: LAMA2; (+) strand; PAM type: NRG; PAM sequence: AAG
tgattcctgattactgatta

SEQ ID NO: 138780 - DNA, 20 bp, Artificial Sequence
  Description of Artificial Sequence: Synthetic oligonucleotide
  Target: LAMA2; (+) strand; PAM type: NRG; PAM sequence: AGG
gattcctgattactgattaa

SEQ ID NO: 138781 - DNA, 20 bp, Artificial Sequence
  Description of Artificial Sequence: Synthetic oligonucleotide
  Target: LAMA2; (+) strand; PAM type: NRG; PAM sequence: AAG
gattaaaggatgtgttgtac

SEQ ID NO: 138782 - DNA, 20 bp, Artificial Sequence
  Description of Artificial Sequence: Synthetic oligonucleotide
  Target: LAMA2; (+) strand; PAM type: NRG; PAM sequence: AGG
attaaaggatgtgttgtaca

SEQ ID NO: 138783 - DNA, 20 bp, Artificial Sequence
  Description of Artificial Sequence: Synthetic oligonucleotide
  Target: LAMA2; (+) strand; PAM type: NRG; PAM sequence: GAG
taaaggatgtgttgtacaag

SEQ ID NO: 138784 - DNA, 20 bp, Artificial Sequence
  Description of Artificial Sequence: Synthetic oligonucleotide
  Target: LAMA2; (+) strand; PAM type: NRG; PAM sequence: AGG
aaaggatgtgttgtacaagg

SEQ ID NO: 138785 - DNA, 20 bp, Artificial Sequence
  Description of Artificial Sequence: Synthetic oligonucleotide
  Target: LAMA2; (+) strand; PAM type: NRG; PAM sequence: GGG
aaggatgtgttgtacaagga

SEQ ID NO: 138786 - DNA, 20 bp, Artificial Sequence
  Description of Artificial Sequence: Synthetic oligonucleotide
  Target: LAMA2; (+) strand; PAM type: NRG; PAM sequence: TGG
gttgtacaaggagggaattt

SEQ ID NO: 138787 - DNA, 20 bp, Artificial Sequence
  Description of Artificial Sequence: Synthetic oligonucleotide
  Target: LAMA2; (+) strand; PAM type: NRG; PAM sequence: TGG
ttggaaaattcacaaataca

SEQ ID NO: 138788 - DNA, 20 bp, Artificial Sequence
  Description of Artificial Sequence: Synthetic oligonucleotide
  Target: LAMA2; (+) strand; PAM type: NRG; PAM sequence: TGG
acatactcccaaacaaccaa

SEQ ID NO: 138789 - DNA, 20 bp, Artificial Sequence
  Description of Artificial Sequence: Synthetic oligonucleotide
  Target: LAMA2; (+) strand; PAM type: NRG; PAM sequence: AAG
tcccaaacaaccaatggata

SEQ ID NO: 138790 - DNA, 20 bp, Artificial Sequence
  Description of Artificial Sequence: Synthetic oligonucleotide
  Target: LAMA2; (+) strand; PAM type: NRG; PAM sequence: AAG
atggataaagaaaaaattaa

SEQ ID NO: 138791 - DNA, 20 bp, Artificial Sequence
  Description of Artificial Sequence: Synthetic oligonucleotide
  Target: LAMA2; (+) strand; PAM type: NRG; PAM sequence: GAG
ggataaagaaaaaattaaaa

SEQ ID NO: 138792 - DNA, 20 bp, Artificial Sequence
  Description of Artificial Sequence: Synthetic oligonucleotide
  Target: LAMA2; (+) strand; PAM type: NRG; PAM sequence: GAG
gagaaatttaaaaataactt

SEQ ID NO: 138793 - DNA, 20 bp, Artificial Sequence
  Description of Artificial Sequence: Synthetic oligonucleotide
  Target: LAMA2; (+) strand; PAM type: NRG; PAM sequence: GAG
aaaaataacttgagacaaat

SEQ ID NO: 138794 - DNA, 20 bp, Artificial Sequence
  Description of Artificial Sequence: Synthetic oligonucleotide
  Target: LAMA2; (+) strand; PAM type: NRG; PAM sequence: TGG
taacttgagacaaatgagaa

SEQ ID NO: 138795 - DNA, 20 bp, Artificial Sequence
  Description of Artificial Sequence: Synthetic oligonucleotide
  Target: LAMA2; (+) strand; PAM type: NRG; PAM sequence: AAG
atggacacactaacactgat

SEQ ID NO: 138796 - DNA, 20 bp, Artificial Sequence
  Description of Artificial Sequence: Synthetic oligonucleotide
  Target: LAMA2; (+) strand; PAM type: NRG; PAM sequence: AAG
gacacactaacactgataag

SEQ ID NO: 138797 - DNA, 20 bp, Artificial Sequence
  Description of Artificial Sequence: Synthetic oligonucleotide
  Target: LAMA2; (+) strand; PAM type: NRG; PAM sequence: AAG
acactaacactgataagaag

SEQ ID NO: 138798 - DNA, 20 bp, Artificial Sequence
  Description of Artificial Sequence: Synthetic oligonucleotide
  Target: LAMA2; (+) strand; PAM type: NRG; PAM sequence: AAG
acactgataagaagaagcaa

SEQ ID NO: 138799 - DNA, 20 bp, Artificial Sequence
  Description of Artificial Sequence: Synthetic oligonucleotide
  Target: LAMA2; (+) strand; PAM type: NRG; PAM sequence: CAG
ctgataagaagaagcaaaag

SEQ ID NO: 138800 - DNA, 20 bp, Artificial Sequence
  Description of Artificial Sequence: Synthetic oligonucleotide
  Target: LAMA2; (+) strand; PAM type: NRG; PAM sequence: AAG
gaagaagcaaaagcagttct

SEQ ID NO: 138801 - DNA, 20 bp, Artificial Sequence
  Description of Artificial Sequence: Synthetic oligonucleotide
  Target: LAMA2; (+) strand; PAM type: NRG; PAM sequence: AAG
gaagcaaaagcagttctaag

SEQ ID NO: 138802 - DNA, 20 bp, Artificial Sequence
  Description of Artificial Sequence: Synthetic oligonucleotide
  Target: LAMA2; (+) strand; PAM type: NRG; PAM sequence: AAG
caaaagcagttctaagaaga

SEQ ID NO: 138803 - DNA, 20 bp, Artificial Sequence
  Description of Artificial Sequence: Synthetic oligonucleotide
  Target: LAMA2; (+) strand; PAM type: NRG; PAM sequence: AGG
aaaagcagttctaagaagaa

SEQ ID NO: 138804 - DNA, 20 bp, Artificial Sequence
  Description of Artificial Sequence: Synthetic oligonucleotide
  Target: LAMA2; (+) strand; PAM type: NRG; PAM sequence: TAG
agttctaagaagaaaggcta

SEQ ID NO: 138805 - DNA, 20 bp, Artificial Sequence
  Description of Artificial Sequence: Synthetic oligonucleotide
  Target: LAMA2; (+) strand; PAM type: NRG; PAM sequence: AAG
taataaatacctacgtcaaa

SEQ ID NO: 138806 - DNA, 20 bp, Artificial Sequence
  Description of Artificial Sequence: Synthetic oligonucleotide
  Target: LAMA2; (+) strand; PAM type: NRG; PAM sequence: AAG
taaatacctacgtcaaaaag

SEQ ID NO: 138807 - DNA, 20 bp, Artificial Sequence
  Description of Artificial Sequence: Synthetic oligonucleotide
  Target: LAMA2; (+) strand; PAM type: NRG; PAM sequence: AAG
tacctacgtcaaaaagaaga

SEQ ID NO: 138808 - DNA, 20 bp, Artificial Sequence
  Description of Artificial Sequence: Synthetic oligonucleotide
  Target: LAMA2; (+) strand; PAM type: NRG; PAM sequence: AAG
agatctaaaattaacaacct

SEQ ID NO: 138809 - DNA, 20 bp, Artificial Sequence
  Description of Artificial Sequence: Synthetic oligonucleotide
  Target: LAMA2; (+) strand; PAM type: NRG; PAM sequence: AGG
gatctaaaattaacaaccta

SEQ ID NO: 138810 - DNA, 20 bp, Artificial Sequence
  Description of Artificial Sequence: Synthetic oligonucleotide
  Target: LAMA2; (+) strand; PAM type: NRG; PAM sequence: AAG
acaacctaaggttacatttc

SEQ ID NO: 138811 - DNA, 20 bp, Artificial Sequence
  Description of Artificial Sequence: Synthetic oligonucleotide
  Target: LAMA2; (+) strand; PAM type: NRG; PAM sequence: AAG
cctaaggttacatttcaaga

SEQ ID NO: 138812 - DNA, 20 bp, Artificial Sequence
  Description of Artificial Sequence: Synthetic oligonucleotide
  Target: LAMA2; (+) strand; PAM type: NRG; PAM sequence: AAG
agcaaaaaaaaaaaaaaatg

SEQ ID NO: 138813 - DNA, 20 bp, Artificial Sequence
  Description of Artificial Sequence: Synthetic oligonucleotide
  Target: LAMA2; (+) strand; PAM type: NRG; PAM sequence: AAG
aaaaaaaaaaaaatgaagaa

SEQ ID NO: 138814 - DNA, 20 bp, Artificial Sequence
  Description of Artificial Sequence: Synthetic oligonucleotide
  Target: LAMA2; (+) strand; PAM type: NRG; PAM sequence: AAG
aaaaaatgaagaaaagataa

SEQ ID NO: 138815 - DNA, 20 bp, Artificial Sequence
  Description of Artificial Sequence: Synthetic oligonucleotide
  Target: LAMA2; (+) strand; PAM type: NRG; PAM sequence: AAG
aatgaagaaaagataaaaga

SEQ ID NO: 138816 - DNA, 20 bp, Artificial Sequence
  Description of Artificial Sequence: Synthetic oligonucleotide
  Target: LAMA2; (+) strand; PAM type: NRG; PAM sequence: TAG
agataaaagaaagaacaaac

SEQ ID NO: 138817 - DNA, 20 bp, Artificial Sequence
  Description of Artificial Sequence: Synthetic oligonucleotide
  Target: LAMA2; (+) strand; PAM type: NRG; PAM sequence: AGG
gataaaagaaagaacaaact

SEQ ID NO: 138818 - DNA, 20 bp, Artificial Sequence
  Description of Artificial Sequence: Synthetic oligonucleotide
  Target: LAMA2; (+) strand; PAM type: NRG; PAM sequence: TAG
aagaaagaacaaactaggcc

SEQ ID NO: 138819 - DNA, 20 bp, Artificial Sequence
  Description of Artificial Sequence: Synthetic oligonucleotide
  Target: LAMA2; (+) strand; PAM type: NRG; PAM sequence: AAG
aaagaacaaactaggcctag

SEQ ID NO: 138820 - DNA, 20 bp, Artificial Sequence
  Description of Artificial Sequence: Synthetic oligonucleotide
  Target: LAMA2; (+) strand; PAM type: NRG; PAM sequence: TAG
gaacaaactaggcctagaag

SEQ ID NO: 138821 - DNA, 20 bp, Artificial Sequence
  Description of Artificial Sequence: Synthetic oligonucleotide
  Target: LAMA2; (+) strand; PAM type: NRG; PAM sequence: CAG
caaactaggcctagaagtag

SEQ ID NO: 138822 - DNA, 20 bp, Artificial Sequence
  Description of Artificial Sequence: Synthetic oligonucleotide
  Target: LAMA2; (+) strand; PAM type: NRG; PAM sequence: AAG
ctaggcctagaagtagcaga

SEQ ID NO: 138823 - DNA, 20 bp, Artificial Sequence
  Description of Artificial Sequence: Synthetic oligonucleotide
  Target: LAMA2; (+) strand; PAM type: NRG; PAM sequence: AAG
ggcctagaagtagcagaaag

SEQ ID NO: 138824 - DNA, 20 bp, Artificial Sequence
  Description of Artificial Sequence: Synthetic oligonucleotide
  Target: LAMA2; (+) strand; PAM type: NRG; PAM sequence: AGG
gcctagaagtagcagaaaga

SEQ ID NO: 138825 - DNA, 20 bp, Artificial Sequence
  Description of Artificial Sequence: Synthetic oligonucleotide
  Target: LAMA2; (+) strand; PAM type: NRG; PAM sequence: AAG
gcagaaagaaggaaataata

SEQ ID NO: 138826 - DNA, 20 bp, Artificial Sequence
  Description of Artificial Sequence: Synthetic oligonucleotide
  Target: LAMA2; (+) strand; PAM type: NRG; PAM sequence: AGG
cagaaagaaggaaataataa

SEQ ID NO: 138827 - DNA, 20 bp, Artificial Sequence
  Description of Artificial Sequence: Synthetic oligonucleotide
  Target: LAMA2; (+) strand; PAM type: NRG; PAM sequence: TGG
agaaggaaataataaaggtc

SEQ ID NO: 138828 - DNA, 20 bp, Artificial Sequence
  Description of Artificial Sequence: Synthetic oligonucleotide
  Target: LAMA2; (+) strand; PAM type: NRG; PAM sequence: GGG
gaaggaaataataaaggtct

SEQ ID NO: 138829 - DNA, 20 bp, Artificial Sequence
  Description of Artificial Sequence: Synthetic oligonucleotide
  Target: LAMA2; (+) strand; PAM type: NRG; PAM sequence: TAG
ggaaataataaaggtctggg

SEQ ID NO: 138830 - DNA, 20 bp, Artificial Sequence
  Description of Artificial Sequence: Synthetic oligonucleotide
  Target: LAMA2; (+) strand; PAM type: NRG; PAM sequence: TAG
ctgggtagaaataaatgaaa

SEQ ID NO: 138831 - DNA, 20 bp, Artificial Sequence
  Description of Artificial Sequence: Synthetic oligonucleotide
  Target: LAMA2; (+) strand; PAM type: NRG; PAM sequence: GAG
gggtagaaataaatgaaata

SEQ ID NO: 138832 - DNA, 20 bp, Artificial Sequence
  Description of Artificial Sequence: Synthetic oligonucleotide
  Target: LAMA2; (+) strand; PAM type: NRG; PAM sequence: TAG
gaaataaatgaaatagagac

SEQ ID NO: 138833 - DNA, 20 bp, Artificial Sequence
  Description of Artificial Sequence: Synthetic oligonucleotide
  Target: LAMA2; (+) strand; PAM type: NRG; PAM sequence: AGG
aaataaatgaaatagagact

SEQ ID NO: 138834 - DNA, 20 bp, Artificial Sequence
  Description of Artificial Sequence: Synthetic oligonucleotide
  Target: LAMA2; (+) strand; PAM type: NRG; PAM sequence: GGG
aataaatgaaatagagacta

SEQ ID NO: 138835 - DNA, 20 bp, Artificial Sequence
  Description of Artificial Sequence: Synthetic oligonucleotide
  Target: LAMA2; (+) strand; PAM type: NRG; PAM sequence: TGG
aatagagactagggaaacaa

SEQ ID NO: 138836 - DNA, 20 bp, Artificial Sequence
  Description of Artificial Sequence: Synthetic oligonucleotide
  Target: LAMA2; (+) strand; PAM type: NRG; PAM sequence: AAG
agagactagggaaacaatgg

SEQ ID NO: 138837 - DNA, 20 bp, Artificial Sequence
  Description of Artificial Sequence: Synthetic oligonucleotide
  Target: LAMA2; (+) strand; PAM type: NRG; PAM sequence: GAG
agactagggaaacaatggaa

SEQ ID NO: 138838 - DNA, 20 bp, Artificial Sequence
  Description of Artificial Sequence: Synthetic oligonucleotide
  Target: LAMA2; (+) strand; PAM type: NRG; PAM sequence: TAG
agggaaacaatggaagagat

SEQ ID NO: 138839 - DNA, 20 bp, Artificial Sequence
  Description of Artificial Sequence: Synthetic oligonucleotide
  Target: LAMA2; (+) strand; PAM type: NRG; PAM sequence: TGG
agattagcaaaactgtcact

SEQ ID NO: 138840 - DNA, 20 bp, Artificial Sequence
  Description of Artificial Sequence: Synthetic oligonucleotide
  Target: LAMA2; (+) strand; PAM type: NRG; PAM sequence: GGG
gattagcaaaactgtcactt

SEQ ID NO: 138841 - DNA, 20 bp, Artificial Sequence
  Description of Artificial Sequence: Synthetic oligonucleotide
  Target: LAMA2; (+) strand; PAM type: NRG; PAM sequence: TGG
caaaactgtcacttgggttt

SEQ ID NO: 138842 - DNA, 20 bp, Artificial Sequence
  Description of Artificial Sequence: Synthetic oligonucleotide
  Target: LAMA2; (+) strand; PAM type: NRG; PAM sequence: AAG
acttgggttttggaaaatat

SEQ ID NO: 138843 - DNA, 20 bp, Artificial Sequence
  Description of Artificial Sequence: Synthetic oligonucleotide
  Target: LAMA2; (+) strand; PAM type: NRG; PAM sequence: AAG
aatataagctaaattgacaa

SEQ ID NO: 138844 - DNA, 20 bp, Artificial Sequence
  Description of Artificial Sequence: Synthetic oligonucleotide
  Target: LAMA2; (+) strand; PAM type: NRG; PAM sequence: TAG
aagctaaattgacaaaagtt

SEQ ID NO: 138845 - DNA, 20 bp, Artificial Sequence
  Description of Artificial Sequence: Synthetic oligonucleotide
  Target: LAMA2; (+) strand; PAM type: NRG; PAM sequence: AAG
aaagtttagctaaactttct

SEQ ID NO: 138846 - DNA, 20 bp, Artificial Sequence
  Description of Artificial Sequence: Synthetic oligonucleotide
  Target: LAMA2; (+) strand; PAM type: NRG; PAM sequence: AAG
agctaaactttctaagaaaa

SEQ ID NO: 138847 - DNA, 20 bp, Artificial Sequence
  Description of Artificial Sequence: Synthetic oligonucleotide
  Target: LAMA2; (+) strand; PAM type: NRG; PAM sequence: CAG
aactttctaagaaaaaagat

SEQ ID NO: 138848 - DNA, 20 bp, Artificial Sequence
  Description of Artificial Sequence: Synthetic oligonucleotide
  Target: LAMA2; (+) strand; PAM type: NRG; PAM sequence: AAG
agaaaaaagatcagaattga

SEQ ID NO: 138849 - DNA, 20 bp, Artificial Sequence
  Description of Artificial Sequence: Synthetic oligonucleotide
  Target: LAMA2; (+) strand; PAM type: NRG; PAM sequence: GAG
aaaaaagatcagaattgaaa

SEQ ID NO: 138850 - DNA, 20 bp, Artificial Sequence
  Description of Artificial Sequence: Synthetic oligonucleotide
  Target: LAMA2; (+) strand; PAM type: NRG; PAM sequence: AGG
aaaaagatcagaattgaaag

SEQ ID NO: 138851 - DNA, 20 bp, Artificial Sequence
  Description of Artificial Sequence: Synthetic oligonucleotide
  Target: LAMA2; (+) strand; PAM type: NRG; PAM sequence: GAG
aaagatcagaattgaaagag

SEQ ID NO: 138852 - DNA, 20 bp, Artificial Sequence
  Description of Artificial Sequence: Synthetic oligonucleotide
  Target: LAMA2; (+) strand; PAM type: NRG; PAM sequence: CAG
agacattactactgatactt

SEQ ID NO: 138853 - DNA, 20 bp, Artificial Sequence
  Description of Artificial Sequence: Synthetic oligonucleotide
  Target: LAMA2; (+) strand; PAM type: NRG; PAM sequence: AAG
actgatacttcagaaataca

SEQ ID NO: 138854 - DNA, 20 bp, Artificial Sequence
  Description of Artificial Sequence: Synthetic oligonucleotide
  Target: LAMA2; (+) strand; PAM type: NRG; PAM sequence: AGG
ctgatacttcagaaatacaa

SEQ ID NO: 138855 - DNA, 20 bp, Artificial Sequence
  Description of Artificial Sequence: Synthetic oligonucleotide
  Target: LAMA2; (+) strand; PAM type: NRG; PAM sequence: AAG
tcagaaatacaaaggatcat

SEQ ID NO: 138856 - DNA, 20 bp, Artificial Sequence
  Description of Artificial Sequence: Synthetic oligonucleotide
  Target: LAMA2; (+) strand; PAM type: NRG; PAM sequence: TGG
acaattatatgccaacaaac

SEQ ID NO: 138857 - DNA, 20 bp, Artificial Sequence
  Description of Artificial Sequence: Synthetic oligonucleotide
  Target: LAMA2; (+) strand; PAM type: NRG; PAM sequence: TAG
tgccaacaaactggataacc

SEQ ID NO: 138858 - DNA, 20 bp, Artificial Sequence
  Description of Artificial Sequence: Synthetic oligonucleotide
  Target: LAMA2; (+) strand; PAM type: NRG; PAM sequence: TGG
actggataacctagaaaaaa

SEQ ID NO: 138859 - DNA, 20 bp, Artificial Sequence
  Description of Artificial Sequence: Synthetic oligonucleotide
  Target: LAMA2; (+) strand; PAM type: NRG; PAM sequence: TAG
agaaaaaatggaaaaattcc

SEQ ID NO: 138860 - DNA, 20 bp, Artificial Sequence
  Description of Artificial Sequence: Synthetic oligonucleotide
  Target: LAMA2; (+) strand; PAM type: NRG; PAM sequence: AAG
cctactaacactgaatcatg

SEQ ID NO: 138861 - DNA, 20 bp, Artificial Sequence
  Description of Artificial Sequence: Synthetic oligonucleotide
  Target: LAMA2; (+) strand; PAM type: NRG; PAM sequence: TAG
aacactgaatcatgaagaaa

SEQ ID NO: 138862 - DNA, 20 bp, Artificial Sequence
  Description of Artificial Sequence: Synthetic oligonucleotide
  Target: LAMA2; (+) strand; PAM type: NRG; PAM sequence: GAG
catgaagaaatagataacat

SEQ ID NO: 138863 - DNA, 20 bp, Artificial Sequence
  Description of Artificial Sequence: Synthetic oligonucleotide
  Target: LAMA2; (+) strand; PAM type: NRG; PAM sequence: CAG
gaagaaatagataacatgag

SEQ ID NO: 138864 - DNA, 20 bp, Artificial Sequence
  Description of Artificial Sequence: Synthetic oligonucleotide
  Target: LAMA2; (+) strand; PAM type: NRG; PAM sequence: AAG
ataacatgagcagatcaatg

SEQ ID NO: 138865 - DNA, 20 bp, Artificial Sequence
  Description of Artificial Sequence: Synthetic oligonucleotide
  Target: LAMA2; (+) strand; PAM type: NRG; PAM sequence: GAG
aacatgagcagatcaatgaa

SEQ ID NO: 138866 - DNA, 20 bp, Artificial Sequence
  Description of Artificial Sequence: Synthetic oligonucleotide
  Target: LAMA2; (+) strand; PAM type: NRG; PAM sequence: AAG
tgagcagatcaatgaagagt

SEQ ID NO: 138867 - DNA, 20 bp, Artificial Sequence
  Description of Artificial Sequence: Synthetic oligonucleotide
  Target: LAMA2; (+) strand; PAM type: NRG; PAM sequence: AGG
gagcagatcaatgaagagta

SEQ ID NO: 138868 - DNA, 20 bp, Artificial Sequence
  Description of Artificial Sequence: Synthetic oligonucleotide
  Target: LAMA2; (+) strand; PAM type: NRG; PAM sequence: GAG
gcagatcaatgaagagtaag

SEQ ID NO: 138869 - DNA, 20 bp, Artificial Sequence
  Description of Artificial Sequence: Synthetic oligonucleotide
  Target: LAMA2; (+) strand; PAM type: NRG; PAM sequence: CAG
gaagagtaaggagattgaat

SEQ ID NO: 138870 - DNA, 20 bp, Artificial Sequence
  Description of Artificial Sequence: Synthetic oligonucleotide
  Target: LAMA2; (+) strand; PAM type: NRG; PAM sequence: AGG
aagagtaaggagattgaatc

SEQ ID NO: 138871 - DNA, 20 bp, Artificial Sequence
  Description of Artificial Sequence: Synthetic oligonucleotide
  Target: LAMA2; (+) strand; PAM type: NRG; PAM sequence: AAG
aaggagattgaatcaggaat

SEQ ID NO: 138872 - DNA, 20 bp, Artificial Sequence
  Description of Artificial Sequence: Synthetic oligonucleotide
  Target: LAMA2; (+) strand; PAM type: NRG; PAM sequence: AAG
gaataagaaataccctatca

SEQ ID NO: 138873 - DNA, 20 bp, Artificial Sequence
  Description of Artificial Sequence: Synthetic oligonucleotide
  Target: LAMA2; (+) strand; PAM type: NRG; PAM sequence: AAG
agaaataccctatcaaagaa

SEQ ID NO: 138874 - DNA, 20 bp, Artificial Sequence
  Description of Artificial Sequence: Synthetic oligonucleotide
  Target: LAMA2; (+) strand; PAM type: NRG; PAM sequence: CAG
taccctatcaaagaaaagcc

SEQ ID NO: 138875 - DNA, 20 bp, Artificial Sequence
  Description of Artificial Sequence: Synthetic oligonucleotide
  Target: LAMA2; (+) strand; PAM type: NRG; PAM sequence: TGG
aagaaaagcccagaacctga

SEQ ID NO: 138876 - DNA, 20 bp, Artificial Sequence
  Description of Artificial Sequence: Synthetic oligonucleotide
  Target: LAMA2; (+) strand; PAM type: NRG; PAM sequence: AAG
ctgaattctaccaaacattt

SEQ ID NO: 138877 - DNA, 20 bp, Artificial Sequence
  Description of Artificial Sequence: Synthetic oligonucleotide
  Target: LAMA2; (+) strand; PAM type: NRG; PAM sequence: AGG
tgaattctaccaaacattta

SEQ ID NO: 138878 - DNA, 20 bp, Artificial Sequence
  Description of Artificial Sequence: Synthetic oligonucleotide
  Target: LAMA2; (+) strand; PAM type: NRG; PAM sequence: AAG
caaaatcctccaaataactg

SEQ ID NO: 138879 - DNA, 20 bp, Artificial Sequence
  Description of Artificial Sequence: Synthetic oligonucleotide
  Target: LAMA2; (+) strand; PAM type: NRG; PAM sequence: GAG
tcctccaaataactgaagat

SEQ ID NO: 138880 - DNA, 20 bp, Artificial Sequence
  Description of Artificial Sequence: Synthetic oligonucleotide
  Target: LAMA2; (+) strand; PAM type: NRG; PAM sequence: AGG
cctccaaataactgaagatg

SEQ ID NO: 138881 - DNA, 20 bp, Artificial Sequence
  Description of Artificial Sequence: Synthetic oligonucleotide
  Target: LAMA2; (+) strand; PAM type: NRG; PAM sequence: GGG
ctccaaataactgaagatga

SEQ ID NO: 138882 - DNA, 20 bp, Artificial Sequence
  Description of Artificial Sequence: Synthetic oligonucleotide
  Target: LAMA2; (+) strand; PAM type: NRG; PAM sequence: GAG
ccaaataactgaagatgagg

SEQ ID NO: 138883 - DNA, 20 bp, Artificial Sequence
  Description of Artificial Sequence: Synthetic oligonucleotide
  Target: LAMA2; (+) strand; PAM type: NRG; PAM sequence: GAG
tacttccaaacttattttat

SEQ ID NO: 138884 - DNA, 20 bp, Artificial Sequence
  Description of Artificial Sequence: Synthetic oligonucleotide
  Target: LAMA2; (+) strand; PAM type: NRG; PAM sequence: AGG
acttccaaacttattttatg

SEQ ID NO: 138885 - DNA, 20 bp, Artificial Sequence
  Description of Artificial Sequence: Synthetic oligonucleotide
  Target: LAMA2; (+) strand; PAM type: NRG; PAM sequence: CAG
ccaaacttattttatgaggc

SEQ ID NO: 138886 - DNA, 20 bp, Artificial Sequence
  Description of Artificial Sequence: Synthetic oligonucleotide
  Target: LAMA2; (+) strand; PAM type: NRG; PAM sequence: TAG
tattttatgaggccagccat

SEQ ID NO: 138887 - DNA, 20 bp, Artificial Sequence
  Description of Artificial Sequence: Synthetic oligonucleotide
  Target: LAMA2; (+) strand; PAM type: NRG; PAM sequence: AAG
cagccattagcctgatacca

SEQ ID NO: 138888 - DNA, 20 bp, Artificial Sequence
  Description of Artificial Sequence: Synthetic oligonucleotide
  Target: LAMA2; (+) strand; PAM type: NRG; PAM sequence: AAG
ttagcctgataccaaagcca

SEQ ID NO: 138889 - DNA, 20 bp, Artificial Sequence
  Description of Artificial Sequence: Synthetic oligonucleotide
  Target: LAMA2; (+) strand; PAM type: NRG; PAM sequence: AAG
accaaagccaaagacactgc

SEQ ID NO: 138890 - DNA, 20 bp, Artificial Sequence
  Description of Artificial Sequence: Synthetic oligonucleotide
  Target: LAMA2; (+) strand; PAM type: NRG; PAM sequence: AAG
agccaaagacactgcaagaa

SEQ ID NO: 138891 - DNA, 20 bp, Artificial Sequence
  Description of Artificial Sequence: Synthetic oligonucleotide
  Target: LAMA2; (+) strand; PAM type: NRG; PAM sequence: CAG
actgcaagaaaagtacatta

SEQ ID NO: 138892 - DNA, 20 bp, Artificial Sequence
  Description of Artificial Sequence: Synthetic oligonucleotide
  Target: LAMA2; (+) strand; PAM type: NRG; PAM sequence: TAG
atcaatatttttgatgaaca

SEQ ID NO: 138893 - DNA, 20 bp, Artificial Sequence
  Description of Artificial Sequence: Synthetic oligonucleotide
  Target: LAMA2; (+) strand; PAM type: NRG; PAM sequence: AAG
acatagatgcaaaactcctc

SEQ ID NO: 138894 - DNA, 20 bp, Artificial Sequence
  Description of Artificial Sequence: Synthetic oligonucleotide
  Target: LAMA2; (+) strand; PAM type: NRG; PAM sequence: CAG
aaatactaacaaaccaaatt

SEQ ID NO: 138895 - DNA, 20 bp, Artificial Sequence
  Description of Artificial Sequence: Synthetic oligonucleotide
  Target: LAMA2; (+) strand; PAM type: NRG; PAM sequence: CAG
tactaacaaaccaaattcag

SEQ ID NO: 138896 - DNA, 20 bp, Artificial Sequence
  Description of Artificial Sequence: Synthetic oligonucleotide
  Target: LAMA2; (+) strand; PAM type: NRG; PAM sequence: AAG
caaattcagcagcacattaa

SEQ ID NO: 138897 - DNA, 20 bp, Artificial Sequence
  Description of Artificial Sequence: Synthetic oligonucleotide
  Target: LAMA2; (+) strand; PAM type: NRG; PAM sequence: AGG
aaattcagcagcacattaaa

SEQ ID NO: 138898 - DNA, 20 bp, Artificial Sequence
  Description of Artificial Sequence: Synthetic oligonucleotide
  Target: LAMA2; (+) strand; PAM type: NRG; PAM sequence: AAG
aaggatcattcactgtgatc

SEQ ID NO: 138899 - DNA, 20 bp, Artificial Sequence
  Description of Artificial Sequence: Synthetic oligonucleotide
  Target: LAMA2; (+) strand; PAM type: NRG; PAM sequence: TGG
gatcattcactgtgatcaag

SEQ ID NO: 138900 - DNA, 20 bp, Artificial Sequence
  Description of Artificial Sequence: Synthetic oligonucleotide
  Target: LAMA2; (+) strand; PAM type: NRG; PAM sequence: GGG
atcattcactgtgatcaagt

SEQ ID NO: 138901 - DNA, 20 bp, Artificial Sequence
  Description of Artificial Sequence: Synthetic oligonucleotide
  Target: LAMA2; (+) strand; PAM type: NRG; PAM sequence: CAG
tgatcaagtgggatcactac

SEQ ID NO: 138902 - DNA, 20 bp, Artificial Sequence
  Description of Artificial Sequence: Synthetic oligonucleotide
  Target: LAMA2; (+) strand; PAM type: NRG; PAM sequence: AGG
gatcaagtgggatcactacc

SEQ ID NO: 138903 - DNA, 20 bp, Artificial Sequence
  Description of Artificial Sequence: Synthetic oligonucleotide
  Target: LAMA2; (+) strand; PAM type: NRG; PAM sequence: GGG
atcaagtgggatcactacca

SEQ ID NO: 138904 - DNA, 20 bp, Artificial Sequence
  Description of Artificial Sequence: Synthetic oligonucleotide
  Target: LAMA2; (+) strand; PAM type: NRG; PAM sequence: TGG
gatcactaccagggatgcca

SEQ ID NO: 138905 - DNA, 20 bp, Artificial Sequence
  Description of Artificial Sequence: Synthetic oligonucleotide
  Target: LAMA2; (+) strand; PAM type: NRG; PAM sequence: TAG
ataaatgtgataccttacat

SEQ ID NO: 138906 - DNA, 20 bp, Artificial Sequence
  Description of Artificial Sequence: Synthetic oligonucleotide
  Target: LAMA2; (+) strand; PAM type: NRG; PAM sequence: TAG
aatgtgataccttacattag

SEQ ID NO: 138907 - DNA, 20 bp, Artificial Sequence
  Description of Artificial Sequence: Synthetic oligonucleotide
  Target: LAMA2; (+) strand; PAM type: NRG; PAM sequence: AAG
taccttacattagtagaatg

SEQ ID NO: 138908 - DNA, 20 bp, Artificial Sequence
  Description of Artificial Sequence: Synthetic oligonucleotide
  Target: LAMA2; (+) strand; PAM type: NRG; PAM sequence: AGG
accttacattagtagaatga

SEQ ID NO: 138909 - DNA, 20 bp, Artificial Sequence
  Description of Artificial Sequence: Synthetic oligonucleotide
  Target: LAMA2; (+) strand; PAM type: NRG; PAM sequence: TAG
aaatcatatgatcatctcaa

SEQ ID NO: 138910 - DNA, 20 bp, Artificial Sequence
  Description of Artificial Sequence: Synthetic oligonucleotide
  Target: LAMA2; (+) strand; PAM type: NRG; PAM sequence: CAG
tatgatcatctcaatagatg

SEQ ID NO: 138911 - DNA, 20 bp, Artificial Sequence
  Description of Artificial Sequence: Synthetic oligonucleotide
  Target: LAMA2; (+) strand; PAM type: NRG; PAM sequence: AAG
catctcaatagatgcagaaa

SEQ ID NO: 138912 - DNA, 20 bp, Artificial Sequence
  Description of Artificial Sequence: Synthetic oligonucleotide
  Target: LAMA2; (+) strand; PAM type: NRG; PAM sequence: AAG
tcaacattgtttaatgataa

SEQ ID NO: 138913 - DNA, 20 bp, Artificial Sequence
  Description of Artificial Sequence: Synthetic oligonucleotide
  Target: LAMA2; (+) strand; PAM type: NRG; PAM sequence: TAG
gataaaagctgtcaacaaat

SEQ ID NO: 138914 - DNA, 20 bp, Artificial Sequence
  Description of Artificial Sequence: Synthetic oligonucleotide
  Target: LAMA2; (+) strand; PAM type: NRG; PAM sequence: TAG
agctgtcaacaaattagcta

SEQ ID NO: 138915 - DNA, 20 bp, Artificial Sequence
  Description of Artificial Sequence: Synthetic oligonucleotide
  Target: LAMA2; (+) strand; PAM type: NRG; PAM sequence: AAG
tgtcaacaaattagctatag

SEQ ID NO: 138916 - DNA, 20 bp, Artificial Sequence
  Description of Artificial Sequence: Synthetic oligonucleotide
  Target: LAMA2; (+) strand; PAM type: NRG; PAM sequence: AGG
gtcaacaaattagctataga

SEQ ID NO: 138917 - DNA, 20 bp, Artificial Sequence
  Description of Artificial Sequence: Synthetic oligonucleotide
  Target: LAMA2; (+) strand; PAM type: NRG; PAM sequence: AAG
gaatgtacgtcaacataata

SEQ ID NO: 138918 - DNA, 20 bp, Artificial Sequence
  Description of Artificial Sequence: Synthetic oligonucleotide
  Target: LAMA2; (+) strand; PAM type: NRG; PAM sequence: CAG
gactgtatatgacacatcct

SEQ ID NO: 138919 - DNA, 20 bp, Artificial Sequence
  Description of Artificial Sequence: Synthetic oligonucleotide
  Target: LAMA2; (+) strand; PAM type: NRG; PAM sequence: TAG
tcagctaacatcatactcaa

SEQ ID NO: 138920 - DNA, 20 bp, Artificial Sequence
  Description of Artificial Sequence: Synthetic oligonucleotide
  Target: LAMA2; (+) strand; PAM type: NRG; PAM sequence: AAG
acatcatactcaatagtgaa

SEQ ID NO: 138921 - DNA, 20 bp, Artificial Sequence
  Description of Artificial Sequence: Synthetic oligonucleotide
  Target: LAMA2; (+) strand; PAM type: NRG; PAM sequence: AAG
actcaatagtgaaaagctga

SEQ ID NO: 138922 - DNA, 20 bp, Artificial Sequence
  Description of Artificial Sequence: Synthetic oligonucleotide
  Target: LAMA2; (+) strand; PAM type: NRG; PAM sequence: AGG
ctcaatagtgaaaagctgaa

SEQ ID NO: 138923 - DNA, 20 bp, Artificial Sequence
  Description of Artificial Sequence: Synthetic oligonucleotide
  Target: LAMA2; (+) strand; PAM type: NRG; PAM sequence: AAG
aagctgaaaggtttttctct

SEQ ID NO: 138924 - DNA, 20 bp, Artificial Sequence
  Description of Artificial Sequence: Synthetic oligonucleotide
  Target: LAMA2; (+) strand; PAM type: NRG; PAM sequence: CAG
gaaaggtttttctctaagat

SEQ ID NO: 138925 - DNA, 20 bp, Artificial Sequence
  Description of Artificial Sequence: Synthetic oligonucleotide
  Target: LAMA2; (+) strand; PAM type: NRG; PAM sequence: AGG
aaaggtttttctctaagatc

SEQ ID NO: 138926 - DNA, 20 bp, Artificial Sequence
  Description of Artificial Sequence: Synthetic oligonucleotide
  Target: LAMA2; (+) strand; PAM type: NRG; PAM sequence: AAG
ttttctctaagatcaggaat

SEQ ID NO: 138927 - DNA, 20 bp, Artificial Sequence
  Description of Artificial Sequence: Synthetic oligonucleotide
  Target: LAMA2; (+) strand; PAM type: NRG; PAM sequence: AAG
tctaagatcaggaataagac

SEQ ID NO: 138928 - DNA, 20 bp, Artificial Sequence
  Description of Artificial Sequence: Synthetic oligonucleotide
  Target: LAMA2; (+) strand; PAM type: NRG; PAM sequence: AGG
ctaagatcaggaataagaca

SEQ ID NO: 138929 - DNA, 20 bp, Artificial Sequence
  Description of Artificial Sequence: Synthetic oligonucleotide
  Target: LAMA2; (+) strand; PAM type: NRG; PAM sequence: TGG
ccacttgcaccacttctatt

SEQ ID NO: 138930 - DNA, 20 bp, Artificial Sequence
  Description of Artificial Sequence: Synthetic oligonucleotide
  Target: LAMA2; (+) strand; PAM type: NRG; PAM sequence: TGG
acttctatttggcataatac

SEQ ID NO: 138931 - DNA, 20 bp, Artificial Sequence
  Description of Artificial Sequence: Synthetic oligonucleotide
  Target: LAMA2; (+) strand; PAM type: NRG; PAM sequence: AAG
tctatttggcataatactgg

SEQ ID NO: 138932 - DNA, 20 bp, Artificial Sequence
  Description of Artificial Sequence: Synthetic oligonucleotide
  Target: LAMA2; (+) strand; PAM type: NRG; PAM sequence: TAG
tggcataatactggaagacc

SEQ ID NO: 138933 - DNA, 20 bp, Artificial Sequence
  Description of Artificial Sequence: Synthetic oligonucleotide
  Target: LAMA2; (+) strand; PAM type: NRG; PAM sequence: CAG
ataatactggaagacctagc

SEQ ID NO: 138934 - DNA, 20 bp, Artificial Sequence
  Description of Artificial Sequence: Synthetic oligonucleotide
  Target: LAMA2; (+) strand; PAM type: NRG; PAM sequence: GAG
aatactggaagacctagcca

SEQ ID NO: 138935 - DNA, 20 bp, Artificial Sequence
  Description of Artificial Sequence: Synthetic oligonucleotide
  Target: LAMA2; (+) strand; PAM type: NRG; PAM sequence: CAG
gaagacctagccagagaaat

SEQ ID NO: 138936 - DNA, 20 bp, Artificial Sequence
  Description of Artificial Sequence: Synthetic oligonucleotide
  Target: LAMA2; (+) strand; PAM type: NRG; PAM sequence: AGG
aagacctagccagagaaatc

SEQ ID NO: 138937 - DNA, 20 bp, Artificial Sequence
  Description of Artificial Sequence: Synthetic oligonucleotide
  Target: LAMA2; (+) strand; PAM type: NRG; PAM sequence: AAG
ccagagaaatcaggcaaaaa

SEQ ID NO: 138938 - DNA, 20 bp, Artificial Sequence
  Description of Artificial Sequence: Synthetic oligonucleotide
  Target: LAMA2; (+) strand; PAM type: NRG; PAM sequence: AAG
aattgtcatcaaaattgaaa

SEQ ID NO: 138939 - DNA, 20 bp, Artificial Sequence
  Description of Artificial Sequence: Synthetic oligonucleotide
  Target: LAMA2; (+) strand; PAM type: NRG; PAM sequence: AAG
catcaaaattgaaaaagaaa

SEQ ID NO: 138940 - DNA, 20 bp, Artificial Sequence
  Description of Artificial Sequence: Synthetic oligonucleotide
  Target: LAMA2; (+) strand; PAM type: NRG; PAM sequence: AGG
atcaaaattgaaaaagaaaa

SEQ ID NO: 138941 - DNA, 20 bp, Artificial Sequence
  Description of Artificial Sequence: Synthetic oligonucleotide
  Target: LAMA2; (+) strand; PAM type: NRG; PAM sequence: AAG
aattgaaaaagaaaaaggta

SEQ ID NO: 138942 - DNA, 20 bp, Artificial Sequence
  Description of Artificial Sequence: Synthetic oligonucleotide
  Target: LAMA2; (+) strand; PAM type: NRG; PAM sequence: CAG
aggtaaagtgtctctttttg

SEQ ID NO: 138943 - DNA, 20 bp, Artificial Sequence
  Description of Artificial Sequence: Synthetic oligonucleotide
  Target: LAMA2; (+) strand; PAM type: NRG; PAM sequence: TAG
agatgacataatcttacata

SEQ ID NO: 138944 - DNA, 20 bp, Artificial Sequence
  Description of Artificial Sequence: Synthetic oligonucleotide
  Target: LAMA2; (+) strand; PAM type: NRG; PAM sequence: TAG
gactccaccaaaataactgt

SEQ ID NO: 138945 - DNA, 20 bp, Artificial Sequence
  Description of Artificial Sequence: Synthetic oligonucleotide
  Target: LAMA2; (+) strand; PAM type: NRG; PAM sequence: TAG
aataaacaaattctgtaaat

SEQ ID NO: 138946 - DNA, 20 bp, Artificial Sequence
  Description of Artificial Sequence: Synthetic oligonucleotide
  Target: LAMA2; (+) strand; PAM type: NRG; PAM sequence: CAG
aaacaaattctgtaaattag

SEQ ID NO: 138947 - DNA, 20 bp, Artificial Sequence
  Description of Artificial Sequence: Synthetic oligonucleotide
  Target: LAMA2; (+) strand; PAM type: NRG; PAM sequence: AGG
aacaaattctgtaaattagc

SEQ ID NO: 138948 - DNA, 20 bp, Artificial Sequence
  Description of Artificial Sequence: Synthetic oligonucleotide
  Target: LAMA2; (+) strand; PAM type: NRG; PAM sequence: TAG
caaaatcaatatactaaaat

SEQ ID NO: 138949 - DNA, 20 bp, Artificial Sequence
  Description of Artificial Sequence: Synthetic oligonucleotide
  Target: LAMA2; (+) strand; PAM type: NRG; PAM sequence: GAG
caacatttccataaactaac

SEQ ID NO: 138950 - DNA, 20 bp, Artificial Sequence
  Description of Artificial Sequence: Synthetic oligonucleotide
  Target: LAMA2; (+) strand; PAM type: NRG; PAM sequence: AGG
aacatttccataaactaacg

SEQ ID NO: 138951 - DNA, 20 bp, Artificial Sequence
  Description of Artificial Sequence: Synthetic oligonucleotide
  Target: LAMA2; (+) strand; PAM type: NRG; PAM sequence: TAG
taaaataatcccattcacca

SEQ ID NO: 138952 - DNA, 20 bp, Artificial Sequence
  Description of Artificial Sequence: Synthetic oligonucleotide
  Target: LAMA2; (+) strand; PAM type: NRG; PAM sequence: AAG
atcccattcaccatagctaa

SEQ ID NO: 138953 - DNA, 20 bp, Artificial Sequence
  Description of Artificial Sequence: Synthetic oligonucleotide
  Target: LAMA2; (+) strand; PAM type: NRG; PAM sequence: TGG
taaaagaaaaataaaaaatt

SEQ ID NO: 138954 - DNA, 20 bp, Artificial Sequence
  Description of Artificial Sequence: Synthetic oligonucleotide
  Target: LAMA2; (+) strand; PAM type: NRG; PAM sequence: AAG
atttggtaataaatttaacc

SEQ ID NO: 138955 - DNA, 20 bp, Artificial Sequence
  Description of Artificial Sequence: Synthetic oligonucleotide
  Target: LAMA2; (+) strand; PAM type: NRG; PAM sequence: GAG
ttggtaataaatttaaccaa

SEQ ID NO: 138956 - DNA, 20 bp, Artificial Sequence
  Description of Artificial Sequence: Synthetic oligonucleotide
  Target: LAMA2; (+) strand; PAM type: NRG; PAM sequence: AGG
tggtaataaatttaaccaag

SEQ ID NO: 138957 - DNA, 20 bp, Artificial Sequence
  Description of Artificial Sequence: Synthetic oligonucleotide
  Target: LAMA2; (+) strand; PAM type: NRG; PAM sequence: TGG
ccaagaggattgctatgatt

SEQ ID NO: 138958 - DNA, 20 bp, Artificial Sequence
  Description of Artificial Sequence: Synthetic oligonucleotide
  Target: LAMA2; (+) strand; PAM type: NRG; PAM sequence: TGG
ccaataattcccatgtgttg

SEQ ID NO: 138959 - DNA, 20 bp, Artificial Sequence
  Description of Artificial Sequence: Synthetic oligonucleotide
  Target: LAMA2; (+) strand; PAM type: NRG; PAM sequence: GGG
caataattcccatgtgttgt

SEQ ID NO: 138960 - DNA, 20 bp, Artificial Sequence
  Description of Artificial Sequence: Synthetic oligonucleotide
  Target: LAMA2; (+) strand; PAM type: NRG; PAM sequence: GAG
ataattcccatgtgttgtgg

SEQ ID NO: 138961 - DNA, 20 bp, Artificial Sequence
  Description of Artificial Sequence: Synthetic oligonucleotide
  Target: LAMA2; (+) strand; PAM type: NRG; PAM sequence: AGG
taattcccatgtgttgtggg

SEQ ID NO: 138962 - DNA, 20 bp, Artificial Sequence
  Description of Artificial Sequence: Synthetic oligonucleotide
  Target: LAMA2; (+) strand; PAM type: NRG; PAM sequence: GGG
aattcccatgtgttgtggga

SEQ ID NO: 138963 - DNA, 20 bp, Artificial Sequence
  Description of Artificial Sequence: Synthetic oligonucleotide
  Target: LAMA2; (+) strand; PAM type: NRG; PAM sequence: TGG
catgtgttgtgggagggacc

SEQ ID NO: 138964 - DNA, 20 bp, Artificial Sequence
  Description of Artificial Sequence: Synthetic oligonucleotide
  Target: LAMA2; (+) strand; PAM type: NRG; PAM sequence: TGG
gtgttgtgggagggacctgg

SEQ ID NO: 138965 - DNA, 20 bp, Artificial Sequence
  Description of Artificial Sequence: Synthetic oligonucleotide
  Target: LAMA2; (+) strand; PAM type: NRG; PAM sequence: GGG
tgttgtgggagggacctggt

SEQ ID NO: 138966 - DNA, 20 bp, Artificial Sequence
  Description of Artificial Sequence: Synthetic oligonucleotide
  Target: LAMA2; (+) strand; PAM type: NRG; PAM sequence: GAG
ttgtgggagggacctggtgg

SEQ ID NO: 138967 - DNA, 20 bp, Artificial Sequence
  Description of Artificial Sequence: Synthetic oligonucleotide
  Target: LAMA2; (+) strand; PAM type: NRG; PAM sequence: TGG
gggagggacctggtgggaga

SEQ ID NO: 138968 - DNA, 20 bp, Artificial Sequence
  Description of Artificial Sequence: Synthetic oligonucleotide
  Target: LAMA2; (+) strand; PAM type: NRG; PAM sequence: TGG
ggtgggagatggctgaatca

SEQ ID NO: 138969 - DNA, 20 bp, Artificial Sequence
  Description of Artificial Sequence: Synthetic oligonucleotide
  Target: LAMA2; (+) strand; PAM type: NRG; PAM sequence: GGG
gtgggagatggctgaatcat

SEQ ID NO: 138970 - DNA, 20 bp, Artificial Sequence
  Description of Artificial Sequence: Synthetic oligonucleotide
  Target: LAMA2; (+) strand; PAM type: NRG; PAM sequence: GAG
gggagatggctgaatcatgg

SEQ ID NO: 138971 - DNA, 20 bp, Artificial Sequence
  Description of Artificial Sequence: Synthetic oligonucleotide
  Target: LAMA2; (+) strand; PAM type: NRG; PAM sequence: TGG
tttcccccatgctgttgtcg

SEQ ID NO: 138972 - DNA, 20 bp, Artificial Sequence
  Description of Artificial Sequence: Synthetic oligonucleotide
  Target: LAMA2; (+) strand; PAM type: NRG; PAM sequence: TAG
cccccatgctgttgtcgtgg

SEQ ID NO: 138973 - DNA, 20 bp, Artificial Sequence
  Description of Artificial Sequence: Synthetic oligonucleotide
  Target: LAMA2; (+) strand; PAM type: NRG; PAM sequence: AAG
gctgttgtcgtggtagtgaa

SEQ ID NO: 138974 - DNA, 20 bp, Artificial Sequence
  Description of Artificial Sequence: Synthetic oligonucleotide
  Target: LAMA2; (+) strand; PAM type: NRG; PAM sequence: GAG
gtggtagtgaaaagtctcat

SEQ ID NO: 138975 - DNA, 20 bp, Artificial Sequence
  Description of Artificial Sequence: Synthetic oligonucleotide
  Target: LAMA2; (+) strand; PAM type: NRG; PAM sequence: TGG
gtgaaaagtctcatgagatc

SEQ ID NO: 138976 - DNA, 20 bp, Artificial Sequence
  Description of Artificial Sequence: Synthetic oligonucleotide
  Target: LAMA2; (+) strand; PAM type: NRG; PAM sequence: TAG
aaaagtctcatgagatctgg

SEQ ID NO: 138977 - DNA, 20 bp, Artificial Sequence
  Description of Artificial Sequence: Synthetic oligonucleotide
  Target: LAMA2; (+) strand; PAM type: NRG; PAM sequence: CAG
atgagatctggtagttttat

SEQ ID NO: 138978 - DNA, 20 bp, Artificial Sequence
  Description of Artificial Sequence: Synthetic oligonucleotide
  Target: LAMA2; (+) strand; PAM type: NRG; PAM sequence: AGG
tgagatctggtagttttatc

SEQ ID NO: 138979 - DNA, 20 bp, Artificial Sequence
  Description of Artificial Sequence: Synthetic oligonucleotide
  Target: LAMA2; (+) strand; PAM type: NRG; PAM sequence: GGG
gagatctggtagttttatca

SEQ ID NO: 138980 - DNA, 20 bp, Artificial Sequence
  Description of Artificial Sequence: Synthetic oligonucleotide
  Target: LAMA2; (+) strand; PAM type: NRG; PAM sequence: GGG
agatctggtagttttatcag

SEQ ID NO: 138981 - DNA, 20 bp, Artificial Sequence
  Description of Artificial Sequence: Synthetic oligonucleotide
  Target: LAMA2; (+) strand; PAM type: NRG; PAM sequence: AAG
ttgcctgctgccatccatgt

SEQ ID NO: 138982 - DNA, 20 bp, Artificial Sequence
  Description of Artificial Sequence: Synthetic oligonucleotide
  Target: LAMA2; (+) strand; PAM type: NRG; PAM sequence: CAG
ctgctgccatccatgtaaga

SEQ ID NO: 138983 - DNA, 20 bp, Artificial Sequence
  Description of Artificial Sequence: Synthetic oligonucleotide
  Target: LAMA2; (+) strand; PAM type: NRG; PAM sequence: AGG
tgctgccatccatgtaagac

SEQ ID NO: 138984 - DNA, 20 bp, Artificial Sequence
  Description of Artificial Sequence: Synthetic oligonucleotide
  Target: LAMA2; (+) strand; PAM type: NRG; PAM sequence: GAG
ttaccttccaccatgattgt

SEQ ID NO: 138985 - DNA, 20 bp, Artificial Sequence
  Description of Artificial Sequence: Synthetic oligonucleotide
  Target: LAMA2; (+) strand; PAM type: NRG; PAM sequence: AGG
taccttccaccatgattgtg

SEQ ID NO: 138986 - DNA, 20 bp, Artificial Sequence
  Description of Artificial Sequence: Synthetic oligonucleotide
  Target: LAMA2; (+) strand; PAM type: NRG; PAM sequence: CAG
ccatgattgtgaggcttccc

SEQ ID NO: 138987 - DNA, 20 bp, Artificial Sequence
  Description of Artificial Sequence: Synthetic oligonucleotide
  Target: LAMA2; (+) strand; PAM type: NRG; PAM sequence: TGG
gtgaggcttccccagccaca

SEQ ID NO: 138988 - DNA, 20 bp, Artificial Sequence
  Description of Artificial Sequence: Synthetic oligonucleotide
  Target: LAMA2; (+) strand; PAM type: NRG; PAM sequence: AAG
ccccagccacatggaactat

SEQ ID NO: 138989 - DNA, 20 bp, Artificial Sequence
  Description of Artificial Sequence: Synthetic oligonucleotide
  Target: LAMA2; (+) strand; PAM type: NRG; PAM sequence: CAG
tctttcttttgtaaattgcc

SEQ ID NO: 138990 - DNA, 20 bp, Artificial Sequence
  Description of Artificial Sequence: Synthetic oligonucleotide
  Target: LAMA2; (+) strand; PAM type: NRG; PAM sequence: CAG
ttttgtaaattgcccagtct

SEQ ID NO: 138991 - DNA, 20 bp, Artificial Sequence
  Description of Artificial Sequence: Synthetic oligonucleotide
  Target: LAMA2; (+) strand; PAM type: NRG; PAM sequence: AGG
tttgtaaattgcccagtctc

SEQ ID NO: 138992 - DNA, 20 bp, Artificial Sequence
  Description of Artificial Sequence: Synthetic oligonucleotide
  Target: LAMA2; (+) strand; PAM type: NRG; PAM sequence: GAG
tttttttttttttttttttt

SEQ ID NO: 138993 - DNA, 20 bp, Artificial Sequence
  Description of Artificial Sequence: Synthetic oligonucleotide
  Target: LAMA2; (+) strand; PAM type: NRG; PAM sequence: CAG
ttttttttttttttgagacg

SEQ ID NO: 138994 - DNA, 20 bp, Artificial Sequence
  Description of Artificial Sequence: Synthetic oligonucleotide
  Target: LAMA2; (+) strand; PAM type: NRG; PAM sequence: CAG
cgcagtctcgctctgtcgcc

SEQ ID NO: 138995 - DNA, 20 bp, Artificial Sequence
  Description of Artificial Sequence: Synthetic oligonucleotide
  Target: LAMA2; (+) strand; PAM type: NRG; PAM sequence: AGG
gcagtctcgctctgtcgccc

SEQ ID NO: 138996 - DNA, 20 bp, Artificial Sequence
  Description of Artificial Sequence: Synthetic oligonucleotide
  Target: LAMA2; (+) strand; PAM type: NRG; PAM sequence: TGG
tctcgctctgtcgcccaggc

SEQ ID NO: 138997 - DNA, 20 bp, Artificial Sequence
  Description of Artificial Sequence: Synthetic oligonucleotide
  Target: LAMA2; (+) strand; PAM type: NRG; PAM sequence: GAG
tcgctctgtcgcccaggctg

SEQ ID NO: 138998 - DNA, 20 bp, Artificial Sequence
  Description of Artificial Sequence: Synthetic oligonucleotide
  Target: LAMA2; (+) strand; PAM type: NRG; PAM sequence: CAG
ctgtcgcccaggctggagtg

SEQ ID NO: 138999 - DNA, 20 bp, Artificial Sequence
  Description of Artificial Sequence: Synthetic oligonucleotide
  Target: LAMA2; (+) strand; PAM type: NRG; PAM sequence: TGG
tcgcccaggctggagtgcag

SEQ ID NO: 139000 - DNA, 20 bp, Artificial Sequence
  Description of Artificial Sequence: Synthetic oligonucleotide
  Target: LAMA2; (+) strand; PAM type: NRG; PAM sequence: CGG
cccaggctggagtgcagtgg

SEQ ID NO: 139001 - DNA, 20 bp, Artificial Sequence
  Description of Artificial Sequence: Synthetic oligonucleotide
  Target: LAMA2; (+) strand; PAM type: NRG; PAM sequence: GGG
ccaggctggagtgcagtggc

SEQ ID NO: 139002 - DNA, 20 bp, Artificial Sequence
  Description of Artificial Sequence: Synthetic oligonucleotide
  Target: LAMA2; (+) strand; PAM type: NRG; PAM sequence: CGG
ggagtgcagtggcgggatct

SEQ ID NO: 139003 - DNA, 20 bp, Artificial Sequence
  Description of Artificial Sequence: Synthetic oligonucleotide
  Target: LAMA2; (+) strand; PAM type: NRG; PAM sequence: AAG
gcgggatctcggctcactgc

SEQ ID NO: 139004 - DNA, 20 bp, Artificial Sequence
  Description of Artificial Sequence: Synthetic oligonucleotide
  Target: LAMA2; (+) strand; PAM type: NRG; PAM sequence: CGG
tcactgcaagctccgcctcc

SEQ ID NO: 139005 - DNA, 20 bp, Artificial Sequence
  Description of Artificial Sequence: Synthetic oligonucleotide
  Target: LAMA2; (+) strand; PAM type: NRG; PAM sequence: GGG
cactgcaagctccgcctccc

SEQ ID NO: 139006 - DNA, 20 bp, Artificial Sequence
  Description of Artificial Sequence: Synthetic oligonucleotide
  Target: LAMA2; (+) strand; PAM type: NRG; PAM sequence: CAG
ttcatgccattctcctgcct

SEQ ID NO: 139007 - DNA, 20 bp, Artificial Sequence
  Description of Artificial Sequence: Synthetic oligonucleotide
  Target: LAMA2; (+) strand; PAM type: NRG; PAM sequence: AAG
ttctcctgcctcagcctccc

SEQ ID NO: 139008 - DNA, 20 bp, Artificial Sequence
  Description of Artificial Sequence: Synthetic oligonucleotide
  Target: LAMA2; (+) strand; PAM type: NRG; PAM sequence: TAG
tcctgcctcagcctcccaag

SEQ ID NO: 139009 - DNA, 20 bp, Artificial Sequence
  Description of Artificial Sequence: Synthetic oligonucleotide
  Target: LAMA2; (+) strand; PAM type: NRG; PAM sequence: TGG
gcctcagcctcccaagtagc

SEQ ID NO: 139010 - DNA, 20 bp, Artificial Sequence
  Description of Artificial Sequence: Synthetic oligonucleotide
  Target: LAMA2; (+) strand; PAM type: NRG; PAM sequence: GGG
cctcagcctcccaagtagct

SEQ ID NO: 139011 - DNA, 20 bp, Artificial Sequence
  Description of Artificial Sequence: Synthetic oligonucleotide
  Target: LAMA2; (+) strand; PAM type: NRG; PAM sequence: CAG
ctcccaagtagctgggacta

SEQ ID NO: 139012 - DNA, 20 bp, Artificial Sequence
  Description of Artificial Sequence: Synthetic oligonucleotide
  Target: LAMA2; (+) strand; PAM type: NRG; PAM sequence: AGG
tcccaagtagctgggactac

SEQ ID NO: 139013 - DNA, 20 bp, Artificial Sequence
  Description of Artificial Sequence: Synthetic oligonucleotide
  Target: LAMA2; (+) strand; PAM type: NRG; PAM sequence: CGG
caggcgcccgccactacgcc

SEQ ID NO: 139014 - DNA, 20 bp, Artificial Sequence
  Description of Artificial Sequence: Synthetic oligonucleotide
  Target: LAMA2; (+) strand; PAM type: NRG; PAM sequence: TAG
cggctaattttttgtatttt

SEQ ID NO: 139015 - DNA, 20 bp, Artificial Sequence
  Description of Artificial Sequence: Synthetic oligonucleotide
  Target: LAMA2; (+) strand; PAM type: NRG; PAM sequence: TAG
ctaattttttgtatttttag

SEQ ID NO: 139016 - DNA, 20 bp, Artificial Sequence
  Description of Artificial Sequence: Synthetic oligonucleotide
  Target: LAMA2; (+) strand; PAM type: NRG; PAM sequence: GAG
aattttttgtatttttagta

SEQ ID NO: 139017 - DNA, 20 bp, Artificial Sequence
  Description of Artificial Sequence: Synthetic oligonucleotide
  Target: LAMA2; (+) strand; PAM type: NRG; PAM sequence: CGG
ttttgtatttttagtagaga

SEQ ID NO: 139018 - DNA, 20 bp, Artificial Sequence
  Description of Artificial Sequence: Synthetic oligonucleotide
  Target: LAMA2; (+) strand; PAM type: NRG; PAM sequence: GGG
tttgtatttttagtagagac

SEQ ID NO: 139019 - DNA, 20 bp, Artificial Sequence
  Description of Artificial Sequence: Synthetic oligonucleotide
  Target: LAMA2; (+) strand; PAM type: NRG; PAM sequence: GGG
ttgtatttttagtagagacg

SEQ ID NO: 139020 - DNA, 20 bp, Artificial Sequence
  Description of Artificial Sequence: Synthetic oligonucleotide
  Target: LAMA2; (+) strand; PAM type: NRG; PAM sequence: TAG
gagacggggtttcaccgttt

SEQ ID NO: 139021 - DNA, 20 bp, Artificial Sequence
  Description of Artificial Sequence: Synthetic oligonucleotide
  Target: LAMA2; (+) strand; PAM type: NRG; PAM sequence: CGG
cggggtttcaccgttttagc

SEQ ID NO: 139022 - DNA, 20 bp, Artificial Sequence
  Description of Artificial Sequence: Synthetic oligonucleotide
  Target: LAMA2; (+) strand; PAM type: NRG; PAM sequence: GGG
ggggtttcaccgttttagcc

SEQ ID NO: 139023 - DNA, 20 bp, Artificial Sequence
  Description of Artificial Sequence: Synthetic oligonucleotide
  Target: LAMA2; (+) strand; PAM type: NRG; PAM sequence: TGG
tttcaccgttttagccggga

SEQ ID NO: 139024 - DNA, 20 bp, Artificial Sequence
  Description of Artificial Sequence: Synthetic oligonucleotide
  Target: LAMA2; (+) strand; PAM type: NRG; PAM sequence: CGG
acctcgtgatccgcccgcct

SEQ ID NO: 139025 - DNA, 20 bp, Artificial Sequence
  Description of Artificial Sequence: Synthetic oligonucleotide
  Target: LAMA2; (+) strand; PAM type: NRG; PAM sequence: AAG
ccgcccgcctcggcctccca

SEQ ID NO: 139026 - DNA, 20 bp, Artificial Sequence
  Description of Artificial Sequence: Synthetic oligonucleotide
  Target: LAMA2; (+) strand; PAM type: NRG; PAM sequence: TGG
gcctcggcctcccaaagtgc

SEQ ID NO: 139027 - DNA, 20 bp, Artificial Sequence
  Description of Artificial Sequence: Synthetic oligonucleotide
  Target: LAMA2; (+) strand; PAM type: NRG; PAM sequence: GGG
cctcggcctcccaaagtgct

SEQ ID NO: 139028 - DNA, 20 bp, Artificial Sequence
  Description of Artificial Sequence: Synthetic oligonucleotide
  Target: LAMA2; (+) strand; PAM type: NRG; PAM sequence: CAG
ctcccaaagtgctgggatta

SEQ ID NO: 139029 - DNA, 20 bp, Artificial Sequence
  Description of Artificial Sequence: Synthetic oligonucleotide
  Target: LAMA2; (+) strand; PAM type: NRG; PAM sequence: AGG
tcccaaagtgctgggattac

SEQ ID NO: 139030 - DNA, 20 bp, Artificial Sequence
  Description of Artificial Sequence: Synthetic oligonucleotide
  Target: LAMA2; (+) strand; PAM type: NRG; PAM sequence: GAG
agtgctgggattacaggcgt

SEQ ID NO: 139031 - DNA, 20 bp, Artificial Sequence
  Description of Artificial Sequence: Synthetic oligonucleotide
  Target: LAMA2; (+) strand; PAM type: NRG; PAM sequence: CGG
caggcgtgagccaccgcgcc

SEQ ID NO: 139032 - DNA, 20 bp, Artificial Sequence
  Description of Artificial Sequence: Synthetic oligonucleotide
  Target: LAMA2; (+) strand; PAM type: NRG; PAM sequence: CAG
tgagccaccgcgcccggcct

SEQ ID NO: 139033 - DNA, 20 bp, Artificial Sequence
  Description of Artificial Sequence: Synthetic oligonucleotide
  Target: LAMA2; (+) strand; PAM type: NRG; PAM sequence: AGG
gagccaccgcgcccggcctc

SEQ ID NO: 139034 - DNA, 20 bp, Artificial Sequence
  Description of Artificial Sequence: Synthetic oligonucleotide
  Target: LAMA2; (+) strand; PAM type: NRG; PAM sequence: CAG
ggcctcaggtatgtctttat

SEQ ID NO: 139035 - DNA, 20 bp, Artificial Sequence
  Description of Artificial Sequence: Synthetic oligonucleotide
  Target: LAMA2; (+) strand; PAM type: NRG; PAM sequence: CAG
ctcaggtatgtctttatcag

SEQ ID NO: 139036 - DNA, 20 bp, Artificial Sequence
  Description of Artificial Sequence: Synthetic oligonucleotide
  Target: LAMA2; (+) strand; PAM type: NRG; PAM sequence: CAG
ctttatcagcagtgtaaaaa

SEQ ID NO: 139037 - DNA, 20 bp, Artificial Sequence
  Description of Artificial Sequence: Synthetic oligonucleotide
  Target: LAMA2; (+) strand; PAM type: NRG; PAM sequence: CAG
agtgtaaaaacagactaata

SEQ ID NO: 139038 - DNA, 20 bp, Artificial Sequence
  Description of Artificial Sequence: Synthetic oligonucleotide
  Target: LAMA2; (+) strand; PAM type: NRG; PAM sequence: GAG
tgtaaaaacagactaataca

SEQ ID NO: 139039 - DNA, 20 bp, Artificial Sequence
  Description of Artificial Sequence: Synthetic oligonucleotide
  Target: LAMA2; (+) strand; PAM type: NRG; PAM sequence: AAG
acagactaatacagagatga

SEQ ID NO: 139040 - DNA, 20 bp, Artificial Sequence
  Description of Artificial Sequence: Synthetic oligonucleotide
  Target: LAMA2; (+) strand; PAM type: NRG; PAM sequence: TGG
ctaatacagagatgaaagac

SEQ ID NO: 139041 - DNA, 20 bp, Artificial Sequence
  Description of Artificial Sequence: Synthetic oligonucleotide
  Target: LAMA2; (+) strand; PAM type: NRG; PAM sequence: CAG
gtacactgaaaactgtaaaa

SEQ ID NO: 139042 - DNA, 20 bp, Artificial Sequence
  Description of Artificial Sequence: Synthetic oligonucleotide
  Target: LAMA2; (+) strand; PAM type: NRG; PAM sequence: AAG
aacagtgatgaaataaattg

SEQ ID NO: 139043 - DNA, 20 bp, Artificial Sequence
  Description of Artificial Sequence: Synthetic oligonucleotide
  Target: LAMA2; (+) strand; PAM type: NRG; PAM sequence: TGG
aaattgaagacacaaataaa

SEQ ID NO: 139044 - DNA, 20 bp, Artificial Sequence
  Description of Artificial Sequence: Synthetic oligonucleotide
  Target: LAMA2; (+) strand; PAM type: NRG; PAM sequence: GGG
aattgaagacacaaataaat

SEQ ID NO: 139045 - DNA, 20 bp, Artificial Sequence
  Description of Artificial Sequence: Synthetic oligonucleotide
  Target: LAMA2; (+) strand; PAM type: NRG; PAM sequence: TGG
ggaaaacatcctgtgttttg

SEQ ID NO: 139046 - DNA, 20 bp, Artificial Sequence
  Description of Artificial Sequence: Synthetic oligonucleotide
  Target: LAMA2; (+) strand; PAM type: NRG; PAM sequence: CAG
atactactcaatgtgatcca

SEQ ID NO: 139047 - DNA, 20 bp, Artificial Sequence
  Description of Artificial Sequence: Synthetic oligonucleotide
  Target: LAMA2; (+) strand; PAM type: NRG; PAM sequence: CAG
ctcaatgtgatccacagatt

SEQ ID NO: 139048 - DNA, 20 bp, Artificial Sequence
  Description of Artificial Sequence: Synthetic oligonucleotide
  Target: LAMA2; (+) strand; PAM type: NRG; PAM sequence: CAG
aattccaatgacgtttttca

SEQ ID NO: 139049 - DNA, 20 bp, Artificial Sequence
  Description of Artificial Sequence: Synthetic oligonucleotide
  Target: LAMA2; (+) strand; PAM type: NRG; PAM sequence: TGG
aataaatcctaaatatttta

SEQ ID NO: 139050 - DNA, 20 bp, Artificial Sequence
  Description of Artificial Sequence: Synthetic oligonucleotide
  Target: LAMA2; (+) strand; PAM type: NRG; PAM sequence: AAG
aatattttatggaaccacaa

SEQ ID NO: 139051 - DNA, 20 bp, Artificial Sequence
  Description of Artificial Sequence: Synthetic oligonucleotide
  Target: LAMA2; (+) strand; PAM type: NRG; PAM sequence: AGG
atattttatggaaccacaaa

SEQ ID NO: 139052 - DNA, 20 bp, Artificial Sequence
  Description of Artificial Sequence: Synthetic oligonucleotide
  Target: LAMA2; (+) strand; PAM type: NRG; PAM sequence: AAG
tggaaccacaaaaggtgcta

SEQ ID NO: 139053 - DNA, 20 bp, Artificial Sequence
  Description of Artificial Sequence: Synthetic oligonucleotide
  Target: LAMA2; (+) strand; PAM type: NRG; PAM sequence: GAG
aaaggtgctaaagcaatctt

SEQ ID NO: 139054 - DNA, 20 bp, Artificial Sequence
  Description of Artificial Sequence: Synthetic oligonucleotide
  Target: LAMA2; (+) strand; PAM type: NRG; PAM sequence: AAG
ctaaagcaatcttgagcaaa

SEQ ID NO: 139055 - DNA, 20 bp, Artificial Sequence
  Description of Artificial Sequence: Synthetic oligonucleotide
  Target: LAMA2; (+) strand; PAM type: NRG; PAM sequence: AAG
aatcttgagcaaaaagaaca

SEQ ID NO: 139056 - DNA, 20 bp, Artificial Sequence
  Description of Artificial Sequence: Synthetic oligonucleotide
  Target: LAMA2; (+) strand; PAM type: NRG; PAM sequence: TGG
ttgagcaaaaagaacaaagc

SEQ ID NO: 139057 - DNA, 20 bp, Artificial Sequence
  Description of Artificial Sequence: Synthetic oligonucleotide
  Target: LAMA2; (+) strand; PAM type: NRG; PAM sequence: AAG
agcaaaaagaacaaagctgg

SEQ ID NO: 139058 - DNA, 20 bp, Artificial Sequence
  Description of Artificial Sequence: Synthetic oligonucleotide
  Target: LAMA2; (+) strand; PAM type: NRG; PAM sequence: AAG
tgactttaaaatatactaca

SEQ ID NO: 139059 - DNA, 20 bp, Artificial Sequence
  Description of Artificial Sequence: Synthetic oligonucleotide
  Target: LAMA2; (+) strand; PAM type: NRG; PAM sequence: TAG
taaaatatactacaaagctg

SEQ ID NO: 139060 - DNA, 20 bp, Artificial Sequence
  Description of Artificial Sequence: Synthetic oligonucleotide
  Target: LAMA2; (+) strand; PAM type: NRG; PAM sequence: CAG
caaagctgtagtaatcaaaa

SEQ ID NO: 139061 - DNA, 20 bp, Artificial Sequence
  Description of Artificial Sequence: Synthetic oligonucleotide
  Target: LAMA2; (+) strand; PAM type: NRG; PAM sequence: CAG
gtatgctgctaacttaaaaa

SEQ ID NO: 139062 - DNA, 20 bp, Artificial Sequence
  Description of Artificial Sequence: Synthetic oligonucleotide
  Target: LAMA2; (+) strand; PAM type: NRG; PAM sequence: TAG
ctaacttaaaaacagataca

SEQ ID NO: 139063 - DNA, 20 bp, Artificial Sequence
  Description of Artificial Sequence: Synthetic oligonucleotide
  Target: LAMA2; (+) strand; PAM type: NRG; PAM sequence: CAG
aaaacagatacatagaccaa

SEQ ID NO: 139064 - DNA, 20 bp, Artificial Sequence
  Description of Artificial Sequence: Synthetic oligonucleotide
  Target: LAMA2; (+) strand; PAM type: NRG; PAM sequence: TAG
agatacatagaccaacagaa

SEQ ID NO: 139065 - DNA, 20 bp, Artificial Sequence
  Description of Artificial Sequence: Synthetic oligonucleotide
  Target: LAMA2; (+) strand; PAM type: NRG; PAM sequence: TAG
catagaccaacagaatagaa

SEQ ID NO: 139066 - DNA, 20 bp, Artificial Sequence
  Description of Artificial Sequence: Synthetic oligonucleotide
  Target: LAMA2; (+) strand; PAM type: NRG; PAM sequence: AGG
atagaccaacagaatagaat

SEQ ID NO: 139067 - DNA, 20 bp, Artificial Sequence
  Description of Artificial Sequence: Synthetic oligonucleotide
  Target: LAMA2; (+) strand; PAM type: NRG; PAM sequence: GAG
agaccaacagaatagaatag

SEQ ID NO: 139068 - DNA, 20 bp, Artificial Sequence
  Description of Artificial Sequence: Synthetic oligonucleotide
  Target: LAMA2; (+) strand; PAM type: NRG; PAM sequence: CAG
aacagaatagaataggagcc

SEQ ID NO: 139069 - DNA, 20 bp, Artificial Sequence
  Description of Artificial Sequence: Synthetic oligonucleotide
  Target: LAMA2; (+) strand; PAM type: NRG; PAM sequence: AAG
aggagcccagaaataaatct

SEQ ID NO: 139070 - DNA, 20 bp, Artificial Sequence
  Description of Artificial Sequence: Synthetic oligonucleotide
  Target: LAMA2; (+) strand; PAM type: NRG; PAM sequence: TGG
gaaataaatctaagcattta

SEQ ID NO: 139071 - DNA, 20 bp, Artificial Sequence
  Description of Artificial Sequence: Synthetic oligonucleotide
  Target: LAMA2; (+) strand; PAM type: NRG; PAM sequence: AAG
tggtcaattgatttttgaca

SEQ ID NO: 139072 - DNA, 20 bp, Artificial Sequence
  Description of Artificial Sequence: Synthetic oligonucleotide
  Target: LAMA2; (+) strand; PAM type: NRG; PAM sequence: AAG
tgatttttgacaaagatgcc

SEQ ID NO: 139073 - DNA, 20 bp, Artificial Sequence
  Description of Artificial Sequence: Synthetic oligonucleotide
  Target: LAMA2; (+) strand; PAM type: NRG; PAM sequence: TGG
aagatgccaagaacacacaa

SEQ ID NO: 139074 - DNA, 20 bp, Artificial Sequence
  Description of Artificial Sequence: Synthetic oligonucleotide
  Target: LAMA2; (+) strand; PAM type: NRG; PAM sequence: GGG
agatgccaagaacacacaat

SEQ ID NO: 139075 - DNA, 20 bp, Artificial Sequence
  Description of Artificial Sequence: Synthetic oligonucleotide
  Target: LAMA2; (+) strand; PAM type: NRG; PAM sequence: CAG
atgggattgaactgtctgtc

SEQ ID NO: 139076 - DNA, 20 bp, Artificial Sequence
  Description of Artificial Sequence: Synthetic oligonucleotide
  Target: LAMA2; (+) strand; PAM type: NRG; PAM sequence: AAG
attgaactgtctgtccagtg

SEQ ID NO: 139077 - DNA, 20 bp, Artificial Sequence
  Description of Artificial Sequence: Synthetic oligonucleotide
  Target: LAMA2; (+) strand; PAM type: NRG; PAM sequence: AGG
ttgaactgtctgtccagtga

SEQ ID NO: 139078 - DNA, 20 bp, Artificial Sequence
  Description of Artificial Sequence: Synthetic oligonucleotide
  Target: LAMA2; (+) strand; PAM type: NRG; PAM sequence: GGG
tgaactgtctgtccagtgaa

SEQ ID NO: 139079 - DNA, 20 bp, Artificial Sequence
  Description of Artificial Sequence: Synthetic oligonucleotide
  Target: LAMA2; (+) strand; PAM type: NRG; PAM sequence: TGG
tctgtccagtgaagggtgtt

SEQ ID NO: 139080 - DNA, 20 bp, Artificial Sequence
  Description of Artificial Sequence: Synthetic oligonucleotide
  Target: LAMA2; (+) strand; PAM type: NRG; PAM sequence: GAG
tgtccagtgaagggtgtttg

SEQ ID NO: 139081 - DNA, 20 bp, Artificial Sequence
  Description of Artificial Sequence: Synthetic oligonucleotide
  Target: LAMA2; (+) strand; PAM type: NRG; PAM sequence: CAG
ccagtgaagggtgtttggag

SEQ ID NO: 139082 - DNA, 20 bp, Artificial Sequence
  Description of Artificial Sequence: Synthetic oligonucleotide
  Target: LAMA2; (+) strand; PAM type: NRG; PAM sequence: TAG
gtgaagggtgtttggagcag

SEQ ID NO: 139083 - DNA, 20 bp, Artificial Sequence
  Description of Artificial Sequence: Synthetic oligonucleotide
  Target: LAMA2; (+) strand; PAM type: NRG; PAM sequence: CAG
gagcagtagatgtccacatg

SEQ ID NO: 139084 - DNA, 20 bp, Artificial Sequence
  Description of Artificial Sequence: Synthetic oligonucleotide
  Target: LAMA2; (+) strand; PAM type: NRG; PAM sequence: AAG
cagtagatgtccacatgcag

SEQ ID NO: 139085 - DNA, 20 bp, Artificial Sequence
  Description of Artificial Sequence: Synthetic oligonucleotide
  Target: LAMA2; (+) strand; PAM type: NRG; PAM sequence: GAG
atgtccacatgcagaagaat

SEQ ID NO: 139086 - DNA, 20 bp, Artificial Sequence
  Description of Artificial Sequence: Synthetic oligonucleotide
  Target: LAMA2; (+) strand; PAM type: NRG; PAM sequence: TAG
cacatgcagaagaatgagta

SEQ ID NO: 139087 - DNA, 20 bp, Artificial Sequence
  Description of Artificial Sequence: Synthetic oligonucleotide
  Target: LAMA2; (+) strand; PAM type: NRG; PAM sequence: AAG
ttcaaattctaaatgaatta

SEQ ID NO: 139088 - DNA, 20 bp, Artificial Sequence
  Description of Artificial Sequence: Synthetic oligonucleotide
  Target: LAMA2; (+) strand; PAM type: NRG; PAM sequence: AAG
tgaaactgtaaaactactga

SEQ ID NO: 139089 - DNA, 20 bp, Artificial Sequence
  Description of Artificial Sequence: Synthetic oligonucleotide
  Target: LAMA2; (+) strand; PAM type: NRG; PAM sequence: CAG
aaaactactgaaagaaaaca

SEQ ID NO: 139090 - DNA, 20 bp, Artificial Sequence
  Description of Artificial Sequence: Synthetic oligonucleotide
  Target: LAMA2; (+) strand; PAM type: NRG; PAM sequence: AGG
aaactactgaaagaaaacac

SEQ ID NO: 139091 - DNA, 20 bp, Artificial Sequence
  Description of Artificial Sequence: Synthetic oligonucleotide
  Target: LAMA2; (+) strand; PAM type: NRG; PAM sequence: GGG
aactactgaaagaaaacaca

SEQ ID NO: 139092 - DNA, 20 bp, Artificial Sequence
  Description of Artificial Sequence: Synthetic oligonucleotide
  Target: LAMA2; (+) strand; PAM type: NRG; PAM sequence: GGG
actactgaaagaaaacacag

SEQ ID NO: 139093 - DNA, 20 bp, Artificial Sequence
  Description of Artificial Sequence: Synthetic oligonucleotide
  Target: LAMA2; (+) strand; PAM type: NRG; PAM sequence: AAG
tgaaagaaaacacaggggaa

SEQ ID NO: 139094 - DNA, 20 bp, Artificial Sequence
  Description of Artificial Sequence: Synthetic oligonucleotide
  Target: LAMA2; (+) strand; PAM type: NRG; PAM sequence: TGG
ggggaaaagttccatgacat

SEQ ID NO: 139095 - DNA, 20 bp, Artificial Sequence
  Description of Artificial Sequence: Synthetic oligonucleotide
  Target: LAMA2; (+) strand; PAM type: NRG; PAM sequence: TGG
aaagttccatgacattggtc

SEQ ID NO: 139096 - DNA, 20 bp, Artificial Sequence
  Description of Artificial Sequence: Synthetic oligonucleotide
  Target: LAMA2; (+) strand; PAM type: NRG; PAM sequence: GGG
aagttccatgacattggtct

SEQ ID NO: 139097 - DNA, 20 bp, Artificial Sequence
  Description of Artificial Sequence: Synthetic oligonucleotide
  Target: LAMA2; (+) strand; PAM type: NRG; PAM sequence: AAG
gtctgggcaatgatttttta

SEQ ID NO: 139098 - DNA, 20 bp, Artificial Sequence
  Description of Artificial Sequence: Synthetic oligonucleotide
  Target: LAMA2; (+) strand; PAM type: NRG; PAM sequence: AAG
ttttaaagatataaacccca

SEQ ID NO: 139099 - DNA, 20 bp, Artificial Sequence
  Description of Artificial Sequence: Synthetic oligonucleotide
  Target: LAMA2; (+) strand; PAM type: NRG; PAM sequence: CAG
aagatataaaccccaaagca

SEQ ID NO: 139100 - DNA, 20 bp, Artificial Sequence
  Description of Artificial Sequence: Synthetic oligonucleotide
  Target: LAMA2; (+) strand; PAM type: NRG; PAM sequence: AGG
agatataaaccccaaagcac

SEQ ID NO: 139101 - DNA, 20 bp, Artificial Sequence
  Description of Artificial Sequence: Synthetic oligonucleotide
  Target: LAMA2; (+) strand; PAM type: NRG; PAM sequence: TAG
acaggaaacacaataaaaca

SEQ ID NO: 139102 - DNA, 20 bp, Artificial Sequence
  Description of Artificial Sequence: Synthetic oligonucleotide
  Target: LAMA2; (+) strand; PAM type: NRG; PAM sequence: GAG
acaataaaacatagacaaat

SEQ ID NO: 139103 - DNA, 20 bp, Artificial Sequence
  Description of Artificial Sequence: Synthetic oligonucleotide
  Target: LAMA2; (+) strand; PAM type: NRG; PAM sequence: TGG
acattaaactgaaacacatc

SEQ ID NO: 139104 - DNA, 20 bp, Artificial Sequence
  Description of Artificial Sequence: Synthetic oligonucleotide
  Target: LAMA2; (+) strand; PAM type: NRG; PAM sequence: CAG
ctgaaacacatctggataac

SEQ ID NO: 139105 - DNA, 20 bp, Artificial Sequence
  Description of Artificial Sequence: Synthetic oligonucleotide
  Target: LAMA2; (+) strand; PAM type: NRG; PAM sequence: AGG
tgaaacacatctggataacc

SEQ ID NO: 139106 - DNA, 20 bp, Artificial Sequence
  Description of Artificial Sequence: Synthetic oligonucleotide
  Target: LAMA2; (+) strand; PAM type: NRG; PAM sequence: GGG
gaaacacatctggataacca

SEQ ID NO: 139107 - DNA, 20 bp, Artificial Sequence
  Description of Artificial Sequence: Synthetic oligonucleotide
  Target: LAMA2; (+) strand; PAM type: NRG; PAM sequence: TGG
aaccagggaaacaatcaaca

SEQ ID NO: 139108 - DNA, 20 bp, Artificial Sequence
  Description of Artificial Sequence: Synthetic oligonucleotide
  Target: LAMA2; (+) strand; PAM type: NRG; PAM sequence: TGG
aatcactgaatttattttgt

SEQ ID NO: 139109 - DNA, 20 bp, Artificial Sequence
  Description of Artificial Sequence: Synthetic oligonucleotide
  Target: LAMA2; (+) strand; PAM type: NRG; PAM sequence: TGG
tttattttgttggtactatt

SEQ ID NO: 139110 - DNA, 20 bp, Artificial Sequence
  Description of Artificial Sequence: Synthetic oligonucleotide
  Target: LAMA2; (+) strand; PAM type: NRG; PAM sequence: GGG
ttattttgttggtactattt

SEQ ID NO: 139111 - DNA, 20 bp, Artificial Sequence
  Description of Artificial Sequence: Synthetic oligonucleotide
  Target: LAMA2; (+) strand; PAM type: NRG; PAM sequence: TGG
tatttgggtcactgctaaat

SEQ ID NO: 139112 - DNA, 20 bp, Artificial Sequence
  Description of Artificial Sequence: Synthetic oligonucleotide
  Target: LAMA2; (+) strand; PAM type: NRG; PAM sequence: CAG
tggtgaataccaaactaaca

SEQ ID NO: 139113 - DNA, 20 bp, Artificial Sequence
  Description of Artificial Sequence: Synthetic oligonucleotide
  Target: LAMA2; (+) strand; PAM type: NRG; PAM sequence: AAG
tgaataccaaactaacacag

SEQ ID NO: 139114 - DNA, 20 bp, Artificial Sequence
  Description of Artificial Sequence: Synthetic oligonucleotide
  Target: LAMA2; (+) strand; PAM type: NRG; PAM sequence: GAG
aataccaaactaacacagaa

SEQ ID NO: 139115 - DNA, 20 bp, Artificial Sequence
  Description of Artificial Sequence: Synthetic oligonucleotide
  Target: LAMA2; (+) strand; PAM type: NRG; PAM sequence: TAG
taatatacatgttccaaatg

SEQ ID NO: 139116 - DNA, 20 bp, Artificial Sequence
  Description of Artificial Sequence: Synthetic oligonucleotide
  Target: LAMA2; (+) strand; PAM type: NRG; PAM sequence: GAG
atgtagattataccttacct

SEQ ID NO: 139117 - DNA, 20 bp, Artificial Sequence
  Description of Artificial Sequence: Synthetic oligonucleotide
  Target: LAMA2; (+) strand; PAM type: NRG; PAM sequence: AAG
accttacctgagtatacctt

SEQ ID NO: 139118 - DNA, 20 bp, Artificial Sequence
  Description of Artificial Sequence: Synthetic oligonucleotide
  Target: LAMA2; (+) strand; PAM type: NRG; PAM sequence: CAG
tgagtataccttaagtacaa

SEQ ID NO: 139119 - DNA, 20 bp, Artificial Sequence
  Description of Artificial Sequence: Synthetic oligonucleotide
  Target: LAMA2; (+) strand; PAM type: NRG; PAM sequence: TAG
accttaagtacaacagaata

SEQ ID NO: 139120 - DNA, 20 bp, Artificial Sequence
  Description of Artificial Sequence: Synthetic oligonucleotide
  Target: LAMA2; (+) strand; PAM type: NRG; PAM sequence: CAG
acagaatatagttaaaatca

SEQ ID NO: 139121 - DNA, 20 bp, Artificial Sequence
  Description of Artificial Sequence: Synthetic oligonucleotide
  Target: LAMA2; (+) strand; PAM type: NRG; PAM sequence: TAG
ttacctgttttaattgtata

SEQ ID NO: 139122 - DNA, 20 bp, Artificial Sequence
  Description of Artificial Sequence: Synthetic oligonucleotide
  Target: LAMA2; (+) strand; PAM type: NRG; PAM sequence: AAG
ttaattgtatatagattttt

SEQ ID NO: 139123 - DNA, 20 bp, Artificial Sequence
  Description of Artificial Sequence: Synthetic oligonucleotide
  Target: LAMA2; (+) strand; PAM type: NRG; PAM sequence: CAG
gatttttaagatcatttgtt

SEQ ID NO: 139124 - DNA, 20 bp, Artificial Sequence
  Description of Artificial Sequence: Synthetic oligonucleotide
  Target: LAMA2; (+) strand; PAM type: NRG; PAM sequence: AAG
gatcatttgttcagtatcac

SEQ ID NO: 139125 - DNA, 20 bp, Artificial Sequence
  Description of Artificial Sequence: Synthetic oligonucleotide
  Target: LAMA2; (+) strand; PAM type: NRG; PAM sequence: TAG
catttgttcagtatcacaag

SEQ ID NO: 139126 - DNA, 20 bp, Artificial Sequence
  Description of Artificial Sequence: Synthetic oligonucleotide
  Target: LAMA2; (+) strand; PAM type: NRG; PAM sequence: TGG
agtatcacaagtagaatctg

SEQ ID NO: 139127 - DNA, 20 bp, Artificial Sequence
  Description of Artificial Sequence: Synthetic oligonucleotide
  Target: LAMA2; (+) strand; PAM type: NRG; PAM sequence: TAG
aagtagaatctgtggttaat

SEQ ID NO: 139128 - DNA, 20 bp, Artificial Sequence
  Description of Artificial Sequence: Synthetic oligonucleotide
  Target: LAMA2; (+) strand; PAM type: NRG; PAM sequence: AAG
gacttttaaaattattaata

SEQ ID NO: 139129 - DNA, 20 bp, Artificial Sequence
  Description of Artificial Sequence: Synthetic oligonucleotide
  Target: LAMA2; (+) strand; PAM type: NRG; PAM sequence: AGG
acttttaaaattattaataa

SEQ ID NO: 139130 - DNA, 20 bp, Artificial Sequence
  Description of Artificial Sequence: Synthetic oligonucleotide
  Target: LAMA2; (+) strand; PAM type: NRG; PAM sequence: CAG
aaaattattaataaaggtga

SEQ ID NO: 139131 - DNA, 20 bp, Artificial Sequence
  Description of Artificial Sequence: Synthetic oligonucleotide
  Target: LAMA2; (+) strand; PAM type: NRG; PAM sequence: TAG
ttattaataaaggtgacagc

SEQ ID NO: 139132 - DNA, 20 bp, Artificial Sequence
  Description of Artificial Sequence: Synthetic oligonucleotide
  Target: LAMA2; (+) strand; PAM type: NRG; PAM sequence: TGG
ataaaggtgacagctagctt

SEQ ID NO: 139133 - DNA, 20 bp, Artificial Sequence
  Description of Artificial Sequence: Synthetic oligonucleotide
  Target: LAMA2; (+) strand; PAM type: NRG; PAM sequence: AAG
tagctttggtgtctatattg

SEQ ID NO: 139134 - DNA, 20 bp, Artificial Sequence
  Description of Artificial Sequence: Synthetic oligonucleotide
  Target: LAMA2; (+) strand; PAM type: NRG; PAM sequence: TGG
aagaaaatgttcatcctaat

SEQ ID NO: 139135 - DNA, 20 bp, Artificial Sequence
  Description of Artificial Sequence: Synthetic oligonucleotide
  Target: LAMA2; (+) strand; PAM type: NRG; PAM sequence: TGG
gtttccgtttgtctaccctt

SEQ ID NO: 139136 - DNA, 20 bp, Artificial Sequence
  Description of Artificial Sequence: Synthetic oligonucleotide
  Target: LAMA2; (+) strand; PAM type: NRG; PAM sequence: CAG
cctttggtctgctttcaaca

SEQ ID NO: 139137 - DNA, 20 bp, Artificial Sequence
  Description of Artificial Sequence: Synthetic oligonucleotide
  Target: LAMA2; (+) strand; PAM type: NRG; PAM sequence: CAG
ttggtctgctttcaacacag

SEQ ID NO: 139138 - DNA, 20 bp, Artificial Sequence
  Description of Artificial Sequence: Synthetic oligonucleotide
  Target: LAMA2; (+) strand; PAM type: NRG; PAM sequence: CAG
tgctttcaacacagcagtca

SEQ ID NO: 139139 - DNA, 20 bp, Artificial Sequence
  Description of Artificial Sequence: Synthetic oligonucleotide
  Target: LAMA2; (+) strand; PAM type: NRG; PAM sequence: TAG
agcagtcacagcaatctcat

SEQ ID NO: 139140 - DNA, 20 bp, Artificial Sequence
  Description of Artificial Sequence: Synthetic oligonucleotide
  Target: LAMA2; (+) strand; PAM type: NRG; PAM sequence: CAG
tcacagcaatctcattagta

SEQ ID NO: 139141 - DNA, 20 bp, Artificial Sequence
  Description of Artificial Sequence: Synthetic oligonucleotide
  Target: LAMA2; (+) strand; PAM type: NRG; PAM sequence: AAG
cacataacactttccactaa

SEQ ID NO: 139142 - DNA, 20 bp, Artificial Sequence
  Description of Artificial Sequence: Synthetic oligonucleotide
  Target: LAMA2; (+) strand; PAM type: NRG; PAM sequence: TGG
ataacactttccactaaaag

SEQ ID NO: 139143 - DNA, 20 bp, Artificial Sequence
  Description of Artificial Sequence: Synthetic oligonucleotide
  Target: LAMA2; (+) strand; PAM type: NRG; PAM sequence: TAG
actaaaagtggaaatcttat

SEQ ID NO: 139144 - DNA, 20 bp, Artificial Sequence
  Description of Artificial Sequence: Synthetic oligonucleotide
  Target: LAMA2; (+) strand; PAM type: NRG; PAM sequence: CAG
aagtggaaatcttattagta

SEQ ID NO: 139145 - DNA, 20 bp, Artificial Sequence
  Description of Artificial Sequence: Synthetic oligonucleotide
  Target: LAMA2; (+) strand; PAM type: NRG; PAM sequence: AAG
cacacaacactttccactaa

SEQ ID NO: 139146 - DNA, 20 bp, Artificial Sequence
  Description of Artificial Sequence: Synthetic oligonucleotide
  Target: LAMA2; (+) strand; PAM type: NRG; PAM sequence: TGG
tttccactaaaagtctctac

SEQ ID NO: 139147 - DNA, 20 bp, Artificial Sequence
  Description of Artificial Sequence: Synthetic oligonucleotide
  Target: LAMA2; (+) strand; PAM type: NRG; PAM sequence: CAG
tactggttttccatcacatt

SEQ ID NO: 139148 - DNA, 20 bp, Artificial Sequence
  Description of Artificial Sequence: Synthetic oligonucleotide
  Target: LAMA2; (+) strand; PAM type: NRG; PAM sequence: TGG
tggttttccatcacattcag

SEQ ID NO: 139149 - DNA, 20 bp, Artificial Sequence
  Description of Artificial Sequence: Synthetic oligonucleotide
  Target: LAMA2; (+) strand; PAM type: NRG; PAM sequence: GGG
ggttttccatcacattcagt

SEQ ID NO: 139150 - DNA, 20 bp, Artificial Sequence
  Description of Artificial Sequence: Synthetic oligonucleotide
  Target: LAMA2; (+) strand; PAM type: NRG; PAM sequence: AAG
tccatcacattcagtgggaa

SEQ ID NO: 139151 - DNA, 20 bp, Artificial Sequence
  Description of Artificial Sequence: Synthetic oligonucleotide
  Target: LAMA2; (+) strand; PAM type: NRG; PAM sequence: AAG
ggaaaagcacaatgacccac

SEQ ID NO: 139152 - DNA, 20 bp, Artificial Sequence
  Description of Artificial Sequence: Synthetic oligonucleotide
  Target: LAMA2; (+) strand; PAM type: NRG; PAM sequence: AGG
gaaaagcacaatgacccaca

SEQ ID NO: 139153 - DNA, 20 bp, Artificial Sequence
  Description of Artificial Sequence: Synthetic oligonucleotide
  Target: LAMA2; (+) strand; PAM type: NRG; PAM sequence: AAG
acaatgacccacaaggcctt

SEQ ID NO: 139154 - DNA, 20 bp, Artificial Sequence
  Description of Artificial Sequence: Synthetic oligonucleotide
  Target: LAMA2; (+) strand; PAM type: NRG; PAM sequence: AGG
caatgacccacaaggcctta

SEQ ID NO: 139155 - DNA, 20 bp, Artificial Sequence
  Description of Artificial Sequence: Synthetic oligonucleotide
  Target: LAMA2; (+) strand; PAM type: NRG; PAM sequence: TGG
tcctcacctcttttcatctc

SEQ ID NO: 139156 - DNA, 20 bp, Artificial Sequence
  Description of Artificial Sequence: Synthetic oligonucleotide
  Target: LAMA2; (+) strand; PAM type: NRG; PAM sequence: CAG
ctcatctgatctctcttcct

SEQ ID NO: 139157 - DNA, 20 bp, Artificial Sequence
  Description of Artificial Sequence: Synthetic oligonucleotide
  Target: LAMA2; (+) strand; PAM type: NRG; PAM sequence: CAG
atctctcttcctcagttgcc

SEQ ID NO: 139158 - DNA, 20 bp, Artificial Sequence
  Description of Artificial Sequence: Synthetic oligonucleotide
  Target: LAMA2; (+) strand; PAM type: NRG; PAM sequence: TGG
ctcttcctcagttgcccagc

SEQ ID NO: 139159 - DNA, 20 bp, Artificial Sequence
  Description of Artificial Sequence: Synthetic oligonucleotide
  Target: LAMA2; (+) strand; PAM type: NRG; PAM sequence: CAG
ttgaacactcacacctgcct

SEQ ID NO: 139160 - DNA, 20 bp, Artificial Sequence
  Description of Artificial Sequence: Synthetic oligonucleotide
  Target: LAMA2; (+) strand; PAM type: NRG; PAM sequence: AGG
tgaacactcacacctgcctc

SEQ ID NO: 139161 - DNA, 20 bp, Artificial Sequence
  Description of Artificial Sequence: Synthetic oligonucleotide
  Target: LAMA2; (+) strand; PAM type: NRG; PAM sequence: GGG
gaacactcacacctgcctca

SEQ ID NO: 139162 - DNA, 20 bp, Artificial Sequence
  Description of Artificial Sequence: Synthetic oligonucleotide
  Target: LAMA2; (+) strand; PAM type: NRG; PAM sequence: TAG
cacttgatatttcttatgtc

SEQ ID NO: 139163 - DNA, 20 bp, Artificial Sequence
  Description of Artificial Sequence: Synthetic oligonucleotide
  Target: LAMA2; (+) strand; PAM type: NRG; PAM sequence: TAG
tattttcttcaatttcaatg

SEQ ID NO: 139164 - DNA, 20 bp, Artificial Sequence
  Description of Artificial Sequence: Synthetic oligonucleotide
  Target: LAMA2; (+) strand; PAM type: NRG; PAM sequence: TGG
cttgtttcctcacctccttt

SEQ ID NO: 139165 - DNA, 20 bp, Artificial Sequence
  Description of Artificial Sequence: Synthetic oligonucleotide
  Target: LAMA2; (+) strand; PAM type: NRG; PAM sequence: AAG
cctccttttggtttttattc

SEQ ID NO: 139166 - DNA, 20 bp, Artificial Sequence
  Description of Artificial Sequence: Synthetic oligonucleotide
  Target: LAMA2; (+) strand; PAM type: NRG; PAM sequence: AAG
tcaagtgttaccttctcaac

SEQ ID NO: 139167 - DNA, 20 bp, Artificial Sequence
  Description of Artificial Sequence: Synthetic oligonucleotide
  Target: LAMA2; (+) strand; PAM type: NRG; PAM sequence: AGG
caagtgttaccttctcaaca

SEQ ID NO: 139168 - DNA, 20 bp, Artificial Sequence
  Description of Artificial Sequence: Synthetic oligonucleotide
  Target: LAMA2; (+) strand; PAM type: NRG; PAM sequence: GGG
aagtgttaccttctcaacaa

SEQ ID NO: 139169 - DNA, 20 bp, Artificial Sequence
  Description of Artificial Sequence: Synthetic oligonucleotide
  Target: LAMA2; (+) strand; PAM type: NRG; PAM sequence: CAG
gacaactctatttaaaattg

SEQ ID NO: 139170 - DNA, 20 bp, Artificial Sequence
  Description of Artificial Sequence: Synthetic oligonucleotide
  Target: LAMA2; (+) strand; PAM type: NRG; PAM sequence: CAG
ctatttaaaattgcagctcc

SEQ ID NO: 139171 - DNA, 20 bp, Artificial Sequence
  Description of Artificial Sequence: Synthetic oligonucleotide
  Target: LAMA2; (+) strand; PAM type: NRG; PAM sequence: CAG
actatgtacatgttactgtt

SEQ ID NO: 139172 - DNA, 20 bp, Artificial Sequence
  Description of Artificial Sequence: Synthetic oligonucleotide
  Target: LAMA2; (+) strand; PAM type: NRG; PAM sequence: TGG
aaatgcaatttttttgtgcg

SEQ ID NO: 139173 - DNA, 20 bp, Artificial Sequence
  Description of Artificial Sequence: Synthetic oligonucleotide
  Target: LAMA2; (+) strand; PAM type: NRG; PAM sequence: GAG
atgcaatttttttgtgcgtg

SEQ ID NO: 139174 - DNA, 20 bp, Artificial Sequence
  Description of Artificial Sequence: Synthetic oligonucleotide
  Target: LAMA2; (+) strand; PAM type: NRG; PAM sequence: AAG
tgttgtaatcattgctttct

SEQ ID NO: 139175 - DNA, 20 bp, Artificial Sequence
  Description of Artificial Sequence: Synthetic oligonucleotide
  Target: LAMA2; (+) strand; PAM type: NRG; PAM sequence: TAG
atcattgctttctaagcact

SEQ ID NO: 139176 - DNA, 20 bp, Artificial Sequence
  Description of Artificial Sequence: Synthetic oligonucleotide
  Target: LAMA2; (+) strand; PAM type: NRG; PAM sequence: TAG
tgctttctaagcacttagaa

SEQ ID NO: 139177 - DNA, 20 bp, Artificial Sequence
  Description of Artificial Sequence: Synthetic oligonucleotide
  Target: LAMA2; (+) strand; PAM type: NRG; PAM sequence: TAG
ttagaatagtgcacaacata

SEQ ID NO: 139178 - DNA, 20 bp, Artificial Sequence
  Description of Artificial Sequence: Synthetic oligonucleotide
  Target: LAMA2; (+) strand; PAM type: NRG; PAM sequence: AGG
tagaatagtgcacaacatat

SEQ ID NO: 139179 - DNA, 20 bp, Artificial Sequence
  Description of Artificial Sequence: Synthetic oligonucleotide
  Target: LAMA2; (+) strand; PAM type: NRG; PAM sequence: AAG
aatagtgcacaacatatagg

SEQ ID NO: 139180 - DNA, 20 bp, Artificial Sequence
  Description of Artificial Sequence: Synthetic oligonucleotide
  Target: LAMA2; (+) strand; PAM type: NRG; PAM sequence: AAG
gcattcaatgtgtttgtatt

SEQ ID NO: 139181 - DNA, 20 bp, Artificial Sequence
  Description of Artificial Sequence: Synthetic oligonucleotide
  Target: LAMA2; (+) strand; PAM type: NRG; PAM sequence: TAG
taaatgactgaatgaataac

SEQ ID NO: 139182 - DNA, 20 bp, Artificial Sequence
  Description of Artificial Sequence: Synthetic oligonucleotide
  Target: LAMA2; (+) strand; PAM type: NRG; PAM sequence: AAG
aaaccaccaatccataattt

SEQ ID NO: 139183 - DNA, 20 bp, Artificial Sequence
  Description of Artificial Sequence: Synthetic oligonucleotide
  Target: LAMA2; (+) strand; PAM type: NRG; PAM sequence: GAG
ttaagaatcttattgaatct

SEQ ID NO: 139184 - DNA, 20 bp, Artificial Sequence
  Description of Artificial Sequence: Synthetic oligonucleotide
  Target: LAMA2; (+) strand; PAM type: NRG; PAM sequence: AAG
cttattgaatctgagaatta

SEQ ID NO: 139185 - DNA, 20 bp, Artificial Sequence
  Description of Artificial Sequence: Synthetic oligonucleotide
  Target: LAMA2; (+) strand; PAM type: NRG; PAM sequence: AGG
ttattgaatctgagaattaa

SEQ ID NO: 139186 - DNA, 20 bp, Artificial Sequence
  Description of Artificial Sequence: Synthetic oligonucleotide
  Target: LAMA2; (+) strand; PAM type: NRG; PAM sequence: AAG
aatctgagaattaaaggatt

SEQ ID NO: 139187 - DNA, 20 bp, Artificial Sequence
  Description of Artificial Sequence: Synthetic oligonucleotide
  Target: LAMA2; (+) strand; PAM type: NRG; PAM sequence: AAG
ctaattatgaaatttccttt

SEQ ID NO: 139188 - DNA, 20 bp, Artificial Sequence
  Description of Artificial Sequence: Synthetic oligonucleotide
  Target: LAMA2; (+) strand; PAM type: NRG; PAM sequence: AGG
taattatgaaatttccttta

SEQ ID NO: 139189 - DNA, 20 bp, Artificial Sequence
  Description of Artificial Sequence: Synthetic oligonucleotide
  Target: LAMA2; (+) strand; PAM type: NRG; PAM sequence: TGG
aaatttcctttaaggttgaa

SEQ ID NO: 139190 - DNA, 20 bp, Artificial Sequence
  Description of Artificial Sequence: Synthetic oligonucleotide
  Target: LAMA2; (+) strand; PAM type: NRG; PAM sequence: TAG
aaggttgaatggcattgttt

SEQ ID NO: 139191 - DNA, 20 bp, Artificial Sequence
  Description of Artificial Sequence: Synthetic oligonucleotide
  Target: LAMA2; (+) strand; PAM type: NRG; PAM sequence: TGG
tggcattgttttagtctatt

SEQ ID NO: 139192 - DNA, 20 bp, Artificial Sequence
  Description of Artificial Sequence: Synthetic oligonucleotide
  Target: LAMA2; (+) strand; PAM type: NRG; PAM sequence: GGG
ggcattgttttagtctattt

SEQ ID NO: 139193 - DNA, 20 bp, Artificial Sequence
  Description of Artificial Sequence: Synthetic oligonucleotide
  Target: LAMA2; (+) strand; PAM type: NRG; PAM sequence: AAG
ctatttgggctattataaca

SEQ ID NO: 139194 - DNA, 20 bp, Artificial Sequence
  Description of Artificial Sequence: Synthetic oligonucleotide
  Target: LAMA2; (+) strand; PAM type: NRG; PAM sequence: CAG
gggctattataacaaagtac

SEQ ID NO: 139195 - DNA, 20 bp, Artificial Sequence
  Description of Artificial Sequence: Synthetic oligonucleotide
  Target: LAMA2; (+) strand; PAM type: NRG; PAM sequence: GAG
attataacaaagtaccagat

SEQ ID NO: 139196 - DNA, 20 bp, Artificial Sequence
  Description of Artificial Sequence: Synthetic oligonucleotide
  Target: LAMA2; (+) strand; PAM type: NRG; PAM sequence: AGG
ttataacaaagtaccagatg

SEQ ID NO: 139197 - DNA, 20 bp, Artificial Sequence
  Description of Artificial Sequence: Synthetic oligonucleotide
  Target: LAMA2; (+) strand; PAM type: NRG; PAM sequence: TGG
taacaaagtaccagatgagg

SEQ ID NO: 139198 - DNA, 20 bp, Artificial Sequence
  Description of Artificial Sequence: Synthetic oligonucleotide
  Target: LAMA2; (+) strand; PAM type: NRG; PAM sequence: CAG
atgaggtggcttataaactg

SEQ ID NO: 139199 - DNA, 20 bp, Artificial Sequence
  Description of Artificial Sequence: Synthetic oligonucleotide
  Target: LAMA2; (+) strand; PAM type: NRG; PAM sequence: TAG
ctgcagcaatttatttctca

SEQ ID NO: 139200 - DNA, 20 bp, Artificial Sequence
  Description of Artificial Sequence: Synthetic oligonucleotide
  Target: LAMA2; (+) strand; PAM type: NRG; PAM sequence: TGG
caatttatttctcatagttc

SEQ ID NO: 139201 - DNA, 20 bp, Artificial Sequence
  Description of Artificial Sequence: Synthetic oligonucleotide
  Target: LAMA2; (+) strand; PAM type: NRG; PAM sequence: GAG
atttatttctcatagttctg

SEQ ID NO: 139202 - DNA, 20 bp, Artificial Sequence
  Description of Artificial Sequence: Synthetic oligonucleotide
  Target: LAMA2; (+) strand; PAM type: NRG; PAM sequence: AGG
tttatttctcatagttctgg

SEQ ID NO: 139203 - DNA, 20 bp, Artificial Sequence
  Description of Artificial Sequence: Synthetic oligonucleotide
  Target: LAMA2; (+) strand; PAM type: NRG; PAM sequence: AAG
gttctggaggcttgacgtcc

SEQ ID NO: 139204 - DNA, 20 bp, Artificial Sequence
  Description of Artificial Sequence: Synthetic oligonucleotide
  Target: LAMA2; (+) strand; PAM type: NRG; PAM sequence: AAG
aggcttgacgtccaagatca

SEQ ID NO: 139205 - DNA, 20 bp, Artificial Sequence
  Description of Artificial Sequence: Synthetic oligonucleotide
  Target: LAMA2; (+) strand; PAM type: NRG; PAM sequence: TGG
gacgtccaagatcaaagcac

SEQ ID NO: 139206 - DNA, 20 bp, Artificial Sequence
  Description of Artificial Sequence: Synthetic oligonucleotide
  Target: LAMA2; (+) strand; PAM type: NRG; PAM sequence: CAG
gtccaagatcaaagcactgg

SEQ ID NO: 139207 - DNA, 20 bp, Artificial Sequence
  Description of Artificial Sequence: Synthetic oligonucleotide
  Target: LAMA2; (+) strand; PAM type: NRG; PAM sequence: TGG
gcactggcagattcaatgtc

SEQ ID NO: 139208 - DNA, 20 bp, Artificial Sequence
  Description of Artificial Sequence: Synthetic oligonucleotide
  Target: LAMA2; (+) strand; PAM type: NRG; PAM sequence: GAG
tggcagattcaatgtctggt

SEQ ID NO: 139209 - DNA, 20 bp, Artificial Sequence
  Description of Artificial Sequence: Synthetic oligonucleotide
  Target: LAMA2; (+) strand; PAM type: NRG; PAM sequence: AGG
ggcagattcaatgtctggtg

SEQ ID NO: 139210 - DNA, 20 bp, Artificial Sequence
  Description of Artificial Sequence: Synthetic oligonucleotide
  Target: LAMA2; (+) strand; PAM type: NRG; PAM sequence: GGG
gcagattcaatgtctggtga

SEQ ID NO: 139211 - DNA, 20 bp, Artificial Sequence
  Description of Artificial Sequence: Synthetic oligonucleotide
  Target: LAMA2; (+) strand; PAM type: NRG; PAM sequence: TGG
tctggtgagggtctgcttcc

SEQ ID NO: 139212 - DNA, 20 bp, Artificial Sequence
  Description of Artificial Sequence: Synthetic oligonucleotide
  Target: LAMA2; (+) strand; PAM type: NRG; PAM sequence: TAG
agggtctgcttcctggttca

SEQ ID NO: 139213 - DNA, 20 bp, Artificial Sequence
  Description of Artificial Sequence: Synthetic oligonucleotide
  Target: LAMA2; (+) strand; PAM type: NRG; PAM sequence: TGG
tctgcttcctggttcataga

SEQ ID NO: 139214 - DNA, 20 bp, Artificial Sequence
  Description of Artificial Sequence: Synthetic oligonucleotide
  Target: LAMA2; (+) strand; PAM type: NRG; PAM sequence: TAG
agatggccttcttcttgctg

SEQ ID NO: 139215 - DNA, 20 bp, Artificial Sequence
  Description of Artificial Sequence: Synthetic oligonucleotide
  Target: LAMA2; (+) strand; PAM type: NRG; PAM sequence: TGG
cttcttgctgtagcctcaca

SEQ ID NO: 139216 - DNA, 20 bp, Artificial Sequence
  Description of Artificial Sequence: Synthetic oligonucleotide
  Target: LAMA2; (+) strand; PAM type: NRG; PAM sequence: CAG
cttgctgtagcctcacatgg

SEQ ID NO: 139217 - DNA, 20 bp, Artificial Sequence
  Description of Artificial Sequence: Synthetic oligonucleotide
  Target: LAMA2; (+) strand; PAM type: NRG; PAM sequence: AAG
gctgtagcctcacatggcag

SEQ ID NO: 139218 - DNA, 20 bp, Artificial Sequence
  Description of Artificial Sequence: Synthetic oligonucleotide
  Target: LAMA2; (+) strand; PAM type: NRG; PAM sequence: AGG
ctgtagcctcacatggcaga

SEQ ID NO: 139219 - DNA, 20 bp, Artificial Sequence
  Description of Artificial Sequence: Synthetic oligonucleotide
  Target: LAMA2; (+) strand; PAM type: NRG; PAM sequence: GGG
tgtagcctcacatggcagaa

SEQ ID NO: 139220 - DNA, 20 bp, Artificial Sequence
  Description of Artificial Sequence: Synthetic oligonucleotide
  Target: LAMA2; (+) strand; PAM type: NRG; PAM sequence: GGG
gtagcctcacatggcagaag

SEQ ID NO: 139221 - DNA, 20 bp, Artificial Sequence
  Description of Artificial Sequence: Synthetic oligonucleotide
  Target: LAMA2; (+) strand; PAM type: NRG; PAM sequence: AAG
acatggcagaaggggcaaat

SEQ ID NO: 139222 - DNA, 20 bp, Artificial Sequence
  Description of Artificial Sequence: Synthetic oligonucleotide
  Target: LAMA2; (+) strand; PAM type: NRG; PAM sequence: TGG
gaaggggcaaataagctttc

SEQ ID NO: 139223 - DNA, 20 bp, Artificial Sequence
  Description of Artificial Sequence: Synthetic oligonucleotide
  Target: LAMA2; (+) strand; PAM type: NRG; PAM sequence: GGG
aaggggcaaataagctttct

SEQ ID NO: 139224 - DNA, 20 bp, Artificial Sequence
  Description of Artificial Sequence: Synthetic oligonucleotide
  Target: LAMA2; (+) strand; PAM type: NRG; PAM sequence: GGG
aggggcaaataagctttctg

SEQ ID NO: 139225 - DNA, 20 bp, Artificial Sequence
  Description of Artificial Sequence: Synthetic oligonucleotide
  Target: LAMA2; (+) strand; PAM type: NRG; PAM sequence: AAG
ctttctggggtttcatttat

SEQ ID NO: 139226 - DNA, 20 bp, Artificial Sequence
  Description of Artificial Sequence: Synthetic oligonucleotide
  Target: LAMA2; (+) strand; PAM type: NRG; PAM sequence: AGG
tttctggggtttcatttata

SEQ ID NO: 139227 - DNA, 20 bp, Artificial Sequence
  Description of Artificial Sequence: Synthetic oligonucleotide
  Target: LAMA2; (+) strand; PAM type: NRG; PAM sequence: GGG
ttctggggtttcatttataa

SEQ ID NO: 139228 - DNA, 20 bp, Artificial Sequence
  Description of Artificial Sequence: Synthetic oligonucleotide
  Target: LAMA2; (+) strand; PAM type: NRG; PAM sequence: TGG
aagggtactaattccattct

SEQ ID NO: 139229 - DNA, 20 bp, Artificial Sequence
  Description of Artificial Sequence: Synthetic oligonucleotide
  Target: LAMA2; (+) strand; PAM type: NRG; PAM sequence: GGG
agggtactaattccattctt

SEQ ID NO: 139230 - DNA, 20 bp, Artificial Sequence
  Description of Artificial Sequence: Synthetic oligonucleotide
  Target: LAMA2; (+) strand; PAM type: NRG; PAM sequence: GGG
gggtactaattccattcttg

SEQ ID NO: 139231 - DNA, 20 bp, Artificial Sequence
  Description of Artificial Sequence: Synthetic oligonucleotide
  Target: LAMA2; (+) strand; PAM type: NRG; PAM sequence: GGG
ggtactaattccattcttgg

SEQ ID NO: 139232 - DNA, 20 bp, Artificial Sequence
  Description of Artificial Sequence: Synthetic oligonucleotide
  Target: LAMA2; (+) strand; PAM type: NRG; PAM sequence: TAG
atcacctaataccatcacat

SEQ ID NO: 139233 - DNA, 20 bp, Artificial Sequence
  Description of Artificial Sequence: Synthetic oligonucleotide
  Target: LAMA2; (+) strand; PAM type: NRG; PAM sequence: AGG
tcacctaataccatcacatt

SEQ ID NO: 139234 - DNA, 20 bp, Artificial Sequence
  Description of Artificial Sequence: Synthetic oligonucleotide
  Target: LAMA2; (+) strand; PAM type: NRG; PAM sequence: GGG
cacctaataccatcacatta

SEQ ID NO: 139235 - DNA, 20 bp, Artificial Sequence
  Description of Artificial Sequence: Synthetic oligonucleotide
  Target: LAMA2; (+) strand; PAM type: NRG; PAM sequence: GGG
acctaataccatcacattag

SEQ ID NO: 139236 - DNA, 20 bp, Artificial Sequence
  Description of Artificial Sequence: Synthetic oligonucleotide
  Target: LAMA2; (+) strand; PAM type: NRG; PAM sequence: TAG
aataccatcacattaggggt

SEQ ID NO: 139237 - DNA, 20 bp, Artificial Sequence
  Description of Artificial Sequence: Synthetic oligonucleotide
  Target: LAMA2; (+) strand; PAM type: NRG; PAM sequence: AGG
ataccatcacattaggggtt

SEQ ID NO: 139238 - DNA, 20 bp, Artificial Sequence
  Description of Artificial Sequence: Synthetic oligonucleotide
  Target: LAMA2; (+) strand; PAM type: NRG; PAM sequence: TAG
ggatttcaacatatgaattt

SEQ ID NO: 139239 - DNA, 20 bp, Artificial Sequence
  Description of Artificial Sequence: Synthetic oligonucleotide
  Target: LAMA2; (+) strand; PAM type: NRG; PAM sequence: AGG
gatttcaacatatgaatttt

SEQ ID NO: 139240 - DNA, 20 bp, Artificial Sequence
  Description of Artificial Sequence: Synthetic oligonucleotide
  Target: LAMA2; (+) strand; PAM type: NRG; PAM sequence: GGG
atttcaacatatgaatttta

SEQ ID NO: 139241 - DNA, 20 bp, Artificial Sequence
  Description of Artificial Sequence: Synthetic oligonucleotide
  Target: LAMA2; (+) strand; PAM type: NRG; PAM sequence: GGG
tttcaacatatgaattttag

SEQ ID NO: 139242 - DNA, 20 bp, Artificial Sequence
  Description of Artificial Sequence: Synthetic oligonucleotide
  Target: LAMA2; (+) strand; PAM type: NRG; PAM sequence: CAG
acatatgaattttaggggaa

SEQ ID NO: 139243 - DNA, 20 bp, Artificial Sequence
  Description of Artificial Sequence: Synthetic oligonucleotide
  Target: LAMA2; (+) strand; PAM type: NRG; PAM sequence: CAG
tttaggggaacagaaacatt

SEQ ID NO: 139244 - DNA, 20 bp, Artificial Sequence
  Description of Artificial Sequence: Synthetic oligonucleotide
  Target: LAMA2; (+) strand; PAM type: NRG; PAM sequence: TAG
gaacagaaacattcagtcta

SEQ ID NO: 139245 - DNA, 20 bp, Artificial Sequence
  Description of Artificial Sequence: Synthetic oligonucleotide
  Target: LAMA2; (+) strand; PAM type: NRG; PAM sequence: AAG
agaaacattcagtctataga

SEQ ID NO: 139246 - DNA, 20 bp, Artificial Sequence
  Description of Artificial Sequence: Synthetic oligonucleotide
  Target: LAMA2; (+) strand; PAM type: NRG; PAM sequence: AAG
ttcagtctatagaaagcgtg

SEQ ID NO: 139247 - DNA, 20 bp, Artificial Sequence
  Description of Artificial Sequence: Synthetic oligonucleotide
  Target: LAMA2; (+) strand; PAM type: NRG; PAM sequence: CAG
gcgtgaagtaaattttcttc

SEQ ID NO: 139248 - DNA, 20 bp, Artificial Sequence
  Description of Artificial Sequence: Synthetic oligonucleotide
  Target: LAMA2; (+) strand; PAM type: NRG; PAM sequence: AAG
catgttcttactctgctttt

SEQ ID NO: 139249 - DNA, 20 bp, Artificial Sequence
  Description of Artificial Sequence: Synthetic oligonucleotide
  Target: LAMA2; (+) strand; PAM type: NRG; PAM sequence: CAG
tttaagcgtattctaaattt

SEQ ID NO: 139250 - DNA, 20 bp, Artificial Sequence
  Description of Artificial Sequence: Synthetic oligonucleotide
  Target: LAMA2; (+) strand; PAM type: NRG; PAM sequence: CAG
atgtgactttaccacactta

SEQ ID NO: 139251 - DNA, 20 bp, Artificial Sequence
  Description of Artificial Sequence: Synthetic oligonucleotide
  Target: LAMA2; (+) strand; PAM type: NRG; PAM sequence: TAG
accacacttacagctttatt

SEQ ID NO: 139252 - DNA, 20 bp, Artificial Sequence
  Description of Artificial Sequence: Synthetic oligonucleotide
  Target: LAMA2; (+) strand; PAM type: NRG; PAM sequence: AGG
ccacacttacagctttattt

SEQ ID NO: 139253 - DNA, 20 bp, Artificial Sequence
  Description of Artificial Sequence: Synthetic oligonucleotide
  Target: LAMA2; (+) strand; PAM type: NRG; PAM sequence: AAG
cttacagctttatttaggaa

SEQ ID NO: 139254 - DNA, 20 bp, Artificial Sequence
  Description of Artificial Sequence: Synthetic oligonucleotide
  Target: LAMA2; (+) strand; PAM type: NRG; PAM sequence: GAG
tacagctttatttaggaaaa

SEQ ID NO: 139255 - DNA, 20 bp, Artificial Sequence
  Description of Artificial Sequence: Synthetic oligonucleotide
  Target: LAMA2; (+) strand; PAM type: NRG; PAM sequence: CAG
ttttaactcttcttttgtaa

SEQ ID NO: 139256 - DNA, 20 bp, Artificial Sequence
  Description of Artificial Sequence: Synthetic oligonucleotide
  Target: LAMA2; (+) strand; PAM type: NRG; PAM sequence: GAG
ttaactcttcttttgtaaca

SEQ ID NO: 139257 - DNA, 20 bp, Artificial Sequence
  Description of Artificial Sequence: Synthetic oligonucleotide
  Target: LAMA2; (+) strand; PAM type: NRG; PAM sequence: AAG
actcttcttttgtaacagag

SEQ ID NO: 139258 - DNA, 20 bp, Artificial Sequence
  Description of Artificial Sequence: Synthetic oligonucleotide
  Target: LAMA2; (+) strand; PAM type: NRG; PAM sequence: TGG
tcttttgtaacagagaagtc

SEQ ID NO: 139259 - DNA, 20 bp, Artificial Sequence
  Description of Artificial Sequence: Synthetic oligonucleotide
  Target: LAMA2; (+) strand; PAM type: NRG; PAM sequence: GGG
cttttgtaacagagaagtct

SEQ ID NO: 139260 - DNA, 20 bp, Artificial Sequence
  Description of Artificial Sequence: Synthetic oligonucleotide
  Target: LAMA2; (+) strand; PAM type: NRG; PAM sequence: TAG
gacattgtattttttcctca

SEQ ID NO: 139261 - DNA, 20 bp, Artificial Sequence
  Description of Artificial Sequence: Synthetic oligonucleotide
  Target: LAMA2; (+) strand; PAM type: NRG; PAM sequence: AAG
attttttcctcatagaacaa

SEQ ID NO: 139262 - DNA, 20 bp, Artificial Sequence
  Description of Artificial Sequence: Synthetic oligonucleotide
  Target: LAMA2; (+) strand; PAM type: NRG; PAM sequence: TAG
tttcctcatagaacaaaagt

SEQ ID NO: 139263 - DNA, 20 bp, Artificial Sequence
  Description of Artificial Sequence: Synthetic oligonucleotide
  Target: LAMA2; (+) strand; PAM type: NRG; PAM sequence: AAG
tagaacaaaagttagtataa

SEQ ID NO: 139264 - DNA, 20 bp, Artificial Sequence
  Description of Artificial Sequence: Synthetic oligonucleotide
  Target: LAMA2; (+) strand; PAM type: NRG; PAM sequence: AAG
acaaaagttagtataaaaga

SEQ ID NO: 139265 - DNA, 20 bp, Artificial Sequence
  Description of Artificial Sequence: Synthetic oligonucleotide
  Target: LAMA2; (+) strand; PAM type: NRG; PAM sequence: AGG
caaaagttagtataaaagaa

SEQ ID NO: 139266 - DNA, 20 bp, Artificial Sequence
  Description of Artificial Sequence: Synthetic oligonucleotide
  Target: LAMA2; (+) strand; PAM type: NRG; PAM sequence: GGG
aaaagttagtataaaagaaa

SEQ ID NO: 139267 - DNA, 20 bp, Artificial Sequence
  Description of Artificial Sequence: Synthetic oligonucleotide
  Target: LAMA2; (+) strand; PAM type: NRG; PAM sequence: AAG
agtataaaagaaagggaaaa

SEQ ID NO: 139268 - DNA, 20 bp, Artificial Sequence
  Description of Artificial Sequence: Synthetic oligonucleotide
  Target: LAMA2; (+) strand; PAM type: NRG; PAM sequence: AGG
gtataaaagaaagggaaaaa

SEQ ID NO: 139269 - DNA, 20 bp, Artificial Sequence
  Description of Artificial Sequence: Synthetic oligonucleotide
  Target: LAMA2; (+) strand; PAM type: NRG; PAM sequence: AAG
tacaatgatgctgtttaaac

SEQ ID NO: 139270 - DNA, 20 bp, Artificial Sequence
  Description of Artificial Sequence: Synthetic oligonucleotide
  Target: LAMA2; (+) strand; PAM type: NRG; PAM sequence: GAG
caatgatgctgtttaaacaa

SEQ ID NO: 139271 - DNA, 20 bp, Artificial Sequence
  Description of Artificial Sequence: Synthetic oligonucleotide
  Target: LAMA2; (+) strand; PAM type: NRG; PAM sequence: TAG
tttaaacaagagtgtaaatg

SEQ ID NO: 139272 - DNA, 20 bp, Artificial Sequence
  Description of Artificial Sequence: Synthetic oligonucleotide
  Target: LAMA2; (+) strand; PAM type: NRG; PAM sequence: AGG
ttaaacaagagtgtaaatgt

SEQ ID NO: 139273 - DNA, 20 bp, Artificial Sequence
  Description of Artificial Sequence: Synthetic oligonucleotide
  Target: LAMA2; (+) strand; PAM type: NRG; PAM sequence: TAG
aatgttgataaaccaaattc

SEQ ID NO: 139274 - DNA, 20 bp, Artificial Sequence
  Description of Artificial Sequence: Synthetic oligonucleotide
  Target: LAMA2; (+) strand; PAM type: NRG; PAM sequence: TGG
ccatgaaaatgtaaacattt

SEQ ID NO: 139275 - DNA, 20 bp, Artificial Sequence
  Description of Artificial Sequence: Synthetic oligonucleotide
  Target: LAMA2; (+) strand; PAM type: NRG; PAM sequence: GAG
atgaaaatgtaaacattttg

SEQ ID NO: 139276 - DNA, 20 bp, Artificial Sequence
  Description of Artificial Sequence: Synthetic oligonucleotide
  Target: LAMA2; (+) strand; PAM type: NRG; PAM sequence: CAG
atgtaaacattttggagacc

SEQ ID NO: 139277 - DNA, 20 bp, Artificial Sequence
  Description of Artificial Sequence: Synthetic oligonucleotide
  Target: LAMA2; (+) strand; PAM type: NRG; PAM sequence: TAG
gacccagatcctatttcaaa

SEQ ID NO: 139278 - DNA, 20 bp, Artificial Sequence
  Description of Artificial Sequence: Synthetic oligonucleotide
  Target: LAMA2; (+) strand; PAM type: NRG; PAM sequence: GAG
cccagatcctatttcaaata

SEQ ID NO: 139279 - DNA, 20 bp, Artificial Sequence
  Description of Artificial Sequence: Synthetic oligonucleotide
  Target: LAMA2; (+) strand; PAM type: NRG; PAM sequence: AAG
atcctatttcaaatagagtc

SEQ ID NO: 139280 - DNA, 20 bp, Artificial Sequence
  Description of Artificial Sequence: Synthetic oligonucleotide
  Target: LAMA2; (+) strand; PAM type: NRG; PAM sequence: TAG
tagagtcaagatgactgccc

SEQ ID NO: 139281 - DNA, 20 bp, Artificial Sequence
  Description of Artificial Sequence: Synthetic oligonucleotide
  Target: LAMA2; (+) strand; PAM type: NRG; PAM sequence: AAG
gccctagaaaatgcttcttg

SEQ ID NO: 139282 - DNA, 20 bp, Artificial Sequence
  Description of Artificial Sequence: Synthetic oligonucleotide
  Target: LAMA2; (+) strand; PAM type: NRG; PAM sequence: TGG
gaaaatgcttcttgaagtca

SEQ ID NO: 139283 - DNA, 20 bp, Artificial Sequence
  Description of Artificial Sequence: Synthetic oligonucleotide
  Target: LAMA2; (+) strand; PAM type: NRG; PAM sequence: TAG
cttgaagtcatggaataaat

SEQ ID NO: 139284 - DNA, 20 bp, Artificial Sequence
  Description of Artificial Sequence: Synthetic oligonucleotide
  Target: LAMA2; (+) strand; PAM type: NRG; PAM sequence: AAG
tgattgtttatttaaaaaaa

SEQ ID NO: 139285 - DNA, 20 bp, Artificial Sequence
  Description of Artificial Sequence: Synthetic oligonucleotide
  Target: LAMA2; (+) strand; PAM type: NRG; PAM sequence: TAG
aaaaaaagaacaataataca

SEQ ID NO: 139286 - DNA, 20 bp, Artificial Sequence
  Description of Artificial Sequence: Synthetic oligonucleotide
  Target: LAMA2; (+) strand; PAM type: NRG; PAM sequence: AGG
aaaaaagaacaataatacat

SEQ ID NO: 139287 - DNA, 20 bp, Artificial Sequence
  Description of Artificial Sequence: Synthetic oligonucleotide
  Target: LAMA2; (+) strand; PAM type: NRG; PAM sequence: GAG
aaaagaacaataatacatag

SEQ ID NO: 139288 - DNA, 20 bp, Artificial Sequence
  Description of Artificial Sequence: Synthetic oligonucleotide
  Target: LAMA2; (+) strand; PAM type: NRG; PAM sequence: GAG
agatctgttaaaaaatctgt

SEQ ID NO: 139289 - DNA, 20 bp, Artificial Sequence
  Description of Artificial Sequence: Synthetic oligonucleotide
  Target: LAMA2; (+) strand; PAM type: NRG; PAM sequence: AGG
gatctgttaaaaaatctgtg

SEQ ID NO: 139290 - DNA, 20 bp, Artificial Sequence
  Description of Artificial Sequence: Synthetic oligonucleotide
  Target: LAMA2; (+) strand; PAM type: NRG; PAM sequence: AAG
tgttaaaaaatctgtgagga

SEQ ID NO: 139291 - DNA, 20 bp, Artificial Sequence
  Description of Artificial Sequence: Synthetic oligonucleotide
  Target: LAMA2; (+) strand; PAM type: NRG; PAM sequence: GAG
ttaaaaaatctgtgaggaaa

SEQ ID NO: 139292 - DNA, 20 bp, Artificial Sequence
  Description of Artificial Sequence: Synthetic oligonucleotide
  Target: LAMA2; (+) strand; PAM type: NRG; PAM sequence: TGG
aaaccacatgaattctgtta

SEQ ID NO: 139293 - DNA, 20 bp, Artificial Sequence
  Description of Artificial Sequence: Synthetic oligonucleotide
  Target: LAMA2; (+) strand; PAM type: NRG; PAM sequence: AAG
cacatgaattctgttatgga

SEQ ID NO: 139294 - DNA, 20 bp, Artificial Sequence
  Description of Artificial Sequence: Synthetic oligonucleotide
  Target: LAMA2; (+) strand; PAM type: NRG; PAM sequence: AAG
ctgttatggaaagtctgaac

SEQ ID NO: 139295 - DNA, 20 bp, Artificial Sequence
  Description of Artificial Sequence: Synthetic oligonucleotide
  Target: LAMA2; (+) strand; PAM type: NRG; PAM sequence: TAG
ctgaacaagactttctaaaa

SEQ ID NO: 139296 - DNA, 20 bp, Artificial Sequence
  Description of Artificial Sequence: Synthetic oligonucleotide
  Target: LAMA2; (+) strand; PAM type: NRG; PAM sequence: TGG
tttctaaaatagattgaatg

SEQ ID NO: 139297 - DNA, 20 bp, Artificial Sequence
  Description of Artificial Sequence: Synthetic oligonucleotide
  Target: LAMA2; (+) strand; PAM type: NRG; PAM sequence: GGG
ttctaaaatagattgaatgt

SEQ ID NO: 139298 - DNA, 20 bp, Artificial Sequence
  Description of Artificial Sequence: Synthetic oligonucleotide
  Target: LAMA2; (+) strand; PAM type: NRG; PAM sequence: CAG
taaaatagattgaatgtggg

SEQ ID NO: 139299 - DNA, 20 bp, Artificial Sequence
  Description of Artificial Sequence: Synthetic oligonucleotide
  Target: LAMA2; (+) strand; PAM type: NRG; PAM sequence: CAG
ttgaatgtgggcagttttca

SEQ ID NO: 139300 - DNA, 20 bp, Artificial Sequence
  Description of Artificial Sequence: Synthetic oligonucleotide
  Target: LAMA2; (+) strand; PAM type: NRG; PAM sequence: TGG
acatccacatttcatccttt

SEQ ID NO: 139301 - DNA, 20 bp, Artificial Sequence
  Description of Artificial Sequence: Synthetic oligonucleotide
  Target: LAMA2; (+) strand; PAM type: NRG; PAM sequence: TGG
tccacatttcatccttttgg

SEQ ID NO: 139302 - DNA, 20 bp, Artificial Sequence
  Description of Artificial Sequence: Synthetic oligonucleotide
  Target: LAMA2; (+) strand; PAM type: NRG; PAM sequence: TAG
gtattttccaattttattct

SEQ ID NO: 139303 - DNA, 20 bp, Artificial Sequence
  Description of Artificial Sequence: Synthetic oligonucleotide
  Target: LAMA2; (+) strand; PAM type: NRG; PAM sequence: GAG
attttccaattttattctta

SEQ ID NO: 139304 - DNA, 20 bp, Artificial Sequence
  Description of Artificial Sequence: Synthetic oligonucleotide
  Target: LAMA2; (+) strand; PAM type: NRG; PAM sequence: AAG
tatattatttatttaaaaat

SEQ ID NO: 139305 - DNA, 20 bp, Artificial Sequence
  Description of Artificial Sequence: Synthetic oligonucleotide
  Target: LAMA2; (+) strand; PAM type: NRG; PAM sequence: AGG
atattatttatttaaaaata

SEQ ID NO: 139306 - DNA, 20 bp, Artificial Sequence
  Description of Artificial Sequence: Synthetic oligonucleotide
  Target: LAMA2; (+) strand; PAM type: NRG; PAM sequence: AAG
tatattatttgtttttaaat

SEQ ID NO: 139307 - DNA, 20 bp, Artificial Sequence
  Description of Artificial Sequence: Synthetic oligonucleotide
  Target: LAMA2; (+) strand; PAM type: NRG; PAM sequence: AGG
atattatttgtttttaaata

SEQ ID NO: 139308 - DNA, 20 bp, Artificial Sequence
  Description of Artificial Sequence: Synthetic oligonucleotide
  Target: LAMA2; (+) strand; PAM type: NRG; PAM sequence: AAG
taaggaattacaaaataatg

SEQ ID NO: 139309 - DNA, 20 bp, Artificial Sequence
  Description of Artificial Sequence: Synthetic oligonucleotide
  Target: LAMA2; (+) strand; PAM type: NRG; PAM sequence: GAG
aggaattacaaaataatgaa

SEQ ID NO: 139310 - DNA, 20 bp, Artificial Sequence
  Description of Artificial Sequence: Synthetic oligonucleotide
  Target: LAMA2; (+) strand; PAM type: NRG; PAM sequence: TAG
tgaagagaccgtatttatta

SEQ ID NO: 139311 - DNA, 20 bp, Artificial Sequence
  Description of Artificial Sequence: Synthetic oligonucleotide
  Target: LAMA2; (+) strand; PAM type: NRG; PAM sequence: CAG
gtgactaaaaaccccatgca

SEQ ID NO: 139312 - DNA, 20 bp, Artificial Sequence
  Description of Artificial Sequence: Synthetic oligonucleotide
  Target: LAMA2; (+) strand; PAM type: NRG; PAM sequence: GAG
gactaaaaaccccatgcaca

SEQ ID NO: 139313 - DNA, 20 bp, Artificial Sequence
  Description of Artificial Sequence: Synthetic oligonucleotide
  Target: LAMA2; (+) strand; PAM type: NRG; PAM sequence: GAG
catgcacagagaaaattctt

SEQ ID NO: 139314 - DNA, 20 bp, Artificial Sequence
  Description of Artificial Sequence: Synthetic oligonucleotide
  Target: LAMA2; (+) strand; PAM type: NRG; PAM sequence: TGG
gagaaaattcttgagtcaaa

SEQ ID NO: 139315 - DNA, 20 bp, Artificial Sequence
  Description of Artificial Sequence: Synthetic oligonucleotide
  Target: LAMA2; (+) strand; PAM type: NRG; PAM sequence: TAG
caaatggcttcattgatgaa

SEQ ID NO: 139316 - DNA, 20 bp, Artificial Sequence
  Description of Artificial Sequence: Synthetic oligonucleotide
  Target: LAMA2; (+) strand; PAM type: NRG; PAM sequence: AAG
atggcttcattgatgaatag

SEQ ID NO: 139317 - DNA, 20 bp, Artificial Sequence
  Description of Artificial Sequence: Synthetic oligonucleotide
  Target: LAMA2; (+) strand; PAM type: NRG; PAM sequence: TAG
cttcattgatgaatagaagt

SEQ ID NO: 139318 - DNA, 20 bp, Artificial Sequence
  Description of Artificial Sequence: Synthetic oligonucleotide
  Target: LAMA2; (+) strand; PAM type: NRG; PAM sequence: TGG
atgaatagaagttagaatac

SEQ ID NO: 139319 - DNA, 20 bp, Artificial Sequence
  Description of Artificial Sequence: Synthetic oligonucleotide
  Target: LAMA2; (+) strand; PAM type: NRG; PAM sequence: AAG
agaatactggttattgttac

SEQ ID NO: 139320 - DNA, 20 bp, Artificial Sequence
  Description of Artificial Sequence: Synthetic oligonucleotide
  Target: LAMA2; (+) strand; PAM type: NRG; PAM sequence: AGG
gaatactggttattgttaca

SEQ ID NO: 139321 - DNA, 20 bp, Artificial Sequence
  Description of Artificial Sequence: Synthetic oligonucleotide
  Target: LAMA2; (+) strand; PAM type: NRG; PAM sequence: GAG
atactggttattgttacaag

SEQ ID NO: 139322 - DNA, 20 bp, Artificial Sequence
  Description of Artificial Sequence: Synthetic oligonucleotide
  Target: LAMA2; (+) strand; PAM type: NRG; PAM sequence: GAG
actggttattgttacaagga

SEQ ID NO: 139323 - DNA, 20 bp, Artificial Sequence
  Description of Artificial Sequence: Synthetic oligonucleotide
  Target: LAMA2; (+) strand; PAM type: NRG; PAM sequence: AGG
ctggttattgttacaaggag

SEQ ID NO: 139324 - DNA, 20 bp, Artificial Sequence
  Description of Artificial Sequence: Synthetic oligonucleotide
  Target: LAMA2; (+) strand; PAM type: NRG; PAM sequence: GGG
tggttattgttacaaggaga

SEQ ID NO: 139325 - DNA, 20 bp, Artificial Sequence
  Description of Artificial Sequence: Synthetic oligonucleotide
  Target: LAMA2; (+) strand; PAM type: NRG; PAM sequence: AAG
ttattgttacaaggagaggg

SEQ ID NO: 139326 - DNA, 20 bp, Artificial Sequence
  Description of Artificial Sequence: Synthetic oligonucleotide
  Target: LAMA2; (+) strand; PAM type: NRG; PAM sequence: TGG
aggagagggaagataatgac

SEQ ID NO: 139327 - DNA, 20 bp, Artificial Sequence
  Description of Artificial Sequence: Synthetic oligonucleotide
  Target: LAMA2; (+) strand; PAM type: NRG; PAM sequence: GGG
ggagagggaagataatgact

SEQ ID NO: 139328 - DNA, 20 bp, Artificial Sequence
  Description of Artificial Sequence: Synthetic oligonucleotide
  Target: LAMA2; (+) strand; PAM type: NRG; PAM sequence: GAG
agagggaagataatgactgg

SEQ ID NO: 139329 - DNA, 20 bp, Artificial Sequence
  Description of Artificial Sequence: Synthetic oligonucleotide
  Target: LAMA2; (+) strand; PAM type: NRG; PAM sequence: GAG
agggaagataatgactggga

SEQ ID NO: 139330 - DNA, 20 bp, Artificial Sequence
  Description of Artificial Sequence: Synthetic oligonucleotide
  Target: LAMA2; (+) strand; PAM type: NRG; PAM sequence: AGG
gggaagataatgactgggag

SEQ ID NO: 139331 - DNA, 20 bp, Artificial Sequence
  Description of Artificial Sequence: Synthetic oligonucleotide
  Target: LAMA2; (+) strand; PAM type: NRG; PAM sequence: GGG
ggaagataatgactgggaga

SEQ ID NO: 139332 - DNA, 20 bp, Artificial Sequence
  Description of Artificial Sequence: Synthetic oligonucleotide
  Target: LAMA2; (+) strand; PAM type: NRG; PAM sequence: GAG
taatgactgggagagggtat

SEQ ID NO: 139333 - DNA, 20 bp, Artificial Sequence
  Description of Artificial Sequence: Synthetic oligonucleotide
  Target: LAMA2; (+) strand; PAM type: NRG; PAM sequence: AGG
aatgactgggagagggtatg

SEQ ID NO: 139334 - DNA, 20 bp, Artificial Sequence
  Description of Artificial Sequence: Synthetic oligonucleotide
  Target: LAMA2; (+) strand; PAM type: NRG; PAM sequence: AAG
actgggagagggtatgagga

SEQ ID NO: 139335 - DNA, 20 bp, Artificial Sequence
  Description of Artificial Sequence: Synthetic oligonucleotide
  Target: LAMA2; (+) strand; PAM type: NRG; PAM sequence: TAG
attgtacaataataatgtgt

SEQ ID NO: 139336 - DNA, 20 bp, Artificial Sequence
  Description of Artificial Sequence: Synthetic oligonucleotide
  Target: LAMA2; (+) strand; PAM type: NRG; PAM sequence: TAG
aataataatgtgttagtaca

SEQ ID NO: 139337 - DNA, 20 bp, Artificial Sequence
  Description of Artificial Sequence: Synthetic oligonucleotide
  Target: LAMA2; (+) strand; PAM type: NRG; PAM sequence: AAG
gaactaatataattgtaaat

SEQ ID NO: 139338 - DNA, 20 bp, Artificial Sequence
  Description of Artificial Sequence: Synthetic oligonucleotide
  Target: LAMA2; (+) strand; PAM type: NRG; PAM sequence: TAG
ataataaaatatacaaaata

SEQ ID NO: 139339 - DNA, 20 bp, Artificial Sequence
  Description of Artificial Sequence: Synthetic oligonucleotide
  Target: LAMA2; (+) strand; PAM type: NRG; PAM sequence: TAG
aattatatgtactaatgtat

SEQ ID NO: 139340 - DNA, 20 bp, Artificial Sequence
  Description of Artificial Sequence: Synthetic oligonucleotide
  Target: LAMA2; (+) strand; PAM type: NRG; PAM sequence: AAG
atttatatgtacctatatat

SEQ ID NO: 139341 - DNA, 20 bp, Artificial Sequence
  Description of Artificial Sequence: Synthetic oligonucleotide
  Target: LAMA2; (+) strand; PAM type: NRG; PAM sequence: TAG
cctatatataagactttttc

SEQ ID NO: 139342 - DNA, 20 bp, Artificial Sequence
  Description of Artificial Sequence: Synthetic oligonucleotide
  Target: LAMA2; (+) strand; PAM type: NRG; PAM sequence: GAG
tgactacatatttgaattgt

SEQ ID NO: 139343 - DNA, 20 bp, Artificial Sequence
  Description of Artificial Sequence: Synthetic oligonucleotide
  Target: LAMA2; (+) strand; PAM type: NRG; PAM sequence: CAG
tacatatttgaattgtgaga

SEQ ID NO: 139344 - DNA, 20 bp, Artificial Sequence
  Description of Artificial Sequence: Synthetic oligonucleotide
  Target: LAMA2; (+) strand; PAM type: NRG; PAM sequence: TAG
agcatgtatgttttgattca

SEQ ID NO: 139345 - DNA, 20 bp, Artificial Sequence
  Description of Artificial Sequence: Synthetic oligonucleotide
  Target: LAMA2; (+) strand; PAM type: NRG; PAM sequence: AAG
gtatgttttgattcatagat

SEQ ID NO: 139346 - DNA, 20 bp, Artificial Sequence
  Description of Artificial Sequence: Synthetic oligonucleotide
  Target: LAMA2; (+) strand; PAM type: NRG; PAM sequence: TGG
atatctctaaaatacaaaca

SEQ ID NO: 139347 - DNA, 20 bp, Artificial Sequence
  Description of Artificial Sequence: Synthetic oligonucleotide
  Target: LAMA2; (+) strand; PAM type: NRG; PAM sequence: AAG
aaatacaaacatggcaaaaa

SEQ ID NO: 139348 - DNA, 20 bp, Artificial Sequence
  Description of Artificial Sequence: Synthetic oligonucleotide
  Target: LAMA2; (+) strand; PAM type: NRG; PAM sequence: AGG
aatacaaacatggcaaaaaa

SEQ ID NO: 139349 - DNA, 20 bp, Artificial Sequence
  Description of Artificial Sequence: Synthetic oligonucleotide
  Target: LAMA2; (+) strand; PAM type: NRG; PAM sequence: TGG
caaacatggcaaaaaaaggc

SEQ ID NO: 139350 - DNA, 20 bp, Artificial Sequence
  Description of Artificial Sequence: Synthetic oligonucleotide
  Target: LAMA2; (+) strand; PAM type: NRG; PAM sequence: GAG
aacatggcaaaaaaaggctg

SEQ ID NO: 139351 - DNA, 20 bp, Artificial Sequence
  Description of Artificial Sequence: Synthetic oligonucleotide
  Target: LAMA2; (+) strand; PAM type: NRG; PAM sequence: GAG
tggcaaaaaaaggctggagt

SEQ ID NO: 139352 - DNA, 20 bp, Artificial Sequence
  Description of Artificial Sequence: Synthetic oligonucleotide
  Target: LAMA2; (+) strand; PAM type: NRG; PAM sequence: AAG
aaaaaggctggagtgagact

SEQ ID NO: 139353 - DNA, 20 bp, Artificial Sequence
  Description of Artificial Sequence: Synthetic oligonucleotide
  Target: LAMA2; (+) strand; PAM type: NRG; PAM sequence: AGG
aaaaggctggagtgagacta

SEQ ID NO: 139354 - DNA, 20 bp, Artificial Sequence
  Description of Artificial Sequence: Synthetic oligonucleotide
  Target: LAMA2; (+) strand; PAM type: NRG; PAM sequence: GAG
aaggctggagtgagactaag

SEQ ID NO: 139355 - DNA, 20 bp, Artificial Sequence
  Description of Artificial Sequence: Synthetic oligonucleotide
  Target: LAMA2; (+) strand; PAM type: NRG; PAM sequence: AAG
ctggagtgagactaaggaga

SEQ ID NO: 139356 - DNA, 20 bp, Artificial Sequence
  Description of Artificial Sequence: Synthetic oligonucleotide
  Target: LAMA2; (+) strand; PAM type: NRG; PAM sequence: AGG
tggagtgagactaaggagaa

SEQ ID NO: 139357 - DNA, 20 bp, Artificial Sequence
  Description of Artificial Sequence: Synthetic oligonucleotide
  Target: LAMA2; (+) strand; PAM type: NRG; PAM sequence: GAG
gagtgagactaaggagaaag

SEQ ID NO: 139358 - DNA, 20 bp, Artificial Sequence
  Description of Artificial Sequence: Synthetic oligonucleotide
  Target: LAMA2; (+) strand; PAM type: NRG; PAM sequence: AGG
agtgagactaaggagaaagg

SEQ ID NO: 139359 - DNA, 20 bp, Artificial Sequence
  Description of Artificial Sequence: Synthetic oligonucleotide
  Target: LAMA2; (+) strand; PAM type: NRG; PAM sequence: GAG
tgagactaaggagaaaggag

SEQ ID NO: 139360 - DNA, 20 bp, Artificial Sequence
  Description of Artificial Sequence: Synthetic oligonucleotide
  Target: LAMA2; (+) strand; PAM type: NRG; PAM sequence: AAG
aaggagaaaggaggagctat

SEQ ID NO: 139361 - DNA, 20 bp, Artificial Sequence
  Description of Artificial Sequence: Synthetic oligonucleotide
  Target: LAMA2; (+) strand; PAM type: NRG; PAM sequence: CAG
ggaggagctataagtgtgcc

SEQ ID NO: 139362 - DNA, 20 bp, Artificial Sequence
  Description of Artificial Sequence: Synthetic oligonucleotide
  Target: LAMA2; (+) strand; PAM type: NRG; PAM sequence: TGG
tttacctatgacttatgcgt

SEQ ID NO: 139363 - DNA, 20 bp, Artificial Sequence
  Description of Artificial Sequence: Synthetic oligonucleotide
  Target: LAMA2; (+) strand; PAM type: NRG; PAM sequence: TAG
atgcgttggtacatttacct

SEQ ID NO: 139364 - DNA, 20 bp, Artificial Sequence
  Description of Artificial Sequence: Synthetic oligonucleotide
  Target: LAMA2; (+) strand; PAM type: NRG; PAM sequence: AGG
tgcgttggtacatttacctt

SEQ ID NO: 139365 - DNA, 20 bp, Artificial Sequence
  Description of Artificial Sequence: Synthetic oligonucleotide
  Target: LAMA2; (+) strand; PAM type: NRG; PAM sequence: TGG
cacttttatgctcttcaatt

SEQ ID NO: 139366 - DNA, 20 bp, Artificial Sequence
  Description of Artificial Sequence: Synthetic oligonucleotide
  Target: LAMA2; (+) strand; PAM type: NRG; PAM sequence: TAG
ttatgctcttcaatttggtc

SEQ ID NO: 139367 - DNA, 20 bp, Artificial Sequence
  Description of Artificial Sequence: Synthetic oligonucleotide
  Target: LAMA2; (+) strand; PAM type: NRG; PAM sequence: TGG
caatttggtctagtgtaaaa

SEQ ID NO: 139368 - DNA, 20 bp, Artificial Sequence
  Description of Artificial Sequence: Synthetic oligonucleotide
  Target: LAMA2; (+) strand; PAM type: NRG; PAM sequence: GAG
atttggtctagtgtaaaatg

SEQ ID NO: 139369 - DNA, 20 bp, Artificial Sequence
  Description of Artificial Sequence: Synthetic oligonucleotide
  Target: LAMA2; (+) strand; PAM type: NRG; PAM sequence: TAG
ctagtgtaaaatggagcaaa

SEQ ID NO: 139370 - DNA, 20 bp, Artificial Sequence
  Description of Artificial Sequence: Synthetic oligonucleotide
  Target: LAMA2; (+) strand; PAM type: NRG; PAM sequence: AGG
tagtgtaaaatggagcaaat

SEQ ID NO: 139371 - DNA, 20 bp, Artificial Sequence
  Description of Artificial Sequence: Synthetic oligonucleotide
  Target: LAMA2; (+) strand; PAM type: NRG; PAM sequence: GAG
taggcccacttccttattac

SEQ ID NO: 139372 - DNA, 20 bp, Artificial Sequence
  Description of Artificial Sequence: Synthetic oligonucleotide
  Target: LAMA2; (+) strand; PAM type: NRG; PAM sequence: AGG
aggcccacttccttattacg

SEQ ID NO: 139373 - DNA, 20 bp, Artificial Sequence
  Description of Artificial Sequence: Synthetic oligonucleotide
  Target: LAMA2; (+) strand; PAM type: NRG; PAM sequence: AAG
cttattacgaggcatattat

SEQ ID NO: 139374 - DNA, 20 bp, Artificial Sequence
  Description of Artificial Sequence: Synthetic oligonucleotide
  Target: LAMA2; (+) strand; PAM type: NRG; PAM sequence: AGG
ttattacgaggcatattata

SEQ ID NO: 139375 - DNA, 20 bp, Artificial Sequence
  Description of Artificial Sequence: Synthetic oligonucleotide
  Target: LAMA2; (+) strand; PAM type: NRG; PAM sequence: AAG
cgaggcatattataaggata

SEQ ID NO: 139376 - DNA, 20 bp, Artificial Sequence
  Description of Artificial Sequence: Synthetic oligonucleotide
  Target: LAMA2; (+) strand; PAM type: NRG; PAM sequence: TAG
aaggataaagtgatgtgtta

SEQ ID NO: 139377 - DNA, 20 bp, Artificial Sequence
  Description of Artificial Sequence: Synthetic oligonucleotide
  Target: LAMA2; (+) strand; PAM type: NRG; PAM sequence: AGG
aggataaagtgatgtgttat

SEQ ID NO: 139378 - DNA, 20 bp, Artificial Sequence
  Description of Artificial Sequence: Synthetic oligonucleotide
  Target: LAMA2; (+) strand; PAM type: NRG; PAM sequence: AAG
aaagtgatgtgttataggca

SEQ ID NO: 139379 - DNA, 20 bp, Artificial Sequence
  Description of Artificial Sequence: Synthetic oligonucleotide
  Target: LAMA2; (+) strand; PAM type: NRG; PAM sequence: GAG
agtgatgtgttataggcaaa

SEQ ID NO: 139380 - DNA, 20 bp, Artificial Sequence
  Description of Artificial Sequence: Synthetic oligonucleotide
  Target: LAMA2; (+) strand; PAM type: NRG; PAM sequence: TAG
tgtgttataggcaaagagca

SEQ ID NO: 139381 - DNA, 20 bp, Artificial Sequence
  Description of Artificial Sequence: Synthetic oligonucleotide
  Target: LAMA2; (+) strand; PAM type: NRG; PAM sequence: TAG
catagcacactgctgcactt

SEQ ID NO: 139382 - DNA, 20 bp, Artificial Sequence
  Description of Artificial Sequence: Synthetic oligonucleotide
  Target: LAMA2; (+) strand; PAM type: NRG; PAM sequence: AGG
atagcacactgctgcacttt

SEQ ID NO: 139383 - DNA, 20 bp, Artificial Sequence
  Description of Artificial Sequence: Synthetic oligonucleotide
  Target: LAMA2; (+) strand; PAM type: NRG; PAM sequence: CAG
gctgcactttaggtgatact

SEQ ID NO: 139384 - DNA, 20 bp, Artificial Sequence
  Description of Artificial Sequence: Synthetic oligonucleotide
  Target: LAMA2; (+) strand; PAM type: NRG; PAM sequence: TGG
tactcagaaaatattacttt

SEQ ID NO: 139385 - DNA, 20 bp, Artificial Sequence
  Description of Artificial Sequence: Synthetic oligonucleotide
  Target: LAMA2; (+) strand; PAM type: NRG; PAM sequence: TGG
gtcttccacattgaaaataa

SEQ ID NO: 139386 - DNA, 20 bp, Artificial Sequence
  Description of Artificial Sequence: Synthetic oligonucleotide
  Target: LAMA2; (+) strand; PAM type: NRG; PAM sequence: TGG
acattgaaaataatggtgaa

SEQ ID NO: 139387 - DNA, 20 bp, Artificial Sequence
  Description of Artificial Sequence: Synthetic oligonucleotide
  Target: LAMA2; (+) strand; PAM type: NRG; PAM sequence: GAG
attgaaaataatggtgaatg

SEQ ID NO: 139388 - DNA, 20 bp, Artificial Sequence
  Description of Artificial Sequence: Synthetic oligonucleotide
  Target: LAMA2; (+) strand; PAM type: NRG; PAM sequence: TGG
aatggtgaatggagaataaa

SEQ ID NO: 139389 - DNA, 20 bp, Artificial Sequence
  Description of Artificial Sequence: Synthetic oligonucleotide
  Target: LAMA2; (+) strand; PAM type: NRG; PAM sequence: GGG
atggtgaatggagaataaat

SEQ ID NO: 139390 - DNA, 20 bp, Artificial Sequence
  Description of Artificial Sequence: Synthetic oligonucleotide
  Target: LAMA2; (+) strand; PAM type: NRG; PAM sequence: AAG
gaatggagaataaatgggct

SEQ ID NO: 139391 - DNA, 20 bp, Artificial Sequence
  Description of Artificial Sequence: Synthetic oligonucleotide
  Target: LAMA2; (+) strand; PAM type: NRG; PAM sequence: TGG
ctaagttgtaatgtgaaaaa

SEQ ID NO: 139392 - DNA, 20 bp, Artificial Sequence
  Description of Artificial Sequence: Synthetic oligonucleotide
  Target: LAMA2; (+) strand; PAM type: NRG; PAM sequence: AAG
aatggaaaataacaaaacaa

SEQ ID NO: 139393 - DNA, 20 bp, Artificial Sequence
  Description of Artificial Sequence: Synthetic oligonucleotide
  Target: LAMA2; (+) strand; PAM type: NRG; PAM sequence: TGG
ctcaaaaatgctttaattac

SEQ ID NO: 139394 - DNA, 20 bp, Artificial Sequence
  Description of Artificial Sequence: Synthetic oligonucleotide
  Target: LAMA2; (+) strand; PAM type: NRG; PAM sequence: GAG
gatattgaaatgatacctat

SEQ ID NO: 139395 - DNA, 20 bp, Artificial Sequence
  Description of Artificial Sequence: Synthetic oligonucleotide
  Target: LAMA2; (+) strand; PAM type: NRG; PAM sequence: AGG
atattgaaatgatacctatg

SEQ ID NO: 139396 - DNA, 20 bp, Artificial Sequence
  Description of Artificial Sequence: Synthetic oligonucleotide
  Target: LAMA2; (+) strand; PAM type: NRG; PAM sequence: AAG
gttcactttgtatatcacct

SEQ ID NO: 139397 - DNA, 20 bp, Artificial Sequence
  Description of Artificial Sequence: Synthetic oligonucleotide
  Target: LAMA2; (+) strand; PAM type: NRG; PAM sequence: TAG
tattttactcaatatatttt

SEQ ID NO: 139398 - DNA, 20 bp, Artificial Sequence
  Description of Artificial Sequence: Synthetic oligonucleotide
  Target: LAMA2; (+) strand; PAM type: NRG; PAM sequence: TGG
aatatatttttagcacttta

SEQ ID NO: 139399 - DNA, 20 bp, Artificial Sequence
  Description of Artificial Sequence: Synthetic oligonucleotide
  Target: LAMA2; (+) strand; PAM type: NRG; PAM sequence: TGG
tatggacattaatatttcta

SEQ ID NO: 139400 - DNA, 20 bp, Artificial Sequence
  Description of Artificial Sequence: Synthetic oligonucleotide
  Target: LAMA2; (+) strand; PAM type: NRG; PAM sequence: GAG
tggacattaatatttctatg

SEQ ID NO: 139401 - DNA, 20 bp, Artificial Sequence
  Description of Artificial Sequence: Synthetic oligonucleotide
  Target: LAMA2; (+) strand; PAM type: NRG; PAM sequence: AAG
cattaatatttctatggaga

SEQ ID NO: 139402 - DNA, 20 bp, Artificial Sequence
  Description of Artificial Sequence: Synthetic oligonucleotide
  Target: LAMA2; (+) strand; PAM type: NRG; PAM sequence: AAG
ttctatggagaaagcttaaa

SEQ ID NO: 139403 - DNA, 20 bp, Artificial Sequence
  Description of Artificial Sequence: Synthetic oligonucleotide
  Target: LAMA2; (+) strand; PAM type: NRG; PAM sequence: CAG
gcattgaaactcttttgtaa

SEQ ID NO: 139404 - DNA, 20 bp, Artificial Sequence
  Description of Artificial Sequence: Synthetic oligonucleotide
  Target: LAMA2; (+) strand; PAM type: NRG; PAM sequence: CAG
gttgttgtcatgatatcctc

SEQ ID NO: 139405 - DNA, 20 bp, Artificial Sequence
  Description of Artificial Sequence: Synthetic oligonucleotide
  Target: LAMA2; (+) strand; PAM type: NRG; PAM sequence: AAG
gattacttaaatttttaacc

SEQ ID NO: 139406 - DNA, 20 bp, Artificial Sequence
  Description of Artificial Sequence: Synthetic oligonucleotide
  Target: LAMA2; (+) strand; PAM type: NRG; PAM sequence: AAG
tacttaaatttttaaccaag

SEQ ID NO: 139407 - DNA, 20 bp, Artificial Sequence
  Description of Artificial Sequence: Synthetic oligonucleotide
  Target: LAMA2; (+) strand; PAM type: NRG; PAM sequence: TAG
gaagtaaccttacttattac

SEQ ID NO: 139408 - DNA, 20 bp, Artificial Sequence
  Description of Artificial Sequence: Synthetic oligonucleotide
  Target: LAMA2; (+) strand; PAM type: NRG; PAM sequence: AAG
ctagtatgctctttccttaa

SEQ ID NO: 139409 - DNA, 20 bp, Artificial Sequence
  Description of Artificial Sequence: Synthetic oligonucleotide
  Target: LAMA2; (+) strand; PAM type: NRG; PAM sequence: CAG
atcaatcttgttattatgta

SEQ ID NO: 139410 - DNA, 20 bp, Artificial Sequence
  Description of Artificial Sequence: Synthetic oligonucleotide
  Target: LAMA2; (+) strand; PAM type: NRG; PAM sequence: TAG
ctttctgcaactttccattt

SEQ ID NO: 139411 - DNA, 20 bp, Artificial Sequence
  Description of Artificial Sequence: Synthetic oligonucleotide
  Target: LAMA2; (+) strand; PAM type: NRG; PAM sequence: TGG
ttttagatatgtctcattaa

SEQ ID NO: 139412 - DNA, 20 bp, Artificial Sequence
  Description of Artificial Sequence: Synthetic oligonucleotide
  Target: LAMA2; (+) strand; PAM type: NRG; PAM sequence: TAG
tatgtctcattaatggcata

SEQ ID NO: 139413 - DNA, 20 bp, Artificial Sequence
  Description of Artificial Sequence: Synthetic oligonucleotide
  Target: LAMA2; (+) strand; PAM type: NRG; PAM sequence: AAG
ctcattaatggcatatagtg

SEQ ID NO: 139414 - DNA, 20 bp, Artificial Sequence
  Description of Artificial Sequence: Synthetic oligonucleotide
  Target: LAMA2; (+) strand; PAM type: NRG; PAM sequence: TAG
tgaagttttgacgttttgtc

SEQ ID NO: 139415 - DNA, 20 bp, Artificial Sequence
  Description of Artificial Sequence: Synthetic oligonucleotide
  Target: LAMA2; (+) strand; PAM type: NRG; PAM sequence: TGG
ttttgacgttttgtctagtt

SEQ ID NO: 139416 - DNA, 20 bp, Artificial Sequence
  Description of Artificial Sequence: Synthetic oligonucleotide
  Target: LAMA2; (+) strand; PAM type: NRG; PAM sequence: CAG
tgacgttttgtctagtttgg

SEQ ID NO: 139417 - DNA, 20 bp, Artificial Sequence
  Description of Artificial Sequence: Synthetic oligonucleotide
  Target: LAMA2; (+) strand; PAM type: NRG; PAM sequence: TGG
tttgtctagtttggcagtgt

SEQ ID NO: 139418 - DNA, 20 bp, Artificial Sequence
  Description of Artificial Sequence: Synthetic oligonucleotide
  Target: LAMA2; (+) strand; PAM type: NRG; PAM sequence: CAG
tttaatgaaacatgcatttt

SEQ ID NO: 139419 - DNA, 20 bp, Artificial Sequence
  Description of Artificial Sequence: Synthetic oligonucleotide
  Target: LAMA2; (+) strand; PAM type: NRG; PAM sequence: TGG
aatgaaacatgcattttcag

SEQ ID NO: 139420 - DNA, 20 bp, Artificial Sequence
  Description of Artificial Sequence: Synthetic oligonucleotide
  Target: LAMA2; (+) strand; PAM type: NRG; PAM sequence: AAG
cagtggatctgtgtgtatct

SEQ ID NO: 139421 - DNA, 20 bp, Artificial Sequence
  Description of Artificial Sequence: Synthetic oligonucleotide
  Target: LAMA2; (+) strand; PAM type: NRG; PAM sequence: AAG
gatctgtgtgtatctaagtg

SEQ ID NO: 139422 - DNA, 20 bp, Artificial Sequence
  Description of Artificial Sequence: Synthetic oligonucleotide
  Target: LAMA2; (+) strand; PAM type: NRG; PAM sequence: CAG
atctaagtgaagcatgtaca

SEQ ID NO: 139423 - DNA, 20 bp, Artificial Sequence
  Description of Artificial Sequence: Synthetic oligonucleotide
  Target: LAMA2; (+) strand; PAM type: NRG; PAM sequence: AAG
agtgaagcatgtacacagaa

SEQ ID NO: 139424 - DNA, 20 bp, Artificial Sequence
  Description of Artificial Sequence: Synthetic oligonucleotide
  Target: LAMA2; (+) strand; PAM type: NRG; PAM sequence: AGG
gtgaagcatgtacacagaaa

SEQ ID NO: 139425 - DNA, 20 bp, Artificial Sequence
  Description of Artificial Sequence: Synthetic oligonucleotide
  Target: LAMA2; (+) strand; PAM type: NRG; PAM sequence: AAG
acagaaaaggtgacaaataa

SEQ ID NO: 139426 - DNA, 20 bp, Artificial Sequence
  Description of Artificial Sequence: Synthetic oligonucleotide
  Target: LAMA2; (+) strand; PAM type: NRG; PAM sequence: GAG
aaggtgacaaataaaagtct

SEQ ID NO: 139427 - DNA, 20 bp, Artificial Sequence
  Description of Artificial Sequence: Synthetic oligonucleotide
  Target: LAMA2; (+) strand; PAM type: NRG; PAM sequence: GAG
ggtgacaaataaaagtctga

SEQ ID NO: 139428 - DNA, 20 bp, Artificial Sequence
  Description of Artificial Sequence: Synthetic oligonucleotide
  Target: LAMA2; (+) strand; PAM type: NRG; PAM sequence: AAG
tttgctaaatgaaccttccc

SEQ ID NO: 139429 - DNA, 20 bp, Artificial Sequence
  Description of Artificial Sequence: Synthetic oligonucleotide
  Target: LAMA2; (+) strand; PAM type: NRG; PAM sequence: GAG
cttcccaagtaactactact

SEQ ID NO: 139430 - DNA, 20 bp, Artificial Sequence
  Description of Artificial Sequence: Synthetic oligonucleotide
  Target: LAMA2; (+) strand; PAM type: NRG; PAM sequence: CAG
actactgagacaaaaataac

SEQ ID NO: 139431 - DNA, 20 bp, Artificial Sequence
  Description of Artificial Sequence: Synthetic oligonucleotide
  Target: LAMA2; (+) strand; PAM type: NRG; PAM sequence: CAG
gacaaaaataaccagcaacc

SEQ ID NO: 139432 - DNA, 20 bp, Artificial Sequence
  Description of Artificial Sequence: Synthetic oligonucleotide
  Target: LAMA2; (+) strand; PAM type: NRG; PAM sequence: TAG
tatcttgccttctcccctaa

SEQ ID NO: 139433 - DNA, 20 bp, Artificial Sequence
  Description of Artificial Sequence: Synthetic oligonucleotide
  Target: LAMA2; (+) strand; PAM type: NRG; PAM sequence: CAG
ccttctcccctaatagtaac

SEQ ID NO: 139434 - DNA, 20 bp, Artificial Sequence
  Description of Artificial Sequence: Synthetic oligonucleotide
  Target: LAMA2; (+) strand; PAM type: NRG; PAM sequence: CAG
gtattctaacttgtattcac

SEQ ID NO: 139435 - DNA, 20 bp, Artificial Sequence
  Description of Artificial Sequence: Synthetic oligonucleotide
  Target: LAMA2; (+) strand; PAM type: NRG; PAM sequence: AAG
ctaacttgtattcaccagtg

SEQ ID NO: 139436 - DNA, 20 bp, Artificial Sequence
  Description of Artificial Sequence: Synthetic oligonucleotide
  Target: LAMA2; (+) strand; PAM type: NRG; PAM sequence: TAG
accagtgaagccatttgatc

SEQ ID NO: 139437 - DNA, 20 bp, Artificial Sequence
  Description of Artificial Sequence: Synthetic oligonucleotide
  Target: LAMA2; (+) strand; PAM type: NRG; PAM sequence: AGG
ccagtgaagccatttgatct

SEQ ID NO: 139438 - DNA, 20 bp, Artificial Sequence
  Description of Artificial Sequence: Synthetic oligonucleotide
  Target: LAMA2; (+) strand; PAM type: NRG; PAM sequence: GAG
agtgaagccatttgatctag

SEQ ID NO: 139439 - DNA, 20 bp, Artificial Sequence
  Description of Artificial Sequence: Synthetic oligonucleotide
  Target: LAMA2; (+) strand; PAM type: NRG; PAM sequence: TGG
ctaggagttttctctgtgca

SEQ ID NO: 139440 - DNA, 20 bp, Artificial Sequence
  Description of Artificial Sequence: Synthetic oligonucleotide
  Target: LAMA2; (+) strand; PAM type: NRG; PAM sequence: GGG
taggagttttctctgtgcat

SEQ ID NO: 139441 - DNA, 20 bp, Artificial Sequence
  Description of Artificial Sequence: Synthetic oligonucleotide
  Target: LAMA2; (+) strand; PAM type: NRG; PAM sequence: TAG
ttttctctgtgcatgggttt

SEQ ID NO: 139442 - DNA, 20 bp, Artificial Sequence
  Description of Artificial Sequence: Synthetic oligonucleotide
  Target: LAMA2; (+) strand; PAM type: NRG; PAM sequence: CAG
ctgtgcatgggttttagtca

SEQ ID NO: 139443 - DNA, 20 bp, Artificial Sequence
  Description of Artificial Sequence: Synthetic oligonucleotide
  Target: LAMA2; (+) strand; PAM type: NRG; PAM sequence: TGG
ttccatatctataataaatg

SEQ ID NO: 139444 - DNA, 20 bp, Artificial Sequence
  Description of Artificial Sequence: Synthetic oligonucleotide
  Target: LAMA2; (+) strand; PAM type: NRG; PAM sequence: GGG
tccatatctataataaatgt

SEQ ID NO: 139445 - DNA, 20 bp, Artificial Sequence
  Description of Artificial Sequence: Synthetic oligonucleotide
  Target: LAMA2; (+) strand; PAM type: NRG; PAM sequence: TGG
ataataaatgtgggactcac

SEQ ID NO: 139446 - DNA, 20 bp, Artificial Sequence
  Description of Artificial Sequence: Synthetic oligonucleotide
  Target: LAMA2; (+) strand; PAM type: NRG; PAM sequence: GAG
aataaatgtgggactcactg

SEQ ID NO: 139447 - DNA, 20 bp, Artificial Sequence
  Description of Artificial Sequence: Synthetic oligonucleotide
  Target: LAMA2; (+) strand; PAM type: NRG; PAM sequence: CAG
gttttcatttcttatatttt

SEQ ID NO: 139448 - DNA, 20 bp, Artificial Sequence
  Description of Artificial Sequence: Synthetic oligonucleotide
  Target: LAMA2; (+) strand; PAM type: NRG; PAM sequence: TAG
catttcttatattttcagtt

SEQ ID NO: 139449 - DNA, 20 bp, Artificial Sequence
  Description of Artificial Sequence: Synthetic oligonucleotide
  Target: LAMA2; (+) strand; PAM type: NRG; PAM sequence: GAG
cttatattttcagtttagtt

SEQ ID NO: 139450 - DNA, 20 bp, Artificial Sequence
  Description of Artificial Sequence: Synthetic oligonucleotide
  Target: LAMA2; (+) strand; PAM type: NRG; PAM sequence: TGG
tattttcagtttagttgagt

SEQ ID NO: 139451 - DNA, 20 bp, Artificial Sequence
  Description of Artificial Sequence: Synthetic oligonucleotide
  Target: LAMA2; (+) strand; PAM type: NRG; PAM sequence: GGG
attttcagtttagttgagtt

SEQ ID NO: 139452 - DNA, 20 bp, Artificial Sequence
  Description of Artificial Sequence: Synthetic oligonucleotide
  Target: LAMA2; (+) strand; PAM type: NRG; PAM sequence: AAG
ttagttgagttgggcttttc

SEQ ID NO: 139453 - DNA, 20 bp, Artificial Sequence
  Description of Artificial Sequence: Synthetic oligonucleotide
  Target: LAMA2; (+) strand; PAM type: NRG; PAM sequence: GAG
tttttcaaatatatcgacat

SEQ ID NO: 139454 - DNA, 20 bp, Artificial Sequence
  Description of Artificial Sequence: Synthetic oligonucleotide
  Target: LAMA2; (+) strand; PAM type: NRG; PAM sequence: TAG
aatatatcgacatgagttgt

SEQ ID NO: 139455 - DNA, 20 bp, Artificial Sequence
  Description of Artificial Sequence: Synthetic oligonucleotide
  Target: LAMA2; (+) strand; PAM type: NRG; PAM sequence: TAG
ttttaatttacaatgatctg

SEQ ID NO: 139456 - DNA, 20 bp, Artificial Sequence
  Description of Artificial Sequence: Synthetic oligonucleotide
  Target: LAMA2; (+) strand; PAM type: NRG; PAM sequence: CAG
gtgatgccctttttttattc

SEQ ID NO: 139457 - DNA, 20 bp, Artificial Sequence
  Description of Artificial Sequence: Synthetic oligonucleotide
  Target: LAMA2; (+) strand; PAM type: NRG; PAM sequence: CAG
taacctttgtttttccttta

SEQ ID NO: 139458 - DNA, 20 bp, Artificial Sequence
  Description of Artificial Sequence: Synthetic oligonucleotide
  Target: LAMA2; (+) strand; PAM type: NRG; PAM sequence: TAG
tttttcctttacagctttaa

SEQ ID NO: 139459 - DNA, 20 bp, Artificial Sequence
  Description of Artificial Sequence: Synthetic oligonucleotide
  Target: LAMA2; (+) strand; PAM type: NRG; PAM sequence: AGG
ttttcctttacagctttaat

SEQ ID NO: 139460 - DNA, 20 bp, Artificial Sequence
  Description of Artificial Sequence: Synthetic oligonucleotide
  Target: LAMA2; (+) strand; PAM type: NRG; PAM sequence: TAG
ataggtcttcataatttcat

SEQ ID NO: 139461 - DNA, 20 bp, Artificial Sequence
  Description of Artificial Sequence: Synthetic oligonucleotide
  Target: LAMA2; (+) strand; PAM type: NRG; PAM sequence: TAG
tttcattagtctttttcaaa

SEQ ID NO: 139462 - DNA, 20 bp, Artificial Sequence
  Description of Artificial Sequence: Synthetic oligonucleotide
  Target: LAMA2; (+) strand; PAM type: NRG; PAM sequence: CAG
attagtctttttcaaatagc

SEQ ID NO: 139463 - DNA, 20 bp, Artificial Sequence
  Description of Artificial Sequence: Synthetic oligonucleotide
  Target: LAMA2; (+) strand; PAM type: NRG; PAM sequence: TGG
ctttttcaaatagccagttt

SEQ ID NO: 139464 - DNA, 20 bp, Artificial Sequence
  Description of Artificial Sequence: Synthetic oligonucleotide
  Target: LAMA2; (+) strand; PAM type: NRG; PAM sequence: GGG
tttttcaaatagccagtttt

SEQ ID NO: 139465 - DNA, 20 bp, Artificial Sequence
  Description of Artificial Sequence: Synthetic oligonucleotide
  Target: LAMA2; (+) strand; PAM type: NRG; PAM sequence: TAG
cttctcgttattttttattt

SEQ ID NO: 139466 - DNA, 20 bp, Artificial Sequence
  Description of Artificial Sequence: Synthetic oligonucleotide
  Target: LAMA2; (+) strand; PAM type: NRG; PAM sequence: TAG
tttagtttactacattttct

SEQ ID NO: 139467 - DNA, 20 bp, Artificial Sequence
  Description of Artificial Sequence: Synthetic oligonucleotide
  Target: LAMA2; (+) strand; PAM type: NRG; PAM sequence: TGG
attttcttagcttcttgaaa

SEQ ID NO: 139468 - DNA, 20 bp, Artificial Sequence
  Description of Artificial Sequence: Synthetic oligonucleotide
  Target: LAMA2; (+) strand; PAM type: NRG; PAM sequence: CAG
tacctatgttattaatattt

SEQ ID NO: 139469 - DNA, 20 bp, Artificial Sequence
  Description of Artificial Sequence: Synthetic oligonucleotide
  Target: LAMA2; (+) strand; PAM type: NRG; PAM sequence: TAG
gcctacaatttgcctctaca

SEQ ID NO: 139470 - DNA, 20 bp, Artificial Sequence
  Description of Artificial Sequence: Synthetic oligonucleotide
  Target: LAMA2; (+) strand; PAM type: NRG; PAM sequence: AGG
cctacaatttgcctctacat

SEQ ID NO: 139471 - DNA, 20 bp, Artificial Sequence
  Description of Artificial Sequence: Synthetic oligonucleotide
  Target: LAMA2; (+) strand; PAM type: NRG; PAM sequence: GGG
ctacaatttgcctctacata

SEQ ID NO: 139472 - DNA, 20 bp, Artificial Sequence
  Description of Artificial Sequence: Synthetic oligonucleotide
  Target: LAMA2; (+) strand; PAM type: NRG; PAM sequence: TAG
tttgcctctacatagggctt

SEQ ID NO: 139473 - DNA, 20 bp, Artificial Sequence
  Description of Artificial Sequence: Synthetic oligonucleotide
  Target: LAMA2; (+) strand; PAM type: NRG; PAM sequence: AAG
gggctttagttgcctcctac

SEQ ID NO: 139474 - DNA, 20 bp, Artificial Sequence
  Description of Artificial Sequence: Synthetic oligonucleotide
  Target: LAMA2; (+) strand; PAM type: NRG; PAM sequence: TAG
aaaatatattctaattttca

SEQ ID NO: 139475 - DNA, 20 bp, Artificial Sequence
  Description of Artificial Sequence: Synthetic oligonucleotide
  Target: LAMA2; (+) strand; PAM type: NRG; PAM sequence: TGG
tttcatagtaaatttttctg

SEQ ID NO: 139476 - DNA, 20 bp, Artificial Sequence
  Description of Artificial Sequence: Synthetic oligonucleotide
  Target: LAMA2; (+) strand; PAM type: NRG; PAM sequence: GAG
taaatttttctgtggcctct

SEQ ID NO: 139477 - DNA, 20 bp, Artificial Sequence
  Description of Artificial Sequence: Synthetic oligonucleotide
  Target: LAMA2; (+) strand; PAM type: NRG; PAM sequence: TAG
tctgtggcctctgagttata

SEQ ID NO: 139478 - DNA, 20 bp, Artificial Sequence
  Description of Artificial Sequence: Synthetic oligonucleotide
  Target: LAMA2; (+) strand; PAM type: NRG; PAM sequence: AAG
gtggcctctgagttatatag

SEQ ID NO: 139479 - DNA, 20 bp, Artificial Sequence
  Description of Artificial Sequence: Synthetic oligonucleotide
  Target: LAMA2; (+) strand; PAM type: NRG; PAM sequence: AAG
ctctgagttatatagaagtg

SEQ ID NO: 139480 - DNA, 20 bp, Artificial Sequence
  Description of Artificial Sequence: Synthetic oligonucleotide
  Target: LAMA2; (+) strand; PAM type: NRG; PAM sequence: GAG
tgcttaatttctgaacaatt

SEQ ID NO: 139481 - DNA, 20 bp, Artificial Sequence
  Description of Artificial Sequence: Synthetic oligonucleotide
  Target: LAMA2; (+) strand; PAM type: NRG; PAM sequence: TGG
tttcctcactaattccacta

SEQ ID NO: 139482 - DNA, 20 bp, Artificial Sequence
  Description of Artificial Sequence: Synthetic oligonucleotide
  Target: LAMA2; (+) strand; PAM type: NRG; PAM sequence: CAG
ctcactaattccactatggt

SEQ ID NO: 139483 - DNA, 20 bp, Artificial Sequence
  Description of Artificial Sequence: Synthetic oligonucleotide
  Target: LAMA2; (+) strand; PAM type: NRG; PAM sequence: GAG
cagtgtattttcaattcttt

SEQ ID NO: 139484 - DNA, 20 bp, Artificial Sequence
  Description of Artificial Sequence: Synthetic oligonucleotide
  Target: LAMA2; (+) strand; PAM type: NRG; PAM sequence: GAG
tctttgagactaaacttttt

SEQ ID NO: 139485 - DNA, 20 bp, Artificial Sequence
  Description of Artificial Sequence: Synthetic oligonucleotide
  Target: LAMA2; (+) strand; PAM type: NRG; PAM sequence: TGG
acttgtttttatccaacata

SEQ ID NO: 139486 - DNA, 20 bp, Artificial Sequence
  Description of Artificial Sequence: Synthetic oligonucleotide
  Target: LAMA2; (+) strand; PAM type: NRG; PAM sequence: CAG
tgtttttatccaacatatgg

SEQ ID NO: 139487 - DNA, 20 bp, Artificial Sequence
  Description of Artificial Sequence: Synthetic oligonucleotide
  Target: LAMA2; (+) strand; PAM type: NRG; PAM sequence: TGG
gcagtgacttgaaaacaatg

SEQ ID NO: 139488 - DNA, 20 bp, Artificial Sequence
  Description of Artificial Sequence: Synthetic oligonucleotide
  Target: LAMA2; (+) strand; PAM type: NRG; PAM sequence: CAG
gacttgaaaacaatgtggac

SEQ ID NO: 139489 - DNA, 20 bp, Artificial Sequence
  Description of Artificial Sequence: Synthetic oligonucleotide
  Target: LAMA2; (+) strand; PAM type: NRG; PAM sequence: TGG
acaatgtggaccagttgccc

SEQ ID NO: 139490 - DNA, 20 bp, Artificial Sequence
  Description of Artificial Sequence: Synthetic oligonucleotide
  Target: LAMA2; (+) strand; PAM type: NRG; PAM sequence: CAG
ctggctcactcctgtaatcc

SEQ ID NO: 139491 - DNA, 20 bp, Artificial Sequence
  Description of Artificial Sequence: Synthetic oligonucleotide
  Target: LAMA2; (+) strand; PAM type: NRG; PAM sequence: TGG
ctcctgtaatcccagcactt

SEQ ID NO: 139492 - DNA, 20 bp, Artificial Sequence
  Description of Artificial Sequence: Synthetic oligonucleotide
  Target: LAMA2; (+) strand; PAM type: NRG; PAM sequence: GGG
tcctgtaatcccagcacttt

SEQ ID NO: 139493 - DNA, 20 bp, Artificial Sequence
  Description of Artificial Sequence: Synthetic oligonucleotide
  Target: LAMA2; (+) strand; PAM type: NRG; PAM sequence: GAG
ctgtaatcccagcactttgg

SEQ ID NO: 139494 - DNA, 20 bp, Artificial Sequence
  Description of Artificial Sequence: Synthetic oligonucleotide
  Target: LAMA2; (+) strand; PAM type: NRG; PAM sequence: AGG
tgtaatcccagcactttggg

SEQ ID NO: 139495 - DNA, 20 bp, Artificial Sequence
  Description of Artificial Sequence: Synthetic oligonucleotide
  Target: LAMA2; (+) strand; PAM type: NRG; PAM sequence: AAG
tcccagcactttgggaggcc

SEQ ID NO: 139496 - DNA, 20 bp, Artificial Sequence
  Description of Artificial Sequence: Synthetic oligonucleotide
  Target: LAMA2; (+) strand; PAM type: NRG; PAM sequence: AGG
cccagcactttgggaggcca

SEQ ID NO: 139497 - DNA, 20 bp, Artificial Sequence
  Description of Artificial Sequence: Synthetic oligonucleotide
  Target: LAMA2; (+) strand; PAM type: NRG; PAM sequence: CAG
agcactttgggaggccaagg

SEQ ID NO: 139498 - DNA, 20 bp, Artificial Sequence
  Description of Artificial Sequence: Synthetic oligonucleotide
  Target: LAMA2; (+) strand; PAM type: NRG; PAM sequence: AGG
gcactttgggaggccaaggc

SEQ ID NO: 139499 - DNA, 20 bp, Artificial Sequence
  Description of Artificial Sequence: Synthetic oligonucleotide
  Target: LAMA2; (+) strand; PAM type: NRG; PAM sequence: CGG
ctttgggaggccaaggcagg

SEQ ID NO: 139500 - DNA, 20 bp, Artificial Sequence
  Description of Artificial Sequence: Synthetic oligonucleotide
  Target: LAMA2; (+) strand; PAM type: NRG; PAM sequence: TGG
gggaggccaaggcaggcgga

SEQ ID NO: 139501 - DNA, 20 bp, Artificial Sequence
  Description of Artificial Sequence: Synthetic oligonucleotide
  Target: LAMA2; (+) strand; PAM type: NRG; PAM sequence: GAG
ccaaggcaggcggatggctt

SEQ ID NO: 139502 - DNA, 20 bp, Artificial Sequence
  Description of Artificial Sequence: Synthetic oligonucleotide
  Target: LAMA2; (+) strand; PAM type: NRG; PAM sequence: CAG
gcaggcggatggcttgagcc

SEQ ID NO: 139503 - DNA, 20 bp, Artificial Sequence
  Description of Artificial Sequence: Synthetic oligonucleotide
  Target: LAMA2; (+) strand; PAM type: NRG; PAM sequence: AAG
ggcggatggcttgagcccag

SEQ ID NO: 139504 - DNA, 20 bp, Artificial Sequence
  Description of Artificial Sequence: Synthetic oligonucleotide
  Target: LAMA2; (+) strand; PAM type: NRG; PAM sequence: AAG
tggcttgagcccagaagttc

SEQ ID NO: 139505 - DNA, 20 bp, Artificial Sequence
  Description of Artificial Sequence: Synthetic oligonucleotide
  Target: LAMA2; (+) strand; PAM type: NRG; PAM sequence: CAG
tgagcccagaagttcaagac

SEQ ID NO: 139506 - DNA, 20 bp, Artificial Sequence
  Description of Artificial Sequence: Synthetic oligonucleotide
  Target: LAMA2; (+) strand; PAM type: NRG; PAM sequence: TGG
ccagaagttcaagaccagtg

SEQ ID NO: 139507 - DNA, 20 bp, Artificial Sequence
  Description of Artificial Sequence: Synthetic oligonucleotide
  Target: LAMA2; (+) strand; PAM type: NRG; PAM sequence: GGG
cagaagttcaagaccagtgt

SEQ ID NO: 139508 - DNA, 20 bp, Artificial Sequence
  Description of Artificial Sequence: Synthetic oligonucleotide
  Target: LAMA2; (+) strand; PAM type: NRG; PAM sequence: TGG
caagaccagtgtgggcaacg

SEQ ID NO: 139509 - DNA, 20 bp, Artificial Sequence
  Description of Artificial Sequence: Synthetic oligonucleotide
  Target: LAMA2; (+) strand; PAM type: NRG; PAM sequence: TAG
aacaaaaccccaaaacaaat

SEQ ID NO: 139510 - DNA, 20 bp, Artificial Sequence
  Description of Artificial Sequence: Synthetic oligonucleotide
  Target: LAMA2; (+) strand; PAM type: NRG; PAM sequence: TGG
aaaccccaaaacaaattagc

SEQ ID NO: 139511 - DNA, 20 bp, Artificial Sequence
  Description of Artificial Sequence: Synthetic oligonucleotide
  Target: LAMA2; (+) strand; PAM type: NRG; PAM sequence: GGG
aaccccaaaacaaattagct

SEQ ID NO: 139512 - DNA, 20 bp, Artificial Sequence
  Description of Artificial Sequence: Synthetic oligonucleotide
  Target: LAMA2; (+) strand; PAM type: NRG; PAM sequence: TAG
attagctgggtgtgtgcctg

SEQ ID NO: 139513 - DNA, 20 bp, Artificial Sequence
  Description of Artificial Sequence: Synthetic oligonucleotide
  Target: LAMA2; (+) strand; PAM type: NRG; PAM sequence: CAG
tgggtgtgtgcctgtagtcc

SEQ ID NO: 139514 - DNA, 20 bp, Artificial Sequence
  Description of Artificial Sequence: Synthetic oligonucleotide
  Target: LAMA2; (+) strand; PAM type: NRG; PAM sequence: TGG
gcctgtagtcccagctattc

SEQ ID NO: 139515 - DNA, 20 bp, Artificial Sequence
  Description of Artificial Sequence: Synthetic oligonucleotide
  Target: LAMA2; (+) strand; PAM type: NRG; PAM sequence: GAG
ctgtagtcccagctattctg

SEQ ID NO: 139516 - DNA, 20 bp, Artificial Sequence
  Description of Artificial Sequence: Synthetic oligonucleotide
  Target: LAMA2; (+) strand; PAM type: NRG; PAM sequence: GAG
tcccagctattctggagtct

SEQ ID NO: 139517 - DNA, 20 bp, Artificial Sequence
  Description of Artificial Sequence: Synthetic oligonucleotide
  Target: LAMA2; (+) strand; PAM type: NRG; PAM sequence: AGG
cccagctattctggagtctg

SEQ ID NO: 139518 - DNA, 20 bp, Artificial Sequence
  Description of Artificial Sequence: Synthetic oligonucleotide
  Target: LAMA2; (+) strand; PAM type: NRG; PAM sequence: TGG
agctattctggagtctgagg

SEQ ID NO: 139519 - DNA, 20 bp, Artificial Sequence
  Description of Artificial Sequence: Synthetic oligonucleotide
  Target: LAMA2; (+) strand; PAM type: NRG; PAM sequence: GGG
gctattctggagtctgaggt

SEQ ID NO: 139520 - DNA, 20 bp, Artificial Sequence
  Description of Artificial Sequence: Synthetic oligonucleotide
  Target: LAMA2; (+) strand; PAM type: NRG; PAM sequence: GAG
tattctggagtctgaggtgg

SEQ ID NO: 139521 - DNA, 20 bp, Artificial Sequence
  Description of Artificial Sequence: Synthetic oligonucleotide
  Target: LAMA2; (+) strand; PAM type: NRG; PAM sequence: CAG
gtgggagaatcacttcaacc

SEQ ID NO: 139522 - DNA, 20 bp, Artificial Sequence
  Description of Artificial Sequence: Synthetic oligonucleotide
  Target: LAMA2; (+) strand; PAM type: NRG; PAM sequence: AGG
tgggagaatcacttcaaccc

SEQ ID NO: 139523 - DNA, 20 bp, Artificial Sequence
  Description of Artificial Sequence: Synthetic oligonucleotide
  Target: LAMA2; (+) strand; PAM type: NRG; PAM sequence: GAG
ggagaatcacttcaacccag

SEQ ID NO: 139524 - DNA, 20 bp, Artificial Sequence
  Description of Artificial Sequence: Synthetic oligonucleotide
  Target: LAMA2; (+) strand; PAM type: NRG; PAM sequence: AGG
gagaatcacttcaacccagg

SEQ ID NO: 139525 - DNA, 20 bp, Artificial Sequence
  Description of Artificial Sequence: Synthetic oligonucleotide
  Target: LAMA2; (+) strand; PAM type: NRG; PAM sequence: TAG
aatcacttcaacccaggagg

SEQ ID NO: 139526 - DNA, 20 bp, Artificial Sequence
  Description of Artificial Sequence: Synthetic oligonucleotide
  Target: LAMA2; (+) strand; PAM type: NRG; PAM sequence: GAG
tcacttcaacccaggaggta

SEQ ID NO: 139527 - DNA, 20 bp, Artificial Sequence
  Description of Artificial Sequence: Synthetic oligonucleotide
  Target: LAMA2; (+) strand; PAM type: NRG; PAM sequence: AGG
cacttcaacccaggaggtag

SEQ ID NO: 139528 - DNA, 20 bp, Artificial Sequence
  Description of Artificial Sequence: Synthetic oligonucleotide
  Target: LAMA2; (+) strand; PAM type: NRG; PAM sequence: TGG
aacccaggaggtagaggttg

SEQ ID NO: 139529 - DNA, 20 bp, Artificial Sequence
  Description of Artificial Sequence: Synthetic oligonucleotide
  Target: LAMA2; (+) strand; PAM type: NRG; PAM sequence: GAG
caggaggtagaggttgtggt

SEQ ID NO: 139530 - DNA, 20 bp, Artificial Sequence
  Description of Artificial Sequence: Synthetic oligonucleotide
  Target: LAMA2; (+) strand; PAM type: NRG; PAM sequence: GAG
ggtagaggttgtggtgagcc

SEQ ID NO: 139531 - DNA, 20 bp, Artificial Sequence
  Description of Artificial Sequence: Synthetic oligonucleotide
  Target: LAMA2; (+) strand; PAM type: NRG; PAM sequence: CAG
gagattacgccactgcactc

SEQ ID NO: 139532 - DNA, 20 bp, Artificial Sequence
  Description of Artificial Sequence: Synthetic oligonucleotide
  Target: LAMA2; (+) strand; PAM type: NRG; PAM sequence: TGG
tacgccactgcactccagcc

SEQ ID NO: 139533 - DNA, 20 bp, Artificial Sequence
  Description of Artificial Sequence: Synthetic oligonucleotide
  Target: LAMA2; (+) strand; PAM type: NRG; PAM sequence: GGG
acgccactgcactccagcct

SEQ ID NO: 139534 - DNA, 20 bp, Artificial Sequence
  Description of Artificial Sequence: Synthetic oligonucleotide
  Target: LAMA2; (+) strand; PAM type: NRG; PAM sequence: CAG
ctgcactccagcctgggtga

SEQ ID NO: 139535 - DNA, 20 bp, Artificial Sequence
  Description of Artificial Sequence: Synthetic oligonucleotide
  Target: LAMA2; (+) strand; PAM type: NRG; PAM sequence: GAG
gcactccagcctgggtgaca

SEQ ID NO: 139536 - DNA, 20 bp, Artificial Sequence
  Description of Artificial Sequence: Synthetic oligonucleotide
  Target: LAMA2; (+) strand; PAM type: NRG; PAM sequence: TGG
tccagcctgggtgacagagc

SEQ ID NO: 139537 - DNA, 20 bp, Artificial Sequence
  Description of Artificial Sequence: Synthetic oligonucleotide
  Target: LAMA2; (+) strand; PAM type: NRG; PAM sequence: CAG
tgggtgacagagctggacat

SEQ ID NO: 139538 - DNA, 20 bp, Artificial Sequence
  Description of Artificial Sequence: Synthetic oligonucleotide
  Target: LAMA2; (+) strand; PAM type: NRG; PAM sequence: AAG
atcagaccctgtctaaaaaa

SEQ ID NO: 139539 - DNA, 20 bp, Artificial Sequence
  Description of Artificial Sequence: Synthetic oligonucleotide
  Target: LAMA2; (+) strand; PAM type: NRG; PAM sequence: AAG
accctgtctaaaaaaaagca

SEQ ID NO: 139540 - DNA, 20 bp, Artificial Sequence
  Description of Artificial Sequence: Synthetic oligonucleotide
  Target: LAMA2; (+) strand; PAM type: NRG; PAM sequence: AAG
gtctaaaaaaaagcaaagaa

SEQ ID NO: 139541 - DNA, 20 bp, Artificial Sequence
  Description of Artificial Sequence: Synthetic oligonucleotide
  Target: LAMA2; (+) strand; PAM type: NRG; PAM sequence: CAG
aaaaagcaaagaaaagaatg

SEQ ID NO: 139542 - DNA, 20 bp, Artificial Sequence
  Description of Artificial Sequence: Synthetic oligonucleotide
  Target: LAMA2; (+) strand; PAM type: NRG; PAM sequence: TAG
agaaaagaatgcagattcta

SEQ ID NO: 139543 - DNA, 20 bp, Artificial Sequence
  Description of Artificial Sequence: Synthetic oligonucleotide
  Target: LAMA2; (+) strand; PAM type: NRG; PAM sequence: TGG
aatgcagattctatagttgt

SEQ ID NO: 139544 - DNA, 20 bp, Artificial Sequence
  Description of Artificial Sequence: Synthetic oligonucleotide
  Target: LAMA2; (+) strand; PAM type: NRG; PAM sequence: CAG
gattctatagttgttggttg

SEQ ID NO: 139545 - DNA, 20 bp, Artificial Sequence
  Description of Artificial Sequence: Synthetic oligonucleotide
  Target: LAMA2; (+) strand; PAM type: NRG; PAM sequence: CAG
ttgcagtactacaaatatat

SEQ ID NO: 139546 - DNA, 20 bp, Artificial Sequence
  Description of Artificial Sequence: Synthetic oligonucleotide
  Target: LAMA2; (+) strand; PAM type: NRG; PAM sequence: GAG
agtactacaaatatatcagt

SEQ ID NO: 139547 - DNA, 20 bp, Artificial Sequence
  Description of Artificial Sequence: Synthetic oligonucleotide
  Target: LAMA2; (+) strand; PAM type: NRG; PAM sequence: TAG
atatattgatacttttaaat

SEQ ID NO: 139548 - DNA, 20 bp, Artificial Sequence
  Description of Artificial Sequence: Synthetic oligonucleotide
  Target: LAMA2; (+) strand; PAM type: NRG; PAM sequence: GAG
atattgatacttttaaatta

SEQ ID NO: 139549 - DNA, 20 bp, Artificial Sequence
  Description of Artificial Sequence: Synthetic oligonucleotide
  Target: LAMA2; (+) strand; PAM type: NRG; PAM sequence: TAG
aaattagagacatacaaatt

SEQ ID NO: 139550 - DNA, 20 bp, Artificial Sequence
  Description of Artificial Sequence: Synthetic oligonucleotide
  Target: LAMA2; (+) strand; PAM type: NRG; PAM sequence: AGG
aattagagacatacaaattt

SEQ ID NO: 139551 - DNA, 20 bp, Artificial Sequence
  Description of Artificial Sequence: Synthetic oligonucleotide
  Target: LAMA2; (+) strand; PAM type: NRG; PAM sequence: CAG
cacctttttaatactactgc

SEQ ID NO: 139552 - DNA, 20 bp, Artificial Sequence
  Description of Artificial Sequence: Synthetic oligonucleotide
  Target: LAMA2; (+) strand; PAM type: NRG; PAM sequence: CAG
ctttttaatactactgccag

SEQ ID NO: 139553 - DNA, 20 bp, Artificial Sequence
  Description of Artificial Sequence: Synthetic oligonucleotide
  Target: LAMA2; (+) strand; PAM type: NRG; PAM sequence: TAG
gccagcagtacttctatctt

SEQ ID NO: 139554 - DNA, 20 bp, Artificial Sequence
  Description of Artificial Sequence: Synthetic oligonucleotide
  Target: LAMA2; (+) strand; PAM type: NRG; PAM sequence: GAG
cagcagtacttctatcttta

SEQ ID NO: 139555 - DNA, 20 bp, Artificial Sequence
  Description of Artificial Sequence: Synthetic oligonucleotide
  Target: LAMA2; (+) strand; PAM type: NRG; PAM sequence: TAG
ttagagtgtacttttgtatg

SEQ ID NO: 139556 - DNA, 20 bp, Artificial Sequence
  Description of Artificial Sequence: Synthetic oligonucleotide
  Target: LAMA2; (+) strand; PAM type: NRG; PAM sequence: TAG
acttttgtatgtagattcac

SEQ ID NO: 139557 - DNA, 20 bp, Artificial Sequence
  Description of Artificial Sequence: Synthetic oligonucleotide
  Target: LAMA2; (+) strand; PAM type: NRG; PAM sequence: TAG
ttctctgtgtttgcgtgata

SEQ ID NO: 139558 - DNA, 20 bp, Artificial Sequence
  Description of Artificial Sequence: Synthetic oligonucleotide
  Target: LAMA2; (+) strand; PAM type: NRG; PAM sequence: AGG
tctctgtgtttgcgtgatat

SEQ ID NO: 139559 - DNA, 20 bp, Artificial Sequence
  Description of Artificial Sequence: Synthetic oligonucleotide
  Target: LAMA2; (+) strand; PAM type: NRG; PAM sequence: GAG
tataggttttctcatatgtt

SEQ ID NO: 139560 - DNA, 20 bp, Artificial Sequence
  Description of Artificial Sequence: Synthetic oligonucleotide
  Target: LAMA2; (+) strand; PAM type: NRG; PAM sequence: AAG
tgttgagtgtacttatattt

SEQ ID NO: 139561 - DNA, 20 bp, Artificial Sequence
  Description of Artificial Sequence: Synthetic oligonucleotide
  Target: LAMA2; (+) strand; PAM type: NRG; PAM sequence: AGG
gttgagtgtacttatattta

SEQ ID NO: 139562 - DNA, 20 bp, Artificial Sequence
  Description of Artificial Sequence: Synthetic oligonucleotide
  Target: LAMA2; (+) strand; PAM type: NRG; PAM sequence: GAG
atttaaggtgtatcttctgt

SEQ ID NO: 139563 - DNA, 20 bp, Artificial Sequence
  Description of Artificial Sequence: Synthetic oligonucleotide
  Target: LAMA2; (+) strand; PAM type: NRG; PAM sequence: CAG
taaggtgtatcttctgtgag

SEQ ID NO: 139564 - DNA, 20 bp, Artificial Sequence
  Description of Artificial Sequence: Synthetic oligonucleotide
  Target: LAMA2; (+) strand; PAM type: NRG; PAM sequence: TGG
gataatcttttcctttaaat

SEQ ID NO: 139565 - DNA, 20 bp, Artificial Sequence
  Description of Artificial Sequence: Synthetic oligonucleotide
  Target: LAMA2; (+) strand; PAM type: NRG; PAM sequence: TAG
atacttaattcatttacatt

SEQ ID NO: 139566 - DNA, 20 bp, Artificial Sequence
  Description of Artificial Sequence: Synthetic oligonucleotide
  Target: LAMA2; (+) strand; PAM type: NRG; PAM sequence: TGG
agtgttactatactgatata

SEQ ID NO: 139567 - DNA, 20 bp, Artificial Sequence
  Description of Artificial Sequence: Synthetic oligonucleotide
  Target: LAMA2; (+) strand; PAM type: NRG; PAM sequence: GGG
gtgttactatactgatatat

SEQ ID NO: 139568 - DNA, 20 bp, Artificial Sequence
  Description of Artificial Sequence: Synthetic oligonucleotide
  Target: LAMA2; (+) strand; PAM type: NRG; PAM sequence: TGG
cctcataactttcttacttt

SEQ ID NO: 139569 - DNA, 20 bp, Artificial Sequence
  Description of Artificial Sequence: Synthetic oligonucleotide
  Target: LAMA2; (+) strand; PAM type: NRG; PAM sequence: AAG
ttcttacttttggaatactg

SEQ ID NO: 139570 - DNA, 20 bp, Artificial Sequence
  Description of Artificial Sequence: Synthetic oligonucleotide
  Target: LAMA2; (+) strand; PAM type: NRG; PAM sequence: AGG
tcttacttttggaatactga

SEQ ID NO: 139571 - DNA, 20 bp, Artificial Sequence
  Description of Artificial Sequence: Synthetic oligonucleotide
  Target: LAMA2; (+) strand; PAM type: NRG; PAM sequence: TAG
tattccatttcttctttcat

SEQ ID NO: 139572 - DNA, 20 bp, Artificial Sequence
  Description of Artificial Sequence: Synthetic oligonucleotide
  Target: LAMA2; (+) strand; PAM type: NRG; PAM sequence: AAG
tcattagcttgtcttctgtg

SEQ ID NO: 139573 - DNA, 20 bp, Artificial Sequence
  Description of Artificial Sequence: Synthetic oligonucleotide
  Target: LAMA2; (+) strand; PAM type: NRG; PAM sequence: TGG
catactaattaccataaata

SEQ ID NO: 139574 - DNA, 20 bp, Artificial Sequence
  Description of Artificial Sequence: Synthetic oligonucleotide
  Target: LAMA2; (+) strand; PAM type: NRG; PAM sequence: CAG
aacttgcgtccttcatttat

SEQ ID NO: 139575 - DNA, 20 bp, Artificial Sequence
  Description of Artificial Sequence: Synthetic oligonucleotide
  Target: LAMA2; (+) strand; PAM type: NRG; PAM sequence: CAG
aactttgtaatattttacct

SEQ ID NO: 139576 - DNA, 20 bp, Artificial Sequence
  Description of Artificial Sequence: Synthetic oligonucleotide
  Target: LAMA2; (+) strand; PAM type: NRG; PAM sequence: CAG
cctcagtcccacctccccat

SEQ ID NO: 139577 - DNA, 20 bp, Artificial Sequence
  Description of Artificial Sequence: Synthetic oligonucleotide
  Target: LAMA2; (+) strand; PAM type: NRG; PAM sequence: TAG
ccccatcagatttaattcta

SEQ ID NO: 139578 - DNA, 20 bp, Artificial Sequence
  Description of Artificial Sequence: Synthetic oligonucleotide
  Target: LAMA2; (+) strand; PAM type: NRG; PAM sequence: TAG
tatgtatatattaaactcca

SEQ ID NO: 139579 - DNA, 20 bp, Artificial Sequence
  Description of Artificial Sequence: Synthetic oligonucleotide
  Target: LAMA2; (+) strand; PAM type: NRG; PAM sequence: AGG
atgtatatattaaactccat

SEQ ID NO: 139580 - DNA, 20 bp, Artificial Sequence
  Description of Artificial Sequence: Synthetic oligonucleotide
  Target: LAMA2; (+) strand; PAM type: NRG; PAM sequence: AAG
tatatattaaactccatagg

SEQ ID NO: 139581 - DNA, 20 bp, Artificial Sequence
  Description of Artificial Sequence: Synthetic oligonucleotide
  Target: LAMA2; (+) strand; PAM type: NRG; PAM sequence: CAG
ttgttaccatcataaacatg

SEQ ID NO: 139582 - DNA, 20 bp, Artificial Sequence
  Description of Artificial Sequence: Synthetic oligonucleotide
  Target: LAMA2; (+) strand; PAM type: NRG; PAM sequence: TAG
cttttttgtttattttttgt

SEQ ID NO: 139583 - DNA, 20 bp, Artificial Sequence
  Description of Artificial Sequence: Synthetic oligonucleotide
  Target: LAMA2; (+) strand; PAM type: NRG; PAM sequence: TAG
gtttatttatttatttctgt

SEQ ID NO: 139584 - DNA, 20 bp, Artificial Sequence
  Description of Artificial Sequence: Synthetic oligonucleotide
  Target: LAMA2; (+) strand; PAM type: NRG; PAM sequence: AAG
tctgttagtaaacttccatc

SEQ ID NO: 139585 - DNA, 20 bp, Artificial Sequence
  Description of Artificial Sequence: Synthetic oligonucleotide
  Target: LAMA2; (+) strand; PAM type: NRG; PAM sequence: AAG
ttagtaaacttccatcaaga

SEQ ID NO: 139586 - DNA, 20 bp, Artificial Sequence
  Description of Artificial Sequence: Synthetic oligonucleotide
  Target: LAMA2; (+) strand; PAM type: NRG; PAM sequence: AAG
tttctgccttttttaaatga

SEQ ID NO: 139587 - DNA, 20 bp, Artificial Sequence
  Description of Artificial Sequence: Synthetic oligonucleotide
  Target: LAMA2; (+) strand; PAM type: NRG; PAM sequence: TAG
ttttttaaatgaaagcctgc

SEQ ID NO: 139588 - DNA, 20 bp, Artificial Sequence
  Description of Artificial Sequence: Synthetic oligonucleotide
  Target: LAMA2; (+) strand; PAM type: NRG; PAM sequence: GAG
tttcacttttctttactttt

SEQ ID NO: 139589 - DNA, 20 bp, Artificial Sequence
  Description of Artificial Sequence: Synthetic oligonucleotide
  Target: LAMA2; (+) strand; PAM type: NRG; PAM sequence: AAG
tttgagacttattttccacc

SEQ ID NO: 139590 - DNA, 20 bp, Artificial Sequence
  Description of Artificial Sequence: Synthetic oligonucleotide
  Target: LAMA2; (+) strand; PAM type: NRG; PAM sequence: AAG
cttattttccaccaagtata

SEQ ID NO: 139591 - DNA, 20 bp, Artificial Sequence
  Description of Artificial Sequence: Synthetic oligonucleotide
  Target: LAMA2; (+) strand; PAM type: NRG; PAM sequence: TAG
attttccaccaagtataaag

SEQ ID NO: 139592 - DNA, 20 bp, Artificial Sequence
  Description of Artificial Sequence: Synthetic oligonucleotide
  Target: LAMA2; (+) strand; PAM type: NRG; PAM sequence: TGG
ataaagtagaatttcttgcc

SEQ ID NO: 139593 - DNA, 20 bp, Artificial Sequence
  Description of Artificial Sequence: Synthetic oligonucleotide
  Target: LAMA2; (+) strand; PAM type: NRG; PAM sequence: TGG
agtagaatttcttgcctggt

SEQ ID NO: 139594 - DNA, 20 bp, Artificial Sequence
  Description of Artificial Sequence: Synthetic oligonucleotide
  Target: LAMA2; (+) strand; PAM type: NRG; PAM sequence: CAG
tgttttgttttgtttttttc

SEQ ID NO: 139595 - DNA, 20 bp, Artificial Sequence
  Description of Artificial Sequence: Synthetic oligonucleotide
  Target: LAMA2; (+) strand; PAM type: NRG; PAM sequence: AAG
ttttcattatttctatcatg

SEQ ID NO: 139596 - DNA, 20 bp, Artificial Sequence
  Description of Artificial Sequence: Synthetic oligonucleotide
  Target: LAMA2; (+) strand; PAM type: NRG; PAM sequence: AAG
cattatttctatcatgaagt

SEQ ID NO: 139597 - DNA, 20 bp, Artificial Sequence
  Description of Artificial Sequence: Synthetic oligonucleotide
  Target: LAMA2; (+) strand; PAM type: NRG; PAM sequence: CGG
tatttctatcatgaagtaag

SEQ ID NO: 139598 - DNA, 20 bp, Artificial Sequence
  Description of Artificial Sequence: Synthetic oligonucleotide
  Target: LAMA2; (+) strand; PAM type: NRG; PAM sequence: AAG
tctatcatgaagtaagcgga

SEQ ID NO: 139599 - DNA, 20 bp, Artificial Sequence
  Description of Artificial Sequence: Synthetic oligonucleotide
  Target: LAMA2; (+) strand; PAM type: NRG; PAM sequence: TGG
taagcggaaagtcttattgc

SEQ ID NO: 139600 - DNA, 20 bp, Artificial Sequence
  Description of Artificial Sequence: Synthetic oligonucleotide
  Target: LAMA2; (+) strand; PAM type: NRG; PAM sequence: TGG
aaagtcttattgctggttct

SEQ ID NO: 139601 - DNA, 20 bp, Artificial Sequence
  Description of Artificial Sequence: Synthetic oligonucleotide
  Target: LAMA2; (+) strand; PAM type: NRG; PAM sequence: AAG
tattgctggttcttggaaac

SEQ ID NO: 139602 - DNA, 20 bp, Artificial Sequence
  Description of Artificial Sequence: Synthetic oligonucleotide
  Target: LAMA2; (+) strand; PAM type: NRG; PAM sequence: AAG
tttttcctttcactccattg

SEQ ID NO: 139603 - DNA, 20 bp, Artificial Sequence
  Description of Artificial Sequence: Synthetic oligonucleotide
  Target: LAMA2; (+) strand; PAM type: NRG; PAM sequence: AGG
ttttcctttcactccattga

SEQ ID NO: 139604 - DNA, 20 bp, Artificial Sequence
  Description of Artificial Sequence: Synthetic oligonucleotide
  Target: LAMA2; (+) strand; PAM type: NRG; PAM sequence: TGG
attttttttaattttgcttt

SEQ ID NO: 139605 - DNA, 20 bp, Artificial Sequence
  Description of Artificial Sequence: Synthetic oligonucleotide
  Target: LAMA2; (+) strand; PAM type: NRG; PAM sequence: CAG
ttaattttgcttttggtgtt

SEQ ID NO: 139606 - DNA, 20 bp, Artificial Sequence
  Description of Artificial Sequence: Synthetic oligonucleotide
  Target: LAMA2; (+) strand; PAM type: NRG; PAM sequence: AGG
taattttgcttttggtgttc

SEQ ID NO: 139607 - DNA, 20 bp, Artificial Sequence
  Description of Artificial Sequence: Synthetic oligonucleotide
  Target: LAMA2; (+) strand; PAM type: NRG; PAM sequence: GGG
aattttgcttttggtgttca

SEQ ID NO: 139608 - DNA, 20 bp, Artificial Sequence
  Description of Artificial Sequence: Synthetic oligonucleotide
  Target: LAMA2; (+) strand; PAM type: NRG; PAM sequence: GGG
attttgcttttggtgttcag

SEQ ID NO: 139609 - DNA, 20 bp, Artificial Sequence
  Description of Artificial Sequence: Synthetic oligonucleotide
  Target: LAMA2; (+) strand; PAM type: NRG; PAM sequence: TAG
ggggtttaccacaatgtact

SEQ ID NO: 139610 - DNA, 20 bp, Artificial Sequence
  Description of Artificial Sequence: Synthetic oligonucleotide
  Target: LAMA2; (+) strand; PAM type: NRG; PAM sequence: AGG
gggtttaccacaatgtactt

SEQ ID NO: 139611 - DNA, 20 bp, Artificial Sequence
  Description of Artificial Sequence: Synthetic oligonucleotide
  Target: LAMA2; (+) strand; PAM type: NRG; PAM sequence: TGG
gtacttaggaatgattttat

SEQ ID NO: 139612 - DNA, 20 bp, Artificial Sequence
  Description of Artificial Sequence: Synthetic oligonucleotide
  Target: LAMA2; (+) strand; PAM type: NRG; PAM sequence: TGG
ttattggtattaatactatt

SEQ ID NO: 139613 - DNA, 20 bp, Artificial Sequence
  Description of Artificial Sequence: Synthetic oligonucleotide
  Target: LAMA2; (+) strand; PAM type: NRG; PAM sequence: GGG
tattggtattaatactattt

SEQ ID NO: 139614 - DNA, 20 bp, Artificial Sequence
  Description of Artificial Sequence: Synthetic oligonucleotide
  Target: LAMA2; (+) strand; PAM type: NRG; PAM sequence: AAG
taatactatttgggattcaa

SEQ ID NO: 139615 - DNA, 20 bp, Artificial Sequence
  Description of Artificial Sequence: Synthetic oligonucleotide
  Target: LAMA2; (+) strand; PAM type: NRG; PAM sequence: TAG
atttgggattcaaaagcttc

SEQ ID NO: 139616 - DNA, 20 bp, Artificial Sequence
  Description of Artificial Sequence: Synthetic oligonucleotide
  Target: LAMA2; (+) strand; PAM type: NRG; PAM sequence: TGG
tcaaaagcttctagattctg

SEQ ID NO: 139617 - DNA, 20 bp, Artificial Sequence
  Description of Artificial Sequence: Synthetic oligonucleotide
  Target: LAMA2; (+) strand; PAM type: NRG; PAM sequence: TGG
atcaatgtctttcaccaatt

SEQ ID NO: 139618 - DNA, 20 bp, Artificial Sequence
  Description of Artificial Sequence: Synthetic oligonucleotide
  Target: LAMA2; (+) strand; PAM type: NRG; PAM sequence: TAG
caccaatttggtaaaattct

SEQ ID NO: 139619 - DNA, 20 bp, Artificial Sequence
  Description of Artificial Sequence: Synthetic oligonucleotide
  Target: LAMA2; (+) strand; PAM type: NRG; PAM sequence: GAG
tctttctctccactctccct

SEQ ID NO: 139620 - DNA, 20 bp, Artificial Sequence
  Description of Artificial Sequence: Synthetic oligonucleotide
  Target: LAMA2; (+) strand; PAM type: NRG; PAM sequence: CAG
ctccactctccctgagactt

SEQ ID NO: 139621 - DNA, 20 bp, Artificial Sequence
  Description of Artificial Sequence: Synthetic oligonucleotide
  Target: LAMA2; (+) strand; PAM type: NRG; PAM sequence: TAG
gacttcagtcacatccctgc

SEQ ID NO: 139622 - DNA, 20 bp, Artificial Sequence
  Description of Artificial Sequence: Synthetic oligonucleotide
  Target: LAMA2; (+) strand; PAM type: NRG; PAM sequence: TGG
cgtgctcattatgtattcta

SEQ ID NO: 139623 - DNA, 20 bp, Artificial Sequence
  Description of Artificial Sequence: Synthetic oligonucleotide
  Target: LAMA2; (+) strand; PAM type: NRG; PAM sequence: GAG
catttgtcttctcttctttt

SEQ ID NO: 139624 - DNA, 20 bp, Artificial Sequence
  Description of Artificial Sequence: Synthetic oligonucleotide
  Target: LAMA2; (+) strand; PAM type: NRG; PAM sequence: AGG
atttgtcttctcttcttttg

SEQ ID NO: 139625 - DNA, 20 bp, Artificial Sequence
  Description of Artificial Sequence: Synthetic oligonucleotide
  Target: LAMA2; (+) strand; PAM type: NRG; PAM sequence: CAG
tctcttcttttgaggtttct

SEQ ID NO: 139626 - DNA, 20 bp, Artificial Sequence
  Description of Artificial Sequence: Synthetic oligonucleotide
  Target: LAMA2; (+) strand; PAM type: NRG; PAM sequence: TGG
ttctcagtctgtacattttc

SEQ ID NO: 139627 - DNA, 20 bp, Artificial Sequence
  Description of Artificial Sequence: Synthetic oligonucleotide
  Target: LAMA2; (+) strand; PAM type: NRG; PAM sequence: GGG
tctcagtctgtacattttct

SEQ ID NO: 139628 - DNA, 20 bp, Artificial Sequence
  Description of Artificial Sequence: Synthetic oligonucleotide
  Target: LAMA2; (+) strand; PAM type: NRG; PAM sequence: TGG
tttctgggtgacctgttgtt

SEQ ID NO: 139629 - DNA, 20 bp, Artificial Sequence
  Description of Artificial Sequence: Synthetic oligonucleotide
  Target: LAMA2; (+) strand; PAM type: NRG; PAM sequence: TGG
aaataatcccttttttctgc

SEQ ID NO: 139630 - DNA, 20 bp, Artificial Sequence
  Description of Artificial Sequence: Synthetic oligonucleotide
  Target: LAMA2; (+) strand; PAM type: NRG; PAM sequence: TGG
cttctattacatacatttac

SEQ ID NO: 139631 - DNA, 20 bp, Artificial Sequence
  Description of Artificial Sequence: Synthetic oligonucleotide
  Target: LAMA2; (+) strand; PAM type: NRG; PAM sequence: TAG
atttttgtatttttattttt

SEQ ID NO: 139632 - DNA, 20 bp, Artificial Sequence
  Description of Artificial Sequence: Synthetic oligonucleotide
  Target: LAMA2; (+) strand; PAM type: NRG; PAM sequence: TAG
gtatttttattttttagttt

SEQ ID NO: 139633 - DNA, 20 bp, Artificial Sequence
  Description of Artificial Sequence: Synthetic oligonucleotide
  Target: LAMA2; (+) strand; PAM type: NRG; PAM sequence: TAG
atttgatactttaaaaaaat

SEQ ID NO: 139634 - DNA, 20 bp, Artificial Sequence
  Description of Artificial Sequence: Synthetic oligonucleotide
  Target: LAMA2; (+) strand; PAM type: NRG; PAM sequence: TAG
actccaaatatctctccact

SEQ ID NO: 139635 - DNA, 20 bp, Artificial Sequence
  Description of Artificial Sequence: Synthetic oligonucleotide
  Target: LAMA2; (+) strand; PAM type: NRG; PAM sequence: TGG
tatctctccacttagtcatc

SEQ ID NO: 139636 - DNA, 20 bp, Artificial Sequence
  Description of Artificial Sequence: Synthetic oligonucleotide
  Target: LAMA2; (+) strand; PAM type: NRG; PAM sequence: CAG
catctggaacatattaataa

SEQ ID NO: 139637 - DNA, 20 bp, Artificial Sequence
  Description of Artificial Sequence: Synthetic oligonucleotide
  Target: LAMA2; (+) strand; PAM type: NRG; PAM sequence: TGG
atgtctgataactctgacgt

SEQ ID NO: 139638 - DNA, 20 bp, Artificial Sequence
  Description of Artificial Sequence: Synthetic oligonucleotide
  Target: LAMA2; (+) strand; PAM type: NRG; PAM sequence: TGG
actctgacgttggaaacaac

SEQ ID NO: 139639 - DNA, 20 bp, Artificial Sequence
  Description of Artificial Sequence: Synthetic oligonucleotide
  Target: LAMA2; (+) strand; PAM type: NRG; PAM sequence: GGG
ctctgacgttggaaacaact

SEQ ID NO: 139640 - DNA, 20 bp, Artificial Sequence
  Description of Artificial Sequence: Synthetic oligonucleotide
  Target: LAMA2; (+) strand; PAM type: NRG; PAM sequence: GAG
ctgacgttggaaacaactgg

SEQ ID NO: 139641 - DNA, 20 bp, Artificial Sequence
  Description of Artificial Sequence: Synthetic oligonucleotide
  Target: LAMA2; (+) strand; PAM type: NRG; PAM sequence: AAG
atgcattcctgttttatgac

SEQ ID NO: 139642 - DNA, 20 bp, Artificial Sequence
  Description of Artificial Sequence: Synthetic oligonucleotide
  Target: LAMA2; (+) strand; PAM type: NRG; PAM sequence: TGG
ttcctgttttatgacaagct

SEQ ID NO: 139643 - DNA, 20 bp, Artificial Sequence
  Description of Artificial Sequence: Synthetic oligonucleotide
  Target: LAMA2; (+) strand; PAM type: NRG; PAM sequence: TGG
ctgaaaatgtataaaaattc

SEQ ID NO: 139644 - DNA, 20 bp, Artificial Sequence
  Description of Artificial Sequence: Synthetic oligonucleotide
  Target: LAMA2; (+) strand; PAM type: NRG; PAM sequence: AAG
aaaatgtataaaaattctgg

SEQ ID NO: 139645 - DNA, 20 bp, Artificial Sequence
  Description of Artificial Sequence: Synthetic oligonucleotide
  Target: LAMA2; (+) strand; PAM type: NRG; PAM sequence: AAG
tgatttattttcattctgtc

SEQ ID NO: 139646 - DNA, 20 bp, Artificial Sequence
  Description of Artificial Sequence: Synthetic oligonucleotide
  Target: LAMA2; (+) strand; PAM type: NRG; PAM sequence: GAG
atttattttcattctgtcaa

SEQ ID NO: 139647 - DNA, 20 bp, Artificial Sequence
  Description of Artificial Sequence: Synthetic oligonucleotide
  Target: LAMA2; (+) strand; PAM type: NRG; PAM sequence: TAG
attttcattctgtcaagagt

SEQ ID NO: 139648 - DNA, 20 bp, Artificial Sequence
  Description of Artificial Sequence: Synthetic oligonucleotide
  Target: LAMA2; (+) strand; PAM type: NRG; PAM sequence: TAG
cattctgtcaagagttagtg

SEQ ID NO: 139649 - DNA, 20 bp, Artificial Sequence
  Description of Artificial Sequence: Synthetic oligonucleotide
  Target: LAMA2; (+) strand; PAM type: NRG; PAM sequence: GAG
ttctgtcaagagttagtgta

SEQ ID NO: 139650 - DNA, 20 bp, Artificial Sequence
  Description of Artificial Sequence: Synthetic oligonucleotide
  Target: LAMA2; (+) strand; PAM type: NRG; PAM sequence: AGG
tctgtcaagagttagtgtag

SEQ ID NO: 139651 - DNA, 20 bp, Artificial Sequence
  Description of Artificial Sequence: Synthetic oligonucleotide
  Target: LAMA2; (+) strand; PAM type: NRG; PAM sequence: AAG
tcaagagttagtgtagaggc

SEQ ID NO: 139652 - DNA, 20 bp, Artificial Sequence
  Description of Artificial Sequence: Synthetic oligonucleotide
  Target: LAMA2; (+) strand; PAM type: NRG; PAM sequence: CAG
agaggcaagttgctttgctt

SEQ ID NO: 139653 - DNA, 20 bp, Artificial Sequence
  Description of Artificial Sequence: Synthetic oligonucleotide
  Target: LAMA2; (+) strand; PAM type: NRG; PAM sequence: CAG
gcaagttgctttgcttcagt

SEQ ID NO: 139654 - DNA, 20 bp, Artificial Sequence
  Description of Artificial Sequence: Synthetic oligonucleotide
  Target: LAMA2; (+) strand; PAM type: NRG; PAM sequence: TAG
tcagcaactcaaatgttttg

SEQ ID NO: 139655 - DNA, 20 bp, Artificial Sequence
  Description of Artificial Sequence: Synthetic oligonucleotide
  Target: LAMA2; (+) strand; PAM type: NRG; PAM sequence: TAG
aactcaaatgttttgtagct

SEQ ID NO: 139656 - DNA, 20 bp, Artificial Sequence
  Description of Artificial Sequence: Synthetic oligonucleotide
  Target: LAMA2; (+) strand; PAM type: NRG; PAM sequence: TAG
caaatgttttgtagcttagt

SEQ ID NO: 139657 - DNA, 20 bp, Artificial Sequence
  Description of Artificial Sequence: Synthetic oligonucleotide
  Target: LAMA2; (+) strand; PAM type: NRG; PAM sequence: GAG
aatgttttgtagcttagtta

SEQ ID NO: 139658 - DNA, 20 bp, Artificial Sequence
  Description of Artificial Sequence: Synthetic oligonucleotide
  Target: LAMA2; (+) strand; PAM type: NRG; PAM sequence: TGG
agcttagttagagattctga

SEQ ID NO: 139659 - DNA, 20 bp, Artificial Sequence
  Description of Artificial Sequence: Synthetic oligonucleotide
  Target: LAMA2; (+) strand; PAM type: NRG; PAM sequence: TAG
gagattctgatggttgtttc

SEQ ID NO: 139660 - DNA, 20 bp, Artificial Sequence
  Description of Artificial Sequence: Synthetic oligonucleotide
  Target: LAMA2; (+) strand; PAM type: NRG; PAM sequence: TAG
ggttgtttctagtttactct

SEQ ID NO: 139661 - DNA, 20 bp, Artificial Sequence
  Description of Artificial Sequence: Synthetic oligonucleotide
  Target: LAMA2; (+) strand; PAM type: NRG; PAM sequence: TAG
ttctagtttactcttagttc

SEQ ID NO: 139662 - DNA, 20 bp, Artificial Sequence
  Description of Artificial Sequence: Synthetic oligonucleotide
  Target: LAMA2; (+) strand; PAM type: NRG; PAM sequence: AGG
tctagtttactcttagttct

SEQ ID NO: 139663 - DNA, 20 bp, Artificial Sequence
  Description of Artificial Sequence: Synthetic oligonucleotide
  Target: LAMA2; (+) strand; PAM type: NRG; PAM sequence: GGG
ctagtttactcttagttcta

SEQ ID NO: 139664 - DNA, 20 bp, Artificial Sequence
  Description of Artificial Sequence: Synthetic oligonucleotide
  Target: LAMA2; (+) strand; PAM type: NRG; PAM sequence: TAG
tttactcttagttctaggga

SEQ ID NO: 139665 - DNA, 20 bp, Artificial Sequence
  Description of Artificial Sequence: Synthetic oligonucleotide
  Target: LAMA2; (+) strand; PAM type: NRG; PAM sequence: CAG
tagttctagggatagacttt

SEQ ID NO: 139666 - DNA, 20 bp, Artificial Sequence
  Description of Artificial Sequence: Synthetic oligonucleotide
  Target: LAMA2; (+) strand; PAM type: NRG; PAM sequence: AGG
agttctagggatagactttc

SEQ ID NO: 139667 - DNA, 20 bp, Artificial Sequence
  Description of Artificial Sequence: Synthetic oligonucleotide
  Target: LAMA2; (+) strand; PAM type: NRG; PAM sequence: CAG
gggatagactttcaggactc

SEQ ID NO: 139668 - DNA, 20 bp, Artificial Sequence
  Description of Artificial Sequence: Synthetic oligonucleotide
  Target: LAMA2; (+) strand; PAM type: NRG; PAM sequence: TGG
atagactttcaggactccag

SEQ ID NO: 139669 - DNA, 20 bp, Artificial Sequence
  Description of Artificial Sequence: Synthetic oligonucleotide
  Target: LAMA2; (+) strand; PAM type: NRG; PAM sequence: TGG
ttaccacactctttccttct

SEQ ID NO: 139670 - DNA, 20 bp, Artificial Sequence
  Description of Artificial Sequence: Synthetic oligonucleotide
  Target: LAMA2; (+) strand; PAM type: NRG; PAM sequence: AAG
ttggctgactcttaactcca

SEQ ID NO: 139671 - DNA, 20 bp, Artificial Sequence
  Description of Artificial Sequence: Synthetic oligonucleotide
  Target: LAMA2; (+) strand; PAM type: NRG; PAM sequence: TGG
aaagtttgtcttcccaactc

SEQ ID NO: 139672 - DNA, 20 bp, Artificial Sequence
  Description of Artificial Sequence: Synthetic oligonucleotide
  Target: LAMA2; (+) strand; PAM type: NRG; PAM sequence: GGG
aagtttgtcttcccaactct

SEQ ID NO: 139673 - DNA, 20 bp, Artificial Sequence
  Description of Artificial Sequence: Synthetic oligonucleotide
  Target: LAMA2; (+) strand; PAM type: NRG; PAM sequence: GAG
gtttgtcttcccaactctgg

SEQ ID NO: 139674 - DNA, 20 bp, Artificial Sequence
  Description of Artificial Sequence: Synthetic oligonucleotide
  Target: LAMA2; (+) strand; PAM type: NRG; PAM sequence: AAG
ccaactctgggagacttccc

SEQ ID NO: 139675 - DNA, 20 bp, Artificial Sequence
  Description of Artificial Sequence: Synthetic oligonucleotide
  Target: LAMA2; (+) strand; PAM type: NRG; PAM sequence: AGG
caactctgggagacttccca

SEQ ID NO: 139676 - DNA, 20 bp, Artificial Sequence
  Description of Artificial Sequence: Synthetic oligonucleotide
  Target: LAMA2; (+) strand; PAM type: NRG; PAM sequence: TAG
agacttcccaaggatcttct

SEQ ID NO: 139677 - DNA, 20 bp, Artificial Sequence
  Description of Artificial Sequence: Synthetic oligonucleotide
  Target: LAMA2; (+) strand; PAM type: NRG; PAM sequence: GAG
cttagtttttcacttctcat

SEQ ID NO: 139678 - DNA, 20 bp, Artificial Sequence
  Description of Artificial Sequence: Synthetic oligonucleotide
  Target: LAMA2; (+) strand; PAM type: NRG; PAM sequence: TGG
tttgcatgatgtttatcttc

SEQ ID NO: 139679 - DNA, 20 bp, Artificial Sequence
  Description of Artificial Sequence: Synthetic oligonucleotide
  Target: LAMA2; (+) strand; PAM type: NRG; PAM sequence: TAG
cttctggctccttcaccact

SEQ ID NO: 139680 - DNA, 20 bp, Artificial Sequence
  Description of Artificial Sequence: Synthetic oligonucleotide
  Target: LAMA2; (+) strand; PAM type: NRG; PAM sequence: TGG
ctccttcaccacttagaaat

SEQ ID NO: 139681 - DNA, 20 bp, Artificial Sequence
  Description of Artificial Sequence: Synthetic oligonucleotide
  Target: LAMA2; (+) strand; PAM type: NRG; PAM sequence: AAG
agaaattggcaaatctcttg

SEQ ID NO: 139682 - DNA, 20 bp, Artificial Sequence
  Description of Artificial Sequence: Synthetic oligonucleotide
  Target: LAMA2; (+) strand; PAM type: NRG; PAM sequence: AGG
gaaattggcaaatctcttga

SEQ ID NO: 139683 - DNA, 20 bp, Artificial Sequence
  Description of Artificial Sequence: Synthetic oligonucleotide
  Target: LAMA2; (+) strand; PAM type: NRG; PAM sequence: AAG
ggcaaatctcttgaaggcaa

SEQ ID NO: 139684 - DNA, 20 bp, Artificial Sequence
  Description of Artificial Sequence: Synthetic oligonucleotide
  Target: LAMA2; (+) strand; PAM type: NRG; PAM sequence: AAG
tcttgaaggcaaaagctgtg

SEQ ID NO: 139685 - DNA, 20 bp, Artificial Sequence
  Description of Artificial Sequence: Synthetic oligonucleotide
  Target: LAMA2; (+) strand; PAM type: NRG; PAM sequence: TAG
ggcaaaagctgtgaagaatg

SEQ ID NO: 139686 - DNA, 20 bp, Artificial Sequence
  Description of Artificial Sequence: Synthetic oligonucleotide
  Target: LAMA2; (+) strand; PAM type: NRG; PAM sequence: AGG
gcaaaagctgtgaagaatgt

SEQ ID NO: 139687 - DNA, 20 bp, Artificial Sequence
  Description of Artificial Sequence: Synthetic oligonucleotide
  Target: LAMA2; (+) strand; PAM type: NRG; PAM sequence: TGG
tctcatttctctatgaatta

SEQ ID NO: 139688 - DNA, 20 bp, Artificial Sequence
  Description of Artificial Sequence: Synthetic oligonucleotide
  Target: LAMA2; (+) strand; PAM type: NRG; PAM sequence: TAG
aattatggtccctcacatcc

SEQ ID NO: 139689 - DNA, 20 bp, Artificial Sequence
  Description of Artificial Sequence: Synthetic oligonucleotide
  Target: LAMA2; (+) strand; PAM type: NRG; PAM sequence: TAG
tcacatcctagctgacttca

SEQ ID NO: 139690 - DNA, 20 bp, Artificial Sequence
  Description of Artificial Sequence: Synthetic oligonucleotide
  Target: LAMA2; (+) strand; PAM type: NRG; PAM sequence: GAG
tgtttatcttcttatcctgt

SEQ ID NO: 139691 - DNA, 20 bp, Artificial Sequence
  Description of Artificial Sequence: Synthetic oligonucleotide
  Target: LAMA2; (+) strand; PAM type: NRG; PAM sequence: AAG
gtgagattgctgaacacact

SEQ ID NO: 139692 - DNA, 20 bp, Artificial Sequence
  Description of Artificial Sequence: Synthetic oligonucleotide
  Target: LAMA2; (+) strand; PAM type: NRG; PAM sequence: TAG
ttgctgaacacactaagatg

SEQ ID NO: 139693 - DNA, 20 bp, Artificial Sequence
  Description of Artificial Sequence: Synthetic oligonucleotide
  Target: LAMA2; (+) strand; PAM type: NRG; PAM sequence: CAG
ataacctcctattcaactgt

SEQ ID NO: 139694 - DNA, 20 bp, Artificial Sequence
  Description of Artificial Sequence: Synthetic oligonucleotide
  Target: LAMA2; (+) strand; PAM type: NRG; PAM sequence: AAG
aactgtcagcaaatcaataa

SEQ ID NO: 139695 - DNA, 20 bp, Artificial Sequence
  Description of Artificial Sequence: Synthetic oligonucleotide
  Target: LAMA2; (+) strand; PAM type: NRG; PAM sequence: GAG
caaatcaataaaagtaccct

SEQ ID NO: 139696 - DNA, 20 bp, Artificial Sequence
  Description of Artificial Sequence: Synthetic oligonucleotide
  Target: LAMA2; (+) strand; PAM type: NRG; PAM sequence: GAG
aatcaataaaagtaccctga

SEQ ID NO: 139697 - DNA, 20 bp, Artificial Sequence
  Description of Artificial Sequence: Synthetic oligonucleotide
  Target: LAMA2; (+) strand; PAM type: NRG; PAM sequence: AGG
atcaataaaagtaccctgag

SEQ ID NO: 139698 - DNA, 20 bp, Artificial Sequence
  Description of Artificial Sequence: Synthetic oligonucleotide
  Target: LAMA2; (+) strand; PAM type: NRG; PAM sequence: TGG
aaagtaccctgagaggaaaa

SEQ ID NO: 139699 - DNA, 20 bp, Artificial Sequence
  Description of Artificial Sequence: Synthetic oligonucleotide
  Target: LAMA2; (+) strand; PAM type: NRG; PAM sequence: TAG
taccctgagaggaaaatggc

SEQ ID NO: 139700 - DNA, 20 bp, Artificial Sequence
  Description of Artificial Sequence: Synthetic oligonucleotide
  Target: LAMA2; (+) strand; PAM type: NRG; PAM sequence: AAG
taatttgcttccctttactt

SEQ ID NO: 139701 - DNA, 20 bp, Artificial Sequence
  Description of Artificial Sequence: Synthetic oligonucleotide
  Target: LAMA2; (+) strand; PAM type: NRG; PAM sequence: TGG
tgcttccctttacttaagtc

SEQ ID NO: 139702 - DNA, 20 bp, Artificial Sequence
  Description of Artificial Sequence: Synthetic oligonucleotide
  Target: LAMA2; (+) strand; PAM type: NRG; PAM sequence: TGG
ttacttaagtctggctgcct

SEQ ID NO: 139703 - DNA, 20 bp, Artificial Sequence
  Description of Artificial Sequence: Synthetic oligonucleotide
  Target: LAMA2; (+) strand; PAM type: NRG; PAM sequence: TAG
tgccttcaaactgctgtttt

SEQ ID NO: 139704 - DNA, 20 bp, Artificial Sequence
  Description of Artificial Sequence: Synthetic oligonucleotide
  Target: LAMA2; (+) strand; PAM type: NRG; PAM sequence: CAG
gctgtttttagtattttatc

SEQ ID NO: 139705 - DNA, 20 bp, Artificial Sequence
  Description of Artificial Sequence: Synthetic oligonucleotide
  Target: LAMA2; (+) strand; PAM type: NRG; PAM sequence: TGG
agtattttatccagctttta

SEQ ID NO: 139706 - DNA, 20 bp, Artificial Sequence
  Description of Artificial Sequence: Synthetic oligonucleotide
  Target: LAMA2; (+) strand; PAM type: NRG; PAM sequence: GAG
cttttatggttgttgtcttt

SEQ ID NO: 139707 - DNA, 20 bp, Artificial Sequence
  Description of Artificial Sequence: Synthetic oligonucleotide
  Target: LAMA2; (+) strand; PAM type: NRG; PAM sequence: GAG
tttatggttgttgtctttga

SEQ ID NO: 139708 - DNA, 20 bp, Artificial Sequence
  Description of Artificial Sequence: Synthetic oligonucleotide
  Target: LAMA2; (+) strand; PAM type: NRG; PAM sequence: TGG
ttgttgtctttgagagaaaa

SEQ ID NO: 139709 - DNA, 20 bp, Artificial Sequence
  Description of Artificial Sequence: Synthetic oligonucleotide
  Target: LAMA2; (+) strand; PAM type: NRG; PAM sequence: AAG
tgtctttgagagaaaatgga

SEQ ID NO: 139710 - DNA, 20 bp, Artificial Sequence
  Description of Artificial Sequence: Synthetic oligonucleotide
  Target: LAMA2; (+) strand; PAM type: NRG; PAM sequence: AGG
gtctttgagagaaaatggaa

SEQ ID NO: 139711 - DNA, 20 bp, Artificial Sequence
  Description of Artificial Sequence: Synthetic oligonucleotide
  Target: LAMA2; (+) strand; PAM type: NRG; PAM sequence: GGG
tctttgagagaaaatggaaa

SEQ ID NO: 139712 - DNA, 20 bp, Artificial Sequence
  Description of Artificial Sequence: Synthetic oligonucleotide
  Target: LAMA2; (+) strand; PAM type: NRG; PAM sequence: CAG
aaaaatatttattttattta

SEQ ID NO: 139713 - DNA, 20 bp, Artificial Sequence
  Description of Artificial Sequence: Synthetic oligonucleotide
  Target: LAMA2; (+) strand; PAM type: NRG; PAM sequence: CAG
acagttttaaaaacaaaaat

SEQ ID NO: 139714 - DNA, 20 bp, Artificial Sequence
  Description of Artificial Sequence: Synthetic oligonucleotide
  Target: LAMA2; (+) strand; PAM type: NRG; PAM sequence: AAG
ttattgctttttgtgaattt

SEQ ID NO: 139715 - DNA, 20 bp, Artificial Sequence
  Description of Artificial Sequence: Synthetic oligonucleotide
  Target: LAMA2; (+) strand; PAM type: NRG; PAM sequence: AGG
tattgctttttgtgaattta

SEQ ID NO: 139716 - DNA, 20 bp, Artificial Sequence
  Description of Artificial Sequence: Synthetic oligonucleotide
  Target: LAMA2; (+) strand; PAM type: NRG; PAM sequence: TGG
aatattaaaacaataattat

SEQ ID NO: 139717 - DNA, 20 bp, Artificial Sequence
  Description of Artificial Sequence: Synthetic oligonucleotide
  Target: LAMA2; (+) strand; PAM type: NRG; PAM sequence: TGG
taattattggaacattttga

SEQ ID NO: 139718 - DNA, 20 bp, Artificial Sequence
  Description of Artificial Sequence: Synthetic oligonucleotide
  Target: LAMA2; (+) strand; PAM type: NRG; PAM sequence: AAG
gaacattttgatggattatg

SEQ ID NO: 139719 - DNA, 20 bp, Artificial Sequence
  Description of Artificial Sequence: Synthetic oligonucleotide
  Target: LAMA2; (+) strand; PAM type: NRG; PAM sequence: AAG
attttgatggattatgaaga

SEQ ID NO: 139720 - DNA, 20 bp, Artificial Sequence
  Description of Artificial Sequence: Synthetic oligonucleotide
  Target: LAMA2; (+) strand; PAM type: NRG; PAM sequence: TGG
gaagaaagaatatgtaaaat

SEQ ID NO: 139721 - DNA, 20 bp, Artificial Sequence
  Description of Artificial Sequence: Synthetic oligonucleotide
  Target: LAMA2; (+) strand; PAM type: NRG; PAM sequence: GGG
aagaaagaatatgtaaaatt

SEQ ID NO: 139722 - DNA, 20 bp, Artificial Sequence
  Description of Artificial Sequence: Synthetic oligonucleotide
  Target: LAMA2; (+) strand; PAM type: NRG; PAM sequence: TGG
tatgtaaaattgggatcgtg

SEQ ID NO: 139723 - DNA, 20 bp, Artificial Sequence
  Description of Artificial Sequence: Synthetic oligonucleotide
  Target: LAMA2; (+) strand; PAM type: NRG; PAM sequence: TGG
ttgggatcgtgtggaaaatc

SEQ ID NO: 139724 - DNA, 20 bp, Artificial Sequence
  Description of Artificial Sequence: Synthetic oligonucleotide
  Target: LAMA2; (+) strand; PAM type: NRG; PAM sequence: TGG
aaatctggtatgcatgaaat

SEQ ID NO: 139725 - DNA, 20 bp, Artificial Sequence
  Description of Artificial Sequence: Synthetic oligonucleotide
  Target: LAMA2; (+) strand; PAM type: NRG; PAM sequence: AAG
atgcatgaaattggcatata

SEQ ID NO: 139726 - DNA, 20 bp, Artificial Sequence
  Description of Artificial Sequence: Synthetic oligonucleotide
  Target: LAMA2; (+) strand; PAM type: NRG; PAM sequence: TAG
catgaaattggcatataaag

SEQ ID NO: 139727 - DNA, 20 bp, Artificial Sequence
  Description of Artificial Sequence: Synthetic oligonucleotide
  Target: LAMA2; (+) strand; PAM type: NRG; PAM sequence: AGG
atgaaattggcatataaagt

SEQ ID NO: 139728 - DNA, 20 bp, Artificial Sequence
  Description of Artificial Sequence: Synthetic oligonucleotide
  Target: LAMA2; (+) strand; PAM type: NRG; PAM sequence: AAG
atataaagtaggcctaaaca

SEQ ID NO: 139729 - DNA, 20 bp, Artificial Sequence
  Description of Artificial Sequence: Synthetic oligonucleotide
  Target: LAMA2; (+) strand; PAM type: NRG; PAM sequence: CAG
taaagtaggcctaaacaaag

SEQ ID NO: 139730 - DNA, 20 bp, Artificial Sequence
  Description of Artificial Sequence: Synthetic oligonucleotide
  Target: LAMA2; (+) strand; PAM type: NRG; PAM sequence: AGG
aaagtaggcctaaacaaagc

SEQ ID NO: 139731 - DNA, 20 bp, Artificial Sequence
  Description of Artificial Sequence: Synthetic oligonucleotide
  Target: LAMA2; (+) strand; PAM type: NRG; PAM sequence: TAG
aacaaagcaggtgctattct

SEQ ID NO: 139732 - DNA, 20 bp, Artificial Sequence
  Description of Artificial Sequence: Synthetic oligonucleotide
  Target: LAMA2; (+) strand; PAM type: NRG; PAM sequence: AAG
aagcaggtgctattcttagt

SEQ ID NO: 139733 - DNA, 20 bp, Artificial Sequence
  Description of Artificial Sequence: Synthetic oligonucleotide
  Target: LAMA2; (+) strand; PAM type: NRG; PAM sequence: AAG
caggtgctattcttagtaag

SEQ ID NO: 139734 - DNA, 20 bp, Artificial Sequence
  Description of Artificial Sequence: Synthetic oligonucleotide
  Target: LAMA2; (+) strand; PAM type: NRG; PAM sequence: TGG
aagaagcttcatgcccctta

SEQ ID NO: 139735 - DNA, 20 bp, Artificial Sequence
  Description of Artificial Sequence: Synthetic oligonucleotide
  Target: LAMA2; (+) strand; PAM type: NRG; PAM sequence: AAG
tctgccctgaataatacata

SEQ ID NO: 139736 - DNA, 20 bp, Artificial Sequence
  Description of Artificial Sequence: Synthetic oligonucleotide
  Target: LAMA2; (+) strand; PAM type: NRG; PAM sequence: GAG
gcgtttgaaaaatatttgtt

SEQ ID NO: 139737 - DNA, 20 bp, Artificial Sequence
  Description of Artificial Sequence: Synthetic oligonucleotide
  Target: LAMA2; (+) strand; PAM type: NRG; PAM sequence: AAG
ttgagcaactactgtttttt

SEQ ID NO: 139738 - DNA, 20 bp, Artificial Sequence
  Description of Artificial Sequence: Synthetic oligonucleotide
  Target: LAMA2; (+) strand; PAM type: NRG; PAM sequence: CAG
agcaactactgttttttaag

SEQ ID NO: 139739 - DNA, 20 bp, Artificial Sequence
  Description of Artificial Sequence: Synthetic oligonucleotide
  Target: LAMA2; (+) strand; PAM type: NRG; PAM sequence: AAG
tgttttttaagcagtgttct

SEQ ID NO: 139740 - DNA, 20 bp, Artificial Sequence
  Description of Artificial Sequence: Synthetic oligonucleotide
  Target: LAMA2; (+) strand; PAM type: NRG; PAM sequence: TAG
taagcagtgttctaagcctg

SEQ ID NO: 139741 - DNA, 20 bp, Artificial Sequence
  Description of Artificial Sequence: Synthetic oligonucleotide
  Target: LAMA2; (+) strand; PAM type: NRG; PAM sequence: AGG
aagcagtgttctaagcctgt

SEQ ID NO: 139742 - DNA, 20 bp, Artificial Sequence
  Description of Artificial Sequence: Synthetic oligonucleotide
  Target: LAMA2; (+) strand; PAM type: NRG; PAM sequence: AAG
agcctgtaggtctgtccatg

SEQ ID NO: 139743 - DNA, 20 bp, Artificial Sequence
  Description of Artificial Sequence: Synthetic oligonucleotide
  Target: LAMA2; (+) strand; PAM type: NRG; PAM sequence: AGG
gcctgtaggtctgtccatga

SEQ ID NO: 139744 - DNA, 20 bp, Artificial Sequence
  Description of Artificial Sequence: Synthetic oligonucleotide
  Target: LAMA2; (+) strand; PAM type: NRG; PAM sequence: GAG
ctgtaggtctgtccatgaag

SEQ ID NO: 139745 - DNA, 20 bp, Artificial Sequence
  Description of Artificial Sequence: Synthetic oligonucleotide
  Target: LAMA2; (+) strand; PAM type: NRG; PAM sequence: CAG
aggtctgtccatgaaggaga

SEQ ID NO: 139746 - DNA, 20 bp, Artificial Sequence
  Description of Artificial Sequence: Synthetic oligonucleotide
  Target: LAMA2; (+) strand; PAM type: NRG; PAM sequence: AGG
ggtctgtccatgaaggagac

SEQ ID NO: 139747 - DNA, 20 bp, Artificial Sequence
  Description of Artificial Sequence: Synthetic oligonucleotide
  Target: LAMA2; (+) strand; PAM type: NRG; PAM sequence: GAG
tctgtccatgaaggagacag

SEQ ID NO: 139748 - DNA, 20 bp, Artificial Sequence
  Description of Artificial Sequence: Synthetic oligonucleotide
  Target: LAMA2; (+) strand; PAM type: NRG; PAM sequence: CAG
agacaggagtccttgcattc

SEQ ID NO: 139749 - DNA, 20 bp, Artificial Sequence
  Description of Artificial Sequence: Synthetic oligonucleotide
  Target: LAMA2; (+) strand; PAM type: NRG; PAM sequence: AGG
gacaggagtccttgcattcc

SEQ ID NO: 139750 - DNA, 20 bp, Artificial Sequence
  Description of Artificial Sequence: Synthetic oligonucleotide
  Target: LAMA2; (+) strand; PAM type: NRG; PAM sequence: GGG
acaggagtccttgcattcca

SEQ ID NO: 139751 - DNA, 20 bp, Artificial Sequence
  Description of Artificial Sequence: Synthetic oligonucleotide
  Target: LAMA2; (+) strand; PAM type: NRG; PAM sequence: AAG
ccttgcattccagggttttc

SEQ ID NO: 139752 - DNA, 20 bp, Artificial Sequence
  Description of Artificial Sequence: Synthetic oligonucleotide
  Target: LAMA2; (+) strand; PAM type: NRG; PAM sequence: TAG
gggttttcaagtaaacaatt

SEQ ID NO: 139753 - DNA, 20 bp, Artificial Sequence
  Description of Artificial Sequence: Synthetic oligonucleotide
  Target: LAMA2; (+) strand; PAM type: NRG; PAM sequence: TAG
ttcaagtaaacaatttagaa

SEQ ID NO: 139754 - DNA, 20 bp, Artificial Sequence
  Description of Artificial Sequence: Synthetic oligonucleotide
  Target: LAMA2; (+) strand; PAM type: NRG; PAM sequence: AAG
taaacaatttagaatagtgc

SEQ ID NO: 139755 - DNA, 20 bp, Artificial Sequence
  Description of Artificial Sequence: Synthetic oligonucleotide
  Target: LAMA2; (+) strand; PAM type: NRG; PAM sequence: AAG
gtgcaagttcatgaaaaaaa

SEQ ID NO: 139756 - DNA, 20 bp, Artificial Sequence
  Description of Artificial Sequence: Synthetic oligonucleotide
  Target: LAMA2; (+) strand; PAM type: NRG; PAM sequence: AAG
gttcatgaaaaaaaaagcat

SEQ ID NO: 139757 - DNA, 20 bp, Artificial Sequence
  Description of Artificial Sequence: Synthetic oligonucleotide
  Target: LAMA2; (+) strand; PAM type: NRG; PAM sequence: AAG
aaaaagcataagattataat

SEQ ID NO: 139758 - DNA, 20 bp, Artificial Sequence
  Description of Artificial Sequence: Synthetic oligonucleotide
  Target: LAMA2; (+) strand; PAM type: NRG; PAM sequence: TAG
ataagattataataagatta

SEQ ID NO: 139759 - DNA, 20 bp, Artificial Sequence
  Description of Artificial Sequence: Synthetic oligonucleotide
  Target: LAMA2; (+) strand; PAM type: NRG; PAM sequence: CGG
gattataataagattataga

SEQ ID NO: 139760 - DNA, 20 bp, Artificial Sequence
  Description of Artificial Sequence: Synthetic oligonucleotide
  Target: LAMA2; (+) strand; PAM type: NRG; PAM sequence: AAG
aagattatagacggtgatga

SEQ ID NO: 139761 - DNA, 20 bp, Artificial Sequence
  Description of Artificial Sequence: Synthetic oligonucleotide
  Target: LAMA2; (+) strand; PAM type: NRG; PAM sequence: GAG
gattatagacggtgatgaaa

SEQ ID NO: 139762 - DNA, 20 bp, Artificial Sequence
  Description of Artificial Sequence: Synthetic oligonucleotide
  Target: LAMA2; (+) strand; PAM type: NRG; PAM sequence: CAG
tgttctatgtatgcattttt

SEQ ID NO: 139763 - DNA, 20 bp, Artificial Sequence
  Description of Artificial Sequence: Synthetic oligonucleotide
  Target: LAMA2; (+) strand; PAM type: NRG; PAM sequence: AGG
gttctatgtatgcatttttc

SEQ ID NO: 139764 - DNA, 20 bp, Artificial Sequence
  Description of Artificial Sequence: Synthetic oligonucleotide
  Target: LAMA2; (+) strand; PAM type: NRG; PAM sequence: AAG
ctatgtatgcatttttcagg

SEQ ID NO: 139765 - DNA, 20 bp, Artificial Sequence
  Description of Artificial Sequence: Synthetic oligonucleotide
  Target: LAMA2; (+) strand; PAM type: NRG; PAM sequence: GAG
tttttcaggaagtgatattt

SEQ ID NO: 139766 - DNA, 20 bp, Artificial Sequence
  Description of Artificial Sequence: Synthetic oligonucleotide
  Target: LAMA2; (+) strand; PAM type: NRG; PAM sequence: GAG
caggaagtgatatttgagct

SEQ ID NO: 139767 - DNA, 20 bp, Artificial Sequence
  Description of Artificial Sequence: Synthetic oligonucleotide
  Target: LAMA2; (+) strand; PAM type: NRG; PAM sequence: CAG
ttgagctgagaattaaaaac

SEQ ID NO: 139768 - DNA, 20 bp, Artificial Sequence
  Description of Artificial Sequence: Synthetic oligonucleotide
  Target: LAMA2; (+) strand; PAM type: NRG; PAM sequence: CAG
aattaaaaaccagaaaatac

SEQ ID NO: 139769 - DNA, 20 bp, Artificial Sequence
  Description of Artificial Sequence: Synthetic oligonucleotide
  Target: LAMA2; (+) strand; PAM type: NRG; PAM sequence: TAG
aaaccagaaaataccagtca

SEQ ID NO: 139770 - DNA, 20 bp, Artificial Sequence
  Description of Artificial Sequence: Synthetic oligonucleotide
  Target: LAMA2; (+) strand; PAM type: NRG; PAM sequence: TGG
ataccagtcatagaaaaatc

SEQ ID NO: 139771 - DNA, 20 bp, Artificial Sequence
  Description of Artificial Sequence: Synthetic oligonucleotide
  Target: LAMA2; (+) strand; PAM type: NRG; PAM sequence: GGG
taccagtcatagaaaaatct

SEQ ID NO: 139772 - DNA, 20 bp, Artificial Sequence
  Description of Artificial Sequence: Synthetic oligonucleotide
  Target: LAMA2; (+) strand; PAM type: NRG; PAM sequence: TAG
cagtcatagaaaaatctggg

SEQ ID NO: 139773 - DNA, 20 bp, Artificial Sequence
  Description of Artificial Sequence: Synthetic oligonucleotide
  Target: LAMA2; (+) strand; PAM type: NRG; PAM sequence: GAG
gtcatagaaaaatctgggta

SEQ ID NO: 139774 - DNA, 20 bp, Artificial Sequence
  Description of Artificial Sequence: Synthetic oligonucleotide
  Target: LAMA2; (+) strand; PAM type: NRG; PAM sequence: CAG
atctgggtagagtttattac

SEQ ID NO: 139775 - DNA, 20 bp, Artificial Sequence
  Description of Artificial Sequence: Synthetic oligonucleotide
  Target: LAMA2; (+) strand; PAM type: NRG; PAM sequence: CAG
tgggtagagtttattaccag

SEQ ID NO: 139776 - DNA, 20 bp, Artificial Sequence
  Description of Artificial Sequence: Synthetic oligonucleotide
  Target: LAMA2; (+) strand; PAM type: NRG; PAM sequence: AGG
gggtagagtttattaccagc

SEQ ID NO: 139777 - DNA, 20 bp, Artificial Sequence
  Description of Artificial Sequence: Synthetic oligonucleotide
  Target: LAMA2; (+) strand; PAM type: NRG; PAM sequence: TGG
attaccagcaggaataaatg

SEQ ID NO: 139778 - DNA, 20 bp, Artificial Sequence
  Description of Artificial Sequence: Synthetic oligonucleotide
  Target: LAMA2; (+) strand; PAM type: NRG; PAM sequence: GGG
ttaccagcaggaataaatgt

SEQ ID NO: 139779 - DNA, 20 bp, Artificial Sequence
  Description of Artificial Sequence: Synthetic oligonucleotide
  Target: LAMA2; (+) strand; PAM type: NRG; PAM sequence: GGG
taccagcaggaataaatgtg

SEQ ID NO: 139780 - DNA, 20 bp, Artificial Sequence
  Description of Artificial Sequence: Synthetic oligonucleotide
  Target: LAMA2; (+) strand; PAM type: NRG; PAM sequence: GAG
aggaataaatgtggggtgct

SEQ ID NO: 139781 - DNA, 20 bp, Artificial Sequence
  Description of Artificial Sequence: Synthetic oligonucleotide
  Target: LAMA2; (+) strand; PAM type: NRG; PAM sequence: AGG
ggaataaatgtggggtgctg

SEQ ID NO: 139782 - DNA, 20 bp, Artificial Sequence
  Description of Artificial Sequence: Synthetic oligonucleotide
  Target: LAMA2; (+) strand; PAM type: NRG; PAM sequence: AAG
taaatgtggggtgctgagga

SEQ ID NO: 139783 - DNA, 20 bp, Artificial Sequence
  Description of Artificial Sequence: Synthetic oligonucleotide
  Target: LAMA2; (+) strand; PAM type: NRG; PAM sequence: AGG
aaatgtggggtgctgaggaa

SEQ ID NO: 139784 - DNA, 20 bp, Artificial Sequence
  Description of Artificial Sequence: Synthetic oligonucleotide
  Target: LAMA2; (+) strand; PAM type: NRG; PAM sequence: AAG
gtggggtgctgaggaaagga

SEQ ID NO: 139785 - DNA, 20 bp, Artificial Sequence
  Description of Artificial Sequence: Synthetic oligonucleotide
  Target: LAMA2; (+) strand; PAM type: NRG; PAM sequence: AAG
gggtgctgaggaaaggaaag

SEQ ID NO: 139786 - DNA, 20 bp, Artificial Sequence
  Description of Artificial Sequence: Synthetic oligonucleotide
  Target: LAMA2; (+) strand; PAM type: NRG; PAM sequence: AGG
ggtgctgaggaaaggaaaga

SEQ ID NO: 139787 - DNA, 20 bp, Artificial Sequence
  Description of Artificial Sequence: Synthetic oligonucleotide
  Target: LAMA2; (+) strand; PAM type: NRG; PAM sequence: TGG
gaaaggaaagaaggccaatg

SEQ ID NO: 139788 - DNA, 20 bp, Artificial Sequence
  Description of Artificial Sequence: Synthetic oligonucleotide
  Target: LAMA2; (+) strand; PAM type: NRG; PAM sequence: TGG
ggaaagaaggccaatgtggc

SEQ ID NO: 139789 - DNA, 20 bp, Artificial Sequence
  Description of Artificial Sequence: Synthetic oligonucleotide
  Target: LAMA2; (+) strand; PAM type: NRG; PAM sequence: TAG
aggccaatgtggctggaacc

SEQ ID NO: 139790 - DNA, 20 bp, Artificial Sequence
  Description of Artificial Sequence: Synthetic oligonucleotide
  Target: LAMA2; (+) strand; PAM type: NRG; PAM sequence: AAG
gtggctggaacctagtgatc

SEQ ID NO: 139791 - DNA, 20 bp, Artificial Sequence
  Description of Artificial Sequence: Synthetic oligonucleotide
  Target: LAMA2; (+) strand; PAM type: NRG; PAM sequence: GAG
ggctggaacctagtgatcaa

SEQ ID NO: 139792 - DNA, 20 bp, Artificial Sequence
  Description of Artificial Sequence: Synthetic oligonucleotide
  Target: LAMA2; (+) strand; PAM type: NRG; PAM sequence: AAG
gaacctagtgatcaagagca

SEQ ID NO: 139793 - DNA, 20 bp, Artificial Sequence
  Description of Artificial Sequence: Synthetic oligonucleotide
  Target: LAMA2; (+) strand; PAM type: NRG; PAM sequence: AGG
aacctagtgatcaagagcaa

SEQ ID NO: 139794 - DNA, 20 bp, Artificial Sequence
  Description of Artificial Sequence: Synthetic oligonucleotide
  Target: LAMA2; (+) strand; PAM type: NRG; PAM sequence: TGG
ctagtgatcaagagcaaagg

SEQ ID NO: 139795 - DNA, 20 bp, Artificial Sequence
  Description of Artificial Sequence: Synthetic oligonucleotide
  Target: LAMA2; (+) strand; PAM type: NRG; PAM sequence: GAG
atcaagagcaaaggtggcat

SEQ ID NO: 139796 - DNA, 20 bp, Artificial Sequence
  Description of Artificial Sequence: Synthetic oligonucleotide
  Target: LAMA2; (+) strand; PAM type: NRG; PAM sequence: CGG
ggtggcatgagatgctgtca

SEQ ID NO: 139797 - DNA, 20 bp, Artificial Sequence
  Description of Artificial Sequence: Synthetic oligonucleotide
  Target: LAMA2; (+) strand; PAM type: NRG; PAM sequence: GAG
tggcatgagatgctgtcacg

SEQ ID NO: 139798 - DNA, 20 bp, Artificial Sequence
  Description of Artificial Sequence: Synthetic oligonucleotide
  Target: LAMA2; (+) strand; PAM type: NRG; PAM sequence: AGG
ggcatgagatgctgtcacgg

SEQ ID NO: 139799 - DNA, 20 bp, Artificial Sequence
  Description of Artificial Sequence: Synthetic oligonucleotide
  Target: LAMA2; (+) strand; PAM type: NRG; PAM sequence: CAG
gatgctgtcacggaggtctc

SEQ ID NO: 139800 - DNA, 20 bp, Artificial Sequence
  Description of Artificial Sequence: Synthetic oligonucleotide
  Target: LAMA2; (+) strand; PAM type: NRG; PAM sequence: AGG
atgctgtcacggaggtctcc

SEQ ID NO: 139801 - DNA, 20 bp, Artificial Sequence
  Description of Artificial Sequence: Synthetic oligonucleotide
  Target: LAMA2; (+) strand; PAM type: NRG; PAM sequence: TAG
cggaggtctccaggtcttct

SEQ ID NO: 139802 - DNA, 20 bp, Artificial Sequence
  Description of Artificial Sequence: Synthetic oligonucleotide
  Target: LAMA2; (+) strand; PAM type: NRG; PAM sequence: AAG
ccaggtcttcttagctcctg

SEQ ID NO: 139803 - DNA, 20 bp, Artificial Sequence
  Description of Artificial Sequence: Synthetic oligonucleotide
  Target: LAMA2; (+) strand; PAM type: NRG; PAM sequence: AGG
caggtcttcttagctcctga

SEQ ID NO: 139804 - DNA, 20 bp, Artificial Sequence
  Description of Artificial Sequence: Synthetic oligonucleotide
  Target: LAMA2; (+) strand; PAM type: NRG; PAM sequence: GGG
aggtcttcttagctcctgaa

SEQ ID NO: 139805 - DNA, 20 bp, Artificial Sequence
  Description of Artificial Sequence: Synthetic oligonucleotide
  Target: LAMA2; (+) strand; PAM type: NRG; PAM sequence: GAG
gtcttcttagctcctgaagg

SEQ ID NO: 139806 - DNA, 20 bp, Artificial Sequence
  Description of Artificial Sequence: Synthetic oligonucleotide
  Target: LAMA2; (+) strand; PAM type: NRG; PAM sequence: TAG
ttcttagctcctgaagggag

SEQ ID NO: 139807 - DNA, 20 bp, Artificial Sequence
  Description of Artificial Sequence: Synthetic oligonucleotide
  Target: LAMA2; (+) strand; PAM type: NRG; PAM sequence: CAG
tagctcctgaagggagtagt

SEQ ID NO: 139808 - DNA, 20 bp, Artificial Sequence
  Description of Artificial Sequence: Synthetic oligonucleotide
  Target: LAMA2; (+) strand; PAM type: NRG; PAM sequence: CAG
gagtagtcagtcatgataaa

SEQ ID NO: 139809 - DNA, 20 bp, Artificial Sequence
  Description of Artificial Sequence: Synthetic oligonucleotide
  Target: LAMA2; (+) strand; PAM type: NRG; PAM sequence: TGG
aaacagtttatattgaattc

SEQ ID NO: 139810 - DNA, 20 bp, Artificial Sequence
  Description of Artificial Sequence: Synthetic oligonucleotide
  Target: LAMA2; (+) strand; PAM type: NRG; PAM sequence: GGG
aacagtttatattgaattct

SEQ ID NO: 139811 - DNA, 20 bp, Artificial Sequence
  Description of Artificial Sequence: Synthetic oligonucleotide
  Target: LAMA2; (+) strand; PAM type: NRG; PAM sequence: GAG
tattgaattctgggtataat

SEQ ID NO: 139812 - DNA, 20 bp, Artificial Sequence
  Description of Artificial Sequence: Synthetic oligonucleotide
  Target: LAMA2; (+) strand; PAM type: NRG; PAM sequence: CAG
tgggtataatgagaaacccg

SEQ ID NO: 139813 - DNA, 20 bp, Artificial Sequence
  Description of Artificial Sequence: Synthetic oligonucleotide
  Target: LAMA2; (+) strand; PAM type: NRG; PAM sequence: TGG
gtataatgagaaacccgcag

SEQ ID NO: 139814 - DNA, 20 bp, Artificial Sequence
  Description of Artificial Sequence: Synthetic oligonucleotide
  Target: LAMA2; (+) strand; PAM type: NRG; PAM sequence: AAG
agaaacccgcagtggtattt

SEQ ID NO: 139815 - DNA, 20 bp, Artificial Sequence
  Description of Artificial Sequence: Synthetic oligonucleotide
  Target: LAMA2; (+) strand; PAM type: NRG; PAM sequence: CAG
aacccgcagtggtatttaag

SEQ ID NO: 139816 - DNA, 20 bp, Artificial Sequence
  Description of Artificial Sequence: Synthetic oligonucleotide
  Target: LAMA2; (+) strand; PAM type: NRG; PAM sequence: AGG
acccgcagtggtatttaagc

SEQ ID NO: 139817 - DNA, 20 bp, Artificial Sequence
  Description of Artificial Sequence: Synthetic oligonucleotide
  Target: LAMA2; (+) strand; PAM type: NRG; PAM sequence: TAG
catgatttcctttatctcat

SEQ ID NO: 139818 - DNA, 20 bp, Artificial Sequence
  Description of Artificial Sequence: Synthetic oligonucleotide
  Target: LAMA2; (+) strand; PAM type: NRG; PAM sequence: AAG
gatttcctttatctcattag

SEQ ID NO: 139819 - DNA, 20 bp, Artificial Sequence
  Description of Artificial Sequence: Synthetic oligonucleotide
  Target: LAMA2; (+) strand; PAM type: NRG; PAM sequence: TGG
agaagtaacattctgctaaa

SEQ ID NO: 139820 - DNA, 20 bp, Artificial Sequence
  Description of Artificial Sequence: Synthetic oligonucleotide
  Target: LAMA2; (+) strand; PAM type: NRG; PAM sequence: GAG
aagtaacattctgctaaatg

SEQ ID NO: 139821 - DNA, 20 bp, Artificial Sequence
  Description of Artificial Sequence: Synthetic oligonucleotide
  Target: LAMA2; (+) strand; PAM type: NRG; PAM sequence: TAG
tgctaaatggagaatgatta

SEQ ID NO: 139822 - DNA, 20 bp, Artificial Sequence
  Description of Artificial Sequence: Synthetic oligonucleotide
  Target: LAMA2; (+) strand; PAM type: NRG; PAM sequence: GAG
aaatggagaatgattatagt

SEQ ID NO: 139823 - DNA, 20 bp, Artificial Sequence
  Description of Artificial Sequence: Synthetic oligonucleotide
  Target: LAMA2; (+) strand; PAM type: NRG; PAM sequence: AAG
gagaatgattatagtgagat

SEQ ID NO: 139824 - DNA, 20 bp, Artificial Sequence
  Description of Artificial Sequence: Synthetic oligonucleotide
  Target: LAMA2; (+) strand; PAM type: NRG; PAM sequence: TAG
agtgagataagtgtgaaaac

SEQ ID NO: 139825 - DNA, 20 bp, Artificial Sequence
  Description of Artificial Sequence: Synthetic oligonucleotide
  Target: LAMA2; (+) strand; PAM type: NRG; PAM sequence: AGG
gtgagataagtgtgaaaact

SEQ ID NO: 139826 - DNA, 20 bp, Artificial Sequence
  Description of Artificial Sequence: Synthetic oligonucleotide
  Target: LAMA2; (+) strand; PAM type: NRG; PAM sequence: TGG
agataagtgtgaaaactagg

SEQ ID NO: 139827 - DNA, 20 bp, Artificial Sequence
  Description of Artificial Sequence: Synthetic oligonucleotide
  Target: LAMA2; (+) strand; PAM type: NRG; PAM sequence: CAG
taagtgtgaaaactaggtgg

SEQ ID NO: 139828 - DNA, 20 bp, Artificial Sequence
  Description of Artificial Sequence: Synthetic oligonucleotide
  Target: LAMA2; (+) strand; PAM type: NRG; PAM sequence: CAG
tgtgaaaactaggtggcagt

SEQ ID NO: 139829 - DNA, 20 bp, Artificial Sequence
  Description of Artificial Sequence: Synthetic oligonucleotide
  Target: LAMA2; (+) strand; PAM type: NRG; PAM sequence: AGG
gtgaaaactaggtggcagtc

SEQ ID NO: 139830 - DNA, 20 bp, Artificial Sequence
  Description of Artificial Sequence: Synthetic oligonucleotide
  Target: LAMA2; (+) strand; PAM type: NRG; PAM sequence: TAG
aggtggcagtcaggaaacca

SEQ ID NO: 139831 - DNA, 20 bp, Artificial Sequence
  Description of Artificial Sequence: Synthetic oligonucleotide
  Target: LAMA2; (+) strand; PAM type: NRG; PAM sequence: TAG
aggaaaccatagtacttttt

SEQ ID NO: 139832 - DNA, 20 bp, Artificial Sequence
  Description of Artificial Sequence: Synthetic oligonucleotide
  Target: LAMA2; (+) strand; PAM type: NRG; PAM sequence: AAG
accatagtacttttttagca

SEQ ID NO: 139833 - DNA, 20 bp, Artificial Sequence
  Description of Artificial Sequence: Synthetic oligonucleotide
  Target: LAMA2; (+) strand; PAM type: NRG; PAM sequence: GAG
catagtacttttttagcaaa

SEQ ID NO: 139834 - DNA, 20 bp, Artificial Sequence
  Description of Artificial Sequence: Synthetic oligonucleotide
  Target: LAMA2; (+) strand; PAM type: NRG; PAM sequence: TGG
cttttttagcaaagagatga

SEQ ID NO: 139835 - DNA, 20 bp, Artificial Sequence
  Description of Artificial Sequence: Synthetic oligonucleotide
  Target: LAMA2; (+) strand; PAM type: NRG; PAM sequence: TGG
gcaaagagatgatggtaact

SEQ ID NO: 139836 - DNA, 20 bp, Artificial Sequence
  Description of Artificial Sequence: Synthetic oligonucleotide
  Target: LAMA2; (+) strand; PAM type: NRG; PAM sequence: TAG
gagatgatggtaacttggaa

SEQ ID NO: 139837 - DNA, 20 bp, Artificial Sequence
  Description of Artificial Sequence: Synthetic oligonucleotide
  Target: LAMA2; (+) strand; PAM type: NRG; PAM sequence: GAG
gatgatggtaacttggaata

SEQ ID NO: 139838 - DNA, 20 bp, Artificial Sequence
  Description of Artificial Sequence: Synthetic oligonucleotide
  Target: LAMA2; (+) strand; PAM type: NRG; PAM sequence: TGG
gatggtaacttggaatagag

SEQ ID NO: 139839 - DNA, 20 bp, Artificial Sequence
  Description of Artificial Sequence: Synthetic oligonucleotide
  Target: LAMA2; (+) strand; PAM type: NRG; PAM sequence: TAG
ggtaacttggaatagagtgg

SEQ ID NO: 139840 - DNA, 20 bp, Artificial Sequence
  Description of Artificial Sequence: Synthetic oligonucleotide
  Target: LAMA2; (+) strand; PAM type: NRG; PAM sequence: TAG
aacttggaatagagtggtag

SEQ ID NO: 139841 - DNA, 20 bp, Artificial Sequence
  Description of Artificial Sequence: Synthetic oligonucleotide
  Target: LAMA2; (+) strand; PAM type: NRG; PAM sequence: CAG
ttggaatagagtggtagtag

SEQ ID NO: 139842 - DNA, 20 bp, Artificial Sequence
  Description of Artificial Sequence: Synthetic oligonucleotide
  Target: LAMA2; (+) strand; PAM type: NRG; PAM sequence: GAG
ggaatagagtggtagtagca

SEQ ID NO: 139843 - DNA, 20 bp, Artificial Sequence
  Description of Artificial Sequence: Synthetic oligonucleotide
  Target: LAMA2; (+) strand; PAM type: NRG; PAM sequence: GAG
aatagagtggtagtagcaga

SEQ ID NO: 139844 - DNA, 20 bp, Artificial Sequence
  Description of Artificial Sequence: Synthetic oligonucleotide
  Target: LAMA2; (+) strand; PAM type: NRG; PAM sequence: AAG
agagtggtagtagcagagag

SEQ ID NO: 139845 - DNA, 20 bp, Artificial Sequence
  Description of Artificial Sequence: Synthetic oligonucleotide
  Target: LAMA2; (+) strand; PAM type: NRG; PAM sequence: TGG
gtggtagtagcagagagaag

SEQ ID NO: 139846 - DNA, 20 bp, Artificial Sequence
  Description of Artificial Sequence: Synthetic oligonucleotide
  Target: LAMA2; (+) strand; PAM type: NRG; PAM sequence: CAG
gtagtagcagagagaagtgg

SEQ ID NO: 139847 - DNA, 20 bp, Artificial Sequence
  Description of Artificial Sequence: Synthetic oligonucleotide
  Target: LAMA2; (+) strand; PAM type: NRG; PAM sequence: AGG
tagtagcagagagaagtggc

SEQ ID NO: 139848 - DNA, 20 bp, Artificial Sequence
  Description of Artificial Sequence: Synthetic oligonucleotide
  Target: LAMA2; (+) strand; PAM type: NRG; PAM sequence: GAG
gcagagagaagtggcaggct

SEQ ID NO: 139849 - DNA, 20 bp, Artificial Sequence
  Description of Artificial Sequence: Synthetic oligonucleotide
  Target: LAMA2; (+) strand; PAM type: NRG; PAM sequence: TGG
gtggcaggctgagatttatc

SEQ ID NO: 139850 - DNA, 20 bp, Artificial Sequence
  Description of Artificial Sequence: Synthetic oligonucleotide
  Target: LAMA2; (+) strand; PAM type: NRG; PAM sequence: GAG
ggcaggctgagatttatctg

SEQ ID NO: 139851 - DNA, 20 bp, Artificial Sequence
  Description of Artificial Sequence: Synthetic oligonucleotide
  Target: LAMA2; (+) strand; PAM type: NRG; PAM sequence: CGG
gctgagatttatctggagtt

SEQ ID NO: 139852 - DNA, 20 bp, Artificial Sequence
  Description of Artificial Sequence: Synthetic oligonucleotide
  Target: LAMA2; (+) strand; PAM type: NRG; PAM sequence: TGG
ttcggcatcacccgaattga

SEQ ID NO: 139853 - DNA, 20 bp, Artificial Sequence
  Description of Artificial Sequence: Synthetic oligonucleotide
  Target: LAMA2; (+) strand; PAM type: NRG; PAM sequence: TGG
ggcatcacccgaattgatgg

SEQ ID NO: 139854 - DNA, 20 bp, Artificial Sequence
  Description of Artificial Sequence: Synthetic oligonucleotide
  Target: LAMA2; (+) strand; PAM type: NRG; PAM sequence: TGG
aattgatggtggaacaaatg

SEQ ID NO: 139855 - DNA, 20 bp, Artificial Sequence
  Description of Artificial Sequence: Synthetic oligonucleotide
  Target: LAMA2; (+) strand; PAM type: NRG; PAM sequence: GAG
ttgatggtggaacaaatgtg

SEQ ID NO: 139856 - DNA, 20 bp, Artificial Sequence
  Description of Artificial Sequence: Synthetic oligonucleotide
  Target: LAMA2; (+) strand; PAM type: NRG; PAM sequence: GAG
gatggtggaacaaatgtgga

SEQ ID NO: 139857 - DNA, 20 bp, Artificial Sequence
  Description of Artificial Sequence: Synthetic oligonucleotide
  Target: LAMA2; (+) strand; PAM type: NRG; PAM sequence: TGG
ggtggaacaaatgtggagag

SEQ ID NO: 139858 - DNA, 20 bp, Artificial Sequence
  Description of Artificial Sequence: Synthetic oligonucleotide
  Target: LAMA2; (+) strand; PAM type: NRG; PAM sequence: GGG
gtggaacaaatgtggagagt

SEQ ID NO: 139859 - DNA, 20 bp, Artificial Sequence
  Description of Artificial Sequence: Synthetic oligonucleotide
  Target: LAMA2; (+) strand; PAM type: NRG; PAM sequence: GGG
tggaacaaatgtggagagtg

SEQ ID NO: 139860 - DNA, 20 bp, Artificial Sequence
  Description of Artificial Sequence: Synthetic oligonucleotide
  Target: LAMA2; (+) strand; PAM type: NRG; PAM sequence: TAG
ggggccaaaatgttgactcc

SEQ ID NO: 139861 - DNA, 20 bp, Artificial Sequence
  Description of Artificial Sequence: Synthetic oligonucleotide
  Target: LAMA2; (+) strand; PAM type: NRG; PAM sequence: AGG
gggccaaaatgttgactcct

SEQ ID NO: 139862 - DNA, 20 bp, Artificial Sequence
  Description of Artificial Sequence: Synthetic oligonucleotide
  Target: LAMA2; (+) strand; PAM type: NRG; PAM sequence: GAG
gccaaaatgttgactcctag

SEQ ID NO: 139863 - DNA, 20 bp, Artificial Sequence
  Description of Artificial Sequence: Synthetic oligonucleotide
  Target: LAMA2; (+) strand; PAM type: NRG; PAM sequence: TGG
aatgttgactcctaggagtt

SEQ ID NO: 139864 - DNA, 20 bp, Artificial Sequence
  Description of Artificial Sequence: Synthetic oligonucleotide
  Target: LAMA2; (+) strand; PAM type: NRG; PAM sequence: AAG
actcctaggagtttggcctg

SEQ ID NO: 139865 - DNA, 20 bp, Artificial Sequence
  Description of Artificial Sequence: Synthetic oligonucleotide
  Target: LAMA2; (+) strand; PAM type: NRG; PAM sequence: TAG
ctgaagaaattttcctgaaa

SEQ ID NO: 139866 - DNA, 20 bp, Artificial Sequence
  Description of Artificial Sequence: Synthetic oligonucleotide
  Target: LAMA2; (+) strand; PAM type: NRG; PAM sequence: TGG
gaaattttcctgaaatagta

SEQ ID NO: 139867 - DNA, 20 bp, Artificial Sequence
  Description of Artificial Sequence: Synthetic oligonucleotide
  Target: LAMA2; (+) strand; PAM type: NRG; PAM sequence: AAG
tcctgaaatagtatggatta

SEQ ID NO: 139868 - DNA, 20 bp, Artificial Sequence
  Description of Artificial Sequence: Synthetic oligonucleotide
  Target: LAMA2; (+) strand; PAM type: NRG; PAM sequence: AGG
cctgaaatagtatggattaa

SEQ ID NO: 139869 - DNA, 20 bp, Artificial Sequence
  Description of Artificial Sequence: Synthetic oligonucleotide
  Target: LAMA2; (+) strand; PAM type: NRG; PAM sequence: GAG
tgaaatagtatggattaaag

SEQ ID NO: 139870 - DNA, 20 bp, Artificial Sequence
  Description of Artificial Sequence: Synthetic oligonucleotide
  Target: LAMA2; (+) strand; PAM type: NRG; PAM sequence: AGG
gaaatagtatggattaaagg

SEQ ID NO: 139871 - DNA, 20 bp, Artificial Sequence
  Description of Artificial Sequence: Synthetic oligonucleotide
  Target: LAMA2; (+) strand; PAM type: NRG; PAM sequence: GAG
aatagtatggattaaaggag

SEQ ID NO: 139872 - DNA, 20 bp, Artificial Sequence
  Description of Artificial Sequence: Synthetic oligonucleotide
  Target: LAMA2; (+) strand; PAM type: NRG; PAM sequence: CAG
agtatggattaaaggaggag

SEQ ID NO: 139873 - DNA, 20 bp, Artificial Sequence
  Description of Artificial Sequence: Synthetic oligonucleotide
  Target: LAMA2; (+) strand; PAM type: NRG; PAM sequence: TGG
ggattaaaggaggagcagaa

SEQ ID NO: 139874 - DNA, 20 bp, Artificial Sequence
  Description of Artificial Sequence: Synthetic oligonucleotide
  Target: LAMA2; (+) strand; PAM type: NRG; PAM sequence: GAG
attaaaggaggagcagaatg

SEQ ID NO: 139875 - DNA, 20 bp, Artificial Sequence
  Description of Artificial Sequence: Synthetic oligonucleotide
  Target: LAMA2; (+) strand; PAM type: NRG; PAM sequence: TGG
gaggagcagaatggagatac

SEQ ID NO: 139876 - DNA, 20 bp, Artificial Sequence
  Description of Artificial Sequence: Synthetic oligonucleotide
  Target: LAMA2; (+) strand; PAM type: NRG; PAM sequence: GGG
aggagcagaatggagatact

SEQ ID NO: 139877 - DNA, 20 bp, Artificial Sequence
  Description of Artificial Sequence: Synthetic oligonucleotide
  Target: LAMA2; (+) strand; PAM type: NRG; PAM sequence: TGG
agcagaatggagatactggg

SEQ ID NO: 139878 - DNA, 20 bp, Artificial Sequence
  Description of Artificial Sequence: Synthetic oligonucleotide
  Target: LAMA2; (+) strand; PAM type: NRG; PAM sequence: AAG
ggagatactgggtggcaatt

SEQ ID NO: 139879 - DNA, 20 bp, Artificial Sequence
  Description of Artificial Sequence: Synthetic oligonucleotide
  Target: LAMA2; (+) strand; PAM type: NRG; PAM sequence: AGG
gagatactgggtggcaatta

SEQ ID NO: 139880 - DNA, 20 bp, Artificial Sequence
  Description of Artificial Sequence: Synthetic oligonucleotide
  Target: LAMA2; (+) strand; PAM type: NRG; PAM sequence: GGG
agatactgggtggcaattaa

SEQ ID NO: 139881 - DNA, 20 bp, Artificial Sequence
  Description of Artificial Sequence: Synthetic oligonucleotide
  Target: LAMA2; (+) strand; PAM type: NRG; PAM sequence: AAG
gttttaacgtgttatctttg

SEQ ID NO: 139882 - DNA, 20 bp, Artificial Sequence
  Description of Artificial Sequence: Synthetic oligonucleotide
  Target: LAMA2; (+) strand; PAM type: NRG; PAM sequence: GAG
gtgttatctttgaagcattc

SEQ ID NO: 139883 - DNA, 20 bp, Artificial Sequence
  Description of Artificial Sequence: Synthetic oligonucleotide
  Target: LAMA2; (+) strand; PAM type: NRG; PAM sequence: TGG
ttatctttgaagcattcgag

SEQ ID NO: 139884 - DNA, 20 bp, Artificial Sequence
  Description of Artificial Sequence: Synthetic oligonucleotide
  Target: LAMA2; (+) strand; PAM type: NRG; PAM sequence: CAG
ttgaagcattcgagtggtgc

SEQ ID NO: 139885 - DNA, 20 bp, Artificial Sequence
  Description of Artificial Sequence: Synthetic oligonucleotide
  Target: LAMA2; (+) strand; PAM type: NRG; PAM sequence: AGG
tgaagcattcgagtggtgcc

SEQ ID NO: 139886 - DNA, 20 bp, Artificial Sequence
  Description of Artificial Sequence: Synthetic oligonucleotide
  Target: LAMA2; (+) strand; PAM type: NRG; PAM sequence: TGG
cattcgagtggtgccaggca

SEQ ID NO: 139887 - DNA, 20 bp, Artificial Sequence
  Description of Artificial Sequence: Synthetic oligonucleotide
  Target: LAMA2; (+) strand; PAM type: NRG; PAM sequence: TGG
tcgagtggtgccaggcatgg

SEQ ID NO: 139888 - DNA, 20 bp, Artificial Sequence
  Description of Artificial Sequence: Synthetic oligonucleotide
  Target: LAMA2; (+) strand; PAM type: NRG; PAM sequence: AAG
gcatggtggctcactcctgt

SEQ ID NO: 139889 - DNA, 20 bp, Artificial Sequence
  Description of Artificial Sequence: Synthetic oligonucleotide
  Target: LAMA2; (+) strand; PAM type: NRG; PAM sequence: CAG
gtggctcactcctgtaagcc

SEQ ID NO: 139890 - DNA, 20 bp, Artificial Sequence
  Description of Artificial Sequence: Synthetic oligonucleotide
  Target: LAMA2; (+) strand; PAM type: NRG; PAM sequence: TGG
ctcctgtaagcccagcactt

SEQ ID NO: 139891 - DNA, 20 bp, Artificial Sequence
  Description of Artificial Sequence: Synthetic oligonucleotide
  Target: LAMA2; (+) strand; PAM type: NRG; PAM sequence: GGG
tcctgtaagcccagcacttt

SEQ ID NO: 139892 - DNA, 20 bp, Artificial Sequence
  Description of Artificial Sequence: Synthetic oligonucleotide
  Target: LAMA2; (+) strand; PAM type: NRG; PAM sequence: GAG
ctgtaagcccagcactttgg

SEQ ID NO: 139893 - DNA, 20 bp, Artificial Sequence
  Description of Artificial Sequence: Synthetic oligonucleotide
  Target: LAMA2; (+) strand; PAM type: NRG; PAM sequence: AGG
tgtaagcccagcactttggg

SEQ ID NO: 139894 - DNA, 20 bp, Artificial Sequence
  Description of Artificial Sequence: Synthetic oligonucleotide
  Target: LAMA2; (+) strand; PAM type: NRG; PAM sequence: GAG
gcccagcactttgggaggtt

SEQ ID NO: 139895 - DNA, 20 bp, Artificial Sequence
  Description of Artificial Sequence: Synthetic oligonucleotide
  Target: LAMA2; (+) strand; PAM type: NRG; PAM sequence: AGG
cccagcactttgggaggttg

SEQ ID NO: 139896 - DNA, 20 bp, Artificial Sequence
  Description of Artificial Sequence: Synthetic oligonucleotide
  Target: LAMA2; (+) strand; PAM type: NRG; PAM sequence: TGG
agcactttgggaggttgagg

SEQ ID NO: 139897 - DNA, 20 bp, Artificial Sequence
  Description of Artificial Sequence: Synthetic oligonucleotide
  Target: LAMA2; (+) strand; PAM type: NRG; PAM sequence: GGG
gcactttgggaggttgaggt

SEQ ID NO: 139898 - DNA, 20 bp, Artificial Sequence
  Description of Artificial Sequence: Synthetic oligonucleotide
  Target: LAMA2; (+) strand; PAM type: NRG; PAM sequence: GAG
actttgggaggttgaggtgg

SEQ ID NO: 139899 - DNA, 20 bp, Artificial Sequence
  Description of Artificial Sequence: Synthetic oligonucleotide
  Target: LAMA2; (+) strand; PAM type: NRG; PAM sequence: AGG
ctttgggaggttgaggtggg

SEQ ID NO: 139900 - DNA, 20 bp, Artificial Sequence
  Description of Artificial Sequence: Synthetic oligonucleotide
  Target: LAMA2; (+) strand; PAM type: NRG; PAM sequence: AAG
ttgaggtgggaggattgctt

SEQ ID NO: 139901 - DNA, 20 bp, Artificial Sequence
  Description of Artificial Sequence: Synthetic oligonucleotide
  Target: LAMA2; (+) strand; PAM type: NRG; PAM sequence: CAG
gtgggaggattgcttaagcc

SEQ ID NO: 139902 - DNA, 20 bp, Artificial Sequence
  Description of Artificial Sequence: Synthetic oligonucleotide
  Target: LAMA2; (+) strand; PAM type: NRG; PAM sequence: AGG
tgggaggattgcttaagccc

SEQ ID NO: 139903 - DNA, 20 bp, Artificial Sequence
  Description of Artificial Sequence: Synthetic oligonucleotide
  Target: LAMA2; (+) strand; PAM type: NRG; PAM sequence: GAG
ttgcttaagcccaggtattc

SEQ ID NO: 139904 - DNA, 20 bp, Artificial Sequence
  Description of Artificial Sequence: Synthetic oligonucleotide
  Target: LAMA2; (+) strand; PAM type: NRG; PAM sequence: CAG
taagcccaggtattcgagac

SEQ ID NO: 139905 - DNA, 20 bp, Artificial Sequence
  Description of Artificial Sequence: Synthetic oligonucleotide
  Target: LAMA2; (+) strand; PAM type: NRG; PAM sequence: CAG
aggtattcgagaccagcaac

SEQ ID NO: 139906 - DNA, 20 bp, Artificial Sequence
  Description of Artificial Sequence: Synthetic oligonucleotide
  Target: LAMA2; (+) strand; PAM type: NRG; PAM sequence: CGG
ttcgagaccagcaaccagcc

SEQ ID NO: 139907 - DNA, 20 bp, Artificial Sequence
  Description of Artificial Sequence: Synthetic oligonucleotide
  Target: LAMA2; (+) strand; PAM type: NRG; PAM sequence: GGG
tcgagaccagcaaccagccc

SEQ ID NO: 139908 - DNA, 20 bp, Artificial Sequence
  Description of Artificial Sequence: Synthetic oligonucleotide
  Target: LAMA2; (+) strand; PAM type: NRG; PAM sequence: AAG
agcaaccagcccgggcaaca

SEQ ID NO: 139909 - DNA, 20 bp, Artificial Sequence
  Description of Artificial Sequence: Synthetic oligonucleotide
  Target: LAMA2; (+) strand; PAM type: NRG; PAM sequence: GAG
accagcccgggcaacaaagt

SEQ ID NO: 139910 - DNA, 20 bp, Artificial Sequence
  Description of Artificial Sequence: Synthetic oligonucleotide
  Target: LAMA2; (+) strand; PAM type: NRG; PAM sequence: AAG
acccctatctctacaaaaaa

SEQ ID NO: 139911 - DNA, 20 bp, Artificial Sequence
  Description of Artificial Sequence: Synthetic oligonucleotide
  Target: LAMA2; (+) strand; PAM type: NRG; PAM sequence: TAG
tacaaaaaaaagcaaaaaat

SEQ ID NO: 139912 - DNA, 20 bp, Artificial Sequence
  Description of Artificial Sequence: Synthetic oligonucleotide
  Target: LAMA2; (+) strand; PAM type: NRG; PAM sequence: CAG
aaaaaaagcaaaaaattagc

SEQ ID NO: 139913 - DNA, 20 bp, Artificial Sequence
  Description of Artificial Sequence: Synthetic oligonucleotide
  Target: LAMA2; (+) strand; PAM type: NRG; PAM sequence: AGG
aaaaaagcaaaaaattagcc

SEQ ID NO: 139914 - DNA, 20 bp, Artificial Sequence
  Description of Artificial Sequence: Synthetic oligonucleotide
  Target: LAMA2; (+) strand; PAM type: NRG; PAM sequence: TAG
agcaaaaaattagccaggca

SEQ ID NO: 139915 - DNA, 20 bp, Artificial Sequence
  Description of Artificial Sequence: Synthetic oligonucleotide
  Target: LAMA2; (+) strand; PAM type: NRG; PAM sequence: TAG
aaaaaattagccaggcatag

SEQ ID NO: 139916 - DNA, 20 bp, Artificial Sequence
  Description of Artificial Sequence: Synthetic oligonucleotide
  Target: LAMA2; (+) strand; PAM type: NRG; PAM sequence: CAG
ttagccaggcatagtagtcc

SEQ ID NO: 139917 - DNA, 20 bp, Artificial Sequence
  Description of Artificial Sequence: Synthetic oligonucleotide
  Target: LAMA2; (+) strand; PAM type: NRG; PAM sequence: CAG
gcatagtagtcccagctact

SEQ ID NO: 139918 - DNA, 20 bp, Artificial Sequence
  Description of Artificial Sequence: Synthetic oligonucleotide
  Target: LAMA2; (+) strand; PAM type: NRG; PAM sequence: AGG
catagtagtcccagctactc

SEQ ID NO: 139919 - DNA, 20 bp, Artificial Sequence
  Description of Artificial Sequence: Synthetic oligonucleotide
  Target: LAMA2; (+) strand; PAM type: NRG; PAM sequence: GAG
tagtagtcccagctactcag

SEQ ID NO: 139920 - DNA, 20 bp, Artificial Sequence
  Description of Artificial Sequence: Synthetic oligonucleotide
  Target: LAMA2; (+) strand; PAM type: NRG; PAM sequence: AGG
agtagtcccagctactcagg

SEQ ID NO: 139921 - DNA, 20 bp, Artificial Sequence
  Description of Artificial Sequence: Synthetic oligonucleotide
  Target: LAMA2; (+) strand; PAM type: NRG; PAM sequence: GAG
tcccagctactcaggaggtt

SEQ ID NO: 139922 - DNA, 20 bp, Artificial Sequence
  Description of Artificial Sequence: Synthetic oligonucleotide
  Target: LAMA2; (+) strand; PAM type: NRG; PAM sequence: AGG
cccagctactcaggaggttg

SEQ ID NO: 139923 - DNA, 20 bp, Artificial Sequence
  Description of Artificial Sequence: Synthetic oligonucleotide
  Target: LAMA2; (+) strand; PAM type: NRG; PAM sequence: CAG
agctactcaggaggttgagg

SEQ ID NO: 139924 - DNA, 20 bp, Artificial Sequence
  Description of Artificial Sequence: Synthetic oligonucleotide
  Target: LAMA2; (+) strand; PAM type: NRG; PAM sequence: AGG
gctactcaggaggttgaggc

SEQ ID NO: 139925 - DNA, 20 bp, Artificial Sequence
  Description of Artificial Sequence: Synthetic oligonucleotide
  Target: LAMA2; (+) strand; PAM type: NRG; PAM sequence: GAG
tactcaggaggttgaggcag

SEQ ID NO: 139926 - DNA, 20 bp, Artificial Sequence
  Description of Artificial Sequence: Synthetic oligonucleotide
  Target: LAMA2; (+) strand; PAM type: NRG; PAM sequence: TGG
gttgaggcaggagaatcact

SEQ ID NO: 139927 - DNA, 20 bp, Artificial Sequence
  Description of Artificial Sequence: Synthetic oligonucleotide
  Target: LAMA2; (+) strand; PAM type: NRG; PAM sequence: GGG
ttgaggcaggagaatcactt

SEQ ID NO: 139928 - DNA, 20 bp, Artificial Sequence
  Description of Artificial Sequence: Synthetic oligonucleotide
  Target: LAMA2; (+) strand; PAM type: NRG; PAM sequence: CAG
gcaggagaatcacttgggtc

SEQ ID NO: 139929 - DNA, 20 bp, Artificial Sequence
  Description of Artificial Sequence: Synthetic oligonucleotide
  Target: LAMA2; (+) strand; PAM type: NRG; PAM sequence: AGG
caggagaatcacttgggtcc

SEQ ID NO: 139930 - DNA, 20 bp, Artificial Sequence
  Description of Artificial Sequence: Synthetic oligonucleotide
  Target: LAMA2; (+) strand; PAM type: NRG; PAM sequence: GAG
ggagaatcacttgggtccag

SEQ ID NO: 139931 - DNA, 20 bp, Artificial Sequence
  Description of Artificial Sequence: Synthetic oligonucleotide
  Target: LAMA2; (+) strand; PAM type: NRG; PAM sequence: AGG
gagaatcacttgggtccagg

SEQ ID NO: 139932 - DNA, 20 bp, Artificial Sequence
  Description of Artificial Sequence: Synthetic oligonucleotide
  Target: LAMA2; (+) strand; PAM type: NRG; PAM sequence: AAG
tcacttgggtccaggaggtc

SEQ ID NO: 139933 - DNA, 20 bp, Artificial Sequence
  Description of Artificial Sequence: Synthetic oligonucleotide
  Target: LAMA2; (+) strand; PAM type: NRG; PAM sequence: AGG
cacttgggtccaggaggtca

SEQ ID NO: 139934 - DNA, 20 bp, Artificial Sequence
  Description of Artificial Sequence: Synthetic oligonucleotide
  Target: LAMA2; (+) strand; PAM type: NRG; PAM sequence: CAG
ggtccaggaggtcaaggctg

SEQ ID NO: 139935 - DNA, 20 bp, Artificial Sequence
  Description of Artificial Sequence: Synthetic oligonucleotide
  Target: LAMA2; (+) strand; PAM type: NRG; PAM sequence: GAG
caggaggtcaaggctgcagt

SEQ ID NO: 139936 - DNA, 20 bp, Artificial Sequence
  Description of Artificial Sequence: Synthetic oligonucleotide
  Target: LAMA2; (+) strand; PAM type: NRG; PAM sequence: CAG
atattcatgtctctgcactc

SEQ ID NO: 139937 - DNA, 20 bp, Artificial Sequence
  Description of Artificial Sequence: Synthetic oligonucleotide
  Target: LAMA2; (+) strand; PAM type: NRG; PAM sequence: TGG
catgtctctgcactccagcc

SEQ ID NO: 139938 - DNA, 20 bp, Artificial Sequence
  Description of Artificial Sequence: Synthetic oligonucleotide
  Target: LAMA2; (+) strand; PAM type: NRG; PAM sequence: GGG
atgtctctgcactccagcct

SEQ ID NO: 139939 - DNA, 20 bp, Artificial Sequence
  Description of Artificial Sequence: Synthetic oligonucleotide
  Target: LAMA2; (+) strand; PAM type: NRG; PAM sequence: GAG
gtctctgcactccagcctgg

SEQ ID NO: 139940 - DNA, 20 bp, Artificial Sequence
  Description of Artificial Sequence: Synthetic oligonucleotide
  Target: LAMA2; (+) strand; PAM type: NRG; PAM sequence: CAG
ctgcactccagcctgggaga

SEQ ID NO: 139941 - DNA, 20 bp, Artificial Sequence
  Description of Artificial Sequence: Synthetic oligonucleotide
  Target: LAMA2; (+) strand; PAM type: NRG; PAM sequence: GAG
gcactccagcctgggagaca

SEQ ID NO: 139942 - DNA, 20 bp, Artificial Sequence
  Description of Artificial Sequence: Synthetic oligonucleotide
  Target: LAMA2; (+) strand; PAM type: NRG; PAM sequence: AAG
tccagcctgggagacagagc

SEQ ID NO: 139943 - DNA, 20 bp, Artificial Sequence
  Description of Artificial Sequence: Synthetic oligonucleotide
  Target: LAMA2; (+) strand; PAM type: NRG; PAM sequence: AAG
acaaaacaaaaaaattattc

SEQ ID NO: 139944 - DNA, 20 bp, Artificial Sequence
  Description of Artificial Sequence: Synthetic oligonucleotide
  Target: LAMA2; (+) strand; PAM type: NRG; PAM sequence: TGG
aaacaaaaaaattattcaag

SEQ ID NO: 139945 - DNA, 20 bp, Artificial Sequence
  Description of Artificial Sequence: Synthetic oligonucleotide
  Target: LAMA2; (+) strand; PAM type: NRG; PAM sequence: AAG
ttattcaagtggaaatatta

SEQ ID NO: 139946 - DNA, 20 bp, Artificial Sequence
  Description of Artificial Sequence: Synthetic oligonucleotide
  Target: LAMA2; (+) strand; PAM type: NRG; PAM sequence: AGG
tattcaagtggaaatattaa

SEQ ID NO: 139947 - DNA, 20 bp, Artificial Sequence
  Description of Artificial Sequence: Synthetic oligonucleotide
  Target: LAMA2; (+) strand; PAM type: NRG; PAM sequence: GGG
attcaagtggaaatattaaa

SEQ ID NO: 139948 - DNA, 20 bp, Artificial Sequence
  Description of Artificial Sequence: Synthetic oligonucleotide
  Target: LAMA2; (+) strand; PAM type: NRG; PAM sequence: TGG
ggaaatattaaagggacaat

SEQ ID NO: 139949 - DNA, 20 bp, Artificial Sequence
  Description of Artificial Sequence: Synthetic oligonucleotide
  Target: LAMA2; (+) strand; PAM type: NRG; PAM sequence: GAG
aaagggacaattggatttat

SEQ ID NO: 139950 - DNA, 20 bp, Artificial Sequence
  Description of Artificial Sequence: Synthetic oligonucleotide
  Target: LAMA2; (+) strand; PAM type: NRG; PAM sequence: TGG
gacaattggatttatgagtc

SEQ ID NO: 139951 - DNA, 20 bp, Artificial Sequence
  Description of Artificial Sequence: Synthetic oligonucleotide
  Target: LAMA2; (+) strand; PAM type: NRG; PAM sequence: GAG
caattggatttatgagtctg

SEQ ID NO: 139952 - DNA, 20 bp, Artificial Sequence
  Description of Artificial Sequence: Synthetic oligonucleotide
  Target: LAMA2; (+) strand; PAM type: NRG; PAM sequence: GAG
ggatttatgagtctggagtt

SEQ ID NO: 139953 - DNA, 20 bp, Artificial Sequence
  Description of Artificial Sequence: Synthetic oligonucleotide
  Target: LAMA2; (+) strand; PAM type: NRG; PAM sequence: TGG
tggagttgagtgatgtgcac

SEQ ID NO: 139954 - DNA, 20 bp, Artificial Sequence
  Description of Artificial Sequence: Synthetic oligonucleotide
  Target: LAMA2; (+) strand; PAM type: NRG; PAM sequence: GGG
ggagttgagtgatgtgcact

SEQ ID NO: 139955 - DNA, 20 bp, Artificial Sequence
  Description of Artificial Sequence: Synthetic oligonucleotide
  Target: LAMA2; (+) strand; PAM type: NRG; PAM sequence: AAG
ttgagtgatgtgcactggga

SEQ ID NO: 139956 - DNA, 20 bp, Artificial Sequence
  Description of Artificial Sequence: Synthetic oligonucleotide
  Target: LAMA2; (+) strand; PAM type: NRG; PAM sequence: GAG
gagtgatgtgcactgggaaa

SEQ ID NO: 139957 - DNA, 20 bp, Artificial Sequence
  Description of Artificial Sequence: Synthetic oligonucleotide
  Target: LAMA2; (+) strand; PAM type: NRG; PAM sequence: CAG
gggaaagagactgtacttaa

SEQ ID NO: 139958 - DNA, 20 bp, Artificial Sequence
  Description of Artificial Sequence: Synthetic oligonucleotide
  Target: LAMA2; (+) strand; PAM type: NRG; PAM sequence: AAG
agagactgtacttaacagta

SEQ ID NO: 139959 - DNA, 20 bp, Artificial Sequence
  Description of Artificial Sequence: Synthetic oligonucleotide
  Target: LAMA2; (+) strand; PAM type: NRG; PAM sequence: AGG
gagactgtacttaacagtaa

SEQ ID NO: 139960 - DNA, 20 bp, Artificial Sequence
  Description of Artificial Sequence: Synthetic oligonucleotide
  Target: LAMA2; (+) strand; PAM type: NRG; PAM sequence: AAG
ttaacagtaaaggcctgttt

SEQ ID NO: 139961 - DNA, 20 bp, Artificial Sequence
  Description of Artificial Sequence: Synthetic oligonucleotide
  Target: LAMA2; (+) strand; PAM type: NRG; PAM sequence: TAG
aaggcctgtttaagatcatt

SEQ ID NO: 139962 - DNA, 20 bp, Artificial Sequence
  Description of Artificial Sequence: Synthetic oligonucleotide
  Target: LAMA2; (+) strand; PAM type: NRG; PAM sequence: AAG
cctgtttaagatcatttaga

SEQ ID NO: 139963 - DNA, 20 bp, Artificial Sequence
  Description of Artificial Sequence: Synthetic oligonucleotide
  Target: LAMA2; (+) strand; PAM type: NRG; PAM sequence: CAG
gtttaagatcatttagaaag

SEQ ID NO: 139964 - DNA, 20 bp, Artificial Sequence
  Description of Artificial Sequence: Synthetic oligonucleotide
  Target: LAMA2; (+) strand; PAM type: NRG; PAM sequence: AGG
tttaagatcatttagaaagc

SEQ ID NO: 139965 - DNA, 20 bp, Artificial Sequence
  Description of Artificial Sequence: Synthetic oligonucleotide
  Target: LAMA2; (+) strand; PAM type: NRG; PAM sequence: TAG
gatcatttagaaagcaggta

SEQ ID NO: 139966 - DNA, 20 bp, Artificial Sequence
  Description of Artificial Sequence: Synthetic oligonucleotide
  Target: LAMA2; (+) strand; PAM type: NRG; PAM sequence: GAG
tcatttagaaagcaggtata

SEQ ID NO: 139967 - DNA, 20 bp, Artificial Sequence
  Description of Artificial Sequence: Synthetic oligonucleotide
  Target: LAMA2; (+) strand; PAM type: NRG; PAM sequence: AAG
aaagcaggtatagagataaa

SEQ ID NO: 139968 - DNA, 20 bp, Artificial Sequence
  Description of Artificial Sequence: Synthetic oligonucleotide
  Target: LAMA2; (+) strand; PAM type: NRG; PAM sequence: GAG
agcaggtatagagataaaaa

SEQ ID NO: 139969 - DNA, 20 bp, Artificial Sequence
  Description of Artificial Sequence: Synthetic oligonucleotide
  Target: LAMA2; (+) strand; PAM type: NRG; PAM sequence: AGG
gcaggtatagagataaaaag

SEQ ID NO: 139970 - DNA, 20 bp, Artificial Sequence
  Description of Artificial Sequence: Synthetic oligonucleotide
  Target: LAMA2; (+) strand; PAM type: NRG; PAM sequence: GGG
caggtatagagataaaaaga

SEQ ID NO: 139971 - DNA, 20 bp, Artificial Sequence
  Description of Artificial Sequence: Synthetic oligonucleotide
  Target: LAMA2; (+) strand; PAM type: NRG; PAM sequence: TAG
gagggcctataattgaatcc

SEQ ID NO: 139972 - DNA, 20 bp, Artificial Sequence
  Description of Artificial Sequence: Synthetic oligonucleotide
  Target: LAMA2; (+) strand; PAM type: NRG; PAM sequence: AGG
agggcctataattgaatcct

SEQ ID NO: 139973 - DNA, 20 bp, Artificial Sequence
  Description of Artificial Sequence: Synthetic oligonucleotide
  Target: LAMA2; (+) strand; PAM type: NRG; PAM sequence: AAG
tcctaggcacttcaaattta

SEQ ID NO: 139974 - DNA, 20 bp, Artificial Sequence
  Description of Artificial Sequence: Synthetic oligonucleotide
  Target: LAMA2; (+) strand; PAM type: NRG; PAM sequence: AGG
cctaggcacttcaaatttaa

SEQ ID NO: 139975 - DNA, 20 bp, Artificial Sequence
  Description of Artificial Sequence: Synthetic oligonucleotide
  Target: LAMA2; (+) strand; PAM type: NRG; PAM sequence: TGG
aggcacttcaaatttaaagg

SEQ ID NO: 139976 - DNA, 20 bp, Artificial Sequence
  Description of Artificial Sequence: Synthetic oligonucleotide
  Target: LAMA2; (+) strand; PAM type: NRG; PAM sequence: AAG
acttcaaatttaaaggtggt

SEQ ID NO: 139977 - DNA, 20 bp, Artificial Sequence
  Description of Artificial Sequence: Synthetic oligonucleotide
  Target: LAMA2; (+) strand; PAM type: NRG; PAM sequence: AAG
gtggtaagatcaaatacatc

SEQ ID NO: 139978 - DNA, 20 bp, Artificial Sequence
  Description of Artificial Sequence: Synthetic oligonucleotide
  Target: LAMA2; (+) strand; PAM type: NRG; PAM sequence: AAG
taagatcaaatacatcaaga

SEQ ID NO: 139979 - DNA, 20 bp, Artificial Sequence
  Description of Artificial Sequence: Synthetic oligonucleotide
  Target: LAMA2; (+) strand; PAM type: NRG; PAM sequence: GAG
agatcaaatacatcaagaaa

SEQ ID NO: 139980 - DNA, 20 bp, Artificial Sequence
  Description of Artificial Sequence: Synthetic oligonucleotide
  Target: LAMA2; (+) strand; PAM type: NRG; PAM sequence: AGG
gatcaaatacatcaagaaag

SEQ ID NO: 139981 - DNA, 20 bp, Artificial Sequence
  Description of Artificial Sequence: Synthetic oligonucleotide
  Target: LAMA2; (+) strand; PAM type: NRG; PAM sequence: GGG
atcaaatacatcaagaaaga

SEQ ID NO: 139982 - DNA, 20 bp, Artificial Sequence
  Description of Artificial Sequence: Synthetic oligonucleotide
  Target: LAMA2; (+) strand; PAM type: NRG; PAM sequence: CAG
atcaagaaagagggaatctt

SEQ ID NO: 139983 - DNA, 20 bp, Artificial Sequence
  Description of Artificial Sequence: Synthetic oligonucleotide
  Target: LAMA2; (+) strand; PAM type: NRG; PAM sequence: TGG
aaagagggaatcttcagcta

SEQ ID NO: 139984 - DNA, 20 bp, Artificial Sequence
  Description of Artificial Sequence: Synthetic oligonucleotide
  Target: LAMA2; (+) strand; PAM type: NRG; PAM sequence: CAG
aatcttcagctatggcaatg

SEQ ID NO: 139985 - DNA, 20 bp, Artificial Sequence
  Description of Artificial Sequence: Synthetic oligonucleotide
  Target: LAMA2; (+) strand; PAM type: NRG; PAM sequence: GAG
tatggcaatgcagatgctgt

SEQ ID NO: 139986 - DNA, 20 bp, Artificial Sequence
  Description of Artificial Sequence: Synthetic oligonucleotide
  Target: LAMA2; (+) strand; PAM type: NRG; PAM sequence: AGG
atggcaatgcagatgctgtg

SEQ ID NO: 139987 - DNA, 20 bp, Artificial Sequence
  Description of Artificial Sequence: Synthetic oligonucleotide
  Target: LAMA2; (+) strand; PAM type: NRG; PAM sequence: CAG
gaggtacaaattaaaccact

SEQ ID NO: 139988 - DNA, 20 bp, Artificial Sequence
  Description of Artificial Sequence: Synthetic oligonucleotide
  Target: LAMA2; (+) strand; PAM type: NRG; PAM sequence: AGG
aggtacaaattaaaccactc

SEQ ID NO: 139989 - DNA, 20 bp, Artificial Sequence
  Description of Artificial Sequence: Synthetic oligonucleotide
  Target: LAMA2; (+) strand; PAM type: NRG; PAM sequence: TGG
aaattaaaccactcaggtct

SEQ ID NO: 139990 - DNA, 20 bp, Artificial Sequence
  Description of Artificial Sequence: Synthetic oligonucleotide
  Target: LAMA2; (+) strand; PAM type: NRG; PAM sequence: TAG
gtcttggaaatacctaaaca

SEQ ID NO: 139991 - DNA, 20 bp, Artificial Sequence
  Description of Artificial Sequence: Synthetic oligonucleotide
  Target: LAMA2; (+) strand; PAM type: NRG; PAM sequence: AGG
tcttggaaatacctaaacat

SEQ ID NO: 139992 - DNA, 20 bp, Artificial Sequence
  Description of Artificial Sequence: Synthetic oligonucleotide
  Target: LAMA2; (+) strand; PAM type: NRG; PAM sequence: GGG
cttggaaatacctaaacata

SEQ ID NO: 139993 - DNA, 20 bp, Artificial Sequence
  Description of Artificial Sequence: Synthetic oligonucleotide
  Target: LAMA2; (+) strand; PAM type: NRG; PAM sequence: GGG
ttggaaatacctaaacatag

SEQ ID NO: 139994 - DNA, 20 bp, Artificial Sequence
  Description of Artificial Sequence: Synthetic oligonucleotide
  Target: LAMA2; (+) strand; PAM type: NRG; PAM sequence: GGG
tggaaatacctaaacatagg

SEQ ID NO: 139995 - DNA, 20 bp, Artificial Sequence
  Description of Artificial Sequence: Synthetic oligonucleotide
  Target: LAMA2; (+) strand; PAM type: NRG; PAM sequence: GAG
aaaaacacctaaattgtaat

SEQ ID NO: 139996 - DNA, 20 bp, Artificial Sequence
  Description of Artificial Sequence: Synthetic oligonucleotide
  Target: LAMA2; (+) strand; PAM type: NRG; PAM sequence: TAG
atatataatatatataaaat

SEQ ID NO: 139997 - DNA, 20 bp, Artificial Sequence
  Description of Artificial Sequence: Synthetic oligonucleotide
  Target: LAMA2; (+) strand; PAM type: NRG; PAM sequence: GAG
atataatatatataaaatta

SEQ ID NO: 139998 - DNA, 20 bp, Artificial Sequence
  Description of Artificial Sequence: Synthetic oligonucleotide
  Target: LAMA2; (+) strand; PAM type: NRG; PAM sequence: AAG
aaaattagagaatctttaat

SEQ ID NO: 139999 - DNA, 20 bp, Artificial Sequence
  Description of Artificial Sequence: Synthetic oligonucleotide
  Target: LAMA2; (+) strand; PAM type: NRG; PAM sequence: GAG
aattagagaatctttaataa

SEQ ID NO: 140000 - DNA, 20 bp, Artificial Sequence
  Description of Artificial Sequence: Synthetic oligonucleotide
  Target: LAMA2; (+) strand; PAM type: NRG; PAM sequence: AGG
attagagaatctttaataag

SEQ ID NO: 140001 - DNA, 20 bp, Artificial Sequence
  Description of Artificial Sequence: Synthetic oligonucleotide
  Target: LAMA2; (+) strand; PAM type: NRG; PAM sequence: TGG
aatctttaataagaggtgaa

SEQ ID NO: 140002 - DNA, 20 bp, Artificial Sequence
  Description of Artificial Sequence: Synthetic oligonucleotide
  Target: LAMA2; (+) strand; PAM type: NRG; PAM sequence: CAG
gaggtgaatggctccaaaca

SEQ ID NO: 140003 - DNA, 20 bp, Artificial Sequence
  Description of Artificial Sequence: Synthetic oligonucleotide
  Target: LAMA2; (+) strand; PAM type: NRG; PAM sequence: TGG
ctccaaacacagatttaatt

SEQ ID NO: 140004 - DNA, 20 bp, Artificial Sequence
  Description of Artificial Sequence: Synthetic oligonucleotide
  Target: LAMA2; (+) strand; PAM type: NRG; PAM sequence: AAG
caaacacagatttaatttgg

SEQ ID NO: 140005 - DNA, 20 bp, Artificial Sequence
  Description of Artificial Sequence: Synthetic oligonucleotide
  Target: LAMA2; (+) strand; PAM type: NRG; PAM sequence: TAG
taatttggaagctcccaccc

SEQ ID NO: 140006 - DNA, 20 bp, Artificial Sequence
  Description of Artificial Sequence: Synthetic oligonucleotide
  Target: LAMA2; (+) strand; PAM type: NRG; PAM sequence: TGG
cccaccctagcaatacctac

SEQ ID NO: 140007 - DNA, 20 bp, Artificial Sequence
  Description of Artificial Sequence: Synthetic oligonucleotide
  Target: LAMA2; (+) strand; PAM type: NRG; PAM sequence: AAG
gactatgtaatttttcaatt

SEQ ID NO: 140008 - DNA, 20 bp, Artificial Sequence
  Description of Artificial Sequence: Synthetic oligonucleotide
  Target: LAMA2; (+) strand; PAM type: NRG; PAM sequence: AGG
actatgtaatttttcaatta

SEQ ID NO: 140009 - DNA, 20 bp, Artificial Sequence
  Description of Artificial Sequence: Synthetic oligonucleotide
  Target: LAMA2; (+) strand; PAM type: NRG; PAM sequence: TAG
taatttttcaattaaggaaa

SEQ ID NO: 140010 - DNA, 20 bp, Artificial Sequence
  Description of Artificial Sequence: Synthetic oligonucleotide
  Target: LAMA2; (+) strand; PAM type: NRG; PAM sequence: TGG
aaatagccaataaaattgtg

SEQ ID NO: 140011 - DNA, 20 bp, Artificial Sequence
  Description of Artificial Sequence: Synthetic oligonucleotide
  Target: LAMA2; (+) strand; PAM type: NRG; PAM sequence: AAG
caataaaattgtgtggaaaa

SEQ ID NO: 140012 - DNA, 20 bp, Artificial Sequence
  Description of Artificial Sequence: Synthetic oligonucleotide
  Target: LAMA2; (+) strand; PAM type: NRG; PAM sequence: TAG
aaaattgtgtggaaaaaaga

SEQ ID NO: 140013 - DNA, 20 bp, Artificial Sequence
  Description of Artificial Sequence: Synthetic oligonucleotide
  Target: LAMA2; (+) strand; PAM type: NRG; PAM sequence: CGG
attgtgtggaaaaaagatag

SEQ ID NO: 140014 - DNA, 20 bp, Artificial Sequence
  Description of Artificial Sequence: Synthetic oligonucleotide
  Target: LAMA2; (+) strand; PAM type: NRG; PAM sequence: TAG
gtgtggaaaaaagatagcgg

SEQ ID NO: 140015 - DNA, 20 bp, Artificial Sequence
  Description of Artificial Sequence: Synthetic oligonucleotide
  Target: LAMA2; (+) strand; PAM type: NRG; PAM sequence: CAG
tggaaaaaagatagcggtag

SEQ ID NO: 140016 - DNA, 20 bp, Artificial Sequence
  Description of Artificial Sequence: Synthetic oligonucleotide
  Target: LAMA2; (+) strand; PAM type: NRG; PAM sequence: AAG
ataacatcttttacttacta

SEQ ID NO: 140017 - DNA, 20 bp, Artificial Sequence
  Description of Artificial Sequence: Synthetic oligonucleotide
  Target: LAMA2; (+) strand; PAM type: NRG; PAM sequence: GAG
aacatcttttacttactaaa

SEQ ID NO: 140018 - DNA, 20 bp, Artificial Sequence
  Description of Artificial Sequence: Synthetic oligonucleotide
  Target: LAMA2; (+) strand; PAM type: NRG; PAM sequence: AAG
agattgtgtctaaatattaa

SEQ ID NO: 140019 - DNA, 20 bp, Artificial Sequence
  Description of Artificial Sequence: Synthetic oligonucleotide
  Target: LAMA2; (+) strand; PAM type: NRG; PAM sequence: TGG
ttttcacaaatattttaatg

SEQ ID NO: 140020 - DNA, 20 bp, Artificial Sequence
  Description of Artificial Sequence: Synthetic oligonucleotide
  Target: LAMA2; (+) strand; PAM type: NRG; PAM sequence: GAG
aatattttaatgtggatttt

SEQ ID NO: 140021 - DNA, 20 bp, Artificial Sequence
  Description of Artificial Sequence: Synthetic oligonucleotide
  Target: LAMA2; (+) strand; PAM type: NRG; PAM sequence: TAG
attttgagtcaaattttctg

SEQ ID NO: 140022 - DNA, 20 bp, Artificial Sequence
  Description of Artificial Sequence: Synthetic oligonucleotide
  Target: LAMA2; (+) strand; PAM type: NRG; PAM sequence: AGG
ttttgagtcaaattttctgt

SEQ ID NO: 140023 - DNA, 20 bp, Artificial Sequence
  Description of Artificial Sequence: Synthetic oligonucleotide
  Target: LAMA2; (+) strand; PAM type: NRG; PAM sequence: AAG
tgagtcaaattttctgtagg

SEQ ID NO: 140024 - DNA, 20 bp, Artificial Sequence
  Description of Artificial Sequence: Synthetic oligonucleotide
  Target: LAMA2; (+) strand; PAM type: NRG; PAM sequence: AGG
gagtcaaattttctgtagga

SEQ ID NO: 140025 - DNA, 20 bp, Artificial Sequence
  Description of Artificial Sequence: Synthetic oligonucleotide
  Target: LAMA2; (+) strand; PAM type: NRG; PAM sequence: TGG
aattttctgtaggaaggtca

SEQ ID NO: 140026 - DNA, 20 bp, Artificial Sequence
  Description of Artificial Sequence: Synthetic oligonucleotide
  Target: LAMA2; (+) strand; PAM type: NRG; PAM sequence: TAG
tttctgtaggaaggtcatgg

SEQ ID NO: 140027 - DNA, 20 bp, Artificial Sequence
  Description of Artificial Sequence: Synthetic oligonucleotide
  Target: LAMA2; (+) strand; PAM type: NRG; PAM sequence: TAG
atggtagattaatgtcaaat

SEQ ID NO: 140028 - DNA, 20 bp, Artificial Sequence
  Description of Artificial Sequence: Synthetic oligonucleotide
  Target: LAMA2; (+) strand; PAM type: NRG; PAM sequence: AAG
gaaacaataaacacaatgaa

SEQ ID NO: 140029 - DNA, 20 bp, Artificial Sequence
  Description of Artificial Sequence: Synthetic oligonucleotide
  Target: LAMA2; (+) strand; PAM type: NRG; PAM sequence: CAG
aacacaatgaaaagaaaaat

SEQ ID NO: 140030 - DNA, 20 bp, Artificial Sequence
  Description of Artificial Sequence: Synthetic oligonucleotide
  Target: LAMA2; (+) strand; PAM type: NRG; PAM sequence: AAG
aaaagaaaaatcagccttgt

SEQ ID NO: 140031 - DNA, 20 bp, Artificial Sequence
  Description of Artificial Sequence: Synthetic oligonucleotide
  Target: LAMA2; (+) strand; PAM type: NRG; PAM sequence: CAG
gaaaaatcagccttgtaaga

SEQ ID NO: 140032 - DNA, 20 bp, Artificial Sequence
  Description of Artificial Sequence: Synthetic oligonucleotide
  Target: LAMA2; (+) strand; PAM type: NRG; PAM sequence: AAG
ccttgtaagacagtacaact

SEQ ID NO: 140033 - DNA, 20 bp, Artificial Sequence
  Description of Artificial Sequence: Synthetic oligonucleotide
  Target: LAMA2; (+) strand; PAM type: NRG; PAM sequence: AGG
cttgtaagacagtacaacta

SEQ ID NO: 140034 - DNA, 20 bp, Artificial Sequence
  Description of Artificial Sequence: Synthetic oligonucleotide
  Target: LAMA2; (+) strand; PAM type: NRG; PAM sequence: GAG
tgtaagacagtacaactaag

SEQ ID NO: 140035 - DNA, 20 bp, Artificial Sequence
  Description of Artificial Sequence: Synthetic oligonucleotide
  Target: LAMA2; (+) strand; PAM type: NRG; PAM sequence: CAG
gacagtacaactaaggagat

SEQ ID NO: 140036 - DNA, 20 bp, Artificial Sequence
  Description of Artificial Sequence: Synthetic oligonucleotide
  Target: LAMA2; (+) strand; PAM type: NRG; PAM sequence: GAG
gatcagtttaaaacactaat

SEQ ID NO: 140037 - DNA, 20 bp, Artificial Sequence
  Description of Artificial Sequence: Synthetic oligonucleotide
  Target: LAMA2; (+) strand; PAM type: NRG; PAM sequence: AGG
atcagtttaaaacactaatg

SEQ ID NO: 140038 - DNA, 20 bp, Artificial Sequence
  Description of Artificial Sequence: Synthetic oligonucleotide
  Target: LAMA2; (+) strand; PAM type: NRG; PAM sequence: GAG
cagtttaaaacactaatgag

SEQ ID NO: 140039 - DNA, 20 bp, Artificial Sequence
  Description of Artificial Sequence: Synthetic oligonucleotide
  Target: LAMA2; (+) strand; PAM type: NRG; PAM sequence: CAG
actaatgaggagttgcctct

SEQ ID NO: 140040 - DNA, 20 bp, Artificial Sequence
  Description of Artificial Sequence: Synthetic oligonucleotide
  Target: LAMA2; (+) strand; PAM type: NRG; PAM sequence: TGG
gaggagttgcctctcagcac

SEQ ID NO: 140041 - DNA, 20 bp, Artificial Sequence
  Description of Artificial Sequence: Synthetic oligonucleotide
  Target: LAMA2; (+) strand; PAM type: NRG; PAM sequence: GGG
aggagttgcctctcagcact

SEQ ID NO: 140042 - DNA, 20 bp, Artificial Sequence
  Description of Artificial Sequence: Synthetic oligonucleotide
  Target: LAMA2; (+) strand; PAM type: NRG; PAM sequence: AAG
tatgattatactaatataat

SEQ ID NO: 140043 - DNA, 20 bp, Artificial Sequence
  Description of Artificial Sequence: Synthetic oligonucleotide
  Target: LAMA2; (+) strand; PAM type: NRG; PAM sequence: TAG
attatactaatataataagt

SEQ ID NO: 140044 - DNA, 20 bp, Artificial Sequence
  Description of Artificial Sequence: Synthetic oligonucleotide
  Target: LAMA2; (+) strand; PAM type: NRG; PAM sequence: AGG
ttatactaatataataagtt

SEQ ID NO: 140045 - DNA, 20 bp, Artificial Sequence
  Description of Artificial Sequence: Synthetic oligonucleotide
  Target: LAMA2; (+) strand; PAM type: NRG; PAM sequence: CAG
ctaatataataagttaggtt

SEQ ID NO: 140046 - DNA, 20 bp, Artificial Sequence
  Description of Artificial Sequence: Synthetic oligonucleotide
  Target: LAMA2; (+) strand; PAM type: NRG; PAM sequence: AGG
taatataataagttaggttc

SEQ ID NO: 140047 - DNA, 20 bp, Artificial Sequence
  Description of Artificial Sequence: Synthetic oligonucleotide
  Target: LAMA2; (+) strand; PAM type: NRG; PAM sequence: TAG
ataataagttaggttcaggt

SEQ ID NO: 140048 - DNA, 20 bp, Artificial Sequence
  Description of Artificial Sequence: Synthetic oligonucleotide
  Target: LAMA2; (+) strand; PAM type: NRG; PAM sequence: AAG
taagttaggttcaggttaga

SEQ ID NO: 140049 - DNA, 20 bp, Artificial Sequence
  Description of Artificial Sequence: Synthetic oligonucleotide
  Target: LAMA2; (+) strand; PAM type: NRG; PAM sequence: AAG
taggttcaggttagaaagca

SEQ ID NO: 140050 - DNA, 20 bp, Artificial Sequence
  Description of Artificial Sequence: Synthetic oligonucleotide
  Target: LAMA2; (+) strand; PAM type: NRG; PAM sequence: AAG
caaagatgaataatcttcaa

SEQ ID NO: 140051 - DNA, 20 bp, Artificial Sequence
  Description of Artificial Sequence: Synthetic oligonucleotide
  Target: LAMA2; (+) strand; PAM type: NRG; PAM sequence: AGG
aaagatgaataatcttcaaa

SEQ ID NO: 140052 - DNA, 20 bp, Artificial Sequence
  Description of Artificial Sequence: Synthetic oligonucleotide
  Target: LAMA2; (+) strand; PAM type: NRG; PAM sequence: CAG
tgaataatcttcaaaaggca

SEQ ID NO: 140053 - DNA, 20 bp, Artificial Sequence
  Description of Artificial Sequence: Synthetic oligonucleotide
  Target: LAMA2; (+) strand; PAM type: NRG; PAM sequence: TAG
tcttcaaaaggcacagtaaa

SEQ ID NO: 140054 - DNA, 20 bp, Artificial Sequence
  Description of Artificial Sequence: Synthetic oligonucleotide
  Target: LAMA2; (+) strand; PAM type: NRG; PAM sequence: TAG
ggcacagtaaatagtcaatt

SEQ ID NO: 140055 - DNA, 20 bp, Artificial Sequence
  Description of Artificial Sequence: Synthetic oligonucleotide
  Target: LAMA2; (+) strand; PAM type: NRG; PAM sequence: AAG
atttactatttccatactaa

SEQ ID NO: 140056 - DNA, 20 bp, Artificial Sequence
  Description of Artificial Sequence: Synthetic oligonucleotide
  Target: LAMA2; (+) strand; PAM type: NRG; PAM sequence: CAG
atttccatactaaaagctta

SEQ ID NO: 140057 - DNA, 20 bp, Artificial Sequence
  Description of Artificial Sequence: Synthetic oligonucleotide
  Target: LAMA2; (+) strand; PAM type: NRG; PAM sequence: TGG
atactaaaagcttacagttg

SEQ ID NO: 140058 - DNA, 20 bp, Artificial Sequence
  Description of Artificial Sequence: Synthetic oligonucleotide
  Target: LAMA2; (+) strand; PAM type: NRG; PAM sequence: GGG
tactaaaagcttacagttgt

SEQ ID NO: 140059 - DNA, 20 bp, Artificial Sequence
  Description of Artificial Sequence: Synthetic oligonucleotide
  Target: LAMA2; (+) strand; PAM type: NRG; PAM sequence: TAG
aaaagcttacagttgtgggc

SEQ ID NO: 140060 - DNA, 20 bp, Artificial Sequence
  Description of Artificial Sequence: Synthetic oligonucleotide
  Target: LAMA2; (+) strand; PAM type: NRG; PAM sequence: AAG
ataaattcatctcaaatgat

SEQ ID NO: 140061 - DNA, 20 bp, Artificial Sequence
  Description of Artificial Sequence: Synthetic oligonucleotide
  Target: LAMA2; (+) strand; PAM type: NRG; PAM sequence: AAG
attttccatccatcattgtg

SEQ ID NO: 140062 - DNA, 20 bp, Artificial Sequence
  Description of Artificial Sequence: Synthetic oligonucleotide
  Target: LAMA2; (+) strand; PAM type: NRG; PAM sequence: TGG
atttatttacttaatgattc

SEQ ID NO: 140063 - DNA, 20 bp, Artificial Sequence
  Description of Artificial Sequence: Synthetic oligonucleotide
  Target: LAMA2; (+) strand; PAM type: NRG; PAM sequence: TGG
acttaatgattctggaaata

SEQ ID NO: 140064 - DNA, 20 bp, Artificial Sequence
  Description of Artificial Sequence: Synthetic oligonucleotide
  Target: LAMA2; (+) strand; PAM type: NRG; PAM sequence: GGG
cttaatgattctggaaatat

SEQ ID NO: 140065 - DNA, 20 bp, Artificial Sequence
  Description of Artificial Sequence: Synthetic oligonucleotide
  Target: LAMA2; (+) strand; PAM type: NRG; PAM sequence: AAG
taaaacgaaatacaaaaatt

SEQ ID NO: 140066 - DNA, 20 bp, Artificial Sequence
  Description of Artificial Sequence: Synthetic oligonucleotide
  Target: LAMA2; (+) strand; PAM type: NRG; PAM sequence: TGG
gaaatacaaaaattaagaaa

SEQ ID NO: 140067 - DNA, 20 bp, Artificial Sequence
  Description of Artificial Sequence: Synthetic oligonucleotide
  Target: LAMA2; (+) strand; PAM type: NRG; PAM sequence: GAG
aatacaaaaattaagaaatg

SEQ ID NO: 140068 - DNA, 20 bp, Artificial Sequence
  Description of Artificial Sequence: Synthetic oligonucleotide
  Target: LAMA2; (+) strand; PAM type: NRG; PAM sequence: TGG
acaaaaattaagaaatggag

SEQ ID NO: 140069 - DNA, 20 bp, Artificial Sequence
  Description of Artificial Sequence: Synthetic oligonucleotide
  Target: LAMA2; (+) strand; PAM type: NRG; PAM sequence: GGG
caaaaattaagaaatggagt

SEQ ID NO: 140070 - DNA, 20 bp, Artificial Sequence
  Description of Artificial Sequence: Synthetic oligonucleotide
  Target: LAMA2; (+) strand; PAM type: NRG; PAM sequence: AAG
aattaagaaatggagtgggc

SEQ ID NO: 140071 - DNA, 20 bp, Artificial Sequence
  Description of Artificial Sequence: Synthetic oligonucleotide
  Target: LAMA2; (+) strand; PAM type: NRG; PAM sequence: AAG
aaatggagtgggcaagtaaa

SEQ ID NO: 140072 - DNA, 20 bp, Artificial Sequence
  Description of Artificial Sequence: Synthetic oligonucleotide
  Target: LAMA2; (+) strand; PAM type: NRG; PAM sequence: TAG
agacattttcccactgattt

SEQ ID NO: 140073 - DNA, 20 bp, Artificial Sequence
  Description of Artificial Sequence: Synthetic oligonucleotide
  Target: LAMA2; (+) strand; PAM type: NRG; PAM sequence: AAG
actgattttagaatatactc

SEQ ID NO: 140074 - DNA, 20 bp, Artificial Sequence
  Description of Artificial Sequence: Synthetic oligonucleotide
  Target: LAMA2; (+) strand; PAM type: NRG; PAM sequence: TAG
tatactcaagaaaattaaac

SEQ ID NO: 140075 - DNA, 20 bp, Artificial Sequence
  Description of Artificial Sequence: Synthetic oligonucleotide
  Target: LAMA2; (+) strand; PAM type: NRG; PAM sequence: TAG
aaattaaactagtgacaaaa

SEQ ID NO: 140076 - DNA, 20 bp, Artificial Sequence
  Description of Artificial Sequence: Synthetic oligonucleotide
  Target: LAMA2; (+) strand; PAM type: NRG; PAM sequence: AAG
aatagatttatttaacttat

SEQ ID NO: 140077 - DNA, 20 bp, Artificial Sequence
  Description of Artificial Sequence: Synthetic oligonucleotide
  Target: LAMA2; (+) strand; PAM type: NRG; PAM sequence: TGG
taagctaattcataaattaa

SEQ ID NO: 140078 - DNA, 20 bp, Artificial Sequence
  Description of Artificial Sequence: Synthetic oligonucleotide
  Target: LAMA2; (+) strand; PAM type: NRG; PAM sequence: CAG
attaatggcaaaatttatca

SEQ ID NO: 140079 - DNA, 20 bp, Artificial Sequence
  Description of Artificial Sequence: Synthetic oligonucleotide
  Target: LAMA2; (+) strand; PAM type: NRG; PAM sequence: GAG
ttatcacagtatacataact

SEQ ID NO: 140080 - DNA, 20 bp, Artificial Sequence
  Description of Artificial Sequence: Synthetic oligonucleotide
  Target: LAMA2; (+) strand; PAM type: NRG; PAM sequence: CAG
tatacataactgagactttg

SEQ ID NO: 140081 - DNA, 20 bp, Artificial Sequence
  Description of Artificial Sequence: Synthetic oligonucleotide
  Target: LAMA2; (+) strand; PAM type: NRG; PAM sequence: TAG
tttgcagatttttttgtaaa

SEQ ID NO: 140082 - DNA, 20 bp, Artificial Sequence
  Description of Artificial Sequence: Synthetic oligonucleotide
  Target: LAMA2; (+) strand; PAM type: NRG; PAM sequence: CAG
taacattctgatacaattaa

SEQ ID NO: 140083 - DNA, 20 bp, Artificial Sequence
  Description of Artificial Sequence: Synthetic oligonucleotide
  Target: LAMA2; (+) strand; PAM type: NRG; PAM sequence: CAG
tacaattaacagatctccat

SEQ ID NO: 140084 - DNA, 20 bp, Artificial Sequence
  Description of Artificial Sequence: Synthetic oligonucleotide
  Target: LAMA2; (+) strand; PAM type: NRG; PAM sequence: TAG
cagatctccatcagctgcat

SEQ ID NO: 140085 - DNA, 20 bp, Artificial Sequence
  Description of Artificial Sequence: Synthetic oligonucleotide
  Target: LAMA2; (+) strand; PAM type: NRG; PAM sequence: AAG
catcagctgcattagatttc

SEQ ID NO: 140086 - DNA, 20 bp, Artificial Sequence
  Description of Artificial Sequence: Synthetic oligonucleotide
  Target: LAMA2; (+) strand; PAM type: NRG; PAM sequence: TAG
taccactgtatatatgcaca

SEQ ID NO: 140087 - DNA, 20 bp, Artificial Sequence
  Description of Artificial Sequence: Synthetic oligonucleotide
  Target: LAMA2; (+) strand; PAM type: NRG; PAM sequence: TAG
catagataaatatgtatatg

SEQ ID NO: 140088 - DNA, 20 bp, Artificial Sequence
  Description of Artificial Sequence: Synthetic oligonucleotide
  Target: LAMA2; (+) strand; PAM type: NRG; PAM sequence: CAG
tatgtatatgtagtgcaaca

SEQ ID NO: 140089 - DNA, 20 bp, Artificial Sequence
  Description of Artificial Sequence: Synthetic oligonucleotide
  Target: LAMA2; (+) strand; PAM type: NRG; PAM sequence: GAG
atatgtagtgcaacacagat

SEQ ID NO: 140090 - DNA, 20 bp, Artificial Sequence
  Description of Artificial Sequence: Synthetic oligonucleotide
  Target: LAMA2; (+) strand; PAM type: NRG; PAM sequence: AAG
tgtagtgcaacacagatgag

SEQ ID NO: 140091 - DNA, 20 bp, Artificial Sequence
  Description of Artificial Sequence: Synthetic oligonucleotide
  Target: LAMA2; (+) strand; PAM type: NRG; PAM sequence: AAG
aacacagatgagaagatata

SEQ ID NO: 140092 - DNA, 20 bp, Artificial Sequence
  Description of Artificial Sequence: Synthetic oligonucleotide
  Target: LAMA2; (+) strand; PAM type: NRG; PAM sequence: CAG
ttttgttcgaatatgtatta

SEQ ID NO: 140093 - DNA, 20 bp, Artificial Sequence
  Description of Artificial Sequence: Synthetic oligonucleotide
  Target: LAMA2; (+) strand; PAM type: NRG; PAM sequence: GAG
ttgttcgaatatgtattaca

SEQ ID NO: 140094 - DNA, 20 bp, Artificial Sequence
  Description of Artificial Sequence: Synthetic oligonucleotide
  Target: LAMA2; (+) strand; PAM type: NRG; PAM sequence: TAG
agagaaccctatgtgctgta

SEQ ID NO: 140095 - DNA, 20 bp, Artificial Sequence
  Description of Artificial Sequence: Synthetic oligonucleotide
  Target: LAMA2; (+) strand; PAM type: NRG; PAM sequence: AAG
accttatatatctttctttt

SEQ ID NO: 140096 - DNA, 20 bp, Artificial Sequence
  Description of Artificial Sequence: Synthetic oligonucleotide
  Target: LAMA2; (+) strand; PAM type: NRG; PAM sequence: GAG
cttatatatctttcttttaa

SEQ ID NO: 140097 - DNA, 20 bp, Artificial Sequence
  Description of Artificial Sequence: Synthetic oligonucleotide
  Target: LAMA2; (+) strand; PAM type: NRG; PAM sequence: TAG
tttcttttaagagaacctca

SEQ ID NO: 140098 - DNA, 20 bp, Artificial Sequence
  Description of Artificial Sequence: Synthetic oligonucleotide
  Target: LAMA2; (+) strand; PAM type: NRG; PAM sequence: AGG
ttcttttaagagaacctcat

SEQ ID NO: 140099 - DNA, 20 bp, Artificial Sequence
  Description of Artificial Sequence: Synthetic oligonucleotide
  Target: LAMA2; (+) strand; PAM type: NRG; PAM sequence: TAG
ttccaaattcttcactgaaa

SEQ ID NO: 140100 - DNA, 20 bp, Artificial Sequence
  Description of Artificial Sequence: Synthetic oligonucleotide
  Target: LAMA2; (+) strand; PAM type: NRG; PAM sequence: CAG
tatattacctttcgatatgt

SEQ ID NO: 140101 - DNA, 20 bp, Artificial Sequence
  Description of Artificial Sequence: Synthetic oligonucleotide
  Target: LAMA2; (+) strand; PAM type: NRG; PAM sequence: AAG
ttacctttcgatatgtcaga

SEQ ID NO: 140102 - DNA, 20 bp, Artificial Sequence
  Description of Artificial Sequence: Synthetic oligonucleotide
  Target: LAMA2; (+) strand; PAM type: NRG; PAM sequence: TGG
tgtcagaaagattctttttc

SEQ ID NO: 140103 - DNA, 20 bp, Artificial Sequence
  Description of Artificial Sequence: Synthetic oligonucleotide
  Target: LAMA2; (+) strand; PAM type: NRG; PAM sequence: AAG
cagaaagattctttttctgg

SEQ ID NO: 140104 - DNA, 20 bp, Artificial Sequence
  Description of Artificial Sequence: Synthetic oligonucleotide
  Target: LAMA2; (+) strand; PAM type: NRG; PAM sequence: CAG
ttctcatccacatcattgca

SEQ ID NO: 140105 - DNA, 20 bp, Artificial Sequence
  Description of Artificial Sequence: Synthetic oligonucleotide
  Target: LAMA2; (+) strand; PAM type: NRG; PAM sequence: AGG
tctcatccacatcattgcac

SEQ ID NO: 140106 - DNA, 20 bp, Artificial Sequence
  Description of Artificial Sequence: Synthetic oligonucleotide
  Target: LAMA2; (+) strand; PAM type: NRG; PAM sequence: AAG
cattgcacaggctgacaatc

SEQ ID NO: 140107 - DNA, 20 bp, Artificial Sequence
  Description of Artificial Sequence: Synthetic oligonucleotide
  Target: LAMA2; (+) strand; PAM type: NRG; PAM sequence: CAG
cactttctttaaaactaaat

SEQ ID NO: 140108 - DNA, 20 bp, Artificial Sequence
  Description of Artificial Sequence: Synthetic oligonucleotide
  Target: LAMA2; (+) strand; PAM type: NRG; PAM sequence: AGG
actttctttaaaactaaatc

SEQ ID NO: 140109 - DNA, 20 bp, Artificial Sequence
  Description of Artificial Sequence: Synthetic oligonucleotide
  Target: LAMA2; (+) strand; PAM type: NRG; PAM sequence: GAG
ttaaaactaaatcaggattt

SEQ ID NO: 140110 - DNA, 20 bp, Artificial Sequence
  Description of Artificial Sequence: Synthetic oligonucleotide
  Target: LAMA2; (+) strand; PAM type: NRG; PAM sequence: AGG
taaaactaaatcaggatttg

SEQ ID NO: 140111 - DNA, 20 bp, Artificial Sequence
  Description of Artificial Sequence: Synthetic oligonucleotide
  Target: LAMA2; (+) strand; PAM type: NRG; PAM sequence: GGG
aaaactaaatcaggatttga

SEQ ID NO: 140112 - DNA, 20 bp, Artificial Sequence
  Description of Artificial Sequence: Synthetic oligonucleotide
  Target: LAMA2; (+) strand; PAM type: NRG; PAM sequence: GAG
aactaaatcaggatttgagg

SEQ ID NO: 140113 - DNA, 20 bp, Artificial Sequence
  Description of Artificial Sequence: Synthetic oligonucleotide
  Target: LAMA2; (+) strand; PAM type: NRG; PAM sequence: TGG
taaatcaggatttgagggag

SEQ ID NO: 140114 - DNA, 20 bp, Artificial Sequence
  Description of Artificial Sequence: Synthetic oligonucleotide
  Target: LAMA2; (+) strand; PAM type: NRG; PAM sequence: GAG
aatcaggatttgagggagtg

SEQ ID NO: 140115 - DNA, 20 bp, Artificial Sequence
  Description of Artificial Sequence: Synthetic oligonucleotide
  Target: LAMA2; (+) strand; PAM type: NRG; PAM sequence: AGG
atcaggatttgagggagtgg

SEQ ID NO: 140116 - DNA, 20 bp, Artificial Sequence
  Description of Artificial Sequence: Synthetic oligonucleotide
  Target: LAMA2; (+) strand; PAM type: NRG; PAM sequence: GGG
tcaggatttgagggagtgga

SEQ ID NO: 140117 - DNA, 20 bp, Artificial Sequence
  Description of Artificial Sequence: Synthetic oligonucleotide
  Target: LAMA2; (+) strand; PAM type: NRG; PAM sequence: TAG
tgagggagtggagggatgac

SEQ ID NO: 140118 - DNA, 20 bp, Artificial Sequence
  Description of Artificial Sequence: Synthetic oligonucleotide
  Target: LAMA2; (+) strand; PAM type: NRG; PAM sequence: AGG
gagggagtggagggatgact

SEQ ID NO: 140119 - DNA, 20 bp, Artificial Sequence
  Description of Artificial Sequence: Synthetic oligonucleotide
  Target: LAMA2; (+) strand; PAM type: NRG; PAM sequence: CAG
ggagtggagggatgactagg

SEQ ID NO: 140120 - DNA, 20 bp, Artificial Sequence
  Description of Artificial Sequence: Synthetic oligonucleotide
  Target: LAMA2; (+) strand; PAM type: NRG; PAM sequence: GAG
agtggagggatgactaggca

SEQ ID NO: 140121 - DNA, 20 bp, Artificial Sequence
  Description of Artificial Sequence: Synthetic oligonucleotide
  Target: LAMA2; (+) strand; PAM type: NRG; PAM sequence: AAG
gggatgactaggcagagcaa

SEQ ID NO: 140122 - DNA, 20 bp, Artificial Sequence
  Description of Artificial Sequence: Synthetic oligonucleotide
  Target: LAMA2; (+) strand; PAM type: NRG; PAM sequence: AGG
ggatgactaggcagagcaaa

SEQ ID NO: 140123 - DNA, 20 bp, Artificial Sequence
  Description of Artificial Sequence: Synthetic oligonucleotide
  Target: LAMA2; (+) strand; PAM type: NRG; PAM sequence: AAG
ggcagagcaaaaggattttt

SEQ ID NO: 140124 - DNA, 20 bp, Artificial Sequence
  Description of Artificial Sequence: Synthetic oligonucleotide
  Target: LAMA2; (+) strand; PAM type: NRG; PAM sequence: AGG
gcagagcaaaaggattttta

SEQ ID NO: 140125 - DNA, 20 bp, Artificial Sequence
  Description of Artificial Sequence: Synthetic oligonucleotide
  Target: LAMA2; (+) strand; PAM type: NRG; PAM sequence: CAG
gagcaaaaggatttttaagg

SEQ ID NO: 140126 - DNA, 20 bp, Artificial Sequence
  Description of Artificial Sequence: Synthetic oligonucleotide
  Target: LAMA2; (+) strand; PAM type: NRG; PAM sequence: TAG
aaggcagtgaaaatactctg

SEQ ID NO: 140127 - DNA, 20 bp, Artificial Sequence
  Description of Artificial Sequence: Synthetic oligonucleotide
  Target: LAMA2; (+) strand; PAM type: NRG; PAM sequence: AGG
aggcagtgaaaatactctgt

SEQ ID NO: 140128 - DNA, 20 bp, Artificial Sequence
  Description of Artificial Sequence: Synthetic oligonucleotide
  Target: LAMA2; (+) strand; PAM type: NRG; PAM sequence: TAG
agtgaaaatactctgtagga

SEQ ID NO: 140129 - DNA, 20 bp, Artificial Sequence
  Description of Artificial Sequence: Synthetic oligonucleotide
  Target: LAMA2; (+) strand; PAM type: NRG; PAM sequence: TGG
tctgtaggatagtataatga

SEQ ID NO: 140130 - DNA, 20 bp, Artificial Sequence
  Description of Artificial Sequence: Synthetic oligonucleotide
  Target: LAMA2; (+) strand; PAM type: NRG; PAM sequence: GGG
ctgtaggatagtataatgat

SEQ ID NO: 140131 - DNA, 20 bp, Artificial Sequence
  Description of Artificial Sequence: Synthetic oligonucleotide
  Target: LAMA2; (+) strand; PAM type: NRG; PAM sequence: CAG
tgggtacatgtccaaacccg

SEQ ID NO: 140132 - DNA, 20 bp, Artificial Sequence
  Description of Artificial Sequence: Synthetic oligonucleotide
  Target: LAMA2; (+) strand; PAM type: NRG; PAM sequence: AGG
gggtacatgtccaaacccgc

SEQ ID NO: 140133 - DNA, 20 bp, Artificial Sequence
  Description of Artificial Sequence: Synthetic oligonucleotide
  Target: LAMA2; (+) strand; PAM type: NRG; PAM sequence: AAG
tccaaacccgcaggacgtgc

SEQ ID NO: 140134 - DNA, 20 bp, Artificial Sequence
  Description of Artificial Sequence: Synthetic oligonucleotide
  Target: LAMA2; (+) strand; PAM type: NRG; PAM sequence: AGG
ccaaacccgcaggacgtgca

SEQ ID NO: 140135 - DNA, 20 bp, Artificial Sequence
  Description of Artificial Sequence: Synthetic oligonucleotide
  Target: LAMA2; (+) strand; PAM type: NRG; PAM sequence: AAG
cccgcaggacgtgcaaggcc

SEQ ID NO: 140136 - DNA, 20 bp, Artificial Sequence
  Description of Artificial Sequence: Synthetic oligonucleotide
  Target: LAMA2; (+) strand; PAM type: NRG; PAM sequence: GAG
cgcaggacgtgcaaggccaa

SEQ ID NO: 140137 - DNA, 20 bp, Artificial Sequence
  Description of Artificial Sequence: Synthetic oligonucleotide
  Target: LAMA2; (+) strand; PAM type: NRG; PAM sequence: AAG
gacgtgcaaggccaagagtg

SEQ ID NO: 140138 - DNA, 20 bp, Artificial Sequence
  Description of Artificial Sequence: Synthetic oligonucleotide
  Target: LAMA2; (+) strand; PAM type: NRG; PAM sequence: TAG
gtgaagccgaatgtaaacta

SEQ ID NO: 140139 - DNA, 20 bp, Artificial Sequence
  Description of Artificial Sequence: Synthetic oligonucleotide
  Target: LAMA2; (+) strand; PAM type: NRG; PAM sequence: AGG
tgaagccgaatgtaaactat

SEQ ID NO: 140140 - DNA, 20 bp, Artificial Sequence
  Description of Artificial Sequence: Synthetic oligonucleotide
  Target: LAMA2; (+) strand; PAM type: NRG; PAM sequence: TGG
cgaatgtaaactataggctt

SEQ ID NO: 140141 - DNA, 20 bp, Artificial Sequence
  Description of Artificial Sequence: Synthetic oligonucleotide
  Target: LAMA2; (+) strand; PAM type: NRG; PAM sequence: GGG
gaatgtaaactataggcttt

SEQ ID NO: 140142 - DNA, 20 bp, Artificial Sequence
  Description of Artificial Sequence: Synthetic oligonucleotide
  Target: LAMA2; (+) strand; PAM type: NRG; PAM sequence: CAG
acgtgtcaatgtcatttcat

SEQ ID NO: 140143 - DNA, 20 bp, Artificial Sequence
  Description of Artificial Sequence: Synthetic oligonucleotide
  Target: LAMA2; (+) strand; PAM type: NRG; PAM sequence: TGG
ttacaaatgtactactctac

SEQ ID NO: 140144 - DNA, 20 bp, Artificial Sequence
  Description of Artificial Sequence: Synthetic oligonucleotide
  Target: LAMA2; (+) strand; PAM type: NRG; PAM sequence: GGG
tacaaatgtactactctact

SEQ ID NO: 140145 - DNA, 20 bp, Artificial Sequence
  Description of Artificial Sequence: Synthetic oligonucleotide
  Target: LAMA2; (+) strand; PAM type: NRG; PAM sequence: GGG
acaaatgtactactctactg

SEQ ID NO: 140146 - DNA, 20 bp, Artificial Sequence
  Description of Artificial Sequence: Synthetic oligonucleotide
  Target: LAMA2; (+) strand; PAM type: NRG; PAM sequence: GGG
caaatgtactactctactgg

SEQ ID NO: 140147 - DNA, 20 bp, Artificial Sequence
  Description of Artificial Sequence: Synthetic oligonucleotide
  Target: LAMA2; (+) strand; PAM type: NRG; PAM sequence: TAG
tgtactactctactggggga

SEQ ID NO: 140148 - DNA, 20 bp, Artificial Sequence
  Description of Artificial Sequence: Synthetic oligonucleotide
  Target: LAMA2; (+) strand; PAM type: NRG; PAM sequence: TAG
ctactgggggatagtgataa

SEQ ID NO: 140149 - DNA, 20 bp, Artificial Sequence
  Description of Artificial Sequence: Synthetic oligonucleotide
  Target: LAMA2; (+) strand; PAM type: NRG; PAM sequence: AGG
tactgggggatagtgataat

SEQ ID NO: 140150 - DNA, 20 bp, Artificial Sequence
  Description of Artificial Sequence: Synthetic oligonucleotide
  Target: LAMA2; (+) strand; PAM type: NRG; PAM sequence: GGG
actgggggatagtgataata

SEQ ID NO: 140151 - DNA, 20 bp, Artificial Sequence
  Description of Artificial Sequence: Synthetic oligonucleotide
  Target: LAMA2; (+) strand; PAM type: NRG; PAM sequence: GGG
ctgggggatagtgataatag

SEQ ID NO: 140152 - DNA, 20 bp, Artificial Sequence
  Description of Artificial Sequence: Synthetic oligonucleotide
  Target: LAMA2; (+) strand; PAM type: NRG; PAM sequence: GAG
gggggatagtgataataggg

SEQ ID NO: 140153 - DNA, 20 bp, Artificial Sequence
  Description of Artificial Sequence: Synthetic oligonucleotide
  Target: LAMA2; (+) strand; PAM type: NRG; PAM sequence: AGG
ggggatagtgataatagggg

SEQ ID NO: 140154 - DNA, 20 bp, Artificial Sequence
  Description of Artificial Sequence: Synthetic oligonucleotide
  Target: LAMA2; (+) strand; PAM type: NRG; PAM sequence: TGG
taggggaggttatatgttta

SEQ ID NO: 140155 - DNA, 20 bp, Artificial Sequence
  Description of Artificial Sequence: Synthetic oligonucleotide
  Target: LAMA2; (+) strand; PAM type: NRG; PAM sequence: GGG
aggggaggttatatgtttat

SEQ ID NO: 140156 - DNA, 20 bp, Artificial Sequence
  Description of Artificial Sequence: Synthetic oligonucleotide
  Target: LAMA2; (+) strand; PAM type: NRG; PAM sequence: GGG
ggggaggttatatgtttatg

SEQ ID NO: 140157 - DNA, 20 bp, Artificial Sequence
  Description of Artificial Sequence: Synthetic oligonucleotide
  Target: LAMA2; (+) strand; PAM type: NRG; PAM sequence: GGG
gggaggttatatgtttatgg

SEQ ID NO: 140158 - DNA, 20 bp, Artificial Sequence
  Description of Artificial Sequence: Synthetic oligonucleotide
  Target: LAMA2; (+) strand; PAM type: NRG; PAM sequence: CAG
aggttatatgtttatggggg

SEQ ID NO: 140159 - DNA, 20 bp, Artificial Sequence
  Description of Artificial Sequence: Synthetic oligonucleotide
  Target: LAMA2; (+) strand; PAM type: NRG; PAM sequence: GAG
tatatgtttatgggggcagt

SEQ ID NO: 140160 - DNA, 20 bp, Artificial Sequence
  Description of Artificial Sequence: Synthetic oligonucleotide
  Target: LAMA2; (+) strand; PAM type: NRG; PAM sequence: TGG
ttatgggggcagtgagcgta

SEQ ID NO: 140161 - DNA, 20 bp, Artificial Sequence
  Description of Artificial Sequence: Synthetic oligonucleotide
  Target: LAMA2; (+) strand; PAM type: NRG; PAM sequence: GGG
tatgggggcagtgagcgtat

SEQ ID NO: 140162 - DNA, 20 bp, Artificial Sequence
  Description of Artificial Sequence: Synthetic oligonucleotide
  Target: LAMA2; (+) strand; PAM type: NRG; PAM sequence: GAG
tttttttttttttctttttt

SEQ ID NO: 140163 - DNA, 20 bp, Artificial Sequence
  Description of Artificial Sequence: Synthetic oligonucleotide
  Target: LAMA2; (+) strand; PAM type: NRG; PAM sequence: AAG
tttttttcttttttgagaca

SEQ ID NO: 140164 - DNA, 20 bp, Artificial Sequence
  Description of Artificial Sequence: Synthetic oligonucleotide
  Target: LAMA2; (+) strand; PAM type: NRG; PAM sequence: CAG
caaagtcttgctgtgtcgct

SEQ ID NO: 140165 - DNA, 20 bp, Artificial Sequence
  Description of Artificial Sequence: Synthetic oligonucleotide
  Target: LAMA2; (+) strand; PAM type: NRG; PAM sequence: TGG
tcttgctgtgtcgctcagac

SEQ ID NO: 140166 - DNA, 20 bp, Artificial Sequence
  Description of Artificial Sequence: Synthetic oligonucleotide
  Target: LAMA2; (+) strand; PAM type: NRG; PAM sequence: GAG
ttgctgtgtcgctcagactg

SEQ ID NO: 140167 - DNA, 20 bp, Artificial Sequence
  Description of Artificial Sequence: Synthetic oligonucleotide
  Target: LAMA2; (+) strand; PAM type: NRG; PAM sequence: CAG
gtgtcgctcagactggagtg

SEQ ID NO: 140168 - DNA, 20 bp, Artificial Sequence
  Description of Artificial Sequence: Synthetic oligonucleotide
  Target: LAMA2; (+) strand; PAM type: NRG; PAM sequence: TGG
tcgctcagactggagtgcag

SEQ ID NO: 140169 - DNA, 20 bp, Artificial Sequence
  Description of Artificial Sequence: Synthetic oligonucleotide
  Target: LAMA2; (+) strand; PAM type: NRG; PAM sequence: CGG
ggagtgcagtggcacaatgt

SEQ ID NO: 140170 - DNA, 20 bp, Artificial Sequence
  Description of Artificial Sequence: Synthetic oligonucleotide
  Target: LAMA2; (+) strand; PAM type: NRG; PAM sequence: CAG
ggcacaatgtcggctcactg

SEQ ID NO: 140171 - DNA, 20 bp, Artificial Sequence
  Description of Artificial Sequence: Synthetic oligonucleotide
  Target: LAMA2; (+) strand; PAM type: NRG; PAM sequence: TAG
ctcactgcagcctccgcctc

SEQ ID NO: 140172 - DNA, 20 bp, Artificial Sequence
  Description of Artificial Sequence: Synthetic oligonucleotide
  Target: LAMA2; (+) strand; PAM type: NRG; PAM sequence: AAG
agcctccgcctctagcattc

SEQ ID NO: 140173 - DNA, 20 bp, Artificial Sequence
  Description of Artificial Sequence: Synthetic oligonucleotide
  Target: LAMA2; (+) strand; PAM type: NRG; PAM sequence: CGG
ttcaagcgattctcctgcct

SEQ ID NO: 140174 - DNA, 20 bp, Artificial Sequence
  Description of Artificial Sequence: Synthetic oligonucleotide
  Target: LAMA2; (+) strand; PAM type: NRG; PAM sequence: GAG
ttctcctgcctcggcttcct

SEQ ID NO: 140175 - DNA, 20 bp, Artificial Sequence
  Description of Artificial Sequence: Synthetic oligonucleotide
  Target: LAMA2; (+) strand; PAM type: NRG; PAM sequence: TGG
gcctcggcttcctgagtacc

SEQ ID NO: 140176 - DNA, 20 bp, Artificial Sequence
  Description of Artificial Sequence: Synthetic oligonucleotide
  Target: LAMA2; (+) strand; PAM type: NRG; PAM sequence: CAG
ttcctgagtacctggaacta

SEQ ID NO: 140177 - DNA, 20 bp, Artificial Sequence
  Description of Artificial Sequence: Synthetic oligonucleotide
  Target: LAMA2; (+) strand; PAM type: NRG; PAM sequence: AGG
tcctgagtacctggaactac

SEQ ID NO: 140178 - DNA, 20 bp, Artificial Sequence
  Description of Artificial Sequence: Synthetic oligonucleotide
  Target: LAMA2; (+) strand; PAM type: NRG; PAM sequence: TAG
cccgctaatttttgtgtttt

SEQ ID NO: 140179 - DNA, 20 bp, Artificial Sequence
  Description of Artificial Sequence: Synthetic oligonucleotide
  Target: LAMA2; (+) strand; PAM type: NRG; PAM sequence: TAG
gctaatttttgtgtttttag

SEQ ID NO: 140180 - DNA, 20 bp, Artificial Sequence
  Description of Artificial Sequence: Synthetic oligonucleotide
  Target: LAMA2; (+) strand; PAM type: NRG; PAM sequence: GAG
taatttttgtgtttttagta

SEQ ID NO: 140181 - DNA, 20 bp, Artificial Sequence
  Description of Artificial Sequence: Synthetic oligonucleotide
  Target: LAMA2; (+) strand; PAM type: NRG; PAM sequence: AAG
tttgtgtttttagtagagac

SEQ ID NO: 140182 - DNA, 20 bp, Artificial Sequence
  Description of Artificial Sequence: Synthetic oligonucleotide
  Target: LAMA2; (+) strand; PAM type: NRG; PAM sequence: AGG
ttgtgtttttagtagagaca

SEQ ID NO: 140183 - DNA, 20 bp, Artificial Sequence
  Description of Artificial Sequence: Synthetic oligonucleotide
  Target: LAMA2; (+) strand; PAM type: NRG; PAM sequence: CAG
caaggtttcaccatgttgcc

SEQ ID NO: 140184 - DNA, 20 bp, Artificial Sequence
  Description of Artificial Sequence: Synthetic oligonucleotide
  Target: LAMA2; (+) strand; PAM type: NRG; PAM sequence: AGG
aaggtttcaccatgttgccc

SEQ ID NO: 140185 - DNA, 20 bp, Artificial Sequence
  Description of Artificial Sequence: Synthetic oligonucleotide
  Target: LAMA2; (+) strand; PAM type: NRG; PAM sequence: TGG
tttcaccatgttgcccaggc

SEQ ID NO: 140186 - DNA, 20 bp, Artificial Sequence
  Description of Artificial Sequence: Synthetic oligonucleotide
  Target: LAMA2; (+) strand; PAM type: NRG; PAM sequence: AAG
ggtcttgaactcctgacctt

SEQ ID NO: 140187 - DNA, 20 bp, Artificial Sequence
  Description of Artificial Sequence: Synthetic oligonucleotide
  Target: LAMA2; (+) strand; PAM type: NRG; PAM sequence: TGG
cttgaactcctgaccttaag

SEQ ID NO: 140188 - DNA, 20 bp, Artificial Sequence
  Description of Artificial Sequence: Synthetic oligonucleotide
  Target: LAMA2; (+) strand; PAM type: NRG; PAM sequence: CAG
cttaagtggtctgcccatgt

SEQ ID NO: 140189 - DNA, 20 bp, Artificial Sequence
  Description of Artificial Sequence: Synthetic oligonucleotide
  Target: LAMA2; (+) strand; PAM type: NRG; PAM sequence: AAG
ctgcccatgtcagcctccca

SEQ ID NO: 140190 - DNA, 20 bp, Artificial Sequence
  Description of Artificial Sequence: Synthetic oligonucleotide
  Target: LAMA2; (+) strand; PAM type: NRG; PAM sequence: TAG
atgtcagcctcccaaagtgc

SEQ ID NO: 140191 - DNA, 20 bp, Artificial Sequence
  Description of Artificial Sequence: Synthetic oligonucleotide
  Target: LAMA2; (+) strand; PAM type: NRG; PAM sequence: AGG
tgtcagcctcccaaagtgct

SEQ ID NO: 140192 - DNA, 20 bp, Artificial Sequence
  Description of Artificial Sequence: Synthetic oligonucleotide
  Target: LAMA2; (+) strand; PAM type: NRG; PAM sequence: CAG
ctcccaaagtgctaggatta

SEQ ID NO: 140193 - DNA, 20 bp, Artificial Sequence
  Description of Artificial Sequence: Synthetic oligonucleotide
  Target: LAMA2; (+) strand; PAM type: NRG; PAM sequence: AGG
tcccaaagtgctaggattac

SEQ ID NO: 140194 - DNA, 20 bp, Artificial Sequence
  Description of Artificial Sequence: Synthetic oligonucleotide
  Target: LAMA2; (+) strand; PAM type: NRG; PAM sequence: GAG
agtgctaggattacaggtat

SEQ ID NO: 140195 - DNA, 20 bp, Artificial Sequence
  Description of Artificial Sequence: Synthetic oligonucleotide
  Target: LAMA2; (+) strand; PAM type: NRG; PAM sequence: TGG
caggtatgagccactgcacc

SEQ ID NO: 140196 - DNA, 20 bp, Artificial Sequence
  Description of Artificial Sequence: Synthetic oligonucleotide
  Target: LAMA2; (+) strand; PAM type: NRG; PAM sequence: AAG
aataaaatattaaaaaataa

SEQ ID NO: 140197 - DNA, 20 bp, Artificial Sequence
  Description of Artificial Sequence: Synthetic oligonucleotide
  Target: LAMA2; (+) strand; PAM type: NRG; PAM sequence: AAG
accctactgactctttgtca

SEQ ID NO: 140198 - DNA, 20 bp, Artificial Sequence
  Description of Artificial Sequence: Synthetic oligonucleotide
  Target: LAMA2; (+) strand; PAM type: NRG; PAM sequence: TGG
tcatgcaatgtttaacactt

SEQ ID NO: 140199 - DNA, 20 bp, Artificial Sequence
  Description of Artificial Sequence: Synthetic oligonucleotide
  Target: LAMA2; (+) strand; PAM type: NRG; PAM sequence: TGG
ttggaccatattatcactta

SEQ ID NO: 140200 - DNA, 20 bp, Artificial Sequence
  Description of Artificial Sequence: Synthetic oligonucleotide
  Target: LAMA2; (+) strand; PAM type: NRG; PAM sequence: TAG
accatattatcacttatggt

SEQ ID NO: 140201 - DNA, 20 bp, Artificial Sequence
  Description of Artificial Sequence: Synthetic oligonucleotide
  Target: LAMA2; (+) strand; PAM type: NRG; PAM sequence: TGG
atggttagcctcttataata

SEQ ID NO: 140202 - DNA, 20 bp, Artificial Sequence
  Description of Artificial Sequence: Synthetic oligonucleotide
  Target: LAMA2; (+) strand; PAM type: NRG; PAM sequence: TGG
tagcctcttataatatggta

SEQ ID NO: 140203 - DNA, 20 bp, Artificial Sequence
  Description of Artificial Sequence: Synthetic oligonucleotide
  Target: LAMA2; (+) strand; PAM type: NRG; PAM sequence: AAG
ggtatggctatttttttaaa

SEQ ID NO: 140204 - DNA, 20 bp, Artificial Sequence
  Description of Artificial Sequence: Synthetic oligonucleotide
  Target: LAMA2; (+) strand; PAM type: NRG; PAM sequence: TGG
gctatttttttaaaaagtca

SEQ ID NO: 140205 - DNA, 20 bp, Artificial Sequence
  Description of Artificial Sequence: Synthetic oligonucleotide
  Target: LAMA2; (+) strand; PAM type: NRG; PAM sequence: TAG
taacaaacaattttttatct

SEQ ID NO: 140206 - DNA, 20 bp, Artificial Sequence
  Description of Artificial Sequence: Synthetic oligonucleotide
  Target: LAMA2; (+) strand; PAM type: NRG; PAM sequence: AAG
tttttatcttagccactttt

SEQ ID NO: 140207 - DNA, 20 bp, Artificial Sequence
  Description of Artificial Sequence: Synthetic oligonucleotide
  Target: LAMA2; (+) strand; PAM type: NRG; PAM sequence: CAG
gtgcaaccatcatcaccatt

SEQ ID NO: 140208 - DNA, 20 bp, Artificial Sequence
  Description of Artificial Sequence: Synthetic oligonucleotide
  Target: LAMA2; (+) strand; PAM type: NRG; PAM sequence: CAG
actccccattctctctcccc

SEQ ID NO: 140209 - DNA, 20 bp, Artificial Sequence
  Description of Artificial Sequence: Synthetic oligonucleotide
  Target: LAMA2; (+) strand; PAM type: NRG; PAM sequence: TGG
attctctctcccccagtccc

SEQ ID NO: 140210 - DNA, 20 bp, Artificial Sequence
  Description of Artificial Sequence: Synthetic oligonucleotide
  Target: LAMA2; (+) strand; PAM type: NRG; PAM sequence: TGG
ctctataaatttgatcattc

SEQ ID NO: 140211 - DNA, 20 bp, Artificial Sequence
  Description of Artificial Sequence: Synthetic oligonucleotide
  Target: LAMA2; (+) strand; PAM type: NRG; PAM sequence: GGG
tctataaatttgatcattct

SEQ ID NO: 140212 - DNA, 20 bp, Artificial Sequence
  Description of Artificial Sequence: Synthetic oligonucleotide
  Target: LAMA2; (+) strand; PAM type: NRG; PAM sequence: AAG
tcattctgggcacgtcatat

SEQ ID NO: 140213 - DNA, 20 bp, Artificial Sequence
  Description of Artificial Sequence: Synthetic oligonucleotide
  Target: LAMA2; (+) strand; PAM type: NRG; PAM sequence: TGG
ttctgggcacgtcatataag

SEQ ID NO: 140214 - DNA, 20 bp, Artificial Sequence
  Description of Artificial Sequence: Synthetic oligonucleotide
  Target: LAMA2; (+) strand; PAM type: NRG; PAM sequence: CAG
gtcatataagtggaaccaca

SEQ ID NO: 140215 - DNA, 20 bp, Artificial Sequence
  Description of Artificial Sequence: Synthetic oligonucleotide
  Target: LAMA2; (+) strand; PAM type: NRG; PAM sequence: TGG
agtatttgtccttttgtaac

SEQ ID NO: 140216 - DNA, 20 bp, Artificial Sequence
  Description of Artificial Sequence: Synthetic oligonucleotide
  Target: LAMA2; (+) strand; PAM type: NRG; PAM sequence: TAG
ctggcttatttcattcaaca

SEQ ID NO: 140217 - DNA, 20 bp, Artificial Sequence
  Description of Artificial Sequence: Synthetic oligonucleotide
  Target: LAMA2; (+) strand; PAM type: NRG; PAM sequence: GAG
tcattcaacatagtgtcttc

SEQ ID NO: 140218 - DNA, 20 bp, Artificial Sequence
  Description of Artificial Sequence: Synthetic oligonucleotide
  Target: LAMA2; (+) strand; PAM type: NRG; PAM sequence: TAG
ttcgagattcttccacgttg

SEQ ID NO: 140219 - DNA, 20 bp, Artificial Sequence
  Description of Artificial Sequence: Synthetic oligonucleotide
  Target: LAMA2; (+) strand; PAM type: NRG; PAM sequence: CAG
ttccacgttgtagcatatat

SEQ ID NO: 140220 - DNA, 20 bp, Artificial Sequence
  Description of Artificial Sequence: Synthetic oligonucleotide
  Target: LAMA2; (+) strand; PAM type: NRG; PAM sequence: GAG
ccacgttgtagcatatatca

SEQ ID NO: 140221 - DNA, 20 bp, Artificial Sequence
  Description of Artificial Sequence: Synthetic oligonucleotide
  Target: LAMA2; (+) strand; PAM type: NRG; PAM sequence: AAG
tcagagtttccttcattttt

SEQ ID NO: 140222 - DNA, 20 bp, Artificial Sequence
  Description of Artificial Sequence: Synthetic oligonucleotide
  Target: LAMA2; (+) strand; PAM type: NRG; PAM sequence: AGG
cagagtttccttcattttta

SEQ ID NO: 140223 - DNA, 20 bp, Artificial Sequence
  Description of Artificial Sequence: Synthetic oligonucleotide
  Target: LAMA2; (+) strand; PAM type: NRG; PAM sequence: AAG
atattccaatgtctatgtat

SEQ ID NO: 140224 - DNA, 20 bp, Artificial Sequence
  Description of Artificial Sequence: Synthetic oligonucleotide
  Target: LAMA2; (+) strand; PAM type: NRG; PAM sequence: TAG
ttccaatgtctatgtataag

SEQ ID NO: 140225 - DNA, 20 bp, Artificial Sequence
  Description of Artificial Sequence: Synthetic oligonucleotide
  Target: LAMA2; (+) strand; PAM type: NRG; PAM sequence: TGG
ctcacacacacgtacatata

SEQ ID NO: 140226 - DNA, 20 bp, Artificial Sequence
  Description of Artificial Sequence: Synthetic oligonucleotide
  Target: LAMA2; (+) strand; PAM type: NRG; PAM sequence: CAG
cattaatccattgatgaaca

SEQ ID NO: 140227 - DNA, 20 bp, Artificial Sequence
  Description of Artificial Sequence: Synthetic oligonucleotide
  Target: LAMA2; (+) strand; PAM type: NRG; PAM sequence: AGG
attaatccattgatgaacac

SEQ ID NO: 140228 - DNA, 20 bp, Artificial Sequence
  Description of Artificial Sequence: Synthetic oligonucleotide
  Target: LAMA2; (+) strand; PAM type: NRG; PAM sequence: TGG
cacaggttaattccaccttc

SEQ ID NO: 140229 - DNA, 20 bp, Artificial Sequence
  Description of Artificial Sequence: Synthetic oligonucleotide
  Target: LAMA2; (+) strand; PAM type: NRG; PAM sequence: TGG
tgttcttaatgctatgaaca

SEQ ID NO: 140230 - DNA, 20 bp, Artificial Sequence
  Description of Artificial Sequence: Synthetic oligonucleotide
  Target: LAMA2; (+) strand; PAM type: NRG; PAM sequence: GGG
gttcttaatgctatgaacat

SEQ ID NO: 140231 - DNA, 20 bp, Artificial Sequence
  Description of Artificial Sequence: Synthetic oligonucleotide
  Target: LAMA2; (+) strand; PAM type: NRG; PAM sequence: TGG
atgctatgaacatgggcata

SEQ ID NO: 140232 - DNA, 20 bp, Artificial Sequence
  Description of Artificial Sequence: Synthetic oligonucleotide
  Target: LAMA2; (+) strand; PAM type: NRG; PAM sequence: GGG
tgctatgaacatgggcatat

SEQ ID NO: 140233 - DNA, 20 bp, Artificial Sequence
  Description of Artificial Sequence: Synthetic oligonucleotide
  Target: LAMA2; (+) strand; PAM type: NRG; PAM sequence: AAG
gcatatgggcttcaatcttt

SEQ ID NO: 140234 - DNA, 20 bp, Artificial Sequence
  Description of Artificial Sequence: Synthetic oligonucleotide
  Target: LAMA2; (+) strand; PAM type: NRG; PAM sequence: AGG
catatgggcttcaatcttta

SEQ ID NO: 140235 - DNA, 20 bp, Artificial Sequence
  Description of Artificial Sequence: Synthetic oligonucleotide
  Target: LAMA2; (+) strand; PAM type: NRG; PAM sequence: CAG
ggcttcaatctttaaggttt

SEQ ID NO: 140236 - DNA, 20 bp, Artificial Sequence
  Description of Artificial Sequence: Synthetic oligonucleotide
  Target: LAMA2; (+) strand; PAM type: NRG; PAM sequence: TGG
tttaaggtttcagttactca

SEQ ID NO: 140237 - DNA, 20 bp, Artificial Sequence
  Description of Artificial Sequence: Synthetic oligonucleotide
  Target: LAMA2; (+) strand; PAM type: NRG; PAM sequence: AAG
cagttactcatggtaaactg

SEQ ID NO: 140238 - DNA, 20 bp, Artificial Sequence
  Description of Artificial Sequence: Synthetic oligonucleotide
  Target: LAMA2; (+) strand; PAM type: NRG; PAM sequence: AAG
attacatacaaaaacatttt

SEQ ID NO: 140239 - DNA, 20 bp, Artificial Sequence
  Description of Artificial Sequence: Synthetic oligonucleotide
  Target: LAMA2; (+) strand; PAM type: NRG; PAM sequence: GAG
tacatacaaaaacattttaa

SEQ ID NO: 140240 - DNA, 20 bp, Artificial Sequence
  Description of Artificial Sequence: Synthetic oligonucleotide
  Target: LAMA2; (+) strand; PAM type: NRG; PAM sequence: GAG
catacaaaaacattttaaga

SEQ ID NO: 140241 - DNA, 20 bp, Artificial Sequence
  Description of Artificial Sequence: Synthetic oligonucleotide
  Target: LAMA2; (+) strand; PAM type: NRG; PAM sequence: GAG
tacaaaaacattttaagaga

SEQ ID NO: 140242 - DNA, 20 bp, Artificial Sequence
  Description of Artificial Sequence: Synthetic oligonucleotide
  Target: LAMA2; (+) strand; PAM type: NRG; PAM sequence: GAG
caaaaacattttaagagaga

SEQ ID NO: 140243 - DNA, 20 bp, Artificial Sequence
  Description of Artificial Sequence: Synthetic oligonucleotide
  Target: LAMA2; (+) strand; PAM type: NRG; PAM sequence: GAG
aaaacattttaagagagaga

SEQ ID NO: 140244 - DNA, 20 bp, Artificial Sequence
  Description of Artificial Sequence: Synthetic oligonucleotide
  Target: LAMA2; (+) strand; PAM type: NRG; PAM sequence: AGG
aaacattttaagagagagag

SEQ ID NO: 140245 - DNA, 20 bp, Artificial Sequence
  Description of Artificial Sequence: Synthetic oligonucleotide
  Target: LAMA2; (+) strand; PAM type: NRG; PAM sequence: GGG
aacattttaagagagagaga

SEQ ID NO: 140246 - DNA, 20 bp, Artificial Sequence
  Description of Artificial Sequence: Synthetic oligonucleotide
  Target: LAMA2; (+) strand; PAM type: NRG; PAM sequence: GAG
cattttaagagagagagagg

SEQ ID NO: 140247 - DNA, 20 bp, Artificial Sequence
  Description of Artificial Sequence: Synthetic oligonucleotide
  Target: LAMA2; (+) strand; PAM type: NRG; PAM sequence: AAG
tttaagagagagagagggag

SEQ ID NO: 140248 - DNA, 20 bp, Artificial Sequence
  Description of Artificial Sequence: Synthetic oligonucleotide
  Target: LAMA2; (+) strand; PAM type: NRG; PAM sequence: TAG
tatattgttgtattttttat

SEQ ID NO: 140249 - DNA, 20 bp, Artificial Sequence
  Description of Artificial Sequence: Synthetic oligonucleotide
  Target: LAMA2; (+) strand; PAM type: NRG; PAM sequence: AAG
ttataaattaaacttcatca

SEQ ID NO: 140250 - DNA, 20 bp, Artificial Sequence
  Description of Artificial Sequence: Synthetic oligonucleotide
  Target: LAMA2; (+) strand; PAM type: NRG; PAM sequence: TAG
tcatcaaagatgtgtgtgta

SEQ ID NO: 140251 - DNA, 20 bp, Artificial Sequence
  Description of Artificial Sequence: Synthetic oligonucleotide
  Target: LAMA2; (+) strand; PAM type: NRG; PAM sequence: TGG
agaaaaatacattgtatata

SEQ ID NO: 140252 - DNA, 20 bp, Artificial Sequence
  Description of Artificial Sequence: Synthetic oligonucleotide
  Target: LAMA2; (+) strand; PAM type: NRG; PAM sequence: GGG
gaaaaatacattgtatatat

SEQ ID NO: 140253 - DNA, 20 bp, Artificial Sequence
  Description of Artificial Sequence: Synthetic oligonucleotide
  Target: LAMA2; (+) strand; PAM type: NRG; PAM sequence: GAG
atgggcttcacgcattgaat

SEQ ID NO: 140254 - DNA, 20 bp, Artificial Sequence
  Description of Artificial Sequence: Synthetic oligonucleotide
  Target: LAMA2; (+) strand; PAM type: NRG; PAM sequence: AGG
tgggcttcacgcattgaatg

SEQ ID NO: 140255 - DNA, 20 bp, Artificial Sequence
  Description of Artificial Sequence: Synthetic oligonucleotide
  Target: LAMA2; (+) strand; PAM type: NRG; PAM sequence: GGG
gggcttcacgcattgaatga

SEQ ID NO: 140256 - DNA, 20 bp, Artificial Sequence
  Description of Artificial Sequence: Synthetic oligonucleotide
  Target: LAMA2; (+) strand; PAM type: NRG; PAM sequence: TAG
cacgcattgaatgagggtct

SEQ ID NO: 140257 - DNA, 20 bp, Artificial Sequence
  Description of Artificial Sequence: Synthetic oligonucleotide
  Target: LAMA2; (+) strand; PAM type: NRG; PAM sequence: AGG
acgcattgaatgagggtctt

SEQ ID NO: 140258 - DNA, 20 bp, Artificial Sequence
  Description of Artificial Sequence: Synthetic oligonucleotide
  Target: LAMA2; (+) strand; PAM type: NRG; PAM sequence: GAG
ggtcttaggatgtatcccct

SEQ ID NO: 140259 - DNA, 20 bp, Artificial Sequence
  Description of Artificial Sequence: Synthetic oligonucleotide
  Target: LAMA2; (+) strand; PAM type: NRG; PAM sequence: AGG
gtcttaggatgtatcccctg

SEQ ID NO: 140260 - DNA, 20 bp, Artificial Sequence
  Description of Artificial Sequence: Synthetic oligonucleotide
  Target: LAMA2; (+) strand; PAM type: NRG; PAM sequence: AAG
aggatgtatcccctgaggat

SEQ ID NO: 140261 - DNA, 20 bp, Artificial Sequence
  Description of Artificial Sequence: Synthetic oligonucleotide
  Target: LAMA2; (+) strand; PAM type: NRG; PAM sequence: AGG
ggatgtatcccctgaggata

SEQ ID NO: 140262 - DNA, 20 bp, Artificial Sequence
  Description of Artificial Sequence: Synthetic oligonucleotide
  Target: LAMA2; (+) strand; PAM type: NRG; PAM sequence: GAG
atgtatcccctgaggataag

SEQ ID NO: 140263 - DNA, 20 bp, Artificial Sequence
  Description of Artificial Sequence: Synthetic oligonucleotide
  Target: LAMA2; (+) strand; PAM type: NRG; PAM sequence: AGG
tgtatcccctgaggataagg

SEQ ID NO: 140264 - DNA, 20 bp, Artificial Sequence
  Description of Artificial Sequence: Synthetic oligonucleotide
  Target: LAMA2; (+) strand; PAM type: NRG; PAM sequence: GGG
gtatcccctgaggataagga

SEQ ID NO: 140265 - DNA, 20 bp, Artificial Sequence
  Description of Artificial Sequence: Synthetic oligonucleotide
  Target: LAMA2; (+) strand; PAM type: NRG; PAM sequence: GAG
aattctactgttaattcttt

SEQ ID NO: 140266 - DNA, 20 bp, Artificial Sequence
  Description of Artificial Sequence: Synthetic oligonucleotide
  Target: LAMA2; (+) strand; PAM type: NRG; PAM sequence: AGG
attctactgttaattctttg

SEQ ID NO: 140267 - DNA, 20 bp, Artificial Sequence
  Description of Artificial Sequence: Synthetic oligonucleotide
  Target: LAMA2; (+) strand; PAM type: NRG; PAM sequence: TAG
aaccactatattgttttcca

SEQ ID NO: 140268 - DNA, 20 bp, Artificial Sequence
  Description of Artificial Sequence: Synthetic oligonucleotide
  Target: LAMA2; (+) strand; PAM type: NRG; PAM sequence: TGG
cactatattgttttccatag

SEQ ID NO: 140269 - DNA, 20 bp, Artificial Sequence
  Description of Artificial Sequence: Synthetic oligonucleotide
  Target: LAMA2; (+) strand; PAM type: NRG; PAM sequence: CGG
gcaccattttacattcccat

SEQ ID NO: 140270 - DNA, 20 bp, Artificial Sequence
  Description of Artificial Sequence: Synthetic oligonucleotide
  Target: LAMA2; (+) strand; PAM type: NRG; PAM sequence: AAG
cattcccatcggccatacac

SEQ ID NO: 140271 - DNA, 20 bp, Artificial Sequence
  Description of Artificial Sequence: Synthetic oligonucleotide
  Target: LAMA2; (+) strand; PAM type: NRG; PAM sequence: AGG
attcccatcggccatacaca

SEQ ID NO: 140272 - DNA, 20 bp, Artificial Sequence
  Description of Artificial Sequence: Synthetic oligonucleotide
  Target: LAMA2; (+) strand; PAM type: NRG; PAM sequence: TAG
tttttttttttctttttaaa

SEQ ID NO: 140273 - DNA, 20 bp, Artificial Sequence
  Description of Artificial Sequence: Synthetic oligonucleotide
  Target: LAMA2; (+) strand; PAM type: NRG; PAM sequence: TAG
tttttttctttttaaatagt

SEQ ID NO: 140274 - DNA, 20 bp, Artificial Sequence
  Description of Artificial Sequence: Synthetic oligonucleotide
  Target: LAMA2; (+) strand; PAM type: NRG; PAM sequence: AAG
gttagcatcaaatgcgtatg

SEQ ID NO: 140275 - DNA, 20 bp, Artificial Sequence
  Description of Artificial Sequence: Synthetic oligonucleotide
  Target: LAMA2; (+) strand; PAM type: NRG; PAM sequence: TGG
agcatcaaatgcgtatgaag

SEQ ID NO: 140276 - DNA, 20 bp, Artificial Sequence
  Description of Artificial Sequence: Synthetic oligonucleotide
  Target: LAMA2; (+) strand; PAM type: NRG; PAM sequence: TGG
atcaaatgcgtatgaagtgg

SEQ ID NO: 140277 - DNA, 20 bp, Artificial Sequence
  Description of Artificial Sequence: Synthetic oligonucleotide
  Target: LAMA2; (+) strand; PAM type: NRG; PAM sequence: TGG
aaatgcgtatgaagtggtgg

SEQ ID NO: 140278 - DNA, 20 bp, Artificial Sequence
  Description of Artificial Sequence: Synthetic oligonucleotide
  Target: LAMA2; (+) strand; PAM type: NRG; PAM sequence: CAG
gtggtggtggttcatatttt

SEQ ID NO: 140279 - DNA, 20 bp, Artificial Sequence
  Description of Artificial Sequence: Synthetic oligonucleotide
  Target: LAMA2; (+) strand; PAM type: NRG; PAM sequence: CAG
tattttcagtcatcgtttcc

SEQ ID NO: 140280 - DNA, 20 bp, Artificial Sequence
  Description of Artificial Sequence: Synthetic oligonucleotide
  Target: LAMA2; (+) strand; PAM type: NRG; PAM sequence: GAG
atcgtttcccagtatttctt

SEQ ID NO: 140281 - DNA, 20 bp, Artificial Sequence
  Description of Artificial Sequence: Synthetic oligonucleotide
  Target: LAMA2; (+) strand; PAM type: NRG; PAM sequence: AAG
agacaattttgaaatattgt

SEQ ID NO: 140282 - DNA, 20 bp, Artificial Sequence
  Description of Artificial Sequence: Synthetic oligonucleotide
  Target: LAMA2; (+) strand; PAM type: NRG; PAM sequence: GAG
acaattttgaaatattgtaa

SEQ ID NO: 140283 - DNA, 20 bp, Artificial Sequence
  Description of Artificial Sequence: Synthetic oligonucleotide
  Target: LAMA2; (+) strand; PAM type: NRG; PAM sequence: TGG
atataaaataactttgatgt

SEQ ID NO: 140284 - DNA, 20 bp, Artificial Sequence
  Description of Artificial Sequence: Synthetic oligonucleotide
  Target: LAMA2; (+) strand; PAM type: NRG; PAM sequence: AAG
aaaataactttgatgttgga

SEQ ID NO: 140285 - DNA, 20 bp, Artificial Sequence
  Description of Artificial Sequence: Synthetic oligonucleotide
  Target: LAMA2; (+) strand; PAM type: NRG; PAM sequence: TAG
aactttgatgttggaaagaa

SEQ ID NO: 140286 - DNA, 20 bp, Artificial Sequence
  Description of Artificial Sequence: Synthetic oligonucleotide
  Target: LAMA2; (+) strand; PAM type: NRG; PAM sequence: CAG
tttgatgttggaaagaatag

SEQ ID NO: 140287 - DNA, 20 bp, Artificial Sequence
  Description of Artificial Sequence: Synthetic oligonucleotide
  Target: LAMA2; (+) strand; PAM type: NRG; PAM sequence: AAG
tgttggaaagaatagcagtg

SEQ ID NO: 140288 - DNA, 20 bp, Artificial Sequence
  Description of Artificial Sequence: Synthetic oligonucleotide
  Target: LAMA2; (+) strand; PAM type: NRG; PAM sequence: GAG
agaatgcccatgtaaaattt

SEQ ID NO: 140289 - DNA, 20 bp, Artificial Sequence
  Description of Artificial Sequence: Synthetic oligonucleotide
  Target: LAMA2; (+) strand; PAM type: NRG; PAM sequence: CAG
ttgagaatcttgaaacatga

SEQ ID NO: 140290 - DNA, 20 bp, Artificial Sequence
  Description of Artificial Sequence: Synthetic oligonucleotide
  Target: LAMA2; (+) strand; PAM type: NRG; PAM sequence: AAG
acagatacaacattgcatta

SEQ ID NO: 140291 - DNA, 20 bp, Artificial Sequence
  Description of Artificial Sequence: Synthetic oligonucleotide
  Target: LAMA2; (+) strand; PAM type: NRG; PAM sequence: AGG
cagatacaacattgcattaa

SEQ ID NO: 140292 - DNA, 20 bp, Artificial Sequence
  Description of Artificial Sequence: Synthetic oligonucleotide
  Target: LAMA2; (+) strand; PAM type: NRG; PAM sequence: TGG
cattaaaggaaattaaatcc

SEQ ID NO: 140293 - DNA, 20 bp, Artificial Sequence
  Description of Artificial Sequence: Synthetic oligonucleotide
  Target: LAMA2; (+) strand; PAM type: NRG; PAM sequence: TAG
aaatcctggacaattttgct

SEQ ID NO: 140294 - DNA, 20 bp, Artificial Sequence
  Description of Artificial Sequence: Synthetic oligonucleotide
  Target: LAMA2; (+) strand; PAM type: NRG; PAM sequence: AAG
gacaattttgcttagcttgt

SEQ ID NO: 140295 - DNA, 20 bp, Artificial Sequence
  Description of Artificial Sequence: Synthetic oligonucleotide
  Target: LAMA2; (+) strand; PAM type: NRG; PAM sequence: AAG
atacaaatacatgtacctat

SEQ ID NO: 140296 - DNA, 20 bp, Artificial Sequence
  Description of Artificial Sequence: Synthetic oligonucleotide
  Target: LAMA2; (+) strand; PAM type: NRG; PAM sequence: TGG
aaatatatcctttctaaatt

SEQ ID NO: 140297 - DNA, 20 bp, Artificial Sequence
  Description of Artificial Sequence: Synthetic oligonucleotide
  Target: LAMA2; (+) strand; PAM type: NRG; PAM sequence: CAG
tctaaatttggctatattgt

SEQ ID NO: 140298 - DNA, 20 bp, Artificial Sequence
  Description of Artificial Sequence: Synthetic oligonucleotide
  Target: LAMA2; (+) strand; PAM type: NRG; PAM sequence: GAG
ggctatattgtcagatacct

SEQ ID NO: 140299 - DNA, 20 bp, Artificial Sequence
  Description of Artificial Sequence: Synthetic oligonucleotide
  Target: LAMA2; (+) strand; PAM type: NRG; PAM sequence: TAG
tgagaaaattattatcttta

SEQ ID NO: 140300 - DNA, 20 bp, Artificial Sequence
  Description of Artificial Sequence: Synthetic oligonucleotide
  Target: LAMA2; (+) strand; PAM type: NRG; PAM sequence: AAG
ctgtgatatgtcgccaatgc

SEQ ID NO: 140301 - DNA, 20 bp, Artificial Sequence
  Description of Artificial Sequence: Synthetic oligonucleotide
  Target: LAMA2; (+) strand; PAM type: NRG; PAM sequence: AGG
tgtgatatgtcgccaatgca

SEQ ID NO: 140302 - DNA, 20 bp, Artificial Sequence
  Description of Artificial Sequence: Synthetic oligonucleotide
  Target: LAMA2; (+) strand; PAM type: NRG; PAM sequence: AAG
aaggcccatgaaaactcaaa

SEQ ID NO: 140303 - DNA, 20 bp, Artificial Sequence
  Description of Artificial Sequence: Synthetic oligonucleotide
  Target: LAMA2; (+) strand; PAM type: NRG; PAM sequence: GAG
ggcccatgaaaactcaaaaa

SEQ ID NO: 140304 - DNA, 20 bp, Artificial Sequence
  Description of Artificial Sequence: Synthetic oligonucleotide
  Target: LAMA2; (+) strand; PAM type: NRG; PAM sequence: CAG
catgaaaactcaaaaagagt

SEQ ID NO: 140305 - DNA, 20 bp, Artificial Sequence
  Description of Artificial Sequence: Synthetic oligonucleotide
  Target: LAMA2; (+) strand; PAM type: NRG; PAM sequence: TAG
aaaactcaaaaagagtcagt

SEQ ID NO: 140306 - DNA, 20 bp, Artificial Sequence
  Description of Artificial Sequence: Synthetic oligonucleotide
  Target: LAMA2; (+) strand; PAM type: NRG; PAM sequence: TAG
tttattatttgtataaatta

SEQ ID NO: 140307 - DNA, 20 bp, Artificial Sequence
  Description of Artificial Sequence: Synthetic oligonucleotide
  Target: LAMA2; (+) strand; PAM type: NRG; PAM sequence: TGG
aacatatgaatacttgtgtc

SEQ ID NO: 140308 - DNA, 20 bp, Artificial Sequence
  Description of Artificial Sequence: Synthetic oligonucleotide
  Target: LAMA2; (+) strand; PAM type: NRG; PAM sequence: TAG
acttgtgtctggaattacaa

SEQ ID NO: 140309 - DNA, 20 bp, Artificial Sequence
  Description of Artificial Sequence: Synthetic oligonucleotide
  Target: LAMA2; (+) strand; PAM type: NRG; PAM sequence: CAG
aatagacacatttttatctc

SEQ ID NO: 140310 - DNA, 20 bp, Artificial Sequence
  Description of Artificial Sequence: Synthetic oligonucleotide
  Target: LAMA2; (+) strand; PAM type: NRG; PAM sequence: GAG
tagacacatttttatctcca

SEQ ID NO: 140311 - DNA, 20 bp, Artificial Sequence
  Description of Artificial Sequence: Synthetic oligonucleotide
  Target: LAMA2; (+) strand; PAM type: NRG; PAM sequence: GAG
gacacatttttatctccaga

SEQ ID NO: 140312 - DNA, 20 bp, Artificial Sequence
  Description of Artificial Sequence: Synthetic oligonucleotide
  Target: LAMA2; (+) strand; PAM type: NRG; PAM sequence: TGG
tatctccagagagttactac

SEQ ID NO: 140313 - DNA, 20 bp, Artificial Sequence
  Description of Artificial Sequence: Synthetic oligonucleotide
  Target: LAMA2; (+) strand; PAM type: NRG; PAM sequence: TAG
tttgaaatcctgttttgtcc

SEQ ID NO: 140314 - DNA, 20 bp, Artificial Sequence
  Description of Artificial Sequence: Synthetic oligonucleotide
  Target: LAMA2; (+) strand; PAM type: NRG; PAM sequence: TGG
tcctgttttgtcctagacac

SEQ ID NO: 140315 - DNA, 20 bp, Artificial Sequence
  Description of Artificial Sequence: Synthetic oligonucleotide
  Target: LAMA2; (+) strand; PAM type: NRG; PAM sequence: TAG
attttacataaattatctta

SEQ ID NO: 140316 - DNA, 20 bp, Artificial Sequence
  Description of Artificial Sequence: Synthetic oligonucleotide
  Target: LAMA2; (+) strand; PAM type: NRG; PAM sequence: AAG
atagaacttttcaactccgt

SEQ ID NO: 140317 - DNA, 20 bp, Artificial Sequence
  Description of Artificial Sequence: Synthetic oligonucleotide
  Target: LAMA2; (+) strand; PAM type: NRG; PAM sequence: AAG
aacttttcaactccgtaaga

SEQ ID NO: 140318 - DNA, 20 bp, Artificial Sequence
  Description of Artificial Sequence: Synthetic oligonucleotide
  Target: LAMA2; (+) strand; PAM type: NRG; PAM sequence: TAG
aagaaagatactattataat

SEQ ID NO: 140319 - DNA, 20 bp, Artificial Sequence
  Description of Artificial Sequence: Synthetic oligonucleotide
  Target: LAMA2; (+) strand; PAM type: NRG; PAM sequence: CAG
aattagtacattttgtatca

SEQ ID NO: 140320 - DNA, 20 bp, Artificial Sequence
  Description of Artificial Sequence: Synthetic oligonucleotide
  Target: LAMA2; (+) strand; PAM type: NRG; PAM sequence: CAG
acaacttcctcaaaatgaca

SEQ ID NO: 140321 - DNA, 20 bp, Artificial Sequence
  Description of Artificial Sequence: Synthetic oligonucleotide
  Target: LAMA2; (+) strand; PAM type: NRG; PAM sequence: TAG
cttcctcaaaatgacacagt

SEQ ID NO: 140322 - DNA, 20 bp, Artificial Sequence
  Description of Artificial Sequence: Synthetic oligonucleotide
  Target: LAMA2; (+) strand; PAM type: NRG; PAM sequence: TAG
atgacacagttagaaaacaa

SEQ ID NO: 140323 - DNA, 20 bp, Artificial Sequence
  Description of Artificial Sequence: Synthetic oligonucleotide
  Target: LAMA2; (+) strand; PAM type: NRG; PAM sequence: GAG
gacacagttagaaaacaata

SEQ ID NO: 140324 - DNA, 20 bp, Artificial Sequence
  Description of Artificial Sequence: Synthetic oligonucleotide
  Target: LAMA2; (+) strand; PAM type: NRG; PAM sequence: AAG
gttagaaaacaatagagcac

SEQ ID NO: 140325 - DNA, 20 bp, Artificial Sequence
  Description of Artificial Sequence: Synthetic oligonucleotide
  Target: LAMA2; (+) strand; PAM type: NRG; PAM sequence: CAG
aatagagcacaagatgaatc

SEQ ID NO: 140326 - DNA, 20 bp, Artificial Sequence
  Description of Artificial Sequence: Synthetic oligonucleotide
  Target: LAMA2; (+) strand; PAM type: NRG; PAM sequence: AAG
tccagttctttctgatgtca

SEQ ID NO: 140327 - DNA, 20 bp, Artificial Sequence
  Description of Artificial Sequence: Synthetic oligonucleotide
  Target: LAMA2; (+) strand; PAM type: NRG; PAM sequence: CAG
aaagcctgccgtgtatactc

SEQ ID NO: 140328 - DNA, 20 bp, Artificial Sequence
  Description of Artificial Sequence: Synthetic oligonucleotide
  Target: LAMA2; (+) strand; PAM type: NRG; PAM sequence: TAG
actccagatgacctgaacct

SEQ ID NO: 140329 - DNA, 20 bp, Artificial Sequence
  Description of Artificial Sequence: Synthetic oligonucleotide
  Target: LAMA2; (+) strand; PAM type: NRG; PAM sequence: GAG
tccagatgacctgaacctta

SEQ ID NO: 140330 - DNA, 20 bp, Artificial Sequence
  Description of Artificial Sequence: Synthetic oligonucleotide
  Target: LAMA2; (+) strand; PAM type: NRG; PAM sequence: AAG
ctgaaccttagagtaactaa

SEQ ID NO: 140331 - DNA, 20 bp, Artificial Sequence
  Description of Artificial Sequence: Synthetic oligonucleotide
  Target: LAMA2; (+) strand; PAM type: NRG; PAM sequence: CAG
cttagagtaactaaaagcat

SEQ ID NO: 140332 - DNA, 20 bp, Artificial Sequence
  Description of Artificial Sequence: Synthetic oligonucleotide
  Target: LAMA2; (+) strand; PAM type: NRG; PAM sequence: AGG
ttagagtaactaaaagcatc

SEQ ID NO: 140333 - DNA, 20 bp, Artificial Sequence
  Description of Artificial Sequence: Synthetic oligonucleotide
  Target: LAMA2; (+) strand; PAM type: NRG; PAM sequence: GGG
tagagtaactaaaagcatca

SEQ ID NO: 140334 - DNA, 20 bp, Artificial Sequence
  Description of Artificial Sequence: Synthetic oligonucleotide
  Target: LAMA2; (+) strand; PAM type: NRG; PAM sequence: GAG
cttctctgatatataattgt

SEQ ID NO: 140335 - DNA, 20 bp, Artificial Sequence
  Description of Artificial Sequence: Synthetic oligonucleotide
  Target: LAMA2; (+) strand; PAM type: NRG; PAM sequence: AAG
gtgagaatctcactaaaaac

SEQ ID NO: 140336 - DNA, 20 bp, Artificial Sequence
  Description of Artificial Sequence: Synthetic oligonucleotide
  Target: LAMA2; (+) strand; PAM type: NRG; PAM sequence: CAG
aaaacaagattaaattacta

SEQ ID NO: 140337 - DNA, 20 bp, Artificial Sequence
  Description of Artificial Sequence: Synthetic oligonucleotide
  Target: LAMA2; (+) strand; PAM type: NRG; PAM sequence: GAG
aacaagattaaattactaca

SEQ ID NO: 140338 - DNA, 20 bp, Artificial Sequence
  Description of Artificial Sequence: Synthetic oligonucleotide
  Target: LAMA2; (+) strand; PAM type: NRG; PAM sequence: AGG
acaagattaaattactacag

SEQ ID NO: 140339 - DNA, 20 bp, Artificial Sequence
  Description of Artificial Sequence: Synthetic oligonucleotide
  Target: LAMA2; (+) strand; PAM type: NRG; PAM sequence: GAG
aagattaaattactacagag

SEQ ID NO: 140340 - DNA, 20 bp, Artificial Sequence
  Description of Artificial Sequence: Synthetic oligonucleotide
  Target: LAMA2; (+) strand; PAM type: NRG; PAM sequence: TAG
aaattactacagaggagtct

SEQ ID NO: 140341 - DNA, 20 bp, Artificial Sequence
  Description of Artificial Sequence: Synthetic oligonucleotide
  Target: LAMA2; (+) strand; PAM type: NRG; PAM sequence: AAG
ttagaatttaaaactctaaa

SEQ ID NO: 140342 - DNA, 20 bp, Artificial Sequence
  Description of Artificial Sequence: Synthetic oligonucleotide
  Target: LAMA2; (+) strand; PAM type: NRG; PAM sequence: TAG
aaactctaaaaagtgaaact

SEQ ID NO: 140343 - DNA, 20 bp, Artificial Sequence
  Description of Artificial Sequence: Synthetic oligonucleotide
  Target: LAMA2; (+) strand; PAM type: NRG; PAM sequence: AGG
aactctaaaaagtgaaactt

SEQ ID NO: 140344 - DNA, 20 bp, Artificial Sequence
  Description of Artificial Sequence: Synthetic oligonucleotide
  Target: LAMA2; (+) strand; PAM type: NRG; PAM sequence: TGG
taacttctcatatacatgta

SEQ ID NO: 140345 - DNA, 20 bp, Artificial Sequence
  Description of Artificial Sequence: Synthetic oligonucleotide
  Target: LAMA2; (+) strand; PAM type: NRG; PAM sequence: TGG
atggatgtaacctgaaatgc

SEQ ID NO: 140346 - DNA, 20 bp, Artificial Sequence
  Description of Artificial Sequence: Synthetic oligonucleotide
  Target: LAMA2; (+) strand; PAM type: NRG; PAM sequence: GGG
tggatgtaacctgaaatgct

SEQ ID NO: 140347 - DNA, 20 bp, Artificial Sequence
  Description of Artificial Sequence: Synthetic oligonucleotide
  Target: LAMA2; (+) strand; PAM type: NRG; PAM sequence: CAG
atatgaacttacaaatttac

SEQ ID NO: 140348 - DNA, 20 bp, Artificial Sequence
  Description of Artificial Sequence: Synthetic oligonucleotide
  Target: LAMA2; (+) strand; PAM type: NRG; PAM sequence: AAG
aatcaaactaccccatcaaa

SEQ ID NO: 140349 - DNA, 20 bp, Artificial Sequence
  Description of Artificial Sequence: Synthetic oligonucleotide
  Target: LAMA2; (+) strand; PAM type: NRG; PAM sequence: TGG
caaactaccccatcaaaaag

SEQ ID NO: 140350 - DNA, 20 bp, Artificial Sequence
  Description of Artificial Sequence: Synthetic oligonucleotide
  Target: LAMA2; (+) strand; PAM type: NRG; PAM sequence: GGG
aaactaccccatcaaaaagt

SEQ ID NO: 140351 - DNA, 20 bp, Artificial Sequence
  Description of Artificial Sequence: Synthetic oligonucleotide
  Target: LAMA2; (+) strand; PAM type: NRG; PAM sequence: AAG
accccatcaaaaagtgggca

SEQ ID NO: 140352 - DNA, 20 bp, Artificial Sequence
  Description of Artificial Sequence: Synthetic oligonucleotide
  Target: LAMA2; (+) strand; PAM type: NRG; PAM sequence: AGG
ccccatcaaaaagtgggcaa

SEQ ID NO: 140353 - DNA, 20 bp, Artificial Sequence
  Description of Artificial Sequence: Synthetic oligonucleotide
  Target: LAMA2; (+) strand; PAM type: NRG; PAM sequence: AAG
aaaagtgggcaaaggatatg

SEQ ID NO: 140354 - DNA, 20 bp, Artificial Sequence
  Description of Artificial Sequence: Synthetic oligonucleotide
  Target: LAMA2; (+) strand; PAM type: NRG; PAM sequence: GAG
aagtgggcaaaggatatgaa

SEQ ID NO: 140355 - DNA, 20 bp, Artificial Sequence
  Description of Artificial Sequence: Synthetic oligonucleotide
  Target: LAMA2; (+) strand; PAM type: NRG; PAM sequence: AAG
tatgaagagacacttctcaa

SEQ ID NO: 140356 - DNA, 20 bp, Artificial Sequence
  Description of Artificial Sequence: Synthetic oligonucleotide
  Target: LAMA2; (+) strand; PAM type: NRG; PAM sequence: AAG
gaagagacacttctcaaaag

SEQ ID NO: 140357 - DNA, 20 bp, Artificial Sequence
  Description of Artificial Sequence: Synthetic oligonucleotide
  Target: LAMA2; (+) strand; PAM type: NRG; PAM sequence: CAG
ctcaaaagaagacatttatg

SEQ ID NO: 140358 - DNA, 20 bp, Artificial Sequence
  Description of Artificial Sequence: Synthetic oligonucleotide
  Target: LAMA2; (+) strand; PAM type: NRG; PAM sequence: CAG
gaagacatttatgcagccaa

SEQ ID NO: 140359 - DNA, 20 bp, Artificial Sequence
  Description of Artificial Sequence: Synthetic oligonucleotide
  Target: LAMA2; (+) strand; PAM type: NRG; PAM sequence: TGG
gaaaaaatgctcgtcatcac

SEQ ID NO: 140360 - DNA, 20 bp, Artificial Sequence
  Description of Artificial Sequence: Synthetic oligonucleotide
  Target: LAMA2; (+) strand; PAM type: NRG; PAM sequence: CAG
tgctcgtcatcactggcctt

SEQ ID NO: 140361 - DNA, 20 bp, Artificial Sequence
  Description of Artificial Sequence: Synthetic oligonucleotide
  Target: LAMA2; (+) strand; PAM type: NRG; PAM sequence: GAG
ctcgtcatcactggccttca

SEQ ID NO: 140362 - DNA, 20 bp, Artificial Sequence
  Description of Artificial Sequence: Synthetic oligonucleotide
  Target: LAMA2; (+) strand; PAM type: NRG; PAM sequence: AAG
aaatgcaaatcaaaaccaca

SEQ ID NO: 140363 - DNA, 20 bp, Artificial Sequence
  Description of Artificial Sequence: Synthetic oligonucleotide
  Target: LAMA2; (+) strand; PAM type: NRG; PAM sequence: GAG
atgcaaatcaaaaccacaaa

SEQ ID NO: 140364 - DNA, 20 bp, Artificial Sequence
  Description of Artificial Sequence: Synthetic oligonucleotide
  Target: LAMA2; (+) strand; PAM type: NRG; PAM sequence: CAG
aaagagataccatcccacac

SEQ ID NO: 140365 - DNA, 20 bp, Artificial Sequence
  Description of Artificial Sequence: Synthetic oligonucleotide
  Target: LAMA2; (+) strand; PAM type: NRG; PAM sequence: TAG
agataccatcccacaccagt

SEQ ID NO: 140366 - DNA, 20 bp, Artificial Sequence
  Description of Artificial Sequence: Synthetic oligonucleotide
  Target: LAMA2; (+) strand; PAM type: NRG; PAM sequence: TGG
ccatcccacaccagttagaa

SEQ ID NO: 140367 - DNA, 20 bp, Artificial Sequence
  Description of Artificial Sequence: Synthetic oligonucleotide
  Target: LAMA2; (+) strand; PAM type: NRG; PAM sequence: AAG
ttagaatggcgatcattaaa

SEQ ID NO: 140368 - DNA, 20 bp, Artificial Sequence
  Description of Artificial Sequence: Synthetic oligonucleotide
  Target: LAMA2; (+) strand; PAM type: NRG; PAM sequence: CAG
aatggcgatcattaaaaagt

SEQ ID NO: 140369 - DNA, 20 bp, Artificial Sequence
  Description of Artificial Sequence: Synthetic oligonucleotide
  Target: LAMA2; (+) strand; PAM type: NRG; PAM sequence: AGG
atggcgatcattaaaaagtc

SEQ ID NO: 140370 - DNA, 20 bp, Artificial Sequence
  Description of Artificial Sequence: Synthetic oligonucleotide
  Target: LAMA2; (+) strand; PAM type: NRG; PAM sequence: CAG
attaaaaagtcaggaaacaa

SEQ ID NO: 140371 - DNA, 20 bp, Artificial Sequence
  Description of Artificial Sequence: Synthetic oligonucleotide
  Target: LAMA2; (+) strand; PAM type: NRG; PAM sequence: AGG
ttaaaaagtcaggaaacaac

SEQ ID NO: 140372 - DNA, 20 bp, Artificial Sequence
  Description of Artificial Sequence: Synthetic oligonucleotide
  Target: LAMA2; (+) strand; PAM type: NRG; PAM sequence: TGG
agtcaggaaacaacaggtgc

SEQ ID NO: 140373 - DNA, 20 bp, Artificial Sequence
  Description of Artificial Sequence: Synthetic oligonucleotide
  Target: LAMA2; (+) strand; PAM type: NRG; PAM sequence: GAG
tcaggaaacaacaggtgctg

SEQ ID NO: 140374 - DNA, 20 bp, Artificial Sequence
  Description of Artificial Sequence: Synthetic oligonucleotide
  Target: LAMA2; (+) strand; PAM type: NRG; PAM sequence: GAG
aggaaacaacaggtgctgga

SEQ ID NO: 140375 - DNA, 20 bp, Artificial Sequence
  Description of Artificial Sequence: Synthetic oligonucleotide
  Target: LAMA2; (+) strand; PAM type: NRG; PAM sequence: AGG
ggaaacaacaggtgctggag

SEQ ID NO: 140376 - DNA, 20 bp, Artificial Sequence
  Description of Artificial Sequence: Synthetic oligonucleotide
  Target: LAMA2; (+) strand; PAM type: NRG; PAM sequence: TGG
aacaggtgctggagaggatg

SEQ ID NO: 140377 - DNA, 20 bp, Artificial Sequence
  Description of Artificial Sequence: Synthetic oligonucleotide
  Target: LAMA2; (+) strand; PAM type: NRG; PAM sequence: GAG
caggtgctggagaggatgtg

SEQ ID NO: 140378 - DNA, 20 bp, Artificial Sequence
  Description of Artificial Sequence: Synthetic oligonucleotide
  Target: LAMA2; (+) strand; PAM type: NRG; PAM sequence: TAG
ctggagaggatgtggagaaa

SEQ ID NO: 140379 - DNA, 20 bp, Artificial Sequence
  Description of Artificial Sequence: Synthetic oligonucleotide
  Target: LAMA2; (+) strand; PAM type: NRG; PAM sequence: AGG
tggagaggatgtggagaaat

SEQ ID NO: 140380 - DNA, 20 bp, Artificial Sequence
  Description of Artificial Sequence: Synthetic oligonucleotide
  Target: LAMA2; (+) strand; PAM type: NRG; PAM sequence: TGG
taggaatgcttttacaccgt

SEQ ID NO: 140381 - DNA, 20 bp, Artificial Sequence
  Description of Artificial Sequence: Synthetic oligonucleotide
  Target: LAMA2; (+) strand; PAM type: NRG; PAM sequence: CGG
gaatgcttttacaccgttgg

SEQ ID NO: 140382 - DNA, 20 bp, Artificial Sequence
  Description of Artificial Sequence: Synthetic oligonucleotide
  Target: LAMA2; (+) strand; PAM type: NRG; PAM sequence: GGG
aatgcttttacaccgttggc

SEQ ID NO: 140383 - DNA, 20 bp, Artificial Sequence
  Description of Artificial Sequence: Synthetic oligonucleotide
  Target: LAMA2; (+) strand; PAM type: NRG; PAM sequence: TAG
ccgttggcgggactgtaaac

SEQ ID NO: 140384 - DNA, 20 bp, Artificial Sequence
  Description of Artificial Sequence: Synthetic oligonucleotide
  Target: LAMA2; (+) strand; PAM type: NRG; PAM sequence: TGG
gtaaactagttaaaccattg

SEQ ID NO: 140385 - DNA, 20 bp, Artificial Sequence
  Description of Artificial Sequence: Synthetic oligonucleotide
  Target: LAMA2; (+) strand; PAM type: NRG; PAM sequence: AAG
aactagttaaaccattgtgg

SEQ ID NO: 140386 - DNA, 20 bp, Artificial Sequence
  Description of Artificial Sequence: Synthetic oligonucleotide
  Target: LAMA2; (+) strand; PAM type: NRG; PAM sequence: CAG
agttaaaccattgtggaaga

SEQ ID NO: 140387 - DNA, 20 bp, Artificial Sequence
  Description of Artificial Sequence: Synthetic oligonucleotide
  Target: LAMA2; (+) strand; PAM type: NRG; PAM sequence: TGG
aaccattgtggaagacagtg

SEQ ID NO: 140388 - DNA, 20 bp, Artificial Sequence
  Description of Artificial Sequence: Synthetic oligonucleotide
  Target: LAMA2; (+) strand; PAM type: NRG; PAM sequence: AAG
agacagtgtggcgattcctc

SEQ ID NO: 140389 - DNA, 20 bp, Artificial Sequence
  Description of Artificial Sequence: Synthetic oligonucleotide
  Target: LAMA2; (+) strand; PAM type: NRG; PAM sequence: AGG
gacagtgtggcgattcctca

SEQ ID NO: 140390 - DNA, 20 bp, Artificial Sequence
  Description of Artificial Sequence: Synthetic oligonucleotide
  Target: LAMA2; (+) strand; PAM type: NRG; PAM sequence: TAG
gtggcgattcctcaaggatc

SEQ ID NO: 140391 - DNA, 20 bp, Artificial Sequence
  Description of Artificial Sequence: Synthetic oligonucleotide
  Target: LAMA2; (+) strand; PAM type: NRG; PAM sequence: TAG
attcctcaaggatctagaac

SEQ ID NO: 140392 - DNA, 20 bp, Artificial Sequence
  Description of Artificial Sequence: Synthetic oligonucleotide
  Target: LAMA2; (+) strand; PAM type: NRG; PAM sequence: CAG
actagaaataccatttgacc

SEQ ID NO: 140393 - DNA, 20 bp, Artificial Sequence
  Description of Artificial Sequence: Synthetic oligonucleotide
  Target: LAMA2; (+) strand; PAM type: NRG; PAM sequence: TGG
tgacccagccatcccattac

SEQ ID NO: 140394 - DNA, 20 bp, Artificial Sequence
  Description of Artificial Sequence: Synthetic oligonucleotide
  Target: LAMA2; (+) strand; PAM type: NRG; PAM sequence: GGG
gacccagccatcccattact

SEQ ID NO: 140395 - DNA, 20 bp, Artificial Sequence
  Description of Artificial Sequence: Synthetic oligonucleotide
  Target: LAMA2; (+) strand; PAM type: NRG; PAM sequence: AAG
cattactgggtatataccca

SEQ ID NO: 140396 - DNA, 20 bp, Artificial Sequence
  Description of Artificial Sequence: Synthetic oligonucleotide
  Target: LAMA2; (+) strand; PAM type: NRG; PAM sequence: AGG
attactgggtatatacccaa

SEQ ID NO: 140397 - DNA, 20 bp, Artificial Sequence
  Description of Artificial Sequence: Synthetic oligonucleotide
  Target: LAMA2; (+) strand; PAM type: NRG; PAM sequence: AAG
ttataaatcatgctgctata

SEQ ID NO: 140398 - DNA, 20 bp, Artificial Sequence
  Description of Artificial Sequence: Synthetic oligonucleotide
  Target: LAMA2; (+) strand; PAM type: NRG; PAM sequence: TGG
atgcacacatatgtttattg

SEQ ID NO: 140399 - DNA, 20 bp, Artificial Sequence
  Description of Artificial Sequence: Synthetic oligonucleotide
  Target: LAMA2; (+) strand; PAM type: NRG; PAM sequence: TAG
tattgtggcactattcacaa

SEQ ID NO: 140400 - DNA, 20 bp, Artificial Sequence
  Description of Artificial Sequence: Synthetic oligonucleotide
  Target: LAMA2; (+) strand; PAM type: NRG; PAM sequence: AAG
tggcactattcacaatagca

SEQ ID NO: 140401 - DNA, 20 bp, Artificial Sequence
  Description of Artificial Sequence: Synthetic oligonucleotide
  Target: LAMA2; (+) strand; PAM type: NRG; PAM sequence: TGG
tattcacaatagcaaagact

SEQ ID NO: 140402 - DNA, 20 bp, Artificial Sequence
  Description of Artificial Sequence: Synthetic oligonucleotide
  Target: LAMA2; (+) strand; PAM type: NRG; PAM sequence: TAG
acccaaatgtccatcaatga

SEQ ID NO: 140403 - DNA, 20 bp, Artificial Sequence
  Description of Artificial Sequence: Synthetic oligonucleotide
  Target: LAMA2; (+) strand; PAM type: NRG; PAM sequence: TGG
aatgtccatcaatgatagac

SEQ ID NO: 140404 - DNA, 20 bp, Artificial Sequence
  Description of Artificial Sequence: Synthetic oligonucleotide
  Target: LAMA2; (+) strand; PAM type: NRG; PAM sequence: AAG
catcaatgatagactggttt

SEQ ID NO: 140405 - DNA, 20 bp, Artificial Sequence
  Description of Artificial Sequence: Synthetic oligonucleotide
  Target: LAMA2; (+) strand; PAM type: NRG; PAM sequence: TGG
tagactggtttaagaaaatg

SEQ ID NO: 140406 - DNA, 20 bp, Artificial Sequence
  Description of Artificial Sequence: Synthetic oligonucleotide
  Target: LAMA2; (+) strand; PAM type: NRG; PAM sequence: TGG
aatgtggcacatatatacca

SEQ ID NO: 140407 - DNA, 20 bp, Artificial Sequence
  Description of Artificial Sequence: Synthetic oligonucleotide
  Target: LAMA2; (+) strand; PAM type: NRG; PAM sequence: TAG
atataccatggaatactatg

SEQ ID NO: 140408 - DNA, 20 bp, Artificial Sequence
  Description of Artificial Sequence: Synthetic oligonucleotide
  Target: LAMA2; (+) strand; PAM type: NRG; PAM sequence: AAG
ctatgtagccataaaaaatg

SEQ ID NO: 140409 - DNA, 20 bp, Artificial Sequence
  Description of Artificial Sequence: Synthetic oligonucleotide
  Target: LAMA2; (+) strand; PAM type: NRG; PAM sequence: GAG
atgtagccataaaaaatgaa

SEQ ID NO: 140410 - DNA, 20 bp, Artificial Sequence
  Description of Artificial Sequence: Synthetic oligonucleotide
  Target: LAMA2; (+) strand; PAM type: NRG; PAM sequence: TAG
tgaagagttcatgtcctttg

SEQ ID NO: 140411 - DNA, 20 bp, Artificial Sequence
  Description of Artificial Sequence: Synthetic oligonucleotide
  Target: LAMA2; (+) strand; PAM type: NRG; PAM sequence: AGG
gaagagttcatgtcctttgt

SEQ ID NO: 140412 - DNA, 20 bp, Artificial Sequence
  Description of Artificial Sequence: Synthetic oligonucleotide
  Target: LAMA2; (+) strand; PAM type: NRG; PAM sequence: GGG
aagagttcatgtcctttgta

SEQ ID NO: 140413 - DNA, 20 bp, Artificial Sequence
  Description of Artificial Sequence: Synthetic oligonucleotide
  Target: LAMA2; (+) strand; PAM type: NRG; PAM sequence: TGG
tcatgtcctttgtagggata

SEQ ID NO: 140414 - DNA, 20 bp, Artificial Sequence
  Description of Artificial Sequence: Synthetic oligonucleotide
  Target: LAMA2; (+) strand; PAM type: NRG; PAM sequence: AAG
cctttgtagggatatggatg

SEQ ID NO: 140415 - DNA, 20 bp, Artificial Sequence
  Description of Artificial Sequence: Synthetic oligonucleotide
  Target: LAMA2; (+) strand; PAM type: NRG; PAM sequence: TGG
tgtagggatatggatgaagc

SEQ ID NO: 140416 - DNA, 20 bp, Artificial Sequence
  Description of Artificial Sequence: Synthetic oligonucleotide
  Target: LAMA2; (+) strand; PAM type: NRG; PAM sequence: CAG
aagctggaaaccatcattct

SEQ ID NO: 140417 - DNA, 20 bp, Artificial Sequence
  Description of Artificial Sequence: Synthetic oligonucleotide
  Target: LAMA2; (+) strand; PAM type: NRG; PAM sequence: TAG
ccatcattctcagcaaacta

SEQ ID NO: 140418 - DNA, 20 bp, Artificial Sequence
  Description of Artificial Sequence: Synthetic oligonucleotide
  Target: LAMA2; (+) strand; PAM type: NRG; PAM sequence: AAG
cattctcagcaaactatagc

SEQ ID NO: 140419 - DNA, 20 bp, Artificial Sequence
  Description of Artificial Sequence: Synthetic oligonucleotide
  Target: LAMA2; (+) strand; PAM type: NRG; PAM sequence: AGG
attctcagcaaactatagca

SEQ ID NO: 140420 - DNA, 20 bp, Artificial Sequence
  Description of Artificial Sequence: Synthetic oligonucleotide
  Target: LAMA2; (+) strand; PAM type: NRG; PAM sequence: CAG
tcagcaaactatagcaagga

SEQ ID NO: 140421 - DNA, 20 bp, Artificial Sequence
  Description of Artificial Sequence: Synthetic oligonucleotide
  Target: LAMA2; (+) strand; PAM type: NRG; PAM sequence: AGG
cagcaaactatagcaaggac

SEQ ID NO: 140422 - DNA, 20 bp, Artificial Sequence
  Description of Artificial Sequence: Synthetic oligonucleotide
  Target: LAMA2; (+) strand; PAM type: NRG; PAM sequence: TAG
acaccgcatgttctcactca

SEQ ID NO: 140423 - DNA, 20 bp, Artificial Sequence
  Description of Artificial Sequence: Synthetic oligonucleotide
  Target: LAMA2; (+) strand; PAM type: NRG; PAM sequence: AGG
caccgcatgttctcactcat

SEQ ID NO: 140424 - DNA, 20 bp, Artificial Sequence
  Description of Artificial Sequence: Synthetic oligonucleotide
  Target: LAMA2; (+) strand; PAM type: NRG; PAM sequence: TGG
cgcatgttctcactcatagg

SEQ ID NO: 140425 - DNA, 20 bp, Artificial Sequence
  Description of Artificial Sequence: Synthetic oligonucleotide
  Target: LAMA2; (+) strand; PAM type: NRG; PAM sequence: GGG
gcatgttctcactcataggt

SEQ ID NO: 140426 - DNA, 20 bp, Artificial Sequence
  Description of Artificial Sequence: Synthetic oligonucleotide
  Target: LAMA2; (+) strand; PAM type: NRG; PAM sequence: GAG
ataggtgggaaacgaacaat

SEQ ID NO: 140427 - DNA, 20 bp, Artificial Sequence
  Description of Artificial Sequence: Synthetic oligonucleotide
  Target: LAMA2; (+) strand; PAM type: NRG; PAM sequence: TGG
aaacgaacaatgagaacact

SEQ ID NO: 140428 - DNA, 20 bp, Artificial Sequence
  Description of Artificial Sequence: Synthetic oligonucleotide
  Target: LAMA2; (+) strand; PAM type: NRG; PAM sequence: CAG
acaatgagaacacttggaca

SEQ ID NO: 140429 - DNA, 20 bp, Artificial Sequence
  Description of Artificial Sequence: Synthetic oligonucleotide
  Target: LAMA2; (+) strand; PAM type: NRG; PAM sequence: AGG
caatgagaacacttggacac

SEQ ID NO: 140430 - DNA, 20 bp, Artificial Sequence
  Description of Artificial Sequence: Synthetic oligonucleotide
  Target: LAMA2; (+) strand; PAM type: NRG; PAM sequence: GGG
aatgagaacacttggacaca

SEQ ID NO: 140431 - DNA, 20 bp, Artificial Sequence
  Description of Artificial Sequence: Synthetic oligonucleotide
  Target: LAMA2; (+) strand; PAM type: NRG; PAM sequence: TGG
gagaacacttggacacaggg

SEQ ID NO: 140432 - DNA, 20 bp, Artificial Sequence
  Description of Artificial Sequence: Synthetic oligonucleotide
  Target: LAMA2; (+) strand; PAM type: NRG; PAM sequence: GGG
agaacacttggacacagggt

SEQ ID NO: 140433 - DNA, 20 bp, Artificial Sequence
  Description of Artificial Sequence: Synthetic oligonucleotide
  Target: LAMA2; (+) strand; PAM type: NRG; PAM sequence: CGG
gggtgggtaacatcacacac

SEQ ID NO: 140434 - DNA, 20 bp, Artificial Sequence
  Description of Artificial Sequence: Synthetic oligonucleotide
  Target: LAMA2; (+) strand; PAM type: NRG; PAM sequence: GGG
ggtgggtaacatcacacacc

SEQ ID NO: 140435 - DNA, 20 bp, Artificial Sequence
  Description of Artificial Sequence: Synthetic oligonucleotide
  Target: LAMA2; (+) strand; PAM type: NRG; PAM sequence: GGG
gtgggtaacatcacacaccg

SEQ ID NO: 140436 - DNA, 20 bp, Artificial Sequence
  Description of Artificial Sequence: Synthetic oligonucleotide
  Target: LAMA2; (+) strand; PAM type: NRG; PAM sequence: TGG
tcacacaccggggcctgttg

SEQ ID NO: 140437 - DNA, 20 bp, Artificial Sequence
  Description of Artificial Sequence: Synthetic oligonucleotide
  Target: LAMA2; (+) strand; PAM type: NRG; PAM sequence: GGG
cacacaccggggcctgttgt

SEQ ID NO: 140438 - DNA, 20 bp, Artificial Sequence
  Description of Artificial Sequence: Synthetic oligonucleotide
  Target: LAMA2; (+) strand; PAM type: NRG; PAM sequence: GGG
acacaccggggcctgttgtg

SEQ ID NO: 140439 - DNA, 20 bp, Artificial Sequence
  Description of Artificial Sequence: Synthetic oligonucleotide
  Target: LAMA2; (+) strand; PAM type: NRG; PAM sequence: TGG
caccggggcctgttgtgggg

SEQ ID NO: 140440 - DNA, 20 bp, Artificial Sequence
  Description of Artificial Sequence: Synthetic oligonucleotide
  Target: LAMA2; (+) strand; PAM type: NRG; PAM sequence: GGG
accggggcctgttgtggggt

SEQ ID NO: 140441 - DNA, 20 bp, Artificial Sequence
  Description of Artificial Sequence: Synthetic oligonucleotide
  Target: LAMA2; (+) strand; PAM type: NRG; PAM sequence: GGG
ccggggcctgttgtggggtg

SEQ ID NO: 140442 - DNA, 20 bp, Artificial Sequence
  Description of Artificial Sequence: Synthetic oligonucleotide
  Target: LAMA2; (+) strand; PAM type: NRG; PAM sequence: GAG
ggcctgttgtggggtggggt

SEQ ID NO: 140443 - DNA, 20 bp, Artificial Sequence
  Description of Artificial Sequence: Synthetic oligonucleotide
  Target: LAMA2; (+) strand; PAM type: NRG; PAM sequence: AGG
gcctgttgtggggtggggtg

SEQ ID NO: 140444 - DNA, 20 bp, Artificial Sequence
  Description of Artificial Sequence: Synthetic oligonucleotide
  Target: LAMA2; (+) strand; PAM type: NRG; PAM sequence: GGG
cctgttgtggggtggggtga

SEQ ID NO: 140445 - DNA, 20 bp, Artificial Sequence
  Description of Artificial Sequence: Synthetic oligonucleotide
  Target: LAMA2; (+) strand; PAM type: NRG; PAM sequence: GGG
ctgttgtggggtggggtgag

SEQ ID NO: 140446 - DNA, 20 bp, Artificial Sequence
  Description of Artificial Sequence: Synthetic oligonucleotide
  Target: LAMA2; (+) strand; PAM type: NRG; PAM sequence: GGG
tgttgtggggtggggtgagg

SEQ ID NO: 140447 - DNA, 20 bp, Artificial Sequence
  Description of Artificial Sequence: Synthetic oligonucleotide
  Target: LAMA2; (+) strand; PAM type: NRG; PAM sequence: GGG
gttgtggggtggggtgaggg

SEQ ID NO: 140448 - DNA, 20 bp, Artificial Sequence
  Description of Artificial Sequence: Synthetic oligonucleotide
  Target: LAMA2; (+) strand; PAM type: NRG; PAM sequence: GAG
tgtggggtggggtgaggggg

SEQ ID NO: 140449 - DNA, 20 bp, Artificial Sequence
  Description of Artificial Sequence: Synthetic oligonucleotide
  Target: LAMA2; (+) strand; PAM type: NRG; PAM sequence: AGG
gtggggtggggtgagggggg

SEQ ID NO: 140450 - DNA, 20 bp, Artificial Sequence
  Description of Artificial Sequence: Synthetic oligonucleotide
  Target: LAMA2; (+) strand; PAM type: NRG; PAM sequence: GGG
tggggtggggtgagggggga

SEQ ID NO: 140451 - DNA, 20 bp, Artificial Sequence
  Description of Artificial Sequence: Synthetic oligonucleotide
  Target: LAMA2; (+) strand; PAM type: NRG; PAM sequence: TAG
gtggggtgaggggggaggga

SEQ ID NO: 140452 - DNA, 20 bp, Artificial Sequence
  Description of Artificial Sequence: Synthetic oligonucleotide
  Target: LAMA2; (+) strand; PAM type: NRG; PAM sequence: TAG
tgaggggggagggatagcat

SEQ ID NO: 140453 - DNA, 20 bp, Artificial Sequence
  Description of Artificial Sequence: Synthetic oligonucleotide
  Target: LAMA2; (+) strand; PAM type: NRG; PAM sequence: AGG
gaggggggagggatagcatt

SEQ ID NO: 140454 - DNA, 20 bp, Artificial Sequence
  Description of Artificial Sequence: Synthetic oligonucleotide
  Target: LAMA2; (+) strand; PAM type: NRG; PAM sequence: GAG
ggggggagggatagcattag

SEQ ID NO: 140455 - DNA, 20 bp, Artificial Sequence
  Description of Artificial Sequence: Synthetic oligonucleotide
  Target: LAMA2; (+) strand; PAM type: NRG; PAM sequence: GAG
atacacctaatgtaaatgac

SEQ ID NO: 140456 - DNA, 20 bp, Artificial Sequence
  Description of Artificial Sequence: Synthetic oligonucleotide
  Target: LAMA2; (+) strand; PAM type: NRG; PAM sequence: TGG
taatgtaaatgacgagttaa

SEQ ID NO: 140457 - DNA, 20 bp, Artificial Sequence
  Description of Artificial Sequence: Synthetic oligonucleotide
  Target: LAMA2; (+) strand; PAM type: NRG; PAM sequence: CAG
aaatgacgagttaatggatg

SEQ ID NO: 140458 - DNA, 20 bp, Artificial Sequence
  Description of Artificial Sequence: Synthetic oligonucleotide
  Target: LAMA2; (+) strand; PAM type: NRG; PAM sequence: TGG
atggatgcagcacaccaaca

SEQ ID NO: 140459 - DNA, 20 bp, Artificial Sequence
  Description of Artificial Sequence: Synthetic oligonucleotide
  Target: LAMA2; (+) strand; PAM type: NRG; PAM sequence: AAG
cacatgtatcctataactta

SEQ ID NO: 140460 - DNA, 20 bp, Artificial Sequence
  Description of Artificial Sequence: Synthetic oligonucleotide
  Target: LAMA2; (+) strand; PAM type: NRG; PAM sequence: AAG
ttaaagcataataataaaaa

SEQ ID NO: 140461 - DNA, 20 bp, Artificial Sequence
  Description of Artificial Sequence: Synthetic oligonucleotide
  Target: LAMA2; (+) strand; PAM type: NRG; PAM sequence: AAG
gattttttccaaatgttttg

SEQ ID NO: 140462 - DNA, 20 bp, Artificial Sequence
  Description of Artificial Sequence: Synthetic oligonucleotide
  Target: LAMA2; (+) strand; PAM type: NRG; PAM sequence: AAG
ttttccaaatgttttgaaga

SEQ ID NO: 140463 - DNA, 20 bp, Artificial Sequence
  Description of Artificial Sequence: Synthetic oligonucleotide
  Target: LAMA2; (+) strand; PAM type: NRG; PAM sequence: TGG
tattattaaatgctattcat

SEQ ID NO: 140464 - DNA, 20 bp, Artificial Sequence
  Description of Artificial Sequence: Synthetic oligonucleotide
  Target: LAMA2; (+) strand; PAM type: NRG; PAM sequence: AAG
tgctattcattggtcaattt

SEQ ID NO: 140465 - DNA, 20 bp, Artificial Sequence
  Description of Artificial Sequence: Synthetic oligonucleotide
  Target: LAMA2; (+) strand; PAM type: NRG; PAM sequence: AAG
aatttaagtaatcttctttt

SEQ ID NO: 140466 - DNA, 20 bp, Artificial Sequence
  Description of Artificial Sequence: Synthetic oligonucleotide
  Target: LAMA2; (+) strand; PAM type: NRG; PAM sequence: CAG
tcttcttttaagaaatcatt

SEQ ID NO: 140467 - DNA, 20 bp, Artificial Sequence
  Description of Artificial Sequence: Synthetic oligonucleotide
  Target: LAMA2; (+) strand; PAM type: NRG; PAM sequence: TAG
aagaaatcattcagaaattg

SEQ ID NO: 140468 - DNA, 20 bp, Artificial Sequence
  Description of Artificial Sequence: Synthetic oligonucleotide
  Target: LAMA2; (+) strand; PAM type: NRG; PAM sequence: AGG
agaaatcattcagaaattgt

SEQ ID NO: 140469 - DNA, 20 bp, Artificial Sequence
  Description of Artificial Sequence: Synthetic oligonucleotide
  Target: LAMA2; (+) strand; PAM type: NRG; PAM sequence: TGG
tccttgatcgtaattctttt

SEQ ID NO: 140470 - DNA, 20 bp, Artificial Sequence
  Description of Artificial Sequence: Synthetic oligonucleotide
  Target: LAMA2; (+) strand; PAM type: NRG; PAM sequence: GGG
ccttgatcgtaattcttttt

SEQ ID NO: 140471 - DNA, 20 bp, Artificial Sequence
  Description of Artificial Sequence: Synthetic oligonucleotide
  Target: LAMA2; (+) strand; PAM type: NRG; PAM sequence: TAG
ttgggtaatttcaattgcaa

SEQ ID NO: 140472 - DNA, 20 bp, Artificial Sequence
  Description of Artificial Sequence: Synthetic oligonucleotide
  Target: LAMA2; (+) strand; PAM type: NRG; PAM sequence: AGG
tgggtaatttcaattgcaat

SEQ ID NO: 140473 - DNA, 20 bp, Artificial Sequence
  Description of Artificial Sequence: Synthetic oligonucleotide
  Target: LAMA2; (+) strand; PAM type: NRG; PAM sequence: TGG
caataggttaaacactgtgc

SEQ ID NO: 140474 - DNA, 20 bp, Artificial Sequence
  Description of Artificial Sequence: Synthetic oligonucleotide
  Target: LAMA2; (+) strand; PAM type: NRG; PAM sequence: AAG
taggttaaacactgtgctgg

SEQ ID NO: 140475 - DNA, 20 bp, Artificial Sequence
  Description of Artificial Sequence: Synthetic oligonucleotide
  Target: LAMA2; (+) strand; PAM type: NRG; PAM sequence: GAG
aacactgtgctggaagattt

SEQ ID NO: 140476 - DNA, 20 bp, Artificial Sequence
  Description of Artificial Sequence: Synthetic oligonucleotide
  Target: LAMA2; (+) strand; PAM type: NRG; PAM sequence: AAG
ctgtgctggaagatttgaga

SEQ ID NO: 140477 - DNA, 20 bp, Artificial Sequence
  Description of Artificial Sequence: Synthetic oligonucleotide
  Target: LAMA2; (+) strand; PAM type: NRG; PAM sequence: TGG
gatttgagaaagattatcat

SEQ ID NO: 140478 - DNA, 20 bp, Artificial Sequence
  Description of Artificial Sequence: Synthetic oligonucleotide
  Target: LAMA2; (+) strand; PAM type: NRG; PAM sequence: CAG
cattttgtcaaaatcatttc

SEQ ID NO: 140479 - DNA, 20 bp, Artificial Sequence
  Description of Artificial Sequence: Synthetic oligonucleotide
  Target: LAMA2; (+) strand; PAM type: NRG; PAM sequence: AAG
tttgtcaaaatcatttccag

SEQ ID NO: 140480 - DNA, 20 bp, Artificial Sequence
  Description of Artificial Sequence: Synthetic oligonucleotide
  Target: LAMA2; (+) strand; PAM type: NRG; PAM sequence: AAG
aaaatcatttccagaagttt

SEQ ID NO: 140481 - DNA, 20 bp, Artificial Sequence
  Description of Artificial Sequence: Synthetic oligonucleotide
  Target: LAMA2; (+) strand; PAM type: NRG; PAM sequence: TAG
agtccttttttcttcatttt

SEQ ID NO: 140482 - DNA, 20 bp, Artificial Sequence
  Description of Artificial Sequence: Synthetic oligonucleotide
  Target: LAMA2; (+) strand; PAM type: NRG; PAM sequence: AAG
tgtgattcattgattttcct

SEQ ID NO: 140483 - DNA, 20 bp, Artificial Sequence
  Description of Artificial Sequence: Synthetic oligonucleotide
  Target: LAMA2; (+) strand; PAM type: NRG; PAM sequence: AGG
gtgattcattgattttccta

SEQ ID NO: 140484 - DNA, 20 bp, Artificial Sequence
  Description of Artificial Sequence: Synthetic oligonucleotide
  Target: LAMA2; (+) strand; PAM type: NRG; PAM sequence: AAG
attcattgattttcctaagg

SEQ ID NO: 140485 - DNA, 20 bp, Artificial Sequence
  Description of Artificial Sequence: Synthetic oligonucleotide
  Target: LAMA2; (+) strand; PAM type: NRG; PAM sequence: CAG
gaagaacatttaacttctct

SEQ ID NO: 140486 - DNA, 20 bp, Artificial Sequence
  Description of Artificial Sequence: Synthetic oligonucleotide
  Target: LAMA2; (+) strand; PAM type: NRG; PAM sequence: AAG
taacttctctcagtattcac

SEQ ID NO: 140487 - DNA, 20 bp, Artificial Sequence
  Description of Artificial Sequence: Synthetic oligonucleotide
  Target: LAMA2; (+) strand; PAM type: NRG; PAM sequence: AGG
aacttctctcagtattcaca

SEQ ID NO: 140488 - DNA, 20 bp, Artificial Sequence
  Description of Artificial Sequence: Synthetic oligonucleotide
  Target: LAMA2; (+) strand; PAM type: NRG; PAM sequence: AAG
gaatacctgcttgaatgttt

SEQ ID NO: 140489 - DNA, 20 bp, Artificial Sequence
  Description of Artificial Sequence: Synthetic oligonucleotide
  Target: LAMA2; (+) strand; PAM type: NRG; PAM sequence: CAG
cttgaatgtttaagtaccaa

SEQ ID NO: 140490 - DNA, 20 bp, Artificial Sequence
  Description of Artificial Sequence: Synthetic oligonucleotide
  Target: LAMA2; (+) strand; PAM type: NRG; PAM sequence: GAG
tgaatgtttaagtaccaaca

SEQ ID NO: 140491 - DNA, 20 bp, Artificial Sequence
  Description of Artificial Sequence: Synthetic oligonucleotide
  Target: LAMA2; (+) strand; PAM type: NRG; PAM sequence: AGG
gaatgtttaagtaccaacag

SEQ ID NO: 140492 - DNA, 20 bp, Artificial Sequence
  Description of Artificial Sequence: Synthetic oligonucleotide
  Target: LAMA2; (+) strand; PAM type: NRG; PAM sequence: AAG
aagtaccaacagaggattta

SEQ ID NO: 140493 - DNA, 20 bp, Artificial Sequence
  Description of Artificial Sequence: Synthetic oligonucleotide
  Target: LAMA2; (+) strand; PAM type: NRG; PAM sequence: GAG
ttaaagttcttattacttat

SEQ ID NO: 140494 - DNA, 20 bp, Artificial Sequence
  Description of Artificial Sequence: Synthetic oligonucleotide
  Target: LAMA2; (+) strand; PAM type: NRG; PAM sequence: TAG
attcaatactccaaatttta

SEQ ID NO: 140495 - DNA, 20 bp, Artificial Sequence
  Description of Artificial Sequence: Synthetic oligonucleotide
  Target: LAMA2; (+) strand; PAM type: NRG; PAM sequence: AAG
caatactccaaattttatag

SEQ ID NO: 140496 - DNA, 20 bp, Artificial Sequence
  Description of Artificial Sequence: Synthetic oligonucleotide
  Target: LAMA2; (+) strand; PAM type: NRG; PAM sequence: AAG
tactccaaattttatagaag

SEQ ID NO: 140497 - DNA, 20 bp, Artificial Sequence
  Description of Artificial Sequence: Synthetic oligonucleotide
  Target: LAMA2; (+) strand; PAM type: NRG; PAM sequence: AAG
ttatagaagaagcatttctg

SEQ ID NO: 140498 - DNA, 20 bp, Artificial Sequence
  Description of Artificial Sequence: Synthetic oligonucleotide
  Target: LAMA2; (+) strand; PAM type: NRG; PAM sequence: TAG
agaagaagcatttctgaaga

SEQ ID NO: 140499 - DNA, 20 bp, Artificial Sequence
  Description of Artificial Sequence: Synthetic oligonucleotide
  Target: LAMA2; (+) strand; PAM type: NRG; PAM sequence: AAG
catttctgaagatagaaaat

SEQ ID NO: 140500 - DNA, 20 bp, Artificial Sequence
  Description of Artificial Sequence: Synthetic oligonucleotide
  Target: LAMA2; (+) strand; PAM type: NRG; PAM sequence: AGG
atttctgaagatagaaaata

SEQ ID NO: 140501 - DNA, 20 bp, Artificial Sequence
  Description of Artificial Sequence: Synthetic oligonucleotide
  Target: LAMA2; (+) strand; PAM type: NRG; PAM sequence: AAG
taaggataatttttaaacac

SEQ ID NO: 140502 - DNA, 20 bp, Artificial Sequence
  Description of Artificial Sequence: Synthetic oligonucleotide
  Target: LAMA2; (+) strand; PAM type: NRG; PAM sequence: TGG
ttttcatatcattatcaatg

SEQ ID NO: 140503 - DNA, 20 bp, Artificial Sequence
  Description of Artificial Sequence: Synthetic oligonucleotide
  Target: LAMA2; (+) strand; PAM type: NRG; PAM sequence: CAG
tgctattaaaaaccatttat

SEQ ID NO: 140504 - DNA, 20 bp, Artificial Sequence
  Description of Artificial Sequence: Synthetic oligonucleotide
  Target: LAMA2; (+) strand; PAM type: NRG; PAM sequence: TGG
taattaatatgtcaaatatc

SEQ ID NO: 140505 - DNA, 20 bp, Artificial Sequence
  Description of Artificial Sequence: Synthetic oligonucleotide
  Target: LAMA2; (+) strand; PAM type: NRG; PAM sequence: GGG
aattaatatgtcaaatatct

SEQ ID NO: 140506 - DNA, 20 bp, Artificial Sequence
  Description of Artificial Sequence: Synthetic oligonucleotide
  Target: LAMA2; (+) strand; PAM type: NRG; PAM sequence: GAG
aatattcctaaaaacatatt

SEQ ID NO: 140507 - DNA, 20 bp, Artificial Sequence
  Description of Artificial Sequence: Synthetic oligonucleotide
  Target: LAMA2; (+) strand; PAM type: NRG; PAM sequence: CAG
aactttaacaaaacatttta

SEQ ID NO: 140508 - DNA, 20 bp, Artificial Sequence
  Description of Artificial Sequence: Synthetic oligonucleotide
  Target: LAMA2; (+) strand; PAM type: NRG; PAM sequence: TGG
ttaacaaaacattttacagt

SEQ ID NO: 140509 - DNA, 20 bp, Artificial Sequence
  Description of Artificial Sequence: Synthetic oligonucleotide
  Target: LAMA2; (+) strand; PAM type: NRG; PAM sequence: TAG
ttttacagttggaatgaaat

SEQ ID NO: 140510 - DNA, 20 bp, Artificial Sequence
  Description of Artificial Sequence: Synthetic oligonucleotide
  Target: LAMA2; (+) strand; PAM type: NRG; PAM sequence: TGG
agttggaatgaaattagtac

SEQ ID NO: 140511 - DNA, 20 bp, Artificial Sequence
  Description of Artificial Sequence: Synthetic oligonucleotide
  Target: LAMA2; (+) strand; PAM type: NRG; PAM sequence: TGG
tgaaattagtactggatgat

SEQ ID NO: 140512 - DNA, 20 bp, Artificial Sequence
  Description of Artificial Sequence: Synthetic oligonucleotide
  Target: LAMA2; (+) strand; PAM type: NRG; PAM sequence: AAG
gtactggatgattggattaa

SEQ ID NO: 140513 - DNA, 20 bp, Artificial Sequence
  Description of Artificial Sequence: Synthetic oligonucleotide
  Target: LAMA2; (+) strand; PAM type: NRG; PAM sequence: CAG
tggatgattggattaaaagc

SEQ ID NO: 140514 - DNA, 20 bp, Artificial Sequence
  Description of Artificial Sequence: Synthetic oligonucleotide
  Target: LAMA2; (+) strand; PAM type: NRG; PAM sequence: TAG
atgattggattaaaagccag

SEQ ID NO: 140515 - DNA, 20 bp, Artificial Sequence
  Description of Artificial Sequence: Synthetic oligonucleotide
  Target: LAMA2; (+) strand; PAM type: NRG; PAM sequence: TAG
tatattatcctatttaaatg

SEQ ID NO: 140516 - DNA, 20 bp, Artificial Sequence
  Description of Artificial Sequence: Synthetic oligonucleotide
  Target: LAMA2; (+) strand; PAM type: NRG; PAM sequence: AGG
atattatcctatttaaatgt

SEQ ID NO: 140517 - DNA, 20 bp, Artificial Sequence
  Description of Artificial Sequence: Synthetic oligonucleotide
  Target: LAMA2; (+) strand; PAM type: NRG; PAM sequence: AAG
atttaaatgtaggactatat

SEQ ID NO: 140518 - DNA, 20 bp, Artificial Sequence
  Description of Artificial Sequence: Synthetic oligonucleotide
  Target: LAMA2; (+) strand; PAM type: NRG; PAM sequence: TGG
tgtaggactatataagttat

SEQ ID NO: 140519 - DNA, 20 bp, Artificial Sequence
  Description of Artificial Sequence: Synthetic oligonucleotide
  Target: LAMA2; (+) strand; PAM type: NRG; PAM sequence: CAG
cgtaattttattactttttc

SEQ ID NO: 140520 - DNA, 20 bp, Artificial Sequence
  Description of Artificial Sequence: Synthetic oligonucleotide
  Target: LAMA2; (+) strand; PAM type: NRG; PAM sequence: AAG
tattactttttccagtacct

SEQ ID NO: 140521 - DNA, 20 bp, Artificial Sequence
  Description of Artificial Sequence: Synthetic oligonucleotide
  Target: LAMA2; (+) strand; PAM type: NRG; PAM sequence: TGG
tactttttccagtacctaag

SEQ ID NO: 140522 - DNA, 20 bp, Artificial Sequence
  Description of Artificial Sequence: Synthetic oligonucleotide
  Target: LAMA2; (+) strand; PAM type: NRG; PAM sequence: TGG
tccagtacctaagtggatac

SEQ ID NO: 140523 - DNA, 20 bp, Artificial Sequence
  Description of Artificial Sequence: Synthetic oligonucleotide
  Target: LAMA2; (+) strand; PAM type: NRG; PAM sequence: TGG
cctaagtggatactggtgac

SEQ ID NO: 140524 - DNA, 20 bp, Artificial Sequence
  Description of Artificial Sequence: Synthetic oligonucleotide
  Target: LAMA2; (+) strand; PAM type: NRG; PAM sequence: AAG
actggtgactggtatataat

SEQ ID NO: 140525 - DNA, 20 bp, Artificial Sequence
  Description of Artificial Sequence: Synthetic oligonucleotide
  Target: LAMA2; (+) strand; PAM type: NRG; PAM sequence: TAG
tataataagtaaccaatgaa

SEQ ID NO: 140526 - DNA, 20 bp, Artificial Sequence
  Description of Artificial Sequence: Synthetic oligonucleotide
  Target: LAMA2; (+) strand; PAM type: NRG; PAM sequence: GAG
tgctcaattttctcatctct

SEQ ID NO: 140527 - DNA, 20 bp, Artificial Sequence
  Description of Artificial Sequence: Synthetic oligonucleotide
  Target: LAMA2; (+) strand; PAM type: NRG; PAM sequence: CAG
actccactgcaataatatta

SEQ ID NO: 140528 - DNA, 20 bp, Artificial Sequence
  Description of Artificial Sequence: Synthetic oligonucleotide
  Target: LAMA2; (+) strand; PAM type: NRG; PAM sequence: AAG
acagatgttattccctgatt

SEQ ID NO: 140529 - DNA, 20 bp, Artificial Sequence
  Description of Artificial Sequence: Synthetic oligonucleotide
  Target: LAMA2; (+) strand; PAM type: NRG; PAM sequence: TAG
tgttattccctgattaagaa

SEQ ID NO: 140530 - DNA, 20 bp, Artificial Sequence
  Description of Artificial Sequence: Synthetic oligonucleotide
  Target: LAMA2; (+) strand; PAM type: NRG; PAM sequence: TGG
acccctcaaatgaaattttt

SEQ ID NO: 140531 - DNA, 20 bp, Artificial Sequence
  Description of Artificial Sequence: Synthetic oligonucleotide
  Target: LAMA2; (+) strand; PAM type: NRG; PAM sequence: AAG
aacgttttaaacatccaata

SEQ ID NO: 140532 - DNA, 20 bp, Artificial Sequence
  Description of Artificial Sequence: Synthetic oligonucleotide
  Target: LAMA2; (+) strand; PAM type: NRG; PAM sequence: TAG
ccaataaagatataacatgc

SEQ ID NO: 140533 - DNA, 20 bp, Artificial Sequence
  Description of Artificial Sequence: Synthetic oligonucleotide
  Target: LAMA2; (+) strand; PAM type: NRG; PAM sequence: TAG
gatataacatgctagttctc

SEQ ID NO: 140534 - DNA, 20 bp, Artificial Sequence
  Description of Artificial Sequence: Synthetic oligonucleotide
  Target: LAMA2; (+) strand; PAM type: NRG; PAM sequence: TAG
ataacatgctagttctctag

SEQ ID NO: 140535 - DNA, 20 bp, Artificial Sequence
  Description of Artificial Sequence: Synthetic oligonucleotide
  Target: LAMA2; (+) strand; PAM type: NRG; PAM sequence: AGG
taacatgctagttctctagt

SEQ ID NO: 140536 - DNA, 20 bp, Artificial Sequence
  Description of Artificial Sequence: Synthetic oligonucleotide
  Target: LAMA2; (+) strand; PAM type: NRG; PAM sequence: CAG
ctctagtaggcacccatttc

SEQ ID NO: 140537 - DNA, 20 bp, Artificial Sequence
  Description of Artificial Sequence: Synthetic oligonucleotide
  Target: LAMA2; (+) strand; PAM type: NRG; PAM sequence: AGG
tctagtaggcacccatttcc

SEQ ID NO: 140538 - DNA, 20 bp, Artificial Sequence
  Description of Artificial Sequence: Synthetic oligonucleotide
  Target: LAMA2; (+) strand; PAM type: NRG; PAM sequence: TGG
tctctattgattgcataatg

SEQ ID NO: 140539 - DNA, 20 bp, Artificial Sequence
  Description of Artificial Sequence: Synthetic oligonucleotide
  Target: LAMA2; (+) strand; PAM type: NRG; PAM sequence: GAG
tctattgattgcataatgtg

SEQ ID NO: 140540 - DNA, 20 bp, Artificial Sequence
  Description of Artificial Sequence: Synthetic oligonucleotide
  Target: LAMA2; (+) strand; PAM type: NRG; PAM sequence: GAG
taatgtggagattctgtttt

SEQ ID NO: 140541 - DNA, 20 bp, Artificial Sequence
  Description of Artificial Sequence: Synthetic oligonucleotide
  Target: LAMA2; (+) strand; PAM type: NRG; PAM sequence: AAG
ctgttttgagaatgcacata

SEQ ID NO: 140542 - DNA, 20 bp, Artificial Sequence
  Description of Artificial Sequence: Synthetic oligonucleotide
  Target: LAMA2; (+) strand; PAM type: NRG; PAM sequence: GAG
attctgaactgtaacaaaat

SEQ ID NO: 140543 - DNA, 20 bp, Artificial Sequence
  Description of Artificial Sequence: Synthetic oligonucleotide
  Target: LAMA2; (+) strand; PAM type: NRG; PAM sequence: CAG
atgagactctaatttattca

SEQ ID NO: 140544 - DNA, 20 bp, Artificial Sequence
  Description of Artificial Sequence: Synthetic oligonucleotide
  Target: LAMA2; (+) strand; PAM type: NRG; PAM sequence: GAG
gtctgtatttttgttttcct

SEQ ID NO: 140545 - DNA, 20 bp, Artificial Sequence
  Description of Artificial Sequence: Synthetic oligonucleotide
  Target: LAMA2; (+) strand; PAM type: NRG; PAM sequence: TAG
tgagaaaaatcttatcttta

SEQ ID NO: 140546 - DNA, 20 bp, Artificial Sequence
  Description of Artificial Sequence: Synthetic oligonucleotide
  Target: LAMA2; (+) strand; PAM type: NRG; PAM sequence: TGG
tcttatctttatagcctctc

SEQ ID NO: 140547 - DNA, 20 bp, Artificial Sequence
  Description of Artificial Sequence: Synthetic oligonucleotide
  Target: LAMA2; (+) strand; PAM type: NRG; PAM sequence: GAG
ctctggatattgaatatctt

SEQ ID NO: 140548 - DNA, 20 bp, Artificial Sequence
  Description of Artificial Sequence: Synthetic oligonucleotide
  Target: LAMA2; (+) strand; PAM type: NRG; PAM sequence: TAG
gatattgaatatcttgagac

SEQ ID NO: 140549 - DNA, 20 bp, Artificial Sequence
  Description of Artificial Sequence: Synthetic oligonucleotide
  Target: LAMA2; (+) strand; PAM type: NRG; PAM sequence: AAG
tgaactacatgcttatataa

SEQ ID NO: 140550 - DNA, 20 bp, Artificial Sequence
  Description of Artificial Sequence: Synthetic oligonucleotide
  Target: LAMA2; (+) strand; PAM type: NRG; PAM sequence: CAG
taaaagtacgtttcatcaaa

SEQ ID NO: 140551 - DNA, 20 bp, Artificial Sequence
  Description of Artificial Sequence: Synthetic oligonucleotide
  Target: LAMA2; (+) strand; PAM type: NRG; PAM sequence: CAG
tcattaccttttattatttt

SEQ ID NO: 140552 - DNA, 20 bp, Artificial Sequence
  Description of Artificial Sequence: Synthetic oligonucleotide
  Target: LAMA2; (+) strand; PAM type: NRG; PAM sequence: TGG
aattttattcttgaaacatt

SEQ ID NO: 140553 - DNA, 20 bp, Artificial Sequence
  Description of Artificial Sequence: Synthetic oligonucleotide
  Target: LAMA2; (+) strand; PAM type: NRG; PAM sequence: GAG
gttttcctcatatgtatctt

SEQ ID NO: 140554 - DNA, 20 bp, Artificial Sequence
  Description of Artificial Sequence: Synthetic oligonucleotide
  Target: LAMA2; (+) strand; PAM type: NRG; PAM sequence: TAG
tcatatgtatcttgagattt

SEQ ID NO: 140555 - DNA, 20 bp, Artificial Sequence
  Description of Artificial Sequence: Synthetic oligonucleotide
  Target: LAMA2; (+) strand; PAM type: NRG; PAM sequence: TAG
tgtatcttgagattttagtc

SEQ ID NO: 140556 - DNA, 20 bp, Artificial Sequence
  Description of Artificial Sequence: Synthetic oligonucleotide
  Target: LAMA2; (+) strand; PAM type: NRG; PAM sequence: AGG
gtatcttgagattttagtct

SEQ ID NO: 140557 - DNA, 20 bp, Artificial Sequence
  Description of Artificial Sequence: Synthetic oligonucleotide
  Target: LAMA2; (+) strand; PAM type: NRG; PAM sequence: AAG
tttagtctaggttttataac

SEQ ID NO: 140558 - DNA, 20 bp, Artificial Sequence
  Description of Artificial Sequence: Synthetic oligonucleotide
  Target: LAMA2; (+) strand; PAM type: NRG; PAM sequence: TAG
tctaggttttataacaagca

SEQ ID NO: 140559 - DNA, 20 bp, Artificial Sequence
  Description of Artificial Sequence: Synthetic oligonucleotide
  Target: LAMA2; (+) strand; PAM type: NRG; PAM sequence: CAG
aacaagcatagctatattta

SEQ ID NO: 140560 - DNA, 20 bp, Artificial Sequence
  Description of Artificial Sequence: Synthetic oligonucleotide
  Target: LAMA2; (+) strand; PAM type: NRG; PAM sequence: AAG
ttacagatattttttctata

SEQ ID NO: 140561 - DNA, 20 bp, Artificial Sequence
  Description of Artificial Sequence: Synthetic oligonucleotide
  Target: LAMA2; (+) strand; PAM type: NRG; PAM sequence: TAG
tttctataaagttttcaata

SEQ ID NO: 140562 - DNA, 20 bp, Artificial Sequence
  Description of Artificial Sequence: Synthetic oligonucleotide
  Target: LAMA2; (+) strand; PAM type: NRG; PAM sequence: TAG
tttttttatcttataaaaaa

SEQ ID NO: 140563 - DNA, 20 bp, Artificial Sequence
  Description of Artificial Sequence: Synthetic oligonucleotide
  Target: LAMA2; (+) strand; PAM type: NRG; PAM sequence: TGG
tagttaacaccattaacgtt

SEQ ID NO: 140564 - DNA, 20 bp, Artificial Sequence
  Description of Artificial Sequence: Synthetic oligonucleotide
  Target: LAMA2; (+) strand; PAM type: NRG; PAM sequence: TAG
cgtttggatttatttctgtc

SEQ ID NO: 140565 - DNA, 20 bp, Artificial Sequence
  Description of Artificial Sequence: Synthetic oligonucleotide
  Target: LAMA2; (+) strand; PAM type: NRG; PAM sequence: TGG
acaaatacatatatataaaa

SEQ ID NO: 140566 - DNA, 20 bp, Artificial Sequence
  Description of Artificial Sequence: Synthetic oligonucleotide
  Target: LAMA2; (+) strand; PAM type: NRG; PAM sequence: GGG
caaatacatatatataaaat

SEQ ID NO: 140567 - DNA, 20 bp, Artificial Sequence
  Description of Artificial Sequence: Synthetic oligonucleotide
  Target: LAMA2; (+) strand; PAM type: NRG; PAM sequence: CAG
atacatatatataaaatggg

SEQ ID NO: 140568 - DNA, 20 bp, Artificial Sequence
  Description of Artificial Sequence: Synthetic oligonucleotide
  Target: LAMA2; (+) strand; PAM type: NRG; PAM sequence: AAG
aaatgggcagcacactaata

SEQ ID NO: 140569 - DNA, 20 bp, Artificial Sequence
  Description of Artificial Sequence: Synthetic oligonucleotide
  Target: LAMA2; (+) strand; PAM type: NRG; PAM sequence: AAG
agataaaaataaactttata

SEQ ID NO: 140570 - DNA, 20 bp, Artificial Sequence
  Description of Artificial Sequence: Synthetic oligonucleotide
  Target: LAMA2; (+) strand; PAM type: NRG; PAM sequence: TGG
aaagttttacattttgtaac

SEQ ID NO: 140571 - DNA, 20 bp, Artificial Sequence
  Description of Artificial Sequence: Synthetic oligonucleotide
  Target: LAMA2; (+) strand; PAM type: NRG; PAM sequence: TAG
aacatccccatgtaactgtg

SEQ ID NO: 140572 - DNA, 20 bp, Artificial Sequence
  Description of Artificial Sequence: Synthetic oligonucleotide
  Target: LAMA2; (+) strand; PAM type: NRG; PAM sequence: TAG
actgtgtagtatttgaaact

SEQ ID NO: 140573 - DNA, 20 bp, Artificial Sequence
  Description of Artificial Sequence: Synthetic oligonucleotide
  Target: LAMA2; (+) strand; PAM type: NRG; PAM sequence: TAG
attgcaaatgtatgatctta

SEQ ID NO: 140574 - DNA, 20 bp, Artificial Sequence
  Description of Artificial Sequence: Synthetic oligonucleotide
  Target: LAMA2; (+) strand; PAM type: NRG; PAM sequence: AAG
tagactattttcctgcttcc

SEQ ID NO: 140575 - DNA, 20 bp, Artificial Sequence
  Description of Artificial Sequence: Synthetic oligonucleotide
  Target: LAMA2; (+) strand; PAM type: NRG; PAM sequence: TGG
tcctgcttccaagacttctt

SEQ ID NO: 140576 - DNA, 20 bp, Artificial Sequence
  Description of Artificial Sequence: Synthetic oligonucleotide
  Target: LAMA2; (+) strand; PAM type: NRG; PAM sequence: TGG
ccaagacttctttggaactg

SEQ ID NO: 140577 - DNA, 20 bp, Artificial Sequence
  Description of Artificial Sequence: Synthetic oligonucleotide
  Target: LAMA2; (+) strand; PAM type: NRG; PAM sequence: CAG
ctgtggactccctgaaatgc

SEQ ID NO: 140578 - DNA, 20 bp, Artificial Sequence
  Description of Artificial Sequence: Synthetic oligonucleotide
  Target: LAMA2; (+) strand; PAM type: NRG; PAM sequence: AGG
tgtggactccctgaaatgcc

SEQ ID NO: 140579 - DNA, 20 bp, Artificial Sequence
  Description of Artificial Sequence: Synthetic oligonucleotide
  Target: LAMA2; (+) strand; PAM type: NRG; PAM sequence: GGG
gtggactccctgaaatgcca

SEQ ID NO: 140580 - DNA, 20 bp, Artificial Sequence
  Description of Artificial Sequence: Synthetic oligonucleotide
  Target: LAMA2; (+) strand; PAM type: NRG; PAM sequence: AAG
ctgaaatgccagggtaacat

SEQ ID NO: 140581 - DNA, 20 bp, Artificial Sequence
  Description of Artificial Sequence: Synthetic oligonucleotide
  Target: LAMA2; (+) strand; PAM type: NRG; PAM sequence: GAG
aatgccagggtaacataagc

SEQ ID NO: 140582 - DNA, 20 bp, Artificial Sequence
  Description of Artificial Sequence: Synthetic oligonucleotide
  Target: LAMA2; (+) strand; PAM type: NRG; PAM sequence: CAG
ccagggtaacataagcgaga

SEQ ID NO: 140583 - DNA, 20 bp, Artificial Sequence
  Description of Artificial Sequence: Synthetic oligonucleotide
  Target: LAMA2; (+) strand; PAM type: NRG; PAM sequence: CAG
gtaacataagcgagacagaa

SEQ ID NO: 140584 - DNA, 20 bp, Artificial Sequence
  Description of Artificial Sequence: Synthetic oligonucleotide
  Target: LAMA2; (+) strand; PAM type: NRG; PAM sequence: TAG
cataagcgagacagaacagc

SEQ ID NO: 140585 - DNA, 20 bp, Artificial Sequence
  Description of Artificial Sequence: Synthetic oligonucleotide
  Target: LAMA2; (+) strand; PAM type: NRG; PAM sequence: CAG
aagcgagacagaacagctag

SEQ ID NO: 140586 - DNA, 20 bp, Artificial Sequence
  Description of Artificial Sequence: Synthetic oligonucleotide
  Target: LAMA2; (+) strand; PAM type: NRG; PAM sequence: CAG
cagaacagctagcagaacct

SEQ ID NO: 140587 - DNA, 20 bp, Artificial Sequence
  Description of Artificial Sequence: Synthetic oligonucleotide
  Target: LAMA2; (+) strand; PAM type: NRG; PAM sequence: AGG
agaacagctagcagaacctc

SEQ ID NO: 140588 - DNA, 20 bp, Artificial Sequence
  Description of Artificial Sequence: Synthetic oligonucleotide
  Target: LAMA2; (+) strand; PAM type: NRG; PAM sequence: GGG
gaacagctagcagaacctca

SEQ ID NO: 140589 - DNA, 20 bp, Artificial Sequence
  Description of Artificial Sequence: Synthetic oligonucleotide
  Target: LAMA2; (+) strand; PAM type: NRG; PAM sequence: TGG
agggaataccactgacttta

SEQ ID NO: 140590 - DNA, 20 bp, Artificial Sequence
  Description of Artificial Sequence: Synthetic oligonucleotide
  Target: LAMA2; (+) strand; PAM type: NRG; PAM sequence: CAG
taccactgactttatggtgt

SEQ ID NO: 140591 - DNA, 20 bp, Artificial Sequence
  Description of Artificial Sequence: Synthetic oligonucleotide
  Target: LAMA2; (+) strand; PAM type: NRG; PAM sequence: CAG
actgactttatggtgtcagc

SEQ ID NO: 140592 - DNA, 20 bp, Artificial Sequence
  Description of Artificial Sequence: Synthetic oligonucleotide
  Target: LAMA2; (+) strand; PAM type: NRG; PAM sequence: GAG
atggtgtcagccagtatcat

SEQ ID NO: 140593 - DNA, 20 bp, Artificial Sequence
  Description of Artificial Sequence: Synthetic oligonucleotide
  Target: LAMA2; (+) strand; PAM type: NRG; PAM sequence: GAG
ggtgtcagccagtatcatga

SEQ ID NO: 140594 - DNA, 20 bp, Artificial Sequence
  Description of Artificial Sequence: Synthetic oligonucleotide
  Target: LAMA2; (+) strand; PAM type: NRG; PAM sequence: AAG
acaatgttgcctttcaaacc

SEQ ID NO: 140595 - DNA, 20 bp, Artificial Sequence
  Description of Artificial Sequence: Synthetic oligonucleotide
  Target: LAMA2; (+) strand; PAM type: NRG; PAM sequence: AAG
caataattaaataaatttga

SEQ ID NO: 140596 - DNA, 20 bp, Artificial Sequence
  Description of Artificial Sequence: Synthetic oligonucleotide
  Target: LAMA2; (+) strand; PAM type: NRG; PAM sequence: TGG
ccaaatcaaatgactgttga

SEQ ID NO: 140597 - DNA, 20 bp, Artificial Sequence
  Description of Artificial Sequence: Synthetic oligonucleotide
  Target: LAMA2; (+) strand; PAM type: NRG; PAM sequence: GGG
caaatcaaatgactgttgat

SEQ ID NO: 140598 - DNA, 20 bp, Artificial Sequence
  Description of Artificial Sequence: Synthetic oligonucleotide
  Target: LAMA2; (+) strand; PAM type: NRG; PAM sequence: GGG
aaatcaaatgactgttgatg

SEQ ID NO: 140599 - DNA, 20 bp, Artificial Sequence
  Description of Artificial Sequence: Synthetic oligonucleotide
  Target: LAMA2; (+) strand; PAM type: NRG; PAM sequence: GGG
aatcaaatgactgttgatgg

SEQ ID NO: 140600 - DNA, 20 bp, Artificial Sequence
  Description of Artificial Sequence: Synthetic oligonucleotide
  Target: LAMA2; (+) strand; PAM type: NRG; PAM sequence: AAG
actgttgatgggggaattat

SEQ ID NO: 140601 - DNA, 20 bp, Artificial Sequence
  Description of Artificial Sequence: Synthetic oligonucleotide
  Target: LAMA2; (+) strand; PAM type: NRG; PAM sequence: TAG
tgatgggggaattataagaa

SEQ ID NO: 140602 - DNA, 20 bp, Artificial Sequence
  Description of Artificial Sequence: Synthetic oligonucleotide
  Target: LAMA2; (+) strand; PAM type: NRG; PAM sequence: TGG
gggggaattataagaataga

SEQ ID NO: 140603 - DNA, 20 bp, Artificial Sequence
  Description of Artificial Sequence: Synthetic oligonucleotide
  Target: LAMA2; (+) strand; PAM type: NRG; PAM sequence: GGG
ggggaattataagaatagat

SEQ ID NO: 140604 - DNA, 20 bp, Artificial Sequence
  Description of Artificial Sequence: Synthetic oligonucleotide
  Target: LAMA2; (+) strand; PAM type: NRG; PAM sequence: GAG
ggaattataagaatagatgg

SEQ ID NO: 140605 - DNA, 20 bp, Artificial Sequence
  Description of Artificial Sequence: Synthetic oligonucleotide
  Target: LAMA2; (+) strand; PAM type: NRG; PAM sequence: AAG
tataagaatagatgggagtg

SEQ ID NO: 140606 - DNA, 20 bp, Artificial Sequence
  Description of Artificial Sequence: Synthetic oligonucleotide
  Target: LAMA2; (+) strand; PAM type: NRG; PAM sequence: AAG
atagatgggagtgaagaccc

SEQ ID NO: 140607 - DNA, 20 bp, Artificial Sequence
  Description of Artificial Sequence: Synthetic oligonucleotide
  Target: LAMA2; (+) strand; PAM type: NRG; PAM sequence: AAG
ctgactttacctccaactca

SEQ ID NO: 140608 - DNA, 20 bp, Artificial Sequence
  Description of Artificial Sequence: Synthetic oligonucleotide
  Target: LAMA2; (+) strand; PAM type: NRG; PAM sequence: AAG
tttctctctgtgtttgttaa

SEQ ID NO: 140609 - DNA, 20 bp, Artificial Sequence
  Description of Artificial Sequence: Synthetic oligonucleotide
  Target: LAMA2; (+) strand; PAM type: NRG; PAM sequence: AAG
tgtgtttgttaaaagtttca

SEQ ID NO: 140610 - DNA, 20 bp, Artificial Sequence
  Description of Artificial Sequence: Synthetic oligonucleotide
  Target: LAMA2; (+) strand; PAM type: NRG; PAM sequence: TAG
gtttgttaaaagtttcaaag

SEQ ID NO: 140611 - DNA, 20 bp, Artificial Sequence
  Description of Artificial Sequence: Synthetic oligonucleotide
  Target: LAMA2; (+) strand; PAM type: NRG; PAM sequence: TAG
taaaagtttcaaagtagatg

SEQ ID NO: 140612 - DNA, 20 bp, Artificial Sequence
  Description of Artificial Sequence: Synthetic oligonucleotide
  Target: LAMA2; (+) strand; PAM type: NRG; PAM sequence: AGG
aaaagtttcaaagtagatgt

SEQ ID NO: 140613 - DNA, 20 bp, Artificial Sequence
  Description of Artificial Sequence: Synthetic oligonucleotide
  Target: LAMA2; (+) strand; PAM type: NRG; PAM sequence: AAG
tagatgtaggttctcttgcc

SEQ ID NO: 140614 - DNA, 20 bp, Artificial Sequence
  Description of Artificial Sequence: Synthetic oligonucleotide
  Target: LAMA2; (+) strand; PAM type: NRG; PAM sequence: AAG
actcgtgttctttccttttc

SEQ ID NO: 140615 - DNA, 20 bp, Artificial Sequence
  Description of Artificial Sequence: Synthetic oligonucleotide
  Target: LAMA2; (+) strand; PAM type: NRG; PAM sequence: AAG
ccttttcaagattacataaa

SEQ ID NO: 140616 - DNA, 20 bp, Artificial Sequence
  Description of Artificial Sequence: Synthetic oligonucleotide
  Target: LAMA2; (+) strand; PAM type: NRG; PAM sequence: TAG
tcaagattacataaaaagta

SEQ ID NO: 140617 - DNA, 20 bp, Artificial Sequence
  Description of Artificial Sequence: Synthetic oligonucleotide
  Target: LAMA2; (+) strand; PAM type: NRG; PAM sequence: TAG
attacataaaaagtatagct

SEQ ID NO: 140618 - DNA, 20 bp, Artificial Sequence
  Description of Artificial Sequence: Synthetic oligonucleotide
  Target: LAMA2; (+) strand; PAM type: NRG; PAM sequence: TGG
ttagatccaacgtatcaacc

SEQ ID NO: 140619 - DNA, 20 bp, Artificial Sequence
  Description of Artificial Sequence: Synthetic oligonucleotide
  Target: LAMA2; (+) strand; PAM type: NRG; PAM sequence: TAG
tccaacgtatcaacctggaa

SEQ ID NO: 140620 - DNA, 20 bp, Artificial Sequence
  Description of Artificial Sequence: Synthetic oligonucleotide
  Target: LAMA2; (+) strand; PAM type: NRG; PAM sequence: AGG
ccaacgtatcaacctggaat

SEQ ID NO: 140621 - DNA, 20 bp, Artificial Sequence
  Description of Artificial Sequence: Synthetic oligonucleotide
  Target: LAMA2; (+) strand; PAM type: NRG; PAM sequence: TAG
atatcactattgattataac

SEQ ID NO: 140622 - DNA, 20 bp, Artificial Sequence
  Description of Artificial Sequence: Synthetic oligonucleotide
  Target: LAMA2; (+) strand; PAM type: NRG; PAM sequence: GAG
gattataactagtatttaac

SEQ ID NO: 140623 - DNA, 20 bp, Artificial Sequence
  Description of Artificial Sequence: Synthetic oligonucleotide
  Target: LAMA2; (+) strand; PAM type: NRG; PAM sequence: AGG
attataactagtatttaacg

SEQ ID NO: 140624 - DNA, 20 bp, Artificial Sequence
  Description of Artificial Sequence: Synthetic oligonucleotide
  Target: LAMA2; (+) strand; PAM type: NRG; PAM sequence: TGG
gtatttaacgaggcttaata

SEQ ID NO: 140625 - DNA, 20 bp, Artificial Sequence
  Description of Artificial Sequence: Synthetic oligonucleotide
  Target: LAMA2; (+) strand; PAM type: NRG; PAM sequence: TAG
atatggaccaaacactgatc

SEQ ID NO: 140626 - DNA, 20 bp, Artificial Sequence
  Description of Artificial Sequence: Synthetic oligonucleotide
  Target: LAMA2; (+) strand; PAM type: NRG; PAM sequence: AGG
tatggaccaaacactgatct

SEQ ID NO: 140627 - DNA, 20 bp, Artificial Sequence
  Description of Artificial Sequence: Synthetic oligonucleotide
  Target: LAMA2; (+) strand; PAM type: NRG; PAM sequence: AAG
gtaatcctcacaactttatg

SEQ ID NO: 140628 - DNA, 20 bp, Artificial Sequence
  Description of Artificial Sequence: Synthetic oligonucleotide
  Target: LAMA2; (+) strand; PAM type: NRG; PAM sequence: AGG
taatcctcacaactttatga

SEQ ID NO: 140629 - DNA, 20 bp, Artificial Sequence
  Description of Artificial Sequence: Synthetic oligonucleotide
  Target: LAMA2; (+) strand; PAM type: NRG; PAM sequence: AAG
tcctcacaactttatgaagg

SEQ ID NO: 140630 - DNA, 20 bp, Artificial Sequence
  Description of Artificial Sequence: Synthetic oligonucleotide
  Target: LAMA2; (+) strand; PAM type: NRG; PAM sequence: GAG
tatgaaggaagtatatgtgt

SEQ ID NO: 140631 - DNA, 20 bp, Artificial Sequence
  Description of Artificial Sequence: Synthetic oligonucleotide
  Target: LAMA2; (+) strand; PAM type: NRG; PAM sequence: AAG
aggaagtatatgtgtgagaa

SEQ ID NO: 140632 - DNA, 20 bp, Artificial Sequence
  Description of Artificial Sequence: Synthetic oligonucleotide
  Target: LAMA2; (+) strand; PAM type: NRG; PAM sequence: TAG
tgagaaaagatacacacgat

SEQ ID NO: 140633 - DNA, 20 bp, Artificial Sequence
  Description of Artificial Sequence: Synthetic oligonucleotide
  Target: LAMA2; (+) strand; PAM type: NRG; PAM sequence: GAG
gatacacacgattagatttt

SEQ ID NO: 140634 - DNA, 20 bp, Artificial Sequence
  Description of Artificial Sequence: Synthetic oligonucleotide
  Target: LAMA2; (+) strand; PAM type: NRG; PAM sequence: GAG
tacacacgattagattttga

SEQ ID NO: 140635 - DNA, 20 bp, Artificial Sequence
  Description of Artificial Sequence: Synthetic oligonucleotide
  Target: LAMA2; (+) strand; PAM type: NRG; PAM sequence: CAG
cacgattagattttgagagc

SEQ ID NO: 140636 - DNA, 20 bp, Artificial Sequence
  Description of Artificial Sequence: Synthetic oligonucleotide
  Target: LAMA2; (+) strand; PAM type: NRG; PAM sequence: CAG
agccagtgcaaactgcaccg

SEQ ID NO: 140637 - DNA, 20 bp, Artificial Sequence
  Description of Artificial Sequence: Synthetic oligonucleotide
  Target: LAMA2; (+) strand; PAM type: NRG; PAM sequence: AGG
gccagtgcaaactgcaccgc

SEQ ID NO: 140638 - DNA, 20 bp, Artificial Sequence
  Description of Artificial Sequence: Synthetic oligonucleotide
  Target: LAMA2; (+) strand; PAM type: NRG; PAM sequence: AAG
accactctatattaacacct

SEQ ID NO: 140639 - DNA, 20 bp, Artificial Sequence
  Description of Artificial Sequence: Synthetic oligonucleotide
  Target: LAMA2; (+) strand; PAM type: NRG; PAM sequence: AAG
ctatattaacacctaagtta

SEQ ID NO: 140640 - DNA, 20 bp, Artificial Sequence
  Description of Artificial Sequence: Synthetic oligonucleotide
  Target: LAMA2; (+) strand; PAM type: NRG; PAM sequence: AGG
tatattaacacctaagttaa

SEQ ID NO: 140641 - DNA, 20 bp, Artificial Sequence
  Description of Artificial Sequence: Synthetic oligonucleotide
  Target: LAMA2; (+) strand; PAM type: NRG; PAM sequence: CGG
ttaacacctaagttaaaggc

SEQ ID NO: 140642 - DNA, 20 bp, Artificial Sequence
  Description of Artificial Sequence: Synthetic oligonucleotide
  Target: LAMA2; (+) strand; PAM type: NRG; PAM sequence: AAG
aagttaaaggccggcacaat

SEQ ID NO: 140643 - DNA, 20 bp, Artificial Sequence
  Description of Artificial Sequence: Synthetic oligonucleotide
  Target: LAMA2; (+) strand; PAM type: NRG; PAM sequence: TGG
gataatatttgtaaaacaaa

SEQ ID NO: 140644 - DNA, 20 bp, Artificial Sequence
  Description of Artificial Sequence: Synthetic oligonucleotide
  Target: LAMA2; (+) strand; PAM type: NRG; PAM sequence: TAG
tatttgtaaaacaaatggat

SEQ ID NO: 140645 - DNA, 20 bp, Artificial Sequence
  Description of Artificial Sequence: Synthetic oligonucleotide
  Target: LAMA2; (+) strand; PAM type: NRG; PAM sequence: AAG
aaacaaatggattagtgaac

SEQ ID NO: 140646 - DNA, 20 bp, Artificial Sequence
  Description of Artificial Sequence: Synthetic oligonucleotide
  Target: LAMA2; (+) strand; PAM type: NRG; PAM sequence: TGG
caagttaatatgtcactctg

SEQ ID NO: 140647 - DNA, 20 bp, Artificial Sequence
  Description of Artificial Sequence: Synthetic oligonucleotide
  Target: LAMA2; (+) strand; PAM type: NRG; PAM sequence: TGG
tgtggtctttaaaatatata

SEQ ID NO: 140648 - DNA, 20 bp, Artificial Sequence
  Description of Artificial Sequence: Synthetic oligonucleotide
  Target: LAMA2; (+) strand; PAM type: NRG; PAM sequence: CAG
ttaaaatatatatggaaatg

SEQ ID NO: 140649 - DNA, 20 bp, Artificial Sequence
  Description of Artificial Sequence: Synthetic oligonucleotide
  Target: LAMA2; (+) strand; PAM type: NRG; PAM sequence: AAG
aatacatattttgaaaaaca

SEQ ID NO: 140650 - DNA, 20 bp, Artificial Sequence
  Description of Artificial Sequence: Synthetic oligonucleotide
  Target: LAMA2; (+) strand; PAM type: NRG; PAM sequence: AGG
atacatattttgaaaaacaa

SEQ ID NO: 140651 - DNA, 20 bp, Artificial Sequence
  Description of Artificial Sequence: Synthetic oligonucleotide
  Target: LAMA2; (+) strand; PAM type: NRG; PAM sequence: GAG
atattttgaaaaacaaaggt

SEQ ID NO: 140652 - DNA, 20 bp, Artificial Sequence
  Description of Artificial Sequence: Synthetic oligonucleotide
  Target: LAMA2; (+) strand; PAM type: NRG; PAM sequence: GAG
attttgaaaaacaaaggtga

SEQ ID NO: 140653 - DNA, 20 bp, Artificial Sequence
  Description of Artificial Sequence: Synthetic oligonucleotide
  Target: LAMA2; (+) strand; PAM type: NRG; PAM sequence: TAG
aacaaaggtgagagtaatgc

SEQ ID NO: 140654 - DNA, 20 bp, Artificial Sequence
  Description of Artificial Sequence: Synthetic oligonucleotide
  Target: LAMA2; (+) strand; PAM type: NRG; PAM sequence: AAG
ggtgagagtaatgctagcca

SEQ ID NO: 140655 - DNA, 20 bp, Artificial Sequence
  Description of Artificial Sequence: Synthetic oligonucleotide
  Target: LAMA2; (+) strand; PAM type: NRG; PAM sequence: CAG
gagagtaatgctagccaaag

SEQ ID NO: 140656 - DNA, 20 bp, Artificial Sequence
  Description of Artificial Sequence: Synthetic oligonucleotide
  Target: LAMA2; (+) strand; PAM type: NRG; PAM sequence: AGG
agagtaatgctagccaaagc

SEQ ID NO: 140657 - DNA, 20 bp, Artificial Sequence
  Description of Artificial Sequence: Synthetic oligonucleotide
  Target: LAMA2; (+) strand; PAM type: NRG; PAM sequence: CAG
agccaaagcaggtttgactg

SEQ ID NO: 140658 - DNA, 20 bp, Artificial Sequence
  Description of Artificial Sequence: Synthetic oligonucleotide
  Target: LAMA2; (+) strand; PAM type: NRG; PAM sequence: AGG
gccaaagcaggtttgactgc

SEQ ID NO: 140659 - DNA, 20 bp, Artificial Sequence
  Description of Artificial Sequence: Synthetic oligonucleotide
  Target: LAMA2; (+) strand; PAM type: NRG; PAM sequence: AAG
cttcccactcttcttaattg

SEQ ID NO: 140660 - DNA, 20 bp, Artificial Sequence
  Description of Artificial Sequence: Synthetic oligonucleotide
  Target: LAMA2; (+) strand; PAM type: NRG; PAM sequence: GAG
tcccactcttcttaattgaa

SEQ ID NO: 140661 - DNA, 20 bp, Artificial Sequence
  Description of Artificial Sequence: Synthetic oligonucleotide
  Target: LAMA2; (+) strand; PAM type: NRG; PAM sequence: AAG
tctcttttcaacctcctaaa

SEQ ID NO: 140662 - DNA, 20 bp, Artificial Sequence
  Description of Artificial Sequence: Synthetic oligonucleotide
  Target: LAMA2; (+) strand; PAM type: NRG; PAM sequence: GAG
aacctcctaaaaagattact

SEQ ID NO: 140663 - DNA, 20 bp, Artificial Sequence
  Description of Artificial Sequence: Synthetic oligonucleotide
  Target: LAMA2; (+) strand; PAM type: NRG; PAM sequence: TAG
taaaaagattactgagaatg

SEQ ID NO: 140664 - DNA, 20 bp, Artificial Sequence
  Description of Artificial Sequence: Synthetic oligonucleotide
  Target: LAMA2; (+) strand; PAM type: NRG; PAM sequence: AAG
aaataatttcatttatgttt

SEQ ID NO: 140665 - DNA, 20 bp, Artificial Sequence
  Description of Artificial Sequence: Synthetic oligonucleotide
  Target: LAMA2; (+) strand; PAM type: NRG; PAM sequence: AAG
aagctgcaaaaattgatctg

SEQ ID NO: 140666 - DNA, 20 bp, Artificial Sequence
  Description of Artificial Sequence: Synthetic oligonucleotide
  Target: LAMA2; (+) strand; PAM type: NRG; PAM sequence: TAG
tgcaaaaattgatctgaagt

SEQ ID NO: 140667 - DNA, 20 bp, Artificial Sequence
  Description of Artificial Sequence: Synthetic oligonucleotide
  Target: LAMA2; (+) strand; PAM type: NRG; PAM sequence: TGG
aaattgatctgaagttagtc

SEQ ID NO: 140668 - DNA, 20 bp, Artificial Sequence
  Description of Artificial Sequence: Synthetic oligonucleotide
  Target: LAMA2; (+) strand; PAM type: NRG; PAM sequence: AAG
tctggtatattgtgtacttt

SEQ ID NO: 140669 - DNA, 20 bp, Artificial Sequence
  Description of Artificial Sequence: Synthetic oligonucleotide
  Target: LAMA2; (+) strand; PAM type: NRG; PAM sequence: AAG
tctaaaatgttgttcatgtc

SEQ ID NO: 140670 - DNA, 20 bp, Artificial Sequence
  Description of Artificial Sequence: Synthetic oligonucleotide
  Target: LAMA2; (+) strand; PAM type: NRG; PAM sequence: TGG
ttcaaatcatgaccttcttt

SEQ ID NO: 140671 - DNA, 20 bp, Artificial Sequence
  Description of Artificial Sequence: Synthetic oligonucleotide
  Target: LAMA2; (+) strand; PAM type: NRG; PAM sequence: AAG
tggcttgtattctaattttg

SEQ ID NO: 140672 - DNA, 20 bp, Artificial Sequence
  Description of Artificial Sequence: Synthetic oligonucleotide
  Target: LAMA2; (+) strand; PAM type: NRG; PAM sequence: TAG
taattttgaagtttctgacc

SEQ ID NO: 140673 - DNA, 20 bp, Artificial Sequence
  Description of Artificial Sequence: Synthetic oligonucleotide
  Target: LAMA2; (+) strand; PAM type: NRG; PAM sequence: AAG
gacacaaaaatgattaactg

SEQ ID NO: 140674 - DNA, 20 bp, Artificial Sequence
  Description of Artificial Sequence: Synthetic oligonucleotide
  Target: LAMA2; (+) strand; PAM type: NRG; PAM sequence: TAG
gattaactgaagaattttaa

SEQ ID NO: 140675 - DNA, 20 bp, Artificial Sequence
  Description of Artificial Sequence: Synthetic oligonucleotide
  Target: LAMA2; (+) strand; PAM type: NRG; PAM sequence: CAG
ctgttgttcttcacttctat

SEQ ID NO: 140676 - DNA, 20 bp, Artificial Sequence
  Description of Artificial Sequence: Synthetic oligonucleotide
  Target: LAMA2; (+) strand; PAM type: NRG; PAM sequence: TAG
ctatcagtgatgatatttga

SEQ ID NO: 140677 - DNA, 20 bp, Artificial Sequence
  Description of Artificial Sequence: Synthetic oligonucleotide
  Target: LAMA2; (+) strand; PAM type: NRG; PAM sequence: GAG
atttgatagtgtaatatgct

SEQ ID NO: 140678 - DNA, 20 bp, Artificial Sequence
  Description of Artificial Sequence: Synthetic oligonucleotide
  Target: LAMA2; (+) strand; PAM type: NRG; PAM sequence: CAG
tgatagtgtaatatgctgag

SEQ ID NO: 140679 - DNA, 20 bp, Artificial Sequence
  Description of Artificial Sequence: Synthetic oligonucleotide
  Target: LAMA2; (+) strand; PAM type: NRG; PAM sequence: AGG
gatagtgtaatatgctgagc

SEQ ID NO: 140680 - DNA, 20 bp, Artificial Sequence
  Description of Artificial Sequence: Synthetic oligonucleotide
  Target: LAMA2; (+) strand; PAM type: NRG; PAM sequence: AAG
tgagcaggcaaacaatgaaa

SEQ ID NO: 140681 - DNA, 20 bp, Artificial Sequence
  Description of Artificial Sequence: Synthetic oligonucleotide
  Target: LAMA2; (+) strand; PAM type: NRG; PAM sequence: CAG
atgcaaaatgtatgtaaaat

SEQ ID NO: 140682 - DNA, 20 bp, Artificial Sequence
  Description of Artificial Sequence: Synthetic oligonucleotide
  Target: LAMA2; (+) strand; PAM type: NRG; PAM sequence: AAG
atgtaaaatcagctttcaat

SEQ ID NO: 140683 - DNA, 20 bp, Artificial Sequence
  Description of Artificial Sequence: Synthetic oligonucleotide
  Target: LAMA2; (+) strand; PAM type: NRG; PAM sequence: CAG
atcagctttcaataagtgaa

SEQ ID NO: 140684 - DNA, 20 bp, Artificial Sequence
  Description of Artificial Sequence: Synthetic oligonucleotide
  Target: LAMA2; (+) strand; PAM type: NRG; PAM sequence: CAG
ctgttccttttcaccatttg

SEQ ID NO: 140685 - DNA, 20 bp, Artificial Sequence
  Description of Artificial Sequence: Synthetic oligonucleotide
  Target: LAMA2; (+) strand; PAM type: NRG; PAM sequence: TAG
accatttgcagtaccattct

SEQ ID NO: 140686 - DNA, 20 bp, Artificial Sequence
  Description of Artificial Sequence: Synthetic oligonucleotide
  Target: LAMA2; (+) strand; PAM type: NRG; PAM sequence: CAG
taccattcttagactcactg

SEQ ID NO: 140687 - DNA, 20 bp, Artificial Sequence
  Description of Artificial Sequence: Synthetic oligonucleotide
  Target: LAMA2; (+) strand; PAM type: NRG; PAM sequence: AGG
accattcttagactcactgc

SEQ ID NO: 140688 - DNA, 20 bp, Artificial Sequence
  Description of Artificial Sequence: Synthetic oligonucleotide
  Target: LAMA2; (+) strand; PAM type: NRG; PAM sequence: TGG
ctcactgcaggcataaaccc

SEQ ID NO: 140689 - DNA, 20 bp, Artificial Sequence
  Description of Artificial Sequence: Synthetic oligonucleotide
  Target: LAMA2; (+) strand; PAM type: NRG; PAM sequence: GGG
tcactgcaggcataaaccct

SEQ ID NO: 140690 - DNA, 20 bp, Artificial Sequence
  Description of Artificial Sequence: Synthetic oligonucleotide
  Target: LAMA2; (+) strand; PAM type: NRG; PAM sequence: AAG
gcaggcataaaccctgggat

SEQ ID NO: 140691 - DNA, 20 bp, Artificial Sequence
  Description of Artificial Sequence: Synthetic oligonucleotide
  Target: LAMA2; (+) strand; PAM type: NRG; PAM sequence: AGG
caggcataaaccctgggata

SEQ ID NO: 140692 - DNA, 20 bp, Artificial Sequence
  Description of Artificial Sequence: Synthetic oligonucleotide
  Target: LAMA2; (+) strand; PAM type: NRG; PAM sequence: AAG
ataaaccctgggataaggaa

SEQ ID NO: 140693 - DNA, 20 bp, Artificial Sequence
  Description of Artificial Sequence: Synthetic oligonucleotide
  Target: LAMA2; (+) strand; PAM type: NRG; PAM sequence: AAG
ccctgggataaggaaaagtt

SEQ ID NO: 140694 - DNA, 20 bp, Artificial Sequence
  Description of Artificial Sequence: Synthetic oligonucleotide
  Target: LAMA2; (+) strand; PAM type: NRG; PAM sequence: AAG
ccattcttcatacctctaat

SEQ ID NO: 140695 - DNA, 20 bp, Artificial Sequence
  Description of Artificial Sequence: Synthetic oligonucleotide
  Target: LAMA2; (+) strand; PAM type: NRG; PAM sequence: AGG
cattcttcatacctctaata

SEQ ID NO: 140696 - DNA, 20 bp, Artificial Sequence
  Description of Artificial Sequence: Synthetic oligonucleotide
  Target: LAMA2; (+) strand; PAM type: NRG; PAM sequence: TGG
ctctaataaggctttgccaa

SEQ ID NO: 140697 - DNA, 20 bp, Artificial Sequence
  Description of Artificial Sequence: Synthetic oligonucleotide
  Target: LAMA2; (+) strand; PAM type: NRG; PAM sequence: TAG
tacaaccatccacttatgtt

SEQ ID NO: 140698 - DNA, 20 bp, Artificial Sequence
  Description of Artificial Sequence: Synthetic oligonucleotide
  Target: LAMA2; (+) strand; PAM type: NRG; PAM sequence: AGG
acaaccatccacttatgttt

SEQ ID NO: 140699 - DNA, 20 bp, Artificial Sequence
  Description of Artificial Sequence: Synthetic oligonucleotide
  Target: LAMA2; (+) strand; PAM type: NRG; PAM sequence: CAG
ccacttatgtttaggtttaa

SEQ ID NO: 140700 - DNA, 20 bp, Artificial Sequence
  Description of Artificial Sequence: Synthetic oligonucleotide
  Target: LAMA2; (+) strand; PAM type: NRG; PAM sequence: GAG
acttatgtttaggtttaaca

SEQ ID NO: 140701 - DNA, 20 bp, Artificial Sequence
  Description of Artificial Sequence: Synthetic oligonucleotide
  Target: LAMA2; (+) strand; PAM type: NRG; PAM sequence: TGG
gtttaggtttaacagagtct

SEQ ID NO: 140702 - DNA, 20 bp, Artificial Sequence
  Description of Artificial Sequence: Synthetic oligonucleotide
  Target: LAMA2; (+) strand; PAM type: NRG; PAM sequence: AAG
cataatgaaatacttcatta

SEQ ID NO: 140703 - DNA, 20 bp, Artificial Sequence
  Description of Artificial Sequence: Synthetic oligonucleotide
  Target: LAMA2; (+) strand; PAM type: NRG; PAM sequence: TAG
tctgtttacacatatgttca

SEQ ID NO: 140704 - DNA, 20 bp, Artificial Sequence
  Description of Artificial Sequence: Synthetic oligonucleotide
  Target: LAMA2; (+) strand; PAM type: NRG; PAM sequence: TAG
gtttacacatatgttcatag

SEQ ID NO: 140705 - DNA, 20 bp, Artificial Sequence
  Description of Artificial Sequence: Synthetic oligonucleotide
  Target: LAMA2; (+) strand; PAM type: NRG; PAM sequence: TGG
atgttcatagtagaattaca

SEQ ID NO: 140706 - DNA, 20 bp, Artificial Sequence
  Description of Artificial Sequence: Synthetic oligonucleotide
  Target: LAMA2; (+) strand; PAM type: NRG; PAM sequence: CAG
ttacatggtgttctgttatc

SEQ ID NO: 140707 - DNA, 20 bp, Artificial Sequence
  Description of Artificial Sequence: Synthetic oligonucleotide
  Target: LAMA2; (+) strand; PAM type: NRG; PAM sequence: TGG
tccagtctttgccattcaca

SEQ ID NO: 140708 - DNA, 20 bp, Artificial Sequence
  Description of Artificial Sequence: Synthetic oligonucleotide
  Target: LAMA2; (+) strand; PAM type: NRG; PAM sequence: CAG
ctttgccattcacatggact

SEQ ID NO: 140709 - DNA, 20 bp, Artificial Sequence
  Description of Artificial Sequence: Synthetic oligonucleotide
  Target: LAMA2; (+) strand; PAM type: NRG; PAM sequence: TAG
attcacatggactcagttta

SEQ ID NO: 140710 - DNA, 20 bp, Artificial Sequence
  Description of Artificial Sequence: Synthetic oligonucleotide
  Target: LAMA2; (+) strand; PAM type: NRG; PAM sequence: TGG
tggactcagtttatagtgtc

SEQ ID NO: 140711 - DNA, 20 bp, Artificial Sequence
  Description of Artificial Sequence: Synthetic oligonucleotide
  Target: LAMA2; (+) strand; PAM type: NRG; PAM sequence: AAG
agtgtctggttatgctactg

SEQ ID NO: 140712 - DNA, 20 bp, Artificial Sequence
  Description of Artificial Sequence: Synthetic oligonucleotide
  Target: LAMA2; (+) strand; PAM type: NRG; PAM sequence: AAG
ctgctttaccatttgctgtt

SEQ ID NO: 140713 - DNA, 20 bp, Artificial Sequence
  Description of Artificial Sequence: Synthetic oligonucleotide
  Target: LAMA2; (+) strand; PAM type: NRG; PAM sequence: TAG
catttgctgttaagtaattg

SEQ ID NO: 140714 - DNA, 20 bp, Artificial Sequence
  Description of Artificial Sequence: Synthetic oligonucleotide
  Target: LAMA2; (+) strand; PAM type: NRG; PAM sequence: CAG
tgctgttaagtaattgtagt

SEQ ID NO: 140715 - DNA, 20 bp, Artificial Sequence
  Description of Artificial Sequence: Synthetic oligonucleotide
  Target: LAMA2; (+) strand; PAM type: NRG; PAM sequence: CAG
gttaagtaattgtagtcaga

SEQ ID NO: 140716 - DNA, 20 bp, Artificial Sequence
  Description of Artificial Sequence: Synthetic oligonucleotide
  Target: LAMA2; (+) strand; PAM type: NRG; PAM sequence: CAG
ttgtagtcagacagactgcc

SEQ ID NO: 140717 - DNA, 20 bp, Artificial Sequence
  Description of Artificial Sequence: Synthetic oligonucleotide
  Target: LAMA2; (+) strand; PAM type: NRG; PAM sequence: AGG
tgtagtcagacagactgccc

SEQ ID NO: 140718 - DNA, 20 bp, Artificial Sequence
  Description of Artificial Sequence: Synthetic oligonucleotide
  Target: LAMA2; (+) strand; PAM type: NRG; PAM sequence: AAG
agtcagacagactgcccagg

SEQ ID NO: 140719 - DNA, 20 bp, Artificial Sequence
  Description of Artificial Sequence: Synthetic oligonucleotide
  Target: LAMA2; (+) strand; PAM type: NRG; PAM sequence: TGG
agactgcccaggaagcccca

SEQ ID NO: 140720 - DNA, 20 bp, Artificial Sequence
  Description of Artificial Sequence: Synthetic oligonucleotide
  Target: LAMA2; (+) strand; PAM type: NRG; PAM sequence: CAG
cccaggaagccccatggact

SEQ ID NO: 140721 - DNA, 20 bp, Artificial Sequence
  Description of Artificial Sequence: Synthetic oligonucleotide
  Target: LAMA2; (+) strand; PAM type: NRG; PAM sequence: TGG
atggactcagttttatccct

SEQ ID NO: 140722 - DNA, 20 bp, Artificial Sequence
  Description of Artificial Sequence: Synthetic oligonucleotide
  Target: LAMA2; (+) strand; PAM type: NRG; PAM sequence: GGG
tggactcagttttatccctt

SEQ ID NO: 140723 - DNA, 20 bp, Artificial Sequence
  Description of Artificial Sequence: Synthetic oligonucleotide
  Target: LAMA2; (+) strand; PAM type: NRG; PAM sequence: GAG
atcccttgggtatcacaaat

SEQ ID NO: 140724 - DNA, 20 bp, Artificial Sequence
  Description of Artificial Sequence: Synthetic oligonucleotide
  Target: LAMA2; (+) strand; PAM type: NRG; PAM sequence: AGG
tcccttgggtatcacaaatg

SEQ ID NO: 140725 - DNA, 20 bp, Artificial Sequence
  Description of Artificial Sequence: Synthetic oligonucleotide
  Target: LAMA2; (+) strand; PAM type: NRG; PAM sequence: AAG
cttgggtatcacaaatgagg

SEQ ID NO: 140726 - DNA, 20 bp, Artificial Sequence
  Description of Artificial Sequence: Synthetic oligonucleotide
  Target: LAMA2; (+) strand; PAM type: NRG; PAM sequence: GAG
tgggtatcacaaatgaggaa

SEQ ID NO: 140727 - DNA, 20 bp, Artificial Sequence
  Description of Artificial Sequence: Synthetic oligonucleotide
  Target: LAMA2; (+) strand; PAM type: NRG; PAM sequence: TGG
ggaagagtttgattccatat

SEQ ID NO: 140728 - DNA, 20 bp, Artificial Sequence
  Description of Artificial Sequence: Synthetic oligonucleotide
  Target: LAMA2; (+) strand; PAM type: NRG; PAM sequence: AAG
aatactacttctgtttccta

SEQ ID NO: 140729 - DNA, 20 bp, Artificial Sequence
  Description of Artificial Sequence: Synthetic oligonucleotide
  Target: LAMA2; (+) strand; PAM type: NRG; PAM sequence: AAG
ctaaagatatgttgttttct

SEQ ID NO: 140730 - DNA, 20 bp, Artificial Sequence
  Description of Artificial Sequence: Synthetic oligonucleotide
  Target: LAMA2; (+) strand; PAM type: NRG; PAM sequence: TAG
tgttttctaagatttgcttc

SEQ ID NO: 140731 - DNA, 20 bp, Artificial Sequence
  Description of Artificial Sequence: Synthetic oligonucleotide
  Target: LAMA2; (+) strand; PAM type: NRG; PAM sequence: TGG
tttgtgattaaatgttttat

SEQ ID NO: 140732 - DNA, 20 bp, Artificial Sequence
  Description of Artificial Sequence: Synthetic oligonucleotide
  Target: LAMA2; (+) strand; PAM type: NRG; PAM sequence: CAG
tgattaaatgttttattgga

SEQ ID NO: 140733 - DNA, 20 bp, Artificial Sequence
  Description of Artificial Sequence: Synthetic oligonucleotide
  Target: LAMA2; (+) strand; PAM type: NRG; PAM sequence: AGG
gattaaatgttttattggac

SEQ ID NO: 140734 - DNA, 20 bp, Artificial Sequence
  Description of Artificial Sequence: Synthetic oligonucleotide
  Target: LAMA2; (+) strand; PAM type: NRG; PAM sequence: GGG
attaaatgttttattggaca

SEQ ID NO: 140735 - DNA, 20 bp, Artificial Sequence
  Description of Artificial Sequence: Synthetic oligonucleotide
  Target: LAMA2; (+) strand; PAM type: NRG; PAM sequence: AAG
gttttattggacagggattt

SEQ ID NO: 140736 - DNA, 20 bp, Artificial Sequence
  Description of Artificial Sequence: Synthetic oligonucleotide
  Target: LAMA2; (+) strand; PAM type: NRG; PAM sequence: CAG
ttggacagggatttaagaat

SEQ ID NO: 140737 - DNA, 20 bp, Artificial Sequence
  Description of Artificial Sequence: Synthetic oligonucleotide
  Target: LAMA2; (+) strand; PAM type: NRG; PAM sequence: TGG
acattttgtcctactttaaa

SEQ ID NO: 140738 - DNA, 20 bp, Artificial Sequence
  Description of Artificial Sequence: Synthetic oligonucleotide
  Target: LAMA2; (+) strand; PAM type: NRG; PAM sequence: TAG
actttaaatggaaatgtcta

SEQ ID NO: 140739 - DNA, 20 bp, Artificial Sequence
  Description of Artificial Sequence: Synthetic oligonucleotide
  Target: LAMA2; (+) strand; PAM type: NRG; PAM sequence: TAG
gaaatgtctatagacttttc

SEQ ID NO: 140740 - DNA, 20 bp, Artificial Sequence
  Description of Artificial Sequence: Synthetic oligonucleotide
  Target: LAMA2; (+) strand; PAM type: NRG; PAM sequence: AAG
gtctatagacttttctagtg

SEQ ID NO: 140741 - DNA, 20 bp, Artificial Sequence
  Description of Artificial Sequence: Synthetic oligonucleotide
  Target: LAMA2; (+) strand; PAM type: NRG; PAM sequence: AGG
tctatagacttttctagtga

SEQ ID NO: 140742 - DNA, 20 bp, Artificial Sequence
  Description of Artificial Sequence: Synthetic oligonucleotide
  Target: LAMA2; (+) strand; PAM type: NRG; PAM sequence: AAG
tgaaggcttttacaaatgtt

SEQ ID NO: 140743 - DNA, 20 bp, Artificial Sequence
  Description of Artificial Sequence: Synthetic oligonucleotide
  Target: LAMA2; (+) strand; PAM type: NRG; PAM sequence: AGG
gaaggcttttacaaatgtta

SEQ ID NO: 140744 - DNA, 20 bp, Artificial Sequence
  Description of Artificial Sequence: Synthetic oligonucleotide
  Target: LAMA2; (+) strand; PAM type: NRG; PAM sequence: GGG
aaggcttttacaaatgttaa

SEQ ID NO: 140745 - DNA, 20 bp, Artificial Sequence
  Description of Artificial Sequence: Synthetic oligonucleotide
  Target: LAMA2; (+) strand; PAM type: NRG; PAM sequence: CAG
aagggatgattgaatgctca

SEQ ID NO: 140746 - DNA, 20 bp, Artificial Sequence
  Description of Artificial Sequence: Synthetic oligonucleotide
  Target: LAMA2; (+) strand; PAM type: NRG; PAM sequence: CAG
ggatgattgaatgctcacag

SEQ ID NO: 140747 - DNA, 20 bp, Artificial Sequence
  Description of Artificial Sequence: Synthetic oligonucleotide
  Target: LAMA2; (+) strand; PAM type: NRG; PAM sequence: AGG
gatgattgaatgctcacagc

SEQ ID NO: 140748 - DNA, 20 bp, Artificial Sequence
  Description of Artificial Sequence: Synthetic oligonucleotide
  Target: LAMA2; (+) strand; PAM type: NRG; PAM sequence: TGG
aatgctcacagcaggacaca

SEQ ID NO: 140749 - DNA, 20 bp, Artificial Sequence
  Description of Artificial Sequence: Synthetic oligonucleotide
  Target: LAMA2; (+) strand; PAM type: NRG; PAM sequence: CAG
cagcaggacacatggcatta

SEQ ID NO: 140750 - DNA, 20 bp, Artificial Sequence
  Description of Artificial Sequence: Synthetic oligonucleotide
  Target: LAMA2; (+) strand; PAM type: NRG; PAM sequence: AAG
aggacacatggcattacaga

SEQ ID NO: 140751 - DNA, 20 bp, Artificial Sequence
  Description of Artificial Sequence: Synthetic oligonucleotide
  Target: LAMA2; (+) strand; PAM type: NRG; PAM sequence: TGG
tccaaaattattcatccttt

SEQ ID NO: 140752 - DNA, 20 bp, Artificial Sequence
  Description of Artificial Sequence: Synthetic oligonucleotide
  Target: LAMA2; (+) strand; PAM type: NRG; PAM sequence: GGG
ccaaaattattcatcctttt

SEQ ID NO: 140753 - DNA, 20 bp, Artificial Sequence
  Description of Artificial Sequence: Synthetic oligonucleotide
  Target: LAMA2; (+) strand; PAM type: NRG; PAM sequence: GGG
caaaattattcatccttttg

SEQ ID NO: 140754 - DNA, 20 bp, Artificial Sequence
  Description of Artificial Sequence: Synthetic oligonucleotide
  Target: LAMA2; (+) strand; PAM type: NRG; PAM sequence: TGG
acactcataacctgttgaat

SEQ ID NO: 140755 - DNA, 20 bp, Artificial Sequence
  Description of Artificial Sequence: Synthetic oligonucleotide
  Target: LAMA2; (+) strand; PAM type: NRG; PAM sequence: TAG
aattggaaaaatattaatgt

SEQ ID NO: 140756 - DNA, 20 bp, Artificial Sequence
  Description of Artificial Sequence: Synthetic oligonucleotide
  Target: LAMA2; (+) strand; PAM type: NRG; PAM sequence: TAG
ttctccttttttgcctcctg

SEQ ID NO: 140757 - DNA, 20 bp, Artificial Sequence
  Description of Artificial Sequence: Synthetic oligonucleotide
  Target: LAMA2; (+) strand; PAM type: NRG; PAM sequence: GAG
ttttttgcctcctgtagcat

SEQ ID NO: 140758 - DNA, 20 bp, Artificial Sequence
  Description of Artificial Sequence: Synthetic oligonucleotide
  Target: LAMA2; (+) strand; PAM type: NRG; PAM sequence: TAG
gcctcctgtagcatgagtcc

SEQ ID NO: 140759 - DNA, 20 bp, Artificial Sequence
  Description of Artificial Sequence: Synthetic oligonucleotide
  Target: LAMA2; (+) strand; PAM type: NRG; PAM sequence: TAG
gagtcctagtttgattaaac

SEQ ID NO: 140760 - DNA, 20 bp, Artificial Sequence
  Description of Artificial Sequence: Synthetic oligonucleotide
  Target: LAMA2; (+) strand; PAM type: NRG; PAM sequence: TGG
agacacttgattttctccaa

SEQ ID NO: 140761 - DNA, 20 bp, Artificial Sequence
  Description of Artificial Sequence: Synthetic oligonucleotide
  Target: LAMA2; (+) strand; PAM type: NRG; PAM sequence: AAG
atggtaacatgtttttaaaa

SEQ ID NO: 140762 - DNA, 20 bp, Artificial Sequence
  Description of Artificial Sequence: Synthetic oligonucleotide
  Target: LAMA2; (+) strand; PAM type: NRG; PAM sequence: AGG
tggtaacatgtttttaaaaa

SEQ ID NO: 140763 - DNA, 20 bp, Artificial Sequence
  Description of Artificial Sequence: Synthetic oligonucleotide
  Target: LAMA2; (+) strand; PAM type: NRG; PAM sequence: TGG
aaaaaggacttttactctgt

SEQ ID NO: 140764 - DNA, 20 bp, Artificial Sequence
  Description of Artificial Sequence: Synthetic oligonucleotide
  Target: LAMA2; (+) strand; PAM type: NRG; PAM sequence: TAG
tttactctgttggaaccaat

SEQ ID NO: 140765 - DNA, 20 bp, Artificial Sequence
  Description of Artificial Sequence: Synthetic oligonucleotide
  Target: LAMA2; (+) strand; PAM type: NRG; PAM sequence: AGG
ttactctgttggaaccaatt

SEQ ID NO: 140766 - DNA, 20 bp, Artificial Sequence
  Description of Artificial Sequence: Synthetic oligonucleotide
  Target: LAMA2; (+) strand; PAM type: NRG; PAM sequence: GAG
ggaaccaattaggccaatgt

SEQ ID NO: 140767 - DNA, 20 bp, Artificial Sequence
  Description of Artificial Sequence: Synthetic oligonucleotide
  Target: LAMA2; (+) strand; PAM type: NRG; PAM sequence: AGG
gaaccaattaggccaatgtg

SEQ ID NO: 140768 - DNA, 20 bp, Artificial Sequence
  Description of Artificial Sequence: Synthetic oligonucleotide
  Target: LAMA2; (+) strand; PAM type: NRG; PAM sequence: TGG
taggccaatgtgaggaactt

SEQ ID NO: 140769 - DNA, 20 bp, Artificial Sequence
  Description of Artificial Sequence: Synthetic oligonucleotide
  Target: LAMA2; (+) strand; PAM type: NRG; PAM sequence: AAG
gccaatgtgaggaactttgg

SEQ ID NO: 140770 - DNA, 20 bp, Artificial Sequence
  Description of Artificial Sequence: Synthetic oligonucleotide
  Target: LAMA2; (+) strand; PAM type: NRG; PAM sequence: AGG
ccaatgtgaggaactttgga

SEQ ID NO: 140771 - DNA, 20 bp, Artificial Sequence
  Description of Artificial Sequence: Synthetic oligonucleotide
  Target: LAMA2; (+) strand; PAM type: NRG; PAM sequence: GAG
aggaactttggaaggaacat

SEQ ID NO: 140772 - DNA, 20 bp, Artificial Sequence
  Description of Artificial Sequence: Synthetic oligonucleotide
  Target: LAMA2; (+) strand; PAM type: NRG; PAM sequence: CAG
aactttggaaggaacatgag

SEQ ID NO: 140773 - DNA, 20 bp, Artificial Sequence
  Description of Artificial Sequence: Synthetic oligonucleotide
  Target: LAMA2; (+) strand; PAM type: NRG; PAM sequence: CAG
tgagcagccaaacttgctaa

SEQ ID NO: 140774 - DNA, 20 bp, Artificial Sequence
  Description of Artificial Sequence: Synthetic oligonucleotide
  Target: LAMA2; (+) strand; PAM type: NRG; PAM sequence: AAG
cagcaaaacgtatttttctg

SEQ ID NO: 140775 - DNA, 20 bp, Artificial Sequence
  Description of Artificial Sequence: Synthetic oligonucleotide
  Target: LAMA2; (+) strand; PAM type: NRG; PAM sequence: AGG
agcaaaacgtatttttctga

SEQ ID NO: 140776 - DNA, 20 bp, Artificial Sequence
  Description of Artificial Sequence: Synthetic oligonucleotide
  Target: LAMA2; (+) strand; PAM type: NRG; PAM sequence: CAG
aaaacgtatttttctgaagg

SEQ ID NO: 140777 - DNA, 20 bp, Artificial Sequence
  Description of Artificial Sequence: Synthetic oligonucleotide
  Target: LAMA2; (+) strand; PAM type: NRG; PAM sequence: AAG
ttttctgaaggcagcatgaa

SEQ ID NO: 140778 - DNA, 20 bp, Artificial Sequence
  Description of Artificial Sequence: Synthetic oligonucleotide
  Target: LAMA2; (+) strand; PAM type: NRG; PAM sequence: AGG
tttctgaaggcagcatgaaa

SEQ ID NO: 140779 - DNA, 20 bp, Artificial Sequence
  Description of Artificial Sequence: Synthetic oligonucleotide
  Target: LAMA2; (+) strand; PAM type: NRG; PAM sequence: CGG
tgaaggcagcatgaaaagga

SEQ ID NO: 140780 - DNA, 20 bp, Artificial Sequence
  Description of Artificial Sequence: Synthetic oligonucleotide
  Target: LAMA2; (+) strand; PAM type: NRG; PAM sequence: GAG
aaggcagcatgaaaaggacg

SEQ ID NO: 140781 - DNA, 20 bp, Artificial Sequence
  Description of Artificial Sequence: Synthetic oligonucleotide
  Target: LAMA2; (+) strand; PAM type: NRG; PAM sequence: AGG
aggcagcatgaaaaggacgg

SEQ ID NO: 140782 - DNA, 20 bp, Artificial Sequence
  Description of Artificial Sequence: Synthetic oligonucleotide
  Target: LAMA2; (+) strand; PAM type: NRG; PAM sequence: GAG
gcagcatgaaaaggacggag

SEQ ID NO: 140783 - DNA, 20 bp, Artificial Sequence
  Description of Artificial Sequence: Synthetic oligonucleotide
  Target: LAMA2; (+) strand; PAM type: NRG; PAM sequence: AAG
aaaggacggaggagttctct

SEQ ID NO: 140784 - DNA, 20 bp, Artificial Sequence
  Description of Artificial Sequence: Synthetic oligonucleotide
  Target: LAMA2; (+) strand; PAM type: NRG; PAM sequence: AGG
aaggacggaggagttctcta

SEQ ID NO: 140785 - DNA, 20 bp, Artificial Sequence
  Description of Artificial Sequence: Synthetic oligonucleotide
  Target: LAMA2; (+) strand; PAM type: NRG; PAM sequence: GAG
aggagttctctaaggactgt

SEQ ID NO: 140786 - DNA, 20 bp, Artificial Sequence
  Description of Artificial Sequence: Synthetic oligonucleotide
  Target: LAMA2; (+) strand; PAM type: NRG; PAM sequence: CGG
tctaaggactgtgagttcca

SEQ ID NO: 140787 - DNA, 20 bp, Artificial Sequence
  Description of Artificial Sequence: Synthetic oligonucleotide
  Target: LAMA2; (+) strand; PAM type: NRG; PAM sequence: GGG
ctaaggactgtgagttccac

SEQ ID NO: 140788 - DNA, 20 bp, Artificial Sequence
  Description of Artificial Sequence: Synthetic oligonucleotide
  Target: LAMA2; (+) strand; PAM type: NRG; PAM sequence: GAG
tgagttccacgggtcctttt

SEQ ID NO: 140789 - DNA, 20 bp, Artificial Sequence
  Description of Artificial Sequence: Synthetic oligonucleotide
  Target: LAMA2; (+) strand; PAM type: NRG; PAM sequence: CAG
ccacgggtccttttgagctt

SEQ ID NO: 140790 - DNA, 20 bp, Artificial Sequence
  Description of Artificial Sequence: Synthetic oligonucleotide
  Target: LAMA2; (+) strand; PAM type: NRG; PAM sequence: CAG
ccttttgagcttcagaaatc

SEQ ID NO: 140791 - DNA, 20 bp, Artificial Sequence
  Description of Artificial Sequence: Synthetic oligonucleotide
  Target: LAMA2; (+) strand; PAM type: NRG; PAM sequence: CAG
agcttcagaaatccagctct

SEQ ID NO: 140792 - DNA, 20 bp, Artificial Sequence
  Description of Artificial Sequence: Synthetic oligonucleotide
  Target: LAMA2; (+) strand; PAM type: NRG; PAM sequence: AAG
tttctgacctgatgtcactg

SEQ ID NO: 140793 - DNA, 20 bp, Artificial Sequence
  Description of Artificial Sequence: Synthetic oligonucleotide
  Target: LAMA2; (+) strand; PAM type: NRG; PAM sequence: TGG
actgaagttgtattattatg

SEQ ID NO: 140794 - DNA, 20 bp, Artificial Sequence
  Description of Artificial Sequence: Synthetic oligonucleotide
  Target: LAMA2; (+) strand; PAM type: NRG; PAM sequence: TAG
aagttgtattattatgtggt

SEQ ID NO: 140795 - DNA, 20 bp, Artificial Sequence
  Description of Artificial Sequence: Synthetic oligonucleotide
  Target: LAMA2; (+) strand; PAM type: NRG; PAM sequence: CAG
tatgtggttagtataaaatt

SEQ ID NO: 140796 - DNA, 20 bp, Artificial Sequence
  Description of Artificial Sequence: Synthetic oligonucleotide
  Target: LAMA2; (+) strand; PAM type: NRG; PAM sequence: TGG
agtataaaattcagaaaaat

SEQ ID NO: 140797 - DNA, 20 bp, Artificial Sequence
  Description of Artificial Sequence: Synthetic oligonucleotide
  Target: LAMA2; (+) strand; PAM type: NRG; PAM sequence: GGG
gtataaaattcagaaaaatt

SEQ ID NO: 140798 - DNA, 20 bp, Artificial Sequence
  Description of Artificial Sequence: Synthetic oligonucleotide
  Target: LAMA2; (+) strand; PAM type: NRG; PAM sequence: GAG
ataaaattcagaaaaattgg

SEQ ID NO: 140799 - DNA, 20 bp, Artificial Sequence
  Description of Artificial Sequence: Synthetic oligonucleotide
  Target: LAMA2; (+) strand; PAM type: NRG; PAM sequence: AAG
gaaaaattgggagaaaatac

SEQ ID NO: 140800 - DNA, 20 bp, Artificial Sequence
  Description of Artificial Sequence: Synthetic oligonucleotide
  Target: LAMA2; (+) strand; PAM type: NRG; PAM sequence: AGG
aaaaattgggagaaaataca

SEQ ID NO: 140801 - DNA, 20 bp, Artificial Sequence
  Description of Artificial Sequence: Synthetic oligonucleotide
  Target: LAMA2; (+) strand; PAM type: NRG; PAM sequence: GAG
aaattgggagaaaatacaag

SEQ ID NO: 140802 - DNA, 20 bp, Artificial Sequence
  Description of Artificial Sequence: Synthetic oligonucleotide
  Target: LAMA2; (+) strand; PAM type: NRG; PAM sequence: AAG
ttgggagaaaatacaaggag

SEQ ID NO: 140803 - DNA, 20 bp, Artificial Sequence
  Description of Artificial Sequence: Synthetic oligonucleotide
  Target: LAMA2; (+) strand; PAM type: NRG; PAM sequence: CAG
aatacaaggagaagaatttg

SEQ ID NO: 140804 - DNA, 20 bp, Artificial Sequence
  Description of Artificial Sequence: Synthetic oligonucleotide
  Target: LAMA2; (+) strand; PAM type: NRG; PAM sequence: AGG
atacaaggagaagaatttgc

SEQ ID NO: 140805 - DNA, 20 bp, Artificial Sequence
  Description of Artificial Sequence: Synthetic oligonucleotide
  Target: LAMA2; (+) strand; PAM type: NRG; PAM sequence: GGG
tacaaggagaagaatttgca

SEQ ID NO: 140806 - DNA, 20 bp, Artificial Sequence
  Description of Artificial Sequence: Synthetic oligonucleotide
  Target: LAMA2; (+) strand; PAM type: NRG; PAM sequence: AAG
atttgcagggtgattgttgt

SEQ ID NO: 140807 - DNA, 20 bp, Artificial Sequence
  Description of Artificial Sequence: Synthetic oligonucleotide
  Target: LAMA2; (+) strand; PAM type: NRG; PAM sequence: TGG
ttatcatgtcctcttaaaaa

SEQ ID NO: 140808 - DNA, 20 bp, Artificial Sequence
  Description of Artificial Sequence: Synthetic oligonucleotide
  Target: LAMA2; (+) strand; PAM type: NRG; PAM sequence: TAG
tcatgtcctcttaaaaatgg

SEQ ID NO: 140809 - DNA, 20 bp, Artificial Sequence
  Description of Artificial Sequence: Synthetic oligonucleotide
  Target: LAMA2; (+) strand; PAM type: NRG; PAM sequence: CAG
tcttaaaaatggtagctttt

SEQ ID NO: 140810 - DNA, 20 bp, Artificial Sequence
  Description of Artificial Sequence: Synthetic oligonucleotide
  Target: LAMA2; (+) strand; PAM type: NRG; PAM sequence: GAG
actgctttgcattccatctt

SEQ ID NO: 140811 - DNA, 20 bp, Artificial Sequence
  Description of Artificial Sequence: Synthetic oligonucleotide
  Target: LAMA2; (+) strand; PAM type: NRG; PAM sequence: TAG
atcttgagaaaatgtctgta

SEQ ID NO: 140812 - DNA, 20 bp, Artificial Sequence
  Description of Artificial Sequence: Synthetic oligonucleotide
  Target: LAMA2; (+) strand; PAM type: NRG; PAM sequence: TAG
tgagaaaatgtctgtatagt

SEQ ID NO: 140813 - DNA, 20 bp, Artificial Sequence
  Description of Artificial Sequence: Synthetic oligonucleotide
  Target: LAMA2; (+) strand; PAM type: NRG; PAM sequence: GAG
aaatgtctgtatagttagat

SEQ ID NO: 140814 - DNA, 20 bp, Artificial Sequence
  Description of Artificial Sequence: Synthetic oligonucleotide
  Target: LAMA2; (+) strand; PAM type: NRG; PAM sequence: CAG
aatcacatccaaaatgacat

SEQ ID NO: 140815 - DNA, 20 bp, Artificial Sequence
  Description of Artificial Sequence: Synthetic oligonucleotide
  Target: LAMA2; (+) strand; PAM type: NRG; PAM sequence: AGG
atcacatccaaaatgacatc

SEQ ID NO: 140816 - DNA, 20 bp, Artificial Sequence
  Description of Artificial Sequence: Synthetic oligonucleotide
  Target: LAMA2; (+) strand; PAM type: NRG; PAM sequence: CAG
ccaaaatgacatcaggcttg

SEQ ID NO: 140817 - DNA, 20 bp, Artificial Sequence
  Description of Artificial Sequence: Synthetic oligonucleotide
  Target: LAMA2; (+) strand; PAM type: NRG; PAM sequence: TGG
ttacactcttcacacttcat

SEQ ID NO: 140818 - DNA, 20 bp, Artificial Sequence
  Description of Artificial Sequence: Synthetic oligonucleotide
  Target: LAMA2; (+) strand; PAM type: NRG; PAM sequence: GAG
ttcacacttcattggcaatt

SEQ ID NO: 140819 - DNA, 20 bp, Artificial Sequence
  Description of Artificial Sequence: Synthetic oligonucleotide
  Target: LAMA2; (+) strand; PAM type: NRG; PAM sequence: AGG
tcacacttcattggcaattg

SEQ ID NO: 140820 - DNA, 20 bp, Artificial Sequence
  Description of Artificial Sequence: Synthetic oligonucleotide
  Target: LAMA2; (+) strand; PAM type: NRG; PAM sequence: TAG
gaggtcaccactttaaaatt

SEQ ID NO: 140821 - DNA, 20 bp, Artificial Sequence
  Description of Artificial Sequence: Synthetic oligonucleotide
  Target: LAMA2; (+) strand; PAM type: NRG; PAM sequence: AGG
aggtcaccactttaaaattt

SEQ ID NO: 140822 - DNA, 20 bp, Artificial Sequence
  Description of Artificial Sequence: Synthetic oligonucleotide
  Target: LAMA2; (+) strand; PAM type: NRG; PAM sequence: GGG
ggtcaccactttaaaattta

SEQ ID NO: 140823 - DNA, 20 bp, Artificial Sequence
  Description of Artificial Sequence: Synthetic oligonucleotide
  Target: LAMA2; (+) strand; PAM type: NRG; PAM sequence: AAG
ccactttaaaatttagggtg

SEQ ID NO: 140824 - DNA, 20 bp, Artificial Sequence
  Description of Artificial Sequence: Synthetic oligonucleotide
  Target: LAMA2; (+) strand; PAM type: NRG; PAM sequence: AGG
cactttaaaatttagggtga

SEQ ID NO: 140825 - DNA, 20 bp, Artificial Sequence
  Description of Artificial Sequence: Synthetic oligonucleotide
  Target: LAMA2; (+) strand; PAM type: NRG; PAM sequence: AAG
aaaatttagggtgaaggcta

SEQ ID NO: 140826 - DNA, 20 bp, Artificial Sequence
  Description of Artificial Sequence: Synthetic oligonucleotide
  Target: LAMA2; (+) strand; PAM type: NRG; PAM sequence: CAG
ttagggtgaaggctaaagac

SEQ ID NO: 140827 - DNA, 20 bp, Artificial Sequence
  Description of Artificial Sequence: Synthetic oligonucleotide
  Target: LAMA2; (+) strand; PAM type: NRG; PAM sequence: TGG
agaccagcttgacaaactgt

SEQ ID NO: 140828 - DNA, 20 bp, Artificial Sequence
  Description of Artificial Sequence: Synthetic oligonucleotide
  Target: LAMA2; (+) strand; PAM type: NRG; PAM sequence: CGG
ccagcttgacaaactgttgg

SEQ ID NO: 140829 - DNA, 20 bp, Artificial Sequence
  Description of Artificial Sequence: Synthetic oligonucleotide
  Target: LAMA2; (+) strand; PAM type: NRG; PAM sequence: AAG
ggcggaatgctctcttttgc

SEQ ID NO: 140830 - DNA, 20 bp, Artificial Sequence
  Description of Artificial Sequence: Synthetic oligonucleotide
  Target: LAMA2; (+) strand; PAM type: NRG; PAM sequence: AAG
ttttgcaagtcttcgttttg

SEQ ID NO: 140831 - DNA, 20 bp, Artificial Sequence
  Description of Artificial Sequence: Synthetic oligonucleotide
  Target: LAMA2; (+) strand; PAM type: NRG; PAM sequence: AAG
gcaagtcttcgttttgaaga

SEQ ID NO: 140832 - DNA, 20 bp, Artificial Sequence
  Description of Artificial Sequence: Synthetic oligonucleotide
  Target: LAMA2; (+) strand; PAM type: NRG; PAM sequence: TAG
tgaagaaagaatgtgtgatt

SEQ ID NO: 140833 - DNA, 20 bp, Artificial Sequence
  Description of Artificial Sequence: Synthetic oligonucleotide
  Target: LAMA2; (+) strand; PAM type: NRG; PAM sequence: AAG
tgtgtgatttagaaatattt

SEQ ID NO: 140834 - DNA, 20 bp, Artificial Sequence
  Description of Artificial Sequence: Synthetic oligonucleotide
  Target: LAMA2; (+) strand; PAM type: NRG; PAM sequence: TGG
aatatttaagattgtcattt

SEQ ID NO: 140835 - DNA, 20 bp, Artificial Sequence
  Description of Artificial Sequence: Synthetic oligonucleotide
  Target: LAMA2; (+) strand; PAM type: NRG; PAM sequence: TAG
atttaagattgtcattttgg

SEQ ID NO: 140836 - DNA, 20 bp, Artificial Sequence
  Description of Artificial Sequence: Synthetic oligonucleotide
  Target: LAMA2; (+) strand; PAM type: NRG; PAM sequence: CAG
gaacttctcatctatcaatg

SEQ ID NO: 140837 - DNA, 20 bp, Artificial Sequence
  Description of Artificial Sequence: Synthetic oligonucleotide
  Target: LAMA2; (+) strand; PAM type: NRG; PAM sequence: AGG
aacttctcatctatcaatgc

SEQ ID NO: 140838 - DNA, 20 bp, Artificial Sequence
  Description of Artificial Sequence: Synthetic oligonucleotide
  Target: LAMA2; (+) strand; PAM type: NRG; PAM sequence: GGG
acttctcatctatcaatgca

SEQ ID NO: 140839 - DNA, 20 bp, Artificial Sequence
  Description of Artificial Sequence: Synthetic oligonucleotide
  Target: LAMA2; (+) strand; PAM type: NRG; PAM sequence: CAG
tcatctatcaatgcagggtg

SEQ ID NO: 140840 - DNA, 20 bp, Artificial Sequence
  Description of Artificial Sequence: Synthetic oligonucleotide
  Target: LAMA2; (+) strand; PAM type: NRG; PAM sequence: TGG
cctatttattaatgttgtgt

SEQ ID NO: 140841 - DNA, 20 bp, Artificial Sequence
  Description of Artificial Sequence: Synthetic oligonucleotide
  Target: LAMA2; (+) strand; PAM type: NRG; PAM sequence: TAG
tttattaatgttgtgttggt

SEQ ID NO: 140842 - DNA, 20 bp, Artificial Sequence
  Description of Artificial Sequence: Synthetic oligonucleotide
  Target: LAMA2; (+) strand; PAM type: NRG; PAM sequence: TAG
ggttagatatgttcacccat

SEQ ID NO: 140843 - DNA, 20 bp, Artificial Sequence
  Description of Artificial Sequence: Synthetic oligonucleotide
  Target: LAMA2; (+) strand; PAM type: NRG; PAM sequence: AGG
gttagatatgttcacccatt

SEQ ID NO: 140844 - DNA, 20 bp, Artificial Sequence
  Description of Artificial Sequence: Synthetic oligonucleotide
  Target: LAMA2; (+) strand; PAM type: NRG; PAM sequence: CAG
gttcacccattaggtacgtg

SEQ ID NO: 140845 - DNA, 20 bp, Artificial Sequence
  Description of Artificial Sequence: Synthetic oligonucleotide
  Target: LAMA2; (+) strand; PAM type: NRG; PAM sequence: GAG
tcacccattaggtacgtgca

SEQ ID NO: 140846 - DNA, 20 bp, Artificial Sequence
  Description of Artificial Sequence: Synthetic oligonucleotide
  Target: LAMA2; (+) strand; PAM type: NRG; PAM sequence: AGG
cacccattaggtacgtgcag

SEQ ID NO: 140847 - DNA, 20 bp, Artificial Sequence
  Description of Artificial Sequence: Synthetic oligonucleotide
  Target: LAMA2; (+) strand; PAM type: NRG; PAM sequence: GAG
agaggtacctgaaaccatct

SEQ ID NO: 140848 - DNA, 20 bp, Artificial Sequence
  Description of Artificial Sequence: Synthetic oligonucleotide
  Target: LAMA2; (+) strand; PAM type: NRG; PAM sequence: GAG
aggtacctgaaaccatctga

SEQ ID NO: 140849 - DNA, 20 bp, Artificial Sequence
  Description of Artificial Sequence: Synthetic oligonucleotide
  Target: LAMA2; (+) strand; PAM type: NRG; PAM sequence: AGG
ggtacctgaaaccatctgag

SEQ ID NO: 140850 - DNA, 20 bp, Artificial Sequence
  Description of Artificial Sequence: Synthetic oligonucleotide
  Target: LAMA2; (+) strand; PAM type: NRG; PAM sequence: TGG
acctgaaaccatctgagagg

SEQ ID NO: 140851 - DNA, 20 bp, Artificial Sequence
  Description of Artificial Sequence: Synthetic oligonucleotide
  Target: LAMA2; (+) strand; PAM type: NRG; PAM sequence: GAG
attgaactttaaaaataact

SEQ ID NO: 140852 - DNA, 20 bp, Artificial Sequence
  Description of Artificial Sequence: Synthetic oligonucleotide
  Target: LAMA2; (+) strand; PAM type: NRG; PAM sequence: AAG
actgagcatcttttatatac

SEQ ID NO: 140853 - DNA, 20 bp, Artificial Sequence
  Description of Artificial Sequence: Synthetic oligonucleotide
  Target: LAMA2; (+) strand; PAM type: NRG; PAM sequence: CAG
ttttatatacaagacattaa

SEQ ID NO: 140854 - DNA, 20 bp, Artificial Sequence
  Description of Artificial Sequence: Synthetic oligonucleotide
  Target: LAMA2; (+) strand; PAM type: NRG; PAM sequence: TGG
taacagacatttatattcta

SEQ ID NO: 140855 - DNA, 20 bp, Artificial Sequence
  Description of Artificial Sequence: Synthetic oligonucleotide
  Target: LAMA2; (+) strand; PAM type: NRG; PAM sequence: TAG
tattctatggtatctactgc

SEQ ID NO: 140856 - DNA, 20 bp, Artificial Sequence
  Description of Artificial Sequence: Synthetic oligonucleotide
  Target: LAMA2; (+) strand; PAM type: NRG; PAM sequence: CAG
ctactgctagcaacttataa

SEQ ID NO: 140857 - DNA, 20 bp, Artificial Sequence
  Description of Artificial Sequence: Synthetic oligonucleotide
  Target: LAMA2; (+) strand; PAM type: NRG; PAM sequence: TGG
ctagcaacttataacagttt

SEQ ID NO: 140858 - DNA, 20 bp, Artificial Sequence
  Description of Artificial Sequence: Synthetic oligonucleotide
  Target: LAMA2; (+) strand; PAM type: NRG; PAM sequence: TGG
gcaacttataacagttttgg

SEQ ID NO: 140859 - DNA, 20 bp, Artificial Sequence
  Description of Artificial Sequence: Synthetic oligonucleotide
  Target: LAMA2; (+) strand; PAM type: NRG; PAM sequence: AAG
acagttttggtggtaaaata

SEQ ID NO: 140860 - DNA, 20 bp, Artificial Sequence
  Description of Artificial Sequence: Synthetic oligonucleotide
  Target: LAMA2; (+) strand; PAM type: NRG; PAM sequence: AGG
cagttttggtggtaaaataa

SEQ ID NO: 140861 - DNA, 20 bp, Artificial Sequence
  Description of Artificial Sequence: Synthetic oligonucleotide
  Target: LAMA2; (+) strand; PAM type: NRG; PAM sequence: AAG
aacaaaattaaattatcaaa

SEQ ID NO: 140862 - DNA, 20 bp, Artificial Sequence
  Description of Artificial Sequence: Synthetic oligonucleotide
  Target: LAMA2; (+) strand; PAM type: NRG; PAM sequence: CAG
aattatcaaaaagaaatgct

SEQ ID NO: 140863 - DNA, 20 bp, Artificial Sequence
  Description of Artificial Sequence: Synthetic oligonucleotide
  Target: LAMA2; (+) strand; PAM type: NRG; PAM sequence: GAG
gttaatttaaaatataaaat

SEQ ID NO: 140864 - DNA, 20 bp, Artificial Sequence
  Description of Artificial Sequence: Synthetic oligonucleotide
  Target: LAMA2; (+) strand; PAM type: NRG; PAM sequence: GAG
taaaatataaaatgagacat

SEQ ID NO: 140865 - DNA, 20 bp, Artificial Sequence
  Description of Artificial Sequence: Synthetic oligonucleotide
  Target: LAMA2; (+) strand; PAM type: NRG; PAM sequence: TAG
atgagacatgagaataacct

SEQ ID NO: 140866 - DNA, 20 bp, Artificial Sequence
  Description of Artificial Sequence: Synthetic oligonucleotide
  Target: LAMA2; (+) strand; PAM type: NRG; PAM sequence: AGG
tgagacatgagaataacctt

SEQ ID NO: 140867 - DNA, 20 bp, Artificial Sequence
  Description of Artificial Sequence: Synthetic oligonucleotide
  Target: LAMA2; (+) strand; PAM type: NRG; PAM sequence: TAG
acatgagaataaccttaggt

SEQ ID NO: 140868 - DNA, 20 bp, Artificial Sequence
  Description of Artificial Sequence: Synthetic oligonucleotide
  Target: LAMA2; (+) strand; PAM type: NRG; PAM sequence: CAG
ataaccttaggttagaaatt

SEQ ID NO: 140869 - DNA, 20 bp, Artificial Sequence
  Description of Artificial Sequence: Synthetic oligonucleotide
  Target: LAMA2; (+) strand; PAM type: NRG; PAM sequence: TAG
ttaggttagaaattcagatg

SEQ ID NO: 140870 - DNA, 20 bp, Artificial Sequence
  Description of Artificial Sequence: Synthetic oligonucleotide
  Target: LAMA2; (+) strand; PAM type: NRG; PAM sequence: AAG
atgtagaaaatatctgtata

SEQ ID NO: 140871 - DNA, 20 bp, Artificial Sequence
  Description of Artificial Sequence: Synthetic oligonucleotide
  Target: LAMA2; (+) strand; PAM type: NRG; PAM sequence: AAG
tagaaaatatctgtataaag

SEQ ID NO: 140872 - DNA, 20 bp, Artificial Sequence
  Description of Artificial Sequence: Synthetic oligonucleotide
  Target: LAMA2; (+) strand; PAM type: NRG; PAM sequence: TAG
aaatatctgtataaagaagt

SEQ ID NO: 140873 - DNA, 20 bp, Artificial Sequence
  Description of Artificial Sequence: Synthetic oligonucleotide
  Target: LAMA2; (+) strand; PAM type: NRG; PAM sequence: TAG
gaagttagttgaaatactca

SEQ ID NO: 140874 - DNA, 20 bp, Artificial Sequence
  Description of Artificial Sequence: Synthetic oligonucleotide
  Target: LAMA2; (+) strand; PAM type: NRG; PAM sequence: AGG
aagttagttgaaatactcat

SEQ ID NO: 140875 - DNA, 20 bp, Artificial Sequence
  Description of Artificial Sequence: Synthetic oligonucleotide
  Target: LAMA2; (+) strand; PAM type: NRG; PAM sequence: AAG
tgaaatactcataggcatga

SEQ ID NO: 140876 - DNA, 20 bp, Artificial Sequence
  Description of Artificial Sequence: Synthetic oligonucleotide
  Target: LAMA2; (+) strand; PAM type: NRG; PAM sequence: AGG
gaaatactcataggcatgaa

SEQ ID NO: 140877 - DNA, 20 bp, Artificial Sequence
  Description of Artificial Sequence: Synthetic oligonucleotide
  Target: LAMA2; (+) strand; PAM type: NRG; PAM sequence: AAG
catgaaaggtattttgcaaa

SEQ ID NO: 140878 - DNA, 20 bp, Artificial Sequence
  Description of Artificial Sequence: Synthetic oligonucleotide
  Target: LAMA2; (+) strand; PAM type: NRG; PAM sequence: AAG
aggtattttgcaaaaagcaa

SEQ ID NO: 140879 - DNA, 20 bp, Artificial Sequence
  Description of Artificial Sequence: Synthetic oligonucleotide
  Target: LAMA2; (+) strand; PAM type: NRG; PAM sequence: TAG
tattttgcaaaaagcaaaag

SEQ ID NO: 140880 - DNA, 20 bp, Artificial Sequence
  Description of Artificial Sequence: Synthetic oligonucleotide
  Target: LAMA2; (+) strand; PAM type: NRG; PAM sequence: AGG
attttgcaaaaagcaaaagt

SEQ ID NO: 140881 - DNA, 20 bp, Artificial Sequence
  Description of Artificial Sequence: Synthetic oligonucleotide
  Target: LAMA2; (+) strand; PAM type: NRG; PAM sequence: TGG
aaagcaaaagtaggcaaaac

SEQ ID NO: 140882 - DNA, 20 bp, Artificial Sequence
  Description of Artificial Sequence: Synthetic oligonucleotide
  Target: LAMA2; (+) strand; PAM type: NRG; PAM sequence: AAG
taggcaaaactggatctatg

SEQ ID NO: 140883 - DNA, 20 bp, Artificial Sequence
  Description of Artificial Sequence: Synthetic oligonucleotide
  Target: LAMA2; (+) strand; PAM type: NRG; PAM sequence: TAG
gaagttgctccataatgtac

SEQ ID NO: 140884 - DNA, 20 bp, Artificial Sequence
  Description of Artificial Sequence: Synthetic oligonucleotide
  Target: LAMA2; (+) strand; PAM type: NRG; PAM sequence: CAG
ttgctccataatgtactagt

SEQ ID NO: 140885 - DNA, 20 bp, Artificial Sequence
  Description of Artificial Sequence: Synthetic oligonucleotide
  Target: LAMA2; (+) strand; PAM type: NRG; PAM sequence: AGG
tgctccataatgtactagtc

SEQ ID NO: 140886 - DNA, 20 bp, Artificial Sequence
  Description of Artificial Sequence: Synthetic oligonucleotide
  Target: LAMA2; (+) strand; PAM type: NRG; PAM sequence: AAG
cataatgtactagtcaggtg

SEQ ID NO: 140887 - DNA, 20 bp, Artificial Sequence
  Description of Artificial Sequence: Synthetic oligonucleotide
  Target: LAMA2; (+) strand; PAM type: NRG; PAM sequence: TAG
aatgtactagtcaggtgaag

SEQ ID NO: 140888 - DNA, 20 bp, Artificial Sequence
  Description of Artificial Sequence: Synthetic oligonucleotide
  Target: LAMA2; (+) strand; PAM type: NRG; PAM sequence: TAG
gtgaagtagcacaaattacc

SEQ ID NO: 140889 - DNA, 20 bp, Artificial Sequence
  Description of Artificial Sequence: Synthetic oligonucleotide
  Target: LAMA2; (+) strand; PAM type: NRG; PAM sequence: CAG
gcacaaattacctagtgtat

SEQ ID NO: 140890 - DNA, 20 bp, Artificial Sequence
  Description of Artificial Sequence: Synthetic oligonucleotide
  Target: LAMA2; (+) strand; PAM type: NRG; PAM sequence: TGG
acatattaccacaaacttaa

SEQ ID NO: 140891 - DNA, 20 bp, Artificial Sequence
  Description of Artificial Sequence: Synthetic oligonucleotide
  Target: LAMA2; (+) strand; PAM type: NRG; PAM sequence: CAG
aacctcacaaatttatctca

SEQ ID NO: 140892 - DNA, 20 bp, Artificial Sequence
  Description of Artificial Sequence: Synthetic oligonucleotide
  Target: LAMA2; (+) strand; PAM type: NRG; PAM sequence: TAG
aaatttatctcacagtttaa

SEQ ID NO: 140893 - DNA, 20 bp, Artificial Sequence
  Description of Artificial Sequence: Synthetic oligonucleotide
  Target: LAMA2; (+) strand; PAM type: NRG; PAM sequence: AGG
aatttatctcacagtttaat

SEQ ID NO: 140894 - DNA, 20 bp, Artificial Sequence
  Description of Artificial Sequence: Synthetic oligonucleotide
  Target: LAMA2; (+) strand; PAM type: NRG; PAM sequence: TAG
tatctcacagtttaataggt

SEQ ID NO: 140895 - DNA, 20 bp, Artificial Sequence
  Description of Artificial Sequence: Synthetic oligonucleotide
  Target: LAMA2; (+) strand; PAM type: NRG; PAM sequence: TAG
ctcacagtttaataggttag

SEQ ID NO: 140896 - DNA, 20 bp, Artificial Sequence
  Description of Artificial Sequence: Synthetic oligonucleotide
  Target: LAMA2; (+) strand; PAM type: NRG; PAM sequence: AAG
ataggttagtagtctgacac

SEQ ID NO: 140897 - DNA, 20 bp, Artificial Sequence
  Description of Artificial Sequence: Synthetic oligonucleotide
  Target: LAMA2; (+) strand; PAM type: NRG; PAM sequence: GAG
agtctgacacaagtctcact

SEQ ID NO: 140898 - DNA, 20 bp, Artificial Sequence
  Description of Artificial Sequence: Synthetic oligonucleotide
  Target: LAMA2; (+) strand; PAM type: NRG; PAM sequence: AAG
acacaagtctcactgagcta

SEQ ID NO: 140899 - DNA, 20 bp, Artificial Sequence
  Description of Artificial Sequence: Synthetic oligonucleotide
  Target: LAMA2; (+) strand; PAM type: NRG; PAM sequence: CAG
agtctcactgagctaaagtc

SEQ ID NO: 140900 - DNA, 20 bp, Artificial Sequence
  Description of Artificial Sequence: Synthetic oligonucleotide
  Target: LAMA2; (+) strand; PAM type: NRG; PAM sequence: AGG
gtctcactgagctaaagtcc

SEQ ID NO: 140901 - DNA, 20 bp, Artificial Sequence
  Description of Artificial Sequence: Synthetic oligonucleotide
  Target: LAMA2; (+) strand; PAM type: NRG; PAM sequence: TGG
actgagctaaagtccaggtg

SEQ ID NO: 140902 - DNA, 20 bp, Artificial Sequence
  Description of Artificial Sequence: Synthetic oligonucleotide
  Target: LAMA2; (+) strand; PAM type: NRG; PAM sequence: GGG
ctgagctaaagtccaggtgt

SEQ ID NO: 140903 - DNA, 20 bp, Artificial Sequence
  Description of Artificial Sequence: Synthetic oligonucleotide
  Target: LAMA2; (+) strand; PAM type: NRG; PAM sequence: TAG
agctaaagtccaggtgtggg

SEQ ID NO: 140904 - DNA, 20 bp, Artificial Sequence
  Description of Artificial Sequence: Synthetic oligonucleotide
  Target: LAMA2; (+) strand; PAM type: NRG; PAM sequence: TGG
ggtagtattgcatttctttc

SEQ ID NO: 140905 - DNA, 20 bp, Artificial Sequence
  Description of Artificial Sequence: Synthetic oligonucleotide
  Target: LAMA2; (+) strand; PAM type: NRG; PAM sequence: GAG
tagtattgcatttctttctg

SEQ ID NO: 140906 - DNA, 20 bp, Artificial Sequence
  Description of Artificial Sequence: Synthetic oligonucleotide
  Target: LAMA2; (+) strand; PAM type: NRG; PAM sequence: AGG
agtattgcatttctttctgg

SEQ ID NO: 140907 - DNA, 20 bp, Artificial Sequence
  Description of Artificial Sequence: Synthetic oligonucleotide
  Target: LAMA2; (+) strand; PAM type: NRG; PAM sequence: AAG
catttctttctggaggctct

SEQ ID NO: 140908 - DNA, 20 bp, Artificial Sequence
  Description of Artificial Sequence: Synthetic oligonucleotide
  Target: LAMA2; (+) strand; PAM type: NRG; PAM sequence: AGG
atttctttctggaggctcta

SEQ ID NO: 140909 - DNA, 20 bp, Artificial Sequence
  Description of Artificial Sequence: Synthetic oligonucleotide
  Target: LAMA2; (+) strand; PAM type: NRG; PAM sequence: TAG
tctttctggaggctctaagg

SEQ ID NO: 140910 - DNA, 20 bp, Artificial Sequence
  Description of Artificial Sequence: Synthetic oligonucleotide
  Target: LAMA2; (+) strand; PAM type: NRG; PAM sequence: TAG
ttttctaaaattcattcatt

SEQ ID NO: 140911 - DNA, 20 bp, Artificial Sequence
  Description of Artificial Sequence: Synthetic oligonucleotide
  Target: LAMA2; (+) strand; PAM type: NRG; PAM sequence: AGG
tttctaaaattcattcattt

SEQ ID NO: 140912 - DNA, 20 bp, Artificial Sequence
  Description of Artificial Sequence: Synthetic oligonucleotide
  Target: LAMA2; (+) strand; PAM type: NRG; PAM sequence: TAG
taaaattcattcatttagga

SEQ ID NO: 140913 - DNA, 20 bp, Artificial Sequence
  Description of Artificial Sequence: Synthetic oligonucleotide
  Target: LAMA2; (+) strand; PAM type: NRG; PAM sequence: AAG
aattcattcatttaggatag

SEQ ID NO: 140914 - DNA, 20 bp, Artificial Sequence
  Description of Artificial Sequence: Synthetic oligonucleotide
  Target: LAMA2; (+) strand; PAM type: NRG; PAM sequence: AAG
tcatttaggatagaagctga

SEQ ID NO: 140915 - DNA, 20 bp, Artificial Sequence
  Description of Artificial Sequence: Synthetic oligonucleotide
  Target: LAMA2; (+) strand; PAM type: NRG; PAM sequence: CAG
aggatagaagctgaaagaat

SEQ ID NO: 140916 - DNA, 20 bp, Artificial Sequence
  Description of Artificial Sequence: Synthetic oligonucleotide
  Target: LAMA2; (+) strand; PAM type: NRG; PAM sequence: CAG
gctgaaagaatcagtttcta

SEQ ID NO: 140917 - DNA, 20 bp, Artificial Sequence
  Description of Artificial Sequence: Synthetic oligonucleotide
  Target: LAMA2; (+) strand; PAM type: NRG; PAM sequence: AGG
ctgaaagaatcagtttctac

SEQ ID NO: 140918 - DNA, 20 bp, Artificial Sequence
  Description of Artificial Sequence: Synthetic oligonucleotide
  Target: LAMA2; (+) strand; PAM type: NRG; PAM sequence: TGG
tacaggctacctgcatcctt

SEQ ID NO: 140919 - DNA, 20 bp, Artificial Sequence
  Description of Artificial Sequence: Synthetic oligonucleotide
  Target: LAMA2; (+) strand; PAM type: NRG; PAM sequence: AAG
gaccccttcctccatcttca

SEQ ID NO: 140920 - DNA, 20 bp, Artificial Sequence
  Description of Artificial Sequence: Synthetic oligonucleotide
  Target: LAMA2; (+) strand; PAM type: NRG; PAM sequence: CAG
ccttcctccatcttcaaagc

SEQ ID NO: 140921 - DNA, 20 bp, Artificial Sequence
  Description of Artificial Sequence: Synthetic oligonucleotide
  Target: LAMA2; (+) strand; PAM type: NRG; PAM sequence: AGG
cttcctccatcttcaaagcc

SEQ ID NO: 140922 - DNA, 20 bp, Artificial Sequence
  Description of Artificial Sequence: Synthetic oligonucleotide
  Target: LAMA2; (+) strand; PAM type: NRG; PAM sequence: CAG
tccatcttcaaagccaggaa

SEQ ID NO: 140923 - DNA, 20 bp, Artificial Sequence
  Description of Artificial Sequence: Synthetic oligonucleotide
  Target: LAMA2; (+) strand; PAM type: NRG; PAM sequence: AGG
ccatcttcaaagccaggaac

SEQ ID NO: 140924 - DNA, 20 bp, Artificial Sequence
  Description of Artificial Sequence: Synthetic oligonucleotide
  Target: LAMA2; (+) strand; PAM type: NRG; PAM sequence: CAG
tgcctccctcttatactttt

SEQ ID NO: 140925 - DNA, 20 bp, Artificial Sequence
  Description of Artificial Sequence: Synthetic oligonucleotide
  Target: LAMA2; (+) strand; PAM type: NRG; PAM sequence: AGG
gcctccctcttatacttttc

SEQ ID NO: 140926 - DNA, 20 bp, Artificial Sequence
  Description of Artificial Sequence: Synthetic oligonucleotide
  Target: LAMA2; (+) strand; PAM type: NRG; PAM sequence: GAG
aggacccttatgattacatt

SEQ ID NO: 140927 - DNA, 20 bp, Artificial Sequence
  Description of Artificial Sequence: Synthetic oligonucleotide
  Target: LAMA2; (+) strand; PAM type: NRG; PAM sequence: CAG
ccttatgattacattgagcc

SEQ ID NO: 140928 - DNA, 20 bp, Artificial Sequence
  Description of Artificial Sequence: Synthetic oligonucleotide
  Target: LAMA2; (+) strand; PAM type: NRG; PAM sequence: TGG
tatgattacattgagcccag

SEQ ID NO: 140929 - DNA, 20 bp, Artificial Sequence
  Description of Artificial Sequence: Synthetic oligonucleotide
  Target: LAMA2; (+) strand; PAM type: NRG; PAM sequence: CAG
attgagcccagtggattatc

SEQ ID NO: 140930 - DNA, 20 bp, Artificial Sequence
  Description of Artificial Sequence: Synthetic oligonucleotide
  Target: LAMA2; (+) strand; PAM type: NRG; PAM sequence: AGG
ttgagcccagtggattatcc

SEQ ID NO: 140931 - DNA, 20 bp, Artificial Sequence
  Description of Artificial Sequence: Synthetic oligonucleotide
  Target: LAMA2; (+) strand; PAM type: NRG; PAM sequence: GGG
tgagcccagtggattatcca

SEQ ID NO: 140932 - DNA, 20 bp, Artificial Sequence
  Description of Artificial Sequence: Synthetic oligonucleotide
  Target: LAMA2; (+) strand; PAM type: NRG; PAM sequence: AAG
cagggtgatcctttcatctc

SEQ ID NO: 140933 - DNA, 20 bp, Artificial Sequence
  Description of Artificial Sequence: Synthetic oligonucleotide
  Target: LAMA2; (+) strand; PAM type: NRG; PAM sequence: AGG
agggtgatcctttcatctca

SEQ ID NO: 140934 - DNA, 20 bp, Artificial Sequence
  Description of Artificial Sequence: Synthetic oligonucleotide
  Target: LAMA2; (+) strand; PAM type: NRG; PAM sequence: AAG
ttaactgaatcatatctaca

SEQ ID NO: 140935 - DNA, 20 bp, Artificial Sequence
  Description of Artificial Sequence: Synthetic oligonucleotide
  Target: LAMA2; (+) strand; PAM type: NRG; PAM sequence: AAG
aaagttccctttgccataaa

SEQ ID NO: 140936 - DNA, 20 bp, Artificial Sequence
  Description of Artificial Sequence: Synthetic oligonucleotide
  Target: LAMA2; (+) strand; PAM type: NRG; PAM sequence: AGG
aagttccctttgccataaaa

SEQ ID NO: 140937 - DNA, 20 bp, Artificial Sequence
  Description of Artificial Sequence: Synthetic oligonucleotide
  Target: LAMA2; (+) strand; PAM type: NRG; PAM sequence: GGG
agttccctttgccataaaaa

SEQ ID NO: 140938 - DNA, 20 bp, Artificial Sequence
  Description of Artificial Sequence: Synthetic oligonucleotide
  Target: LAMA2; (+) strand; PAM type: NRG; PAM sequence: CAG
cataaaaagggtcatattca

SEQ ID NO: 140939 - DNA, 20 bp, Artificial Sequence
  Description of Artificial Sequence: Synthetic oligonucleotide
  Target: LAMA2; (+) strand; PAM type: NRG; PAM sequence: AGG
ataaaaagggtcatattcac

SEQ ID NO: 140940 - DNA, 20 bp, Artificial Sequence
  Description of Artificial Sequence: Synthetic oligonucleotide
  Target: LAMA2; (+) strand; PAM type: NRG; PAM sequence: AAG
gggtcatattcacaggttcc

SEQ ID NO: 140941 - DNA, 20 bp, Artificial Sequence
  Description of Artificial Sequence: Synthetic oligonucleotide
  Target: LAMA2; (+) strand; PAM type: NRG; PAM sequence: TAG
caggttccaagaattaaata

SEQ ID NO: 140942 - DNA, 20 bp, Artificial Sequence
  Description of Artificial Sequence: Synthetic oligonucleotide
  Target: LAMA2; (+) strand; PAM type: NRG; PAM sequence: GAG
aattaaatatagacgtcttt

SEQ ID NO: 140943 - DNA, 20 bp, Artificial Sequence
  Description of Artificial Sequence: Synthetic oligonucleotide
  Target: LAMA2; (+) strand; PAM type: NRG; PAM sequence: AGG
attaaatatagacgtctttg

SEQ ID NO: 140944 - DNA, 20 bp, Artificial Sequence
  Description of Artificial Sequence: Synthetic oligonucleotide
  Target: LAMA2; (+) strand; PAM type: NRG; PAM sequence: GGG
ttaaatatagacgtctttga

SEQ ID NO: 140945 - DNA, 20 bp, Artificial Sequence
  Description of Artificial Sequence: Synthetic oligonucleotide
  Target: LAMA2; (+) strand; PAM type: NRG; PAM sequence: TAG
actgtttactctaccataac

SEQ ID NO: 140946 - DNA, 20 bp, Artificial Sequence
  Description of Artificial Sequence: Synthetic oligonucleotide
  Target: LAMA2; (+) strand; PAM type: NRG; PAM sequence: CAG
tctcatttcaattttctaat

SEQ ID NO: 140947 - DNA, 20 bp, Artificial Sequence
  Description of Artificial Sequence: Synthetic oligonucleotide
  Target: LAMA2; (+) strand; PAM type: NRG; PAM sequence: TAG
atcagttactacctgtctct

SEQ ID NO: 140948 - DNA, 20 bp, Artificial Sequence
  Description of Artificial Sequence: Synthetic oligonucleotide
  Target: LAMA2; (+) strand; PAM type: NRG; PAM sequence: GAG
cagttactacctgtctctta

SEQ ID NO: 140949 - DNA, 20 bp, Artificial Sequence
  Description of Artificial Sequence: Synthetic oligonucleotide
  Target: LAMA2; (+) strand; PAM type: NRG; PAM sequence: TAG
ctgtctcttagagttcttgt

SEQ ID NO: 140950 - DNA, 20 bp, Artificial Sequence
  Description of Artificial Sequence: Synthetic oligonucleotide
  Target: LAMA2; (+) strand; PAM type: NRG; PAM sequence: CAG
tctcttagagttcttgttag

SEQ ID NO: 140951 - DNA, 20 bp, Artificial Sequence
  Description of Artificial Sequence: Synthetic oligonucleotide
  Target: LAMA2; (+) strand; PAM type: NRG; PAM sequence: AAG
aaacaaatttctgtgtaata

SEQ ID NO: 140952 - DNA, 20 bp, Artificial Sequence
  Description of Artificial Sequence: Synthetic oligonucleotide
  Target: LAMA2; (+) strand; PAM type: NRG; PAM sequence: TGG
tttctgtgtaataaagtgcc

SEQ ID NO: 140953 - DNA, 20 bp, Artificial Sequence
  Description of Artificial Sequence: Synthetic oligonucleotide
  Target: LAMA2; (+) strand; PAM type: NRG; PAM sequence: AAG
gtaataaagtgcctggcaaa

SEQ ID NO: 140954 - DNA, 20 bp, Artificial Sequence
  Description of Artificial Sequence: Synthetic oligonucleotide
  Target: LAMA2; (+) strand; PAM type: NRG; PAM sequence: TAG
ataaagtgcctggcaaaaag

SEQ ID NO: 140955 - DNA, 20 bp, Artificial Sequence
  Description of Artificial Sequence: Synthetic oligonucleotide
  Target: LAMA2; (+) strand; PAM type: NRG; PAM sequence: AGG
taaagtgcctggcaaaaagt

SEQ ID NO: 140956 - DNA, 20 bp, Artificial Sequence
  Description of Artificial Sequence: Synthetic oligonucleotide
  Target: LAMA2; (+) strand; PAM type: NRG; PAM sequence: AAG
aataaaatgttattttcccc

SEQ ID NO: 140957 - DNA, 20 bp, Artificial Sequence
  Description of Artificial Sequence: Synthetic oligonucleotide
  Target: LAMA2; (+) strand; PAM type: NRG; PAM sequence: AGG
ataaaatgttattttcccca

SEQ ID NO: 140958 - DNA, 20 bp, Artificial Sequence
  Description of Artificial Sequence: Synthetic oligonucleotide
  Target: LAMA2; (+) strand; PAM type: NRG; PAM sequence: GGG
taaaatgttattttccccaa

SEQ ID NO: 140959 - DNA, 20 bp, Artificial Sequence
  Description of Artificial Sequence: Synthetic oligonucleotide
  Target: LAMA2; (+) strand; PAM type: NRG; PAM sequence: AAG
atgttattttccccaaggga

SEQ ID NO: 140960 - DNA, 20 bp, Artificial Sequence
  Description of Artificial Sequence: Synthetic oligonucleotide
  Target: LAMA2; (+) strand; PAM type: NRG; PAM sequence: TAG
ttccccaagggaaagattat

SEQ ID NO: 140961 - DNA, 20 bp, Artificial Sequence
  Description of Artificial Sequence: Synthetic oligonucleotide
  Target: LAMA2; (+) strand; PAM type: NRG; PAM sequence: AGG
tccccaagggaaagattatt

SEQ ID NO: 140962 - DNA, 20 bp, Artificial Sequence
  Description of Artificial Sequence: Synthetic oligonucleotide
  Target: LAMA2; (+) strand; PAM type: NRG; PAM sequence: TGG
attattaggaattataacat

SEQ ID NO: 140963 - DNA, 20 bp, Artificial Sequence
  Description of Artificial Sequence: Synthetic oligonucleotide
  Target: LAMA2; (+) strand; PAM type: NRG; PAM sequence: GGG
ttattaggaattataacatt

SEQ ID NO: 140964 - DNA, 20 bp, Artificial Sequence
  Description of Artificial Sequence: Synthetic oligonucleotide
  Target: LAMA2; (+) strand; PAM type: NRG; PAM sequence: AAG
gggacacacctttgtttaaa

SEQ ID NO: 140965 - DNA, 20 bp, Artificial Sequence
  Description of Artificial Sequence: Synthetic oligonucleotide
  Target: LAMA2; (+) strand; PAM type: NRG; PAM sequence: AAG
tttaaaaagctctaattaac

SEQ ID NO: 140966 - DNA, 20 bp, Artificial Sequence
  Description of Artificial Sequence: Synthetic oligonucleotide
  Target: LAMA2; (+) strand; PAM type: NRG; PAM sequence: CAG
gctctaattaacaagaacca

SEQ ID NO: 140967 - DNA, 20 bp, Artificial Sequence
  Description of Artificial Sequence: Synthetic oligonucleotide
  Target: LAMA2; (+) strand; PAM type: NRG; PAM sequence: CAG
ctaattaacaagaaccacag

SEQ ID NO: 140968 - DNA, 20 bp, Artificial Sequence
  Description of Artificial Sequence: Synthetic oligonucleotide
  Target: LAMA2; (+) strand; PAM type: NRG; PAM sequence: AGG
taattaacaagaaccacagc

SEQ ID NO: 140969 - DNA, 20 bp, Artificial Sequence
  Description of Artificial Sequence: Synthetic oligonucleotide
  Target: LAMA2; (+) strand; PAM type: NRG; PAM sequence: GGG
aattaacaagaaccacagca

SEQ ID NO: 140970 - DNA, 20 bp, Artificial Sequence
  Description of Artificial Sequence: Synthetic oligonucleotide
  Target: LAMA2; (+) strand; PAM type: NRG; PAM sequence: GGG
attaacaagaaccacagcag

SEQ ID NO: 140971 - DNA, 20 bp, Artificial Sequence
  Description of Artificial Sequence: Synthetic oligonucleotide
  Target: LAMA2; (+) strand; PAM type: NRG; PAM sequence: CAG
ccacagcaggggcgcacata

SEQ ID NO: 140972 - DNA, 20 bp, Artificial Sequence
  Description of Artificial Sequence: Synthetic oligonucleotide
  Target: LAMA2; (+) strand; PAM type: NRG; PAM sequence: AGG
cacagcaggggcgcacatac

SEQ ID NO: 140973 - DNA, 20 bp, Artificial Sequence
  Description of Artificial Sequence: Synthetic oligonucleotide
  Target: LAMA2; (+) strand; PAM type: NRG; PAM sequence: GGG
acagcaggggcgcacataca

SEQ ID NO: 140974 - DNA, 20 bp, Artificial Sequence
  Description of Artificial Sequence: Synthetic oligonucleotide
  Target: LAMA2; (+) strand; PAM type: NRG; PAM sequence: GGG
cagcaggggcgcacatacag

SEQ ID NO: 140975 - DNA, 20 bp, Artificial Sequence
  Description of Artificial Sequence: Synthetic oligonucleotide
  Target: LAMA2; (+) strand; PAM type: NRG; PAM sequence: TGG
aggggcgcacatacaggggt

SEQ ID NO: 140976 - DNA, 20 bp, Artificial Sequence
  Description of Artificial Sequence: Synthetic oligonucleotide
  Target: LAMA2; (+) strand; PAM type: NRG; PAM sequence: GAG
gggcgcacatacaggggttg

SEQ ID NO: 140977 - DNA, 20 bp, Artificial Sequence
  Description of Artificial Sequence: Synthetic oligonucleotide
  Target: LAMA2; (+) strand; PAM type: NRG; PAM sequence: GAG
gcgcacatacaggggttgga

SEQ ID NO: 140978 - DNA, 20 bp, Artificial Sequence
  Description of Artificial Sequence: Synthetic oligonucleotide
  Target: LAMA2; (+) strand; PAM type: NRG; PAM sequence: CAG
acaggggttggagagaaatt

SEQ ID NO: 140979 - DNA, 20 bp, Artificial Sequence
  Description of Artificial Sequence: Synthetic oligonucleotide
  Target: LAMA2; (+) strand; PAM type: NRG; PAM sequence: TAG
gggttggagagaaattcagt

SEQ ID NO: 140980 - DNA, 20 bp, Artificial Sequence
  Description of Artificial Sequence: Synthetic oligonucleotide
  Target: LAMA2; (+) strand; PAM type: NRG; PAM sequence: TGG
attcagttagtgctgtcttc

SEQ ID NO: 140981 - DNA, 20 bp, Artificial Sequence
  Description of Artificial Sequence: Synthetic oligonucleotide
  Target: LAMA2; (+) strand; PAM type: NRG; PAM sequence: TAG
ccattgttaaccttccattt

SEQ ID NO: 140982 - DNA, 20 bp, Artificial Sequence
  Description of Artificial Sequence: Synthetic oligonucleotide
  Target: LAMA2; (+) strand; PAM type: NRG; PAM sequence: AGG
cattgttaaccttccatttt

SEQ ID NO: 140983 - DNA, 20 bp, Artificial Sequence
  Description of Artificial Sequence: Synthetic oligonucleotide
  Target: LAMA2; (+) strand; PAM type: NRG; PAM sequence: AAG
gttaaccttccattttaggc

SEQ ID NO: 140984 - DNA, 20 bp, Artificial Sequence
  Description of Artificial Sequence: Synthetic oligonucleotide
  Target: LAMA2; (+) strand; PAM type: NRG; PAM sequence: AGG
ttaaccttccattttaggca

SEQ ID NO: 140985 - DNA, 20 bp, Artificial Sequence
  Description of Artificial Sequence: Synthetic oligonucleotide
  Target: LAMA2; (+) strand; PAM type: NRG; PAM sequence: GAG
aaccttccattttaggcaag

SEQ ID NO: 140986 - DNA, 20 bp, Artificial Sequence
  Description of Artificial Sequence: Synthetic oligonucleotide
  Target: LAMA2; (+) strand; PAM type: NRG; PAM sequence: TAG
ttttaggcaaggagctgtat

SEQ ID NO: 140987 - DNA, 20 bp, Artificial Sequence
  Description of Artificial Sequence: Synthetic oligonucleotide
  Target: LAMA2; (+) strand; PAM type: NRG; PAM sequence: AGG
tttaggcaaggagctgtatt

SEQ ID NO: 140988 - DNA, 20 bp, Artificial Sequence
  Description of Artificial Sequence: Synthetic oligonucleotide
  Target: LAMA2; (+) strand; PAM type: NRG; PAM sequence: TGG
ggagctgtattaggaaaatg

SEQ ID NO: 140989 - DNA, 20 bp, Artificial Sequence
  Description of Artificial Sequence: Synthetic oligonucleotide
  Target: LAMA2; (+) strand; PAM type: NRG; PAM sequence: AAG
atgtggtttccttttattaa

SEQ ID NO: 140990 - DNA, 20 bp, Artificial Sequence
  Description of Artificial Sequence: Synthetic oligonucleotide
  Target: LAMA2; (+) strand; PAM type: NRG; PAM sequence: TAG
gaaaatctctaaattattaa

SEQ ID NO: 140991 - DNA, 20 bp, Artificial Sequence
  Description of Artificial Sequence: Synthetic oligonucleotide
  Target: LAMA2; (+) strand; PAM type: NRG; PAM sequence: AAG
taatagatattacttttcca

SEQ ID NO: 140992 - DNA, 20 bp, Artificial Sequence
  Description of Artificial Sequence: Synthetic oligonucleotide
  Target: LAMA2; (+) strand; PAM type: NRG; PAM sequence: CAG
tacttttccaaagaaaattt

SEQ ID NO: 140993 - DNA, 20 bp, Artificial Sequence
  Description of Artificial Sequence: Synthetic oligonucleotide
  Target: LAMA2; (+) strand; PAM type: NRG; PAM sequence: AAG
tttccaaagaaaatttcaga

SEQ ID NO: 140994 - DNA, 20 bp, Artificial Sequence
  Description of Artificial Sequence: Synthetic oligonucleotide
  Target: LAMA2; (+) strand; PAM type: NRG; PAM sequence: AGG
ttccaaagaaaatttcagaa

SEQ ID NO: 140995 - DNA, 20 bp, Artificial Sequence
  Description of Artificial Sequence: Synthetic oligonucleotide
  Target: LAMA2; (+) strand; PAM type: NRG; PAM sequence: GAG
ccaaagaaaatttcagaaag

SEQ ID NO: 140996 - DNA, 20 bp, Artificial Sequence
  Description of Artificial Sequence: Synthetic oligonucleotide
  Target: LAMA2; (+) strand; PAM type: NRG; PAM sequence: AAG
aagaaaatttcagaaaggag

SEQ ID NO: 140997 - DNA, 20 bp, Artificial Sequence
  Description of Artificial Sequence: Synthetic oligonucleotide
  Target: LAMA2; (+) strand; PAM type: NRG; PAM sequence: TGG
aacaacataatcaaaatctg

SEQ ID NO: 140998 - DNA, 20 bp, Artificial Sequence
  Description of Artificial Sequence: Synthetic oligonucleotide
  Target: LAMA2; (+) strand; PAM type: NRG; PAM sequence: AAG
caaaatctgtggacacttta

SEQ ID NO: 140999 - DNA, 20 bp, Artificial Sequence
  Description of Artificial Sequence: Synthetic oligonucleotide
  Target: LAMA2; (+) strand; PAM type: NRG; PAM sequence: AAG
tctgtggacactttaaagat

SEQ ID NO: 141000 - DNA, 20 bp, Artificial Sequence
  Description of Artificial Sequence: Synthetic oligonucleotide
  Target: LAMA2; (+) strand; PAM type: NRG; PAM sequence: AGG
ctgtggacactttaaagata

SEQ ID NO: 141001 - DNA, 20 bp, Artificial Sequence
  Description of Artificial Sequence: Synthetic oligonucleotide
  Target: LAMA2; (+) strand; PAM type: NRG; PAM sequence: TGG
cactttaaagataaggatga

SEQ ID NO: 141002 - DNA, 20 bp, Artificial Sequence
  Description of Artificial Sequence: Synthetic oligonucleotide
  Target: LAMA2; (+) strand; PAM type: NRG; PAM sequence: GAG
ctttaaagataaggatgatg

SEQ ID NO: 141003 - DNA, 20 bp, Artificial Sequence
  Description of Artificial Sequence: Synthetic oligonucleotide
  Target: LAMA2; (+) strand; PAM type: NRG; PAM sequence: AAG
aaagataaggatgatggaga

SEQ ID NO: 141004 - DNA, 20 bp, Artificial Sequence
  Description of Artificial Sequence: Synthetic oligonucleotide
  Target: LAMA2; (+) strand; PAM type: NRG; PAM sequence: AAG
ggagaaagactgaattttgc

SEQ ID NO: 141005 - DNA, 20 bp, Artificial Sequence
  Description of Artificial Sequence: Synthetic oligonucleotide
  Target: LAMA2; (+) strand; PAM type: NRG; PAM sequence: CAG
gaaagactgaattttgcaag

SEQ ID NO: 141006 - DNA, 20 bp, Artificial Sequence
  Description of Artificial Sequence: Synthetic oligonucleotide
  Target: LAMA2; (+) strand; PAM type: NRG; PAM sequence: AGG
aaagactgaattttgcaagc

SEQ ID NO: 141007 - DNA, 20 bp, Artificial Sequence
  Description of Artificial Sequence: Synthetic oligonucleotide
  Target: LAMA2; (+) strand; PAM type: NRG; PAM sequence: GAG
agcaggttataataactcct

SEQ ID NO: 141008 - DNA, 20 bp, Artificial Sequence
  Description of Artificial Sequence: Synthetic oligonucleotide
  Target: LAMA2; (+) strand; PAM type: NRG; PAM sequence: GAG
caggttataataactcctga

SEQ ID NO: 141009 - DNA, 20 bp, Artificial Sequence
  Description of Artificial Sequence: Synthetic oligonucleotide
  Target: LAMA2; (+) strand; PAM type: NRG; PAM sequence: TAG
actcctgagagtgattgtaa

SEQ ID NO: 141010 - DNA, 20 bp, Artificial Sequence
  Description of Artificial Sequence: Synthetic oligonucleotide
  Target: LAMA2; (+) strand; PAM type: NRG; PAM sequence: AGG
ctcctgagagtgattgtaat

SEQ ID NO: 141011 - DNA, 20 bp, Artificial Sequence
  Description of Artificial Sequence: Synthetic oligonucleotide
  Target: LAMA2; (+) strand; PAM type: NRG; PAM sequence: GGG
tcctgagagtgattgtaata

SEQ ID NO: 141012 - DNA, 20 bp, Artificial Sequence
  Description of Artificial Sequence: Synthetic oligonucleotide
  Target: LAMA2; (+) strand; PAM type: NRG; PAM sequence: TAG
agtgattgtaatagggtgat

SEQ ID NO: 141013 - DNA, 20 bp, Artificial Sequence
  Description of Artificial Sequence: Synthetic oligonucleotide
  Target: LAMA2; (+) strand; PAM type: NRG; PAM sequence: AGG
gtgattgtaatagggtgatt

SEQ ID NO: 141014 - DNA, 20 bp, Artificial Sequence
  Description of Artificial Sequence: Synthetic oligonucleotide
  Target: LAMA2; (+) strand; PAM type: NRG; PAM sequence: TGG
tagggtgattaggtcatgca

SEQ ID NO: 141015 - DNA, 20 bp, Artificial Sequence
  Description of Artificial Sequence: Synthetic oligonucleotide
  Target: LAMA2; (+) strand; PAM type: NRG; PAM sequence: AAG
ttaggtcatgcatggactac

SEQ ID NO: 141016 - DNA, 20 bp, Artificial Sequence
  Description of Artificial Sequence: Synthetic oligonucleotide
  Target: LAMA2; (+) strand; PAM type: NRG; PAM sequence: AGG
taggtcatgcatggactaca

SEQ ID NO: 141017 - DNA, 20 bp, Artificial Sequence
  Description of Artificial Sequence: Synthetic oligonucleotide
  Target: LAMA2; (+) strand; PAM type: NRG; PAM sequence: GGG
aggtcatgcatggactacaa

SEQ ID NO: 141018 - DNA, 20 bp, Artificial Sequence
  Description of Artificial Sequence: Synthetic oligonucleotide
  Target: LAMA2; (+) strand; PAM type: NRG; PAM sequence: AAG
tgcatggactacaagggatc

SEQ ID NO: 141019 - DNA, 20 bp, Artificial Sequence
  Description of Artificial Sequence: Synthetic oligonucleotide
  Target: LAMA2; (+) strand; PAM type: NRG; PAM sequence: TAG
atggactacaagggatcaag

SEQ ID NO: 141020 - DNA, 20 bp, Artificial Sequence
  Description of Artificial Sequence: Synthetic oligonucleotide
  Target: LAMA2; (+) strand; PAM type: NRG; PAM sequence: AAG
ctacaagggatcaagtagaa

SEQ ID NO: 141021 - DNA, 20 bp, Artificial Sequence
  Description of Artificial Sequence: Synthetic oligonucleotide
  Target: LAMA2; (+) strand; PAM type: NRG; PAM sequence: AGG
tacaagggatcaagtagaaa

SEQ ID NO: 141022 - DNA, 20 bp, Artificial Sequence
  Description of Artificial Sequence: Synthetic oligonucleotide
  Target: LAMA2; (+) strand; PAM type: NRG; PAM sequence: GAG
caagggatcaagtagaaaag

SEQ ID NO: 141023 - DNA, 20 bp, Artificial Sequence
  Description of Artificial Sequence: Synthetic oligonucleotide
  Target: LAMA2; (+) strand; PAM type: NRG; PAM sequence: TGG
gggatcaagtagaaaaggag

SEQ ID NO: 141024 - DNA, 20 bp, Artificial Sequence
  Description of Artificial Sequence: Synthetic oligonucleotide
  Target: LAMA2; (+) strand; PAM type: NRG; PAM sequence: AAG
caagtagaaaaggagtggta

SEQ ID NO: 141025 - DNA, 20 bp, Artificial Sequence
  Description of Artificial Sequence: Synthetic oligonucleotide
  Target: LAMA2; (+) strand; PAM type: NRG; PAM sequence: TAG
gtagaaaaggagtggtaaag

SEQ ID NO: 141026 - DNA, 20 bp, Artificial Sequence
  Description of Artificial Sequence: Synthetic oligonucleotide
  Target: LAMA2; (+) strand; PAM type: NRG; PAM sequence: CAG
aggagtggtaaagtagtaaa

SEQ ID NO: 141027 - DNA, 20 bp, Artificial Sequence
  Description of Artificial Sequence: Synthetic oligonucleotide
  Target: LAMA2; (+) strand; PAM type: NRG; PAM sequence: CAG
agtggtaaagtagtaaacag

SEQ ID NO: 141028 - DNA, 20 bp, Artificial Sequence
  Description of Artificial Sequence: Synthetic oligonucleotide
  Target: LAMA2; (+) strand; PAM type: NRG; PAM sequence: GAG
tggtaaagtagtaaacagca

SEQ ID NO: 141029 - DNA, 20 bp, Artificial Sequence
  Description of Artificial Sequence: Synthetic oligonucleotide
  Target: LAMA2; (+) strand; PAM type: NRG; PAM sequence: AGG
ggtaaagtagtaaacagcag

SEQ ID NO: 141030 - DNA, 20 bp, Artificial Sequence
  Description of Artificial Sequence: Synthetic oligonucleotide
  Target: LAMA2; (+) strand; PAM type: NRG; PAM sequence: GGG
gtaaagtagtaaacagcaga

SEQ ID NO: 141031 - DNA, 20 bp, Artificial Sequence
  Description of Artificial Sequence: Synthetic oligonucleotide
  Target: LAMA2; (+) strand; PAM type: NRG; PAM sequence: CAG
gtagtaaacagcagagggta

SEQ ID NO: 141032 - DNA, 20 bp, Artificial Sequence
  Description of Artificial Sequence: Synthetic oligonucleotide
  Target: LAMA2; (+) strand; PAM type: NRG; PAM sequence: AGG
tagtaaacagcagagggtac

SEQ ID NO: 141033 - DNA, 20 bp, Artificial Sequence
  Description of Artificial Sequence: Synthetic oligonucleotide
  Target: LAMA2; (+) strand; PAM type: NRG; PAM sequence: AAG
agagggtacaggctactctt

SEQ ID NO: 141034 - DNA, 20 bp, Artificial Sequence
  Description of Artificial Sequence: Synthetic oligonucleotide
  Target: LAMA2; (+) strand; PAM type: NRG; PAM sequence: AAG
ggtacaggctactcttaaga

SEQ ID NO: 141035 - DNA, 20 bp, Artificial Sequence
  Description of Artificial Sequence: Synthetic oligonucleotide
  Target: LAMA2; (+) strand; PAM type: NRG; PAM sequence: TAG
gctactcttaagaaagtccc

SEQ ID NO: 141036 - DNA, 20 bp, Artificial Sequence
  Description of Artificial Sequence: Synthetic oligonucleotide
  Target: LAMA2; (+) strand; PAM type: NRG; PAM sequence: GAG
tactcttaagaaagtcccta

SEQ ID NO: 141037 - DNA, 20 bp, Artificial Sequence
  Description of Artificial Sequence: Synthetic oligonucleotide
  Target: LAMA2; (+) strand; PAM type: NRG; PAM sequence: AAG
tcttaagaaagtccctagag

SEQ ID NO: 141038 - DNA, 20 bp, Artificial Sequence
  Description of Artificial Sequence: Synthetic oligonucleotide
  Target: LAMA2; (+) strand; PAM type: NRG; PAM sequence: AGG
cttaagaaagtccctagaga

SEQ ID NO: 141039 - DNA, 20 bp, Artificial Sequence
  Description of Artificial Sequence: Synthetic oligonucleotide
  Target: LAMA2; (+) strand; PAM type: NRG; PAM sequence: AAG
gaaagtccctagagaaggat

SEQ ID NO: 141040 - DNA, 20 bp, Artificial Sequence
  Description of Artificial Sequence: Synthetic oligonucleotide
  Target: LAMA2; (+) strand; PAM type: NRG; PAM sequence: TGG
cctagagaaggataagaaaa

SEQ ID NO: 141041 - DNA, 20 bp, Artificial Sequence
  Description of Artificial Sequence: Synthetic oligonucleotide
  Target: LAMA2; (+) strand; PAM type: NRG; PAM sequence: GGG
ctagagaaggataagaaaat

SEQ ID NO: 141042 - DNA, 20 bp, Artificial Sequence
  Description of Artificial Sequence: Synthetic oligonucleotide
  Target: LAMA2; (+) strand; PAM type: NRG; PAM sequence: GGG
tagagaaggataagaaaatg

SEQ ID NO: 141043 - DNA, 20 bp, Artificial Sequence
  Description of Artificial Sequence: Synthetic oligonucleotide
  Target: LAMA2; (+) strand; PAM type: NRG; PAM sequence: AAG
aagaaaatggggcaatacat

SEQ ID NO: 141044 - DNA, 20 bp, Artificial Sequence
  Description of Artificial Sequence: Synthetic oligonucleotide
  Target: LAMA2; (+) strand; PAM type: NRG; PAM sequence: TGG
aatggggcaatacataagct

SEQ ID NO: 141045 - DNA, 20 bp, Artificial Sequence
  Description of Artificial Sequence: Synthetic oligonucleotide
  Target: LAMA2; (+) strand; PAM type: NRG; PAM sequence: TAG
gcaatacataagcttggaaa

SEQ ID NO: 141046 - DNA, 20 bp, Artificial Sequence
  Description of Artificial Sequence: Synthetic oligonucleotide
  Target: LAMA2; (+) strand; PAM type: NRG; PAM sequence: TGG
ttttttttattaatcattct

SEQ ID NO: 141047 - DNA, 20 bp, Artificial Sequence
  Description of Artificial Sequence: Synthetic oligonucleotide
  Target: LAMA2; (+) strand; PAM type: NRG; PAM sequence: GGG
tttttttattaatcattctt

SEQ ID NO: 141048 - DNA, 20 bp, Artificial Sequence
  Description of Artificial Sequence: Synthetic oligonucleotide
  Target: LAMA2; (+) strand; PAM type: NRG; PAM sequence: CAG
tcattcttgggtgtttctca

SEQ ID NO: 141049 - DNA, 20 bp, Artificial Sequence
  Description of Artificial Sequence: Synthetic oligonucleotide
  Target: LAMA2; (+) strand; PAM type: NRG; PAM sequence: GAG
attcttgggtgtttctcaca

SEQ ID NO: 141050 - DNA, 20 bp, Artificial Sequence
  Description of Artificial Sequence: Synthetic oligonucleotide
  Target: LAMA2; (+) strand; PAM type: NRG; PAM sequence: AGG
ttcttgggtgtttctcacag

SEQ ID NO: 141051 - DNA, 20 bp, Artificial Sequence
  Description of Artificial Sequence: Synthetic oligonucleotide
  Target: LAMA2; (+) strand; PAM type: NRG; PAM sequence: GGG
tcttgggtgtttctcacaga

SEQ ID NO: 141052 - DNA, 20 bp, Artificial Sequence
  Description of Artificial Sequence: Synthetic oligonucleotide
  Target: LAMA2; (+) strand; PAM type: NRG; PAM sequence: GGG
cttgggtgtttctcacagag

SEQ ID NO: 141053 - DNA, 20 bp, Artificial Sequence
  Description of Artificial Sequence: Synthetic oligonucleotide
  Target: LAMA2; (+) strand; PAM type: NRG; PAM sequence: GGG
ttgggtgtttctcacagagg

SEQ ID NO: 141054 - DNA, 20 bp, Artificial Sequence
  Description of Artificial Sequence: Synthetic oligonucleotide
  Target: LAMA2; (+) strand; PAM type: NRG; PAM sequence: TGG
gtttctcacagagggggatt

SEQ ID NO: 141055 - DNA, 20 bp, Artificial Sequence
  Description of Artificial Sequence: Synthetic oligonucleotide
  Target: LAMA2; (+) strand; PAM type: NRG; PAM sequence: CAG
tctcacagagggggatttgg

SEQ ID NO: 141056 - DNA, 20 bp, Artificial Sequence
  Description of Artificial Sequence: Synthetic oligonucleotide
  Target: LAMA2; (+) strand; PAM type: NRG; PAM sequence: AGG
ctcacagagggggatttggc

SEQ ID NO: 141057 - DNA, 20 bp, Artificial Sequence
  Description of Artificial Sequence: Synthetic oligonucleotide
  Target: LAMA2; (+) strand; PAM type: NRG; PAM sequence: GGG
tcacagagggggatttggca

SEQ ID NO: 141058 - DNA, 20 bp, Artificial Sequence
  Description of Artificial Sequence: Synthetic oligonucleotide
  Target: LAMA2; (+) strand; PAM type: NRG; PAM sequence: CGG
agggggatttggcagggtca

SEQ ID NO: 141059 - DNA, 20 bp, Artificial Sequence
  Description of Artificial Sequence: Synthetic oligonucleotide
  Target: LAMA2; (+) strand; PAM type: NRG; PAM sequence: GGG
gggggatttggcagggtcac

SEQ ID NO: 141060 - DNA, 20 bp, Artificial Sequence
  Description of Artificial Sequence: Synthetic oligonucleotide
  Target: LAMA2; (+) strand; PAM type: NRG; PAM sequence: TAG
ttggcagggtcacgggacaa

SEQ ID NO: 141061 - DNA, 20 bp, Artificial Sequence
  Description of Artificial Sequence: Synthetic oligonucleotide
  Target: LAMA2; (+) strand; PAM type: NRG; PAM sequence: TGG
gcagggtcacgggacaatag

SEQ ID NO: 141062 - DNA, 20 bp, Artificial Sequence
  Description of Artificial Sequence: Synthetic oligonucleotide
  Target: LAMA2; (+) strand; PAM type: NRG; PAM sequence: GAG
agggtcacgggacaatagtg

SEQ ID NO: 141063 - DNA, 20 bp, Artificial Sequence
  Description of Artificial Sequence: Synthetic oligonucleotide
  Target: LAMA2; (+) strand; PAM type: NRG; PAM sequence: AGG
gggtcacgggacaatagtgg

SEQ ID NO: 141064 - DNA, 20 bp, Artificial Sequence
  Description of Artificial Sequence: Synthetic oligonucleotide
  Target: LAMA2; (+) strand; PAM type: NRG; PAM sequence: GGG
ggtcacgggacaatagtgga

SEQ ID NO: 141065 - DNA, 20 bp, Artificial Sequence
  Description of Artificial Sequence: Synthetic oligonucleotide
  Target: LAMA2; (+) strand; PAM type: NRG; PAM sequence: AAG
cacgggacaatagtggaggg

SEQ ID NO: 141066 - DNA, 20 bp, Artificial Sequence
  Description of Artificial Sequence: Synthetic oligonucleotide
  Target: LAMA2; (+) strand; PAM type: NRG; PAM sequence: AGG
acgggacaatagtggaggga

SEQ ID NO: 141067 - DNA, 20 bp, Artificial Sequence
  Description of Artificial Sequence: Synthetic oligonucleotide
  Target: LAMA2; (+) strand; PAM type: NRG; PAM sequence: CAG
gacaatagtggagggaaggt

SEQ ID NO: 141068 - DNA, 20 bp, Artificial Sequence
  Description of Artificial Sequence: Synthetic oligonucleotide
  Target: LAMA2; (+) strand; PAM type: NRG; PAM sequence: CAG
aatagtggagggaaggtcag

SEQ ID NO: 141069 - DNA, 20 bp, Artificial Sequence
  Description of Artificial Sequence: Synthetic oligonucleotide
  Target: LAMA2; (+) strand; PAM type: NRG; PAM sequence: AAG
gggaaggtcagcagataaac

SEQ ID NO: 141070 - DNA, 20 bp, Artificial Sequence
  Description of Artificial Sequence: Synthetic oligonucleotide
  Target: LAMA2; (+) strand; PAM type: NRG; PAM sequence: AAG
agcagataaacaagtgaaca

SEQ ID NO: 141071 - DNA, 20 bp, Artificial Sequence
  Description of Artificial Sequence: Synthetic oligonucleotide
  Target: LAMA2; (+) strand; PAM type: NRG; PAM sequence: AGG
gcagataaacaagtgaacaa

SEQ ID NO: 141072 - DNA, 20 bp, Artificial Sequence
  Description of Artificial Sequence: Synthetic oligonucleotide
  Target: LAMA2; (+) strand; PAM type: NRG; PAM sequence: TGG
aacaagtgaacaaaggtctc

SEQ ID NO: 141073 - DNA, 20 bp, Artificial Sequence
  Description of Artificial Sequence: Synthetic oligonucleotide
  Target: LAMA2; (+) strand; PAM type: NRG; PAM sequence: TAG
acaaaggtctctggttttcc

SEQ ID NO: 141074 - DNA, 20 bp, Artificial Sequence
  Description of Artificial Sequence: Synthetic oligonucleotide
  Target: LAMA2; (+) strand; PAM type: NRG; PAM sequence: AGG
caaaggtctctggttttcct

SEQ ID NO: 141075 - DNA, 20 bp, Artificial Sequence
  Description of Artificial Sequence: Synthetic oligonucleotide
  Target: LAMA2; (+) strand; PAM type: NRG; PAM sequence: CAG
aggtctctggttttcctagg

SEQ ID NO: 141076 - DNA, 20 bp, Artificial Sequence
  Description of Artificial Sequence: Synthetic oligonucleotide
  Target: LAMA2; (+) strand; PAM type: NRG; PAM sequence: GAG
gtctctggttttcctaggca

SEQ ID NO: 141077 - DNA, 20 bp, Artificial Sequence
  Description of Artificial Sequence: Synthetic oligonucleotide
  Target: LAMA2; (+) strand; PAM type: NRG; PAM sequence: AGG
tctctggttttcctaggcag

SEQ ID NO: 141078 - DNA, 20 bp, Artificial Sequence
  Description of Artificial Sequence: Synthetic oligonucleotide
  Target: LAMA2; (+) strand; PAM type: NRG; PAM sequence: CGG
ttcctaggcagaggaccctg

SEQ ID NO: 141079 - DNA, 20 bp, Artificial Sequence
  Description of Artificial Sequence: Synthetic oligonucleotide
  Target: LAMA2; (+) strand; PAM type: NRG; PAM sequence: TGG
ttccgccgtgtttgtgtccc

SEQ ID NO: 141080 - DNA, 20 bp, Artificial Sequence
  Description of Artificial Sequence: Synthetic oligonucleotide
  Target: LAMA2; (+) strand; PAM type: NRG; PAM sequence: GGG
tccgccgtgtttgtgtccct

SEQ ID NO: 141081 - DNA, 20 bp, Artificial Sequence
  Description of Artificial Sequence: Synthetic oligonucleotide
  Target: LAMA2; (+) strand; PAM type: NRG; PAM sequence: GAG
gtttgtgtccctgggtactt

SEQ ID NO: 141082 - DNA, 20 bp, Artificial Sequence
  Description of Artificial Sequence: Synthetic oligonucleotide
  Target: LAMA2; (+) strand; PAM type: NRG; PAM sequence: CAG
tgtccctgggtacttgagat

SEQ ID NO: 141083 - DNA, 20 bp, Artificial Sequence
  Description of Artificial Sequence: Synthetic oligonucleotide
  Target: LAMA2; (+) strand; PAM type: NRG; PAM sequence: AGG
gtccctgggtacttgagatc

SEQ ID NO: 141084 - DNA, 20 bp, Artificial Sequence
  Description of Artificial Sequence: Synthetic oligonucleotide
  Target: LAMA2; (+) strand; PAM type: NRG; PAM sequence: GGG
tccctgggtacttgagatca

SEQ ID NO: 141085 - DNA, 20 bp, Artificial Sequence
  Description of Artificial Sequence: Synthetic oligonucleotide
  Target: LAMA2; (+) strand; PAM type: NRG; PAM sequence: GAG
cctgggtacttgagatcagg

SEQ ID NO: 141086 - DNA, 20 bp, Artificial Sequence
  Description of Artificial Sequence: Synthetic oligonucleotide
  Target: LAMA2; (+) strand; PAM type: NRG; PAM sequence: AAG
ttaacgcgcatgctgcctta

SEQ ID NO: 141087 - DNA, 20 bp, Artificial Sequence
  Description of Artificial Sequence: Synthetic oligonucleotide
  Target: LAMA2; (+) strand; PAM type: NRG; PAM sequence: AAG
cttaaagcatctgtttaaca

SEQ ID NO: 141088 - DNA, 20 bp, Artificial Sequence
  Description of Artificial Sequence: Synthetic oligonucleotide
  Target: LAMA2; (+) strand; PAM type: NRG; PAM sequence: GAG
cccttaatccattcaaccct

SEQ ID NO: 141089 - DNA, 20 bp, Artificial Sequence
  Description of Artificial Sequence: Synthetic oligonucleotide
  Target: LAMA2; (+) strand; PAM type: NRG; PAM sequence: TGG
ttaatccattcaaccctgag

SEQ ID NO: 141090 - DNA, 20 bp, Artificial Sequence
  Description of Artificial Sequence: Synthetic oligonucleotide
  Target: LAMA2; (+) strand; PAM type: NRG; PAM sequence: CAG
cattcaaccctgagtggaca

SEQ ID NO: 141091 - DNA, 20 bp, Artificial Sequence
  Description of Artificial Sequence: Synthetic oligonucleotide
  Target: LAMA2; (+) strand; PAM type: NRG; PAM sequence: CAG
agtggacacagcacatgttt

SEQ ID NO: 141092 - DNA, 20 bp, Artificial Sequence
  Description of Artificial Sequence: Synthetic oligonucleotide
  Target: LAMA2; (+) strand; PAM type: NRG; PAM sequence: GAG
tggacacagcacatgtttca

SEQ ID NO: 141093 - DNA, 20 bp, Artificial Sequence
  Description of Artificial Sequence: Synthetic oligonucleotide
  Target: LAMA2; (+) strand; PAM type: NRG; PAM sequence: GAG
gacacagcacatgtttcaga

SEQ ID NO: 141094 - DNA, 20 bp, Artificial Sequence
  Description of Artificial Sequence: Synthetic oligonucleotide
  Target: LAMA2; (+) strand; PAM type: NRG; PAM sequence: CGG
agcacatgtttcagagagca

SEQ ID NO: 141095 - DNA, 20 bp, Artificial Sequence
  Description of Artificial Sequence: Synthetic oligonucleotide
  Target: LAMA2; (+) strand; PAM type: NRG; PAM sequence: GGG
gcacatgtttcagagagcac

SEQ ID NO: 141096 - DNA, 20 bp, Artificial Sequence
  Description of Artificial Sequence: Synthetic oligonucleotide
  Target: LAMA2; (+) strand; PAM type: NRG; PAM sequence: GGG
cacatgtttcagagagcacg

SEQ ID NO: 141097 - DNA, 20 bp, Artificial Sequence
  Description of Artificial Sequence: Synthetic oligonucleotide
  Target: LAMA2; (+) strand; PAM type: NRG; PAM sequence: TGG
tgtttcagagagcacggggt

SEQ ID NO: 141098 - DNA, 20 bp, Artificial Sequence
  Description of Artificial Sequence: Synthetic oligonucleotide
  Target: LAMA2; (+) strand; PAM type: NRG; PAM sequence: GGG
gtttcagagagcacggggtt

SEQ ID NO: 141099 - DNA, 20 bp, Artificial Sequence
  Description of Artificial Sequence: Synthetic oligonucleotide
  Target: LAMA2; (+) strand; PAM type: NRG; PAM sequence: GAG
ttcagagagcacggggttgg

SEQ ID NO: 141100 - DNA, 20 bp, Artificial Sequence
  Description of Artificial Sequence: Synthetic oligonucleotide
  Target: LAMA2; (+) strand; PAM type: NRG; PAM sequence: AAG
gagagcacggggttgggagt

SEQ ID NO: 141101 - DNA, 20 bp, Artificial Sequence
  Description of Artificial Sequence: Synthetic oligonucleotide
  Target: LAMA2; (+) strand; PAM type: NRG; PAM sequence: AGG
agagcacggggttgggagta

SEQ ID NO: 141102 - DNA, 20 bp, Artificial Sequence
  Description of Artificial Sequence: Synthetic oligonucleotide
  Target: LAMA2; (+) strand; PAM type: NRG; PAM sequence: TAG
cggggttgggagtaaggtca

SEQ ID NO: 141103 - DNA, 20 bp, Artificial Sequence
  Description of Artificial Sequence: Synthetic oligonucleotide
  Target: LAMA2; (+) strand; PAM type: NRG; PAM sequence: CAG
ggagtaaggtcatagatcaa

SEQ ID NO: 141104 - DNA, 20 bp, Artificial Sequence
  Description of Artificial Sequence: Synthetic oligonucleotide
  Target: LAMA2; (+) strand; PAM type: NRG; PAM sequence: AAG
tcatagatcaacagcatccc

SEQ ID NO: 141105 - DNA, 20 bp, Artificial Sequence
  Description of Artificial Sequence: Synthetic oligonucleotide
  Target: LAMA2; (+) strand; PAM type: NRG; PAM sequence: AGG
catagatcaacagcatccca

SEQ ID NO: 141106 - DNA, 20 bp, Artificial Sequence
  Description of Artificial Sequence: Synthetic oligonucleotide
  Target: LAMA2; (+) strand; PAM type: NRG; PAM sequence: CAG
agatcaacagcatcccaagg

SEQ ID NO: 141107 - DNA, 20 bp, Artificial Sequence
  Description of Artificial Sequence: Synthetic oligonucleotide
  Target: LAMA2; (+) strand; PAM type: NRG; PAM sequence: AAG
tcaacagcatcccaaggcag

SEQ ID NO: 141108 - DNA, 20 bp, Artificial Sequence
  Description of Artificial Sequence: Synthetic oligonucleotide
  Target: LAMA2; (+) strand; PAM type: NRG; PAM sequence: TAG
caaggcagaagaatctttct

SEQ ID NO: 141109 - DNA, 20 bp, Artificial Sequence
  Description of Artificial Sequence: Synthetic oligonucleotide
  Target: LAMA2; (+) strand; PAM type: NRG; PAM sequence: CAG
cagaagaatctttcttagta

SEQ ID NO: 141110 - DNA, 20 bp, Artificial Sequence
  Description of Artificial Sequence: Synthetic oligonucleotide
  Target: LAMA2; (+) strand; PAM type: NRG; PAM sequence: TGG
tttcttagtacagaacaaaa

SEQ ID NO: 141111 - DNA, 20 bp, Artificial Sequence
  Description of Artificial Sequence: Synthetic oligonucleotide
  Target: LAMA2; (+) strand; PAM type: NRG; PAM sequence: GAG
tcttagtacagaacaaaatg

SEQ ID NO: 141112 - DNA, 20 bp, Artificial Sequence
  Description of Artificial Sequence: Synthetic oligonucleotide
  Target: LAMA2; (+) strand; PAM type: NRG; PAM sequence: CAG
tatgtctacttctttctaca

SEQ ID NO: 141113 - DNA, 20 bp, Artificial Sequence
  Description of Artificial Sequence: Synthetic oligonucleotide
  Target: LAMA2; (+) strand; PAM type: NRG; PAM sequence: CAG
tacttctttctacacagaca

SEQ ID NO: 141114 - DNA, 20 bp, Artificial Sequence
  Description of Artificial Sequence: Synthetic oligonucleotide
  Target: LAMA2; (+) strand; PAM type: NRG; PAM sequence: TGG
caaaaccaccatcatcatca

SEQ ID NO: 141115 - DNA, 20 bp, Artificial Sequence
  Description of Artificial Sequence: Synthetic oligonucleotide
  Target: LAMA2; (+) strand; PAM type: NRG; PAM sequence: GAG
catcatggcccgttctcaat

SEQ ID NO: 141116 - DNA, 20 bp, Artificial Sequence
  Description of Artificial Sequence: Synthetic oligonucleotide
  Target: LAMA2; (+) strand; PAM type: NRG; PAM sequence: TGG
gcccgttctcaatgagctgc

SEQ ID NO: 141117 - DNA, 20 bp, Artificial Sequence
  Description of Artificial Sequence: Synthetic oligonucleotide
  Target: LAMA2; (+) strand; PAM type: NRG; PAM sequence: GGG
cccgttctcaatgagctgct

SEQ ID NO: 141118 - DNA, 20 bp, Artificial Sequence
  Description of Artificial Sequence: Synthetic oligonucleotide
  Target: LAMA2; (+) strand; PAM type: NRG; PAM sequence: CAG
gagctgctgggtacacctcc

SEQ ID NO: 141119 - DNA, 20 bp, Artificial Sequence
  Description of Artificial Sequence: Synthetic oligonucleotide
  Target: LAMA2; (+) strand; PAM type: NRG; PAM sequence: TGG
tgctgggtacacctcccaga

SEQ ID NO: 141120 - DNA, 20 bp, Artificial Sequence
  Description of Artificial Sequence: Synthetic oligonucleotide
  Target: LAMA2; (+) strand; PAM type: NRG; PAM sequence: GGG
gctgggtacacctcccagat

SEQ ID NO: 141121 - DNA, 20 bp, Artificial Sequence
  Description of Artificial Sequence: Synthetic oligonucleotide
  Target: LAMA2; (+) strand; PAM type: NRG; PAM sequence: GGG
ctgggtacacctcccagatg

SEQ ID NO: 141122 - DNA, 20 bp, Artificial Sequence
  Description of Artificial Sequence: Synthetic oligonucleotide
  Target: LAMA2; (+) strand; PAM type: NRG; PAM sequence: TGG
ggtacacctcccagatgggg

SEQ ID NO: 141123 - DNA, 20 bp, Artificial Sequence
  Description of Artificial Sequence: Synthetic oligonucleotide
  Target: LAMA2; (+) strand; PAM type: NRG; PAM sequence: CGG
acacctcccagatggggtgg

SEQ ID NO: 141124 - DNA, 20 bp, Artificial Sequence
  Description of Artificial Sequence: Synthetic oligonucleotide
  Target: LAMA2; (+) strand; PAM type: NRG; PAM sequence: TGG
ctcccagatggggtggcggc

SEQ ID NO: 141125 - DNA, 20 bp, Artificial Sequence
  Description of Artificial Sequence: Synthetic oligonucleotide
  Target: LAMA2; (+) strand; PAM type: NRG; PAM sequence: GGG
tcccagatggggtggcggct

SEQ ID NO: 141126 - DNA, 20 bp, Artificial Sequence
  Description of Artificial Sequence: Synthetic oligonucleotide
  Target: LAMA2; (+) strand; PAM type: NRG; PAM sequence: CAG
cagatggggtggcggctggg

SEQ ID NO: 141127 - DNA, 20 bp, Artificial Sequence
  Description of Artificial Sequence: Synthetic oligonucleotide
  Target: LAMA2; (+) strand; PAM type: NRG; PAM sequence: GAG
gatggggtggcggctgggca

SEQ ID NO: 141128 - DNA, 20 bp, Artificial Sequence
  Description of Artificial Sequence: Synthetic oligonucleotide
  Target: LAMA2; (+) strand; PAM type: NRG; PAM sequence: AGG
atggggtggcggctgggcag

SEQ ID NO: 141129 - DNA, 20 bp, Artificial Sequence
  Description of Artificial Sequence: Synthetic oligonucleotide
  Target: LAMA2; (+) strand; PAM type: NRG; PAM sequence: GGG
tggggtggcggctgggcaga

SEQ ID NO: 141130 - DNA, 20 bp, Artificial Sequence
  Description of Artificial Sequence: Synthetic oligonucleotide
  Target: LAMA2; (+) strand; PAM type: NRG; PAM sequence: GGG
ggggtggcggctgggcagag

SEQ ID NO: 141131 - DNA, 20 bp, Artificial Sequence
  Description of Artificial Sequence: Synthetic oligonucleotide
  Target: LAMA2; (+) strand; PAM type: NRG; PAM sequence: CAG
cagaggggctcctcacttcc

SEQ ID NO: 141132 - DNA, 20 bp, Artificial Sequence
  Description of Artificial Sequence: Synthetic oligonucleotide
  Target: LAMA2; (+) strand; PAM type: NRG; PAM sequence: AAG
aggggctcctcacttcccag

SEQ ID NO: 141133 - DNA, 20 bp, Artificial Sequence
  Description of Artificial Sequence: Synthetic oligonucleotide
  Target: LAMA2; (+) strand; PAM type: NRG; PAM sequence: AGG
ggggctcctcacttcccaga

SEQ ID NO: 141134 - DNA, 20 bp, Artificial Sequence
  Description of Artificial Sequence: Synthetic oligonucleotide
  Target: LAMA2; (+) strand; PAM type: NRG; PAM sequence: GGG
gggctcctcacttcccagaa

SEQ ID NO: 141135 - DNA, 20 bp, Artificial Sequence
  Description of Artificial Sequence: Synthetic oligonucleotide
  Target: LAMA2; (+) strand; PAM type: NRG; PAM sequence: GGG
ggctcctcacttcccagaag

SEQ ID NO: 141136 - DNA, 20 bp, Artificial Sequence
  Description of Artificial Sequence: Synthetic oligonucleotide
  Target: LAMA2; (+) strand; PAM type: NRG; PAM sequence: TGG
tcctcacttcccagaagggg

SEQ ID NO: 141137 - DNA, 20 bp, Artificial Sequence
  Description of Artificial Sequence: Synthetic oligonucleotide
  Target: LAMA2; (+) strand; PAM type: NRG; PAM sequence: CGG
cacttcccagaaggggtggc

SEQ ID NO: 141138 - DNA, 20 bp, Artificial Sequence
  Description of Artificial Sequence: Synthetic oligonucleotide
  Target: LAMA2; (+) strand; PAM type: NRG; PAM sequence: TAG
ttcccagaaggggtggccgg

SEQ ID NO: 141139 - DNA, 20 bp, Artificial Sequence
  Description of Artificial Sequence: Synthetic oligonucleotide
  Target: LAMA2; (+) strand; PAM type: NRG; PAM sequence: GAG
cccagaaggggtggccggta

SEQ ID NO: 141140 - DNA, 20 bp, Artificial Sequence
  Description of Artificial Sequence: Synthetic oligonucleotide
  Target: LAMA2; (+) strand; PAM type: NRG; PAM sequence: AGG
ccagaaggggtggccggtag

SEQ ID NO: 141141 - DNA, 20 bp, Artificial Sequence
  Description of Artificial Sequence: Synthetic oligonucleotide
  Target: LAMA2; (+) strand; PAM type: NRG; PAM sequence: CAG
ggcgccccccacctccctcc

SEQ ID NO: 141142 - DNA, 20 bp, Artificial Sequence
  Description of Artificial Sequence: Synthetic oligonucleotide
  Target: LAMA2; (+) strand; PAM type: NRG; PAM sequence: CGG
ccccccacctccctcccaga

SEQ ID NO: 141143 - DNA, 20 bp, Artificial Sequence
  Description of Artificial Sequence: Synthetic oligonucleotide
  Target: LAMA2; (+) strand; PAM type: NRG; PAM sequence: GGG
cccccacctccctcccagac

SEQ ID NO: 141144 - DNA, 20 bp, Artificial Sequence
  Description of Artificial Sequence: Synthetic oligonucleotide
  Target: LAMA2; (+) strand; PAM type: NRG; PAM sequence: GGG
ccccacctccctcccagacg

SEQ ID NO: 141145 - DNA, 20 bp, Artificial Sequence
  Description of Artificial Sequence: Synthetic oligonucleotide
  Target: LAMA2; (+) strand; PAM type: NRG; PAM sequence: TGG
cacctccctcccagacgggg

SEQ ID NO: 141146 - DNA, 20 bp, Artificial Sequence
  Description of Artificial Sequence: Synthetic oligonucleotide
  Target: LAMA2; (+) strand; PAM type: NRG; PAM sequence: TGG
tccctcccagacggggtggc

SEQ ID NO: 141147 - DNA, 20 bp, Artificial Sequence
  Description of Artificial Sequence: Synthetic oligonucleotide
  Target: LAMA2; (+) strand; PAM type: NRG; PAM sequence: CAG
tcccagacggggtggctggc

SEQ ID NO: 141148 - DNA, 20 bp, Artificial Sequence
  Description of Artificial Sequence: Synthetic oligonucleotide
  Target: LAMA2; (+) strand; PAM type: NRG; PAM sequence: AGG
cccagacggggtggctggcc

SEQ ID NO: 141149 - DNA, 20 bp, Artificial Sequence
  Description of Artificial Sequence: Synthetic oligonucleotide
  Target: LAMA2; (+) strand; PAM type: NRG; PAM sequence: CGG
agacggggtggctggccagg

SEQ ID NO: 141150 - DNA, 20 bp, Artificial Sequence
  Description of Artificial Sequence: Synthetic oligonucleotide
  Target: LAMA2; (+) strand; PAM type: NRG; PAM sequence: GGG
gacggggtggctggccaggc

SEQ ID NO: 141151 - DNA, 20 bp, Artificial Sequence
  Description of Artificial Sequence: Synthetic oligonucleotide
  Target: LAMA2; (+) strand; PAM type: NRG; PAM sequence: GGG
acggggtggctggccaggcg

SEQ ID NO: 141152 - DNA, 20 bp, Artificial Sequence
  Description of Artificial Sequence: Synthetic oligonucleotide
  Target: LAMA2; (+) strand; PAM type: NRG; PAM sequence: GGG
cggggtggctggccaggcgg

SEQ ID NO: 141153 - DNA, 20 bp, Artificial Sequence
  Description of Artificial Sequence: Synthetic oligonucleotide
  Target: LAMA2; (+) strand; PAM type: NRG; PAM sequence: TGG
gctgccccctacctccctcc

SEQ ID NO: 141154 - DNA, 20 bp, Artificial Sequence
  Description of Artificial Sequence: Synthetic oligonucleotide
  Target: LAMA2; (+) strand; PAM type: NRG; PAM sequence: CGG
ccccctacctccctcctgga

SEQ ID NO: 141155 - DNA, 20 bp, Artificial Sequence
  Description of Artificial Sequence: Synthetic oligonucleotide
  Target: LAMA2; (+) strand; PAM type: NRG; PAM sequence: GGG
cccctacctccctcctggac

SEQ ID NO: 141156 - DNA, 20 bp, Artificial Sequence
  Description of Artificial Sequence: Synthetic oligonucleotide
  Target: LAMA2; (+) strand; PAM type: NRG; PAM sequence: GGG
ccctacctccctcctggacg

SEQ ID NO: 141157 - DNA, 20 bp, Artificial Sequence
  Description of Artificial Sequence: Synthetic oligonucleotide
  Target: LAMA2; (+) strand; PAM type: NRG; PAM sequence: CGG
tacctccctcctggacgggg

SEQ ID NO: 141158 - DNA, 20 bp, Artificial Sequence
  Description of Artificial Sequence: Synthetic oligonucleotide
  Target: LAMA2; (+) strand; PAM type: NRG; PAM sequence: TGG
tccctcctggacggggcggc

SEQ ID NO: 141159 - DNA, 20 bp, Artificial Sequence
  Description of Artificial Sequence: Synthetic oligonucleotide
  Target: LAMA2; (+) strand; PAM type: NRG; PAM sequence: CAG
ctcctggacggggcggctgg

SEQ ID NO: 141160 - DNA, 20 bp, Artificial Sequence
  Description of Artificial Sequence: Synthetic oligonucleotide
  Target: LAMA2; (+) strand; PAM type: NRG; PAM sequence: AGG
tcctggacggggcggctggc

SEQ ID NO: 141161 - DNA, 20 bp, Artificial Sequence
  Description of Artificial Sequence: Synthetic oligonucleotide
  Target: LAMA2; (+) strand; PAM type: NRG; PAM sequence: GGG
cctggacggggcggctggca

SEQ ID NO: 141162 - DNA, 20 bp, Artificial Sequence
  Description of Artificial Sequence: Synthetic oligonucleotide
  Target: LAMA2; (+) strand; PAM type: NRG; PAM sequence: TGG
ggacggggcggctggcaggg

SEQ ID NO: 141163 - DNA, 20 bp, Artificial Sequence
  Description of Artificial Sequence: Synthetic oligonucleotide
  Target: LAMA2; (+) strand; PAM type: NRG; PAM sequence: GGG
gacggggcggctggcagggt

SEQ ID NO: 141164 - DNA, 20 bp, Artificial Sequence
  Description of Artificial Sequence: Synthetic oligonucleotide
  Target: LAMA2; (+) strand; PAM type: NRG; PAM sequence: GGG
acggggcggctggcagggtg

SEQ ID NO: 141165 - DNA, 20 bp, Artificial Sequence
  Description of Artificial Sequence: Synthetic oligonucleotide
  Target: LAMA2; (+) strand; PAM type: NRG; PAM sequence: GGG
cggggcggctggcagggtgg

SEQ ID NO: 141166 - DNA, 20 bp, Artificial Sequence
  Description of Artificial Sequence: Synthetic oligonucleotide
  Target: LAMA2; (+) strand; PAM type: NRG; PAM sequence: CGG
ggctgcccccacctccctcc

SEQ ID NO: 141167 - DNA, 20 bp, Artificial Sequence
  Description of Artificial Sequence: Synthetic oligonucleotide
  Target: LAMA2; (+) strand; PAM type: NRG; PAM sequence: CGG
gcccccacctccctcccgga

SEQ ID NO: 141168 - DNA, 20 bp, Artificial Sequence
  Description of Artificial Sequence: Synthetic oligonucleotide
  Target: LAMA2; (+) strand; PAM type: NRG; PAM sequence: GGG
cccccacctccctcccggac

SEQ ID NO: 141169 - DNA, 20 bp, Artificial Sequence
  Description of Artificial Sequence: Synthetic oligonucleotide
  Target: LAMA2; (+) strand; PAM type: NRG; PAM sequence: GGG
ccccacctccctcccggacg

SEQ ID NO: 141170 - DNA, 20 bp, Artificial Sequence
  Description of Artificial Sequence: Synthetic oligonucleotide
  Target: LAMA2; (+) strand; PAM type: NRG; PAM sequence: TGG
cacctccctcccggacgggg

SEQ ID NO: 141171 - DNA, 20 bp, Artificial Sequence
  Description of Artificial Sequence: Synthetic oligonucleotide
  Target: LAMA2; (+) strand; PAM type: NRG; PAM sequence: CGG
ctcccggacggggtggctgc

SEQ ID NO: 141172 - DNA, 20 bp, Artificial Sequence
  Description of Artificial Sequence: Synthetic oligonucleotide
  Target: LAMA2; (+) strand; PAM type: NRG; PAM sequence: GGG
tcccggacggggtggctgcc

SEQ ID NO: 141173 - DNA, 20 bp, Artificial Sequence
  Description of Artificial Sequence: Synthetic oligonucleotide
  Target: LAMA2; (+) strand; PAM type: NRG; PAM sequence: CGG
cggacggggtggctgccggg

SEQ ID NO: 141174 - DNA, 20 bp, Artificial Sequence
  Description of Artificial Sequence: Synthetic oligonucleotide
  Target: LAMA2; (+) strand; PAM type: NRG; PAM sequence: GAG
gacggggtggctgccgggcg

SEQ ID NO: 141175 - DNA, 20 bp, Artificial Sequence
  Description of Artificial Sequence: Synthetic oligonucleotide
  Target: LAMA2; (+) strand; PAM type: NRG; PAM sequence: CAG
cggagacgctcctcacttcc

SEQ ID NO: 141176 - DNA, 20 bp, Artificial Sequence
  Description of Artificial Sequence: Synthetic oligonucleotide
  Target: LAMA2; (+) strand; PAM type: NRG; PAM sequence: TGG
gacgctcctcacttcccaga

SEQ ID NO: 141177 - DNA, 20 bp, Artificial Sequence
  Description of Artificial Sequence: Synthetic oligonucleotide
  Target: LAMA2; (+) strand; PAM type: NRG; PAM sequence: GGG
acgctcctcacttcccagat

SEQ ID NO: 141178 - DNA, 20 bp, Artificial Sequence
  Description of Artificial Sequence: Synthetic oligonucleotide
  Target: LAMA2; (+) strand; PAM type: NRG; PAM sequence: GGG
cgctcctcacttcccagatg

SEQ ID NO: 141179 - DNA, 20 bp, Artificial Sequence
  Description of Artificial Sequence: Synthetic oligonucleotide
  Target: LAMA2; (+) strand; PAM type: NRG; PAM sequence: TAG
tcctcacttcccagatgggg

SEQ ID NO: 141180 - DNA, 20 bp, Artificial Sequence
  Description of Artificial Sequence: Synthetic oligonucleotide
  Target: LAMA2; (+) strand; PAM type: NRG; PAM sequence: CGG
ttcccagatggggtagctgc

SEQ ID NO: 141181 - DNA, 20 bp, Artificial Sequence
  Description of Artificial Sequence: Synthetic oligonucleotide
  Target: LAMA2; (+) strand; PAM type: NRG; PAM sequence: GGG
tcccagatggggtagctgcc

SEQ ID NO: 141182 - DNA, 20 bp, Artificial Sequence
  Description of Artificial Sequence: Synthetic oligonucleotide
  Target: LAMA2; (+) strand; PAM type: NRG; PAM sequence: CGG
cagatggggtagctgccggg

SEQ ID NO: 141183 - DNA, 20 bp, Artificial Sequence
  Description of Artificial Sequence: Synthetic oligonucleotide
  Target: LAMA2; (+) strand; PAM type: NRG; PAM sequence: GAG
gatggggtagctgccgggcg

SEQ ID NO: 141184 - DNA, 20 bp, Artificial Sequence
  Description of Artificial Sequence: Synthetic oligonucleotide
  Target: LAMA2; (+) strand; PAM type: NRG; PAM sequence: AGG
atggggtagctgccgggcgg

SEQ ID NO: 141185 - DNA, 20 bp, Artificial Sequence
  Description of Artificial Sequence: Synthetic oligonucleotide
  Target: LAMA2; (+) strand; PAM type: NRG; PAM sequence: GGG
tggggtagctgccgggcgga

SEQ ID NO: 141186 - DNA, 20 bp, Artificial Sequence
  Description of Artificial Sequence: Synthetic oligonucleotide
  Target: LAMA2; (+) strand; PAM type: NRG; PAM sequence: GGG
ggggtagctgccgggcggag

SEQ ID NO: 141187 - DNA, 20 bp, Artificial Sequence
  Description of Artificial Sequence: Synthetic oligonucleotide
  Target: LAMA2; (+) strand; PAM type: NRG; PAM sequence: CAG
cggaggggctcctcacttct

SEQ ID NO: 141188 - DNA, 20 bp, Artificial Sequence
  Description of Artificial Sequence: Synthetic oligonucleotide
  Target: LAMA2; (+) strand; PAM type: NRG; PAM sequence: CGG
ggggctcctcacttctcaga

SEQ ID NO: 141189 - DNA, 20 bp, Artificial Sequence
  Description of Artificial Sequence: Synthetic oligonucleotide
  Target: LAMA2; (+) strand; PAM type: NRG; PAM sequence: GGG
gggctcctcacttctcagac

SEQ ID NO: 141190 - DNA, 20 bp, Artificial Sequence
  Description of Artificial Sequence: Synthetic oligonucleotide
  Target: LAMA2; (+) strand; PAM type: NRG; PAM sequence: GGG
ggctcctcacttctcagacg

SEQ ID NO: 141191 - DNA, 20 bp, Artificial Sequence
  Description of Artificial Sequence: Synthetic oligonucleotide
  Target: LAMA2; (+) strand; PAM type: NRG; PAM sequence: CGG
tcctcacttctcagacgggg

SEQ ID NO: 141192 - DNA, 20 bp, Artificial Sequence
  Description of Artificial Sequence: Synthetic oligonucleotide
  Target: LAMA2; (+) strand; PAM type: NRG; PAM sequence: CGG
ttctcagacggggcggctgc

SEQ ID NO: 141193 - DNA, 20 bp, Artificial Sequence
  Description of Artificial Sequence: Synthetic oligonucleotide
  Target: LAMA2; (+) strand; PAM type: NRG; PAM sequence: GGG
tctcagacggggcggctgcc

SEQ ID NO: 141194 - DNA, 20 bp, Artificial Sequence
  Description of Artificial Sequence: Synthetic oligonucleotide
  Target: LAMA2; (+) strand; PAM type: NRG; PAM sequence: CGG
cagacggggcggctgccggg

SEQ ID NO: 141195 - DNA, 20 bp, Artificial Sequence
  Description of Artificial Sequence: Synthetic oligonucleotide
  Target: LAMA2; (+) strand; PAM type: NRG; PAM sequence: GAG
gacggggcggctgccgggcg

SEQ ID NO: 141196 - DNA, 20 bp, Artificial Sequence
  Description of Artificial Sequence: Synthetic oligonucleotide
  Target: LAMA2; (+) strand; PAM type: NRG; PAM sequence: AGG
acggggcggctgccgggcgg

SEQ ID NO: 141197 - DNA, 20 bp, Artificial Sequence
  Description of Artificial Sequence: Synthetic oligonucleotide
  Target: LAMA2; (+) strand; PAM type: NRG; PAM sequence: GGG
cggggcggctgccgggcgga

SEQ ID NO: 141198 - DNA, 20 bp, Artificial Sequence
  Description of Artificial Sequence: Synthetic oligonucleotide
  Target: LAMA2; (+) strand; PAM type: NRG; PAM sequence: GGG
ggggcggctgccgggcggag

SEQ ID NO: 141199 - DNA, 20 bp, Artificial Sequence
  Description of Artificial Sequence: Synthetic oligonucleotide
  Target: LAMA2; (+) strand; PAM type: NRG; PAM sequence: CAG
cggaggggttcctcacttct

SEQ ID NO: 141200 - DNA, 20 bp, Artificial Sequence
  Description of Artificial Sequence: Synthetic oligonucleotide
  Target: LAMA2; (+) strand; PAM type: NRG; PAM sequence: TGG
ggggttcctcacttctcaga

SEQ ID NO: 141201 - DNA, 20 bp, Artificial Sequence
  Description of Artificial Sequence: Synthetic oligonucleotide
  Target: LAMA2; (+) strand; PAM type: NRG; PAM sequence: GGG
gggttcctcacttctcagat

SEQ ID NO: 141202 - DNA, 20 bp, Artificial Sequence
  Description of Artificial Sequence: Synthetic oligonucleotide
  Target: LAMA2; (+) strand; PAM type: NRG; PAM sequence: GGG
ggttcctcacttctcagatg

SEQ ID NO: 141203 - DNA, 20 bp, Artificial Sequence
  Description of Artificial Sequence: Synthetic oligonucleotide
  Target: LAMA2; (+) strand; PAM type: NRG; PAM sequence: CGG
tcctcacttctcagatgggg

SEQ ID NO: 141204 - DNA, 20 bp, Artificial Sequence
  Description of Artificial Sequence: Synthetic oligonucleotide
  Target: LAMA2; (+) strand; PAM type: NRG; PAM sequence: CGG
ttctcagatggggcggctgc

SEQ ID NO: 141205 - DNA, 20 bp, Artificial Sequence
  Description of Artificial Sequence: Synthetic oligonucleotide
  Target: LAMA2; (+) strand; PAM type: NRG; PAM sequence: GGG
tctcagatggggcggctgcc

SEQ ID NO: 141206 - DNA, 20 bp, Artificial Sequence
  Description of Artificial Sequence: Synthetic oligonucleotide
  Target: LAMA2; (+) strand; PAM type: NRG; PAM sequence: CAG
cagatggggcggctgccggg

SEQ ID NO: 141207 - DNA, 20 bp, Artificial Sequence
  Description of Artificial Sequence: Synthetic oligonucleotide
  Target: LAMA2; (+) strand; PAM type: NRG; PAM sequence: GAG
gatggggcggctgccgggca

SEQ ID NO: 141208 - DNA, 20 bp, Artificial Sequence
  Description of Artificial Sequence: Synthetic oligonucleotide
  Target: LAMA2; (+) strand; PAM type: NRG; PAM sequence: AGG
atggggcggctgccgggcag

SEQ ID NO: 141209 - DNA, 20 bp, Artificial Sequence
  Description of Artificial Sequence: Synthetic oligonucleotide
  Target: LAMA2; (+) strand; PAM type: NRG; PAM sequence: GGG
tggggcggctgccgggcaga

SEQ ID NO: 141210 - DNA, 20 bp, Artificial Sequence
  Description of Artificial Sequence: Synthetic oligonucleotide
  Target: LAMA2; (+) strand; PAM type: NRG; PAM sequence: GGG
ggggcggctgccgggcagag

SEQ ID NO: 141211 - DNA, 20 bp, Artificial Sequence
  Description of Artificial Sequence: Synthetic oligonucleotide
  Target: LAMA2; (+) strand; PAM type: NRG; PAM sequence: CAG
cagaggggctcctcacttct

SEQ ID NO: 141212 - DNA, 20 bp, Artificial Sequence
  Description of Artificial Sequence: Synthetic oligonucleotide
  Target: LAMA2; (+) strand; PAM type: NRG; PAM sequence: CAG
ggctcctcacttctcagacg

SEQ ID NO: 141213 - DNA, 20 bp, Artificial Sequence
  Description of Artificial Sequence: Synthetic oligonucleotide
  Target: LAMA2; (+) strand; PAM type: NRG; PAM sequence: CGG
tcctcacttctcagacgcag

SEQ ID NO: 141214 - DNA, 20 bp, Artificial Sequence
  Description of Artificial Sequence: Synthetic oligonucleotide
  Target: LAMA2; (+) strand; PAM type: NRG; PAM sequence: CGG
cacttctcagacgcagcggc

SEQ ID NO: 141215 - DNA, 20 bp, Artificial Sequence
  Description of Artificial Sequence: Synthetic oligonucleotide
  Target: LAMA2; (+) strand; PAM type: NRG; PAM sequence: GGG
acttctcagacgcagcggcc

SEQ ID NO: 141216 - DNA, 20 bp, Artificial Sequence
  Description of Artificial Sequence: Synthetic oligonucleotide
  Target: LAMA2; (+) strand; PAM type: NRG; PAM sequence: CAG
tctcagacgcagcggccggg

SEQ ID NO: 141217 - DNA, 20 bp, Artificial Sequence
  Description of Artificial Sequence: Synthetic oligonucleotide
  Target: LAMA2; (+) strand; PAM type: NRG; PAM sequence: GAG
tcagacgcagcggccgggca

SEQ ID NO: 141218 - DNA, 20 bp, Artificial Sequence
  Description of Artificial Sequence: Synthetic oligonucleotide
  Target: LAMA2; (+) strand; PAM type: NRG; PAM sequence: TAG
cagagacgctcctcacttcc

SEQ ID NO: 141219 - DNA, 20 bp, Artificial Sequence
  Description of Artificial Sequence: Synthetic oligonucleotide
  Target: LAMA2; (+) strand; PAM type: NRG; PAM sequence: CGG
gacgctcctcacttcctaga

SEQ ID NO: 141220 - DNA, 20 bp, Artificial Sequence
  Description of Artificial Sequence: Synthetic oligonucleotide
  Target: LAMA2; (+) strand; PAM type: NRG; PAM sequence: GGG
acgctcctcacttcctagac

SEQ ID NO: 141221 - DNA, 20 bp, Artificial Sequence
  Description of Artificial Sequence: Synthetic oligonucleotide
  Target: LAMA2; (+) strand; PAM type: NRG; PAM sequence: TGG
tcctcacttcctagacggga

SEQ ID NO: 141222 - DNA, 20 bp, Artificial Sequence
  Description of Artificial Sequence: Synthetic oligonucleotide
  Target: LAMA2; (+) strand; PAM type: NRG; PAM sequence: CGG
tcacttcctagacgggatgg

SEQ ID NO: 141223 - DNA, 20 bp, Artificial Sequence
  Description of Artificial Sequence: Synthetic oligonucleotide
  Target: LAMA2; (+) strand; PAM type: NRG; PAM sequence: CGG
tcctagacgggatggcggtc

SEQ ID NO: 141224 - DNA, 20 bp, Artificial Sequence
  Description of Artificial Sequence: Synthetic oligonucleotide
  Target: LAMA2; (+) strand; PAM type: NRG; PAM sequence: AAG
tagacgggatggcggtccgg

SEQ ID NO: 141225 - DNA, 20 bp, Artificial Sequence
  Description of Artificial Sequence: Synthetic oligonucleotide
  Target: LAMA2; (+) strand; PAM type: NRG; PAM sequence: GAG
gacgggatggcggtccggaa

SEQ ID NO: 141226 - DNA, 20 bp, Artificial Sequence
  Description of Artificial Sequence: Synthetic oligonucleotide
  Target: LAMA2; (+) strand; PAM type: NRG; PAM sequence: AGG
acgggatggcggtccggaag

SEQ ID NO: 141227 - DNA, 20 bp, Artificial Sequence
  Description of Artificial Sequence: Synthetic oligonucleotide
  Target: LAMA2; (+) strand; PAM type: NRG; PAM sequence: CAG
aagaggcactcctcacttcc

SEQ ID NO: 141228 - DNA, 20 bp, Artificial Sequence
  Description of Artificial Sequence: Synthetic oligonucleotide
  Target: LAMA2; (+) strand; PAM type: NRG; PAM sequence: TGG
gcactcctcacttcccagac

SEQ ID NO: 141229 - DNA, 20 bp, Artificial Sequence
  Description of Artificial Sequence: Synthetic oligonucleotide
  Target: LAMA2; (+) strand; PAM type: NRG; PAM sequence: GGG
cactcctcacttcccagact

SEQ ID NO: 141230 - DNA, 20 bp, Artificial Sequence
  Description of Artificial Sequence: Synthetic oligonucleotide
  Target: LAMA2; (+) strand; PAM type: NRG; PAM sequence: TAG
tcctcacttcccagactggg

SEQ ID NO: 141231 - DNA, 20 bp, Artificial Sequence
  Description of Artificial Sequence: Synthetic oligonucleotide
  Target: LAMA2; (+) strand; PAM type: NRG; PAM sequence: CAG
cacttcccagactgggtagc

SEQ ID NO: 141232 - DNA, 20 bp, Artificial Sequence
  Description of Artificial Sequence: Synthetic oligonucleotide
  Target: LAMA2; (+) strand; PAM type: NRG; PAM sequence: AGG
acttcccagactgggtagcc

SEQ ID NO: 141233 - DNA, 20 bp, Artificial Sequence
  Description of Artificial Sequence: Synthetic oligonucleotide
  Target: LAMA2; (+) strand; PAM type: NRG; PAM sequence: CAG
tcccagactgggtagccagg

SEQ ID NO: 141234 - DNA, 20 bp, Artificial Sequence
  Description of Artificial Sequence: Synthetic oligonucleotide
  Target: LAMA2; (+) strand; PAM type: NRG; PAM sequence: GAG
ccagactgggtagccaggca

SEQ ID NO: 141235 - DNA, 20 bp, Artificial Sequence
  Description of Artificial Sequence: Synthetic oligonucleotide
  Target: LAMA2; (+) strand; PAM type: NRG; PAM sequence: AGG
cagactgggtagccaggcag

SEQ ID NO: 141236 - DNA, 20 bp, Artificial Sequence
  Description of Artificial Sequence: Synthetic oligonucleotide
  Target: LAMA2; (+) strand; PAM type: NRG; PAM sequence: GGG
agactgggtagccaggcaga

SEQ ID NO: 141237 - DNA, 20 bp, Artificial Sequence
  Description of Artificial Sequence: Synthetic oligonucleotide
  Target: LAMA2; (+) strand; PAM type: NRG; PAM sequence: GGG
gactgggtagccaggcagag

SEQ ID NO: 141238 - DNA, 20 bp, Artificial Sequence
  Description of Artificial Sequence: Synthetic oligonucleotide
  Target: LAMA2; (+) strand; PAM type: NRG; PAM sequence: CAG
cagaggggctccttacatcc

SEQ ID NO: 141239 - DNA, 20 bp, Artificial Sequence
  Description of Artificial Sequence: Synthetic oligonucleotide
  Target: LAMA2; (+) strand; PAM type: NRG; PAM sequence: TGG
gctccttacatcccagacga

SEQ ID NO: 141240 - DNA, 20 bp, Artificial Sequence
  Description of Artificial Sequence: Synthetic oligonucleotide
  Target: LAMA2; (+) strand; PAM type: NRG; PAM sequence: GGG
ctccttacatcccagacgat

SEQ ID NO: 141241 - DNA, 20 bp, Artificial Sequence
  Description of Artificial Sequence: Synthetic oligonucleotide
  Target: LAMA2; (+) strand; PAM type: NRG; PAM sequence: CGG
cttacatcccagacgatggg

SEQ ID NO: 141242 - DNA, 20 bp, Artificial Sequence
  Description of Artificial Sequence: Synthetic oligonucleotide
  Target: LAMA2; (+) strand; PAM type: NRG; PAM sequence: CAG
catcccagacgatgggcggc

SEQ ID NO: 141243 - DNA, 20 bp, Artificial Sequence
  Description of Artificial Sequence: Synthetic oligonucleotide
  Target: LAMA2; (+) strand; PAM type: NRG; PAM sequence: AGG
atcccagacgatgggcggcc

SEQ ID NO: 141244 - DNA, 20 bp, Artificial Sequence
  Description of Artificial Sequence: Synthetic oligonucleotide
  Target: LAMA2; (+) strand; PAM type: NRG; PAM sequence: CAG
ccagacgatgggcggccagg

SEQ ID NO: 141245 - DNA, 20 bp, Artificial Sequence
  Description of Artificial Sequence: Synthetic oligonucleotide
  Target: LAMA2; (+) strand; PAM type: NRG; PAM sequence: GAG
agacgatgggcggccaggca

SEQ ID NO: 141246 - DNA, 20 bp, Artificial Sequence
  Description of Artificial Sequence: Synthetic oligonucleotide
  Target: LAMA2; (+) strand; PAM type: NRG; PAM sequence: CAG
cagagacgctcctcacttcc

SEQ ID NO: 141247 - DNA, 20 bp, Artificial Sequence
  Description of Artificial Sequence: Synthetic oligonucleotide
  Target: LAMA2; (+) strand; PAM type: NRG; PAM sequence: CGG
gacgctcctcacttcccaga

SEQ ID NO: 141248 - DNA, 20 bp, Artificial Sequence
  Description of Artificial Sequence: Synthetic oligonucleotide
  Target: LAMA2; (+) strand; PAM type: NRG; PAM sequence: GGG
acgctcctcacttcccagac

SEQ ID NO: 141249 - DNA, 20 bp, Artificial Sequence
  Description of Artificial Sequence: Synthetic oligonucleotide
  Target: LAMA2; (+) strand; PAM type: NRG; PAM sequence: GGG
cgctcctcacttcccagacg

SEQ ID NO: 141250 - DNA, 20 bp, Artificial Sequence
  Description of Artificial Sequence: Synthetic oligonucleotide
  Target: LAMA2; (+) strand; PAM type: NRG; PAM sequence: TGG
tcctcacttcccagacgggg

SEQ ID NO: 141251 - DNA, 20 bp, Artificial Sequence
  Description of Artificial Sequence: Synthetic oligonucleotide
  Target: LAMA2; (+) strand; PAM type: NRG; PAM sequence: CGG
tcacttcccagacggggtgg

SEQ ID NO: 141252 - DNA, 20 bp, Artificial Sequence
  Description of Artificial Sequence: Synthetic oligonucleotide
  Target: LAMA2; (+) strand; PAM type: NRG; PAM sequence: CGG
ttcccagacggggtggcggc

SEQ ID NO: 141253 - DNA, 20 bp, Artificial Sequence
  Description of Artificial Sequence: Synthetic oligonucleotide
  Target: LAMA2; (+) strand; PAM type: NRG; PAM sequence: GGG
tcccagacggggtggcggcc

SEQ ID NO: 141254 - DNA, 20 bp, Artificial Sequence
  Description of Artificial Sequence: Synthetic oligonucleotide
  Target: LAMA2; (+) strand; PAM type: NRG; PAM sequence: CAG
cagacggggtggcggccggg

SEQ ID NO: 141255 - DNA, 20 bp, Artificial Sequence
  Description of Artificial Sequence: Synthetic oligonucleotide
  Target: LAMA2; (+) strand; PAM type: NRG; PAM sequence: GAG
gacggggtggcggccgggca

SEQ ID NO: 141256 - DNA, 20 bp, Artificial Sequence
  Description of Artificial Sequence: Synthetic oligonucleotide
  Target: LAMA2; (+) strand; PAM type: NRG; PAM sequence: AGG
acggggtggcggccgggcag

SEQ ID NO: 141257 - DNA, 20 bp, Artificial Sequence
  Description of Artificial Sequence: Synthetic oligonucleotide
  Target: LAMA2; (+) strand; PAM type: NRG; PAM sequence: CGG
ccgggcagaggctgcaaact

SEQ ID NO: 141258 - DNA, 20 bp, Artificial Sequence
  Description of Artificial Sequence: Synthetic oligonucleotide
  Target: LAMA2; (+) strand; PAM type: NRG; PAM sequence: TGG
aggctgcaaactcggcactt

SEQ ID NO: 141259 - DNA, 20 bp, Artificial Sequence
  Description of Artificial Sequence: Synthetic oligonucleotide
  Target: LAMA2; (+) strand; PAM type: NRG; PAM sequence: GGG
ggctgcaaactcggcacttt

SEQ ID NO: 141260 - DNA, 20 bp, Artificial Sequence
  Description of Artificial Sequence: Synthetic oligonucleotide
  Target: LAMA2; (+) strand; PAM type: NRG; PAM sequence: GAG
ctgcaaactcggcactttgg

SEQ ID NO: 141261 - DNA, 20 bp, Artificial Sequence
  Description of Artificial Sequence: Synthetic oligonucleotide
  Target: LAMA2; (+) strand; PAM type: NRG; PAM sequence: AGG
tgcaaactcggcactttggg

SEQ ID NO: 141262 - DNA, 20 bp, Artificial Sequence
  Description of Artificial Sequence: Synthetic oligonucleotide
  Target: LAMA2; (+) strand; PAM type: NRG; PAM sequence: AAG
actcggcactttgggaggcc

SEQ ID NO: 141263 - DNA, 20 bp, Artificial Sequence
  Description of Artificial Sequence: Synthetic oligonucleotide
  Target: LAMA2; (+) strand; PAM type: NRG; PAM sequence: AGG
ctcggcactttgggaggcca

SEQ ID NO: 141264 - DNA, 20 bp, Artificial Sequence
  Description of Artificial Sequence: Synthetic oligonucleotide
  Target: LAMA2; (+) strand; PAM type: NRG; PAM sequence: CAG
ggcactttgggaggccaagg

SEQ ID NO: 141265 - DNA, 20 bp, Artificial Sequence
  Description of Artificial Sequence: Synthetic oligonucleotide
  Target: LAMA2; (+) strand; PAM type: NRG; PAM sequence: AGG
gcactttgggaggccaaggc

SEQ ID NO: 141266 - DNA, 20 bp, Artificial Sequence
  Description of Artificial Sequence: Synthetic oligonucleotide
  Target: LAMA2; (+) strand; PAM type: NRG; PAM sequence: CGG
ctttgggaggccaaggcagg

SEQ ID NO: 141267 - DNA, 20 bp, Artificial Sequence
  Description of Artificial Sequence: Synthetic oligonucleotide
  Target: LAMA2; (+) strand; PAM type: NRG; PAM sequence: TGG
gggaggccaaggcaggcggc

SEQ ID NO: 141268 - DNA, 20 bp, Artificial Sequence
  Description of Artificial Sequence: Synthetic oligonucleotide
  Target: LAMA2; (+) strand; PAM type: NRG; PAM sequence: GGG
ggaggccaaggcaggcggct

SEQ ID NO: 141269 - DNA, 20 bp, Artificial Sequence
  Description of Artificial Sequence: Synthetic oligonucleotide
  Target: LAMA2; (+) strand; PAM type: NRG; PAM sequence: GAG
aggccaaggcaggcggctgg

SEQ ID NO: 141270 - DNA, 20 bp, Artificial Sequence
  Description of Artificial Sequence: Synthetic oligonucleotide
  Target: LAMA2; (+) strand; PAM type: NRG; PAM sequence: AGG
ggccaaggcaggcggctggg

SEQ ID NO: 141271 - DNA, 20 bp, Artificial Sequence
  Description of Artificial Sequence: Synthetic oligonucleotide
  Target: LAMA2; (+) strand; PAM type: NRG; PAM sequence: TGG
caaggcaggcggctgggagg

SEQ ID NO: 141272 - DNA, 20 bp, Artificial Sequence
  Description of Artificial Sequence: Synthetic oligonucleotide
  Target: LAMA2; (+) strand; PAM type: NRG; PAM sequence: GAG
aggcaggcggctgggaggtg

SEQ ID NO: 141273 - DNA, 20 bp, Artificial Sequence
  Description of Artificial Sequence: Synthetic oligonucleotide
  Target: LAMA2; (+) strand; PAM type: NRG; PAM sequence: AGG
ggcaggcggctgggaggtgg

SEQ ID NO: 141274 - DNA, 20 bp, Artificial Sequence
  Description of Artificial Sequence: Synthetic oligonucleotide
  Target: LAMA2; (+) strand; PAM type: NRG; PAM sequence: TAG
cggctgggaggtggaggttg

SEQ ID NO: 141275 - DNA, 20 bp, Artificial Sequence
  Description of Artificial Sequence: Synthetic oligonucleotide
  Target: LAMA2; (+) strand; PAM type: NRG; PAM sequence: TAG
tgggaggtggaggttgtagc

SEQ ID NO: 141276 - DNA, 20 bp, Artificial Sequence
  Description of Artificial Sequence: Synthetic oligonucleotide
  Target: LAMA2; (+) strand; PAM type: NRG; PAM sequence: GAG
ggtggaggttgtagctagcc

SEQ ID NO: 141277 - DNA, 20 bp, Artificial Sequence
  Description of Artificial Sequence: Synthetic oligonucleotide
  Target: LAMA2; (+) strand; PAM type: NRG; PAM sequence: CAG
gagatcacaccactgcactc

SEQ ID NO: 141278 - DNA, 20 bp, Artificial Sequence
  Description of Artificial Sequence: Synthetic oligonucleotide
  Target: LAMA2; (+) strand; PAM type: NRG; PAM sequence: TGG
cacaccactgcactccagcc

SEQ ID NO: 141279 - DNA, 20 bp, Artificial Sequence
  Description of Artificial Sequence: Synthetic oligonucleotide
  Target: LAMA2; (+) strand; PAM type: NRG; PAM sequence: GGG
acaccactgcactccagcct

SEQ ID NO: 141280 - DNA, 20 bp, Artificial Sequence
  Description of Artificial Sequence: Synthetic oligonucleotide
  Target: LAMA2; (+) strand; PAM type: NRG; PAM sequence: GAG
actccagcctgggcaacatt

SEQ ID NO: 141281 - DNA, 20 bp, Artificial Sequence
  Description of Artificial Sequence: Synthetic oligonucleotide
  Target: LAMA2; (+) strand; PAM type: NRG; PAM sequence: GAG
cctgggcaacattgagcact

SEQ ID NO: 141282 - DNA, 20 bp, Artificial Sequence
  Description of Artificial Sequence: Synthetic oligonucleotide
  Target: LAMA2; (+) strand; PAM type: NRG; PAM sequence: GAG
acattgagcactgagtgaac

SEQ ID NO: 141283 - DNA, 20 bp, Artificial Sequence
  Description of Artificial Sequence: Synthetic oligonucleotide
  Target: LAMA2; (+) strand; PAM type: NRG; PAM sequence: CGG
cgagactccgtctgcaatct

SEQ ID NO: 141284 - DNA, 20 bp, Artificial Sequence
  Description of Artificial Sequence: Synthetic oligonucleotide
  Target: LAMA2; (+) strand; PAM type: NRG; PAM sequence: CGG
cgtctgcaatctcggcacct

SEQ ID NO: 141285 - DNA, 20 bp, Artificial Sequence
  Description of Artificial Sequence: Synthetic oligonucleotide
  Target: LAMA2; (+) strand; PAM type: NRG; PAM sequence: GGG
gtctgcaatctcggcacctc

SEQ ID NO: 141286 - DNA, 20 bp, Artificial Sequence
  Description of Artificial Sequence: Synthetic oligonucleotide
  Target: LAMA2; (+) strand; PAM type: NRG; PAM sequence: GAG
ctgcaatctcggcacctcgg

SEQ ID NO: 141287 - DNA, 20 bp, Artificial Sequence
  Description of Artificial Sequence: Synthetic oligonucleotide
  Target: LAMA2; (+) strand; PAM type: NRG; PAM sequence: AGG
tgcaatctcggcacctcggg

SEQ ID NO: 141288 - DNA, 20 bp, Artificial Sequence
  Description of Artificial Sequence: Synthetic oligonucleotide
  Target: LAMA2; (+) strand; PAM type: NRG; PAM sequence: GAG
tctcggcacctcgggaggcc

SEQ ID NO: 141289 - DNA, 20 bp, Artificial Sequence
  Description of Artificial Sequence: Synthetic oligonucleotide
  Target: LAMA2; (+) strand; PAM type: NRG; PAM sequence: AGG
ctcggcacctcgggaggccg

SEQ ID NO: 141290 - DNA, 20 bp, Artificial Sequence
  Description of Artificial Sequence: Synthetic oligonucleotide
  Target: LAMA2; (+) strand; PAM type: NRG; PAM sequence: TGG
gcacctcgggaggccgaggc

SEQ ID NO: 141291 - DNA, 20 bp, Artificial Sequence
  Description of Artificial Sequence: Synthetic oligonucleotide
  Target: LAMA2; (+) strand; PAM type: NRG; PAM sequence: CAG
cctcgggaggccgaggctgg

SEQ ID NO: 141292 - DNA, 20 bp, Artificial Sequence
  Description of Artificial Sequence: Synthetic oligonucleotide
  Target: LAMA2; (+) strand; PAM type: NRG; PAM sequence: CGG
cgaggctggcagatcactcg

SEQ ID NO: 141293 - DNA, 20 bp, Artificial Sequence
  Description of Artificial Sequence: Synthetic oligonucleotide
  Target: LAMA2; (+) strand; PAM type: NRG; PAM sequence: TAG
gctggcagatcactcgcggt

SEQ ID NO: 141294 - DNA, 20 bp, Artificial Sequence
  Description of Artificial Sequence: Synthetic oligonucleotide
  Target: LAMA2; (+) strand; PAM type: NRG; PAM sequence: AGG
ctggcagatcactcgcggtt

SEQ ID NO: 141295 - DNA, 20 bp, Artificial Sequence
  Description of Artificial Sequence: Synthetic oligonucleotide
  Target: LAMA2; (+) strand; PAM type: NRG; PAM sequence: GAG
ggcagatcactcgcggttag

SEQ ID NO: 141296 - DNA, 20 bp, Artificial Sequence
  Description of Artificial Sequence: Synthetic oligonucleotide
  Target: LAMA2; (+) strand; PAM type: NRG; PAM sequence: TGG
gatcactcgcggttaggagc

SEQ ID NO: 141297 - DNA, 20 bp, Artificial Sequence
  Description of Artificial Sequence: Synthetic oligonucleotide
  Target: LAMA2; (+) strand; PAM type: NRG; PAM sequence: GAG
tcactcgcggttaggagctg

SEQ ID NO: 141298 - DNA, 20 bp, Artificial Sequence
  Description of Artificial Sequence: Synthetic oligonucleotide
  Target: LAMA2; (+) strand; PAM type: NRG; PAM sequence: CAG
cgcggttaggagctggagac

SEQ ID NO: 141299 - DNA, 20 bp, Artificial Sequence
  Description of Artificial Sequence: Synthetic oligonucleotide
  Target: LAMA2; (+) strand; PAM type: NRG; PAM sequence: CGG
ttaggagctggagaccagcc

SEQ ID NO: 141300 - DNA, 20 bp, Artificial Sequence
  Description of Artificial Sequence: Synthetic oligonucleotide
  Target: LAMA2; (+) strand; PAM type: NRG; PAM sequence: TAG
ggagctggagaccagcccgg

SEQ ID NO: 141301 - DNA, 20 bp, Artificial Sequence
  Description of Artificial Sequence: Synthetic oligonucleotide
  Target: LAMA2; (+) strand; PAM type: NRG; PAM sequence: TAG
tgatgatatttcatttgcaa

SEQ ID NO: 141302 - DNA, 20 bp, Artificial Sequence
  Description of Artificial Sequence: Synthetic oligonucleotide
  Target: LAMA2; (+) strand; PAM type: NRG; PAM sequence: AAG
tgcaatagctaaaattgact

SEQ ID NO: 141303 - DNA, 20 bp, Artificial Sequence
  Description of Artificial Sequence: Synthetic oligonucleotide
  Target: LAMA2; (+) strand; PAM type: NRG; PAM sequence: AAG
gctaaaattgactaagtgtt

SEQ ID NO: 141304 - DNA, 20 bp, Artificial Sequence
  Description of Artificial Sequence: Synthetic oligonucleotide
  Target: LAMA2; (+) strand; PAM type: NRG; PAM sequence: AAG
aagtgactctgatctgttga

SEQ ID NO: 141305 - DNA, 20 bp, Artificial Sequence
  Description of Artificial Sequence: Synthetic oligonucleotide
  Target: LAMA2; (+) strand; PAM type: NRG; PAM sequence: AAG
gttgaaagaattcatgaacc

SEQ ID NO: 141306 - DNA, 20 bp, Artificial Sequence
  Description of Artificial Sequence: Synthetic oligonucleotide
  Target: LAMA2; (+) strand; PAM type: NRG; PAM sequence: CAG
aagaattcatgaaccaagat

SEQ ID NO: 141307 - DNA, 20 bp, Artificial Sequence
  Description of Artificial Sequence: Synthetic oligonucleotide
  Target: LAMA2; (+) strand; PAM type: NRG; PAM sequence: TAG
tcactacaaatctttgctat

SEQ ID NO: 141308 - DNA, 20 bp, Artificial Sequence
  Description of Artificial Sequence: Synthetic oligonucleotide
  Target: LAMA2; (+) strand; PAM type: NRG; PAM sequence: TAG
agtccccaaatgctttgaac

SEQ ID NO: 141309 - DNA, 20 bp, Artificial Sequence
  Description of Artificial Sequence: Synthetic oligonucleotide
  Target: LAMA2; (+) strand; PAM type: NRG; PAM sequence: GAG
tccccaaatgctttgaacta

SEQ ID NO: 141310 - DNA, 20 bp, Artificial Sequence
  Description of Artificial Sequence: Synthetic oligonucleotide
  Target: LAMA2; (+) strand; PAM type: NRG; PAM sequence: TGG
atgtgtgtaatgtcataaat

SEQ ID NO: 141311 - DNA, 20 bp, Artificial Sequence
  Description of Artificial Sequence: Synthetic oligonucleotide
  Target: LAMA2; (+) strand; PAM type: NRG; PAM sequence: GAG
gtgtgtaatgtcataaattg

SEQ ID NO: 141312 - DNA, 20 bp, Artificial Sequence
  Description of Artificial Sequence: Synthetic oligonucleotide
  Target: LAMA2; (+) strand; PAM type: NRG; PAM sequence: TAG
gtcataaattggagaatgtg

SEQ ID NO: 141313 - DNA, 20 bp, Artificial Sequence
  Description of Artificial Sequence: Synthetic oligonucleotide
  Target: LAMA2; (+) strand; PAM type: NRG; PAM sequence: AGG
tcataaattggagaatgtgt

SEQ ID NO: 141314 - DNA, 20 bp, Artificial Sequence
  Description of Artificial Sequence: Synthetic oligonucleotide
  Target: LAMA2; (+) strand; PAM type: NRG; PAM sequence: TGG
tgtgtaggttcatcttacct

SEQ ID NO: 141315 - DNA, 20 bp, Artificial Sequence
  Description of Artificial Sequence: Synthetic oligonucleotide
  Target: LAMA2; (+) strand; PAM type: NRG; PAM sequence: CAG
tcatcttaccttggtaaata

SEQ ID NO: 141316 - DNA, 20 bp, Artificial Sequence
  Description of Artificial Sequence: Synthetic oligonucleotide
  Target: LAMA2; (+) strand; PAM type: NRG; PAM sequence: AAG
tcttaccttggtaaatacag

SEQ ID NO: 141317 - DNA, 20 bp, Artificial Sequence
  Description of Artificial Sequence: Synthetic oligonucleotide
  Target: LAMA2; (+) strand; PAM type: NRG; PAM sequence: AAG
atacagaagcacaaaaaaca

SEQ ID NO: 141318 - DNA, 20 bp, Artificial Sequence
  Description of Artificial Sequence: Synthetic oligonucleotide
  Target: LAMA2; (+) strand; PAM type: NRG; PAM sequence: AGG
tacagaagcacaaaaaacaa

SEQ ID NO: 141319 - DNA, 20 bp, Artificial Sequence
  Description of Artificial Sequence: Synthetic oligonucleotide
  Target: LAMA2; (+) strand; PAM type: NRG; PAM sequence: CAG
acaaaaaacaaaggcaatgc

SEQ ID NO: 141320 - DNA, 20 bp, Artificial Sequence
  Description of Artificial Sequence: Synthetic oligonucleotide
  Target: LAMA2; (+) strand; PAM type: NRG; PAM sequence: AGG
caaaaaacaaaggcaatgcc

SEQ ID NO: 141321 - DNA, 20 bp, Artificial Sequence
  Description of Artificial Sequence: Synthetic oligonucleotide
  Target: LAMA2; (+) strand; PAM type: NRG; PAM sequence: CAG
ggcaatgccaggtatttctc

SEQ ID NO: 141322 - DNA, 20 bp, Artificial Sequence
  Description of Artificial Sequence: Synthetic oligonucleotide
  Target: LAMA2; (+) strand; PAM type: NRG; PAM sequence: AGG
gcaatgccaggtatttctcc

SEQ ID NO: 141323 - DNA, 20 bp, Artificial Sequence
  Description of Artificial Sequence: Synthetic oligonucleotide
  Target: LAMA2; (+) strand; PAM type: NRG; PAM sequence: GGG
caatgccaggtatttctcca

SEQ ID NO: 141324 - DNA, 20 bp, Artificial Sequence
  Description of Artificial Sequence: Synthetic oligonucleotide
  Target: LAMA2; (+) strand; PAM type: NRG; PAM sequence: TAG
tctccagggtgaataaattt

SEQ ID NO: 141325 - DNA, 20 bp, Artificial Sequence
  Description of Artificial Sequence: Synthetic oligonucleotide
  Target: LAMA2; (+) strand; PAM type: NRG; PAM sequence: AAG
ccagggtgaataaattttag

SEQ ID NO: 141326 - DNA, 20 bp, Artificial Sequence
  Description of Artificial Sequence: Synthetic oligonucleotide
  Target: LAMA2; (+) strand; PAM type: NRG; PAM sequence: AGG
cagggtgaataaattttaga

SEQ ID NO: 141327 - DNA, 20 bp, Artificial Sequence
  Description of Artificial Sequence: Synthetic oligonucleotide
  Target: LAMA2; (+) strand; PAM type: NRG; PAM sequence: CAG
accattgttgtactctgtga

SEQ ID NO: 141328 - DNA, 20 bp, Artificial Sequence
  Description of Artificial Sequence: Synthetic oligonucleotide
  Target: LAMA2; (+) strand; PAM type: NRG; PAM sequence: AAG
ctctgtgacagtttcattga

SEQ ID NO: 141329 - DNA, 20 bp, Artificial Sequence
  Description of Artificial Sequence: Synthetic oligonucleotide
  Target: LAMA2; (+) strand; PAM type: NRG; PAM sequence: AGG
tctgtgacagtttcattgaa

SEQ ID NO: 141330 - DNA, 20 bp, Artificial Sequence
  Description of Artificial Sequence: Synthetic oligonucleotide
  Target: LAMA2; (+) strand; PAM type: NRG; PAM sequence: GAG
aaaggactgtcatgttccat

SEQ ID NO: 141331 - DNA, 20 bp, Artificial Sequence
  Description of Artificial Sequence: Synthetic oligonucleotide
  Target: LAMA2; (+) strand; PAM type: NRG; PAM sequence: AGG
aaggactgtcatgttccatg

SEQ ID NO: 141332 - DNA, 20 bp, Artificial Sequence
  Description of Artificial Sequence: Synthetic oligonucleotide
  Target: LAMA2; (+) strand; PAM type: NRG; PAM sequence: CAG
gtcatgttccatgaggaact

SEQ ID NO: 141333 - DNA, 20 bp, Artificial Sequence
  Description of Artificial Sequence: Synthetic oligonucleotide
  Target: LAMA2; (+) strand; PAM type: NRG; PAM sequence: CAG
cagcctacctgctcttttac

SEQ ID NO: 141334 - DNA, 20 bp, Artificial Sequence
  Description of Artificial Sequence: Synthetic oligonucleotide
  Target: LAMA2; (+) strand; PAM type: NRG; PAM sequence: TAG
cctacctgctcttttaccag

SEQ ID NO: 141335 - DNA, 20 bp, Artificial Sequence
  Description of Artificial Sequence: Synthetic oligonucleotide
  Target: LAMA2; (+) strand; PAM type: NRG; PAM sequence: TGG
cctgctcttttaccagtagc

SEQ ID NO: 141336 - DNA, 20 bp, Artificial Sequence
  Description of Artificial Sequence: Synthetic oligonucleotide
  Target: LAMA2; (+) strand; PAM type: NRG; PAM sequence: TGG
gctcttttaccagtagctgg

SEQ ID NO: 141337 - DNA, 20 bp, Artificial Sequence
  Description of Artificial Sequence: Synthetic oligonucleotide
  Target: LAMA2; (+) strand; PAM type: NRG; PAM sequence: GGG
ctcttttaccagtagctggt

SEQ ID NO: 141338 - DNA, 20 bp, Artificial Sequence
  Description of Artificial Sequence: Synthetic oligonucleotide
  Target: LAMA2; (+) strand; PAM type: NRG; PAM sequence: AAG
tttaccagtagctggtggga

SEQ ID NO: 141339 - DNA, 20 bp, Artificial Sequence
  Description of Artificial Sequence: Synthetic oligonucleotide
  Target: LAMA2; (+) strand; PAM type: NRG; PAM sequence: CAG
ctgtgccaatgacttattca

SEQ ID NO: 141340 - DNA, 20 bp, Artificial Sequence
  Description of Artificial Sequence: Synthetic oligonucleotide
  Target: LAMA2; (+) strand; PAM type: NRG; PAM sequence: AGG
tgtgccaatgacttattcac

SEQ ID NO: 141341 - DNA, 20 bp, Artificial Sequence
  Description of Artificial Sequence: Synthetic oligonucleotide
  Target: LAMA2; (+) strand; PAM type: NRG; PAM sequence: GAG
tgccaatgacttattcacag

SEQ ID NO: 141342 - DNA, 20 bp, Artificial Sequence
  Description of Artificial Sequence: Synthetic oligonucleotide
  Target: LAMA2; (+) strand; PAM type: NRG; PAM sequence: AGG
gccaatgacttattcacagg

SEQ ID NO: 141343 - DNA, 20 bp, Artificial Sequence
  Description of Artificial Sequence: Synthetic oligonucleotide
  Target: LAMA2; (+) strand; PAM type: NRG; PAM sequence: CAG
aatgacttattcacaggagg

SEQ ID NO: 141344 - DNA, 20 bp, Artificial Sequence
  Description of Artificial Sequence: Synthetic oligonucleotide
  Target: LAMA2; (+) strand; PAM type: NRG; PAM sequence: AGG
atgacttattcacaggaggc

SEQ ID NO: 141345 - DNA, 20 bp, Artificial Sequence
  Description of Artificial Sequence: Synthetic oligonucleotide
  Target: LAMA2; (+) strand; PAM type: NRG; PAM sequence: CAG
aggtcaatcttttgaaacca

SEQ ID NO: 141346 - DNA, 20 bp, Artificial Sequence
  Description of Artificial Sequence: Synthetic oligonucleotide
  Target: LAMA2; (+) strand; PAM type: NRG; PAM sequence: GAG
aaccacagattgtttcaaat

SEQ ID NO: 141347 - DNA, 20 bp, Artificial Sequence
  Description of Artificial Sequence: Synthetic oligonucleotide
  Target: LAMA2; (+) strand; PAM type: NRG; PAM sequence: GAG
ccacagattgtttcaaatga

SEQ ID NO: 141348 - DNA, 20 bp, Artificial Sequence
  Description of Artificial Sequence: Synthetic oligonucleotide
  Target: LAMA2; (+) strand; PAM type: NRG; PAM sequence: GAG
caaatgagagaaaaatatgt

SEQ ID NO: 141349 - DNA, 20 bp, Artificial Sequence
  Description of Artificial Sequence: Synthetic oligonucleotide
  Target: LAMA2; (+) strand; PAM type: NRG; PAM sequence: AAG
atgagagaaaaatatgtgag

SEQ ID NO: 141350 - DNA, 20 bp, Artificial Sequence
  Description of Artificial Sequence: Synthetic oligonucleotide
  Target: LAMA2; (+) strand; PAM type: NRG; PAM sequence: GAG
gagagaaaaatatgtgagaa

SEQ ID NO: 141351 - DNA, 20 bp, Artificial Sequence
  Description of Artificial Sequence: Synthetic oligonucleotide
  Target: LAMA2; (+) strand; PAM type: NRG; PAM sequence: TAG
aaaaatatgtgagaagagaa

SEQ ID NO: 141352 - DNA, 20 bp, Artificial Sequence
  Description of Artificial Sequence: Synthetic oligonucleotide
  Target: LAMA2; (+) strand; PAM type: NRG; PAM sequence: AAG
gtgagaagagaatagatgtc

SEQ ID NO: 141353 - DNA, 20 bp, Artificial Sequence
  Description of Artificial Sequence: Synthetic oligonucleotide
  Target: LAMA2; (+) strand; PAM type: NRG; PAM sequence: AGG
tgagaagagaatagatgtca

SEQ ID NO: 141354 - DNA, 20 bp, Artificial Sequence
  Description of Artificial Sequence: Synthetic oligonucleotide
  Target: LAMA2; (+) strand; PAM type: NRG; PAM sequence: GGG
gagaagagaatagatgtcaa

SEQ ID NO: 141355 - DNA, 20 bp, Artificial Sequence
  Description of Artificial Sequence: Synthetic oligonucleotide
  Target: LAMA2; (+) strand; PAM type: NRG; PAM sequence: TAG
aagagaatagatgtcaaggg

SEQ ID NO: 141356 - DNA, 20 bp, Artificial Sequence
  Description of Artificial Sequence: Synthetic oligonucleotide
  Target: LAMA2; (+) strand; PAM type: NRG; PAM sequence: AAG
agatgtcaagggtagtgcta

SEQ ID NO: 141357 - DNA, 20 bp, Artificial Sequence
  Description of Artificial Sequence: Synthetic oligonucleotide
  Target: LAMA2; (+) strand; PAM type: NRG; PAM sequence: AAG
tcaagggtagtgctaaagac

SEQ ID NO: 141358 - DNA, 20 bp, Artificial Sequence
  Description of Artificial Sequence: Synthetic oligonucleotide
  Target: LAMA2; (+) strand; PAM type: NRG; PAM sequence: AGG
caagggtagtgctaaagaca

SEQ ID NO: 141359 - DNA, 20 bp, Artificial Sequence
  Description of Artificial Sequence: Synthetic oligonucleotide
  Target: LAMA2; (+) strand; PAM type: NRG; PAM sequence: TGG
agacaaggaaaatgcttgcc

SEQ ID NO: 141360 - DNA, 20 bp, Artificial Sequence
  Description of Artificial Sequence: Synthetic oligonucleotide
  Target: LAMA2; (+) strand; PAM type: NRG; PAM sequence: GGG
gacaaggaaaatgcttgcct

SEQ ID NO: 141361 - DNA, 20 bp, Artificial Sequence
  Description of Artificial Sequence: Synthetic oligonucleotide
  Target: LAMA2; (+) strand; PAM type: NRG; PAM sequence: CAG
gcttgcctgggttttccctg

SEQ ID NO: 141362 - DNA, 20 bp, Artificial Sequence
  Description of Artificial Sequence: Synthetic oligonucleotide
  Target: LAMA2; (+) strand; PAM type: NRG; PAM sequence: TAG
gctgacgttgttaaaaatga

SEQ ID NO: 141363 - DNA, 20 bp, Artificial Sequence
  Description of Artificial Sequence: Synthetic oligonucleotide
  Target: LAMA2; (+) strand; PAM type: NRG; PAM sequence: AAG
aaaatgatagcaacttaatg

SEQ ID NO: 141364 - DNA, 20 bp, Artificial Sequence
  Description of Artificial Sequence: Synthetic oligonucleotide
  Target: LAMA2; (+) strand; PAM type: NRG; PAM sequence: TGG
gatagcaacttaatgaagca

SEQ ID NO: 141365 - DNA, 20 bp, Artificial Sequence
  Description of Artificial Sequence: Synthetic oligonucleotide
  Target: LAMA2; (+) strand; PAM type: NRG; PAM sequence: AAG
ggcgtactaaatgcattaat

SEQ ID NO: 141366 - DNA, 20 bp, Artificial Sequence
  Description of Artificial Sequence: Synthetic oligonucleotide
  Target: LAMA2; (+) strand; PAM type: NRG; PAM sequence: GAG
actaaatgcattaataagct

SEQ ID NO: 141367 - DNA, 20 bp, Artificial Sequence
  Description of Artificial Sequence: Synthetic oligonucleotide
  Target: LAMA2; (+) strand; PAM type: NRG; PAM sequence: AGG
ctaaatgcattaataagctg

SEQ ID NO: 141368 - DNA, 20 bp, Artificial Sequence
  Description of Artificial Sequence: Synthetic oligonucleotide
  Target: LAMA2; (+) strand; PAM type: NRG; PAM sequence: GGG
taaatgcattaataagctga

SEQ ID NO: 141369 - DNA, 20 bp, Artificial Sequence
  Description of Artificial Sequence: Synthetic oligonucleotide
  Target: LAMA2; (+) strand; PAM type: NRG; PAM sequence: GAG
aatgcattaataagctgagg

SEQ ID NO: 141370 - DNA, 20 bp, Artificial Sequence
  Description of Artificial Sequence: Synthetic oligonucleotide
  Target: LAMA2; (+) strand; PAM type: NRG; PAM sequence: AGG
atgcattaataagctgaggg

SEQ ID NO: 141371 - DNA, 20 bp, Artificial Sequence
  Description of Artificial Sequence: Synthetic oligonucleotide
  Target: LAMA2; (+) strand; PAM type: NRG; PAM sequence: TGG
ggaccttattcattccaatt

SEQ ID NO: 141372 - DNA, 20 bp, Artificial Sequence
  Description of Artificial Sequence: Synthetic oligonucleotide
  Target: LAMA2; (+) strand; PAM type: NRG; PAM sequence: AAG
ctcgtgttactcgttttctt

SEQ ID NO: 141373 - DNA, 20 bp, Artificial Sequence
  Description of Artificial Sequence: Synthetic oligonucleotide
  Target: LAMA2; (+) strand; PAM type: NRG; PAM sequence: TGG
gttactcgttttcttaagac

SEQ ID NO: 141374 - DNA, 20 bp, Artificial Sequence
  Description of Artificial Sequence: Synthetic oligonucleotide
  Target: LAMA2; (+) strand; PAM type: NRG; PAM sequence: GAG
taagactggactaaaattgt

SEQ ID NO: 141375 - DNA, 20 bp, Artificial Sequence
  Description of Artificial Sequence: Synthetic oligonucleotide
  Target: LAMA2; (+) strand; PAM type: NRG; PAM sequence: TGG
actaaaattgtgagacctta

SEQ ID NO: 141376 - DNA, 20 bp, Artificial Sequence
  Description of Artificial Sequence: Synthetic oligonucleotide
  Target: LAMA2; (+) strand; PAM type: NRG; PAM sequence: GGG
ctaaaattgtgagaccttat

SEQ ID NO: 141377 - DNA, 20 bp, Artificial Sequence
  Description of Artificial Sequence: Synthetic oligonucleotide
  Target: LAMA2; (+) strand; PAM type: NRG; PAM sequence: TAG
tatgggccaacgataccctt

SEQ ID NO: 141378 - DNA, 20 bp, Artificial Sequence
  Description of Artificial Sequence: Synthetic oligonucleotide
  Target: LAMA2; (+) strand; PAM type: NRG; PAM sequence: GAG
tgggccaacgatacccttta

SEQ ID NO: 141379 - DNA, 20 bp, Artificial Sequence
  Description of Artificial Sequence: Synthetic oligonucleotide
  Target: LAMA2; (+) strand; PAM type: NRG; PAM sequence: AAG
agagctgataattaatttga

SEQ ID NO: 141380 - DNA, 20 bp, Artificial Sequence
  Description of Artificial Sequence: Synthetic oligonucleotide
  Target: LAMA2; (+) strand; PAM type: NRG; PAM sequence: AAG
ttaatttgaaagaattatta

SEQ ID NO: 141381 - DNA, 20 bp, Artificial Sequence
  Description of Artificial Sequence: Synthetic oligonucleotide
  Target: LAMA2; (+) strand; PAM type: NRG; PAM sequence: GAG
attattaaagcatatttctt

SEQ ID NO: 141382 - DNA, 20 bp, Artificial Sequence
  Description of Artificial Sequence: Synthetic oligonucleotide
  Target: LAMA2; (+) strand; PAM type: NRG; PAM sequence: AAG
taaagcatatttcttgagct

SEQ ID NO: 141383 - DNA, 20 bp, Artificial Sequence
  Description of Artificial Sequence: Synthetic oligonucleotide
  Target: LAMA2; (+) strand; PAM type: NRG; PAM sequence: CAG
tatttcttgagctaagaatg

SEQ ID NO: 141384 - DNA, 20 bp, Artificial Sequence
  Description of Artificial Sequence: Synthetic oligonucleotide
  Target: LAMA2; (+) strand; PAM type: NRG; PAM sequence: CAG
ctaagaatgcagtgtattca

SEQ ID NO: 141385 - DNA, 20 bp, Artificial Sequence
  Description of Artificial Sequence: Synthetic oligonucleotide
  Target: LAMA2; (+) strand; PAM type: NRG; PAM sequence: AAG
gaatgcagtgtattcacagt

SEQ ID NO: 141386 - DNA, 20 bp, Artificial Sequence
  Description of Artificial Sequence: Synthetic oligonucleotide
  Target: LAMA2; (+) strand; PAM type: NRG; PAM sequence: GAG
atgcagtgtattcacagtaa

SEQ ID NO: 141387 - DNA, 20 bp, Artificial Sequence
  Description of Artificial Sequence: Synthetic oligonucleotide
  Target: LAMA2; (+) strand; PAM type: NRG; PAM sequence: AGG
tgcagtgtattcacagtaag

SEQ ID NO: 141388 - DNA, 20 bp, Artificial Sequence
  Description of Artificial Sequence: Synthetic oligonucleotide
  Target: LAMA2; (+) strand; PAM type: NRG; PAM sequence: CAG
agtgtattcacagtaagagg

SEQ ID NO: 141389 - DNA, 20 bp, Artificial Sequence
  Description of Artificial Sequence: Synthetic oligonucleotide
  Target: LAMA2; (+) strand; PAM type: NRG; PAM sequence: GAG
tgtattcacagtaagaggca

SEQ ID NO: 141390 - DNA, 20 bp, Artificial Sequence
  Description of Artificial Sequence: Synthetic oligonucleotide
  Target: LAMA2; (+) strand; PAM type: NRG; PAM sequence: AAG
ggcagagttaaccatttatc

SEQ ID NO: 141391 - DNA, 20 bp, Artificial Sequence
  Description of Artificial Sequence: Synthetic oligonucleotide
  Target: LAMA2; (+) strand; PAM type: NRG; PAM sequence: AAG
aaccatttatcaagataatt

SEQ ID NO: 141392 - DNA, 20 bp, Artificial Sequence
  Description of Artificial Sequence: Synthetic oligonucleotide
  Target: LAMA2; (+) strand; PAM type: NRG; PAM sequence: AAG
gcattaaatgtttgctccgt

SEQ ID NO: 141393 - DNA, 20 bp, Artificial Sequence
  Description of Artificial Sequence: Synthetic oligonucleotide
  Target: LAMA2; (+) strand; PAM type: NRG; PAM sequence: GAG
attaaatgtttgctccgtaa

SEQ ID NO: 141394 - DNA, 20 bp, Artificial Sequence
  Description of Artificial Sequence: Synthetic oligonucleotide
  Target: LAMA2; (+) strand; PAM type: NRG; PAM sequence: AAG
aatgtttgctccgtaagagc

SEQ ID NO: 141395 - DNA, 20 bp, Artificial Sequence
  Description of Artificial Sequence: Synthetic oligonucleotide
  Target: LAMA2; (+) strand; PAM type: NRG; PAM sequence: CAG
aagagcaagcactaaattac

SEQ ID NO: 141396 - DNA, 20 bp, Artificial Sequence
  Description of Artificial Sequence: Synthetic oligonucleotide
  Target: LAMA2; (+) strand; PAM type: NRG; PAM sequence: TAG
agcaagcactaaattaccag

SEQ ID NO: 141397 - DNA, 20 bp, Artificial Sequence
  Description of Artificial Sequence: Synthetic oligonucleotide
  Target: LAMA2; (+) strand; PAM type: NRG; PAM sequence: TAG
aagcactaaattaccagtag

SEQ ID NO: 141398 - DNA, 20 bp, Artificial Sequence
  Description of Artificial Sequence: Synthetic oligonucleotide
  Target: LAMA2; (+) strand; PAM type: NRG; PAM sequence: AAG
gtagtaatattattatgtga

SEQ ID NO: 141399 - DNA, 20 bp, Artificial Sequence
  Description of Artificial Sequence: Synthetic oligonucleotide
  Target: LAMA2; (+) strand; PAM type: NRG; PAM sequence: AGG
tagtaatattattatgtgaa

SEQ ID NO: 141400 - DNA, 20 bp, Artificial Sequence
  Description of Artificial Sequence: Synthetic oligonucleotide
  Target: LAMA2; (+) strand; PAM type: NRG; PAM sequence: GGG
agtaatattattatgtgaaa

SEQ ID NO: 141401 - DNA, 20 bp, Artificial Sequence
  Description of Artificial Sequence: Synthetic oligonucleotide
  Target: LAMA2; (+) strand; PAM type: NRG; PAM sequence: TAG
attatgtgaaagggaatcaa

SEQ ID NO: 141402 - DNA, 20 bp, Artificial Sequence
  Description of Artificial Sequence: Synthetic oligonucleotide
  Target: LAMA2; (+) strand; PAM type: NRG; PAM sequence: GAG
aatagtttgtttactaaaat

SEQ ID NO: 141403 - DNA, 20 bp, Artificial Sequence
  Description of Artificial Sequence: Synthetic oligonucleotide
  Target: LAMA2; (+) strand; PAM type: NRG; PAM sequence: TAG
tttactaaaatgagatgcat

SEQ ID NO: 141404 - DNA, 20 bp, Artificial Sequence
  Description of Artificial Sequence: Synthetic oligonucleotide
  Target: LAMA2; (+) strand; PAM type: NRG; PAM sequence: AAG
ctaaaatgagatgcattagc

SEQ ID NO: 141405 - DNA, 20 bp, Artificial Sequence
  Description of Artificial Sequence: Synthetic oligonucleotide
  Target: LAMA2; (+) strand; PAM type: NRG; PAM sequence: AAG
aaattttcaaatatacacaa

SEQ ID NO: 141406 - DNA, 20 bp, Artificial Sequence
  Description of Artificial Sequence: Synthetic oligonucleotide
  Target: LAMA2; (+) strand; PAM type: NRG; PAM sequence: TAG
ttcaaatatacacaaaagta

SEQ ID NO: 141407 - DNA, 20 bp, Artificial Sequence
  Description of Artificial Sequence: Synthetic oligonucleotide
  Target: LAMA2; (+) strand; PAM type: NRG; PAM sequence: GAG
caaatatacacaaaagtata

SEQ ID NO: 141408 - DNA, 20 bp, Artificial Sequence
  Description of Artificial Sequence: Synthetic oligonucleotide
  Target: LAMA2; (+) strand; PAM type: NRG; PAM sequence: TGG
caaaagtatagagaataccg

SEQ ID NO: 141409 - DNA, 20 bp, Artificial Sequence
  Description of Artificial Sequence: Synthetic oligonucleotide
  Target: LAMA2; (+) strand; PAM type: NRG; PAM sequence: AAG
tgtacccaacacccatccat

SEQ ID NO: 141410 - DNA, 20 bp, Artificial Sequence
  Description of Artificial Sequence: Synthetic oligonucleotide
  Target: LAMA2; (+) strand; PAM type: NRG; PAM sequence: CAG
cccatccataagtattaact

SEQ ID NO: 141411 - DNA, 20 bp, Artificial Sequence
  Description of Artificial Sequence: Synthetic oligonucleotide
  Target: LAMA2; (+) strand; PAM type: NRG; PAM sequence: AGG
ccatccataagtattaactc

SEQ ID NO: 141412 - DNA, 20 bp, Artificial Sequence
  Description of Artificial Sequence: Synthetic oligonucleotide
  Target: LAMA2; (+) strand; PAM type: NRG; PAM sequence: CAG
actcaggacccctcttgtat

SEQ ID NO: 141413 - DNA, 20 bp, Artificial Sequence
  Description of Artificial Sequence: Synthetic oligonucleotide
  Target: LAMA2; (+) strand; PAM type: NRG; PAM sequence: CAG
cacatcctactccacccctc

SEQ ID NO: 141414 - DNA, 20 bp, Artificial Sequence
  Description of Artificial Sequence: Synthetic oligonucleotide
  Target: LAMA2; (+) strand; PAM type: NRG; PAM sequence: TGG
actccacccctccagattat

SEQ ID NO: 141415 - DNA, 20 bp, Artificial Sequence
  Description of Artificial Sequence: Synthetic oligonucleotide
  Target: LAMA2; (+) strand; PAM type: NRG; PAM sequence: GGG
ctccacccctccagattatt

SEQ ID NO: 141416 - DNA, 20 bp, Artificial Sequence
  Description of Artificial Sequence: Synthetic oligonucleotide
  Target: LAMA2; (+) strand; PAM type: NRG; PAM sequence: AAG
cacccctccagattattggg

SEQ ID NO: 141417 - DNA, 20 bp, Artificial Sequence
  Description of Artificial Sequence: Synthetic oligonucleotide
  Target: LAMA2; (+) strand; PAM type: NRG; PAM sequence: AAG
tacttcattatgtatctctg

SEQ ID NO: 141418 - DNA, 20 bp, Artificial Sequence
  Description of Artificial Sequence: Synthetic oligonucleotide
  Target: LAMA2; (+) strand; PAM type: NRG; PAM sequence: AGG
acttcattatgtatctctga

SEQ ID NO: 141419 - DNA, 20 bp, Artificial Sequence
  Description of Artificial Sequence: Synthetic oligonucleotide
  Target: LAMA2; (+) strand; PAM type: NRG; PAM sequence: AAG
attatgtatctctgaaggat

SEQ ID NO: 141420 - DNA, 20 bp, Artificial Sequence
  Description of Artificial Sequence: Synthetic oligonucleotide
  Target: LAMA2; (+) strand; PAM type: NRG; PAM sequence: AAG
aaggataagactcttttata

SEQ ID NO: 141421 - DNA, 20 bp, Artificial Sequence
  Description of Artificial Sequence: Synthetic oligonucleotide
  Target: LAMA2; (+) strand; PAM type: NRG; PAM sequence: AGG
aggataagactcttttataa

SEQ ID NO: 141422 - DNA, 20 bp, Artificial Sequence
  Description of Artificial Sequence: Synthetic oligonucleotide
  Target: LAMA2; (+) strand; PAM type: NRG; PAM sequence: CAG
aatattaacaaatatttact

SEQ ID NO: 141423 - DNA, 20 bp, Artificial Sequence
  Description of Artificial Sequence: Synthetic oligonucleotide
  Target: LAMA2; (+) strand; PAM type: NRG; PAM sequence: AAG
aattcatcacacctgcttcc

SEQ ID NO: 141424 - DNA, 20 bp, Artificial Sequence
  Description of Artificial Sequence: Synthetic oligonucleotide
  Target: LAMA2; (+) strand; PAM type: NRG; PAM sequence: CAG
gcttccaagttttttaaaaa

SEQ ID NO: 141425 - DNA, 20 bp, Artificial Sequence
  Description of Artificial Sequence: Synthetic oligonucleotide
  Target: LAMA2; (+) strand; PAM type: NRG; PAM sequence: CAG
ttttttaaaaacagttgaat

SEQ ID NO: 141426 - DNA, 20 bp, Artificial Sequence
  Description of Artificial Sequence: Synthetic oligonucleotide
  Target: LAMA2; (+) strand; PAM type: NRG; PAM sequence: AGG
tttttaaaaacagttgaatc

SEQ ID NO: 141427 - DNA, 20 bp, Artificial Sequence
  Description of Artificial Sequence: Synthetic oligonucleotide
  Target: LAMA2; (+) strand; PAM type: NRG; PAM sequence: AAG
acagttgaatcaggattcac

SEQ ID NO: 141428 - DNA, 20 bp, Artificial Sequence
  Description of Artificial Sequence: Synthetic oligonucleotide
  Target: LAMA2; (+) strand; PAM type: NRG; PAM sequence: AAG
gttgaatcaggattcacaag

SEQ ID NO: 141429 - DNA, 20 bp, Artificial Sequence
  Description of Artificial Sequence: Synthetic oligonucleotide
  Target: LAMA2; (+) strand; PAM type: NRG; PAM sequence: TAG
ctgcatttgttcgatatatc

SEQ ID NO: 141430 - DNA, 20 bp, Artificial Sequence
  Description of Artificial Sequence: Synthetic oligonucleotide
  Target: LAMA2; (+) strand; PAM type: NRG; PAM sequence: AGG
tgcatttgttcgatatatct

SEQ ID NO: 141431 - DNA, 20 bp, Artificial Sequence
  Description of Artificial Sequence: Synthetic oligonucleotide
  Target: LAMA2; (+) strand; PAM type: NRG; PAM sequence: AAG
ccttgcaacttatttttttg

SEQ ID NO: 141432 - DNA, 20 bp, Artificial Sequence
  Description of Artificial Sequence: Synthetic oligonucleotide
  Target: LAMA2; (+) strand; PAM type: NRG; PAM sequence: CAG
aagaaaccacgttgtgtgtc

SEQ ID NO: 141433 - DNA, 20 bp, Artificial Sequence
  Description of Artificial Sequence: Synthetic oligonucleotide
  Target: LAMA2; (+) strand; PAM type: NRG; PAM sequence: TAG
aaaccacgttgtgtgtccag

SEQ ID NO: 141434 - DNA, 20 bp, Artificial Sequence
  Description of Artificial Sequence: Synthetic oligonucleotide
  Target: LAMA2; (+) strand; PAM type: NRG; PAM sequence: TAG
acatcctgcattttgctact

SEQ ID NO: 141435 - DNA, 20 bp, Artificial Sequence
  Description of Artificial Sequence: Synthetic oligonucleotide
  Target: LAMA2; (+) strand; PAM type: NRG; PAM sequence: AGG
catcctgcattttgctactt

SEQ ID NO: 141436 - DNA, 20 bp, Artificial Sequence
  Description of Artificial Sequence: Synthetic oligonucleotide
  Target: LAMA2; (+) strand; PAM type: NRG; PAM sequence: GGG
atcctgcattttgctactta

SEQ ID NO: 141437 - DNA, 20 bp, Artificial Sequence
  Description of Artificial Sequence: Synthetic oligonucleotide
  Target: LAMA2; (+) strand; PAM type: NRG; PAM sequence: TAG
tttgctacttagggttcctg

SEQ ID NO: 141438 - DNA, 20 bp, Artificial Sequence
  Description of Artificial Sequence: Synthetic oligonucleotide
  Target: LAMA2; (+) strand; PAM type: NRG; PAM sequence: TAG
ctatatttcctgaaaactga

SEQ ID NO: 141439 - DNA, 20 bp, Artificial Sequence
  Description of Artificial Sequence: Synthetic oligonucleotide
  Target: LAMA2; (+) strand; PAM type: NRG; PAM sequence: TAG
tgaaaactgatagataaatt

SEQ ID NO: 141440 - DNA, 20 bp, Artificial Sequence
  Description of Artificial Sequence: Synthetic oligonucleotide
  Target: LAMA2; (+) strand; PAM type: NRG; PAM sequence: GAG
aaaactgatagataaattta

SEQ ID NO: 141441 - DNA, 20 bp, Artificial Sequence
  Description of Artificial Sequence: Synthetic oligonucleotide
  Target: LAMA2; (+) strand; PAM type: NRG; PAM sequence: GAG
aactgatagataaatttaga

SEQ ID NO: 141442 - DNA, 20 bp, Artificial Sequence
  Description of Artificial Sequence: Synthetic oligonucleotide
  Target: LAMA2; (+) strand; PAM type: NRG; PAM sequence: CAG
tttagagagttactctgatt

SEQ ID NO: 141443 - DNA, 20 bp, Artificial Sequence
  Description of Artificial Sequence: Synthetic oligonucleotide
  Target: LAMA2; (+) strand; PAM type: NRG; PAM sequence: AGG
ttagagagttactctgattc

SEQ ID NO: 141444 - DNA, 20 bp, Artificial Sequence
  Description of Artificial Sequence: Synthetic oligonucleotide
  Target: LAMA2; (+) strand; PAM type: NRG; PAM sequence: GGG
tagagagttactctgattca

SEQ ID NO: 141445 - DNA, 20 bp, Artificial Sequence
  Description of Artificial Sequence: Synthetic oligonucleotide
  Target: LAMA2; (+) strand; PAM type: NRG; PAM sequence: TGG
tgattcagggttcatatttt

SEQ ID NO: 141446 - DNA, 20 bp, Artificial Sequence
  Description of Artificial Sequence: Synthetic oligonucleotide
  Target: LAMA2; (+) strand; PAM type: NRG; PAM sequence: TAG
tttttggcacaaccacttta

SEQ ID NO: 141447 - DNA, 20 bp, Artificial Sequence
  Description of Artificial Sequence: Synthetic oligonucleotide
  Target: LAMA2; (+) strand; PAM type: NRG; PAM sequence: CAG
tatgtgcttccatcacactg

SEQ ID NO: 141448 - DNA, 20 bp, Artificial Sequence
  Description of Artificial Sequence: Synthetic oligonucleotide
  Target: LAMA2; (+) strand; PAM type: NRG; PAM sequence: TGG
atcacactgcagaaaatatc

SEQ ID NO: 141449 - DNA, 20 bp, Artificial Sequence
  Description of Artificial Sequence: Synthetic oligonucleotide
  Target: LAMA2; (+) strand; PAM type: NRG; PAM sequence: GGG
tcacactgcagaaaatatct

SEQ ID NO: 141450 - DNA, 20 bp, Artificial Sequence
  Description of Artificial Sequence: Synthetic oligonucleotide
  Target: LAMA2; (+) strand; PAM type: NRG; PAM sequence: TGG
atatctgggtgtctcttttt

SEQ ID NO: 141451 - DNA, 20 bp, Artificial Sequence
  Description of Artificial Sequence: Synthetic oligonucleotide
  Target: LAMA2; (+) strand; PAM type: NRG; PAM sequence: GGG
tatctgggtgtctctttttt

SEQ ID NO: 141452 - DNA, 20 bp, Artificial Sequence
  Description of Artificial Sequence: Synthetic oligonucleotide
  Target: LAMA2; (+) strand; PAM type: NRG; PAM sequence: GGG
atctgggtgtctcttttttg

SEQ ID NO: 141453 - DNA, 20 bp, Artificial Sequence
  Description of Artificial Sequence: Synthetic oligonucleotide
  Target: LAMA2; (+) strand; PAM type: NRG; PAM sequence: TGG
ctcttttttggggatgtttc

SEQ ID NO: 141454 - DNA, 20 bp, Artificial Sequence
  Description of Artificial Sequence: Synthetic oligonucleotide
  Target: LAMA2; (+) strand; PAM type: NRG; PAM sequence: CAG
ggatgtttctggtcattgat

SEQ ID NO: 141455 - DNA, 20 bp, Artificial Sequence
  Description of Artificial Sequence: Synthetic oligonucleotide
  Target: LAMA2; (+) strand; PAM type: NRG; PAM sequence: TGG
tggtcattgatcagcattaa

SEQ ID NO: 141456 - DNA, 20 bp, Artificial Sequence
  Description of Artificial Sequence: Synthetic oligonucleotide
  Target: LAMA2; (+) strand; PAM type: NRG; PAM sequence: CAG
ttgatcagcattaatggcca

SEQ ID NO: 141457 - DNA, 20 bp, Artificial Sequence
  Description of Artificial Sequence: Synthetic oligonucleotide
  Target: LAMA2; (+) strand; PAM type: NRG; PAM sequence: AGG
tgatcagcattaatggccac

SEQ ID NO: 141458 - DNA, 20 bp, Artificial Sequence
  Description of Artificial Sequence: Synthetic oligonucleotide
  Target: LAMA2; (+) strand; PAM type: NRG; PAM sequence: TGG
gccacaggtccatcatttta

SEQ ID NO: 141459 - DNA, 20 bp, Artificial Sequence
  Description of Artificial Sequence: Synthetic oligonucleotide
  Target: LAMA2; (+) strand; PAM type: NRG; PAM sequence: GGG
ccacaggtccatcattttat

SEQ ID NO: 141460 - DNA, 20 bp, Artificial Sequence
  Description of Artificial Sequence: Synthetic oligonucleotide
  Target: LAMA2; (+) strand; PAM type: NRG; PAM sequence: GGG
cacaggtccatcattttatg

SEQ ID NO: 141461 - DNA, 20 bp, Artificial Sequence
  Description of Artificial Sequence: Synthetic oligonucleotide
  Target: LAMA2; (+) strand; PAM type: NRG; PAM sequence: GGG
acaggtccatcattttatgg

SEQ ID NO: 141462 - DNA, 20 bp, Artificial Sequence
  Description of Artificial Sequence: Synthetic oligonucleotide
  Target: LAMA2; (+) strand; PAM type: NRG; PAM sequence: TAG
ttttatgggggctcccttca

SEQ ID NO: 141463 - DNA, 20 bp, Artificial Sequence
  Description of Artificial Sequence: Synthetic oligonucleotide
  Target: LAMA2; (+) strand; PAM type: NRG; PAM sequence: CAG
tcccttcatagtaaactgca

SEQ ID NO: 141464 - DNA, 20 bp, Artificial Sequence
  Description of Artificial Sequence: Synthetic oligonucleotide
  Target: LAMA2; (+) strand; PAM type: NRG; PAM sequence: CAG
actgcacagtaaactataca

SEQ ID NO: 141465 - DNA, 20 bp, Artificial Sequence
  Description of Artificial Sequence: Synthetic oligonucleotide
  Target: LAMA2; (+) strand; PAM type: NRG; PAM sequence: TGG
actatacacagtgaaccttg

SEQ ID NO: 141466 - DNA, 20 bp, Artificial Sequence
  Description of Artificial Sequence: Synthetic oligonucleotide
  Target: LAMA2; (+) strand; PAM type: NRG; PAM sequence: TAG
gtgaaccttgtggtaaactg

SEQ ID NO: 141467 - DNA, 20 bp, Artificial Sequence
  Description of Artificial Sequence: Synthetic oligonucleotide
  Target: LAMA2; (+) strand; PAM type: NRG; PAM sequence: TAG
ctgtagcatcctgtgtacta

SEQ ID NO: 141468 - DNA, 20 bp, Artificial Sequence
  Description of Artificial Sequence: Synthetic oligonucleotide
  Target: LAMA2; (+) strand; PAM type: NRG; PAM sequence: CAG
cattcattgctcttccatct

SEQ ID NO: 141469 - DNA, 20 bp, Artificial Sequence
  Description of Artificial Sequence: Synthetic oligonucleotide
  Target: LAMA2; (+) strand; PAM type: NRG; PAM sequence: AGG
attcattgctcttccatctc

SEQ ID NO: 141470 - DNA, 20 bp, Artificial Sequence
  Description of Artificial Sequence: Synthetic oligonucleotide
  Target: LAMA2; (+) strand; PAM type: NRG; PAM sequence: GGG
ttcattgctcttccatctca

SEQ ID NO: 141471 - DNA, 20 bp, Artificial Sequence
  Description of Artificial Sequence: Synthetic oligonucleotide
  Target: LAMA2; (+) strand; PAM type: NRG; PAM sequence: AAG
tccaaatcacatttataatc

SEQ ID NO: 141472 - DNA, 20 bp, Artificial Sequence
  Description of Artificial Sequence: Synthetic oligonucleotide
  Target: LAMA2; (+) strand; PAM type: NRG; PAM sequence: CAG
acatttataatcaagtcgtt

SEQ ID NO: 141473 - DNA, 20 bp, Artificial Sequence
  Description of Artificial Sequence: Synthetic oligonucleotide
  Target: LAMA2; (+) strand; PAM type: NRG; PAM sequence: AAG
taatcaagtcgttcagcact

SEQ ID NO: 141474 - DNA, 20 bp, Artificial Sequence
  Description of Artificial Sequence: Synthetic oligonucleotide
  Target: LAMA2; (+) strand; PAM type: NRG; PAM sequence: AGG
aatcaagtcgttcagcacta

SEQ ID NO: 141475 - DNA, 20 bp, Artificial Sequence
  Description of Artificial Sequence: Synthetic oligonucleotide
  Target: LAMA2; (+) strand; PAM type: NRG; PAM sequence: TAG
attacatttatatattctct

SEQ ID NO: 141476 - DNA, 20 bp, Artificial Sequence
  Description of Artificial Sequence: Synthetic oligonucleotide
  Target: LAMA2; (+) strand; PAM type: NRG; PAM sequence: AGG
ttacatttatatattctctt

SEQ ID NO: 141477 - DNA, 20 bp, Artificial Sequence
  Description of Artificial Sequence: Synthetic oligonucleotide
  Target: LAMA2; (+) strand; PAM type: NRG; PAM sequence: GGG
tacatttatatattctctta

SEQ ID NO: 141478 - DNA, 20 bp, Artificial Sequence
  Description of Artificial Sequence: Synthetic oligonucleotide
  Target: LAMA2; (+) strand; PAM type: NRG; PAM sequence: AAG
ctcttagggacattgaaaat

SEQ ID NO: 141479 - DNA, 20 bp, Artificial Sequence
  Description of Artificial Sequence: Synthetic oligonucleotide
  Target: LAMA2; (+) strand; PAM type: NRG; PAM sequence: CAG
aaataagtcttgctattttt

SEQ ID NO: 141480 - DNA, 20 bp, Artificial Sequence
  Description of Artificial Sequence: Synthetic oligonucleotide
  Target: LAMA2; (+) strand; PAM type: NRG; PAM sequence: GAG
ataagtcttgctatttttca

SEQ ID NO: 141481 - DNA, 20 bp, Artificial Sequence
  Description of Artificial Sequence: Synthetic oligonucleotide
  Target: LAMA2; (+) strand; PAM type: NRG; PAM sequence: TAG
gtcttgctatttttcagagc

SEQ ID NO: 141482 - DNA, 20 bp, Artificial Sequence
  Description of Artificial Sequence: Synthetic oligonucleotide
  Target: LAMA2; (+) strand; PAM type: NRG; PAM sequence: GAG
atttttcagagctagacttt

SEQ ID NO: 141483 - DNA, 20 bp, Artificial Sequence
  Description of Artificial Sequence: Synthetic oligonucleotide
  Target: LAMA2; (+) strand; PAM type: NRG; PAM sequence: CAG
ctttgagatttgcttttttg

SEQ ID NO: 141484 - DNA, 20 bp, Artificial Sequence
  Description of Artificial Sequence: Synthetic oligonucleotide
  Target: LAMA2; (+) strand; PAM type: NRG; PAM sequence: GAG
ttgagatttgcttttttgca

SEQ ID NO: 141485 - DNA, 20 bp, Artificial Sequence
  Description of Artificial Sequence: Synthetic oligonucleotide
  Target: LAMA2; (+) strand; PAM type: NRG; PAM sequence: GAG
gatttgcttttttgcagagt

SEQ ID NO: 141486 - DNA, 20 bp, Artificial Sequence
  Description of Artificial Sequence: Synthetic oligonucleotide
  Target: LAMA2; (+) strand; PAM type: NRG; PAM sequence: TAG
tgcttttttgcagagtgaga

SEQ ID NO: 141487 - DNA, 20 bp, Artificial Sequence
  Description of Artificial Sequence: Synthetic oligonucleotide
  Target: LAMA2; (+) strand; PAM type: NRG; PAM sequence: GAG
cttttttgcagagtgagata

SEQ ID NO: 141488 - DNA, 20 bp, Artificial Sequence
  Description of Artificial Sequence: Synthetic oligonucleotide
  Target: LAMA2; (+) strand; PAM type: NRG; PAM sequence: AAG
ttttgcagagtgagatagag

SEQ ID NO: 141489 - DNA, 20 bp, Artificial Sequence
  Description of Artificial Sequence: Synthetic oligonucleotide
  Target: LAMA2; (+) strand; PAM type: NRG; PAM sequence: AAG
ccttcaaatactgtcccttg

SEQ ID NO: 141490 - DNA, 20 bp, Artificial Sequence
  Description of Artificial Sequence: Synthetic oligonucleotide
  Target: LAMA2; (+) strand; PAM type: NRG; PAM sequence: GAG
ttcaaatactgtcccttgaa

SEQ ID NO: 141491 - DNA, 20 bp, Artificial Sequence
  Description of Artificial Sequence: Synthetic oligonucleotide
  Target: LAMA2; (+) strand; PAM type: NRG; PAM sequence: TAG
aatactgtcccttgaagagt

SEQ ID NO: 141492 - DNA, 20 bp, Artificial Sequence
  Description of Artificial Sequence: Synthetic oligonucleotide
  Target: LAMA2; (+) strand; PAM type: NRG; PAM sequence: AGG
atactgtcccttgaagagtt

SEQ ID NO: 141493 - DNA, 20 bp, Artificial Sequence
  Description of Artificial Sequence: Synthetic oligonucleotide
  Target: LAMA2; (+) strand; PAM type: NRG; PAM sequence: AAG
aattgaaaatgttctcttca

SEQ ID NO: 141494 - DNA, 20 bp, Artificial Sequence
  Description of Artificial Sequence: Synthetic oligonucleotide
  Target: LAMA2; (+) strand; PAM type: NRG; PAM sequence: TAG
tctcttcaaagtattatcat

SEQ ID NO: 141495 - DNA, 20 bp, Artificial Sequence
  Description of Artificial Sequence: Synthetic oligonucleotide
  Target: LAMA2; (+) strand; PAM type: NRG; PAM sequence: CAG
aagtattatcattagtcatc

SEQ ID NO: 141496 - DNA, 20 bp, Artificial Sequence
  Description of Artificial Sequence: Synthetic oligonucleotide
  Target: LAMA2; (+) strand; PAM type: NRG; PAM sequence: TAG
attatcattagtcatccagt

SEQ ID NO: 141497 - DNA, 20 bp, Artificial Sequence
  Description of Artificial Sequence: Synthetic oligonucleotide
  Target: LAMA2; (+) strand; PAM type: NRG; PAM sequence: TAG
tccagttagattattattat

SEQ ID NO: 141498 - DNA, 20 bp, Artificial Sequence
  Description of Artificial Sequence: Synthetic oligonucleotide
  Target: LAMA2; (+) strand; PAM type: NRG; PAM sequence: AGG
ccagttagattattattatt

SEQ ID NO: 141499 - DNA, 20 bp, Artificial Sequence
  Description of Artificial Sequence: Synthetic oligonucleotide
  Target: LAMA2; (+) strand; PAM type: NRG; PAM sequence: GAG
ttattattattaggaattct

SEQ ID NO: 141500 - DNA, 20 bp, Artificial Sequence
  Description of Artificial Sequence: Synthetic oligonucleotide
  Target: LAMA2; (+) strand; PAM type: NRG; PAM sequence: AGG
tattattattaggaattctg

SEQ ID NO: 141501 - DNA, 20 bp, Artificial Sequence
  Description of Artificial Sequence: Synthetic oligonucleotide
  Target: LAMA2; (+) strand; PAM type: NRG; PAM sequence: TGG
tattattaggaattctgagg

SEQ ID NO: 141502 - DNA, 20 bp, Artificial Sequence
  Description of Artificial Sequence: Synthetic oligonucleotide
  Target: LAMA2; (+) strand; PAM type: NRG; PAM sequence: TGG
tattaggaattctgaggtgg

SEQ ID NO: 141503 - DNA, 20 bp, Artificial Sequence
  Description of Artificial Sequence: Synthetic oligonucleotide
  Target: LAMA2; (+) strand; PAM type: NRG; PAM sequence: GAG
ccaatgtgttaacttctcat

SEQ ID NO: 141504 - DNA, 20 bp, Artificial Sequence
  Description of Artificial Sequence: Synthetic oligonucleotide
  Target: LAMA2; (+) strand; PAM type: NRG; PAM sequence: GAG
acttctcatgagtttaatgt

SEQ ID NO: 141505 - DNA, 20 bp, Artificial Sequence
  Description of Artificial Sequence: Synthetic oligonucleotide
  Target: LAMA2; (+) strand; PAM type: NRG; PAM sequence: AAG
gagtttaatgtgagtataaa

SEQ ID NO: 141506 - DNA, 20 bp, Artificial Sequence
  Description of Artificial Sequence: Synthetic oligonucleotide
  Target: LAMA2; (+) strand; PAM type: NRG; PAM sequence: GAG
ataaaaagtctgttttaact

SEQ ID NO: 141507 - DNA, 20 bp, Artificial Sequence
  Description of Artificial Sequence: Synthetic oligonucleotide
  Target: LAMA2; (+) strand; PAM type: NRG; PAM sequence: AGG
taaaaagtctgttttaactg

SEQ ID NO: 141508 - DNA, 20 bp, Artificial Sequence
  Description of Artificial Sequence: Synthetic oligonucleotide
  Target: LAMA2; (+) strand; PAM type: NRG; PAM sequence: GGG
aaaaagtctgttttaactga

SEQ ID NO: 141509 - DNA, 20 bp, Artificial Sequence
  Description of Artificial Sequence: Synthetic oligonucleotide
  Target: LAMA2; (+) strand; PAM type: NRG; PAM sequence: CAG
aagtctgttttaactgaggg

SEQ ID NO: 141510 - DNA, 20 bp, Artificial Sequence
  Description of Artificial Sequence: Synthetic oligonucleotide
  Target: LAMA2; (+) strand; PAM type: NRG; PAM sequence: GAG
gtctgttttaactgagggca

SEQ ID NO: 141511 - DNA, 20 bp, Artificial Sequence
  Description of Artificial Sequence: Synthetic oligonucleotide
  Target: LAMA2; (+) strand; PAM type: NRG; PAM sequence: CAG
ttcctttttctcttataata

SEQ ID NO: 141512 - DNA, 20 bp, Artificial Sequence
  Description of Artificial Sequence: Synthetic oligonucleotide
  Target: LAMA2; (+) strand; PAM type: NRG; PAM sequence: AGG
tcctttttctcttataatac

SEQ ID NO: 141513 - DNA, 20 bp, Artificial Sequence
  Description of Artificial Sequence: Synthetic oligonucleotide
  Target: LAMA2; (+) strand; PAM type: NRG; PAM sequence: GAG
ctttttctcttataatacag

SEQ ID NO: 141514 - DNA, 20 bp, Artificial Sequence
  Description of Artificial Sequence: Synthetic oligonucleotide
  Target: LAMA2; (+) strand; PAM type: NRG; PAM sequence: CAG
ttctcttataatacaggagc

SEQ ID NO: 141515 - DNA, 20 bp, Artificial Sequence
  Description of Artificial Sequence: Synthetic oligonucleotide
  Target: LAMA2; (+) strand; PAM type: NRG; PAM sequence: CAG
tacaggagccagttacaaca

SEQ ID NO: 141516 - DNA, 20 bp, Artificial Sequence
  Description of Artificial Sequence: Synthetic oligonucleotide
  Target: LAMA2; (+) strand; PAM type: NRG; PAM sequence: AGG
acaggagccagttacaacac

SEQ ID NO: 141517 - DNA, 20 bp, Artificial Sequence
  Description of Artificial Sequence: Synthetic oligonucleotide
  Target: LAMA2; (+) strand; PAM type: NRG; PAM sequence: GAG
aggagccagttacaacacag

SEQ ID NO: 141518 - DNA, 20 bp, Artificial Sequence
  Description of Artificial Sequence: Synthetic oligonucleotide
  Target: LAMA2; (+) strand; PAM type: NRG; PAM sequence: AGG
ggagccagttacaacacagg

SEQ ID NO: 141519 - DNA, 20 bp, Artificial Sequence
  Description of Artificial Sequence: Synthetic oligonucleotide
  Target: LAMA2; (+) strand; PAM type: NRG; PAM sequence: TGG
ttacaacacaggaggtgaaa

SEQ ID NO: 141520 - DNA, 20 bp, Artificial Sequence
  Description of Artificial Sequence: Synthetic oligonucleotide
  Target: LAMA2; (+) strand; PAM type: NRG; PAM sequence: CAG
tgtttgcttacctgcaactt

SEQ ID NO: 141521 - DNA, 20 bp, Artificial Sequence
  Description of Artificial Sequence: Synthetic oligonucleotide
  Target: LAMA2; (+) strand; PAM type: NRG; PAM sequence: AGG
gtttgcttacctgcaacttc

SEQ ID NO: 141522 - DNA, 20 bp, Artificial Sequence
  Description of Artificial Sequence: Synthetic oligonucleotide
  Target: LAMA2; (+) strand; PAM type: NRG; PAM sequence: TAG
aacttcaggaatttcatgct

SEQ ID NO: 141523 - DNA, 20 bp, Artificial Sequence
  Description of Artificial Sequence: Synthetic oligonucleotide
  Target: LAMA2; (+) strand; PAM type: NRG; PAM sequence: CAG
tcatgcttagcaattaattg

SEQ ID NO: 141524 - DNA, 20 bp, Artificial Sequence
  Description of Artificial Sequence: Synthetic oligonucleotide
  Target: LAMA2; (+) strand; PAM type: NRG; PAM sequence: TGG
ttaattgcagtacacacttg

SEQ ID NO: 141525 - DNA, 20 bp, Artificial Sequence
  Description of Artificial Sequence: Synthetic oligonucleotide
  Target: LAMA2; (+) strand; PAM type: NRG; PAM sequence: GGG
taattgcagtacacacttgt

SEQ ID NO: 141526 - DNA, 20 bp, Artificial Sequence
  Description of Artificial Sequence: Synthetic oligonucleotide
  Target: LAMA2; (+) strand; PAM type: NRG; PAM sequence: GGG
aattgcagtacacacttgtg

SEQ ID NO: 141527 - DNA, 20 bp, Artificial Sequence
  Description of Artificial Sequence: Synthetic oligonucleotide
  Target: LAMA2; (+) strand; PAM type: NRG; PAM sequence: GGG
attgcagtacacacttgtgg

SEQ ID NO: 141528 - DNA, 20 bp, Artificial Sequence
  Description of Artificial Sequence: Synthetic oligonucleotide
  Target: LAMA2; (+) strand; PAM type: NRG; PAM sequence: TAG
gcagtacacacttgtggggg

SEQ ID NO: 141529 - DNA, 20 bp, Artificial Sequence
  Description of Artificial Sequence: Synthetic oligonucleotide
  Target: LAMA2; (+) strand; PAM type: NRG; PAM sequence: AGG
cagtacacacttgtgggggt

SEQ ID NO: 141530 - DNA, 20 bp, Artificial Sequence
  Description of Artificial Sequence: Synthetic oligonucleotide
  Target: LAMA2; (+) strand; PAM type: NRG; PAM sequence: GGG
agtacacacttgtgggggta

SEQ ID NO: 141531 - DNA, 20 bp, Artificial Sequence
  Description of Artificial Sequence: Synthetic oligonucleotide
  Target: LAMA2; (+) strand; PAM type: NRG; PAM sequence: GGG
gtacacacttgtgggggtag

SEQ ID NO: 141532 - DNA, 20 bp, Artificial Sequence
  Description of Artificial Sequence: Synthetic oligonucleotide
  Target: LAMA2; (+) strand; PAM type: NRG; PAM sequence: TAG
cacacttgtgggggtagggg

SEQ ID NO: 141533 - DNA, 20 bp, Artificial Sequence
  Description of Artificial Sequence: Synthetic oligonucleotide
  Target: LAMA2; (+) strand; PAM type: NRG; PAM sequence: AGG
acacttgtgggggtaggggt

SEQ ID NO: 141534 - DNA, 20 bp, Artificial Sequence
  Description of Artificial Sequence: Synthetic oligonucleotide
  Target: LAMA2; (+) strand; PAM type: NRG; PAM sequence: GAG
acttgtgggggtaggggtag

SEQ ID NO: 141535 - DNA, 20 bp, Artificial Sequence
  Description of Artificial Sequence: Synthetic oligonucleotide
  Target: LAMA2; (+) strand; PAM type: NRG; PAM sequence: AGG
cttgtgggggtaggggtagg

SEQ ID NO: 141536 - DNA, 20 bp, Artificial Sequence
  Description of Artificial Sequence: Synthetic oligonucleotide
  Target: LAMA2; (+) strand; PAM type: NRG; PAM sequence: TGG
tgggggtaggggtaggaggt

SEQ ID NO: 141537 - DNA, 20 bp, Artificial Sequence
  Description of Artificial Sequence: Synthetic oligonucleotide
  Target: LAMA2; (+) strand; PAM type: NRG; PAM sequence: AAG
gtaggggtaggaggttggat

SEQ ID NO: 141538 - DNA, 20 bp, Artificial Sequence
  Description of Artificial Sequence: Synthetic oligonucleotide
  Target: LAMA2; (+) strand; PAM type: NRG; PAM sequence: TGG
ggggtaggaggttggataag

SEQ ID NO: 141539 - DNA, 20 bp, Artificial Sequence
  Description of Artificial Sequence: Synthetic oligonucleotide
  Target: LAMA2; (+) strand; PAM type: NRG; PAM sequence: GGG
gggtaggaggttggataagt

SEQ ID NO: 141540 - DNA, 20 bp, Artificial Sequence
  Description of Artificial Sequence: Synthetic oligonucleotide
  Target: LAMA2; (+) strand; PAM type: NRG; PAM sequence: CAG
gtgggttgcacttaataatt

SEQ ID NO: 141541 - DNA, 20 bp, Artificial Sequence
  Description of Artificial Sequence: Synthetic oligonucleotide
  Target: LAMA2; (+) strand; PAM type: NRG; PAM sequence: AAG
aatcgtttcactatatgtga

SEQ ID NO: 141542 - DNA, 20 bp, Artificial Sequence
  Description of Artificial Sequence: Synthetic oligonucleotide
  Target: LAMA2; (+) strand; PAM type: NRG; PAM sequence: AAG
actatatgtgaaagtatttg

SEQ ID NO: 141543 - DNA, 20 bp, Artificial Sequence
  Description of Artificial Sequence: Synthetic oligonucleotide
  Target: LAMA2; (+) strand; PAM type: NRG; PAM sequence: AAG
atttgaagtaaatttacctg

SEQ ID NO: 141544 - DNA, 20 bp, Artificial Sequence
  Description of Artificial Sequence: Synthetic oligonucleotide
  Target: LAMA2; (+) strand; PAM type: NRG; PAM sequence: TAG
gaagtaaatttacctgaaga

SEQ ID NO: 141545 - DNA, 20 bp, Artificial Sequence
  Description of Artificial Sequence: Synthetic oligonucleotide
  Target: LAMA2; (+) strand; PAM type: NRG; PAM sequence: TGG
ttacctgaagatagaaaata

SEQ ID NO: 141546 - DNA, 20 bp, Artificial Sequence
  Description of Artificial Sequence: Synthetic oligonucleotide
  Target: LAMA2; (+) strand; PAM type: NRG; PAM sequence: GGG
tacctgaagatagaaaatat

SEQ ID NO: 141547 - DNA, 20 bp, Artificial Sequence
  Description of Artificial Sequence: Synthetic oligonucleotide
  Target: LAMA2; (+) strand; PAM type: NRG; PAM sequence: TGG
ctgaagatagaaaatatggg

SEQ ID NO: 141548 - DNA, 20 bp, Artificial Sequence
  Description of Artificial Sequence: Synthetic oligonucleotide
  Target: LAMA2; (+) strand; PAM type: NRG; PAM sequence: GGG
tgaagatagaaaatatgggt

SEQ ID NO: 141549 - DNA, 20 bp, Artificial Sequence
  Description of Artificial Sequence: Synthetic oligonucleotide
  Target: LAMA2; (+) strand; PAM type: NRG; PAM sequence: AAG
gatagaaaatatgggtgggc

SEQ ID NO: 141550 - DNA, 20 bp, Artificial Sequence
  Description of Artificial Sequence: Synthetic oligonucleotide
  Target: LAMA2; (+) strand; PAM type: NRG; PAM sequence: TAG
aactccccaccacattattc

SEQ ID NO: 141551 - DNA, 20 bp, Artificial Sequence
  Description of Artificial Sequence: Synthetic oligonucleotide
  Target: LAMA2; (+) strand; PAM type: NRG; PAM sequence: AGG
actccccaccacattattct

SEQ ID NO: 141552 - DNA, 20 bp, Artificial Sequence
  Description of Artificial Sequence: Synthetic oligonucleotide
  Target: LAMA2; (+) strand; PAM type: NRG; PAM sequence: AAG
acattattctaggtttattg

SEQ ID NO: 141553 - DNA, 20 bp, Artificial Sequence
  Description of Artificial Sequence: Synthetic oligonucleotide
  Target: LAMA2; (+) strand; PAM type: NRG; PAM sequence: AAG
tgaagtaaatgtaaacttat

SEQ ID NO: 141554 - DNA, 20 bp, Artificial Sequence
  Description of Artificial Sequence: Synthetic oligonucleotide
  Target: LAMA2; (+) strand; PAM type: NRG; PAM sequence: AGG
gaagtaaatgtaaacttata

SEQ ID NO: 141555 - DNA, 20 bp, Artificial Sequence
  Description of Artificial Sequence: Synthetic oligonucleotide
  Target: LAMA2; (+) strand; PAM type: NRG; PAM sequence: GGG
aagtaaatgtaaacttataa

SEQ ID NO: 141556 - DNA, 20 bp, Artificial Sequence
  Description of Artificial Sequence: Synthetic oligonucleotide
  Target: LAMA2; (+) strand; PAM type: NRG; PAM sequence: GGG
agtaaatgtaaacttataag

SEQ ID NO: 141557 - DNA, 20 bp, Artificial Sequence
  Description of Artificial Sequence: Synthetic oligonucleotide
  Target: LAMA2; (+) strand; PAM type: NRG; PAM sequence: CAG
aaggggacataaaactcaca

SEQ ID NO: 141558 - DNA, 20 bp, Artificial Sequence
  Description of Artificial Sequence: Synthetic oligonucleotide
  Target: LAMA2; (+) strand; PAM type: NRG; PAM sequence: TAG
ctcacacagaaaataataat

SEQ ID NO: 141559 - DNA, 20 bp, Artificial Sequence
  Description of Artificial Sequence: Synthetic oligonucleotide
  Target: LAMA2; (+) strand; PAM type: NRG; PAM sequence: AAG
atttccacattaatgttttt

SEQ ID NO: 141560 - DNA, 20 bp, Artificial Sequence
  Description of Artificial Sequence: Synthetic oligonucleotide
  Target: LAMA2; (+) strand; PAM type: NRG; PAM sequence: AAG
cactgatgcttgacttaaac

SEQ ID NO: 141561 - DNA, 20 bp, Artificial Sequence
  Description of Artificial Sequence: Synthetic oligonucleotide
  Target: LAMA2; (+) strand; PAM type: NRG; PAM sequence: TAG
gacttaaacaagtccactta

SEQ ID NO: 141562 - DNA, 20 bp, Artificial Sequence
  Description of Artificial Sequence: Synthetic oligonucleotide
  Target: LAMA2; (+) strand; PAM type: NRG; PAM sequence: CAG
aagtccacttatagcattgt

SEQ ID NO: 141563 - DNA, 20 bp, Artificial Sequence
  Description of Artificial Sequence: Synthetic oligonucleotide
  Target: LAMA2; (+) strand; PAM type: NRG; PAM sequence: AAG
agcattgtcagaatctgtat

SEQ ID NO: 141564 - DNA, 20 bp, Artificial Sequence
  Description of Artificial Sequence: Synthetic oligonucleotide
  Target: LAMA2; (+) strand; PAM type: NRG; PAM sequence: CAG
aatctgtataagtatctctt

SEQ ID NO: 141565 - DNA, 20 bp, Artificial Sequence
  Description of Artificial Sequence: Synthetic oligonucleotide
  Target: LAMA2; (+) strand; PAM type: NRG; PAM sequence: AGG
atctgtataagtatctcttc

SEQ ID NO: 141566 - DNA, 20 bp, Artificial Sequence
  Description of Artificial Sequence: Synthetic oligonucleotide
  Target: LAMA2; (+) strand; PAM type: NRG; PAM sequence: GGG
tctgtataagtatctcttca

SEQ ID NO: 141567 - DNA, 20 bp, Artificial Sequence
  Description of Artificial Sequence: Synthetic oligonucleotide
  Target: LAMA2; (+) strand; PAM type: NRG; PAM sequence: AAG
tatctcttcagggaattttt

SEQ ID NO: 141568 - DNA, 20 bp, Artificial Sequence
  Description of Artificial Sequence: Synthetic oligonucleotide
  Target: LAMA2; (+) strand; PAM type: NRG; PAM sequence: GAG
cttcagggaatttttaagat

SEQ ID NO: 141569 - DNA, 20 bp, Artificial Sequence
  Description of Artificial Sequence: Synthetic oligonucleotide
  Target: LAMA2; (+) strand; PAM type: NRG; PAM sequence: GAG
tcagggaatttttaagatga

SEQ ID NO: 141570 - DNA, 20 bp, Artificial Sequence
  Description of Artificial Sequence: Synthetic oligonucleotide
  Target: LAMA2; (+) strand; PAM type: NRG; PAM sequence: GAG
atgagagtgaacaattttct

SEQ ID NO: 141571 - DNA, 20 bp, Artificial Sequence
  Description of Artificial Sequence: Synthetic oligonucleotide
  Target: LAMA2; (+) strand; PAM type: NRG; PAM sequence: CAG
gcctacacatttttgttaca

SEQ ID NO: 141572 - DNA, 20 bp, Artificial Sequence
  Description of Artificial Sequence: Synthetic oligonucleotide
  Target: LAMA2; (+) strand; PAM type: NRG; PAM sequence: AAG
acacatttttgttacacagt

SEQ ID NO: 141573 - DNA, 20 bp, Artificial Sequence
  Description of Artificial Sequence: Synthetic oligonucleotide
  Target: LAMA2; (+) strand; PAM type: NRG; PAM sequence: GAG
acatttttgttacacagtaa

SEQ ID NO: 141574 - DNA, 20 bp, Artificial Sequence
  Description of Artificial Sequence: Synthetic oligonucleotide
  Target: LAMA2; (+) strand; PAM type: NRG; PAM sequence: CAG
ttttgttacacagtaagagc

SEQ ID NO: 141575 - DNA, 20 bp, Artificial Sequence
  Description of Artificial Sequence: Synthetic oligonucleotide
  Target: LAMA2; (+) strand; PAM type: NRG; PAM sequence: AGG
tttgttacacagtaagagcc

SEQ ID NO: 141576 - DNA, 20 bp, Artificial Sequence
  Description of Artificial Sequence: Synthetic oligonucleotide
  Target: LAMA2; (+) strand; PAM type: NRG; PAM sequence: TGG
agtaagagccaggttctatg

SEQ ID NO: 141577 - DNA, 20 bp, Artificial Sequence
  Description of Artificial Sequence: Synthetic oligonucleotide
  Target: LAMA2; (+) strand; PAM type: NRG; PAM sequence: TAG
gagccaggttctatgtggct

SEQ ID NO: 141578 - DNA, 20 bp, Artificial Sequence
  Description of Artificial Sequence: Synthetic oligonucleotide
  Target: LAMA2; (+) strand; PAM type: NRG; PAM sequence: AGG
agccaggttctatgtggctt

SEQ ID NO: 141579 - DNA, 20 bp, Artificial Sequence
  Description of Artificial Sequence: Synthetic oligonucleotide
  Target: LAMA2; (+) strand; PAM type: NRG; PAM sequence: TGG
caggttctatgtggcttagg

SEQ ID NO: 141580 - DNA, 20 bp, Artificial Sequence
  Description of Artificial Sequence: Synthetic oligonucleotide
  Target: LAMA2; (+) strand; PAM type: NRG; PAM sequence: GGG
aggttctatgtggcttaggt

SEQ ID NO: 141581 - DNA, 20 bp, Artificial Sequence
  Description of Artificial Sequence: Synthetic oligonucleotide
  Target: LAMA2; (+) strand; PAM type: NRG; PAM sequence: GGG
ggttctatgtggcttaggtg

SEQ ID NO: 141582 - DNA, 20 bp, Artificial Sequence
  Description of Artificial Sequence: Synthetic oligonucleotide
  Target: LAMA2; (+) strand; PAM type: NRG; PAM sequence: TGG
ctatgtggcttaggtgggga

SEQ ID NO: 141583 - DNA, 20 bp, Artificial Sequence
  Description of Artificial Sequence: Synthetic oligonucleotide
  Target: LAMA2; (+) strand; PAM type: NRG; PAM sequence: GGG
tatgtggcttaggtggggat

SEQ ID NO: 141584 - DNA, 20 bp, Artificial Sequence
  Description of Artificial Sequence: Synthetic oligonucleotide
  Target: LAMA2; (+) strand; PAM type: NRG; PAM sequence: GGG
atgtggcttaggtggggatg

SEQ ID NO: 141585 - DNA, 20 bp, Artificial Sequence
  Description of Artificial Sequence: Synthetic oligonucleotide
  Target: LAMA2; (+) strand; PAM type: NRG; PAM sequence: GAG
ttaggtggggatggggcttt

SEQ ID NO: 141586 - DNA, 20 bp, Artificial Sequence
  Description of Artificial Sequence: Synthetic oligonucleotide
  Target: LAMA2; (+) strand; PAM type: NRG; PAM sequence: CAG
agtgaatcctctgttgtaca

SEQ ID NO: 141587 - DNA, 20 bp, Artificial Sequence
  Description of Artificial Sequence: Synthetic oligonucleotide
  Target: LAMA2; (+) strand; PAM type: NRG; PAM sequence: CAG
acttaatacattctccattt

SEQ ID NO: 141588 - DNA, 20 bp, Artificial Sequence
  Description of Artificial Sequence: Synthetic oligonucleotide
  Target: LAMA2; (+) strand; PAM type: NRG; PAM sequence: CAG
cttttcacctctgttttcat

SEQ ID NO: 141589 - DNA, 20 bp, Artificial Sequence
  Description of Artificial Sequence: Synthetic oligonucleotide
  Target: LAMA2; (+) strand; PAM type: NRG; PAM sequence: CGG
tgttttcatcagacctacct

SEQ ID NO: 141590 - DNA, 20 bp, Artificial Sequence
  Description of Artificial Sequence: Synthetic oligonucleotide
  Target: LAMA2; (+) strand; PAM type: NRG; PAM sequence: GAG
ttcatcagacctacctcggt

SEQ ID NO: 141591 - DNA, 20 bp, Artificial Sequence
  Description of Artificial Sequence: Synthetic oligonucleotide
  Target: LAMA2; (+) strand; PAM type: NRG; PAM sequence: AGG
tcatcagacctacctcggtg

SEQ ID NO: 141592 - DNA, 20 bp, Artificial Sequence
  Description of Artificial Sequence: Synthetic oligonucleotide
  Target: LAMA2; (+) strand; PAM type: NRG; PAM sequence: TAG
gacctacctcggtgaggttc

SEQ ID NO: 141593 - DNA, 20 bp, Artificial Sequence
  Description of Artificial Sequence: Synthetic oligonucleotide
  Target: LAMA2; (+) strand; PAM type: NRG; PAM sequence: CAG
tctagacttctgccctgctg

SEQ ID NO: 141594 - DNA, 20 bp, Artificial Sequence
  Description of Artificial Sequence: Synthetic oligonucleotide
  Target: LAMA2; (+) strand; PAM type: NRG; PAM sequence: CAG
tctgccctgctgcagctact

SEQ ID NO: 141595 - DNA, 20 bp, Artificial Sequence
  Description of Artificial Sequence: Synthetic oligonucleotide
  Target: LAMA2; (+) strand; PAM type: NRG; PAM sequence: TAG
gctgcagctactcagtactt

SEQ ID NO: 141596 - DNA, 20 bp, Artificial Sequence
  Description of Artificial Sequence: Synthetic oligonucleotide
  Target: LAMA2; (+) strand; PAM type: NRG; PAM sequence: AGG
ctgcagctactcagtacttt

SEQ ID NO: 141597 - DNA, 20 bp, Artificial Sequence
  Description of Artificial Sequence: Synthetic oligonucleotide
  Target: LAMA2; (+) strand; PAM type: NRG; PAM sequence: CAG
tgacctccgctctccttcct

SEQ ID NO: 141598 - DNA, 20 bp, Artificial Sequence
  Description of Artificial Sequence: Synthetic oligonucleotide
  Target: LAMA2; (+) strand; PAM type: NRG; PAM sequence: CAG
ccttcctcagcaactcacca

SEQ ID NO: 141599 - DNA, 20 bp, Artificial Sequence
  Description of Artificial Sequence: Synthetic oligonucleotide
  Target: LAMA2; (+) strand; PAM type: NRG; PAM sequence: CAG
gcaactcaccacagaccttc

SEQ ID NO: 141600 - DNA, 20 bp, Artificial Sequence
  Description of Artificial Sequence: Synthetic oligonucleotide
  Target: LAMA2; (+) strand; PAM type: NRG; PAM sequence: TGG
tctcatccttttcttgttat

SEQ ID NO: 141601 - DNA, 20 bp, Artificial Sequence
  Description of Artificial Sequence: Synthetic oligonucleotide
  Target: LAMA2; (+) strand; PAM type: NRG; PAM sequence: TAG
ttctttctttcttttttctt

SEQ ID NO: 141602 - DNA, 20 bp, Artificial Sequence
  Description of Artificial Sequence: Synthetic oligonucleotide
  Target: LAMA2; (+) strand; PAM type: NRG; PAM sequence: CAG
ttcttttttctttagcgtca

SEQ ID NO: 141603 - DNA, 20 bp, Artificial Sequence
  Description of Artificial Sequence: Synthetic oligonucleotide
  Target: LAMA2; (+) strand; PAM type: NRG; PAM sequence: AGG
tcttttttctttagcgtcac

SEQ ID NO: 141604 - DNA, 20 bp, Artificial Sequence
  Description of Artificial Sequence: Synthetic oligonucleotide
  Target: LAMA2; (+) strand; PAM type: NRG; PAM sequence: GGG
cttttttctttagcgtcaca

SEQ ID NO: 141605 - DNA, 20 bp, Artificial Sequence
  Description of Artificial Sequence: Synthetic oligonucleotide
  Target: LAMA2; (+) strand; PAM type: NRG; PAM sequence: GGG
ttttttctttagcgtcacag

SEQ ID NO: 141606 - DNA, 20 bp, Artificial Sequence
  Description of Artificial Sequence: Synthetic oligonucleotide
  Target: LAMA2; (+) strand; PAM type: NRG; PAM sequence: AAG
tttctttagcgtcacagggg

SEQ ID NO: 141607 - DNA, 20 bp, Artificial Sequence
  Description of Artificial Sequence: Synthetic oligonucleotide
  Target: LAMA2; (+) strand; PAM type: NRG; PAM sequence: GAG
tctttagcgtcacaggggaa

SEQ ID NO: 141608 - DNA, 20 bp, Artificial Sequence
  Description of Artificial Sequence: Synthetic oligonucleotide
  Target: LAMA2; (+) strand; PAM type: NRG; PAM sequence: TGG
ggaagagctgataattgtat

SEQ ID NO: 141609 - DNA, 20 bp, Artificial Sequence
  Description of Artificial Sequence: Synthetic oligonucleotide
  Target: LAMA2; (+) strand; PAM type: NRG; PAM sequence: CAG
gctatatgtatcaactcaaa

SEQ ID NO: 141610 - DNA, 20 bp, Artificial Sequence
  Description of Artificial Sequence: Synthetic oligonucleotide
  Target: LAMA2; (+) strand; PAM type: NRG; PAM sequence: GAG
tatatgtatcaactcaaaca

SEQ ID NO: 141611 - DNA, 20 bp, Artificial Sequence
  Description of Artificial Sequence: Synthetic oligonucleotide
  Target: LAMA2; (+) strand; PAM type: NRG; PAM sequence: GAG
tatgtatcaactcaaacaga

SEQ ID NO: 141612 - DNA, 20 bp, Artificial Sequence
  Description of Artificial Sequence: Synthetic oligonucleotide
  Target: LAMA2; (+) strand; PAM type: NRG; PAM sequence: CAG
aaacagagagacattacctg

SEQ ID NO: 141613 - DNA, 20 bp, Artificial Sequence
  Description of Artificial Sequence: Synthetic oligonucleotide
  Target: LAMA2; (+) strand; PAM type: NRG; PAM sequence: AAG
acattacctgcagttctata

SEQ ID NO: 141614 - DNA, 20 bp, Artificial Sequence
  Description of Artificial Sequence: Synthetic oligonucleotide
  Target: LAMA2; (+) strand; PAM type: NRG; PAM sequence: CAG
tgcagttctataaagattcc

SEQ ID NO: 141615 - DNA, 20 bp, Artificial Sequence
  Description of Artificial Sequence: Synthetic oligonucleotide
  Target: LAMA2; (+) strand; PAM type: NRG; PAM sequence: TGG
agattcccagattattccaa

SEQ ID NO: 141616 - DNA, 20 bp, Artificial Sequence
  Description of Artificial Sequence: Synthetic oligonucleotide
  Target: LAMA2; (+) strand; PAM type: NRG; PAM sequence: GGG
gattcccagattattccaat

SEQ ID NO: 141617 - DNA, 20 bp, Artificial Sequence
  Description of Artificial Sequence: Synthetic oligonucleotide
  Target: LAMA2; (+) strand; PAM type: NRG; PAM sequence: AAG
agattattccaatgggtatt

SEQ ID NO: 141618 - DNA, 20 bp, Artificial Sequence
  Description of Artificial Sequence: Synthetic oligonucleotide
  Target: LAMA2; (+) strand; PAM type: NRG; PAM sequence: TGG
atgatgtctatgatcctttc

SEQ ID NO: 141619 - DNA, 20 bp, Artificial Sequence
  Description of Artificial Sequence: Synthetic oligonucleotide
  Target: LAMA2; (+) strand; PAM type: NRG; PAM sequence: AAG
taactctcatcacttaatga

SEQ ID NO: 141620 - DNA, 20 bp, Artificial Sequence
  Description of Artificial Sequence: Synthetic oligonucleotide
  Target: LAMA2; (+) strand; PAM type: NRG; PAM sequence: TGG
tgaaagccaccgttcctatt

SEQ ID NO: 141621 - DNA, 20 bp, Artificial Sequence
  Description of Artificial Sequence: Synthetic oligonucleotide
  Target: LAMA2; (+) strand; PAM type: NRG; PAM sequence: AAG
ccgttcctatttggataaat

SEQ ID NO: 141622 - DNA, 20 bp, Artificial Sequence
  Description of Artificial Sequence: Synthetic oligonucleotide
  Target: LAMA2; (+) strand; PAM type: NRG; PAM sequence: GAG
gttcctatttggataaataa

SEQ ID NO: 141623 - DNA, 20 bp, Artificial Sequence
  Description of Artificial Sequence: Synthetic oligonucleotide
  Target: LAMA2; (+) strand; PAM type: NRG; PAM sequence: TAG
agaattgaaaaacgcactat

SEQ ID NO: 141624 - DNA, 20 bp, Artificial Sequence
  Description of Artificial Sequence: Synthetic oligonucleotide
  Target: LAMA2; (+) strand; PAM type: NRG; PAM sequence: GAG
aaaaacgcactattagaact

SEQ ID NO: 141625 - DNA, 20 bp, Artificial Sequence
  Description of Artificial Sequence: Synthetic oligonucleotide
  Target: LAMA2; (+) strand; PAM type: NRG; PAM sequence: GAG
aaacgcactattagaactga

SEQ ID NO: 141626 - DNA, 20 bp, Artificial Sequence
  Description of Artificial Sequence: Synthetic oligonucleotide
  Target: LAMA2; (+) strand; PAM type: NRG; PAM sequence: CAG
cactattagaactgagagta

SEQ ID NO: 141627 - DNA, 20 bp, Artificial Sequence
  Description of Artificial Sequence: Synthetic oligonucleotide
  Target: LAMA2; (+) strand; PAM type: NRG; PAM sequence: GAG
ttagaactgagagtacagat

SEQ ID NO: 141628 - DNA, 20 bp, Artificial Sequence
  Description of Artificial Sequence: Synthetic oligonucleotide
  Target: LAMA2; (+) strand; PAM type: NRG; PAM sequence: TAG
gatgagctttccaaatatat

SEQ ID NO: 141629 - DNA, 20 bp, Artificial Sequence
  Description of Artificial Sequence: Synthetic oligonucleotide
  Target: LAMA2; (+) strand; PAM type: NRG; PAM sequence: GAG
tgagctttccaaatatatta

SEQ ID NO: 141630 - DNA, 20 bp, Artificial Sequence
  Description of Artificial Sequence: Synthetic oligonucleotide
  Target: LAMA2; (+) strand; PAM type: NRG; PAM sequence: TGG
ctttccaaatatattagaga

SEQ ID NO: 141631 - DNA, 20 bp, Artificial Sequence
  Description of Artificial Sequence: Synthetic oligonucleotide
  Target: LAMA2; (+) strand; PAM type: NRG; PAM sequence: CAG
atatattagagatggcatca

SEQ ID NO: 141632 - DNA, 20 bp, Artificial Sequence
  Description of Artificial Sequence: Synthetic oligonucleotide
  Target: LAMA2; (+) strand; PAM type: NRG; PAM sequence: TGG
agagatggcatcacagtaca

SEQ ID NO: 141633 - DNA, 20 bp, Artificial Sequence
  Description of Artificial Sequence: Synthetic oligonucleotide
  Target: LAMA2; (+) strand; PAM type: NRG; PAM sequence: TGG
aaatgttaaaatccataaca

SEQ ID NO: 141634 - DNA, 20 bp, Artificial Sequence
  Description of Artificial Sequence: Synthetic oligonucleotide
  Target: LAMA2; (+) strand; PAM type: NRG; PAM sequence: GGG
aatgttaaaatccataacat

SEQ ID NO: 141635 - DNA, 20 bp, Artificial Sequence
  Description of Artificial Sequence: Synthetic oligonucleotide
  Target: LAMA2; (+) strand; PAM type: NRG; PAM sequence: AAG
ttaaaatccataacatgggc

SEQ ID NO: 141636 - DNA, 20 bp, Artificial Sequence
  Description of Artificial Sequence: Synthetic oligonucleotide
  Target: LAMA2; (+) strand; PAM type: NRG; PAM sequence: GAG
aaaatccataacatgggcaa

SEQ ID NO: 141637 - DNA, 20 bp, Artificial Sequence
  Description of Artificial Sequence: Synthetic oligonucleotide
  Target: LAMA2; (+) strand; PAM type: NRG; PAM sequence: TAG
acatgggcaagagcacatac

SEQ ID NO: 141638 - DNA, 20 bp, Artificial Sequence
  Description of Artificial Sequence: Synthetic oligonucleotide
  Target: LAMA2; (+) strand; PAM type: NRG; PAM sequence: AAG
ggcaagagcacatactagaa

SEQ ID NO: 141639 - DNA, 20 bp, Artificial Sequence
  Description of Artificial Sequence: Synthetic oligonucleotide
  Target: LAMA2; (+) strand; PAM type: NRG; PAM sequence: CAG
gagcacatactagaaaagtg

SEQ ID NO: 141640 - DNA, 20 bp, Artificial Sequence
  Description of Artificial Sequence: Synthetic oligonucleotide
  Target: LAMA2; (+) strand; PAM type: NRG; PAM sequence: TAG
agaaaagtgcagaacctctt

SEQ ID NO: 141641 - DNA, 20 bp, Artificial Sequence
  Description of Artificial Sequence: Synthetic oligonucleotide
  Target: LAMA2; (+) strand; PAM type: NRG; PAM sequence: AAG
aaagtgcagaacctctttag

SEQ ID NO: 141642 - DNA, 20 bp, Artificial Sequence
  Description of Artificial Sequence: Synthetic oligonucleotide
  Target: LAMA2; (+) strand; PAM type: NRG; PAM sequence: AAG
gcagaacctctttagaagtg

SEQ ID NO: 141643 - DNA, 20 bp, Artificial Sequence
  Description of Artificial Sequence: Synthetic oligonucleotide
  Target: LAMA2; (+) strand; PAM type: NRG; PAM sequence: TAG
ccatgcacatcaatttgcta

SEQ ID NO: 141644 - DNA, 20 bp, Artificial Sequence
  Description of Artificial Sequence: Synthetic oligonucleotide
  Target: LAMA2; (+) strand; PAM type: NRG; PAM sequence: AGG
catgcacatcaatttgctat

SEQ ID NO: 141645 - DNA, 20 bp, Artificial Sequence
  Description of Artificial Sequence: Synthetic oligonucleotide
  Target: LAMA2; (+) strand; PAM type: NRG; PAM sequence: GAG
tgcacatcaatttgctatag

SEQ ID NO: 141646 - DNA, 20 bp, Artificial Sequence
  Description of Artificial Sequence: Synthetic oligonucleotide
  Target: LAMA2; (+) strand; PAM type: NRG; PAM sequence: CAG
atcaatttgctataggagtt

SEQ ID NO: 141647 - DNA, 20 bp, Artificial Sequence
  Description of Artificial Sequence: Synthetic oligonucleotide
  Target: LAMA2; (+) strand; PAM type: NRG; PAM sequence: AGG
tcaatttgctataggagttc

SEQ ID NO: 141648 - DNA, 20 bp, Artificial Sequence
  Description of Artificial Sequence: Synthetic oligonucleotide
  Target: LAMA2; (+) strand; PAM type: NRG; PAM sequence: GGG
caatttgctataggagttca

SEQ ID NO: 141649 - DNA, 20 bp, Artificial Sequence
  Description of Artificial Sequence: Synthetic oligonucleotide
  Target: LAMA2; (+) strand; PAM type: NRG; PAM sequence: TAG
tataggagttcagggacaaa

SEQ ID NO: 141650 - DNA, 20 bp, Artificial Sequence
  Description of Artificial Sequence: Synthetic oligonucleotide
  Target: LAMA2; (+) strand; PAM type: NRG; PAM sequence: TGG
ttcagggacaaatagcaata

SEQ ID NO: 141651 - DNA, 20 bp, Artificial Sequence
  Description of Artificial Sequence: Synthetic oligonucleotide
  Target: LAMA2; (+) strand; PAM type: NRG; PAM sequence: GGG
tcagggacaaatagcaatat

SEQ ID NO: 141652 - DNA, 20 bp, Artificial Sequence
  Description of Artificial Sequence: Synthetic oligonucleotide
  Target: LAMA2; (+) strand; PAM type: NRG; PAM sequence: AAG
gggacaaatagcaatatggg

SEQ ID NO: 141653 - DNA, 20 bp, Artificial Sequence
  Description of Artificial Sequence: Synthetic oligonucleotide
  Target: LAMA2; (+) strand; PAM type: NRG; PAM sequence: AGG
ggacaaatagcaatatggga

SEQ ID NO: 141654 - DNA, 20 bp, Artificial Sequence
  Description of Artificial Sequence: Synthetic oligonucleotide
  Target: LAMA2; (+) strand; PAM type: NRG; PAM sequence: GAG
acaaatagcaatatgggaag

SEQ ID NO: 141655 - DNA, 20 bp, Artificial Sequence
  Description of Artificial Sequence: Synthetic oligonucleotide
  Target: LAMA2; (+) strand; PAM type: NRG; PAM sequence: AGG
caaatagcaatatgggaagg

SEQ ID NO: 141656 - DNA, 20 bp, Artificial Sequence
  Description of Artificial Sequence: Synthetic oligonucleotide
  Target: LAMA2; (+) strand; PAM type: NRG; PAM sequence: CGG
atagcaatatgggaaggagg

SEQ ID NO: 141657 - DNA, 20 bp, Artificial Sequence
  Description of Artificial Sequence: Synthetic oligonucleotide
  Target: LAMA2; (+) strand; PAM type: NRG; PAM sequence: GAG
agcaatatgggaaggaggcg

SEQ ID NO: 141658 - DNA, 20 bp, Artificial Sequence
  Description of Artificial Sequence: Synthetic oligonucleotide
  Target: LAMA2; (+) strand; PAM type: NRG; PAM sequence: GAG
aggaggcggagctcaacatt

SEQ ID NO: 141659 - DNA, 20 bp, Artificial Sequence
  Description of Artificial Sequence: Synthetic oligonucleotide
  Target: LAMA2; (+) strand; PAM type: NRG; PAM sequence: CAG
aggcggagctcaacattgag

SEQ ID NO: 141660 - DNA, 20 bp, Artificial Sequence
  Description of Artificial Sequence: Synthetic oligonucleotide
  Target: LAMA2; (+) strand; PAM type: NRG; PAM sequence: TAG
gctcaacattgagcagaaat

SEQ ID NO: 141661 - DNA, 20 bp, Artificial Sequence
  Description of Artificial Sequence: Synthetic oligonucleotide
  Target: LAMA2; (+) strand; PAM type: NRG; PAM sequence: GAG
tagacacatgctgttctctt

SEQ ID NO: 141662 - DNA, 20 bp, Artificial Sequence
  Description of Artificial Sequence: Synthetic oligonucleotide
  Target: LAMA2; (+) strand; PAM type: NRG; PAM sequence: GAG
gacacatgctgttctcttga

SEQ ID NO: 141663 - DNA, 20 bp, Artificial Sequence
  Description of Artificial Sequence: Synthetic oligonucleotide
  Target: LAMA2; (+) strand; PAM type: NRG; PAM sequence: AAG
tgctgttctcttgagagatt

SEQ ID NO: 141664 - DNA, 20 bp, Artificial Sequence
  Description of Artificial Sequence: Synthetic oligonucleotide
  Target: LAMA2; (+) strand; PAM type: NRG; PAM sequence: AAG
gttctcttgagagattaaga

SEQ ID NO: 141665 - DNA, 20 bp, Artificial Sequence
  Description of Artificial Sequence: Synthetic oligonucleotide
  Target: LAMA2; (+) strand; PAM type: NRG; PAM sequence: TAG
agagattaagaaagaataaa

SEQ ID NO: 141666 - DNA, 20 bp, Artificial Sequence
  Description of Artificial Sequence: Synthetic oligonucleotide
  Target: LAMA2; (+) strand; PAM type: NRG; PAM sequence: AAG
gattaagaaagaataaatag

SEQ ID NO: 141667 - DNA, 20 bp, Artificial Sequence
  Description of Artificial Sequence: Synthetic oligonucleotide
  Target: LAMA2; (+) strand; PAM type: NRG; PAM sequence: GAG
ttaagaaagaataaatagaa

SEQ ID NO: 141668 - DNA, 20 bp, Artificial Sequence
  Description of Artificial Sequence: Synthetic oligonucleotide
  Target: LAMA2; (+) strand; PAM type: NRG; PAM sequence: GAG
aagaaagaataaatagaaga

SEQ ID NO: 141669 - DNA, 20 bp, Artificial Sequence
  Description of Artificial Sequence: Synthetic oligonucleotide
  Target: LAMA2; (+) strand; PAM type: NRG; PAM sequence: AAG
aagaataaatagaagagagt

SEQ ID NO: 141670 - DNA, 20 bp, Artificial Sequence
  Description of Artificial Sequence: Synthetic oligonucleotide
  Target: LAMA2; (+) strand; PAM type: NRG; PAM sequence: CAG
ataaatagaagagagtaagt

SEQ ID NO: 141671 - DNA, 20 bp, Artificial Sequence
  Description of Artificial Sequence: Synthetic oligonucleotide
  Target: LAMA2; (+) strand; PAM type: NRG; PAM sequence: AGG
taaatagaagagagtaagtc

SEQ ID NO: 141672 - DNA, 20 bp, Artificial Sequence
  Description of Artificial Sequence: Synthetic oligonucleotide
  Target: LAMA2; (+) strand; PAM type: NRG; PAM sequence: GAG
gagagtaagtcaggtcctat

SEQ ID NO: 141673 - DNA, 20 bp, Artificial Sequence
  Description of Artificial Sequence: Synthetic oligonucleotide
  Target: LAMA2; (+) strand; PAM type: NRG; PAM sequence: AAG
agtaagtcaggtcctatgag

SEQ ID NO: 141674 - DNA, 20 bp, Artificial Sequence
  Description of Artificial Sequence: Synthetic oligonucleotide
  Target: LAMA2; (+) strand; PAM type: NRG; PAM sequence: AGG
gtaagtcaggtcctatgaga

SEQ ID NO: 141675 - DNA, 20 bp, Artificial Sequence
  Description of Artificial Sequence: Synthetic oligonucleotide
  Target: LAMA2; (+) strand; PAM type: NRG; PAM sequence: AAG
caggtcctatgagaaggata

SEQ ID NO: 141676 - DNA, 20 bp, Artificial Sequence
  Description of Artificial Sequence: Synthetic oligonucleotide
  Target: LAMA2; (+) strand; PAM type: NRG; PAM sequence: TAG
ggataaagcattgtcttcca

SEQ ID NO: 141677 - DNA, 20 bp, Artificial Sequence
  Description of Artificial Sequence: Synthetic oligonucleotide
  Target: LAMA2; (+) strand; PAM type: NRG; PAM sequence: GAG
ataaagcattgtcttccata

SEQ ID NO: 141678 - DNA, 20 bp, Artificial Sequence
  Description of Artificial Sequence: Synthetic oligonucleotide
  Target: LAMA2; (+) strand; PAM type: NRG; PAM sequence: GAG
aaagcattgtcttccataga

SEQ ID NO: 141679 - DNA, 20 bp, Artificial Sequence
  Description of Artificial Sequence: Synthetic oligonucleotide
  Target: LAMA2; (+) strand; PAM type: NRG; PAM sequence: CGG
accttcattaatatttttta

SEQ ID NO: 141680 - DNA, 20 bp, Artificial Sequence
  Description of Artificial Sequence: Synthetic oligonucleotide
  Target: LAMA2; (+) strand; PAM type: NRG; PAM sequence: TGG
aatattttttacggcttttg

SEQ ID NO: 141681 - DNA, 20 bp, Artificial Sequence
  Description of Artificial Sequence: Synthetic oligonucleotide
  Target: LAMA2; (+) strand; PAM type: NRG; PAM sequence: GAG
tattttttacggcttttgtg

SEQ ID NO: 141682 - DNA, 20 bp, Artificial Sequence
  Description of Artificial Sequence: Synthetic oligonucleotide
  Target: LAMA2; (+) strand; PAM type: NRG; PAM sequence: CAG
tttacggcttttgtggagat

SEQ ID NO: 141683 - DNA, 20 bp, Artificial Sequence
  Description of Artificial Sequence: Synthetic oligonucleotide
  Target: LAMA2; (+) strand; PAM type: NRG; PAM sequence: AAG
gcttttgtggagatcagcct

SEQ ID NO: 141684 - DNA, 20 bp, Artificial Sequence
  Description of Artificial Sequence: Synthetic oligonucleotide
  Target: LAMA2; (+) strand; PAM type: NRG; PAM sequence: AGG
cttttgtggagatcagccta

SEQ ID NO: 141685 - DNA, 20 bp, Artificial Sequence
  Description of Artificial Sequence: Synthetic oligonucleotide
  Target: LAMA2; (+) strand; PAM type: NRG; PAM sequence: CAG
tggagatcagcctaaggaaa

SEQ ID NO: 141686 - DNA, 20 bp, Artificial Sequence
  Description of Artificial Sequence: Synthetic oligonucleotide
  Target: LAMA2; (+) strand; PAM type: NRG; PAM sequence: AAG
agatcagcctaaggaaacag

SEQ ID NO: 141687 - DNA, 20 bp, Artificial Sequence
  Description of Artificial Sequence: Synthetic oligonucleotide
  Target: LAMA2; (+) strand; PAM type: NRG; PAM sequence: TGG
ctaaggaaacagaagtccta

SEQ ID NO: 141688 - DNA, 20 bp, Artificial Sequence
  Description of Artificial Sequence: Synthetic oligonucleotide
  Target: LAMA2; (+) strand; PAM type: NRG; PAM sequence: CAG
atggccttattacatcatta

SEQ ID NO: 141689 - DNA, 20 bp, Artificial Sequence
  Description of Artificial Sequence: Synthetic oligonucleotide
  Target: LAMA2; (+) strand; PAM type: NRG; PAM sequence: TGG
atcattacagaatcacactt

SEQ ID NO: 141690 - DNA, 20 bp, Artificial Sequence
  Description of Artificial Sequence: Synthetic oligonucleotide
  Target: LAMA2; (+) strand; PAM type: NRG; PAM sequence: TGG
ttacagaatcacactttggc

SEQ ID NO: 141691 - DNA, 20 bp, Artificial Sequence
  Description of Artificial Sequence: Synthetic oligonucleotide
  Target: LAMA2; (+) strand; PAM type: NRG; PAM sequence: GGG
tacagaatcacactttggct

SEQ ID NO: 141692 - DNA, 20 bp, Artificial Sequence
  Description of Artificial Sequence: Synthetic oligonucleotide
  Target: LAMA2; (+) strand; PAM type: NRG; PAM sequence: CAG
tgggtctcttaactgtgtaa

SEQ ID NO: 141693 - DNA, 20 bp, Artificial Sequence
  Description of Artificial Sequence: Synthetic oligonucleotide
  Target: LAMA2; (+) strand; PAM type: NRG; PAM sequence: TGG
gtctcttaactgtgtaacag

SEQ ID NO: 141694 - DNA, 20 bp, Artificial Sequence
  Description of Artificial Sequence: Synthetic oligonucleotide
  Target: LAMA2; (+) strand; PAM type: NRG; PAM sequence: AAG
tgtgtaacagtggtgctcaa

SEQ ID NO: 141695 - DNA, 20 bp, Artificial Sequence
  Description of Artificial Sequence: Synthetic oligonucleotide
  Target: LAMA2; (+) strand; PAM type: NRG; PAM sequence: TAG
ctccaaaacacaatactctt

SEQ ID NO: 141696 - DNA, 20 bp, Artificial Sequence
  Description of Artificial Sequence: Synthetic oligonucleotide
  Target: LAMA2; (+) strand; PAM type: NRG; PAM sequence: TAG
caaaacacaatactctttag

SEQ ID NO: 141697 - DNA, 20 bp, Artificial Sequence
  Description of Artificial Sequence: Synthetic oligonucleotide
  Target: LAMA2; (+) strand; PAM type: NRG; PAM sequence: TAG
tactctttagtagcatttct

SEQ ID NO: 141698 - DNA, 20 bp, Artificial Sequence
  Description of Artificial Sequence: Synthetic oligonucleotide
  Target: LAMA2; (+) strand; PAM type: NRG; PAM sequence: TGG
tcttagatttgtgattcttc

SEQ ID NO: 141699 - DNA, 20 bp, Artificial Sequence
  Description of Artificial Sequence: Synthetic oligonucleotide
  Target: LAMA2; (+) strand; PAM type: NRG; PAM sequence: GGG
cttagatttgtgattcttct

SEQ ID NO: 141700 - DNA, 20 bp, Artificial Sequence
  Description of Artificial Sequence: Synthetic oligonucleotide
  Target: LAMA2; (+) strand; PAM type: NRG; PAM sequence: GGG
ttagatttgtgattcttctg

SEQ ID NO: 141701 - DNA, 20 bp, Artificial Sequence
  Description of Artificial Sequence: Synthetic oligonucleotide
  Target: LAMA2; (+) strand; PAM type: NRG; PAM sequence: AAG
ttgtgattcttctggggaca

SEQ ID NO: 141702 - DNA, 20 bp, Artificial Sequence
  Description of Artificial Sequence: Synthetic oligonucleotide
  Target: LAMA2; (+) strand; PAM type: NRG; PAM sequence: AGG
tgtgattcttctggggacaa

SEQ ID NO: 141703 - DNA, 20 bp, Artificial Sequence
  Description of Artificial Sequence: Synthetic oligonucleotide
  Target: LAMA2; (+) strand; PAM type: NRG; PAM sequence: TGG
tcttctggggacaaaggatc

SEQ ID NO: 141704 - DNA, 20 bp, Artificial Sequence
  Description of Artificial Sequence: Synthetic oligonucleotide
  Target: LAMA2; (+) strand; PAM type: NRG; PAM sequence: GGG
cttctggggacaaaggatct

SEQ ID NO: 141705 - DNA, 20 bp, Artificial Sequence
  Description of Artificial Sequence: Synthetic oligonucleotide
  Target: LAMA2; (+) strand; PAM type: NRG; PAM sequence: TGG
acaaaggatctgggatacaa

SEQ ID NO: 141706 - DNA, 20 bp, Artificial Sequence
  Description of Artificial Sequence: Synthetic oligonucleotide
  Target: LAMA2; (+) strand; PAM type: NRG; PAM sequence: GGG
caaaggatctgggatacaat

SEQ ID NO: 141707 - DNA, 20 bp, Artificial Sequence
  Description of Artificial Sequence: Synthetic oligonucleotide
  Target: LAMA2; (+) strand; PAM type: NRG; PAM sequence: GAG
ctgggatacaatgggttccc

SEQ ID NO: 141708 - DNA, 20 bp, Artificial Sequence
  Description of Artificial Sequence: Synthetic oligonucleotide
  Target: LAMA2; (+) strand; PAM type: NRG; PAM sequence: CAG
atacaatgggttcccgagtg

SEQ ID NO: 141709 - DNA, 20 bp, Artificial Sequence
  Description of Artificial Sequence: Synthetic oligonucleotide
  Target: LAMA2; (+) strand; PAM type: NRG; PAM sequence: TGG
caatgggttcccgagtgcag

SEQ ID NO: 141710 - DNA, 20 bp, Artificial Sequence
  Description of Artificial Sequence: Synthetic oligonucleotide
  Target: LAMA2; (+) strand; PAM type: NRG; PAM sequence: CGG
cgagtgcagtggtgtgatct

SEQ ID NO: 141711 - DNA, 20 bp, Artificial Sequence
  Description of Artificial Sequence: Synthetic oligonucleotide
  Target: LAMA2; (+) strand; PAM type: NRG; PAM sequence: AAG
acctccgccttccgattttc

SEQ ID NO: 141712 - DNA, 20 bp, Artificial Sequence
  Description of Artificial Sequence: Synthetic oligonucleotide
  Target: LAMA2; (+) strand; PAM type: NRG; PAM sequence: CAG
ttcaagcgattctcctgcct

SEQ ID NO: 141713 - DNA, 20 bp, Artificial Sequence
  Description of Artificial Sequence: Synthetic oligonucleotide
  Target: LAMA2; (+) strand; PAM type: NRG; PAM sequence: CGG
gattctcctgcctcagcttc

SEQ ID NO: 141714 - DNA, 20 bp, Artificial Sequence
  Description of Artificial Sequence: Synthetic oligonucleotide
  Target: LAMA2; (+) strand; PAM type: NRG; PAM sequence: GAG
ttctcctgcctcagcttccg

SEQ ID NO: 141715 - DNA, 20 bp, Artificial Sequence
  Description of Artificial Sequence: Synthetic oligonucleotide
  Target: LAMA2; (+) strand; PAM type: NRG; PAM sequence: TAG
tcctgcctcagcttccggag

SEQ ID NO: 141716 - DNA, 20 bp, Artificial Sequence
  Description of Artificial Sequence: Synthetic oligonucleotide
  Target: LAMA2; (+) strand; PAM type: NRG; PAM sequence: TGG
gcctcagcttccggagtagc

SEQ ID NO: 141717 - DNA, 20 bp, Artificial Sequence
  Description of Artificial Sequence: Synthetic oligonucleotide
  Target: LAMA2; (+) strand; PAM type: NRG; PAM sequence: GGG
cctcagcttccggagtagct

SEQ ID NO: 141718 - DNA, 20 bp, Artificial Sequence
  Description of Artificial Sequence: Synthetic oligonucleotide
  Target: LAMA2; (+) strand; PAM type: NRG; PAM sequence: CAG
ttccggagtagctgggatta

SEQ ID NO: 141719 - DNA, 20 bp, Artificial Sequence
  Description of Artificial Sequence: Synthetic oligonucleotide
  Target: LAMA2; (+) strand; PAM type: NRG; PAM sequence: AGG
tccggagtagctgggattac

SEQ ID NO: 141720 - DNA, 20 bp, Artificial Sequence
  Description of Artificial Sequence: Synthetic oligonucleotide
  Target: LAMA2; (+) strand; PAM type: NRG; PAM sequence: TAG
ttttttttttttgtattttt

SEQ ID NO: 141721 - DNA, 20 bp, Artificial Sequence
  Description of Artificial Sequence: Synthetic oligonucleotide
  Target: LAMA2; (+) strand; PAM type: NRG; PAM sequence: TAG
tttttttttgtattttttag

SEQ ID NO: 141722 - DNA, 20 bp, Artificial Sequence
  Description of Artificial Sequence: Synthetic oligonucleotide
  Target: LAMA2; (+) strand; PAM type: NRG; PAM sequence: GAG
tttttttgtattttttagta

SEQ ID NO: 141723 - DNA, 20 bp, Artificial Sequence
  Description of Artificial Sequence: Synthetic oligonucleotide
  Target: LAMA2; (+) strand; PAM type: NRG; PAM sequence: CGG
tttgtattttttagtagaga

SEQ ID NO: 141724 - DNA, 20 bp, Artificial Sequence
  Description of Artificial Sequence: Synthetic oligonucleotide
  Target: LAMA2; (+) strand; PAM type: NRG; PAM sequence: GAG
tgtattttttagtagagacg

SEQ ID NO: 141725 - DNA, 20 bp, Artificial Sequence
  Description of Artificial Sequence: Synthetic oligonucleotide
  Target: LAMA2; (+) strand; PAM type: NRG; PAM sequence: TGG
gagacggagtttcaccatat

SEQ ID NO: 141726 - DNA, 20 bp, Artificial Sequence
  Description of Artificial Sequence: Synthetic oligonucleotide
  Target: LAMA2; (+) strand; PAM type: NRG; PAM sequence: CAG
cggagtttcaccatattggc

SEQ ID NO: 141727 - DNA, 20 bp, Artificial Sequence
  Description of Artificial Sequence: Synthetic oligonucleotide
  Target: LAMA2; (+) strand; PAM type: NRG; PAM sequence: AGG
ggagtttcaccatattggcc

SEQ ID NO: 141728 - DNA, 20 bp, Artificial Sequence
  Description of Artificial Sequence: Synthetic oligonucleotide
  Target: LAMA2; (+) strand; PAM type: NRG; PAM sequence: TGG
tttcaccatattggccaggc

SEQ ID NO: 141729 - DNA, 20 bp, Artificial Sequence
  Description of Artificial Sequence: Synthetic oligonucleotide
  Target: LAMA2; (+) strand; PAM type: NRG; PAM sequence: CAG
acatcgtgatccgcctgccc

SEQ ID NO: 141730 - DNA, 20 bp, Artificial Sequence
  Description of Artificial Sequence: Synthetic oligonucleotide
  Target: LAMA2; (+) strand; PAM type: NRG; PAM sequence: AAG
ccgcctgccccagcctccca

SEQ ID NO: 141731 - DNA, 20 bp, Artificial Sequence
  Description of Artificial Sequence: Synthetic oligonucleotide
  Target: LAMA2; (+) strand; PAM type: NRG; PAM sequence: TGG
gccccagcctcccaaagtgc

SEQ ID NO: 141732 - DNA, 20 bp, Artificial Sequence
  Description of Artificial Sequence: Synthetic oligonucleotide
  Target: LAMA2; (+) strand; PAM type: NRG; PAM sequence: GGG
ccccagcctcccaaagtgct

SEQ ID NO: 141733 - DNA, 20 bp, Artificial Sequence
  Description of Artificial Sequence: Synthetic oligonucleotide
  Target: LAMA2; (+) strand; PAM type: NRG; PAM sequence: CAG
ctcccaaagtgctgggatta

SEQ ID NO: 141734 - DNA, 20 bp, Artificial Sequence
  Description of Artificial Sequence: Synthetic oligonucleotide
  Target: LAMA2; (+) strand; PAM type: NRG; PAM sequence: AGG
tcccaaagtgctgggattac

SEQ ID NO: 141735 - DNA, 20 bp, Artificial Sequence
  Description of Artificial Sequence: Synthetic oligonucleotide
  Target: LAMA2; (+) strand; PAM type: NRG; PAM sequence: GAG
agtgctgggattacaggcgt

SEQ ID NO: 141736 - DNA, 20 bp, Artificial Sequence
  Description of Artificial Sequence: Synthetic oligonucleotide
  Target: LAMA2; (+) strand; PAM type: NRG; PAM sequence: CGG
caggcgtgagccaccgtgcc

SEQ ID NO: 141737 - DNA, 20 bp, Artificial Sequence
  Description of Artificial Sequence: Synthetic oligonucleotide
  Target: LAMA2; (+) strand; PAM type: NRG; PAM sequence: GAG
gtgagccaccgtgcccggcc

SEQ ID NO: 141738 - DNA, 20 bp, Artificial Sequence
  Description of Artificial Sequence: Synthetic oligonucleotide
  Target: LAMA2; (+) strand; PAM type: NRG; PAM sequence: AGG
tgagccaccgtgcccggccg

SEQ ID NO: 141739 - DNA, 20 bp, Artificial Sequence
  Description of Artificial Sequence: Synthetic oligonucleotide
  Target: LAMA2; (+) strand; PAM type: NRG; PAM sequence: AAG
tttttttttttttttaaatc

SEQ ID NO: 141740 - DNA, 20 bp, Artificial Sequence
  Description of Artificial Sequence: Synthetic oligonucleotide
  Target: LAMA2; (+) strand; PAM type: NRG; PAM sequence: TAG
tttttttttaaatcaagact

SEQ ID NO: 141741 - DNA, 20 bp, Artificial Sequence
  Description of Artificial Sequence: Synthetic oligonucleotide
  Target: LAMA2; (+) strand; PAM type: NRG; PAM sequence: TAG
agacttagcaatgcatgttc

SEQ ID NO: 141742 - DNA, 20 bp, Artificial Sequence
  Description of Artificial Sequence: Synthetic oligonucleotide
  Target: LAMA2; (+) strand; PAM type: NRG; PAM sequence: TGG
catgttctagaaactgattc

SEQ ID NO: 141743 - DNA, 20 bp, Artificial Sequence
  Description of Artificial Sequence: Synthetic oligonucleotide
  Target: LAMA2; (+) strand; PAM type: NRG; PAM sequence: CAG
tagaaactgattctggtttt

SEQ ID NO: 141744 - DNA, 20 bp, Artificial Sequence
  Description of Artificial Sequence: Synthetic oligonucleotide
  Target: LAMA2; (+) strand; PAM type: NRG; PAM sequence: TGG
gttttcagacttaactaaca

SEQ ID NO: 141745 - DNA, 20 bp, Artificial Sequence
  Description of Artificial Sequence: Synthetic oligonucleotide
  Target: LAMA2; (+) strand; PAM type: NRG; PAM sequence: GGG
ttttcagacttaactaacat

SEQ ID NO: 141746 - DNA, 20 bp, Artificial Sequence
  Description of Artificial Sequence: Synthetic oligonucleotide
  Target: LAMA2; (+) strand; PAM type: NRG; PAM sequence: TAG
agacttaactaacatgggta

SEQ ID NO: 141747 - DNA, 20 bp, Artificial Sequence
  Description of Artificial Sequence: Synthetic oligonucleotide
  Target: LAMA2; (+) strand; PAM type: NRG; PAM sequence: AGG
gacttaactaacatgggtat

SEQ ID NO: 141748 - DNA, 20 bp, Artificial Sequence
  Description of Artificial Sequence: Synthetic oligonucleotide
  Target: LAMA2; (+) strand; PAM type: NRG; PAM sequence: GAG
taactaacatgggtataggt

SEQ ID NO: 141749 - DNA, 20 bp, Artificial Sequence
  Description of Artificial Sequence: Synthetic oligonucleotide
  Target: LAMA2; (+) strand; PAM type: NRG; PAM sequence: AAG
aacatgggtataggtgagct

SEQ ID NO: 141750 - DNA, 20 bp, Artificial Sequence
  Description of Artificial Sequence: Synthetic oligonucleotide
  Target: LAMA2; (+) strand; PAM type: NRG; PAM sequence: AAG
tataggtgagctaagatatt

SEQ ID NO: 141751 - DNA, 20 bp, Artificial Sequence
  Description of Artificial Sequence: Synthetic oligonucleotide
  Target: LAMA2; (+) strand; PAM type: NRG; PAM sequence: CAG
tgagctaagatattaagctg

SEQ ID NO: 141752 - DNA, 20 bp, Artificial Sequence
  Description of Artificial Sequence: Synthetic oligonucleotide
  Target: LAMA2; (+) strand; PAM type: NRG; PAM sequence: AGG
gagctaagatattaagctgc

SEQ ID NO: 141753 - DNA, 20 bp, Artificial Sequence
  Description of Artificial Sequence: Synthetic oligonucleotide
  Target: LAMA2; (+) strand; PAM type: NRG; PAM sequence: GGG
agctaagatattaagctgca

SEQ ID NO: 141754 - DNA, 20 bp, Artificial Sequence
  Description of Artificial Sequence: Synthetic oligonucleotide
  Target: LAMA2; (+) strand; PAM type: NRG; PAM sequence: AAG
taagatattaagctgcaggg

SEQ ID NO: 141755 - DNA, 20 bp, Artificial Sequence
  Description of Artificial Sequence: Synthetic oligonucleotide
  Target: LAMA2; (+) strand; PAM type: NRG; PAM sequence: AGG
aagatattaagctgcaggga

SEQ ID NO: 141756 - DNA, 20 bp, Artificial Sequence
  Description of Artificial Sequence: Synthetic oligonucleotide
  Target: LAMA2; (+) strand; PAM type: NRG; PAM sequence: GGG
agatattaagctgcagggaa

SEQ ID NO: 141757 - DNA, 20 bp, Artificial Sequence
  Description of Artificial Sequence: Synthetic oligonucleotide
  Target: LAMA2; (+) strand; PAM type: NRG; PAM sequence: TAG
ttaagctgcagggaagggtc

SEQ ID NO: 141758 - DNA, 20 bp, Artificial Sequence
  Description of Artificial Sequence: Synthetic oligonucleotide
  Target: LAMA2; (+) strand; PAM type: NRG; PAM sequence: GAG
aagctgcagggaagggtcta

SEQ ID NO: 141759 - DNA, 20 bp, Artificial Sequence
  Description of Artificial Sequence: Synthetic oligonucleotide
  Target: LAMA2; (+) strand; PAM type: NRG; PAM sequence: TAG
ctgcagggaagggtctagag

SEQ ID NO: 141760 - DNA, 20 bp, Artificial Sequence
  Description of Artificial Sequence: Synthetic oligonucleotide
  Target: LAMA2; (+) strand; PAM type: NRG; PAM sequence: TAG
agggaagggtctagagtagc

SEQ ID NO: 141761 - DNA, 20 bp, Artificial Sequence
  Description of Artificial Sequence: Synthetic oligonucleotide
  Target: LAMA2; (+) strand; PAM type: NRG; PAM sequence: GAG
ggaagggtctagagtagcta

SEQ ID NO: 141762 - DNA, 20 bp, Artificial Sequence
  Description of Artificial Sequence: Synthetic oligonucleotide
  Target: LAMA2; (+) strand; PAM type: NRG; PAM sequence: TGG
tctagagtagctagagttcc

SEQ ID NO: 141763 - DNA, 20 bp, Artificial Sequence
  Description of Artificial Sequence: Synthetic oligonucleotide
  Target: LAMA2; (+) strand; PAM type: NRG; PAM sequence: GGG
ctagagtagctagagttcct

SEQ ID NO: 141764 - DNA, 20 bp, Artificial Sequence
  Description of Artificial Sequence: Synthetic oligonucleotide
  Target: LAMA2; (+) strand; PAM type: NRG; PAM sequence: AAG
gttcctgggctgctcacttc

SEQ ID NO: 141765 - DNA, 20 bp, Artificial Sequence
  Description of Artificial Sequence: Synthetic oligonucleotide
  Target: LAMA2; (+) strand; PAM type: NRG; PAM sequence: GAG
ggctgctcacttcaagctat

SEQ ID NO: 141766 - DNA, 20 bp, Artificial Sequence
  Description of Artificial Sequence: Synthetic oligonucleotide
  Target: LAMA2; (+) strand; PAM type: NRG; PAM sequence: AGG
gctgctcacttcaagctatg

SEQ ID NO: 141767 - DNA, 20 bp, Artificial Sequence
  Description of Artificial Sequence: Synthetic oligonucleotide
  Target: LAMA2; (+) strand; PAM type: NRG; PAM sequence: TGG
ctatgaggtctcctgaacac

SEQ ID NO: 141768 - DNA, 20 bp, Artificial Sequence
  Description of Artificial Sequence: Synthetic oligonucleotide
  Target: LAMA2; (+) strand; PAM type: NRG; PAM sequence: CAG
ctgaacactggtaaaaaccc

SEQ ID NO: 141769 - DNA, 20 bp, Artificial Sequence
  Description of Artificial Sequence: Synthetic oligonucleotide
  Target: LAMA2; (+) strand; PAM type: NRG; PAM sequence: TAG
gtacaaatatcattttatct

SEQ ID NO: 141770 - DNA, 20 bp, Artificial Sequence
  Description of Artificial Sequence: Synthetic oligonucleotide
  Target: LAMA2; (+) strand; PAM type: NRG; PAM sequence: AAG
ttatcttagccatgatgttc

SEQ ID NO: 141771 - DNA, 20 bp, Artificial Sequence
  Description of Artificial Sequence: Synthetic oligonucleotide
  Target: LAMA2; (+) strand; PAM type: NRG; PAM sequence: TGG
ttagccatgatgttcaagat

SEQ ID NO: 141772 - DNA, 20 bp, Artificial Sequence
  Description of Artificial Sequence: Synthetic oligonucleotide
  Target: LAMA2; (+) strand; PAM type: NRG; PAM sequence: AAG
ccatgatgttcaagattgga

SEQ ID NO: 141773 - DNA, 20 bp, Artificial Sequence
  Description of Artificial Sequence: Synthetic oligonucleotide
  Target: LAMA2; (+) strand; PAM type: NRG; PAM sequence: GAG
tgtccgttgcttattatttt

SEQ ID NO: 141774 - DNA, 20 bp, Artificial Sequence
  Description of Artificial Sequence: Synthetic oligonucleotide
  Target: LAMA2; (+) strand; PAM type: NRG; PAM sequence: AAG
tgcttattattttgagacta

SEQ ID NO: 141775 - DNA, 20 bp, Artificial Sequence
  Description of Artificial Sequence: Synthetic oligonucleotide
  Target: LAMA2; (+) strand; PAM type: NRG; PAM sequence: AGG
gcttattattttgagactaa

SEQ ID NO: 141776 - DNA, 20 bp, Artificial Sequence
  Description of Artificial Sequence: Synthetic oligonucleotide
  Target: LAMA2; (+) strand; PAM type: NRG; PAM sequence: AAG
tttgagactaaaggattctt

SEQ ID NO: 141777 - DNA, 20 bp, Artificial Sequence
  Description of Artificial Sequence: Synthetic oligonucleotide
  Target: LAMA2; (+) strand; PAM type: NRG; PAM sequence: AAG
agactaaaggattcttaaga

SEQ ID NO: 141778 - DNA, 20 bp, Artificial Sequence
  Description of Artificial Sequence: Synthetic oligonucleotide
  Target: LAMA2; (+) strand; PAM type: NRG; PAM sequence: GAG
tctccatttccacactaaat

SEQ ID NO: 141779 - DNA, 20 bp, Artificial Sequence
  Description of Artificial Sequence: Synthetic oligonucleotide
  Target: LAMA2; (+) strand; PAM type: NRG; PAM sequence: AAG
tttccacactaaatgagatc

SEQ ID NO: 141780 - DNA, 20 bp, Artificial Sequence
  Description of Artificial Sequence: Synthetic oligonucleotide
  Target: LAMA2; (+) strand; PAM type: NRG; PAM sequence: TAG
tcttaatactcttcttatta

SEQ ID NO: 141781 - DNA, 20 bp, Artificial Sequence
  Description of Artificial Sequence: Synthetic oligonucleotide
  Target: LAMA2; (+) strand; PAM type: NRG; PAM sequence: AGG
cttaatactcttcttattat

SEQ ID NO: 141782 - DNA, 20 bp, Artificial Sequence
  Description of Artificial Sequence: Synthetic oligonucleotide
  Target: LAMA2; (+) strand; PAM type: NRG; PAM sequence: GAG
taatactcttcttattatag

SEQ ID NO: 141783 - DNA, 20 bp, Artificial Sequence
  Description of Artificial Sequence: Synthetic oligonucleotide
  Target: LAMA2; (+) strand; PAM type: NRG; PAM sequence: AGG
aatactcttcttattatagg

SEQ ID NO: 141784 - DNA, 20 bp, Artificial Sequence
  Description of Artificial Sequence: Synthetic oligonucleotide
  Target: LAMA2; (+) strand; PAM type: NRG; PAM sequence: CAG
catctaattcaatgctacat

SEQ ID NO: 141785 - DNA, 20 bp, Artificial Sequence
  Description of Artificial Sequence: Synthetic oligonucleotide
  Target: LAMA2; (+) strand; PAM type: NRG; PAM sequence: TAG
gtaattaaatgatattttgt

SEQ ID NO: 141786 - DNA, 20 bp, Artificial Sequence
  Description of Artificial Sequence: Synthetic oligonucleotide
  Target: LAMA2; (+) strand; PAM type: NRG; PAM sequence: AGG
taattaaatgatattttgtt

SEQ ID NO: 141787 - DNA, 20 bp, Artificial Sequence
  Description of Artificial Sequence: Synthetic oligonucleotide
  Target: LAMA2; (+) strand; PAM type: NRG; PAM sequence: GAG
ttgttaggtgacatgcaaat

SEQ ID NO: 141788 - DNA, 20 bp, Artificial Sequence
  Description of Artificial Sequence: Synthetic oligonucleotide
  Target: LAMA2; (+) strand; PAM type: NRG; PAM sequence: TGG
acatgcaaatgagtaacaaa

SEQ ID NO: 141789 - DNA, 20 bp, Artificial Sequence
  Description of Artificial Sequence: Synthetic oligonucleotide
  Target: LAMA2; (+) strand; PAM type: NRG; PAM sequence: TAG
gtaacaaatggaatatgaaa

SEQ ID NO: 141790 - DNA, 20 bp, Artificial Sequence
  Description of Artificial Sequence: Synthetic oligonucleotide
  Target: LAMA2; (+) strand; PAM type: NRG; PAM sequence: AAG
caaatggaatatgaaataga

SEQ ID NO: 141791 - DNA, 20 bp, Artificial Sequence
  Description of Artificial Sequence: Synthetic oligonucleotide
  Target: LAMA2; (+) strand; PAM type: NRG; PAM sequence: AAG
aacacttgatattgttttta

SEQ ID NO: 141792 - DNA, 20 bp, Artificial Sequence
  Description of Artificial Sequence: Synthetic oligonucleotide
  Target: LAMA2; (+) strand; PAM type: NRG; PAM sequence: TGG
atattgtttttaaagttatt

SEQ ID NO: 141793 - DNA, 20 bp, Artificial Sequence
  Description of Artificial Sequence: Synthetic oligonucleotide
  Target: LAMA2; (+) strand; PAM type: NRG; PAM sequence: GGG
tattgtttttaaagttattt

SEQ ID NO: 141794 - DNA, 20 bp, Artificial Sequence
  Description of Artificial Sequence: Synthetic oligonucleotide
  Target: LAMA2; (+) strand; PAM type: NRG; PAM sequence: AAG
aagttatttgggattttttt

SEQ ID NO: 141795 - DNA, 20 bp, Artificial Sequence
  Description of Artificial Sequence: Synthetic oligonucleotide
  Target: LAMA2; (+) strand; PAM type: NRG; PAM sequence: AAG
tgggatttttttaagacacc

SEQ ID NO: 141796 - DNA, 20 bp, Artificial Sequence
  Description of Artificial Sequence: Synthetic oligonucleotide
  Target: LAMA2; (+) strand; PAM type: NRG; PAM sequence: AAG
taagacaccaagtttgtaac

SEQ ID NO: 141797 - DNA, 20 bp, Artificial Sequence
  Description of Artificial Sequence: Synthetic oligonucleotide
  Target: LAMA2; (+) strand; PAM type: NRG; PAM sequence: CAG
ttgtaacaagtgcccttcaa

SEQ ID NO: 141798 - DNA, 20 bp, Artificial Sequence
  Description of Artificial Sequence: Synthetic oligonucleotide
  Target: LAMA2; (+) strand; PAM type: NRG; PAM sequence: AAG
acaagtgcccttcaacagaa

SEQ ID NO: 141799 - DNA, 20 bp, Artificial Sequence
  Description of Artificial Sequence: Synthetic oligonucleotide
  Target: LAMA2; (+) strand; PAM type: NRG; PAM sequence: TGG
ccttcaacagaaaagacact

SEQ ID NO: 141800 - DNA, 20 bp, Artificial Sequence
  Description of Artificial Sequence: Synthetic oligonucleotide
  Target: LAMA2; (+) strand; PAM type: NRG; PAM sequence: GAG
aaaagacacttggatatcat

SEQ ID NO: 141801 - DNA, 20 bp, Artificial Sequence
  Description of Artificial Sequence: Synthetic oligonucleotide
  Target: LAMA2; (+) strand; PAM type: NRG; PAM sequence: TAG
gatatcatgagatgttctct

SEQ ID NO: 141802 - DNA, 20 bp, Artificial Sequence
  Description of Artificial Sequence: Synthetic oligonucleotide
  Target: LAMA2; (+) strand; PAM type: NRG; PAM sequence: AGG
atatcatgagatgttctctt

SEQ ID NO: 141803 - DNA, 20 bp, Artificial Sequence
  Description of Artificial Sequence: Synthetic oligonucleotide
  Target: LAMA2; (+) strand; PAM type: NRG; PAM sequence: AAG
atgttctcttaggttcctca

SEQ ID NO: 141804 - DNA, 20 bp, Artificial Sequence
  Description of Artificial Sequence: Synthetic oligonucleotide
  Target: LAMA2; (+) strand; PAM type: NRG; PAM sequence: TAG
ctcttaggttcctcaaagcc

SEQ ID NO: 141805 - DNA, 20 bp, Artificial Sequence
  Description of Artificial Sequence: Synthetic oligonucleotide
  Target: LAMA2; (+) strand; PAM type: NRG; PAM sequence: CAG
ttaggttcctcaaagcctag

SEQ ID NO: 141806 - DNA, 20 bp, Artificial Sequence
  Description of Artificial Sequence: Synthetic oligonucleotide
  Target: LAMA2; (+) strand; PAM type: NRG; PAM sequence: TAG
tcctcaaagcctagcagtca

SEQ ID NO: 141807 - DNA, 20 bp, Artificial Sequence
  Description of Artificial Sequence: Synthetic oligonucleotide
  Target: LAMA2; (+) strand; PAM type: NRG; PAM sequence: TAG
catagcattttaatacttac

SEQ ID NO: 141808 - DNA, 20 bp, Artificial Sequence
  Description of Artificial Sequence: Synthetic oligonucleotide
  Target: LAMA2; (+) strand; PAM type: NRG; PAM sequence: TGG
agcattttaatacttactag

SEQ ID NO: 141809 - DNA, 20 bp, Artificial Sequence
  Description of Artificial Sequence: Synthetic oligonucleotide
  Target: LAMA2; (+) strand; PAM type: NRG; PAM sequence: GGG
gcattttaatacttactagt

SEQ ID NO: 141810 - DNA, 20 bp, Artificial Sequence
  Description of Artificial Sequence: Synthetic oligonucleotide
  Target: LAMA2; (+) strand; PAM type: NRG; PAM sequence: GGG
cattttaatacttactagtg

SEQ ID NO: 141811 - DNA, 20 bp, Artificial Sequence
  Description of Artificial Sequence: Synthetic oligonucleotide
  Target: LAMA2; (+) strand; PAM type: NRG; PAM sequence: GAG
ttttaatacttactagtggg

SEQ ID NO: 141812 - DNA, 20 bp, Artificial Sequence
  Description of Artificial Sequence: Synthetic oligonucleotide
  Target: LAMA2; (+) strand; PAM type: NRG; PAM sequence: CAG
ctgccttccctgctgcacac

SEQ ID NO: 141813 - DNA, 20 bp, Artificial Sequence
  Description of Artificial Sequence: Synthetic oligonucleotide
  Target: LAMA2; (+) strand; PAM type: NRG; PAM sequence: CAG
ttccctgctgcacaccagaa

SEQ ID NO: 141814 - DNA, 20 bp, Artificial Sequence
  Description of Artificial Sequence: Synthetic oligonucleotide
  Target: LAMA2; (+) strand; PAM type: NRG; PAM sequence: TGG
tgctgcacaccagaacagac

SEQ ID NO: 141815 - DNA, 20 bp, Artificial Sequence
  Description of Artificial Sequence: Synthetic oligonucleotide
  Target: LAMA2; (+) strand; PAM type: NRG; PAM sequence: GGG
gctgcacaccagaacagact

SEQ ID NO: 141816 - DNA, 20 bp, Artificial Sequence
  Description of Artificial Sequence: Synthetic oligonucleotide
  Target: LAMA2; (+) strand; PAM type: NRG; PAM sequence: GGG
ctgcacaccagaacagactg

SEQ ID NO: 141817 - DNA, 20 bp, Artificial Sequence
  Description of Artificial Sequence: Synthetic oligonucleotide
  Target: LAMA2; (+) strand; PAM type: NRG; PAM sequence: TGG
cacaccagaacagactgggg

SEQ ID NO: 141818 - DNA, 20 bp, Artificial Sequence
  Description of Artificial Sequence: Synthetic oligonucleotide
  Target: LAMA2; (+) strand; PAM type: NRG; PAM sequence: GGG
acaccagaacagactggggt

SEQ ID NO: 141819 - DNA, 20 bp, Artificial Sequence
  Description of Artificial Sequence: Synthetic oligonucleotide
  Target: LAMA2; (+) strand; PAM type: NRG; PAM sequence: GGG
caccagaacagactggggtg

SEQ ID NO: 141820 - DNA, 20 bp, Artificial Sequence
  Description of Artificial Sequence: Synthetic oligonucleotide
  Target: LAMA2; (+) strand; PAM type: NRG; PAM sequence: GGG
accagaacagactggggtgg

SEQ ID NO: 141821 - DNA, 20 bp, Artificial Sequence
  Description of Artificial Sequence: Synthetic oligonucleotide
  Target: LAMA2; (+) strand; PAM type: NRG; PAM sequence: TGG
tggggtgggggttaatcatc

SEQ ID NO: 141822 - DNA, 20 bp, Artificial Sequence
  Description of Artificial Sequence: Synthetic oligonucleotide
  Target: LAMA2; (+) strand; PAM type: NRG; PAM sequence: GAG
ggggttaatcatctggaaat

SEQ ID NO: 141823 - DNA, 20 bp, Artificial Sequence
  Description of Artificial Sequence: Synthetic oligonucleotide
  Target: LAMA2; (+) strand; PAM type: NRG; PAM sequence: AGG
gggttaatcatctggaaatg

SEQ ID NO: 141824 - DNA, 20 bp, Artificial Sequence
  Description of Artificial Sequence: Synthetic oligonucleotide
  Target: LAMA2; (+) strand; PAM type: NRG; PAM sequence: AAG
tattataactactgattttg

SEQ ID NO: 141825 - DNA, 20 bp, Artificial Sequence
  Description of Artificial Sequence: Synthetic oligonucleotide
  Target: LAMA2; (+) strand; PAM type: NRG; PAM sequence: GAG
ttataactactgattttgaa

SEQ ID NO: 141826 - DNA, 20 bp, Artificial Sequence
  Description of Artificial Sequence: Synthetic oligonucleotide
  Target: LAMA2; (+) strand; PAM type: NRG; PAM sequence: AAG
agagtctttataatgaaaac

SEQ ID NO: 141827 - DNA, 20 bp, Artificial Sequence
  Description of Artificial Sequence: Synthetic oligonucleotide
  Target: LAMA2; (+) strand; PAM type: NRG; PAM sequence: CAG
tttataatgaaaacaagaca

SEQ ID NO: 141828 - DNA, 20 bp, Artificial Sequence
  Description of Artificial Sequence: Synthetic oligonucleotide
  Target: LAMA2; (+) strand; PAM type: NRG; PAM sequence: AAG
aaacaagacacagttaataa

SEQ ID NO: 141829 - DNA, 20 bp, Artificial Sequence
  Description of Artificial Sequence: Synthetic oligonucleotide
  Target: LAMA2; (+) strand; PAM type: NRG; PAM sequence: TAG
caagacacagttaataaaag

SEQ ID NO: 141830 - DNA, 20 bp, Artificial Sequence
  Description of Artificial Sequence: Synthetic oligonucleotide
  Target: LAMA2; (+) strand; PAM type: NRG; PAM sequence: TAG
cacagttaataaaagtagca

SEQ ID NO: 141831 - DNA, 20 bp, Artificial Sequence
  Description of Artificial Sequence: Synthetic oligonucleotide
  Target: LAMA2; (+) strand; PAM type: NRG; PAM sequence: TAG
aaaagtagcatagaaaacat

SEQ ID NO: 141832 - DNA, 20 bp, Artificial Sequence
  Description of Artificial Sequence: Synthetic oligonucleotide
  Target: LAMA2; (+) strand; PAM type: NRG; PAM sequence: GAG
aagtagcatagaaaacatta

SEQ ID NO: 141833 - DNA, 20 bp, Artificial Sequence
  Description of Artificial Sequence: Synthetic oligonucleotide
  Target: LAMA2; (+) strand; PAM type: NRG; PAM sequence: GAG
gtagcatagaaaacattaga

SEQ ID NO: 141834 - DNA, 20 bp, Artificial Sequence
  Description of Artificial Sequence: Synthetic oligonucleotide
  Target: LAMA2; (+) strand; PAM type: NRG; PAM sequence: TAG
acattagagagttattttat

SEQ ID NO: 141835 - DNA, 20 bp, Artificial Sequence
  Description of Artificial Sequence: Synthetic oligonucleotide
  Target: LAMA2; (+) strand; PAM type: NRG; PAM sequence: AGG
cattagagagttattttatt

SEQ ID NO: 141836 - DNA, 20 bp, Artificial Sequence
  Description of Artificial Sequence: Synthetic oligonucleotide
  Target: LAMA2; (+) strand; PAM type: NRG; PAM sequence: GGG
attagagagttattttatta

SEQ ID NO: 141837 - DNA, 20 bp, Artificial Sequence
  Description of Artificial Sequence: Synthetic oligonucleotide
  Target: LAMA2; (+) strand; PAM type: NRG; PAM sequence: TGG
tattagggccattaaatatt

SEQ ID NO: 141838 - DNA, 20 bp, Artificial Sequence
  Description of Artificial Sequence: Synthetic oligonucleotide
  Target: LAMA2; (+) strand; PAM type: NRG; PAM sequence: GAG
ttagggccattaaatatttg

SEQ ID NO: 141839 - DNA, 20 bp, Artificial Sequence
  Description of Artificial Sequence: Synthetic oligonucleotide
  Target: LAMA2; (+) strand; PAM type: NRG; PAM sequence: CAG
gccattaaatatttggagta

SEQ ID NO: 141840 - DNA, 20 bp, Artificial Sequence
  Description of Artificial Sequence: Synthetic oligonucleotide
  Target: LAMA2; (+) strand; PAM type: NRG; PAM sequence: TAG
aatatttggagtacagtact

SEQ ID NO: 141841 - DNA, 20 bp, Artificial Sequence
  Description of Artificial Sequence: Synthetic oligonucleotide
  Target: LAMA2; (+) strand; PAM type: NRG; PAM sequence: CAG
aatcactgttaaaattgtta

SEQ ID NO: 141842 - DNA, 20 bp, Artificial Sequence
  Description of Artificial Sequence: Synthetic oligonucleotide
  Target: LAMA2; (+) strand; PAM type: NRG; PAM sequence: AAG
attgttacagttactctctg

SEQ ID NO: 141843 - DNA, 20 bp, Artificial Sequence
  Description of Artificial Sequence: Synthetic oligonucleotide
  Target: LAMA2; (+) strand; PAM type: NRG; PAM sequence: AAG
gttactctctgaagcctgct

SEQ ID NO: 141844 - DNA, 20 bp, Artificial Sequence
  Description of Artificial Sequence: Synthetic oligonucleotide
  Target: LAMA2; (+) strand; PAM type: NRG; PAM sequence: AAG
tgctattcactacattttaa

SEQ ID NO: 141845 - DNA, 20 bp, Artificial Sequence
  Description of Artificial Sequence: Synthetic oligonucleotide
  Target: LAMA2; (+) strand; PAM type: NRG; PAM sequence: AAG
tcaaaaactacatgactttc

SEQ ID NO: 141846 - DNA, 20 bp, Artificial Sequence
  Description of Artificial Sequence: Synthetic oligonucleotide
  Target: LAMA2; (+) strand; PAM type: NRG; PAM sequence: AAG
acatgactttcaagtcattt

SEQ ID NO: 141847 - DNA, 20 bp, Artificial Sequence
  Description of Artificial Sequence: Synthetic oligonucleotide
  Target: LAMA2; (+) strand; PAM type: NRG; PAM sequence: AAG
tgactttcaagtcatttaag

SEQ ID NO: 141848 - DNA, 20 bp, Artificial Sequence
  Description of Artificial Sequence: Synthetic oligonucleotide
  Target: LAMA2; (+) strand; PAM type: NRG; PAM sequence: AAG
aagtcatttaagaagtccaa

SEQ ID NO: 141849 - DNA, 20 bp, Artificial Sequence
  Description of Artificial Sequence: Synthetic oligonucleotide
  Target: LAMA2; (+) strand; PAM type: NRG; PAM sequence: TGG
caaatttaattaattttgca

SEQ ID NO: 141850 - DNA, 20 bp, Artificial Sequence
  Description of Artificial Sequence: Synthetic oligonucleotide
  Target: LAMA2; (+) strand; PAM type: NRG; PAM sequence: AAG
taattttgcatggaatgtga

SEQ ID NO: 141851 - DNA, 20 bp, Artificial Sequence
  Description of Artificial Sequence: Synthetic oligonucleotide
  Target: LAMA2; (+) strand; PAM type: NRG; PAM sequence: TAG
atggaatgtgaaagaaccca

SEQ ID NO: 141852 - DNA, 20 bp, Artificial Sequence
  Description of Artificial Sequence: Synthetic oligonucleotide
  Target: LAMA2; (+) strand; PAM type: NRG; PAM sequence: AAG
aacccatagaaaataaatga

SEQ ID NO: 141853 - DNA, 20 bp, Artificial Sequence
  Description of Artificial Sequence: Synthetic oligonucleotide
  Target: LAMA2; (+) strand; PAM type: NRG; PAM sequence: GAG
cccatagaaaataaatgaaa

SEQ ID NO: 141854 - DNA, 20 bp, Artificial Sequence
  Description of Artificial Sequence: Synthetic oligonucleotide
  Target: LAMA2; (+) strand; PAM type: NRG; PAM sequence: AGG
ccatagaaaataaatgaaag

SEQ ID NO: 141855 - DNA, 20 bp, Artificial Sequence
  Description of Artificial Sequence: Synthetic oligonucleotide
  Target: LAMA2; (+) strand; PAM type: NRG; PAM sequence: GGG
catagaaaataaatgaaaga

SEQ ID NO: 141856 - DNA, 20 bp, Artificial Sequence
  Description of Artificial Sequence: Synthetic oligonucleotide
  Target: LAMA2; (+) strand; PAM type: NRG; PAM sequence: TGG
agagggatattgttttgaaa

SEQ ID NO: 141857 - DNA, 20 bp, Artificial Sequence
  Description of Artificial Sequence: Synthetic oligonucleotide
  Target: LAMA2; (+) strand; PAM type: NRG; PAM sequence: GGG
gagggatattgttttgaaat

SEQ ID NO: 141858 - DNA, 20 bp, Artificial Sequence
  Description of Artificial Sequence: Synthetic oligonucleotide
  Target: LAMA2; (+) strand; PAM type: NRG; PAM sequence: CAG
gttttgaaatgggactcatt

SEQ ID NO: 141859 - DNA, 20 bp, Artificial Sequence
  Description of Artificial Sequence: Synthetic oligonucleotide
  Target: LAMA2; (+) strand; PAM type: NRG; PAM sequence: AAG
ggactcattcagtcttctgt

SEQ ID NO: 141860 - DNA, 20 bp, Artificial Sequence
  Description of Artificial Sequence: Synthetic oligonucleotide
  Target: LAMA2; (+) strand; PAM type: NRG; PAM sequence: AGG
gactcattcagtcttctgta

SEQ ID NO: 141861 - DNA, 20 bp, Artificial Sequence
  Description of Artificial Sequence: Synthetic oligonucleotide
  Target: LAMA2; (+) strand; PAM type: NRG; PAM sequence: CGG
tcattcagtcttctgtaagg

SEQ ID NO: 141862 - DNA, 20 bp, Artificial Sequence
  Description of Artificial Sequence: Synthetic oligonucleotide
  Target: LAMA2; (+) strand; PAM type: NRG; PAM sequence: TGG
ctgcttttccgtgtcactgc

SEQ ID NO: 141863 - DNA, 20 bp, Artificial Sequence
  Description of Artificial Sequence: Synthetic oligonucleotide
  Target: LAMA2; (+) strand; PAM type: NRG; PAM sequence: CAG
cttttccgtgtcactgctgg

SEQ ID NO: 141864 - DNA, 20 bp, Artificial Sequence
  Description of Artificial Sequence: Synthetic oligonucleotide
  Target: LAMA2; (+) strand; PAM type: NRG; PAM sequence: TAG
ctggcagttatgttgaatta

SEQ ID NO: 141865 - DNA, 20 bp, Artificial Sequence
  Description of Artificial Sequence: Synthetic oligonucleotide
  Target: LAMA2; (+) strand; PAM type: NRG; PAM sequence: AAG
cagttatgttgaattataga

SEQ ID NO: 141866 - DNA, 20 bp, Artificial Sequence
  Description of Artificial Sequence: Synthetic oligonucleotide
  Target: LAMA2; (+) strand; PAM type: NRG; PAM sequence: GAG
gttatgttgaattatagaaa

SEQ ID NO: 141867 - DNA, 20 bp, Artificial Sequence
  Description of Artificial Sequence: Synthetic oligonucleotide
  Target: LAMA2; (+) strand; PAM type: NRG; PAM sequence: TGG
tgaattatagaaagagtctg

SEQ ID NO: 141868 - DNA, 20 bp, Artificial Sequence
  Description of Artificial Sequence: Synthetic oligonucleotide
  Target: LAMA2; (+) strand; PAM type: NRG; PAM sequence: GGG
gaattatagaaagagtctgt

SEQ ID NO: 141869 - DNA, 20 bp, Artificial Sequence
  Description of Artificial Sequence: Synthetic oligonucleotide
  Target: LAMA2; (+) strand; PAM type: NRG; PAM sequence: GGG
aattatagaaagagtctgtg

SEQ ID NO: 141870 - DNA, 20 bp, Artificial Sequence
  Description of Artificial Sequence: Synthetic oligonucleotide
  Target: LAMA2; (+) strand; PAM type: NRG; PAM sequence: TAG
gaaagagtctgtggggtctc

SEQ ID NO: 141871 - DNA, 20 bp, Artificial Sequence
  Description of Artificial Sequence: Synthetic oligonucleotide
  Target: LAMA2; (+) strand; PAM type: NRG; PAM sequence: TAG
agagtctgtggggtctctag

SEQ ID NO: 141872 - DNA, 20 bp, Artificial Sequence
  Description of Artificial Sequence: Synthetic oligonucleotide
  Target: LAMA2; (+) strand; PAM type: NRG; PAM sequence: TGG
tctagtagaacttctcttcg

SEQ ID NO: 141873 - DNA, 20 bp, Artificial Sequence
  Description of Artificial Sequence: Synthetic oligonucleotide
  Target: LAMA2; (+) strand; PAM type: NRG; PAM sequence: CAG
attatttttatctattattc

SEQ ID NO: 141874 - DNA, 20 bp, Artificial Sequence
  Description of Artificial Sequence: Synthetic oligonucleotide
  Target: LAMA2; (+) strand; PAM type: NRG; PAM sequence: GAG
tatttttatctattattcca

SEQ ID NO: 141875 - DNA, 20 bp, Artificial Sequence
  Description of Artificial Sequence: Synthetic oligonucleotide
  Target: LAMA2; (+) strand; PAM type: NRG; PAM sequence: CAG
ctattattccagagccaaca

SEQ ID NO: 141876 - DNA, 20 bp, Artificial Sequence
  Description of Artificial Sequence: Synthetic oligonucleotide
  Target: LAMA2; (+) strand; PAM type: NRG; PAM sequence: AGG
tattattccagagccaacac

SEQ ID NO: 141877 - DNA, 20 bp, Artificial Sequence
  Description of Artificial Sequence: Synthetic oligonucleotide
  Target: LAMA2; (+) strand; PAM type: NRG; PAM sequence: GAG
ttattccagagccaacacag

SEQ ID NO: 141878 - DNA, 20 bp, Artificial Sequence
  Description of Artificial Sequence: Synthetic oligonucleotide
  Target: LAMA2; (+) strand; PAM type: NRG; PAM sequence: AAG
gagccaacacaggagctatg

SEQ ID NO: 141879 - DNA, 20 bp, Artificial Sequence
  Description of Artificial Sequence: Synthetic oligonucleotide
  Target: LAMA2; (+) strand; PAM type: NRG; PAM sequence: TAG
gaagtcataaatccacattg

SEQ ID NO: 141880 - DNA, 20 bp, Artificial Sequence
  Description of Artificial Sequence: Synthetic oligonucleotide
  Target: LAMA2; (+) strand; PAM type: NRG; PAM sequence: GAG
aatccacattgtagctgcat

SEQ ID NO: 141881 - DNA, 20 bp, Artificial Sequence
  Description of Artificial Sequence: Synthetic oligonucleotide
  Target: LAMA2; (+) strand; PAM type: NRG; PAM sequence: TGG
attgtagctgcatgagaact

SEQ ID NO: 141882 - DNA, 20 bp, Artificial Sequence
  Description of Artificial Sequence: Synthetic oligonucleotide
  Target: LAMA2; (+) strand; PAM type: NRG; PAM sequence: CAG
ttatcacatatttgcatact

SEQ ID NO: 141883 - DNA, 20 bp, Artificial Sequence
  Description of Artificial Sequence: Synthetic oligonucleotide
  Target: LAMA2; (+) strand; PAM type: NRG; PAM sequence: AAG
ttgcatactcagtgctttct

SEQ ID NO: 141884 - DNA, 20 bp, Artificial Sequence
  Description of Artificial Sequence: Synthetic oligonucleotide
  Target: LAMA2; (+) strand; PAM type: NRG; PAM sequence: AAG
tactcagtgctttctaagca

SEQ ID NO: 141885 - DNA, 20 bp, Artificial Sequence
  Description of Artificial Sequence: Synthetic oligonucleotide
  Target: LAMA2; (+) strand; PAM type: NRG; PAM sequence: TAG
aagttctttatccataacct

SEQ ID NO: 141886 - DNA, 20 bp, Artificial Sequence
  Description of Artificial Sequence: Synthetic oligonucleotide
  Target: LAMA2; (+) strand; PAM type: NRG; PAM sequence: TAG
ctttatccataaccttagtg

SEQ ID NO: 141887 - DNA, 20 bp, Artificial Sequence
  Description of Artificial Sequence: Synthetic oligonucleotide
  Target: LAMA2; (+) strand; PAM type: NRG; PAM sequence: TAG
tagtgtagtcttatttttct

SEQ ID NO: 141888 - DNA, 20 bp, Artificial Sequence
  Description of Artificial Sequence: Synthetic oligonucleotide
  Target: LAMA2; (+) strand; PAM type: NRG; PAM sequence: TGG
tgtagtcttatttttcttag

SEQ ID NO: 141889 - DNA, 20 bp, Artificial Sequence
  Description of Artificial Sequence: Synthetic oligonucleotide
  Target: LAMA2; (+) strand; PAM type: NRG; PAM sequence: GGG
gtagtcttatttttcttagt

SEQ ID NO: 141890 - DNA, 20 bp, Artificial Sequence
  Description of Artificial Sequence: Synthetic oligonucleotide
  Target: LAMA2; (+) strand; PAM type: NRG; PAM sequence: TGG
ctctatgtttttattttttc

SEQ ID NO: 141891 - DNA, 20 bp, Artificial Sequence
  Description of Artificial Sequence: Synthetic oligonucleotide
  Target: LAMA2; (+) strand; PAM type: NRG; PAM sequence: AAG
tatgtttttattttttctgg

SEQ ID NO: 141892 - DNA, 20 bp, Artificial Sequence
  Description of Artificial Sequence: Synthetic oligonucleotide
  Target: LAMA2; (+) strand; PAM type: NRG; PAM sequence: AGG
atgtttttattttttctgga

SEQ ID NO: 141893 - DNA, 20 bp, Artificial Sequence
  Description of Artificial Sequence: Synthetic oligonucleotide
  Target: LAMA2; (+) strand; PAM type: NRG; PAM sequence: CAG
ttattttttctggaaggaaa

SEQ ID NO: 141894 - DNA, 20 bp, Artificial Sequence
  Description of Artificial Sequence: Synthetic oligonucleotide
  Target: LAMA2; (+) strand; PAM type: NRG; PAM sequence: AGG
tattttttctggaaggaaac

SEQ ID NO: 141895 - DNA, 20 bp, Artificial Sequence
  Description of Artificial Sequence: Synthetic oligonucleotide
  Target: LAMA2; (+) strand; PAM type: NRG; PAM sequence: TGG
tggaaggaaacaggctcact

SEQ ID NO: 141896 - DNA, 20 bp, Artificial Sequence
  Description of Artificial Sequence: Synthetic oligonucleotide
  Target: LAMA2; (+) strand; PAM type: NRG; PAM sequence: TAG
gctcacttggaatatttacc

SEQ ID NO: 141897 - DNA, 20 bp, Artificial Sequence
  Description of Artificial Sequence: Synthetic oligonucleotide
  Target: LAMA2; (+) strand; PAM type: NRG; PAM sequence: AAG
acctagattctctctttcac

SEQ ID NO: 141898 - DNA, 20 bp, Artificial Sequence
  Description of Artificial Sequence: Synthetic oligonucleotide
  Target: LAMA2; (+) strand; PAM type: NRG; PAM sequence: CAG
ctctctttcacaagaacacg

SEQ ID NO: 141899 - DNA, 20 bp, Artificial Sequence
  Description of Artificial Sequence: Synthetic oligonucleotide
  Target: LAMA2; (+) strand; PAM type: NRG; PAM sequence: TGG
ttatctcattatctcttccc

SEQ ID NO: 141900 - DNA, 20 bp, Artificial Sequence
  Description of Artificial Sequence: Synthetic oligonucleotide
  Target: LAMA2; (+) strand; PAM type: NRG; PAM sequence: TAG
ctcttccctggttgtgtctt

SEQ ID NO: 141901 - DNA, 20 bp, Artificial Sequence
  Description of Artificial Sequence: Synthetic oligonucleotide
  Target: LAMA2; (+) strand; PAM type: NRG; PAM sequence: AAG
ccctggttgtgtctttagaa

SEQ ID NO: 141902 - DNA, 20 bp, Artificial Sequence
  Description of Artificial Sequence: Synthetic oligonucleotide
  Target: LAMA2; (+) strand; PAM type: NRG; PAM sequence: TGG
tgtctttagaaaagaaacaa

SEQ ID NO: 141903 - DNA, 20 bp, Artificial Sequence
  Description of Artificial Sequence: Synthetic oligonucleotide
  Target: LAMA2; (+) strand; PAM type: NRG; PAM sequence: CAG
agaaaagaaacaatggataa

SEQ ID NO: 141904 - DNA, 20 bp, Artificial Sequence
  Description of Artificial Sequence: Synthetic oligonucleotide
  Target: LAMA2; (+) strand; PAM type: NRG; PAM sequence: GAG
aaaagaaacaatggataaca

SEQ ID NO: 141905 - DNA, 20 bp, Artificial Sequence
  Description of Artificial Sequence: Synthetic oligonucleotide
  Target: LAMA2; (+) strand; PAM type: NRG; PAM sequence: AGG
aaagaaacaatggataacag

SEQ ID NO: 141906 - DNA, 20 bp, Artificial Sequence
  Description of Artificial Sequence: Synthetic oligonucleotide
  Target: LAMA2; (+) strand; PAM type: NRG; PAM sequence: GGG
aagaaacaatggataacaga

SEQ ID NO: 141907 - DNA, 20 bp, Artificial Sequence
  Description of Artificial Sequence: Synthetic oligonucleotide
  Target: LAMA2; (+) strand; PAM type: NRG; PAM sequence: AAG
caatggataacagagggtaa

SEQ ID NO: 141908 - DNA, 20 bp, Artificial Sequence
  Description of Artificial Sequence: Synthetic oligonucleotide
  Target: LAMA2; (+) strand; PAM type: NRG; PAM sequence: GAG
atggataacagagggtaaaa

SEQ ID NO: 141909 - DNA, 20 bp, Artificial Sequence
  Description of Artificial Sequence: Synthetic oligonucleotide
  Target: LAMA2; (+) strand; PAM type: NRG; PAM sequence: CAG
aacagagggtaaaagagttt

SEQ ID NO: 141910 - DNA, 20 bp, Artificial Sequence
  Description of Artificial Sequence: Synthetic oligonucleotide
  Target: LAMA2; (+) strand; PAM type: NRG; PAM sequence: CAG
aagagtttcagtaattttct

SEQ ID NO: 141911 - DNA, 20 bp, Artificial Sequence
  Description of Artificial Sequence: Synthetic oligonucleotide
  Target: LAMA2; (+) strand; PAM type: NRG; PAM sequence: CAG
tcagtaattttctcagctca

SEQ ID NO: 141912 - DNA, 20 bp, Artificial Sequence
  Description of Artificial Sequence: Synthetic oligonucleotide
  Target: LAMA2; (+) strand; PAM type: NRG; PAM sequence: GAG
agtaattttctcagctcaca

SEQ ID NO: 141913 - DNA, 20 bp, Artificial Sequence
  Description of Artificial Sequence: Synthetic oligonucleotide
  Target: LAMA2; (+) strand; PAM type: NRG; PAM sequence: TAG
ctcagctcacagagacctaa

SEQ ID NO: 141914 - DNA, 20 bp, Artificial Sequence
  Description of Artificial Sequence: Synthetic oligonucleotide
  Target: LAMA2; (+) strand; PAM type: NRG; PAM sequence: AGG
tcagctcacagagacctaat

SEQ ID NO: 141915 - DNA, 20 bp, Artificial Sequence
  Description of Artificial Sequence: Synthetic oligonucleotide
  Target: LAMA2; (+) strand; PAM type: NRG; PAM sequence: CAG
acctaataggacaaatactc

SEQ ID NO: 141916 - DNA, 20 bp, Artificial Sequence
  Description of Artificial Sequence: Synthetic oligonucleotide
  Target: LAMA2; (+) strand; PAM type: NRG; PAM sequence: AGG
cctaataggacaaatactcc

SEQ ID NO: 141917 - DNA, 20 bp, Artificial Sequence
  Description of Artificial Sequence: Synthetic oligonucleotide
  Target: LAMA2; (+) strand; PAM type: NRG; PAM sequence: TAG
tactccaggaacgtatgcct

SEQ ID NO: 141918 - DNA, 20 bp, Artificial Sequence
  Description of Artificial Sequence: Synthetic oligonucleotide
  Target: LAMA2; (+) strand; PAM type: NRG; PAM sequence: CAG
aacgtatgccttagttcctg

SEQ ID NO: 141919 - DNA, 20 bp, Artificial Sequence
  Description of Artificial Sequence: Synthetic oligonucleotide
  Target: LAMA2; (+) strand; PAM type: NRG; PAM sequence: TGG
agatgacaatatatgctaac

SEQ ID NO: 141920 - DNA, 20 bp, Artificial Sequence
  Description of Artificial Sequence: Synthetic oligonucleotide
  Target: LAMA2; (+) strand; PAM type: NRG; PAM sequence: GGG
gatgacaatatatgctaact

SEQ ID NO: 141921 - DNA, 20 bp, Artificial Sequence
  Description of Artificial Sequence: Synthetic oligonucleotide
  Target: LAMA2; (+) strand; PAM type: NRG; PAM sequence: AAG
atatatgctaactgggattc

SEQ ID NO: 141922 - DNA, 20 bp, Artificial Sequence
  Description of Artificial Sequence: Synthetic oligonucleotide
  Target: LAMA2; (+) strand; PAM type: NRG; PAM sequence: CAG
gggattcaagctctaacaaa

SEQ ID NO: 141923 - DNA, 20 bp, Artificial Sequence
  Description of Artificial Sequence: Synthetic oligonucleotide
  Target: LAMA2; (+) strand; PAM type: NRG; PAM sequence: AGG
ggattcaagctctaacaaac

SEQ ID NO: 141924 - DNA, 20 bp, Artificial Sequence
  Description of Artificial Sequence: Synthetic oligonucleotide
  Target: LAMA2; (+) strand; PAM type: NRG; PAM sequence: AAG
tcaagctctaacaaacaggc

SEQ ID NO: 141925 - DNA, 20 bp, Artificial Sequence
  Description of Artificial Sequence: Synthetic oligonucleotide
  Target: LAMA2; (+) strand; PAM type: NRG; PAM sequence: TGG
tcaaactaataaccataacg

SEQ ID NO: 141926 - DNA, 20 bp, Artificial Sequence
  Description of Artificial Sequence: Synthetic oligonucleotide
  Target: LAMA2; (+) strand; PAM type: NRG; PAM sequence: AAG
aactaataaccataacgtgg

SEQ ID NO: 141927 - DNA, 20 bp, Artificial Sequence
  Description of Artificial Sequence: Synthetic oligonucleotide
  Target: LAMA2; (+) strand; PAM type: NRG; PAM sequence: CAG
cataacgtggaagcacatta

SEQ ID NO: 141928 - DNA, 20 bp, Artificial Sequence
  Description of Artificial Sequence: Synthetic oligonucleotide
  Target: LAMA2; (+) strand; PAM type: NRG; PAM sequence: TGG
gaagcacattacagtgattt

SEQ ID NO: 141929 - DNA, 20 bp, Artificial Sequence
  Description of Artificial Sequence: Synthetic oligonucleotide
  Target: LAMA2; (+) strand; PAM type: NRG; PAM sequence: CAG
atatcaaatgcccaccattt

SEQ ID NO: 141930 - DNA, 20 bp, Artificial Sequence
  Description of Artificial Sequence: Synthetic oligonucleotide
  Target: LAMA2; (+) strand; PAM type: NRG; PAM sequence: AAG
tcaaatgcccaccatttcag

SEQ ID NO: 141931 - DNA, 20 bp, Artificial Sequence
  Description of Artificial Sequence: Synthetic oligonucleotide
  Target: LAMA2; (+) strand; PAM type: NRG; PAM sequence: AAG
catttcagaagaattataat

SEQ ID NO: 141932 - DNA, 20 bp, Artificial Sequence
  Description of Artificial Sequence: Synthetic oligonucleotide
  Target: LAMA2; (+) strand; PAM type: NRG; PAM sequence: AGG
atttcagaagaattataata

SEQ ID NO: 141933 - DNA, 20 bp, Artificial Sequence
  Description of Artificial Sequence: Synthetic oligonucleotide
  Target: LAMA2; (+) strand; PAM type: NRG; PAM sequence: TAG
aagaattataataaggaata

SEQ ID NO: 141934 - DNA, 20 bp, Artificial Sequence
  Description of Artificial Sequence: Synthetic oligonucleotide
  Target: LAMA2; (+) strand; PAM type: NRG; PAM sequence: AAG
acccatttctcatttgcctg

SEQ ID NO: 141935 - DNA, 20 bp, Artificial Sequence
  Description of Artificial Sequence: Synthetic oligonucleotide
  Target: LAMA2; (+) strand; PAM type: NRG; PAM sequence: CAG
atttgcctgaagaatacttg

SEQ ID NO: 141936 - DNA, 20 bp, Artificial Sequence
  Description of Artificial Sequence: Synthetic oligonucleotide
  Target: LAMA2; (+) strand; PAM type: NRG; PAM sequence: CAG
gcctgaagaatacttgcaga

SEQ ID NO: 141937 - DNA, 20 bp, Artificial Sequence
  Description of Artificial Sequence: Synthetic oligonucleotide
  Target: LAMA2; (+) strand; PAM type: NRG; PAM sequence: TGG
atacttgcagacagcatttg

SEQ ID NO: 141938 - DNA, 20 bp, Artificial Sequence
  Description of Artificial Sequence: Synthetic oligonucleotide
  Target: LAMA2; (+) strand; PAM type: NRG; PAM sequence: GAG
tgtggcttaatgtttaccct

SEQ ID NO: 141939 - DNA, 20 bp, Artificial Sequence
  Description of Artificial Sequence: Synthetic oligonucleotide
  Target: LAMA2; (+) strand; PAM type: NRG; PAM sequence: TGG
gtttaccctgagataacttg

SEQ ID NO: 141940 - DNA, 20 bp, Artificial Sequence
  Description of Artificial Sequence: Synthetic oligonucleotide
  Target: LAMA2; (+) strand; PAM type: NRG; PAM sequence: AAG
ctgtcctaaccttatcccca

SEQ ID NO: 141941 - DNA, 20 bp, Artificial Sequence
  Description of Artificial Sequence: Synthetic oligonucleotide
  Target: LAMA2; (+) strand; PAM type: NRG; PAM sequence: TAG
cttttattattatttttgca

SEQ ID NO: 141942 - DNA, 20 bp, Artificial Sequence
  Description of Artificial Sequence: Synthetic oligonucleotide
  Target: LAMA2; (+) strand; PAM type: NRG; PAM sequence: AGG
ttttattattatttttgcat

SEQ ID NO: 141943 - DNA, 20 bp, Artificial Sequence
  Description of Artificial Sequence: Synthetic oligonucleotide
  Target: LAMA2; (+) strand; PAM type: NRG; PAM sequence: TAG
ttattatttttgcataggtc

SEQ ID NO: 141944 - DNA, 20 bp, Artificial Sequence
  Description of Artificial Sequence: Synthetic oligonucleotide
  Target: LAMA2; (+) strand; PAM type: NRG; PAM sequence: TGG
taggtctagcatattgactt

SEQ ID NO: 141945 - DNA, 20 bp, Artificial Sequence
  Description of Artificial Sequence: Synthetic oligonucleotide
  Target: LAMA2; (+) strand; PAM type: NRG; PAM sequence: AAG
catattgactttggaaacaa

SEQ ID NO: 141946 - DNA, 20 bp, Artificial Sequence
  Description of Artificial Sequence: Synthetic oligonucleotide
  Target: LAMA2; (+) strand; PAM type: NRG; PAM sequence: TAG
aaaagacatcattctatttg

SEQ ID NO: 141947 - DNA, 20 bp, Artificial Sequence
  Description of Artificial Sequence: Synthetic oligonucleotide
  Target: LAMA2; (+) strand; PAM type: NRG; PAM sequence: TAG
ttgtagcattctgtgtttga

SEQ ID NO: 141948 - DNA, 20 bp, Artificial Sequence
  Description of Artificial Sequence: Synthetic oligonucleotide
  Target: LAMA2; (+) strand; PAM type: NRG; PAM sequence: TAG
tagcattctgtgtttgatag

SEQ ID NO: 141949 - DNA, 20 bp, Artificial Sequence
  Description of Artificial Sequence: Synthetic oligonucleotide
  Target: LAMA2; (+) strand; PAM type: NRG; PAM sequence: TAG
gtatttccatatacaaaata

SEQ ID NO: 141950 - DNA, 20 bp, Artificial Sequence
  Description of Artificial Sequence: Synthetic oligonucleotide
  Target: LAMA2; (+) strand; PAM type: NRG; PAM sequence: TAG
tgattgctgaaatcaaatcc

SEQ ID NO: 141951 - DNA, 20 bp, Artificial Sequence
  Description of Artificial Sequence: Synthetic oligonucleotide
  Target: LAMA2; (+) strand; PAM type: NRG; PAM sequence: CAG
aaatcaaatcctagaaaata

SEQ ID NO: 141952 - DNA, 20 bp, Artificial Sequence
  Description of Artificial Sequence: Synthetic oligonucleotide
  Target: LAMA2; (+) strand; PAM type: NRG; PAM sequence: TAG
catatacatttctgttacat

SEQ ID NO: 141953 - DNA, 20 bp, Artificial Sequence
  Description of Artificial Sequence: Synthetic oligonucleotide
  Target: LAMA2; (+) strand; PAM type: NRG; PAM sequence: AGG
atatacatttctgttacatt

SEQ ID NO: 141954 - DNA, 20 bp, Artificial Sequence
  Description of Artificial Sequence: Synthetic oligonucleotide
  Target: LAMA2; (+) strand; PAM type: NRG; PAM sequence: TAG
catttctgttacattaggat

SEQ ID NO: 141955 - DNA, 20 bp, Artificial Sequence
  Description of Artificial Sequence: Synthetic oligonucleotide
  Target: LAMA2; (+) strand; PAM type: NRG; PAM sequence: GAG
tttctgttacattaggatta

SEQ ID NO: 141956 - DNA, 20 bp, Artificial Sequence
  Description of Artificial Sequence: Synthetic oligonucleotide
  Target: LAMA2; (+) strand; PAM type: NRG; PAM sequence: AAG
gttacattaggattagagat

SEQ ID NO: 141957 - DNA, 20 bp, Artificial Sequence
  Description of Artificial Sequence: Synthetic oligonucleotide
  Target: LAMA2; (+) strand; PAM type: NRG; PAM sequence: TAG
gattagagataagttttatt

SEQ ID NO: 141958 - DNA, 20 bp, Artificial Sequence
  Description of Artificial Sequence: Synthetic oligonucleotide
  Target: LAMA2; (+) strand; PAM type: NRG; PAM sequence: AAG
ttttatttagaaataactct

SEQ ID NO: 141959 - DNA, 20 bp, Artificial Sequence
  Description of Artificial Sequence: Synthetic oligonucleotide
  Target: LAMA2; (+) strand; PAM type: NRG; PAM sequence: AAG
tttattttcacattgaaaat

SEQ ID NO: 141960 - DNA, 20 bp, Artificial Sequence
  Description of Artificial Sequence: Synthetic oligonucleotide
  Target: LAMA2; (+) strand; PAM type: NRG; PAM sequence: CAG
ttttcacattgaaaataagt

SEQ ID NO: 141961 - DNA, 20 bp, Artificial Sequence
  Description of Artificial Sequence: Synthetic oligonucleotide
  Target: LAMA2; (+) strand; PAM type: NRG; PAM sequence: CAG
aaaataagtcagatttgctt

SEQ ID NO: 141962 - DNA, 20 bp, Artificial Sequence
  Description of Artificial Sequence: Synthetic oligonucleotide
  Target: LAMA2; (+) strand; PAM type: NRG; PAM sequence: GAG
gtgtttatgtaaaattaaat

SEQ ID NO: 141963 - DNA, 20 bp, Artificial Sequence
  Description of Artificial Sequence: Synthetic oligonucleotide
  Target: LAMA2; (+) strand; PAM type: NRG; PAM sequence: GAG
gtttatgtaaaattaaatga

SEQ ID NO: 141964 - DNA, 20 bp, Artificial Sequence
  Description of Artificial Sequence: Synthetic oligonucleotide
  Target: LAMA2; (+) strand; PAM type: NRG; PAM sequence: TGG
atgtaaaattaaatgagagc

SEQ ID NO: 141965 - DNA, 20 bp, Artificial Sequence
  Description of Artificial Sequence: Synthetic oligonucleotide
  Target: LAMA2; (+) strand; PAM type: NRG; PAM sequence: CAG
taaaattaaatgagagctgg

SEQ ID NO: 141966 - DNA, 20 bp, Artificial Sequence
  Description of Artificial Sequence: Synthetic oligonucleotide
  Target: LAMA2; (+) strand; PAM type: NRG; PAM sequence: GAG
attaaatgagagctggcagt

SEQ ID NO: 141967 - DNA, 20 bp, Artificial Sequence
  Description of Artificial Sequence: Synthetic oligonucleotide
  Target: LAMA2; (+) strand; PAM type: NRG; PAM sequence: TGG
ctgtacattttttttcctaa

SEQ ID NO: 141968 - DNA, 20 bp, Artificial Sequence
  Description of Artificial Sequence: Synthetic oligonucleotide
  Target: LAMA2; (+) strand; PAM type: NRG; PAM sequence: GGG
tgtacattttttttcctaat

SEQ ID NO: 141969 - DNA, 20 bp, Artificial Sequence
  Description of Artificial Sequence: Synthetic oligonucleotide
  Target: LAMA2; (+) strand; PAM type: NRG; PAM sequence: TGG
ttttttttcctaatgggaca

SEQ ID NO: 141970 - DNA, 20 bp, Artificial Sequence
  Description of Artificial Sequence: Synthetic oligonucleotide
  Target: LAMA2; (+) strand; PAM type: NRG; PAM sequence: GGG
tttttttcctaatgggacat

SEQ ID NO: 141971 - DNA, 20 bp, Artificial Sequence
  Description of Artificial Sequence: Synthetic oligonucleotide
  Target: LAMA2; (+) strand; PAM type: NRG; PAM sequence: TGG
tcctaatgggacatgggtta

SEQ ID NO: 141972 - DNA, 20 bp, Artificial Sequence
  Description of Artificial Sequence: Synthetic oligonucleotide
  Target: LAMA2; (+) strand; PAM type: NRG; PAM sequence: GGG
cctaatgggacatgggttat

SEQ ID NO: 141973 - DNA, 20 bp, Artificial Sequence
  Description of Artificial Sequence: Synthetic oligonucleotide
  Target: LAMA2; (+) strand; PAM type: NRG; PAM sequence: AAG
gggacatgggttatgggtta

SEQ ID NO: 141974 - DNA, 20 bp, Artificial Sequence
  Description of Artificial Sequence: Synthetic oligonucleotide
  Target: LAMA2; (+) strand; PAM type: NRG; PAM sequence: AAG
gttatgggttaaagatgtac

SEQ ID NO: 141975 - DNA, 20 bp, Artificial Sequence
  Description of Artificial Sequence: Synthetic oligonucleotide
  Target: LAMA2; (+) strand; PAM type: NRG; PAM sequence: TGG
tgggttaaagatgtacaagc

SEQ ID NO: 141976 - DNA, 20 bp, Artificial Sequence
  Description of Artificial Sequence: Synthetic oligonucleotide
  Target: LAMA2; (+) strand; PAM type: NRG; PAM sequence: CGG
ttaaagatgtacaagctggc

SEQ ID NO: 141977 - DNA, 20 bp, Artificial Sequence
  Description of Artificial Sequence: Synthetic oligonucleotide
  Target: LAMA2; (+) strand; PAM type: NRG; PAM sequence: GGG
taaagatgtacaagctggcc

SEQ ID NO: 141978 - DNA, 20 bp, Artificial Sequence
  Description of Artificial Sequence: Synthetic oligonucleotide
  Target: LAMA2; (+) strand; PAM type: NRG; PAM sequence: CGG
atgtacaagctggccgggca

SEQ ID NO: 141979 - DNA, 20 bp, Artificial Sequence
  Description of Artificial Sequence: Synthetic oligonucleotide
  Target: LAMA2; (+) strand; PAM type: NRG; PAM sequence: TGG
tacaagctggccgggcacgg

SEQ ID NO: 141980 - DNA, 20 bp, Artificial Sequence
  Description of Artificial Sequence: Synthetic oligonucleotide
  Target: LAMA2; (+) strand; PAM type: NRG; PAM sequence: GAG
ctgtaatcccaacactttgt

SEQ ID NO: 141981 - DNA, 20 bp, Artificial Sequence
  Description of Artificial Sequence: Synthetic oligonucleotide
  Target: LAMA2; (+) strand; PAM type: NRG; PAM sequence: AGG
tgtaatcccaacactttgtg

SEQ ID NO: 141982 - DNA, 20 bp, Artificial Sequence
  Description of Artificial Sequence: Synthetic oligonucleotide
  Target: LAMA2; (+) strand; PAM type: NRG; PAM sequence: GAG
tcccaacactttgtgaggct

SEQ ID NO: 141983 - DNA, 20 bp, Artificial Sequence
  Description of Artificial Sequence: Synthetic oligonucleotide
  Target: LAMA2; (+) strand; PAM type: NRG; PAM sequence: AGG
cccaacactttgtgaggctg

SEQ ID NO: 141984 - DNA, 20 bp, Artificial Sequence
  Description of Artificial Sequence: Synthetic oligonucleotide
  Target: LAMA2; (+) strand; PAM type: NRG; PAM sequence: AAG
acactttgtgaggctgaggc

SEQ ID NO: 141985 - DNA, 20 bp, Artificial Sequence
  Description of Artificial Sequence: Synthetic oligonucleotide
  Target: LAMA2; (+) strand; PAM type: NRG; PAM sequence: TGG
ctttgtgaggctgaggcaag

SEQ ID NO: 141986 - DNA, 20 bp, Artificial Sequence
  Description of Artificial Sequence: Synthetic oligonucleotide
  Target: LAMA2; (+) strand; PAM type: NRG; PAM sequence: GAG
ctgaggcaagtggatcacct

SEQ ID NO: 141987 - DNA, 20 bp, Artificial Sequence
  Description of Artificial Sequence: Synthetic oligonucleotide
  Target: LAMA2; (+) strand; PAM type: NRG; PAM sequence: AGG
tgaggcaagtggatcacctg

SEQ ID NO: 141988 - DNA, 20 bp, Artificial Sequence
  Description of Artificial Sequence: Synthetic oligonucleotide
  Target: LAMA2; (+) strand; PAM type: NRG; PAM sequence: TAG
gcaagtggatcacctgaggt

SEQ ID NO: 141989 - DNA, 20 bp, Artificial Sequence
  Description of Artificial Sequence: Synthetic oligonucleotide
  Target: LAMA2; (+) strand; PAM type: NRG; PAM sequence: AGG
caagtggatcacctgaggtt

SEQ ID NO: 141990 - DNA, 20 bp, Artificial Sequence
  Description of Artificial Sequence: Synthetic oligonucleotide
  Target: LAMA2; (+) strand; PAM type: NRG; PAM sequence: GAG
agtggatcacctgaggttag

SEQ ID NO: 141991 - DNA, 20 bp, Artificial Sequence
  Description of Artificial Sequence: Synthetic oligonucleotide
  Target: LAMA2; (+) strand; PAM type: NRG; PAM sequence: GAG
tcacctgaggttaggagttt

SEQ ID NO: 141992 - DNA, 20 bp, Artificial Sequence
  Description of Artificial Sequence: Synthetic oligonucleotide
  Target: LAMA2; (+) strand; PAM type: NRG; PAM sequence: CAG
tgaggttaggagtttgagac

SEQ ID NO: 141993 - DNA, 20 bp, Artificial Sequence
  Description of Artificial Sequence: Synthetic oligonucleotide
  Target: LAMA2; (+) strand; PAM type: NRG; PAM sequence: TGG
tgagaccagccttaccaata

SEQ ID NO: 141994 - DNA, 20 bp, Artificial Sequence
  Description of Artificial Sequence: Synthetic oligonucleotide
  Target: LAMA2; (+) strand; PAM type: NRG; PAM sequence: TAG
aaaaaaaaaaaaaaaaaaat

SEQ ID NO: 141995 - DNA, 20 bp, Artificial Sequence
  Description of Artificial Sequence: Synthetic oligonucleotide
  Target: LAMA2; (+) strand; PAM type: NRG; PAM sequence: CAG
aaaaaaaaaaaaaaattagc

SEQ ID NO: 141996 - DNA, 20 bp, Artificial Sequence
  Description of Artificial Sequence: Synthetic oligonucleotide
  Target: LAMA2; (+) strand; PAM type: NRG; PAM sequence: AGG
aaaaaaaaaaaaaattagcc

SEQ ID NO: 141997 - DNA, 20 bp, Artificial Sequence
  Description of Artificial Sequence: Synthetic oligonucleotide
  Target: LAMA2; (+) strand; PAM type: NRG; PAM sequence: CAG
aaaaaaaaattagccaggcg

SEQ ID NO: 141998 - DNA, 20 bp, Artificial Sequence
  Description of Artificial Sequence: Synthetic oligonucleotide
  Target: LAMA2; (+) strand; PAM type: NRG; PAM sequence: TGG
aaaaaattagccaggcgcag

SEQ ID NO: 141999 - DNA, 20 bp, Artificial Sequence
  Description of Artificial Sequence: Synthetic oligonucleotide
  Target: LAMA2; (+) strand; PAM type: NRG; PAM sequence: CAG
agtggcacctgcctgtaatc

SEQ ID NO: 142000 - DNA, 20 bp, Artificial Sequence
  Description of Artificial Sequence: Synthetic oligonucleotide
  Target: LAMA2; (+) strand; PAM type: NRG; PAM sequence: TGG
ctgcctgtaatccagctact

SEQ ID NO: 142001 - DNA, 20 bp, Artificial Sequence
  Description of Artificial Sequence: Synthetic oligonucleotide
  Target: LAMA2; (+) strand; PAM type: NRG; PAM sequence: GGG
tgcctgtaatccagctactt

SEQ ID NO: 142002 - DNA, 20 bp, Artificial Sequence
  Description of Artificial Sequence: Synthetic oligonucleotide
  Target: LAMA2; (+) strand; PAM type: NRG; PAM sequence: GAG
cctgtaatccagctacttgg

SEQ ID NO: 142003 - DNA, 20 bp, Artificial Sequence
  Description of Artificial Sequence: Synthetic oligonucleotide
  Target: LAMA2; (+) strand; PAM type: NRG; PAM sequence: AGG
ctgtaatccagctacttggg

SEQ ID NO: 142004 - DNA, 20 bp, Artificial Sequence
  Description of Artificial Sequence: Synthetic oligonucleotide
  Target: LAMA2; (+) strand; PAM type: NRG; PAM sequence: GAG
atccagctacttgggaggct

SEQ ID NO: 142005 - DNA, 20 bp, Artificial Sequence
  Description of Artificial Sequence: Synthetic oligonucleotide
  Target: LAMA2; (+) strand; PAM type: NRG; PAM sequence: AGG
tccagctacttgggaggctg

SEQ ID NO: 142006 - DNA, 20 bp, Artificial Sequence
  Description of Artificial Sequence: Synthetic oligonucleotide
  Target: LAMA2; (+) strand; PAM type: NRG; PAM sequence: CAG
agctacttgggaggctgagg

SEQ ID NO: 142007 - DNA, 20 bp, Artificial Sequence
  Description of Artificial Sequence: Synthetic oligonucleotide
  Target: LAMA2; (+) strand; PAM type: NRG; PAM sequence: AGG
gctacttgggaggctgaggc

SEQ ID NO: 142008 - DNA, 20 bp, Artificial Sequence
  Description of Artificial Sequence: Synthetic oligonucleotide
  Target: LAMA2; (+) strand; PAM type: NRG; PAM sequence: GAG
tacttgggaggctgaggcag

SEQ ID NO: 142009 - DNA, 20 bp, Artificial Sequence
  Description of Artificial Sequence: Synthetic oligonucleotide
  Target: LAMA2; (+) strand; PAM type: NRG; PAM sequence: TGG
gcaggagaattgcttgaacc

SEQ ID NO: 142010 - DNA, 20 bp, Artificial Sequence
  Description of Artificial Sequence: Synthetic oligonucleotide
  Target: LAMA2; (+) strand; PAM type: NRG; PAM sequence: GGG
caggagaattgcttgaacct

SEQ ID NO: 142011 - DNA, 20 bp, Artificial Sequence
  Description of Artificial Sequence: Synthetic oligonucleotide
  Target: LAMA2; (+) strand; PAM type: NRG; PAM sequence: GAG
ggagaattgcttgaacctgg

SEQ ID NO: 142012 - DNA, 20 bp, Artificial Sequence
  Description of Artificial Sequence: Synthetic oligonucleotide
  Target: LAMA2; (+) strand; PAM type: NRG; PAM sequence: AGG
gagaattgcttgaacctggg

SEQ ID NO: 142013 - DNA, 20 bp, Artificial Sequence
  Description of Artificial Sequence: Synthetic oligonucleotide
  Target: LAMA2; (+) strand; PAM type: NRG; PAM sequence: CAG
aattgcttgaacctgggagg

SEQ ID NO: 142014 - DNA, 20 bp, Artificial Sequence
  Description of Artificial Sequence: Synthetic oligonucleotide
  Target: LAMA2; (+) strand; PAM type: NRG; PAM sequence: GAG
ttgcttgaacctgggaggca

SEQ ID NO: 142015 - DNA, 20 bp, Artificial Sequence
  Description of Artificial Sequence: Synthetic oligonucleotide
  Target: LAMA2; (+) strand; PAM type: NRG; PAM sequence: AGG
tgcttgaacctgggaggcag

SEQ ID NO: 142016 - DNA, 20 bp, Artificial Sequence
  Description of Artificial Sequence: Synthetic oligonucleotide
  Target: LAMA2; (+) strand; PAM type: NRG; PAM sequence: CAG
aacctgggaggcagaggttg

SEQ ID NO: 142017 - DNA, 20 bp, Artificial Sequence
  Description of Artificial Sequence: Synthetic oligonucleotide
  Target: LAMA2; (+) strand; PAM type: NRG; PAM sequence: GAG
tgggaggcagaggttgcagt

SEQ ID NO: 142018 - DNA, 20 bp, Artificial Sequence
  Description of Artificial Sequence: Synthetic oligonucleotide
  Target: LAMA2; (+) strand; PAM type: NRG; PAM sequence: AAG
ggcagaggttgcagtgagcc

SEQ ID NO: 142019 - DNA, 20 bp, Artificial Sequence
  Description of Artificial Sequence: Synthetic oligonucleotide
  Target: LAMA2; (+) strand; PAM type: NRG; PAM sequence: TGG
tgcgccattgcactccatcc

SEQ ID NO: 142020 - DNA, 20 bp, Artificial Sequence
  Description of Artificial Sequence: Synthetic oligonucleotide
  Target: LAMA2; (+) strand; PAM type: NRG; PAM sequence: CAG
ttgcactccatcctggacaa

SEQ ID NO: 142021 - DNA, 20 bp, Artificial Sequence
  Description of Artificial Sequence: Synthetic oligonucleotide
  Target: LAMA2; (+) strand; PAM type: NRG; PAM sequence: GAG
gcactccatcctggacaaca

SEQ ID NO: 142022 - DNA, 20 bp, Artificial Sequence
  Description of Artificial Sequence: Synthetic oligonucleotide
  Target: LAMA2; (+) strand; PAM type: NRG; PAM sequence: CAG
ctccatcctggacaacagag

SEQ ID NO: 142023 - DNA, 20 bp, Artificial Sequence
  Description of Artificial Sequence: Synthetic oligonucleotide
  Target: LAMA2; (+) strand; PAM type: NRG; PAM sequence: AGG
tccatcctggacaacagagc

SEQ ID NO: 142024 - DNA, 20 bp, Artificial Sequence
  Description of Artificial Sequence: Synthetic oligonucleotide
  Target: LAMA2; (+) strand; PAM type: NRG; PAM sequence: CAG
ctggacaacagagcaggacg

SEQ ID NO: 142025 - DNA, 20 bp, Artificial Sequence
  Description of Artificial Sequence: Synthetic oligonucleotide
  Target: LAMA2; (+) strand; PAM type: NRG; PAM sequence: TGG
caacagagcaggacgcagtc

SEQ ID NO: 142026 - DNA, 20 bp, Artificial Sequence
  Description of Artificial Sequence: Synthetic oligonucleotide
  Target: LAMA2; (+) strand; PAM type: NRG; PAM sequence: AAG
gcagtctggaaaaaaaaaaa

SEQ ID NO: 142027 - DNA, 20 bp, Artificial Sequence
  Description of Artificial Sequence: Synthetic oligonucleotide
  Target: LAMA2; (+) strand; PAM type: NRG; PAM sequence: AAG
gaaaaaaaaaaaaagtgtaa

SEQ ID NO: 142028 - DNA, 20 bp, Artificial Sequence
  Description of Artificial Sequence: Synthetic oligonucleotide
  Target: LAMA2; (+) strand; PAM type: NRG; PAM sequence: TAG
aaaaaaaaaagtgtaaaagc

SEQ ID NO: 142029 - DNA, 20 bp, Artificial Sequence
  Description of Artificial Sequence: Synthetic oligonucleotide
  Target: LAMA2; (+) strand; PAM type: NRG; PAM sequence: GAG
aaaaaaaagtgtaaaagcta

SEQ ID NO: 142030 - DNA, 20 bp, Artificial Sequence
  Description of Artificial Sequence: Synthetic oligonucleotide
  Target: LAMA2; (+) strand; PAM type: NRG; PAM sequence: AGG
aaaaaaagtgtaaaagctag

SEQ ID NO: 142031 - DNA, 20 bp, Artificial Sequence
  Description of Artificial Sequence: Synthetic oligonucleotide
  Target: LAMA2; (+) strand; PAM type: NRG; PAM sequence: TGG
agtgtaaaagctagaggccc

SEQ ID NO: 142032 - DNA, 20 bp, Artificial Sequence
  Description of Artificial Sequence: Synthetic oligonucleotide
  Target: LAMA2; (+) strand; PAM type: NRG; PAM sequence: AAG
ctagaggccctggcctccac

SEQ ID NO: 142033 - DNA, 20 bp, Artificial Sequence
  Description of Artificial Sequence: Synthetic oligonucleotide
  Target: LAMA2; (+) strand; PAM type: NRG; PAM sequence: TAG
gcctccacaagcccacaatt

SEQ ID NO: 142034 - DNA, 20 bp, Artificial Sequence
  Description of Artificial Sequence: Synthetic oligonucleotide
  Target: LAMA2; (+) strand; PAM type: NRG; PAM sequence: AAG
ttcttcttctttatgatttt

SEQ ID NO: 142035 - DNA, 20 bp, Artificial Sequence
  Description of Artificial Sequence: Synthetic oligonucleotide
  Target: LAMA2; (+) strand; PAM type: NRG; PAM sequence: CAG
ttatgattttaagaccttgt

SEQ ID NO: 142036 - DNA, 20 bp, Artificial Sequence
  Description of Artificial Sequence: Synthetic oligonucleotide
  Target: LAMA2; (+) strand; PAM type: NRG; PAM sequence: AGG
tatgattttaagaccttgtc

SEQ ID NO: 142037 - DNA, 20 bp, Artificial Sequence
  Description of Artificial Sequence: Synthetic oligonucleotide
  Target: LAMA2; (+) strand; PAM type: NRG; PAM sequence: TGG
agaccttgtcaggaatactt

SEQ ID NO: 142038 - DNA, 20 bp, Artificial Sequence
  Description of Artificial Sequence: Synthetic oligonucleotide
  Target: LAMA2; (+) strand; PAM type: NRG; PAM sequence: GGG
gaccttgtcaggaatacttt

SEQ ID NO: 142039 - DNA, 20 bp, Artificial Sequence
  Description of Artificial Sequence: Synthetic oligonucleotide
  Target: LAMA2; (+) strand; PAM type: NRG; PAM sequence: CAG
caggaatactttgggattat

SEQ ID NO: 142040 - DNA, 20 bp, Artificial Sequence
  Description of Artificial Sequence: Synthetic oligonucleotide
  Target: LAMA2; (+) strand; PAM type: NRG; PAM sequence: TAG
gaatactttgggattatcag

SEQ ID NO: 142041 - DNA, 20 bp, Artificial Sequence
  Description of Artificial Sequence: Synthetic oligonucleotide
  Target: LAMA2; (+) strand; PAM type: NRG; PAM sequence: TAG
actttgggattatcagtagt

SEQ ID NO: 142042 - DNA, 20 bp, Artificial Sequence
  Description of Artificial Sequence: Synthetic oligonucleotide
  Target: LAMA2; (+) strand; PAM type: NRG; PAM sequence: AGG
ctttgggattatcagtagtt

SEQ ID NO: 142043 - DNA, 20 bp, Artificial Sequence
  Description of Artificial Sequence: Synthetic oligonucleotide
  Target: LAMA2; (+) strand; PAM type: NRG; PAM sequence: AAG
gattatcagtagttaggacc

SEQ ID NO: 142044 - DNA, 20 bp, Artificial Sequence
  Description of Artificial Sequence: Synthetic oligonucleotide
  Target: LAMA2; (+) strand; PAM type: NRG; PAM sequence: TAG
ccaagatatttcatatttta

SEQ ID NO: 142045 - DNA, 20 bp, Artificial Sequence
  Description of Artificial Sequence: Synthetic oligonucleotide
  Target: LAMA2; (+) strand; PAM type: NRG; PAM sequence: CAG
agatatttcatattttatag

SEQ ID NO: 142046 - DNA, 20 bp, Artificial Sequence
  Description of Artificial Sequence: Synthetic oligonucleotide
  Target: LAMA2; (+) strand; PAM type: NRG; PAM sequence: GAG
atatttcatattttatagca

SEQ ID NO: 142047 - DNA, 20 bp, Artificial Sequence
  Description of Artificial Sequence: Synthetic oligonucleotide
  Target: LAMA2; (+) strand; PAM type: NRG; PAM sequence: AAG
actctatctgtgcattttat

SEQ ID NO: 142048 - DNA, 20 bp, Artificial Sequence
  Description of Artificial Sequence: Synthetic oligonucleotide
  Target: LAMA2; (+) strand; PAM type: NRG; PAM sequence: TGG
attttataagattaatccat

SEQ ID NO: 142049 - DNA, 20 bp, Artificial Sequence
  Description of Artificial Sequence: Synthetic oligonucleotide
  Target: LAMA2; (+) strand; PAM type: NRG; PAM sequence: AAG
tcttgttgaatttctatata

SEQ ID NO: 142050 - DNA, 20 bp, Artificial Sequence
  Description of Artificial Sequence: Synthetic oligonucleotide
  Target: LAMA2; (+) strand; PAM type: NRG; PAM sequence: GAG
ataaagacattctacgtgat

SEQ ID NO: 142051 - DNA, 20 bp, Artificial Sequence
  Description of Artificial Sequence: Synthetic oligonucleotide
  Target: LAMA2; (+) strand; PAM type: NRG; PAM sequence: AAG
aataatacctaaaaatgcat

SEQ ID NO: 142052 - DNA, 20 bp, Artificial Sequence
  Description of Artificial Sequence: Synthetic oligonucleotide
  Target: LAMA2; (+) strand; PAM type: NRG; PAM sequence: TAG
aatacctaaaaatgcataag

SEQ ID NO: 142053 - DNA, 20 bp, Artificial Sequence
  Description of Artificial Sequence: Synthetic oligonucleotide
  Target: LAMA2; (+) strand; PAM type: NRG; PAM sequence: TAG
taagtagcaaatatctttta

SEQ ID NO: 142054 - DNA, 20 bp, Artificial Sequence
  Description of Artificial Sequence: Synthetic oligonucleotide
  Target: LAMA2; (+) strand; PAM type: NRG; PAM sequence: TGG
gtagcaaatatcttttatag

SEQ ID NO: 142055 - DNA, 20 bp, Artificial Sequence
  Description of Artificial Sequence: Synthetic oligonucleotide
  Target: LAMA2; (+) strand; PAM type: NRG; PAM sequence: AAG
tttactttgtctttatttta

SEQ ID NO: 142056 - DNA, 20 bp, Artificial Sequence
  Description of Artificial Sequence: Synthetic oligonucleotide
  Target: LAMA2; (+) strand; PAM type: NRG; PAM sequence: AAG
ttaaagataattttatttaa

SEQ ID NO: 142057 - DNA, 20 bp, Artificial Sequence
  Description of Artificial Sequence: Synthetic oligonucleotide
  Target: LAMA2; (+) strand; PAM type: NRG; PAM sequence: TAG
ttatgttcatacaaaaaata

SEQ ID NO: 142058 - DNA, 20 bp, Artificial Sequence
  Description of Artificial Sequence: Synthetic oligonucleotide
  Target: LAMA2; (+) strand; PAM type: NRG; PAM sequence: CAG
tgttcatacaaaaaatatag

SEQ ID NO: 142059 - DNA, 20 bp, Artificial Sequence
  Description of Artificial Sequence: Synthetic oligonucleotide
  Target: LAMA2; (+) strand; PAM type: NRG; PAM sequence: CGG
acaaaaaatatagcagaata

SEQ ID NO: 142060 - DNA, 20 bp, Artificial Sequence
  Description of Artificial Sequence: Synthetic oligonucleotide
  Target: LAMA2; (+) strand; PAM type: NRG; PAM sequence: GGG
caaaaaatatagcagaatac

SEQ ID NO: 142061 - DNA, 20 bp, Artificial Sequence
  Description of Artificial Sequence: Synthetic oligonucleotide
  Target: LAMA2; (+) strand; PAM type: NRG; PAM sequence: TGG
aaatatagcagaatacggga

SEQ ID NO: 142062 - DNA, 20 bp, Artificial Sequence
  Description of Artificial Sequence: Synthetic oligonucleotide
  Target: LAMA2; (+) strand; PAM type: NRG; PAM sequence: AAG
gaatacgggatggaaaataa

SEQ ID NO: 142063 - DNA, 20 bp, Artificial Sequence
  Description of Artificial Sequence: Synthetic oligonucleotide
  Target: LAMA2; (+) strand; PAM type: NRG; PAM sequence: AAG
tcctcttttcttgactccta

SEQ ID NO: 142064 - DNA, 20 bp, Artificial Sequence
  Description of Artificial Sequence: Synthetic oligonucleotide
  Target: LAMA2; (+) strand; PAM type: NRG; PAM sequence: AGG
cctcttttcttgactcctaa

SEQ ID NO: 142065 - DNA, 20 bp, Artificial Sequence
  Description of Artificial Sequence: Synthetic oligonucleotide
  Target: LAMA2; (+) strand; PAM type: NRG; PAM sequence: TGG
cttttcttgactcctaaagg

SEQ ID NO: 142066 - DNA, 20 bp, Artificial Sequence
  Description of Artificial Sequence: Synthetic oligonucleotide
  Target: LAMA2; (+) strand; PAM type: NRG; PAM sequence: CAG
ttcttgactcctaaaggtgg

SEQ ID NO: 142067 - DNA, 20 bp, Artificial Sequence
  Description of Artificial Sequence: Synthetic oligonucleotide
  Target: LAMA2; (+) strand; PAM type: NRG; PAM sequence: TGG
attcctctcccaaaatgtct

SEQ ID NO: 142068 - DNA, 20 bp, Artificial Sequence
  Description of Artificial Sequence: Synthetic oligonucleotide
  Target: LAMA2; (+) strand; PAM type: NRG; PAM sequence: AAG
caaaatgtcttggcatattc

SEQ ID NO: 142069 - DNA, 20 bp, Artificial Sequence
  Description of Artificial Sequence: Synthetic oligonucleotide
  Target: LAMA2; (+) strand; PAM type: NRG; PAM sequence: CAG
aatgtcttggcatattcaag

SEQ ID NO: 142070 - DNA, 20 bp, Artificial Sequence
  Description of Artificial Sequence: Synthetic oligonucleotide
  Target: LAMA2; (+) strand; PAM type: NRG; PAM sequence: CAG
ttggcatattcaagcagtta

SEQ ID NO: 142071 - DNA, 20 bp, Artificial Sequence
  Description of Artificial Sequence: Synthetic oligonucleotide
  Target: LAMA2; (+) strand; PAM type: NRG; PAM sequence: AGG
tggcatattcaagcagttac

SEQ ID NO: 142072 - DNA, 20 bp, Artificial Sequence
  Description of Artificial Sequence: Synthetic oligonucleotide
  Target: LAMA2; (+) strand; PAM type: NRG; PAM sequence: TAG
agcagttacaggcacataca

SEQ ID NO: 142073 - DNA, 20 bp, Artificial Sequence
  Description of Artificial Sequence: Synthetic oligonucleotide
  Target: LAMA2; (+) strand; PAM type: NRG; PAM sequence: CAG
tagatatgtgtgtctatctg

SEQ ID NO: 142074 - DNA, 20 bp, Artificial Sequence
  Description of Artificial Sequence: Synthetic oligonucleotide
  Target: LAMA2; (+) strand; PAM type: NRG; PAM sequence: CAG
ctttgtaaatataaattcat

SEQ ID NO: 142075 - DNA, 20 bp, Artificial Sequence
  Description of Artificial Sequence: Synthetic oligonucleotide
  Target: LAMA2; (+) strand; PAM type: NRG; PAM sequence: CAG
tcatcagtatttctcacctg

SEQ ID NO: 142076 - DNA, 20 bp, Artificial Sequence
  Description of Artificial Sequence: Synthetic oligonucleotide
  Target: LAMA2; (+) strand; PAM type: NRG; PAM sequence: CAG
tgcagtgatactcaataaaa

SEQ ID NO: 142077 - DNA, 20 bp, Artificial Sequence
  Description of Artificial Sequence: Synthetic oligonucleotide
  Target: LAMA2; (+) strand; PAM type: NRG; PAM sequence: AAG
tcaataaaacagaatgctca

SEQ ID NO: 142078 - DNA, 20 bp, Artificial Sequence
  Description of Artificial Sequence: Synthetic oligonucleotide
  Target: LAMA2; (+) strand; PAM type: NRG; PAM sequence: CAG
aaaacagaatgctcaaagcc

SEQ ID NO: 142079 - DNA, 20 bp, Artificial Sequence
  Description of Artificial Sequence: Synthetic oligonucleotide
  Target: LAMA2; (+) strand; PAM type: NRG; PAM sequence: CAG
tgctcaaagcccagacccct

SEQ ID NO: 142080 - DNA, 20 bp, Artificial Sequence
  Description of Artificial Sequence: Synthetic oligonucleotide
  Target: LAMA2; (+) strand; PAM type: NRG; PAM sequence: AGG
gctcaaagcccagacccctc

SEQ ID NO: 142081 - DNA, 20 bp, Artificial Sequence
  Description of Artificial Sequence: Synthetic oligonucleotide
  Target: LAMA2; (+) strand; PAM type: NRG; PAM sequence: TGG
acccctcaggacaaatatct

SEQ ID NO: 142082 - DNA, 20 bp, Artificial Sequence
  Description of Artificial Sequence: Synthetic oligonucleotide
  Target: LAMA2; (+) strand; PAM type: NRG; PAM sequence: TGG
cttggctgtccttgctatgc

SEQ ID NO: 142083 - DNA, 20 bp, Artificial Sequence
  Description of Artificial Sequence: Synthetic oligonucleotide
  Target: LAMA2; (+) strand; PAM type: NRG; PAM sequence: GGG
ttggctgtccttgctatgct

SEQ ID NO: 142084 - DNA, 20 bp, Artificial Sequence
  Description of Artificial Sequence: Synthetic oligonucleotide
  Target: LAMA2; (+) strand; PAM type: NRG; PAM sequence: GGG
tggctgtccttgctatgctg

SEQ ID NO: 142085 - DNA, 20 bp, Artificial Sequence
  Description of Artificial Sequence: Synthetic oligonucleotide
  Target: LAMA2; (+) strand; PAM type: NRG; PAM sequence: CAG
cttgctatgctggggtcaat

SEQ ID NO: 142086 - DNA, 20 bp, Artificial Sequence
  Description of Artificial Sequence: Synthetic oligonucleotide
  Target: LAMA2; (+) strand; PAM type: NRG; PAM sequence: TGG
ctatgctggggtcaatcaga

SEQ ID NO: 142087 - DNA, 20 bp, Artificial Sequence
  Description of Artificial Sequence: Synthetic oligonucleotide
  Target: LAMA2; (+) strand; PAM type: NRG; PAM sequence: CAG
tggggtcaatcagatggtct

SEQ ID NO: 142088 - DNA, 20 bp, Artificial Sequence
  Description of Artificial Sequence: Synthetic oligonucleotide
  Target: LAMA2; (+) strand; PAM type: NRG; PAM sequence: AGG
ggggtcaatcagatggtctc

SEQ ID NO: 142089 - DNA, 20 bp, Artificial Sequence
  Description of Artificial Sequence: Synthetic oligonucleotide
  Target: LAMA2; (+) strand; PAM type: NRG; PAM sequence: GGG
gggtcaatcagatggtctca

SEQ ID NO: 142090 - DNA, 20 bp, Artificial Sequence
  Description of Artificial Sequence: Synthetic oligonucleotide
  Target: LAMA2; (+) strand; PAM type: NRG; PAM sequence: GGG
ggtcaatcagatggtctcag

SEQ ID NO: 142091 - DNA, 20 bp, Artificial Sequence
  Description of Artificial Sequence: Synthetic oligonucleotide
  Target: LAMA2; (+) strand; PAM type: NRG; PAM sequence: GAG
tcaatcagatggtctcaggg

SEQ ID NO: 142092 - DNA, 20 bp, Artificial Sequence
  Description of Artificial Sequence: Synthetic oligonucleotide
  Target: LAMA2; (+) strand; PAM type: NRG; PAM sequence: GAG
aatcagatggtctcagggga

SEQ ID NO: 142093 - DNA, 20 bp, Artificial Sequence
  Description of Artificial Sequence: Synthetic oligonucleotide
  Target: LAMA2; (+) strand; PAM type: NRG; PAM sequence: AGG
atcagatggtctcaggggag

SEQ ID NO: 142094 - DNA, 20 bp, Artificial Sequence
  Description of Artificial Sequence: Synthetic oligonucleotide
  Target: LAMA2; (+) strand; PAM type: NRG; PAM sequence: GAG
cagatggtctcaggggagag

SEQ ID NO: 142095 - DNA, 20 bp, Artificial Sequence
  Description of Artificial Sequence: Synthetic oligonucleotide
  Target: LAMA2; (+) strand; PAM type: NRG; PAM sequence: AGG
agatggtctcaggggagagg

SEQ ID NO: 142096 - DNA, 20 bp, Artificial Sequence
  Description of Artificial Sequence: Synthetic oligonucleotide
  Target: LAMA2; (+) strand; PAM type: NRG; PAM sequence: TGG
ctcaggggagaggaggcatt

SEQ ID NO: 142097 - DNA, 20 bp, Artificial Sequence
  Description of Artificial Sequence: Synthetic oligonucleotide
  Target: LAMA2; (+) strand; PAM type: NRG; PAM sequence: GGG
tcaggggagaggaggcattt

SEQ ID NO: 142098 - DNA, 20 bp, Artificial Sequence
  Description of Artificial Sequence: Synthetic oligonucleotide
  Target: LAMA2; (+) strand; PAM type: NRG; PAM sequence: GAG
aggggagaggaggcatttgg

SEQ ID NO: 142099 - DNA, 20 bp, Artificial Sequence
  Description of Artificial Sequence: Synthetic oligonucleotide
  Target: LAMA2; (+) strand; PAM type: NRG; PAM sequence: AGG
ggggagaggaggcatttggg

SEQ ID NO: 142100 - DNA, 20 bp, Artificial Sequence
  Description of Artificial Sequence: Synthetic oligonucleotide
  Target: LAMA2; (+) strand; PAM type: NRG; PAM sequence: TGG
agaggaggcatttgggaggt

SEQ ID NO: 142101 - DNA, 20 bp, Artificial Sequence
  Description of Artificial Sequence: Synthetic oligonucleotide
  Target: LAMA2; (+) strand; PAM type: NRG; PAM sequence: GGG
gaggaggcatttgggaggtt

SEQ ID NO: 142102 - DNA, 20 bp, Artificial Sequence
  Description of Artificial Sequence: Synthetic oligonucleotide
  Target: LAMA2; (+) strand; PAM type: NRG; PAM sequence: CAG
gaggcatttgggaggttggg

SEQ ID NO: 142103 - DNA, 20 bp, Artificial Sequence
  Description of Artificial Sequence: Synthetic oligonucleotide
  Target: LAMA2; (+) strand; PAM type: NRG; PAM sequence: CAG
gcatttgggaggttgggcag

SEQ ID NO: 142104 - DNA, 20 bp, Artificial Sequence
  Description of Artificial Sequence: Synthetic oligonucleotide
  Target: LAMA2; (+) strand; PAM type: NRG; PAM sequence: AAG
ggcagcagtgatttgtcaac

SEQ ID NO: 142105 - DNA, 20 bp, Artificial Sequence
  Description of Artificial Sequence: Synthetic oligonucleotide
  Target: LAMA2; (+) strand; PAM type: NRG; PAM sequence: CAG
cagtgatttgtcaacaagta

SEQ ID NO: 142106 - DNA, 20 bp, Artificial Sequence
  Description of Artificial Sequence: Synthetic oligonucleotide
  Target: LAMA2; (+) strand; PAM type: NRG; PAM sequence: AAG
tgatttgtcaacaagtacag

SEQ ID NO: 142107 - DNA, 20 bp, Artificial Sequence
  Description of Artificial Sequence: Synthetic oligonucleotide
  Target: LAMA2; (+) strand; PAM type: NRG; PAM sequence: CAG
caacaagtacagaagcattt

SEQ ID NO: 142108 - DNA, 20 bp, Artificial Sequence
  Description of Artificial Sequence: Synthetic oligonucleotide
  Target: LAMA2; (+) strand; PAM type: NRG; PAM sequence: TAG
catttcagtattttatccac

SEQ ID NO: 142109 - DNA, 20 bp, Artificial Sequence
  Description of Artificial Sequence: Synthetic oligonucleotide
  Target: LAMA2; (+) strand; PAM type: NRG; PAM sequence: AAG
tgttccacaactgtgcctaa

SEQ ID NO: 142110 - DNA, 20 bp, Artificial Sequence
  Description of Artificial Sequence: Synthetic oligonucleotide
  Target: LAMA2; (+) strand; PAM type: NRG; PAM sequence: AGG
gttccacaactgtgcctaaa

SEQ ID NO: 142111 - DNA, 20 bp, Artificial Sequence
  Description of Artificial Sequence: Synthetic oligonucleotide
  Target: LAMA2; (+) strand; PAM type: NRG; PAM sequence: TGG
ccctactttgactcattcga

SEQ ID NO: 142112 - DNA, 20 bp, Artificial Sequence
  Description of Artificial Sequence: Synthetic oligonucleotide
  Target: LAMA2; (+) strand; PAM type: NRG; PAM sequence: GGG
cctactttgactcattcgat

SEQ ID NO: 142113 - DNA, 20 bp, Artificial Sequence
  Description of Artificial Sequence: Synthetic oligonucleotide
  Target: LAMA2; (+) strand; PAM type: NRG; PAM sequence: TGG
gatgggtgatttcccctcca

SEQ ID NO: 142114 - DNA, 20 bp, Artificial Sequence
  Description of Artificial Sequence: Synthetic oligonucleotide
  Target: LAMA2; (+) strand; PAM type: NRG; PAM sequence: AAG
atttcccctccatggctctc

SEQ ID NO: 142115 - DNA, 20 bp, Artificial Sequence
  Description of Artificial Sequence: Synthetic oligonucleotide
  Target: LAMA2; (+) strand; PAM type: NRG; PAM sequence: AAG
tctcaagcatgcatgcattc

SEQ ID NO: 142116 - DNA, 20 bp, Artificial Sequence
  Description of Artificial Sequence: Synthetic oligonucleotide
  Target: LAMA2; (+) strand; PAM type: NRG; PAM sequence: AAG
gcattcaagtaaacatcttg

SEQ ID NO: 142117 - DNA, 20 bp, Artificial Sequence
  Description of Artificial Sequence: Synthetic oligonucleotide
  Target: LAMA2; (+) strand; PAM type: NRG; PAM sequence: AGG
cattcaagtaaacatcttga

SEQ ID NO: 142118 - DNA, 20 bp, Artificial Sequence
  Description of Artificial Sequence: Synthetic oligonucleotide
  Target: LAMA2; (+) strand; PAM type: NRG; PAM sequence: TAG
aagtaaacatcttgaaggaa

SEQ ID NO: 142119 - DNA, 20 bp, Artificial Sequence
  Description of Artificial Sequence: Synthetic oligonucleotide
  Target: LAMA2; (+) strand; PAM type: NRG; PAM sequence: CAG
acatcttgaaggaatagcat

SEQ ID NO: 142120 - DNA, 20 bp, Artificial Sequence
  Description of Artificial Sequence: Synthetic oligonucleotide
  Target: LAMA2; (+) strand; PAM type: NRG; PAM sequence: GAG
atcttgaaggaatagcatca

SEQ ID NO: 142121 - DNA, 20 bp, Artificial Sequence
  Description of Artificial Sequence: Synthetic oligonucleotide
  Target: LAMA2; (+) strand; PAM type: NRG; PAM sequence: TAG
aatttttatatttttaaatc

SEQ ID NO: 142122 - DNA, 20 bp, Artificial Sequence
  Description of Artificial Sequence: Synthetic oligonucleotide
  Target: LAMA2; (+) strand; PAM type: NRG; PAM sequence: TAG
tatttttaaatctagtccct

SEQ ID NO: 142123 - DNA, 20 bp, Artificial Sequence
  Description of Artificial Sequence: Synthetic oligonucleotide
  Target: LAMA2; (+) strand; PAM type: NRG; PAM sequence: AGG
atttttaaatctagtccctt

SEQ ID NO: 142124 - DNA, 20 bp, Artificial Sequence
  Description of Artificial Sequence: Synthetic oligonucleotide
  Target: LAMA2; (+) strand; PAM type: NRG; PAM sequence: GGG
tttttaaatctagtccctta

SEQ ID NO: 142125 - DNA, 20 bp, Artificial Sequence
  Description of Artificial Sequence: Synthetic oligonucleotide
  Target: LAMA2; (+) strand; PAM type: NRG; PAM sequence: TAG
tagtcccttagggtatacca

SEQ ID NO: 142126 - DNA, 20 bp, Artificial Sequence
  Description of Artificial Sequence: Synthetic oligonucleotide
  Target: LAMA2; (+) strand; PAM type: NRG; PAM sequence: GAG
gatcctatacacgtatgcat

SEQ ID NO: 142127 - DNA, 20 bp, Artificial Sequence
  Description of Artificial Sequence: Synthetic oligonucleotide
  Target: LAMA2; (+) strand; PAM type: NRG; PAM sequence: AAG
gttaccatgtcaaaactatg

SEQ ID NO: 142128 - DNA, 20 bp, Artificial Sequence
  Description of Artificial Sequence: Synthetic oligonucleotide
  Target: LAMA2; (+) strand; PAM type: NRG; PAM sequence: CAG
accatgtcaaaactatgaag

SEQ ID NO: 142129 - DNA, 20 bp, Artificial Sequence
  Description of Artificial Sequence: Synthetic oligonucleotide
  Target: LAMA2; (+) strand; PAM type: NRG; PAM sequence: TAG
aagcagataaaatttgtttc

SEQ ID NO: 142130 - DNA, 20 bp, Artificial Sequence
  Description of Artificial Sequence: Synthetic oligonucleotide
  Target: LAMA2; (+) strand; PAM type: NRG; PAM sequence: GAG
gcagataaaatttgtttcta

SEQ ID NO: 142131 - DNA, 20 bp, Artificial Sequence
  Description of Artificial Sequence: Synthetic oligonucleotide
  Target: LAMA2; (+) strand; PAM type: NRG; PAM sequence: CAG
tgtttctagagcatcccttt

SEQ ID NO: 142132 - DNA, 20 bp, Artificial Sequence
  Description of Artificial Sequence: Synthetic oligonucleotide
  Target: LAMA2; (+) strand; PAM type: NRG; PAM sequence: AGG
gtttctagagcatccctttc

SEQ ID NO: 142133 - DNA, 20 bp, Artificial Sequence
  Description of Artificial Sequence: Synthetic oligonucleotide
  Target: LAMA2; (+) strand; PAM type: NRG; PAM sequence: TAG
ccctttcaggattccctctg

SEQ ID NO: 142134 - DNA, 20 bp, Artificial Sequence
  Description of Artificial Sequence: Synthetic oligonucleotide
  Target: LAMA2; (+) strand; PAM type: NRG; PAM sequence: CAG
tcaggattccctctgtagct

SEQ ID NO: 142135 - DNA, 20 bp, Artificial Sequence
  Description of Artificial Sequence: Synthetic oligonucleotide
  Target: LAMA2; (+) strand; PAM type: NRG; PAM sequence: CAG
ggattccctctgtagctcag

SEQ ID NO: 142136 - DNA, 20 bp, Artificial Sequence
  Description of Artificial Sequence: Synthetic oligonucleotide
  Target: LAMA2; (+) strand; PAM type: NRG; PAM sequence: TAG
cagtcctgttaatcacattg

SEQ ID NO: 142137 - DNA, 20 bp, Artificial Sequence
  Description of Artificial Sequence: Synthetic oligonucleotide
  Target: LAMA2; (+) strand; PAM type: NRG; PAM sequence: GAG
cctgttaatcacattgtagt

SEQ ID NO: 142138 - DNA, 20 bp, Artificial Sequence
  Description of Artificial Sequence: Synthetic oligonucleotide
  Target: LAMA2; (+) strand; PAM type: NRG; PAM sequence: CAG
tcctcccaattgtgccccac

SEQ ID NO: 142139 - DNA, 20 bp, Artificial Sequence
  Description of Artificial Sequence: Synthetic oligonucleotide
  Target: LAMA2; (+) strand; PAM type: NRG; PAM sequence: TAG
caccagtgacctcatccact

SEQ ID NO: 142140 - DNA, 20 bp, Artificial Sequence
  Description of Artificial Sequence: Synthetic oligonucleotide
  Target: LAMA2; (+) strand; PAM type: NRG; PAM sequence: GAG
ccagtgacctcatccactta

SEQ ID NO: 142141 - DNA, 20 bp, Artificial Sequence
  Description of Artificial Sequence: Synthetic oligonucleotide
  Target: LAMA2; (+) strand; PAM type: NRG; PAM sequence: TAG
gacctcatccacttagagct

SEQ ID NO: 142142 - DNA, 20 bp, Artificial Sequence
  Description of Artificial Sequence: Synthetic oligonucleotide
  Target: LAMA2; (+) strand; PAM type: NRG; PAM sequence: GAG
cctcatccacttagagctta

SEQ ID NO: 142143 - DNA, 20 bp, Artificial Sequence
  Description of Artificial Sequence: Synthetic oligonucleotide
  Target: LAMA2; (+) strand; PAM type: NRG; PAM sequence: AAG
acttagagcttagagctgcc

SEQ ID NO: 142144 - DNA, 20 bp, Artificial Sequence
  Description of Artificial Sequence: Synthetic oligonucleotide
  Target: LAMA2; (+) strand; PAM type: NRG; PAM sequence: TAG
tgccaagctctcatacctca

SEQ ID NO: 142145 - DNA, 20 bp, Artificial Sequence
  Description of Artificial Sequence: Synthetic oligonucleotide
  Target: LAMA2; (+) strand; PAM type: NRG; PAM sequence: TAG
tcatacctcatagcatttac

SEQ ID NO: 142146 - DNA, 20 bp, Artificial Sequence
  Description of Artificial Sequence: Synthetic oligonucleotide
  Target: LAMA2; (+) strand; PAM type: NRG; PAM sequence: AAG
cctcatagcatttactagtc

SEQ ID NO: 142147 - DNA, 20 bp, Artificial Sequence
  Description of Artificial Sequence: Synthetic oligonucleotide
  Target: LAMA2; (+) strand; PAM type: NRG; PAM sequence: TAG
atcatactgttttattatta

SEQ ID NO: 142148 - DNA, 20 bp, Artificial Sequence
  Description of Artificial Sequence: Synthetic oligonucleotide
  Target: LAMA2; (+) strand; PAM type: NRG; PAM sequence: TGG
atatattaacaacacattga

SEQ ID NO: 142149 - DNA, 20 bp, Artificial Sequence
  Description of Artificial Sequence: Synthetic oligonucleotide
  Target: LAMA2; (+) strand; PAM type: NRG; PAM sequence: TGG
tattaacaacacattgatgg

SEQ ID NO: 142150 - DNA, 20 bp, Artificial Sequence
  Description of Artificial Sequence: Synthetic oligonucleotide
  Target: LAMA2; (+) strand; PAM type: NRG; PAM sequence: TAG
acaacacattgatggtggaa

SEQ ID NO: 142151 - DNA, 20 bp, Artificial Sequence
  Description of Artificial Sequence: Synthetic oligonucleotide
  Target: LAMA2; (+) strand; PAM type: NRG; PAM sequence: TAG
ttcatatctgtctttctacc

SEQ ID NO: 142152 - DNA, 20 bp, Artificial Sequence
  Description of Artificial Sequence: Synthetic oligonucleotide
  Target: LAMA2; (+) strand; PAM type: NRG; PAM sequence: TGG
atgtttcttcactattcttt

SEQ ID NO: 142153 - DNA, 20 bp, Artificial Sequence
  Description of Artificial Sequence: Synthetic oligonucleotide
  Target: LAMA2; (+) strand; PAM type: NRG; PAM sequence: TGG
actattcttttggactacat

SEQ ID NO: 142154 - DNA, 20 bp, Artificial Sequence
  Description of Artificial Sequence: Synthetic oligonucleotide
  Target: LAMA2; (+) strand; PAM type: NRG; PAM sequence: AAG
tcttttggactacattggta

SEQ ID NO: 142155 - DNA, 20 bp, Artificial Sequence
  Description of Artificial Sequence: Synthetic oligonucleotide
  Target: LAMA2; (+) strand; PAM type: NRG; PAM sequence: CAG
ggactacattggtaaagaca

SEQ ID NO: 142156 - DNA, 20 bp, Artificial Sequence
  Description of Artificial Sequence: Synthetic oligonucleotide
  Target: LAMA2; (+) strand; PAM type: NRG; PAM sequence: TAG
atgcactaccacaaaacatc

SEQ ID NO: 142157 - DNA, 20 bp, Artificial Sequence
  Description of Artificial Sequence: Synthetic oligonucleotide
  Target: LAMA2; (+) strand; PAM type: NRG; PAM sequence: TAG
attctatataaatttgtaaa

SEQ ID NO: 142158 - DNA, 20 bp, Artificial Sequence
  Description of Artificial Sequence: Synthetic oligonucleotide
  Target: LAMA2; (+) strand; PAM type: NRG; PAM sequence: GAG
tctatataaatttgtaaata

SEQ ID NO: 142159 - DNA, 20 bp, Artificial Sequence
  Description of Artificial Sequence: Synthetic oligonucleotide
  Target: LAMA2; (+) strand; PAM type: NRG; PAM sequence: CAG
ctccattgtcactctgttaa

SEQ ID NO: 142160 - DNA, 20 bp, Artificial Sequence
  Description of Artificial Sequence: Synthetic oligonucleotide
  Target: LAMA2; (+) strand; PAM type: NRG; PAM sequence: AAG
ttgcatgtttaccttttgta

SEQ ID NO: 142161 - DNA, 20 bp, Artificial Sequence
  Description of Artificial Sequence: Synthetic oligonucleotide
  Target: LAMA2; (+) strand; PAM type: NRG; PAM sequence: GAG
gcatgtttaccttttgtaaa

SEQ ID NO: 142162 - DNA, 20 bp, Artificial Sequence
  Description of Artificial Sequence: Synthetic oligonucleotide
  Target: LAMA2; (+) strand; PAM type: NRG; PAM sequence: AAG
tgtttaccttttgtaaagag

SEQ ID NO: 142163 - DNA, 20 bp, Artificial Sequence
  Description of Artificial Sequence: Synthetic oligonucleotide
  Target: LAMA2; (+) strand; PAM type: NRG; PAM sequence: AGG
gtttaccttttgtaaagaga

SEQ ID NO: 142164 - DNA, 20 bp, Artificial Sequence
  Description of Artificial Sequence: Synthetic oligonucleotide
  Target: LAMA2; (+) strand; PAM type: NRG; PAM sequence: CAG
ccttttgtaaagagaaggta

SEQ ID NO: 142165 - DNA, 20 bp, Artificial Sequence
  Description of Artificial Sequence: Synthetic oligonucleotide
  Target: LAMA2; (+) strand; PAM type: NRG; PAM sequence: CAG
acccttcatttaatgtgttt

SEQ ID NO: 142166 - DNA, 20 bp, Artificial Sequence
  Description of Artificial Sequence: Synthetic oligonucleotide
  Target: LAMA2; (+) strand; PAM type: NRG; PAM sequence: AGG
cccttcatttaatgtgtttc

SEQ ID NO: 142167 - DNA, 20 bp, Artificial Sequence
  Description of Artificial Sequence: Synthetic oligonucleotide
  Target: LAMA2; (+) strand; PAM type: NRG; PAM sequence: TGG
atccgttgtcttcataacac

SEQ ID NO: 142168 - DNA, 20 bp, Artificial Sequence
  Description of Artificial Sequence: Synthetic oligonucleotide
  Target: LAMA2; (+) strand; PAM type: NRG; PAM sequence: TGG
ctcctccattattttctatt

SEQ ID NO: 142169 - DNA, 20 bp, Artificial Sequence
  Description of Artificial Sequence: Synthetic oligonucleotide
  Target: LAMA2; (+) strand; PAM type: NRG; PAM sequence: GGG
tcctccattattttctattt

SEQ ID NO: 142170 - DNA, 20 bp, Artificial Sequence
  Description of Artificial Sequence: Synthetic oligonucleotide
  Target: LAMA2; (+) strand; PAM type: NRG; PAM sequence: GGG
cctccattattttctatttg

SEQ ID NO: 142171 - DNA, 20 bp, Artificial Sequence
  Description of Artificial Sequence: Synthetic oligonucleotide
  Target: LAMA2; (+) strand; PAM type: NRG; PAM sequence: AAG
attttctatttggggatgta

SEQ ID NO: 142172 - DNA, 20 bp, Artificial Sequence
  Description of Artificial Sequence: Synthetic oligonucleotide
  Target: LAMA2; (+) strand; PAM type: NRG; PAM sequence: AGG
ttttctatttggggatgtaa

SEQ ID NO: 142173 - DNA, 20 bp, Artificial Sequence
  Description of Artificial Sequence: Synthetic oligonucleotide
  Target: LAMA2; (+) strand; PAM type: NRG; PAM sequence: TGG
tatttggggatgtaaaggaa

SEQ ID NO: 142174 - DNA, 20 bp, Artificial Sequence
  Description of Artificial Sequence: Synthetic oligonucleotide
  Target: LAMA2; (+) strand; PAM type: NRG; PAM sequence: GAG
taaaggaatggacatttatt

SEQ ID NO: 142175 - DNA, 20 bp, Artificial Sequence
  Description of Artificial Sequence: Synthetic oligonucleotide
  Target: LAMA2; (+) strand; PAM type: NRG; PAM sequence: AGG
aaaggaatggacatttattg

SEQ ID NO: 142176 - DNA, 20 bp, Artificial Sequence
  Description of Artificial Sequence: Synthetic oligonucleotide
  Target: LAMA2; (+) strand; PAM type: NRG; PAM sequence: TAG
aggatttactgccacaatgc

SEQ ID NO: 142177 - DNA, 20 bp, Artificial Sequence
  Description of Artificial Sequence: Synthetic oligonucleotide
  Target: LAMA2; (+) strand; PAM type: NRG; PAM sequence: TAG
ctagaaccacaatctgaaca

SEQ ID NO: 142178 - DNA, 20 bp, Artificial Sequence
  Description of Artificial Sequence: Synthetic oligonucleotide
  Target: LAMA2; (+) strand; PAM type: NRG; PAM sequence: AGG
tagaaccacaatctgaacat

SEQ ID NO: 142179 - DNA, 20 bp, Artificial Sequence
  Description of Artificial Sequence: Synthetic oligonucleotide
  Target: LAMA2; (+) strand; PAM type: NRG; PAM sequence: TGG
ccatactaactgcctctaaa

SEQ ID NO: 142180 - DNA, 20 bp, Artificial Sequence
  Description of Artificial Sequence: Synthetic oligonucleotide
  Target: LAMA2; (+) strand; PAM type: NRG; PAM sequence: GAG
cctctaaatggcactttttt

SEQ ID NO: 142181 - DNA, 20 bp, Artificial Sequence
  Description of Artificial Sequence: Synthetic oligonucleotide
  Target: LAMA2; (+) strand; PAM type: NRG; PAM sequence: AGG
ctctaaatggcacttttttg

SEQ ID NO: 142182 - DNA, 20 bp, Artificial Sequence
  Description of Artificial Sequence: Synthetic oligonucleotide
  Target: LAMA2; (+) strand; PAM type: NRG; PAM sequence: AAG
ttttgaggattatgtgatat

SEQ ID NO: 142183 - DNA, 20 bp, Artificial Sequence
  Description of Artificial Sequence: Synthetic oligonucleotide
  Target: LAMA2; (+) strand; PAM type: NRG; PAM sequence: AAG
attatgtgatataagtaaac

SEQ ID NO: 142184 - DNA, 20 bp, Artificial Sequence
  Description of Artificial Sequence: Synthetic oligonucleotide
  Target: LAMA2; (+) strand; PAM type: NRG; PAM sequence: AAG
aacaagttttctaaactatc

SEQ ID NO: 142185 - DNA, 20 bp, Artificial Sequence
  Description of Artificial Sequence: Synthetic oligonucleotide
  Target: LAMA2; (+) strand; PAM type: NRG; PAM sequence: TGG
ctatcaagcactattcacac

SEQ ID NO: 142186 - DNA, 20 bp, Artificial Sequence
  Description of Artificial Sequence: Synthetic oligonucleotide
  Target: LAMA2; (+) strand; PAM type: NRG; PAM sequence: GGG
tatcaagcactattcacact

SEQ ID NO: 142187 - DNA, 20 bp, Artificial Sequence
  Description of Artificial Sequence: Synthetic oligonucleotide
  Target: LAMA2; (+) strand; PAM type: NRG; PAM sequence: TAG
ctattcacactgggaatttc

SEQ ID NO: 142188 - DNA, 20 bp, Artificial Sequence
  Description of Artificial Sequence: Synthetic oligonucleotide
  Target: LAMA2; (+) strand; PAM type: NRG; PAM sequence: CAG
aatttctagcttgtatttta

SEQ ID NO: 142189 - DNA, 20 bp, Artificial Sequence
  Description of Artificial Sequence: Synthetic oligonucleotide
  Target: LAMA2; (+) strand; PAM type: NRG; PAM sequence: CAG
gtattttacagtctttaaca

SEQ ID NO: 142190 - DNA, 20 bp, Artificial Sequence
  Description of Artificial Sequence: Synthetic oligonucleotide
  Target: LAMA2; (+) strand; PAM type: NRG; PAM sequence: AAG
tttacagtctttaacacagt

SEQ ID NO: 142191 - DNA, 20 bp, Artificial Sequence
  Description of Artificial Sequence: Synthetic oligonucleotide
  Target: LAMA2; (+) strand; PAM type: NRG; PAM sequence: AGG
ttacagtctttaacacagta

SEQ ID NO: 142192 - DNA, 20 bp, Artificial Sequence
  Description of Artificial Sequence: Synthetic oligonucleotide
  Target: LAMA2; (+) strand; PAM type: NRG; PAM sequence: GAG
agtctttaacacagtaaggt

SEQ ID NO: 142193 - DNA, 20 bp, Artificial Sequence
  Description of Artificial Sequence: Synthetic oligonucleotide
  Target: LAMA2; (+) strand; PAM type: NRG; PAM sequence: TGG
acacagtaaggtgagtaaat

SEQ ID NO: 142194 - DNA, 20 bp, Artificial Sequence
  Description of Artificial Sequence: Synthetic oligonucleotide
  Target: LAMA2; (+) strand; PAM type: NRG; PAM sequence: TAG
tgtactattaataaatgttt

SEQ ID NO: 142195 - DNA, 20 bp, Artificial Sequence
  Description of Artificial Sequence: Synthetic oligonucleotide
  Target: LAMA2; (+) strand; PAM type: NRG; PAM sequence: AGG
gtactattaataaatgtttt

SEQ ID NO: 142196 - DNA, 20 bp, Artificial Sequence
  Description of Artificial Sequence: Synthetic oligonucleotide
  Target: LAMA2; (+) strand; PAM type: NRG; PAM sequence: TGG
ctattaataaatgttttagg

SEQ ID NO: 142197 - DNA, 20 bp, Artificial Sequence
  Description of Artificial Sequence: Synthetic oligonucleotide
  Target: LAMA2; (+) strand; PAM type: NRG; PAM sequence: TGG
ttaggtggtaataattataa

SEQ ID NO: 142198 - DNA, 20 bp, Artificial Sequence
  Description of Artificial Sequence: Synthetic oligonucleotide
  Target: LAMA2; (+) strand; PAM type: NRG; PAM sequence: CAG
tataatggaactttaaacat

SEQ ID NO: 142199 - DNA, 20 bp, Artificial Sequence
  Description of Artificial Sequence: Synthetic oligonucleotide
  Target: LAMA2; (+) strand; PAM type: NRG; PAM sequence: AGG
ataatggaactttaaacatc

SEQ ID NO: 142200 - DNA, 20 bp, Artificial Sequence
  Description of Artificial Sequence: Synthetic oligonucleotide
  Target: LAMA2; (+) strand; PAM type: NRG; PAM sequence: GAG
tcaggtgaaatgttgccaat

SEQ ID NO: 142201 - DNA, 20 bp, Artificial Sequence
  Description of Artificial Sequence: Synthetic oligonucleotide
  Target: LAMA2; (+) strand; PAM type: NRG; PAM sequence: CAG
aatgagttgttactaaaatc

SEQ ID NO: 142202 - DNA, 20 bp, Artificial Sequence
  Description of Artificial Sequence: Synthetic oligonucleotide
  Target: LAMA2; (+) strand; PAM type: NRG; PAM sequence: AAG
gtcttaatccatttctttta

SEQ ID NO: 142203 - DNA, 20 bp, Artificial Sequence
  Description of Artificial Sequence: Synthetic oligonucleotide
  Target: LAMA2; (+) strand; PAM type: NRG; PAM sequence: TGG
atccatttcttttaaagcca

SEQ ID NO: 142204 - DNA, 20 bp, Artificial Sequence
  Description of Artificial Sequence: Synthetic oligonucleotide
  Target: LAMA2; (+) strand; PAM type: NRG; PAM sequence: TAG
caaaacaaaacatcacttct

SEQ ID NO: 142205 - DNA, 20 bp, Artificial Sequence
  Description of Artificial Sequence: Synthetic oligonucleotide
  Target: LAMA2; (+) strand; PAM type: NRG; PAM sequence: TAG
acttcttagcaaaaaattat

SEQ ID NO: 142206 - DNA, 20 bp, Artificial Sequence
  Description of Artificial Sequence: Synthetic oligonucleotide
  Target: LAMA2; (+) strand; PAM type: NRG; PAM sequence: TAG
tattagatatgaacctgtaa

SEQ ID NO: 142207 - DNA, 20 bp, Artificial Sequence
  Description of Artificial Sequence: Synthetic oligonucleotide
  Target: LAMA2; (+) strand; PAM type: NRG; PAM sequence: CAG
ctgtaatagtaaaatcattt

SEQ ID NO: 142208 - DNA, 20 bp, Artificial Sequence
  Description of Artificial Sequence: Synthetic oligonucleotide
  Target: LAMA2; (+) strand; PAM type: NRG; PAM sequence: GAG
gtaatagtaaaatcatttca

SEQ ID NO: 142209 - DNA, 20 bp, Artificial Sequence
  Description of Artificial Sequence: Synthetic oligonucleotide
  Target: LAMA2; (+) strand; PAM type: NRG; PAM sequence: AAG
atcatttcagagaacattat

SEQ ID NO: 142210 - DNA, 20 bp, Artificial Sequence
  Description of Artificial Sequence: Synthetic oligonucleotide
  Target: LAMA2; (+) strand; PAM type: NRG; PAM sequence: TAG
cagagaacattataagatta

SEQ ID NO: 142211 - DNA, 20 bp, Artificial Sequence
  Description of Artificial Sequence: Synthetic oligonucleotide
  Target: LAMA2; (+) strand; PAM type: NRG; PAM sequence: TAG
atctgaaataaaatctactg

SEQ ID NO: 142212 - DNA, 20 bp, Artificial Sequence
  Description of Artificial Sequence: Synthetic oligonucleotide
  Target: LAMA2; (+) strand; PAM type: NRG; PAM sequence: TAG
ataaaatctactgtagcatt

SEQ ID NO: 142213 - DNA, 20 bp, Artificial Sequence
  Description of Artificial Sequence: Synthetic oligonucleotide
  Target: LAMA2; (+) strand; PAM type: NRG; PAM sequence: GAG
tatatttgacataaaatgat

SEQ ID NO: 142214 - DNA, 20 bp, Artificial Sequence
  Description of Artificial Sequence: Synthetic oligonucleotide
  Target: LAMA2; (+) strand; PAM type: NRG; PAM sequence: TGG
cataaaatgatgagaatatt

SEQ ID NO: 142215 - DNA, 20 bp, Artificial Sequence
  Description of Artificial Sequence: Synthetic oligonucleotide
  Target: LAMA2; (+) strand; PAM type: NRG; PAM sequence: GGG
ataaaatgatgagaatattt

SEQ ID NO: 142216 - DNA, 20 bp, Artificial Sequence
  Description of Artificial Sequence: Synthetic oligonucleotide
  Target: LAMA2; (+) strand; PAM type: NRG; PAM sequence: TAG
ttgttgttgttatacttccc

SEQ ID NO: 142217 - DNA, 20 bp, Artificial Sequence
  Description of Artificial Sequence: Synthetic oligonucleotide
  Target: LAMA2; (+) strand; PAM type: NRG; PAM sequence: AGG
tgttgttgttatacttccct

SEQ ID NO: 142218 - DNA, 20 bp, Artificial Sequence
  Description of Artificial Sequence: Synthetic oligonucleotide
  Target: LAMA2; (+) strand; PAM type: NRG; PAM sequence: CAG
ttatacttccctaggtgttc

SEQ ID NO: 142219 - DNA, 20 bp, Artificial Sequence
  Description of Artificial Sequence: Synthetic oligonucleotide
  Target: LAMA2; (+) strand; PAM type: NRG; PAM sequence: AAG
agatcgcgtatgtgattgtg

SEQ ID NO: 142220 - DNA, 20 bp, Artificial Sequence
  Description of Artificial Sequence: Synthetic oligonucleotide
  Target: LAMA2; (+) strand; PAM type: NRG; PAM sequence: AGG
gatcgcgtatgtgattgtga

SEQ ID NO: 142221 - DNA, 20 bp, Artificial Sequence
  Description of Artificial Sequence: Synthetic oligonucleotide
  Target: LAMA2; (+) strand; PAM type: NRG; PAM sequence: CAG
cgcgtatgtgattgtgaagg

SEQ ID NO: 142222 - DNA, 20 bp, Artificial Sequence
  Description of Artificial Sequence: Synthetic oligonucleotide
  Target: LAMA2; (+) strand; PAM type: NRG; PAM sequence: CGG
tgaaggcagctaactccccc

SEQ ID NO: 142223 - DNA, 20 bp, Artificial Sequence
  Description of Artificial Sequence: Synthetic oligonucleotide
  Target: LAMA2; (+) strand; PAM type: NRG; PAM sequence: TGG
gcagctaactccccccggcc

SEQ ID NO: 142224 - DNA, 20 bp, Artificial Sequence
  Description of Artificial Sequence: Synthetic oligonucleotide
  Target: LAMA2; (+) strand; PAM type: NRG; PAM sequence: TGG
actccccccggcctggaaac

SEQ ID NO: 142225 - DNA, 20 bp, Artificial Sequence
  Description of Artificial Sequence: Synthetic oligonucleotide
  Target: LAMA2; (+) strand; PAM type: NRG; PAM sequence: TGG
ccggcctggaaactggattt

SEQ ID NO: 142226 - DNA, 20 bp, Artificial Sequence
  Description of Artificial Sequence: Synthetic oligonucleotide
  Target: LAMA2; (+) strand; PAM type: NRG; PAM sequence: AAG
ctcttgatgatgttgaatac

SEQ ID NO: 142227 - DNA, 20 bp, Artificial Sequence
  Description of Artificial Sequence: Synthetic oligonucleotide
  Target: LAMA2; (+) strand; PAM type: NRG; PAM sequence: TGG
atgatgttgaatacaagccc

SEQ ID NO: 142228 - DNA, 20 bp, Artificial Sequence
  Description of Artificial Sequence: Synthetic oligonucleotide
  Target: LAMA2; (+) strand; PAM type: NRG; PAM sequence: CAG
atgttgaatacaagccctgg

SEQ ID NO: 142229 - DNA, 20 bp, Artificial Sequence
  Description of Artificial Sequence: Synthetic oligonucleotide
  Target: LAMA2; (+) strand; PAM type: NRG; PAM sequence: CAG
ctggcagtatcatgctgtga

SEQ ID NO: 142230 - DNA, 20 bp, Artificial Sequence
  Description of Artificial Sequence: Synthetic oligonucleotide
  Target: LAMA2; (+) strand; PAM type: NRG; PAM sequence: CGG
gtatcatgctgtgacagaca

SEQ ID NO: 142231 - DNA, 20 bp, Artificial Sequence
  Description of Artificial Sequence: Synthetic oligonucleotide
  Target: LAMA2; (+) strand; PAM type: NRG; PAM sequence: GAG
atcatgctgtgacagacacg

SEQ ID NO: 142232 - DNA, 20 bp, Artificial Sequence
  Description of Artificial Sequence: Synthetic oligonucleotide
  Target: LAMA2; (+) strand; PAM type: NRG; PAM sequence: TGG
tacaatatttatccccgcac

SEQ ID NO: 142233 - DNA, 20 bp, Artificial Sequence
  Description of Artificial Sequence: Synthetic oligonucleotide
  Target: LAMA2; (+) strand; PAM type: NRG; PAM sequence: GGG
acaatatttatccccgcact

SEQ ID NO: 142234 - DNA, 20 bp, Artificial Sequence
  Description of Artificial Sequence: Synthetic oligonucleotide
  Target: LAMA2; (+) strand; PAM type: NRG; PAM sequence: AAG
tgggccaccgtcatatgcca

SEQ ID NO: 142235 - DNA, 20 bp, Artificial Sequence
  Description of Artificial Sequence: Synthetic oligonucleotide
  Target: LAMA2; (+) strand; PAM type: NRG; PAM sequence: GAG
cgtcatatgccaaagatgat

SEQ ID NO: 142236 - DNA, 20 bp, Artificial Sequence
  Description of Artificial Sequence: Synthetic oligonucleotide
  Target: LAMA2; (+) strand; PAM type: NRG; PAM sequence: AGG
gtcatatgccaaagatgatg

SEQ ID NO: 142237 - DNA, 20 bp, Artificial Sequence
  Description of Artificial Sequence: Synthetic oligonucleotide
  Target: LAMA2; (+) strand; PAM type: NRG; PAM sequence: AAG
tctgcacttcattttactcc

SEQ ID NO: 142238 - DNA, 20 bp, Artificial Sequence
  Description of Artificial Sequence: Synthetic oligonucleotide
  Target: LAMA2; (+) strand; PAM type: NRG; PAM sequence: TAG
ttactccaagatacacccct

SEQ ID NO: 142239 - DNA, 20 bp, Artificial Sequence
  Description of Artificial Sequence: Synthetic oligonucleotide
  Target: LAMA2; (+) strand; PAM type: NRG; PAM sequence: TGG
aagatacaccccttagaaaa

SEQ ID NO: 142240 - DNA, 20 bp, Artificial Sequence
  Description of Artificial Sequence: Synthetic oligonucleotide
  Target: LAMA2; (+) strand; PAM type: NRG; PAM sequence: GAG
gatacaccccttagaaaatg

SEQ ID NO: 142241 - DNA, 20 bp, Artificial Sequence
  Description of Artificial Sequence: Synthetic oligonucleotide
  Target: LAMA2; (+) strand; PAM type: NRG; PAM sequence: GAG
tacaccccttagaaaatgga

SEQ ID NO: 142242 - DNA, 20 bp, Artificial Sequence
  Description of Artificial Sequence: Synthetic oligonucleotide
  Target: LAMA2; (+) strand; PAM type: NRG; PAM sequence: AGG
acaccccttagaaaatggag

SEQ ID NO: 142243 - DNA, 20 bp, Artificial Sequence
  Description of Artificial Sequence: Synthetic oligonucleotide
  Target: LAMA2; (+) strand; PAM type: NRG; PAM sequence: AAG
cccttagaaaatggagaggt

SEQ ID NO: 142244 - DNA, 20 bp, Artificial Sequence
  Description of Artificial Sequence: Synthetic oligonucleotide
  Target: LAMA2; (+) strand; PAM type: NRG; PAM sequence: GAG
agaaaatggagaggtaagat

SEQ ID NO: 142245 - DNA, 20 bp, Artificial Sequence
  Description of Artificial Sequence: Synthetic oligonucleotide
  Target: LAMA2; (+) strand; PAM type: NRG; PAM sequence: AAG
gatgagaaaactcaccattt

SEQ ID NO: 142246 - DNA, 20 bp, Artificial Sequence
  Description of Artificial Sequence: Synthetic oligonucleotide
  Target: LAMA2; (+) strand; PAM type: NRG; PAM sequence: CGG
ccatttaagcacatttgata

SEQ ID NO: 142247 - DNA, 20 bp, Artificial Sequence
  Description of Artificial Sequence: Synthetic oligonucleotide
  Target: LAMA2; (+) strand; PAM type: NRG; PAM sequence: TAG
gcacatttgatacggtgaaa

SEQ ID NO: 142248 - DNA, 20 bp, Artificial Sequence
  Description of Artificial Sequence: Synthetic oligonucleotide
  Target: LAMA2; (+) strand; PAM type: NRG; PAM sequence: AGG
cacatttgatacggtgaaat

SEQ ID NO: 142249 - DNA, 20 bp, Artificial Sequence
  Description of Artificial Sequence: Synthetic oligonucleotide
  Target: LAMA2; (+) strand; PAM type: NRG; PAM sequence: CAG
atacggtgaaataggcctgt

SEQ ID NO: 142250 - DNA, 20 bp, Artificial Sequence
  Description of Artificial Sequence: Synthetic oligonucleotide
  Target: LAMA2; (+) strand; PAM type: NRG; PAM sequence: AAG
ggtgaaataggcctgtcaga

SEQ ID NO: 142251 - DNA, 20 bp, Artificial Sequence
  Description of Artificial Sequence: Synthetic oligonucleotide
  Target: LAMA2; (+) strand; PAM type: NRG; PAM sequence: CAG
tcagaaagacctgaatatat

SEQ ID NO: 142252 - DNA, 20 bp, Artificial Sequence
  Description of Artificial Sequence: Synthetic oligonucleotide
  Target: LAMA2; (+) strand; PAM type: NRG; PAM sequence: CAG
aatatatcagtaattaatgt

SEQ ID NO: 142253 - DNA, 20 bp, Artificial Sequence
  Description of Artificial Sequence: Synthetic oligonucleotide
  Target: LAMA2; (+) strand; PAM type: NRG; PAM sequence: AGG
atatatcagtaattaatgtc

SEQ ID NO: 142254 - DNA, 20 bp, Artificial Sequence
  Description of Artificial Sequence: Synthetic oligonucleotide
  Target: LAMA2; (+) strand; PAM type: NRG; PAM sequence: GGG
tatatcagtaattaatgtca

SEQ ID NO: 142255 - DNA, 20 bp, Artificial Sequence
  Description of Artificial Sequence: Synthetic oligonucleotide
  Target: LAMA2; (+) strand; PAM type: NRG; PAM sequence: GAG
tatcagtaattaatgtcagg

SEQ ID NO: 142256 - DNA, 20 bp, Artificial Sequence
  Description of Artificial Sequence: Synthetic oligonucleotide
  Target: LAMA2; (+) strand; PAM type: NRG; PAM sequence: TAG
atgtcagggagattttaaaa

SEQ ID NO: 142257 - DNA, 20 bp, Artificial Sequence
  Description of Artificial Sequence: Synthetic oligonucleotide
  Target: LAMA2; (+) strand; PAM type: NRG; PAM sequence: AGG
tgtcagggagattttaaaat

SEQ ID NO: 142258 - DNA, 20 bp, Artificial Sequence
  Description of Artificial Sequence: Synthetic oligonucleotide
  Target: LAMA2; (+) strand; PAM type: NRG; PAM sequence: TAG
ggagattttaaaataggatt

SEQ ID NO: 142259 - DNA, 20 bp, Artificial Sequence
  Description of Artificial Sequence: Synthetic oligonucleotide
  Target: LAMA2; (+) strand; PAM type: NRG; PAM sequence: AAG
tttaaaataggatttagcaa

SEQ ID NO: 142260 - DNA, 20 bp, Artificial Sequence
  Description of Artificial Sequence: Synthetic oligonucleotide
  Target: LAMA2; (+) strand; PAM type: NRG; PAM sequence: GAG
tagcaaaagtacatttaaat

SEQ ID NO: 142261 - DNA, 20 bp, Artificial Sequence
  Description of Artificial Sequence: Synthetic oligonucleotide
  Target: LAMA2; (+) strand; PAM type: NRG; PAM sequence: AAG
aaatgagttattaaataaaa

SEQ ID NO: 142262 - DNA, 20 bp, Artificial Sequence
  Description of Artificial Sequence: Synthetic oligonucleotide
  Target: LAMA2; (+) strand; PAM type: NRG; PAM sequence: GAG
taaataaaaaagaaaaacct

SEQ ID NO: 142263 - DNA, 20 bp, Artificial Sequence
  Description of Artificial Sequence: Synthetic oligonucleotide
  Target: LAMA2; (+) strand; PAM type: NRG; PAM sequence: AGG
aaataaaaaagaaaaacctg

SEQ ID NO: 142264 - DNA, 20 bp, Artificial Sequence
  Description of Artificial Sequence: Synthetic oligonucleotide
  Target: LAMA2; (+) strand; PAM type: NRG; PAM sequence: TAG
aaagaaaaacctgaggtgat

SEQ ID NO: 142265 - DNA, 20 bp, Artificial Sequence
  Description of Artificial Sequence: Synthetic oligonucleotide
  Target: LAMA2; (+) strand; PAM type: NRG; PAM sequence: CAG
cttcatgtgtctcccatctc

SEQ ID NO: 142266 - DNA, 20 bp, Artificial Sequence
  Description of Artificial Sequence: Synthetic oligonucleotide
  Target: LAMA2; (+) strand; PAM type: NRG; PAM sequence: AAG
tgtgtctcccatctccagta

SEQ ID NO: 142267 - DNA, 20 bp, Artificial Sequence
  Description of Artificial Sequence: Synthetic oligonucleotide
  Target: LAMA2; (+) strand; PAM type: NRG; PAM sequence: CAG
ctcccatctccagtaaagat

SEQ ID NO: 142268 - DNA, 20 bp, Artificial Sequence
  Description of Artificial Sequence: Synthetic oligonucleotide
  Target: LAMA2; (+) strand; PAM type: NRG; PAM sequence: GAG
cccatctccagtaaagatca

SEQ ID NO: 142269 - DNA, 20 bp, Artificial Sequence
  Description of Artificial Sequence: Synthetic oligonucleotide
  Target: LAMA2; (+) strand; PAM type: NRG; PAM sequence: AAG
atctccagtaaagatcagag

SEQ ID NO: 142270 - DNA, 20 bp, Artificial Sequence
  Description of Artificial Sequence: Synthetic oligonucleotide
  Target: LAMA2; (+) strand; PAM type: NRG; PAM sequence: GAG
ctccagtaaagatcagagaa

SEQ ID NO: 142271 - DNA, 20 bp, Artificial Sequence
  Description of Artificial Sequence: Synthetic oligonucleotide
  Target: LAMA2; (+) strand; PAM type: NRG; PAM sequence: AGG
tccagtaaagatcagagaag

SEQ ID NO: 142272 - DNA, 20 bp, Artificial Sequence
  Description of Artificial Sequence: Synthetic oligonucleotide
  Target: LAMA2; (+) strand; PAM type: NRG; PAM sequence: TAG
aaagatcagagaagaggaaa

SEQ ID NO: 142273 - DNA, 20 bp, Artificial Sequence
  Description of Artificial Sequence: Synthetic oligonucleotide
  Target: LAMA2; (+) strand; PAM type: NRG; PAM sequence: AGG
aagatcagagaagaggaaat

SEQ ID NO: 142274 - DNA, 20 bp, Artificial Sequence
  Description of Artificial Sequence: Synthetic oligonucleotide
  Target: LAMA2; (+) strand; PAM type: NRG; PAM sequence: TGG
aagaggaaataggtttaatc

SEQ ID NO: 142275 - DNA, 20 bp, Artificial Sequence
  Description of Artificial Sequence: Synthetic oligonucleotide
  Target: LAMA2; (+) strand; PAM type: NRG; PAM sequence: AAG
ggaaataggtttaatctgga

SEQ ID NO: 142276 - DNA, 20 bp, Artificial Sequence
  Description of Artificial Sequence: Synthetic oligonucleotide
  Target: LAMA2; (+) strand; PAM type: NRG; PAM sequence: AAG
aatgattaattttacatata

SEQ ID NO: 142277 - DNA, 20 bp, Artificial Sequence
  Description of Artificial Sequence: Synthetic oligonucleotide
  Target: LAMA2; (+) strand; PAM type: NRG; PAM sequence: GAG
tgattaattttacatataaa

SEQ ID NO: 142278 - DNA, 20 bp, Artificial Sequence
  Description of Artificial Sequence: Synthetic oligonucleotide
  Target: LAMA2; (+) strand; PAM type: NRG; PAM sequence: GAG
aaagagactttctcaacaat

SEQ ID NO: 142279 - DNA, 20 bp, Artificial Sequence
  Description of Artificial Sequence: Synthetic oligonucleotide
  Target: LAMA2; (+) strand; PAM type: NRG; PAM sequence: AGG
aagagactttctcaacaatg

SEQ ID NO: 142280 - DNA, 20 bp, Artificial Sequence
  Description of Artificial Sequence: Synthetic oligonucleotide
  Target: LAMA2; (+) strand; PAM type: NRG; PAM sequence: TAG
caatgaggattgctaatgat

SEQ ID NO: 142281 - DNA, 20 bp, Artificial Sequence
  Description of Artificial Sequence: Synthetic oligonucleotide
  Target: LAMA2; (+) strand; PAM type: NRG; PAM sequence: GAG
atgaggattgctaatgatta

SEQ ID NO: 142282 - DNA, 20 bp, Artificial Sequence
  Description of Artificial Sequence: Synthetic oligonucleotide
  Target: LAMA2; (+) strand; PAM type: NRG; PAM sequence: AAG
aggattgctaatgattagag

SEQ ID NO: 142283 - DNA, 20 bp, Artificial Sequence
  Description of Artificial Sequence: Synthetic oligonucleotide
  Target: LAMA2; (+) strand; PAM type: NRG; PAM sequence: AGG
ggattgctaatgattagaga

SEQ ID NO: 142284 - DNA, 20 bp, Artificial Sequence
  Description of Artificial Sequence: Synthetic oligonucleotide
  Target: LAMA2; (+) strand; PAM type: NRG; PAM sequence: TGG
gctaatgattagagaaggat

SEQ ID NO: 142285 - DNA, 20 bp, Artificial Sequence
  Description of Artificial Sequence: Synthetic oligonucleotide
  Target: LAMA2; (+) strand; PAM type: NRG; PAM sequence: GAG
taatgattagagaaggattg

SEQ ID NO: 142286 - DNA, 20 bp, Artificial Sequence
  Description of Artificial Sequence: Synthetic oligonucleotide
  Target: LAMA2; (+) strand; PAM type: NRG; PAM sequence: AAG
gagaaggattggagacctta

SEQ ID NO: 142287 - DNA, 20 bp, Artificial Sequence
  Description of Artificial Sequence: Synthetic oligonucleotide
  Target: LAMA2; (+) strand; PAM type: NRG; PAM sequence: AGG
agaaggattggagaccttaa

SEQ ID NO: 142288 - DNA, 20 bp, Artificial Sequence
  Description of Artificial Sequence: Synthetic oligonucleotide
  Target: LAMA2; (+) strand; PAM type: NRG; PAM sequence: TGG
aggattggagaccttaaagg

SEQ ID NO: 142289 - DNA, 20 bp, Artificial Sequence
  Description of Artificial Sequence: Synthetic oligonucleotide
  Target: LAMA2; (+) strand; PAM type: NRG; PAM sequence: GAG
ttaaaggtggccttacattt

SEQ ID NO: 142290 - DNA, 20 bp, Artificial Sequence
  Description of Artificial Sequence: Synthetic oligonucleotide
  Target: LAMA2; (+) strand; PAM type: NRG; PAM sequence: TGG
ccttacatttgagtgtactt

SEQ ID NO: 142291 - DNA, 20 bp, Artificial Sequence
  Description of Artificial Sequence: Synthetic oligonucleotide
  Target: LAMA2; (+) strand; PAM type: NRG; PAM sequence: AAG
tttgagtgtactttggtctg

SEQ ID NO: 142292 - DNA, 20 bp, Artificial Sequence
  Description of Artificial Sequence: Synthetic oligonucleotide
  Target: LAMA2; (+) strand; PAM type: NRG; PAM sequence: TGG
agtgtactttggtctgaaga

SEQ ID NO: 142293 - DNA, 20 bp, Artificial Sequence
  Description of Artificial Sequence: Synthetic oligonucleotide
  Target: LAMA2; (+) strand; PAM type: NRG; PAM sequence: GAG
tgtactttggtctgaagatg

SEQ ID NO: 142294 - DNA, 20 bp, Artificial Sequence
  Description of Artificial Sequence: Synthetic oligonucleotide
  Target: LAMA2; (+) strand; PAM type: NRG; PAM sequence: AAG
tggtctgaagatggagacaa

SEQ ID NO: 142295 - DNA, 20 bp, Artificial Sequence
  Description of Artificial Sequence: Synthetic oligonucleotide
  Target: LAMA2; (+) strand; PAM type: NRG; PAM sequence: AAG
acaaaagaaatgaatttgtg

SEQ ID NO: 142296 - DNA, 20 bp, Artificial Sequence
  Description of Artificial Sequence: Synthetic oligonucleotide
  Target: LAMA2; (+) strand; PAM type: NRG; PAM sequence: AAG
aagaaatgtaatccacatga

SEQ ID NO: 142297 - DNA, 20 bp, Artificial Sequence
  Description of Artificial Sequence: Synthetic oligonucleotide
  Target: LAMA2; (+) strand; PAM type: NRG; PAM sequence: AAG
acatgaaagacccaaatgaa

SEQ ID NO: 142298 - DNA, 20 bp, Artificial Sequence
  Description of Artificial Sequence: Synthetic oligonucleotide
  Target: LAMA2; (+) strand; PAM type: NRG; PAM sequence: TAG
gtttttctgctgtcaccaca

SEQ ID NO: 142299 - DNA, 20 bp, Artificial Sequence
  Description of Artificial Sequence: Synthetic oligonucleotide
  Target: LAMA2; (+) strand; PAM type: NRG; PAM sequence: AGG
tttttctgctgtcaccacat

SEQ ID NO: 142300 - DNA, 20 bp, Artificial Sequence
  Description of Artificial Sequence: Synthetic oligonucleotide
  Target: LAMA2; (+) strand; PAM type: NRG; PAM sequence: GGG
ttttctgctgtcaccacata

SEQ ID NO: 142301 - DNA, 20 bp, Artificial Sequence
  Description of Artificial Sequence: Synthetic oligonucleotide
  Target: LAMA2; (+) strand; PAM type: NRG; PAM sequence: CAG
gctgtcaccacatagggcta

SEQ ID NO: 142302 - DNA, 20 bp, Artificial Sequence
  Description of Artificial Sequence: Synthetic oligonucleotide
  Target: LAMA2; (+) strand; PAM type: NRG; PAM sequence: TGG
gtcaccacatagggctacag

SEQ ID NO: 142303 - DNA, 20 bp, Artificial Sequence
  Description of Artificial Sequence: Synthetic oligonucleotide
  Target: LAMA2; (+) strand; PAM type: NRG; PAM sequence: GGG
tcaccacatagggctacagt

SEQ ID NO: 142304 - DNA, 20 bp, Artificial Sequence
  Description of Artificial Sequence: Synthetic oligonucleotide
  Target: LAMA2; (+) strand; PAM type: NRG; PAM sequence: GGG
caccacatagggctacagtg

SEQ ID NO: 142305 - DNA, 20 bp, Artificial Sequence
  Description of Artificial Sequence: Synthetic oligonucleotide
  Target: LAMA2; (+) strand; PAM type: NRG; PAM sequence: TGG
ctacagtggggtttcttccc

SEQ ID NO: 142306 - DNA, 20 bp, Artificial Sequence
  Description of Artificial Sequence: Synthetic oligonucleotide
  Target: LAMA2; (+) strand; PAM type: NRG; PAM sequence: GGG
tacagtggggtttcttccct

SEQ ID NO: 142307 - DNA, 20 bp, Artificial Sequence
  Description of Artificial Sequence: Synthetic oligonucleotide
  Target: LAMA2; (+) strand; PAM type: NRG; PAM sequence: CAG
gtggggtttcttccctgggt

SEQ ID NO: 142308 - DNA, 20 bp, Artificial Sequence
  Description of Artificial Sequence: Synthetic oligonucleotide
  Target: LAMA2; (+) strand; PAM type: NRG; PAM sequence: AGG
tggggtttcttccctgggtc

SEQ ID NO: 142309 - DNA, 20 bp, Artificial Sequence
  Description of Artificial Sequence: Synthetic oligonucleotide
  Target: LAMA2; (+) strand; PAM type: NRG; PAM sequence: TGG
cttccctgggtcaggctttg

SEQ ID NO: 142310 - DNA, 20 bp, Artificial Sequence
  Description of Artificial Sequence: Synthetic oligonucleotide
  Target: LAMA2; (+) strand; PAM type: NRG; PAM sequence: CAG
ctgggtcaggctttgtggaa

SEQ ID NO: 142311 - DNA, 20 bp, Artificial Sequence
  Description of Artificial Sequence: Synthetic oligonucleotide
  Target: LAMA2; (+) strand; PAM type: NRG; PAM sequence: CAG
ctttgtggaacagtaatgtg

SEQ ID NO: 142312 - DNA, 20 bp, Artificial Sequence
  Description of Artificial Sequence: Synthetic oligonucleotide
  Target: LAMA2; (+) strand; PAM type: NRG; PAM sequence: AGG
tttgtggaacagtaatgtgc

SEQ ID NO: 142313 - DNA, 20 bp, Artificial Sequence
  Description of Artificial Sequence: Synthetic oligonucleotide
  Target: LAMA2; (+) strand; PAM type: NRG; PAM sequence: AAG
gtggaacagtaatgtgcagg

SEQ ID NO: 142314 - DNA, 20 bp, Artificial Sequence
  Description of Artificial Sequence: Synthetic oligonucleotide
  Target: LAMA2; (+) strand; PAM type: NRG; PAM sequence: TAG
cagtaatgtgcaggaagtct

SEQ ID NO: 142315 - DNA, 20 bp, Artificial Sequence
  Description of Artificial Sequence: Synthetic oligonucleotide
  Target: LAMA2; (+) strand; PAM type: NRG; PAM sequence: AGG
agtaatgtgcaggaagtctt

SEQ ID NO: 142316 - DNA, 20 bp, Artificial Sequence
  Description of Artificial Sequence: Synthetic oligonucleotide
  Target: LAMA2; (+) strand; PAM type: NRG; PAM sequence: CAG
tgcaggaagtcttaggttct

SEQ ID NO: 142317 - DNA, 20 bp, Artificial Sequence
  Description of Artificial Sequence: Synthetic oligonucleotide
  Target: LAMA2; (+) strand; PAM type: NRG; PAM sequence: AAG
ttaggttctcagtgatgtgc

SEQ ID NO: 142318 - DNA, 20 bp, Artificial Sequence
  Description of Artificial Sequence: Synthetic oligonucleotide
  Target: LAMA2; (+) strand; PAM type: NRG; PAM sequence: TAG
gttctcagtgatgtgcaagc

SEQ ID NO: 142319 - DNA, 20 bp, Artificial Sequence
  Description of Artificial Sequence: Synthetic oligonucleotide
  Target: LAMA2; (+) strand; PAM type: NRG; PAM sequence: AGG
ttctcagtgatgtgcaagct

SEQ ID NO: 142320 - DNA, 20 bp, Artificial Sequence
  Description of Artificial Sequence: Synthetic oligonucleotide
  Target: LAMA2; (+) strand; PAM type: NRG; PAM sequence: TAG
tgcaagctaggttacgtgct

SEQ ID NO: 142321 - DNA, 20 bp, Artificial Sequence
  Description of Artificial Sequence: Synthetic oligonucleotide
  Target: LAMA2; (+) strand; PAM type: NRG; PAM sequence: CAG
agttcaaatatgttcttctc

SEQ ID NO: 142322 - DNA, 20 bp, Artificial Sequence
  Description of Artificial Sequence: Synthetic oligonucleotide
  Target: LAMA2; (+) strand; PAM type: NRG; PAM sequence: TGG
ctccagtgtctgtcatcctg

SEQ ID NO: 142323 - DNA, 20 bp, Artificial Sequence
  Description of Artificial Sequence: Synthetic oligonucleotide
  Target: LAMA2; (+) strand; PAM type: NRG; PAM sequence: AAG
gtgtctgtcatcctgtggtt

SEQ ID NO: 142324 - DNA, 20 bp, Artificial Sequence
  Description of Artificial Sequence: Synthetic oligonucleotide
  Target: LAMA2; (+) strand; PAM type: NRG; PAM sequence: TAG
tcatcctgtggttaagattt

SEQ ID NO: 142325 - DNA, 20 bp, Artificial Sequence
  Description of Artificial Sequence: Synthetic oligonucleotide
  Target: LAMA2; (+) strand; PAM type: NRG; PAM sequence: AAG
tagattcattcattgatttt

SEQ ID NO: 142326 - DNA, 20 bp, Artificial Sequence
  Description of Artificial Sequence: Synthetic oligonucleotide
  Target: LAMA2; (+) strand; PAM type: NRG; PAM sequence: TGG
taagccacatattctaacca

SEQ ID NO: 142327 - DNA, 20 bp, Artificial Sequence
  Description of Artificial Sequence: Synthetic oligonucleotide
  Target: LAMA2; (+) strand; PAM type: NRG; PAM sequence: CAG
acatattctaaccatggctt

SEQ ID NO: 142328 - DNA, 20 bp, Artificial Sequence
  Description of Artificial Sequence: Synthetic oligonucleotide
  Target: LAMA2; (+) strand; PAM type: NRG; PAM sequence: TAG
accatggcttcagttgttat

SEQ ID NO: 142329 - DNA, 20 bp, Artificial Sequence
  Description of Artificial Sequence: Synthetic oligonucleotide
  Target: LAMA2; (+) strand; PAM type: NRG; PAM sequence: TAG
ttcagttgttattagtttat

SEQ ID NO: 142330 - DNA, 20 bp, Artificial Sequence
  Description of Artificial Sequence: Synthetic oligonucleotide
  Target: LAMA2; (+) strand; PAM type: NRG; PAM sequence: TGG
attagtttattagttgtatg

SEQ ID NO: 142331 - DNA, 20 bp, Artificial Sequence
  Description of Artificial Sequence: Synthetic oligonucleotide
  Target: LAMA2; (+) strand; PAM type: NRG; PAM sequence: GGG
ttagtttattagttgtatgt

SEQ ID NO: 142332 - DNA, 20 bp, Artificial Sequence
  Description of Artificial Sequence: Synthetic oligonucleotide
  Target: LAMA2; (+) strand; PAM type: NRG; PAM sequence: GGG
tagtttattagttgtatgtg

SEQ ID NO: 142333 - DNA, 20 bp, Artificial Sequence
  Description of Artificial Sequence: Synthetic oligonucleotide
  Target: LAMA2; (+) strand; PAM type: NRG; PAM sequence: GGG
agtttattagttgtatgtgg

SEQ ID NO: 142334 - DNA, 20 bp, Artificial Sequence
  Description of Artificial Sequence: Synthetic oligonucleotide
  Target: LAMA2; (+) strand; PAM type: NRG; PAM sequence: CGG
ttattagttgtatgtggggg

SEQ ID NO: 142335 - DNA, 20 bp, Artificial Sequence
  Description of Artificial Sequence: Synthetic oligonucleotide
  Target: LAMA2; (+) strand; PAM type: NRG; PAM sequence: GGG
tattagttgtatgtgggggc

SEQ ID NO: 142336 - DNA, 20 bp, Artificial Sequence
  Description of Artificial Sequence: Synthetic oligonucleotide
  Target: LAMA2; (+) strand; PAM type: NRG; PAM sequence: GGG
attagttgtatgtgggggcg

SEQ ID NO: 142337 - DNA, 20 bp, Artificial Sequence
  Description of Artificial Sequence: Synthetic oligonucleotide
  Target: LAMA2; (+) strand; PAM type: NRG; PAM sequence: GAG
tagttgtatgtgggggcggg

SEQ ID NO: 142338 - DNA, 20 bp, Artificial Sequence
  Description of Artificial Sequence: Synthetic oligonucleotide
  Target: LAMA2; (+) strand; PAM type: NRG; PAM sequence: AGG
agttgtatgtgggggcgggg

SEQ ID NO: 142339 - DNA, 20 bp, Artificial Sequence
  Description of Artificial Sequence: Synthetic oligonucleotide
  Target: LAMA2; (+) strand; PAM type: NRG; PAM sequence: TGG
ttttttttttttttgttttc

SEQ ID NO: 142340 - DNA, 20 bp, Artificial Sequence
  Description of Artificial Sequence: Synthetic oligonucleotide
  Target: LAMA2; (+) strand; PAM type: NRG; PAM sequence: TAG
tttttttttgttttctggct

SEQ ID NO: 142341 - DNA, 20 bp, Artificial Sequence
  Description of Artificial Sequence: Synthetic oligonucleotide
  Target: LAMA2; (+) strand; PAM type: NRG; PAM sequence: CAG
ttagttgtgtgttcttgatc

SEQ ID NO: 142342 - DNA, 20 bp, Artificial Sequence
  Description of Artificial Sequence: Synthetic oligonucleotide
  Target: LAMA2; (+) strand; PAM type: NRG; PAM sequence: CAG
tacttaaattctctgcacct

SEQ ID NO: 142343 - DNA, 20 bp, Artificial Sequence
  Description of Artificial Sequence: Synthetic oligonucleotide
  Target: LAMA2; (+) strand; PAM type: NRG; PAM sequence: CAG
cagtttcatcgcccataaat

SEQ ID NO: 142344 - DNA, 20 bp, Artificial Sequence
  Description of Artificial Sequence: Synthetic oligonucleotide
  Target: LAMA2; (+) strand; PAM type: NRG; PAM sequence: AGG
agtttcatcgcccataaatc

SEQ ID NO: 142345 - DNA, 20 bp, Artificial Sequence
  Description of Artificial Sequence: Synthetic oligonucleotide
  Target: LAMA2; (+) strand; PAM type: NRG; PAM sequence: TAG
ccataaatcaggaataataa

SEQ ID NO: 142346 - DNA, 20 bp, Artificial Sequence
  Description of Artificial Sequence: Synthetic oligonucleotide
  Target: LAMA2; (+) strand; PAM type: NRG; PAM sequence: AAG
tcttacctcatataattgtc

SEQ ID NO: 142347 - DNA, 20 bp, Artificial Sequence
  Description of Artificial Sequence: Synthetic oligonucleotide
  Target: LAMA2; (+) strand; PAM type: NRG; PAM sequence: GAG
ttacctcatataattgtcaa

SEQ ID NO: 142348 - DNA, 20 bp, Artificial Sequence
  Description of Artificial Sequence: Synthetic oligonucleotide
  Target: LAMA2; (+) strand; PAM type: NRG; PAM sequence: AGG
tacctcatataattgtcaag

SEQ ID NO: 142349 - DNA, 20 bp, Artificial Sequence
  Description of Artificial Sequence: Synthetic oligonucleotide
  Target: LAMA2; (+) strand; PAM type: NRG; PAM sequence: AAG
taaatgcattattgtattta

SEQ ID NO: 142350 - DNA, 20 bp, Artificial Sequence
  Description of Artificial Sequence: Synthetic oligonucleotide
  Target: LAMA2; (+) strand; PAM type: NRG; PAM sequence: TAG
cattattgtatttaaagcat

SEQ ID NO: 142351 - DNA, 20 bp, Artificial Sequence
  Description of Artificial Sequence: Synthetic oligonucleotide
  Target: LAMA2; (+) strand; PAM type: NRG; PAM sequence: AAG
acaatgctgaaatgcacact

SEQ ID NO: 142352 - DNA, 20 bp, Artificial Sequence
  Description of Artificial Sequence: Synthetic oligonucleotide
  Target: LAMA2; (+) strand; PAM type: NRG; PAM sequence: AAG
tttattgttttgttgccatt

SEQ ID NO: 142353 - DNA, 20 bp, Artificial Sequence
  Description of Artificial Sequence: Synthetic oligonucleotide
  Target: LAMA2; (+) strand; PAM type: NRG; PAM sequence: AGG
ttattgttttgttgccatta

SEQ ID NO: 142354 - DNA, 20 bp, Artificial Sequence
  Description of Artificial Sequence: Synthetic oligonucleotide
  Target: LAMA2; (+) strand; PAM type: NRG; PAM sequence: TAG
attatttttattattatcct

SEQ ID NO: 142355 - DNA, 20 bp, Artificial Sequence
  Description of Artificial Sequence: Synthetic oligonucleotide
  Target: LAMA2; (+) strand; PAM type: NRG; PAM sequence: TAG
caaatacccaaactttgact

SEQ ID NO: 142356 - DNA, 20 bp, Artificial Sequence
  Description of Artificial Sequence: Synthetic oligonucleotide
  Target: LAMA2; (+) strand; PAM type: NRG; PAM sequence: TAG
tgaattattcaatatttctt

SEQ ID NO: 142357 - DNA, 20 bp, Artificial Sequence
  Description of Artificial Sequence: Synthetic oligonucleotide
  Target: LAMA2; (+) strand; PAM type: NRG; PAM sequence: TAG
ttccctgacttgtctccctt

SEQ ID NO: 142358 - DNA, 20 bp, Artificial Sequence
  Description of Artificial Sequence: Synthetic oligonucleotide
  Target: LAMA2; (+) strand; PAM type: NRG; PAM sequence: TAG
gtctgatattctctcccaca

SEQ ID NO: 142359 - DNA, 20 bp, Artificial Sequence
  Description of Artificial Sequence: Synthetic oligonucleotide
  Target: LAMA2; (+) strand; PAM type: NRG; PAM sequence: AAG
ccacatagtccaaacatctg

SEQ ID NO: 142360 - DNA, 20 bp, Artificial Sequence
  Description of Artificial Sequence: Synthetic oligonucleotide
  Target: LAMA2; (+) strand; PAM type: NRG; PAM sequence: TAG
atagtccaaacatctgaagc

SEQ ID NO: 142361 - DNA, 20 bp, Artificial Sequence
  Description of Artificial Sequence: Synthetic oligonucleotide
  Target: LAMA2; (+) strand; PAM type: NRG; PAM sequence: CAG
atcatttatatttacatttt

SEQ ID NO: 142362 - DNA, 20 bp, Artificial Sequence
  Description of Artificial Sequence: Synthetic oligonucleotide
  Target: LAMA2; (+) strand; PAM type: NRG; PAM sequence: CAG
acattctatcatgcccaccc

SEQ ID NO: 142363 - DNA, 20 bp, Artificial Sequence
  Description of Artificial Sequence: Synthetic oligonucleotide
  Target: LAMA2; (+) strand; PAM type: NRG; PAM sequence: TAG
catgcccaccccagccaatc

SEQ ID NO: 142364 - DNA, 20 bp, Artificial Sequence
  Description of Artificial Sequence: Synthetic oligonucleotide
  Target: LAMA2; (+) strand; PAM type: NRG; PAM sequence: AGG
atgcccaccccagccaatct

SEQ ID NO: 142365 - DNA, 20 bp, Artificial Sequence
  Description of Artificial Sequence: Synthetic oligonucleotide
  Target: LAMA2; (+) strand; PAM type: NRG; PAM sequence: GGG
tgcccaccccagccaatcta

SEQ ID NO: 142366 - DNA, 20 bp, Artificial Sequence
  Description of Artificial Sequence: Synthetic oligonucleotide
  Target: LAMA2; (+) strand; PAM type: NRG; PAM sequence: TAG
gggttatctctcaacacttc

SEQ ID NO: 142367 - DNA, 20 bp, Artificial Sequence
  Description of Artificial Sequence: Synthetic oligonucleotide
  Target: LAMA2; (+) strand; PAM type: NRG; PAM sequence: AGG
ggttatctctcaacacttct

SEQ ID NO: 142368 - DNA, 20 bp, Artificial Sequence
  Description of Artificial Sequence: Synthetic oligonucleotide
  Target: LAMA2; (+) strand; PAM type: NRG; PAM sequence: GGG
gttatctctcaacacttcta

SEQ ID NO: 142369 - DNA, 20 bp, Artificial Sequence
  Description of Artificial Sequence: Synthetic oligonucleotide
  Target: LAMA2; (+) strand; PAM type: NRG; PAM sequence: TAG
tcaacacttctagggaaaat

SEQ ID NO: 142370 - DNA, 20 bp, Artificial Sequence
  Description of Artificial Sequence: Synthetic oligonucleotide
  Target: LAMA2; (+) strand; PAM type: NRG; PAM sequence: AGG
caacacttctagggaaaatt

SEQ ID NO: 142371 - DNA, 20 bp, Artificial Sequence
  Description of Artificial Sequence: Synthetic oligonucleotide
  Target: LAMA2; (+) strand; PAM type: NRG; PAM sequence: GGG
aacacttctagggaaaatta

SEQ ID NO: 142372 - DNA, 20 bp, Artificial Sequence
  Description of Artificial Sequence: Synthetic oligonucleotide
  Target: LAMA2; (+) strand; PAM type: NRG; PAM sequence: TGG
tctagggaaaattagggttt

SEQ ID NO: 142373 - DNA, 20 bp, Artificial Sequence
  Description of Artificial Sequence: Synthetic oligonucleotide
  Target: LAMA2; (+) strand; PAM type: NRG; PAM sequence: CAG
gggttttggcataaatctgt

SEQ ID NO: 142374 - DNA, 20 bp, Artificial Sequence
  Description of Artificial Sequence: Synthetic oligonucleotide
  Target: LAMA2; (+) strand; PAM type: NRG; PAM sequence: TAG
taaatctgtcagaccctcat

SEQ ID NO: 142375 - DNA, 20 bp, Artificial Sequence
  Description of Artificial Sequence: Synthetic oligonucleotide
  Target: LAMA2; (+) strand; PAM type: NRG; PAM sequence: AGG
aaatctgtcagaccctcatt

SEQ ID NO: 142376 - DNA, 20 bp, Artificial Sequence
  Description of Artificial Sequence: Synthetic oligonucleotide
  Target: LAMA2; (+) strand; PAM type: NRG; PAM sequence: CAG
atttttatattaatgtatac

SEQ ID NO: 142377 - DNA, 20 bp, Artificial Sequence
  Description of Artificial Sequence: Synthetic oligonucleotide
  Target: LAMA2; (+) strand; PAM type: NRG; PAM sequence: CAG
aattccatgttcaaaaatac

SEQ ID NO: 142378 - DNA, 20 bp, Artificial Sequence
  Description of Artificial Sequence: Synthetic oligonucleotide
  Target: LAMA2; (+) strand; PAM type: NRG; PAM sequence: TGG
atgttcaaaaataccagttt

SEQ ID NO: 142379 - DNA, 20 bp, Artificial Sequence
  Description of Artificial Sequence: Synthetic oligonucleotide
  Target: LAMA2; (+) strand; PAM type: NRG; PAM sequence: GGG
tgttcaaaaataccagtttt

SEQ ID NO: 142380 - DNA, 20 bp, Artificial Sequence
  Description of Artificial Sequence: Synthetic oligonucleotide
  Target: LAMA2; (+) strand; PAM type: NRG; PAM sequence: GGG
gttcaaaaataccagttttg

SEQ ID NO: 142381 - DNA, 20 bp, Artificial Sequence
  Description of Artificial Sequence: Synthetic oligonucleotide
  Target: LAMA2; (+) strand; PAM type: NRG; PAM sequence: TGG
ttggggaaaaacattccaaa

SEQ ID NO: 142382 - DNA, 20 bp, Artificial Sequence
  Description of Artificial Sequence: Synthetic oligonucleotide
  Target: LAMA2; (+) strand; PAM type: NRG; PAM sequence: CAG
aacattccaaatggtactct

SEQ ID NO: 142383 - DNA, 20 bp, Artificial Sequence
  Description of Artificial Sequence: Synthetic oligonucleotide
  Target: LAMA2; (+) strand; PAM type: NRG; PAM sequence: CAG
attccaaatggtactctcag

SEQ ID NO: 142384 - DNA, 20 bp, Artificial Sequence
  Description of Artificial Sequence: Synthetic oligonucleotide
  Target: LAMA2; (+) strand; PAM type: NRG; PAM sequence: AAG
atctcaatctgccaaatgac

SEQ ID NO: 142385 - DNA, 20 bp, Artificial Sequence
  Description of Artificial Sequence: Synthetic oligonucleotide
  Target: LAMA2; (+) strand; PAM type: NRG; PAM sequence: AGG
tctcaatctgccaaatgaca

SEQ ID NO: 142386 - DNA, 20 bp, Artificial Sequence
  Description of Artificial Sequence: Synthetic oligonucleotide
  Target: LAMA2; (+) strand; PAM type: NRG; PAM sequence: CAG
aaatgacaaggactcaaatg

SEQ ID NO: 142387 - DNA, 20 bp, Artificial Sequence
  Description of Artificial Sequence: Synthetic oligonucleotide
  Target: LAMA2; (+) strand; PAM type: NRG; PAM sequence: GAG
gacaaggactcaaatgcagt

SEQ ID NO: 142388 - DNA, 20 bp, Artificial Sequence
  Description of Artificial Sequence: Synthetic oligonucleotide
  Target: LAMA2; (+) strand; PAM type: NRG; PAM sequence: CAG
ctcaaatgcagtgagtcaaa

SEQ ID NO: 142389 - DNA, 20 bp, Artificial Sequence
  Description of Artificial Sequence: Synthetic oligonucleotide
  Target: LAMA2; (+) strand; PAM type: NRG; PAM sequence: TAG
tgttcaacctgctttgtgcc

SEQ ID NO: 142390 - DNA, 20 bp, Artificial Sequence
  Description of Artificial Sequence: Synthetic oligonucleotide
  Target: LAMA2; (+) strand; PAM type: NRG; PAM sequence: GAG
ttcaacctgctttgtgccta

SEQ ID NO: 142391 - DNA, 20 bp, Artificial Sequence
  Description of Artificial Sequence: Synthetic oligonucleotide
  Target: LAMA2; (+) strand; PAM type: NRG; PAM sequence: AGG
tcaacctgctttgtgcctag

SEQ ID NO: 142392 - DNA, 20 bp, Artificial Sequence
  Description of Artificial Sequence: Synthetic oligonucleotide
  Target: LAMA2; (+) strand; PAM type: NRG; PAM sequence: TGG
gcctagaggcatccaattcc

SEQ ID NO: 142393 - DNA, 20 bp, Artificial Sequence
  Description of Artificial Sequence: Synthetic oligonucleotide
  Target: LAMA2; (+) strand; PAM type: NRG; PAM sequence: CAG
agaggcatccaattcctggc

SEQ ID NO: 142394 - DNA, 20 bp, Artificial Sequence
  Description of Artificial Sequence: Synthetic oligonucleotide
  Target: LAMA2; (+) strand; PAM type: NRG; PAM sequence: TGG
catccaattcctggccagtt

SEQ ID NO: 142395 - DNA, 20 bp, Artificial Sequence
  Description of Artificial Sequence: Synthetic oligonucleotide
  Target: LAMA2; (+) strand; PAM type: NRG; PAM sequence: GAG
attcctggccagtttggcct

SEQ ID NO: 142396 - DNA, 20 bp, Artificial Sequence
  Description of Artificial Sequence: Synthetic oligonucleotide
  Target: LAMA2; (+) strand; PAM type: NRG; PAM sequence: AGG
ttcctggccagtttggcctg

SEQ ID NO: 142397 - DNA, 20 bp, Artificial Sequence
  Description of Artificial Sequence: Synthetic oligonucleotide
  Target: LAMA2; (+) strand; PAM type: NRG; PAM sequence: TGG
gccagtttggcctgaggata

SEQ ID NO: 142398 - DNA, 20 bp, Artificial Sequence
  Description of Artificial Sequence: Synthetic oligonucleotide
  Target: LAMA2; (+) strand; PAM type: NRG; PAM sequence: GGG
ccagtttggcctgaggatat

SEQ ID NO: 142399 - DNA, 20 bp, Artificial Sequence
  Description of Artificial Sequence: Synthetic oligonucleotide
  Target: LAMA2; (+) strand; PAM type: NRG; PAM sequence: GAG
agtttggcctgaggatatgg

SEQ ID NO: 142400 - DNA, 20 bp, Artificial Sequence
  Description of Artificial Sequence: Synthetic oligonucleotide
  Target: LAMA2; (+) strand; PAM type: NRG; PAM sequence: TAG
ttggcctgaggatatgggag

SEQ ID NO: 142401 - DNA, 20 bp, Artificial Sequence
  Description of Artificial Sequence: Synthetic oligonucleotide
  Target: LAMA2; (+) strand; PAM type: NRG; PAM sequence: AGG
tggcctgaggatatgggagt

SEQ ID NO: 142402 - DNA, 20 bp, Artificial Sequence
  Description of Artificial Sequence: Synthetic oligonucleotide
  Target: LAMA2; (+) strand; PAM type: NRG; PAM sequence: GGG
ggcctgaggatatgggagta

SEQ ID NO: 142403 - DNA, 20 bp, Artificial Sequence
  Description of Artificial Sequence: Synthetic oligonucleotide
  Target: LAMA2; (+) strand; PAM type: NRG; PAM sequence: GAG
cctgaggatatgggagtagg

SEQ ID NO: 142404 - DNA, 20 bp, Artificial Sequence
  Description of Artificial Sequence: Synthetic oligonucleotide
  Target: LAMA2; (+) strand; PAM type: NRG; PAM sequence: CAG
ggatatgggagtagggagtg

SEQ ID NO: 142405 - DNA, 20 bp, Artificial Sequence
  Description of Artificial Sequence: Synthetic oligonucleotide
  Target: LAMA2; (+) strand; PAM type: NRG; PAM sequence: AAG
atgggagtagggagtgcaga

SEQ ID NO: 142406 - DNA, 20 bp, Artificial Sequence
  Description of Artificial Sequence: Synthetic oligonucleotide
  Target: LAMA2; (+) strand; PAM type: NRG; PAM sequence: GAG
gggagtagggagtgcagaaa

SEQ ID NO: 142407 - DNA, 20 bp, Artificial Sequence
  Description of Artificial Sequence: Synthetic oligonucleotide
  Target: LAMA2; (+) strand; PAM type: NRG; PAM sequence: GAG
gggagtgcagaaagagtttt

SEQ ID NO: 142408 - DNA, 20 bp, Artificial Sequence
  Description of Artificial Sequence: Synthetic oligonucleotide
  Target: LAMA2; (+) strand; PAM type: NRG; PAM sequence: TAG
atttttattattttttatcc

SEQ ID NO: 142409 - DNA, 20 bp, Artificial Sequence
  Description of Artificial Sequence: Synthetic oligonucleotide
  Target: LAMA2; (+) strand; PAM type: NRG; PAM sequence: CAG
attattttttatcctagatt

SEQ ID NO: 142410 - DNA, 20 bp, Artificial Sequence
  Description of Artificial Sequence: Synthetic oligonucleotide
  Target: LAMA2; (+) strand; PAM type: NRG; PAM sequence: AAG
atcctagattcagtttacat

SEQ ID NO: 142411 - DNA, 20 bp, Artificial Sequence
  Description of Artificial Sequence: Synthetic oligonucleotide
  Target: LAMA2; (+) strand; PAM type: NRG; PAM sequence: AAG
taataattctcaaacaattt

SEQ ID NO: 142412 - DNA, 20 bp, Artificial Sequence
  Description of Artificial Sequence: Synthetic oligonucleotide
  Target: LAMA2; (+) strand; PAM type: NRG; PAM sequence: CAG
cctttaaaaatgattcaatt

SEQ ID NO: 142413 - DNA, 20 bp, Artificial Sequence
  Description of Artificial Sequence: Synthetic oligonucleotide
  Target: LAMA2; (+) strand; PAM type: NRG; PAM sequence: AAG
attcaattcagaaatttatt

SEQ ID NO: 142414 - DNA, 20 bp, Artificial Sequence
  Description of Artificial Sequence: Synthetic oligonucleotide
  Target: LAMA2; (+) strand; PAM type: NRG; PAM sequence: CGG
aagcaatataaaatacactt

SEQ ID NO: 142415 - DNA, 20 bp, Artificial Sequence
  Description of Artificial Sequence: Synthetic oligonucleotide
  Target: LAMA2; (+) strand; PAM type: NRG; PAM sequence: CAG
caatataaaatacacttcgg

SEQ ID NO: 142416 - DNA, 20 bp, Artificial Sequence
  Description of Artificial Sequence: Synthetic oligonucleotide
  Target: LAMA2; (+) strand; PAM type: NRG; PAM sequence: AGG
aatataaaatacacttcggc

SEQ ID NO: 142417 - DNA, 20 bp, Artificial Sequence
  Description of Artificial Sequence: Synthetic oligonucleotide
  Target: LAMA2; (+) strand; PAM type: NRG; PAM sequence: AAG
gtatgtaacatgcgtgtcac

SEQ ID NO: 142418 - DNA, 20 bp, Artificial Sequence
  Description of Artificial Sequence: Synthetic oligonucleotide
  Target: LAMA2; (+) strand; PAM type: NRG; PAM sequence: TGG
ttctctcccttcattaataa

SEQ ID NO: 142419 - DNA, 20 bp, Artificial Sequence
  Description of Artificial Sequence: Synthetic oligonucleotide
  Target: LAMA2; (+) strand; PAM type: NRG; PAM sequence: AAG
ggttctccattccttaaacc

SEQ ID NO: 142420 - DNA, 20 bp, Artificial Sequence
  Description of Artificial Sequence: Synthetic oligonucleotide
  Target: LAMA2; (+) strand; PAM type: NRG; PAM sequence: CAG
ctccattccttaaaccaagt

SEQ ID NO: 142421 - DNA, 20 bp, Artificial Sequence
  Description of Artificial Sequence: Synthetic oligonucleotide
  Target: LAMA2; (+) strand; PAM type: NRG; PAM sequence: AAG
agcctgccaatatgaaacaa

SEQ ID NO: 142422 - DNA, 20 bp, Artificial Sequence
  Description of Artificial Sequence: Synthetic oligonucleotide
  Target: LAMA2; (+) strand; PAM type: NRG; PAM sequence: TAG
gaaacaaaagacatgtttat

SEQ ID NO: 142423 - DNA, 20 bp, Artificial Sequence
  Description of Artificial Sequence: Synthetic oligonucleotide
  Target: LAMA2; (+) strand; PAM type: NRG; PAM sequence: TAG
agacatgtttattagttaat

SEQ ID NO: 142424 - DNA, 20 bp, Artificial Sequence
  Description of Artificial Sequence: Synthetic oligonucleotide
  Target: LAMA2; (+) strand; PAM type: NRG; PAM sequence: TAG
atgtttattagttaattagt

SEQ ID NO: 142425 - DNA, 20 bp, Artificial Sequence
  Description of Artificial Sequence: Synthetic oligonucleotide
  Target: LAMA2; (+) strand; PAM type: NRG; PAM sequence: TGG
aattagttagtttctttaat

SEQ ID NO: 142426 - DNA, 20 bp, Artificial Sequence
  Description of Artificial Sequence: Synthetic oligonucleotide
  Target: LAMA2; (+) strand; PAM type: NRG; PAM sequence: TGG
tactaaaaactgcttattga

SEQ ID NO: 142427 - DNA, 20 bp, Artificial Sequence
  Description of Artificial Sequence: Synthetic oligonucleotide
  Target: LAMA2; (+) strand; PAM type: NRG; PAM sequence: TAG
tgcttattgatggtaactat

SEQ ID NO: 142428 - DNA, 20 bp, Artificial Sequence
  Description of Artificial Sequence: Synthetic oligonucleotide
  Target: LAMA2; (+) strand; PAM type: NRG; PAM sequence: AGG
gcttattgatggtaactatt

SEQ ID NO: 142429 - DNA, 20 bp, Artificial Sequence
  Description of Artificial Sequence: Synthetic oligonucleotide
  Target: LAMA2; (+) strand; PAM type: NRG; PAM sequence: GAG
ttattgatggtaactattag

SEQ ID NO: 142430 - DNA, 20 bp, Artificial Sequence
  Description of Artificial Sequence: Synthetic oligonucleotide
  Target: LAMA2; (+) strand; PAM type: NRG; PAM sequence: TGG
ttacgtctatttgtcactca

SEQ ID NO: 142431 - DNA, 20 bp, Artificial Sequence
  Description of Artificial Sequence: Synthetic oligonucleotide
  Target: LAMA2; (+) strand; PAM type: NRG; PAM sequence: GGG
tacgtctatttgtcactcat

SEQ ID NO: 142432 - DNA, 20 bp, Artificial Sequence
  Description of Artificial Sequence: Synthetic oligonucleotide
  Target: LAMA2; (+) strand; PAM type: NRG; PAM sequence: GGG
acgtctatttgtcactcatg

SEQ ID NO: 142433 - DNA, 20 bp, Artificial Sequence
  Description of Artificial Sequence: Synthetic oligonucleotide
  Target: LAMA2; (+) strand; PAM type: NRG; PAM sequence: AAG
tctatttgtcactcatgggg

SEQ ID NO: 142434 - DNA, 20 bp, Artificial Sequence
  Description of Artificial Sequence: Synthetic oligonucleotide
  Target: LAMA2; (+) strand; PAM type: NRG; PAM sequence: AAG
catggggaagtgaatgaaat

SEQ ID NO: 142435 - DNA, 20 bp, Artificial Sequence
  Description of Artificial Sequence: Synthetic oligonucleotide
  Target: LAMA2; (+) strand; PAM type: NRG; PAM sequence: AGG
atggggaagtgaatgaaata

SEQ ID NO: 142436 - DNA, 20 bp, Artificial Sequence
  Description of Artificial Sequence: Synthetic oligonucleotide
  Target: LAMA2; (+) strand; PAM type: NRG; PAM sequence: CAG
gaagtgaatgaaataaggaa

SEQ ID NO: 142437 - DNA, 20 bp, Artificial Sequence
  Description of Artificial Sequence: Synthetic oligonucleotide
  Target: LAMA2; (+) strand; PAM type: NRG; PAM sequence: AAG
tgaatgaaataaggaacaga

SEQ ID NO: 142438 - DNA, 20 bp, Artificial Sequence
  Description of Artificial Sequence: Synthetic oligonucleotide
  Target: LAMA2; (+) strand; PAM type: NRG; PAM sequence: TAG
gtaattcaaaatatttgcca

SEQ ID NO: 142439 - DNA, 20 bp, Artificial Sequence
  Description of Artificial Sequence: Synthetic oligonucleotide
  Target: LAMA2; (+) strand; PAM type: NRG; PAM sequence: AAG
aatatttgccatagaatgat

SEQ ID NO: 142440 - DNA, 20 bp, Artificial Sequence
  Description of Artificial Sequence: Synthetic oligonucleotide
  Target: LAMA2; (+) strand; PAM type: NRG; PAM sequence: AAG
gccatagaatgataagactg

SEQ ID NO: 142441 - DNA, 20 bp, Artificial Sequence
  Description of Artificial Sequence: Synthetic oligonucleotide
  Target: LAMA2; (+) strand; PAM type: NRG; PAM sequence: AAG
gaatgataagactgaagaat

SEQ ID NO: 142442 - DNA, 20 bp, Artificial Sequence
  Description of Artificial Sequence: Synthetic oligonucleotide
  Target: LAMA2; (+) strand; PAM type: NRG; PAM sequence: CAG
tgaagaataagaattaaatt

SEQ ID NO: 142443 - DNA, 20 bp, Artificial Sequence
  Description of Artificial Sequence: Synthetic oligonucleotide
  Target: LAMA2; (+) strand; PAM type: NRG; PAM sequence: TAG
aattaaattcagacctctcc

SEQ ID NO: 142444 - DNA, 20 bp, Artificial Sequence
  Description of Artificial Sequence: Synthetic oligonucleotide
  Target: LAMA2; (+) strand; PAM type: NRG; PAM sequence: AGG
attaaattcagacctctcct

SEQ ID NO: 142445 - DNA, 20 bp, Artificial Sequence
  Description of Artificial Sequence: Synthetic oligonucleotide
  Target: LAMA2; (+) strand; PAM type: NRG; PAM sequence: TAG
ggctatctattcattttata

SEQ ID NO: 142446 - DNA, 20 bp, Artificial Sequence
  Description of Artificial Sequence: Synthetic oligonucleotide
  Target: LAMA2; (+) strand; PAM type: NRG; PAM sequence: TGG
attttatatagcttactttg

SEQ ID NO: 142447 - DNA, 20 bp, Artificial Sequence
  Description of Artificial Sequence: Synthetic oligonucleotide
  Target: LAMA2; (+) strand; PAM type: NRG; PAM sequence: TAG
gaatatgttacttttttgaa

SEQ ID NO: 142448 - DNA, 20 bp, Artificial Sequence
  Description of Artificial Sequence: Synthetic oligonucleotide
  Target: LAMA2; (+) strand; PAM type: NRG; PAM sequence: CAG
atgttacttttttgaataga

SEQ ID NO: 142449 - DNA, 20 bp, Artificial Sequence
  Description of Artificial Sequence: Synthetic oligonucleotide
  Target: LAMA2; (+) strand; PAM type: NRG; PAM sequence: AGG
tgttacttttttgaatagac

SEQ ID NO: 142450 - DNA, 20 bp, Artificial Sequence
  Description of Artificial Sequence: Synthetic oligonucleotide
  Target: LAMA2; (+) strand; PAM type: NRG; PAM sequence: AAG
atagacaggtgatatcctcc

SEQ ID NO: 142451 - DNA, 20 bp, Artificial Sequence
  Description of Artificial Sequence: Synthetic oligonucleotide
  Target: LAMA2; (+) strand; PAM type: NRG; PAM sequence: CAG
gtgatatcctccaagactct

SEQ ID NO: 142452 - DNA, 20 bp, Artificial Sequence
  Description of Artificial Sequence: Synthetic oligonucleotide
  Target: LAMA2; (+) strand; PAM type: NRG; PAM sequence: GAG
atataactgaaataataatt

SEQ ID NO: 142453 - DNA, 20 bp, Artificial Sequence
  Description of Artificial Sequence: Synthetic oligonucleotide
  Target: LAMA2; (+) strand; PAM type: NRG; PAM sequence: AGG
tataactgaaataataattg

SEQ ID NO: 142454 - DNA, 20 bp, Artificial Sequence
  Description of Artificial Sequence: Synthetic oligonucleotide
  Target: LAMA2; (+) strand; PAM type: NRG; PAM sequence: CAG
taattgaggtctctgattct

SEQ ID NO: 142455 - DNA, 20 bp, Artificial Sequence
  Description of Artificial Sequence: Synthetic oligonucleotide
  Target: LAMA2; (+) strand; PAM type: NRG; PAM sequence: AGG
aattgaggtctctgattctc

SEQ ID NO: 142456 - DNA, 20 bp, Artificial Sequence
  Description of Artificial Sequence: Synthetic oligonucleotide
  Target: LAMA2; (+) strand; PAM type: NRG; PAM sequence: TGG
taaatatttcatccataatc

SEQ ID NO: 142457 - DNA, 20 bp, Artificial Sequence
  Description of Artificial Sequence: Synthetic oligonucleotide
  Target: LAMA2; (+) strand; PAM type: NRG; PAM sequence: AAG
tatttcatccataatctggt

SEQ ID NO: 142458 - DNA, 20 bp, Artificial Sequence
  Description of Artificial Sequence: Synthetic oligonucleotide
  Target: LAMA2; (+) strand; PAM type: NRG; PAM sequence: AGG
atttcatccataatctggta

SEQ ID NO: 142459 - DNA, 20 bp, Artificial Sequence
  Description of Artificial Sequence: Synthetic oligonucleotide
  Target: LAMA2; (+) strand; PAM type: NRG; PAM sequence: AAG
cataatctggtaaggattaa

SEQ ID NO: 142460 - DNA, 20 bp, Artificial Sequence
  Description of Artificial Sequence: Synthetic oligonucleotide
  Target: LAMA2; (+) strand; PAM type: NRG; PAM sequence: AAG
gattaaaagttgacttttaa

SEQ ID NO: 142461 - DNA, 20 bp, Artificial Sequence
  Description of Artificial Sequence: Synthetic oligonucleotide
  Target: LAMA2; (+) strand; PAM type: NRG; PAM sequence: TGG
acaatcgctaaacttaaaaa

SEQ ID NO: 142462 - DNA, 20 bp, Artificial Sequence
  Description of Artificial Sequence: Synthetic oligonucleotide
  Target: LAMA2; (+) strand; PAM type: NRG; PAM sequence: CAG
cgctaaacttaaaaatggtt

SEQ ID NO: 142463 - DNA, 20 bp, Artificial Sequence
  Description of Artificial Sequence: Synthetic oligonucleotide
  Target: LAMA2; (+) strand; PAM type: NRG; PAM sequence: GAG
ctaaacttaaaaatggttca

SEQ ID NO: 142464 - DNA, 20 bp, Artificial Sequence
  Description of Artificial Sequence: Synthetic oligonucleotide
  Target: LAMA2; (+) strand; PAM type: NRG; PAM sequence: AGG
taaacttaaaaatggttcag

SEQ ID NO: 142465 - DNA, 20 bp, Artificial Sequence
  Description of Artificial Sequence: Synthetic oligonucleotide
  Target: LAMA2; (+) strand; PAM type: NRG; PAM sequence: GAG
aacttaaaaatggttcagag

SEQ ID NO: 142466 - DNA, 20 bp, Artificial Sequence
  Description of Artificial Sequence: Synthetic oligonucleotide
  Target: LAMA2; (+) strand; PAM type: NRG; PAM sequence: TGG
cagaggagatacaatattgc

SEQ ID NO: 142467 - DNA, 20 bp, Artificial Sequence
  Description of Artificial Sequence: Synthetic oligonucleotide
  Target: LAMA2; (+) strand; PAM type: NRG; PAM sequence: AAG
aatattgctggatctaatgt

SEQ ID NO: 142468 - DNA, 20 bp, Artificial Sequence
  Description of Artificial Sequence: Synthetic oligonucleotide
  Target: LAMA2; (+) strand; PAM type: NRG; PAM sequence: TAG
attgctggatctaatgtaag

SEQ ID NO: 142469 - DNA, 20 bp, Artificial Sequence
  Description of Artificial Sequence: Synthetic oligonucleotide
  Target: LAMA2; (+) strand; PAM type: NRG; PAM sequence: AAG
ctggatctaatgtaagtaga

SEQ ID NO: 142470 - DNA, 20 bp, Artificial Sequence
  Description of Artificial Sequence: Synthetic oligonucleotide
  Target: LAMA2; (+) strand; PAM type: NRG; PAM sequence: TGG
atcctaattctgatatatca

SEQ ID NO: 142471 - DNA, 20 bp, Artificial Sequence
  Description of Artificial Sequence: Synthetic oligonucleotide
  Target: LAMA2; (+) strand; PAM type: NRG; PAM sequence: TAG
aattctgatatatcatggca

SEQ ID NO: 142472 - DNA, 20 bp, Artificial Sequence
  Description of Artificial Sequence: Synthetic oligonucleotide
  Target: LAMA2; (+) strand; PAM type: NRG; PAM sequence: AAG
gatatatcatggcatagaaa

SEQ ID NO: 142473 - DNA, 20 bp, Artificial Sequence
  Description of Artificial Sequence: Synthetic oligonucleotide
  Target: LAMA2; (+) strand; PAM type: NRG; PAM sequence: AAG
catggcatagaaaaagacac

SEQ ID NO: 142474 - DNA, 20 bp, Artificial Sequence
  Description of Artificial Sequence: Synthetic oligonucleotide
  Target: LAMA2; (+) strand; PAM type: NRG; PAM sequence: AGG
atggcatagaaaaagacaca

SEQ ID NO: 142475 - DNA, 20 bp, Artificial Sequence
  Description of Artificial Sequence: Synthetic oligonucleotide
  Target: LAMA2; (+) strand; PAM type: NRG; PAM sequence: TAG
tagaaaaagacacaaggaat

SEQ ID NO: 142476 - DNA, 20 bp, Artificial Sequence
  Description of Artificial Sequence: Synthetic oligonucleotide
  Target: LAMA2; (+) strand; PAM type: NRG; PAM sequence: AAG
aaaaagacacaaggaattag

SEQ ID NO: 142477 - DNA, 20 bp, Artificial Sequence
  Description of Artificial Sequence: Synthetic oligonucleotide
  Target: LAMA2; (+) strand; PAM type: NRG; PAM sequence: TGG
acacaaggaattagaagacc

SEQ ID NO: 142478 - DNA, 20 bp, Artificial Sequence
  Description of Artificial Sequence: Synthetic oligonucleotide
  Target: LAMA2; (+) strand; PAM type: NRG; PAM sequence: TGG
gaattagaagacctggattc

SEQ ID NO: 142479 - DNA, 20 bp, Artificial Sequence
  Description of Artificial Sequence: Synthetic oligonucleotide
  Target: LAMA2; (+) strand; PAM type: NRG; PAM sequence: TGG
gaagacctggattctggtac

SEQ ID NO: 142480 - DNA, 20 bp, Artificial Sequence
  Description of Artificial Sequence: Synthetic oligonucleotide
  Target: LAMA2; (+) strand; PAM type: NRG; PAM sequence: CAG
ctggattctggtactggttc

SEQ ID NO: 142481 - DNA, 20 bp, Artificial Sequence
  Description of Artificial Sequence: Synthetic oligonucleotide
  Target: LAMA2; (+) strand; PAM type: NRG; PAM sequence: TGG
gtactggttccagttatttg

SEQ ID NO: 142482 - DNA, 20 bp, Artificial Sequence
  Description of Artificial Sequence: Synthetic oligonucleotide
  Target: LAMA2; (+) strand; PAM type: NRG; PAM sequence: GGG
tactggttccagttatttgt

SEQ ID NO: 142483 - DNA, 20 bp, Artificial Sequence
  Description of Artificial Sequence: Synthetic oligonucleotide
  Target: LAMA2; (+) strand; PAM type: NRG; PAM sequence: TGG
tccagttatttgtgggacct

SEQ ID NO: 142484 - DNA, 20 bp, Artificial Sequence
  Description of Artificial Sequence: Synthetic oligonucleotide
  Target: LAMA2; (+) strand; PAM type: NRG; PAM sequence: TGG
gtcaaatgatttaatctctc

SEQ ID NO: 142485 - DNA, 20 bp, Artificial Sequence
  Description of Artificial Sequence: Synthetic oligonucleotide
  Target: LAMA2; (+) strand; PAM type: NRG; PAM sequence: GGG
tcaaatgatttaatctctct

SEQ ID NO: 142486 - DNA, 20 bp, Artificial Sequence
  Description of Artificial Sequence: Synthetic oligonucleotide
  Target: LAMA2; (+) strand; PAM type: NRG; PAM sequence: TAG
ctgggattaaatttctttaa

SEQ ID NO: 142487 - DNA, 20 bp, Artificial Sequence
  Description of Artificial Sequence: Synthetic oligonucleotide
  Target: LAMA2; (+) strand; PAM type: NRG; PAM sequence: TAG
aatttctttaatagatgaat

SEQ ID NO: 142488 - DNA, 20 bp, Artificial Sequence
  Description of Artificial Sequence: Synthetic oligonucleotide
  Target: LAMA2; (+) strand; PAM type: NRG; PAM sequence: CAG
agatgaattagttcaatgcc

SEQ ID NO: 142489 - DNA, 20 bp, Artificial Sequence
  Description of Artificial Sequence: Synthetic oligonucleotide
  Target: LAMA2; (+) strand; PAM type: NRG; PAM sequence: AAG
ttcaatgcccagattgttct

SEQ ID NO: 142490 - DNA, 20 bp, Artificial Sequence
  Description of Artificial Sequence: Synthetic oligonucleotide
  Target: LAMA2; (+) strand; PAM type: NRG; PAM sequence: AGG
tcaatgcccagattgttcta

SEQ ID NO: 142491 - DNA, 20 bp, Artificial Sequence
  Description of Artificial Sequence: Synthetic oligonucleotide
  Target: LAMA2; (+) strand; PAM type: NRG; PAM sequence: CAG
atgcccagattgttctaagg

SEQ ID NO: 142492 - DNA, 20 bp, Artificial Sequence
  Description of Artificial Sequence: Synthetic oligonucleotide
  Target: LAMA2; (+) strand; PAM type: NRG; PAM sequence: TGG
cagattgttctaaggcagca

SEQ ID NO: 142493 - DNA, 20 bp, Artificial Sequence
  Description of Artificial Sequence: Synthetic oligonucleotide
  Target: LAMA2; (+) strand; PAM type: NRG; PAM sequence: TAG
tggtattttctaaaataata

SEQ ID NO: 142494 - DNA, 20 bp, Artificial Sequence
  Description of Artificial Sequence: Synthetic oligonucleotide
  Target: LAMA2; (+) strand; PAM type: NRG; PAM sequence: TGG
tttctaaaataatatagctt

SEQ ID NO: 142495 - DNA, 20 bp, Artificial Sequence
  Description of Artificial Sequence: Synthetic oligonucleotide
  Target: LAMA2; (+) strand; PAM type: NRG; PAM sequence: GAG
ttggctatcatacaacattt

SEQ ID NO: 142496 - DNA, 20 bp, Artificial Sequence
  Description of Artificial Sequence: Synthetic oligonucleotide
  Target: LAMA2; (+) strand; PAM type: NRG; PAM sequence: AGG
tggctatcatacaacatttg

SEQ ID NO: 142497 - DNA, 20 bp, Artificial Sequence
  Description of Artificial Sequence: Synthetic oligonucleotide
  Target: LAMA2; (+) strand; PAM type: NRG; PAM sequence: AAG
aacatttgaggatattctaa

SEQ ID NO: 142498 - DNA, 20 bp, Artificial Sequence
  Description of Artificial Sequence: Synthetic oligonucleotide
  Target: LAMA2; (+) strand; PAM type: NRG; PAM sequence: TGG
tgaggatattctaaaagttt

SEQ ID NO: 142499 - DNA, 20 bp, Artificial Sequence
  Description of Artificial Sequence: Synthetic oligonucleotide
  Target: LAMA2; (+) strand; PAM type: NRG; PAM sequence: CAG
tacttttctctaacattatc

SEQ ID NO: 142500 - DNA, 20 bp, Artificial Sequence
  Description of Artificial Sequence: Synthetic oligonucleotide
  Target: LAMA2; (+) strand; PAM type: NRG; PAM sequence: AAG
tctctaacattatccagaca

SEQ ID NO: 142501 - DNA, 20 bp, Artificial Sequence
  Description of Artificial Sequence: Synthetic oligonucleotide
  Target: LAMA2; (+) strand; PAM type: NRG; PAM sequence: TAG
ctaacattatccagacaaag

SEQ ID NO: 142502 - DNA, 20 bp, Artificial Sequence
  Description of Artificial Sequence: Synthetic oligonucleotide
  Target: LAMA2; (+) strand; PAM type: NRG; PAM sequence: TGG
ttatccagacaaagtagctg

SEQ ID NO: 142503 - DNA, 20 bp, Artificial Sequence
  Description of Artificial Sequence: Synthetic oligonucleotide
  Target: LAMA2; (+) strand; PAM type: NRG; PAM sequence: CAG
gtggaataaatctcactcgt

SEQ ID NO: 142504 - DNA, 20 bp, Artificial Sequence
  Description of Artificial Sequence: Synthetic oligonucleotide
  Target: LAMA2; (+) strand; PAM type: NRG; PAM sequence: TAG
taaatctcactcgtcagctt

SEQ ID NO: 142505 - DNA, 20 bp, Artificial Sequence
  Description of Artificial Sequence: Synthetic oligonucleotide
  Target: LAMA2; (+) strand; PAM type: NRG; PAM sequence: TGG
atgtactttcacataatccc

SEQ ID NO: 142506 - DNA, 20 bp, Artificial Sequence
  Description of Artificial Sequence: Synthetic oligonucleotide
  Target: LAMA2; (+) strand; PAM type: NRG; PAM sequence: CAG
tgtttatgttcaaaacttta

SEQ ID NO: 142507 - DNA, 20 bp, Artificial Sequence
  Description of Artificial Sequence: Synthetic oligonucleotide
  Target: LAMA2; (+) strand; PAM type: NRG; PAM sequence: GAG
tttatgttcaaaactttaca

SEQ ID NO: 142508 - DNA, 20 bp, Artificial Sequence
  Description of Artificial Sequence: Synthetic oligonucleotide
  Target: LAMA2; (+) strand; PAM type: NRG; PAM sequence: AAG
atgttcaaaactttacagag

SEQ ID NO: 142509 - DNA, 20 bp, Artificial Sequence
  Description of Artificial Sequence: Synthetic oligonucleotide
  Target: LAMA2; (+) strand; PAM type: NRG; PAM sequence: CAG
aaaactttacagagaagtga

SEQ ID NO: 142510 - DNA, 20 bp, Artificial Sequence
  Description of Artificial Sequence: Synthetic oligonucleotide
  Target: LAMA2; (+) strand; PAM type: NRG; PAM sequence: AAG
cagagaagtgacagtcaaat

SEQ ID NO: 142511 - DNA, 20 bp, Artificial Sequence
  Description of Artificial Sequence: Synthetic oligonucleotide
  Target: LAMA2; (+) strand; PAM type: NRG; PAM sequence: GAG
gagaagtgacagtcaaataa

SEQ ID NO: 142512 - DNA, 20 bp, Artificial Sequence
  Description of Artificial Sequence: Synthetic oligonucleotide
  Target: LAMA2; (+) strand; PAM type: NRG; PAM sequence: CAG
agagaaacaaacatataaac

SEQ ID NO: 142513 - DNA, 20 bp, Artificial Sequence
  Description of Artificial Sequence: Synthetic oligonucleotide
  Target: LAMA2; (+) strand; PAM type: NRG; PAM sequence: AAG
taaataaaacatgattgcat

SEQ ID NO: 142514 - DNA, 20 bp, Artificial Sequence
  Description of Artificial Sequence: Synthetic oligonucleotide
  Target: LAMA2; (+) strand; PAM type: NRG; PAM sequence: CAG
tgattgcataagtactgtaa

SEQ ID NO: 142515 - DNA, 20 bp, Artificial Sequence
  Description of Artificial Sequence: Synthetic oligonucleotide
  Target: LAMA2; (+) strand; PAM type: NRG; PAM sequence: TAG
ttgcataagtactgtaacag

SEQ ID NO: 142516 - DNA, 20 bp, Artificial Sequence
  Description of Artificial Sequence: Synthetic oligonucleotide
  Target: LAMA2; (+) strand; PAM type: NRG; PAM sequence: CAG
tactgtaacagtagtgtata

SEQ ID NO: 142517 - DNA, 20 bp, Artificial Sequence
  Description of Artificial Sequence: Synthetic oligonucleotide
  Target: LAMA2; (+) strand; PAM type: NRG; PAM sequence: GAG
ctgtaacagtagtgtataca

SEQ ID NO: 142518 - DNA, 20 bp, Artificial Sequence
  Description of Artificial Sequence: Synthetic oligonucleotide
  Target: LAMA2; (+) strand; PAM type: NRG; PAM sequence: GAG
gtaacagtagtgtatacaga

SEQ ID NO: 142519 - DNA, 20 bp, Artificial Sequence
  Description of Artificial Sequence: Synthetic oligonucleotide
  Target: LAMA2; (+) strand; PAM type: NRG; PAM sequence: GAG
caataaatctccccctgctt

SEQ ID NO: 142520 - DNA, 20 bp, Artificial Sequence
  Description of Artificial Sequence: Synthetic oligonucleotide
  Target: LAMA2; (+) strand; PAM type: NRG; PAM sequence: TGG
taaatctccccctgcttgag

SEQ ID NO: 142521 - DNA, 20 bp, Artificial Sequence
  Description of Artificial Sequence: Synthetic oligonucleotide
  Target: LAMA2; (+) strand; PAM type: NRG; PAM sequence: AAG
atctccccctgcttgagtgg

SEQ ID NO: 142522 - DNA, 20 bp, Artificial Sequence
  Description of Artificial Sequence: Synthetic oligonucleotide
  Target: LAMA2; (+) strand; PAM type: NRG; PAM sequence: AGG
tctccccctgcttgagtgga

SEQ ID NO: 142523 - DNA, 20 bp, Artificial Sequence
  Description of Artificial Sequence: Synthetic oligonucleotide
  Target: LAMA2; (+) strand; PAM type: NRG; PAM sequence: GAG
tccccctgcttgagtggaag

SEQ ID NO: 142524 - DNA, 20 bp, Artificial Sequence
  Description of Artificial Sequence: Synthetic oligonucleotide
  Target: LAMA2; (+) strand; PAM type: NRG; PAM sequence: AGG
ccccctgcttgagtggaagg

SEQ ID NO: 142525 - DNA, 20 bp, Artificial Sequence
  Description of Artificial Sequence: Synthetic oligonucleotide
  Target: LAMA2; (+) strand; PAM type: NRG; PAM sequence: GAG
tgagtggaaggaggcacatt

SEQ ID NO: 142526 - DNA, 20 bp, Artificial Sequence
  Description of Artificial Sequence: Synthetic oligonucleotide
  Target: LAMA2; (+) strand; PAM type: NRG; PAM sequence: AAG
gtggaaggaggcacattgag

SEQ ID NO: 142527 - DNA, 20 bp, Artificial Sequence
  Description of Artificial Sequence: Synthetic oligonucleotide
  Target: LAMA2; (+) strand; PAM type: NRG; PAM sequence: CAG
acattgagaagataacttct

SEQ ID NO: 142528 - DNA, 20 bp, Artificial Sequence
  Description of Artificial Sequence: Synthetic oligonucleotide
  Target: LAMA2; (+) strand; PAM type: NRG; PAM sequence: TGG
gaagataacttctcagaata

SEQ ID NO: 142529 - DNA, 20 bp, Artificial Sequence
  Description of Artificial Sequence: Synthetic oligonucleotide
  Target: LAMA2; (+) strand; PAM type: NRG; PAM sequence: GGG
aagataacttctcagaatat

SEQ ID NO: 142530 - DNA, 20 bp, Artificial Sequence
  Description of Artificial Sequence: Synthetic oligonucleotide
  Target: LAMA2; (+) strand; PAM type: NRG; PAM sequence: CAG
ttctcagaatatgggaaaac

SEQ ID NO: 142531 - DNA, 20 bp, Artificial Sequence
  Description of Artificial Sequence: Synthetic oligonucleotide
  Target: LAMA2; (+) strand; PAM type: NRG; PAM sequence: AAG
agcaacaactcttatctcaa

SEQ ID NO: 142532 - DNA, 20 bp, Artificial Sequence
  Description of Artificial Sequence: Synthetic oligonucleotide
  Target: LAMA2; (+) strand; PAM type: NRG; PAM sequence: AAG
ctcttatctcaaaagtctca

SEQ ID NO: 142533 - DNA, 20 bp, Artificial Sequence
  Description of Artificial Sequence: Synthetic oligonucleotide
  Target: LAMA2; (+) strand; PAM type: NRG; PAM sequence: CGG
taatgcctatgtgttaaact

SEQ ID NO: 142534 - DNA, 20 bp, Artificial Sequence
  Description of Artificial Sequence: Synthetic oligonucleotide
  Target: LAMA2; (+) strand; PAM type: NRG; PAM sequence: CAG
tgtgttaaactcggtacata

SEQ ID NO: 142535 - DNA, 20 bp, Artificial Sequence
  Description of Artificial Sequence: Synthetic oligonucleotide
  Target: LAMA2; (+) strand; PAM type: NRG; PAM sequence: GAG
cagaatttacctccattgtt

SEQ ID NO: 142536 - DNA, 20 bp, Artificial Sequence
  Description of Artificial Sequence: Synthetic oligonucleotide
  Target: LAMA2; (+) strand; PAM type: NRG; PAM sequence: AGG
agaatttacctccattgttg

SEQ ID NO: 142537 - DNA, 20 bp, Artificial Sequence
  Description of Artificial Sequence: Synthetic oligonucleotide
  Target: LAMA2; (+) strand; PAM type: NRG; PAM sequence: GGG
gaatttacctccattgttga

SEQ ID NO: 142538 - DNA, 20 bp, Artificial Sequence
  Description of Artificial Sequence: Synthetic oligonucleotide
  Target: LAMA2; (+) strand; PAM type: NRG; PAM sequence: CAG
ttgttgagggatattgttat

SEQ ID NO: 142539 - DNA, 20 bp, Artificial Sequence
  Description of Artificial Sequence: Synthetic oligonucleotide
  Target: LAMA2; (+) strand; PAM type: NRG; PAM sequence: TAG
agggatattgttatcagatg

SEQ ID NO: 142540 - DNA, 20 bp, Artificial Sequence
  Description of Artificial Sequence: Synthetic oligonucleotide
  Target: LAMA2; (+) strand; PAM type: NRG; PAM sequence: TAG
tgttatcagatgtagaattc

SEQ ID NO: 142541 - DNA, 20 bp, Artificial Sequence
  Description of Artificial Sequence: Synthetic oligonucleotide
  Target: LAMA2; (+) strand; PAM type: NRG; PAM sequence: AGG
gttatcagatgtagaattct

SEQ ID NO: 142542 - DNA, 20 bp, Artificial Sequence
  Description of Artificial Sequence: Synthetic oligonucleotide
  Target: LAMA2; (+) strand; PAM type: NRG; PAM sequence: CAG
gatgtagaattctaggtttg

SEQ ID NO: 142543 - DNA, 20 bp, Artificial Sequence
  Description of Artificial Sequence: Synthetic oligonucleotide
  Target: LAMA2; (+) strand; PAM type: NRG; PAM sequence: TGG
ggtttgcagttattttcttt

SEQ ID NO: 142544 - DNA, 20 bp, Artificial Sequence
  Description of Artificial Sequence: Synthetic oligonucleotide
  Target: LAMA2; (+) strand; PAM type: NRG; PAM sequence: TAG
tctgatttccattgcttatg

SEQ ID NO: 142545 - DNA, 20 bp, Artificial Sequence
  Description of Artificial Sequence: Synthetic oligonucleotide
  Target: LAMA2; (+) strand; PAM type: NRG; PAM sequence: GAG
tgatttccattgcttatgta

SEQ ID NO: 142546 - DNA, 20 bp, Artificial Sequence
  Description of Artificial Sequence: Synthetic oligonucleotide
  Target: LAMA2; (+) strand; PAM type: NRG; PAM sequence: CAG
cattgcttatgtagagaatg

SEQ ID NO: 142547 - DNA, 20 bp, Artificial Sequence
  Description of Artificial Sequence: Synthetic oligonucleotide
  Target: LAMA2; (+) strand; PAM type: NRG; PAM sequence: TGG
gctatccgattactatcttt

SEQ ID NO: 142548 - DNA, 20 bp, Artificial Sequence
  Description of Artificial Sequence: Synthetic oligonucleotide
  Target: LAMA2; (+) strand; PAM type: NRG; PAM sequence: GAG
tatccgattactatcttttg

SEQ ID NO: 142549 - DNA, 20 bp, Artificial Sequence
  Description of Artificial Sequence: Synthetic oligonucleotide
  Target: LAMA2; (+) strand; PAM type: NRG; PAM sequence: CAG
atatttttttctttgttctt

SEQ ID NO: 142550 - DNA, 20 bp, Artificial Sequence
  Description of Artificial Sequence: Synthetic oligonucleotide
  Target: LAMA2; (+) strand; PAM type: NRG; PAM sequence: TAG
tttttttctttgttcttcag

SEQ ID NO: 142551 - DNA, 20 bp, Artificial Sequence
  Description of Artificial Sequence: Synthetic oligonucleotide
  Target: LAMA2; (+) strand; PAM type: NRG; PAM sequence: CAG
gtagttttactatgatgctt

SEQ ID NO: 142552 - DNA, 20 bp, Artificial Sequence
  Description of Artificial Sequence: Synthetic oligonucleotide
  Target: LAMA2; (+) strand; PAM type: NRG; PAM sequence: TAG
atcttcactgcccactacaa

SEQ ID NO: 142553 - DNA, 20 bp, Artificial Sequence
  Description of Artificial Sequence: Synthetic oligonucleotide
  Target: LAMA2; (+) strand; PAM type: NRG; PAM sequence: TAG
ctgcccactacaatagccac

SEQ ID NO: 142554 - DNA, 20 bp, Artificial Sequence
  Description of Artificial Sequence: Synthetic oligonucleotide
  Target: LAMA2; (+) strand; PAM type: NRG; PAM sequence: TGG
caatagccactagccatatg

SEQ ID NO: 142555 - DNA, 20 bp, Artificial Sequence
  Description of Artificial Sequence: Synthetic oligonucleotide
  Target: LAMA2; (+) strand; PAM type: NRG; PAM sequence: CAG
ggtaattcaaatttaaattt

SEQ ID NO: 142556 - DNA, 20 bp, Artificial Sequence
  Description of Artificial Sequence: Synthetic oligonucleotide
  Target: LAMA2; (+) strand; PAM type: NRG; PAM sequence: TAG
attccatttccccattacac

SEQ ID NO: 142557 - DNA, 20 bp, Artificial Sequence
  Description of Artificial Sequence: Synthetic oligonucleotide
  Target: LAMA2; (+) strand; PAM type: NRG; PAM sequence: AAG
cattacactagccacatttc

SEQ ID NO: 142558 - DNA, 20 bp, Artificial Sequence
  Description of Artificial Sequence: Synthetic oligonucleotide
  Target: LAMA2; (+) strand; PAM type: NRG; PAM sequence: CAG
ctagccacatttcaagtact

SEQ ID NO: 142559 - DNA, 20 bp, Artificial Sequence
  Description of Artificial Sequence: Synthetic oligonucleotide
  Target: LAMA2; (+) strand; PAM type: NRG; PAM sequence: TAG
gccacatttcaagtactcag

SEQ ID NO: 142560 - DNA, 20 bp, Artificial Sequence
  Description of Artificial Sequence: Synthetic oligonucleotide
  Target: LAMA2; (+) strand; PAM type: NRG; PAM sequence: TGG
tcaagtactcagtagccaca

SEQ ID NO: 142561 - DNA, 20 bp, Artificial Sequence
  Description of Artificial Sequence: Synthetic oligonucleotide
  Target: LAMA2; (+) strand; PAM type: NRG; PAM sequence: GGG
caagtactcagtagccacat

SEQ ID NO: 142562 - DNA, 20 bp, Artificial Sequence
  Description of Artificial Sequence: Synthetic oligonucleotide
  Target: LAMA2; (+) strand; PAM type: NRG; PAM sequence: TAG
actcagtagccacatgggac

SEQ ID NO: 142563 - DNA, 20 bp, Artificial Sequence
  Description of Artificial Sequence: Synthetic oligonucleotide
  Target: LAMA2; (+) strand; PAM type: NRG; PAM sequence: CAG
cagtagccacatgggactag

SEQ ID NO: 142564 - DNA, 20 bp, Artificial Sequence
  Description of Artificial Sequence: Synthetic oligonucleotide
  Target: LAMA2; (+) strand; PAM type: NRG; PAM sequence: TGG
gggactagcagccaccacac

SEQ ID NO: 142565 - DNA, 20 bp, Artificial Sequence
  Description of Artificial Sequence: Synthetic oligonucleotide
  Target: LAMA2; (+) strand; PAM type: NRG; PAM sequence: TGG
tagcagccaccacactggat

SEQ ID NO: 142566 - DNA, 20 bp, Artificial Sequence
  Description of Artificial Sequence: Synthetic oligonucleotide
  Target: LAMA2; (+) strand; PAM type: NRG; PAM sequence: GGG
agcagccaccacactggatt

SEQ ID NO: 142567 - DNA, 20 bp, Artificial Sequence
  Description of Artificial Sequence: Synthetic oligonucleotide
  Target: LAMA2; (+) strand; PAM type: NRG; PAM sequence: CAG
agccaccacactggattggg

SEQ ID NO: 142568 - DNA, 20 bp, Artificial Sequence
  Description of Artificial Sequence: Synthetic oligonucleotide
  Target: LAMA2; (+) strand; PAM type: NRG; PAM sequence: AAG
accacactggattgggcaga

SEQ ID NO: 142569 - DNA, 20 bp, Artificial Sequence
  Description of Artificial Sequence: Synthetic oligonucleotide
  Target: LAMA2; (+) strand; PAM type: NRG; PAM sequence: AAG
aacactgccattattgcaca

SEQ ID NO: 142570 - DNA, 20 bp, Artificial Sequence
  Description of Artificial Sequence: Synthetic oligonucleotide
  Target: LAMA2; (+) strand; PAM type: NRG; PAM sequence: TGG
attattgcacaaagttctgt

SEQ ID NO: 142571 - DNA, 20 bp, Artificial Sequence
  Description of Artificial Sequence: Synthetic oligonucleotide
  Target: LAMA2; (+) strand; PAM type: NRG; PAM sequence: GGG
ttattgcacaaagttctgtt

SEQ ID NO: 142572 - DNA, 20 bp, Artificial Sequence
  Description of Artificial Sequence: Synthetic oligonucleotide
  Target: LAMA2; (+) strand; PAM type: NRG; PAM sequence: TAG
tctgttgggcaatgctactt

SEQ ID NO: 142573 - DNA, 20 bp, Artificial Sequence
  Description of Artificial Sequence: Synthetic oligonucleotide
  Target: LAMA2; (+) strand; PAM type: NRG; PAM sequence: AAG
ttattttctacatatctgca

SEQ ID NO: 142574 - DNA, 20 bp, Artificial Sequence
  Description of Artificial Sequence: Synthetic oligonucleotide
  Target: LAMA2; (+) strand; PAM type: NRG; PAM sequence: CAG
tgcaaagtgatgtctttcat

SEQ ID NO: 142575 - DNA, 20 bp, Artificial Sequence
  Description of Artificial Sequence: Synthetic oligonucleotide
  Target: LAMA2; (+) strand; PAM type: NRG; PAM sequence: CAG
agtgatgtctttcatcagtt

SEQ ID NO: 142576 - DNA, 20 bp, Artificial Sequence
  Description of Artificial Sequence: Synthetic oligonucleotide
  Target: LAMA2; (+) strand; PAM type: NRG; PAM sequence: CAG
catcagttcagaaaactgtt

SEQ ID NO: 142577 - DNA, 20 bp, Artificial Sequence
  Description of Artificial Sequence: Synthetic oligonucleotide
  Target: LAMA2; (+) strand; PAM type: NRG; PAM sequence: TGG
gattctaattaaaaatgact

SEQ ID NO: 142578 - DNA, 20 bp, Artificial Sequence
  Description of Artificial Sequence: Synthetic oligonucleotide
  Target: LAMA2; (+) strand; PAM type: NRG; PAM sequence: TAG
gtattttaaactctcttctt

SEQ ID NO: 142579 - DNA, 20 bp, Artificial Sequence
  Description of Artificial Sequence: Synthetic oligonucleotide
  Target: LAMA2; (+) strand; PAM type: NRG; PAM sequence: TAG
gtctttctgtatcttcattc

SEQ ID NO: 142580 - DNA, 20 bp, Artificial Sequence
  Description of Artificial Sequence: Synthetic oligonucleotide
  Target: LAMA2; (+) strand; PAM type: NRG; PAM sequence: AGG
tctttctgtatcttcattct

SEQ ID NO: 142581 - DNA, 20 bp, Artificial Sequence
  Description of Artificial Sequence: Synthetic oligonucleotide
  Target: LAMA2; (+) strand; PAM type: NRG; PAM sequence: TGG
tcattctaggtattttcttc

SEQ ID NO: 142582 - DNA, 20 bp, Artificial Sequence
  Description of Artificial Sequence: Synthetic oligonucleotide
  Target: LAMA2; (+) strand; PAM type: NRG; PAM sequence: TAG
attttcttctggattacttc

SEQ ID NO: 142583 - DNA, 20 bp, Artificial Sequence
  Description of Artificial Sequence: Synthetic oligonucleotide
  Target: LAMA2; (+) strand; PAM type: NRG; PAM sequence: CAG
tagttcattaattctcttct

SEQ ID NO: 142584 - DNA, 20 bp, Artificial Sequence
  Description of Artificial Sequence: Synthetic oligonucleotide
  Target: LAMA2; (+) strand; PAM type: NRG; PAM sequence: AAG
ctatgtaaatattgctatta

SEQ ID NO: 142585 - DNA, 20 bp, Artificial Sequence
  Description of Artificial Sequence: Synthetic oligonucleotide
  Target: LAMA2; (+) strand; PAM type: NRG; PAM sequence: TAG
attgctattaaagttattca

SEQ ID NO: 142586 - DNA, 20 bp, Artificial Sequence
  Description of Artificial Sequence: Synthetic oligonucleotide
  Target: LAMA2; (+) strand; PAM type: NRG; PAM sequence: AGG
ttgctattaaagttattcat

SEQ ID NO: 142587 - DNA, 20 bp, Artificial Sequence
  Description of Artificial Sequence: Synthetic oligonucleotide
  Target: LAMA2; (+) strand; PAM type: NRG; PAM sequence: CAG
tcttaatttcatatattttt

SEQ ID NO: 142588 - DNA, 20 bp, Artificial Sequence
  Description of Artificial Sequence: Synthetic oligonucleotide
  Target: LAMA2; (+) strand; PAM type: NRG; PAM sequence: TGG
tttcagtttctaaatttctc

SEQ ID NO: 142589 - DNA, 20 bp, Artificial Sequence
  Description of Artificial Sequence: Synthetic oligonucleotide
  Target: LAMA2; (+) strand; PAM type: NRG; PAM sequence: GAG
tttctttttttttttttttt

SEQ ID NO: 142590 - DNA, 20 bp, Artificial Sequence
  Description of Artificial Sequence: Synthetic oligonucleotide
  Target: LAMA2; (+) strand; PAM type: NRG; PAM sequence: GAG
ttttttttttttttgagacc

SEQ ID NO: 142591 - DNA, 20 bp, Artificial Sequence
  Description of Artificial Sequence: Synthetic oligonucleotide
  Target: LAMA2; (+) strand; PAM type: NRG; PAM sequence: CAG
ccgagtctcgctctgtcacc

SEQ ID NO: 142592 - DNA, 20 bp, Artificial Sequence
  Description of Artificial Sequence: Synthetic oligonucleotide
  Target: LAMA2; (+) strand; PAM type: NRG; PAM sequence: AGG
cgagtctcgctctgtcaccc

SEQ ID NO: 142593 - DNA, 20 bp, Artificial Sequence
  Description of Artificial Sequence: Synthetic oligonucleotide
  Target: LAMA2; (+) strand; PAM type: NRG; PAM sequence: TGG
tctcgctctgtcacccaggc

SEQ ID NO: 142594 - DNA, 20 bp, Artificial Sequence
  Description of Artificial Sequence: Synthetic oligonucleotide
  Target: LAMA2; (+) strand; PAM type: NRG; PAM sequence: GAG
tcgctctgtcacccaggctg

SEQ ID NO: 142595 - DNA, 20 bp, Artificial Sequence
  Description of Artificial Sequence: Synthetic oligonucleotide
  Target: LAMA2; (+) strand; PAM type: NRG; PAM sequence: CAG
ctgtcacccaggctggagtg

SEQ ID NO: 142596 - DNA, 20 bp, Artificial Sequence
  Description of Artificial Sequence: Synthetic oligonucleotide
  Target: LAMA2; (+) strand; PAM type: NRG; PAM sequence: TGG
tcacccaggctggagtgcag

SEQ ID NO: 142597 - DNA, 20 bp, Artificial Sequence
  Description of Artificial Sequence: Synthetic oligonucleotide
  Target: LAMA2; (+) strand; PAM type: NRG; PAM sequence: CAG
ggagtgcagtggcgccatct

SEQ ID NO: 142598 - DNA, 20 bp, Artificial Sequence
  Description of Artificial Sequence: Synthetic oligonucleotide
  Target: LAMA2; (+) strand; PAM type: NRG; PAM sequence: CGG
tcactgtaacctccgcctcc

SEQ ID NO: 142599 - DNA, 20 bp, Artificial Sequence
  Description of Artificial Sequence: Synthetic oligonucleotide
  Target: LAMA2; (+) strand; PAM type: NRG; PAM sequence: GGG
cactgtaacctccgcctccc

SEQ ID NO: 142600 - DNA, 20 bp, Artificial Sequence
  Description of Artificial Sequence: Synthetic oligonucleotide
  Target: LAMA2; (+) strand; PAM type: NRG; PAM sequence: CGG
acctccgcctcccgggttcc

SEQ ID NO: 142601 - DNA, 20 bp, Artificial Sequence
  Description of Artificial Sequence: Synthetic oligonucleotide
  Target: LAMA2; (+) strand; PAM type: NRG; PAM sequence: GGG
cctccgcctcccgggttccc

SEQ ID NO: 142602 - DNA, 20 bp, Artificial Sequence
  Description of Artificial Sequence: Synthetic oligonucleotide
  Target: LAMA2; (+) strand; PAM type: NRG; PAM sequence: AAG
cctcccgggttcccgggttc

SEQ ID NO: 142603 - DNA, 20 bp, Artificial Sequence
  Description of Artificial Sequence: Synthetic oligonucleotide
  Target: LAMA2; (+) strand; PAM type: NRG; PAM sequence: TGG
cccgggttcccgggttcaag

SEQ ID NO: 142604 - DNA, 20 bp, Artificial Sequence
  Description of Artificial Sequence: Synthetic oligonucleotide
  Target: LAMA2; (+) strand; PAM type: NRG; PAM sequence: CAG
ttcaagtggttctcctgcct

SEQ ID NO: 142605 - DNA, 20 bp, Artificial Sequence
  Description of Artificial Sequence: Synthetic oligonucleotide
  Target: LAMA2; (+) strand; PAM type: NRG; PAM sequence: GAG
ttctcctgcctcagcctcct

SEQ ID NO: 142606 - DNA, 20 bp, Artificial Sequence
  Description of Artificial Sequence: Synthetic oligonucleotide
  Target: LAMA2; (+) strand; PAM type: NRG; PAM sequence: TAG
tcctgcctcagcctcctgag

SEQ ID NO: 142607 - DNA, 20 bp, Artificial Sequence
  Description of Artificial Sequence: Synthetic oligonucleotide
  Target: LAMA2; (+) strand; PAM type: NRG; PAM sequence: TGG
gcctcagcctcctgagtagc

SEQ ID NO: 142608 - DNA, 20 bp, Artificial Sequence
  Description of Artificial Sequence: Synthetic oligonucleotide
  Target: LAMA2; (+) strand; PAM type: NRG; PAM sequence: GGG
cctcagcctcctgagtagct

SEQ ID NO: 142609 - DNA, 20 bp, Artificial Sequence
  Description of Artificial Sequence: Synthetic oligonucleotide
  Target: LAMA2; (+) strand; PAM type: NRG; PAM sequence: CAG
ctcctgagtagctgggatta

SEQ ID NO: 142610 - DNA, 20 bp, Artificial Sequence
  Description of Artificial Sequence: Synthetic oligonucleotide
  Target: LAMA2; (+) strand; PAM type: NRG; PAM sequence: AGG
tcctgagtagctgggattac

SEQ ID NO: 142611 - DNA, 20 bp, Artificial Sequence
  Description of Artificial Sequence: Synthetic oligonucleotide
  Target: LAMA2; (+) strand; PAM type: NRG; PAM sequence: CAG
ccacttgatttttgtgtttt

SEQ ID NO: 142612 - DNA, 20 bp, Artificial Sequence
  Description of Artificial Sequence: Synthetic oligonucleotide
  Target: LAMA2; (+) strand; PAM type: NRG; PAM sequence: CAG
tgatttttgtgttttcagta

SEQ ID NO: 142613 - DNA, 20 bp, Artificial Sequence
  Description of Artificial Sequence: Synthetic oligonucleotide
  Target: LAMA2; (+) strand; PAM type: NRG; PAM sequence: CAG
ttttgtgttttcagtacaga

SEQ ID NO: 142614 - DNA, 20 bp, Artificial Sequence
  Description of Artificial Sequence: Synthetic oligonucleotide
  Target: LAMA2; (+) strand; PAM type: NRG; PAM sequence: AGG
tttgtgttttcagtacagac

SEQ ID NO: 142615 - DNA, 20 bp, Artificial Sequence
  Description of Artificial Sequence: Synthetic oligonucleotide
  Target: LAMA2; (+) strand; PAM type: NRG; PAM sequence: GGG
ttgtgttttcagtacagaca

SEQ ID NO: 142616 - DNA, 20 bp, Artificial Sequence
  Description of Artificial Sequence: Synthetic oligonucleotide
  Target: LAMA2; (+) strand; PAM type: NRG; PAM sequence: TGG
cagacagggtttcaccatgt

SEQ ID NO: 142617 - DNA, 20 bp, Artificial Sequence
  Description of Artificial Sequence: Synthetic oligonucleotide
  Target: LAMA2; (+) strand; PAM type: NRG; PAM sequence: CAG
cagggtttcaccatgttggt

SEQ ID NO: 142618 - DNA, 20 bp, Artificial Sequence
  Description of Artificial Sequence: Synthetic oligonucleotide
  Target: LAMA2; (+) strand; PAM type: NRG; PAM sequence: AGG
agggtttcaccatgttggtc

SEQ ID NO: 142619 - DNA, 20 bp, Artificial Sequence
  Description of Artificial Sequence: Synthetic oligonucleotide
  Target: LAMA2; (+) strand; PAM type: NRG; PAM sequence: TGG
tttcaccatgttggtcagga

SEQ ID NO: 142620 - DNA, 20 bp, Artificial Sequence
  Description of Artificial Sequence: Synthetic oligonucleotide
  Target: LAMA2; (+) strand; PAM type: NRG; PAM sequence: TGG
acctcatgatctgcccacct

SEQ ID NO: 142621 - DNA, 20 bp, Artificial Sequence
  Description of Artificial Sequence: Synthetic oligonucleotide
  Target: LAMA2; (+) strand; PAM type: NRG; PAM sequence: AAG
ctgcccaccttggcctccca

SEQ ID NO: 142622 - DNA, 20 bp, Artificial Sequence
  Description of Artificial Sequence: Synthetic oligonucleotide
  Target: LAMA2; (+) strand; PAM type: NRG; PAM sequence: TAG
accttggcctcccaaagtgc

SEQ ID NO: 142623 - DNA, 20 bp, Artificial Sequence
  Description of Artificial Sequence: Synthetic oligonucleotide
  Target: LAMA2; (+) strand; PAM type: NRG; PAM sequence: AGG
ccttggcctcccaaagtgct

SEQ ID NO: 142624 - DNA, 20 bp, Artificial Sequence
  Description of Artificial Sequence: Synthetic oligonucleotide
  Target: LAMA2; (+) strand; PAM type: NRG; PAM sequence: CAG
ctcccaaagtgctaggatta

SEQ ID NO: 142625 - DNA, 20 bp, Artificial Sequence
  Description of Artificial Sequence: Synthetic oligonucleotide
  Target: LAMA2; (+) strand; PAM type: NRG; PAM sequence: AGG
tcccaaagtgctaggattac

SEQ ID NO: 142626 - DNA, 20 bp, Artificial Sequence
  Description of Artificial Sequence: Synthetic oligonucleotide
  Target: LAMA2; (+) strand; PAM type: NRG; PAM sequence: GAG
agtgctaggattacaggcat

SEQ ID NO: 142627 - DNA, 20 bp, Artificial Sequence
  Description of Artificial Sequence: Synthetic oligonucleotide
  Target: LAMA2; (+) strand; PAM type: NRG; PAM sequence: CAG
caggcatgagccactgtgcc

SEQ ID NO: 142628 - DNA, 20 bp, Artificial Sequence
  Description of Artificial Sequence: Synthetic oligonucleotide
  Target: LAMA2; (+) strand; PAM type: NRG; PAM sequence: TGG
atgagccactgtgcccagcc

SEQ ID NO: 142629 - DNA, 20 bp, Artificial Sequence
  Description of Artificial Sequence: Synthetic oligonucleotide
  Target: LAMA2; (+) strand; PAM type: NRG; PAM sequence: TAG
cagcctggttcattttcaaa

SEQ ID NO: 142630 - DNA, 20 bp, Artificial Sequence
  Description of Artificial Sequence: Synthetic oligonucleotide
  Target: LAMA2; (+) strand; PAM type: NRG; PAM sequence: AAG
cctggttcattttcaaatag

SEQ ID NO: 142631 - DNA, 20 bp, Artificial Sequence
  Description of Artificial Sequence: Synthetic oligonucleotide
  Target: LAMA2; (+) strand; PAM type: NRG; PAM sequence: TAG
acattgaaattttatattta

SEQ ID NO: 142632 - DNA, 20 bp, Artificial Sequence
  Description of Artificial Sequence: Synthetic oligonucleotide
  Target: LAMA2; (+) strand; PAM type: NRG; PAM sequence: GAG
attctatttttaatctcctt

SEQ ID NO: 142633 - DNA, 20 bp, Artificial Sequence
  Description of Artificial Sequence: Synthetic oligonucleotide
  Target: LAMA2; (+) strand; PAM type: NRG; PAM sequence: AAG
ttttaatctccttgagcata

SEQ ID NO: 142634 - DNA, 20 bp, Artificial Sequence
  Description of Artificial Sequence: Synthetic oligonucleotide
  Target: LAMA2; (+) strand; PAM type: NRG; PAM sequence: AAG
aaagtaaaaattatctttaa

SEQ ID NO: 142635 - DNA, 20 bp, Artificial Sequence
  Description of Artificial Sequence: Synthetic oligonucleotide
  Target: LAMA2; (+) strand; PAM type: NRG; PAM sequence: TGG
tgtctgataattctaatata

SEQ ID NO: 142636 - DNA, 20 bp, Artificial Sequence
  Description of Artificial Sequence: Synthetic oligonucleotide
  Target: LAMA2; (+) strand; PAM type: NRG; PAM sequence: TGG
attctaatatatggcctttt

SEQ ID NO: 142637 - DNA, 20 bp, Artificial Sequence
  Description of Artificial Sequence: Synthetic oligonucleotide
  Target: LAMA2; (+) strand; PAM type: NRG; PAM sequence: CAG
gcctgattatctttgtataa

SEQ ID NO: 142638 - DNA, 20 bp, Artificial Sequence
  Description of Artificial Sequence: Synthetic oligonucleotide
  Target: LAMA2; (+) strand; PAM type: NRG; PAM sequence: AAG
tgattatctttgtataacag

SEQ ID NO: 142639 - DNA, 20 bp, Artificial Sequence
  Description of Artificial Sequence: Synthetic oligonucleotide
  Target: LAMA2; (+) strand; PAM type: NRG; PAM sequence: AAG
ataacagaagttgtatttga

SEQ ID NO: 142640 - DNA, 20 bp, Artificial Sequence
  Description of Artificial Sequence: Synthetic oligonucleotide
  Target: LAMA2; (+) strand; PAM type: NRG; PAM sequence: GAG
aacagaagttgtatttgaaa

SEQ ID NO: 142641 - DNA, 20 bp, Artificial Sequence
  Description of Artificial Sequence: Synthetic oligonucleotide
  Target: LAMA2; (+) strand; PAM type: NRG; PAM sequence: TAG
tgtatttgaaagagaatgtg

SEQ ID NO: 142642 - DNA, 20 bp, Artificial Sequence
  Description of Artificial Sequence: Synthetic oligonucleotide
  Target: LAMA2; (+) strand; PAM type: NRG; PAM sequence: GAG
agaatgtgtagaaataattt

SEQ ID NO: 142643 - DNA, 20 bp, Artificial Sequence
  Description of Artificial Sequence: Synthetic oligonucleotide
  Target: LAMA2; (+) strand; PAM type: NRG; PAM sequence: GAG
aatgtgtagaaataatttga

SEQ ID NO: 142644 - DNA, 20 bp, Artificial Sequence
  Description of Artificial Sequence: Synthetic oligonucleotide
  Target: LAMA2; (+) strand; PAM type: NRG; PAM sequence: TAG
tgtagaaataatttgagagc

SEQ ID NO: 142645 - DNA, 20 bp, Artificial Sequence
  Description of Artificial Sequence: Synthetic oligonucleotide
  Target: LAMA2; (+) strand; PAM type: NRG; PAM sequence: CAG
gaactttctgatgctactgc

SEQ ID NO: 142646 - DNA, 20 bp, Artificial Sequence
  Description of Artificial Sequence: Synthetic oligonucleotide
  Target: LAMA2; (+) strand; PAM type: NRG; PAM sequence: AGG
aactttctgatgctactgcc

SEQ ID NO: 142647 - DNA, 20 bp, Artificial Sequence
  Description of Artificial Sequence: Synthetic oligonucleotide
  Target: LAMA2; (+) strand; PAM type: NRG; PAM sequence: TGG
ctgatgctactgccaggcaa

SEQ ID NO: 142648 - DNA, 20 bp, Artificial Sequence
  Description of Artificial Sequence: Synthetic oligonucleotide
  Target: LAMA2; (+) strand; PAM type: NRG; PAM sequence: TGG
actgccaggcaatggaaatc

SEQ ID NO: 142649 - DNA, 20 bp, Artificial Sequence
  Description of Artificial Sequence: Synthetic oligonucleotide
  Target: LAMA2; (+) strand; PAM type: NRG; PAM sequence: TAG
ggatcatcttaattcaattt

SEQ ID NO: 142650 - DNA, 20 bp, Artificial Sequence
  Description of Artificial Sequence: Synthetic oligonucleotide
  Target: LAMA2; (+) strand; PAM type: NRG; PAM sequence: AGG
gatcatcttaattcaatttt

SEQ ID NO: 142651 - DNA, 20 bp, Artificial Sequence
  Description of Artificial Sequence: Synthetic oligonucleotide
  Target: LAMA2; (+) strand; PAM type: NRG; PAM sequence: GGG
atcatcttaattcaatttta

SEQ ID NO: 142652 - DNA, 20 bp, Artificial Sequence
  Description of Artificial Sequence: Synthetic oligonucleotide
  Target: LAMA2; (+) strand; PAM type: NRG; PAM sequence: TGG
attttagggattcaaatttc

SEQ ID NO: 142653 - DNA, 20 bp, Artificial Sequence
  Description of Artificial Sequence: Synthetic oligonucleotide
  Target: LAMA2; (+) strand; PAM type: NRG; PAM sequence: GGG
ttttagggattcaaatttct

SEQ ID NO: 142654 - DNA, 20 bp, Artificial Sequence
  Description of Artificial Sequence: Synthetic oligonucleotide
  Target: LAMA2; (+) strand; PAM type: NRG; PAM sequence: CAG
attcaaatttctgggacatt

SEQ ID NO: 142655 - DNA, 20 bp, Artificial Sequence
  Description of Artificial Sequence: Synthetic oligonucleotide
  Target: LAMA2; (+) strand; PAM type: NRG; PAM sequence: AAG
tgggacattcagatgattca

SEQ ID NO: 142656 - DNA, 20 bp, Artificial Sequence
  Description of Artificial Sequence: Synthetic oligonucleotide
  Target: LAMA2; (+) strand; PAM type: NRG; PAM sequence: CAG
ttcaaagcattgctataacc

SEQ ID NO: 142657 - DNA, 20 bp, Artificial Sequence
  Description of Artificial Sequence: Synthetic oligonucleotide
  Target: LAMA2; (+) strand; PAM type: NRG; PAM sequence: CAG
gcattgctataacccagtga

SEQ ID NO: 142658 - DNA, 20 bp, Artificial Sequence
  Description of Artificial Sequence: Synthetic oligonucleotide
  Target: LAMA2; (+) strand; PAM type: NRG; PAM sequence: CAG
agtgacagctgctttaattc

SEQ ID NO: 142659 - DNA, 20 bp, Artificial Sequence
  Description of Artificial Sequence: Synthetic oligonucleotide
  Target: LAMA2; (+) strand; PAM type: NRG; PAM sequence: TGG
attcccatgctgcttatctt

SEQ ID NO: 142660 - DNA, 20 bp, Artificial Sequence
  Description of Artificial Sequence: Synthetic oligonucleotide
  Target: LAMA2; (+) strand; PAM type: NRG; PAM sequence: GAG
tcccatgctgcttatctttg

SEQ ID NO: 142661 - DNA, 20 bp, Artificial Sequence
  Description of Artificial Sequence: Synthetic oligonucleotide
  Target: LAMA2; (+) strand; PAM type: NRG; PAM sequence: AAG
gctgcttatctttggagtcc

SEQ ID NO: 142662 - DNA, 20 bp, Artificial Sequence
  Description of Artificial Sequence: Synthetic oligonucleotide
  Target: LAMA2; (+) strand; PAM type: NRG; PAM sequence: CAG
cttatctttggagtccaagc

SEQ ID NO: 142663 - DNA, 20 bp, Artificial Sequence
  Description of Artificial Sequence: Synthetic oligonucleotide
  Target: LAMA2; (+) strand; PAM type: NRG; PAM sequence: TGG
ggagtccaagccagcgtgtg

SEQ ID NO: 142664 - DNA, 20 bp, Artificial Sequence
  Description of Artificial Sequence: Synthetic oligonucleotide
  Target: LAMA2; (+) strand; PAM type: NRG; PAM sequence: GGG
gagtccaagccagcgtgtgt

SEQ ID NO: 142665 - DNA, 20 bp, Artificial Sequence
  Description of Artificial Sequence: Synthetic oligonucleotide
  Target: LAMA2; (+) strand; PAM type: NRG; PAM sequence: AAG
agcgtgtgtgggaattacga

SEQ ID NO: 142666 - DNA, 20 bp, Artificial Sequence
  Description of Artificial Sequence: Synthetic oligonucleotide
  Target: LAMA2; (+) strand; PAM type: NRG; PAM sequence: CAG
ttacgaaagtcccacccatg

SEQ ID NO: 142667 - DNA, 20 bp, Artificial Sequence
  Description of Artificial Sequence: Synthetic oligonucleotide
  Target: LAMA2; (+) strand; PAM type: NRG; PAM sequence: TGG
aagtcccacccatgcagtcc

SEQ ID NO: 142668 - DNA, 20 bp, Artificial Sequence
  Description of Artificial Sequence: Synthetic oligonucleotide
  Target: LAMA2; (+) strand; PAM type: NRG; PAM sequence: CAG
caacttttgtcctcctaata

SEQ ID NO: 142669 - DNA, 20 bp, Artificial Sequence
  Description of Artificial Sequence: Synthetic oligonucleotide
  Target: LAMA2; (+) strand; PAM type: NRG; PAM sequence: CAG
cttttgtcctcctaatacag

SEQ ID NO: 142670 - DNA, 20 bp, Artificial Sequence
  Description of Artificial Sequence: Synthetic oligonucleotide
  Target: LAMA2; (+) strand; PAM type: NRG; PAM sequence: AGG
ttttgtcctcctaatacagc

SEQ ID NO: 142671 - DNA, 20 bp, Artificial Sequence
  Description of Artificial Sequence: Synthetic oligonucleotide
  Target: LAMA2; (+) strand; PAM type: NRG; PAM sequence: GGG
tttgtcctcctaatacagca

SEQ ID NO: 142672 - DNA, 20 bp, Artificial Sequence
  Description of Artificial Sequence: Synthetic oligonucleotide
  Target: LAMA2; (+) strand; PAM type: NRG; PAM sequence: AAG
taatacagcagggctgtcaa

SEQ ID NO: 142673 - DNA, 20 bp, Artificial Sequence
  Description of Artificial Sequence: Synthetic oligonucleotide
  Target: LAMA2; (+) strand; PAM type: NRG; PAM sequence: GAG
atacagcagggctgtcaaaa

SEQ ID NO: 142674 - DNA, 20 bp, Artificial Sequence
  Description of Artificial Sequence: Synthetic oligonucleotide
  Target: LAMA2; (+) strand; PAM type: NRG; PAM sequence: CAG
gggctgtcaaaagagctgct

SEQ ID NO: 142675 - DNA, 20 bp, Artificial Sequence
  Description of Artificial Sequence: Synthetic oligonucleotide
  Target: LAMA2; (+) strand; PAM type: NRG; PAM sequence: CAG
aaaagagctgctcagtctct

SEQ ID NO: 142676 - DNA, 20 bp, Artificial Sequence
  Description of Artificial Sequence: Synthetic oligonucleotide
  Target: LAMA2; (+) strand; PAM type: NRG; PAM sequence: TGG
cagtctctcagccatgtgtc

SEQ ID NO: 142677 - DNA, 20 bp, Artificial Sequence
  Description of Artificial Sequence: Synthetic oligonucleotide
  Target: LAMA2; (+) strand; PAM type: NRG; PAM sequence: CAG
ctctcagccatgtgtctgga

SEQ ID NO: 142678 - DNA, 20 bp, Artificial Sequence
  Description of Artificial Sequence: Synthetic oligonucleotide
  Target: LAMA2; (+) strand; PAM type: NRG; PAM sequence: AGG
tctcagccatgtgtctggac

SEQ ID NO: 142679 - DNA, 20 bp, Artificial Sequence
  Description of Artificial Sequence: Synthetic oligonucleotide
  Target: LAMA2; (+) strand; PAM type: NRG; PAM sequence: CAG
tctggacaggaaaatgctca

SEQ ID NO: 142680 - DNA, 20 bp, Artificial Sequence
  Description of Artificial Sequence: Synthetic oligonucleotide
  Target: LAMA2; (+) strand; PAM type: NRG; PAM sequence: AGG
ctggacaggaaaatgctcac

SEQ ID NO: 142681 - DNA, 20 bp, Artificial Sequence
  Description of Artificial Sequence: Synthetic oligonucleotide
  Target: LAMA2; (+) strand; PAM type: NRG; PAM sequence: AAG
ggaaaatgctcacaggacaa

SEQ ID NO: 142682 - DNA, 20 bp, Artificial Sequence
  Description of Artificial Sequence: Synthetic oligonucleotide
  Target: LAMA2; (+) strand; PAM type: NRG; PAM sequence: TAG
caacgtaccaatcacctgtc

SEQ ID NO: 142683 - DNA, 20 bp, Artificial Sequence
  Description of Artificial Sequence: Synthetic oligonucleotide
  Target: LAMA2; (+) strand; PAM type: NRG; PAM sequence: GAG
tctcttttgtccttgatgtt

SEQ ID NO: 142684 - DNA, 20 bp, Artificial Sequence
  Description of Artificial Sequence: Synthetic oligonucleotide
  Target: LAMA2; (+) strand; PAM type: NRG; PAM sequence: AAG
cttttgtccttgatgttgag

SEQ ID NO: 142685 - DNA, 20 bp, Artificial Sequence
  Description of Artificial Sequence: Synthetic oligonucleotide
  Target: LAMA2; (+) strand; PAM type: NRG; PAM sequence: AGG
ttttgtccttgatgttgaga

SEQ ID NO: 142686 - DNA, 20 bp, Artificial Sequence
  Description of Artificial Sequence: Synthetic oligonucleotide
  Target: LAMA2; (+) strand; PAM type: NRG; PAM sequence: TAG
ggttatcttcactctcttga

SEQ ID NO: 142687 - DNA, 20 bp, Artificial Sequence
  Description of Artificial Sequence: Synthetic oligonucleotide
  Target: LAMA2; (+) strand; PAM type: NRG; PAM sequence: TGG
ctctcttgatagctctcaca

SEQ ID NO: 142688 - DNA, 20 bp, Artificial Sequence
  Description of Artificial Sequence: Synthetic oligonucleotide
  Target: LAMA2; (+) strand; PAM type: NRG; PAM sequence: CAG
tatgtttttgtatatttatc

SEQ ID NO: 142689 - DNA, 20 bp, Artificial Sequence
  Description of Artificial Sequence: Synthetic oligonucleotide
  Target: LAMA2; (+) strand; PAM type: NRG; PAM sequence: TAG
gtatatttatccagtttgtc

SEQ ID NO: 142690 - DNA, 20 bp, Artificial Sequence
  Description of Artificial Sequence: Synthetic oligonucleotide
  Target: LAMA2; (+) strand; PAM type: NRG; PAM sequence: GAG
tttgtctagttgttgtcatt

SEQ ID NO: 142691 - DNA, 20 bp, Artificial Sequence
  Description of Artificial Sequence: Synthetic oligonucleotide
  Target: LAMA2; (+) strand; PAM type: NRG; PAM sequence: GAG
tgtctagttgttgtcattga

SEQ ID NO: 142692 - DNA, 20 bp, Artificial Sequence
  Description of Artificial Sequence: Synthetic oligonucleotide
  Target: LAMA2; (+) strand; PAM type: NRG; PAM sequence: TAG
actgtataatctaccataaa

SEQ ID NO: 142693 - DNA, 20 bp, Artificial Sequence
  Description of Artificial Sequence: Synthetic oligonucleotide
  Target: LAMA2; (+) strand; PAM type: NRG; PAM sequence: AAG
gtataatctaccataaatag

SEQ ID NO: 142694 - DNA, 20 bp, Artificial Sequence
  Description of Artificial Sequence: Synthetic oligonucleotide
  Target: LAMA2; (+) strand; PAM type: NRG; PAM sequence: AAG
atctaccataaatagaagcg

SEQ ID NO: 142695 - DNA, 20 bp, Artificial Sequence
  Description of Artificial Sequence: Synthetic oligonucleotide
  Target: LAMA2; (+) strand; PAM type: NRG; PAM sequence: TGG
gcatttaattttttttattt

SEQ ID NO: 142696 - DNA, 20 bp, Artificial Sequence
  Description of Artificial Sequence: Synthetic oligonucleotide
  Target: LAMA2; (+) strand; PAM type: NRG; PAM sequence: AAG
ttttattttggaattatgtt

SEQ ID NO: 142697 - DNA, 20 bp, Artificial Sequence
  Description of Artificial Sequence: Synthetic oligonucleotide
  Target: LAMA2; (+) strand; PAM type: NRG; PAM sequence: AAG
taagtttacacacatgtatg

SEQ ID NO: 142698 - DNA, 20 bp, Artificial Sequence
  Description of Artificial Sequence: Synthetic oligonucleotide
  Target: LAMA2; (+) strand; PAM type: NRG; PAM sequence: TAG
acacacatgtatgaagatta

SEQ ID NO: 142699 - DNA, 20 bp, Artificial Sequence
  Description of Artificial Sequence: Synthetic oligonucleotide
  Target: LAMA2; (+) strand; PAM type: NRG; PAM sequence: GAG
acacatgtatgaagattata

SEQ ID NO: 142700 - DNA, 20 bp, Artificial Sequence
  Description of Artificial Sequence: Synthetic oligonucleotide
  Target: LAMA2; (+) strand; PAM type: NRG; PAM sequence: CAG
aatcctcacattccctcatc

SEQ ID NO: 142701 - DNA, 20 bp, Artificial Sequence
  Description of Artificial Sequence: Synthetic oligonucleotide
  Target: LAMA2; (+) strand; PAM type: NRG; PAM sequence: TAG
ttccctcatccagctatccc

SEQ ID NO: 142702 - DNA, 20 bp, Artificial Sequence
  Description of Artificial Sequence: Synthetic oligonucleotide
  Target: LAMA2; (+) strand; PAM type: NRG; PAM sequence: AGG
tccctcatccagctatccct

SEQ ID NO: 142703 - DNA, 20 bp, Artificial Sequence
  Description of Artificial Sequence: Synthetic oligonucleotide
  Target: LAMA2; (+) strand; PAM type: NRG; PAM sequence: AAG
acaatgcacatgttaaaact

SEQ ID NO: 142704 - DNA, 20 bp, Artificial Sequence
  Description of Artificial Sequence: Synthetic oligonucleotide
  Target: LAMA2; (+) strand; PAM type: NRG; PAM sequence: AAG
atgcacatgttaaaactaag

SEQ ID NO: 142705 - DNA, 20 bp, Artificial Sequence
  Description of Artificial Sequence: Synthetic oligonucleotide
  Target: LAMA2; (+) strand; PAM type: NRG; PAM sequence: TAG
acatgttaaaactaagaagt

SEQ ID NO: 142706 - DNA, 20 bp, Artificial Sequence
  Description of Artificial Sequence: Synthetic oligonucleotide
  Target: LAMA2; (+) strand; PAM type: NRG; PAM sequence: CAG
cattattgttatctaaacca

SEQ ID NO: 142707 - DNA, 20 bp, Artificial Sequence
  Description of Artificial Sequence: Synthetic oligonucleotide
  Target: LAMA2; (+) strand; PAM type: NRG; PAM sequence: CAG
tctaaaccacagaccttatt

SEQ ID NO: 142708 - DNA, 20 bp, Artificial Sequence
  Description of Artificial Sequence: Synthetic oligonucleotide
  Target: LAMA2; (+) strand; PAM type: NRG; PAM sequence: AGG
ctaaaccacagaccttattc

SEQ ID NO: 142709 - DNA, 20 bp, Artificial Sequence
  Description of Artificial Sequence: Synthetic oligonucleotide
  Target: LAMA2; (+) strand; PAM type: NRG; PAM sequence: TGG
caatttcattttttctcttc

SEQ ID NO: 142710 - DNA, 20 bp, Artificial Sequence
  Description of Artificial Sequence: Synthetic oligonucleotide
  Target: LAMA2; (+) strand; PAM type: NRG; PAM sequence: GGG
aatttcattttttctcttct

SEQ ID NO: 142711 - DNA, 20 bp, Artificial Sequence
  Description of Artificial Sequence: Synthetic oligonucleotide
  Target: LAMA2; (+) strand; PAM type: NRG; PAM sequence: CAG
ttctcttctgggatccaatt

SEQ ID NO: 142712 - DNA, 20 bp, Artificial Sequence
  Description of Artificial Sequence: Synthetic oligonucleotide
  Target: LAMA2; (+) strand; PAM type: NRG; PAM sequence: AGG
tctcttctgggatccaattc

SEQ ID NO: 142713 - DNA, 20 bp, Artificial Sequence
  Description of Artificial Sequence: Synthetic oligonucleotide
  Target: LAMA2; (+) strand; PAM type: NRG; PAM sequence: TAG
ttcaggtactattttgcatt

SEQ ID NO: 142714 - DNA, 20 bp, Artificial Sequence
  Description of Artificial Sequence: Synthetic oligonucleotide
  Target: LAMA2; (+) strand; PAM type: NRG; PAM sequence: CAG
atttagtcactgatctgtga

SEQ ID NO: 142715 - DNA, 20 bp, Artificial Sequence
  Description of Artificial Sequence: Synthetic oligonucleotide
  Target: LAMA2; (+) strand; PAM type: NRG; PAM sequence: AAG
cactgatctgtgacagtttt

SEQ ID NO: 142716 - DNA, 20 bp, Artificial Sequence
  Description of Artificial Sequence: Synthetic oligonucleotide
  Target: LAMA2; (+) strand; PAM type: NRG; PAM sequence: GAG
ctgatctgtgacagttttaa

SEQ ID NO: 142717 - DNA, 20 bp, Artificial Sequence
  Description of Artificial Sequence: Synthetic oligonucleotide
  Target: LAMA2; (+) strand; PAM type: NRG; PAM sequence: AAG
acagttttaagagatatttt

SEQ ID NO: 142718 - DNA, 20 bp, Artificial Sequence
  Description of Artificial Sequence: Synthetic oligonucleotide
  Target: LAMA2; (+) strand; PAM type: NRG; PAM sequence: AAG
gatattttaagaaatatttt

SEQ ID NO: 142719 - DNA, 20 bp, Artificial Sequence
  Description of Artificial Sequence: Synthetic oligonucleotide
  Target: LAMA2; (+) strand; PAM type: NRG; PAM sequence: GAG
tattttaagaaatattttaa

SEQ ID NO: 142720 - DNA, 20 bp, Artificial Sequence
  Description of Artificial Sequence: Synthetic oligonucleotide
  Target: LAMA2; (+) strand; PAM type: NRG; PAM sequence: TAG
gaaatattttaagagatatt

SEQ ID NO: 142721 - DNA, 20 bp, Artificial Sequence
  Description of Artificial Sequence: Synthetic oligonucleotide
  Target: LAMA2; (+) strand; PAM type: NRG; PAM sequence: GAG
aatattttaagagatattta

SEQ ID NO: 142722 - DNA, 20 bp, Artificial Sequence
  Description of Artificial Sequence: Synthetic oligonucleotide
  Target: LAMA2; (+) strand; PAM type: NRG; PAM sequence: TAG
agatatttagagatatttta

SEQ ID NO: 142723 - DNA, 20 bp, Artificial Sequence
  Description of Artificial Sequence: Synthetic oligonucleotide
  Target: LAMA2; (+) strand; PAM type: NRG; PAM sequence: CAG
atattttatagactattatt

SEQ ID NO: 142724 - DNA, 20 bp, Artificial Sequence
  Description of Artificial Sequence: Synthetic oligonucleotide
  Target: LAMA2; (+) strand; PAM type: NRG; PAM sequence: TGG
ttatagactattattcagtt

SEQ ID NO: 142725 - DNA, 20 bp, Artificial Sequence
  Description of Artificial Sequence: Synthetic oligonucleotide
  Target: LAMA2; (+) strand; PAM type: NRG; PAM sequence: GGG
tatagactattattcagttt

SEQ ID NO: 142726 - DNA, 20 bp, Artificial Sequence
  Description of Artificial Sequence: Synthetic oligonucleotide
  Target: LAMA2; (+) strand; PAM type: NRG; PAM sequence: TGG
gtttgcctgatgttttttca

SEQ ID NO: 142727 - DNA, 20 bp, Artificial Sequence
  Description of Artificial Sequence: Synthetic oligonucleotide
  Target: LAMA2; (+) strand; PAM type: NRG; PAM sequence: TGG
atgttttttcatggttaaac

SEQ ID NO: 142728 - DNA, 20 bp, Artificial Sequence
  Description of Artificial Sequence: Synthetic oligonucleotide
  Target: LAMA2; (+) strand; PAM type: NRG; PAM sequence: GGG
tgttttttcatggttaaact

SEQ ID NO: 142729 - DNA, 20 bp, Artificial Sequence
  Description of Artificial Sequence: Synthetic oligonucleotide
  Target: LAMA2; (+) strand; PAM type: NRG; PAM sequence: TGG
tcatggttaaactgggcttc

SEQ ID NO: 142730 - DNA, 20 bp, Artificial Sequence
  Description of Artificial Sequence: Synthetic oligonucleotide
  Target: LAMA2; (+) strand; PAM type: NRG; PAM sequence: TGG
taaactgggcttctggattt

SEQ ID NO: 142731 - DNA, 20 bp, Artificial Sequence
  Description of Artificial Sequence: Synthetic oligonucleotide
  Target: LAMA2; (+) strand; PAM type: NRG; PAM sequence: GGG
aaactgggcttctggatttt

SEQ ID NO: 142732 - DNA, 20 bp, Artificial Sequence
  Description of Artificial Sequence: Synthetic oligonucleotide
  Target: LAMA2; (+) strand; PAM type: NRG; PAM sequence: CAG
gattttgggaaccaatacta

SEQ ID NO: 142733 - DNA, 20 bp, Artificial Sequence
  Description of Artificial Sequence: Synthetic oligonucleotide
  Target: LAMA2; (+) strand; PAM type: NRG; PAM sequence: GAG
ttttgggaaccaatactaca

SEQ ID NO: 142734 - DNA, 20 bp, Artificial Sequence
  Description of Artificial Sequence: Synthetic oligonucleotide
  Target: LAMA2; (+) strand; PAM type: NRG; PAM sequence: AGG
tttgggaaccaatactacag

SEQ ID NO: 142735 - DNA, 20 bp, Artificial Sequence
  Description of Artificial Sequence: Synthetic oligonucleotide
  Target: LAMA2; (+) strand; PAM type: NRG; PAM sequence: CAG
aaccaatactacagaggaaa

SEQ ID NO: 142736 - DNA, 20 bp, Artificial Sequence
  Description of Artificial Sequence: Synthetic oligonucleotide
  Target: LAMA2; (+) strand; PAM type: NRG; PAM sequence: TGG
catatttttttcttttttat

SEQ ID NO: 142737 - DNA, 20 bp, Artificial Sequence
  Description of Artificial Sequence: Synthetic oligonucleotide
  Target: LAMA2; (+) strand; PAM type: NRG; PAM sequence: TGG
ttttcttttttattggttta

SEQ ID NO: 142738 - DNA, 20 bp, Artificial Sequence
  Description of Artificial Sequence: Synthetic oligonucleotide
  Target: LAMA2; (+) strand; PAM type: NRG; PAM sequence: GGG
tttcttttttattggtttat

SEQ ID NO: 142739 - DNA, 20 bp, Artificial Sequence
  Description of Artificial Sequence: Synthetic oligonucleotide
  Target: LAMA2; (+) strand; PAM type: NRG; PAM sequence: GGG
ttcttttttattggtttatg

SEQ ID NO: 142740 - DNA, 20 bp, Artificial Sequence
  Description of Artificial Sequence: Synthetic oligonucleotide
  Target: LAMA2; (+) strand; PAM type: NRG; PAM sequence: TAG
ggggcttgtgcttctattaa

SEQ ID NO: 142741 - DNA, 20 bp, Artificial Sequence
  Description of Artificial Sequence: Synthetic oligonucleotide
  Target: LAMA2; (+) strand; PAM type: NRG; PAM sequence: AGG
gggcttgtgcttctattaat

SEQ ID NO: 142742 - DNA, 20 bp, Artificial Sequence
  Description of Artificial Sequence: Synthetic oligonucleotide
  Target: LAMA2; (+) strand; PAM type: NRG; PAM sequence: TAG
cttgtgcttctattaatagg

SEQ ID NO: 142743 - DNA, 20 bp, Artificial Sequence
  Description of Artificial Sequence: Synthetic oligonucleotide
  Target: LAMA2; (+) strand; PAM type: NRG; PAM sequence: TGG
taaaatgtttttaattttta

SEQ ID NO: 142744 - DNA, 20 bp, Artificial Sequence
  Description of Artificial Sequence: Synthetic oligonucleotide
  Target: LAMA2; (+) strand; PAM type: NRG; PAM sequence: TAG
ttttaatttttatggttaca

SEQ ID NO: 142745 - DNA, 20 bp, Artificial Sequence
  Description of Artificial Sequence: Synthetic oligonucleotide
  Target: LAMA2; (+) strand; PAM type: NRG; PAM sequence: TAG
taatttttatggttacatag

SEQ ID NO: 142746 - DNA, 20 bp, Artificial Sequence
  Description of Artificial Sequence: Synthetic oligonucleotide
  Target: LAMA2; (+) strand; PAM type: NRG; PAM sequence: AGG
aatttttatggttacatagt

SEQ ID NO: 142747 - DNA, 20 bp, Artificial Sequence
  Description of Artificial Sequence: Synthetic oligonucleotide
  Target: LAMA2; (+) strand; PAM type: NRG; PAM sequence: TAG
catagtaggtgtatatattt

SEQ ID NO: 142748 - DNA, 20 bp, Artificial Sequence
  Description of Artificial Sequence: Synthetic oligonucleotide
  Target: LAMA2; (+) strand; PAM type: NRG; PAM sequence: TAG
gtaggtgtatatattttaga

SEQ ID NO: 142749 - DNA, 20 bp, Artificial Sequence
  Description of Artificial Sequence: Synthetic oligonucleotide
  Target: LAMA2; (+) strand; PAM type: NRG; PAM sequence: TGG
ttttagatagatttttaacg

SEQ ID NO: 142750 - DNA, 20 bp, Artificial Sequence
  Description of Artificial Sequence: Synthetic oligonucleotide
  Target: LAMA2; (+) strand; PAM type: NRG; PAM sequence: CAG
agatagatttttaacgtgga

SEQ ID NO: 142751 - DNA, 20 bp, Artificial Sequence
  Description of Artificial Sequence: Synthetic oligonucleotide
  Target: LAMA2; (+) strand; PAM type: NRG; PAM sequence: CAG
tagatttttaacgtggacag

SEQ ID NO: 142752 - DNA, 20 bp, Artificial Sequence
  Description of Artificial Sequence: Synthetic oligonucleotide
  Target: LAMA2; (+) strand; PAM type: NRG; PAM sequence: AAG
tgtaatgtatatttttcact

SEQ ID NO: 142753 - DNA, 20 bp, Artificial Sequence
  Description of Artificial Sequence: Synthetic oligonucleotide
  Target: LAMA2; (+) strand; PAM type: NRG; PAM sequence: TGG
atttttcactaagcattgaa

SEQ ID NO: 142754 - DNA, 20 bp, Artificial Sequence
  Description of Artificial Sequence: Synthetic oligonucleotide
  Target: LAMA2; (+) strand; PAM type: NRG; PAM sequence: CAG
attgaatggtcattttcttc

SEQ ID NO: 142755 - DNA, 20 bp, Artificial Sequence
  Description of Artificial Sequence: Synthetic oligonucleotide
  Target: LAMA2; (+) strand; PAM type: NRG; PAM sequence: CAG
aaaatattccttaaatatgt

SEQ ID NO: 142756 - DNA, 20 bp, Artificial Sequence
  Description of Artificial Sequence: Synthetic oligonucleotide
  Target: LAMA2; (+) strand; PAM type: NRG; PAM sequence: AAG
tccttaaatatgtcagaaat

SEQ ID NO: 142757 - DNA, 20 bp, Artificial Sequence
  Description of Artificial Sequence: Synthetic oligonucleotide
  Target: LAMA2; (+) strand; PAM type: NRG; PAM sequence: AAG
atgtcagaaataagaaaaac

SEQ ID NO: 142758 - DNA, 20 bp, Artificial Sequence
  Description of Artificial Sequence: Synthetic oligonucleotide
  Target: LAMA2; (+) strand; PAM type: NRG; PAM sequence: CAG
ttttctttcttctttacaaa

SEQ ID NO: 142759 - DNA, 20 bp, Artificial Sequence
  Description of Artificial Sequence: Synthetic oligonucleotide
  Target: LAMA2; (+) strand; PAM type: NRG; PAM sequence: AGG
tttctttcttctttacaaac

SEQ ID NO: 142760 - DNA, 20 bp, Artificial Sequence
  Description of Artificial Sequence: Synthetic oligonucleotide
  Target: LAMA2; (+) strand; PAM type: NRG; PAM sequence: CAG
caggttctcattgtgttgat

SEQ ID NO: 142761 - DNA, 20 bp, Artificial Sequence
  Description of Artificial Sequence: Synthetic oligonucleotide
  Target: LAMA2; (+) strand; PAM type: NRG; PAM sequence: AGG
aggttctcattgtgttgatc

SEQ ID NO: 142762 - DNA, 20 bp, Artificial Sequence
  Description of Artificial Sequence: Synthetic oligonucleotide
  Target: LAMA2; (+) strand; PAM type: NRG; PAM sequence: TAG
tctcattgtgttgatcaggc

SEQ ID NO: 142763 - DNA, 20 bp, Artificial Sequence
  Description of Artificial Sequence: Synthetic oligonucleotide
  Target: LAMA2; (+) strand; PAM type: NRG; PAM sequence: GAG
tcattgtgttgatcaggcta

SEQ ID NO: 142764 - DNA, 20 bp, Artificial Sequence
  Description of Artificial Sequence: Synthetic oligonucleotide
  Target: LAMA2; (+) strand; PAM type: NRG; PAM sequence: CAG
gtgttgatcaggctagagtc

SEQ ID NO: 142765 - DNA, 20 bp, Artificial Sequence
  Description of Artificial Sequence: Synthetic oligonucleotide
  Target: LAMA2; (+) strand; PAM type: NRG; PAM sequence: TGG
ttgatcaggctagagtccag

SEQ ID NO: 142766 - DNA, 20 bp, Artificial Sequence
  Description of Artificial Sequence: Synthetic oligonucleotide
  Target: LAMA2; (+) strand; PAM type: NRG; PAM sequence: TAG
agagtccagtggcatgatta

SEQ ID NO: 142767 - DNA, 20 bp, Artificial Sequence
  Description of Artificial Sequence: Synthetic oligonucleotide
  Target: LAMA2; (+) strand; PAM type: NRG; PAM sequence: CAG
ggcatgattatagctcactg

SEQ ID NO: 142768 - DNA, 20 bp, Artificial Sequence
  Description of Artificial Sequence: Synthetic oligonucleotide
  Target: LAMA2; (+) strand; PAM type: NRG; PAM sequence: AGG
gcatgattatagctcactgc

SEQ ID NO: 142769 - DNA, 20 bp, Artificial Sequence
  Description of Artificial Sequence: Synthetic oligonucleotide
  Target: LAMA2; (+) strand; PAM type: NRG; PAM sequence: TAG
tcactgcaggctcaaactcc

SEQ ID NO: 142770 - DNA, 20 bp, Artificial Sequence
  Description of Artificial Sequence: Synthetic oligonucleotide
  Target: LAMA2; (+) strand; PAM type: NRG; PAM sequence: AGG
cactgcaggctcaaactcct

SEQ ID NO: 142771 - DNA, 20 bp, Artificial Sequence
  Description of Artificial Sequence: Synthetic oligonucleotide
  Target: LAMA2; (+) strand; PAM type: NRG; PAM sequence: AAG
aggctcaaactcctaggctc

SEQ ID NO: 142772 - DNA, 20 bp, Artificial Sequence
  Description of Artificial Sequence: Synthetic oligonucleotide
  Target: LAMA2; (+) strand; PAM type: NRG; PAM sequence: CAG
aatcttcctacctaaaaaat

SEQ ID NO: 142773 - DNA, 20 bp, Artificial Sequence
  Description of Artificial Sequence: Synthetic oligonucleotide
  Target: LAMA2; (+) strand; PAM type: NRG; PAM sequence: CAG
ctacctaaaaaatcagcctc

SEQ ID NO: 142774 - DNA, 20 bp, Artificial Sequence
  Description of Artificial Sequence: Synthetic oligonucleotide
  Target: LAMA2; (+) strand; PAM type: NRG; PAM sequence: TAG
aattttttaaaatttttttg

SEQ ID NO: 142775 - DNA, 20 bp, Artificial Sequence
  Description of Artificial Sequence: Synthetic oligonucleotide
  Target: LAMA2; (+) strand; PAM type: NRG; PAM sequence: GAG
ttttttaaaatttttttgta

SEQ ID NO: 142776 - DNA, 20 bp, Artificial Sequence
  Description of Artificial Sequence: Synthetic oligonucleotide
  Target: LAMA2; (+) strand; PAM type: NRG; PAM sequence: CAG
ttaaaatttttttgtagaga

SEQ ID NO: 142777 - DNA, 20 bp, Artificial Sequence
  Description of Artificial Sequence: Synthetic oligonucleotide
  Target: LAMA2; (+) strand; PAM type: NRG; PAM sequence: AGG
taaaatttttttgtagagac

SEQ ID NO: 142778 - DNA, 20 bp, Artificial Sequence
  Description of Artificial Sequence: Synthetic oligonucleotide
  Target: LAMA2; (+) strand; PAM type: NRG; PAM sequence: GGG
aaaatttttttgtagagaca

SEQ ID NO: 142779 - DNA, 20 bp, Artificial Sequence
  Description of Artificial Sequence: Synthetic oligonucleotide
  Target: LAMA2; (+) strand; PAM type: NRG; PAM sequence: CAG
cagggtcttgctatgttgcc

SEQ ID NO: 142780 - DNA, 20 bp, Artificial Sequence
  Description of Artificial Sequence: Synthetic oligonucleotide
  Target: LAMA2; (+) strand; PAM type: NRG; PAM sequence: AGG
agggtcttgctatgttgccc

SEQ ID NO: 142781 - DNA, 20 bp, Artificial Sequence
  Description of Artificial Sequence: Synthetic oligonucleotide
  Target: LAMA2; (+) strand; PAM type: NRG; PAM sequence: TGG
ccaggccgttctcaaactcc

SEQ ID NO: 142782 - DNA, 20 bp, Artificial Sequence
  Description of Artificial Sequence: Synthetic oligonucleotide
  Target: LAMA2; (+) strand; PAM type: NRG; PAM sequence: AAG
gttctcaaactcctggcctc

SEQ ID NO: 142783 - DNA, 20 bp, Artificial Sequence
  Description of Artificial Sequence: Synthetic oligonucleotide
  Target: LAMA2; (+) strand; PAM type: NRG; PAM sequence: TAG
ctcaagtgatctttccacct

SEQ ID NO: 142784 - DNA, 20 bp, Artificial Sequence
  Description of Artificial Sequence: Synthetic oligonucleotide
  Target: LAMA2; (+) strand; PAM type: NRG; PAM sequence: AAG
ctttccaccttagtcttcta

SEQ ID NO: 142785 - DNA, 20 bp, Artificial Sequence
  Description of Artificial Sequence: Synthetic oligonucleotide
  Target: LAMA2; (+) strand; PAM type: NRG; PAM sequence: CAG
accttagtcttctaaagtta

SEQ ID NO: 142786 - DNA, 20 bp, Artificial Sequence
  Description of Artificial Sequence: Synthetic oligonucleotide
  Target: LAMA2; (+) strand; PAM type: NRG; PAM sequence: GAG
ttctaaagttacagtcttct

SEQ ID NO: 142787 - DNA, 20 bp, Artificial Sequence
  Description of Artificial Sequence: Synthetic oligonucleotide
  Target: LAMA2; (+) strand; PAM type: NRG; PAM sequence: CAG
gttacagtcttctgagatta

SEQ ID NO: 142788 - DNA, 20 bp, Artificial Sequence
  Description of Artificial Sequence: Synthetic oligonucleotide
  Target: LAMA2; (+) strand; PAM type: NRG; PAM sequence: TGG
cagacatgaaccaccatgcc

SEQ ID NO: 142789 - DNA, 20 bp, Artificial Sequence
  Description of Artificial Sequence: Synthetic oligonucleotide
  Target: LAMA2; (+) strand; PAM type: NRG; PAM sequence: CAG
atgaaccaccatgcctggcc

SEQ ID NO: 142790 - DNA, 20 bp, Artificial Sequence
  Description of Artificial Sequence: Synthetic oligonucleotide
  Target: LAMA2; (+) strand; PAM type: NRG; PAM sequence: GAG
gaaccaccatgcctggccca

SEQ ID NO: 142791 - DNA, 20 bp, Artificial Sequence
  Description of Artificial Sequence: Synthetic oligonucleotide
  Target: LAMA2; (+) strand; PAM type: NRG; PAM sequence: AGG
aaccaccatgcctggcccag

SEQ ID NO: 142792 - DNA, 20 bp, Artificial Sequence
  Description of Artificial Sequence: Synthetic oligonucleotide
  Target: LAMA2; (+) strand; PAM type: NRG; PAM sequence: AAG
cctggcccagaggaattttt

SEQ ID NO: 142793 - DNA, 20 bp, Artificial Sequence
  Description of Artificial Sequence: Synthetic oligonucleotide
  Target: LAMA2; (+) strand; PAM type: NRG; PAM sequence: AGG
ctggcccagaggaattttta

SEQ ID NO: 142794 - DNA, 20 bp, Artificial Sequence
  Description of Artificial Sequence: Synthetic oligonucleotide
  Target: LAMA2; (+) strand; PAM type: NRG; PAM sequence: AAG
ttaaggcccacccatgtaac

SEQ ID NO: 142795 - DNA, 20 bp, Artificial Sequence
  Description of Artificial Sequence: Synthetic oligonucleotide
  Target: LAMA2; (+) strand; PAM type: NRG; PAM sequence: AGG
taaggcccacccatgtaaca

SEQ ID NO: 142796 - DNA, 20 bp, Artificial Sequence
  Description of Artificial Sequence: Synthetic oligonucleotide
  Target: LAMA2; (+) strand; PAM type: NRG; PAM sequence: TAG
atgtctcaattgttacacac

SEQ ID NO: 142797 - DNA, 20 bp, Artificial Sequence
  Description of Artificial Sequence: Synthetic oligonucleotide
  Target: LAMA2; (+) strand; PAM type: NRG; PAM sequence: TAG
ctcaattgttacacactagt

SEQ ID NO: 142798 - DNA, 20 bp, Artificial Sequence
  Description of Artificial Sequence: Synthetic oligonucleotide
  Target: LAMA2; (+) strand; PAM type: NRG; PAM sequence: TAG
agacaacaatgttcatgttt

SEQ ID NO: 142799 - DNA, 20 bp, Artificial Sequence
  Description of Artificial Sequence: Synthetic oligonucleotide
  Target: LAMA2; (+) strand; PAM type: NRG; PAM sequence: AGG
gacaacaatgttcatgtttt

SEQ ID NO: 142800 - DNA, 20 bp, Artificial Sequence
  Description of Artificial Sequence: Synthetic oligonucleotide
  Target: LAMA2; (+) strand; PAM type: NRG; PAM sequence: TAG
caatgttcatgttttaggct

SEQ ID NO: 142801 - DNA, 20 bp, Artificial Sequence
  Description of Artificial Sequence: Synthetic oligonucleotide
  Target: LAMA2; (+) strand; PAM type: NRG; PAM sequence: TAG
ttttaggcttagaacattaa

SEQ ID NO: 142802 - DNA, 20 bp, Artificial Sequence
  Description of Artificial Sequence: Synthetic oligonucleotide
  Target: LAMA2; (+) strand; PAM type: NRG; PAM sequence: AGG
tttaggcttagaacattaat

SEQ ID NO: 142803 - DNA, 20 bp, Artificial Sequence
  Description of Artificial Sequence: Synthetic oligonucleotide
  Target: LAMA2; (+) strand; PAM type: NRG; PAM sequence: TAG
cttagaacattaataggaaa

SEQ ID NO: 142804 - DNA, 20 bp, Artificial Sequence
  Description of Artificial Sequence: Synthetic oligonucleotide
  Target: LAMA2; (+) strand; PAM type: NRG; PAM sequence: GAG
tgactaatgccaaatccact

SEQ ID NO: 142805 - DNA, 20 bp, Artificial Sequence
  Description of Artificial Sequence: Synthetic oligonucleotide
  Target: LAMA2; (+) strand; PAM type: NRG; PAM sequence: AAG
tgccaaatccactgagtcta

SEQ ID NO: 142806 - DNA, 20 bp, Artificial Sequence
  Description of Artificial Sequence: Synthetic oligonucleotide
  Target: LAMA2; (+) strand; PAM type: NRG; PAM sequence: AAG
attacatttccacttgtcta

SEQ ID NO: 142807 - DNA, 20 bp, Artificial Sequence
  Description of Artificial Sequence: Synthetic oligonucleotide
  Target: LAMA2; (+) strand; PAM type: NRG; PAM sequence: GAG
cacttgtctaaagaattttt

SEQ ID NO: 142808 - DNA, 20 bp, Artificial Sequence
  Description of Artificial Sequence: Synthetic oligonucleotide
  Target: LAMA2; (+) strand; PAM type: NRG; PAM sequence: TAG
gagacatgtgccaaaatctt

SEQ ID NO: 142809 - DNA, 20 bp, Artificial Sequence
  Description of Artificial Sequence: Synthetic oligonucleotide
  Target: LAMA2; (+) strand; PAM type: NRG; PAM sequence: TAG
tgccaaaatctttagaacat

SEQ ID NO: 142810 - DNA, 20 bp, Artificial Sequence
  Description of Artificial Sequence: Synthetic oligonucleotide
  Target: LAMA2; (+) strand; PAM type: NRG; PAM sequence: GAG
ccaaaatctttagaacatta

SEQ ID NO: 142811 - DNA, 20 bp, Artificial Sequence
  Description of Artificial Sequence: Synthetic oligonucleotide
  Target: LAMA2; (+) strand; PAM type: NRG; PAM sequence: AAG
ctttagaacattagagctga

SEQ ID NO: 142812 - DNA, 20 bp, Artificial Sequence
  Description of Artificial Sequence: Synthetic oligonucleotide
  Target: LAMA2; (+) strand; PAM type: NRG; PAM sequence: TAG
attagagctgaaagatacct

SEQ ID NO: 142813 - DNA, 20 bp, Artificial Sequence
  Description of Artificial Sequence: Synthetic oligonucleotide
  Target: LAMA2; (+) strand; PAM type: NRG; PAM sequence: AGG
ttagagctgaaagatacctt

SEQ ID NO: 142814 - DNA, 20 bp, Artificial Sequence
  Description of Artificial Sequence: Synthetic oligonucleotide
  Target: LAMA2; (+) strand; PAM type: NRG; PAM sequence: AAG
aatttctcatcaatctatta

SEQ ID NO: 142815 - DNA, 20 bp, Artificial Sequence
  Description of Artificial Sequence: Synthetic oligonucleotide
  Target: LAMA2; (+) strand; PAM type: NRG; PAM sequence: AGG
atttctcatcaatctattaa

SEQ ID NO: 142816 - DNA, 20 bp, Artificial Sequence
  Description of Artificial Sequence: Synthetic oligonucleotide
  Target: LAMA2; (+) strand; PAM type: NRG; PAM sequence: AAG
caatctattaaaggatattc

SEQ ID NO: 142817 - DNA, 20 bp, Artificial Sequence
  Description of Artificial Sequence: Synthetic oligonucleotide
  Target: LAMA2; (+) strand; PAM type: NRG; PAM sequence: CAG
gatattcaagcccccaattt

SEQ ID NO: 142818 - DNA, 20 bp, Artificial Sequence
  Description of Artificial Sequence: Synthetic oligonucleotide
  Target: LAMA2; (+) strand; PAM type: NRG; PAM sequence: TGG
ccctatgttcatatcatcac

SEQ ID NO: 142819 - DNA, 20 bp, Artificial Sequence
  Description of Artificial Sequence: Synthetic oligonucleotide
  Target: LAMA2; (+) strand; PAM type: NRG; PAM sequence: GAG
ctatgttcatatcatcactg

SEQ ID NO: 142820 - DNA, 20 bp, Artificial Sequence
  Description of Artificial Sequence: Synthetic oligonucleotide
  Target: LAMA2; (+) strand; PAM type: NRG; PAM sequence: GAG
atgttcatatcatcactgga

SEQ ID NO: 142821 - DNA, 20 bp, Artificial Sequence
  Description of Artificial Sequence: Synthetic oligonucleotide
  Target: LAMA2; (+) strand; PAM type: NRG; PAM sequence: AGG
tgttcatatcatcactggag

SEQ ID NO: 142822 - DNA, 20 bp, Artificial Sequence
  Description of Artificial Sequence: Synthetic oligonucleotide
  Target: LAMA2; (+) strand; PAM type: NRG; PAM sequence: TGG
atatcatcactggagaggtc

SEQ ID NO: 142823 - DNA, 20 bp, Artificial Sequence
  Description of Artificial Sequence: Synthetic oligonucleotide
  Target: LAMA2; (+) strand; PAM type: NRG; PAM sequence: TGG
agaggtctggcctttcctta

SEQ ID NO: 142824 - DNA, 20 bp, Artificial Sequence
  Description of Artificial Sequence: Synthetic oligonucleotide
  Target: LAMA2; (+) strand; PAM type: NRG; PAM sequence: TGG
atcatctctgatgttttatt

SEQ ID NO: 142825 - DNA, 20 bp, Artificial Sequence
  Description of Artificial Sequence: Synthetic oligonucleotide
  Target: LAMA2; (+) strand; PAM type: NRG; PAM sequence: CAG
tttggctttgtttgttactc

SEQ ID NO: 142826 - DNA, 20 bp, Artificial Sequence
  Description of Artificial Sequence: Synthetic oligonucleotide
  Target: LAMA2; (+) strand; PAM type: NRG; PAM sequence: TGG
ctcccacctgtttcccttca

SEQ ID NO: 142827 - DNA, 20 bp, Artificial Sequence
  Description of Artificial Sequence: Synthetic oligonucleotide
  Target: LAMA2; (+) strand; PAM type: NRG; PAM sequence: TGG
acctgtttcccttcatggtt

SEQ ID NO: 142828 - DNA, 20 bp, Artificial Sequence
  Description of Artificial Sequence: Synthetic oligonucleotide
  Target: LAMA2; (+) strand; PAM type: NRG; PAM sequence: TGG
tttcccttcatggtttggtt

SEQ ID NO: 142829 - DNA, 20 bp, Artificial Sequence
  Description of Artificial Sequence: Synthetic oligonucleotide
  Target: LAMA2; (+) strand; PAM type: NRG; PAM sequence: AAG
ctccactccacattgatttc

SEQ ID NO: 142830 - DNA, 20 bp, Artificial Sequence
  Description of Artificial Sequence: Synthetic oligonucleotide
  Target: LAMA2; (+) strand; PAM type: NRG; PAM sequence: GAG
ccactccacattgatttcaa

SEQ ID NO: 142831 - DNA, 20 bp, Artificial Sequence
  Description of Artificial Sequence: Synthetic oligonucleotide
  Target: LAMA2; (+) strand; PAM type: NRG; PAM sequence: TAG
ttcaagagatcaacaaatgt

SEQ ID NO: 142832 - DNA, 20 bp, Artificial Sequence
  Description of Artificial Sequence: Synthetic oligonucleotide
  Target: LAMA2; (+) strand; PAM type: NRG; PAM sequence: GAG
caagagatcaacaaatgtta

SEQ ID NO: 142833 - DNA, 20 bp, Artificial Sequence
  Description of Artificial Sequence: Synthetic oligonucleotide
  Target: LAMA2; (+) strand; PAM type: NRG; PAM sequence: TGG
atcaacaaatgttagagaac

SEQ ID NO: 142834 - DNA, 20 bp, Artificial Sequence
  Description of Artificial Sequence: Synthetic oligonucleotide
  Target: LAMA2; (+) strand; PAM type: NRG; PAM sequence: GGG
tcaacaaatgttagagaact

SEQ ID NO: 142835 - DNA, 20 bp, Artificial Sequence
  Description of Artificial Sequence: Synthetic oligonucleotide
  Target: LAMA2; (+) strand; PAM type: NRG; PAM sequence: AAG
aactgggttcaactactacc

SEQ ID NO: 142836 - DNA, 20 bp, Artificial Sequence
  Description of Artificial Sequence: Synthetic oligonucleotide
  Target: LAMA2; (+) strand; PAM type: NRG; PAM sequence: AAG
gggttcaactactaccaaga

SEQ ID NO: 142837 - DNA, 20 bp, Artificial Sequence
  Description of Artificial Sequence: Synthetic oligonucleotide
  Target: LAMA2; (+) strand; PAM type: NRG; PAM sequence: GAG
gttcaactactaccaagaaa

SEQ ID NO: 142838 - DNA, 20 bp, Artificial Sequence
  Description of Artificial Sequence: Synthetic oligonucleotide
  Target: LAMA2; (+) strand; PAM type: NRG; PAM sequence: TAG
aagagcttaaccctgaaacc

SEQ ID NO: 142839 - DNA, 20 bp, Artificial Sequence
  Description of Artificial Sequence: Synthetic oligonucleotide
  Target: LAMA2; (+) strand; PAM type: NRG; PAM sequence: TAG
aaccctgaaacctagcatcc

SEQ ID NO: 142840 - DNA, 20 bp, Artificial Sequence
  Description of Artificial Sequence: Synthetic oligonucleotide
  Target: LAMA2; (+) strand; PAM type: NRG; PAM sequence: AGG
accctgaaacctagcatcct

SEQ ID NO: 142841 - DNA, 20 bp, Artificial Sequence
  Description of Artificial Sequence: Synthetic oligonucleotide
  Target: LAMA2; (+) strand; PAM type: NRG; PAM sequence: AAG
gcatcctaggcctgcaccca

SEQ ID NO: 142842 - DNA, 20 bp, Artificial Sequence
  Description of Artificial Sequence: Synthetic oligonucleotide
  Target: LAMA2; (+) strand; PAM type: NRG; PAM sequence: AGG
catcctaggcctgcacccaa

SEQ ID NO: 142843 - DNA, 20 bp, Artificial Sequence
  Description of Artificial Sequence: Synthetic oligonucleotide
  Target: LAMA2; (+) strand; PAM type: NRG; PAM sequence: GGG
atcctaggcctgcacccaaa

SEQ ID NO: 142844 - DNA, 20 bp, Artificial Sequence
  Description of Artificial Sequence: Synthetic oligonucleotide
  Target: LAMA2; (+) strand; PAM type: NRG; PAM sequence: GAG
cctaggcctgcacccaaagg

SEQ ID NO: 142845 - DNA, 20 bp, Artificial Sequence
  Description of Artificial Sequence: Synthetic oligonucleotide
  Target: LAMA2; (+) strand; PAM type: NRG; PAM sequence: AAG
aggcctgcacccaaagggag

SEQ ID NO: 142846 - DNA, 20 bp, Artificial Sequence
  Description of Artificial Sequence: Synthetic oligonucleotide
  Target: LAMA2; (+) strand; PAM type: NRG; PAM sequence: GAG
gcctgcacccaaagggagaa

SEQ ID NO: 142847 - DNA, 20 bp, Artificial Sequence
  Description of Artificial Sequence: Synthetic oligonucleotide
  Target: LAMA2; (+) strand; PAM type: NRG; PAM sequence: AAG
tgcacccaaagggagaagag

SEQ ID NO: 142848 - DNA, 20 bp, Artificial Sequence
  Description of Artificial Sequence: Synthetic oligonucleotide
  Target: LAMA2; (+) strand; PAM type: NRG; PAM sequence: GAG
ggagaagagaagcttattct

SEQ ID NO: 142849 - DNA, 20 bp, Artificial Sequence
  Description of Artificial Sequence: Synthetic oligonucleotide
  Target: LAMA2; (+) strand; PAM type: NRG; PAM sequence: GAG
agaagcttattctgagctat

SEQ ID NO: 142850 - DNA, 20 bp, Artificial Sequence
  Description of Artificial Sequence: Synthetic oligonucleotide
  Target: LAMA2; (+) strand; PAM type: NRG; PAM sequence: AAG
ctgagctatgagataatcgt

SEQ ID NO: 142851 - DNA, 20 bp, Artificial Sequence
  Description of Artificial Sequence: Synthetic oligonucleotide
  Target: LAMA2; (+) strand; PAM type: NRG; PAM sequence: AGG
tgagctatgagataatcgta

SEQ ID NO: 142852 - DNA, 20 bp, Artificial Sequence
  Description of Artificial Sequence: Synthetic oligonucleotide
  Target: LAMA2; (+) strand; PAM type: NRG; PAM sequence: AAG
tgagataatcgtaaggtatc

SEQ ID NO: 142853 - DNA, 20 bp, Artificial Sequence
  Description of Artificial Sequence: Synthetic oligonucleotide
  Target: LAMA2; (+) strand; PAM type: NRG; PAM sequence: CAG
aatcgtaaggtatcaagtct

SEQ ID NO: 142854 - DNA, 20 bp, Artificial Sequence
  Description of Artificial Sequence: Synthetic oligonucleotide
  Target: LAMA2; (+) strand; PAM type: NRG; PAM sequence: AGG
atcgtaaggtatcaagtctc

SEQ ID NO: 142855 - DNA, 20 bp, Artificial Sequence
  Description of Artificial Sequence: Synthetic oligonucleotide
  Target: LAMA2; (+) strand; PAM type: NRG; PAM sequence: GGG
tcgtaaggtatcaagtctca

SEQ ID NO: 142856 - DNA, 20 bp, Artificial Sequence
  Description of Artificial Sequence: Synthetic oligonucleotide
  Target: LAMA2; (+) strand; PAM type: NRG; PAM sequence: TGG
aggtatcaagtctcagggcc

SEQ ID NO: 142857 - DNA, 20 bp, Artificial Sequence
  Description of Artificial Sequence: Synthetic oligonucleotide
  Target: LAMA2; (+) strand; PAM type: NRG; PAM sequence: AAG
tcaagtctcagggcctggca

SEQ ID NO: 142858 - DNA, 20 bp, Artificial Sequence
  Description of Artificial Sequence: Synthetic oligonucleotide
  Target: LAMA2; (+) strand; PAM type: NRG; PAM sequence: AGG
caagtctcagggcctggcaa

SEQ ID NO: 142859 - DNA, 20 bp, Artificial Sequence
  Description of Artificial Sequence: Synthetic oligonucleotide
  Target: LAMA2; (+) strand; PAM type: NRG; PAM sequence: GAG
agtctcagggcctggcaaag

SEQ ID NO: 142860 - DNA, 20 bp, Artificial Sequence
  Description of Artificial Sequence: Synthetic oligonucleotide
  Target: LAMA2; (+) strand; PAM type: NRG; PAM sequence: AGG
gtctcagggcctggcaaagg

SEQ ID NO: 142861 - DNA, 20 bp, Artificial Sequence
  Description of Artificial Sequence: Synthetic oligonucleotide
  Target: LAMA2; (+) strand; PAM type: NRG; PAM sequence: GGG
tctcagggcctggcaaagga

SEQ ID NO: 142862 - DNA, 20 bp, Artificial Sequence
  Description of Artificial Sequence: Synthetic oligonucleotide
  Target: LAMA2; (+) strand; PAM type: NRG; PAM sequence: TGG
gcctggcaaaggagggataa

SEQ ID NO: 142863 - DNA, 20 bp, Artificial Sequence
  Description of Artificial Sequence: Synthetic oligonucleotide
  Target: LAMA2; (+) strand; PAM type: NRG; PAM sequence: GAG
ctggcaaaggagggataatg

SEQ ID NO: 142864 - DNA, 20 bp, Artificial Sequence
  Description of Artificial Sequence: Synthetic oligonucleotide
  Target: LAMA2; (+) strand; PAM type: NRG; PAM sequence: AGG
tggcaaaggagggataatgg

SEQ ID NO: 142865 - DNA, 20 bp, Artificial Sequence
  Description of Artificial Sequence: Synthetic oligonucleotide
  Target: LAMA2; (+) strand; PAM type: NRG; PAM sequence: TAG
aggagggataatggaggata

SEQ ID NO: 142866 - DNA, 20 bp, Artificial Sequence
  Description of Artificial Sequence: Synthetic oligonucleotide
  Target: LAMA2; (+) strand; PAM type: NRG; PAM sequence: AGG
ggagggataatggaggatat

SEQ ID NO: 142867 - DNA, 20 bp, Artificial Sequence
  Description of Artificial Sequence: Synthetic oligonucleotide
  Target: LAMA2; (+) strand; PAM type: NRG; PAM sequence: AAG
ggataatggaggatataggc

SEQ ID NO: 142868 - DNA, 20 bp, Artificial Sequence
  Description of Artificial Sequence: Synthetic oligonucleotide
  Target: LAMA2; (+) strand; PAM type: NRG; PAM sequence: TGG
aggcaagataataatatgac

SEQ ID NO: 142869 - DNA, 20 bp, Artificial Sequence
  Description of Artificial Sequence: Synthetic oligonucleotide
  Target: LAMA2; (+) strand; PAM type: NRG; PAM sequence: GGG
ggcaagataataatatgact

SEQ ID NO: 142870 - DNA, 20 bp, Artificial Sequence
  Description of Artificial Sequence: Synthetic oligonucleotide
  Target: LAMA2; (+) strand; PAM type: NRG; PAM sequence: CAG
tgactgggtatgtcgttatc

SEQ ID NO: 142871 - DNA, 20 bp, Artificial Sequence
  Description of Artificial Sequence: Synthetic oligonucleotide
  Target: LAMA2; (+) strand; PAM type: NRG; PAM sequence: AGG
gactgggtatgtcgttatcc

SEQ ID NO: 142872 - DNA, 20 bp, Artificial Sequence
  Description of Artificial Sequence: Synthetic oligonucleotide
  Target: LAMA2; (+) strand; PAM type: NRG; PAM sequence: TAG
gtcgttatccaggctgcaaa

SEQ ID NO: 142873 - DNA, 20 bp, Artificial Sequence
  Description of Artificial Sequence: Synthetic oligonucleotide
  Target: LAMA2; (+) strand; PAM type: NRG; PAM sequence: AAG
gttatccaggctgcaaatag

SEQ ID NO: 142874 - DNA, 20 bp, Artificial Sequence
  Description of Artificial Sequence: Synthetic oligonucleotide
  Target: LAMA2; (+) strand; PAM type: NRG; PAM sequence: AGG
ttatccaggctgcaaataga

SEQ ID NO: 142875 - DNA, 20 bp, Artificial Sequence
  Description of Artificial Sequence: Synthetic oligonucleotide
  Target: LAMA2; (+) strand; PAM type: NRG; PAM sequence: GAG
atccaggctgcaaatagaag

SEQ ID NO: 142876 - DNA, 20 bp, Artificial Sequence
  Description of Artificial Sequence: Synthetic oligonucleotide
  Target: LAMA2; (+) strand; PAM type: NRG; PAM sequence: AGG
tccaggctgcaaatagaagg

SEQ ID NO: 142877 - DNA, 20 bp, Artificial Sequence
  Description of Artificial Sequence: Synthetic oligonucleotide
  Target: LAMA2; (+) strand; PAM type: NRG; PAM sequence: GAG
tgcaaatagaaggaggcttt

SEQ ID NO: 142878 - DNA, 20 bp, Artificial Sequence
  Description of Artificial Sequence: Synthetic oligonucleotide
  Target: LAMA2; (+) strand; PAM type: NRG; PAM sequence: AAG
tagaaggaggctttgagcaa

SEQ ID NO: 142879 - DNA, 20 bp, Artificial Sequence
  Description of Artificial Sequence: Synthetic oligonucleotide
  Target: LAMA2; (+) strand; PAM type: NRG; PAM sequence: CAG
tttgagcaaaagccttaaaa

SEQ ID NO: 142880 - DNA, 20 bp, Artificial Sequence
  Description of Artificial Sequence: Synthetic oligonucleotide
  Target: LAMA2; (+) strand; PAM type: NRG; PAM sequence: TAG
gccttaaaacagttttattt

SEQ ID NO: 142881 - DNA, 20 bp, Artificial Sequence
  Description of Artificial Sequence: Synthetic oligonucleotide
  Target: LAMA2; (+) strand; PAM type: NRG; PAM sequence: AAG
ttaaaacagttttattttag

SEQ ID NO: 142882 - DNA, 20 bp, Artificial Sequence
  Description of Artificial Sequence: Synthetic oligonucleotide
  Target: LAMA2; (+) strand; PAM type: NRG; PAM sequence: AGG
taaaacagttttattttaga

SEQ ID NO: 142883 - DNA, 20 bp, Artificial Sequence
  Description of Artificial Sequence: Synthetic oligonucleotide
  Target: LAMA2; (+) strand; PAM type: NRG; PAM sequence: GGG
aaaacagttttattttagaa

SEQ ID NO: 142884 - DNA, 20 bp, Artificial Sequence
  Description of Artificial Sequence: Synthetic oligonucleotide
  Target: LAMA2; (+) strand; PAM type: NRG; PAM sequence: AAG
aattttctatcatcaatgcc

SEQ ID NO: 142885 - DNA, 20 bp, Artificial Sequence
  Description of Artificial Sequence: Synthetic oligonucleotide
  Target: LAMA2; (+) strand; PAM type: NRG; PAM sequence: GAG
ttttctatcatcaatgccaa

SEQ ID NO: 142886 - DNA, 20 bp, Artificial Sequence
  Description of Artificial Sequence: Synthetic oligonucleotide
  Target: LAMA2; (+) strand; PAM type: NRG; PAM sequence: AAG
tctatcatcaatgccaagag

SEQ ID NO: 142887 - DNA, 20 bp, Artificial Sequence
  Description of Artificial Sequence: Synthetic oligonucleotide
  Target: LAMA2; (+) strand; PAM type: NRG; PAM sequence: AGG
ctatcatcaatgccaagaga

SEQ ID NO: 142888 - DNA, 20 bp, Artificial Sequence
  Description of Artificial Sequence: Synthetic oligonucleotide
  Target: LAMA2; (+) strand; PAM type: NRG; PAM sequence: CAG
atcaatgccaagagaaggct

SEQ ID NO: 142889 - DNA, 20 bp, Artificial Sequence
  Description of Artificial Sequence: Synthetic oligonucleotide
  Target: LAMA2; (+) strand; PAM type: NRG; PAM sequence: CAG
aatgccaagagaaggctcag

SEQ ID NO: 142890 - DNA, 20 bp, Artificial Sequence
  Description of Artificial Sequence: Synthetic oligonucleotide
  Target: LAMA2; (+) strand; PAM type: NRG; PAM sequence: AGG
atgccaagagaaggctcagc

SEQ ID NO: 142891 - DNA, 20 bp, Artificial Sequence
  Description of Artificial Sequence: Synthetic oligonucleotide
  Target: LAMA2; (+) strand; PAM type: NRG; PAM sequence: GGG
tgccaagagaaggctcagca

SEQ ID NO: 142892 - DNA, 20 bp, Artificial Sequence
  Description of Artificial Sequence: Synthetic oligonucleotide
  Target: LAMA2; (+) strand; PAM type: NRG; PAM sequence: GAG
accctactttgtcctgcttt

SEQ ID NO: 142893 - DNA, 20 bp, Artificial Sequence
  Description of Artificial Sequence: Synthetic oligonucleotide
  Target: LAMA2; (+) strand; PAM type: NRG; PAM sequence: GAG
tgctttgagcaaatgatact

SEQ ID NO: 142894 - DNA, 20 bp, Artificial Sequence
  Description of Artificial Sequence: Synthetic oligonucleotide
  Target: LAMA2; (+) strand; PAM type: NRG; PAM sequence: TAG
aatgatactgagctccctaa

SEQ ID NO: 142895 - DNA, 20 bp, Artificial Sequence
  Description of Artificial Sequence: Synthetic oligonucleotide
  Target: LAMA2; (+) strand; PAM type: NRG; PAM sequence: AGG
atgatactgagctccctaat

SEQ ID NO: 142896 - DNA, 20 bp, Artificial Sequence
  Description of Artificial Sequence: Synthetic oligonucleotide
  Target: LAMA2; (+) strand; PAM type: NRG; PAM sequence: GAG
gatactgagctccctaatag

SEQ ID NO: 142897 - DNA, 20 bp, Artificial Sequence
  Description of Artificial Sequence: Synthetic oligonucleotide
  Target: LAMA2; (+) strand; PAM type: NRG; PAM sequence: CAG
gagctccctaataggagttg

SEQ ID NO: 142898 - DNA, 20 bp, Artificial Sequence
  Description of Artificial Sequence: Synthetic oligonucleotide
  Target: LAMA2; (+) strand; PAM type: NRG; PAM sequence: AGG
agctccctaataggagttgc

SEQ ID NO: 142899 - DNA, 20 bp, Artificial Sequence
  Description of Artificial Sequence: Synthetic oligonucleotide
  Target: LAMA2; (+) strand; PAM type: NRG; PAM sequence: GGG
gctccctaataggagttgca

SEQ ID NO: 142900 - DNA, 20 bp, Artificial Sequence
  Description of Artificial Sequence: Synthetic oligonucleotide
  Target: LAMA2; (+) strand; PAM type: NRG; PAM sequence: AAG
aataggagttgcagggtatg

SEQ ID NO: 142901 - DNA, 20 bp, Artificial Sequence
  Description of Artificial Sequence: Synthetic oligonucleotide
  Target: LAMA2; (+) strand; PAM type: NRG; PAM sequence: CAG
agttgcagggtatgaagcaa

SEQ ID NO: 142902 - DNA, 20 bp, Artificial Sequence
  Description of Artificial Sequence: Synthetic oligonucleotide
  Target: LAMA2; (+) strand; PAM type: NRG; PAM sequence: CAG
gggtatgaagcaacagactg

SEQ ID NO: 142903 - DNA, 20 bp, Artificial Sequence
  Description of Artificial Sequence: Synthetic oligonucleotide
  Target: LAMA2; (+) strand; PAM type: NRG; PAM sequence: AGG
ggtatgaagcaacagactgc

SEQ ID NO: 142904 - DNA, 20 bp, Artificial Sequence
  Description of Artificial Sequence: Synthetic oligonucleotide
  Target: LAMA2; (+) strand; PAM type: NRG; PAM sequence: GGG
gtatgaagcaacagactgca

SEQ ID NO: 142905 - DNA, 20 bp, Artificial Sequence
  Description of Artificial Sequence: Synthetic oligonucleotide
  Target: LAMA2; (+) strand; PAM type: NRG; PAM sequence: GGG
tatgaagcaacagactgcag

SEQ ID NO: 142906 - DNA, 20 bp, Artificial Sequence
  Description of Artificial Sequence: Synthetic oligonucleotide
  Target: LAMA2; (+) strand; PAM type: NRG; PAM sequence: GAG
gcaggggcctccattacttt

SEQ ID NO: 142907 - DNA, 20 bp, Artificial Sequence
  Description of Artificial Sequence: Synthetic oligonucleotide
  Target: LAMA2; (+) strand; PAM type: NRG; PAM sequence: AGG
caggggcctccattactttg

SEQ ID NO: 142908 - DNA, 20 bp, Artificial Sequence
  Description of Artificial Sequence: Synthetic oligonucleotide
  Target: LAMA2; (+) strand; PAM type: NRG; PAM sequence: CAG
cattactttgaggccaacca

SEQ ID NO: 142909 - DNA, 20 bp, Artificial Sequence
  Description of Artificial Sequence: Synthetic oligonucleotide
  Target: LAMA2; (+) strand; PAM type: NRG; PAM sequence: AGG
attactttgaggccaaccac

SEQ ID NO: 142910 - DNA, 20 bp, Artificial Sequence
  Description of Artificial Sequence: Synthetic oligonucleotide
  Target: LAMA2; (+) strand; PAM type: NRG; PAM sequence: GGG
ttactttgaggccaaccaca

SEQ ID NO: 142911 - DNA, 20 bp, Artificial Sequence
  Description of Artificial Sequence: Synthetic oligonucleotide
  Target: LAMA2; (+) strand; PAM type: NRG; PAM sequence: TAG
ctttgaggccaaccacaggg

SEQ ID NO: 142912 - DNA, 20 bp, Artificial Sequence
  Description of Artificial Sequence: Synthetic oligonucleotide
  Target: LAMA2; (+) strand; PAM type: NRG; PAM sequence: GAG
ttgaggccaaccacagggta

SEQ ID NO: 142913 - DNA, 20 bp, Artificial Sequence
  Description of Artificial Sequence: Synthetic oligonucleotide
  Target: LAMA2; (+) strand; PAM type: NRG; PAM sequence: TGG
accacagggtagagctcttg

SEQ ID NO: 142914 - DNA, 20 bp, Artificial Sequence
  Description of Artificial Sequence: Synthetic oligonucleotide
  Target: LAMA2; (+) strand; PAM type: NRG; PAM sequence: GGG
ccacagggtagagctcttgt

SEQ ID NO: 142915 - DNA, 20 bp, Artificial Sequence
  Description of Artificial Sequence: Synthetic oligonucleotide
  Target: LAMA2; (+) strand; PAM type: NRG; PAM sequence: CAG
gggtagagctcttgtgggaa

SEQ ID NO: 142916 - DNA, 20 bp, Artificial Sequence
  Description of Artificial Sequence: Synthetic oligonucleotide
  Target: LAMA2; (+) strand; PAM type: NRG; PAM sequence: CAG
agctacataacatgcatgtc

SEQ ID NO: 142917 - DNA, 20 bp, Artificial Sequence
  Description of Artificial Sequence: Synthetic oligonucleotide
  Target: LAMA2; (+) strand; PAM type: NRG; PAM sequence: CAG
tacataacatgcatgtccag

SEQ ID NO: 142918 - DNA, 20 bp, Artificial Sequence
  Description of Artificial Sequence: Synthetic oligonucleotide
  Target: LAMA2; (+) strand; PAM type: NRG; PAM sequence: CAG
atgcatgtccagcagtgccc

SEQ ID NO: 142919 - DNA, 20 bp, Artificial Sequence
  Description of Artificial Sequence: Synthetic oligonucleotide
  Target: LAMA2; (+) strand; PAM type: NRG; PAM sequence: AGG
tgcatgtccagcagtgcccc

SEQ ID NO: 142920 - DNA, 20 bp, Artificial Sequence
  Description of Artificial Sequence: Synthetic oligonucleotide
  Target: LAMA2; (+) strand; PAM type: NRG; PAM sequence: GGG
gcatgtccagcagtgcccca

SEQ ID NO: 142921 - DNA, 20 bp, Artificial Sequence
  Description of Artificial Sequence: Synthetic oligonucleotide
  Target: LAMA2; (+) strand; PAM type: NRG; PAM sequence: AAG
cagcagtgccccagggaacc

SEQ ID NO: 142922 - DNA, 20 bp, Artificial Sequence
  Description of Artificial Sequence: Synthetic oligonucleotide
  Target: LAMA2; (+) strand; PAM type: NRG; PAM sequence: GAG
ccccagggaaccaagccatc

SEQ ID NO: 142923 - DNA, 20 bp, Artificial Sequence
  Description of Artificial Sequence: Synthetic oligonucleotide
  Target: LAMA2; (+) strand; PAM type: NRG; PAM sequence: GAG
ccagggaaccaagccatcga

SEQ ID NO: 142924 - DNA, 20 bp, Artificial Sequence
  Description of Artificial Sequence: Synthetic oligonucleotide
  Target: LAMA2; (+) strand; PAM type: NRG; PAM sequence: CAG
gccatcgagagctactatca

SEQ ID NO: 142925 - DNA, 20 bp, Artificial Sequence
  Description of Artificial Sequence: Synthetic oligonucleotide
  Target: LAMA2; (+) strand; PAM type: NRG; PAM sequence: AAG
gagagctactatcacagccc

SEQ ID NO: 142926 - DNA, 20 bp, Artificial Sequence
  Description of Artificial Sequence: Synthetic oligonucleotide
  Target: LAMA2; (+) strand; PAM type: NRG; PAM sequence: CAG
cagcccaagtgctgcctctg

SEQ ID NO: 142927 - DNA, 20 bp, Artificial Sequence
  Description of Artificial Sequence: Synthetic oligonucleotide
  Target: LAMA2; (+) strand; PAM type: NRG; PAM sequence: AAG
ccaagtgctgcctctgcaga

SEQ ID NO: 142928 - DNA, 20 bp, Artificial Sequence
  Description of Artificial Sequence: Synthetic oligonucleotide
  Target: LAMA2; (+) strand; PAM type: NRG; PAM sequence: CAG
agtgctgcctctgcagaaag

SEQ ID NO: 142929 - DNA, 20 bp, Artificial Sequence
  Description of Artificial Sequence: Synthetic oligonucleotide
  Target: LAMA2; (+) strand; PAM type: NRG; PAM sequence: TAG
gctgcctctgcagaaagcag

SEQ ID NO: 142930 - DNA, 20 bp, Artificial Sequence
  Description of Artificial Sequence: Synthetic oligonucleotide
  Target: LAMA2; (+) strand; PAM type: NRG; PAM sequence: CAG
ctctgcagaaagcagtagcc

SEQ ID NO: 142931 - DNA, 20 bp, Artificial Sequence
  Description of Artificial Sequence: Synthetic oligonucleotide
  Target: LAMA2; (+) strand; PAM type: NRG; PAM sequence: GAG
gcagtagcccagatgctatt

SEQ ID NO: 142932 - DNA, 20 bp, Artificial Sequence
  Description of Artificial Sequence: Synthetic oligonucleotide
  Target: LAMA2; (+) strand; PAM type: NRG; PAM sequence: AAG
tgctattgagaactgcttac

SEQ ID NO: 142933 - DNA, 20 bp, Artificial Sequence
  Description of Artificial Sequence: Synthetic oligonucleotide
  Target: LAMA2; (+) strand; PAM type: NRG; PAM sequence: TGG
tgcttacaagaactgccact

SEQ ID NO: 142934 - DNA, 20 bp, Artificial Sequence
  Description of Artificial Sequence: Synthetic oligonucleotide
  Target: LAMA2; (+) strand; PAM type: NRG; PAM sequence: AAG
ttacaagaactgccacttgg

SEQ ID NO: 142935 - DNA, 20 bp, Artificial Sequence
  Description of Artificial Sequence: Synthetic oligonucleotide
  Target: LAMA2; (+) strand; PAM type: NRG; PAM sequence: GAG
ctgccacttggaagcaccct

SEQ ID NO: 142936 - DNA, 20 bp, Artificial Sequence
  Description of Artificial Sequence: Synthetic oligonucleotide
  Target: LAMA2; (+) strand; PAM type: NRG; PAM sequence: TGG
ttggaagcaccctgagaact

SEQ ID NO: 142937 - DNA, 20 bp, Artificial Sequence
  Description of Artificial Sequence: Synthetic oligonucleotide
  Target: LAMA2; (+) strand; PAM type: NRG; PAM sequence: TGG
cctgagaacttggctttact

SEQ ID NO: 142938 - DNA, 20 bp, Artificial Sequence
  Description of Artificial Sequence: Synthetic oligonucleotide
  Target: LAMA2; (+) strand; PAM type: NRG; PAM sequence: TAG
ggctttacttggaaatcacc

SEQ ID NO: 142939 - DNA, 20 bp, Artificial Sequence
  Description of Artificial Sequence: Synthetic oligonucleotide
  Target: LAMA2; (+) strand; PAM type: NRG; PAM sequence: AGG
gctttacttggaaatcacct

SEQ ID NO: 142940 - DNA, 20 bp, Artificial Sequence
  Description of Artificial Sequence: Synthetic oligonucleotide
  Target: LAMA2; (+) strand; PAM type: NRG; PAM sequence: GAG
tttacttggaaatcacctag

SEQ ID NO: 142941 - DNA, 20 bp, Artificial Sequence
  Description of Artificial Sequence: Synthetic oligonucleotide
  Target: LAMA2; (+) strand; PAM type: NRG; PAM sequence: TAG
acctaggagcatttgaaaaa

SEQ ID NO: 142942 - DNA, 20 bp, Artificial Sequence
  Description of Artificial Sequence: Synthetic oligonucleotide
  Target: LAMA2; (+) strand; PAM type: NRG; PAM sequence: GAG
tttgaaaaatagctactcct

SEQ ID NO: 142943 - DNA, 20 bp, Artificial Sequence
  Description of Artificial Sequence: Synthetic oligonucleotide
  Target: LAMA2; (+) strand; PAM type: NRG; PAM sequence: CAG
aaaatagctactcctgagac

SEQ ID NO: 142944 - DNA, 20 bp, Artificial Sequence
  Description of Artificial Sequence: Synthetic oligonucleotide
  Target: LAMA2; (+) strand; PAM type: NRG; PAM sequence: CAG
ttttaattcattatatttgt

SEQ ID NO: 142945 - DNA, 20 bp, Artificial Sequence
  Description of Artificial Sequence: Synthetic oligonucleotide
  Target: LAMA2; (+) strand; PAM type: NRG; PAM sequence: GAG
ttaattcattatatttgtca

SEQ ID NO: 142946 - DNA, 20 bp, Artificial Sequence
  Description of Artificial Sequence: Synthetic oligonucleotide
  Target: LAMA2; (+) strand; PAM type: NRG; PAM sequence: AGG
taattcattatatttgtcag

SEQ ID NO: 142947 - DNA, 20 bp, Artificial Sequence
  Description of Artificial Sequence: Synthetic oligonucleotide
  Target: LAMA2; (+) strand; PAM type: NRG; PAM sequence: AAG
atatttgtcagaggctcatt

SEQ ID NO: 142948 - DNA, 20 bp, Artificial Sequence
  Description of Artificial Sequence: Synthetic oligonucleotide
  Target: LAMA2; (+) strand; PAM type: NRG; PAM sequence: AAG
gccctatgtatattttaaac

SEQ ID NO: 142949 - DNA, 20 bp, Artificial Sequence
  Description of Artificial Sequence: Synthetic oligonucleotide
  Target: LAMA2; (+) strand; PAM type: NRG; PAM sequence: TGG
atattttaaacaagtactct

SEQ ID NO: 142950 - DNA, 20 bp, Artificial Sequence
  Description of Artificial Sequence: Synthetic oligonucleotide
  Target: LAMA2; (+) strand; PAM type: NRG; PAM sequence: TGG
gattcttatgtctgtattcc

SEQ ID NO: 142951 - DNA, 20 bp, Artificial Sequence
  Description of Artificial Sequence: Synthetic oligonucleotide
  Target: LAMA2; (+) strand; PAM type: NRG; PAM sequence: CAG
tgtattcctggcttaatgtt

SEQ ID NO: 142952 - DNA, 20 bp, Artificial Sequence
  Description of Artificial Sequence: Synthetic oligonucleotide
  Target: LAMA2; (+) strand; PAM type: NRG; PAM sequence: CAG
gcttaatgttcagctatttc

SEQ ID NO: 142953 - DNA, 20 bp, Artificial Sequence
  Description of Artificial Sequence: Synthetic oligonucleotide
  Target: LAMA2; (+) strand; PAM type: NRG; PAM sequence: TAG
ttccagccttttaaaccctg

SEQ ID NO: 142954 - DNA, 20 bp, Artificial Sequence
  Description of Artificial Sequence: Synthetic oligonucleotide
  Target: LAMA2; (+) strand; PAM type: NRG; PAM sequence: AGG
tccagccttttaaaccctgt

SEQ ID NO: 142955 - DNA, 20 bp, Artificial Sequence
  Description of Artificial Sequence: Synthetic oligonucleotide
  Target: LAMA2; (+) strand; PAM type: NRG; PAM sequence: GAG
cagccttttaaaccctgtag

SEQ ID NO: 142956 - DNA, 20 bp, Artificial Sequence
  Description of Artificial Sequence: Synthetic oligonucleotide
  Target: LAMA2; (+) strand; PAM type: NRG; PAM sequence: CAG
ttttaaaccctgtaggagaa

SEQ ID NO: 142957 - DNA, 20 bp, Artificial Sequence
  Description of Artificial Sequence: Synthetic oligonucleotide
  Target: LAMA2; (+) strand; PAM type: NRG; PAM sequence: AGG
tttaaaccctgtaggagaac

SEQ ID NO: 142958 - DNA, 20 bp, Artificial Sequence
  Description of Artificial Sequence: Synthetic oligonucleotide
  Target: LAMA2; (+) strand; PAM type: NRG; PAM sequence: GGG
ttaaaccctgtaggagaaca

SEQ ID NO: 142959 - DNA, 20 bp, Artificial Sequence
  Description of Artificial Sequence: Synthetic oligonucleotide
  Target: LAMA2; (+) strand; PAM type: NRG; PAM sequence: CAG
cctgtaggagaacagggcac

SEQ ID NO: 142960 - DNA, 20 bp, Artificial Sequence
  Description of Artificial Sequence: Synthetic oligonucleotide
  Target: LAMA2; (+) strand; PAM type: NRG; PAM sequence: TAG
agaacagggcaccagttatt

SEQ ID NO: 142961 - DNA, 20 bp, Artificial Sequence
  Description of Artificial Sequence: Synthetic oligonucleotide
  Target: LAMA2; (+) strand; PAM type: NRG; PAM sequence: AGG
gaacagggcaccagttattt

SEQ ID NO: 142962 - DNA, 20 bp, Artificial Sequence
  Description of Artificial Sequence: Synthetic oligonucleotide
  Target: LAMA2; (+) strand; PAM type: NRG; PAM sequence: GGG
aacagggcaccagttattta

SEQ ID NO: 142963 - DNA, 20 bp, Artificial Sequence
  Description of Artificial Sequence: Synthetic oligonucleotide
  Target: LAMA2; (+) strand; PAM type: NRG; PAM sequence: AAG
gggcaccagttatttaggga

SEQ ID NO: 142964 - DNA, 20 bp, Artificial Sequence
  Description of Artificial Sequence: Synthetic oligonucleotide
  Target: LAMA2; (+) strand; PAM type: NRG; PAM sequence: TGG
gttatttagggaaagaatat

SEQ ID NO: 142965 - DNA, 20 bp, Artificial Sequence
  Description of Artificial Sequence: Synthetic oligonucleotide
  Target: LAMA2; (+) strand; PAM type: NRG; PAM sequence: AAG
attctaactacttccaactg

SEQ ID NO: 142966 - DNA, 20 bp, Artificial Sequence
  Description of Artificial Sequence: Synthetic oligonucleotide
  Target: LAMA2; (+) strand; PAM type: NRG; PAM sequence: AAG
taactacttccaactgaaga

SEQ ID NO: 142967 - DNA, 20 bp, Artificial Sequence
  Description of Artificial Sequence: Synthetic oligonucleotide
  Target: LAMA2; (+) strand; PAM type: NRG; PAM sequence: GAG
actacttccaactgaagaaa

SEQ ID NO: 142968 - DNA, 20 bp, Artificial Sequence
  Description of Artificial Sequence: Synthetic oligonucleotide
  Target: LAMA2; (+) strand; PAM type: NRG; PAM sequence: TAG
ttttctgtcaacaaatgtga

SEQ ID NO: 142969 - DNA, 20 bp, Artificial Sequence
  Description of Artificial Sequence: Synthetic oligonucleotide
  Target: LAMA2; (+) strand; PAM type: NRG; PAM sequence: AGG
tttctgtcaacaaatgtgat

SEQ ID NO: 142970 - DNA, 20 bp, Artificial Sequence
  Description of Artificial Sequence: Synthetic oligonucleotide
  Target: LAMA2; (+) strand; PAM type: NRG; PAM sequence: TGG
tcaacaaatgtgataggttt

SEQ ID NO: 142971 - DNA, 20 bp, Artificial Sequence
  Description of Artificial Sequence: Synthetic oligonucleotide
  Target: LAMA2; (+) strand; PAM type: NRG; PAM sequence: TGG
acaaatgtgataggttttgg

SEQ ID NO: 142972 - DNA, 20 bp, Artificial Sequence
  Description of Artificial Sequence: Synthetic oligonucleotide
  Target: LAMA2; (+) strand; PAM type: NRG; PAM sequence: GAG
gtgataggttttggtggact

SEQ ID NO: 142973 - DNA, 20 bp, Artificial Sequence
  Description of Artificial Sequence: Synthetic oligonucleotide
  Target: LAMA2; (+) strand; PAM type: NRG; PAM sequence: TGG
ttttggtggactgagtctct

SEQ ID NO: 142974 - DNA, 20 bp, Artificial Sequence
  Description of Artificial Sequence: Synthetic oligonucleotide
  Target: LAMA2; (+) strand; PAM type: NRG; PAM sequence: CAG
tggtggactgagtctcttgg

SEQ ID NO: 142975 - DNA, 20 bp, Artificial Sequence
  Description of Artificial Sequence: Synthetic oligonucleotide
  Target: LAMA2; (+) strand; PAM type: NRG; PAM sequence: AGG
ggtggactgagtctcttggc

SEQ ID NO: 142976 - DNA, 20 bp, Artificial Sequence
  Description of Artificial Sequence: Synthetic oligonucleotide
  Target: LAMA2; (+) strand; PAM type: NRG; PAM sequence: GAG
ctgagtctcttggcaggttt

SEQ ID NO: 142977 - DNA, 20 bp, Artificial Sequence
  Description of Artificial Sequence: Synthetic oligonucleotide
  Target: LAMA2; (+) strand; PAM type: NRG; PAM sequence: GAG
tctcttggcaggtttgagtt

SEQ ID NO: 142978 - DNA, 20 bp, Artificial Sequence
  Description of Artificial Sequence: Synthetic oligonucleotide
  Target: LAMA2; (+) strand; PAM type: NRG; PAM sequence: TAG
aataaacttcgaactaaaac

SEQ ID NO: 142979 - DNA, 20 bp, Artificial Sequence
  Description of Artificial Sequence: Synthetic oligonucleotide
  Target: LAMA2; (+) strand; PAM type: NRG; PAM sequence: AGG
ataaacttcgaactaaaact

SEQ ID NO: 142980 - DNA, 20 bp, Artificial Sequence
  Description of Artificial Sequence: Synthetic oligonucleotide
  Target: LAMA2; (+) strand; PAM type: NRG; PAM sequence: TGG
aactaaaactaggttattga

SEQ ID NO: 142981 - DNA, 20 bp, Artificial Sequence
  Description of Artificial Sequence: Synthetic oligonucleotide
  Target: LAMA2; (+) strand; PAM type: NRG; PAM sequence: AAG
aactaggttattgatggtca

SEQ ID NO: 142982 - DNA, 20 bp, Artificial Sequence
  Description of Artificial Sequence: Synthetic oligonucleotide
  Target: LAMA2; (+) strand; PAM type: NRG; PAM sequence: AGG
actaggttattgatggtcaa

SEQ ID NO: 142983 - DNA, 20 bp, Artificial Sequence
  Description of Artificial Sequence: Synthetic oligonucleotide
  Target: LAMA2; (+) strand; PAM type: NRG; PAM sequence: GGG
ctaggttattgatggtcaaa

SEQ ID NO: 142984 - DNA, 20 bp, Artificial Sequence
  Description of Artificial Sequence: Synthetic oligonucleotide
  Target: LAMA2; (+) strand; PAM type: NRG; PAM sequence: GGG
taggttattgatggtcaaag

SEQ ID NO: 142985 - DNA, 20 bp, Artificial Sequence
  Description of Artificial Sequence: Synthetic oligonucleotide
  Target: LAMA2; (+) strand; PAM type: NRG; PAM sequence: GAG
tgatggtcaaaggggtatct

SEQ ID NO: 142986 - DNA, 20 bp, Artificial Sequence
  Description of Artificial Sequence: Synthetic oligonucleotide
  Target: LAMA2; (+) strand; PAM type: NRG; PAM sequence: GAG
atggtcaaaggggtatctga

SEQ ID NO: 142987 - DNA, 20 bp, Artificial Sequence
  Description of Artificial Sequence: Synthetic oligonucleotide
  Target: LAMA2; (+) strand; PAM type: NRG; PAM sequence: AAG
gtcaaaggggtatctgagag

SEQ ID NO: 142988 - DNA, 20 bp, Artificial Sequence
  Description of Artificial Sequence: Synthetic oligonucleotide
  Target: LAMA2; (+) strand; PAM type: NRG; PAM sequence: CAG
ggtatctgagagaagaatca

SEQ ID NO: 142989 - DNA, 20 bp, Artificial Sequence
  Description of Artificial Sequence: Synthetic oligonucleotide
  Target: LAMA2; (+) strand; PAM type: NRG; PAM sequence: GAG
agaatcacagtaataatatt

SEQ ID NO: 142990 - DNA, 20 bp, Artificial Sequence
  Description of Artificial Sequence: Synthetic oligonucleotide
  Target: LAMA2; (+) strand; PAM type: NRG; PAM sequence: AGG
gaatcacagtaataatattg

SEQ ID NO: 142991 - DNA, 20 bp, Artificial Sequence
  Description of Artificial Sequence: Synthetic oligonucleotide
  Target: LAMA2; (+) strand; PAM type: NRG; PAM sequence: GAG
atcacagtaataatattgag

SEQ ID NO: 142992 - DNA, 20 bp, Artificial Sequence
  Description of Artificial Sequence: Synthetic oligonucleotide
  Target: LAMA2; (+) strand; PAM type: NRG; PAM sequence: AGG
tcacagtaataatattgagg

SEQ ID NO: 142993 - DNA, 20 bp, Artificial Sequence
  Description of Artificial Sequence: Synthetic oligonucleotide
  Target: LAMA2; (+) strand; PAM type: NRG; PAM sequence: TAG
attgaggaggacgaactttc

SEQ ID NO: 142994 - DNA, 20 bp, Artificial Sequence
  Description of Artificial Sequence: Synthetic oligonucleotide
  Target: LAMA2; (+) strand; PAM type: NRG; PAM sequence: TGG
aggaggacgaactttctaga

SEQ ID NO: 142995 - DNA, 20 bp, Artificial Sequence
  Description of Artificial Sequence: Synthetic oligonucleotide
  Target: LAMA2; (+) strand; PAM type: NRG; PAM sequence: TAG
ctttctagatggcactgctt

SEQ ID NO: 142996 - DNA, 20 bp, Artificial Sequence
  Description of Artificial Sequence: Synthetic oligonucleotide
  Target: LAMA2; (+) strand; PAM type: NRG; PAM sequence: GAG
ttctagatggcactgcttta

SEQ ID NO: 142997 - DNA, 20 bp, Artificial Sequence
  Description of Artificial Sequence: Synthetic oligonucleotide
  Target: LAMA2; (+) strand; PAM type: NRG; PAM sequence: TAG
tggcactgctttagagatcc

SEQ ID NO: 142998 - DNA, 20 bp, Artificial Sequence
  Description of Artificial Sequence: Synthetic oligonucleotide
  Target: LAMA2; (+) strand; PAM type: NRG; PAM sequence: GAG
ataatatttttctgttgtat

SEQ ID NO: 142999 - DNA, 20 bp, Artificial Sequence
  Description of Artificial Sequence: Synthetic oligonucleotide
  Target: LAMA2; (+) strand; PAM type: NRG; PAM sequence: TGG
attattgcttttaatttatt

SEQ ID NO: 143000 - DNA, 20 bp, Artificial Sequence
  Description of Artificial Sequence: Synthetic oligonucleotide
  Target: LAMA2; (+) strand; PAM type: NRG; PAM sequence: TAG
taatttatttggattgtcac

SEQ ID NO: 143001 - DNA, 20 bp, Artificial Sequence
  Description of Artificial Sequence: Synthetic oligonucleotide
  Target: LAMA2; (+) strand; PAM type: NRG; PAM sequence: TAG
ttggattgtcactagactgc

SEQ ID NO: 143002 - DNA, 20 bp, Artificial Sequence
  Description of Artificial Sequence: Synthetic oligonucleotide
  Target: LAMA2; (+) strand; PAM type: NRG; PAM sequence: TGG
gactgctagctaaatattcg

SEQ ID NO: 143003 - DNA, 20 bp, Artificial Sequence
  Description of Artificial Sequence: Synthetic oligonucleotide
  Target: LAMA2; (+) strand; PAM type: NRG; PAM sequence: TAG
ctaaatattcgtggttacca

SEQ ID NO: 143004 - DNA, 20 bp, Artificial Sequence
  Description of Artificial Sequence: Synthetic oligonucleotide
  Target: LAMA2; (+) strand; PAM type: NRG; PAM sequence: CAG
tttgcttccatttcctcata

SEQ ID NO: 143005 - DNA, 20 bp, Artificial Sequence
  Description of Artificial Sequence: Synthetic oligonucleotide
  Target: LAMA2; (+) strand; PAM type: NRG; PAM sequence: GAG
tgcttccatttcctcataca

SEQ ID NO: 143006 - DNA, 20 bp, Artificial Sequence
  Description of Artificial Sequence: Synthetic oligonucleotide
  Target: LAMA2; (+) strand; PAM type: NRG; PAM sequence: AGG
gcttccatttcctcatacag

SEQ ID NO: 143007 - DNA, 20 bp, Artificial Sequence
  Description of Artificial Sequence: Synthetic oligonucleotide
  Target: LAMA2; (+) strand; PAM type: NRG; PAM sequence: AAG
ttcctcatacagaggccttt

SEQ ID NO: 143008 - DNA, 20 bp, Artificial Sequence
  Description of Artificial Sequence: Synthetic oligonucleotide
  Target: LAMA2; (+) strand; PAM type: NRG; PAM sequence: TGG
ccaccaccttctcactctcc

SEQ ID NO: 143009 - DNA, 20 bp, Artificial Sequence
  Description of Artificial Sequence: Synthetic oligonucleotide
  Target: LAMA2; (+) strand; PAM type: NRG; PAM sequence: CAG
cttctcactctcctggactg

SEQ ID NO: 143010 - DNA, 20 bp, Artificial Sequence
  Description of Artificial Sequence: Synthetic oligonucleotide
  Target: LAMA2; (+) strand; PAM type: NRG; PAM sequence: TGG
tctcctggactgcagctcaa

SEQ ID NO: 143011 - DNA, 20 bp, Artificial Sequence
  Description of Artificial Sequence: Synthetic oligonucleotide
  Target: LAMA2; (+) strand; PAM type: NRG; PAM sequence: TAG
gactgcagctcaatggaact

SEQ ID NO: 143012 - DNA, 20 bp, Artificial Sequence
  Description of Artificial Sequence: Synthetic oligonucleotide
  Target: LAMA2; (+) strand; PAM type: NRG; PAM sequence: TGG
tttgattctgctttgaaaca

SEQ ID NO: 143013 - DNA, 20 bp, Artificial Sequence
  Description of Artificial Sequence: Synthetic oligonucleotide
  Target: LAMA2; (+) strand; PAM type: NRG; PAM sequence: CAG
gattctgctttgaaacatgg

SEQ ID NO: 143014 - DNA, 20 bp, Artificial Sequence
  Description of Artificial Sequence: Synthetic oligonucleotide
  Target: LAMA2; (+) strand; PAM type: NRG; PAM sequence: AGG
attctgctttgaaacatggc

SEQ ID NO: 143015 - DNA, 20 bp, Artificial Sequence
  Description of Artificial Sequence: Synthetic oligonucleotide
  Target: LAMA2; (+) strand; PAM type: NRG; PAM sequence: TGG
caggcttgtataaaaatccc

SEQ ID NO: 143016 - DNA, 20 bp, Artificial Sequence
  Description of Artificial Sequence: Synthetic oligonucleotide
  Target: LAMA2; (+) strand; PAM type: NRG; PAM sequence: GAG
ggcttgtataaaaatccctg

SEQ ID NO: 143017 - DNA, 20 bp, Artificial Sequence
  Description of Artificial Sequence: Synthetic oligonucleotide
  Target: LAMA2; (+) strand; PAM type: NRG; PAM sequence: AAG
gaaaccatcattaaatcttg

SEQ ID NO: 143018 - DNA, 20 bp, Artificial Sequence
  Description of Artificial Sequence: Synthetic oligonucleotide
  Target: LAMA2; (+) strand; PAM type: NRG; PAM sequence: TAG
ttttttttgtaaactgtatg

SEQ ID NO: 143019 - DNA, 20 bp, Artificial Sequence
  Description of Artificial Sequence: Synthetic oligonucleotide
  Target: LAMA2; (+) strand; PAM type: NRG; PAM sequence: GAG
ttttttgtaaactgtatgta

SEQ ID NO: 143020 - DNA, 20 bp, Artificial Sequence
  Description of Artificial Sequence: Synthetic oligonucleotide
  Target: LAMA2; (+) strand; PAM type: NRG; PAM sequence: CAG
tattttgatttcctatgtga

SEQ ID NO: 143021 - DNA, 20 bp, Artificial Sequence
  Description of Artificial Sequence: Synthetic oligonucleotide
  Target: LAMA2; (+) strand; PAM type: NRG; PAM sequence: CAG
gtgacagaattttatatata

SEQ ID NO: 143022 - DNA, 20 bp, Artificial Sequence
  Description of Artificial Sequence: Synthetic oligonucleotide
  Target: LAMA2; (+) strand; PAM type: NRG; PAM sequence: CAG
cagaattttatatatacaga

SEQ ID NO: 143023 - DNA, 20 bp, Artificial Sequence
  Description of Artificial Sequence: Synthetic oligonucleotide
  Target: LAMA2; (+) strand; PAM type: NRG; PAM sequence: TGG
cttttcatcatctgacatta

SEQ ID NO: 143024 - DNA, 20 bp, Artificial Sequence
  Description of Artificial Sequence: Synthetic oligonucleotide
  Target: LAMA2; (+) strand; PAM type: NRG; PAM sequence: TGG
ttcatcatctgacattatgg

SEQ ID NO: 143025 - DNA, 20 bp, Artificial Sequence
  Description of Artificial Sequence: Synthetic oligonucleotide
  Target: LAMA2; (+) strand; PAM type: NRG; PAM sequence: TAG
tctgacattatggtggtcct

SEQ ID NO: 143026 - DNA, 20 bp, Artificial Sequence
  Description of Artificial Sequence: Synthetic oligonucleotide
  Target: LAMA2; (+) strand; PAM type: NRG; PAM sequence: CAG
ggtccttagaattgcaaata

SEQ ID NO: 143027 - DNA, 20 bp, Artificial Sequence
  Description of Artificial Sequence: Synthetic oligonucleotide
  Target: LAMA2; (+) strand; PAM type: NRG; PAM sequence: AGG
gtccttagaattgcaaatac

SEQ ID NO: 143028 - DNA, 20 bp, Artificial Sequence
  Description of Artificial Sequence: Synthetic oligonucleotide
  Target: LAMA2; (+) strand; PAM type: NRG; PAM sequence: GAG
ccttagaattgcaaatacag

SEQ ID NO: 143029 - DNA, 20 bp, Artificial Sequence
  Description of Artificial Sequence: Synthetic oligonucleotide
  Target: LAMA2; (+) strand; PAM type: NRG; PAM sequence: AAG
tagaattgcaaatacaggag

SEQ ID NO: 143030 - DNA, 20 bp, Artificial Sequence
  Description of Artificial Sequence: Synthetic oligonucleotide
  Target: LAMA2; (+) strand; PAM type: NRG; PAM sequence: AGG
agaattgcaaatacaggaga

SEQ ID NO: 143031 - DNA, 20 bp, Artificial Sequence
  Description of Artificial Sequence: Synthetic oligonucleotide
  Target: LAMA2; (+) strand; PAM type: NRG; PAM sequence: AAG
attgcaaatacaggagaagg

SEQ ID NO: 143032 - DNA, 20 bp, Artificial Sequence
  Description of Artificial Sequence: Synthetic oligonucleotide
  Target: LAMA2; (+) strand; PAM type: NRG; PAM sequence: AAG
gagaaggaagacacaaaccc

SEQ ID NO: 143033 - DNA, 20 bp, Artificial Sequence
  Description of Artificial Sequence: Synthetic oligonucleotide
  Target: LAMA2; (+) strand; PAM type: NRG; PAM sequence: CAG
gactgtattaaaaaatgttt

SEQ ID NO: 143034 - DNA, 20 bp, Artificial Sequence
  Description of Artificial Sequence: Synthetic oligonucleotide
  Target: LAMA2; (+) strand; PAM type: NRG; PAM sequence: AAG
tcctttgatataacattgtt

SEQ ID NO: 143035 - DNA, 20 bp, Artificial Sequence
  Description of Artificial Sequence: Synthetic oligonucleotide
  Target: LAMA2; (+) strand; PAM type: NRG; PAM sequence: AGG
cctttgatataacattgtta

SEQ ID NO: 143036 - DNA, 20 bp, Artificial Sequence
  Description of Artificial Sequence: Synthetic oligonucleotide
  Target: LAMA2; (+) strand; PAM type: NRG; PAM sequence: GAG
tataacatgattttgcatgt

SEQ ID NO: 143037 - DNA, 20 bp, Artificial Sequence
  Description of Artificial Sequence: Synthetic oligonucleotide
  Target: LAMA2; (+) strand; PAM type: NRG; PAM sequence: TGG
attttgcatgtgagtttgta

SEQ ID NO: 143038 - DNA, 20 bp, Artificial Sequence
  Description of Artificial Sequence: Synthetic oligonucleotide
  Target: LAMA2; (+) strand; PAM type: NRG; PAM sequence: GAG
atgtgagtttgtatggaaat

SEQ ID NO: 143039 - DNA, 20 bp, Artificial Sequence
  Description of Artificial Sequence: Synthetic oligonucleotide
  Target: LAMA2; (+) strand; PAM type: NRG; PAM sequence: AGG
tgtgagtttgtatggaaatg

SEQ ID NO: 143040 - DNA, 20 bp, Artificial Sequence
  Description of Artificial Sequence: Synthetic oligonucleotide
  Target: LAMA2; (+) strand; PAM type: NRG; PAM sequence: GGG
gtgagtttgtatggaaatga

SEQ ID NO: 143041 - DNA, 20 bp, Artificial Sequence
  Description of Artificial Sequence: Synthetic oligonucleotide
  Target: LAMA2; (+) strand; PAM type: NRG; PAM sequence: TGG
tttgtatggaaatgagggaa

SEQ ID NO: 143042 - DNA, 20 bp, Artificial Sequence
  Description of Artificial Sequence: Synthetic oligonucleotide
  Target: LAMA2; (+) strand; PAM type: NRG; PAM sequence: AAG
gaaatgagggaatggaaatg

SEQ ID NO: 143043 - DNA, 20 bp, Artificial Sequence
  Description of Artificial Sequence: Synthetic oligonucleotide
  Target: LAMA2; (+) strand; PAM type: NRG; PAM sequence: TAG
agggaatggaaatgaagacc

SEQ ID NO: 143044 - DNA, 20 bp, Artificial Sequence
  Description of Artificial Sequence: Synthetic oligonucleotide
  Target: LAMA2; (+) strand; PAM type: NRG; PAM sequence: TAG
tacccttgcaattgttcctt

SEQ ID NO: 143045 - DNA, 20 bp, Artificial Sequence
  Description of Artificial Sequence: Synthetic oligonucleotide
  Target: LAMA2; (+) strand; PAM type: NRG; PAM sequence: AGG
acccttgcaattgttccttt

SEQ ID NO: 143046 - DNA, 20 bp, Artificial Sequence
  Description of Artificial Sequence: Synthetic oligonucleotide
  Target: LAMA2; (+) strand; PAM type: NRG; PAM sequence: GGG
cccttgcaattgttccttta

SEQ ID NO: 143047 - DNA, 20 bp, Artificial Sequence
  Description of Artificial Sequence: Synthetic oligonucleotide
  Target: LAMA2; (+) strand; PAM type: NRG; PAM sequence: GAG
cttgcaattgttcctttagg

SEQ ID NO: 143048 - DNA, 20 bp, Artificial Sequence
  Description of Artificial Sequence: Synthetic oligonucleotide
  Target: LAMA2; (+) strand; PAM type: NRG; PAM sequence: CAG
attgttcctttagggagaaa

SEQ ID NO: 143049 - DNA, 20 bp, Artificial Sequence
  Description of Artificial Sequence: Synthetic oligonucleotide
  Target: LAMA2; (+) strand; PAM type: NRG; PAM sequence: CGG
gttcctttagggagaaacag

SEQ ID NO: 143050 - DNA, 20 bp, Artificial Sequence
  Description of Artificial Sequence: Synthetic oligonucleotide
  Target: LAMA2; (+) strand; PAM type: NRG; PAM sequence: GAG
tcctttagggagaaacagcg

SEQ ID NO: 143051 - DNA, 20 bp, Artificial Sequence
  Description of Artificial Sequence: Synthetic oligonucleotide
  Target: LAMA2; (+) strand; PAM type: NRG; PAM sequence: TGG
ggagtattactaatttgtat

SEQ ID NO: 143052 - DNA, 20 bp, Artificial Sequence
  Description of Artificial Sequence: Synthetic oligonucleotide
  Target: LAMA2; (+) strand; PAM type: NRG; PAM sequence: TAG
taatttgtattggttttcaa

SEQ ID NO: 143053 - DNA, 20 bp, Artificial Sequence
  Description of Artificial Sequence: Synthetic oligonucleotide
  Target: LAMA2; (+) strand; PAM type: NRG; PAM sequence: TAG
attggttttcaatagaaatt

SEQ ID NO: 143054 - DNA, 20 bp, Artificial Sequence
  Description of Artificial Sequence: Synthetic oligonucleotide
  Target: LAMA2; (+) strand; PAM type: NRG; PAM sequence: AGG
ttggttttcaatagaaattt

SEQ ID NO: 143055 - DNA, 20 bp, Artificial Sequence
  Description of Artificial Sequence: Synthetic oligonucleotide
  Target: LAMA2; (+) strand; PAM type: NRG; PAM sequence: TGG
aatttaggtaaataattatt

SEQ ID NO: 143056 - DNA, 20 bp, Artificial Sequence
  Description of Artificial Sequence: Synthetic oligonucleotide
  Target: LAMA2; (+) strand; PAM type: NRG; PAM sequence: GGG
atttaggtaaataattattt

SEQ ID NO: 143057 - DNA, 20 bp, Artificial Sequence
  Description of Artificial Sequence: Synthetic oligonucleotide
  Target: LAMA2; (+) strand; PAM type: NRG; PAM sequence: GGG
tttaggtaaataattatttg

SEQ ID NO: 143058 - DNA, 20 bp, Artificial Sequence
  Description of Artificial Sequence: Synthetic oligonucleotide
  Target: LAMA2; (+) strand; PAM type: NRG; PAM sequence: CAG
taaataattatttggggttt

SEQ ID NO: 143059 - DNA, 20 bp, Artificial Sequence
  Description of Artificial Sequence: Synthetic oligonucleotide
  Target: LAMA2; (+) strand; PAM type: NRG; PAM sequence: AGG
aaataattatttggggtttc

SEQ ID NO: 143060 - DNA, 20 bp, Artificial Sequence
  Description of Artificial Sequence: Synthetic oligonucleotide
  Target: LAMA2; (+) strand; PAM type: NRG; PAM sequence: TAG
tctctaaaaataattctttt

SEQ ID NO: 143061 - DNA, 20 bp, Artificial Sequence
  Description of Artificial Sequence: Synthetic oligonucleotide
  Target: LAMA2; (+) strand; PAM type: NRG; PAM sequence: TGG
taattctttttagaccaatg

SEQ ID NO: 143062 - DNA, 20 bp, Artificial Sequence
  Description of Artificial Sequence: Synthetic oligonucleotide
  Target: LAMA2; (+) strand; PAM type: NRG; PAM sequence: GGG
aattctttttagaccaatgt

SEQ ID NO: 143063 - DNA, 20 bp, Artificial Sequence
  Description of Artificial Sequence: Synthetic oligonucleotide
  Target: LAMA2; (+) strand; PAM type: NRG; PAM sequence: GGG
attctttttagaccaatgtg

SEQ ID NO: 143064 - DNA, 20 bp, Artificial Sequence
  Description of Artificial Sequence: Synthetic oligonucleotide
  Target: LAMA2; (+) strand; PAM type: NRG; PAM sequence: CAG
tagaccaatgtggggccaat

SEQ ID NO: 143065 - DNA, 20 bp, Artificial Sequence
  Description of Artificial Sequence: Synthetic oligonucleotide
  Target: LAMA2; (+) strand; PAM type: NRG; PAM sequence: TGG
atgtggggccaatcagtacc

SEQ ID NO: 143066 - DNA, 20 bp, Artificial Sequence
  Description of Artificial Sequence: Synthetic oligonucleotide
  Target: LAMA2; (+) strand; PAM type: NRG; PAM sequence: GAG
gtggggccaatcagtacctg

SEQ ID NO: 143067 - DNA, 20 bp, Artificial Sequence
  Description of Artificial Sequence: Synthetic oligonucleotide
  Target: LAMA2; (+) strand; PAM type: NRG; PAM sequence: AAG
tacctggagcaacaatatta

SEQ ID NO: 143068 - DNA, 20 bp, Artificial Sequence
  Description of Artificial Sequence: Synthetic oligonucleotide
  Target: LAMA2; (+) strand; PAM type: NRG; PAM sequence: CAG
aatattaaagtacctcctta

SEQ ID NO: 143069 - DNA, 20 bp, Artificial Sequence
  Description of Artificial Sequence: Synthetic oligonucleotide
  Target: LAMA2; (+) strand; PAM type: NRG; PAM sequence: GAG
ttaaagtacctccttacagt

SEQ ID NO: 143070 - DNA, 20 bp, Artificial Sequence
  Description of Artificial Sequence: Synthetic oligonucleotide
  Target: LAMA2; (+) strand; PAM type: NRG; PAM sequence: AGG
taaagtacctccttacagtg

SEQ ID NO: 143071 - DNA, 20 bp, Artificial Sequence
  Description of Artificial Sequence: Synthetic oligonucleotide
  Target: LAMA2; (+) strand; PAM type: NRG; PAM sequence: TGG
tccttacagtgaggtttata

SEQ ID NO: 143072 - DNA, 20 bp, Artificial Sequence
  Description of Artificial Sequence: Synthetic oligonucleotide
  Target: LAMA2; (+) strand; PAM type: NRG; PAM sequence: GAG
cttacagtgaggtttatatg

SEQ ID NO: 143073 - DNA, 20 bp, Artificial Sequence
  Description of Artificial Sequence: Synthetic oligonucleotide
  Target: LAMA2; (+) strand; PAM type: NRG; PAM sequence: TGG
aaaatgaaatgtttcaactc

SEQ ID NO: 143074 - DNA, 20 bp, Artificial Sequence
  Description of Artificial Sequence: Synthetic oligonucleotide
  Target: LAMA2; (+) strand; PAM type: NRG; PAM sequence: TGG
tgaaatgtttcaactctggt

SEQ ID NO: 143075 - DNA, 20 bp, Artificial Sequence
  Description of Artificial Sequence: Synthetic oligonucleotide
  Target: LAMA2; (+) strand; PAM type: NRG; PAM sequence: CAG
tcaactctggttggaataca

SEQ ID NO: 143076 - DNA, 20 bp, Artificial Sequence
  Description of Artificial Sequence: Synthetic oligonucleotide
  Target: LAMA2; (+) strand; PAM type: NRG; PAM sequence: GAG
aactctggttggaatacaca

SEQ ID NO: 143077 - DNA, 20 bp, Artificial Sequence
  Description of Artificial Sequence: Synthetic oligonucleotide
  Target: LAMA2; (+) strand; PAM type: NRG; PAM sequence: CAG
tctggttggaatacacagag

SEQ ID NO: 143078 - DNA, 20 bp, Artificial Sequence
  Description of Artificial Sequence: Synthetic oligonucleotide
  Target: LAMA2; (+) strand; PAM type: NRG; PAM sequence: AAG
ataaaatacataatttattt

SEQ ID NO: 143079 - DNA, 20 bp, Artificial Sequence
  Description of Artificial Sequence: Synthetic oligonucleotide
  Target: LAMA2; (+) strand; PAM type: NRG; PAM sequence: AGG
taaaatacataatttattta

SEQ ID NO: 143080 - DNA, 20 bp, Artificial Sequence
  Description of Artificial Sequence: Synthetic oligonucleotide
  Target: LAMA2; (+) strand; PAM type: NRG; PAM sequence: AAG
tacatctttttaataaaata

SEQ ID NO: 143081 - DNA, 20 bp, Artificial Sequence
  Description of Artificial Sequence: Synthetic oligonucleotide
  Target: LAMA2; (+) strand; PAM type: NRG; PAM sequence: AAG
aataaaataaagataaaatt

SEQ ID NO: 143082 - DNA, 20 bp, Artificial Sequence
  Description of Artificial Sequence: Synthetic oligonucleotide
  Target: LAMA2; (+) strand; PAM type: NRG; PAM sequence: GAG
taaaataaagataaaattaa

SEQ ID NO: 143083 - DNA, 20 bp, Artificial Sequence
  Description of Artificial Sequence: Synthetic oligonucleotide
  Target: LAMA2; (+) strand; PAM type: NRG; PAM sequence: AGG
aaaataaagataaaattaag

SEQ ID NO: 143084 - DNA, 20 bp, Artificial Sequence
  Description of Artificial Sequence: Synthetic oligonucleotide
  Target: LAMA2; (+) strand; PAM type: NRG; PAM sequence: CAG
cctcctttttctttgttgat

SEQ ID NO: 143085 - DNA, 20 bp, Artificial Sequence
  Description of Artificial Sequence: Synthetic oligonucleotide
  Target: LAMA2; (+) strand; PAM type: NRG; PAM sequence: TAG
tttctttgttgatcagttac

SEQ ID NO: 143086 - DNA, 20 bp, Artificial Sequence
  Description of Artificial Sequence: Synthetic oligonucleotide
  Target: LAMA2; (+) strand; PAM type: NRG; PAM sequence: CAG
atatatatatatacaatgcc

SEQ ID NO: 143087 - DNA, 20 bp, Artificial Sequence
  Description of Artificial Sequence: Synthetic oligonucleotide
  Target: LAMA2; (+) strand; PAM type: NRG; PAM sequence: AAG
atatatatacaatgcccaga

SEQ ID NO: 143088 - DNA, 20 bp, Artificial Sequence
  Description of Artificial Sequence: Synthetic oligonucleotide
  Target: LAMA2; (+) strand; PAM type: NRG; PAM sequence: CAG
aaatccctgttaaattaatg

SEQ ID NO: 143089 - DNA, 20 bp, Artificial Sequence
  Description of Artificial Sequence: Synthetic oligonucleotide
  Target: LAMA2; (+) strand; PAM type: NRG; PAM sequence: AAG
tgcagtattgttgaaaaaca

SEQ ID NO: 143090 - DNA, 20 bp, Artificial Sequence
  Description of Artificial Sequence: Synthetic oligonucleotide
  Target: LAMA2; (+) strand; PAM type: NRG; PAM sequence: TGG
gtattgttgaaaaacaaaga

SEQ ID NO: 143091 - DNA, 20 bp, Artificial Sequence
  Description of Artificial Sequence: Synthetic oligonucleotide
  Target: LAMA2; (+) strand; PAM type: NRG; PAM sequence: CAG
tgttgaaaaacaaagatggc

SEQ ID NO: 143092 - DNA, 20 bp, Artificial Sequence
  Description of Artificial Sequence: Synthetic oligonucleotide
  Target: LAMA2; (+) strand; PAM type: NRG; PAM sequence: GAG
ttgaaaaacaaagatggcca

SEQ ID NO: 143093 - DNA, 20 bp, Artificial Sequence
  Description of Artificial Sequence: Synthetic oligonucleotide
  Target: LAMA2; (+) strand; PAM type: NRG; PAM sequence: GAG
gatggccagagaaactgaat

SEQ ID NO: 143094 - DNA, 20 bp, Artificial Sequence
  Description of Artificial Sequence: Synthetic oligonucleotide
  Target: LAMA2; (+) strand; PAM type: NRG; PAM sequence: TGG
ccagagaaactgaatgagaa

SEQ ID NO: 143095 - DNA, 20 bp, Artificial Sequence
  Description of Artificial Sequence: Synthetic oligonucleotide
  Target: LAMA2; (+) strand; PAM type: NRG; PAM sequence: GAG
ctgaatgagaatggaatcct

SEQ ID NO: 143096 - DNA, 20 bp, Artificial Sequence
  Description of Artificial Sequence: Synthetic oligonucleotide
  Target: LAMA2; (+) strand; PAM type: NRG; PAM sequence: AGG
tgaatgagaatggaatcctg

SEQ ID NO: 143097 - DNA, 20 bp, Artificial Sequence
  Description of Artificial Sequence: Synthetic oligonucleotide
  Target: LAMA2; (+) strand; PAM type: NRG; PAM sequence: GAG
aatgagaatggaatcctgag

SEQ ID NO: 143098 - DNA, 20 bp, Artificial Sequence
  Description of Artificial Sequence: Synthetic oligonucleotide
  Target: LAMA2; (+) strand; PAM type: NRG; PAM sequence: AAG
aggagaaaacaccaatattt

SEQ ID NO: 143099 - DNA, 20 bp, Artificial Sequence
  Description of Artificial Sequence: Synthetic oligonucleotide
  Target: LAMA2; (+) strand; PAM type: NRG; PAM sequence: GAG
gagaaaacaccaatatttaa

SEQ ID NO: 143100 - DNA, 20 bp, Artificial Sequence
  Description of Artificial Sequence: Synthetic oligonucleotide
  Target: LAMA2; (+) strand; PAM type: NRG; PAM sequence: TGG
acaccaatatttaagagacc

SEQ ID NO: 143101 - DNA, 20 bp, Artificial Sequence
  Description of Artificial Sequence: Synthetic oligonucleotide
  Target: LAMA2; (+) strand; PAM type: NRG; PAM sequence: CAG
tttaagagacctggttctct

SEQ ID NO: 143102 - DNA, 20 bp, Artificial Sequence
  Description of Artificial Sequence: Synthetic oligonucleotide
  Target: LAMA2; (+) strand; PAM type: NRG; PAM sequence: TGG
acctggttctctcagtgttg

SEQ ID NO: 143103 - DNA, 20 bp, Artificial Sequence
  Description of Artificial Sequence: Synthetic oligonucleotide
  Target: LAMA2; (+) strand; PAM type: NRG; PAM sequence: CAG
gttctctcagtgttgtggaa

SEQ ID NO: 143104 - DNA, 20 bp, Artificial Sequence
  Description of Artificial Sequence: Synthetic oligonucleotide
  Target: LAMA2; (+) strand; PAM type: NRG; PAM sequence: AGG
ttctctcagtgttgtggaac

SEQ ID NO: 143105 - DNA, 20 bp, Artificial Sequence
  Description of Artificial Sequence: Synthetic oligonucleotide
  Target: LAMA2; (+) strand; PAM type: NRG; PAM sequence: TGG
tggaacaggatccactgata

SEQ ID NO: 143106 - DNA, 20 bp, Artificial Sequence
  Description of Artificial Sequence: Synthetic oligonucleotide
  Target: LAMA2; (+) strand; PAM type: NRG; PAM sequence: CAG
caggatccactgatatggaa

SEQ ID NO: 143107 - DNA, 20 bp, Artificial Sequence
  Description of Artificial Sequence: Synthetic oligonucleotide
  Target: LAMA2; (+) strand; PAM type: NRG; PAM sequence: AAG
gatccactgatatggaacag

SEQ ID NO: 143108 - DNA, 20 bp, Artificial Sequence
  Description of Artificial Sequence: Synthetic oligonucleotide
  Target: LAMA2; (+) strand; PAM type: NRG; PAM sequence: AGG
atccactgatatggaacaga

SEQ ID NO: 143109 - DNA, 20 bp, Artificial Sequence
  Description of Artificial Sequence: Synthetic oligonucleotide
  Target: LAMA2; (+) strand; PAM type: NRG; PAM sequence: GGG
tccactgatatggaacagaa

SEQ ID NO: 143110 - DNA, 20 bp, Artificial Sequence
  Description of Artificial Sequence: Synthetic oligonucleotide
  Target: LAMA2; (+) strand; PAM type: NRG; PAM sequence: AAG
ctgatatggaacagaagggt

SEQ ID NO: 143111 - DNA, 20 bp, Artificial Sequence
  Description of Artificial Sequence: Synthetic oligonucleotide
  Target: LAMA2; (+) strand; PAM type: NRG; PAM sequence: AAG
cagaagggtaagcttctgtt

SEQ ID NO: 143112 - DNA, 20 bp, Artificial Sequence
  Description of Artificial Sequence: Synthetic oligonucleotide
  Target: LAMA2; (+) strand; PAM type: NRG; PAM sequence: TAG
agggtaagcttctgttaagc

SEQ ID NO: 143113 - DNA, 20 bp, Artificial Sequence
  Description of Artificial Sequence: Synthetic oligonucleotide
  Target: LAMA2; (+) strand; PAM type: NRG; PAM sequence: AGG
gggtaagcttctgttaagct

SEQ ID NO: 143114 - DNA, 20 bp, Artificial Sequence
  Description of Artificial Sequence: Synthetic oligonucleotide
  Target: LAMA2; (+) strand; PAM type: NRG; PAM sequence: AAG
aagcttctgttaagctaggt

SEQ ID NO: 143115 - DNA, 20 bp, Artificial Sequence
  Description of Artificial Sequence: Synthetic oligonucleotide
  Target: LAMA2; (+) strand; PAM type: NRG; PAM sequence: AGG
agcttctgttaagctaggta

SEQ ID NO: 143116 - DNA, 20 bp, Artificial Sequence
  Description of Artificial Sequence: Synthetic oligonucleotide
  Target: LAMA2; (+) strand; PAM type: NRG; PAM sequence: AAG
ttctgttaagctaggtaagg

SEQ ID NO: 143117 - DNA, 20 bp, Artificial Sequence
  Description of Artificial Sequence: Synthetic oligonucleotide
  Target: LAMA2; (+) strand; PAM type: NRG; PAM sequence: TAG
ttaagctaggtaaggaagct

SEQ ID NO: 143118 - DNA, 20 bp, Artificial Sequence
  Description of Artificial Sequence: Synthetic oligonucleotide
  Target: LAMA2; (+) strand; PAM type: NRG; PAM sequence: AGG
taagctaggtaaggaagctt

SEQ ID NO: 143119 - DNA, 20 bp, Artificial Sequence
  Description of Artificial Sequence: Synthetic oligonucleotide
  Target: LAMA2; (+) strand; PAM type: NRG; PAM sequence: GGG
aagctaggtaaggaagctta

SEQ ID NO: 143120 - DNA, 20 bp, Artificial Sequence
  Description of Artificial Sequence: Synthetic oligonucleotide
  Target: LAMA2; (+) strand; PAM type: NRG; PAM sequence: AAG
aaggaagcttagggttgtga

SEQ ID NO: 143121 - DNA, 20 bp, Artificial Sequence
  Description of Artificial Sequence: Synthetic oligonucleotide
  Target: LAMA2; (+) strand; PAM type: NRG; PAM sequence: AAG
gaagcttagggttgtgaaag

SEQ ID NO: 143122 - DNA, 20 bp, Artificial Sequence
  Description of Artificial Sequence: Synthetic oligonucleotide
  Target: LAMA2; (+) strand; PAM type: NRG; PAM sequence: AGG
aagcttagggttgtgaaaga

SEQ ID NO: 143123 - DNA, 20 bp, Artificial Sequence
  Description of Artificial Sequence: Synthetic oligonucleotide
  Target: LAMA2; (+) strand; PAM type: NRG; PAM sequence: AAG
gggttgtgaaagaaggtaca

SEQ ID NO: 143124 - DNA, 20 bp, Artificial Sequence
  Description of Artificial Sequence: Synthetic oligonucleotide
  Target: LAMA2; (+) strand; PAM type: NRG; PAM sequence: TGG
agacactgcacactgacttt

SEQ ID NO: 143125 - DNA, 20 bp, Artificial Sequence
  Description of Artificial Sequence: Synthetic oligonucleotide
  Target: LAMA2; (+) strand; PAM type: NRG; PAM sequence: GGG
gacactgcacactgactttt

SEQ ID NO: 143126 - DNA, 20 bp, Artificial Sequence
  Description of Artificial Sequence: Synthetic oligonucleotide
  Target: LAMA2; (+) strand; PAM type: NRG; PAM sequence: GGG
acactgcacactgacttttg

SEQ ID NO: 143127 - DNA, 20 bp, Artificial Sequence
  Description of Artificial Sequence: Synthetic oligonucleotide
  Target: LAMA2; (+) strand; PAM type: NRG; PAM sequence: TGG
ctgacttttggggaattacc

SEQ ID NO: 143128 - DNA, 20 bp, Artificial Sequence
  Description of Artificial Sequence: Synthetic oligonucleotide
  Target: LAMA2; (+) strand; PAM type: NRG; PAM sequence: TGG
tttggggaattacctggatt

SEQ ID NO: 143129 - DNA, 20 bp, Artificial Sequence
  Description of Artificial Sequence: Synthetic oligonucleotide
  Target: LAMA2; (+) strand; PAM type: NRG; PAM sequence: CAG
aattacctggatttggcttt

SEQ ID NO: 143130 - DNA, 20 bp, Artificial Sequence
  Description of Artificial Sequence: Synthetic oligonucleotide
  Target: LAMA2; (+) strand; PAM type: NRG; PAM sequence: AGG
attacctggatttggctttc

SEQ ID NO: 143131 - DNA, 20 bp, Artificial Sequence
  Description of Artificial Sequence: Synthetic oligonucleotide
  Target: LAMA2; (+) strand; PAM type: NRG; PAM sequence: TAG
acctggatttggctttcagg

SEQ ID NO: 143132 - DNA, 20 bp, Artificial Sequence
  Description of Artificial Sequence: Synthetic oligonucleotide
  Target: LAMA2; (+) strand; PAM type: NRG; PAM sequence: AAG
ggctttcaggtagctctgcc

SEQ ID NO: 143133 - DNA, 20 bp, Artificial Sequence
  Description of Artificial Sequence: Synthetic oligonucleotide
  Target: LAMA2; (+) strand; PAM type: NRG; PAM sequence: AGG
gctttcaggtagctctgcca

SEQ ID NO: 143134 - DNA, 20 bp, Artificial Sequence
  Description of Artificial Sequence: Synthetic oligonucleotide
  Target: LAMA2; (+) strand; PAM type: NRG; PAM sequence: TAG
gctctgccaaggattaacaa

SEQ ID NO: 143135 - DNA, 20 bp, Artificial Sequence
  Description of Artificial Sequence: Synthetic oligonucleotide
  Target: LAMA2; (+) strand; PAM type: NRG; PAM sequence: AGG
ctctgccaaggattaacaat

SEQ ID NO: 143136 - DNA, 20 bp, Artificial Sequence
  Description of Artificial Sequence: Synthetic oligonucleotide
  Target: LAMA2; (+) strand; PAM type: NRG; PAM sequence: GGG
tctgccaaggattaacaata

SEQ ID NO: 143137 - DNA, 20 bp, Artificial Sequence
  Description of Artificial Sequence: Synthetic oligonucleotide
  Target: LAMA2; (+) strand; PAM type: NRG; PAM sequence: CAG
caaggattaacaatagggtt

SEQ ID NO: 143138 - DNA, 20 bp, Artificial Sequence
  Description of Artificial Sequence: Synthetic oligonucleotide
  Target: LAMA2; (+) strand; PAM type: NRG; PAM sequence: AAG
gattaacaatagggttcaga

SEQ ID NO: 143139 - DNA, 20 bp, Artificial Sequence
  Description of Artificial Sequence: Synthetic oligonucleotide
  Target: LAMA2; (+) strand; PAM type: NRG; PAM sequence: AAG
taacaatagggttcagaaag

SEQ ID NO: 143140 - DNA, 20 bp, Artificial Sequence
  Description of Artificial Sequence: Synthetic oligonucleotide
  Target: LAMA2; (+) strand; PAM type: NRG; PAM sequence: GAG
acaatagggttcagaaagaa

SEQ ID NO: 143141 - DNA, 20 bp, Artificial Sequence
  Description of Artificial Sequence: Synthetic oligonucleotide
  Target: LAMA2; (+) strand; PAM type: NRG; PAM sequence: CAG
aaaccatctaatatgtgccc

SEQ ID NO: 143142 - DNA, 20 bp, Artificial Sequence
  Description of Artificial Sequence: Synthetic oligonucleotide
  Target: LAMA2; (+) strand; PAM type: NRG; PAM sequence: CAG
catctaatatgtgccccagc

SEQ ID NO: 143143 - DNA, 20 bp, Artificial Sequence
  Description of Artificial Sequence: Synthetic oligonucleotide
  Target: LAMA2; (+) strand; PAM type: NRG; PAM sequence: TGG
tgtgccccagccagtttacg

SEQ ID NO: 143144 - DNA, 20 bp, Artificial Sequence
  Description of Artificial Sequence: Synthetic oligonucleotide
  Target: LAMA2; (+) strand; PAM type: NRG; PAM sequence: TAG
ggttataataacgatcaaat

SEQ ID NO: 143145 - DNA, 20 bp, Artificial Sequence
  Description of Artificial Sequence: Synthetic oligonucleotide
  Target: LAMA2; (+) strand; PAM type: NRG; PAM sequence: TGG
acgatcaaattagattttta

SEQ ID NO: 143146 - DNA, 20 bp, Artificial Sequence
  Description of Artificial Sequence: Synthetic oligonucleotide
  Target: LAMA2; (+) strand; PAM type: NRG; PAM sequence: TAG
ctttaacctctacgatatga

SEQ ID NO: 143147 - DNA, 20 bp, Artificial Sequence
  Description of Artificial Sequence: Synthetic oligonucleotide
  Target: LAMA2; (+) strand; PAM type: NRG; PAM sequence: CAG
ctacgatatgatagtatttc

SEQ ID NO: 143148 - DNA, 20 bp, Artificial Sequence
  Description of Artificial Sequence: Synthetic oligonucleotide
  Target: LAMA2; (+) strand; PAM type: NRG; PAM sequence: AAG
tttccagcctttttattctc

SEQ ID NO: 143149 - DNA, 20 bp, Artificial Sequence
  Description of Artificial Sequence: Synthetic oligonucleotide
  Target: LAMA2; (+) strand; PAM type: NRG; PAM sequence: AGG
ttccagcctttttattctca

SEQ ID NO: 143150 - DNA, 20 bp, Artificial Sequence
  Description of Artificial Sequence: Synthetic oligonucleotide
  Target: LAMA2; (+) strand; PAM type: NRG; PAM sequence: CAG
gcctttttattctcaaggtt

SEQ ID NO: 143151 - DNA, 20 bp, Artificial Sequence
  Description of Artificial Sequence: Synthetic oligonucleotide
  Target: LAMA2; (+) strand; PAM type: NRG; PAM sequence: TAG
tttttattctcaaggttcag

SEQ ID NO: 143152 - DNA, 20 bp, Artificial Sequence
  Description of Artificial Sequence: Synthetic oligonucleotide
  Target: LAMA2; (+) strand; PAM type: NRG; PAM sequence: TGG
caaggttcagtagctaacat

SEQ ID NO: 143153 - DNA, 20 bp, Artificial Sequence
  Description of Artificial Sequence: Synthetic oligonucleotide
  Target: LAMA2; (+) strand; PAM type: NRG; PAM sequence: AAG
tcagtagctaacattggctt

SEQ ID NO: 143154 - DNA, 20 bp, Artificial Sequence
  Description of Artificial Sequence: Synthetic oligonucleotide
  Target: LAMA2; (+) strand; PAM type: NRG; PAM sequence: GAG
ctcctaactatgaaatgact

SEQ ID NO: 143155 - DNA, 20 bp, Artificial Sequence
  Description of Artificial Sequence: Synthetic oligonucleotide
  Target: LAMA2; (+) strand; PAM type: NRG; PAM sequence: TGG
taactatgaaatgactgagc

SEQ ID NO: 143156 - DNA, 20 bp, Artificial Sequence
  Description of Artificial Sequence: Synthetic oligonucleotide
  Target: LAMA2; (+) strand; PAM type: NRG; PAM sequence: CAG
atgaaatgactgagctggct

SEQ ID NO: 143157 - DNA, 20 bp, Artificial Sequence
  Description of Artificial Sequence: Synthetic oligonucleotide
  Target: LAMA2; (+) strand; PAM type: NRG; PAM sequence: TGG
atgactgagctggctcagcc

SEQ ID NO: 143158 - DNA, 20 bp, Artificial Sequence
  Description of Artificial Sequence: Synthetic oligonucleotide
  Target: LAMA2; (+) strand; PAM type: NRG; PAM sequence: GAG
gagctggctcagcctggaat

SEQ ID NO: 143159 - DNA, 20 bp, Artificial Sequence
  Description of Artificial Sequence: Synthetic oligonucleotide
  Target: LAMA2; (+) strand; PAM type: NRG; PAM sequence: GAG
gctggctcagcctggaatga

SEQ ID NO: 143160 - DNA, 20 bp, Artificial Sequence
  Description of Artificial Sequence: Synthetic oligonucleotide
  Target: LAMA2; (+) strand; PAM type: NRG; PAM sequence: TGG
ggctcagcctggaatgagag

SEQ ID NO: 143161 - DNA, 20 bp, Artificial Sequence
  Description of Artificial Sequence: Synthetic oligonucleotide
  Target: LAMA2; (+) strand; PAM type: NRG; PAM sequence: GGG
gctcagcctggaatgagagt

SEQ ID NO: 143162 - DNA, 20 bp, Artificial Sequence
  Description of Artificial Sequence: Synthetic oligonucleotide
  Target: LAMA2; (+) strand; PAM type: NRG; PAM sequence: GGG
ctcagcctggaatgagagtg

SEQ ID NO: 143163 - DNA, 20 bp, Artificial Sequence
  Description of Artificial Sequence: Synthetic oligonucleotide
  Target: LAMA2; (+) strand; PAM type: NRG; PAM sequence: GAG
cagcctggaatgagagtggg

SEQ ID NO: 143164 - DNA, 20 bp, Artificial Sequence
  Description of Artificial Sequence: Synthetic oligonucleotide
  Target: LAMA2; (+) strand; PAM type: NRG; PAM sequence: GAG
ggaatgagagtggggagcat

SEQ ID NO: 143165 - DNA, 20 bp, Artificial Sequence
  Description of Artificial Sequence: Synthetic oligonucleotide
  Target: LAMA2; (+) strand; PAM type: NRG; PAM sequence: GAG
aatgagagtggggagcatga

SEQ ID NO: 143166 - DNA, 20 bp, Artificial Sequence
  Description of Artificial Sequence: Synthetic oligonucleotide
  Target: LAMA2; (+) strand; PAM type: NRG; PAM sequence: AGG
atgagagtggggagcatgag

SEQ ID NO: 143167 - DNA, 20 bp, Artificial Sequence
  Description of Artificial Sequence: Synthetic oligonucleotide
  Target: LAMA2; (+) strand; PAM type: NRG; PAM sequence: GGG
tgagagtggggagcatgaga

SEQ ID NO: 143168 - DNA, 20 bp, Artificial Sequence
  Description of Artificial Sequence: Synthetic oligonucleotide
  Target: LAMA2; (+) strand; PAM type: NRG; PAM sequence: CAG
tggggagcatgagagggaca

SEQ ID NO: 143169 - DNA, 20 bp, Artificial Sequence
  Description of Artificial Sequence: Synthetic oligonucleotide
  Target: LAMA2; (+) strand; PAM type: NRG; PAM sequence: GAG
gggacacagccataccacat

SEQ ID NO: 143170 - DNA, 20 bp, Artificial Sequence
  Description of Artificial Sequence: Synthetic oligonucleotide
  Target: LAMA2; (+) strand; PAM type: NRG; PAM sequence: AGG
ggacacagccataccacatg

SEQ ID NO: 143171 - DNA, 20 bp, Artificial Sequence
  Description of Artificial Sequence: Synthetic oligonucleotide
  Target: LAMA2; (+) strand; PAM type: NRG; PAM sequence: TGG
agccataccacatgaggcca

SEQ ID NO: 143172 - DNA, 20 bp, Artificial Sequence
  Description of Artificial Sequence: Synthetic oligonucleotide
  Target: LAMA2; (+) strand; PAM type: NRG; PAM sequence: TAG
ataccacatgaggccatggc

SEQ ID NO: 143173 - DNA, 20 bp, Artificial Sequence
  Description of Artificial Sequence: Synthetic oligonucleotide
  Target: LAMA2; (+) strand; PAM type: NRG; PAM sequence: AGG
taccacatgaggccatggct

SEQ ID NO: 143174 - DNA, 20 bp, Artificial Sequence
  Description of Artificial Sequence: Synthetic oligonucleotide
  Target: LAMA2; (+) strand; PAM type: NRG; PAM sequence: GGG
accacatgaggccatggcta

SEQ ID NO: 143175 - DNA, 20 bp, Artificial Sequence
  Description of Artificial Sequence: Synthetic oligonucleotide
  Target: LAMA2; (+) strand; PAM type: NRG; PAM sequence: AAG
acatgaggccatggctaggg

SEQ ID NO: 143176 - DNA, 20 bp, Artificial Sequence
  Description of Artificial Sequence: Synthetic oligonucleotide
  Target: LAMA2; (+) strand; PAM type: NRG; PAM sequence: AGG
catgaggccatggctaggga

SEQ ID NO: 143177 - DNA, 20 bp, Artificial Sequence
  Description of Artificial Sequence: Synthetic oligonucleotide
  Target: LAMA2; (+) strand; PAM type: NRG; PAM sequence: CAG
gaggccatggctagggaagg

SEQ ID NO: 143178 - DNA, 20 bp, Artificial Sequence
  Description of Artificial Sequence: Synthetic oligonucleotide
  Target: LAMA2; (+) strand; PAM type: NRG; PAM sequence: GAG
ggccatggctagggaaggca

SEQ ID NO: 143179 - DNA, 20 bp, Artificial Sequence
  Description of Artificial Sequence: Synthetic oligonucleotide
  Target: LAMA2; (+) strand; PAM type: NRG; PAM sequence: AGG
gccatggctagggaaggcag

SEQ ID NO: 143180 - DNA, 20 bp, Artificial Sequence
  Description of Artificial Sequence: Synthetic oligonucleotide
  Target: LAMA2; (+) strand; PAM type: NRG; PAM sequence: AAG
gaaggcagaggctactgaac

SEQ ID NO: 143181 - DNA, 20 bp, Artificial Sequence
  Description of Artificial Sequence: Synthetic oligonucleotide
  Target: LAMA2; (+) strand; PAM type: NRG; PAM sequence: AAG
gaggctactgaacaagactg

SEQ ID NO: 143182 - DNA, 20 bp, Artificial Sequence
  Description of Artificial Sequence: Synthetic oligonucleotide
  Target: LAMA2; (+) strand; PAM type: NRG; PAM sequence: AGG
aggctactgaacaagactga

SEQ ID NO: 143183 - DNA, 20 bp, Artificial Sequence
  Description of Artificial Sequence: Synthetic oligonucleotide
  Target: LAMA2; (+) strand; PAM type: NRG; PAM sequence: AAG
ctgaacaagactgaaggaat

SEQ ID NO: 143184 - DNA, 20 bp, Artificial Sequence
  Description of Artificial Sequence: Synthetic oligonucleotide
  Target: LAMA2; (+) strand; PAM type: NRG; PAM sequence: AAG
caagactgaaggaataagca

SEQ ID NO: 143185 - DNA, 20 bp, Artificial Sequence
  Description of Artificial Sequence: Synthetic oligonucleotide
  Target: LAMA2; (+) strand; PAM type: NRG; PAM sequence: AAG
taagcaaagcaaaaaaccac

SEQ ID NO: 143186 - DNA, 20 bp, Artificial Sequence
  Description of Artificial Sequence: Synthetic oligonucleotide
  Target: LAMA2; (+) strand; PAM type: NRG; PAM sequence: AAG
aaaaaaccacaagcttgctg

SEQ ID NO: 143187 - DNA, 20 bp, Artificial Sequence
  Description of Artificial Sequence: Synthetic oligonucleotide
  Target: LAMA2; (+) strand; PAM type: NRG; PAM sequence: TGG
aaccacaagcttgctgaagt

SEQ ID NO: 143188 - DNA, 20 bp, Artificial Sequence
  Description of Artificial Sequence: Synthetic oligonucleotide
  Target: LAMA2; (+) strand; PAM type: NRG; PAM sequence: GAG
ccacaagcttgctgaagttg

SEQ ID NO: 143189 - DNA, 20 bp, Artificial Sequence
  Description of Artificial Sequence: Synthetic oligonucleotide
  Target: LAMA2; (+) strand; PAM type: NRG; PAM sequence: AGG
cacaagcttgctgaagttgg

SEQ ID NO: 143190 - DNA, 20 bp, Artificial Sequence
  Description of Artificial Sequence: Synthetic oligonucleotide
  Target: LAMA2; (+) strand; PAM type: NRG; PAM sequence: CAG
gcttgctgaagttggaggac

SEQ ID NO: 143191 - DNA, 20 bp, Artificial Sequence
  Description of Artificial Sequence: Synthetic oligonucleotide
  Target: LAMA2; (+) strand; PAM type: NRG; PAM sequence: AAG
tgctgaagttggaggaccag

SEQ ID NO: 143192 - DNA, 20 bp, Artificial Sequence
  Description of Artificial Sequence: Synthetic oligonucleotide
  Target: LAMA2; (+) strand; PAM type: NRG; PAM sequence: AGG
gctgaagttggaggaccaga

SEQ ID NO: 143193 - DNA, 20 bp, Artificial Sequence
  Description of Artificial Sequence: Synthetic oligonucleotide
  Target: LAMA2; (+) strand; PAM type: NRG; PAM sequence: TAG
agttggaggaccagaaggaa

SEQ ID NO: 143194 - DNA, 20 bp, Artificial Sequence
  Description of Artificial Sequence: Synthetic oligonucleotide
  Target: LAMA2; (+) strand; PAM type: NRG; PAM sequence: AGG
gttggaggaccagaaggaat

SEQ ID NO: 143195 - DNA, 20 bp, Artificial Sequence
  Description of Artificial Sequence: Synthetic oligonucleotide
  Target: LAMA2; (+) strand; PAM type: NRG; PAM sequence: GAG
gaggaccagaaggaataggt

SEQ ID NO: 143196 - DNA, 20 bp, Artificial Sequence
  Description of Artificial Sequence: Synthetic oligonucleotide
  Target: LAMA2; (+) strand; PAM type: NRG; PAM sequence: AGG
aggaccagaaggaataggtg

SEQ ID NO: 143197 - DNA, 20 bp, Artificial Sequence
  Description of Artificial Sequence: Synthetic oligonucleotide
  Target: LAMA2; (+) strand; PAM type: NRG; PAM sequence: GGG
ggaccagaaggaataggtga

SEQ ID NO: 143198 - DNA, 20 bp, Artificial Sequence
  Description of Artificial Sequence: Synthetic oligonucleotide
  Target: LAMA2; (+) strand; PAM type: NRG; PAM sequence: CAG
gaaggaataggtgagggtct

SEQ ID NO: 143199 - DNA, 20 bp, Artificial Sequence
  Description of Artificial Sequence: Synthetic oligonucleotide
  Target: LAMA2; (+) strand; PAM type: NRG; PAM sequence: TAG
tgagggtctcagtgctaatg

SEQ ID NO: 143200 - DNA, 20 bp, Artificial Sequence
  Description of Artificial Sequence: Synthetic oligonucleotide
  Target: LAMA2; (+) strand; PAM type: NRG; PAM sequence: AGG
gagggtctcagtgctaatgt

SEQ ID NO: 143201 - DNA, 20 bp, Artificial Sequence
  Description of Artificial Sequence: Synthetic oligonucleotide
  Target: LAMA2; (+) strand; PAM type: NRG; PAM sequence: GGG
agggtctcagtgctaatgta

SEQ ID NO: 143202 - DNA, 20 bp, Artificial Sequence
  Description of Artificial Sequence: Synthetic oligonucleotide
  Target: LAMA2; (+) strand; PAM type: NRG; PAM sequence: CAG
gtgctaatgtagggttaatc

SEQ ID NO: 143203 - DNA, 20 bp, Artificial Sequence
  Description of Artificial Sequence: Synthetic oligonucleotide
  Target: LAMA2; (+) strand; PAM type: NRG; PAM sequence: AGG
tgctaatgtagggttaatcc

SEQ ID NO: 143204 - DNA, 20 bp, Artificial Sequence
  Description of Artificial Sequence: Synthetic oligonucleotide
  Target: LAMA2; (+) strand; PAM type: NRG; PAM sequence: GGG
gctaatgtagggttaatcca

SEQ ID NO: 143205 - DNA, 20 bp, Artificial Sequence
  Description of Artificial Sequence: Synthetic oligonucleotide
  Target: LAMA2; (+) strand; PAM type: NRG; PAM sequence: AAG
tgtagggttaatccagggcc

SEQ ID NO: 143206 - DNA, 20 bp, Artificial Sequence
  Description of Artificial Sequence: Synthetic oligonucleotide
  Target: LAMA2; (+) strand; PAM type: NRG; PAM sequence: TAG
agggttaatccagggccaag

SEQ ID NO: 143207 - DNA, 20 bp, Artificial Sequence
  Description of Artificial Sequence: Synthetic oligonucleotide
  Target: LAMA2; (+) strand; PAM type: NRG; PAM sequence: TGG
ataataataataataaatga

SEQ ID NO: 143208 - DNA, 20 bp, Artificial Sequence
  Description of Artificial Sequence: Synthetic oligonucleotide
  Target: LAMA2; (+) strand; PAM type: NRG; PAM sequence: TAG
taataataataaatgatggc

SEQ ID NO: 143209 - DNA, 20 bp, Artificial Sequence
  Description of Artificial Sequence: Synthetic oligonucleotide
  Target: LAMA2; (+) strand; PAM type: NRG; PAM sequence: TGG
tttgttgcacatttatttta

SEQ ID NO: 143210 - DNA, 20 bp, Artificial Sequence
  Description of Artificial Sequence: Synthetic oligonucleotide
  Target: LAMA2; (+) strand; PAM type: NRG; PAM sequence: GAG
tgttgcacatttattttatg

SEQ ID NO: 143211 - DNA, 20 bp, Artificial Sequence
  Description of Artificial Sequence: Synthetic oligonucleotide
  Target: LAMA2; (+) strand; PAM type: NRG; PAM sequence: AGG
gttgcacatttattttatgg

SEQ ID NO: 143212 - DNA, 20 bp, Artificial Sequence
  Description of Artificial Sequence: Synthetic oligonucleotide
  Target: LAMA2; (+) strand; PAM type: NRG; PAM sequence: GGG
ttgcacatttattttatgga

SEQ ID NO: 143213 - DNA, 20 bp, Artificial Sequence
  Description of Artificial Sequence: Synthetic oligonucleotide
  Target: LAMA2; (+) strand; PAM type: NRG; PAM sequence: AAG
tttatggagggtgttaatct

SEQ ID NO: 143214 - DNA, 20 bp, Artificial Sequence
  Description of Artificial Sequence: Synthetic oligonucleotide
  Target: LAMA2; (+) strand; PAM type: NRG; PAM sequence: CAG
ctaatacttgtcgcatttta

SEQ ID NO: 143215 - DNA, 20 bp, Artificial Sequence
  Description of Artificial Sequence: Synthetic oligonucleotide
  Target: LAMA2; (+) strand; PAM type: NRG; PAM sequence: GAG
acttgtcgcattttacagtt

SEQ ID NO: 143216 - DNA, 20 bp, Artificial Sequence
  Description of Artificial Sequence: Synthetic oligonucleotide
  Target: LAMA2; (+) strand; PAM type: NRG; PAM sequence: CAG
cgcattttacagttgagaaa

SEQ ID NO: 143217 - DNA, 20 bp, Artificial Sequence
  Description of Artificial Sequence: Synthetic oligonucleotide
  Target: LAMA2; (+) strand; PAM type: NRG; PAM sequence: AGG
gcattttacagttgagaaac

SEQ ID NO: 143218 - DNA, 20 bp, Artificial Sequence
  Description of Artificial Sequence: Synthetic oligonucleotide
  Target: LAMA2; (+) strand; PAM type: NRG; PAM sequence: CAG
cagttgagaaacaggtatta

SEQ ID NO: 143219 - DNA, 20 bp, Artificial Sequence
  Description of Artificial Sequence: Synthetic oligonucleotide
  Target: LAMA2; (+) strand; PAM type: NRG; PAM sequence: GAG
gttgagaaacaggtattaca

SEQ ID NO: 143220 - DNA, 20 bp, Artificial Sequence
  Description of Artificial Sequence: Synthetic oligonucleotide
  Target: LAMA2; (+) strand; PAM type: NRG; PAM sequence: GAG
tgagaaacaggtattacaga

SEQ ID NO: 143221 - DNA, 20 bp, Artificial Sequence
  Description of Artificial Sequence: Synthetic oligonucleotide
  Target: LAMA2; (+) strand; PAM type: NRG; PAM sequence: AGG
gagaaacaggtattacagag

SEQ ID NO: 143222 - DNA, 20 bp, Artificial Sequence
  Description of Artificial Sequence: Synthetic oligonucleotide
  Target: LAMA2; (+) strand; PAM type: NRG; PAM sequence: CAG
gagaggtcaaataactttcc

SEQ ID NO: 143223 - DNA, 20 bp, Artificial Sequence
  Description of Artificial Sequence: Synthetic oligonucleotide
  Target: LAMA2; (+) strand; PAM type: NRG; PAM sequence: AGG
agaggtcaaataactttccc

SEQ ID NO: 143224 - DNA, 20 bp, Artificial Sequence
  Description of Artificial Sequence: Synthetic oligonucleotide
  Target: LAMA2; (+) strand; PAM type: NRG; PAM sequence: GGG
gaggtcaaataactttccca

SEQ ID NO: 143225 - DNA, 20 bp, Artificial Sequence
  Description of Artificial Sequence: Synthetic oligonucleotide
  Target: LAMA2; (+) strand; PAM type: NRG; PAM sequence: CAG
ataactttcccagggttcca

SEQ ID NO: 143226 - DNA, 20 bp, Artificial Sequence
  Description of Artificial Sequence: Synthetic oligonucleotide
  Target: LAMA2; (+) strand; PAM type: NRG; PAM sequence: TAG
ctttcccagggttccacagc

SEQ ID NO: 143227 - DNA, 20 bp, Artificial Sequence
  Description of Artificial Sequence: Synthetic oligonucleotide
  Target: LAMA2; (+) strand; PAM type: NRG; PAM sequence: TGG
gttccacagctagtaatttt

SEQ ID NO: 143228 - DNA, 20 bp, Artificial Sequence
  Description of Artificial Sequence: Synthetic oligonucleotide
  Target: LAMA2; (+) strand; PAM type: NRG; PAM sequence: GAG
tccacagctagtaatttttg

SEQ ID NO: 143229 - DNA, 20 bp, Artificial Sequence
  Description of Artificial Sequence: Synthetic oligonucleotide
  Target: LAMA2; (+) strand; PAM type: NRG; PAM sequence: CAG
ttggagctgtgatttgaatt

SEQ ID NO: 143230 - DNA, 20 bp, Artificial Sequence
  Description of Artificial Sequence: Synthetic oligonucleotide
  Target: LAMA2; (+) strand; PAM type: NRG; PAM sequence: CAG
atttgaattcagtgtattct

SEQ ID NO: 143231 - DNA, 20 bp, Artificial Sequence
  Description of Artificial Sequence: Synthetic oligonucleotide
  Target: LAMA2; (+) strand; PAM type: NRG; PAM sequence: GAG
ttgaattcagtgtattctca

SEQ ID NO: 143232 - DNA, 20 bp, Artificial Sequence
  Description of Artificial Sequence: Synthetic oligonucleotide
  Target: LAMA2; (+) strand; PAM type: NRG; PAM sequence: CAG
tcagtgtattctcagagcac

SEQ ID NO: 143233 - DNA, 20 bp, Artificial Sequence
  Description of Artificial Sequence: Synthetic oligonucleotide
  Target: LAMA2; (+) strand; PAM type: NRG; PAM sequence: AAG
tgtattctcagagcaccaga

SEQ ID NO: 143234 - DNA, 20 bp, Artificial Sequence
  Description of Artificial Sequence: Synthetic oligonucleotide
  Target: LAMA2; (+) strand; PAM type: NRG; PAM sequence: AGG
gtattctcagagcaccagaa

SEQ ID NO: 143235 - DNA, 20 bp, Artificial Sequence
  Description of Artificial Sequence: Synthetic oligonucleotide
  Target: LAMA2; (+) strand; PAM type: NRG; PAM sequence: AAG
cagagcaccagaaaggtaca

SEQ ID NO: 143236 - DNA, 20 bp, Artificial Sequence
  Description of Artificial Sequence: Synthetic oligonucleotide
  Target: LAMA2; (+) strand; PAM type: NRG; PAM sequence: AAG
ccagaaaggtacaaagctaa

SEQ ID NO: 143237 - DNA, 20 bp, Artificial Sequence
  Description of Artificial Sequence: Synthetic oligonucleotide
  Target: LAMA2; (+) strand; PAM type: NRG; PAM sequence: TGG
taaaagtttccttctgtgtc

SEQ ID NO: 143238 - DNA, 20 bp, Artificial Sequence
  Description of Artificial Sequence: Synthetic oligonucleotide
  Target: LAMA2; (+) strand; PAM type: NRG; PAM sequence: GGG
aaaagtttccttctgtgtct

SEQ ID NO: 143239 - DNA, 20 bp, Artificial Sequence
  Description of Artificial Sequence: Synthetic oligonucleotide
  Target: LAMA2; (+) strand; PAM type: NRG; PAM sequence: GGG
aaagtttccttctgtgtctg

SEQ ID NO: 143240 - DNA, 20 bp, Artificial Sequence
  Description of Artificial Sequence: Synthetic oligonucleotide
  Target: LAMA2; (+) strand; PAM type: NRG; PAM sequence: TGG
cttctgtgtctggggtttcc

SEQ ID NO: 143241 - DNA, 20 bp, Artificial Sequence
  Description of Artificial Sequence: Synthetic oligonucleotide
  Target: LAMA2; (+) strand; PAM type: NRG; PAM sequence: AAG
gaaaatctgctctgccctat

SEQ ID NO: 143242 - DNA, 20 bp, Artificial Sequence
  Description of Artificial Sequence: Synthetic oligonucleotide
  Target: LAMA2; (+) strand; PAM type: NRG; PAM sequence: CAG
tctgctctgccctataagct

SEQ ID NO: 143243 - DNA, 20 bp, Artificial Sequence
  Description of Artificial Sequence: Synthetic oligonucleotide
  Target: LAMA2; (+) strand; PAM type: NRG; PAM sequence: AGG
ctgctctgccctataagctc

SEQ ID NO: 143244 - DNA, 20 bp, Artificial Sequence
  Description of Artificial Sequence: Synthetic oligonucleotide
  Target: LAMA2; (+) strand; PAM type: NRG; PAM sequence: GAG
gctctgccctataagctcag

SEQ ID NO: 143245 - DNA, 20 bp, Artificial Sequence
  Description of Artificial Sequence: Synthetic oligonucleotide
  Target: LAMA2; (+) strand; PAM type: NRG; PAM sequence: TAG
agctcaggagtcccccctcc

SEQ ID NO: 143246 - DNA, 20 bp, Artificial Sequence
  Description of Artificial Sequence: Synthetic oligonucleotide
  Target: LAMA2; (+) strand; PAM type: NRG; PAM sequence: CAG
tcaggagtcccccctcctag

SEQ ID NO: 143247 - DNA, 20 bp, Artificial Sequence
  Description of Artificial Sequence: Synthetic oligonucleotide
  Target: LAMA2; (+) strand; PAM type: NRG; PAM sequence: AAG
cctcctagcagttcctgctg

SEQ ID NO: 143248 - DNA, 20 bp, Artificial Sequence
  Description of Artificial Sequence: Synthetic oligonucleotide
  Target: LAMA2; (+) strand; PAM type: NRG; PAM sequence: GAG
ttcctgctgaagctctatgt

SEQ ID NO: 143249 - DNA, 20 bp, Artificial Sequence
  Description of Artificial Sequence: Synthetic oligonucleotide
  Target: LAMA2; (+) strand; PAM type: NRG; PAM sequence: CAG
aagctctatgtgagattgca

SEQ ID NO: 143250 - DNA, 20 bp, Artificial Sequence
  Description of Artificial Sequence: Synthetic oligonucleotide
  Target: LAMA2; (+) strand; PAM type: NRG; PAM sequence: GAG
atgtgagattgcacagacct

SEQ ID NO: 143251 - DNA, 20 bp, Artificial Sequence
  Description of Artificial Sequence: Synthetic oligonucleotide
  Target: LAMA2; (+) strand; PAM type: NRG; PAM sequence: GAG
gattgcacagacctgagttt

SEQ ID NO: 143252 - DNA, 20 bp, Artificial Sequence
  Description of Artificial Sequence: Synthetic oligonucleotide
  Target: LAMA2; (+) strand; PAM type: NRG; PAM sequence: TGG
ctgctgcttattttttattt

SEQ ID NO: 143253 - DNA, 20 bp, Artificial Sequence
  Description of Artificial Sequence: Synthetic oligonucleotide
  Target: LAMA2; (+) strand; PAM type: NRG; PAM sequence: GGG
tgctgcttattttttatttt

SEQ ID NO: 143254 - DNA, 20 bp, Artificial Sequence
  Description of Artificial Sequence: Synthetic oligonucleotide
  Target: LAMA2; (+) strand; PAM type: NRG; PAM sequence: GGG
gctgcttattttttattttg

SEQ ID NO: 143255 - DNA, 20 bp, Artificial Sequence
  Description of Artificial Sequence: Synthetic oligonucleotide
  Target: LAMA2; (+) strand; PAM type: NRG; PAM sequence: TAG
tattttttattttggggttt

SEQ ID NO: 143256 - DNA, 20 bp, Artificial Sequence
  Description of Artificial Sequence: Synthetic oligonucleotide
  Target: LAMA2; (+) strand; PAM type: NRG; PAM sequence: TAG
gttttagtattttcatgttt

SEQ ID NO: 143257 - DNA, 20 bp, Artificial Sequence
  Description of Artificial Sequence: Synthetic oligonucleotide
  Target: LAMA2; (+) strand; PAM type: NRG; PAM sequence: AGG
ttttagtattttcatgtttt

SEQ ID NO: 143258 - DNA, 20 bp, Artificial Sequence
  Description of Artificial Sequence: Synthetic oligonucleotide
  Target: LAMA2; (+) strand; PAM type: NRG; PAM sequence: TAG
taaaaaaattctttaccttt

SEQ ID NO: 143259 - DNA, 20 bp, Artificial Sequence
  Description of Artificial Sequence: Synthetic oligonucleotide
  Target: LAMA2; (+) strand; PAM type: NRG; PAM sequence: TAG
tacttcatttttatatctaa

SEQ ID NO: 143260 - DNA, 20 bp, Artificial Sequence
  Description of Artificial Sequence: Synthetic oligonucleotide
  Target: LAMA2; (+) strand; PAM type: NRG; PAM sequence: AGG
acttcatttttatatctaat

SEQ ID NO: 143261 - DNA, 20 bp, Artificial Sequence
  Description of Artificial Sequence: Synthetic oligonucleotide
  Target: LAMA2; (+) strand; PAM type: NRG; PAM sequence: TGG
tgattttaataattttatct

SEQ ID NO: 143262 - DNA, 20 bp, Artificial Sequence
  Description of Artificial Sequence: Synthetic oligonucleotide
  Target: LAMA2; (+) strand; PAM type: NRG; PAM sequence: CAG
cttggcatatttatatttat

SEQ ID NO: 143263 - DNA, 20 bp, Artificial Sequence
  Description of Artificial Sequence: Synthetic oligonucleotide
  Target: LAMA2; (+) strand; PAM type: NRG; PAM sequence: AAG
tttatcagtttttctgcttc

SEQ ID NO: 143264 - DNA, 20 bp, Artificial Sequence
  Description of Artificial Sequence: Synthetic oligonucleotide
  Target: LAMA2; (+) strand; PAM type: NRG; PAM sequence: TGG
ttctgcttcaagctttattc

SEQ ID NO: 143265 - DNA, 20 bp, Artificial Sequence
  Description of Artificial Sequence: Synthetic oligonucleotide
  Target: LAMA2; (+) strand; PAM type: NRG; PAM sequence: TGG
atattttttatttttgtttc

SEQ ID NO: 143266 - DNA, 20 bp, Artificial Sequence
  Description of Artificial Sequence: Synthetic oligonucleotide
  Target: LAMA2; (+) strand; PAM type: NRG; PAM sequence: CAG
ttctggaatttaatgtatgt

SEQ ID NO: 143267 - DNA, 20 bp, Artificial Sequence
  Description of Artificial Sequence: Synthetic oligonucleotide
  Target: LAMA2; (+) strand; PAM type: NRG; PAM sequence: TAG
aatgtatgtcagttgtgcaa

SEQ ID NO: 143268 - DNA, 20 bp, Artificial Sequence
  Description of Artificial Sequence: Synthetic oligonucleotide
  Target: LAMA2; (+) strand; PAM type: NRG; PAM sequence: TAG
cagttgtgcaatagacttgt

SEQ ID NO: 143269 - DNA, 20 bp, Artificial Sequence
  Description of Artificial Sequence: Synthetic oligonucleotide
  Target: LAMA2; (+) strand; PAM type: NRG; PAM sequence: AAG
gtttgctttaataattttta

SEQ ID NO: 143270 - DNA, 20 bp, Artificial Sequence
  Description of Artificial Sequence: Synthetic oligonucleotide
  Target: LAMA2; (+) strand; PAM type: NRG; PAM sequence: TAG
acttttgatcattttactct

SEQ ID NO: 143271 - DNA, 20 bp, Artificial Sequence
  Description of Artificial Sequence: Synthetic oligonucleotide
  Target: LAMA2; (+) strand; PAM type: NRG; PAM sequence: GAG
ttttactcttagcttatttt

SEQ ID NO: 143272 - DNA, 20 bp, Artificial Sequence
  Description of Artificial Sequence: Synthetic oligonucleotide
  Target: LAMA2; (+) strand; PAM type: NRG; PAM sequence: TAG
taaatataactttgtttgtc

SEQ ID NO: 143273 - DNA, 20 bp, Artificial Sequence
  Description of Artificial Sequence: Synthetic oligonucleotide
  Target: LAMA2; (+) strand; PAM type: NRG; PAM sequence: TAG
actttgtttgtctagtgttt

SEQ ID NO: 143274 - DNA, 20 bp, Artificial Sequence
  Description of Artificial Sequence: Synthetic oligonucleotide
  Target: LAMA2; (+) strand; PAM type: NRG; PAM sequence: TAG
gtctagtgttttagtgtctt

SEQ ID NO: 143275 - DNA, 20 bp, Artificial Sequence
  Description of Artificial Sequence: Synthetic oligonucleotide
  Target: LAMA2; (+) strand; PAM type: NRG; PAM sequence: TGG
ctttagtcattgcttctaca

SEQ ID NO: 143276 - DNA, 20 bp, Artificial Sequence
  Description of Artificial Sequence: Synthetic oligonucleotide
  Target: LAMA2; (+) strand; PAM type: NRG; PAM sequence: TAG
tcattgcttctacatggcaa

SEQ ID NO: 143277 - DNA, 20 bp, Artificial Sequence
  Description of Artificial Sequence: Synthetic oligonucleotide
  Target: LAMA2; (+) strand; PAM type: NRG; PAM sequence: AGG
cattgcttctacatggcaat

SEQ ID NO: 143278 - DNA, 20 bp, Artificial Sequence
  Description of Artificial Sequence: Synthetic oligonucleotide
  Target: LAMA2; (+) strand; PAM type: NRG; PAM sequence: CAG
aaatatgaccataaaaacct

SEQ ID NO: 143279 - DNA, 20 bp, Artificial Sequence
  Description of Artificial Sequence: Synthetic oligonucleotide
  Target: LAMA2; (+) strand; PAM type: NRG; PAM sequence: AAG
gaccataaaaacctcagtga

SEQ ID NO: 143280 - DNA, 20 bp, Artificial Sequence
  Description of Artificial Sequence: Synthetic oligonucleotide
  Target: LAMA2; (+) strand; PAM type: NRG; PAM sequence: TAG
cagtgaaagtaacccacatt

SEQ ID NO: 143281 - DNA, 20 bp, Artificial Sequence
  Description of Artificial Sequence: Synthetic oligonucleotide
  Target: LAMA2; (+) strand; PAM type: NRG; PAM sequence: GAG
gtgaaagtaacccacattta

SEQ ID NO: 143282 - DNA, 20 bp, Artificial Sequence
  Description of Artificial Sequence: Synthetic oligonucleotide
  Target: LAMA2; (+) strand; PAM type: NRG; PAM sequence: AAG
aaagtaacccacatttagag

SEQ ID NO: 143283 - DNA, 20 bp, Artificial Sequence
  Description of Artificial Sequence: Synthetic oligonucleotide
  Target: LAMA2; (+) strand; PAM type: NRG; PAM sequence: AGG
aagtaacccacatttagaga

SEQ ID NO: 143284 - DNA, 20 bp, Artificial Sequence
  Description of Artificial Sequence: Synthetic oligonucleotide
  Target: LAMA2; (+) strand; PAM type: NRG; PAM sequence: TAG
ccacccattcaacccatctg

SEQ ID NO: 143285 - DNA, 20 bp, Artificial Sequence
  Description of Artificial Sequence: Synthetic oligonucleotide
  Target: LAMA2; (+) strand; PAM type: NRG; PAM sequence: CAG
cccatctgtagcctcccttt

SEQ ID NO: 143286 - DNA, 20 bp, Artificial Sequence
  Description of Artificial Sequence: Synthetic oligonucleotide
  Target: LAMA2; (+) strand; PAM type: NRG; PAM sequence: AAG
tccctttcagctgttcttaa

SEQ ID NO: 143287 - DNA, 20 bp, Artificial Sequence
  Description of Artificial Sequence: Synthetic oligonucleotide
  Target: LAMA2; (+) strand; PAM type: NRG; PAM sequence: AAG
cttaaaagaccttccctttt

SEQ ID NO: 143288 - DNA, 20 bp, Artificial Sequence
  Description of Artificial Sequence: Synthetic oligonucleotide
  Target: LAMA2; (+) strand; PAM type: NRG; PAM sequence: AGG
ttaaaagaccttccctttta

SEQ ID NO: 143289 - DNA, 20 bp, Artificial Sequence
  Description of Artificial Sequence: Synthetic oligonucleotide
  Target: LAMA2; (+) strand; PAM type: NRG; PAM sequence: GGG
taaaagaccttcccttttaa

SEQ ID NO: 143290 - DNA, 20 bp, Artificial Sequence
  Description of Artificial Sequence: Synthetic oligonucleotide
  Target: LAMA2; (+) strand; PAM type: NRG; PAM sequence: AAG
ccttcaatactaaatcccaa

SEQ ID NO: 143291 - DNA, 20 bp, Artificial Sequence
  Description of Artificial Sequence: Synthetic oligonucleotide
  Target: LAMA2; (+) strand; PAM type: NRG; PAM sequence: TAG
tactaaatcccaaaagctaa

SEQ ID NO: 143292 - DNA, 20 bp, Artificial Sequence
  Description of Artificial Sequence: Synthetic oligonucleotide
  Target: LAMA2; (+) strand; PAM type: NRG; PAM sequence: CAG
cccaaaagctaatagcaata

SEQ ID NO: 143293 - DNA, 20 bp, Artificial Sequence
  Description of Artificial Sequence: Synthetic oligonucleotide
  Target: LAMA2; (+) strand; PAM type: NRG; PAM sequence: AAG
aaaagctaatagcaatacag

SEQ ID NO: 143294 - DNA, 20 bp, Artificial Sequence
  Description of Artificial Sequence: Synthetic oligonucleotide
  Target: LAMA2; (+) strand; PAM type: NRG; PAM sequence: AAG
actgaccaacatttcttccc

SEQ ID NO: 143295 - DNA, 20 bp, Artificial Sequence
  Description of Artificial Sequence: Synthetic oligonucleotide
  Target: LAMA2; (+) strand; PAM type: NRG; PAM sequence: TAG
atttcttcccaagacaataa

SEQ ID NO: 143296 - DNA, 20 bp, Artificial Sequence
  Description of Artificial Sequence: Synthetic oligonucleotide
  Target: LAMA2; (+) strand; PAM type: NRG; PAM sequence: AAG
acttatatgcataattgtta

SEQ ID NO: 143297 - DNA, 20 bp, Artificial Sequence
  Description of Artificial Sequence: Synthetic oligonucleotide
  Target: LAMA2; (+) strand; PAM type: NRG; PAM sequence: AAG
ataattgttaaagcaatttt

SEQ ID NO: 143298 - DNA, 20 bp, Artificial Sequence
  Description of Artificial Sequence: Synthetic oligonucleotide
  Target: LAMA2; (+) strand; PAM type: NRG; PAM sequence: AAG
tgttttgttttttgctatcc

SEQ ID NO: 143299 - DNA, 20 bp, Artificial Sequence
  Description of Artificial Sequence: Synthetic oligonucleotide
  Target: LAMA2; (+) strand; PAM type: NRG; PAM sequence: AAG
tttttgctatccaagttcct

SEQ ID NO: 143300 - DNA, 20 bp, Artificial Sequence
  Description of Artificial Sequence: Synthetic oligonucleotide
  Target: LAMA2; (+) strand; PAM type: NRG; PAM sequence: AAG
aagacatgttattcctctaa

SEQ ID NO: 143301 - DNA, 20 bp, Artificial Sequence
  Description of Artificial Sequence: Synthetic oligonucleotide
  Target: LAMA2; (+) strand; PAM type: NRG; PAM sequence: TGG
tatatgaaatgattgactaa

SEQ ID NO: 143302 - DNA, 20 bp, Artificial Sequence
  Description of Artificial Sequence: Synthetic oligonucleotide
  Target: LAMA2; (+) strand; PAM type: NRG; PAM sequence: AAG
aacaaatactataaacacat

SEQ ID NO: 143303 - DNA, 20 bp, Artificial Sequence
  Description of Artificial Sequence: Synthetic oligonucleotide
  Target: LAMA2; (+) strand; PAM type: NRG; PAM sequence: AGG
acaaatactataaacacata

SEQ ID NO: 143304 - DNA, 20 bp, Artificial Sequence
  Description of Artificial Sequence: Synthetic oligonucleotide
  Target: LAMA2; (+) strand; PAM type: NRG; PAM sequence: AAG
aatactataaacacataagg

SEQ ID NO: 143305 - DNA, 20 bp, Artificial Sequence
  Description of Artificial Sequence: Synthetic oligonucleotide
  Target: LAMA2; (+) strand; PAM type: NRG; PAM sequence: AGG
atactataaacacataagga

SEQ ID NO: 143306 - DNA, 20 bp, Artificial Sequence
  Description of Artificial Sequence: Synthetic oligonucleotide
  Target: LAMA2; (+) strand; PAM type: NRG; PAM sequence: TGG
aacacataaggaaggtgata

SEQ ID NO: 143307 - DNA, 20 bp, Artificial Sequence
  Description of Artificial Sequence: Synthetic oligonucleotide
  Target: LAMA2; (+) strand; PAM type: NRG; PAM sequence: GGG
acacataaggaaggtgatat

SEQ ID NO: 143308 - DNA, 20 bp, Artificial Sequence
  Description of Artificial Sequence: Synthetic oligonucleotide
  Target: LAMA2; (+) strand; PAM type: NRG; PAM sequence: CAG
ggtgatatgggttttactca

SEQ ID NO: 143309 - DNA, 20 bp, Artificial Sequence
  Description of Artificial Sequence: Synthetic oligonucleotide
  Target: LAMA2; (+) strand; PAM type: NRG; PAM sequence: AAG
gatatgggttttactcacag

SEQ ID NO: 143310 - DNA, 20 bp, Artificial Sequence
  Description of Artificial Sequence: Synthetic oligonucleotide
  Target: LAMA2; (+) strand; PAM type: NRG; PAM sequence: TGG
ctcaaaacgcatacctgatt

SEQ ID NO: 143311 - DNA, 20 bp, Artificial Sequence
  Description of Artificial Sequence: Synthetic oligonucleotide
  Target: LAMA2; (+) strand; PAM type: NRG; PAM sequence: AAG
atacctgatttggttttaat

SEQ ID NO: 143312 - DNA, 20 bp, Artificial Sequence
  Description of Artificial Sequence: Synthetic oligonucleotide
  Target: LAMA2; (+) strand; PAM type: NRG; PAM sequence: AGG
tacctgatttggttttaata

SEQ ID NO: 143313 - DNA, 20 bp, Artificial Sequence
  Description of Artificial Sequence: Synthetic oligonucleotide
  Target: LAMA2; (+) strand; PAM type: NRG; PAM sequence: CAG
ttttaataaggatcacatta

SEQ ID NO: 143314 - DNA, 20 bp, Artificial Sequence
  Description of Artificial Sequence: Synthetic oligonucleotide
  Target: LAMA2; (+) strand; PAM type: NRG; PAM sequence: AGG
tttaataaggatcacattac

SEQ ID NO: 143315 - DNA, 20 bp, Artificial Sequence
  Description of Artificial Sequence: Synthetic oligonucleotide
  Target: LAMA2; (+) strand; PAM type: NRG; PAM sequence: GAG
taataaggatcacattacag

SEQ ID NO: 143316 - DNA, 20 bp, Artificial Sequence
  Description of Artificial Sequence: Synthetic oligonucleotide
  Target: LAMA2; (+) strand; PAM type: NRG; PAM sequence: TAG
tcacattacaggagatccaa

SEQ ID NO: 143317 - DNA, 20 bp, Artificial Sequence
  Description of Artificial Sequence: Synthetic oligonucleotide
  Target: LAMA2; (+) strand; PAM type: NRG; PAM sequence: AAG
cattacaggagatccaatag

SEQ ID NO: 143318 - DNA, 20 bp, Artificial Sequence
  Description of Artificial Sequence: Synthetic oligonucleotide
  Target: LAMA2; (+) strand; PAM type: NRG; PAM sequence: AAG
tccaatagaagctacttaaa

SEQ ID NO: 143319 - DNA, 20 bp, Artificial Sequence
  Description of Artificial Sequence: Synthetic oligonucleotide
  Target: LAMA2; (+) strand; PAM type: NRG; PAM sequence: TAG
aagctacttaaaaagtgttt

SEQ ID NO: 143320 - DNA, 20 bp, Artificial Sequence
  Description of Artificial Sequence: Synthetic oligonucleotide
  Target: LAMA2; (+) strand; PAM type: NRG; PAM sequence: TAG
acttccttccaatatacctg

SEQ ID NO: 143321 - DNA, 20 bp, Artificial Sequence
  Description of Artificial Sequence: Synthetic oligonucleotide
  Target: LAMA2; (+) strand; PAM type: NRG; PAM sequence: GAG
ttccaatatacctgtagaat

SEQ ID NO: 143322 - DNA, 20 bp, Artificial Sequence
  Description of Artificial Sequence: Synthetic oligonucleotide
  Target: LAMA2; (+) strand; PAM type: NRG; PAM sequence: GAG
tacctgtagaatgagctatt

SEQ ID NO: 143323 - DNA, 20 bp, Artificial Sequence
  Description of Artificial Sequence: Synthetic oligonucleotide
  Target: LAMA2; (+) strand; PAM type: NRG; PAM sequence: CAG
tattgagtttaacttctttc

SEQ ID NO: 143324 - DNA, 20 bp, Artificial Sequence
  Description of Artificial Sequence: Synthetic oligonucleotide
  Target: LAMA2; (+) strand; PAM type: NRG; PAM sequence: AGG
attgagtttaacttctttcc

SEQ ID NO: 143325 - DNA, 20 bp, Artificial Sequence
  Description of Artificial Sequence: Synthetic oligonucleotide
  Target: LAMA2; (+) strand; PAM type: NRG; PAM sequence: TGG
gtttaacttctttccaggca

SEQ ID NO: 143326 - DNA, 20 bp, Artificial Sequence
  Description of Artificial Sequence: Synthetic oligonucleotide
  Target: LAMA2; (+) strand; PAM type: NRG; PAM sequence: TGG
cttctttccaggcatggtta

SEQ ID NO: 143327 - DNA, 20 bp, Artificial Sequence
  Description of Artificial Sequence: Synthetic oligonucleotide
  Target: LAMA2; (+) strand; PAM type: NRG; PAM sequence: GAG
tctttccaggcatggttatg

SEQ ID NO: 143328 - DNA, 20 bp, Artificial Sequence
  Description of Artificial Sequence: Synthetic oligonucleotide
  Target: LAMA2; (+) strand; PAM type: NRG; PAM sequence: TAG
ggcatggttatggagcctgc

SEQ ID NO: 143329 - DNA, 20 bp, Artificial Sequence
  Description of Artificial Sequence: Synthetic oligonucleotide
  Target: LAMA2; (+) strand; PAM type: NRG; PAM sequence: TGG
ttatggagcctgctagtgtg

SEQ ID NO: 143330 - DNA, 20 bp, Artificial Sequence
  Description of Artificial Sequence: Synthetic oligonucleotide
  Target: LAMA2; (+) strand; PAM type: NRG; PAM sequence: GGG
tatggagcctgctagtgtgt

SEQ ID NO: 143331 - DNA, 20 bp, Artificial Sequence
  Description of Artificial Sequence: Synthetic oligonucleotide
  Target: LAMA2; (+) strand; PAM type: NRG; PAM sequence: CGG
ctgctagtgtgtgggtgtcc

SEQ ID NO: 143332 - DNA, 20 bp, Artificial Sequence
  Description of Artificial Sequence: Synthetic oligonucleotide
  Target: LAMA2; (+) strand; PAM type: NRG; PAM sequence: GGG
tgctagtgtgtgggtgtccc

SEQ ID NO: 143333 - DNA, 20 bp, Artificial Sequence
  Description of Artificial Sequence: Synthetic oligonucleotide
  Target: LAMA2; (+) strand; PAM type: NRG; PAM sequence: GGG
gctagtgtgtgggtgtcccg

SEQ ID NO: 143334 - DNA, 20 bp, Artificial Sequence
  Description of Artificial Sequence: Synthetic oligonucleotide
  Target: LAMA2; (+) strand; PAM type: NRG; PAM sequence: TAG
cggggccacaccgtattaaa

SEQ ID NO: 143335 - DNA, 20 bp, Artificial Sequence
  Description of Artificial Sequence: Synthetic oligonucleotide
  Target: LAMA2; (+) strand; PAM type: NRG; PAM sequence: AGG
ggggccacaccgtattaaat

SEQ ID NO: 143336 - DNA, 20 bp, Artificial Sequence
  Description of Artificial Sequence: Synthetic oligonucleotide
  Target: LAMA2; (+) strand; PAM type: NRG; PAM sequence: TAG
ccacaccgtattaaataggc

SEQ ID NO: 143337 - DNA, 20 bp, Artificial Sequence
  Description of Artificial Sequence: Synthetic oligonucleotide
  Target: LAMA2; (+) strand; PAM type: NRG; PAM sequence: TGG
taaataggctagtgataaaa

SEQ ID NO: 143338 - DNA, 20 bp, Artificial Sequence
  Description of Artificial Sequence: Synthetic oligonucleotide
  Target: LAMA2; (+) strand; PAM type: NRG; PAM sequence: TAG
taggctagtgataaaatgga

SEQ ID NO: 143339 - DNA, 20 bp, Artificial Sequence
  Description of Artificial Sequence: Synthetic oligonucleotide
  Target: LAMA2; (+) strand; PAM type: NRG; PAM sequence: AGG
aggctagtgataaaatggat

SEQ ID NO: 143340 - DNA, 20 bp, Artificial Sequence
  Description of Artificial Sequence: Synthetic oligonucleotide
  Target: LAMA2; (+) strand; PAM type: NRG; PAM sequence: AAG
agtgataaaatggataggac

SEQ ID NO: 143341 - DNA, 20 bp, Artificial Sequence
  Description of Artificial Sequence: Synthetic oligonucleotide
  Target: LAMA2; (+) strand; PAM type: NRG; PAM sequence: CAG
gataggacaagatttctcat

SEQ ID NO: 143342 - DNA, 20 bp, Artificial Sequence
  Description of Artificial Sequence: Synthetic oligonucleotide
  Target: LAMA2; (+) strand; PAM type: NRG; PAM sequence: AGG
ataggacaagatttctcatc

SEQ ID NO: 143343 - DNA, 20 bp, Artificial Sequence
  Description of Artificial Sequence: Synthetic oligonucleotide
  Target: LAMA2; (+) strand; PAM type: NRG; PAM sequence: CAG
atcaggaacatttttaaaca

SEQ ID NO: 143344 - DNA, 20 bp, Artificial Sequence
  Description of Artificial Sequence: Synthetic oligonucleotide
  Target: LAMA2; (+) strand; PAM type: NRG; PAM sequence: TGG
agaatctgttgattctgtgt

SEQ ID NO: 143345 - DNA, 20 bp, Artificial Sequence
  Description of Artificial Sequence: Synthetic oligonucleotide
  Target: LAMA2; (+) strand; PAM type: NRG; PAM sequence: GGG
gaatctgttgattctgtgtt

SEQ ID NO: 143346 - DNA, 20 bp, Artificial Sequence
  Description of Artificial Sequence: Synthetic oligonucleotide
  Target: LAMA2; (+) strand; PAM type: NRG; PAM sequence: GGG
aatctgttgattctgtgttg

SEQ ID NO: 143347 - DNA, 20 bp, Artificial Sequence
  Description of Artificial Sequence: Synthetic oligonucleotide
  Target: LAMA2; (+) strand; PAM type: NRG; PAM sequence: GGG
atctgttgattctgtgttgg

SEQ ID NO: 143348 - DNA, 20 bp, Artificial Sequence
  Description of Artificial Sequence: Synthetic oligonucleotide
  Target: LAMA2; (+) strand; PAM type: NRG; PAM sequence: CAG
tgttgattctgtgttggggg

SEQ ID NO: 143349 - DNA, 20 bp, Artificial Sequence
  Description of Artificial Sequence: Synthetic oligonucleotide
  Target: LAMA2; (+) strand; PAM type: NRG; PAM sequence: GAG
ttgattctgtgttgggggca

SEQ ID NO: 143350 - DNA, 20 bp, Artificial Sequence
  Description of Artificial Sequence: Synthetic oligonucleotide
  Target: LAMA2; (+) strand; PAM type: NRG; PAM sequence: AGG
tgattctgtgttgggggcag

SEQ ID NO: 143351 - DNA, 20 bp, Artificial Sequence
  Description of Artificial Sequence: Synthetic oligonucleotide
  Target: LAMA2; (+) strand; PAM type: NRG; PAM sequence: TGG
tctgtgttgggggcagaggc

SEQ ID NO: 143352 - DNA, 20 bp, Artificial Sequence
  Description of Artificial Sequence: Synthetic oligonucleotide
  Target: LAMA2; (+) strand; PAM type: NRG; PAM sequence: GGG
ctgtgttgggggcagaggct

SEQ ID NO: 143353 - DNA, 20 bp, Artificial Sequence
  Description of Artificial Sequence: Synthetic oligonucleotide
  Target: LAMA2; (+) strand; PAM type: NRG; PAM sequence: GAG
gtgttgggggcagaggctgg

SEQ ID NO: 143354 - DNA, 20 bp, Artificial Sequence
  Description of Artificial Sequence: Synthetic oligonucleotide
  Target: LAMA2; (+) strand; PAM type: NRG; PAM sequence: TAG
ggggcagaggctgggagaaa

SEQ ID NO: 143355 - DNA, 20 bp, Artificial Sequence
  Description of Artificial Sequence: Synthetic oligonucleotide
  Target: LAMA2; (+) strand; PAM type: NRG; PAM sequence: AGG
gggcagaggctgggagaaat

SEQ ID NO: 143356 - DNA, 20 bp, Artificial Sequence
  Description of Artificial Sequence: Synthetic oligonucleotide
  Target: LAMA2; (+) strand; PAM type: NRG; PAM sequence: GGG
ggcagaggctgggagaaata

SEQ ID NO: 143357 - DNA, 20 bp, Artificial Sequence
  Description of Artificial Sequence: Synthetic oligonucleotide
  Target: LAMA2; (+) strand; PAM type: NRG; PAM sequence: GAG
cagaggctgggagaaatagg

SEQ ID NO: 143358 - DNA, 20 bp, Artificial Sequence
  Description of Artificial Sequence: Synthetic oligonucleotide
  Target: LAMA2; (+) strand; PAM type: NRG; PAM sequence: TAG
tgggagaaatagggagatat

SEQ ID NO: 143359 - DNA, 20 bp, Artificial Sequence
  Description of Artificial Sequence: Synthetic oligonucleotide
  Target: LAMA2; (+) strand; PAM type: NRG; PAM sequence: AAG
agtcaatgcattacttttat

SEQ ID NO: 143360 - DNA, 20 bp, Artificial Sequence
  Description of Artificial Sequence: Synthetic oligonucleotide
  Target: LAMA2; (+) strand; PAM type: NRG; PAM sequence: TGG
caatgcattacttttataag

SEQ ID NO: 143361 - DNA, 20 bp, Artificial Sequence
  Description of Artificial Sequence: Synthetic oligonucleotide
  Target: LAMA2; (+) strand; PAM type: NRG; PAM sequence: GGG
aatgcattacttttataagt

SEQ ID NO: 143362 - DNA, 20 bp, Artificial Sequence
  Description of Artificial Sequence: Synthetic oligonucleotide
  Target: LAMA2; (+) strand; PAM type: NRG; PAM sequence: CAG
ttacttttataagtgggcaa

SEQ ID NO: 143363 - DNA, 20 bp, Artificial Sequence
  Description of Artificial Sequence: Synthetic oligonucleotide
  Target: LAMA2; (+) strand; PAM type: NRG; PAM sequence: TGG
gcaacagaacccatgttgtg

SEQ ID NO: 143364 - DNA, 20 bp, Artificial Sequence
  Description of Artificial Sequence: Synthetic oligonucleotide
  Target: LAMA2; (+) strand; PAM type: NRG; PAM sequence: AAG
gaacccatgttgtgtggtca

SEQ ID NO: 143365 - DNA, 20 bp, Artificial Sequence
  Description of Artificial Sequence: Synthetic oligonucleotide
  Target: LAMA2; (+) strand; PAM type: NRG; PAM sequence: CAG
gttgtgtggtcaaagtactg

SEQ ID NO: 143366 - DNA, 20 bp, Artificial Sequence
  Description of Artificial Sequence: Synthetic oligonucleotide
  Target: LAMA2; (+) strand; PAM type: NRG; PAM sequence: AAG
aaagtactgcagaacttctc

SEQ ID NO: 143367 - DNA, 20 bp, Artificial Sequence
  Description of Artificial Sequence: Synthetic oligonucleotide
  Target: LAMA2; (+) strand; PAM type: NRG; PAM sequence: CAG
ctcaagcattgtacacgttt

SEQ ID NO: 143368 - DNA, 20 bp, Artificial Sequence
  Description of Artificial Sequence: Synthetic oligonucleotide
  Target: LAMA2; (+) strand; PAM type: NRG; PAM sequence: TGG
gtttttgactacgactttaa

SEQ ID NO: 143369 - DNA, 20 bp, Artificial Sequence
  Description of Artificial Sequence: Synthetic oligonucleotide
  Target: LAMA2; (+) strand; PAM type: NRG; PAM sequence: AAG
ctacgactttaatggtccac

SEQ ID NO: 143370 - DNA, 20 bp, Artificial Sequence
  Description of Artificial Sequence: Synthetic oligonucleotide
  Target: LAMA2; (+) strand; PAM type: NRG; PAM sequence: AAG
gactttaatggtccacaaga

SEQ ID NO: 143371 - DNA, 20 bp, Artificial Sequence
  Description of Artificial Sequence: Synthetic oligonucleotide
  Target: LAMA2; (+) strand; PAM type: NRG; PAM sequence: AGG
actttaatggtccacaagaa

SEQ ID NO: 143372 - DNA, 20 bp, Artificial Sequence
  Description of Artificial Sequence: Synthetic oligonucleotide
  Target: LAMA2; (+) strand; PAM type: NRG; PAM sequence: AAG
ggtccacaagaaaggcctct

SEQ ID NO: 143373 - DNA, 20 bp, Artificial Sequence
  Description of Artificial Sequence: Synthetic oligonucleotide
  Target: LAMA2; (+) strand; PAM type: NRG; PAM sequence: AAG
tttttcgtgtccatttctat

SEQ ID NO: 143374 - DNA, 20 bp, Artificial Sequence
  Description of Artificial Sequence: Synthetic oligonucleotide
  Target: LAMA2; (+) strand; PAM type: NRG; PAM sequence: GAG
tttcgtgtccatttctataa

SEQ ID NO: 143375 - DNA, 20 bp, Artificial Sequence
  Description of Artificial Sequence: Synthetic oligonucleotide
  Target: LAMA2; (+) strand; PAM type: NRG; PAM sequence: GAG
tcgtgtccatttctataaga

SEQ ID NO: 143376 - DNA, 20 bp, Artificial Sequence
  Description of Artificial Sequence: Synthetic oligonucleotide
  Target: LAMA2; (+) strand; PAM type: NRG; PAM sequence: TAG
gagagaacataatgctgtgt

SEQ ID NO: 143377 - DNA, 20 bp, Artificial Sequence
  Description of Artificial Sequence: Synthetic oligonucleotide
  Target: LAMA2; (+) strand; PAM type: NRG; PAM sequence: TAG
acataatgctgtgttagaca

SEQ ID NO: 143378 - DNA, 20 bp, Artificial Sequence
  Description of Artificial Sequence: Synthetic oligonucleotide
  Target: LAMA2; (+) strand; PAM type: NRG; PAM sequence: GAG
atgctgtgttagacatagtt

SEQ ID NO: 143379 - DNA, 20 bp, Artificial Sequence
  Description of Artificial Sequence: Synthetic oligonucleotide
  Target: LAMA2; (+) strand; PAM type: NRG; PAM sequence: AAG
aatacataaatccttttatg

SEQ ID NO: 143380 - DNA, 20 bp, Artificial Sequence
  Description of Artificial Sequence: Synthetic oligonucleotide
  Target: LAMA2; (+) strand; PAM type: NRG; PAM sequence: TGG
ttttatgaagtctttaaaat

SEQ ID NO: 143381 - DNA, 20 bp, Artificial Sequence
  Description of Artificial Sequence: Synthetic oligonucleotide
  Target: LAMA2; (+) strand; PAM type: NRG; PAM sequence: TGG
aaccaataaaattatatttt

SEQ ID NO: 143382 - DNA, 20 bp, Artificial Sequence
  Description of Artificial Sequence: Synthetic oligonucleotide
  Target: LAMA2; (+) strand; PAM type: NRG; PAM sequence: TAG
aaaattatatttttggaaca

SEQ ID NO: 143383 - DNA, 20 bp, Artificial Sequence
  Description of Artificial Sequence: Synthetic oligonucleotide
  Target: LAMA2; (+) strand; PAM type: NRG; PAM sequence: AAG
gttaaccactttgtgcacat

SEQ ID NO: 143384 - DNA, 20 bp, Artificial Sequence
  Description of Artificial Sequence: Synthetic oligonucleotide
  Target: LAMA2; (+) strand; PAM type: NRG; PAM sequence: GAG
accactttgtgcacataagt

SEQ ID NO: 143385 - DNA, 20 bp, Artificial Sequence
  Description of Artificial Sequence: Synthetic oligonucleotide
  Target: LAMA2; (+) strand; PAM type: NRG; PAM sequence: AGG
ccactttgtgcacataagtg

SEQ ID NO: 143386 - DNA, 20 bp, Artificial Sequence
  Description of Artificial Sequence: Synthetic oligonucleotide
  Target: LAMA2; (+) strand; PAM type: NRG; PAM sequence: TAG
tgtgcacataagtgaggctg

SEQ ID NO: 143387 - DNA, 20 bp, Artificial Sequence
  Description of Artificial Sequence: Synthetic oligonucleotide
  Target: LAMA2; (+) strand; PAM type: NRG; PAM sequence: TAG
ataagtgaggctgtagaaac

SEQ ID NO: 143388 - DNA, 20 bp, Artificial Sequence
  Description of Artificial Sequence: Synthetic oligonucleotide
  Target: LAMA2; (+) strand; PAM type: NRG; PAM sequence: AGG
taagtgaggctgtagaaact

SEQ ID NO: 143389 - DNA, 20 bp, Artificial Sequence
  Description of Artificial Sequence: Synthetic oligonucleotide
  Target: LAMA2; (+) strand; PAM type: NRG; PAM sequence: GGG
aagtgaggctgtagaaacta

SEQ ID NO: 143390 - DNA, 20 bp, Artificial Sequence
  Description of Artificial Sequence: Synthetic oligonucleotide
  Target: LAMA2; (+) strand; PAM type: NRG; PAM sequence: AAG
agggtttttaaatgacttaa

SEQ ID NO: 143391 - DNA, 20 bp, Artificial Sequence
  Description of Artificial Sequence: Synthetic oligonucleotide
  Target: LAMA2; (+) strand; PAM type: NRG; PAM sequence: TAG
atatatatttctccaaacta

SEQ ID NO: 143392 - DNA, 20 bp, Artificial Sequence
  Description of Artificial Sequence: Synthetic oligonucleotide
  Target: LAMA2; (+) strand; PAM type: NRG; PAM sequence: AGG
tatatatttctccaaactat

SEQ ID NO: 143393 - DNA, 20 bp, Artificial Sequence
  Description of Artificial Sequence: Synthetic oligonucleotide
  Target: LAMA2; (+) strand; PAM type: NRG; PAM sequence: CAG
ttatatcaatattactttga

SEQ ID NO: 143394 - DNA, 20 bp, Artificial Sequence
  Description of Artificial Sequence: Synthetic oligonucleotide
  Target: LAMA2; (+) strand; PAM type: NRG; PAM sequence: GAG
atatcaatattactttgaca

SEQ ID NO: 143395 - DNA, 20 bp, Artificial Sequence
  Description of Artificial Sequence: Synthetic oligonucleotide
  Target: LAMA2; (+) strand; PAM type: NRG; PAM sequence: TAG
atattactttgacagagata

SEQ ID NO: 143396 - DNA, 20 bp, Artificial Sequence
  Description of Artificial Sequence: Synthetic oligonucleotide
  Target: LAMA2; (+) strand; PAM type: NRG; PAM sequence: TAG
tatagtaattctccatctta

SEQ ID NO: 143397 - DNA, 20 bp, Artificial Sequence
  Description of Artificial Sequence: Synthetic oligonucleotide
  Target: LAMA2; (+) strand; PAM type: NRG; PAM sequence: AAG
gtaaaatttatgaaaacatt

SEQ ID NO: 143398 - DNA, 20 bp, Artificial Sequence
  Description of Artificial Sequence: Synthetic oligonucleotide
  Target: LAMA2; (+) strand; PAM type: NRG; PAM sequence: CAG
gaaaacattaagtaaaccaa

SEQ ID NO: 143399 - DNA, 20 bp, Artificial Sequence
  Description of Artificial Sequence: Synthetic oligonucleotide
  Target: LAMA2; (+) strand; PAM type: NRG; PAM sequence: AGG
aaaacattaagtaaaccaac

SEQ ID NO: 143400 - DNA, 20 bp, Artificial Sequence
  Description of Artificial Sequence: Synthetic oligonucleotide
  Target: LAMA2; (+) strand; PAM type: NRG; PAM sequence: TGG
ccaacaggtaaatacatttt

SEQ ID NO: 143401 - DNA, 20 bp, Artificial Sequence
  Description of Artificial Sequence: Synthetic oligonucleotide
  Target: LAMA2; (+) strand; PAM type: NRG; PAM sequence: TGG
aattatgtttttcttttatt

SEQ ID NO: 143402 - DNA, 20 bp, Artificial Sequence
  Description of Artificial Sequence: Synthetic oligonucleotide
  Target: LAMA2; (+) strand; PAM type: NRG; PAM sequence: AAG
gtttttcttttatttggctc

SEQ ID NO: 143403 - DNA, 20 bp, Artificial Sequence
  Description of Artificial Sequence: Synthetic oligonucleotide
  Target: LAMA2; (+) strand; PAM type: NRG; PAM sequence: CAG
tttattattaattgactact

SEQ ID NO: 143404 - DNA, 20 bp, Artificial Sequence
  Description of Artificial Sequence: Synthetic oligonucleotide
  Target: LAMA2; (+) strand; PAM type: NRG; PAM sequence: AGG
ttattattaattgactactc

SEQ ID NO: 143405 - DNA, 20 bp, Artificial Sequence
  Description of Artificial Sequence: Synthetic oligonucleotide
  Target: LAMA2; (+) strand; PAM type: NRG; PAM sequence: CAG
gacatcattgatcccattgt

SEQ ID NO: 143406 - DNA, 20 bp, Artificial Sequence
  Description of Artificial Sequence: Synthetic oligonucleotide
  Target: LAMA2; (+) strand; PAM type: NRG; PAM sequence: AAG
cattgatcccattgtcagaa

SEQ ID NO: 143407 - DNA, 20 bp, Artificial Sequence
  Description of Artificial Sequence: Synthetic oligonucleotide
  Target: LAMA2; (+) strand; PAM type: NRG; PAM sequence: CAG
gatcccattgtcagaaaaga

SEQ ID NO: 143408 - DNA, 20 bp, Artificial Sequence
  Description of Artificial Sequence: Synthetic oligonucleotide
  Target: LAMA2; (+) strand; PAM type: NRG; PAM sequence: TGG
ttattaaactgctaatcttc

SEQ ID NO: 143409 - DNA, 20 bp, Artificial Sequence
  Description of Artificial Sequence: Synthetic oligonucleotide
  Target: LAMA2; (+) strand; PAM type: NRG; PAM sequence: AAG
atcttctggacttttcttca

SEQ ID NO: 143410 - DNA, 20 bp, Artificial Sequence
  Description of Artificial Sequence: Synthetic oligonucleotide
  Target: LAMA2; (+) strand; PAM type: NRG; PAM sequence: CAG
gacttttcttcaaagcttgt

SEQ ID NO: 143411 - DNA, 20 bp, Artificial Sequence
  Description of Artificial Sequence: Synthetic oligonucleotide
  Target: LAMA2; (+) strand; PAM type: NRG; PAM sequence: CAG
gttttgatccaaaaaaactt

SEQ ID NO: 143412 - DNA, 20 bp, Artificial Sequence
  Description of Artificial Sequence: Synthetic oligonucleotide
  Target: LAMA2; (+) strand; PAM type: NRG; PAM sequence: TGG
aaacttcagatttcattgtg

SEQ ID NO: 143413 - DNA, 20 bp, Artificial Sequence
  Description of Artificial Sequence: Synthetic oligonucleotide
  Target: LAMA2; (+) strand; PAM type: NRG; PAM sequence: CAG
gttacttcttgtgtgaaaaa

SEQ ID NO: 143414 - DNA, 20 bp, Artificial Sequence
  Description of Artificial Sequence: Synthetic oligonucleotide
  Target: LAMA2; (+) strand; PAM type: NRG; PAM sequence: TGG
ttcttgtgtgaaaaacagta

SEQ ID NO: 143415 - DNA, 20 bp, Artificial Sequence
  Description of Artificial Sequence: Synthetic oligonucleotide
  Target: LAMA2; (+) strand; PAM type: NRG; PAM sequence: TGG
tgaaaaacagtatggtttca

SEQ ID NO: 143416 - DNA, 20 bp, Artificial Sequence
  Description of Artificial Sequence: Synthetic oligonucleotide
  Target: LAMA2; (+) strand; PAM type: NRG; PAM sequence: TGG
ggtttcatggaatccactct

SEQ ID NO: 143417 - DNA, 20 bp, Artificial Sequence
  Description of Artificial Sequence: Synthetic oligonucleotide
  Target: LAMA2; (+) strand; PAM type: NRG; PAM sequence: CAG
tggccattgttaatattgta

SEQ ID NO: 143418 - DNA, 20 bp, Artificial Sequence
  Description of Artificial Sequence: Synthetic oligonucleotide
  Target: LAMA2; (+) strand; PAM type: NRG; PAM sequence: TAG
cattgttaatattgtacaga

SEQ ID NO: 143419 - DNA, 20 bp, Artificial Sequence
  Description of Artificial Sequence: Synthetic oligonucleotide
  Target: LAMA2; (+) strand; PAM type: NRG; PAM sequence: AGG
attgttaatattgtacagat

SEQ ID NO: 143420 - DNA, 20 bp, Artificial Sequence
  Description of Artificial Sequence: Synthetic oligonucleotide
  Target: LAMA2; (+) strand; PAM type: NRG; PAM sequence: AAG
tattgtacagataggcacac

SEQ ID NO: 143421 - DNA, 20 bp, Artificial Sequence
  Description of Artificial Sequence: Synthetic oligonucleotide
  Target: LAMA2; (+) strand; PAM type: NRG; PAM sequence: TAG
acacaagcatttaaatatgc

SEQ ID NO: 143422 - DNA, 20 bp, Artificial Sequence
  Description of Artificial Sequence: Synthetic oligonucleotide
  Target: LAMA2; (+) strand; PAM type: NRG; PAM sequence: AAG
accttattgcaaaaaaaaaa

SEQ ID NO: 143423 - DNA, 20 bp, Artificial Sequence
  Description of Artificial Sequence: Synthetic oligonucleotide
  Target: LAMA2; (+) strand; PAM type: NRG; PAM sequence: TAG
atattcattgcaatttatta

SEQ ID NO: 143424 - DNA, 20 bp, Artificial Sequence
  Description of Artificial Sequence: Synthetic oligonucleotide
  Target: LAMA2; (+) strand; PAM type: NRG; PAM sequence: CAG
ataaactgttgtcaataatt

SEQ ID NO: 143425 - DNA, 20 bp, Artificial Sequence
  Description of Artificial Sequence: Synthetic oligonucleotide
  Target: LAMA2; (+) strand; PAM type: NRG; PAM sequence: AGG
taaactgttgtcaataattc

SEQ ID NO: 143426 - DNA, 20 bp, Artificial Sequence
  Description of Artificial Sequence: Synthetic oligonucleotide
  Target: LAMA2; (+) strand; PAM type: NRG; PAM sequence: AAG
taattcaggtcccaattctg

SEQ ID NO: 143427 - DNA, 20 bp, Artificial Sequence
  Description of Artificial Sequence: Synthetic oligonucleotide
  Target: LAMA2; (+) strand; PAM type: NRG; PAM sequence: GAG
tcccaattctgaagtgtatt

SEQ ID NO: 143428 - DNA, 20 bp, Artificial Sequence
  Description of Artificial Sequence: Synthetic oligonucleotide
  Target: LAMA2; (+) strand; PAM type: NRG; PAM sequence: AAG
attgagattaccaaactgtg

SEQ ID NO: 143429 - DNA, 20 bp, Artificial Sequence
  Description of Artificial Sequence: Synthetic oligonucleotide
  Target: LAMA2; (+) strand; PAM type: NRG; PAM sequence: CAG
gagattaccaaactgtgaag

SEQ ID NO: 143430 - DNA, 20 bp, Artificial Sequence
  Description of Artificial Sequence: Synthetic oligonucleotide
  Target: LAMA2; (+) strand; PAM type: NRG; PAM sequence: AGG
agattaccaaactgtgaagc

SEQ ID NO: 143431 - DNA, 20 bp, Artificial Sequence
  Description of Artificial Sequence: Synthetic oligonucleotide
  Target: LAMA2; (+) strand; PAM type: NRG; PAM sequence: AAG
caatatttattctctacata

SEQ ID NO: 143432 - DNA, 20 bp, Artificial Sequence
  Description of Artificial Sequence: Synthetic oligonucleotide
  Target: LAMA2; (+) strand; PAM type: NRG; PAM sequence: AAG
atttattctctacataaaga

SEQ ID NO: 143433 - DNA, 20 bp, Artificial Sequence
  Description of Artificial Sequence: Synthetic oligonucleotide
  Target: LAMA2; (+) strand; PAM type: NRG; PAM sequence: AAG
ttctctacataaagaaagaa

SEQ ID NO: 143434 - DNA, 20 bp, Artificial Sequence
  Description of Artificial Sequence: Synthetic oligonucleotide
  Target: LAMA2; (+) strand; PAM type: NRG; PAM sequence: AAG
ttaaatgaacttgatattat

SEQ ID NO: 143435 - DNA, 20 bp, Artificial Sequence
  Description of Artificial Sequence: Synthetic oligonucleotide
  Target: LAMA2; (+) strand; PAM type: NRG; PAM sequence: AAG
aatgaacttgatattataag

SEQ ID NO: 143436 - DNA, 20 bp, Artificial Sequence
  Description of Artificial Sequence: Synthetic oligonucleotide
  Target: LAMA2; (+) strand; PAM type: NRG; PAM sequence: CAG
tgatattataagaagcactt

SEQ ID NO: 143437 - DNA, 20 bp, Artificial Sequence
  Description of Artificial Sequence: Synthetic oligonucleotide
  Target: LAMA2; (+) strand; PAM type: NRG; PAM sequence: AGG
gatattataagaagcacttc

SEQ ID NO: 143438 - DNA, 20 bp, Artificial Sequence
  Description of Artificial Sequence: Synthetic oligonucleotide
  Target: LAMA2; (+) strand; PAM type: NRG; PAM sequence: TGG
atattatgacatctataatc

SEQ ID NO: 143439 - DNA, 20 bp, Artificial Sequence
  Description of Artificial Sequence: Synthetic oligonucleotide
  Target: LAMA2; (+) strand; PAM type: NRG; PAM sequence: AAG
ataatctggcctaaaatcac

SEQ ID NO: 143440 - DNA, 20 bp, Artificial Sequence
  Description of Artificial Sequence: Synthetic oligonucleotide
  Target: LAMA2; (+) strand; PAM type: NRG; PAM sequence: TGG
cacaagcaaacattccatga

SEQ ID NO: 143441 - DNA, 20 bp, Artificial Sequence
  Description of Artificial Sequence: Synthetic oligonucleotide
  Target: LAMA2; (+) strand; PAM type: NRG; PAM sequence: TGG
gcaaacattccatgatggaa

SEQ ID NO: 143442 - DNA, 20 bp, Artificial Sequence
  Description of Artificial Sequence: Synthetic oligonucleotide
  Target: LAMA2; (+) strand; PAM type: NRG; PAM sequence: CAG
aacattccatgatggaatgg

SEQ ID NO: 143443 - DNA, 20 bp, Artificial Sequence
  Description of Artificial Sequence: Synthetic oligonucleotide
  Target: LAMA2; (+) strand; PAM type: NRG; PAM sequence: TAG
gatggaatggcagatcatgc

SEQ ID NO: 143444 - DNA, 20 bp, Artificial Sequence
  Description of Artificial Sequence: Synthetic oligonucleotide
  Target: LAMA2; (+) strand; PAM type: NRG; PAM sequence: TGG
gcagatcatgctagatttgc

SEQ ID NO: 143445 - DNA, 20 bp, Artificial Sequence
  Description of Artificial Sequence: Synthetic oligonucleotide
  Target: LAMA2; (+) strand; PAM type: NRG; PAM sequence: CAG
ctagatttgctggttattat

SEQ ID NO: 143446 - DNA, 20 bp, Artificial Sequence
  Description of Artificial Sequence: Synthetic oligonucleotide
  Target: LAMA2; (+) strand; PAM type: NRG; PAM sequence: AAG
agttttattttacgttacct

SEQ ID NO: 143447 - DNA, 20 bp, Artificial Sequence
  Description of Artificial Sequence: Synthetic oligonucleotide
  Target: LAMA2; (+) strand; PAM type: NRG; PAM sequence: TAG
tttattttacgttacctaag

SEQ ID NO: 143448 - DNA, 20 bp, Artificial Sequence
  Description of Artificial Sequence: Synthetic oligonucleotide
  Target: LAMA2; (+) strand; PAM type: NRG; PAM sequence: AAG
acgttacctaagtagaattt

SEQ ID NO: 143449 - DNA, 20 bp, Artificial Sequence
  Description of Artificial Sequence: Synthetic oligonucleotide
  Target: LAMA2; (+) strand; PAM type: NRG; PAM sequence: CAG
taagtagaatttaagccttt

SEQ ID NO: 143450 - DNA, 20 bp, Artificial Sequence
  Description of Artificial Sequence: Synthetic oligonucleotide
  Target: LAMA2; (+) strand; PAM type: NRG; PAM sequence: AAG
tcagttaaaatatgactccc

SEQ ID NO: 143451 - DNA, 20 bp, Artificial Sequence
  Description of Artificial Sequence: Synthetic oligonucleotide
  Target: LAMA2; (+) strand; PAM type: NRG; PAM sequence: AAG
aaaatatgactcccaagcaa

SEQ ID NO: 143452 - DNA, 20 bp, Artificial Sequence
  Description of Artificial Sequence: Synthetic oligonucleotide
  Target: LAMA2; (+) strand; PAM type: NRG; PAM sequence: AGG
aaatatgactcccaagcaaa

SEQ ID NO: 143453 - DNA, 20 bp, Artificial Sequence
  Description of Artificial Sequence: Synthetic oligonucleotide
  Target: LAMA2; (+) strand; PAM type: NRG; PAM sequence: AAG
tatgactcccaagcaaaagg

SEQ ID NO: 143454 - DNA, 20 bp, Artificial Sequence
  Description of Artificial Sequence: Synthetic oligonucleotide
  Target: LAMA2; (+) strand; PAM type: NRG; PAM sequence: GAG
tgactcccaagcaaaaggaa

SEQ ID NO: 143455 - DNA, 20 bp, Artificial Sequence
  Description of Artificial Sequence: Synthetic oligonucleotide
  Target: LAMA2; (+) strand; PAM type: NRG; PAM sequence: AGG
gactcccaagcaaaaggaag

SEQ ID NO: 143456 - DNA, 20 bp, Artificial Sequence
  Description of Artificial Sequence: Synthetic oligonucleotide
  Target: LAMA2; (+) strand; PAM type: NRG; PAM sequence: TGG
agcaaaaggaagaggattaa

SEQ ID NO: 143457 - DNA, 20 bp, Artificial Sequence
  Description of Artificial Sequence: Synthetic oligonucleotide
  Target: LAMA2; (+) strand; PAM type: NRG; PAM sequence: TGG
gtttgtgttatcaataatat

SEQ ID NO: 143458 - DNA, 20 bp, Artificial Sequence
  Description of Artificial Sequence: Synthetic oligonucleotide
  Target: LAMA2; (+) strand; PAM type: NRG; PAM sequence: TGG
tggcaataactatttgtcta

SEQ ID NO: 143459 - DNA, 20 bp, Artificial Sequence
  Description of Artificial Sequence: Synthetic oligonucleotide
  Target: LAMA2; (+) strand; PAM type: NRG; PAM sequence: CAG
atttgtctatggtgctgtgt

SEQ ID NO: 143460 - DNA, 20 bp, Artificial Sequence
  Description of Artificial Sequence: Synthetic oligonucleotide
  Target: LAMA2; (+) strand; PAM type: NRG; PAM sequence: AAG
tatggtgctgtgtcagttac

SEQ ID NO: 143461 - DNA, 20 bp, Artificial Sequence
  Description of Artificial Sequence: Synthetic oligonucleotide
  Target: LAMA2; (+) strand; PAM type: NRG; PAM sequence: AGG
atggtgctgtgtcagttaca

SEQ ID NO: 143462 - DNA, 20 bp, Artificial Sequence
  Description of Artificial Sequence: Synthetic oligonucleotide
  Target: LAMA2; (+) strand; PAM type: NRG; PAM sequence: AAG
cttccatctgatcctcacca

SEQ ID NO: 143463 - DNA, 20 bp, Artificial Sequence
  Description of Artificial Sequence: Synthetic oligonucleotide
  Target: LAMA2; (+) strand; PAM type: NRG; PAM sequence: TGG
tctgatcctcaccaaagcct

SEQ ID NO: 143464 - DNA, 20 bp, Artificial Sequence
  Description of Artificial Sequence: Synthetic oligonucleotide
  Target: LAMA2; (+) strand; PAM type: NRG; PAM sequence: GAG
tgatcctcaccaaagccttg

SEQ ID NO: 143465 - DNA, 20 bp, Artificial Sequence
  Description of Artificial Sequence: Synthetic oligonucleotide
  Target: LAMA2; (+) strand; PAM type: NRG; PAM sequence: AAG
caaagccttggagatgcttc

SEQ ID NO: 143466 - DNA, 20 bp, Artificial Sequence
  Description of Artificial Sequence: Synthetic oligonucleotide
  Target: LAMA2; (+) strand; PAM type: NRG; PAM sequence: CAG
ttgttattattctcatttta

SEQ ID NO: 143467 - DNA, 20 bp, Artificial Sequence
  Description of Artificial Sequence: Synthetic oligonucleotide
  Target: LAMA2; (+) strand; PAM type: NRG; PAM sequence: TGG
tattattctcattttacaga

SEQ ID NO: 143468 - DNA, 20 bp, Artificial Sequence
  Description of Artificial Sequence: Synthetic oligonucleotide
  Target: LAMA2; (+) strand; PAM type: NRG; PAM sequence: GAG
ttattctcattttacagatg

SEQ ID NO: 143469 - DNA, 20 bp, Artificial Sequence
  Description of Artificial Sequence: Synthetic oligonucleotide
  Target: LAMA2; (+) strand; PAM type: NRG; PAM sequence: AGG
tattctcattttacagatgg

SEQ ID NO: 143470 - DNA, 20 bp, Artificial Sequence
  Description of Artificial Sequence: Synthetic oligonucleotide
  Target: LAMA2; (+) strand; PAM type: NRG; PAM sequence: AAG
tcattttacagatggaggtg

SEQ ID NO: 143471 - DNA, 20 bp, Artificial Sequence
  Description of Artificial Sequence: Synthetic oligonucleotide
  Target: LAMA2; (+) strand; PAM type: NRG; PAM sequence: AGG
cattttacagatggaggtga

SEQ ID NO: 143472 - DNA, 20 bp, Artificial Sequence
  Description of Artificial Sequence: Synthetic oligonucleotide
  Target: LAMA2; (+) strand; PAM type: NRG; PAM sequence: GAG
ggaggtgaaggaactgattt

SEQ ID NO: 143473 - DNA, 20 bp, Artificial Sequence
  Description of Artificial Sequence: Synthetic oligonucleotide
  Target: LAMA2; (+) strand; PAM type: NRG; PAM sequence: AGG
gaggtgaaggaactgatttg

SEQ ID NO: 143474 - DNA, 20 bp, Artificial Sequence
  Description of Artificial Sequence: Synthetic oligonucleotide
  Target: LAMA2; (+) strand; PAM type: NRG; PAM sequence: TGG
actgatttgaggtcacactg

SEQ ID NO: 143475 - DNA, 20 bp, Artificial Sequence
  Description of Artificial Sequence: Synthetic oligonucleotide
  Target: LAMA2; (+) strand; PAM type: NRG; PAM sequence: TGG
aaatgttcaacactaatctc

SEQ ID NO: 143476 - DNA, 20 bp, Artificial Sequence
  Description of Artificial Sequence: Synthetic oligonucleotide
  Target: LAMA2; (+) strand; PAM type: NRG; PAM sequence: CAG
ttcaacactaatctctggtc

SEQ ID NO: 143477 - DNA, 20 bp, Artificial Sequence
  Description of Artificial Sequence: Synthetic oligonucleotide
  Target: LAMA2; (+) strand; PAM type: NRG; PAM sequence: AGG
tcaacactaatctctggtcc

SEQ ID NO: 143478 - DNA, 20 bp, Artificial Sequence
  Description of Artificial Sequence: Synthetic oligonucleotide
  Target: LAMA2; (+) strand; PAM type: NRG; PAM sequence: CAG
actaatctctggtccaggtc

SEQ ID NO: 143479 - DNA, 20 bp, Artificial Sequence
  Description of Artificial Sequence: Synthetic oligonucleotide
  Target: LAMA2; (+) strand; PAM type: NRG; PAM sequence: CAG
tctctggtccaggtccagtc

SEQ ID NO: 143480 - DNA, 20 bp, Artificial Sequence
  Description of Artificial Sequence: Synthetic oligonucleotide
  Target: LAMA2; (+) strand; PAM type: NRG; PAM sequence: TGG
gtccagtccagatcttctga

SEQ ID NO: 143481 - DNA, 20 bp, Artificial Sequence
  Description of Artificial Sequence: Synthetic oligonucleotide
  Target: LAMA2; (+) strand; PAM type: NRG; PAM sequence: TGG
taatcattccacttcataaa

SEQ ID NO: 143482 - DNA, 20 bp, Artificial Sequence
  Description of Artificial Sequence: Synthetic oligonucleotide
  Target: LAMA2; (+) strand; PAM type: NRG; PAM sequence: TAG
cacttcataaatggaacact

SEQ ID NO: 143483 - DNA, 20 bp, Artificial Sequence
  Description of Artificial Sequence: Synthetic oligonucleotide
  Target: LAMA2; (+) strand; PAM type: NRG; PAM sequence: AGG
acttcataaatggaacactt

SEQ ID NO: 143484 - DNA, 20 bp, Artificial Sequence
  Description of Artificial Sequence: Synthetic oligonucleotide
  Target: LAMA2; (+) strand; PAM type: NRG; PAM sequence: CAG
atggaacacttaggtccaat

SEQ ID NO: 143485 - DNA, 20 bp, Artificial Sequence
  Description of Artificial Sequence: Synthetic oligonucleotide
  Target: LAMA2; (+) strand; PAM type: NRG; PAM sequence: TGG
tctaaatgtgtatttactgt

SEQ ID NO: 143486 - DNA, 20 bp, Artificial Sequence
  Description of Artificial Sequence: Synthetic oligonucleotide
  Target: LAMA2; (+) strand; PAM type: NRG; PAM sequence: AAG
gtgtatttactgttggtcac

SEQ ID NO: 143487 - DNA, 20 bp, Artificial Sequence
  Description of Artificial Sequence: Synthetic oligonucleotide
  Target: LAMA2; (+) strand; PAM type: NRG; PAM sequence: GAG
gtatttactgttggtcacaa

SEQ ID NO: 143488 - DNA, 20 bp, Artificial Sequence
  Description of Artificial Sequence: Synthetic oligonucleotide
  Target: LAMA2; (+) strand; PAM type: NRG; PAM sequence: TGG
agagtttgtgtgacactgtg

SEQ ID NO: 143489 - DNA, 20 bp, Artificial Sequence
  Description of Artificial Sequence: Synthetic oligonucleotide
  Target: LAMA2; (+) strand; PAM type: NRG; PAM sequence: CGG
tgccatccaccatctctact

SEQ ID NO: 143490 - DNA, 20 bp, Artificial Sequence
  Description of Artificial Sequence: Synthetic oligonucleotide
  Target: LAMA2; (+) strand; PAM type: NRG; PAM sequence: AAG
atctctactcggaaaaaccc

SEQ ID NO: 143491 - DNA, 20 bp, Artificial Sequence
  Description of Artificial Sequence: Synthetic oligonucleotide
  Target: LAMA2; (+) strand; PAM type: NRG; PAM sequence: AGG
tctctactcggaaaaaccca

SEQ ID NO: 143492 - DNA, 20 bp, Artificial Sequence
  Description of Artificial Sequence: Synthetic oligonucleotide
  Target: LAMA2; (+) strand; PAM type: NRG; PAM sequence: GGG
ctctactcggaaaaacccaa

SEQ ID NO: 143493 - DNA, 20 bp, Artificial Sequence
  Description of Artificial Sequence: Synthetic oligonucleotide
  Target: LAMA2; (+) strand; PAM type: NRG; PAM sequence: CAG
ggaaaaacccaagggtgtgt

SEQ ID NO: 143494 - DNA, 20 bp, Artificial Sequence
  Description of Artificial Sequence: Synthetic oligonucleotide
  Target: LAMA2; (+) strand; PAM type: NRG; PAM sequence: CAG
ccaagggtgtgtcagttaat

SEQ ID NO: 143495 - DNA, 20 bp, Artificial Sequence
  Description of Artificial Sequence: Synthetic oligonucleotide
  Target: LAMA2; (+) strand; PAM type: NRG; PAM sequence: CAG
tgtcagttaatcagtcttaa

SEQ ID NO: 143496 - DNA, 20 bp, Artificial Sequence
  Description of Artificial Sequence: Synthetic oligonucleotide
  Target: LAMA2; (+) strand; PAM type: NRG; PAM sequence: AGG
gtcagttaatcagtcttaac

SEQ ID NO: 143497 - DNA, 20 bp, Artificial Sequence
  Description of Artificial Sequence: Synthetic oligonucleotide
  Target: LAMA2; (+) strand; PAM type: NRG; PAM sequence: AAG
gttaatcagtcttaacagga

SEQ ID NO: 143498 - DNA, 20 bp, Artificial Sequence
  Description of Artificial Sequence: Synthetic oligonucleotide
  Target: LAMA2; (+) strand; PAM type: NRG; PAM sequence: TGG
ataatgtactattatcatta

SEQ ID NO: 143499 - DNA, 20 bp, Artificial Sequence
  Description of Artificial Sequence: Synthetic oligonucleotide
  Target: LAMA2; (+) strand; PAM type: NRG; PAM sequence: AAG
tactattatcattatggcaa

SEQ ID NO: 143500 - DNA, 20 bp, Artificial Sequence
  Description of Artificial Sequence: Synthetic oligonucleotide
  Target: LAMA2; (+) strand; PAM type: NRG; PAM sequence: AAG
gtacacttgaaaatacaaca

SEQ ID NO: 143501 - DNA, 20 bp, Artificial Sequence
  Description of Artificial Sequence: Synthetic oligonucleotide
  Target: LAMA2; (+) strand; PAM type: NRG; PAM sequence: AGG
tacacttgaaaatacaacaa

SEQ ID NO: 143502 - DNA, 20 bp, Artificial Sequence
  Description of Artificial Sequence: Synthetic oligonucleotide
  Target: LAMA2; (+) strand; PAM type: NRG; PAM sequence: AAG
aaatacaacaaaggatattg

SEQ ID NO: 143503 - DNA, 20 bp, Artificial Sequence
  Description of Artificial Sequence: Synthetic oligonucleotide
  Target: LAMA2; (+) strand; PAM type: NRG; PAM sequence: AAG
gatattgaagctattaaaat

SEQ ID NO: 143504 - DNA, 20 bp, Artificial Sequence
  Description of Artificial Sequence: Synthetic oligonucleotide
  Target: LAMA2; (+) strand; PAM type: NRG; PAM sequence: TAG
taaaataagcttcttatcct

SEQ ID NO: 143505 - DNA, 20 bp, Artificial Sequence
  Description of Artificial Sequence: Synthetic oligonucleotide
  Target: LAMA2; (+) strand; PAM type: NRG; PAM sequence: AGG
aaaataagcttcttatcctt

SEQ ID NO: 143506 - DNA, 20 bp, Artificial Sequence
  Description of Artificial Sequence: Synthetic oligonucleotide
  Target: LAMA2; (+) strand; PAM type: NRG; PAM sequence: GGG
aaataagcttcttatcctta

SEQ ID NO: 143507 - DNA, 20 bp, Artificial Sequence
  Description of Artificial Sequence: Synthetic oligonucleotide
  Target: LAMA2; (+) strand; PAM type: NRG; PAM sequence: TAG
tagggaaactatttcaacac

SEQ ID NO: 143508 - DNA, 20 bp, Artificial Sequence
  Description of Artificial Sequence: Synthetic oligonucleotide
  Target: LAMA2; (+) strand; PAM type: NRG; PAM sequence: GAG
gggaaactatttcaacacta

SEQ ID NO: 143509 - DNA, 20 bp, Artificial Sequence
  Description of Artificial Sequence: Synthetic oligonucleotide
  Target: LAMA2; (+) strand; PAM type: NRG; PAM sequence: AAG
aacactagagctatcatcaa

SEQ ID NO: 143510 - DNA, 20 bp, Artificial Sequence
  Description of Artificial Sequence: Synthetic oligonucleotide
  Target: LAMA2; (+) strand; PAM type: NRG; PAM sequence: GAG
agctatcatcaaaagtcctt

SEQ ID NO: 143511 - DNA, 20 bp, Artificial Sequence
  Description of Artificial Sequence: Synthetic oligonucleotide
  Target: LAMA2; (+) strand; PAM type: NRG; PAM sequence: AAG
tcatcaaaagtccttgagac

SEQ ID NO: 143512 - DNA, 20 bp, Artificial Sequence
  Description of Artificial Sequence: Synthetic oligonucleotide
  Target: LAMA2; (+) strand; PAM type: NRG; PAM sequence: CAG
agtccttgagacaagtaacc

SEQ ID NO: 143513 - DNA, 20 bp, Artificial Sequence
  Description of Artificial Sequence: Synthetic oligonucleotide
  Target: LAMA2; (+) strand; PAM type: NRG; PAM sequence: AGG
gtccttgagacaagtaaccc

SEQ ID NO: 143514 - DNA, 20 bp, Artificial Sequence
  Description of Artificial Sequence: Synthetic oligonucleotide
  Target: LAMA2; (+) strand; PAM type: NRG; PAM sequence: GAG
ccttgagacaagtaacccag

SEQ ID NO: 143515 - DNA, 20 bp, Artificial Sequence
  Description of Artificial Sequence: Synthetic oligonucleotide
  Target: LAMA2; (+) strand; PAM type: NRG; PAM sequence: TGG
tgagacaagtaacccaggag

SEQ ID NO: 143516 - DNA, 20 bp, Artificial Sequence
  Description of Artificial Sequence: Synthetic oligonucleotide
  Target: LAMA2; (+) strand; PAM type: NRG; PAM sequence: TGG
caagtaacccaggagtggaa

SEQ ID NO: 143517 - DNA, 20 bp, Artificial Sequence
  Description of Artificial Sequence: Synthetic oligonucleotide
  Target: LAMA2; (+) strand; PAM type: NRG; PAM sequence: AAG
tggttatgattacactttat

SEQ ID NO: 143518 - DNA, 20 bp, Artificial Sequence
  Description of Artificial Sequence: Synthetic oligonucleotide
  Target: LAMA2; (+) strand; PAM type: NRG; PAM sequence: AAG
actttataagcaaacttaaa

SEQ ID NO: 143519 - DNA, 20 bp, Artificial Sequence
  Description of Artificial Sequence: Synthetic oligonucleotide
  Target: LAMA2; (+) strand; PAM type: NRG; PAM sequence: CAG
aagcaaacttaaaaagatat

SEQ ID NO: 143520 - DNA, 20 bp, Artificial Sequence
  Description of Artificial Sequence: Synthetic oligonucleotide
  Target: LAMA2; (+) strand; PAM type: NRG; PAM sequence: AGG
agcaaacttaaaaagatatc

SEQ ID NO: 143521 - DNA, 20 bp, Artificial Sequence
  Description of Artificial Sequence: Synthetic oligonucleotide
  Target: LAMA2; (+) strand; PAM type: NRG; PAM sequence: GAG
caaacttaaaaagatatcag

SEQ ID NO: 143522 - DNA, 20 bp, Artificial Sequence
  Description of Artificial Sequence: Synthetic oligonucleotide
  Target: LAMA2; (+) strand; PAM type: NRG; PAM sequence: TAG
gatatcaggagctgctttac

SEQ ID NO: 143523 - DNA, 20 bp, Artificial Sequence
  Description of Artificial Sequence: Synthetic oligonucleotide
  Target: LAMA2; (+) strand; PAM type: NRG; PAM sequence: AGG
atatcaggagctgctttact

SEQ ID NO: 143524 - DNA, 20 bp, Artificial Sequence
  Description of Artificial Sequence: Synthetic oligonucleotide
  Target: LAMA2; (+) strand; PAM type: NRG; PAM sequence: AAG
tttactaggcccctgctatg

SEQ ID NO: 143525 - DNA, 20 bp, Artificial Sequence
  Description of Artificial Sequence: Synthetic oligonucleotide
  Target: LAMA2; (+) strand; PAM type: NRG; PAM sequence: TGG
ccctgctatgaagtgaaaac

SEQ ID NO: 143526 - DNA, 20 bp, Artificial Sequence
  Description of Artificial Sequence: Synthetic oligonucleotide
  Target: LAMA2; (+) strand; PAM type: NRG; PAM sequence: GAG
ctgctatgaagtgaaaactg

SEQ ID NO: 143527 - DNA, 20 bp, Artificial Sequence
  Description of Artificial Sequence: Synthetic oligonucleotide
  Target: LAMA2; (+) strand; PAM type: NRG; PAM sequence: CAG
gaaaactggagaaaaatcta

SEQ ID NO: 143528 - DNA, 20 bp, Artificial Sequence
  Description of Artificial Sequence: Synthetic oligonucleotide
  Target: LAMA2; (+) strand; PAM type: NRG; PAM sequence: AAG
ctggagaaaaatctacagca

SEQ ID NO: 143529 - DNA, 20 bp, Artificial Sequence
  Description of Artificial Sequence: Synthetic oligonucleotide
  Target: LAMA2; (+) strand; PAM type: NRG; PAM sequence: TAG
aaatctacagcaaagcattc

SEQ ID NO: 143530 - DNA, 20 bp, Artificial Sequence
  Description of Artificial Sequence: Synthetic oligonucleotide
  Target: LAMA2; (+) strand; PAM type: NRG; PAM sequence: GAG
acagcaaagcattctagcct

SEQ ID NO: 143531 - DNA, 20 bp, Artificial Sequence
  Description of Artificial Sequence: Synthetic oligonucleotide
  Target: LAMA2; (+) strand; PAM type: NRG; PAM sequence: AGG
cagcaaagcattctagcctg

SEQ ID NO: 143532 - DNA, 20 bp, Artificial Sequence
  Description of Artificial Sequence: Synthetic oligonucleotide
  Target: LAMA2; (+) strand; PAM type: NRG; PAM sequence: CAG
atgtgtactattttgcaaca

SEQ ID NO: 143533 - DNA, 20 bp, Artificial Sequence
  Description of Artificial Sequence: Synthetic oligonucleotide
  Target: LAMA2; (+) strand; PAM type: NRG; PAM sequence: CAG
tgtactattttgcaacacag

SEQ ID NO: 143534 - DNA, 20 bp, Artificial Sequence
  Description of Artificial Sequence: Synthetic oligonucleotide
  Target: LAMA2; (+) strand; PAM type: NRG; PAM sequence: CAG
gcaacacagcagactgacta

SEQ ID NO: 143535 - DNA, 20 bp, Artificial Sequence
  Description of Artificial Sequence: Synthetic oligonucleotide
  Target: LAMA2; (+) strand; PAM type: NRG; PAM sequence: TGG
ctacagccaaatattttcat

SEQ ID NO: 143536 - DNA, 20 bp, Artificial Sequence
  Description of Artificial Sequence: Synthetic oligonucleotide
  Target: LAMA2; (+) strand; PAM type: NRG; PAM sequence: TGG
tgttgctcaattctgctacc

SEQ ID NO: 143537 - DNA, 20 bp, Artificial Sequence
  Description of Artificial Sequence: Synthetic oligonucleotide
  Target: LAMA2; (+) strand; PAM type: NRG; PAM sequence: GGG
gttgctcaattctgctacct

SEQ ID NO: 143538 - DNA, 20 bp, Artificial Sequence
  Description of Artificial Sequence: Synthetic oligonucleotide
  Target: LAMA2; (+) strand; PAM type: NRG; PAM sequence: TAG
gctcaattctgctacctggg

SEQ ID NO: 143539 - DNA, 20 bp, Artificial Sequence
  Description of Artificial Sequence: Synthetic oligonucleotide
  Target: LAMA2; (+) strand; PAM type: NRG; PAM sequence: AAG
ctgctacctgggtagtacat

SEQ ID NO: 143540 - DNA, 20 bp, Artificial Sequence
  Description of Artificial Sequence: Synthetic oligonucleotide
  Target: LAMA2; (+) strand; PAM type: NRG; PAM sequence: CAG
catgtaatttaaattctaat

SEQ ID NO: 143541 - DNA, 20 bp, Artificial Sequence
  Description of Artificial Sequence: Synthetic oligonucleotide
  Target: LAMA2; (+) strand; PAM type: NRG; PAM sequence: AGG
atgtaatttaaattctaatc

SEQ ID NO: 143542 - DNA, 20 bp, Artificial Sequence
  Description of Artificial Sequence: Synthetic oligonucleotide
  Target: LAMA2; (+) strand; PAM type: NRG; PAM sequence: GGG
tgtaatttaaattctaatca

SEQ ID NO: 143543 - DNA, 20 bp, Artificial Sequence
  Description of Artificial Sequence: Synthetic oligonucleotide
  Target: LAMA2; (+) strand; PAM type: NRG; PAM sequence: AAG
cctatgatacttattttgca

SEQ ID NO: 143544 - DNA, 20 bp, Artificial Sequence
  Description of Artificial Sequence: Synthetic oligonucleotide
  Target: LAMA2; (+) strand; PAM type: NRG; PAM sequence: AGG
ctatgatacttattttgcaa

SEQ ID NO: 143545 - DNA, 20 bp, Artificial Sequence
  Description of Artificial Sequence: Synthetic oligonucleotide
  Target: LAMA2; (+) strand; PAM type: NRG; PAM sequence: TGG
acttattttgcaaaggaaaa

SEQ ID NO: 143546 - DNA, 20 bp, Artificial Sequence
  Description of Artificial Sequence: Synthetic oligonucleotide
  Target: LAMA2; (+) strand; PAM type: NRG; PAM sequence: CAG
tattttgcaaaggaaaatgg

SEQ ID NO: 143547 - DNA, 20 bp, Artificial Sequence
  Description of Artificial Sequence: Synthetic oligonucleotide
  Target: LAMA2; (+) strand; PAM type: NRG; PAM sequence: TGG
gcaaaggaaaatggcagtcc

SEQ ID NO: 143548 - DNA, 20 bp, Artificial Sequence
  Description of Artificial Sequence: Synthetic oligonucleotide
  Target: LAMA2; (+) strand; PAM type: NRG; PAM sequence: AAG
aggaaaatggcagtcctggc

SEQ ID NO: 143549 - DNA, 20 bp, Artificial Sequence
  Description of Artificial Sequence: Synthetic oligonucleotide
  Target: LAMA2; (+) strand; PAM type: NRG; PAM sequence: AGG
ggaaaatggcagtcctggca

SEQ ID NO: 143550 - DNA, 20 bp, Artificial Sequence
  Description of Artificial Sequence: Synthetic oligonucleotide
  Target: LAMA2; (+) strand; PAM type: NRG; PAM sequence: AAG
ggcagtcctggcaaggttat

SEQ ID NO: 143551 - DNA, 20 bp, Artificial Sequence
  Description of Artificial Sequence: Synthetic oligonucleotide
  Target: LAMA2; (+) strand; PAM type: NRG; PAM sequence: TAG
gtcctggcaaggttataagt

SEQ ID NO: 143552 - DNA, 20 bp, Artificial Sequence
  Description of Artificial Sequence: Synthetic oligonucleotide
  Target: LAMA2; (+) strand; PAM type: NRG; PAM sequence: TAG
ctttgtgtaaatttgttctt

SEQ ID NO: 143553 - DNA, 20 bp, Artificial Sequence
  Description of Artificial Sequence: Synthetic oligonucleotide
  Target: LAMA2; (+) strand; PAM type: NRG; PAM sequence: CAG
atttgttctttagcttcatt

SEQ ID NO: 143554 - DNA, 20 bp, Artificial Sequence
  Description of Artificial Sequence: Synthetic oligonucleotide
  Target: LAMA2; (+) strand; PAM type: NRG; PAM sequence: CAG
ctttagcttcattcagtaat

SEQ ID NO: 143555 - DNA, 20 bp, Artificial Sequence
  Description of Artificial Sequence: Synthetic oligonucleotide
  Target: LAMA2; (+) strand; PAM type: NRG; PAM sequence: AAG
tatttccttattcaaattgt

SEQ ID NO: 143556 - DNA, 20 bp, Artificial Sequence
  Description of Artificial Sequence: Synthetic oligonucleotide
  Target: LAMA2; (+) strand; PAM type: NRG; PAM sequence: GAG
tgtaagtgccttctaaaccc

SEQ ID NO: 143557 - DNA, 20 bp, Artificial Sequence
  Description of Artificial Sequence: Synthetic oligonucleotide
  Target: LAMA2; (+) strand; PAM type: NRG; PAM sequence: GAG
gagcctactactattatgtt

SEQ ID NO: 143558 - DNA, 20 bp, Artificial Sequence
  Description of Artificial Sequence: Synthetic oligonucleotide
  Target: LAMA2; (+) strand; PAM type: NRG; PAM sequence: TGG
actactattatgttgagcca

SEQ ID NO: 143559 - DNA, 20 bp, Artificial Sequence
  Description of Artificial Sequence: Synthetic oligonucleotide
  Target: LAMA2; (+) strand; PAM type: NRG; PAM sequence: GGG
ctactattatgttgagccat

SEQ ID NO: 143560 - DNA, 20 bp, Artificial Sequence
  Description of Artificial Sequence: Synthetic oligonucleotide
  Target: LAMA2; (+) strand; PAM type: NRG; PAM sequence: TAG
ttgccaatatttgactattt

SEQ ID NO: 143561 - DNA, 20 bp, Artificial Sequence
  Description of Artificial Sequence: Synthetic oligonucleotide
  Target: LAMA2; (+) strand; PAM type: NRG; PAM sequence: CAG
tattttagtccattaaaatg

SEQ ID NO: 143562 - DNA, 20 bp, Artificial Sequence
  Description of Artificial Sequence: Synthetic oligonucleotide
  Target: LAMA2; (+) strand; PAM type: NRG; PAM sequence: TGG
cattaaaatgcagtttcata

SEQ ID NO: 143563 - DNA, 20 bp, Artificial Sequence
  Description of Artificial Sequence: Synthetic oligonucleotide
  Target: LAMA2; (+) strand; PAM type: NRG; PAM sequence: AAG
gtttaaactaatatgtgcca

SEQ ID NO: 143564 - DNA, 20 bp, Artificial Sequence
  Description of Artificial Sequence: Synthetic oligonucleotide
  Target: LAMA2; (+) strand; PAM type: NRG; PAM sequence: TAG
aatatgtgccaaagcatgaa

SEQ ID NO: 143565 - DNA, 20 bp, Artificial Sequence
  Description of Artificial Sequence: Synthetic oligonucleotide
  Target: LAMA2; (+) strand; PAM type: NRG; PAM sequence: CAG
agcatgaatagaaatacttg

SEQ ID NO: 143566 - DNA, 20 bp, Artificial Sequence
  Description of Artificial Sequence: Synthetic oligonucleotide
  Target: LAMA2; (+) strand; PAM type: NRG; PAM sequence: AGG
gcatgaatagaaatacttgc

SEQ ID NO: 143567 - DNA, 20 bp, Artificial Sequence
  Description of Artificial Sequence: Synthetic oligonucleotide
  Target: LAMA2; (+) strand; PAM type: NRG; PAM sequence: AAG
acttgcaggaatactgtcct

SEQ ID NO: 143568 - DNA, 20 bp, Artificial Sequence
  Description of Artificial Sequence: Synthetic oligonucleotide
  Target: LAMA2; (+) strand; PAM type: NRG; PAM sequence: CAG
tactgtcctaagtataacct

SEQ ID NO: 143569 - DNA, 20 bp, Artificial Sequence
  Description of Artificial Sequence: Synthetic oligonucleotide
  Target: LAMA2; (+) strand; PAM type: NRG; PAM sequence: CAG
agtataacctcagatgcaca

SEQ ID NO: 143570 - DNA, 20 bp, Artificial Sequence
  Description of Artificial Sequence: Synthetic oligonucleotide
  Target: LAMA2; (+) strand; PAM type: NRG; PAM sequence: TAG
ctcagatgcacacagtattt

SEQ ID NO: 143571 - DNA, 20 bp, Artificial Sequence
  Description of Artificial Sequence: Synthetic oligonucleotide
  Target: LAMA2; (+) strand; PAM type: NRG; PAM sequence: AAG
tgcacacagtattttagcaa

SEQ ID NO: 143572 - DNA, 20 bp, Artificial Sequence
  Description of Artificial Sequence: Synthetic oligonucleotide
  Target: LAMA2; (+) strand; PAM type: NRG; PAM sequence: TGG
tattttagcaaaagtatcaa

SEQ ID NO: 143573 - DNA, 20 bp, Artificial Sequence
  Description of Artificial Sequence: Synthetic oligonucleotide
  Target: LAMA2; (+) strand; PAM type: NRG; PAM sequence: GGG
attttagcaaaagtatcaat

SEQ ID NO: 143574 - DNA, 20 bp, Artificial Sequence
  Description of Artificial Sequence: Synthetic oligonucleotide
  Target: LAMA2; (+) strand; PAM type: NRG; PAM sequence: CAG
caaaagtatcaatgggaaat

SEQ ID NO: 143575 - DNA, 20 bp, Artificial Sequence
  Description of Artificial Sequence: Synthetic oligonucleotide
  Target: LAMA2; (+) strand; PAM type: NRG; PAM sequence: AGG
aaaagtatcaatgggaaatc

SEQ ID NO: 143576 - DNA, 20 bp, Artificial Sequence
  Description of Artificial Sequence: Synthetic oligonucleotide
  Target: LAMA2; (+) strand; PAM type: NRG; PAM sequence: AAG
gtatcaatgggaaatcaggc

SEQ ID NO: 143577 - DNA, 20 bp, Artificial Sequence
  Description of Artificial Sequence: Synthetic oligonucleotide
  Target: LAMA2; (+) strand; PAM type: NRG; PAM sequence: AAG
ctttcactgaaacaatttat

SEQ ID NO: 143578 - DNA, 20 bp, Artificial Sequence
  Description of Artificial Sequence: Synthetic oligonucleotide
  Target: LAMA2; (+) strand; PAM type: NRG; PAM sequence: AAG
gtataataatttattttgtg

SEQ ID NO: 143579 - DNA, 20 bp, Artificial Sequence
  Description of Artificial Sequence: Synthetic oligonucleotide
  Target: LAMA2; (+) strand; PAM type: NRG; PAM sequence: AGG
tataataatttattttgtga

SEQ ID NO: 143580 - DNA, 20 bp, Artificial Sequence
  Description of Artificial Sequence: Synthetic oligonucleotide
  Target: LAMA2; (+) strand; PAM type: NRG; PAM sequence: TAG
aggccttttctttaccaaat

SEQ ID NO: 143581 - DNA, 20 bp, Artificial Sequence
  Description of Artificial Sequence: Synthetic oligonucleotide
  Target: LAMA2; (+) strand; PAM type: NRG; PAM sequence: TGG
tctttaccaaattagtaata

SEQ ID NO: 143582 - DNA, 20 bp, Artificial Sequence
  Description of Artificial Sequence: Synthetic oligonucleotide
  Target: LAMA2; (+) strand; PAM type: NRG; PAM sequence: GAG
gtgaatattaaactaaacct

SEQ ID NO: 143583 - DNA, 20 bp, Artificial Sequence
  Description of Artificial Sequence: Synthetic oligonucleotide
  Target: LAMA2; (+) strand; PAM type: NRG; PAM sequence: TAG
acatttgtttttaaattttg

SEQ ID NO: 143584 - DNA, 20 bp, Artificial Sequence
  Description of Artificial Sequence: Synthetic oligonucleotide
  Target: LAMA2; (+) strand; PAM type: NRG; PAM sequence: AGG
catttgtttttaaattttgt

SEQ ID NO: 143585 - DNA, 20 bp, Artificial Sequence
  Description of Artificial Sequence: Synthetic oligonucleotide
  Target: LAMA2; (+) strand; PAM type: NRG; PAM sequence: GGG
atttgtttttaaattttgta

SEQ ID NO: 143586 - DNA, 20 bp, Artificial Sequence
  Description of Artificial Sequence: Synthetic oligonucleotide
  Target: LAMA2; (+) strand; PAM type: NRG; PAM sequence: AAG
tgtttttaaattttgtaggg

SEQ ID NO: 143587 - DNA, 20 bp, Artificial Sequence
  Description of Artificial Sequence: Synthetic oligonucleotide
  Target: LAMA2; (+) strand; PAM type: NRG; PAM sequence: AGG
gtttttaaattttgtaggga

SEQ ID NO: 143588 - DNA, 20 bp, Artificial Sequence
  Description of Artificial Sequence: Synthetic oligonucleotide
  Target: LAMA2; (+) strand; PAM type: NRG; PAM sequence: GGG
tttttaaattttgtagggaa

SEQ ID NO: 143589 - DNA, 20 bp, Artificial Sequence
  Description of Artificial Sequence: Synthetic oligonucleotide
  Target: LAMA2; (+) strand; PAM type: NRG; PAM sequence: GGG
ttttaaattttgtagggaag

SEQ ID NO: 143590 - DNA, 20 bp, Artificial Sequence
  Description of Artificial Sequence: Synthetic oligonucleotide
  Target: LAMA2; (+) strand; PAM type: NRG; PAM sequence: GGG
tttaaattttgtagggaagg

SEQ ID NO: 143591 - DNA, 20 bp, Artificial Sequence
  Description of Artificial Sequence: Synthetic oligonucleotide
  Target: LAMA2; (+) strand; PAM type: NRG; PAM sequence: GGG
ttaaattttgtagggaaggg

SEQ ID NO: 143592 - DNA, 20 bp, Artificial Sequence
  Description of Artificial Sequence: Synthetic oligonucleotide
  Target: LAMA2; (+) strand; PAM type: NRG; PAM sequence: TAG
ttttgtagggaaggggggaa

SEQ ID NO: 143593 - DNA, 20 bp, Artificial Sequence
  Description of Artificial Sequence: Synthetic oligonucleotide
  Target: LAMA2; (+) strand; PAM type: NRG; PAM sequence: TAG
tagcaaataatattttatgc

SEQ ID NO: 143594 - DNA, 20 bp, Artificial Sequence
  Description of Artificial Sequence: Synthetic oligonucleotide
  Target: LAMA2; (+) strand; PAM type: NRG; PAM sequence: CAG
taatattttatgctagtaat

SEQ ID NO: 143595 - DNA, 20 bp, Artificial Sequence
  Description of Artificial Sequence: Synthetic oligonucleotide
  Target: LAMA2; (+) strand; PAM type: NRG; PAM sequence: AGG
aatattttatgctagtaatc

SEQ ID NO: 143596 - DNA, 20 bp, Artificial Sequence
  Description of Artificial Sequence: Synthetic oligonucleotide
  Target: LAMA2; (+) strand; PAM type: NRG; PAM sequence: CAG
ctagtaatcaggcattatat

SEQ ID NO: 143597 - DNA, 20 bp, Artificial Sequence
  Description of Artificial Sequence: Synthetic oligonucleotide
  Target: LAMA2; (+) strand; PAM type: NRG; PAM sequence: AAG
ggcattatatcagttgttgt

SEQ ID NO: 143598 - DNA, 20 bp, Artificial Sequence
  Description of Artificial Sequence: Synthetic oligonucleotide
  Target: LAMA2; (+) strand; PAM type: NRG; PAM sequence: AGG
gcattatatcagttgttgta

SEQ ID NO: 143599 - DNA, 20 bp, Artificial Sequence
  Description of Artificial Sequence: Synthetic oligonucleotide
  Target: LAMA2; (+) strand; PAM type: NRG; PAM sequence: AAG
tgttgtaaggaactacatga

SEQ ID NO: 143600 - DNA, 20 bp, Artificial Sequence
  Description of Artificial Sequence: Synthetic oligonucleotide
  Target: LAMA2; (+) strand; PAM type: NRG; PAM sequence: TGG
gtaaggaactacatgaaagt

SEQ ID NO: 143601 - DNA, 20 bp, Artificial Sequence
  Description of Artificial Sequence: Synthetic oligonucleotide
  Target: LAMA2; (+) strand; PAM type: NRG; PAM sequence: TGG
aggaactacatgaaagttgg

SEQ ID NO: 143602 - DNA, 20 bp, Artificial Sequence
  Description of Artificial Sequence: Synthetic oligonucleotide
  Target: LAMA2; (+) strand; PAM type: NRG; PAM sequence: CAG
acatgaaagttggtggtata

SEQ ID NO: 143603 - DNA, 20 bp, Artificial Sequence
  Description of Artificial Sequence: Synthetic oligonucleotide
  Target: LAMA2; (+) strand; PAM type: NRG; PAM sequence: AGG
catgaaagttggtggtatac

SEQ ID NO: 143604 - DNA, 20 bp, Artificial Sequence
  Description of Artificial Sequence: Synthetic oligonucleotide
  Target: LAMA2; (+) strand; PAM type: NRG; PAM sequence: CAG
gttggtggtatacaggttac

SEQ ID NO: 143605 - DNA, 20 bp, Artificial Sequence
  Description of Artificial Sequence: Synthetic oligonucleotide
  Target: LAMA2; (+) strand; PAM type: NRG; PAM sequence: TAG
ggtggtatacaggttaccag

SEQ ID NO: 143606 - DNA, 20 bp, Artificial Sequence
  Description of Artificial Sequence: Synthetic oligonucleotide
  Target: LAMA2; (+) strand; PAM type: NRG; PAM sequence: AAG
gtatacaggttaccagtagt

SEQ ID NO: 143607 - DNA, 20 bp, Artificial Sequence
  Description of Artificial Sequence: Synthetic oligonucleotide
  Target: LAMA2; (+) strand; PAM type: NRG; PAM sequence: TGG
caggttaccagtagtaagtt

SEQ ID NO: 143608 - DNA, 20 bp, Artificial Sequence
  Description of Artificial Sequence: Synthetic oligonucleotide
  Target: LAMA2; (+) strand; PAM type: NRG; PAM sequence: GGG
aggttaccagtagtaagttt

SEQ ID NO: 143609 - DNA, 20 bp, Artificial Sequence
  Description of Artificial Sequence: Synthetic oligonucleotide
  Target: LAMA2; (+) strand; PAM type: NRG; PAM sequence: TGG
gtttgggaactgtgttgttt

SEQ ID NO: 143610 - DNA, 20 bp, Artificial Sequence
  Description of Artificial Sequence: Synthetic oligonucleotide
  Target: LAMA2; (+) strand; PAM type: NRG; PAM sequence: CAG
aactgtgttgttttggctca

SEQ ID NO: 143611 - DNA, 20 bp, Artificial Sequence
  Description of Artificial Sequence: Synthetic oligonucleotide
  Target: LAMA2; (+) strand; PAM type: NRG; PAM sequence: AAG
gttttggctcacagaatata

SEQ ID NO: 143612 - DNA, 20 bp, Artificial Sequence
  Description of Artificial Sequence: Synthetic oligonucleotide
  Target: LAMA2; (+) strand; PAM type: NRG; PAM sequence: TAG
tatatacctgtgtttccaca

SEQ ID NO: 143613 - DNA, 20 bp, Artificial Sequence
  Description of Artificial Sequence: Synthetic oligonucleotide
  Target: LAMA2; (+) strand; PAM type: NRG; PAM sequence: TAG
gtattgtataatcacatgtg

SEQ ID NO: 143614 - DNA, 20 bp, Artificial Sequence
  Description of Artificial Sequence: Synthetic oligonucleotide
  Target: LAMA2; (+) strand; PAM type: NRG; PAM sequence: TGG
gtgtagatgttcattgtatc

SEQ ID NO: 143615 - DNA, 20 bp, Artificial Sequence
  Description of Artificial Sequence: Synthetic oligonucleotide
  Target: LAMA2; (+) strand; PAM type: NRG; PAM sequence: GAG
gtagatgttcattgtatctg

SEQ ID NO: 143616 - DNA, 20 bp, Artificial Sequence
  Description of Artificial Sequence: Synthetic oligonucleotide
  Target: LAMA2; (+) strand; PAM type: NRG; PAM sequence: CAG
gttcattgtatctggagtga

SEQ ID NO: 143617 - DNA, 20 bp, Artificial Sequence
  Description of Artificial Sequence: Synthetic oligonucleotide
  Target: LAMA2; (+) strand; PAM type: NRG; PAM sequence: TAG
gagtgacagttgacaccttt

SEQ ID NO: 143618 - DNA, 20 bp, Artificial Sequence
  Description of Artificial Sequence: Synthetic oligonucleotide
  Target: LAMA2; (+) strand; PAM type: NRG; PAM sequence: AGG
agtgacagttgacacctttt

SEQ ID NO: 143619 - DNA, 20 bp, Artificial Sequence
  Description of Artificial Sequence: Synthetic oligonucleotide
  Target: LAMA2; (+) strand; PAM type: NRG; PAM sequence: GGG
gtgacagttgacacctttta

SEQ ID NO: 143620 - DNA, 20 bp, Artificial Sequence
  Description of Artificial Sequence: Synthetic oligonucleotide
  Target: LAMA2; (+) strand; PAM type: NRG; PAM sequence: GGG
tgacagttgacaccttttag

SEQ ID NO: 143621 - DNA, 20 bp, Artificial Sequence
  Description of Artificial Sequence: Synthetic oligonucleotide
  Target: LAMA2; (+) strand; PAM type: NRG; PAM sequence: CAG
taaaacctgacatccactta

SEQ ID NO: 143622 - DNA, 20 bp, Artificial Sequence
  Description of Artificial Sequence: Synthetic oligonucleotide
  Target: LAMA2; (+) strand; PAM type: NRG; PAM sequence: CAG
cacttatctactactctctt

SEQ ID NO: 143623 - DNA, 20 bp, Artificial Sequence
  Description of Artificial Sequence: Synthetic oligonucleotide
  Target: LAMA2; (+) strand; PAM type: NRG; PAM sequence: AGG
acttatctactactctcttc

SEQ ID NO: 143624 - DNA, 20 bp, Artificial Sequence
  Description of Artificial Sequence: Synthetic oligonucleotide
  Target: LAMA2; (+) strand; PAM type: NRG; PAM sequence: AAG
ggataaactacctttattgc

SEQ ID NO: 143625 - DNA, 20 bp, Artificial Sequence
  Description of Artificial Sequence: Synthetic oligonucleotide
  Target: LAMA2; (+) strand; PAM type: NRG; PAM sequence: TAG
agacttttgctaaaaattct

SEQ ID NO: 143626 - DNA, 20 bp, Artificial Sequence
  Description of Artificial Sequence: Synthetic oligonucleotide
  Target: LAMA2; (+) strand; PAM type: NRG; PAM sequence: AAG
aaaaattcttagattatgtc

SEQ ID NO: 143627 - DNA, 20 bp, Artificial Sequence
  Description of Artificial Sequence: Synthetic oligonucleotide
  Target: LAMA2; (+) strand; PAM type: NRG; PAM sequence: AGG
aaaattcttagattatgtca

SEQ ID NO: 143628 - DNA, 20 bp, Artificial Sequence
  Description of Artificial Sequence: Synthetic oligonucleotide
  Target: LAMA2; (+) strand; PAM type: NRG; PAM sequence: GGG
aaattcttagattatgtcaa

SEQ ID NO: 143629 - DNA, 20 bp, Artificial Sequence
  Description of Artificial Sequence: Synthetic oligonucleotide
  Target: LAMA2; (+) strand; PAM type: NRG; PAM sequence: AAG
aaatcctctattgcttttta

SEQ ID NO: 143630 - DNA, 20 bp, Artificial Sequence
  Description of Artificial Sequence: Synthetic oligonucleotide
  Target: LAMA2; (+) strand; PAM type: NRG; PAM sequence: CAG
ctttttaaagaaaaaattat

SEQ ID NO: 143631 - DNA, 20 bp, Artificial Sequence
  Description of Artificial Sequence: Synthetic oligonucleotide
  Target: LAMA2; (+) strand; PAM type: NRG; PAM sequence: TAG
gttattttttatctccacat

SEQ ID NO: 143632 - DNA, 20 bp, Artificial Sequence
  Description of Artificial Sequence: Synthetic oligonucleotide
  Target: LAMA2; (+) strand; PAM type: NRG; PAM sequence: CAG
tccacattagtttgttattt

SEQ ID NO: 143633 - DNA, 20 bp, Artificial Sequence
  Description of Artificial Sequence: Synthetic oligonucleotide
  Target: LAMA2; (+) strand; PAM type: NRG; PAM sequence: TGG
acattagtttgttatttcag

SEQ ID NO: 143634 - DNA, 20 bp, Artificial Sequence
  Description of Artificial Sequence: Synthetic oligonucleotide
  Target: LAMA2; (+) strand; PAM type: NRG; PAM sequence: CAG
tgttatttcagtggttattt

SEQ ID NO: 143635 - DNA, 20 bp, Artificial Sequence
  Description of Artificial Sequence: Synthetic oligonucleotide
  Target: LAMA2; (+) strand; PAM type: NRG; PAM sequence: AAG
ttcagtggttatttcagtta

SEQ ID NO: 143636 - DNA, 20 bp, Artificial Sequence
  Description of Artificial Sequence: Synthetic oligonucleotide
  Target: LAMA2; (+) strand; PAM type: NRG; PAM sequence: TAG
cattgtatccatttatctca

SEQ ID NO: 143637 - DNA, 20 bp, Artificial Sequence
  Description of Artificial Sequence: Synthetic oligonucleotide
  Target: LAMA2; (+) strand; PAM type: NRG; PAM sequence: AAG
gtatccatttatctcataga

SEQ ID NO: 143638 - DNA, 20 bp, Artificial Sequence
  Description of Artificial Sequence: Synthetic oligonucleotide
  Target: LAMA2; (+) strand; PAM type: NRG; PAM sequence: TAG
gataaacttttgtgttgaat

SEQ ID NO: 143639 - DNA, 20 bp, Artificial Sequence
  Description of Artificial Sequence: Synthetic oligonucleotide
  Target: LAMA2; (+) strand; PAM type: NRG; PAM sequence: TGG
cttttgtgttgaattagctg

SEQ ID NO: 143640 - DNA, 20 bp, Artificial Sequence
  Description of Artificial Sequence: Synthetic oligonucleotide
  Target: LAMA2; (+) strand; PAM type: NRG; PAM sequence: AAG
ttgtgttgaattagctgtgg

SEQ ID NO: 143641 - DNA, 20 bp, Artificial Sequence
  Description of Artificial Sequence: Synthetic oligonucleotide
  Target: LAMA2; (+) strand; PAM type: NRG; PAM sequence: CAG
ttgaattagctgtggaagac

SEQ ID NO: 143642 - DNA, 20 bp, Artificial Sequence
  Description of Artificial Sequence: Synthetic oligonucleotide
  Target: LAMA2; (+) strand; PAM type: NRG; PAM sequence: AAG
ctcacacattaatcactact

SEQ ID NO: 143643 - DNA, 20 bp, Artificial Sequence
  Description of Artificial Sequence: Synthetic oligonucleotide
  Target: LAMA2; (+) strand; PAM type: NRG; PAM sequence: AAG
taagcaaatgcgttacaaaa

SEQ ID NO: 143644 - DNA, 20 bp, Artificial Sequence
  Description of Artificial Sequence: Synthetic oligonucleotide
  Target: LAMA2; (+) strand; PAM type: NRG; PAM sequence: GAG
agcaaatgcgttacaaaaaa

SEQ ID NO: 143645 - DNA, 20 bp, Artificial Sequence
  Description of Artificial Sequence: Synthetic oligonucleotide
  Target: LAMA2; (+) strand; PAM type: NRG; PAM sequence: GAG
caaatgcgttacaaaaaaga

SEQ ID NO: 143646 - DNA, 20 bp, Artificial Sequence
  Description of Artificial Sequence: Synthetic oligonucleotide
  Target: LAMA2; (+) strand; PAM type: NRG; PAM sequence: AGG
aaatgcgttacaaaaaagag

SEQ ID NO: 143647 - DNA, 20 bp, Artificial Sequence
  Description of Artificial Sequence: Synthetic oligonucleotide
  Target: LAMA2; (+) strand; PAM type: NRG; PAM sequence: GAG
aaagagaggacaacaaaaat

SEQ ID NO: 143648 - DNA, 20 bp, Artificial Sequence
  Description of Artificial Sequence: Synthetic oligonucleotide
  Target: LAMA2; (+) strand; PAM type: NRG; PAM sequence: TGG
agaggacaacaaaaatgagc

SEQ ID NO: 143649 - DNA, 20 bp, Artificial Sequence
  Description of Artificial Sequence: Synthetic oligonucleotide
  Target: LAMA2; (+) strand; PAM type: NRG; PAM sequence: CAG
aacaaaaatgagctggaata

SEQ ID NO: 143650 - DNA, 20 bp, Artificial Sequence
  Description of Artificial Sequence: Synthetic oligonucleotide
  Target: LAMA2; (+) strand; PAM type: NRG; PAM sequence: CAG
aatgagctggaatacagttt

SEQ ID NO: 143651 - DNA, 20 bp, Artificial Sequence
  Description of Artificial Sequence: Synthetic oligonucleotide
  Target: LAMA2; (+) strand; PAM type: NRG; PAM sequence: TGG
gatatcatgaataaatttct

SEQ ID NO: 143652 - DNA, 20 bp, Artificial Sequence
  Description of Artificial Sequence: Synthetic oligonucleotide
  Target: LAMA2; (+) strand; PAM type: NRG; PAM sequence: GGG
atatcatgaataaatttctt

SEQ ID NO: 143653 - DNA, 20 bp, Artificial Sequence
  Description of Artificial Sequence: Synthetic oligonucleotide
  Target: LAMA2; (+) strand; PAM type: NRG; PAM sequence: TAG
ataaatttcttgggtatatg

SEQ ID NO: 143654 - DNA, 20 bp, Artificial Sequence
  Description of Artificial Sequence: Synthetic oligonucleotide
  Target: LAMA2; (+) strand; PAM type: NRG; PAM sequence: CAG
atttcttgggtatatgtagc

SEQ ID NO: 143655 - DNA, 20 bp, Artificial Sequence
  Description of Artificial Sequence: Synthetic oligonucleotide
  Target: LAMA2; (+) strand; PAM type: NRG; PAM sequence: AAG
cttgggtatatgtagccagt

SEQ ID NO: 143656 - DNA, 20 bp, Artificial Sequence
  Description of Artificial Sequence: Synthetic oligonucleotide
  Target: LAMA2; (+) strand; PAM type: NRG; PAM sequence: TAG
gggtatatgtagccagtaag

SEQ ID NO: 143657 - DNA, 20 bp, Artificial Sequence
  Description of Artificial Sequence: Synthetic oligonucleotide
  Target: LAMA2; (+) strand; PAM type: NRG; PAM sequence: TAG
agtaagtagacctcaacatt

SEQ ID NO: 143658 - DNA, 20 bp, Artificial Sequence
  Description of Artificial Sequence: Synthetic oligonucleotide
  Target: LAMA2; (+) strand; PAM type: NRG; PAM sequence: GAG
tttttcaataaataaatatt

SEQ ID NO: 143659 - DNA, 20 bp, Artificial Sequence
  Description of Artificial Sequence: Synthetic oligonucleotide
  Target: LAMA2; (+) strand; PAM type: NRG; PAM sequence: TGG
aatattgagcactgtcttta

SEQ ID NO: 143660 - DNA, 20 bp, Artificial Sequence
  Description of Artificial Sequence: Synthetic oligonucleotide
  Target: LAMA2; (+) strand; PAM type: NRG; PAM sequence: TAG
ctttatggcaaacactgtct

SEQ ID NO: 143661 - DNA, 20 bp, Artificial Sequence
  Description of Artificial Sequence: Synthetic oligonucleotide
  Target: LAMA2; (+) strand; PAM type: NRG; PAM sequence: AGG
tttatggcaaacactgtctt

SEQ ID NO: 143662 - DNA, 20 bp, Artificial Sequence
  Description of Artificial Sequence: Synthetic oligonucleotide
  Target: LAMA2; (+) strand; PAM type: NRG; PAM sequence: CAG
ggcaaacactgtcttaggtg

SEQ ID NO: 143663 - DNA, 20 bp, Artificial Sequence
  Description of Artificial Sequence: Synthetic oligonucleotide
  Target: LAMA2; (+) strand; PAM type: NRG; PAM sequence: AGG
gcaaacactgtcttaggtgc

SEQ ID NO: 143664 - DNA, 20 bp, Artificial Sequence
  Description of Artificial Sequence: Synthetic oligonucleotide
  Target: LAMA2; (+) strand; PAM type: NRG; PAM sequence: GGG
caaacactgtcttaggtgca

SEQ ID NO: 143665 - DNA, 20 bp, Artificial Sequence
  Description of Artificial Sequence: Synthetic oligonucleotide
  Target: LAMA2; (+) strand; PAM type: NRG; PAM sequence: GGG
aaacactgtcttaggtgcag

SEQ ID NO: 143666 - DNA, 20 bp, Artificial Sequence
  Description of Artificial Sequence: Synthetic oligonucleotide
  Target: LAMA2; (+) strand; PAM type: NRG; PAM sequence: TGG
gtcttaggtgcaggggataa

SEQ ID NO: 143667 - DNA, 20 bp, Artificial Sequence
  Description of Artificial Sequence: Synthetic oligonucleotide
  Target: LAMA2; (+) strand; PAM type: NRG; PAM sequence: TGG
gataatggacattatgcttt

SEQ ID NO: 143668 - DNA, 20 bp, Artificial Sequence
  Description of Artificial Sequence: Synthetic oligonucleotide
  Target: LAMA2; (+) strand; PAM type: NRG; PAM sequence: GGG
ataatggacattatgctttt

SEQ ID NO: 143669 - DNA, 20 bp, Artificial Sequence
  Description of Artificial Sequence: Synthetic oligonucleotide
  Target: LAMA2; (+) strand; PAM type: NRG; PAM sequence: GGG
taatggacattatgcttttg

SEQ ID NO: 143670 - DNA, 20 bp, Artificial Sequence
  Description of Artificial Sequence: Synthetic oligonucleotide
  Target: LAMA2; (+) strand; PAM type: NRG; PAM sequence: GGG
aatggacattatgcttttgg

SEQ ID NO: 143671 - DNA, 20 bp, Artificial Sequence
  Description of Artificial Sequence: Synthetic oligonucleotide
  Target: LAMA2; (+) strand; PAM type: NRG; PAM sequence: TAG
acattatgcttttgggggat

SEQ ID NO: 143672 - DNA, 20 bp, Artificial Sequence
  Description of Artificial Sequence: Synthetic oligonucleotide
  Target: LAMA2; (+) strand; PAM type: NRG; PAM sequence: AAG
atgcttttgggggattagat

SEQ ID NO: 143673 - DNA, 20 bp, Artificial Sequence
  Description of Artificial Sequence: Synthetic oligonucleotide
  Target: LAMA2; (+) strand; PAM type: NRG; PAM sequence: GAG
gcttttgggggattagataa

SEQ ID NO: 143674 - DNA, 20 bp, Artificial Sequence
  Description of Artificial Sequence: Synthetic oligonucleotide
  Target: LAMA2; (+) strand; PAM type: NRG; PAM sequence: GAG
ttttgggggattagataaga

SEQ ID NO: 143675 - DNA, 20 bp, Artificial Sequence
  Description of Artificial Sequence: Synthetic oligonucleotide
  Target: LAMA2; (+) strand; PAM type: NRG; PAM sequence: AGG
tttgggggattagataagag

SEQ ID NO: 143676 - DNA, 20 bp, Artificial Sequence
  Description of Artificial Sequence: Synthetic oligonucleotide
  Target: LAMA2; (+) strand; PAM type: NRG; PAM sequence: AAG
gattagataagagaggaaat

SEQ ID NO: 143677 - DNA, 20 bp, Artificial Sequence
  Description of Artificial Sequence: Synthetic oligonucleotide
  Target: LAMA2; (+) strand; PAM type: NRG; PAM sequence: CAG
agataagagaggaaataagt

SEQ ID NO: 143678 - DNA, 20 bp, Artificial Sequence
  Description of Artificial Sequence: Synthetic oligonucleotide
  Target: LAMA2; (+) strand; PAM type: NRG; PAM sequence: GAG
ataagagaggaaataagtca

SEQ ID NO: 143679 - DNA, 20 bp, Artificial Sequence
  Description of Artificial Sequence: Synthetic oligonucleotide
  Target: LAMA2; (+) strand; PAM type: NRG; PAM sequence: AAG
agaggaaataagtcagagaa

SEQ ID NO: 143680 - DNA, 20 bp, Artificial Sequence
  Description of Artificial Sequence: Synthetic oligonucleotide
  Target: LAMA2; (+) strand; PAM type: NRG; PAM sequence: TAG
taagtcagagaaaagatctc

SEQ ID NO: 143681 - DNA, 20 bp, Artificial Sequence
  Description of Artificial Sequence: Synthetic oligonucleotide
  Target: LAMA2; (+) strand; PAM type: NRG; PAM sequence: CAG
cagagaaaagatctctagca

SEQ ID NO: 143682 - DNA, 20 bp, Artificial Sequence
  Description of Artificial Sequence: Synthetic oligonucleotide
  Target: LAMA2; (+) strand; PAM type: NRG; PAM sequence: AAG
aaaagatctctagcacagaa

SEQ ID NO: 143683 - DNA, 20 bp, Artificial Sequence
  Description of Artificial Sequence: Synthetic oligonucleotide
  Target: LAMA2; (+) strand; PAM type: NRG; PAM sequence: TGG
atctctagcacagaaaagtc

SEQ ID NO: 143684 - DNA, 20 bp, Artificial Sequence
  Description of Artificial Sequence: Synthetic oligonucleotide
  Target: LAMA2; (+) strand; PAM type: NRG; PAM sequence: AAG
gcacagaaaagtctggttac

SEQ ID NO: 143685 - DNA, 20 bp, Artificial Sequence
  Description of Artificial Sequence: Synthetic oligonucleotide
  Target: LAMA2; (+) strand; PAM type: NRG; PAM sequence: CAG
aaagtctggttacaagatta

SEQ ID NO: 143686 - DNA, 20 bp, Artificial Sequence
  Description of Artificial Sequence: Synthetic oligonucleotide
  Target: LAMA2; (+) strand; PAM type: NRG; PAM sequence: GAG
agtctggttacaagattaca

SEQ ID NO: 143687 - DNA, 20 bp, Artificial Sequence
  Description of Artificial Sequence: Synthetic oligonucleotide
  Target: LAMA2; (+) strand; PAM type: NRG; PAM sequence: GAG
tctggttacaagattacaga

SEQ ID NO: 143688 - DNA, 20 bp, Artificial Sequence
  Description of Artificial Sequence: Synthetic oligonucleotide
  Target: LAMA2; (+) strand; PAM type: NRG; PAM sequence: GAG
tggttacaagattacagaga

SEQ ID NO: 143689 - DNA, 20 bp, Artificial Sequence
  Description of Artificial Sequence: Synthetic oligonucleotide
  Target: LAMA2; (+) strand; PAM type: NRG; PAM sequence: GAG
gttacaagattacagagaga

SEQ ID NO: 143690 - DNA, 20 bp, Artificial Sequence
  Description of Artificial Sequence: Synthetic oligonucleotide
  Target: LAMA2; (+) strand; PAM type: NRG; PAM sequence: GAG
tacaagattacagagagaga

SEQ ID NO: 143691 - DNA, 20 bp, Artificial Sequence
  Description of Artificial Sequence: Synthetic oligonucleotide
  Target: LAMA2; (+) strand; PAM type: NRG; PAM sequence: TAG
gagagagaaaaaaaaaactg

SEQ ID NO: 143692 - DNA, 20 bp, Artificial Sequence
  Description of Artificial Sequence: Synthetic oligonucleotide
  Target: LAMA2; (+) strand; PAM type: NRG; PAM sequence: TAG
aaaaactgtagtgacttgtc

SEQ ID NO: 143693 - DNA, 20 bp, Artificial Sequence
  Description of Artificial Sequence: Synthetic oligonucleotide
  Target: LAMA2; (+) strand; PAM type: NRG; PAM sequence: AGG
aaaactgtagtgacttgtct

SEQ ID NO: 143694 - DNA, 20 bp, Artificial Sequence
  Description of Artificial Sequence: Synthetic oligonucleotide
  Target: LAMA2; (+) strand; PAM type: NRG; PAM sequence: GGG
aaactgtagtgacttgtcta

SEQ ID NO: 143695 - DNA, 20 bp, Artificial Sequence
  Description of Artificial Sequence: Synthetic oligonucleotide
  Target: LAMA2; (+) strand; PAM type: NRG; PAM sequence: TGG
gacttgtctagggaactgtg

SEQ ID NO: 143696 - DNA, 20 bp, Artificial Sequence
  Description of Artificial Sequence: Synthetic oligonucleotide
  Target: LAMA2; (+) strand; PAM type: NRG; PAM sequence: TAG
ggaactgtgtggttgccaca

SEQ ID NO: 143697 - DNA, 20 bp, Artificial Sequence
  Description of Artificial Sequence: Synthetic oligonucleotide
  Target: LAMA2; (+) strand; PAM type: NRG; PAM sequence: TGG
tggttgccacatagaaaatg

SEQ ID NO: 143698 - DNA, 20 bp, Artificial Sequence
  Description of Artificial Sequence: Synthetic oligonucleotide
  Target: LAMA2; (+) strand; PAM type: NRG; PAM sequence: AAG
ttgccacatagaaaatgtgg

SEQ ID NO: 143699 - DNA, 20 bp, Artificial Sequence
  Description of Artificial Sequence: Synthetic oligonucleotide
  Target: LAMA2; (+) strand; PAM type: NRG; PAM sequence: AGG
tgccacatagaaaatgtgga

SEQ ID NO: 143700 - DNA, 20 bp, Artificial Sequence
  Description of Artificial Sequence: Synthetic oligonucleotide
  Target: LAMA2; (+) strand; PAM type: NRG; PAM sequence: GGG
gccacatagaaaatgtggaa

SEQ ID NO: 143701 - DNA, 20 bp, Artificial Sequence
  Description of Artificial Sequence: Synthetic oligonucleotide
  Target: LAMA2; (+) strand; PAM type: NRG; PAM sequence: GAG
cacatagaaaatgtggaagg

SEQ ID NO: 143702 - DNA, 20 bp, Artificial Sequence
  Description of Artificial Sequence: Synthetic oligonucleotide
  Target: LAMA2; (+) strand; PAM type: NRG; PAM sequence: TGG
gaaaatgtggaagggagtga

SEQ ID NO: 143703 - DNA, 20 bp, Artificial Sequence
  Description of Artificial Sequence: Synthetic oligonucleotide
  Target: LAMA2; (+) strand; PAM type: NRG; PAM sequence: GGG
aaaatgtggaagggagtgat

SEQ ID NO: 143704 - DNA, 20 bp, Artificial Sequence
  Description of Artificial Sequence: Synthetic oligonucleotide
  Target: LAMA2; (+) strand; PAM type: NRG; PAM sequence: GAG
aatgtggaagggagtgatgg

SEQ ID NO: 143705 - DNA, 20 bp, Artificial Sequence
  Description of Artificial Sequence: Synthetic oligonucleotide
  Target: LAMA2; (+) strand; PAM type: NRG; PAM sequence: CAG
tggaagggagtgatgggaga

SEQ ID NO: 143706 - DNA, 20 bp, Artificial Sequence
  Description of Artificial Sequence: Synthetic oligonucleotide
  Target: LAMA2; (+) strand; PAM type: NRG; PAM sequence: AGG
ggaagggagtgatgggagac

SEQ ID NO: 143707 - DNA, 20 bp, Artificial Sequence
  Description of Artificial Sequence: Synthetic oligonucleotide
  Target: LAMA2; (+) strand; PAM type: NRG; PAM sequence: TAG
tgggagacaggctatgttcc

SEQ ID NO: 143708 - DNA, 20 bp, Artificial Sequence
  Description of Artificial Sequence: Synthetic oligonucleotide
  Target: LAMA2; (+) strand; PAM type: NRG; PAM sequence: GAG
actgaataactgaataaatt

SEQ ID NO: 143709 - DNA, 20 bp, Artificial Sequence
  Description of Artificial Sequence: Synthetic oligonucleotide
  Target: LAMA2; (+) strand; PAM type: NRG; PAM sequence: TAG
gaataactgaataaattgag

SEQ ID NO: 143710 - DNA, 20 bp, Artificial Sequence
  Description of Artificial Sequence: Synthetic oligonucleotide
  Target: LAMA2; (+) strand; PAM type: NRG; PAM sequence: GAG
ataactgaataaattgagta

SEQ ID NO: 143711 - DNA, 20 bp, Artificial Sequence
  Description of Artificial Sequence: Synthetic oligonucleotide
  Target: LAMA2; (+) strand; PAM type: NRG; PAM sequence: GAG
aactgaataaattgagtaga

SEQ ID NO: 143712 - DNA, 20 bp, Artificial Sequence
  Description of Artificial Sequence: Synthetic oligonucleotide
  Target: LAMA2; (+) strand; PAM type: NRG; PAM sequence: AGG
actgaataaattgagtagag

SEQ ID NO: 143713 - DNA, 20 bp, Artificial Sequence
  Description of Artificial Sequence: Synthetic oligonucleotide
  Target: LAMA2; (+) strand; PAM type: NRG; PAM sequence: CAG
gcttgtaccaaactgtaaaa

SEQ ID NO: 143714 - DNA, 20 bp, Artificial Sequence
  Description of Artificial Sequence: Synthetic oligonucleotide
  Target: LAMA2; (+) strand; PAM type: NRG; PAM sequence: CAG
accaaactgtaaaacagttt

SEQ ID NO: 143715 - DNA, 20 bp, Artificial Sequence
  Description of Artificial Sequence: Synthetic oligonucleotide
  Target: LAMA2; (+) strand; PAM type: NRG; PAM sequence: AGG
ccaaactgtaaaacagtttc

SEQ ID NO: 143716 - DNA, 20 bp, Artificial Sequence
  Description of Artificial Sequence: Synthetic oligonucleotide
  Target: LAMA2; (+) strand; PAM type: NRG; PAM sequence: GAG
ctgtaaaacagtttcaggat

SEQ ID NO: 143717 - DNA, 20 bp, Artificial Sequence
  Description of Artificial Sequence: Synthetic oligonucleotide
  Target: LAMA2; (+) strand; PAM type: NRG; PAM sequence: TAG
ttacattttaaacatacact

SEQ ID NO: 143718 - DNA, 20 bp, Artificial Sequence
  Description of Artificial Sequence: Synthetic oligonucleotide
  Target: LAMA2; (+) strand; PAM type: NRG; PAM sequence: AGG
tacattttaaacatacactt

SEQ ID NO: 143719 - DNA, 20 bp, Artificial Sequence
  Description of Artificial Sequence: Synthetic oligonucleotide
  Target: LAMA2; (+) strand; PAM type: NRG; PAM sequence: GGG
acattttaaacatacactta

SEQ ID NO: 143720 - DNA, 20 bp, Artificial Sequence
  Description of Artificial Sequence: Synthetic oligonucleotide
  Target: LAMA2; (+) strand; PAM type: NRG; PAM sequence: CAG
aaaacaaaacacctgccttg

SEQ ID NO: 143721 - DNA, 20 bp, Artificial Sequence
  Description of Artificial Sequence: Synthetic oligonucleotide
  Target: LAMA2; (+) strand; PAM type: NRG; PAM sequence: TAG
tgccttgcagaaacatgtca

SEQ ID NO: 143722 - DNA, 20 bp, Artificial Sequence
  Description of Artificial Sequence: Synthetic oligonucleotide
  Target: LAMA2; (+) strand; PAM type: NRG; PAM sequence: CAG
gcagaaacatgtcatagaaa

SEQ ID NO: 143723 - DNA, 20 bp, Artificial Sequence
  Description of Artificial Sequence: Synthetic oligonucleotide
  Target: LAMA2; (+) strand; PAM type: NRG; PAM sequence: TAG
catgtcatagaaacagattt

SEQ ID NO: 143724 - DNA, 20 bp, Artificial Sequence
  Description of Artificial Sequence: Synthetic oligonucleotide
  Target: LAMA2; (+) strand; PAM type: NRG; PAM sequence: AGG
atgtcatagaaacagatttt

SEQ ID NO: 143725 - DNA, 20 bp, Artificial Sequence
  Description of Artificial Sequence: Synthetic oligonucleotide
  Target: LAMA2; (+) strand; PAM type: NRG; PAM sequence: CAG
tcatagaaacagattttagg

SEQ ID NO: 143726 - DNA, 20 bp, Artificial Sequence
  Description of Artificial Sequence: Synthetic oligonucleotide
  Target: LAMA2; (+) strand; PAM type: NRG; PAM sequence: AAG
cctgtacaacaattgtgatt

SEQ ID NO: 143727 - DNA, 20 bp, Artificial Sequence
  Description of Artificial Sequence: Synthetic oligonucleotide
  Target: LAMA2; (+) strand; PAM type: NRG; PAM sequence: AAG
taagtaaatgttaaaataaa

SEQ ID NO: 143728 - DNA, 20 bp, Artificial Sequence
  Description of Artificial Sequence: Synthetic oligonucleotide
  Target: LAMA2; (+) strand; PAM type: NRG; PAM sequence: AAG
gtaaatgttaaaataaaaag

SEQ ID NO: 143729 - DNA, 20 bp, Artificial Sequence
  Description of Artificial Sequence: Synthetic oligonucleotide
  Target: LAMA2; (+) strand; PAM type: NRG; PAM sequence: AGG
taaatgttaaaataaaaaga

SEQ ID NO: 143730 - DNA, 20 bp, Artificial Sequence
  Description of Artificial Sequence: Synthetic oligonucleotide
  Target: LAMA2; (+) strand; PAM type: NRG; PAM sequence: TAG
aaaataaaaagaaggatgtt

SEQ ID NO: 143731 - DNA, 20 bp, Artificial Sequence
  Description of Artificial Sequence: Synthetic oligonucleotide
  Target: LAMA2; (+) strand; PAM type: NRG; PAM sequence: CAG
ataaaaagaaggatgtttag

SEQ ID NO: 143732 - DNA, 20 bp, Artificial Sequence
  Description of Artificial Sequence: Synthetic oligonucleotide
  Target: LAMA2; (+) strand; PAM type: NRG; PAM sequence: AAG
agaaggatgtttagcagcat

SEQ ID NO: 143733 - DNA, 20 bp, Artificial Sequence
  Description of Artificial Sequence: Synthetic oligonucleotide
  Target: LAMA2; (+) strand; PAM type: NRG; PAM sequence: AGG
gaaggatgtttagcagcata

SEQ ID NO: 143734 - DNA, 20 bp, Artificial Sequence
  Description of Artificial Sequence: Synthetic oligonucleotide
  Target: LAMA2; (+) strand; PAM type: NRG; PAM sequence: TAG
atgtttagcagcataaggaa

SEQ ID NO: 143735 - DNA, 20 bp, Artificial Sequence
  Description of Artificial Sequence: Synthetic oligonucleotide
  Target: LAMA2; (+) strand; PAM type: NRG; PAM sequence: TGG
gcataaggaatagaaacatt

SEQ ID NO: 143736 - DNA, 20 bp, Artificial Sequence
  Description of Artificial Sequence: Synthetic oligonucleotide
  Target: LAMA2; (+) strand; PAM type: NRG; PAM sequence: GAG
ataaggaatagaaacatttg

SEQ ID NO: 143737 - DNA, 20 bp, Artificial Sequence
  Description of Artificial Sequence: Synthetic oligonucleotide
  Target: LAMA2; (+) strand; PAM type: NRG; PAM sequence: TAG
aatagaaacatttggagttt

SEQ ID NO: 143738 - DNA, 20 bp, Artificial Sequence
  Description of Artificial Sequence: Synthetic oligonucleotide
  Target: LAMA2; (+) strand; PAM type: NRG; PAM sequence: TAG
aacatttggagttttagctt

SEQ ID NO: 143739 - DNA, 20 bp, Artificial Sequence
  Description of Artificial Sequence: Synthetic oligonucleotide
  Target: LAMA2; (+) strand; PAM type: NRG; PAM sequence: TGG
ttccaacaatgtttacataa

SEQ ID NO: 143740 - DNA, 20 bp, Artificial Sequence
  Description of Artificial Sequence: Synthetic oligonucleotide
  Target: LAMA2; (+) strand; PAM type: NRG; PAM sequence: GGG
tccaacaatgtttacataat

SEQ ID NO: 143741 - DNA, 20 bp, Artificial Sequence
  Description of Artificial Sequence: Synthetic oligonucleotide
  Target: LAMA2; (+) strand; PAM type: NRG; PAM sequence: GAG
caacaatgtttacataatgg

SEQ ID NO: 143742 - DNA, 20 bp, Artificial Sequence
  Description of Artificial Sequence: Synthetic oligonucleotide
  Target: LAMA2; (+) strand; PAM type: NRG; PAM sequence: AGG
aacaatgtttacataatggg

SEQ ID NO: 143743 - DNA, 20 bp, Artificial Sequence
  Description of Artificial Sequence: Synthetic oligonucleotide
  Target: LAMA2; (+) strand; PAM type: NRG; PAM sequence: GGG
acaatgtttacataatggga

SEQ ID NO: 143744 - DNA, 20 bp, Artificial Sequence
  Description of Artificial Sequence: Synthetic oligonucleotide
  Target: LAMA2; (+) strand; PAM type: NRG; PAM sequence: GAG
ggagggtcactctttaacat

SEQ ID NO: 143745 - DNA, 20 bp, Artificial Sequence
  Description of Artificial Sequence: Synthetic oligonucleotide
  Target: LAMA2; (+) strand; PAM type: NRG; PAM sequence: AGG
gagggtcactctttaacatg

SEQ ID NO: 143746 - DNA, 20 bp, Artificial Sequence
  Description of Artificial Sequence: Synthetic oligonucleotide
  Target: LAMA2; (+) strand; PAM type: NRG; PAM sequence: GGG
agggtcactctttaacatga

SEQ ID NO: 143747 - DNA, 20 bp, Artificial Sequence
  Description of Artificial Sequence: Synthetic oligonucleotide
  Target: LAMA2; (+) strand; PAM type: NRG; PAM sequence: GGG
gggtcactctttaacatgag

SEQ ID NO: 143748 - DNA, 20 bp, Artificial Sequence
  Description of Artificial Sequence: Synthetic oligonucleotide
  Target: LAMA2; (+) strand; PAM type: NRG; PAM sequence: TAG
aacatgaggggctctgtcac

SEQ ID NO: 143749 - DNA, 20 bp, Artificial Sequence
  Description of Artificial Sequence: Synthetic oligonucleotide
  Target: LAMA2; (+) strand; PAM type: NRG; PAM sequence: CAG
gggctctgtcactagaattg

SEQ ID NO: 143750 - DNA, 20 bp, Artificial Sequence
  Description of Artificial Sequence: Synthetic oligonucleotide
  Target: LAMA2; (+) strand; PAM type: NRG; PAM sequence: TAG
tcactagaattgcagtgtgt

SEQ ID NO: 143751 - DNA, 20 bp, Artificial Sequence
  Description of Artificial Sequence: Synthetic oligonucleotide
  Target: LAMA2; (+) strand; PAM type: NRG; PAM sequence: CAG
tgttagcccctcattttctc

SEQ ID NO: 143752 - DNA, 20 bp, Artificial Sequence
  Description of Artificial Sequence: Synthetic oligonucleotide
  Target: LAMA2; (+) strand; PAM type: NRG; PAM sequence: CGG
ttaataatttccaaaacaat

SEQ ID NO: 143753 - DNA, 20 bp, Artificial Sequence
  Description of Artificial Sequence: Synthetic oligonucleotide
  Target: LAMA2; (+) strand; PAM type: NRG; PAM sequence: GGG
taataatttccaaaacaatc

SEQ ID NO: 143754 - DNA, 20 bp, Artificial Sequence
  Description of Artificial Sequence: Synthetic oligonucleotide
  Target: LAMA2; (+) strand; PAM type: NRG; PAM sequence: GGG
aataatttccaaaacaatcg

SEQ ID NO: 143755 - DNA, 20 bp, Artificial Sequence
  Description of Artificial Sequence: Synthetic oligonucleotide
  Target: LAMA2; (+) strand; PAM type: NRG; PAM sequence: GGG
ataatttccaaaacaatcgg

SEQ ID NO: 143756 - DNA, 20 bp, Artificial Sequence
  Description of Artificial Sequence: Synthetic oligonucleotide
  Target: LAMA2; (+) strand; PAM type: NRG; PAM sequence: AAG
gggggtaatgttcgaattct

SEQ ID NO: 143757 - DNA, 20 bp, Artificial Sequence
  Description of Artificial Sequence: Synthetic oligonucleotide
  Target: LAMA2; (+) strand; PAM type: NRG; PAM sequence: CAG
ttgtcataaatgaatcaatc

SEQ ID NO: 143758 - DNA, 20 bp, Artificial Sequence
  Description of Artificial Sequence: Synthetic oligonucleotide
  Target: LAMA2; (+) strand; PAM type: NRG; PAM sequence: TGG
cataaatgaatcaatccagt

SEQ ID NO: 143759 - DNA, 20 bp, Artificial Sequence
  Description of Artificial Sequence: Synthetic oligonucleotide
  Target: LAMA2; (+) strand; PAM type: NRG; PAM sequence: CAG
aaatgaatcaatccagttgg

SEQ ID NO: 143760 - DNA, 20 bp, Artificial Sequence
  Description of Artificial Sequence: Synthetic oligonucleotide
  Target: LAMA2; (+) strand; PAM type: NRG; PAM sequence: AGG
aatgaatcaatccagttggc

SEQ ID NO: 143761 - DNA, 20 bp, Artificial Sequence
  Description of Artificial Sequence: Synthetic oligonucleotide
  Target: LAMA2; (+) strand; PAM type: NRG; PAM sequence: GAG
tgaatcaatccagttggcag

SEQ ID NO: 143762 - DNA, 20 bp, Artificial Sequence
  Description of Artificial Sequence: Synthetic oligonucleotide
  Target: LAMA2; (+) strand; PAM type: NRG; PAM sequence: TGG
tcaatccagttggcaggaga

SEQ ID NO: 143763 - DNA, 20 bp, Artificial Sequence
  Description of Artificial Sequence: Synthetic oligonucleotide
  Target: LAMA2; (+) strand; PAM type: NRG; PAM sequence: TAG
cagttggcaggagatggatg

SEQ ID NO: 143764 - DNA, 20 bp, Artificial Sequence
  Description of Artificial Sequence: Synthetic oligonucleotide
  Target: LAMA2; (+) strand; PAM type: NRG; PAM sequence: TGG
gatggatgtagtctttttgc

SEQ ID NO: 143765 - DNA, 20 bp, Artificial Sequence
  Description of Artificial Sequence: Synthetic oligonucleotide
  Target: LAMA2; (+) strand; PAM type: NRG; PAM sequence: AAG
ttttgctggtgttccgtgct

SEQ ID NO: 143766 - DNA, 20 bp, Artificial Sequence
  Description of Artificial Sequence: Synthetic oligonucleotide
  Target: LAMA2; (+) strand; PAM type: NRG; PAM sequence: AAG
ctggtgttccgtgctaagaa

SEQ ID NO: 143767 - DNA, 20 bp, Artificial Sequence
  Description of Artificial Sequence: Synthetic oligonucleotide
  Target: LAMA2; (+) strand; PAM type: NRG; PAM sequence: GAG
aaagcacacacatttttctt

SEQ ID NO: 143768 - DNA, 20 bp, Artificial Sequence
  Description of Artificial Sequence: Synthetic oligonucleotide
  Target: LAMA2; (+) strand; PAM type: NRG; PAM sequence: GAG
agcacacacatttttcttga

SEQ ID NO: 143769 - DNA, 20 bp, Artificial Sequence
  Description of Artificial Sequence: Synthetic oligonucleotide
  Target: LAMA2; (+) strand; PAM type: NRG; PAM sequence: TGG
acacatttttcttgagagta

SEQ ID NO: 143770 - DNA, 20 bp, Artificial Sequence
  Description of Artificial Sequence: Synthetic oligonucleotide
  Target: LAMA2; (+) strand; PAM type: NRG; PAM sequence: TAG
atttttcttgagagtatggc

SEQ ID NO: 143771 - DNA, 20 bp, Artificial Sequence
  Description of Artificial Sequence: Synthetic oligonucleotide
  Target: LAMA2; (+) strand; PAM type: NRG; PAM sequence: AAG
tgagagtatggctagccgaa

SEQ ID NO: 143772 - DNA, 20 bp, Artificial Sequence
  Description of Artificial Sequence: Synthetic oligonucleotide
  Target: LAMA2; (+) strand; PAM type: NRG; PAM sequence: GAG
tggctagccgaaaagcatct

SEQ ID NO: 143773 - DNA, 20 bp, Artificial Sequence
  Description of Artificial Sequence: Synthetic oligonucleotide
  Target: LAMA2; (+) strand; PAM type: NRG; PAM sequence: TGG
gaaaagcatctgagaattga

SEQ ID NO: 143774 - DNA, 20 bp, Artificial Sequence
  Description of Artificial Sequence: Synthetic oligonucleotide
  Target: LAMA2; (+) strand; PAM type: NRG; PAM sequence: AAG
ctgagaattgatggaatcct

SEQ ID NO: 143775 - DNA, 20 bp, Artificial Sequence
  Description of Artificial Sequence: Synthetic oligonucleotide
  Target: LAMA2; (+) strand; PAM type: NRG; PAM sequence: AGG
tgagaattgatggaatccta

SEQ ID NO: 143776 - DNA, 20 bp, Artificial Sequence
  Description of Artificial Sequence: Synthetic oligonucleotide
  Target: LAMA2; (+) strand; PAM type: NRG; PAM sequence: CAG
gaattgatggaatcctaagg

SEQ ID NO: 143777 - DNA, 20 bp, Artificial Sequence
  Description of Artificial Sequence: Synthetic oligonucleotide
  Target: LAMA2; (+) strand; PAM type: NRG; PAM sequence: CAG
tgatggaatcctaaggcaga

SEQ ID NO: 143778 - DNA, 20 bp, Artificial Sequence
  Description of Artificial Sequence: Synthetic oligonucleotide
  Target: LAMA2; (+) strand; PAM type: NRG; PAM sequence: AAG
aaggcagacagaaacgccaa

SEQ ID NO: 143779 - DNA, 20 bp, Artificial Sequence
  Description of Artificial Sequence: Synthetic oligonucleotide
  Target: LAMA2; (+) strand; PAM type: NRG; PAM sequence: AAG
agacagaaacgccaaaagtc

SEQ ID NO: 143780 - DNA, 20 bp, Artificial Sequence
  Description of Artificial Sequence: Synthetic oligonucleotide
  Target: LAMA2; (+) strand; PAM type: NRG; PAM sequence: TGG
aacgccaaaagtcaagtaac

SEQ ID NO: 143781 - DNA, 20 bp, Artificial Sequence
  Description of Artificial Sequence: Synthetic oligonucleotide
  Target: LAMA2; (+) strand; PAM type: NRG; PAM sequence: CAG
caagtaactggttttgtctc

SEQ ID NO: 143782 - DNA, 20 bp, Artificial Sequence
  Description of Artificial Sequence: Synthetic oligonucleotide
  Target: LAMA2; (+) strand; PAM type: NRG; PAM sequence: CAG
ggttttgtctccagcactta

SEQ ID NO: 143783 - DNA, 20 bp, Artificial Sequence
  Description of Artificial Sequence: Synthetic oligonucleotide
  Target: LAMA2; (+) strand; PAM type: NRG; PAM sequence: TGG
agcacttacagtttgttgtc

SEQ ID NO: 143784 - DNA, 20 bp, Artificial Sequence
  Description of Artificial Sequence: Synthetic oligonucleotide
  Target: LAMA2; (+) strand; PAM type: NRG; PAM sequence: GGG
gcacttacagtttgttgtct

SEQ ID NO: 143785 - DNA, 20 bp, Artificial Sequence
  Description of Artificial Sequence: Synthetic oligonucleotide
  Target: LAMA2; (+) strand; PAM type: NRG; PAM sequence: TAG
tgccatgacataccctctac

SEQ ID NO: 143786 - DNA, 20 bp, Artificial Sequence
  Description of Artificial Sequence: Synthetic oligonucleotide
  Target: LAMA2; (+) strand; PAM type: NRG; PAM sequence: AAG
ctctactagttaattccatt

SEQ ID NO: 143787 - DNA, 20 bp, Artificial Sequence
  Description of Artificial Sequence: Synthetic oligonucleotide
  Target: LAMA2; (+) strand; PAM type: NRG; PAM sequence: TGG
gttaattccattaagcaaca

SEQ ID NO: 143788 - DNA, 20 bp, Artificial Sequence
  Description of Artificial Sequence: Synthetic oligonucleotide
  Target: LAMA2; (+) strand; PAM type: NRG; PAM sequence: GGG
ttaattccattaagcaacat

SEQ ID NO: 143789 - DNA, 20 bp, Artificial Sequence
  Description of Artificial Sequence: Synthetic oligonucleotide
  Target: LAMA2; (+) strand; PAM type: NRG; PAM sequence: TAG
caacatgggccatttaaata

SEQ ID NO: 143790 - DNA, 20 bp, Artificial Sequence
  Description of Artificial Sequence: Synthetic oligonucleotide
  Target: LAMA2; (+) strand; PAM type: NRG; PAM sequence: AGG
aacatgggccatttaaatat

SEQ ID NO: 143791 - DNA, 20 bp, Artificial Sequence
  Description of Artificial Sequence: Synthetic oligonucleotide
  Target: LAMA2; (+) strand; PAM type: NRG; PAM sequence: AAG
ggcaaaacaacaacaaaaca

SEQ ID NO: 143792 - DNA, 20 bp, Artificial Sequence
  Description of Artificial Sequence: Synthetic oligonucleotide
  Target: LAMA2; (+) strand; PAM type: NRG; PAM sequence: AAG
aacaacaaaacaaagcaaac

SEQ ID NO: 143793 - DNA, 20 bp, Artificial Sequence
  Description of Artificial Sequence: Synthetic oligonucleotide
  Target: LAMA2; (+) strand; PAM type: NRG; PAM sequence: CAG
aagtaaaaactctgtgacca

SEQ ID NO: 143794 - DNA, 20 bp, Artificial Sequence
  Description of Artificial Sequence: Synthetic oligonucleotide
  Target: LAMA2; (+) strand; PAM type: NRG; PAM sequence: AAG
aaaaactctgtgaccacaga

SEQ ID NO: 143795 - DNA, 20 bp, Artificial Sequence
  Description of Artificial Sequence: Synthetic oligonucleotide
  Target: LAMA2; (+) strand; PAM type: NRG; PAM sequence: GAG
aaactctgtgaccacagaaa

SEQ ID NO: 143796 - DNA, 20 bp, Artificial Sequence
  Description of Artificial Sequence: Synthetic oligonucleotide
  Target: LAMA2; (+) strand; PAM type: NRG; PAM sequence: TAG
cacagaaagagcctgtaaca

SEQ ID NO: 143797 - DNA, 20 bp, Artificial Sequence
  Description of Artificial Sequence: Synthetic oligonucleotide
  Target: LAMA2; (+) strand; PAM type: NRG; PAM sequence: CAG
gaaagagcctgtaacataga

SEQ ID NO: 143798 - DNA, 20 bp, Artificial Sequence
  Description of Artificial Sequence: Synthetic oligonucleotide
  Target: LAMA2; (+) strand; PAM type: NRG; PAM sequence: AAG
agagcctgtaacatagacag

SEQ ID NO: 143799 - DNA, 20 bp, Artificial Sequence
  Description of Artificial Sequence: Synthetic oligonucleotide
  Target: LAMA2; (+) strand; PAM type: NRG; PAM sequence: TAG
catagacagaagactacaaa

SEQ ID NO: 143800 - DNA, 20 bp, Artificial Sequence
  Description of Artificial Sequence: Synthetic oligonucleotide
  Target: LAMA2; (+) strand; PAM type: NRG; PAM sequence: TAG
aagactacaaatagtgttct

SEQ ID NO: 143801 - DNA, 20 bp, Artificial Sequence
  Description of Artificial Sequence: Synthetic oligonucleotide
  Target: LAMA2; (+) strand; PAM type: NRG; PAM sequence: AAG
actacaaatagtgttcttag

SEQ ID NO: 143802 - DNA, 20 bp, Artificial Sequence
  Description of Artificial Sequence: Synthetic oligonucleotide
  Target: LAMA2; (+) strand; PAM type: NRG; PAM sequence: AAG
ttcttagaagataaatcatt

SEQ ID NO: 143803 - DNA, 20 bp, Artificial Sequence
  Description of Artificial Sequence: Synthetic oligonucleotide
  Target: LAMA2; (+) strand; PAM type: NRG; PAM sequence: CAG
tagaagataaatcattaaga

SEQ ID NO: 143804 - DNA, 20 bp, Artificial Sequence
  Description of Artificial Sequence: Synthetic oligonucleotide
  Target: LAMA2; (+) strand; PAM type: NRG; PAM sequence: TAG
aagataaatcattaagacag

SEQ ID NO: 143805 - DNA, 20 bp, Artificial Sequence
  Description of Artificial Sequence: Synthetic oligonucleotide
  Target: LAMA2; (+) strand; PAM type: NRG; PAM sequence: GAG
cattaagacagtagcaaaat

SEQ ID NO: 143806 - DNA, 20 bp, Artificial Sequence
  Description of Artificial Sequence: Synthetic oligonucleotide
  Target: LAMA2; (+) strand; PAM type: NRG; PAM sequence: AAG
taagacagtagcaaaatgag

SEQ ID NO: 143807 - DNA, 20 bp, Artificial Sequence
  Description of Artificial Sequence: Synthetic oligonucleotide
  Target: LAMA2; (+) strand; PAM type: NRG; PAM sequence: AGG
aagacagtagcaaaatgaga

SEQ ID NO: 143808 - DNA, 20 bp, Artificial Sequence
  Description of Artificial Sequence: Synthetic oligonucleotide
  Target: LAMA2; (+) strand; PAM type: NRG; PAM sequence: TAG
agtagcaaaatgagaaggaa

SEQ ID NO: 143809 - DNA, 20 bp, Artificial Sequence
  Description of Artificial Sequence: Synthetic oligonucleotide
  Target: LAMA2; (+) strand; PAM type: NRG; PAM sequence: TGG
aatgagaaggaatagtgtcc

SEQ ID NO: 143810 - DNA, 20 bp, Artificial Sequence
  Description of Artificial Sequence: Synthetic oligonucleotide
  Target: LAMA2; (+) strand; PAM type: NRG; PAM sequence: GGG
atgagaaggaatagtgtcct

SEQ ID NO: 143811 - DNA, 20 bp, Artificial Sequence
  Description of Artificial Sequence: Synthetic oligonucleotide
  Target: LAMA2; (+) strand; PAM type: NRG; PAM sequence: AAG
atagtgtcctgggcaacata

SEQ ID NO: 143812 - DNA, 20 bp, Artificial Sequence
  Description of Artificial Sequence: Synthetic oligonucleotide
  Target: LAMA2; (+) strand; PAM type: NRG; PAM sequence: AAG
acactcaactgaaatttgcc

SEQ ID NO: 143813 - DNA, 20 bp, Artificial Sequence
  Description of Artificial Sequence: Synthetic oligonucleotide
  Target: LAMA2; (+) strand; PAM type: NRG; PAM sequence: AGG
cactcaactgaaatttgcca

SEQ ID NO: 143814 - DNA, 20 bp, Artificial Sequence
  Description of Artificial Sequence: Synthetic oligonucleotide
  Target: LAMA2; (+) strand; PAM type: NRG; PAM sequence: TAG
tgaaatttgccaaggctcac

SEQ ID NO: 143815 - DNA, 20 bp, Artificial Sequence
  Description of Artificial Sequence: Synthetic oligonucleotide
  Target: LAMA2; (+) strand; PAM type: NRG; PAM sequence: GAG
caaggctcactagtgtcttt

SEQ ID NO: 143816 - DNA, 20 bp, Artificial Sequence
  Description of Artificial Sequence: Synthetic oligonucleotide
  Target: LAMA2; (+) strand; PAM type: NRG; PAM sequence: AGG
aaggctcactagtgtctttg

SEQ ID NO: 143817 - DNA, 20 bp, Artificial Sequence
  Description of Artificial Sequence: Synthetic oligonucleotide
  Target: LAMA2; (+) strand; PAM type: NRG; PAM sequence: TAG
ctagtgtctttgaggcaccc

SEQ ID NO: 143818 - DNA, 20 bp, Artificial Sequence
  Description of Artificial Sequence: Synthetic oligonucleotide
  Target: LAMA2; (+) strand; PAM type: NRG; PAM sequence: GAG
agtgtctttgaggcacccta

SEQ ID NO: 143819 - DNA, 20 bp, Artificial Sequence
  Description of Artificial Sequence: Synthetic oligonucleotide
  Target: LAMA2; (+) strand; PAM type: NRG; PAM sequence: GAG
tgtctttgaggcaccctaga

SEQ ID NO: 143820 - DNA, 20 bp, Artificial Sequence
  Description of Artificial Sequence: Synthetic oligonucleotide
  Target: LAMA2; (+) strand; PAM type: NRG; PAM sequence: AGG
gtctttgaggcaccctagag

SEQ ID NO: 143821 - DNA, 20 bp, Artificial Sequence
  Description of Artificial Sequence: Synthetic oligonucleotide
  Target: LAMA2; (+) strand; PAM type: NRG; PAM sequence: GGG
tctttgaggcaccctagaga

SEQ ID NO: 143822 - DNA, 20 bp, Artificial Sequence
  Description of Artificial Sequence: Synthetic oligonucleotide
  Target: LAMA2; (+) strand; PAM type: NRG; PAM sequence: GGG
ctttgaggcaccctagagag

SEQ ID NO: 143823 - DNA, 20 bp, Artificial Sequence
  Description of Artificial Sequence: Synthetic oligonucleotide
  Target: LAMA2; (+) strand; PAM type: NRG; PAM sequence: GAG
ttgaggcaccctagagaggg

SEQ ID NO: 143824 - DNA, 20 bp, Artificial Sequence
  Description of Artificial Sequence: Synthetic oligonucleotide
  Target: LAMA2; (+) strand; PAM type: NRG; PAM sequence: AGG
tgaggcaccctagagagggg

SEQ ID NO: 143825 - DNA, 20 bp, Artificial Sequence
  Description of Artificial Sequence: Synthetic oligonucleotide
  Target: LAMA2; (+) strand; PAM type: NRG; PAM sequence: TAG
gcaccctagagaggggaggc

SEQ ID NO: 143826 - DNA, 20 bp, Artificial Sequence
  Description of Artificial Sequence: Synthetic oligonucleotide
  Target: LAMA2; (+) strand; PAM type: NRG; PAM sequence: CAG
ctagaaataaccatcatcct

SEQ ID NO: 143827 - DNA, 20 bp, Artificial Sequence
  Description of Artificial Sequence: Synthetic oligonucleotide
  Target: LAMA2; (+) strand; PAM type: NRG; PAM sequence: TGG
catcatcctcagctgttcca

SEQ ID NO: 143828 - DNA, 20 bp, Artificial Sequence
  Description of Artificial Sequence: Synthetic oligonucleotide
  Target: LAMA2; (+) strand; PAM type: NRG; PAM sequence: AAG
atcctcagctgttccatggt

SEQ ID NO: 143829 - DNA, 20 bp, Artificial Sequence
  Description of Artificial Sequence: Synthetic oligonucleotide
  Target: LAMA2; (+) strand; PAM type: NRG; PAM sequence: AGG
tcctcagctgttccatggta

SEQ ID NO: 143830 - DNA, 20 bp, Artificial Sequence
  Description of Artificial Sequence: Synthetic oligonucleotide
  Target: LAMA2; (+) strand; PAM type: NRG; PAM sequence: TAG
tccatggtaaggccctacac

SEQ ID NO: 143831 - DNA, 20 bp, Artificial Sequence
  Description of Artificial Sequence: Synthetic oligonucleotide
  Target: LAMA2; (+) strand; PAM type: NRG; PAM sequence: AGG
ccatggtaaggccctacact

SEQ ID NO: 143832 - DNA, 20 bp, Artificial Sequence
  Description of Artificial Sequence: Synthetic oligonucleotide
  Target: LAMA2; (+) strand; PAM type: NRG; PAM sequence: CAG
taaggccctacactaggact

SEQ ID NO: 143833 - DNA, 20 bp, Artificial Sequence
  Description of Artificial Sequence: Synthetic oligonucleotide
  Target: LAMA2; (+) strand; PAM type: NRG; PAM sequence: GAG
aggccctacactaggactca

SEQ ID NO: 143834 - DNA, 20 bp, Artificial Sequence
  Description of Artificial Sequence: Synthetic oligonucleotide
  Target: LAMA2; (+) strand; PAM type: NRG; PAM sequence: AGG
ggccctacactaggactcag

SEQ ID NO: 143835 - DNA, 20 bp, Artificial Sequence
  Description of Artificial Sequence: Synthetic oligonucleotide
  Target: LAMA2; (+) strand; PAM type: NRG; PAM sequence: GAG
ccctacactaggactcagag

SEQ ID NO: 143836 - DNA, 20 bp, Artificial Sequence
  Description of Artificial Sequence: Synthetic oligonucleotide
  Target: LAMA2; (+) strand; PAM type: NRG; PAM sequence: GAG
ctacactaggactcagagga

SEQ ID NO: 143837 - DNA, 20 bp, Artificial Sequence
  Description of Artificial Sequence: Synthetic oligonucleotide
  Target: LAMA2; (+) strand; PAM type: NRG; PAM sequence: TAG
actaggactcagaggagaga

SEQ ID NO: 143838 - DNA, 20 bp, Artificial Sequence
  Description of Artificial Sequence: Synthetic oligonucleotide
  Target: LAMA2; (+) strand; PAM type: NRG; PAM sequence: TGG
gactcagaggagagatagtt

SEQ ID NO: 143839 - DNA, 20 bp, Artificial Sequence
  Description of Artificial Sequence: Synthetic oligonucleotide
  Target: LAMA2; (+) strand; PAM type: NRG; PAM sequence: CAG
ttggaacattttatccctat

SEQ ID NO: 143840 - DNA, 20 bp, Artificial Sequence
  Description of Artificial Sequence: Synthetic oligonucleotide
  Target: LAMA2; (+) strand; PAM type: NRG; PAM sequence: TGG
gaacattttatccctatcag

SEQ ID NO: 143841 - DNA, 20 bp, Artificial Sequence
  Description of Artificial Sequence: Synthetic oligonucleotide
  Target: LAMA2; (+) strand; PAM type: NRG; PAM sequence: TAG
ttatccctatcagtggaaaa

SEQ ID NO: 143842 - DNA, 20 bp, Artificial Sequence
  Description of Artificial Sequence: Synthetic oligonucleotide
  Target: LAMA2; (+) strand; PAM type: NRG; PAM sequence: CAG
cctatcagtggaaaatagca

SEQ ID NO: 143843 - DNA, 20 bp, Artificial Sequence
  Description of Artificial Sequence: Synthetic oligonucleotide
  Target: LAMA2; (+) strand; PAM type: NRG; PAM sequence: TGG
tcagtggaaaatagcacagt

SEQ ID NO: 143844 - DNA, 20 bp, Artificial Sequence
  Description of Artificial Sequence: Synthetic oligonucleotide
  Target: LAMA2; (+) strand; PAM type: NRG; PAM sequence: CAG
tcctttcgttgaaaataaca

SEQ ID NO: 143845 - DNA, 20 bp, Artificial Sequence
  Description of Artificial Sequence: Synthetic oligonucleotide
  Target: LAMA2; (+) strand; PAM type: NRG; PAM sequence: AGG
cctttcgttgaaaataacac

SEQ ID NO: 143846 - DNA, 20 bp, Artificial Sequence
  Description of Artificial Sequence: Synthetic oligonucleotide
  Target: LAMA2; (+) strand; PAM type: NRG; PAM sequence: TAG
aaataacacaggtaattttt

SEQ ID NO: 143847 - DNA, 20 bp, Artificial Sequence
  Description of Artificial Sequence: Synthetic oligonucleotide
  Target: LAMA2; (+) strand; PAM type: NRG; PAM sequence: GAG
aggtaattttttagccaaat

SEQ ID NO: 143848 - DNA, 20 bp, Artificial Sequence
  Description of Artificial Sequence: Synthetic oligonucleotide
  Target: LAMA2; (+) strand; PAM type: NRG; PAM sequence: AAG
aaatgagatttttatcaaaa

SEQ ID NO: 143849 - DNA, 20 bp, Artificial Sequence
  Description of Artificial Sequence: Synthetic oligonucleotide
  Target: LAMA2; (+) strand; PAM type: NRG; PAM sequence: AAG
gagatttttatcaaaaaagc

SEQ ID NO: 143850 - DNA, 20 bp, Artificial Sequence
  Description of Artificial Sequence: Synthetic oligonucleotide
  Target: LAMA2; (+) strand; PAM type: NRG; PAM sequence: AAG
ttttatcaaaaaagcaagca

SEQ ID NO: 143851 - DNA, 20 bp, Artificial Sequence
  Description of Artificial Sequence: Synthetic oligonucleotide
  Target: LAMA2; (+) strand; PAM type: NRG; PAM sequence: AGG
tttatcaaaaaagcaagcaa

SEQ ID NO: 143852 - DNA, 20 bp, Artificial Sequence
  Description of Artificial Sequence: Synthetic oligonucleotide
  Target: LAMA2; (+) strand; PAM type: NRG; PAM sequence: CAG
atcaaaaaagcaagcaaagg

SEQ ID NO: 143853 - DNA, 20 bp, Artificial Sequence
  Description of Artificial Sequence: Synthetic oligonucleotide
  Target: LAMA2; (+) strand; PAM type: NRG; PAM sequence: AAG
aagcaaaggcagaatgtgaa

SEQ ID NO: 143854 - DNA, 20 bp, Artificial Sequence
  Description of Artificial Sequence: Synthetic oligonucleotide
  Target: LAMA2; (+) strand; PAM type: NRG; PAM sequence: AGG
agcaaaggcagaatgtgaaa

SEQ ID NO: 143855 - DNA, 20 bp, Artificial Sequence
  Description of Artificial Sequence: Synthetic oligonucleotide
  Target: LAMA2; (+) strand; PAM type: NRG; PAM sequence: GAG
caaaggcagaatgtgaaaag

SEQ ID NO: 143856 - DNA, 20 bp, Artificial Sequence
  Description of Artificial Sequence: Synthetic oligonucleotide
  Target: LAMA2; (+) strand; PAM type: NRG; PAM sequence: CAG
atgtgaaaaggagctgatat

SEQ ID NO: 143857 - DNA, 20 bp, Artificial Sequence
  Description of Artificial Sequence: Synthetic oligonucleotide
  Target: LAMA2; (+) strand; PAM type: NRG; PAM sequence: AAG
gagctgatatcagtaattcc

SEQ ID NO: 143858 - DNA, 20 bp, Artificial Sequence
  Description of Artificial Sequence: Synthetic oligonucleotide
  Target: LAMA2; (+) strand; PAM type: NRG; PAM sequence: AGG
agctgatatcagtaattcca

SEQ ID NO: 143859 - DNA, 20 bp, Artificial Sequence
  Description of Artificial Sequence: Synthetic oligonucleotide
  Target: LAMA2; (+) strand; PAM type: NRG; PAM sequence: AAG
aaaatttgttttaaataata

SEQ ID NO: 143860 - DNA, 20 bp, Artificial Sequence
  Description of Artificial Sequence: Synthetic oligonucleotide
  Target: LAMA2; (+) strand; PAM type: NRG; PAM sequence: TAG
tgttttaaataataaagaaa

SEQ ID NO: 143861 - DNA, 20 bp, Artificial Sequence
  Description of Artificial Sequence: Synthetic oligonucleotide
  Target: LAMA2; (+) strand; PAM type: NRG; PAM sequence: CAG
taataaagaaatagcatctt

SEQ ID NO: 143862 - DNA, 20 bp, Artificial Sequence
  Description of Artificial Sequence: Synthetic oligonucleotide
  Target: LAMA2; (+) strand; PAM type: NRG; PAM sequence: AGG
aataaagaaatagcatcttc

SEQ ID NO: 143863 - DNA, 20 bp, Artificial Sequence
  Description of Artificial Sequence: Synthetic oligonucleotide
  Target: LAMA2; (+) strand; PAM type: NRG; PAM sequence: TAG
aatagcatcttcaggccctt

SEQ ID NO: 143864 - DNA, 20 bp, Artificial Sequence
  Description of Artificial Sequence: Synthetic oligonucleotide
  Target: LAMA2; (+) strand; PAM type: NRG; PAM sequence: TGG
tcttcaggccctttagactt

SEQ ID NO: 143865 - DNA, 20 bp, Artificial Sequence
  Description of Artificial Sequence: Synthetic oligonucleotide
  Target: LAMA2; (+) strand; PAM type: NRG; PAM sequence: TGG
tagactttggactccaaaat

SEQ ID NO: 143866 - DNA, 20 bp, Artificial Sequence
  Description of Artificial Sequence: Synthetic oligonucleotide
  Target: LAMA2; (+) strand; PAM type: NRG; PAM sequence: CAG
ttggactccaaaattggatg

SEQ ID NO: 143867 - DNA, 20 bp, Artificial Sequence
  Description of Artificial Sequence: Synthetic oligonucleotide
  Target: LAMA2; (+) strand; PAM type: NRG; PAM sequence: TAG
aaaattggatgcagatcaaa

SEQ ID NO: 143868 - DNA, 20 bp, Artificial Sequence
  Description of Artificial Sequence: Synthetic oligonucleotide
  Target: LAMA2; (+) strand; PAM type: NRG; PAM sequence: AGG
aaattggatgcagatcaaat

SEQ ID NO: 143869 - DNA, 20 bp, Artificial Sequence
  Description of Artificial Sequence: Synthetic oligonucleotide
  Target: LAMA2; (+) strand; PAM type: NRG; PAM sequence: AAG
tttatatattaaaaaatccc

SEQ ID NO: 143870 - DNA, 20 bp, Artificial Sequence
  Description of Artificial Sequence: Synthetic oligonucleotide
  Target: LAMA2; (+) strand; PAM type: NRG; PAM sequence: GAG
tatatattaaaaaatcccaa

SEQ ID NO: 143871 - DNA, 20 bp, Artificial Sequence
  Description of Artificial Sequence: Synthetic oligonucleotide
  Target: LAMA2; (+) strand; PAM type: NRG; PAM sequence: CAG
aaatcccaagagaacttgta

SEQ ID NO: 143872 - DNA, 20 bp, Artificial Sequence
  Description of Artificial Sequence: Synthetic oligonucleotide
  Target: LAMA2; (+) strand; PAM type: NRG; PAM sequence: AAG
caagagaacttgtacagcat

SEQ ID NO: 143873 - DNA, 20 bp, Artificial Sequence
  Description of Artificial Sequence: Synthetic oligonucleotide
  Target: LAMA2; (+) strand; PAM type: NRG; PAM sequence: AGG
aagagaacttgtacagcata

SEQ ID NO: 143874 - DNA, 20 bp, Artificial Sequence
  Description of Artificial Sequence: Synthetic oligonucleotide
  Target: LAMA2; (+) strand; PAM type: NRG; PAM sequence: AAG
gcataaggtaaatacaaatc

SEQ ID NO: 143875 - DNA, 20 bp, Artificial Sequence
  Description of Artificial Sequence: Synthetic oligonucleotide
  Target: LAMA2; (+) strand; PAM type: NRG; PAM sequence: AGG
cataaggtaaatacaaatca

SEQ ID NO: 143876 - DNA, 20 bp, Artificial Sequence
  Description of Artificial Sequence: Synthetic oligonucleotide
  Target: LAMA2; (+) strand; PAM type: NRG; PAM sequence: CAG
aaatacaaatcaaggttgaa

SEQ ID NO: 143877 - DNA, 20 bp, Artificial Sequence
  Description of Artificial Sequence: Synthetic oligonucleotide
  Target: LAMA2; (+) strand; PAM type: NRG; PAM sequence: AGG
aatacaaatcaaggttgaac

SEQ ID NO: 143878 - DNA, 20 bp, Artificial Sequence
  Description of Artificial Sequence: Synthetic oligonucleotide
  Target: LAMA2; (+) strand; PAM type: NRG; PAM sequence: TAG
ttgaacaggtataaaataat

SEQ ID NO: 143879 - DNA, 20 bp, Artificial Sequence
  Description of Artificial Sequence: Synthetic oligonucleotide
  Target: LAMA2; (+) strand; PAM type: NRG; PAM sequence: AGG
tgaacaggtataaaataatt

SEQ ID NO: 143880 - DNA, 20 bp, Artificial Sequence
  Description of Artificial Sequence: Synthetic oligonucleotide
  Target: LAMA2; (+) strand; PAM type: NRG; PAM sequence: AAG
aggtataaaataattaggtc

SEQ ID NO: 143881 - DNA, 20 bp, Artificial Sequence
  Description of Artificial Sequence: Synthetic oligonucleotide
  Target: LAMA2; (+) strand; PAM type: NRG; PAM sequence: GAG
gtataaaataattaggtcaa

SEQ ID NO: 143882 - DNA, 20 bp, Artificial Sequence
  Description of Artificial Sequence: Synthetic oligonucleotide
  Target: LAMA2; (+) strand; PAM type: NRG; PAM sequence: CAG
ataattaggtcaagagcaat

SEQ ID NO: 143883 - DNA, 20 bp, Artificial Sequence
  Description of Artificial Sequence: Synthetic oligonucleotide
  Target: LAMA2; (+) strand; PAM type: NRG; PAM sequence: CAG
agcaatcagcaaaatatatg

SEQ ID NO: 143884 - DNA, 20 bp, Artificial Sequence
  Description of Artificial Sequence: Synthetic oligonucleotide
  Target: LAMA2; (+) strand; PAM type: NRG; PAM sequence: TGG
caaacaatactttgatattc

SEQ ID NO: 143885 - DNA, 20 bp, Artificial Sequence
  Description of Artificial Sequence: Synthetic oligonucleotide
  Target: LAMA2; (+) strand; PAM type: NRG; PAM sequence: TGG
aatactttgatattctggtc

SEQ ID NO: 143886 - DNA, 20 bp, Artificial Sequence
  Description of Artificial Sequence: Synthetic oligonucleotide
  Target: LAMA2; (+) strand; PAM type: NRG; PAM sequence: AAG
ctttgatattctggtctgga

SEQ ID NO: 143887 - DNA, 20 bp, Artificial Sequence
  Description of Artificial Sequence: Synthetic oligonucleotide
  Target: LAMA2; (+) strand; PAM type: NRG; PAM sequence: GAG
ttgatattctggtctggaaa

SEQ ID NO: 143888 - DNA, 20 bp, Artificial Sequence
  Description of Artificial Sequence: Synthetic oligonucleotide
  Target: LAMA2; (+) strand; PAM type: NRG; PAM sequence: TGG
tctggtctggaaagagaatt

SEQ ID NO: 143889 - DNA, 20 bp, Artificial Sequence
  Description of Artificial Sequence: Synthetic oligonucleotide
  Target: LAMA2; (+) strand; PAM type: NRG; PAM sequence: GGG
ctggtctggaaagagaattt

SEQ ID NO: 143890 - DNA, 20 bp, Artificial Sequence
  Description of Artificial Sequence: Synthetic oligonucleotide
  Target: LAMA2; (+) strand; PAM type: NRG; PAM sequence: GGG
tggtctggaaagagaatttg

SEQ ID NO: 143891 - DNA, 20 bp, Artificial Sequence
  Description of Artificial Sequence: Synthetic oligonucleotide
  Target: LAMA2; (+) strand; PAM type: NRG; PAM sequence: CAG
actgtcactacaactctgtc

SEQ ID NO: 143892 - DNA, 20 bp, Artificial Sequence
  Description of Artificial Sequence: Synthetic oligonucleotide
  Target: LAMA2; (+) strand; PAM type: NRG; PAM sequence: CAG
acaactctgtccagaaccca

SEQ ID NO: 143893 - DNA, 20 bp, Artificial Sequence
  Description of Artificial Sequence: Synthetic oligonucleotide
  Target: LAMA2; (+) strand; PAM type: NRG; PAM sequence: CAG
ctgtccagaacccacagctg

SEQ ID NO: 143894 - DNA, 20 bp, Artificial Sequence
  Description of Artificial Sequence: Synthetic oligonucleotide
  Target: LAMA2; (+) strand; PAM type: NRG; PAM sequence: GAG
gaacccacagctgcagaaat

SEQ ID NO: 143895 - DNA, 20 bp, Artificial Sequence
  Description of Artificial Sequence: Synthetic oligonucleotide
  Target: LAMA2; (+) strand; PAM type: NRG; PAM sequence: AAG
agctgcagaaatgagtaaac

SEQ ID NO: 143896 - DNA, 20 bp, Artificial Sequence
  Description of Artificial Sequence: Synthetic oligonucleotide
  Target: LAMA2; (+) strand; PAM type: NRG; PAM sequence: TAG
gagtaaacaagtcatcttat

SEQ ID NO: 143897 - DNA, 20 bp, Artificial Sequence
  Description of Artificial Sequence: Synthetic oligonucleotide
  Target: LAMA2; (+) strand; PAM type: NRG; PAM sequence: AAG
taaacaagtcatcttattag

SEQ ID NO: 143898 - DNA, 20 bp, Artificial Sequence
  Description of Artificial Sequence: Synthetic oligonucleotide
  Target: LAMA2; (+) strand; PAM type: NRG; PAM sequence: AAG
tcatcttattagaagactgc

SEQ ID NO: 143899 - DNA, 20 bp, Artificial Sequence
  Description of Artificial Sequence: Synthetic oligonucleotide
  Target: LAMA2; (+) strand; PAM type: NRG; PAM sequence: AGG
catcttattagaagactgca

SEQ ID NO: 143900 - DNA, 20 bp, Artificial Sequence
  Description of Artificial Sequence: Synthetic oligonucleotide
  Target: LAMA2; (+) strand; PAM type: NRG; PAM sequence: AAG
attagaagactgcaaggtta

SEQ ID NO: 143901 - DNA, 20 bp, Artificial Sequence
  Description of Artificial Sequence: Synthetic oligonucleotide
  Target: LAMA2; (+) strand; PAM type: NRG; PAM sequence: CAG
aagactgcaaggttaaagaa

SEQ ID NO: 143902 - DNA, 20 bp, Artificial Sequence
  Description of Artificial Sequence: Synthetic oligonucleotide
  Target: LAMA2; (+) strand; PAM type: NRG; PAM sequence: AAG
gcaaggttaaagaacagcta

SEQ ID NO: 143903 - DNA, 20 bp, Artificial Sequence
  Description of Artificial Sequence: Synthetic oligonucleotide
  Target: LAMA2; (+) strand; PAM type: NRG; PAM sequence: TAG
aaactaaatgacattcttgt

SEQ ID NO: 143904 - DNA, 20 bp, Artificial Sequence
  Description of Artificial Sequence: Synthetic oligonucleotide
  Target: LAMA2; (+) strand; PAM type: NRG; PAM sequence: AAG
ataactcacacaattcccta

SEQ ID NO: 143905 - DNA, 20 bp, Artificial Sequence
  Description of Artificial Sequence: Synthetic oligonucleotide
  Target: LAMA2; (+) strand; PAM type: NRG; PAM sequence: AGG
taactcacacaattccctaa

SEQ ID NO: 143906 - DNA, 20 bp, Artificial Sequence
  Description of Artificial Sequence: Synthetic oligonucleotide
  Target: LAMA2; (+) strand; PAM type: NRG; PAM sequence: AAG
ccctaaaggaaaactacaaa

SEQ ID NO: 143907 - DNA, 20 bp, Artificial Sequence
  Description of Artificial Sequence: Synthetic oligonucleotide
  Target: LAMA2; (+) strand; PAM type: NRG; PAM sequence: AGG
cctaaaggaaaactacaaaa

SEQ ID NO: 143908 - DNA, 20 bp, Artificial Sequence
  Description of Artificial Sequence: Synthetic oligonucleotide
  Target: LAMA2; (+) strand; PAM type: NRG; PAM sequence: GAG
ctacaaaaaggatgtttctt

SEQ ID NO: 143909 - DNA, 20 bp, Artificial Sequence
  Description of Artificial Sequence: Synthetic oligonucleotide
  Target: LAMA2; (+) strand; PAM type: NRG; PAM sequence: TAG
aaaaaggatgtttcttgaga

SEQ ID NO: 143910 - DNA, 20 bp, Artificial Sequence
  Description of Artificial Sequence: Synthetic oligonucleotide
  Target: LAMA2; (+) strand; PAM type: NRG; PAM sequence: AGG
aaaaggatgtttcttgagat

SEQ ID NO: 143911 - DNA, 20 bp, Artificial Sequence
  Description of Artificial Sequence: Synthetic oligonucleotide
  Target: LAMA2; (+) strand; PAM type: NRG; PAM sequence: CAG
tgtttgttttgttttaaatc

SEQ ID NO: 143912 - DNA, 20 bp, Artificial Sequence
  Description of Artificial Sequence: Synthetic oligonucleotide
  Target: LAMA2; (+) strand; PAM type: NRG; PAM sequence: AAG
tttgttttaaatccagtgat

SEQ ID NO: 143913 - DNA, 20 bp, Artificial Sequence
  Description of Artificial Sequence: Synthetic oligonucleotide
  Target: LAMA2; (+) strand; PAM type: NRG; PAM sequence: CAG
aaaactctatattttatgtg

SEQ ID NO: 143914 - DNA, 20 bp, Artificial Sequence
  Description of Artificial Sequence: Synthetic oligonucleotide
  Target: LAMA2; (+) strand; PAM type: NRG; PAM sequence: TAG
tcttttcccaatgtctttct

SEQ ID NO: 143915 - DNA, 20 bp, Artificial Sequence
  Description of Artificial Sequence: Synthetic oligonucleotide
  Target: LAMA2; (+) strand; PAM type: NRG; PAM sequence: TAG
caatgtctttcttagatgat

SEQ ID NO: 143916 - DNA, 20 bp, Artificial Sequence
  Description of Artificial Sequence: Synthetic oligonucleotide
  Target: LAMA2; (+) strand; PAM type: NRG; PAM sequence: AGG
aatgtctttcttagatgatt

SEQ ID NO: 143917 - DNA, 20 bp, Artificial Sequence
  Description of Artificial Sequence: Synthetic oligonucleotide
  Target: LAMA2; (+) strand; PAM type: NRG; PAM sequence: TAG
gtctttcttagatgattagg

SEQ ID NO: 143918 - DNA, 20 bp, Artificial Sequence
  Description of Artificial Sequence: Synthetic oligonucleotide
  Target: LAMA2; (+) strand; PAM type: NRG; PAM sequence: AAG
ttagatgattaggtagttga

SEQ ID NO: 143919 - DNA, 20 bp, Artificial Sequence
  Description of Artificial Sequence: Synthetic oligonucleotide
  Target: LAMA2; (+) strand; PAM type: NRG; PAM sequence: GAG
tgaaagacgctactgtttac

SEQ ID NO: 143920 - DNA, 20 bp, Artificial Sequence
  Description of Artificial Sequence: Synthetic oligonucleotide
  Target: LAMA2; (+) strand; PAM type: NRG; PAM sequence: AGG
gaaagacgctactgtttacg

SEQ ID NO: 143921 - DNA, 20 bp, Artificial Sequence
  Description of Artificial Sequence: Synthetic oligonucleotide
  Target: LAMA2; (+) strand; PAM type: NRG; PAM sequence: AAG
tgtttacgaggcattgctaa

SEQ ID NO: 143922 - DNA, 20 bp, Artificial Sequence
  Description of Artificial Sequence: Synthetic oligonucleotide
  Target: LAMA2; (+) strand; PAM type: NRG; PAM sequence: TGG
gaggcattgctaaaagcttt

SEQ ID NO: 143923 - DNA, 20 bp, Artificial Sequence
  Description of Artificial Sequence: Synthetic oligonucleotide
  Target: LAMA2; (+) strand; PAM type: NRG; PAM sequence: GGG
aggcattgctaaaagctttt

SEQ ID NO: 143924 - DNA, 20 bp, Artificial Sequence
  Description of Artificial Sequence: Synthetic oligonucleotide
  Target: LAMA2; (+) strand; PAM type: NRG; PAM sequence: GAG
taaaagcttttgggttccat

SEQ ID NO: 143925 - DNA, 20 bp, Artificial Sequence
  Description of Artificial Sequence: Synthetic oligonucleotide
  Target: LAMA2; (+) strand; PAM type: NRG; PAM sequence: AGG
aaaagcttttgggttccatg

SEQ ID NO: 143926 - DNA, 20 bp, Artificial Sequence
  Description of Artificial Sequence: Synthetic oligonucleotide
  Target: LAMA2; (+) strand; PAM type: NRG; PAM sequence: GGG
aaagcttttgggttccatga

SEQ ID NO: 143927 - DNA, 20 bp, Artificial Sequence
  Description of Artificial Sequence: Synthetic oligonucleotide
  Target: LAMA2; (+) strand; PAM type: NRG; PAM sequence: GAG
agcttttgggttccatgagg

SEQ ID NO: 143928 - DNA, 20 bp, Artificial Sequence
  Description of Artificial Sequence: Synthetic oligonucleotide
  Target: LAMA2; (+) strand; PAM type: NRG; PAM sequence: GAG
cttttgggttccatgaggga

SEQ ID NO: 143929 - DNA, 20 bp, Artificial Sequence
  Description of Artificial Sequence: Synthetic oligonucleotide
  Target: LAMA2; (+) strand; PAM type: NRG; PAM sequence: AGG
ttttgggttccatgagggag

SEQ ID NO: 143930 - DNA, 20 bp, Artificial Sequence
  Description of Artificial Sequence: Synthetic oligonucleotide
  Target: LAMA2; (+) strand; PAM type: NRG; PAM sequence: GGG
tttgggttccatgagggaga

SEQ ID NO: 143931 - DNA, 20 bp, Artificial Sequence
  Description of Artificial Sequence: Synthetic oligonucleotide
  Target: LAMA2; (+) strand; PAM type: NRG; PAM sequence: TGG
atcacataaacatatatgta

SEQ ID NO: 143932 - DNA, 20 bp, Artificial Sequence
  Description of Artificial Sequence: Synthetic oligonucleotide
  Target: LAMA2; (+) strand; PAM type: NRG; PAM sequence: CAG
tatatgtatggtcttccatg

SEQ ID NO: 143933 - DNA, 20 bp, Artificial Sequence
  Description of Artificial Sequence: Synthetic oligonucleotide
  Target: LAMA2; (+) strand; PAM type: NRG; PAM sequence: CAG
tgtatggtcttccatgcagt

SEQ ID NO: 143934 - DNA, 20 bp, Artificial Sequence
  Description of Artificial Sequence: Synthetic oligonucleotide
  Target: LAMA2; (+) strand; PAM type: NRG; PAM sequence: CAG
ttccatgcagtcagccaaat

SEQ ID NO: 143935 - DNA, 20 bp, Artificial Sequence
  Description of Artificial Sequence: Synthetic oligonucleotide
  Target: LAMA2; (+) strand; PAM type: NRG; PAM sequence: TAG
caaatcagacaaatcatgcc

SEQ ID NO: 143936 - DNA, 20 bp, Artificial Sequence
  Description of Artificial Sequence: Synthetic oligonucleotide
  Target: LAMA2; (+) strand; PAM type: NRG; PAM sequence: AGG
aaatcagacaaatcatgcct

SEQ ID NO: 143937 - DNA, 20 bp, Artificial Sequence
  Description of Artificial Sequence: Synthetic oligonucleotide
  Target: LAMA2; (+) strand; PAM type: NRG; PAM sequence: GAG
atcagacaaatcatgcctag

SEQ ID NO: 143938 - DNA, 20 bp, Artificial Sequence
  Description of Artificial Sequence: Synthetic oligonucleotide
  Target: LAMA2; (+) strand; PAM type: NRG; PAM sequence: AAG
aaatcatgcctaggagttga

SEQ ID NO: 143939 - DNA, 20 bp, Artificial Sequence
  Description of Artificial Sequence: Synthetic oligonucleotide
  Target: LAMA2; (+) strand; PAM type: NRG; PAM sequence: TGG
tcatgcctaggagttgaaag

SEQ ID NO: 143940 - DNA, 20 bp, Artificial Sequence
  Description of Artificial Sequence: Synthetic oligonucleotide
  Target: LAMA2; (+) strand; PAM type: NRG; PAM sequence: GGG
catgcctaggagttgaaagt

SEQ ID NO: 143941 - DNA, 20 bp, Artificial Sequence
  Description of Artificial Sequence: Synthetic oligonucleotide
  Target: LAMA2; (+) strand; PAM type: NRG; PAM sequence: TAG
aaagtgggaactgatttgtc

SEQ ID NO: 143942 - DNA, 20 bp, Artificial Sequence
  Description of Artificial Sequence: Synthetic oligonucleotide
  Target: LAMA2; (+) strand; PAM type: NRG; PAM sequence: TAG
tctagtttgaatattctgat

SEQ ID NO: 143943 - DNA, 20 bp, Artificial Sequence
  Description of Artificial Sequence: Synthetic oligonucleotide
  Target: LAMA2; (+) strand; PAM type: NRG; PAM sequence: TAG
gaatattctgattagtgaac

SEQ ID NO: 143944 - DNA, 20 bp, Artificial Sequence
  Description of Artificial Sequence: Synthetic oligonucleotide
  Target: LAMA2; (+) strand; PAM type: NRG; PAM sequence: TAG
attctgattagtgaactagc

SEQ ID NO: 143945 - DNA, 20 bp, Artificial Sequence
  Description of Artificial Sequence: Synthetic oligonucleotide
  Target: LAMA2; (+) strand; PAM type: NRG; PAM sequence: TAG
gattagtgaactagctagct

SEQ ID NO: 143946 - DNA, 20 bp, Artificial Sequence
  Description of Artificial Sequence: Synthetic oligonucleotide
  Target: LAMA2; (+) strand; PAM type: NRG; PAM sequence: TGG
ctagctagcttagaattttg

SEQ ID NO: 143947 - DNA, 20 bp, Artificial Sequence
  Description of Artificial Sequence: Synthetic oligonucleotide
  Target: LAMA2; (+) strand; PAM type: NRG; PAM sequence: CAG
tgtcattcatttatgtacta

SEQ ID NO: 143948 - DNA, 20 bp, Artificial Sequence
  Description of Artificial Sequence: Synthetic oligonucleotide
  Target: LAMA2; (+) strand; PAM type: NRG; PAM sequence: CAG
ctacagctacacctaaatcc

SEQ ID NO: 143949 - DNA, 20 bp, Artificial Sequence
  Description of Artificial Sequence: Synthetic oligonucleotide
  Target: LAMA2; (+) strand; PAM type: NRG; PAM sequence: CGG
cacctaaatcccagaaaaat

SEQ ID NO: 143950 - DNA, 20 bp, Artificial Sequence
  Description of Artificial Sequence: Synthetic oligonucleotide
  Target: LAMA2; (+) strand; PAM type: NRG; PAM sequence: TAG
aacaaaataacctattattc

SEQ ID NO: 143951 - DNA, 20 bp, Artificial Sequence
  Description of Artificial Sequence: Synthetic oligonucleotide
  Target: LAMA2; (+) strand; PAM type: NRG; PAM sequence: AAG
ttaaattttaaaatccacat

SEQ ID NO: 143952 - DNA, 20 bp, Artificial Sequence
  Description of Artificial Sequence: Synthetic oligonucleotide
  Target: LAMA2; (+) strand; PAM type: NRG; PAM sequence: CAG
tatttttttcatttcaccct

SEQ ID NO: 143953 - DNA, 20 bp, Artificial Sequence
  Description of Artificial Sequence: Synthetic oligonucleotide
  Target: LAMA2; (+) strand; PAM type: NRG; PAM sequence: GAG
tttttttcatttcaccctca

SEQ ID NO: 143954 - DNA, 20 bp, Artificial Sequence
  Description of Artificial Sequence: Synthetic oligonucleotide
  Target: LAMA2; (+) strand; PAM type: NRG; PAM sequence: CAG
tcctctatccaaaaacaaca

SEQ ID NO: 143955 - DNA, 20 bp, Artificial Sequence
  Description of Artificial Sequence: Synthetic oligonucleotide
  Target: LAMA2; (+) strand; PAM type: NRG; PAM sequence: AAG
tctatccaaaaacaacacag

SEQ ID NO: 143956 - DNA, 20 bp, Artificial Sequence
  Description of Artificial Sequence: Synthetic oligonucleotide
  Target: LAMA2; (+) strand; PAM type: NRG; PAM sequence: CAG
aacacagaagcaaaatgtta

SEQ ID NO: 143957 - DNA, 20 bp, Artificial Sequence
  Description of Artificial Sequence: Synthetic oligonucleotide
  Target: LAMA2; (+) strand; PAM type: NRG; PAM sequence: GAG
cacagaagcaaaatgttaca

SEQ ID NO: 143958 - DNA, 20 bp, Artificial Sequence
  Description of Artificial Sequence: Synthetic oligonucleotide
  Target: LAMA2; (+) strand; PAM type: NRG; PAM sequence: CAG
gcaaaatgttacagagacac

SEQ ID NO: 143959 - DNA, 20 bp, Artificial Sequence
  Description of Artificial Sequence: Synthetic oligonucleotide
  Target: LAMA2; (+) strand; PAM type: NRG; PAM sequence: CAG
agagacaccagaatgttgcc

SEQ ID NO: 143960 - DNA, 20 bp, Artificial Sequence
  Description of Artificial Sequence: Synthetic oligonucleotide
  Target: LAMA2; (+) strand; PAM type: NRG; PAM sequence: AAG
aaaccatgcattaattactc

SEQ ID NO: 143961 - DNA, 20 bp, Artificial Sequence
  Description of Artificial Sequence: Synthetic oligonucleotide
  Target: LAMA2; (+) strand; PAM type: NRG; PAM sequence: CAG
catgcattaattactcaagc

SEQ ID NO: 143962 - DNA, 20 bp, Artificial Sequence
  Description of Artificial Sequence: Synthetic oligonucleotide
  Target: LAMA2; (+) strand; PAM type: NRG; PAM sequence: AGG
atgcattaattactcaagcc

SEQ ID NO: 143963 - DNA, 20 bp, Artificial Sequence
  Description of Artificial Sequence: Synthetic oligonucleotide
  Target: LAMA2; (+) strand; PAM type: NRG; PAM sequence: AAG
gcaactctattttatcattt

SEQ ID NO: 143964 - DNA, 20 bp, Artificial Sequence
  Description of Artificial Sequence: Synthetic oligonucleotide
  Target: LAMA2; (+) strand; PAM type: NRG; PAM sequence: GAG
aactctattttatcatttaa

SEQ ID NO: 143965 - DNA, 20 bp, Artificial Sequence
  Description of Artificial Sequence: Synthetic oligonucleotide
  Target: LAMA2; (+) strand; PAM type: NRG; PAM sequence: GAG
ctctattttatcatttaaga

SEQ ID NO: 143966 - DNA, 20 bp, Artificial Sequence
  Description of Artificial Sequence: Synthetic oligonucleotide
  Target: LAMA2; (+) strand; PAM type: NRG; PAM sequence: AAG
tccacatgtgtgttctaaaa

SEQ ID NO: 143967 - DNA, 20 bp, Artificial Sequence
  Description of Artificial Sequence: Synthetic oligonucleotide
  Target: LAMA2; (+) strand; PAM type: NRG; PAM sequence: CAG
atgtgtgttctaaaaaagaa

SEQ ID NO: 143968 - DNA, 20 bp, Artificial Sequence
  Description of Artificial Sequence: Synthetic oligonucleotide
  Target: LAMA2; (+) strand; PAM type: NRG; PAM sequence: GAG
gtgtgttctaaaaaagaaca

SEQ ID NO: 143969 - DNA, 20 bp, Artificial Sequence
  Description of Artificial Sequence: Synthetic oligonucleotide
  Target: LAMA2; (+) strand; PAM type: NRG; PAM sequence: CAG
aaaaagaacagagaaataac

SEQ ID NO: 143970 - DNA, 20 bp, Artificial Sequence
  Description of Artificial Sequence: Synthetic oligonucleotide
  Target: LAMA2; (+) strand; PAM type: NRG; PAM sequence: TAG
ataaccagtcctctgtaact

SEQ ID NO: 143971 - DNA, 20 bp, Artificial Sequence
  Description of Artificial Sequence: Synthetic oligonucleotide
  Target: LAMA2; (+) strand; PAM type: NRG; PAM sequence: TGG
aacttagcaaaaatacaaat

SEQ ID NO: 143972 - DNA, 20 bp, Artificial Sequence
  Description of Artificial Sequence: Synthetic oligonucleotide
  Target: LAMA2; (+) strand; PAM type: NRG; PAM sequence: CAG
ctctttttgaaataaatttt

SEQ ID NO: 143973 - DNA, 20 bp, Artificial Sequence
  Description of Artificial Sequence: Synthetic oligonucleotide
  Target: LAMA2; (+) strand; PAM type: NRG; PAM sequence: CGG
agcttgactttcttttgcct

SEQ ID NO: 143974 - DNA, 20 bp, Artificial Sequence
  Description of Artificial Sequence: Synthetic oligonucleotide
  Target: LAMA2; (+) strand; PAM type: NRG; PAM sequence: GGG
gcttgactttcttttgcctc

SEQ ID NO: 143975 - DNA, 20 bp, Artificial Sequence
  Description of Artificial Sequence: Synthetic oligonucleotide
  Target: LAMA2; (+) strand; PAM type: NRG; PAM sequence: TGG
ttcttttgcctcgggtattc

SEQ ID NO: 143976 - DNA, 20 bp, Artificial Sequence
  Description of Artificial Sequence: Synthetic oligonucleotide
  Target: LAMA2; (+) strand; PAM type: NRG; PAM sequence: TAG
tattctggattatcattttg

SEQ ID NO: 143977 - DNA, 20 bp, Artificial Sequence
  Description of Artificial Sequence: Synthetic oligonucleotide
  Target: LAMA2; (+) strand; PAM type: NRG; PAM sequence: TGG
gattatcattttgtagcatc

SEQ ID NO: 143978 - DNA, 20 bp, Artificial Sequence
  Description of Artificial Sequence: Synthetic oligonucleotide
  Target: LAMA2; (+) strand; PAM type: NRG; PAM sequence: TGG
gataattttacattaacatc

SEQ ID NO: 143979 - DNA, 20 bp, Artificial Sequence
  Description of Artificial Sequence: Synthetic oligonucleotide
  Target: LAMA2; (+) strand; PAM type: NRG; PAM sequence: GAG
taattttacattaacatctg

SEQ ID NO: 143980 - DNA, 20 bp, Artificial Sequence
  Description of Artificial Sequence: Synthetic oligonucleotide
  Target: LAMA2; (+) strand; PAM type: NRG; PAM sequence: GAG
ttacattaacatctggagtt

SEQ ID NO: 143981 - DNA, 20 bp, Artificial Sequence
  Description of Artificial Sequence: Synthetic oligonucleotide
  Target: LAMA2; (+) strand; PAM type: NRG; PAM sequence: AGG
tacattaacatctggagttg

SEQ ID NO: 143982 - DNA, 20 bp, Artificial Sequence
  Description of Artificial Sequence: Synthetic oligonucleotide
  Target: LAMA2; (+) strand; PAM type: NRG; PAM sequence: GGG
acattaacatctggagttga

SEQ ID NO: 143983 - DNA, 20 bp, Artificial Sequence
  Description of Artificial Sequence: Synthetic oligonucleotide
  Target: LAMA2; (+) strand; PAM type: NRG; PAM sequence: CGG
ttgagggtctttttatttgt

SEQ ID NO: 143984 - DNA, 20 bp, Artificial Sequence
  Description of Artificial Sequence: Synthetic oligonucleotide
  Target: LAMA2; (+) strand; PAM type: NRG; PAM sequence: TAG
ttttatttgtcggatgcata

SEQ ID NO: 143985 - DNA, 20 bp, Artificial Sequence
  Description of Artificial Sequence: Synthetic oligonucleotide
  Target: LAMA2; (+) strand; PAM type: NRG; PAM sequence: AAG
tgcatatagaatacttctgt

SEQ ID NO: 143986 - DNA, 20 bp, Artificial Sequence
  Description of Artificial Sequence: Synthetic oligonucleotide
  Target: LAMA2; (+) strand; PAM type: NRG; PAM sequence: CAG
ctgtaagaaatgtattttcc

SEQ ID NO: 143987 - DNA, 20 bp, Artificial Sequence
  Description of Artificial Sequence: Synthetic oligonucleotide
  Target: LAMA2; (+) strand; PAM type: NRG; PAM sequence: AAG
gctgctgtttattcatttta

SEQ ID NO: 143988 - DNA, 20 bp, Artificial Sequence
  Description of Artificial Sequence: Synthetic oligonucleotide
  Target: LAMA2; (+) strand; PAM type: NRG; PAM sequence: GAG
tgctgtttattcattttaaa

SEQ ID NO: 143989 - DNA, 20 bp, Artificial Sequence
  Description of Artificial Sequence: Synthetic oligonucleotide
  Target: LAMA2; (+) strand; PAM type: NRG; PAM sequence: TGG
ttattcattttaaagagaca

SEQ ID NO: 143990 - DNA, 20 bp, Artificial Sequence
  Description of Artificial Sequence: Synthetic oligonucleotide
  Target: LAMA2; (+) strand; PAM type: NRG; PAM sequence: AAG
cattttaaagagacatggtt

SEQ ID NO: 143991 - DNA, 20 bp, Artificial Sequence
  Description of Artificial Sequence: Synthetic oligonucleotide
  Target: LAMA2; (+) strand; PAM type: NRG; PAM sequence: AAG
ttaaagagacatggttaagt

SEQ ID NO: 143992 - DNA, 20 bp, Artificial Sequence
  Description of Artificial Sequence: Synthetic oligonucleotide
  Target: LAMA2; (+) strand; PAM type: NRG; PAM sequence: CAG
acatggttaagtaagtctaa

SEQ ID NO: 143993 - DNA, 20 bp, Artificial Sequence
  Description of Artificial Sequence: Synthetic oligonucleotide
  Target: LAMA2; (+) strand; PAM type: NRG; PAM sequence: TAG
agtaagtctaacagcctcct

SEQ ID NO: 143994 - DNA, 20 bp, Artificial Sequence
  Description of Artificial Sequence: Synthetic oligonucleotide
  Target: LAMA2; (+) strand; PAM type: NRG; PAM sequence: AGG
gtaagtctaacagcctcctt

SEQ ID NO: 143995 - DNA, 20 bp, Artificial Sequence
  Description of Artificial Sequence: Synthetic oligonucleotide
  Target: LAMA2; (+) strand; PAM type: NRG; PAM sequence: TAG
aattcaattcctaaattcct

SEQ ID NO: 143996 - DNA, 20 bp, Artificial Sequence
  Description of Artificial Sequence: Synthetic oligonucleotide
  Target: LAMA2; (+) strand; PAM type: NRG; PAM sequence: AGG
attcaattcctaaattcctt

SEQ ID NO: 143997 - DNA, 20 bp, Artificial Sequence
  Description of Artificial Sequence: Synthetic oligonucleotide
  Target: LAMA2; (+) strand; PAM type: NRG; PAM sequence: AAG
cacaaaccatgtttaatctg

SEQ ID NO: 143998 - DNA, 20 bp, Artificial Sequence
  Description of Artificial Sequence: Synthetic oligonucleotide
  Target: LAMA2; (+) strand; PAM type: NRG; PAM sequence: CAG
tgtttaatctgaagtcctgc

SEQ ID NO: 143999 - DNA, 20 bp, Artificial Sequence
  Description of Artificial Sequence: Synthetic oligonucleotide
  Target: LAMA2; (+) strand; PAM type: NRG; PAM sequence: CAG
cagtctgttttctctcctac

SEQ ID NO: 144000 - DNA, 20 bp, Artificial Sequence
  Description of Artificial Sequence: Synthetic oligonucleotide
  Target: LAMA2; (+) strand; PAM type: NRG; PAM sequence: TGG
tctcctaccagcttttccca

SEQ ID NO: 144001 - DNA, 20 bp, Artificial Sequence
  Description of Artificial Sequence: Synthetic oligonucleotide
  Target: LAMA2; (+) strand; PAM type: NRG; PAM sequence: CAG
cctaccagcttttcccatgg

SEQ ID NO: 144002 - DNA, 20 bp, Artificial Sequence
  Description of Artificial Sequence: Synthetic oligonucleotide
  Target: LAMA2; (+) strand; PAM type: NRG; PAM sequence: TGG
agcttttcccatggcagaaa

SEQ ID NO: 144003 - DNA, 20 bp, Artificial Sequence
  Description of Artificial Sequence: Synthetic oligonucleotide
  Target: LAMA2; (+) strand; PAM type: NRG; PAM sequence: GAG
ttcccatggcagaaatggtt

SEQ ID NO: 144004 - DNA, 20 bp, Artificial Sequence
  Description of Artificial Sequence: Synthetic oligonucleotide
  Target: LAMA2; (+) strand; PAM type: NRG; PAM sequence: CAG
agaaatggttgagatctgta

SEQ ID NO: 144005 - DNA, 20 bp, Artificial Sequence
  Description of Artificial Sequence: Synthetic oligonucleotide
  Target: LAMA2; (+) strand; PAM type: NRG; PAM sequence: AAG
aatggttgagatctgtacag

SEQ ID NO: 144006 - DNA, 20 bp, Artificial Sequence
  Description of Artificial Sequence: Synthetic oligonucleotide
  Target: LAMA2; (+) strand; PAM type: NRG; PAM sequence: AGG
atggttgagatctgtacaga

SEQ ID NO: 144007 - DNA, 20 bp, Artificial Sequence
  Description of Artificial Sequence: Synthetic oligonucleotide
  Target: LAMA2; (+) strand; PAM type: NRG; PAM sequence: GAG
ggttgagatctgtacagaag

SEQ ID NO: 144008 - DNA, 20 bp, Artificial Sequence
  Description of Artificial Sequence: Synthetic oligonucleotide
  Target: LAMA2; (+) strand; PAM type: NRG; PAM sequence: AGG
gttgagatctgtacagaagg

SEQ ID NO: 144009 - DNA, 20 bp, Artificial Sequence
  Description of Artificial Sequence: Synthetic oligonucleotide
  Target: LAMA2; (+) strand; PAM type: NRG; PAM sequence: TAG
tctgtacagaaggaggactt

SEQ ID NO: 144010 - DNA, 20 bp, Artificial Sequence
  Description of Artificial Sequence: Synthetic oligonucleotide
  Target: LAMA2; (+) strand; PAM type: NRG; PAM sequence: TGG
acagaaggaggactttagtc

SEQ ID NO: 144011 - DNA, 20 bp, Artificial Sequence
  Description of Artificial Sequence: Synthetic oligonucleotide
  Target: LAMA2; (+) strand; PAM type: NRG; PAM sequence: CAG
ggaggactttagtctggtaa

SEQ ID NO: 144012 - DNA, 20 bp, Artificial Sequence
  Description of Artificial Sequence: Synthetic oligonucleotide
  Target: LAMA2; (+) strand; PAM type: NRG; PAM sequence: AGG
gaggactttagtctggtaac

SEQ ID NO: 144013 - DNA, 20 bp, Artificial Sequence
  Description of Artificial Sequence: Synthetic oligonucleotide
  Target: LAMA2; (+) strand; PAM type: NRG; PAM sequence: TGG
gactttagtctggtaacagg

SEQ ID NO: 144014 - DNA, 20 bp, Artificial Sequence
  Description of Artificial Sequence: Synthetic oligonucleotide
  Target: LAMA2; (+) strand; PAM type: NRG; PAM sequence: GAG
tggtaacaggtggtgttgct

SEQ ID NO: 144015 - DNA, 20 bp, Artificial Sequence
  Description of Artificial Sequence: Synthetic oligonucleotide
  Target: LAMA2; (+) strand; PAM type: NRG; PAM sequence: AAG
caggtggtgttgctgagtgc

SEQ ID NO: 144016 - DNA, 20 bp, Artificial Sequence
  Description of Artificial Sequence: Synthetic oligonucleotide
  Target: LAMA2; (+) strand; PAM type: NRG; PAM sequence: AGG
aggtggtgttgctgagtgca

SEQ ID NO: 144017 - DNA, 20 bp, Artificial Sequence
  Description of Artificial Sequence: Synthetic oligonucleotide
  Target: LAMA2; (+) strand; PAM type: NRG; PAM sequence: GGG
ggtggtgttgctgagtgcaa

SEQ ID NO: 144018 - DNA, 20 bp, Artificial Sequence
  Description of Artificial Sequence: Synthetic oligonucleotide
  Target: LAMA2; (+) strand; PAM type: NRG; PAM sequence: CAG
agtgcaagggcctttgaaat

SEQ ID NO: 144019 - DNA, 20 bp, Artificial Sequence
  Description of Artificial Sequence: Synthetic oligonucleotide
  Target: LAMA2; (+) strand; PAM type: NRG; PAM sequence: AGG
gtgcaagggcctttgaaatc

SEQ ID NO: 144020 - DNA, 20 bp, Artificial Sequence
  Description of Artificial Sequence: Synthetic oligonucleotide
  Target: LAMA2; (+) strand; PAM type: NRG; PAM sequence: TGG
agggcctttgaaatcaggcc

SEQ ID NO: 144021 - DNA, 20 bp, Artificial Sequence
  Description of Artificial Sequence: Synthetic oligonucleotide
  Target: LAMA2; (+) strand; PAM type: NRG; PAM sequence: TGG
ctttgaaatcaggcctggtt

SEQ ID NO: 144022 - DNA, 20 bp, Artificial Sequence
  Description of Artificial Sequence: Synthetic oligonucleotide
  Target: LAMA2; (+) strand; PAM type: NRG; PAM sequence: TGG
tcaggcctggtttggaatct

SEQ ID NO: 144023 - DNA, 20 bp, Artificial Sequence
  Description of Artificial Sequence: Synthetic oligonucleotide
  Target: LAMA2; (+) strand; PAM type: NRG; PAM sequence: CAG
cctggtttggaatcttggtc

SEQ ID NO: 144024 - DNA, 20 bp, Artificial Sequence
  Description of Artificial Sequence: Synthetic oligonucleotide
  Target: LAMA2; (+) strand; PAM type: NRG; PAM sequence: TAG
aatcttggtccagcaatcaa

SEQ ID NO: 144025 - DNA, 20 bp, Artificial Sequence
  Description of Artificial Sequence: Synthetic oligonucleotide
  Target: LAMA2; (+) strand; PAM type: NRG; PAM sequence: TAG
aatcaatagctgtgtaatct

SEQ ID NO: 144026 - DNA, 20 bp, Artificial Sequence
  Description of Artificial Sequence: Synthetic oligonucleotide
  Target: LAMA2; (+) strand; PAM type: NRG; PAM sequence: AGG
atcaatagctgtgtaatctt

SEQ ID NO: 144027 - DNA, 20 bp, Artificial Sequence
  Description of Artificial Sequence: Synthetic oligonucleotide
  Target: LAMA2; (+) strand; PAM type: NRG; PAM sequence: AAG
taatcttaggtaactctttg

SEQ ID NO: 144028 - DNA, 20 bp, Artificial Sequence
  Description of Artificial Sequence: Synthetic oligonucleotide
  Target: LAMA2; (+) strand; PAM type: NRG; PAM sequence: TAG
ttaggtaactctttgaagtt

SEQ ID NO: 144029 - DNA, 20 bp, Artificial Sequence
  Description of Artificial Sequence: Synthetic oligonucleotide
  Target: LAMA2; (+) strand; PAM type: NRG; PAM sequence: AAG
gaagtttagtttccgcatct

SEQ ID NO: 144030 - DNA, 20 bp, Artificial Sequence
  Description of Artificial Sequence: Synthetic oligonucleotide
  Target: LAMA2; (+) strand; PAM type: NRG; PAM sequence: GAG
tagtttccgcatctaagaat

SEQ ID NO: 144031 - DNA, 20 bp, Artificial Sequence
  Description of Artificial Sequence: Synthetic oligonucleotide
  Target: LAMA2; (+) strand; PAM type: NRG; PAM sequence: AGG
agtttccgcatctaagaatg

SEQ ID NO: 144032 - DNA, 20 bp, Artificial Sequence
  Description of Artificial Sequence: Synthetic oligonucleotide
  Target: LAMA2; (+) strand; PAM type: NRG; PAM sequence: AAG
ttccgcatctaagaatgagg

SEQ ID NO: 144033 - DNA, 20 bp, Artificial Sequence
  Description of Artificial Sequence: Synthetic oligonucleotide
  Target: LAMA2; (+) strand; PAM type: NRG; PAM sequence: TGG
aaatacatatctgcccacgt

SEQ ID NO: 144034 - DNA, 20 bp, Artificial Sequence
  Description of Artificial Sequence: Synthetic oligonucleotide
  Target: LAMA2; (+) strand; PAM type: NRG; PAM sequence: GAG
ccacgttggttgtattaaat

SEQ ID NO: 144035 - DNA, 20 bp, Artificial Sequence
  Description of Artificial Sequence: Synthetic oligonucleotide
  Target: LAMA2; (+) strand; PAM type: NRG; PAM sequence: AAG
tttacataacacatccgact

SEQ ID NO: 144036 - DNA, 20 bp, Artificial Sequence
  Description of Artificial Sequence: Synthetic oligonucleotide
  Target: LAMA2; (+) strand; PAM type: NRG; PAM sequence: AGG
ttacataacacatccgacta

SEQ ID NO: 144037 - DNA, 20 bp, Artificial Sequence
  Description of Artificial Sequence: Synthetic oligonucleotide
  Target: LAMA2; (+) strand; PAM type: NRG; PAM sequence: CAG
taacacatccgactaaggtg

SEQ ID NO: 144038 - DNA, 20 bp, Artificial Sequence
  Description of Artificial Sequence: Synthetic oligonucleotide
  Target: LAMA2; (+) strand; PAM type: NRG; PAM sequence: CAG
ggtgcagatgtaataaatga

SEQ ID NO: 144039 - DNA, 20 bp, Artificial Sequence
  Description of Artificial Sequence: Synthetic oligonucleotide
  Target: LAMA2; (+) strand; PAM type: NRG; PAM sequence: CAG
gctgttattatcatttattt

SEQ ID NO: 144040 - DNA, 20 bp, Artificial Sequence
  Description of Artificial Sequence: Synthetic oligonucleotide
  Target: LAMA2; (+) strand; PAM type: NRG; PAM sequence: CAG
tcatttatttcagcacgttg

SEQ ID NO: 144041 - DNA, 20 bp, Artificial Sequence
  Description of Artificial Sequence: Synthetic oligonucleotide
  Target: LAMA2; (+) strand; PAM type: NRG; PAM sequence: AAG
ttatttcagcacgttgcaga

SEQ ID NO: 144042 - DNA, 20 bp, Artificial Sequence
  Description of Artificial Sequence: Synthetic oligonucleotide
  Target: LAMA2; (+) strand; PAM type: NRG; PAM sequence: TAG
ttcttcttttcctgacctcc

SEQ ID NO: 144043 - DNA, 20 bp, Artificial Sequence
  Description of Artificial Sequence: Synthetic oligonucleotide
  Target: LAMA2; (+) strand; PAM type: NRG; PAM sequence: AGG
tcttcttttcctgacctcct

SEQ ID NO: 144044 - DNA, 20 bp, Artificial Sequence
  Description of Artificial Sequence: Synthetic oligonucleotide
  Target: LAMA2; (+) strand; PAM type: NRG; PAM sequence: GGG
cttcttttcctgacctccta

SEQ ID NO: 144045 - DNA, 20 bp, Artificial Sequence
  Description of Artificial Sequence: Synthetic oligonucleotide
  Target: LAMA2; (+) strand; PAM type: NRG; PAM sequence: TAG
agggcttttatgcatgcaat

SEQ ID NO: 144046 - DNA, 20 bp, Artificial Sequence
  Description of Artificial Sequence: Synthetic oligonucleotide
  Target: LAMA2; (+) strand; PAM type: NRG; PAM sequence: TGG
tatgcatgcaattagcaatt

SEQ ID NO: 144047 - DNA, 20 bp, Artificial Sequence
  Description of Artificial Sequence: Synthetic oligonucleotide
  Target: LAMA2; (+) strand; PAM type: NRG; PAM sequence: GGG
atgcatgcaattagcaattt

SEQ ID NO: 144048 - DNA, 20 bp, Artificial Sequence
  Description of Artificial Sequence: Synthetic oligonucleotide
  Target: LAMA2; (+) strand; PAM type: NRG; PAM sequence: AAG
tagcaatttgggatttgcac

SEQ ID NO: 144049 - DNA, 20 bp, Artificial Sequence
  Description of Artificial Sequence: Synthetic oligonucleotide
  Target: LAMA2; (+) strand; PAM type: NRG; PAM sequence: AGG
agcaatttgggatttgcaca

SEQ ID NO: 144050 - DNA, 20 bp, Artificial Sequence
  Description of Artificial Sequence: Synthetic oligonucleotide
  Target: LAMA2; (+) strand; PAM type: NRG; PAM sequence: CAG
ggatttgcacaaggtttttc

SEQ ID NO: 144051 - DNA, 20 bp, Artificial Sequence
  Description of Artificial Sequence: Synthetic oligonucleotide
  Target: LAMA2; (+) strand; PAM type: NRG; PAM sequence: GAG
atttgcacaaggtttttcca

SEQ ID NO: 144052 - DNA, 20 bp, Artificial Sequence
  Description of Artificial Sequence: Synthetic oligonucleotide
  Target: LAMA2; (+) strand; PAM type: NRG; PAM sequence: AAG
acaaggtttttccagagtac

SEQ ID NO: 144053 - DNA, 20 bp, Artificial Sequence
  Description of Artificial Sequence: Synthetic oligonucleotide
  Target: LAMA2; (+) strand; PAM type: NRG; PAM sequence: GAG
ttccagagtacaagattttt

SEQ ID NO: 144054 - DNA, 20 bp, Artificial Sequence
  Description of Artificial Sequence: Synthetic oligonucleotide
  Target: LAMA2; (+) strand; PAM type: NRG; PAM sequence: GAG
ccagagtacaagatttttga

SEQ ID NO: 144055 - DNA, 20 bp, Artificial Sequence
  Description of Artificial Sequence: Synthetic oligonucleotide
  Target: LAMA2; (+) strand; PAM type: NRG; PAM sequence: TAG
tgtgactgaatcttattctt

SEQ ID NO: 144056 - DNA, 20 bp, Artificial Sequence
  Description of Artificial Sequence: Synthetic oligonucleotide
  Target: LAMA2; (+) strand; PAM type: NRG; PAM sequence: GAG
tctttagaaacttgctcttt

SEQ ID NO: 144057 - DNA, 20 bp, Artificial Sequence
  Description of Artificial Sequence: Synthetic oligonucleotide
  Target: LAMA2; (+) strand; PAM type: NRG; PAM sequence: TGG
ttagaaacttgctctttgag

SEQ ID NO: 144058 - DNA, 20 bp, Artificial Sequence
  Description of Artificial Sequence: Synthetic oligonucleotide
  Target: LAMA2; (+) strand; PAM type: NRG; PAM sequence: GAG
agaaacttgctctttgagtg

SEQ ID NO: 144059 - DNA, 20 bp, Artificial Sequence
  Description of Artificial Sequence: Synthetic oligonucleotide
  Target: LAMA2; (+) strand; PAM type: NRG; PAM sequence: AGG
gaaacttgctctttgagtgg

SEQ ID NO: 144060 - DNA, 20 bp, Artificial Sequence
  Description of Artificial Sequence: Synthetic oligonucleotide
  Target: LAMA2; (+) strand; PAM type: NRG; PAM sequence: AAG
ttgctctttgagtggaggaa

SEQ ID NO: 144061 - DNA, 20 bp, Artificial Sequence
  Description of Artificial Sequence: Synthetic oligonucleotide
  Target: LAMA2; (+) strand; PAM type: NRG; PAM sequence: AGG
tgctctttgagtggaggaaa

SEQ ID NO: 144062 - DNA, 20 bp, Artificial Sequence
  Description of Artificial Sequence: Synthetic oligonucleotide
  Target: LAMA2; (+) strand; PAM type: NRG; PAM sequence: AAG
tctttgagtggaggaaaagg

SEQ ID NO: 144063 - DNA, 20 bp, Artificial Sequence
  Description of Artificial Sequence: Synthetic oligonucleotide
  Target: LAMA2; (+) strand; PAM type: NRG; PAM sequence: AAG
tggaggaaaaggaagaaact

SEQ ID NO: 144064 - DNA, 20 bp, Artificial Sequence
  Description of Artificial Sequence: Synthetic oligonucleotide
  Target: LAMA2; (+) strand; PAM type: NRG; PAM sequence: AAG
gttgactaatgacattataa

SEQ ID NO: 144065 - DNA, 20 bp, Artificial Sequence
  Description of Artificial Sequence: Synthetic oligonucleotide
  Target: LAMA2; (+) strand; PAM type: NRG; PAM sequence: CAG
gactaatgacattataaaag

SEQ ID NO: 144066 - DNA, 20 bp, Artificial Sequence
  Description of Artificial Sequence: Synthetic oligonucleotide
  Target: LAMA2; (+) strand; PAM type: NRG; PAM sequence: AGG
actaatgacattataaaagc

SEQ ID NO: 144067 - DNA, 20 bp, Artificial Sequence
  Description of Artificial Sequence: Synthetic oligonucleotide
  Target: LAMA2; (+) strand; PAM type: NRG; PAM sequence: TAG
aatgacattataaaagcagg

SEQ ID NO: 144068 - DNA, 20 bp, Artificial Sequence
  Description of Artificial Sequence: Synthetic oligonucleotide
  Target: LAMA2; (+) strand; PAM type: NRG; PAM sequence: GAG
tgacattataaaagcaggta

SEQ ID NO: 144069 - DNA, 20 bp, Artificial Sequence
  Description of Artificial Sequence: Synthetic oligonucleotide
  Target: LAMA2; (+) strand; PAM type: NRG; PAM sequence: GAG
gtagagaatcatttctttct

SEQ ID NO: 144070 - DNA, 20 bp, Artificial Sequence
  Description of Artificial Sequence: Synthetic oligonucleotide
  Target: LAMA2; (+) strand; PAM type: NRG; PAM sequence: TAG
catttctttctgagcttctg

SEQ ID NO: 144071 - DNA, 20 bp, Artificial Sequence
  Description of Artificial Sequence: Synthetic oligonucleotide
  Target: LAMA2; (+) strand; PAM type: NRG; PAM sequence: CAG
ctttctgagcttctgtagca

SEQ ID NO: 144072 - DNA, 20 bp, Artificial Sequence
  Description of Artificial Sequence: Synthetic oligonucleotide
  Target: LAMA2; (+) strand; PAM type: NRG; PAM sequence: AGG
tttctgagcttctgtagcac

SEQ ID NO: 144073 - DNA, 20 bp, Artificial Sequence
  Description of Artificial Sequence: Synthetic oligonucleotide
  Target: LAMA2; (+) strand; PAM type: NRG; PAM sequence: AAG
cttctgtagcacaggctatg

SEQ ID NO: 144074 - DNA, 20 bp, Artificial Sequence
  Description of Artificial Sequence: Synthetic oligonucleotide
  Target: LAMA2; (+) strand; PAM type: NRG; PAM sequence: TAG
gcacaggctatgaagtgtgc

SEQ ID NO: 144075 - DNA, 20 bp, Artificial Sequence
  Description of Artificial Sequence: Synthetic oligonucleotide
  Target: LAMA2; (+) strand; PAM type: NRG; PAM sequence: AAG
ggctatgaagtgtgctagta

SEQ ID NO: 144076 - DNA, 20 bp, Artificial Sequence
  Description of Artificial Sequence: Synthetic oligonucleotide
  Target: LAMA2; (+) strand; PAM type: NRG; PAM sequence: AAG
agtaaagtaaatacaatttt

SEQ ID NO: 144077 - DNA, 20 bp, Artificial Sequence
  Description of Artificial Sequence: Synthetic oligonucleotide
  Target: LAMA2; (+) strand; PAM type: NRG; PAM sequence: AAG
agtaaatacaattttaagca

SEQ ID NO: 144078 - DNA, 20 bp, Artificial Sequence
  Description of Artificial Sequence: Synthetic oligonucleotide
  Target: LAMA2; (+) strand; PAM type: NRG; PAM sequence: CAG
tacaattttaagcaaagttt

SEQ ID NO: 144079 - DNA, 20 bp, Artificial Sequence
  Description of Artificial Sequence: Synthetic oligonucleotide
  Target: LAMA2; (+) strand; PAM type: NRG; PAM sequence: AAG
gaaatcaccataataaaata

SEQ ID NO: 144080 - DNA, 20 bp, Artificial Sequence
  Description of Artificial Sequence: Synthetic oligonucleotide
  Target: LAMA2; (+) strand; PAM type: NRG; PAM sequence: AAG
cataataaaataaagtctgt

SEQ ID NO: 144081 - DNA, 20 bp, Artificial Sequence
  Description of Artificial Sequence: Synthetic oligonucleotide
  Target: LAMA2; (+) strand; PAM type: NRG; PAM sequence: CAG
aaaataaagtctgtaagtcc

SEQ ID NO: 144082 - DNA, 20 bp, Artificial Sequence
  Description of Artificial Sequence: Synthetic oligonucleotide
  Target: LAMA2; (+) strand; PAM type: NRG; PAM sequence: TGG
gtaagtcccagctattaaac

SEQ ID NO: 144083 - DNA, 20 bp, Artificial Sequence
  Description of Artificial Sequence: Synthetic oligonucleotide
  Target: LAMA2; (+) strand; PAM type: NRG; PAM sequence: CAG
agtcccagctattaaactgg

SEQ ID NO: 144084 - DNA, 20 bp, Artificial Sequence
  Description of Artificial Sequence: Synthetic oligonucleotide
  Target: LAMA2; (+) strand; PAM type: NRG; PAM sequence: AGG
gtcccagctattaaactggc

SEQ ID NO: 144085 - DNA, 20 bp, Artificial Sequence
  Description of Artificial Sequence: Synthetic oligonucleotide
  Target: LAMA2; (+) strand; PAM type: NRG; PAM sequence: GGG
tcccagctattaaactggca

SEQ ID NO: 144086 - DNA, 20 bp, Artificial Sequence
  Description of Artificial Sequence: Synthetic oligonucleotide
  Target: LAMA2; (+) strand; PAM type: NRG; PAM sequence: AAG
caatgtgcaatgttgttcga

SEQ ID NO: 144087 - DNA, 20 bp, Artificial Sequence
  Description of Artificial Sequence: Synthetic oligonucleotide
  Target: LAMA2; (+) strand; PAM type: NRG; PAM sequence: TAG
aaagttgttcaaaatgtttt

SEQ ID NO: 144088 - DNA, 20 bp, Artificial Sequence
  Description of Artificial Sequence: Synthetic oligonucleotide
  Target: LAMA2; (+) strand; PAM type: NRG; PAM sequence: TGG
aatgtttttagaatttttct

SEQ ID NO: 144089 - DNA, 20 bp, Artificial Sequence
  Description of Artificial Sequence: Synthetic oligonucleotide
  Target: LAMA2; (+) strand; PAM type: NRG; PAM sequence: GAG
tgtttttagaatttttcttg

SEQ ID NO: 144090 - DNA, 20 bp, Artificial Sequence
  Description of Artificial Sequence: Synthetic oligonucleotide
  Target: LAMA2; (+) strand; PAM type: NRG; PAM sequence: CAG
tgacttcacgtcttgactct

SEQ ID NO: 144091 - DNA, 20 bp, Artificial Sequence
  Description of Artificial Sequence: Synthetic oligonucleotide
  Target: LAMA2; (+) strand; PAM type: NRG; PAM sequence: TAG
agtgattttgtttgtctcct

SEQ ID NO: 144092 - DNA, 20 bp, Artificial Sequence
  Description of Artificial Sequence: Synthetic oligonucleotide
  Target: LAMA2; (+) strand; PAM type: NRG; PAM sequence: AAG
cccaaaattattcaccttaa

SEQ ID NO: 144093 - DNA, 20 bp, Artificial Sequence
  Description of Artificial Sequence: Synthetic oligonucleotide
  Target: LAMA2; (+) strand; PAM type: NRG; PAM sequence: TGG
tcaccttaaaagatgaaatt

SEQ ID NO: 144094 - DNA, 20 bp, Artificial Sequence
  Description of Artificial Sequence: Synthetic oligonucleotide
  Target: LAMA2; (+) strand; PAM type: NRG; PAM sequence: AAG
agatgaaatttggtaatatt

SEQ ID NO: 144095 - DNA, 20 bp, Artificial Sequence
  Description of Artificial Sequence: Synthetic oligonucleotide
  Target: LAMA2; (+) strand; PAM type: NRG; PAM sequence: CAG
gaaatttggtaatattaaga

SEQ ID NO: 144096 - DNA, 20 bp, Artificial Sequence
  Description of Artificial Sequence: Synthetic oligonucleotide
  Target: LAMA2; (+) strand; PAM type: NRG; PAM sequence: AAG
tggtaatattaagacagtca

SEQ ID NO: 144097 - DNA, 20 bp, Artificial Sequence
  Description of Artificial Sequence: Synthetic oligonucleotide
  Target: LAMA2; (+) strand; PAM type: NRG; PAM sequence: AGG
ggtaatattaagacagtcaa

SEQ ID NO: 144098 - DNA, 20 bp, Artificial Sequence
  Description of Artificial Sequence: Synthetic oligonucleotide
  Target: LAMA2; (+) strand; PAM type: NRG; PAM sequence: AAG
acagtcaaaggaatgtcctg

SEQ ID NO: 144099 - DNA, 20 bp, Artificial Sequence
  Description of Artificial Sequence: Synthetic oligonucleotide
  Target: LAMA2; (+) strand; PAM type: NRG; PAM sequence: CAG
atgtcctgaagttctgatca

SEQ ID NO: 144100 - DNA, 20 bp, Artificial Sequence
  Description of Artificial Sequence: Synthetic oligonucleotide
  Target: LAMA2; (+) strand; PAM type: NRG; PAM sequence: TAG
gttctgatcacagctatgaa

SEQ ID NO: 144101 - DNA, 20 bp, Artificial Sequence
  Description of Artificial Sequence: Synthetic oligonucleotide
  Target: LAMA2; (+) strand; PAM type: NRG; PAM sequence: TGG
taaaatcttctaaatatttt

SEQ ID NO: 144102 - DNA, 20 bp, Artificial Sequence
  Description of Artificial Sequence: Synthetic oligonucleotide
  Target: LAMA2; (+) strand; PAM type: NRG; PAM sequence: GGG
aaaatcttctaaatattttt

SEQ ID NO: 144103 - DNA, 20 bp, Artificial Sequence
  Description of Artificial Sequence: Synthetic oligonucleotide
  Target: LAMA2; (+) strand; PAM type: NRG; PAM sequence: TAG
aaatatttttgggatatgta

SEQ ID NO: 144104 - DNA, 20 bp, Artificial Sequence
  Description of Artificial Sequence: Synthetic oligonucleotide
  Target: LAMA2; (+) strand; PAM type: NRG; PAM sequence: AAG
tttgggatatgtatagaacc

SEQ ID NO: 144105 - DNA, 20 bp, Artificial Sequence
  Description of Artificial Sequence: Synthetic oligonucleotide
  Target: LAMA2; (+) strand; PAM type: NRG; PAM sequence: AAG
gaaccaagatgatttgtgtg

SEQ ID NO: 144106 - DNA, 20 bp, Artificial Sequence
  Description of Artificial Sequence: Synthetic oligonucleotide
  Target: LAMA2; (+) strand; PAM type: NRG; PAM sequence: AGG
aaccaagatgatttgtgtga

SEQ ID NO: 144107 - DNA, 20 bp, Artificial Sequence
  Description of Artificial Sequence: Synthetic oligonucleotide
  Target: LAMA2; (+) strand; PAM type: NRG; PAM sequence: GGG
accaagatgatttgtgtgaa

SEQ ID NO: 144108 - DNA, 20 bp, Artificial Sequence
  Description of Artificial Sequence: Synthetic oligonucleotide
  Target: LAMA2; (+) strand; PAM type: NRG; PAM sequence: TAG
gaagggtttttccattcact

SEQ ID NO: 144109 - DNA, 20 bp, Artificial Sequence
  Description of Artificial Sequence: Synthetic oligonucleotide
  Target: LAMA2; (+) strand; PAM type: NRG; PAM sequence: AAG
tttaatataattgtttaaaa

SEQ ID NO: 144110 - DNA, 20 bp, Artificial Sequence
  Description of Artificial Sequence: Synthetic oligonucleotide
  Target: LAMA2; (+) strand; PAM type: NRG; PAM sequence: TAG
tttaaaaaagattcatgtta

SEQ ID NO: 144111 - DNA, 20 bp, Artificial Sequence
  Description of Artificial Sequence: Synthetic oligonucleotide
  Target: LAMA2; (+) strand; PAM type: NRG; PAM sequence: CAG
aaagattcatgttatagtca

SEQ ID NO: 144112 - DNA, 20 bp, Artificial Sequence
  Description of Artificial Sequence: Synthetic oligonucleotide
  Target: LAMA2; (+) strand; PAM type: NRG; PAM sequence: AAG
atgttatagtcacagattaa

SEQ ID NO: 144113 - DNA, 20 bp, Artificial Sequence
  Description of Artificial Sequence: Synthetic oligonucleotide
  Target: LAMA2; (+) strand; PAM type: NRG; PAM sequence: AGG
tgttatagtcacagattaaa

SEQ ID NO: 144114 - DNA, 20 bp, Artificial Sequence
  Description of Artificial Sequence: Synthetic oligonucleotide
  Target: LAMA2; (+) strand; PAM type: NRG; PAM sequence: CAG
tatagtcacagattaaaagg

SEQ ID NO: 144115 - DNA, 20 bp, Artificial Sequence
  Description of Artificial Sequence: Synthetic oligonucleotide
  Target: LAMA2; (+) strand; PAM type: NRG; PAM sequence: AAG
agattaaaaggcagttttta

SEQ ID NO: 144116 - DNA, 20 bp, Artificial Sequence
  Description of Artificial Sequence: Synthetic oligonucleotide
  Target: LAMA2; (+) strand; PAM type: NRG; PAM sequence: AGG
gattaaaaggcagtttttaa

SEQ ID NO: 144117 - DNA, 20 bp, Artificial Sequence
  Description of Artificial Sequence: Synthetic oligonucleotide
  Target: LAMA2; (+) strand; PAM type: NRG; PAM sequence: GAG
ttaaaaggcagtttttaaag

SEQ ID NO: 144118 - DNA, 20 bp, Artificial Sequence
  Description of Artificial Sequence: Synthetic oligonucleotide
  Target: LAMA2; (+) strand; PAM type: NRG; PAM sequence: CAG
ttttaaaggagatgaattaa

SEQ ID NO: 144119 - DNA, 20 bp, Artificial Sequence
  Description of Artificial Sequence: Synthetic oligonucleotide
  Target: LAMA2; (+) strand; PAM type: NRG; PAM sequence: CAG
aggagatgaattaacagttt

SEQ ID NO: 144120 - DNA, 20 bp, Artificial Sequence
  Description of Artificial Sequence: Synthetic oligonucleotide
  Target: LAMA2; (+) strand; PAM type: NRG; PAM sequence: GAG
gagatgaattaacagtttca

SEQ ID NO: 144121 - DNA, 20 bp, Artificial Sequence
  Description of Artificial Sequence: Synthetic oligonucleotide
  Target: LAMA2; (+) strand; PAM type: NRG; PAM sequence: CAG
acatttatttattctgaaaa

SEQ ID NO: 144122 - DNA, 20 bp, Artificial Sequence
  Description of Artificial Sequence: Synthetic oligonucleotide
  Target: LAMA2; (+) strand; PAM type: NRG; PAM sequence: AAG
attttcttataaccacttta

SEQ ID NO: 144123 - DNA, 20 bp, Artificial Sequence
  Description of Artificial Sequence: Synthetic oligonucleotide
  Target: LAMA2; (+) strand; PAM type: NRG; PAM sequence: AAG
ataaccactttaaagaaatt

SEQ ID NO: 144124 - DNA, 20 bp, Artificial Sequence
  Description of Artificial Sequence: Synthetic oligonucleotide
  Target: LAMA2; (+) strand; PAM type: NRG; PAM sequence: AGG
taaccactttaaagaaatta

SEQ ID NO: 144125 - DNA, 20 bp, Artificial Sequence
  Description of Artificial Sequence: Synthetic oligonucleotide
  Target: LAMA2; (+) strand; PAM type: NRG; PAM sequence: CAG
ttaaagaaattaaggacttg

SEQ ID NO: 144126 - DNA, 20 bp, Artificial Sequence
  Description of Artificial Sequence: Synthetic oligonucleotide
  Target: LAMA2; (+) strand; PAM type: NRG; PAM sequence: AGG
taaagaaattaaggacttgc

SEQ ID NO: 144127 - DNA, 20 bp, Artificial Sequence
  Description of Artificial Sequence: Synthetic oligonucleotide
  Target: LAMA2; (+) strand; PAM type: NRG; PAM sequence: TGG
ttaaggacttgcaggttgtc

SEQ ID NO: 144128 - DNA, 20 bp, Artificial Sequence
  Description of Artificial Sequence: Synthetic oligonucleotide
  Target: LAMA2; (+) strand; PAM type: NRG; PAM sequence: TAG
tttactatttttcttatcca

SEQ ID NO: 144129 - DNA, 20 bp, Artificial Sequence
  Description of Artificial Sequence: Synthetic oligonucleotide
  Target: LAMA2; (+) strand; PAM type: NRG; PAM sequence: AAG
ctatttttcttatccatagc

SEQ ID NO: 144130 - DNA, 20 bp, Artificial Sequence
  Description of Artificial Sequence: Synthetic oligonucleotide
  Target: LAMA2; (+) strand; PAM type: NRG; PAM sequence: AGG
tatttttcttatccatagca

SEQ ID NO: 144131 - DNA, 20 bp, Artificial Sequence
  Description of Artificial Sequence: Synthetic oligonucleotide
  Target: LAMA2; (+) strand; PAM type: NRG; PAM sequence: TGG
tttcttatccatagcaaggt

SEQ ID NO: 144132 - DNA, 20 bp, Artificial Sequence
  Description of Artificial Sequence: Synthetic oligonucleotide
  Target: LAMA2; (+) strand; PAM type: NRG; PAM sequence: TAG
aggttggtgctcaataatac

SEQ ID NO: 144133 - DNA, 20 bp, Artificial Sequence
  Description of Artificial Sequence: Synthetic oligonucleotide
  Target: LAMA2; (+) strand; PAM type: NRG; PAM sequence: GAG
ggtgctcaataatactagat

SEQ ID NO: 144134 - DNA, 20 bp, Artificial Sequence
  Description of Artificial Sequence: Synthetic oligonucleotide
  Target: LAMA2; (+) strand; PAM type: NRG; PAM sequence: AAG
actagatgagcaactgaatg

SEQ ID NO: 144135 - DNA, 20 bp, Artificial Sequence
  Description of Artificial Sequence: Synthetic oligonucleotide
  Target: LAMA2; (+) strand; PAM type: NRG; PAM sequence: GAG
tagatgagcaactgaatgaa

SEQ ID NO: 144136 - DNA, 20 bp, Artificial Sequence
  Description of Artificial Sequence: Synthetic oligonucleotide
  Target: LAMA2; (+) strand; PAM type: NRG; PAM sequence: AAG
tttattaccactgcatgtta

SEQ ID NO: 144137 - DNA, 20 bp, Artificial Sequence
  Description of Artificial Sequence: Synthetic oligonucleotide
  Target: LAMA2; (+) strand; PAM type: NRG; PAM sequence: AAG
attaccactgcatgttaaag

SEQ ID NO: 144138 - DNA, 20 bp, Artificial Sequence
  Description of Artificial Sequence: Synthetic oligonucleotide
  Target: LAMA2; (+) strand; PAM type: NRG; PAM sequence: GAG
acttttttatgcttgtcttt

SEQ ID NO: 144139 - DNA, 20 bp, Artificial Sequence
  Description of Artificial Sequence: Synthetic oligonucleotide
  Target: LAMA2; (+) strand; PAM type: NRG; PAM sequence: AAG
tttatgcttgtctttgagaa

SEQ ID NO: 144140 - DNA, 20 bp, Artificial Sequence
  Description of Artificial Sequence: Synthetic oligonucleotide
  Target: LAMA2; (+) strand; PAM type: NRG; PAM sequence: AAG
ttgtctttgagaaaagtgtc

SEQ ID NO: 144141 - DNA, 20 bp, Artificial Sequence
  Description of Artificial Sequence: Synthetic oligonucleotide
  Target: LAMA2; (+) strand; PAM type: NRG; PAM sequence: AGG
tgtctttgagaaaagtgtca

SEQ ID NO: 144142 - DNA, 20 bp, Artificial Sequence
  Description of Artificial Sequence: Synthetic oligonucleotide
  Target: LAMA2; (+) strand; PAM type: NRG; PAM sequence: TGG
ctttgagaaaagtgtcaagg

SEQ ID NO: 144143 - DNA, 20 bp, Artificial Sequence
  Description of Artificial Sequence: Synthetic oligonucleotide
  Target: LAMA2; (+) strand; PAM type: NRG; PAM sequence: AAG
cactgaacaaaataaaataa

SEQ ID NO: 144144 - DNA, 20 bp, Artificial Sequence
  Description of Artificial Sequence: Synthetic oligonucleotide
  Target: LAMA2; (+) strand; PAM type: NRG; PAM sequence: TAG
aataaaagaaaaatgcatac

SEQ ID NO: 144145 - DNA, 20 bp, Artificial Sequence
  Description of Artificial Sequence: Synthetic oligonucleotide
  Target: LAMA2; (+) strand; PAM type: NRG; PAM sequence: TGG
atgcatactagctgctcatc

SEQ ID NO: 144146 - DNA, 20 bp, Artificial Sequence
  Description of Artificial Sequence: Synthetic oligonucleotide
  Target: LAMA2; (+) strand; PAM type: NRG; PAM sequence: GGG
tgcatactagctgctcatct

SEQ ID NO: 144147 - DNA, 20 bp, Artificial Sequence
  Description of Artificial Sequence: Synthetic oligonucleotide
  Target: LAMA2; (+) strand; PAM type: NRG; PAM sequence: GAG
actagctgctcatctgggat

SEQ ID NO: 144148 - DNA, 20 bp, Artificial Sequence
  Description of Artificial Sequence: Synthetic oligonucleotide
  Target: LAMA2; (+) strand; PAM type: NRG; PAM sequence: TAG
gctgctcatctgggatgagt

SEQ ID NO: 144149 - DNA, 20 bp, Artificial Sequence
  Description of Artificial Sequence: Synthetic oligonucleotide
  Target: LAMA2; (+) strand; PAM type: NRG; PAM sequence: CAG
attcaacttgtaatttaatg

SEQ ID NO: 144150 - DNA, 20 bp, Artificial Sequence
  Description of Artificial Sequence: Synthetic oligonucleotide
  Target: LAMA2; (+) strand; PAM type: NRG; PAM sequence: CAG
gtaatttaatgcagaatttt

SEQ ID NO: 144151 - DNA, 20 bp, Artificial Sequence
  Description of Artificial Sequence: Synthetic oligonucleotide
  Target: LAMA2; (+) strand; PAM type: NRG; PAM sequence: TAG
atgcagaattttcagacaat

SEQ ID NO: 144152 - DNA, 20 bp, Artificial Sequence
  Description of Artificial Sequence: Synthetic oligonucleotide
  Target: LAMA2; (+) strand; PAM type: NRG; PAM sequence: AGG
tgcagaattttcagacaatt

SEQ ID NO: 144153 - DNA, 20 bp, Artificial Sequence
  Description of Artificial Sequence: Synthetic oligonucleotide
  Target: LAMA2; (+) strand; PAM type: NRG; PAM sequence: GGG
gcagaattttcagacaatta

SEQ ID NO: 144154 - DNA, 20 bp, Artificial Sequence
  Description of Artificial Sequence: Synthetic oligonucleotide
  Target: LAMA2; (+) strand; PAM type: NRG; PAM sequence: AAG
tcagacaattagggccaaaa

SEQ ID NO: 144155 - DNA, 20 bp, Artificial Sequence
  Description of Artificial Sequence: Synthetic oligonucleotide
  Target: LAMA2; (+) strand; PAM type: NRG; PAM sequence: TAG
caaaaaagaaaatgttaaat

SEQ ID NO: 144156 - DNA, 20 bp, Artificial Sequence
  Description of Artificial Sequence: Synthetic oligonucleotide
  Target: LAMA2; (+) strand; PAM type: NRG; PAM sequence: TAG
aaagaaaatgttaaattagc

SEQ ID NO: 144157 - DNA, 20 bp, Artificial Sequence
  Description of Artificial Sequence: Synthetic oligonucleotide
  Target: LAMA2; (+) strand; PAM type: NRG; PAM sequence: AAG
aaattagctagtgtctgaca

SEQ ID NO: 144158 - DNA, 20 bp, Artificial Sequence
  Description of Artificial Sequence: Synthetic oligonucleotide
  Target: LAMA2; (+) strand; PAM type: NRG; PAM sequence: AAG
ttagctagtgtctgacaaag

SEQ ID NO: 144159 - DNA, 20 bp, Artificial Sequence
  Description of Artificial Sequence: Synthetic oligonucleotide
  Target: LAMA2; (+) strand; PAM type: NRG; PAM sequence: AAG
ctagtgtctgacaaagaaga

SEQ ID NO: 144160 - DNA, 20 bp, Artificial Sequence
  Description of Artificial Sequence: Synthetic oligonucleotide
  Target: LAMA2; (+) strand; PAM type: NRG; PAM sequence: AAG
aagaaagctttcaaactttc

SEQ ID NO: 144161 - DNA, 20 bp, Artificial Sequence
  Description of Artificial Sequence: Synthetic oligonucleotide
  Target: LAMA2; (+) strand; PAM type: NRG; PAM sequence: TAG
tttcaagacgaacattttat

SEQ ID NO: 144162 - DNA, 20 bp, Artificial Sequence
  Description of Artificial Sequence: Synthetic oligonucleotide
  Target: LAMA2; (+) strand; PAM type: NRG; PAM sequence: CAG
ttttattagcaatgaattct

SEQ ID NO: 144163 - DNA, 20 bp, Artificial Sequence
  Description of Artificial Sequence: Synthetic oligonucleotide
  Target: LAMA2; (+) strand; PAM type: NRG; PAM sequence: GAG
ttattagcaatgaattctca

SEQ ID NO: 144164 - DNA, 20 bp, Artificial Sequence
  Description of Artificial Sequence: Synthetic oligonucleotide
  Target: LAMA2; (+) strand; PAM type: NRG; PAM sequence: CAG
ttctcagagcaaatttaatg

SEQ ID NO: 144165 - DNA, 20 bp, Artificial Sequence
  Description of Artificial Sequence: Synthetic oligonucleotide
  Target: LAMA2; (+) strand; PAM type: NRG; PAM sequence: AAG
atttaatgcagtccttatgt

SEQ ID NO: 144166 - DNA, 20 bp, Artificial Sequence
  Description of Artificial Sequence: Synthetic oligonucleotide
  Target: LAMA2; (+) strand; PAM type: NRG; PAM sequence: AGG
tttaatgcagtccttatgta

SEQ ID NO: 144167 - DNA, 20 bp, Artificial Sequence
  Description of Artificial Sequence: Synthetic oligonucleotide
  Target: LAMA2; (+) strand; PAM type: NRG; PAM sequence: CAG
cagtccttatgtaaggatgt

SEQ ID NO: 144168 - DNA, 20 bp, Artificial Sequence
  Description of Artificial Sequence: Synthetic oligonucleotide
  Target: LAMA2; (+) strand; PAM type: NRG; PAM sequence: TAG
ccttatgtaaggatgtcaga

SEQ ID NO: 144169 - DNA, 20 bp, Artificial Sequence
  Description of Artificial Sequence: Synthetic oligonucleotide
  Target: LAMA2; (+) strand; PAM type: NRG; PAM sequence: AAG
taaggatgtcagatagaaaa

SEQ ID NO: 144170 - DNA, 20 bp, Artificial Sequence
  Description of Artificial Sequence: Synthetic oligonucleotide
  Target: LAMA2; (+) strand; PAM type: NRG; PAM sequence: AAG
tgtcagatagaaaaaagtaa

SEQ ID NO: 144171 - DNA, 20 bp, Artificial Sequence
  Description of Artificial Sequence: Synthetic oligonucleotide
  Target: LAMA2; (+) strand; PAM type: NRG; PAM sequence: AGG
gtcagatagaaaaaagtaaa

SEQ ID NO: 144172 - DNA, 20 bp, Artificial Sequence
  Description of Artificial Sequence: Synthetic oligonucleotide
  Target: LAMA2; (+) strand; PAM type: NRG; PAM sequence: AAG
gaaaaaagtaaaaggatttc

SEQ ID NO: 144173 - DNA, 20 bp, Artificial Sequence
  Description of Artificial Sequence: Synthetic oligonucleotide
  Target: LAMA2; (+) strand; PAM type: NRG; PAM sequence: TAG
aaaaggatttcaagcatcac

SEQ ID NO: 144174 - DNA, 20 bp, Artificial Sequence
  Description of Artificial Sequence: Synthetic oligonucleotide
  Target: LAMA2; (+) strand; PAM type: NRG; PAM sequence: AAG
tttcaagcatcactagtgca

SEQ ID NO: 144175 - DNA, 20 bp, Artificial Sequence
  Description of Artificial Sequence: Synthetic oligonucleotide
  Target: LAMA2; (+) strand; PAM type: NRG; PAM sequence: AGG
ttcaagcatcactagtgcaa

SEQ ID NO: 144176 - DNA, 20 bp, Artificial Sequence
  Description of Artificial Sequence: Synthetic oligonucleotide
  Target: LAMA2; (+) strand; PAM type: NRG; PAM sequence: CAG
atattacttgcttatttctg

SEQ ID NO: 144177 - DNA, 20 bp, Artificial Sequence
  Description of Artificial Sequence: Synthetic oligonucleotide
  Target: LAMA2; (+) strand; PAM type: NRG; PAM sequence: AAG
cttatttctgcagtgtaaca

SEQ ID NO: 144178 - DNA, 20 bp, Artificial Sequence
  Description of Artificial Sequence: Synthetic oligonucleotide
  Target: LAMA2; (+) strand; PAM type: NRG; PAM sequence: AAG
tctgcagtgtaacaaagatg

SEQ ID NO: 144179 - DNA, 20 bp, Artificial Sequence
  Description of Artificial Sequence: Synthetic oligonucleotide
  Target: LAMA2; (+) strand; PAM type: NRG; PAM sequence: GAG
atgatgattcatgtgtctct

SEQ ID NO: 144180 - DNA, 20 bp, Artificial Sequence
  Description of Artificial Sequence: Synthetic oligonucleotide
  Target: LAMA2; (+) strand; PAM type: NRG; PAM sequence: AAG
tcatgtgtctctgagaaact

SEQ ID NO: 144181 - DNA, 20 bp, Artificial Sequence
  Description of Artificial Sequence: Synthetic oligonucleotide
  Target: LAMA2; (+) strand; PAM type: NRG; PAM sequence: TGG
atgatttaattctgtgcttt

SEQ ID NO: 144182 - DNA, 20 bp, Artificial Sequence
  Description of Artificial Sequence: Synthetic oligonucleotide
  Target: LAMA2; (+) strand; PAM type: NRG; PAM sequence: GGG
tgatttaattctgtgctttt

SEQ ID NO: 144183 - DNA, 20 bp, Artificial Sequence
  Description of Artificial Sequence: Synthetic oligonucleotide
  Target: LAMA2; (+) strand; PAM type: NRG; PAM sequence: TAG
ttaattctgtgcttttggga

SEQ ID NO: 144184 - DNA, 20 bp, Artificial Sequence
  Description of Artificial Sequence: Synthetic oligonucleotide
  Target: LAMA2; (+) strand; PAM type: NRG; PAM sequence: AAG
atagtctaacttaattcatg

SEQ ID NO: 144185 - DNA, 20 bp, Artificial Sequence
  Description of Artificial Sequence: Synthetic oligonucleotide
  Target: LAMA2; (+) strand; PAM type: NRG; PAM sequence: AGG
tagtctaacttaattcatga

SEQ ID NO: 144186 - DNA, 20 bp, Artificial Sequence
  Description of Artificial Sequence: Synthetic oligonucleotide
  Target: LAMA2; (+) strand; PAM type: NRG; PAM sequence: GAG
gtctaacttaattcatgaag

SEQ ID NO: 144187 - DNA, 20 bp, Artificial Sequence
  Description of Artificial Sequence: Synthetic oligonucleotide
  Target: LAMA2; (+) strand; PAM type: NRG; PAM sequence: CAG
acttaattcatgaaggagta

SEQ ID NO: 144188 - DNA, 20 bp, Artificial Sequence
  Description of Artificial Sequence: Synthetic oligonucleotide
  Target: LAMA2; (+) strand; PAM type: NRG; PAM sequence: AGG
cttaattcatgaaggagtac

SEQ ID NO: 144189 - DNA, 20 bp, Artificial Sequence
  Description of Artificial Sequence: Synthetic oligonucleotide
  Target: LAMA2; (+) strand; PAM type: NRG; PAM sequence: GGG
ttaattcatgaaggagtaca

SEQ ID NO: 144190 - DNA, 20 bp, Artificial Sequence
  Description of Artificial Sequence: Synthetic oligonucleotide
  Target: LAMA2; (+) strand; PAM type: NRG; PAM sequence: GGG
taattcatgaaggagtacag

SEQ ID NO: 144191 - DNA, 20 bp, Artificial Sequence
  Description of Artificial Sequence: Synthetic oligonucleotide
  Target: LAMA2; (+) strand; PAM type: NRG; PAM sequence: TGG
tcatgaaggagtacagggga

SEQ ID NO: 144192 - DNA, 20 bp, Artificial Sequence
  Description of Artificial Sequence: Synthetic oligonucleotide
  Target: LAMA2; (+) strand; PAM type: NRG; PAM sequence: GGG
catgaaggagtacaggggat

SEQ ID NO: 144193 - DNA, 20 bp, Artificial Sequence
  Description of Artificial Sequence: Synthetic oligonucleotide
  Target: LAMA2; (+) strand; PAM type: NRG; PAM sequence: CAG
tgtttgtcactctcaaatgt

SEQ ID NO: 144194 - DNA, 20 bp, Artificial Sequence
  Description of Artificial Sequence: Synthetic oligonucleotide
  Target: LAMA2; (+) strand; PAM type: NRG; PAM sequence: CAG
actctcaaatgtcagatgtg

SEQ ID NO: 144195 - DNA, 20 bp, Artificial Sequence
  Description of Artificial Sequence: Synthetic oligonucleotide
  Target: LAMA2; (+) strand; PAM type: NRG; PAM sequence: AGG
ctctcaaatgtcagatgtgc

SEQ ID NO: 144196 - DNA, 20 bp, Artificial Sequence
  Description of Artificial Sequence: Synthetic oligonucleotide
  Target: LAMA2; (+) strand; PAM type: NRG; PAM sequence: CAG
cagatgtgcaggcaaattct

SEQ ID NO: 144197 - DNA, 20 bp, Artificial Sequence
  Description of Artificial Sequence: Synthetic oligonucleotide
  Target: LAMA2; (+) strand; PAM type: NRG; PAM sequence: GAG
gatgtgcaggcaaattctca

SEQ ID NO: 144198 - DNA, 20 bp, Artificial Sequence
  Description of Artificial Sequence: Synthetic oligonucleotide
  Target: LAMA2; (+) strand; PAM type: NRG; PAM sequence: CAG
ctcagagttaaattacttga

SEQ ID NO: 144199 - DNA, 20 bp, Artificial Sequence
  Description of Artificial Sequence: Synthetic oligonucleotide
  Target: LAMA2; (+) strand; PAM type: NRG; PAM sequence: AGG
tcagagttaaattacttgac

SEQ ID NO: 144200 - DNA, 20 bp, Artificial Sequence
  Description of Artificial Sequence: Synthetic oligonucleotide
  Target: LAMA2; (+) strand; PAM type: NRG; PAM sequence: AAG
aaattacttgacaggaactt

SEQ ID NO: 144201 - DNA, 20 bp, Artificial Sequence
  Description of Artificial Sequence: Synthetic oligonucleotide
  Target: LAMA2; (+) strand; PAM type: NRG; PAM sequence: CAG
taagcatccgtatttgttgc

SEQ ID NO: 144202 - DNA, 20 bp, Artificial Sequence
  Description of Artificial Sequence: Synthetic oligonucleotide
  Target: LAMA2; (+) strand; PAM type: NRG; PAM sequence: AGG
aagcatccgtatttgttgcc

SEQ ID NO: 144203 - DNA, 20 bp, Artificial Sequence
  Description of Artificial Sequence: Synthetic oligonucleotide
  Target: LAMA2; (+) strand; PAM type: NRG; PAM sequence: TAG
catccgtatttgttgccagg

SEQ ID NO: 144204 - DNA, 20 bp, Artificial Sequence
  Description of Artificial Sequence: Synthetic oligonucleotide
  Target: LAMA2; (+) strand; PAM type: NRG; PAM sequence: TGG
ttgccaggtagtcttctgtg

SEQ ID NO: 144205 - DNA, 20 bp, Artificial Sequence
  Description of Artificial Sequence: Synthetic oligonucleotide
  Target: LAMA2; (+) strand; PAM type: NRG; PAM sequence: AAG
ggtagtcttctgtgtggtta

SEQ ID NO: 144206 - DNA, 20 bp, Artificial Sequence
  Description of Artificial Sequence: Synthetic oligonucleotide
  Target: LAMA2; (+) strand; PAM type: NRG; PAM sequence: CAG
tcttctgtgtggttaaagta

SEQ ID NO: 144207 - DNA, 20 bp, Artificial Sequence
  Description of Artificial Sequence: Synthetic oligonucleotide
  Target: LAMA2; (+) strand; PAM type: NRG; PAM sequence: AAG
tacagaatgtactcctacaa

SEQ ID NO: 144208 - DNA, 20 bp, Artificial Sequence
  Description of Artificial Sequence: Synthetic oligonucleotide
  Target: LAMA2; (+) strand; PAM type: NRG; PAM sequence: CAG
agaatgtactcctacaaaag

SEQ ID NO: 144209 - DNA, 20 bp, Artificial Sequence
  Description of Artificial Sequence: Synthetic oligonucleotide
  Target: LAMA2; (+) strand; PAM type: NRG; PAM sequence: GAG
aatgtactcctacaaaagca

SEQ ID NO: 144210 - DNA, 20 bp, Artificial Sequence
  Description of Artificial Sequence: Synthetic oligonucleotide
  Target: LAMA2; (+) strand; PAM type: NRG; PAM sequence: GAG
tgtactcctacaaaagcaga

SEQ ID NO: 144211 - DNA, 20 bp, Artificial Sequence
  Description of Artificial Sequence: Synthetic oligonucleotide
  Target: LAMA2; (+) strand; PAM type: NRG; PAM sequence: AGG
gtactcctacaaaagcagag

SEQ ID NO: 144212 - DNA, 20 bp, Artificial Sequence
  Description of Artificial Sequence: Synthetic oligonucleotide
  Target: LAMA2; (+) strand; PAM type: NRG; PAM sequence: CGG
ctcctacaaaagcagagagg

SEQ ID NO: 144213 - DNA, 20 bp, Artificial Sequence
  Description of Artificial Sequence: Synthetic oligonucleotide
  Target: LAMA2; (+) strand; PAM type: NRG; PAM sequence: AAG
ggcggcccgttgccacacaa

SEQ ID NO: 144214 - DNA, 20 bp, Artificial Sequence
  Description of Artificial Sequence: Synthetic oligonucleotide
  Target: LAMA2; (+) strand; PAM type: NRG; PAM sequence: CAG
gccacacaaaagtgtttttt

SEQ ID NO: 144215 - DNA, 20 bp, Artificial Sequence
  Description of Artificial Sequence: Synthetic oligonucleotide
  Target: LAMA2; (+) strand; PAM type: NRG; PAM sequence: TGG
cacaaaagtgttttttcaga

SEQ ID NO: 144216 - DNA, 20 bp, Artificial Sequence
  Description of Artificial Sequence: Synthetic oligonucleotide
  Target: LAMA2; (+) strand; PAM type: NRG; PAM sequence: TGG
gtgttttttcagatggctta

SEQ ID NO: 144217 - DNA, 20 bp, Artificial Sequence
  Description of Artificial Sequence: Synthetic oligonucleotide
  Target: LAMA2; (+) strand; PAM type: NRG; PAM sequence: TAG
tttttcagatggcttatggt

SEQ ID NO: 144218 - DNA, 20 bp, Artificial Sequence
  Description of Artificial Sequence: Synthetic oligonucleotide
  Target: LAMA2; (+) strand; PAM type: NRG; PAM sequence: TAG
ttagaaccaatatatttttc

SEQ ID NO: 144219 - DNA, 20 bp, Artificial Sequence
  Description of Artificial Sequence: Synthetic oligonucleotide
  Target: LAMA2; (+) strand; PAM type: NRG; PAM sequence: CAG
caatatatttttctagcata

SEQ ID NO: 144220 - DNA, 20 bp, Artificial Sequence
  Description of Artificial Sequence: Synthetic oligonucleotide
  Target: LAMA2; (+) strand; PAM type: NRG; PAM sequence: GAG
atttttctagcatacagttt

SEQ ID NO: 144221 - DNA, 20 bp, Artificial Sequence
  Description of Artificial Sequence: Synthetic oligonucleotide
  Target: LAMA2; (+) strand; PAM type: NRG; PAM sequence: TAG
gcatacagtttgagtgataa

SEQ ID NO: 144222 - DNA, 20 bp, Artificial Sequence
  Description of Artificial Sequence: Synthetic oligonucleotide
  Target: LAMA2; (+) strand; PAM type: NRG; PAM sequence: AAG
ccgatcacatgccttgtgcc

SEQ ID NO: 144223 - DNA, 20 bp, Artificial Sequence
  Description of Artificial Sequence: Synthetic oligonucleotide
  Target: LAMA2; (+) strand; PAM type: NRG; PAM sequence: CAG
tgtaactcattaaaccttta

SEQ ID NO: 144224 - DNA, 20 bp, Artificial Sequence
  Description of Artificial Sequence: Synthetic oligonucleotide
  Target: LAMA2; (+) strand; PAM type: NRG; PAM sequence: AAG
gttgttcccattttgcaaat

SEQ ID NO: 144225 - DNA, 20 bp, Artificial Sequence
  Description of Artificial Sequence: Synthetic oligonucleotide
  Target: LAMA2; (+) strand; PAM type: NRG; PAM sequence: TGG
tttgcaaataagaaaactga

SEQ ID NO: 144226 - DNA, 20 bp, Artificial Sequence
  Description of Artificial Sequence: Synthetic oligonucleotide
  Target: LAMA2; (+) strand; PAM type: NRG; PAM sequence: GGG
ttgcaaataagaaaactgat

SEQ ID NO: 144227 - DNA, 20 bp, Artificial Sequence
  Description of Artificial Sequence: Synthetic oligonucleotide
  Target: LAMA2; (+) strand; PAM type: NRG; PAM sequence: AAG
tgggcaatattaccttgccc

SEQ ID NO: 144228 - DNA, 20 bp, Artificial Sequence
  Description of Artificial Sequence: Synthetic oligonucleotide
  Target: LAMA2; (+) strand; PAM type: NRG; PAM sequence: CAG
ttaccttgcccaagtttata

SEQ ID NO: 144229 - DNA, 20 bp, Artificial Sequence
  Description of Artificial Sequence: Synthetic oligonucleotide
  Target: LAMA2; (+) strand; PAM type: NRG; PAM sequence: TGG
cttgcccaagtttatacagc

SEQ ID NO: 144230 - DNA, 20 bp, Artificial Sequence
  Description of Artificial Sequence: Synthetic oligonucleotide
  Target: LAMA2; (+) strand; PAM type: NRG; PAM sequence: AAG
cccaagtttatacagctggt

SEQ ID NO: 144231 - DNA, 20 bp, Artificial Sequence
  Description of Artificial Sequence: Synthetic oligonucleotide
  Target: LAMA2; (+) strand; PAM type: NRG; PAM sequence: TGG
aagtttatacagctggtaag

SEQ ID NO: 144232 - DNA, 20 bp, Artificial Sequence
  Description of Artificial Sequence: Synthetic oligonucleotide
  Target: LAMA2; (+) strand; PAM type: NRG; PAM sequence: CAG
tttatacagctggtaagtgg

SEQ ID NO: 144233 - DNA, 20 bp, Artificial Sequence
  Description of Artificial Sequence: Synthetic oligonucleotide
  Target: LAMA2; (+) strand; PAM type: NRG; PAM sequence: GAG
tatacagctggtaagtggca

SEQ ID NO: 144234 - DNA, 20 bp, Artificial Sequence
  Description of Artificial Sequence: Synthetic oligonucleotide
  Target: LAMA2; (+) strand; PAM type: NRG; PAM sequence: CAG
cagctggtaagtggcagagt

SEQ ID NO: 144235 - DNA, 20 bp, Artificial Sequence
  Description of Artificial Sequence: Synthetic oligonucleotide
  Target: LAMA2; (+) strand; PAM type: NRG; PAM sequence: AGG
agctggtaagtggcagagtc

SEQ ID NO: 144236 - DNA, 20 bp, Artificial Sequence
  Description of Artificial Sequence: Synthetic oligonucleotide
  Target: LAMA2; (+) strand; PAM type: NRG; PAM sequence: CAG
gcagagtcaggatttgaacc

SEQ ID NO: 144237 - DNA, 20 bp, Artificial Sequence
  Description of Artificial Sequence: Synthetic oligonucleotide
  Target: LAMA2; (+) strand; PAM type: NRG; PAM sequence: AGG
cagagtcaggatttgaaccc

SEQ ID NO: 144238 - DNA, 20 bp, Artificial Sequence
  Description of Artificial Sequence: Synthetic oligonucleotide
  Target: LAMA2; (+) strand; PAM type: NRG; PAM sequence: TGG
aggatttgaacccaggctga

SEQ ID NO: 144239 - DNA, 20 bp, Artificial Sequence
  Description of Artificial Sequence: Synthetic oligonucleotide
  Target: LAMA2; (+) strand; PAM type: NRG; PAM sequence: TAG
ttgaacccaggctgatggta

SEQ ID NO: 144240 - DNA, 20 bp, Artificial Sequence
  Description of Artificial Sequence: Synthetic oligonucleotide
  Target: LAMA2; (+) strand; PAM type: NRG; PAM sequence: CAG
gatggtatagtctgcgtgct

SEQ ID NO: 144241 - DNA, 20 bp, Artificial Sequence
  Description of Artificial Sequence: Synthetic oligonucleotide
  Target: LAMA2; (+) strand; PAM type: NRG; PAM sequence: TGG
cctgtgtttgcataatcatg

SEQ ID NO: 144242 - DNA, 20 bp, Artificial Sequence
  Description of Artificial Sequence: Synthetic oligonucleotide
  Target: LAMA2; (+) strand; PAM type: NRG; PAM sequence: CAG
gcataatcatgtggatacta

SEQ ID NO: 144243 - DNA, 20 bp, Artificial Sequence
  Description of Artificial Sequence: Synthetic oligonucleotide
  Target: LAMA2; (+) strand; PAM type: NRG; PAM sequence: AGG
cataatcatgtggatactac

SEQ ID NO: 144244 - DNA, 20 bp, Artificial Sequence
  Description of Artificial Sequence: Synthetic oligonucleotide
  Target: LAMA2; (+) strand; PAM type: NRG; PAM sequence: TAG
atcatgtggatactacagga

SEQ ID NO: 144245 - DNA, 20 bp, Artificial Sequence
  Description of Artificial Sequence: Synthetic oligonucleotide
  Target: LAMA2; (+) strand; PAM type: NRG; PAM sequence: TAG
atactacaggatagattctt

SEQ ID NO: 144246 - DNA, 20 bp, Artificial Sequence
  Description of Artificial Sequence: Synthetic oligonucleotide
  Target: LAMA2; (+) strand; PAM type: NRG; PAM sequence: TAG
ttctttagactcatcttatg

SEQ ID NO: 144247 - DNA, 20 bp, Artificial Sequence
  Description of Artificial Sequence: Synthetic oligonucleotide
  Target: LAMA2; (+) strand; PAM type: NRG; PAM sequence: AGG
tctttagactcatcttatgt

SEQ ID NO: 144248 - DNA, 20 bp, Artificial Sequence
  Description of Artificial Sequence: Synthetic oligonucleotide
  Target: LAMA2; (+) strand; PAM type: NRG; PAM sequence: GAG
tttagactcatcttatgtag

SEQ ID NO: 144249 - DNA, 20 bp, Artificial Sequence
  Description of Artificial Sequence: Synthetic oligonucleotide
  Target: LAMA2; (+) strand; PAM type: NRG; PAM sequence: AGG
ttagactcatcttatgtagg

SEQ ID NO: 144250 - DNA, 20 bp, Artificial Sequence
  Description of Artificial Sequence: Synthetic oligonucleotide
  Target: LAMA2; (+) strand; PAM type: NRG; PAM sequence: TAG
ctcatcttatgtaggaggaa

SEQ ID NO: 144251 - DNA, 20 bp, Artificial Sequence
  Description of Artificial Sequence: Synthetic oligonucleotide
  Target: LAMA2; (+) strand; PAM type: NRG; PAM sequence: AAG
atagtgacatgaaccatcat

SEQ ID NO: 144252 - DNA, 20 bp, Artificial Sequence
  Description of Artificial Sequence: Synthetic oligonucleotide
  Target: LAMA2; (+) strand; PAM type: NRG; PAM sequence: GAG
agtgacatgaaccatcataa

SEQ ID NO: 144253 - DNA, 20 bp, Artificial Sequence
  Description of Artificial Sequence: Synthetic oligonucleotide
  Target: LAMA2; (+) strand; PAM type: NRG; PAM sequence: AGG
gtgacatgaaccatcataag

SEQ ID NO: 144254 - DNA, 20 bp, Artificial Sequence
  Description of Artificial Sequence: Synthetic oligonucleotide
  Target: LAMA2; (+) strand; PAM type: NRG; PAM sequence: GAG
gacatgaaccatcataagag

SEQ ID NO: 144255 - DNA, 20 bp, Artificial Sequence
  Description of Artificial Sequence: Synthetic oligonucleotide
  Target: LAMA2; (+) strand; PAM type: NRG; PAM sequence: AAG
tttgcttgtcttacccatga

SEQ ID NO: 144256 - DNA, 20 bp, Artificial Sequence
  Description of Artificial Sequence: Synthetic oligonucleotide
  Target: LAMA2; (+) strand; PAM type: NRG; PAM sequence: CAG
tcttacccatgaaagaacat

SEQ ID NO: 144257 - DNA, 20 bp, Artificial Sequence
  Description of Artificial Sequence: Synthetic oligonucleotide
  Target: LAMA2; (+) strand; PAM type: NRG; PAM sequence: AAG
gccaaatatctgataatgaa

SEQ ID NO: 144258 - DNA, 20 bp, Artificial Sequence
  Description of Artificial Sequence: Synthetic oligonucleotide
  Target: LAMA2; (+) strand; PAM type: NRG; PAM sequence: CAG
gaaaagaaatgcattgtgat

SEQ ID NO: 144259 - DNA, 20 bp, Artificial Sequence
  Description of Artificial Sequence: Synthetic oligonucleotide
  Target: LAMA2; (+) strand; PAM type: NRG; PAM sequence: AAG
agaaatgcattgtgatcagc

SEQ ID NO: 144260 - DNA, 20 bp, Artificial Sequence
  Description of Artificial Sequence: Synthetic oligonucleotide
  Target: LAMA2; (+) strand; PAM type: NRG; PAM sequence: AAG
gtgatcagcaagataaaatg

SEQ ID NO: 144261 - DNA, 20 bp, Artificial Sequence
  Description of Artificial Sequence: Synthetic oligonucleotide
  Target: LAMA2; (+) strand; PAM type: NRG; PAM sequence: TAG
aataaaaatgtacactgaaa

SEQ ID NO: 144262 - DNA, 20 bp, Artificial Sequence
  Description of Artificial Sequence: Synthetic oligonucleotide
  Target: LAMA2; (+) strand; PAM type: NRG; PAM sequence: TAG
tgaattaacaacctatttta

SEQ ID NO: 144263 - DNA, 20 bp, Artificial Sequence
  Description of Artificial Sequence: Synthetic oligonucleotide
  Target: LAMA2; (+) strand; PAM type: NRG; PAM sequence: TGG
cctattttatagcattgtgc

SEQ ID NO: 144264 - DNA, 20 bp, Artificial Sequence
  Description of Artificial Sequence: Synthetic oligonucleotide
  Target: LAMA2; (+) strand; PAM type: NRG; PAM sequence: GAG
tattttatagcattgtgctg

SEQ ID NO: 144265 - DNA, 20 bp, Artificial Sequence
  Description of Artificial Sequence: Synthetic oligonucleotide
  Target: LAMA2; (+) strand; PAM type: NRG; PAM sequence: AAG
tttatagcattgtgctggag

SEQ ID NO: 144266 - DNA, 20 bp, Artificial Sequence
  Description of Artificial Sequence: Synthetic oligonucleotide
  Target: LAMA2; (+) strand; PAM type: NRG; PAM sequence: CAG
ggagaagaatgctcatctta

SEQ ID NO: 144267 - DNA, 20 bp, Artificial Sequence
  Description of Artificial Sequence: Synthetic oligonucleotide
  Target: LAMA2; (+) strand; PAM type: NRG; PAM sequence: GAG
agaagaatgctcatcttaca

SEQ ID NO: 144268 - DNA, 20 bp, Artificial Sequence
  Description of Artificial Sequence: Synthetic oligonucleotide
  Target: LAMA2; (+) strand; PAM type: NRG; PAM sequence: AGG
gaagaatgctcatcttacag

SEQ ID NO: 144269 - DNA, 20 bp, Artificial Sequence
  Description of Artificial Sequence: Synthetic oligonucleotide
  Target: LAMA2; (+) strand; PAM type: NRG; PAM sequence: TGG
gtgtctaataaaaactgcac

SEQ ID NO: 144270 - DNA, 20 bp, Artificial Sequence
  Description of Artificial Sequence: Synthetic oligonucleotide
  Target: LAMA2; (+) strand; PAM type: NRG; PAM sequence: AAG
taaaaactgcactggatttg

SEQ ID NO: 144271 - DNA, 20 bp, Artificial Sequence
  Description of Artificial Sequence: Synthetic oligonucleotide
  Target: LAMA2; (+) strand; PAM type: NRG; PAM sequence: TGG
aaaaaataaaaaacaaaaac

SEQ ID NO: 144272 - DNA, 20 bp, Artificial Sequence
  Description of Artificial Sequence: Synthetic oligonucleotide
  Target: LAMA2; (+) strand; PAM type: NRG; PAM sequence: TAG
atttccaattctatcactcg

SEQ ID NO: 144273 - DNA, 20 bp, Artificial Sequence
  Description of Artificial Sequence: Synthetic oligonucleotide
  Target: LAMA2; (+) strand; PAM type: NRG; PAM sequence: TAG
tcgtagtctctgtaacctcc

SEQ ID NO: 144274 - DNA, 20 bp, Artificial Sequence
  Description of Artificial Sequence: Synthetic oligonucleotide
  Target: LAMA2; (+) strand; PAM type: NRG; PAM sequence: TGG
aacctcctagtctctttcac

SEQ ID NO: 144275 - DNA, 20 bp, Artificial Sequence
  Description of Artificial Sequence: Synthetic oligonucleotide
  Target: LAMA2; (+) strand; PAM type: NRG; PAM sequence: GGG
acctcctagtctctttcact

SEQ ID NO: 144276 - DNA, 20 bp, Artificial Sequence
  Description of Artificial Sequence: Synthetic oligonucleotide
  Target: LAMA2; (+) strand; PAM type: NRG; PAM sequence: TAG
agtctctttcactgggatct

SEQ ID NO: 144277 - DNA, 20 bp, Artificial Sequence
  Description of Artificial Sequence: Synthetic oligonucleotide
  Target: LAMA2; (+) strand; PAM type: NRG; PAM sequence: TAG
ggatcttagatgtgccttct

SEQ ID NO: 144278 - DNA, 20 bp, Artificial Sequence
  Description of Artificial Sequence: Synthetic oligonucleotide
  Target: LAMA2; (+) strand; PAM type: NRG; PAM sequence: AAG
tcttagatgtgccttcttag

SEQ ID NO: 144279 - DNA, 20 bp, Artificial Sequence
  Description of Artificial Sequence: Synthetic oligonucleotide
  Target: LAMA2; (+) strand; PAM type: NRG; PAM sequence: GAG
agctaaattttcttatctgt

SEQ ID NO: 144280 - DNA, 20 bp, Artificial Sequence
  Description of Artificial Sequence: Synthetic oligonucleotide
  Target: LAMA2; (+) strand; PAM type: NRG; PAM sequence: TGG
aaattttcttatctgtgagt

SEQ ID NO: 144281 - DNA, 20 bp, Artificial Sequence
  Description of Artificial Sequence: Synthetic oligonucleotide
  Target: LAMA2; (+) strand; PAM type: NRG; PAM sequence: AAG
ctttattgtgatatcaaaat

SEQ ID NO: 144282 - DNA, 20 bp, Artificial Sequence
  Description of Artificial Sequence: Synthetic oligonucleotide
  Target: LAMA2; (+) strand; PAM type: NRG; PAM sequence: TAG
attgtgatatcaaaataaga

SEQ ID NO: 144283 - DNA, 20 bp, Artificial Sequence
  Description of Artificial Sequence: Synthetic oligonucleotide
  Target: LAMA2; (+) strand; PAM type: NRG; PAM sequence: TGG
atagcatatgtgcatatcct

SEQ ID NO: 144284 - DNA, 20 bp, Artificial Sequence
  Description of Artificial Sequence: Synthetic oligonucleotide
  Target: LAMA2; (+) strand; PAM type: NRG; PAM sequence: GAG
agcatatgtgcatatccttg

SEQ ID NO: 144285 - DNA, 20 bp, Artificial Sequence
  Description of Artificial Sequence: Synthetic oligonucleotide
  Target: LAMA2; (+) strand; PAM type: NRG; PAM sequence: AAG
gcatatccttggagatttta

SEQ ID NO: 144286 - DNA, 20 bp, Artificial Sequence
  Description of Artificial Sequence: Synthetic oligonucleotide
  Target: LAMA2; (+) strand; PAM type: NRG; PAM sequence: TAG
atatttaaacatactgaaca

SEQ ID NO: 144287 - DNA, 20 bp, Artificial Sequence
  Description of Artificial Sequence: Synthetic oligonucleotide
  Target: LAMA2; (+) strand; PAM type: NRG; PAM sequence: AAG
aacatactgaacatagttaa

SEQ ID NO: 144288 - DNA, 20 bp, Artificial Sequence
  Description of Artificial Sequence: Synthetic oligonucleotide
  Target: LAMA2; (+) strand; PAM type: NRG; PAM sequence: TAG
aaaactataccaatttattg

SEQ ID NO: 144289 - DNA, 20 bp, Artificial Sequence
  Description of Artificial Sequence: Synthetic oligonucleotide
  Target: LAMA2; (+) strand; PAM type: NRG; PAM sequence: TGG
ccaatttattgtagtccact

SEQ ID NO: 144290 - DNA, 20 bp, Artificial Sequence
  Description of Artificial Sequence: Synthetic oligonucleotide
  Target: LAMA2; (+) strand; PAM type: NRG; PAM sequence: AAG
tttattgtagtccacttgga

SEQ ID NO: 144291 - DNA, 20 bp, Artificial Sequence
  Description of Artificial Sequence: Synthetic oligonucleotide
  Target: LAMA2; (+) strand; PAM type: NRG; PAM sequence: AAG
tgtagtccacttggaaagac

SEQ ID NO: 144292 - DNA, 20 bp, Artificial Sequence
  Description of Artificial Sequence: Synthetic oligonucleotide
  Target: LAMA2; (+) strand; PAM type: NRG; PAM sequence: TAG
agtccacttggaaagacaag

SEQ ID NO: 144293 - DNA, 20 bp, Artificial Sequence
  Description of Artificial Sequence: Synthetic oligonucleotide
  Target: LAMA2; (+) strand; PAM type: NRG; PAM sequence: AAG
aaagacaagtagcttactta

SEQ ID NO: 144294 - DNA, 20 bp, Artificial Sequence
  Description of Artificial Sequence: Synthetic oligonucleotide
  Target: LAMA2; (+) strand; PAM type: NRG; PAM sequence: AAG
gatctattttgttgcattta

SEQ ID NO: 144295 - DNA, 20 bp, Artificial Sequence
  Description of Artificial Sequence: Synthetic oligonucleotide
  Target: LAMA2; (+) strand; PAM type: NRG; PAM sequence: TGG
tattttgttgcatttaaagt

SEQ ID NO: 144296 - DNA, 20 bp, Artificial Sequence
  Description of Artificial Sequence: Synthetic oligonucleotide
  Target: LAMA2; (+) strand; PAM type: NRG; PAM sequence: TAG
tgtctttaatacaactttaa

SEQ ID NO: 144297 - DNA, 20 bp, Artificial Sequence
  Description of Artificial Sequence: Synthetic oligonucleotide
  Target: LAMA2; (+) strand; PAM type: NRG; PAM sequence: TGG
ttaatacaactttaatagac

SEQ ID NO: 144298 - DNA, 20 bp, Artificial Sequence
  Description of Artificial Sequence: Synthetic oligonucleotide
  Target: LAMA2; (+) strand; PAM type: NRG; PAM sequence: AAG
aatagactggaacatatgcc

SEQ ID NO: 144299 - DNA, 20 bp, Artificial Sequence
  Description of Artificial Sequence: Synthetic oligonucleotide
  Target: LAMA2; (+) strand; PAM type: NRG; PAM sequence: GAG
tagactggaacatatgccaa

SEQ ID NO: 144300 - DNA, 20 bp, Artificial Sequence
  Description of Artificial Sequence: Synthetic oligonucleotide
  Target: LAMA2; (+) strand; PAM type: NRG; PAM sequence: CAG
gaacatatgccaagagtata

SEQ ID NO: 144301 - DNA, 20 bp, Artificial Sequence
  Description of Artificial Sequence: Synthetic oligonucleotide
  Target: LAMA2; (+) strand; PAM type: NRG; PAM sequence: CAG
atatgccaagagtatacagt

SEQ ID NO: 144302 - DNA, 20 bp, Artificial Sequence
  Description of Artificial Sequence: Synthetic oligonucleotide
  Target: LAMA2; (+) strand; PAM type: NRG; PAM sequence: AAG
tatacagtcagaatctctct

SEQ ID NO: 144303 - DNA, 20 bp, Artificial Sequence
  Description of Artificial Sequence: Synthetic oligonucleotide
  Target: LAMA2; (+) strand; PAM type: NRG; PAM sequence: AAG
cagaatctctctaagaatca

SEQ ID NO: 144304 - DNA, 20 bp, Artificial Sequence
  Description of Artificial Sequence: Synthetic oligonucleotide
  Target: LAMA2; (+) strand; PAM type: NRG; PAM sequence: GAG
tctaagaatcaaagactgat

SEQ ID NO: 144305 - DNA, 20 bp, Artificial Sequence
  Description of Artificial Sequence: Synthetic oligonucleotide
  Target: LAMA2; (+) strand; PAM type: NRG; PAM sequence: AAG
gactgatgagaaacctctga

SEQ ID NO: 144306 - DNA, 20 bp, Artificial Sequence
  Description of Artificial Sequence: Synthetic oligonucleotide
  Target: LAMA2; (+) strand; PAM type: NRG; PAM sequence: AAG
aaacctctgaaagctgtgaa

SEQ ID NO: 144307 - DNA, 20 bp, Artificial Sequence
  Description of Artificial Sequence: Synthetic oligonucleotide
  Target: LAMA2; (+) strand; PAM type: NRG; PAM sequence: AAG
tgtttttaattgcttcccta

SEQ ID NO: 144308 - DNA, 20 bp, Artificial Sequence
  Description of Artificial Sequence: Synthetic oligonucleotide
  Target: LAMA2; (+) strand; PAM type: NRG; PAM sequence: GAG
taattgcttccctaaagaat

SEQ ID NO: 144309 - DNA, 20 bp, Artificial Sequence
  Description of Artificial Sequence: Synthetic oligonucleotide
  Target: LAMA2; (+) strand; PAM type: NRG; PAM sequence: GAG
attgcttccctaaagaatga

SEQ ID NO: 144310 - DNA, 20 bp, Artificial Sequence
  Description of Artificial Sequence: Synthetic oligonucleotide
  Target: LAMA2; (+) strand; PAM type: NRG; PAM sequence: AAG
gcttccctaaagaatgagag

SEQ ID NO: 144311 - DNA, 20 bp, Artificial Sequence
  Description of Artificial Sequence: Synthetic oligonucleotide
  Target: LAMA2; (+) strand; PAM type: NRG; PAM sequence: AGG
cttccctaaagaatgagaga

SEQ ID NO: 144312 - DNA, 20 bp, Artificial Sequence
  Description of Artificial Sequence: Synthetic oligonucleotide
  Target: LAMA2; (+) strand; PAM type: NRG; PAM sequence: AAG
ctaaagaatgagagaaggca

SEQ ID NO: 144313 - DNA, 20 bp, Artificial Sequence
  Description of Artificial Sequence: Synthetic oligonucleotide
  Target: LAMA2; (+) strand; PAM type: NRG; PAM sequence: TGG
agaatgagagaaggcaaagc

SEQ ID NO: 144314 - DNA, 20 bp, Artificial Sequence
  Description of Artificial Sequence: Synthetic oligonucleotide
  Target: LAMA2; (+) strand; PAM type: NRG; PAM sequence: GGG
gaatgagagaaggcaaagct

SEQ ID NO: 144315 - DNA, 20 bp, Artificial Sequence
  Description of Artificial Sequence: Synthetic oligonucleotide
  Target: LAMA2; (+) strand; PAM type: NRG; PAM sequence: TAG
agaaggcaaagctgggaccc

SEQ ID NO: 144316 - DNA, 20 bp, Artificial Sequence
  Description of Artificial Sequence: Synthetic oligonucleotide
  Target: LAMA2; (+) strand; PAM type: NRG; PAM sequence: TGG
aggcaaagctgggaccctag

SEQ ID NO: 144317 - DNA, 20 bp, Artificial Sequence
  Description of Artificial Sequence: Synthetic oligonucleotide
  Target: LAMA2; (+) strand; PAM type: NRG; PAM sequence: TGG
tgggaccctagtggtattga

SEQ ID NO: 144318 - DNA, 20 bp, Artificial Sequence
  Description of Artificial Sequence: Synthetic oligonucleotide
  Target: LAMA2; (+) strand; PAM type: NRG; PAM sequence: GGG
gggaccctagtggtattgat

SEQ ID NO: 144319 - DNA, 20 bp, Artificial Sequence
  Description of Artificial Sequence: Synthetic oligonucleotide
  Target: LAMA2; (+) strand; PAM type: NRG; PAM sequence: AAG
gctccttatccatgatgtgt

SEQ ID NO: 144320 - DNA, 20 bp, Artificial Sequence
  Description of Artificial Sequence: Synthetic oligonucleotide
  Target: LAMA2; (+) strand; PAM type: NRG; PAM sequence: GAG
tccttatccatgatgtgtaa

SEQ ID NO: 144321 - DNA, 20 bp, Artificial Sequence
  Description of Artificial Sequence: Synthetic oligonucleotide
  Target: LAMA2; (+) strand; PAM type: NRG; PAM sequence: GAG
tatccatgatgtgtaagagt

SEQ ID NO: 144322 - DNA, 20 bp, Artificial Sequence
  Description of Artificial Sequence: Synthetic oligonucleotide
  Target: LAMA2; (+) strand; PAM type: NRG; PAM sequence: AGG
atccatgatgtgtaagagtg

SEQ ID NO: 144323 - DNA, 20 bp, Artificial Sequence
  Description of Artificial Sequence: Synthetic oligonucleotide
  Target: LAMA2; (+) strand; PAM type: NRG; PAM sequence: AAG
atgtgtaagagtgaggaact

SEQ ID NO: 144324 - DNA, 20 bp, Artificial Sequence
  Description of Artificial Sequence: Synthetic oligonucleotide
  Target: LAMA2; (+) strand; PAM type: NRG; PAM sequence: AAG
actaagtctgaaaacttttt

SEQ ID NO: 144325 - DNA, 20 bp, Artificial Sequence
  Description of Artificial Sequence: Synthetic oligonucleotide
  Target: LAMA2; (+) strand; PAM type: NRG; PAM sequence: AGG
ctaagtctgaaaacttttta

SEQ ID NO: 144326 - DNA, 20 bp, Artificial Sequence
  Description of Artificial Sequence: Synthetic oligonucleotide
  Target: LAMA2; (+) strand; PAM type: NRG; PAM sequence: GGG
taagtctgaaaactttttaa

SEQ ID NO: 144327 - DNA, 20 bp, Artificial Sequence
  Description of Artificial Sequence: Synthetic oligonucleotide
  Target: LAMA2; (+) strand; PAM type: NRG; PAM sequence: GGG
aagtctgaaaactttttaag

SEQ ID NO: 144328 - DNA, 20 bp, Artificial Sequence
  Description of Artificial Sequence: Synthetic oligonucleotide
  Target: LAMA2; (+) strand; PAM type: NRG; PAM sequence: TAG
aaaactttttaaggggaaaa

SEQ ID NO: 144329 - DNA, 20 bp, Artificial Sequence
  Description of Artificial Sequence: Synthetic oligonucleotide
  Target: LAMA2; (+) strand; PAM type: NRG; PAM sequence: CAG
actttttaaggggaaaatag

SEQ ID NO: 144330 - DNA, 20 bp, Artificial Sequence
  Description of Artificial Sequence: Synthetic oligonucleotide
  Target: LAMA2; (+) strand; PAM type: NRG; PAM sequence: TAG
ttaaggggaaaatagcagta

SEQ ID NO: 144331 - DNA, 20 bp, Artificial Sequence
  Description of Artificial Sequence: Synthetic oligonucleotide
  Target: LAMA2; (+) strand; PAM type: NRG; PAM sequence: AAG
atagcagtatagcatactga

SEQ ID NO: 144332 - DNA, 20 bp, Artificial Sequence
  Description of Artificial Sequence: Synthetic oligonucleotide
  Target: LAMA2; (+) strand; PAM type: NRG; PAM sequence: TAG
taaaaatgccaattaaaaaa

SEQ ID NO: 144333 - DNA, 20 bp, Artificial Sequence
  Description of Artificial Sequence: Synthetic oligonucleotide
  Target: LAMA2; (+) strand; PAM type: NRG; PAM sequence: GAG
attgtataacgcaattatat

SEQ ID NO: 144334 - DNA, 20 bp, Artificial Sequence
  Description of Artificial Sequence: Synthetic oligonucleotide
  Target: LAMA2; (+) strand; PAM type: NRG; PAM sequence: TGG
caattatatgagaattgttt

SEQ ID NO: 144335 - DNA, 20 bp, Artificial Sequence
  Description of Artificial Sequence: Synthetic oligonucleotide
  Target: LAMA2; (+) strand; PAM type: NRG; PAM sequence: GGG
aattatatgagaattgtttt

SEQ ID NO: 144336 - DNA, 20 bp, Artificial Sequence
  Description of Artificial Sequence: Synthetic oligonucleotide
  Target: LAMA2; (+) strand; PAM type: NRG; PAM sequence: CAG
tatgagaattgttttgggat

SEQ ID NO: 144337 - DNA, 20 bp, Artificial Sequence
  Description of Artificial Sequence: Synthetic oligonucleotide
  Target: LAMA2; (+) strand; PAM type: NRG; PAM sequence: CGG
gagaattgttttgggatcag

SEQ ID NO: 144338 - DNA, 20 bp, Artificial Sequence
  Description of Artificial Sequence: Synthetic oligonucleotide
  Target: LAMA2; (+) strand; PAM type: NRG; PAM sequence: AAG
gttttgggatcagcggtcca

SEQ ID NO: 144339 - DNA, 20 bp, Artificial Sequence
  Description of Artificial Sequence: Synthetic oligonucleotide
  Target: LAMA2; (+) strand; PAM type: NRG; PAM sequence: AAG
ggatcagcggtccaaagaca

SEQ ID NO: 144340 - DNA, 20 bp, Artificial Sequence
  Description of Artificial Sequence: Synthetic oligonucleotide
  Target: LAMA2; (+) strand; PAM type: NRG; PAM sequence: AAG
cagcggtccaaagacaaaga

SEQ ID NO: 144341 - DNA, 20 bp, Artificial Sequence
  Description of Artificial Sequence: Synthetic oligonucleotide
  Target: LAMA2; (+) strand; PAM type: NRG; PAM sequence: TAG
ctccatgttcttttcactgc

SEQ ID NO: 144342 - DNA, 20 bp, Artificial Sequence
  Description of Artificial Sequence: Synthetic oligonucleotide
  Target: LAMA2; (+) strand; PAM type: NRG; PAM sequence: CAG
catgttcttttcactgctag

SEQ ID NO: 144343 - DNA, 20 bp, Artificial Sequence
  Description of Artificial Sequence: Synthetic oligonucleotide
  Target: LAMA2; (+) strand; PAM type: NRG; PAM sequence: TGG
tgctagcagcaattaacatt

SEQ ID NO: 144344 - DNA, 20 bp, Artificial Sequence
  Description of Artificial Sequence: Synthetic oligonucleotide
  Target: LAMA2; (+) strand; PAM type: NRG; PAM sequence: TAG
acatttggcatatatcctcc

SEQ ID NO: 144345 - DNA, 20 bp, Artificial Sequence
  Description of Artificial Sequence: Synthetic oligonucleotide
  Target: LAMA2; (+) strand; PAM type: NRG; PAM sequence: AAG
agatttcattttttatgcat

SEQ ID NO: 144346 - DNA, 20 bp, Artificial Sequence
  Description of Artificial Sequence: Synthetic oligonucleotide
  Target: LAMA2; (+) strand; PAM type: NRG; PAM sequence: AAG
tcattttttatgcataagtg

SEQ ID NO: 144347 - DNA, 20 bp, Artificial Sequence
  Description of Artificial Sequence: Synthetic oligonucleotide
  Target: LAMA2; (+) strand; PAM type: NRG; PAM sequence: TAG
tgtgttcttgttatattaca

SEQ ID NO: 144348 - DNA, 20 bp, Artificial Sequence
  Description of Artificial Sequence: Synthetic oligonucleotide
  Target: LAMA2; (+) strand; PAM type: NRG; PAM sequence: AAG
catagttcttgttttaacac

SEQ ID NO: 144349 - DNA, 20 bp, Artificial Sequence
  Description of Artificial Sequence: Synthetic oligonucleotide
  Target: LAMA2; (+) strand; PAM type: NRG; PAM sequence: TGG
agttcttgttttaacacaag

SEQ ID NO: 144350 - DNA, 20 bp, Artificial Sequence
  Description of Artificial Sequence: Synthetic oligonucleotide
  Target: LAMA2; (+) strand; PAM type: NRG; PAM sequence: TGG
aagtggaattatcctctaca

SEQ ID NO: 144351 - DNA, 20 bp, Artificial Sequence
  Description of Artificial Sequence: Synthetic oligonucleotide
  Target: LAMA2; (+) strand; PAM type: NRG; PAM sequence: GAG
tgatttgtttttgcacttat

SEQ ID NO: 144352 - DNA, 20 bp, Artificial Sequence
  Description of Artificial Sequence: Synthetic oligonucleotide
  Target: LAMA2; (+) strand; PAM type: NRG; PAM sequence: AGG
gatttgtttttgcacttatg

SEQ ID NO: 144353 - DNA, 20 bp, Artificial Sequence
  Description of Artificial Sequence: Synthetic oligonucleotide
  Target: LAMA2; (+) strand; PAM type: NRG; PAM sequence: TAG
gttgtacatttttttaattt

SEQ ID NO: 144354 - DNA, 20 bp, Artificial Sequence
  Description of Artificial Sequence: Synthetic oligonucleotide
  Target: LAMA2; (+) strand; PAM type: NRG; PAM sequence: TGG
catttttttaattttagcat

SEQ ID NO: 144355 - DNA, 20 bp, Artificial Sequence
  Description of Artificial Sequence: Synthetic oligonucleotide
  Target: LAMA2; (+) strand; PAM type: NRG; PAM sequence: TAG
actttgtttttattttaaca

SEQ ID NO: 144356 - DNA, 20 bp, Artificial Sequence
  Description of Artificial Sequence: Synthetic oligonucleotide
  Target: LAMA2; (+) strand; PAM type: NRG; PAM sequence: CGG
atttatcatatctccactga

SEQ ID NO: 144357 - DNA, 20 bp, Artificial Sequence
  Description of Artificial Sequence: Synthetic oligonucleotide
  Target: LAMA2; (+) strand; PAM type: NRG; PAM sequence: CAG
tatctccactgacggtcctt

SEQ ID NO: 144358 - DNA, 20 bp, Artificial Sequence
  Description of Artificial Sequence: Synthetic oligonucleotide
  Target: LAMA2; (+) strand; PAM type: NRG; PAM sequence: AGG
atctccactgacggtccttc

SEQ ID NO: 144359 - DNA, 20 bp, Artificial Sequence
  Description of Artificial Sequence: Synthetic oligonucleotide
  Target: LAMA2; (+) strand; PAM type: NRG; PAM sequence: AAG
ttctaacttttcttgattat

SEQ ID NO: 144360 - DNA, 20 bp, Artificial Sequence
  Description of Artificial Sequence: Synthetic oligonucleotide
  Target: LAMA2; (+) strand; PAM type: NRG; PAM sequence: AAG
ttgtaatgactatcttgtac

SEQ ID NO: 144361 - DNA, 20 bp, Artificial Sequence
  Description of Artificial Sequence: Synthetic oligonucleotide
  Target: LAMA2; (+) strand; PAM type: NRG; PAM sequence: AAG
cttatgtaaataaatctgat

SEQ ID NO: 144362 - DNA, 20 bp, Artificial Sequence
  Description of Artificial Sequence: Synthetic oligonucleotide
  Target: LAMA2; (+) strand; PAM type: NRG; PAM sequence: AGG
ttatgtaaataaatctgata

SEQ ID NO: 144363 - DNA, 20 bp, Artificial Sequence
  Description of Artificial Sequence: Synthetic oligonucleotide
  Target: LAMA2; (+) strand; PAM type: NRG; PAM sequence: GGG
tatgtaaataaatctgataa

SEQ ID NO: 144364 - DNA, 20 bp, Artificial Sequence
  Description of Artificial Sequence: Synthetic oligonucleotide
  Target: LAMA2; (+) strand; PAM type: NRG; PAM sequence: TAG
aaatctgataagggaaattg

SEQ ID NO: 144365 - DNA, 20 bp, Artificial Sequence
  Description of Artificial Sequence: Synthetic oligonucleotide
  Target: LAMA2; (+) strand; PAM type: NRG; PAM sequence: AGG
aatctgataagggaaattgt

SEQ ID NO: 144366 - DNA, 20 bp, Artificial Sequence
  Description of Artificial Sequence: Synthetic oligonucleotide
  Target: LAMA2; (+) strand; PAM type: NRG; PAM sequence: AAG
ataagggaaattgtaggcta

SEQ ID NO: 144367 - DNA, 20 bp, Artificial Sequence
  Description of Artificial Sequence: Synthetic oligonucleotide
  Target: LAMA2; (+) strand; PAM type: NRG; PAM sequence: GAG
ttaattatttatttattttt

SEQ ID NO: 144368 - DNA, 20 bp, Artificial Sequence
  Description of Artificial Sequence: Synthetic oligonucleotide
  Target: LAMA2; (+) strand; PAM type: NRG; PAM sequence: CGG
ttatttatttatttttgaga

SEQ ID NO: 144369 - DNA, 20 bp, Artificial Sequence
  Description of Artificial Sequence: Synthetic oligonucleotide
  Target: LAMA2; (+) strand; PAM type: NRG; PAM sequence: GAG
atttatttatttttgagacg

SEQ ID NO: 144370 - DNA, 20 bp, Artificial Sequence
  Description of Artificial Sequence: Synthetic oligonucleotide
  Target: LAMA2; (+) strand; PAM type: NRG; PAM sequence: CAG
cggagtctcgatctgtcgcc

SEQ ID NO: 144371 - DNA, 20 bp, Artificial Sequence
  Description of Artificial Sequence: Synthetic oligonucleotide
  Target: LAMA2; (+) strand; PAM type: NRG; PAM sequence: AGG
ggagtctcgatctgtcgccc

SEQ ID NO: 144372 - DNA, 20 bp, Artificial Sequence
  Description of Artificial Sequence: Synthetic oligonucleotide
  Target: LAMA2; (+) strand; PAM type: NRG; PAM sequence: TGG
tctcgatctgtcgcccaggc

SEQ ID NO: 144373 - DNA, 20 bp, Artificial Sequence
  Description of Artificial Sequence: Synthetic oligonucleotide
  Target: LAMA2; (+) strand; PAM type: NRG; PAM sequence: CAG
ctgtcgcccaggctggactg

SEQ ID NO: 144374 - DNA, 20 bp, Artificial Sequence
  Description of Artificial Sequence: Synthetic oligonucleotide
  Target: LAMA2; (+) strand; PAM type: NRG; PAM sequence: TGG
tcgcccaggctggactgcag

SEQ ID NO: 144375 - DNA, 20 bp, Artificial Sequence
  Description of Artificial Sequence: Synthetic oligonucleotide
  Target: LAMA2; (+) strand; PAM type: NRG; PAM sequence: TGG
ggactgcagtggctcgatct

SEQ ID NO: 144376 - DNA, 20 bp, Artificial Sequence
  Description of Artificial Sequence: Synthetic oligonucleotide
  Target: LAMA2; (+) strand; PAM type: NRG; PAM sequence: AAG
gctcgatcttggctcactgc

SEQ ID NO: 144377 - DNA, 20 bp, Artificial Sequence
  Description of Artificial Sequence: Synthetic oligonucleotide
  Target: LAMA2; (+) strand; PAM type: NRG; PAM sequence: CGG
tcactgcaagctccgcctcc

SEQ ID NO: 144378 - DNA, 20 bp, Artificial Sequence
  Description of Artificial Sequence: Synthetic oligonucleotide
  Target: LAMA2; (+) strand; PAM type: NRG; PAM sequence: GGG
cactgcaagctccgcctccc

SEQ ID NO: 144379 - DNA, 20 bp, Artificial Sequence
  Description of Artificial Sequence: Synthetic oligonucleotide
  Target: LAMA2; (+) strand; PAM type: NRG; PAM sequence: CAG
ttcacgccattctcctgcct

SEQ ID NO: 144380 - DNA, 20 bp, Artificial Sequence
  Description of Artificial Sequence: Synthetic oligonucleotide
  Target: LAMA2; (+) strand; PAM type: NRG; PAM sequence: GAG
ttctcctgcctcagcctcct

SEQ ID NO: 144381 - DNA, 20 bp, Artificial Sequence
  Description of Artificial Sequence: Synthetic oligonucleotide
  Target: LAMA2; (+) strand; PAM type: NRG; PAM sequence: TAG
tcctgcctcagcctcctgag

SEQ ID NO: 144382 - DNA, 20 bp, Artificial Sequence
  Description of Artificial Sequence: Synthetic oligonucleotide
  Target: LAMA2; (+) strand; PAM type: NRG; PAM sequence: TGG
gcctcagcctcctgagtagc

SEQ ID NO: 144383 - DNA, 20 bp, Artificial Sequence
  Description of Artificial Sequence: Synthetic oligonucleotide
  Target: LAMA2; (+) strand; PAM type: NRG; PAM sequence: CAG
ctcctgagtagctggaacta

SEQ ID NO: 144384 - DNA, 20 bp, Artificial Sequence
  Description of Artificial Sequence: Synthetic oligonucleotide
  Target: LAMA2; (+) strand; PAM type: NRG; PAM sequence: AGG
tcctgagtagctggaactac

SEQ ID NO: 144385 - DNA, 20 bp, Artificial Sequence
  Description of Artificial Sequence: Synthetic oligonucleotide
  Target: LAMA2; (+) strand; PAM type: NRG; PAM sequence: TGG
caggcgcccgccaccacgcc

SEQ ID NO: 144386 - DNA, 20 bp, Artificial Sequence
  Description of Artificial Sequence: Synthetic oligonucleotide
  Target: LAMA2; (+) strand; PAM type: NRG; PAM sequence: TAG
ggctaatttttttgtatttt

SEQ ID NO: 144387 - DNA, 20 bp, Artificial Sequence
  Description of Artificial Sequence: Synthetic oligonucleotide
  Target: LAMA2; (+) strand; PAM type: NRG; PAM sequence: CAG
atttttttgtatttttagta

SEQ ID NO: 144388 - DNA, 20 bp, Artificial Sequence
  Description of Artificial Sequence: Synthetic oligonucleotide
  Target: LAMA2; (+) strand; PAM type: NRG; PAM sequence: CGG
ttttgtatttttagtacaga

SEQ ID NO: 144389 - DNA, 20 bp, Artificial Sequence
  Description of Artificial Sequence: Synthetic oligonucleotide
  Target: LAMA2; (+) strand; PAM type: NRG; PAM sequence: GGG
tttgtatttttagtacagac

SEQ ID NO: 144390 - DNA, 20 bp, Artificial Sequence
  Description of Artificial Sequence: Synthetic oligonucleotide
  Target: LAMA2; (+) strand; PAM type: NRG; PAM sequence: GGG
ttgtatttttagtacagacg

SEQ ID NO: 144391 - DNA, 20 bp, Artificial Sequence
  Description of Artificial Sequence: Synthetic oligonucleotide
  Target: LAMA2; (+) strand; PAM type: NRG; PAM sequence: TAG
cagacggggtttcaccgtgt

SEQ ID NO: 144392 - DNA, 20 bp, Artificial Sequence
  Description of Artificial Sequence: Synthetic oligonucleotide
  Target: LAMA2; (+) strand; PAM type: NRG; PAM sequence: CAG
cggggtttcaccgtgttagc

SEQ ID NO: 144393 - DNA, 20 bp, Artificial Sequence
  Description of Artificial Sequence: Synthetic oligonucleotide
  Target: LAMA2; (+) strand; PAM type: NRG; PAM sequence: AGG
ggggtttcaccgtgttagcc

SEQ ID NO: 144394 - DNA, 20 bp, Artificial Sequence
  Description of Artificial Sequence: Synthetic oligonucleotide
  Target: LAMA2; (+) strand; PAM type: NRG; PAM sequence: TGG
tttcaccgtgttagccagga

SEQ ID NO: 144395 - DNA, 20 bp, Artificial Sequence
  Description of Artificial Sequence: Synthetic oligonucleotide
  Target: LAMA2; (+) strand; PAM type: NRG; PAM sequence: CGG
acctcgtgatctgcccacct

SEQ ID NO: 144396 - DNA, 20 bp, Artificial Sequence
  Description of Artificial Sequence: Synthetic oligonucleotide
  Target: LAMA2; (+) strand; PAM type: NRG; PAM sequence: AAG
ctgcccacctcggcctctta

SEQ ID NO: 144397 - DNA, 20 bp, Artificial Sequence
  Description of Artificial Sequence: Synthetic oligonucleotide
  Target: LAMA2; (+) strand; PAM type: NRG; PAM sequence: GAG
cctcggcctcttaaagtgct

SEQ ID NO: 144398 - DNA, 20 bp, Artificial Sequence
  Description of Artificial Sequence: Synthetic oligonucleotide
  Target: LAMA2; (+) strand; PAM type: NRG; PAM sequence: CAG
ctcttaaagtgctgagatta

SEQ ID NO: 144399 - DNA, 20 bp, Artificial Sequence
  Description of Artificial Sequence: Synthetic oligonucleotide
  Target: LAMA2; (+) strand; PAM type: NRG; PAM sequence: AGG
tcttaaagtgctgagattac

SEQ ID NO: 144400 - DNA, 20 bp, Artificial Sequence
  Description of Artificial Sequence: Synthetic oligonucleotide
  Target: LAMA2; (+) strand; PAM type: NRG; PAM sequence: GAG
agtgctgagattacaggcgt

SEQ ID NO: 144401 - DNA, 20 bp, Artificial Sequence
  Description of Artificial Sequence: Synthetic oligonucleotide
  Target: LAMA2; (+) strand; PAM type: NRG; PAM sequence: CGG
caggcgtgagccactgctcc

SEQ ID NO: 144402 - DNA, 20 bp, Artificial Sequence
  Description of Artificial Sequence: Synthetic oligonucleotide
  Target: LAMA2; (+) strand; PAM type: NRG; PAM sequence: TGG
attttatttttgatatgcac

SEQ ID NO: 144403 - DNA, 20 bp, Artificial Sequence
  Description of Artificial Sequence: Synthetic oligonucleotide
  Target: LAMA2; (+) strand; PAM type: NRG; PAM sequence: AAG
cactggcacaaaattgtgtg

SEQ ID NO: 144404 - DNA, 20 bp, Artificial Sequence
  Description of Artificial Sequence: Synthetic oligonucleotide
  Target: LAMA2; (+) strand; PAM type: NRG; PAM sequence: AAG
accaattaataaatatgtct

SEQ ID NO: 144405 - DNA, 20 bp, Artificial Sequence
  Description of Artificial Sequence: Synthetic oligonucleotide
  Target: LAMA2; (+) strand; PAM type: NRG; PAM sequence: AGG
ccaattaataaatatgtcta

SEQ ID NO: 144406 - DNA, 20 bp, Artificial Sequence
  Description of Artificial Sequence: Synthetic oligonucleotide
  Target: LAMA2; (+) strand; PAM type: NRG; PAM sequence: TAG
ataaatatgtctaaggaata

SEQ ID NO: 144407 - DNA, 20 bp, Artificial Sequence
  Description of Artificial Sequence: Synthetic oligonucleotide
  Target: LAMA2; (+) strand; PAM type: NRG; PAM sequence: TGG
tcaaaaaattatcacttaca

SEQ ID NO: 144408 - DNA, 20 bp, Artificial Sequence
  Description of Artificial Sequence: Synthetic oligonucleotide
  Target: LAMA2; (+) strand; PAM type: NRG; PAM sequence: GGG
caaaaaattatcacttacat

SEQ ID NO: 144409 - DNA, 20 bp, Artificial Sequence
  Description of Artificial Sequence: Synthetic oligonucleotide
  Target: LAMA2; (+) strand; PAM type: NRG; PAM sequence: TAG
attatcacttacatgggctc

SEQ ID NO: 144410 - DNA, 20 bp, Artificial Sequence
  Description of Artificial Sequence: Synthetic oligonucleotide
  Target: LAMA2; (+) strand; PAM type: NRG; PAM sequence: AAG
acccatgatatgaccaattt

SEQ ID NO: 144411 - DNA, 20 bp, Artificial Sequence
  Description of Artificial Sequence: Synthetic oligonucleotide
  Target: LAMA2; (+) strand; PAM type: NRG; PAM sequence: TAG
aaacttgaaaatataatttc

SEQ ID NO: 144412 - DNA, 20 bp, Artificial Sequence
  Description of Artificial Sequence: Synthetic oligonucleotide
  Target: LAMA2; (+) strand; PAM type: NRG; PAM sequence: GAG
tagcacgtgtatactaatgc

SEQ ID NO: 144413 - DNA, 20 bp, Artificial Sequence
  Description of Artificial Sequence: Synthetic oligonucleotide
  Target: LAMA2; (+) strand; PAM type: NRG; PAM sequence: TAG
acgtgtatactaatgcgaga

SEQ ID NO: 144414 - DNA, 20 bp, Artificial Sequence
  Description of Artificial Sequence: Synthetic oligonucleotide
  Target: LAMA2; (+) strand; PAM type: NRG; PAM sequence: GAG
gtgtatactaatgcgagata

SEQ ID NO: 144415 - DNA, 20 bp, Artificial Sequence
  Description of Artificial Sequence: Synthetic oligonucleotide
  Target: LAMA2; (+) strand; PAM type: NRG; PAM sequence: AAG
tatactaatgcgagatagag

SEQ ID NO: 144416 - DNA, 20 bp, Artificial Sequence
  Description of Artificial Sequence: Synthetic oligonucleotide
  Target: LAMA2; (+) strand; PAM type: NRG; PAM sequence: CAG
agagaagttttatttacaac

SEQ ID NO: 144417 - DNA, 20 bp, Artificial Sequence
  Description of Artificial Sequence: Synthetic oligonucleotide
  Target: LAMA2; (+) strand; PAM type: NRG; PAM sequence: TGG
tatttacaaccagaaattgt

SEQ ID NO: 144418 - DNA, 20 bp, Artificial Sequence
  Description of Artificial Sequence: Synthetic oligonucleotide
  Target: LAMA2; (+) strand; PAM type: NRG; PAM sequence: GGG
atttacaaccagaaattgtt

SEQ ID NO: 144419 - DNA, 20 bp, Artificial Sequence
  Description of Artificial Sequence: Synthetic oligonucleotide
  Target: LAMA2; (+) strand; PAM type: NRG; PAM sequence: AAG
agaaattgttgggtccataa

SEQ ID NO: 144420 - DNA, 20 bp, Artificial Sequence
  Description of Artificial Sequence: Synthetic oligonucleotide
  Target: LAMA2; (+) strand; PAM type: NRG; PAM sequence: TAG
ataaaagaaacaaatatgtc

SEQ ID NO: 144421 - DNA, 20 bp, Artificial Sequence
  Description of Artificial Sequence: Synthetic oligonucleotide
  Target: LAMA2; (+) strand; PAM type: NRG; PAM sequence: AAG
aatatgtctagaacatttta

SEQ ID NO: 144422 - DNA, 20 bp, Artificial Sequence
  Description of Artificial Sequence: Synthetic oligonucleotide
  Target: LAMA2; (+) strand; PAM type: NRG; PAM sequence: CAG
ctagaacattttaaagttgc

SEQ ID NO: 144423 - DNA, 20 bp, Artificial Sequence
  Description of Artificial Sequence: Synthetic oligonucleotide
  Target: LAMA2; (+) strand; PAM type: NRG; PAM sequence: GAG
agaacattttaaagttgcca

SEQ ID NO: 144424 - DNA, 20 bp, Artificial Sequence
  Description of Artificial Sequence: Synthetic oligonucleotide
  Target: LAMA2; (+) strand; PAM type: NRG; PAM sequence: CAG
acattttaaagttgccagag

SEQ ID NO: 144425 - DNA, 20 bp, Artificial Sequence
  Description of Artificial Sequence: Synthetic oligonucleotide
  Target: LAMA2; (+) strand; PAM type: NRG; PAM sequence: AAG
aagttgccagagcagatttc

SEQ ID NO: 144426 - DNA, 20 bp, Artificial Sequence
  Description of Artificial Sequence: Synthetic oligonucleotide
  Target: LAMA2; (+) strand; PAM type: NRG; PAM sequence: CAG
gagcagatttcaagatattc

SEQ ID NO: 144427 - DNA, 20 bp, Artificial Sequence
  Description of Artificial Sequence: Synthetic oligonucleotide
  Target: LAMA2; (+) strand; PAM type: NRG; PAM sequence: GAG
atttcaagatattccagcct

SEQ ID NO: 144428 - DNA, 20 bp, Artificial Sequence
  Description of Artificial Sequence: Synthetic oligonucleotide
  Target: LAMA2; (+) strand; PAM type: NRG; PAM sequence: CAG
atattccagcctgagtccct

SEQ ID NO: 144429 - DNA, 20 bp, Artificial Sequence
  Description of Artificial Sequence: Synthetic oligonucleotide
  Target: LAMA2; (+) strand; PAM type: NRG; PAM sequence: TGG
agtccctcagatatgtattt

SEQ ID NO: 144430 - DNA, 20 bp, Artificial Sequence
  Description of Artificial Sequence: Synthetic oligonucleotide
  Target: LAMA2; (+) strand; PAM type: NRG; PAM sequence: AAG
ggtgattgtaaaaatatcaa

SEQ ID NO: 144431 - DNA, 20 bp, Artificial Sequence
  Description of Artificial Sequence: Synthetic oligonucleotide
  Target: LAMA2; (+) strand; PAM type: NRG; PAM sequence: AAG
aagaaattatttgtgtccga

SEQ ID NO: 144432 - DNA, 20 bp, Artificial Sequence
  Description of Artificial Sequence: Synthetic oligonucleotide
  Target: LAMA2; (+) strand; PAM type: NRG; PAM sequence: GAG
ccgaaagtcacaatatgcgt

SEQ ID NO: 144433 - DNA, 20 bp, Artificial Sequence
  Description of Artificial Sequence: Synthetic oligonucleotide
  Target: LAMA2; (+) strand; PAM type: NRG; PAM sequence: AAG
gcgtgagtcatcaacacaat

SEQ ID NO: 144434 - DNA, 20 bp, Artificial Sequence
  Description of Artificial Sequence: Synthetic oligonucleotide
  Target: LAMA2; (+) strand; PAM type: NRG; PAM sequence: AAG
agtcatcaacacaataagat

SEQ ID NO: 144435 - DNA, 20 bp, Artificial Sequence
  Description of Artificial Sequence: Synthetic oligonucleotide
  Target: LAMA2; (+) strand; PAM type: NRG; PAM sequence: AGG
gtcatcaacacaataagata

SEQ ID NO: 144436 - DNA, 20 bp, Artificial Sequence
  Description of Artificial Sequence: Synthetic oligonucleotide
  Target: LAMA2; (+) strand; PAM type: NRG; PAM sequence: GAG
aataagataaggctaaaatt

SEQ ID NO: 144437 - DNA, 20 bp, Artificial Sequence
  Description of Artificial Sequence: Synthetic oligonucleotide
  Target: LAMA2; (+) strand; PAM type: NRG; PAM sequence: CAG
ataaggctaaaattgagttt

SEQ ID NO: 144438 - DNA, 20 bp, Artificial Sequence
  Description of Artificial Sequence: Synthetic oligonucleotide
  Target: LAMA2; (+) strand; PAM type: NRG; PAM sequence: TGG
aaattgagtttcagatattt

SEQ ID NO: 144439 - DNA, 20 bp, Artificial Sequence
  Description of Artificial Sequence: Synthetic oligonucleotide
  Target: LAMA2; (+) strand; PAM type: NRG; PAM sequence: GGG
aattgagtttcagatatttt

SEQ ID NO: 144440 - DNA, 20 bp, Artificial Sequence
  Description of Artificial Sequence: Synthetic oligonucleotide
  Target: LAMA2; (+) strand; PAM type: NRG; PAM sequence: AAG
taatcatttgtaaaatttta

SEQ ID NO: 144441 - DNA, 20 bp, Artificial Sequence
  Description of Artificial Sequence: Synthetic oligonucleotide
  Target: LAMA2; (+) strand; PAM type: NRG; PAM sequence: AAG
ttaaagtttatcattacgaa

SEQ ID NO: 144442 - DNA, 20 bp, Artificial Sequence
  Description of Artificial Sequence: Synthetic oligonucleotide
  Target: LAMA2; (+) strand; PAM type: NRG; PAM sequence: AGG
taaagtttatcattacgaaa

SEQ ID NO: 144443 - DNA, 20 bp, Artificial Sequence
  Description of Artificial Sequence: Synthetic oligonucleotide
  Target: LAMA2; (+) strand; PAM type: NRG; PAM sequence: AAG
gtttatcattacgaaaagga

SEQ ID NO: 144444 - DNA, 20 bp, Artificial Sequence
  Description of Artificial Sequence: Synthetic oligonucleotide
  Target: LAMA2; (+) strand; PAM type: NRG; PAM sequence: AAG
aaaatcaaatgaaataaaac

SEQ ID NO: 144445 - DNA, 20 bp, Artificial Sequence
  Description of Artificial Sequence: Synthetic oligonucleotide
  Target: LAMA2; (+) strand; PAM type: NRG; PAM sequence: TGG
ataaaacaagctttgttcca

SEQ ID NO: 144446 - DNA, 20 bp, Artificial Sequence
  Description of Artificial Sequence: Synthetic oligonucleotide
  Target: LAMA2; (+) strand; PAM type: NRG; PAM sequence: GGG
taaaacaagctttgttccat

SEQ ID NO: 144447 - DNA, 20 bp, Artificial Sequence
  Description of Artificial Sequence: Synthetic oligonucleotide
  Target: LAMA2; (+) strand; PAM type: NRG; PAM sequence: TAG
acaagctttgttccatggga

SEQ ID NO: 144448 - DNA, 20 bp, Artificial Sequence
  Description of Artificial Sequence: Synthetic oligonucleotide
  Target: LAMA2; (+) strand; PAM type: NRG; PAM sequence: CAG
tttgttccatgggatagtgt

SEQ ID NO: 144449 - DNA, 20 bp, Artificial Sequence
  Description of Artificial Sequence: Synthetic oligonucleotide
  Target: LAMA2; (+) strand; PAM type: NRG; PAM sequence: AAG
atgggatagtgtcagtcata

SEQ ID NO: 144450 - DNA, 20 bp, Artificial Sequence
  Description of Artificial Sequence: Synthetic oligonucleotide
  Target: LAMA2; (+) strand; PAM type: NRG; PAM sequence: TAG
tgtcagtcataaagacttac

SEQ ID NO: 144451 - DNA, 20 bp, Artificial Sequence
  Description of Artificial Sequence: Synthetic oligonucleotide
  Target: LAMA2; (+) strand; PAM type: NRG; PAM sequence: TAG
agtcataaagacttactagt

SEQ ID NO: 144452 - DNA, 20 bp, Artificial Sequence
  Description of Artificial Sequence: Synthetic oligonucleotide
  Target: LAMA2; (+) strand; PAM type: NRG; PAM sequence: AGG
gtcataaagacttactagtt

SEQ ID NO: 144453 - DNA, 20 bp, Artificial Sequence
  Description of Artificial Sequence: Synthetic oligonucleotide
  Target: LAMA2; (+) strand; PAM type: NRG; PAM sequence: GAG
gttaggtgctaattcatttt

SEQ ID NO: 144454 - DNA, 20 bp, Artificial Sequence
  Description of Artificial Sequence: Synthetic oligonucleotide
  Target: LAMA2; (+) strand; PAM type: NRG; PAM sequence: CAG
gctaattcattttgagctta

SEQ ID NO: 144455 - DNA, 20 bp, Artificial Sequence
  Description of Artificial Sequence: Synthetic oligonucleotide
  Target: LAMA2; (+) strand; PAM type: NRG; PAM sequence: AGG
ctaattcattttgagcttac

SEQ ID NO: 144456 - DNA, 20 bp, Artificial Sequence
  Description of Artificial Sequence: Synthetic oligonucleotide
  Target: LAMA2; (+) strand; PAM type: NRG; PAM sequence: GGG
taattcattttgagcttaca

SEQ ID NO: 144457 - DNA, 20 bp, Artificial Sequence
  Description of Artificial Sequence: Synthetic oligonucleotide
  Target: LAMA2; (+) strand; PAM type: NRG; PAM sequence: CAG
ttgagcttacagggttttat

SEQ ID NO: 144458 - DNA, 20 bp, Artificial Sequence
  Description of Artificial Sequence: Synthetic oligonucleotide
  Target: LAMA2; (+) strand; PAM type: NRG; PAM sequence: AGG
tgagcttacagggttttatc

SEQ ID NO: 144459 - DNA, 20 bp, Artificial Sequence
  Description of Artificial Sequence: Synthetic oligonucleotide
  Target: LAMA2; (+) strand; PAM type: NRG; PAM sequence: CAG
ttacagggttttatcaggat

SEQ ID NO: 144460 - DNA, 20 bp, Artificial Sequence
  Description of Artificial Sequence: Synthetic oligonucleotide
  Target: LAMA2; (+) strand; PAM type: NRG; PAM sequence: AAG
ggttttatcaggatcagact

SEQ ID NO: 144461 - DNA, 20 bp, Artificial Sequence
  Description of Artificial Sequence: Synthetic oligonucleotide
  Target: LAMA2; (+) strand; PAM type: NRG; PAM sequence: TGG
ttttataaataaaaatgttt

SEQ ID NO: 144462 - DNA, 20 bp, Artificial Sequence
  Description of Artificial Sequence: Synthetic oligonucleotide
  Target: LAMA2; (+) strand; PAM type: NRG; PAM sequence: GGG
tttataaataaaaatgtttt

SEQ ID NO: 144463 - DNA, 20 bp, Artificial Sequence
  Description of Artificial Sequence: Synthetic oligonucleotide
  Target: LAMA2; (+) strand; PAM type: NRG; PAM sequence: GGG
ttataaataaaaatgttttg

SEQ ID NO: 144464 - DNA, 20 bp, Artificial Sequence
  Description of Artificial Sequence: Synthetic oligonucleotide
  Target: LAMA2; (+) strand; PAM type: NRG; PAM sequence: CAG
ataaaaatgttttggggttt

SEQ ID NO: 144465 - DNA, 20 bp, Artificial Sequence
  Description of Artificial Sequence: Synthetic oligonucleotide
  Target: LAMA2; (+) strand; PAM type: NRG; PAM sequence: AAG
gggtttcagatttaaaaatc

SEQ ID NO: 144466 - DNA, 20 bp, Artificial Sequence
  Description of Artificial Sequence: Synthetic oligonucleotide
  Target: LAMA2; (+) strand; PAM type: NRG; PAM sequence: GAG
gtttcagatttaaaaatcaa

SEQ ID NO: 144467 - DNA, 20 bp, Artificial Sequence
  Description of Artificial Sequence: Synthetic oligonucleotide
  Target: LAMA2; (+) strand; PAM type: NRG; PAM sequence: AAG
cagatttaaaaatcaagagt

SEQ ID NO: 144468 - DNA, 20 bp, Artificial Sequence
  Description of Artificial Sequence: Synthetic oligonucleotide
  Target: LAMA2; (+) strand; PAM type: NRG; PAM sequence: AAG
atttaaaaatcaagagtaag

SEQ ID NO: 144469 - DNA, 20 bp, Artificial Sequence
  Description of Artificial Sequence: Synthetic oligonucleotide
  Target: LAMA2; (+) strand; PAM type: NRG; PAM sequence: AAG
aagttttacaatatttacta

SEQ ID NO: 144470 - DNA, 20 bp, Artificial Sequence
  Description of Artificial Sequence: Synthetic oligonucleotide
  Target: LAMA2; (+) strand; PAM type: NRG; PAM sequence: TAG
tatttactaaagattacgat

SEQ ID NO: 144471 - DNA, 20 bp, Artificial Sequence
  Description of Artificial Sequence: Synthetic oligonucleotide
  Target: LAMA2; (+) strand; PAM type: NRG; PAM sequence: TAG
accacaaaacatctgaactt

SEQ ID NO: 144472 - DNA, 20 bp, Artificial Sequence
  Description of Artificial Sequence: Synthetic oligonucleotide
  Target: LAMA2; (+) strand; PAM type: NRG; PAM sequence: AAG
tattatttatatgaccttaa

SEQ ID NO: 144473 - DNA, 20 bp, Artificial Sequence
  Description of Artificial Sequence: Synthetic oligonucleotide
  Target: LAMA2; (+) strand; PAM type: NRG; PAM sequence: CAG
atttatatgaccttaaaagt

SEQ ID NO: 144474 - DNA, 20 bp, Artificial Sequence
  Description of Artificial Sequence: Synthetic oligonucleotide
  Target: LAMA2; (+) strand; PAM type: NRG; PAM sequence: TAG
aatgacttaacttctgtctt

SEQ ID NO: 144475 - DNA, 20 bp, Artificial Sequence
  Description of Artificial Sequence: Synthetic oligonucleotide
  Target: LAMA2; (+) strand; PAM type: NRG; PAM sequence: AAG
ctttagtgctattttgtttg

SEQ ID NO: 144476 - DNA, 20 bp, Artificial Sequence
  Description of Artificial Sequence: Synthetic oligonucleotide
  Target: LAMA2; (+) strand; PAM type: NRG; PAM sequence: AGG
tttagtgctattttgtttga

SEQ ID NO: 144477 - DNA, 20 bp, Artificial Sequence
  Description of Artificial Sequence: Synthetic oligonucleotide
  Target: LAMA2; (+) strand; PAM type: NRG; PAM sequence: AAG
aggcttatttatctgctatg

SEQ ID NO: 144478 - DNA, 20 bp, Artificial Sequence
  Description of Artificial Sequence: Synthetic oligonucleotide
  Target: LAMA2; (+) strand; PAM type: NRG; PAM sequence: TGG
ttctacatgtctcttcacat

SEQ ID NO: 144479 - DNA, 20 bp, Artificial Sequence
  Description of Artificial Sequence: Synthetic oligonucleotide
  Target: LAMA2; (+) strand; PAM type: NRG; PAM sequence: GGG
tctacatgtctcttcacatt

SEQ ID NO: 144480 - DNA, 20 bp, Artificial Sequence
  Description of Artificial Sequence: Synthetic oligonucleotide
  Target: LAMA2; (+) strand; PAM type: NRG; PAM sequence: TAG
catgtctcttcacattgggt

SEQ ID NO: 144481 - DNA, 20 bp, Artificial Sequence
  Description of Artificial Sequence: Synthetic oligonucleotide
  Target: LAMA2; (+) strand; PAM type: NRG; PAM sequence: AGG
atgtctcttcacattgggtt

SEQ ID NO: 144482 - DNA, 20 bp, Artificial Sequence
  Description of Artificial Sequence: Synthetic oligonucleotide
  Target: LAMA2; (+) strand; PAM type: NRG; PAM sequence: AAG
cattgggttaggaaatcttc

SEQ ID NO: 144483 - DNA, 20 bp, Artificial Sequence
  Description of Artificial Sequence: Synthetic oligonucleotide
  Target: LAMA2; (+) strand; PAM type: NRG; PAM sequence: AGG
attgggttaggaaatcttca

SEQ ID NO: 144484 - DNA, 20 bp, Artificial Sequence
  Description of Artificial Sequence: Synthetic oligonucleotide
  Target: LAMA2; (+) strand; PAM type: NRG; PAM sequence: CGG
ttcaaggaaattaatatcct

SEQ ID NO: 144485 - DNA, 20 bp, Artificial Sequence
  Description of Artificial Sequence: Synthetic oligonucleotide
  Target: LAMA2; (+) strand; PAM type: NRG; PAM sequence: GGG
tcaaggaaattaatatcctc

SEQ ID NO: 144486 - DNA, 20 bp, Artificial Sequence
  Description of Artificial Sequence: Synthetic oligonucleotide
  Target: LAMA2; (+) strand; PAM type: NRG; PAM sequence: TGG
gtatacacaaccttttgctg

SEQ ID NO: 144487 - DNA, 20 bp, Artificial Sequence
  Description of Artificial Sequence: Synthetic oligonucleotide
  Target: LAMA2; (+) strand; PAM type: NRG; PAM sequence: TGG
ctgtggtatttgctctgaca

SEQ ID NO: 144488 - DNA, 20 bp, Artificial Sequence
  Description of Artificial Sequence: Synthetic oligonucleotide
  Target: LAMA2; (+) strand; PAM type: NRG; PAM sequence: AAG
atttgctctgacatggaaca

SEQ ID NO: 144489 - DNA, 20 bp, Artificial Sequence
  Description of Artificial Sequence: Synthetic oligonucleotide
  Target: LAMA2; (+) strand; PAM type: NRG; PAM sequence: AGG
tttgctctgacatggaacaa

SEQ ID NO: 144490 - DNA, 20 bp, Artificial Sequence
  Description of Artificial Sequence: Synthetic oligonucleotide
  Target: LAMA2; (+) strand; PAM type: NRG; PAM sequence: AAG
ctgacatggaacaaaggcaa

SEQ ID NO: 144491 - DNA, 20 bp, Artificial Sequence
  Description of Artificial Sequence: Synthetic oligonucleotide
  Target: LAMA2; (+) strand; PAM type: NRG; PAM sequence: CGG
tggaacaaaggcaaaagata

SEQ ID NO: 144492 - DNA, 20 bp, Artificial Sequence
  Description of Artificial Sequence: Synthetic oligonucleotide
  Target: LAMA2; (+) strand; PAM type: NRG; PAM sequence: GGG
ggaacaaaggcaaaagatac

SEQ ID NO: 144493 - DNA, 20 bp, Artificial Sequence
  Description of Artificial Sequence: Synthetic oligonucleotide
  Target: LAMA2; (+) strand; PAM type: NRG; PAM sequence: TAG
gcaaaagatacgggaaaatg

SEQ ID NO: 144494 - DNA, 20 bp, Artificial Sequence
  Description of Artificial Sequence: Synthetic oligonucleotide
  Target: LAMA2; (+) strand; PAM type: NRG; PAM sequence: AAG
aaagatacgggaaaatgtag

SEQ ID NO: 144495 - DNA, 20 bp, Artificial Sequence
  Description of Artificial Sequence: Synthetic oligonucleotide
  Target: LAMA2; (+) strand; PAM type: NRG; PAM sequence: TGG
gatacgggaaaatgtagaag

SEQ ID NO: 144496 - DNA, 20 bp, Artificial Sequence
  Description of Artificial Sequence: Synthetic oligonucleotide
  Target: LAMA2; (+) strand; PAM type: NRG; PAM sequence: GGG
atacgggaaaatgtagaagt

SEQ ID NO: 144497 - DNA, 20 bp, Artificial Sequence
  Description of Artificial Sequence: Synthetic oligonucleotide
  Target: LAMA2; (+) strand; PAM type: NRG; PAM sequence: TAG
aaatgtagaagtgggcatta

SEQ ID NO: 144498 - DNA, 20 bp, Artificial Sequence
  Description of Artificial Sequence: Synthetic oligonucleotide
  Target: LAMA2; (+) strand; PAM type: NRG; PAM sequence: AAG
tgtagaagtgggcattatag

SEQ ID NO: 144499 - DNA, 20 bp, Artificial Sequence
  Description of Artificial Sequence: Synthetic oligonucleotide
  Target: LAMA2; (+) strand; PAM type: NRG; PAM sequence: TAG
ttcttcatactaattccttc

SEQ ID NO: 144500 - DNA, 20 bp, Artificial Sequence
  Description of Artificial Sequence: Synthetic oligonucleotide
  Target: LAMA2; (+) strand; PAM type: NRG; PAM sequence: TAG
tctagcctttatttaaaaaa

SEQ ID NO: 144501 - DNA, 20 bp, Artificial Sequence
  Description of Artificial Sequence: Synthetic oligonucleotide
  Target: LAMA2; (+) strand; PAM type: NRG; PAM sequence: AAG
aaaaatagcttctgaattgc

SEQ ID NO: 144502 - DNA, 20 bp, Artificial Sequence
  Description of Artificial Sequence: Synthetic oligonucleotide
  Target: LAMA2; (+) strand; PAM type: NRG; PAM sequence: AGG
aaaatagcttctgaattgca

SEQ ID NO: 144503 - DNA, 20 bp, Artificial Sequence
  Description of Artificial Sequence: Synthetic oligonucleotide
  Target: LAMA2; (+) strand; PAM type: NRG; PAM sequence: AAG
tgaattgcaaggatattttt

SEQ ID NO: 144504 - DNA, 20 bp, Artificial Sequence
  Description of Artificial Sequence: Synthetic oligonucleotide
  Target: LAMA2; (+) strand; PAM type: NRG; PAM sequence: CAG
tatttttaagccacatgaat

SEQ ID NO: 144505 - DNA, 20 bp, Artificial Sequence
  Description of Artificial Sequence: Synthetic oligonucleotide
  Target: LAMA2; (+) strand; PAM type: NRG; PAM sequence: CAG
catgaatcagtatgcccctt

SEQ ID NO: 144506 - DNA, 20 bp, Artificial Sequence
  Description of Artificial Sequence: Synthetic oligonucleotide
  Target: LAMA2; (+) strand; PAM type: NRG; PAM sequence: TGG
aatcagtatgccccttcagc

SEQ ID NO: 144507 - DNA, 20 bp, Artificial Sequence
  Description of Artificial Sequence: Synthetic oligonucleotide
  Target: LAMA2; (+) strand; PAM type: NRG; PAM sequence: AAG
ccccttcagctggacttttc

SEQ ID NO: 144508 - DNA, 20 bp, Artificial Sequence
  Description of Artificial Sequence: Synthetic oligonucleotide
  Target: LAMA2; (+) strand; PAM type: NRG; PAM sequence: AGG
cccttcagctggacttttca

SEQ ID NO: 144509 - DNA, 20 bp, Artificial Sequence
  Description of Artificial Sequence: Synthetic oligonucleotide
  Target: LAMA2; (+) strand; PAM type: NRG; PAM sequence: GAG
cttcagctggacttttcaag

SEQ ID NO: 144510 - DNA, 20 bp, Artificial Sequence
  Description of Artificial Sequence: Synthetic oligonucleotide
  Target: LAMA2; (+) strand; PAM type: NRG; PAM sequence: AAG
gaaatgattaacattatgtg

SEQ ID NO: 144511 - DNA, 20 bp, Artificial Sequence
  Description of Artificial Sequence: Synthetic oligonucleotide
  Target: LAMA2; (+) strand; PAM type: NRG; PAM sequence: TGG
agctaaattgcactgaaccg

SEQ ID NO: 144512 - DNA, 20 bp, Artificial Sequence
  Description of Artificial Sequence: Synthetic oligonucleotide
  Target: LAMA2; (+) strand; PAM type: NRG; PAM sequence: TGG
cactgaaccgtggaaccatg

SEQ ID NO: 144513 - DNA, 20 bp, Artificial Sequence
  Description of Artificial Sequence: Synthetic oligonucleotide
  Target: LAMA2; (+) strand; PAM type: NRG; PAM sequence: TGG
aaccgtggaaccatgtggtg

SEQ ID NO: 144514 - DNA, 20 bp, Artificial Sequence
  Description of Artificial Sequence: Synthetic oligonucleotide
  Target: LAMA2; (+) strand; PAM type: NRG; PAM sequence: TAG
ggaaccatgtggtgtggcaa

SEQ ID NO: 144515 - DNA, 20 bp, Artificial Sequence
  Description of Artificial Sequence: Synthetic oligonucleotide
  Target: LAMA2; (+) strand; PAM type: NRG; PAM sequence: TGG
accatgtggtgtggcaatag

SEQ ID NO: 144516 - DNA, 20 bp, Artificial Sequence
  Description of Artificial Sequence: Synthetic oligonucleotide
  Target: LAMA2; (+) strand; PAM type: NRG; PAM sequence: GGG
ccatgtggtgtggcaatagt

SEQ ID NO: 144517 - DNA, 20 bp, Artificial Sequence
  Description of Artificial Sequence: Synthetic oligonucleotide
  Target: LAMA2; (+) strand; PAM type: NRG; PAM sequence: TGG
tgtggtgtggcaatagtggg

SEQ ID NO: 144518 - DNA, 20 bp, Artificial Sequence
  Description of Artificial Sequence: Synthetic oligonucleotide
  Target: LAMA2; (+) strand; PAM type: NRG; PAM sequence: GGG
gtggtgtggcaatagtgggt

SEQ ID NO: 144519 - DNA, 20 bp, Artificial Sequence
  Description of Artificial Sequence: Synthetic oligonucleotide
  Target: LAMA2; (+) strand; PAM type: NRG; PAM sequence: GGG
tggtgtggcaatagtgggtg

SEQ ID NO: 144520 - DNA, 20 bp, Artificial Sequence
  Description of Artificial Sequence: Synthetic oligonucleotide
  Target: LAMA2; (+) strand; PAM type: NRG; PAM sequence: GAG
gtgtggcaatagtgggtggg

SEQ ID NO: 144521 - DNA, 20 bp, Artificial Sequence
  Description of Artificial Sequence: Synthetic oligonucleotide
  Target: LAMA2; (+) strand; PAM type: NRG; PAM sequence: TAG
tagtgggtggggagacatat

SEQ ID NO: 144522 - DNA, 20 bp, Artificial Sequence
  Description of Artificial Sequence: Synthetic oligonucleotide
  Target: LAMA2; (+) strand; PAM type: NRG; PAM sequence: TAG
ggtggggagacatattagtc

SEQ ID NO: 144523 - DNA, 20 bp, Artificial Sequence
  Description of Artificial Sequence: Synthetic oligonucleotide
  Target: LAMA2; (+) strand; PAM type: NRG; PAM sequence: GAG
tggggagacatattagtcta

SEQ ID NO: 144524 - DNA, 20 bp, Artificial Sequence
  Description of Artificial Sequence: Synthetic oligonucleotide
  Target: LAMA2; (+) strand; PAM type: NRG; PAM sequence: AGG
ggggagacatattagtctag

SEQ ID NO: 144525 - DNA, 20 bp, Artificial Sequence
  Description of Artificial Sequence: Synthetic oligonucleotide
  Target: LAMA2; (+) strand; PAM type: NRG; PAM sequence: GAG
ttagtctagaggtccctgct

SEQ ID NO: 144526 - DNA, 20 bp, Artificial Sequence
  Description of Artificial Sequence: Synthetic oligonucleotide
  Target: LAMA2; (+) strand; PAM type: NRG; PAM sequence: AAG
tagaggtccctgctgagcaa

SEQ ID NO: 144527 - DNA, 20 bp, Artificial Sequence
  Description of Artificial Sequence: Synthetic oligonucleotide
  Target: LAMA2; (+) strand; PAM type: NRG; PAM sequence: AAG
tccctgctgagcaaaagaca

SEQ ID NO: 144528 - DNA, 20 bp, Artificial Sequence
  Description of Artificial Sequence: Synthetic oligonucleotide
  Target: LAMA2; (+) strand; PAM type: NRG; PAM sequence: TGG
tctccattgtcccgcactga

SEQ ID NO: 144529 - DNA, 20 bp, Artificial Sequence
  Description of Artificial Sequence: Synthetic oligonucleotide
  Target: LAMA2; (+) strand; PAM type: NRG; PAM sequence: TGG
ccattgtcccgcactgatgg

SEQ ID NO: 144530 - DNA, 20 bp, Artificial Sequence
  Description of Artificial Sequence: Synthetic oligonucleotide
  Target: LAMA2; (+) strand; PAM type: NRG; PAM sequence: GGG
cattgtcccgcactgatggt

SEQ ID NO: 144531 - DNA, 20 bp, Artificial Sequence
  Description of Artificial Sequence: Synthetic oligonucleotide
  Target: LAMA2; (+) strand; PAM type: NRG; PAM sequence: TGG
tcccgcactgatggtgggct

SEQ ID NO: 144532 - DNA, 20 bp, Artificial Sequence
  Description of Artificial Sequence: Synthetic oligonucleotide
  Target: LAMA2; (+) strand; PAM type: NRG; PAM sequence: GGG
cccgcactgatggtgggctt

SEQ ID NO: 144533 - DNA, 20 bp, Artificial Sequence
  Description of Artificial Sequence: Synthetic oligonucleotide
  Target: LAMA2; (+) strand; PAM type: NRG; PAM sequence: CAG
gtgggcttgggatgtatttt

SEQ ID NO: 144534 - DNA, 20 bp, Artificial Sequence
  Description of Artificial Sequence: Synthetic oligonucleotide
  Target: LAMA2; (+) strand; PAM type: NRG; PAM sequence: CAG
ttttcagaaataattatttg

SEQ ID NO: 144535 - DNA, 20 bp, Artificial Sequence
  Description of Artificial Sequence: Synthetic oligonucleotide
  Target: LAMA2; (+) strand; PAM type: NRG; PAM sequence: AGG
tttcagaaataattatttgc

SEQ ID NO: 144536 - DNA, 20 bp, Artificial Sequence
  Description of Artificial Sequence: Synthetic oligonucleotide
  Target: LAMA2; (+) strand; PAM type: NRG; PAM sequence: GGG
ttcagaaataattatttgca

SEQ ID NO: 144537 - DNA, 20 bp, Artificial Sequence
  Description of Artificial Sequence: Synthetic oligonucleotide
  Target: LAMA2; (+) strand; PAM type: NRG; PAM sequence: TGG
tcactgtgcttgttccgttt

SEQ ID NO: 144538 - DNA, 20 bp, Artificial Sequence
  Description of Artificial Sequence: Synthetic oligonucleotide
  Target: LAMA2; (+) strand; PAM type: NRG; PAM sequence: GGG
cactgtgcttgttccgtttt

SEQ ID NO: 144539 - DNA, 20 bp, Artificial Sequence
  Description of Artificial Sequence: Synthetic oligonucleotide
  Target: LAMA2; (+) strand; PAM type: NRG; PAM sequence: TAG
gttttgggatgtttgtctac

SEQ ID NO: 144540 - DNA, 20 bp, Artificial Sequence
  Description of Artificial Sequence: Synthetic oligonucleotide
  Target: LAMA2; (+) strand; PAM type: NRG; PAM sequence: TGG
gtctactagactttctaaat

SEQ ID NO: 144541 - DNA, 20 bp, Artificial Sequence
  Description of Artificial Sequence: Synthetic oligonucleotide
  Target: LAMA2; (+) strand; PAM type: NRG; PAM sequence: GGG
tctactagactttctaaatt

SEQ ID NO: 144542 - DNA, 20 bp, Artificial Sequence
  Description of Artificial Sequence: Synthetic oligonucleotide
  Target: LAMA2; (+) strand; PAM type: NRG; PAM sequence: GAG
tactagactttctaaattgg

SEQ ID NO: 144543 - DNA, 20 bp, Artificial Sequence
  Description of Artificial Sequence: Synthetic oligonucleotide
  Target: LAMA2; (+) strand; PAM type: NRG; PAM sequence: TAG
actttctaaattgggagatt

SEQ ID NO: 144544 - DNA, 20 bp, Artificial Sequence
  Description of Artificial Sequence: Synthetic oligonucleotide
  Target: LAMA2; (+) strand; PAM type: NRG; PAM sequence: CAG
aattgggagatttagaaatt

SEQ ID NO: 144545 - DNA, 20 bp, Artificial Sequence
  Description of Artificial Sequence: Synthetic oligonucleotide
  Target: LAMA2; (+) strand; PAM type: NRG; PAM sequence: AAG
gggagatttagaaattcagt

SEQ ID NO: 144546 - DNA, 20 bp, Artificial Sequence
  Description of Artificial Sequence: Synthetic oligonucleotide
  Target: LAMA2; (+) strand; PAM type: NRG; PAM sequence: AAG
gatttagaaattcagtaaga

SEQ ID NO: 144547 - DNA, 20 bp, Artificial Sequence
  Description of Artificial Sequence: Synthetic oligonucleotide
  Target: LAMA2; (+) strand; PAM type: NRG; PAM sequence: GAG
gatatttaaaaaaatttttt

SEQ ID NO: 144548 - DNA, 20 bp, Artificial Sequence
  Description of Artificial Sequence: Synthetic oligonucleotide
  Target: LAMA2; (+) strand; PAM type: NRG; PAM sequence: AGG
atatttaaaaaaattttttg

SEQ ID NO: 144549 - DNA, 20 bp, Artificial Sequence
  Description of Artificial Sequence: Synthetic oligonucleotide
  Target: LAMA2; (+) strand; PAM type: NRG; PAM sequence: CAG
aaaaaattttttgaggtcct

SEQ ID NO: 144550 - DNA, 20 bp, Artificial Sequence
  Description of Artificial Sequence: Synthetic oligonucleotide
  Target: LAMA2; (+) strand; PAM type: NRG; PAM sequence: AAG
aggtcctcagtgtcttctgc

SEQ ID NO: 144551 - DNA, 20 bp, Artificial Sequence
  Description of Artificial Sequence: Synthetic oligonucleotide
  Target: LAMA2; (+) strand; PAM type: NRG; PAM sequence: CAG
tacactttcaatttttatta

SEQ ID NO: 144552 - DNA, 20 bp, Artificial Sequence
  Description of Artificial Sequence: Synthetic oligonucleotide
  Target: LAMA2; (+) strand; PAM type: NRG; PAM sequence: CAG
ctttcaatttttattacaga

SEQ ID NO: 144553 - DNA, 20 bp, Artificial Sequence
  Description of Artificial Sequence: Synthetic oligonucleotide
  Target: LAMA2; (+) strand; PAM type: NRG; PAM sequence: TAG
ttaacttgaatattttaatt

SEQ ID NO: 144554 - DNA, 20 bp, Artificial Sequence
  Description of Artificial Sequence: Synthetic oligonucleotide
  Target: LAMA2; (+) strand; PAM type: NRG; PAM sequence: GAG
tgaatattttaatttagcat

SEQ ID NO: 144555 - DNA, 20 bp, Artificial Sequence
  Description of Artificial Sequence: Synthetic oligonucleotide
  Target: LAMA2; (+) strand; PAM type: NRG; PAM sequence: TGG
tttagcatgagtcattccca

SEQ ID NO: 144556 - DNA, 20 bp, Artificial Sequence
  Description of Artificial Sequence: Synthetic oligonucleotide
  Target: LAMA2; (+) strand; PAM type: NRG; PAM sequence: TAG
catgagtcattcccatggat

SEQ ID NO: 144557 - DNA, 20 bp, Artificial Sequence
  Description of Artificial Sequence: Synthetic oligonucleotide
  Target: LAMA2; (+) strand; PAM type: NRG; PAM sequence: TAG
ggattagcaactttgtatgc

SEQ ID NO: 144558 - DNA, 20 bp, Artificial Sequence
  Description of Artificial Sequence: Synthetic oligonucleotide
  Target: LAMA2; (+) strand; PAM type: NRG; PAM sequence: TAG
actttgtatgctagcatatc

SEQ ID NO: 144559 - DNA, 20 bp, Artificial Sequence
  Description of Artificial Sequence: Synthetic oligonucleotide
  Target: LAMA2; (+) strand; PAM type: NRG; PAM sequence: TGG
tatcttctgtgtgttttcaa

SEQ ID NO: 144560 - DNA, 20 bp, Artificial Sequence
  Description of Artificial Sequence: Synthetic oligonucleotide
  Target: LAMA2; (+) strand; PAM type: NRG; PAM sequence: AAG
atggtgtgtctgctactcca

SEQ ID NO: 144561 - DNA, 20 bp, Artificial Sequence
  Description of Artificial Sequence: Synthetic oligonucleotide
  Target: LAMA2; (+) strand; PAM type: NRG; PAM sequence: TAG
tcttcctgaattttacatat

SEQ ID NO: 144562 - DNA, 20 bp, Artificial Sequence
  Description of Artificial Sequence: Synthetic oligonucleotide
  Target: LAMA2; (+) strand; PAM type: NRG; PAM sequence: AAG
tcctgaattttacatattag

SEQ ID NO: 144563 - DNA, 20 bp, Artificial Sequence
  Description of Artificial Sequence: Synthetic oligonucleotide
  Target: LAMA2; (+) strand; PAM type: NRG; PAM sequence: TGG
tgaattttacatattagaag

SEQ ID NO: 144564 - DNA, 20 bp, Artificial Sequence
  Description of Artificial Sequence: Synthetic oligonucleotide
  Target: LAMA2; (+) strand; PAM type: NRG; PAM sequence: TAG
tttacatattagaagtggca

SEQ ID NO: 144565 - DNA, 20 bp, Artificial Sequence
  Description of Artificial Sequence: Synthetic oligonucleotide
  Target: LAMA2; (+) strand; PAM type: NRG; PAM sequence: AAG
gcctcatgacactttatatc

SEQ ID NO: 144566 - DNA, 20 bp, Artificial Sequence
  Description of Artificial Sequence: Synthetic oligonucleotide
  Target: LAMA2; (+) strand; PAM type: NRG; PAM sequence: CAG
tcatgacactttatatcaag

SEQ ID NO: 144567 - DNA, 20 bp, Artificial Sequence
  Description of Artificial Sequence: Synthetic oligonucleotide
  Target: LAMA2; (+) strand; PAM type: NRG; PAM sequence: AGG
catgacactttatatcaagc

SEQ ID NO: 144568 - DNA, 20 bp, Artificial Sequence
  Description of Artificial Sequence: Synthetic oligonucleotide
  Target: LAMA2; (+) strand; PAM type: NRG; PAM sequence: AAG
gacactttatatcaagcagg

SEQ ID NO: 144569 - DNA, 20 bp, Artificial Sequence
  Description of Artificial Sequence: Synthetic oligonucleotide
  Target: LAMA2; (+) strand; PAM type: NRG; PAM sequence: TGG
ttatatcaagcaggaagttc

SEQ ID NO: 144570 - DNA, 20 bp, Artificial Sequence
  Description of Artificial Sequence: Synthetic oligonucleotide
  Target: LAMA2; (+) strand; PAM type: NRG; PAM sequence: AAG
tatcaagcaggaagttctgg

SEQ ID NO: 144571 - DNA, 20 bp, Artificial Sequence
  Description of Artificial Sequence: Synthetic oligonucleotide
  Target: LAMA2; (+) strand; PAM type: NRG; PAM sequence: TGG
gctaacaaatacctcaaatc

SEQ ID NO: 144572 - DNA, 20 bp, Artificial Sequence
  Description of Artificial Sequence: Synthetic oligonucleotide
  Target: LAMA2; (+) strand; PAM type: NRG; PAM sequence: TAG
tacctcaaatctggaaattg

SEQ ID NO: 144573 - DNA, 20 bp, Artificial Sequence
  Description of Artificial Sequence: Synthetic oligonucleotide
  Target: LAMA2; (+) strand; PAM type: NRG; PAM sequence: AGG
acctcaaatctggaaattgt

SEQ ID NO: 144574 - DNA, 20 bp, Artificial Sequence
  Description of Artificial Sequence: Synthetic oligonucleotide
  Target: LAMA2; (+) strand; PAM type: NRG; PAM sequence: TAG
aatctggaaattgtaggctt

SEQ ID NO: 144575 - DNA, 20 bp, Artificial Sequence
  Description of Artificial Sequence: Synthetic oligonucleotide
  Target: LAMA2; (+) strand; PAM type: NRG; PAM sequence: AAG
ttgtaggctttagaaaaata

SEQ ID NO: 144576 - DNA, 20 bp, Artificial Sequence
  Description of Artificial Sequence: Synthetic oligonucleotide
  Target: LAMA2; (+) strand; PAM type: NRG; PAM sequence: TAG
gaaaaataaagtcatcttgt

SEQ ID NO: 144577 - DNA, 20 bp, Artificial Sequence
  Description of Artificial Sequence: Synthetic oligonucleotide
  Target: LAMA2; (+) strand; PAM type: NRG; PAM sequence: TAG
ttgttagtgaatctctatat

SEQ ID NO: 144578 - DNA, 20 bp, Artificial Sequence
  Description of Artificial Sequence: Synthetic oligonucleotide
  Target: LAMA2; (+) strand; PAM type: NRG; PAM sequence: CAG
actttctaataccttataaa

SEQ ID NO: 144579 - DNA, 20 bp, Artificial Sequence
  Description of Artificial Sequence: Synthetic oligonucleotide
  Target: LAMA2; (+) strand; PAM type: NRG; PAM sequence: AGG
ctttctaataccttataaac

SEQ ID NO: 144580 - DNA, 20 bp, Artificial Sequence
  Description of Artificial Sequence: Synthetic oligonucleotide
  Target: LAMA2; (+) strand; PAM type: NRG; PAM sequence: CAG
ataccttataaacaggtttt

SEQ ID NO: 144581 - DNA, 20 bp, Artificial Sequence
  Description of Artificial Sequence: Synthetic oligonucleotide
  Target: LAMA2; (+) strand; PAM type: NRG; PAM sequence: TAG
tcagaaattaattatattta

SEQ ID NO: 144582 - DNA, 20 bp, Artificial Sequence
  Description of Artificial Sequence: Synthetic oligonucleotide
  Target: LAMA2; (+) strand; PAM type: NRG; PAM sequence: GAG
ttaattatatttatagcctc

SEQ ID NO: 144583 - DNA, 20 bp, Artificial Sequence
  Description of Artificial Sequence: Synthetic oligonucleotide
  Target: LAMA2; (+) strand; PAM type: NRG; PAM sequence: TAG
tatttatagcctcgagaaac

SEQ ID NO: 144584 - DNA, 20 bp, Artificial Sequence
  Description of Artificial Sequence: Synthetic oligonucleotide
  Target: LAMA2; (+) strand; PAM type: NRG; PAM sequence: AGG
atttatagcctcgagaaact

SEQ ID NO: 144585 - DNA, 20 bp, Artificial Sequence
  Description of Artificial Sequence: Synthetic oligonucleotide
  Target: LAMA2; (+) strand; PAM type: NRG; PAM sequence: GGG
tttatagcctcgagaaacta

SEQ ID NO: 144586 - DNA, 20 bp, Artificial Sequence
  Description of Artificial Sequence: Synthetic oligonucleotide
  Target: LAMA2; (+) strand; PAM type: NRG; PAM sequence: AAG
gcctcgagaaactagggaaa

SEQ ID NO: 144587 - DNA, 20 bp, Artificial Sequence
  Description of Artificial Sequence: Synthetic oligonucleotide
  Target: LAMA2; (+) strand; PAM type: NRG; PAM sequence: TGG
cgagaaactagggaaaaagc

SEQ ID NO: 144588 - DNA, 20 bp, Artificial Sequence
  Description of Artificial Sequence: Synthetic oligonucleotide
  Target: LAMA2; (+) strand; PAM type: NRG; PAM sequence: AAG
agggaaaaagctggatctca

SEQ ID NO: 144589 - DNA, 20 bp, Artificial Sequence
  Description of Artificial Sequence: Synthetic oligonucleotide
  Target: LAMA2; (+) strand; PAM type: NRG; PAM sequence: AAG
atctcaaagacattattaca

SEQ ID NO: 144590 - DNA, 20 bp, Artificial Sequence
  Description of Artificial Sequence: Synthetic oligonucleotide
  Target: LAMA2; (+) strand; PAM type: NRG; PAM sequence: CAG
tcaaagacattattacaaag

SEQ ID NO: 144591 - DNA, 20 bp, Artificial Sequence
  Description of Artificial Sequence: Synthetic oligonucleotide
  Target: LAMA2; (+) strand; PAM type: NRG; PAM sequence: TAG
aagacattattacaaagcag

SEQ ID NO: 144592 - DNA, 20 bp, Artificial Sequence
  Description of Artificial Sequence: Synthetic oligonucleotide
  Target: LAMA2; (+) strand; PAM type: NRG; PAM sequence: GAG
aattcataattaaaattaac

SEQ ID NO: 144593 - DNA, 20 bp, Artificial Sequence
  Description of Artificial Sequence: Synthetic oligonucleotide
  Target: LAMA2; (+) strand; PAM type: NRG; PAM sequence: GAG
aattaacgagtcaattttct

SEQ ID NO: 144594 - DNA, 20 bp, Artificial Sequence
  Description of Artificial Sequence: Synthetic oligonucleotide
  Target: LAMA2; (+) strand; PAM type: NRG; PAM sequence: AGG
attaacgagtcaattttctg

SEQ ID NO: 144595 - DNA, 20 bp, Artificial Sequence
  Description of Artificial Sequence: Synthetic oligonucleotide
  Target: LAMA2; (+) strand; PAM type: NRG; PAM sequence: AAG
tctgaggcattgacctatta

SEQ ID NO: 144596 - DNA, 20 bp, Artificial Sequence
  Description of Artificial Sequence: Synthetic oligonucleotide
  Target: LAMA2; (+) strand; PAM type: NRG; PAM sequence: GAG
ttgacctattaaagatttat

SEQ ID NO: 144597 - DNA, 20 bp, Artificial Sequence
  Description of Artificial Sequence: Synthetic oligonucleotide
  Target: LAMA2; (+) strand; PAM type: NRG; PAM sequence: GAG
taaaatcccaaatcttccct

SEQ ID NO: 144598 - DNA, 20 bp, Artificial Sequence
  Description of Artificial Sequence: Synthetic oligonucleotide
  Target: LAMA2; (+) strand; PAM type: NRG; PAM sequence: AGG
aaaatcccaaatcttccctg

SEQ ID NO: 144599 - DNA, 20 bp, Artificial Sequence
  Description of Artificial Sequence: Synthetic oligonucleotide
  Target: LAMA2; (+) strand; PAM type: NRG; PAM sequence: TAG
ccaaatcttccctgaggtaa

SEQ ID NO: 144600 - DNA, 20 bp, Artificial Sequence
  Description of Artificial Sequence: Synthetic oligonucleotide
  Target: LAMA2; (+) strand; PAM type: NRG; PAM sequence: CAG
cttccctgaggtaatagctt

SEQ ID NO: 144601 - DNA, 20 bp, Artificial Sequence
  Description of Artificial Sequence: Synthetic oligonucleotide
  Target: LAMA2; (+) strand; PAM type: NRG; PAM sequence: GAG
ctgaggtaatagcttcagtt

SEQ ID NO: 144602 - DNA, 20 bp, Artificial Sequence
  Description of Artificial Sequence: Synthetic oligonucleotide
  Target: LAMA2; (+) strand; PAM type: NRG; PAM sequence: AAG
taatagcttcagttgagata

SEQ ID NO: 144603 - DNA, 20 bp, Artificial Sequence
  Description of Artificial Sequence: Synthetic oligonucleotide
  Target: LAMA2; (+) strand; PAM type: NRG; PAM sequence: AGG
aatagcttcagttgagataa

SEQ ID NO: 144604 - DNA, 20 bp, Artificial Sequence
  Description of Artificial Sequence: Synthetic oligonucleotide
  Target: LAMA2; (+) strand; PAM type: NRG; PAM sequence: GGG
atagcttcagttgagataaa

SEQ ID NO: 144605 - DNA, 20 bp, Artificial Sequence
  Description of Artificial Sequence: Synthetic oligonucleotide
  Target: LAMA2; (+) strand; PAM type: NRG; PAM sequence: AAG
gcttcagttgagataaaggg

SEQ ID NO: 144606 - DNA, 20 bp, Artificial Sequence
  Description of Artificial Sequence: Synthetic oligonucleotide
  Target: LAMA2; (+) strand; PAM type: NRG; PAM sequence: AGG
cttcagttgagataaaggga

SEQ ID NO: 144607 - DNA, 20 bp, Artificial Sequence
  Description of Artificial Sequence: Synthetic oligonucleotide
  Target: LAMA2; (+) strand; PAM type: NRG; PAM sequence: CAG
tcttatttgtcgcttcactg

SEQ ID NO: 144608 - DNA, 20 bp, Artificial Sequence
  Description of Artificial Sequence: Synthetic oligonucleotide
  Target: LAMA2; (+) strand; PAM type: NRG; PAM sequence: AGG
cttatttgtcgcttcactgc

SEQ ID NO: 144609 - DNA, 20 bp, Artificial Sequence
  Description of Artificial Sequence: Synthetic oligonucleotide
  Target: LAMA2; (+) strand; PAM type: NRG; PAM sequence: CAG
tgatgcctattgcaaaatta

SEQ ID NO: 144610 - DNA, 20 bp, Artificial Sequence
  Description of Artificial Sequence: Synthetic oligonucleotide
  Target: LAMA2; (+) strand; PAM type: NRG; PAM sequence: AAG
ctcttaaaattatgtgaaaa

SEQ ID NO: 144611 - DNA, 20 bp, Artificial Sequence
  Description of Artificial Sequence: Synthetic oligonucleotide
  Target: LAMA2; (+) strand; PAM type: NRG; PAM sequence: TAG
aaaaagatcattaaatgttt

SEQ ID NO: 144612 - DNA, 20 bp, Artificial Sequence
  Description of Artificial Sequence: Synthetic oligonucleotide
  Target: LAMA2; (+) strand; PAM type: NRG; PAM sequence: AAG
agacatttcttaaaacttat

SEQ ID NO: 144613 - DNA, 20 bp, Artificial Sequence
  Description of Artificial Sequence: Synthetic oligonucleotide
  Target: LAMA2; (+) strand; PAM type: NRG; PAM sequence: AAG
aacttataagcaaaactttc

SEQ ID NO: 144614 - DNA, 20 bp, Artificial Sequence
  Description of Artificial Sequence: Synthetic oligonucleotide
  Target: LAMA2; (+) strand; PAM type: NRG; PAM sequence: TGG
agttttttaaactgatttac

SEQ ID NO: 144615 - DNA, 20 bp, Artificial Sequence
  Description of Artificial Sequence: Synthetic oligonucleotide
  Target: LAMA2; (+) strand; PAM type: NRG; PAM sequence: TAG
tgatttactggttgtatatg

SEQ ID NO: 144616 - DNA, 20 bp, Artificial Sequence
  Description of Artificial Sequence: Synthetic oligonucleotide
  Target: LAMA2; (+) strand; PAM type: NRG; PAM sequence: AAG
taattgactatgaaaacttg

SEQ ID NO: 144617 - DNA, 20 bp, Artificial Sequence
  Description of Artificial Sequence: Synthetic oligonucleotide
  Target: LAMA2; (+) strand; PAM type: NRG; PAM sequence: TAG
acttgaagcttaactctttg

SEQ ID NO: 144618 - DNA, 20 bp, Artificial Sequence
  Description of Artificial Sequence: Synthetic oligonucleotide
  Target: LAMA2; (+) strand; PAM type: NRG; PAM sequence: CAG
attgctttataaattattac

SEQ ID NO: 144619 - DNA, 20 bp, Artificial Sequence
  Description of Artificial Sequence: Synthetic oligonucleotide
  Target: LAMA2; (+) strand; PAM type: NRG; PAM sequence: AAG
aaattattaccagaatattg

SEQ ID NO: 144620 - DNA, 20 bp, Artificial Sequence
  Description of Artificial Sequence: Synthetic oligonucleotide
  Target: LAMA2; (+) strand; PAM type: NRG; PAM sequence: AGG
aattattaccagaatattga

SEQ ID NO: 144621 - DNA, 20 bp, Artificial Sequence
  Description of Artificial Sequence: Synthetic oligonucleotide
  Target: LAMA2; (+) strand; PAM type: NRG; PAM sequence: TAG
tttatgcaatcaatatttat

SEQ ID NO: 144622 - DNA, 20 bp, Artificial Sequence
  Description of Artificial Sequence: Synthetic oligonucleotide
  Target: LAMA2; (+) strand; PAM type: NRG; PAM sequence: AGG
ttatgcaatcaatatttatt

SEQ ID NO: 144623 - DNA, 20 bp, Artificial Sequence
  Description of Artificial Sequence: Synthetic oligonucleotide
  Target: LAMA2; (+) strand; PAM type: NRG; PAM sequence: TAG
tgcaatcaatatttattagg

SEQ ID NO: 144624 - DNA, 20 bp, Artificial Sequence
  Description of Artificial Sequence: Synthetic oligonucleotide
  Target: LAMA2; (+) strand; PAM type: NRG; PAM sequence: GAG
atatttattaggtagttttt

SEQ ID NO: 144625 - DNA, 20 bp, Artificial Sequence
  Description of Artificial Sequence: Synthetic oligonucleotide
  Target: LAMA2; (+) strand; PAM type: NRG; PAM sequence: GAG
tttttgagaaaatcttatat

SEQ ID NO: 144626 - DNA, 20 bp, Artificial Sequence
  Description of Artificial Sequence: Synthetic oligonucleotide
  Target: LAMA2; (+) strand; PAM type: NRG; PAM sequence: TGG
cttgtataccaaatgtttca

SEQ ID NO: 144627 - DNA, 20 bp, Artificial Sequence
  Description of Artificial Sequence: Synthetic oligonucleotide
  Target: LAMA2; (+) strand; PAM type: NRG; PAM sequence: CAG
aatgtttcatggaacaccac

SEQ ID NO: 144628 - DNA, 20 bp, Artificial Sequence
  Description of Artificial Sequence: Synthetic oligonucleotide
  Target: LAMA2; (+) strand; PAM type: NRG; PAM sequence: TAG
ttcatggaacaccaccagca

SEQ ID NO: 144629 - DNA, 20 bp, Artificial Sequence
  Description of Artificial Sequence: Synthetic oligonucleotide
  Target: LAMA2; (+) strand; PAM type: NRG; PAM sequence: TGG
ttttgtttactctgtgcaac

SEQ ID NO: 144630 - DNA, 20 bp, Artificial Sequence
  Description of Artificial Sequence: Synthetic oligonucleotide
  Target: LAMA2; (+) strand; PAM type: NRG; PAM sequence: TGG
tgtgcaactggatttcgttc

SEQ ID NO: 144631 - DNA, 20 bp, Artificial Sequence
  Description of Artificial Sequence: Synthetic oligonucleotide
  Target: LAMA2; (+) strand; PAM type: NRG; PAM sequence: GGG
gtgcaactggatttcgttct

SEQ ID NO: 144632 - DNA, 20 bp, Artificial Sequence
  Description of Artificial Sequence: Synthetic oligonucleotide
  Target: LAMA2; (+) strand; PAM type: NRG; PAM sequence: GGG
tgcaactggatttcgttctg

SEQ ID NO: 144633 - DNA, 20 bp, Artificial Sequence
  Description of Artificial Sequence: Synthetic oligonucleotide
  Target: LAMA2; (+) strand; PAM type: NRG; PAM sequence: GAG
caactggatttcgttctggg

SEQ ID NO: 144634 - DNA, 20 bp, Artificial Sequence
  Description of Artificial Sequence: Synthetic oligonucleotide
  Target: LAMA2; (+) strand; PAM type: NRG; PAM sequence: GAG
gggagcttcaatttgtacat

SEQ ID NO: 144635 - DNA, 20 bp, Artificial Sequence
  Description of Artificial Sequence: Synthetic oligonucleotide
  Target: LAMA2; (+) strand; PAM type: NRG; PAM sequence: TAG
caaaccatcttaccgatact

SEQ ID NO: 144636 - DNA, 20 bp, Artificial Sequence
  Description of Artificial Sequence: Synthetic oligonucleotide
  Target: LAMA2; (+) strand; PAM type: NRG; PAM sequence: GAG
aaccatcttaccgatactta

SEQ ID NO: 144637 - DNA, 20 bp, Artificial Sequence
  Description of Artificial Sequence: Synthetic oligonucleotide
  Target: LAMA2; (+) strand; PAM type: NRG; PAM sequence: AAG
ttaccgatacttagagtcca

SEQ ID NO: 144638 - DNA, 20 bp, Artificial Sequence
  Description of Artificial Sequence: Synthetic oligonucleotide
  Target: LAMA2; (+) strand; PAM type: NRG; PAM sequence: CAG
ttagagtccaaagtgaaatt

SEQ ID NO: 144639 - DNA, 20 bp, Artificial Sequence
  Description of Artificial Sequence: Synthetic oligonucleotide
  Target: LAMA2; (+) strand; PAM type: NRG; PAM sequence: AGG
tagagtccaaagtgaaattc

SEQ ID NO: 144640 - DNA, 20 bp, Artificial Sequence
  Description of Artificial Sequence: Synthetic oligonucleotide
  Target: LAMA2; (+) strand; PAM type: NRG; PAM sequence: TGG
aaagtgaaattcaggaacta

SEQ ID NO: 144641 - DNA, 20 bp, Artificial Sequence
  Description of Artificial Sequence: Synthetic oligonucleotide
  Target: LAMA2; (+) strand; PAM type: NRG; PAM sequence: CAG
gaaattcaggaactatggcc

SEQ ID NO: 144642 - DNA, 20 bp, Artificial Sequence
  Description of Artificial Sequence: Synthetic oligonucleotide
  Target: LAMA2; (+) strand; PAM type: NRG; PAM sequence: AAG
ttcaggaactatggcccagc

SEQ ID NO: 144643 - DNA, 20 bp, Artificial Sequence
  Description of Artificial Sequence: Synthetic oligonucleotide
  Target: LAMA2; (+) strand; PAM type: NRG; PAM sequence: TGG
tattctttgcttcatgactt

SEQ ID NO: 144644 - DNA, 20 bp, Artificial Sequence
  Description of Artificial Sequence: Synthetic oligonucleotide
  Target: LAMA2; (+) strand; PAM type: NRG; PAM sequence: TGG
ttcatgactttggaaatcta

SEQ ID NO: 144645 - DNA, 20 bp, Artificial Sequence
  Description of Artificial Sequence: Synthetic oligonucleotide
  Target: LAMA2; (+) strand; PAM type: NRG; PAM sequence: GGG
tcatgactttggaaatctat

SEQ ID NO: 144646 - DNA, 20 bp, Artificial Sequence
  Description of Artificial Sequence: Synthetic oligonucleotide
  Target: LAMA2; (+) strand; PAM type: NRG; PAM sequence: GAG
atgactttggaaatctatgg

SEQ ID NO: 144647 - DNA, 20 bp, Artificial Sequence
  Description of Artificial Sequence: Synthetic oligonucleotide
  Target: LAMA2; (+) strand; PAM type: NRG; PAM sequence: TAG
tatgggagaccctgtatcac

SEQ ID NO: 144648 - DNA, 20 bp, Artificial Sequence
  Description of Artificial Sequence: Synthetic oligonucleotide
  Target: LAMA2; (+) strand; PAM type: NRG; PAM sequence: CAG
ggagaccctgtatcactaga

SEQ ID NO: 144649 - DNA, 20 bp, Artificial Sequence
  Description of Artificial Sequence: Synthetic oligonucleotide
  Target: LAMA2; (+) strand; PAM type: NRG; PAM sequence: AAG
tcactagacagaatactgaa

SEQ ID NO: 144650 - DNA, 20 bp, Artificial Sequence
  Description of Artificial Sequence: Synthetic oligonucleotide
  Target: LAMA2; (+) strand; PAM type: NRG; PAM sequence: CAG
ctagacagaatactgaaaag

SEQ ID NO: 144651 - DNA, 20 bp, Artificial Sequence
  Description of Artificial Sequence: Synthetic oligonucleotide
  Target: LAMA2; (+) strand; PAM type: NRG; PAM sequence: AGG
tagacagaatactgaaaagc

SEQ ID NO: 144652 - DNA, 20 bp, Artificial Sequence
  Description of Artificial Sequence: Synthetic oligonucleotide
  Target: LAMA2; (+) strand; PAM type: NRG; PAM sequence: AAG
gaaaagcaggattacatatg

SEQ ID NO: 144653 - DNA, 20 bp, Artificial Sequence
  Description of Artificial Sequence: Synthetic oligonucleotide
  Target: LAMA2; (+) strand; PAM type: NRG; PAM sequence: AAG
taccatctgatttttttcct

SEQ ID NO: 144654 - DNA, 20 bp, Artificial Sequence
  Description of Artificial Sequence: Synthetic oligonucleotide
  Target: LAMA2; (+) strand; PAM type: NRG; PAM sequence: AGG
accatctgatttttttccta

SEQ ID NO: 144655 - DNA, 20 bp, Artificial Sequence
  Description of Artificial Sequence: Synthetic oligonucleotide
  Target: LAMA2; (+) strand; PAM type: NRG; PAM sequence: GGG
ccatctgatttttttcctaa

SEQ ID NO: 144656 - DNA, 20 bp, Artificial Sequence
  Description of Artificial Sequence: Synthetic oligonucleotide
  Target: LAMA2; (+) strand; PAM type: NRG; PAM sequence: TGG
ttattccttgtctttttgtg

SEQ ID NO: 144657 - DNA, 20 bp, Artificial Sequence
  Description of Artificial Sequence: Synthetic oligonucleotide
  Target: LAMA2; (+) strand; PAM type: NRG; PAM sequence: CAG
cttgtctttttgtgtggatt

SEQ ID NO: 144658 - DNA, 20 bp, Artificial Sequence
  Description of Artificial Sequence: Synthetic oligonucleotide
  Target: LAMA2; (+) strand; PAM type: NRG; PAM sequence: CAG
tgtgtggattcagcaatctc

SEQ ID NO: 144659 - DNA, 20 bp, Artificial Sequence
  Description of Artificial Sequence: Synthetic oligonucleotide
  Target: LAMA2; (+) strand; PAM type: NRG; PAM sequence: AGG
gtgtggattcagcaatctcc

SEQ ID NO: 144660 - DNA, 20 bp, Artificial Sequence
  Description of Artificial Sequence: Synthetic oligonucleotide
  Target: LAMA2; (+) strand; PAM type: NRG; PAM sequence: CAG
caatctccaggtttactgaa

SEQ ID NO: 144661 - DNA, 20 bp, Artificial Sequence
  Description of Artificial Sequence: Synthetic oligonucleotide
  Target: LAMA2; (+) strand; PAM type: NRG; PAM sequence: AGG
aatctccaggtttactgaac

SEQ ID NO: 144662 - DNA, 20 bp, Artificial Sequence
  Description of Artificial Sequence: Synthetic oligonucleotide
  Target: LAMA2; (+) strand; PAM type: NRG; PAM sequence: GGG
atctccaggtttactgaaca

SEQ ID NO: 144663 - DNA, 20 bp, Artificial Sequence
  Description of Artificial Sequence: Synthetic oligonucleotide
  Target: LAMA2; (+) strand; PAM type: NRG; PAM sequence: GGG
tctccaggtttactgaacag

SEQ ID NO: 144664 - DNA, 20 bp, Artificial Sequence
  Description of Artificial Sequence: Synthetic oligonucleotide
  Target: LAMA2; (+) strand; PAM type: NRG; PAM sequence: AAG
tttactgaacaggggttgtg

SEQ ID NO: 144665 - DNA, 20 bp, Artificial Sequence
  Description of Artificial Sequence: Synthetic oligonucleotide
  Target: LAMA2; (+) strand; PAM type: NRG; PAM sequence: AGG
ttactgaacaggggttgtga

SEQ ID NO: 144666 - DNA, 20 bp, Artificial Sequence
  Description of Artificial Sequence: Synthetic oligonucleotide
  Target: LAMA2; (+) strand; PAM type: NRG; PAM sequence: GGG
tactgaacaggggttgtgaa

SEQ ID NO: 144667 - DNA, 20 bp, Artificial Sequence
  Description of Artificial Sequence: Synthetic oligonucleotide
  Target: LAMA2; (+) strand; PAM type: NRG; PAM sequence: CAG
tgaacaggggttgtgaaggg

SEQ ID NO: 144668 - DNA, 20 bp, Artificial Sequence
  Description of Artificial Sequence: Synthetic oligonucleotide
  Target: LAMA2; (+) strand; PAM type: NRG; PAM sequence: GAG
aagggcagttgttcacaact

SEQ ID NO: 144669 - DNA, 20 bp, Artificial Sequence
  Description of Artificial Sequence: Synthetic oligonucleotide
  Target: LAMA2; (+) strand; PAM type: NRG; PAM sequence: CGG
cccactgtgttgatatactc

SEQ ID NO: 144670 - DNA, 20 bp, Artificial Sequence
  Description of Artificial Sequence: Synthetic oligonucleotide
  Target: LAMA2; (+) strand; PAM type: NRG; PAM sequence: TAG
tatactccggttcccccaca

SEQ ID NO: 144671 - DNA, 20 bp, Artificial Sequence
  Description of Artificial Sequence: Synthetic oligonucleotide
  Target: LAMA2; (+) strand; PAM type: NRG; PAM sequence: TAG
ctaactcccaacctcatgca

SEQ ID NO: 144672 - DNA, 20 bp, Artificial Sequence
  Description of Artificial Sequence: Synthetic oligonucleotide
  Target: LAMA2; (+) strand; PAM type: NRG; PAM sequence: TGG
gcatagctccaccacactat

SEQ ID NO: 144673 - DNA, 20 bp, Artificial Sequence
  Description of Artificial Sequence: Synthetic oligonucleotide
  Target: LAMA2; (+) strand; PAM type: NRG; PAM sequence: GGG
catagctccaccacactatt

SEQ ID NO: 144674 - DNA, 20 bp, Artificial Sequence
  Description of Artificial Sequence: Synthetic oligonucleotide
  Target: LAMA2; (+) strand; PAM type: NRG; PAM sequence: TAG
cacactattgggcttgaatc

SEQ ID NO: 144675 - DNA, 20 bp, Artificial Sequence
  Description of Artificial Sequence: Synthetic oligonucleotide
  Target: LAMA2; (+) strand; PAM type: NRG; PAM sequence: AGG
acactattgggcttgaatct

SEQ ID NO: 144676 - DNA, 20 bp, Artificial Sequence
  Description of Artificial Sequence: Synthetic oligonucleotide
  Target: LAMA2; (+) strand; PAM type: NRG; PAM sequence: TAG
atctaggctctgccactttc

SEQ ID NO: 144677 - DNA, 20 bp, Artificial Sequence
  Description of Artificial Sequence: Synthetic oligonucleotide
  Target: LAMA2; (+) strand; PAM type: NRG; PAM sequence: TGG
aggctctgccactttctagc

SEQ ID NO: 144678 - DNA, 20 bp, Artificial Sequence
  Description of Artificial Sequence: Synthetic oligonucleotide
  Target: LAMA2; (+) strand; PAM type: NRG; PAM sequence: GAG
ccactttctagctggttcct

SEQ ID NO: 144679 - DNA, 20 bp, Artificial Sequence
  Description of Artificial Sequence: Synthetic oligonucleotide
  Target: LAMA2; (+) strand; PAM type: NRG; PAM sequence: AAG
tttctagctggttcctgagc

SEQ ID NO: 144680 - DNA, 20 bp, Artificial Sequence
  Description of Artificial Sequence: Synthetic oligonucleotide
  Target: LAMA2; (+) strand; PAM type: NRG; PAM sequence: GAG
gcaagttctttaacctctct

SEQ ID NO: 144681 - DNA, 20 bp, Artificial Sequence
  Description of Artificial Sequence: Synthetic oligonucleotide
  Target: LAMA2; (+) strand; PAM type: NRG; PAM sequence: AAG
cctgtttcctcatccacaaa

SEQ ID NO: 144682 - DNA, 20 bp, Artificial Sequence
  Description of Artificial Sequence: Synthetic oligonucleotide
  Target: LAMA2; (+) strand; PAM type: NRG; PAM sequence: AGG
ctgtttcctcatccacaaaa

SEQ ID NO: 144683 - DNA, 20 bp, Artificial Sequence
  Description of Artificial Sequence: Synthetic oligonucleotide
  Target: LAMA2; (+) strand; PAM type: NRG; PAM sequence: AAG
cctcatccacaaaaaggatg

SEQ ID NO: 144684 - DNA, 20 bp, Artificial Sequence
  Description of Artificial Sequence: Synthetic oligonucleotide
  Target: LAMA2; (+) strand; PAM type: NRG; PAM sequence: AAG
caaaaaggatgaagaacaaa

SEQ ID NO: 144685 - DNA, 20 bp, Artificial Sequence
  Description of Artificial Sequence: Synthetic oligonucleotide
  Target: LAMA2; (+) strand; PAM type: NRG; PAM sequence: AGG
aaaaaggatgaagaacaaaa

SEQ ID NO: 144686 - DNA, 20 bp, Artificial Sequence
  Description of Artificial Sequence: Synthetic oligonucleotide
  Target: LAMA2; (+) strand; PAM type: NRG; PAM sequence: GAG
ggatgaagaacaaaaaggac

SEQ ID NO: 144687 - DNA, 20 bp, Artificial Sequence
  Description of Artificial Sequence: Synthetic oligonucleotide
  Target: LAMA2; (+) strand; PAM type: NRG; PAM sequence: AGG
gatgaagaacaaaaaggacg

SEQ ID NO: 144688 - DNA, 20 bp, Artificial Sequence
  Description of Artificial Sequence: Synthetic oligonucleotide
  Target: LAMA2; (+) strand; PAM type: NRG; PAM sequence: AAG
cttaacactgataattaaat

SEQ ID NO: 144689 - DNA, 20 bp, Artificial Sequence
  Description of Artificial Sequence: Synthetic oligonucleotide
  Target: LAMA2; (+) strand; PAM type: NRG; PAM sequence: AAG
cactgataattaaataagat

SEQ ID NO: 144690 - DNA, 20 bp, Artificial Sequence
  Description of Artificial Sequence: Synthetic oligonucleotide
  Target: LAMA2; (+) strand; PAM type: NRG; PAM sequence: CAG
ataagcttaaattataaaat

SEQ ID NO: 144691 - DNA, 20 bp, Artificial Sequence
  Description of Artificial Sequence: Synthetic oligonucleotide
  Target: LAMA2; (+) strand; PAM type: NRG; PAM sequence: CAG
cttaaattataaaatcagca

SEQ ID NO: 144692 - DNA, 20 bp, Artificial Sequence
  Description of Artificial Sequence: Synthetic oligonucleotide
  Target: LAMA2; (+) strand; PAM type: NRG; PAM sequence: GAG
taaattataaaatcagcaca

SEQ ID NO: 144693 - DNA, 20 bp, Artificial Sequence
  Description of Artificial Sequence: Synthetic oligonucleotide
  Target: LAMA2; (+) strand; PAM type: NRG; PAM sequence: AGG
aaattataaaatcagcacag

SEQ ID NO: 144694 - DNA, 20 bp, Artificial Sequence
  Description of Artificial Sequence: Synthetic oligonucleotide
  Target: LAMA2; (+) strand; PAM type: NRG; PAM sequence: GGG
aattataaaatcagcacaga

SEQ ID NO: 144695 - DNA, 20 bp, Artificial Sequence
  Description of Artificial Sequence: Synthetic oligonucleotide
  Target: LAMA2; (+) strand; PAM type: NRG; PAM sequence: TGG
agcacagagggaatgtaaat

SEQ ID NO: 144696 - DNA, 20 bp, Artificial Sequence
  Description of Artificial Sequence: Synthetic oligonucleotide
  Target: LAMA2; (+) strand; PAM type: NRG; PAM sequence: TGG
gtaaattggttcaaccatta

SEQ ID NO: 144697 - DNA, 20 bp, Artificial Sequence
  Description of Artificial Sequence: Synthetic oligonucleotide
  Target: LAMA2; (+) strand; PAM type: NRG; PAM sequence: AAG
aattggttcaaccattatgg

SEQ ID NO: 144698 - DNA, 20 bp, Artificial Sequence
  Description of Artificial Sequence: Synthetic oligonucleotide
  Target: LAMA2; (+) strand; PAM type: NRG; PAM sequence: AGG
attggttcaaccattatgga

SEQ ID NO: 144699 - DNA, 20 bp, Artificial Sequence
  Description of Artificial Sequence: Synthetic oligonucleotide
  Target: LAMA2; (+) strand; PAM type: NRG; PAM sequence: AAG
caaccattatggaaggaaaa

SEQ ID NO: 144700 - DNA, 20 bp, Artificial Sequence
  Description of Artificial Sequence: Synthetic oligonucleotide
  Target: LAMA2; (+) strand; PAM type: NRG; PAM sequence: TAG
ccattatggaaggaaaaaag

SEQ ID NO: 144701 - DNA, 20 bp, Artificial Sequence
  Description of Artificial Sequence: Synthetic oligonucleotide
  Target: LAMA2; (+) strand; PAM type: NRG; PAM sequence: AGG
cattatggaaggaaaaaagt

SEQ ID NO: 144702 - DNA, 20 bp, Artificial Sequence
  Description of Artificial Sequence: Synthetic oligonucleotide
  Target: LAMA2; (+) strand; PAM type: NRG; PAM sequence: AAG
tatggaaggaaaaaagtagg

SEQ ID NO: 144703 - DNA, 20 bp, Artificial Sequence
  Description of Artificial Sequence: Synthetic oligonucleotide
  Target: LAMA2; (+) strand; PAM type: NRG; PAM sequence: AGG
atggaaggaaaaaagtagga

SEQ ID NO: 144704 - DNA, 20 bp, Artificial Sequence
  Description of Artificial Sequence: Synthetic oligonucleotide
  Target: LAMA2; (+) strand; PAM type: NRG; PAM sequence: TGG
gttcctcaaaaaattcaaaa

SEQ ID NO: 144705 - DNA, 20 bp, Artificial Sequence
  Description of Artificial Sequence: Synthetic oligonucleotide
  Target: LAMA2; (+) strand; PAM type: NRG; PAM sequence: GGG
ttcctcaaaaaattcaaaat

SEQ ID NO: 144706 - DNA, 20 bp, Artificial Sequence
  Description of Artificial Sequence: Synthetic oligonucleotide
  Target: LAMA2; (+) strand; PAM type: NRG; PAM sequence: GAG
aaaattcaaaatgggactgc

SEQ ID NO: 144707 - DNA, 20 bp, Artificial Sequence
  Description of Artificial Sequence: Synthetic oligonucleotide
  Target: LAMA2; (+) strand; PAM type: NRG; PAM sequence: AGG
aaattcaaaatgggactgcg

SEQ ID NO: 144708 - DNA, 20 bp, Artificial Sequence
  Description of Artificial Sequence: Synthetic oligonucleotide
  Target: LAMA2; (+) strand; PAM type: NRG; PAM sequence: CGG
tcaaaatgggactgcgaggc

SEQ ID NO: 144709 - DNA, 20 bp, Artificial Sequence
  Description of Artificial Sequence: Synthetic oligonucleotide
  Target: LAMA2; (+) strand; PAM type: NRG; PAM sequence: GGG
caaaatgggactgcgaggcc

SEQ ID NO: 144710 - DNA, 20 bp, Artificial Sequence
  Description of Artificial Sequence: Synthetic oligonucleotide
  Target: LAMA2; (+) strand; PAM type: NRG; PAM sequence: TGG
tgggactgcgaggccgggtg

SEQ ID NO: 144711 - DNA, 20 bp, Artificial Sequence
  Description of Artificial Sequence: Synthetic oligonucleotide
  Target: LAMA2; (+) strand; PAM type: NRG; PAM sequence: TGG
gactgcgaggccgggtgtgg

SEQ ID NO: 144712 - DNA, 20 bp, Artificial Sequence
  Description of Artificial Sequence: Synthetic oligonucleotide
  Target: LAMA2; (+) strand; PAM type: NRG; PAM sequence: AAG
gaggccgggtgtggtggctc

SEQ ID NO: 144713 - DNA, 20 bp, Artificial Sequence
  Description of Artificial Sequence: Synthetic oligonucleotide
  Target: LAMA2; (+) strand; PAM type: NRG; PAM sequence: CAG
gtggctcaagcctgtaatct

SEQ ID NO: 144714 - DNA, 20 bp, Artificial Sequence
  Description of Artificial Sequence: Synthetic oligonucleotide
  Target: LAMA2; (+) strand; PAM type: NRG; PAM sequence: TGG
agcctgtaatctcagcactt

SEQ ID NO: 144715 - DNA, 20 bp, Artificial Sequence
  Description of Artificial Sequence: Synthetic oligonucleotide
  Target: LAMA2; (+) strand; PAM type: NRG; PAM sequence: GGG
gcctgtaatctcagcacttt

SEQ ID NO: 144716 - DNA, 20 bp, Artificial Sequence
  Description of Artificial Sequence: Synthetic oligonucleotide
  Target: LAMA2; (+) strand; PAM type: NRG; PAM sequence: GAG
ctgtaatctcagcactttgg

SEQ ID NO: 144717 - DNA, 20 bp, Artificial Sequence
  Description of Artificial Sequence: Synthetic oligonucleotide
  Target: LAMA2; (+) strand; PAM type: NRG; PAM sequence: AGG
tgtaatctcagcactttggg

SEQ ID NO: 144718 - DNA, 20 bp, Artificial Sequence
  Description of Artificial Sequence: Synthetic oligonucleotide
  Target: LAMA2; (+) strand; PAM type: NRG; PAM sequence: GAG
tctcagcactttgggaggct

SEQ ID NO: 144719 - DNA, 20 bp, Artificial Sequence
  Description of Artificial Sequence: Synthetic oligonucleotide
  Target: LAMA2; (+) strand; PAM type: NRG; PAM sequence: AGG
ctcagcactttgggaggctg

SEQ ID NO: 144720 - DNA, 20 bp, Artificial Sequence
  Description of Artificial Sequence: Synthetic oligonucleotide
  Target: LAMA2; (+) strand; PAM type: NRG; PAM sequence: CAG
agcactttgggaggctgagg

SEQ ID NO: 144721 - DNA, 20 bp, Artificial Sequence
  Description of Artificial Sequence: Synthetic oligonucleotide
  Target: LAMA2; (+) strand; PAM type: NRG; PAM sequence: AGG
gcactttgggaggctgaggc

SEQ ID NO: 144722 - DNA, 20 bp, Artificial Sequence
  Description of Artificial Sequence: Synthetic oligonucleotide
  Target: LAMA2; (+) strand; PAM type: NRG; PAM sequence: CAG
ctttgggaggctgaggcagg

SEQ ID NO: 144723 - DNA, 20 bp, Artificial Sequence
  Description of Artificial Sequence: Synthetic oligonucleotide
  Target: LAMA2; (+) strand; PAM type: NRG; PAM sequence: GAG
ttgggaggctgaggcaggca

SEQ ID NO: 144724 - DNA, 20 bp, Artificial Sequence
  Description of Artificial Sequence: Synthetic oligonucleotide
  Target: LAMA2; (+) strand; PAM type: NRG; PAM sequence: GAG
tgaggcaggcagagcatttt

SEQ ID NO: 144725 - DNA, 20 bp, Artificial Sequence
  Description of Artificial Sequence: Synthetic oligonucleotide
  Target: LAMA2; (+) strand; PAM type: NRG; PAM sequence: AGG
gaggcaggcagagcattttg

SEQ ID NO: 144726 - DNA, 20 bp, Artificial Sequence
  Description of Artificial Sequence: Synthetic oligonucleotide
  Target: LAMA2; (+) strand; PAM type: NRG; PAM sequence: CAG
caggcagagcattttgaggt

SEQ ID NO: 144727 - DNA, 20 bp, Artificial Sequence
  Description of Artificial Sequence: Synthetic oligonucleotide
  Target: LAMA2; (+) strand; PAM type: NRG; PAM sequence: AGG
aggcagagcattttgaggtc

SEQ ID NO: 144728 - DNA, 20 bp, Artificial Sequence
  Description of Artificial Sequence: Synthetic oligonucleotide
  Target: LAMA2; (+) strand; PAM type: NRG; PAM sequence: GAG
gcagagcattttgaggtcag

SEQ ID NO: 144729 - DNA, 20 bp, Artificial Sequence
  Description of Artificial Sequence: Synthetic oligonucleotide
  Target: LAMA2; (+) strand; PAM type: NRG; PAM sequence: GAG
cattttgaggtcaggagttc

SEQ ID NO: 144730 - DNA, 20 bp, Artificial Sequence
  Description of Artificial Sequence: Synthetic oligonucleotide
  Target: LAMA2; (+) strand; PAM type: NRG; PAM sequence: GAG
ttttgaggtcaggagttcga

SEQ ID NO: 144731 - DNA, 20 bp, Artificial Sequence
  Description of Artificial Sequence: Synthetic oligonucleotide
  Target: LAMA2; (+) strand; PAM type: NRG; PAM sequence: CAG
tgaggtcaggagttcgagag

SEQ ID NO: 144732 - DNA, 20 bp, Artificial Sequence
  Description of Artificial Sequence: Synthetic oligonucleotide
  Target: LAMA2; (+) strand; PAM type: NRG; PAM sequence: TGG
tcaggagttcgagagcagcc

SEQ ID NO: 144733 - DNA, 20 bp, Artificial Sequence
  Description of Artificial Sequence: Synthetic oligonucleotide
  Target: LAMA2; (+) strand; PAM type: NRG; PAM sequence: TGG
cgagagcagcctggccaaca

SEQ ID NO: 144734 - DNA, 20 bp, Artificial Sequence
  Description of Artificial Sequence: Synthetic oligonucleotide
  Target: LAMA2; (+) strand; PAM type: NRG; PAM sequence: TAG
actaaaaaacatccaaaaat

SEQ ID NO: 144735 - DNA, 20 bp, Artificial Sequence
  Description of Artificial Sequence: Synthetic oligonucleotide
  Target: LAMA2; (+) strand; PAM type: NRG; PAM sequence: CAG
aaaaacatccaaaaattagc

SEQ ID NO: 144736 - DNA, 20 bp, Artificial Sequence
  Description of Artificial Sequence: Synthetic oligonucleotide
  Target: LAMA2; (+) strand; PAM type: NRG; PAM sequence: AGG
aaaacatccaaaaattagcc

SEQ ID NO: 144737 - DNA, 20 bp, Artificial Sequence
  Description of Artificial Sequence: Synthetic oligonucleotide
  Target: LAMA2; (+) strand; PAM type: NRG; PAM sequence: TAG
atccaaaaattagccaggca

SEQ ID NO: 144738 - DNA, 20 bp, Artificial Sequence
  Description of Artificial Sequence: Synthetic oligonucleotide
  Target: LAMA2; (+) strand; PAM type: NRG; PAM sequence: TGG
caaaaattagccaggcatag

SEQ ID NO: 144739 - DNA, 20 bp, Artificial Sequence
  Description of Artificial Sequence: Synthetic oligonucleotide
  Target: LAMA2; (+) strand; PAM type: NRG; PAM sequence: CAG
gtggtgcacgtctgtaatcc

SEQ ID NO: 144740 - DNA, 20 bp, Artificial Sequence
  Description of Artificial Sequence: Synthetic oligonucleotide
  Target: LAMA2; (+) strand; PAM type: NRG; PAM sequence: TGG
cgtctgtaatcccagctact

SEQ ID NO: 144741 - DNA, 20 bp, Artificial Sequence
  Description of Artificial Sequence: Synthetic oligonucleotide
  Target: LAMA2; (+) strand; PAM type: NRG; PAM sequence: GGG
gtctgtaatcccagctactt

SEQ ID NO: 144742 - DNA, 20 bp, Artificial Sequence
  Description of Artificial Sequence: Synthetic oligonucleotide
  Target: LAMA2; (+) strand; PAM type: NRG; PAM sequence: GAG
ctgtaatcccagctacttgg

SEQ ID NO: 144743 - DNA, 20 bp, Artificial Sequence
  Description of Artificial Sequence: Synthetic oligonucleotide
  Target: LAMA2; (+) strand; PAM type: NRG; PAM sequence: AGG
tgtaatcccagctacttggg

SEQ ID NO: 144744 - DNA, 20 bp, Artificial Sequence
  Description of Artificial Sequence: Synthetic oligonucleotide
  Target: LAMA2; (+) strand; PAM type: NRG; PAM sequence: GAG
tcccagctacttgggaggct

SEQ ID NO: 144745 - DNA, 20 bp, Artificial Sequence
  Description of Artificial Sequence: Synthetic oligonucleotide
  Target: LAMA2; (+) strand; PAM type: NRG; PAM sequence: AGG
cccagctacttgggaggctg

SEQ ID NO: 144746 - DNA, 20 bp, Artificial Sequence
  Description of Artificial Sequence: Synthetic oligonucleotide
  Target: LAMA2; (+) strand; PAM type: NRG; PAM sequence: CAG
agctacttgggaggctgagg

SEQ ID NO: 144747 - DNA, 20 bp, Artificial Sequence
  Description of Artificial Sequence: Synthetic oligonucleotide
  Target: LAMA2; (+) strand; PAM type: NRG; PAM sequence: AAG
tacttgggaggctgaggcag

SEQ ID NO: 144748 - DNA, 20 bp, Artificial Sequence
  Description of Artificial Sequence: Synthetic oligonucleotide
  Target: LAMA2; (+) strand; PAM type: NRG; PAM sequence: CGG
ggcagaagaattgtgtgaac

SEQ ID NO: 144749 - DNA, 20 bp, Artificial Sequence
  Description of Artificial Sequence: Synthetic oligonucleotide
  Target: LAMA2; (+) strand; PAM type: NRG; PAM sequence: GGG
gcagaagaattgtgtgaacc

SEQ ID NO: 144750 - DNA, 20 bp, Artificial Sequence
  Description of Artificial Sequence: Synthetic oligonucleotide
  Target: LAMA2; (+) strand; PAM type: NRG; PAM sequence: CAG
gaagaattgtgtgaaccggg

SEQ ID NO: 144751 - DNA, 20 bp, Artificial Sequence
  Description of Artificial Sequence: Synthetic oligonucleotide
  Target: LAMA2; (+) strand; PAM type: NRG; PAM sequence: AGG
aagaattgtgtgaaccgggc

SEQ ID NO: 144752 - DNA, 20 bp, Artificial Sequence
  Description of Artificial Sequence: Synthetic oligonucleotide
  Target: LAMA2; (+) strand; PAM type: NRG; PAM sequence: CAG
aattgtgtgaaccgggcagg

SEQ ID NO: 144753 - DNA, 20 bp, Artificial Sequence
  Description of Artificial Sequence: Synthetic oligonucleotide
  Target: LAMA2; (+) strand; PAM type: NRG; PAM sequence: GAG
ttgtgtgaaccgggcaggca

SEQ ID NO: 144754 - DNA, 20 bp, Artificial Sequence
  Description of Artificial Sequence: Synthetic oligonucleotide
  Target: LAMA2; (+) strand; PAM type: NRG; PAM sequence: AGG
tgtgtgaaccgggcaggcag

SEQ ID NO: 144755 - DNA, 20 bp, Artificial Sequence
  Description of Artificial Sequence: Synthetic oligonucleotide
  Target: LAMA2; (+) strand; PAM type: NRG; PAM sequence: CAG
aaccgggcaggcagaggttg

SEQ ID NO: 144756 - DNA, 20 bp, Artificial Sequence
  Description of Artificial Sequence: Synthetic oligonucleotide
  Target: LAMA2; (+) strand; PAM type: NRG; PAM sequence: GAG
ggcagaggttgcagtgaact

SEQ ID NO: 144757 - DNA, 20 bp, Artificial Sequence
  Description of Artificial Sequence: Synthetic oligonucleotide
  Target: LAMA2; (+) strand; PAM type: NRG; PAM sequence: TGG
gaggttgcagtgaactgaga

SEQ ID NO: 144758 - DNA, 20 bp, Artificial Sequence
  Description of Artificial Sequence: Synthetic oligonucleotide
  Target: LAMA2; (+) strand; PAM type: NRG; PAM sequence: CAG
gagatggtgccactgcactt

SEQ ID NO: 144759 - DNA, 20 bp, Artificial Sequence
  Description of Artificial Sequence: Synthetic oligonucleotide
  Target: LAMA2; (+) strand; PAM type: NRG; PAM sequence: GAG
gtgccactgcacttcagcct

SEQ ID NO: 144760 - DNA, 20 bp, Artificial Sequence
  Description of Artificial Sequence: Synthetic oligonucleotide
  Target: LAMA2; (+) strand; PAM type: NRG; PAM sequence: TAG
ctgcacttcagcctgagcga

SEQ ID NO: 144761 - DNA, 20 bp, Artificial Sequence
  Description of Artificial Sequence: Synthetic oligonucleotide
  Target: LAMA2; (+) strand; PAM type: NRG; PAM sequence: GAG
gcacttcagcctgagcgata

SEQ ID NO: 144762 - DNA, 20 bp, Artificial Sequence
  Description of Artificial Sequence: Synthetic oligonucleotide
  Target: LAMA2; (+) strand; PAM type: NRG; PAM sequence: AAG
ttcagcctgagcgatagagt

SEQ ID NO: 144763 - DNA, 20 bp, Artificial Sequence
  Description of Artificial Sequence: Synthetic oligonucleotide
  Target: LAMA2; (+) strand; PAM type: NRG; PAM sequence: AAG
ctgtctcaaaaaaaaaaaaa

SEQ ID NO: 144764 - DNA, 20 bp, Artificial Sequence
  Description of Artificial Sequence: Synthetic oligonucleotide
  Target: LAMA2; (+) strand; PAM type: NRG; PAM sequence: AGG
tgtctcaaaaaaaaaaaaaa

SEQ ID NO: 144765 - DNA, 20 bp, Artificial Sequence
  Description of Artificial Sequence: Synthetic oligonucleotide
  Target: LAMA2; (+) strand; PAM type: NRG; PAM sequence: CAG
aaaggaactaccatatgatc

SEQ ID NO: 144766 - DNA, 20 bp, Artificial Sequence
  Description of Artificial Sequence: Synthetic oligonucleotide
  Target: LAMA2; (+) strand; PAM type: NRG; PAM sequence: GAG
acacatatatatatgtgtgt

SEQ ID NO: 144767 - DNA, 20 bp, Artificial Sequence
  Description of Artificial Sequence: Synthetic oligonucleotide
  Target: LAMA2; (+) strand; PAM type: NRG; PAM sequence: AAG
tatatatatatatatattca

SEQ ID NO: 144768 - DNA, 20 bp, Artificial Sequence
  Description of Artificial Sequence: Synthetic oligonucleotide
  Target: LAMA2; (+) strand; PAM type: NRG; PAM sequence: CAG
atattcaaagcaattgaaat

SEQ ID NO: 144769 - DNA, 20 bp, Artificial Sequence
  Description of Artificial Sequence: Synthetic oligonucleotide
  Target: LAMA2; (+) strand; PAM type: NRG; PAM sequence: AGG
tattcaaagcaattgaaatc

SEQ ID NO: 144770 - DNA, 20 bp, Artificial Sequence
  Description of Artificial Sequence: Synthetic oligonucleotide
  Target: LAMA2; (+) strand; PAM type: NRG; PAM sequence: AAG
caattgaaatcaggatctca

SEQ ID NO: 144771 - DNA, 20 bp, Artificial Sequence
  Description of Artificial Sequence: Synthetic oligonucleotide
  Target: LAMA2; (+) strand; PAM type: NRG; PAM sequence: GAG
attgaaatcaggatctcaaa

SEQ ID NO: 144772 - DNA, 20 bp, Artificial Sequence
  Description of Artificial Sequence: Synthetic oligonucleotide
  Target: LAMA2; (+) strand; PAM type: NRG; PAM sequence: TAG
ctgcatttccgtattcattt

SEQ ID NO: 144773 - DNA, 20 bp, Artificial Sequence
  Description of Artificial Sequence: Synthetic oligonucleotide
  Target: LAMA2; (+) strand; PAM type: NRG; PAM sequence: TAG
cattttagcattattcacaa

SEQ ID NO: 144774 - DNA, 20 bp, Artificial Sequence
  Description of Artificial Sequence: Synthetic oligonucleotide
  Target: LAMA2; (+) strand; PAM type: NRG; PAM sequence: AAG
tagcattattcacaatagtc

SEQ ID NO: 144775 - DNA, 20 bp, Artificial Sequence
  Description of Artificial Sequence: Synthetic oligonucleotide
  Target: LAMA2; (+) strand; PAM type: NRG; PAM sequence: TGG
tattcacaatagtcaagata

SEQ ID NO: 144776 - DNA, 20 bp, Artificial Sequence
  Description of Artificial Sequence: Synthetic oligonucleotide
  Target: LAMA2; (+) strand; PAM type: NRG; PAM sequence: AAG
tcacaatagtcaagatatgg

SEQ ID NO: 144777 - DNA, 20 bp, Artificial Sequence
  Description of Artificial Sequence: Synthetic oligonucleotide
  Target: LAMA2; (+) strand; PAM type: NRG; PAM sequence: CAG
gcaacctaaatatctgttga

SEQ ID NO: 144778 - DNA, 20 bp, Artificial Sequence
  Description of Artificial Sequence: Synthetic oligonucleotide
  Target: LAMA2; (+) strand; PAM type: NRG; PAM sequence: AAG
ctgttgacagatgaataaat

SEQ ID NO: 144779 - DNA, 20 bp, Artificial Sequence
  Description of Artificial Sequence: Synthetic oligonucleotide
  Target: LAMA2; (+) strand; PAM type: NRG; PAM sequence: AGG
tgttgacagatgaataaata

SEQ ID NO: 144780 - DNA, 20 bp, Artificial Sequence
  Description of Artificial Sequence: Synthetic oligonucleotide
  Target: LAMA2; (+) strand; PAM type: NRG; PAM sequence: TGG
atgaataaataaggaaaatg

SEQ ID NO: 144781 - DNA, 20 bp, Artificial Sequence
  Description of Artificial Sequence: Synthetic oligonucleotide
  Target: LAMA2; (+) strand; PAM type: NRG; PAM sequence: TAG
aatgtggtatatacatacaa

SEQ ID NO: 144782 - DNA, 20 bp, Artificial Sequence
  Description of Artificial Sequence: Synthetic oligonucleotide
  Target: LAMA2; (+) strand; PAM type: NRG; PAM sequence: AGG
atgtggtatatacatacaat

SEQ ID NO: 144783 - DNA, 20 bp, Artificial Sequence
  Description of Artificial Sequence: Synthetic oligonucleotide
  Target: LAMA2; (+) strand; PAM type: NRG; PAM sequence: TAG
acatacaataggatattact

SEQ ID NO: 144784 - DNA, 20 bp, Artificial Sequence
  Description of Artificial Sequence: Synthetic oligonucleotide
  Target: LAMA2; (+) strand; PAM type: NRG; PAM sequence: TAG
aataggatattacttagcct

SEQ ID NO: 144785 - DNA, 20 bp, Artificial Sequence
  Description of Artificial Sequence: Synthetic oligonucleotide
  Target: LAMA2; (+) strand; PAM type: NRG; PAM sequence: AAG
atattacttagccttagaaa

SEQ ID NO: 144786 - DNA, 20 bp, Artificial Sequence
  Description of Artificial Sequence: Synthetic oligonucleotide
  Target: LAMA2; (+) strand; PAM type: NRG; PAM sequence: AAG
ttacttagccttagaaaaag

SEQ ID NO: 144787 - DNA, 20 bp, Artificial Sequence
  Description of Artificial Sequence: Synthetic oligonucleotide
  Target: LAMA2; (+) strand; PAM type: NRG; PAM sequence: AGG
tacttagccttagaaaaaga

SEQ ID NO: 144788 - DNA, 20 bp, Artificial Sequence
  Description of Artificial Sequence: Synthetic oligonucleotide
  Target: LAMA2; (+) strand; PAM type: NRG; PAM sequence: CAG
agaaggaaatcctgccattt

SEQ ID NO: 144789 - DNA, 20 bp, Artificial Sequence
  Description of Artificial Sequence: Synthetic oligonucleotide
  Target: LAMA2; (+) strand; PAM type: NRG; PAM sequence: AGG
gaaggaaatcctgccatttc

SEQ ID NO: 144790 - DNA, 20 bp, Artificial Sequence
  Description of Artificial Sequence: Synthetic oligonucleotide
  Target: LAMA2; (+) strand; PAM type: NRG; PAM sequence: TGG
tcctgccatttcaggcaatg

SEQ ID NO: 144791 - DNA, 20 bp, Artificial Sequence
  Description of Artificial Sequence: Synthetic oligonucleotide
  Target: LAMA2; (+) strand; PAM type: NRG; PAM sequence: AAG
caggcaatgtggacaacatg

SEQ ID NO: 144792 - DNA, 20 bp, Artificial Sequence
  Description of Artificial Sequence: Synthetic oligonucleotide
  Target: LAMA2; (+) strand; PAM type: NRG; PAM sequence: AGG
aggcaatgtggacaacatga

SEQ ID NO: 144793 - DNA, 20 bp, Artificial Sequence
  Description of Artificial Sequence: Synthetic oligonucleotide
  Target: LAMA2; (+) strand; PAM type: NRG; PAM sequence: AAG
aacatgaaggacattatgtt

SEQ ID NO: 144794 - DNA, 20 bp, Artificial Sequence
  Description of Artificial Sequence: Synthetic oligonucleotide
  Target: LAMA2; (+) strand; PAM type: NRG; PAM sequence: AAG
gaaggacattatgttaagtg

SEQ ID NO: 144795 - DNA, 20 bp, Artificial Sequence
  Description of Artificial Sequence: Synthetic oligonucleotide
  Target: LAMA2; (+) strand; PAM type: NRG; PAM sequence: AAG
gacattatgttaagtgaagt

SEQ ID NO: 144796 - DNA, 20 bp, Artificial Sequence
  Description of Artificial Sequence: Synthetic oligonucleotide
  Target: LAMA2; (+) strand; PAM type: NRG; PAM sequence: CAG
ttatgttaagtgaagtaagc

SEQ ID NO: 144797 - DNA, 20 bp, Artificial Sequence
  Description of Artificial Sequence: Synthetic oligonucleotide
  Target: LAMA2; (+) strand; PAM type: NRG; PAM sequence: AGG
tatgttaagtgaagtaagcc

SEQ ID NO: 144798 - DNA, 20 bp, Artificial Sequence
  Description of Artificial Sequence: Synthetic oligonucleotide
  Target: LAMA2; (+) strand; PAM type: NRG; PAM sequence: GAG
tgttaagtgaagtaagccag

SEQ ID NO: 144799 - DNA, 20 bp, Artificial Sequence
  Description of Artificial Sequence: Synthetic oligonucleotide
  Target: LAMA2; (+) strand; PAM type: NRG; PAM sequence: TGG
taagtgaagtaagccaggag

SEQ ID NO: 144800 - DNA, 20 bp, Artificial Sequence
  Description of Artificial Sequence: Synthetic oligonucleotide
  Target: LAMA2; (+) strand; PAM type: NRG; PAM sequence: AAG
gtgaagtaagccaggagtgg

SEQ ID NO: 144801 - DNA, 20 bp, Artificial Sequence
  Description of Artificial Sequence: Synthetic oligonucleotide
  Target: LAMA2; (+) strand; PAM type: NRG; PAM sequence: AGG
tgaagtaagccaggagtgga

SEQ ID NO: 144802 - DNA, 20 bp, Artificial Sequence
  Description of Artificial Sequence: Synthetic oligonucleotide
  Target: LAMA2; (+) strand; PAM type: NRG; PAM sequence: AAG
ttacatgatatcatttatat

SEQ ID NO: 144803 - DNA, 20 bp, Artificial Sequence
  Description of Artificial Sequence: Synthetic oligonucleotide
  Target: LAMA2; (+) strand; PAM type: NRG; PAM sequence: AGG
tacatgatatcatttatata

SEQ ID NO: 144804 - DNA, 20 bp, Artificial Sequence
  Description of Artificial Sequence: Synthetic oligonucleotide
  Target: LAMA2; (+) strand; PAM type: NRG; PAM sequence: TAG
tttatataaggaaactaaaa

SEQ ID NO: 144805 - DNA, 20 bp, Artificial Sequence
  Description of Artificial Sequence: Synthetic oligonucleotide
  Target: LAMA2; (+) strand; PAM type: NRG; PAM sequence: CAG
aaactaaaatagtcaaaact

SEQ ID NO: 144806 - DNA, 20 bp, Artificial Sequence
  Description of Artificial Sequence: Synthetic oligonucleotide
  Target: LAMA2; (+) strand; PAM type: NRG; PAM sequence: GAG
tagtcaaaactcagaaacat

SEQ ID NO: 144807 - DNA, 20 bp, Artificial Sequence
  Description of Artificial Sequence: Synthetic oligonucleotide
  Target: LAMA2; (+) strand; PAM type: NRG; PAM sequence: GAG
gtcaaaactcagaaacatga

SEQ ID NO: 144808 - DNA, 20 bp, Artificial Sequence
  Description of Artificial Sequence: Synthetic oligonucleotide
  Target: LAMA2; (+) strand; PAM type: NRG; PAM sequence: TAG
aaaactcagaaacatgagag

SEQ ID NO: 144809 - DNA, 20 bp, Artificial Sequence
  Description of Artificial Sequence: Synthetic oligonucleotide
  Target: LAMA2; (+) strand; PAM type: NRG; PAM sequence: TGG
tcagaaacatgagagtagaa

SEQ ID NO: 144810 - DNA, 20 bp, Artificial Sequence
  Description of Artificial Sequence: Synthetic oligonucleotide
  Target: LAMA2; (+) strand; PAM type: NRG; PAM sequence: TAG
gaaacatgagagtagaatgg

SEQ ID NO: 144811 - DNA, 20 bp, Artificial Sequence
  Description of Artificial Sequence: Synthetic oligonucleotide
  Target: LAMA2; (+) strand; PAM type: NRG; PAM sequence: CAG
gagagtagaatggtagttac

SEQ ID NO: 144812 - DNA, 20 bp, Artificial Sequence
  Description of Artificial Sequence: Synthetic oligonucleotide
  Target: LAMA2; (+) strand; PAM type: NRG; PAM sequence: AGG
agagtagaatggtagttacc

SEQ ID NO: 144813 - DNA, 20 bp, Artificial Sequence
  Description of Artificial Sequence: Synthetic oligonucleotide
  Target: LAMA2; (+) strand; PAM type: NRG; PAM sequence: GGG
gagtagaatggtagttacca

SEQ ID NO: 144814 - DNA, 20 bp, Artificial Sequence
  Description of Artificial Sequence: Synthetic oligonucleotide
  Target: LAMA2; (+) strand; PAM type: NRG; PAM sequence: TGG
gaatggtagttaccagggtc

SEQ ID NO: 144815 - DNA, 20 bp, Artificial Sequence
  Description of Artificial Sequence: Synthetic oligonucleotide
  Target: LAMA2; (+) strand; PAM type: NRG; PAM sequence: GGG
aatggtagttaccagggtct

SEQ ID NO: 144816 - DNA, 20 bp, Artificial Sequence
  Description of Artificial Sequence: Synthetic oligonucleotide
  Target: LAMA2; (+) strand; PAM type: NRG; PAM sequence: TGG
gtagttaccagggtctgggt

SEQ ID NO: 144817 - DNA, 20 bp, Artificial Sequence
  Description of Artificial Sequence: Synthetic oligonucleotide
  Target: LAMA2; (+) strand; PAM type: NRG; PAM sequence: GAG
agttaccagggtctgggttg

SEQ ID NO: 144818 - DNA, 20 bp, Artificial Sequence
  Description of Artificial Sequence: Synthetic oligonucleotide
  Target: LAMA2; (+) strand; PAM type: NRG; PAM sequence: AGG
gttaccagggtctgggttgg

SEQ ID NO: 144819 - DNA, 20 bp, Artificial Sequence
  Description of Artificial Sequence: Synthetic oligonucleotide
  Target: LAMA2; (+) strand; PAM type: NRG; PAM sequence: GGG
ttaccagggtctgggttgga

SEQ ID NO: 144820 - DNA, 20 bp, Artificial Sequence
  Description of Artificial Sequence: Synthetic oligonucleotide
  Target: LAMA2; (+) strand; PAM type: NRG; PAM sequence: GGG
taccagggtctgggttggag

SEQ ID NO: 144821 - DNA, 20 bp, Artificial Sequence
  Description of Artificial Sequence: Synthetic oligonucleotide
  Target: LAMA2; (+) strand; PAM type: NRG; PAM sequence: GGG
accagggtctgggttggagg

SEQ ID NO: 144822 - DNA, 20 bp, Artificial Sequence
  Description of Artificial Sequence: Synthetic oligonucleotide
  Target: LAMA2; (+) strand; PAM type: NRG; PAM sequence: CAG
gtctgggttggagggggaaa

SEQ ID NO: 144823 - DNA, 20 bp, Artificial Sequence
  Description of Artificial Sequence: Synthetic oligonucleotide
  Target: LAMA2; (+) strand; PAM type: NRG; PAM sequence: AGG
tctgggttggagggggaaac

SEQ ID NO: 144824 - DNA, 20 bp, Artificial Sequence
  Description of Artificial Sequence: Synthetic oligonucleotide
  Target: LAMA2; (+) strand; PAM type: NRG; PAM sequence: AAG
ggttggagggggaaacagga

SEQ ID NO: 144825 - DNA, 20 bp, Artificial Sequence
  Description of Artificial Sequence: Synthetic oligonucleotide
  Target: LAMA2; (+) strand; PAM type: NRG; PAM sequence: TAG
agggggaaacaggaaagtat

SEQ ID NO: 144826 - DNA, 20 bp, Artificial Sequence
  Description of Artificial Sequence: Synthetic oligonucleotide
  Target: LAMA2; (+) strand; PAM type: NRG; PAM sequence: AAG
aaacaggaaagtattagtga

SEQ ID NO: 144827 - DNA, 20 bp, Artificial Sequence
  Description of Artificial Sequence: Synthetic oligonucleotide
  Target: LAMA2; (+) strand; PAM type: NRG; PAM sequence: AGG
aacaggaaagtattagtgaa

SEQ ID NO: 144828 - DNA, 20 bp, Artificial Sequence
  Description of Artificial Sequence: Synthetic oligonucleotide
  Target: LAMA2; (+) strand; PAM type: NRG; PAM sequence: AAG
agtattagtgaaaggataaa

SEQ ID NO: 144829 - DNA, 20 bp, Artificial Sequence
  Description of Artificial Sequence: Synthetic oligonucleotide
  Target: LAMA2; (+) strand; PAM type: NRG; PAM sequence: AAG
ataaaaagttttatttatac

SEQ ID NO: 144830 - DNA, 20 bp, Artificial Sequence
  Description of Artificial Sequence: Synthetic oligonucleotide
  Target: LAMA2; (+) strand; PAM type: NRG; PAM sequence: AAG
ttatttatacaagatgaatt

SEQ ID NO: 144831 - DNA, 20 bp, Artificial Sequence
  Description of Artificial Sequence: Synthetic oligonucleotide
  Target: LAMA2; (+) strand; PAM type: NRG; PAM sequence: GAG
acaagatgaattaagtcctc

SEQ ID NO: 144832 - DNA, 20 bp, Artificial Sequence
  Description of Artificial Sequence: Synthetic oligonucleotide
  Target: LAMA2; (+) strand; PAM type: NRG; PAM sequence: TAG
tcgagatctactgtaccgca

SEQ ID NO: 144833 - DNA, 20 bp, Artificial Sequence
  Description of Artificial Sequence: Synthetic oligonucleotide
  Target: LAMA2; (+) strand; PAM type: NRG; PAM sequence: TAG
ctactgtaccgcatagtgcc

SEQ ID NO: 144834 - DNA, 20 bp, Artificial Sequence
  Description of Artificial Sequence: Synthetic oligonucleotide
  Target: LAMA2; (+) strand; PAM type: NRG; PAM sequence: AAG
tgcttgaaattttcctaaca

SEQ ID NO: 144835 - DNA, 20 bp, Artificial Sequence
  Description of Artificial Sequence: Synthetic oligonucleotide
  Target: LAMA2; (+) strand; PAM type: NRG; PAM sequence: AAG
atcacaaaataataataata

SEQ ID NO: 144836 - DNA, 20 bp, Artificial Sequence
  Description of Artificial Sequence: Synthetic oligonucleotide
  Target: LAMA2; (+) strand; PAM type: NRG; PAM sequence: GAG
cacaaaataataataataaa

SEQ ID NO: 144837 - DNA, 20 bp, Artificial Sequence
  Description of Artificial Sequence: Synthetic oligonucleotide
  Target: LAMA2; (+) strand; PAM type: NRG; PAM sequence: GAG
caaaataataataataaaga

SEQ ID NO: 144838 - DNA, 20 bp, Artificial Sequence
  Description of Artificial Sequence: Synthetic oligonucleotide
  Target: LAMA2; (+) strand; PAM type: NRG; PAM sequence: GAG
ataataataataaagagagt

SEQ ID NO: 144839 - DNA, 20 bp, Artificial Sequence
  Description of Artificial Sequence: Synthetic oligonucleotide
  Target: LAMA2; (+) strand; PAM type: NRG; PAM sequence: GAG
aataataataaagagagtga

SEQ ID NO: 144840 - DNA, 20 bp, Artificial Sequence
  Description of Artificial Sequence: Synthetic oligonucleotide
  Target: LAMA2; (+) strand; PAM type: NRG; PAM sequence: TGG
agagagtgagagaaaacttt

SEQ ID NO: 144841 - DNA, 20 bp, Artificial Sequence
  Description of Artificial Sequence: Synthetic oligonucleotide
  Target: LAMA2; (+) strand; PAM type: NRG; PAM sequence: GAG
agagtgagagaaaacttttg

SEQ ID NO: 144842 - DNA, 20 bp, Artificial Sequence
  Description of Artificial Sequence: Synthetic oligonucleotide
  Target: LAMA2; (+) strand; PAM type: NRG; PAM sequence: AGG
gagtgagagaaaacttttgg

SEQ ID NO: 144843 - DNA, 20 bp, Artificial Sequence
  Description of Artificial Sequence: Synthetic oligonucleotide
  Target: LAMA2; (+) strand; PAM type: NRG; PAM sequence: TGG
ggaggttattgatatatatg

SEQ ID NO: 144844 - DNA, 20 bp, Artificial Sequence
  Description of Artificial Sequence: Synthetic oligonucleotide
  Target: LAMA2; (+) strand; PAM type: NRG; PAM sequence: CAG
ggttattgatatatatgtgg

SEQ ID NO: 144845 - DNA, 20 bp, Artificial Sequence
  Description of Artificial Sequence: Synthetic oligonucleotide
  Target: LAMA2; (+) strand; PAM type: NRG; PAM sequence: GAG
ttattgatatatatgtggca

SEQ ID NO: 144846 - DNA, 20 bp, Artificial Sequence
  Description of Artificial Sequence: Synthetic oligonucleotide
  Target: LAMA2; (+) strand; PAM type: NRG; PAM sequence: CGG
tgatatatatgtggcagaga

SEQ ID NO: 144847 - DNA, 20 bp, Artificial Sequence
  Description of Artificial Sequence: Synthetic oligonucleotide
  Target: LAMA2; (+) strand; PAM type: NRG; PAM sequence: TGG
tatatatgtggcagagacgg

SEQ ID NO: 144848 - DNA, 20 bp, Artificial Sequence
  Description of Artificial Sequence: Synthetic oligonucleotide
  Target: LAMA2; (+) strand; PAM type: NRG; PAM sequence: TGG
tgtggcagagacggtggtga

SEQ ID NO: 144849 - DNA, 20 bp, Artificial Sequence
  Description of Artificial Sequence: Synthetic oligonucleotide
  Target: LAMA2; (+) strand; PAM type: NRG; PAM sequence: TGG
gacggtggtgatggtttcgc

SEQ ID NO: 144850 - DNA, 20 bp, Artificial Sequence
  Description of Artificial Sequence: Synthetic oligonucleotide
  Target: LAMA2; (+) strand; PAM type: NRG; PAM sequence: TAG
atacttatctccaaactcat

SEQ ID NO: 144851 - DNA, 20 bp, Artificial Sequence
  Description of Artificial Sequence: Synthetic oligonucleotide
  Target: LAMA2; (+) strand; PAM type: NRG; PAM sequence: AGG
tacttatctccaaactcatt

SEQ ID NO: 144852 - DNA, 20 bp, Artificial Sequence
  Description of Artificial Sequence: Synthetic oligonucleotide
  Target: LAMA2; (+) strand; PAM type: NRG; PAM sequence: AAG
gttgtatacatcaaatacgt

SEQ ID NO: 144853 - DNA, 20 bp, Artificial Sequence
  Description of Artificial Sequence: Synthetic oligonucleotide
  Target: LAMA2; (+) strand; PAM type: NRG; PAM sequence: AGG
ttgtatacatcaaatacgta

SEQ ID NO: 144854 - DNA, 20 bp, Artificial Sequence
  Description of Artificial Sequence: Synthetic oligonucleotide
  Target: LAMA2; (+) strand; PAM type: NRG; PAM sequence: AAG
acctcaacatgtttttttta

SEQ ID NO: 144855 - DNA, 20 bp, Artificial Sequence
  Description of Artificial Sequence: Synthetic oligonucleotide
  Target: LAMA2; (+) strand; PAM type: NRG; PAM sequence: CAG
tcaacatgttttttttaaag

SEQ ID NO: 144856 - DNA, 20 bp, Artificial Sequence
  Description of Artificial Sequence: Synthetic oligonucleotide
  Target: LAMA2; (+) strand; PAM type: NRG; PAM sequence: TAG
atgttttttttaaagcagta

SEQ ID NO: 144857 - DNA, 20 bp, Artificial Sequence
  Description of Artificial Sequence: Synthetic oligonucleotide
  Target: LAMA2; (+) strand; PAM type: NRG; PAM sequence: AAG
tttaaaattattacaactga

SEQ ID NO: 144858 - DNA, 20 bp, Artificial Sequence
  Description of Artificial Sequence: Synthetic oligonucleotide
  Target: LAMA2; (+) strand; PAM type: NRG; PAM sequence: TGG
actgaaagccttctaacttg

SEQ ID NO: 144859 - DNA, 20 bp, Artificial Sequence
  Description of Artificial Sequence: Synthetic oligonucleotide
  Target: LAMA2; (+) strand; PAM type: NRG; PAM sequence: TGG
ttgaaataataatcgtatct

SEQ ID NO: 144860 - DNA, 20 bp, Artificial Sequence
  Description of Artificial Sequence: Synthetic oligonucleotide
  Target: LAMA2; (+) strand; PAM type: NRG; PAM sequence: TAG
aataatcgtatcttggttaa

SEQ ID NO: 144861 - DNA, 20 bp, Artificial Sequence
  Description of Artificial Sequence: Synthetic oligonucleotide
  Target: LAMA2; (+) strand; PAM type: NRG; PAM sequence: GAG
tcgtatcttggttaatagtt

SEQ ID NO: 144862 - DNA, 20 bp, Artificial Sequence
  Description of Artificial Sequence: Synthetic oligonucleotide
  Target: LAMA2; (+) strand; PAM type: NRG; PAM sequence: AAG
ggttaatagttgagatctaa

SEQ ID NO: 144863 - DNA, 20 bp, Artificial Sequence
  Description of Artificial Sequence: Synthetic oligonucleotide
  Target: LAMA2; (+) strand; PAM type: NRG; PAM sequence: TAG
atagttgagatctaaaagct

SEQ ID NO: 144864 - DNA, 20 bp, Artificial Sequence
  Description of Artificial Sequence: Synthetic oligonucleotide
  Target: LAMA2; (+) strand; PAM type: NRG; PAM sequence: AGG
tagttgagatctaaaagctt

SEQ ID NO: 144865 - DNA, 20 bp, Artificial Sequence
  Description of Artificial Sequence: Synthetic oligonucleotide
  Target: LAMA2; (+) strand; PAM type: NRG; PAM sequence: CAG
taaaagcttaggcctaaatt

SEQ ID NO: 144866 - DNA, 20 bp, Artificial Sequence
  Description of Artificial Sequence: Synthetic oligonucleotide
  Target: LAMA2; (+) strand; PAM type: NRG; PAM sequence: TAG
agcttaggcctaaattcaga

SEQ ID NO: 144867 - DNA, 20 bp, Artificial Sequence
  Description of Artificial Sequence: Synthetic oligonucleotide
  Target: LAMA2; (+) strand; PAM type: NRG; PAM sequence: AAG
taggcctaaattcagataga

SEQ ID NO: 144868 - DNA, 20 bp, Artificial Sequence
  Description of Artificial Sequence: Synthetic oligonucleotide
  Target: LAMA2; (+) strand; PAM type: NRG; PAM sequence: TGG
ctaaattcagatagaaagct

SEQ ID NO: 144869 - DNA, 20 bp, Artificial Sequence
  Description of Artificial Sequence: Synthetic oligonucleotide
  Target: LAMA2; (+) strand; PAM type: NRG; PAM sequence: AAG
aagcttggcacatctgttgt

SEQ ID NO: 144870 - DNA, 20 bp, Artificial Sequence
  Description of Artificial Sequence: Synthetic oligonucleotide
  Target: LAMA2; (+) strand; PAM type: NRG; PAM sequence: CAG
tctgttgtaagttttgaaac

SEQ ID NO: 144871 - DNA, 20 bp, Artificial Sequence
  Description of Artificial Sequence: Synthetic oligonucleotide
  Target: LAMA2; (+) strand; PAM type: NRG; PAM sequence: AGG
ctgttgtaagttttgaaacc

SEQ ID NO: 144872 - DNA, 20 bp, Artificial Sequence
  Description of Artificial Sequence: Synthetic oligonucleotide
  Target: LAMA2; (+) strand; PAM type: NRG; PAM sequence: CAG
aagttttgaaaccaggtgca

SEQ ID NO: 144873 - DNA, 20 bp, Artificial Sequence
  Description of Artificial Sequence: Synthetic oligonucleotide
  Target: LAMA2; (+) strand; PAM type: NRG; PAM sequence: CAG
tgcacagaccatctttgttc

SEQ ID NO: 144874 - DNA, 20 bp, Artificial Sequence
  Description of Artificial Sequence: Synthetic oligonucleotide
  Target: LAMA2; (+) strand; PAM type: NRG; PAM sequence: CAG
tttgttccagacgatcttct

SEQ ID NO: 144875 - DNA, 20 bp, Artificial Sequence
  Description of Artificial Sequence: Synthetic oligonucleotide
  Target: LAMA2; (+) strand; PAM type: NRG; PAM sequence: AGG
ttgttccagacgatcttctc

SEQ ID NO: 144876 - DNA, 20 bp, Artificial Sequence
  Description of Artificial Sequence: Synthetic oligonucleotide
  Target: LAMA2; (+) strand; PAM type: NRG; PAM sequence: GGG
tgttccagacgatcttctca

SEQ ID NO: 144877 - DNA, 20 bp, Artificial Sequence
  Description of Artificial Sequence: Synthetic oligonucleotide
  Target: LAMA2; (+) strand; PAM type: NRG; PAM sequence: AAG
tcttctcagggatgtttgta

SEQ ID NO: 144878 - DNA, 20 bp, Artificial Sequence
  Description of Artificial Sequence: Synthetic oligonucleotide
  Target: LAMA2; (+) strand; PAM type: NRG; PAM sequence: CAG
agggatgtttgtaaagtgaa

SEQ ID NO: 144879 - DNA, 20 bp, Artificial Sequence
  Description of Artificial Sequence: Synthetic oligonucleotide
  Target: LAMA2; (+) strand; PAM type: NRG; PAM sequence: TGG
gtttgtaaagtgaacagcct

SEQ ID NO: 144880 - DNA, 20 bp, Artificial Sequence
  Description of Artificial Sequence: Synthetic oligonucleotide
  Target: LAMA2; (+) strand; PAM type: NRG; PAM sequence: AAG
tgtaaagtgaacagccttgg

SEQ ID NO: 144881 - DNA, 20 bp, Artificial Sequence
  Description of Artificial Sequence: Synthetic oligonucleotide
  Target: LAMA2; (+) strand; PAM type: NRG; PAM sequence: AGG
gtaaagtgaacagccttgga

SEQ ID NO: 144882 - DNA, 20 bp, Artificial Sequence
  Description of Artificial Sequence: Synthetic oligonucleotide
  Target: LAMA2; (+) strand; PAM type: NRG; PAM sequence: TAG
aagtgaacagccttggaagg

SEQ ID NO: 144883 - DNA, 20 bp, Artificial Sequence
  Description of Artificial Sequence: Synthetic oligonucleotide
  Target: LAMA2; (+) strand; PAM type: NRG; PAM sequence: GAG
gtgaacagccttggaaggta

SEQ ID NO: 144884 - DNA, 20 bp, Artificial Sequence
  Description of Artificial Sequence: Synthetic oligonucleotide
  Target: LAMA2; (+) strand; PAM type: NRG; PAM sequence: TGG
aggtagagatgatgtccccc

SEQ ID NO: 144885 - DNA, 20 bp, Artificial Sequence
  Description of Artificial Sequence: Synthetic oligonucleotide
  Target: LAMA2; (+) strand; PAM type: NRG; PAM sequence: GGG
ggtagagatgatgtccccct

SEQ ID NO: 144886 - DNA, 20 bp, Artificial Sequence
  Description of Artificial Sequence: Synthetic oligonucleotide
  Target: LAMA2; (+) strand; PAM type: NRG; PAM sequence: AAG
agagatgatgtccccctggg

SEQ ID NO: 144887 - DNA, 20 bp, Artificial Sequence
  Description of Artificial Sequence: Synthetic oligonucleotide
  Target: LAMA2; (+) strand; PAM type: NRG; PAM sequence: AAG
tgatgtccccctgggaagca

SEQ ID NO: 144888 - DNA, 20 bp, Artificial Sequence
  Description of Artificial Sequence: Synthetic oligonucleotide
  Target: LAMA2; (+) strand; PAM type: NRG; PAM sequence: AGG
gatgtccccctgggaagcaa

SEQ ID NO: 144889 - DNA, 20 bp, Artificial Sequence
  Description of Artificial Sequence: Synthetic oligonucleotide
  Target: LAMA2; (+) strand; PAM type: NRG; PAM sequence: GGG
atgtccccctgggaagcaaa

SEQ ID NO: 144890 - DNA, 20 bp, Artificial Sequence
  Description of Artificial Sequence: Synthetic oligonucleotide
  Target: LAMA2; (+) strand; PAM type: NRG; PAM sequence: TAG
tccccctgggaagcaaaggg

SEQ ID NO: 144891 - DNA, 20 bp, Artificial Sequence
  Description of Artificial Sequence: Synthetic oligonucleotide
  Target: LAMA2; (+) strand; PAM type: NRG; PAM sequence: AGG
ccccctgggaagcaaagggt

SEQ ID NO: 144892 - DNA, 20 bp, Artificial Sequence
  Description of Artificial Sequence: Synthetic oligonucleotide
  Target: LAMA2; (+) strand; PAM type: NRG; PAM sequence: TAG
gcaaagggtaggtttactca

SEQ ID NO: 144893 - DNA, 20 bp, Artificial Sequence
  Description of Artificial Sequence: Synthetic oligonucleotide
  Target: LAMA2; (+) strand; PAM type: NRG; PAM sequence: TGG
gggtaggtttactcatagct

SEQ ID NO: 144894 - DNA, 20 bp, Artificial Sequence
  Description of Artificial Sequence: Synthetic oligonucleotide
  Target: LAMA2; (+) strand; PAM type: NRG; PAM sequence: GGG
ggtaggtttactcatagctt

SEQ ID NO: 144895 - DNA, 20 bp, Artificial Sequence
  Description of Artificial Sequence: Synthetic oligonucleotide
  Target: LAMA2; (+) strand; PAM type: NRG; PAM sequence: AAG
aggtttactcatagcttggg

SEQ ID NO: 144896 - DNA, 20 bp, Artificial Sequence
  Description of Artificial Sequence: Synthetic oligonucleotide
  Target: LAMA2; (+) strand; PAM type: NRG; PAM sequence: GAG
gtttactcatagcttgggaa

SEQ ID NO: 144897 - DNA, 20 bp, Artificial Sequence
  Description of Artificial Sequence: Synthetic oligonucleotide
  Target: LAMA2; (+) strand; PAM type: NRG; PAM sequence: GAG
ttactcatagcttgggaaga

SEQ ID NO: 144898 - DNA, 20 bp, Artificial Sequence
  Description of Artificial Sequence: Synthetic oligonucleotide
  Target: LAMA2; (+) strand; PAM type: NRG; PAM sequence: GAG
actcatagcttgggaagaga

SEQ ID NO: 144899 - DNA, 20 bp, Artificial Sequence
  Description of Artificial Sequence: Synthetic oligonucleotide
  Target: LAMA2; (+) strand; PAM type: NRG; PAM sequence: TGG
atagcttgggaagagagaga

SEQ ID NO: 144900 - DNA, 20 bp, Artificial Sequence
  Description of Artificial Sequence: Synthetic oligonucleotide
  Target: LAMA2; (+) strand; PAM type: NRG; PAM sequence: CAG
agagagatggtgtctccctc

SEQ ID NO: 144901 - DNA, 20 bp, Artificial Sequence
  Description of Artificial Sequence: Synthetic oligonucleotide
  Target: LAMA2; (+) strand; PAM type: NRG; PAM sequence: GAG
gatggtgtctccctccagat

SEQ ID NO: 144902 - DNA, 20 bp, Artificial Sequence
  Description of Artificial Sequence: Synthetic oligonucleotide
  Target: LAMA2; (+) strand; PAM type: NRG; PAM sequence: AGG
atggtgtctccctccagatg

SEQ ID NO: 144903 - DNA, 20 bp, Artificial Sequence
  Description of Artificial Sequence: Synthetic oligonucleotide
  Target: LAMA2; (+) strand; PAM type: NRG; PAM sequence: GGG
tggtgtctccctccagatga

SEQ ID NO: 144904 - DNA, 20 bp, Artificial Sequence
  Description of Artificial Sequence: Synthetic oligonucleotide
  Target: LAMA2; (+) strand; PAM type: NRG; PAM sequence: GGG
ggtgtctccctccagatgag

SEQ ID NO: 144905 - DNA, 20 bp, Artificial Sequence
  Description of Artificial Sequence: Synthetic oligonucleotide
  Target: LAMA2; (+) strand; PAM type: NRG; PAM sequence: AAG
ggaatatatttaccacccat

SEQ ID NO: 144906 - DNA, 20 bp, Artificial Sequence
  Description of Artificial Sequence: Synthetic oligonucleotide
  Target: LAMA2; (+) strand; PAM type: NRG; PAM sequence: AAG
atatttaccacccataagaa

SEQ ID NO: 144907 - DNA, 20 bp, Artificial Sequence
  Description of Artificial Sequence: Synthetic oligonucleotide
  Target: LAMA2; (+) strand; PAM type: NRG; PAM sequence: AAG
agaaaagatttgaacccatt

SEQ ID NO: 144908 - DNA, 20 bp, Artificial Sequence
  Description of Artificial Sequence: Synthetic oligonucleotide
  Target: LAMA2; (+) strand; PAM type: NRG; PAM sequence: GAG
agatttgaacccattaagct

SEQ ID NO: 144909 - DNA, 20 bp, Artificial Sequence
  Description of Artificial Sequence: Synthetic oligonucleotide
  Target: LAMA2; (+) strand; PAM type: NRG; PAM sequence: AGG
gatttgaacccattaagctg

SEQ ID NO: 144910 - DNA, 20 bp, Artificial Sequence
  Description of Artificial Sequence: Synthetic oligonucleotide
  Target: LAMA2; (+) strand; PAM type: NRG; PAM sequence: GGG
atttgaacccattaagctga

SEQ ID NO: 144911 - DNA, 20 bp, Artificial Sequence
  Description of Artificial Sequence: Synthetic oligonucleotide
  Target: LAMA2; (+) strand; PAM type: NRG; PAM sequence: GAG
tctgtaacaccacccactgt

SEQ ID NO: 144912 - DNA, 20 bp, Artificial Sequence
  Description of Artificial Sequence: Synthetic oligonucleotide
  Target: LAMA2; (+) strand; PAM type: NRG; PAM sequence: TGG
gtaacaccacccactgtgag

SEQ ID NO: 144913 - DNA, 20 bp, Artificial Sequence
  Description of Artificial Sequence: Synthetic oligonucleotide
  Target: LAMA2; (+) strand; PAM type: NRG; PAM sequence: GAG
aacaccacccactgtgagtg

SEQ ID NO: 144914 - DNA, 20 bp, Artificial Sequence
  Description of Artificial Sequence: Synthetic oligonucleotide
  Target: LAMA2; (+) strand; PAM type: NRG; PAM sequence: AGG
acaccacccactgtgagtgg

SEQ ID NO: 144915 - DNA, 20 bp, Artificial Sequence
  Description of Artificial Sequence: Synthetic oligonucleotide
  Target: LAMA2; (+) strand; PAM type: NRG; PAM sequence: CAG
cccactgtgagtggaggcat

SEQ ID NO: 144916 - DNA, 20 bp, Artificial Sequence
  Description of Artificial Sequence: Synthetic oligonucleotide
  Target: LAMA2; (+) strand; PAM type: NRG; PAM sequence: TGG
ctgtgagtggaggcatcagc

SEQ ID NO: 144917 - DNA, 20 bp, Artificial Sequence
  Description of Artificial Sequence: Synthetic oligonucleotide
  Target: LAMA2; (+) strand; PAM type: NRG; PAM sequence: CAG
gcctgctttctatctctctg

SEQ ID NO: 144918 - DNA, 20 bp, Artificial Sequence
  Description of Artificial Sequence: Synthetic oligonucleotide
  Target: LAMA2; (+) strand; PAM type: NRG; PAM sequence: AGG
cctgctttctatctctctgc

SEQ ID NO: 144919 - DNA, 20 bp, Artificial Sequence
  Description of Artificial Sequence: Synthetic oligonucleotide
  Target: LAMA2; (+) strand; PAM type: NRG; PAM sequence: AAG
gctttctatctctctgcagg

SEQ ID NO: 144920 - DNA, 20 bp, Artificial Sequence
  Description of Artificial Sequence: Synthetic oligonucleotide
  Target: LAMA2; (+) strand; PAM type: NRG; PAM sequence: TAG
ttctatctctctgcaggaag

SEQ ID NO: 144921 - DNA, 20 bp, Artificial Sequence
  Description of Artificial Sequence: Synthetic oligonucleotide
  Target: LAMA2; (+) strand; PAM type: NRG; PAM sequence: GAG
ctatctctctgcaggaagta

SEQ ID NO: 144922 - DNA, 20 bp, Artificial Sequence
  Description of Artificial Sequence: Synthetic oligonucleotide
  Target: LAMA2; (+) strand; PAM type: NRG; PAM sequence: CAG
tctctgcaggaagtagagcc

SEQ ID NO: 144923 - DNA, 20 bp, Artificial Sequence
  Description of Artificial Sequence: Synthetic oligonucleotide
  Target: LAMA2; (+) strand; PAM type: NRG; PAM sequence: AGG
ctctgcaggaagtagagccc

SEQ ID NO: 144924 - DNA, 20 bp, Artificial Sequence
  Description of Artificial Sequence: Synthetic oligonucleotide
  Target: LAMA2; (+) strand; PAM type: NRG; PAM sequence: TGG
ggaagtagagcccaggcaac

SEQ ID NO: 144925 - DNA, 20 bp, Artificial Sequence
  Description of Artificial Sequence: Synthetic oligonucleotide
  Target: LAMA2; (+) strand; PAM type: NRG; PAM sequence: AAG
aactggcaccaaatatgcca

SEQ ID NO: 144926 - DNA, 20 bp, Artificial Sequence
  Description of Artificial Sequence: Synthetic oligonucleotide
  Target: LAMA2; (+) strand; PAM type: NRG; PAM sequence: TGG
ccaaagcttatgctgcttcc

SEQ ID NO: 144927 - DNA, 20 bp, Artificial Sequence
  Description of Artificial Sequence: Synthetic oligonucleotide
  Target: LAMA2; (+) strand; PAM type: NRG; PAM sequence: GGG
caaagcttatgctgcttcct

SEQ ID NO: 144928 - DNA, 20 bp, Artificial Sequence
  Description of Artificial Sequence: Synthetic oligonucleotide
  Target: LAMA2; (+) strand; PAM type: NRG; PAM sequence: GAG
tatgctgcttcctgggctgt

SEQ ID NO: 144929 - DNA, 20 bp, Artificial Sequence
  Description of Artificial Sequence: Synthetic oligonucleotide
  Target: LAMA2; (+) strand; PAM type: NRG; PAM sequence: AAG
ttcctgggctgtgagtaata

SEQ ID NO: 144930 - DNA, 20 bp, Artificial Sequence
  Description of Artificial Sequence: Synthetic oligonucleotide
  Target: LAMA2; (+) strand; PAM type: NRG; PAM sequence: TAG
aaagtcccttttccctcttt

SEQ ID NO: 144931 - DNA, 20 bp, Artificial Sequence
  Description of Artificial Sequence: Synthetic oligonucleotide
  Target: LAMA2; (+) strand; PAM type: NRG; PAM sequence: AAG
gtcccttttccctcttttag

SEQ ID NO: 144932 - DNA, 20 bp, Artificial Sequence
  Description of Artificial Sequence: Synthetic oligonucleotide
  Target: LAMA2; (+) strand; PAM type: NRG; PAM sequence: CAG
agaagtctcatatgttctgt

SEQ ID NO: 144933 - DNA, 20 bp, Artificial Sequence
  Description of Artificial Sequence: Synthetic oligonucleotide
  Target: LAMA2; (+) strand; PAM type: NRG; PAM sequence: CAG
agtctcatatgttctgtcag

SEQ ID NO: 144934 - DNA, 20 bp, Artificial Sequence
  Description of Artificial Sequence: Synthetic oligonucleotide
  Target: LAMA2; (+) strand; PAM type: NRG; PAM sequence: AAG
atgttctgtcagcagccacc

SEQ ID NO: 144935 - DNA, 20 bp, Artificial Sequence
  Description of Artificial Sequence: Synthetic oligonucleotide
  Target: LAMA2; (+) strand; PAM type: NRG; PAM sequence: CAG
cagcagccaccaagctgtgt

SEQ ID NO: 144936 - DNA, 20 bp, Artificial Sequence
  Description of Artificial Sequence: Synthetic oligonucleotide
  Target: LAMA2; (+) strand; PAM type: NRG; PAM sequence: AGG
agcagccaccaagctgtgtc

SEQ ID NO: 144937 - DNA, 20 bp, Artificial Sequence
  Description of Artificial Sequence: Synthetic oligonucleotide
  Target: LAMA2; (+) strand; PAM type: NRG; PAM sequence: AAG
aggctaaattgctgtcttgc

SEQ ID NO: 144938 - DNA, 20 bp, Artificial Sequence
  Description of Artificial Sequence: Synthetic oligonucleotide
  Target: LAMA2; (+) strand; PAM type: NRG; PAM sequence: TAG
ctaaattgctgtcttgcaag

SEQ ID NO: 144939 - DNA, 20 bp, Artificial Sequence
  Description of Artificial Sequence: Synthetic oligonucleotide
  Target: LAMA2; (+) strand; PAM type: NRG; PAM sequence: CAG
ttgcaagtagaataaaatcc

SEQ ID NO: 144940 - DNA, 20 bp, Artificial Sequence
  Description of Artificial Sequence: Synthetic oligonucleotide
  Target: LAMA2; (+) strand; PAM type: NRG; PAM sequence: CAG
taccatatatttaccgcata

SEQ ID NO: 144941 - DNA, 20 bp, Artificial Sequence
  Description of Artificial Sequence: Synthetic oligonucleotide
  Target: LAMA2; (+) strand; PAM type: NRG; PAM sequence: CAG
tatatttaccgcatacagtt

SEQ ID NO: 144942 - DNA, 20 bp, Artificial Sequence
  Description of Artificial Sequence: Synthetic oligonucleotide
  Target: LAMA2; (+) strand; PAM type: NRG; PAM sequence: TAG
agttcagaattatttattaa

SEQ ID NO: 144943 - DNA, 20 bp, Artificial Sequence
  Description of Artificial Sequence: Synthetic oligonucleotide
  Target: LAMA2; (+) strand; PAM type: NRG; PAM sequence: CAG
atttattaatagtatattca

SEQ ID NO: 144944 - DNA, 20 bp, Artificial Sequence
  Description of Artificial Sequence: Synthetic oligonucleotide
  Target: LAMA2; (+) strand; PAM type: NRG; PAM sequence: GAG
ttattaatagtatattcaca

SEQ ID NO: 144945 - DNA, 20 bp, Artificial Sequence
  Description of Artificial Sequence: Synthetic oligonucleotide
  Target: LAMA2; (+) strand; PAM type: NRG; PAM sequence: TAG
ccaccaccacaatccaattt

SEQ ID NO: 144946 - DNA, 20 bp, Artificial Sequence
  Description of Artificial Sequence: Synthetic oligonucleotide
  Target: LAMA2; (+) strand; PAM type: NRG; PAM sequence: AAG
gatcatttcaacaactcaaa

SEQ ID NO: 144947 - DNA, 20 bp, Artificial Sequence
  Description of Artificial Sequence: Synthetic oligonucleotide
  Target: LAMA2; (+) strand; PAM type: NRG; PAM sequence: AAG
aaagaaaccttgtacacgtt

SEQ ID NO: 144948 - DNA, 20 bp, Artificial Sequence
  Description of Artificial Sequence: Synthetic oligonucleotide
  Target: LAMA2; (+) strand; PAM type: NRG; PAM sequence: TAG
ccctgaaaatctgcttgctc

SEQ ID NO: 144949 - DNA, 20 bp, Artificial Sequence
  Description of Artificial Sequence: Synthetic oligonucleotide
  Target: LAMA2; (+) strand; PAM type: NRG; PAM sequence: TGG
tctgcttgctctagctgtgt

SEQ ID NO: 144950 - DNA, 20 bp, Artificial Sequence
  Description of Artificial Sequence: Synthetic oligonucleotide
  Target: LAMA2; (+) strand; PAM type: NRG; PAM sequence: CAG
tagctgtgttggattgatgt

SEQ ID NO: 144951 - DNA, 20 bp, Artificial Sequence
  Description of Artificial Sequence: Synthetic oligonucleotide
  Target: LAMA2; (+) strand; PAM type: NRG; PAM sequence: CAG
gttggattgatgtcagaaca

SEQ ID NO: 144952 - DNA, 20 bp, Artificial Sequence
  Description of Artificial Sequence: Synthetic oligonucleotide
  Target: LAMA2; (+) strand; PAM type: NRG; PAM sequence: AGG
ttggattgatgtcagaacac

SEQ ID NO: 144953 - DNA, 20 bp, Artificial Sequence
  Description of Artificial Sequence: Synthetic oligonucleotide
  Target: LAMA2; (+) strand; PAM type: NRG; PAM sequence: GAG
ggattgatgtcagaacacag

SEQ ID NO: 144954 - DNA, 20 bp, Artificial Sequence
  Description of Artificial Sequence: Synthetic oligonucleotide
  Target: LAMA2; (+) strand; PAM type: NRG; PAM sequence: AGG
gattgatgtcagaacacagg

SEQ ID NO: 144955 - DNA, 20 bp, Artificial Sequence
  Description of Artificial Sequence: Synthetic oligonucleotide
  Target: LAMA2; (+) strand; PAM type: NRG; PAM sequence: GGG
attgatgtcagaacacagga

SEQ ID NO: 144956 - DNA, 20 bp, Artificial Sequence
  Description of Artificial Sequence: Synthetic oligonucleotide
  Target: LAMA2; (+) strand; PAM type: NRG; PAM sequence: AAG
gatgtcagaacacaggaggg

SEQ ID NO: 144957 - DNA, 20 bp, Artificial Sequence
  Description of Artificial Sequence: Synthetic oligonucleotide
  Target: LAMA2; (+) strand; PAM type: NRG; PAM sequence: AGG
atgtcagaacacaggaggga

SEQ ID NO: 144958 - DNA, 20 bp, Artificial Sequence
  Description of Artificial Sequence: Synthetic oligonucleotide
  Target: LAMA2; (+) strand; PAM type: NRG; PAM sequence: GGG
tgtcagaacacaggagggaa

SEQ ID NO: 144959 - DNA, 20 bp, Artificial Sequence
  Description of Artificial Sequence: Synthetic oligonucleotide
  Target: LAMA2; (+) strand; PAM type: NRG; PAM sequence: AAG
caggagggaagggcaaatgc

SEQ ID NO: 144960 - DNA, 20 bp, Artificial Sequence
  Description of Artificial Sequence: Synthetic oligonucleotide
  Target: LAMA2; (+) strand; PAM type: NRG; PAM sequence: AGG
aggagggaagggcaaatgca

SEQ ID NO: 144961 - DNA, 20 bp, Artificial Sequence
  Description of Artificial Sequence: Synthetic oligonucleotide
  Target: LAMA2; (+) strand; PAM type: NRG; PAM sequence: GGG
ggagggaagggcaaatgcaa

SEQ ID NO: 144962 - DNA, 20 bp, Artificial Sequence
  Description of Artificial Sequence: Synthetic oligonucleotide
  Target: LAMA2; (+) strand; PAM type: NRG; PAM sequence: GAG
agggaagggcaaatgcaagg

SEQ ID NO: 144963 - DNA, 20 bp, Artificial Sequence
  Description of Artificial Sequence: Synthetic oligonucleotide
  Target: LAMA2; (+) strand; PAM type: NRG; PAM sequence: CAG
gaagggcaaatgcaagggag

SEQ ID NO: 144964 - DNA, 20 bp, Artificial Sequence
  Description of Artificial Sequence: Synthetic oligonucleotide
  Target: LAMA2; (+) strand; PAM type: NRG; PAM sequence: AGG
aagggcaaatgcaagggagc

SEQ ID NO: 144965 - DNA, 20 bp, Artificial Sequence
  Description of Artificial Sequence: Synthetic oligonucleotide
  Target: LAMA2; (+) strand; PAM type: NRG; PAM sequence: AAG
gcaaatgcaagggagcaggt

SEQ ID NO: 144966 - DNA, 20 bp, Artificial Sequence
  Description of Artificial Sequence: Synthetic oligonucleotide
  Target: LAMA2; (+) strand; PAM type: NRG; PAM sequence: GAG
aaatgcaagggagcaggtaa

SEQ ID NO: 144967 - DNA, 20 bp, Artificial Sequence
  Description of Artificial Sequence: Synthetic oligonucleotide
  Target: LAMA2; (+) strand; PAM type: NRG; PAM sequence: AGG
aatgcaagggagcaggtaag

SEQ ID NO: 144968 - DNA, 20 bp, Artificial Sequence
  Description of Artificial Sequence: Synthetic oligonucleotide
  Target: LAMA2; (+) strand; PAM type: NRG; PAM sequence: CAG
gagcaggtaagaggctttca

SEQ ID NO: 144969 - DNA, 20 bp, Artificial Sequence
  Description of Artificial Sequence: Synthetic oligonucleotide
  Target: LAMA2; (+) strand; PAM type: NRG; PAM sequence: CGG
aagaggctttcacagcaact

SEQ ID NO: 144970 - DNA, 20 bp, Artificial Sequence
  Description of Artificial Sequence: Synthetic oligonucleotide
  Target: LAMA2; (+) strand; PAM type: NRG; PAM sequence: GGG
agaggctttcacagcaactc

SEQ ID NO: 144971 - DNA, 20 bp, Artificial Sequence
  Description of Artificial Sequence: Synthetic oligonucleotide
  Target: LAMA2; (+) strand; PAM type: NRG; PAM sequence: TAG
cagcaactcgggacaaatga

SEQ ID NO: 144972 - DNA, 20 bp, Artificial Sequence
  Description of Artificial Sequence: Synthetic oligonucleotide
  Target: LAMA2; (+) strand; PAM type: NRG; PAM sequence: TGG
caactcgggacaaatgatag

SEQ ID NO: 144973 - DNA, 20 bp, Artificial Sequence
  Description of Artificial Sequence: Synthetic oligonucleotide
  Target: LAMA2; (+) strand; PAM type: NRG; PAM sequence: TGG
cgggacaaatgatagtggct

SEQ ID NO: 144974 - DNA, 20 bp, Artificial Sequence
  Description of Artificial Sequence: Synthetic oligonucleotide
  Target: LAMA2; (+) strand; PAM type: NRG; PAM sequence: GAG
ggacaaatgatagtggcttg

SEQ ID NO: 144975 - DNA, 20 bp, Artificial Sequence
  Description of Artificial Sequence: Synthetic oligonucleotide
  Target: LAMA2; (+) strand; PAM type: NRG; PAM sequence: CAG
caaatgatagtggcttggag

SEQ ID NO: 144976 - DNA, 20 bp, Artificial Sequence
  Description of Artificial Sequence: Synthetic oligonucleotide
  Target: LAMA2; (+) strand; PAM type: NRG; PAM sequence: AGG
aaatgatagtggcttggagc

SEQ ID NO: 144977 - DNA, 20 bp, Artificial Sequence
  Description of Artificial Sequence: Synthetic oligonucleotide
  Target: LAMA2; (+) strand; PAM type: NRG; PAM sequence: GGG
aatgatagtggcttggagca

SEQ ID NO: 144978 - DNA, 20 bp, Artificial Sequence
  Description of Artificial Sequence: Synthetic oligonucleotide
  Target: LAMA2; (+) strand; PAM type: NRG; PAM sequence: TAG
gatagtggcttggagcaggg

SEQ ID NO: 144979 - DNA, 20 bp, Artificial Sequence
  Description of Artificial Sequence: Synthetic oligonucleotide
  Target: LAMA2; (+) strand; PAM type: NRG; PAM sequence: CAG
agtggcttggagcagggtag

SEQ ID NO: 144980 - DNA, 20 bp, Artificial Sequence
  Description of Artificial Sequence: Synthetic oligonucleotide
  Target: LAMA2; (+) strand; PAM type: NRG; PAM sequence: AAG
ggagcagggtagcagcatga

SEQ ID NO: 144981 - DNA, 20 bp, Artificial Sequence
  Description of Artificial Sequence: Synthetic oligonucleotide
  Target: LAMA2; (+) strand; PAM type: NRG; PAM sequence: TAG
gcagggtagcagcatgaaag

SEQ ID NO: 144982 - DNA, 20 bp, Artificial Sequence
  Description of Artificial Sequence: Synthetic oligonucleotide
  Target: LAMA2; (+) strand; PAM type: NRG; PAM sequence: GAG
ggtagcagcatgaaagtagt

SEQ ID NO: 144983 - DNA, 20 bp, Artificial Sequence
  Description of Artificial Sequence: Synthetic oligonucleotide
  Target: LAMA2; (+) strand; PAM type: NRG; PAM sequence: AAG
agcagcatgaaagtagtgag

SEQ ID NO: 144984 - DNA, 20 bp, Artificial Sequence
  Description of Artificial Sequence: Synthetic oligonucleotide
  Target: LAMA2; (+) strand; PAM type: NRG; PAM sequence: TGG
agcatgaaagtagtgagaag

SEQ ID NO: 144985 - DNA, 20 bp, Artificial Sequence
  Description of Artificial Sequence: Synthetic oligonucleotide
  Target: LAMA2; (+) strand; PAM type: NRG; PAM sequence: CGG
atgaaagtagtgagaagtgg

SEQ ID NO: 144986 - DNA, 20 bp, Artificial Sequence
  Description of Artificial Sequence: Synthetic oligonucleotide
  Target: LAMA2; (+) strand; PAM type: NRG; PAM sequence: TAG
agtagtgagaagtggcggaa

SEQ ID NO: 144987 - DNA, 20 bp, Artificial Sequence
  Description of Artificial Sequence: Synthetic oligonucleotide
  Target: LAMA2; (+) strand; PAM type: NRG; PAM sequence: AAG
agtgagaagtggcggaatag

SEQ ID NO: 144988 - DNA, 20 bp, Artificial Sequence
  Description of Artificial Sequence: Synthetic oligonucleotide
  Target: LAMA2; (+) strand; PAM type: NRG; PAM sequence: AAG
gaatagaagatacattttca

SEQ ID NO: 144989 - DNA, 20 bp, Artificial Sequence
  Description of Artificial Sequence: Synthetic oligonucleotide
  Target: LAMA2; (+) strand; PAM type: NRG; PAM sequence: TGG
tagaagatacattttcaaag

SEQ ID NO: 144990 - DNA, 20 bp, Artificial Sequence
  Description of Artificial Sequence: Synthetic oligonucleotide
  Target: LAMA2; (+) strand; PAM type: NRG; PAM sequence: TAG
cattttcaaagtggaaccaa

SEQ ID NO: 144991 - DNA, 20 bp, Artificial Sequence
  Description of Artificial Sequence: Synthetic oligonucleotide
  Target: LAMA2; (+) strand; PAM type: NRG; PAM sequence: TGG
aatagtatttcctgaccaat

SEQ ID NO: 144992 - DNA, 20 bp, Artificial Sequence
  Description of Artificial Sequence: Synthetic oligonucleotide
  Target: LAMA2; (+) strand; PAM type: NRG; PAM sequence: AAG
cctgaccaattggctctgcc

SEQ ID NO: 144993 - DNA, 20 bp, Artificial Sequence
  Description of Artificial Sequence: Synthetic oligonucleotide
  Target: LAMA2; (+) strand; PAM type: NRG; PAM sequence: GAG
tgaccaattggctctgccaa

SEQ ID NO: 144994 - DNA, 20 bp, Artificial Sequence
  Description of Artificial Sequence: Synthetic oligonucleotide
  Target: LAMA2; (+) strand; PAM type: NRG; PAM sequence: AGG
gaccaattggctctgccaag

SEQ ID NO: 144995 - DNA, 20 bp, Artificial Sequence
  Description of Artificial Sequence: Synthetic oligonucleotide
  Target: LAMA2; (+) strand; PAM type: NRG; PAM sequence: GAG
tgtgctgatcaattttccgt

SEQ ID NO: 144996 - DNA, 20 bp, Artificial Sequence
  Description of Artificial Sequence: Synthetic oligonucleotide
  Target: LAMA2; (+) strand; PAM type: NRG; PAM sequence: AGG
gtgctgatcaattttccgtg

SEQ ID NO: 144997 - DNA, 20 bp, Artificial Sequence
  Description of Artificial Sequence: Synthetic oligonucleotide
  Target: LAMA2; (+) strand; PAM type: NRG; PAM sequence: GAG
atcaattttccgtgaggtgt

SEQ ID NO: 144998 - DNA, 20 bp, Artificial Sequence
  Description of Artificial Sequence: Synthetic oligonucleotide
  Target: LAMA2; (+) strand; PAM type: NRG; PAM sequence: GAG
tttccgtgaggtgtgagaat

SEQ ID NO: 144999 - DNA, 20 bp, Artificial Sequence
  Description of Artificial Sequence: Synthetic oligonucleotide
  Target: LAMA2; (+) strand; PAM type: NRG; PAM sequence: TGG
cgtgaggtgtgagaatgaga

SEQ ID NO: 145000 - DNA, 20 bp, Artificial Sequence
  Description of Artificial Sequence: Synthetic oligonucleotide
  Target: LAMA2; (+) strand; PAM type: NRG; PAM sequence: GAG
ggtgtgagaatgagatggct

SEQ ID NO: 145001 - DNA, 20 bp, Artificial Sequence
  Description of Artificial Sequence: Synthetic oligonucleotide
  Target: LAMA2; (+) strand; PAM type: NRG; PAM sequence: AGG
gtgtgagaatgagatggctg

SEQ ID NO: 145002 - DNA, 20 bp, Artificial Sequence
  Description of Artificial Sequence: Synthetic oligonucleotide
  Target: LAMA2; (+) strand; PAM type: NRG; PAM sequence: GGG
tgtgagaatgagatggctga

SEQ ID NO: 145003 - DNA, 20 bp, Artificial Sequence
  Description of Artificial Sequence: Synthetic oligonucleotide
  Target: LAMA2; (+) strand; PAM type: NRG; PAM sequence: GAG
gaatgagatggctgagggat

SEQ ID NO: 145004 - DNA, 20 bp, Artificial Sequence
  Description of Artificial Sequence: Synthetic oligonucleotide
  Target: LAMA2; (+) strand; PAM type: NRG; PAM sequence: TGG
atggctgagggatgagtcca

SEQ ID NO: 145005 - DNA, 20 bp, Artificial Sequence
  Description of Artificial Sequence: Synthetic oligonucleotide
  Target: LAMA2; (+) strand; PAM type: NRG; PAM sequence: TGG
gagggatgagtccatggttt

SEQ ID NO: 145006 - DNA, 20 bp, Artificial Sequence
  Description of Artificial Sequence: Synthetic oligonucleotide
  Target: LAMA2; (+) strand; PAM type: NRG; PAM sequence: GAG
tgagtccatggttttggcat

SEQ ID NO: 145007 - DNA, 20 bp, Artificial Sequence
  Description of Artificial Sequence: Synthetic oligonucleotide
  Target: LAMA2; (+) strand; PAM type: NRG; PAM sequence: AAG
ccatggttttggcatgagca

SEQ ID NO: 145008 - DNA, 20 bp, Artificial Sequence
  Description of Artificial Sequence: Synthetic oligonucleotide
  Target: LAMA2; (+) strand; PAM type: NRG; PAM sequence: AGG
catggttttggcatgagcaa

SEQ ID NO: 145009 - DNA, 20 bp, Artificial Sequence
  Description of Artificial Sequence: Synthetic oligonucleotide
  Target: LAMA2; (+) strand; PAM type: NRG; PAM sequence: GGG
atggttttggcatgagcaaa

SEQ ID NO: 145010 - DNA, 20 bp, Artificial Sequence
  Description of Artificial Sequence: Synthetic oligonucleotide
  Target: LAMA2; (+) strand; PAM type: NRG; PAM sequence: AAG
gttttggcatgagcaaaggg

SEQ ID NO: 145011 - DNA, 20 bp, Artificial Sequence
  Description of Artificial Sequence: Synthetic oligonucleotide
  Target: LAMA2; (+) strand; PAM type: NRG; PAM sequence: AGG
ttttggcatgagcaaaggga

SEQ ID NO: 145012 - DNA, 20 bp, Artificial Sequence
  Description of Artificial Sequence: Synthetic oligonucleotide
  Target: LAMA2; (+) strand; PAM type: NRG; PAM sequence: GAG
catgagcaaagggaaggatt

SEQ ID NO: 145013 - DNA, 20 bp, Artificial Sequence
  Description of Artificial Sequence: Synthetic oligonucleotide
  Target: LAMA2; (+) strand; PAM type: NRG; PAM sequence: GAG
ggattgagttgctttgaaat

SEQ ID NO: 145014 - DNA, 20 bp, Artificial Sequence
  Description of Artificial Sequence: Synthetic oligonucleotide
  Target: LAMA2; (+) strand; PAM type: NRG; PAM sequence: TGG
tgagttgctttgaaatgagt

SEQ ID NO: 145015 - DNA, 20 bp, Artificial Sequence
  Description of Artificial Sequence: Synthetic oligonucleotide
  Target: LAMA2; (+) strand; PAM type: NRG; PAM sequence: GGG
gagttgctttgaaatgagtt

SEQ ID NO: 145016 - DNA, 20 bp, Artificial Sequence
  Description of Artificial Sequence: Synthetic oligonucleotide
  Target: LAMA2; (+) strand; PAM type: NRG; PAM sequence: GGG
agttgctttgaaatgagttg

SEQ ID NO: 145017 - DNA, 20 bp, Artificial Sequence
  Description of Artificial Sequence: Synthetic oligonucleotide
  Target: LAMA2; (+) strand; PAM type: NRG; PAM sequence: AAG
tgctttgaaatgagttgggg

SEQ ID NO: 145018 - DNA, 20 bp, Artificial Sequence
  Description of Artificial Sequence: Synthetic oligonucleotide
  Target: LAMA2; (+) strand; PAM type: NRG; PAM sequence: TGG
aaatgagttggggaagactg

SEQ ID NO: 145019 - DNA, 20 bp, Artificial Sequence
  Description of Artificial Sequence: Synthetic oligonucleotide
  Target: LAMA2; (+) strand; PAM type: NRG; PAM sequence: GGG
aatgagttggggaagactgt

SEQ ID NO: 145020 - DNA, 20 bp, Artificial Sequence
  Description of Artificial Sequence: Synthetic oligonucleotide
  Target: LAMA2; (+) strand; PAM type: NRG; PAM sequence: TAG
gttggggaagactgtgggca

SEQ ID NO: 145021 - DNA, 20 bp, Artificial Sequence
  Description of Artificial Sequence: Synthetic oligonucleotide
  Target: LAMA2; (+) strand; PAM type: NRG; PAM sequence: CAG
ggggaagactgtgggcatag

SEQ ID NO: 145022 - DNA, 20 bp, Artificial Sequence
  Description of Artificial Sequence: Synthetic oligonucleotide
  Target: LAMA2; (+) strand; PAM type: NRG; PAM sequence: AGG
gggaagactgtgggcatagc

SEQ ID NO: 145023 - DNA, 20 bp, Artificial Sequence
  Description of Artificial Sequence: Synthetic oligonucleotide
  Target: LAMA2; (+) strand; PAM type: NRG; PAM sequence: CAG
gtgggcatagcaggttttga

SEQ ID NO: 145024 - DNA, 20 bp, Artificial Sequence
  Description of Artificial Sequence: Synthetic oligonucleotide
  Target: LAMA2; (+) strand; PAM type: NRG; PAM sequence: GAG
gggcatagcaggttttgaca

SEQ ID NO: 145025 - DNA, 20 bp, Artificial Sequence
  Description of Artificial Sequence: Synthetic oligonucleotide
  Target: LAMA2; (+) strand; PAM type: NRG; PAM sequence: AAG
catagcaggttttgacagag

SEQ ID NO: 145026 - DNA, 20 bp, Artificial Sequence
  Description of Artificial Sequence: Synthetic oligonucleotide
  Target: LAMA2; (+) strand; PAM type: NRG; PAM sequence: TAG
caggttttgacagagaagaa

SEQ ID NO: 145027 - DNA, 20 bp, Artificial Sequence
  Description of Artificial Sequence: Synthetic oligonucleotide
  Target: LAMA2; (+) strand; PAM type: NRG; PAM sequence: AGG
aggttttgacagagaagaat

SEQ ID NO: 145028 - DNA, 20 bp, Artificial Sequence
  Description of Artificial Sequence: Synthetic oligonucleotide
  Target: LAMA2; (+) strand; PAM type: NRG; PAM sequence: GAG
gttttgacagagaagaatag

SEQ ID NO: 145029 - DNA, 20 bp, Artificial Sequence
  Description of Artificial Sequence: Synthetic oligonucleotide
  Target: LAMA2; (+) strand; PAM type: NRG; PAM sequence: CAG
gacagagaagaataggagtt

SEQ ID NO: 145030 - DNA, 20 bp, Artificial Sequence
  Description of Artificial Sequence: Synthetic oligonucleotide
  Target: LAMA2; (+) strand; PAM type: NRG; PAM sequence: TAG
tgttaactgaaaatgtctat

SEQ ID NO: 145031 - DNA, 20 bp, Artificial Sequence
  Description of Artificial Sequence: Synthetic oligonucleotide
  Target: LAMA2; (+) strand; PAM type: NRG; PAM sequence: TGG
aaaatgtctattagacattt

SEQ ID NO: 145032 - DNA, 20 bp, Artificial Sequence
  Description of Artificial Sequence: Synthetic oligonucleotide
  Target: LAMA2; (+) strand; PAM type: NRG; PAM sequence: AAG
gtctattagacattttggtg

SEQ ID NO: 145033 - DNA, 20 bp, Artificial Sequence
  Description of Artificial Sequence: Synthetic oligonucleotide
  Target: LAMA2; (+) strand; PAM type: NRG; PAM sequence: TAG
gacattttggtgaagctgaa

SEQ ID NO: 145034 - DNA, 20 bp, Artificial Sequence
  Description of Artificial Sequence: Synthetic oligonucleotide
  Target: LAMA2; (+) strand; PAM type: NRG; PAM sequence: TAG
ttttggtgaagctgaataga

SEQ ID NO: 145035 - DNA, 20 bp, Artificial Sequence
  Description of Artificial Sequence: Synthetic oligonucleotide
  Target: LAMA2; (+) strand; PAM type: NRG; PAM sequence: TAG
gaagctgaatagatagtgta

SEQ ID NO: 145036 - DNA, 20 bp, Artificial Sequence
  Description of Artificial Sequence: Synthetic oligonucleotide
  Target: LAMA2; (+) strand; PAM type: NRG; PAM sequence: TGG
atagatagtgtatagtattc

SEQ ID NO: 145037 - DNA, 20 bp, Artificial Sequence
  Description of Artificial Sequence: Synthetic oligonucleotide
  Target: LAMA2; (+) strand; PAM type: NRG; PAM sequence: CAG
gtgtatagtattctggaatt

SEQ ID NO: 145038 - DNA, 20 bp, Artificial Sequence
  Description of Artificial Sequence: Synthetic oligonucleotide
  Target: LAMA2; (+) strand; PAM type: NRG; PAM sequence: GAG
tagtattctggaattcagat

SEQ ID NO: 145039 - DNA, 20 bp, Artificial Sequence
  Description of Artificial Sequence: Synthetic oligonucleotide
  Target: LAMA2; (+) strand; PAM type: NRG; PAM sequence: AAG
cagatgagaaatgctgctta

SEQ ID NO: 145040 - DNA, 20 bp, Artificial Sequence
  Description of Artificial Sequence: Synthetic oligonucleotide
  Target: LAMA2; (+) strand; PAM type: NRG; PAM sequence: TAG
tgctgcttaaagatacgaat

SEQ ID NO: 145041 - DNA, 20 bp, Artificial Sequence
  Description of Artificial Sequence: Synthetic oligonucleotide
  Target: LAMA2; (+) strand; PAM type: NRG; PAM sequence: GAG
ctgcttaaagatacgaatta

SEQ ID NO: 145042 - DNA, 20 bp, Artificial Sequence
  Description of Artificial Sequence: Synthetic oligonucleotide
  Target: LAMA2; (+) strand; PAM type: NRG; PAM sequence: GAG
attagagaatttaaaatcat

SEQ ID NO: 145043 - DNA, 20 bp, Artificial Sequence
  Description of Artificial Sequence: Synthetic oligonucleotide
  Target: LAMA2; (+) strand; PAM type: NRG; PAM sequence: CAG
tgagactgcataatatcacc

SEQ ID NO: 145044 - DNA, 20 bp, Artificial Sequence
  Description of Artificial Sequence: Synthetic oligonucleotide
  Target: LAMA2; (+) strand; PAM type: NRG; PAM sequence: AGG
gagactgcataatatcaccc

SEQ ID NO: 145045 - DNA, 20 bp, Artificial Sequence
  Description of Artificial Sequence: Synthetic oligonucleotide
  Target: LAMA2; (+) strand; PAM type: NRG; PAM sequence: AAG
actgcataatatcacccagg

SEQ ID NO: 145046 - DNA, 20 bp, Artificial Sequence
  Description of Artificial Sequence: Synthetic oligonucleotide
  Target: LAMA2; (+) strand; PAM type: NRG; PAM sequence: AAG
taatatcacccaggaagtac

SEQ ID NO: 145047 - DNA, 20 bp, Artificial Sequence
  Description of Artificial Sequence: Synthetic oligonucleotide
  Target: LAMA2; (+) strand; PAM type: NRG; PAM sequence: AAG
tatcacccaggaagtacaag

SEQ ID NO: 145048 - DNA, 20 bp, Artificial Sequence
  Description of Artificial Sequence: Synthetic oligonucleotide
  Target: LAMA2; (+) strand; PAM type: NRG; PAM sequence: TAG
ccaggaagtacaagaagacc

SEQ ID NO: 145049 - DNA, 20 bp, Artificial Sequence
  Description of Artificial Sequence: Synthetic oligonucleotide
  Target: LAMA2; (+) strand; PAM type: NRG; PAM sequence: AAG
aagtacaagaagacctagaa

SEQ ID NO: 145050 - DNA, 20 bp, Artificial Sequence
  Description of Artificial Sequence: Synthetic oligonucleotide
  Target: LAMA2; (+) strand; PAM type: NRG; PAM sequence: CAG
aagaagacctagaaaagtaa

SEQ ID NO: 145051 - DNA, 20 bp, Artificial Sequence
  Description of Artificial Sequence: Synthetic oligonucleotide
  Target: LAMA2; (+) strand; PAM type: NRG; PAM sequence: GAG
acctagaaaagtaacagtct

SEQ ID NO: 145052 - DNA, 20 bp, Artificial Sequence
  Description of Artificial Sequence: Synthetic oligonucleotide
  Target: LAMA2; (+) strand; PAM type: NRG; PAM sequence: GAG
aaagtaacagtctgagaact

SEQ ID NO: 145053 - DNA, 20 bp, Artificial Sequence
  Description of Artificial Sequence: Synthetic oligonucleotide
  Target: LAMA2; (+) strand; PAM type: NRG; PAM sequence: AAG
cagtctgagaactgagctct

SEQ ID NO: 145054 - DNA, 20 bp, Artificial Sequence
  Description of Artificial Sequence: Synthetic oligonucleotide
  Target: LAMA2; (+) strand; PAM type: NRG; PAM sequence: AGG
agtctgagaactgagctcta

SEQ ID NO: 145055 - DNA, 20 bp, Artificial Sequence
  Description of Artificial Sequence: Synthetic oligonucleotide
  Target: LAMA2; (+) strand; PAM type: NRG; PAM sequence: TAG
ctctaaggaacatctacctt

SEQ ID NO: 145056 - DNA, 20 bp, Artificial Sequence
  Description of Artificial Sequence: Synthetic oligonucleotide
  Target: LAMA2; (+) strand; PAM type: NRG; PAM sequence: GAG
ctaaggaacatctaccttta

SEQ ID NO: 145057 - DNA, 20 bp, Artificial Sequence
  Description of Artificial Sequence: Synthetic oligonucleotide
  Target: LAMA2; (+) strand; PAM type: NRG; PAM sequence: AGG
taaggaacatctacctttag

SEQ ID NO: 145058 - DNA, 20 bp, Artificial Sequence
  Description of Artificial Sequence: Synthetic oligonucleotide
  Target: LAMA2; (+) strand; PAM type: NRG; PAM sequence: CAG
gaacatctacctttagaggt

SEQ ID NO: 145059 - DNA, 20 bp, Artificial Sequence
  Description of Artificial Sequence: Synthetic oligonucleotide
  Target: LAMA2; (+) strand; PAM type: NRG; PAM sequence: GAG
acatctacctttagaggtca

SEQ ID NO: 145060 - DNA, 20 bp, Artificial Sequence
  Description of Artificial Sequence: Synthetic oligonucleotide
  Target: LAMA2; (+) strand; PAM type: NRG; PAM sequence: GAG
atctacctttagaggtcaga

SEQ ID NO: 145061 - DNA, 20 bp, Artificial Sequence
  Description of Artificial Sequence: Synthetic oligonucleotide
  Target: LAMA2; (+) strand; PAM type: NRG; PAM sequence: AAG
ctttagaggtcagagagatg

SEQ ID NO: 145062 - DNA, 20 bp, Artificial Sequence
  Description of Artificial Sequence: Synthetic oligonucleotide
  Target: LAMA2; (+) strand; PAM type: NRG; PAM sequence: TAG
tagaggtcagagagatgaag

SEQ ID NO: 145063 - DNA, 20 bp, Artificial Sequence
  Description of Artificial Sequence: Synthetic oligonucleotide
  Target: LAMA2; (+) strand; PAM type: NRG; PAM sequence: GAG
gaggtcagagagatgaagta

SEQ ID NO: 145064 - DNA, 20 bp, Artificial Sequence
  Description of Artificial Sequence: Synthetic oligonucleotide
  Target: LAMA2; (+) strand; PAM type: NRG; PAM sequence: AAG
gaagtagagcttgtaaaacc

SEQ ID NO: 145065 - DNA, 20 bp, Artificial Sequence
  Description of Artificial Sequence: Synthetic oligonucleotide
  Target: LAMA2; (+) strand; PAM type: NRG; PAM sequence: AGG
aagtagagcttgtaaaacca

SEQ ID NO: 145066 - DNA, 20 bp, Artificial Sequence
  Description of Artificial Sequence: Synthetic oligonucleotide
  Target: LAMA2; (+) strand; PAM type: NRG; PAM sequence: GAG
gtagagcttgtaaaaccaag

SEQ ID NO: 145067 - DNA, 20 bp, Artificial Sequence
  Description of Artificial Sequence: Synthetic oligonucleotide
  Target: LAMA2; (+) strand; PAM type: NRG; PAM sequence: AAG
agcttgtaaaaccaaggagc

SEQ ID NO: 145068 - DNA, 20 bp, Artificial Sequence
  Description of Artificial Sequence: Synthetic oligonucleotide
  Target: LAMA2; (+) strand; PAM type: NRG; PAM sequence: CAG
aaccaaggagcaagcacaca

SEQ ID NO: 145069 - DNA, 20 bp, Artificial Sequence
  Description of Artificial Sequence: Synthetic oligonucleotide
  Target: LAMA2; (+) strand; PAM type: NRG; PAM sequence: TGG
ggagcaagcacacacagttt

SEQ ID NO: 145070 - DNA, 20 bp, Artificial Sequence
  Description of Artificial Sequence: Synthetic oligonucleotide
  Target: LAMA2; (+) strand; PAM type: NRG; PAM sequence: CAG
agcacacacagttttggaca

SEQ ID NO: 145071 - DNA, 20 bp, Artificial Sequence
  Description of Artificial Sequence: Synthetic oligonucleotide
  Target: LAMA2; (+) strand; PAM type: NRG; PAM sequence: GAG
cacacacagttttggacaca

SEQ ID NO: 145072 - DNA, 20 bp, Artificial Sequence
  Description of Artificial Sequence: Synthetic oligonucleotide
  Target: LAMA2; (+) strand; PAM type: NRG; PAM sequence: AAG
tggacacagagatttcccat

SEQ ID NO: 145073 - DNA, 20 bp, Artificial Sequence
  Description of Artificial Sequence: Synthetic oligonucleotide
  Target: LAMA2; (+) strand; PAM type: NRG; PAM sequence: GAG
gacacagagatttcccataa

SEQ ID NO: 145074 - DNA, 20 bp, Artificial Sequence
  Description of Artificial Sequence: Synthetic oligonucleotide
  Target: LAMA2; (+) strand; PAM type: NRG; PAM sequence: TGG
acgttacatattctctttgt

SEQ ID NO: 145075 - DNA, 20 bp, Artificial Sequence
  Description of Artificial Sequence: Synthetic oligonucleotide
  Target: LAMA2; (+) strand; PAM type: NRG; PAM sequence: TGG
tggatgtgaaaataatcttt

SEQ ID NO: 145076 - DNA, 20 bp, Artificial Sequence
  Description of Artificial Sequence: Synthetic oligonucleotide
  Target: LAMA2; (+) strand; PAM type: NRG; PAM sequence: GGG
ggatgtgaaaataatctttt

SEQ ID NO: 145077 - DNA, 20 bp, Artificial Sequence
  Description of Artificial Sequence: Synthetic oligonucleotide
  Target: LAMA2; (+) strand; PAM type: NRG; PAM sequence: TAG
tcttttgggaaatgtgtgct

SEQ ID NO: 145078 - DNA, 20 bp, Artificial Sequence
  Description of Artificial Sequence: Synthetic oligonucleotide
  Target: LAMA2; (+) strand; PAM type: NRG; PAM sequence: TAG
ttagaccttgatgtgatgca

SEQ ID NO: 145079 - DNA, 20 bp, Artificial Sequence
  Description of Artificial Sequence: Synthetic oligonucleotide
  Target: LAMA2; (+) strand; PAM type: NRG; PAM sequence: AGG
tagaccttgatgtgatgcat

SEQ ID NO: 145080 - DNA, 20 bp, Artificial Sequence
  Description of Artificial Sequence: Synthetic oligonucleotide
  Target: LAMA2; (+) strand; PAM type: NRG; PAM sequence: GGG
agaccttgatgtgatgcata

SEQ ID NO: 145081 - DNA, 20 bp, Artificial Sequence
  Description of Artificial Sequence: Synthetic oligonucleotide
  Target: LAMA2; (+) strand; PAM type: NRG; PAM sequence: AAG
tctaattctatttgcttcct

SEQ ID NO: 145082 - DNA, 20 bp, Artificial Sequence
  Description of Artificial Sequence: Synthetic oligonucleotide
  Target: LAMA2; (+) strand; PAM type: NRG; PAM sequence: CAG
atgaaatgttactaaataaa

SEQ ID NO: 145083 - DNA, 20 bp, Artificial Sequence
  Description of Artificial Sequence: Synthetic oligonucleotide
  Target: LAMA2; (+) strand; PAM type: NRG; PAM sequence: CAG
tgttactaaataaacagcgt

SEQ ID NO: 145084 - DNA, 20 bp, Artificial Sequence
  Description of Artificial Sequence: Synthetic oligonucleotide
  Target: LAMA2; (+) strand; PAM type: NRG; PAM sequence: AGG
gttactaaataaacagcgtc

SEQ ID NO: 145085 - DNA, 20 bp, Artificial Sequence
  Description of Artificial Sequence: Synthetic oligonucleotide
  Target: LAMA2; (+) strand; PAM type: NRG; PAM sequence: GGG
ttactaaataaacagcgtca

SEQ ID NO: 145086 - DNA, 20 bp, Artificial Sequence
  Description of Artificial Sequence: Synthetic oligonucleotide
  Target: LAMA2; (+) strand; PAM type: NRG; PAM sequence: AAG
taaataaacagcgtcagggc

SEQ ID NO: 145087 - DNA, 20 bp, Artificial Sequence
  Description of Artificial Sequence: Synthetic oligonucleotide
  Target: LAMA2; (+) strand; PAM type: NRG; PAM sequence: AGG
aaataaacagcgtcagggca

SEQ ID NO: 145088 - DNA, 20 bp, Artificial Sequence
  Description of Artificial Sequence: Synthetic oligonucleotide
  Target: LAMA2; (+) strand; PAM type: NRG; PAM sequence: GAG
ataaacagcgtcagggcaag

SEQ ID NO: 145089 - DNA, 20 bp, Artificial Sequence
  Description of Artificial Sequence: Synthetic oligonucleotide
  Target: LAMA2; (+) strand; PAM type: NRG; PAM sequence: CAG
cagcgtcagggcaaggagtc

SEQ ID NO: 145090 - DNA, 20 bp, Artificial Sequence
  Description of Artificial Sequence: Synthetic oligonucleotide
  Target: LAMA2; (+) strand; PAM type: NRG; PAM sequence: AGG
agcgtcagggcaaggagtcc

SEQ ID NO: 145091 - DNA, 20 bp, Artificial Sequence
  Description of Artificial Sequence: Synthetic oligonucleotide
  Target: LAMA2; (+) strand; PAM type: NRG; PAM sequence: AAG
gcaaggagtccaggtccata

SEQ ID NO: 145092 - DNA, 20 bp, Artificial Sequence
  Description of Artificial Sequence: Synthetic oligonucleotide
  Target: LAMA2; (+) strand; PAM type: NRG; PAM sequence: CAG
tccataaagaaaaacttgca

SEQ ID NO: 145093 - DNA, 20 bp, Artificial Sequence
  Description of Artificial Sequence: Synthetic oligonucleotide
  Target: LAMA2; (+) strand; PAM type: NRG; PAM sequence: TGG
aaagaaaaacttgcacagca

SEQ ID NO: 145094 - DNA, 20 bp, Artificial Sequence
  Description of Artificial Sequence: Synthetic oligonucleotide
  Target: LAMA2; (+) strand; PAM type: NRG; PAM sequence: TGG
atggtgaataaaattaataa

SEQ ID NO: 145095 - DNA, 20 bp, Artificial Sequence
  Description of Artificial Sequence: Synthetic oligonucleotide
  Target: LAMA2; (+) strand; PAM type: NRG; PAM sequence: CAG
aaattaataatggtgtattg

SEQ ID NO: 145096 - DNA, 20 bp, Artificial Sequence
  Description of Artificial Sequence: Synthetic oligonucleotide
  Target: LAMA2; (+) strand; PAM type: NRG; PAM sequence: AAG
gcagattttaaaattgctaa

SEQ ID NO: 145097 - DNA, 20 bp, Artificial Sequence
  Description of Artificial Sequence: Synthetic oligonucleotide
  Target: LAMA2; (+) strand; PAM type: NRG; PAM sequence: GAG
agattttaaaattgctaaaa

SEQ ID NO: 145098 - DNA, 20 bp, Artificial Sequence
  Description of Artificial Sequence: Synthetic oligonucleotide
  Target: LAMA2; (+) strand; PAM type: NRG; PAM sequence: TAG
gctctcatcataaaaaatat

SEQ ID NO: 145099 - DNA, 20 bp, Artificial Sequence
  Description of Artificial Sequence: Synthetic oligonucleotide
  Target: LAMA2; (+) strand; PAM type: NRG; PAM sequence: GAG
cataaaaaatattagtattt

SEQ ID NO: 145100 - DNA, 20 bp, Artificial Sequence
  Description of Artificial Sequence: Synthetic oligonucleotide
  Target: LAMA2; (+) strand; PAM type: NRG; PAM sequence: AGG
ataaaaaatattagtatttg

SEQ ID NO: 145101 - DNA, 20 bp, Artificial Sequence
  Description of Artificial Sequence: Synthetic oligonucleotide
  Target: LAMA2; (+) strand; PAM type: NRG; PAM sequence: GGG
taaaaaatattagtatttga

SEQ ID NO: 145102 - DNA, 20 bp, Artificial Sequence
  Description of Artificial Sequence: Synthetic oligonucleotide
  Target: LAMA2; (+) strand; PAM type: NRG; PAM sequence: TGG
aatattagtatttgagggaa

SEQ ID NO: 145103 - DNA, 20 bp, Artificial Sequence
  Description of Artificial Sequence: Synthetic oligonucleotide
  Target: LAMA2; (+) strand; PAM type: NRG; PAM sequence: GGG
atattagtatttgagggaat

SEQ ID NO: 145104 - DNA, 20 bp, Artificial Sequence
  Description of Artificial Sequence: Synthetic oligonucleotide
  Target: LAMA2; (+) strand; PAM type: NRG; PAM sequence: TAG
tgagggaatgggtatgttac

SEQ ID NO: 145105 - DNA, 20 bp, Artificial Sequence
  Description of Artificial Sequence: Synthetic oligonucleotide
  Target: LAMA2; (+) strand; PAM type: NRG; PAM sequence: TAG
accccataaatttacataat

SEQ ID NO: 145106 - DNA, 20 bp, Artificial Sequence
  Description of Artificial Sequence: Synthetic oligonucleotide
  Target: LAMA2; (+) strand; PAM type: NRG; PAM sequence: AAG
aatttacaataaaaaataaa

SEQ ID NO: 145107 - DNA, 20 bp, Artificial Sequence
  Description of Artificial Sequence: Synthetic oligonucleotide
  Target: LAMA2; (+) strand; PAM type: NRG; PAM sequence: CAG
aaaaagccatcaaaaaacgc

SEQ ID NO: 145108 - DNA, 20 bp, Artificial Sequence
  Description of Artificial Sequence: Synthetic oligonucleotide
  Target: LAMA2; (+) strand; PAM type: NRG; PAM sequence: AGG
aaaagccatcaaaaaacgcc

SEQ ID NO: 145109 - DNA, 20 bp, Artificial Sequence
  Description of Artificial Sequence: Synthetic oligonucleotide
  Target: LAMA2; (+) strand; PAM type: NRG; PAM sequence: CAG
attctgcctgctgctgtttt

SEQ ID NO: 145110 - DNA, 20 bp, Artificial Sequence
  Description of Artificial Sequence: Synthetic oligonucleotide
  Target: LAMA2; (+) strand; PAM type: NRG; PAM sequence: AAG
tttcagtaattaatatcatt

SEQ ID NO: 145111 - DNA, 20 bp, Artificial Sequence
  Description of Artificial Sequence: Synthetic oligonucleotide
  Target: LAMA2; (+) strand; PAM type: NRG; PAM sequence: AAG
agtaattaatatcattaaga

SEQ ID NO: 145112 - DNA, 20 bp, Artificial Sequence
  Description of Artificial Sequence: Synthetic oligonucleotide
  Target: LAMA2; (+) strand; PAM type: NRG; PAM sequence: CAG
ttaatatcattaagaaagca

SEQ ID NO: 145113 - DNA, 20 bp, Artificial Sequence
  Description of Artificial Sequence: Synthetic oligonucleotide
  Target: LAMA2; (+) strand; PAM type: NRG; PAM sequence: AGG
taatatcattaagaaagcac

SEQ ID NO: 145114 - DNA, 20 bp, Artificial Sequence
  Description of Artificial Sequence: Synthetic oligonucleotide
  Target: LAMA2; (+) strand; PAM type: NRG; PAM sequence: CAG
ggttaaatcaaatttcaaca

SEQ ID NO: 145115 - DNA, 20 bp, Artificial Sequence
  Description of Artificial Sequence: Synthetic oligonucleotide
  Target: LAMA2; (+) strand; PAM type: NRG; PAM sequence: CAG
atttcaacacagtatcattt

SEQ ID NO: 145116 - DNA, 20 bp, Artificial Sequence
  Description of Artificial Sequence: Synthetic oligonucleotide
  Target: LAMA2; (+) strand; PAM type: NRG; PAM sequence: GAG
caaattttgtttcttttttt

SEQ ID NO: 145117 - DNA, 20 bp, Artificial Sequence
  Description of Artificial Sequence: Synthetic oligonucleotide
  Target: LAMA2; (+) strand; PAM type: NRG; PAM sequence: CAG
ttgtttctttttttgagaac

SEQ ID NO: 145118 - DNA, 20 bp, Artificial Sequence
  Description of Artificial Sequence: Synthetic oligonucleotide
  Target: LAMA2; (+) strand; PAM type: NRG; PAM sequence: TAG
accagaaaaacaattatact

SEQ ID NO: 145119 - DNA, 20 bp, Artificial Sequence
  Description of Artificial Sequence: Synthetic oligonucleotide
  Target: LAMA2; (+) strand; PAM type: NRG; PAM sequence: TGG
gaaaaacaattatacttaga

SEQ ID NO: 145120 - DNA, 20 bp, Artificial Sequence
  Description of Artificial Sequence: Synthetic oligonucleotide
  Target: LAMA2; (+) strand; PAM type: NRG; PAM sequence: GGG
aaaaacaattatacttagat

SEQ ID NO: 145121 - DNA, 20 bp, Artificial Sequence
  Description of Artificial Sequence: Synthetic oligonucleotide
  Target: LAMA2; (+) strand; PAM type: NRG; PAM sequence: CAG
ggccatctaaaatgtccttc

SEQ ID NO: 145122 - DNA, 20 bp, Artificial Sequence
  Description of Artificial Sequence: Synthetic oligonucleotide
  Target: LAMA2; (+) strand; PAM type: NRG; PAM sequence: TGG
taaaatgtccttccagcttg

SEQ ID NO: 145123 - DNA, 20 bp, Artificial Sequence
  Description of Artificial Sequence: Synthetic oligonucleotide
  Target: LAMA2; (+) strand; PAM type: NRG; PAM sequence: GAG
aaatgtccttccagcttgtg

SEQ ID NO: 145124 - DNA, 20 bp, Artificial Sequence
  Description of Artificial Sequence: Synthetic oligonucleotide
  Target: LAMA2; (+) strand; PAM type: NRG; PAM sequence: TAG
tgtccttccagcttgtggag

SEQ ID NO: 145125 - DNA, 20 bp, Artificial Sequence
  Description of Artificial Sequence: Synthetic oligonucleotide
  Target: LAMA2; (+) strand; PAM type: NRG; PAM sequence: AGG
gtccttccagcttgtggagt

SEQ ID NO: 145126 - DNA, 20 bp, Artificial Sequence
  Description of Artificial Sequence: Synthetic oligonucleotide
  Target: LAMA2; (+) strand; PAM type: NRG; PAM sequence: CAG
tttccatgacatcaaatatc

SEQ ID NO: 145127 - DNA, 20 bp, Artificial Sequence
  Description of Artificial Sequence: Synthetic oligonucleotide
  Target: LAMA2; (+) strand; PAM type: NRG; PAM sequence: TAG
catgacatcaaatatccaga

SEQ ID NO: 145128 - DNA, 20 bp, Artificial Sequence
  Description of Artificial Sequence: Synthetic oligonucleotide
  Target: LAMA2; (+) strand; PAM type: NRG; PAM sequence: CAG
tgatgactaactatattttt

SEQ ID NO: 145129 - DNA, 20 bp, Artificial Sequence
  Description of Artificial Sequence: Synthetic oligonucleotide
  Target: LAMA2; (+) strand; PAM type: NRG; PAM sequence: CAG
ctaactatatttttcagttt

SEQ ID NO: 145130 - DNA, 20 bp, Artificial Sequence
  Description of Artificial Sequence: Synthetic oligonucleotide
  Target: LAMA2; (+) strand; PAM type: NRG; PAM sequence: CAG
ctatatttttcagtttcagc

SEQ ID NO: 145131 - DNA, 20 bp, Artificial Sequence
  Description of Artificial Sequence: Synthetic oligonucleotide
  Target: LAMA2; (+) strand; PAM type: NRG; PAM sequence: TGG
ttcagtttcagccagatgtt

SEQ ID NO: 145132 - DNA, 20 bp, Artificial Sequence
  Description of Artificial Sequence: Synthetic oligonucleotide
  Target: LAMA2; (+) strand; PAM type: NRG; PAM sequence: AAG
ccagatgtttggcatcacgt

SEQ ID NO: 145133 - DNA, 20 bp, Artificial Sequence
  Description of Artificial Sequence: Synthetic oligonucleotide
  Target: LAMA2; (+) strand; PAM type: NRG; PAM sequence: TAG
catcacgtaagataccacct

SEQ ID NO: 145134 - DNA, 20 bp, Artificial Sequence
  Description of Artificial Sequence: Synthetic oligonucleotide
  Target: LAMA2; (+) strand; PAM type: NRG; PAM sequence: GAG
ataaaaataaaatgtttctt

SEQ ID NO: 145135 - DNA, 20 bp, Artificial Sequence
  Description of Artificial Sequence: Synthetic oligonucleotide
  Target: LAMA2; (+) strand; PAM type: NRG; PAM sequence: TGG
aataaaatgtttcttgagtc

SEQ ID NO: 145136 - DNA, 20 bp, Artificial Sequence
  Description of Artificial Sequence: Synthetic oligonucleotide
  Target: LAMA2; (+) strand; PAM type: NRG; PAM sequence: TGG
ttgagtctggcttatcataa

SEQ ID NO: 145137 - DNA, 20 bp, Artificial Sequence
  Description of Artificial Sequence: Synthetic oligonucleotide
  Target: LAMA2; (+) strand; PAM type: NRG; PAM sequence: GGG
tgagtctggcttatcataat

SEQ ID NO: 145138 - DNA, 20 bp, Artificial Sequence
  Description of Artificial Sequence: Synthetic oligonucleotide
  Target: LAMA2; (+) strand; PAM type: NRG; PAM sequence: GGG
gagtctggcttatcataatg

SEQ ID NO: 145139 - DNA, 20 bp, Artificial Sequence
  Description of Artificial Sequence: Synthetic oligonucleotide
  Target: LAMA2; (+) strand; PAM type: NRG; PAM sequence: GAG
gtctggcttatcataatggg

SEQ ID NO: 145140 - DNA, 20 bp, Artificial Sequence
  Description of Artificial Sequence: Synthetic oligonucleotide
  Target: LAMA2; (+) strand; PAM type: NRG; PAM sequence: AGG
tctggcttatcataatgggg

SEQ ID NO: 145141 - DNA, 20 bp, Artificial Sequence
  Description of Artificial Sequence: Synthetic oligonucleotide
  Target: LAMA2; (+) strand; PAM type: NRG; PAM sequence: AAG
ggaggaaactaatatgaatg

SEQ ID NO: 145142 - DNA, 20 bp, Artificial Sequence
  Description of Artificial Sequence: Synthetic oligonucleotide
  Target: LAMA2; (+) strand; PAM type: NRG; PAM sequence: CAG
ggaaactaatatgaatgaag

SEQ ID NO: 145143 - DNA, 20 bp, Artificial Sequence
  Description of Artificial Sequence: Synthetic oligonucleotide
  Target: LAMA2; (+) strand; PAM type: NRG; PAM sequence: TGG
ctaatatgaatgaagcagaa

SEQ ID NO: 145144 - DNA, 20 bp, Artificial Sequence
  Description of Artificial Sequence: Synthetic oligonucleotide
  Target: LAMA2; (+) strand; PAM type: NRG; PAM sequence: TGG
ctcaatgtgtacaattctac

SEQ ID NO: 145145 - DNA, 20 bp, Artificial Sequence
  Description of Artificial Sequence: Synthetic oligonucleotide
  Target: LAMA2; (+) strand; PAM type: NRG; PAM sequence: AAG
atgtgtacaattctactggt

SEQ ID NO: 145146 - DNA, 20 bp, Artificial Sequence
  Description of Artificial Sequence: Synthetic oligonucleotide
  Target: LAMA2; (+) strand; PAM type: NRG; PAM sequence: AAG
ataaaattgtactttaaaat

SEQ ID NO: 145147 - DNA, 20 bp, Artificial Sequence
  Description of Artificial Sequence: Synthetic oligonucleotide
  Target: LAMA2; (+) strand; PAM type: NRG; PAM sequence: AAG
ttcaaacttttacaaataca

SEQ ID NO: 145148 - DNA, 20 bp, Artificial Sequence
  Description of Artificial Sequence: Synthetic oligonucleotide
  Target: LAMA2; (+) strand; PAM type: NRG; PAM sequence: AAG
aacttttacaaatacaaaga

SEQ ID NO: 145149 - DNA, 20 bp, Artificial Sequence
  Description of Artificial Sequence: Synthetic oligonucleotide
  Target: LAMA2; (+) strand; PAM type: NRG; PAM sequence: CAG
tttacaaatacaaagaaagc

SEQ ID NO: 145150 - DNA, 20 bp, Artificial Sequence
  Description of Artificial Sequence: Synthetic oligonucleotide
  Target: LAMA2; (+) strand; PAM type: NRG; PAM sequence: AAG
aaaacccaattttgaatatc

SEQ ID NO: 145151 - DNA, 20 bp, Artificial Sequence
  Description of Artificial Sequence: Synthetic oligonucleotide
  Target: LAMA2; (+) strand; PAM type: NRG; PAM sequence: CAG
caagtgttaaatatgaatat

SEQ ID NO: 145152 - DNA, 20 bp, Artificial Sequence
  Description of Artificial Sequence: Synthetic oligonucleotide
  Target: LAMA2; (+) strand; PAM type: NRG; PAM sequence: AAG
atacaaattttaaaaaaaat

SEQ ID NO: 145153 - DNA, 20 bp, Artificial Sequence
  Description of Artificial Sequence: Synthetic oligonucleotide
  Target: LAMA2; (+) strand; PAM type: NRG; PAM sequence: CAG
aaaaaataagtttgtaaatt

SEQ ID NO: 145154 - DNA, 20 bp, Artificial Sequence
  Description of Artificial Sequence: Synthetic oligonucleotide
  Target: LAMA2; (+) strand; PAM type: NRG; PAM sequence: GAG
aaaataagtttgtaaattca

SEQ ID NO: 145155 - DNA, 20 bp, Artificial Sequence
  Description of Artificial Sequence: Synthetic oligonucleotide
  Target: LAMA2; (+) strand; PAM type: NRG; PAM sequence: CAG
taaattcagagtttatccct

SEQ ID NO: 145156 - DNA, 20 bp, Artificial Sequence
  Description of Artificial Sequence: Synthetic oligonucleotide
  Target: LAMA2; (+) strand; PAM type: NRG; PAM sequence: AAG
tatccctcagatgttatttc

SEQ ID NO: 145157 - DNA, 20 bp, Artificial Sequence
  Description of Artificial Sequence: Synthetic oligonucleotide
  Target: LAMA2; (+) strand; PAM type: NRG; PAM sequence: TAG
gttatttcaagcatatatca

SEQ ID NO: 145158 - DNA, 20 bp, Artificial Sequence
  Description of Artificial Sequence: Synthetic oligonucleotide
  Target: LAMA2; (+) strand; PAM type: NRG; PAM sequence: AAG
atatccttgaatatatattt

SEQ ID NO: 145159 - DNA, 20 bp, Artificial Sequence
  Description of Artificial Sequence: Synthetic oligonucleotide
  Target: LAMA2; (+) strand; PAM type: NRG; PAM sequence: TAG
aatatatatttaagatccga

SEQ ID NO: 145160 - DNA, 20 bp, Artificial Sequence
  Description of Artificial Sequence: Synthetic oligonucleotide
  Target: LAMA2; (+) strand; PAM type: NRG; PAM sequence: AGG
atatatatttaagatccgat

SEQ ID NO: 145161 - DNA, 20 bp, Artificial Sequence
  Description of Artificial Sequence: Synthetic oligonucleotide
  Target: LAMA2; (+) strand; PAM type: NRG; PAM sequence: GGG
tatatatttaagatccgata

SEQ ID NO: 145162 - DNA, 20 bp, Artificial Sequence
  Description of Artificial Sequence: Synthetic oligonucleotide
  Target: LAMA2; (+) strand; PAM type: NRG; PAM sequence: TGG
atttaagatccgatagggac

SEQ ID NO: 145163 - DNA, 20 bp, Artificial Sequence
  Description of Artificial Sequence: Synthetic oligonucleotide
  Target: LAMA2; (+) strand; PAM type: NRG; PAM sequence: GGG
tttaagatccgatagggact

SEQ ID NO: 145164 - DNA, 20 bp, Artificial Sequence
  Description of Artificial Sequence: Synthetic oligonucleotide
  Target: LAMA2; (+) strand; PAM type: NRG; PAM sequence: CAG
gatccgatagggactgggca

SEQ ID NO: 145165 - DNA, 20 bp, Artificial Sequence
  Description of Artificial Sequence: Synthetic oligonucleotide
  Target: LAMA2; (+) strand; PAM type: NRG; PAM sequence: CAG
ctgggcacagttgctcacac

SEQ ID NO: 145166 - DNA, 20 bp, Artificial Sequence
  Description of Artificial Sequence: Synthetic oligonucleotide
  Target: LAMA2; (+) strand; PAM type: NRG; PAM sequence: TGG
agttgctcacaccagcattt

SEQ ID NO: 145167 - DNA, 20 bp, Artificial Sequence
  Description of Artificial Sequence: Synthetic oligonucleotide
  Target: LAMA2; (+) strand; PAM type: NRG; PAM sequence: GGG
gttgctcacaccagcatttt

SEQ ID NO: 145168 - DNA, 20 bp, Artificial Sequence
  Description of Artificial Sequence: Synthetic oligonucleotide
  Target: LAMA2; (+) strand; PAM type: NRG; PAM sequence: GAG
tgctcacaccagcattttgg

SEQ ID NO: 145169 - DNA, 20 bp, Artificial Sequence
  Description of Artificial Sequence: Synthetic oligonucleotide
  Target: LAMA2; (+) strand; PAM type: NRG; PAM sequence: AGG
gctcacaccagcattttggg

SEQ ID NO: 145170 - DNA, 20 bp, Artificial Sequence
  Description of Artificial Sequence: Synthetic oligonucleotide
  Target: LAMA2; (+) strand; PAM type: NRG; PAM sequence: GAG
caccagcattttgggaggct

SEQ ID NO: 145171 - DNA, 20 bp, Artificial Sequence
  Description of Artificial Sequence: Synthetic oligonucleotide
  Target: LAMA2; (+) strand; PAM type: NRG; PAM sequence: AGG
accagcattttgggaggctg

SEQ ID NO: 145172 - DNA, 20 bp, Artificial Sequence
  Description of Artificial Sequence: Synthetic oligonucleotide
  Target: LAMA2; (+) strand; PAM type: NRG; PAM sequence: CAG
agcattttgggaggctgagg

SEQ ID NO: 145173 - DNA, 20 bp, Artificial Sequence
  Description of Artificial Sequence: Synthetic oligonucleotide
  Target: LAMA2; (+) strand; PAM type: NRG; PAM sequence: TGG
ttttgggaggctgaggcaga

SEQ ID NO: 145174 - DNA, 20 bp, Artificial Sequence
  Description of Artificial Sequence: Synthetic oligonucleotide
  Target: LAMA2; (+) strand; PAM type: NRG; PAM sequence: GAG
ctgaggcagatggattgctt

SEQ ID NO: 145175 - DNA, 20 bp, Artificial Sequence
  Description of Artificial Sequence: Synthetic oligonucleotide
  Target: LAMA2; (+) strand; PAM type: NRG; PAM sequence: CAG
gcagatggattgcttgagct

SEQ ID NO: 145176 - DNA, 20 bp, Artificial Sequence
  Description of Artificial Sequence: Synthetic oligonucleotide
  Target: LAMA2; (+) strand; PAM type: NRG; PAM sequence: AGG
cagatggattgcttgagctc

SEQ ID NO: 145177 - DNA, 20 bp, Artificial Sequence
  Description of Artificial Sequence: Synthetic oligonucleotide
  Target: LAMA2; (+) strand; PAM type: NRG; PAM sequence: GAG
gatggattgcttgagctcag

SEQ ID NO: 145178 - DNA, 20 bp, Artificial Sequence
  Description of Artificial Sequence: Synthetic oligonucleotide
  Target: LAMA2; (+) strand; PAM type: NRG; PAM sequence: GAG
ttgcttgagctcaggagttt

SEQ ID NO: 145179 - DNA, 20 bp, Artificial Sequence
  Description of Artificial Sequence: Synthetic oligonucleotide
  Target: LAMA2; (+) strand; PAM type: NRG; PAM sequence: CAG
tgagctcaggagtttgagac

SEQ ID NO: 145180 - DNA, 20 bp, Artificial Sequence
  Description of Artificial Sequence: Synthetic oligonucleotide
  Target: LAMA2; (+) strand; PAM type: NRG; PAM sequence: TGG
tcaggagtttgagaccagaa

SEQ ID NO: 145181 - DNA, 20 bp, Artificial Sequence
  Description of Artificial Sequence: Synthetic oligonucleotide
  Target: LAMA2; (+) strand; PAM type: NRG; PAM sequence: GGG
caggagtttgagaccagaat

SEQ ID NO: 145182 - DNA, 20 bp, Artificial Sequence
  Description of Artificial Sequence: Synthetic oligonucleotide
  Target: LAMA2; (+) strand; PAM type: NRG; PAM sequence: TGG
tgagaccagaatgggcaaca

SEQ ID NO: 145183 - DNA, 20 bp, Artificial Sequence
  Description of Artificial Sequence: Synthetic oligonucleotide
  Target: LAMA2; (+) strand; PAM type: NRG; PAM sequence: CAG
gcaacatggtgaaacgccac

SEQ ID NO: 145184 - DNA, 20 bp, Artificial Sequence
  Description of Artificial Sequence: Synthetic oligonucleotide
  Target: LAMA2; (+) strand; PAM type: NRG; PAM sequence: TAG
caccagaaaaaatgcaaaat

SEQ ID NO: 145185 - DNA, 20 bp, Artificial Sequence
  Description of Artificial Sequence: Synthetic oligonucleotide
  Target: LAMA2; (+) strand; PAM type: NRG; PAM sequence: AAG
gaaaaaatgcaaaattagca

SEQ ID NO: 145186 - DNA, 20 bp, Artificial Sequence
  Description of Artificial Sequence: Synthetic oligonucleotide
  Target: LAMA2; (+) strand; PAM type: NRG; PAM sequence: CGG
aatgcaaaattagcaaagtg

SEQ ID NO: 145187 - DNA, 20 bp, Artificial Sequence
  Description of Artificial Sequence: Synthetic oligonucleotide
  Target: LAMA2; (+) strand; PAM type: NRG; PAM sequence: TGG
gcaaaattagcaaagtgcgg

SEQ ID NO: 145188 - DNA, 20 bp, Artificial Sequence
  Description of Artificial Sequence: Synthetic oligonucleotide
  Target: LAMA2; (+) strand; PAM type: NRG; PAM sequence: TAG
agtgcggtggtgtgcacctg

SEQ ID NO: 145189 - DNA, 20 bp, Artificial Sequence
  Description of Artificial Sequence: Synthetic oligonucleotide
  Target: LAMA2; (+) strand; PAM type: NRG; PAM sequence: CAG
gtggtgtgcacctgtagtcc

SEQ ID NO: 145190 - DNA, 20 bp, Artificial Sequence
  Description of Artificial Sequence: Synthetic oligonucleotide
  Target: LAMA2; (+) strand; PAM type: NRG; PAM sequence: CGG
acctgtagtcccagcgactt

SEQ ID NO: 145191 - DNA, 20 bp, Artificial Sequence
  Description of Artificial Sequence: Synthetic oligonucleotide
  Target: LAMA2; (+) strand; PAM type: NRG; PAM sequence: GAG
ctgtagtcccagcgacttcg

SEQ ID NO: 145192 - DNA, 20 bp, Artificial Sequence
  Description of Artificial Sequence: Synthetic oligonucleotide
  Target: LAMA2; (+) strand; PAM type: NRG; PAM sequence: AGG
tgtagtcccagcgacttcgg

SEQ ID NO: 145193 - DNA, 20 bp, Artificial Sequence
  Description of Artificial Sequence: Synthetic oligonucleotide
  Target: LAMA2; (+) strand; PAM type: NRG; PAM sequence: GAG
tcccagcgacttcggaggtt

SEQ ID NO: 145194 - DNA, 20 bp, Artificial Sequence
  Description of Artificial Sequence: Synthetic oligonucleotide
  Target: LAMA2; (+) strand; PAM type: NRG; PAM sequence: TGG
agcgacttcggaggttgagc

SEQ ID NO: 145195 - DNA, 20 bp, Artificial Sequence
  Description of Artificial Sequence: Synthetic oligonucleotide
  Target: LAMA2; (+) strand; PAM type: NRG; PAM sequence: GGG
gcgacttcggaggttgagct

SEQ ID NO: 145196 - DNA, 20 bp, Artificial Sequence
  Description of Artificial Sequence: Synthetic oligonucleotide
  Target: LAMA2; (+) strand; PAM type: NRG; PAM sequence: GAG
gacttcggaggttgagctgg

SEQ ID NO: 145197 - DNA, 20 bp, Artificial Sequence
  Description of Artificial Sequence: Synthetic oligonucleotide
  Target: LAMA2; (+) strand; PAM type: NRG; PAM sequence: AGG
acttcggaggttgagctggg

SEQ ID NO: 145198 - DNA, 20 bp, Artificial Sequence
  Description of Artificial Sequence: Synthetic oligonucleotide
  Target: LAMA2; (+) strand; PAM type: NRG; PAM sequence: GAG
ttgagctgggaggattgctt

SEQ ID NO: 145199 - DNA, 20 bp, Artificial Sequence
  Description of Artificial Sequence: Synthetic oligonucleotide
  Target: LAMA2; (+) strand; PAM type: NRG; PAM sequence: TGG
ctgggaggattgcttgagcc

SEQ ID NO: 145200 - DNA, 20 bp, Artificial Sequence
  Description of Artificial Sequence: Synthetic oligonucleotide
  Target: LAMA2; (+) strand; PAM type: NRG; PAM sequence: TAG
ggaggattgcttgagcctgg

SEQ ID NO: 145201 - DNA, 20 bp, Artificial Sequence
  Description of Artificial Sequence: Synthetic oligonucleotide
  Target: LAMA2; (+) strand; PAM type: NRG; PAM sequence: AGG
gaggattgcttgagcctggt

SEQ ID NO: 145202 - DNA, 20 bp, Artificial Sequence
  Description of Artificial Sequence: Synthetic oligonucleotide
  Target: LAMA2; (+) strand; PAM type: NRG; PAM sequence: CAG
gattgcttgagcctggtagg

SEQ ID NO: 145203 - DNA, 20 bp, Artificial Sequence
  Description of Artificial Sequence: Synthetic oligonucleotide
  Target: LAMA2; (+) strand; PAM type: NRG; PAM sequence: GAG
ttgcttgagcctggtaggca

SEQ ID NO: 145204 - DNA, 20 bp, Artificial Sequence
  Description of Artificial Sequence: Synthetic oligonucleotide
  Target: LAMA2; (+) strand; PAM type: NRG; PAM sequence: AGG
tgcttgagcctggtaggcag

SEQ ID NO: 145205 - DNA, 20 bp, Artificial Sequence
  Description of Artificial Sequence: Synthetic oligonucleotide
  Target: LAMA2; (+) strand; PAM type: NRG; PAM sequence: CAG
agcctggtaggcagaggttg

SEQ ID NO: 145206 - DNA, 20 bp, Artificial Sequence
  Description of Artificial Sequence: Synthetic oligonucleotide
  Target: LAMA2; (+) strand; PAM type: NRG; PAM sequence: AAG
tggtaggcagaggttgcagt

SEQ ID NO: 145207 - DNA, 20 bp, Artificial Sequence
  Description of Artificial Sequence: Synthetic oligonucleotide
  Target: LAMA2; (+) strand; PAM type: NRG; PAM sequence: GAG
ggcagaggttgcagtaagct

SEQ ID NO: 145208 - DNA, 20 bp, Artificial Sequence
  Description of Artificial Sequence: Synthetic oligonucleotide
  Target: LAMA2; (+) strand; PAM type: NRG; PAM sequence: CAG
gagactgtgctactgcactt

SEQ ID NO: 145209 - DNA, 20 bp, Artificial Sequence
  Description of Artificial Sequence: Synthetic oligonucleotide
  Target: LAMA2; (+) strand; PAM type: NRG; PAM sequence: TGG
tgtgctactgcacttcagcc

SEQ ID NO: 145210 - DNA, 20 bp, Artificial Sequence
  Description of Artificial Sequence: Synthetic oligonucleotide
  Target: LAMA2; (+) strand; PAM type: NRG; PAM sequence: CAG
gcacttcagcctggatgaca

SEQ ID NO: 145211 - DNA, 20 bp, Artificial Sequence
  Description of Artificial Sequence: Synthetic oligonucleotide
  Target: LAMA2; (+) strand; PAM type: NRG; PAM sequence: AGG
cacttcagcctggatgacac

SEQ ID NO: 145212 - DNA, 20 bp, Artificial Sequence
  Description of Artificial Sequence: Synthetic oligonucleotide
  Target: LAMA2; (+) strand; PAM type: NRG; PAM sequence: CAG
ttcagcctggatgacacagg

SEQ ID NO: 145213 - DNA, 20 bp, Artificial Sequence
  Description of Artificial Sequence: Synthetic oligonucleotide
  Target: LAMA2; (+) strand; PAM type: NRG; PAM sequence: AAG
acaggcagaccctgtctcaa

SEQ ID NO: 145214 - DNA, 20 bp, Artificial Sequence
  Description of Artificial Sequence: Synthetic oligonucleotide
  Target: LAMA2; (+) strand; PAM type: NRG; PAM sequence: AAG
accctgtctcaaaagaaaaa

SEQ ID NO: 145215 - DNA, 20 bp, Artificial Sequence
  Description of Artificial Sequence: Synthetic oligonucleotide
  Target: LAMA2; (+) strand; PAM type: NRG; PAM sequence: TAG
aaaaatctgatatgataatt

SEQ ID NO: 145216 - DNA, 20 bp, Artificial Sequence
  Description of Artificial Sequence: Synthetic oligonucleotide
  Target: LAMA2; (+) strand; PAM type: NRG; PAM sequence: TGG
tgatatgataatttagaata

SEQ ID NO: 145217 - DNA, 20 bp, Artificial Sequence
  Description of Artificial Sequence: Synthetic oligonucleotide
  Target: LAMA2; (+) strand; PAM type: NRG; PAM sequence: GGG
gatatgataatttagaatat

SEQ ID NO: 145218 - DNA, 20 bp, Artificial Sequence
  Description of Artificial Sequence: Synthetic oligonucleotide
  Target: LAMA2; (+) strand; PAM type: NRG; PAM sequence: CAG
taatttagaatatgggtcct

SEQ ID NO: 145219 - DNA, 20 bp, Artificial Sequence
  Description of Artificial Sequence: Synthetic oligonucleotide
  Target: LAMA2; (+) strand; PAM type: NRG; PAM sequence: AGG
aatttagaatatgggtcctc

SEQ ID NO: 145220 - DNA, 20 bp, Artificial Sequence
  Description of Artificial Sequence: Synthetic oligonucleotide
  Target: LAMA2; (+) strand; PAM type: NRG; PAM sequence: GGG
atttagaatatgggtcctca

SEQ ID NO: 145221 - DNA, 20 bp, Artificial Sequence
  Description of Artificial Sequence: Synthetic oligonucleotide
  Target: LAMA2; (+) strand; PAM type: NRG; PAM sequence: CAG
gggtcctcagggccataaaa

SEQ ID NO: 145222 - DNA, 20 bp, Artificial Sequence
  Description of Artificial Sequence: Synthetic oligonucleotide
  Target: LAMA2; (+) strand; PAM type: NRG; PAM sequence: TAG
ggccataaaacagcatatgc

SEQ ID NO: 145223 - DNA, 20 bp, Artificial Sequence
  Description of Artificial Sequence: Synthetic oligonucleotide
  Target: LAMA2; (+) strand; PAM type: NRG; PAM sequence: TGG
aacagcatatgctagtttgt

SEQ ID NO: 145224 - DNA, 20 bp, Artificial Sequence
  Description of Artificial Sequence: Synthetic oligonucleotide
  Target: LAMA2; (+) strand; PAM type: NRG; PAM sequence: AAG
ctcaccatgctgtgcactaa

SEQ ID NO: 145225 - DNA, 20 bp, Artificial Sequence
  Description of Artificial Sequence: Synthetic oligonucleotide
  Target: LAMA2; (+) strand; PAM type: NRG; PAM sequence: AAG
actaaaagtaaaaaaatata

SEQ ID NO: 145226 - DNA, 20 bp, Artificial Sequence
  Description of Artificial Sequence: Synthetic oligonucleotide
  Target: LAMA2; (+) strand; PAM type: NRG; PAM sequence: AAG
aagtaaaaaaatataaagta

SEQ ID NO: 145227 - DNA, 20 bp, Artificial Sequence
  Description of Artificial Sequence: Synthetic oligonucleotide
  Target: LAMA2; (+) strand; PAM type: NRG; PAM sequence: GAG
taaagcccattcttttaact

SEQ ID NO: 145228 - DNA, 20 bp, Artificial Sequence
  Description of Artificial Sequence: Synthetic oligonucleotide
  Target: LAMA2; (+) strand; PAM type: NRG; PAM sequence: CAG
acataatctctccattccca

SEQ ID NO: 145229 - DNA, 20 bp, Artificial Sequence
  Description of Artificial Sequence: Synthetic oligonucleotide
  Target: LAMA2; (+) strand; PAM type: NRG; PAM sequence: CAG
ctctccattcccacagccct

SEQ ID NO: 145230 - DNA, 20 bp, Artificial Sequence
  Description of Artificial Sequence: Synthetic oligonucleotide
  Target: LAMA2; (+) strand; PAM type: NRG; PAM sequence: AAG
ctatttcactcactccttct

SEQ ID NO: 145231 - DNA, 20 bp, Artificial Sequence
  Description of Artificial Sequence: Synthetic oligonucleotide
  Target: LAMA2; (+) strand; PAM type: NRG; PAM sequence: AAG
ttgttttacatttcacatgc

SEQ ID NO: 145232 - DNA, 20 bp, Artificial Sequence
  Description of Artificial Sequence: Synthetic oligonucleotide
  Target: LAMA2; (+) strand; PAM type: NRG; PAM sequence: AGG
tgttttacatttcacatgca

SEQ ID NO: 145233 - DNA, 20 bp, Artificial Sequence
  Description of Artificial Sequence: Synthetic oligonucleotide
  Target: LAMA2; (+) strand; PAM type: NRG; PAM sequence: GGG
gttttacatttcacatgcaa

SEQ ID NO: 145234 - DNA, 20 bp, Artificial Sequence
  Description of Artificial Sequence: Synthetic oligonucleotide
  Target: LAMA2; (+) strand; PAM type: NRG; PAM sequence: GAG
tttacatttcacatgcaagg

SEQ ID NO: 145235 - DNA, 20 bp, Artificial Sequence
  Description of Artificial Sequence: Synthetic oligonucleotide
  Target: LAMA2; (+) strand; PAM type: NRG; PAM sequence: CAG
catgtaatctttccaaatga

SEQ ID NO: 145236 - DNA, 20 bp, Artificial Sequence
  Description of Artificial Sequence: Synthetic oligonucleotide
  Target: LAMA2; (+) strand; PAM type: NRG; PAM sequence: AAG
tgacagaattttctttttta

SEQ ID NO: 145237 - DNA, 20 bp, Artificial Sequence
  Description of Artificial Sequence: Synthetic oligonucleotide
  Target: LAMA2; (+) strand; PAM type: NRG; PAM sequence: TAG
ttttcttttttaaagctaaa

SEQ ID NO: 145238 - DNA, 20 bp, Artificial Sequence
  Description of Artificial Sequence: Synthetic oligonucleotide
  Target: LAMA2; (+) strand; PAM type: NRG; PAM sequence: TGG
tttatccattcatctgttga

SEQ ID NO: 145239 - DNA, 20 bp, Artificial Sequence
  Description of Artificial Sequence: Synthetic oligonucleotide
  Target: LAMA2; (+) strand; PAM type: NRG; PAM sequence: CAG
tccattcatctgttgatgga

SEQ ID NO: 145240 - DNA, 20 bp, Artificial Sequence
  Description of Artificial Sequence: Synthetic oligonucleotide
  Target: LAMA2; (+) strand; PAM type: NRG; PAM sequence: AGG
ccattcatctgttgatggac

SEQ ID NO: 145241 - DNA, 20 bp, Artificial Sequence
  Description of Artificial Sequence: Synthetic oligonucleotide
  Target: LAMA2; (+) strand; PAM type: NRG; PAM sequence: TGG
gacaggttgatttcaaaatg

SEQ ID NO: 145242 - DNA, 20 bp, Artificial Sequence
  Description of Artificial Sequence: Synthetic oligonucleotide
  Target: LAMA2; (+) strand; PAM type: NRG; PAM sequence: AAG
ttcaaaatgtggctaatgtg

SEQ ID NO: 145243 - DNA, 20 bp, Artificial Sequence
  Description of Artificial Sequence: Synthetic oligonucleotide
  Target: LAMA2; (+) strand; PAM type: NRG; PAM sequence: CAG
gtggctaatgtgaagtgctg

SEQ ID NO: 145244 - DNA, 20 bp, Artificial Sequence
  Description of Artificial Sequence: Synthetic oligonucleotide
  Target: LAMA2; (+) strand; PAM type: NRG; PAM sequence: TGG
gtgaagtgctgcagtgaaca

SEQ ID NO: 145245 - DNA, 20 bp, Artificial Sequence
  Description of Artificial Sequence: Synthetic oligonucleotide
  Target: LAMA2; (+) strand; PAM type: NRG; PAM sequence: GGG
tgaagtgctgcagtgaacat

SEQ ID NO: 145246 - DNA, 20 bp, Artificial Sequence
  Description of Artificial Sequence: Synthetic oligonucleotide
  Target: LAMA2; (+) strand; PAM type: NRG; PAM sequence: GAG
aagtgctgcagtgaacatgg

SEQ ID NO: 145247 - DNA, 20 bp, Artificial Sequence
  Description of Artificial Sequence: Synthetic oligonucleotide
  Target: LAMA2; (+) strand; PAM type: NRG; PAM sequence: CAG
ctgcagtgaacatgggagtg

SEQ ID NO: 145248 - DNA, 20 bp, Artificial Sequence
  Description of Artificial Sequence: Synthetic oligonucleotide
  Target: LAMA2; (+) strand; PAM type: NRG; PAM sequence: CGG
tgggagtgcagatatctttt

SEQ ID NO: 145249 - DNA, 20 bp, Artificial Sequence
  Description of Artificial Sequence: Synthetic oligonucleotide
  Target: LAMA2; (+) strand; PAM type: NRG; PAM sequence: TGG
aaaactgatttcacatcttt

SEQ ID NO: 145250 - DNA, 20 bp, Artificial Sequence
  Description of Artificial Sequence: Synthetic oligonucleotide
  Target: LAMA2; (+) strand; PAM type: NRG; PAM sequence: GGG
aaactgatttcacatctttt

SEQ ID NO: 145251 - DNA, 20 bp, Artificial Sequence
  Description of Artificial Sequence: Synthetic oligonucleotide
  Target: LAMA2; (+) strand; PAM type: NRG; PAM sequence: TGG
acatcttttgggtaaatacc

SEQ ID NO: 145252 - DNA, 20 bp, Artificial Sequence
  Description of Artificial Sequence: Synthetic oligonucleotide
  Target: LAMA2; (+) strand; PAM type: NRG; PAM sequence: AAG
tcttttgggtaaatacctgg

SEQ ID NO: 145253 - DNA, 20 bp, Artificial Sequence
  Description of Artificial Sequence: Synthetic oligonucleotide
  Target: LAMA2; (+) strand; PAM type: NRG; PAM sequence: GAG
ttgggtaaatacctggaagt

SEQ ID NO: 145254 - DNA, 20 bp, Artificial Sequence
  Description of Artificial Sequence: Synthetic oligonucleotide
  Target: LAMA2; (+) strand; PAM type: NRG; PAM sequence: TAG
atacctggaagtgagattgc

SEQ ID NO: 145255 - DNA, 20 bp, Artificial Sequence
  Description of Artificial Sequence: Synthetic oligonucleotide
  Target: LAMA2; (+) strand; PAM type: NRG; PAM sequence: TAG
tcgcatcgtgattctacttt

SEQ ID NO: 145256 - DNA, 20 bp, Artificial Sequence
  Description of Artificial Sequence: Synthetic oligonucleotide
  Target: LAMA2; (+) strand; PAM type: NRG; PAM sequence: TGG
gattctacttttagttgttt

SEQ ID NO: 145257 - DNA, 20 bp, Artificial Sequence
  Description of Artificial Sequence: Synthetic oligonucleotide
  Target: LAMA2; (+) strand; PAM type: NRG; PAM sequence: TAG
ttgttttggaaaactccatg

SEQ ID NO: 145258 - DNA, 20 bp, Artificial Sequence
  Description of Artificial Sequence: Synthetic oligonucleotide
  Target: LAMA2; (+) strand; PAM type: NRG; PAM sequence: TGG
ctccatgtagttttccataa

SEQ ID NO: 145259 - DNA, 20 bp, Artificial Sequence
  Description of Artificial Sequence: Synthetic oligonucleotide
  Target: LAMA2; (+) strand; PAM type: NRG; PAM sequence: CAG
ctaatttacattcccaccaa

SEQ ID NO: 145260 - DNA, 20 bp, Artificial Sequence
  Description of Artificial Sequence: Synthetic oligonucleotide
  Target: LAMA2; (+) strand; PAM type: NRG; PAM sequence: AAG
cattcccaccaacagtgtac

SEQ ID NO: 145261 - DNA, 20 bp, Artificial Sequence
  Description of Artificial Sequence: Synthetic oligonucleotide
  Target: LAMA2; (+) strand; PAM type: NRG; PAM sequence: AGG
attcccaccaacagtgtaca

SEQ ID NO: 145262 - DNA, 20 bp, Artificial Sequence
  Description of Artificial Sequence: Synthetic oligonucleotide
  Target: LAMA2; (+) strand; PAM type: NRG; PAM sequence: CAG
tttgatattacctattctga

SEQ ID NO: 145263 - DNA, 20 bp, Artificial Sequence
  Description of Artificial Sequence: Synthetic oligonucleotide
  Target: LAMA2; (+) strand; PAM type: NRG; PAM sequence: AGG
ttgatattacctattctgac

SEQ ID NO: 145264 - DNA, 20 bp, Artificial Sequence
  Description of Artificial Sequence: Synthetic oligonucleotide
  Target: LAMA2; (+) strand; PAM type: NRG; PAM sequence: GAG
ttacctattctgacaggtgt

SEQ ID NO: 145265 - DNA, 20 bp, Artificial Sequence
  Description of Artificial Sequence: Synthetic oligonucleotide
  Target: LAMA2; (+) strand; PAM type: NRG; PAM sequence: TAG
atttgcatttccctaatgat

SEQ ID NO: 145266 - DNA, 20 bp, Artificial Sequence
  Description of Artificial Sequence: Synthetic oligonucleotide
  Target: LAMA2; (+) strand; PAM type: NRG; PAM sequence: TGG
tgattttttcatttatctct

SEQ ID NO: 145267 - DNA, 20 bp, Artificial Sequence
  Description of Artificial Sequence: Synthetic oligonucleotide
  Target: LAMA2; (+) strand; PAM type: NRG; PAM sequence: TAG
tttatctcttggccatttgt

SEQ ID NO: 145268 - DNA, 20 bp, Artificial Sequence
  Description of Artificial Sequence: Synthetic oligonucleotide
  Target: LAMA2; (+) strand; PAM type: NRG; PAM sequence: GAG
ccatttgttagtcttctttt

SEQ ID NO: 145269 - DNA, 20 bp, Artificial Sequence
  Description of Artificial Sequence: Synthetic oligonucleotide
  Target: LAMA2; (+) strand; PAM type: NRG; PAM sequence: CAG
tcttttgagcaatgtctatt

SEQ ID NO: 145270 - DNA, 20 bp, Artificial Sequence
  Description of Artificial Sequence: Synthetic oligonucleotide
  Target: LAMA2; (+) strand; PAM type: NRG; PAM sequence: AAG
aatttttttttcttcctctt

SEQ ID NO: 145271 - DNA, 20 bp, Artificial Sequence
  Description of Artificial Sequence: Synthetic oligonucleotide
  Target: LAMA2; (+) strand; PAM type: NRG; PAM sequence: TGG
ttttcttcctcttaagttga

SEQ ID NO: 145272 - DNA, 20 bp, Artificial Sequence
  Description of Artificial Sequence: Synthetic oligonucleotide
  Target: LAMA2; (+) strand; PAM type: NRG; PAM sequence: TGG
tggaactctttatatatttg

SEQ ID NO: 145273 - DNA, 20 bp, Artificial Sequence
  Description of Artificial Sequence: Synthetic oligonucleotide
  Target: LAMA2; (+) strand; PAM type: NRG; PAM sequence: TGG
ttaactttttattgaatata

SEQ ID NO: 145274 - DNA, 20 bp, Artificial Sequence
  Description of Artificial Sequence: Synthetic oligonucleotide
  Target: LAMA2; (+) strand; PAM type: NRG; PAM sequence: TAG
aaatattttctccacattca

SEQ ID NO: 145275 - DNA, 20 bp, Artificial Sequence
  Description of Artificial Sequence: Synthetic oligonucleotide
  Target: LAMA2; (+) strand; PAM type: NRG; PAM sequence: CAG
ttgttgcttcctttgttgtg

SEQ ID NO: 145276 - DNA, 20 bp, Artificial Sequence
  Description of Artificial Sequence: Synthetic oligonucleotide
  Target: LAMA2; (+) strand; PAM type: NRG; PAM sequence: AAG
ttgcttcctttgttgtgcag

SEQ ID NO: 145277 - DNA, 20 bp, Artificial Sequence
  Description of Artificial Sequence: Synthetic oligonucleotide
  Target: LAMA2; (+) strand; PAM type: NRG; PAM sequence: TAG
tttgttgtgcagaagctttt

SEQ ID NO: 145278 - DNA, 20 bp, Artificial Sequence
  Description of Artificial Sequence: Synthetic oligonucleotide
  Target: LAMA2; (+) strand; PAM type: NRG; PAM sequence: TGG
tttgtttgtttttacttttg

SEQ ID NO: 145279 - DNA, 20 bp, Artificial Sequence
  Description of Artificial Sequence: Synthetic oligonucleotide
  Target: LAMA2; (+) strand; PAM type: NRG; PAM sequence: TGG
tacttttgtggcctatactt

SEQ ID NO: 145280 - DNA, 20 bp, Artificial Sequence
  Description of Artificial Sequence: Synthetic oligonucleotide
  Target: LAMA2; (+) strand; PAM type: NRG; PAM sequence: GGG
acttttgtggcctatacttt

SEQ ID NO: 145281 - DNA, 20 bp, Artificial Sequence
  Description of Artificial Sequence: Synthetic oligonucleotide
  Target: LAMA2; (+) strand; PAM type: NRG; PAM sequence: GGG
cttttgtggcctatactttg

SEQ ID NO: 145282 - DNA, 20 bp, Artificial Sequence
  Description of Artificial Sequence: Synthetic oligonucleotide
  Target: LAMA2; (+) strand; PAM type: NRG; PAM sequence: GGG
ttttgtggcctatactttgg

SEQ ID NO: 145283 - DNA, 20 bp, Artificial Sequence
  Description of Artificial Sequence: Synthetic oligonucleotide
  Target: LAMA2; (+) strand; PAM type: NRG; PAM sequence: CAG
aaattcaaaacattattacc

SEQ ID NO: 145284 - DNA, 20 bp, Artificial Sequence
  Description of Artificial Sequence: Synthetic oligonucleotide
  Target: LAMA2; (+) strand; PAM type: NRG; PAM sequence: TAG
ttctcccctgtgttttcttc

SEQ ID NO: 145285 - DNA, 20 bp, Artificial Sequence
  Description of Artificial Sequence: Synthetic oligonucleotide
  Target: LAMA2; (+) strand; PAM type: NRG; PAM sequence: TGG
tgtgttttcttctagcaatt

SEQ ID NO: 145286 - DNA, 20 bp, Artificial Sequence
  Description of Artificial Sequence: Synthetic oligonucleotide
  Target: LAMA2; (+) strand; PAM type: NRG; PAM sequence: GAG
tgttttcttctagcaatttg

SEQ ID NO: 145287 - DNA, 20 bp, Artificial Sequence
  Description of Artificial Sequence: Synthetic oligonucleotide
  Target: LAMA2; (+) strand; PAM type: NRG; PAM sequence: TGG
ttctagcaatttggagttgc

SEQ ID NO: 145288 - DNA, 20 bp, Artificial Sequence
  Description of Artificial Sequence: Synthetic oligonucleotide
  Target: LAMA2; (+) strand; PAM type: NRG; PAM sequence: AAG
gagttgctggccttatactt

SEQ ID NO: 145289 - DNA, 20 bp, Artificial Sequence
  Description of Artificial Sequence: Synthetic oligonucleotide
  Target: LAMA2; (+) strand; PAM type: NRG; PAM sequence: AGG
agttgctggccttatactta

SEQ ID NO: 145290 - DNA, 20 bp, Artificial Sequence
  Description of Artificial Sequence: Synthetic oligonucleotide
  Target: LAMA2; (+) strand; PAM type: NRG; PAM sequence: GAG
gctttaattcatttcgaatt

SEQ ID NO: 145291 - DNA, 20 bp, Artificial Sequence
  Description of Artificial Sequence: Synthetic oligonucleotide
  Target: LAMA2; (+) strand; PAM type: NRG; PAM sequence: AAG
ttttgtatatgatgtgaaat

SEQ ID NO: 145292 - DNA, 20 bp, Artificial Sequence
  Description of Artificial Sequence: Synthetic oligonucleotide
  Target: LAMA2; (+) strand; PAM type: NRG; PAM sequence: AGG
tttgtatatgatgtgaaata

SEQ ID NO: 145293 - DNA, 20 bp, Artificial Sequence
  Description of Artificial Sequence: Synthetic oligonucleotide
  Target: LAMA2; (+) strand; PAM type: NRG; PAM sequence: GGG
ttgtatatgatgtgaaataa

SEQ ID NO: 145294 - DNA, 20 bp, Artificial Sequence
  Description of Artificial Sequence: Synthetic oligonucleotide
  Target: LAMA2; (+) strand; PAM type: NRG; PAM sequence: GGG
tgtatatgatgtgaaataag

SEQ ID NO: 145295 - DNA, 20 bp, Artificial Sequence
  Description of Artificial Sequence: Synthetic oligonucleotide
  Target: LAMA2; (+) strand; PAM type: NRG; PAM sequence: TGG
caattttattcttctgcatg

SEQ ID NO: 145296 - DNA, 20 bp, Artificial Sequence
  Description of Artificial Sequence: Synthetic oligonucleotide
  Target: LAMA2; (+) strand; PAM type: NRG; PAM sequence: TAG
ttcttctgcatgtggatacc

SEQ ID NO: 145297 - DNA, 20 bp, Artificial Sequence
  Description of Artificial Sequence: Synthetic oligonucleotide
  Target: LAMA2; (+) strand; PAM type: NRG; PAM sequence: CAG
ccccaacaccattcattgaa

SEQ ID NO: 145298 - DNA, 20 bp, Artificial Sequence
  Description of Artificial Sequence: Synthetic oligonucleotide
  Target: LAMA2; (+) strand; PAM type: NRG; PAM sequence: TAG
cttttctcattgtgtattct

SEQ ID NO: 145299 - DNA, 20 bp, Artificial Sequence
  Description of Artificial Sequence: Synthetic oligonucleotide
  Target: LAMA2; (+) strand; PAM type: NRG; PAM sequence: TGG
catctttgtcaaaaataaat

SEQ ID NO: 145300 - DNA, 20 bp, Artificial Sequence
  Description of Artificial Sequence: Synthetic oligonucleotide
  Target: LAMA2; (+) strand; PAM type: NRG; PAM sequence: AAG
taaattggttgtacatgcat

SEQ ID NO: 145301 - DNA, 20 bp, Artificial Sequence
  Description of Artificial Sequence: Synthetic oligonucleotide
  Target: LAMA2; (+) strand; PAM type: NRG; PAM sequence: TGG
tacatgcataagttgatttc

SEQ ID NO: 145302 - DNA, 20 bp, Artificial Sequence
  Description of Artificial Sequence: Synthetic oligonucleotide
  Target: LAMA2; (+) strand; PAM type: NRG; PAM sequence: GGG
acatgcataagttgatttct

SEQ ID NO: 145303 - DNA, 20 bp, Artificial Sequence
  Description of Artificial Sequence: Synthetic oligonucleotide
  Target: LAMA2; (+) strand; PAM type: NRG; PAM sequence: CAG
gacctatatttcttttttgc

SEQ ID NO: 145304 - DNA, 20 bp, Artificial Sequence
  Description of Artificial Sequence: Synthetic oligonucleotide
  Target: LAMA2; (+) strand; PAM type: NRG; PAM sequence: TAG
tattttaattaatactacaa

SEQ ID NO: 145305 - DNA, 20 bp, Artificial Sequence
  Description of Artificial Sequence: Synthetic oligonucleotide
  Target: LAMA2; (+) strand; PAM type: NRG; PAM sequence: TAG
ttaatactacaatagctttg

SEQ ID NO: 145306 - DNA, 20 bp, Artificial Sequence
  Description of Artificial Sequence: Synthetic oligonucleotide
  Target: LAMA2; (+) strand; PAM type: NRG; PAM sequence: AAG
tagctttgtagtattgtttg

SEQ ID NO: 145307 - DNA, 20 bp, Artificial Sequence
  Description of Artificial Sequence: Synthetic oligonucleotide
  Target: LAMA2; (+) strand; PAM type: NRG; PAM sequence: AAG
ttgtagtattgtttgaagtc

SEQ ID NO: 145308 - DNA, 20 bp, Artificial Sequence
  Description of Artificial Sequence: Synthetic oligonucleotide
  Target: LAMA2; (+) strand; PAM type: NRG; PAM sequence: TAG
tagtattgtttgaagtcaag

SEQ ID NO: 145309 - DNA, 20 bp, Artificial Sequence
  Description of Artificial Sequence: Synthetic oligonucleotide
  Target: LAMA2; (+) strand; PAM type: NRG; PAM sequence: TGG
atgatgattttgactgttct

SEQ ID NO: 145310 - DNA, 20 bp, Artificial Sequence
  Description of Artificial Sequence: Synthetic oligonucleotide
  Target: LAMA2; (+) strand; PAM type: NRG; PAM sequence: TGG
tgactgttcttggtttgttg

SEQ ID NO: 145311 - DNA, 20 bp, Artificial Sequence
  Description of Artificial Sequence: Synthetic oligonucleotide
  Target: LAMA2; (+) strand; PAM type: NRG; PAM sequence: TAG
aaatgacatcaaaatcttga

SEQ ID NO: 145312 - DNA, 20 bp, Artificial Sequence
  Description of Artificial Sequence: Synthetic oligonucleotide
  Target: LAMA2; (+) strand; PAM type: NRG; PAM sequence: TGG
tgacatcaaaatcttgatag

SEQ ID NO: 145313 - DNA, 20 bp, Artificial Sequence
  Description of Artificial Sequence: Synthetic oligonucleotide
  Target: LAMA2; (+) strand; PAM type: NRG; PAM sequence: TAG
agtggttgcactgaaatctg

SEQ ID NO: 145314 - DNA, 20 bp, Artificial Sequence
  Description of Artificial Sequence: Synthetic oligonucleotide
  Target: LAMA2; (+) strand; PAM type: NRG; PAM sequence: TGG
ctgaaatctgtagattgctt

SEQ ID NO: 145315 - DNA, 20 bp, Artificial Sequence
  Description of Artificial Sequence: Synthetic oligonucleotide
  Target: LAMA2; (+) strand; PAM type: NRG; PAM sequence: GGG
tgaaatctgtagattgcttt

SEQ ID NO: 145316 - DNA, 20 bp, Artificial Sequence
  Description of Artificial Sequence: Synthetic oligonucleotide
  Target: LAMA2; (+) strand; PAM type: NRG; PAM sequence: CAG
attcttccaatccatgaaca

SEQ ID NO: 145317 - DNA, 20 bp, Artificial Sequence
  Description of Artificial Sequence: Synthetic oligonucleotide
  Target: LAMA2; (+) strand; PAM type: NRG; PAM sequence: AGG
ttcttccaatccatgaacac

SEQ ID NO: 145318 - DNA, 20 bp, Artificial Sequence
  Description of Artificial Sequence: Synthetic oligonucleotide
  Target: LAMA2; (+) strand; PAM type: NRG; PAM sequence: CAG
tttctttcatcaacatttta

SEQ ID NO: 145319 - DNA, 20 bp, Artificial Sequence
  Description of Artificial Sequence: Synthetic oligonucleotide
  Target: LAMA2; (+) strand; PAM type: NRG; PAM sequence: CAG
catcaacattttacagtttg

SEQ ID NO: 145320 - DNA, 20 bp, Artificial Sequence
  Description of Artificial Sequence: Synthetic oligonucleotide
  Target: LAMA2; (+) strand; PAM type: NRG; PAM sequence: CAG
tttacagtttgcagtgtatg

SEQ ID NO: 145321 - DNA, 20 bp, Artificial Sequence
  Description of Artificial Sequence: Synthetic oligonucleotide
  Target: LAMA2; (+) strand; PAM type: NRG; PAM sequence: TGG
tgcagatcttttcaactcct

SEQ ID NO: 145322 - DNA, 20 bp, Artificial Sequence
  Description of Artificial Sequence: Synthetic oligonucleotide
  Target: LAMA2; (+) strand; PAM type: NRG; PAM sequence: AAG
ccttggttaaatttattcct

SEQ ID NO: 145323 - DNA, 20 bp, Artificial Sequence
  Description of Artificial Sequence: Synthetic oligonucleotide
  Target: LAMA2; (+) strand; PAM type: NRG; PAM sequence: TAG
taagcatttaatctttttta

SEQ ID NO: 145324 - DNA, 20 bp, Artificial Sequence
  Description of Artificial Sequence: Synthetic oligonucleotide
  Target: LAMA2; (+) strand; PAM type: NRG; PAM sequence: TGG
ttttttatagctattgtaaa

SEQ ID NO: 145325 - DNA, 20 bp, Artificial Sequence
  Description of Artificial Sequence: Synthetic oligonucleotide
  Target: LAMA2; (+) strand; PAM type: NRG; PAM sequence: GGG
tttttatagctattgtaaat

SEQ ID NO: 145326 - DNA, 20 bp, Artificial Sequence
  Description of Artificial Sequence: Synthetic oligonucleotide
  Target: LAMA2; (+) strand; PAM type: NRG; PAM sequence: AAG
aaatgggattttttaactcc

SEQ ID NO: 145327 - DNA, 20 bp, Artificial Sequence
  Description of Artificial Sequence: Synthetic oligonucleotide
  Target: LAMA2; (+) strand; PAM type: NRG; PAM sequence: TAG
ttaactccaagtatatttca

SEQ ID NO: 145328 - DNA, 20 bp, Artificial Sequence
  Description of Artificial Sequence: Synthetic oligonucleotide
  Target: LAMA2; (+) strand; PAM type: NRG; PAM sequence: TGG
ctccaagtatatttcataga

SEQ ID NO: 145329 - DNA, 20 bp, Artificial Sequence
  Description of Artificial Sequence: Synthetic oligonucleotide
  Target: LAMA2; (+) strand; PAM type: NRG; PAM sequence: CAG
tttcatagatggcattgata

SEQ ID NO: 145330 - DNA, 20 bp, Artificial Sequence
  Description of Artificial Sequence: Synthetic oligonucleotide
  Target: LAMA2; (+) strand; PAM type: NRG; PAM sequence: TGG
aaaatcctttattctgtaaa

SEQ ID NO: 145331 - DNA, 20 bp, Artificial Sequence
  Description of Artificial Sequence: Synthetic oligonucleotide
  Target: LAMA2; (+) strand; PAM type: NRG; PAM sequence: TAG
ttctgtaaatggcatttata

SEQ ID NO: 145332 - DNA, 20 bp, Artificial Sequence
  Description of Artificial Sequence: Synthetic oligonucleotide
  Target: LAMA2; (+) strand; PAM type: NRG; PAM sequence: TGG
atatagtaaaatcttttcca

SEQ ID NO: 145333 - DNA, 20 bp, Artificial Sequence
  Description of Artificial Sequence: Synthetic oligonucleotide
  Target: LAMA2; (+) strand; PAM type: NRG; PAM sequence: TAG
tttccatggtgaatgattat

SEQ ID NO: 145334 - DNA, 20 bp, Artificial Sequence
  Description of Artificial Sequence: Synthetic oligonucleotide
  Target: LAMA2; (+) strand; PAM type: NRG; PAM sequence: AAG
ggtgaatgattattagtctt

SEQ ID NO: 145335 - DNA, 20 bp, Artificial Sequence
  Description of Artificial Sequence: Synthetic oligonucleotide
  Target: LAMA2; (+) strand; PAM type: NRG; PAM sequence: AAG
ttagtcttaagtgaaataca

SEQ ID NO: 145336 - DNA, 20 bp, Artificial Sequence
  Description of Artificial Sequence: Synthetic oligonucleotide
  Target: LAMA2; (+) strand; PAM type: NRG; PAM sequence: AAG
atacaaagatttgattttat

SEQ ID NO: 145337 - DNA, 20 bp, Artificial Sequence
  Description of Artificial Sequence: Synthetic oligonucleotide
  Target: LAMA2; (+) strand; PAM type: NRG; PAM sequence: AAG
ttataagtgaaatatttctt

SEQ ID NO: 145338 - DNA, 20 bp, Artificial Sequence
  Description of Artificial Sequence: Synthetic oligonucleotide
  Target: LAMA2; (+) strand; PAM type: NRG; PAM sequence: TGG
tttcttaagtaaactatcct

SEQ ID NO: 145339 - DNA, 20 bp, Artificial Sequence
  Description of Artificial Sequence: Synthetic oligonucleotide
  Target: LAMA2; (+) strand; PAM type: NRG; PAM sequence: CAG
agtaaactatccttggctgc

SEQ ID NO: 145340 - DNA, 20 bp, Artificial Sequence
  Description of Artificial Sequence: Synthetic oligonucleotide
  Target: LAMA2; (+) strand; PAM type: NRG; PAM sequence: AAG
gctgccagtttctttcttaa

SEQ ID NO: 145341 - DNA, 20 bp, Artificial Sequence
  Description of Artificial Sequence: Synthetic oligonucleotide
  Target: LAMA2; (+) strand; PAM type: NRG; PAM sequence: CAG
cttaaaagtttaatatttcc

SEQ ID NO: 145342 - DNA, 20 bp, Artificial Sequence
  Description of Artificial Sequence: Synthetic oligonucleotide
  Target: LAMA2; (+) strand; PAM type: NRG; PAM sequence: TGG
tatttcccagcaacttcctg

SEQ ID NO: 145343 - DNA, 20 bp, Artificial Sequence
  Description of Artificial Sequence: Synthetic oligonucleotide
  Target: LAMA2; (+) strand; PAM type: NRG; PAM sequence: AAG
acttcctgtggttgactctt

SEQ ID NO: 145344 - DNA, 20 bp, Artificial Sequence
  Description of Artificial Sequence: Synthetic oligonucleotide
  Target: LAMA2; (+) strand; PAM type: NRG; PAM sequence: AGG
cttcctgtggttgactctta

SEQ ID NO: 145345 - DNA, 20 bp, Artificial Sequence
  Description of Artificial Sequence: Synthetic oligonucleotide
  Target: LAMA2; (+) strand; PAM type: NRG; PAM sequence: AAG
gttgactcttaaggatactg

SEQ ID NO: 145346 - DNA, 20 bp, Artificial Sequence
  Description of Artificial Sequence: Synthetic oligonucleotide
  Target: LAMA2; (+) strand; PAM type: NRG; PAM sequence: AAG
cttaaggatactgaagctga

SEQ ID NO: 145347 - DNA, 20 bp, Artificial Sequence
  Description of Artificial Sequence: Synthetic oligonucleotide
  Target: LAMA2; (+) strand; PAM type: NRG; PAM sequence: AGG
ttaaggatactgaagctgaa

SEQ ID NO: 145348 - DNA, 20 bp, Artificial Sequence
  Description of Artificial Sequence: Synthetic oligonucleotide
  Target: LAMA2; (+) strand; PAM type: NRG; PAM sequence: GAG
aaggatactgaagctgaaag

SEQ ID NO: 145349 - DNA, 20 bp, Artificial Sequence
  Description of Artificial Sequence: Synthetic oligonucleotide
  Target: LAMA2; (+) strand; PAM type: NRG; PAM sequence: CAG
tactgaagctgaaaggagcc

SEQ ID NO: 145350 - DNA, 20 bp, Artificial Sequence
  Description of Artificial Sequence: Synthetic oligonucleotide
  Target: LAMA2; (+) strand; PAM type: NRG; PAM sequence: TGG
tgaaaggagcccagcaattc

SEQ ID NO: 145351 - DNA, 20 bp, Artificial Sequence
  Description of Artificial Sequence: Synthetic oligonucleotide
  Target: LAMA2; (+) strand; PAM type: NRG; PAM sequence: GGG
gaaaggagcccagcaattct

SEQ ID NO: 145352 - DNA, 20 bp, Artificial Sequence
  Description of Artificial Sequence: Synthetic oligonucleotide
  Target: LAMA2; (+) strand; PAM type: NRG; PAM sequence: TGG
agcccagcaattctgggtga

SEQ ID NO: 145353 - DNA, 20 bp, Artificial Sequence
  Description of Artificial Sequence: Synthetic oligonucleotide
  Target: LAMA2; (+) strand; PAM type: NRG; PAM sequence: GAG
cccagcaattctgggtgatg

SEQ ID NO: 145354 - DNA, 20 bp, Artificial Sequence
  Description of Artificial Sequence: Synthetic oligonucleotide
  Target: LAMA2; (+) strand; PAM type: NRG; PAM sequence: AGG
ccagcaattctgggtgatgg

SEQ ID NO: 145355 - DNA, 20 bp, Artificial Sequence
  Description of Artificial Sequence: Synthetic oligonucleotide
  Target: LAMA2; (+) strand; PAM type: NRG; PAM sequence: TGG
tgggtgatggaggaaatacg

SEQ ID NO: 145356 - DNA, 20 bp, Artificial Sequence
  Description of Artificial Sequence: Synthetic oligonucleotide
  Target: LAMA2; (+) strand; PAM type: NRG; PAM sequence: CAG
tgatggaggaaatacgtggc

SEQ ID NO: 145357 - DNA, 20 bp, Artificial Sequence
  Description of Artificial Sequence: Synthetic oligonucleotide
  Target: LAMA2; (+) strand; PAM type: NRG; PAM sequence: AGG
gatggaggaaatacgtggcc

SEQ ID NO: 145358 - DNA, 20 bp, Artificial Sequence
  Description of Artificial Sequence: Synthetic oligonucleotide
  Target: LAMA2; (+) strand; PAM type: NRG; PAM sequence: TAG
aataatatttgtttttgaac

SEQ ID NO: 145359 - DNA, 20 bp, Artificial Sequence
  Description of Artificial Sequence: Synthetic oligonucleotide
  Target: LAMA2; (+) strand; PAM type: NRG; PAM sequence: AAG
agtcttcctcatgccattta

SEQ ID NO: 145360 - DNA, 20 bp, Artificial Sequence
  Description of Artificial Sequence: Synthetic oligonucleotide
  Target: LAMA2; (+) strand; PAM type: NRG; PAM sequence: CAG
tgccatttaaagaaaaattt

SEQ ID NO: 145361 - DNA, 20 bp, Artificial Sequence
  Description of Artificial Sequence: Synthetic oligonucleotide
  Target: LAMA2; (+) strand; PAM type: NRG; PAM sequence: AGG
gccatttaaagaaaaatttc

SEQ ID NO: 145362 - DNA, 20 bp, Artificial Sequence
  Description of Artificial Sequence: Synthetic oligonucleotide
  Target: LAMA2; (+) strand; PAM type: NRG; PAM sequence: AAG
taaagaaaaatttcaggaat

SEQ ID NO: 145363 - DNA, 20 bp, Artificial Sequence
  Description of Artificial Sequence: Synthetic oligonucleotide
  Target: LAMA2; (+) strand; PAM type: NRG; PAM sequence: AGG
aaagaaaaatttcaggaata

SEQ ID NO: 145364 - DNA, 20 bp, Artificial Sequence
  Description of Artificial Sequence: Synthetic oligonucleotide
  Target: LAMA2; (+) strand; PAM type: NRG; PAM sequence: CAG
ttcaggaataaggaaaaaca

SEQ ID NO: 145365 - DNA, 20 bp, Artificial Sequence
  Description of Artificial Sequence: Synthetic oligonucleotide
  Target: LAMA2; (+) strand; PAM type: NRG; PAM sequence: AGG
tcaggaataaggaaaaacac

SEQ ID NO: 145366 - DNA, 20 bp, Artificial Sequence
  Description of Artificial Sequence: Synthetic oligonucleotide
  Target: LAMA2; (+) strand; PAM type: NRG; PAM sequence: GAG
aggaataaggaaaaacacag

SEQ ID NO: 145367 - DNA, 20 bp, Artificial Sequence
  Description of Artificial Sequence: Synthetic oligonucleotide
  Target: LAMA2; (+) strand; PAM type: NRG; PAM sequence: TGG
aaaacacaggagtattaaaa

SEQ ID NO: 145368 - DNA, 20 bp, Artificial Sequence
  Description of Artificial Sequence: Synthetic oligonucleotide
  Target: LAMA2; (+) strand; PAM type: NRG; PAM sequence: GAG
aacacaggagtattaaaatg

SEQ ID NO: 145369 - DNA, 20 bp, Artificial Sequence
  Description of Artificial Sequence: Synthetic oligonucleotide
  Target: LAMA2; (+) strand; PAM type: NRG; PAM sequence: CAG
aacatcaatattgttataaa

SEQ ID NO: 145370 - DNA, 20 bp, Artificial Sequence
  Description of Artificial Sequence: Synthetic oligonucleotide
  Target: LAMA2; (+) strand; PAM type: NRG; PAM sequence: GAG
catcaatattgttataaaca

SEQ ID NO: 145371 - DNA, 20 bp, Artificial Sequence
  Description of Artificial Sequence: Synthetic oligonucleotide
  Target: LAMA2; (+) strand; PAM type: NRG; PAM sequence: AAG
ccccaaaataattattttga

SEQ ID NO: 145372 - DNA, 20 bp, Artificial Sequence
  Description of Artificial Sequence: Synthetic oligonucleotide
  Target: LAMA2; (+) strand; PAM type: NRG; PAM sequence: GAG
ccaaaataattattttgaaa

SEQ ID NO: 145373 - DNA, 20 bp, Artificial Sequence
  Description of Artificial Sequence: Synthetic oligonucleotide
  Target: LAMA2; (+) strand; PAM type: NRG; PAM sequence: TGG
tcatttgaatttataaactc

SEQ ID NO: 145374 - DNA, 20 bp, Artificial Sequence
  Description of Artificial Sequence: Synthetic oligonucleotide
  Target: LAMA2; (+) strand; PAM type: NRG; PAM sequence: AAG
caaatttgtatttttacttg

SEQ ID NO: 145375 - DNA, 20 bp, Artificial Sequence
  Description of Artificial Sequence: Synthetic oligonucleotide
  Target: LAMA2; (+) strand; PAM type: NRG; PAM sequence: AGG
aaatttgtatttttacttga

SEQ ID NO: 145376 - DNA, 20 bp, Artificial Sequence
  Description of Artificial Sequence: Synthetic oligonucleotide
  Target: LAMA2; (+) strand; PAM type: NRG; PAM sequence: AAG
tgtatttttacttgaaggaa

SEQ ID NO: 145377 - DNA, 20 bp, Artificial Sequence
  Description of Artificial Sequence: Synthetic oligonucleotide
  Target: LAMA2; (+) strand; PAM type: NRG; PAM sequence: CAG
atttttacttgaaggaaaag

SEQ ID NO: 145378 - DNA, 20 bp, Artificial Sequence
  Description of Artificial Sequence: Synthetic oligonucleotide
  Target: LAMA2; (+) strand; PAM type: NRG; PAM sequence: TGG
tgaaggaaaagcagcattgc

SEQ ID NO: 145379 - DNA, 20 bp, Artificial Sequence
  Description of Artificial Sequence: Synthetic oligonucleotide
  Target: LAMA2; (+) strand; PAM type: NRG; PAM sequence: TAG
aggaaaagcagcattgctgg

SEQ ID NO: 145380 - DNA, 20 bp, Artificial Sequence
  Description of Artificial Sequence: Synthetic oligonucleotide
  Target: LAMA2; (+) strand; PAM type: NRG; PAM sequence: CAG
cacatgtgcttctgtacata

SEQ ID NO: 145381 - DNA, 20 bp, Artificial Sequence
  Description of Artificial Sequence: Synthetic oligonucleotide
  Target: LAMA2; (+) strand; PAM type: NRG; PAM sequence: GAG
acatacagattgtacacatt

SEQ ID NO: 145382 - DNA, 20 bp, Artificial Sequence
  Description of Artificial Sequence: Synthetic oligonucleotide
  Target: LAMA2; (+) strand; PAM type: NRG; PAM sequence: AGG
catacagattgtacacattg

SEQ ID NO: 145383 - DNA, 20 bp, Artificial Sequence
  Description of Artificial Sequence: Synthetic oligonucleotide
  Target: LAMA2; (+) strand; PAM type: NRG; PAM sequence: AAG
gaggatgatgtttatgccat

SEQ ID NO: 145384 - DNA, 20 bp, Artificial Sequence
  Description of Artificial Sequence: Synthetic oligonucleotide
  Target: LAMA2; (+) strand; PAM type: NRG; PAM sequence: GAG
ggatgatgtttatgccataa

SEQ ID NO: 145385 - DNA, 20 bp, Artificial Sequence
  Description of Artificial Sequence: Synthetic oligonucleotide
  Target: LAMA2; (+) strand; PAM type: NRG; PAM sequence: CAG
atcatttcctctctttttat

SEQ ID NO: 145386 - DNA, 20 bp, Artificial Sequence
  Description of Artificial Sequence: Synthetic oligonucleotide
  Target: LAMA2; (+) strand; PAM type: NRG; PAM sequence: AGG
tcatttcctctctttttatc

SEQ ID NO: 145387 - DNA, 20 bp, Artificial Sequence
  Description of Artificial Sequence: Synthetic oligonucleotide
  Target: LAMA2; (+) strand; PAM type: NRG; PAM sequence: GGG
catttcctctctttttatca

SEQ ID NO: 145388 - DNA, 20 bp, Artificial Sequence
  Description of Artificial Sequence: Synthetic oligonucleotide
  Target: LAMA2; (+) strand; PAM type: NRG; PAM sequence: TAG
ccattacatcatttctcaaa

SEQ ID NO: 145389 - DNA, 20 bp, Artificial Sequence
  Description of Artificial Sequence: Synthetic oligonucleotide
  Target: LAMA2; (+) strand; PAM type: NRG; PAM sequence: TAG
tttctcaaatagaccactgt

SEQ ID NO: 145390 - DNA, 20 bp, Artificial Sequence
  Description of Artificial Sequence: Synthetic oligonucleotide
  Target: LAMA2; (+) strand; PAM type: NRG; PAM sequence: AGG
ttctcaaatagaccactgtt

SEQ ID NO: 145391 - DNA, 20 bp, Artificial Sequence
  Description of Artificial Sequence: Synthetic oligonucleotide
  Target: LAMA2; (+) strand; PAM type: NRG; PAM sequence: AAG
tcaaatagaccactgttagg

SEQ ID NO: 145392 - DNA, 20 bp, Artificial Sequence
  Description of Artificial Sequence: Synthetic oligonucleotide
  Target: LAMA2; (+) strand; PAM type: NRG; PAM sequence: TAG
aatagaccactgttaggaag

SEQ ID NO: 145393 - DNA, 20 bp, Artificial Sequence
  Description of Artificial Sequence: Synthetic oligonucleotide
  Target: LAMA2; (+) strand; PAM type: NRG; PAM sequence: AGG
atagaccactgttaggaagt

SEQ ID NO: 145394 - DNA, 20 bp, Artificial Sequence
  Description of Artificial Sequence: Synthetic oligonucleotide
  Target: LAMA2; (+) strand; PAM type: NRG; PAM sequence: GGG
tagaccactgttaggaagta

SEQ ID NO: 145395 - DNA, 20 bp, Artificial Sequence
  Description of Artificial Sequence: Synthetic oligonucleotide
  Target: LAMA2; (+) strand; PAM type: NRG; PAM sequence: AAG
gttaggaagtagggatatat

SEQ ID NO: 145396 - DNA, 20 bp, Artificial Sequence
  Description of Artificial Sequence: Synthetic oligonucleotide
  Target: LAMA2; (+) strand; PAM type: NRG; PAM sequence: AAG
aagtagggatatataagtat

SEQ ID NO: 145397 - DNA, 20 bp, Artificial Sequence
  Description of Artificial Sequence: Synthetic oligonucleotide
  Target: LAMA2; (+) strand; PAM type: NRG; PAM sequence: AGG
agtagggatatataagtata

SEQ ID NO: 145398 - DNA, 20 bp, Artificial Sequence
  Description of Artificial Sequence: Synthetic oligonucleotide
  Target: LAMA2; (+) strand; PAM type: NRG; PAM sequence: GGG
gtagggatatataagtataa

SEQ ID NO: 145399 - DNA, 20 bp, Artificial Sequence
  Description of Artificial Sequence: Synthetic oligonucleotide
  Target: LAMA2; (+) strand; PAM type: NRG; PAM sequence: GAG
agggatatataagtataagg

SEQ ID NO: 145400 - DNA, 20 bp, Artificial Sequence
  Description of Artificial Sequence: Synthetic oligonucleotide
  Target: LAMA2; (+) strand; PAM type: NRG; PAM sequence: AGG
gggatatataagtataaggg

SEQ ID NO: 145401 - DNA, 20 bp, Artificial Sequence
  Description of Artificial Sequence: Synthetic oligonucleotide
  Target: LAMA2; (+) strand; PAM type: NRG; PAM sequence: GAG
gatatataagtataagggag

SEQ ID NO: 145402 - DNA, 20 bp, Artificial Sequence
  Description of Artificial Sequence: Synthetic oligonucleotide
  Target: LAMA2; (+) strand; PAM type: NRG; PAM sequence: AAG
aagtataagggaggagactc

SEQ ID NO: 145403 - DNA, 20 bp, Artificial Sequence
  Description of Artificial Sequence: Synthetic oligonucleotide
  Target: LAMA2; (+) strand; PAM type: NRG; PAM sequence: CAG
ggaggagactcaagtaaaac

SEQ ID NO: 145404 - DNA, 20 bp, Artificial Sequence
  Description of Artificial Sequence: Synthetic oligonucleotide
  Target: LAMA2; (+) strand; PAM type: NRG; PAM sequence: GAG
aggagactcaagtaaaacca

SEQ ID NO: 145405 - DNA, 20 bp, Artificial Sequence
  Description of Artificial Sequence: Synthetic oligonucleotide
  Target: LAMA2; (+) strand; PAM type: NRG; PAM sequence: TGG
agactcaagtaaaaccagag

SEQ ID NO: 145406 - DNA, 20 bp, Artificial Sequence
  Description of Artificial Sequence: Synthetic oligonucleotide
  Target: LAMA2; (+) strand; PAM type: NRG; PAM sequence: GAG
tggtgcatatcctacaaatt

SEQ ID NO: 145407 - DNA, 20 bp, Artificial Sequence
  Description of Artificial Sequence: Synthetic oligonucleotide
  Target: LAMA2; (+) strand; PAM type: NRG; PAM sequence: AAG
atatcctacaaattgagaat

SEQ ID NO: 145408 - DNA, 20 bp, Artificial Sequence
  Description of Artificial Sequence: Synthetic oligonucleotide
  Target: LAMA2; (+) strand; PAM type: NRG; PAM sequence: AGG
tatcctacaaattgagaata

SEQ ID NO: 145409 - DNA, 20 bp, Artificial Sequence
  Description of Artificial Sequence: Synthetic oligonucleotide
  Target: LAMA2; (+) strand; PAM type: NRG; PAM sequence: TGG
tcttttaaaataacatattt

SEQ ID NO: 145410 - DNA, 20 bp, Artificial Sequence
  Description of Artificial Sequence: Synthetic oligonucleotide
  Target: LAMA2; (+) strand; PAM type: NRG; PAM sequence: CGG
ttaaaataacatattttggc

SEQ ID NO: 145411 - DNA, 20 bp, Artificial Sequence
  Description of Artificial Sequence: Synthetic oligonucleotide
  Target: LAMA2; (+) strand; PAM type: NRG; PAM sequence: GGG
taaaataacatattttggcc

SEQ ID NO: 145412 - DNA, 20 bp, Artificial Sequence
  Description of Artificial Sequence: Synthetic oligonucleotide
  Target: LAMA2; (+) strand; PAM type: NRG; PAM sequence: CGG
taacatattttggccgggcg

SEQ ID NO: 145413 - DNA, 20 bp, Artificial Sequence
  Description of Artificial Sequence: Synthetic oligonucleotide
  Target: LAMA2; (+) strand; PAM type: NRG; PAM sequence: TGG
catattttggccgggcgcgg

SEQ ID NO: 145414 - DNA, 20 bp, Artificial Sequence
  Description of Artificial Sequence: Synthetic oligonucleotide
  Target: LAMA2; (+) strand; PAM type: NRG; PAM sequence: CAG
gtggctcacgcctgtaatcc

SEQ ID NO: 145415 - DNA, 20 bp, Artificial Sequence
  Description of Artificial Sequence: Synthetic oligonucleotide
  Target: LAMA2; (+) strand; PAM type: NRG; PAM sequence: TGG
cgcctgtaatcccagcactt

SEQ ID NO: 145416 - DNA, 20 bp, Artificial Sequence
  Description of Artificial Sequence: Synthetic oligonucleotide
  Target: LAMA2; (+) strand; PAM type: NRG; PAM sequence: GGG
gcctgtaatcccagcacttt

SEQ ID NO: 145417 - DNA, 20 bp, Artificial Sequence
  Description of Artificial Sequence: Synthetic oligonucleotide
  Target: LAMA2; (+) strand; PAM type: NRG; PAM sequence: GAG
ctgtaatcccagcactttgg

SEQ ID NO: 145418 - DNA, 20 bp, Artificial Sequence
  Description of Artificial Sequence: Synthetic oligonucleotide
  Target: LAMA2; (+) strand; PAM type: NRG; PAM sequence: AGG
tgtaatcccagcactttggg

SEQ ID NO: 145419 - DNA, 20 bp, Artificial Sequence
  Description of Artificial Sequence: Synthetic oligonucleotide
  Target: LAMA2; (+) strand; PAM type: NRG; PAM sequence: GAG
tcccagcactttgggaggcc

SEQ ID NO: 145420 - DNA, 20 bp, Artificial Sequence
  Description of Artificial Sequence: Synthetic oligonucleotide
  Target: LAMA2; (+) strand; PAM type: NRG; PAM sequence: AGG
cccagcactttgggaggccg

SEQ ID NO: 145421 - DNA, 20 bp, Artificial Sequence
  Description of Artificial Sequence: Synthetic oligonucleotide
  Target: LAMA2; (+) strand; PAM type: NRG; PAM sequence: CGG
agcactttgggaggccgagg

SEQ ID NO: 145422 - DNA, 20 bp, Artificial Sequence
  Description of Artificial Sequence: Synthetic oligonucleotide
  Target: LAMA2; (+) strand; PAM type: NRG; PAM sequence: GGG
gcactttgggaggccgaggc

SEQ ID NO: 145423 - DNA, 20 bp, Artificial Sequence
  Description of Artificial Sequence: Synthetic oligonucleotide
  Target: LAMA2; (+) strand; PAM type: NRG; PAM sequence: CGG
ctttgggaggccgaggcggg

SEQ ID NO: 145424 - DNA, 20 bp, Artificial Sequence
  Description of Artificial Sequence: Synthetic oligonucleotide
  Target: LAMA2; (+) strand; PAM type: NRG; PAM sequence: GAG
ggccgaggcgggcggatcac

SEQ ID NO: 145425 - DNA, 20 bp, Artificial Sequence
  Description of Artificial Sequence: Synthetic oligonucleotide
  Target: LAMA2; (+) strand; PAM type: NRG; PAM sequence: AGG
gccgaggcgggcggatcacg

SEQ ID NO: 145426 - DNA, 20 bp, Artificial Sequence
  Description of Artificial Sequence: Synthetic oligonucleotide
  Target: LAMA2; (+) strand; PAM type: NRG; PAM sequence: CAG
aggcgggcggatcacgaggt

SEQ ID NO: 145427 - DNA, 20 bp, Artificial Sequence
  Description of Artificial Sequence: Synthetic oligonucleotide
  Target: LAMA2; (+) strand; PAM type: NRG; PAM sequence: AGG
ggcgggcggatcacgaggtc

SEQ ID NO: 145428 - DNA, 20 bp, Artificial Sequence
  Description of Artificial Sequence: Synthetic oligonucleotide
  Target: LAMA2; (+) strand; PAM type: NRG; PAM sequence: GAG
cgggcggatcacgaggtcag

SEQ ID NO: 145429 - DNA, 20 bp, Artificial Sequence
  Description of Artificial Sequence: Synthetic oligonucleotide
  Target: LAMA2; (+) strand; PAM type: NRG; PAM sequence: GAG
gatcacgaggtcaggagatc

SEQ ID NO: 145430 - DNA, 20 bp, Artificial Sequence
  Description of Artificial Sequence: Synthetic oligonucleotide
  Target: LAMA2; (+) strand; PAM type: NRG; PAM sequence: CGG
tcaggagatcgagaccatcc

SEQ ID NO: 145431 - DNA, 20 bp, Artificial Sequence
  Description of Artificial Sequence: Synthetic oligonucleotide
  Target: LAMA2; (+) strand; PAM type: NRG; PAM sequence: CGG
cgagaccatcccggctaaaa

SEQ ID NO: 145432 - DNA, 20 bp, Artificial Sequence
  Description of Artificial Sequence: Synthetic oligonucleotide
  Target: LAMA2; (+) strand; PAM type: NRG; PAM sequence: TAG
ctactaaaaatacaaaaaat

SEQ ID NO: 145433 - DNA, 20 bp, Artificial Sequence
  Description of Artificial Sequence: Synthetic oligonucleotide
  Target: LAMA2; (+) strand; PAM type: NRG; PAM sequence: CAG
taaaaatacaaaaaattagc

SEQ ID NO: 145434 - DNA, 20 bp, Artificial Sequence
  Description of Artificial Sequence: Synthetic oligonucleotide
  Target: LAMA2; (+) strand; PAM type: NRG; PAM sequence: AGG
aaaaatacaaaaaattagcc

SEQ ID NO: 145435 - DNA, 20 bp, Artificial Sequence
  Description of Artificial Sequence: Synthetic oligonucleotide
  Target: LAMA2; (+) strand; PAM type: NRG; PAM sequence: TAG
tacaaaaaattagccaggcg

SEQ ID NO: 145436 - DNA, 20 bp, Artificial Sequence
  Description of Artificial Sequence: Synthetic oligonucleotide
  Target: LAMA2; (+) strand; PAM type: NRG; PAM sequence: TGG
aaaaaattagccaggcgtag

SEQ ID NO: 145437 - DNA, 20 bp, Artificial Sequence
  Description of Artificial Sequence: Synthetic oligonucleotide
  Target: LAMA2; (+) strand; PAM type: NRG; PAM sequence: CGG
aaattagccaggcgtagtgg

SEQ ID NO: 145438 - DNA, 20 bp, Artificial Sequence
  Description of Artificial Sequence: Synthetic oligonucleotide
  Target: LAMA2; (+) strand; PAM type: NRG; PAM sequence: GGG
aattagccaggcgtagtggc

SEQ ID NO: 145439 - DNA, 20 bp, Artificial Sequence
  Description of Artificial Sequence: Synthetic oligonucleotide
  Target: LAMA2; (+) strand; PAM type: NRG; PAM sequence: TAG
ggcgtagtggcgggcgcctg

SEQ ID NO: 145440 - DNA, 20 bp, Artificial Sequence
  Description of Artificial Sequence: Synthetic oligonucleotide
  Target: LAMA2; (+) strand; PAM type: NRG; PAM sequence: CAG
gtggcgggcgcctgtagtcc

SEQ ID NO: 145441 - DNA, 20 bp, Artificial Sequence
  Description of Artificial Sequence: Synthetic oligonucleotide
  Target: LAMA2; (+) strand; PAM type: NRG; PAM sequence: TGG
cgcctgtagtcccagctact

SEQ ID NO: 145442 - DNA, 20 bp, Artificial Sequence
  Description of Artificial Sequence: Synthetic oligonucleotide
  Target: LAMA2; (+) strand; PAM type: NRG; PAM sequence: GGG
gcctgtagtcccagctactt

SEQ ID NO: 145443 - DNA, 20 bp, Artificial Sequence
  Description of Artificial Sequence: Synthetic oligonucleotide
  Target: LAMA2; (+) strand; PAM type: NRG; PAM sequence: GAG
ctgtagtcccagctacttgg

SEQ ID NO: 145444 - DNA, 20 bp, Artificial Sequence
  Description of Artificial Sequence: Synthetic oligonucleotide
  Target: LAMA2; (+) strand; PAM type: NRG; PAM sequence: AGG
tgtagtcccagctacttggg

SEQ ID NO: 145445 - DNA, 20 bp, Artificial Sequence
  Description of Artificial Sequence: Synthetic oligonucleotide
  Target: LAMA2; (+) strand; PAM type: NRG; PAM sequence: GAG
tcccagctacttgggaggct

SEQ ID NO: 145446 - DNA, 20 bp, Artificial Sequence
  Description of Artificial Sequence: Synthetic oligonucleotide
  Target: LAMA2; (+) strand; PAM type: NRG; PAM sequence: AGG
cccagctacttgggaggctg

SEQ ID NO: 145447 - DNA, 20 bp, Artificial Sequence
  Description of Artificial Sequence: Synthetic oligonucleotide
  Target: LAMA2; (+) strand; PAM type: NRG; PAM sequence: CAG
agctacttgggaggctgagg

SEQ ID NO: 145448 - DNA, 20 bp, Artificial Sequence
  Description of Artificial Sequence: Synthetic oligonucleotide
  Target: LAMA2; (+) strand; PAM type: NRG; PAM sequence: AGG
gctacttgggaggctgaggc

SEQ ID NO: 145449 - DNA, 20 bp, Artificial Sequence
  Description of Artificial Sequence: Synthetic oligonucleotide
  Target: LAMA2; (+) strand; PAM type: NRG; PAM sequence: GAG
tacttgggaggctgaggcag

SEQ ID NO: 145450 - DNA, 20 bp, Artificial Sequence
  Description of Artificial Sequence: Synthetic oligonucleotide
  Target: LAMA2; (+) strand; PAM type: NRG; PAM sequence: TGG
gggaggctgaggcaggagaa

SEQ ID NO: 145451 - DNA, 20 bp, Artificial Sequence
  Description of Artificial Sequence: Synthetic oligonucleotide
  Target: LAMA2; (+) strand; PAM type: NRG; PAM sequence: CGG
gcaggagaatggcgtgaacc

SEQ ID NO: 145452 - DNA, 20 bp, Artificial Sequence
  Description of Artificial Sequence: Synthetic oligonucleotide
  Target: LAMA2; (+) strand; PAM type: NRG; PAM sequence: GGG
caggagaatggcgtgaaccc

SEQ ID NO: 145453 - DNA, 20 bp, Artificial Sequence
  Description of Artificial Sequence: Synthetic oligonucleotide
  Target: LAMA2; (+) strand; PAM type: NRG; PAM sequence: GAG
ggagaatggcgtgaacccgg

SEQ ID NO: 145454 - DNA, 20 bp, Artificial Sequence
  Description of Artificial Sequence: Synthetic oligonucleotide
  Target: LAMA2; (+) strand; PAM type: NRG; PAM sequence: AGG
gagaatggcgtgaacccggg

SEQ ID NO: 145455 - DNA, 20 bp, Artificial Sequence
  Description of Artificial Sequence: Synthetic oligonucleotide
  Target: LAMA2; (+) strand; PAM type: NRG; PAM sequence: CGG
aatggcgtgaacccgggagg

SEQ ID NO: 145456 - DNA, 20 bp, Artificial Sequence
  Description of Artificial Sequence: Synthetic oligonucleotide
  Target: LAMA2; (+) strand; PAM type: NRG; PAM sequence: GAG
tggcgtgaacccgggaggcg

SEQ ID NO: 145457 - DNA, 20 bp, Artificial Sequence
  Description of Artificial Sequence: Synthetic oligonucleotide
  Target: LAMA2; (+) strand; PAM type: NRG; PAM sequence: CAG
aacccgggaggcggagcttg

SEQ ID NO: 145458 - DNA, 20 bp, Artificial Sequence
  Description of Artificial Sequence: Synthetic oligonucleotide
  Target: LAMA2; (+) strand; PAM type: NRG; PAM sequence: GAG
cgggaggcggagcttgcagt

SEQ ID NO: 145459 - DNA, 20 bp, Artificial Sequence
  Description of Artificial Sequence: Synthetic oligonucleotide
  Target: LAMA2; (+) strand; PAM type: NRG; PAM sequence: GAG
ggcggagcttgcagtgagcc

SEQ ID NO: 145460 - DNA, 20 bp, Artificial Sequence
  Description of Artificial Sequence: Synthetic oligonucleotide
  Target: LAMA2; (+) strand; PAM type: NRG; PAM sequence: CAG
gagatcccgccactgcactc

SEQ ID NO: 145461 - DNA, 20 bp, Artificial Sequence
  Description of Artificial Sequence: Synthetic oligonucleotide
  Target: LAMA2; (+) strand; PAM type: NRG; PAM sequence: TGG
cccgccactgcactccagcc

SEQ ID NO: 145462 - DNA, 20 bp, Artificial Sequence
  Description of Artificial Sequence: Synthetic oligonucleotide
  Target: LAMA2; (+) strand; PAM type: NRG; PAM sequence: GGG
ccgccactgcactccagcct

SEQ ID NO: 145463 - DNA, 20 bp, Artificial Sequence
  Description of Artificial Sequence: Synthetic oligonucleotide
  Target: LAMA2; (+) strand; PAM type: NRG; PAM sequence: CAG
ctgcactccagcctgggcga

SEQ ID NO: 145464 - DNA, 20 bp, Artificial Sequence
  Description of Artificial Sequence: Synthetic oligonucleotide
  Target: LAMA2; (+) strand; PAM type: NRG; PAM sequence: GAG
gcactccagcctgggcgaca

SEQ ID NO: 145465 - DNA, 20 bp, Artificial Sequence
  Description of Artificial Sequence: Synthetic oligonucleotide
  Target: LAMA2; (+) strand; PAM type: NRG; PAM sequence: GAG
tccagcctgggcgacagagc

SEQ ID NO: 145466 - DNA, 20 bp, Artificial Sequence
  Description of Artificial Sequence: Synthetic oligonucleotide
  Target: LAMA2; (+) strand; PAM type: NRG; PAM sequence: TAG
aaaaaaaaaataacatattt

SEQ ID NO: 145467 - DNA, 20 bp, Artificial Sequence
  Description of Artificial Sequence: Synthetic oligonucleotide
  Target: LAMA2; (+) strand; PAM type: NRG; PAM sequence: GAG
aaaaaaaataacatatttta

SEQ ID NO: 145468 - DNA, 20 bp, Artificial Sequence
  Description of Artificial Sequence: Synthetic oligonucleotide
  Target: LAMA2; (+) strand; PAM type: NRG; PAM sequence: CAG
aataacatattttagagact

SEQ ID NO: 145469 - DNA, 20 bp, Artificial Sequence
  Description of Artificial Sequence: Synthetic oligonucleotide
  Target: LAMA2; (+) strand; PAM type: NRG; PAM sequence: AAG
gactcagtaaaataatttta

SEQ ID NO: 145470 - DNA, 20 bp, Artificial Sequence
  Description of Artificial Sequence: Synthetic oligonucleotide
  Target: LAMA2; (+) strand; PAM type: NRG; PAM sequence: AGG
actcagtaaaataattttaa

SEQ ID NO: 145471 - DNA, 20 bp, Artificial Sequence
  Description of Artificial Sequence: Synthetic oligonucleotide
  Target: LAMA2; (+) strand; PAM type: NRG; PAM sequence: GGG
ctcagtaaaataattttaaa

SEQ ID NO: 145472 - DNA, 20 bp, Artificial Sequence
  Description of Artificial Sequence: Synthetic oligonucleotide
  Target: LAMA2; (+) strand; PAM type: NRG; PAM sequence: GGG
tcagtaaaataattttaaag

SEQ ID NO: 145473 - DNA, 20 bp, Artificial Sequence
  Description of Artificial Sequence: Synthetic oligonucleotide
  Target: LAMA2; (+) strand; PAM type: NRG; PAM sequence: CAG
gtaaaataattttaaagggg

SEQ ID NO: 145474 - DNA, 20 bp, Artificial Sequence
  Description of Artificial Sequence: Synthetic oligonucleotide
  Target: LAMA2; (+) strand; PAM type: NRG; PAM sequence: AAG
aaataattttaaaggggcag

SEQ ID NO: 145475 - DNA, 20 bp, Artificial Sequence
  Description of Artificial Sequence: Synthetic oligonucleotide
  Target: LAMA2; (+) strand; PAM type: NRG; PAM sequence: CAG
attttaaaggggcagaagta

SEQ ID NO: 145476 - DNA, 20 bp, Artificial Sequence
  Description of Artificial Sequence: Synthetic oligonucleotide
  Target: LAMA2; (+) strand; PAM type: NRG; PAM sequence: TAG
aaggggcagaagtacagatg

SEQ ID NO: 145477 - DNA, 20 bp, Artificial Sequence
  Description of Artificial Sequence: Synthetic oligonucleotide
  Target: LAMA2; (+) strand; PAM type: NRG; PAM sequence: TAG
agaagtacagatgtagctgt

SEQ ID NO: 145478 - DNA, 20 bp, Artificial Sequence
  Description of Artificial Sequence: Synthetic oligonucleotide
  Target: LAMA2; (+) strand; PAM type: NRG; PAM sequence: AGG
gaagtacagatgtagctgtt

SEQ ID NO: 145479 - DNA, 20 bp, Artificial Sequence
  Description of Artificial Sequence: Synthetic oligonucleotide
  Target: LAMA2; (+) strand; PAM type: NRG; PAM sequence: GAG
agtacagatgtagctgttag

SEQ ID NO: 145480 - DNA, 20 bp, Artificial Sequence
  Description of Artificial Sequence: Synthetic oligonucleotide
  Target: LAMA2; (+) strand; PAM type: NRG; PAM sequence: AGG
gtacagatgtagctgttagg

SEQ ID NO: 145481 - DNA, 20 bp, Artificial Sequence
  Description of Artificial Sequence: Synthetic oligonucleotide
  Target: LAMA2; (+) strand; PAM type: NRG; PAM sequence: AAG
cagatgtagctgttaggagg

SEQ ID NO: 145482 - DNA, 20 bp, Artificial Sequence
  Description of Artificial Sequence: Synthetic oligonucleotide
  Target: LAMA2; (+) strand; PAM type: NRG; PAM sequence: CAG
gttaggaggaagcattattt

SEQ ID NO: 145483 - DNA, 20 bp, Artificial Sequence
  Description of Artificial Sequence: Synthetic oligonucleotide
  Target: LAMA2; (+) strand; PAM type: NRG; PAM sequence: CAG
aggaagcattatttcagcta

SEQ ID NO: 145484 - DNA, 20 bp, Artificial Sequence
  Description of Artificial Sequence: Synthetic oligonucleotide
  Target: LAMA2; (+) strand; PAM type: NRG; PAM sequence: TGG
tttcagctacagcacattat

SEQ ID NO: 145485 - DNA, 20 bp, Artificial Sequence
  Description of Artificial Sequence: Synthetic oligonucleotide
  Target: LAMA2; (+) strand; PAM type: NRG; PAM sequence: GAG
tcagctacagcacattattg

SEQ ID NO: 145486 - DNA, 20 bp, Artificial Sequence
  Description of Artificial Sequence: Synthetic oligonucleotide
  Target: LAMA2; (+) strand; PAM type: NRG; PAM sequence: AGG
cagctacagcacattattgg

SEQ ID NO: 145487 - DNA, 20 bp, Artificial Sequence
  Description of Artificial Sequence: Synthetic oligonucleotide
  Target: LAMA2; (+) strand; PAM type: NRG; PAM sequence: TAG
tacagcacattattggagga

SEQ ID NO: 145488 - DNA, 20 bp, Artificial Sequence
  Description of Artificial Sequence: Synthetic oligonucleotide
  Target: LAMA2; (+) strand; PAM type: NRG; PAM sequence: AGG
acagcacattattggaggat

SEQ ID NO: 145489 - DNA, 20 bp, Artificial Sequence
  Description of Artificial Sequence: Synthetic oligonucleotide
  Target: LAMA2; (+) strand; PAM type: NRG; PAM sequence: AAG
gcacattattggaggatagg

SEQ ID NO: 145490 - DNA, 20 bp, Artificial Sequence
  Description of Artificial Sequence: Synthetic oligonucleotide
  Target: LAMA2; (+) strand; PAM type: NRG; PAM sequence: GAG
acattattggaggataggaa

SEQ ID NO: 145491 - DNA, 20 bp, Artificial Sequence
  Description of Artificial Sequence: Synthetic oligonucleotide
  Target: LAMA2; (+) strand; PAM type: NRG; PAM sequence: TGG
tggaggataggaagagcata

SEQ ID NO: 145492 - DNA, 20 bp, Artificial Sequence
  Description of Artificial Sequence: Synthetic oligonucleotide
  Target: LAMA2; (+) strand; PAM type: NRG; PAM sequence: CAG
aggaagagcatatggtattc

SEQ ID NO: 145493 - DNA, 20 bp, Artificial Sequence
  Description of Artificial Sequence: Synthetic oligonucleotide
  Target: LAMA2; (+) strand; PAM type: NRG; PAM sequence: AAG
agcatatggtattccagtga

SEQ ID NO: 145494 - DNA, 20 bp, Artificial Sequence
  Description of Artificial Sequence: Synthetic oligonucleotide
  Target: LAMA2; (+) strand; PAM type: NRG; PAM sequence: GAG
catatggtattccagtgaaa

SEQ ID NO: 145495 - DNA, 20 bp, Artificial Sequence
  Description of Artificial Sequence: Synthetic oligonucleotide
  Target: LAMA2; (+) strand; PAM type: NRG; PAM sequence: TAG
gtgaaagagcttaattataa

SEQ ID NO: 145496 - DNA, 20 bp, Artificial Sequence
  Description of Artificial Sequence: Synthetic oligonucleotide
  Target: LAMA2; (+) strand; PAM type: NRG; PAM sequence: GAG
gaaagagcttaattataata

SEQ ID NO: 145497 - DNA, 20 bp, Artificial Sequence
  Description of Artificial Sequence: Synthetic oligonucleotide
  Target: LAMA2; (+) strand; PAM type: NRG; PAM sequence: CAG
agagcttaattataatagag

SEQ ID NO: 145498 - DNA, 20 bp, Artificial Sequence
  Description of Artificial Sequence: Synthetic oligonucleotide
  Target: LAMA2; (+) strand; PAM type: NRG; PAM sequence: AAG
cttaattataatagagcaga

SEQ ID NO: 145499 - DNA, 20 bp, Artificial Sequence
  Description of Artificial Sequence: Synthetic oligonucleotide
  Target: LAMA2; (+) strand; PAM type: NRG; PAM sequence: AGG
ttaattataatagagcagaa

SEQ ID NO: 145500 - DNA, 20 bp, Artificial Sequence
  Description of Artificial Sequence: Synthetic oligonucleotide
  Target: LAMA2; (+) strand; PAM type: NRG; PAM sequence: TAG
tataatagagcagaaaggat

SEQ ID NO: 145501 - DNA, 20 bp, Artificial Sequence
  Description of Artificial Sequence: Synthetic oligonucleotide
  Target: LAMA2; (+) strand; PAM type: NRG; PAM sequence: CAG
agagcagaaaggattagaaa

SEQ ID NO: 145502 - DNA, 20 bp, Artificial Sequence
  Description of Artificial Sequence: Synthetic oligonucleotide
  Target: LAMA2; (+) strand; PAM type: NRG; PAM sequence: AAG
agaaaggattagaaacagaa

SEQ ID NO: 145503 - DNA, 20 bp, Artificial Sequence
  Description of Artificial Sequence: Synthetic oligonucleotide
  Target: LAMA2; (+) strand; PAM type: NRG; PAM sequence: AAG
aaggattagaaacagaaaag

SEQ ID NO: 145504 - DNA, 20 bp, Artificial Sequence
  Description of Artificial Sequence: Synthetic oligonucleotide
  Target: LAMA2; (+) strand; PAM type: NRG; PAM sequence: AGG
aggattagaaacagaaaaga

SEQ ID NO: 145505 - DNA, 20 bp, Artificial Sequence
  Description of Artificial Sequence: Synthetic oligonucleotide
  Target: LAMA2; (+) strand; PAM type: NRG; PAM sequence: TGG
attagaaacagaaaagaagg

SEQ ID NO: 145506 - DNA, 20 bp, Artificial Sequence
  Description of Artificial Sequence: Synthetic oligonucleotide
  Target: LAMA2; (+) strand; PAM type: NRG; PAM sequence: CAG
cagaaaagaaggtggattat

SEQ ID NO: 145507 - DNA, 20 bp, Artificial Sequence
  Description of Artificial Sequence: Synthetic oligonucleotide
  Target: LAMA2; (+) strand; PAM type: NRG; PAM sequence: AGG
agaaaagaaggtggattatc

SEQ ID NO: 145508 - DNA, 20 bp, Artificial Sequence
  Description of Artificial Sequence: Synthetic oligonucleotide
  Target: LAMA2; (+) strand; PAM type: NRG; PAM sequence: AAG
aaggtggattatcaggaata

SEQ ID NO: 145509 - DNA, 20 bp, Artificial Sequence
  Description of Artificial Sequence: Synthetic oligonucleotide
  Target: LAMA2; (+) strand; PAM type: NRG; PAM sequence: AAG
gattatcaggaataaagtca

SEQ ID NO: 145510 - DNA, 20 bp, Artificial Sequence
  Description of Artificial Sequence: Synthetic oligonucleotide
  Target: LAMA2; (+) strand; PAM type: NRG; PAM sequence: AAG
tatcaggaataaagtcaaag

SEQ ID NO: 145511 - DNA, 20 bp, Artificial Sequence
  Description of Artificial Sequence: Synthetic oligonucleotide
  Target: LAMA2; (+) strand; PAM type: NRG; PAM sequence: AGG
atcaggaataaagtcaaaga

SEQ ID NO: 145512 - DNA, 20 bp, Artificial Sequence
  Description of Artificial Sequence: Synthetic oligonucleotide
  Target: LAMA2; (+) strand; PAM type: NRG; PAM sequence: GGG
tcaggaataaagtcaaagaa

SEQ ID NO: 145513 - DNA, 20 bp, Artificial Sequence
  Description of Artificial Sequence: Synthetic oligonucleotide
  Target: LAMA2; (+) strand; PAM type: NRG; PAM sequence: CAG
agaagggactgaatattgat

SEQ ID NO: 145514 - DNA, 20 bp, Artificial Sequence
  Description of Artificial Sequence: Synthetic oligonucleotide
  Target: LAMA2; (+) strand; PAM type: NRG; PAM sequence: CAG
ctgaatattgatcagatttt

SEQ ID NO: 145515 - DNA, 20 bp, Artificial Sequence
  Description of Artificial Sequence: Synthetic oligonucleotide
  Target: LAMA2; (+) strand; PAM type: NRG; PAM sequence: TAG
aaacaaaccccaccacatac

SEQ ID NO: 145516 - DNA, 20 bp, Artificial Sequence
  Description of Artificial Sequence: Synthetic oligonucleotide
  Target: LAMA2; (+) strand; PAM type: NRG; PAM sequence: TAG
accccaccacatactagcac

SEQ ID NO: 145517 - DNA, 20 bp, Artificial Sequence
  Description of Artificial Sequence: Synthetic oligonucleotide
  Target: LAMA2; (+) strand; PAM type: NRG; PAM sequence: TAG
ccacatactagcactagtca

SEQ ID NO: 145518 - DNA, 20 bp, Artificial Sequence
  Description of Artificial Sequence: Synthetic oligonucleotide
  Target: LAMA2; (+) strand; PAM type: NRG; PAM sequence: AGG
cacatactagcactagtcat

SEQ ID NO: 145519 - DNA, 20 bp, Artificial Sequence
  Description of Artificial Sequence: Synthetic oligonucleotide
  Target: LAMA2; (+) strand; PAM type: NRG; PAM sequence: GAG
ctagcactagtcataggact

SEQ ID NO: 145520 - DNA, 20 bp, Artificial Sequence
  Description of Artificial Sequence: Synthetic oligonucleotide
  Target: LAMA2; (+) strand; PAM type: NRG; PAM sequence: AAG
cataggactgagatttgtca

SEQ ID NO: 145521 - DNA, 20 bp, Artificial Sequence
  Description of Artificial Sequence: Synthetic oligonucleotide
  Target: LAMA2; (+) strand; PAM type: NRG; PAM sequence: TAG
ggactgagatttgtcaaagc

SEQ ID NO: 145522 - DNA, 20 bp, Artificial Sequence
  Description of Artificial Sequence: Synthetic oligonucleotide
  Target: LAMA2; (+) strand; PAM type: NRG; PAM sequence: TGG
tgtcaaagctagctctcttc

SEQ ID NO: 145523 - DNA, 20 bp, Artificial Sequence
  Description of Artificial Sequence: Synthetic oligonucleotide
  Target: LAMA2; (+) strand; PAM type: NRG; PAM sequence: TGG
agctctcttctggtgcactc

SEQ ID NO: 145524 - DNA, 20 bp, Artificial Sequence
  Description of Artificial Sequence: Synthetic oligonucleotide
  Target: LAMA2; (+) strand; PAM type: NRG; PAM sequence: AAG
ctctggttcactgtgaatat

SEQ ID NO: 145525 - DNA, 20 bp, Artificial Sequence
  Description of Artificial Sequence: Synthetic oligonucleotide
  Target: LAMA2; (+) strand; PAM type: NRG; PAM sequence: TGG
tggttcactgtgaatataag

SEQ ID NO: 145526 - DNA, 20 bp, Artificial Sequence
  Description of Artificial Sequence: Synthetic oligonucleotide
  Target: LAMA2; (+) strand; PAM type: NRG; PAM sequence: GGG
ggttcactgtgaatataagt

SEQ ID NO: 145527 - DNA, 20 bp, Artificial Sequence
  Description of Artificial Sequence: Synthetic oligonucleotide
  Target: LAMA2; (+) strand; PAM type: NRG; PAM sequence: TAG
ctgtgaatataagtgggcca

SEQ ID NO: 145528 - DNA, 20 bp, Artificial Sequence
  Description of Artificial Sequence: Synthetic oligonucleotide
  Target: LAMA2; (+) strand; PAM type: NRG; PAM sequence: GAG
gtgaatataagtgggccata

SEQ ID NO: 145529 - DNA, 20 bp, Artificial Sequence
  Description of Artificial Sequence: Synthetic oligonucleotide
  Target: LAMA2; (+) strand; PAM type: NRG; PAM sequence: TGG
gccatagagtgtgaccattg

SEQ ID NO: 145530 - DNA, 20 bp, Artificial Sequence
  Description of Artificial Sequence: Synthetic oligonucleotide
  Target: LAMA2; (+) strand; PAM type: NRG; PAM sequence: TGG
agtgtgaccattgtggtctc

SEQ ID NO: 145531 - DNA, 20 bp, Artificial Sequence
  Description of Artificial Sequence: Synthetic oligonucleotide
  Target: LAMA2; (+) strand; PAM type: NRG; PAM sequence: TAG
accattgtggtctctggccc

SEQ ID NO: 145532 - DNA, 20 bp, Artificial Sequence
  Description of Artificial Sequence: Synthetic oligonucleotide
  Target: LAMA2; (+) strand; PAM type: NRG; PAM sequence: AGG
ccattgtggtctctggccct

SEQ ID NO: 145533 - DNA, 20 bp, Artificial Sequence
  Description of Artificial Sequence: Synthetic oligonucleotide
  Target: LAMA2; (+) strand; PAM type: NRG; PAM sequence: TGG
tggtctctggccctaggcca

SEQ ID NO: 145534 - DNA, 20 bp, Artificial Sequence
  Description of Artificial Sequence: Synthetic oligonucleotide
  Target: LAMA2; (+) strand; PAM type: NRG; PAM sequence: GAG
gtctctggccctaggccatg

SEQ ID NO: 145535 - DNA, 20 bp, Artificial Sequence
  Description of Artificial Sequence: Synthetic oligonucleotide
  Target: LAMA2; (+) strand; PAM type: NRG; PAM sequence: GAG
ctggccctaggccatggagt

SEQ ID NO: 145536 - DNA, 20 bp, Artificial Sequence
  Description of Artificial Sequence: Synthetic oligonucleotide
  Target: LAMA2; (+) strand; PAM type: NRG; PAM sequence: GAG
ggccatggagtgagataatt

SEQ ID NO: 145537 - DNA, 20 bp, Artificial Sequence
  Description of Artificial Sequence: Synthetic oligonucleotide
  Target: LAMA2; (+) strand; PAM type: NRG; PAM sequence: AAG
tggagtgagataattgagac

SEQ ID NO: 145538 - DNA, 20 bp, Artificial Sequence
  Description of Artificial Sequence: Synthetic oligonucleotide
  Target: LAMA2; (+) strand; PAM type: NRG; PAM sequence: GAG
gagtgagataattgagacaa

SEQ ID NO: 145539 - DNA, 20 bp, Artificial Sequence
  Description of Artificial Sequence: Synthetic oligonucleotide
  Target: LAMA2; (+) strand; PAM type: NRG; PAM sequence: AAG
tgagataattgagacaagag

SEQ ID NO: 145540 - DNA, 20 bp, Artificial Sequence
  Description of Artificial Sequence: Synthetic oligonucleotide
  Target: LAMA2; (+) strand; PAM type: NRG; PAM sequence: AAG
tgtatatcatctctccacat

SEQ ID NO: 145541 - DNA, 20 bp, Artificial Sequence
  Description of Artificial Sequence: Synthetic oligonucleotide
  Target: LAMA2; (+) strand; PAM type: NRG; PAM sequence: TAG
tcatctctccacataagcaa

SEQ ID NO: 145542 - DNA, 20 bp, Artificial Sequence
  Description of Artificial Sequence: Synthetic oligonucleotide
  Target: LAMA2; (+) strand; PAM type: NRG; PAM sequence: GAG
atctctccacataagcaata

SEQ ID NO: 145543 - DNA, 20 bp, Artificial Sequence
  Description of Artificial Sequence: Synthetic oligonucleotide
  Target: LAMA2; (+) strand; PAM type: NRG; PAM sequence: TGG
acataagcaatagagctgat

SEQ ID NO: 145544 - DNA, 20 bp, Artificial Sequence
  Description of Artificial Sequence: Synthetic oligonucleotide
  Target: LAMA2; (+) strand; PAM type: NRG; PAM sequence: GGG
cataagcaatagagctgatt

SEQ ID NO: 145545 - DNA, 20 bp, Artificial Sequence
  Description of Artificial Sequence: Synthetic oligonucleotide
  Target: LAMA2; (+) strand; PAM type: NRG; PAM sequence: AAG
tgattgggctgcctgtaaac

SEQ ID NO: 145546 - DNA, 20 bp, Artificial Sequence
  Description of Artificial Sequence: Synthetic oligonucleotide
  Target: LAMA2; (+) strand; PAM type: NRG; PAM sequence: TAG
gctgcctgtaaacaagattt

SEQ ID NO: 145547 - DNA, 20 bp, Artificial Sequence
  Description of Artificial Sequence: Synthetic oligonucleotide
  Target: LAMA2; (+) strand; PAM type: NRG; PAM sequence: GAG
tgcctgtaaacaagatttta

SEQ ID NO: 145548 - DNA, 20 bp, Artificial Sequence
  Description of Artificial Sequence: Synthetic oligonucleotide
  Target: LAMA2; (+) strand; PAM type: NRG; PAM sequence: AAG
ctcacttttctttttcttaa

SEQ ID NO: 145549 - DNA, 20 bp, Artificial Sequence
  Description of Artificial Sequence: Synthetic oligonucleotide
  Target: LAMA2; (+) strand; PAM type: NRG; PAM sequence: TAG
tcttaaaagactgccacact

SEQ ID NO: 145550 - DNA, 20 bp, Artificial Sequence
  Description of Artificial Sequence: Synthetic oligonucleotide
  Target: LAMA2; (+) strand; PAM type: NRG; PAM sequence: TGG
ccacacttagccatctgata

SEQ ID NO: 145551 - DNA, 20 bp, Artificial Sequence
  Description of Artificial Sequence: Synthetic oligonucleotide
  Target: LAMA2; (+) strand; PAM type: NRG; PAM sequence: TGG
cttagccatctgatatggaa

SEQ ID NO: 145552 - DNA, 20 bp, Artificial Sequence
  Description of Artificial Sequence: Synthetic oligonucleotide
  Target: LAMA2; (+) strand; PAM type: NRG; PAM sequence: GAG
gaatggcatctcctcttaat

SEQ ID NO: 145553 - DNA, 20 bp, Artificial Sequence
  Description of Artificial Sequence: Synthetic oligonucleotide
  Target: LAMA2; (+) strand; PAM type: NRG; PAM sequence: TGG
ttatttgcaccttatcaaac

SEQ ID NO: 145554 - DNA, 20 bp, Artificial Sequence
  Description of Artificial Sequence: Synthetic oligonucleotide
  Target: LAMA2; (+) strand; PAM type: NRG; PAM sequence: GGG
tatttgcaccttatcaaact

SEQ ID NO: 145555 - DNA, 20 bp, Artificial Sequence
  Description of Artificial Sequence: Synthetic oligonucleotide
  Target: LAMA2; (+) strand; PAM type: NRG; PAM sequence: GAG
tttgcaccttatcaaactgg

SEQ ID NO: 145556 - DNA, 20 bp, Artificial Sequence
  Description of Artificial Sequence: Synthetic oligonucleotide
  Target: LAMA2; (+) strand; PAM type: NRG; PAM sequence: AAG
tatcaaactgggagatactg

SEQ ID NO: 145557 - DNA, 20 bp, Artificial Sequence
  Description of Artificial Sequence: Synthetic oligonucleotide
  Target: LAMA2; (+) strand; PAM type: NRG; PAM sequence: TGG
aaactgggagatactgaaga

SEQ ID NO: 145558 - DNA, 20 bp, Artificial Sequence
  Description of Artificial Sequence: Synthetic oligonucleotide
  Target: LAMA2; (+) strand; PAM type: NRG; PAM sequence: CAG
ctgggagatactgaagatgg

SEQ ID NO: 145559 - DNA, 20 bp, Artificial Sequence
  Description of Artificial Sequence: Synthetic oligonucleotide
  Target: LAMA2; (+) strand; PAM type: NRG; PAM sequence: TAG
gaagatggcagtgatgctga

SEQ ID NO: 145560 - DNA, 20 bp, Artificial Sequence
  Description of Artificial Sequence: Synthetic oligonucleotide
  Target: LAMA2; (+) strand; PAM type: NRG; PAM sequence: TGG
gatggcagtgatgctgatag

SEQ ID NO: 145561 - DNA, 20 bp, Artificial Sequence
  Description of Artificial Sequence: Synthetic oligonucleotide
  Target: LAMA2; (+) strand; PAM type: NRG; PAM sequence: GAG
gcagtgatgctgatagtggt

SEQ ID NO: 145562 - DNA, 20 bp, Artificial Sequence
  Description of Artificial Sequence: Synthetic oligonucleotide
  Target: LAMA2; (+) strand; PAM type: NRG; PAM sequence: TGG
atgctgatagtggtgagaca

SEQ ID NO: 145563 - DNA, 20 bp, Artificial Sequence
  Description of Artificial Sequence: Synthetic oligonucleotide
  Target: LAMA2; (+) strand; PAM type: NRG; PAM sequence: AAG
ctgatagtggtgagacatgg

SEQ ID NO: 145564 - DNA, 20 bp, Artificial Sequence
  Description of Artificial Sequence: Synthetic oligonucleotide
  Target: LAMA2; (+) strand; PAM type: NRG; PAM sequence: TAG
gtggtgagacatggaagatg

SEQ ID NO: 145565 - DNA, 20 bp, Artificial Sequence
  Description of Artificial Sequence: Synthetic oligonucleotide
  Target: LAMA2; (+) strand; PAM type: NRG; PAM sequence: GAG
ggtgagacatggaagatgta

SEQ ID NO: 145566 - DNA, 20 bp, Artificial Sequence
  Description of Artificial Sequence: Synthetic oligonucleotide
  Target: LAMA2; (+) strand; PAM type: NRG; PAM sequence: AGG
gtgagacatggaagatgtag

SEQ ID NO: 145567 - DNA, 20 bp, Artificial Sequence
  Description of Artificial Sequence: Synthetic oligonucleotide
  Target: LAMA2; (+) strand; PAM type: NRG; PAM sequence: AAG
agatgtagaggaaacctaca

SEQ ID NO: 145568 - DNA, 20 bp, Artificial Sequence
  Description of Artificial Sequence: Synthetic oligonucleotide
  Target: LAMA2; (+) strand; PAM type: NRG; PAM sequence: AAG
tgtagaggaaacctacaaag

SEQ ID NO: 145569 - DNA, 20 bp, Artificial Sequence
  Description of Artificial Sequence: Synthetic oligonucleotide
  Target: LAMA2; (+) strand; PAM type: NRG; PAM sequence: GAG
ggaaacctacaaagaagcct

SEQ ID NO: 145570 - DNA, 20 bp, Artificial Sequence
  Description of Artificial Sequence: Synthetic oligonucleotide
  Target: LAMA2; (+) strand; PAM type: NRG; PAM sequence: TAG
acctacaaagaagcctgaga

SEQ ID NO: 145571 - DNA, 20 bp, Artificial Sequence
  Description of Artificial Sequence: Synthetic oligonucleotide
  Target: LAMA2; (+) strand; PAM type: NRG; PAM sequence: AGG
cctacaaagaagcctgagat

SEQ ID NO: 145572 - DNA, 20 bp, Artificial Sequence
  Description of Artificial Sequence: Synthetic oligonucleotide
  Target: LAMA2; (+) strand; PAM type: NRG; PAM sequence: GAG
tacaaagaagcctgagatag

SEQ ID NO: 145573 - DNA, 20 bp, Artificial Sequence
  Description of Artificial Sequence: Synthetic oligonucleotide
  Target: LAMA2; (+) strand; PAM type: NRG; PAM sequence: GAG
caaagaagcctgagatagga

SEQ ID NO: 145574 - DNA, 20 bp, Artificial Sequence
  Description of Artificial Sequence: Synthetic oligonucleotide
  Target: LAMA2; (+) strand; PAM type: NRG; PAM sequence: AAG
gaagcctgagataggagaga

SEQ ID NO: 145575 - DNA, 20 bp, Artificial Sequence
  Description of Artificial Sequence: Synthetic oligonucleotide
  Target: LAMA2; (+) strand; PAM type: NRG; PAM sequence: AGG
aagcctgagataggagagaa

SEQ ID NO: 145576 - DNA, 20 bp, Artificial Sequence
  Description of Artificial Sequence: Synthetic oligonucleotide
  Target: LAMA2; (+) strand; PAM type: NRG; PAM sequence: GGG
agcctgagataggagagaaa

SEQ ID NO: 145577 - DNA, 20 bp, Artificial Sequence
  Description of Artificial Sequence: Synthetic oligonucleotide
  Target: LAMA2; (+) strand; PAM type: NRG; PAM sequence: TAG
aggagagaaagggtaatttt

SEQ ID NO: 145578 - DNA, 20 bp, Artificial Sequence
  Description of Artificial Sequence: Synthetic oligonucleotide
  Target: LAMA2; (+) strand; PAM type: NRG; PAM sequence: AAG
agagaaagggtaatttttag

SEQ ID NO: 145579 - DNA, 20 bp, Artificial Sequence
  Description of Artificial Sequence: Synthetic oligonucleotide
  Target: LAMA2; (+) strand; PAM type: NRG; PAM sequence: TAG
gaaagggtaatttttagaag

SEQ ID NO: 145580 - DNA, 20 bp, Artificial Sequence
  Description of Artificial Sequence: Synthetic oligonucleotide
  Target: LAMA2; (+) strand; PAM type: NRG; PAM sequence: TGG
ggtaatttttagaagtagat

SEQ ID NO: 145581 - DNA, 20 bp, Artificial Sequence
  Description of Artificial Sequence: Synthetic oligonucleotide
  Target: LAMA2; (+) strand; PAM type: NRG; PAM sequence: GGG
gtaatttttagaagtagatt

SEQ ID NO: 145582 - DNA, 20 bp, Artificial Sequence
  Description of Artificial Sequence: Synthetic oligonucleotide
  Target: LAMA2; (+) strand; PAM type: NRG; PAM sequence: GAG
aatttttagaagtagattgg

SEQ ID NO: 145583 - DNA, 20 bp, Artificial Sequence
  Description of Artificial Sequence: Synthetic oligonucleotide
  Target: LAMA2; (+) strand; PAM type: NRG; PAM sequence: TGG
agattgggagaactgcattc

SEQ ID NO: 145584 - DNA, 20 bp, Artificial Sequence
  Description of Artificial Sequence: Synthetic oligonucleotide
  Target: LAMA2; (+) strand; PAM type: NRG; PAM sequence: GGG
gattgggagaactgcattct

SEQ ID NO: 145585 - DNA, 20 bp, Artificial Sequence
  Description of Artificial Sequence: Synthetic oligonucleotide
  Target: LAMA2; (+) strand; PAM type: NRG; PAM sequence: TGG
tctgggcaataaatattcac

SEQ ID NO: 145586 - DNA, 20 bp, Artificial Sequence
  Description of Artificial Sequence: Synthetic oligonucleotide
  Target: LAMA2; (+) strand; PAM type: NRG; PAM sequence: CAG
ataaatattcactggactta

SEQ ID NO: 145587 - DNA, 20 bp, Artificial Sequence
  Description of Artificial Sequence: Synthetic oligonucleotide
  Target: LAMA2; (+) strand; PAM type: NRG; PAM sequence: AAG
tacagcgtattccttttttt

SEQ ID NO: 145588 - DNA, 20 bp, Artificial Sequence
  Description of Artificial Sequence: Synthetic oligonucleotide
  Target: LAMA2; (+) strand; PAM type: NRG; PAM sequence: AGG
acagcgtattccttttttta

SEQ ID NO: 145589 - DNA, 20 bp, Artificial Sequence
  Description of Artificial Sequence: Synthetic oligonucleotide
  Target: LAMA2; (+) strand; PAM type: NRG; PAM sequence: AAG
attcctttttttaaggaacc

SEQ ID NO: 145590 - DNA, 20 bp, Artificial Sequence
  Description of Artificial Sequence: Synthetic oligonucleotide
  Target: LAMA2; (+) strand; PAM type: NRG; PAM sequence: CAG
tttttaaggaaccaagttca

SEQ ID NO: 145591 - DNA, 20 bp, Artificial Sequence
  Description of Artificial Sequence: Synthetic oligonucleotide
  Target: LAMA2; (+) strand; PAM type: NRG; PAM sequence: TAG
ggaaccaagttcacagttgt

SEQ ID NO: 145592 - DNA, 20 bp, Artificial Sequence
  Description of Artificial Sequence: Synthetic oligonucleotide
  Target: LAMA2; (+) strand; PAM type: NRG; PAM sequence: AAG
ttcacagttgttagaactac

SEQ ID NO: 145593 - DNA, 20 bp, Artificial Sequence
  Description of Artificial Sequence: Synthetic oligonucleotide
  Target: LAMA2; (+) strand; PAM type: NRG; PAM sequence: GAG
cacagttgttagaactacaa

SEQ ID NO: 145594 - DNA, 20 bp, Artificial Sequence
  Description of Artificial Sequence: Synthetic oligonucleotide
  Target: LAMA2; (+) strand; PAM type: NRG; PAM sequence: AAG
acataatcatgacatcaaat

SEQ ID NO: 145595 - DNA, 20 bp, Artificial Sequence
  Description of Artificial Sequence: Synthetic oligonucleotide
  Target: LAMA2; (+) strand; PAM type: NRG; PAM sequence: CAG
atgcttatttttaattttta

SEQ ID NO: 145596 - DNA, 20 bp, Artificial Sequence
  Description of Artificial Sequence: Synthetic oligonucleotide
  Target: LAMA2; (+) strand; PAM type: NRG; PAM sequence: AGG
tgcttatttttaatttttac

SEQ ID NO: 145597 - DNA, 20 bp, Artificial Sequence
  Description of Artificial Sequence: Synthetic oligonucleotide
  Target: LAMA2; (+) strand; PAM type: NRG; PAM sequence: AAG
ttttataaactatctctata

SEQ ID NO: 145598 - DNA, 20 bp, Artificial Sequence
  Description of Artificial Sequence: Synthetic oligonucleotide
  Target: LAMA2; (+) strand; PAM type: NRG; PAM sequence: GAG
ttataaactatctctataaa

SEQ ID NO: 145599 - DNA, 20 bp, Artificial Sequence
  Description of Artificial Sequence: Synthetic oligonucleotide
  Target: LAMA2; (+) strand; PAM type: NRG; PAM sequence: TAG
ctctataaagagattaatgt

SEQ ID NO: 145600 - DNA, 20 bp, Artificial Sequence
  Description of Artificial Sequence: Synthetic oligonucleotide
  Target: LAMA2; (+) strand; PAM type: NRG; PAM sequence: TGG
ttaatgttagcttcttgttt

SEQ ID NO: 145601 - DNA, 20 bp, Artificial Sequence
  Description of Artificial Sequence: Synthetic oligonucleotide
  Target: LAMA2; (+) strand; PAM type: NRG; PAM sequence: AAG
tagcttcttgttttggaaat

SEQ ID NO: 145602 - DNA, 20 bp, Artificial Sequence
  Description of Artificial Sequence: Synthetic oligonucleotide
  Target: LAMA2; (+) strand; PAM type: NRG; PAM sequence: TGG
ttgttttggaaataagataa

SEQ ID NO: 145603 - DNA, 20 bp, Artificial Sequence
  Description of Artificial Sequence: Synthetic oligonucleotide
  Target: LAMA2; (+) strand; PAM type: NRG; PAM sequence: GGG
tgttttggaaataagataat

SEQ ID NO: 145604 - DNA, 20 bp, Artificial Sequence
  Description of Artificial Sequence: Synthetic oligonucleotide
  Target: LAMA2; (+) strand; PAM type: NRG; PAM sequence: GAG
ttttggaaataagataatgg

SEQ ID NO: 145605 - DNA, 20 bp, Artificial Sequence
  Description of Artificial Sequence: Synthetic oligonucleotide
  Target: LAMA2; (+) strand; PAM type: NRG; PAM sequence: AGG
tttggaaataagataatggg

SEQ ID NO: 145606 - DNA, 20 bp, Artificial Sequence
  Description of Artificial Sequence: Synthetic oligonucleotide
  Target: LAMA2; (+) strand; PAM type: NRG; PAM sequence: GGG
ttggaaataagataatggga

SEQ ID NO: 145607 - DNA, 20 bp, Artificial Sequence
  Description of Artificial Sequence: Synthetic oligonucleotide
  Target: LAMA2; (+) strand; PAM type: NRG; PAM sequence: AAG
gaaataagataatgggaggg

SEQ ID NO: 145608 - DNA, 20 bp, Artificial Sequence
  Description of Artificial Sequence: Synthetic oligonucleotide
  Target: LAMA2; (+) strand; PAM type: NRG; PAM sequence: AGG
aaataagataatgggaggga

SEQ ID NO: 145609 - DNA, 20 bp, Artificial Sequence
  Description of Artificial Sequence: Synthetic oligonucleotide
  Target: LAMA2; (+) strand; PAM type: NRG; PAM sequence: CAG
ggagggaaggataaatgaaa

SEQ ID NO: 145610 - DNA, 20 bp, Artificial Sequence
  Description of Artificial Sequence: Synthetic oligonucleotide
  Target: LAMA2; (+) strand; PAM type: NRG; PAM sequence: GAG
ttgttgccatctctcattgt

SEQ ID NO: 145611 - DNA, 20 bp, Artificial Sequence
  Description of Artificial Sequence: Synthetic oligonucleotide
  Target: LAMA2; (+) strand; PAM type: NRG; PAM sequence: CAG
tgccatctctcattgtgagc

SEQ ID NO: 145612 - DNA, 20 bp, Artificial Sequence
  Description of Artificial Sequence: Synthetic oligonucleotide
  Target: LAMA2; (+) strand; PAM type: NRG; PAM sequence: TAG
tctctcattgtgagccagtt

SEQ ID NO: 145613 - DNA, 20 bp, Artificial Sequence
  Description of Artificial Sequence: Synthetic oligonucleotide
  Target: LAMA2; (+) strand; PAM type: NRG; PAM sequence: AAG
aaacaaacaaaacaactctt

SEQ ID NO: 145614 - DNA, 20 bp, Artificial Sequence
  Description of Artificial Sequence: Synthetic oligonucleotide
  Target: LAMA2; (+) strand; PAM type: NRG; PAM sequence: CAG
aaaacaactcttaagcccaa

SEQ ID NO: 145615 - DNA, 20 bp, Artificial Sequence
  Description of Artificial Sequence: Synthetic oligonucleotide
  Target: LAMA2; (+) strand; PAM type: NRG; PAM sequence: AAG
cactcccttttctttttgct

SEQ ID NO: 145616 - DNA, 20 bp, Artificial Sequence
  Description of Artificial Sequence: Synthetic oligonucleotide
  Target: LAMA2; (+) strand; PAM type: NRG; PAM sequence: AAG
cccttttctttttgctaaga

SEQ ID NO: 145617 - DNA, 20 bp, Artificial Sequence
  Description of Artificial Sequence: Synthetic oligonucleotide
  Target: LAMA2; (+) strand; PAM type: NRG; PAM sequence: CGG
ttctttttgctaagaaagaa

SEQ ID NO: 145618 - DNA, 20 bp, Artificial Sequence
  Description of Artificial Sequence: Synthetic oligonucleotide
  Target: LAMA2; (+) strand; PAM type: NRG; PAM sequence: TAG
ggttgtatttttgtccttaa

SEQ ID NO: 145619 - DNA, 20 bp, Artificial Sequence
  Description of Artificial Sequence: Synthetic oligonucleotide
  Target: LAMA2; (+) strand; PAM type: NRG; PAM sequence: AAG
tatttttgtccttaatagaa

SEQ ID NO: 145620 - DNA, 20 bp, Artificial Sequence
  Description of Artificial Sequence: Synthetic oligonucleotide
  Target: LAMA2; (+) strand; PAM type: NRG; PAM sequence: AGG
atttttgtccttaatagaaa

SEQ ID NO: 145621 - DNA, 20 bp, Artificial Sequence
  Description of Artificial Sequence: Synthetic oligonucleotide
  Target: LAMA2; (+) strand; PAM type: NRG; PAM sequence: GGG
tttttgtccttaatagaaaa

SEQ ID NO: 145622 - DNA, 20 bp, Artificial Sequence
  Description of Artificial Sequence: Synthetic oligonucleotide
  Target: LAMA2; (+) strand; PAM type: NRG; PAM sequence: CAG
gtccttaatagaaaagggaa

SEQ ID NO: 145623 - DNA, 20 bp, Artificial Sequence
  Description of Artificial Sequence: Synthetic oligonucleotide
  Target: LAMA2; (+) strand; PAM type: NRG; PAM sequence: TGG
caacctattataaattcttc

SEQ ID NO: 145624 - DNA, 20 bp, Artificial Sequence
  Description of Artificial Sequence: Synthetic oligonucleotide
  Target: LAMA2; (+) strand; PAM type: NRG; PAM sequence: GGG
aacctattataaattcttct

SEQ ID NO: 145625 - DNA, 20 bp, Artificial Sequence
  Description of Artificial Sequence: Synthetic oligonucleotide
  Target: LAMA2; (+) strand; PAM type: NRG; PAM sequence: AAG
tattataaattcttctggga

SEQ ID NO: 145626 - DNA, 20 bp, Artificial Sequence
  Description of Artificial Sequence: Synthetic oligonucleotide
  Target: LAMA2; (+) strand; PAM type: NRG; PAM sequence: TGG
caaccctgattctgtgaact

SEQ ID NO: 145627 - DNA, 20 bp, Artificial Sequence
  Description of Artificial Sequence: Synthetic oligonucleotide
  Target: LAMA2; (+) strand; PAM type: NRG; PAM sequence: CAG
ccctgattctgtgaacttgg

SEQ ID NO: 145628 - DNA, 20 bp, Artificial Sequence
  Description of Artificial Sequence: Synthetic oligonucleotide
  Target: LAMA2; (+) strand; PAM type: NRG; PAM sequence: AAG
acttggcagcaaatgtataa

SEQ ID NO: 145629 - DNA, 20 bp, Artificial Sequence
  Description of Artificial Sequence: Synthetic oligonucleotide
  Target: LAMA2; (+) strand; PAM type: NRG; PAM sequence: AAG
ggcagcaaatgtataaaaga

SEQ ID NO: 145630 - DNA, 20 bp, Artificial Sequence
  Description of Artificial Sequence: Synthetic oligonucleotide
  Target: LAMA2; (+) strand; PAM type: NRG; PAM sequence: CAG
atgtataaaagaaagcaatt

SEQ ID NO: 145631 - DNA, 20 bp, Artificial Sequence
  Description of Artificial Sequence: Synthetic oligonucleotide
  Target: LAMA2; (+) strand; PAM type: NRG; PAM sequence: TGG
aaaagaaagcaattcagccc

SEQ ID NO: 145632 - DNA, 20 bp, Artificial Sequence
  Description of Artificial Sequence: Synthetic oligonucleotide
  Target: LAMA2; (+) strand; PAM type: NRG; PAM sequence: TGG
agcaattcagccctggcccc

SEQ ID NO: 145633 - DNA, 20 bp, Artificial Sequence
  Description of Artificial Sequence: Synthetic oligonucleotide
  Target: LAMA2; (+) strand; PAM type: NRG; PAM sequence: AAG
tcattcatgctgtgtttgtc

SEQ ID NO: 145634 - DNA, 20 bp, Artificial Sequence
  Description of Artificial Sequence: Synthetic oligonucleotide
  Target: LAMA2; (+) strand; PAM type: NRG; PAM sequence: GAG
attcatgctgtgtttgtcaa

SEQ ID NO: 145635 - DNA, 20 bp, Artificial Sequence
  Description of Artificial Sequence: Synthetic oligonucleotide
  Target: LAMA2; (+) strand; PAM type: NRG; PAM sequence: AGG
ttcatgctgtgtttgtcaag

SEQ ID NO: 145636 - DNA, 20 bp, Artificial Sequence
  Description of Artificial Sequence: Synthetic oligonucleotide
  Target: LAMA2; (+) strand; PAM type: NRG; PAM sequence: AAG
tgctgtgtttgtcaagagga

SEQ ID NO: 145637 - DNA, 20 bp, Artificial Sequence
  Description of Artificial Sequence: Synthetic oligonucleotide
  Target: LAMA2; (+) strand; PAM type: NRG; PAM sequence: GAG
ctgtgtttgtcaagaggaaa

SEQ ID NO: 145638 - DNA, 20 bp, Artificial Sequence
  Description of Artificial Sequence: Synthetic oligonucleotide
  Target: LAMA2; (+) strand; PAM type: NRG; PAM sequence: AAG
tttgtcaagaggaaagagaa

SEQ ID NO: 145639 - DNA, 20 bp, Artificial Sequence
  Description of Artificial Sequence: Synthetic oligonucleotide
  Target: LAMA2; (+) strand; PAM type: NRG; PAM sequence: AGG
ttgtcaagaggaaagagaaa

SEQ ID NO: 145640 - DNA, 20 bp, Artificial Sequence
  Description of Artificial Sequence: Synthetic oligonucleotide
  Target: LAMA2; (+) strand; PAM type: NRG; PAM sequence: AAG
aaaaggaatgttgtgaaatg

SEQ ID NO: 145641 - DNA, 20 bp, Artificial Sequence
  Description of Artificial Sequence: Synthetic oligonucleotide
  Target: LAMA2; (+) strand; PAM type: NRG; PAM sequence: TAG
ttgtgaaatgaagtccactt

SEQ ID NO: 145642 - DNA, 20 bp, Artificial Sequence
  Description of Artificial Sequence: Synthetic oligonucleotide
  Target: LAMA2; (+) strand; PAM type: NRG; PAM sequence: CAG
aaataacttacaataatgat

SEQ ID NO: 145643 - DNA, 20 bp, Artificial Sequence
  Description of Artificial Sequence: Synthetic oligonucleotide
  Target: LAMA2; (+) strand; PAM type: NRG; PAM sequence: CAG
aatgatcagtgacttctcat

SEQ ID NO: 145644 - DNA, 20 bp, Artificial Sequence
  Description of Artificial Sequence: Synthetic oligonucleotide
  Target: LAMA2; (+) strand; PAM type: NRG; PAM sequence: GAG
gctgtttattcatttttctt

SEQ ID NO: 145645 - DNA, 20 bp, Artificial Sequence
  Description of Artificial Sequence: Synthetic oligonucleotide
  Target: LAMA2; (+) strand; PAM type: NRG; PAM sequence: TAG
gttgtaatatttcttaatat

SEQ ID NO: 145646 - DNA, 20 bp, Artificial Sequence
  Description of Artificial Sequence: Synthetic oligonucleotide
  Target: LAMA2; (+) strand; PAM type: NRG; PAM sequence: TGG
ttaatattagctatcctgca

SEQ ID NO: 145647 - DNA, 20 bp, Artificial Sequence
  Description of Artificial Sequence: Synthetic oligonucleotide
  Target: LAMA2; (+) strand; PAM type: NRG; PAM sequence: CAG
gctatcctgcatggacccga

SEQ ID NO: 145648 - DNA, 20 bp, Artificial Sequence
  Description of Artificial Sequence: Synthetic oligonucleotide
  Target: LAMA2; (+) strand; PAM type: NRG; PAM sequence: AAG
gcatggacccgacagaaaat

SEQ ID NO: 145649 - DNA, 20 bp, Artificial Sequence
  Description of Artificial Sequence: Synthetic oligonucleotide
  Target: LAMA2; (+) strand; PAM type: NRG; PAM sequence: AGG
catggacccgacagaaaata

SEQ ID NO: 145650 - DNA, 20 bp, Artificial Sequence
  Description of Artificial Sequence: Synthetic oligonucleotide
  Target: LAMA2; (+) strand; PAM type: NRG; PAM sequence: GAG
ccgacagaaaataaggtcct

SEQ ID NO: 145651 - DNA, 20 bp, Artificial Sequence
  Description of Artificial Sequence: Synthetic oligonucleotide
  Target: LAMA2; (+) strand; PAM type: NRG; PAM sequence: TAG
gaaaataaggtcctgagttt

SEQ ID NO: 145652 - DNA, 20 bp, Artificial Sequence
  Description of Artificial Sequence: Synthetic oligonucleotide
  Target: LAMA2; (+) strand; PAM type: NRG; PAM sequence: CAG
gcttgtccccaactccctgc

SEQ ID NO: 145653 - DNA, 20 bp, Artificial Sequence
  Description of Artificial Sequence: Synthetic oligonucleotide
  Target: LAMA2; (+) strand; PAM type: NRG; PAM sequence: AAG
tgccagctaaccatcaacac

SEQ ID NO: 145654 - DNA, 20 bp, Artificial Sequence
  Description of Artificial Sequence: Synthetic oligonucleotide
  Target: LAMA2; (+) strand; PAM type: NRG; PAM sequence: GAG
catcaacacaagctgtatct

SEQ ID NO: 145655 - DNA, 20 bp, Artificial Sequence
  Description of Artificial Sequence: Synthetic oligonucleotide
  Target: LAMA2; (+) strand; PAM type: NRG; PAM sequence: GAG
agctgtatctgagcttcttt

SEQ ID NO: 145656 - DNA, 20 bp, Artificial Sequence
  Description of Artificial Sequence: Synthetic oligonucleotide
  Target: LAMA2; (+) strand; PAM type: NRG; PAM sequence: AGG
gctgtatctgagcttctttg

SEQ ID NO: 145657 - DNA, 20 bp, Artificial Sequence
  Description of Artificial Sequence: Synthetic oligonucleotide
  Target: LAMA2; (+) strand; PAM type: NRG; PAM sequence: GGG
ctgtatctgagcttctttga

SEQ ID NO: 145658 - DNA, 20 bp, Artificial Sequence
  Description of Artificial Sequence: Synthetic oligonucleotide
  Target: LAMA2; (+) strand; PAM type: NRG; PAM sequence: TGG
tctgagcttctttgagggca

SEQ ID NO: 145659 - DNA, 20 bp, Artificial Sequence
  Description of Artificial Sequence: Synthetic oligonucleotide
  Target: LAMA2; (+) strand; PAM type: NRG; PAM sequence: CAG
tctttgagggcatggccctg

SEQ ID NO: 145660 - DNA, 20 bp, Artificial Sequence
  Description of Artificial Sequence: Synthetic oligonucleotide
  Target: LAMA2; (+) strand; PAM type: NRG; PAM sequence: TGG
catggccctgcagctccctg

SEQ ID NO: 145661 - DNA, 20 bp, Artificial Sequence
  Description of Artificial Sequence: Synthetic oligonucleotide
  Target: LAMA2; (+) strand; PAM type: NRG; PAM sequence: CAG
gccctgcagctccctgtggt

SEQ ID NO: 145662 - DNA, 20 bp, Artificial Sequence
  Description of Artificial Sequence: Synthetic oligonucleotide
  Target: LAMA2; (+) strand; PAM type: NRG; PAM sequence: TAG
agctccctgtggtcagttat

SEQ ID NO: 145663 - DNA, 20 bp, Artificial Sequence
  Description of Artificial Sequence: Synthetic oligonucleotide
  Target: LAMA2; (+) strand; PAM type: NRG; PAM sequence: GAG
ctgtggtcagttattagtct

SEQ ID NO: 145664 - DNA, 20 bp, Artificial Sequence
  Description of Artificial Sequence: Synthetic oligonucleotide
  Target: LAMA2; (+) strand; PAM type: NRG; PAM sequence: CAG
gtcagttattagtctgagtc

SEQ ID NO: 145665 - DNA, 20 bp, Artificial Sequence
  Description of Artificial Sequence: Synthetic oligonucleotide
  Target: LAMA2; (+) strand; PAM type: NRG; PAM sequence: AAG
ttattagtctgagtccagca

SEQ ID NO: 145666 - DNA, 20 bp, Artificial Sequence
  Description of Artificial Sequence: Synthetic oligonucleotide
  Target: LAMA2; (+) strand; PAM type: NRG; PAM sequence: AGG
tattagtctgagtccagcaa

SEQ ID NO: 145667 - DNA, 20 bp, Artificial Sequence
  Description of Artificial Sequence: Synthetic oligonucleotide
  Target: LAMA2; (+) strand; PAM type: NRG; PAM sequence: AAG
tctgagtccagcaaaggaac

SEQ ID NO: 145668 - DNA, 20 bp, Artificial Sequence
  Description of Artificial Sequence: Synthetic oligonucleotide
  Target: LAMA2; (+) strand; PAM type: NRG; PAM sequence: CAG
ctgtgtgcttgctaaatcta

SEQ ID NO: 145669 - DNA, 20 bp, Artificial Sequence
  Description of Artificial Sequence: Synthetic oligonucleotide
  Target: LAMA2; (+) strand; PAM type: NRG; PAM sequence: TGG
ctacagaaaacttcatcttc

SEQ ID NO: 145670 - DNA, 20 bp, Artificial Sequence
  Description of Artificial Sequence: Synthetic oligonucleotide
  Target: LAMA2; (+) strand; PAM type: NRG; PAM sequence: TGG
aacttcatcttctggttgtg

SEQ ID NO: 145671 - DNA, 20 bp, Artificial Sequence
  Description of Artificial Sequence: Synthetic oligonucleotide
  Target: LAMA2; (+) strand; PAM type: NRG; PAM sequence: GGG
acttcatcttctggttgtgt

SEQ ID NO: 145672 - DNA, 20 bp, Artificial Sequence
  Description of Artificial Sequence: Synthetic oligonucleotide
  Target: LAMA2; (+) strand; PAM type: NRG; PAM sequence: GAG
ttcatcttctggttgtgtgg

SEQ ID NO: 145673 - DNA, 20 bp, Artificial Sequence
  Description of Artificial Sequence: Synthetic oligonucleotide
  Target: LAMA2; (+) strand; PAM type: NRG; PAM sequence: AGG
tcatcttctggttgtgtggg

SEQ ID NO: 145674 - DNA, 20 bp, Artificial Sequence
  Description of Artificial Sequence: Synthetic oligonucleotide
  Target: LAMA2; (+) strand; PAM type: NRG; PAM sequence: GAG
atcttctggttgtgtgggag

SEQ ID NO: 145675 - DNA, 20 bp, Artificial Sequence
  Description of Artificial Sequence: Synthetic oligonucleotide
  Target: LAMA2; (+) strand; PAM type: NRG; PAM sequence: GAG
cttctggttgtgtgggagga

SEQ ID NO: 145676 - DNA, 20 bp, Artificial Sequence
  Description of Artificial Sequence: Synthetic oligonucleotide
  Target: LAMA2; (+) strand; PAM type: NRG; PAM sequence: AGG
ttctggttgtgtgggaggag

SEQ ID NO: 145677 - DNA, 20 bp, Artificial Sequence
  Description of Artificial Sequence: Synthetic oligonucleotide
  Target: LAMA2; (+) strand; PAM type: NRG; PAM sequence: AAG
ttgtgtactctgtttctttg

SEQ ID NO: 145678 - DNA, 20 bp, Artificial Sequence
  Description of Artificial Sequence: Synthetic oligonucleotide
  Target: LAMA2; (+) strand; PAM type: NRG; PAM sequence: AGG
tgtgtactctgtttctttga

SEQ ID NO: 145679 - DNA, 20 bp, Artificial Sequence
  Description of Artificial Sequence: Synthetic oligonucleotide
  Target: LAMA2; (+) strand; PAM type: NRG; PAM sequence: TAG
ctctgtttctttgaaggaac

SEQ ID NO: 145680 - DNA, 20 bp, Artificial Sequence
  Description of Artificial Sequence: Synthetic oligonucleotide
  Target: LAMA2; (+) strand; PAM type: NRG; PAM sequence: AGG
tctgtttctttgaaggaact

SEQ ID NO: 145681 - DNA, 20 bp, Artificial Sequence
  Description of Artificial Sequence: Synthetic oligonucleotide
  Target: LAMA2; (+) strand; PAM type: NRG; PAM sequence: GGG
ctgtttctttgaaggaacta

SEQ ID NO: 145682 - DNA, 20 bp, Artificial Sequence
  Description of Artificial Sequence: Synthetic oligonucleotide
  Target: LAMA2; (+) strand; PAM type: NRG; PAM sequence: TGG
tgaaggaactagggatctgt

SEQ ID NO: 145683 - DNA, 20 bp, Artificial Sequence
  Description of Artificial Sequence: Synthetic oligonucleotide
  Target: LAMA2; (+) strand; PAM type: NRG; PAM sequence: CAG
agggatctgttggtgctgta

SEQ ID NO: 145684 - DNA, 20 bp, Artificial Sequence
  Description of Artificial Sequence: Synthetic oligonucleotide
  Target: LAMA2; (+) strand; PAM type: NRG; PAM sequence: GAG
gttggtgctgtacagatgtc

SEQ ID NO: 145685 - DNA, 20 bp, Artificial Sequence
  Description of Artificial Sequence: Synthetic oligonucleotide
  Target: LAMA2; (+) strand; PAM type: NRG; PAM sequence: AGG
ttggtgctgtacagatgtcg

SEQ ID NO: 145686 - DNA, 20 bp, Artificial Sequence
  Description of Artificial Sequence: Synthetic oligonucleotide
  Target: LAMA2; (+) strand; PAM type: NRG; PAM sequence: CAG
tgtacagatgtcgaggtgca

SEQ ID NO: 145687 - DNA, 20 bp, Artificial Sequence
  Description of Artificial Sequence: Synthetic oligonucleotide
  Target: LAMA2; (+) strand; PAM type: NRG; PAM sequence: GAG
tacagatgtcgaggtgcaca

SEQ ID NO: 145688 - DNA, 20 bp, Artificial Sequence
  Description of Artificial Sequence: Synthetic oligonucleotide
  Target: LAMA2; (+) strand; PAM type: NRG; PAM sequence: TAG
gagccaacatcctacaaaac

SEQ ID NO: 145689 - DNA, 20 bp, Artificial Sequence
  Description of Artificial Sequence: Synthetic oligonucleotide
  Target: LAMA2; (+) strand; PAM type: NRG; PAM sequence: TAG
catcctacaaaactagtaaa

SEQ ID NO: 145690 - DNA, 20 bp, Artificial Sequence
  Description of Artificial Sequence: Synthetic oligonucleotide
  Target: LAMA2; (+) strand; PAM type: NRG; PAM sequence: TAG
aaaactagtaaatagatgat

SEQ ID NO: 145691 - DNA, 20 bp, Artificial Sequence
  Description of Artificial Sequence: Synthetic oligonucleotide
  Target: LAMA2; (+) strand; PAM type: NRG; PAM sequence: AGG
aaactagtaaatagatgatt

SEQ ID NO: 145692 - DNA, 20 bp, Artificial Sequence
  Description of Artificial Sequence: Synthetic oligonucleotide
  Target: LAMA2; (+) strand; PAM type: NRG; PAM sequence: CAG
gattaggatccaactctgta

SEQ ID NO: 145693 - DNA, 20 bp, Artificial Sequence
  Description of Artificial Sequence: Synthetic oligonucleotide
  Target: LAMA2; (+) strand; PAM type: NRG; PAM sequence: TGG
tccaactctgtacagaataa

SEQ ID NO: 145694 - DNA, 20 bp, Artificial Sequence
  Description of Artificial Sequence: Synthetic oligonucleotide
  Target: LAMA2; (+) strand; PAM type: NRG; PAM sequence: TAG
aactctgtacagaataatgg

SEQ ID NO: 145695 - DNA, 20 bp, Artificial Sequence
  Description of Artificial Sequence: Synthetic oligonucleotide
  Target: LAMA2; (+) strand; PAM type: NRG; PAM sequence: AGG
actctgtacagaataatggt

SEQ ID NO: 145696 - DNA, 20 bp, Artificial Sequence
  Description of Artificial Sequence: Synthetic oligonucleotide
  Target: LAMA2; (+) strand; PAM type: NRG; PAM sequence: TGG
aatggtaggaacctaaacct

SEQ ID NO: 145697 - DNA, 20 bp, Artificial Sequence
  Description of Artificial Sequence: Synthetic oligonucleotide
  Target: LAMA2; (+) strand; PAM type: NRG; PAM sequence: GGG
atggtaggaacctaaacctt

SEQ ID NO: 145698 - DNA, 20 bp, Artificial Sequence
  Description of Artificial Sequence: Synthetic oligonucleotide
  Target: LAMA2; (+) strand; PAM type: NRG; PAM sequence: GGG
tggtaggaacctaaaccttg

SEQ ID NO: 145699 - DNA, 20 bp, Artificial Sequence
  Description of Artificial Sequence: Synthetic oligonucleotide
  Target: LAMA2; (+) strand; PAM type: NRG; PAM sequence: AAG
caaaattgttgttgtcctat

SEQ ID NO: 145700 - DNA, 20 bp, Artificial Sequence
  Description of Artificial Sequence: Synthetic oligonucleotide
  Target: LAMA2; (+) strand; PAM type: NRG; PAM sequence: TAG
tcctcaatgaaacactttct

SEQ ID NO: 145701 - DNA, 20 bp, Artificial Sequence
  Description of Artificial Sequence: Synthetic oligonucleotide
  Target: LAMA2; (+) strand; PAM type: NRG; PAM sequence: GAG
tctgtgtacatcacaatgtt

SEQ ID NO: 145702 - DNA, 20 bp, Artificial Sequence
  Description of Artificial Sequence: Synthetic oligonucleotide
  Target: LAMA2; (+) strand; PAM type: NRG; PAM sequence: TGG
acaatgttgagctacaaatg

SEQ ID NO: 145703 - DNA, 20 bp, Artificial Sequence
  Description of Artificial Sequence: Synthetic oligonucleotide
  Target: LAMA2; (+) strand; PAM type: NRG; PAM sequence: TGG
atgttgagctacaaatgtgg

SEQ ID NO: 145704 - DNA, 20 bp, Artificial Sequence
  Description of Artificial Sequence: Synthetic oligonucleotide
  Target: LAMA2; (+) strand; PAM type: NRG; PAM sequence: AAG
ggtggctctaacaaaatttt

SEQ ID NO: 145705 - DNA, 20 bp, Artificial Sequence
  Description of Artificial Sequence: Synthetic oligonucleotide
  Target: LAMA2; (+) strand; PAM type: NRG; PAM sequence: AAG
ctaacaaaattttaagtatg

SEQ ID NO: 145706 - DNA, 20 bp, Artificial Sequence
  Description of Artificial Sequence: Synthetic oligonucleotide
  Target: LAMA2; (+) strand; PAM type: NRG; PAM sequence: CAG
caaaattttaagtatgaagt

SEQ ID NO: 145707 - DNA, 20 bp, Artificial Sequence
  Description of Artificial Sequence: Synthetic oligonucleotide
  Target: LAMA2; (+) strand; PAM type: NRG; PAM sequence: TAG
taagtatgaagtcagatgta

SEQ ID NO: 145708 - DNA, 20 bp, Artificial Sequence
  Description of Artificial Sequence: Synthetic oligonucleotide
  Target: LAMA2; (+) strand; PAM type: NRG; PAM sequence: GAG
agtatgaagtcagatgtata

SEQ ID NO: 145709 - DNA, 20 bp, Artificial Sequence
  Description of Artificial Sequence: Synthetic oligonucleotide
  Target: LAMA2; (+) strand; PAM type: NRG; PAM sequence: AGG
gtatgaagtcagatgtatag

SEQ ID NO: 145710 - DNA, 20 bp, Artificial Sequence
  Description of Artificial Sequence: Synthetic oligonucleotide
  Target: LAMA2; (+) strand; PAM type: NRG; PAM sequence: CAG
gcttctcacaaactactccc

SEQ ID NO: 145711 - DNA, 20 bp, Artificial Sequence
  Description of Artificial Sequence: Synthetic oligonucleotide
  Target: LAMA2; (+) strand; PAM type: NRG; PAM sequence: TGG
tcttcctacaaccttcgtgt

SEQ ID NO: 145712 - DNA, 20 bp, Artificial Sequence
  Description of Artificial Sequence: Synthetic oligonucleotide
  Target: LAMA2; (+) strand; PAM type: NRG; PAM sequence: TAG
acaaccttcgtgttggtcct

SEQ ID NO: 145713 - DNA, 20 bp, Artificial Sequence
  Description of Artificial Sequence: Synthetic oligonucleotide
  Target: LAMA2; (+) strand; PAM type: NRG; PAM sequence: AAG
tactctgatctcaaccgcaa

SEQ ID NO: 145714 - DNA, 20 bp, Artificial Sequence
  Description of Artificial Sequence: Synthetic oligonucleotide
  Target: LAMA2; (+) strand; PAM type: NRG; PAM sequence: CAG
ctgatctcaaccgcaaaagt

SEQ ID NO: 145715 - DNA, 20 bp, Artificial Sequence
  Description of Artificial Sequence: Synthetic oligonucleotide
  Target: LAMA2; (+) strand; PAM type: NRG; PAM sequence: AGG
tgatctcaaccgcaaaagtc

SEQ ID NO: 145716 - DNA, 20 bp, Artificial Sequence
  Description of Artificial Sequence: Synthetic oligonucleotide
  Target: LAMA2; (+) strand; PAM type: NRG; PAM sequence: GGG
gatctcaaccgcaaaagtca

SEQ ID NO: 145717 - DNA, 20 bp, Artificial Sequence
  Description of Artificial Sequence: Synthetic oligonucleotide
  Target: LAMA2; (+) strand; PAM type: NRG; PAM sequence: GGG
atctcaaccgcaaaagtcag

SEQ ID NO: 145718 - DNA, 20 bp, Artificial Sequence
  Description of Artificial Sequence: Synthetic oligonucleotide
  Target: LAMA2; (+) strand; PAM type: NRG; PAM sequence: GAG
aaccgcaaaagtcaggggat

SEQ ID NO: 145719 - DNA, 20 bp, Artificial Sequence
  Description of Artificial Sequence: Synthetic oligonucleotide
  Target: LAMA2; (+) strand; PAM type: NRG; PAM sequence: TAG
aaagtcaggggatgagacta

SEQ ID NO: 145720 - DNA, 20 bp, Artificial Sequence
  Description of Artificial Sequence: Synthetic oligonucleotide
  Target: LAMA2; (+) strand; PAM type: NRG; PAM sequence: AGG
aagtcaggggatgagactat

SEQ ID NO: 145721 - DNA, 20 bp, Artificial Sequence
  Description of Artificial Sequence: Synthetic oligonucleotide
  Target: LAMA2; (+) strand; PAM type: NRG; PAM sequence: CAG
atgagactataggccatccc

SEQ ID NO: 145722 - DNA, 20 bp, Artificial Sequence
  Description of Artificial Sequence: Synthetic oligonucleotide
  Target: LAMA2; (+) strand; PAM type: NRG; PAM sequence: GAG
gagactataggccatcccca

SEQ ID NO: 145723 - DNA, 20 bp, Artificial Sequence
  Description of Artificial Sequence: Synthetic oligonucleotide
  Target: LAMA2; (+) strand; PAM type: NRG; PAM sequence: CAG
ataggccatccccagagcaa

SEQ ID NO: 145724 - DNA, 20 bp, Artificial Sequence
  Description of Artificial Sequence: Synthetic oligonucleotide
  Target: LAMA2; (+) strand; PAM type: NRG; PAM sequence: CAG
catccccagagcaacagcct

SEQ ID NO: 145725 - DNA, 20 bp, Artificial Sequence
  Description of Artificial Sequence: Synthetic oligonucleotide
  Target: LAMA2; (+) strand; PAM type: NRG; PAM sequence: CAG
gagcaacagcctcagcacct

SEQ ID NO: 145726 - DNA, 20 bp, Artificial Sequence
  Description of Artificial Sequence: Synthetic oligonucleotide
  Target: LAMA2; (+) strand; PAM type: NRG; PAM sequence: CAG
acagcctcagcacctcagca

SEQ ID NO: 145727 - DNA, 20 bp, Artificial Sequence
  Description of Artificial Sequence: Synthetic oligonucleotide
  Target: LAMA2; (+) strand; PAM type: NRG; PAM sequence: TGG
tcagcacctcagcacagatc

SEQ ID NO: 145728 - DNA, 20 bp, Artificial Sequence
  Description of Artificial Sequence: Synthetic oligonucleotide
  Target: LAMA2; (+) strand; PAM type: NRG; PAM sequence: GAG
agcacctcagcacagatctg

SEQ ID NO: 145729 - DNA, 20 bp, Artificial Sequence
  Description of Artificial Sequence: Synthetic oligonucleotide
  Target: LAMA2; (+) strand; PAM type: NRG; PAM sequence: AGG
gcacctcagcacagatctgg

SEQ ID NO: 145730 - DNA, 20 bp, Artificial Sequence
  Description of Artificial Sequence: Synthetic oligonucleotide
  Target: LAMA2; (+) strand; PAM type: NRG; PAM sequence: GGG
cacctcagcacagatctgga

SEQ ID NO: 145731 - DNA, 20 bp, Artificial Sequence
  Description of Artificial Sequence: Synthetic oligonucleotide
  Target: LAMA2; (+) strand; PAM type: NRG; PAM sequence: GGG
acctcagcacagatctggag

SEQ ID NO: 145732 - DNA, 20 bp, Artificial Sequence
  Description of Artificial Sequence: Synthetic oligonucleotide
  Target: LAMA2; (+) strand; PAM type: NRG; PAM sequence: GAG
cacagatctggaggggattt

SEQ ID NO: 145733 - DNA, 20 bp, Artificial Sequence
  Description of Artificial Sequence: Synthetic oligonucleotide
  Target: LAMA2; (+) strand; PAM type: NRG; PAM sequence: TAG
gatctggaggggatttgagc

SEQ ID NO: 145734 - DNA, 20 bp, Artificial Sequence
  Description of Artificial Sequence: Synthetic oligonucleotide
  Target: LAMA2; (+) strand; PAM type: NRG; PAM sequence: AAG
tggaggggatttgagctaga

SEQ ID NO: 145735 - DNA, 20 bp, Artificial Sequence
  Description of Artificial Sequence: Synthetic oligonucleotide
  Target: LAMA2; (+) strand; PAM type: NRG; PAM sequence: GAG
actctttttttttttttttt

SEQ ID NO: 145736 - DNA, 20 bp, Artificial Sequence
  Description of Artificial Sequence: Synthetic oligonucleotide
  Target: LAMA2; (+) strand; PAM type: NRG; PAM sequence: CAG
ttttttttttttttttgaga

SEQ ID NO: 145737 - DNA, 20 bp, Artificial Sequence
  Description of Artificial Sequence: Synthetic oligonucleotide
  Target: LAMA2; (+) strand; PAM type: NRG; PAM sequence: GAG
ttttttttttttttgagaca

SEQ ID NO: 145738 - DNA, 20 bp, Artificial Sequence
  Description of Artificial Sequence: Synthetic oligonucleotide
  Target: LAMA2; (+) strand; PAM type: NRG; PAM sequence: CAG
cagagtctcgctctgtcacc

SEQ ID NO: 145739 - DNA, 20 bp, Artificial Sequence
  Description of Artificial Sequence: Synthetic oligonucleotide
  Target: LAMA2; (+) strand; PAM type: NRG; PAM sequence: AGG
agagtctcgctctgtcaccc

SEQ ID NO: 145740 - DNA, 20 bp, Artificial Sequence
  Description of Artificial Sequence: Synthetic oligonucleotide
  Target: LAMA2; (+) strand; PAM type: NRG; PAM sequence: TGG
tctcgctctgtcacccaggc

SEQ ID NO: 145741 - DNA, 20 bp, Artificial Sequence
  Description of Artificial Sequence: Synthetic oligonucleotide
  Target: LAMA2; (+) strand; PAM type: NRG; PAM sequence: GAG
tcgctctgtcacccaggctg

SEQ ID NO: 145742 - DNA, 20 bp, Artificial Sequence
  Description of Artificial Sequence: Synthetic oligonucleotide
  Target: LAMA2; (+) strand; PAM type: NRG; PAM sequence: CAG
ctgtcacccaggctggagtg

SEQ ID NO: 145743 - DNA, 20 bp, Artificial Sequence
  Description of Artificial Sequence: Synthetic oligonucleotide
  Target: LAMA2; (+) strand; PAM type: NRG; PAM sequence: TGG
tcacccaggctggagtgcag

SEQ ID NO: 145744 - DNA, 20 bp, Artificial Sequence
  Description of Artificial Sequence: Synthetic oligonucleotide
  Target: LAMA2; (+) strand; PAM type: NRG; PAM sequence: CGG
ggagtgcagtggcacaatct

SEQ ID NO: 145745 - DNA, 20 bp, Artificial Sequence
  Description of Artificial Sequence: Synthetic oligonucleotide
  Target: LAMA2; (+) strand; PAM type: NRG; PAM sequence: AAG
gcacaatctcggctcactgc

SEQ ID NO: 145746 - DNA, 20 bp, Artificial Sequence
  Description of Artificial Sequence: Synthetic oligonucleotide
  Target: LAMA2; (+) strand; PAM type: NRG; PAM sequence: CGG
tcactgcaagctccacctcc

SEQ ID NO: 145747 - DNA, 20 bp, Artificial Sequence
  Description of Artificial Sequence: Synthetic oligonucleotide
  Target: LAMA2; (+) strand; PAM type: NRG; PAM sequence: GGG
cactgcaagctccacctccc

SEQ ID NO: 145748 - DNA, 20 bp, Artificial Sequence
  Description of Artificial Sequence: Synthetic oligonucleotide
  Target: LAMA2; (+) strand; PAM type: NRG; PAM sequence: CAG
ttcatgccattctcccacct

SEQ ID NO: 145749 - DNA, 20 bp, Artificial Sequence
  Description of Artificial Sequence: Synthetic oligonucleotide
  Target: LAMA2; (+) strand; PAM type: NRG; PAM sequence: GAG
ttctcccacctcagcctcct

SEQ ID NO: 145750 - DNA, 20 bp, Artificial Sequence
  Description of Artificial Sequence: Synthetic oligonucleotide
  Target: LAMA2; (+) strand; PAM type: NRG; PAM sequence: TAG
tcccacctcagcctcctgag

SEQ ID NO: 145751 - DNA, 20 bp, Artificial Sequence
  Description of Artificial Sequence: Synthetic oligonucleotide
  Target: LAMA2; (+) strand; PAM type: NRG; PAM sequence: TAG
acctcagcctcctgagtagc

SEQ ID NO: 145752 - DNA, 20 bp, Artificial Sequence
  Description of Artificial Sequence: Synthetic oligonucleotide
  Target: LAMA2; (+) strand; PAM type: NRG; PAM sequence: AGG
cctcagcctcctgagtagct

SEQ ID NO: 145753 - DNA, 20 bp, Artificial Sequence
  Description of Artificial Sequence: Synthetic oligonucleotide
  Target: LAMA2; (+) strand; PAM type: NRG; PAM sequence: CAG
ctcctgagtagctaggacta

SEQ ID NO: 145754 - DNA, 20 bp, Artificial Sequence
  Description of Artificial Sequence: Synthetic oligonucleotide
  Target: LAMA2; (+) strand; PAM type: NRG; PAM sequence: AGG
tcctgagtagctaggactac

SEQ ID NO: 145755 - DNA, 20 bp, Artificial Sequence
  Description of Artificial Sequence: Synthetic oligonucleotide
  Target: LAMA2; (+) strand; PAM type: NRG; PAM sequence: TGG
caggcgcccgccaccacgcc

SEQ ID NO: 145756 - DNA, 20 bp, Artificial Sequence
  Description of Artificial Sequence: Synthetic oligonucleotide
  Target: LAMA2; (+) strand; PAM type: NRG; PAM sequence: TAG
tggctaattttttgtatttt

SEQ ID NO: 145757 - DNA, 20 bp, Artificial Sequence
  Description of Artificial Sequence: Synthetic oligonucleotide
  Target: LAMA2; (+) strand; PAM type: NRG; PAM sequence: TAG
ctaattttttgtatttttag

SEQ ID NO: 145758 - DNA, 20 bp, Artificial Sequence
  Description of Artificial Sequence: Synthetic oligonucleotide
  Target: LAMA2; (+) strand; PAM type: NRG; PAM sequence: GAG
aattttttgtatttttagta

SEQ ID NO: 145759 - DNA, 20 bp, Artificial Sequence
  Description of Artificial Sequence: Synthetic oligonucleotide
  Target: LAMA2; (+) strand; PAM type: NRG; PAM sequence: CGG
ttttgtatttttagtagaga

SEQ ID NO: 145760 - DNA, 20 bp, Artificial Sequence
  Description of Artificial Sequence: Synthetic oligonucleotide
  Target: LAMA2; (+) strand; PAM type: NRG; PAM sequence: GGG
tttgtatttttagtagagac

SEQ ID NO: 145761 - DNA, 20 bp, Artificial Sequence
  Description of Artificial Sequence: Synthetic oligonucleotide
  Target: LAMA2; (+) strand; PAM type: NRG; PAM sequence: GGG
ttgtatttttagtagagacg

SEQ ID NO: 145762 - DNA, 20 bp, Artificial Sequence
  Description of Artificial Sequence: Synthetic oligonucleotide
  Target: LAMA2; (+) strand; PAM type: NRG; PAM sequence: TAG
gagacggggtttcactgtgt

SEQ ID NO: 145763 - DNA, 20 bp, Artificial Sequence
  Description of Artificial Sequence: Synthetic oligonucleotide
  Target: LAMA2; (+) strand; PAM type: NRG; PAM sequence: CAG
cggggtttcactgtgttagc

SEQ ID NO: 145764 - DNA, 20 bp, Artificial Sequence
  Description of Artificial Sequence: Synthetic oligonucleotide
  Target: LAMA2; (+) strand; PAM type: NRG; PAM sequence: AGG
ggggtttcactgtgttagcc

SEQ ID NO: 145765 - DNA, 20 bp, Artificial Sequence
  Description of Artificial Sequence: Synthetic oligonucleotide
  Target: LAMA2; (+) strand; PAM type: NRG; PAM sequence: TGG
tttcactgtgttagccagga

SEQ ID NO: 145766 - DNA, 20 bp, Artificial Sequence
  Description of Artificial Sequence: Synthetic oligonucleotide
  Target: LAMA2; (+) strand; PAM type: NRG; PAM sequence: CGG
cgatctcctgacctcgtgat

SEQ ID NO: 145767 - DNA, 20 bp, Artificial Sequence
  Description of Artificial Sequence: Synthetic oligonucleotide
  Target: LAMA2; (+) strand; PAM type: NRG; PAM sequence: CGG
acctcgtgatcggcccgcct

SEQ ID NO: 145768 - DNA, 20 bp, Artificial Sequence
  Description of Artificial Sequence: Synthetic oligonucleotide
  Target: LAMA2; (+) strand; PAM type: NRG; PAM sequence: AAG
cggcccgcctcggcctccca

SEQ ID NO: 145769 - DNA, 20 bp, Artificial Sequence
  Description of Artificial Sequence: Synthetic oligonucleotide
  Target: LAMA2; (+) strand; PAM type: NRG; PAM sequence: TGG
gcctcggcctcccaaagtgc

SEQ ID NO: 145770 - DNA, 20 bp, Artificial Sequence
  Description of Artificial Sequence: Synthetic oligonucleotide
  Target: LAMA2; (+) strand; PAM type: NRG; PAM sequence: GGG
cctcggcctcccaaagtgct

SEQ ID NO: 145771 - DNA, 20 bp, Artificial Sequence
  Description of Artificial Sequence: Synthetic oligonucleotide
  Target: LAMA2; (+) strand; PAM type: NRG; PAM sequence: CAG
ctcccaaagtgctgggatta

SEQ ID NO: 145772 - DNA, 20 bp, Artificial Sequence
  Description of Artificial Sequence: Synthetic oligonucleotide
  Target: LAMA2; (+) strand; PAM type: NRG; PAM sequence: AGG
tcccaaagtgctgggattac

SEQ ID NO: 145773 - DNA, 20 bp, Artificial Sequence
  Description of Artificial Sequence: Synthetic oligonucleotide
  Target: LAMA2; (+) strand; PAM type: NRG; PAM sequence: GAG
agtgctgggattacaggcgt

SEQ ID NO: 145774 - DNA, 20 bp, Artificial Sequence
  Description of Artificial Sequence: Synthetic oligonucleotide
  Target: LAMA2; (+) strand; PAM type: NRG; PAM sequence: CAG
acaggcgtgagccaccgcac

SEQ ID NO: 145775 - DNA, 20 bp, Artificial Sequence
  Description of Artificial Sequence: Synthetic oligonucleotide
  Target: LAMA2; (+) strand; PAM type: NRG; PAM sequence: TGG
ttaattgcttgcatgaaaat

SEQ ID NO: 145776 - DNA, 20 bp, Artificial Sequence
  Description of Artificial Sequence: Synthetic oligonucleotide
  Target: LAMA2; (+) strand; PAM type: NRG; PAM sequence: TGG
gcttgcatgaaaattggata

SEQ ID NO: 145777 - DNA, 20 bp, Artificial Sequence
  Description of Artificial Sequence: Synthetic oligonucleotide
  Target: LAMA2; (+) strand; PAM type: NRG; PAM sequence: AAG
catgaaaattggatatggat

SEQ ID NO: 145778 - DNA, 20 bp, Artificial Sequence
  Description of Artificial Sequence: Synthetic oligonucleotide
  Target: LAMA2; (+) strand; PAM type: NRG; PAM sequence: AAG
atggataagaatgcaaaccc

SEQ ID NO: 145779 - DNA, 20 bp, Artificial Sequence
  Description of Artificial Sequence: Synthetic oligonucleotide
  Target: LAMA2; (+) strand; PAM type: NRG; PAM sequence: CAG
cacattctcctattgatgtt

SEQ ID NO: 145780 - DNA, 20 bp, Artificial Sequence
  Description of Artificial Sequence: Synthetic oligonucleotide
  Target: LAMA2; (+) strand; PAM type: NRG; PAM sequence: TAG
ctattgatgttcagtgacct

SEQ ID NO: 145781 - DNA, 20 bp, Artificial Sequence
  Description of Artificial Sequence: Synthetic oligonucleotide
  Target: LAMA2; (+) strand; PAM type: NRG; PAM sequence: CAG
ttcagtgaccttagcatttc

SEQ ID NO: 145782 - DNA, 20 bp, Artificial Sequence
  Description of Artificial Sequence: Synthetic oligonucleotide
  Target: LAMA2; (+) strand; PAM type: NRG; PAM sequence: AAG
agtgaccttagcatttccag

SEQ ID NO: 145783 - DNA, 20 bp, Artificial Sequence
  Description of Artificial Sequence: Synthetic oligonucleotide
  Target: LAMA2; (+) strand; PAM type: NRG; PAM sequence: TGG
ccagaagcacctctttattg

SEQ ID NO: 145784 - DNA, 20 bp, Artificial Sequence
  Description of Artificial Sequence: Synthetic oligonucleotide
  Target: LAMA2; (+) strand; PAM type: NRG; PAM sequence: TGG
aagcacctctttattgtgga

SEQ ID NO: 145785 - DNA, 20 bp, Artificial Sequence
  Description of Artificial Sequence: Synthetic oligonucleotide
  Target: LAMA2; (+) strand; PAM type: NRG; PAM sequence: CAG
cttacttattcatgttgtct

SEQ ID NO: 145786 - DNA, 20 bp, Artificial Sequence
  Description of Artificial Sequence: Synthetic oligonucleotide
  Target: LAMA2; (+) strand; PAM type: NRG; PAM sequence: AGG
ttacttattcatgttgtctc

SEQ ID NO: 145787 - DNA, 20 bp, Artificial Sequence
  Description of Artificial Sequence: Synthetic oligonucleotide
  Target: LAMA2; (+) strand; PAM type: NRG; PAM sequence: CAG
tcatgttgtctcaggctgtc

SEQ ID NO: 145788 - DNA, 20 bp, Artificial Sequence
  Description of Artificial Sequence: Synthetic oligonucleotide
  Target: LAMA2; (+) strand; PAM type: NRG; PAM sequence: AGG
catgttgtctcaggctgtcc

SEQ ID NO: 145789 - DNA, 20 bp, Artificial Sequence
  Description of Artificial Sequence: Synthetic oligonucleotide
  Target: LAMA2; (+) strand; PAM type: NRG; PAM sequence: TGG
ttgtctcaggctgtccaggt

SEQ ID NO: 145790 - DNA, 20 bp, Artificial Sequence
  Description of Artificial Sequence: Synthetic oligonucleotide
  Target: LAMA2; (+) strand; PAM type: NRG; PAM sequence: CAG
caggctgtccaggttggtaa

SEQ ID NO: 145791 - DNA, 20 bp, Artificial Sequence
  Description of Artificial Sequence: Synthetic oligonucleotide
  Target: LAMA2; (+) strand; PAM type: NRG; PAM sequence: AGG
aggctgtccaggttggtaac

SEQ ID NO: 145792 - DNA, 20 bp, Artificial Sequence
  Description of Artificial Sequence: Synthetic oligonucleotide
  Target: LAMA2; (+) strand; PAM type: NRG; PAM sequence: AAG
ggtaacaggtaactgctata

SEQ ID NO: 145793 - DNA, 20 bp, Artificial Sequence
  Description of Artificial Sequence: Synthetic oligonucleotide
  Target: LAMA2; (+) strand; PAM type: NRG; PAM sequence: AGG
gtaacaggtaactgctataa

SEQ ID NO: 145794 - DNA, 20 bp, Artificial Sequence
  Description of Artificial Sequence: Synthetic oligonucleotide
  Target: LAMA2; (+) strand; PAM type: NRG; PAM sequence: GGG
taacaggtaactgctataaa

SEQ ID NO: 145795 - DNA, 20 bp, Artificial Sequence
  Description of Artificial Sequence: Synthetic oligonucleotide
  Target: LAMA2; (+) strand; PAM type: NRG; PAM sequence: TGG
caggtaactgctataaaggg

SEQ ID NO: 145796 - DNA, 20 bp, Artificial Sequence
  Description of Artificial Sequence: Synthetic oligonucleotide
  Target: LAMA2; (+) strand; PAM type: NRG; PAM sequence: GAG
ggtaactgctataaagggtg

SEQ ID NO: 145797 - DNA, 20 bp, Artificial Sequence
  Description of Artificial Sequence: Synthetic oligonucleotide
  Target: LAMA2; (+) strand; PAM type: NRG; PAM sequence: TGG
gtggagcacatcctgctaaa

SEQ ID NO: 145798 - DNA, 20 bp, Artificial Sequence
  Description of Artificial Sequence: Synthetic oligonucleotide
  Target: LAMA2; (+) strand; PAM type: NRG; PAM sequence: GAG
ggagcacatcctgctaaatg

SEQ ID NO: 145799 - DNA, 20 bp, Artificial Sequence
  Description of Artificial Sequence: Synthetic oligonucleotide
  Target: LAMA2; (+) strand; PAM type: NRG; PAM sequence: GAG
agcacatcctgctaaatgga

SEQ ID NO: 145800 - DNA, 20 bp, Artificial Sequence
  Description of Artificial Sequence: Synthetic oligonucleotide
  Target: LAMA2; (+) strand; PAM type: NRG; PAM sequence: CAG
tcctgctaaatggagagatc

SEQ ID NO: 145801 - DNA, 20 bp, Artificial Sequence
  Description of Artificial Sequence: Synthetic oligonucleotide
  Target: LAMA2; (+) strand; PAM type: NRG; PAM sequence: AAG
acattttttttaactctttc

SEQ ID NO: 145802 - DNA, 20 bp, Artificial Sequence
  Description of Artificial Sequence: Synthetic oligonucleotide
  Target: LAMA2; (+) strand; PAM type: NRG; PAM sequence: AGG
cattttttttaactctttca

SEQ ID NO: 145803 - DNA, 20 bp, Artificial Sequence
  Description of Artificial Sequence: Synthetic oligonucleotide
  Target: LAMA2; (+) strand; PAM type: NRG; PAM sequence: GGG
attttttttaactctttcaa

SEQ ID NO: 145804 - DNA, 20 bp, Artificial Sequence
  Description of Artificial Sequence: Synthetic oligonucleotide
  Target: LAMA2; (+) strand; PAM type: NRG; PAM sequence: TGG
tttaactctttcaagggtaa

SEQ ID NO: 145805 - DNA, 20 bp, Artificial Sequence
  Description of Artificial Sequence: Synthetic oligonucleotide
  Target: LAMA2; (+) strand; PAM type: NRG; PAM sequence: TAG
agggtaatggcaactaacaa

SEQ ID NO: 145806 - DNA, 20 bp, Artificial Sequence
  Description of Artificial Sequence: Synthetic oligonucleotide
  Target: LAMA2; (+) strand; PAM type: NRG; PAM sequence: TAG
caatagtttctcctgtgtgc

SEQ ID NO: 145807 - DNA, 20 bp, Artificial Sequence
  Description of Artificial Sequence: Synthetic oligonucleotide
  Target: LAMA2; (+) strand; PAM type: NRG; PAM sequence: CAG
atttcttttaatccaccaaa

SEQ ID NO: 145808 - DNA, 20 bp, Artificial Sequence
  Description of Artificial Sequence: Synthetic oligonucleotide
  Target: LAMA2; (+) strand; PAM type: NRG; PAM sequence: AAG
aatccaccaaacagcactat

SEQ ID NO: 145809 - DNA, 20 bp, Artificial Sequence
  Description of Artificial Sequence: Synthetic oligonucleotide
  Target: LAMA2; (+) strand; PAM type: NRG; PAM sequence: TAG
caccaaacagcactataaga

SEQ ID NO: 145810 - DNA, 20 bp, Artificial Sequence
  Description of Artificial Sequence: Synthetic oligonucleotide
  Target: LAMA2; (+) strand; PAM type: NRG; PAM sequence: TAG
ttatttttatttacctttgt

SEQ ID NO: 145811 - DNA, 20 bp, Artificial Sequence
  Description of Artificial Sequence: Synthetic oligonucleotide
  Target: LAMA2; (+) strand; PAM type: NRG; PAM sequence: GAG
atttttatttacctttgtta

SEQ ID NO: 145812 - DNA, 20 bp, Artificial Sequence
  Description of Artificial Sequence: Synthetic oligonucleotide
  Target: LAMA2; (+) strand; PAM type: NRG; PAM sequence: GAG
tacctttgttagagaaaact

SEQ ID NO: 145813 - DNA, 20 bp, Artificial Sequence
  Description of Artificial Sequence: Synthetic oligonucleotide
  Target: LAMA2; (+) strand; PAM type: NRG; PAM sequence: AGG
acctttgttagagaaaactg

SEQ ID NO: 145814 - DNA, 20 bp, Artificial Sequence
  Description of Artificial Sequence: Synthetic oligonucleotide
  Target: LAMA2; (+) strand; PAM type: NRG; PAM sequence: TAG
tgttagagaaaactgaggta

SEQ ID NO: 145815 - DNA, 20 bp, Artificial Sequence
  Description of Artificial Sequence: Synthetic oligonucleotide
  Target: LAMA2; (+) strand; PAM type: NRG; PAM sequence: GAG
ttagagaaaactgaggtata

SEQ ID NO: 145816 - DNA, 20 bp, Artificial Sequence
  Description of Artificial Sequence: Synthetic oligonucleotide
  Target: LAMA2; (+) strand; PAM type: NRG; PAM sequence: GAG
agagaaaactgaggtataga

SEQ ID NO: 145817 - DNA, 20 bp, Artificial Sequence
  Description of Artificial Sequence: Synthetic oligonucleotide
  Target: LAMA2; (+) strand; PAM type: NRG; PAM sequence: AAG
aactgaggtatagagagatt

SEQ ID NO: 145818 - DNA, 20 bp, Artificial Sequence
  Description of Artificial Sequence: Synthetic oligonucleotide
  Target: LAMA2; (+) strand; PAM type: NRG; PAM sequence: CAG
gtaaattgtctaaattcaca

SEQ ID NO: 145819 - DNA, 20 bp, Artificial Sequence
  Description of Artificial Sequence: Synthetic oligonucleotide
  Target: LAMA2; (+) strand; PAM type: NRG; PAM sequence: TAG
attgtctaaattcacacaga

SEQ ID NO: 145820 - DNA, 20 bp, Artificial Sequence
  Description of Artificial Sequence: Synthetic oligonucleotide
  Target: LAMA2; (+) strand; PAM type: NRG; PAM sequence: AAG
tctaaattcacacagatagt

SEQ ID NO: 145821 - DNA, 20 bp, Artificial Sequence
  Description of Artificial Sequence: Synthetic oligonucleotide
  Target: LAMA2; (+) strand; PAM type: NRG; PAM sequence: TGG
aaattcacacagatagtaag

SEQ ID NO: 145822 - DNA, 20 bp, Artificial Sequence
  Description of Artificial Sequence: Synthetic oligonucleotide
  Target: LAMA2; (+) strand; PAM type: NRG; PAM sequence: GAG
attcacacagatagtaagtg

SEQ ID NO: 145823 - DNA, 20 bp, Artificial Sequence
  Description of Artificial Sequence: Synthetic oligonucleotide
  Target: LAMA2; (+) strand; PAM type: NRG; PAM sequence: AGG
ttcacacagatagtaagtgg

SEQ ID NO: 145824 - DNA, 20 bp, Artificial Sequence
  Description of Artificial Sequence: Synthetic oligonucleotide
  Target: LAMA2; (+) strand; PAM type: NRG; PAM sequence: GAG
cacacagatagtaagtggag

SEQ ID NO: 145825 - DNA, 20 bp, Artificial Sequence
  Description of Artificial Sequence: Synthetic oligonucleotide
  Target: LAMA2; (+) strand; PAM type: NRG; PAM sequence: CAG
cagatagtaagtggaggagc

SEQ ID NO: 145826 - DNA, 20 bp, Artificial Sequence
  Description of Artificial Sequence: Synthetic oligonucleotide
  Target: LAMA2; (+) strand; PAM type: NRG; PAM sequence: AAG
aggagccagaatttgaacac

SEQ ID NO: 145827 - DNA, 20 bp, Artificial Sequence
  Description of Artificial Sequence: Synthetic oligonucleotide
  Target: LAMA2; (+) strand; PAM type: NRG; PAM sequence: TGG
acaaatttgatcttaaacta

SEQ ID NO: 145828 - DNA, 20 bp, Artificial Sequence
  Description of Artificial Sequence: Synthetic oligonucleotide
  Target: LAMA2; (+) strand; PAM type: NRG; PAM sequence: AAG
tacgtacatgcaatcacaca

SEQ ID NO: 145829 - DNA, 20 bp, Artificial Sequence
  Description of Artificial Sequence: Synthetic oligonucleotide
  Target: LAMA2; (+) strand; PAM type: NRG; PAM sequence: CAG
catgcaatcacacaaagtat

SEQ ID NO: 145830 - DNA, 20 bp, Artificial Sequence
  Description of Artificial Sequence: Synthetic oligonucleotide
  Target: LAMA2; (+) strand; PAM type: NRG; PAM sequence: AGG
atgcaatcacacaaagtatc

SEQ ID NO: 145831 - DNA, 20 bp, Artificial Sequence
  Description of Artificial Sequence: Synthetic oligonucleotide
  Target: LAMA2; (+) strand; PAM type: NRG; PAM sequence: TGG
cacacaaagtatcaggcaca

SEQ ID NO: 145832 - DNA, 20 bp, Artificial Sequence
  Description of Artificial Sequence: Synthetic oligonucleotide
  Target: LAMA2; (+) strand; PAM type: NRG; PAM sequence: GGG
acacaaagtatcaggcacat

SEQ ID NO: 145833 - DNA, 20 bp, Artificial Sequence
  Description of Artificial Sequence: Synthetic oligonucleotide
  Target: LAMA2; (+) strand; PAM type: NRG; PAM sequence: GGG
cacaaagtatcaggcacatg

SEQ ID NO: 145834 - DNA, 20 bp, Artificial Sequence
  Description of Artificial Sequence: Synthetic oligonucleotide
  Target: LAMA2; (+) strand; PAM type: NRG; PAM sequence: TAG
aagtatcaggcacatgggga

SEQ ID NO: 145835 - DNA, 20 bp, Artificial Sequence
  Description of Artificial Sequence: Synthetic oligonucleotide
  Target: LAMA2; (+) strand; PAM type: NRG; PAM sequence: TAG
cacatggggatagacaatat

SEQ ID NO: 145836 - DNA, 20 bp, Artificial Sequence
  Description of Artificial Sequence: Synthetic oligonucleotide
  Target: LAMA2; (+) strand; PAM type: NRG; PAM sequence: AAG
ggggatagacaatattagaa

SEQ ID NO: 145837 - DNA, 20 bp, Artificial Sequence
  Description of Artificial Sequence: Synthetic oligonucleotide
  Target: LAMA2; (+) strand; PAM type: NRG; PAM sequence: CAG
tatacatacaaacatcctta

SEQ ID NO: 145838 - DNA, 20 bp, Artificial Sequence
  Description of Artificial Sequence: Synthetic oligonucleotide
  Target: LAMA2; (+) strand; PAM type: NRG; PAM sequence: TAG
catccttacagttgtacaca

SEQ ID NO: 145839 - DNA, 20 bp, Artificial Sequence
  Description of Artificial Sequence: Synthetic oligonucleotide
  Target: LAMA2; (+) strand; PAM type: NRG; PAM sequence: CAG
tacagttgtacacatagact

SEQ ID NO: 145840 - DNA, 20 bp, Artificial Sequence
  Description of Artificial Sequence: Synthetic oligonucleotide
  Target: LAMA2; (+) strand; PAM type: NRG; PAM sequence: AGG
acagttgtacacatagactc

SEQ ID NO: 145841 - DNA, 20 bp, Artificial Sequence
  Description of Artificial Sequence: Synthetic oligonucleotide
  Target: LAMA2; (+) strand; PAM type: NRG; PAM sequence: AAG
tcaggtttataaacccactg

SEQ ID NO: 145842 - DNA, 20 bp, Artificial Sequence
  Description of Artificial Sequence: Synthetic oligonucleotide
  Target: LAMA2; (+) strand; PAM type: NRG; PAM sequence: AAG
tttataaacccactgaagtg

SEQ ID NO: 145843 - DNA, 20 bp, Artificial Sequence
  Description of Artificial Sequence: Synthetic oligonucleotide
  Target: LAMA2; (+) strand; PAM type: NRG; PAM sequence: GAG
tttaaaattccttgtgcaat

SEQ ID NO: 145844 - DNA, 20 bp, Artificial Sequence
  Description of Artificial Sequence: Synthetic oligonucleotide
  Target: LAMA2; (+) strand; PAM type: NRG; PAM sequence: AAG
aattccttgtgcaatgagaa

SEQ ID NO: 145845 - DNA, 20 bp, Artificial Sequence
  Description of Artificial Sequence: Synthetic oligonucleotide
  Target: LAMA2; (+) strand; PAM type: NRG; PAM sequence: CAG
cttgtgcaatgagaaaagat

SEQ ID NO: 145846 - DNA, 20 bp, Artificial Sequence
  Description of Artificial Sequence: Synthetic oligonucleotide
  Target: LAMA2; (+) strand; PAM type: NRG; PAM sequence: GAG
tgtgcaatgagaaaagatca

SEQ ID NO: 145847 - DNA, 20 bp, Artificial Sequence
  Description of Artificial Sequence: Synthetic oligonucleotide
  Target: LAMA2; (+) strand; PAM type: NRG; PAM sequence: GAG
tgcaatgagaaaagatcaga

SEQ ID NO: 145848 - DNA, 20 bp, Artificial Sequence
  Description of Artificial Sequence: Synthetic oligonucleotide
  Target: LAMA2; (+) strand; PAM type: NRG; PAM sequence: AGG
gcaatgagaaaagatcagag

SEQ ID NO: 145849 - DNA, 20 bp, Artificial Sequence
  Description of Artificial Sequence: Synthetic oligonucleotide
  Target: LAMA2; (+) strand; PAM type: NRG; PAM sequence: CAG
gaaaagatcagagaggccta

SEQ ID NO: 145850 - DNA, 20 bp, Artificial Sequence
  Description of Artificial Sequence: Synthetic oligonucleotide
  Target: LAMA2; (+) strand; PAM type: NRG; PAM sequence: CAG
aggcctacagtttcctttta

SEQ ID NO: 145851 - DNA, 20 bp, Artificial Sequence
  Description of Artificial Sequence: Synthetic oligonucleotide
  Target: LAMA2; (+) strand; PAM type: NRG; PAM sequence: GAG
gcctacagtttccttttaca

SEQ ID NO: 145852 - DNA, 20 bp, Artificial Sequence
  Description of Artificial Sequence: Synthetic oligonucleotide
  Target: LAMA2; (+) strand; PAM type: NRG; PAM sequence: TAG
acagtttccttttacagagc

SEQ ID NO: 145853 - DNA, 20 bp, Artificial Sequence
  Description of Artificial Sequence: Synthetic oligonucleotide
  Target: LAMA2; (+) strand; PAM type: NRG; PAM sequence: AGG
cagtttccttttacagagct

SEQ ID NO: 145854 - DNA, 20 bp, Artificial Sequence
  Description of Artificial Sequence: Synthetic oligonucleotide
  Target: LAMA2; (+) strand; PAM type: NRG; PAM sequence: CAG
ttccttttacagagctaggc

SEQ ID NO: 145855 - DNA, 20 bp, Artificial Sequence
  Description of Artificial Sequence: Synthetic oligonucleotide
  Target: LAMA2; (+) strand; PAM type: NRG; PAM sequence: AGG
tccttttacagagctaggcc

SEQ ID NO: 145856 - DNA, 20 bp, Artificial Sequence
  Description of Artificial Sequence: Synthetic oligonucleotide
  Target: LAMA2; (+) strand; PAM type: NRG; PAM sequence: GGG
ccttttacagagctaggcca

SEQ ID NO: 145857 - DNA, 20 bp, Artificial Sequence
  Description of Artificial Sequence: Synthetic oligonucleotide
  Target: LAMA2; (+) strand; PAM type: NRG; PAM sequence: GGG
cttttacagagctaggccag

SEQ ID NO: 145858 - DNA, 20 bp, Artificial Sequence
  Description of Artificial Sequence: Synthetic oligonucleotide
  Target: LAMA2; (+) strand; PAM type: NRG; PAM sequence: TAG
gctaggccaggggctgtatt

SEQ ID NO: 145859 - DNA, 20 bp, Artificial Sequence
  Description of Artificial Sequence: Synthetic oligonucleotide
  Target: LAMA2; (+) strand; PAM type: NRG; PAM sequence: GAG
taggccaggggctgtattta

SEQ ID NO: 145860 - DNA, 20 bp, Artificial Sequence
  Description of Artificial Sequence: Synthetic oligonucleotide
  Target: LAMA2; (+) strand; PAM type: NRG; PAM sequence: CGG
cacatgattttacttgaatg

SEQ ID NO: 145861 - DNA, 20 bp, Artificial Sequence
  Description of Artificial Sequence: Synthetic oligonucleotide
  Target: LAMA2; (+) strand; PAM type: NRG; PAM sequence: GAG
catgattttacttgaatgcg

SEQ ID NO: 145862 - DNA, 20 bp, Artificial Sequence
  Description of Artificial Sequence: Synthetic oligonucleotide
  Target: LAMA2; (+) strand; PAM type: NRG; PAM sequence: CAG
gaatatgcaatttcactcta

SEQ ID NO: 145863 - DNA, 20 bp, Artificial Sequence
  Description of Artificial Sequence: Synthetic oligonucleotide
  Target: LAMA2; (+) strand; PAM type: NRG; PAM sequence: CGG
acagatgaaataaaattaaa

SEQ ID NO: 145864 - DNA, 20 bp, Artificial Sequence
  Description of Artificial Sequence: Synthetic oligonucleotide
  Target: LAMA2; (+) strand; PAM type: NRG; PAM sequence: GGG
cagatgaaataaaattaaac

SEQ ID NO: 145865 - DNA, 20 bp, Artificial Sequence
  Description of Artificial Sequence: Synthetic oligonucleotide
  Target: LAMA2; (+) strand; PAM type: NRG; PAM sequence: GGG
agatgaaataaaattaaacg

SEQ ID NO: 145866 - DNA, 20 bp, Artificial Sequence
  Description of Artificial Sequence: Synthetic oligonucleotide
  Target: LAMA2; (+) strand; PAM type: NRG; PAM sequence: AAG
aataaaattaaacggggcaa

SEQ ID NO: 145867 - DNA, 20 bp, Artificial Sequence
  Description of Artificial Sequence: Synthetic oligonucleotide
  Target: LAMA2; (+) strand; PAM type: NRG; PAM sequence: AAG
aattaaacggggcaaaagta

SEQ ID NO: 145868 - DNA, 20 bp, Artificial Sequence
  Description of Artificial Sequence: Synthetic oligonucleotide
  Target: LAMA2; (+) strand; PAM type: NRG; PAM sequence: AAG
taaacggggcaaaagtaaag

SEQ ID NO: 145869 - DNA, 20 bp, Artificial Sequence
  Description of Artificial Sequence: Synthetic oligonucleotide
  Target: LAMA2; (+) strand; PAM type: NRG; PAM sequence: TGG
ggggcaaaagtaaagaagaa

SEQ ID NO: 145870 - DNA, 20 bp, Artificial Sequence
  Description of Artificial Sequence: Synthetic oligonucleotide
  Target: LAMA2; (+) strand; PAM type: NRG; PAM sequence: GAG
ggcaaaagtaaagaagaatg

SEQ ID NO: 145871 - DNA, 20 bp, Artificial Sequence
  Description of Artificial Sequence: Synthetic oligonucleotide
  Target: LAMA2; (+) strand; PAM type: NRG; PAM sequence: TAG
aagtaaagaagaatggagac

SEQ ID NO: 145872 - DNA, 20 bp, Artificial Sequence
  Description of Artificial Sequence: Synthetic oligonucleotide
  Target: LAMA2; (+) strand; PAM type: NRG; PAM sequence: AGG
agtaaagaagaatggagact

SEQ ID NO: 145873 - DNA, 20 bp, Artificial Sequence
  Description of Artificial Sequence: Synthetic oligonucleotide
  Target: LAMA2; (+) strand; PAM type: NRG; PAM sequence: AAG
agaagaatggagactaggta

SEQ ID NO: 145874 - DNA, 20 bp, Artificial Sequence
  Description of Artificial Sequence: Synthetic oligonucleotide
  Target: LAMA2; (+) strand; PAM type: NRG; PAM sequence: TGG
atggagactaggtaaagtga

SEQ ID NO: 145875 - DNA, 20 bp, Artificial Sequence
  Description of Artificial Sequence: Synthetic oligonucleotide
  Target: LAMA2; (+) strand; PAM type: NRG; PAM sequence: AAG
agactaggtaaagtgatgga

SEQ ID NO: 145876 - DNA, 20 bp, Artificial Sequence
  Description of Artificial Sequence: Synthetic oligonucleotide
  Target: LAMA2; (+) strand; PAM type: NRG; PAM sequence: GAG
actaggtaaagtgatggaaa

SEQ ID NO: 145877 - DNA, 20 bp, Artificial Sequence
  Description of Artificial Sequence: Synthetic oligonucleotide
  Target: LAMA2; (+) strand; PAM type: NRG; PAM sequence: TAG
ggaaagagacaccaaaaaat

SEQ ID NO: 145878 - DNA, 20 bp, Artificial Sequence
  Description of Artificial Sequence: Synthetic oligonucleotide
  Target: LAMA2; (+) strand; PAM type: NRG; PAM sequence: AAG
ccaaaaaattagtcatgtga

SEQ ID NO: 145879 - DNA, 20 bp, Artificial Sequence
  Description of Artificial Sequence: Synthetic oligonucleotide
  Target: LAMA2; (+) strand; PAM type: NRG; PAM sequence: AAG
agtcatgtgaaagcaaaact

SEQ ID NO: 145880 - DNA, 20 bp, Artificial Sequence
  Description of Artificial Sequence: Synthetic oligonucleotide
  Target: LAMA2; (+) strand; PAM type: NRG; PAM sequence: GAG
tcatgtgaaagcaaaactaa

SEQ ID NO: 145881 - DNA, 20 bp, Artificial Sequence
  Description of Artificial Sequence: Synthetic oligonucleotide
  Target: LAMA2; (+) strand; PAM type: NRG; PAM sequence: AGG
catgtgaaagcaaaactaag

SEQ ID NO: 145882 - DNA, 20 bp, Artificial Sequence
  Description of Artificial Sequence: Synthetic oligonucleotide
  Target: LAMA2; (+) strand; PAM type: NRG; PAM sequence: GAG
tgtgaaagcaaaactaagag

SEQ ID NO: 145883 - DNA, 20 bp, Artificial Sequence
  Description of Artificial Sequence: Synthetic oligonucleotide
  Target: LAMA2; (+) strand; PAM type: NRG; PAM sequence: GAG
tgaaagcaaaactaagagga

SEQ ID NO: 145884 - DNA, 20 bp, Artificial Sequence
  Description of Artificial Sequence: Synthetic oligonucleotide
  Target: LAMA2; (+) strand; PAM type: NRG; PAM sequence: AGG
gaaagcaaaactaagaggag

SEQ ID NO: 145885 - DNA, 20 bp, Artificial Sequence
  Description of Artificial Sequence: Synthetic oligonucleotide
  Target: LAMA2; (+) strand; PAM type: NRG; PAM sequence: GGG
aaagcaaaactaagaggaga

SEQ ID NO: 145886 - DNA, 20 bp, Artificial Sequence
  Description of Artificial Sequence: Synthetic oligonucleotide
  Target: LAMA2; (+) strand; PAM type: NRG; PAM sequence: AAG
caaaactaagaggagaggga

SEQ ID NO: 145887 - DNA, 20 bp, Artificial Sequence
  Description of Artificial Sequence: Synthetic oligonucleotide
  Target: LAMA2; (+) strand; PAM type: NRG; PAM sequence: AGG
aaaactaagaggagagggaa

SEQ ID NO: 145888 - DNA, 20 bp, Artificial Sequence
  Description of Artificial Sequence: Synthetic oligonucleotide
  Target: LAMA2; (+) strand; PAM type: NRG; PAM sequence: TGG
actaagaggagagggaaagg

SEQ ID NO: 145889 - DNA, 20 bp, Artificial Sequence
  Description of Artificial Sequence: Synthetic oligonucleotide
  Target: LAMA2; (+) strand; PAM type: NRG; PAM sequence: AAG
aggagagggaaaggtggcaa

SEQ ID NO: 145890 - DNA, 20 bp, Artificial Sequence
  Description of Artificial Sequence: Synthetic oligonucleotide
  Target: LAMA2; (+) strand; PAM type: NRG; PAM sequence: AAG
agagggaaaggtggcaaaag

SEQ ID NO: 145891 - DNA, 20 bp, Artificial Sequence
  Description of Artificial Sequence: Synthetic oligonucleotide
  Target: LAMA2; (+) strand; PAM type: NRG; PAM sequence: AGG
gagggaaaggtggcaaaaga

SEQ ID NO: 145892 - DNA, 20 bp, Artificial Sequence
  Description of Artificial Sequence: Synthetic oligonucleotide
  Target: LAMA2; (+) strand; PAM type: NRG; PAM sequence: GGG
agggaaaggtggcaaaagaa

SEQ ID NO: 145893 - DNA, 20 bp, Artificial Sequence
  Description of Artificial Sequence: Synthetic oligonucleotide
  Target: LAMA2; (+) strand; PAM type: NRG; PAM sequence: CAG
tggcaaaagaagggaacatt

SEQ ID NO: 145894 - DNA, 20 bp, Artificial Sequence
  Description of Artificial Sequence: Synthetic oligonucleotide
  Target: LAMA2; (+) strand; PAM type: NRG; PAM sequence: GAG
gcaaaagaagggaacattca

SEQ ID NO: 145895 - DNA, 20 bp, Artificial Sequence
  Description of Artificial Sequence: Synthetic oligonucleotide
  Target: LAMA2; (+) strand; PAM type: NRG; PAM sequence: GAG
tcagagaatgttgatatatt

SEQ ID NO: 145896 - DNA, 20 bp, Artificial Sequence
  Description of Artificial Sequence: Synthetic oligonucleotide
  Target: LAMA2; (+) strand; PAM type: NRG; PAM sequence: GAG
agagaatgttgatatattga

SEQ ID NO: 145897 - DNA, 20 bp, Artificial Sequence
  Description of Artificial Sequence: Synthetic oligonucleotide
  Target: LAMA2; (+) strand; PAM type: NRG; PAM sequence: AGG
gagaatgttgatatattgag

SEQ ID NO: 145898 - DNA, 20 bp, Artificial Sequence
  Description of Artificial Sequence: Synthetic oligonucleotide
  Target: LAMA2; (+) strand; PAM type: NRG; PAM sequence: GAG
atgttgatatattgagaggt

SEQ ID NO: 145899 - DNA, 20 bp, Artificial Sequence
  Description of Artificial Sequence: Synthetic oligonucleotide
  Target: LAMA2; (+) strand; PAM type: NRG; PAM sequence: TAG
gatatattgagaggtgagaa

SEQ ID NO: 145900 - DNA, 20 bp, Artificial Sequence
  Description of Artificial Sequence: Synthetic oligonucleotide
  Target: LAMA2; (+) strand; PAM type: NRG; PAM sequence: AGG
atatattgagaggtgagaat

SEQ ID NO: 145901 - DNA, 20 bp, Artificial Sequence
  Description of Artificial Sequence: Synthetic oligonucleotide
  Target: LAMA2; (+) strand; PAM type: NRG; PAM sequence: GGG
tatattgagaggtgagaata

SEQ ID NO: 145902 - DNA, 20 bp, Artificial Sequence
  Description of Artificial Sequence: Synthetic oligonucleotide
  Target: LAMA2; (+) strand; PAM type: NRG; PAM sequence: GAG
tattgagaggtgagaatagg

SEQ ID NO: 145903 - DNA, 20 bp, Artificial Sequence
  Description of Artificial Sequence: Synthetic oligonucleotide
  Target: LAMA2; (+) strand; PAM type: NRG; PAM sequence: TGG
gagaggtgagaatagggagt

SEQ ID NO: 145904 - DNA, 20 bp, Artificial Sequence
  Description of Artificial Sequence: Synthetic oligonucleotide
  Target: LAMA2; (+) strand; PAM type: NRG; PAM sequence: TAG
aggtgagaatagggagttgg

SEQ ID NO: 145905 - DNA, 20 bp, Artificial Sequence
  Description of Artificial Sequence: Synthetic oligonucleotide
  Target: LAMA2; (+) strand; PAM type: NRG; PAM sequence: AGG
ggtgagaatagggagttggt

SEQ ID NO: 145906 - DNA, 20 bp, Artificial Sequence
  Description of Artificial Sequence: Synthetic oligonucleotide
  Target: LAMA2; (+) strand; PAM type: NRG; PAM sequence: AAG
agaatagggagttggtaggc

SEQ ID NO: 145907 - DNA, 20 bp, Artificial Sequence
  Description of Artificial Sequence: Synthetic oligonucleotide
  Target: LAMA2; (+) strand; PAM type: NRG; PAM sequence: CAG
gggagttggtaggcaagtgt

SEQ ID NO: 145908 - DNA, 20 bp, Artificial Sequence
  Description of Artificial Sequence: Synthetic oligonucleotide
  Target: LAMA2; (+) strand; PAM type: NRG; PAM sequence: GAG
gagttggtaggcaagtgtca

SEQ ID NO: 145909 - DNA, 20 bp, Artificial Sequence
  Description of Artificial Sequence: Synthetic oligonucleotide
  Target: LAMA2; (+) strand; PAM type: NRG; PAM sequence: TGG
ggtaggcaagtgtcagagtg

SEQ ID NO: 145910 - DNA, 20 bp, Artificial Sequence
  Description of Artificial Sequence: Synthetic oligonucleotide
  Target: LAMA2; (+) strand; PAM type: NRG; PAM sequence: GGG
gtaggcaagtgtcagagtgt

SEQ ID NO: 145911 - DNA, 20 bp, Artificial Sequence
  Description of Artificial Sequence: Synthetic oligonucleotide
  Target: LAMA2; (+) strand; PAM type: NRG; PAM sequence: GAG
aggcaagtgtcagagtgtgg

SEQ ID NO: 145912 - DNA, 20 bp, Artificial Sequence
  Description of Artificial Sequence: Synthetic oligonucleotide
  Target: LAMA2; (+) strand; PAM type: NRG; PAM sequence: AGG
ggcaagtgtcagagtgtggg

SEQ ID NO: 145913 - DNA, 20 bp, Artificial Sequence
  Description of Artificial Sequence: Synthetic oligonucleotide
  Target: LAMA2; (+) strand; PAM type: NRG; PAM sequence: TGG
agtgtcagagtgtgggagga

SEQ ID NO: 145914 - DNA, 20 bp, Artificial Sequence
  Description of Artificial Sequence: Synthetic oligonucleotide
  Target: LAMA2; (+) strand; PAM type: NRG; PAM sequence: CAG
agagtgtgggaggatggtga

SEQ ID NO: 145915 - DNA, 20 bp, Artificial Sequence
  Description of Artificial Sequence: Synthetic oligonucleotide
  Target: LAMA2; (+) strand; PAM type: NRG; PAM sequence: TAG
gggaggatggtgacagtcac

SEQ ID NO: 145916 - DNA, 20 bp, Artificial Sequence
  Description of Artificial Sequence: Synthetic oligonucleotide
  Target: LAMA2; (+) strand; PAM type: NRG; PAM sequence: AGG
ggaggatggtgacagtcact

SEQ ID NO: 145917 - DNA, 20 bp, Artificial Sequence
  Description of Artificial Sequence: Synthetic oligonucleotide
  Target: LAMA2; (+) strand; PAM type: NRG; PAM sequence: CAG
gtgacagtcactaggaactc

SEQ ID NO: 145918 - DNA, 20 bp, Artificial Sequence
  Description of Artificial Sequence: Synthetic oligonucleotide
  Target: LAMA2; (+) strand; PAM type: NRG; PAM sequence: AAG
gtttgcatacacacaatgtt

SEQ ID NO: 145919 - DNA, 20 bp, Artificial Sequence
  Description of Artificial Sequence: Synthetic oligonucleotide
  Target: LAMA2; (+) strand; PAM type: NRG; PAM sequence: TAG
acacacaatgttaagaacat

SEQ ID NO: 145920 - DNA, 20 bp, Artificial Sequence
  Description of Artificial Sequence: Synthetic oligonucleotide
  Target: LAMA2; (+) strand; PAM type: NRG; PAM sequence: TAG
atgttaagaacattagaaat

SEQ ID NO: 145921 - DNA, 20 bp, Artificial Sequence
  Description of Artificial Sequence: Synthetic oligonucleotide
  Target: LAMA2; (+) strand; PAM type: NRG; PAM sequence: TAG
taagaacattagaaattagc

SEQ ID NO: 145922 - DNA, 20 bp, Artificial Sequence
  Description of Artificial Sequence: Synthetic oligonucleotide
  Target: LAMA2; (+) strand; PAM type: NRG; PAM sequence: TGG
attagaaattagctagccaa

SEQ ID NO: 145923 - DNA, 20 bp, Artificial Sequence
  Description of Artificial Sequence: Synthetic oligonucleotide
  Target: LAMA2; (+) strand; PAM type: NRG; PAM sequence: CAG
tagctagccaatggaatgct

SEQ ID NO: 145924 - DNA, 20 bp, Artificial Sequence
  Description of Artificial Sequence: Synthetic oligonucleotide
  Target: LAMA2; (+) strand; PAM type: NRG; PAM sequence: AAG
caatggaatgctcagtcttg

SEQ ID NO: 145925 - DNA, 20 bp, Artificial Sequence
  Description of Artificial Sequence: Synthetic oligonucleotide
  Target: LAMA2; (+) strand; PAM type: NRG; PAM sequence: GAG
atggaatgctcagtcttgaa

SEQ ID NO: 145926 - DNA, 20 bp, Artificial Sequence
  Description of Artificial Sequence: Synthetic oligonucleotide
  Target: LAMA2; (+) strand; PAM type: NRG; PAM sequence: TAG
gcttaaactcctgtatgcat

SEQ ID NO: 145927 - DNA, 20 bp, Artificial Sequence
  Description of Artificial Sequence: Synthetic oligonucleotide
  Target: LAMA2; (+) strand; PAM type: NRG; PAM sequence: AAG
agtatgattccataaattta

SEQ ID NO: 145928 - DNA, 20 bp, Artificial Sequence
  Description of Artificial Sequence: Synthetic oligonucleotide
  Target: LAMA2; (+) strand; PAM type: NRG; PAM sequence: GAG
tttaaagtctctgacatctt

SEQ ID NO: 145929 - DNA, 20 bp, Artificial Sequence
  Description of Artificial Sequence: Synthetic oligonucleotide
  Target: LAMA2; (+) strand; PAM type: NRG; PAM sequence: AAG
tctctgacatcttgagtttt

SEQ ID NO: 145930 - DNA, 20 bp, Artificial Sequence
  Description of Artificial Sequence: Synthetic oligonucleotide
  Target: LAMA2; (+) strand; PAM type: NRG; PAM sequence: CAG
aagctttctgaacattaaat

SEQ ID NO: 145931 - DNA, 20 bp, Artificial Sequence
  Description of Artificial Sequence: Synthetic oligonucleotide
  Target: LAMA2; (+) strand; PAM type: NRG; PAM sequence: TGG
ctttctgaacattaaatcag

SEQ ID NO: 145932 - DNA, 20 bp, Artificial Sequence
  Description of Artificial Sequence: Synthetic oligonucleotide
  Target: LAMA2; (+) strand; PAM type: NRG; PAM sequence: GAG
ttctgaacattaaatcagtg

SEQ ID NO: 145933 - DNA, 20 bp, Artificial Sequence
  Description of Artificial Sequence: Synthetic oligonucleotide
  Target: LAMA2; (+) strand; PAM type: NRG; PAM sequence: AGG
tctgaacattaaatcagtgg

SEQ ID NO: 145934 - DNA, 20 bp, Artificial Sequence
  Description of Artificial Sequence: Synthetic oligonucleotide
  Target: LAMA2; (+) strand; PAM type: NRG; PAM sequence: TAG
attaaatcagtggaggctgc

SEQ ID NO: 145935 - DNA, 20 bp, Artificial Sequence
  Description of Artificial Sequence: Synthetic oligonucleotide
  Target: LAMA2; (+) strand; PAM type: NRG; PAM sequence: TAG
aaatcagtggaggctgctag

SEQ ID NO: 145936 - DNA, 20 bp, Artificial Sequence
  Description of Artificial Sequence: Synthetic oligonucleotide
  Target: LAMA2; (+) strand; PAM type: NRG; PAM sequence: GAG
aatgctgcttctatacatat

SEQ ID NO: 145937 - DNA, 20 bp, Artificial Sequence
  Description of Artificial Sequence: Synthetic oligonucleotide
  Target: LAMA2; (+) strand; PAM type: NRG; PAM sequence: CAG
tccaaattaatgtatttata

SEQ ID NO: 145938 - DNA, 20 bp, Artificial Sequence
  Description of Artificial Sequence: Synthetic oligonucleotide
  Target: LAMA2; (+) strand; PAM type: NRG; PAM sequence: CAG
tcgtaaaatacacacacaca

SEQ ID NO: 145939 - DNA, 20 bp, Artificial Sequence
  Description of Artificial Sequence: Synthetic oligonucleotide
  Target: LAMA2; (+) strand; PAM type: NRG; PAM sequence: GAG
gtaaaatacacacacacaca

SEQ ID NO: 145940 - DNA, 20 bp, Artificial Sequence
  Description of Artificial Sequence: Synthetic oligonucleotide
  Target: LAMA2; (+) strand; PAM type: NRG; PAM sequence: AAG
cacaattcaacttttctctg

SEQ ID NO: 145941 - DNA, 20 bp, Artificial Sequence
  Description of Artificial Sequence: Synthetic oligonucleotide
  Target: LAMA2; (+) strand; PAM type: NRG; PAM sequence: GAG
cttttctctgaagaaccttt

SEQ ID NO: 145942 - DNA, 20 bp, Artificial Sequence
  Description of Artificial Sequence: Synthetic oligonucleotide
  Target: LAMA2; (+) strand; PAM type: NRG; PAM sequence: CAG
tctctgaagaacctttgagt

SEQ ID NO: 145943 - DNA, 20 bp, Artificial Sequence
  Description of Artificial Sequence: Synthetic oligonucleotide
  Target: LAMA2; (+) strand; PAM type: NRG; PAM sequence: GAG
tctgaagaacctttgagtca

SEQ ID NO: 145944 - DNA, 20 bp, Artificial Sequence
  Description of Artificial Sequence: Synthetic oligonucleotide
  Target: LAMA2; (+) strand; PAM type: NRG; PAM sequence: GAG
gaacctttgagtcagagaat

SEQ ID NO: 145945 - DNA, 20 bp, Artificial Sequence
  Description of Artificial Sequence: Synthetic oligonucleotide
  Target: LAMA2; (+) strand; PAM type: NRG; PAM sequence: AAG
tgagtcagagaatgagaatg

SEQ ID NO: 145946 - DNA, 20 bp, Artificial Sequence
  Description of Artificial Sequence: Synthetic oligonucleotide
  Target: LAMA2; (+) strand; PAM type: NRG; PAM sequence: AGG
gagtcagagaatgagaatga

SEQ ID NO: 145947 - DNA, 20 bp, Artificial Sequence
  Description of Artificial Sequence: Synthetic oligonucleotide
  Target: LAMA2; (+) strand; PAM type: NRG; PAM sequence: GAG
gtcagagaatgagaatgaag

SEQ ID NO: 145948 - DNA, 20 bp, Artificial Sequence
  Description of Artificial Sequence: Synthetic oligonucleotide
  Target: LAMA2; (+) strand; PAM type: NRG; PAM sequence: AAG
ggagactgaatttctctttt

SEQ ID NO: 145949 - DNA, 20 bp, Artificial Sequence
  Description of Artificial Sequence: Synthetic oligonucleotide
  Target: LAMA2; (+) strand; PAM type: NRG; PAM sequence: TAG
ttctcttttaagttcctgtc

SEQ ID NO: 145950 - DNA, 20 bp, Artificial Sequence
  Description of Artificial Sequence: Synthetic oligonucleotide
  Target: LAMA2; (+) strand; PAM type: NRG; PAM sequence: AGG
tctcttttaagttcctgtct

SEQ ID NO: 145951 - DNA, 20 bp, Artificial Sequence
  Description of Artificial Sequence: Synthetic oligonucleotide
  Target: LAMA2; (+) strand; PAM type: NRG; PAM sequence: CAG
tttgttccaatctaatgaca

SEQ ID NO: 145952 - DNA, 20 bp, Artificial Sequence
  Description of Artificial Sequence: Synthetic oligonucleotide
  Target: LAMA2; (+) strand; PAM type: NRG; PAM sequence: AGG
ttgttccaatctaatgacac

SEQ ID NO: 145953 - DNA, 20 bp, Artificial Sequence
  Description of Artificial Sequence: Synthetic oligonucleotide
  Target: LAMA2; (+) strand; PAM type: NRG; PAM sequence: TGG
caatctaatgacacaggatc

SEQ ID NO: 145954 - DNA, 20 bp, Artificial Sequence
  Description of Artificial Sequence: Synthetic oligonucleotide
  Target: LAMA2; (+) strand; PAM type: NRG; PAM sequence: TAG
acaggatctggcactgtatt

SEQ ID NO: 145955 - DNA, 20 bp, Artificial Sequence
  Description of Artificial Sequence: Synthetic oligonucleotide
  Target: LAMA2; (+) strand; PAM type: NRG; PAM sequence: AAG
gtatttagacctcctgctcc

SEQ ID NO: 145956 - DNA, 20 bp, Artificial Sequence
  Description of Artificial Sequence: Synthetic oligonucleotide
  Target: LAMA2; (+) strand; PAM type: NRG; PAM sequence: AAG
attttatttttattttaaac

SEQ ID NO: 145957 - DNA, 20 bp, Artificial Sequence
  Description of Artificial Sequence: Synthetic oligonucleotide
  Target: LAMA2; (+) strand; PAM type: NRG; PAM sequence: CGG
tttaaacaagtgttcccaca

SEQ ID NO: 145958 - DNA, 20 bp, Artificial Sequence
  Description of Artificial Sequence: Synthetic oligonucleotide
  Target: LAMA2; (+) strand; PAM type: NRG; PAM sequence: GGG
ttaaacaagtgttcccacac

SEQ ID NO: 145959 - DNA, 20 bp, Artificial Sequence
  Description of Artificial Sequence: Synthetic oligonucleotide
  Target: LAMA2; (+) strand; PAM type: NRG; PAM sequence: GGG
taaacaagtgttcccacacg

SEQ ID NO: 145960 - DNA, 20 bp, Artificial Sequence
  Description of Artificial Sequence: Synthetic oligonucleotide
  Target: LAMA2; (+) strand; PAM type: NRG; PAM sequence: CAG
cacggggactgaaaacaaaa

SEQ ID NO: 145961 - DNA, 20 bp, Artificial Sequence
  Description of Artificial Sequence: Synthetic oligonucleotide
  Target: LAMA2; (+) strand; PAM type: NRG; PAM sequence: AGG
acggggactgaaaacaaaac

SEQ ID NO: 145962 - DNA, 20 bp, Artificial Sequence
  Description of Artificial Sequence: Synthetic oligonucleotide
  Target: LAMA2; (+) strand; PAM type: NRG; PAM sequence: AAG
aaaacaggaaaatgttgctt

SEQ ID NO: 145963 - DNA, 20 bp, Artificial Sequence
  Description of Artificial Sequence: Synthetic oligonucleotide
  Target: LAMA2; (+) strand; PAM type: NRG; PAM sequence: GAG
tgttgcttaagttttccttt

SEQ ID NO: 145964 - DNA, 20 bp, Artificial Sequence
  Description of Artificial Sequence: Synthetic oligonucleotide
  Target: LAMA2; (+) strand; PAM type: NRG; PAM sequence: AAG
gctgctgttatctgactttc

SEQ ID NO: 145965 - DNA, 20 bp, Artificial Sequence
  Description of Artificial Sequence: Synthetic oligonucleotide
  Target: LAMA2; (+) strand; PAM type: NRG; PAM sequence: TAG
attgttccgtctcaccaatg

SEQ ID NO: 145966 - DNA, 20 bp, Artificial Sequence
  Description of Artificial Sequence: Synthetic oligonucleotide
  Target: LAMA2; (+) strand; PAM type: NRG; PAM sequence: AGG
ttgttccgtctcaccaatgt

SEQ ID NO: 145967 - DNA, 20 bp, Artificial Sequence
  Description of Artificial Sequence: Synthetic oligonucleotide
  Target: LAMA2; (+) strand; PAM type: NRG; PAM sequence: CAG
aatgtaggtcattgtactct

SEQ ID NO: 145968 - DNA, 20 bp, Artificial Sequence
  Description of Artificial Sequence: Synthetic oligonucleotide
  Target: LAMA2; (+) strand; PAM type: NRG; PAM sequence: CGG
tcagttactttgttttctat

SEQ ID NO: 145969 - DNA, 20 bp, Artificial Sequence
  Description of Artificial Sequence: Synthetic oligonucleotide
  Target: LAMA2; (+) strand; PAM type: NRG; PAM sequence: TAG
ttttctatcggaactttctc

SEQ ID NO: 145970 - DNA, 20 bp, Artificial Sequence
  Description of Artificial Sequence: Synthetic oligonucleotide
  Target: LAMA2; (+) strand; PAM type: NRG; PAM sequence: CAG
tctatcggaactttctctag

SEQ ID NO: 145971 - DNA, 20 bp, Artificial Sequence
  Description of Artificial Sequence: Synthetic oligonucleotide
  Target: LAMA2; (+) strand; PAM type: NRG; PAM sequence: AAG
ctctagcagctctccacatt

SEQ ID NO: 145972 - DNA, 20 bp, Artificial Sequence
  Description of Artificial Sequence: Synthetic oligonucleotide
  Target: LAMA2; (+) strand; PAM type: NRG; PAM sequence: AGG
tctagcagctctccacatta

SEQ ID NO: 145973 - DNA, 20 bp, Artificial Sequence
  Description of Artificial Sequence: Synthetic oligonucleotide
  Target: LAMA2; (+) strand; PAM type: NRG; PAM sequence: GGG
ctagcagctctccacattaa

SEQ ID NO: 145974 - DNA, 20 bp, Artificial Sequence
  Description of Artificial Sequence: Synthetic oligonucleotide
  Target: LAMA2; (+) strand; PAM type: NRG; PAM sequence: GAG
agcagctctccacattaagg

SEQ ID NO: 145975 - DNA, 20 bp, Artificial Sequence
  Description of Artificial Sequence: Synthetic oligonucleotide
  Target: LAMA2; (+) strand; PAM type: NRG; PAM sequence: GAG
tcttcatctccctataattt

SEQ ID NO: 145976 - DNA, 20 bp, Artificial Sequence
  Description of Artificial Sequence: Synthetic oligonucleotide
  Target: LAMA2; (+) strand; PAM type: NRG; PAM sequence: AGG
cttcatctccctataatttg

SEQ ID NO: 145977 - DNA, 20 bp, Artificial Sequence
  Description of Artificial Sequence: Synthetic oligonucleotide
  Target: LAMA2; (+) strand; PAM type: NRG; PAM sequence: TAG
ctccctataatttgaggttt

SEQ ID NO: 145978 - DNA, 20 bp, Artificial Sequence
  Description of Artificial Sequence: Synthetic oligonucleotide
  Target: LAMA2; (+) strand; PAM type: NRG; PAM sequence: TAG
ttttagcactttcttctttg

SEQ ID NO: 145979 - DNA, 20 bp, Artificial Sequence
  Description of Artificial Sequence: Synthetic oligonucleotide
  Target: LAMA2; (+) strand; PAM type: NRG; PAM sequence: AAG
tctttgtagaatttaccata

SEQ ID NO: 145980 - DNA, 20 bp, Artificial Sequence
  Description of Artificial Sequence: Synthetic oligonucleotide
  Target: LAMA2; (+) strand; PAM type: NRG; PAM sequence: TAG
gcatacgtatttttgaaaac

SEQ ID NO: 145981 - DNA, 20 bp, Artificial Sequence
  Description of Artificial Sequence: Synthetic oligonucleotide
  Target: LAMA2; (+) strand; PAM type: NRG; PAM sequence: AGG
catacgtatttttgaaaact

SEQ ID NO: 145982 - DNA, 20 bp, Artificial Sequence
  Description of Artificial Sequence: Synthetic oligonucleotide
  Target: LAMA2; (+) strand; PAM type: NRG; PAM sequence: GGG
atacgtatttttgaaaacta

SEQ ID NO: 145983 - DNA, 20 bp, Artificial Sequence
  Description of Artificial Sequence: Synthetic oligonucleotide
  Target: LAMA2; (+) strand; PAM type: NRG; PAM sequence: TAG
tatttttgaaaactagggaa

SEQ ID NO: 145984 - DNA, 20 bp, Artificial Sequence
  Description of Artificial Sequence: Synthetic oligonucleotide
  Target: LAMA2; (+) strand; PAM type: NRG; PAM sequence: AAG
ggaatagcttttacttacta

SEQ ID NO: 145985 - DNA, 20 bp, Artificial Sequence
  Description of Artificial Sequence: Synthetic oligonucleotide
  Target: LAMA2; (+) strand; PAM type: NRG; PAM sequence: AAG
ttttacttactaaagtactt

SEQ ID NO: 145986 - DNA, 20 bp, Artificial Sequence
  Description of Artificial Sequence: Synthetic oligonucleotide
  Target: LAMA2; (+) strand; PAM type: NRG; PAM sequence: AAG
cataaccaatttcatttatt

SEQ ID NO: 145987 - DNA, 20 bp, Artificial Sequence
  Description of Artificial Sequence: Synthetic oligonucleotide
  Target: LAMA2; (+) strand; PAM type: NRG; PAM sequence: TAG
aatttcatttattaagatgt

SEQ ID NO: 145988 - DNA, 20 bp, Artificial Sequence
  Description of Artificial Sequence: Synthetic oligonucleotide
  Target: LAMA2; (+) strand; PAM type: NRG; PAM sequence: AAG
tcatttattaagatgttagt

SEQ ID NO: 145989 - DNA, 20 bp, Artificial Sequence
  Description of Artificial Sequence: Synthetic oligonucleotide
  Target: LAMA2; (+) strand; PAM type: NRG; PAM sequence: TAG
ttaagatgttagtaagactt

SEQ ID NO: 145990 - DNA, 20 bp, Artificial Sequence
  Description of Artificial Sequence: Synthetic oligonucleotide
  Target: LAMA2; (+) strand; PAM type: NRG; PAM sequence: AGG
taagatgttagtaagacttt

SEQ ID NO: 145991 - DNA, 20 bp, Artificial Sequence
  Description of Artificial Sequence: Synthetic oligonucleotide
  Target: LAMA2; (+) strand; PAM type: NRG; PAM sequence: GAG
agatgttagtaagactttag

SEQ ID NO: 145992 - DNA, 20 bp, Artificial Sequence
  Description of Artificial Sequence: Synthetic oligonucleotide
  Target: LAMA2; (+) strand; PAM type: NRG; PAM sequence: TGG
agtaagactttaggagttgt

SEQ ID NO: 145993 - DNA, 20 bp, Artificial Sequence
  Description of Artificial Sequence: Synthetic oligonucleotide
  Target: LAMA2; (+) strand; PAM type: NRG; PAM sequence: CGG
aggagttgttggttcttttc

SEQ ID NO: 145994 - DNA, 20 bp, Artificial Sequence
  Description of Artificial Sequence: Synthetic oligonucleotide
  Target: LAMA2; (+) strand; PAM type: NRG; PAM sequence: GAG
gagttgttggttcttttccg

SEQ ID NO: 145995 - DNA, 20 bp, Artificial Sequence
  Description of Artificial Sequence: Synthetic oligonucleotide
  Target: LAMA2; (+) strand; PAM type: NRG; PAM sequence: TAG
ttttccggagaataatgctt

SEQ ID NO: 145996 - DNA, 20 bp, Artificial Sequence
  Description of Artificial Sequence: Synthetic oligonucleotide
  Target: LAMA2; (+) strand; PAM type: NRG; PAM sequence: CAG
cggagaataatgctttagcc

SEQ ID NO: 145997 - DNA, 20 bp, Artificial Sequence
  Description of Artificial Sequence: Synthetic oligonucleotide
  Target: LAMA2; (+) strand; PAM type: NRG; PAM sequence: CAG
agaataatgctttagcccag

SEQ ID NO: 145998 - DNA, 20 bp, Artificial Sequence
  Description of Artificial Sequence: Synthetic oligonucleotide
  Target: LAMA2; (+) strand; PAM type: NRG; PAM sequence: TGG
ccagcagtccccaacctttt

SEQ ID NO: 145999 - DNA, 20 bp, Artificial Sequence
  Description of Artificial Sequence: Synthetic oligonucleotide
  Target: LAMA2; (+) strand; PAM type: NRG; PAM sequence: CAG
gtccccaacctttttggtac

SEQ ID NO: 146000 - DNA, 20 bp, Artificial Sequence
  Description of Artificial Sequence: Synthetic oligonucleotide
  Target: LAMA2; (+) strand; PAM type: NRG; PAM sequence: AGG
tccccaacctttttggtacc

SEQ ID NO: 146001 - DNA, 20 bp, Artificial Sequence
  Description of Artificial Sequence: Synthetic oligonucleotide
  Target: LAMA2; (+) strand; PAM type: NRG; PAM sequence: GGG
ccccaacctttttggtacca

SEQ ID NO: 146002 - DNA, 20 bp, Artificial Sequence
  Description of Artificial Sequence: Synthetic oligonucleotide
  Target: LAMA2; (+) strand; PAM type: NRG; PAM sequence: TGG
acctttttggtaccagggat

SEQ ID NO: 146003 - DNA, 20 bp, Artificial Sequence
  Description of Artificial Sequence: Synthetic oligonucleotide
  Target: LAMA2; (+) strand; PAM type: NRG; PAM sequence: TGG
ggtaccagggattggttttg

SEQ ID NO: 146004 - DNA, 20 bp, Artificial Sequence
  Description of Artificial Sequence: Synthetic oligonucleotide
  Target: LAMA2; (+) strand; PAM type: NRG; PAM sequence: AAG
accagggattggttttgtgg

SEQ ID NO: 146005 - DNA, 20 bp, Artificial Sequence
  Description of Artificial Sequence: Synthetic oligonucleotide
  Target: LAMA2; (+) strand; PAM type: NRG; PAM sequence: CAG
gggattggttttgtggaaga

SEQ ID NO: 146006 - DNA, 20 bp, Artificial Sequence
  Description of Artificial Sequence: Synthetic oligonucleotide
  Target: LAMA2; (+) strand; PAM type: NRG; PAM sequence: TGG
tgtggaagacagtttttcca

SEQ ID NO: 146007 - DNA, 20 bp, Artificial Sequence
  Description of Artificial Sequence: Synthetic oligonucleotide
  Target: LAMA2; (+) strand; PAM type: NRG; PAM sequence: CAG
cagtttttccatggaattga

SEQ ID NO: 146008 - DNA, 20 bp, Artificial Sequence
  Description of Artificial Sequence: Synthetic oligonucleotide
  Target: LAMA2; (+) strand; PAM type: NRG; PAM sequence: AGG
agtttttccatggaattgac

SEQ ID NO: 146009 - DNA, 20 bp, Artificial Sequence
  Description of Artificial Sequence: Synthetic oligonucleotide
  Target: LAMA2; (+) strand; PAM type: NRG; PAM sequence: GGG
gtttttccatggaattgaca

SEQ ID NO: 146010 - DNA, 20 bp, Artificial Sequence
  Description of Artificial Sequence: Synthetic oligonucleotide
  Target: LAMA2; (+) strand; PAM type: NRG; PAM sequence: GGG
tttttccatggaattgacag

SEQ ID NO: 146011 - DNA, 20 bp, Artificial Sequence
  Description of Artificial Sequence: Synthetic oligonucleotide
  Target: LAMA2; (+) strand; PAM type: NRG; PAM sequence: GGG
ttttccatggaattgacagg

SEQ ID NO: 146012 - DNA, 20 bp, Artificial Sequence
  Description of Artificial Sequence: Synthetic oligonucleotide
  Target: LAMA2; (+) strand; PAM type: NRG; PAM sequence: GGG
tttccatggaattgacaggg

SEQ ID NO: 146013 - DNA, 20 bp, Artificial Sequence
  Description of Artificial Sequence: Synthetic oligonucleotide
  Target: LAMA2; (+) strand; PAM type: NRG; PAM sequence: TGG
catggaattgacagggggga

SEQ ID NO: 146014 - DNA, 20 bp, Artificial Sequence
  Description of Artificial Sequence: Synthetic oligonucleotide
  Target: LAMA2; (+) strand; PAM type: NRG; PAM sequence: GGG
atggaattgacaggggggat

SEQ ID NO: 146015 - DNA, 20 bp, Artificial Sequence
  Description of Artificial Sequence: Synthetic oligonucleotide
  Target: LAMA2; (+) strand; PAM type: NRG; PAM sequence: GGG
tggaattgacaggggggatg

SEQ ID NO: 146016 - DNA, 20 bp, Artificial Sequence
  Description of Artificial Sequence: Synthetic oligonucleotide
  Target: LAMA2; (+) strand; PAM type: NRG; PAM sequence: GAG
gaattgacaggggggatggg

SEQ ID NO: 146017 - DNA, 20 bp, Artificial Sequence
  Description of Artificial Sequence: Synthetic oligonucleotide
  Target: LAMA2; (+) strand; PAM type: NRG; PAM sequence: TGG
ttgacaggggggatggggag

SEQ ID NO: 146018 - DNA, 20 bp, Artificial Sequence
  Description of Artificial Sequence: Synthetic oligonucleotide
  Target: LAMA2; (+) strand; PAM type: NRG; PAM sequence: GGG
tgacaggggggatggggagt

SEQ ID NO: 146019 - DNA, 20 bp, Artificial Sequence
  Description of Artificial Sequence: Synthetic oligonucleotide
  Target: LAMA2; (+) strand; PAM type: NRG; PAM sequence: GGG
gacaggggggatggggagtg

SEQ ID NO: 146020 - DNA, 20 bp, Artificial Sequence
  Description of Artificial Sequence: Synthetic oligonucleotide
  Target: LAMA2; (+) strand; PAM type: NRG; PAM sequence: TGG
ggggggatggggagtgggga

SEQ ID NO: 146021 - DNA, 20 bp, Artificial Sequence
  Description of Artificial Sequence: Synthetic oligonucleotide
  Target: LAMA2; (+) strand; PAM type: NRG; PAM sequence: GGG
gggggatggggagtggggat

SEQ ID NO: 146022 - DNA, 20 bp, Artificial Sequence
  Description of Artificial Sequence: Synthetic oligonucleotide
  Target: LAMA2; (+) strand; PAM type: NRG; PAM sequence: CAG
ggggagtggggatgggtttc

SEQ ID NO: 146023 - DNA, 20 bp, Artificial Sequence
  Description of Artificial Sequence: Synthetic oligonucleotide
  Target: LAMA2; (+) strand; PAM type: NRG; PAM sequence: AAG
ctgttttacctcatatcatc

SEQ ID NO: 146024 - DNA, 20 bp, Artificial Sequence
  Description of Artificial Sequence: Synthetic oligonucleotide
  Target: LAMA2; (+) strand; PAM type: NRG; PAM sequence: TAG
tacctcatatcatcaagcat

SEQ ID NO: 146025 - DNA, 20 bp, Artificial Sequence
  Description of Artificial Sequence: Synthetic oligonucleotide
  Target: LAMA2; (+) strand; PAM type: NRG; PAM sequence: TAG
tcatatcatcaagcattagt

SEQ ID NO: 146026 - DNA, 20 bp, Artificial Sequence
  Description of Artificial Sequence: Synthetic oligonucleotide
  Target: LAMA2; (+) strand; PAM type: NRG; PAM sequence: GAG
atatcatcaagcattagtta

SEQ ID NO: 146027 - DNA, 20 bp, Artificial Sequence
  Description of Artificial Sequence: Synthetic oligonucleotide
  Target: LAMA2; (+) strand; PAM type: NRG; PAM sequence: AAG
agcattagttagagtctcat

SEQ ID NO: 146028 - DNA, 20 bp, Artificial Sequence
  Description of Artificial Sequence: Synthetic oligonucleotide
  Target: LAMA2; (+) strand; PAM type: NRG; PAM sequence: AGG
gcattagttagagtctcata

SEQ ID NO: 146029 - DNA, 20 bp, Artificial Sequence
  Description of Artificial Sequence: Synthetic oligonucleotide
  Target: LAMA2; (+) strand; PAM type: NRG; PAM sequence: GAG
attagttagagtctcataag

SEQ ID NO: 146030 - DNA, 20 bp, Artificial Sequence
  Description of Artificial Sequence: Synthetic oligonucleotide
  Target: LAMA2; (+) strand; PAM type: NRG; PAM sequence: AAG
gagtctcataaggagcctgc

SEQ ID NO: 146031 - DNA, 20 bp, Artificial Sequence
  Description of Artificial Sequence: Synthetic oligonucleotide
  Target: LAMA2; (+) strand; PAM type: NRG; PAM sequence: TAG
ctcataaggagcctgcaagc

SEQ ID NO: 146032 - DNA, 20 bp, Artificial Sequence
  Description of Artificial Sequence: Synthetic oligonucleotide
  Target: LAMA2; (+) strand; PAM type: NRG; PAM sequence: AGG
tcataaggagcctgcaagct

SEQ ID NO: 146033 - DNA, 20 bp, Artificial Sequence
  Description of Artificial Sequence: Synthetic oligonucleotide
  Target: LAMA2; (+) strand; PAM type: NRG; PAM sequence: CAG
agctaggtccctcacatgca

SEQ ID NO: 146034 - DNA, 20 bp, Artificial Sequence
  Description of Artificial Sequence: Synthetic oligonucleotide
  Target: LAMA2; (+) strand; PAM type: NRG; PAM sequence: TAG
ctcacatgcacagtttacaa

SEQ ID NO: 146035 - DNA, 20 bp, Artificial Sequence
  Description of Artificial Sequence: Synthetic oligonucleotide
  Target: LAMA2; (+) strand; PAM type: NRG; PAM sequence: AGG
tcacatgcacagtttacaat

SEQ ID NO: 146036 - DNA, 20 bp, Artificial Sequence
  Description of Artificial Sequence: Synthetic oligonucleotide
  Target: LAMA2; (+) strand; PAM type: NRG; PAM sequence: GGG
cacatgcacagtttacaata

SEQ ID NO: 146037 - DNA, 20 bp, Artificial Sequence
  Description of Artificial Sequence: Synthetic oligonucleotide
  Target: LAMA2; (+) strand; PAM type: NRG; PAM sequence: GAG
aatagggcttgtgctccttt

SEQ ID NO: 146038 - DNA, 20 bp, Artificial Sequence
  Description of Artificial Sequence: Synthetic oligonucleotide
  Target: LAMA2; (+) strand; PAM type: NRG; PAM sequence: CAG
cctttgagaacctaatgcca

SEQ ID NO: 146039 - DNA, 20 bp, Artificial Sequence
  Description of Artificial Sequence: Synthetic oligonucleotide
  Target: LAMA2; (+) strand; PAM type: NRG; PAM sequence: CAG
tgccacagctgctgatctga

SEQ ID NO: 146040 - DNA, 20 bp, Artificial Sequence
  Description of Artificial Sequence: Synthetic oligonucleotide
  Target: LAMA2; (+) strand; PAM type: NRG; PAM sequence: AGG
gccacagctgctgatctgac

SEQ ID NO: 146041 - DNA, 20 bp, Artificial Sequence
  Description of Artificial Sequence: Synthetic oligonucleotide
  Target: LAMA2; (+) strand; PAM type: NRG; PAM sequence: GAG
cacagctgctgatctgacag

SEQ ID NO: 146042 - DNA, 20 bp, Artificial Sequence
  Description of Artificial Sequence: Synthetic oligonucleotide
  Target: LAMA2; (+) strand; PAM type: NRG; PAM sequence: AGG
acagctgctgatctgacagg

SEQ ID NO: 146043 - DNA, 20 bp, Artificial Sequence
  Description of Artificial Sequence: Synthetic oligonucleotide
  Target: LAMA2; (+) strand; PAM type: NRG; PAM sequence: TGG
gctgctgatctgacaggagg

SEQ ID NO: 146044 - DNA, 20 bp, Artificial Sequence
  Description of Artificial Sequence: Synthetic oligonucleotide
  Target: LAMA2; (+) strand; PAM type: NRG; PAM sequence: GAG
tgctgatctgacaggaggtg

SEQ ID NO: 146045 - DNA, 20 bp, Artificial Sequence
  Description of Artificial Sequence: Synthetic oligonucleotide
  Target: LAMA2; (+) strand; PAM type: NRG; PAM sequence: CAG
atctgacaggaggtggagct

SEQ ID NO: 146046 - DNA, 20 bp, Artificial Sequence
  Description of Artificial Sequence: Synthetic oligonucleotide
  Target: LAMA2; (+) strand; PAM type: NRG; PAM sequence: CAG
ctcagacacctccttctgtg

SEQ ID NO: 146047 - DNA, 20 bp, Artificial Sequence
  Description of Artificial Sequence: Synthetic oligonucleotide
  Target: LAMA2; (+) strand; PAM type: NRG; PAM sequence: TGG
acacctccttctgtgcagcc

SEQ ID NO: 146048 - DNA, 20 bp, Artificial Sequence
  Description of Artificial Sequence: Synthetic oligonucleotide
  Target: LAMA2; (+) strand; PAM type: NRG; PAM sequence: CAG
ctgtgcagcctggttcctaa

SEQ ID NO: 146049 - DNA, 20 bp, Artificial Sequence
  Description of Artificial Sequence: Synthetic oligonucleotide
  Target: LAMA2; (+) strand; PAM type: NRG; PAM sequence: AGG
tgtgcagcctggttcctaac

SEQ ID NO: 146050 - DNA, 20 bp, Artificial Sequence
  Description of Artificial Sequence: Synthetic oligonucleotide
  Target: LAMA2; (+) strand; PAM type: NRG; PAM sequence: CAG
gcctggttcctaacaggcca

SEQ ID NO: 146051 - DNA, 20 bp, Artificial Sequence
  Description of Artificial Sequence: Synthetic oligonucleotide
  Target: LAMA2; (+) strand; PAM type: NRG; PAM sequence: TAG
ggttcctaacaggccacaga

SEQ ID NO: 146052 - DNA, 20 bp, Artificial Sequence
  Description of Artificial Sequence: Synthetic oligonucleotide
  Target: LAMA2; (+) strand; PAM type: NRG; PAM sequence: TGG
taacaggccacagatagtac

SEQ ID NO: 146053 - DNA, 20 bp, Artificial Sequence
  Description of Artificial Sequence: Synthetic oligonucleotide
  Target: LAMA2; (+) strand; PAM type: NRG; PAM sequence: TGG
ccacagatagtactggtcca

SEQ ID NO: 146054 - DNA, 20 bp, Artificial Sequence
  Description of Artificial Sequence: Synthetic oligonucleotide
  Target: LAMA2; (+) strand; PAM type: NRG; PAM sequence: CAG
gatagtactggtccatggcc

SEQ ID NO: 146055 - DNA, 20 bp, Artificial Sequence
  Description of Artificial Sequence: Synthetic oligonucleotide
  Target: LAMA2; (+) strand; PAM type: NRG; PAM sequence: CAG
agtactggtccatggcccag

SEQ ID NO: 146056 - DNA, 20 bp, Artificial Sequence
  Description of Artificial Sequence: Synthetic oligonucleotide
  Target: LAMA2; (+) strand; PAM type: NRG; PAM sequence: TGG
ctggtccatggcccagcagt

SEQ ID NO: 146057 - DNA, 20 bp, Artificial Sequence
  Description of Artificial Sequence: Synthetic oligonucleotide
  Target: LAMA2; (+) strand; PAM type: NRG; PAM sequence: GGG
tggtccatggcccagcagtt

SEQ ID NO: 146058 - DNA, 20 bp, Artificial Sequence
  Description of Artificial Sequence: Synthetic oligonucleotide
  Target: LAMA2; (+) strand; PAM type: NRG; PAM sequence: GGG
ggtccatggcccagcagttg

SEQ ID NO: 146059 - DNA, 20 bp, Artificial Sequence
  Description of Artificial Sequence: Synthetic oligonucleotide
  Target: LAMA2; (+) strand; PAM type: NRG; PAM sequence: TAG
gcagttggggacccctgctt

SEQ ID NO: 146060 - DNA, 20 bp, Artificial Sequence
  Description of Artificial Sequence: Synthetic oligonucleotide
  Target: LAMA2; (+) strand; PAM type: NRG; PAM sequence: TAG
ctgctttagccctcaactct

SEQ ID NO: 146061 - DNA, 20 bp, Artificial Sequence
  Description of Artificial Sequence: Synthetic oligonucleotide
  Target: LAMA2; (+) strand; PAM type: NRG; PAM sequence: AGG
tgctttagccctcaactctt

SEQ ID NO: 146062 - DNA, 20 bp, Artificial Sequence
  Description of Artificial Sequence: Synthetic oligonucleotide
  Target: LAMA2; (+) strand; PAM type: NRG; PAM sequence: CAG
ctcaactcttaggcatgttt

SEQ ID NO: 146063 - DNA, 20 bp, Artificial Sequence
  Description of Artificial Sequence: Synthetic oligonucleotide
  Target: LAMA2; (+) strand; PAM type: NRG; PAM sequence: TGG
gcatgtttcagttctgattt

SEQ ID NO: 146064 - DNA, 20 bp, Artificial Sequence
  Description of Artificial Sequence: Synthetic oligonucleotide
  Target: LAMA2; (+) strand; PAM type: NRG; PAM sequence: CAG
gtttcagttctgattttggt

SEQ ID NO: 146065 - DNA, 20 bp, Artificial Sequence
  Description of Artificial Sequence: Synthetic oligonucleotide
  Target: LAMA2; (+) strand; PAM type: NRG; PAM sequence: TAG
agttctgattttggtcagca

SEQ ID NO: 146066 - DNA, 20 bp, Artificial Sequence
  Description of Artificial Sequence: Synthetic oligonucleotide
  Target: LAMA2; (+) strand; PAM type: NRG; PAM sequence: GAG
ttctgattttggtcagcata

SEQ ID NO: 146067 - DNA, 20 bp, Artificial Sequence
  Description of Artificial Sequence: Synthetic oligonucleotide
  Target: LAMA2; (+) strand; PAM type: NRG; PAM sequence: CAG
agagctttccttctatttac

SEQ ID NO: 146068 - DNA, 20 bp, Artificial Sequence
  Description of Artificial Sequence: Synthetic oligonucleotide
  Target: LAMA2; (+) strand; PAM type: NRG; PAM sequence: AGG
gagctttccttctatttacc

SEQ ID NO: 146069 - DNA, 20 bp, Artificial Sequence
  Description of Artificial Sequence: Synthetic oligonucleotide
  Target: LAMA2; (+) strand; PAM type: NRG; PAM sequence: GAG
gctttccttctatttaccag

SEQ ID NO: 146070 - DNA, 20 bp, Artificial Sequence
  Description of Artificial Sequence: Synthetic oligonucleotide
  Target: LAMA2; (+) strand; PAM type: NRG; PAM sequence: AGG
ctttccttctatttaccagg

SEQ ID NO: 146071 - DNA, 20 bp, Artificial Sequence
  Description of Artificial Sequence: Synthetic oligonucleotide
  Target: LAMA2; (+) strand; PAM type: NRG; PAM sequence: GGG
tttccttctatttaccagga

SEQ ID NO: 146072 - DNA, 20 bp, Artificial Sequence
  Description of Artificial Sequence: Synthetic oligonucleotide
  Target: LAMA2; (+) strand; PAM type: NRG; PAM sequence: TGG
caggagggtctctactgata

SEQ ID NO: 146073 - DNA, 20 bp, Artificial Sequence
  Description of Artificial Sequence: Synthetic oligonucleotide
  Target: LAMA2; (+) strand; PAM type: NRG; PAM sequence: TGG
tctctactgatatggatcaa

SEQ ID NO: 146074 - DNA, 20 bp, Artificial Sequence
  Description of Artificial Sequence: Synthetic oligonucleotide
  Target: LAMA2; (+) strand; PAM type: NRG; PAM sequence: CAG
ctactgatatggatcaatgg

SEQ ID NO: 146075 - DNA, 20 bp, Artificial Sequence
  Description of Artificial Sequence: Synthetic oligonucleotide
  Target: LAMA2; (+) strand; PAM type: NRG; PAM sequence: AGG
tactgatatggatcaatggc

SEQ ID NO: 146076 - DNA, 20 bp, Artificial Sequence
  Description of Artificial Sequence: Synthetic oligonucleotide
  Target: LAMA2; (+) strand; PAM type: NRG; PAM sequence: GAG
ctgatatggatcaatggcag

SEQ ID NO: 146077 - DNA, 20 bp, Artificial Sequence
  Description of Artificial Sequence: Synthetic oligonucleotide
  Target: LAMA2; (+) strand; PAM type: NRG; PAM sequence: AGG
tgatatggatcaatggcagg

SEQ ID NO: 146078 - DNA, 20 bp, Artificial Sequence
  Description of Artificial Sequence: Synthetic oligonucleotide
  Target: LAMA2; (+) strand; PAM type: NRG; PAM sequence: TGG
tcaatggcaggaggtgatat

SEQ ID NO: 146079 - DNA, 20 bp, Artificial Sequence
  Description of Artificial Sequence: Synthetic oligonucleotide
  Target: LAMA2; (+) strand; PAM type: NRG; PAM sequence: GGG
caatggcaggaggtgatatt

SEQ ID NO: 146080 - DNA, 20 bp, Artificial Sequence
  Description of Artificial Sequence: Synthetic oligonucleotide
  Target: LAMA2; (+) strand; PAM type: NRG; PAM sequence: TGG
gcaggaggtgatattgggtc

SEQ ID NO: 146081 - DNA, 20 bp, Artificial Sequence
  Description of Artificial Sequence: Synthetic oligonucleotide
  Target: LAMA2; (+) strand; PAM type: NRG; PAM sequence: TGG
ttgggtctggaactatcctt

SEQ ID NO: 146082 - DNA, 20 bp, Artificial Sequence
  Description of Artificial Sequence: Synthetic oligonucleotide
  Target: LAMA2; (+) strand; PAM type: NRG; PAM sequence: TAG
tctggaactatcctttggct

SEQ ID NO: 146083 - DNA, 20 bp, Artificial Sequence
  Description of Artificial Sequence: Synthetic oligonucleotide
  Target: LAMA2; (+) strand; PAM type: NRG; PAM sequence: CAG
gcctcactcctgccccttct

SEQ ID NO: 146084 - DNA, 20 bp, Artificial Sequence
  Description of Artificial Sequence: Synthetic oligonucleotide
  Target: LAMA2; (+) strand; PAM type: NRG; PAM sequence: AGG
cctcactcctgccccttctc

SEQ ID NO: 146085 - DNA, 20 bp, Artificial Sequence
  Description of Artificial Sequence: Synthetic oligonucleotide
  Target: LAMA2; (+) strand; PAM type: NRG; PAM sequence: GGG
ctcactcctgccccttctca

SEQ ID NO: 146086 - DNA, 20 bp, Artificial Sequence
  Description of Artificial Sequence: Synthetic oligonucleotide
  Target: LAMA2; (+) strand; PAM type: NRG; PAM sequence: GGG
tcactcctgccccttctcag

SEQ ID NO: 146087 - DNA, 20 bp, Artificial Sequence
  Description of Artificial Sequence: Synthetic oligonucleotide
  Target: LAMA2; (+) strand; PAM type: NRG; PAM sequence: TGG
ctgccccttctcaggggacc

SEQ ID NO: 146088 - DNA, 20 bp, Artificial Sequence
  Description of Artificial Sequence: Synthetic oligonucleotide
  Target: LAMA2; (+) strand; PAM type: NRG; PAM sequence: GGG
tgccccttctcaggggacct

SEQ ID NO: 146089 - DNA, 20 bp, Artificial Sequence
  Description of Artificial Sequence: Synthetic oligonucleotide
  Target: LAMA2; (+) strand; PAM type: NRG; PAM sequence: CGG
tcaggggacctgggcaccgt

SEQ ID NO: 146090 - DNA, 20 bp, Artificial Sequence
  Description of Artificial Sequence: Synthetic oligonucleotide
  Target: LAMA2; (+) strand; PAM type: NRG; PAM sequence: CAG
ggcaccgtcggatcccatga

SEQ ID NO: 146091 - DNA, 20 bp, Artificial Sequence
  Description of Artificial Sequence: Synthetic oligonucleotide
  Target: LAMA2; (+) strand; PAM type: NRG; PAM sequence: AGG
gcaccgtcggatcccatgac

SEQ ID NO: 146092 - DNA, 20 bp, Artificial Sequence
  Description of Artificial Sequence: Synthetic oligonucleotide
  Target: LAMA2; (+) strand; PAM type: NRG; PAM sequence: TGG
atcccatgacaggtcctaca

SEQ ID NO: 146093 - DNA, 20 bp, Artificial Sequence
  Description of Artificial Sequence: Synthetic oligonucleotide
  Target: LAMA2; (+) strand; PAM type: NRG; PAM sequence: TAG
acaggtcctacatggtgacc

SEQ ID NO: 146094 - DNA, 20 bp, Artificial Sequence
  Description of Artificial Sequence: Synthetic oligonucleotide
  Target: LAMA2; (+) strand; PAM type: NRG; PAM sequence: AGG
caggtcctacatggtgacct

SEQ ID NO: 146095 - DNA, 20 bp, Artificial Sequence
  Description of Artificial Sequence: Synthetic oligonucleotide
  Target: LAMA2; (+) strand; PAM type: NRG; PAM sequence: GGG
aggtcctacatggtgaccta

SEQ ID NO: 146096 - DNA, 20 bp, Artificial Sequence
  Description of Artificial Sequence: Synthetic oligonucleotide
  Target: LAMA2; (+) strand; PAM type: NRG; PAM sequence: CGG
ctacatggtgacctagggca

SEQ ID NO: 146097 - DNA, 20 bp, Artificial Sequence
  Description of Artificial Sequence: Synthetic oligonucleotide
  Target: LAMA2; (+) strand; PAM type: NRG; PAM sequence: AAG
gtgacctagggcacggtaaa

SEQ ID NO: 146098 - DNA, 20 bp, Artificial Sequence
  Description of Artificial Sequence: Synthetic oligonucleotide
  Target: LAMA2; (+) strand; PAM type: NRG; PAM sequence: CAG
gcacggtaaaaagtctaccc

SEQ ID NO: 146099 - DNA, 20 bp, Artificial Sequence
  Description of Artificial Sequence: Synthetic oligonucleotide
  Target: LAMA2; (+) strand; PAM type: NRG; PAM sequence: AGG
cacggtaaaaagtctacccc

SEQ ID NO: 146100 - DNA, 20 bp, Artificial Sequence
  Description of Artificial Sequence: Synthetic oligonucleotide
  Target: LAMA2; (+) strand; PAM type: NRG; PAM sequence: AAG
ggtaaaaagtctaccccagg

SEQ ID NO: 146101 - DNA, 20 bp, Artificial Sequence
  Description of Artificial Sequence: Synthetic oligonucleotide
  Target: LAMA2; (+) strand; PAM type: NRG; PAM sequence: TAG
aaagtctaccccaggaagcc

SEQ ID NO: 146102 - DNA, 20 bp, Artificial Sequence
  Description of Artificial Sequence: Synthetic oligonucleotide
  Target: LAMA2; (+) strand; PAM type: NRG; PAM sequence: TGG
ctaccccaggaagcctagaa

SEQ ID NO: 146103 - DNA, 20 bp, Artificial Sequence
  Description of Artificial Sequence: Synthetic oligonucleotide
  Target: LAMA2; (+) strand; PAM type: NRG; PAM sequence: TAG
cccaggaagcctagaatgga

SEQ ID NO: 146104 - DNA, 20 bp, Artificial Sequence
  Description of Artificial Sequence: Synthetic oligonucleotide
  Target: LAMA2; (+) strand; PAM type: NRG; PAM sequence: AAG
tcatccaacacaaattcatg

SEQ ID NO: 146105 - DNA, 20 bp, Artificial Sequence
  Description of Artificial Sequence: Synthetic oligonucleotide
  Target: LAMA2; (+) strand; PAM type: NRG; PAM sequence: AAG
caacacaaattcatgaagaa

SEQ ID NO: 146106 - DNA, 20 bp, Artificial Sequence
  Description of Artificial Sequence: Synthetic oligonucleotide
  Target: LAMA2; (+) strand; PAM type: NRG; PAM sequence: AAG
caaattcatgaagaaaagcc

SEQ ID NO: 146107 - DNA, 20 bp, Artificial Sequence
  Description of Artificial Sequence: Synthetic oligonucleotide
  Target: LAMA2; (+) strand; PAM type: NRG; PAM sequence: CAG
tgaagaaaagccaagatctg

SEQ ID NO: 146108 - DNA, 20 bp, Artificial Sequence
  Description of Artificial Sequence: Synthetic oligonucleotide
  Target: LAMA2; (+) strand; PAM type: NRG; PAM sequence: CAG
aagatctgcagaaaatcaaa

SEQ ID NO: 146109 - DNA, 20 bp, Artificial Sequence
  Description of Artificial Sequence: Synthetic oligonucleotide
  Target: LAMA2; (+) strand; PAM type: NRG; PAM sequence: AAG
ctgcagaaaatcaaacagta

SEQ ID NO: 146110 - DNA, 20 bp, Artificial Sequence
  Description of Artificial Sequence: Synthetic oligonucleotide
  Target: LAMA2; (+) strand; PAM type: NRG; PAM sequence: CAG
tcaaacagtaaagactattc

SEQ ID NO: 146111 - DNA, 20 bp, Artificial Sequence
  Description of Artificial Sequence: Synthetic oligonucleotide
  Target: LAMA2; (+) strand; PAM type: NRG; PAM sequence: AAG
aacagtaaagactattccag

SEQ ID NO: 146112 - DNA, 20 bp, Artificial Sequence
  Description of Artificial Sequence: Synthetic oligonucleotide
  Target: LAMA2; (+) strand; PAM type: NRG; PAM sequence: GAG
cagtaaagactattccagaa

SEQ ID NO: 146113 - DNA, 20 bp, Artificial Sequence
  Description of Artificial Sequence: Synthetic oligonucleotide
  Target: LAMA2; (+) strand; PAM type: NRG; PAM sequence: CAG
agactattccagaagagcaa

SEQ ID NO: 146114 - DNA, 20 bp, Artificial Sequence
  Description of Artificial Sequence: Synthetic oligonucleotide
  Target: LAMA2; (+) strand; PAM type: NRG; PAM sequence: AGG
gactattccagaagagcaac

SEQ ID NO: 146115 - DNA, 20 bp, Artificial Sequence
  Description of Artificial Sequence: Synthetic oligonucleotide
  Target: LAMA2; (+) strand; PAM type: NRG; PAM sequence: GAG
ctattccagaagagcaacag

SEQ ID NO: 146116 - DNA, 20 bp, Artificial Sequence
  Description of Artificial Sequence: Synthetic oligonucleotide
  Target: LAMA2; (+) strand; PAM type: NRG; PAM sequence: AGG
tattccagaagagcaacagg

SEQ ID NO: 146117 - DNA, 20 bp, Artificial Sequence
  Description of Artificial Sequence: Synthetic oligonucleotide
  Target: LAMA2; (+) strand; PAM type: NRG; PAM sequence: AAG
agagcaacaggaggacgata

SEQ ID NO: 146118 - DNA, 20 bp, Artificial Sequence
  Description of Artificial Sequence: Synthetic oligonucleotide
  Target: LAMA2; (+) strand; PAM type: NRG; PAM sequence: GAG
agcaacaggaggacgataaa

SEQ ID NO: 146119 - DNA, 20 bp, Artificial Sequence
  Description of Artificial Sequence: Synthetic oligonucleotide
  Target: LAMA2; (+) strand; PAM type: NRG; PAM sequence: AGG
gcaacaggaggacgataaag

SEQ ID NO: 146120 - DNA, 20 bp, Artificial Sequence
  Description of Artificial Sequence: Synthetic oligonucleotide
  Target: LAMA2; (+) strand; PAM type: NRG; PAM sequence: GAG
aacaggaggacgataaagag

SEQ ID NO: 146121 - DNA, 20 bp, Artificial Sequence
  Description of Artificial Sequence: Synthetic oligonucleotide
  Target: LAMA2; (+) strand; PAM type: NRG; PAM sequence: TGG
ggaggacgataaagaggaga

SEQ ID NO: 146122 - DNA, 20 bp, Artificial Sequence
  Description of Artificial Sequence: Synthetic oligonucleotide
  Target: LAMA2; (+) strand; PAM type: NRG; PAM sequence: GAG
aggacgataaagaggagatg

SEQ ID NO: 146123 - DNA, 20 bp, Artificial Sequence
  Description of Artificial Sequence: Synthetic oligonucleotide
  Target: LAMA2; (+) strand; PAM type: NRG; PAM sequence: TGG
aggagatggagttaaaatac

SEQ ID NO: 146124 - DNA, 20 bp, Artificial Sequence
  Description of Artificial Sequence: Synthetic oligonucleotide
  Target: LAMA2; (+) strand; PAM type: NRG; PAM sequence: GGG
ggagatggagttaaaatact

SEQ ID NO: 146125 - DNA, 20 bp, Artificial Sequence
  Description of Artificial Sequence: Synthetic oligonucleotide
  Target: LAMA2; (+) strand; PAM type: NRG; PAM sequence: TAG
ttaaaatactgggtctgtca

SEQ ID NO: 146126 - DNA, 20 bp, Artificial Sequence
  Description of Artificial Sequence: Synthetic oligonucleotide
  Target: LAMA2; (+) strand; PAM type: NRG; PAM sequence: CAG
aatactgggtctgtcataga

SEQ ID NO: 146127 - DNA, 20 bp, Artificial Sequence
  Description of Artificial Sequence: Synthetic oligonucleotide
  Target: LAMA2; (+) strand; PAM type: NRG; PAM sequence: AGG
atactgggtctgtcatagac

SEQ ID NO: 146128 - DNA, 20 bp, Artificial Sequence
  Description of Artificial Sequence: Synthetic oligonucleotide
  Target: LAMA2; (+) strand; PAM type: NRG; PAM sequence: TGG
gggtctgtcatagacaggat

SEQ ID NO: 146129 - DNA, 20 bp, Artificial Sequence
  Description of Artificial Sequence: Synthetic oligonucleotide
  Target: LAMA2; (+) strand; PAM type: NRG; PAM sequence: TGG
tgtcatagacaggattggaa

SEQ ID NO: 146130 - DNA, 20 bp, Artificial Sequence
  Description of Artificial Sequence: Synthetic oligonucleotide
  Target: LAMA2; (+) strand; PAM type: NRG; PAM sequence: CAG
attggaatggaatcccaaat

SEQ ID NO: 146131 - DNA, 20 bp, Artificial Sequence
  Description of Artificial Sequence: Synthetic oligonucleotide
  Target: LAMA2; (+) strand; PAM type: NRG; PAM sequence: TAG
tggaatcccaaatcagatga

SEQ ID NO: 146132 - DNA, 20 bp, Artificial Sequence
  Description of Artificial Sequence: Synthetic oligonucleotide
  Target: LAMA2; (+) strand; PAM type: NRG; PAM sequence: AAG
ccaaatcagatgatagaatg

SEQ ID NO: 146133 - DNA, 20 bp, Artificial Sequence
  Description of Artificial Sequence: Synthetic oligonucleotide
  Target: LAMA2; (+) strand; PAM type: NRG; PAM sequence: AGG
caaatcagatgatagaatga

SEQ ID NO: 146134 - DNA, 20 bp, Artificial Sequence
  Description of Artificial Sequence: Synthetic oligonucleotide
  Target: LAMA2; (+) strand; PAM type: NRG; PAM sequence: GGG
aaatcagatgatagaatgaa

SEQ ID NO: 146135 - DNA, 20 bp, Artificial Sequence
  Description of Artificial Sequence: Synthetic oligonucleotide
  Target: LAMA2; (+) strand; PAM type: NRG; PAM sequence: AAG
tcagatgatagaatgaaggg

SEQ ID NO: 146136 - DNA, 20 bp, Artificial Sequence
  Description of Artificial Sequence: Synthetic oligonucleotide
  Target: LAMA2; (+) strand; PAM type: NRG; PAM sequence: AGG
cagatgatagaatgaaggga

SEQ ID NO: 146137 - DNA, 20 bp, Artificial Sequence
  Description of Artificial Sequence: Synthetic oligonucleotide
  Target: LAMA2; (+) strand; PAM type: NRG; PAM sequence: TGG
tagaatgaagggaaggtaca

SEQ ID NO: 146138 - DNA, 20 bp, Artificial Sequence
  Description of Artificial Sequence: Synthetic oligonucleotide
  Target: LAMA2; (+) strand; PAM type: NRG; PAM sequence: TAG
tgaagggaaggtacatggaa

SEQ ID NO: 146139 - DNA, 20 bp, Artificial Sequence
  Description of Artificial Sequence: Synthetic oligonucleotide
  Target: LAMA2; (+) strand; PAM type: NRG; PAM sequence: TAG
tacatggaatagactctcac

SEQ ID NO: 146140 - DNA, 20 bp, Artificial Sequence
  Description of Artificial Sequence: Synthetic oligonucleotide
  Target: LAMA2; (+) strand; PAM type: NRG; PAM sequence: TGG
atggaatagactctcactag

SEQ ID NO: 146141 - DNA, 20 bp, Artificial Sequence
  Description of Artificial Sequence: Synthetic oligonucleotide
  Target: LAMA2; (+) strand; PAM type: NRG; PAM sequence: GAG
aatagactctcactagtggt

SEQ ID NO: 146142 - DNA, 20 bp, Artificial Sequence
  Description of Artificial Sequence: Synthetic oligonucleotide
  Target: LAMA2; (+) strand; PAM type: NRG; PAM sequence: CGG
tctcactagtggtgagcttt

SEQ ID NO: 146143 - DNA, 20 bp, Artificial Sequence
  Description of Artificial Sequence: Synthetic oligonucleotide
  Target: LAMA2; (+) strand; PAM type: NRG; PAM sequence: AAG
ggtgagctttcggtcactac

SEQ ID NO: 146144 - DNA, 20 bp, Artificial Sequence
  Description of Artificial Sequence: Synthetic oligonucleotide
  Target: LAMA2; (+) strand; PAM type: NRG; PAM sequence: AAG
cggtcactacaagtcttcaa

SEQ ID NO: 146145 - DNA, 20 bp, Artificial Sequence
  Description of Artificial Sequence: Synthetic oligonucleotide
  Target: LAMA2; (+) strand; PAM type: NRG; PAM sequence: AGG
ggtcactacaagtcttcaaa

SEQ ID NO: 146146 - DNA, 20 bp, Artificial Sequence
  Description of Artificial Sequence: Synthetic oligonucleotide
  Target: LAMA2; (+) strand; PAM type: NRG; PAM sequence: GGG
gtcactacaagtcttcaaaa

SEQ ID NO: 146147 - DNA, 20 bp, Artificial Sequence
  Description of Artificial Sequence: Synthetic oligonucleotide
  Target: LAMA2; (+) strand; PAM type: NRG; PAM sequence: GGG
tcactacaagtcttcaaaag

SEQ ID NO: 146148 - DNA, 20 bp, Artificial Sequence
  Description of Artificial Sequence: Synthetic oligonucleotide
  Target: LAMA2; (+) strand; PAM type: NRG; PAM sequence: TAG
acaagtcttcaaaaggggcc

SEQ ID NO: 146149 - DNA, 20 bp, Artificial Sequence
  Description of Artificial Sequence: Synthetic oligonucleotide
  Target: LAMA2; (+) strand; PAM type: NRG; PAM sequence: CAG
tcaaaaggggcctagatgac

SEQ ID NO: 146150 - DNA, 20 bp, Artificial Sequence
  Description of Artificial Sequence: Synthetic oligonucleotide
  Target: LAMA2; (+) strand; PAM type: NRG; PAM sequence: TGG
cttattgaacccttcctctg

SEQ ID NO: 146151 - DNA, 20 bp, Artificial Sequence
  Description of Artificial Sequence: Synthetic oligonucleotide
  Target: LAMA2; (+) strand; PAM type: NRG; PAM sequence: GGG
ttattgaacccttcctctgt

SEQ ID NO: 146152 - DNA, 20 bp, Artificial Sequence
  Description of Artificial Sequence: Synthetic oligonucleotide
  Target: LAMA2; (+) strand; PAM type: NRG; PAM sequence: TAG
ttgaacccttcctctgtggg

SEQ ID NO: 146153 - DNA, 20 bp, Artificial Sequence
  Description of Artificial Sequence: Synthetic oligonucleotide
  Target: LAMA2; (+) strand; PAM type: NRG; PAM sequence: TGG
ccttcctctgtgggtagtga

SEQ ID NO: 146154 - DNA, 20 bp, Artificial Sequence
  Description of Artificial Sequence: Synthetic oligonucleotide
  Target: LAMA2; (+) strand; PAM type: NRG; PAM sequence: GGG
cttcctctgtgggtagtgat

SEQ ID NO: 146155 - DNA, 20 bp, Artificial Sequence
  Description of Artificial Sequence: Synthetic oligonucleotide
  Target: LAMA2; (+) strand; PAM type: NRG; PAM sequence: CAG
tgggtagtgatgggcacatt

SEQ ID NO: 146156 - DNA, 20 bp, Artificial Sequence
  Description of Artificial Sequence: Synthetic oligonucleotide
  Target: LAMA2; (+) strand; PAM type: NRG; PAM sequence: CAG
atgggcacattcagtgaatt

SEQ ID NO: 146157 - DNA, 20 bp, Artificial Sequence
  Description of Artificial Sequence: Synthetic oligonucleotide
  Target: LAMA2; (+) strand; PAM type: NRG; PAM sequence: TGG
cacattcagtgaattcagac

SEQ ID NO: 146158 - DNA, 20 bp, Artificial Sequence
  Description of Artificial Sequence: Synthetic oligonucleotide
  Target: LAMA2; (+) strand; PAM type: NRG; PAM sequence: GAG
acacattgtaaccattaaat

SEQ ID NO: 146159 - DNA, 20 bp, Artificial Sequence
  Description of Artificial Sequence: Synthetic oligonucleotide
  Target: LAMA2; (+) strand; PAM type: NRG; PAM sequence: GAG
taaatgagttaatcttatat

SEQ ID NO: 146160 - DNA, 20 bp, Artificial Sequence
  Description of Artificial Sequence: Synthetic oligonucleotide
  Target: LAMA2; (+) strand; PAM type: NRG; PAM sequence: CAG
cttatatgagttcatacata

SEQ ID NO: 146161 - DNA, 20 bp, Artificial Sequence
  Description of Artificial Sequence: Synthetic oligonucleotide
  Target: LAMA2; (+) strand; PAM type: NRG; PAM sequence: AAG
catacatacagatcacatgc

SEQ ID NO: 146162 - DNA, 20 bp, Artificial Sequence
  Description of Artificial Sequence: Synthetic oligonucleotide
  Target: LAMA2; (+) strand; PAM type: NRG; PAM sequence: GAG
tacatacagatcacatgcaa

SEQ ID NO: 146163 - DNA, 20 bp, Artificial Sequence
  Description of Artificial Sequence: Synthetic oligonucleotide
  Target: LAMA2; (+) strand; PAM type: NRG; PAM sequence: CAG
atgcaagagtgtctcatatc

SEQ ID NO: 146164 - DNA, 20 bp, Artificial Sequence
  Description of Artificial Sequence: Synthetic oligonucleotide
  Target: LAMA2; (+) strand; PAM type: NRG; PAM sequence: AAG
aagagtgtctcatatccagt

SEQ ID NO: 146165 - DNA, 20 bp, Artificial Sequence
  Description of Artificial Sequence: Synthetic oligonucleotide
  Target: LAMA2; (+) strand; PAM type: NRG; PAM sequence: AAG
ctcatatccagtaagtttgc

SEQ ID NO: 146166 - DNA, 20 bp, Artificial Sequence
  Description of Artificial Sequence: Synthetic oligonucleotide
  Target: LAMA2; (+) strand; PAM type: NRG; PAM sequence: AAG
ctactattgtttttgtgtac

SEQ ID NO: 146167 - DNA, 20 bp, Artificial Sequence
  Description of Artificial Sequence: Synthetic oligonucleotide
  Target: LAMA2; (+) strand; PAM type: NRG; PAM sequence: TAG
gtgtattgtaatttctgaaa

SEQ ID NO: 146168 - DNA, 20 bp, Artificial Sequence
  Description of Artificial Sequence: Synthetic oligonucleotide
  Target: LAMA2; (+) strand; PAM type: NRG; PAM sequence: GAG
gtaatttctgaaatagcaat

SEQ ID NO: 146169 - DNA, 20 bp, Artificial Sequence
  Description of Artificial Sequence: Synthetic oligonucleotide
  Target: LAMA2; (+) strand; PAM type: NRG; PAM sequence: AGG
taatttctgaaatagcaatg

SEQ ID NO: 146170 - DNA, 20 bp, Artificial Sequence
  Description of Artificial Sequence: Synthetic oligonucleotide
  Target: LAMA2; (+) strand; PAM type: NRG; PAM sequence: TGG
ttctgaaatagcaatgaggt

SEQ ID NO: 146171 - DNA, 20 bp, Artificial Sequence
  Description of Artificial Sequence: Synthetic oligonucleotide
  Target: LAMA2; (+) strand; PAM type: NRG; PAM sequence: TGG
ttatcctcttatgatatctc

SEQ ID NO: 146172 - DNA, 20 bp, Artificial Sequence
  Description of Artificial Sequence: Synthetic oligonucleotide
  Target: LAMA2; (+) strand; PAM type: NRG; PAM sequence: TGG
cctcttatgatatctctggt

SEQ ID NO: 146173 - DNA, 20 bp, Artificial Sequence
  Description of Artificial Sequence: Synthetic oligonucleotide
  Target: LAMA2; (+) strand; PAM type: NRG; PAM sequence: GGG
ctcttatgatatctctggtt

SEQ ID NO: 146174 - DNA, 20 bp, Artificial Sequence
  Description of Artificial Sequence: Synthetic oligonucleotide
  Target: LAMA2; (+) strand; PAM type: NRG; PAM sequence: GGG
tcttatgatatctctggttg

SEQ ID NO: 146175 - DNA, 20 bp, Artificial Sequence
  Description of Artificial Sequence: Synthetic oligonucleotide
  Target: LAMA2; (+) strand; PAM type: NRG; PAM sequence: TGG
ggcacacccaaaacaaaatt

SEQ ID NO: 146176 - DNA, 20 bp, Artificial Sequence
  Description of Artificial Sequence: Synthetic oligonucleotide
  Target: LAMA2; (+) strand; PAM type: NRG; PAM sequence: GAG
cacacccaaaacaaaatttg

SEQ ID NO: 146177 - DNA, 20 bp, Artificial Sequence
  Description of Artificial Sequence: Synthetic oligonucleotide
  Target: LAMA2; (+) strand; PAM type: NRG; PAM sequence: GAG
ttggagcaatgcaaatgttc

SEQ ID NO: 146178 - DNA, 20 bp, Artificial Sequence
  Description of Artificial Sequence: Synthetic oligonucleotide
  Target: LAMA2; (+) strand; PAM type: NRG; PAM sequence: AGG
tggagcaatgcaaatgttcg

SEQ ID NO: 146179 - DNA, 20 bp, Artificial Sequence
  Description of Artificial Sequence: Synthetic oligonucleotide
  Target: LAMA2; (+) strand; PAM type: NRG; PAM sequence: GAG
gagcaatgcaaatgttcgag

SEQ ID NO: 146180 - DNA, 20 bp, Artificial Sequence
  Description of Artificial Sequence: Synthetic oligonucleotide
  Target: LAMA2; (+) strand; PAM type: NRG; PAM sequence: GAG
gcaatgcaaatgttcgagga

SEQ ID NO: 146181 - DNA, 20 bp, Artificial Sequence
  Description of Artificial Sequence: Synthetic oligonucleotide
  Target: LAMA2; (+) strand; PAM type: NRG; PAM sequence: GAG
tgcaaatgttcgaggagagt

SEQ ID NO: 146182 - DNA, 20 bp, Artificial Sequence
  Description of Artificial Sequence: Synthetic oligonucleotide
  Target: LAMA2; (+) strand; PAM type: NRG; PAM sequence: GAG
caaatgttcgaggagagtga

SEQ ID NO: 146183 - DNA, 20 bp, Artificial Sequence
  Description of Artificial Sequence: Synthetic oligonucleotide
  Target: LAMA2; (+) strand; PAM type: NRG; PAM sequence: TGG
agagtgagagaacttccttc

SEQ ID NO: 146184 - DNA, 20 bp, Artificial Sequence
  Description of Artificial Sequence: Synthetic oligonucleotide
  Target: LAMA2; (+) strand; PAM type: NRG; PAM sequence: AAG
ttctctaatgacttgctctg

SEQ ID NO: 146185 - DNA, 20 bp, Artificial Sequence
  Description of Artificial Sequence: Synthetic oligonucleotide
  Target: LAMA2; (+) strand; PAM type: NRG; PAM sequence: TAG
tgctctgaagctactcctct

SEQ ID NO: 146186 - DNA, 20 bp, Artificial Sequence
  Description of Artificial Sequence: Synthetic oligonucleotide
  Target: LAMA2; (+) strand; PAM type: NRG; PAM sequence: TAG
actcctcttagattctttcc

SEQ ID NO: 146187 - DNA, 20 bp, Artificial Sequence
  Description of Artificial Sequence: Synthetic oligonucleotide
  Target: LAMA2; (+) strand; PAM type: NRG; PAM sequence: TAG
cctagctgtgtattcctata

SEQ ID NO: 146188 - DNA, 20 bp, Artificial Sequence
  Description of Artificial Sequence: Synthetic oligonucleotide
  Target: LAMA2; (+) strand; PAM type: NRG; PAM sequence: TAG
tgtgtattcctatatagtct

SEQ ID NO: 146189 - DNA, 20 bp, Artificial Sequence
  Description of Artificial Sequence: Synthetic oligonucleotide
  Target: LAMA2; (+) strand; PAM type: NRG; PAM sequence: CAG
cctatatagtcttagcttaa

SEQ ID NO: 146190 - DNA, 20 bp, Artificial Sequence
  Description of Artificial Sequence: Synthetic oligonucleotide
  Target: LAMA2; (+) strand; PAM type: NRG; PAM sequence: AAG
agtcttagcttaacagcaca

SEQ ID NO: 146191 - DNA, 20 bp, Artificial Sequence
  Description of Artificial Sequence: Synthetic oligonucleotide
  Target: LAMA2; (+) strand; PAM type: NRG; PAM sequence: CAG
ttaacagcacaaagatttaa

SEQ ID NO: 146192 - DNA, 20 bp, Artificial Sequence
  Description of Artificial Sequence: Synthetic oligonucleotide
  Target: LAMA2; (+) strand; PAM type: NRG; PAM sequence: TGG
acagcacaaagatttaacag

SEQ ID NO: 146193 - DNA, 20 bp, Artificial Sequence
  Description of Artificial Sequence: Synthetic oligonucleotide
  Target: LAMA2; (+) strand; PAM type: NRG; PAM sequence: GAG
gcatttgataaaatgtaaat

SEQ ID NO: 146194 - DNA, 20 bp, Artificial Sequence
  Description of Artificial Sequence: Synthetic oligonucleotide
  Target: LAMA2; (+) strand; PAM type: NRG; PAM sequence: AAG
tttgataaaatgtaaatgag

SEQ ID NO: 146195 - DNA, 20 bp, Artificial Sequence
  Description of Artificial Sequence: Synthetic oligonucleotide
  Target: LAMA2; (+) strand; PAM type: NRG; PAM sequence: AAG
tgtaaatgagaagctcccaa

SEQ ID NO: 146196 - DNA, 20 bp, Artificial Sequence
  Description of Artificial Sequence: Synthetic oligonucleotide
  Target: LAMA2; (+) strand; PAM type: NRG; PAM sequence: GAG
taaatgagaagctcccaaaa

SEQ ID NO: 146197 - DNA, 20 bp, Artificial Sequence
  Description of Artificial Sequence: Synthetic oligonucleotide
  Target: LAMA2; (+) strand; PAM type: NRG; PAM sequence: GAG
agaagctcccaaaagagatt

SEQ ID NO: 146198 - DNA, 20 bp, Artificial Sequence
  Description of Artificial Sequence: Synthetic oligonucleotide
  Target: LAMA2; (+) strand; PAM type: NRG; PAM sequence: AAG
agctcccaaaagagattgag

SEQ ID NO: 146199 - DNA, 20 bp, Artificial Sequence
  Description of Artificial Sequence: Synthetic oligonucleotide
  Target: LAMA2; (+) strand; PAM type: NRG; PAM sequence: AAG
attattatatactttaactg

SEQ ID NO: 146200 - DNA, 20 bp, Artificial Sequence
  Description of Artificial Sequence: Synthetic oligonucleotide
  Target: LAMA2; (+) strand; PAM type: NRG; PAM sequence: AAG
ttatatactttaactgaaga

SEQ ID NO: 146201 - DNA, 20 bp, Artificial Sequence
  Description of Artificial Sequence: Synthetic oligonucleotide
  Target: LAMA2; (+) strand; PAM type: NRG; PAM sequence: AAG
actgaagaaagaaaaacaca

SEQ ID NO: 146202 - DNA, 20 bp, Artificial Sequence
  Description of Artificial Sequence: Synthetic oligonucleotide
  Target: LAMA2; (+) strand; PAM type: NRG; PAM sequence: GAG
aaatacaatatttcaacttc

SEQ ID NO: 146203 - DNA, 20 bp, Artificial Sequence
  Description of Artificial Sequence: Synthetic oligonucleotide
  Target: LAMA2; (+) strand; PAM type: NRG; PAM sequence: AAG
actttttaaaaattatttga

SEQ ID NO: 146204 - DNA, 20 bp, Artificial Sequence
  Description of Artificial Sequence: Synthetic oligonucleotide
  Target: LAMA2; (+) strand; PAM type: NRG; PAM sequence: TAG
tatttgaaagcatttaaaaa

SEQ ID NO: 146205 - DNA, 20 bp, Artificial Sequence
  Description of Artificial Sequence: Synthetic oligonucleotide
  Target: LAMA2; (+) strand; PAM type: NRG; PAM sequence: CAG
cctgtatgtcaaattccttt

SEQ ID NO: 146206 - DNA, 20 bp, Artificial Sequence
  Description of Artificial Sequence: Synthetic oligonucleotide
  Target: LAMA2; (+) strand; PAM type: NRG; PAM sequence: GAG
tgtatgtcaaattcctttca

SEQ ID NO: 146207 - DNA, 20 bp, Artificial Sequence
  Description of Artificial Sequence: Synthetic oligonucleotide
  Target: LAMA2; (+) strand; PAM type: NRG; PAM sequence: AAG
ttcctttcagagaaaaaaaa

SEQ ID NO: 146208 - DNA, 20 bp, Artificial Sequence
  Description of Artificial Sequence: Synthetic oligonucleotide
  Target: LAMA2; (+) strand; PAM type: NRG; PAM sequence: GAG
tttcagagaaaaaaaaaagt

SEQ ID NO: 146209 - DNA, 20 bp, Artificial Sequence
  Description of Artificial Sequence: Synthetic oligonucleotide
  Target: LAMA2; (+) strand; PAM type: NRG; PAM sequence: GAG
tcagagaaaaaaaaaagtga

SEQ ID NO: 146210 - DNA, 20 bp, Artificial Sequence
  Description of Artificial Sequence: Synthetic oligonucleotide
  Target: LAMA2; (+) strand; PAM type: NRG; PAM sequence: AGG
cagagaaaaaaaaaagtgag

SEQ ID NO: 146211 - DNA, 20 bp, Artificial Sequence
  Description of Artificial Sequence: Synthetic oligonucleotide
  Target: LAMA2; (+) strand; PAM type: NRG; PAM sequence: GGG
agagaaaaaaaaaagtgaga

SEQ ID NO: 146212 - DNA, 20 bp, Artificial Sequence
  Description of Artificial Sequence: Synthetic oligonucleotide
  Target: LAMA2; (+) strand; PAM type: NRG; PAM sequence: AAG
gaaaaaaaaaagtgagaggg

SEQ ID NO: 146213 - DNA, 20 bp, Artificial Sequence
  Description of Artificial Sequence: Synthetic oligonucleotide
  Target: LAMA2; (+) strand; PAM type: NRG; PAM sequence: AGG
aaaaaaaaaagtgagaggga

SEQ ID NO: 146214 - DNA, 20 bp, Artificial Sequence
  Description of Artificial Sequence: Synthetic oligonucleotide
  Target: LAMA2; (+) strand; PAM type: NRG; PAM sequence: GGG
aaaaaaaaagtgagagggaa

SEQ ID NO: 146215 - DNA, 20 bp, Artificial Sequence
  Description of Artificial Sequence: Synthetic oligonucleotide
  Target: LAMA2; (+) strand; PAM type: NRG; PAM sequence: GGG
aaaaaaaagtgagagggaag

SEQ ID NO: 146216 - DNA, 20 bp, Artificial Sequence
  Description of Artificial Sequence: Synthetic oligonucleotide
  Target: LAMA2; (+) strand; PAM type: NRG; PAM sequence: GGG
aaaaaaagtgagagggaagg

SEQ ID NO: 146217 - DNA, 20 bp, Artificial Sequence
  Description of Artificial Sequence: Synthetic oligonucleotide
  Target: LAMA2; (+) strand; PAM type: NRG; PAM sequence: TAG
ggaagggggaaatttgcatt

SEQ ID NO: 146218 - DNA, 20 bp, Artificial Sequence
  Description of Artificial Sequence: Synthetic oligonucleotide
  Target: LAMA2; (+) strand; PAM type: NRG; PAM sequence: CAG
ttttgtttttttgaaaattt

SEQ ID NO: 146219 - DNA, 20 bp, Artificial Sequence
  Description of Artificial Sequence: Synthetic oligonucleotide
  Target: LAMA2; (+) strand; PAM type: NRG; PAM sequence: AGG
tttgtttttttgaaaatttc

SEQ ID NO: 146220 - DNA, 20 bp, Artificial Sequence
  Description of Artificial Sequence: Synthetic oligonucleotide
  Target: LAMA2; (+) strand; PAM type: NRG; PAM sequence: TAG
ttttgaaaatttcaggcact

SEQ ID NO: 146221 - DNA, 20 bp, Artificial Sequence
  Description of Artificial Sequence: Synthetic oligonucleotide
  Target: LAMA2; (+) strand; PAM type: NRG; PAM sequence: TGG
cttttgtacgtcatgcccaa

SEQ ID NO: 146222 - DNA, 20 bp, Artificial Sequence
  Description of Artificial Sequence: Synthetic oligonucleotide
  Target: LAMA2; (+) strand; PAM type: NRG; PAM sequence: GGG
ttttgtacgtcatgcccaat

SEQ ID NO: 146223 - DNA, 20 bp, Artificial Sequence
  Description of Artificial Sequence: Synthetic oligonucleotide
  Target: LAMA2; (+) strand; PAM type: NRG; PAM sequence: CAG
atgcccaatgggaacgatac

SEQ ID NO: 146224 - DNA, 20 bp, Artificial Sequence
  Description of Artificial Sequence: Synthetic oligonucleotide
  Target: LAMA2; (+) strand; PAM type: NRG; PAM sequence: AGG
tgcccaatgggaacgatacc

SEQ ID NO: 146225 - DNA, 20 bp, Artificial Sequence
  Description of Artificial Sequence: Synthetic oligonucleotide
  Target: LAMA2; (+) strand; PAM type: NRG; PAM sequence: TGG
ggatctttcactcaattctg

SEQ ID NO: 146226 - DNA, 20 bp, Artificial Sequence
  Description of Artificial Sequence: Synthetic oligonucleotide
  Target: LAMA2; (+) strand; PAM type: NRG; PAM sequence: CAG
tcactcaattctgtggatta

SEQ ID NO: 146227 - DNA, 20 bp, Artificial Sequence
  Description of Artificial Sequence: Synthetic oligonucleotide
  Target: LAMA2; (+) strand; PAM type: NRG; PAM sequence: AGG
cactcaattctgtggattac

SEQ ID NO: 146228 - DNA, 20 bp, Artificial Sequence
  Description of Artificial Sequence: Synthetic oligonucleotide
  Target: LAMA2; (+) strand; PAM type: NRG; PAM sequence: TGG
tggattacaggtcacccacc

SEQ ID NO: 146229 - DNA, 20 bp, Artificial Sequence
  Description of Artificial Sequence: Synthetic oligonucleotide
  Target: LAMA2; (+) strand; PAM type: NRG; PAM sequence: GGG
ggattacaggtcacccacct

SEQ ID NO: 146230 - DNA, 20 bp, Artificial Sequence
  Description of Artificial Sequence: Synthetic oligonucleotide
  Target: LAMA2; (+) strand; PAM type: NRG; PAM sequence: CAG
tcacccacctgggcatgttt

SEQ ID NO: 146231 - DNA, 20 bp, Artificial Sequence
  Description of Artificial Sequence: Synthetic oligonucleotide
  Target: LAMA2; (+) strand; PAM type: NRG; PAM sequence: AAG
gtttcagatgaaactaacct

SEQ ID NO: 146232 - DNA, 20 bp, Artificial Sequence
  Description of Artificial Sequence: Synthetic oligonucleotide
  Target: LAMA2; (+) strand; PAM type: NRG; PAM sequence: GAG
aactaacctaagctcatctt

SEQ ID NO: 146233 - DNA, 20 bp, Artificial Sequence
  Description of Artificial Sequence: Synthetic oligonucleotide
  Target: LAMA2; (+) strand; PAM type: NRG; PAM sequence: AAG
aacctaagctcatcttgagt

SEQ ID NO: 146234 - DNA, 20 bp, Artificial Sequence
  Description of Artificial Sequence: Synthetic oligonucleotide
  Target: LAMA2; (+) strand; PAM type: NRG; PAM sequence: AGG
acctaagctcatcttgagta

SEQ ID NO: 146235 - DNA, 20 bp, Artificial Sequence
  Description of Artificial Sequence: Synthetic oligonucleotide
  Target: LAMA2; (+) strand; PAM type: NRG; PAM sequence: GGG
cctaagctcatcttgagtaa

SEQ ID NO: 146236 - DNA, 20 bp, Artificial Sequence
  Description of Artificial Sequence: Synthetic oligonucleotide
  Target: LAMA2; (+) strand; PAM type: NRG; PAM sequence: GGG
ctaagctcatcttgagtaag

SEQ ID NO: 146237 - DNA, 20 bp, Artificial Sequence
  Description of Artificial Sequence: Synthetic oligonucleotide
  Target: LAMA2; (+) strand; PAM type: NRG; PAM sequence: TAG
ctcatcttgagtaaggggct

SEQ ID NO: 146238 - DNA, 20 bp, Artificial Sequence
  Description of Artificial Sequence: Synthetic oligonucleotide
  Target: LAMA2; (+) strand; PAM type: NRG; PAM sequence: AAG
atcttgagtaaggggcttag

SEQ ID NO: 146239 - DNA, 20 bp, Artificial Sequence
  Description of Artificial Sequence: Synthetic oligonucleotide
  Target: LAMA2; (+) strand; PAM type: NRG; PAM sequence: TGG
cttagaagtaaatgctttgt

SEQ ID NO: 146240 - DNA, 20 bp, Artificial Sequence
  Description of Artificial Sequence: Synthetic oligonucleotide
  Target: LAMA2; (+) strand; PAM type: NRG; PAM sequence: GAG
aatgctttgttggttgcttt

SEQ ID NO: 146241 - DNA, 20 bp, Artificial Sequence
  Description of Artificial Sequence: Synthetic oligonucleotide
  Target: LAMA2; (+) strand; PAM type: NRG; PAM sequence: AAG
tggttgctttgagttgtaca

SEQ ID NO: 146242 - DNA, 20 bp, Artificial Sequence
  Description of Artificial Sequence: Synthetic oligonucleotide
  Target: LAMA2; (+) strand; PAM type: NRG; PAM sequence: CAG
ttgctttgagttgtacaaag

SEQ ID NO: 146243 - DNA, 20 bp, Artificial Sequence
  Description of Artificial Sequence: Synthetic oligonucleotide
  Target: LAMA2; (+) strand; PAM type: NRG; PAM sequence: AGG
tgctttgagttgtacaaagc

SEQ ID NO: 146244 - DNA, 20 bp, Artificial Sequence
  Description of Artificial Sequence: Synthetic oligonucleotide
  Target: LAMA2; (+) strand; PAM type: NRG; PAM sequence: CAG
gtacaaagcaggacgaccac

SEQ ID NO: 146245 - DNA, 20 bp, Artificial Sequence
  Description of Artificial Sequence: Synthetic oligonucleotide
  Target: LAMA2; (+) strand; PAM type: NRG; PAM sequence: GAG
acaaagcaggacgaccacca

SEQ ID NO: 146246 - DNA, 20 bp, Artificial Sequence
  Description of Artificial Sequence: Synthetic oligonucleotide
  Target: LAMA2; (+) strand; PAM type: NRG; PAM sequence: AGG
caaagcaggacgaccaccag

SEQ ID NO: 146247 - DNA, 20 bp, Artificial Sequence
  Description of Artificial Sequence: Synthetic oligonucleotide
  Target: LAMA2; (+) strand; PAM type: NRG; PAM sequence: AAG
acgaccaccagaggctttct

SEQ ID NO: 146248 - DNA, 20 bp, Artificial Sequence
  Description of Artificial Sequence: Synthetic oligonucleotide
  Target: LAMA2; (+) strand; PAM type: NRG; PAM sequence: AAG
accagaggctttctaagaaa

SEQ ID NO: 146249 - DNA, 20 bp, Artificial Sequence
  Description of Artificial Sequence: Synthetic oligonucleotide
  Target: LAMA2; (+) strand; PAM type: NRG; PAM sequence: TAG
ctttctaagaaaaagaatca

SEQ ID NO: 146250 - DNA, 20 bp, Artificial Sequence
  Description of Artificial Sequence: Synthetic oligonucleotide
  Target: LAMA2; (+) strand; PAM type: NRG; PAM sequence: GAG
ttctaagaaaaagaatcata

SEQ ID NO: 146251 - DNA, 20 bp, Artificial Sequence
  Description of Artificial Sequence: Synthetic oligonucleotide
  Target: LAMA2; (+) strand; PAM type: NRG; PAM sequence: TGG
catagagactttgataaaat

SEQ ID NO: 146252 - DNA, 20 bp, Artificial Sequence
  Description of Artificial Sequence: Synthetic oligonucleotide
  Target: LAMA2; (+) strand; PAM type: NRG; PAM sequence: AAG
tgataaaattggaactccta

SEQ ID NO: 146253 - DNA, 20 bp, Artificial Sequence
  Description of Artificial Sequence: Synthetic oligonucleotide
  Target: LAMA2; (+) strand; PAM type: NRG; PAM sequence: CAG
taaaattggaactcctaaag

SEQ ID NO: 146254 - DNA, 20 bp, Artificial Sequence
  Description of Artificial Sequence: Synthetic oligonucleotide
  Target: LAMA2; (+) strand; PAM type: NRG; PAM sequence: AAG
ttggaactcctaaagcagct

SEQ ID NO: 146255 - DNA, 20 bp, Artificial Sequence
  Description of Artificial Sequence: Synthetic oligonucleotide
  Target: LAMA2; (+) strand; PAM type: NRG; PAM sequence: AGG
tggaactcctaaagcagcta

SEQ ID NO: 146256 - DNA, 20 bp, Artificial Sequence
  Description of Artificial Sequence: Synthetic oligonucleotide
  Target: LAMA2; (+) strand; PAM type: NRG; PAM sequence: AAG
tatttttgatcatttttaaa

SEQ ID NO: 146257 - DNA, 20 bp, Artificial Sequence
  Description of Artificial Sequence: Synthetic oligonucleotide
  Target: LAMA2; (+) strand; PAM type: NRG; PAM sequence: TAG
tttgatcatttttaaaaagt

SEQ ID NO: 146258 - DNA, 20 bp, Artificial Sequence
  Description of Artificial Sequence: Synthetic oligonucleotide
  Target: LAMA2; (+) strand; PAM type: NRG; PAM sequence: TGG
ttttaaaaagttagttcttc

SEQ ID NO: 146259 - DNA, 20 bp, Artificial Sequence
  Description of Artificial Sequence: Synthetic oligonucleotide
  Target: LAMA2; (+) strand; PAM type: NRG; PAM sequence: TGG
aagttagttcttctggtgtt

SEQ ID NO: 146260 - DNA, 20 bp, Artificial Sequence
  Description of Artificial Sequence: Synthetic oligonucleotide
  Target: LAMA2; (+) strand; PAM type: NRG; PAM sequence: TAG
ttagttcttctggtgtttgg

SEQ ID NO: 146261 - DNA, 20 bp, Artificial Sequence
  Description of Artificial Sequence: Synthetic oligonucleotide
  Target: LAMA2; (+) strand; PAM type: NRG; PAM sequence: TAG
tctggtgtttggtagttcca

SEQ ID NO: 146262 - DNA, 20 bp, Artificial Sequence
  Description of Artificial Sequence: Synthetic oligonucleotide
  Target: LAMA2; (+) strand; PAM type: NRG; PAM sequence: TAG
ggtgtttggtagttccatag

SEQ ID NO: 146263 - DNA, 20 bp, Artificial Sequence
  Description of Artificial Sequence: Synthetic oligonucleotide
  Target: LAMA2; (+) strand; PAM type: NRG; PAM sequence: TAG
tttggtagttccatagtagt

SEQ ID NO: 146264 - DNA, 20 bp, Artificial Sequence
  Description of Artificial Sequence: Synthetic oligonucleotide
  Target: LAMA2; (+) strand; PAM type: NRG; PAM sequence: AAG
gtagttccatagtagttaga

SEQ ID NO: 146265 - DNA, 20 bp, Artificial Sequence
  Description of Artificial Sequence: Synthetic oligonucleotide
  Target: LAMA2; (+) strand; PAM type: NRG; PAM sequence: TGG
tgccacatgaaatctgctat

SEQ ID NO: 146266 - DNA, 20 bp, Artificial Sequence
  Description of Artificial Sequence: Synthetic oligonucleotide
  Target: LAMA2; (+) strand; PAM type: NRG; PAM sequence: TAG
cacatgaaatctgctattgg

SEQ ID NO: 146267 - DNA, 20 bp, Artificial Sequence
  Description of Artificial Sequence: Synthetic oligonucleotide
  Target: LAMA2; (+) strand; PAM type: NRG; PAM sequence: AAG
aaatctgctattggtagaaa

SEQ ID NO: 146268 - DNA, 20 bp, Artificial Sequence
  Description of Artificial Sequence: Synthetic oligonucleotide
  Target: LAMA2; (+) strand; PAM type: NRG; PAM sequence: CAG
ggtagaaaaagaaaatgtta

SEQ ID NO: 146269 - DNA, 20 bp, Artificial Sequence
  Description of Artificial Sequence: Synthetic oligonucleotide
  Target: LAMA2; (+) strand; PAM type: NRG; PAM sequence: GAG
agccaactctgatacaacat

SEQ ID NO: 146270 - DNA, 20 bp, Artificial Sequence
  Description of Artificial Sequence: Synthetic oligonucleotide
  Target: LAMA2; (+) strand; PAM type: NRG; PAM sequence: GAG
ccaactctgatacaacatga

SEQ ID NO: 146271 - DNA, 20 bp, Artificial Sequence
  Description of Artificial Sequence: Synthetic oligonucleotide
  Target: LAMA2; (+) strand; PAM type: NRG; PAM sequence: GAG
aactctgatacaacatgaga

SEQ ID NO: 146272 - DNA, 20 bp, Artificial Sequence
  Description of Artificial Sequence: Synthetic oligonucleotide
  Target: LAMA2; (+) strand; PAM type: NRG; PAM sequence: GAG
ctctgatacaacatgagaga

SEQ ID NO: 146273 - DNA, 20 bp, Artificial Sequence
  Description of Artificial Sequence: Synthetic oligonucleotide
  Target: LAMA2; (+) strand; PAM type: NRG; PAM sequence: CAG
gatacaacatgagagagaga

SEQ ID NO: 146274 - DNA, 20 bp, Artificial Sequence
  Description of Artificial Sequence: Synthetic oligonucleotide
  Target: LAMA2; (+) strand; PAM type: NRG; PAM sequence: GAG
tacaacatgagagagagaca

SEQ ID NO: 146275 - DNA, 20 bp, Artificial Sequence
  Description of Artificial Sequence: Synthetic oligonucleotide
  Target: LAMA2; (+) strand; PAM type: NRG; PAM sequence: GAG
caacatgagagagagacaga

SEQ ID NO: 146276 - DNA, 20 bp, Artificial Sequence
  Description of Artificial Sequence: Synthetic oligonucleotide
  Target: LAMA2; (+) strand; PAM type: NRG; PAM sequence: GAG
acatgagagagagacagaga

SEQ ID NO: 146277 - DNA, 20 bp, Artificial Sequence
  Description of Artificial Sequence: Synthetic oligonucleotide
  Target: LAMA2; (+) strand; PAM type: NRG; PAM sequence: GAG
atgagagagagacagagaga

SEQ ID NO: 146278 - DNA, 20 bp, Artificial Sequence
  Description of Artificial Sequence: Synthetic oligonucleotide
  Target: LAMA2; (+) strand; PAM type: NRG; PAM sequence: GAG
gagagagagacagagagaga

SEQ ID NO: 146279 - DNA, 20 bp, Artificial Sequence
  Description of Artificial Sequence: Synthetic oligonucleotide
  Target: LAMA2; (+) strand; PAM type: NRG; PAM sequence: GAG
gagagagacagagagagaga

SEQ ID NO: 146280 - DNA, 20 bp, Artificial Sequence
  Description of Artificial Sequence: Synthetic oligonucleotide
  Target: LAMA2; (+) strand; PAM type: NRG; PAM sequence: AAG
agagacagagagagagagag

SEQ ID NO: 146281 - DNA, 20 bp, Artificial Sequence
  Description of Artificial Sequence: Synthetic oligonucleotide
  Target: LAMA2; (+) strand; PAM type: NRG; PAM sequence: AGG
gagacagagagagagagaga

SEQ ID NO: 146282 - DNA, 20 bp, Artificial Sequence
  Description of Artificial Sequence: Synthetic oligonucleotide
  Target: LAMA2; (+) strand; PAM type: NRG; PAM sequence: GGG
agacagagagagagagagaa

SEQ ID NO: 146283 - DNA, 20 bp, Artificial Sequence
  Description of Artificial Sequence: Synthetic oligonucleotide
  Target: LAMA2; (+) strand; PAM type: NRG; PAM sequence: GAG
acagagagagagagagaagg

SEQ ID NO: 146284 - DNA, 20 bp, Artificial Sequence
  Description of Artificial Sequence: Synthetic oligonucleotide
  Target: LAMA2; (+) strand; PAM type: NRG; PAM sequence: GAG
agagagagagagagaaggga

SEQ ID NO: 146285 - DNA, 20 bp, Artificial Sequence
  Description of Artificial Sequence: Synthetic oligonucleotide
  Target: LAMA2; (+) strand; PAM type: NRG; PAM sequence: AAG
gagagagagagaagggagag

SEQ ID NO: 146286 - DNA, 20 bp, Artificial Sequence
  Description of Artificial Sequence: Synthetic oligonucleotide
  Target: LAMA2; (+) strand; PAM type: NRG; PAM sequence: GAG
gagagagagaagggagagaa

SEQ ID NO: 146287 - DNA, 20 bp, Artificial Sequence
  Description of Artificial Sequence: Synthetic oligonucleotide
  Target: LAMA2; (+) strand; PAM type: NRG; PAM sequence: CAG
gagacatgttcttctttgac

SEQ ID NO: 146288 - DNA, 20 bp, Artificial Sequence
  Description of Artificial Sequence: Synthetic oligonucleotide
  Target: LAMA2; (+) strand; PAM type: NRG; PAM sequence: CAG
acatgttcttctttgaccag

SEQ ID NO: 146289 - DNA, 20 bp, Artificial Sequence
  Description of Artificial Sequence: Synthetic oligonucleotide
  Target: LAMA2; (+) strand; PAM type: NRG; PAM sequence: AGG
catgttcttctttgaccagc

SEQ ID NO: 146290 - DNA, 20 bp, Artificial Sequence
  Description of Artificial Sequence: Synthetic oligonucleotide
  Target: LAMA2; (+) strand; PAM type: NRG; PAM sequence: AAG
gaccagcaggaaaaaaaaaa

SEQ ID NO: 146291 - DNA, 20 bp, Artificial Sequence
  Description of Artificial Sequence: Synthetic oligonucleotide
  Target: LAMA2; (+) strand; PAM type: NRG; PAM sequence: TAG
agctgcacaaaccttttaac

SEQ ID NO: 146292 - DNA, 20 bp, Artificial Sequence
  Description of Artificial Sequence: Synthetic oligonucleotide
  Target: LAMA2; (+) strand; PAM type: NRG; PAM sequence: TAG
aaccttttaactagtttcac

SEQ ID NO: 146293 - DNA, 20 bp, Artificial Sequence
  Description of Artificial Sequence: Synthetic oligonucleotide
  Target: LAMA2; (+) strand; PAM type: NRG; PAM sequence: CAG
cttttaactagtttcactag

SEQ ID NO: 146294 - DNA, 20 bp, Artificial Sequence
  Description of Artificial Sequence: Synthetic oligonucleotide
  Target: LAMA2; (+) strand; PAM type: NRG; PAM sequence: AAG
aactagtttcactagcagaa

SEQ ID NO: 146295 - DNA, 20 bp, Artificial Sequence
  Description of Artificial Sequence: Synthetic oligonucleotide
  Target: LAMA2; (+) strand; PAM type: NRG; PAM sequence: TAG
agaaaaataaaaatataaaa

SEQ ID NO: 146296 - DNA, 20 bp, Artificial Sequence
  Description of Artificial Sequence: Synthetic oligonucleotide
  Target: LAMA2; (+) strand; PAM type: NRG; PAM sequence: AAG
aaaatagcaaataatcttta

SEQ ID NO: 146297 - DNA, 20 bp, Artificial Sequence
  Description of Artificial Sequence: Synthetic oligonucleotide
  Target: LAMA2; (+) strand; PAM type: NRG; PAM sequence: AAG
tattatgctgaaatttatta

SEQ ID NO: 146298 - DNA, 20 bp, Artificial Sequence
  Description of Artificial Sequence: Synthetic oligonucleotide
  Target: LAMA2; (+) strand; PAM type: NRG; PAM sequence: AAG
aaagactgttgtgttgactg

SEQ ID NO: 146299 - DNA, 20 bp, Artificial Sequence
  Description of Artificial Sequence: Synthetic oligonucleotide
  Target: LAMA2; (+) strand; PAM type: NRG; PAM sequence: TGG
gaatatgtttaaatattttg

SEQ ID NO: 146300 - DNA, 20 bp, Artificial Sequence
  Description of Artificial Sequence: Synthetic oligonucleotide
  Target: LAMA2; (+) strand; PAM type: NRG; PAM sequence: AAG
tatgtttaaatattttgtgg

SEQ ID NO: 146301 - DNA, 20 bp, Artificial Sequence
  Description of Artificial Sequence: Synthetic oligonucleotide
  Target: LAMA2; (+) strand; PAM type: NRG; PAM sequence: AGG
atgtttaaatattttgtgga

SEQ ID NO: 146302 - DNA, 20 bp, Artificial Sequence
  Description of Artificial Sequence: Synthetic oligonucleotide
  Target: LAMA2; (+) strand; PAM type: NRG; PAM sequence: AAG
taaatattttgtggaaggca

SEQ ID NO: 146303 - DNA, 20 bp, Artificial Sequence
  Description of Artificial Sequence: Synthetic oligonucleotide
  Target: LAMA2; (+) strand; PAM type: NRG; PAM sequence: CAG
tggaaggcaaagctttcatt

SEQ ID NO: 146304 - DNA, 20 bp, Artificial Sequence
  Description of Artificial Sequence: Synthetic oligonucleotide
  Target: LAMA2; (+) strand; PAM type: NRG; PAM sequence: AGG
ggaaggcaaagctttcattc

SEQ ID NO: 146305 - DNA, 20 bp, Artificial Sequence
  Description of Artificial Sequence: Synthetic oligonucleotide
  Target: LAMA2; (+) strand; PAM type: NRG; PAM sequence: AAG
agctttcattcaggaatgac

SEQ ID NO: 146306 - DNA, 20 bp, Artificial Sequence
  Description of Artificial Sequence: Synthetic oligonucleotide
  Target: LAMA2; (+) strand; PAM type: NRG; PAM sequence: AAG
cattcaggaatgacaagtgc

SEQ ID NO: 146307 - DNA, 20 bp, Artificial Sequence
  Description of Artificial Sequence: Synthetic oligonucleotide
  Target: LAMA2; (+) strand; PAM type: NRG; PAM sequence: AGG
attcaggaatgacaagtgca

SEQ ID NO: 146308 - DNA, 20 bp, Artificial Sequence
  Description of Artificial Sequence: Synthetic oligonucleotide
  Target: LAMA2; (+) strand; PAM type: NRG; PAM sequence: AAG
gtgcaaggactgtaattcta

SEQ ID NO: 146309 - DNA, 20 bp, Artificial Sequence
  Description of Artificial Sequence: Synthetic oligonucleotide
  Target: LAMA2; (+) strand; PAM type: NRG; PAM sequence: AAG
ctgtaattctaaagaaatta

SEQ ID NO: 146310 - DNA, 20 bp, Artificial Sequence
  Description of Artificial Sequence: Synthetic oligonucleotide
  Target: LAMA2; (+) strand; PAM type: NRG; PAM sequence: AAG
attctaaagaaattaaagaa

SEQ ID NO: 146311 - DNA, 20 bp, Artificial Sequence
  Description of Artificial Sequence: Synthetic oligonucleotide
  Target: LAMA2; (+) strand; PAM type: NRG; PAM sequence: AAG
ctaaagaaattaaagaaaag

SEQ ID NO: 146312 - DNA, 20 bp, Artificial Sequence
  Description of Artificial Sequence: Synthetic oligonucleotide
  Target: LAMA2; (+) strand; PAM type: NRG; PAM sequence: TGG
gaaattaaagaaaagaagaa

SEQ ID NO: 146313 - DNA, 20 bp, Artificial Sequence
  Description of Artificial Sequence: Synthetic oligonucleotide
  Target: LAMA2; (+) strand; PAM type: NRG; PAM sequence: AAG
gaaaagaagaatggcaattt

SEQ ID NO: 146314 - DNA, 20 bp, Artificial Sequence
  Description of Artificial Sequence: Synthetic oligonucleotide
  Target: LAMA2; (+) strand; PAM type: NRG; PAM sequence: CAG
gaagaatggcaatttaagtt

SEQ ID NO: 146315 - DNA, 20 bp, Artificial Sequence
  Description of Artificial Sequence: Synthetic oligonucleotide
  Target: LAMA2; (+) strand; PAM type: NRG; PAM sequence: AGG
aagaatggcaatttaagttc

SEQ ID NO: 146316 - DNA, 20 bp, Artificial Sequence
  Description of Artificial Sequence: Synthetic oligonucleotide
  Target: LAMA2; (+) strand; PAM type: NRG; PAM sequence: GGG
agaatggcaatttaagttca

SEQ ID NO: 146317 - DNA, 20 bp, Artificial Sequence
  Description of Artificial Sequence: Synthetic oligonucleotide
  Target: LAMA2; (+) strand; PAM type: NRG; PAM sequence: TGG
aatttaagttcagggacaat

SEQ ID NO: 146318 - DNA, 20 bp, Artificial Sequence
  Description of Artificial Sequence: Synthetic oligonucleotide
  Target: LAMA2; (+) strand; PAM type: NRG; PAM sequence: AAG
gttcagggacaattggaatc

SEQ ID NO: 146319 - DNA, 20 bp, Artificial Sequence
  Description of Artificial Sequence: Synthetic oligonucleotide
  Target: LAMA2; (+) strand; PAM type: NRG; PAM sequence: CAG
cagggacaattggaatcaag

SEQ ID NO: 146320 - DNA, 20 bp, Artificial Sequence
  Description of Artificial Sequence: Synthetic oligonucleotide
  Target: LAMA2; (+) strand; PAM type: NRG; PAM sequence: CAG
aatcaagcagtaatgattta

SEQ ID NO: 146321 - DNA, 20 bp, Artificial Sequence
  Description of Artificial Sequence: Synthetic oligonucleotide
  Target: LAMA2; (+) strand; PAM type: NRG; PAM sequence: CAG
ttacagctttttaaaatttt

SEQ ID NO: 146322 - DNA, 20 bp, Artificial Sequence
  Description of Artificial Sequence: Synthetic oligonucleotide
  Target: LAMA2; (+) strand; PAM type: NRG; PAM sequence: AGG
tacagctttttaaaattttc

SEQ ID NO: 146323 - DNA, 20 bp, Artificial Sequence
  Description of Artificial Sequence: Synthetic oligonucleotide
  Target: LAMA2; (+) strand; PAM type: NRG; PAM sequence: TAG
ttttaaaattttcaggcact

SEQ ID NO: 146324 - DNA, 20 bp, Artificial Sequence
  Description of Artificial Sequence: Synthetic oligonucleotide
  Target: LAMA2; (+) strand; PAM type: NRG; PAM sequence: TGG
taaaattttcaggcacttag

SEQ ID NO: 146325 - DNA, 20 bp, Artificial Sequence
  Description of Artificial Sequence: Synthetic oligonucleotide
  Target: LAMA2; (+) strand; PAM type: NRG; PAM sequence: CAG
attttcaggcacttagtggt

SEQ ID NO: 146326 - DNA, 20 bp, Artificial Sequence
  Description of Artificial Sequence: Synthetic oligonucleotide
  Target: LAMA2; (+) strand; PAM type: NRG; PAM sequence: CAG
ttccttttatgcgttatgac

SEQ ID NO: 146327 - DNA, 20 bp, Artificial Sequence
  Description of Artificial Sequence: Synthetic oligonucleotide
  Target: LAMA2; (+) strand; PAM type: NRG; PAM sequence: TGG
cttttatgcgttatgaccag

SEQ ID NO: 146328 - DNA, 20 bp, Artificial Sequence
  Description of Artificial Sequence: Synthetic oligonucleotide
  Target: LAMA2; (+) strand; PAM type: NRG; PAM sequence: GGG
ttttatgcgttatgaccagt

SEQ ID NO: 146329 - DNA, 20 bp, Artificial Sequence
  Description of Artificial Sequence: Synthetic oligonucleotide
  Target: LAMA2; (+) strand; PAM type: NRG; PAM sequence: AAG
tatgcgttatgaccagtggg

SEQ ID NO: 146330 - DNA, 20 bp, Artificial Sequence
  Description of Artificial Sequence: Synthetic oligonucleotide
  Target: LAMA2; (+) strand; PAM type: NRG; PAM sequence: AGG
atgcgttatgaccagtggga

SEQ ID NO: 146331 - DNA, 20 bp, Artificial Sequence
  Description of Artificial Sequence: Synthetic oligonucleotide
  Target: LAMA2; (+) strand; PAM type: NRG; PAM sequence: CAG
atgaccagtgggaaggatac

SEQ ID NO: 146332 - DNA, 20 bp, Artificial Sequence
  Description of Artificial Sequence: Synthetic oligonucleotide
  Target: LAMA2; (+) strand; PAM type: NRG; PAM sequence: AGG
tgaccagtgggaaggatacc

SEQ ID NO: 146333 - DNA, 20 bp, Artificial Sequence
  Description of Artificial Sequence: Synthetic oligonucleotide
  Target: LAMA2; (+) strand; PAM type: NRG; PAM sequence: CAG
ggataccaggatcttccatt

SEQ ID NO: 146334 - DNA, 20 bp, Artificial Sequence
  Description of Artificial Sequence: Synthetic oligonucleotide
  Target: LAMA2; (+) strand; PAM type: NRG; PAM sequence: TGG
gatcttccattcagttatta

SEQ ID NO: 146335 - DNA, 20 bp, Artificial Sequence
  Description of Artificial Sequence: Synthetic oligonucleotide
  Target: LAMA2; (+) strand; PAM type: NRG; PAM sequence: GGG
atcttccattcagttattat

SEQ ID NO: 146336 - DNA, 20 bp, Artificial Sequence
  Description of Artificial Sequence: Synthetic oligonucleotide
  Target: LAMA2; (+) strand; PAM type: NRG; PAM sequence: CAG
cattcagttattatgggtta

SEQ ID NO: 146337 - DNA, 20 bp, Artificial Sequence
  Description of Artificial Sequence: Synthetic oligonucleotide
  Target: LAMA2; (+) strand; PAM type: NRG; PAM sequence: AGG
attcagttattatgggttac

SEQ ID NO: 146338 - DNA, 20 bp, Artificial Sequence
  Description of Artificial Sequence: Synthetic oligonucleotide
  Target: LAMA2; (+) strand; PAM type: NRG; PAM sequence: TGG
ggtcacccatccgtgacctg

SEQ ID NO: 146339 - DNA, 20 bp, Artificial Sequence
  Description of Artificial Sequence: Synthetic oligonucleotide
  Target: LAMA2; (+) strand; PAM type: NRG; PAM sequence: CAG
ccatccgtgacctgtggtca

SEQ ID NO: 146340 - DNA, 20 bp, Artificial Sequence
  Description of Artificial Sequence: Synthetic oligonucleotide
  Target: LAMA2; (+) strand; PAM type: NRG; PAM sequence: TAG
gtgacctgtggtcacagtgt

SEQ ID NO: 146341 - DNA, 20 bp, Artificial Sequence
  Description of Artificial Sequence: Synthetic oligonucleotide
  Target: LAMA2; (+) strand; PAM type: NRG; PAM sequence: AGG
tgacctgtggtcacagtgtt

SEQ ID NO: 146342 - DNA, 20 bp, Artificial Sequence
  Description of Artificial Sequence: Synthetic oligonucleotide
  Target: LAMA2; (+) strand; PAM type: NRG; PAM sequence: AAG
gtcacagtgttaggtatcga

SEQ ID NO: 146343 - DNA, 20 bp, Artificial Sequence
  Description of Artificial Sequence: Synthetic oligonucleotide
  Target: LAMA2; (+) strand; PAM type: NRG; PAM sequence: AAG
agcataataccttcttatct

SEQ ID NO: 146344 - DNA, 20 bp, Artificial Sequence
  Description of Artificial Sequence: Synthetic oligonucleotide
  Target: LAMA2; (+) strand; PAM type: NRG; PAM sequence: AAG
ataataccttcttatctaag

SEQ ID NO: 146345 - DNA, 20 bp, Artificial Sequence
  Description of Artificial Sequence: Synthetic oligonucleotide
  Target: LAMA2; (+) strand; PAM type: NRG; PAM sequence: AGG
taataccttcttatctaaga

SEQ ID NO: 146346 - DNA, 20 bp, Artificial Sequence
  Description of Artificial Sequence: Synthetic oligonucleotide
  Target: LAMA2; (+) strand; PAM type: NRG; PAM sequence: AAG
accttcttatctaagaagga

SEQ ID NO: 146347 - DNA, 20 bp, Artificial Sequence
  Description of Artificial Sequence: Synthetic oligonucleotide
  Target: LAMA2; (+) strand; PAM type: NRG; PAM sequence: AAG
ctaagaaggaaagacctgtt

SEQ ID NO: 146348 - DNA, 20 bp, Artificial Sequence
  Description of Artificial Sequence: Synthetic oligonucleotide
  Target: LAMA2; (+) strand; PAM type: NRG; PAM sequence: AAG
aggaaagacctgttaagtct

SEQ ID NO: 146349 - DNA, 20 bp, Artificial Sequence
  Description of Artificial Sequence: Synthetic oligonucleotide
  Target: LAMA2; (+) strand; PAM type: NRG; PAM sequence: TAG
agacctgttaagtctaagct

SEQ ID NO: 146350 - DNA, 20 bp, Artificial Sequence
  Description of Artificial Sequence: Synthetic oligonucleotide
  Target: LAMA2; (+) strand; PAM type: NRG; PAM sequence: AGG
gacctgttaagtctaagctt

SEQ ID NO: 146351 - DNA, 20 bp, Artificial Sequence
  Description of Artificial Sequence: Synthetic oligonucleotide
  Target: LAMA2; (+) strand; PAM type: NRG; PAM sequence: GGG
acctgttaagtctaagctta

SEQ ID NO: 146352 - DNA, 20 bp, Artificial Sequence
  Description of Artificial Sequence: Synthetic oligonucleotide
  Target: LAMA2; (+) strand; PAM type: NRG; PAM sequence: GGG
cctgttaagtctaagcttag

SEQ ID NO: 146353 - DNA, 20 bp, Artificial Sequence
  Description of Artificial Sequence: Synthetic oligonucleotide
  Target: LAMA2; (+) strand; PAM type: NRG; PAM sequence: TAG
gttaagtctaagcttagggg

SEQ ID NO: 146354 - DNA, 20 bp, Artificial Sequence
  Description of Artificial Sequence: Synthetic oligonucleotide
  Target: LAMA2; (+) strand; PAM type: NRG; PAM sequence: GAG
taagtctaagcttaggggta

SEQ ID NO: 146355 - DNA, 20 bp, Artificial Sequence
  Description of Artificial Sequence: Synthetic oligonucleotide
  Target: LAMA2; (+) strand; PAM type: NRG; PAM sequence: CAG
gggtagagttgtcaacgata

SEQ ID NO: 146356 - DNA, 20 bp, Artificial Sequence
  Description of Artificial Sequence: Synthetic oligonucleotide
  Target: LAMA2; (+) strand; PAM type: NRG; PAM sequence: CAG
atacagtcatatttgttgaa

SEQ ID NO: 146357 - DNA, 20 bp, Artificial Sequence
  Description of Artificial Sequence: Synthetic oligonucleotide
  Target: LAMA2; (+) strand; PAM type: NRG; PAM sequence: AAG
tcatatttgttgaacagttc

SEQ ID NO: 146358 - DNA, 20 bp, Artificial Sequence
  Description of Artificial Sequence: Synthetic oligonucleotide
  Target: LAMA2; (+) strand; PAM type: NRG; PAM sequence: TGG
gttgccatttcttgtattct

SEQ ID NO: 146359 - DNA, 20 bp, Artificial Sequence
  Description of Artificial Sequence: Synthetic oligonucleotide
  Target: LAMA2; (+) strand; PAM type: NRG; PAM sequence: AAG
gccatttcttgtattcttgg

SEQ ID NO: 146360 - DNA, 20 bp, Artificial Sequence
  Description of Artificial Sequence: Synthetic oligonucleotide
  Target: LAMA2; (+) strand; PAM type: NRG; PAM sequence: GAG
catttcttgtattcttggaa

SEQ ID NO: 146361 - DNA, 20 bp, Artificial Sequence
  Description of Artificial Sequence: Synthetic oligonucleotide
  Target: LAMA2; (+) strand; PAM type: NRG; PAM sequence: AGG
atttcttgtattcttggaag

SEQ ID NO: 146362 - DNA, 20 bp, Artificial Sequence
  Description of Artificial Sequence: Synthetic oligonucleotide
  Target: LAMA2; (+) strand; PAM type: NRG; PAM sequence: AAG
cttgtattcttggaagaggt

SEQ ID NO: 146363 - DNA, 20 bp, Artificial Sequence
  Description of Artificial Sequence: Synthetic oligonucleotide
  Target: LAMA2; (+) strand; PAM type: NRG; PAM sequence: AAG
ttcttggaagaggtaagtta

SEQ ID NO: 146364 - DNA, 20 bp, Artificial Sequence
  Description of Artificial Sequence: Synthetic oligonucleotide
  Target: LAMA2; (+) strand; PAM type: NRG; PAM sequence: AAG
ttggaagaggtaagttaaag

SEQ ID NO: 146365 - DNA, 20 bp, Artificial Sequence
  Description of Artificial Sequence: Synthetic oligonucleotide
  Target: LAMA2; (+) strand; PAM type: NRG; PAM sequence: AGG
tggaagaggtaagttaaaga

SEQ ID NO: 146366 - DNA, 20 bp, Artificial Sequence
  Description of Artificial Sequence: Synthetic oligonucleotide
  Target: LAMA2; (+) strand; PAM type: NRG; PAM sequence: CAG
aagttaaagaaggttgtgca

SEQ ID NO: 146367 - DNA, 20 bp, Artificial Sequence
  Description of Artificial Sequence: Synthetic oligonucleotide
  Target: LAMA2; (+) strand; PAM type: NRG; PAM sequence: CAG
ttcttgacattttattatta

SEQ ID NO: 146368 - DNA, 20 bp, Artificial Sequence
  Description of Artificial Sequence: Synthetic oligonucleotide
  Target: LAMA2; (+) strand; PAM type: NRG; PAM sequence: AAG
ttattacagcactacctttc

SEQ ID NO: 146369 - DNA, 20 bp, Artificial Sequence
  Description of Artificial Sequence: Synthetic oligonucleotide
  Target: LAMA2; (+) strand; PAM type: NRG; PAM sequence: CAG
gcactacctttcaagccact

SEQ ID NO: 146370 - DNA, 20 bp, Artificial Sequence
  Description of Artificial Sequence: Synthetic oligonucleotide
  Target: LAMA2; (+) strand; PAM type: NRG; PAM sequence: TAG
ctacctttcaagccactcag

SEQ ID NO: 146371 - DNA, 20 bp, Artificial Sequence
  Description of Artificial Sequence: Synthetic oligonucleotide
  Target: LAMA2; (+) strand; PAM type: NRG; PAM sequence: CGG
tcaagccactcagtagtcat

SEQ ID NO: 146372 - DNA, 20 bp, Artificial Sequence
  Description of Artificial Sequence: Synthetic oligonucleotide
  Target: LAMA2; (+) strand; PAM type: NRG; PAM sequence: AAG
tcagtagtcatcggacatgt

SEQ ID NO: 146373 - DNA, 20 bp, Artificial Sequence
  Description of Artificial Sequence: Synthetic oligonucleotide
  Target: LAMA2; (+) strand; PAM type: NRG; PAM sequence: GAG
agtagtcatcggacatgtaa

SEQ ID NO: 146374 - DNA, 20 bp, Artificial Sequence
  Description of Artificial Sequence: Synthetic oligonucleotide
  Target: LAMA2; (+) strand; PAM type: NRG; PAM sequence: TGG
agtcatcggacatgtaagag

SEQ ID NO: 146375 - DNA, 20 bp, Artificial Sequence
  Description of Artificial Sequence: Synthetic oligonucleotide
  Target: LAMA2; (+) strand; PAM type: NRG; PAM sequence: TGG
gtaagagtggttgttctatt

SEQ ID NO: 146376 - DNA, 20 bp, Artificial Sequence
  Description of Artificial Sequence: Synthetic oligonucleotide
  Target: LAMA2; (+) strand; PAM type: NRG; PAM sequence: TAG
tatttggtcgtgtaaatttc

SEQ ID NO: 146377 - DNA, 20 bp, Artificial Sequence
  Description of Artificial Sequence: Synthetic oligonucleotide
  Target: LAMA2; (+) strand; PAM type: NRG; PAM sequence: CAG
gtcgtgtaaatttctagtga

SEQ ID NO: 146378 - DNA, 20 bp, Artificial Sequence
  Description of Artificial Sequence: Synthetic oligonucleotide
  Target: LAMA2; (+) strand; PAM type: NRG; PAM sequence: TAG
gtgtaaatttctagtgacag

SEQ ID NO: 146379 - DNA, 20 bp, Artificial Sequence
  Description of Artificial Sequence: Synthetic oligonucleotide
  Target: LAMA2; (+) strand; PAM type: NRG; PAM sequence: AGG
tgtaaatttctagtgacagt

SEQ ID NO: 146380 - DNA, 20 bp, Artificial Sequence
  Description of Artificial Sequence: Synthetic oligonucleotide
  Target: LAMA2; (+) strand; PAM type: NRG; PAM sequence: AAG
tgacagtaggaaaaaaaaaa

SEQ ID NO: 146381 - DNA, 20 bp, Artificial Sequence
  Description of Artificial Sequence: Synthetic oligonucleotide
  Target: LAMA2; (+) strand; PAM type: NRG; PAM sequence: AAG
aaaaaaaaagacctttatta

SEQ ID NO: 146382 - DNA, 20 bp, Artificial Sequence
  Description of Artificial Sequence: Synthetic oligonucleotide
  Target: LAMA2; (+) strand; PAM type: NRG; PAM sequence: CAG
aaagaccttccaaactaatt

SEQ ID NO: 146383 - DNA, 20 bp, Artificial Sequence
  Description of Artificial Sequence: Synthetic oligonucleotide
  Target: LAMA2; (+) strand; PAM type: NRG; PAM sequence: GAG
cctacatgctgcatgaaaat

SEQ ID NO: 146384 - DNA, 20 bp, Artificial Sequence
  Description of Artificial Sequence: Synthetic oligonucleotide
  Target: LAMA2; (+) strand; PAM type: NRG; PAM sequence: AGG
ctacatgctgcatgaaaatg

SEQ ID NO: 146385 - DNA, 20 bp, Artificial Sequence
  Description of Artificial Sequence: Synthetic oligonucleotide
  Target: LAMA2; (+) strand; PAM type: NRG; PAM sequence: CAG
gcatgaaaatgaggactttc

SEQ ID NO: 146386 - DNA, 20 bp, Artificial Sequence
  Description of Artificial Sequence: Synthetic oligonucleotide
  Target: LAMA2; (+) strand; PAM type: NRG; PAM sequence: GAG
aatgaggactttccagttct

SEQ ID NO: 146387 - DNA, 20 bp, Artificial Sequence
  Description of Artificial Sequence: Synthetic oligonucleotide
  Target: LAMA2; (+) strand; PAM type: NRG; PAM sequence: TAG
gaggactttccagttctgag

SEQ ID NO: 146388 - DNA, 20 bp, Artificial Sequence
  Description of Artificial Sequence: Synthetic oligonucleotide
  Target: LAMA2; (+) strand; PAM type: NRG; PAM sequence: AAG
gactttccagttctgagtag

SEQ ID NO: 146389 - DNA, 20 bp, Artificial Sequence
  Description of Artificial Sequence: Synthetic oligonucleotide
  Target: LAMA2; (+) strand; PAM type: NRG; PAM sequence: AGG
actttccagttctgagtaga

SEQ ID NO: 146390 - DNA, 20 bp, Artificial Sequence
  Description of Artificial Sequence: Synthetic oligonucleotide
  Target: LAMA2; (+) strand; PAM type: NRG; PAM sequence: AAG
ttctgagtagaaggaatatt

SEQ ID NO: 146391 - DNA, 20 bp, Artificial Sequence
  Description of Artificial Sequence: Synthetic oligonucleotide
  Target: LAMA2; (+) strand; PAM type: NRG; PAM sequence: AGG
tctgagtagaaggaatatta

SEQ ID NO: 146392 - DNA, 20 bp, Artificial Sequence
  Description of Artificial Sequence: Synthetic oligonucleotide
  Target: LAMA2; (+) strand; PAM type: NRG; PAM sequence: AAG
aaggaatattaaggcacctg

SEQ ID NO: 146393 - DNA, 20 bp, Artificial Sequence
  Description of Artificial Sequence: Synthetic oligonucleotide
  Target: LAMA2; (+) strand; PAM type: NRG; PAM sequence: AGG
aggaatattaaggcacctga

SEQ ID NO: 146394 - DNA, 20 bp, Artificial Sequence
  Description of Artificial Sequence: Synthetic oligonucleotide
  Target: LAMA2; (+) strand; PAM type: NRG; PAM sequence: GGG
ggaatattaaggcacctgaa

SEQ ID NO: 146395 - DNA, 20 bp, Artificial Sequence
  Description of Artificial Sequence: Synthetic oligonucleotide
  Target: LAMA2; (+) strand; PAM type: NRG; PAM sequence: TGG
ttttgtgataaaaatataaa

SEQ ID NO: 146396 - DNA, 20 bp, Artificial Sequence
  Description of Artificial Sequence: Synthetic oligonucleotide
  Target: LAMA2; (+) strand; PAM type: NRG; PAM sequence: TAG
aaaaatataaatggctctgc

SEQ ID NO: 146397 - DNA, 20 bp, Artificial Sequence
  Description of Artificial Sequence: Synthetic oligonucleotide
  Target: LAMA2; (+) strand; PAM type: NRG; PAM sequence: TGG
agtatactaaaaaatataaa

SEQ ID NO: 146398 - DNA, 20 bp, Artificial Sequence
  Description of Artificial Sequence: Synthetic oligonucleotide
  Target: LAMA2; (+) strand; PAM type: NRG; PAM sequence: TAG
aaaaatataaatggctctac

SEQ ID NO: 146399 - DNA, 20 bp, Artificial Sequence
  Description of Artificial Sequence: Synthetic oligonucleotide
  Target: LAMA2; (+) strand; PAM type: NRG; PAM sequence: AAG
ttgatttacctaaacgtatg

SEQ ID NO: 146400 - DNA, 20 bp, Artificial Sequence
  Description of Artificial Sequence: Synthetic oligonucleotide
  Target: LAMA2; (+) strand; PAM type: NRG; PAM sequence: AAG
catataatatttttaaaaat

SEQ ID NO: 146401 - DNA, 20 bp, Artificial Sequence
  Description of Artificial Sequence: Synthetic oligonucleotide
  Target: LAMA2; (+) strand; PAM type: NRG; PAM sequence: TAG
tttttaaaaataagttattg

SEQ ID NO: 146402 - DNA, 20 bp, Artificial Sequence
  Description of Artificial Sequence: Synthetic oligonucleotide
  Target: LAMA2; (+) strand; PAM type: NRG; PAM sequence: TAG
gtagctctaaaataatttat

SEQ ID NO: 146403 - DNA, 20 bp, Artificial Sequence
  Description of Artificial Sequence: Synthetic oligonucleotide
  Target: LAMA2; (+) strand; PAM type: NRG; PAM sequence: TAG
tctaaaataatttattagac

SEQ ID NO: 146404 - DNA, 20 bp, Artificial Sequence
  Description of Artificial Sequence: Synthetic oligonucleotide
  Target: LAMA2; (+) strand; PAM type: NRG; PAM sequence: TAG
tagaataaataaatttatac

SEQ ID NO: 146405 - DNA, 20 bp, Artificial Sequence
  Description of Artificial Sequence: Synthetic oligonucleotide
  Target: LAMA2; (+) strand; PAM type: NRG; PAM sequence: CAG
atactagaatttatgatgaa

SEQ ID NO: 146406 - DNA, 20 bp, Artificial Sequence
  Description of Artificial Sequence: Synthetic oligonucleotide
  Target: LAMA2; (+) strand; PAM type: NRG; PAM sequence: TGG
tatgatgaacagtcaataaa

SEQ ID NO: 146407 - DNA, 20 bp, Artificial Sequence
  Description of Artificial Sequence: Synthetic oligonucleotide
  Target: LAMA2; (+) strand; PAM type: NRG; PAM sequence: TAG
aataaatggaattaaaaata

SEQ ID NO: 146408 - DNA, 20 bp, Artificial Sequence
  Description of Artificial Sequence: Synthetic oligonucleotide
  Target: LAMA2; (+) strand; PAM type: NRG; PAM sequence: AGG
ataaatggaattaaaaatat

SEQ ID NO: 146409 - DNA, 20 bp, Artificial Sequence
  Description of Artificial Sequence: Synthetic oligonucleotide
  Target: LAMA2; (+) strand; PAM type: NRG; PAM sequence: CAG
ttaaaaatataggtaaaata

SEQ ID NO: 146410 - DNA, 20 bp, Artificial Sequence
  Description of Artificial Sequence: Synthetic oligonucleotide
  Target: LAMA2; (+) strand; PAM type: NRG; PAM sequence: AAG
ttaaaatatatacaaatttt

SEQ ID NO: 146411 - DNA, 20 bp, Artificial Sequence
  Description of Artificial Sequence: Synthetic oligonucleotide
  Target: LAMA2; (+) strand; PAM type: NRG; PAM sequence: GAG
caaattgtaaatgtttgatt

SEQ ID NO: 146412 - DNA, 20 bp, Artificial Sequence
  Description of Artificial Sequence: Synthetic oligonucleotide
  Target: LAMA2; (+) strand; PAM type: NRG; PAM sequence: AGG
aaattgtaaatgtttgattg

SEQ ID NO: 146413 - DNA, 20 bp, Artificial Sequence
  Description of Artificial Sequence: Synthetic oligonucleotide
  Target: LAMA2; (+) strand; PAM type: NRG; PAM sequence: AAG
tgtaaatgtttgattgagga

SEQ ID NO: 146414 - DNA, 20 bp, Artificial Sequence
  Description of Artificial Sequence: Synthetic oligonucleotide
  Target: LAMA2; (+) strand; PAM type: NRG; PAM sequence: GAG
taaatgtttgattgaggaaa

SEQ ID NO: 146415 - DNA, 20 bp, Artificial Sequence
  Description of Artificial Sequence: Synthetic oligonucleotide
  Target: LAMA2; (+) strand; PAM type: NRG; PAM sequence: TGG
tgaggaaagagctaattcat

SEQ ID NO: 146416 - DNA, 20 bp, Artificial Sequence
  Description of Artificial Sequence: Synthetic oligonucleotide
  Target: LAMA2; (+) strand; PAM type: NRG; PAM sequence: AAG
ggaaagagctaattcattgg

SEQ ID NO: 146417 - DNA, 20 bp, Artificial Sequence
  Description of Artificial Sequence: Synthetic oligonucleotide
  Target: LAMA2; (+) strand; PAM type: NRG; PAM sequence: TAG
agctaattcattggaagctc

SEQ ID NO: 146418 - DNA, 20 bp, Artificial Sequence
  Description of Artificial Sequence: Synthetic oligonucleotide
  Target: LAMA2; (+) strand; PAM type: NRG; PAM sequence: CAG
attcattggaagctctagtc

SEQ ID NO: 146419 - DNA, 20 bp, Artificial Sequence
  Description of Artificial Sequence: Synthetic oligonucleotide
  Target: LAMA2; (+) strand; PAM type: NRG; PAM sequence: TAG
ggaagctctagtccagtcta

SEQ ID NO: 146420 - DNA, 20 bp, Artificial Sequence
  Description of Artificial Sequence: Synthetic oligonucleotide
  Target: LAMA2; (+) strand; PAM type: NRG; PAM sequence: TGG
ctagtccagtctatagtatt

SEQ ID NO: 146421 - DNA, 20 bp, Artificial Sequence
  Description of Artificial Sequence: Synthetic oligonucleotide
  Target: LAMA2; (+) strand; PAM type: NRG; PAM sequence: GGG
tagtccagtctatagtattt

SEQ ID NO: 146422 - DNA, 20 bp, Artificial Sequence
  Description of Artificial Sequence: Synthetic oligonucleotide
  Target: LAMA2; (+) strand; PAM type: NRG; PAM sequence: GGG
agtccagtctatagtatttg

SEQ ID NO: 146423 - DNA, 20 bp, Artificial Sequence
  Description of Artificial Sequence: Synthetic oligonucleotide
  Target: LAMA2; (+) strand; PAM type: NRG; PAM sequence: TAG
acaaataattactgataata

SEQ ID NO: 146424 - DNA, 20 bp, Artificial Sequence
  Description of Artificial Sequence: Synthetic oligonucleotide
  Target: LAMA2; (+) strand; PAM type: NRG; PAM sequence: GAG
aaatcattatgctaaacact

SEQ ID NO: 146425 - DNA, 20 bp, Artificial Sequence
  Description of Artificial Sequence: Synthetic oligonucleotide
  Target: LAMA2; (+) strand; PAM type: NRG; PAM sequence: AGG
aatcattatgctaaacactg

SEQ ID NO: 146426 - DNA, 20 bp, Artificial Sequence
  Description of Artificial Sequence: Synthetic oligonucleotide
  Target: LAMA2; (+) strand; PAM type: NRG; PAM sequence: GGG
atcattatgctaaacactga

SEQ ID NO: 146427 - DNA, 20 bp, Artificial Sequence
  Description of Artificial Sequence: Synthetic oligonucleotide
  Target: LAMA2; (+) strand; PAM type: NRG; PAM sequence: AAG
actgagggtttacaataaat

SEQ ID NO: 146428 - DNA, 20 bp, Artificial Sequence
  Description of Artificial Sequence: Synthetic oligonucleotide
  Target: LAMA2; (+) strand; PAM type: NRG; PAM sequence: TAG
aacctcattgaacttaaatc

SEQ ID NO: 146429 - DNA, 20 bp, Artificial Sequence
  Description of Artificial Sequence: Synthetic oligonucleotide
  Target: LAMA2; (+) strand; PAM type: NRG; PAM sequence: TAG
ctcattgaacttaaatctag

SEQ ID NO: 146430 - DNA, 20 bp, Artificial Sequence
  Description of Artificial Sequence: Synthetic oligonucleotide
  Target: LAMA2; (+) strand; PAM type: NRG; PAM sequence: CAG
attgaacttaaatctagtag

SEQ ID NO: 146431 - DNA, 20 bp, Artificial Sequence
  Description of Artificial Sequence: Synthetic oligonucleotide
  Target: LAMA2; (+) strand; PAM type: NRG; PAM sequence: AAG
ttaaatctagtagcagacac

SEQ ID NO: 146432 - DNA, 20 bp, Artificial Sequence
  Description of Artificial Sequence: Synthetic oligonucleotide
  Target: LAMA2; (+) strand; PAM type: NRG; PAM sequence: AAG
atctagtagcagacacaagc

SEQ ID NO: 146433 - DNA, 20 bp, Artificial Sequence
  Description of Artificial Sequence: Synthetic oligonucleotide
  Target: LAMA2; (+) strand; PAM type: NRG; PAM sequence: TGG
gcagacacaagcaagtaaat

SEQ ID NO: 146434 - DNA, 20 bp, Artificial Sequence
  Description of Artificial Sequence: Synthetic oligonucleotide
  Target: LAMA2; (+) strand; PAM type: NRG; PAM sequence: TAG
aagtaaattggcaataaaaa

SEQ ID NO: 146435 - DNA, 20 bp, Artificial Sequence
  Description of Artificial Sequence: Synthetic oligonucleotide
  Target: LAMA2; (+) strand; PAM type: NRG; PAM sequence: AGG
agtaaattggcaataaaaat

SEQ ID NO: 146436 - DNA, 20 bp, Artificial Sequence
  Description of Artificial Sequence: Synthetic oligonucleotide
  Target: LAMA2; (+) strand; PAM type: NRG; PAM sequence: GGG
gtaaattggcaataaaaata

SEQ ID NO: 146437 - DNA, 20 bp, Artificial Sequence
  Description of Artificial Sequence: Synthetic oligonucleotide
  Target: LAMA2; (+) strand; PAM type: NRG; PAM sequence: GGG
taaattggcaataaaaatag

SEQ ID NO: 146438 - DNA, 20 bp, Artificial Sequence
  Description of Artificial Sequence: Synthetic oligonucleotide
  Target: LAMA2; (+) strand; PAM type: NRG; PAM sequence: GGG
aaattggcaataaaaatagg

SEQ ID NO: 146439 - DNA, 20 bp, Artificial Sequence
  Description of Artificial Sequence: Synthetic oligonucleotide
  Target: LAMA2; (+) strand; PAM type: NRG; PAM sequence: GAG
attggcaataaaaatagggg

SEQ ID NO: 146440 - DNA, 20 bp, Artificial Sequence
  Description of Artificial Sequence: Synthetic oligonucleotide
  Target: LAMA2; (+) strand; PAM type: NRG; PAM sequence: AAG
caataaaaatagggggagtc

SEQ ID NO: 146441 - DNA, 20 bp, Artificial Sequence
  Description of Artificial Sequence: Synthetic oligonucleotide
  Target: LAMA2; (+) strand; PAM type: NRG; PAM sequence: AGG
aataaaaatagggggagtca

SEQ ID NO: 146442 - DNA, 20 bp, Artificial Sequence
  Description of Artificial Sequence: Synthetic oligonucleotide
  Target: LAMA2; (+) strand; PAM type: NRG; PAM sequence: GGG
ataaaaatagggggagtcaa

SEQ ID NO: 146443 - DNA, 20 bp, Artificial Sequence
  Description of Artificial Sequence: Synthetic oligonucleotide
  Target: LAMA2; (+) strand; PAM type: NRG; PAM sequence: GAG
aaaaatagggggagtcaagg

SEQ ID NO: 146444 - DNA, 20 bp, Artificial Sequence
  Description of Artificial Sequence: Synthetic oligonucleotide
  Target: LAMA2; (+) strand; PAM type: NRG; PAM sequence: TGG
tagggggagtcaagggagtt

SEQ ID NO: 146445 - DNA, 20 bp, Artificial Sequence
  Description of Artificial Sequence: Synthetic oligonucleotide
  Target: LAMA2; (+) strand; PAM type: NRG; PAM sequence: TAG
aagggagtttggataaatta

SEQ ID NO: 146446 - DNA, 20 bp, Artificial Sequence
  Description of Artificial Sequence: Synthetic oligonucleotide
  Target: LAMA2; (+) strand; PAM type: NRG; PAM sequence: AAG
ggagtttggataaattatag

SEQ ID NO: 146447 - DNA, 20 bp, Artificial Sequence
  Description of Artificial Sequence: Synthetic oligonucleotide
  Target: LAMA2; (+) strand; PAM type: NRG; PAM sequence: AAG
gtttggataaattatagaag

SEQ ID NO: 146448 - DNA, 20 bp, Artificial Sequence
  Description of Artificial Sequence: Synthetic oligonucleotide
  Target: LAMA2; (+) strand; PAM type: NRG; PAM sequence: TAG
taaattatagaagaagctcc

SEQ ID NO: 146449 - DNA, 20 bp, Artificial Sequence
  Description of Artificial Sequence: Synthetic oligonucleotide
  Target: LAMA2; (+) strand; PAM type: NRG; PAM sequence: CAG
ttatagaagaagctcctaga

SEQ ID NO: 146450 - DNA, 20 bp, Artificial Sequence
  Description of Artificial Sequence: Synthetic oligonucleotide
  Target: LAMA2; (+) strand; PAM type: NRG; PAM sequence: TGG
agaagctcctagacagtcca

SEQ ID NO: 146451 - DNA, 20 bp, Artificial Sequence
  Description of Artificial Sequence: Synthetic oligonucleotide
  Target: LAMA2; (+) strand; PAM type: NRG; PAM sequence: GAG
aagctcctagacagtccatg

SEQ ID NO: 146452 - DNA, 20 bp, Artificial Sequence
  Description of Artificial Sequence: Synthetic oligonucleotide
  Target: LAMA2; (+) strand; PAM type: NRG; PAM sequence: AGG
agctcctagacagtccatgg

SEQ ID NO: 146453 - DNA, 20 bp, Artificial Sequence
  Description of Artificial Sequence: Synthetic oligonucleotide
  Target: LAMA2; (+) strand; PAM type: NRG; PAM sequence: TGG
acagtccatggaggtatttg

SEQ ID NO: 146454 - DNA, 20 bp, Artificial Sequence
  Description of Artificial Sequence: Synthetic oligonucleotide
  Target: LAMA2; (+) strand; PAM type: NRG; PAM sequence: GGG
cagtccatggaggtatttgt

SEQ ID NO: 146455 - DNA, 20 bp, Artificial Sequence
  Description of Artificial Sequence: Synthetic oligonucleotide
  Target: LAMA2; (+) strand; PAM type: NRG; PAM sequence: GAG
gtccatggaggtatttgtgg

SEQ ID NO: 146456 - DNA, 20 bp, Artificial Sequence
  Description of Artificial Sequence: Synthetic oligonucleotide
  Target: LAMA2; (+) strand; PAM type: NRG; PAM sequence: AGG
tccatggaggtatttgtggg

SEQ ID NO: 146457 - DNA, 20 bp, Artificial Sequence
  Description of Artificial Sequence: Synthetic oligonucleotide
  Target: LAMA2; (+) strand; PAM type: NRG; PAM sequence: TGG
tggaggtatttgtgggagga

SEQ ID NO: 146458 - DNA, 20 bp, Artificial Sequence
  Description of Artificial Sequence: Synthetic oligonucleotide
  Target: LAMA2; (+) strand; PAM type: NRG; PAM sequence: TGG
tatttgtgggaggatggaat

SEQ ID NO: 146459 - DNA, 20 bp, Artificial Sequence
  Description of Artificial Sequence: Synthetic oligonucleotide
  Target: LAMA2; (+) strand; PAM type: NRG; PAM sequence: CAG
ggaggatggaattggcaaca

SEQ ID NO: 146460 - DNA, 20 bp, Artificial Sequence
  Description of Artificial Sequence: Synthetic oligonucleotide
  Target: LAMA2; (+) strand; PAM type: NRG; PAM sequence: GAG
atggaattggcaacacagct

SEQ ID NO: 146461 - DNA, 20 bp, Artificial Sequence
  Description of Artificial Sequence: Synthetic oligonucleotide
  Target: LAMA2; (+) strand; PAM type: NRG; PAM sequence: AAG
gcaacacagctgagatttta

SEQ ID NO: 146462 - DNA, 20 bp, Artificial Sequence
  Description of Artificial Sequence: Synthetic oligonucleotide
  Target: LAMA2; (+) strand; PAM type: NRG; PAM sequence: AAG
tgagattttaaagatatata

SEQ ID NO: 146463 - DNA, 20 bp, Artificial Sequence
  Description of Artificial Sequence: Synthetic oligonucleotide
  Target: LAMA2; (+) strand; PAM type: NRG; PAM sequence: TGG
ataaagtacatctgtgtaaa

SEQ ID NO: 146464 - DNA, 20 bp, Artificial Sequence
  Description of Artificial Sequence: Synthetic oligonucleotide
  Target: LAMA2; (+) strand; PAM type: NRG; PAM sequence: AAG
agtacatctgtgtaaatggc

SEQ ID NO: 146465 - DNA, 20 bp, Artificial Sequence
  Description of Artificial Sequence: Synthetic oligonucleotide
  Target: LAMA2; (+) strand; PAM type: NRG; PAM sequence: CAG
acatctgtgtaaatggcaag

SEQ ID NO: 146466 - DNA, 20 bp, Artificial Sequence
  Description of Artificial Sequence: Synthetic oligonucleotide
  Target: LAMA2; (+) strand; PAM type: NRG; PAM sequence: GAG
ctgtgtaaatggcaagcagt

SEQ ID NO: 146467 - DNA, 20 bp, Artificial Sequence
  Description of Artificial Sequence: Synthetic oligonucleotide
  Target: LAMA2; (+) strand; PAM type: NRG; PAM sequence: CAG
aatggcaagcagtgagaaca

SEQ ID NO: 146468 - DNA, 20 bp, Artificial Sequence
  Description of Artificial Sequence: Synthetic oligonucleotide
  Target: LAMA2; (+) strand; PAM type: NRG; PAM sequence: AAG
caagcagtgagaacacagaa

SEQ ID NO: 146469 - DNA, 20 bp, Artificial Sequence
  Description of Artificial Sequence: Synthetic oligonucleotide
  Target: LAMA2; (+) strand; PAM type: NRG; PAM sequence: AGG
aagcagtgagaacacagaaa

SEQ ID NO: 146470 - DNA, 20 bp, Artificial Sequence
  Description of Artificial Sequence: Synthetic oligonucleotide
  Target: LAMA2; (+) strand; PAM type: NRG; PAM sequence: GAG
agaacacagaaaaggtgttt

SEQ ID NO: 146471 - DNA, 20 bp, Artificial Sequence
  Description of Artificial Sequence: Synthetic oligonucleotide
  Target: LAMA2; (+) strand; PAM type: NRG; PAM sequence: AGG
gaacacagaaaaggtgtttg

SEQ ID NO: 146472 - DNA, 20 bp, Artificial Sequence
  Description of Artificial Sequence: Synthetic oligonucleotide
  Target: LAMA2; (+) strand; PAM type: NRG; PAM sequence: AAG
acagaaaaggtgtttgagga

SEQ ID NO: 146473 - DNA, 20 bp, Artificial Sequence
  Description of Artificial Sequence: Synthetic oligonucleotide
  Target: LAMA2; (+) strand; PAM type: NRG; PAM sequence: AGG
cagaaaaggtgtttgaggaa

SEQ ID NO: 146474 - DNA, 20 bp, Artificial Sequence
  Description of Artificial Sequence: Synthetic oligonucleotide
  Target: LAMA2; (+) strand; PAM type: NRG; PAM sequence: GGG
agaaaaggtgtttgaggaaa

SEQ ID NO: 146475 - DNA, 20 bp, Artificial Sequence
  Description of Artificial Sequence: Synthetic oligonucleotide
  Target: LAMA2; (+) strand; PAM type: NRG; PAM sequence: AAG
gtgtttgaggaaagggccta

SEQ ID NO: 146476 - DNA, 20 bp, Artificial Sequence
  Description of Artificial Sequence: Synthetic oligonucleotide
  Target: LAMA2; (+) strand; PAM type: NRG; PAM sequence: AAG
tgaggaaagggcctaaagat

SEQ ID NO: 146477 - DNA, 20 bp, Artificial Sequence
  Description of Artificial Sequence: Synthetic oligonucleotide
  Target: LAMA2; (+) strand; PAM type: NRG; PAM sequence: TAG
gaaagggcctaaagataaga

SEQ ID NO: 146478 - DNA, 20 bp, Artificial Sequence
  Description of Artificial Sequence: Synthetic oligonucleotide
  Target: LAMA2; (+) strand; PAM type: NRG; PAM sequence: CAG
agataagatagaccatgaca

SEQ ID NO: 146479 - DNA, 20 bp, Artificial Sequence
  Description of Artificial Sequence: Synthetic oligonucleotide
  Target: LAMA2; (+) strand; PAM type: NRG; PAM sequence: AAG
aagatagaccatgacacaga

SEQ ID NO: 146480 - DNA, 20 bp, Artificial Sequence
  Description of Artificial Sequence: Synthetic oligonucleotide
  Target: LAMA2; (+) strand; PAM type: NRG; PAM sequence: AGG
agatagaccatgacacagaa

SEQ ID NO: 146481 - DNA, 20 bp, Artificial Sequence
  Description of Artificial Sequence: Synthetic oligonucleotide
  Target: LAMA2; (+) strand; PAM type: NRG; PAM sequence: AAG
agaccatgacacagaaagga

SEQ ID NO: 146482 - DNA, 20 bp, Artificial Sequence
  Description of Artificial Sequence: Synthetic oligonucleotide
  Target: LAMA2; (+) strand; PAM type: NRG; PAM sequence: CAG
aaaggaaagtaaaaatgatt

SEQ ID NO: 146483 - DNA, 20 bp, Artificial Sequence
  Description of Artificial Sequence: Synthetic oligonucleotide
  Target: LAMA2; (+) strand; PAM type: NRG; PAM sequence: TAG
aaaatgattcagtgaccatc

SEQ ID NO: 146484 - DNA, 20 bp, Artificial Sequence
  Description of Artificial Sequence: Synthetic oligonucleotide
  Target: LAMA2; (+) strand; PAM type: NRG; PAM sequence: TAG
atgattcagtgaccatctag

SEQ ID NO: 146485 - DNA, 20 bp, Artificial Sequence
  Description of Artificial Sequence: Synthetic oligonucleotide
  Target: LAMA2; (+) strand; PAM type: NRG; PAM sequence: GAG
gatatccaatacatatattt

SEQ ID NO: 146486 - DNA, 20 bp, Artificial Sequence
  Description of Artificial Sequence: Synthetic oligonucleotide
  Target: LAMA2; (+) strand; PAM type: NRG; PAM sequence: GAG
atacatatatttgagtgaat

SEQ ID NO: 146487 - DNA, 20 bp, Artificial Sequence
  Description of Artificial Sequence: Synthetic oligonucleotide
  Target: LAMA2; (+) strand; PAM type: NRG; PAM sequence: TAG
atatttgagtgaatgagtga

SEQ ID NO: 146488 - DNA, 20 bp, Artificial Sequence
  Description of Artificial Sequence: Synthetic oligonucleotide
  Target: LAMA2; (+) strand; PAM type: NRG; PAM sequence: TGG
tgatagactgactatatgaa

SEQ ID NO: 146489 - DNA, 20 bp, Artificial Sequence
  Description of Artificial Sequence: Synthetic oligonucleotide
  Target: LAMA2; (+) strand; PAM type: NRG; PAM sequence: GGG
gatagactgactatatgaat

SEQ ID NO: 146490 - DNA, 20 bp, Artificial Sequence
  Description of Artificial Sequence: Synthetic oligonucleotide
  Target: LAMA2; (+) strand; PAM type: NRG; PAM sequence: AAG
atgggaaatattgaaatata

SEQ ID NO: 146491 - DNA, 20 bp, Artificial Sequence
  Description of Artificial Sequence: Synthetic oligonucleotide
  Target: LAMA2; (+) strand; PAM type: NRG; PAM sequence: GAG
gggaaatattgaaatataaa

SEQ ID NO: 146492 - DNA, 20 bp, Artificial Sequence
  Description of Artificial Sequence: Synthetic oligonucleotide
  Target: LAMA2; (+) strand; PAM type: NRG; PAM sequence: AGG
ggaaatattgaaatataaag

SEQ ID NO: 146493 - DNA, 20 bp, Artificial Sequence
  Description of Artificial Sequence: Synthetic oligonucleotide
  Target: LAMA2; (+) strand; PAM type: NRG; PAM sequence: AAG
aatattgaaatataaagagg

SEQ ID NO: 146494 - DNA, 20 bp, Artificial Sequence
  Description of Artificial Sequence: Synthetic oligonucleotide
  Target: LAMA2; (+) strand; PAM type: NRG; PAM sequence: AGG
atattgaaatataaagagga

SEQ ID NO: 146495 - DNA, 20 bp, Artificial Sequence
  Description of Artificial Sequence: Synthetic oligonucleotide
  Target: LAMA2; (+) strand; PAM type: NRG; PAM sequence: CAG
tgaaatataaagaggaaggc

SEQ ID NO: 146496 - DNA, 20 bp, Artificial Sequence
  Description of Artificial Sequence: Synthetic oligonucleotide
  Target: LAMA2; (+) strand; PAM type: NRG; PAM sequence: GAG
aaatataaagaggaaggcca

SEQ ID NO: 146497 - DNA, 20 bp, Artificial Sequence
  Description of Artificial Sequence: Synthetic oligonucleotide
  Target: LAMA2; (+) strand; PAM type: NRG; PAM sequence: AAG
aaagaggaaggccagagata

SEQ ID NO: 146498 - DNA, 20 bp, Artificial Sequence
  Description of Artificial Sequence: Synthetic oligonucleotide
  Target: LAMA2; (+) strand; PAM type: NRG; PAM sequence: AAG
ggccagagataaagctctga

SEQ ID NO: 146499 - DNA, 20 bp, Artificial Sequence
  Description of Artificial Sequence: Synthetic oligonucleotide
  Target: LAMA2; (+) strand; PAM type: NRG; PAM sequence: AGG
gccagagataaagctctgaa

SEQ ID NO: 146500 - DNA, 20 bp, Artificial Sequence
  Description of Artificial Sequence: Synthetic oligonucleotide
  Target: LAMA2; (+) strand; PAM type: NRG; PAM sequence: AAG
gagataaagctctgaaaggt

SEQ ID NO: 146501 - DNA, 20 bp, Artificial Sequence
  Description of Artificial Sequence: Synthetic oligonucleotide
  Target: LAMA2; (+) strand; PAM type: NRG; PAM sequence: AAG
gaaaggtaagcatatatttt

SEQ ID NO: 146502 - DNA, 20 bp, Artificial Sequence
  Description of Artificial Sequence: Synthetic oligonucleotide
  Target: LAMA2; (+) strand; PAM type: NRG; PAM sequence: CAG
aagcatatattttaagactt

SEQ ID NO: 146503 - DNA, 20 bp, Artificial Sequence
  Description of Artificial Sequence: Synthetic oligonucleotide
  Target: LAMA2; (+) strand; PAM type: NRG; PAM sequence: GAG
gcatatattttaagacttca

SEQ ID NO: 146504 - DNA, 20 bp, Artificial Sequence
  Description of Artificial Sequence: Synthetic oligonucleotide
  Target: LAMA2; (+) strand; PAM type: NRG; PAM sequence: GAG
aattttctgaatatgcaaat

SEQ ID NO: 146505 - DNA, 20 bp, Artificial Sequence
  Description of Artificial Sequence: Synthetic oligonucleotide
  Target: LAMA2; (+) strand; PAM type: NRG; PAM sequence: CAG
tttctgaatatgcaaatgag

SEQ ID NO: 146506 - DNA, 20 bp, Artificial Sequence
  Description of Artificial Sequence: Synthetic oligonucleotide
  Target: LAMA2; (+) strand; PAM type: NRG; PAM sequence: TAG
aatatgcaaatgagcagtat

SEQ ID NO: 146507 - DNA, 20 bp, Artificial Sequence
  Description of Artificial Sequence: Synthetic oligonucleotide
  Target: LAMA2; (+) strand; PAM type: NRG; PAM sequence: GAG
ataaaaataaccctaaaaat

SEQ ID NO: 146508 - DNA, 20 bp, Artificial Sequence
  Description of Artificial Sequence: Synthetic oligonucleotide
  Target: LAMA2; (+) strand; PAM type: NRG; PAM sequence: TGG
accctaaaaatgagaactct

SEQ ID NO: 146509 - DNA, 20 bp, Artificial Sequence
  Description of Artificial Sequence: Synthetic oligonucleotide
  Target: LAMA2; (+) strand; PAM type: NRG; PAM sequence: TGG
taaaaatgagaactcttggt

SEQ ID NO: 146510 - DNA, 20 bp, Artificial Sequence
  Description of Artificial Sequence: Synthetic oligonucleotide
  Target: LAMA2; (+) strand; PAM type: NRG; PAM sequence: GAG
aaaatgagaactcttggttg

SEQ ID NO: 146511 - DNA, 20 bp, Artificial Sequence
  Description of Artificial Sequence: Synthetic oligonucleotide
  Target: LAMA2; (+) strand; PAM type: NRG; PAM sequence: AAG
ggagaaaataacaaaatatg

SEQ ID NO: 146512 - DNA, 20 bp, Artificial Sequence
  Description of Artificial Sequence: Synthetic oligonucleotide
  Target: LAMA2; (+) strand; PAM type: NRG; PAM sequence: AAG
aaataacaaaatatgaagta

SEQ ID NO: 146513 - DNA, 20 bp, Artificial Sequence
  Description of Artificial Sequence: Synthetic oligonucleotide
  Target: LAMA2; (+) strand; PAM type: NRG; PAM sequence: AGG
aataacaaaatatgaagtaa

SEQ ID NO: 146514 - DNA, 20 bp, Artificial Sequence
  Description of Artificial Sequence: Synthetic oligonucleotide
  Target: LAMA2; (+) strand; PAM type: NRG; PAM sequence: CAG
atgaagtaaaggaaaattga

SEQ ID NO: 146515 - DNA, 20 bp, Artificial Sequence
  Description of Artificial Sequence: Synthetic oligonucleotide
  Target: LAMA2; (+) strand; PAM type: NRG; PAM sequence: TGG
aaaactgtgcctgatataat

SEQ ID NO: 146516 - DNA, 20 bp, Artificial Sequence
  Description of Artificial Sequence: Synthetic oligonucleotide
  Target: LAMA2; (+) strand; PAM type: NRG; PAM sequence: TGG
atataattggaaataatgcc

SEQ ID NO: 146517 - DNA, 20 bp, Artificial Sequence
  Description of Artificial Sequence: Synthetic oligonucleotide
  Target: LAMA2; (+) strand; PAM type: NRG; PAM sequence: CAG
ttggaaataatgcctggaaa

SEQ ID NO: 146518 - DNA, 20 bp, Artificial Sequence
  Description of Artificial Sequence: Synthetic oligonucleotide
  Target: LAMA2; (+) strand; PAM type: NRG; PAM sequence: GAG
ataatgcctggaaacagatt

SEQ ID NO: 146519 - DNA, 20 bp, Artificial Sequence
  Description of Artificial Sequence: Synthetic oligonucleotide
  Target: LAMA2; (+) strand; PAM type: NRG; PAM sequence: AAG
taatcctgtatgtgttcatt

SEQ ID NO: 146520 - DNA, 20 bp, Artificial Sequence
  Description of Artificial Sequence: Synthetic oligonucleotide
  Target: LAMA2; (+) strand; PAM type: NRG; PAM sequence: AGG
aatcctgtatgtgttcatta

SEQ ID NO: 146521 - DNA, 20 bp, Artificial Sequence
  Description of Artificial Sequence: Synthetic oligonucleotide
  Target: LAMA2; (+) strand; PAM type: NRG; PAM sequence: CAG
ctgtatgtgttcattaaggc

SEQ ID NO: 146522 - DNA, 20 bp, Artificial Sequence
  Description of Artificial Sequence: Synthetic oligonucleotide
  Target: LAMA2; (+) strand; PAM type: NRG; PAM sequence: AGG
tgtatgtgttcattaaggcc

SEQ ID NO: 146523 - DNA, 20 bp, Artificial Sequence
  Description of Artificial Sequence: Synthetic oligonucleotide
  Target: LAMA2; (+) strand; PAM type: NRG; PAM sequence: AAG
atgtgttcattaaggccagg

SEQ ID NO: 146524 - DNA, 20 bp, Artificial Sequence
  Description of Artificial Sequence: Synthetic oligonucleotide
  Target: LAMA2; (+) strand; PAM type: NRG; PAM sequence: TGG
attaaggccaggaagattct

SEQ ID NO: 146525 - DNA, 20 bp, Artificial Sequence
  Description of Artificial Sequence: Synthetic oligonucleotide
  Target: LAMA2; (+) strand; PAM type: NRG; PAM sequence: AAG
aggccaggaagattcttggt

SEQ ID NO: 146526 - DNA, 20 bp, Artificial Sequence
  Description of Artificial Sequence: Synthetic oligonucleotide
  Target: LAMA2; (+) strand; PAM type: NRG; PAM sequence: AGG
ggccaggaagattcttggta

SEQ ID NO: 146527 - DNA, 20 bp, Artificial Sequence
  Description of Artificial Sequence: Synthetic oligonucleotide
  Target: LAMA2; (+) strand; PAM type: NRG; PAM sequence: TAG
attcttggtaaggaaatgtc

SEQ ID NO: 146528 - DNA, 20 bp, Artificial Sequence
  Description of Artificial Sequence: Synthetic oligonucleotide
  Target: LAMA2; (+) strand; PAM type: NRG; PAM sequence: AAG
taaggaaatgtctagtctga

SEQ ID NO: 146529 - DNA, 20 bp, Artificial Sequence
  Description of Artificial Sequence: Synthetic oligonucleotide
  Target: LAMA2; (+) strand; PAM type: NRG; PAM sequence: AGG
aaggaaatgtctagtctgaa

SEQ ID NO: 146530 - DNA, 20 bp, Artificial Sequence
  Description of Artificial Sequence: Synthetic oligonucleotide
  Target: LAMA2; (+) strand; PAM type: NRG; PAM sequence: AAG
tgtctagtctgaaaggtcta

SEQ ID NO: 146531 - DNA, 20 bp, Artificial Sequence
  Description of Artificial Sequence: Synthetic oligonucleotide
  Target: LAMA2; (+) strand; PAM type: NRG; PAM sequence: CAG
tgaaactcttgtcatttatc

SEQ ID NO: 146532 - DNA, 20 bp, Artificial Sequence
  Description of Artificial Sequence: Synthetic oligonucleotide
  Target: LAMA2; (+) strand; PAM type: NRG; PAM sequence: TGG
attactgtttcatatattca

SEQ ID NO: 146533 - DNA, 20 bp, Artificial Sequence
  Description of Artificial Sequence: Synthetic oligonucleotide
  Target: LAMA2; (+) strand; PAM type: NRG; PAM sequence: AAG
aatattccattgatttgaat

SEQ ID NO: 146534 - DNA, 20 bp, Artificial Sequence
  Description of Artificial Sequence: Synthetic oligonucleotide
  Target: LAMA2; (+) strand; PAM type: NRG; PAM sequence: CAG
gaataagattctttaaatta

SEQ ID NO: 146535 - DNA, 20 bp, Artificial Sequence
  Description of Artificial Sequence: Synthetic oligonucleotide
  Target: LAMA2; (+) strand; PAM type: NRG; PAM sequence: AAG
gattctttaaattacagtga

SEQ ID NO: 146536 - DNA, 20 bp, Artificial Sequence
  Description of Artificial Sequence: Synthetic oligonucleotide
  Target: LAMA2; (+) strand; PAM type: NRG; PAM sequence: AAG
tacagtgaaagctttctgat

SEQ ID NO: 146537 - DNA, 20 bp, Artificial Sequence
  Description of Artificial Sequence: Synthetic oligonucleotide
  Target: LAMA2; (+) strand; PAM type: NRG; PAM sequence: AGG
acagtgaaagctttctgata

SEQ ID NO: 146538 - DNA, 20 bp, Artificial Sequence
  Description of Artificial Sequence: Synthetic oligonucleotide
  Target: LAMA2; (+) strand; PAM type: NRG; PAM sequence: TGG
gaaagctttctgataaggta

SEQ ID NO: 146539 - DNA, 20 bp, Artificial Sequence
  Description of Artificial Sequence: Synthetic oligonucleotide
  Target: LAMA2; (+) strand; PAM type: NRG; PAM sequence: AAG
gctttctgataaggtatggt

SEQ ID NO: 146540 - DNA, 20 bp, Artificial Sequence
  Description of Artificial Sequence: Synthetic oligonucleotide
  Target: LAMA2; (+) strand; PAM type: NRG; PAM sequence: CAG
ggtatggtaagattattttt

SEQ ID NO: 146541 - DNA, 20 bp, Artificial Sequence
  Description of Artificial Sequence: Synthetic oligonucleotide
  Target: LAMA2; (+) strand; PAM type: NRG; PAM sequence: AAG
ttatgctgatacatataata

SEQ ID NO: 146542 - DNA, 20 bp, Artificial Sequence
  Description of Artificial Sequence: Synthetic oligonucleotide
  Target: LAMA2; (+) strand; PAM type: NRG; PAM sequence: AAG
aaagctactgacaattcata

SEQ ID NO: 146543 - DNA, 20 bp, Artificial Sequence
  Description of Artificial Sequence: Synthetic oligonucleotide
  Target: LAMA2; (+) strand; PAM type: NRG; PAM sequence: TAG
cataaagatgataatacact

SEQ ID NO: 146544 - DNA, 20 bp, Artificial Sequence
  Description of Artificial Sequence: Synthetic oligonucleotide
  Target: LAMA2; (+) strand; PAM type: NRG; PAM sequence: GAG
taatacacttagtacaaact

SEQ ID NO: 146545 - DNA, 20 bp, Artificial Sequence
  Description of Artificial Sequence: Synthetic oligonucleotide
  Target: LAMA2; (+) strand; PAM type: NRG; PAM sequence: TGG
tagtacaaactgagcttcaa

SEQ ID NO: 146546 - DNA, 20 bp, Artificial Sequence
  Description of Artificial Sequence: Synthetic oligonucleotide
  Target: LAMA2; (+) strand; PAM type: NRG; PAM sequence: GGG
agtacaaactgagcttcaat

SEQ ID NO: 146547 - DNA, 20 bp, Artificial Sequence
  Description of Artificial Sequence: Synthetic oligonucleotide
  Target: LAMA2; (+) strand; PAM type: NRG; PAM sequence: GAG
cttcaatgggattactaaat

SEQ ID NO: 146548 - DNA, 20 bp, Artificial Sequence
  Description of Artificial Sequence: Synthetic oligonucleotide
  Target: LAMA2; (+) strand; PAM type: NRG; PAM sequence: GAG
ggattactaaatgagtatgt

SEQ ID NO: 146549 - DNA, 20 bp, Artificial Sequence
  Description of Artificial Sequence: Synthetic oligonucleotide
  Target: LAMA2; (+) strand; PAM type: NRG; PAM sequence: AGG
gattactaaatgagtatgtg

SEQ ID NO: 146550 - DNA, 20 bp, Artificial Sequence
  Description of Artificial Sequence: Synthetic oligonucleotide
  Target: LAMA2; (+) strand; PAM type: NRG; PAM sequence: CAG
actaaatgagtatgtgagga

SEQ ID NO: 146551 - DNA, 20 bp, Artificial Sequence
  Description of Artificial Sequence: Synthetic oligonucleotide
  Target: LAMA2; (+) strand; PAM type: NRG; PAM sequence: GAG
taaatgagtatgtgaggaca

SEQ ID NO: 146552 - DNA, 20 bp, Artificial Sequence
  Description of Artificial Sequence: Synthetic oligonucleotide
  Target: LAMA2; (+) strand; PAM type: NRG; PAM sequence: CAG
atgagtatgtgaggacagag

SEQ ID NO: 146553 - DNA, 20 bp, Artificial Sequence
  Description of Artificial Sequence: Synthetic oligonucleotide
  Target: LAMA2; (+) strand; PAM type: NRG; PAM sequence: GAG
gagtatgtgaggacagagca

SEQ ID NO: 146554 - DNA, 20 bp, Artificial Sequence
  Description of Artificial Sequence: Synthetic oligonucleotide
  Target: LAMA2; (+) strand; PAM type: NRG; PAM sequence: AGG
agtatgtgaggacagagcag

SEQ ID NO: 146555 - DNA, 20 bp, Artificial Sequence
  Description of Artificial Sequence: Synthetic oligonucleotide
  Target: LAMA2; (+) strand; PAM type: NRG; PAM sequence: AAG
gtgaggacagagcagaggaa

SEQ ID NO: 146556 - DNA, 20 bp, Artificial Sequence
  Description of Artificial Sequence: Synthetic oligonucleotide
  Target: LAMA2; (+) strand; PAM type: NRG; PAM sequence: AGG
tgaggacagagcagaggaaa

SEQ ID NO: 146557 - DNA, 20 bp, Artificial Sequence
  Description of Artificial Sequence: Synthetic oligonucleotide
  Target: LAMA2; (+) strand; PAM type: NRG; PAM sequence: AAG
acagagcagaggaaaaggcc

SEQ ID NO: 146558 - DNA, 20 bp, Artificial Sequence
  Description of Artificial Sequence: Synthetic oligonucleotide
  Target: LAMA2; (+) strand; PAM type: NRG; PAM sequence: AGG
cagagcagaggaaaaggcca

SEQ ID NO: 146559 - DNA, 20 bp, Artificial Sequence
  Description of Artificial Sequence: Synthetic oligonucleotide
  Target: LAMA2; (+) strand; PAM type: NRG; PAM sequence: GGG
agagcagaggaaaaggccaa

SEQ ID NO: 146560 - DNA, 20 bp, Artificial Sequence
  Description of Artificial Sequence: Synthetic oligonucleotide
  Target: LAMA2; (+) strand; PAM type: NRG; PAM sequence: GAG
agaggaaaaggccaagggtt

SEQ ID NO: 146561 - DNA, 20 bp, Artificial Sequence
  Description of Artificial Sequence: Synthetic oligonucleotide
  Target: LAMA2; (+) strand; PAM type: NRG; PAM sequence: TGG
aggccaagggttgagcactg

SEQ ID NO: 146562 - DNA, 20 bp, Artificial Sequence
  Description of Artificial Sequence: Synthetic oligonucleotide
  Target: LAMA2; (+) strand; PAM type: NRG; PAM sequence: GAG
gcactgtggtgctctattat

SEQ ID NO: 146563 - DNA, 20 bp, Artificial Sequence
  Description of Artificial Sequence: Synthetic oligonucleotide
  Target: LAMA2; (+) strand; PAM type: NRG; PAM sequence: AAG
tgtggtgctctattatgaga

SEQ ID NO: 146564 - DNA, 20 bp, Artificial Sequence
  Description of Artificial Sequence: Synthetic oligonucleotide
  Target: LAMA2; (+) strand; PAM type: NRG; PAM sequence: TAG
gtgctctattatgagaaagt

SEQ ID NO: 146565 - DNA, 20 bp, Artificial Sequence
  Description of Artificial Sequence: Synthetic oligonucleotide
  Target: LAMA2; (+) strand; PAM type: NRG; PAM sequence: AGG
tgctctattatgagaaagtt

SEQ ID NO: 146566 - DNA, 20 bp, Artificial Sequence
  Description of Artificial Sequence: Synthetic oligonucleotide
  Target: LAMA2; (+) strand; PAM type: NRG; PAM sequence: AAG
tctattatgagaaagttagg

SEQ ID NO: 146567 - DNA, 20 bp, Artificial Sequence
  Description of Artificial Sequence: Synthetic oligonucleotide
  Target: LAMA2; (+) strand; PAM type: NRG; PAM sequence: AGG
ctattatgagaaagttagga

SEQ ID NO: 146568 - DNA, 20 bp, Artificial Sequence
  Description of Artificial Sequence: Synthetic oligonucleotide
  Target: LAMA2; (+) strand; PAM type: NRG; PAM sequence: AAG
gagaaagttaggaaggatta

SEQ ID NO: 146569 - DNA, 20 bp, Artificial Sequence
  Description of Artificial Sequence: Synthetic oligonucleotide
  Target: LAMA2; (+) strand; PAM type: NRG; PAM sequence: TGG
aagttaggaaggattaaagt

SEQ ID NO: 146570 - DNA, 20 bp, Artificial Sequence
  Description of Artificial Sequence: Synthetic oligonucleotide
  Target: LAMA2; (+) strand; PAM type: NRG; PAM sequence: AAG
aaggattaaagttggcactg

SEQ ID NO: 146571 - DNA, 20 bp, Artificial Sequence
  Description of Artificial Sequence: Synthetic oligonucleotide
  Target: LAMA2; (+) strand; PAM type: NRG; PAM sequence: AGG
aggattaaagttggcactga

SEQ ID NO: 146572 - DNA, 20 bp, Artificial Sequence
  Description of Artificial Sequence: Synthetic oligonucleotide
  Target: LAMA2; (+) strand; PAM type: NRG; PAM sequence: GGG
ggattaaagttggcactgaa

SEQ ID NO: 146573 - DNA, 20 bp, Artificial Sequence
  Description of Artificial Sequence: Synthetic oligonucleotide
  Target: LAMA2; (+) strand; PAM type: NRG; PAM sequence: GGG
gattaaagttggcactgaag

SEQ ID NO: 146574 - DNA, 20 bp, Artificial Sequence
  Description of Artificial Sequence: Synthetic oligonucleotide
  Target: LAMA2; (+) strand; PAM type: NRG; PAM sequence: GAG
agttggcactgaaggggatt

SEQ ID NO: 146575 - DNA, 20 bp, Artificial Sequence
  Description of Artificial Sequence: Synthetic oligonucleotide
  Target: LAMA2; (+) strand; PAM type: NRG; PAM sequence: AAG
tggcactgaaggggattgag

SEQ ID NO: 146576 - DNA, 20 bp, Artificial Sequence
  Description of Artificial Sequence: Synthetic oligonucleotide
  Target: LAMA2; (+) strand; PAM type: NRG; PAM sequence: AGG
ggcactgaaggggattgaga

SEQ ID NO: 146577 - DNA, 20 bp, Artificial Sequence
  Description of Artificial Sequence: Synthetic oligonucleotide
  Target: LAMA2; (+) strand; PAM type: NRG; PAM sequence: GAG
cactgaaggggattgagaag

SEQ ID NO: 146578 - DNA, 20 bp, Artificial Sequence
  Description of Artificial Sequence: Synthetic oligonucleotide
  Target: LAMA2; (+) strand; PAM type: NRG; PAM sequence: TAG
tgaaggggattgagaaggag

SEQ ID NO: 146579 - DNA, 20 bp, Artificial Sequence
  Description of Artificial Sequence: Synthetic oligonucleotide
  Target: LAMA2; (+) strand; PAM type: NRG; PAM sequence: AAG
ggattgagaaggagtagctg

SEQ ID NO: 146580 - DNA, 20 bp, Artificial Sequence
  Description of Artificial Sequence: Synthetic oligonucleotide
  Target: LAMA2; (+) strand; PAM type: NRG; PAM sequence: CGG
ttgagaaggagtagctgaag

SEQ ID NO: 146581 - DNA, 20 bp, Artificial Sequence
  Description of Artificial Sequence: Synthetic oligonucleotide
  Target: LAMA2; (+) strand; PAM type: NRG; PAM sequence: TAG
agaaggagtagctgaagcgg

SEQ ID NO: 146582 - DNA, 20 bp, Artificial Sequence
  Description of Artificial Sequence: Synthetic oligonucleotide
  Target: LAMA2; (+) strand; PAM type: NRG; PAM sequence: AAG
aggagtagctgaagcggtag

SEQ ID NO: 146583 - DNA, 20 bp, Artificial Sequence
  Description of Artificial Sequence: Synthetic oligonucleotide
  Target: LAMA2; (+) strand; PAM type: NRG; PAM sequence: AGG
ggagtagctgaagcggtaga

SEQ ID NO: 146584 - DNA, 20 bp, Artificial Sequence
  Description of Artificial Sequence: Synthetic oligonucleotide
  Target: LAMA2; (+) strand; PAM type: NRG; PAM sequence: AAG
tgaagcggtagaaggaaaac

SEQ ID NO: 146585 - DNA, 20 bp, Artificial Sequence
  Description of Artificial Sequence: Synthetic oligonucleotide
  Target: LAMA2; (+) strand; PAM type: NRG; PAM sequence: CAG
cggtagaaggaaaacaagaa

SEQ ID NO: 146586 - DNA, 20 bp, Artificial Sequence
  Description of Artificial Sequence: Synthetic oligonucleotide
  Target: LAMA2; (+) strand; PAM type: NRG; PAM sequence: TGG
aaaacaagaacagtgtgtcc

SEQ ID NO: 146587 - DNA, 20 bp, Artificial Sequence
  Description of Artificial Sequence: Synthetic oligonucleotide
  Target: LAMA2; (+) strand; PAM type: NRG; PAM sequence: AAG
acaagaacagtgtgtcctgg

SEQ ID NO: 146588 - DNA, 20 bp, Artificial Sequence
  Description of Artificial Sequence: Synthetic oligonucleotide
  Target: LAMA2; (+) strand; PAM type: NRG; PAM sequence: CAG
gaacagtgtgtcctggaagt

SEQ ID NO: 146589 - DNA, 20 bp, Artificial Sequence
  Description of Artificial Sequence: Synthetic oligonucleotide
  Target: LAMA2; (+) strand; PAM type: NRG; PAM sequence: TGG
cagtgtgtcctggaagtcag

SEQ ID NO: 146590 - DNA, 20 bp, Artificial Sequence
  Description of Artificial Sequence: Synthetic oligonucleotide
  Target: LAMA2; (+) strand; PAM type: NRG; PAM sequence: GAG
gtgtgtcctggaagtcagtg

SEQ ID NO: 146591 - DNA, 20 bp, Artificial Sequence
  Description of Artificial Sequence: Synthetic oligonucleotide
  Target: LAMA2; (+) strand; PAM type: NRG; PAM sequence: TAG
cttgtctcaaatgctgctaa

SEQ ID NO: 146592 - DNA, 20 bp, Artificial Sequence
  Description of Artificial Sequence: Synthetic oligonucleotide
  Target: LAMA2; (+) strand; PAM type: NRG; PAM sequence: AGG
ttgtctcaaatgctgctaat

SEQ ID NO: 146593 - DNA, 20 bp, Artificial Sequence
  Description of Artificial Sequence: Synthetic oligonucleotide
  Target: LAMA2; (+) strand; PAM type: NRG; PAM sequence: TGG
tgctgctaataggtcaaata

SEQ ID NO: 146594 - DNA, 20 bp, Artificial Sequence
  Description of Artificial Sequence: Synthetic oligonucleotide
  Target: LAMA2; (+) strand; PAM type: NRG; PAM sequence: GAG
gctaataggtcaaatatggt

SEQ ID NO: 146595 - DNA, 20 bp, Artificial Sequence
  Description of Artificial Sequence: Synthetic oligonucleotide
  Target: LAMA2; (+) strand; PAM type: NRG; PAM sequence: GAG
ggtcaaatatggtgagaact

SEQ ID NO: 146596 - DNA, 20 bp, Artificial Sequence
  Description of Artificial Sequence: Synthetic oligonucleotide
  Target: LAMA2; (+) strand; PAM type: NRG; PAM sequence: TGG
atatggtgagaactgagaac

SEQ ID NO: 146597 - DNA, 20 bp, Artificial Sequence
  Description of Artificial Sequence: Synthetic oligonucleotide
  Target: LAMA2; (+) strand; PAM type: NRG; PAM sequence: TAG
tgagaactggacatttcatt

SEQ ID NO: 146598 - DNA, 20 bp, Artificial Sequence
  Description of Artificial Sequence: Synthetic oligonucleotide
  Target: LAMA2; (+) strand; PAM type: NRG; PAM sequence: AAG
acatttcatttagtaatgtg

SEQ ID NO: 146599 - DNA, 20 bp, Artificial Sequence
  Description of Artificial Sequence: Synthetic oligonucleotide
  Target: LAMA2; (+) strand; PAM type: NRG; PAM sequence: AGG
catttcatttagtaatgtga

SEQ ID NO: 146600 - DNA, 20 bp, Artificial Sequence
  Description of Artificial Sequence: Synthetic oligonucleotide
  Target: LAMA2; (+) strand; PAM type: NRG; PAM sequence: TGG
tttagtaatgtgaaggacgt

SEQ ID NO: 146601 - DNA, 20 bp, Artificial Sequence
  Description of Artificial Sequence: Synthetic oligonucleotide
  Target: LAMA2; (+) strand; PAM type: NRG; PAM sequence: AAG
aggacgttggtgactttccc

SEQ ID NO: 146602 - DNA, 20 bp, Artificial Sequence
  Description of Artificial Sequence: Synthetic oligonucleotide
  Target: LAMA2; (+) strand; PAM type: NRG; PAM sequence: GAG
gacgttggtgactttcccaa

SEQ ID NO: 146603 - DNA, 20 bp, Artificial Sequence
  Description of Artificial Sequence: Synthetic oligonucleotide
  Target: LAMA2; (+) strand; PAM type: NRG; PAM sequence: CAG
gttggtgactttcccaagag

SEQ ID NO: 146604 - DNA, 20 bp, Artificial Sequence
  Description of Artificial Sequence: Synthetic oligonucleotide
  Target: LAMA2; (+) strand; PAM type: NRG; PAM sequence: CAG
gactttcccaagagcagttt

SEQ ID NO: 146605 - DNA, 20 bp, Artificial Sequence
  Description of Artificial Sequence: Synthetic oligonucleotide
  Target: LAMA2; (+) strand; PAM type: NRG; PAM sequence: TGG
tttcccaagagcagtttcag

SEQ ID NO: 146606 - DNA, 20 bp, Artificial Sequence
  Description of Artificial Sequence: Synthetic oligonucleotide
  Target: LAMA2; (+) strand; PAM type: NRG; PAM sequence: TGG
caagagcagtttcagtggaa

SEQ ID NO: 146607 - DNA, 20 bp, Artificial Sequence
  Description of Artificial Sequence: Synthetic oligonucleotide
  Target: LAMA2; (+) strand; PAM type: NRG; PAM sequence: GAG
agagcagtttcagtggaatg

SEQ ID NO: 146608 - DNA, 20 bp, Artificial Sequence
  Description of Artificial Sequence: Synthetic oligonucleotide
  Target: LAMA2; (+) strand; PAM type: NRG; PAM sequence: AGG
gagcagtttcagtggaatgg

SEQ ID NO: 146609 - DNA, 20 bp, Artificial Sequence
  Description of Artificial Sequence: Synthetic oligonucleotide
  Target: LAMA2; (+) strand; PAM type: NRG; PAM sequence: AAG
cagtttcagtggaatggagg

SEQ ID NO: 146610 - DNA, 20 bp, Artificial Sequence
  Description of Artificial Sequence: Synthetic oligonucleotide
  Target: LAMA2; (+) strand; PAM type: NRG; PAM sequence: TGG
gtggaatggaggaagaccaa

SEQ ID NO: 146611 - DNA, 20 bp, Artificial Sequence
  Description of Artificial Sequence: Synthetic oligonucleotide
  Target: LAMA2; (+) strand; PAM type: NRG; PAM sequence: TAG
gaggaagaccaatggaataa

SEQ ID NO: 146612 - DNA, 20 bp, Artificial Sequence
  Description of Artificial Sequence: Synthetic oligonucleotide
  Target: LAMA2; (+) strand; PAM type: NRG; PAM sequence: AGG
aggaagaccaatggaataat

SEQ ID NO: 146613 - DNA, 20 bp, Artificial Sequence
  Description of Artificial Sequence: Synthetic oligonucleotide
  Target: LAMA2; (+) strand; PAM type: NRG; PAM sequence: GAG
gaagaccaatggaataatag

SEQ ID NO: 146614 - DNA, 20 bp, Artificial Sequence
  Description of Artificial Sequence: Synthetic oligonucleotide
  Target: LAMA2; (+) strand; PAM type: NRG; PAM sequence: TGG
atggaataataggagcattg

SEQ ID NO: 146615 - DNA, 20 bp, Artificial Sequence
  Description of Artificial Sequence: Synthetic oligonucleotide
  Target: LAMA2; (+) strand; PAM type: NRG; PAM sequence: GAG
ggaataataggagcattgtg

SEQ ID NO: 146616 - DNA, 20 bp, Artificial Sequence
  Description of Artificial Sequence: Synthetic oligonucleotide
  Target: LAMA2; (+) strand; PAM type: NRG; PAM sequence: AGG
gaataataggagcattgtgg

SEQ ID NO: 146617 - DNA, 20 bp, Artificial Sequence
  Description of Artificial Sequence: Synthetic oligonucleotide
  Target: LAMA2; (+) strand; PAM type: NRG; PAM sequence: CAG
aaatgtacctatttaccatc

SEQ ID NO: 146618 - DNA, 20 bp, Artificial Sequence
  Description of Artificial Sequence: Synthetic oligonucleotide
  Target: LAMA2; (+) strand; PAM type: NRG; PAM sequence: GAG
atgtacctatttaccatcca

SEQ ID NO: 146619 - DNA, 20 bp, Artificial Sequence
  Description of Artificial Sequence: Synthetic oligonucleotide
  Target: LAMA2; (+) strand; PAM type: NRG; PAM sequence: CAG
acctatttaccatccagagc

SEQ ID NO: 146620 - DNA, 20 bp, Artificial Sequence
  Description of Artificial Sequence: Synthetic oligonucleotide
  Target: LAMA2; (+) strand; PAM type: NRG; PAM sequence: CAG
ttaccatccagagccagact

SEQ ID NO: 146621 - DNA, 20 bp, Artificial Sequence
  Description of Artificial Sequence: Synthetic oligonucleotide
  Target: LAMA2; (+) strand; PAM type: NRG; PAM sequence: GAG
accatccagagccagactca

SEQ ID NO: 146622 - DNA, 20 bp, Artificial Sequence
  Description of Artificial Sequence: Synthetic oligonucleotide
  Target: LAMA2; (+) strand; PAM type: NRG; PAM sequence: TAG
tcagagcctttactctgtgc

SEQ ID NO: 146623 - DNA, 20 bp, Artificial Sequence
  Description of Artificial Sequence: Synthetic oligonucleotide
  Target: LAMA2; (+) strand; PAM type: NRG; PAM sequence: GAG
ttgcattgttccctttcctt

SEQ ID NO: 146624 - DNA, 20 bp, Artificial Sequence
  Description of Artificial Sequence: Synthetic oligonucleotide
  Target: LAMA2; (+) strand; PAM type: NRG; PAM sequence: CAG
ccctttccttgagctttcta

SEQ ID NO: 146625 - DNA, 20 bp, Artificial Sequence
  Description of Artificial Sequence: Synthetic oligonucleotide
  Target: LAMA2; (+) strand; PAM type: NRG; PAM sequence: CAG
cttcttcaaacatgtacaat

SEQ ID NO: 146626 - DNA, 20 bp, Artificial Sequence
  Description of Artificial Sequence: Synthetic oligonucleotide
  Target: LAMA2; (+) strand; PAM type: NRG; PAM sequence: TGG
caatcagacctctgaatctg

SEQ ID NO: 146627 - DNA, 20 bp, Artificial Sequence
  Description of Artificial Sequence: Synthetic oligonucleotide
  Target: LAMA2; (+) strand; PAM type: NRG; PAM sequence: TGG
atctgtggattccacatcca

SEQ ID NO: 146628 - DNA, 20 bp, Artificial Sequence
  Description of Artificial Sequence: Synthetic oligonucleotide
  Target: LAMA2; (+) strand; PAM type: NRG; PAM sequence: CAG
tccatggattcaactgactg

SEQ ID NO: 146629 - DNA, 20 bp, Artificial Sequence
  Description of Artificial Sequence: Synthetic oligonucleotide
  Target: LAMA2; (+) strand; PAM type: NRG; PAM sequence: AAG
atggattcaactgactgcag

SEQ ID NO: 146630 - DNA, 20 bp, Artificial Sequence
  Description of Artificial Sequence: Synthetic oligonucleotide
  Target: LAMA2; (+) strand; PAM type: NRG; PAM sequence: TAG
tgactgcagaagaaaaatgt

SEQ ID NO: 146631 - DNA, 20 bp, Artificial Sequence
  Description of Artificial Sequence: Synthetic oligonucleotide
  Target: LAMA2; (+) strand; PAM type: NRG; PAM sequence: CAG
gcatctgtaccgaacatgtg

SEQ ID NO: 146632 - DNA, 20 bp, Artificial Sequence
  Description of Artificial Sequence: Synthetic oligonucleotide
  Target: LAMA2; (+) strand; PAM type: NRG; PAM sequence: TGG
tcattattccctaaataata

SEQ ID NO: 146633 - DNA, 20 bp, Artificial Sequence
  Description of Artificial Sequence: Synthetic oligonucleotide
  Target: LAMA2; (+) strand; PAM type: NRG; PAM sequence: TAG
tggtataacaactatttaca

SEQ ID NO: 146634 - DNA, 20 bp, Artificial Sequence
  Description of Artificial Sequence: Synthetic oligonucleotide
  Target: LAMA2; (+) strand; PAM type: NRG; PAM sequence: TGG
acatagcctttacattgtat

SEQ ID NO: 146635 - DNA, 20 bp, Artificial Sequence
  Description of Artificial Sequence: Synthetic oligonucleotide
  Target: LAMA2; (+) strand; PAM type: NRG; PAM sequence: GGG
catagcctttacattgtatt

SEQ ID NO: 146636 - DNA, 20 bp, Artificial Sequence
  Description of Artificial Sequence: Synthetic oligonucleotide
  Target: LAMA2; (+) strand; PAM type: NRG; PAM sequence: AAG
tacattgtattgggtattta

SEQ ID NO: 146637 - DNA, 20 bp, Artificial Sequence
  Description of Artificial Sequence: Synthetic oligonucleotide
  Target: LAMA2; (+) strand; PAM type: NRG; PAM sequence: TAG
attgggtatttaaagtaatg

SEQ ID NO: 146638 - DNA, 20 bp, Artificial Sequence
  Description of Artificial Sequence: Synthetic oligonucleotide
  Target: LAMA2; (+) strand; PAM type: NRG; PAM sequence: TAG
ataattttgaaatatgtgta

SEQ ID NO: 146639 - DNA, 20 bp, Artificial Sequence
  Description of Artificial Sequence: Synthetic oligonucleotide
  Target: LAMA2; (+) strand; PAM type: NRG; PAM sequence: AGG
taattttgaaatatgtgtat

SEQ ID NO: 146640 - DNA, 20 bp, Artificial Sequence
  Description of Artificial Sequence: Synthetic oligonucleotide
  Target: LAMA2; (+) strand; PAM type: NRG; PAM sequence: AAG
atactatgccatttcatttc

SEQ ID NO: 146641 - DNA, 20 bp, Artificial Sequence
  Description of Artificial Sequence: Synthetic oligonucleotide
  Target: LAMA2; (+) strand; PAM type: NRG; PAM sequence: AGG
tactatgccatttcatttca

SEQ ID NO: 146642 - DNA, 20 bp, Artificial Sequence
  Description of Artificial Sequence: Synthetic oligonucleotide
  Target: LAMA2; (+) strand; PAM type: NRG; PAM sequence: GAG
ccatttcatttcaaggactt

SEQ ID NO: 146643 - DNA, 20 bp, Artificial Sequence
  Description of Artificial Sequence: Synthetic oligonucleotide
  Target: LAMA2; (+) strand; PAM type: NRG; PAM sequence: CAG
ttcaaggacttgagcatcct

SEQ ID NO: 146644 - DNA, 20 bp, Artificial Sequence
  Description of Artificial Sequence: Synthetic oligonucleotide
  Target: LAMA2; (+) strand; PAM type: NRG; PAM sequence: CAG
tcctcagattttgatatcca

SEQ ID NO: 146645 - DNA, 20 bp, Artificial Sequence
  Description of Artificial Sequence: Synthetic oligonucleotide
  Target: LAMA2; (+) strand; PAM type: NRG; PAM sequence: AGG
cctcagattttgatatccac

SEQ ID NO: 146646 - DNA, 20 bp, Artificial Sequence
  Description of Artificial Sequence: Synthetic oligonucleotide
  Target: LAMA2; (+) strand; PAM type: NRG; PAM sequence: GAG
tcagattttgatatccacag

SEQ ID NO: 146647 - DNA, 20 bp, Artificial Sequence
  Description of Artificial Sequence: Synthetic oligonucleotide
  Target: LAMA2; (+) strand; PAM type: NRG; PAM sequence: AGG
cagattttgatatccacagg

SEQ ID NO: 146648 - DNA, 20 bp, Artificial Sequence
  Description of Artificial Sequence: Synthetic oligonucleotide
  Target: LAMA2; (+) strand; PAM type: NRG; PAM sequence: TGG
ttgatatccacaggaggtcc

SEQ ID NO: 146649 - DNA, 20 bp, Artificial Sequence
  Description of Artificial Sequence: Synthetic oligonucleotide
  Target: LAMA2; (+) strand; PAM type: NRG; PAM sequence: GAG
cccctgaaactataactgat

SEQ ID NO: 146650 - DNA, 20 bp, Artificial Sequence
  Description of Artificial Sequence: Synthetic oligonucleotide
  Target: LAMA2; (+) strand; PAM type: NRG; PAM sequence: AGG
ccctgaaactataactgatg

SEQ ID NO: 146651 - DNA, 20 bp, Artificial Sequence
  Description of Artificial Sequence: Synthetic oligonucleotide
  Target: LAMA2; (+) strand; PAM type: NRG; PAM sequence: GGG
cctgaaactataactgatga

SEQ ID NO: 146652 - DNA, 20 bp, Artificial Sequence
  Description of Artificial Sequence: Synthetic oligonucleotide
  Target: LAMA2; (+) strand; PAM type: NRG; PAM sequence: GGG
ctgaaactataactgatgag

SEQ ID NO: 146653 - DNA, 20 bp, Artificial Sequence
  Description of Artificial Sequence: Synthetic oligonucleotide
  Target: LAMA2; (+) strand; PAM type: NRG; PAM sequence: TGG
ctataactgatgaggggtga

SEQ ID NO: 146654 - DNA, 20 bp, Artificial Sequence
  Description of Artificial Sequence: Synthetic oligonucleotide
  Target: LAMA2; (+) strand; PAM type: NRG; PAM sequence: CAG
atggtacttctttttttaca

SEQ ID NO: 146655 - DNA, 20 bp, Artificial Sequence
  Description of Artificial Sequence: Synthetic oligonucleotide
  Target: LAMA2; (+) strand; PAM type: NRG; PAM sequence: AAG
tttttacacagtcaaaataa

SEQ ID NO: 146656 - DNA, 20 bp, Artificial Sequence
  Description of Artificial Sequence: Synthetic oligonucleotide
  Target: LAMA2; (+) strand; PAM type: NRG; PAM sequence: GAG
tttacacagtcaaaataaaa

SEQ ID NO: 146657 - DNA, 20 bp, Artificial Sequence
  Description of Artificial Sequence: Synthetic oligonucleotide
  Target: LAMA2; (+) strand; PAM type: NRG; PAM sequence: TAG
acagtcaaaataaaagagat

SEQ ID NO: 146658 - DNA, 20 bp, Artificial Sequence
  Description of Artificial Sequence: Synthetic oligonucleotide
  Target: LAMA2; (+) strand; PAM type: NRG; PAM sequence: AGG
cagtcaaaataaaagagatt

SEQ ID NO: 146659 - DNA, 20 bp, Artificial Sequence
  Description of Artificial Sequence: Synthetic oligonucleotide
  Target: LAMA2; (+) strand; PAM type: NRG; PAM sequence: GAG
tccccaaataatgccatatt

SEQ ID NO: 146660 - DNA, 20 bp, Artificial Sequence
  Description of Artificial Sequence: Synthetic oligonucleotide
  Target: LAMA2; (+) strand; PAM type: NRG; PAM sequence: TGG
aatgccatattgagcatgac

SEQ ID NO: 146661 - DNA, 20 bp, Artificial Sequence
  Description of Artificial Sequence: Synthetic oligonucleotide
  Target: LAMA2; (+) strand; PAM type: NRG; PAM sequence: AAG
tattgagcatgactggattt

SEQ ID NO: 146662 - DNA, 20 bp, Artificial Sequence
  Description of Artificial Sequence: Synthetic oligonucleotide
  Target: LAMA2; (+) strand; PAM type: NRG; PAM sequence: GAG
ttgagcatgactggatttaa

SEQ ID NO: 146663 - DNA, 20 bp, Artificial Sequence
  Description of Artificial Sequence: Synthetic oligonucleotide
  Target: LAMA2; (+) strand; PAM type: NRG; PAM sequence: AGG
tgagcatgactggatttaag

SEQ ID NO: 146664 - DNA, 20 bp, Artificial Sequence
  Description of Artificial Sequence: Synthetic oligonucleotide
  Target: LAMA2; (+) strand; PAM type: NRG; PAM sequence: CAG
gactggatttaagaggtccc

SEQ ID NO: 146665 - DNA, 20 bp, Artificial Sequence
  Description of Artificial Sequence: Synthetic oligonucleotide
  Target: LAMA2; (+) strand; PAM type: NRG; PAM sequence: CAG
taagaggtccccagatgtct

SEQ ID NO: 146666 - DNA, 20 bp, Artificial Sequence
  Description of Artificial Sequence: Synthetic oligonucleotide
  Target: LAMA2; (+) strand; PAM type: NRG; PAM sequence: AAG
atctgtacatccttaatctc

SEQ ID NO: 146667 - DNA, 20 bp, Artificial Sequence
  Description of Artificial Sequence: Synthetic oligonucleotide
  Target: LAMA2; (+) strand; PAM type: NRG; PAM sequence: TGG
ttaatctcaagctacacata

SEQ ID NO: 146668 - DNA, 20 bp, Artificial Sequence
  Description of Artificial Sequence: Synthetic oligonucleotide
  Target: LAMA2; (+) strand; PAM type: NRG; PAM sequence: TGG
ggatttactgttctgtctcc

SEQ ID NO: 146669 - DNA, 20 bp, Artificial Sequence
  Description of Artificial Sequence: Synthetic oligonucleotide
  Target: LAMA2; (+) strand; PAM type: NRG; PAM sequence: CAG
actgttctgtctcctggtgt

SEQ ID NO: 146670 - DNA, 20 bp, Artificial Sequence
  Description of Artificial Sequence: Synthetic oligonucleotide
  Target: LAMA2; (+) strand; PAM type: NRG; PAM sequence: TGG
atttgttttacctgtttcat

SEQ ID NO: 146671 - DNA, 20 bp, Artificial Sequence
  Description of Artificial Sequence: Synthetic oligonucleotide
  Target: LAMA2; (+) strand; PAM type: NRG; PAM sequence: TAG
ctgtttcattggcacacttg

SEQ ID NO: 146672 - DNA, 20 bp, Artificial Sequence
  Description of Artificial Sequence: Synthetic oligonucleotide
  Target: LAMA2; (+) strand; PAM type: NRG; PAM sequence: GAG
gtttcattggcacacttgta

SEQ ID NO: 146673 - DNA, 20 bp, Artificial Sequence
  Description of Artificial Sequence: Synthetic oligonucleotide
  Target: LAMA2; (+) strand; PAM type: NRG; PAM sequence: TAG
ttgataatacaaaaatgttt

SEQ ID NO: 146674 - DNA, 20 bp, Artificial Sequence
  Description of Artificial Sequence: Synthetic oligonucleotide
  Target: LAMA2; (+) strand; PAM type: NRG; PAM sequence: AGG
tgataatacaaaaatgtttt

SEQ ID NO: 146675 - DNA, 20 bp, Artificial Sequence
  Description of Artificial Sequence: Synthetic oligonucleotide
  Target: LAMA2; (+) strand; PAM type: NRG; PAM sequence: GAG
ataatacaaaaatgttttag

SEQ ID NO: 146676 - DNA, 20 bp, Artificial Sequence
  Description of Artificial Sequence: Synthetic oligonucleotide
  Target: LAMA2; (+) strand; PAM type: NRG; PAM sequence: GAG
aatacaaaaatgttttagga

SEQ ID NO: 146677 - DNA, 20 bp, Artificial Sequence
  Description of Artificial Sequence: Synthetic oligonucleotide
  Target: LAMA2; (+) strand; PAM type: NRG; PAM sequence: GAG
tacaaaaatgttttaggaga

SEQ ID NO: 146678 - DNA, 20 bp, Artificial Sequence
  Description of Artificial Sequence: Synthetic oligonucleotide
  Target: LAMA2; (+) strand; PAM type: NRG; PAM sequence: AAG
gagagagcataccacacatc

SEQ ID NO: 146679 - DNA, 20 bp, Artificial Sequence
  Description of Artificial Sequence: Synthetic oligonucleotide
  Target: LAMA2; (+) strand; PAM type: NRG; PAM sequence: AAG
cacttctgctacttatttca

SEQ ID NO: 146680 - DNA, 20 bp, Artificial Sequence
  Description of Artificial Sequence: Synthetic oligonucleotide
  Target: LAMA2; (+) strand; PAM type: NRG; PAM sequence: CAG
gatacttattcatgatcttt

SEQ ID NO: 146681 - DNA, 20 bp, Artificial Sequence
  Description of Artificial Sequence: Synthetic oligonucleotide
  Target: LAMA2; (+) strand; PAM type: NRG; PAM sequence: TAG
acttattcatgatctttcag

SEQ ID NO: 146682 - DNA, 20 bp, Artificial Sequence
  Description of Artificial Sequence: Synthetic oligonucleotide
  Target: LAMA2; (+) strand; PAM type: NRG; PAM sequence: AAG
tcccatccatccattcactc

SEQ ID NO: 146683 - DNA, 20 bp, Artificial Sequence
  Description of Artificial Sequence: Synthetic oligonucleotide
  Target: LAMA2; (+) strand; PAM type: NRG; PAM sequence: TAG
actcaagaaacttgtattgt

SEQ ID NO: 146684 - DNA, 20 bp, Artificial Sequence
  Description of Artificial Sequence: Synthetic oligonucleotide
  Target: LAMA2; (+) strand; PAM type: NRG; PAM sequence: AGG
ctcaagaaacttgtattgtt

SEQ ID NO: 146685 - DNA, 20 bp, Artificial Sequence
  Description of Artificial Sequence: Synthetic oligonucleotide
  Target: LAMA2; (+) strand; PAM type: NRG; PAM sequence: GGG
tcaagaaacttgtattgtta

SEQ ID NO: 146686 - DNA, 20 bp, Artificial Sequence
  Description of Artificial Sequence: Synthetic oligonucleotide
  Target: LAMA2; (+) strand; PAM type: NRG; PAM sequence: TAG
tgtattgttagggaatgtat

SEQ ID NO: 146687 - DNA, 20 bp, Artificial Sequence
  Description of Artificial Sequence: Synthetic oligonucleotide
  Target: LAMA2; (+) strand; PAM type: NRG; PAM sequence: TAG
tagggaatgtattagaatta

SEQ ID NO: 146688 - DNA, 20 bp, Artificial Sequence
  Description of Artificial Sequence: Synthetic oligonucleotide
  Target: LAMA2; (+) strand; PAM type: NRG; PAM sequence: AAG
tattagaattatagctcttc

SEQ ID NO: 146689 - DNA, 20 bp, Artificial Sequence
  Description of Artificial Sequence: Synthetic oligonucleotide
  Target: LAMA2; (+) strand; PAM type: NRG; PAM sequence: TAG
caagctttccaaaacaaatg

SEQ ID NO: 146690 - DNA, 20 bp, Artificial Sequence
  Description of Artificial Sequence: Synthetic oligonucleotide
  Target: LAMA2; (+) strand; PAM type: NRG; PAM sequence: TAG
aacaaatgtagcaacataaa

SEQ ID NO: 146691 - DNA, 20 bp, Artificial Sequence
  Description of Artificial Sequence: Synthetic oligonucleotide
  Target: LAMA2; (+) strand; PAM type: NRG; PAM sequence: AAG
atgtagcaacataaatagac

SEQ ID NO: 146692 - DNA, 20 bp, Artificial Sequence
  Description of Artificial Sequence: Synthetic oligonucleotide
  Target: LAMA2; (+) strand; PAM type: NRG; PAM sequence: TGG
taaatagacaagcataataa

SEQ ID NO: 146693 - DNA, 20 bp, Artificial Sequence
  Description of Artificial Sequence: Synthetic oligonucleotide
  Target: LAMA2; (+) strand; PAM type: NRG; PAM sequence: GAG
taatggaaaatcgtctatac

SEQ ID NO: 146694 - DNA, 20 bp, Artificial Sequence
  Description of Artificial Sequence: Synthetic oligonucleotide
  Target: LAMA2; (+) strand; PAM type: NRG; PAM sequence: TAG
tacgagaaatctaattattt

SEQ ID NO: 146695 - DNA, 20 bp, Artificial Sequence
  Description of Artificial Sequence: Synthetic oligonucleotide
  Target: LAMA2; (+) strand; PAM type: NRG; PAM sequence: AGG
acgagaaatctaattatttt

SEQ ID NO: 146696 - DNA, 20 bp, Artificial Sequence
  Description of Artificial Sequence: Synthetic oligonucleotide
  Target: LAMA2; (+) strand; PAM type: NRG; PAM sequence: GAG
tctaaaataaaaatgccatt

SEQ ID NO: 146697 - DNA, 20 bp, Artificial Sequence
  Description of Artificial Sequence: Synthetic oligonucleotide
  Target: LAMA2; (+) strand; PAM type: NRG; PAM sequence: AGG
ctaaaataaaaatgccattg

SEQ ID NO: 146698 - DNA, 20 bp, Artificial Sequence
  Description of Artificial Sequence: Synthetic oligonucleotide
  Target: LAMA2; (+) strand; PAM type: NRG; PAM sequence: CAG
ataaaaatgccattgaggca

SEQ ID NO: 146699 - DNA, 20 bp, Artificial Sequence
  Description of Artificial Sequence: Synthetic oligonucleotide
  Target: LAMA2; (+) strand; PAM type: NRG; PAM sequence: GAG
aaaaatgccattgaggcaca

SEQ ID NO: 146700 - DNA, 20 bp, Artificial Sequence
  Description of Artificial Sequence: Synthetic oligonucleotide
  Target: LAMA2; (+) strand; PAM type: NRG; PAM sequence: AGG
aaaatgccattgaggcacag

SEQ ID NO: 146701 - DNA, 20 bp, Artificial Sequence
  Description of Artificial Sequence: Synthetic oligonucleotide
  Target: LAMA2; (+) strand; PAM type: NRG; PAM sequence: AAG
agaggtcttactaatctgta

SEQ ID NO: 146702 - DNA, 20 bp, Artificial Sequence
  Description of Artificial Sequence: Synthetic oligonucleotide
  Target: LAMA2; (+) strand; PAM type: NRG; PAM sequence: TAG
taaagcaaacatgatttata

SEQ ID NO: 146703 - DNA, 20 bp, Artificial Sequence
  Description of Artificial Sequence: Synthetic oligonucleotide
  Target: LAMA2; (+) strand; PAM type: NRG; PAM sequence: TAG
tttatatagtatgcttacat

SEQ ID NO: 146704 - DNA, 20 bp, Artificial Sequence
  Description of Artificial Sequence: Synthetic oligonucleotide
  Target: LAMA2; (+) strand; PAM type: NRG; PAM sequence: CAG
gtatgcttacattagtaaat

SEQ ID NO: 146705 - DNA, 20 bp, Artificial Sequence
  Description of Artificial Sequence: Synthetic oligonucleotide
  Target: LAMA2; (+) strand; PAM type: NRG; PAM sequence: AGG
tatgcttacattagtaaatc

SEQ ID NO: 146706 - DNA, 20 bp, Artificial Sequence
  Description of Artificial Sequence: Synthetic oligonucleotide
  Target: LAMA2; (+) strand; PAM type: NRG; PAM sequence: TGG
attagtaaatcaggattatt

SEQ ID NO: 146707 - DNA, 20 bp, Artificial Sequence
  Description of Artificial Sequence: Synthetic oligonucleotide
  Target: LAMA2; (+) strand; PAM type: NRG; PAM sequence: GGG
ttagtaaatcaggattattt

SEQ ID NO: 146708 - DNA, 20 bp, Artificial Sequence
  Description of Artificial Sequence: Synthetic oligonucleotide
  Target: LAMA2; (+) strand; PAM type: NRG; PAM sequence: CAG
atcaggattatttgggtgaa

SEQ ID NO: 146709 - DNA, 20 bp, Artificial Sequence
  Description of Artificial Sequence: Synthetic oligonucleotide
  Target: LAMA2; (+) strand; PAM type: NRG; PAM sequence: GAG
caggattatttgggtgaaca

SEQ ID NO: 146710 - DNA, 20 bp, Artificial Sequence
  Description of Artificial Sequence: Synthetic oligonucleotide
  Target: LAMA2; (+) strand; PAM type: NRG; PAM sequence: TAG
aacagagtataatattgata

SEQ ID NO: 146711 - DNA, 20 bp, Artificial Sequence
  Description of Artificial Sequence: Synthetic oligonucleotide
  Target: LAMA2; (+) strand; PAM type: NRG; PAM sequence: TGG
ataatattgatatagttatt

SEQ ID NO: 146712 - DNA, 20 bp, Artificial Sequence
  Description of Artificial Sequence: Synthetic oligonucleotide
  Target: LAMA2; (+) strand; PAM type: NRG; PAM sequence: AAG
tatagttatttggttataaa

SEQ ID NO: 146713 - DNA, 20 bp, Artificial Sequence
  Description of Artificial Sequence: Synthetic oligonucleotide
  Target: LAMA2; (+) strand; PAM type: NRG; PAM sequence: GAG
tagttatttggttataaaaa

SEQ ID NO: 146714 - DNA, 20 bp, Artificial Sequence
  Description of Artificial Sequence: Synthetic oligonucleotide
  Target: LAMA2; (+) strand; PAM type: NRG; PAM sequence: AAG
taaaaagagatgtttctgat

SEQ ID NO: 146715 - DNA, 20 bp, Artificial Sequence
  Description of Artificial Sequence: Synthetic oligonucleotide
  Target: LAMA2; (+) strand; PAM type: NRG; PAM sequence: AGG
aaaaagagatgtttctgata

SEQ ID NO: 146716 - DNA, 20 bp, Artificial Sequence
  Description of Artificial Sequence: Synthetic oligonucleotide
  Target: LAMA2; (+) strand; PAM type: NRG; PAM sequence: TGG
ttccccccctttatttgcct

SEQ ID NO: 146717 - DNA, 20 bp, Artificial Sequence
  Description of Artificial Sequence: Synthetic oligonucleotide
  Target: LAMA2; (+) strand; PAM type: NRG; PAM sequence: AAG
gccttggaaaacaaatttca

SEQ ID NO: 146718 - DNA, 20 bp, Artificial Sequence
  Description of Artificial Sequence: Synthetic oligonucleotide
  Target: LAMA2; (+) strand; PAM type: NRG; PAM sequence: AAG
ttggaaaacaaatttcaaag

SEQ ID NO: 146719 - DNA, 20 bp, Artificial Sequence
  Description of Artificial Sequence: Synthetic oligonucleotide
  Target: LAMA2; (+) strand; PAM type: NRG; PAM sequence: GAG
ggaaaacaaatttcaaagaa

SEQ ID NO: 146720 - DNA, 20 bp, Artificial Sequence
  Description of Artificial Sequence: Synthetic oligonucleotide
  Target: LAMA2; (+) strand; PAM type: NRG; PAM sequence: CAG
cattttaaactctaaaaaac

SEQ ID NO: 146721 - DNA, 20 bp, Artificial Sequence
  Description of Artificial Sequence: Synthetic oligonucleotide
  Target: LAMA2; (+) strand; PAM type: NRG; PAM sequence: TAG
aaaaaaccagttgataacca

SEQ ID NO: 146722 - DNA, 20 bp, Artificial Sequence
  Description of Artificial Sequence: Synthetic oligonucleotide
  Target: LAMA2; (+) strand; PAM type: NRG; PAM sequence: CAG
taaccatagtctgatatttg

SEQ ID NO: 146723 - DNA, 20 bp, Artificial Sequence
  Description of Artificial Sequence: Synthetic oligonucleotide
  Target: LAMA2; (+) strand; PAM type: NRG; PAM sequence: TGG
catagtctgatatttgcagt

SEQ ID NO: 146724 - DNA, 20 bp, Artificial Sequence
  Description of Artificial Sequence: Synthetic oligonucleotide
  Target: LAMA2; (+) strand; PAM type: NRG; PAM sequence: CAG
gttggaatgaattcctgtga

SEQ ID NO: 146725 - DNA, 20 bp, Artificial Sequence
  Description of Artificial Sequence: Synthetic oligonucleotide
  Target: LAMA2; (+) strand; PAM type: NRG; PAM sequence: TAG
acccaccaacatgtctgtaa

SEQ ID NO: 146726 - DNA, 20 bp, Artificial Sequence
  Description of Artificial Sequence: Synthetic oligonucleotide
  Target: LAMA2; (+) strand; PAM type: NRG; PAM sequence: TGG
gtctgtaatagaaaccactt

SEQ ID NO: 146727 - DNA, 20 bp, Artificial Sequence
  Description of Artificial Sequence: Synthetic oligonucleotide
  Target: LAMA2; (+) strand; PAM type: NRG; PAM sequence: AAG
tgtaatagaaaccactttgg

SEQ ID NO: 146728 - DNA, 20 bp, Artificial Sequence
  Description of Artificial Sequence: Synthetic oligonucleotide
  Target: LAMA2; (+) strand; PAM type: NRG; PAM sequence: TAG
gaaaccactttggaagacac

SEQ ID NO: 146729 - DNA, 20 bp, Artificial Sequence
  Description of Artificial Sequence: Synthetic oligonucleotide
  Target: LAMA2; (+) strand; PAM type: NRG; PAM sequence: GAG
aaccactttggaagacacta

SEQ ID NO: 146730 - DNA, 20 bp, Artificial Sequence
  Description of Artificial Sequence: Synthetic oligonucleotide
  Target: LAMA2; (+) strand; PAM type: NRG; PAM sequence: AGG
accactttggaagacactag

SEQ ID NO: 146731 - DNA, 20 bp, Artificial Sequence
  Description of Artificial Sequence: Synthetic oligonucleotide
  Target: LAMA2; (+) strand; PAM type: NRG; PAM sequence: CAG
gaagacactagaggctgcca

SEQ ID NO: 146732 - DNA, 20 bp, Artificial Sequence
  Description of Artificial Sequence: Synthetic oligonucleotide
  Target: LAMA2; (+) strand; PAM type: NRG; PAM sequence: CAG
agaggctgccacagatttct

SEQ ID NO: 146733 - DNA, 20 bp, Artificial Sequence
  Description of Artificial Sequence: Synthetic oligonucleotide
  Target: LAMA2; (+) strand; PAM type: NRG; PAM sequence: AGG
gaggctgccacagatttctc

SEQ ID NO: 146734 - DNA, 20 bp, Artificial Sequence
  Description of Artificial Sequence: Synthetic oligonucleotide
  Target: LAMA2; (+) strand; PAM type: NRG; PAM sequence: CAG
acagatttctcaggtcctca

SEQ ID NO: 146735 - DNA, 20 bp, Artificial Sequence
  Description of Artificial Sequence: Synthetic oligonucleotide
  Target: LAMA2; (+) strand; PAM type: NRG; PAM sequence: AAG
atttctcaggtcctcacagc

SEQ ID NO: 146736 - DNA, 20 bp, Artificial Sequence
  Description of Artificial Sequence: Synthetic oligonucleotide
  Target: LAMA2; (+) strand; PAM type: NRG; PAM sequence: CAG
ctcaggtcctcacagcaaga

SEQ ID NO: 146737 - DNA, 20 bp, Artificial Sequence
  Description of Artificial Sequence: Synthetic oligonucleotide
  Target: LAMA2; (+) strand; PAM type: NRG; PAM sequence: TGG
aggtcctcacagcaagacag

SEQ ID NO: 146738 - DNA, 20 bp, Artificial Sequence
  Description of Artificial Sequence: Synthetic oligonucleotide
  Target: LAMA2; (+) strand; PAM type: NRG; PAM sequence: TGG
tcctcacagcaagacagtgg

SEQ ID NO: 146739 - DNA, 20 bp, Artificial Sequence
  Description of Artificial Sequence: Synthetic oligonucleotide
  Target: LAMA2; (+) strand; PAM type: NRG; PAM sequence: TGG
cagcaagacagtggtggtct

SEQ ID NO: 146740 - DNA, 20 bp, Artificial Sequence
  Description of Artificial Sequence: Synthetic oligonucleotide
  Target: LAMA2; (+) strand; PAM type: NRG; PAM sequence: GGG
agcaagacagtggtggtctt

SEQ ID NO: 146741 - DNA, 20 bp, Artificial Sequence
  Description of Artificial Sequence: Synthetic oligonucleotide
  Target: LAMA2; (+) strand; PAM type: NRG; PAM sequence: GGG
gcaagacagtggtggtcttg

SEQ ID NO: 146742 - DNA, 20 bp, Artificial Sequence
  Description of Artificial Sequence: Synthetic oligonucleotide
  Target: LAMA2; (+) strand; PAM type: NRG; PAM sequence: TGG
gacagtggtggtcttgggga

SEQ ID NO: 146743 - DNA, 20 bp, Artificial Sequence
  Description of Artificial Sequence: Synthetic oligonucleotide
  Target: LAMA2; (+) strand; PAM type: NRG; PAM sequence: AAG
gatacatttcatcttccttg

SEQ ID NO: 146744 - DNA, 20 bp, Artificial Sequence
  Description of Artificial Sequence: Synthetic oligonucleotide
  Target: LAMA2; (+) strand; PAM type: NRG; PAM sequence: CAG
catttcatcttccttgaaga

SEQ ID NO: 146745 - DNA, 20 bp, Artificial Sequence
  Description of Artificial Sequence: Synthetic oligonucleotide
  Target: LAMA2; (+) strand; PAM type: NRG; PAM sequence: TGG
tgaagacagataccaccctc

SEQ ID NO: 146746 - DNA, 20 bp, Artificial Sequence
  Description of Artificial Sequence: Synthetic oligonucleotide
  Target: LAMA2; (+) strand; PAM type: NRG; PAM sequence: TAG
accctctggctgtcacccca

SEQ ID NO: 146747 - DNA, 20 bp, Artificial Sequence
  Description of Artificial Sequence: Synthetic oligonucleotide
  Target: LAMA2; (+) strand; PAM type: NRG; PAM sequence: AGG
ccctctggctgtcaccccat

SEQ ID NO: 146748 - DNA, 20 bp, Artificial Sequence
  Description of Artificial Sequence: Synthetic oligonucleotide
  Target: LAMA2; (+) strand; PAM type: NRG; PAM sequence: CAG
gctgtcaccccataggaaat

SEQ ID NO: 146749 - DNA, 20 bp, Artificial Sequence
  Description of Artificial Sequence: Synthetic oligonucleotide
  Target: LAMA2; (+) strand; PAM type: NRG; PAM sequence: AGG
ctgtcaccccataggaaatc

SEQ ID NO: 146750 - DNA, 20 bp, Artificial Sequence
  Description of Artificial Sequence: Synthetic oligonucleotide
  Target: LAMA2; (+) strand; PAM type: NRG; PAM sequence: AAG
tcaccccataggaaatcagg

SEQ ID NO: 146751 - DNA, 20 bp, Artificial Sequence
  Description of Artificial Sequence: Synthetic oligonucleotide
  Target: LAMA2; (+) strand; PAM type: NRG; PAM sequence: AAG
aggaaatcaggaagtatgct

SEQ ID NO: 146752 - DNA, 20 bp, Artificial Sequence
  Description of Artificial Sequence: Synthetic oligonucleotide
  Target: LAMA2; (+) strand; PAM type: NRG; PAM sequence: CAG
aggaagtatgctaagctatc

SEQ ID NO: 146753 - DNA, 20 bp, Artificial Sequence
  Description of Artificial Sequence: Synthetic oligonucleotide
  Target: LAMA2; (+) strand; PAM type: NRG; PAM sequence: TGG
aagtatgctaagctatccag

SEQ ID NO: 146754 - DNA, 20 bp, Artificial Sequence
  Description of Artificial Sequence: Synthetic oligonucleotide
  Target: LAMA2; (+) strand; PAM type: NRG; PAM sequence: TGG
gctaagctatccagtggact

SEQ ID NO: 146755 - DNA, 20 bp, Artificial Sequence
  Description of Artificial Sequence: Synthetic oligonucleotide
  Target: LAMA2; (+) strand; PAM type: NRG; PAM sequence: TAG
ggaattacactgtgctgtgc

SEQ ID NO: 146756 - DNA, 20 bp, Artificial Sequence
  Description of Artificial Sequence: Synthetic oligonucleotide
  Target: LAMA2; (+) strand; PAM type: NRG; PAM sequence: TGG
attacactgtgctgtgctag

SEQ ID NO: 146757 - DNA, 20 bp, Artificial Sequence
  Description of Artificial Sequence: Synthetic oligonucleotide
  Target: LAMA2; (+) strand; PAM type: NRG; PAM sequence: AAG
caacattatgatttattttg

SEQ ID NO: 146758 - DNA, 20 bp, Artificial Sequence
  Description of Artificial Sequence: Synthetic oligonucleotide
  Target: LAMA2; (+) strand; PAM type: NRG; PAM sequence: AGG
aacattatgatttattttga

SEQ ID NO: 146759 - DNA, 20 bp, Artificial Sequence
  Description of Artificial Sequence: Synthetic oligonucleotide
  Target: LAMA2; (+) strand; PAM type: NRG; PAM sequence: GAG
cattatgatttattttgaag

SEQ ID NO: 146760 - DNA, 20 bp, Artificial Sequence
  Description of Artificial Sequence: Synthetic oligonucleotide
  Target: LAMA2; (+) strand; PAM type: NRG; PAM sequence: AAG
atgatttattttgaaggaga

SEQ ID NO: 146761 - DNA, 20 bp, Artificial Sequence
  Description of Artificial Sequence: Synthetic oligonucleotide
  Target: LAMA2; (+) strand; PAM type: NRG; PAM sequence: AGG
tgatttattttgaaggagaa

SEQ ID NO: 146762 - DNA, 20 bp, Artificial Sequence
  Description of Artificial Sequence: Synthetic oligonucleotide
  Target: LAMA2; (+) strand; PAM type: NRG; PAM sequence: CGG
aaaaaaaaatacacacaaaa

SEQ ID NO: 146763 - DNA, 20 bp, Artificial Sequence
  Description of Artificial Sequence: Synthetic oligonucleotide
  Target: LAMA2; (+) strand; PAM type: NRG; PAM sequence: TGG
aaaaaatacacacaaaacgg

SEQ ID NO: 146764 - DNA, 20 bp, Artificial Sequence
  Description of Artificial Sequence: Synthetic oligonucleotide
  Target: LAMA2; (+) strand; PAM type: NRG; PAM sequence: AAG
aaatacacacaaaacggtgg

SEQ ID NO: 146765 - DNA, 20 bp, Artificial Sequence
  Description of Artificial Sequence: Synthetic oligonucleotide
  Target: LAMA2; (+) strand; PAM type: NRG; PAM sequence: AGG
aatacacacaaaacggtgga

SEQ ID NO: 146766 - DNA, 20 bp, Artificial Sequence
  Description of Artificial Sequence: Synthetic oligonucleotide
  Target: LAMA2; (+) strand; PAM type: NRG; PAM sequence: AAG
acacacaaaacggtggaagg

SEQ ID NO: 146767 - DNA, 20 bp, Artificial Sequence
  Description of Artificial Sequence: Synthetic oligonucleotide
  Target: LAMA2; (+) strand; PAM type: NRG; PAM sequence: CAG
ctgcacacaacatcgccaaa

SEQ ID NO: 146768 - DNA, 20 bp, Artificial Sequence
  Description of Artificial Sequence: Synthetic oligonucleotide
  Target: LAMA2; (+) strand; PAM type: NRG; PAM sequence: TGG
acacaacatcgccaaacagc

SEQ ID NO: 146769 - DNA, 20 bp, Artificial Sequence
  Description of Artificial Sequence: Synthetic oligonucleotide
  Target: LAMA2; (+) strand; PAM type: NRG; PAM sequence: CAG
agctggcttgttttatatcc

SEQ ID NO: 146770 - DNA, 20 bp, Artificial Sequence
  Description of Artificial Sequence: Synthetic oligonucleotide
  Target: LAMA2; (+) strand; PAM type: NRG; PAM sequence: CAG
cttgttttatatcccagaaa

SEQ ID NO: 146771 - DNA, 20 bp, Artificial Sequence
  Description of Artificial Sequence: Synthetic oligonucleotide
  Target: LAMA2; (+) strand; PAM type: NRG; PAM sequence: TGG
tttatatcccagaaacagct

SEQ ID NO: 146772 - DNA, 20 bp, Artificial Sequence
  Description of Artificial Sequence: Synthetic oligonucleotide
  Target: LAMA2; (+) strand; PAM type: NRG; PAM sequence: GGG
ttatatcccagaaacagctt

SEQ ID NO: 146773 - DNA, 20 bp, Artificial Sequence
  Description of Artificial Sequence: Synthetic oligonucleotide
  Target: LAMA2; (+) strand; PAM type: NRG; PAM sequence: AAG
ttgggactaactatattcac

SEQ ID NO: 146774 - DNA, 20 bp, Artificial Sequence
  Description of Artificial Sequence: Synthetic oligonucleotide
  Target: LAMA2; (+) strand; PAM type: NRG; PAM sequence: TGG
actatattcacaagatctct

SEQ ID NO: 146775 - DNA, 20 bp, Artificial Sequence
  Description of Artificial Sequence: Synthetic oligonucleotide
  Target: LAMA2; (+) strand; PAM type: NRG; PAM sequence: CAG
atattcacaagatctcttgg

SEQ ID NO: 146776 - DNA, 20 bp, Artificial Sequence
  Description of Artificial Sequence: Synthetic oligonucleotide
  Target: LAMA2; (+) strand; PAM type: NRG; PAM sequence: GAG
attcacaagatctcttggca

SEQ ID NO: 146777 - DNA, 20 bp, Artificial Sequence
  Description of Artificial Sequence: Synthetic oligonucleotide
  Target: LAMA2; (+) strand; PAM type: NRG; PAM sequence: TAG
cacaagatctcttggcagag

SEQ ID NO: 146778 - DNA, 20 bp, Artificial Sequence
  Description of Artificial Sequence: Synthetic oligonucleotide
  Target: LAMA2; (+) strand; PAM type: NRG; PAM sequence: AAG
gtagcttgatgaaaatacca

SEQ ID NO: 146779 - DNA, 20 bp, Artificial Sequence
  Description of Artificial Sequence: Synthetic oligonucleotide
  Target: LAMA2; (+) strand; PAM type: NRG; PAM sequence: GAG
gatgaaaataccaaagctgt

SEQ ID NO: 146780 - DNA, 20 bp, Artificial Sequence
  Description of Artificial Sequence: Synthetic oligonucleotide
  Target: LAMA2; (+) strand; PAM type: NRG; PAM sequence: AAG
gaaaataccaaagctgtgag

SEQ ID NO: 146781 - DNA, 20 bp, Artificial Sequence
  Description of Artificial Sequence: Synthetic oligonucleotide
  Target: LAMA2; (+) strand; PAM type: NRG; PAM sequence: TAG
cttttgctgaatccttcatg

SEQ ID NO: 146782 - DNA, 20 bp, Artificial Sequence
  Description of Artificial Sequence: Synthetic oligonucleotide
  Target: LAMA2; (+) strand; PAM type: NRG; PAM sequence: CGG
tccttcatgtagctatcaca

SEQ ID NO: 146783 - DNA, 20 bp, Artificial Sequence
  Description of Artificial Sequence: Synthetic oligonucleotide
  Target: LAMA2; (+) strand; PAM type: NRG; PAM sequence: GAG
cacggtttattaacctaaat

SEQ ID NO: 146784 - DNA, 20 bp, Artificial Sequence
  Description of Artificial Sequence: Synthetic oligonucleotide
  Target: LAMA2; (+) strand; PAM type: NRG; PAM sequence: AAG
atgtacaccttttttccaaa

SEQ ID NO: 146785 - DNA, 20 bp, Artificial Sequence
  Description of Artificial Sequence: Synthetic oligonucleotide
  Target: LAMA2; (+) strand; PAM type: NRG; PAM sequence: AGG
tgtacaccttttttccaaaa

SEQ ID NO: 146786 - DNA, 20 bp, Artificial Sequence
  Description of Artificial Sequence: Synthetic oligonucleotide
  Target: LAMA2; (+) strand; PAM type: NRG; PAM sequence: AAG
aaaaggtcctttgtatgttt

SEQ ID NO: 146787 - DNA, 20 bp, Artificial Sequence
  Description of Artificial Sequence: Synthetic oligonucleotide
  Target: LAMA2; (+) strand; PAM type: NRG; PAM sequence: GAG
ggtcctttgtatgtttaagt

SEQ ID NO: 146788 - DNA, 20 bp, Artificial Sequence
  Description of Artificial Sequence: Synthetic oligonucleotide
  Target: LAMA2; (+) strand; PAM type: NRG; PAM sequence: CGG
aaacttactgattcttcata

SEQ ID NO: 146789 - DNA, 20 bp, Artificial Sequence
  Description of Artificial Sequence: Synthetic oligonucleotide
  Target: LAMA2; (+) strand; PAM type: NRG; PAM sequence: CAG
ggcacaaacatgattcacca

SEQ ID NO: 146790 - DNA, 20 bp, Artificial Sequence
  Description of Artificial Sequence: Synthetic oligonucleotide
  Target: LAMA2; (+) strand; PAM type: NRG; PAM sequence: CAG
aaataaactctaataatgtt

SEQ ID NO: 146791 - DNA, 20 bp, Artificial Sequence
  Description of Artificial Sequence: Synthetic oligonucleotide
  Target: LAMA2; (+) strand; PAM type: NRG; PAM sequence: TAG
atgttcagaaactataatcc

SEQ ID NO: 146792 - DNA, 20 bp, Artificial Sequence
  Description of Artificial Sequence: Synthetic oligonucleotide
  Target: LAMA2; (+) strand; PAM type: NRG; PAM sequence: TAG
aaactataatcctagacatg

SEQ ID NO: 146793 - DNA, 20 bp, Artificial Sequence
  Description of Artificial Sequence: Synthetic oligonucleotide
  Target: LAMA2; (+) strand; PAM type: NRG; PAM sequence: AAG
gcgatttcctcctttctttc

SEQ ID NO: 146794 - DNA, 20 bp, Artificial Sequence
  Description of Artificial Sequence: Synthetic oligonucleotide
  Target: LAMA2; (+) strand; PAM type: NRG; PAM sequence: TAG
atttcctcctttctttcaag

SEQ ID NO: 146795 - DNA, 20 bp, Artificial Sequence
  Description of Artificial Sequence: Synthetic oligonucleotide
  Target: LAMA2; (+) strand; PAM type: NRG; PAM sequence: TGG
tttctttcaagtagtatttt

SEQ ID NO: 146796 - DNA, 20 bp, Artificial Sequence
  Description of Artificial Sequence: Synthetic oligonucleotide
  Target: LAMA2; (+) strand; PAM type: NRG; PAM sequence: GGG
ttctttcaagtagtattttt

SEQ ID NO: 146797 - DNA, 20 bp, Artificial Sequence
  Description of Artificial Sequence: Synthetic oligonucleotide
  Target: LAMA2; (+) strand; PAM type: NRG; PAM sequence: GGG
tctttcaagtagtatttttg

SEQ ID NO: 146798 - DNA, 20 bp, Artificial Sequence
  Description of Artificial Sequence: Synthetic oligonucleotide
  Target: LAMA2; (+) strand; PAM type: NRG; PAM sequence: CAG
tcaagtagtatttttgggga

SEQ ID NO: 146799 - DNA, 20 bp, Artificial Sequence
  Description of Artificial Sequence: Synthetic oligonucleotide
  Target: LAMA2; (+) strand; PAM type: NRG; PAM sequence: AAG
tagtatttttggggacagtc

SEQ ID NO: 146800 - DNA, 20 bp, Artificial Sequence
  Description of Artificial Sequence: Synthetic oligonucleotide
  Target: LAMA2; (+) strand; PAM type: NRG; PAM sequence: GAG
gtatttttggggacagtcaa

SEQ ID NO: 146801 - DNA, 20 bp, Artificial Sequence
  Description of Artificial Sequence: Synthetic oligonucleotide
  Target: LAMA2; (+) strand; PAM type: NRG; PAM sequence: GAG
atttttggggacagtcaaga

SEQ ID NO: 146802 - DNA, 20 bp, Artificial Sequence
  Description of Artificial Sequence: Synthetic oligonucleotide
  Target: LAMA2; (+) strand; PAM type: NRG; PAM sequence: TAG
acagtcaagagagaatttga

SEQ ID NO: 146803 - DNA, 20 bp, Artificial Sequence
  Description of Artificial Sequence: Synthetic oligonucleotide
  Target: LAMA2; (+) strand; PAM type: NRG; PAM sequence: AAG
agagaatttgatagaaatgt

SEQ ID NO: 146804 - DNA, 20 bp, Artificial Sequence
  Description of Artificial Sequence: Synthetic oligonucleotide
  Target: LAMA2; (+) strand; PAM type: NRG; PAM sequence: GAG
tttgatagaaatgtaagcct

SEQ ID NO: 146805 - DNA, 20 bp, Artificial Sequence
  Description of Artificial Sequence: Synthetic oligonucleotide
  Target: LAMA2; (+) strand; PAM type: NRG; PAM sequence: TGG
aaatgtaagcctgagttcaa

SEQ ID NO: 146806 - DNA, 20 bp, Artificial Sequence
  Description of Artificial Sequence: Synthetic oligonucleotide
  Target: LAMA2; (+) strand; PAM type: NRG; PAM sequence: TGG
aagcctgagttcaatggcac

SEQ ID NO: 146807 - DNA, 20 bp, Artificial Sequence
  Description of Artificial Sequence: Synthetic oligonucleotide
  Target: LAMA2; (+) strand; PAM type: NRG; PAM sequence: TAG
aatggcactggtgacttttt

SEQ ID NO: 146808 - DNA, 20 bp, Artificial Sequence
  Description of Artificial Sequence: Synthetic oligonucleotide
  Target: LAMA2; (+) strand; PAM type: NRG; PAM sequence: AGG
atggcactggtgactttttt

SEQ ID NO: 146809 - DNA, 20 bp, Artificial Sequence
  Description of Artificial Sequence: Synthetic oligonucleotide
  Target: LAMA2; (+) strand; PAM type: NRG; PAM sequence: AAG
tggtgacttttttaggtgcc

SEQ ID NO: 146810 - DNA, 20 bp, Artificial Sequence
  Description of Artificial Sequence: Synthetic oligonucleotide
  Target: LAMA2; (+) strand; PAM type: NRG; PAM sequence: AGG
ggtgacttttttaggtgcca

SEQ ID NO: 146811 - DNA, 20 bp, Artificial Sequence
  Description of Artificial Sequence: Synthetic oligonucleotide
  Target: LAMA2; (+) strand; PAM type: NRG; PAM sequence: CAG
ttaggtgccaaggttaatct

SEQ ID NO: 146812 - DNA, 20 bp, Artificial Sequence
  Description of Artificial Sequence: Synthetic oligonucleotide
  Target: LAMA2; (+) strand; PAM type: NRG; PAM sequence: GAG
aggtgccaaggttaatctca

SEQ ID NO: 146813 - DNA, 20 bp, Artificial Sequence
  Description of Artificial Sequence: Synthetic oligonucleotide
  Target: LAMA2; (+) strand; PAM type: NRG; PAM sequence: AGG
ggtgccaaggttaatctcag

SEQ ID NO: 146814 - DNA, 20 bp, Artificial Sequence
  Description of Artificial Sequence: Synthetic oligonucleotide
  Target: LAMA2; (+) strand; PAM type: NRG; PAM sequence: GGG
gtgccaaggttaatctcaga

SEQ ID NO: 146815 - DNA, 20 bp, Artificial Sequence
  Description of Artificial Sequence: Synthetic oligonucleotide
  Target: LAMA2; (+) strand; PAM type: NRG; PAM sequence: TAG
ggttaatctcagagggaaat

SEQ ID NO: 146816 - DNA, 20 bp, Artificial Sequence
  Description of Artificial Sequence: Synthetic oligonucleotide
  Target: LAMA2; (+) strand; PAM type: NRG; PAM sequence: TGG
cagagggaaattagttttaa

SEQ ID NO: 146817 - DNA, 20 bp, Artificial Sequence
  Description of Artificial Sequence: Synthetic oligonucleotide
  Target: LAMA2; (+) strand; PAM type: NRG; PAM sequence: AAG
catttaactctaacctcctt

SEQ ID NO: 146818 - DNA, 20 bp, Artificial Sequence
  Description of Artificial Sequence: Synthetic oligonucleotide
  Target: LAMA2; (+) strand; PAM type: NRG; PAM sequence: TGG
ctcaattctaaacacatttc

SEQ ID NO: 146819 - DNA, 20 bp, Artificial Sequence
  Description of Artificial Sequence: Synthetic oligonucleotide
  Target: LAMA2; (+) strand; PAM type: NRG; PAM sequence: TAG
cacatttctggctcacctgc

SEQ ID NO: 146820 - DNA, 20 bp, Artificial Sequence
  Description of Artificial Sequence: Synthetic oligonucleotide
  Target: LAMA2; (+) strand; PAM type: NRG; PAM sequence: AGG
acatttctggctcacctgct

SEQ ID NO: 146821 - DNA, 20 bp, Artificial Sequence
  Description of Artificial Sequence: Synthetic oligonucleotide
  Target: LAMA2; (+) strand; PAM type: NRG; PAM sequence: CAG
ctggctcacctgctaggtgc

SEQ ID NO: 146822 - DNA, 20 bp, Artificial Sequence
  Description of Artificial Sequence: Synthetic oligonucleotide
  Target: LAMA2; (+) strand; PAM type: NRG; PAM sequence: CGG
cctgctaggtgccagaaatg

SEQ ID NO: 146823 - DNA, 20 bp, Artificial Sequence
  Description of Artificial Sequence: Synthetic oligonucleotide
  Target: LAMA2; (+) strand; PAM type: NRG; PAM sequence: GAG
gtgccagaaatgcggatctt

SEQ ID NO: 146824 - DNA, 20 bp, Artificial Sequence
  Description of Artificial Sequence: Synthetic oligonucleotide
  Target: LAMA2; (+) strand; PAM type: NRG; PAM sequence: AGG
tgccagaaatgcggatcttg

SEQ ID NO: 146825 - DNA, 20 bp, Artificial Sequence
  Description of Artificial Sequence: Synthetic oligonucleotide
  Target: LAMA2; (+) strand; PAM type: NRG; PAM sequence: AAG
gcggatcttgaggaatatac

SEQ ID NO: 146826 - DNA, 20 bp, Artificial Sequence
  Description of Artificial Sequence: Synthetic oligonucleotide
  Target: LAMA2; (+) strand; PAM type: NRG; PAM sequence: TAG
caagatctgcttcactcttt

SEQ ID NO: 146827 - DNA, 20 bp, Artificial Sequence
  Description of Artificial Sequence: Synthetic oligonucleotide
  Target: LAMA2; (+) strand; PAM type: NRG; PAM sequence: TAG
ctcttttagaatccctgcat

SEQ ID NO: 146828 - DNA, 20 bp, Artificial Sequence
  Description of Artificial Sequence: Synthetic oligonucleotide
  Target: LAMA2; (+) strand; PAM type: NRG; PAM sequence: GAG
cttttagaatccctgcatta

SEQ ID NO: 146829 - DNA, 20 bp, Artificial Sequence
  Description of Artificial Sequence: Synthetic oligonucleotide
  Target: LAMA2; (+) strand; PAM type: NRG; PAM sequence: GAG
tttagaatccctgcattaga

SEQ ID NO: 146830 - DNA, 20 bp, Artificial Sequence
  Description of Artificial Sequence: Synthetic oligonucleotide
  Target: LAMA2; (+) strand; PAM type: NRG; PAM sequence: AGG
ttagaatccctgcattagag

SEQ ID NO: 146831 - DNA, 20 bp, Artificial Sequence
  Description of Artificial Sequence: Synthetic oligonucleotide
  Target: LAMA2; (+) strand; PAM type: NRG; PAM sequence: CAG
tccctgcattagagaggatt

SEQ ID NO: 146832 - DNA, 20 bp, Artificial Sequence
  Description of Artificial Sequence: Synthetic oligonucleotide
  Target: LAMA2; (+) strand; PAM type: NRG; PAM sequence: CAG
tagagaggattcagtatttt

SEQ ID NO: 146833 - DNA, 20 bp, Artificial Sequence
  Description of Artificial Sequence: Synthetic oligonucleotide
  Target: LAMA2; (+) strand; PAM type: NRG; PAM sequence: TAG
gtattttcagattcatattt

SEQ ID NO: 146834 - DNA, 20 bp, Artificial Sequence
  Description of Artificial Sequence: Synthetic oligonucleotide
  Target: LAMA2; (+) strand; PAM type: NRG; PAM sequence: AAG
ttttcagattcatattttag

SEQ ID NO: 146835 - DNA, 20 bp, Artificial Sequence
  Description of Artificial Sequence: Synthetic oligonucleotide
  Target: LAMA2; (+) strand; PAM type: NRG; PAM sequence: AAG
attgcattctattccttact

SEQ ID NO: 146836 - DNA, 20 bp, Artificial Sequence
  Description of Artificial Sequence: Synthetic oligonucleotide
  Target: LAMA2; (+) strand; PAM type: NRG; PAM sequence: CAG
ctattccttactaagcatcc

SEQ ID NO: 146837 - DNA, 20 bp, Artificial Sequence
  Description of Artificial Sequence: Synthetic oligonucleotide
  Target: LAMA2; (+) strand; PAM type: NRG; PAM sequence: AGG
tattccttactaagcatccc

SEQ ID NO: 146838 - DNA, 20 bp, Artificial Sequence
  Description of Artificial Sequence: Synthetic oligonucleotide
  Target: LAMA2; (+) strand; PAM type: NRG; PAM sequence: TAG
tccttactaagcatcccagg

SEQ ID NO: 146839 - DNA, 20 bp, Artificial Sequence
  Description of Artificial Sequence: Synthetic oligonucleotide
  Target: LAMA2; (+) strand; PAM type: NRG; PAM sequence: TAG
gcatcccaggtagattcaat

SEQ ID NO: 146840 - DNA, 20 bp, Artificial Sequence
  Description of Artificial Sequence: Synthetic oligonucleotide
  Target: LAMA2; (+) strand; PAM type: NRG; PAM sequence: AGG
catcccaggtagattcaatt

SEQ ID NO: 146841 - DNA, 20 bp, Artificial Sequence
  Description of Artificial Sequence: Synthetic oligonucleotide
  Target: LAMA2; (+) strand; PAM type: NRG; PAM sequence: TGG
cccaggtagattcaattagg

SEQ ID NO: 146842 - DNA, 20 bp, Artificial Sequence
  Description of Artificial Sequence: Synthetic oligonucleotide
  Target: LAMA2; (+) strand; PAM type: NRG; PAM sequence: GAG
catattcatatttttatcat

SEQ ID NO: 146843 - DNA, 20 bp, Artificial Sequence
  Description of Artificial Sequence: Synthetic oligonucleotide
  Target: LAMA2; (+) strand; PAM type: NRG; PAM sequence: AGG
atattcatatttttatcatg

SEQ ID NO: 146844 - DNA, 20 bp, Artificial Sequence
  Description of Artificial Sequence: Synthetic oligonucleotide
  Target: LAMA2; (+) strand; PAM type: NRG; PAM sequence: GAG
tttttatcatgaggcatttt

SEQ ID NO: 146845 - DNA, 20 bp, Artificial Sequence
  Description of Artificial Sequence: Synthetic oligonucleotide
  Target: LAMA2; (+) strand; PAM type: NRG; PAM sequence: CAG
gagtctattctttgtgacac

SEQ ID NO: 146846 - DNA, 20 bp, Artificial Sequence
  Description of Artificial Sequence: Synthetic oligonucleotide
  Target: LAMA2; (+) strand; PAM type: NRG; PAM sequence: TAG
attctttgtgacaccagaat

SEQ ID NO: 146847 - DNA, 20 bp, Artificial Sequence
  Description of Artificial Sequence: Synthetic oligonucleotide
  Target: LAMA2; (+) strand; PAM type: NRG; PAM sequence: CAG
ccagaattagtttctcatct

SEQ ID NO: 146848 - DNA, 20 bp, Artificial Sequence
  Description of Artificial Sequence: Synthetic oligonucleotide
  Target: LAMA2; (+) strand; PAM type: NRG; PAM sequence: GAG
agaattagtttctcatctca

SEQ ID NO: 146849 - DNA, 20 bp, Artificial Sequence
  Description of Artificial Sequence: Synthetic oligonucleotide
  Target: LAMA2; (+) strand; PAM type: NRG; PAM sequence: TGG
cagagtttgctgtatttctc

SEQ ID NO: 146850 - DNA, 20 bp, Artificial Sequence
  Description of Artificial Sequence: Synthetic oligonucleotide
  Target: LAMA2; (+) strand; PAM type: NRG; PAM sequence: AAG
ctgtatttctctggtgactc

SEQ ID NO: 146851 - DNA, 20 bp, Artificial Sequence
  Description of Artificial Sequence: Synthetic oligonucleotide
  Target: LAMA2; (+) strand; PAM type: NRG; PAM sequence: TAG
tatttctctggtgactcaag

SEQ ID NO: 146852 - DNA, 20 bp, Artificial Sequence
  Description of Artificial Sequence: Synthetic oligonucleotide
  Target: LAMA2; (+) strand; PAM type: NRG; PAM sequence: TGG
tggtgactcaagtagtttat

SEQ ID NO: 146853 - DNA, 20 bp, Artificial Sequence
  Description of Artificial Sequence: Synthetic oligonucleotide
  Target: LAMA2; (+) strand; PAM type: NRG; PAM sequence: CAG
tgactcaagtagtttattgg

SEQ ID NO: 146854 - DNA, 20 bp, Artificial Sequence
  Description of Artificial Sequence: Synthetic oligonucleotide
  Target: LAMA2; (+) strand; PAM type: NRG; PAM sequence: CAG
tcaagtagtttattggcagt

SEQ ID NO: 146855 - DNA, 20 bp, Artificial Sequence
  Description of Artificial Sequence: Synthetic oligonucleotide
  Target: LAMA2; (+) strand; PAM type: NRG; PAM sequence: AAG
tattggcagtcagtttgtaa

SEQ ID NO: 146856 - DNA, 20 bp, Artificial Sequence
  Description of Artificial Sequence: Synthetic oligonucleotide
  Target: LAMA2; (+) strand; PAM type: NRG; PAM sequence: AGG
attggcagtcagtttgtaaa

SEQ ID NO: 146857 - DNA, 20 bp, Artificial Sequence
  Description of Artificial Sequence: Synthetic oligonucleotide
  Target: LAMA2; (+) strand; PAM type: NRG; PAM sequence: TGG
tcagtttgtaaaaggctccc

SEQ ID NO: 146858 - DNA, 20 bp, Artificial Sequence
  Description of Artificial Sequence: Synthetic oligonucleotide
  Target: LAMA2; (+) strand; PAM type: NRG; PAM sequence: GGG
cagtttgtaaaaggctccct

SEQ ID NO: 146859 - DNA, 20 bp, Artificial Sequence
  Description of Artificial Sequence: Synthetic oligonucleotide
  Target: LAMA2; (+) strand; PAM type: NRG; PAM sequence: CAG
tccctgggattatctaaatg

SEQ ID NO: 146860 - DNA, 20 bp, Artificial Sequence
  Description of Artificial Sequence: Synthetic oligonucleotide
  Target: LAMA2; (+) strand; PAM type: NRG; PAM sequence: AGG
ccctgggattatctaaatgc

SEQ ID NO: 146861 - DNA, 20 bp, Artificial Sequence
  Description of Artificial Sequence: Synthetic oligonucleotide
  Target: LAMA2; (+) strand; PAM type: NRG; PAM sequence: TAG
attatctaaatgcaggacgt

SEQ ID NO: 146862 - DNA, 20 bp, Artificial Sequence
  Description of Artificial Sequence: Synthetic oligonucleotide
  Target: LAMA2; (+) strand; PAM type: NRG; PAM sequence: AGG
ttatctaaatgcaggacgtt

SEQ ID NO: 146863 - DNA, 20 bp, Artificial Sequence
  Description of Artificial Sequence: Synthetic oligonucleotide
  Target: LAMA2; (+) strand; PAM type: NRG; PAM sequence: TGG
taaatgcaggacgttaggaa

SEQ ID NO: 146864 - DNA, 20 bp, Artificial Sequence
  Description of Artificial Sequence: Synthetic oligonucleotide
  Target: LAMA2; (+) strand; PAM type: NRG; PAM sequence: AAG
acatgatatatcatcttaca

SEQ ID NO: 146865 - DNA, 20 bp, Artificial Sequence
  Description of Artificial Sequence: Synthetic oligonucleotide
  Target: LAMA2; (+) strand; PAM type: NRG; PAM sequence: TGG
tgatatatcatcttacaaag

SEQ ID NO: 146866 - DNA, 20 bp, Artificial Sequence
  Description of Artificial Sequence: Synthetic oligonucleotide
  Target: LAMA2; (+) strand; PAM type: NRG; PAM sequence: CAG
tacaaagtggatgaaaattc

SEQ ID NO: 146867 - DNA, 20 bp, Artificial Sequence
  Description of Artificial Sequence: Synthetic oligonucleotide
  Target: LAMA2; (+) strand; PAM type: NRG; PAM sequence: TGG
aaagtggatgaaaattccag

SEQ ID NO: 146868 - DNA, 20 bp, Artificial Sequence
  Description of Artificial Sequence: Synthetic oligonucleotide
  Target: LAMA2; (+) strand; PAM type: NRG; PAM sequence: GGG
aagtggatgaaaattccagt

SEQ ID NO: 146869 - DNA, 20 bp, Artificial Sequence
  Description of Artificial Sequence: Synthetic oligonucleotide
  Target: LAMA2; (+) strand; PAM type: NRG; PAM sequence: GAG
aaattccagtgggtgacctt

SEQ ID NO: 146870 - DNA, 20 bp, Artificial Sequence
  Description of Artificial Sequence: Synthetic oligonucleotide
  Target: LAMA2; (+) strand; PAM type: NRG; PAM sequence: CAG
cagtgggtgaccttgagtca

SEQ ID NO: 146871 - DNA, 20 bp, Artificial Sequence
  Description of Artificial Sequence: Synthetic oligonucleotide
  Target: LAMA2; (+) strand; PAM type: NRG; PAM sequence: CAG
gaccttgagtcacagctcct

SEQ ID NO: 146872 - DNA, 20 bp, Artificial Sequence
  Description of Artificial Sequence: Synthetic oligonucleotide
  Target: LAMA2; (+) strand; PAM type: NRG; PAM sequence: AAG
gcacacactgtcctgtaccc

SEQ ID NO: 146873 - DNA, 20 bp, Artificial Sequence
  Description of Artificial Sequence: Synthetic oligonucleotide
  Target: LAMA2; (+) strand; PAM type: NRG; PAM sequence: CAG
tcctgtacccaagcatctcc

SEQ ID NO: 146874 - DNA, 20 bp, Artificial Sequence
  Description of Artificial Sequence: Synthetic oligonucleotide
  Target: LAMA2; (+) strand; PAM type: NRG; PAM sequence: TAG
gtacccaagcatctcccaga

SEQ ID NO: 146875 - DNA, 20 bp, Artificial Sequence
  Description of Artificial Sequence: Synthetic oligonucleotide
  Target: LAMA2; (+) strand; PAM type: NRG; PAM sequence: CAG
caagcatctcccagatagca

SEQ ID NO: 146876 - DNA, 20 bp, Artificial Sequence
  Description of Artificial Sequence: Synthetic oligonucleotide
  Target: LAMA2; (+) strand; PAM type: NRG; PAM sequence: TAG
ttcctgcatccctgtacctt

SEQ ID NO: 146877 - DNA, 20 bp, Artificial Sequence
  Description of Artificial Sequence: Synthetic oligonucleotide
  Target: LAMA2; (+) strand; PAM type: NRG; PAM sequence: GAG
ttgtgtgtgtatgtgtgtgt

SEQ ID NO: 146878 - DNA, 20 bp, Artificial Sequence
  Description of Artificial Sequence: Synthetic oligonucleotide
  Target: LAMA2; (+) strand; PAM type: NRG; PAM sequence: GAG
gtgtatgtgtgtgtgagtgt

SEQ ID NO: 146879 - DNA, 20 bp, Artificial Sequence
  Description of Artificial Sequence: Synthetic oligonucleotide
  Target: LAMA2; (+) strand; PAM type: NRG; PAM sequence: CAG
tgagtgtgtatgtgtatttt

SEQ ID NO: 146880 - DNA, 20 bp, Artificial Sequence
  Description of Artificial Sequence: Synthetic oligonucleotide
  Target: LAMA2; (+) strand; PAM type: NRG; PAM sequence: TGG
ttcactttctttaacaattt

SEQ ID NO: 146881 - DNA, 20 bp, Artificial Sequence
  Description of Artificial Sequence: Synthetic oligonucleotide
  Target: LAMA2; (+) strand; PAM type: NRG; PAM sequence: TGG
tttctttaacaattttggtt

SEQ ID NO: 146882 - DNA, 20 bp, Artificial Sequence
  Description of Artificial Sequence: Synthetic oligonucleotide
  Target: LAMA2; (+) strand; PAM type: NRG; PAM sequence: TAG
gtttggttcaatttgttgca

SEQ ID NO: 146883 - DNA, 20 bp, Artificial Sequence
  Description of Artificial Sequence: Synthetic oligonucleotide
  Target: LAMA2; (+) strand; PAM type: NRG; PAM sequence: AGG
tttggttcaatttgttgcat

SEQ ID NO: 146884 - DNA, 20 bp, Artificial Sequence
  Description of Artificial Sequence: Synthetic oligonucleotide
  Target: LAMA2; (+) strand; PAM type: NRG; PAM sequence: CAG
aggtaataataatccattta

SEQ ID NO: 146885 - DNA, 20 bp, Artificial Sequence
  Description of Artificial Sequence: Synthetic oligonucleotide
  Target: LAMA2; (+) strand; PAM type: NRG; PAM sequence: TAG
ccatttacagaatacaaaaa

SEQ ID NO: 146886 - DNA, 20 bp, Artificial Sequence
  Description of Artificial Sequence: Synthetic oligonucleotide
  Target: LAMA2; (+) strand; PAM type: NRG; PAM sequence: AAG
acagaatacaaaaatagtgt

SEQ ID NO: 146887 - DNA, 20 bp, Artificial Sequence
  Description of Artificial Sequence: Synthetic oligonucleotide
  Target: LAMA2; (+) strand; PAM type: NRG; PAM sequence: GAG
cttcttcctatctgtatgtt

SEQ ID NO: 146888 - DNA, 20 bp, Artificial Sequence
  Description of Artificial Sequence: Synthetic oligonucleotide
  Target: LAMA2; (+) strand; PAM type: NRG; PAM sequence: GAG
tcttcctatctgtatgttga

SEQ ID NO: 146889 - DNA, 20 bp, Artificial Sequence
  Description of Artificial Sequence: Synthetic oligonucleotide
  Target: LAMA2; (+) strand; PAM type: NRG; PAM sequence: TGG
agattcctcattctttttta

SEQ ID NO: 146890 - DNA, 20 bp, Artificial Sequence
  Description of Artificial Sequence: Synthetic oligonucleotide
  Target: LAMA2; (+) strand; PAM type: NRG; PAM sequence: CAG
ctcattcttttttatggttg

SEQ ID NO: 146891 - DNA, 20 bp, Artificial Sequence
  Description of Artificial Sequence: Synthetic oligonucleotide
  Target: LAMA2; (+) strand; PAM type: NRG; PAM sequence: CAG
gttgcagataattcattatg

SEQ ID NO: 146892 - DNA, 20 bp, Artificial Sequence
  Description of Artificial Sequence: Synthetic oligonucleotide
  Target: LAMA2; (+) strand; PAM type: NRG; PAM sequence: CAG
agatatacaatttatttaac

SEQ ID NO: 146893 - DNA, 20 bp, Artificial Sequence
  Description of Artificial Sequence: Synthetic oligonucleotide
  Target: LAMA2; (+) strand; PAM type: NRG; PAM sequence: TGG
tttaaccagtcccatattga

SEQ ID NO: 146894 - DNA, 20 bp, Artificial Sequence
  Description of Artificial Sequence: Synthetic oligonucleotide
  Target: LAMA2; (+) strand; PAM type: NRG; PAM sequence: TAG
agtcccatattgatggatat

SEQ ID NO: 146895 - DNA, 20 bp, Artificial Sequence
  Description of Artificial Sequence: Synthetic oligonucleotide
  Target: LAMA2; (+) strand; PAM type: NRG; PAM sequence: AGG
gtcccatattgatggatatt

SEQ ID NO: 146896 - DNA, 20 bp, Artificial Sequence
  Description of Artificial Sequence: Synthetic oligonucleotide
  Target: LAMA2; (+) strand; PAM type: NRG; PAM sequence: CAG
gatggatattaggttatttc

SEQ ID NO: 146897 - DNA, 20 bp, Artificial Sequence
  Description of Artificial Sequence: Synthetic oligonucleotide
  Target: LAMA2; (+) strand; PAM type: NRG; PAM sequence: AAG
gtcctttgatgtgaccaaaa

SEQ ID NO: 146898 - DNA, 20 bp, Artificial Sequence
  Description of Artificial Sequence: Synthetic oligonucleotide
  Target: LAMA2; (+) strand; PAM type: NRG; PAM sequence: AAG
attataataaaaaatgctga

SEQ ID NO: 146899 - DNA, 20 bp, Artificial Sequence
  Description of Artificial Sequence: Synthetic oligonucleotide
  Target: LAMA2; (+) strand; PAM type: NRG; PAM sequence: CAG
aagaataatattgtctttgt

SEQ ID NO: 146900 - DNA, 20 bp, Artificial Sequence
  Description of Artificial Sequence: Synthetic oligonucleotide
  Target: LAMA2; (+) strand; PAM type: NRG; PAM sequence: TGG
taatattgtctttgtcagtt

SEQ ID NO: 146901 - DNA, 20 bp, Artificial Sequence
  Description of Artificial Sequence: Synthetic oligonucleotide
  Target: LAMA2; (+) strand; PAM type: NRG; PAM sequence: GGG
aatattgtctttgtcagttt

SEQ ID NO: 146902 - DNA, 20 bp, Artificial Sequence
  Description of Artificial Sequence: Synthetic oligonucleotide
  Target: LAMA2; (+) strand; PAM type: NRG; PAM sequence: CGG
attgtctttgtcagtttggg

SEQ ID NO: 146903 - DNA, 20 bp, Artificial Sequence
  Description of Artificial Sequence: Synthetic oligonucleotide
  Target: LAMA2; (+) strand; PAM type: NRG; PAM sequence: AAG
ttgtcagtttgggcggccat

SEQ ID NO: 146904 - DNA, 20 bp, Artificial Sequence
  Description of Artificial Sequence: Synthetic oligonucleotide
  Target: LAMA2; (+) strand; PAM type: NRG; PAM sequence: AAG
cagtttgggcggccataaga

SEQ ID NO: 146905 - DNA, 20 bp, Artificial Sequence
  Description of Artificial Sequence: Synthetic oligonucleotide
  Target: LAMA2; (+) strand; PAM type: NRG; PAM sequence: TAG
gcggccataagaaagttcca

SEQ ID NO: 146906 - DNA, 20 bp, Artificial Sequence
  Description of Artificial Sequence: Synthetic oligonucleotide
  Target: LAMA2; (+) strand; PAM type: NRG; PAM sequence: TAG
cataagaaagttccatagac

SEQ ID NO: 146907 - DNA, 20 bp, Artificial Sequence
  Description of Artificial Sequence: Synthetic oligonucleotide
  Target: LAMA2; (+) strand; PAM type: NRG; PAM sequence: AGG
ataagaaagttccatagact

SEQ ID NO: 146908 - DNA, 20 bp, Artificial Sequence
  Description of Artificial Sequence: Synthetic oligonucleotide
  Target: LAMA2; (+) strand; PAM type: NRG; PAM sequence: TGG
agaaagttccatagactagg

SEQ ID NO: 146909 - DNA, 20 bp, Artificial Sequence
  Description of Artificial Sequence: Synthetic oligonucleotide
  Target: LAMA2; (+) strand; PAM type: NRG; PAM sequence: GGG
gaaagttccatagactaggt

SEQ ID NO: 146910 - DNA, 20 bp, Artificial Sequence
  Description of Artificial Sequence: Synthetic oligonucleotide
  Target: LAMA2; (+) strand; PAM type: NRG; PAM sequence: AAG
agactaggtgggttgtaaac

SEQ ID NO: 146911 - DNA, 20 bp, Artificial Sequence
  Description of Artificial Sequence: Synthetic oligonucleotide
  Target: LAMA2; (+) strand; PAM type: NRG; PAM sequence: GAG
actaggtgggttgtaaacaa

SEQ ID NO: 146912 - DNA, 20 bp, Artificial Sequence
  Description of Artificial Sequence: Synthetic oligonucleotide
  Target: LAMA2; (+) strand; PAM type: NRG; PAM sequence: CAG
aagagaaatttatttcccca

SEQ ID NO: 146913 - DNA, 20 bp, Artificial Sequence
  Description of Artificial Sequence: Synthetic oligonucleotide
  Target: LAMA2; (+) strand; PAM type: NRG; PAM sequence: TGG
aatttatttccccacagtac

SEQ ID NO: 146914 - DNA, 20 bp, Artificial Sequence
  Description of Artificial Sequence: Synthetic oligonucleotide
  Target: LAMA2; (+) strand; PAM type: NRG; PAM sequence: GAG
tttatttccccacagtactg

SEQ ID NO: 146915 - DNA, 20 bp, Artificial Sequence
  Description of Artificial Sequence: Synthetic oligonucleotide
  Target: LAMA2; (+) strand; PAM type: NRG; PAM sequence: AGG
ttatttccccacagtactgg

SEQ ID NO: 146916 - DNA, 20 bp, Artificial Sequence
  Description of Artificial Sequence: Synthetic oligonucleotide
  Target: LAMA2; (+) strand; PAM type: NRG; PAM sequence: GAG
gtactggaggctgaaaatct

SEQ ID NO: 146917 - DNA, 20 bp, Artificial Sequence
  Description of Artificial Sequence: Synthetic oligonucleotide
  Target: LAMA2; (+) strand; PAM type: NRG; PAM sequence: CAG
ggaggctgaaaatctgagat

SEQ ID NO: 146918 - DNA, 20 bp, Artificial Sequence
  Description of Artificial Sequence: Synthetic oligonucleotide
  Target: LAMA2; (+) strand; PAM type: NRG; PAM sequence: AGG
gaggctgaaaatctgagatc

SEQ ID NO: 146919 - DNA, 20 bp, Artificial Sequence
  Description of Artificial Sequence: Synthetic oligonucleotide
  Target: LAMA2; (+) strand; PAM type: NRG; PAM sequence: GGG
aggctgaaaatctgagatca

SEQ ID NO: 146920 - DNA, 20 bp, Artificial Sequence
  Description of Artificial Sequence: Synthetic oligonucleotide
  Target: LAMA2; (+) strand; PAM type: NRG; PAM sequence: TGG
ctgagatcagggtgtccgca

SEQ ID NO: 146921 - DNA, 20 bp, Artificial Sequence
  Description of Artificial Sequence: Synthetic oligonucleotide
  Target: LAMA2; (+) strand; PAM type: NRG; PAM sequence: TGG
gtgtccgcatggttatgctt

SEQ ID NO: 146922 - DNA, 20 bp, Artificial Sequence
  Description of Artificial Sequence: Synthetic oligonucleotide
  Target: LAMA2; (+) strand; PAM type: NRG; PAM sequence: GAG
ccgcatggttatgctttggt

SEQ ID NO: 146923 - DNA, 20 bp, Artificial Sequence
  Description of Artificial Sequence: Synthetic oligonucleotide
  Target: LAMA2; (+) strand; PAM type: NRG; PAM sequence: AGG
cgcatggttatgctttggtg

SEQ ID NO: 146924 - DNA, 20 bp, Artificial Sequence
  Description of Artificial Sequence: Synthetic oligonucleotide
  Target: LAMA2; (+) strand; PAM type: NRG; PAM sequence: CGG
tgctttggtgaggactgttt

SEQ ID NO: 146925 - DNA, 20 bp, Artificial Sequence
  Description of Artificial Sequence: Synthetic oligonucleotide
  Target: LAMA2; (+) strand; PAM type: NRG; PAM sequence: GGG
gctttggtgaggactgtttc

SEQ ID NO: 146926 - DNA, 20 bp, Artificial Sequence
  Description of Artificial Sequence: Synthetic oligonucleotide
  Target: LAMA2; (+) strand; PAM type: NRG; PAM sequence: GGG
ctttggtgaggactgtttcg

SEQ ID NO: 146927 - DNA, 20 bp, Artificial Sequence
  Description of Artificial Sequence: Synthetic oligonucleotide
  Target: LAMA2; (+) strand; PAM type: NRG; PAM sequence: CAG
gaggactgtttcggggcttg

SEQ ID NO: 146928 - DNA, 20 bp, Artificial Sequence
  Description of Artificial Sequence: Synthetic oligonucleotide
  Target: LAMA2; (+) strand; PAM type: NRG; PAM sequence: TAG
tgcagactgctgacttcttg

SEQ ID NO: 146929 - DNA, 20 bp, Artificial Sequence
  Description of Artificial Sequence: Synthetic oligonucleotide
  Target: LAMA2; (+) strand; PAM type: NRG; PAM sequence: TGG
tgacttcttgtagcctcaca

SEQ ID NO: 146930 - DNA, 20 bp, Artificial Sequence
  Description of Artificial Sequence: Synthetic oligonucleotide
  Target: LAMA2; (+) strand; PAM type: NRG; PAM sequence: AAG
ttgtagcctcacatggttga

SEQ ID NO: 146931 - DNA, 20 bp, Artificial Sequence
  Description of Artificial Sequence: Synthetic oligonucleotide
  Target: LAMA2; (+) strand; PAM type: NRG; PAM sequence: GAG
gtagcctcacatggttgaaa

SEQ ID NO: 146932 - DNA, 20 bp, Artificial Sequence
  Description of Artificial Sequence: Synthetic oligonucleotide
  Target: LAMA2; (+) strand; PAM type: NRG; PAM sequence: GAG
agcctcacatggttgaaaga

SEQ ID NO: 146933 - DNA, 20 bp, Artificial Sequence
  Description of Artificial Sequence: Synthetic oligonucleotide
  Target: LAMA2; (+) strand; PAM type: NRG; PAM sequence: TAG
tcacatggttgaaagagagc

SEQ ID NO: 146934 - DNA, 20 bp, Artificial Sequence
  Description of Artificial Sequence: Synthetic oligonucleotide
  Target: LAMA2; (+) strand; PAM type: NRG; PAM sequence: TAG
atggttgaaagagagctagc

SEQ ID NO: 146935 - DNA, 20 bp, Artificial Sequence
  Description of Artificial Sequence: Synthetic oligonucleotide
  Target: LAMA2; (+) strand; PAM type: NRG; PAM sequence: TGG
aagagagctagctagctctc

SEQ ID NO: 146936 - DNA, 20 bp, Artificial Sequence
  Description of Artificial Sequence: Synthetic oligonucleotide
  Target: LAMA2; (+) strand; PAM type: NRG; PAM sequence: TAG
gctctctggcctctttttat

SEQ ID NO: 146937 - DNA, 20 bp, Artificial Sequence
  Description of Artificial Sequence: Synthetic oligonucleotide
  Target: LAMA2; (+) strand; PAM type: NRG; PAM sequence: AGG
ctctctggcctctttttatt

SEQ ID NO: 146938 - DNA, 20 bp, Artificial Sequence
  Description of Artificial Sequence: Synthetic oligonucleotide
  Target: LAMA2; (+) strand; PAM type: NRG; PAM sequence: CAG
attaggtcactaatctcatt

SEQ ID NO: 146939 - DNA, 20 bp, Artificial Sequence
  Description of Artificial Sequence: Synthetic oligonucleotide
  Target: LAMA2; (+) strand; PAM type: NRG; PAM sequence: AGG
ttaggtcactaatctcattc

SEQ ID NO: 146940 - DNA, 20 bp, Artificial Sequence
  Description of Artificial Sequence: Synthetic oligonucleotide
  Target: LAMA2; (+) strand; PAM type: NRG; PAM sequence: GAG
aggtcactaatctcattcag

SEQ ID NO: 146941 - DNA, 20 bp, Artificial Sequence
  Description of Artificial Sequence: Synthetic oligonucleotide
  Target: LAMA2; (+) strand; PAM type: NRG; PAM sequence: AGG
ggtcactaatctcattcagg

SEQ ID NO: 146942 - DNA, 20 bp, Artificial Sequence
  Description of Artificial Sequence: Synthetic oligonucleotide
  Target: LAMA2; (+) strand; PAM type: NRG; PAM sequence: GGG
gtcactaatctcattcagga

SEQ ID NO: 146943 - DNA, 20 bp, Artificial Sequence
  Description of Artificial Sequence: Synthetic oligonucleotide
  Target: LAMA2; (+) strand; PAM type: NRG; PAM sequence: CAG
attcaggagggctccaccct

SEQ ID NO: 146944 - DNA, 20 bp, Artificial Sequence
  Description of Artificial Sequence: Synthetic oligonucleotide
  Target: LAMA2; (+) strand; PAM type: NRG; PAM sequence: AGG
ttcaggagggctccaccctc

SEQ ID NO: 146945 - DNA, 20 bp, Artificial Sequence
  Description of Artificial Sequence: Synthetic oligonucleotide
  Target: LAMA2; (+) strand; PAM type: NRG; PAM sequence: TGG
cccccaaatatcatcacatt

SEQ ID NO: 146946 - DNA, 20 bp, Artificial Sequence
  Description of Artificial Sequence: Synthetic oligonucleotide
  Target: LAMA2; (+) strand; PAM type: NRG; PAM sequence: GGG
ccccaaatatcatcacattt

SEQ ID NO: 146947 - DNA, 20 bp, Artificial Sequence
  Description of Artificial Sequence: Synthetic oligonucleotide
  Target: LAMA2; (+) strand; PAM type: NRG; PAM sequence: TAG
aatatcatcacatttgggat

SEQ ID NO: 146948 - DNA, 20 bp, Artificial Sequence
  Description of Artificial Sequence: Synthetic oligonucleotide
  Target: LAMA2; (+) strand; PAM type: NRG; PAM sequence: AGG
atatcatcacatttgggatt

SEQ ID NO: 146949 - DNA, 20 bp, Artificial Sequence
  Description of Artificial Sequence: Synthetic oligonucleotide
  Target: LAMA2; (+) strand; PAM type: NRG; PAM sequence: GGG
tatcatcacatttgggatta

SEQ ID NO: 146950 - DNA, 20 bp, Artificial Sequence
  Description of Artificial Sequence: Synthetic oligonucleotide
  Target: LAMA2; (+) strand; PAM type: NRG; PAM sequence: TAG
gggtttcaacatatgaattt

SEQ ID NO: 146951 - DNA, 20 bp, Artificial Sequence
  Description of Artificial Sequence: Synthetic oligonucleotide
  Target: LAMA2; (+) strand; PAM type: NRG; PAM sequence: TAG
tttcaacatatgaattttag

SEQ ID NO: 146952 - DNA, 20 bp, Artificial Sequence
  Description of Artificial Sequence: Synthetic oligonucleotide
  Target: LAMA2; (+) strand; PAM type: NRG; PAM sequence: AGG
ttcaacatatgaattttagt

SEQ ID NO: 146953 - DNA, 20 bp, Artificial Sequence
  Description of Artificial Sequence: Synthetic oligonucleotide
  Target: LAMA2; (+) strand; PAM type: NRG; PAM sequence: GGG
tcaacatatgaattttagta

SEQ ID NO: 146954 - DNA, 20 bp, Artificial Sequence
  Description of Artificial Sequence: Synthetic oligonucleotide
  Target: LAMA2; (+) strand; PAM type: NRG; PAM sequence: GGG
caacatatgaattttagtag

SEQ ID NO: 146955 - DNA, 20 bp, Artificial Sequence
  Description of Artificial Sequence: Synthetic oligonucleotide
  Target: LAMA2; (+) strand; PAM type: NRG; PAM sequence: GGG
aacatatgaattttagtagg

SEQ ID NO: 146956 - DNA, 20 bp, Artificial Sequence
  Description of Artificial Sequence: Synthetic oligonucleotide
  Target: LAMA2; (+) strand; PAM type: NRG; PAM sequence: GGG
acatatgaattttagtaggg

SEQ ID NO: 146957 - DNA, 20 bp, Artificial Sequence
  Description of Artificial Sequence: Synthetic oligonucleotide
  Target: LAMA2; (+) strand; PAM type: NRG; PAM sequence: GAG
atatgaattttagtaggggg

SEQ ID NO: 146958 - DNA, 20 bp, Artificial Sequence
  Description of Artificial Sequence: Synthetic oligonucleotide
  Target: LAMA2; (+) strand; PAM type: NRG; PAM sequence: AGG
tatgaattttagtagggggg

SEQ ID NO: 146959 - DNA, 20 bp, Artificial Sequence
  Description of Artificial Sequence: Synthetic oligonucleotide
  Target: LAMA2; (+) strand; PAM type: NRG; PAM sequence: CAG
gtaggggggaggcaaacatt

SEQ ID NO: 146960 - DNA, 20 bp, Artificial Sequence
  Description of Artificial Sequence: Synthetic oligonucleotide
  Target: LAMA2; (+) strand; PAM type: NRG; PAM sequence: TAG
gaggcaaacattcagtccat

SEQ ID NO: 146961 - DNA, 20 bp, Artificial Sequence
  Description of Artificial Sequence: Synthetic oligonucleotide
  Target: LAMA2; (+) strand; PAM type: NRG; PAM sequence: CAG
ttcagtccattagccatatt

SEQ ID NO: 146962 - DNA, 20 bp, Artificial Sequence
  Description of Artificial Sequence: Synthetic oligonucleotide
  Target: LAMA2; (+) strand; PAM type: NRG; PAM sequence: TAG
tattcagttcacctgtaata

SEQ ID NO: 146963 - DNA, 20 bp, Artificial Sequence
  Description of Artificial Sequence: Synthetic oligonucleotide
  Target: LAMA2; (+) strand; PAM type: NRG; PAM sequence: TAG
tctgtattattttatgtctg

SEQ ID NO: 146964 - DNA, 20 bp, Artificial Sequence
  Description of Artificial Sequence: Synthetic oligonucleotide
  Target: LAMA2; (+) strand; PAM type: NRG; PAM sequence: TAG
tatgtctgtagaataattcc

SEQ ID NO: 146965 - DNA, 20 bp, Artificial Sequence
  Description of Artificial Sequence: Synthetic oligonucleotide
  Target: LAMA2; (+) strand; PAM type: NRG; PAM sequence: AAG
gtctgtagaataattcctag

SEQ ID NO: 146966 - DNA, 20 bp, Artificial Sequence
  Description of Artificial Sequence: Synthetic oligonucleotide
  Target: LAMA2; (+) strand; PAM type: NRG; PAM sequence: TGG
tgtagaataattcctagaag

SEQ ID NO: 146967 - DNA, 20 bp, Artificial Sequence
  Description of Artificial Sequence: Synthetic oligonucleotide
  Target: LAMA2; (+) strand; PAM type: NRG; PAM sequence: TAG
attcctagaagtggaattgc

SEQ ID NO: 146968 - DNA, 20 bp, Artificial Sequence
  Description of Artificial Sequence: Synthetic oligonucleotide
  Target: LAMA2; (+) strand; PAM type: NRG; PAM sequence: CAG
tagaagtggaattgctagct

SEQ ID NO: 146969 - DNA, 20 bp, Artificial Sequence
  Description of Artificial Sequence: Synthetic oligonucleotide
  Target: LAMA2; (+) strand; PAM type: NRG; PAM sequence: TAG
ctgtgtgtttctaattttga

SEQ ID NO: 146970 - DNA, 20 bp, Artificial Sequence
  Description of Artificial Sequence: Synthetic oligonucleotide
  Target: LAMA2; (+) strand; PAM type: NRG; PAM sequence: CAG
ttgaaatttgtatcatttta

SEQ ID NO: 146971 - DNA, 20 bp, Artificial Sequence
  Description of Artificial Sequence: Synthetic oligonucleotide
  Target: LAMA2; (+) strand; PAM type: NRG; PAM sequence: AAG
acagttatacctgtaaatgt

SEQ ID NO: 146972 - DNA, 20 bp, Artificial Sequence
  Description of Artificial Sequence: Synthetic oligonucleotide
  Target: LAMA2; (+) strand; PAM type: NRG; PAM sequence: GAG
agttatacctgtaaatgtaa

SEQ ID NO: 146973 - DNA, 20 bp, Artificial Sequence
  Description of Artificial Sequence: Synthetic oligonucleotide
  Target: LAMA2; (+) strand; PAM type: NRG; PAM sequence: AGG
gttatacctgtaaatgtaag

SEQ ID NO: 146974 - DNA, 20 bp, Artificial Sequence
  Description of Artificial Sequence: Synthetic oligonucleotide
  Target: LAMA2; (+) strand; PAM type: NRG; PAM sequence: TAG
gaggtatgtatctactctct

SEQ ID NO: 146975 - DNA, 20 bp, Artificial Sequence
  Description of Artificial Sequence: Synthetic oligonucleotide
  Target: LAMA2; (+) strand; PAM type: NRG; PAM sequence: CAG
tactctcttagtctaaccat

SEQ ID NO: 146976 - DNA, 20 bp, Artificial Sequence
  Description of Artificial Sequence: Synthetic oligonucleotide
  Target: LAMA2; (+) strand; PAM type: NRG; PAM sequence: GAG
ctctcttagtctaaccatca

SEQ ID NO: 146977 - DNA, 20 bp, Artificial Sequence
  Description of Artificial Sequence: Synthetic oligonucleotide
  Target: LAMA2; (+) strand; PAM type: NRG; PAM sequence: GAG
ctcttagtctaaccatcaga

SEQ ID NO: 146978 - DNA, 20 bp, Artificial Sequence
  Description of Artificial Sequence: Synthetic oligonucleotide
  Target: LAMA2; (+) strand; PAM type: NRG; PAM sequence: TGG
gagagtattaccaatatttg

SEQ ID NO: 146979 - DNA, 20 bp, Artificial Sequence
  Description of Artificial Sequence: Synthetic oligonucleotide
  Target: LAMA2; (+) strand; PAM type: NRG; PAM sequence: GGG
agagtattaccaatatttgt

SEQ ID NO: 146980 - DNA, 20 bp, Artificial Sequence
  Description of Artificial Sequence: Synthetic oligonucleotide
  Target: LAMA2; (+) strand; PAM type: NRG; PAM sequence: GGG
gagtattaccaatatttgtg

SEQ ID NO: 146981 - DNA, 20 bp, Artificial Sequence
  Description of Artificial Sequence: Synthetic oligonucleotide
  Target: LAMA2; (+) strand; PAM type: NRG; PAM sequence: TGG
ggtttgccaacctgaaaaaa

SEQ ID NO: 146982 - DNA, 20 bp, Artificial Sequence
  Description of Artificial Sequence: Synthetic oligonucleotide
  Target: LAMA2; (+) strand; PAM type: NRG; PAM sequence: GGG
gtttgccaacctgaaaaaat

SEQ ID NO: 146983 - DNA, 20 bp, Artificial Sequence
  Description of Artificial Sequence: Synthetic oligonucleotide
  Target: LAMA2; (+) strand; PAM type: NRG; PAM sequence: AAG
tgccaacctgaaaaaatggg

SEQ ID NO: 146984 - DNA, 20 bp, Artificial Sequence
  Description of Artificial Sequence: Synthetic oligonucleotide
  Target: LAMA2; (+) strand; PAM type: NRG; PAM sequence: CAG
tgaaaaaatgggaagtttat

SEQ ID NO: 146985 - DNA, 20 bp, Artificial Sequence
  Description of Artificial Sequence: Synthetic oligonucleotide
  Target: LAMA2; (+) strand; PAM type: NRG; PAM sequence: GAG
attaacatttatcctattat

SEQ ID NO: 146986 - DNA, 20 bp, Artificial Sequence
  Description of Artificial Sequence: Synthetic oligonucleotide
  Target: LAMA2; (+) strand; PAM type: NRG; PAM sequence: AGG
ttaacatttatcctattatg

SEQ ID NO: 146987 - DNA, 20 bp, Artificial Sequence
  Description of Artificial Sequence: Synthetic oligonucleotide
  Target: LAMA2; (+) strand; PAM type: NRG; PAM sequence: GGG
taacatttatcctattatga

SEQ ID NO: 146988 - DNA, 20 bp, Artificial Sequence
  Description of Artificial Sequence: Synthetic oligonucleotide
  Target: LAMA2; (+) strand; PAM type: NRG; PAM sequence: GAG
acatttatcctattatgagg

SEQ ID NO: 146989 - DNA, 20 bp, Artificial Sequence
  Description of Artificial Sequence: Synthetic oligonucleotide
  Target: LAMA2; (+) strand; PAM type: NRG; PAM sequence: AGG
catttatcctattatgaggg

SEQ ID NO: 146990 - DNA, 20 bp, Artificial Sequence
  Description of Artificial Sequence: Synthetic oligonucleotide
  Target: LAMA2; (+) strand; PAM type: NRG; PAM sequence: CAG
atcctattatgagggaggat

SEQ ID NO: 146991 - DNA, 20 bp, Artificial Sequence
  Description of Artificial Sequence: Synthetic oligonucleotide
  Target: LAMA2; (+) strand; PAM type: NRG; PAM sequence: CAG
agtatcttataaacttttaa

SEQ ID NO: 146992 - DNA, 20 bp, Artificial Sequence
  Description of Artificial Sequence: Synthetic oligonucleotide
  Target: LAMA2; (+) strand; PAM type: NRG; PAM sequence: TAG
ttaattttcttttctttgaa

SEQ ID NO: 146993 - DNA, 20 bp, Artificial Sequence
  Description of Artificial Sequence: Synthetic oligonucleotide
  Target: LAMA2; (+) strand; PAM type: NRG; PAM sequence: AGG
taattttcttttctttgaat

SEQ ID NO: 146994 - DNA, 20 bp, Artificial Sequence
  Description of Artificial Sequence: Synthetic oligonucleotide
  Target: LAMA2; (+) strand; PAM type: NRG; PAM sequence: GGG
aattttcttttctttgaata

SEQ ID NO: 146995 - DNA, 20 bp, Artificial Sequence
  Description of Artificial Sequence: Synthetic oligonucleotide
  Target: LAMA2; (+) strand; PAM type: NRG; PAM sequence: TGG
tatatttgtgcattttgtta

SEQ ID NO: 146996 - DNA, 20 bp, Artificial Sequence
  Description of Artificial Sequence: Synthetic oligonucleotide
  Target: LAMA2; (+) strand; PAM type: NRG; PAM sequence: TGG
tgtgcattttgttatggtgt

SEQ ID NO: 146997 - DNA, 20 bp, Artificial Sequence
  Description of Artificial Sequence: Synthetic oligonucleotide
  Target: LAMA2; (+) strand; PAM type: NRG; PAM sequence: AAG
gcatttctttattgatttac

SEQ ID NO: 146998 - DNA, 20 bp, Artificial Sequence
  Description of Artificial Sequence: Synthetic oligonucleotide
  Target: LAMA2; (+) strand; PAM type: NRG; PAM sequence: GAG
atttctttattgatttacaa

SEQ ID NO: 146999 - DNA, 20 bp, Artificial Sequence
  Description of Artificial Sequence: Synthetic oligonucleotide
  Target: LAMA2; (+) strand; PAM type: NRG; PAM sequence: GAG
ttgatttacaagagttcttt

SEQ ID NO: 147000 - DNA, 20 bp, Artificial Sequence
  Description of Artificial Sequence: Synthetic oligonucleotide
  Target: LAMA2; (+) strand; PAM type: NRG; PAM sequence: TAG
tacaagagttctttgagtat

SEQ ID NO: 147001 - DNA, 20 bp, Artificial Sequence
  Description of Artificial Sequence: Synthetic oligonucleotide
  Target: LAMA2; (+) strand; PAM type: NRG; PAM sequence: AGG
acaagagttctttgagtatt

SEQ ID NO: 147002 - DNA, 20 bp, Artificial Sequence
  Description of Artificial Sequence: Synthetic oligonucleotide
  Target: LAMA2; (+) strand; PAM type: NRG; PAM sequence: CAG
ccttcctttatccgtgccaa

SEQ ID NO: 147003 - DNA, 20 bp, Artificial Sequence
  Description of Artificial Sequence: Synthetic oligonucleotide
  Target: LAMA2; (+) strand; PAM type: NRG; PAM sequence: CAG
gtaccttttattttgtcaca

SEQ ID NO: 147004 - DNA, 20 bp, Artificial Sequence
  Description of Artificial Sequence: Synthetic oligonucleotide
  Target: LAMA2; (+) strand; PAM type: NRG; PAM sequence: CAG
tcacacagtttattcttcat

SEQ ID NO: 147005 - DNA, 20 bp, Artificial Sequence
  Description of Artificial Sequence: Synthetic oligonucleotide
  Target: LAMA2; (+) strand; PAM type: NRG; PAM sequence: GAG
catcagaattctttgctctt

SEQ ID NO: 147006 - DNA, 20 bp, Artificial Sequence
  Description of Artificial Sequence: Synthetic oligonucleotide
  Target: LAMA2; (+) strand; PAM type: NRG; PAM sequence: AAG
cagaattctttgctcttgag

SEQ ID NO: 147007 - DNA, 20 bp, Artificial Sequence
  Description of Artificial Sequence: Synthetic oligonucleotide
  Target: LAMA2; (+) strand; PAM type: NRG; PAM sequence: GAG
tgctcttgagaagtccctgt

SEQ ID NO: 147008 - DNA, 20 bp, Artificial Sequence
  Description of Artificial Sequence: Synthetic oligonucleotide
  Target: LAMA2; (+) strand; PAM type: NRG; PAM sequence: GAG
ctcttgagaagtccctgtga

SEQ ID NO: 147009 - DNA, 20 bp, Artificial Sequence
  Description of Artificial Sequence: Synthetic oligonucleotide
  Target: LAMA2; (+) strand; PAM type: NRG; PAM sequence: CAG
aagtccctgtgagagcctgc

SEQ ID NO: 147010 - DNA, 20 bp, Artificial Sequence
  Description of Artificial Sequence: Synthetic oligonucleotide
  Target: LAMA2; (+) strand; PAM type: NRG; PAM sequence: TGG
ctgccagccttctacacctt

SEQ ID NO: 147011 - DNA, 20 bp, Artificial Sequence
  Description of Artificial Sequence: Synthetic oligonucleotide
  Target: LAMA2; (+) strand; PAM type: NRG; PAM sequence: GAG
gccagccttctacacctttg

SEQ ID NO: 147012 - DNA, 20 bp, Artificial Sequence
  Description of Artificial Sequence: Synthetic oligonucleotide
  Target: LAMA2; (+) strand; PAM type: NRG; PAM sequence: AGG
ccagccttctacacctttgg

SEQ ID NO: 147013 - DNA, 20 bp, Artificial Sequence
  Description of Artificial Sequence: Synthetic oligonucleotide
  Target: LAMA2; (+) strand; PAM type: NRG; PAM sequence: GGG
cagccttctacacctttgga

SEQ ID NO: 147014 - DNA, 20 bp, Artificial Sequence
  Description of Artificial Sequence: Synthetic oligonucleotide
  Target: LAMA2; (+) strand; PAM type: NRG; PAM sequence: CAG
ccttctacacctttggaggg

SEQ ID NO: 147015 - DNA, 20 bp, Artificial Sequence
  Description of Artificial Sequence: Synthetic oligonucleotide
  Target: LAMA2; (+) strand; PAM type: NRG; PAM sequence: TGG
acctttggagggcagtttgt

SEQ ID NO: 147016 - DNA, 20 bp, Artificial Sequence
  Description of Artificial Sequence: Synthetic oligonucleotide
  Target: LAMA2; (+) strand; PAM type: NRG; PAM sequence: TAG
ttctcaatttttctttcaca

SEQ ID NO: 147017 - DNA, 20 bp, Artificial Sequence
  Description of Artificial Sequence: Synthetic oligonucleotide
  Target: LAMA2; (+) strand; PAM type: NRG; PAM sequence: CAG
aaaaaattcaccattccatt

SEQ ID NO: 147018 - DNA, 20 bp, Artificial Sequence
  Description of Artificial Sequence: Synthetic oligonucleotide
  Target: LAMA2; (+) strand; PAM type: NRG; PAM sequence: AGG
aaaaattcaccattccattc

SEQ ID NO: 147019 - DNA, 20 bp, Artificial Sequence
  Description of Artificial Sequence: Synthetic oligonucleotide
  Target: LAMA2; (+) strand; PAM type: NRG; PAM sequence: TAG
ttcaggtttaacatattttt

SEQ ID NO: 147020 - DNA, 20 bp, Artificial Sequence
  Description of Artificial Sequence: Synthetic oligonucleotide
  Target: LAMA2; (+) strand; PAM type: NRG; PAM sequence: GAG
caggtttaacatatttttta

SEQ ID NO: 147021 - DNA, 20 bp, Artificial Sequence
  Description of Artificial Sequence: Synthetic oligonucleotide
  Target: LAMA2; (+) strand; PAM type: NRG; PAM sequence: TAG
tttttagagtgtgattttca

SEQ ID NO: 147022 - DNA, 20 bp, Artificial Sequence
  Description of Artificial Sequence: Synthetic oligonucleotide
  Target: LAMA2; (+) strand; PAM type: NRG; PAM sequence: AGG
ttttagagtgtgattttcat

SEQ ID NO: 147023 - DNA, 20 bp, Artificial Sequence
  Description of Artificial Sequence: Synthetic oligonucleotide
  Target: LAMA2; (+) strand; PAM type: NRG; PAM sequence: GGG
tttagagtgtgattttcata

SEQ ID NO: 147024 - DNA, 20 bp, Artificial Sequence
  Description of Artificial Sequence: Synthetic oligonucleotide
  Target: LAMA2; (+) strand; PAM type: NRG; PAM sequence: CAG
aattactaaaaaaaaaaata

SEQ ID NO: 147025 - DNA, 20 bp, Artificial Sequence
  Description of Artificial Sequence: Synthetic oligonucleotide
  Target: LAMA2; (+) strand; PAM type: NRG; PAM sequence: TAG
gaaatatctcactgtgatga

SEQ ID NO: 147026 - DNA, 20 bp, Artificial Sequence
  Description of Artificial Sequence: Synthetic oligonucleotide
  Target: LAMA2; (+) strand; PAM type: NRG; PAM sequence: TAG
actgtgatgatagatttgtc

SEQ ID NO: 147027 - DNA, 20 bp, Artificial Sequence
  Description of Artificial Sequence: Synthetic oligonucleotide
  Target: LAMA2; (+) strand; PAM type: NRG; PAM sequence: AAG
atttttgttctccatatttt

SEQ ID NO: 147028 - DNA, 20 bp, Artificial Sequence
  Description of Artificial Sequence: Synthetic oligonucleotide
  Target: LAMA2; (+) strand; PAM type: NRG; PAM sequence: AGG
tttttgttctccatatttta

SEQ ID NO: 147029 - DNA, 20 bp, Artificial Sequence
  Description of Artificial Sequence: Synthetic oligonucleotide
  Target: LAMA2; (+) strand; PAM type: NRG; PAM sequence: AAG
ctatataatgtgatgttttc

SEQ ID NO: 147030 - DNA, 20 bp, Artificial Sequence
  Description of Artificial Sequence: Synthetic oligonucleotide
  Target: LAMA2; (+) strand; PAM type: NRG; PAM sequence: CAG
taatgtgatgttttcaagta

SEQ ID NO: 147031 - DNA, 20 bp, Artificial Sequence
  Description of Artificial Sequence: Synthetic oligonucleotide
  Target: LAMA2; (+) strand; PAM type: NRG; PAM sequence: AAG
ttcaagtacagaattatttt

SEQ ID NO: 147032 - DNA, 20 bp, Artificial Sequence
  Description of Artificial Sequence: Synthetic oligonucleotide
  Target: LAMA2; (+) strand; PAM type: NRG; PAM sequence: TGG
gaattattttaagttcctaa

SEQ ID NO: 147033 - DNA, 20 bp, Artificial Sequence
  Description of Artificial Sequence: Synthetic oligonucleotide
  Target: LAMA2; (+) strand; PAM type: NRG; PAM sequence: GGG
aattattttaagttcctaat

SEQ ID NO: 147034 - DNA, 20 bp, Artificial Sequence
  Description of Artificial Sequence: Synthetic oligonucleotide
  Target: LAMA2; (+) strand; PAM type: NRG; PAM sequence: AAG
tattttataactttttcccc

SEQ ID NO: 147035 - DNA, 20 bp, Artificial Sequence
  Description of Artificial Sequence: Synthetic oligonucleotide
  Target: LAMA2; (+) strand; PAM type: NRG; PAM sequence: TGG
aactttttccccaagttttc

SEQ ID NO: 147036 - DNA, 20 bp, Artificial Sequence
  Description of Artificial Sequence: Synthetic oligonucleotide
  Target: LAMA2; (+) strand; PAM type: NRG; PAM sequence: CAG
tctggtttcccaccataccc

SEQ ID NO: 147037 - DNA, 20 bp, Artificial Sequence
  Description of Artificial Sequence: Synthetic oligonucleotide
  Target: LAMA2; (+) strand; PAM type: NRG; PAM sequence: AAG
ccaccataccccagattctt

SEQ ID NO: 147038 - DNA, 20 bp, Artificial Sequence
  Description of Artificial Sequence: Synthetic oligonucleotide
  Target: LAMA2; (+) strand; PAM type: NRG; PAM sequence: TAG
ccccagattcttaagtaatt

SEQ ID NO: 147039 - DNA, 20 bp, Artificial Sequence
  Description of Artificial Sequence: Synthetic oligonucleotide
  Target: LAMA2; (+) strand; PAM type: NRG; PAM sequence: AGG
cccagattcttaagtaattt

SEQ ID NO: 147040 - DNA, 20 bp, Artificial Sequence
  Description of Artificial Sequence: Synthetic oligonucleotide
  Target: LAMA2; (+) strand; PAM type: NRG; PAM sequence: GGG
ccagattcttaagtaattta

SEQ ID NO: 147041 - DNA, 20 bp, Artificial Sequence
  Description of Artificial Sequence: Synthetic oligonucleotide
  Target: LAMA2; (+) strand; PAM type: NRG; PAM sequence: CAG
atttagggcacaataatttt

SEQ ID NO: 147042 - DNA, 20 bp, Artificial Sequence
  Description of Artificial Sequence: Synthetic oligonucleotide
  Target: LAMA2; (+) strand; PAM type: NRG; PAM sequence: GAG
ttagggcacaataattttca

SEQ ID NO: 147043 - DNA, 20 bp, Artificial Sequence
  Description of Artificial Sequence: Synthetic oligonucleotide
  Target: LAMA2; (+) strand; PAM type: NRG; PAM sequence: AAG
ggcacaataattttcagaga

SEQ ID NO: 147044 - DNA, 20 bp, Artificial Sequence
  Description of Artificial Sequence: Synthetic oligonucleotide
  Target: LAMA2; (+) strand; PAM type: NRG; PAM sequence: AAG
ttttcagagaaagaatgatt

SEQ ID NO: 147045 - DNA, 20 bp, Artificial Sequence
  Description of Artificial Sequence: Synthetic oligonucleotide
  Target: LAMA2; (+) strand; PAM type: NRG; PAM sequence: TGG
aaagaatgattaagaattta

SEQ ID NO: 147046 - DNA, 20 bp, Artificial Sequence
  Description of Artificial Sequence: Synthetic oligonucleotide
  Target: LAMA2; (+) strand; PAM type: NRG; PAM sequence: TAG
ttaagaatttatggaaatct

SEQ ID NO: 147047 - DNA, 20 bp, Artificial Sequence
  Description of Artificial Sequence: Synthetic oligonucleotide
  Target: LAMA2; (+) strand; PAM type: NRG; PAM sequence: AGG
taagaatttatggaaatctt

SEQ ID NO: 147048 - DNA, 20 bp, Artificial Sequence
  Description of Artificial Sequence: Synthetic oligonucleotide
  Target: LAMA2; (+) strand; PAM type: NRG; PAM sequence: AAG
gaatttatggaaatcttagg

SEQ ID NO: 147049 - DNA, 20 bp, Artificial Sequence
  Description of Artificial Sequence: Synthetic oligonucleotide
  Target: LAMA2; (+) strand; PAM type: NRG; PAM sequence: AGG
aatttatggaaatcttagga

SEQ ID NO: 147050 - DNA, 20 bp, Artificial Sequence
  Description of Artificial Sequence: Synthetic oligonucleotide
  Target: LAMA2; (+) strand; PAM type: NRG; PAM sequence: CAG
ttaggaaggtcgaattgacg

SEQ ID NO: 147051 - DNA, 20 bp, Artificial Sequence
  Description of Artificial Sequence: Synthetic oligonucleotide
  Target: LAMA2; (+) strand; PAM type: NRG; PAM sequence: TGG
gtcgaattgacgcagtgcct

SEQ ID NO: 147052 - DNA, 20 bp, Artificial Sequence
  Description of Artificial Sequence: Synthetic oligonucleotide
  Target: LAMA2; (+) strand; PAM type: NRG; PAM sequence: AAG
gaattgacgcagtgccttgg

SEQ ID NO: 147053 - DNA, 20 bp, Artificial Sequence
  Description of Artificial Sequence: Synthetic oligonucleotide
  Target: LAMA2; (+) strand; PAM type: NRG; PAM sequence: GAG
attgacgcagtgccttggaa

SEQ ID NO: 147054 - DNA, 20 bp, Artificial Sequence
  Description of Artificial Sequence: Synthetic oligonucleotide
  Target: LAMA2; (+) strand; PAM type: NRG; PAM sequence: GAG
tgacgcagtgccttggaaga

SEQ ID NO: 147055 - DNA, 20 bp, Artificial Sequence
  Description of Artificial Sequence: Synthetic oligonucleotide
  Target: LAMA2; (+) strand; PAM type: NRG; PAM sequence: TAG
tgccttggaagagagaaata

SEQ ID NO: 147056 - DNA, 20 bp, Artificial Sequence
  Description of Artificial Sequence: Synthetic oligonucleotide
  Target: LAMA2; (+) strand; PAM type: NRG; PAM sequence: AGG
gccttggaagagagaaatat

SEQ ID NO: 147057 - DNA, 20 bp, Artificial Sequence
  Description of Artificial Sequence: Synthetic oligonucleotide
  Target: LAMA2; (+) strand; PAM type: NRG; PAM sequence: TAG
ttggaagagagaaatatagg

SEQ ID NO: 147058 - DNA, 20 bp, Artificial Sequence
  Description of Artificial Sequence: Synthetic oligonucleotide
  Target: LAMA2; (+) strand; PAM type: NRG; PAM sequence: AAG
gagagaaatataggtagttg

SEQ ID NO: 147059 - DNA, 20 bp, Artificial Sequence
  Description of Artificial Sequence: Synthetic oligonucleotide
  Target: LAMA2; (+) strand; PAM type: NRG; PAM sequence: AAG
aatataggtagttgaagtat

SEQ ID NO: 147060 - DNA, 20 bp, Artificial Sequence
  Description of Artificial Sequence: Synthetic oligonucleotide
  Target: LAMA2; (+) strand; PAM type: NRG; PAM sequence: AGG
atataggtagttgaagtata

SEQ ID NO: 147061 - DNA, 20 bp, Artificial Sequence
  Description of Artificial Sequence: Synthetic oligonucleotide
  Target: LAMA2; (+) strand; PAM type: NRG; PAM sequence: GAG
ataggtagttgaagtataag

SEQ ID NO: 147062 - DNA, 20 bp, Artificial Sequence
  Description of Artificial Sequence: Synthetic oligonucleotide
  Target: LAMA2; (+) strand; PAM type: NRG; PAM sequence: AAG
aaattgcatgtacatgtatt

SEQ ID NO: 147063 - DNA, 20 bp, Artificial Sequence
  Description of Artificial Sequence: Synthetic oligonucleotide
  Target: LAMA2; (+) strand; PAM type: NRG; PAM sequence: AAG
ttgcatgtacatgtattaag

SEQ ID NO: 147064 - DNA, 20 bp, Artificial Sequence
  Description of Artificial Sequence: Synthetic oligonucleotide
  Target: LAMA2; (+) strand; PAM type: NRG; PAM sequence: CAG
aagaagactataacatatat

SEQ ID NO: 147065 - DNA, 20 bp, Artificial Sequence
  Description of Artificial Sequence: Synthetic oligonucleotide
  Target: LAMA2; (+) strand; PAM type: NRG; PAM sequence: TAG
acatatatcagttacttcac

SEQ ID NO: 147066 - DNA, 20 bp, Artificial Sequence
  Description of Artificial Sequence: Synthetic oligonucleotide
  Target: LAMA2; (+) strand; PAM type: NRG; PAM sequence: CAG
tcagttacttcactagatgc

SEQ ID NO: 147067 - DNA, 20 bp, Artificial Sequence
  Description of Artificial Sequence: Synthetic oligonucleotide
  Target: LAMA2; (+) strand; PAM type: NRG; PAM sequence: TAG
cttcactagatgccagtgca

SEQ ID NO: 147068 - DNA, 20 bp, Artificial Sequence
  Description of Artificial Sequence: Synthetic oligonucleotide
  Target: LAMA2; (+) strand; PAM type: NRG; PAM sequence: AGG
ttcactagatgccagtgcat

SEQ ID NO: 147069 - DNA, 20 bp, Artificial Sequence
  Description of Artificial Sequence: Synthetic oligonucleotide
  Target: LAMA2; (+) strand; PAM type: NRG; PAM sequence: TGG
cctgaatctgcgtaactaat

SEQ ID NO: 147070 - DNA, 20 bp, Artificial Sequence
  Description of Artificial Sequence: Synthetic oligonucleotide
  Target: LAMA2; (+) strand; PAM type: NRG; PAM sequence: GGG
ctgaatctgcgtaactaatt

SEQ ID NO: 147071 - DNA, 20 bp, Artificial Sequence
  Description of Artificial Sequence: Synthetic oligonucleotide
  Target: LAMA2; (+) strand; PAM type: NRG; PAM sequence: GAG
gaatctgcgtaactaattgg

SEQ ID NO: 147072 - DNA, 20 bp, Artificial Sequence
  Description of Artificial Sequence: Synthetic oligonucleotide
  Target: LAMA2; (+) strand; PAM type: NRG; PAM sequence: TGG
tgcgtaactaattgggagaa

SEQ ID NO: 147073 - DNA, 20 bp, Artificial Sequence
  Description of Artificial Sequence: Synthetic oligonucleotide
  Target: LAMA2; (+) strand; PAM type: NRG; PAM sequence: GGG
gcgtaactaattgggagaat

SEQ ID NO: 147074 - DNA, 20 bp, Artificial Sequence
  Description of Artificial Sequence: Synthetic oligonucleotide
  Target: LAMA2; (+) strand; PAM type: NRG; PAM sequence: AAG
taactaattgggagaatggg

SEQ ID NO: 147075 - DNA, 20 bp, Artificial Sequence
  Description of Artificial Sequence: Synthetic oligonucleotide
  Target: LAMA2; (+) strand; PAM type: NRG; PAM sequence: AAG
gaagttaactttatttttcc

SEQ ID NO: 147076 - DNA, 20 bp, Artificial Sequence
  Description of Artificial Sequence: Synthetic oligonucleotide
  Target: LAMA2; (+) strand; PAM type: NRG; PAM sequence: AAG
aactttatttttccaagaaa

SEQ ID NO: 147077 - DNA, 20 bp, Artificial Sequence
  Description of Artificial Sequence: Synthetic oligonucleotide
  Target: LAMA2; (+) strand; PAM type: NRG; PAM sequence: TGG
caaaatcaatatttaaattt

SEQ ID NO: 147078 - DNA, 20 bp, Artificial Sequence
  Description of Artificial Sequence: Synthetic oligonucleotide
  Target: LAMA2; (+) strand; PAM type: NRG; PAM sequence: TAG
aaattatttttcatattgtg

SEQ ID NO: 147079 - DNA, 20 bp, Artificial Sequence
  Description of Artificial Sequence: Synthetic oligonucleotide
  Target: LAMA2; (+) strand; PAM type: NRG; PAM sequence: TGG
attcacatctctttaatcaa

SEQ ID NO: 147080 - DNA, 20 bp, Artificial Sequence
  Description of Artificial Sequence: Synthetic oligonucleotide
  Target: LAMA2; (+) strand; PAM type: NRG; PAM sequence: GGG
ttcacatctctttaatcaat

SEQ ID NO: 147081 - DNA, 20 bp, Artificial Sequence
  Description of Artificial Sequence: Synthetic oligonucleotide
  Target: LAMA2; (+) strand; PAM type: NRG; PAM sequence: GAG
cacatctctttaatcaatgg

SEQ ID NO: 147082 - DNA, 20 bp, Artificial Sequence
  Description of Artificial Sequence: Synthetic oligonucleotide
  Target: LAMA2; (+) strand; PAM type: NRG; PAM sequence: AAG
tctttaatcaatgggagacc

SEQ ID NO: 147083 - DNA, 20 bp, Artificial Sequence
  Description of Artificial Sequence: Synthetic oligonucleotide
  Target: LAMA2; (+) strand; PAM type: NRG; PAM sequence: CAG
aagtgccgatgatccttctc

SEQ ID NO: 147084 - DNA, 20 bp, Artificial Sequence
  Description of Artificial Sequence: Synthetic oligonucleotide
  Target: LAMA2; (+) strand; PAM type: NRG; PAM sequence: TAG
tgatccttctccagaactgc

SEQ ID NO: 147085 - DNA, 20 bp, Artificial Sequence
  Description of Artificial Sequence: Synthetic oligonucleotide
  Target: LAMA2; (+) strand; PAM type: NRG; PAM sequence: GAG
tccgctcgctatattcgcct

SEQ ID NO: 147086 - DNA, 20 bp, Artificial Sequence
  Description of Artificial Sequence: Synthetic oligonucleotide
  Target: LAMA2; (+) strand; PAM type: NRG; PAM sequence: CAG
gctatattcgcctgagattt

SEQ ID NO: 147087 - DNA, 20 bp, Artificial Sequence
  Description of Artificial Sequence: Synthetic oligonucleotide
  Target: LAMA2; (+) strand; PAM type: NRG; PAM sequence: GAG
tatattcgcctgagatttca

SEQ ID NO: 147088 - DNA, 20 bp, Artificial Sequence
  Description of Artificial Sequence: Synthetic oligonucleotide
  Target: LAMA2; (+) strand; PAM type: NRG; PAM sequence: AGG
atattcgcctgagatttcag

SEQ ID NO: 147089 - DNA, 20 bp, Artificial Sequence
  Description of Artificial Sequence: Synthetic oligonucleotide
  Target: LAMA2; (+) strand; PAM type: NRG; PAM sequence: AAG
cttgatgatgtttgctcaca

SEQ ID NO: 147090 - DNA, 20 bp, Artificial Sequence
  Description of Artificial Sequence: Synthetic oligonucleotide
  Target: LAMA2; (+) strand; PAM type: NRG; PAM sequence: AAG
atgtttgctcacaaagaccc

SEQ ID NO: 147091 - DNA, 20 bp, Artificial Sequence
  Description of Artificial Sequence: Synthetic oligonucleotide
  Target: LAMA2; (+) strand; PAM type: NRG; PAM sequence: GAG
gtttgctcacaaagacccaa

SEQ ID NO: 147092 - DNA, 20 bp, Artificial Sequence
  Description of Artificial Sequence: Synthetic oligonucleotide
  Target: LAMA2; (+) strand; PAM type: NRG; PAM sequence: CAG
gaaattgaccccattgtcac

SEQ ID NO: 147093 - DNA, 20 bp, Artificial Sequence
  Description of Artificial Sequence: Synthetic oligonucleotide
  Target: LAMA2; (+) strand; PAM type: NRG; PAM sequence: AAG
attgaccccattgtcaccag

SEQ ID NO: 147094 - DNA, 20 bp, Artificial Sequence
  Description of Artificial Sequence: Synthetic oligonucleotide
  Target: LAMA2; (+) strand; PAM type: NRG; PAM sequence: GAG
tgaccccattgtcaccagaa

SEQ ID NO: 147095 - DNA, 20 bp, Artificial Sequence
  Description of Artificial Sequence: Synthetic oligonucleotide
  Target: LAMA2; (+) strand; PAM type: NRG; PAM sequence: AAG
cccattgtcaccagaagagt

SEQ ID NO: 147096 - DNA, 20 bp, Artificial Sequence
  Description of Artificial Sequence: Synthetic oligonucleotide
  Target: LAMA2; (+) strand; PAM type: NRG; PAM sequence: TAG
taagttatgatgaatcatat

SEQ ID NO: 147097 - DNA, 20 bp, Artificial Sequence
  Description of Artificial Sequence: Synthetic oligonucleotide
  Target: LAMA2; (+) strand; PAM type: NRG; PAM sequence: GAG
agttatgatgaatcatatta

SEQ ID NO: 147098 - DNA, 20 bp, Artificial Sequence
  Description of Artificial Sequence: Synthetic oligonucleotide
  Target: LAMA2; (+) strand; PAM type: NRG; PAM sequence: CAG
aaatactttaaaaatgtttt

SEQ ID NO: 147099 - DNA, 20 bp, Artificial Sequence
  Description of Artificial Sequence: Synthetic oligonucleotide
  Target: LAMA2; (+) strand; PAM type: NRG; PAM sequence: TAG
aaaatgttttcagtgatttg

SEQ ID NO: 147100 - DNA, 20 bp, Artificial Sequence
  Description of Artificial Sequence: Synthetic oligonucleotide
  Target: LAMA2; (+) strand; PAM type: NRG; PAM sequence: AGG
aaatgttttcagtgatttgt

SEQ ID NO: 147101 - DNA, 20 bp, Artificial Sequence
  Description of Artificial Sequence: Synthetic oligonucleotide
  Target: LAMA2; (+) strand; PAM type: NRG; PAM sequence: GAG
atgttttcagtgatttgtag

SEQ ID NO: 147102 - DNA, 20 bp, Artificial Sequence
  Description of Artificial Sequence: Synthetic oligonucleotide
  Target: LAMA2; (+) strand; PAM type: NRG; PAM sequence: TGG
ttttcagtgatttgtaggag

SEQ ID NO: 147103 - DNA, 20 bp, Artificial Sequence
  Description of Artificial Sequence: Synthetic oligonucleotide
  Target: LAMA2; (+) strand; PAM type: NRG; PAM sequence: TAG
ttattatcaaatttttattt

SEQ ID NO: 147104 - DNA, 20 bp, Artificial Sequence
  Description of Artificial Sequence: Synthetic oligonucleotide
  Target: LAMA2; (+) strand; PAM type: NRG; PAM sequence: TAG
aaatttttattttagaattg

SEQ ID NO: 147105 - DNA, 20 bp, Artificial Sequence
  Description of Artificial Sequence: Synthetic oligonucleotide
  Target: LAMA2; (+) strand; PAM type: NRG; PAM sequence: CAG
tattattatttgaaatttga

SEQ ID NO: 147106 - DNA, 20 bp, Artificial Sequence
  Description of Artificial Sequence: Synthetic oligonucleotide
  Target: LAMA2; (+) strand; PAM type: NRG; PAM sequence: CAG
ttgacagactttcctttgtt

SEQ ID NO: 147107 - DNA, 20 bp, Artificial Sequence
  Description of Artificial Sequence: Synthetic oligonucleotide
  Target: LAMA2; (+) strand; PAM type: NRG; PAM sequence: AAG
actttcctttgttcagatcc

SEQ ID NO: 147108 - DNA, 20 bp, Artificial Sequence
  Description of Artificial Sequence: Synthetic oligonucleotide
  Target: LAMA2; (+) strand; PAM type: NRG; PAM sequence: TAG
gtaacatttatcaaacattt

SEQ ID NO: 147109 - DNA, 20 bp, Artificial Sequence
  Description of Artificial Sequence: Synthetic oligonucleotide
  Target: LAMA2; (+) strand; PAM type: NRG; PAM sequence: GAG
aatttcttcttttgtaaaat

SEQ ID NO: 147110 - DNA, 20 bp, Artificial Sequence
  Description of Artificial Sequence: Synthetic oligonucleotide
  Target: LAMA2; (+) strand; PAM type: NRG; PAM sequence: CAG
tacttaataatcttattttt

SEQ ID NO: 147111 - DNA, 20 bp, Artificial Sequence
  Description of Artificial Sequence: Synthetic oligonucleotide
  Target: LAMA2; (+) strand; PAM type: NRG; PAM sequence: TAG
cttatttttcagaataaaat

SEQ ID NO: 147112 - DNA, 20 bp, Artificial Sequence
  Description of Artificial Sequence: Synthetic oligonucleotide
  Target: LAMA2; (+) strand; PAM type: NRG; PAM sequence: TAG
aaaattagcctttgtcacct

SEQ ID NO: 147113 - DNA, 20 bp, Artificial Sequence
  Description of Artificial Sequence: Synthetic oligonucleotide
  Target: LAMA2; (+) strand; PAM type: NRG; PAM sequence: AGG
aaattagcctttgtcacctt

SEQ ID NO: 147114 - DNA, 20 bp, Artificial Sequence
  Description of Artificial Sequence: Synthetic oligonucleotide
  Target: LAMA2; (+) strand; PAM type: NRG; PAM sequence: GGG
aattagcctttgtcacctta

SEQ ID NO: 147115 - DNA, 20 bp, Artificial Sequence
  Description of Artificial Sequence: Synthetic oligonucleotide
  Target: LAMA2; (+) strand; PAM type: NRG; PAM sequence: GGG
attagcctttgtcaccttag

SEQ ID NO: 147116 - DNA, 20 bp, Artificial Sequence
  Description of Artificial Sequence: Synthetic oligonucleotide
  Target: LAMA2; (+) strand; PAM type: NRG; PAM sequence: TGG
atctatactactattataat

SEQ ID NO: 147117 - DNA, 20 bp, Artificial Sequence
  Description of Artificial Sequence: Synthetic oligonucleotide
  Target: LAMA2; (+) strand; PAM type: NRG; PAM sequence: TGG
actactattataattggctt

SEQ ID NO: 147118 - DNA, 20 bp, Artificial Sequence
  Description of Artificial Sequence: Synthetic oligonucleotide
  Target: LAMA2; (+) strand; PAM type: NRG; PAM sequence: GAG
ctattataattggctttggc

SEQ ID NO: 147119 - DNA, 20 bp, Artificial Sequence
  Description of Artificial Sequence: Synthetic oligonucleotide
  Target: LAMA2; (+) strand; PAM type: NRG; PAM sequence: TGG
tggctttggcgagttactac

SEQ ID NO: 147120 - DNA, 20 bp, Artificial Sequence
  Description of Artificial Sequence: Synthetic oligonucleotide
  Target: LAMA2; (+) strand; PAM type: NRG; PAM sequence: AAG
ctttggcgagttactactgg

SEQ ID NO: 147121 - DNA, 20 bp, Artificial Sequence
  Description of Artificial Sequence: Synthetic oligonucleotide
  Target: LAMA2; (+) strand; PAM type: NRG; PAM sequence: CAG
gcgagttactactggaagtg

SEQ ID NO: 147122 - DNA, 20 bp, Artificial Sequence
  Description of Artificial Sequence: Synthetic oligonucleotide
  Target: LAMA2; (+) strand; PAM type: NRG; PAM sequence: AGG
cgagttactactggaagtgc

SEQ ID NO: 147123 - DNA, 20 bp, Artificial Sequence
  Description of Artificial Sequence: Synthetic oligonucleotide
  Target: LAMA2; (+) strand; PAM type: NRG; PAM sequence: GGG
gagttactactggaagtgca

SEQ ID NO: 147124 - DNA, 20 bp, Artificial Sequence
  Description of Artificial Sequence: Synthetic oligonucleotide
  Target: LAMA2; (+) strand; PAM type: NRG; PAM sequence: GGG
agttactactggaagtgcag

SEQ ID NO: 147125 - DNA, 20 bp, Artificial Sequence
  Description of Artificial Sequence: Synthetic oligonucleotide
  Target: LAMA2; (+) strand; PAM type: NRG; PAM sequence: GAG
aacatttttttgccaccact

SEQ ID NO: 147126 - DNA, 20 bp, Artificial Sequence
  Description of Artificial Sequence: Synthetic oligonucleotide
  Target: LAMA2; (+) strand; PAM type: NRG; PAM sequence: CAG
tttttttgccaccactgagc

SEQ ID NO: 147127 - DNA, 20 bp, Artificial Sequence
  Description of Artificial Sequence: Synthetic oligonucleotide
  Target: LAMA2; (+) strand; PAM type: NRG; PAM sequence: CAG
tatacacacatgcacacata

SEQ ID NO: 147128 - DNA, 20 bp, Artificial Sequence
  Description of Artificial Sequence: Synthetic oligonucleotide
  Target: LAMA2; (+) strand; PAM type: NRG; PAM sequence: GAG
tacacacatgcacacataca

SEQ ID NO: 147129 - DNA, 20 bp, Artificial Sequence
  Description of Artificial Sequence: Synthetic oligonucleotide
  Target: LAMA2; (+) strand; PAM type: NRG; PAM sequence: GAG
cacacatgcacacatacaga

SEQ ID NO: 147130 - DNA, 20 bp, Artificial Sequence
  Description of Artificial Sequence: Synthetic oligonucleotide
  Target: LAMA2; (+) strand; PAM type: NRG; PAM sequence: CAG
acatgcacacatacagagag

SEQ ID NO: 147131 - DNA, 20 bp, Artificial Sequence
  Description of Artificial Sequence: Synthetic oligonucleotide
  Target: LAMA2; (+) strand; PAM type: NRG; PAM sequence: TGG
gtcttaaaccttaatgtgta

SEQ ID NO: 147132 - DNA, 20 bp, Artificial Sequence
  Description of Artificial Sequence: Synthetic oligonucleotide
  Target: LAMA2; (+) strand; PAM type: NRG; PAM sequence: GGG
tcttaaaccttaatgtgtat

SEQ ID NO: 147133 - DNA, 20 bp, Artificial Sequence
  Description of Artificial Sequence: Synthetic oligonucleotide
  Target: LAMA2; (+) strand; PAM type: NRG; PAM sequence: TAG
aaccttaatgtgtatgggat

SEQ ID NO: 147134 - DNA, 20 bp, Artificial Sequence
  Description of Artificial Sequence: Synthetic oligonucleotide
  Target: LAMA2; (+) strand; PAM type: NRG; PAM sequence: CAG
ttaatgtgtatgggattagc

SEQ ID NO: 147135 - DNA, 20 bp, Artificial Sequence
  Description of Artificial Sequence: Synthetic oligonucleotide
  Target: LAMA2; (+) strand; PAM type: NRG; PAM sequence: TGG
gggattagccagtgatcttg

SEQ ID NO: 147136 - DNA, 20 bp, Artificial Sequence
  Description of Artificial Sequence: Synthetic oligonucleotide
  Target: LAMA2; (+) strand; PAM type: NRG; PAM sequence: TAG
ccagtgatcttgtggaaata

SEQ ID NO: 147137 - DNA, 20 bp, Artificial Sequence
  Description of Artificial Sequence: Synthetic oligonucleotide
  Target: LAMA2; (+) strand; PAM type: NRG; PAM sequence: AGG
cagtgatcttgtggaaatat

SEQ ID NO: 147138 - DNA, 20 bp, Artificial Sequence
  Description of Artificial Sequence: Synthetic oligonucleotide
  Target: LAMA2; (+) strand; PAM type: NRG; PAM sequence: CAG
tggaaatataggttatgatt

SEQ ID NO: 147139 - DNA, 20 bp, Artificial Sequence
  Description of Artificial Sequence: Synthetic oligonucleotide
  Target: LAMA2; (+) strand; PAM type: NRG; PAM sequence: TAG
aaatataggttatgattcag

SEQ ID NO: 147140 - DNA, 20 bp, Artificial Sequence
  Description of Artificial Sequence: Synthetic oligonucleotide
  Target: LAMA2; (+) strand; PAM type: NRG; PAM sequence: AGG
aatataggttatgattcagt

SEQ ID NO: 147141 - DNA, 20 bp, Artificial Sequence
  Description of Artificial Sequence: Synthetic oligonucleotide
  Target: LAMA2; (+) strand; PAM type: NRG; PAM sequence: GGG
atataggttatgattcagta

SEQ ID NO: 147142 - DNA, 20 bp, Artificial Sequence
  Description of Artificial Sequence: Synthetic oligonucleotide
  Target: LAMA2; (+) strand; PAM type: NRG; PAM sequence: CAG
taggttatgattcagtaggg

SEQ ID NO: 147143 - DNA, 20 bp, Artificial Sequence
  Description of Artificial Sequence: Synthetic oligonucleotide
  Target: LAMA2; (+) strand; PAM type: NRG; PAM sequence: GAG
ggttatgattcagtagggca

SEQ ID NO: 147144 - DNA, 20 bp, Artificial Sequence
  Description of Artificial Sequence: Synthetic oligonucleotide
  Target: LAMA2; (+) strand; PAM type: NRG; PAM sequence: GAG
tgattcagtagggcagagct

SEQ ID NO: 147145 - DNA, 20 bp, Artificial Sequence
  Description of Artificial Sequence: Synthetic oligonucleotide
  Target: LAMA2; (+) strand; PAM type: NRG; PAM sequence: CAG
gctgcacttcaaaaactttc

SEQ ID NO: 147146 - DNA, 20 bp, Artificial Sequence
  Description of Artificial Sequence: Synthetic oligonucleotide
  Target: LAMA2; (+) strand; PAM type: NRG; PAM sequence: AGG
ctgcacttcaaaaactttcc

SEQ ID NO: 147147 - DNA, 20 bp, Artificial Sequence
  Description of Artificial Sequence: Synthetic oligonucleotide
  Target: LAMA2; (+) strand; PAM type: NRG; PAM sequence: CGG
ccaggtgatgctgatgttgc

SEQ ID NO: 147148 - DNA, 20 bp, Artificial Sequence
  Description of Artificial Sequence: Synthetic oligonucleotide
  Target: LAMA2; (+) strand; PAM type: NRG; PAM sequence: TGG
atgctgatgttgccggtttg

SEQ ID NO: 147149 - DNA, 20 bp, Artificial Sequence
  Description of Artificial Sequence: Synthetic oligonucleotide
  Target: LAMA2; (+) strand; PAM type: NRG; PAM sequence: GGG
tgctgatgttgccggtttgt

SEQ ID NO: 147150 - DNA, 20 bp, Artificial Sequence
  Description of Artificial Sequence: Synthetic oligonucleotide
  Target: LAMA2; (+) strand; PAM type: NRG; PAM sequence: TGG
ttgtgggccatcaaataatt

SEQ ID NO: 147151 - DNA, 20 bp, Artificial Sequence
  Description of Artificial Sequence: Synthetic oligonucleotide
  Target: LAMA2; (+) strand; PAM type: NRG; PAM sequence: AAG
atgcttgattaatgaatcac

SEQ ID NO: 147152 - DNA, 20 bp, Artificial Sequence
  Description of Artificial Sequence: Synthetic oligonucleotide
  Target: LAMA2; (+) strand; PAM type: NRG; PAM sequence: TAG
gattaatgaatcacaagcca

SEQ ID NO: 147153 - DNA, 20 bp, Artificial Sequence
  Description of Artificial Sequence: Synthetic oligonucleotide
  Target: LAMA2; (+) strand; PAM type: NRG; PAM sequence: CAG
aagccatagttttaaaaatg

SEQ ID NO: 147154 - DNA, 20 bp, Artificial Sequence
  Description of Artificial Sequence: Synthetic oligonucleotide
  Target: LAMA2; (+) strand; PAM type: NRG; PAM sequence: TAG
gttttaaaaatgcagtgcta

SEQ ID NO: 147155 - DNA, 20 bp, Artificial Sequence
  Description of Artificial Sequence: Synthetic oligonucleotide
  Target: LAMA2; (+) strand; PAM type: NRG; PAM sequence: AGG
ttttaaaaatgcagtgctat

SEQ ID NO: 147156 - DNA, 20 bp, Artificial Sequence
  Description of Artificial Sequence: Synthetic oligonucleotide
  Target: LAMA2; (+) strand; PAM type: NRG; PAM sequence: GAG
ttaaaaatgcagtgctatag

SEQ ID NO: 147157 - DNA, 20 bp, Artificial Sequence
  Description of Artificial Sequence: Synthetic oligonucleotide
  Target: LAMA2; (+) strand; PAM type: NRG; PAM sequence: TAG
ttcctttacaaataaaatat

SEQ ID NO: 147158 - DNA, 20 bp, Artificial Sequence
  Description of Artificial Sequence: Synthetic oligonucleotide
  Target: LAMA2; (+) strand; PAM type: NRG; PAM sequence: AGG
tcctttacaaataaaatatt

SEQ ID NO: 147159 - DNA, 20 bp, Artificial Sequence
  Description of Artificial Sequence: Synthetic oligonucleotide
  Target: LAMA2; (+) strand; PAM type: NRG; PAM sequence: GGG
cctttacaaataaaatatta

SEQ ID NO: 147160 - DNA, 20 bp, Artificial Sequence
  Description of Artificial Sequence: Synthetic oligonucleotide
  Target: LAMA2; (+) strand; PAM type: NRG; PAM sequence: GGG
ctttacaaataaaatattag

SEQ ID NO: 147161 - DNA, 20 bp, Artificial Sequence
  Description of Artificial Sequence: Synthetic oligonucleotide
  Target: LAMA2; (+) strand; PAM type: NRG; PAM sequence: AAG
aaataaaatattaggggaaa

SEQ ID NO: 147162 - DNA, 20 bp, Artificial Sequence
  Description of Artificial Sequence: Synthetic oligonucleotide
  Target: LAMA2; (+) strand; PAM type: NRG; PAM sequence: AAG
atattaggggaaaaagttta

SEQ ID NO: 147163 - DNA, 20 bp, Artificial Sequence
  Description of Artificial Sequence: Synthetic oligonucleotide
  Target: LAMA2; (+) strand; PAM type: NRG; PAM sequence: AAG
agtttaaagcatcttttcaa

SEQ ID NO: 147164 - DNA, 20 bp, Artificial Sequence
  Description of Artificial Sequence: Synthetic oligonucleotide
  Target: LAMA2; (+) strand; PAM type: NRG; PAM sequence: AAG
ttcaaaagctttttgaacac

SEQ ID NO: 147165 - DNA, 20 bp, Artificial Sequence
  Description of Artificial Sequence: Synthetic oligonucleotide
  Target: LAMA2; (+) strand; PAM type: NRG; PAM sequence: GAG
caaaagctttttgaacacaa

SEQ ID NO: 147166 - DNA, 20 bp, Artificial Sequence
  Description of Artificial Sequence: Synthetic oligonucleotide
  Target: LAMA2; (+) strand; PAM type: NRG; PAM sequence: CAG
tttttgaacacaagagctaa

SEQ ID NO: 147167 - DNA, 20 bp, Artificial Sequence
  Description of Artificial Sequence: Synthetic oligonucleotide
  Target: LAMA2; (+) strand; PAM type: NRG; PAM sequence: AAG
ttgaacacaagagctaacag

SEQ ID NO: 147168 - DNA, 20 bp, Artificial Sequence
  Description of Artificial Sequence: Synthetic oligonucleotide
  Target: LAMA2; (+) strand; PAM type: NRG; PAM sequence: CAG
ctaacagaagtgctgtcttc

SEQ ID NO: 147169 - DNA, 20 bp, Artificial Sequence
  Description of Artificial Sequence: Synthetic oligonucleotide
  Target: LAMA2; (+) strand; PAM type: NRG; PAM sequence: CAG
tgctgtcttccagtgttaaa

SEQ ID NO: 147170 - DNA, 20 bp, Artificial Sequence
  Description of Artificial Sequence: Synthetic oligonucleotide
  Target: LAMA2; (+) strand; PAM type: NRG; PAM sequence: AGG
gctgtcttccagtgttaaac

SEQ ID NO: 147171 - DNA, 20 bp, Artificial Sequence
  Description of Artificial Sequence: Synthetic oligonucleotide
  Target: LAMA2; (+) strand; PAM type: NRG; PAM sequence: TGG
cagtgttaaacaggaatttg

SEQ ID NO: 147172 - DNA, 20 bp, Artificial Sequence
  Description of Artificial Sequence: Synthetic oligonucleotide
  Target: LAMA2; (+) strand; PAM type: NRG; PAM sequence: GGG
agtgttaaacaggaatttgt

SEQ ID NO: 147173 - DNA, 20 bp, Artificial Sequence
  Description of Artificial Sequence: Synthetic oligonucleotide
  Target: LAMA2; (+) strand; PAM type: NRG; PAM sequence: AAG
acaggaatttgtgggattac

SEQ ID NO: 147174 - DNA, 20 bp, Artificial Sequence
  Description of Artificial Sequence: Synthetic oligonucleotide
  Target: LAMA2; (+) strand; PAM type: NRG; PAM sequence: TAG
gaatttgtgggattacaaga

SEQ ID NO: 147175 - DNA, 20 bp, Artificial Sequence
  Description of Artificial Sequence: Synthetic oligonucleotide
  Target: LAMA2; (+) strand; PAM type: NRG; PAM sequence: CAG
tacaagatagatgatcaacc

SEQ ID NO: 147176 - DNA, 20 bp, Artificial Sequence
  Description of Artificial Sequence: Synthetic oligonucleotide
  Target: LAMA2; (+) strand; PAM type: NRG; PAM sequence: GAG
tgatcaacccagattgctat

SEQ ID NO: 147177 - DNA, 20 bp, Artificial Sequence
  Description of Artificial Sequence: Synthetic oligonucleotide
  Target: LAMA2; (+) strand; PAM type: NRG; PAM sequence: TGG
ctaccttctaccatattcac

SEQ ID NO: 147178 - DNA, 20 bp, Artificial Sequence
  Description of Artificial Sequence: Synthetic oligonucleotide
  Target: LAMA2; (+) strand; PAM type: NRG; PAM sequence: TGG
ctaccatattcactggttta

SEQ ID NO: 147179 - DNA, 20 bp, Artificial Sequence
  Description of Artificial Sequence: Synthetic oligonucleotide
  Target: LAMA2; (+) strand; PAM type: NRG; PAM sequence: AAG
acatatgctgctacacaacc

SEQ ID NO: 147180 - DNA, 20 bp, Artificial Sequence
  Description of Artificial Sequence: Synthetic oligonucleotide
  Target: LAMA2; (+) strand; PAM type: NRG; PAM sequence: AGG
catatgctgctacacaacca

SEQ ID NO: 147181 - DNA, 20 bp, Artificial Sequence
  Description of Artificial Sequence: Synthetic oligonucleotide
  Target: LAMA2; (+) strand; PAM type: NRG; PAM sequence: CAG
cacaaccaaggcattattac

SEQ ID NO: 147182 - DNA, 20 bp, Artificial Sequence
  Description of Artificial Sequence: Synthetic oligonucleotide
  Target: LAMA2; (+) strand; PAM type: NRG; PAM sequence: AGG
acaaccaaggcattattacc

SEQ ID NO: 147183 - DNA, 20 bp, Artificial Sequence
  Description of Artificial Sequence: Synthetic oligonucleotide
  Target: LAMA2; (+) strand; PAM type: NRG; PAM sequence: GGG
caaccaaggcattattacca

SEQ ID NO: 147184 - DNA, 20 bp, Artificial Sequence
  Description of Artificial Sequence: Synthetic oligonucleotide
  Target: LAMA2; (+) strand; PAM type: NRG; PAM sequence: AAG
ccaaggcattattaccaggg

SEQ ID NO: 147185 - DNA, 20 bp, Artificial Sequence
  Description of Artificial Sequence: Synthetic oligonucleotide
  Target: LAMA2; (+) strand; PAM type: NRG; PAM sequence: CAG
tattaccagggaagtcaatt

SEQ ID NO: 147186 - DNA, 20 bp, Artificial Sequence
  Description of Artificial Sequence: Synthetic oligonucleotide
  Target: LAMA2; (+) strand; PAM type: NRG; PAM sequence: AAG
aattcagccataactctata

SEQ ID NO: 147187 - DNA, 20 bp, Artificial Sequence
  Description of Artificial Sequence: Synthetic oligonucleotide
  Target: LAMA2; (+) strand; PAM type: NRG; PAM sequence: TAG
ataaagtaaactcctgtgaa

SEQ ID NO: 147188 - DNA, 20 bp, Artificial Sequence
  Description of Artificial Sequence: Synthetic oligonucleotide
  Target: LAMA2; (+) strand; PAM type: NRG; PAM sequence: GAG
aaagtaaactcctgtgaata

SEQ ID NO: 147189 - DNA, 20 bp, Artificial Sequence
  Description of Artificial Sequence: Synthetic oligonucleotide
  Target: LAMA2; (+) strand; PAM type: NRG; PAM sequence: TAG
tagagtatctactgtatgac

SEQ ID NO: 147190 - DNA, 20 bp, Artificial Sequence
  Description of Artificial Sequence: Synthetic oligonucleotide
  Target: LAMA2; (+) strand; PAM type: NRG; PAM sequence: GAG
gagtatctactgtatgacta

SEQ ID NO: 147191 - DNA, 20 bp, Artificial Sequence
  Description of Artificial Sequence: Synthetic oligonucleotide
  Target: LAMA2; (+) strand; PAM type: NRG; PAM sequence: AGG
agtatctactgtatgactag

SEQ ID NO: 147192 - DNA, 20 bp, Artificial Sequence
  Description of Artificial Sequence: Synthetic oligonucleotide
  Target: LAMA2; (+) strand; PAM type: NRG; PAM sequence: TAG
ctactgtatgactagaggta

SEQ ID NO: 147193 - DNA, 20 bp, Artificial Sequence
  Description of Artificial Sequence: Synthetic oligonucleotide
  Target: LAMA2; (+) strand; PAM type: NRG; PAM sequence: AAG
gtatgactagaggtatagct

SEQ ID NO: 147194 - DNA, 20 bp, Artificial Sequence
  Description of Artificial Sequence: Synthetic oligonucleotide
  Target: LAMA2; (+) strand; PAM type: NRG; PAM sequence: AAG
tagaggtatagctaagaaaa

SEQ ID NO: 147195 - DNA, 20 bp, Artificial Sequence
  Description of Artificial Sequence: Synthetic oligonucleotide
  Target: LAMA2; (+) strand; PAM type: NRG; PAM sequence: TAG
atagctaagaaaaaagacta

SEQ ID NO: 147196 - DNA, 20 bp, Artificial Sequence
  Description of Artificial Sequence: Synthetic oligonucleotide
  Target: LAMA2; (+) strand; PAM type: NRG; PAM sequence: AGG
tagctaagaaaaaagactat

SEQ ID NO: 147197 - DNA, 20 bp, Artificial Sequence
  Description of Artificial Sequence: Synthetic oligonucleotide
  Target: LAMA2; (+) strand; PAM type: NRG; PAM sequence: GGG
agctaagaaaaaagactata

SEQ ID NO: 147198 - DNA, 20 bp, Artificial Sequence
  Description of Artificial Sequence: Synthetic oligonucleotide
  Target: LAMA2; (+) strand; PAM type: NRG; PAM sequence: GAG
ctaagaaaaaagactatagg

SEQ ID NO: 147199 - DNA, 20 bp, Artificial Sequence
  Description of Artificial Sequence: Synthetic oligonucleotide
  Target: LAMA2; (+) strand; PAM type: NRG; PAM sequence: TAG
atagggagaaattaatattg

SEQ ID NO: 147200 - DNA, 20 bp, Artificial Sequence
  Description of Artificial Sequence: Synthetic oligonucleotide
  Target: LAMA2; (+) strand; PAM type: NRG; PAM sequence: AGG
tagggagaaattaatattgt

SEQ ID NO: 147201 - DNA, 20 bp, Artificial Sequence
  Description of Artificial Sequence: Synthetic oligonucleotide
  Target: LAMA2; (+) strand; PAM type: NRG; PAM sequence: AAG
gaaattaatattgtaggaca

SEQ ID NO: 147202 - DNA, 20 bp, Artificial Sequence
  Description of Artificial Sequence: Synthetic oligonucleotide
  Target: LAMA2; (+) strand; PAM type: NRG; PAM sequence: TAG
taggacaaagcatttaattc

SEQ ID NO: 147203 - DNA, 20 bp, Artificial Sequence
  Description of Artificial Sequence: Synthetic oligonucleotide
  Target: LAMA2; (+) strand; PAM type: NRG; PAM sequence: AAG
aattctagaatgatcccact

SEQ ID NO: 147204 - DNA, 20 bp, Artificial Sequence
  Description of Artificial Sequence: Synthetic oligonucleotide
  Target: LAMA2; (+) strand; PAM type: NRG; PAM sequence: AGG
attctagaatgatcccacta

SEQ ID NO: 147205 - DNA, 20 bp, Artificial Sequence
  Description of Artificial Sequence: Synthetic oligonucleotide
  Target: LAMA2; (+) strand; PAM type: NRG; PAM sequence: AAG
tagaatgatcccactaaggt

SEQ ID NO: 147206 - DNA, 20 bp, Artificial Sequence
  Description of Artificial Sequence: Synthetic oligonucleotide
  Target: LAMA2; (+) strand; PAM type: NRG; PAM sequence: CGG
taaggtaagaccaccgtcat

SEQ ID NO: 147207 - DNA, 20 bp, Artificial Sequence
  Description of Artificial Sequence: Synthetic oligonucleotide
  Target: LAMA2; (+) strand; PAM type: NRG; PAM sequence: TAG
ttgcaaaattgctgaatcac

SEQ ID NO: 147208 - DNA, 20 bp, Artificial Sequence
  Description of Artificial Sequence: Synthetic oligonucleotide
  Target: LAMA2; (+) strand; PAM type: NRG; PAM sequence: AGG
tgcaaaattgctgaatcact

SEQ ID NO: 147209 - DNA, 20 bp, Artificial Sequence
  Description of Artificial Sequence: Synthetic oligonucleotide
  Target: LAMA2; (+) strand; PAM type: NRG; PAM sequence: GGG
gcaaaattgctgaatcacta

SEQ ID NO: 147210 - DNA, 20 bp, Artificial Sequence
  Description of Artificial Sequence: Synthetic oligonucleotide
  Target: LAMA2; (+) strand; PAM type: NRG; PAM sequence: TAG
tgctgaatcactagggttaa

SEQ ID NO: 147211 - DNA, 20 bp, Artificial Sequence
  Description of Artificial Sequence: Synthetic oligonucleotide
  Target: LAMA2; (+) strand; PAM type: NRG; PAM sequence: CAG
atcactagggttaatagtta

SEQ ID NO: 147212 - DNA, 20 bp, Artificial Sequence
  Description of Artificial Sequence: Synthetic oligonucleotide
  Target: LAMA2; (+) strand; PAM type: NRG; PAM sequence: AAG
cccaacctctccatcatcac

SEQ ID NO: 147213 - DNA, 20 bp, Artificial Sequence
  Description of Artificial Sequence: Synthetic oligonucleotide
  Target: LAMA2; (+) strand; PAM type: NRG; PAM sequence: AAG
atcatcacaagataactttt

SEQ ID NO: 147214 - DNA, 20 bp, Artificial Sequence
  Description of Artificial Sequence: Synthetic oligonucleotide
  Target: LAMA2; (+) strand; PAM type: NRG; PAM sequence: AGG
tcatcacaagataactttta

SEQ ID NO: 147215 - DNA, 20 bp, Artificial Sequence
  Description of Artificial Sequence: Synthetic oligonucleotide
  Target: LAMA2; (+) strand; PAM type: NRG; PAM sequence: TAG
caagataacttttaaggctt

SEQ ID NO: 147216 - DNA, 20 bp, Artificial Sequence
  Description of Artificial Sequence: Synthetic oligonucleotide
  Target: LAMA2; (+) strand; PAM type: NRG; PAM sequence: TAG
ataacttttaaggctttagt

SEQ ID NO: 147217 - DNA, 20 bp, Artificial Sequence
  Description of Artificial Sequence: Synthetic oligonucleotide
  Target: LAMA2; (+) strand; PAM type: NRG; PAM sequence: CAG
tagtcccatgcaacatatgt

SEQ ID NO: 147218 - DNA, 20 bp, Artificial Sequence
  Description of Artificial Sequence: Synthetic oligonucleotide
  Target: LAMA2; (+) strand; PAM type: NRG; PAM sequence: TAG
gcaacatatgtcagatgttt

SEQ ID NO: 147219 - DNA, 20 bp, Artificial Sequence
  Description of Artificial Sequence: Synthetic oligonucleotide
  Target: LAMA2; (+) strand; PAM type: NRG; PAM sequence: TAG
caaaactaatcattatttta

SEQ ID NO: 147220 - DNA, 20 bp, Artificial Sequence
  Description of Artificial Sequence: Synthetic oligonucleotide
  Target: LAMA2; (+) strand; PAM type: NRG; PAM sequence: TGG
cattattttatagcaatgtt

SEQ ID NO: 147221 - DNA, 20 bp, Artificial Sequence
  Description of Artificial Sequence: Synthetic oligonucleotide
  Target: LAMA2; (+) strand; PAM type: NRG; PAM sequence: AAG
tttggatttttcacttgttt

SEQ ID NO: 147222 - DNA, 20 bp, Artificial Sequence
  Description of Artificial Sequence: Synthetic oligonucleotide
  Target: LAMA2; (+) strand; PAM type: NRG; PAM sequence: TGG
aacattttcaattctaattt

SEQ ID NO: 147223 - DNA, 20 bp, Artificial Sequence
  Description of Artificial Sequence: Synthetic oligonucleotide
  Target: LAMA2; (+) strand; PAM type: NRG; PAM sequence: CGG
attttcaattctaattttgg

SEQ ID NO: 147224 - DNA, 20 bp, Artificial Sequence
  Description of Artificial Sequence: Synthetic oligonucleotide
  Target: LAMA2; (+) strand; PAM type: NRG; PAM sequence: GGG
ttttcaattctaattttggc

SEQ ID NO: 147225 - DNA, 20 bp, Artificial Sequence
  Description of Artificial Sequence: Synthetic oligonucleotide
  Target: LAMA2; (+) strand; PAM type: NRG; PAM sequence: AAG
gggacttaaaaatatacacc

SEQ ID NO: 147226 - DNA, 20 bp, Artificial Sequence
  Description of Artificial Sequence: Synthetic oligonucleotide
  Target: LAMA2; (+) strand; PAM type: NRG; PAM sequence: AGG
ggacttaaaaatatacacca

SEQ ID NO: 147227 - DNA, 20 bp, Artificial Sequence
  Description of Artificial Sequence: Synthetic oligonucleotide
  Target: LAMA2; (+) strand; PAM type: NRG; PAM sequence: AAG
cttaaaaatatacaccaagg

SEQ ID NO: 147228 - DNA, 20 bp, Artificial Sequence
  Description of Artificial Sequence: Synthetic oligonucleotide
  Target: LAMA2; (+) strand; PAM type: NRG; PAM sequence: TGG
aaatatacaccaaggaagac

SEQ ID NO: 147229 - DNA, 20 bp, Artificial Sequence
  Description of Artificial Sequence: Synthetic oligonucleotide
  Target: LAMA2; (+) strand; PAM type: NRG; PAM sequence: TGG
aaggaagactggtgtgaaat

SEQ ID NO: 147230 - DNA, 20 bp, Artificial Sequence
  Description of Artificial Sequence: Synthetic oligonucleotide
  Target: LAMA2; (+) strand; PAM type: NRG; PAM sequence: GAG
ggaagactggtgtgaaattg

SEQ ID NO: 147231 - DNA, 20 bp, Artificial Sequence
  Description of Artificial Sequence: Synthetic oligonucleotide
  Target: LAMA2; (+) strand; PAM type: NRG; PAM sequence: CAG
tgaaatttaatctttcttga

SEQ ID NO: 147232 - DNA, 20 bp, Artificial Sequence
  Description of Artificial Sequence: Synthetic oligonucleotide
  Target: LAMA2; (+) strand; PAM type: NRG; PAM sequence: CAG
tttcttgacagtatgtctat

SEQ ID NO: 147233 - DNA, 20 bp, Artificial Sequence
  Description of Artificial Sequence: Synthetic oligonucleotide
  Target: LAMA2; (+) strand; PAM type: NRG; PAM sequence: GAG
tcttgacagtatgtctatca

SEQ ID NO: 147234 - DNA, 20 bp, Artificial Sequence
  Description of Artificial Sequence: Synthetic oligonucleotide
  Target: LAMA2; (+) strand; PAM type: NRG; PAM sequence: TAG
aaaaatcaatgaaaataaat

SEQ ID NO: 147235 - DNA, 20 bp, Artificial Sequence
  Description of Artificial Sequence: Synthetic oligonucleotide
  Target: LAMA2; (+) strand; PAM type: NRG; PAM sequence: CAG
gttctttctatcatctcttg

SEQ ID NO: 147236 - DNA, 20 bp, Artificial Sequence
  Description of Artificial Sequence: Synthetic oligonucleotide
  Target: LAMA2; (+) strand; PAM type: NRG; PAM sequence: AGG
ttctttctatcatctcttgc

SEQ ID NO: 147237 - DNA, 20 bp, Artificial Sequence
  Description of Artificial Sequence: Synthetic oligonucleotide
  Target: LAMA2; (+) strand; PAM type: NRG; PAM sequence: GAG
ctttctatcatctcttgcag

SEQ ID NO: 147238 - DNA, 20 bp, Artificial Sequence
  Description of Artificial Sequence: Synthetic oligonucleotide
  Target: LAMA2; (+) strand; PAM type: NRG; PAM sequence: AGG
tttctatcatctcttgcagg

SEQ ID NO: 147239 - DNA, 20 bp, Artificial Sequence
  Description of Artificial Sequence: Synthetic oligonucleotide
  Target: LAMA2; (+) strand; PAM type: NRG; PAM sequence: TAG
ctatcatctcttgcaggagg

SEQ ID NO: 147240 - DNA, 20 bp, Artificial Sequence
  Description of Artificial Sequence: Synthetic oligonucleotide
  Target: LAMA2; (+) strand; PAM type: NRG; PAM sequence: GAG
atcatctcttgcaggaggta

SEQ ID NO: 147241 - DNA, 20 bp, Artificial Sequence
  Description of Artificial Sequence: Synthetic oligonucleotide
  Target: LAMA2; (+) strand; PAM type: NRG; PAM sequence: TGG
atctcttgcaggaggtagag

SEQ ID NO: 147242 - DNA, 20 bp, Artificial Sequence
  Description of Artificial Sequence: Synthetic oligonucleotide
  Target: LAMA2; (+) strand; PAM type: NRG; PAM sequence: GGG
tctcttgcaggaggtagagt

SEQ ID NO: 147243 - DNA, 20 bp, Artificial Sequence
  Description of Artificial Sequence: Synthetic oligonucleotide
  Target: LAMA2; (+) strand; PAM type: NRG; PAM sequence: GGG
ctcttgcaggaggtagagtg

SEQ ID NO: 147244 - DNA, 20 bp, Artificial Sequence
  Description of Artificial Sequence: Synthetic oligonucleotide
  Target: LAMA2; (+) strand; PAM type: NRG; PAM sequence: GGG
tcttgcaggaggtagagtgg

SEQ ID NO: 147245 - DNA, 20 bp, Artificial Sequence
  Description of Artificial Sequence: Synthetic oligonucleotide
  Target: LAMA2; (+) strand; PAM type: NRG; PAM sequence: TGG
gcaggaggtagagtgggggt

SEQ ID NO: 147246 - DNA, 20 bp, Artificial Sequence
  Description of Artificial Sequence: Synthetic oligonucleotide
  Target: LAMA2; (+) strand; PAM type: NRG; PAM sequence: GGG
caggaggtagagtgggggtt

SEQ ID NO: 147247 - DNA, 20 bp, Artificial Sequence
  Description of Artificial Sequence: Synthetic oligonucleotide
  Target: LAMA2; (+) strand; PAM type: NRG; PAM sequence: GGG
aggaggtagagtgggggttg

SEQ ID NO: 147248 - DNA, 20 bp, Artificial Sequence
  Description of Artificial Sequence: Synthetic oligonucleotide
  Target: LAMA2; (+) strand; PAM type: NRG; PAM sequence: GAG
tttataactttatcgtacat

SEQ ID NO: 147249 - DNA, 20 bp, Artificial Sequence
  Description of Artificial Sequence: Synthetic oligonucleotide
  Target: LAMA2; (+) strand; PAM type: NRG; PAM sequence: CAG
catgagtctttaaaataatg

SEQ ID NO: 147250 - DNA, 20 bp, Artificial Sequence
  Description of Artificial Sequence: Synthetic oligonucleotide
  Target: LAMA2; (+) strand; PAM type: NRG; PAM sequence: AAG
tctttaaaataatgcagtat

SEQ ID NO: 147251 - DNA, 20 bp, Artificial Sequence
  Description of Artificial Sequence: Synthetic oligonucleotide
  Target: LAMA2; (+) strand; PAM type: NRG; PAM sequence: AAG
catataaatatgttttttga

SEQ ID NO: 147252 - DNA, 20 bp, Artificial Sequence
  Description of Artificial Sequence: Synthetic oligonucleotide
  Target: LAMA2; (+) strand; PAM type: NRG; PAM sequence: AAG
tatgttttttgaaagtactc

SEQ ID NO: 147253 - DNA, 20 bp, Artificial Sequence
  Description of Artificial Sequence: Synthetic oligonucleotide
  Target: LAMA2; (+) strand; PAM type: NRG; PAM sequence: AAG
tcatttaaatatataaaaat

SEQ ID NO: 147254 - DNA, 20 bp, Artificial Sequence
  Description of Artificial Sequence: Synthetic oligonucleotide
  Target: LAMA2; (+) strand; PAM type: NRG; PAM sequence: TAG
ttaaatatataaaaataaga

SEQ ID NO: 147255 - DNA, 20 bp, Artificial Sequence
  Description of Artificial Sequence: Synthetic oligonucleotide
  Target: LAMA2; (+) strand; PAM type: NRG; PAM sequence: CAG
aaaaataagatagcaaattt

SEQ ID NO: 147256 - DNA, 20 bp, Artificial Sequence
  Description of Artificial Sequence: Synthetic oligonucleotide
  Target: LAMA2; (+) strand; PAM type: NRG; PAM sequence: AAG
agctcttcttcatgactcaa

SEQ ID NO: 147257 - DNA, 20 bp, Artificial Sequence
  Description of Artificial Sequence: Synthetic oligonucleotide
  Target: LAMA2; (+) strand; PAM type: NRG; PAM sequence: AAG
ttcttcatgactcaaaagca

SEQ ID NO: 147258 - DNA, 20 bp, Artificial Sequence
  Description of Artificial Sequence: Synthetic oligonucleotide
  Target: LAMA2; (+) strand; PAM type: NRG; PAM sequence: TAG
ttatacatttatatttaaaa

SEQ ID NO: 147259 - DNA, 20 bp, Artificial Sequence
  Description of Artificial Sequence: Synthetic oligonucleotide
  Target: LAMA2; (+) strand; PAM type: NRG; PAM sequence: CAG
tatatttaaaatagatttcc

SEQ ID NO: 147260 - DNA, 20 bp, Artificial Sequence
  Description of Artificial Sequence: Synthetic oligonucleotide
  Target: LAMA2; (+) strand; PAM type: NRG; PAM sequence: AAG
aatagatttcccagttttaa

SEQ ID NO: 147261 - DNA, 20 bp, Artificial Sequence
  Description of Artificial Sequence: Synthetic oligonucleotide
  Target: LAMA2; (+) strand; PAM type: NRG; PAM sequence: CAG
atttacaaatactactgtat

SEQ ID NO: 147262 - DNA, 20 bp, Artificial Sequence
  Description of Artificial Sequence: Synthetic oligonucleotide
  Target: LAMA2; (+) strand; PAM type: NRG; PAM sequence: AAG
tactactgtatcagcttttt

SEQ ID NO: 147263 - DNA, 20 bp, Artificial Sequence
  Description of Artificial Sequence: Synthetic oligonucleotide
  Target: LAMA2; (+) strand; PAM type: NRG; PAM sequence: AAG
ctatttgtgtctatattatt

SEQ ID NO: 147264 - DNA, 20 bp, Artificial Sequence
  Description of Artificial Sequence: Synthetic oligonucleotide
  Target: LAMA2; (+) strand; PAM type: NRG; PAM sequence: GAG
tgtctatattattaagtgat

SEQ ID NO: 147265 - DNA, 20 bp, Artificial Sequence
  Description of Artificial Sequence: Synthetic oligonucleotide
  Target: LAMA2; (+) strand; PAM type: NRG; PAM sequence: AGG
gtctatattattaagtgatg

SEQ ID NO: 147266 - DNA, 20 bp, Artificial Sequence
  Description of Artificial Sequence: Synthetic oligonucleotide
  Target: LAMA2; (+) strand; PAM type: NRG; PAM sequence: TGG
tattaagtgatgaggttaaa

SEQ ID NO: 147267 - DNA, 20 bp, Artificial Sequence
  Description of Artificial Sequence: Synthetic oligonucleotide
  Target: LAMA2; (+) strand; PAM type: NRG; PAM sequence: TAG
tttatactatccaaactccc

SEQ ID NO: 147268 - DNA, 20 bp, Artificial Sequence
  Description of Artificial Sequence: Synthetic oligonucleotide
  Target: LAMA2; (+) strand; PAM type: NRG; PAM sequence: CAG
tactatccaaactccctagc

SEQ ID NO: 147269 - DNA, 20 bp, Artificial Sequence
  Description of Artificial Sequence: Synthetic oligonucleotide
  Target: LAMA2; (+) strand; PAM type: NRG; PAM sequence: TAG
aactccctagccagttccat

SEQ ID NO: 147270 - DNA, 20 bp, Artificial Sequence
  Description of Artificial Sequence: Synthetic oligonucleotide
  Target: LAMA2; (+) strand; PAM type: NRG; PAM sequence: AAG
ctagccagttccattagttc

SEQ ID NO: 147271 - DNA, 20 bp, Artificial Sequence
  Description of Artificial Sequence: Synthetic oligonucleotide
  Target: LAMA2; (+) strand; PAM type: NRG; PAM sequence: AGG
tagccagttccattagttca

SEQ ID NO: 147272 - DNA, 20 bp, Artificial Sequence
  Description of Artificial Sequence: Synthetic oligonucleotide
  Target: LAMA2; (+) strand; PAM type: NRG; PAM sequence: TAG
agttccattagttcaaggtc

SEQ ID NO: 147273 - DNA, 20 bp, Artificial Sequence
  Description of Artificial Sequence: Synthetic oligonucleotide
  Target: LAMA2; (+) strand; PAM type: NRG; PAM sequence: AGG
gttccattagttcaaggtct

SEQ ID NO: 147274 - DNA, 20 bp, Artificial Sequence
  Description of Artificial Sequence: Synthetic oligonucleotide
  Target: LAMA2; (+) strand; PAM type: NRG; PAM sequence: AAG
aaggtctaggtatatcaaat

SEQ ID NO: 147275 - DNA, 20 bp, Artificial Sequence
  Description of Artificial Sequence: Synthetic oligonucleotide
  Target: LAMA2; (+) strand; PAM type: NRG; PAM sequence: AAG
acataacaaaaatattttca

SEQ ID NO: 147276 - DNA, 20 bp, Artificial Sequence
  Description of Artificial Sequence: Synthetic oligonucleotide
  Target: LAMA2; (+) strand; PAM type: NRG; PAM sequence: TAG
atgtatgtaacaaaaacaaa

SEQ ID NO: 147277 - DNA, 20 bp, Artificial Sequence
  Description of Artificial Sequence: Synthetic oligonucleotide
  Target: LAMA2; (+) strand; PAM type: NRG; PAM sequence: AAG
tatgtaacaaaaacaaatag

SEQ ID NO: 147278 - DNA, 20 bp, Artificial Sequence
  Description of Artificial Sequence: Synthetic oligonucleotide
  Target: LAMA2; (+) strand; PAM type: NRG; PAM sequence: AGG
atgtaacaaaaacaaataga

SEQ ID NO: 147279 - DNA, 20 bp, Artificial Sequence
  Description of Artificial Sequence: Synthetic oligonucleotide
  Target: LAMA2; (+) strand; PAM type: NRG; PAM sequence: AAG
caaaaacaaatagaaggaaa

SEQ ID NO: 147280 - DNA, 20 bp, Artificial Sequence
  Description of Artificial Sequence: Synthetic oligonucleotide
  Target: LAMA2; (+) strand; PAM type: NRG; PAM sequence: AAG
aatagaaggaaaaagaaaca

SEQ ID NO: 147281 - DNA, 20 bp, Artificial Sequence
  Description of Artificial Sequence: Synthetic oligonucleotide
  Target: LAMA2; (+) strand; PAM type: NRG; PAM sequence: AAG
agaaggaaaaagaaacaaag

SEQ ID NO: 147282 - DNA, 20 bp, Artificial Sequence
  Description of Artificial Sequence: Synthetic oligonucleotide
  Target: LAMA2; (+) strand; PAM type: NRG; PAM sequence: TGG
aaagaaacaaagaagtaaat

SEQ ID NO: 147283 - DNA, 20 bp, Artificial Sequence
  Description of Artificial Sequence: Synthetic oligonucleotide
  Target: LAMA2; (+) strand; PAM type: NRG; PAM sequence: AAG
acaaagaagtaaattggaaa

SEQ ID NO: 147284 - DNA, 20 bp, Artificial Sequence
  Description of Artificial Sequence: Synthetic oligonucleotide
  Target: LAMA2; (+) strand; PAM type: NRG; PAM sequence: AGG
caaagaagtaaattggaaaa

SEQ ID NO: 147285 - DNA, 20 bp, Artificial Sequence
  Description of Artificial Sequence: Synthetic oligonucleotide
  Target: LAMA2; (+) strand; PAM type: NRG; PAM sequence: GGG
aaagaagtaaattggaaaaa

SEQ ID NO: 147286 - DNA, 20 bp, Artificial Sequence
  Description of Artificial Sequence: Synthetic oligonucleotide
  Target: LAMA2; (+) strand; PAM type: NRG; PAM sequence: GGG
aagaagtaaattggaaaaag

SEQ ID NO: 147287 - DNA, 20 bp, Artificial Sequence
  Description of Artificial Sequence: Synthetic oligonucleotide
  Target: LAMA2; (+) strand; PAM type: NRG; PAM sequence: TAG
aattggaaaaaggggattct

SEQ ID NO: 147288 - DNA, 20 bp, Artificial Sequence
  Description of Artificial Sequence: Synthetic oligonucleotide
  Target: LAMA2; (+) strand; PAM type: NRG; PAM sequence: AAG
gaaaaaggggattcttagtc

SEQ ID NO: 147289 - DNA, 20 bp, Artificial Sequence
  Description of Artificial Sequence: Synthetic oligonucleotide
  Target: LAMA2; (+) strand; PAM type: NRG; PAM sequence: AGG
aaaaaggggattcttagtca

SEQ ID NO: 147290 - DNA, 20 bp, Artificial Sequence
  Description of Artificial Sequence: Synthetic oligonucleotide
  Target: LAMA2; (+) strand; PAM type: NRG; PAM sequence: CAG
ggattcttagtcaaggaact

SEQ ID NO: 147291 - DNA, 20 bp, Artificial Sequence
  Description of Artificial Sequence: Synthetic oligonucleotide
  Target: LAMA2; (+) strand; PAM type: NRG; PAM sequence: TAG
atgtgtccacctacatattc

SEQ ID NO: 147292 - DNA, 20 bp, Artificial Sequence
  Description of Artificial Sequence: Synthetic oligonucleotide
  Target: LAMA2; (+) strand; PAM type: NRG; PAM sequence: TGG
tttttgtgtgtgtgtataat

SEQ ID NO: 147293 - DNA, 20 bp, Artificial Sequence
  Description of Artificial Sequence: Synthetic oligonucleotide
  Target: LAMA2; (+) strand; PAM type: NRG; PAM sequence: TAG
tgtgtgtataattggaataa

SEQ ID NO: 147294 - DNA, 20 bp, Artificial Sequence
  Description of Artificial Sequence: Synthetic oligonucleotide
  Target: LAMA2; (+) strand; PAM type: NRG; PAM sequence: AAG
taatagaactatctaacgct

SEQ ID NO: 147295 - DNA, 20 bp, Artificial Sequence
  Description of Artificial Sequence: Synthetic oligonucleotide
  Target: LAMA2; (+) strand; PAM type: NRG; PAM sequence: AAG
tatttgaatatgataatgta

SEQ ID NO: 147296 - DNA, 20 bp, Artificial Sequence
  Description of Artificial Sequence: Synthetic oligonucleotide
  Target: LAMA2; (+) strand; PAM type: NRG; PAM sequence: TAG
attaattaaaattttaaaaa

SEQ ID NO: 147297 - DNA, 20 bp, Artificial Sequence
  Description of Artificial Sequence: Synthetic oligonucleotide
  Target: LAMA2; (+) strand; PAM type: NRG; PAM sequence: TAG
ttaaaattttaaaaatagtc

SEQ ID NO: 147298 - DNA, 20 bp, Artificial Sequence
  Description of Artificial Sequence: Synthetic oligonucleotide
  Target: LAMA2; (+) strand; PAM type: NRG; PAM sequence: TAG
ccataattatccttaaaaaa

SEQ ID NO: 147299 - DNA, 20 bp, Artificial Sequence
  Description of Artificial Sequence: Synthetic oligonucleotide
  Target: LAMA2; (+) strand; PAM type: NRG; PAM sequence: TGG
aattatccttaaaaaatagc

SEQ ID NO: 147300 - DNA, 20 bp, Artificial Sequence
  Description of Artificial Sequence: Synthetic oligonucleotide
  Target: LAMA2; (+) strand; PAM type: NRG; PAM sequence: GGG
attatccttaaaaaatagct

SEQ ID NO: 147301 - DNA, 20 bp, Artificial Sequence
  Description of Artificial Sequence: Synthetic oligonucleotide
  Target: LAMA2; (+) strand; PAM type: NRG; PAM sequence: TAG
atccttaaaaaatagctggg

SEQ ID NO: 147302 - DNA, 20 bp, Artificial Sequence
  Description of Artificial Sequence: Synthetic oligonucleotide
  Target: LAMA2; (+) strand; PAM type: NRG; PAM sequence: TAG
gctgggtagattaaaataat

SEQ ID NO: 147303 - DNA, 20 bp, Artificial Sequence
  Description of Artificial Sequence: Synthetic oligonucleotide
  Target: LAMA2; (+) strand; PAM type: NRG; PAM sequence: TAG
gattaaaataattagtaaca

SEQ ID NO: 147304 - DNA, 20 bp, Artificial Sequence
  Description of Artificial Sequence: Synthetic oligonucleotide
  Target: LAMA2; (+) strand; PAM type: NRG; PAM sequence: AAG
ctatgttaacttcatataca

SEQ ID NO: 147305 - DNA, 20 bp, Artificial Sequence
  Description of Artificial Sequence: Synthetic oligonucleotide
  Target: LAMA2; (+) strand; PAM type: NRG; PAM sequence: AGG
tatgttaacttcatatacaa

SEQ ID NO: 147306 - DNA, 20 bp, Artificial Sequence
  Description of Artificial Sequence: Synthetic oligonucleotide
  Target: LAMA2; (+) strand; PAM type: NRG; PAM sequence: TGG
catatacaaaggtaattgta

SEQ ID NO: 147307 - DNA, 20 bp, Artificial Sequence
  Description of Artificial Sequence: Synthetic oligonucleotide
  Target: LAMA2; (+) strand; PAM type: NRG; PAM sequence: TAG
attgtatggactatattaca

SEQ ID NO: 147308 - DNA, 20 bp, Artificial Sequence
  Description of Artificial Sequence: Synthetic oligonucleotide
  Target: LAMA2; (+) strand; PAM type: NRG; PAM sequence: CAG
tgttctgcacaataaactta

SEQ ID NO: 147309 - DNA, 20 bp, Artificial Sequence
  Description of Artificial Sequence: Synthetic oligonucleotide
  Target: LAMA2; (+) strand; PAM type: NRG; PAM sequence: TGG
ttttaattttcttcttaata

SEQ ID NO: 147310 - DNA, 20 bp, Artificial Sequence
  Description of Artificial Sequence: Synthetic oligonucleotide
  Target: LAMA2; (+) strand; PAM type: NRG; PAM sequence: AAG
attttcttcttaatatggtt

SEQ ID NO: 147311 - DNA, 20 bp, Artificial Sequence
  Description of Artificial Sequence: Synthetic oligonucleotide
  Target: LAMA2; (+) strand; PAM type: NRG; PAM sequence: AGG
ttttcttcttaatatggtta

SEQ ID NO: 147312 - DNA, 20 bp, Artificial Sequence
  Description of Artificial Sequence: Synthetic oligonucleotide
  Target: LAMA2; (+) strand; PAM type: NRG; PAM sequence: GAG
gttaaggaatatattgttat

SEQ ID NO: 147313 - DNA, 20 bp, Artificial Sequence
  Description of Artificial Sequence: Synthetic oligonucleotide
  Target: LAMA2; (+) strand; PAM type: NRG; PAM sequence: CAG
ttatgagcacaatttctacc

SEQ ID NO: 147314 - DNA, 20 bp, Artificial Sequence
  Description of Artificial Sequence: Synthetic oligonucleotide
  Target: LAMA2; (+) strand; PAM type: NRG; PAM sequence: TGG
aatttctacccagattttgt

SEQ ID NO: 147315 - DNA, 20 bp, Artificial Sequence
  Description of Artificial Sequence: Synthetic oligonucleotide
  Target: LAMA2; (+) strand; PAM type: NRG; PAM sequence: AAG
tggttcttttcaaatccatc

SEQ ID NO: 147316 - DNA, 20 bp, Artificial Sequence
  Description of Artificial Sequence: Synthetic oligonucleotide
  Target: LAMA2; (+) strand; PAM type: NRG; PAM sequence: CAG
ttcaaatccatcaagtaaaa

SEQ ID NO: 147317 - DNA, 20 bp, Artificial Sequence
  Description of Artificial Sequence: Synthetic oligonucleotide
  Target: LAMA2; (+) strand; PAM type: NRG; PAM sequence: CAG
cgtatgatttgtgaatactg

SEQ ID NO: 147318 - DNA, 20 bp, Artificial Sequence
  Description of Artificial Sequence: Synthetic oligonucleotide
  Target: LAMA2; (+) strand; PAM type: NRG; PAM sequence: AAG
agttgctataatcacaataa

SEQ ID NO: 147319 - DNA, 20 bp, Artificial Sequence
  Description of Artificial Sequence: Synthetic oligonucleotide
  Target: LAMA2; (+) strand; PAM type: NRG; PAM sequence: GAG
ttgctataatcacaataaaa

SEQ ID NO: 147320 - DNA, 20 bp, Artificial Sequence
  Description of Artificial Sequence: Synthetic oligonucleotide
  Target: LAMA2; (+) strand; PAM type: NRG; PAM sequence: AGG
tgctataatcacaataaaag

SEQ ID NO: 147321 - DNA, 20 bp, Artificial Sequence
  Description of Artificial Sequence: Synthetic oligonucleotide
  Target: LAMA2; (+) strand; PAM type: NRG; PAM sequence: GGG
gctataatcacaataaaaga

SEQ ID NO: 147322 - DNA, 20 bp, Artificial Sequence
  Description of Artificial Sequence: Synthetic oligonucleotide
  Target: LAMA2; (+) strand; PAM type: NRG; PAM sequence: AAG
aataaaagagggtttcttgc

SEQ ID NO: 147323 - DNA, 20 bp, Artificial Sequence
  Description of Artificial Sequence: Synthetic oligonucleotide
  Target: LAMA2; (+) strand; PAM type: NRG; PAM sequence: AAG
tatgtaaaacaacttttatg

SEQ ID NO: 147324 - DNA, 20 bp, Artificial Sequence
  Description of Artificial Sequence: Synthetic oligonucleotide
  Target: LAMA2; (+) strand; PAM type: NRG; PAM sequence: TAG
aaaacaacttttatgaagaa

SEQ ID NO: 147325 - DNA, 20 bp, Artificial Sequence
  Description of Artificial Sequence: Synthetic oligonucleotide
  Target: LAMA2; (+) strand; PAM type: NRG; PAM sequence: TAG
ttatgaagaatagctgtcct

SEQ ID NO: 147326 - DNA, 20 bp, Artificial Sequence
  Description of Artificial Sequence: Synthetic oligonucleotide
  Target: LAMA2; (+) strand; PAM type: NRG; PAM sequence: CAG
agaatagctgtccttagccc

SEQ ID NO: 147327 - DNA, 20 bp, Artificial Sequence
  Description of Artificial Sequence: Synthetic oligonucleotide
  Target: LAMA2; (+) strand; PAM type: NRG; PAM sequence: CAG
ccccagataaaaactactgt

SEQ ID NO: 147328 - DNA, 20 bp, Artificial Sequence
  Description of Artificial Sequence: Synthetic oligonucleotide
  Target: LAMA2; (+) strand; PAM type: NRG; PAM sequence: CAG
ataaaaactactgtcagcca

SEQ ID NO: 147329 - DNA, 20 bp, Artificial Sequence
  Description of Artificial Sequence: Synthetic oligonucleotide
  Target: LAMA2; (+) strand; PAM type: NRG; PAM sequence: AGG
taaaaactactgtcagccac

SEQ ID NO: 147330 - DNA, 20 bp, Artificial Sequence
  Description of Artificial Sequence: Synthetic oligonucleotide
  Target: LAMA2; (+) strand; PAM type: NRG; PAM sequence: TAG
actgtcagccacaggtactc

SEQ ID NO: 147331 - DNA, 20 bp, Artificial Sequence
  Description of Artificial Sequence: Synthetic oligonucleotide
  Target: LAMA2; (+) strand; PAM type: NRG; PAM sequence: TGG
cagccacaggtactctagca

SEQ ID NO: 147332 - DNA, 20 bp, Artificial Sequence
  Description of Artificial Sequence: Synthetic oligonucleotide
  Target: LAMA2; (+) strand; PAM type: NRG; PAM sequence: TGG
caggtactctagcatggact

SEQ ID NO: 147333 - DNA, 20 bp, Artificial Sequence
  Description of Artificial Sequence: Synthetic oligonucleotide
  Target: LAMA2; (+) strand; PAM type: NRG; PAM sequence: TGG
agcatggacttggtgctgac

SEQ ID NO: 147334 - DNA, 20 bp, Artificial Sequence
  Description of Artificial Sequence: Synthetic oligonucleotide
  Target: LAMA2; (+) strand; PAM type: NRG; PAM sequence: GGG
gcatggacttggtgctgact

SEQ ID NO: 147335 - DNA, 20 bp, Artificial Sequence
  Description of Artificial Sequence: Synthetic oligonucleotide
  Target: LAMA2; (+) strand; PAM type: NRG; PAM sequence: AAG
acttggtgctgactgggaaa

SEQ ID NO: 147336 - DNA, 20 bp, Artificial Sequence
  Description of Artificial Sequence: Synthetic oligonucleotide
  Target: LAMA2; (+) strand; PAM type: NRG; PAM sequence: TAG
atatttctaaaatgcccaac

SEQ ID NO: 147337 - DNA, 20 bp, Artificial Sequence
  Description of Artificial Sequence: Synthetic oligonucleotide
  Target: LAMA2; (+) strand; PAM type: NRG; PAM sequence: AAG
tgcccaactagcttaaatta

SEQ ID NO: 147338 - DNA, 20 bp, Artificial Sequence
  Description of Artificial Sequence: Synthetic oligonucleotide
  Target: LAMA2; (+) strand; PAM type: NRG; PAM sequence: AGG
gcccaactagcttaaattaa

SEQ ID NO: 147339 - DNA, 20 bp, Artificial Sequence
  Description of Artificial Sequence: Synthetic oligonucleotide
  Target: LAMA2; (+) strand; PAM type: NRG; PAM sequence: TGG
attaaaggccactcttcctt

SEQ ID NO: 147340 - DNA, 20 bp, Artificial Sequence
  Description of Artificial Sequence: Synthetic oligonucleotide
  Target: LAMA2; (+) strand; PAM type: NRG; PAM sequence: GGG
ttaaaggccactcttccttt

SEQ ID NO: 147341 - DNA, 20 bp, Artificial Sequence
  Description of Artificial Sequence: Synthetic oligonucleotide
  Target: LAMA2; (+) strand; PAM type: NRG; PAM sequence: AAG
ggccactcttcctttgggct

SEQ ID NO: 147342 - DNA, 20 bp, Artificial Sequence
  Description of Artificial Sequence: Synthetic oligonucleotide
  Target: LAMA2; (+) strand; PAM type: NRG; PAM sequence: CAG
cttcctttgggctaagatca

SEQ ID NO: 147343 - DNA, 20 bp, Artificial Sequence
  Description of Artificial Sequence: Synthetic oligonucleotide
  Target: LAMA2; (+) strand; PAM type: NRG; PAM sequence: AAG
tgggctaagatcacagtgct

SEQ ID NO: 147344 - DNA, 20 bp, Artificial Sequence
  Description of Artificial Sequence: Synthetic oligonucleotide
  Target: LAMA2; (+) strand; PAM type: NRG; PAM sequence: GAG
ggctaagatcacagtgctaa

SEQ ID NO: 147345 - DNA, 20 bp, Artificial Sequence
  Description of Artificial Sequence: Synthetic oligonucleotide
  Target: LAMA2; (+) strand; PAM type: NRG; PAM sequence: CAG
agtgctaagagttactttgt

SEQ ID NO: 147346 - DNA, 20 bp, Artificial Sequence
  Description of Artificial Sequence: Synthetic oligonucleotide
  Target: LAMA2; (+) strand; PAM type: NRG; PAM sequence: GAG
agttactttgtcagttttgt

SEQ ID NO: 147347 - DNA, 20 bp, Artificial Sequence
  Description of Artificial Sequence: Synthetic oligonucleotide
  Target: LAMA2; (+) strand; PAM type: NRG; PAM sequence: AAG
gtgagtcctcacttgtcctc

SEQ ID NO: 147348 - DNA, 20 bp, Artificial Sequence
  Description of Artificial Sequence: Synthetic oligonucleotide
  Target: LAMA2; (+) strand; PAM type: NRG; PAM sequence: AAG
acacaaatgtccttcaaact

SEQ ID NO: 147349 - DNA, 20 bp, Artificial Sequence
  Description of Artificial Sequence: Synthetic oligonucleotide
  Target: LAMA2; (+) strand; PAM type: NRG; PAM sequence: AGG
cacaaatgtccttcaaacta

SEQ ID NO: 147350 - DNA, 20 bp, Artificial Sequence
  Description of Artificial Sequence: Synthetic oligonucleotide
  Target: LAMA2; (+) strand; PAM type: NRG; PAM sequence: AAG
gtccttcaaactaaggataa

SEQ ID NO: 147351 - DNA, 20 bp, Artificial Sequence
  Description of Artificial Sequence: Synthetic oligonucleotide
  Target: LAMA2; (+) strand; PAM type: NRG; PAM sequence: CAG
cttcaaactaaggataaaag

SEQ ID NO: 147352 - DNA, 20 bp, Artificial Sequence
  Description of Artificial Sequence: Synthetic oligonucleotide
  Target: LAMA2; (+) strand; PAM type: NRG; PAM sequence: AAG
aaggataaaagcagaaaata

SEQ ID NO: 147353 - DNA, 20 bp, Artificial Sequence
  Description of Artificial Sequence: Synthetic oligonucleotide
  Target: LAMA2; (+) strand; PAM type: NRG; PAM sequence: CAG
cttttgttactttgaccttg

SEQ ID NO: 147354 - DNA, 20 bp, Artificial Sequence
  Description of Artificial Sequence: Synthetic oligonucleotide
  Target: LAMA2; (+) strand; PAM type: NRG; PAM sequence: CAG
tgaccttgcagtcatcttaa

SEQ ID NO: 147355 - DNA, 20 bp, Artificial Sequence
  Description of Artificial Sequence: Synthetic oligonucleotide
  Target: LAMA2; (+) strand; PAM type: NRG; PAM sequence: AGG
gaccttgcagtcatcttaac

SEQ ID NO: 147356 - DNA, 20 bp, Artificial Sequence
  Description of Artificial Sequence: Synthetic oligonucleotide
  Target: LAMA2; (+) strand; PAM type: NRG; PAM sequence: TGG
atcttaacaggatttctctc

SEQ ID NO: 147357 - DNA, 20 bp, Artificial Sequence
  Description of Artificial Sequence: Synthetic oligonucleotide
  Target: LAMA2; (+) strand; PAM type: NRG; PAM sequence: CAG
tctctctggattgctttttg

SEQ ID NO: 147358 - DNA, 20 bp, Artificial Sequence
  Description of Artificial Sequence: Synthetic oligonucleotide
  Target: LAMA2; (+) strand; PAM type: NRG; PAM sequence: CGG
ctttttgcagtattactact

SEQ ID NO: 147359 - DNA, 20 bp, Artificial Sequence
  Description of Artificial Sequence: Synthetic oligonucleotide
  Target: LAMA2; (+) strand; PAM type: NRG; PAM sequence: AAG
tgcagtattactactcggtc

SEQ ID NO: 147360 - DNA, 20 bp, Artificial Sequence
  Description of Artificial Sequence: Synthetic oligonucleotide
  Target: LAMA2; (+) strand; PAM type: NRG; PAM sequence: AGG
gcagtattactactcggtca

SEQ ID NO: 147361 - DNA, 20 bp, Artificial Sequence
  Description of Artificial Sequence: Synthetic oligonucleotide
  Target: LAMA2; (+) strand; PAM type: NRG; PAM sequence: CAG
ctactcggtcaaggatattt

SEQ ID NO: 147362 - DNA, 20 bp, Artificial Sequence
  Description of Artificial Sequence: Synthetic oligonucleotide
  Target: LAMA2; (+) strand; PAM type: NRG; PAM sequence: TGG
tcggtcaaggatatttcagt

SEQ ID NO: 147363 - DNA, 20 bp, Artificial Sequence
  Description of Artificial Sequence: Synthetic oligonucleotide
  Target: LAMA2; (+) strand; PAM type: NRG; PAM sequence: GAG
ggtcaaggatatttcagttg

SEQ ID NO: 147364 - DNA, 20 bp, Artificial Sequence
  Description of Artificial Sequence: Synthetic oligonucleotide
  Target: LAMA2; (+) strand; PAM type: NRG; PAM sequence: AGG
gtcaaggatatttcagttgg

SEQ ID NO: 147365 - DNA, 20 bp, Artificial Sequence
  Description of Artificial Sequence: Synthetic oligonucleotide
  Target: LAMA2; (+) strand; PAM type: NRG; PAM sequence: GGG
tcaaggatatttcagttgga

SEQ ID NO: 147366 - DNA, 20 bp, Artificial Sequence
  Description of Artificial Sequence: Synthetic oligonucleotide
  Target: LAMA2; (+) strand; PAM type: NRG; PAM sequence: TGG
ggagggatgtgcatctgcta

SEQ ID NO: 147367 - DNA, 20 bp, Artificial Sequence
  Description of Artificial Sequence: Synthetic oligonucleotide
  Target: LAMA2; (+) strand; PAM type: NRG; PAM sequence: CAG
tgcatctgctatggtcatgc

SEQ ID NO: 147368 - DNA, 20 bp, Artificial Sequence
  Description of Artificial Sequence: Synthetic oligonucleotide
  Target: LAMA2; (+) strand; PAM type: NRG; PAM sequence: AGG
gcatctgctatggtcatgcc

SEQ ID NO: 147369 - DNA, 20 bp, Artificial Sequence
  Description of Artificial Sequence: Synthetic oligonucleotide
  Target: LAMA2; (+) strand; PAM type: NRG; PAM sequence: GGG
catctgctatggtcatgcca

SEQ ID NO: 147370 - DNA, 20 bp, Artificial Sequence
  Description of Artificial Sequence: Synthetic oligonucleotide
  Target: LAMA2; (+) strand; PAM type: NRG; PAM sequence: CAG
cagggcttgtccacttgatc

SEQ ID NO: 147371 - DNA, 20 bp, Artificial Sequence
  Description of Artificial Sequence: Synthetic oligonucleotide
  Target: LAMA2; (+) strand; PAM type: NRG; PAM sequence: TAG
gacaaatgtatgtatattta

SEQ ID NO: 147372 - DNA, 20 bp, Artificial Sequence
  Description of Artificial Sequence: Synthetic oligonucleotide
  Target: LAMA2; (+) strand; PAM type: NRG; PAM sequence: AGG
acaaatgtatgtatatttat

SEQ ID NO: 147373 - DNA, 20 bp, Artificial Sequence
  Description of Artificial Sequence: Synthetic oligonucleotide
  Target: LAMA2; (+) strand; PAM type: NRG; PAM sequence: TAG
atgtatatttataggatgct

SEQ ID NO: 147374 - DNA, 20 bp, Artificial Sequence
  Description of Artificial Sequence: Synthetic oligonucleotide
  Target: LAMA2; (+) strand; PAM type: NRG; PAM sequence: AGG
tgtatatttataggatgctt

SEQ ID NO: 147375 - DNA, 20 bp, Artificial Sequence
  Description of Artificial Sequence: Synthetic oligonucleotide
  Target: LAMA2; (+) strand; PAM type: NRG; PAM sequence: AAG
taggatgcttaggcaaaatg

SEQ ID NO: 147376 - DNA, 20 bp, Artificial Sequence
  Description of Artificial Sequence: Synthetic oligonucleotide
  Target: LAMA2; (+) strand; PAM type: NRG; PAM sequence: GAG
cttaggcaaaatgaagccct

SEQ ID NO: 147377 - DNA, 20 bp, Artificial Sequence
  Description of Artificial Sequence: Synthetic oligonucleotide
  Target: LAMA2; (+) strand; PAM type: NRG; PAM sequence: CAG
agctgtaaaatgtttcatga

SEQ ID NO: 147378 - DNA, 20 bp, Artificial Sequence
  Description of Artificial Sequence: Synthetic oligonucleotide
  Target: LAMA2; (+) strand; PAM type: NRG; PAM sequence: CAG
ttcatgacagtctttgctga

SEQ ID NO: 147379 - DNA, 20 bp, Artificial Sequence
  Description of Artificial Sequence: Synthetic oligonucleotide
  Target: LAMA2; (+) strand; PAM type: NRG; PAM sequence: GAG
catgacagtctttgctgaca

SEQ ID NO: 147380 - DNA, 20 bp, Artificial Sequence
  Description of Artificial Sequence: Synthetic oligonucleotide
  Target: LAMA2; (+) strand; PAM type: NRG; PAM sequence: TGG
ctgacagagaacgctgtaaa

SEQ ID NO: 147381 - DNA, 20 bp, Artificial Sequence
  Description of Artificial Sequence: Synthetic oligonucleotide
  Target: LAMA2; (+) strand; PAM type: NRG; PAM sequence: GGG
tgacagagaacgctgtaaat

SEQ ID NO: 147382 - DNA, 20 bp, Artificial Sequence
  Description of Artificial Sequence: Synthetic oligonucleotide
  Target: LAMA2; (+) strand; PAM type: NRG; PAM sequence: GAG
acagagaacgctgtaaatgg

SEQ ID NO: 147383 - DNA, 20 bp, Artificial Sequence
  Description of Artificial Sequence: Synthetic oligonucleotide
  Target: LAMA2; (+) strand; PAM type: NRG; PAM sequence: CAG
agaacgctgtaaatgggagt

SEQ ID NO: 147384 - DNA, 20 bp, Artificial Sequence
  Description of Artificial Sequence: Synthetic oligonucleotide
  Target: LAMA2; (+) strand; PAM type: NRG; PAM sequence: AGG
gaacgctgtaaatgggagtc

SEQ ID NO: 147385 - DNA, 20 bp, Artificial Sequence
  Description of Artificial Sequence: Synthetic oligonucleotide
  Target: LAMA2; (+) strand; PAM type: NRG; PAM sequence: TAG
atgggagtcaggtccccact

SEQ ID NO: 147386 - DNA, 20 bp, Artificial Sequence
  Description of Artificial Sequence: Synthetic oligonucleotide
  Target: LAMA2; (+) strand; PAM type: NRG; PAM sequence: CAG
gagtcaggtccccacttaga

SEQ ID NO: 147387 - DNA, 20 bp, Artificial Sequence
  Description of Artificial Sequence: Synthetic oligonucleotide
  Target: LAMA2; (+) strand; PAM type: NRG; PAM sequence: CAG
tccccacttagacagtgtaa

SEQ ID NO: 147388 - DNA, 20 bp, Artificial Sequence
  Description of Artificial Sequence: Synthetic oligonucleotide
  Target: LAMA2; (+) strand; PAM type: NRG; PAM sequence: CAG
agtgtaacagaaatccatgc

SEQ ID NO: 147389 - DNA, 20 bp, Artificial Sequence
  Description of Artificial Sequence: Synthetic oligonucleotide
  Target: LAMA2; (+) strand; PAM type: NRG; PAM sequence: AGG
gtgtaacagaaatccatgcc

SEQ ID NO: 147390 - DNA, 20 bp, Artificial Sequence
  Description of Artificial Sequence: Synthetic oligonucleotide
  Target: LAMA2; (+) strand; PAM type: NRG; PAM sequence: GGG
tgtaacagaaatccatgcca

SEQ ID NO: 147391 - DNA, 20 bp, Artificial Sequence
  Description of Artificial Sequence: Synthetic oligonucleotide
  Target: LAMA2; (+) strand; PAM type: NRG; PAM sequence: AAG
aatccatgccagggtgaaat

SEQ ID NO: 147392 - DNA, 20 bp, Artificial Sequence
  Description of Artificial Sequence: Synthetic oligonucleotide
  Target: LAMA2; (+) strand; PAM type: NRG; PAM sequence: GAG
tccatgccagggtgaaataa

SEQ ID NO: 147393 - DNA, 20 bp, Artificial Sequence
  Description of Artificial Sequence: Synthetic oligonucleotide
  Target: LAMA2; (+) strand; PAM type: NRG; PAM sequence: TGG
tgccagggtgaaataagagc

SEQ ID NO: 147394 - DNA, 20 bp, Artificial Sequence
  Description of Artificial Sequence: Synthetic oligonucleotide
  Target: LAMA2; (+) strand; PAM type: NRG; PAM sequence: CAG
cagggtgaaataagagctgg

SEQ ID NO: 147395 - DNA, 20 bp, Artificial Sequence
  Description of Artificial Sequence: Synthetic oligonucleotide
  Target: LAMA2; (+) strand; PAM type: NRG; PAM sequence: TAG
gtgaaataagagctggcagt

SEQ ID NO: 147396 - DNA, 20 bp, Artificial Sequence
  Description of Artificial Sequence: Synthetic oligonucleotide
  Target: LAMA2; (+) strand; PAM type: NRG; PAM sequence: AGG
tgaaataagagctggcagtt

SEQ ID NO: 147397 - DNA, 20 bp, Artificial Sequence
  Description of Artificial Sequence: Synthetic oligonucleotide
  Target: LAMA2; (+) strand; PAM type: NRG; PAM sequence: TAG
agagctggcagttaggatga

SEQ ID NO: 147398 - DNA, 20 bp, Artificial Sequence
  Description of Artificial Sequence: Synthetic oligonucleotide
  Target: LAMA2; (+) strand; PAM type: NRG; PAM sequence: CAG
aggatgatagactttgaaat

SEQ ID NO: 147399 - DNA, 20 bp, Artificial Sequence
  Description of Artificial Sequence: Synthetic oligonucleotide
  Target: LAMA2; (+) strand; PAM type: NRG; PAM sequence: CAG
gactttgaaatcagccatca

SEQ ID NO: 147400 - DNA, 20 bp, Artificial Sequence
  Description of Artificial Sequence: Synthetic oligonucleotide
  Target: LAMA2; (+) strand; PAM type: NRG; PAM sequence: AAG
gaaatcagccatcacagtat

SEQ ID NO: 147401 - DNA, 20 bp, Artificial Sequence
  Description of Artificial Sequence: Synthetic oligonucleotide
  Target: LAMA2; (+) strand; PAM type: NRG; PAM sequence: CAG
gccatcacagtataagaaaa

SEQ ID NO: 147402 - DNA, 20 bp, Artificial Sequence
  Description of Artificial Sequence: Synthetic oligonucleotide
  Target: LAMA2; (+) strand; PAM type: NRG; PAM sequence: TAG
cacagtataagaaaacagat

SEQ ID NO: 147403 - DNA, 20 bp, Artificial Sequence
  Description of Artificial Sequence: Synthetic oligonucleotide
  Target: LAMA2; (+) strand; PAM type: NRG; PAM sequence: AAG
ttttttttttttttttcaaa

SEQ ID NO: 147404 - DNA, 20 bp, Artificial Sequence
  Description of Artificial Sequence: Synthetic oligonucleotide
  Target: LAMA2; (+) strand; PAM type: NRG; PAM sequence: AGG
tttttttttttttttcaaaa

SEQ ID NO: 147405 - DNA, 20 bp, Artificial Sequence
  Description of Artificial Sequence: Synthetic oligonucleotide
  Target: LAMA2; (+) strand; PAM type: NRG; PAM sequence: TGG
ttttcaaaaaggctccaaac

SEQ ID NO: 147406 - DNA, 20 bp, Artificial Sequence
  Description of Artificial Sequence: Synthetic oligonucleotide
  Target: LAMA2; (+) strand; PAM type: NRG; PAM sequence: TAG
ggtctattttgaaatctctc

SEQ ID NO: 147407 - DNA, 20 bp, Artificial Sequence
  Description of Artificial Sequence: Synthetic oligonucleotide
  Target: LAMA2; (+) strand; PAM type: NRG; PAM sequence: CAG
tgaaatctctctagctatga

SEQ ID NO: 147408 - DNA, 20 bp, Artificial Sequence
  Description of Artificial Sequence: Synthetic oligonucleotide
  Target: LAMA2; (+) strand; PAM type: NRG; PAM sequence: TAG
tgacagcctgcctcatgata

SEQ ID NO: 147409 - DNA, 20 bp, Artificial Sequence
  Description of Artificial Sequence: Synthetic oligonucleotide
  Target: LAMA2; (+) strand; PAM type: NRG; PAM sequence: TAG
cctgcctcatgatatagctt

SEQ ID NO: 147410 - DNA, 20 bp, Artificial Sequence
  Description of Artificial Sequence: Synthetic oligonucleotide
  Target: LAMA2; (+) strand; PAM type: NRG; PAM sequence: GAG
tgcctcatgatatagcttta

SEQ ID NO: 147411 - DNA, 20 bp, Artificial Sequence
  Description of Artificial Sequence: Synthetic oligonucleotide
  Target: LAMA2; (+) strand; PAM type: NRG; PAM sequence: AAG
caacctgaccatttctttta

SEQ ID NO: 147412 - DNA, 20 bp, Artificial Sequence
  Description of Artificial Sequence: Synthetic oligonucleotide
  Target: LAMA2; (+) strand; PAM type: NRG; PAM sequence: GAG
atcaaaaaattaatgcaaat

SEQ ID NO: 147413 - DNA, 20 bp, Artificial Sequence
  Description of Artificial Sequence: Synthetic oligonucleotide
  Target: LAMA2; (+) strand; PAM type: NRG; PAM sequence: CAG
caaatgagtaaaaaaatgtg

SEQ ID NO: 147414 - DNA, 20 bp, Artificial Sequence
  Description of Artificial Sequence: Synthetic oligonucleotide
  Target: LAMA2; (+) strand; PAM type: NRG; PAM sequence: AGG
aaatgagtaaaaaaatgtgc

SEQ ID NO: 147415 - DNA, 20 bp, Artificial Sequence
  Description of Artificial Sequence: Synthetic oligonucleotide
  Target: LAMA2; (+) strand; PAM type: NRG; PAM sequence: GGG
aatgagtaaaaaaatgtgca

SEQ ID NO: 147416 - DNA, 20 bp, Artificial Sequence
  Description of Artificial Sequence: Synthetic oligonucleotide
  Target: LAMA2; (+) strand; PAM type: NRG; PAM sequence: AAG
gagtaaaaaaatgtgcaggg

SEQ ID NO: 147417 - DNA, 20 bp, Artificial Sequence
  Description of Artificial Sequence: Synthetic oligonucleotide
  Target: LAMA2; (+) strand; PAM type: NRG; PAM sequence: AAG
gtgcagggaagtaaatatat

SEQ ID NO: 147418 - DNA, 20 bp, Artificial Sequence
  Description of Artificial Sequence: Synthetic oligonucleotide
  Target: LAMA2; (+) strand; PAM type: NRG; PAM sequence: TGG
agtaaatatataagtgacaa

SEQ ID NO: 147419 - DNA, 20 bp, Artificial Sequence
  Description of Artificial Sequence: Synthetic oligonucleotide
  Target: LAMA2; (+) strand; PAM type: NRG; PAM sequence: CAG
atatataagtgacaatggaa

SEQ ID NO: 147420 - DNA, 20 bp, Artificial Sequence
  Description of Artificial Sequence: Synthetic oligonucleotide
  Target: LAMA2; (+) strand; PAM type: NRG; PAM sequence: AGG
tatataagtgacaatggaac

SEQ ID NO: 147421 - DNA, 20 bp, Artificial Sequence
  Description of Artificial Sequence: Synthetic oligonucleotide
  Target: LAMA2; (+) strand; PAM type: NRG; PAM sequence: GAG
tataagtgacaatggaacag

SEQ ID NO: 147422 - DNA, 20 bp, Artificial Sequence
  Description of Artificial Sequence: Synthetic oligonucleotide
  Target: LAMA2; (+) strand; PAM type: NRG; PAM sequence: AGG
ataagtgacaatggaacagg

SEQ ID NO: 147423 - DNA, 20 bp, Artificial Sequence
  Description of Artificial Sequence: Synthetic oligonucleotide
  Target: LAMA2; (+) strand; PAM type: NRG; PAM sequence: TAG
aatggaacaggaggataaaa

SEQ ID NO: 147424 - DNA, 20 bp, Artificial Sequence
  Description of Artificial Sequence: Synthetic oligonucleotide
  Target: LAMA2; (+) strand; PAM type: NRG; PAM sequence: AGG
atggaacaggaggataaaat

SEQ ID NO: 147425 - DNA, 20 bp, Artificial Sequence
  Description of Artificial Sequence: Synthetic oligonucleotide
  Target: LAMA2; (+) strand; PAM type: NRG; PAM sequence: GGG
tggaacaggaggataaaata

SEQ ID NO: 147426 - DNA, 20 bp, Artificial Sequence
  Description of Artificial Sequence: Synthetic oligonucleotide
  Target: LAMA2; (+) strand; PAM type: NRG; PAM sequence: CAG
aacaggaggataaaataggg

SEQ ID NO: 147427 - DNA, 20 bp, Artificial Sequence
  Description of Artificial Sequence: Synthetic oligonucleotide
  Target: LAMA2; (+) strand; PAM type: NRG; PAM sequence: AGG
acaggaggataaaatagggc

SEQ ID NO: 147428 - DNA, 20 bp, Artificial Sequence
  Description of Artificial Sequence: Synthetic oligonucleotide
  Target: LAMA2; (+) strand; PAM type: NRG; PAM sequence: GGG
caggaggataaaatagggca

SEQ ID NO: 147429 - DNA, 20 bp, Artificial Sequence
  Description of Artificial Sequence: Synthetic oligonucleotide
  Target: LAMA2; (+) strand; PAM type: NRG; PAM sequence: GGG
aggaggataaaatagggcag

SEQ ID NO: 147430 - DNA, 20 bp, Artificial Sequence
  Description of Artificial Sequence: Synthetic oligonucleotide
  Target: LAMA2; (+) strand; PAM type: NRG; PAM sequence: AAG
taaaatagggcaggggcaat

SEQ ID NO: 147431 - DNA, 20 bp, Artificial Sequence
  Description of Artificial Sequence: Synthetic oligonucleotide
  Target: LAMA2; (+) strand; PAM type: NRG; PAM sequence: AGG
aaaatagggcaggggcaata

SEQ ID NO: 147432 - DNA, 20 bp, Artificial Sequence
  Description of Artificial Sequence: Synthetic oligonucleotide
  Target: LAMA2; (+) strand; PAM type: NRG; PAM sequence: GGG
aaatagggcaggggcaataa

SEQ ID NO: 147433 - DNA, 20 bp, Artificial Sequence
  Description of Artificial Sequence: Synthetic oligonucleotide
  Target: LAMA2; (+) strand; PAM type: NRG; PAM sequence: GGG
aatagggcaggggcaataag

SEQ ID NO: 147434 - DNA, 20 bp, Artificial Sequence
  Description of Artificial Sequence: Synthetic oligonucleotide
  Target: LAMA2; (+) strand; PAM type: NRG; PAM sequence: GGG
atagggcaggggcaataagg

SEQ ID NO: 147435 - DNA, 20 bp, Artificial Sequence
  Description of Artificial Sequence: Synthetic oligonucleotide
  Target: LAMA2; (+) strand; PAM type: NRG; PAM sequence: TGG
gggcaggggcaataaggggg

SEQ ID NO: 147436 - DNA, 20 bp, Artificial Sequence
  Description of Artificial Sequence: Synthetic oligonucleotide
  Target: LAMA2; (+) strand; PAM type: NRG; PAM sequence: GAG
gcaggggcaataagggggtg

SEQ ID NO: 147437 - DNA, 20 bp, Artificial Sequence
  Description of Artificial Sequence: Synthetic oligonucleotide
  Target: LAMA2; (+) strand; PAM type: NRG; PAM sequence: AGG
caggggcaataagggggtgg

SEQ ID NO: 147438 - DNA, 20 bp, Artificial Sequence
  Description of Artificial Sequence: Synthetic oligonucleotide
  Target: LAMA2; (+) strand; PAM type: NRG; PAM sequence: GGG
aggggcaataagggggtgga

SEQ ID NO: 147439 - DNA, 20 bp, Artificial Sequence
  Description of Artificial Sequence: Synthetic oligonucleotide
  Target: LAMA2; (+) strand; PAM type: NRG; PAM sequence: GGG
ggggcaataagggggtggag

SEQ ID NO: 147440 - DNA, 20 bp, Artificial Sequence
  Description of Artificial Sequence: Synthetic oligonucleotide
  Target: LAMA2; (+) strand; PAM type: NRG; PAM sequence: GGG
gggcaataagggggtggagg

SEQ ID NO: 147441 - DNA, 20 bp, Artificial Sequence
  Description of Artificial Sequence: Synthetic oligonucleotide
  Target: LAMA2; (+) strand; PAM type: NRG; PAM sequence: TGG
caataagggggtggaggggg

SEQ ID NO: 147442 - DNA, 20 bp, Artificial Sequence
  Description of Artificial Sequence: Synthetic oligonucleotide
  Target: LAMA2; (+) strand; PAM type: NRG; PAM sequence: GAG
ataagggggtggagggggtg

SEQ ID NO: 147443 - DNA, 20 bp, Artificial Sequence
  Description of Artificial Sequence: Synthetic oligonucleotide
  Target: LAMA2; (+) strand; PAM type: NRG; PAM sequence: TGG
agggggtggagggggtggag

SEQ ID NO: 147444 - DNA, 20 bp, Artificial Sequence
  Description of Artificial Sequence: Synthetic oligonucleotide
  Target: LAMA2; (+) strand; PAM type: NRG; PAM sequence: GGG
gggggtggagggggtggagt

SEQ ID NO: 147445 - DNA, 20 bp, Artificial Sequence
  Description of Artificial Sequence: Synthetic oligonucleotide
  Target: LAMA2; (+) strand; PAM type: NRG; PAM sequence: GAG
gtggagggggtggagtgggt

SEQ ID NO: 147446 - DNA, 20 bp, Artificial Sequence
  Description of Artificial Sequence: Synthetic oligonucleotide
  Target: LAMA2; (+) strand; PAM type: NRG; PAM sequence: GAG
ggagggggtggagtgggtga

SEQ ID NO: 147447 - DNA, 20 bp, Artificial Sequence
  Description of Artificial Sequence: Synthetic oligonucleotide
  Target: LAMA2; (+) strand; PAM type: NRG; PAM sequence: GAG
agggggtggagtgggtgaga

SEQ ID NO: 147448 - DNA, 20 bp, Artificial Sequence
  Description of Artificial Sequence: Synthetic oligonucleotide
  Target: LAMA2; (+) strand; PAM type: NRG; PAM sequence: AAG
gtggagtgggtgagagagtc

SEQ ID NO: 147449 - DNA, 20 bp, Artificial Sequence
  Description of Artificial Sequence: Synthetic oligonucleotide
  Target: LAMA2; (+) strand; PAM type: NRG; PAM sequence: GAG
ggagtgggtgagagagtcaa

SEQ ID NO: 147450 - DNA, 20 bp, Artificial Sequence
  Description of Artificial Sequence: Synthetic oligonucleotide
  Target: LAMA2; (+) strand; PAM type: NRG; PAM sequence: GAG
agtgggtgagagagtcaaga

SEQ ID NO: 147451 - DNA, 20 bp, Artificial Sequence
  Description of Artificial Sequence: Synthetic oligonucleotide
  Target: LAMA2; (+) strand; PAM type: NRG; PAM sequence: TAG
gagagtcaagagagtactga

SEQ ID NO: 147452 - DNA, 20 bp, Artificial Sequence
  Description of Artificial Sequence: Synthetic oligonucleotide
  Target: LAMA2; (+) strand; PAM type: NRG; PAM sequence: TGG
agtcaagagagtactgatag

SEQ ID NO: 147453 - DNA, 20 bp, Artificial Sequence
  Description of Artificial Sequence: Synthetic oligonucleotide
  Target: LAMA2; (+) strand; PAM type: NRG; PAM sequence: AAG
aagagagtactgatagtggc

SEQ ID NO: 147454 - DNA, 20 bp, Artificial Sequence
  Description of Artificial Sequence: Synthetic oligonucleotide
  Target: LAMA2; (+) strand; PAM type: NRG; PAM sequence: CGG
gagtactgatagtggcaagc

SEQ ID NO: 147455 - DNA, 20 bp, Artificial Sequence
  Description of Artificial Sequence: Synthetic oligonucleotide
  Target: LAMA2; (+) strand; PAM type: NRG; PAM sequence: CAG
agtggcaagccggaaaatgc

SEQ ID NO: 147456 - DNA, 20 bp, Artificial Sequence
  Description of Artificial Sequence: Synthetic oligonucleotide
  Target: LAMA2; (+) strand; PAM type: NRG; PAM sequence: TAG
aatgccagaatgctttttga

SEQ ID NO: 147457 - DNA, 20 bp, Artificial Sequence
  Description of Artificial Sequence: Synthetic oligonucleotide
  Target: LAMA2; (+) strand; PAM type: NRG; PAM sequence: AAG
ttcattaatgacaatgaatt

SEQ ID NO: 147458 - DNA, 20 bp, Artificial Sequence
  Description of Artificial Sequence: Synthetic oligonucleotide
  Target: LAMA2; (+) strand; PAM type: NRG; PAM sequence: AAG
aattaagtgaacataaccta

SEQ ID NO: 147459 - DNA, 20 bp, Artificial Sequence
  Description of Artificial Sequence: Synthetic oligonucleotide
  Target: LAMA2; (+) strand; PAM type: NRG; PAM sequence: AGG
attaagtgaacataacctaa

SEQ ID NO: 147460 - DNA, 20 bp, Artificial Sequence
  Description of Artificial Sequence: Synthetic oligonucleotide
  Target: LAMA2; (+) strand; PAM type: NRG; PAM sequence: GAG
taagtgaacataacctaaag

SEQ ID NO: 147461 - DNA, 20 bp, Artificial Sequence
  Description of Artificial Sequence: Synthetic oligonucleotide
  Target: LAMA2; (+) strand; PAM type: NRG; PAM sequence: AAG
gtgaacataacctaaaggag

SEQ ID NO: 147462 - DNA, 20 bp, Artificial Sequence
  Description of Artificial Sequence: Synthetic oligonucleotide
  Target: LAMA2; (+) strand; PAM type: NRG; PAM sequence: GAG
acctaaaggagaagatgaat

SEQ ID NO: 147463 - DNA, 20 bp, Artificial Sequence
  Description of Artificial Sequence: Synthetic oligonucleotide
  Target: LAMA2; (+) strand; PAM type: NRG; PAM sequence: TAG
agcatctatttttcctgtca

SEQ ID NO: 147464 - DNA, 20 bp, Artificial Sequence
  Description of Artificial Sequence: Synthetic oligonucleotide
  Target: LAMA2; (+) strand; PAM type: NRG; PAM sequence: TGG
ttttcctgtcatagacaaac

SEQ ID NO: 147465 - DNA, 20 bp, Artificial Sequence
  Description of Artificial Sequence: Synthetic oligonucleotide
  Target: LAMA2; (+) strand; PAM type: NRG; PAM sequence: TAG
attcaaactcatctcctgta

SEQ ID NO: 147466 - DNA, 20 bp, Artificial Sequence
  Description of Artificial Sequence: Synthetic oligonucleotide
  Target: LAMA2; (+) strand; PAM type: NRG; PAM sequence: TGG
ctcatctcctgtatagtata

SEQ ID NO: 147467 - DNA, 20 bp, Artificial Sequence
  Description of Artificial Sequence: Synthetic oligonucleotide
  Target: LAMA2; (+) strand; PAM type: NRG; PAM sequence: TAG
atatggaaaaatacattgaa

SEQ ID NO: 147468 - DNA, 20 bp, Artificial Sequence
  Description of Artificial Sequence: Synthetic oligonucleotide
  Target: LAMA2; (+) strand; PAM type: NRG; PAM sequence: AAG
ggaaaaatacattgaatagt

SEQ ID NO: 147469 - DNA, 20 bp, Artificial Sequence
  Description of Artificial Sequence: Synthetic oligonucleotide
  Target: LAMA2; (+) strand; PAM type: NRG; PAM sequence: CAG
aatacattgaatagtaagat

SEQ ID NO: 147470 - DNA, 20 bp, Artificial Sequence
  Description of Artificial Sequence: Synthetic oligonucleotide
  Target: LAMA2; (+) strand; PAM type: NRG; PAM sequence: CGG
taagatcagtgaatgtaaat

SEQ ID NO: 147471 - DNA, 20 bp, Artificial Sequence
  Description of Artificial Sequence: Synthetic oligonucleotide
  Target: LAMA2; (+) strand; PAM type: NRG; PAM sequence: GGG
aagatcagtgaatgtaaatc

SEQ ID NO: 147472 - DNA, 20 bp, Artificial Sequence
  Description of Artificial Sequence: Synthetic oligonucleotide
  Target: LAMA2; (+) strand; PAM type: NRG; PAM sequence: CAG
agtgaatgtaaatcgggcca

SEQ ID NO: 147473 - DNA, 20 bp, Artificial Sequence
  Description of Artificial Sequence: Synthetic oligonucleotide
  Target: LAMA2; (+) strand; PAM type: NRG; PAM sequence: AAG
tgcaaatgacattatactca

SEQ ID NO: 147474 - DNA, 20 bp, Artificial Sequence
  Description of Artificial Sequence: Synthetic oligonucleotide
  Target: LAMA2; (+) strand; PAM type: NRG; PAM sequence: TAG
aatgacattatactcaaagc

SEQ ID NO: 147475 - DNA, 20 bp, Artificial Sequence
  Description of Artificial Sequence: Synthetic oligonucleotide
  Target: LAMA2; (+) strand; PAM type: NRG; PAM sequence: TGG
aaagctagttttctgatgat

SEQ ID NO: 147476 - DNA, 20 bp, Artificial Sequence
  Description of Artificial Sequence: Synthetic oligonucleotide
  Target: LAMA2; (+) strand; PAM type: NRG; PAM sequence: TAG
tggattataatgttatctcc

SEQ ID NO: 147477 - DNA, 20 bp, Artificial Sequence
  Description of Artificial Sequence: Synthetic oligonucleotide
  Target: LAMA2; (+) strand; PAM type: NRG; PAM sequence: AGG
ggattataatgttatctcct

SEQ ID NO: 147478 - DNA, 20 bp, Artificial Sequence
  Description of Artificial Sequence: Synthetic oligonucleotide
  Target: LAMA2; (+) strand; PAM type: NRG; PAM sequence: AAG
ttataatgttatctcctagg

SEQ ID NO: 147479 - DNA, 20 bp, Artificial Sequence
  Description of Artificial Sequence: Synthetic oligonucleotide
  Target: LAMA2; (+) strand; PAM type: NRG; PAM sequence: AAG
gttatctcctaggaagatta

SEQ ID NO: 147480 - DNA, 20 bp, Artificial Sequence
  Description of Artificial Sequence: Synthetic oligonucleotide
  Target: LAMA2; (+) strand; PAM type: NRG; PAM sequence: TGG
agtacactaacatattttta

SEQ ID NO: 147481 - DNA, 20 bp, Artificial Sequence
  Description of Artificial Sequence: Synthetic oligonucleotide
  Target: LAMA2; (+) strand; PAM type: NRG; PAM sequence: GGG
gtacactaacatatttttat

SEQ ID NO: 147482 - DNA, 20 bp, Artificial Sequence
  Description of Artificial Sequence: Synthetic oligonucleotide
  Target: LAMA2; (+) strand; PAM type: NRG; PAM sequence: AAG
ctaacatatttttatgggca

SEQ ID NO: 147483 - DNA, 20 bp, Artificial Sequence
  Description of Artificial Sequence: Synthetic oligonucleotide
  Target: LAMA2; (+) strand; PAM type: NRG; PAM sequence: CAG
tatttttatgggcaaagctg

SEQ ID NO: 147484 - DNA, 20 bp, Artificial Sequence
  Description of Artificial Sequence: Synthetic oligonucleotide
  Target: LAMA2; (+) strand; PAM type: NRG; PAM sequence: TGG
ctgcagtgctgctttctgcc

SEQ ID NO: 147485 - DNA, 20 bp, Artificial Sequence
  Description of Artificial Sequence: Synthetic oligonucleotide
  Target: LAMA2; (+) strand; PAM type: NRG; PAM sequence: TGG
gtgctgctttctgcctggta

SEQ ID NO: 147486 - DNA, 20 bp, Artificial Sequence
  Description of Artificial Sequence: Synthetic oligonucleotide
  Target: LAMA2; (+) strand; PAM type: NRG; PAM sequence: GGG
tgctgctttctgcctggtat

SEQ ID NO: 147487 - DNA, 20 bp, Artificial Sequence
  Description of Artificial Sequence: Synthetic oligonucleotide
  Target: LAMA2; (+) strand; PAM type: NRG; PAM sequence: TGG
taaaattttactttaaatcc

SEQ ID NO: 147488 - DNA, 20 bp, Artificial Sequence
  Description of Artificial Sequence: Synthetic oligonucleotide
  Target: LAMA2; (+) strand; PAM type: NRG; PAM sequence: CAG
ggatactcgtgcacaacatg

SEQ ID NO: 147489 - DNA, 20 bp, Artificial Sequence
  Description of Artificial Sequence: Synthetic oligonucleotide
  Target: LAMA2; (+) strand; PAM type: NRG; PAM sequence: AGG
gatactcgtgcacaacatgc

SEQ ID NO: 147490 - DNA, 20 bp, Artificial Sequence
  Description of Artificial Sequence: Synthetic oligonucleotide
  Target: LAMA2; (+) strand; PAM type: NRG; PAM sequence: TAG
caacatgcaggtttgttaca

SEQ ID NO: 147491 - DNA, 20 bp, Artificial Sequence
  Description of Artificial Sequence: Synthetic oligonucleotide
  Target: LAMA2; (+) strand; PAM type: NRG; PAM sequence: AGG
aacatgcaggtttgttacat

SEQ ID NO: 147492 - DNA, 20 bp, Artificial Sequence
  Description of Artificial Sequence: Synthetic oligonucleotide
  Target: LAMA2; (+) strand; PAM type: NRG; PAM sequence: TGG
acataggtaaatgtgtgtca

SEQ ID NO: 147493 - DNA, 20 bp, Artificial Sequence
  Description of Artificial Sequence: Synthetic oligonucleotide
  Target: LAMA2; (+) strand; PAM type: NRG; PAM sequence: TAG
gcccctatcaacccatcacc

SEQ ID NO: 147494 - DNA, 20 bp, Artificial Sequence
  Description of Artificial Sequence: Synthetic oligonucleotide
  Target: LAMA2; (+) strand; PAM type: NRG; PAM sequence: AGG
cccctatcaacccatcacct

SEQ ID NO: 147495 - DNA, 20 bp, Artificial Sequence
  Description of Artificial Sequence: Synthetic oligonucleotide
  Target: LAMA2; (+) strand; PAM type: NRG; PAM sequence: CAG
cacctaggcataattttcca

SEQ ID NO: 147496 - DNA, 20 bp, Artificial Sequence
  Description of Artificial Sequence: Synthetic oligonucleotide
  Target: LAMA2; (+) strand; PAM type: NRG; PAM sequence: AGG
acctaggcataattttccac

SEQ ID NO: 147497 - DNA, 20 bp, Artificial Sequence
  Description of Artificial Sequence: Synthetic oligonucleotide
  Target: LAMA2; (+) strand; PAM type: NRG; PAM sequence: CAG
ataattttccacaggcttta

SEQ ID NO: 147498 - DNA, 20 bp, Artificial Sequence
  Description of Artificial Sequence: Synthetic oligonucleotide
  Target: LAMA2; (+) strand; PAM type: NRG; PAM sequence: GAG
aattttccacaggctttaca

SEQ ID NO: 147499 - DNA, 20 bp, Artificial Sequence
  Description of Artificial Sequence: Synthetic oligonucleotide
  Target: LAMA2; (+) strand; PAM type: NRG; PAM sequence: TGG
acagagtccctttgtctcac

SEQ ID NO: 147500 - DNA, 20 bp, Artificial Sequence
  Description of Artificial Sequence: Synthetic oligonucleotide
  Target: LAMA2; (+) strand; PAM type: NRG; PAM sequence: TGG
ccctttactgttattttatt

SEQ ID NO: 147501 - DNA, 20 bp, Artificial Sequence
  Description of Artificial Sequence: Synthetic oligonucleotide
  Target: LAMA2; (+) strand; PAM type: NRG; PAM sequence: GAG
ctttactgttattttatttg

SEQ ID NO: 147502 - DNA, 20 bp, Artificial Sequence
  Description of Artificial Sequence: Synthetic oligonucleotide
  Target: LAMA2; (+) strand; PAM type: NRG; PAM sequence: AGG
tttactgttattttatttgg

SEQ ID NO: 147503 - DNA, 20 bp, Artificial Sequence
  Description of Artificial Sequence: Synthetic oligonucleotide
  Target: LAMA2; (+) strand; PAM type: NRG; PAM sequence: AAG
actgttattttatttggagg

SEQ ID NO: 147504 - DNA, 20 bp, Artificial Sequence
  Description of Artificial Sequence: Synthetic oligonucleotide
  Target: LAMA2; (+) strand; PAM type: NRG; PAM sequence: TAG
aaaaaatgcatatgccacca

SEQ ID NO: 147505 - DNA, 20 bp, Artificial Sequence
  Description of Artificial Sequence: Synthetic oligonucleotide
  Target: LAMA2; (+) strand; PAM type: NRG; PAM sequence: AAG
gaatactacgctgccataaa

SEQ ID NO: 147506 - DNA, 20 bp, Artificial Sequence
  Description of Artificial Sequence: Synthetic oligonucleotide
  Target: LAMA2; (+) strand; PAM type: NRG; PAM sequence: AGG
aatactacgctgccataaaa

SEQ ID NO: 147507 - DNA, 20 bp, Artificial Sequence
  Description of Artificial Sequence: Synthetic oligonucleotide
  Target: LAMA2; (+) strand; PAM type: NRG; PAM sequence: GAG
acgctgccataaaaaggaat

SEQ ID NO: 147508 - DNA, 20 bp, Artificial Sequence
  Description of Artificial Sequence: Synthetic oligonucleotide
  Target: LAMA2; (+) strand; PAM type: NRG; PAM sequence: CAG
gaatgagatcatgtcctttg

SEQ ID NO: 147509 - DNA, 20 bp, Artificial Sequence
  Description of Artificial Sequence: Synthetic oligonucleotide
  Target: LAMA2; (+) strand; PAM type: NRG; PAM sequence: AGG
aatgagatcatgtcctttgc

SEQ ID NO: 147510 - DNA, 20 bp, Artificial Sequence
  Description of Artificial Sequence: Synthetic oligonucleotide
  Target: LAMA2; (+) strand; PAM type: NRG; PAM sequence: GGG
atgagatcatgtcctttgca

SEQ ID NO: 147511 - DNA, 20 bp, Artificial Sequence
  Description of Artificial Sequence: Synthetic oligonucleotide
  Target: LAMA2; (+) strand; PAM type: NRG; PAM sequence: TGG
tcatgtcctttgcagggaca

SEQ ID NO: 147512 - DNA, 20 bp, Artificial Sequence
  Description of Artificial Sequence: Synthetic oligonucleotide
  Target: LAMA2; (+) strand; PAM type: NRG; PAM sequence: AAG
cctttgcagggacatggatg

SEQ ID NO: 147513 - DNA, 20 bp, Artificial Sequence
  Description of Artificial Sequence: Synthetic oligonucleotide
  Target: LAMA2; (+) strand; PAM type: NRG; PAM sequence: TGG
tgcagggacatggatgaagc

SEQ ID NO: 147514 - DNA, 20 bp, Artificial Sequence
  Description of Artificial Sequence: Synthetic oligonucleotide
  Target: LAMA2; (+) strand; PAM type: NRG; PAM sequence: TGG
atggatgaagctggaaacca

SEQ ID NO: 147515 - DNA, 20 bp, Artificial Sequence
  Description of Artificial Sequence: Synthetic oligonucleotide
  Target: LAMA2; (+) strand; PAM type: NRG; PAM sequence: CAG
aagctggaaaccatggtcct

SEQ ID NO: 147516 - DNA, 20 bp, Artificial Sequence
  Description of Artificial Sequence: Synthetic oligonucleotide
  Target: LAMA2; (+) strand; PAM type: NRG; PAM sequence: AGG
agctggaaaccatggtcctc

SEQ ID NO: 147517 - DNA, 20 bp, Artificial Sequence
  Description of Artificial Sequence: Synthetic oligonucleotide
  Target: LAMA2; (+) strand; PAM type: NRG; PAM sequence: CAG
tggtcctcaggaaactaaca

SEQ ID NO: 147518 - DNA, 20 bp, Artificial Sequence
  Description of Artificial Sequence: Synthetic oligonucleotide
  Target: LAMA2; (+) strand; PAM type: NRG; PAM sequence: AGG
ggtcctcaggaaactaacac

SEQ ID NO: 147519 - DNA, 20 bp, Artificial Sequence
  Description of Artificial Sequence: Synthetic oligonucleotide
  Target: LAMA2; (+) strand; PAM type: NRG; PAM sequence: CAG
tcaggaaactaacacaggaa

SEQ ID NO: 147520 - DNA, 20 bp, Artificial Sequence
  Description of Artificial Sequence: Synthetic oligonucleotide
  Target: LAMA2; (+) strand; PAM type: NRG; PAM sequence: GAG
atatgttctcactcataaat

SEQ ID NO: 147521 - DNA, 20 bp, Artificial Sequence
  Description of Artificial Sequence: Synthetic oligonucleotide
  Target: LAMA2; (+) strand; PAM type: NRG; PAM sequence: GAG
atgttctcactcataaatga

SEQ ID NO: 147522 - DNA, 20 bp, Artificial Sequence
  Description of Artificial Sequence: Synthetic oligonucleotide
  Target: LAMA2; (+) strand; PAM type: NRG; PAM sequence: GAG
ataaatgagagctaaacaat

SEQ ID NO: 147523 - DNA, 20 bp, Artificial Sequence
  Description of Artificial Sequence: Synthetic oligonucleotide
  Target: LAMA2; (+) strand; PAM type: NRG; PAM sequence: TGG
agctaaacaatgagaacaca

SEQ ID NO: 147524 - DNA, 20 bp, Artificial Sequence
  Description of Artificial Sequence: Synthetic oligonucleotide
  Target: LAMA2; (+) strand; PAM type: NRG; PAM sequence: AAG
caatgagaacacatggactc

SEQ ID NO: 147525 - DNA, 20 bp, Artificial Sequence
  Description of Artificial Sequence: Synthetic oligonucleotide
  Target: LAMA2; (+) strand; PAM type: NRG; PAM sequence: AGG
aatgagaacacatggactca

SEQ ID NO: 147526 - DNA, 20 bp, Artificial Sequence
  Description of Artificial Sequence: Synthetic oligonucleotide
  Target: LAMA2; (+) strand; PAM type: NRG; PAM sequence: GAG
tgagaacacatggactcaag

SEQ ID NO: 147527 - DNA, 20 bp, Artificial Sequence
  Description of Artificial Sequence: Synthetic oligonucleotide
  Target: LAMA2; (+) strand; PAM type: NRG; PAM sequence: AGG
gagaacacatggactcaagg

SEQ ID NO: 147528 - DNA, 20 bp, Artificial Sequence
  Description of Artificial Sequence: Synthetic oligonucleotide
  Target: LAMA2; (+) strand; PAM type: NRG; PAM sequence: GGG
agaacacatggactcaagga

SEQ ID NO: 147529 - DNA, 20 bp, Artificial Sequence
  Description of Artificial Sequence: Synthetic oligonucleotide
  Target: LAMA2; (+) strand; PAM type: NRG; PAM sequence: GGG
gaacacatggactcaaggag

SEQ ID NO: 147530 - DNA, 20 bp, Artificial Sequence
  Description of Artificial Sequence: Synthetic oligonucleotide
  Target: LAMA2; (+) strand; PAM type: NRG; PAM sequence: CAG
aggaggggaacaacacacac

SEQ ID NO: 147531 - DNA, 20 bp, Artificial Sequence
  Description of Artificial Sequence: Synthetic oligonucleotide
  Target: LAMA2; (+) strand; PAM type: NRG; PAM sequence: AGG
ggaggggaacaacacacacc

SEQ ID NO: 147532 - DNA, 20 bp, Artificial Sequence
  Description of Artificial Sequence: Synthetic oligonucleotide
  Target: LAMA2; (+) strand; PAM type: NRG; PAM sequence: GGG
gaggggaacaacacacacca

SEQ ID NO: 147533 - DNA, 20 bp, Artificial Sequence
  Description of Artificial Sequence: Synthetic oligonucleotide
  Target: LAMA2; (+) strand; PAM type: NRG; PAM sequence: CAG
caacacacaccagggcctat

SEQ ID NO: 147534 - DNA, 20 bp, Artificial Sequence
  Description of Artificial Sequence: Synthetic oligonucleotide
  Target: LAMA2; (+) strand; PAM type: NRG; PAM sequence: TGG
acacaccagggcctatcaga

SEQ ID NO: 147535 - DNA, 20 bp, Artificial Sequence
  Description of Artificial Sequence: Synthetic oligonucleotide
  Target: LAMA2; (+) strand; PAM type: NRG; PAM sequence: GAG
acaccagggcctatcagatg

SEQ ID NO: 147536 - DNA, 20 bp, Artificial Sequence
  Description of Artificial Sequence: Synthetic oligonucleotide
  Target: LAMA2; (+) strand; PAM type: NRG; PAM sequence: AGG
caccagggcctatcagatgg

SEQ ID NO: 147537 - DNA, 20 bp, Artificial Sequence
  Description of Artificial Sequence: Synthetic oligonucleotide
  Target: LAMA2; (+) strand; PAM type: NRG; PAM sequence: GGG
accagggcctatcagatgga

SEQ ID NO: 147538 - DNA, 20 bp, Artificial Sequence
  Description of Artificial Sequence: Synthetic oligonucleotide
  Target: LAMA2; (+) strand; PAM type: NRG; PAM sequence: GAG
cagggcctatcagatggagg

SEQ ID NO: 147539 - DNA, 20 bp, Artificial Sequence
  Description of Artificial Sequence: Synthetic oligonucleotide
  Target: LAMA2; (+) strand; PAM type: NRG; PAM sequence: AGG
agggcctatcagatggaggg

SEQ ID NO: 147540 - DNA, 20 bp, Artificial Sequence
  Description of Artificial Sequence: Synthetic oligonucleotide
  Target: LAMA2; (+) strand; PAM type: NRG; PAM sequence: AAG
ctatcagatggagggaggca

SEQ ID NO: 147541 - DNA, 20 bp, Artificial Sequence
  Description of Artificial Sequence: Synthetic oligonucleotide
  Target: LAMA2; (+) strand; PAM type: NRG; PAM sequence: AGG
tatcagatggagggaggcaa

SEQ ID NO: 147542 - DNA, 20 bp, Artificial Sequence
  Description of Artificial Sequence: Synthetic oligonucleotide
  Target: LAMA2; (+) strand; PAM type: NRG; PAM sequence: GGG
atcagatggagggaggcaaa

SEQ ID NO: 147543 - DNA, 20 bp, Artificial Sequence
  Description of Artificial Sequence: Synthetic oligonucleotide
  Target: LAMA2; (+) strand; PAM type: NRG; PAM sequence: GAG
cagatggagggaggcaaagg

SEQ ID NO: 147544 - DNA, 20 bp, Artificial Sequence
  Description of Artificial Sequence: Synthetic oligonucleotide
  Target: LAMA2; (+) strand; PAM type: NRG; PAM sequence: AGG
agatggagggaggcaaaggg

SEQ ID NO: 147545 - DNA, 20 bp, Artificial Sequence
  Description of Artificial Sequence: Synthetic oligonucleotide
  Target: LAMA2; (+) strand; PAM type: NRG; PAM sequence: GGG
gatggagggaggcaaaggga

SEQ ID NO: 147546 - DNA, 20 bp, Artificial Sequence
  Description of Artificial Sequence: Synthetic oligonucleotide
  Target: LAMA2; (+) strand; PAM type: NRG; PAM sequence: GAG
tggagggaggcaaagggagg

SEQ ID NO: 147547 - DNA, 20 bp, Artificial Sequence
  Description of Artificial Sequence: Synthetic oligonucleotide
  Target: LAMA2; (+) strand; PAM type: NRG; PAM sequence: CAG
ggcaaagggagggagaacat

SEQ ID NO: 147548 - DNA, 20 bp, Artificial Sequence
  Description of Artificial Sequence: Synthetic oligonucleotide
  Target: LAMA2; (+) strand; PAM type: NRG; PAM sequence: AGG
gcaaagggagggagaacatc

SEQ ID NO: 147549 - DNA, 20 bp, Artificial Sequence
  Description of Artificial Sequence: Synthetic oligonucleotide
  Target: LAMA2; (+) strand; PAM type: NRG; PAM sequence: CAG
agggagggagaacatcagga

SEQ ID NO: 147550 - DNA, 20 bp, Artificial Sequence
  Description of Artificial Sequence: Synthetic oligonucleotide
  Target: LAMA2; (+) strand; PAM type: NRG; PAM sequence: CAG
agggagaacatcaggacaga

SEQ ID NO: 147551 - DNA, 20 bp, Artificial Sequence
  Description of Artificial Sequence: Synthetic oligonucleotide
  Target: LAMA2; (+) strand; PAM type: NRG; PAM sequence: CAG
ggacagacagctaatgcatg

SEQ ID NO: 147552 - DNA, 20 bp, Artificial Sequence
  Description of Artificial Sequence: Synthetic oligonucleotide
  Target: LAMA2; (+) strand; PAM type: NRG; PAM sequence: AGG
gacagacagctaatgcatgc

SEQ ID NO: 147553 - DNA, 20 bp, Artificial Sequence
  Description of Artificial Sequence: Synthetic oligonucleotide
  Target: LAMA2; (+) strand; PAM type: NRG; PAM sequence: GGG
acagacagctaatgcatgca

SEQ ID NO: 147554 - DNA, 20 bp, Artificial Sequence
  Description of Artificial Sequence: Synthetic oligonucleotide
  Target: LAMA2; (+) strand; PAM type: NRG; PAM sequence: CAG
gcatgcagggtgctttctat

SEQ ID NO: 147555 - DNA, 20 bp, Artificial Sequence
  Description of Artificial Sequence: Synthetic oligonucleotide
  Target: LAMA2; (+) strand; PAM type: NRG; PAM sequence: AGG
catgcagggtgctttctatc

SEQ ID NO: 147556 - DNA, 20 bp, Artificial Sequence
  Description of Artificial Sequence: Synthetic oligonucleotide
  Target: LAMA2; (+) strand; PAM type: NRG; PAM sequence: CAG
ggtgctttctatcaggtgta

SEQ ID NO: 147557 - DNA, 20 bp, Artificial Sequence
  Description of Artificial Sequence: Synthetic oligonucleotide
  Target: LAMA2; (+) strand; PAM type: NRG; PAM sequence: CAG
ctatcaggtgtacagatgat

SEQ ID NO: 147558 - DNA, 20 bp, Artificial Sequence
  Description of Artificial Sequence: Synthetic oligonucleotide
  Target: LAMA2; (+) strand; PAM type: NRG; PAM sequence: CAG
tacagatgatcagtgtttcc

SEQ ID NO: 147559 - DNA, 20 bp, Artificial Sequence
  Description of Artificial Sequence: Synthetic oligonucleotide
  Target: LAMA2; (+) strand; PAM type: NRG; PAM sequence: AGG
acagatgatcagtgtttccc

SEQ ID NO: 147560 - DNA, 20 bp, Artificial Sequence
  Description of Artificial Sequence: Synthetic oligonucleotide
  Target: LAMA2; (+) strand; PAM type: NRG; PAM sequence: AAG
cagtgtttcccaggctttaa

SEQ ID NO: 147561 - DNA, 20 bp, Artificial Sequence
  Description of Artificial Sequence: Synthetic oligonucleotide
  Target: LAMA2; (+) strand; PAM type: NRG; PAM sequence: AAG
cccaggctttaaaagtccac

SEQ ID NO: 147562 - DNA, 20 bp, Artificial Sequence
  Description of Artificial Sequence: Synthetic oligonucleotide
  Target: LAMA2; (+) strand; PAM type: NRG; PAM sequence: CAG
ggctttaaaagtccacaaga

SEQ ID NO: 147563 - DNA, 20 bp, Artificial Sequence
  Description of Artificial Sequence: Synthetic oligonucleotide
  Target: LAMA2; (+) strand; PAM type: NRG; PAM sequence: AGG
gctttaaaagtccacaagac

SEQ ID NO: 147564 - DNA, 20 bp, Artificial Sequence
  Description of Artificial Sequence: Synthetic oligonucleotide
  Target: LAMA2; (+) strand; PAM type: NRG; PAM sequence: TGG
aaaagtccacaagacaggct

SEQ ID NO: 147565 - DNA, 20 bp, Artificial Sequence
  Description of Artificial Sequence: Synthetic oligonucleotide
  Target: LAMA2; (+) strand; PAM type: NRG; PAM sequence: AAG
agtccacaagacaggcttgg

SEQ ID NO: 147566 - DNA, 20 bp, Artificial Sequence
  Description of Artificial Sequence: Synthetic oligonucleotide
  Target: LAMA2; (+) strand; PAM type: NRG; PAM sequence: AGG
gtccacaagacaggcttgga

SEQ ID NO: 147567 - DNA, 20 bp, Artificial Sequence
  Description of Artificial Sequence: Synthetic oligonucleotide
  Target: LAMA2; (+) strand; PAM type: NRG; PAM sequence: CAG
caggcttggaaggccaattc

SEQ ID NO: 147568 - DNA, 20 bp, Artificial Sequence
  Description of Artificial Sequence: Synthetic oligonucleotide
  Target: LAMA2; (+) strand; PAM type: NRG; PAM sequence: AGG
aggcttggaaggccaattcc

SEQ ID NO: 147569 - DNA, 20 bp, Artificial Sequence
  Description of Artificial Sequence: Synthetic oligonucleotide
  Target: LAMA2; (+) strand; PAM type: NRG; PAM sequence: TGG
cttggaaggccaattccagg

SEQ ID NO: 147570 - DNA, 20 bp, Artificial Sequence
  Description of Artificial Sequence: Synthetic oligonucleotide
  Target: LAMA2; (+) strand; PAM type: NRG; PAM sequence: GAG
ccaattccaggtggtaaatt

SEQ ID NO: 147571 - DNA, 20 bp, Artificial Sequence
  Description of Artificial Sequence: Synthetic oligonucleotide
  Target: LAMA2; (+) strand; PAM type: NRG; PAM sequence: CAG
tggtaaattgagactgtatt

SEQ ID NO: 147572 - DNA, 20 bp, Artificial Sequence
  Description of Artificial Sequence: Synthetic oligonucleotide
  Target: LAMA2; (+) strand; PAM type: NRG; PAM sequence: GAG
gtaaattgagactgtattca

SEQ ID NO: 147573 - DNA, 20 bp, Artificial Sequence
  Description of Artificial Sequence: Synthetic oligonucleotide
  Target: LAMA2; (+) strand; PAM type: NRG; PAM sequence: CAG
gactgtattcagagcatgca

SEQ ID NO: 147574 - DNA, 20 bp, Artificial Sequence
  Description of Artificial Sequence: Synthetic oligonucleotide
  Target: LAMA2; (+) strand; PAM type: NRG; PAM sequence: CAG
gtattcagagcatgcacaga

SEQ ID NO: 147575 - DNA, 20 bp, Artificial Sequence
  Description of Artificial Sequence: Synthetic oligonucleotide
  Target: LAMA2; (+) strand; PAM type: NRG; PAM sequence: AGG
tattcagagcatgcacagac

SEQ ID NO: 147576 - DNA, 20 bp, Artificial Sequence
  Description of Artificial Sequence: Synthetic oligonucleotide
  Target: LAMA2; (+) strand; PAM type: NRG; PAM sequence: GAG
ttcagagcatgcacagacag

SEQ ID NO: 147577 - DNA, 20 bp, Artificial Sequence
  Description of Artificial Sequence: Synthetic oligonucleotide
  Target: LAMA2; (+) strand; PAM type: NRG; PAM sequence: TAG
gcatgcacagacaggagatt

SEQ ID NO: 147578 - DNA, 20 bp, Artificial Sequence
  Description of Artificial Sequence: Synthetic oligonucleotide
  Target: LAMA2; (+) strand; PAM type: NRG; PAM sequence: TAG
acagacaggagatttagtcc

SEQ ID NO: 147579 - DNA, 20 bp, Artificial Sequence
  Description of Artificial Sequence: Synthetic oligonucleotide
  Target: LAMA2; (+) strand; PAM type: NRG; PAM sequence: GAG
agacaggagatttagtccta

SEQ ID NO: 147580 - DNA, 20 bp, Artificial Sequence
  Description of Artificial Sequence: Synthetic oligonucleotide
  Target: LAMA2; (+) strand; PAM type: NRG; PAM sequence: TAG
agatttagtcctagagacat

SEQ ID NO: 147581 - DNA, 20 bp, Artificial Sequence
  Description of Artificial Sequence: Synthetic oligonucleotide
  Target: LAMA2; (+) strand; PAM type: NRG; PAM sequence: TGG
tcctagagacattagatttc

SEQ ID NO: 147582 - DNA, 20 bp, Artificial Sequence
  Description of Artificial Sequence: Synthetic oligonucleotide
  Target: LAMA2; (+) strand; PAM type: NRG; PAM sequence: TAG
ttctggtttacctgcacccc

SEQ ID NO: 147583 - DNA, 20 bp, Artificial Sequence
  Description of Artificial Sequence: Synthetic oligonucleotide
  Target: LAMA2; (+) strand; PAM type: NRG; PAM sequence: GAG
ctggtttacctgcaccccta

SEQ ID NO: 147584 - DNA, 20 bp, Artificial Sequence
  Description of Artificial Sequence: Synthetic oligonucleotide
  Target: LAMA2; (+) strand; PAM type: NRG; PAM sequence: AGG
tggtttacctgcacccctag

SEQ ID NO: 147585 - DNA, 20 bp, Artificial Sequence
  Description of Artificial Sequence: Synthetic oligonucleotide
  Target: LAMA2; (+) strand; PAM type: NRG; PAM sequence: TAG
tacctgcacccctagaggcc

SEQ ID NO: 147586 - DNA, 20 bp, Artificial Sequence
  Description of Artificial Sequence: Synthetic oligonucleotide
  Target: LAMA2; (+) strand; PAM type: NRG; PAM sequence: AGG
acctgcacccctagaggcct

SEQ ID NO: 147587 - DNA, 20 bp, Artificial Sequence
  Description of Artificial Sequence: Synthetic oligonucleotide
  Target: LAMA2; (+) strand; PAM type: NRG; PAM sequence: GAG
aaaaatattaacaacatttt

SEQ ID NO: 147588 - DNA, 20 bp, Artificial Sequence
  Description of Artificial Sequence: Synthetic oligonucleotide
  Target: LAMA2; (+) strand; PAM type: NRG; PAM sequence: AGG
aaaatattaacaacattttg

SEQ ID NO: 147589 - DNA, 20 bp, Artificial Sequence
  Description of Artificial Sequence: Synthetic oligonucleotide
  Target: LAMA2; (+) strand; PAM type: NRG; PAM sequence: GGG
aaatattaacaacattttga

SEQ ID NO: 147590 - DNA, 20 bp, Artificial Sequence
  Description of Artificial Sequence: Synthetic oligonucleotide
  Target: LAMA2; (+) strand; PAM type: NRG; PAM sequence: GGG
aatattaacaacattttgag

SEQ ID NO: 147591 - DNA, 20 bp, Artificial Sequence
  Description of Artificial Sequence: Synthetic oligonucleotide
  Target: LAMA2; (+) strand; PAM type: NRG; PAM sequence: GAG
tattaacaacattttgaggg

SEQ ID NO: 147592 - DNA, 20 bp, Artificial Sequence
  Description of Artificial Sequence: Synthetic oligonucleotide
  Target: LAMA2; (+) strand; PAM type: NRG; PAM sequence: AAG
tttgaggggagccttaaaac

SEQ ID NO: 147593 - DNA, 20 bp, Artificial Sequence
  Description of Artificial Sequence: Synthetic oligonucleotide
  Target: LAMA2; (+) strand; PAM type: NRG; PAM sequence: TAG
atcgacccccaaaaaacaca

SEQ ID NO: 147594 - DNA, 20 bp, Artificial Sequence
  Description of Artificial Sequence: Synthetic oligonucleotide
  Target: LAMA2; (+) strand; PAM type: NRG; PAM sequence: CAG
cccaaaaaacacatagatcc

SEQ ID NO: 147595 - DNA, 20 bp, Artificial Sequence
  Description of Artificial Sequence: Synthetic oligonucleotide
  Target: LAMA2; (+) strand; PAM type: NRG; PAM sequence: AGG
ccaaaaaacacatagatccc

SEQ ID NO: 147596 - DNA, 20 bp, Artificial Sequence
  Description of Artificial Sequence: Synthetic oligonucleotide
  Target: LAMA2; (+) strand; PAM type: NRG; PAM sequence: CAG
aacacatagatcccaggcat

SEQ ID NO: 147597 - DNA, 20 bp, Artificial Sequence
  Description of Artificial Sequence: Synthetic oligonucleotide
  Target: LAMA2; (+) strand; PAM type: NRG; PAM sequence: GAG
cacatagatcccaggcatca

SEQ ID NO: 147598 - DNA, 20 bp, Artificial Sequence
  Description of Artificial Sequence: Synthetic oligonucleotide
  Target: LAMA2; (+) strand; PAM type: NRG; PAM sequence: AAG
atagatcccaggcatcagag

SEQ ID NO: 147599 - DNA, 20 bp, Artificial Sequence
  Description of Artificial Sequence: Synthetic oligonucleotide
  Target: LAMA2; (+) strand; PAM type: NRG; PAM sequence: AGG
tagatcccaggcatcagaga

SEQ ID NO: 147600 - DNA, 20 bp, Artificial Sequence
  Description of Artificial Sequence: Synthetic oligonucleotide
  Target: LAMA2; (+) strand; PAM type: NRG; PAM sequence: GAG
gatcccaggcatcagagaag

SEQ ID NO: 147601 - DNA, 20 bp, Artificial Sequence
  Description of Artificial Sequence: Synthetic oligonucleotide
  Target: LAMA2; (+) strand; PAM type: NRG; PAM sequence: CAG
ggcatcagagaaggagaatt

SEQ ID NO: 147602 - DNA, 20 bp, Artificial Sequence
  Description of Artificial Sequence: Synthetic oligonucleotide
  Target: LAMA2; (+) strand; PAM type: NRG; PAM sequence: AAG
agaaggagaattcagtcttc

SEQ ID NO: 147603 - DNA, 20 bp, Artificial Sequence
  Description of Artificial Sequence: Synthetic oligonucleotide
  Target: LAMA2; (+) strand; PAM type: NRG; PAM sequence: CAG
tcagtcttcaagaccactcc

SEQ ID NO: 147604 - DNA, 20 bp, Artificial Sequence
  Description of Artificial Sequence: Synthetic oligonucleotide
  Target: LAMA2; (+) strand; PAM type: NRG; PAM sequence: TGG
tcttcaagaccactcccagc

SEQ ID NO: 147605 - DNA, 20 bp, Artificial Sequence
  Description of Artificial Sequence: Synthetic oligonucleotide
  Target: LAMA2; (+) strand; PAM type: NRG; PAM sequence: GGG
cttcaagaccactcccagct

SEQ ID NO: 147606 - DNA, 20 bp, Artificial Sequence
  Description of Artificial Sequence: Synthetic oligonucleotide
  Target: LAMA2; (+) strand; PAM type: NRG; PAM sequence: GAG
gggccttcctgctttcttct

SEQ ID NO: 147607 - DNA, 20 bp, Artificial Sequence
  Description of Artificial Sequence: Synthetic oligonucleotide
  Target: LAMA2; (+) strand; PAM type: NRG; PAM sequence: CAG
ctttcttctgagcctaaacc

SEQ ID NO: 147608 - DNA, 20 bp, Artificial Sequence
  Description of Artificial Sequence: Synthetic oligonucleotide
  Target: LAMA2; (+) strand; PAM type: NRG; PAM sequence: AAG
gagcctaaacccagtgatta

SEQ ID NO: 147609 - DNA, 20 bp, Artificial Sequence
  Description of Artificial Sequence: Synthetic oligonucleotide
  Target: LAMA2; (+) strand; PAM type: NRG; PAM sequence: CAG
aaacccagtgattaaagaac

SEQ ID NO: 147610 - DNA, 20 bp, Artificial Sequence
  Description of Artificial Sequence: Synthetic oligonucleotide
  Target: LAMA2; (+) strand; PAM type: NRG; PAM sequence: TGG
cagtgattaaagaaccagcc

SEQ ID NO: 147611 - DNA, 20 bp, Artificial Sequence
  Description of Artificial Sequence: Synthetic oligonucleotide
  Target: LAMA2; (+) strand; PAM type: NRG; PAM sequence: AAG
gaaccagcctggacttcctt

SEQ ID NO: 147612 - DNA, 20 bp, Artificial Sequence
  Description of Artificial Sequence: Synthetic oligonucleotide
  Target: LAMA2; (+) strand; PAM type: NRG; PAM sequence: AGG
aaccagcctggacttcctta

SEQ ID NO: 147613 - DNA, 20 bp, Artificial Sequence
  Description of Artificial Sequence: Synthetic oligonucleotide
  Target: LAMA2; (+) strand; PAM type: NRG; PAM sequence: AAG
tgatcaaatatacccacttc

SEQ ID NO: 147614 - DNA, 20 bp, Artificial Sequence
  Description of Artificial Sequence: Synthetic oligonucleotide
  Target: LAMA2; (+) strand; PAM type: NRG; PAM sequence: TGG
aaatatacccacttcaagcc

SEQ ID NO: 147615 - DNA, 20 bp, Artificial Sequence
  Description of Artificial Sequence: Synthetic oligonucleotide
  Target: LAMA2; (+) strand; PAM type: NRG; PAM sequence: CAG
gcctggcaccactttcttcc

SEQ ID NO: 147616 - DNA, 20 bp, Artificial Sequence
  Description of Artificial Sequence: Synthetic oligonucleotide
  Target: LAMA2; (+) strand; PAM type: NRG; PAM sequence: AGG
cctggcaccactttcttccc

SEQ ID NO: 147617 - DNA, 20 bp, Artificial Sequence
  Description of Artificial Sequence: Synthetic oligonucleotide
  Target: LAMA2; (+) strand; PAM type: NRG; PAM sequence: TGG
gcaccactttcttcccaggc

SEQ ID NO: 147618 - DNA, 20 bp, Artificial Sequence
  Description of Artificial Sequence: Synthetic oligonucleotide
  Target: LAMA2; (+) strand; PAM type: NRG; PAM sequence: TAG
cactttcttcccaggctggc

SEQ ID NO: 147619 - DNA, 20 bp, Artificial Sequence
  Description of Artificial Sequence: Synthetic oligonucleotide
  Target: LAMA2; (+) strand; PAM type: NRG; PAM sequence: TAG
ggctggctagttttacattt

SEQ ID NO: 147620 - DNA, 20 bp, Artificial Sequence
  Description of Artificial Sequence: Synthetic oligonucleotide
  Target: LAMA2; (+) strand; PAM type: NRG; PAM sequence: CAG
tagttttacattttagtaca

SEQ ID NO: 147621 - DNA, 20 bp, Artificial Sequence
  Description of Artificial Sequence: Synthetic oligonucleotide
  Target: LAMA2; (+) strand; PAM type: NRG; PAM sequence: CAG
ttacattttagtacacagtc

SEQ ID NO: 147622 - DNA, 20 bp, Artificial Sequence
  Description of Artificial Sequence: Synthetic oligonucleotide
  Target: LAMA2; (+) strand; PAM type: NRG; PAM sequence: TAG
gatgttttctcttttcttca

SEQ ID NO: 147623 - DNA, 20 bp, Artificial Sequence
  Description of Artificial Sequence: Synthetic oligonucleotide
  Target: LAMA2; (+) strand; PAM type: NRG; PAM sequence: TAG
tcttttcttcatagtacctt

SEQ ID NO: 147624 - DNA, 20 bp, Artificial Sequence
  Description of Artificial Sequence: Synthetic oligonucleotide
  Target: LAMA2; (+) strand; PAM type: NRG; PAM sequence: GAG
ttttcttcatagtaccttta

SEQ ID NO: 147625 - DNA, 20 bp, Artificial Sequence
  Description of Artificial Sequence: Synthetic oligonucleotide
  Target: LAMA2; (+) strand; PAM type: NRG; PAM sequence: GAG
ttcttcatagtacctttaga

SEQ ID NO: 147626 - DNA, 20 bp, Artificial Sequence
  Description of Artificial Sequence: Synthetic oligonucleotide
  Target: LAMA2; (+) strand; PAM type: NRG; PAM sequence: GAG
cttcatagtacctttagaga

SEQ ID NO: 147627 - DNA, 20 bp, Artificial Sequence
  Description of Artificial Sequence: Synthetic oligonucleotide
  Target: LAMA2; (+) strand; PAM type: NRG; PAM sequence: AGG
ttcatagtacctttagagag

SEQ ID NO: 147628 - DNA, 20 bp, Artificial Sequence
  Description of Artificial Sequence: Synthetic oligonucleotide
  Target: LAMA2; (+) strand; PAM type: NRG; PAM sequence: TGG
ttagagagaggcttccttta

SEQ ID NO: 147629 - DNA, 20 bp, Artificial Sequence
  Description of Artificial Sequence: Synthetic oligonucleotide
  Target: LAMA2; (+) strand; PAM type: NRG; PAM sequence: GAG
cttcctttatggttctaaat

SEQ ID NO: 147630 - DNA, 20 bp, Artificial Sequence
  Description of Artificial Sequence: Synthetic oligonucleotide
  Target: LAMA2; (+) strand; PAM type: NRG; PAM sequence: AGG
ttcctttatggttctaaatg

SEQ ID NO: 147631 - DNA, 20 bp, Artificial Sequence
  Description of Artificial Sequence: Synthetic oligonucleotide
  Target: LAMA2; (+) strand; PAM type: NRG; PAM sequence: TAG
gcttcctccctctttttgac

SEQ ID NO: 147632 - DNA, 20 bp, Artificial Sequence
  Description of Artificial Sequence: Synthetic oligonucleotide
  Target: LAMA2; (+) strand; PAM type: NRG; PAM sequence: GAG
ttgactagaaatctcgctgt

SEQ ID NO: 147633 - DNA, 20 bp, Artificial Sequence
  Description of Artificial Sequence: Synthetic oligonucleotide
  Target: LAMA2; (+) strand; PAM type: NRG; PAM sequence: GAG
agaaatctcgctgtgagtgt

SEQ ID NO: 147634 - DNA, 20 bp, Artificial Sequence
  Description of Artificial Sequence: Synthetic oligonucleotide
  Target: LAMA2; (+) strand; PAM type: NRG; PAM sequence: TGG
gagtgtgagcataacacatg

SEQ ID NO: 147635 - DNA, 20 bp, Artificial Sequence
  Description of Artificial Sequence: Synthetic oligonucleotide
  Target: LAMA2; (+) strand; PAM type: NRG; PAM sequence: TAG
gagcataacacatgtggcga

SEQ ID NO: 147636 - DNA, 20 bp, Artificial Sequence
  Description of Artificial Sequence: Synthetic oligonucleotide
  Target: LAMA2; (+) strand; PAM type: NRG; PAM sequence: CAG
catgtggcgatagctgtgat

SEQ ID NO: 147637 - DNA, 20 bp, Artificial Sequence
  Description of Artificial Sequence: Synthetic oligonucleotide
  Target: LAMA2; (+) strand; PAM type: NRG; PAM sequence: CAG
tagctgtgatcagtgctgtc

SEQ ID NO: 147638 - DNA, 20 bp, Artificial Sequence
  Description of Artificial Sequence: Synthetic oligonucleotide
  Target: LAMA2; (+) strand; PAM type: NRG; PAM sequence: AGG
agctgtgatcagtgctgtcc

SEQ ID NO: 147639 - DNA, 20 bp, Artificial Sequence
  Description of Artificial Sequence: Synthetic oligonucleotide
  Target: LAMA2; (+) strand; PAM type: NRG; PAM sequence: CAG
agtgctgtccaggattccat

SEQ ID NO: 147640 - DNA, 20 bp, Artificial Sequence
  Description of Artificial Sequence: Synthetic oligonucleotide
  Target: LAMA2; (+) strand; PAM type: NRG; PAM sequence: TGG
caggattccatcagaaaccc

SEQ ID NO: 147641 - DNA, 20 bp, Artificial Sequence
  Description of Artificial Sequence: Synthetic oligonucleotide
  Target: LAMA2; (+) strand; PAM type: NRG; PAM sequence: GAG
ggattccatcagaaaccctg

SEQ ID NO: 147642 - DNA, 20 bp, Artificial Sequence
  Description of Artificial Sequence: Synthetic oligonucleotide
  Target: LAMA2; (+) strand; PAM type: NRG; PAM sequence: GAG
attccatcagaaaccctgga

SEQ ID NO: 147643 - DNA, 20 bp, Artificial Sequence
  Description of Artificial Sequence: Synthetic oligonucleotide
  Target: LAMA2; (+) strand; PAM type: NRG; PAM sequence: TGG
catcagaaaccctggagagc

SEQ ID NO: 147644 - DNA, 20 bp, Artificial Sequence
  Description of Artificial Sequence: Synthetic oligonucleotide
  Target: LAMA2; (+) strand; PAM type: NRG; PAM sequence: AAG
tctaactaaaactgaatgtg

SEQ ID NO: 147645 - DNA, 20 bp, Artificial Sequence
  Description of Artificial Sequence: Synthetic oligonucleotide
  Target: LAMA2; (+) strand; PAM type: NRG; PAM sequence: AGG
ctaactaaaactgaatgtga

SEQ ID NO: 147646 - DNA, 20 bp, Artificial Sequence
  Description of Artificial Sequence: Synthetic oligonucleotide
  Target: LAMA2; (+) strand; PAM type: NRG; PAM sequence: TAG
gaatgtgaaggtatgttctt

SEQ ID NO: 147647 - DNA, 20 bp, Artificial Sequence
  Description of Artificial Sequence: Synthetic oligonucleotide
  Target: LAMA2; (+) strand; PAM type: NRG; PAM sequence: AAG
tgtgaaggtatgttctttag

SEQ ID NO: 147648 - DNA, 20 bp, Artificial Sequence
  Description of Artificial Sequence: Synthetic oligonucleotide
  Target: LAMA2; (+) strand; PAM type: NRG; PAM sequence: AAG
atatgtcattcttcctttcc

SEQ ID NO: 147649 - DNA, 20 bp, Artificial Sequence
  Description of Artificial Sequence: Synthetic oligonucleotide
  Target: LAMA2; (+) strand; PAM type: NRG; PAM sequence: AAG
ttcttcctttccaagaaaaa

SEQ ID NO: 147650 - DNA, 20 bp, Artificial Sequence
  Description of Artificial Sequence: Synthetic oligonucleotide
  Target: LAMA2; (+) strand; PAM type: NRG; PAM sequence: CAG
tcctttccaagaaaaaaagc

SEQ ID NO: 147651 - DNA, 20 bp, Artificial Sequence
  Description of Artificial Sequence: Synthetic oligonucleotide
  Target: LAMA2; (+) strand; PAM type: NRG; PAM sequence: TAG
aaaaagccagtaatgaaaaa

SEQ ID NO: 147652 - DNA, 20 bp, Artificial Sequence
  Description of Artificial Sequence: Synthetic oligonucleotide
  Target: LAMA2; (+) strand; PAM type: NRG; PAM sequence: TGG
agtaatgaaaaatagtgaaa

SEQ ID NO: 147653 - DNA, 20 bp, Artificial Sequence
  Description of Artificial Sequence: Synthetic oligonucleotide
  Target: LAMA2; (+) strand; PAM type: NRG; PAM sequence: TGG
atgaaaaatagtgaaatggc

SEQ ID NO: 147654 - DNA, 20 bp, Artificial Sequence
  Description of Artificial Sequence: Synthetic oligonucleotide
  Target: LAMA2; (+) strand; PAM type: NRG; PAM sequence: AAG
tcatttatattatcacttcg

SEQ ID NO: 147655 - DNA, 20 bp, Artificial Sequence
  Description of Artificial Sequence: Synthetic oligonucleotide
  Target: LAMA2; (+) strand; PAM type: NRG; PAM sequence: TAG
tcgaagacaacccatatgtc

SEQ ID NO: 147656 - DNA, 20 bp, Artificial Sequence
  Description of Artificial Sequence: Synthetic oligonucleotide
  Target: LAMA2; (+) strand; PAM type: NRG; PAM sequence: AAG
catatgtctagcttttccta

SEQ ID NO: 147657 - DNA, 20 bp, Artificial Sequence
  Description of Artificial Sequence: Synthetic oligonucleotide
  Target: LAMA2; (+) strand; PAM type: NRG; PAM sequence: AGG
atatgtctagcttttcctaa

SEQ ID NO: 147658 - DNA, 20 bp, Artificial Sequence
  Description of Artificial Sequence: Synthetic oligonucleotide
  Target: LAMA2; (+) strand; PAM type: NRG; PAM sequence: GGG
tatgtctagcttttcctaaa

SEQ ID NO: 147659 - DNA, 20 bp, Artificial Sequence
  Description of Artificial Sequence: Synthetic oligonucleotide
  Target: LAMA2; (+) strand; PAM type: NRG; PAM sequence: AAG
tttcctaaagggaaatatct

SEQ ID NO: 147660 - DNA, 20 bp, Artificial Sequence
  Description of Artificial Sequence: Synthetic oligonucleotide
  Target: LAMA2; (+) strand; PAM type: NRG; PAM sequence: TAG
agggaaatatctaagaaatg

SEQ ID NO: 147661 - DNA, 20 bp, Artificial Sequence
  Description of Artificial Sequence: Synthetic oligonucleotide
  Target: LAMA2; (+) strand; PAM type: NRG; PAM sequence: CAG
gaaatatctaagaaatgtag

SEQ ID NO: 147662 - DNA, 20 bp, Artificial Sequence
  Description of Artificial Sequence: Synthetic oligonucleotide
  Target: LAMA2; (+) strand; PAM type: NRG; PAM sequence: TAG
aaatgtagcagatgacttta

SEQ ID NO: 147663 - DNA, 20 bp, Artificial Sequence
  Description of Artificial Sequence: Synthetic oligonucleotide
  Target: LAMA2; (+) strand; PAM type: NRG; PAM sequence: TAG
cagatgactttatagcctaa

SEQ ID NO: 147664 - DNA, 20 bp, Artificial Sequence
  Description of Artificial Sequence: Synthetic oligonucleotide
  Target: LAMA2; (+) strand; PAM type: NRG; PAM sequence: TGG
tatagcctaatagtgacaac

SEQ ID NO: 147665 - DNA, 20 bp, Artificial Sequence
  Description of Artificial Sequence: Synthetic oligonucleotide
  Target: LAMA2; (+) strand; PAM type: NRG; PAM sequence: TAG
atagtgacaactggtctttt

SEQ ID NO: 147666 - DNA, 20 bp, Artificial Sequence
  Description of Artificial Sequence: Synthetic oligonucleotide
  Target: LAMA2; (+) strand; PAM type: NRG; PAM sequence: AGG
tagtgacaactggtcttttt

SEQ ID NO: 147667 - DNA, 20 bp, Artificial Sequence
  Description of Artificial Sequence: Synthetic oligonucleotide
  Target: LAMA2; (+) strand; PAM type: NRG; PAM sequence: CAG
caactggtctttttaggtga

SEQ ID NO: 147668 - DNA, 20 bp, Artificial Sequence
  Description of Artificial Sequence: Synthetic oligonucleotide
  Target: LAMA2; (+) strand; PAM type: NRG; PAM sequence: AGG
aactggtctttttaggtgac

SEQ ID NO: 147669 - DNA, 20 bp, Artificial Sequence
  Description of Artificial Sequence: Synthetic oligonucleotide
  Target: LAMA2; (+) strand; PAM type: NRG; PAM sequence: TGG
tttttaggtgacaggtatca

SEQ ID NO: 147670 - DNA, 20 bp, Artificial Sequence
  Description of Artificial Sequence: Synthetic oligonucleotide
  Target: LAMA2; (+) strand; PAM type: NRG; PAM sequence: GAG
tttaggtgacaggtatcatg

SEQ ID NO: 147671 - DNA, 20 bp, Artificial Sequence
  Description of Artificial Sequence: Synthetic oligonucleotide
  Target: LAMA2; (+) strand; PAM type: NRG; PAM sequence: TGG
catggagaaacctgtgtttc

SEQ ID NO: 147672 - DNA, 20 bp, Artificial Sequence
  Description of Artificial Sequence: Synthetic oligonucleotide
  Target: LAMA2; (+) strand; PAM type: NRG; PAM sequence: GAG
tggagaaacctgtgtttctg

SEQ ID NO: 147673 - DNA, 20 bp, Artificial Sequence
  Description of Artificial Sequence: Synthetic oligonucleotide
  Target: LAMA2; (+) strand; PAM type: NRG; PAM sequence: AAG
tctggagattttctcaaccc

SEQ ID NO: 147674 - DNA, 20 bp, Artificial Sequence
  Description of Artificial Sequence: Synthetic oligonucleotide
  Target: LAMA2; (+) strand; PAM type: NRG; PAM sequence: AAG
agattttctcaacccaagaa

SEQ ID NO: 147675 - DNA, 20 bp, Artificial Sequence
  Description of Artificial Sequence: Synthetic oligonucleotide
  Target: LAMA2; (+) strand; PAM type: NRG; PAM sequence: TAG
cccaagaaaagacctaaaaa

SEQ ID NO: 147676 - DNA, 20 bp, Artificial Sequence
  Description of Artificial Sequence: Synthetic oligonucleotide
  Target: LAMA2; (+) strand; PAM type: NRG; PAM sequence: TGG
aaaagacctaaaaatagtct

SEQ ID NO: 147677 - DNA, 20 bp, Artificial Sequence
  Description of Artificial Sequence: Synthetic oligonucleotide
  Target: LAMA2; (+) strand; PAM type: NRG; PAM sequence: GGG
aaagacctaaaaatagtctt

SEQ ID NO: 147678 - DNA, 20 bp, Artificial Sequence
  Description of Artificial Sequence: Synthetic oligonucleotide
  Target: LAMA2; (+) strand; PAM type: NRG; PAM sequence: TAG
gctgaactgcaaacctaaac

SEQ ID NO: 147679 - DNA, 20 bp, Artificial Sequence
  Description of Artificial Sequence: Synthetic oligonucleotide
  Target: LAMA2; (+) strand; PAM type: NRG; PAM sequence: AAG
tgcaaacctaaactagtatg

SEQ ID NO: 147680 - DNA, 20 bp, Artificial Sequence
  Description of Artificial Sequence: Synthetic oligonucleotide
  Target: LAMA2; (+) strand; PAM type: NRG; PAM sequence: CAG
gaatgcaaatattaatatta

SEQ ID NO: 147681 - DNA, 20 bp, Artificial Sequence
  Description of Artificial Sequence: Synthetic oligonucleotide
  Target: LAMA2; (+) strand; PAM type: NRG; PAM sequence: CAG
atattaatattacagtaaat

SEQ ID NO: 147682 - DNA, 20 bp, Artificial Sequence
  Description of Artificial Sequence: Synthetic oligonucleotide
  Target: LAMA2; (+) strand; PAM type: NRG; PAM sequence: CAG
agccctaaccacattttttt

SEQ ID NO: 147683 - DNA, 20 bp, Artificial Sequence
  Description of Artificial Sequence: Synthetic oligonucleotide
  Target: LAMA2; (+) strand; PAM type: NRG; PAM sequence: AAG
cacatttttttcagctcact

SEQ ID NO: 147684 - DNA, 20 bp, Artificial Sequence
  Description of Artificial Sequence: Synthetic oligonucleotide
  Target: LAMA2; (+) strand; PAM type: NRG; PAM sequence: TGG
ttcagctcactaagtatata

SEQ ID NO: 147685 - DNA, 20 bp, Artificial Sequence
  Description of Artificial Sequence: Synthetic oligonucleotide
  Target: LAMA2; (+) strand; PAM type: NRG; PAM sequence: CAG
gtatatatggccttcaaaaa

SEQ ID NO: 147686 - DNA, 20 bp, Artificial Sequence
  Description of Artificial Sequence: Synthetic oligonucleotide
  Target: LAMA2; (+) strand; PAM type: NRG; PAM sequence: TAG
ggccttcaaaaacagcttga

SEQ ID NO: 147687 - DNA, 20 bp, Artificial Sequence
  Description of Artificial Sequence: Synthetic oligonucleotide
  Target: LAMA2; (+) strand; PAM type: NRG; PAM sequence: CAG
atttatcatgtacaatgtgt

SEQ ID NO: 147688 - DNA, 20 bp, Artificial Sequence
  Description of Artificial Sequence: Synthetic oligonucleotide
  Target: LAMA2; (+) strand; PAM type: NRG; PAM sequence: CAG
gtacaatgtgtcagacatga

SEQ ID NO: 147689 - DNA, 20 bp, Artificial Sequence
  Description of Artificial Sequence: Synthetic oligonucleotide
  Target: LAMA2; (+) strand; PAM type: NRG; PAM sequence: AGG
tacaatgtgtcagacatgac

SEQ ID NO: 147690 - DNA, 20 bp, Artificial Sequence
  Description of Artificial Sequence: Synthetic oligonucleotide
  Target: LAMA2; (+) strand; PAM type: NRG; PAM sequence: AAG
acaaaatgttccccacctat

SEQ ID NO: 147691 - DNA, 20 bp, Artificial Sequence
  Description of Artificial Sequence: Synthetic oligonucleotide
  Target: LAMA2; (+) strand; PAM type: NRG; PAM sequence: AAG
ttccccacctataagatata

SEQ ID NO: 147692 - DNA, 20 bp, Artificial Sequence
  Description of Artificial Sequence: Synthetic oligonucleotide
  Target: LAMA2; (+) strand; PAM type: NRG; PAM sequence: CGG
ccacctataagatataaagt

SEQ ID NO: 147693 - DNA, 20 bp, Artificial Sequence
  Description of Artificial Sequence: Synthetic oligonucleotide
  Target: LAMA2; (+) strand; PAM type: NRG; PAM sequence: TGG
aagtcggccttccatatcca

SEQ ID NO: 147694 - DNA, 20 bp, Artificial Sequence
  Description of Artificial Sequence: Synthetic oligonucleotide
  Target: LAMA2; (+) strand; PAM type: NRG; PAM sequence: TGG
atccatggtttctccatcca

SEQ ID NO: 147695 - DNA, 20 bp, Artificial Sequence
  Description of Artificial Sequence: Synthetic oligonucleotide
  Target: LAMA2; (+) strand; PAM type: NRG; PAM sequence: GGG
tccatggtttctccatccat

SEQ ID NO: 147696 - DNA, 20 bp, Artificial Sequence
  Description of Artificial Sequence: Synthetic oligonucleotide
  Target: LAMA2; (+) strand; PAM type: NRG; PAM sequence: CAG
tccatgggtctaaccaactg

SEQ ID NO: 147697 - DNA, 20 bp, Artificial Sequence
  Description of Artificial Sequence: Synthetic oligonucleotide
  Target: LAMA2; (+) strand; PAM type: NRG; PAM sequence: AAG
gatcaaaaatgtttgaaaaa

SEQ ID NO: 147698 - DNA, 20 bp, Artificial Sequence
  Description of Artificial Sequence: Synthetic oligonucleotide
  Target: LAMA2; (+) strand; PAM type: NRG; PAM sequence: AAG
gcatctgtactgaacttgta

SEQ ID NO: 147699 - DNA, 20 bp, Artificial Sequence
  Description of Artificial Sequence: Synthetic oligonucleotide
  Target: LAMA2; (+) strand; PAM type: NRG; PAM sequence: AAG
ttttcttattattatttcct

SEQ ID NO: 147700 - DNA, 20 bp, Artificial Sequence
  Description of Artificial Sequence: Synthetic oligonucleotide
  Target: LAMA2; (+) strand; PAM type: NRG; PAM sequence: TAG
caatataacaactatttata

SEQ ID NO: 147701 - DNA, 20 bp, Artificial Sequence
  Description of Artificial Sequence: Synthetic oligonucleotide
  Target: LAMA2; (+) strand; PAM type: NRG; PAM sequence: TAG
atatagcatttacattttgt

SEQ ID NO: 147702 - DNA, 20 bp, Artificial Sequence
  Description of Artificial Sequence: Synthetic oligonucleotide
  Target: LAMA2; (+) strand; PAM type: NRG; PAM sequence: AGG
tatagcatttacattttgtt

SEQ ID NO: 147703 - DNA, 20 bp, Artificial Sequence
  Description of Artificial Sequence: Synthetic oligonucleotide
  Target: LAMA2; (+) strand; PAM type: NRG; PAM sequence: AAG
tacattttgttaggtattat

SEQ ID NO: 147704 - DNA, 20 bp, Artificial Sequence
  Description of Artificial Sequence: Synthetic oligonucleotide
  Target: LAMA2; (+) strand; PAM type: NRG; PAM sequence: TAG
gttaggtattataagtaatc

SEQ ID NO: 147705 - DNA, 20 bp, Artificial Sequence
  Description of Artificial Sequence: Synthetic oligonucleotide
  Target: LAMA2; (+) strand; PAM type: NRG; PAM sequence: GAG
taggtattataagtaatcta

SEQ ID NO: 147706 - DNA, 20 bp, Artificial Sequence
  Description of Artificial Sequence: Synthetic oligonucleotide
  Target: LAMA2; (+) strand; PAM type: NRG; PAM sequence: AAG
agtaatctagagatgatcta

SEQ ID NO: 147707 - DNA, 20 bp, Artificial Sequence
  Description of Artificial Sequence: Synthetic oligonucleotide
  Target: LAMA2; (+) strand; PAM type: NRG; PAM sequence: CAG
tagagatgatctaaagtgta

SEQ ID NO: 147708 - DNA, 20 bp, Artificial Sequence
  Description of Artificial Sequence: Synthetic oligonucleotide
  Target: LAMA2; (+) strand; PAM type: NRG; PAM sequence: AGG
agagatgatctaaagtgtac

SEQ ID NO: 147709 - DNA, 20 bp, Artificial Sequence
  Description of Artificial Sequence: Synthetic oligonucleotide
  Target: LAMA2; (+) strand; PAM type: NRG; PAM sequence: GAG
agatgatctaaagtgtacag

SEQ ID NO: 147710 - DNA, 20 bp, Artificial Sequence
  Description of Artificial Sequence: Synthetic oligonucleotide
  Target: LAMA2; (+) strand; PAM type: NRG; PAM sequence: AGG
gatgatctaaagtgtacagg

SEQ ID NO: 147711 - DNA, 20 bp, Artificial Sequence
  Description of Artificial Sequence: Synthetic oligonucleotide
  Target: LAMA2; (+) strand; PAM type: NRG; PAM sequence: TAG
agtgtacaggaggatgtgca

SEQ ID NO: 147712 - DNA, 20 bp, Artificial Sequence
  Description of Artificial Sequence: Synthetic oligonucleotide
  Target: LAMA2; (+) strand; PAM type: NRG; PAM sequence: AGG
gtgtacaggaggatgtgcat

SEQ ID NO: 147713 - DNA, 20 bp, Artificial Sequence
  Description of Artificial Sequence: Synthetic oligonucleotide
  Target: LAMA2; (+) strand; PAM type: NRG; PAM sequence: AAG
gatgtgcataggctgtatgc

SEQ ID NO: 147714 - DNA, 20 bp, Artificial Sequence
  Description of Artificial Sequence: Synthetic oligonucleotide
  Target: LAMA2; (+) strand; PAM type: NRG; PAM sequence: CAG
agtactatgccactgtataa

SEQ ID NO: 147715 - DNA, 20 bp, Artificial Sequence
  Description of Artificial Sequence: Synthetic oligonucleotide
  Target: LAMA2; (+) strand; PAM type: NRG; PAM sequence: AGG
gtactatgccactgtataac

SEQ ID NO: 147716 - DNA, 20 bp, Artificial Sequence
  Description of Artificial Sequence: Synthetic oligonucleotide
  Target: LAMA2; (+) strand; PAM type: NRG; PAM sequence: GAG
ccactgtataacaggaactt

SEQ ID NO: 147717 - DNA, 20 bp, Artificial Sequence
  Description of Artificial Sequence: Synthetic oligonucleotide
  Target: LAMA2; (+) strand; PAM type: NRG; PAM sequence: TGG
acttgagtatccttgaatct

SEQ ID NO: 147718 - DNA, 20 bp, Artificial Sequence
  Description of Artificial Sequence: Synthetic oligonucleotide
  Target: LAMA2; (+) strand; PAM type: NRG; PAM sequence: GAG
atccttgaatcttggtgttt

SEQ ID NO: 147719 - DNA, 20 bp, Artificial Sequence
  Description of Artificial Sequence: Synthetic oligonucleotide
  Target: LAMA2; (+) strand; PAM type: NRG; PAM sequence: AGG
tccttgaatcttggtgtttg

SEQ ID NO: 147720 - DNA, 20 bp, Artificial Sequence
  Description of Artificial Sequence: Synthetic oligonucleotide
  Target: LAMA2; (+) strand; PAM type: NRG; PAM sequence: GGG
ccttgaatcttggtgtttga

SEQ ID NO: 147721 - DNA, 20 bp, Artificial Sequence
  Description of Artificial Sequence: Synthetic oligonucleotide
  Target: LAMA2; (+) strand; PAM type: NRG; PAM sequence: GAG
ttgaatcttggtgtttgagg

SEQ ID NO: 147722 - DNA, 20 bp, Artificial Sequence
  Description of Artificial Sequence: Synthetic oligonucleotide
  Target: LAMA2; (+) strand; PAM type: NRG; PAM sequence: AGG
tgaatcttggtgtttgaggg

SEQ ID NO: 147723 - DNA, 20 bp, Artificial Sequence
  Description of Artificial Sequence: Synthetic oligonucleotide
  Target: LAMA2; (+) strand; PAM type: NRG; PAM sequence: TGG
ttggtgtttgagggaggtcc

SEQ ID NO: 147724 - DNA, 20 bp, Artificial Sequence
  Description of Artificial Sequence: Synthetic oligonucleotide
  Target: LAMA2; (+) strand; PAM type: NRG; PAM sequence: TGG
aggtcctggaaccattccca

SEQ ID NO: 147725 - DNA, 20 bp, Artificial Sequence
  Description of Artificial Sequence: Synthetic oligonucleotide
  Target: LAMA2; (+) strand; PAM type: NRG; PAM sequence: GAG
gaaccattcccatggatatt

SEQ ID NO: 147726 - DNA, 20 bp, Artificial Sequence
  Description of Artificial Sequence: Synthetic oligonucleotide
  Target: LAMA2; (+) strand; PAM type: NRG; PAM sequence: AGG
aaccattcccatggatattg

SEQ ID NO: 147727 - DNA, 20 bp, Artificial Sequence
  Description of Artificial Sequence: Synthetic oligonucleotide
  Target: LAMA2; (+) strand; PAM type: NRG; PAM sequence: GGG
accattcccatggatattga

SEQ ID NO: 147728 - DNA, 20 bp, Artificial Sequence
  Description of Artificial Sequence: Synthetic oligonucleotide
  Target: LAMA2; (+) strand; PAM type: NRG; PAM sequence: TGG
ttcccatggatattgaggga

SEQ ID NO: 147729 - DNA, 20 bp, Artificial Sequence
  Description of Artificial Sequence: Synthetic oligonucleotide
  Target: LAMA2; (+) strand; PAM type: NRG; PAM sequence: TAG
ggatggctgtattttctttt

SEQ ID NO: 147730 - DNA, 20 bp, Artificial Sequence
  Description of Artificial Sequence: Synthetic oligonucleotide
  Target: LAMA2; (+) strand; PAM type: NRG; PAM sequence: GAG
ctgtattttctttttagttt

SEQ ID NO: 147731 - DNA, 20 bp, Artificial Sequence
  Description of Artificial Sequence: Synthetic oligonucleotide
  Target: LAMA2; (+) strand; PAM type: NRG; PAM sequence: TAG
agattctgcatatatgctat

SEQ ID NO: 147732 - DNA, 20 bp, Artificial Sequence
  Description of Artificial Sequence: Synthetic oligonucleotide
  Target: LAMA2; (+) strand; PAM type: NRG; PAM sequence: TGG
gcactcacttcatttgcttt

SEQ ID NO: 147733 - DNA, 20 bp, Artificial Sequence
  Description of Artificial Sequence: Synthetic oligonucleotide
  Target: LAMA2; (+) strand; PAM type: NRG; PAM sequence: AAG
tttgtgtctgcctgtttata

SEQ ID NO: 147734 - DNA, 20 bp, Artificial Sequence
  Description of Artificial Sequence: Synthetic oligonucleotide
  Target: LAMA2; (+) strand; PAM type: NRG; PAM sequence: TGG
gcctgtttataaagatatta

SEQ ID NO: 147735 - DNA, 20 bp, Artificial Sequence
  Description of Artificial Sequence: Synthetic oligonucleotide
  Target: LAMA2; (+) strand; PAM type: NRG; PAM sequence: TAG
tttataaagatattatggat

SEQ ID NO: 147736 - DNA, 20 bp, Artificial Sequence
  Description of Artificial Sequence: Synthetic oligonucleotide
  Target: LAMA2; (+) strand; PAM type: NRG; PAM sequence: AAG
gaaatctcccattattacaa

SEQ ID NO: 147737 - DNA, 20 bp, Artificial Sequence
  Description of Artificial Sequence: Synthetic oligonucleotide
  Target: LAMA2; (+) strand; PAM type: NRG; PAM sequence: TGG
cattattacaaaagcatatc

SEQ ID NO: 147738 - DNA, 20 bp, Artificial Sequence
  Description of Artificial Sequence: Synthetic oligonucleotide
  Target: LAMA2; (+) strand; PAM type: NRG; PAM sequence: GAG
ttattacaaaagcatatctg

SEQ ID NO: 147739 - DNA, 20 bp, Artificial Sequence
  Description of Artificial Sequence: Synthetic oligonucleotide
  Target: LAMA2; (+) strand; PAM type: NRG; PAM sequence: AGG
tattacaaaagcatatctgg

SEQ ID NO: 147740 - DNA, 20 bp, Artificial Sequence
  Description of Artificial Sequence: Synthetic oligonucleotide
  Target: LAMA2; (+) strand; PAM type: NRG; PAM sequence: GAG
aaaagcatatctggaggcat

SEQ ID NO: 147741 - DNA, 20 bp, Artificial Sequence
  Description of Artificial Sequence: Synthetic oligonucleotide
  Target: LAMA2; (+) strand; PAM type: NRG; PAM sequence: TGG
ctggaggcatgagccaccat

SEQ ID NO: 147742 - DNA, 20 bp, Artificial Sequence
  Description of Artificial Sequence: Synthetic oligonucleotide
  Target: LAMA2; (+) strand; PAM type: NRG; PAM sequence: TGG
ggatcatcactcaccatgca

SEQ ID NO: 147743 - DNA, 20 bp, Artificial Sequence
  Description of Artificial Sequence: Synthetic oligonucleotide
  Target: LAMA2; (+) strand; PAM type: NRG; PAM sequence: TAG
tcatcactcaccatgcatgg

SEQ ID NO: 147744 - DNA, 20 bp, Artificial Sequence
  Description of Artificial Sequence: Synthetic oligonucleotide
  Target: LAMA2; (+) strand; PAM type: NRG; PAM sequence: AGG
catcactcaccatgcatggt

SEQ ID NO: 147745 - DNA, 20 bp, Artificial Sequence
  Description of Artificial Sequence: Synthetic oligonucleotide
  Target: LAMA2; (+) strand; PAM type: NRG; PAM sequence: GGG
atcactcaccatgcatggta

SEQ ID NO: 147746 - DNA, 20 bp, Artificial Sequence
  Description of Artificial Sequence: Synthetic oligonucleotide
  Target: LAMA2; (+) strand; PAM type: NRG; PAM sequence: GGG
tcactcaccatgcatggtag

SEQ ID NO: 147747 - DNA, 20 bp, Artificial Sequence
  Description of Artificial Sequence: Synthetic oligonucleotide
  Target: LAMA2; (+) strand; PAM type: NRG; PAM sequence: TGG
catgcatggtaggggaccat

SEQ ID NO: 147748 - DNA, 20 bp, Artificial Sequence
  Description of Artificial Sequence: Synthetic oligonucleotide
  Target: LAMA2; (+) strand; PAM type: NRG; PAM sequence: AAG
gcatggtaggggaccattgg

SEQ ID NO: 147749 - DNA, 20 bp, Artificial Sequence
  Description of Artificial Sequence: Synthetic oligonucleotide
  Target: LAMA2; (+) strand; PAM type: NRG; PAM sequence: CAG
gtaggggaccattggaagcc

SEQ ID NO: 147750 - DNA, 20 bp, Artificial Sequence
  Description of Artificial Sequence: Synthetic oligonucleotide
  Target: LAMA2; (+) strand; PAM type: NRG; PAM sequence: CAG
ttgtttccttcaactacttc

SEQ ID NO: 147751 - DNA, 20 bp, Artificial Sequence
  Description of Artificial Sequence: Synthetic oligonucleotide
  Target: LAMA2; (+) strand; PAM type: NRG; PAM sequence: TGG
aactacttccagccatgttc

SEQ ID NO: 147752 - DNA, 20 bp, Artificial Sequence
  Description of Artificial Sequence: Synthetic oligonucleotide
  Target: LAMA2; (+) strand; PAM type: NRG; PAM sequence: TAG
ccatgttctggctaatccct

SEQ ID NO: 147753 - DNA, 20 bp, Artificial Sequence
  Description of Artificial Sequence: Synthetic oligonucleotide
  Target: LAMA2; (+) strand; PAM type: NRG; PAM sequence: CAG
gctaatcccttagttctcca

SEQ ID NO: 147754 - DNA, 20 bp, Artificial Sequence
  Description of Artificial Sequence: Synthetic oligonucleotide
  Target: LAMA2; (+) strand; PAM type: NRG; PAM sequence: TAG
agttctccacagcttctcca

SEQ ID NO: 147755 - DNA, 20 bp, Artificial Sequence
  Description of Artificial Sequence: Synthetic oligonucleotide
  Target: LAMA2; (+) strand; PAM type: NRG; PAM sequence: GAG
ttctccacagcttctccata

SEQ ID NO: 147756 - DNA, 20 bp, Artificial Sequence
  Description of Artificial Sequence: Synthetic oligonucleotide
  Target: LAMA2; (+) strand; PAM type: NRG; PAM sequence: CAG
cacagcttctccatagagaa

SEQ ID NO: 147757 - DNA, 20 bp, Artificial Sequence
  Description of Artificial Sequence: Synthetic oligonucleotide
  Target: LAMA2; (+) strand; PAM type: NRG; PAM sequence: TAG
gaacagacatttgttcttaa

SEQ ID NO: 147758 - DNA, 20 bp, Artificial Sequence
  Description of Artificial Sequence: Synthetic oligonucleotide
  Target: LAMA2; (+) strand; PAM type: NRG; PAM sequence: CAG
actttaaatgtaatgccacc

SEQ ID NO: 147759 - DNA, 20 bp, Artificial Sequence
  Description of Artificial Sequence: Synthetic oligonucleotide
  Target: LAMA2; (+) strand; PAM type: NRG; PAM sequence: AGG
ctttaaatgtaatgccaccc

SEQ ID NO: 147760 - DNA, 20 bp, Artificial Sequence
  Description of Artificial Sequence: Synthetic oligonucleotide
  Target: LAMA2; (+) strand; PAM type: NRG; PAM sequence: GGG
tttaaatgtaatgccaccca

SEQ ID NO: 147761 - DNA, 20 bp, Artificial Sequence
  Description of Artificial Sequence: Synthetic oligonucleotide
  Target: LAMA2; (+) strand; PAM type: NRG; PAM sequence: GAG
acccagggatgtttgctctc

SEQ ID NO: 147762 - DNA, 20 bp, Artificial Sequence
  Description of Artificial Sequence: Synthetic oligonucleotide
  Target: LAMA2; (+) strand; PAM type: NRG; PAM sequence: TAG
ttaaatttctcttctgtttg

SEQ ID NO: 147763 - DNA, 20 bp, Artificial Sequence
  Description of Artificial Sequence: Synthetic oligonucleotide
  Target: LAMA2; (+) strand; PAM type: NRG; PAM sequence: CAG
ctcttctgtttgtagaatat

SEQ ID NO: 147764 - DNA, 20 bp, Artificial Sequence
  Description of Artificial Sequence: Synthetic oligonucleotide
  Target: LAMA2; (+) strand; PAM type: NRG; PAM sequence: AAG
tgtagaatatcagtaatcat

SEQ ID NO: 147765 - DNA, 20 bp, Artificial Sequence
  Description of Artificial Sequence: Synthetic oligonucleotide
  Target: LAMA2; (+) strand; PAM type: NRG; PAM sequence: TGG
agaatatcagtaatcataag

SEQ ID NO: 147766 - DNA, 20 bp, Artificial Sequence
  Description of Artificial Sequence: Synthetic oligonucleotide
  Target: LAMA2; (+) strand; PAM type: NRG; PAM sequence: GGG
gaatatcagtaatcataagt

SEQ ID NO: 147767 - DNA, 20 bp, Artificial Sequence
  Description of Artificial Sequence: Synthetic oligonucleotide
  Target: LAMA2; (+) strand; PAM type: NRG; PAM sequence: GAG
atatcagtaatcataagtgg

SEQ ID NO: 147768 - DNA, 20 bp, Artificial Sequence
  Description of Artificial Sequence: Synthetic oligonucleotide
  Target: LAMA2; (+) strand; PAM type: NRG; PAM sequence: CAG
tcagtaatcataagtgggag

SEQ ID NO: 147769 - DNA, 20 bp, Artificial Sequence
  Description of Artificial Sequence: Synthetic oligonucleotide
  Target: LAMA2; (+) strand; PAM type: NRG; PAM sequence: AAG
ataagtgggagcagcacttg

SEQ ID NO: 147770 - DNA, 20 bp, Artificial Sequence
  Description of Artificial Sequence: Synthetic oligonucleotide
  Target: LAMA2; (+) strand; PAM type: NRG; PAM sequence: AGG
taagtgggagcagcacttga

SEQ ID NO: 147771 - DNA, 20 bp, Artificial Sequence
  Description of Artificial Sequence: Synthetic oligonucleotide
  Target: LAMA2; (+) strand; PAM type: NRG; PAM sequence: TAG
gtgggagcagcacttgaagg

SEQ ID NO: 147772 - DNA, 20 bp, Artificial Sequence
  Description of Artificial Sequence: Synthetic oligonucleotide
  Target: LAMA2; (+) strand; PAM type: NRG; PAM sequence: AGG
tgggagcagcacttgaaggt

SEQ ID NO: 147773 - DNA, 20 bp, Artificial Sequence
  Description of Artificial Sequence: Synthetic oligonucleotide
  Target: LAMA2; (+) strand; PAM type: NRG; PAM sequence: GGG
gggagcagcacttgaaggta

SEQ ID NO: 147774 - DNA, 20 bp, Artificial Sequence
  Description of Artificial Sequence: Synthetic oligonucleotide
  Target: LAMA2; (+) strand; PAM type: NRG; PAM sequence: GGG
ggagcagcacttgaaggtag

SEQ ID NO: 147775 - DNA, 20 bp, Artificial Sequence
  Description of Artificial Sequence: Synthetic oligonucleotide
  Target: LAMA2; (+) strand; PAM type: NRG; PAM sequence: CAG
gccactgacatgccttcaca

SEQ ID NO: 147776 - DNA, 20 bp, Artificial Sequence
  Description of Artificial Sequence: Synthetic oligonucleotide
  Target: LAMA2; (+) strand; PAM type: NRG; PAM sequence: AAG
agtgataattgtgtaatgtt

SEQ ID NO: 147777 - DNA, 20 bp, Artificial Sequence
  Description of Artificial Sequence: Synthetic oligonucleotide
  Target: LAMA2; (+) strand; PAM type: NRG; PAM sequence: TGG
gataattgtgtaatgttaag

SEQ ID NO: 147778 - DNA, 20 bp, Artificial Sequence
  Description of Artificial Sequence: Synthetic oligonucleotide
  Target: LAMA2; (+) strand; PAM type: NRG; PAM sequence: GAG
aatacaaaacaaaaacaatc

SEQ ID NO: 147779 - DNA, 20 bp, Artificial Sequence
  Description of Artificial Sequence: Synthetic oligonucleotide
  Target: LAMA2; (+) strand; PAM type: NRG; PAM sequence: TAG
aaaacaatcgagcaacttgt

SEQ ID NO: 147780 - DNA, 20 bp, Artificial Sequence
  Description of Artificial Sequence: Synthetic oligonucleotide
  Target: LAMA2; (+) strand; PAM type: NRG; PAM sequence: TAG
atcgagcaacttgttagcaa

SEQ ID NO: 147781 - DNA, 20 bp, Artificial Sequence
  Description of Artificial Sequence: Synthetic oligonucleotide
  Target: LAMA2; (+) strand; PAM type: NRG; PAM sequence: GAG
cgagcaacttgttagcaata

SEQ ID NO: 147782 - DNA, 20 bp, Artificial Sequence
  Description of Artificial Sequence: Synthetic oligonucleotide
  Target: LAMA2; (+) strand; PAM type: NRG; PAM sequence: AGG
gagcaacttgttagcaatag

SEQ ID NO: 147783 - DNA, 20 bp, Artificial Sequence
  Description of Artificial Sequence: Synthetic oligonucleotide
  Target: LAMA2; (+) strand; PAM type: NRG; PAM sequence: TAG
caacttgttagcaatagagg

SEQ ID NO: 147784 - DNA, 20 bp, Artificial Sequence
  Description of Artificial Sequence: Synthetic oligonucleotide
  Target: LAMA2; (+) strand; PAM type: NRG; PAM sequence: AAG
gttagcaatagaggtagact

SEQ ID NO: 147785 - DNA, 20 bp, Artificial Sequence
  Description of Artificial Sequence: Synthetic oligonucleotide
  Target: LAMA2; (+) strand; PAM type: NRG; PAM sequence: AAG
gcaatagaggtagactaagc

SEQ ID NO: 147786 - DNA, 20 bp, Artificial Sequence
  Description of Artificial Sequence: Synthetic oligonucleotide
  Target: LAMA2; (+) strand; PAM type: NRG; PAM sequence: AGG
caatagaggtagactaagca

SEQ ID NO: 147787 - DNA, 20 bp, Artificial Sequence
  Description of Artificial Sequence: Synthetic oligonucleotide
  Target: LAMA2; (+) strand; PAM type: NRG; PAM sequence: AAG
agaggtagactaagcaaggc

SEQ ID NO: 147788 - DNA, 20 bp, Artificial Sequence
  Description of Artificial Sequence: Synthetic oligonucleotide
  Target: LAMA2; (+) strand; PAM type: NRG; PAM sequence: TAG
tactgtacacatttttaaaa

SEQ ID NO: 147789 - DNA, 20 bp, Artificial Sequence
  Description of Artificial Sequence: Synthetic oligonucleotide
  Target: LAMA2; (+) strand; PAM type: NRG; PAM sequence: TGG
tgtacacatttttaaaatag

SEQ ID NO: 147790 - DNA, 20 bp, Artificial Sequence
  Description of Artificial Sequence: Synthetic oligonucleotide
  Target: LAMA2; (+) strand; PAM type: NRG; PAM sequence: TAG
acactttttttctttccctg

SEQ ID NO: 147791 - DNA, 20 bp, Artificial Sequence
  Description of Artificial Sequence: Synthetic oligonucleotide
  Target: LAMA2; (+) strand; PAM type: NRG; PAM sequence: AGG
cactttttttctttccctgt

SEQ ID NO: 147792 - DNA, 20 bp, Artificial Sequence
  Description of Artificial Sequence: Synthetic oligonucleotide
  Target: LAMA2; (+) strand; PAM type: NRG; PAM sequence: GGG
actttttttctttccctgta

SEQ ID NO: 147793 - DNA, 20 bp, Artificial Sequence
  Description of Artificial Sequence: Synthetic oligonucleotide
  Target: LAMA2; (+) strand; PAM type: NRG; PAM sequence: AAG
ttttttctttccctgtaggg

SEQ ID NO: 147794 - DNA, 20 bp, Artificial Sequence
  Description of Artificial Sequence: Synthetic oligonucleotide
  Target: LAMA2; (+) strand; PAM type: NRG; PAM sequence: GAG
ttttctttccctgtagggaa

SEQ ID NO: 147795 - DNA, 20 bp, Artificial Sequence
  Description of Artificial Sequence: Synthetic oligonucleotide
  Target: LAMA2; (+) strand; PAM type: NRG; PAM sequence: AGG
tttctttccctgtagggaag

SEQ ID NO: 147796 - DNA, 20 bp, Artificial Sequence
  Description of Artificial Sequence: Synthetic oligonucleotide
  Target: LAMA2; (+) strand; PAM type: NRG; PAM sequence: GGG
ttctttccctgtagggaaga

SEQ ID NO: 147797 - DNA, 20 bp, Artificial Sequence
  Description of Artificial Sequence: Synthetic oligonucleotide
  Target: LAMA2; (+) strand; PAM type: NRG; PAM sequence: GGG
tctttccctgtagggaagag

SEQ ID NO: 147798 - DNA, 20 bp, Artificial Sequence
  Description of Artificial Sequence: Synthetic oligonucleotide
  Target: LAMA2; (+) strand; PAM type: NRG; PAM sequence: GAG
tttccctgtagggaagaggg

SEQ ID NO: 147799 - DNA, 20 bp, Artificial Sequence
  Description of Artificial Sequence: Synthetic oligonucleotide
  Target: LAMA2; (+) strand; PAM type: NRG; PAM sequence: AGG
ttccctgtagggaagagggg

SEQ ID NO: 147800 - DNA, 20 bp, Artificial Sequence
  Description of Artificial Sequence: Synthetic oligonucleotide
  Target: LAMA2; (+) strand; PAM type: NRG; PAM sequence: CAG
aaacaaacattttaaaaacg

SEQ ID NO: 147801 - DNA, 20 bp, Artificial Sequence
  Description of Artificial Sequence: Synthetic oligonucleotide
  Target: LAMA2; (+) strand; PAM type: NRG; PAM sequence: AAG
ttttaaaaacgcagaaattc

SEQ ID NO: 147802 - DNA, 20 bp, Artificial Sequence
  Description of Artificial Sequence: Synthetic oligonucleotide
  Target: LAMA2; (+) strand; PAM type: NRG; PAM sequence: TGG
aaaaacgcagaaattcaaga

SEQ ID NO: 147803 - DNA, 20 bp, Artificial Sequence
  Description of Artificial Sequence: Synthetic oligonucleotide
  Target: LAMA2; (+) strand; PAM type: NRG; PAM sequence: GGG
aaaacgcagaaattcaagat

SEQ ID NO: 147804 - DNA, 20 bp, Artificial Sequence
  Description of Artificial Sequence: Synthetic oligonucleotide
  Target: LAMA2; (+) strand; PAM type: NRG; PAM sequence: GGG
aaacgcagaaattcaagatg

SEQ ID NO: 147805 - DNA, 20 bp, Artificial Sequence
  Description of Artificial Sequence: Synthetic oligonucleotide
  Target: LAMA2; (+) strand; PAM type: NRG; PAM sequence: TAG
gaaattcaagatggggatct

SEQ ID NO: 147806 - DNA, 20 bp, Artificial Sequence
  Description of Artificial Sequence: Synthetic oligonucleotide
  Target: LAMA2; (+) strand; PAM type: NRG; PAM sequence: AAG
agatggggatcttagccata

SEQ ID NO: 147807 - DNA, 20 bp, Artificial Sequence
  Description of Artificial Sequence: Synthetic oligonucleotide
  Target: LAMA2; (+) strand; PAM type: NRG; PAM sequence: CAG
atacataaaaatcacacttt

SEQ ID NO: 147808 - DNA, 20 bp, Artificial Sequence
  Description of Artificial Sequence: Synthetic oligonucleotide
  Target: LAMA2; (+) strand; PAM type: NRG; PAM sequence: GAG
aaaatcacactttcagcaat

SEQ ID NO: 147809 - DNA, 20 bp, Artificial Sequence
  Description of Artificial Sequence: Synthetic oligonucleotide
  Target: LAMA2; (+) strand; PAM type: NRG; PAM sequence: AAG
agcaatgagtacattcctga

SEQ ID NO: 147810 - DNA, 20 bp, Artificial Sequence
  Description of Artificial Sequence: Synthetic oligonucleotide
  Target: LAMA2; (+) strand; PAM type: NRG; PAM sequence: AAG
gagtacattcctgaaagctt

SEQ ID NO: 147811 - DNA, 20 bp, Artificial Sequence
  Description of Artificial Sequence: Synthetic oligonucleotide
  Target: LAMA2; (+) strand; PAM type: NRG; PAM sequence: AAG
aagtaaaaattttcttttcc

SEQ ID NO: 147812 - DNA, 20 bp, Artificial Sequence
  Description of Artificial Sequence: Synthetic oligonucleotide
  Target: LAMA2; (+) strand; PAM type: NRG; PAM sequence: TAG
attccaatcaccttaatatt

SEQ ID NO: 147813 - DNA, 20 bp, Artificial Sequence
  Description of Artificial Sequence: Synthetic oligonucleotide
  Target: LAMA2; (+) strand; PAM type: NRG; PAM sequence: GAG
aatcacattctaattcattt

SEQ ID NO: 147814 - DNA, 20 bp, Artificial Sequence
  Description of Artificial Sequence: Synthetic oligonucleotide
  Target: LAMA2; (+) strand; PAM type: NRG; PAM sequence: TGG
taattcatttgagtttaatt

SEQ ID NO: 147815 - DNA, 20 bp, Artificial Sequence
  Description of Artificial Sequence: Synthetic oligonucleotide
  Target: LAMA2; (+) strand; PAM type: NRG; PAM sequence: TAG
aatttggattttcatcaatc

SEQ ID NO: 147816 - DNA, 20 bp, Artificial Sequence
  Description of Artificial Sequence: Synthetic oligonucleotide
  Target: LAMA2; (+) strand; PAM type: NRG; PAM sequence: AAG
ttcatcaatctagcttacat

SEQ ID NO: 147817 - DNA, 20 bp, Artificial Sequence
  Description of Artificial Sequence: Synthetic oligonucleotide
  Target: LAMA2; (+) strand; PAM type: NRG; PAM sequence: AGG
tcatcaatctagcttacata

SEQ ID NO: 147818 - DNA, 20 bp, Artificial Sequence
  Description of Artificial Sequence: Synthetic oligonucleotide
  Target: LAMA2; (+) strand; PAM type: NRG; PAM sequence: AAG
caatctagcttacataaggc

SEQ ID NO: 147819 - DNA, 20 bp, Artificial Sequence
  Description of Artificial Sequence: Synthetic oligonucleotide
  Target: LAMA2; (+) strand; PAM type: NRG; PAM sequence: AAG
ggcaagataatatctctaaa

SEQ ID NO: 147820 - DNA, 20 bp, Artificial Sequence
  Description of Artificial Sequence: Synthetic oligonucleotide
  Target: LAMA2; (+) strand; PAM type: NRG; PAM sequence: TAG
gataatatctctaaaaagca

SEQ ID NO: 147821 - DNA, 20 bp, Artificial Sequence
  Description of Artificial Sequence: Synthetic oligonucleotide
  Target: LAMA2; (+) strand; PAM type: NRG; PAM sequence: CAG
aaaagcatagaatattcatt

SEQ ID NO: 147822 - DNA, 20 bp, Artificial Sequence
  Description of Artificial Sequence: Synthetic oligonucleotide
  Target: LAMA2; (+) strand; PAM type: NRG; PAM sequence: GAG
agaatattcattcagttgct

SEQ ID NO: 147823 - DNA, 20 bp, Artificial Sequence
  Description of Artificial Sequence: Synthetic oligonucleotide
  Target: LAMA2; (+) strand; PAM type: NRG; PAM sequence: CAG
gctgagcctttactaaacaa

SEQ ID NO: 147824 - DNA, 20 bp, Artificial Sequence
  Description of Artificial Sequence: Synthetic oligonucleotide
  Target: LAMA2; (+) strand; PAM type: NRG; PAM sequence: TGG
cagtttcatatgatatatct

SEQ ID NO: 147825 - DNA, 20 bp, Artificial Sequence
  Description of Artificial Sequence: Synthetic oligonucleotide
  Target: LAMA2; (+) strand; PAM type: NRG; PAM sequence: TAG
atcttggacattctgtgaaa

SEQ ID NO: 147826 - DNA, 20 bp, Artificial Sequence
  Description of Artificial Sequence: Synthetic oligonucleotide
  Target: LAMA2; (+) strand; PAM type: NRG; PAM sequence: AAG
tggacattctgtgaaatagt

SEQ ID NO: 147827 - DNA, 20 bp, Artificial Sequence
  Description of Artificial Sequence: Synthetic oligonucleotide
  Target: LAMA2; (+) strand; PAM type: NRG; PAM sequence: TAG
aaatagtaagttgctgatga

SEQ ID NO: 147828 - DNA, 20 bp, Artificial Sequence
  Description of Artificial Sequence: Synthetic oligonucleotide
  Target: LAMA2; (+) strand; PAM type: NRG; PAM sequence: GAG
atagtaagttgctgatgata

SEQ ID NO: 147829 - DNA, 20 bp, Artificial Sequence
  Description of Artificial Sequence: Synthetic oligonucleotide
  Target: LAMA2; (+) strand; PAM type: NRG; PAM sequence: TGG
ctgatgatagagaaaaaaca

SEQ ID NO: 147830 - DNA, 20 bp, Artificial Sequence
  Description of Artificial Sequence: Synthetic oligonucleotide
  Target: LAMA2; (+) strand; PAM type: NRG; PAM sequence: CAG
aaaaaacatggctttgtgat

SEQ ID NO: 147831 - DNA, 20 bp, Artificial Sequence
  Description of Artificial Sequence: Synthetic oligonucleotide
  Target: LAMA2; (+) strand; PAM type: NRG; PAM sequence: TAG
atggctttgtgatcagttac

SEQ ID NO: 147832 - DNA, 20 bp, Artificial Sequence
  Description of Artificial Sequence: Synthetic oligonucleotide
  Target: LAMA2; (+) strand; PAM type: NRG; PAM sequence: AAG
agttactagccatattcttg

SEQ ID NO: 147833 - DNA, 20 bp, Artificial Sequence
  Description of Artificial Sequence: Synthetic oligonucleotide
  Target: LAMA2; (+) strand; PAM type: NRG; PAM sequence: AGG
gttactagccatattcttga

SEQ ID NO: 147834 - DNA, 20 bp, Artificial Sequence
  Description of Artificial Sequence: Synthetic oligonucleotide
  Target: LAMA2; (+) strand; PAM type: NRG; PAM sequence: CAG
agccatattcttgaaggtta

SEQ ID NO: 147835 - DNA, 20 bp, Artificial Sequence
  Description of Artificial Sequence: Synthetic oligonucleotide
  Target: LAMA2; (+) strand; PAM type: NRG; PAM sequence: CAG
atattcttgaaggttacaga

SEQ ID NO: 147836 - DNA, 20 bp, Artificial Sequence
  Description of Artificial Sequence: Synthetic oligonucleotide
  Target: LAMA2; (+) strand; PAM type: NRG; PAM sequence: GAG
attcttgaaggttacagaca

SEQ ID NO: 147837 - DNA, 20 bp, Artificial Sequence
  Description of Artificial Sequence: Synthetic oligonucleotide
  Target: LAMA2; (+) strand; PAM type: NRG; PAM sequence: CGG
cttgaaggttacagacagag

SEQ ID NO: 147838 - DNA, 20 bp, Artificial Sequence
  Description of Artificial Sequence: Synthetic oligonucleotide
  Target: LAMA2; (+) strand; PAM type: NRG; PAM sequence: GGG
ttgaaggttacagacagagc

SEQ ID NO: 147839 - DNA, 20 bp, Artificial Sequence
  Description of Artificial Sequence: Synthetic oligonucleotide
  Target: LAMA2; (+) strand; PAM type: NRG; PAM sequence: GGG
tgaaggttacagacagagcg

SEQ ID NO: 147840 - DNA, 20 bp, Artificial Sequence
  Description of Artificial Sequence: Synthetic oligonucleotide
  Target: LAMA2; (+) strand; PAM type: NRG; PAM sequence: TAG
aggttacagacagagcgggg

SEQ ID NO: 147841 - DNA, 20 bp, Artificial Sequence
  Description of Artificial Sequence: Synthetic oligonucleotide
  Target: LAMA2; (+) strand; PAM type: NRG; PAM sequence: AGG
ggttacagacagagcggggt

SEQ ID NO: 147842 - DNA, 20 bp, Artificial Sequence
  Description of Artificial Sequence: Synthetic oligonucleotide
  Target: LAMA2; (+) strand; PAM type: NRG; PAM sequence: CAG
agacagagcggggtaggctg

SEQ ID NO: 147843 - DNA, 20 bp, Artificial Sequence
  Description of Artificial Sequence: Synthetic oligonucleotide
  Target: LAMA2; (+) strand; PAM type: NRG; PAM sequence: CAG
gcggggtaggctgcagccta

SEQ ID NO: 147844 - DNA, 20 bp, Artificial Sequence
  Description of Artificial Sequence: Synthetic oligonucleotide
  Target: LAMA2; (+) strand; PAM type: NRG; PAM sequence: CAG
ggtaggctgcagcctacaga

SEQ ID NO: 147845 - DNA, 20 bp, Artificial Sequence
  Description of Artificial Sequence: Synthetic oligonucleotide
  Target: LAMA2; (+) strand; PAM type: NRG; PAM sequence: AAG
ggctgcagcctacagacaga

SEQ ID NO: 147846 - DNA, 20 bp, Artificial Sequence
  Description of Artificial Sequence: Synthetic oligonucleotide
  Target: LAMA2; (+) strand; PAM type: NRG; PAM sequence: TGG
tgcagcctacagacagaaag

SEQ ID NO: 147847 - DNA, 20 bp, Artificial Sequence
  Description of Artificial Sequence: Synthetic oligonucleotide
  Target: LAMA2; (+) strand; PAM type: NRG; PAM sequence: GGG
gcagcctacagacagaaagt

SEQ ID NO: 147848 - DNA, 20 bp, Artificial Sequence
  Description of Artificial Sequence: Synthetic oligonucleotide
  Target: LAMA2; (+) strand; PAM type: NRG; PAM sequence: GGG
cagcctacagacagaaagtg

SEQ ID NO: 147849 - DNA, 20 bp, Artificial Sequence
  Description of Artificial Sequence: Synthetic oligonucleotide
  Target: LAMA2; (+) strand; PAM type: NRG; PAM sequence: TAG
acagacagaaagtggggctg

SEQ ID NO: 147850 - DNA, 20 bp, Artificial Sequence
  Description of Artificial Sequence: Synthetic oligonucleotide
  Target: LAMA2; (+) strand; PAM type: NRG; PAM sequence: AGG
cagacagaaagtggggctgt

SEQ ID NO: 147851 - DNA, 20 bp, Artificial Sequence
  Description of Artificial Sequence: Synthetic oligonucleotide
  Target: LAMA2; (+) strand; PAM type: NRG; PAM sequence: TAG
agaaagtggggctgtaggtg

SEQ ID NO: 147852 - DNA, 20 bp, Artificial Sequence
  Description of Artificial Sequence: Synthetic oligonucleotide
  Target: LAMA2; (+) strand; PAM type: NRG; PAM sequence: AGG
gaaagtggggctgtaggtgt

SEQ ID NO: 147853 - DNA, 20 bp, Artificial Sequence
  Description of Artificial Sequence: Synthetic oligonucleotide
  Target: LAMA2; (+) strand; PAM type: NRG; PAM sequence: GGG
aaagtggggctgtaggtgta

SEQ ID NO: 147854 - DNA, 20 bp, Artificial Sequence
  Description of Artificial Sequence: Synthetic oligonucleotide
  Target: LAMA2; (+) strand; PAM type: NRG; PAM sequence: TGG
gggctgtaggtgtagggtcc

SEQ ID NO: 147855 - DNA, 20 bp, Artificial Sequence
  Description of Artificial Sequence: Synthetic oligonucleotide
  Target: LAMA2; (+) strand; PAM type: NRG; PAM sequence: CAG
ggtgtagggtcctggctgca

SEQ ID NO: 147856 - DNA, 20 bp, Artificial Sequence
  Description of Artificial Sequence: Synthetic oligonucleotide
  Target: LAMA2; (+) strand; PAM type: NRG; PAM sequence: GAG
tgtagggtcctggctgcaca

SEQ ID NO: 147857 - DNA, 20 bp, Artificial Sequence
  Description of Artificial Sequence: Synthetic oligonucleotide
  Target: LAMA2; (+) strand; PAM type: NRG; PAM sequence: TGG
tggctgcacagagtgtgtga

SEQ ID NO: 147858 - DNA, 20 bp, Artificial Sequence
  Description of Artificial Sequence: Synthetic oligonucleotide
  Target: LAMA2; (+) strand; PAM type: NRG; PAM sequence: TGG
tgtgtgatggaccgtttatt

SEQ ID NO: 147859 - DNA, 20 bp, Artificial Sequence
  Description of Artificial Sequence: Synthetic oligonucleotide
  Target: LAMA2; (+) strand; PAM type: NRG; PAM sequence: CAG
atggaccgtttatttggcat

SEQ ID NO: 147860 - DNA, 20 bp, Artificial Sequence
  Description of Artificial Sequence: Synthetic oligonucleotide
  Target: LAMA2; (+) strand; PAM type: NRG; PAM sequence: AGG
tggaccgtttatttggcatc

SEQ ID NO: 147861 - DNA, 20 bp, Artificial Sequence
  Description of Artificial Sequence: Synthetic oligonucleotide
  Target: LAMA2; (+) strand; PAM type: NRG; PAM sequence: GGG
ggaccgtttatttggcatca

SEQ ID NO: 147862 - DNA, 20 bp, Artificial Sequence
  Description of Artificial Sequence: Synthetic oligonucleotide
  Target: LAMA2; (+) strand; PAM type: NRG; PAM sequence: TAG
tggcatcagggttttacata

SEQ ID NO: 147863 - DNA, 20 bp, Artificial Sequence
  Description of Artificial Sequence: Synthetic oligonucleotide
  Target: LAMA2; (+) strand; PAM type: NRG; PAM sequence: TAG
catcagggttttacatatag

SEQ ID NO: 147864 - DNA, 20 bp, Artificial Sequence
  Description of Artificial Sequence: Synthetic oligonucleotide
  Target: LAMA2; (+) strand; PAM type: NRG; PAM sequence: TAG
gttttacatatagtagctca

SEQ ID NO: 147865 - DNA, 20 bp, Artificial Sequence
  Description of Artificial Sequence: Synthetic oligonucleotide
  Target: LAMA2; (+) strand; PAM type: NRG; PAM sequence: TAG
ttgacaacacgaattctaaa

SEQ ID NO: 147866 - DNA, 20 bp, Artificial Sequence
  Description of Artificial Sequence: Synthetic oligonucleotide
  Target: LAMA2; (+) strand; PAM type: NRG; PAM sequence: GAG
acacgaattctaaatagtgt

SEQ ID NO: 147867 - DNA, 20 bp, Artificial Sequence
  Description of Artificial Sequence: Synthetic oligonucleotide
  Target: LAMA2; (+) strand; PAM type: NRG; PAM sequence: AAG
attctaaatagtgtgagaat

SEQ ID NO: 147868 - DNA, 20 bp, Artificial Sequence
  Description of Artificial Sequence: Synthetic oligonucleotide
  Target: LAMA2; (+) strand; PAM type: NRG; PAM sequence: TGG
atgttttcctctgcttatac

SEQ ID NO: 147869 - DNA, 20 bp, Artificial Sequence
  Description of Artificial Sequence: Synthetic oligonucleotide
  Target: LAMA2; (+) strand; PAM type: NRG; PAM sequence: CAG
ttttcctctgcttatactgg

SEQ ID NO: 147870 - DNA, 20 bp, Artificial Sequence
  Description of Artificial Sequence: Synthetic oligonucleotide
  Target: LAMA2; (+) strand; PAM type: NRG; PAM sequence: CAG
tcctctgcttatactggcag

SEQ ID NO: 147871 - DNA, 20 bp, Artificial Sequence
  Description of Artificial Sequence: Synthetic oligonucleotide
  Target: LAMA2; (+) strand; PAM type: NRG; PAM sequence: AAG
tctgcttatactggcagcag

SEQ ID NO: 147872 - DNA, 20 bp, Artificial Sequence
  Description of Artificial Sequence: Synthetic oligonucleotide
  Target: LAMA2; (+) strand; PAM type: NRG; PAM sequence: AAG
tgaaatacactattacaaca

SEQ ID NO: 147873 - DNA, 20 bp, Artificial Sequence
  Description of Artificial Sequence: Synthetic oligonucleotide
  Target: LAMA2; (+) strand; PAM type: NRG; PAM sequence: AAG
actattacaacaaagctttt

SEQ ID NO: 147874 - DNA, 20 bp, Artificial Sequence
  Description of Artificial Sequence: Synthetic oligonucleotide
  Target: LAMA2; (+) strand; PAM type: NRG; PAM sequence: TAG
acaaagcttttaagaattca

SEQ ID NO: 147875 - DNA, 20 bp, Artificial Sequence
  Description of Artificial Sequence: Synthetic oligonucleotide
  Target: LAMA2; (+) strand; PAM type: NRG; PAM sequence: CAG
agcttttaagaattcatagc

SEQ ID NO: 147876 - DNA, 20 bp, Artificial Sequence
  Description of Artificial Sequence: Synthetic oligonucleotide
  Target: LAMA2; (+) strand; PAM type: NRG; PAM sequence: AGG
gcttttaagaattcatagcc

SEQ ID NO: 147877 - DNA, 20 bp, Artificial Sequence
  Description of Artificial Sequence: Synthetic oligonucleotide
  Target: LAMA2; (+) strand; PAM type: NRG; PAM sequence: CAG
taagaattcatagccaggtc

SEQ ID NO: 147878 - DNA, 20 bp, Artificial Sequence
  Description of Artificial Sequence: Synthetic oligonucleotide
  Target: LAMA2; (+) strand; PAM type: NRG; PAM sequence: TGG
gaattcatagccaggtccag

SEQ ID NO: 147879 - DNA, 20 bp, Artificial Sequence
  Description of Artificial Sequence: Synthetic oligonucleotide
  Target: LAMA2; (+) strand; PAM type: NRG; PAM sequence: CAG
gtggcatgctcctataatcc

SEQ ID NO: 147880 - DNA, 20 bp, Artificial Sequence
  Description of Artificial Sequence: Synthetic oligonucleotide
  Target: LAMA2; (+) strand; PAM type: NRG; PAM sequence: TGG
gctcctataatcccagctac

SEQ ID NO: 147881 - DNA, 20 bp, Artificial Sequence
  Description of Artificial Sequence: Synthetic oligonucleotide
  Target: LAMA2; (+) strand; PAM type: NRG; PAM sequence: AAG
ctataatcccagctactgga

SEQ ID NO: 147882 - DNA, 20 bp, Artificial Sequence
  Description of Artificial Sequence: Synthetic oligonucleotide
  Target: LAMA2; (+) strand; PAM type: NRG; PAM sequence: AAG
taatcccagctactggaaag

SEQ ID NO: 147883 - DNA, 20 bp, Artificial Sequence
  Description of Artificial Sequence: Synthetic oligonucleotide
  Target: LAMA2; (+) strand; PAM type: NRG; PAM sequence: TGG
cagctactggaaagaagcta

SEQ ID NO: 147884 - DNA, 20 bp, Artificial Sequence
  Description of Artificial Sequence: Synthetic oligonucleotide
  Target: LAMA2; (+) strand; PAM type: NRG; PAM sequence: TGG
ctactggaaagaagctatgg

SEQ ID NO: 147885 - DNA, 20 bp, Artificial Sequence
  Description of Artificial Sequence: Synthetic oligonucleotide
  Target: LAMA2; (+) strand; PAM type: NRG; PAM sequence: GGG
tactggaaagaagctatggt

SEQ ID NO: 147886 - DNA, 20 bp, Artificial Sequence
  Description of Artificial Sequence: Synthetic oligonucleotide
  Target: LAMA2; (+) strand; PAM type: NRG; PAM sequence: GAG
ctggaaagaagctatggtgg

SEQ ID NO: 147887 - DNA, 20 bp, Artificial Sequence
  Description of Artificial Sequence: Synthetic oligonucleotide
  Target: LAMA2; (+) strand; PAM type: NRG; PAM sequence: AGG
tggaaagaagctatggtggg

SEQ ID NO: 147888 - DNA, 20 bp, Artificial Sequence
  Description of Artificial Sequence: Synthetic oligonucleotide
  Target: LAMA2; (+) strand; PAM type: NRG; PAM sequence: GAG
ctatggtgggaggatctctt

SEQ ID NO: 147889 - DNA, 20 bp, Artificial Sequence
  Description of Artificial Sequence: Synthetic oligonucleotide
  Target: LAMA2; (+) strand; PAM type: NRG; PAM sequence: CAG
gtgggaggatctcttgagcc

SEQ ID NO: 147890 - DNA, 20 bp, Artificial Sequence
  Description of Artificial Sequence: Synthetic oligonucleotide
  Target: LAMA2; (+) strand; PAM type: NRG; PAM sequence: AGG
tgggaggatctcttgagccc

SEQ ID NO: 147891 - DNA, 20 bp, Artificial Sequence
  Description of Artificial Sequence: Synthetic oligonucleotide
  Target: LAMA2; (+) strand; PAM type: NRG; PAM sequence: GAG
ggaggatctcttgagcccag

SEQ ID NO: 147892 - DNA, 20 bp, Artificial Sequence
  Description of Artificial Sequence: Synthetic oligonucleotide
  Target: LAMA2; (+) strand; PAM type: NRG; PAM sequence: GAG
tctcttgagcccaggagttt

SEQ ID NO: 147893 - DNA, 20 bp, Artificial Sequence
  Description of Artificial Sequence: Synthetic oligonucleotide
  Target: LAMA2; (+) strand; PAM type: NRG; PAM sequence: AGG
ctcttgagcccaggagtttg

SEQ ID NO: 147894 - DNA, 20 bp, Artificial Sequence
  Description of Artificial Sequence: Synthetic oligonucleotide
  Target: LAMA2; (+) strand; PAM type: NRG; PAM sequence: CAG
tgagcccaggagtttgaggc

SEQ ID NO: 147895 - DNA, 20 bp, Artificial Sequence
  Description of Artificial Sequence: Synthetic oligonucleotide
  Target: LAMA2; (+) strand; PAM type: NRG; PAM sequence: TGG
ccaggagtttgaggccagcc

SEQ ID NO: 147896 - DNA, 20 bp, Artificial Sequence
  Description of Artificial Sequence: Synthetic oligonucleotide
  Target: LAMA2; (+) strand; PAM type: NRG; PAM sequence: GGG
caggagtttgaggccagcct

SEQ ID NO: 147897 - DNA, 20 bp, Artificial Sequence
  Description of Artificial Sequence: Synthetic oligonucleotide
  Target: LAMA2; (+) strand; PAM type: NRG; PAM sequence: TAG
tgaggccagcctgggccaca

SEQ ID NO: 147898 - DNA, 20 bp, Artificial Sequence
  Description of Artificial Sequence: Synthetic oligonucleotide
  Target: LAMA2; (+) strand; PAM type: NRG; PAM sequence: GAG
gccagcctgggccacatagt

SEQ ID NO: 147899 - DNA, 20 bp, Artificial Sequence
  Description of Artificial Sequence: Synthetic oligonucleotide
  Target: LAMA2; (+) strand; PAM type: NRG; PAM sequence: AAG
tccgttttcacactgctgta

SEQ ID NO: 147900 - DNA, 20 bp, Artificial Sequence
  Description of Artificial Sequence: Synthetic oligonucleotide
  Target: LAMA2; (+) strand; PAM type: NRG; PAM sequence: GAG
ctgctgtaaagatactaccc

SEQ ID NO: 147901 - DNA, 20 bp, Artificial Sequence
  Description of Artificial Sequence: Synthetic oligonucleotide
  Target: LAMA2; (+) strand; PAM type: NRG; PAM sequence: TGG
gtaaagatactacccgagac

SEQ ID NO: 147902 - DNA, 20 bp, Artificial Sequence
  Description of Artificial Sequence: Synthetic oligonucleotide
  Target: LAMA2; (+) strand; PAM type: NRG; PAM sequence: GGG
taaagatactacccgagact

SEQ ID NO: 147903 - DNA, 20 bp, Artificial Sequence
  Description of Artificial Sequence: Synthetic oligonucleotide
  Target: LAMA2; (+) strand; PAM type: NRG; PAM sequence: AAG
ccgagactgggtaatttata

SEQ ID NO: 147904 - DNA, 20 bp, Artificial Sequence
  Description of Artificial Sequence: Synthetic oligonucleotide
  Target: LAMA2; (+) strand; PAM type: NRG; PAM sequence: AGG
cgagactgggtaatttataa

SEQ ID NO: 147905 - DNA, 20 bp, Artificial Sequence
  Description of Artificial Sequence: Synthetic oligonucleotide
  Target: LAMA2; (+) strand; PAM type: NRG; PAM sequence: AAG
actgggtaatttataaagga

SEQ ID NO: 147906 - DNA, 20 bp, Artificial Sequence
  Description of Artificial Sequence: Synthetic oligonucleotide
  Target: LAMA2; (+) strand; PAM type: NRG; PAM sequence: GAG
tgggtaatttataaaggaaa

SEQ ID NO: 147907 - DNA, 20 bp, Artificial Sequence
  Description of Artificial Sequence: Synthetic oligonucleotide
  Target: LAMA2; (+) strand; PAM type: NRG; PAM sequence: AGG
gggtaatttataaaggaaag

SEQ ID NO: 147908 - DNA, 20 bp, Artificial Sequence
  Description of Artificial Sequence: Synthetic oligonucleotide
  Target: LAMA2; (+) strand; PAM type: NRG; PAM sequence: TAG
atttataaaggaaagaggtt

SEQ ID NO: 147909 - DNA, 20 bp, Artificial Sequence
  Description of Artificial Sequence: Synthetic oligonucleotide
  Target: LAMA2; (+) strand; PAM type: NRG; PAM sequence: TGG
agttgactcacccttctgca

SEQ ID NO: 147910 - DNA, 20 bp, Artificial Sequence
  Description of Artificial Sequence: Synthetic oligonucleotide
  Target: LAMA2; (+) strand; PAM type: NRG; PAM sequence: TAG
gactcacccttctgcatggc

SEQ ID NO: 147911 - DNA, 20 bp, Artificial Sequence
  Description of Artificial Sequence: Synthetic oligonucleotide
  Target: LAMA2; (+) strand; PAM type: NRG; PAM sequence: AGG
actcacccttctgcatggct

SEQ ID NO: 147912 - DNA, 20 bp, Artificial Sequence
  Description of Artificial Sequence: Synthetic oligonucleotide
  Target: LAMA2; (+) strand; PAM type: NRG; PAM sequence: GAG
tcacccttctgcatggctag

SEQ ID NO: 147913 - DNA, 20 bp, Artificial Sequence
  Description of Artificial Sequence: Synthetic oligonucleotide
  Target: LAMA2; (+) strand; PAM type: NRG; PAM sequence: AGG
cacccttctgcatggctagg

SEQ ID NO: 147914 - DNA, 20 bp, Artificial Sequence
  Description of Artificial Sequence: Synthetic oligonucleotide
  Target: LAMA2; (+) strand; PAM type: NRG; PAM sequence: CAG
tctgcatggctaggaggcct

SEQ ID NO: 147915 - DNA, 20 bp, Artificial Sequence
  Description of Artificial Sequence: Synthetic oligonucleotide
  Target: LAMA2; (+) strand; PAM type: NRG; PAM sequence: AGG
ctgcatggctaggaggcctc

SEQ ID NO: 147916 - DNA, 20 bp, Artificial Sequence
  Description of Artificial Sequence: Synthetic oligonucleotide
  Target: LAMA2; (+) strand; PAM type: NRG; PAM sequence: AAG
cctcaggaaacttatgatca

SEQ ID NO: 147917 - DNA, 20 bp, Artificial Sequence
  Description of Artificial Sequence: Synthetic oligonucleotide
  Target: LAMA2; (+) strand; PAM type: NRG; PAM sequence: AGG
ctcaggaaacttatgatcaa

SEQ ID NO: 147918 - DNA, 20 bp, Artificial Sequence
  Description of Artificial Sequence: Synthetic oligonucleotide
  Target: LAMA2; (+) strand; PAM type: NRG; PAM sequence: GGG
tcaggaaacttatgatcaaa

SEQ ID NO: 147919 - DNA, 20 bp, Artificial Sequence
  Description of Artificial Sequence: Synthetic oligonucleotide
  Target: LAMA2; (+) strand; PAM type: NRG; PAM sequence: GGG
caggaaacttatgatcaaag

SEQ ID NO: 147920 - DNA, 20 bp, Artificial Sequence
  Description of Artificial Sequence: Synthetic oligonucleotide
  Target: LAMA2; (+) strand; PAM type: NRG; PAM sequence: AAG
gaaacttatgatcaaagggg

SEQ ID NO: 147921 - DNA, 20 bp, Artificial Sequence
  Description of Artificial Sequence: Synthetic oligonucleotide
  Target: LAMA2; (+) strand; PAM type: NRG; PAM sequence: GAG
aacttatgatcaaaggggaa

SEQ ID NO: 147922 - DNA, 20 bp, Artificial Sequence
  Description of Artificial Sequence: Synthetic oligonucleotide
  Target: LAMA2; (+) strand; PAM type: NRG; PAM sequence: AGG
acttatgatcaaaggggaag

SEQ ID NO: 147923 - DNA, 20 bp, Artificial Sequence
  Description of Artificial Sequence: Synthetic oligonucleotide
  Target: LAMA2; (+) strand; PAM type: NRG; PAM sequence: GGG
cttatgatcaaaggggaaga

SEQ ID NO: 147924 - DNA, 20 bp, Artificial Sequence
  Description of Artificial Sequence: Synthetic oligonucleotide
  Target: LAMA2; (+) strand; PAM type: NRG; PAM sequence: GAG
tatgatcaaaggggaagagg

SEQ ID NO: 147925 - DNA, 20 bp, Artificial Sequence
  Description of Artificial Sequence: Synthetic oligonucleotide
  Target: LAMA2; (+) strand; PAM type: NRG; PAM sequence: CAG
gatcaaaggggaagagggag

SEQ ID NO: 147926 - DNA, 20 bp, Artificial Sequence
  Description of Artificial Sequence: Synthetic oligonucleotide
  Target: LAMA2; (+) strand; PAM type: NRG; PAM sequence: AGG
atcaaaggggaagagggagc

SEQ ID NO: 147927 - DNA, 20 bp, Artificial Sequence
  Description of Artificial Sequence: Synthetic oligonucleotide
  Target: LAMA2; (+) strand; PAM type: NRG; PAM sequence: TGG
gggagcaggcacatcttaca

SEQ ID NO: 147928 - DNA, 20 bp, Artificial Sequence
  Description of Artificial Sequence: Synthetic oligonucleotide
  Target: LAMA2; (+) strand; PAM type: NRG; PAM sequence: CAG
caggcacatcttacatggta

SEQ ID NO: 147929 - DNA, 20 bp, Artificial Sequence
  Description of Artificial Sequence: Synthetic oligonucleotide
  Target: LAMA2; (+) strand; PAM type: NRG; PAM sequence: AGG
aggcacatcttacatggtac

SEQ ID NO: 147930 - DNA, 20 bp, Artificial Sequence
  Description of Artificial Sequence: Synthetic oligonucleotide
  Target: LAMA2; (+) strand; PAM type: NRG; PAM sequence: GAG
gcacatcttacatggtacag

SEQ ID NO: 147931 - DNA, 20 bp, Artificial Sequence
  Description of Artificial Sequence: Synthetic oligonucleotide
  Target: LAMA2; (+) strand; PAM type: NRG; PAM sequence: GAG
acatcttacatggtacagga

SEQ ID NO: 147932 - DNA, 20 bp, Artificial Sequence
  Description of Artificial Sequence: Synthetic oligonucleotide
  Target: LAMA2; (+) strand; PAM type: NRG; PAM sequence: GAG
atcttacatggtacaggaga

SEQ ID NO: 147933 - DNA, 20 bp, Artificial Sequence
  Description of Artificial Sequence: Synthetic oligonucleotide
  Target: LAMA2; (+) strand; PAM type: NRG; PAM sequence: GAG
cttacatggtacaggagaga

SEQ ID NO: 147934 - DNA, 20 bp, Artificial Sequence
  Description of Artificial Sequence: Synthetic oligonucleotide
  Target: LAMA2; (+) strand; PAM type: NRG; PAM sequence: AGG
ttacatggtacaggagagag

SEQ ID NO: 147935 - DNA, 20 bp, Artificial Sequence
  Description of Artificial Sequence: Synthetic oligonucleotide
  Target: LAMA2; (+) strand; PAM type: NRG; PAM sequence: GAG
acatggtacaggagagagag

SEQ ID NO: 147936 - DNA, 20 bp, Artificial Sequence
  Description of Artificial Sequence: Synthetic oligonucleotide
  Target: LAMA2; (+) strand; PAM type: NRG; PAM sequence: AAG
ggtacaggagagagaggaga

SEQ ID NO: 147937 - DNA, 20 bp, Artificial Sequence
  Description of Artificial Sequence: Synthetic oligonucleotide
  Target: LAMA2; (+) strand; PAM type: NRG; PAM sequence: TGG
gagagagaggagaaagtgaa

SEQ ID NO: 147938 - DNA, 20 bp, Artificial Sequence
  Description of Artificial Sequence: Synthetic oligonucleotide
  Target: LAMA2; (+) strand; PAM type: NRG; PAM sequence: GGG
agagagaggagaaagtgaat

SEQ ID NO: 147939 - DNA, 20 bp, Artificial Sequence
  Description of Artificial Sequence: Synthetic oligonucleotide
  Target: LAMA2; (+) strand; PAM type: NRG; PAM sequence: GGG
gagagaggagaaagtgaatg

SEQ ID NO: 147940 - DNA, 20 bp, Artificial Sequence
  Description of Artificial Sequence: Synthetic oligonucleotide
  Target: LAMA2; (+) strand; PAM type: NRG; PAM sequence: AAG
agaggagaaagtgaatgggg

SEQ ID NO: 147941 - DNA, 20 bp, Artificial Sequence
  Description of Artificial Sequence: Synthetic oligonucleotide
  Target: LAMA2; (+) strand; PAM type: NRG; PAM sequence: GAG
aggagaaagtgaatggggaa

SEQ ID NO: 147942 - DNA, 20 bp, Artificial Sequence
  Description of Artificial Sequence: Synthetic oligonucleotide
  Target: LAMA2; (+) strand; PAM type: NRG; PAM sequence: CAG
agagccccttataaaaccat

SEQ ID NO: 147943 - DNA, 20 bp, Artificial Sequence
  Description of Artificial Sequence: Synthetic oligonucleotide
  Target: LAMA2; (+) strand; PAM type: NRG; PAM sequence: GAG
acgaactcactcactatcat

SEQ ID NO: 147944 - DNA, 20 bp, Artificial Sequence
  Description of Artificial Sequence: Synthetic oligonucleotide
  Target: LAMA2; (+) strand; PAM type: NRG; PAM sequence: AGG
cgaactcactcactatcatg

SEQ ID NO: 147945 - DNA, 20 bp, Artificial Sequence
  Description of Artificial Sequence: Synthetic oligonucleotide
  Target: LAMA2; (+) strand; PAM type: NRG; PAM sequence: CAG
ctcactcactatcatgagga

SEQ ID NO: 147946 - DNA, 20 bp, Artificial Sequence
  Description of Artificial Sequence: Synthetic oligonucleotide
  Target: LAMA2; (+) strand; PAM type: NRG; PAM sequence: TGG
tcactatcatgaggacagca

SEQ ID NO: 147947 - DNA, 20 bp, Artificial Sequence
  Description of Artificial Sequence: Synthetic oligonucleotide
  Target: LAMA2; (+) strand; PAM type: NRG; PAM sequence: GGG
cactatcatgaggacagcat

SEQ ID NO: 147948 - DNA, 20 bp, Artificial Sequence
  Description of Artificial Sequence: Synthetic oligonucleotide
  Target: LAMA2; (+) strand; PAM type: NRG; PAM sequence: GGG
actatcatgaggacagcatg

SEQ ID NO: 147949 - DNA, 20 bp, Artificial Sequence
  Description of Artificial Sequence: Synthetic oligonucleotide
  Target: LAMA2; (+) strand; PAM type: NRG; PAM sequence: GGG
ctatcatgaggacagcatgg

SEQ ID NO: 147950 - DNA, 20 bp, Artificial Sequence
  Description of Artificial Sequence: Synthetic oligonucleotide
  Target: LAMA2; (+) strand; PAM type: NRG; PAM sequence: GAG
atcatgaggacagcatgggg

SEQ ID NO: 147951 - DNA, 20 bp, Artificial Sequence
  Description of Artificial Sequence: Synthetic oligonucleotide
  Target: LAMA2; (+) strand; PAM type: NRG; PAM sequence: CAG
ggggagctgcccccttgatc

SEQ ID NO: 147952 - DNA, 20 bp, Artificial Sequence
  Description of Artificial Sequence: Synthetic oligonucleotide
  Target: LAMA2; (+) strand; PAM type: NRG; PAM sequence: TGG
ctcctccctccctccatacg

SEQ ID NO: 147953 - DNA, 20 bp, Artificial Sequence
  Description of Artificial Sequence: Synthetic oligonucleotide
  Target: LAMA2; (+) strand; PAM type: NRG; PAM sequence: GAG
cctccctccctccatacgtg

SEQ ID NO: 147954 - DNA, 20 bp, Artificial Sequence
  Description of Artificial Sequence: Synthetic oligonucleotide
  Target: LAMA2; (+) strand; PAM type: NRG; PAM sequence: GAG
tggagattacaatttcaaat

SEQ ID NO: 147955 - DNA, 20 bp, Artificial Sequence
  Description of Artificial Sequence: Synthetic oligonucleotide
  Target: LAMA2; (+) strand; PAM type: NRG; PAM sequence: TGG
ttacaatttcaaatgagatt

SEQ ID NO: 147956 - DNA, 20 bp, Artificial Sequence
  Description of Artificial Sequence: Synthetic oligonucleotide
  Target: LAMA2; (+) strand; PAM type: NRG; PAM sequence: GGG
tacaatttcaaatgagattt

SEQ ID NO: 147957 - DNA, 20 bp, Artificial Sequence
  Description of Artificial Sequence: Synthetic oligonucleotide
  Target: LAMA2; (+) strand; PAM type: NRG; PAM sequence: TGG
aatttcaaatgagatttggg

SEQ ID NO: 147958 - DNA, 20 bp, Artificial Sequence
  Description of Artificial Sequence: Synthetic oligonucleotide
  Target: LAMA2; (+) strand; PAM type: NRG; PAM sequence: GGG
atttcaaatgagatttgggt

SEQ ID NO: 147959 - DNA, 20 bp, Artificial Sequence
  Description of Artificial Sequence: Synthetic oligonucleotide
  Target: LAMA2; (+) strand; PAM type: NRG; PAM sequence: GGG
tttcaaatgagatttgggtg

SEQ ID NO: 147960 - DNA, 20 bp, Artificial Sequence
  Description of Artificial Sequence: Synthetic oligonucleotide
  Target: LAMA2; (+) strand; PAM type: NRG; PAM sequence: CAG
atgagatttgggtggggaca

SEQ ID NO: 147961 - DNA, 20 bp, Artificial Sequence
  Description of Artificial Sequence: Synthetic oligonucleotide
  Target: LAMA2; (+) strand; PAM type: NRG; PAM sequence: GAG
gagatttgggtggggacaca

SEQ ID NO: 147962 - DNA, 20 bp, Artificial Sequence
  Description of Artificial Sequence: Synthetic oligonucleotide
  Target: LAMA2; (+) strand; PAM type: NRG; PAM sequence: AAG
accatatcactgtctttctg

SEQ ID NO: 147963 - DNA, 20 bp, Artificial Sequence
  Description of Artificial Sequence: Synthetic oligonucleotide
  Target: LAMA2; (+) strand; PAM type: NRG; PAM sequence: AAG
ctgtctttctgaagaaaaaa

SEQ ID NO: 147964 - DNA, 20 bp, Artificial Sequence
  Description of Artificial Sequence: Synthetic oligonucleotide
  Target: LAMA2; (+) strand; PAM type: NRG; PAM sequence: AGG
tgtctttctgaagaaaaaaa

SEQ ID NO: 147965 - DNA, 20 bp, Artificial Sequence
  Description of Artificial Sequence: Synthetic oligonucleotide
  Target: LAMA2; (+) strand; PAM type: NRG; PAM sequence: AAG
aattcttgtatgttgcccta

SEQ ID NO: 147966 - DNA, 20 bp, Artificial Sequence
  Description of Artificial Sequence: Synthetic oligonucleotide
  Target: LAMA2; (+) strand; PAM type: NRG; PAM sequence: TAG
ataaaactgcttacaatgcc

SEQ ID NO: 147967 - DNA, 20 bp, Artificial Sequence
  Description of Artificial Sequence: Synthetic oligonucleotide
  Target: LAMA2; (+) strand; PAM type: NRG; PAM sequence: AAG
tgattactatgtgttcccta

SEQ ID NO: 147968 - DNA, 20 bp, Artificial Sequence
  Description of Artificial Sequence: Synthetic oligonucleotide
  Target: LAMA2; (+) strand; PAM type: NRG; PAM sequence: TAG
tttgaaactctccattaaca

SEQ ID NO: 147969 - DNA, 20 bp, Artificial Sequence
  Description of Artificial Sequence: Synthetic oligonucleotide
  Target: LAMA2; (+) strand; PAM type: NRG; PAM sequence: CAG
ctatattctaaatcaaatgt

SEQ ID NO: 147970 - DNA, 20 bp, Artificial Sequence
  Description of Artificial Sequence: Synthetic oligonucleotide
  Target: LAMA2; (+) strand; PAM type: NRG; PAM sequence: CAG
tattctaaatcaaatgtcag

SEQ ID NO: 147971 - DNA, 20 bp, Artificial Sequence
  Description of Artificial Sequence: Synthetic oligonucleotide
  Target: LAMA2; (+) strand; PAM type: NRG; PAM sequence: AGG
attctaaatcaaatgtcagc

SEQ ID NO: 147972 - DNA, 20 bp, Artificial Sequence
  Description of Artificial Sequence: Synthetic oligonucleotide
  Target: LAMA2; (+) strand; PAM type: NRG; PAM sequence: TGG
taaatcaaatgtcagcaggt

SEQ ID NO: 147973 - DNA, 20 bp, Artificial Sequence
  Description of Artificial Sequence: Synthetic oligonucleotide
  Target: LAMA2; (+) strand; PAM type: NRG; PAM sequence: GGG
aaatcaaatgtcagcaggtt

SEQ ID NO: 147974 - DNA, 20 bp, Artificial Sequence
  Description of Artificial Sequence: Synthetic oligonucleotide
  Target: LAMA2; (+) strand; PAM type: NRG; PAM sequence: AAG
caaatgtcagcaggttggga

SEQ ID NO: 147975 - DNA, 20 bp, Artificial Sequence
  Description of Artificial Sequence: Synthetic oligonucleotide
  Target: LAMA2; (+) strand; PAM type: NRG; PAM sequence: AGG
aaatgtcagcaggttgggaa

SEQ ID NO: 147976 - DNA, 20 bp, Artificial Sequence
  Description of Artificial Sequence: Synthetic oligonucleotide
  Target: LAMA2; (+) strand; PAM type: NRG; PAM sequence: AAG
gtatttacaacaaacatgac

SEQ ID NO: 147977 - DNA, 20 bp, Artificial Sequence
  Description of Artificial Sequence: Synthetic oligonucleotide
  Target: LAMA2; (+) strand; PAM type: NRG; PAM sequence: AGG
tatttacaacaaacatgaca

SEQ ID NO: 147978 - DNA, 20 bp, Artificial Sequence
  Description of Artificial Sequence: Synthetic oligonucleotide
  Target: LAMA2; (+) strand; PAM type: NRG; PAM sequence: GGG
atttacaacaaacatgacaa

SEQ ID NO: 147979 - DNA, 20 bp, Artificial Sequence
  Description of Artificial Sequence: Synthetic oligonucleotide
  Target: LAMA2; (+) strand; PAM type: NRG; PAM sequence: GGG
tttacaacaaacatgacaag

SEQ ID NO: 147980 - DNA, 20 bp, Artificial Sequence
  Description of Artificial Sequence: Synthetic oligonucleotide
  Target: LAMA2; (+) strand; PAM type: NRG; PAM sequence: AAG
gataataacctttctatatt

SEQ ID NO: 147981 - DNA, 20 bp, Artificial Sequence
  Description of Artificial Sequence: Synthetic oligonucleotide
  Target: LAMA2; (+) strand; PAM type: NRG; PAM sequence: GAG
taataacctttctatattaa

SEQ ID NO: 147982 - DNA, 20 bp, Artificial Sequence
  Description of Artificial Sequence: Synthetic oligonucleotide
  Target: LAMA2; (+) strand; PAM type: NRG; PAM sequence: AAG
aagagatcttacatatcaat

SEQ ID NO: 147983 - DNA, 20 bp, Artificial Sequence
  Description of Artificial Sequence: Synthetic oligonucleotide
  Target: LAMA2; (+) strand; PAM type: NRG; PAM sequence: AAG
cttacatatcaataagaaaa

SEQ ID NO: 147984 - DNA, 20 bp, Artificial Sequence
  Description of Artificial Sequence: Synthetic oligonucleotide
  Target: LAMA2; (+) strand; PAM type: NRG; PAM sequence: TAG
taagaaaaaagttaacctgt

SEQ ID NO: 147985 - DNA, 20 bp, Artificial Sequence
  Description of Artificial Sequence: Synthetic oligonucleotide
  Target: LAMA2; (+) strand; PAM type: NRG; PAM sequence: AAG
aaaaaagttaacctgttaga

SEQ ID NO: 147986 - DNA, 20 bp, Artificial Sequence
  Description of Artificial Sequence: Synthetic oligonucleotide
  Target: LAMA2; (+) strand; PAM type: NRG; PAM sequence: CAG
acctgttagaaagatcaaaa

SEQ ID NO: 147987 - DNA, 20 bp, Artificial Sequence
  Description of Artificial Sequence: Synthetic oligonucleotide
  Target: LAMA2; (+) strand; PAM type: NRG; PAM sequence: AGG
cctgttagaaagatcaaaac

SEQ ID NO: 147988 - DNA, 20 bp, Artificial Sequence
  Description of Artificial Sequence: Synthetic oligonucleotide
  Target: LAMA2; (+) strand; PAM type: NRG; PAM sequence: CAG
agatcaaaacaggtattcct

SEQ ID NO: 147989 - DNA, 20 bp, Artificial Sequence
  Description of Artificial Sequence: Synthetic oligonucleotide
  Target: LAMA2; (+) strand; PAM type: NRG; PAM sequence: AAG
atgacatataactttgtaaa

SEQ ID NO: 147990 - DNA, 20 bp, Artificial Sequence
  Description of Artificial Sequence: Synthetic oligonucleotide
  Target: LAMA2; (+) strand; PAM type: NRG; PAM sequence: AAG
agataatgacactcataatg

SEQ ID NO: 147991 - DNA, 20 bp, Artificial Sequence
  Description of Artificial Sequence: Synthetic oligonucleotide
  Target: LAMA2; (+) strand; PAM type: NRG; PAM sequence: AGG
gataatgacactcataatga

SEQ ID NO: 147992 - DNA, 20 bp, Artificial Sequence
  Description of Artificial Sequence: Synthetic oligonucleotide
  Target: LAMA2; (+) strand; PAM type: NRG; PAM sequence: AAG
aatgacactcataatgaagg

SEQ ID NO: 147993 - DNA, 20 bp, Artificial Sequence
  Description of Artificial Sequence: Synthetic oligonucleotide
  Target: LAMA2; (+) strand; PAM type: NRG; PAM sequence: AAG
atattatttttcacctatca

SEQ ID NO: 147994 - DNA, 20 bp, Artificial Sequence
  Description of Artificial Sequence: Synthetic oligonucleotide
  Target: LAMA2; (+) strand; PAM type: NRG; PAM sequence: CAG
atttgaatgcttattatgtc

SEQ ID NO: 147995 - DNA, 20 bp, Artificial Sequence
  Description of Artificial Sequence: Synthetic oligonucleotide
  Target: LAMA2; (+) strand; PAM type: NRG; PAM sequence: AGG
tttgaatgcttattatgtcc

SEQ ID NO: 147996 - DNA, 20 bp, Artificial Sequence
  Description of Artificial Sequence: Synthetic oligonucleotide
  Target: LAMA2; (+) strand; PAM type: NRG; PAM sequence: AAG
tatgtccaggaattgtattc

SEQ ID NO: 147997 - DNA, 20 bp, Artificial Sequence
  Description of Artificial Sequence: Synthetic oligonucleotide
  Target: LAMA2; (+) strand; PAM type: NRG; PAM sequence: AGG
atgtccaggaattgtattca

SEQ ID NO: 147998 - DNA, 20 bp, Artificial Sequence
  Description of Artificial Sequence: Synthetic oligonucleotide
  Target: LAMA2; (+) strand; PAM type: NRG; PAM sequence: GGG
tgtccaggaattgtattcaa

SEQ ID NO: 147999 - DNA, 20 bp, Artificial Sequence
  Description of Artificial Sequence: Synthetic oligonucleotide
  Target: LAMA2; (+) strand; PAM type: NRG; PAM sequence: AAG
ttcaagggttgataacacac

SEQ ID NO: 148000 - DNA, 20 bp, Artificial Sequence
  Description of Artificial Sequence: Synthetic oligonucleotide
  Target: LAMA2; (+) strand; PAM type: NRG; PAM sequence: AGG
tcaagggttgataacacaca

SEQ ID NO: 148001 - DNA, 20 bp, Artificial Sequence
  Description of Artificial Sequence: Synthetic oligonucleotide
  Target: LAMA2; (+) strand; PAM type: NRG; PAM sequence: TGG
gggttgataacacacaaggt

SEQ ID NO: 148002 - DNA, 20 bp, Artificial Sequence
  Description of Artificial Sequence: Synthetic oligonucleotide
  Target: LAMA2; (+) strand; PAM type: NRG; PAM sequence: TGG
ttgataacacacaaggttgg

SEQ ID NO: 148003 - DNA, 20 bp, Artificial Sequence
  Description of Artificial Sequence: Synthetic oligonucleotide
  Target: LAMA2; (+) strand; PAM type: NRG; PAM sequence: TGG
acacacaaggttggtggcta

SEQ ID NO: 148004 - DNA, 20 bp, Artificial Sequence
  Description of Artificial Sequence: Synthetic oligonucleotide
  Target: LAMA2; (+) strand; PAM type: NRG; PAM sequence: GAG
acacaaggttggtggctatg

SEQ ID NO: 148005 - DNA, 20 bp, Artificial Sequence
  Description of Artificial Sequence: Synthetic oligonucleotide
  Target: LAMA2; (+) strand; PAM type: NRG; PAM sequence: AAG
aaggttggtggctatggaga

SEQ ID NO: 148006 - DNA, 20 bp, Artificial Sequence
  Description of Artificial Sequence: Synthetic oligonucleotide
  Target: LAMA2; (+) strand; PAM type: NRG; PAM sequence: TAG
aagtgttttatcatatctac

SEQ ID NO: 148007 - DNA, 20 bp, Artificial Sequence
  Description of Artificial Sequence: Synthetic oligonucleotide
  Target: LAMA2; (+) strand; PAM type: NRG; PAM sequence: GAG
gtgttttatcatatctacta

SEQ ID NO: 148008 - DNA, 20 bp, Artificial Sequence
  Description of Artificial Sequence: Synthetic oligonucleotide
  Target: LAMA2; (+) strand; PAM type: NRG; PAM sequence: AGG
tgttttatcatatctactag

SEQ ID NO: 148009 - DNA, 20 bp, Artificial Sequence
  Description of Artificial Sequence: Synthetic oligonucleotide
  Target: LAMA2; (+) strand; PAM type: NRG; PAM sequence: AAG
tatcatatctactagaggaa

SEQ ID NO: 148010 - DNA, 20 bp, Artificial Sequence
  Description of Artificial Sequence: Synthetic oligonucleotide
  Target: LAMA2; (+) strand; PAM type: NRG; PAM sequence: TAG
agaggaaaagtcatttgtca

SEQ ID NO: 148011 - DNA, 20 bp, Artificial Sequence
  Description of Artificial Sequence: Synthetic oligonucleotide
  Target: LAMA2; (+) strand; PAM type: NRG; PAM sequence: TGG
gtcatttgtcatagcgttcc

SEQ ID NO: 148012 - DNA, 20 bp, Artificial Sequence
  Description of Artificial Sequence: Synthetic oligonucleotide
  Target: LAMA2; (+) strand; PAM type: NRG; PAM sequence: GAG
catttgtcatagcgttcctg

SEQ ID NO: 148013 - DNA, 20 bp, Artificial Sequence
  Description of Artificial Sequence: Synthetic oligonucleotide
  Target: LAMA2; (+) strand; PAM type: NRG; PAM sequence: AGG
atttgtcatagcgttcctgg

SEQ ID NO: 148014 - DNA, 20 bp, Artificial Sequence
  Description of Artificial Sequence: Synthetic oligonucleotide
  Target: LAMA2; (+) strand; PAM type: NRG; PAM sequence: GGG
tttgtcatagcgttcctgga

SEQ ID NO: 148015 - DNA, 20 bp, Artificial Sequence
  Description of Artificial Sequence: Synthetic oligonucleotide
  Target: LAMA2; (+) strand; PAM type: NRG; PAM sequence: GGG
ttgtcatagcgttcctggag

SEQ ID NO: 148016 - DNA, 20 bp, Artificial Sequence
  Description of Artificial Sequence: Synthetic oligonucleotide
  Target: LAMA2; (+) strand; PAM type: NRG; PAM sequence: AAG
ttcctggaggggaatttttt

SEQ ID NO: 148017 - DNA, 20 bp, Artificial Sequence
  Description of Artificial Sequence: Synthetic oligonucleotide
  Target: LAMA2; (+) strand; PAM type: NRG; PAM sequence: TAG
aattttacatatcctttgac

SEQ ID NO: 148018 - DNA, 20 bp, Artificial Sequence
  Description of Artificial Sequence: Synthetic oligonucleotide
  Target: LAMA2; (+) strand; PAM type: NRG; PAM sequence: CAG
ttgactagaaattatgcttc

SEQ ID NO: 148019 - DNA, 20 bp, Artificial Sequence
  Description of Artificial Sequence: Synthetic oligonucleotide
  Target: LAMA2; (+) strand; PAM type: NRG; PAM sequence: AGG
tgactagaaattatgcttcc

SEQ ID NO: 148020 - DNA, 20 bp, Artificial Sequence
  Description of Artificial Sequence: Synthetic oligonucleotide
  Target: LAMA2; (+) strand; PAM type: NRG; PAM sequence: TAG
gcttccaggaatttacccta

SEQ ID NO: 148021 - DNA, 20 bp, Artificial Sequence
  Description of Artificial Sequence: Synthetic oligonucleotide
  Target: LAMA2; (+) strand; PAM type: NRG; PAM sequence: TAG
accctatagatatattcata

SEQ ID NO: 148022 - DNA, 20 bp, Artificial Sequence
  Description of Artificial Sequence: Synthetic oligonucleotide
  Target: LAMA2; (+) strand; PAM type: NRG; PAM sequence: CAG
gatatattcatatagatgta

SEQ ID NO: 148023 - DNA, 20 bp, Artificial Sequence
  Description of Artificial Sequence: Synthetic oligonucleotide
  Target: LAMA2; (+) strand; PAM type: NRG; PAM sequence: AGG
atatattcatatagatgtac

SEQ ID NO: 148024 - DNA, 20 bp, Artificial Sequence
  Description of Artificial Sequence: Synthetic oligonucleotide
  Target: LAMA2; (+) strand; PAM type: NRG; PAM sequence: AAG
gatcctcgtcattattatac

SEQ ID NO: 148025 - DNA, 20 bp, Artificial Sequence
  Description of Artificial Sequence: Synthetic oligonucleotide
  Target: LAMA2; (+) strand; PAM type: NRG; PAM sequence: GAG
tactgctactaacatttatt

SEQ ID NO: 148026 - DNA, 20 bp, Artificial Sequence
  Description of Artificial Sequence: Synthetic oligonucleotide
  Target: LAMA2; (+) strand; PAM type: NRG; PAM sequence: CAG
ctactaacatttattgagct

SEQ ID NO: 148027 - DNA, 20 bp, Artificial Sequence
  Description of Artificial Sequence: Synthetic oligonucleotide
  Target: LAMA2; (+) strand; PAM type: NRG; PAM sequence: TAG
catttattgagctcagtatt

SEQ ID NO: 148028 - DNA, 20 bp, Artificial Sequence
  Description of Artificial Sequence: Synthetic oligonucleotide
  Target: LAMA2; (+) strand; PAM type: NRG; PAM sequence: CAG
gctcagtatttagtatgttt

SEQ ID NO: 148029 - DNA, 20 bp, Artificial Sequence
  Description of Artificial Sequence: Synthetic oligonucleotide
  Target: LAMA2; (+) strand; PAM type: NRG; PAM sequence: AGG
ctcagtatttagtatgtttc

SEQ ID NO: 148030 - DNA, 20 bp, Artificial Sequence
  Description of Artificial Sequence: Synthetic oligonucleotide
  Target: LAMA2; (+) strand; PAM type: NRG; PAM sequence: AAG
tatgtttcaggcattctgct

SEQ ID NO: 148031 - DNA, 20 bp, Artificial Sequence
  Description of Artificial Sequence: Synthetic oligonucleotide
  Target: LAMA2; (+) strand; PAM type: NRG; PAM sequence: GAG
agcattctcaaaacatgtat

SEQ ID NO: 148032 - DNA, 20 bp, Artificial Sequence
  Description of Artificial Sequence: Synthetic oligonucleotide
  Target: LAMA2; (+) strand; PAM type: NRG; PAM sequence: AAG
tctcaaaacatgtatgagac

SEQ ID NO: 148033 - DNA, 20 bp, Artificial Sequence
  Description of Artificial Sequence: Synthetic oligonucleotide
  Target: LAMA2; (+) strand; PAM type: NRG; PAM sequence: AAG
catgtatgagacaagtacta

SEQ ID NO: 148034 - DNA, 20 bp, Artificial Sequence
  Description of Artificial Sequence: Synthetic oligonucleotide
  Target: LAMA2; (+) strand; PAM type: NRG; PAM sequence: TAG
gacaagtactaaagtgatgc

SEQ ID NO: 148035 - DNA, 20 bp, Artificial Sequence
  Description of Artificial Sequence: Synthetic oligonucleotide
  Target: LAMA2; (+) strand; PAM type: NRG; PAM sequence: AGG
acaagtactaaagtgatgct

SEQ ID NO: 148036 - DNA, 20 bp, Artificial Sequence
  Description of Artificial Sequence: Synthetic oligonucleotide
  Target: LAMA2; (+) strand; PAM type: NRG; PAM sequence: GAG
ctaaagtgatgctaggactc

SEQ ID NO: 148037 - DNA, 20 bp, Artificial Sequence
  Description of Artificial Sequence: Synthetic oligonucleotide
  Target: LAMA2; (+) strand; PAM type: NRG; PAM sequence: AAG
ggactcgagtttttgcctca

SEQ ID NO: 148038 - DNA, 20 bp, Artificial Sequence
  Description of Artificial Sequence: Synthetic oligonucleotide
  Target: LAMA2; (+) strand; PAM type: NRG; PAM sequence: TGG
ttgcctcaaagtcactcaac

SEQ ID NO: 148039 - DNA, 20 bp, Artificial Sequence
  Description of Artificial Sequence: Synthetic oligonucleotide
  Target: LAMA2; (+) strand; PAM type: NRG; PAM sequence: TAG
aaagtcactcaactggcaaa

SEQ ID NO: 148040 - DNA, 20 bp, Artificial Sequence
  Description of Artificial Sequence: Synthetic oligonucleotide
  Target: LAMA2; (+) strand; PAM type: NRG; PAM sequence: AGG
aagtcactcaactggcaaat

SEQ ID NO: 148041 - DNA, 20 bp, Artificial Sequence
  Description of Artificial Sequence: Synthetic oligonucleotide
  Target: LAMA2; (+) strand; PAM type: NRG; PAM sequence: TAG
ataggaaacttttctaacat

SEQ ID NO: 148042 - DNA, 20 bp, Artificial Sequence
  Description of Artificial Sequence: Synthetic oligonucleotide
  Target: LAMA2; (+) strand; PAM type: NRG; PAM sequence: GAG
aggaaacttttctaacatta

SEQ ID NO: 148043 - DNA, 20 bp, Artificial Sequence
  Description of Artificial Sequence: Synthetic oligonucleotide
  Target: LAMA2; (+) strand; PAM type: NRG; PAM sequence: CGG
ttagagcgcctccctccacc

SEQ ID NO: 148044 - DNA, 20 bp, Artificial Sequence
  Description of Artificial Sequence: Synthetic oligonucleotide
  Target: LAMA2; (+) strand; PAM type: NRG; PAM sequence: CAG
acccggcatccttgtcctcc

SEQ ID NO: 148045 - DNA, 20 bp, Artificial Sequence
  Description of Artificial Sequence: Synthetic oligonucleotide
  Target: LAMA2; (+) strand; PAM type: NRG; PAM sequence: TGG
ttgtcctcccagtatgtgtg

SEQ ID NO: 148046 - DNA, 20 bp, Artificial Sequence
  Description of Artificial Sequence: Synthetic oligonucleotide
  Target: LAMA2; (+) strand; PAM type: NRG; PAM sequence: AAG
tgtgtgtggtgttatttgta

SEQ ID NO: 148047 - DNA, 20 bp, Artificial Sequence
  Description of Artificial Sequence: Synthetic oligonucleotide
  Target: LAMA2; (+) strand; PAM type: NRG; PAM sequence: AGG
gtgtgtggtgttatttgtaa

SEQ ID NO: 148048 - DNA, 20 bp, Artificial Sequence
  Description of Artificial Sequence: Synthetic oligonucleotide
  Target: LAMA2; (+) strand; PAM type: NRG; PAM sequence: GGG
tgtgtggtgttatttgtaaa

SEQ ID NO: 148049 - DNA, 20 bp, Artificial Sequence
  Description of Artificial Sequence: Synthetic oligonucleotide
  Target: LAMA2; (+) strand; PAM type: NRG; PAM sequence: GAG
tgtggtgttatttgtaaagg

SEQ ID NO: 148050 - DNA, 20 bp, Artificial Sequence
  Description of Artificial Sequence: Synthetic oligonucleotide
  Target: LAMA2; (+) strand; PAM type: NRG; PAM sequence: TGG
tatttgtaaagggagaaaca

SEQ ID NO: 148051 - DNA, 20 bp, Artificial Sequence
  Description of Artificial Sequence: Synthetic oligonucleotide
  Target: LAMA2; (+) strand; PAM type: NRG; PAM sequence: TAG
actgtgtaactgttcattaa

SEQ ID NO: 148052 - DNA, 20 bp, Artificial Sequence
  Description of Artificial Sequence: Synthetic oligonucleotide
  Target: LAMA2; (+) strand; PAM type: NRG; PAM sequence: AGG
ctgtgtaactgttcattaat

SEQ ID NO: 148053 - DNA, 20 bp, Artificial Sequence
  Description of Artificial Sequence: Synthetic oligonucleotide
  Target: LAMA2; (+) strand; PAM type: NRG; PAM sequence: GGG
tgtgtaactgttcattaata

SEQ ID NO: 148054 - DNA, 20 bp, Artificial Sequence
  Description of Artificial Sequence: Synthetic oligonucleotide
  Target: LAMA2; (+) strand; PAM type: NRG; PAM sequence: AAG
cctgataaataccttcattc

SEQ ID NO: 148055 - DNA, 20 bp, Artificial Sequence
  Description of Artificial Sequence: Synthetic oligonucleotide
  Target: LAMA2; (+) strand; PAM type: NRG; PAM sequence: TAG
gataaataccttcattcaag

SEQ ID NO: 148056 - DNA, 20 bp, Artificial Sequence
  Description of Artificial Sequence: Synthetic oligonucleotide
  Target: LAMA2; (+) strand; PAM type: NRG; PAM sequence: TAG
agtagtaccctgtgtaccct

SEQ ID NO: 148057 - DNA, 20 bp, Artificial Sequence
  Description of Artificial Sequence: Synthetic oligonucleotide
  Target: LAMA2; (+) strand; PAM type: NRG; PAM sequence: AGG
gtagtaccctgtgtaccctt

SEQ ID NO: 148058 - DNA, 20 bp, Artificial Sequence
  Description of Artificial Sequence: Synthetic oligonucleotide
  Target: LAMA2; (+) strand; PAM type: NRG; PAM sequence: GGG
tagtaccctgtgtaccctta

SEQ ID NO: 148059 - DNA, 20 bp, Artificial Sequence
  Description of Artificial Sequence: Synthetic oligonucleotide
  Target: LAMA2; (+) strand; PAM type: NRG; PAM sequence: GGG
agtaccctgtgtacccttag

SEQ ID NO: 148060 - DNA, 20 bp, Artificial Sequence
  Description of Artificial Sequence: Synthetic oligonucleotide
  Target: LAMA2; (+) strand; PAM type: NRG; PAM sequence: TGG
aggggatacacatgctaata

SEQ ID NO: 148061 - DNA, 20 bp, Artificial Sequence
  Description of Artificial Sequence: Synthetic oligonucleotide
  Target: LAMA2; (+) strand; PAM type: NRG; PAM sequence: AAG
gatacacatgctaatatgga

SEQ ID NO: 148062 - DNA, 20 bp, Artificial Sequence
  Description of Artificial Sequence: Synthetic oligonucleotide
  Target: LAMA2; (+) strand; PAM type: NRG; PAM sequence: AGG
atacacatgctaatatggaa

SEQ ID NO: 148063 - DNA, 20 bp, Artificial Sequence
  Description of Artificial Sequence: Synthetic oligonucleotide
  Target: LAMA2; (+) strand; PAM type: NRG; PAM sequence: GGG
tacacatgctaatatggaaa

SEQ ID NO: 148064 - DNA, 20 bp, Artificial Sequence
  Description of Artificial Sequence: Synthetic oligonucleotide
  Target: LAMA2; (+) strand; PAM type: NRG; PAM sequence: TAG
agggctccatgatttactgt

SEQ ID NO: 148065 - DNA, 20 bp, Artificial Sequence
  Description of Artificial Sequence: Synthetic oligonucleotide
  Target: LAMA2; (+) strand; PAM type: NRG; PAM sequence: AAG
catgatttactgttagtaaa

SEQ ID NO: 148066 - DNA, 20 bp, Artificial Sequence
  Description of Artificial Sequence: Synthetic oligonucleotide
  Target: LAMA2; (+) strand; PAM type: NRG; PAM sequence: CGG
ttactgttagtaaaaagaac

SEQ ID NO: 148067 - DNA, 20 bp, Artificial Sequence
  Description of Artificial Sequence: Synthetic oligonucleotide
  Target: LAMA2; (+) strand; PAM type: NRG; PAM sequence: CAG
taaaaagaaccggttctaaa

SEQ ID NO: 148068 - DNA, 20 bp, Artificial Sequence
  Description of Artificial Sequence: Synthetic oligonucleotide
  Target: LAMA2; (+) strand; PAM type: NRG; PAM sequence: TAG
caaatgccccttcccttttg

SEQ ID NO: 148069 - DNA, 20 bp, Artificial Sequence
  Description of Artificial Sequence: Synthetic oligonucleotide
  Target: LAMA2; (+) strand; PAM type: NRG; PAM sequence: AAG
ccttttgtagaataaataaa

SEQ ID NO: 148070 - DNA, 20 bp, Artificial Sequence
  Description of Artificial Sequence: Synthetic oligonucleotide
  Target: LAMA2; (+) strand; PAM type: NRG; PAM sequence: GAG
gtagaataaataaaaagatt

SEQ ID NO: 148071 - DNA, 20 bp, Artificial Sequence
  Description of Artificial Sequence: Synthetic oligonucleotide
  Target: LAMA2; (+) strand; PAM type: NRG; PAM sequence: AAG
agattgagctgtatgcatac

SEQ ID NO: 148072 - DNA, 20 bp, Artificial Sequence
  Description of Artificial Sequence: Synthetic oligonucleotide
  Target: LAMA2; (+) strand; PAM type: NRG; PAM sequence: TGG
tacacacacacacacacacg

SEQ ID NO: 148073 - DNA, 20 bp, Artificial Sequence
  Description of Artificial Sequence: Synthetic oligonucleotide
  Target: LAMA2; (+) strand; PAM type: NRG; PAM sequence: AAG
acacacgtggaaataaatgt

SEQ ID NO: 148074 - DNA, 20 bp, Artificial Sequence
  Description of Artificial Sequence: Synthetic oligonucleotide
  Target: LAMA2; (+) strand; PAM type: NRG; PAM sequence: AAG
aaataaatgtaagtactcct

SEQ ID NO: 148075 - DNA, 20 bp, Artificial Sequence
  Description of Artificial Sequence: Synthetic oligonucleotide
  Target: LAMA2; (+) strand; PAM type: NRG; PAM sequence: CAG
tcctaagaaactcaacatgt

SEQ ID NO: 148076 - DNA, 20 bp, Artificial Sequence
  Description of Artificial Sequence: Synthetic oligonucleotide
  Target: LAMA2; (+) strand; PAM type: NRG; PAM sequence: AGG
cctaagaaactcaacatgtc

SEQ ID NO: 148077 - DNA, 20 bp, Artificial Sequence
  Description of Artificial Sequence: Synthetic oligonucleotide
  Target: LAMA2; (+) strand; PAM type: NRG; PAM sequence: TAG
aagaaactcaacatgtcagg

SEQ ID NO: 148078 - DNA, 20 bp, Artificial Sequence
  Description of Artificial Sequence: Synthetic oligonucleotide
  Target: LAMA2; (+) strand; PAM type: NRG; PAM sequence: AGG
agaaactcaacatgtcaggt

SEQ ID NO: 148079 - DNA, 20 bp, Artificial Sequence
  Description of Artificial Sequence: Synthetic oligonucleotide
  Target: LAMA2; (+) strand; PAM type: NRG; PAM sequence: AAG
aactcaacatgtcaggtagg

SEQ ID NO: 148080 - DNA, 20 bp, Artificial Sequence
  Description of Artificial Sequence: Synthetic oligonucleotide
  Target: LAMA2; (+) strand; PAM type: NRG; PAM sequence: AGG
actcaacatgtcaggtagga

SEQ ID NO: 148081 - DNA, 20 bp, Artificial Sequence
  Description of Artificial Sequence: Synthetic oligonucleotide
  Target: LAMA2; (+) strand; PAM type: NRG; PAM sequence: GAG
tcaacatgtcaggtaggaag

SEQ ID NO: 148082 - DNA, 20 bp, Artificial Sequence
  Description of Artificial Sequence: Synthetic oligonucleotide
  Target: LAMA2; (+) strand; PAM type: NRG; PAM sequence: TGG
actgcatcgatatatttccc

SEQ ID NO: 148083 - DNA, 20 bp, Artificial Sequence
  Description of Artificial Sequence: Synthetic oligonucleotide
  Target: LAMA2; (+) strand; PAM type: NRG; PAM sequence: TAG
taatataaattcttcatatt

SEQ ID NO: 148084 - DNA, 20 bp, Artificial Sequence
  Description of Artificial Sequence: Synthetic oligonucleotide
  Target: LAMA2; (+) strand; PAM type: NRG; PAM sequence: AAG
tataaattcttcatatttag

SEQ ID NO: 148085 - DNA, 20 bp, Artificial Sequence
  Description of Artificial Sequence: Synthetic oligonucleotide
  Target: LAMA2; (+) strand; PAM type: NRG; PAM sequence: GAG
taaattcttcatatttagaa

SEQ ID NO: 148086 - DNA, 20 bp, Artificial Sequence
  Description of Artificial Sequence: Synthetic oligonucleotide
  Target: LAMA2; (+) strand; PAM type: NRG; PAM sequence: TGG
gagtcttacccaatcctttc

SEQ ID NO: 148087 - DNA, 20 bp, Artificial Sequence
  Description of Artificial Sequence: Synthetic oligonucleotide
  Target: LAMA2; (+) strand; PAM type: NRG; PAM sequence: GAG
gtcttacccaatcctttctg

SEQ ID NO: 148088 - DNA, 20 bp, Artificial Sequence
  Description of Artificial Sequence: Synthetic oligonucleotide
  Target: LAMA2; (+) strand; PAM type: NRG; PAM sequence: AAG
tacccaatcctttctggaga

SEQ ID NO: 148089 - DNA, 20 bp, Artificial Sequence
  Description of Artificial Sequence: Synthetic oligonucleotide
  Target: LAMA2; (+) strand; PAM type: NRG; PAM sequence: TGG
gaaagtgatttttcacttct

SEQ ID NO: 148090 - DNA, 20 bp, Artificial Sequence
  Description of Artificial Sequence: Synthetic oligonucleotide
  Target: LAMA2; (+) strand; PAM type: NRG; PAM sequence: AAG
tcttctaatgtaacatgaaa

SEQ ID NO: 148091 - DNA, 20 bp, Artificial Sequence
  Description of Artificial Sequence: Synthetic oligonucleotide
  Target: LAMA2; (+) strand; PAM type: NRG; PAM sequence: AAG
taatgtaacatgaaaaagac

SEQ ID NO: 148092 - DNA, 20 bp, Artificial Sequence
  Description of Artificial Sequence: Synthetic oligonucleotide
  Target: LAMA2; (+) strand; PAM type: NRG; PAM sequence: AGG
aatgtaacatgaaaaagaca

SEQ ID NO: 148093 - DNA, 20 bp, Artificial Sequence
  Description of Artificial Sequence: Synthetic oligonucleotide
  Target: LAMA2; (+) strand; PAM type: NRG; PAM sequence: GAG
tgtaacatgaaaaagacaag

SEQ ID NO: 148094 - DNA, 20 bp, Artificial Sequence
  Description of Artificial Sequence: Synthetic oligonucleotide
  Target: LAMA2; (+) strand; PAM type: NRG; PAM sequence: AGG
gtaacatgaaaaagacaagg

SEQ ID NO: 148095 - DNA, 20 bp, Artificial Sequence
  Description of Artificial Sequence: Synthetic oligonucleotide
  Target: LAMA2; (+) strand; PAM type: NRG; PAM sequence: AAG
acatgaaaaagacaaggagg

SEQ ID NO: 148096 - DNA, 20 bp, Artificial Sequence
  Description of Artificial Sequence: Synthetic oligonucleotide
  Target: LAMA2; (+) strand; PAM type: NRG; PAM sequence: AAG
aaaaagacaaggaggaagaa

SEQ ID NO: 148097 - DNA, 20 bp, Artificial Sequence
  Description of Artificial Sequence: Synthetic oligonucleotide
  Target: LAMA2; (+) strand; PAM type: NRG; PAM sequence: AAG
aagacaaggaggaagaaaag

SEQ ID NO: 148098 - DNA, 20 bp, Artificial Sequence
  Description of Artificial Sequence: Synthetic oligonucleotide
  Target: LAMA2; (+) strand; PAM type: NRG; PAM sequence: AAG
tcaattgctaacttctttat

SEQ ID NO: 148099 - DNA, 20 bp, Artificial Sequence
  Description of Artificial Sequence: Synthetic oligonucleotide
  Target: LAMA2; (+) strand; PAM type: NRG; PAM sequence: TAG
tgcttttaaatatcccaatc

SEQ ID NO: 148100 - DNA, 20 bp, Artificial Sequence
  Description of Artificial Sequence: Synthetic oligonucleotide
  Target: LAMA2; (+) strand; PAM type: NRG; PAM sequence: TGG
tgaccactccatgtattata

SEQ ID NO: 148101 - DNA, 20 bp, Artificial Sequence
  Description of Artificial Sequence: Synthetic oligonucleotide
  Target: LAMA2; (+) strand; PAM type: NRG; PAM sequence: GAG
ccatgtattatatggaaact

SEQ ID NO: 148102 - DNA, 20 bp, Artificial Sequence
  Description of Artificial Sequence: Synthetic oligonucleotide
  Target: LAMA2; (+) strand; PAM type: NRG; PAM sequence: AAG
aactgagccttcgtgaaatt

SEQ ID NO: 148103 - DNA, 20 bp, Artificial Sequence
  Description of Artificial Sequence: Synthetic oligonucleotide
  Target: LAMA2; (+) strand; PAM type: NRG; PAM sequence: AAG
tgagccttcgtgaaattaag

SEQ ID NO: 148104 - DNA, 20 bp, Artificial Sequence
  Description of Artificial Sequence: Synthetic oligonucleotide
  Target: LAMA2; (+) strand; PAM type: NRG; PAM sequence: AAG
tccaatgtcatatgactgct

SEQ ID NO: 148105 - DNA, 20 bp, Artificial Sequence
  Description of Artificial Sequence: Synthetic oligonucleotide
  Target: LAMA2; (+) strand; PAM type: NRG; PAM sequence: TAG
aatgtcatatgactgctaag

SEQ ID NO: 148106 - DNA, 20 bp, Artificial Sequence
  Description of Artificial Sequence: Synthetic oligonucleotide
  Target: LAMA2; (+) strand; PAM type: NRG; PAM sequence: GAG
tgtcatatgactgctaagta

SEQ ID NO: 148107 - DNA, 20 bp, Artificial Sequence
  Description of Artificial Sequence: Synthetic oligonucleotide
  Target: LAMA2; (+) strand; PAM type: NRG; PAM sequence: AGG
gtcatatgactgctaagtag

SEQ ID NO: 148108 - DNA, 20 bp, Artificial Sequence
  Description of Artificial Sequence: Synthetic oligonucleotide
  Target: LAMA2; (+) strand; PAM type: NRG; PAM sequence: GAG
catatgactgctaagtagag

SEQ ID NO: 148109 - DNA, 20 bp, Artificial Sequence
  Description of Artificial Sequence: Synthetic oligonucleotide
  Target: LAMA2; (+) strand; PAM type: NRG; PAM sequence: GAG
tatgactgctaagtagagga

SEQ ID NO: 148110 - DNA, 20 bp, Artificial Sequence
  Description of Artificial Sequence: Synthetic oligonucleotide
  Target: LAMA2; (+) strand; PAM type: NRG; PAM sequence: AAG
aggagagcacacccacatcc

SEQ ID NO: 148111 - DNA, 20 bp, Artificial Sequence
  Description of Artificial Sequence: Synthetic oligonucleotide
  Target: LAMA2; (+) strand; PAM type: NRG; PAM sequence: CAG
gagcacacccacatccaaga

SEQ ID NO: 148112 - DNA, 20 bp, Artificial Sequence
  Description of Artificial Sequence: Synthetic oligonucleotide
  Target: LAMA2; (+) strand; PAM type: NRG; PAM sequence: TGG
acacccacatccaagacagt

SEQ ID NO: 148113 - DNA, 20 bp, Artificial Sequence
  Description of Artificial Sequence: Synthetic oligonucleotide
  Target: LAMA2; (+) strand; PAM type: NRG; PAM sequence: TAG
caagacagttggttgcaaaa

SEQ ID NO: 148114 - DNA, 20 bp, Artificial Sequence
  Description of Artificial Sequence: Synthetic oligonucleotide
  Target: LAMA2; (+) strand; PAM type: NRG; PAM sequence: TAG
gttgcaaaatagcatgatct

SEQ ID NO: 148115 - DNA, 20 bp, Artificial Sequence
  Description of Artificial Sequence: Synthetic oligonucleotide
  Target: LAMA2; (+) strand; PAM type: NRG; PAM sequence: CAG
aatagcatgatcttagccac

SEQ ID NO: 148116 - DNA, 20 bp, Artificial Sequence
  Description of Artificial Sequence: Synthetic oligonucleotide
  Target: LAMA2; (+) strand; PAM type: NRG; PAM sequence: TAG
gatcttagccaccagtaaac

SEQ ID NO: 148117 - DNA, 20 bp, Artificial Sequence
  Description of Artificial Sequence: Synthetic oligonucleotide
  Target: LAMA2; (+) strand; PAM type: NRG; PAM sequence: CGG
gccaccagtaaactagctct

SEQ ID NO: 148118 - DNA, 20 bp, Artificial Sequence
  Description of Artificial Sequence: Synthetic oligonucleotide
  Target: LAMA2; (+) strand; PAM type: NRG; PAM sequence: TGG
ctcggtttgtcttaattcct

SEQ ID NO: 148119 - DNA, 20 bp, Artificial Sequence
  Description of Artificial Sequence: Synthetic oligonucleotide
  Target: LAMA2; (+) strand; PAM type: NRG; PAM sequence: CGG
atgtatcttatttcattcac

SEQ ID NO: 148120 - DNA, 20 bp, Artificial Sequence
  Description of Artificial Sequence: Synthetic oligonucleotide
  Target: LAMA2; (+) strand; PAM type: NRG; PAM sequence: GGG
tgtatcttatttcattcacc

SEQ ID NO: 148121 - DNA, 20 bp, Artificial Sequence
  Description of Artificial Sequence: Synthetic oligonucleotide
  Target: LAMA2; (+) strand; PAM type: NRG; PAM sequence: TAG
atcttatttcattcaccggg

SEQ ID NO: 148122 - DNA, 20 bp, Artificial Sequence
  Description of Artificial Sequence: Synthetic oligonucleotide
  Target: LAMA2; (+) strand; PAM type: NRG; PAM sequence: AGG
tcttatttcattcaccgggt

SEQ ID NO: 148123 - DNA, 20 bp, Artificial Sequence
  Description of Artificial Sequence: Synthetic oligonucleotide
  Target: LAMA2; (+) strand; PAM type: NRG; PAM sequence: AAG
cattcaccgggtaggatgtg

SEQ ID NO: 148124 - DNA, 20 bp, Artificial Sequence
  Description of Artificial Sequence: Synthetic oligonucleotide
  Target: LAMA2; (+) strand; PAM type: NRG; PAM sequence: GAG
ttcaccgggtaggatgtgaa

SEQ ID NO: 148125 - DNA, 20 bp, Artificial Sequence
  Description of Artificial Sequence: Synthetic oligonucleotide
  Target: LAMA2; (+) strand; PAM type: NRG; PAM sequence: TGG
ggtaggatgtgaagagattc

SEQ ID NO: 148126 - DNA, 20 bp, Artificial Sequence
  Description of Artificial Sequence: Synthetic oligonucleotide
  Target: LAMA2; (+) strand; PAM type: NRG; PAM sequence: CAG
aggatgtgaagagattctgg

SEQ ID NO: 148127 - DNA, 20 bp, Artificial Sequence
  Description of Artificial Sequence: Synthetic oligonucleotide
  Target: LAMA2; (+) strand; PAM type: NRG; PAM sequence: TAG
gaagagattctggcagtctt

SEQ ID NO: 148128 - DNA, 20 bp, Artificial Sequence
  Description of Artificial Sequence: Synthetic oligonucleotide
  Target: LAMA2; (+) strand; PAM type: NRG; PAM sequence: CAG
gagattctggcagtctttag

SEQ ID NO: 148129 - DNA, 20 bp, Artificial Sequence
  Description of Artificial Sequence: Synthetic oligonucleotide
  Target: LAMA2; (+) strand; PAM type: NRG; PAM sequence: CAG
tctggcagtctttagcagtg

SEQ ID NO: 148130 - DNA, 20 bp, Artificial Sequence
  Description of Artificial Sequence: Synthetic oligonucleotide
  Target: LAMA2; (+) strand; PAM type: NRG; PAM sequence: TGG
gtctttagcagtgcagactc

SEQ ID NO: 148131 - DNA, 20 bp, Artificial Sequence
  Description of Artificial Sequence: Synthetic oligonucleotide
  Target: LAMA2; (+) strand; PAM type: NRG; PAM sequence: GAG
ctttagcagtgcagactctg

SEQ ID NO: 148132 - DNA, 20 bp, Artificial Sequence
  Description of Artificial Sequence: Synthetic oligonucleotide
  Target: LAMA2; (+) strand; PAM type: NRG; PAM sequence: TGG
gcagtgcagactctggagtc

SEQ ID NO: 148133 - DNA, 20 bp, Artificial Sequence
  Description of Artificial Sequence: Synthetic oligonucleotide
  Target: LAMA2; (+) strand; PAM type: NRG; PAM sequence: CAG
cagactctggagtctggctt

SEQ ID NO: 148134 - DNA, 20 bp, Artificial Sequence
  Description of Artificial Sequence: Synthetic oligonucleotide
  Target: LAMA2; (+) strand; PAM type: NRG; PAM sequence: GAG
gactctggagtctggcttca

SEQ ID NO: 148135 - DNA, 20 bp, Artificial Sequence
  Description of Artificial Sequence: Synthetic oligonucleotide
  Target: LAMA2; (+) strand; PAM type: NRG; PAM sequence: AGG
actctggagtctggcttcag

SEQ ID NO: 148136 - DNA, 20 bp, Artificial Sequence
  Description of Artificial Sequence: Synthetic oligonucleotide
  Target: LAMA2; (+) strand; PAM type: NRG; PAM sequence: TGG
tggagtctggcttcagaggt

SEQ ID NO: 148137 - DNA, 20 bp, Artificial Sequence
  Description of Artificial Sequence: Synthetic oligonucleotide
  Target: LAMA2; (+) strand; PAM type: NRG; PAM sequence: TAG
ggttggtttccaatactgat

SEQ ID NO: 148138 - DNA, 20 bp, Artificial Sequence
  Description of Artificial Sequence: Synthetic oligonucleotide
  Target: LAMA2; (+) strand; PAM type: NRG; PAM sequence: TGG
tacacgttatttcacttctc

SEQ ID NO: 148139 - DNA, 20 bp, Artificial Sequence
  Description of Artificial Sequence: Synthetic oligonucleotide
  Target: LAMA2; (+) strand; PAM type: NRG; PAM sequence: CAG
ttatttcacttctctggact

SEQ ID NO: 148140 - DNA, 20 bp, Artificial Sequence
  Description of Artificial Sequence: Synthetic oligonucleotide
  Target: LAMA2; (+) strand; PAM type: NRG; PAM sequence: AGG
tatttcacttctctggactc

SEQ ID NO: 148141 - DNA, 20 bp, Artificial Sequence
  Description of Artificial Sequence: Synthetic oligonucleotide
  Target: LAMA2; (+) strand; PAM type: NRG; PAM sequence: TAG
cttctctggactcaggtttc

SEQ ID NO: 148142 - DNA, 20 bp, Artificial Sequence
  Description of Artificial Sequence: Synthetic oligonucleotide
  Target: LAMA2; (+) strand; PAM type: NRG; PAM sequence: TAG
aggtttctagtatacaaaaa

SEQ ID NO: 148143 - DNA, 20 bp, Artificial Sequence
  Description of Artificial Sequence: Synthetic oligonucleotide
  Target: LAMA2; (+) strand; PAM type: NRG; PAM sequence: AGG
ggtttctagtatacaaaaat

SEQ ID NO: 148144 - DNA, 20 bp, Artificial Sequence
  Description of Artificial Sequence: Synthetic oligonucleotide
  Target: LAMA2; (+) strand; PAM type: NRG; PAM sequence: AAG
taataatacctaattcctaa

SEQ ID NO: 148145 - DNA, 20 bp, Artificial Sequence
  Description of Artificial Sequence: Synthetic oligonucleotide
  Target: LAMA2; (+) strand; PAM type: NRG; PAM sequence: GAG
taattcctaaaagcattttt

SEQ ID NO: 148146 - DNA, 20 bp, Artificial Sequence
  Description of Artificial Sequence: Synthetic oligonucleotide
  Target: LAMA2; (+) strand; PAM type: NRG; PAM sequence: AGG
aattcctaaaagcatttttg

SEQ ID NO: 148147 - DNA, 20 bp, Artificial Sequence
  Description of Artificial Sequence: Synthetic oligonucleotide
  Target: LAMA2; (+) strand; PAM type: NRG; PAM sequence: CAG
gcatttttgaggattaaaat

SEQ ID NO: 148148 - DNA, 20 bp, Artificial Sequence
  Description of Artificial Sequence: Synthetic oligonucleotide
  Target: LAMA2; (+) strand; PAM type: NRG; PAM sequence: TAG
tttttgaggattaaaatcag

SEQ ID NO: 148149 - DNA, 20 bp, Artificial Sequence
  Description of Artificial Sequence: Synthetic oligonucleotide
  Target: LAMA2; (+) strand; PAM type: NRG; PAM sequence: TGG
aaaatcagtagcaacaaata

SEQ ID NO: 148150 - DNA, 20 bp, Artificial Sequence
  Description of Artificial Sequence: Synthetic oligonucleotide
  Target: LAMA2; (+) strand; PAM type: NRG; PAM sequence: GAG
aatcagtagcaacaaatatg

SEQ ID NO: 148151 - DNA, 20 bp, Artificial Sequence
  Description of Artificial Sequence: Synthetic oligonucleotide
  Target: LAMA2; (+) strand; PAM type: NRG; PAM sequence: TAG
agcaacaaatatggagcatt

SEQ ID NO: 148152 - DNA, 20 bp, Artificial Sequence
  Description of Artificial Sequence: Synthetic oligonucleotide
  Target: LAMA2; (+) strand; PAM type: NRG; PAM sequence: CAG
caaatatggagcatttagaa

SEQ ID NO: 148153 - DNA, 20 bp, Artificial Sequence
  Description of Artificial Sequence: Synthetic oligonucleotide
  Target: LAMA2; (+) strand; PAM type: NRG; PAM sequence: TGG
ggagcatttagaacagtgtc

SEQ ID NO: 148154 - DNA, 20 bp, Artificial Sequence
  Description of Artificial Sequence: Synthetic oligonucleotide
  Target: LAMA2; (+) strand; PAM type: NRG; PAM sequence: GAG
ttagaacagtgtctggcatt

SEQ ID NO: 148155 - DNA, 20 bp, Artificial Sequence
  Description of Artificial Sequence: Synthetic oligonucleotide
  Target: LAMA2; (+) strand; PAM type: NRG; PAM sequence: TAG
cattgagaaaacctatgttt

SEQ ID NO: 148156 - DNA, 20 bp, Artificial Sequence
  Description of Artificial Sequence: Synthetic oligonucleotide
  Target: LAMA2; (+) strand; PAM type: NRG; PAM sequence: TAG
acctatgttttagttgttat

SEQ ID NO: 148157 - DNA, 20 bp, Artificial Sequence
  Description of Artificial Sequence: Synthetic oligonucleotide
  Target: LAMA2; (+) strand; PAM type: NRG; PAM sequence: AAG
ttagttgttattagtattaa

SEQ ID NO: 148158 - DNA, 20 bp, Artificial Sequence
  Description of Artificial Sequence: Synthetic oligonucleotide
  Target: LAMA2; (+) strand; PAM type: NRG; PAM sequence: AAG
ttgttattagtattaaaaga

SEQ ID NO: 148159 - DNA, 20 bp, Artificial Sequence
  Description of Artificial Sequence: Synthetic oligonucleotide
  Target: LAMA2; (+) strand; PAM type: NRG; PAM sequence: AGG
tgttattagtattaaaagaa

SEQ ID NO: 148160 - DNA, 20 bp, Artificial Sequence
  Description of Artificial Sequence: Synthetic oligonucleotide
  Target: LAMA2; (+) strand; PAM type: NRG; PAM sequence: CAG
tacatacttttctttaccca

SEQ ID NO: 148161 - DNA, 20 bp, Artificial Sequence
  Description of Artificial Sequence: Synthetic oligonucleotide
  Target: LAMA2; (+) strand; PAM type: NRG; PAM sequence: AGG
acatacttttctttacccac

SEQ ID NO: 148162 - DNA, 20 bp, Artificial Sequence
  Description of Artificial Sequence: Synthetic oligonucleotide
  Target: LAMA2; (+) strand; PAM type: NRG; PAM sequence: CAG
tttacccacaggctctaata

SEQ ID NO: 148163 - DNA, 20 bp, Artificial Sequence
  Description of Artificial Sequence: Synthetic oligonucleotide
  Target: LAMA2; (+) strand; PAM type: NRG; PAM sequence: TGG
ctaatacagaaatttccata

SEQ ID NO: 148164 - DNA, 20 bp, Artificial Sequence
  Description of Artificial Sequence: Synthetic oligonucleotide
  Target: LAMA2; (+) strand; PAM type: NRG; PAM sequence: TAG
atacagaaatttccatatgg

SEQ ID NO: 148165 - DNA, 20 bp, Artificial Sequence
  Description of Artificial Sequence: Synthetic oligonucleotide
  Target: LAMA2; (+) strand; PAM type: NRG; PAM sequence: CAG
catatggtagtaattcatta

SEQ ID NO: 148166 - DNA, 20 bp, Artificial Sequence
  Description of Artificial Sequence: Synthetic oligonucleotide
  Target: LAMA2; (+) strand; PAM type: NRG; PAM sequence: TAG
gtaattcattacagattacc

SEQ ID NO: 148167 - DNA, 20 bp, Artificial Sequence
  Description of Artificial Sequence: Synthetic oligonucleotide
  Target: LAMA2; (+) strand; PAM type: NRG; PAM sequence: CAG
ttacctagctgttaatcatt

SEQ ID NO: 148168 - DNA, 20 bp, Artificial Sequence
  Description of Artificial Sequence: Synthetic oligonucleotide
  Target: LAMA2; (+) strand; PAM type: NRG; PAM sequence: TAG
taatttattatttgttataa

SEQ ID NO: 148169 - DNA, 20 bp, Artificial Sequence
  Description of Artificial Sequence: Synthetic oligonucleotide
  Target: LAMA2; (+) strand; PAM type: NRG; PAM sequence: AGG
aatttattatttgttataat

SEQ ID NO: 148170 - DNA, 20 bp, Artificial Sequence
  Description of Artificial Sequence: Synthetic oligonucleotide
  Target: LAMA2; (+) strand; PAM type: NRG; PAM sequence: AAG
ttgttataataggaaattgt

SEQ ID NO: 148171 - DNA, 20 bp, Artificial Sequence
  Description of Artificial Sequence: Synthetic oligonucleotide
  Target: LAMA2; (+) strand; PAM type: NRG; PAM sequence: TAG
aaccatataaaattgcacgt

SEQ ID NO: 148172 - DNA, 20 bp, Artificial Sequence
  Description of Artificial Sequence: Synthetic oligonucleotide
  Target: LAMA2; (+) strand; PAM type: NRG; PAM sequence: TGG
cgttagtcaaaaccaaatat

SEQ ID NO: 148173 - DNA, 20 bp, Artificial Sequence
  Description of Artificial Sequence: Synthetic oligonucleotide
  Target: LAMA2; (+) strand; PAM type: NRG; PAM sequence: GAG
attggcaattgcatatgatt

SEQ ID NO: 148174 - DNA, 20 bp, Artificial Sequence
  Description of Artificial Sequence: Synthetic oligonucleotide
  Target: LAMA2; (+) strand; PAM type: NRG; PAM sequence: CAG
attaatacctccaatacatc

SEQ ID NO: 148175 - DNA, 20 bp, Artificial Sequence
  Description of Artificial Sequence: Synthetic oligonucleotide
  Target: LAMA2; (+) strand; PAM type: NRG; PAM sequence: TGG
caatacatccagatactttc

SEQ ID NO: 148176 - DNA, 20 bp, Artificial Sequence
  Description of Artificial Sequence: Synthetic oligonucleotide
  Target: LAMA2; (+) strand; PAM type: NRG; PAM sequence: TGG
gctaaatgtaatttcccgta

SEQ ID NO: 148177 - DNA, 20 bp, Artificial Sequence
  Description of Artificial Sequence: Synthetic oligonucleotide
  Target: LAMA2; (+) strand; PAM type: NRG; PAM sequence: AAG
taatttcccgtatggtataa

SEQ ID NO: 148178 - DNA, 20 bp, Artificial Sequence
  Description of Artificial Sequence: Synthetic oligonucleotide
  Target: LAMA2; (+) strand; PAM type: NRG; PAM sequence: TAG
tcccgtatggtataaaagtc

SEQ ID NO: 148179 - DNA, 20 bp, Artificial Sequence
  Description of Artificial Sequence: Synthetic oligonucleotide
  Target: LAMA2; (+) strand; PAM type: NRG; PAM sequence: AGG
cccgtatggtataaaagtct

SEQ ID NO: 148180 - DNA, 20 bp, Artificial Sequence
  Description of Artificial Sequence: Synthetic oligonucleotide
  Target: LAMA2; (+) strand; PAM type: NRG; PAM sequence: CGG
tatggtataaaagtctaggc

SEQ ID NO: 148181 - DNA, 20 bp, Artificial Sequence
  Description of Artificial Sequence: Synthetic oligonucleotide
  Target: LAMA2; (+) strand; PAM type: NRG; PAM sequence: GGG
atggtataaaagtctaggcc

SEQ ID NO: 148182 - DNA, 20 bp, Artificial Sequence
  Description of Artificial Sequence: Synthetic oligonucleotide
  Target: LAMA2; (+) strand; PAM type: NRG; PAM sequence: GGG
tggtataaaagtctaggccg

SEQ ID NO: 148183 - DNA, 20 bp, Artificial Sequence
  Description of Artificial Sequence: Synthetic oligonucleotide
  Target: LAMA2; (+) strand; PAM type: NRG; PAM sequence: GGG
ggtataaaagtctaggccgg

SEQ ID NO: 148184 - DNA, 20 bp, Artificial Sequence
  Description of Artificial Sequence: Synthetic oligonucleotide
  Target: LAMA2; (+) strand; PAM type: NRG; PAM sequence: CAG
ataaaagtctaggccggggg

SEQ ID NO: 148185 - DNA, 20 bp, Artificial Sequence
  Description of Artificial Sequence: Synthetic oligonucleotide
  Target: LAMA2; (+) strand; PAM type: NRG; PAM sequence: TGG
aaagtctaggccgggggcag

SEQ ID NO: 148186 - DNA, 20 bp, Artificial Sequence
  Description of Artificial Sequence: Synthetic oligonucleotide
  Target: LAMA2; (+) strand; PAM type: NRG; PAM sequence: CAG
gtggctcacgcctgtaattc

SEQ ID NO: 148187 - DNA, 20 bp, Artificial Sequence
  Description of Artificial Sequence: Synthetic oligonucleotide
  Target: LAMA2; (+) strand; PAM type: NRG; PAM sequence: GAG
gcctgtaattccagcacttt

SEQ ID NO: 148188 - DNA, 20 bp, Artificial Sequence
  Description of Artificial Sequence: Synthetic oligonucleotide
  Target: LAMA2; (+) strand; PAM type: NRG; PAM sequence: GAG
ctgtaattccagcactttga

SEQ ID NO: 148189 - DNA, 20 bp, Artificial Sequence
  Description of Artificial Sequence: Synthetic oligonucleotide
  Target: LAMA2; (+) strand; PAM type: NRG; PAM sequence: AGG
tgtaattccagcactttgag

SEQ ID NO: 148190 - DNA, 20 bp, Artificial Sequence
  Description of Artificial Sequence: Synthetic oligonucleotide
  Target: LAMA2; (+) strand; PAM type: NRG; PAM sequence: GAG
ttccagcactttgagaggct

SEQ ID NO: 148191 - DNA, 20 bp, Artificial Sequence
  Description of Artificial Sequence: Synthetic oligonucleotide
  Target: LAMA2; (+) strand; PAM type: NRG; PAM sequence: AGG
tccagcactttgagaggctg

SEQ ID NO: 148192 - DNA, 20 bp, Artificial Sequence
  Description of Artificial Sequence: Synthetic oligonucleotide
  Target: LAMA2; (+) strand; PAM type: NRG; PAM sequence: CGG
agcactttgagaggctgagg

SEQ ID NO: 148193 - DNA, 20 bp, Artificial Sequence
  Description of Artificial Sequence: Synthetic oligonucleotide
  Target: LAMA2; (+) strand; PAM type: NRG; PAM sequence: GGG
gcactttgagaggctgaggc

SEQ ID NO: 148194 - DNA, 20 bp, Artificial Sequence
  Description of Artificial Sequence: Synthetic oligonucleotide
  Target: LAMA2; (+) strand; PAM type: NRG; PAM sequence: TGG
ctttgagaggctgaggcggg

SEQ ID NO: 148195 - DNA, 20 bp, Artificial Sequence
  Description of Artificial Sequence: Synthetic oligonucleotide
  Target: LAMA2; (+) strand; PAM type: NRG; PAM sequence: TGG
aggctgaggcgggtggatca

SEQ ID NO: 148196 - DNA, 20 bp, Artificial Sequence
  Description of Artificial Sequence: Synthetic oligonucleotide
  Target: LAMA2; (+) strand; PAM type: NRG; PAM sequence: GGG
ggctgaggcgggtggatcat

SEQ ID NO: 148197 - DNA, 20 bp, Artificial Sequence
  Description of Artificial Sequence: Synthetic oligonucleotide
  Target: LAMA2; (+) strand; PAM type: NRG; PAM sequence: AAG
aggcgggtggatcatgggtc

SEQ ID NO: 148198 - DNA, 20 bp, Artificial Sequence
  Description of Artificial Sequence: Synthetic oligonucleotide
  Target: LAMA2; (+) strand; PAM type: NRG; PAM sequence: GAG
gcgggtggatcatgggtcaa

SEQ ID NO: 148199 - DNA, 20 bp, Artificial Sequence
  Description of Artificial Sequence: Synthetic oligonucleotide
  Target: LAMA2; (+) strand; PAM type: NRG; PAM sequence: AAG
ggatcatgggtcaagagttc

SEQ ID NO: 148200 - DNA, 20 bp, Artificial Sequence
  Description of Artificial Sequence: Synthetic oligonucleotide
  Target: LAMA2; (+) strand; PAM type: NRG; PAM sequence: CAG
atgggtcaagagttcaagac

SEQ ID NO: 148201 - DNA, 20 bp, Artificial Sequence
  Description of Artificial Sequence: Synthetic oligonucleotide
  Target: LAMA2; (+) strand; PAM type: NRG; PAM sequence: TGG
tcaagagttcaagaccagcc

SEQ ID NO: 148202 - DNA, 20 bp, Artificial Sequence
  Description of Artificial Sequence: Synthetic oligonucleotide
  Target: LAMA2; (+) strand; PAM type: NRG; PAM sequence: TGG
caagaccagcctggccaaca

SEQ ID NO: 148203 - DNA, 20 bp, Artificial Sequence
  Description of Artificial Sequence: Synthetic oligonucleotide
  Target: LAMA2; (+) strand; PAM type: NRG; PAM sequence: AAG
ccagcctggccaacatggtg

SEQ ID NO: 148204 - DNA, 20 bp, Artificial Sequence
  Description of Artificial Sequence: Synthetic oligonucleotide
  Target: LAMA2; (+) strand; PAM type: NRG; PAM sequence: CAG
ccccatctctactaaaaata

SEQ ID NO: 148205 - DNA, 20 bp, Artificial Sequence
  Description of Artificial Sequence: Synthetic oligonucleotide
  Target: LAMA2; (+) strand; PAM type: NRG; PAM sequence: TAG
tctactaaaaatacagaaat

SEQ ID NO: 148206 - DNA, 20 bp, Artificial Sequence
  Description of Artificial Sequence: Synthetic oligonucleotide
  Target: LAMA2; (+) strand; PAM type: NRG; PAM sequence: TGG
ctaaaaatacagaaattagc

SEQ ID NO: 148207 - DNA, 20 bp, Artificial Sequence
  Description of Artificial Sequence: Synthetic oligonucleotide
  Target: LAMA2; (+) strand; PAM type: NRG; PAM sequence: GGG
taaaaatacagaaattagct

SEQ ID NO: 148208 - DNA, 20 bp, Artificial Sequence
  Description of Artificial Sequence: Synthetic oligonucleotide
  Target: LAMA2; (+) strand; PAM type: NRG; PAM sequence: TGG
atacagaaattagctgggtg

SEQ ID NO: 148209 - DNA, 20 bp, Artificial Sequence
  Description of Artificial Sequence: Synthetic oligonucleotide
  Target: LAMA2; (+) strand; PAM type: NRG; PAM sequence: TGG
cagaaattagctgggtgtgg

SEQ ID NO: 148210 - DNA, 20 bp, Artificial Sequence
  Description of Artificial Sequence: Synthetic oligonucleotide
  Target: LAMA2; (+) strand; PAM type: NRG; PAM sequence: CAG
tggtgcatgcctgttgtccc

SEQ ID NO: 148211 - DNA, 20 bp, Artificial Sequence
  Description of Artificial Sequence: Synthetic oligonucleotide
  Target: LAMA2; (+) strand; PAM type: NRG; PAM sequence: CGG
gcctgttgtccccagctact

SEQ ID NO: 148212 - DNA, 20 bp, Artificial Sequence
  Description of Artificial Sequence: Synthetic oligonucleotide
  Target: LAMA2; (+) strand; PAM type: NRG; PAM sequence: GGG
cctgttgtccccagctactc

SEQ ID NO: 148213 - DNA, 20 bp, Artificial Sequence
  Description of Artificial Sequence: Synthetic oligonucleotide
  Target: LAMA2; (+) strand; PAM type: NRG; PAM sequence: GAG
tgttgtccccagctactcgg

SEQ ID NO: 148214 - DNA, 20 bp, Artificial Sequence
  Description of Artificial Sequence: Synthetic oligonucleotide
  Target: LAMA2; (+) strand; PAM type: NRG; PAM sequence: AGG
gttgtccccagctactcggg

SEQ ID NO: 148215 - DNA, 20 bp, Artificial Sequence
  Description of Artificial Sequence: Synthetic oligonucleotide
  Target: LAMA2; (+) strand; PAM type: NRG; PAM sequence: GAG
ccccagctactcgggaggct

SEQ ID NO: 148216 - DNA, 20 bp, Artificial Sequence
  Description of Artificial Sequence: Synthetic oligonucleotide
  Target: LAMA2; (+) strand; PAM type: NRG; PAM sequence: CAG
agctactcgggaggctgaga

SEQ ID NO: 148217 - DNA, 20 bp, Artificial Sequence
  Description of Artificial Sequence: Synthetic oligonucleotide
  Target: LAMA2; (+) strand; PAM type: NRG; PAM sequence: AGG
gctactcgggaggctgagac

SEQ ID NO: 148218 - DNA, 20 bp, Artificial Sequence
  Description of Artificial Sequence: Synthetic oligonucleotide
  Target: LAMA2; (+) strand; PAM type: NRG; PAM sequence: GAG
tactcgggaggctgagacag

SEQ ID NO: 148219 - DNA, 20 bp, Artificial Sequence
  Description of Artificial Sequence: Synthetic oligonucleotide
  Target: LAMA2; (+) strand; PAM type: NRG; PAM sequence: AGG
actcgggaggctgagacagg

SEQ ID NO: 148220 - DNA, 20 bp, Artificial Sequence
  Description of Artificial Sequence: Synthetic oligonucleotide
  Target: LAMA2; (+) strand; PAM type: NRG; PAM sequence: TGG
acaggaggattgcttgaacc

SEQ ID NO: 148221 - DNA, 20 bp, Artificial Sequence
  Description of Artificial Sequence: Synthetic oligonucleotide
  Target: LAMA2; (+) strand; PAM type: NRG; PAM sequence: AAG
ggaggattgcttgaacctgg

SEQ ID NO: 148222 - DNA, 20 bp, Artificial Sequence
  Description of Artificial Sequence: Synthetic oligonucleotide
  Target: LAMA2; (+) strand; PAM type: NRG; PAM sequence: AGG
gaggattgcttgaacctgga

SEQ ID NO: 148223 - DNA, 20 bp, Artificial Sequence
  Description of Artificial Sequence: Synthetic oligonucleotide
  Target: LAMA2; (+) strand; PAM type: NRG; PAM sequence: CAG
gattgcttgaacctggaagg

SEQ ID NO: 148224 - DNA, 20 bp, Artificial Sequence
  Description of Artificial Sequence: Synthetic oligonucleotide
  Target: LAMA2; (+) strand; PAM type: NRG; PAM sequence: GAG
ttgcttgaacctggaaggca

SEQ ID NO: 148225 - DNA, 20 bp, Artificial Sequence
  Description of Artificial Sequence: Synthetic oligonucleotide
  Target: LAMA2; (+) strand; PAM type: NRG; PAM sequence: AGG
tgcttgaacctggaaggcag

SEQ ID NO: 148226 - DNA, 20 bp, Artificial Sequence
  Description of Artificial Sequence: Synthetic oligonucleotide
  Target: LAMA2; (+) strand; PAM type: NRG; PAM sequence: CAG
aacctggaaggcagaggttg

SEQ ID NO: 148227 - DNA, 20 bp, Artificial Sequence
  Description of Artificial Sequence: Synthetic oligonucleotide
  Target: LAMA2; (+) strand; PAM type: NRG; PAM sequence: GAG
tggaaggcagaggttgcagt

SEQ ID NO: 148228 - DNA, 20 bp, Artificial Sequence
  Description of Artificial Sequence: Synthetic oligonucleotide
  Target: LAMA2; (+) strand; PAM type: NRG; PAM sequence: GAG
ggcagaggttgcagtgagcc

SEQ ID NO: 148229 - DNA, 20 bp, Artificial Sequence
  Description of Artificial Sequence: Synthetic oligonucleotide
  Target: LAMA2; (+) strand; PAM type: NRG; PAM sequence: CAG
gatcgtgccactctgcactc

SEQ ID NO: 148230 - DNA, 20 bp, Artificial Sequence
  Description of Artificial Sequence: Synthetic oligonucleotide
  Target: LAMA2; (+) strand; PAM type: NRG; PAM sequence: TGG
tgccactctgcactccagcc

SEQ ID NO: 148231 - DNA, 20 bp, Artificial Sequence
  Description of Artificial Sequence: Synthetic oligonucleotide
  Target: LAMA2; (+) strand; PAM type: NRG; PAM sequence: GGG
gccactctgcactccagcct

SEQ ID NO: 148232 - DNA, 20 bp, Artificial Sequence
  Description of Artificial Sequence: Synthetic oligonucleotide
  Target: LAMA2; (+) strand; PAM type: NRG; PAM sequence: CAG
ctgcactccagcctgggcga

SEQ ID NO: 148233 - DNA, 20 bp, Artificial Sequence
  Description of Artificial Sequence: Synthetic oligonucleotide
  Target: LAMA2; (+) strand; PAM type: NRG; PAM sequence: GAG
gcactccagcctgggcgaca

SEQ ID NO: 148234 - DNA, 20 bp, Artificial Sequence
  Description of Artificial Sequence: Synthetic oligonucleotide
  Target: LAMA2; (+) strand; PAM type: NRG; PAM sequence: GAG
tccagcctgggcgacagagt

SEQ ID NO: 148235 - DNA, 20 bp, Artificial Sequence
  Description of Artificial Sequence: Synthetic oligonucleotide
  Target: LAMA2; (+) strand; PAM type: NRG; PAM sequence: CAG
aaaaaatctattatgtataa

SEQ ID NO: 148236 - DNA, 20 bp, Artificial Sequence
  Description of Artificial Sequence: Synthetic oligonucleotide
  Target: LAMA2; (+) strand; PAM type: NRG; PAM sequence: CAG
taatttatttttccttaatg

SEQ ID NO: 148237 - DNA, 20 bp, Artificial Sequence
  Description of Artificial Sequence: Synthetic oligonucleotide
  Target: LAMA2; (+) strand; PAM type: NRG; PAM sequence: TGG
aatgcagcatgcaattgtca

SEQ ID NO: 148238 - DNA, 20 bp, Artificial Sequence
  Description of Artificial Sequence: Synthetic oligonucleotide
  Target: LAMA2; (+) strand; PAM type: NRG; PAM sequence: AAG
agcatgcaattgtcatggaa

SEQ ID NO: 148239 - DNA, 20 bp, Artificial Sequence
  Description of Artificial Sequence: Synthetic oligonucleotide
  Target: LAMA2; (+) strand; PAM type: NRG; PAM sequence: AAG
caattgtcatggaaaagctg

SEQ ID NO: 148240 - DNA, 20 bp, Artificial Sequence
  Description of Artificial Sequence: Synthetic oligonucleotide
  Target: LAMA2; (+) strand; PAM type: NRG; PAM sequence: CAG
tattatgatgaaaatgttgc

SEQ ID NO: 148241 - DNA, 20 bp, Artificial Sequence
  Description of Artificial Sequence: Synthetic oligonucleotide
  Target: LAMA2; (+) strand; PAM type: NRG; PAM sequence: AAG
tatgatgaaaatgttgccag

SEQ ID NO: 148242 - DNA, 20 bp, Artificial Sequence
  Description of Artificial Sequence: Synthetic oligonucleotide
  Target: LAMA2; (+) strand; PAM type: NRG; PAM sequence: GAG
aatgttgccagaagaaatct

SEQ ID NO: 148243 - DNA, 20 bp, Artificial Sequence
  Description of Artificial Sequence: Synthetic oligonucleotide
  Target: LAMA2; (+) strand; PAM type: NRG; PAM sequence: TGG
aatctgagtttgaatatacg

SEQ ID NO: 148244 - DNA, 20 bp, Artificial Sequence
  Description of Artificial Sequence: Synthetic oligonucleotide
  Target: LAMA2; (+) strand; PAM type: NRG; PAM sequence: AAG
tgagtttgaatatacgtgga

SEQ ID NO: 148245 - DNA, 20 bp, Artificial Sequence
  Description of Artificial Sequence: Synthetic oligonucleotide
  Target: LAMA2; (+) strand; PAM type: NRG; PAM sequence: TGG
aatatacgtggaaagtacat

SEQ ID NO: 148246 - DNA, 20 bp, Artificial Sequence
  Description of Artificial Sequence: Synthetic oligonucleotide
  Target: LAMA2; (+) strand; PAM type: NRG; PAM sequence: GAG
tatacgtggaaagtacattg

SEQ ID NO: 148247 - DNA, 20 bp, Artificial Sequence
  Description of Artificial Sequence: Synthetic oligonucleotide
  Target: LAMA2; (+) strand; PAM type: NRG; PAM sequence: AGG
atacgtggaaagtacattgg

SEQ ID NO: 148248 - DNA, 20 bp, Artificial Sequence
  Description of Artificial Sequence: Synthetic oligonucleotide
  Target: LAMA2; (+) strand; PAM type: NRG; PAM sequence: GGG
tacgtggaaagtacattgga

SEQ ID NO: 148249 - DNA, 20 bp, Artificial Sequence
  Description of Artificial Sequence: Synthetic oligonucleotide
  Target: LAMA2; (+) strand; PAM type: NRG; PAM sequence: GGG
acgtggaaagtacattggag

SEQ ID NO: 148250 - DNA, 20 bp, Artificial Sequence
  Description of Artificial Sequence: Synthetic oligonucleotide
  Target: LAMA2; (+) strand; PAM type: NRG; PAM sequence: GGG
cgtggaaagtacattggagg

SEQ ID NO: 148251 - DNA, 20 bp, Artificial Sequence
  Description of Artificial Sequence: Synthetic oligonucleotide
  Target: LAMA2; (+) strand; PAM type: NRG; PAM sequence: TGG
aattgtacccaaaacactgc

SEQ ID NO: 148252 - DNA, 20 bp, Artificial Sequence
  Description of Artificial Sequence: Synthetic oligonucleotide
  Target: LAMA2; (+) strand; PAM type: NRG; PAM sequence: GAG
acactgctggtataaactgc

SEQ ID NO: 148253 - DNA, 20 bp, Artificial Sequence
  Description of Artificial Sequence: Synthetic oligonucleotide
  Target: LAMA2; (+) strand; PAM type: NRG; PAM sequence: TGG
aactgcgagacatgtactga

SEQ ID NO: 148254 - DNA, 20 bp, Artificial Sequence
  Description of Artificial Sequence: Synthetic oligonucleotide
  Target: LAMA2; (+) strand; PAM type: NRG; PAM sequence: CAG
acatgtactgatggcttctt

SEQ ID NO: 148255 - DNA, 20 bp, Artificial Sequence
  Description of Artificial Sequence: Synthetic oligonucleotide
  Target: LAMA2; (+) strand; PAM type: NRG; PAM sequence: AAG
tgatggcttcttcagaccca

SEQ ID NO: 148256 - DNA, 20 bp, Artificial Sequence
  Description of Artificial Sequence: Synthetic oligonucleotide
  Target: LAMA2; (+) strand; PAM type: NRG; PAM sequence: AGG
gatggcttcttcagacccaa

SEQ ID NO: 148257 - DNA, 20 bp, Artificial Sequence
  Description of Artificial Sequence: Synthetic oligonucleotide
  Target: LAMA2; (+) strand; PAM type: NRG; PAM sequence: GGG
atggcttcttcagacccaaa

SEQ ID NO: 148258 - DNA, 20 bp, Artificial Sequence
  Description of Artificial Sequence: Synthetic oligonucleotide
  Target: LAMA2; (+) strand; PAM type: NRG; PAM sequence: GGG
tggcttcttcagacccaaag

SEQ ID NO: 148259 - DNA, 20 bp, Artificial Sequence
  Description of Artificial Sequence: Synthetic oligonucleotide
  Target: LAMA2; (+) strand; PAM type: NRG; PAM sequence: AAG
tcttcagacccaaaggggta

SEQ ID NO: 148260 - DNA, 20 bp, Artificial Sequence
  Description of Artificial Sequence: Synthetic oligonucleotide
  Target: LAMA2; (+) strand; PAM type: NRG; PAM sequence: AAG
agtatgctttttctttcata

SEQ ID NO: 148261 - DNA, 20 bp, Artificial Sequence
  Description of Artificial Sequence: Synthetic oligonucleotide
  Target: LAMA2; (+) strand; PAM type: NRG; PAM sequence: GAG
tatgctttttctttcataaa

SEQ ID NO: 148262 - DNA, 20 bp, Artificial Sequence
  Description of Artificial Sequence: Synthetic oligonucleotide
  Target: LAMA2; (+) strand; PAM type: NRG; PAM sequence: AAG
caaaaaaataataattttga

SEQ ID NO: 148263 - DNA, 20 bp, Artificial Sequence
  Description of Artificial Sequence: Synthetic oligonucleotide
  Target: LAMA2; (+) strand; PAM type: NRG; PAM sequence: CAG
attttgaaagcttctgtaaa

SEQ ID NO: 148264 - DNA, 20 bp, Artificial Sequence
  Description of Artificial Sequence: Synthetic oligonucleotide
  Target: LAMA2; (+) strand; PAM type: NRG; PAM sequence: AAG
acagttgaacttcaaattaa

SEQ ID NO: 148265 - DNA, 20 bp, Artificial Sequence
  Description of Artificial Sequence: Synthetic oligonucleotide
  Target: LAMA2; (+) strand; PAM type: NRG; PAM sequence: AGG
cagttgaacttcaaattaaa

SEQ ID NO: 148266 - DNA, 20 bp, Artificial Sequence
  Description of Artificial Sequence: Synthetic oligonucleotide
  Target: LAMA2; (+) strand; PAM type: NRG; PAM sequence: AAG
tgaacttcaaattaaaaggt

SEQ ID NO: 148267 - DNA, 20 bp, Artificial Sequence
  Description of Artificial Sequence: Synthetic oligonucleotide
  Target: LAMA2; (+) strand; PAM type: NRG; PAM sequence: TAG
acttcaaattaaaaggtaag

SEQ ID NO: 148268 - DNA, 20 bp, Artificial Sequence
  Description of Artificial Sequence: Synthetic oligonucleotide
  Target: LAMA2; (+) strand; PAM type: NRG; PAM sequence: AGG
cttcaaattaaaaggtaagt

SEQ ID NO: 148269 - DNA, 20 bp, Artificial Sequence
  Description of Artificial Sequence: Synthetic oligonucleotide
  Target: LAMA2; (+) strand; PAM type: NRG; PAM sequence: TAG
aggtaagtaggaacatttcg

SEQ ID NO: 148270 - DNA, 20 bp, Artificial Sequence
  Description of Artificial Sequence: Synthetic oligonucleotide
  Target: LAMA2; (+) strand; PAM type: NRG; PAM sequence: GAG
tgaaactgacctaaatcttt

SEQ ID NO: 148271 - DNA, 20 bp, Artificial Sequence
  Description of Artificial Sequence: Synthetic oligonucleotide
  Target: LAMA2; (+) strand; PAM type: NRG; PAM sequence: AGG
gaaactgacctaaatctttg

SEQ ID NO: 148272 - DNA, 20 bp, Artificial Sequence
  Description of Artificial Sequence: Synthetic oligonucleotide
  Target: LAMA2; (+) strand; PAM type: NRG; PAM sequence: AAG
acctaaatctttgaggatgt

SEQ ID NO: 148273 - DNA, 20 bp, Artificial Sequence
  Description of Artificial Sequence: Synthetic oligonucleotide
  Target: LAMA2; (+) strand; PAM type: NRG; PAM sequence: CAG
ataaaacttttccatcactc

SEQ ID NO: 148274 - DNA, 20 bp, Artificial Sequence
  Description of Artificial Sequence: Synthetic oligonucleotide
  Target: LAMA2; (+) strand; PAM type: NRG; PAM sequence: AAG
aacttttccatcactccaga

SEQ ID NO: 148275 - DNA, 20 bp, Artificial Sequence
  Description of Artificial Sequence: Synthetic oligonucleotide
  Target: LAMA2; (+) strand; PAM type: NRG; PAM sequence: TGG
cactccagaaagttttatca

SEQ ID NO: 148276 - DNA, 20 bp, Artificial Sequence
  Description of Artificial Sequence: Synthetic oligonucleotide
  Target: LAMA2; (+) strand; PAM type: NRG; PAM sequence: CAG
agttttatcatggctccttc

SEQ ID NO: 148277 - DNA, 20 bp, Artificial Sequence
  Description of Artificial Sequence: Synthetic oligonucleotide
  Target: LAMA2; (+) strand; PAM type: NRG; PAM sequence: AAG
tatcatggctccttccagtc

SEQ ID NO: 148278 - DNA, 20 bp, Artificial Sequence
  Description of Artificial Sequence: Synthetic oligonucleotide
  Target: LAMA2; (+) strand; PAM type: NRG; PAM sequence: AGG
atcatggctccttccagtca

SEQ ID NO: 148279 - DNA, 20 bp, Artificial Sequence
  Description of Artificial Sequence: Synthetic oligonucleotide
  Target: LAMA2; (+) strand; PAM type: NRG; PAM sequence: GAG
catggctccttccagtcaag

SEQ ID NO: 148280 - DNA, 20 bp, Artificial Sequence
  Description of Artificial Sequence: Synthetic oligonucleotide
  Target: LAMA2; (+) strand; PAM type: NRG; PAM sequence: TGG
ggctccttccagtcaaggag

SEQ ID NO: 148281 - DNA, 20 bp, Artificial Sequence
  Description of Artificial Sequence: Synthetic oligonucleotide
  Target: LAMA2; (+) strand; PAM type: NRG; PAM sequence: TAG
ccagtcaaggagtggacccc

SEQ ID NO: 148282 - DNA, 20 bp, Artificial Sequence
  Description of Artificial Sequence: Synthetic oligonucleotide
  Target: LAMA2; (+) strand; PAM type: NRG; PAM sequence: AGG
cagtcaaggagtggacccct

SEQ ID NO: 148283 - DNA, 20 bp, Artificial Sequence
  Description of Artificial Sequence: Synthetic oligonucleotide
  Target: LAMA2; (+) strand; PAM type: NRG; PAM sequence: TAG
gcaaactctgttctgatttt

SEQ ID NO: 148284 - DNA, 20 bp, Artificial Sequence
  Description of Artificial Sequence: Synthetic oligonucleotide
  Target: LAMA2; (+) strand; PAM type: NRG; PAM sequence: TAG
ctgatttttagaacgtaaat

SEQ ID NO: 148285 - DNA, 20 bp, Artificial Sequence
  Description of Artificial Sequence: Synthetic oligonucleotide
  Target: LAMA2; (+) strand; PAM type: NRG; PAM sequence: TAG
cgtaaattagttgtgcctct

SEQ ID NO: 148286 - DNA, 20 bp, Artificial Sequence
  Description of Artificial Sequence: Synthetic oligonucleotide
  Target: LAMA2; (+) strand; PAM type: NRG; PAM sequence: GAG
taaattagttgtgcctctta

SEQ ID NO: 148287 - DNA, 20 bp, Artificial Sequence
  Description of Artificial Sequence: Synthetic oligonucleotide
  Target: LAMA2; (+) strand; PAM type: NRG; PAM sequence: CAG
ttcataaaaatgaaatcata

SEQ ID NO: 148288 - DNA, 20 bp, Artificial Sequence
  Description of Artificial Sequence: Synthetic oligonucleotide
  Target: LAMA2; (+) strand; PAM type: NRG; PAM sequence: TAG
tgaaatcatacagtacatac

SEQ ID NO: 148289 - DNA, 20 bp, Artificial Sequence
  Description of Artificial Sequence: Synthetic oligonucleotide
  Target: LAMA2; (+) strand; PAM type: NRG; PAM sequence: GAG
atcatacagtacatactagt

SEQ ID NO: 148290 - DNA, 20 bp, Artificial Sequence
  Description of Artificial Sequence: Synthetic oligonucleotide
  Target: LAMA2; (+) strand; PAM type: NRG; PAM sequence: AAG
ttcactcgacataatatgtt

SEQ ID NO: 148291 - DNA, 20 bp, Artificial Sequence
  Description of Artificial Sequence: Synthetic oligonucleotide
  Target: LAMA2; (+) strand; PAM type: NRG; PAM sequence: CAG
tatccatgttgtttgtgcat

SEQ ID NO: 148292 - DNA, 20 bp, Artificial Sequence
  Description of Artificial Sequence: Synthetic oligonucleotide
  Target: LAMA2; (+) strand; PAM type: NRG; PAM sequence: TAG
ccatgttgtttgtgcatcag

SEQ ID NO: 148293 - DNA, 20 bp, Artificial Sequence
  Description of Artificial Sequence: Synthetic oligonucleotide
  Target: LAMA2; (+) strand; PAM type: NRG; PAM sequence: AAG
agtagttctttttcttttga

SEQ ID NO: 148294 - DNA, 20 bp, Artificial Sequence
  Description of Artificial Sequence: Synthetic oligonucleotide
  Target: LAMA2; (+) strand; PAM type: NRG; PAM sequence: GAG
ttcttttgaaagaaattgct

SEQ ID NO: 148295 - DNA, 20 bp, Artificial Sequence
  Description of Artificial Sequence: Synthetic oligonucleotide
  Target: LAMA2; (+) strand; PAM type: NRG; PAM sequence: TAG
ttttgaaagaaattgctgag

SEQ ID NO: 148296 - DNA, 20 bp, Artificial Sequence
  Description of Artificial Sequence: Synthetic oligonucleotide
  Target: LAMA2; (+) strand; PAM type: NRG; PAM sequence: TAG
taaatccattctcctgttga

SEQ ID NO: 148297 - DNA, 20 bp, Artificial Sequence
  Description of Artificial Sequence: Synthetic oligonucleotide
  Target: LAMA2; (+) strand; PAM type: NRG; PAM sequence: TAG
attctcctgttgatagaaat

SEQ ID NO: 148298 - DNA, 20 bp, Artificial Sequence
  Description of Artificial Sequence: Synthetic oligonucleotide
  Target: LAMA2; (+) strand; PAM type: NRG; PAM sequence: AGG
ttctcctgttgatagaaatt

SEQ ID NO: 148299 - DNA, 20 bp, Artificial Sequence
  Description of Artificial Sequence: Synthetic oligonucleotide
  Target: LAMA2; (+) strand; PAM type: NRG; PAM sequence: CAG
atagaaattaggatcatttc

SEQ ID NO: 148300 - DNA, 20 bp, Artificial Sequence
  Description of Artificial Sequence: Synthetic oligonucleotide
  Target: LAMA2; (+) strand; PAM type: NRG; PAM sequence: TAG
attaggatcatttccagttt

SEQ ID NO: 148301 - DNA, 20 bp, Artificial Sequence
  Description of Artificial Sequence: Synthetic oligonucleotide
  Target: LAMA2; (+) strand; PAM type: NRG; PAM sequence: TAG
gatcatttccagttttagct

SEQ ID NO: 148302 - DNA, 20 bp, Artificial Sequence
  Description of Artificial Sequence: Synthetic oligonucleotide
  Target: LAMA2; (+) strand; PAM type: NRG; PAM sequence: TAG
tcctacaaataattttatac

SEQ ID NO: 148303 - DNA, 20 bp, Artificial Sequence
  Description of Artificial Sequence: Synthetic oligonucleotide
  Target: LAMA2; (+) strand; PAM type: NRG; PAM sequence: TAG
attttatactagttatttta

SEQ ID NO: 148304 - DNA, 20 bp, Artificial Sequence
  Description of Artificial Sequence: Synthetic oligonucleotide
  Target: LAMA2; (+) strand; PAM type: NRG; PAM sequence: TAG
atttaccttgtgtaaatact

SEQ ID NO: 148305 - DNA, 20 bp, Artificial Sequence
  Description of Artificial Sequence: Synthetic oligonucleotide
  Target: LAMA2; (+) strand; PAM type: NRG; PAM sequence: AGG
tttaccttgtgtaaatactt

SEQ ID NO: 148306 - DNA, 20 bp, Artificial Sequence
  Description of Artificial Sequence: Synthetic oligonucleotide
  Target: LAMA2; (+) strand; PAM type: NRG; PAM sequence: TAG
cttgtgtaaatacttaggaa

SEQ ID NO: 148307 - DNA, 20 bp, Artificial Sequence
  Description of Artificial Sequence: Synthetic oligonucleotide
  Target: LAMA2; (+) strand; PAM type: NRG; PAM sequence: AAG
tgtaaatacttaggaataga

SEQ ID NO: 148308 - DNA, 20 bp, Artificial Sequence
  Description of Artificial Sequence: Synthetic oligonucleotide
  Target: LAMA2; (+) strand; PAM type: NRG; PAM sequence: TAG
ggaatagaaagcttttttca

SEQ ID NO: 148309 - DNA, 20 bp, Artificial Sequence
  Description of Artificial Sequence: Synthetic oligonucleotide
  Target: LAMA2; (+) strand; PAM type: NRG; PAM sequence: AGG
gaatagaaagcttttttcat

SEQ ID NO: 148310 - DNA, 20 bp, Artificial Sequence
  Description of Artificial Sequence: Synthetic oligonucleotide
  Target: LAMA2; (+) strand; PAM type: NRG; PAM sequence: TAG
agaaagcttttttcatagga

SEQ ID NO: 148311 - DNA, 20 bp, Artificial Sequence
  Description of Artificial Sequence: Synthetic oligonucleotide
  Target: LAMA2; (+) strand; PAM type: NRG; PAM sequence: AGG
gaaagcttttttcataggat

SEQ ID NO: 148312 - DNA, 20 bp, Artificial Sequence
  Description of Artificial Sequence: Synthetic oligonucleotide
  Target: LAMA2; (+) strand; PAM type: NRG; PAM sequence: TAG
agcttttttcataggatagg

SEQ ID NO: 148313 - DNA, 20 bp, Artificial Sequence
  Description of Artificial Sequence: Synthetic oligonucleotide
  Target: LAMA2; (+) strand; PAM type: NRG; PAM sequence: AAG
aggtagatgcttaactttat

SEQ ID NO: 148314 - DNA, 20 bp, Artificial Sequence
  Description of Artificial Sequence: Synthetic oligonucleotide
  Target: LAMA2; (+) strand; PAM type: NRG; PAM sequence: TAG
ccgtcaacattttgccaaat

SEQ ID NO: 148315 - DNA, 20 bp, Artificial Sequence
  Description of Artificial Sequence: Synthetic oligonucleotide
  Target: LAMA2; (+) strand; PAM type: NRG; PAM sequence: AAG
tgtataaaatgttcaccaaa

SEQ ID NO: 148316 - DNA, 20 bp, Artificial Sequence
  Description of Artificial Sequence: Synthetic oligonucleotide
  Target: LAMA2; (+) strand; PAM type: NRG; PAM sequence: GAG
tgttcaccaaaaagttatat

SEQ ID NO: 148317 - DNA, 20 bp, Artificial Sequence
  Description of Artificial Sequence: Synthetic oligonucleotide
  Target: LAMA2; (+) strand; PAM type: NRG; PAM sequence: CAG
ccaaaaagttatatgagttt

SEQ ID NO: 148318 - DNA, 20 bp, Artificial Sequence
  Description of Artificial Sequence: Synthetic oligonucleotide
  Target: LAMA2; (+) strand; PAM type: NRG; PAM sequence: TGG
tttgatgttgactatctttt

SEQ ID NO: 148319 - DNA, 20 bp, Artificial Sequence
  Description of Artificial Sequence: Synthetic oligonucleotide
  Target: LAMA2; (+) strand; PAM type: NRG; PAM sequence: TAG
ttgactatctttttggattt

SEQ ID NO: 148320 - DNA, 20 bp, Artificial Sequence
  Description of Artificial Sequence: Synthetic oligonucleotide
  Target: LAMA2; (+) strand; PAM type: NRG; PAM sequence: TAG
ctttttggattttagtcatc

SEQ ID NO: 148321 - DNA, 20 bp, Artificial Sequence
  Description of Artificial Sequence: Synthetic oligonucleotide
  Target: LAMA2; (+) strand; PAM type: NRG; PAM sequence: TGG
tttggattttagtcatctag

SEQ ID NO: 148322 - DNA, 20 bp, Artificial Sequence
  Description of Artificial Sequence: Synthetic oligonucleotide
  Target: LAMA2; (+) strand; PAM type: NRG; PAM sequence: GGG
ttggattttagtcatctagt

SEQ ID NO: 148323 - DNA, 20 bp, Artificial Sequence
  Description of Artificial Sequence: Synthetic oligonucleotide
  Target: LAMA2; (+) strand; PAM type: NRG; PAM sequence: TGG
gtcatctagtgggtgtgaaa

SEQ ID NO: 148324 - DNA, 20 bp, Artificial Sequence
  Description of Artificial Sequence: Synthetic oligonucleotide
  Target: LAMA2; (+) strand; PAM type: NRG; PAM sequence: TGG
tgtgaaatggcatctgatta

SEQ ID NO: 148325 - DNA, 20 bp, Artificial Sequence
  Description of Artificial Sequence: Synthetic oligonucleotide
  Target: LAMA2; (+) strand; PAM type: NRG; PAM sequence: AAG
atggatttaattttaatcgt

SEQ ID NO: 148326 - DNA, 20 bp, Artificial Sequence
  Description of Artificial Sequence: Synthetic oligonucleotide
  Target: LAMA2; (+) strand; PAM type: NRG; PAM sequence: AGG
tggatttaattttaatcgta

SEQ ID NO: 148327 - DNA, 20 bp, Artificial Sequence
  Description of Artificial Sequence: Synthetic oligonucleotide
  Target: LAMA2; (+) strand; PAM type: NRG; PAM sequence: GGG
ggatttaattttaatcgtaa

SEQ ID NO: 148328 - DNA, 20 bp, Artificial Sequence
  Description of Artificial Sequence: Synthetic oligonucleotide
  Target: LAMA2; (+) strand; PAM type: NRG; PAM sequence: AAG
ttcctgtatcttctcttatg

SEQ ID NO: 148329 - DNA, 20 bp, Artificial Sequence
  Description of Artificial Sequence: Synthetic oligonucleotide
  Target: LAMA2; (+) strand; PAM type: NRG; PAM sequence: TAG
ctgtatcttctcttatgaag

SEQ ID NO: 148330 - DNA, 20 bp, Artificial Sequence
  Description of Artificial Sequence: Synthetic oligonucleotide
  Target: LAMA2; (+) strand; PAM type: NRG; PAM sequence: AAG
tcttatgaagtagatgttca

SEQ ID NO: 148331 - DNA, 20 bp, Artificial Sequence
  Description of Artificial Sequence: Synthetic oligonucleotide
  Target: LAMA2; (+) strand; PAM type: NRG; PAM sequence: TAG
aaaaccaaaattttaactta

SEQ ID NO: 148332 - DNA, 20 bp, Artificial Sequence
  Description of Artificial Sequence: Synthetic oligonucleotide
  Target: LAMA2; (+) strand; PAM type: NRG; PAM sequence: GAG
aaccaaaattttaacttata

SEQ ID NO: 148333 - DNA, 20 bp, Artificial Sequence
  Description of Artificial Sequence: Synthetic oligonucleotide
  Target: LAMA2; (+) strand; PAM type: NRG; PAM sequence: AAG
atagagctattacccatatc

SEQ ID NO: 148334 - DNA, 20 bp, Artificial Sequence
  Description of Artificial Sequence: Synthetic oligonucleotide
  Target: LAMA2; (+) strand; PAM type: NRG; PAM sequence: TGG
atcaagtaaatgtttgtgtg

SEQ ID NO: 148335 - DNA, 20 bp, Artificial Sequence
  Description of Artificial Sequence: Synthetic oligonucleotide
  Target: LAMA2; (+) strand; PAM type: NRG; PAM sequence: AAG
tgtttgtgtgtggtgtgaat

SEQ ID NO: 148336 - DNA, 20 bp, Artificial Sequence
  Description of Artificial Sequence: Synthetic oligonucleotide
  Target: LAMA2; (+) strand; PAM type: NRG; PAM sequence: CAG
gtgtggtgtgaataagtaac

SEQ ID NO: 148337 - DNA, 20 bp, Artificial Sequence
  Description of Artificial Sequence: Synthetic oligonucleotide
  Target: LAMA2; (+) strand; PAM type: NRG; PAM sequence: TGG
aataagtaaccagatttata

SEQ ID NO: 148338 - DNA, 20 bp, Artificial Sequence
  Description of Artificial Sequence: Synthetic oligonucleotide
  Target: LAMA2; (+) strand; PAM type: NRG; PAM sequence: AAG
agatttatatggttaacctg

SEQ ID NO: 148339 - DNA, 20 bp, Artificial Sequence
  Description of Artificial Sequence: Synthetic oligonucleotide
  Target: LAMA2; (+) strand; PAM type: NRG; PAM sequence: TAG
atatggttaacctgaagttc

SEQ ID NO: 148340 - DNA, 20 bp, Artificial Sequence
  Description of Artificial Sequence: Synthetic oligonucleotide
  Target: LAMA2; (+) strand; PAM type: NRG; PAM sequence: TGG
aatcaattgatcatattaca

SEQ ID NO: 148341 - DNA, 20 bp, Artificial Sequence
  Description of Artificial Sequence: Synthetic oligonucleotide
  Target: LAMA2; (+) strand; PAM type: NRG; PAM sequence: TAG
atattacatggatcaatttc

SEQ ID NO: 148342 - DNA, 20 bp, Artificial Sequence
  Description of Artificial Sequence: Synthetic oligonucleotide
  Target: LAMA2; (+) strand; PAM type: NRG; PAM sequence: CAG
tggatcaatttctagaacct

SEQ ID NO: 148343 - DNA, 20 bp, Artificial Sequence
  Description of Artificial Sequence: Synthetic oligonucleotide
  Target: LAMA2; (+) strand; PAM type: NRG; PAM sequence: TAG
cctcagttatctatttttcc

SEQ ID NO: 148344 - DNA, 20 bp, Artificial Sequence
  Description of Artificial Sequence: Synthetic oligonucleotide
  Target: LAMA2; (+) strand; PAM type: NRG; PAM sequence: TAG
ccatactatcttcattgctt

SEQ ID NO: 148345 - DNA, 20 bp, Artificial Sequence
  Description of Artificial Sequence: Synthetic oligonucleotide
  Target: LAMA2; (+) strand; PAM type: NRG; PAM sequence: AAG
actatcttcattgctttagt

SEQ ID NO: 148346 - DNA, 20 bp, Artificial Sequence
  Description of Artificial Sequence: Synthetic oligonucleotide
  Target: LAMA2; (+) strand; PAM type: NRG; PAM sequence: TAG
cttcattgctttagtaagtc

SEQ ID NO: 148347 - DNA, 20 bp, Artificial Sequence
  Description of Artificial Sequence: Synthetic oligonucleotide
  Target: LAMA2; (+) strand; PAM type: NRG; PAM sequence: TAG
gctttagtaagtctagaatt

SEQ ID NO: 148348 - DNA, 20 bp, Artificial Sequence
  Description of Artificial Sequence: Synthetic oligonucleotide
  Target: LAMA2; (+) strand; PAM type: NRG; PAM sequence: AGG
ctttagtaagtctagaattt

SEQ ID NO: 148349 - DNA, 20 bp, Artificial Sequence
  Description of Artificial Sequence: Synthetic oligonucleotide
  Target: LAMA2; (+) strand; PAM type: NRG; PAM sequence: AAG
caactttattttttattttc

SEQ ID NO: 148350 - DNA, 20 bp, Artificial Sequence
  Description of Artificial Sequence: Synthetic oligonucleotide
  Target: LAMA2; (+) strand; PAM type: NRG; PAM sequence: TAG
tttattttcaagattgtcta

SEQ ID NO: 148351 - DNA, 20 bp, Artificial Sequence
  Description of Artificial Sequence: Synthetic oligonucleotide
  Target: LAMA2; (+) strand; PAM type: NRG; PAM sequence: TAG
attttcaagattgtctatag

SEQ ID NO: 148352 - DNA, 20 bp, Artificial Sequence
  Description of Artificial Sequence: Synthetic oligonucleotide
  Target: LAMA2; (+) strand; PAM type: NRG; PAM sequence: AGG
ttttcaagattgtctatagt

SEQ ID NO: 148353 - DNA, 20 bp, Artificial Sequence
  Description of Artificial Sequence: Synthetic oligonucleotide
  Target: LAMA2; (+) strand; PAM type: NRG; PAM sequence: GGG
tttcaagattgtctatagta

SEQ ID NO: 148354 - DNA, 20 bp, Artificial Sequence
  Description of Artificial Sequence: Synthetic oligonucleotide
  Target: LAMA2; (+) strand; PAM type: NRG; PAM sequence: GGG
ttcaagattgtctatagtag

SEQ ID NO: 148355 - DNA, 20 bp, Artificial Sequence
  Description of Artificial Sequence: Synthetic oligonucleotide
  Target: LAMA2; (+) strand; PAM type: NRG; PAM sequence: TAG
tgtgtgtttctatacaattt

SEQ ID NO: 148356 - DNA, 20 bp, Artificial Sequence
  Description of Artificial Sequence: Synthetic oligonucleotide
  Target: LAMA2; (+) strand; PAM type: NRG; PAM sequence: CAG
tagaatcaacttgtcaatta

SEQ ID NO: 148357 - DNA, 20 bp, Artificial Sequence
  Description of Artificial Sequence: Synthetic oligonucleotide
  Target: LAMA2; (+) strand; PAM type: NRG; PAM sequence: TAG
ttgtcaattacagaaaatat

SEQ ID NO: 148358 - DNA, 20 bp, Artificial Sequence
  Description of Artificial Sequence: Synthetic oligonucleotide
  Target: LAMA2; (+) strand; PAM type: NRG; PAM sequence: AGG
tgtcaattacagaaaatatt

SEQ ID NO: 148359 - DNA, 20 bp, Artificial Sequence
  Description of Artificial Sequence: Synthetic oligonucleotide
  Target: LAMA2; (+) strand; PAM type: NRG; PAM sequence: TAG
aaaatattaggattattgct

SEQ ID NO: 148360 - DNA, 20 bp, Artificial Sequence
  Description of Artificial Sequence: Synthetic oligonucleotide
  Target: LAMA2; (+) strand; PAM type: NRG; PAM sequence: TGG
ttagactctatatacaaata

SEQ ID NO: 148361 - DNA, 20 bp, Artificial Sequence
  Description of Artificial Sequence: Synthetic oligonucleotide
  Target: LAMA2; (+) strand; PAM type: NRG; PAM sequence: TGG
ctatatacaaatatggaaaa

SEQ ID NO: 148362 - DNA, 20 bp, Artificial Sequence
  Description of Artificial Sequence: Synthetic oligonucleotide
  Target: LAMA2; (+) strand; PAM type: NRG; PAM sequence: GAG
atatacaaatatggaaaatg

SEQ ID NO: 148363 - DNA, 20 bp, Artificial Sequence
  Description of Artificial Sequence: Synthetic oligonucleotide
  Target: LAMA2; (+) strand; PAM type: NRG; PAM sequence: GAG
aaatatggaaaatggagctt

SEQ ID NO: 148364 - DNA, 20 bp, Artificial Sequence
  Description of Artificial Sequence: Synthetic oligonucleotide
  Target: LAMA2; (+) strand; PAM type: NRG; PAM sequence: AGG
aatatggaaaatggagcttg

SEQ ID NO: 148365 - DNA, 20 bp, Artificial Sequence
  Description of Artificial Sequence: Synthetic oligonucleotide
  Target: LAMA2; (+) strand; PAM type: NRG; PAM sequence: GAG
tatggaaaatggagcttgag

SEQ ID NO: 148366 - DNA, 20 bp, Artificial Sequence
  Description of Artificial Sequence: Synthetic oligonucleotide
  Target: LAMA2; (+) strand; PAM type: NRG; PAM sequence: TGG
aatggagcttgaggagatgt

SEQ ID NO: 148367 - DNA, 20 bp, Artificial Sequence
  Description of Artificial Sequence: Synthetic oligonucleotide
  Target: LAMA2; (+) strand; PAM type: NRG; PAM sequence: AAG
gcttgaggagatgttggtca

SEQ ID NO: 148368 - DNA, 20 bp, Artificial Sequence
  Description of Artificial Sequence: Synthetic oligonucleotide
  Target: LAMA2; (+) strand; PAM type: NRG; PAM sequence: CAG
ggtcaaagaatataaaattt

SEQ ID NO: 148369 - DNA, 20 bp, Artificial Sequence
  Description of Artificial Sequence: Synthetic oligonucleotide
  Target: LAMA2; (+) strand; PAM type: NRG; PAM sequence: TAG
aaagaatataaaatttcagt

SEQ ID NO: 148370 - DNA, 20 bp, Artificial Sequence
  Description of Artificial Sequence: Synthetic oligonucleotide
  Target: LAMA2; (+) strand; PAM type: NRG; PAM sequence: TAG
aatataaaatttcagttaga

SEQ ID NO: 148371 - DNA, 20 bp, Artificial Sequence
  Description of Artificial Sequence: Synthetic oligonucleotide
  Target: LAMA2; (+) strand; PAM type: NRG; PAM sequence: TAG
ataaaatttcagttagatag

SEQ ID NO: 148372 - DNA, 20 bp, Artificial Sequence
  Description of Artificial Sequence: Synthetic oligonucleotide
  Target: LAMA2; (+) strand; PAM type: NRG; PAM sequence: AGG
taaaatttcagttagatagt

SEQ ID NO: 148373 - DNA, 20 bp, Artificial Sequence
  Description of Artificial Sequence: Synthetic oligonucleotide
  Target: LAMA2; (+) strand; PAM type: NRG; PAM sequence: AAG
tagatagtaggaatacattg

SEQ ID NO: 148374 - DNA, 20 bp, Artificial Sequence
  Description of Artificial Sequence: Synthetic oligonucleotide
  Target: LAMA2; (+) strand; PAM type: NRG; PAM sequence: CAG
cattgaagatatttattgta

SEQ ID NO: 148375 - DNA, 20 bp, Artificial Sequence
  Description of Artificial Sequence: Synthetic oligonucleotide
  Target: LAMA2; (+) strand; PAM type: NRG; PAM sequence: TGG
aagatatttattgtacagca

SEQ ID NO: 148376 - DNA, 20 bp, Artificial Sequence
  Description of Artificial Sequence: Synthetic oligonucleotide
  Target: LAMA2; (+) strand; PAM type: NRG; PAM sequence: TAG
attgtacagcatggtgactg

SEQ ID NO: 148377 - DNA, 20 bp, Artificial Sequence
  Description of Artificial Sequence: Synthetic oligonucleotide
  Target: LAMA2; (+) strand; PAM type: NRG; PAM sequence: GAG
atttactcttaaaaaatgct

SEQ ID NO: 148378 - DNA, 20 bp, Artificial Sequence
  Description of Artificial Sequence: Synthetic oligonucleotide
  Target: LAMA2; (+) strand; PAM type: NRG; PAM sequence: GAG
ttactcttaaaaaatgctga

SEQ ID NO: 148379 - DNA, 20 bp, Artificial Sequence
  Description of Artificial Sequence: Synthetic oligonucleotide
  Target: LAMA2; (+) strand; PAM type: NRG; PAM sequence: TAG
ctcttaaaaaatgctgagag

SEQ ID NO: 148380 - DNA, 20 bp, Artificial Sequence
  Description of Artificial Sequence: Synthetic oligonucleotide
  Target: LAMA2; (+) strand; PAM type: NRG; PAM sequence: AAG
aaatgctgagagtagatttt

SEQ ID NO: 148381 - DNA, 20 bp, Artificial Sequence
  Description of Artificial Sequence: Synthetic oligonucleotide
  Target: LAMA2; (+) strand; PAM type: NRG; PAM sequence: TAG
aaaaaaattgataattatgt

SEQ ID NO: 148382 - DNA, 20 bp, Artificial Sequence
  Description of Artificial Sequence: Synthetic oligonucleotide
  Target: LAMA2; (+) strand; PAM type: NRG; PAM sequence: AGG
aaaaaattgataattatgtt

SEQ ID NO: 148383 - DNA, 20 bp, Artificial Sequence
  Description of Artificial Sequence: Synthetic oligonucleotide
  Target: LAMA2; (+) strand; PAM type: NRG; PAM sequence: TAG
atgttaggtaatatgttaat

SEQ ID NO: 148384 - DNA, 20 bp, Artificial Sequence
  Description of Artificial Sequence: Synthetic oligonucleotide
  Target: LAMA2; (+) strand; PAM type: NRG; PAM sequence: AAG
atatatacaattttgtcaaa

SEQ ID NO: 148385 - DNA, 20 bp, Artificial Sequence
  Description of Artificial Sequence: Synthetic oligonucleotide
  Target: LAMA2; (+) strand; PAM type: NRG; PAM sequence: AGG
tatatacaattttgtcaaaa

SEQ ID NO: 148386 - DNA, 20 bp, Artificial Sequence
  Description of Artificial Sequence: Synthetic oligonucleotide
  Target: LAMA2; (+) strand; PAM type: NRG; PAM sequence: AAG
aaaaggaaattaaactttaa

SEQ ID NO: 148387 - DNA, 20 bp, Artificial Sequence
  Description of Artificial Sequence: Synthetic oligonucleotide
  Target: LAMA2; (+) strand; PAM type: NRG; PAM sequence: AAG
attaaactttaaaagcaaac

SEQ ID NO: 148388 - DNA, 20 bp, Artificial Sequence
  Description of Artificial Sequence: Synthetic oligonucleotide
  Target: LAMA2; (+) strand; PAM type: NRG; PAM sequence: GAG
tttaaaagcaaacaagtatt

SEQ ID NO: 148389 - DNA, 20 bp, Artificial Sequence
  Description of Artificial Sequence: Synthetic oligonucleotide
  Target: LAMA2; (+) strand; PAM type: NRG; PAM sequence: AGG
ttaaaagcaaacaagtattg

SEQ ID NO: 148390 - DNA, 20 bp, Artificial Sequence
  Description of Artificial Sequence: Synthetic oligonucleotide
  Target: LAMA2; (+) strand; PAM type: NRG; PAM sequence: TAG
aatcatttaaccaatgaaca

SEQ ID NO: 148391 - DNA, 20 bp, Artificial Sequence
  Description of Artificial Sequence: Synthetic oligonucleotide
  Target: LAMA2; (+) strand; PAM type: NRG; PAM sequence: CAG
tctatcttctttattcatgt

SEQ ID NO: 148392 - DNA, 20 bp, Artificial Sequence
  Description of Artificial Sequence: Synthetic oligonucleotide
  Target: LAMA2; (+) strand; PAM type: NRG; PAM sequence: CAG
ctttattcatgtcagtgttc

SEQ ID NO: 148393 - DNA, 20 bp, Artificial Sequence
  Description of Artificial Sequence: Synthetic oligonucleotide
  Target: LAMA2; (+) strand; PAM type: NRG; PAM sequence: CAG
ttcatgtcagtgttccagta

SEQ ID NO: 148394 - DNA, 20 bp, Artificial Sequence
  Description of Artificial Sequence: Synthetic oligonucleotide
  Target: LAMA2; (+) strand; PAM type: NRG; PAM sequence: GAG
catgtcagtgttccagtaca

SEQ ID NO: 148395 - DNA, 20 bp, Artificial Sequence
  Description of Artificial Sequence: Synthetic oligonucleotide
  Target: LAMA2; (+) strand; PAM type: NRG; PAM sequence: TAG
tcttttgttaaattaatctt

SEQ ID NO: 148396 - DNA, 20 bp, Artificial Sequence
  Description of Artificial Sequence: Synthetic oligonucleotide
  Target: LAMA2; (+) strand; PAM type: NRG; PAM sequence: AAG
attatttaatgtaattgtta

SEQ ID NO: 148397 - DNA, 20 bp, Artificial Sequence
  Description of Artificial Sequence: Synthetic oligonucleotide
  Target: LAMA2; (+) strand; PAM type: NRG; PAM sequence: TAG
aatattgactttatgcccta

SEQ ID NO: 148398 - DNA, 20 bp, Artificial Sequence
  Description of Artificial Sequence: Synthetic oligonucleotide
  Target: LAMA2; (+) strand; PAM type: NRG; PAM sequence: AAG
ttaaataacttcccttttaa

SEQ ID NO: 148399 - DNA, 20 bp, Artificial Sequence
  Description of Artificial Sequence: Synthetic oligonucleotide
  Target: LAMA2; (+) strand; PAM type: NRG; PAM sequence: GAG
cttcccttttaaaagttact

SEQ ID NO: 148400 - DNA, 20 bp, Artificial Sequence
  Description of Artificial Sequence: Synthetic oligonucleotide
  Target: LAMA2; (+) strand; PAM type: NRG; PAM sequence: AAG
tttaaaagttactgagaata

SEQ ID NO: 148401 - DNA, 20 bp, Artificial Sequence
  Description of Artificial Sequence: Synthetic oligonucleotide
  Target: LAMA2; (+) strand; PAM type: NRG; PAM sequence: CAG
gttactgagaataaagaata

SEQ ID NO: 148402 - DNA, 20 bp, Artificial Sequence
  Description of Artificial Sequence: Synthetic oligonucleotide
  Target: LAMA2; (+) strand; PAM type: NRG; PAM sequence: TGG
agaataaagaatacagaaca

SEQ ID NO: 148403 - DNA, 20 bp, Artificial Sequence
  Description of Artificial Sequence: Synthetic oligonucleotide
  Target: LAMA2; (+) strand; PAM type: NRG; PAM sequence: TAG
aagaatacagaacatggtta

SEQ ID NO: 148404 - DNA, 20 bp, Artificial Sequence
  Description of Artificial Sequence: Synthetic oligonucleotide
  Target: LAMA2; (+) strand; PAM type: NRG; PAM sequence: AGG
agaatacagaacatggttat

SEQ ID NO: 148405 - DNA, 20 bp, Artificial Sequence
  Description of Artificial Sequence: Synthetic oligonucleotide
  Target: LAMA2; (+) strand; PAM type: NRG; PAM sequence: CAG
acttacattgctatcaaatg

SEQ ID NO: 148406 - DNA, 20 bp, Artificial Sequence
  Description of Artificial Sequence: Synthetic oligonucleotide
  Target: LAMA2; (+) strand; PAM type: NRG; PAM sequence: AGG
cttacattgctatcaaatgc

SEQ ID NO: 148407 - DNA, 20 bp, Artificial Sequence
  Description of Artificial Sequence: Synthetic oligonucleotide
  Target: LAMA2; (+) strand; PAM type: NRG; PAM sequence: AAG
atgcaggaattcacttcaat

SEQ ID NO: 148408 - DNA, 20 bp, Artificial Sequence
  Description of Artificial Sequence: Synthetic oligonucleotide
  Target: LAMA2; (+) strand; PAM type: NRG; PAM sequence: AAG
caggaattcacttcaataag

SEQ ID NO: 148409 - DNA, 20 bp, Artificial Sequence
  Description of Artificial Sequence: Synthetic oligonucleotide
  Target: LAMA2; (+) strand; PAM type: NRG; PAM sequence: AAG
ataagaagtgctttctctgt

SEQ ID NO: 148410 - DNA, 20 bp, Artificial Sequence
  Description of Artificial Sequence: Synthetic oligonucleotide
  Target: LAMA2; (+) strand; PAM type: NRG; PAM sequence: TGG
aagtgctttctctgtaagca

SEQ ID NO: 148411 - DNA, 20 bp, Artificial Sequence
  Description of Artificial Sequence: Synthetic oligonucleotide
  Target: LAMA2; (+) strand; PAM type: NRG; PAM sequence: TGG
ttctctgtaagcatggttca

SEQ ID NO: 148412 - DNA, 20 bp, Artificial Sequence
  Description of Artificial Sequence: Synthetic oligonucleotide
  Target: LAMA2; (+) strand; PAM type: NRG; PAM sequence: TAG
gtaagcatggttcatggcaa

SEQ ID NO: 148413 - DNA, 20 bp, Artificial Sequence
  Description of Artificial Sequence: Synthetic oligonucleotide
  Target: LAMA2; (+) strand; PAM type: NRG; PAM sequence: AAG
agcatggttcatggcaatag

SEQ ID NO: 148414 - DNA, 20 bp, Artificial Sequence
  Description of Artificial Sequence: Synthetic oligonucleotide
  Target: LAMA2; (+) strand; PAM type: NRG; PAM sequence: TAG
tggcaatagaagctccaact

SEQ ID NO: 148415 - DNA, 20 bp, Artificial Sequence
  Description of Artificial Sequence: Synthetic oligonucleotide
  Target: LAMA2; (+) strand; PAM type: NRG; PAM sequence: AGG
ggcaatagaagctccaactt

SEQ ID NO: 148416 - DNA, 20 bp, Artificial Sequence
  Description of Artificial Sequence: Synthetic oligonucleotide
  Target: LAMA2; (+) strand; PAM type: NRG; PAM sequence: GAG
caatagaagctccaacttag

SEQ ID NO: 148417 - DNA, 20 bp, Artificial Sequence
  Description of Artificial Sequence: Synthetic oligonucleotide
  Target: LAMA2; (+) strand; PAM type: NRG; PAM sequence: GAG
atagaagctccaacttagga

SEQ ID NO: 148418 - DNA, 20 bp, Artificial Sequence
  Description of Artificial Sequence: Synthetic oligonucleotide
  Target: LAMA2; (+) strand; PAM type: NRG; PAM sequence: AGG
tagaagctccaacttaggag

SEQ ID NO: 148419 - DNA, 20 bp, Artificial Sequence
  Description of Artificial Sequence: Synthetic oligonucleotide
  Target: LAMA2; (+) strand; PAM type: NRG; PAM sequence: TGG
aataataacaacaaaaaaaa

SEQ ID NO: 148420 - DNA, 20 bp, Artificial Sequence
  Description of Artificial Sequence: Synthetic oligonucleotide
  Target: LAMA2; (+) strand; PAM type: NRG; PAM sequence: TGG
aataacaacaaaaaaaatgg

SEQ ID NO: 148421 - DNA, 20 bp, Artificial Sequence
  Description of Artificial Sequence: Synthetic oligonucleotide
  Target: LAMA2; (+) strand; PAM type: NRG; PAM sequence: AAG
aacaaaaaaaatggtggttg

SEQ ID NO: 148422 - DNA, 20 bp, Artificial Sequence
  Description of Artificial Sequence: Synthetic oligonucleotide
  Target: LAMA2; (+) strand; PAM type: NRG; PAM sequence: AGG
acaaaaaaaatggtggttga

SEQ ID NO: 148423 - DNA, 20 bp, Artificial Sequence
  Description of Artificial Sequence: Synthetic oligonucleotide
  Target: LAMA2; (+) strand; PAM type: NRG; PAM sequence: CAG
aaatggtggttgaaggaaaa

SEQ ID NO: 148424 - DNA, 20 bp, Artificial Sequence
  Description of Artificial Sequence: Synthetic oligonucleotide
  Target: LAMA2; (+) strand; PAM type: NRG; PAM sequence: CAG
aggaaaacagtccaaattta

SEQ ID NO: 148425 - DNA, 20 bp, Artificial Sequence
  Description of Artificial Sequence: Synthetic oligonucleotide
  Target: LAMA2; (+) strand; PAM type: NRG; PAM sequence: TGG
cagatgctttaaacttcttt

SEQ ID NO: 148426 - DNA, 20 bp, Artificial Sequence
  Description of Artificial Sequence: Synthetic oligonucleotide
  Target: LAMA2; (+) strand; PAM type: NRG; PAM sequence: TGG
ctttaaacttcttttggcct

SEQ ID NO: 148427 - DNA, 20 bp, Artificial Sequence
  Description of Artificial Sequence: Synthetic oligonucleotide
  Target: LAMA2; (+) strand; PAM type: NRG; PAM sequence: CAG
acttcttttggccttggcat

SEQ ID NO: 148428 - DNA, 20 bp, Artificial Sequence
  Description of Artificial Sequence: Synthetic oligonucleotide
  Target: LAMA2; (+) strand; PAM type: NRG; PAM sequence: AAG
agctttcatgttaaaaaata

SEQ ID NO: 148429 - DNA, 20 bp, Artificial Sequence
  Description of Artificial Sequence: Synthetic oligonucleotide
  Target: LAMA2; (+) strand; PAM type: NRG; PAM sequence: TGG
ttcatgttaaaaaataaagc

SEQ ID NO: 148430 - DNA, 20 bp, Artificial Sequence
  Description of Artificial Sequence: Synthetic oligonucleotide
  Target: LAMA2; (+) strand; PAM type: NRG; PAM sequence: TGG
atgttaaaaaataaagctgg

SEQ ID NO: 148431 - DNA, 20 bp, Artificial Sequence
  Description of Artificial Sequence: Synthetic oligonucleotide
  Target: LAMA2; (+) strand; PAM type: NRG; PAM sequence: GGG
tgttaaaaaataaagctggt

SEQ ID NO: 148432 - DNA, 20 bp, Artificial Sequence
  Description of Artificial Sequence: Synthetic oligonucleotide
  Target: LAMA2; (+) strand; PAM type: NRG; PAM sequence: GGG
gttaaaaaataaagctggtg

SEQ ID NO: 148433 - DNA, 20 bp, Artificial Sequence
  Description of Artificial Sequence: Synthetic oligonucleotide
  Target: LAMA2; (+) strand; PAM type: NRG; PAM sequence: AAG
aaaaaataaagctggtgggg

SEQ ID NO: 148434 - DNA, 20 bp, Artificial Sequence
  Description of Artificial Sequence: Synthetic oligonucleotide
  Target: LAMA2; (+) strand; PAM type: NRG; PAM sequence: AAG
gggaagctatctcacttgca

SEQ ID NO: 148435 - DNA, 20 bp, Artificial Sequence
  Description of Artificial Sequence: Synthetic oligonucleotide
  Target: LAMA2; (+) strand; PAM type: NRG; PAM sequence: TGG
tatctcacttgcaaagtaaa

SEQ ID NO: 148436 - DNA, 20 bp, Artificial Sequence
  Description of Artificial Sequence: Synthetic oligonucleotide
  Target: LAMA2; (+) strand; PAM type: NRG; PAM sequence: GAG
gcaaagtaaatggcttgtat

SEQ ID NO: 148437 - DNA, 20 bp, Artificial Sequence
  Description of Artificial Sequence: Synthetic oligonucleotide
  Target: LAMA2; (+) strand; PAM type: NRG; PAM sequence: TGG
gtaaatggcttgtatgagat

SEQ ID NO: 148438 - DNA, 20 bp, Artificial Sequence
  Description of Artificial Sequence: Synthetic oligonucleotide
  Target: LAMA2; (+) strand; PAM type: NRG; PAM sequence: TGG
tgtatgagattggcgaatct

SEQ ID NO: 148439 - DNA, 20 bp, Artificial Sequence
  Description of Artificial Sequence: Synthetic oligonucleotide
  Target: LAMA2; (+) strand; PAM type: NRG; PAM sequence: CAG
tgagattggcgaatcttggt

SEQ ID NO: 148440 - DNA, 20 bp, Artificial Sequence
  Description of Artificial Sequence: Synthetic oligonucleotide
  Target: LAMA2; (+) strand; PAM type: NRG; PAM sequence: AAG
ggtcagatattgcattttta

SEQ ID NO: 148441 - DNA, 20 bp, Artificial Sequence
  Description of Artificial Sequence: Synthetic oligonucleotide
  Target: LAMA2; (+) strand; PAM type: NRG; PAM sequence: CGG
tttttaaagcacaaaaccac

SEQ ID NO: 148442 - DNA, 20 bp, Artificial Sequence
  Description of Artificial Sequence: Synthetic oligonucleotide
  Target: LAMA2; (+) strand; PAM type: NRG; PAM sequence: TGG
ttattttcttctaattcaaa

SEQ ID NO: 148443 - DNA, 20 bp, Artificial Sequence
  Description of Artificial Sequence: Synthetic oligonucleotide
  Target: LAMA2; (+) strand; PAM type: NRG; PAM sequence: CAG
tcttctaattcaaatggcaa

SEQ ID NO: 148444 - DNA, 20 bp, Artificial Sequence
  Description of Artificial Sequence: Synthetic oligonucleotide
  Target: LAMA2; (+) strand; PAM type: NRG; PAM sequence: GAG
ttctaattcaaatggcaaca

SEQ ID NO: 148445 - DNA, 20 bp, Artificial Sequence
  Description of Artificial Sequence: Synthetic oligonucleotide
  Target: LAMA2; (+) strand; PAM type: NRG; PAM sequence: AGG
tctaattcaaatggcaacag

SEQ ID NO: 148446 - DNA, 20 bp, Artificial Sequence
  Description of Artificial Sequence: Synthetic oligonucleotide
  Target: LAMA2; (+) strand; PAM type: NRG; PAM sequence: TGG
aaatggcaacagaggaatcc

SEQ ID NO: 148447 - DNA, 20 bp, Artificial Sequence
  Description of Artificial Sequence: Synthetic oligonucleotide
  Target: LAMA2; (+) strand; PAM type: NRG; PAM sequence: TGG
aatcctggcgtgcatgtgca

SEQ ID NO: 148448 - DNA, 20 bp, Artificial Sequence
  Description of Artificial Sequence: Synthetic oligonucleotide
  Target: LAMA2; (+) strand; PAM type: NRG; PAM sequence: GAG
tcctggcgtgcatgtgcatg

SEQ ID NO: 148449 - DNA, 20 bp, Artificial Sequence
  Description of Artificial Sequence: Synthetic oligonucleotide
  Target: LAMA2; (+) strand; PAM type: NRG; PAM sequence: AAG
ggagacacacacacatcact

SEQ ID NO: 148450 - DNA, 20 bp, Artificial Sequence
  Description of Artificial Sequence: Synthetic oligonucleotide
  Target: LAMA2; (+) strand; PAM type: NRG; PAM sequence: AGG
gagacacacacacatcacta

SEQ ID NO: 148451 - DNA, 20 bp, Artificial Sequence
  Description of Artificial Sequence: Synthetic oligonucleotide
  Target: LAMA2; (+) strand; PAM type: NRG; PAM sequence: GAG
gacacacacacatcactaag

SEQ ID NO: 148452 - DNA, 20 bp, Artificial Sequence
  Description of Artificial Sequence: Synthetic oligonucleotide
  Target: LAMA2; (+) strand; PAM type: NRG; PAM sequence: CAG
cacacacatcactaaggaga

SEQ ID NO: 148453 - DNA, 20 bp, Artificial Sequence
  Description of Artificial Sequence: Synthetic oligonucleotide
  Target: LAMA2; (+) strand; PAM type: NRG; PAM sequence: AGG
acacacatcactaaggagac

SEQ ID NO: 148454 - DNA, 20 bp, Artificial Sequence
  Description of Artificial Sequence: Synthetic oligonucleotide
  Target: LAMA2; (+) strand; PAM type: NRG; PAM sequence: AAG
aggacaaactatcataaact

SEQ ID NO: 148455 - DNA, 20 bp, Artificial Sequence
  Description of Artificial Sequence: Synthetic oligonucleotide
  Target: LAMA2; (+) strand; PAM type: NRG; PAM sequence: CAG
acaaactatcataaactaag

SEQ ID NO: 148456 - DNA, 20 bp, Artificial Sequence
  Description of Artificial Sequence: Synthetic oligonucleotide
  Target: LAMA2; (+) strand; PAM type: NRG; PAM sequence: TAG
cccaaacacatcatcatcta

SEQ ID NO: 148457 - DNA, 20 bp, Artificial Sequence
  Description of Artificial Sequence: Synthetic oligonucleotide
  Target: LAMA2; (+) strand; PAM type: NRG; PAM sequence: AGG
ccaaacacatcatcatctat

SEQ ID NO: 148458 - DNA, 20 bp, Artificial Sequence
  Description of Artificial Sequence: Synthetic oligonucleotide
  Target: LAMA2; (+) strand; PAM type: NRG; PAM sequence: AAG
catctataggctgttttaca

SEQ ID NO: 148459 - DNA, 20 bp, Artificial Sequence
  Description of Artificial Sequence: Synthetic oligonucleotide
  Target: LAMA2; (+) strand; PAM type: NRG; PAM sequence: AGG
atctataggctgttttacaa

SEQ ID NO: 148460 - DNA, 20 bp, Artificial Sequence
  Description of Artificial Sequence: Synthetic oligonucleotide
  Target: LAMA2; (+) strand; PAM type: NRG; PAM sequence: TGG
tataggctgttttacaaagg

SEQ ID NO: 148461 - DNA, 20 bp, Artificial Sequence
  Description of Artificial Sequence: Synthetic oligonucleotide
  Target: LAMA2; (+) strand; PAM type: NRG; PAM sequence: CAG
tacaaacgaactgaatgtct

SEQ ID NO: 148462 - DNA, 20 bp, Artificial Sequence
  Description of Artificial Sequence: Synthetic oligonucleotide
  Target: LAMA2; (+) strand; PAM type: NRG; PAM sequence: AGG
acaaacgaactgaatgtctc

SEQ ID NO: 148463 - DNA, 20 bp, Artificial Sequence
  Description of Artificial Sequence: Synthetic oligonucleotide
  Target: LAMA2; (+) strand; PAM type: NRG; PAM sequence: AAG
gaactgaatgtctcaggtaa

SEQ ID NO: 148464 - DNA, 20 bp, Artificial Sequence
  Description of Artificial Sequence: Synthetic oligonucleotide
  Target: LAMA2; (+) strand; PAM type: NRG; PAM sequence: AGG
aactgaatgtctcaggtaaa

SEQ ID NO: 148465 - DNA, 20 bp, Artificial Sequence
  Description of Artificial Sequence: Synthetic oligonucleotide
  Target: LAMA2; (+) strand; PAM type: NRG; PAM sequence: AAG
aatgtctcaggtaaaaggca

SEQ ID NO: 148466 - DNA, 20 bp, Artificial Sequence
  Description of Artificial Sequence: Synthetic oligonucleotide
  Target: LAMA2; (+) strand; PAM type: NRG; PAM sequence: AAG
ctgcactcatttatcttctt

SEQ ID NO: 148467 - DNA, 20 bp, Artificial Sequence
  Description of Artificial Sequence: Synthetic oligonucleotide
  Target: LAMA2; (+) strand; PAM type: NRG; PAM sequence: AGG
tgcactcatttatcttctta

SEQ ID NO: 148468 - DNA, 20 bp, Artificial Sequence
  Description of Artificial Sequence: Synthetic oligonucleotide
  Target: LAMA2; (+) strand; PAM type: NRG; PAM sequence: CAG
ttatcttcttaaggctttca

SEQ ID NO: 148469 - DNA, 20 bp, Artificial Sequence
  Description of Artificial Sequence: Synthetic oligonucleotide
  Target: LAMA2; (+) strand; PAM type: NRG; PAM sequence: AAG
cttcttaaggctttcacaga

SEQ ID NO: 148470 - DNA, 20 bp, Artificial Sequence
  Description of Artificial Sequence: Synthetic oligonucleotide
  Target: LAMA2; (+) strand; PAM type: NRG; PAM sequence: CAG
agaaagcaccgttttatgaa

SEQ ID NO: 148471 - DNA, 20 bp, Artificial Sequence
  Description of Artificial Sequence: Synthetic oligonucleotide
  Target: LAMA2; (+) strand; PAM type: NRG; PAM sequence: AGG
gaaagcaccgttttatgaac

SEQ ID NO: 148472 - DNA, 20 bp, Artificial Sequence
  Description of Artificial Sequence: Synthetic oligonucleotide
  Target: LAMA2; (+) strand; PAM type: NRG; PAM sequence: CAG
cgttttatgaacaggcaatt

SEQ ID NO: 148473 - DNA, 20 bp, Artificial Sequence
  Description of Artificial Sequence: Synthetic oligonucleotide
  Target: LAMA2; (+) strand; PAM type: NRG; PAM sequence: CAG
tgaacaggcaattcagtacc

SEQ ID NO: 148474 - DNA, 20 bp, Artificial Sequence
  Description of Artificial Sequence: Synthetic oligonucleotide
  Target: LAMA2; (+) strand; PAM type: NRG; PAM sequence: GAG
aacaggcaattcagtaccca

SEQ ID NO: 148475 - DNA, 20 bp, Artificial Sequence
  Description of Artificial Sequence: Synthetic oligonucleotide
  Target: LAMA2; (+) strand; PAM type: NRG; PAM sequence: TGG
ttcagtacccagagcttgac

SEQ ID NO: 148476 - DNA, 20 bp, Artificial Sequence
  Description of Artificial Sequence: Synthetic oligonucleotide
  Target: LAMA2; (+) strand; PAM type: NRG; PAM sequence: GAG
cagtacccagagcttgactg

SEQ ID NO: 148477 - DNA, 20 bp, Artificial Sequence
  Description of Artificial Sequence: Synthetic oligonucleotide
  Target: LAMA2; (+) strand; PAM type: NRG; PAM sequence: CAG
gcttgactggagacactaat

SEQ ID NO: 148478 - DNA, 20 bp, Artificial Sequence
  Description of Artificial Sequence: Synthetic oligonucleotide
  Target: LAMA2; (+) strand; PAM type: NRG; PAM sequence: AGG
cttgactggagacactaatc

SEQ ID NO: 148479 - DNA, 20 bp, Artificial Sequence
  Description of Artificial Sequence: Synthetic oligonucleotide
  Target: LAMA2; (+) strand; PAM type: NRG; PAM sequence: AAG
ggagacactaatcaggattg

SEQ ID NO: 148480 - DNA, 20 bp, Artificial Sequence
  Description of Artificial Sequence: Synthetic oligonucleotide
  Target: LAMA2; (+) strand; PAM type: NRG; PAM sequence: CAG
tcaggattgaagtcttgatg

SEQ ID NO: 148481 - DNA, 20 bp, Artificial Sequence
  Description of Artificial Sequence: Synthetic oligonucleotide
  Target: LAMA2; (+) strand; PAM type: NRG; PAM sequence: AAG
cataaaaacccatttaaaaa

SEQ ID NO: 148482 - DNA, 20 bp, Artificial Sequence
  Description of Artificial Sequence: Synthetic oligonucleotide
  Target: LAMA2; (+) strand; PAM type: NRG; PAM sequence: AGG
ataaaaacccatttaaaaaa

SEQ ID NO: 148483 - DNA, 20 bp, Artificial Sequence
  Description of Artificial Sequence: Synthetic oligonucleotide
  Target: LAMA2; (+) strand; PAM type: NRG; PAM sequence: AAG
caaaaaccacatttaaaata

SEQ ID NO: 148484 - DNA, 20 bp, Artificial Sequence
  Description of Artificial Sequence: Synthetic oligonucleotide
  Target: LAMA2; (+) strand; PAM type: NRG; PAM sequence: AAG
aataaagttgtccatatata

SEQ ID NO: 148485 - DNA, 20 bp, Artificial Sequence
  Description of Artificial Sequence: Synthetic oligonucleotide
  Target: LAMA2; (+) strand; PAM type: NRG; PAM sequence: AAG
ttgtccatatataaagaatg

SEQ ID NO: 148486 - DNA, 20 bp, Artificial Sequence
  Description of Artificial Sequence: Synthetic oligonucleotide
  Target: LAMA2; (+) strand; PAM type: NRG; PAM sequence: TAG
tatataaagaatgaagtgtt

SEQ ID NO: 148487 - DNA, 20 bp, Artificial Sequence
  Description of Artificial Sequence: Synthetic oligonucleotide
  Target: LAMA2; (+) strand; PAM type: NRG; PAM sequence: AAG
ataaagaatgaagtgtttag

SEQ ID NO: 148488 - DNA, 20 bp, Artificial Sequence
  Description of Artificial Sequence: Synthetic oligonucleotide
  Target: LAMA2; (+) strand; PAM type: NRG; PAM sequence: CAG
atgaagtgtttagaagttcc

SEQ ID NO: 148489 - DNA, 20 bp, Artificial Sequence
  Description of Artificial Sequence: Synthetic oligonucleotide
  Target: LAMA2; (+) strand; PAM type: NRG; PAM sequence: AAG
ttcccagcttgtatcctaat

SEQ ID NO: 148490 - DNA, 20 bp, Artificial Sequence
  Description of Artificial Sequence: Synthetic oligonucleotide
  Target: LAMA2; (+) strand; PAM type: NRG; PAM sequence: GAG
cccagcttgtatcctaataa

SEQ ID NO: 148491 - DNA, 20 bp, Artificial Sequence
  Description of Artificial Sequence: Synthetic oligonucleotide
  Target: LAMA2; (+) strand; PAM type: NRG; PAM sequence: AAG
tatcctaataagagtactga

SEQ ID NO: 148492 - DNA, 20 bp, Artificial Sequence
  Description of Artificial Sequence: Synthetic oligonucleotide
  Target: LAMA2; (+) strand; PAM type: NRG; PAM sequence: AGG
atcctaataagagtactgaa

SEQ ID NO: 148493 - DNA, 20 bp, Artificial Sequence
  Description of Artificial Sequence: Synthetic oligonucleotide
  Target: LAMA2; (+) strand; PAM type: NRG; PAM sequence: TAG
agtactgaaaggtttaatat

SEQ ID NO: 148494 - DNA, 20 bp, Artificial Sequence
  Description of Artificial Sequence: Synthetic oligonucleotide
  Target: LAMA2; (+) strand; PAM type: NRG; PAM sequence: CAG
actgaaaggtttaatattag

SEQ ID NO: 148495 - DNA, 20 bp, Artificial Sequence
  Description of Artificial Sequence: Synthetic oligonucleotide
  Target: LAMA2; (+) strand; PAM type: NRG; PAM sequence: TAG
attagcagcctgtgaacacg

SEQ ID NO: 148496 - DNA, 20 bp, Artificial Sequence
  Description of Artificial Sequence: Synthetic oligonucleotide
  Target: LAMA2; (+) strand; PAM type: NRG; PAM sequence: AAG
cagcctgtgaacacgtagtg

SEQ ID NO: 148497 - DNA, 20 bp, Artificial Sequence
  Description of Artificial Sequence: Synthetic oligonucleotide
  Target: LAMA2; (+) strand; PAM type: NRG; PAM sequence: AAG
ctgtgaacacgtagtgaaga

SEQ ID NO: 148498 - DNA, 20 bp, Artificial Sequence
  Description of Artificial Sequence: Synthetic oligonucleotide
  Target: LAMA2; (+) strand; PAM type: NRG; PAM sequence: GAG
gtgaacacgtagtgaagaaa

SEQ ID NO: 148499 - DNA, 20 bp, Artificial Sequence
  Description of Artificial Sequence: Synthetic oligonucleotide
  Target: LAMA2; (+) strand; PAM type: NRG; PAM sequence: GAG
acgtagtgaagaaagagtct

SEQ ID NO: 148500 - DNA, 20 bp, Artificial Sequence
  Description of Artificial Sequence: Synthetic oligonucleotide
  Target: LAMA2; (+) strand; PAM type: NRG; PAM sequence: AAG
gaagaaagagtctgagaacc

SEQ ID NO: 148501 - DNA, 20 bp, Artificial Sequence
  Description of Artificial Sequence: Synthetic oligonucleotide
  Target: LAMA2; (+) strand; PAM type: NRG; PAM sequence: TGG
ctctaattccacccatgcca

SEQ ID NO: 148502 - DNA, 20 bp, Artificial Sequence
  Description of Artificial Sequence: Synthetic oligonucleotide
  Target: LAMA2; (+) strand; PAM type: NRG; PAM sequence: GGG
tctaattccacccatgccat

SEQ ID NO: 148503 - DNA, 20 bp, Artificial Sequence
  Description of Artificial Sequence: Synthetic oligonucleotide
  Target: LAMA2; (+) strand; PAM type: NRG; PAM sequence: CAG
acccatgccatgggtaaaaa

SEQ ID NO: 148504 - DNA, 20 bp, Artificial Sequence
  Description of Artificial Sequence: Synthetic oligonucleotide
  Target: LAMA2; (+) strand; PAM type: NRG; PAM sequence: CAG
atgggtaaaaacagttcttg

SEQ ID NO: 148505 - DNA, 20 bp, Artificial Sequence
  Description of Artificial Sequence: Synthetic oligonucleotide
  Target: LAMA2; (+) strand; PAM type: NRG; PAM sequence: TAG
taaaaacagttcttgcagtc

SEQ ID NO: 148506 - DNA, 20 bp, Artificial Sequence
  Description of Artificial Sequence: Synthetic oligonucleotide
  Target: LAMA2; (+) strand; PAM type: NRG; PAM sequence: GAG
aaaacagttcttgcagtcta

SEQ ID NO: 148507 - DNA, 20 bp, Artificial Sequence
  Description of Artificial Sequence: Synthetic oligonucleotide
  Target: LAMA2; (+) strand; PAM type: NRG; PAM sequence: TGG
gtctagagtttctcctccga

SEQ ID NO: 148508 - DNA, 20 bp, Artificial Sequence
  Description of Artificial Sequence: Synthetic oligonucleotide
  Target: LAMA2; (+) strand; PAM type: NRG; PAM sequence: CAG
tcctccgatggtttaaccgt

SEQ ID NO: 148509 - DNA, 20 bp, Artificial Sequence
  Description of Artificial Sequence: Synthetic oligonucleotide
  Target: LAMA2; (+) strand; PAM type: NRG; PAM sequence: TGG
accgtcagatttttacatct

SEQ ID NO: 148510 - DNA, 20 bp, Artificial Sequence
  Description of Artificial Sequence: Synthetic oligonucleotide
  Target: LAMA2; (+) strand; PAM type: NRG; PAM sequence: GGG
ccgtcagatttttacatctt

SEQ ID NO: 148511 - DNA, 20 bp, Artificial Sequence
  Description of Artificial Sequence: Synthetic oligonucleotide
  Target: LAMA2; (+) strand; PAM type: NRG; PAM sequence: TGG
atcttgggattcaaccatct

SEQ ID NO: 148512 - DNA, 20 bp, Artificial Sequence
  Description of Artificial Sequence: Synthetic oligonucleotide
  Target: LAMA2; (+) strand; PAM type: NRG; PAM sequence: AAG
tgggattcaaccatcttggc

SEQ ID NO: 148513 - DNA, 20 bp, Artificial Sequence
  Description of Artificial Sequence: Synthetic oligonucleotide
  Target: LAMA2; (+) strand; PAM type: NRG; PAM sequence: GAG
ttcttaattctcaacgctgt

SEQ ID NO: 148514 - DNA, 20 bp, Artificial Sequence
  Description of Artificial Sequence: Synthetic oligonucleotide
  Target: LAMA2; (+) strand; PAM type: NRG; PAM sequence: TGG
aattctcaacgctgtgagtc

SEQ ID NO: 148515 - DNA, 20 bp, Artificial Sequence
  Description of Artificial Sequence: Synthetic oligonucleotide
  Target: LAMA2; (+) strand; PAM type: NRG; PAM sequence: GGG
attctcaacgctgtgagtct

SEQ ID NO: 148516 - DNA, 20 bp, Artificial Sequence
  Description of Artificial Sequence: Synthetic oligonucleotide
  Target: LAMA2; (+) strand; PAM type: NRG; PAM sequence: GGG
ttctcaacgctgtgagtctg

SEQ ID NO: 148517 - DNA, 20 bp, Artificial Sequence
  Description of Artificial Sequence: Synthetic oligonucleotide
  Target: LAMA2; (+) strand; PAM type: NRG; PAM sequence: GGG
tctcaacgctgtgagtctgg

SEQ ID NO: 148518 - DNA, 20 bp, Artificial Sequence
  Description of Artificial Sequence: Synthetic oligonucleotide
  Target: LAMA2; (+) strand; PAM type: NRG; PAM sequence: TGG
aacgctgtgagtctgggggc

SEQ ID NO: 148519 - DNA, 20 bp, Artificial Sequence
  Description of Artificial Sequence: Synthetic oligonucleotide
  Target: LAMA2; (+) strand; PAM type: NRG; PAM sequence: TGG
tgagtctgggggctggattg

SEQ ID NO: 148520 - DNA, 20 bp, Artificial Sequence
  Description of Artificial Sequence: Synthetic oligonucleotide
  Target: LAMA2; (+) strand; PAM type: NRG; PAM sequence: GGG
gagtctgggggctggattgt

SEQ ID NO: 148521 - DNA, 20 bp, Artificial Sequence
  Description of Artificial Sequence: Synthetic oligonucleotide
  Target: LAMA2; (+) strand; PAM type: NRG; PAM sequence: CAG
tgggggctggattgtgggcc

SEQ ID NO: 148522 - DNA, 20 bp, Artificial Sequence
  Description of Artificial Sequence: Synthetic oligonucleotide
  Target: LAMA2; (+) strand; PAM type: NRG; PAM sequence: TAG
tgggcccagcattctgacat

SEQ ID NO: 148523 - DNA, 20 bp, Artificial Sequence
  Description of Artificial Sequence: Synthetic oligonucleotide
  Target: LAMA2; (+) strand; PAM type: NRG; PAM sequence: TAG
attagcttcaaaactgctcg

SEQ ID NO: 148524 - DNA, 20 bp, Artificial Sequence
  Description of Artificial Sequence: Synthetic oligonucleotide
  Target: LAMA2; (+) strand; PAM type: NRG; PAM sequence: TAG
ttcatcactgttccaccgat

SEQ ID NO: 148525 - DNA, 20 bp, Artificial Sequence
  Description of Artificial Sequence: Synthetic oligonucleotide
  Target: LAMA2; (+) strand; PAM type: NRG; PAM sequence: TGG
ttccaccgattagacacaat

SEQ ID NO: 148526 - DNA, 20 bp, Artificial Sequence
  Description of Artificial Sequence: Synthetic oligonucleotide
  Target: LAMA2; (+) strand; PAM type: NRG; PAM sequence: CGG
tcacgcatatcttcgtatga

SEQ ID NO: 148527 - DNA, 20 bp, Artificial Sequence
  Description of Artificial Sequence: Synthetic oligonucleotide
  Target: LAMA2; (+) strand; PAM type: NRG; PAM sequence: CGG
tcttcgtatgacggatcact

SEQ ID NO: 148528 - DNA, 20 bp, Artificial Sequence
  Description of Artificial Sequence: Synthetic oligonucleotide
  Target: LAMA2; (+) strand; PAM type: NRG; PAM sequence: TGG
ctcggtaccatgttataata

SEQ ID NO: 148529 - DNA, 20 bp, Artificial Sequence
  Description of Artificial Sequence: Synthetic oligonucleotide
  Target: LAMA2; (+) strand; PAM type: NRG; PAM sequence: TGG
ccatgttataatatggcaat

SEQ ID NO: 148530 - DNA, 20 bp, Artificial Sequence
  Description of Artificial Sequence: Synthetic oligonucleotide
  Target: LAMA2; (+) strand; PAM type: NRG; PAM sequence: TAG
tgttataatatggcaattgg

SEQ ID NO: 148531 - DNA, 20 bp, Artificial Sequence
  Description of Artificial Sequence: Synthetic oligonucleotide
  Target: LAMA2; (+) strand; PAM type: NRG; PAM sequence: GAG
ccctcctgtgatacaacgac

SEQ ID NO: 148532 - DNA, 20 bp, Artificial Sequence
  Description of Artificial Sequence: Synthetic oligonucleotide
  Target: LAMA2; (+) strand; PAM type: NRG; PAM sequence: TAG
cgagccatctcccaaatgat

SEQ ID NO: 148533 - DNA, 20 bp, Artificial Sequence
  Description of Artificial Sequence: Synthetic oligonucleotide
  Target: LAMA2; (+) strand; PAM type: NRG; PAM sequence: AGG
gagccatctcccaaatgatt

SEQ ID NO: 148534 - DNA, 20 bp, Artificial Sequence
  Description of Artificial Sequence: Synthetic oligonucleotide
  Target: LAMA2; (+) strand; PAM type: NRG; PAM sequence: AAG
tctcccaaatgattaggccg

SEQ ID NO: 148535 - DNA, 20 bp, Artificial Sequence
  Description of Artificial Sequence: Synthetic oligonucleotide
  Target: LAMA2; (+) strand; PAM type: NRG; PAM sequence: TAG
aaatgattaggccgaagctg

SEQ ID NO: 148536 - DNA, 20 bp, Artificial Sequence
  Description of Artificial Sequence: Synthetic oligonucleotide
  Target: LAMA2; (+) strand; PAM type: NRG; PAM sequence: CAG
taggccgaagctgtagatat

SEQ ID NO: 148537 - DNA, 20 bp, Artificial Sequence
  Description of Artificial Sequence: Synthetic oligonucleotide
  Target: LAMA2; (+) strand; PAM type: NRG; PAM sequence: TAG
tgtagatatcagccatgatg

SEQ ID NO: 148538 - DNA, 20 bp, Artificial Sequence
  Description of Artificial Sequence: Synthetic oligonucleotide
  Target: LAMA2; (+) strand; PAM type: NRG; PAM sequence: AGG
gtagatatcagccatgatgt

SEQ ID NO: 148539 - DNA, 20 bp, Artificial Sequence
  Description of Artificial Sequence: Synthetic oligonucleotide
  Target: LAMA2; (+) strand; PAM type: NRG; PAM sequence: GGG
tagatatcagccatgatgta

SEQ ID NO: 148540 - DNA, 20 bp, Artificial Sequence
  Description of Artificial Sequence: Synthetic oligonucleotide
  Target: LAMA2; (+) strand; PAM type: NRG; PAM sequence: TGG
tatcagccatgatgtagggc

SEQ ID NO: 148541 - DNA, 20 bp, Artificial Sequence
  Description of Artificial Sequence: Synthetic oligonucleotide
  Target: LAMA2; (+) strand; PAM type: NRG; PAM sequence: AAG
cagccatgatgtagggctgg

SEQ ID NO: 148542 - DNA, 20 bp, Artificial Sequence
  Description of Artificial Sequence: Synthetic oligonucleotide
  Target: LAMA2; (+) strand; PAM type: NRG; PAM sequence: TGG
ccatgatgtagggctggaag

SEQ ID NO: 148543 - DNA, 20 bp, Artificial Sequence
  Description of Artificial Sequence: Synthetic oligonucleotide
  Target: LAMA2; (+) strand; PAM type: NRG; PAM sequence: CAG
ggctggaagtggtttttgtt

SEQ ID NO: 148544 - DNA, 20 bp, Artificial Sequence
  Description of Artificial Sequence: Synthetic oligonucleotide
  Target: LAMA2; (+) strand; PAM type: NRG; PAM sequence: AGG
gctggaagtggtttttgttc

SEQ ID NO: 148545 - DNA, 20 bp, Artificial Sequence
  Description of Artificial Sequence: Synthetic oligonucleotide
  Target: LAMA2; (+) strand; PAM type: NRG; PAM sequence: CAG
tttttgttcaggctttcgtc

SEQ ID NO: 148546 - DNA, 20 bp, Artificial Sequence
  Description of Artificial Sequence: Synthetic oligonucleotide
  Target: LAMA2; (+) strand; PAM type: NRG; PAM sequence: TGG
aggctttcgtccagcacttc

SEQ ID NO: 148547 - DNA, 20 bp, Artificial Sequence
  Description of Artificial Sequence: Synthetic oligonucleotide
  Target: LAMA2; (+) strand; PAM type: NRG; PAM sequence: GAG
gctttcgtccagcacttctg

SEQ ID NO: 148548 - DNA, 20 bp, Artificial Sequence
  Description of Artificial Sequence: Synthetic oligonucleotide
  Target: LAMA2; (+) strand; PAM type: NRG; PAM sequence: CAG
tcgtccagcacttctggagc

SEQ ID NO: 148549 - DNA, 20 bp, Artificial Sequence
  Description of Artificial Sequence: Synthetic oligonucleotide
  Target: LAMA2; (+) strand; PAM type: NRG; PAM sequence: AGG
cgtccagcacttctggagcc

SEQ ID NO: 148550 - DNA, 20 bp, Artificial Sequence
  Description of Artificial Sequence: Synthetic oligonucleotide
  Target: LAMA2; (+) strand; PAM type: NRG; PAM sequence: TAG
ccagcacttctggagccagg

SEQ ID NO: 148551 - DNA, 20 bp, Artificial Sequence
  Description of Artificial Sequence: Synthetic oligonucleotide
  Target: LAMA2; (+) strand; PAM type: NRG; PAM sequence: TGG
ttctggagccaggtagcgtt

SEQ ID NO: 148552 - DNA, 20 bp, Artificial Sequence
  Description of Artificial Sequence: Synthetic oligonucleotide
  Target: LAMA2; (+) strand; PAM type: NRG; PAM sequence: TGG
gtagcgtttggtgcccaccc

SEQ ID NO: 148553 - DNA, 20 bp, Artificial Sequence
  Description of Artificial Sequence: Synthetic oligonucleotide
  Target: LAMA2; (+) strand; PAM type: NRG; PAM sequence: AAG
tggtgcccaccctggtattc

SEQ ID NO: 148554 - DNA, 20 bp, Artificial Sequence
  Description of Artificial Sequence: Synthetic oligonucleotide
  Target: LAMA2; (+) strand; PAM type: NRG; PAM sequence: AGG
ggtgcccaccctggtattca

SEQ ID NO: 148555 - DNA, 20 bp, Artificial Sequence
  Description of Artificial Sequence: Synthetic oligonucleotide
  Target: LAMA2; (+) strand; PAM type: NRG; PAM sequence: GGG
gtgcccaccctggtattcaa

SEQ ID NO: 148556 - DNA, 20 bp, Artificial Sequence
  Description of Artificial Sequence: Synthetic oligonucleotide
  Target: LAMA2; (+) strand; PAM type: NRG; PAM sequence: CAG
tgtgtcactgttgaatttaa

SEQ ID NO: 148557 - DNA, 20 bp, Artificial Sequence
  Description of Artificial Sequence: Synthetic oligonucleotide
  Target: LAMA2; (+) strand; PAM type: NRG; PAM sequence: AAG
tcactgttgaatttaacagc

SEQ ID NO: 148558 - DNA, 20 bp, Artificial Sequence
  Description of Artificial Sequence: Synthetic oligonucleotide
  Target: LAMA2; (+) strand; PAM type: NRG; PAM sequence: AGG
cactgttgaatttaacagca

SEQ ID NO: 148559 - DNA, 20 bp, Artificial Sequence
  Description of Artificial Sequence: Synthetic oligonucleotide
  Target: LAMA2; (+) strand; PAM type: NRG; PAM sequence: CAG
ttgaatttaacagcaaggcc

SEQ ID NO: 148560 - DNA, 20 bp, Artificial Sequence
  Description of Artificial Sequence: Synthetic oligonucleotide
  Target: LAMA2; (+) strand; PAM type: NRG; PAM sequence: AGG
tgaatttaacagcaaggccc

SEQ ID NO: 148561 - DNA, 20 bp, Artificial Sequence
  Description of Artificial Sequence: Synthetic oligonucleotide
  Target: LAMA2; (+) strand; PAM type: NRG; PAM sequence: CAG
tttaacagcaaggcccaggt

SEQ ID NO: 148562 - DNA, 20 bp, Artificial Sequence
  Description of Artificial Sequence: Synthetic oligonucleotide
  Target: LAMA2; (+) strand; PAM type: NRG; PAM sequence: CAG
caaggcccaggtcagcaatg

SEQ ID NO: 148563 - DNA, 20 bp, Artificial Sequence
  Description of Artificial Sequence: Synthetic oligonucleotide
  Target: LAMA2; (+) strand; PAM type: NRG; PAM sequence: GAG
caactcccatttttcttgat

SEQ ID NO: 148564 - DNA, 20 bp, Artificial Sequence
  Description of Artificial Sequence: Synthetic oligonucleotide
  Target: LAMA2; (+) strand; PAM type: NRG; PAM sequence: AGG
aactcccatttttcttgatg

SEQ ID NO: 148565 - DNA, 20 bp, Artificial Sequence
  Description of Artificial Sequence: Synthetic oligonucleotide
  Target: LAMA2; (+) strand; PAM type: NRG; PAM sequence: TAG
atgaggatgtttttgctctt

SEQ ID NO: 148566 - DNA, 20 bp, Artificial Sequence
  Description of Artificial Sequence: Synthetic oligonucleotide
  Target: LAMA2; (+) strand; PAM type: NRG; PAM sequence: AGG
tgaggatgtttttgctcttt

SEQ ID NO: 148567 - DNA, 20 bp, Artificial Sequence
  Description of Artificial Sequence: Synthetic oligonucleotide
  Target: LAMA2; (+) strand; PAM type: NRG; PAM sequence: GAG
tttgctctttaggtctcgat

SEQ ID NO: 148568 - DNA, 20 bp, Artificial Sequence
  Description of Artificial Sequence: Synthetic oligonucleotide
  Target: LAMA2; (+) strand; PAM type: NRG; PAM sequence: CGG
taggtctcgatgagcaattg

SEQ ID NO: 148569 - DNA, 20 bp, Artificial Sequence
  Description of Artificial Sequence: Synthetic oligonucleotide
  Target: LAMA2; (+) strand; PAM type: NRG; PAM sequence: GGG
aggtctcgatgagcaattgc

SEQ ID NO: 148570 - DNA, 20 bp, Artificial Sequence
  Description of Artificial Sequence: Synthetic oligonucleotide
  Target: LAMA2; (+) strand; PAM type: NRG; PAM sequence: TGG
gagcaattgcgggctttcct

SEQ ID NO: 148571 - DNA, 20 bp, Artificial Sequence
  Description of Artificial Sequence: Synthetic oligonucleotide
  Target: LAMA2; (+) strand; PAM type: NRG; PAM sequence: GGG
agcaattgcgggctttcctt

SEQ ID NO: 148572 - DNA, 20 bp, Artificial Sequence
  Description of Artificial Sequence: Synthetic oligonucleotide
  Target: LAMA2; (+) strand; PAM type: NRG; PAM sequence: CAG
gtgccatacgtttctgtgtg

SEQ ID NO: 148573 - DNA, 20 bp, Artificial Sequence
  Description of Artificial Sequence: Synthetic oligonucleotide
  Target: LAMA2; (+) strand; PAM type: NRG; PAM sequence: AGG
tgccatacgtttctgtgtgc

SEQ ID NO: 148574 - DNA, 20 bp, Artificial Sequence
  Description of Artificial Sequence: Synthetic oligonucleotide
  Target: LAMA2; (+) strand; PAM type: NRG; PAM sequence: TGG
catacgtttctgtgtgcagg

SEQ ID NO: 148575 - DNA, 20 bp, Artificial Sequence
  Description of Artificial Sequence: Synthetic oligonucleotide
  Target: LAMA2; (+) strand; PAM type: NRG; PAM sequence: CAG
gtttctgtgtgcaggtggca

SEQ ID NO: 148576 - DNA, 20 bp, Artificial Sequence
  Description of Artificial Sequence: Synthetic oligonucleotide
  Target: LAMA2; (+) strand; PAM type: NRG; PAM sequence: CAG
tgtgcaggtggcacagacca

SEQ ID NO: 148577 - DNA, 20 bp, Artificial Sequence
  Description of Artificial Sequence: Synthetic oligonucleotide
  Target: LAMA2; (+) strand; PAM type: NRG; PAM sequence: AGG
gtgcaggtggcacagaccac

SEQ ID NO: 148578 - DNA, 20 bp, Artificial Sequence
  Description of Artificial Sequence: Synthetic oligonucleotide
  Target: LAMA2; (+) strand; PAM type: NRG; PAM sequence: CAG
caggtggcacagaccacagg

SEQ ID NO: 148579 - DNA, 20 bp, Artificial Sequence
  Description of Artificial Sequence: Synthetic oligonucleotide
  Target: LAMA2; (+) strand; PAM type: NRG; PAM sequence: AAG
cagaccacaggcagctgaat

SEQ ID NO: 148580 - DNA, 20 bp, Artificial Sequence
  Description of Artificial Sequence: Synthetic oligonucleotide
  Target: LAMA2; (+) strand; PAM type: NRG; PAM sequence: AAG
gcagctgaataagccaattt

SEQ ID NO: 148581 - DNA, 20 bp, Artificial Sequence
  Description of Artificial Sequence: Synthetic oligonucleotide
  Target: LAMA2; (+) strand; PAM type: NRG; PAM sequence: CAG
gctgaataagccaatttaag

SEQ ID NO: 148582 - DNA, 20 bp, Artificial Sequence
  Description of Artificial Sequence: Synthetic oligonucleotide
  Target: LAMA2; (+) strand; PAM type: NRG; PAM sequence: AGG
ctgaataagccaatttaagc

SEQ ID NO: 148583 - DNA, 20 bp, Artificial Sequence
  Description of Artificial Sequence: Synthetic oligonucleotide
  Target: LAMA2; (+) strand; PAM type: NRG; PAM sequence: GGG
tgaataagccaatttaagca

SEQ ID NO: 148584 - DNA, 20 bp, Artificial Sequence
  Description of Artificial Sequence: Synthetic oligonucleotide
  Target: LAMA2; (+) strand; PAM type: NRG; PAM sequence: TGG
agccaatttaagcagggctc

SEQ ID NO: 148585 - DNA, 20 bp, Artificial Sequence
  Description of Artificial Sequence: Synthetic oligonucleotide
  Target: LAMA2; (+) strand; PAM type: NRG; PAM sequence: CAG
ttaagcagggctctggtgtc

SEQ ID NO: 148586 - DNA, 20 bp, Artificial Sequence
  Description of Artificial Sequence: Synthetic oligonucleotide
  Target: LAMA2; (+) strand; PAM type: NRG; PAM sequence: TAG
cagggctctggtgtccagcg

SEQ ID NO: 148587 - DNA, 20 bp, Artificial Sequence
  Description of Artificial Sequence: Synthetic oligonucleotide
  Target: LAMA2; (+) strand; PAM type: NRG; PAM sequence: CAG
gtgtccagcgtagcacattt

SEQ ID NO: 148588 - DNA, 20 bp, Artificial Sequence
  Description of Artificial Sequence: Synthetic oligonucleotide
  Target: LAMA2; (+) strand; PAM type: NRG; PAM sequence: AGG
tgtccagcgtagcacatttc

SEQ ID NO: 148589 - DNA, 20 bp, Artificial Sequence
  Description of Artificial Sequence: Synthetic oligonucleotide
  Target: LAMA2; (+) strand; PAM type: NRG; PAM sequence: AAG
ccagcgtagcacatttcagg

SEQ ID NO: 148590 - DNA, 20 bp, Artificial Sequence
  Description of Artificial Sequence: Synthetic oligonucleotide
  Target: LAMA2; (+) strand; PAM type: NRG; PAM sequence: TAG
tagcacatttcaggaagtca

SEQ ID NO: 148591 - DNA, 20 bp, Artificial Sequence
  Description of Artificial Sequence: Synthetic oligonucleotide
  Target: LAMA2; (+) strand; PAM type: NRG; PAM sequence: GAG
gcacatttcaggaagtcata

SEQ ID NO: 148592 - DNA, 20 bp, Artificial Sequence
  Description of Artificial Sequence: Synthetic oligonucleotide
  Target: LAMA2; (+) strand; PAM type: NRG; PAM sequence: GAG
acatttcaggaagtcataga

SEQ ID NO: 148593 - DNA, 20 bp, Artificial Sequence
  Description of Artificial Sequence: Synthetic oligonucleotide
  Target: LAMA2; (+) strand; PAM type: NRG; PAM sequence: TGG
catagagagatccattttca

SEQ ID NO: 148594 - DNA, 20 bp, Artificial Sequence
  Description of Artificial Sequence: Synthetic oligonucleotide
  Target: LAMA2; (+) strand; PAM type: NRG; PAM sequence: CAG
agatccattttcatggtaat

SEQ ID NO: 148595 - DNA, 20 bp, Artificial Sequence
  Description of Artificial Sequence: Synthetic oligonucleotide
  Target: LAMA2; (+) strand; PAM type: NRG; PAM sequence: TAG
catggtaatcagtaatcaaa

SEQ ID NO: 148596 - DNA, 20 bp, Artificial Sequence
  Description of Artificial Sequence: Synthetic oligonucleotide
  Target: LAMA2; (+) strand; PAM type: NRG; PAM sequence: GAG
tggtaatcagtaatcaaata

SEQ ID NO: 148597 - DNA, 20 bp, Artificial Sequence
  Description of Artificial Sequence: Synthetic oligonucleotide
  Target: LAMA2; (+) strand; PAM type: NRG; PAM sequence: GAG
atcagtaatcaaatagagct

SEQ ID NO: 148598 - DNA, 20 bp, Artificial Sequence
  Description of Artificial Sequence: Synthetic oligonucleotide
  Target: LAMA2; (+) strand; PAM type: NRG; PAM sequence: CAG
taatcaaatagagctgagtc

SEQ ID NO: 148599 - DNA, 20 bp, Artificial Sequence
  Description of Artificial Sequence: Synthetic oligonucleotide
  Target: LAMA2; (+) strand; PAM type: NRG; PAM sequence: AGG
aatcaaatagagctgagtcc

SEQ ID NO: 148600 - DNA, 20 bp, Artificial Sequence
  Description of Artificial Sequence: Synthetic oligonucleotide
  Target: LAMA2; (+) strand; PAM type: NRG; PAM sequence: AAG
atatctgccgctatgaaacc

SEQ ID NO: 148601 - DNA, 20 bp, Artificial Sequence
  Description of Artificial Sequence: Synthetic oligonucleotide
  Target: LAMA2; (+) strand; PAM type: NRG; PAM sequence: TGG
tgaaaccaagtatgttttca

SEQ ID NO: 148602 - DNA, 20 bp, Artificial Sequence
  Description of Artificial Sequence: Synthetic oligonucleotide
  Target: LAMA2; (+) strand; PAM type: NRG; PAM sequence: TAG
agtatgttttcatggcgcat

SEQ ID NO: 148603 - DNA, 20 bp, Artificial Sequence
  Description of Artificial Sequence: Synthetic oligonucleotide
  Target: LAMA2; (+) strand; PAM type: NRG; PAM sequence: CAG
gttttcatggcgcattagca

SEQ ID NO: 148604 - DNA, 20 bp, Artificial Sequence
  Description of Artificial Sequence: Synthetic oligonucleotide
  Target: LAMA2; (+) strand; PAM type: NRG; PAM sequence: TGG
catggcgcattagcacagtt

SEQ ID NO: 148605 - DNA, 20 bp, Artificial Sequence
  Description of Artificial Sequence: Synthetic oligonucleotide
  Target: LAMA2; (+) strand; PAM type: NRG; PAM sequence: TAG
ggcgcattagcacagtttgg

SEQ ID NO: 148606 - DNA, 20 bp, Artificial Sequence
  Description of Artificial Sequence: Synthetic oligonucleotide
  Target: LAMA2; (+) strand; PAM type: NRG; PAM sequence: CAG
agatttctgtttctcgaaac

SEQ ID NO: 148607 - DNA, 20 bp, Artificial Sequence
  Description of Artificial Sequence: Synthetic oligonucleotide
  Target: LAMA2; (+) strand; PAM type: NRG; PAM sequence: TGG
ttctgtttctcgaaaccagc

SEQ ID NO: 148608 - DNA, 20 bp, Artificial Sequence
  Description of Artificial Sequence: Synthetic oligonucleotide
  Target: LAMA2; (+) strand; PAM type: NRG; PAM sequence: CAG
tcgaaaccagctggcttctt

SEQ ID NO: 148609 - DNA, 20 bp, Artificial Sequence
  Description of Artificial Sequence: Synthetic oligonucleotide
  Target: LAMA2; (+) strand; PAM type: NRG; PAM sequence: TGG
aaaccagctggcttcttcag

SEQ ID NO: 148610 - DNA, 20 bp, Artificial Sequence
  Description of Artificial Sequence: Synthetic oligonucleotide
  Target: LAMA2; (+) strand; PAM type: NRG; PAM sequence: AAG
agctggcttcttcagtggta

SEQ ID NO: 148611 - DNA, 20 bp, Artificial Sequence
  Description of Artificial Sequence: Synthetic oligonucleotide
  Target: LAMA2; (+) strand; PAM type: NRG; PAM sequence: CGG
ccatccgtacttctccatat

SEQ ID NO: 148612 - DNA, 20 bp, Artificial Sequence
  Description of Artificial Sequence: Synthetic oligonucleotide
  Target: LAMA2; (+) strand; PAM type: NRG; PAM sequence: CGG
atcggcctttaccaacttgc

SEQ ID NO: 148613 - DNA, 20 bp, Artificial Sequence
  Description of Artificial Sequence: Synthetic oligonucleotide
  Target: LAMA2; (+) strand; PAM type: NRG; PAM sequence: TGG
ccggaccatctgaatctgtt

SEQ ID NO: 148614 - DNA, 20 bp, Artificial Sequence
  Description of Artificial Sequence: Synthetic oligonucleotide
  Target: LAMA2; (+) strand; PAM type: NRG; PAM sequence: TAG
catctgaatctgtttggcaa

SEQ ID NO: 148615 - DNA, 20 bp, Artificial Sequence
  Description of Artificial Sequence: Synthetic oligonucleotide
  Target: LAMA2; (+) strand; PAM type: NRG; PAM sequence: AAG
aatagttcgctgaaccaata

SEQ ID NO: 148616 - DNA, 20 bp, Artificial Sequence
  Description of Artificial Sequence: Synthetic oligonucleotide
  Target: LAMA2; (+) strand; PAM type: NRG; PAM sequence: AGG
atagttcgctgaaccaataa

SEQ ID NO: 148617 - DNA, 20 bp, Artificial Sequence
  Description of Artificial Sequence: Synthetic oligonucleotide
  Target: LAMA2; (+) strand; PAM type: NRG; PAM sequence: TAG
gttcgctgaaccaataaagg

SEQ ID NO: 148618 - DNA, 20 bp, Artificial Sequence
  Description of Artificial Sequence: Synthetic oligonucleotide
  Target: LAMA2; (+) strand; PAM type: NRG; PAM sequence: CAG
ctgaaccaataaaggtagtc

SEQ ID NO: 148619 - DNA, 20 bp, Artificial Sequence
  Description of Artificial Sequence: Synthetic oligonucleotide
  Target: LAMA2; (+) strand; PAM type: NRG; PAM sequence: CAG
aggtagtccagacccactac

SEQ ID NO: 148620 - DNA, 20 bp, Artificial Sequence
  Description of Artificial Sequence: Synthetic oligonucleotide
  Target: LAMA2; (+) strand; PAM type: NRG; PAM sequence: TGG
cactaccagaactttgtgac

SEQ ID NO: 148621 - DNA, 20 bp, Artificial Sequence
  Description of Artificial Sequence: Synthetic oligonucleotide
  Target: LAMA2; (+) strand; PAM type: NRG; PAM sequence: AAG
gaactttgtgactggtcaat

SEQ ID NO: 148622 - DNA, 20 bp, Artificial Sequence
  Description of Artificial Sequence: Synthetic oligonucleotide
  Target: LAMA2; (+) strand; PAM type: NRG; PAM sequence: AGG
aactttgtgactggtcaata

SEQ ID NO: 148623 - DNA, 20 bp, Artificial Sequence
  Description of Artificial Sequence: Synthetic oligonucleotide
  Target: LAMA2; (+) strand; PAM type: NRG; PAM sequence: TAG
gactggtcaataaggtcttt

SEQ ID NO: 148624 - DNA, 20 bp, Artificial Sequence
  Description of Artificial Sequence: Synthetic oligonucleotide
  Target: LAMA2; (+) strand; PAM type: NRG; PAM sequence: TGG
tcttttagtgattttccaac

SEQ ID NO: 148625 - DNA, 20 bp, Artificial Sequence
  Description of Artificial Sequence: Synthetic oligonucleotide
  Target: LAMA2; (+) strand; PAM type: NRG; PAM sequence: GAG
gattgtaacgacgtctgctt

SEQ ID NO: 148626 - DNA, 20 bp, Artificial Sequence
  Description of Artificial Sequence: Synthetic oligonucleotide
  Target: LAMA2; (+) strand; PAM type: NRG; PAM sequence: AAG
tgcaataatgtttgtaacaa

SEQ ID NO: 148627 - DNA, 20 bp, Artificial Sequence
  Description of Artificial Sequence: Synthetic oligonucleotide
  Target: LAMA2; (+) strand; PAM type: NRG; PAM sequence: CAG
aataatgtttgtaacaaaag

SEQ ID NO: 148628 - DNA, 20 bp, Artificial Sequence
  Description of Artificial Sequence: Synthetic oligonucleotide
  Target: LAMA2; (+) strand; PAM type: NRG; PAM sequence: TGG
atgtttgtaacaaaagcagc

SEQ ID NO: 148629 - DNA, 20 bp, Artificial Sequence
  Description of Artificial Sequence: Synthetic oligonucleotide
  Target: LAMA2; (+) strand; PAM type: NRG; PAM sequence: GAG
gtttgtaacaaaagcagctg

SEQ ID NO: 148630 - DNA, 20 bp, Artificial Sequence
  Description of Artificial Sequence: Synthetic oligonucleotide
  Target: LAMA2; (+) strand; PAM type: NRG; PAM sequence: AAG
tgtaacaaaagcagctggag

SEQ ID NO: 148631 - DNA, 20 bp, Artificial Sequence
  Description of Artificial Sequence: Synthetic oligonucleotide
  Target: LAMA2; (+) strand; PAM type: NRG; PAM sequence: TAG
gcagctggagaagatgatca

SEQ ID NO: 148632 - DNA, 20 bp, Artificial Sequence
  Description of Artificial Sequence: Synthetic oligonucleotide
  Target: LAMA2; (+) strand; PAM type: NRG; PAM sequence: CAG
agatgatcatagcaattatg

SEQ ID NO: 148633 - DNA, 20 bp, Artificial Sequence
  Description of Artificial Sequence: Synthetic oligonucleotide
  Target: LAMA2; (+) strand; PAM type: NRG; PAM sequence: CAG
gatcatagcaattatgcaga

SEQ ID NO: 148634 - DNA, 20 bp, Artificial Sequence
  Description of Artificial Sequence: Synthetic oligonucleotide
  Target: LAMA2; (+) strand; PAM type: NRG; PAM sequence: TAG
agcaattatgcagacagcca

SEQ ID NO: 148635 - DNA, 20 bp, Artificial Sequence
  Description of Artificial Sequence: Synthetic oligonucleotide
  Target: LAMA2; (+) strand; PAM type: NRG; PAM sequence: GAG
atgcagacagccatagaaat

SEQ ID NO: 148636 - DNA, 20 bp, Artificial Sequence
  Description of Artificial Sequence: Synthetic oligonucleotide
  Target: LAMA2; (+) strand; PAM type: NRG; PAM sequence: CAG
gccatagaaatgagcaaaac

SEQ ID NO: 148637 - DNA, 20 bp, Artificial Sequence
  Description of Artificial Sequence: Synthetic oligonucleotide
  Target: LAMA2; (+) strand; PAM type: NRG; PAM sequence: CGG
cgaatgctgccatcaaaaaa

SEQ ID NO: 148638 - DNA, 20 bp, Artificial Sequence
  Description of Artificial Sequence: Synthetic oligonucleotide
  Target: LAMA2; (+) strand; PAM type: NRG; PAM sequence: CAG
aaaaaacggacctatgacaa

SEQ ID NO: 148639 - DNA, 20 bp, Artificial Sequence
  Description of Artificial Sequence: Synthetic oligonucleotide
  Target: LAMA2; (+) strand; PAM type: NRG; PAM sequence: AGG
aaaaacggacctatgacaac

SEQ ID NO: 148640 - DNA, 20 bp, Artificial Sequence
  Description of Artificial Sequence: Synthetic oligonucleotide
  Target: LAMA2; (+) strand; PAM type: NRG; PAM sequence: GGG
aaaacggacctatgacaaca

SEQ ID NO: 148641 - DNA, 20 bp, Artificial Sequence
  Description of Artificial Sequence: Synthetic oligonucleotide
  Target: LAMA2; (+) strand; PAM type: NRG; PAM sequence: GGG
aaacggacctatgacaacag

SEQ ID NO: 148642 - DNA, 20 bp, Artificial Sequence
  Description of Artificial Sequence: Synthetic oligonucleotide
  Target: LAMA2; (+) strand; PAM type: NRG; PAM sequence: GGG
aacggacctatgacaacagg

SEQ ID NO: 148643 - DNA, 20 bp, Artificial Sequence
  Description of Artificial Sequence: Synthetic oligonucleotide
  Target: LAMA2; (+) strand; PAM type: NRG; PAM sequence: TGG
ctatgacaacagggggcatg

SEQ ID NO: 148644 - DNA, 20 bp, Artificial Sequence
  Description of Artificial Sequence: Synthetic oligonucleotide
  Target: LAMA2; (+) strand; PAM type: NRG; PAM sequence: GGG
tatgacaacagggggcatgt

SEQ ID NO: 148645 - DNA, 20 bp, Artificial Sequence
  Description of Artificial Sequence: Synthetic oligonucleotide
  Target: LAMA2; (+) strand; PAM type: NRG; PAM sequence: TGG
ggcatgtgggttgcaaatac

SEQ ID NO: 148646 - DNA, 20 bp, Artificial Sequence
  Description of Artificial Sequence: Synthetic oligonucleotide
  Target: LAMA2; (+) strand; PAM type: NRG; PAM sequence: TGG
caaatactggttacataaat

SEQ ID NO: 148647 - DNA, 20 bp, Artificial Sequence
  Description of Artificial Sequence: Synthetic oligonucleotide
  Target: LAMA2; (+) strand; PAM type: NRG; PAM sequence: CGG
tccgacaacattctattgtc

SEQ ID NO: 148648 - DNA, 20 bp, Artificial Sequence
  Description of Artificial Sequence: Synthetic oligonucleotide
  Target: LAMA2; (+) strand; PAM type: NRG; PAM sequence: TAG
caacattctattgtccggcg

SEQ ID NO: 148649 - DNA, 20 bp, Artificial Sequence
  Description of Artificial Sequence: Synthetic oligonucleotide
  Target: LAMA2; (+) strand; PAM type: NRG; PAM sequence: TGG
attctattgtccggcgtagc

SEQ ID NO: 148650 - DNA, 20 bp, Artificial Sequence
  Description of Artificial Sequence: Synthetic oligonucleotide
  Target: LAMA2; (+) strand; PAM type: NRG; PAM sequence: GGG
ttctattgtccggcgtagct

SEQ ID NO: 148651 - DNA, 20 bp, Artificial Sequence
  Description of Artificial Sequence: Synthetic oligonucleotide
  Target: LAMA2; (+) strand; PAM type: NRG; PAM sequence: TGG
gtccggcgtagctgggcttt

SEQ ID NO: 148652 - DNA, 20 bp, Artificial Sequence
  Description of Artificial Sequence: Synthetic oligonucleotide
  Target: LAMA2; (+) strand; PAM type: NRG; PAM sequence: GAG
ccggcgtagctgggcttttg

SEQ ID NO: 148653 - DNA, 20 bp, Artificial Sequence
  Description of Artificial Sequence: Synthetic oligonucleotide
  Target: LAMA2; (+) strand; PAM type: NRG; PAM sequence: CAG
agaatctttgcactgaaaat

SEQ ID NO: 148654 - DNA, 20 bp, Artificial Sequence
  Description of Artificial Sequence: Synthetic oligonucleotide
  Target: LAMA2; (+) strand; PAM type: NRG; PAM sequence: AAG
ttcatatttcatacaccctg

SEQ ID NO: 148655 - DNA, 20 bp, Artificial Sequence
  Description of Artificial Sequence: Synthetic oligonucleotide
  Target: LAMA2; (+) strand; PAM type: NRG; PAM sequence: TGG
catacaccctgaagctaatg

SEQ ID NO: 148656 - DNA, 20 bp, Artificial Sequence
  Description of Artificial Sequence: Synthetic oligonucleotide
  Target: LAMA2; (+) strand; PAM type: NRG; PAM sequence: TGG
aagctaatgtggtttctccc

SEQ ID NO: 148657 - DNA, 20 bp, Artificial Sequence
  Description of Artificial Sequence: Synthetic oligonucleotide
  Target: LAMA2; (+) strand; PAM type: NRG; PAM sequence: TGG
ctggtcatcttcttctatga

SEQ ID NO: 148658 - DNA, 20 bp, Artificial Sequence
  Description of Artificial Sequence: Synthetic oligonucleotide
  Target: LAMA2; (+) strand; PAM type: NRG; PAM sequence: AAG
catcttcttctatgatggca

SEQ ID NO: 148659 - DNA, 20 bp, Artificial Sequence
  Description of Artificial Sequence: Synthetic oligonucleotide
  Target: LAMA2; (+) strand; PAM type: NRG; PAM sequence: TAG
gatggcaaagcaacgtccat

SEQ ID NO: 148660 - DNA, 20 bp, Artificial Sequence
  Description of Artificial Sequence: Synthetic oligonucleotide
  Target: LAMA2; (+) strand; PAM type: NRG; PAM sequence: TAG
agttatgcatgtgttattaa

SEQ ID NO: 148661 - DNA, 20 bp, Artificial Sequence
  Description of Artificial Sequence: Synthetic oligonucleotide
  Target: LAMA2; (+) strand; PAM type: NRG; PAM sequence: TGG
gtgttattaatagcatcatc

SEQ ID NO: 148662 - DNA, 20 bp, Artificial Sequence
  Description of Artificial Sequence: Synthetic oligonucleotide
  Target: LAMA2; (+) strand; PAM type: NRG; PAM sequence: GGG
tgttattaatagcatcatct

SEQ ID NO: 148663 - DNA, 20 bp, Artificial Sequence
  Description of Artificial Sequence: Synthetic oligonucleotide
  Target: LAMA2; (+) strand; PAM type: NRG; PAM sequence: CAG
tattaatagcatcatctggg

SEQ ID NO: 148664 - DNA, 20 bp, Artificial Sequence
  Description of Artificial Sequence: Synthetic oligonucleotide
  Target: LAMA2; (+) strand; PAM type: NRG; PAM sequence: CAG
catcatctgggcagtgccct

SEQ ID NO: 148665 - DNA, 20 bp, Artificial Sequence
  Description of Artificial Sequence: Synthetic oligonucleotide
  Target: LAMA2; (+) strand; PAM type: NRG; PAM sequence: TAG
ctgggcagtgccctcagcaa

SEQ ID NO: 148666 - DNA, 20 bp, Artificial Sequence
  Description of Artificial Sequence: Synthetic oligonucleotide
  Target: LAMA2; (+) strand; PAM type: NRG; PAM sequence: AAG
tcagcaatagcacttgaaaa

SEQ ID NO: 148667 - DNA, 20 bp, Artificial Sequence
  Description of Artificial Sequence: Synthetic oligonucleotide
  Target: LAMA2; (+) strand; PAM type: NRG; PAM sequence: AGG
cagcaatagcacttgaaaaa

SEQ ID NO: 148668 - DNA, 20 bp, Artificial Sequence
  Description of Artificial Sequence: Synthetic oligonucleotide
  Target: LAMA2; (+) strand; PAM type: NRG; PAM sequence: AAG
aatagcacttgaaaaaaggc

SEQ ID NO: 148669 - DNA, 20 bp, Artificial Sequence
  Description of Artificial Sequence: Synthetic oligonucleotide
  Target: LAMA2; (+) strand; PAM type: NRG; PAM sequence: AGG
atagcacttgaaaaaaggca

SEQ ID NO: 148670 - DNA, 20 bp, Artificial Sequence
  Description of Artificial Sequence: Synthetic oligonucleotide
  Target: LAMA2; (+) strand; PAM type: NRG; PAM sequence: TGG
aaaaaaggcaaggtatcctc

SEQ ID NO: 148671 - DNA, 20 bp, Artificial Sequence
  Description of Artificial Sequence: Synthetic oligonucleotide
  Target: LAMA2; (+) strand; PAM type: NRG; PAM sequence: AAG
gcaaggtatcctctggtgct

SEQ ID NO: 148672 - DNA, 20 bp, Artificial Sequence
  Description of Artificial Sequence: Synthetic oligonucleotide
  Target: LAMA2; (+) strand; PAM type: NRG; PAM sequence: AGG
caaggtatcctctggtgcta

SEQ ID NO: 148673 - DNA, 20 bp, Artificial Sequence
  Description of Artificial Sequence: Synthetic oligonucleotide
  Target: LAMA2; (+) strand; PAM type: NRG; PAM sequence: TGG
ctccattttctgactttttc

SEQ ID NO: 148674 - DNA, 20 bp, Artificial Sequence
  Description of Artificial Sequence: Synthetic oligonucleotide
  Target: LAMA2; (+) strand; PAM type: NRG; PAM sequence: CGG
attttctgactttttctggt

SEQ ID NO: 148675 - DNA, 20 bp, Artificial Sequence
  Description of Artificial Sequence: Synthetic oligonucleotide
  Target: LAMA2; (+) strand; PAM type: NRG; PAM sequence: GAG
tttctgactttttctggtcg

SEQ ID NO: 148676 - DNA, 20 bp, Artificial Sequence
  Description of Artificial Sequence: Synthetic oligonucleotide
  Target: LAMA2; (+) strand; PAM type: NRG; PAM sequence: CAG
gtcggagtctgatttcatcc

SEQ ID NO: 148677 - DNA, 20 bp, Artificial Sequence
  Description of Artificial Sequence: Synthetic oligonucleotide
  Target: LAMA2; (+) strand; PAM type: NRG; PAM sequence: TGG
ctgatttcatcccagtgccg

SEQ ID NO: 148678 - DNA, 20 bp, Artificial Sequence
  Description of Artificial Sequence: Synthetic oligonucleotide
  Target: LAMA2; (+) strand; PAM type: NRG; PAM sequence: GAG
gatttcatcccagtgccgtg

SEQ ID NO: 148679 - DNA, 20 bp, Artificial Sequence
  Description of Artificial Sequence: Synthetic oligonucleotide
  Target: LAMA2; (+) strand; PAM type: NRG; PAM sequence: CAG
gtgccgtggagcatactatc

SEQ ID NO: 148680 - DNA, 20 bp, Artificial Sequence
  Description of Artificial Sequence: Synthetic oligonucleotide
  Target: LAMA2; (+) strand; PAM type: NRG; PAM sequence: GAG
cagattctgtccttgaacac

SEQ ID NO: 148681 - DNA, 20 bp, Artificial Sequence
  Description of Artificial Sequence: Synthetic oligonucleotide
  Target: LAMA2; (+) strand; PAM type: NRG; PAM sequence: TAG
cacgagaaatgatgaacaaa

SEQ ID NO: 148682 - DNA, 20 bp, Artificial Sequence
  Description of Artificial Sequence: Synthetic oligonucleotide
  Target: LAMA2; (+) strand; PAM type: NRG; PAM sequence: AGG
acgagaaatgatgaacaaat

SEQ ID NO: 148683 - DNA, 20 bp, Artificial Sequence
  Description of Artificial Sequence: Synthetic oligonucleotide
  Target: LAMA2; (+) strand; PAM type: NRG; PAM sequence: TAG
aataatctgatgtaaatgta

SEQ ID NO: 148684 - DNA, 20 bp, Artificial Sequence
  Description of Artificial Sequence: Synthetic oligonucleotide
  Target: LAMA2; (+) strand; PAM type: NRG; PAM sequence: GAG
tctgatgtaaatgtatagct

SEQ ID NO: 148685 - DNA, 20 bp, Artificial Sequence
  Description of Artificial Sequence: Synthetic oligonucleotide
  Target: LAMA2; (+) strand; PAM type: NRG; PAM sequence: TAG
ttcctgtgtactgtcacctt

SEQ ID NO: 148686 - DNA, 20 bp, Artificial Sequence
  Description of Artificial Sequence: Synthetic oligonucleotide
  Target: LAMA2; (+) strand; PAM type: NRG; PAM sequence: TGG
gtactgtcacctttagtaat

SEQ ID NO: 148687 - DNA, 20 bp, Artificial Sequence
  Description of Artificial Sequence: Synthetic oligonucleotide
  Target: LAMA2; (+) strand; PAM type: NRG; PAM sequence: CAG
caatttaaatgactgtcatt

SEQ ID NO: 148688 - DNA, 20 bp, Artificial Sequence
  Description of Artificial Sequence: Synthetic oligonucleotide
  Target: LAMA2; (+) strand; PAM type: NRG; PAM sequence: GAG
ttaaatgactgtcattcagt

SEQ ID NO: 148689 - DNA, 20 bp, Artificial Sequence
  Description of Artificial Sequence: Synthetic oligonucleotide
  Target: LAMA2; (+) strand; PAM type: NRG; PAM sequence: AAG
tcagtgagattttcttgtaa

SEQ ID NO: 148690 - DNA, 20 bp, Artificial Sequence
  Description of Artificial Sequence: Synthetic oligonucleotide
  Target: LAMA2; (+) strand; PAM type: NRG; PAM sequence: AAG
attttcttgtaaaagatcgc

SEQ ID NO: 148691 - DNA, 20 bp, Artificial Sequence
  Description of Artificial Sequence: Synthetic oligonucleotide
  Target: LAMA2; (+) strand; PAM type: NRG; PAM sequence: AAG
tgctttcttacgactcctcc

SEQ ID NO: 148692 - DNA, 20 bp, Artificial Sequence
  Description of Artificial Sequence: Synthetic oligonucleotide
  Target: LAMA2; (+) strand; PAM type: NRG; PAM sequence: TGG
cttacgactcctccaagatg

SEQ ID NO: 148693 - DNA, 20 bp, Artificial Sequence
  Description of Artificial Sequence: Synthetic oligonucleotide
  Target: LAMA2; (+) strand; PAM type: NRG; PAM sequence: TAG
cgactcctccaagatgtggc

SEQ ID NO: 148694 - DNA, 20 bp, Artificial Sequence
  Description of Artificial Sequence: Synthetic oligonucleotide
  Target: LAMA2; (+) strand; PAM type: NRG; PAM sequence: CAG
tacttccgattttctccaaa

SEQ ID NO: 148695 - DNA, 20 bp, Artificial Sequence
  Description of Artificial Sequence: Synthetic oligonucleotide
  Target: LAMA2; (+) strand; PAM type: NRG; PAM sequence: AAG
gcttccatctcatgaattcc

SEQ ID NO: 148696 - DNA, 20 bp, Artificial Sequence
  Description of Artificial Sequence: Synthetic oligonucleotide
  Target: LAMA2; (+) strand; PAM type: NRG; PAM sequence: CAG
ccatctcatgaattccaaga

SEQ ID NO: 148697 - DNA, 20 bp, Artificial Sequence
  Description of Artificial Sequence: Synthetic oligonucleotide
  Target: LAMA2; (+) strand; PAM type: NRG; PAM sequence: AAG
aaactgatgcatattttcat

SEQ ID NO: 148698 - DNA, 20 bp, Artificial Sequence
  Description of Artificial Sequence: Synthetic oligonucleotide
  Target: LAMA2; (+) strand; PAM type: NRG; PAM sequence: CGG
atattttcataagtcgctcc

SEQ ID NO: 148699 - DNA, 20 bp, Artificial Sequence
  Description of Artificial Sequence: Synthetic oligonucleotide
  Target: LAMA2; (+) strand; PAM type: NRG; PAM sequence: CGG
tcgctcccggcgtctcttcc

SEQ ID NO: 148700 - DNA, 20 bp, Artificial Sequence
  Description of Artificial Sequence: Synthetic oligonucleotide
  Target: LAMA2; (+) strand; PAM type: NRG; PAM sequence: GGG
cgctcccggcgtctcttccc

SEQ ID NO: 148701 - DNA, 20 bp, Artificial Sequence
  Description of Artificial Sequence: Synthetic oligonucleotide
  Target: LAMA2; (+) strand; PAM type: NRG; PAM sequence: CAG
tctcttcccgggctccttgc

SEQ ID NO: 148702 - DNA, 20 bp, Artificial Sequence
  Description of Artificial Sequence: Synthetic oligonucleotide
  Target: LAMA2; (+) strand; PAM type: NRG; PAM sequence: GAG
gggctccttgccagcgtgcc

SEQ ID NO: 148703 - DNA, 20 bp, Artificial Sequence
  Description of Artificial Sequence: Synthetic oligonucleotide
  Target: LAMA2; (+) strand; PAM type: NRG; PAM sequence: AGG
ggctccttgccagcgtgccg

SEQ ID NO: 148704 - DNA, 20 bp, Artificial Sequence
  Description of Artificial Sequence: Synthetic oligonucleotide
  Target: LAMA2; (+) strand; PAM type: NRG; PAM sequence: CAG
cttgccagcgtgccgaggcg

SEQ ID NO: 148705 - DNA, 20 bp, Artificial Sequence
  Description of Artificial Sequence: Synthetic oligonucleotide
  Target: LAMA2; (+) strand; PAM type: NRG; PAM sequence: AGG
ttgccagcgtgccgaggcgc

SEQ ID NO: 148706 - DNA, 20 bp, Artificial Sequence
  Description of Artificial Sequence: Synthetic oligonucleotide
  Target: LAMA2; (+) strand; PAM type: NRG; PAM sequence: CAG
ccagcgtgccgaggcgcagg

SEQ ID NO: 148707 - DNA, 20 bp, Artificial Sequence
  Description of Artificial Sequence: Synthetic oligonucleotide
  Target: LAMA2; (+) strand; PAM type: NRG; PAM sequence: AGG
cagcgtgccgaggcgcaggc

SEQ ID NO: 148708 - DNA, 20 bp, Artificial Sequence
  Description of Artificial Sequence: Synthetic oligonucleotide
  Target: LAMA2; (+) strand; PAM type: NRG; PAM sequence: GGG
agcgtgccgaggcgcaggca

SEQ ID NO: 148709 - DNA, 20 bp, Artificial Sequence
  Description of Artificial Sequence: Synthetic oligonucleotide
  Target: LAMA2; (+) strand; PAM type: NRG; PAM sequence: TGG
ccgaggcgcaggcagggtga

SEQ ID NO: 148710 - DNA, 20 bp, Artificial Sequence
  Description of Artificial Sequence: Synthetic oligonucleotide
  Target: LAMA2; (+) strand; PAM type: NRG; PAM sequence: GAG
gaggcgcaggcagggtgatg

SEQ ID NO: 148711 - DNA, 20 bp, Artificial Sequence
  Description of Artificial Sequence: Synthetic oligonucleotide
  Target: LAMA2; (+) strand; PAM type: NRG; PAM sequence: AGG
aggcgcaggcagggtgatgg

SEQ ID NO: 148712 - DNA, 20 bp, Artificial Sequence
  Description of Artificial Sequence: Synthetic oligonucleotide
  Target: LAMA2; (+) strand; PAM type: NRG; PAM sequence: CGG
gcagggtgatggaggcgccc

SEQ ID NO: 148713 - DNA, 20 bp, Artificial Sequence
  Description of Artificial Sequence: Synthetic oligonucleotide
  Target: LAMA2; (+) strand; PAM type: NRG; PAM sequence: CGG
ggtgatggaggcgccccggc

SEQ ID NO: 148714 - DNA, 20 bp, Artificial Sequence
  Description of Artificial Sequence: Synthetic oligonucleotide
  Target: LAMA2; (+) strand; PAM type: NRG; PAM sequence: GGG
gtgatggaggcgccccggcc

SEQ ID NO: 148715 - DNA, 20 bp, Artificial Sequence
  Description of Artificial Sequence: Synthetic oligonucleotide
  Target: LAMA2; (+) strand; PAM type: NRG; PAM sequence: GAG
gatggaggcgccccggccgg

SEQ ID NO: 148716 - DNA, 20 bp, Artificial Sequence
  Description of Artificial Sequence: Synthetic oligonucleotide
  Target: LAMA2; (+) strand; PAM type: NRG; PAM sequence: AGG
atggaggcgccccggccggg

SEQ ID NO: 148717 - DNA, 20 bp, Artificial Sequence
  Description of Artificial Sequence: Synthetic oligonucleotide
  Target: LAMA2; (+) strand; PAM type: NRG; PAM sequence: CGG
ccccggccgggaggatctgc

SEQ ID NO: 148718 - DNA, 20 bp, Artificial Sequence
  Description of Artificial Sequence: Synthetic oligonucleotide
  Target: LAMA2; (+) strand; PAM type: NRG; PAM sequence: GGG
cccggccgggaggatctgcc

SEQ ID NO: 148719 - DNA, 20 bp, Artificial Sequence
  Description of Artificial Sequence: Synthetic oligonucleotide
  Target: LAMA2; (+) strand; PAM type: NRG; PAM sequence: GGG
ccggccgggaggatctgccg

SEQ ID NO: 148720 - DNA, 20 bp, Artificial Sequence
  Description of Artificial Sequence: Synthetic oligonucleotide
  Target: LAMA2; (+) strand; PAM type: NRG; PAM sequence: GAG
ggccgggaggatctgccggg

SEQ ID NO: 148721 - DNA, 20 bp, Artificial Sequence
  Description of Artificial Sequence: Synthetic oligonucleotide
  Target: LAMA2; (+) strand; PAM type: NRG; PAM sequence: GAG
ccgggaggatctgccgggga

SEQ ID NO: 148722 - DNA, 20 bp, Artificial Sequence
  Description of Artificial Sequence: Synthetic oligonucleotide
  Target: LAMA2; (+) strand; PAM type: NRG; PAM sequence: CGG
ggaggatctgccggggagag

SEQ ID NO: 148723 - DNA, 20 bp, Artificial Sequence
  Description of Artificial Sequence: Synthetic oligonucleotide
  Target: LAMA2; (+) strand; PAM type: NRG; PAM sequence: CGG
agcggctttcctcatcgatt

SEQ ID NO: 148724 - DNA, 20 bp, Artificial Sequence
  Description of Artificial Sequence: Synthetic oligonucleotide
  Target: LAMA2; (+) strand; PAM type: NRG; PAM sequence: GGG
gcggctttcctcatcgattc

SEQ ID NO: 148725 - DNA, 20 bp, Artificial Sequence
  Description of Artificial Sequence: Synthetic oligonucleotide
  Target: LAMA2; (+) strand; PAM type: NRG; PAM sequence: GAG
ggctttcctcatcgattcgg

SEQ ID NO: 148726 - DNA, 20 bp, Artificial Sequence
  Description of Artificial Sequence: Synthetic oligonucleotide
  Target: LAMA2; (+) strand; PAM type: NRG; PAM sequence: TAG
cttaatttctttattaattc

SEQ ID NO: 148727 - DNA, 20 bp, Artificial Sequence
  Description of Artificial Sequence: Synthetic oligonucleotide
  Target: LAMA2; (+) strand; PAM type: NRG; PAM sequence: TAG
aatttctttattaattctag

SEQ ID NO: 148728 - DNA, 20 bp, Artificial Sequence
  Description of Artificial Sequence: Synthetic oligonucleotide
  Target: LAMA2; (+) strand; PAM type: NRG; PAM sequence: TAG
tagttttaaactacatgctt

SEQ ID NO: 148729 - DNA, 20 bp, Artificial Sequence
  Description of Artificial Sequence: Synthetic oligonucleotide
  Target: LAMA2; (+) strand; PAM type: NRG; PAM sequence: AAG
taaacaatcattttacctgc

SEQ ID NO: 148730 - DNA, 20 bp, Artificial Sequence
  Description of Artificial Sequence: Synthetic oligonucleotide
  Target: LAMA2; (+) strand; PAM type: NRG; PAM sequence: CAG
attttacctgcaagtacatt

SEQ ID NO: 148731 - DNA, 20 bp, Artificial Sequence
  Description of Artificial Sequence: Synthetic oligonucleotide
  Target: LAMA2; (+) strand; PAM type: NRG; PAM sequence: AGG
ttttacctgcaagtacattc

SEQ ID NO: 148732 - DNA, 20 bp, Artificial Sequence
  Description of Artificial Sequence: Synthetic oligonucleotide
  Target: LAMA2; (+) strand; PAM type: NRG; PAM sequence: AAG
tcctttgcaatctttatgcc

SEQ ID NO: 148733 - DNA, 20 bp, Artificial Sequence
  Description of Artificial Sequence: Synthetic oligonucleotide
  Target: LAMA2; (+) strand; PAM type: NRG; PAM sequence: AGG
cctttgcaatctttatgcca

SEQ ID NO: 148734 - DNA, 20 bp, Artificial Sequence
  Description of Artificial Sequence: Synthetic oligonucleotide
  Target: LAMA2; (+) strand; PAM type: NRG; PAM sequence: TGG
atgccaaggttaactaaaaa

SEQ ID NO: 148735 - DNA, 20 bp, Artificial Sequence
  Description of Artificial Sequence: Synthetic oligonucleotide
  Target: LAMA2; (+) strand; PAM type: NRG; PAM sequence: GAG
caaggttaactaaaaatggc

SEQ ID NO: 148736 - DNA, 20 bp, Artificial Sequence
  Description of Artificial Sequence: Synthetic oligonucleotide
  Target: LAMA2; (+) strand; PAM type: NRG; PAM sequence: GAG
aggttaactaaaaatggcga

SEQ ID NO: 148737 - DNA, 20 bp, Artificial Sequence
  Description of Artificial Sequence: Synthetic oligonucleotide
  Target: LAMA2; (+) strand; PAM type: NRG; PAM sequence: AAG
tcactttgttctgaatttta

SEQ ID NO: 148738 - DNA, 20 bp, Artificial Sequence
  Description of Artificial Sequence: Synthetic oligonucleotide
  Target: LAMA2; (+) strand; PAM type: NRG; PAM sequence: AGG
cactttgttctgaattttaa

SEQ ID NO: 148739 - DNA, 20 bp, Artificial Sequence
  Description of Artificial Sequence: Synthetic oligonucleotide
  Target: LAMA2; (+) strand; PAM type: NRG; PAM sequence: GGG
actttgttctgaattttaaa

SEQ ID NO: 148740 - DNA, 20 bp, Artificial Sequence
  Description of Artificial Sequence: Synthetic oligonucleotide
  Target: LAMA2; (+) strand; PAM type: NRG; PAM sequence: TGG
ggaaacctaatatttcacta

SEQ ID NO: 148741 - DNA, 20 bp, Artificial Sequence
  Description of Artificial Sequence: Synthetic oligonucleotide
  Target: LAMA2; (+) strand; PAM type: NRG; PAM sequence: GAG
aaacctaatatttcactatg

SEQ ID NO: 148742 - DNA, 20 bp, Artificial Sequence
  Description of Artificial Sequence: Synthetic oligonucleotide
  Target: LAMA2; (+) strand; PAM type: NRG; PAM sequence: TGG
gtgaactgcatattttttta

SEQ ID NO: 148743 - DNA, 20 bp, Artificial Sequence
  Description of Artificial Sequence: Synthetic oligonucleotide
  Target: LAMA2; (+) strand; PAM type: NRG; PAM sequence: CAG
tttttatggacaccctttat

SEQ ID NO: 148744 - DNA, 20 bp, Artificial Sequence
  Description of Artificial Sequence: Synthetic oligonucleotide
  Target: LAMA2; (+) strand; PAM type: NRG; PAM sequence: CAG
tggacaccctttatcagatt

SEQ ID NO: 148745 - DNA, 20 bp, Artificial Sequence
  Description of Artificial Sequence: Synthetic oligonucleotide
  Target: LAMA2; (+) strand; PAM type: NRG; PAM sequence: TAG
acaccctttatcagattcag

SEQ ID NO: 148746 - DNA, 20 bp, Artificial Sequence
  Description of Artificial Sequence: Synthetic oligonucleotide
  Target: LAMA2; (+) strand; PAM type: NRG; PAM sequence: AGG
caccctttatcagattcagt

SEQ ID NO: 148747 - DNA, 20 bp, Artificial Sequence
  Description of Artificial Sequence: Synthetic oligonucleotide
  Target: LAMA2; (+) strand; PAM type: NRG; PAM sequence: AAG
gtaggtcccctactattcct

SEQ ID NO: 148748 - DNA, 20 bp, Artificial Sequence
  Description of Artificial Sequence: Synthetic oligonucleotide
  Target: LAMA2; (+) strand; PAM type: NRG; PAM sequence: CAG
cccctactattcctaagttg

SEQ ID NO: 148749 - DNA, 20 bp, Artificial Sequence
  Description of Artificial Sequence: Synthetic oligonucleotide
  Target: LAMA2; (+) strand; PAM type: NRG; PAM sequence: GAG
cctactattcctaagttgca

SEQ ID NO: 148750 - DNA, 20 bp, Artificial Sequence
  Description of Artificial Sequence: Synthetic oligonucleotide
  Target: LAMA2; (+) strand; PAM type: NRG; PAM sequence: GAG
tactattcctaagttgcaga

SEQ ID NO: 148751 - DNA, 20 bp, Artificial Sequence
  Description of Artificial Sequence: Synthetic oligonucleotide
  Target: LAMA2; (+) strand; PAM type: NRG; PAM sequence: TGG
agagagtttttataacaaaa

SEQ ID NO: 148752 - DNA, 20 bp, Artificial Sequence
  Description of Artificial Sequence: Synthetic oligonucleotide
  Target: LAMA2; (+) strand; PAM type: NRG; PAM sequence: AAG
aaacctactgaaatgaacat

SEQ ID NO: 148753 - DNA, 20 bp, Artificial Sequence
  Description of Artificial Sequence: Synthetic oligonucleotide
  Target: LAMA2; (+) strand; PAM type: NRG; PAM sequence: AGG
aacctactgaaatgaacata

SEQ ID NO: 148754 - DNA, 20 bp, Artificial Sequence
  Description of Artificial Sequence: Synthetic oligonucleotide
  Target: LAMA2; (+) strand; PAM type: NRG; PAM sequence: CGG
tttctcctttattctgttaa

SEQ ID NO: 148755 - DNA, 20 bp, Artificial Sequence
  Description of Artificial Sequence: Synthetic oligonucleotide
  Target: LAMA2; (+) strand; PAM type: NRG; PAM sequence: GGG
ttctcctttattctgttaac

SEQ ID NO: 148756 - DNA, 20 bp, Artificial Sequence
  Description of Artificial Sequence: Synthetic oligonucleotide
  Target: LAMA2; (+) strand; PAM type: NRG; PAM sequence: GGG
tctcctttattctgttaacg

SEQ ID NO: 148757 - DNA, 20 bp, Artificial Sequence
  Description of Artificial Sequence: Synthetic oligonucleotide
  Target: LAMA2; (+) strand; PAM type: NRG; PAM sequence: AAG
aaattgaattttaaaatatg

SEQ ID NO: 148758 - DNA, 20 bp, Artificial Sequence
  Description of Artificial Sequence: Synthetic oligonucleotide
  Target: LAMA2; (+) strand; PAM type: NRG; PAM sequence: AGG
aattgaattttaaaatatga

SEQ ID NO: 148759 - DNA, 20 bp, Artificial Sequence
  Description of Artificial Sequence: Synthetic oligonucleotide
  Target: LAMA2; (+) strand; PAM type: NRG; PAM sequence: CAG
tgaattttaaaatatgaagg

SEQ ID NO: 148760 - DNA, 20 bp, Artificial Sequence
  Description of Artificial Sequence: Synthetic oligonucleotide
  Target: LAMA2; (+) strand; PAM type: NRG; PAM sequence: TGG
tttgtgaattaatctccatt

SEQ ID NO: 148761 - DNA, 20 bp, Artificial Sequence
  Description of Artificial Sequence: Synthetic oligonucleotide
  Target: LAMA2; (+) strand; PAM type: NRG; PAM sequence: TGG
atattatcatttttatatat

SEQ ID NO: 148762 - DNA, 20 bp, Artificial Sequence
  Description of Artificial Sequence: Synthetic oligonucleotide
  Target: LAMA2; (+) strand; PAM type: NRG; PAM sequence: TGG
tgattcaattgactaatgtt

SEQ ID NO: 148763 - DNA, 20 bp, Artificial Sequence
  Description of Artificial Sequence: Synthetic oligonucleotide
  Target: LAMA2; (+) strand; PAM type: NRG; PAM sequence: AAG
caattgactaatgtttggtt

SEQ ID NO: 148764 - DNA, 20 bp, Artificial Sequence
  Description of Artificial Sequence: Synthetic oligonucleotide
  Target: LAMA2; (+) strand; PAM type: NRG; PAM sequence: TGG
catcctctcataaaatatat

SEQ ID NO: 148765 - DNA, 20 bp, Artificial Sequence
  Description of Artificial Sequence: Synthetic oligonucleotide
  Target: LAMA2; (+) strand; PAM type: NRG; PAM sequence: CAG
ttttcttataatgtttttgt

SEQ ID NO: 148766 - DNA, 20 bp, Artificial Sequence
  Description of Artificial Sequence: Synthetic oligonucleotide
  Target: LAMA2; (+) strand; PAM type: NRG; PAM sequence: AGG
tttcttataatgtttttgtc

SEQ ID NO: 148767 - DNA, 20 bp, Artificial Sequence
  Description of Artificial Sequence: Synthetic oligonucleotide
  Target: LAMA2; (+) strand; PAM type: NRG; PAM sequence: TGG
gtttttgtcaggttttttat

SEQ ID NO: 148768 - DNA, 20 bp, Artificial Sequence
  Description of Artificial Sequence: Synthetic oligonucleotide
  Target: LAMA2; (+) strand; PAM type: NRG; PAM sequence: GGG
tttttgtcaggttttttatt

SEQ ID NO: 148769 - DNA, 20 bp, Artificial Sequence
  Description of Artificial Sequence: Synthetic oligonucleotide
  Target: LAMA2; (+) strand; PAM type: NRG; PAM sequence: GGG
ttttgtcaggttttttattg

SEQ ID NO: 148770 - DNA, 20 bp, Artificial Sequence
  Description of Artificial Sequence: Synthetic oligonucleotide
  Target: LAMA2; (+) strand; PAM type: NRG; PAM sequence: TGG
ggttttttattggggtatac

SEQ ID NO: 148771 - DNA, 20 bp, Artificial Sequence
  Description of Artificial Sequence: Synthetic oligonucleotide
  Target: LAMA2; (+) strand; PAM type: NRG; PAM sequence: CGG
tactggcatcaacaaatgat

SEQ ID NO: 148772 - DNA, 20 bp, Artificial Sequence
  Description of Artificial Sequence: Synthetic oligonucleotide
  Target: LAMA2; (+) strand; PAM type: NRG; PAM sequence: GGG
actggcatcaacaaatgatc

SEQ ID NO: 148773 - DNA, 20 bp, Artificial Sequence
  Description of Artificial Sequence: Synthetic oligonucleotide
  Target: LAMA2; (+) strand; PAM type: NRG; PAM sequence: GGG
ctggcatcaacaaatgatcg

SEQ ID NO: 148774 - DNA, 20 bp, Artificial Sequence
  Description of Artificial Sequence: Synthetic oligonucleotide
  Target: LAMA2; (+) strand; PAM type: NRG; PAM sequence: AAG
acttcctcttctgttttcta

SEQ ID NO: 148775 - DNA, 20 bp, Artificial Sequence
  Description of Artificial Sequence: Synthetic oligonucleotide
  Target: LAMA2; (+) strand; PAM type: NRG; PAM sequence: CAG
tctgttttctaaagtaactt

SEQ ID NO: 148776 - DNA, 20 bp, Artificial Sequence
  Description of Artificial Sequence: Synthetic oligonucleotide
  Target: LAMA2; (+) strand; PAM type: NRG; PAM sequence: TAG
aaatgcttgataaaatttcc

SEQ ID NO: 148777 - DNA, 20 bp, Artificial Sequence
  Description of Artificial Sequence: Synthetic oligonucleotide
  Target: LAMA2; (+) strand; PAM type: NRG; PAM sequence: GAG
atttcctagtgaaactatct

SEQ ID NO: 148778 - DNA, 20 bp, Artificial Sequence
  Description of Artificial Sequence: Synthetic oligonucleotide
  Target: LAMA2; (+) strand; PAM type: NRG; PAM sequence: TAG
agtgaaactatctgagtctc

SEQ ID NO: 148779 - DNA, 20 bp, Artificial Sequence
  Description of Artificial Sequence: Synthetic oligonucleotide
  Target: LAMA2; (+) strand; PAM type: NRG; PAM sequence: TGG
gttttcttcgtgcattgtat

SEQ ID NO: 148780 - DNA, 20 bp, Artificial Sequence
  Description of Artificial Sequence: Synthetic oligonucleotide
  Target: LAMA2; (+) strand; PAM type: NRG; PAM sequence: TAG
ttgtattggctattttttat

SEQ ID NO: 148781 - DNA, 20 bp, Artificial Sequence
  Description of Artificial Sequence: Synthetic oligonucleotide
  Target: LAMA2; (+) strand; PAM type: NRG; PAM sequence: TAG
tggctattttttattagaca

SEQ ID NO: 148782 - DNA, 20 bp, Artificial Sequence
  Description of Artificial Sequence: Synthetic oligonucleotide
  Target: LAMA2; (+) strand; PAM type: NRG; PAM sequence: AGG
ggctattttttattagacat

SEQ ID NO: 148783 - DNA, 20 bp, Artificial Sequence
  Description of Artificial Sequence: Synthetic oligonucleotide
  Target: LAMA2; (+) strand; PAM type: NRG; PAM sequence: GGG
gctattttttattagacata

SEQ ID NO: 148784 - DNA, 20 bp, Artificial Sequence
  Description of Artificial Sequence: Synthetic oligonucleotide
  Target: LAMA2; (+) strand; PAM type: NRG; PAM sequence: TAG
ttttttattagacatagggt

SEQ ID NO: 148785 - DNA, 20 bp, Artificial Sequence
  Description of Artificial Sequence: Synthetic oligonucleotide
  Target: LAMA2; (+) strand; PAM type: NRG; PAM sequence: TAG
ttattagacatagggttaga

SEQ ID NO: 148786 - DNA, 20 bp, Artificial Sequence
  Description of Artificial Sequence: Synthetic oligonucleotide
  Target: LAMA2; (+) strand; PAM type: NRG; PAM sequence: AGG
tattagacatagggttagat

SEQ ID NO: 148787 - DNA, 20 bp, Artificial Sequence
  Description of Artificial Sequence: Synthetic oligonucleotide
  Target: LAMA2; (+) strand; PAM type: NRG; PAM sequence: TAG
aggttttgtattaatatctt

SEQ ID NO: 148788 - DNA, 20 bp, Artificial Sequence
  Description of Artificial Sequence: Synthetic oligonucleotide
  Target: LAMA2; (+) strand; PAM type: NRG; PAM sequence: AGG
ggttttgtattaatatcttt

SEQ ID NO: 148789 - DNA, 20 bp, Artificial Sequence
  Description of Artificial Sequence: Synthetic oligonucleotide
  Target: LAMA2; (+) strand; PAM type: NRG; PAM sequence: GGG
gttttgtattaatatcttta

SEQ ID NO: 148790 - DNA, 20 bp, Artificial Sequence
  Description of Artificial Sequence: Synthetic oligonucleotide
  Target: LAMA2; (+) strand; PAM type: NRG; PAM sequence: GAG
tttgtattaatatctttagg

SEQ ID NO: 148791 - DNA, 20 bp, Artificial Sequence
  Description of Artificial Sequence: Synthetic oligonucleotide
  Target: LAMA2; (+) strand; PAM type: NRG; PAM sequence: AGG
ttgtattaatatctttaggg

SEQ ID NO: 148792 - DNA, 20 bp, Artificial Sequence
  Description of Artificial Sequence: Synthetic oligonucleotide
  Target: LAMA2; (+) strand; PAM type: NRG; PAM sequence: GGG
tgtattaatatctttaggga

SEQ ID NO: 148793 - DNA, 20 bp, Artificial Sequence
  Description of Artificial Sequence: Synthetic oligonucleotide
  Target: LAMA2; (+) strand; PAM type: NRG; PAM sequence: AAG
tttgatatattgtatttttc

SEQ ID NO: 148794 - DNA, 20 bp, Artificial Sequence
  Description of Artificial Sequence: Synthetic oligonucleotide
  Target: LAMA2; (+) strand; PAM type: NRG; PAM sequence: TGG
catctaaattgtcaaatcat

SEQ ID NO: 148795 - DNA, 20 bp, Artificial Sequence
  Description of Artificial Sequence: Synthetic oligonucleotide
  Target: LAMA2; (+) strand; PAM type: NRG; PAM sequence: TGG
attgtcaaatcattggcaat

SEQ ID NO: 148796 - DNA, 20 bp, Artificial Sequence
  Description of Artificial Sequence: Synthetic oligonucleotide
  Target: LAMA2; (+) strand; PAM type: NRG; PAM sequence: CAG
gtcaaatcattggcaattgg

SEQ ID NO: 148797 - DNA, 20 bp, Artificial Sequence
  Description of Artificial Sequence: Synthetic oligonucleotide
  Target: LAMA2; (+) strand; PAM type: NRG; PAM sequence: AAG
attgccttattatcttcttg

SEQ ID NO: 148798 - DNA, 20 bp, Artificial Sequence
  Description of Artificial Sequence: Synthetic oligonucleotide
  Target: LAMA2; (+) strand; PAM type: NRG; PAM sequence: TAG
tattatcttcttgaagtcta

SEQ ID NO: 148799 - DNA, 20 bp, Artificial Sequence
  Description of Artificial Sequence: Synthetic oligonucleotide
  Target: LAMA2; (+) strand; PAM type: NRG; PAM sequence: TAG
tgaagtctatagcatctata

SEQ ID NO: 148800 - DNA, 20 bp, Artificial Sequence
  Description of Artificial Sequence: Synthetic oligonucleotide
  Target: LAMA2; (+) strand; PAM type: NRG; PAM sequence: AAG
gtgtaatttttaaaatgatt

SEQ ID NO: 148801 - DNA, 20 bp, Artificial Sequence
  Description of Artificial Sequence: Synthetic oligonucleotide
  Target: LAMA2; (+) strand; PAM type: NRG; PAM sequence: TAG
cttttattgatcacttatgt

SEQ ID NO: 148802 - DNA, 20 bp, Artificial Sequence
  Description of Artificial Sequence: Synthetic oligonucleotide
  Target: LAMA2; (+) strand; PAM type: NRG; PAM sequence: AGG
ttttattgatcacttatgtt

SEQ ID NO: 148803 - DNA, 20 bp, Artificial Sequence
  Description of Artificial Sequence: Synthetic oligonucleotide
  Target: LAMA2; (+) strand; PAM type: NRG; PAM sequence: GGG
tttattgatcacttatgtta

SEQ ID NO: 148804 - DNA, 20 bp, Artificial Sequence
  Description of Artificial Sequence: Synthetic oligonucleotide
  Target: LAMA2; (+) strand; PAM type: NRG; PAM sequence: GGG
ttattgatcacttatgttag

SEQ ID NO: 148805 - DNA, 20 bp, Artificial Sequence
  Description of Artificial Sequence: Synthetic oligonucleotide
  Target: LAMA2; (+) strand; PAM type: NRG; PAM sequence: TGG
attattcatttgacctgttt

SEQ ID NO: 148806 - DNA, 20 bp, Artificial Sequence
  Description of Artificial Sequence: Synthetic oligonucleotide
  Target: LAMA2; (+) strand; PAM type: NRG; PAM sequence: TGG
tctttttctacctatcaatt

SEQ ID NO: 148807 - DNA, 20 bp, Artificial Sequence
  Description of Artificial Sequence: Synthetic oligonucleotide
  Target: LAMA2; (+) strand; PAM type: NRG; PAM sequence: AAG
tttctacctatcaatttgga

SEQ ID NO: 148808 - DNA, 20 bp, Artificial Sequence
  Description of Artificial Sequence: Synthetic oligonucleotide
  Target: LAMA2; (+) strand; PAM type: NRG; PAM sequence: TAG
atcatataaacttttaaata

SEQ ID NO: 148809 - DNA, 20 bp, Artificial Sequence
  Description of Artificial Sequence: Synthetic oligonucleotide
  Target: LAMA2; (+) strand; PAM type: NRG; PAM sequence: TAG
tttaaatatagatttccttc

SEQ ID NO: 148810 - DNA, 20 bp, Artificial Sequence
  Description of Artificial Sequence: Synthetic oligonucleotide
  Target: LAMA2; (+) strand; PAM type: NRG; PAM sequence: CAG
aaatatagatttccttctag

SEQ ID NO: 148811 - DNA, 20 bp, Artificial Sequence
  Description of Artificial Sequence: Synthetic oligonucleotide
  Target: LAMA2; (+) strand; PAM type: NRG; PAM sequence: TAG
atttccttctagcagttctt

SEQ ID NO: 148812 - DNA, 20 bp, Artificial Sequence
  Description of Artificial Sequence: Synthetic oligonucleotide
  Target: LAMA2; (+) strand; PAM type: NRG; PAM sequence: CAG
ttagctgtttctcatgaatt

SEQ ID NO: 148813 - DNA, 20 bp, Artificial Sequence
  Description of Artificial Sequence: Synthetic oligonucleotide
  Target: LAMA2; (+) strand; PAM type: NRG; PAM sequence: AGG
tagctgtttctcatgaattc

SEQ ID NO: 148814 - DNA, 20 bp, Artificial Sequence
  Description of Artificial Sequence: Synthetic oligonucleotide
  Target: LAMA2; (+) strand; PAM type: NRG; PAM sequence: GAG
ttgttaatttccaaatattt

SEQ ID NO: 148815 - DNA, 20 bp, Artificial Sequence
  Description of Artificial Sequence: Synthetic oligonucleotide
  Target: LAMA2; (+) strand; PAM type: NRG; PAM sequence: TGG
tatatttttgatttctacac

SEQ ID NO: 148816 - DNA, 20 bp, Artificial Sequence
  Description of Artificial Sequence: Synthetic oligonucleotide
  Target: LAMA2; (+) strand; PAM type: NRG; PAM sequence: GAG
acactggatgtttatgatct

SEQ ID NO: 148817 - DNA, 20 bp, Artificial Sequence
  Description of Artificial Sequence: Synthetic oligonucleotide
  Target: LAMA2; (+) strand; PAM type: NRG; PAM sequence: AAG
gatctgagaacatactctct

SEQ ID NO: 148818 - DNA, 20 bp, Artificial Sequence
  Description of Artificial Sequence: Synthetic oligonucleotide
  Target: LAMA2; (+) strand; PAM type: NRG; PAM sequence: TAG
ctctctaagatgtcaaactt

SEQ ID NO: 148819 - DNA, 20 bp, Artificial Sequence
  Description of Artificial Sequence: Synthetic oligonucleotide
  Target: LAMA2; (+) strand; PAM type: NRG; PAM sequence: AAG
tctaagatgtcaaactttag

SEQ ID NO: 148820 - DNA, 20 bp, Artificial Sequence
  Description of Artificial Sequence: Synthetic oligonucleotide
  Target: LAMA2; (+) strand; PAM type: NRG; PAM sequence: TGG
gtttattgaaatttaactta

SEQ ID NO: 148821 - DNA, 20 bp, Artificial Sequence
  Description of Artificial Sequence: Synthetic oligonucleotide
  Target: LAMA2; (+) strand; PAM type: NRG; PAM sequence: CAG
ttgaaatttaacttatggct

SEQ ID NO: 148822 - DNA, 20 bp, Artificial Sequence
  Description of Artificial Sequence: Synthetic oligonucleotide
  Target: LAMA2; (+) strand; PAM type: NRG; PAM sequence: TGG
ttaacttatggctcagtgca

SEQ ID NO: 148823 - DNA, 20 bp, Artificial Sequence
  Description of Artificial Sequence: Synthetic oligonucleotide
  Target: LAMA2; (+) strand; PAM type: NRG; PAM sequence: TGG
gctcagtgcatggtctctct

SEQ ID NO: 148824 - DNA, 20 bp, Artificial Sequence
  Description of Artificial Sequence: Synthetic oligonucleotide
  Target: LAMA2; (+) strand; PAM type: NRG; PAM sequence: TGG
tcttggcaaacaaataaatg

SEQ ID NO: 148825 - DNA, 20 bp, Artificial Sequence
  Description of Artificial Sequence: Synthetic oligonucleotide
  Target: LAMA2; (+) strand; PAM type: NRG; PAM sequence: TGG
atttttccaatctgcgatta

SEQ ID NO: 148826 - DNA, 20 bp, Artificial Sequence
  Description of Artificial Sequence: Synthetic oligonucleotide
  Target: LAMA2; (+) strand; PAM type: NRG; PAM sequence: CAG
tacctttctttcattttttt

SEQ ID NO: 148827 - DNA, 20 bp, Artificial Sequence
  Description of Artificial Sequence: Synthetic oligonucleotide
  Target: LAMA2; (+) strand; PAM type: NRG; PAM sequence: AAG
gtatttcttcctgttctttg

SEQ ID NO: 148828 - DNA, 20 bp, Artificial Sequence
  Description of Artificial Sequence: Synthetic oligonucleotide
  Target: LAMA2; (+) strand; PAM type: NRG; PAM sequence: GAG
gttctttgaagcactgttat

SEQ ID NO: 148829 - DNA, 20 bp, Artificial Sequence
  Description of Artificial Sequence: Synthetic oligonucleotide
  Target: LAMA2; (+) strand; PAM type: NRG; PAM sequence: AGG
ttctttgaagcactgttatg

SEQ ID NO: 148830 - DNA, 20 bp, Artificial Sequence
  Description of Artificial Sequence: Synthetic oligonucleotide
  Target: LAMA2; (+) strand; PAM type: NRG; PAM sequence: TAG
ttatgaggcacatacatatt

SEQ ID NO: 148831 - DNA, 20 bp, Artificial Sequence
  Description of Artificial Sequence: Synthetic oligonucleotide
  Target: LAMA2; (+) strand; PAM type: NRG; PAM sequence: TAG
tttagaatattttgaatctt

SEQ ID NO: 148832 - DNA, 20 bp, Artificial Sequence
  Description of Artificial Sequence: Synthetic oligonucleotide
  Target: LAMA2; (+) strand; PAM type: NRG; PAM sequence: AAG
ttaatattttgataactgtg

SEQ ID NO: 148833 - DNA, 20 bp, Artificial Sequence
  Description of Artificial Sequence: Synthetic oligonucleotide
  Target: LAMA2; (+) strand; PAM type: NRG; PAM sequence: CAG
tgaagatctccacttaatct

SEQ ID NO: 148834 - DNA, 20 bp, Artificial Sequence
  Description of Artificial Sequence: Synthetic oligonucleotide
  Target: LAMA2; (+) strand; PAM type: NRG; PAM sequence: AAG
agatatcactttttgtccta

SEQ ID NO: 148835 - DNA, 20 bp, Artificial Sequence
  Description of Artificial Sequence: Synthetic oligonucleotide
  Target: LAMA2; (+) strand; PAM type: NRG; PAM sequence: CAG
attttttattaacattgcca

SEQ ID NO: 148836 - DNA, 20 bp, Artificial Sequence
  Description of Artificial Sequence: Synthetic oligonucleotide
  Target: LAMA2; (+) strand; PAM type: NRG; PAM sequence: CAG
ttttattaacattgccacag

SEQ ID NO: 148837 - DNA, 20 bp, Artificial Sequence
  Description of Artificial Sequence: Synthetic oligonucleotide
  Target: LAMA2; (+) strand; PAM type: NRG; PAM sequence: TGG
tttcatatgcttactctgta

SEQ ID NO: 148838 - DNA, 20 bp, Artificial Sequence
  Description of Artificial Sequence: Synthetic oligonucleotide
  Target: LAMA2; (+) strand; PAM type: NRG; PAM sequence: AAG
ctatctttattttcatttaa

SEQ ID NO: 148839 - DNA, 20 bp, Artificial Sequence
  Description of Artificial Sequence: Synthetic oligonucleotide
  Target: LAMA2; (+) strand; PAM type: NRG; PAM sequence: AAG
catttaaaagatttcttata

SEQ ID NO: 148840 - DNA, 20 bp, Artificial Sequence
  Description of Artificial Sequence: Synthetic oligonucleotide
  Target: LAMA2; (+) strand; PAM type: NRG; PAM sequence: GAG
tttaaaagatttcttataaa

SEQ ID NO: 148841 - DNA, 20 bp, Artificial Sequence
  Description of Artificial Sequence: Synthetic oligonucleotide
  Target: LAMA2; (+) strand; PAM type: NRG; PAM sequence: TAG
atttcttataaagagtaaaa

SEQ ID NO: 148842 - DNA, 20 bp, Artificial Sequence
  Description of Artificial Sequence: Synthetic oligonucleotide
  Target: LAMA2; (+) strand; PAM type: NRG; PAM sequence: TGG
cttataaagagtaaaataga

SEQ ID NO: 148843 - DNA, 20 bp, Artificial Sequence
  Description of Artificial Sequence: Synthetic oligonucleotide
  Target: LAMA2; (+) strand; PAM type: NRG; PAM sequence: TAG
cctgacaattactgtgtgtt

SEQ ID NO: 148844 - DNA, 20 bp, Artificial Sequence
  Description of Artificial Sequence: Synthetic oligonucleotide
  Target: LAMA2; (+) strand; PAM type: NRG; PAM sequence: TAG
tttagtccctaaatttaata

SEQ ID NO: 148845 - DNA, 20 bp, Artificial Sequence
  Description of Artificial Sequence: Synthetic oligonucleotide
  Target: LAMA2; (+) strand; PAM type: NRG; PAM sequence: TGG
aatatagttaataatatgat

SEQ ID NO: 148846 - DNA, 20 bp, Artificial Sequence
  Description of Artificial Sequence: Synthetic oligonucleotide
  Target: LAMA2; (+) strand; PAM type: NRG; PAM sequence: GGG
atatagttaataatatgatt

SEQ ID NO: 148847 - DNA, 20 bp, Artificial Sequence
  Description of Artificial Sequence: Synthetic oligonucleotide
  Target: LAMA2; (+) strand; PAM type: NRG; PAM sequence: CAG
tatgttaaacaaatattttt

SEQ ID NO: 148848 - DNA, 20 bp, Artificial Sequence
  Description of Artificial Sequence: Synthetic oligonucleotide
  Target: LAMA2; (+) strand; PAM type: NRG; PAM sequence: TAG
tatttcctttattatctttt

SEQ ID NO: 148849 - DNA, 20 bp, Artificial Sequence
  Description of Artificial Sequence: Synthetic oligonucleotide
  Target: LAMA2; (+) strand; PAM type: NRG; PAM sequence: CAG
ttcctttattatctttttag

SEQ ID NO: 148850 - DNA, 20 bp, Artificial Sequence
  Description of Artificial Sequence: Synthetic oligonucleotide
  Target: LAMA2; (+) strand; PAM type: NRG; PAM sequence: TAG
ttccattccaacttttattt

SEQ ID NO: 148851 - DNA, 20 bp, Artificial Sequence
  Description of Artificial Sequence: Synthetic oligonucleotide
  Target: LAMA2; (+) strand; PAM type: NRG; PAM sequence: AGG
tccattccaacttttatttt

SEQ ID NO: 148852 - DNA, 20 bp, Artificial Sequence
  Description of Artificial Sequence: Synthetic oligonucleotide
  Target: LAMA2; (+) strand; PAM type: NRG; PAM sequence: CAG
tccaacttttattttaggtt

SEQ ID NO: 148853 - DNA, 20 bp, Artificial Sequence
  Description of Artificial Sequence: Synthetic oligonucleotide
  Target: LAMA2; (+) strand; PAM type: NRG; PAM sequence: AGG
ccaacttttattttaggttc

SEQ ID NO: 148854 - DNA, 20 bp, Artificial Sequence
  Description of Artificial Sequence: Synthetic oligonucleotide
  Target: LAMA2; (+) strand; PAM type: NRG; PAM sequence: TAG
acttttattttaggttcagg

SEQ ID NO: 148855 - DNA, 20 bp, Artificial Sequence
  Description of Artificial Sequence: Synthetic oligonucleotide
  Target: LAMA2; (+) strand; PAM type: NRG; PAM sequence: TGG
ttttaggttcaggtagtaca

SEQ ID NO: 148856 - DNA, 20 bp, Artificial Sequence
  Description of Artificial Sequence: Synthetic oligonucleotide
  Target: LAMA2; (+) strand; PAM type: NRG; PAM sequence: GGG
tttaggttcaggtagtacat

SEQ ID NO: 148857 - DNA, 20 bp, Artificial Sequence
  Description of Artificial Sequence: Synthetic oligonucleotide
  Target: LAMA2; (+) strand; PAM type: NRG; PAM sequence: TGG
catgggtaaattatgtgtca

SEQ ID NO: 148858 - DNA, 20 bp, Artificial Sequence
  Description of Artificial Sequence: Synthetic oligonucleotide
  Target: LAMA2; (+) strand; PAM type: NRG; PAM sequence: GGG
atgggtaaattatgtgtcat

SEQ ID NO: 148859 - DNA, 20 bp, Artificial Sequence
  Description of Artificial Sequence: Synthetic oligonucleotide
  Target: LAMA2; (+) strand; PAM type: NRG; PAM sequence: TGG
aaattatgtgtcatgggatt

SEQ ID NO: 148860 - DNA, 20 bp, Artificial Sequence
  Description of Artificial Sequence: Synthetic oligonucleotide
  Target: LAMA2; (+) strand; PAM type: NRG; PAM sequence: CAG
gtgtcatgggatttggtgta

SEQ ID NO: 148861 - DNA, 20 bp, Artificial Sequence
  Description of Artificial Sequence: Synthetic oligonucleotide
  Target: LAMA2; (+) strand; PAM type: NRG; PAM sequence: CAG
gtacagattattttgtcacc

SEQ ID NO: 148862 - DNA, 20 bp, Artificial Sequence
  Description of Artificial Sequence: Synthetic oligonucleotide
  Target: LAMA2; (+) strand; PAM type: NRG; PAM sequence: AAG
tattttgtcacccagataat

SEQ ID NO: 148863 - DNA, 20 bp, Artificial Sequence
  Description of Artificial Sequence: Synthetic oligonucleotide
  Target: LAMA2; (+) strand; PAM type: NRG; PAM sequence: AAG
acccccctcccacccttttc

SEQ ID NO: 148864 - DNA, 20 bp, Artificial Sequence
  Description of Artificial Sequence: Synthetic oligonucleotide
  Target: LAMA2; (+) strand; PAM type: NRG; PAM sequence: CAG
cccctcccacccttttcaag

SEQ ID NO: 148865 - DNA, 20 bp, Artificial Sequence
  Description of Artificial Sequence: Synthetic oligonucleotide
  Target: LAMA2; (+) strand; PAM type: NRG; PAM sequence: AGG
ccctcccacccttttcaagc

SEQ ID NO: 148866 - DNA, 20 bp, Artificial Sequence
  Description of Artificial Sequence: Synthetic oligonucleotide
  Target: LAMA2; (+) strand; PAM type: NRG; PAM sequence: TGG
cacccttttcaagcaggccc

SEQ ID NO: 148867 - DNA, 20 bp, Artificial Sequence
  Description of Artificial Sequence: Synthetic oligonucleotide
  Target: LAMA2; (+) strand; PAM type: NRG; PAM sequence: TAG
gtccatgtgtactcaatgtt

SEQ ID NO: 148868 - DNA, 20 bp, Artificial Sequence
  Description of Artificial Sequence: Synthetic oligonucleotide
  Target: LAMA2; (+) strand; PAM type: NRG; PAM sequence: AAG
caatgtttagctccactcat

SEQ ID NO: 148869 - DNA, 20 bp, Artificial Sequence
  Description of Artificial Sequence: Synthetic oligonucleotide
  Target: LAMA2; (+) strand; PAM type: NRG; PAM sequence: GAG
atgtttagctccactcataa

SEQ ID NO: 148870 - DNA, 20 bp, Artificial Sequence
  Description of Artificial Sequence: Synthetic oligonucleotide
  Target: LAMA2; (+) strand; PAM type: NRG; PAM sequence: GAG
gtttagctccactcataaga

SEQ ID NO: 148871 - DNA, 20 bp, Artificial Sequence
  Description of Artificial Sequence: Synthetic oligonucleotide
  Target: LAMA2; (+) strand; PAM type: NRG; PAM sequence: CAG
cactcataagagagaacatg

SEQ ID NO: 148872 - DNA, 20 bp, Artificial Sequence
  Description of Artificial Sequence: Synthetic oligonucleotide
  Target: LAMA2; (+) strand; PAM type: NRG; PAM sequence: TGG
aagagagaacatgcagtatc

SEQ ID NO: 148873 - DNA, 20 bp, Artificial Sequence
  Description of Artificial Sequence: Synthetic oligonucleotide
  Target: LAMA2; (+) strand; PAM type: NRG; PAM sequence: TAG
tattcttgcattaattcact

SEQ ID NO: 148874 - DNA, 20 bp, Artificial Sequence
  Description of Artificial Sequence: Synthetic oligonucleotide
  Target: LAMA2; (+) strand; PAM type: NRG; PAM sequence: AGG
attcttgcattaattcactt

SEQ ID NO: 148875 - DNA, 20 bp, Artificial Sequence
  Description of Artificial Sequence: Synthetic oligonucleotide
  Target: LAMA2; (+) strand; PAM type: NRG; PAM sequence: TGG
cattaattcacttaggataa

SEQ ID NO: 148876 - DNA, 20 bp, Artificial Sequence
  Description of Artificial Sequence: Synthetic oligonucleotide
  Target: LAMA2; (+) strand; PAM type: NRG; PAM sequence: AAG
gctccatccatgttgcttca

SEQ ID NO: 148877 - DNA, 20 bp, Artificial Sequence
  Description of Artificial Sequence: Synthetic oligonucleotide
  Target: LAMA2; (+) strand; PAM type: NRG; PAM sequence: AGG
ctccatccatgttgcttcaa

SEQ ID NO: 148878 - DNA, 20 bp, Artificial Sequence
  Description of Artificial Sequence: Synthetic oligonucleotide
  Target: LAMA2; (+) strand; PAM type: NRG; PAM sequence: TGG
catgattttattctttttta

SEQ ID NO: 148879 - DNA, 20 bp, Artificial Sequence
  Description of Artificial Sequence: Synthetic oligonucleotide
  Target: LAMA2; (+) strand; PAM type: NRG; PAM sequence: TAG
tattcttttttatggctgtg

SEQ ID NO: 148880 - DNA, 20 bp, Artificial Sequence
  Description of Artificial Sequence: Synthetic oligonucleotide
  Target: LAMA2; (+) strand; PAM type: NRG; PAM sequence: TGG
tatggctgtgtagtattcca

SEQ ID NO: 148881 - DNA, 20 bp, Artificial Sequence
  Description of Artificial Sequence: Synthetic oligonucleotide
  Target: LAMA2; (+) strand; PAM type: NRG; PAM sequence: CAG
tgtactacattttctttatt

SEQ ID NO: 148882 - DNA, 20 bp, Artificial Sequence
  Description of Artificial Sequence: Synthetic oligonucleotide
  Target: LAMA2; (+) strand; PAM type: NRG; PAM sequence: TGG
tttattcagtccaccaatga

SEQ ID NO: 148883 - DNA, 20 bp, Artificial Sequence
  Description of Artificial Sequence: Synthetic oligonucleotide
  Target: LAMA2; (+) strand; PAM type: NRG; PAM sequence: TAG
agtccaccaatgatggtacc

SEQ ID NO: 148884 - DNA, 20 bp, Artificial Sequence
  Description of Artificial Sequence: Synthetic oligonucleotide
  Target: LAMA2; (+) strand; PAM type: NRG; PAM sequence: AGG
gtccaccaatgatggtacct

SEQ ID NO: 148885 - DNA, 20 bp, Artificial Sequence
  Description of Artificial Sequence: Synthetic oligonucleotide
  Target: LAMA2; (+) strand; PAM type: NRG; PAM sequence: TAG
catgtctttgttattgtgaa

SEQ ID NO: 148886 - DNA, 20 bp, Artificial Sequence
  Description of Artificial Sequence: Synthetic oligonucleotide
  Target: LAMA2; (+) strand; PAM type: NRG; PAM sequence: AGG
atgtctttgttattgtgaat

SEQ ID NO: 148887 - DNA, 20 bp, Artificial Sequence
  Description of Artificial Sequence: Synthetic oligonucleotide
  Target: LAMA2; (+) strand; PAM type: NRG; PAM sequence: GGG
tgtctttgttattgtgaata

SEQ ID NO: 148888 - DNA, 20 bp, Artificial Sequence
  Description of Artificial Sequence: Synthetic oligonucleotide
  Target: LAMA2; (+) strand; PAM type: NRG; PAM sequence: TAG
gaatagggctgcaatgaaca

SEQ ID NO: 148889 - DNA, 20 bp, Artificial Sequence
  Description of Artificial Sequence: Synthetic oligonucleotide
  Target: LAMA2; (+) strand; PAM type: NRG; PAM sequence: AGG
aatagggctgcaatgaacat

SEQ ID NO: 148890 - DNA, 20 bp, Artificial Sequence
  Description of Artificial Sequence: Synthetic oligonucleotide
  Target: LAMA2; (+) strand; PAM type: NRG; PAM sequence: TGG
aatgaacataggcatgcatg

SEQ ID NO: 148891 - DNA, 20 bp, Artificial Sequence
  Description of Artificial Sequence: Synthetic oligonucleotide
  Target: LAMA2; (+) strand; PAM type: NRG; PAM sequence: TAG
gcatgcatgtggctttatga

SEQ ID NO: 148892 - DNA, 20 bp, Artificial Sequence
  Description of Artificial Sequence: Synthetic oligonucleotide
  Target: LAMA2; (+) strand; PAM type: NRG; PAM sequence: TGG
tagaatgatatatattcctt

SEQ ID NO: 148893 - DNA, 20 bp, Artificial Sequence
  Description of Artificial Sequence: Synthetic oligonucleotide
  Target: LAMA2; (+) strand; PAM type: NRG; PAM sequence: GGG
agaatgatatatattccttt

SEQ ID NO: 148894 - DNA, 20 bp, Artificial Sequence
  Description of Artificial Sequence: Synthetic oligonucleotide
  Target: LAMA2; (+) strand; PAM type: NRG; PAM sequence: CAG
tattcctttgggcatatacg

SEQ ID NO: 148895 - DNA, 20 bp, Artificial Sequence
  Description of Artificial Sequence: Synthetic oligonucleotide
  Target: LAMA2; (+) strand; PAM type: NRG; PAM sequence: TGG
tttgggcatatacgcagtaa

SEQ ID NO: 148896 - DNA, 20 bp, Artificial Sequence
  Description of Artificial Sequence: Synthetic oligonucleotide
  Target: LAMA2; (+) strand; PAM type: NRG; PAM sequence: GGG
ttgggcatatacgcagtaat

SEQ ID NO: 148897 - DNA, 20 bp, Artificial Sequence
  Description of Artificial Sequence: Synthetic oligonucleotide
  Target: LAMA2; (+) strand; PAM type: NRG; PAM sequence: GAG
tacgcagtaatgggattgct

SEQ ID NO: 148898 - DNA, 20 bp, Artificial Sequence
  Description of Artificial Sequence: Synthetic oligonucleotide
  Target: LAMA2; (+) strand; PAM type: NRG; PAM sequence: GAG
agtaatgggattgctgagtt

SEQ ID NO: 148899 - DNA, 20 bp, Artificial Sequence
  Description of Artificial Sequence: Synthetic oligonucleotide
  Target: LAMA2; (+) strand; PAM type: NRG; PAM sequence: TAG
gggattgctgagttgagtgc

SEQ ID NO: 148900 - DNA, 20 bp, Artificial Sequence
  Description of Artificial Sequence: Synthetic oligonucleotide
  Target: LAMA2; (+) strand; PAM type: NRG; PAM sequence: AAG
ttgagtgctagttctgtttt

SEQ ID NO: 148901 - DNA, 20 bp, Artificial Sequence
  Description of Artificial Sequence: Synthetic oligonucleotide
  Target: LAMA2; (+) strand; PAM type: NRG; PAM sequence: GAG
agttctgttttaagtttttt

SEQ ID NO: 148902 - DNA, 20 bp, Artificial Sequence
  Description of Artificial Sequence: Synthetic oligonucleotide
  Target: LAMA2; (+) strand; PAM type: NRG; PAM sequence: CGG
ttttttgagaaatctcccaa

SEQ ID NO: 148903 - DNA, 20 bp, Artificial Sequence
  Description of Artificial Sequence: Synthetic oligonucleotide
  Target: LAMA2; (+) strand; PAM type: NRG; PAM sequence: CAG
aatctcccaacggcttccca

SEQ ID NO: 148904 - DNA, 20 bp, Artificial Sequence
  Description of Artificial Sequence: Synthetic oligonucleotide
  Target: LAMA2; (+) strand; PAM type: NRG; PAM sequence: CAG
gaactaatttactttcccac

SEQ ID NO: 148905 - DNA, 20 bp, Artificial Sequence
  Description of Artificial Sequence: Synthetic oligonucleotide
  Target: LAMA2; (+) strand; PAM type: NRG; PAM sequence: CAG
ctaatttactttcccaccag

SEQ ID NO: 148906 - DNA, 20 bp, Artificial Sequence
  Description of Artificial Sequence: Synthetic oligonucleotide
  Target: LAMA2; (+) strand; PAM type: NRG; PAM sequence: AAG
ctttcccaccagcagtgtat

SEQ ID NO: 148907 - DNA, 20 bp, Artificial Sequence
  Description of Artificial Sequence: Synthetic oligonucleotide
  Target: LAMA2; (+) strand; PAM type: NRG; PAM sequence: CAG
ccctttctctgcaacctcac

SEQ ID NO: 148908 - DNA, 20 bp, Artificial Sequence
  Description of Artificial Sequence: Synthetic oligonucleotide
  Target: LAMA2; (+) strand; PAM type: NRG; PAM sequence: CAG
tatctgttatttttgacttt

SEQ ID NO: 148909 - DNA, 20 bp, Artificial Sequence
  Description of Artificial Sequence: Synthetic oligonucleotide
  Target: LAMA2; (+) strand; PAM type: NRG; PAM sequence: TAG
ttatttttgactttcagtaa

SEQ ID NO: 148910 - DNA, 20 bp, Artificial Sequence
  Description of Artificial Sequence: Synthetic oligonucleotide
  Target: LAMA2; (+) strand; PAM type: NRG; PAM sequence: CAG
tcagtaatagccgttctgac

SEQ ID NO: 148911 - DNA, 20 bp, Artificial Sequence
  Description of Artificial Sequence: Synthetic oligonucleotide
  Target: LAMA2; (+) strand; PAM type: NRG; PAM sequence: GAG
atagccgttctgaccagtgt

SEQ ID NO: 148912 - DNA, 20 bp, Artificial Sequence
  Description of Artificial Sequence: Synthetic oligonucleotide
  Target: LAMA2; (+) strand; PAM type: NRG; PAM sequence: TGG
ccgttctgaccagtgtgaga

SEQ ID NO: 148913 - DNA, 20 bp, Artificial Sequence
  Description of Artificial Sequence: Synthetic oligonucleotide
  Target: LAMA2; (+) strand; PAM type: NRG; PAM sequence: TAG
ttctgaccagtgtgagatgg

SEQ ID NO: 148914 - DNA, 20 bp, Artificial Sequence
  Description of Artificial Sequence: Synthetic oligonucleotide
  Target: LAMA2; (+) strand; PAM type: NRG; PAM sequence: AAG
gtgtgagatggtagtatttt

SEQ ID NO: 148915 - DNA, 20 bp, Artificial Sequence
  Description of Artificial Sequence: Synthetic oligonucleotide
  Target: LAMA2; (+) strand; PAM type: NRG; PAM sequence: TAG
agtattttaagctcatgata

SEQ ID NO: 148916 - DNA, 20 bp, Artificial Sequence
  Description of Artificial Sequence: Synthetic oligonucleotide
  Target: LAMA2; (+) strand; PAM type: NRG; PAM sequence: TAG
aagctcatgatatagtgata

SEQ ID NO: 148917 - DNA, 20 bp, Artificial Sequence
  Description of Artificial Sequence: Synthetic oligonucleotide
  Target: LAMA2; (+) strand; PAM type: NRG; PAM sequence: TGG
agtgatatagtcctatcttt

SEQ ID NO: 148918 - DNA, 20 bp, Artificial Sequence
  Description of Artificial Sequence: Synthetic oligonucleotide
  Target: LAMA2; (+) strand; PAM type: NRG; PAM sequence: AAG
atatattgcacataatttgt

SEQ ID NO: 148919 - DNA, 20 bp, Artificial Sequence
  Description of Artificial Sequence: Synthetic oligonucleotide
  Target: LAMA2; (+) strand; PAM type: NRG; PAM sequence: CAG
attgcacataatttgtaagc

SEQ ID NO: 148920 - DNA, 20 bp, Artificial Sequence
  Description of Artificial Sequence: Synthetic oligonucleotide
  Target: LAMA2; (+) strand; PAM type: NRG; PAM sequence: AAG
aatgttgtcatttttgtttg

SEQ ID NO: 148921 - DNA, 20 bp, Artificial Sequence
  Description of Artificial Sequence: Synthetic oligonucleotide
  Target: LAMA2; (+) strand; PAM type: NRG; PAM sequence: AAG
aaactatgaaaacaatctta

SEQ ID NO: 148922 - DNA, 20 bp, Artificial Sequence
  Description of Artificial Sequence: Synthetic oligonucleotide
  Target: LAMA2; (+) strand; PAM type: NRG; PAM sequence: AAG
aacaatcttaaagaaatgaa

SEQ ID NO: 148923 - DNA, 20 bp, Artificial Sequence
  Description of Artificial Sequence: Synthetic oligonucleotide
  Target: LAMA2; (+) strand; PAM type: NRG; PAM sequence: AAG
aatcttaaagaaatgaaaag

SEQ ID NO: 148924 - DNA, 20 bp, Artificial Sequence
  Description of Artificial Sequence: Synthetic oligonucleotide
  Target: LAMA2; (+) strand; PAM type: NRG; PAM sequence: AGG
atcttaaagaaatgaaaaga

SEQ ID NO: 148925 - DNA, 20 bp, Artificial Sequence
  Description of Artificial Sequence: Synthetic oligonucleotide
  Target: LAMA2; (+) strand; PAM type: NRG; PAM sequence: TGG
ttcccattttccatactctg

SEQ ID NO: 148926 - DNA, 20 bp, Artificial Sequence
  Description of Artificial Sequence: Synthetic oligonucleotide
  Target: LAMA2; (+) strand; PAM type: NRG; PAM sequence: TAG
ttttccatactctgtggttc

SEQ ID NO: 148927 - DNA, 20 bp, Artificial Sequence
  Description of Artificial Sequence: Synthetic oligonucleotide
  Target: LAMA2; (+) strand; PAM type: NRG; PAM sequence: TGG
ttcctttaacattttttttt

SEQ ID NO: 148928 - DNA, 20 bp, Artificial Sequence
  Description of Artificial Sequence: Synthetic oligonucleotide
  Target: LAMA2; (+) strand; PAM type: NRG; PAM sequence: TAG
ctttaacattttttttttgg

SEQ ID NO: 148929 - DNA, 20 bp, Artificial Sequence
  Description of Artificial Sequence: Synthetic oligonucleotide
  Target: LAMA2; (+) strand; PAM type: NRG; PAM sequence: CAG
acattttttttttggtagtg

SEQ ID NO: 148930 - DNA, 20 bp, Artificial Sequence
  Description of Artificial Sequence: Synthetic oligonucleotide
  Target: LAMA2; (+) strand; PAM type: NRG; PAM sequence: GAG
attttttttttggtagtgca

SEQ ID NO: 148931 - DNA, 20 bp, Artificial Sequence
  Description of Artificial Sequence: Synthetic oligonucleotide
  Target: LAMA2; (+) strand; PAM type: NRG; PAM sequence: TGG
ttttggtagtgcagagctgc

SEQ ID NO: 148932 - DNA, 20 bp, Artificial Sequence
  Description of Artificial Sequence: Synthetic oligonucleotide
  Target: LAMA2; (+) strand; PAM type: NRG; PAM sequence: AAG
ttaatctactttcattattg

SEQ ID NO: 148933 - DNA, 20 bp, Artificial Sequence
  Description of Artificial Sequence: Synthetic oligonucleotide
  Target: LAMA2; (+) strand; PAM type: NRG; PAM sequence: AGG
taatctactttcattattga

SEQ ID NO: 148934 - DNA, 20 bp, Artificial Sequence
  Description of Artificial Sequence: Synthetic oligonucleotide
  Target: LAMA2; (+) strand; PAM type: NRG; PAM sequence: TAG
attgaaggatattttccaca

SEQ ID NO: 148935 - DNA, 20 bp, Artificial Sequence
  Description of Artificial Sequence: Synthetic oligonucleotide
  Target: LAMA2; (+) strand; PAM type: NRG; PAM sequence: CAG
ggatattttccacatagtta

SEQ ID NO: 148936 - DNA, 20 bp, Artificial Sequence
  Description of Artificial Sequence: Synthetic oligonucleotide
  Target: LAMA2; (+) strand; PAM type: NRG; PAM sequence: GAG
atattttccacatagttaca

SEQ ID NO: 148937 - DNA, 20 bp, Artificial Sequence
  Description of Artificial Sequence: Synthetic oligonucleotide
  Target: LAMA2; (+) strand; PAM type: NRG; PAM sequence: AGG
tattttccacatagttacag

SEQ ID NO: 148938 - DNA, 20 bp, Artificial Sequence
  Description of Artificial Sequence: Synthetic oligonucleotide
  Target: LAMA2; (+) strand; PAM type: NRG; PAM sequence: TAG
tgtgtgttttcttctttgtt

SEQ ID NO: 148939 - DNA, 20 bp, Artificial Sequence
  Description of Artificial Sequence: Synthetic oligonucleotide
  Target: LAMA2; (+) strand; PAM type: NRG; PAM sequence: AAG
cttctttgtttagcacttta

SEQ ID NO: 148940 - DNA, 20 bp, Artificial Sequence
  Description of Artificial Sequence: Synthetic oligonucleotide
  Target: LAMA2; (+) strand; PAM type: NRG; PAM sequence: TGG
tgtttagcactttaaagatg

SEQ ID NO: 148941 - DNA, 20 bp, Artificial Sequence
  Description of Artificial Sequence: Synthetic oligonucleotide
  Target: LAMA2; (+) strand; PAM type: NRG; PAM sequence: TGG
gatgtggcaccattattttc

SEQ ID NO: 148942 - DNA, 20 bp, Artificial Sequence
  Description of Artificial Sequence: Synthetic oligonucleotide
  Target: LAMA2; (+) strand; PAM type: NRG; PAM sequence: TAG
cattcatccttatgacaaca

SEQ ID NO: 148943 - DNA, 20 bp, Artificial Sequence
  Description of Artificial Sequence: Synthetic oligonucleotide
  Target: LAMA2; (+) strand; PAM type: NRG; PAM sequence: TAG
tatatatatctttaattcac

SEQ ID NO: 148944 - DNA, 20 bp, Artificial Sequence
  Description of Artificial Sequence: Synthetic oligonucleotide
  Target: LAMA2; (+) strand; PAM type: NRG; PAM sequence: TGG
taccatgtatgataaaactt

SEQ ID NO: 148945 - DNA, 20 bp, Artificial Sequence
  Description of Artificial Sequence: Synthetic oligonucleotide
  Target: LAMA2; (+) strand; PAM type: NRG; PAM sequence: TAG
tatgataaaactttggcccg

SEQ ID NO: 148946 - DNA, 20 bp, Artificial Sequence
  Description of Artificial Sequence: Synthetic oligonucleotide
  Target: LAMA2; (+) strand; PAM type: NRG; PAM sequence: TGG
cgtagaccaaatctgactca

SEQ ID NO: 148947 - DNA, 20 bp, Artificial Sequence
  Description of Artificial Sequence: Synthetic oligonucleotide
  Target: LAMA2; (+) strand; PAM type: NRG; PAM sequence: AAG
cctatatttgtatgatctgt

SEQ ID NO: 148948 - DNA, 20 bp, Artificial Sequence
  Description of Artificial Sequence: Synthetic oligonucleotide
  Target: LAMA2; (+) strand; PAM type: NRG; PAM sequence: AAG
atttgtatgatctgtaagca

SEQ ID NO: 148949 - DNA, 20 bp, Artificial Sequence
  Description of Artificial Sequence: Synthetic oligonucleotide
  Target: LAMA2; (+) strand; PAM type: NRG; PAM sequence: AGG
tttgtatgatctgtaagcaa

SEQ ID NO: 148950 - DNA, 20 bp, Artificial Sequence
  Description of Artificial Sequence: Synthetic oligonucleotide
  Target: LAMA2; (+) strand; PAM type: NRG; PAM sequence: AAG
aggatgtttttacatttgta

SEQ ID NO: 148951 - DNA, 20 bp, Artificial Sequence
  Description of Artificial Sequence: Synthetic oligonucleotide
  Target: LAMA2; (+) strand; PAM type: NRG; PAM sequence: AGG
ggatgtttttacatttgtaa

SEQ ID NO: 148952 - DNA, 20 bp, Artificial Sequence
  Description of Artificial Sequence: Synthetic oligonucleotide
  Target: LAMA2; (+) strand; PAM type: NRG; PAM sequence: AAG
catttgtaaaggtttgttaa

SEQ ID NO: 148953 - DNA, 20 bp, Artificial Sequence
  Description of Artificial Sequence: Synthetic oligonucleotide
  Target: LAMA2; (+) strand; PAM type: NRG; PAM sequence: AGG
atttgtaaaggtttgttaaa

SEQ ID NO: 148954 - DNA, 20 bp, Artificial Sequence
  Description of Artificial Sequence: Synthetic oligonucleotide
  Target: LAMA2; (+) strand; PAM type: NRG; PAM sequence: GAG
ttgtaaaggtttgttaaaag

SEQ ID NO: 148955 - DNA, 20 bp, Artificial Sequence
  Description of Artificial Sequence: Synthetic oligonucleotide
  Target: LAMA2; (+) strand; PAM type: NRG; PAM sequence: AAG
taaaggtttgttaaaaggag

SEQ ID NO: 148956 - DNA, 20 bp, Artificial Sequence
  Description of Artificial Sequence: Synthetic oligonucleotide
  Target: LAMA2; (+) strand; PAM type: NRG; PAM sequence: TAG
aggtttgttaaaaggagaag

SEQ ID NO: 148957 - DNA, 20 bp, Artificial Sequence
  Description of Artificial Sequence: Synthetic oligonucleotide
  Target: LAMA2; (+) strand; PAM type: NRG; PAM sequence: AAG
tttgttaaaaggagaagtag

SEQ ID NO: 148958 - DNA, 20 bp, Artificial Sequence
  Description of Artificial Sequence: Synthetic oligonucleotide
  Target: LAMA2; (+) strand; PAM type: NRG; PAM sequence: AAG
gttaaaaggagaagtagaag

SEQ ID NO: 148959 - DNA, 20 bp, Artificial Sequence
  Description of Artificial Sequence: Synthetic oligonucleotide
  Target: LAMA2; (+) strand; PAM type: NRG; PAM sequence: AGG
ttaaaaggagaagtagaaga

SEQ ID NO: 148960 - DNA, 20 bp, Artificial Sequence
  Description of Artificial Sequence: Synthetic oligonucleotide
  Target: LAMA2; (+) strand; PAM type: NRG; PAM sequence: GGG
taaaaggagaagtagaagaa

SEQ ID NO: 148961 - DNA, 20 bp, Artificial Sequence
  Description of Artificial Sequence: Synthetic oligonucleotide
  Target: LAMA2; (+) strand; PAM type: NRG; PAM sequence: GGG
aaaaggagaagtagaagaag

SEQ ID NO: 148962 - DNA, 20 bp, Artificial Sequence
  Description of Artificial Sequence: Synthetic oligonucleotide
  Target: LAMA2; (+) strand; PAM type: NRG; PAM sequence: GAG
aaggagaagtagaagaaggg

SEQ ID NO: 148963 - DNA, 20 bp, Artificial Sequence
  Description of Artificial Sequence: Synthetic oligonucleotide
  Target: LAMA2; (+) strand; PAM type: NRG; PAM sequence: AAG
agtagaagaaggggagaatg

SEQ ID NO: 148964 - DNA, 20 bp, Artificial Sequence
  Description of Artificial Sequence: Synthetic oligonucleotide
  Target: LAMA2; (+) strand; PAM type: NRG; PAM sequence: GAG
tagaagaaggggagaatgaa

SEQ ID NO: 148965 - DNA, 20 bp, Artificial Sequence
  Description of Artificial Sequence: Synthetic oligonucleotide
  Target: LAMA2; (+) strand; PAM type: NRG; PAM sequence: TAG
aaggggagaatgaagagaac

SEQ ID NO: 148966 - DNA, 20 bp, Artificial Sequence
  Description of Artificial Sequence: Synthetic oligonucleotide
  Target: LAMA2; (+) strand; PAM type: NRG; PAM sequence: AGG
aggggagaatgaagagaact

SEQ ID NO: 148967 - DNA, 20 bp, Artificial Sequence
  Description of Artificial Sequence: Synthetic oligonucleotide
  Target: LAMA2; (+) strand; PAM type: NRG; PAM sequence: GAG
gggagaatgaagagaactag

SEQ ID NO: 148968 - DNA, 20 bp, Artificial Sequence
  Description of Artificial Sequence: Synthetic oligonucleotide
  Target: LAMA2; (+) strand; PAM type: NRG; PAM sequence: AGG
ggagaatgaagagaactagg

SEQ ID NO: 148969 - DNA, 20 bp, Artificial Sequence
  Description of Artificial Sequence: Synthetic oligonucleotide
  Target: LAMA2; (+) strand; PAM type: NRG; PAM sequence: GGG
gagaatgaagagaactagga

SEQ ID NO: 148970 - DNA, 20 bp, Artificial Sequence
  Description of Artificial Sequence: Synthetic oligonucleotide
  Target: LAMA2; (+) strand; PAM type: NRG; PAM sequence: GGG
agaatgaagagaactaggag

SEQ ID NO: 148971 - DNA, 20 bp, Artificial Sequence
  Description of Artificial Sequence: Synthetic oligonucleotide
  Target: LAMA2; (+) strand; PAM type: NRG; PAM sequence: GGG
gaatgaagagaactaggagg

SEQ ID NO: 148972 - DNA, 20 bp, Artificial Sequence
  Description of Artificial Sequence: Synthetic oligonucleotide
  Target: LAMA2; (+) strand; PAM type: NRG; PAM sequence: GGG
aatgaagagaactaggaggg

SEQ ID NO: 148973 - DNA, 20 bp, Artificial Sequence
  Description of Artificial Sequence: Synthetic oligonucleotide
  Target: LAMA2; (+) strand; PAM type: NRG; PAM sequence: GGG
atgaagagaactaggagggg

SEQ ID NO: 148974 - DNA, 20 bp, Artificial Sequence
  Description of Artificial Sequence: Synthetic oligonucleotide
  Target: LAMA2; (+) strand; PAM type: NRG; PAM sequence: GGG
tgaagagaactaggaggggg

SEQ ID NO: 148975 - DNA, 20 bp, Artificial Sequence
  Description of Artificial Sequence: Synthetic oligonucleotide
  Target: LAMA2; (+) strand; PAM type: NRG; PAM sequence: AAG
agagaactaggagggggggg

SEQ ID NO: 148976 - DNA, 20 bp, Artificial Sequence
  Description of Artificial Sequence: Synthetic oligonucleotide
  Target: LAMA2; (+) strand; PAM type: NRG; PAM sequence: AAG
gaactaggaggggggggaag

SEQ ID NO: 148977 - DNA, 20 bp, Artificial Sequence
  Description of Artificial Sequence: Synthetic oligonucleotide
  Target: LAMA2; (+) strand; PAM type: NRG; PAM sequence: GAG
actaggaggggggggaagaa

SEQ ID NO: 148978 - DNA, 20 bp, Artificial Sequence
  Description of Artificial Sequence: Synthetic oligonucleotide
  Target: LAMA2; (+) strand; PAM type: NRG; PAM sequence: AGG
ctaggaggggggggaagaag

SEQ ID NO: 148979 - DNA, 20 bp, Artificial Sequence
  Description of Artificial Sequence: Synthetic oligonucleotide
  Target: LAMA2; (+) strand; PAM type: NRG; PAM sequence: GAG
aggaggggggggaagaagag

SEQ ID NO: 148980 - DNA, 20 bp, Artificial Sequence
  Description of Artificial Sequence: Synthetic oligonucleotide
  Target: LAMA2; (+) strand; PAM type: NRG; PAM sequence: AGG
ggaggggggggaagaagagg

SEQ ID NO: 148981 - DNA, 20 bp, Artificial Sequence
  Description of Artificial Sequence: Synthetic oligonucleotide
  Target: LAMA2; (+) strand; PAM type: NRG; PAM sequence: AAG
ggggggggaagaagaggagg

SEQ ID NO: 148982 - DNA, 20 bp, Artificial Sequence
  Description of Artificial Sequence: Synthetic oligonucleotide
  Target: LAMA2; (+) strand; PAM type: NRG; PAM sequence: AAG
gaagaagaggaggaagaatg

SEQ ID NO: 148983 - DNA, 20 bp, Artificial Sequence
  Description of Artificial Sequence: Synthetic oligonucleotide
  Target: LAMA2; (+) strand; PAM type: NRG; PAM sequence: GAG
agaagaggaggaagaatgaa

SEQ ID NO: 148984 - DNA, 20 bp, Artificial Sequence
  Description of Artificial Sequence: Synthetic oligonucleotide
  Target: LAMA2; (+) strand; PAM type: NRG; PAM sequence: GAG
aagaggaggaagaatgaaga

SEQ ID NO: 148985 - DNA, 20 bp, Artificial Sequence
  Description of Artificial Sequence: Synthetic oligonucleotide
  Target: LAMA2; (+) strand; PAM type: NRG; PAM sequence: TGG
gaatgaagagagtctttata

SEQ ID NO: 148986 - DNA, 20 bp, Artificial Sequence
  Description of Artificial Sequence: Synthetic oligonucleotide
  Target: LAMA2; (+) strand; PAM type: NRG; PAM sequence: TGG
atatggcttattttactatc

SEQ ID NO: 148987 - DNA, 20 bp, Artificial Sequence
  Description of Artificial Sequence: Synthetic oligonucleotide
  Target: LAMA2; (+) strand; PAM type: NRG; PAM sequence: CAG
ttttactatctggcccttta

SEQ ID NO: 148988 - DNA, 20 bp, Artificial Sequence
  Description of Artificial Sequence: Synthetic oligonucleotide
  Target: LAMA2; (+) strand; PAM type: NRG; PAM sequence: AAG
ctatctggccctttacagaa

SEQ ID NO: 148989 - DNA, 20 bp, Artificial Sequence
  Description of Artificial Sequence: Synthetic oligonucleotide
  Target: LAMA2; (+) strand; PAM type: NRG; PAM sequence: CAG
acagaaaagttttccaacct

SEQ ID NO: 148990 - DNA, 20 bp, Artificial Sequence
  Description of Artificial Sequence: Synthetic oligonucleotide
  Target: LAMA2; (+) strand; PAM type: NRG; PAM sequence: GAG
agaaaagttttccaacctca

SEQ ID NO: 148991 - DNA, 20 bp, Artificial Sequence
  Description of Artificial Sequence: Synthetic oligonucleotide
  Target: LAMA2; (+) strand; PAM type: NRG; PAM sequence: TGG
aactatgatgtgtctatgtt

SEQ ID NO: 148992 - DNA, 20 bp, Artificial Sequence
  Description of Artificial Sequence: Synthetic oligonucleotide
  Target: LAMA2; (+) strand; PAM type: NRG; PAM sequence: AAG
tgtgtctatgtttggctttc

SEQ ID NO: 148993 - DNA, 20 bp, Artificial Sequence
  Description of Artificial Sequence: Synthetic oligonucleotide
  Target: LAMA2; (+) strand; PAM type: NRG; PAM sequence: AAG
cttaccttgcttgattcaca

SEQ ID NO: 148994 - DNA, 20 bp, Artificial Sequence
  Description of Artificial Sequence: Synthetic oligonucleotide
  Target: LAMA2; (+) strand; PAM type: NRG; PAM sequence: TAG
tgcttgattcacaaagcttc

SEQ ID NO: 148995 - DNA, 20 bp, Artificial Sequence
  Description of Artificial Sequence: Synthetic oligonucleotide
  Target: LAMA2; (+) strand; PAM type: NRG; PAM sequence: AGG
gcttgattcacaaagcttct

SEQ ID NO: 148996 - DNA, 20 bp, Artificial Sequence
  Description of Artificial Sequence: Synthetic oligonucleotide
  Target: LAMA2; (+) strand; PAM type: NRG; PAM sequence: GAG
gcttctaggaactataaatt

SEQ ID NO: 148997 - DNA, 20 bp, Artificial Sequence
  Description of Artificial Sequence: Synthetic oligonucleotide
  Target: LAMA2; (+) strand; PAM type: NRG; PAM sequence: TAG
ttgagattttattccacatt

SEQ ID NO: 148998 - DNA, 20 bp, Artificial Sequence
  Description of Artificial Sequence: Synthetic oligonucleotide
  Target: LAMA2; (+) strand; PAM type: NRG; PAM sequence: AGG
tgagattttattccacattt

SEQ ID NO: 148999 - DNA, 20 bp, Artificial Sequence
  Description of Artificial Sequence: Synthetic oligonucleotide
  Target: LAMA2; (+) strand; PAM type: NRG; PAM sequence: TAG
attccacatttaggaaattt

SEQ ID NO: 149000 - DNA, 20 bp, Artificial Sequence
  Description of Artificial Sequence: Synthetic oligonucleotide
  Target: LAMA2; (+) strand; PAM type: NRG; PAM sequence: AGG
ttccacatttaggaaatttt

SEQ ID NO: 149001 - DNA, 20 bp, Artificial Sequence
  Description of Artificial Sequence: Synthetic oligonucleotide
  Target: LAMA2; (+) strand; PAM type: NRG; PAM sequence: TAG
ttatttttacttattttttt

SEQ ID NO: 149002 - DNA, 20 bp, Artificial Sequence
  Description of Artificial Sequence: Synthetic oligonucleotide
  Target: LAMA2; (+) strand; PAM type: NRG; PAM sequence: AGG
tatttttacttatttttttt

SEQ ID NO: 149003 - DNA, 20 bp, Artificial Sequence
  Description of Artificial Sequence: Synthetic oligonucleotide
  Target: LAMA2; (+) strand; PAM type: NRG; PAM sequence: CAG
tttaaaacctgttttttgac

SEQ ID NO: 149004 - DNA, 20 bp, Artificial Sequence
  Description of Artificial Sequence: Synthetic oligonucleotide
  Target: LAMA2; (+) strand; PAM type: NRG; PAM sequence: TAG
agtgtttttccttctctttc

SEQ ID NO: 149005 - DNA, 20 bp, Artificial Sequence
  Description of Artificial Sequence: Synthetic oligonucleotide
  Target: LAMA2; (+) strand; PAM type: NRG; PAM sequence: AGG
gtgtttttccttctctttct

SEQ ID NO: 149006 - DNA, 20 bp, Artificial Sequence
  Description of Artificial Sequence: Synthetic oligonucleotide
  Target: LAMA2; (+) strand; PAM type: NRG; PAM sequence: CAG
tccttctctttctaggactc

SEQ ID NO: 149007 - DNA, 20 bp, Artificial Sequence
  Description of Artificial Sequence: Synthetic oligonucleotide
  Target: LAMA2; (+) strand; PAM type: NRG; PAM sequence: TAG
gactccagctgcatgtgtgc

SEQ ID NO: 149008 - DNA, 20 bp, Artificial Sequence
  Description of Artificial Sequence: Synthetic oligonucleotide
  Target: LAMA2; (+) strand; PAM type: NRG; PAM sequence: AGG
actccagctgcatgtgtgct

SEQ ID NO: 149009 - DNA, 20 bp, Artificial Sequence
  Description of Artificial Sequence: Synthetic oligonucleotide
  Target: LAMA2; (+) strand; PAM type: NRG; PAM sequence: GGG
ctccagctgcatgtgtgcta

SEQ ID NO: 149010 - DNA, 20 bp, Artificial Sequence
  Description of Artificial Sequence: Synthetic oligonucleotide
  Target: LAMA2; (+) strand; PAM type: NRG; PAM sequence: GAG
ctagggcgttcattgtatct

SEQ ID NO: 149011 - DNA, 20 bp, Artificial Sequence
  Description of Artificial Sequence: Synthetic oligonucleotide
  Target: LAMA2; (+) strand; PAM type: NRG; PAM sequence: AGG
tagggcgttcattgtatctg

SEQ ID NO: 149012 - DNA, 20 bp, Artificial Sequence
  Description of Artificial Sequence: Synthetic oligonucleotide
  Target: LAMA2; (+) strand; PAM type: NRG; PAM sequence: CAG
ggcgttcattgtatctgagg

SEQ ID NO: 149013 - DNA, 20 bp, Artificial Sequence
  Description of Artificial Sequence: Synthetic oligonucleotide
  Target: LAMA2; (+) strand; PAM type: NRG; PAM sequence: AAG
attgtatctgaggcagtgct

SEQ ID NO: 149014 - DNA, 20 bp, Artificial Sequence
  Description of Artificial Sequence: Synthetic oligonucleotide
  Target: LAMA2; (+) strand; PAM type: NRG; PAM sequence: TAG
ttttttctttctccgttctt

SEQ ID NO: 149015 - DNA, 20 bp, Artificial Sequence
  Description of Artificial Sequence: Synthetic oligonucleotide
  Target: LAMA2; (+) strand; PAM type: NRG; PAM sequence: TGG
tctttctccgttctttagat

SEQ ID NO: 149016 - DNA, 20 bp, Artificial Sequence
  Description of Artificial Sequence: Synthetic oligonucleotide
  Target: LAMA2; (+) strand; PAM type: NRG; PAM sequence: TGG
attcatctgtcattatactt

SEQ ID NO: 149017 - DNA, 20 bp, Artificial Sequence
  Description of Artificial Sequence: Synthetic oligonucleotide
  Target: LAMA2; (+) strand; PAM type: NRG; PAM sequence: TAG
ataatgtatctttaatttac

SEQ ID NO: 149018 - DNA, 20 bp, Artificial Sequence
  Description of Artificial Sequence: Synthetic oligonucleotide
  Target: LAMA2; (+) strand; PAM type: NRG; PAM sequence: TAG
tgattttaaaatattctcat

SEQ ID NO: 149019 - DNA, 20 bp, Artificial Sequence
  Description of Artificial Sequence: Synthetic oligonucleotide
  Target: LAMA2; (+) strand; PAM type: NRG; PAM sequence: AGG
gattttaaaatattctcatt

SEQ ID NO: 149020 - DNA, 20 bp, Artificial Sequence
  Description of Artificial Sequence: Synthetic oligonucleotide
  Target: LAMA2; (+) strand; PAM type: NRG; PAM sequence: CGG
ttaaaatattctcattaggc

SEQ ID NO: 149021 - DNA, 20 bp, Artificial Sequence
  Description of Artificial Sequence: Synthetic oligonucleotide
  Target: LAMA2; (+) strand; PAM type: NRG; PAM sequence: GGG
taaaatattctcattaggcc

SEQ ID NO: 149022 - DNA, 20 bp, Artificial Sequence
  Description of Artificial Sequence: Synthetic oligonucleotide
  Target: LAMA2; (+) strand; PAM type: NRG; PAM sequence: CAG
tattctcattaggccgggca

SEQ ID NO: 149023 - DNA, 20 bp, Artificial Sequence
  Description of Artificial Sequence: Synthetic oligonucleotide
  Target: LAMA2; (+) strand; PAM type: NRG; PAM sequence: TGG
tctcattaggccgggcacag

SEQ ID NO: 149024 - DNA, 20 bp, Artificial Sequence
  Description of Artificial Sequence: Synthetic oligonucleotide
  Target: LAMA2; (+) strand; PAM type: NRG; PAM sequence: CAG
ccgggcacagtggttcaccc

SEQ ID NO: 149025 - DNA, 20 bp, Artificial Sequence
  Description of Artificial Sequence: Synthetic oligonucleotide
  Target: LAMA2; (+) strand; PAM type: NRG; PAM sequence: AGG
cgggcacagtggttcacccc

SEQ ID NO: 149026 - DNA, 20 bp, Artificial Sequence
  Description of Artificial Sequence: Synthetic oligonucleotide
  Target: LAMA2; (+) strand; PAM type: NRG; PAM sequence: CAG
gtggttcaccccaggaatcc

SEQ ID NO: 149027 - DNA, 20 bp, Artificial Sequence
  Description of Artificial Sequence: Synthetic oligonucleotide
  Target: LAMA2; (+) strand; PAM type: NRG; PAM sequence: TGG
ccccaggaatcccagtactt

SEQ ID NO: 149028 - DNA, 20 bp, Artificial Sequence
  Description of Artificial Sequence: Synthetic oligonucleotide
  Target: LAMA2; (+) strand; PAM type: NRG; PAM sequence: AAG
caggaatcccagtactttgg

SEQ ID NO: 149029 - DNA, 20 bp, Artificial Sequence
  Description of Artificial Sequence: Synthetic oligonucleotide
  Target: LAMA2; (+) strand; PAM type: NRG; PAM sequence: AGG
aggaatcccagtactttgga

SEQ ID NO: 149030 - DNA, 20 bp, Artificial Sequence
  Description of Artificial Sequence: Synthetic oligonucleotide
  Target: LAMA2; (+) strand; PAM type: NRG; PAM sequence: AAG
cccagtactttggaaggccg

SEQ ID NO: 149031 - DNA, 20 bp, Artificial Sequence
  Description of Artificial Sequence: Synthetic oligonucleotide
  Target: LAMA2; (+) strand; PAM type: NRG; PAM sequence: CAG
agtactttggaaggccgaag

SEQ ID NO: 149032 - DNA, 20 bp, Artificial Sequence
  Description of Artificial Sequence: Synthetic oligonucleotide
  Target: LAMA2; (+) strand; PAM type: NRG; PAM sequence: AGG
gtactttggaaggccgaagc

SEQ ID NO: 149033 - DNA, 20 bp, Artificial Sequence
  Description of Artificial Sequence: Synthetic oligonucleotide
  Target: LAMA2; (+) strand; PAM type: NRG; PAM sequence: AAG
tttggaaggccgaagcaggc

SEQ ID NO: 149034 - DNA, 20 bp, Artificial Sequence
  Description of Artificial Sequence: Synthetic oligonucleotide
  Target: LAMA2; (+) strand; PAM type: NRG; PAM sequence: CGG
cgaagcaggcaagtcgcttg

SEQ ID NO: 149035 - DNA, 20 bp, Artificial Sequence
  Description of Artificial Sequence: Synthetic oligonucleotide
  Target: LAMA2; (+) strand; PAM type: NRG; PAM sequence: CAG
gcaggcaagtcgcttgcggt

SEQ ID NO: 149036 - DNA, 20 bp, Artificial Sequence
  Description of Artificial Sequence: Synthetic oligonucleotide
  Target: LAMA2; (+) strand; PAM type: NRG; PAM sequence: AGG
caggcaagtcgcttgcggtc

SEQ ID NO: 149037 - DNA, 20 bp, Artificial Sequence
  Description of Artificial Sequence: Synthetic oligonucleotide
  Target: LAMA2; (+) strand; PAM type: NRG; PAM sequence: GAG
ggcaagtcgcttgcggtcag

SEQ ID NO: 149038 - DNA, 20 bp, Artificial Sequence
  Description of Artificial Sequence: Synthetic oligonucleotide
  Target: LAMA2; (+) strand; PAM type: NRG; PAM sequence: AAG
tcgcttgcggtcaggagttt

SEQ ID NO: 149039 - DNA, 20 bp, Artificial Sequence
  Description of Artificial Sequence: Synthetic oligonucleotide
  Target: LAMA2; (+) strand; PAM type: NRG; PAM sequence: TGG
tcaggagtttaagaccaacc

SEQ ID NO: 149040 - DNA, 20 bp, Artificial Sequence
  Description of Artificial Sequence: Synthetic oligonucleotide
  Target: LAMA2; (+) strand; PAM type: NRG; PAM sequence: TGG
taagaccaacctggccaaca

SEQ ID NO: 149041 - DNA, 20 bp, Artificial Sequence
  Description of Artificial Sequence: Synthetic oligonucleotide
  Target: LAMA2; (+) strand; PAM type: NRG; PAM sequence: TAG
tctattaaaaatacaaaatt

SEQ ID NO: 149042 - DNA, 20 bp, Artificial Sequence
  Description of Artificial Sequence: Synthetic oligonucleotide
  Target: LAMA2; (+) strand; PAM type: NRG; PAM sequence: CAG
ttaaaaatacaaaatttagc

SEQ ID NO: 149043 - DNA, 20 bp, Artificial Sequence
  Description of Artificial Sequence: Synthetic oligonucleotide
  Target: LAMA2; (+) strand; PAM type: NRG; PAM sequence: AGG
taaaaatacaaaatttagcc

SEQ ID NO: 149044 - DNA, 20 bp, Artificial Sequence
  Description of Artificial Sequence: Synthetic oligonucleotide
  Target: LAMA2; (+) strand; PAM type: NRG; PAM sequence: TGG
atacaaaatttagccaggca

SEQ ID NO: 149045 - DNA, 20 bp, Artificial Sequence
  Description of Artificial Sequence: Synthetic oligonucleotide
  Target: LAMA2; (+) strand; PAM type: NRG; PAM sequence: TGG
caaaatttagccaggcatgg

SEQ ID NO: 149046 - DNA, 20 bp, Artificial Sequence
  Description of Artificial Sequence: Synthetic oligonucleotide
  Target: LAMA2; (+) strand; PAM type: NRG; PAM sequence: CAG
aatttagccaggcatggtgg

SEQ ID NO: 149047 - DNA, 20 bp, Artificial Sequence
  Description of Artificial Sequence: Synthetic oligonucleotide
  Target: LAMA2; (+) strand; PAM type: NRG; PAM sequence: AGG
atttagccaggcatggtggc

SEQ ID NO: 149048 - DNA, 20 bp, Artificial Sequence
  Description of Artificial Sequence: Synthetic oligonucleotide
  Target: LAMA2; (+) strand; PAM type: NRG; PAM sequence: CAG
cacctgtaatatcacctact

SEQ ID NO: 149049 - DNA, 20 bp, Artificial Sequence
  Description of Artificial Sequence: Synthetic oligonucleotide
  Target: LAMA2; (+) strand; PAM type: NRG; PAM sequence: AGG
acctgtaatatcacctactc

SEQ ID NO: 149050 - DNA, 20 bp, Artificial Sequence
  Description of Artificial Sequence: Synthetic oligonucleotide
  Target: LAMA2; (+) strand; PAM type: NRG; PAM sequence: GAG
ctgtaatatcacctactcag

SEQ ID NO: 149051 - DNA, 20 bp, Artificial Sequence
  Description of Artificial Sequence: Synthetic oligonucleotide
  Target: LAMA2; (+) strand; PAM type: NRG; PAM sequence: GAG
tatcacctactcaggagact

SEQ ID NO: 149052 - DNA, 20 bp, Artificial Sequence
  Description of Artificial Sequence: Synthetic oligonucleotide
  Target: LAMA2; (+) strand; PAM type: NRG; PAM sequence: AGG
atcacctactcaggagactg

SEQ ID NO: 149053 - DNA, 20 bp, Artificial Sequence
  Description of Artificial Sequence: Synthetic oligonucleotide
  Target: LAMA2; (+) strand; PAM type: NRG; PAM sequence: CAG
acctactcaggagactgagg

SEQ ID NO: 149054 - DNA, 20 bp, Artificial Sequence
  Description of Artificial Sequence: Synthetic oligonucleotide
  Target: LAMA2; (+) strand; PAM type: NRG; PAM sequence: AGG
cctactcaggagactgaggc

SEQ ID NO: 149055 - DNA, 20 bp, Artificial Sequence
  Description of Artificial Sequence: Synthetic oligonucleotide
  Target: LAMA2; (+) strand; PAM type: NRG; PAM sequence: GAG
tactcaggagactgaggcag

SEQ ID NO: 149056 - DNA, 20 bp, Artificial Sequence
  Description of Artificial Sequence: Synthetic oligonucleotide
  Target: LAMA2; (+) strand; PAM type: NRG; PAM sequence: TAG
aggagactgaggcaggagaa

SEQ ID NO: 149057 - DNA, 20 bp, Artificial Sequence
  Description of Artificial Sequence: Synthetic oligonucleotide
  Target: LAMA2; (+) strand; PAM type: NRG; PAM sequence: CAG
gcaggagaatagcttgaacc

SEQ ID NO: 149058 - DNA, 20 bp, Artificial Sequence
  Description of Artificial Sequence: Synthetic oligonucleotide
  Target: LAMA2; (+) strand; PAM type: NRG; PAM sequence: AGG
caggagaatagcttgaaccc

SEQ ID NO: 149059 - DNA, 20 bp, Artificial Sequence
  Description of Artificial Sequence: Synthetic oligonucleotide
  Target: LAMA2; (+) strand; PAM type: NRG; PAM sequence: AAG
gagaatagcttgaacccagg

SEQ ID NO: 149060 - DNA, 20 bp, Artificial Sequence
  Description of Artificial Sequence: Synthetic oligonucleotide
  Target: LAMA2; (+) strand; PAM type: NRG; PAM sequence: GAG
atagcttgaacccaggaagt

SEQ ID NO: 149061 - DNA, 20 bp, Artificial Sequence
  Description of Artificial Sequence: Synthetic oligonucleotide
  Target: LAMA2; (+) strand; PAM type: NRG; PAM sequence: AGG
tagcttgaacccaggaagtg

SEQ ID NO: 149062 - DNA, 20 bp, Artificial Sequence
  Description of Artificial Sequence: Synthetic oligonucleotide
  Target: LAMA2; (+) strand; PAM type: NRG; PAM sequence: CAG
gaacccaggaagtgaggttg

SEQ ID NO: 149063 - DNA, 20 bp, Artificial Sequence
  Description of Artificial Sequence: Synthetic oligonucleotide
  Target: LAMA2; (+) strand; PAM type: NRG; PAM sequence: TGG
cccaggaagtgaggttgcag

SEQ ID NO: 149064 - DNA, 20 bp, Artificial Sequence
  Description of Artificial Sequence: Synthetic oligonucleotide
  Target: LAMA2; (+) strand; PAM type: NRG; PAM sequence: GGG
ccaggaagtgaggttgcagt

SEQ ID NO: 149065 - DNA, 20 bp, Artificial Sequence
  Description of Artificial Sequence: Synthetic oligonucleotide
  Target: LAMA2; (+) strand; PAM type: NRG; PAM sequence: AAG
aagtgaggttgcagtgggtc

SEQ ID NO: 149066 - DNA, 20 bp, Artificial Sequence
  Description of Artificial Sequence: Synthetic oligonucleotide
  Target: LAMA2; (+) strand; PAM type: NRG; PAM sequence: CAG
gcagtgggtcaagcttgcac

SEQ ID NO: 149067 - DNA, 20 bp, Artificial Sequence
  Description of Artificial Sequence: Synthetic oligonucleotide
  Target: LAMA2; (+) strand; PAM type: NRG; PAM sequence: CAG
aagcttgcaccagtgcactt

SEQ ID NO: 149068 - DNA, 20 bp, Artificial Sequence
  Description of Artificial Sequence: Synthetic oligonucleotide
  Target: LAMA2; (+) strand; PAM type: NRG; PAM sequence: TGG
tgcaccagtgcacttcagcc

SEQ ID NO: 149069 - DNA, 20 bp, Artificial Sequence
  Description of Artificial Sequence: Synthetic oligonucleotide
  Target: LAMA2; (+) strand; PAM type: NRG; PAM sequence: GGG
gcaccagtgcacttcagcct

SEQ ID NO: 149070 - DNA, 20 bp, Artificial Sequence
  Description of Artificial Sequence: Synthetic oligonucleotide
  Target: LAMA2; (+) strand; PAM type: NRG; PAM sequence: AAG
cagtgcacttcagcctgggc

SEQ ID NO: 149071 - DNA, 20 bp, Artificial Sequence
  Description of Artificial Sequence: Synthetic oligonucleotide
  Target: LAMA2; (+) strand; PAM type: NRG; PAM sequence: GAG
gtgcacttcagcctgggcaa

SEQ ID NO: 149072 - DNA, 20 bp, Artificial Sequence
  Description of Artificial Sequence: Synthetic oligonucleotide
  Target: LAMA2; (+) strand; PAM type: NRG; PAM sequence: GAG
gcacttcagcctgggcaaga

SEQ ID NO: 149073 - DNA, 20 bp, Artificial Sequence
  Description of Artificial Sequence: Synthetic oligonucleotide
  Target: LAMA2; (+) strand; PAM type: NRG; PAM sequence: GAG
ttcagcctgggcaagagagc

SEQ ID NO: 149074 - DNA, 20 bp, Artificial Sequence
  Description of Artificial Sequence: Synthetic oligonucleotide
  Target: LAMA2; (+) strand; PAM type: NRG; PAM sequence: TAG
attatatttacttttaacaa

SEQ ID NO: 149075 - DNA, 20 bp, Artificial Sequence
  Description of Artificial Sequence: Synthetic oligonucleotide
  Target: LAMA2; (+) strand; PAM type: NRG; PAM sequence: GAG
ttaacaatagtatcatgttt

SEQ ID NO: 149076 - DNA, 20 bp, Artificial Sequence
  Description of Artificial Sequence: Synthetic oligonucleotide
  Target: LAMA2; (+) strand; PAM type: NRG; PAM sequence: TGG
tatcatgtttgagaaaactt

SEQ ID NO: 149077 - DNA, 20 bp, Artificial Sequence
  Description of Artificial Sequence: Synthetic oligonucleotide
  Target: LAMA2; (+) strand; PAM type: NRG; PAM sequence: TAG
tttgagaaaactttggcctg

SEQ ID NO: 149078 - DNA, 20 bp, Artificial Sequence
  Description of Artificial Sequence: Synthetic oligonucleotide
  Target: LAMA2; (+) strand; PAM type: NRG; PAM sequence: TGG
ttggcctgtagaccaaatcc

SEQ ID NO: 149079 - DNA, 20 bp, Artificial Sequence
  Description of Artificial Sequence: Synthetic oligonucleotide
  Target: LAMA2; (+) strand; PAM type: NRG; PAM sequence: TGG
gtagaccaaatcctggccta

SEQ ID NO: 149080 - DNA, 20 bp, Artificial Sequence
  Description of Artificial Sequence: Synthetic oligonucleotide
  Target: LAMA2; (+) strand; PAM type: NRG; PAM sequence: CAG
accaaatcctggcctatggc

SEQ ID NO: 149081 - DNA, 20 bp, Artificial Sequence
  Description of Artificial Sequence: Synthetic oligonucleotide
  Target: LAMA2; (+) strand; PAM type: NRG; PAM sequence: AAG
ctatggccagatgactacaa

SEQ ID NO: 149082 - DNA, 20 bp, Artificial Sequence
  Description of Artificial Sequence: Synthetic oligonucleotide
  Target: LAMA2; (+) strand; PAM type: NRG; PAM sequence: TAG
tggccagatgactacaaaag

SEQ ID NO: 149083 - DNA, 20 bp, Artificial Sequence
  Description of Artificial Sequence: Synthetic oligonucleotide
  Target: LAMA2; (+) strand; PAM type: NRG; PAM sequence: TAG
atgactacaaaagtagtcat

SEQ ID NO: 149084 - DNA, 20 bp, Artificial Sequence
  Description of Artificial Sequence: Synthetic oligonucleotide
  Target: LAMA2; (+) strand; PAM type: NRG; PAM sequence: AGG
tgactacaaaagtagtcatt

SEQ ID NO: 149085 - DNA, 20 bp, Artificial Sequence
  Description of Artificial Sequence: Synthetic oligonucleotide
  Target: LAMA2; (+) strand; PAM type: NRG; PAM sequence: AAG
tatcatctctacctgatgtt

SEQ ID NO: 149086 - DNA, 20 bp, Artificial Sequence
  Description of Artificial Sequence: Synthetic oligonucleotide
  Target: LAMA2; (+) strand; PAM type: NRG; PAM sequence: CAG
tacctgatgttaagcatatc

SEQ ID NO: 149087 - DNA, 20 bp, Artificial Sequence
  Description of Artificial Sequence: Synthetic oligonucleotide
  Target: LAMA2; (+) strand; PAM type: NRG; PAM sequence: GAG
atccagtgaattattaaatt

SEQ ID NO: 149088 - DNA, 20 bp, Artificial Sequence
  Description of Artificial Sequence: Synthetic oligonucleotide
  Target: LAMA2; (+) strand; PAM type: NRG; PAM sequence: AGG
tccagtgaattattaaattg

SEQ ID NO: 149089 - DNA, 20 bp, Artificial Sequence
  Description of Artificial Sequence: Synthetic oligonucleotide
  Target: LAMA2; (+) strand; PAM type: NRG; PAM sequence: CAG
aattgaggtattttactttt

SEQ ID NO: 149090 - DNA, 20 bp, Artificial Sequence
  Description of Artificial Sequence: Synthetic oligonucleotide
  Target: LAMA2; (+) strand; PAM type: NRG; PAM sequence: TGG
tattttacttttcagctttc

SEQ ID NO: 149091 - DNA, 20 bp, Artificial Sequence
  Description of Artificial Sequence: Synthetic oligonucleotide
  Target: LAMA2; (+) strand; PAM type: NRG; PAM sequence: GAG
ttttacttttcagctttctg

SEQ ID NO: 149092 - DNA, 20 bp, Artificial Sequence
  Description of Artificial Sequence: Synthetic oligonucleotide
  Target: LAMA2; (+) strand; PAM type: NRG; PAM sequence: CAG
tggagttcttatgttcctta

SEQ ID NO: 149093 - DNA, 20 bp, Artificial Sequence
  Description of Artificial Sequence: Synthetic oligonucleotide
  Target: LAMA2; (+) strand; PAM type: NRG; PAM sequence: CGG
cattgtttcctttatattct

SEQ ID NO: 149094 - DNA, 20 bp, Artificial Sequence
  Description of Artificial Sequence: Synthetic oligonucleotide
  Target: LAMA2; (+) strand; PAM type: NRG; PAM sequence: CAG
tatattctcggacatattta

SEQ ID NO: 149095 - DNA, 20 bp, Artificial Sequence
  Description of Artificial Sequence: Synthetic oligonucleotide
  Target: LAMA2; (+) strand; PAM type: NRG; PAM sequence: TGG
tgtatgctaatttcaatatc

SEQ ID NO: 149096 - DNA, 20 bp, Artificial Sequence
  Description of Artificial Sequence: Synthetic oligonucleotide
  Target: LAMA2; (+) strand; PAM type: NRG; PAM sequence: GGG
gtatgctaatttcaatatct

SEQ ID NO: 149097 - DNA, 20 bp, Artificial Sequence
  Description of Artificial Sequence: Synthetic oligonucleotide
  Target: LAMA2; (+) strand; PAM type: NRG; PAM sequence: CAG
tttcaatatctgggtcacct

SEQ ID NO: 149098 - DNA, 20 bp, Artificial Sequence
  Description of Artificial Sequence: Synthetic oligonucleotide
  Target: LAMA2; (+) strand; PAM type: NRG; PAM sequence: AGG
ttcaatatctgggtcacctc

SEQ ID NO: 149099 - DNA, 20 bp, Artificial Sequence
  Description of Artificial Sequence: Synthetic oligonucleotide
  Target: LAMA2; (+) strand; PAM type: NRG; PAM sequence: AAG
tatcaacttctttttttaat

SEQ ID NO: 149100 - DNA, 20 bp, Artificial Sequence
  Description of Artificial Sequence: Synthetic oligonucleotide
  Target: LAMA2; (+) strand; PAM type: NRG; PAM sequence: AGG
atcaacttctttttttaata

SEQ ID NO: 149101 - DNA, 20 bp, Artificial Sequence
  Description of Artificial Sequence: Synthetic oligonucleotide
  Target: LAMA2; (+) strand; PAM type: NRG; PAM sequence: CAG
tctttcctgtatatctaata

SEQ ID NO: 149102 - DNA, 20 bp, Artificial Sequence
  Description of Artificial Sequence: Synthetic oligonucleotide
  Target: LAMA2; (+) strand; PAM type: NRG; PAM sequence: TAG
ttcctgtatatctaatacag

SEQ ID NO: 149103 - DNA, 20 bp, Artificial Sequence
  Description of Artificial Sequence: Synthetic oligonucleotide
  Target: LAMA2; (+) strand; PAM type: NRG; PAM sequence: CAG
cagtagtcctcctttattca

SEQ ID NO: 149104 - DNA, 20 bp, Artificial Sequence
  Description of Artificial Sequence: Synthetic oligonucleotide
  Target: LAMA2; (+) strand; PAM type: NRG; PAM sequence: GAG
gtagtcctcctttattcaca

SEQ ID NO: 149105 - DNA, 20 bp, Artificial Sequence
  Description of Artificial Sequence: Synthetic oligonucleotide
  Target: LAMA2; (+) strand; PAM type: NRG; PAM sequence: AGG
tagtcctcctttattcacag

SEQ ID NO: 149106 - DNA, 20 bp, Artificial Sequence
  Description of Artificial Sequence: Synthetic oligonucleotide
  Target: LAMA2; (+) strand; PAM type: NRG; PAM sequence: CAG
tattcacagaggatatgttc

SEQ ID NO: 149107 - DNA, 20 bp, Artificial Sequence
  Description of Artificial Sequence: Synthetic oligonucleotide
  Target: LAMA2; (+) strand; PAM type: NRG; PAM sequence: AGG
attcacagaggatatgttcc

SEQ ID NO: 149108 - DNA, 20 bp, Artificial Sequence
  Description of Artificial Sequence: Synthetic oligonucleotide
  Target: LAMA2; (+) strand; PAM type: NRG; PAM sequence: CAG
aggatatgttccaggaaccc

SEQ ID NO: 149109 - DNA, 20 bp, Artificial Sequence
  Description of Artificial Sequence: Synthetic oligonucleotide
  Target: LAMA2; (+) strand; PAM type: NRG; PAM sequence: CAG
ccagttgatacctgaaatca

SEQ ID NO: 149110 - DNA, 20 bp, Artificial Sequence
  Description of Artificial Sequence: Synthetic oligonucleotide
  Target: LAMA2; (+) strand; PAM type: NRG; PAM sequence: TAG
ttgatacctgaaatcacaga

SEQ ID NO: 149111 - DNA, 20 bp, Artificial Sequence
  Description of Artificial Sequence: Synthetic oligonucleotide
  Target: LAMA2; (+) strand; PAM type: NRG; PAM sequence: TGG
tttctatctgatacctgtga

SEQ ID NO: 149112 - DNA, 20 bp, Artificial Sequence
  Description of Artificial Sequence: Synthetic oligonucleotide
  Target: LAMA2; (+) strand; PAM type: NRG; PAM sequence: GGG
ttctatctgatacctgtgat

SEQ ID NO: 149113 - DNA, 20 bp, Artificial Sequence
  Description of Artificial Sequence: Synthetic oligonucleotide
  Target: LAMA2; (+) strand; PAM type: NRG; PAM sequence: AAG
ctgatacctgtgatgggact

SEQ ID NO: 149114 - DNA, 20 bp, Artificial Sequence
  Description of Artificial Sequence: Synthetic oligonucleotide
  Target: LAMA2; (+) strand; PAM type: NRG; PAM sequence: CAG
tgatgggactaagtgactaa

SEQ ID NO: 149115 - DNA, 20 bp, Artificial Sequence
  Description of Artificial Sequence: Synthetic oligonucleotide
  Target: LAMA2; (+) strand; PAM type: NRG; PAM sequence: AGG
gatgggactaagtgactaac

SEQ ID NO: 149116 - DNA, 20 bp, Artificial Sequence
  Description of Artificial Sequence: Synthetic oligonucleotide
  Target: LAMA2; (+) strand; PAM type: NRG; PAM sequence: GAG
tgggactaagtgactaacag

SEQ ID NO: 149117 - DNA, 20 bp, Artificial Sequence
  Description of Artificial Sequence: Synthetic oligonucleotide
  Target: LAMA2; (+) strand; PAM type: NRG; PAM sequence: AGG
gggactaagtgactaacagg

SEQ ID NO: 149118 - DNA, 20 bp, Artificial Sequence
  Description of Artificial Sequence: Synthetic oligonucleotide
  Target: LAMA2; (+) strand; PAM type: NRG; PAM sequence: GGG
ggactaagtgactaacagga

SEQ ID NO: 149119 - DNA, 20 bp, Artificial Sequence
  Description of Artificial Sequence: Synthetic oligonucleotide
  Target: LAMA2; (+) strand; PAM type: NRG; PAM sequence: TAG
ctaagtgactaacaggaggg

SEQ ID NO: 149120 - DNA, 20 bp, Artificial Sequence
  Description of Artificial Sequence: Synthetic oligonucleotide
  Target: LAMA2; (+) strand; PAM type: NRG; PAM sequence: CAG
acaggagggtagtgtctata

SEQ ID NO: 149121 - DNA, 20 bp, Artificial Sequence
  Description of Artificial Sequence: Synthetic oligonucleotide
  Target: LAMA2; (+) strand; PAM type: NRG; PAM sequence: TAG
agggtagtgtctatacagca

SEQ ID NO: 149122 - DNA, 20 bp, Artificial Sequence
  Description of Artificial Sequence: Synthetic oligonucleotide
  Target: LAMA2; (+) strand; PAM type: NRG; PAM sequence: TGG
tctatacagcatagatatgc

SEQ ID NO: 149123 - DNA, 20 bp, Artificial Sequence
  Description of Artificial Sequence: Synthetic oligonucleotide
  Target: LAMA2; (+) strand; PAM type: NRG; PAM sequence: AAG
acagcatagatatgctggac

SEQ ID NO: 149124 - DNA, 20 bp, Artificial Sequence
  Description of Artificial Sequence: Synthetic oligonucleotide
  Target: LAMA2; (+) strand; PAM type: NRG; PAM sequence: AGG
cagcatagatatgctggaca

SEQ ID NO: 149125 - DNA, 20 bp, Artificial Sequence
  Description of Artificial Sequence: Synthetic oligonucleotide
  Target: LAMA2; (+) strand; PAM type: NRG; PAM sequence: GGG
agcatagatatgctggacaa

SEQ ID NO: 149126 - DNA, 20 bp, Artificial Sequence
  Description of Artificial Sequence: Synthetic oligonucleotide
  Target: LAMA2; (+) strand; PAM type: NRG; PAM sequence: GGG
gcatagatatgctggacaag

SEQ ID NO: 149127 - DNA, 20 bp, Artificial Sequence
  Description of Artificial Sequence: Synthetic oligonucleotide
  Target: LAMA2; (+) strand; PAM type: NRG; PAM sequence: TGG
aaggggatgattcatatccc

SEQ ID NO: 149128 - DNA, 20 bp, Artificial Sequence
  Description of Artificial Sequence: Synthetic oligonucleotide
  Target: LAMA2; (+) strand; PAM type: NRG; PAM sequence: CAG
gattcatatccctggtgcga

SEQ ID NO: 149129 - DNA, 20 bp, Artificial Sequence
  Description of Artificial Sequence: Synthetic oligonucleotide
  Target: LAMA2; (+) strand; PAM type: NRG; PAM sequence: GAG
ttcatatccctggtgcgaca

SEQ ID NO: 149130 - DNA, 20 bp, Artificial Sequence
  Description of Artificial Sequence: Synthetic oligonucleotide
  Target: LAMA2; (+) strand; PAM type: NRG; PAM sequence: AAG
tatccctggtgcgacagagc

SEQ ID NO: 149131 - DNA, 20 bp, Artificial Sequence
  Description of Artificial Sequence: Synthetic oligonucleotide
  Target: LAMA2; (+) strand; PAM type: NRG; PAM sequence: TGG
cctggtgcgacagagcaaga

SEQ ID NO: 149132 - DNA, 20 bp, Artificial Sequence
  Description of Artificial Sequence: Synthetic oligonucleotide
  Target: LAMA2; (+) strand; PAM type: NRG; PAM sequence: GAG
gcgacagagcaagatggccc

SEQ ID NO: 149133 - DNA, 20 bp, Artificial Sequence
  Description of Artificial Sequence: Synthetic oligonucleotide
  Target: LAMA2; (+) strand; PAM type: NRG; PAM sequence: TGG
acttttcaattatttatttc

SEQ ID NO: 149134 - DNA, 20 bp, Artificial Sequence
  Description of Artificial Sequence: Synthetic oligonucleotide
  Target: LAMA2; (+) strand; PAM type: NRG; PAM sequence: GAG
ttttcaattatttatttctg

SEQ ID NO: 149135 - DNA, 20 bp, Artificial Sequence
  Description of Artificial Sequence: Synthetic oligonucleotide
  Target: LAMA2; (+) strand; PAM type: NRG; PAM sequence: TGG
catttaatattttcgaactg

SEQ ID NO: 149136 - DNA, 20 bp, Artificial Sequence
  Description of Artificial Sequence: Synthetic oligonucleotide
  Target: LAMA2; (+) strand; PAM type: NRG; PAM sequence: CAG
aaccatgataactgaaacct

SEQ ID NO: 149137 - DNA, 20 bp, Artificial Sequence
  Description of Artificial Sequence: Synthetic oligonucleotide
  Target: LAMA2; (+) strand; PAM type: NRG; PAM sequence: CAG
atgataactgaaacctcaga

SEQ ID NO: 149138 - DNA, 20 bp, Artificial Sequence
  Description of Artificial Sequence: Synthetic oligonucleotide
  Target: LAMA2; (+) strand; PAM type: NRG; PAM sequence: CAG
aacctcagacagcaaaacta

SEQ ID NO: 149139 - DNA, 20 bp, Artificial Sequence
  Description of Artificial Sequence: Synthetic oligonucleotide
  Target: LAMA2; (+) strand; PAM type: NRG; PAM sequence: GAG
cagacagcaaaactacagat

SEQ ID NO: 149140 - DNA, 20 bp, Artificial Sequence
  Description of Artificial Sequence: Synthetic oligonucleotide
  Target: LAMA2; (+) strand; PAM type: NRG; PAM sequence: AGG
agacagcaaaactacagatg

SEQ ID NO: 149141 - DNA, 20 bp, Artificial Sequence
  Description of Artificial Sequence: Synthetic oligonucleotide
  Target: LAMA2; (+) strand; PAM type: NRG; PAM sequence: GAG
agcaaaactacagatgaggt

SEQ ID NO: 149142 - DNA, 20 bp, Artificial Sequence
  Description of Artificial Sequence: Synthetic oligonucleotide
  Target: LAMA2; (+) strand; PAM type: NRG; PAM sequence: AGG
gcaaaactacagatgaggtg

SEQ ID NO: 149143 - DNA, 20 bp, Artificial Sequence
  Description of Artificial Sequence: Synthetic oligonucleotide
  Target: LAMA2; (+) strand; PAM type: NRG; PAM sequence: CAG
actgtaatttatcatctcta

SEQ ID NO: 149144 - DNA, 20 bp, Artificial Sequence
  Description of Artificial Sequence: Synthetic oligonucleotide
  Target: LAMA2; (+) strand; PAM type: NRG; PAM sequence: AGG
ctgtaatttatcatctctac

SEQ ID NO: 149145 - DNA, 20 bp, Artificial Sequence
  Description of Artificial Sequence: Synthetic oligonucleotide
  Target: LAMA2; (+) strand; PAM type: NRG; PAM sequence: CGG
atcatctctacaggacattt

SEQ ID NO: 149146 - DNA, 20 bp, Artificial Sequence
  Description of Artificial Sequence: Synthetic oligonucleotide
  Target: LAMA2; (+) strand; PAM type: NRG; PAM sequence: GAG
catctctacaggacatttcg

SEQ ID NO: 149147 - DNA, 20 bp, Artificial Sequence
  Description of Artificial Sequence: Synthetic oligonucleotide
  Target: LAMA2; (+) strand; PAM type: NRG; PAM sequence: CAG
acatttcggagaatacaatg

SEQ ID NO: 149148 - DNA, 20 bp, Artificial Sequence
  Description of Artificial Sequence: Synthetic oligonucleotide
  Target: LAMA2; (+) strand; PAM type: NRG; PAM sequence: TGG
ggagaatacaatgcagacac

SEQ ID NO: 149149 - DNA, 20 bp, Artificial Sequence
  Description of Artificial Sequence: Synthetic oligonucleotide
  Target: LAMA2; (+) strand; PAM type: NRG; PAM sequence: AAG
gtttctgttatgttcctctg

SEQ ID NO: 149150 - DNA, 20 bp, Artificial Sequence
  Description of Artificial Sequence: Synthetic oligonucleotide
  Target: LAMA2; (+) strand; PAM type: NRG; PAM sequence: GAG
ttctgttatgttcctctgaa

SEQ ID NO: 149151 - DNA, 20 bp, Artificial Sequence
  Description of Artificial Sequence: Synthetic oligonucleotide
  Target: LAMA2; (+) strand; PAM type: NRG; PAM sequence: TGG
ttcctctgaagagtttgaat

SEQ ID NO: 149152 - DNA, 20 bp, Artificial Sequence
  Description of Artificial Sequence: Synthetic oligonucleotide
  Target: LAMA2; (+) strand; PAM type: NRG; PAM sequence: TAG
gagtttgaattggttctaat

SEQ ID NO: 149153 - DNA, 20 bp, Artificial Sequence
  Description of Artificial Sequence: Synthetic oligonucleotide
  Target: LAMA2; (+) strand; PAM type: NRG; PAM sequence: GAG
taattagtaataaacttgct

SEQ ID NO: 149154 - DNA, 20 bp, Artificial Sequence
  Description of Artificial Sequence: Synthetic oligonucleotide
  Target: LAMA2; (+) strand; PAM type: NRG; PAM sequence: AAG
cttgctgagtgatcaccatg

SEQ ID NO: 149155 - DNA, 20 bp, Artificial Sequence
  Description of Artificial Sequence: Synthetic oligonucleotide
  Target: LAMA2; (+) strand; PAM type: NRG; PAM sequence: AAG
tgatcaccatgaagtcatga

SEQ ID NO: 149156 - DNA, 20 bp, Artificial Sequence
  Description of Artificial Sequence: Synthetic oligonucleotide
  Target: LAMA2; (+) strand; PAM type: NRG; PAM sequence: TAG
agtttactttcatactttgt

SEQ ID NO: 149157 - DNA, 20 bp, Artificial Sequence
  Description of Artificial Sequence: Synthetic oligonucleotide
  Target: LAMA2; (+) strand; PAM type: NRG; PAM sequence: AGG
gtttactttcatactttgtt

SEQ ID NO: 149158 - DNA, 20 bp, Artificial Sequence
  Description of Artificial Sequence: Synthetic oligonucleotide
  Target: LAMA2; (+) strand; PAM type: NRG; PAM sequence: CAG
actttcatactttgttagga

SEQ ID NO: 149159 - DNA, 20 bp, Artificial Sequence
  Description of Artificial Sequence: Synthetic oligonucleotide
  Target: LAMA2; (+) strand; PAM type: NRG; PAM sequence: TAG
catactttgttaggacagat

SEQ ID NO: 149160 - DNA, 20 bp, Artificial Sequence
  Description of Artificial Sequence: Synthetic oligonucleotide
  Target: LAMA2; (+) strand; PAM type: NRG; PAM sequence: TGG
actttgttaggacagattag

SEQ ID NO: 149161 - DNA, 20 bp, Artificial Sequence
  Description of Artificial Sequence: Synthetic oligonucleotide
  Target: LAMA2; (+) strand; PAM type: NRG; PAM sequence: CAG
gacagattagtggaaaactc

SEQ ID NO: 149162 - DNA, 20 bp, Artificial Sequence
  Description of Artificial Sequence: Synthetic oligonucleotide
  Target: LAMA2; (+) strand; PAM type: NRG; PAM sequence: AGG
acagattagtggaaaactcc

SEQ ID NO: 149163 - DNA, 20 bp, Artificial Sequence
  Description of Artificial Sequence: Synthetic oligonucleotide
  Target: LAMA2; (+) strand; PAM type: NRG; PAM sequence: TAG
ttcatcaaacatttctaatg

SEQ ID NO: 149164 - DNA, 20 bp, Artificial Sequence
  Description of Artificial Sequence: Synthetic oligonucleotide
  Target: LAMA2; (+) strand; PAM type: NRG; PAM sequence: AAG
tttctaatgtagttaactta

SEQ ID NO: 149165 - DNA, 20 bp, Artificial Sequence
  Description of Artificial Sequence: Synthetic oligonucleotide
  Target: LAMA2; (+) strand; PAM type: NRG; PAM sequence: TGG
tctgaattctctttacttta

SEQ ID NO: 149166 - DNA, 20 bp, Artificial Sequence
  Description of Artificial Sequence: Synthetic oligonucleotide
  Target: LAMA2; (+) strand; PAM type: NRG; PAM sequence: TGG
aattctctttactttatggt

SEQ ID NO: 149167 - DNA, 20 bp, Artificial Sequence
  Description of Artificial Sequence: Synthetic oligonucleotide
  Target: LAMA2; (+) strand; PAM type: NRG; PAM sequence: TAG
tctctttactttatggttgg

SEQ ID NO: 149168 - DNA, 20 bp, Artificial Sequence
  Description of Artificial Sequence: Synthetic oligonucleotide
  Target: LAMA2; (+) strand; PAM type: NRG; PAM sequence: CAG
aaaactcttctcaccttgtt

SEQ ID NO: 149169 - DNA, 20 bp, Artificial Sequence
  Description of Artificial Sequence: Synthetic oligonucleotide
  Target: LAMA2; (+) strand; PAM type: NRG; PAM sequence: CAG
ttctcaccttgttcagtttc

SEQ ID NO: 149170 - DNA, 20 bp, Artificial Sequence
  Description of Artificial Sequence: Synthetic oligonucleotide
  Target: LAMA2; (+) strand; PAM type: NRG; PAM sequence: CGG
tcaccttgttcagtttccag

SEQ ID NO: 149171 - DNA, 20 bp, Artificial Sequence
  Description of Artificial Sequence: Synthetic oligonucleotide
  Target: LAMA2; (+) strand; PAM type: NRG; PAM sequence: TAG
ttgctttccactgaatttcc

SEQ ID NO: 149172 - DNA, 20 bp, Artificial Sequence
  Description of Artificial Sequence: Synthetic oligonucleotide
  Target: LAMA2; (+) strand; PAM type: NRG; PAM sequence: GAG
tgaatttcctagaatctcct

SEQ ID NO: 149173 - DNA, 20 bp, Artificial Sequence
  Description of Artificial Sequence: Synthetic oligonucleotide
  Target: LAMA2; (+) strand; PAM type: NRG; PAM sequence: AAG
tcctgagtgaatatacaata

SEQ ID NO: 149174 - DNA, 20 bp, Artificial Sequence
  Description of Artificial Sequence: Synthetic oligonucleotide
  Target: LAMA2; (+) strand; PAM type: NRG; PAM sequence: AGG
cctgagtgaatatacaataa

SEQ ID NO: 149175 - DNA, 20 bp, Artificial Sequence
  Description of Artificial Sequence: Synthetic oligonucleotide
  Target: LAMA2; (+) strand; PAM type: NRG; PAM sequence: GGG
ctgagtgaatatacaataaa

SEQ ID NO: 149176 - DNA, 20 bp, Artificial Sequence
  Description of Artificial Sequence: Synthetic oligonucleotide
  Target: LAMA2; (+) strand; PAM type: NRG; PAM sequence: CAG
tgaatatacaataaagggat

SEQ ID NO: 149177 - DNA, 20 bp, Artificial Sequence
  Description of Artificial Sequence: Synthetic oligonucleotide
  Target: LAMA2; (+) strand; PAM type: NRG; PAM sequence: AAG
atacaataaagggatcagtt

SEQ ID NO: 149178 - DNA, 20 bp, Artificial Sequence
  Description of Artificial Sequence: Synthetic oligonucleotide
  Target: LAMA2; (+) strand; PAM type: NRG; PAM sequence: AGG
tacaataaagggatcagtta

SEQ ID NO: 149179 - DNA, 20 bp, Artificial Sequence
  Description of Artificial Sequence: Synthetic oligonucleotide
  Target: LAMA2; (+) strand; PAM type: NRG; PAM sequence: TGG
ataaagggatcagttaaggc

SEQ ID NO: 149180 - DNA, 20 bp, Artificial Sequence
  Description of Artificial Sequence: Synthetic oligonucleotide
  Target: LAMA2; (+) strand; PAM type: NRG; PAM sequence: GGG
taaagggatcagttaaggct

SEQ ID NO: 149181 - DNA, 20 bp, Artificial Sequence
  Description of Artificial Sequence: Synthetic oligonucleotide
  Target: LAMA2; (+) strand; PAM type: NRG; PAM sequence: AAG
agggatcagttaaggctggg

SEQ ID NO: 149182 - DNA, 20 bp, Artificial Sequence
  Description of Artificial Sequence: Synthetic oligonucleotide
  Target: LAMA2; (+) strand; PAM type: NRG; PAM sequence: AGG
gggatcagttaaggctggga

SEQ ID NO: 149183 - DNA, 20 bp, Artificial Sequence
  Description of Artificial Sequence: Synthetic oligonucleotide
  Target: LAMA2; (+) strand; PAM type: NRG; PAM sequence: GGG
ggatcagttaaggctgggaa

SEQ ID NO: 149184 - DNA, 20 bp, Artificial Sequence
  Description of Artificial Sequence: Synthetic oligonucleotide
  Target: LAMA2; (+) strand; PAM type: NRG; PAM sequence: CAG
tatgcaaattttgtgaattg

SEQ ID NO: 149185 - DNA, 20 bp, Artificial Sequence
  Description of Artificial Sequence: Synthetic oligonucleotide
  Target: LAMA2; (+) strand; PAM type: NRG; PAM sequence: CAG
ttttgtgaattgcagtttaa

SEQ ID NO: 149186 - DNA, 20 bp, Artificial Sequence
  Description of Artificial Sequence: Synthetic oligonucleotide
  Target: LAMA2; (+) strand; PAM type: NRG; PAM sequence: AAG
gaattgcagtttaacagcta

SEQ ID NO: 149187 - DNA, 20 bp, Artificial Sequence
  Description of Artificial Sequence: Synthetic oligonucleotide
  Target: LAMA2; (+) strand; PAM type: NRG; PAM sequence: TAG
attgtcttaaaatttgattt

SEQ ID NO: 149188 - DNA, 20 bp, Artificial Sequence
  Description of Artificial Sequence: Synthetic oligonucleotide
  Target: LAMA2; (+) strand; PAM type: NRG; PAM sequence: CAG
tgccttacctattctgtgca

SEQ ID NO: 149189 - DNA, 20 bp, Artificial Sequence
  Description of Artificial Sequence: Synthetic oligonucleotide
  Target: LAMA2; (+) strand; PAM type: NRG; PAM sequence: TGG
gcacagtcccaacttcataa

SEQ ID NO: 149190 - DNA, 20 bp, Artificial Sequence
  Description of Artificial Sequence: Synthetic oligonucleotide
  Target: LAMA2; (+) strand; PAM type: NRG; PAM sequence: GGG
cacagtcccaacttcataat

SEQ ID NO: 149191 - DNA, 20 bp, Artificial Sequence
  Description of Artificial Sequence: Synthetic oligonucleotide
  Target: LAMA2; (+) strand; PAM type: NRG; PAM sequence: GGG
acagtcccaacttcataatg

SEQ ID NO: 149192 - DNA, 20 bp, Artificial Sequence
  Description of Artificial Sequence: Synthetic oligonucleotide
  Target: LAMA2; (+) strand; PAM type: NRG; PAM sequence: GGG
cagtcccaacttcataatgg

SEQ ID NO: 149193 - DNA, 20 bp, Artificial Sequence
  Description of Artificial Sequence: Synthetic oligonucleotide
  Target: LAMA2; (+) strand; PAM type: NRG; PAM sequence: TAG
ttgaaactgacctgtgaact

SEQ ID NO: 149194 - DNA, 20 bp, Artificial Sequence
  Description of Artificial Sequence: Synthetic oligonucleotide
  Target: LAMA2; (+) strand; PAM type: NRG; PAM sequence: GAG
acctgtgaacttagttaatt

SEQ ID NO: 149195 - DNA, 20 bp, Artificial Sequence
  Description of Artificial Sequence: Synthetic oligonucleotide
  Target: LAMA2; (+) strand; PAM type: NRG; PAM sequence: CAG
gaacttagttaattgagatt

SEQ ID NO: 149196 - DNA, 20 bp, Artificial Sequence
  Description of Artificial Sequence: Synthetic oligonucleotide
  Target: LAMA2; (+) strand; PAM type: NRG; PAM sequence: GAG
ttagttaattgagattcagt

SEQ ID NO: 149197 - DNA, 20 bp, Artificial Sequence
  Description of Artificial Sequence: Synthetic oligonucleotide
  Target: LAMA2; (+) strand; PAM type: NRG; PAM sequence: AGG
tagttaattgagattcagtg

SEQ ID NO: 149198 - DNA, 20 bp, Artificial Sequence
  Description of Artificial Sequence: Synthetic oligonucleotide
  Target: LAMA2; (+) strand; PAM type: NRG; PAM sequence: AAG
attcagtgaggtatataaat

SEQ ID NO: 149199 - DNA, 20 bp, Artificial Sequence
  Description of Artificial Sequence: Synthetic oligonucleotide
  Target: LAMA2; (+) strand; PAM type: NRG; PAM sequence: TAG
aattttaacactctgattta

SEQ ID NO: 149200 - DNA, 20 bp, Artificial Sequence
  Description of Artificial Sequence: Synthetic oligonucleotide
  Target: LAMA2; (+) strand; PAM type: NRG; PAM sequence: TAG
tttaacactctgatttatag

SEQ ID NO: 149201 - DNA, 20 bp, Artificial Sequence
  Description of Artificial Sequence: Synthetic oligonucleotide
  Target: LAMA2; (+) strand; PAM type: NRG; PAM sequence: AAG
tctgatttatagtagcaaac

SEQ ID NO: 149202 - DNA, 20 bp, Artificial Sequence
  Description of Artificial Sequence: Synthetic oligonucleotide
  Target: LAMA2; (+) strand; PAM type: NRG; PAM sequence: AAG
caagttttcatttgtaaatt

SEQ ID NO: 149203 - DNA, 20 bp, Artificial Sequence
  Description of Artificial Sequence: Synthetic oligonucleotide
  Target: LAMA2; (+) strand; PAM type: NRG; PAM sequence: TAG
tttcatttgtaaattaagcc

SEQ ID NO: 149204 - DNA, 20 bp, Artificial Sequence
  Description of Artificial Sequence: Synthetic oligonucleotide
  Target: LAMA2; (+) strand; PAM type: NRG; PAM sequence: TAG
tacatatgaactatattgaa

SEQ ID NO: 149205 - DNA, 20 bp, Artificial Sequence
  Description of Artificial Sequence: Synthetic oligonucleotide
  Target: LAMA2; (+) strand; PAM type: NRG; PAM sequence: AGG
acatatgaactatattgaat

SEQ ID NO: 149206 - DNA, 20 bp, Artificial Sequence
  Description of Artificial Sequence: Synthetic oligonucleotide
  Target: LAMA2; (+) strand; PAM type: NRG; PAM sequence: TGG
tatgaactatattgaatagg

SEQ ID NO: 149207 - DNA, 20 bp, Artificial Sequence
  Description of Artificial Sequence: Synthetic oligonucleotide
  Target: LAMA2; (+) strand; PAM type: NRG; PAM sequence: GGG
atgaactatattgaataggt

SEQ ID NO: 149208 - DNA, 20 bp, Artificial Sequence
  Description of Artificial Sequence: Synthetic oligonucleotide
  Target: LAMA2; (+) strand; PAM type: NRG; PAM sequence: TGG
ttgaataggtgggcatttct

SEQ ID NO: 149209 - DNA, 20 bp, Artificial Sequence
  Description of Artificial Sequence: Synthetic oligonucleotide
  Target: LAMA2; (+) strand; PAM type: NRG; PAM sequence: GGG
tgaataggtgggcatttctt

SEQ ID NO: 149210 - DNA, 20 bp, Artificial Sequence
  Description of Artificial Sequence: Synthetic oligonucleotide
  Target: LAMA2; (+) strand; PAM type: NRG; PAM sequence: TAG
catttcttgggcaaataatt

SEQ ID NO: 149211 - DNA, 20 bp, Artificial Sequence
  Description of Artificial Sequence: Synthetic oligonucleotide
  Target: LAMA2; (+) strand; PAM type: NRG; PAM sequence: TGG
tttttttttcctattacatc

SEQ ID NO: 149212 - DNA, 20 bp, Artificial Sequence
  Description of Artificial Sequence: Synthetic oligonucleotide
  Target: LAMA2; (+) strand; PAM type: NRG; PAM sequence: CAG
gaaaataaatcttgtatata

SEQ ID NO: 149213 - DNA, 20 bp, Artificial Sequence
  Description of Artificial Sequence: Synthetic oligonucleotide
  Target: LAMA2; (+) strand; PAM type: NRG; PAM sequence: CAG
gtatatacagtatatgaaca

SEQ ID NO: 149214 - DNA, 20 bp, Artificial Sequence
  Description of Artificial Sequence: Synthetic oligonucleotide
  Target: LAMA2; (+) strand; PAM type: NRG; PAM sequence: TAG
tacagtatatgaacacagtg

SEQ ID NO: 149215 - DNA, 20 bp, Artificial Sequence
  Description of Artificial Sequence: Synthetic oligonucleotide
  Target: LAMA2; (+) strand; PAM type: NRG; PAM sequence: AAG
aacacagtgtagttttgttt

SEQ ID NO: 149216 - DNA, 20 bp, Artificial Sequence
  Description of Artificial Sequence: Synthetic oligonucleotide
  Target: LAMA2; (+) strand; PAM type: NRG; PAM sequence: TAG
gtagttttgtttaagtaaac

SEQ ID NO: 149217 - DNA, 20 bp, Artificial Sequence
  Description of Artificial Sequence: Synthetic oligonucleotide
  Target: LAMA2; (+) strand; PAM type: NRG; PAM sequence: AAG
tgttgatatactatgtatac

SEQ ID NO: 149218 - DNA, 20 bp, Artificial Sequence
  Description of Artificial Sequence: Synthetic oligonucleotide
  Target: LAMA2; (+) strand; PAM type: NRG; PAM sequence: AAG
tactatgtatacaagataaa

SEQ ID NO: 149219 - DNA, 20 bp, Artificial Sequence
  Description of Artificial Sequence: Synthetic oligonucleotide
  Target: LAMA2; (+) strand; PAM type: NRG; PAM sequence: AGG
actatgtatacaagataaaa

SEQ ID NO: 149220 - DNA, 20 bp, Artificial Sequence
  Description of Artificial Sequence: Synthetic oligonucleotide
  Target: LAMA2; (+) strand; PAM type: NRG; PAM sequence: AAG
taaaacatgaaaatatcaat

SEQ ID NO: 149221 - DNA, 20 bp, Artificial Sequence
  Description of Artificial Sequence: Synthetic oligonucleotide
  Target: LAMA2; (+) strand; PAM type: NRG; PAM sequence: AAG
tatcaataagtattgaatct

SEQ ID NO: 149222 - DNA, 20 bp, Artificial Sequence
  Description of Artificial Sequence: Synthetic oligonucleotide
  Target: LAMA2; (+) strand; PAM type: NRG; PAM sequence: TAG
gaatctaagtaacaaatata

SEQ ID NO: 149223 - DNA, 20 bp, Artificial Sequence
  Description of Artificial Sequence: Synthetic oligonucleotide
  Target: LAMA2; (+) strand; PAM type: NRG; PAM sequence: AGG
aatctaagtaacaaatatat

SEQ ID NO: 149224 - DNA, 20 bp, Artificial Sequence
  Description of Artificial Sequence: Synthetic oligonucleotide
  Target: LAMA2; (+) strand; PAM type: NRG; PAM sequence: AAG
tattatctttacttttgtgt

SEQ ID NO: 149225 - DNA, 20 bp, Artificial Sequence
  Description of Artificial Sequence: Synthetic oligonucleotide
  Target: LAMA2; (+) strand; PAM type: NRG; PAM sequence: AAG
acttttgtgtaagcatgtaa

SEQ ID NO: 149226 - DNA, 20 bp, Artificial Sequence
  Description of Artificial Sequence: Synthetic oligonucleotide
  Target: LAMA2; (+) strand; PAM type: NRG; PAM sequence: TGG
gtgtaagcatgtaaaagaac

SEQ ID NO: 149227 - DNA, 20 bp, Artificial Sequence
  Description of Artificial Sequence: Synthetic oligonucleotide
  Target: LAMA2; (+) strand; PAM type: NRG; PAM sequence: TAG
catgtaaaagaactggattt

SEQ ID NO: 149228 - DNA, 20 bp, Artificial Sequence
  Description of Artificial Sequence: Synthetic oligonucleotide
  Target: LAMA2; (+) strand; PAM type: NRG; PAM sequence: AAG
gaaattataaacatgtatta

SEQ ID NO: 149229 - DNA, 20 bp, Artificial Sequence
  Description of Artificial Sequence: Synthetic oligonucleotide
  Target: LAMA2; (+) strand; PAM type: NRG; PAM sequence: AGG
aaattataaacatgtattaa

SEQ ID NO: 149230 - DNA, 20 bp, Artificial Sequence
  Description of Artificial Sequence: Synthetic oligonucleotide
  Target: LAMA2; (+) strand; PAM type: NRG; PAM sequence: TAG
tgtattaaaggtaattctta

SEQ ID NO: 149231 - DNA, 20 bp, Artificial Sequence
  Description of Artificial Sequence: Synthetic oligonucleotide
  Target: LAMA2; (+) strand; PAM type: NRG; PAM sequence: AAG
taaaactactttgtctataa

SEQ ID NO: 149232 - DNA, 20 bp, Artificial Sequence
  Description of Artificial Sequence: Synthetic oligonucleotide
  Target: LAMA2; (+) strand; PAM type: NRG; PAM sequence: AAG
ttgtctataaaagtttgctg

SEQ ID NO: 149233 - DNA, 20 bp, Artificial Sequence
  Description of Artificial Sequence: Synthetic oligonucleotide
  Target: LAMA2; (+) strand; PAM type: NRG; PAM sequence: TAG
attcattttaatatttttgt

SEQ ID NO: 149234 - DNA, 20 bp, Artificial Sequence
  Description of Artificial Sequence: Synthetic oligonucleotide
  Target: LAMA2; (+) strand; PAM type: NRG; PAM sequence: AGG
ttcattttaatatttttgtt

SEQ ID NO: 149235 - DNA, 20 bp, Artificial Sequence
  Description of Artificial Sequence: Synthetic oligonucleotide
  Target: LAMA2; (+) strand; PAM type: NRG; PAM sequence: AAG
taggtatctccaaattatcc

SEQ ID NO: 149236 - DNA, 20 bp, Artificial Sequence
  Description of Artificial Sequence: Synthetic oligonucleotide
  Target: LAMA2; (+) strand; PAM type: NRG; PAM sequence: AGG
aggtatctccaaattatcca

SEQ ID NO: 149237 - DNA, 20 bp, Artificial Sequence
  Description of Artificial Sequence: Synthetic oligonucleotide
  Target: LAMA2; (+) strand; PAM type: NRG; PAM sequence: CAG
caaattatccaaggccatgc

SEQ ID NO: 149238 - DNA, 20 bp, Artificial Sequence
  Description of Artificial Sequence: Synthetic oligonucleotide
  Target: LAMA2; (+) strand; PAM type: NRG; PAM sequence: TGG
ccatgtcattgcgatccaat

SEQ ID NO: 149239 - DNA, 20 bp, Artificial Sequence
  Description of Artificial Sequence: Synthetic oligonucleotide
  Target: LAMA2; (+) strand; PAM type: NRG; PAM sequence: AAG
tccaattggttccttaaatg

SEQ ID NO: 149240 - DNA, 20 bp, Artificial Sequence
  Description of Artificial Sequence: Synthetic oligonucleotide
  Target: LAMA2; (+) strand; PAM type: NRG; PAM sequence: AAG
ccttaaatgaagtctgtgtc

SEQ ID NO: 149241 - DNA, 20 bp, Artificial Sequence
  Description of Artificial Sequence: Synthetic oligonucleotide
  Target: LAMA2; (+) strand; PAM type: NRG; PAM sequence: AGG
cttaaatgaagtctgtgtca

SEQ ID NO: 149242 - DNA, 20 bp, Artificial Sequence
  Description of Artificial Sequence: Synthetic oligonucleotide
  Target: LAMA2; (+) strand; PAM type: NRG; PAM sequence: GAG
atgaagtctgtgtcaaggat

SEQ ID NO: 149243 - DNA, 20 bp, Artificial Sequence
  Description of Artificial Sequence: Synthetic oligonucleotide
  Target: LAMA2; (+) strand; PAM type: NRG; PAM sequence: GAG
ggatgagaaacatgctcgac

SEQ ID NO: 149244 - DNA, 20 bp, Artificial Sequence
  Description of Artificial Sequence: Synthetic oligonucleotide
  Target: LAMA2; (+) strand; PAM type: NRG; PAM sequence: AGG
gatgagaaacatgctcgacg

SEQ ID NO: 149245 - DNA, 20 bp, Artificial Sequence
  Description of Artificial Sequence: Synthetic oligonucleotide
  Target: LAMA2; (+) strand; PAM type: NRG; PAM sequence: GAG
agaaacatgctcgacgaggt

SEQ ID NO: 149246 - DNA, 20 bp, Artificial Sequence
  Description of Artificial Sequence: Synthetic oligonucleotide
  Target: LAMA2; (+) strand; PAM type: NRG; PAM sequence: GAG
aaacatgctcgacgaggtga

SEQ ID NO: 149247 - DNA, 20 bp, Artificial Sequence
  Description of Artificial Sequence: Synthetic oligonucleotide
  Target: LAMA2; (+) strand; PAM type: NRG; PAM sequence: CAG
gctcgacgaggtgagagctg

SEQ ID NO: 149248 - DNA, 20 bp, Artificial Sequence
  Description of Artificial Sequence: Synthetic oligonucleotide
  Target: LAMA2; (+) strand; PAM type: NRG; PAM sequence: CAG
cgacgaggtgagagctgcag

SEQ ID NO: 149249 - DNA, 20 bp, Artificial Sequence
  Description of Artificial Sequence: Synthetic oligonucleotide
  Target: LAMA2; (+) strand; PAM type: NRG; PAM sequence: AAG
gaatgtcactgctctgataa

SEQ ID NO: 149250 - DNA, 20 bp, Artificial Sequence
  Description of Artificial Sequence: Synthetic oligonucleotide
  Target: LAMA2; (+) strand; PAM type: NRG; PAM sequence: AGG
aatgtcactgctctgataaa

SEQ ID NO: 149251 - DNA, 20 bp, Artificial Sequence
  Description of Artificial Sequence: Synthetic oligonucleotide
  Target: LAMA2; (+) strand; PAM type: NRG; PAM sequence: AAG
tctgataaaaggacaactaa

SEQ ID NO: 149252 - DNA, 20 bp, Artificial Sequence
  Description of Artificial Sequence: Synthetic oligonucleotide
  Target: LAMA2; (+) strand; PAM type: NRG; PAM sequence: CAG
aagccaaatatgattatttt

SEQ ID NO: 149253 - DNA, 20 bp, Artificial Sequence
  Description of Artificial Sequence: Synthetic oligonucleotide
  Target: LAMA2; (+) strand; PAM type: NRG; PAM sequence: AAG
ccaaatatgattattttcag

SEQ ID NO: 149254 - DNA, 20 bp, Artificial Sequence
  Description of Artificial Sequence: Synthetic oligonucleotide
  Target: LAMA2; (+) strand; PAM type: NRG; PAM sequence: CAG
attttcagaagaatattttg

SEQ ID NO: 149255 - DNA, 20 bp, Artificial Sequence
  Description of Artificial Sequence: Synthetic oligonucleotide
  Target: LAMA2; (+) strand; PAM type: NRG; PAM sequence: CAG
aaatttattctttaatctat

SEQ ID NO: 149256 - DNA, 20 bp, Artificial Sequence
  Description of Artificial Sequence: Synthetic oligonucleotide
  Target: LAMA2; (+) strand; PAM type: NRG; PAM sequence: TAG
tctttaatctatcagtgtat

SEQ ID NO: 149257 - DNA, 20 bp, Artificial Sequence
  Description of Artificial Sequence: Synthetic oligonucleotide
  Target: LAMA2; (+) strand; PAM type: NRG; PAM sequence: CAG
cagtgtattagcgttccctc

SEQ ID NO: 149258 - DNA, 20 bp, Artificial Sequence
  Description of Artificial Sequence: Synthetic oligonucleotide
  Target: LAMA2; (+) strand; PAM type: NRG; PAM sequence: AGG
agtgtattagcgttccctcc

SEQ ID NO: 149259 - DNA, 20 bp, Artificial Sequence
  Description of Artificial Sequence: Synthetic oligonucleotide
  Target: LAMA2; (+) strand; PAM type: NRG; PAM sequence: AAG
gtattagcgttccctccagg

SEQ ID NO: 149260 - DNA, 20 bp, Artificial Sequence
  Description of Artificial Sequence: Synthetic oligonucleotide
  Target: LAMA2; (+) strand; PAM type: NRG; PAM sequence: TAG
ttagcgttccctccaggaag

SEQ ID NO: 149261 - DNA, 20 bp, Artificial Sequence
  Description of Artificial Sequence: Synthetic oligonucleotide
  Target: LAMA2; (+) strand; PAM type: NRG; PAM sequence: TAG
gtttaattataatgttttca

SEQ ID NO: 149262 - DNA, 20 bp, Artificial Sequence
  Description of Artificial Sequence: Synthetic oligonucleotide
  Target: LAMA2; (+) strand; PAM type: NRG; PAM sequence: AAG
aattataatgttttcatagc

SEQ ID NO: 149263 - DNA, 20 bp, Artificial Sequence
  Description of Artificial Sequence: Synthetic oligonucleotide
  Target: LAMA2; (+) strand; PAM type: NRG; PAM sequence: AAG
tataatgttttcatagcaag

SEQ ID NO: 149264 - DNA, 20 bp, Artificial Sequence
  Description of Artificial Sequence: Synthetic oligonucleotide
  Target: LAMA2; (+) strand; PAM type: NRG; PAM sequence: GAG
taatgttttcatagcaagaa

SEQ ID NO: 149265 - DNA, 20 bp, Artificial Sequence
  Description of Artificial Sequence: Synthetic oligonucleotide
  Target: LAMA2; (+) strand; PAM type: NRG; PAM sequence: GAG
agagttgaattatgtatttt

SEQ ID NO: 149266 - DNA, 20 bp, Artificial Sequence
  Description of Artificial Sequence: Synthetic oligonucleotide
  Target: LAMA2; (+) strand; PAM type: NRG; PAM sequence: CAG
gatacacacacacacataca

SEQ ID NO: 149267 - DNA, 20 bp, Artificial Sequence
  Description of Artificial Sequence: Synthetic oligonucleotide
  Target: LAMA2; (+) strand; PAM type: NRG; PAM sequence: GAG
tacacacacacacatacaca

SEQ ID NO: 149268 - DNA, 20 bp, Artificial Sequence
  Description of Artificial Sequence: Synthetic oligonucleotide
  Target: LAMA2; (+) strand; PAM type: NRG; PAM sequence: AAG
cacacacatacacagagata

SEQ ID NO: 149269 - DNA, 20 bp, Artificial Sequence
  Description of Artificial Sequence: Synthetic oligonucleotide
  Target: LAMA2; (+) strand; PAM type: NRG; PAM sequence: AAG
cacatacacagagataaaga

SEQ ID NO: 149270 - DNA, 20 bp, Artificial Sequence
  Description of Artificial Sequence: Synthetic oligonucleotide
  Target: LAMA2; (+) strand; PAM type: NRG; PAM sequence: GAG
catacacagagataaagaaa

SEQ ID NO: 149271 - DNA, 20 bp, Artificial Sequence
  Description of Artificial Sequence: Synthetic oligonucleotide
  Target: LAMA2; (+) strand; PAM type: NRG; PAM sequence: GAG
tacacagagataaagaaaga

SEQ ID NO: 149272 - DNA, 20 bp, Artificial Sequence
  Description of Artificial Sequence: Synthetic oligonucleotide
  Target: LAMA2; (+) strand; PAM type: NRG; PAM sequence: GAG
cacagagataaagaaagaga

SEQ ID NO: 149273 - DNA, 20 bp, Artificial Sequence
  Description of Artificial Sequence: Synthetic oligonucleotide
  Target: LAMA2; (+) strand; PAM type: NRG; PAM sequence: GAG
cagagataaagaaagagaga

SEQ ID NO: 149274 - DNA, 20 bp, Artificial Sequence
  Description of Artificial Sequence: Synthetic oligonucleotide
  Target: LAMA2; (+) strand; PAM type: NRG; PAM sequence: TGG
gagagtcaatcacaaatctg

SEQ ID NO: 149275 - DNA, 20 bp, Artificial Sequence
  Description of Artificial Sequence: Synthetic oligonucleotide
  Target: LAMA2; (+) strand; PAM type: NRG; PAM sequence: TAG
tttcatatcgtgttatttat

SEQ ID NO: 149276 - DNA, 20 bp, Artificial Sequence
  Description of Artificial Sequence: Synthetic oligonucleotide
  Target: LAMA2; (+) strand; PAM type: NRG; PAM sequence: TAG
gttatttattagattgtttg

SEQ ID NO: 149277 - DNA, 20 bp, Artificial Sequence
  Description of Artificial Sequence: Synthetic oligonucleotide
  Target: LAMA2; (+) strand; PAM type: NRG; PAM sequence: GAG
agattgtttgtagcttctat

SEQ ID NO: 149278 - DNA, 20 bp, Artificial Sequence
  Description of Artificial Sequence: Synthetic oligonucleotide
  Target: LAMA2; (+) strand; PAM type: NRG; PAM sequence: TAG
tttgtagcttctatgagttc

SEQ ID NO: 149279 - DNA, 20 bp, Artificial Sequence
  Description of Artificial Sequence: Synthetic oligonucleotide
  Target: LAMA2; (+) strand; PAM type: NRG; PAM sequence: CAG
tgagttctagcatgaaatgc

SEQ ID NO: 149280 - DNA, 20 bp, Artificial Sequence
  Description of Artificial Sequence: Synthetic oligonucleotide
  Target: LAMA2; (+) strand; PAM type: NRG; PAM sequence: GAG
atgaaatgccagcgttcact

SEQ ID NO: 149281 - DNA, 20 bp, Artificial Sequence
  Description of Artificial Sequence: Synthetic oligonucleotide
  Target: LAMA2; (+) strand; PAM type: NRG; PAM sequence: AGG
tgaaatgccagcgttcactg

SEQ ID NO: 149282 - DNA, 20 bp, Artificial Sequence
  Description of Artificial Sequence: Synthetic oligonucleotide
  Target: LAMA2; (+) strand; PAM type: NRG; PAM sequence: TAG
actgaggaatgtgtgtgctg

SEQ ID NO: 149283 - DNA, 20 bp, Artificial Sequence
  Description of Artificial Sequence: Synthetic oligonucleotide
  Target: LAMA2; (+) strand; PAM type: NRG; PAM sequence: TGG
gaggaatgtgtgtgctgtag

SEQ ID NO: 149284 - DNA, 20 bp, Artificial Sequence
  Description of Artificial Sequence: Synthetic oligonucleotide
  Target: LAMA2; (+) strand; PAM type: NRG; PAM sequence: GGG
aggaatgtgtgtgctgtagt

SEQ ID NO: 149285 - DNA, 20 bp, Artificial Sequence
  Description of Artificial Sequence: Synthetic oligonucleotide
  Target: LAMA2; (+) strand; PAM type: NRG; PAM sequence: AAG
tgtgtgtgctgtagtgggaa

SEQ ID NO: 149286 - DNA, 20 bp, Artificial Sequence
  Description of Artificial Sequence: Synthetic oligonucleotide
  Target: LAMA2; (+) strand; PAM type: NRG; PAM sequence: TAG
gctgtagtgggaaaagcaaa

SEQ ID NO: 149287 - DNA, 20 bp, Artificial Sequence
  Description of Artificial Sequence: Synthetic oligonucleotide
  Target: LAMA2; (+) strand; PAM type: NRG; PAM sequence: AAG
gtagtgggaaaagcaaatag

SEQ ID NO: 149288 - DNA, 20 bp, Artificial Sequence
  Description of Artificial Sequence: Synthetic oligonucleotide
  Target: LAMA2; (+) strand; PAM type: NRG; PAM sequence: GAG
aatagaagaactcacacact

SEQ ID NO: 149289 - DNA, 20 bp, Artificial Sequence
  Description of Artificial Sequence: Synthetic oligonucleotide
  Target: LAMA2; (+) strand; PAM type: NRG; PAM sequence: TAG
agaactcacacactgagatg

SEQ ID NO: 149290 - DNA, 20 bp, Artificial Sequence
  Description of Artificial Sequence: Synthetic oligonucleotide
  Target: LAMA2; (+) strand; PAM type: NRG; PAM sequence: AGG
gaactcacacactgagatgt

SEQ ID NO: 149291 - DNA, 20 bp, Artificial Sequence
  Description of Artificial Sequence: Synthetic oligonucleotide
  Target: LAMA2; (+) strand; PAM type: NRG; PAM sequence: TAG
ctgagatgtaggcaataata

SEQ ID NO: 149292 - DNA, 20 bp, Artificial Sequence
  Description of Artificial Sequence: Synthetic oligonucleotide
  Target: LAMA2; (+) strand; PAM type: NRG; PAM sequence: AAG
gatgtaggcaataatataga

SEQ ID NO: 149293 - DNA, 20 bp, Artificial Sequence
  Description of Artificial Sequence: Synthetic oligonucleotide
  Target: LAMA2; (+) strand; PAM type: NRG; PAM sequence: AAG
taggcaataatatagaaagc

SEQ ID NO: 149294 - DNA, 20 bp, Artificial Sequence
  Description of Artificial Sequence: Synthetic oligonucleotide
  Target: LAMA2; (+) strand; PAM type: NRG; PAM sequence: AAG
gcaataatatagaaagcaag

SEQ ID NO: 149295 - DNA, 20 bp, Artificial Sequence
  Description of Artificial Sequence: Synthetic oligonucleotide
  Target: LAMA2; (+) strand; PAM type: NRG; PAM sequence: AAG
gaaagcaagaagtgttcata

SEQ ID NO: 149296 - DNA, 20 bp, Artificial Sequence
  Description of Artificial Sequence: Synthetic oligonucleotide
  Target: LAMA2; (+) strand; PAM type: NRG; PAM sequence: AGG
aaagcaagaagtgttcataa

SEQ ID NO: 149297 - DNA, 20 bp, Artificial Sequence
  Description of Artificial Sequence: Synthetic oligonucleotide
  Target: LAMA2; (+) strand; PAM type: NRG; PAM sequence: AAG
agaagtgttcataaaggact

SEQ ID NO: 149298 - DNA, 20 bp, Artificial Sequence
  Description of Artificial Sequence: Synthetic oligonucleotide
  Target: LAMA2; (+) strand; PAM type: NRG; PAM sequence: AAG
agtgttcataaaggactaag

SEQ ID NO: 149299 - DNA, 20 bp, Artificial Sequence
  Description of Artificial Sequence: Synthetic oligonucleotide
  Target: LAMA2; (+) strand; PAM type: NRG; PAM sequence: AGG
gtgttcataaaggactaaga

SEQ ID NO: 149300 - DNA, 20 bp, Artificial Sequence
  Description of Artificial Sequence: Synthetic oligonucleotide
  Target: LAMA2; (+) strand; PAM type: NRG; PAM sequence: TAG
ttcataaaggactaagaagg

SEQ ID NO: 149301 - DNA, 20 bp, Artificial Sequence
  Description of Artificial Sequence: Synthetic oligonucleotide
  Target: LAMA2; (+) strand; PAM type: NRG; PAM sequence: TAG
ataaaggactaagaaggtag

SEQ ID NO: 149302 - DNA, 20 bp, Artificial Sequence
  Description of Artificial Sequence: Synthetic oligonucleotide
  Target: LAMA2; (+) strand; PAM type: NRG; PAM sequence: CAG
agtagtcatgaattaatgaa

SEQ ID NO: 149303 - DNA, 20 bp, Artificial Sequence
  Description of Artificial Sequence: Synthetic oligonucleotide
  Target: LAMA2; (+) strand; PAM type: NRG; PAM sequence: AAG
gtcatgaattaatgaacaga

SEQ ID NO: 149304 - DNA, 20 bp, Artificial Sequence
  Description of Artificial Sequence: Synthetic oligonucleotide
  Target: LAMA2; (+) strand; PAM type: NRG; PAM sequence: GAG
catgaattaatgaacagaaa

SEQ ID NO: 149305 - DNA, 20 bp, Artificial Sequence
  Description of Artificial Sequence: Synthetic oligonucleotide
  Target: LAMA2; (+) strand; PAM type: NRG; PAM sequence: AGG
atgaattaatgaacagaaag

SEQ ID NO: 149306 - DNA, 20 bp, Artificial Sequence
  Description of Artificial Sequence: Synthetic oligonucleotide
  Target: LAMA2; (+) strand; PAM type: NRG; PAM sequence: AAG
aaagaggctgacactaattt

SEQ ID NO: 149307 - DNA, 20 bp, Artificial Sequence
  Description of Artificial Sequence: Synthetic oligonucleotide
  Target: LAMA2; (+) strand; PAM type: NRG; PAM sequence: AAG
gctgacactaatttaagcta

SEQ ID NO: 149308 - DNA, 20 bp, Artificial Sequence
  Description of Artificial Sequence: Synthetic oligonucleotide
  Target: LAMA2; (+) strand; PAM type: NRG; PAM sequence: GAG
ttaagctaaagccttccttt

SEQ ID NO: 149309 - DNA, 20 bp, Artificial Sequence
  Description of Artificial Sequence: Synthetic oligonucleotide
  Target: LAMA2; (+) strand; PAM type: NRG; PAM sequence: AGG
taagctaaagccttcctttg

SEQ ID NO: 149310 - DNA, 20 bp, Artificial Sequence
  Description of Artificial Sequence: Synthetic oligonucleotide
  Target: LAMA2; (+) strand; PAM type: NRG; PAM sequence: AAG
attcatgaactccaaacatt

SEQ ID NO: 149311 - DNA, 20 bp, Artificial Sequence
  Description of Artificial Sequence: Synthetic oligonucleotide
  Target: LAMA2; (+) strand; PAM type: NRG; PAM sequence: AAG
aacataactccttgatataa

SEQ ID NO: 149312 - DNA, 20 bp, Artificial Sequence
  Description of Artificial Sequence: Synthetic oligonucleotide
  Target: LAMA2; (+) strand; PAM type: NRG; PAM sequence: TGG
ctccttgatataaaagcgtt

SEQ ID NO: 149313 - DNA, 20 bp, Artificial Sequence
  Description of Artificial Sequence: Synthetic oligonucleotide
  Target: LAMA2; (+) strand; PAM type: NRG; PAM sequence: GGG
tccttgatataaaagcgttt

SEQ ID NO: 149314 - DNA, 20 bp, Artificial Sequence
  Description of Artificial Sequence: Synthetic oligonucleotide
  Target: LAMA2; (+) strand; PAM type: NRG; PAM sequence: GAG
cttgatataaaagcgtttgg

SEQ ID NO: 149315 - DNA, 20 bp, Artificial Sequence
  Description of Artificial Sequence: Synthetic oligonucleotide
  Target: LAMA2; (+) strand; PAM type: NRG; PAM sequence: CAG
aagcgtttgggagctacttc

SEQ ID NO: 149316 - DNA, 20 bp, Artificial Sequence
  Description of Artificial Sequence: Synthetic oligonucleotide
  Target: LAMA2; (+) strand; PAM type: NRG; PAM sequence: AGG
agcgtttgggagctacttcc

SEQ ID NO: 149317 - DNA, 20 bp, Artificial Sequence
  Description of Artificial Sequence: Synthetic oligonucleotide
  Target: LAMA2; (+) strand; PAM type: NRG; PAM sequence: GGG
gcgtttgggagctacttcca

SEQ ID NO: 149318 - DNA, 20 bp, Artificial Sequence
  Description of Artificial Sequence: Synthetic oligonucleotide
  Target: LAMA2; (+) strand; PAM type: NRG; PAM sequence: CAG
tttgggagctacttccaggg

SEQ ID NO: 149319 - DNA, 20 bp, Artificial Sequence
  Description of Artificial Sequence: Synthetic oligonucleotide
  Target: LAMA2; (+) strand; PAM type: NRG; PAM sequence: AAG
ttccagggcagttgctcgcc

SEQ ID NO: 149320 - DNA, 20 bp, Artificial Sequence
  Description of Artificial Sequence: Synthetic oligonucleotide
  Target: LAMA2; (+) strand; PAM type: NRG; PAM sequence: AAG
ggcagttgctcgccaagttt

SEQ ID NO: 149321 - DNA, 20 bp, Artificial Sequence
  Description of Artificial Sequence: Synthetic oligonucleotide
  Target: LAMA2; (+) strand; PAM type: NRG; PAM sequence: TAG
agttgctcgccaagtttaag

SEQ ID NO: 149322 - DNA, 20 bp, Artificial Sequence
  Description of Artificial Sequence: Synthetic oligonucleotide
  Target: LAMA2; (+) strand; PAM type: NRG; PAM sequence: AGG
gttgctcgccaagtttaagt

SEQ ID NO: 149323 - DNA, 20 bp, Artificial Sequence
  Description of Artificial Sequence: Synthetic oligonucleotide
  Target: LAMA2; (+) strand; PAM type: NRG; PAM sequence: TAG
aagtttaagtaggaaattca

SEQ ID NO: 149324 - DNA, 20 bp, Artificial Sequence
  Description of Artificial Sequence: Synthetic oligonucleotide
  Target: LAMA2; (+) strand; PAM type: NRG; PAM sequence: TGG
aggaaattcatagaatgcac

SEQ ID NO: 149325 - DNA, 20 bp, Artificial Sequence
  Description of Artificial Sequence: Synthetic oligonucleotide
  Target: LAMA2; (+) strand; PAM type: NRG; PAM sequence: GGG
ggaaattcatagaatgcact

SEQ ID NO: 149326 - DNA, 20 bp, Artificial Sequence
  Description of Artificial Sequence: Synthetic oligonucleotide
  Target: LAMA2; (+) strand; PAM type: NRG; PAM sequence: TAG
gcactgggacgcttcttctc

SEQ ID NO: 149327 - DNA, 20 bp, Artificial Sequence
  Description of Artificial Sequence: Synthetic oligonucleotide
  Target: LAMA2; (+) strand; PAM type: NRG; PAM sequence: AAG
tgggacgcttcttctctaga

SEQ ID NO: 149328 - DNA, 20 bp, Artificial Sequence
  Description of Artificial Sequence: Synthetic oligonucleotide
  Target: LAMA2; (+) strand; PAM type: NRG; PAM sequence: AAG
tagaaagactaaaattaatc

SEQ ID NO: 149329 - DNA, 20 bp, Artificial Sequence
  Description of Artificial Sequence: Synthetic oligonucleotide
  Target: LAMA2; (+) strand; PAM type: NRG; PAM sequence: AGG
agaaagactaaaattaatca

SEQ ID NO: 149330 - DNA, 20 bp, Artificial Sequence
  Description of Artificial Sequence: Synthetic oligonucleotide
  Target: LAMA2; (+) strand; PAM type: NRG; PAM sequence: TAG
aattaatcaaggctacaatg

SEQ ID NO: 149331 - DNA, 20 bp, Artificial Sequence
  Description of Artificial Sequence: Synthetic oligonucleotide
  Target: LAMA2; (+) strand; PAM type: NRG; PAM sequence: TAG
gtttttttccctaatgactt

SEQ ID NO: 149332 - DNA, 20 bp, Artificial Sequence
  Description of Artificial Sequence: Synthetic oligonucleotide
  Target: LAMA2; (+) strand; PAM type: NRG; PAM sequence: AAG
cctaatgactttagcgttaa

SEQ ID NO: 149333 - DNA, 20 bp, Artificial Sequence
  Description of Artificial Sequence: Synthetic oligonucleotide
  Target: LAMA2; (+) strand; PAM type: NRG; PAM sequence: CAG
tgactttagcgttaaaagac

SEQ ID NO: 149334 - DNA, 20 bp, Artificial Sequence
  Description of Artificial Sequence: Synthetic oligonucleotide
  Target: LAMA2; (+) strand; PAM type: NRG; PAM sequence: TAG
aaaagaccagcaatgtttct

SEQ ID NO: 149335 - DNA, 20 bp, Artificial Sequence
  Description of Artificial Sequence: Synthetic oligonucleotide
  Target: LAMA2; (+) strand; PAM type: NRG; PAM sequence: AGG
aaagaccagcaatgtttctt

SEQ ID NO: 149336 - DNA, 20 bp, Artificial Sequence
  Description of Artificial Sequence: Synthetic oligonucleotide
  Target: LAMA2; (+) strand; PAM type: NRG; PAM sequence: TAG
ctgctttctttataaaactg

SEQ ID NO: 149337 - DNA, 20 bp, Artificial Sequence
  Description of Artificial Sequence: Synthetic oligonucleotide
  Target: LAMA2; (+) strand; PAM type: NRG; PAM sequence: AGG
tgctttctttataaaactgt

SEQ ID NO: 149338 - DNA, 20 bp, Artificial Sequence
  Description of Artificial Sequence: Synthetic oligonucleotide
  Target: LAMA2; (+) strand; PAM type: NRG; PAM sequence: GAG
aactgtaggattatcaatct

SEQ ID NO: 149339 - DNA, 20 bp, Artificial Sequence
  Description of Artificial Sequence: Synthetic oligonucleotide
  Target: LAMA2; (+) strand; PAM type: NRG; PAM sequence: TAG
atcaatctgagcattacatg

SEQ ID NO: 149340 - DNA, 20 bp, Artificial Sequence
  Description of Artificial Sequence: Synthetic oligonucleotide
  Target: LAMA2; (+) strand; PAM type: NRG; PAM sequence: CGG
aattttgaaatattaaaaaa

SEQ ID NO: 149341 - DNA, 20 bp, Artificial Sequence
  Description of Artificial Sequence: Synthetic oligonucleotide
  Target: LAMA2; (+) strand; PAM type: NRG; PAM sequence: TAG
aaaaaacggatacgttttga

SEQ ID NO: 149342 - DNA, 20 bp, Artificial Sequence
  Description of Artificial Sequence: Synthetic oligonucleotide
  Target: LAMA2; (+) strand; PAM type: NRG; PAM sequence: GAG
tagtcgaatgatgaattact

SEQ ID NO: 149343 - DNA, 20 bp, Artificial Sequence
  Description of Artificial Sequence: Synthetic oligonucleotide
  Target: LAMA2; (+) strand; PAM type: NRG; PAM sequence: AAG
ctgagctcacttttcgtttt

SEQ ID NO: 149344 - DNA, 20 bp, Artificial Sequence
  Description of Artificial Sequence: Synthetic oligonucleotide
  Target: LAMA2; (+) strand; PAM type: NRG; PAM sequence: AAG
ccttttctctttgtgtttac

SEQ ID NO: 149345 - DNA, 20 bp, Artificial Sequence
  Description of Artificial Sequence: Synthetic oligonucleotide
  Target: LAMA2; (+) strand; PAM type: NRG; PAM sequence: GAG
actcttccctaccccttttt

SEQ ID NO: 149346 - DNA, 20 bp, Artificial Sequence
  Description of Artificial Sequence: Synthetic oligonucleotide
  Target: LAMA2; (+) strand; PAM type: NRG; PAM sequence: GAG
cctacccctttttgagtaat

SEQ ID NO: 149347 - DNA, 20 bp, Artificial Sequence
  Description of Artificial Sequence: Synthetic oligonucleotide
  Target: LAMA2; (+) strand; PAM type: NRG; PAM sequence: CAG
gagtaatgagtatatgatca

SEQ ID NO: 149348 - DNA, 20 bp, Artificial Sequence
  Description of Artificial Sequence: Synthetic oligonucleotide
  Target: LAMA2; (+) strand; PAM type: NRG; PAM sequence: TGG
atatgatcacagaataaaaa

SEQ ID NO: 149349 - DNA, 20 bp, Artificial Sequence
  Description of Artificial Sequence: Synthetic oligonucleotide
  Target: LAMA2; (+) strand; PAM type: NRG; PAM sequence: AAG
atcacagaataaaaatggaa

SEQ ID NO: 149350 - DNA, 20 bp, Artificial Sequence
  Description of Artificial Sequence: Synthetic oligonucleotide
  Target: LAMA2; (+) strand; PAM type: NRG; PAM sequence: TAG
acagaataaaaatggaaaag

SEQ ID NO: 149351 - DNA, 20 bp, Artificial Sequence
  Description of Artificial Sequence: Synthetic oligonucleotide
  Target: LAMA2; (+) strand; PAM type: NRG; PAM sequence: CAG
agaaaaataaatatacaatt

SEQ ID NO: 149352 - DNA, 20 bp, Artificial Sequence
  Description of Artificial Sequence: Synthetic oligonucleotide
  Target: LAMA2; (+) strand; PAM type: NRG; PAM sequence: TGG
aaaataaatatacaattcag

SEQ ID NO: 149353 - DNA, 20 bp, Artificial Sequence
  Description of Artificial Sequence: Synthetic oligonucleotide
  Target: LAMA2; (+) strand; PAM type: NRG; PAM sequence: CAG
tatacaattcagtggtaatt

SEQ ID NO: 149354 - DNA, 20 bp, Artificial Sequence
  Description of Artificial Sequence: Synthetic oligonucleotide
  Target: LAMA2; (+) strand; PAM type: NRG; PAM sequence: AGG
atacaattcagtggtaattc

SEQ ID NO: 149355 - DNA, 20 bp, Artificial Sequence
  Description of Artificial Sequence: Synthetic oligonucleotide
  Target: LAMA2; (+) strand; PAM type: NRG; PAM sequence: GAG
acaattcagtggtaattcag

SEQ ID NO: 149356 - DNA, 20 bp, Artificial Sequence
  Description of Artificial Sequence: Synthetic oligonucleotide
  Target: LAMA2; (+) strand; PAM type: NRG; PAM sequence: GAG
aattcagtggtaattcagga

SEQ ID NO: 149357 - DNA, 20 bp, Artificial Sequence
  Description of Artificial Sequence: Synthetic oligonucleotide
  Target: LAMA2; (+) strand; PAM type: NRG; PAM sequence: GAG
tcctcttaactttatgtgat

SEQ ID NO: 149358 - DNA, 20 bp, Artificial Sequence
  Description of Artificial Sequence: Synthetic oligonucleotide
  Target: LAMA2; (+) strand; PAM type: NRG; PAM sequence: AAG
atctatgaaaactttctctg

SEQ ID NO: 149359 - DNA, 20 bp, Artificial Sequence
  Description of Artificial Sequence: Synthetic oligonucleotide
  Target: LAMA2; (+) strand; PAM type: NRG; PAM sequence: TGG
tgaaaactttctctgaagtc

SEQ ID NO: 149360 - DNA, 20 bp, Artificial Sequence
  Description of Artificial Sequence: Synthetic oligonucleotide
  Target: LAMA2; (+) strand; PAM type: NRG; PAM sequence: CAG
ctttctctgaagtctggctt

SEQ ID NO: 149361 - DNA, 20 bp, Artificial Sequence
  Description of Artificial Sequence: Synthetic oligonucleotide
  Target: LAMA2; (+) strand; PAM type: NRG; PAM sequence: TGG
ctaaataacacattattata

SEQ ID NO: 149362 - DNA, 20 bp, Artificial Sequence
  Description of Artificial Sequence: Synthetic oligonucleotide
  Target: LAMA2; (+) strand; PAM type: NRG; PAM sequence: TGG
tttaccctctcaactttata

SEQ ID NO: 149363 - DNA, 20 bp, Artificial Sequence
  Description of Artificial Sequence: Synthetic oligonucleotide
  Target: LAMA2; (+) strand; PAM type: NRG; PAM sequence: AAG
ctcaactttatatggacatt

SEQ ID NO: 149364 - DNA, 20 bp, Artificial Sequence
  Description of Artificial Sequence: Synthetic oligonucleotide
  Target: LAMA2; (+) strand; PAM type: NRG; PAM sequence: TAG
attattgtaaaaacaataca

SEQ ID NO: 149365 - DNA, 20 bp, Artificial Sequence
  Description of Artificial Sequence: Synthetic oligonucleotide
  Target: LAMA2; (+) strand; PAM type: NRG; PAM sequence: TAG
atagtaaaataaattcttaa

SEQ ID NO: 149366 - DNA, 20 bp, Artificial Sequence
  Description of Artificial Sequence: Synthetic oligonucleotide
  Target: LAMA2; (+) strand; PAM type: NRG; PAM sequence: AAG
aaaataaattcttaatagta

SEQ ID NO: 149367 - DNA, 20 bp, Artificial Sequence
  Description of Artificial Sequence: Synthetic oligonucleotide
  Target: LAMA2; (+) strand; PAM type: NRG; PAM sequence: AAG
tagtaaagaaataaaataat

SEQ ID NO: 149368 - DNA, 20 bp, Artificial Sequence
  Description of Artificial Sequence: Synthetic oligonucleotide
  Target: LAMA2; (+) strand; PAM type: NRG; PAM sequence: CAG
cctcttcaacctatttatcc

SEQ ID NO: 149369 - DNA, 20 bp, Artificial Sequence
  Description of Artificial Sequence: Synthetic oligonucleotide
  Target: LAMA2; (+) strand; PAM type: NRG; PAM sequence: GAG
cttccaaatttaaaaatatt

SEQ ID NO: 149370 - DNA, 20 bp, Artificial Sequence
  Description of Artificial Sequence: Synthetic oligonucleotide
  Target: LAMA2; (+) strand; PAM type: NRG; PAM sequence: CAG
attgagccttttttccgatt

SEQ ID NO: 149371 - DNA, 20 bp, Artificial Sequence
  Description of Artificial Sequence: Synthetic oligonucleotide
  Target: LAMA2; (+) strand; PAM type: NRG; PAM sequence: AAG
attttttttaattatacttt

SEQ ID NO: 149372 - DNA, 20 bp, Artificial Sequence
  Description of Artificial Sequence: Synthetic oligonucleotide
  Target: LAMA2; (+) strand; PAM type: NRG; PAM sequence: TAG
tttaattatactttaagttt

SEQ ID NO: 149373 - DNA, 20 bp, Artificial Sequence
  Description of Artificial Sequence: Synthetic oligonucleotide
  Target: LAMA2; (+) strand; PAM type: NRG; PAM sequence: AGG
ttaattatactttaagtttt

SEQ ID NO: 149374 - DNA, 20 bp, Artificial Sequence
  Description of Artificial Sequence: Synthetic oligonucleotide
  Target: LAMA2; (+) strand; PAM type: NRG; PAM sequence: GGG
taattatactttaagtttta

SEQ ID NO: 149375 - DNA, 20 bp, Artificial Sequence
  Description of Artificial Sequence: Synthetic oligonucleotide
  Target: LAMA2; (+) strand; PAM type: NRG; PAM sequence: CAG
gggtacatgtgcacaatgtg

SEQ ID NO: 149376 - DNA, 20 bp, Artificial Sequence
  Description of Artificial Sequence: Synthetic oligonucleotide
  Target: LAMA2; (+) strand; PAM type: NRG; PAM sequence: AGG
ggtacatgtgcacaatgtgc

SEQ ID NO: 149377 - DNA, 20 bp, Artificial Sequence
  Description of Artificial Sequence: Synthetic oligonucleotide
  Target: LAMA2; (+) strand; PAM type: NRG; PAM sequence: TAG
catgtgcacaatgtgcaggt

SEQ ID NO: 149378 - DNA, 20 bp, Artificial Sequence
  Description of Artificial Sequence: Synthetic oligonucleotide
  Target: LAMA2; (+) strand; PAM type: NRG; PAM sequence: TGG
tatgtatacatgtgccatgc

SEQ ID NO: 149379 - DNA, 20 bp, Artificial Sequence
  Description of Artificial Sequence: Synthetic oligonucleotide
  Target: LAMA2; (+) strand; PAM type: NRG; PAM sequence: TAG
gcacccactaactcgtcatc

SEQ ID NO: 149380 - DNA, 20 bp, Artificial Sequence
  Description of Artificial Sequence: Synthetic oligonucleotide
  Target: LAMA2; (+) strand; PAM type: NRG; PAM sequence: TAG
actaactcgtcatctagcat

SEQ ID NO: 149381 - DNA, 20 bp, Artificial Sequence
  Description of Artificial Sequence: Synthetic oligonucleotide
  Target: LAMA2; (+) strand; PAM type: NRG; PAM sequence: AGG
ctaactcgtcatctagcatt

SEQ ID NO: 149382 - DNA, 20 bp, Artificial Sequence
  Description of Artificial Sequence: Synthetic oligonucleotide
  Target: LAMA2; (+) strand; PAM type: NRG; PAM sequence: CAG
cccctccccccaccccacaa

SEQ ID NO: 149383 - DNA, 20 bp, Artificial Sequence
  Description of Artificial Sequence: Synthetic oligonucleotide
  Target: LAMA2; (+) strand; PAM type: NRG; PAM sequence: CAG
ccccaccccacaacagtccc

SEQ ID NO: 149384 - DNA, 20 bp, Artificial Sequence
  Description of Artificial Sequence: Synthetic oligonucleotide
  Target: LAMA2; (+) strand; PAM type: NRG; PAM sequence: GAG
ccaccccacaacagtcccca

SEQ ID NO: 149385 - DNA, 20 bp, Artificial Sequence
  Description of Artificial Sequence: Synthetic oligonucleotide
  Target: LAMA2; (+) strand; PAM type: NRG; PAM sequence: TAG
cccttcctgtgtccatgtga

SEQ ID NO: 149386 - DNA, 20 bp, Artificial Sequence
  Description of Artificial Sequence: Synthetic oligonucleotide
  Target: LAMA2; (+) strand; PAM type: NRG; PAM sequence: GAG
attgttcaattcccacctat

SEQ ID NO: 149387 - DNA, 20 bp, Artificial Sequence
  Description of Artificial Sequence: Synthetic oligonucleotide
  Target: LAMA2; (+) strand; PAM type: NRG; PAM sequence: GAG
ttcaattcccacctatgagt

SEQ ID NO: 149388 - DNA, 20 bp, Artificial Sequence
  Description of Artificial Sequence: Synthetic oligonucleotide
  Target: LAMA2; (+) strand; PAM type: NRG; PAM sequence: TGG
cacctatgagtgagaatatg

SEQ ID NO: 149389 - DNA, 20 bp, Artificial Sequence
  Description of Artificial Sequence: Synthetic oligonucleotide
  Target: LAMA2; (+) strand; PAM type: NRG; PAM sequence: TGG
gagtgagaatatgtggtgtt

SEQ ID NO: 149390 - DNA, 20 bp, Artificial Sequence
  Description of Artificial Sequence: Synthetic oligonucleotide
  Target: LAMA2; (+) strand; PAM type: NRG; PAM sequence: GAG
tgttcttgcaatcgtttact

SEQ ID NO: 149391 - DNA, 20 bp, Artificial Sequence
  Description of Artificial Sequence: Synthetic oligonucleotide
  Target: LAMA2; (+) strand; PAM type: NRG; PAM sequence: AAG
atttcatccatgtccctaca

SEQ ID NO: 149392 - DNA, 20 bp, Artificial Sequence
  Description of Artificial Sequence: Synthetic oligonucleotide
  Target: LAMA2; (+) strand; PAM type: NRG; PAM sequence: AGG
tttcatccatgtccctacaa

SEQ ID NO: 149393 - DNA, 20 bp, Artificial Sequence
  Description of Artificial Sequence: Synthetic oligonucleotide
  Target: LAMA2; (+) strand; PAM type: NRG; PAM sequence: TGG
catgaactcatcatttttta

SEQ ID NO: 149394 - DNA, 20 bp, Artificial Sequence
  Description of Artificial Sequence: Synthetic oligonucleotide
  Target: LAMA2; (+) strand; PAM type: NRG; PAM sequence: TAG
catcattttttatggctgca

SEQ ID NO: 149395 - DNA, 20 bp, Artificial Sequence
  Description of Artificial Sequence: Synthetic oligonucleotide
  Target: LAMA2; (+) strand; PAM type: NRG; PAM sequence: TGG
tatggctgcatagtattcca

SEQ ID NO: 149396 - DNA, 20 bp, Artificial Sequence
  Description of Artificial Sequence: Synthetic oligonucleotide
  Target: LAMA2; (+) strand; PAM type: NRG; PAM sequence: AAG
catagtattccatggtgtat

SEQ ID NO: 149397 - DNA, 20 bp, Artificial Sequence
  Description of Artificial Sequence: Synthetic oligonucleotide
  Target: LAMA2; (+) strand; PAM type: NRG; PAM sequence: CAG
agtgccacattttcttaatc

SEQ ID NO: 149398 - DNA, 20 bp, Artificial Sequence
  Description of Artificial Sequence: Synthetic oligonucleotide
  Target: LAMA2; (+) strand; PAM type: NRG; PAM sequence: TGG
ttaatccagtctatcattgt

SEQ ID NO: 149399 - DNA, 20 bp, Artificial Sequence
  Description of Artificial Sequence: Synthetic oligonucleotide
  Target: LAMA2; (+) strand; PAM type: NRG; PAM sequence: TGG
gtctatcattgttggacatt

SEQ ID NO: 149400 - DNA, 20 bp, Artificial Sequence
  Description of Artificial Sequence: Synthetic oligonucleotide
  Target: LAMA2; (+) strand; PAM type: NRG; PAM sequence: GGG
tctatcattgttggacattt

SEQ ID NO: 149401 - DNA, 20 bp, Artificial Sequence
  Description of Artificial Sequence: Synthetic oligonucleotide
  Target: LAMA2; (+) strand; PAM type: NRG; PAM sequence: TGG
tcattgttggacatttgggt

SEQ ID NO: 149402 - DNA, 20 bp, Artificial Sequence
  Description of Artificial Sequence: Synthetic oligonucleotide
  Target: LAMA2; (+) strand; PAM type: NRG; PAM sequence: AAG
tggacatttgggttggttcc

SEQ ID NO: 149403 - DNA, 20 bp, Artificial Sequence
  Description of Artificial Sequence: Synthetic oligonucleotide
  Target: LAMA2; (+) strand; PAM type: NRG; PAM sequence: TGG
gttccaagtctttgctattg

SEQ ID NO: 149404 - DNA, 20 bp, Artificial Sequence
  Description of Artificial Sequence: Synthetic oligonucleotide
  Target: LAMA2; (+) strand; PAM type: NRG; PAM sequence: TAG
tacgtgtgcatgtgtcttca

SEQ ID NO: 149405 - DNA, 20 bp, Artificial Sequence
  Description of Artificial Sequence: Synthetic oligonucleotide
  Target: LAMA2; (+) strand; PAM type: NRG; PAM sequence: CAG
gtgtgcatgtgtcttcatag

SEQ ID NO: 149406 - DNA, 20 bp, Artificial Sequence
  Description of Artificial Sequence: Synthetic oligonucleotide
  Target: LAMA2; (+) strand; PAM type: NRG; PAM sequence: CAG
cttcatagcagcatgattta

SEQ ID NO: 149407 - DNA, 20 bp, Artificial Sequence
  Description of Artificial Sequence: Synthetic oligonucleotide
  Target: LAMA2; (+) strand; PAM type: NRG; PAM sequence: TGG
cagcatgatttacagtcctt

SEQ ID NO: 149408 - DNA, 20 bp, Artificial Sequence
  Description of Artificial Sequence: Synthetic oligonucleotide
  Target: LAMA2; (+) strand; PAM type: NRG; PAM sequence: GGG
agcatgatttacagtccttt

SEQ ID NO: 149409 - DNA, 20 bp, Artificial Sequence
  Description of Artificial Sequence: Synthetic oligonucleotide
  Target: LAMA2; (+) strand; PAM type: NRG; PAM sequence: CAG
cagtcctttgggtatatacc

SEQ ID NO: 149410 - DNA, 20 bp, Artificial Sequence
  Description of Artificial Sequence: Synthetic oligonucleotide
  Target: LAMA2; (+) strand; PAM type: NRG; PAM sequence: TGG
tttgggtatatacccagtaa

SEQ ID NO: 149411 - DNA, 20 bp, Artificial Sequence
  Description of Artificial Sequence: Synthetic oligonucleotide
  Target: LAMA2; (+) strand; PAM type: NRG; PAM sequence: GGG
ttgggtatatacccagtaat

SEQ ID NO: 149412 - DNA, 20 bp, Artificial Sequence
  Description of Artificial Sequence: Synthetic oligonucleotide
  Target: LAMA2; (+) strand; PAM type: NRG; PAM sequence: TGG
gtatatacccagtaatggga

SEQ ID NO: 149413 - DNA, 20 bp, Artificial Sequence
  Description of Artificial Sequence: Synthetic oligonucleotide
  Target: LAMA2; (+) strand; PAM type: NRG; PAM sequence: TGG
atacccagtaatgggatggc

SEQ ID NO: 149414 - DNA, 20 bp, Artificial Sequence
  Description of Artificial Sequence: Synthetic oligonucleotide
  Target: LAMA2; (+) strand; PAM type: NRG; PAM sequence: GGG
tacccagtaatgggatggct

SEQ ID NO: 149415 - DNA, 20 bp, Artificial Sequence
  Description of Artificial Sequence: Synthetic oligonucleotide
  Target: LAMA2; (+) strand; PAM type: NRG; PAM sequence: AAG
gtaatgggatggctgggtca

SEQ ID NO: 149416 - DNA, 20 bp, Artificial Sequence
  Description of Artificial Sequence: Synthetic oligonucleotide
  Target: LAMA2; (+) strand; PAM type: NRG; PAM sequence: AGG
taatgggatggctgggtcaa

SEQ ID NO: 149417 - DNA, 20 bp, Artificial Sequence
  Description of Artificial Sequence: Synthetic oligonucleotide
  Target: LAMA2; (+) strand; PAM type: NRG; PAM sequence: GGG
aatgggatggctgggtcaaa

SEQ ID NO: 149418 - DNA, 20 bp, Artificial Sequence
  Description of Artificial Sequence: Synthetic oligonucleotide
  Target: LAMA2; (+) strand; PAM type: NRG; PAM sequence: CAG
gctgggtcaaagggtatttc

SEQ ID NO: 149419 - DNA, 20 bp, Artificial Sequence
  Description of Artificial Sequence: Synthetic oligonucleotide
  Target: LAMA2; (+) strand; PAM type: NRG; PAM sequence: TAG
tcaaagggtatttccagttc

SEQ ID NO: 149420 - DNA, 20 bp, Artificial Sequence
  Description of Artificial Sequence: Synthetic oligonucleotide
  Target: LAMA2; (+) strand; PAM type: NRG; PAM sequence: GAG
atttccagttctagatccct

SEQ ID NO: 149421 - DNA, 20 bp, Artificial Sequence
  Description of Artificial Sequence: Synthetic oligonucleotide
  Target: LAMA2; (+) strand; PAM type: NRG; PAM sequence: AGG
tttccagttctagatccctg

SEQ ID NO: 149422 - DNA, 20 bp, Artificial Sequence
  Description of Artificial Sequence: Synthetic oligonucleotide
  Target: LAMA2; (+) strand; PAM type: NRG; PAM sequence: TGG
agttctagatccctgaggaa

SEQ ID NO: 149423 - DNA, 20 bp, Artificial Sequence
  Description of Artificial Sequence: Synthetic oligonucleotide
  Target: LAMA2; (+) strand; PAM type: NRG; PAM sequence: TGG
ggccacactgacttccacaa

SEQ ID NO: 149424 - DNA, 20 bp, Artificial Sequence
  Description of Artificial Sequence: Synthetic oligonucleotide
  Target: LAMA2; (+) strand; PAM type: NRG; PAM sequence: TAG
gacttccacaatggttgaac

SEQ ID NO: 149425 - DNA, 20 bp, Artificial Sequence
  Description of Artificial Sequence: Synthetic oligonucleotide
  Target: LAMA2; (+) strand; PAM type: NRG; PAM sequence: CAG
acaatggttgaactagttta

SEQ ID NO: 149426 - DNA, 20 bp, Artificial Sequence
  Description of Artificial Sequence: Synthetic oligonucleotide
  Target: LAMA2; (+) strand; PAM type: NRG; PAM sequence: CAG
ctagtttacagtcccaccaa

SEQ ID NO: 149427 - DNA, 20 bp, Artificial Sequence
  Description of Artificial Sequence: Synthetic oligonucleotide
  Target: LAMA2; (+) strand; PAM type: NRG; PAM sequence: AAG
gtcccaccaacagtgtgtaa

SEQ ID NO: 149428 - DNA, 20 bp, Artificial Sequence
  Description of Artificial Sequence: Synthetic oligonucleotide
  Target: LAMA2; (+) strand; PAM type: NRG; PAM sequence: CAG
ctatttctccacatcctctc

SEQ ID NO: 149429 - DNA, 20 bp, Artificial Sequence
  Description of Artificial Sequence: Synthetic oligonucleotide
  Target: LAMA2; (+) strand; PAM type: NRG; PAM sequence: TGG
ttaatgattgccattctaac

SEQ ID NO: 149430 - DNA, 20 bp, Artificial Sequence
  Description of Artificial Sequence: Synthetic oligonucleotide
  Target: LAMA2; (+) strand; PAM type: NRG; PAM sequence: GAG
attgccattctaactggtgt

SEQ ID NO: 149431 - DNA, 20 bp, Artificial Sequence
  Description of Artificial Sequence: Synthetic oligonucleotide
  Target: LAMA2; (+) strand; PAM type: NRG; PAM sequence: TGG
ccattctaactggtgtgaga

SEQ ID NO: 149432 - DNA, 20 bp, Artificial Sequence
  Description of Artificial Sequence: Synthetic oligonucleotide
  Target: LAMA2; (+) strand; PAM type: NRG; PAM sequence: TGG
tgtgagatggtatctcattg

SEQ ID NO: 149433 - DNA, 20 bp, Artificial Sequence
  Description of Artificial Sequence: Synthetic oligonucleotide
  Target: LAMA2; (+) strand; PAM type: NRG; PAM sequence: TGG
tttgatttgcatttctctga

SEQ ID NO: 149434 - DNA, 20 bp, Artificial Sequence
  Description of Artificial Sequence: Synthetic oligonucleotide
  Target: LAMA2; (+) strand; PAM type: NRG; PAM sequence: CAG
atttgcatttctctgatggc

SEQ ID NO: 149435 - DNA, 20 bp, Artificial Sequence
  Description of Artificial Sequence: Synthetic oligonucleotide
  Target: LAMA2; (+) strand; PAM type: NRG; PAM sequence: GAG
ctctgatggccagtgatgat

SEQ ID NO: 149436 - DNA, 20 bp, Artificial Sequence
  Description of Artificial Sequence: Synthetic oligonucleotide
  Target: LAMA2; (+) strand; PAM type: NRG; PAM sequence: TGG
gcattttttcatgtgttttt

SEQ ID NO: 149437 - DNA, 20 bp, Artificial Sequence
  Description of Artificial Sequence: Synthetic oligonucleotide
  Target: LAMA2; (+) strand; PAM type: NRG; PAM sequence: GAG
ctgcataaatgtcttctttt

SEQ ID NO: 149438 - DNA, 20 bp, Artificial Sequence
  Description of Artificial Sequence: Synthetic oligonucleotide
  Target: LAMA2; (+) strand; PAM type: NRG; PAM sequence: AAG
cataaatgtcttcttttgag

SEQ ID NO: 149439 - DNA, 20 bp, Artificial Sequence
  Description of Artificial Sequence: Synthetic oligonucleotide
  Target: LAMA2; (+) strand; PAM type: NRG; PAM sequence: TGG
gtccttcgcccacttgttga

SEQ ID NO: 149440 - DNA, 20 bp, Artificial Sequence
  Description of Artificial Sequence: Synthetic oligonucleotide
  Target: LAMA2; (+) strand; PAM type: NRG; PAM sequence: GGG
tccttcgcccacttgttgat

SEQ ID NO: 149441 - DNA, 20 bp, Artificial Sequence
  Description of Artificial Sequence: Synthetic oligonucleotide
  Target: LAMA2; (+) strand; PAM type: NRG; PAM sequence: GGG
ccttcgcccacttgttgatg

SEQ ID NO: 149442 - DNA, 20 bp, Artificial Sequence
  Description of Artificial Sequence: Synthetic oligonucleotide
  Target: LAMA2; (+) strand; PAM type: NRG; PAM sequence: GAG
tttttcttgtaaatttgttt

SEQ ID NO: 149443 - DNA, 20 bp, Artificial Sequence
  Description of Artificial Sequence: Synthetic oligonucleotide
  Target: LAMA2; (+) strand; PAM type: NRG; PAM sequence: TAG
aaatttgtttgagttcattg

SEQ ID NO: 149444 - DNA, 20 bp, Artificial Sequence
  Description of Artificial Sequence: Synthetic oligonucleotide
  Target: LAMA2; (+) strand; PAM type: NRG; PAM sequence: TGG
tttgagttcattgtagattc

SEQ ID NO: 149445 - DNA, 20 bp, Artificial Sequence
  Description of Artificial Sequence: Synthetic oligonucleotide
  Target: LAMA2; (+) strand; PAM type: NRG; PAM sequence: TAG
tcattgtagattctggatat

SEQ ID NO: 149446 - DNA, 20 bp, Artificial Sequence
  Description of Artificial Sequence: Synthetic oligonucleotide
  Target: LAMA2; (+) strand; PAM type: NRG; PAM sequence: CAG
tctggatattagccctttgt

SEQ ID NO: 149447 - DNA, 20 bp, Artificial Sequence
  Description of Artificial Sequence: Synthetic oligonucleotide
  Target: LAMA2; (+) strand; PAM type: NRG; PAM sequence: GAG
atattagccctttgtcagat

SEQ ID NO: 149448 - DNA, 20 bp, Artificial Sequence
  Description of Artificial Sequence: Synthetic oligonucleotide
  Target: LAMA2; (+) strand; PAM type: NRG; PAM sequence: TAG
ttagccctttgtcagatgag

SEQ ID NO: 149449 - DNA, 20 bp, Artificial Sequence
  Description of Artificial Sequence: Synthetic oligonucleotide
  Target: LAMA2; (+) strand; PAM type: NRG; PAM sequence: AGG
tagccctttgtcagatgagt

SEQ ID NO: 149450 - DNA, 20 bp, Artificial Sequence
  Description of Artificial Sequence: Synthetic oligonucleotide
  Target: LAMA2; (+) strand; PAM type: NRG; PAM sequence: TAG
aaaaattttctcccattttg

SEQ ID NO: 149451 - DNA, 20 bp, Artificial Sequence
  Description of Artificial Sequence: Synthetic oligonucleotide
  Target: LAMA2; (+) strand; PAM type: NRG; PAM sequence: AGG
aaaattttctcccattttgt

SEQ ID NO: 149452 - DNA, 20 bp, Artificial Sequence
  Description of Artificial Sequence: Synthetic oligonucleotide
  Target: LAMA2; (+) strand; PAM type: NRG; PAM sequence: TGG
aggttgcctgttcactctga

SEQ ID NO: 149453 - DNA, 20 bp, Artificial Sequence
  Description of Artificial Sequence: Synthetic oligonucleotide
  Target: LAMA2; (+) strand; PAM type: NRG; PAM sequence: TAG
ttgcctgttcactctgatgg

SEQ ID NO: 149454 - DNA, 20 bp, Artificial Sequence
  Description of Artificial Sequence: Synthetic oligonucleotide
  Target: LAMA2; (+) strand; PAM type: NRG; PAM sequence: CAG
tggtagtttcttttgctgtg

SEQ ID NO: 149455 - DNA, 20 bp, Artificial Sequence
  Description of Artificial Sequence: Synthetic oligonucleotide
  Target: LAMA2; (+) strand; PAM type: NRG; PAM sequence: AAG
tagtttcttttgctgtgcag

SEQ ID NO: 149456 - DNA, 20 bp, Artificial Sequence
  Description of Artificial Sequence: Synthetic oligonucleotide
  Target: LAMA2; (+) strand; PAM type: NRG; PAM sequence: TAG
tttgctgtgcagaagctctt

SEQ ID NO: 149457 - DNA, 20 bp, Artificial Sequence
  Description of Artificial Sequence: Synthetic oligonucleotide
  Target: LAMA2; (+) strand; PAM type: NRG; PAM sequence: TAG
cagaagctctttagtttaat

SEQ ID NO: 149458 - DNA, 20 bp, Artificial Sequence
  Description of Artificial Sequence: Synthetic oligonucleotide
  Target: LAMA2; (+) strand; PAM type: NRG; PAM sequence: TGG
tcttttgttgccattgcttt

SEQ ID NO: 149459 - DNA, 20 bp, Artificial Sequence
  Description of Artificial Sequence: Synthetic oligonucleotide
  Target: LAMA2; (+) strand; PAM type: NRG; PAM sequence: TAG
tgccattgcttttggtgttt

SEQ ID NO: 149460 - DNA, 20 bp, Artificial Sequence
  Description of Artificial Sequence: Synthetic oligonucleotide
  Target: LAMA2; (+) strand; PAM type: NRG; PAM sequence: AAG
cttttggtgttttagacatg

SEQ ID NO: 149461 - DNA, 20 bp, Artificial Sequence
  Description of Artificial Sequence: Synthetic oligonucleotide
  Target: LAMA2; (+) strand; PAM type: NRG; PAM sequence: TGG
gcccatgcctatgtcctgaa

SEQ ID NO: 149462 - DNA, 20 bp, Artificial Sequence
  Description of Artificial Sequence: Synthetic oligonucleotide
  Target: LAMA2; (+) strand; PAM type: NRG; PAM sequence: TAG
atgtcctgaatggtactgcc

SEQ ID NO: 149463 - DNA, 20 bp, Artificial Sequence
  Description of Artificial Sequence: Synthetic oligonucleotide
  Target: LAMA2; (+) strand; PAM type: NRG; PAM sequence: AGG
tgtcctgaatggtactgcct

SEQ ID NO: 149464 - DNA, 20 bp, Artificial Sequence
  Description of Artificial Sequence: Synthetic oligonucleotide
  Target: LAMA2; (+) strand; PAM type: NRG; PAM sequence: TAG
gtactgcctaggttttcttc

SEQ ID NO: 149465 - DNA, 20 bp, Artificial Sequence
  Description of Artificial Sequence: Synthetic oligonucleotide
  Target: LAMA2; (+) strand; PAM type: NRG; PAM sequence: AGG
tactgcctaggttttcttct

SEQ ID NO: 149466 - DNA, 20 bp, Artificial Sequence
  Description of Artificial Sequence: Synthetic oligonucleotide
  Target: LAMA2; (+) strand; PAM type: NRG; PAM sequence: GGG
actgcctaggttttcttcta

SEQ ID NO: 149467 - DNA, 20 bp, Artificial Sequence
  Description of Artificial Sequence: Synthetic oligonucleotide
  Target: LAMA2; (+) strand; PAM type: NRG; PAM sequence: TGG
gttttcttctagggttttta

SEQ ID NO: 149468 - DNA, 20 bp, Artificial Sequence
  Description of Artificial Sequence: Synthetic oligonucleotide
  Target: LAMA2; (+) strand; PAM type: NRG; PAM sequence: TAG
ttctagggtttttatggttt

SEQ ID NO: 149469 - DNA, 20 bp, Artificial Sequence
  Description of Artificial Sequence: Synthetic oligonucleotide
  Target: LAMA2; (+) strand; PAM type: NRG; PAM sequence: AGG
tctagggtttttatggtttt

SEQ ID NO: 149470 - DNA, 20 bp, Artificial Sequence
  Description of Artificial Sequence: Synthetic oligonucleotide
  Target: LAMA2; (+) strand; PAM type: NRG; PAM sequence: AAG
tggttttaggtctaacgttt

SEQ ID NO: 149471 - DNA, 20 bp, Artificial Sequence
  Description of Artificial Sequence: Synthetic oligonucleotide
  Target: LAMA2; (+) strand; PAM type: NRG; PAM sequence: AAG
tcttgaattgatttttgtat

SEQ ID NO: 149472 - DNA, 20 bp, Artificial Sequence
  Description of Artificial Sequence: Synthetic oligonucleotide
  Target: LAMA2; (+) strand; PAM type: NRG; PAM sequence: AGG
cttgaattgatttttgtata

SEQ ID NO: 149473 - DNA, 20 bp, Artificial Sequence
  Description of Artificial Sequence: Synthetic oligonucleotide
  Target: LAMA2; (+) strand; PAM type: NRG; PAM sequence: AAG
ttgatttttgtataaggtgt

SEQ ID NO: 149474 - DNA, 20 bp, Artificial Sequence
  Description of Artificial Sequence: Synthetic oligonucleotide
  Target: LAMA2; (+) strand; PAM type: NRG; PAM sequence: AGG
tgatttttgtataaggtgta

SEQ ID NO: 149475 - DNA, 20 bp, Artificial Sequence
  Description of Artificial Sequence: Synthetic oligonucleotide
  Target: LAMA2; (+) strand; PAM type: NRG; PAM sequence: AAG
tttttgtataaggtgtaagg

SEQ ID NO: 149476 - DNA, 20 bp, Artificial Sequence
  Description of Artificial Sequence: Synthetic oligonucleotide
  Target: LAMA2; (+) strand; PAM type: NRG; PAM sequence: AGG
ttttgtataaggtgtaagga

SEQ ID NO: 149477 - DNA, 20 bp, Artificial Sequence
  Description of Artificial Sequence: Synthetic oligonucleotide
  Target: LAMA2; (+) strand; PAM type: NRG; PAM sequence: GGG
tttgtataaggtgtaaggaa

SEQ ID NO: 149478 - DNA, 20 bp, Artificial Sequence
  Description of Artificial Sequence: Synthetic oligonucleotide
  Target: LAMA2; (+) strand; PAM type: NRG; PAM sequence: CAG
taaggtgtaaggaagggatc

SEQ ID NO: 149479 - DNA, 20 bp, Artificial Sequence
  Description of Artificial Sequence: Synthetic oligonucleotide
  Target: LAMA2; (+) strand; PAM type: NRG; PAM sequence: CAG
gtaaggaagggatccagttt

SEQ ID NO: 149480 - DNA, 20 bp, Artificial Sequence
  Description of Artificial Sequence: Synthetic oligonucleotide
  Target: LAMA2; (+) strand; PAM type: NRG; PAM sequence: TGG
cagtttcagctttctacata

SEQ ID NO: 149481 - DNA, 20 bp, Artificial Sequence
  Description of Artificial Sequence: Synthetic oligonucleotide
  Target: LAMA2; (+) strand; PAM type: NRG; PAM sequence: TAG
ttcagctttctacatatggc

SEQ ID NO: 149482 - DNA, 20 bp, Artificial Sequence
  Description of Artificial Sequence: Synthetic oligonucleotide
  Target: LAMA2; (+) strand; PAM type: NRG; PAM sequence: CAG
gctttctacatatggctagc

SEQ ID NO: 149483 - DNA, 20 bp, Artificial Sequence
  Description of Artificial Sequence: Synthetic oligonucleotide
  Target: LAMA2; (+) strand; PAM type: NRG; PAM sequence: CAG
atatggctagccagttctcc

SEQ ID NO: 149484 - DNA, 20 bp, Artificial Sequence
  Description of Artificial Sequence: Synthetic oligonucleotide
  Target: LAMA2; (+) strand; PAM type: NRG; PAM sequence: CAG
tcccagcaccatttattaaa

SEQ ID NO: 149485 - DNA, 20 bp, Artificial Sequence
  Description of Artificial Sequence: Synthetic oligonucleotide
  Target: LAMA2; (+) strand; PAM type: NRG; PAM sequence: AGG
cccagcaccatttattaaac

SEQ ID NO: 149486 - DNA, 20 bp, Artificial Sequence
  Description of Artificial Sequence: Synthetic oligonucleotide
  Target: LAMA2; (+) strand; PAM type: NRG; PAM sequence: GGG
ccagcaccatttattaaaca

SEQ ID NO: 149487 - DNA, 20 bp, Artificial Sequence
  Description of Artificial Sequence: Synthetic oligonucleotide
  Target: LAMA2; (+) strand; PAM type: NRG; PAM sequence: CAG
tccccattgcttgtttttct

SEQ ID NO: 149488 - DNA, 20 bp, Artificial Sequence
  Description of Artificial Sequence: Synthetic oligonucleotide
  Target: LAMA2; (+) strand; PAM type: NRG; PAM sequence: AGG
ccccattgcttgtttttctc

SEQ ID NO: 149489 - DNA, 20 bp, Artificial Sequence
  Description of Artificial Sequence: Synthetic oligonucleotide
  Target: LAMA2; (+) strand; PAM type: NRG; PAM sequence: AAG
tgtttttctcaggtttgtca

SEQ ID NO: 149490 - DNA, 20 bp, Artificial Sequence
  Description of Artificial Sequence: Synthetic oligonucleotide
  Target: LAMA2; (+) strand; PAM type: NRG; PAM sequence: CAG
ttctcaggtttgtcaaagat

SEQ ID NO: 149491 - DNA, 20 bp, Artificial Sequence
  Description of Artificial Sequence: Synthetic oligonucleotide
  Target: LAMA2; (+) strand; PAM type: NRG; PAM sequence: AGG
tctcaggtttgtcaaagatc

SEQ ID NO: 149492 - DNA, 20 bp, Artificial Sequence
  Description of Artificial Sequence: Synthetic oligonucleotide
  Target: LAMA2; (+) strand; PAM type: NRG; PAM sequence: TAG
caggtttgtcaaagatcagg

SEQ ID NO: 149493 - DNA, 20 bp, Artificial Sequence
  Description of Artificial Sequence: Synthetic oligonucleotide
  Target: LAMA2; (+) strand; PAM type: NRG; PAM sequence: CGG
atcaggtagttgtacatatg

SEQ ID NO: 149494 - DNA, 20 bp, Artificial Sequence
  Description of Artificial Sequence: Synthetic oligonucleotide
  Target: LAMA2; (+) strand; PAM type: NRG; PAM sequence: GAG
acatatgcggcgttatttct

SEQ ID NO: 149495 - DNA, 20 bp, Artificial Sequence
  Description of Artificial Sequence: Synthetic oligonucleotide
  Target: LAMA2; (+) strand; PAM type: NRG; PAM sequence: AGG
catatgcggcgttatttctg

SEQ ID NO: 149496 - DNA, 20 bp, Artificial Sequence
  Description of Artificial Sequence: Synthetic oligonucleotide
  Target: LAMA2; (+) strand; PAM type: NRG; PAM sequence: GGG
atatgcggcgttatttctga

SEQ ID NO: 149497 - DNA, 20 bp, Artificial Sequence
  Description of Artificial Sequence: Synthetic oligonucleotide
  Target: LAMA2; (+) strand; PAM type: NRG; PAM sequence: TGG
attgatctatatctctgttt

SEQ ID NO: 149498 - DNA, 20 bp, Artificial Sequence
  Description of Artificial Sequence: Synthetic oligonucleotide
  Target: LAMA2; (+) strand; PAM type: NRG; PAM sequence: CAG
ctatatctctgttttggtac

SEQ ID NO: 149499 - DNA, 20 bp, Artificial Sequence
  Description of Artificial Sequence: Synthetic oligonucleotide
  Target: LAMA2; (+) strand; PAM type: NRG; PAM sequence: TGG
gtaccagtaccatgctgttt

SEQ ID NO: 149500 - DNA, 20 bp, Artificial Sequence
  Description of Artificial Sequence: Synthetic oligonucleotide
  Target: LAMA2; (+) strand; PAM type: NRG; PAM sequence: TAG
ccatgctgttttggttactg

SEQ ID NO: 149501 - DNA, 20 bp, Artificial Sequence
  Description of Artificial Sequence: Synthetic oligonucleotide
  Target: LAMA2; (+) strand; PAM type: NRG; PAM sequence: TAG
ttttggttactgtagacttg

SEQ ID NO: 149502 - DNA, 20 bp, Artificial Sequence
  Description of Artificial Sequence: Synthetic oligonucleotide
  Target: LAMA2; (+) strand; PAM type: NRG; PAM sequence: TAG
gttactgtagacttgtagta

SEQ ID NO: 149503 - DNA, 20 bp, Artificial Sequence
  Description of Artificial Sequence: Synthetic oligonucleotide
  Target: LAMA2; (+) strand; PAM type: NRG; PAM sequence: AAG
tagacttgtagtatagtttg

SEQ ID NO: 149504 - DNA, 20 bp, Artificial Sequence
  Description of Artificial Sequence: Synthetic oligonucleotide
  Target: LAMA2; (+) strand; PAM type: NRG; PAM sequence: CAG
cttgtagtatagtttgaagt

SEQ ID NO: 149505 - DNA, 20 bp, Artificial Sequence
  Description of Artificial Sequence: Synthetic oligonucleotide
  Target: LAMA2; (+) strand; PAM type: NRG; PAM sequence: AGG
ttgtagtatagtttgaagtc

SEQ ID NO: 149506 - DNA, 20 bp, Artificial Sequence
  Description of Artificial Sequence: Synthetic oligonucleotide
  Target: LAMA2; (+) strand; PAM type: NRG; PAM sequence: TAG
tagtatagtttgaagtcagg

SEQ ID NO: 149507 - DNA, 20 bp, Artificial Sequence
  Description of Artificial Sequence: Synthetic oligonucleotide
  Target: LAMA2; (+) strand; PAM type: NRG; PAM sequence: CAG
gtcaggtagtgtgatgcctc

SEQ ID NO: 149508 - DNA, 20 bp, Artificial Sequence
  Description of Artificial Sequence: Synthetic oligonucleotide
  Target: LAMA2; (+) strand; PAM type: NRG; PAM sequence: TGG
tgcctccagctttgttcttt

SEQ ID NO: 149509 - DNA, 20 bp, Artificial Sequence
  Description of Artificial Sequence: Synthetic oligonucleotide
  Target: LAMA2; (+) strand; PAM type: NRG; PAM sequence: TAG
ccagctttgttcttttggct

SEQ ID NO: 149510 - DNA, 20 bp, Artificial Sequence
  Description of Artificial Sequence: Synthetic oligonucleotide
  Target: LAMA2; (+) strand; PAM type: NRG; PAM sequence: AGG
cagctttgttcttttggctt

SEQ ID NO: 149511 - DNA, 20 bp, Artificial Sequence
  Description of Artificial Sequence: Synthetic oligonucleotide
  Target: LAMA2; (+) strand; PAM type: NRG; PAM sequence: TGG
cttttggcttaggattgact

SEQ ID NO: 149512 - DNA, 20 bp, Artificial Sequence
  Description of Artificial Sequence: Synthetic oligonucleotide
  Target: LAMA2; (+) strand; PAM type: NRG; PAM sequence: CGG
ttaggattgacttggcgatg

SEQ ID NO: 149513 - DNA, 20 bp, Artificial Sequence
  Description of Artificial Sequence: Synthetic oligonucleotide
  Target: LAMA2; (+) strand; PAM type: NRG; PAM sequence: GGG
taggattgacttggcgatgc

SEQ ID NO: 149514 - DNA, 20 bp, Artificial Sequence
  Description of Artificial Sequence: Synthetic oligonucleotide
  Target: LAMA2; (+) strand; PAM type: NRG; PAM sequence: TGG
tggcgatgcgggctcttttt

SEQ ID NO: 149515 - DNA, 20 bp, Artificial Sequence
  Description of Artificial Sequence: Synthetic oligonucleotide
  Target: LAMA2; (+) strand; PAM type: NRG; PAM sequence: AAG
ttggttccatatgaacttta

SEQ ID NO: 149516 - DNA, 20 bp, Artificial Sequence
  Description of Artificial Sequence: Synthetic oligonucleotide
  Target: LAMA2; (+) strand; PAM type: NRG; PAM sequence: TAG
gttccatatgaactttaaag

SEQ ID NO: 149517 - DNA, 20 bp, Artificial Sequence
  Description of Artificial Sequence: Synthetic oligonucleotide
  Target: LAMA2; (+) strand; PAM type: NRG; PAM sequence: AAG
tagttttttccaattctgtg

SEQ ID NO: 149518 - DNA, 20 bp, Artificial Sequence
  Description of Artificial Sequence: Synthetic oligonucleotide
  Target: LAMA2; (+) strand; PAM type: NRG; PAM sequence: AAG
tttttccaattctgtgaaga

SEQ ID NO: 149519 - DNA, 20 bp, Artificial Sequence
  Description of Artificial Sequence: Synthetic oligonucleotide
  Target: LAMA2; (+) strand; PAM type: NRG; PAM sequence: AGG
ttttccaattctgtgaagaa

SEQ ID NO: 149520 - DNA, 20 bp, Artificial Sequence
  Description of Artificial Sequence: Synthetic oligonucleotide
  Target: LAMA2; (+) strand; PAM type: NRG; PAM sequence: TGG
aattctgtgaagaaaggcat

SEQ ID NO: 149521 - DNA, 20 bp, Artificial Sequence
  Description of Artificial Sequence: Synthetic oligonucleotide
  Target: LAMA2; (+) strand; PAM type: NRG; PAM sequence: TAG
tctgtgaagaaaggcattgg

SEQ ID NO: 149522 - DNA, 20 bp, Artificial Sequence
  Description of Artificial Sequence: Synthetic oligonucleotide
  Target: LAMA2; (+) strand; PAM type: NRG; PAM sequence: TGG
gaaaggcattggtagcttga

SEQ ID NO: 149523 - DNA, 20 bp, Artificial Sequence
  Description of Artificial Sequence: Synthetic oligonucleotide
  Target: LAMA2; (+) strand; PAM type: NRG; PAM sequence: GGG
aaaggcattggtagcttgat

SEQ ID NO: 149524 - DNA, 20 bp, Artificial Sequence
  Description of Artificial Sequence: Synthetic oligonucleotide
  Target: LAMA2; (+) strand; PAM type: NRG; PAM sequence: GGG
aaggcattggtagcttgatg

SEQ ID NO: 149525 - DNA, 20 bp, Artificial Sequence
  Description of Artificial Sequence: Synthetic oligonucleotide
  Target: LAMA2; (+) strand; PAM type: NRG; PAM sequence: TGG
cattggtagcttgatgggga

SEQ ID NO: 149526 - DNA, 20 bp, Artificial Sequence
  Description of Artificial Sequence: Synthetic oligonucleotide
  Target: LAMA2; (+) strand; PAM type: NRG; PAM sequence: TGG
attgaatctgtaaattacct

SEQ ID NO: 149527 - DNA, 20 bp, Artificial Sequence
  Description of Artificial Sequence: Synthetic oligonucleotide
  Target: LAMA2; (+) strand; PAM type: NRG; PAM sequence: GGG
ttgaatctgtaaattacctt

SEQ ID NO: 149528 - DNA, 20 bp, Artificial Sequence
  Description of Artificial Sequence: Synthetic oligonucleotide
  Target: LAMA2; (+) strand; PAM type: NRG; PAM sequence: CAG
aatctgtaaattaccttggg

SEQ ID NO: 149529 - DNA, 20 bp, Artificial Sequence
  Description of Artificial Sequence: Synthetic oligonucleotide
  Target: LAMA2; (+) strand; PAM type: NRG; PAM sequence: TGG
gtaaattaccttgggcagta

SEQ ID NO: 149530 - DNA, 20 bp, Artificial Sequence
  Description of Artificial Sequence: Synthetic oligonucleotide
  Target: LAMA2; (+) strand; PAM type: NRG; PAM sequence: GAG
tattgattcttcctacccat

SEQ ID NO: 149531 - DNA, 20 bp, Artificial Sequence
  Description of Artificial Sequence: Synthetic oligonucleotide
  Target: LAMA2; (+) strand; PAM type: NRG; PAM sequence: TGG
attcttcctacccatgagca

SEQ ID NO: 149532 - DNA, 20 bp, Artificial Sequence
  Description of Artificial Sequence: Synthetic oligonucleotide
  Target: LAMA2; (+) strand; PAM type: NRG; PAM sequence: GAG
gtatcctcttttatttcctt

SEQ ID NO: 149533 - DNA, 20 bp, Artificial Sequence
  Description of Artificial Sequence: Synthetic oligonucleotide
  Target: LAMA2; (+) strand; PAM type: NRG; PAM sequence: CAG
tcctcttttatttccttgag

SEQ ID NO: 149534 - DNA, 20 bp, Artificial Sequence
  Description of Artificial Sequence: Synthetic oligonucleotide
  Target: LAMA2; (+) strand; PAM type: NRG; PAM sequence: TGG
tcttttatttccttgagcag

SEQ ID NO: 149535 - DNA, 20 bp, Artificial Sequence
  Description of Artificial Sequence: Synthetic oligonucleotide
  Target: LAMA2; (+) strand; PAM type: NRG; PAM sequence: TAG
tttccttgagcagtggtttg

SEQ ID NO: 149536 - DNA, 20 bp, Artificial Sequence
  Description of Artificial Sequence: Synthetic oligonucleotide
  Target: LAMA2; (+) strand; PAM type: NRG; PAM sequence: AAG
gtggtttgtagttctccttg

SEQ ID NO: 149537 - DNA, 20 bp, Artificial Sequence
  Description of Artificial Sequence: Synthetic oligonucleotide
  Target: LAMA2; (+) strand; PAM type: NRG; PAM sequence: GAG
ggtttgtagttctccttgaa

SEQ ID NO: 149538 - DNA, 20 bp, Artificial Sequence
  Description of Artificial Sequence: Synthetic oligonucleotide
  Target: LAMA2; (+) strand; PAM type: NRG; PAM sequence: AGG
gtttgtagttctccttgaag

SEQ ID NO: 149539 - DNA, 20 bp, Artificial Sequence
  Description of Artificial Sequence: Synthetic oligonucleotide
  Target: LAMA2; (+) strand; PAM type: NRG; PAM sequence: AAG
aggtccttcacatcccttgt

SEQ ID NO: 149540 - DNA, 20 bp, Artificial Sequence
  Description of Artificial Sequence: Synthetic oligonucleotide
  Target: LAMA2; (+) strand; PAM type: NRG; PAM sequence: TGG
ccttcacatcccttgtaagt

SEQ ID NO: 149541 - DNA, 20 bp, Artificial Sequence
  Description of Artificial Sequence: Synthetic oligonucleotide
  Target: LAMA2; (+) strand; PAM type: NRG; PAM sequence: TAG
tcccttgtaagttggattcc

SEQ ID NO: 149542 - DNA, 20 bp, Artificial Sequence
  Description of Artificial Sequence: Synthetic oligonucleotide
  Target: LAMA2; (+) strand; PAM type: NRG; PAM sequence: AGG
cccttgtaagttggattcct

SEQ ID NO: 149543 - DNA, 20 bp, Artificial Sequence
  Description of Artificial Sequence: Synthetic oligonucleotide
  Target: LAMA2; (+) strand; PAM type: NRG; PAM sequence: AAG
taggtattttattctctttg

SEQ ID NO: 149544 - DNA, 20 bp, Artificial Sequence
  Description of Artificial Sequence: Synthetic oligonucleotide
  Target: LAMA2; (+) strand; PAM type: NRG; PAM sequence: TGG
ctctttgaagcaattgtgaa

SEQ ID NO: 149545 - DNA, 20 bp, Artificial Sequence
  Description of Artificial Sequence: Synthetic oligonucleotide
  Target: LAMA2; (+) strand; PAM type: NRG; PAM sequence: GGG
tctttgaagcaattgtgaat

SEQ ID NO: 149546 - DNA, 20 bp, Artificial Sequence
  Description of Artificial Sequence: Synthetic oligonucleotide
  Target: LAMA2; (+) strand; PAM type: NRG; PAM sequence: GAG
tttgaagcaattgtgaatgg

SEQ ID NO: 149547 - DNA, 20 bp, Artificial Sequence
  Description of Artificial Sequence: Synthetic oligonucleotide
  Target: LAMA2; (+) strand; PAM type: NRG; PAM sequence: TGG
atgggagttcactcatgatt

SEQ ID NO: 149548 - DNA, 20 bp, Artificial Sequence
  Description of Artificial Sequence: Synthetic oligonucleotide
  Target: LAMA2; (+) strand; PAM type: NRG; PAM sequence: AAG
tctgtttgttgttgttgtat

SEQ ID NO: 149549 - DNA, 20 bp, Artificial Sequence
  Description of Artificial Sequence: Synthetic oligonucleotide
  Target: LAMA2; (+) strand; PAM type: NRG; PAM sequence: GAG
gtacattgattttgtatcct

SEQ ID NO: 149550 - DNA, 20 bp, Artificial Sequence
  Description of Artificial Sequence: Synthetic oligonucleotide
  Target: LAMA2; (+) strand; PAM type: NRG; PAM sequence: AAG
tgtatcctgagactttgctg

SEQ ID NO: 149551 - DNA, 20 bp, Artificial Sequence
  Description of Artificial Sequence: Synthetic oligonucleotide
  Target: LAMA2; (+) strand; PAM type: NRG; PAM sequence: CAG
actttgctgaagttgcttat

SEQ ID NO: 149552 - DNA, 20 bp, Artificial Sequence
  Description of Artificial Sequence: Synthetic oligonucleotide
  Target: LAMA2; (+) strand; PAM type: NRG; PAM sequence: AAG
ctgaagttgcttatcagctt

SEQ ID NO: 149553 - DNA, 20 bp, Artificial Sequence
  Description of Artificial Sequence: Synthetic oligonucleotide
  Target: LAMA2; (+) strand; PAM type: NRG; PAM sequence: AGG
tgaagttgcttatcagctta

SEQ ID NO: 149554 - DNA, 20 bp, Artificial Sequence
  Description of Artificial Sequence: Synthetic oligonucleotide
  Target: LAMA2; (+) strand; PAM type: NRG; PAM sequence: GAG
aagttgcttatcagcttaag

SEQ ID NO: 149555 - DNA, 20 bp, Artificial Sequence
  Description of Artificial Sequence: Synthetic oligonucleotide
  Target: LAMA2; (+) strand; PAM type: NRG; PAM sequence: TGG
ttatcagcttaaggagattt

SEQ ID NO: 149556 - DNA, 20 bp, Artificial Sequence
  Description of Artificial Sequence: Synthetic oligonucleotide
  Target: LAMA2; (+) strand; PAM type: NRG; PAM sequence: GAG
gcttaaggagattttggact

SEQ ID NO: 149557 - DNA, 20 bp, Artificial Sequence
  Description of Artificial Sequence: Synthetic oligonucleotide
  Target: LAMA2; (+) strand; PAM type: NRG; PAM sequence: TGG
gagattttggactgagacaa

SEQ ID NO: 149558 - DNA, 20 bp, Artificial Sequence
  Description of Artificial Sequence: Synthetic oligonucleotide
  Target: LAMA2; (+) strand; PAM type: NRG; PAM sequence: GGG
agattttggactgagacaat

SEQ ID NO: 149559 - DNA, 20 bp, Artificial Sequence
  Description of Artificial Sequence: Synthetic oligonucleotide
  Target: LAMA2; (+) strand; PAM type: NRG; PAM sequence: GGG
gattttggactgagacaatg

SEQ ID NO: 149560 - DNA, 20 bp, Artificial Sequence
  Description of Artificial Sequence: Synthetic oligonucleotide
  Target: LAMA2; (+) strand; PAM type: NRG; PAM sequence: TAG
actgagacaatggggttttc

SEQ ID NO: 149561 - DNA, 20 bp, Artificial Sequence
  Description of Artificial Sequence: Synthetic oligonucleotide
  Target: LAMA2; (+) strand; PAM type: NRG; PAM sequence: CGG
acaatcatgtcgtctgcaaa

SEQ ID NO: 149562 - DNA, 20 bp, Artificial Sequence
  Description of Artificial Sequence: Synthetic oligonucleotide
  Target: LAMA2; (+) strand; PAM type: NRG; PAM sequence: GGG
caatcatgtcgtctgcaaac

SEQ ID NO: 149563 - DNA, 20 bp, Artificial Sequence
  Description of Artificial Sequence: Synthetic oligonucleotide
  Target: LAMA2; (+) strand; PAM type: NRG; PAM sequence: GGG
aatcatgtcgtctgcaaacg

SEQ ID NO: 149564 - DNA, 20 bp, Artificial Sequence
  Description of Artificial Sequence: Synthetic oligonucleotide
  Target: LAMA2; (+) strand; PAM type: NRG; PAM sequence: TGG
cttctcctgcctaattgccc

SEQ ID NO: 149565 - DNA, 20 bp, Artificial Sequence
  Description of Artificial Sequence: Synthetic oligonucleotide
  Target: LAMA2; (+) strand; PAM type: NRG; PAM sequence: CAG
tcctgcctaattgccctggc

SEQ ID NO: 149566 - DNA, 20 bp, Artificial Sequence
  Description of Artificial Sequence: Synthetic oligonucleotide
  Target: LAMA2; (+) strand; PAM type: NRG; PAM sequence: TAG
acttccaacactatgttgaa

SEQ ID NO: 149567 - DNA, 20 bp, Artificial Sequence
  Description of Artificial Sequence: Synthetic oligonucleotide
  Target: LAMA2; (+) strand; PAM type: NRG; PAM sequence: AGG
cttccaacactatgttgaat

SEQ ID NO: 149568 - DNA, 20 bp, Artificial Sequence
  Description of Artificial Sequence: Synthetic oligonucleotide
  Target: LAMA2; (+) strand; PAM type: NRG; PAM sequence: GAG
tccaacactatgttgaatag

SEQ ID NO: 149569 - DNA, 20 bp, Artificial Sequence
  Description of Artificial Sequence: Synthetic oligonucleotide
  Target: LAMA2; (+) strand; PAM type: NRG; PAM sequence: CGG
aacactatgttgaataggag

SEQ ID NO: 149570 - DNA, 20 bp, Artificial Sequence
  Description of Artificial Sequence: Synthetic oligonucleotide
  Target: LAMA2; (+) strand; PAM type: NRG; PAM sequence: GAG
ctatgttgaataggagcggt

SEQ ID NO: 149571 - DNA, 20 bp, Artificial Sequence
  Description of Artificial Sequence: Synthetic oligonucleotide
  Target: LAMA2; (+) strand; PAM type: NRG; PAM sequence: GAG
atgttgaataggagcggtga

SEQ ID NO: 149572 - DNA, 20 bp, Artificial Sequence
  Description of Artificial Sequence: Synthetic oligonucleotide
  Target: LAMA2; (+) strand; PAM type: NRG; PAM sequence: GAG
gttgaataggagcggtgaga

SEQ ID NO: 149573 - DNA, 20 bp, Artificial Sequence
  Description of Artificial Sequence: Synthetic oligonucleotide
  Target: LAMA2; (+) strand; PAM type: NRG; PAM sequence: AGG
ttgaataggagcggtgagag

SEQ ID NO: 149574 - DNA, 20 bp, Artificial Sequence
  Description of Artificial Sequence: Synthetic oligonucleotide
  Target: LAMA2; (+) strand; PAM type: NRG; PAM sequence: GGG
tgaataggagcggtgagaga

SEQ ID NO: 149575 - DNA, 20 bp, Artificial Sequence
  Description of Artificial Sequence: Synthetic oligonucleotide
  Target: LAMA2; (+) strand; PAM type: NRG; PAM sequence: CAG
agggcatccctgtcttgtgc

SEQ ID NO: 149576 - DNA, 20 bp, Artificial Sequence
  Description of Artificial Sequence: Synthetic oligonucleotide
  Target: LAMA2; (+) strand; PAM type: NRG; PAM sequence: AAG
ctgtcttgtgccagttttca

SEQ ID NO: 149577 - DNA, 20 bp, Artificial Sequence
  Description of Artificial Sequence: Synthetic oligonucleotide
  Target: LAMA2; (+) strand; PAM type: NRG; PAM sequence: AGG
tgtcttgtgccagttttcaa

SEQ ID NO: 149578 - DNA, 20 bp, Artificial Sequence
  Description of Artificial Sequence: Synthetic oligonucleotide
  Target: LAMA2; (+) strand; PAM type: NRG; PAM sequence: GGG
gtcttgtgccagttttcaaa

SEQ ID NO: 149579 - DNA, 20 bp, Artificial Sequence
  Description of Artificial Sequence: Synthetic oligonucleotide
  Target: LAMA2; (+) strand; PAM type: NRG; PAM sequence: CAG
gttttcaaagggaatgcttc

SEQ ID NO: 149580 - DNA, 20 bp, Artificial Sequence
  Description of Artificial Sequence: Synthetic oligonucleotide
  Target: LAMA2; (+) strand; PAM type: NRG; PAM sequence: TGG
ttgcccattctgtatgatac

SEQ ID NO: 149581 - DNA, 20 bp, Artificial Sequence
  Description of Artificial Sequence: Synthetic oligonucleotide
  Target: LAMA2; (+) strand; PAM type: NRG; PAM sequence: TGG
attctgtatgatactggctg

SEQ ID NO: 149582 - DNA, 20 bp, Artificial Sequence
  Description of Artificial Sequence: Synthetic oligonucleotide
  Target: LAMA2; (+) strand; PAM type: NRG; PAM sequence: GGG
ttctgtatgatactggctgt

SEQ ID NO: 149583 - DNA, 20 bp, Artificial Sequence
  Description of Artificial Sequence: Synthetic oligonucleotide
  Target: LAMA2; (+) strand; PAM type: NRG; PAM sequence: TAG
tactggctgtgggtttgtca

SEQ ID NO: 149584 - DNA, 20 bp, Artificial Sequence
  Description of Artificial Sequence: Synthetic oligonucleotide
  Target: LAMA2; (+) strand; PAM type: NRG; PAM sequence: TAG
ggctgtgggtttgtcataga

SEQ ID NO: 149585 - DNA, 20 bp, Artificial Sequence
  Description of Artificial Sequence: Synthetic oligonucleotide
  Target: LAMA2; (+) strand; PAM type: NRG; PAM sequence: GAG
ccatcaatacctaatttatt

SEQ ID NO: 149586 - DNA, 20 bp, Artificial Sequence
  Description of Artificial Sequence: Synthetic oligonucleotide
  Target: LAMA2; (+) strand; PAM type: NRG; PAM sequence: GAG
atcaatacctaatttattga

SEQ ID NO: 149587 - DNA, 20 bp, Artificial Sequence
  Description of Artificial Sequence: Synthetic oligonucleotide
  Target: LAMA2; (+) strand; PAM type: NRG; PAM sequence: TAG
cctaatttattgagagtttt

SEQ ID NO: 149588 - DNA, 20 bp, Artificial Sequence
  Description of Artificial Sequence: Synthetic oligonucleotide
  Target: LAMA2; (+) strand; PAM type: NRG; PAM sequence: AAG
tattgagagtttttagcatg

SEQ ID NO: 149589 - DNA, 20 bp, Artificial Sequence
  Description of Artificial Sequence: Synthetic oligonucleotide
  Target: LAMA2; (+) strand; PAM type: NRG; PAM sequence: AGG
attgagagtttttagcatga

SEQ ID NO: 149590 - DNA, 20 bp, Artificial Sequence
  Description of Artificial Sequence: Synthetic oligonucleotide
  Target: LAMA2; (+) strand; PAM type: NRG; PAM sequence: GGG
ttgagagtttttagcatgaa

SEQ ID NO: 149591 - DNA, 20 bp, Artificial Sequence
  Description of Artificial Sequence: Synthetic oligonucleotide
  Target: LAMA2; (+) strand; PAM type: NRG; PAM sequence: AAG
agggttgttgaattttgtca

SEQ ID NO: 149592 - DNA, 20 bp, Artificial Sequence
  Description of Artificial Sequence: Synthetic oligonucleotide
  Target: LAMA2; (+) strand; PAM type: NRG; PAM sequence: AGG
gggttgttgaattttgtcaa

SEQ ID NO: 149593 - DNA, 20 bp, Artificial Sequence
  Description of Artificial Sequence: Synthetic oligonucleotide
  Target: LAMA2; (+) strand; PAM type: NRG; PAM sequence: GAG
aggctttttctgcatctatt

SEQ ID NO: 149594 - DNA, 20 bp, Artificial Sequence
  Description of Artificial Sequence: Synthetic oligonucleotide
  Target: LAMA2; (+) strand; PAM type: NRG; PAM sequence: TGG
catctattgagataatcatg

SEQ ID NO: 149595 - DNA, 20 bp, Artificial Sequence
  Description of Artificial Sequence: Synthetic oligonucleotide
  Target: LAMA2; (+) strand; PAM type: NRG; PAM sequence: TGG
aatcatgtggtttttgtctt

SEQ ID NO: 149596 - DNA, 20 bp, Artificial Sequence
  Description of Artificial Sequence: Synthetic oligonucleotide
  Target: LAMA2; (+) strand; PAM type: NRG; PAM sequence: TGG
ctttggctctgtttatatgc

SEQ ID NO: 149597 - DNA, 20 bp, Artificial Sequence
  Description of Artificial Sequence: Synthetic oligonucleotide
  Target: LAMA2; (+) strand; PAM type: NRG; PAM sequence: CAG
ttgatttgtgtatattgaac

SEQ ID NO: 149598 - DNA, 20 bp, Artificial Sequence
  Description of Artificial Sequence: Synthetic oligonucleotide
  Target: LAMA2; (+) strand; PAM type: NRG; PAM sequence: CAG
attgaaccagccttgcatcc

SEQ ID NO: 149599 - DNA, 20 bp, Artificial Sequence
  Description of Artificial Sequence: Synthetic oligonucleotide
  Target: LAMA2; (+) strand; PAM type: NRG; PAM sequence: AGG
ttgaaccagccttgcatccc

SEQ ID NO: 149600 - DNA, 20 bp, Artificial Sequence
  Description of Artificial Sequence: Synthetic oligonucleotide
  Target: LAMA2; (+) strand; PAM type: NRG; PAM sequence: GGG
tgaaccagccttgcatccca

SEQ ID NO: 149601 - DNA, 20 bp, Artificial Sequence
  Description of Artificial Sequence: Synthetic oligonucleotide
  Target: LAMA2; (+) strand; PAM type: NRG; PAM sequence: AAG
agccttgcatcccagggatg

SEQ ID NO: 149602 - DNA, 20 bp, Artificial Sequence
  Description of Artificial Sequence: Synthetic oligonucleotide
  Target: LAMA2; (+) strand; PAM type: NRG; PAM sequence: TGG
ggatgaagcctacttgatca

SEQ ID NO: 149603 - DNA, 20 bp, Artificial Sequence
  Description of Artificial Sequence: Synthetic oligonucleotide
  Target: LAMA2; (+) strand; PAM type: NRG; PAM sequence: TGG
tgaagcctacttgatcatgg

SEQ ID NO: 149604 - DNA, 20 bp, Artificial Sequence
  Description of Artificial Sequence: Synthetic oligonucleotide
  Target: LAMA2; (+) strand; PAM type: NRG; PAM sequence: AAG
cctacttgatcatggtggat

SEQ ID NO: 149605 - DNA, 20 bp, Artificial Sequence
  Description of Artificial Sequence: Synthetic oligonucleotide
  Target: LAMA2; (+) strand; PAM type: NRG; PAM sequence: TGG
taagctttttgatgtgctgc

SEQ ID NO: 149606 - DNA, 20 bp, Artificial Sequence
  Description of Artificial Sequence: Synthetic oligonucleotide
  Target: LAMA2; (+) strand; PAM type: NRG; PAM sequence: CAG
tgctgctggattcgttttgc

SEQ ID NO: 149607 - DNA, 20 bp, Artificial Sequence
  Description of Artificial Sequence: Synthetic oligonucleotide
  Target: LAMA2; (+) strand; PAM type: NRG; PAM sequence: GAG
cgttttgccagtattttact

SEQ ID NO: 149608 - DNA, 20 bp, Artificial Sequence
  Description of Artificial Sequence: Synthetic oligonucleotide
  Target: LAMA2; (+) strand; PAM type: NRG; PAM sequence: AGG
gttttgccagtattttactg

SEQ ID NO: 149609 - DNA, 20 bp, Artificial Sequence
  Description of Artificial Sequence: Synthetic oligonucleotide
  Target: LAMA2; (+) strand; PAM type: NRG; PAM sequence: AAG
tttttgcatcaatgttcatc

SEQ ID NO: 149610 - DNA, 20 bp, Artificial Sequence
  Description of Artificial Sequence: Synthetic oligonucleotide
  Target: LAMA2; (+) strand; PAM type: NRG; PAM sequence: AGG
ttttgcatcaatgttcatca

SEQ ID NO: 149611 - DNA, 20 bp, Artificial Sequence
  Description of Artificial Sequence: Synthetic oligonucleotide
  Target: LAMA2; (+) strand; PAM type: NRG; PAM sequence: TGG
tcaatgttcatcaaggatat

SEQ ID NO: 149612 - DNA, 20 bp, Artificial Sequence
  Description of Artificial Sequence: Synthetic oligonucleotide
  Target: LAMA2; (+) strand; PAM type: NRG; PAM sequence: TGG
tggtctaaaattctcttttt

SEQ ID NO: 149613 - DNA, 20 bp, Artificial Sequence
  Description of Artificial Sequence: Synthetic oligonucleotide
  Target: LAMA2; (+) strand; PAM type: NRG; PAM sequence: TGG
tttttggttgtgtctctgcc

SEQ ID NO: 149614 - DNA, 20 bp, Artificial Sequence
  Description of Artificial Sequence: Synthetic oligonucleotide
  Target: LAMA2; (+) strand; PAM type: NRG; PAM sequence: TGG
gttgtgtctctgcctggctt

SEQ ID NO: 149615 - DNA, 20 bp, Artificial Sequence
  Description of Artificial Sequence: Synthetic oligonucleotide
  Target: LAMA2; (+) strand; PAM type: NRG; PAM sequence: CAG
tctctgcctggctttggtat

SEQ ID NO: 149616 - DNA, 20 bp, Artificial Sequence
  Description of Artificial Sequence: Synthetic oligonucleotide
  Target: LAMA2; (+) strand; PAM type: NRG; PAM sequence: TGG
ctttggtatcagaatgatgc

SEQ ID NO: 149617 - DNA, 20 bp, Artificial Sequence
  Description of Artificial Sequence: Synthetic oligonucleotide
  Target: LAMA2; (+) strand; PAM type: NRG; PAM sequence: GAG
tgatgctggcctcataaaat

SEQ ID NO: 149618 - DNA, 20 bp, Artificial Sequence
  Description of Artificial Sequence: Synthetic oligonucleotide
  Target: LAMA2; (+) strand; PAM type: NRG; PAM sequence: TAG
gctggcctcataaaatgagt

SEQ ID NO: 149619 - DNA, 20 bp, Artificial Sequence
  Description of Artificial Sequence: Synthetic oligonucleotide
  Target: LAMA2; (+) strand; PAM type: NRG; PAM sequence: AGG
ctggcctcataaaatgagtt

SEQ ID NO: 149620 - DNA, 20 bp, Artificial Sequence
  Description of Artificial Sequence: Synthetic oligonucleotide
  Target: LAMA2; (+) strand; PAM type: NRG; PAM sequence: GGG
tggcctcataaaatgagtta

SEQ ID NO: 149621 - DNA, 20 bp, Artificial Sequence
  Description of Artificial Sequence: Synthetic oligonucleotide
  Target: LAMA2; (+) strand; PAM type: NRG; PAM sequence: GAG
gcctcataaaatgagttagg

SEQ ID NO: 149622 - DNA, 20 bp, Artificial Sequence
  Description of Artificial Sequence: Synthetic oligonucleotide
  Target: LAMA2; (+) strand; PAM type: NRG; PAM sequence: AGG
cctcataaaatgagttaggg

SEQ ID NO: 149623 - DNA, 20 bp, Artificial Sequence
  Description of Artificial Sequence: Synthetic oligonucleotide
  Target: LAMA2; (+) strand; PAM type: NRG; PAM sequence: TGG
ttccctctttttctattgat

SEQ ID NO: 149624 - DNA, 20 bp, Artificial Sequence
  Description of Artificial Sequence: Synthetic oligonucleotide
  Target: LAMA2; (+) strand; PAM type: NRG; PAM sequence: TAG
tctttttctattgattggaa

SEQ ID NO: 149625 - DNA, 20 bp, Artificial Sequence
  Description of Artificial Sequence: Synthetic oligonucleotide
  Target: LAMA2; (+) strand; PAM type: NRG; PAM sequence: CAG
tctattgattggaatagttt

SEQ ID NO: 149626 - DNA, 20 bp, Artificial Sequence
  Description of Artificial Sequence: Synthetic oligonucleotide
  Target: LAMA2; (+) strand; PAM type: NRG; PAM sequence: AAG
attgattggaatagtttcag

SEQ ID NO: 149627 - DNA, 20 bp, Artificial Sequence
  Description of Artificial Sequence: Synthetic oligonucleotide
  Target: LAMA2; (+) strand; PAM type: NRG; PAM sequence: AGG
ttgattggaatagtttcaga

SEQ ID NO: 149628 - DNA, 20 bp, Artificial Sequence
  Description of Artificial Sequence: Synthetic oligonucleotide
  Target: LAMA2; (+) strand; PAM type: NRG; PAM sequence: TGG
tggaatagtttcagaaggaa

SEQ ID NO: 149629 - DNA, 20 bp, Artificial Sequence
  Description of Artificial Sequence: Synthetic oligonucleotide
  Target: LAMA2; (+) strand; PAM type: NRG; PAM sequence: CAG
agtttcagaaggaatggtac

SEQ ID NO: 149630 - DNA, 20 bp, Artificial Sequence
  Description of Artificial Sequence: Synthetic oligonucleotide
  Target: LAMA2; (+) strand; PAM type: NRG; PAM sequence: TGG
ccagttcctccttgtacctc

SEQ ID NO: 149631 - DNA, 20 bp, Artificial Sequence
  Description of Artificial Sequence: Synthetic oligonucleotide
  Target: LAMA2; (+) strand; PAM type: NRG; PAM sequence: TAG
gttcctccttgtacctctgg

SEQ ID NO: 149632 - DNA, 20 bp, Artificial Sequence
  Description of Artificial Sequence: Synthetic oligonucleotide
  Target: LAMA2; (+) strand; PAM type: NRG; PAM sequence: CGG
cttgtacctctggtagaatt

SEQ ID NO: 149633 - DNA, 20 bp, Artificial Sequence
  Description of Artificial Sequence: Synthetic oligonucleotide
  Target: LAMA2; (+) strand; PAM type: NRG; PAM sequence: TGG
aattcggctgtgaatccatc

SEQ ID NO: 149634 - DNA, 20 bp, Artificial Sequence
  Description of Artificial Sequence: Synthetic oligonucleotide
  Target: LAMA2; (+) strand; PAM type: NRG; PAM sequence: TGG
gctgtgaatccatctggtcc

SEQ ID NO: 149635 - DNA, 20 bp, Artificial Sequence
  Description of Artificial Sequence: Synthetic oligonucleotide
  Target: LAMA2; (+) strand; PAM type: NRG; PAM sequence: TGG
atctggtcctggactctttt

SEQ ID NO: 149636 - DNA, 20 bp, Artificial Sequence
  Description of Artificial Sequence: Synthetic oligonucleotide
  Target: LAMA2; (+) strand; PAM type: NRG; PAM sequence: TGG
ggtcctggactctttttggt

SEQ ID NO: 149637 - DNA, 20 bp, Artificial Sequence
  Description of Artificial Sequence: Synthetic oligonucleotide
  Target: LAMA2; (+) strand; PAM type: NRG; PAM sequence: AAG
ctggactctttttggttggt

SEQ ID NO: 149638 - DNA, 20 bp, Artificial Sequence
  Description of Artificial Sequence: Synthetic oligonucleotide
  Target: LAMA2; (+) strand; PAM type: NRG; PAM sequence: CAG
attgattattgccacaattt

SEQ ID NO: 149639 - DNA, 20 bp, Artificial Sequence
  Description of Artificial Sequence: Synthetic oligonucleotide
  Target: LAMA2; (+) strand; PAM type: NRG; PAM sequence: TGG
acaatttcagatcctgttat

SEQ ID NO: 149640 - DNA, 20 bp, Artificial Sequence
  Description of Artificial Sequence: Synthetic oligonucleotide
  Target: LAMA2; (+) strand; PAM type: NRG; PAM sequence: CAG
gatcctgttattggtctatt

SEQ ID NO: 149641 - DNA, 20 bp, Artificial Sequence
  Description of Artificial Sequence: Synthetic oligonucleotide
  Target: LAMA2; (+) strand; PAM type: NRG; PAM sequence: GAG
tcctgttattggtctattca

SEQ ID NO: 149642 - DNA, 20 bp, Artificial Sequence
  Description of Artificial Sequence: Synthetic oligonucleotide
  Target: LAMA2; (+) strand; PAM type: NRG; PAM sequence: TGG
tcagagattcaacttcttcc

SEQ ID NO: 149643 - DNA, 20 bp, Artificial Sequence
  Description of Artificial Sequence: Synthetic oligonucleotide
  Target: LAMA2; (+) strand; PAM type: NRG; PAM sequence: TAG
gattcaacttcttcctggtt

SEQ ID NO: 149644 - DNA, 20 bp, Artificial Sequence
  Description of Artificial Sequence: Synthetic oligonucleotide
  Target: LAMA2; (+) strand; PAM type: NRG; PAM sequence: TGG
acttcttcctggtttagtct

SEQ ID NO: 149645 - DNA, 20 bp, Artificial Sequence
  Description of Artificial Sequence: Synthetic oligonucleotide
  Target: LAMA2; (+) strand; PAM type: NRG; PAM sequence: GGG
cttcttcctggtttagtctt

SEQ ID NO: 149646 - DNA, 20 bp, Artificial Sequence
  Description of Artificial Sequence: Synthetic oligonucleotide
  Target: LAMA2; (+) strand; PAM type: NRG; PAM sequence: GAG
tcttcctggtttagtcttgg

SEQ ID NO: 149647 - DNA, 20 bp, Artificial Sequence
  Description of Artificial Sequence: Synthetic oligonucleotide
  Target: LAMA2; (+) strand; PAM type: NRG; PAM sequence: GAG
ttcctggtttagtcttggga

SEQ ID NO: 149648 - DNA, 20 bp, Artificial Sequence
  Description of Artificial Sequence: Synthetic oligonucleotide
  Target: LAMA2; (+) strand; PAM type: NRG; PAM sequence: GAG
cttgggagagtgtatgtgtc

SEQ ID NO: 149649 - DNA, 20 bp, Artificial Sequence
  Description of Artificial Sequence: Synthetic oligonucleotide
  Target: LAMA2; (+) strand; PAM type: NRG; PAM sequence: AGG
ttgggagagtgtatgtgtcg

SEQ ID NO: 149650 - DNA, 20 bp, Artificial Sequence
  Description of Artificial Sequence: Synthetic oligonucleotide
  Target: LAMA2; (+) strand; PAM type: NRG; PAM sequence: TAG
aggaatttatccatttcttc

SEQ ID NO: 149651 - DNA, 20 bp, Artificial Sequence
  Description of Artificial Sequence: Synthetic oligonucleotide
  Target: LAMA2; (+) strand; PAM type: NRG; PAM sequence: TAG
tccatttcttctagattttc

SEQ ID NO: 149652 - DNA, 20 bp, Artificial Sequence
  Description of Artificial Sequence: Synthetic oligonucleotide
  Target: LAMA2; (+) strand; PAM type: NRG; PAM sequence: TAG
gattttctagtttatttgca

SEQ ID NO: 149653 - DNA, 20 bp, Artificial Sequence
  Description of Artificial Sequence: Synthetic oligonucleotide
  Target: LAMA2; (+) strand; PAM type: NRG; PAM sequence: GAG
ttttctagtttatttgcata

SEQ ID NO: 149654 - DNA, 20 bp, Artificial Sequence
  Description of Artificial Sequence: Synthetic oligonucleotide
  Target: LAMA2; (+) strand; PAM type: NRG; PAM sequence: AGG
tttctagtttatttgcatag

SEQ ID NO: 149655 - DNA, 20 bp, Artificial Sequence
  Description of Artificial Sequence: Synthetic oligonucleotide
  Target: LAMA2; (+) strand; PAM type: NRG; PAM sequence: TAG
tatttgcatagaggtgtttg

SEQ ID NO: 149656 - DNA, 20 bp, Artificial Sequence
  Description of Artificial Sequence: Synthetic oligonucleotide
  Target: LAMA2; (+) strand; PAM type: NRG; PAM sequence: TAG
tttgtagtattctctgattt

SEQ ID NO: 149657 - DNA, 20 bp, Artificial Sequence
  Description of Artificial Sequence: Synthetic oligonucleotide
  Target: LAMA2; (+) strand; PAM type: NRG; PAM sequence: TGG
gattttagtttgtatttctg

SEQ ID NO: 149658 - DNA, 20 bp, Artificial Sequence
  Description of Artificial Sequence: Synthetic oligonucleotide
  Target: LAMA2; (+) strand; PAM type: NRG; PAM sequence: GGG
attttagtttgtatttctgt

SEQ ID NO: 149659 - DNA, 20 bp, Artificial Sequence
  Description of Artificial Sequence: Synthetic oligonucleotide
  Target: LAMA2; (+) strand; PAM type: NRG; PAM sequence: TGG
ttgtatttctgtgggatccg

SEQ ID NO: 149660 - DNA, 20 bp, Artificial Sequence
  Description of Artificial Sequence: Synthetic oligonucleotide
  Target: LAMA2; (+) strand; PAM type: NRG; PAM sequence: TAG
tcattttttattgcatctat

SEQ ID NO: 149661 - DNA, 20 bp, Artificial Sequence
  Description of Artificial Sequence: Synthetic oligonucleotide
  Target: LAMA2; (+) strand; PAM type: NRG; PAM sequence: TAG
ttctctctttttttctttat

SEQ ID NO: 149662 - DNA, 20 bp, Artificial Sequence
  Description of Artificial Sequence: Synthetic oligonucleotide
  Target: LAMA2; (+) strand; PAM type: NRG; PAM sequence: TAG
tttttctttattagtcttgc

SEQ ID NO: 149663 - DNA, 20 bp, Artificial Sequence
  Description of Artificial Sequence: Synthetic oligonucleotide
  Target: LAMA2; (+) strand; PAM type: NRG; PAM sequence: CGG
ttctttattagtcttgctag

SEQ ID NO: 149664 - DNA, 20 bp, Artificial Sequence
  Description of Artificial Sequence: Synthetic oligonucleotide
  Target: LAMA2; (+) strand; PAM type: NRG; PAM sequence: CAG
tgttgaccctttcaaaaaac

SEQ ID NO: 149665 - DNA, 20 bp, Artificial Sequence
  Description of Artificial Sequence: Synthetic oligonucleotide
  Target: LAMA2; (+) strand; PAM type: NRG; PAM sequence: TGG
cctttcaaaaaaccagctcc

SEQ ID NO: 149666 - DNA, 20 bp, Artificial Sequence
  Description of Artificial Sequence: Synthetic oligonucleotide
  Target: LAMA2; (+) strand; PAM type: NRG; PAM sequence: AAG
ctggattcattaattttttg

SEQ ID NO: 149667 - DNA, 20 bp, Artificial Sequence
  Description of Artificial Sequence: Synthetic oligonucleotide
  Target: LAMA2; (+) strand; PAM type: NRG; PAM sequence: AGG
tggattcattaattttttga

SEQ ID NO: 149668 - DNA, 20 bp, Artificial Sequence
  Description of Artificial Sequence: Synthetic oligonucleotide
  Target: LAMA2; (+) strand; PAM type: NRG; PAM sequence: GGG
ggattcattaattttttgaa

SEQ ID NO: 149669 - DNA, 20 bp, Artificial Sequence
  Description of Artificial Sequence: Synthetic oligonucleotide
  Target: LAMA2; (+) strand; PAM type: NRG; PAM sequence: CAG
ttttgtgtctctatttcctt

SEQ ID NO: 149670 - DNA, 20 bp, Artificial Sequence
  Description of Artificial Sequence: Synthetic oligonucleotide
  Target: LAMA2; (+) strand; PAM type: NRG; PAM sequence: TAG
cttcagttctgctctgattt

SEQ ID NO: 149671 - DNA, 20 bp, Artificial Sequence
  Description of Artificial Sequence: Synthetic oligonucleotide
  Target: LAMA2; (+) strand; PAM type: NRG; PAM sequence: TAG
agttatttcttgccttctgc

SEQ ID NO: 149672 - DNA, 20 bp, Artificial Sequence
  Description of Artificial Sequence: Synthetic oligonucleotide
  Target: LAMA2; (+) strand; PAM type: NRG; PAM sequence: TAG
tgtgtttgctcctgcttttc

SEQ ID NO: 149673 - DNA, 20 bp, Artificial Sequence
  Description of Artificial Sequence: Synthetic oligonucleotide
  Target: LAMA2; (+) strand; PAM type: NRG; PAM sequence: TAG
agttcttttaattgtgatgt

SEQ ID NO: 149674 - DNA, 20 bp, Artificial Sequence
  Description of Artificial Sequence: Synthetic oligonucleotide
  Target: LAMA2; (+) strand; PAM type: NRG; PAM sequence: AGG
gttcttttaattgtgatgtt

SEQ ID NO: 149675 - DNA, 20 bp, Artificial Sequence
  Description of Artificial Sequence: Synthetic oligonucleotide
  Target: LAMA2; (+) strand; PAM type: NRG; PAM sequence: GGG
ttcttttaattgtgatgtta

SEQ ID NO: 149676 - DNA, 20 bp, Artificial Sequence
  Description of Artificial Sequence: Synthetic oligonucleotide
  Target: LAMA2; (+) strand; PAM type: NRG; PAM sequence: TGG
tgatgttagggtgtcaattt

SEQ ID NO: 149677 - DNA, 20 bp, Artificial Sequence
  Description of Artificial Sequence: Synthetic oligonucleotide
  Target: LAMA2; (+) strand; PAM type: NRG; PAM sequence: TGG
atctttcctgctttctcttg

SEQ ID NO: 149678 - DNA, 20 bp, Artificial Sequence
  Description of Artificial Sequence: Synthetic oligonucleotide
  Target: LAMA2; (+) strand; PAM type: NRG; PAM sequence: GGG
tctttcctgctttctcttgt

SEQ ID NO: 149679 - DNA, 20 bp, Artificial Sequence
  Description of Artificial Sequence: Synthetic oligonucleotide
  Target: LAMA2; (+) strand; PAM type: NRG; PAM sequence: TAG
tgctttctcttgtgggcatt

SEQ ID NO: 149680 - DNA, 20 bp, Artificial Sequence
  Description of Artificial Sequence: Synthetic oligonucleotide
  Target: LAMA2; (+) strand; PAM type: NRG; PAM sequence: CAG
acactgctttgaatgcgtcc

SEQ ID NO: 149681 - DNA, 20 bp, Artificial Sequence
  Description of Artificial Sequence: Synthetic oligonucleotide
  Target: LAMA2; (+) strand; PAM type: NRG; PAM sequence: GAG
actgctttgaatgcgtccca

SEQ ID NO: 149682 - DNA, 20 bp, Artificial Sequence
  Description of Artificial Sequence: Synthetic oligonucleotide
  Target: LAMA2; (+) strand; PAM type: NRG; PAM sequence: TGG
tgaatgcgtcccagagattc

SEQ ID NO: 149683 - DNA, 20 bp, Artificial Sequence
  Description of Artificial Sequence: Synthetic oligonucleotide
  Target: LAMA2; (+) strand; PAM type: NRG; PAM sequence: TGG
atgttgtgtctttgttctca

SEQ ID NO: 149684 - DNA, 20 bp, Artificial Sequence
  Description of Artificial Sequence: Synthetic oligonucleotide
  Target: LAMA2; (+) strand; PAM type: NRG; PAM sequence: GGG
tgttgtgtctttgttctcat

SEQ ID NO: 149685 - DNA, 20 bp, Artificial Sequence
  Description of Artificial Sequence: Synthetic oligonucleotide
  Target: LAMA2; (+) strand; PAM type: NRG; PAM sequence: AAG
ctttgttctcatgggtttca

SEQ ID NO: 149686 - DNA, 20 bp, Artificial Sequence
  Description of Artificial Sequence: Synthetic oligonucleotide
  Target: LAMA2; (+) strand; PAM type: NRG; PAM sequence: CAG
ccttcatttcgttatgtacc

SEQ ID NO: 149687 - DNA, 20 bp, Artificial Sequence
  Description of Artificial Sequence: Synthetic oligonucleotide
  Target: LAMA2; (+) strand; PAM type: NRG; PAM sequence: TAG
tcatttcgttatgtacccag

SEQ ID NO: 149688 - DNA, 20 bp, Artificial Sequence
  Description of Artificial Sequence: Synthetic oligonucleotide
  Target: LAMA2; (+) strand; PAM type: NRG; PAM sequence: CAG
ttatgtacccagtagtcatt

SEQ ID NO: 149689 - DNA, 20 bp, Artificial Sequence
  Description of Artificial Sequence: Synthetic oligonucleotide
  Target: LAMA2; (+) strand; PAM type: NRG; PAM sequence: AGG
tatgtacccagtagtcattc

SEQ ID NO: 149690 - DNA, 20 bp, Artificial Sequence
  Description of Artificial Sequence: Synthetic oligonucleotide
  Target: LAMA2; (+) strand; PAM type: NRG; PAM sequence: GAG
tgtacccagtagtcattcag

SEQ ID NO: 149691 - DNA, 20 bp, Artificial Sequence
  Description of Artificial Sequence: Synthetic oligonucleotide
  Target: LAMA2; (+) strand; PAM type: NRG; PAM sequence: CAG
acccagtagtcattcaggag

SEQ ID NO: 149692 - DNA, 20 bp, Artificial Sequence
  Description of Artificial Sequence: Synthetic oligonucleotide
  Target: LAMA2; (+) strand; PAM type: NRG; PAM sequence: AGG
cccagtagtcattcaggagc

SEQ ID NO: 149693 - DNA, 20 bp, Artificial Sequence
  Description of Artificial Sequence: Synthetic oligonucleotide
  Target: LAMA2; (+) strand; PAM type: NRG; PAM sequence: CAG
tcattcaggagcaggttgtt

SEQ ID NO: 149694 - DNA, 20 bp, Artificial Sequence
  Description of Artificial Sequence: Synthetic oligonucleotide
  Target: LAMA2; (+) strand; PAM type: NRG; PAM sequence: TAG
caggttgttcagtttccatg

SEQ ID NO: 149695 - DNA, 20 bp, Artificial Sequence
  Description of Artificial Sequence: Synthetic oligonucleotide
  Target: LAMA2; (+) strand; PAM type: NRG; PAM sequence: GAG
tgttcagtttccatgtagtt

SEQ ID NO: 149696 - DNA, 20 bp, Artificial Sequence
  Description of Artificial Sequence: Synthetic oligonucleotide
  Target: LAMA2; (+) strand; PAM type: NRG; PAM sequence: CAG
tcagtttccatgtagttgag

SEQ ID NO: 149697 - DNA, 20 bp, Artificial Sequence
  Description of Artificial Sequence: Synthetic oligonucleotide
  Target: LAMA2; (+) strand; PAM type: NRG; PAM sequence: GAG
ccatgtagttgagcagtttt

SEQ ID NO: 149698 - DNA, 20 bp, Artificial Sequence
  Description of Artificial Sequence: Synthetic oligonucleotide
  Target: LAMA2; (+) strand; PAM type: NRG; PAM sequence: GAG
gtagttgagcagttttgagt

SEQ ID NO: 149699 - DNA, 20 bp, Artificial Sequence
  Description of Artificial Sequence: Synthetic oligonucleotide
  Target: LAMA2; (+) strand; PAM type: NRG; PAM sequence: GAG
tgagtgagattcttaatcct

SEQ ID NO: 149700 - DNA, 20 bp, Artificial Sequence
  Description of Artificial Sequence: Synthetic oligonucleotide
  Target: LAMA2; (+) strand; PAM type: NRG; PAM sequence: TAG
agattcttaatcctgagttc

SEQ ID NO: 149701 - DNA, 20 bp, Artificial Sequence
  Description of Artificial Sequence: Synthetic oligonucleotide
  Target: LAMA2; (+) strand; PAM type: NRG; PAM sequence: TGG
gttctagtttgattgcactg

SEQ ID NO: 149702 - DNA, 20 bp, Artificial Sequence
  Description of Artificial Sequence: Synthetic oligonucleotide
  Target: LAMA2; (+) strand; PAM type: NRG; PAM sequence: GAG
gtttgattgcactgtggtct

SEQ ID NO: 149703 - DNA, 20 bp, Artificial Sequence
  Description of Artificial Sequence: Synthetic oligonucleotide
  Target: LAMA2; (+) strand; PAM type: NRG; PAM sequence: GAG
ttgattgcactgtggtctga

SEQ ID NO: 149704 - DNA, 20 bp, Artificial Sequence
  Description of Artificial Sequence: Synthetic oligonucleotide
  Target: LAMA2; (+) strand; PAM type: NRG; PAM sequence: TAG
ttgcactgtggtctgagaga

SEQ ID NO: 149705 - DNA, 20 bp, Artificial Sequence
  Description of Artificial Sequence: Synthetic oligonucleotide
  Target: LAMA2; (+) strand; PAM type: NRG; PAM sequence: GAG
tctgttcttttacatttgct

SEQ ID NO: 149706 - DNA, 20 bp, Artificial Sequence
  Description of Artificial Sequence: Synthetic oligonucleotide
  Target: LAMA2; (+) strand; PAM type: NRG; PAM sequence: AGG
ctgttcttttacatttgctg

SEQ ID NO: 149707 - DNA, 20 bp, Artificial Sequence
  Description of Artificial Sequence: Synthetic oligonucleotide
  Target: LAMA2; (+) strand; PAM type: NRG; PAM sequence: GAG
gttcttttacatttgctgag

SEQ ID NO: 149708 - DNA, 20 bp, Artificial Sequence
  Description of Artificial Sequence: Synthetic oligonucleotide
  Target: LAMA2; (+) strand; PAM type: NRG; PAM sequence: GAG
tcttttacatttgctgagga

SEQ ID NO: 149709 - DNA, 20 bp, Artificial Sequence
  Description of Artificial Sequence: Synthetic oligonucleotide
  Target: LAMA2; (+) strand; PAM type: NRG; PAM sequence: AAG
ctgaggagagctttacttcc

SEQ ID NO: 149710 - DNA, 20 bp, Artificial Sequence
  Description of Artificial Sequence: Synthetic oligonucleotide
  Target: LAMA2; (+) strand; PAM type: NRG; PAM sequence: TGG
gagctttacttccaagtatg

SEQ ID NO: 149711 - DNA, 20 bp, Artificial Sequence
  Description of Artificial Sequence: Synthetic oligonucleotide
  Target: LAMA2; (+) strand; PAM type: NRG; PAM sequence: TGG
tccaagtatgtggtcaattt

SEQ ID NO: 149712 - DNA, 20 bp, Artificial Sequence
  Description of Artificial Sequence: Synthetic oligonucleotide
  Target: LAMA2; (+) strand; PAM type: NRG; PAM sequence: TAG
gtatgtggtcaattttggaa

SEQ ID NO: 149713 - DNA, 20 bp, Artificial Sequence
  Description of Artificial Sequence: Synthetic oligonucleotide
  Target: LAMA2; (+) strand; PAM type: NRG; PAM sequence: AGG
tatgtggtcaattttggaat

SEQ ID NO: 149714 - DNA, 20 bp, Artificial Sequence
  Description of Artificial Sequence: Synthetic oligonucleotide
  Target: LAMA2; (+) strand; PAM type: NRG; PAM sequence: TGG
ggtcaattttggaataggtg

SEQ ID NO: 149715 - DNA, 20 bp, Artificial Sequence
  Description of Artificial Sequence: Synthetic oligonucleotide
  Target: LAMA2; (+) strand; PAM type: NRG; PAM sequence: TGG
attttggaataggtgtggtg

SEQ ID NO: 149716 - DNA, 20 bp, Artificial Sequence
  Description of Artificial Sequence: Synthetic oligonucleotide
  Target: LAMA2; (+) strand; PAM type: NRG; PAM sequence: TGG
aaatgtatattctgttgatt

SEQ ID NO: 149717 - DNA, 20 bp, Artificial Sequence
  Description of Artificial Sequence: Synthetic oligonucleotide
  Target: LAMA2; (+) strand; PAM type: NRG; PAM sequence: GGG
aatgtatattctgttgattt

SEQ ID NO: 149718 - DNA, 20 bp, Artificial Sequence
  Description of Artificial Sequence: Synthetic oligonucleotide
  Target: LAMA2; (+) strand; PAM type: NRG; PAM sequence: GGG
atgtatattctgttgatttg

SEQ ID NO: 149719 - DNA, 20 bp, Artificial Sequence
  Description of Artificial Sequence: Synthetic oligonucleotide
  Target: LAMA2; (+) strand; PAM type: NRG; PAM sequence: TGG
tatattctgttgatttgggg

SEQ ID NO: 149720 - DNA, 20 bp, Artificial Sequence
  Description of Artificial Sequence: Synthetic oligonucleotide
  Target: LAMA2; (+) strand; PAM type: NRG; PAM sequence: GAG
tattctgttgatttggggtg

SEQ ID NO: 149721 - DNA, 20 bp, Artificial Sequence
  Description of Artificial Sequence: Synthetic oligonucleotide
  Target: LAMA2; (+) strand; PAM type: NRG; PAM sequence: GAG
ttctgttgatttggggtgga

SEQ ID NO: 149722 - DNA, 20 bp, Artificial Sequence
  Description of Artificial Sequence: Synthetic oligonucleotide
  Target: LAMA2; (+) strand; PAM type: NRG; PAM sequence: TAG
atttggggtggagagttctg

SEQ ID NO: 149723 - DNA, 20 bp, Artificial Sequence
  Description of Artificial Sequence: Synthetic oligonucleotide
  Target: LAMA2; (+) strand; PAM type: NRG; PAM sequence: TAG
agagttctgtagatgtttat

SEQ ID NO: 149724 - DNA, 20 bp, Artificial Sequence
  Description of Artificial Sequence: Synthetic oligonucleotide
  Target: LAMA2; (+) strand; PAM type: NRG; PAM sequence: AGG
gagttctgtagatgtttatt

SEQ ID NO: 149725 - DNA, 20 bp, Artificial Sequence
  Description of Artificial Sequence: Synthetic oligonucleotide
  Target: LAMA2; (+) strand; PAM type: NRG; PAM sequence: TGG
agatgtttattaggtccgct

SEQ ID NO: 149726 - DNA, 20 bp, Artificial Sequence
  Description of Artificial Sequence: Synthetic oligonucleotide
  Target: LAMA2; (+) strand; PAM type: NRG; PAM sequence: CAG
tttattaggtccgcttggtg

SEQ ID NO: 149727 - DNA, 20 bp, Artificial Sequence
  Description of Artificial Sequence: Synthetic oligonucleotide
  Target: LAMA2; (+) strand; PAM type: NRG; PAM sequence: GAG
tattaggtccgcttggtgca

SEQ ID NO: 149728 - DNA, 20 bp, Artificial Sequence
  Description of Artificial Sequence: Synthetic oligonucleotide
  Target: LAMA2; (+) strand; PAM type: NRG; PAM sequence: TGG
gcagagctgtgttcaattcc

SEQ ID NO: 149729 - DNA, 20 bp, Artificial Sequence
  Description of Artificial Sequence: Synthetic oligonucleotide
  Target: LAMA2; (+) strand; PAM type: NRG; PAM sequence: GGG
cagagctgtgttcaattcct

SEQ ID NO: 149730 - DNA, 20 bp, Artificial Sequence
  Description of Artificial Sequence: Synthetic oligonucleotide
  Target: LAMA2; (+) strand; PAM type: NRG; PAM sequence: CAG
gttgatctgtctaatgttga

SEQ ID NO: 149731 - DNA, 20 bp, Artificial Sequence
  Description of Artificial Sequence: Synthetic oligonucleotide
  Target: LAMA2; (+) strand; PAM type: NRG; PAM sequence: TGG
gatctgtctaatgttgacag

SEQ ID NO: 149732 - DNA, 20 bp, Artificial Sequence
  Description of Artificial Sequence: Synthetic oligonucleotide
  Target: LAMA2; (+) strand; PAM type: NRG; PAM sequence: GGG
atctgtctaatgttgacagt

SEQ ID NO: 149733 - DNA, 20 bp, Artificial Sequence
  Description of Artificial Sequence: Synthetic oligonucleotide
  Target: LAMA2; (+) strand; PAM type: NRG; PAM sequence: GGG
tctgtctaatgttgacagtg

SEQ ID NO: 149734 - DNA, 20 bp, Artificial Sequence
  Description of Artificial Sequence: Synthetic oligonucleotide
  Target: LAMA2; (+) strand; PAM type: NRG; PAM sequence: AAG
atgttgacagtggggtgtta

SEQ ID NO: 149735 - DNA, 20 bp, Artificial Sequence
  Description of Artificial Sequence: Synthetic oligonucleotide
  Target: LAMA2; (+) strand; PAM type: NRG; PAM sequence: TGG
agtctcccattattaatgtg

SEQ ID NO: 149736 - DNA, 20 bp, Artificial Sequence
  Description of Artificial Sequence: Synthetic oligonucleotide
  Target: LAMA2; (+) strand; PAM type: NRG; PAM sequence: GGG
gtctcccattattaatgtgt

SEQ ID NO: 149737 - DNA, 20 bp, Artificial Sequence
  Description of Artificial Sequence: Synthetic oligonucleotide
  Target: LAMA2; (+) strand; PAM type: NRG; PAM sequence: GAG
ctcccattattaatgtgtgg

SEQ ID NO: 149738 - DNA, 20 bp, Artificial Sequence
  Description of Artificial Sequence: Synthetic oligonucleotide
  Target: LAMA2; (+) strand; PAM type: NRG; PAM sequence: AAG
ttattaatgtgtgggagtct

SEQ ID NO: 149739 - DNA, 20 bp, Artificial Sequence
  Description of Artificial Sequence: Synthetic oligonucleotide
  Target: LAMA2; (+) strand; PAM type: NRG; PAM sequence: TAG
tgggagtctaagtctctttg

SEQ ID NO: 149740 - DNA, 20 bp, Artificial Sequence
  Description of Artificial Sequence: Synthetic oligonucleotide
  Target: LAMA2; (+) strand; PAM type: NRG; PAM sequence: AGG
gggagtctaagtctctttgt

SEQ ID NO: 149741 - DNA, 20 bp, Artificial Sequence
  Description of Artificial Sequence: Synthetic oligonucleotide
  Target: LAMA2; (+) strand; PAM type: NRG; PAM sequence: CAG
aagtctctttgtaggtcact

SEQ ID NO: 149742 - DNA, 20 bp, Artificial Sequence
  Description of Artificial Sequence: Synthetic oligonucleotide
  Target: LAMA2; (+) strand; PAM type: NRG; PAM sequence: AGG
agtctctttgtaggtcactc

SEQ ID NO: 149743 - DNA, 20 bp, Artificial Sequence
  Description of Artificial Sequence: Synthetic oligonucleotide
  Target: LAMA2; (+) strand; PAM type: NRG; PAM sequence: TGG
caggacttgctttatgaatc

SEQ ID NO: 149744 - DNA, 20 bp, Artificial Sequence
  Description of Artificial Sequence: Synthetic oligonucleotide
  Target: LAMA2; (+) strand; PAM type: NRG; PAM sequence: GGG
aggacttgctttatgaatct

SEQ ID NO: 149745 - DNA, 20 bp, Artificial Sequence
  Description of Artificial Sequence: Synthetic oligonucleotide
  Target: LAMA2; (+) strand; PAM type: NRG; PAM sequence: TGG
gaatctgggtgctcctgtat

SEQ ID NO: 149746 - DNA, 20 bp, Artificial Sequence
  Description of Artificial Sequence: Synthetic oligonucleotide
  Target: LAMA2; (+) strand; PAM type: NRG; PAM sequence: GGG
aatctgggtgctcctgtatt

SEQ ID NO: 149747 - DNA, 20 bp, Artificial Sequence
  Description of Artificial Sequence: Synthetic oligonucleotide
  Target: LAMA2; (+) strand; PAM type: NRG; PAM sequence: TAG
gtattgggtgcatatatatt

SEQ ID NO: 149748 - DNA, 20 bp, Artificial Sequence
  Description of Artificial Sequence: Synthetic oligonucleotide
  Target: LAMA2; (+) strand; PAM type: NRG; PAM sequence: AGG
tattgggtgcatatatattt

SEQ ID NO: 149749 - DNA, 20 bp, Artificial Sequence
  Description of Artificial Sequence: Synthetic oligonucleotide
  Target: LAMA2; (+) strand; PAM type: NRG; PAM sequence: TAG
gggtgcatatatatttagga

SEQ ID NO: 149750 - DNA, 20 bp, Artificial Sequence
  Description of Artificial Sequence: Synthetic oligonucleotide
  Target: LAMA2; (+) strand; PAM type: NRG; PAM sequence: TAG
gcatatatatttaggatagt

SEQ ID NO: 149751 - DNA, 20 bp, Artificial Sequence
  Description of Artificial Sequence: Synthetic oligonucleotide
  Target: LAMA2; (+) strand; PAM type: NRG; PAM sequence: TGG
atccctttaccattatgtaa

SEQ ID NO: 149752 - DNA, 20 bp, Artificial Sequence
  Description of Artificial Sequence: Synthetic oligonucleotide
  Target: LAMA2; (+) strand; PAM type: NRG; PAM sequence: TGG
ttgtctcttttgatgtttgt

SEQ ID NO: 149753 - DNA, 20 bp, Artificial Sequence
  Description of Artificial Sequence: Synthetic oligonucleotide
  Target: LAMA2; (+) strand; PAM type: NRG; PAM sequence: AAG
ttttgatgtttgttggttta

SEQ ID NO: 149754 - DNA, 20 bp, Artificial Sequence
  Description of Artificial Sequence: Synthetic oligonucleotide
  Target: LAMA2; (+) strand; PAM type: NRG; PAM sequence: CAG
tggtttaaagtctgttttat

SEQ ID NO: 149755 - DNA, 20 bp, Artificial Sequence
  Description of Artificial Sequence: Synthetic oligonucleotide
  Target: LAMA2; (+) strand; PAM type: NRG; PAM sequence: GAG
gtttaaagtctgttttatca

SEQ ID NO: 149756 - DNA, 20 bp, Artificial Sequence
  Description of Artificial Sequence: Synthetic oligonucleotide
  Target: LAMA2; (+) strand; PAM type: NRG; PAM sequence: TAG
aagtctgttttatcagagac

SEQ ID NO: 149757 - DNA, 20 bp, Artificial Sequence
  Description of Artificial Sequence: Synthetic oligonucleotide
  Target: LAMA2; (+) strand; PAM type: NRG; PAM sequence: AGG
agtctgttttatcagagact

SEQ ID NO: 149758 - DNA, 20 bp, Artificial Sequence
  Description of Artificial Sequence: Synthetic oligonucleotide
  Target: LAMA2; (+) strand; PAM type: NRG; PAM sequence: TGG
ttttttgttttccatttgct

SEQ ID NO: 149759 - DNA, 20 bp, Artificial Sequence
  Description of Artificial Sequence: Synthetic oligonucleotide
  Target: LAMA2; (+) strand; PAM type: NRG; PAM sequence: TAG
tttgttttccatttgcttgg

SEQ ID NO: 149760 - DNA, 20 bp, Artificial Sequence
  Description of Artificial Sequence: Synthetic oligonucleotide
  Target: LAMA2; (+) strand; PAM type: NRG; PAM sequence: GAG
ttcctccatccttttatttt

SEQ ID NO: 149761 - DNA, 20 bp, Artificial Sequence
  Description of Artificial Sequence: Synthetic oligonucleotide
  Target: LAMA2; (+) strand; PAM type: NRG; PAM sequence: GAG
ctatgtgtgtctctgcacat

SEQ ID NO: 149762 - DNA, 20 bp, Artificial Sequence
  Description of Artificial Sequence: Synthetic oligonucleotide
  Target: LAMA2; (+) strand; PAM type: NRG; PAM sequence: TGG
gtgtgtctctgcacatgaga

SEQ ID NO: 149763 - DNA, 20 bp, Artificial Sequence
  Description of Artificial Sequence: Synthetic oligonucleotide
  Target: LAMA2; (+) strand; PAM type: NRG; PAM sequence: GGG
tgtgtctctgcacatgagat

SEQ ID NO: 149764 - DNA, 20 bp, Artificial Sequence
  Description of Artificial Sequence: Synthetic oligonucleotide
  Target: LAMA2; (+) strand; PAM type: NRG; PAM sequence: CGG
tgagatgggtttcctgaata

SEQ ID NO: 149765 - DNA, 20 bp, Artificial Sequence
  Description of Artificial Sequence: Synthetic oligonucleotide
  Target: LAMA2; (+) strand; PAM type: NRG; PAM sequence: TGG
tcctgaatacggaacactga

SEQ ID NO: 149766 - DNA, 20 bp, Artificial Sequence
  Description of Artificial Sequence: Synthetic oligonucleotide
  Target: LAMA2; (+) strand; PAM type: NRG; PAM sequence: GGG
cctgaatacggaacactgat

SEQ ID NO: 149767 - DNA, 20 bp, Artificial Sequence
  Description of Artificial Sequence: Synthetic oligonucleotide
  Target: LAMA2; (+) strand; PAM type: NRG; PAM sequence: CAG
tgactctttatccaatttgc

SEQ ID NO: 149768 - DNA, 20 bp, Artificial Sequence
  Description of Artificial Sequence: Synthetic oligonucleotide
  Target: LAMA2; (+) strand; PAM type: NRG; PAM sequence: TGG
gccagtctgtgtcttttaat

SEQ ID NO: 149769 - DNA, 20 bp, Artificial Sequence
  Description of Artificial Sequence: Synthetic oligonucleotide
  Target: LAMA2; (+) strand; PAM type: NRG; PAM sequence: GAG
cagtctgtgtcttttaattg

SEQ ID NO: 149770 - DNA, 20 bp, Artificial Sequence
  Description of Artificial Sequence: Synthetic oligonucleotide
  Target: LAMA2; (+) strand; PAM type: NRG; PAM sequence: TAG
tgtcttttaattggagcatt

SEQ ID NO: 149771 - DNA, 20 bp, Artificial Sequence
  Description of Artificial Sequence: Synthetic oligonucleotide
  Target: LAMA2; (+) strand; PAM type: NRG; PAM sequence: AAG
atttagtccatttacattta

SEQ ID NO: 149772 - DNA, 20 bp, Artificial Sequence
  Description of Artificial Sequence: Synthetic oligonucleotide
  Target: LAMA2; (+) strand; PAM type: NRG; PAM sequence: TAG
tgatcctgtcatgatgatgt

SEQ ID NO: 149773 - DNA, 20 bp, Artificial Sequence
  Description of Artificial Sequence: Synthetic oligonucleotide
  Target: LAMA2; (+) strand; PAM type: NRG; PAM sequence: TGG
cctgtcatgatgatgttagc

SEQ ID NO: 149774 - DNA, 20 bp, Artificial Sequence
  Description of Artificial Sequence: Synthetic oligonucleotide
  Target: LAMA2; (+) strand; PAM type: NRG; PAM sequence: TAG
tagctggttattttgctcgt

SEQ ID NO: 149775 - DNA, 20 bp, Artificial Sequence
  Description of Artificial Sequence: Synthetic oligonucleotide
  Target: LAMA2; (+) strand; PAM type: NRG; PAM sequence: CAG
attttgctcgttagttgatg

SEQ ID NO: 149776 - DNA, 20 bp, Artificial Sequence
  Description of Artificial Sequence: Synthetic oligonucleotide
  Target: LAMA2; (+) strand; PAM type: NRG; PAM sequence: TAG
tagttgatgcagtttcttcc

SEQ ID NO: 149777 - DNA, 20 bp, Artificial Sequence
  Description of Artificial Sequence: Synthetic oligonucleotide
  Target: LAMA2; (+) strand; PAM type: NRG; PAM sequence: TGG
cagtttcttcctagcatcga

SEQ ID NO: 149778 - DNA, 20 bp, Artificial Sequence
  Description of Artificial Sequence: Synthetic oligonucleotide
  Target: LAMA2; (+) strand; PAM type: NRG; PAM sequence: TGG
catcgatggtctttacaatt

SEQ ID NO: 149779 - DNA, 20 bp, Artificial Sequence
  Description of Artificial Sequence: Synthetic oligonucleotide
  Target: LAMA2; (+) strand; PAM type: NRG; PAM sequence: CAG
tacaatttggcatgcttttg

SEQ ID NO: 149780 - DNA, 20 bp, Artificial Sequence
  Description of Artificial Sequence: Synthetic oligonucleotide
  Target: LAMA2; (+) strand; PAM type: NRG; PAM sequence: TGG
aatttggcatgcttttgcag

SEQ ID NO: 149781 - DNA, 20 bp, Artificial Sequence
  Description of Artificial Sequence: Synthetic oligonucleotide
  Target: LAMA2; (+) strand; PAM type: NRG; PAM sequence: TGG
tggcatgcttttgcagtggc

SEQ ID NO: 149782 - DNA, 20 bp, Artificial Sequence
  Description of Artificial Sequence: Synthetic oligonucleotide
  Target: LAMA2; (+) strand; PAM type: NRG; PAM sequence: TGG
gcttttgcagtggctggtac

SEQ ID NO: 149783 - DNA, 20 bp, Artificial Sequence
  Description of Artificial Sequence: Synthetic oligonucleotide
  Target: LAMA2; (+) strand; PAM type: NRG; PAM sequence: TAG
tggttgttcctttccatgtt

SEQ ID NO: 149784 - DNA, 20 bp, Artificial Sequence
  Description of Artificial Sequence: Synthetic oligonucleotide
  Target: LAMA2; (+) strand; PAM type: NRG; PAM sequence: CAG
tccatgtttagtgcttcctt

SEQ ID NO: 149785 - DNA, 20 bp, Artificial Sequence
  Description of Artificial Sequence: Synthetic oligonucleotide
  Target: LAMA2; (+) strand; PAM type: NRG; PAM sequence: AGG
ccatgtttagtgcttccttc

SEQ ID NO: 149786 - DNA, 20 bp, Artificial Sequence
  Description of Artificial Sequence: Synthetic oligonucleotide
  Target: LAMA2; (+) strand; PAM type: NRG; PAM sequence: GAG
atgtttagtgcttccttcag

SEQ ID NO: 149787 - DNA, 20 bp, Artificial Sequence
  Description of Artificial Sequence: Synthetic oligonucleotide
  Target: LAMA2; (+) strand; PAM type: NRG; PAM sequence: TAG
gcttccttcaggagctcttt

SEQ ID NO: 149788 - DNA, 20 bp, Artificial Sequence
  Description of Artificial Sequence: Synthetic oligonucleotide
  Target: LAMA2; (+) strand; PAM type: NRG; PAM sequence: AGG
cttccttcaggagctctttt

SEQ ID NO: 149789 - DNA, 20 bp, Artificial Sequence
  Description of Artificial Sequence: Synthetic oligonucleotide
  Target: LAMA2; (+) strand; PAM type: NRG; PAM sequence: GGG
ttccttcaggagctctttta

SEQ ID NO: 149790 - DNA, 20 bp, Artificial Sequence
  Description of Artificial Sequence: Synthetic oligonucleotide
  Target: LAMA2; (+) strand; PAM type: NRG; PAM sequence: CAG
cttcaggagctcttttaggg

SEQ ID NO: 149791 - DNA, 20 bp, Artificial Sequence
  Description of Artificial Sequence: Synthetic oligonucleotide
  Target: LAMA2; (+) strand; PAM type: NRG; PAM sequence: AGG
ttcaggagctcttttagggc

SEQ ID NO: 149792 - DNA, 20 bp, Artificial Sequence
  Description of Artificial Sequence: Synthetic oligonucleotide
  Target: LAMA2; (+) strand; PAM type: NRG; PAM sequence: TGG
gagctcttttagggcaggac

SEQ ID NO: 149793 - DNA, 20 bp, Artificial Sequence
  Description of Artificial Sequence: Synthetic oligonucleotide
  Target: LAMA2; (+) strand; PAM type: NRG; PAM sequence: TGG
ctcttttagggcaggactgg

SEQ ID NO: 149794 - DNA, 20 bp, Artificial Sequence
  Description of Artificial Sequence: Synthetic oligonucleotide
  Target: LAMA2; (+) strand; PAM type: NRG; PAM sequence: CAG
ctggtggtgacaaaatctct

SEQ ID NO: 149795 - DNA, 20 bp, Artificial Sequence
  Description of Artificial Sequence: Synthetic oligonucleotide
  Target: LAMA2; (+) strand; PAM type: NRG; PAM sequence: AAG
tcagcatttgcttgtctgta

SEQ ID NO: 149796 - DNA, 20 bp, Artificial Sequence
  Description of Artificial Sequence: Synthetic oligonucleotide
  Target: LAMA2; (+) strand; PAM type: NRG; PAM sequence: AAG
ttatttctccttcgcttatg

SEQ ID NO: 149797 - DNA, 20 bp, Artificial Sequence
  Description of Artificial Sequence: Synthetic oligonucleotide
  Target: LAMA2; (+) strand; PAM type: NRG; PAM sequence: TAG
tctccttcgcttatgaagct

SEQ ID NO: 149798 - DNA, 20 bp, Artificial Sequence
  Description of Artificial Sequence: Synthetic oligonucleotide
  Target: LAMA2; (+) strand; PAM type: NRG; PAM sequence: TGG
ttcgcttatgaagcttagtt

SEQ ID NO: 149799 - DNA, 20 bp, Artificial Sequence
  Description of Artificial Sequence: Synthetic oligonucleotide
  Target: LAMA2; (+) strand; PAM type: NRG; PAM sequence: TGG
cttatgaagcttagtttggc

SEQ ID NO: 149800 - DNA, 20 bp, Artificial Sequence
  Description of Artificial Sequence: Synthetic oligonucleotide
  Target: LAMA2; (+) strand; PAM type: NRG; PAM sequence: TGG
tttggctggatatgaaattc

SEQ ID NO: 149801 - DNA, 20 bp, Artificial Sequence
  Description of Artificial Sequence: Synthetic oligonucleotide
  Target: LAMA2; (+) strand; PAM type: NRG; PAM sequence: GGG
ttggctggatatgaaattct

SEQ ID NO: 149802 - DNA, 20 bp, Artificial Sequence
  Description of Artificial Sequence: Synthetic oligonucleotide
  Target: LAMA2; (+) strand; PAM type: NRG; PAM sequence: AAG
ggttgaaaattcttttcttt

SEQ ID NO: 149803 - DNA, 20 bp, Artificial Sequence
  Description of Artificial Sequence: Synthetic oligonucleotide
  Target: LAMA2; (+) strand; PAM type: NRG; PAM sequence: TGG
tctttaagaatgttgaatat

SEQ ID NO: 149804 - DNA, 20 bp, Artificial Sequence
  Description of Artificial Sequence: Synthetic oligonucleotide
  Target: LAMA2; (+) strand; PAM type: NRG; PAM sequence: CGG
tattggcccccactctcttc

SEQ ID NO: 149805 - DNA, 20 bp, Artificial Sequence
  Description of Artificial Sequence: Synthetic oligonucleotide
  Target: LAMA2; (+) strand; PAM type: NRG; PAM sequence: TAG
ccccactctcttccggcttg

SEQ ID NO: 149806 - DNA, 20 bp, Artificial Sequence
  Description of Artificial Sequence: Synthetic oligonucleotide
  Target: LAMA2; (+) strand; PAM type: NRG; PAM sequence: GAG
ccactctcttccggcttgta

SEQ ID NO: 149807 - DNA, 20 bp, Artificial Sequence
  Description of Artificial Sequence: Synthetic oligonucleotide
  Target: LAMA2; (+) strand; PAM type: NRG; PAM sequence: GAG
cggcttgtagagtttctgcc

SEQ ID NO: 149808 - DNA, 20 bp, Artificial Sequence
  Description of Artificial Sequence: Synthetic oligonucleotide
  Target: LAMA2; (+) strand; PAM type: NRG; PAM sequence: TAG
tctgccgagcgatctgctgt

SEQ ID NO: 149809 - DNA, 20 bp, Artificial Sequence
  Description of Artificial Sequence: Synthetic oligonucleotide
  Target: LAMA2; (+) strand; PAM type: NRG; PAM sequence: TGG
gcgatctgctgttagtctga

SEQ ID NO: 149810 - DNA, 20 bp, Artificial Sequence
  Description of Artificial Sequence: Synthetic oligonucleotide
  Target: LAMA2; (+) strand; PAM type: NRG; PAM sequence: GGG
cgatctgctgttagtctgat

SEQ ID NO: 149811 - DNA, 20 bp, Artificial Sequence
  Description of Artificial Sequence: Synthetic oligonucleotide
  Target: LAMA2; (+) strand; PAM type: NRG; PAM sequence: GAG
agtctgatgggcttcccttt

SEQ ID NO: 149812 - DNA, 20 bp, Artificial Sequence
  Description of Artificial Sequence: Synthetic oligonucleotide
  Target: LAMA2; (+) strand; PAM type: NRG; PAM sequence: AGG
gtctgatgggcttccctttg

SEQ ID NO: 149813 - DNA, 20 bp, Artificial Sequence
  Description of Artificial Sequence: Synthetic oligonucleotide
  Target: LAMA2; (+) strand; PAM type: NRG; PAM sequence: GGG
tctgatgggcttccctttga

SEQ ID NO: 149814 - DNA, 20 bp, Artificial Sequence
  Description of Artificial Sequence: Synthetic oligonucleotide
  Target: LAMA2; (+) strand; PAM type: NRG; PAM sequence: TGG
ggtaacccgacctttctctc

SEQ ID NO: 149815 - DNA, 20 bp, Artificial Sequence
  Description of Artificial Sequence: Synthetic oligonucleotide
  Target: LAMA2; (+) strand; PAM type: NRG; PAM sequence: CAG
taacattttttccttcattt

SEQ ID NO: 149816 - DNA, 20 bp, Artificial Sequence
  Description of Artificial Sequence: Synthetic oligonucleotide
  Target: LAMA2; (+) strand; PAM type: NRG; PAM sequence: TGG
tttttccttcatttcagctt

SEQ ID NO: 149817 - DNA, 20 bp, Artificial Sequence
  Description of Artificial Sequence: Synthetic oligonucleotide
  Target: LAMA2; (+) strand; PAM type: NRG; PAM sequence: TGG
aatctgacaattatgtgtct

SEQ ID NO: 149818 - DNA, 20 bp, Artificial Sequence
  Description of Artificial Sequence: Synthetic oligonucleotide
  Target: LAMA2; (+) strand; PAM type: NRG; PAM sequence: GAG
tctgacaattatgtgtcttg

SEQ ID NO: 149819 - DNA, 20 bp, Artificial Sequence
  Description of Artificial Sequence: Synthetic oligonucleotide
  Target: LAMA2; (+) strand; PAM type: NRG; PAM sequence: GAG
gtcttggagttgctcttctc

SEQ ID NO: 149820 - DNA, 20 bp, Artificial Sequence
  Description of Artificial Sequence: Synthetic oligonucleotide
  Target: LAMA2; (+) strand; PAM type: NRG; PAM sequence: AGG
tcttggagttgctcttctcg

SEQ ID NO: 149821 - DNA, 20 bp, Artificial Sequence
  Description of Artificial Sequence: Synthetic oligonucleotide
  Target: LAMA2; (+) strand; PAM type: NRG; PAM sequence: GAG
ttggagttgctcttctcgag

SEQ ID NO: 149822 - DNA, 20 bp, Artificial Sequence
  Description of Artificial Sequence: Synthetic oligonucleotide
  Target: LAMA2; (+) strand; PAM type: NRG; PAM sequence: TGG
cttctcgaggagtatctttg

SEQ ID NO: 149823 - DNA, 20 bp, Artificial Sequence
  Description of Artificial Sequence: Synthetic oligonucleotide
  Target: LAMA2; (+) strand; PAM type: NRG; PAM sequence: TGG
tatttcctgaatctgaacgt

SEQ ID NO: 149824 - DNA, 20 bp, Artificial Sequence
  Description of Artificial Sequence: Synthetic oligonucleotide
  Target: LAMA2; (+) strand; PAM type: NRG; PAM sequence: TAG
tgaacgttggcctgccttgc

SEQ ID NO: 149825 - DNA, 20 bp, Artificial Sequence
  Description of Artificial Sequence: Synthetic oligonucleotide
  Target: LAMA2; (+) strand; PAM type: NRG; PAM sequence: TGG
gttggcctgccttgctagat

SEQ ID NO: 149826 - DNA, 20 bp, Artificial Sequence
  Description of Artificial Sequence: Synthetic oligonucleotide
  Target: LAMA2; (+) strand; PAM type: NRG; PAM sequence: GGG
ttggcctgccttgctagatt

SEQ ID NO: 149827 - DNA, 20 bp, Artificial Sequence
  Description of Artificial Sequence: Synthetic oligonucleotide
  Target: LAMA2; (+) strand; PAM type: NRG; PAM sequence: GGG
tggcctgccttgctagattg

SEQ ID NO: 149828 - DNA, 20 bp, Artificial Sequence
  Description of Artificial Sequence: Synthetic oligonucleotide
  Target: LAMA2; (+) strand; PAM type: NRG; PAM sequence: AAG
cctgccttgctagattgggg

SEQ ID NO: 149829 - DNA, 20 bp, Artificial Sequence
  Description of Artificial Sequence: Synthetic oligonucleotide
  Target: LAMA2; (+) strand; PAM type: NRG; PAM sequence: TGG
ctagattggggaagttctcc

SEQ ID NO: 149830 - DNA, 20 bp, Artificial Sequence
  Description of Artificial Sequence: Synthetic oligonucleotide
  Target: LAMA2; (+) strand; PAM type: NRG; PAM sequence: CAG
ttctcctggataatatcctg

SEQ ID NO: 149831 - DNA, 20 bp, Artificial Sequence
  Description of Artificial Sequence: Synthetic oligonucleotide
  Target: LAMA2; (+) strand; PAM type: NRG; PAM sequence: GAG
ctcctggataatatcctgca

SEQ ID NO: 149832 - DNA, 20 bp, Artificial Sequence
  Description of Artificial Sequence: Synthetic oligonucleotide
  Target: LAMA2; (+) strand; PAM type: NRG; PAM sequence: TGG
ctgcagagtgttttccaact

SEQ ID NO: 149833 - DNA, 20 bp, Artificial Sequence
  Description of Artificial Sequence: Synthetic oligonucleotide
  Target: LAMA2; (+) strand; PAM type: NRG; PAM sequence: CAG
tccattctccccatcacttt

SEQ ID NO: 149834 - DNA, 20 bp, Artificial Sequence
  Description of Artificial Sequence: Synthetic oligonucleotide
  Target: LAMA2; (+) strand; PAM type: NRG; PAM sequence: AGG
ccattctccccatcactttc

SEQ ID NO: 149835 - DNA, 20 bp, Artificial Sequence
  Description of Artificial Sequence: Synthetic oligonucleotide
  Target: LAMA2; (+) strand; PAM type: NRG; PAM sequence: CAG
tcactttcaggtacaccaat

SEQ ID NO: 149836 - DNA, 20 bp, Artificial Sequence
  Description of Artificial Sequence: Synthetic oligonucleotide
  Target: LAMA2; (+) strand; PAM type: NRG; PAM sequence: TAG
tcaggtacaccaatcagacg

SEQ ID NO: 149837 - DNA, 20 bp, Artificial Sequence
  Description of Artificial Sequence: Synthetic oligonucleotide
  Target: LAMA2; (+) strand; PAM type: NRG; PAM sequence: TGG
acaccaatcagacgtagatt

SEQ ID NO: 149838 - DNA, 20 bp, Artificial Sequence
  Description of Artificial Sequence: Synthetic oligonucleotide
  Target: LAMA2; (+) strand; PAM type: NRG; PAM sequence: TAG
gtagatttggtcttttcaca

SEQ ID NO: 149839 - DNA, 20 bp, Artificial Sequence
  Description of Artificial Sequence: Synthetic oligonucleotide
  Target: LAMA2; (+) strand; PAM type: NRG; PAM sequence: TGG
tcacatagtcccatatttct

SEQ ID NO: 149840 - DNA, 20 bp, Artificial Sequence
  Description of Artificial Sequence: Synthetic oligonucleotide
  Target: LAMA2; (+) strand; PAM type: NRG; PAM sequence: GAG
acatagtcccatatttcttg

SEQ ID NO: 149841 - DNA, 20 bp, Artificial Sequence
  Description of Artificial Sequence: Synthetic oligonucleotide
  Target: LAMA2; (+) strand; PAM type: NRG; PAM sequence: AGG
catagtcccatatttcttgg

SEQ ID NO: 149842 - DNA, 20 bp, Artificial Sequence
  Description of Artificial Sequence: Synthetic oligonucleotide
  Target: LAMA2; (+) strand; PAM type: NRG; PAM sequence: CAG
attgctgataccctttcttc

SEQ ID NO: 149843 - DNA, 20 bp, Artificial Sequence
  Description of Artificial Sequence: Synthetic oligonucleotide
  Target: LAMA2; (+) strand; PAM type: NRG; PAM sequence: CGG
tttcttccagttgatcgcat

SEQ ID NO: 149844 - DNA, 20 bp, Artificial Sequence
  Description of Artificial Sequence: Synthetic oligonucleotide
  Target: LAMA2; (+) strand; PAM type: NRG; PAM sequence: GAG
agttgatcgcatcggctcct

SEQ ID NO: 149845 - DNA, 20 bp, Artificial Sequence
  Description of Artificial Sequence: Synthetic oligonucleotide
  Target: LAMA2; (+) strand; PAM type: NRG; PAM sequence: AGG
gttgatcgcatcggctcctg

SEQ ID NO: 149846 - DNA, 20 bp, Artificial Sequence
  Description of Artificial Sequence: Synthetic oligonucleotide
  Target: LAMA2; (+) strand; PAM type: NRG; PAM sequence: TAG
aggcttctgcattcttcacg

SEQ ID NO: 149847 - DNA, 20 bp, Artificial Sequence
  Description of Artificial Sequence: Synthetic oligonucleotide
  Target: LAMA2; (+) strand; PAM type: NRG; PAM sequence: GAG
gcattcttcacgtagttctc

SEQ ID NO: 149848 - DNA, 20 bp, Artificial Sequence
  Description of Artificial Sequence: Synthetic oligonucleotide
  Target: LAMA2; (+) strand; PAM type: NRG; PAM sequence: TGG
ttcacgtagttctcgagcct

SEQ ID NO: 149849 - DNA, 20 bp, Artificial Sequence
  Description of Artificial Sequence: Synthetic oligonucleotide
  Target: LAMA2; (+) strand; PAM type: NRG; PAM sequence: CAG
agttctcgagccttggtttt

SEQ ID NO: 149850 - DNA, 20 bp, Artificial Sequence
  Description of Artificial Sequence: Synthetic oligonucleotide
  Target: LAMA2; (+) strand; PAM type: NRG; PAM sequence: CAG
gccttggttttcagctccat

SEQ ID NO: 149851 - DNA, 20 bp, Artificial Sequence
  Description of Artificial Sequence: Synthetic oligonucleotide
  Target: LAMA2; (+) strand; PAM type: NRG; PAM sequence: AAG
tcagctccatcagctccttt

SEQ ID NO: 149852 - DNA, 20 bp, Artificial Sequence
  Description of Artificial Sequence: Synthetic oligonucleotide
  Target: LAMA2; (+) strand; PAM type: NRG; PAM sequence: TGG
ctttaagcacttctctgtat

SEQ ID NO: 149853 - DNA, 20 bp, Artificial Sequence
  Description of Artificial Sequence: Synthetic oligonucleotide
  Target: LAMA2; (+) strand; PAM type: NRG; PAM sequence: TAG
cttctctgtattggttattc

SEQ ID NO: 149854 - DNA, 20 bp, Artificial Sequence
  Description of Artificial Sequence: Synthetic oligonucleotide
  Target: LAMA2; (+) strand; PAM type: NRG; PAM sequence: AAG
attcttctacatttttttca

SEQ ID NO: 149855 - DNA, 20 bp, Artificial Sequence
  Description of Artificial Sequence: Synthetic oligonucleotide
  Target: LAMA2; (+) strand; PAM type: NRG; PAM sequence: TGG
gttttcaacttctttgcctt

SEQ ID NO: 149856 - DNA, 20 bp, Artificial Sequence
  Description of Artificial Sequence: Synthetic oligonucleotide
  Target: LAMA2; (+) strand; PAM type: NRG; PAM sequence: TAG
ttggtttgaatgtcctcccg

SEQ ID NO: 149857 - DNA, 20 bp, Artificial Sequence
  Description of Artificial Sequence: Synthetic oligonucleotide
  Target: LAMA2; (+) strand; PAM type: NRG; PAM sequence: CAG
ttgaatgtcctcccgtagct

SEQ ID NO: 149858 - DNA, 20 bp, Artificial Sequence
  Description of Artificial Sequence: Synthetic oligonucleotide
  Target: LAMA2; (+) strand; PAM type: NRG; PAM sequence: GAG
gaatgtcctcccgtagctca

SEQ ID NO: 149859 - DNA, 20 bp, Artificial Sequence
  Description of Artificial Sequence: Synthetic oligonucleotide
  Target: LAMA2; (+) strand; PAM type: NRG; PAM sequence: AAG
cagagtaatttgatcgtctg

SEQ ID NO: 149860 - DNA, 20 bp, Artificial Sequence
  Description of Artificial Sequence: Synthetic oligonucleotide
  Target: LAMA2; (+) strand; PAM type: NRG; PAM sequence: CAG
cgtctgaagccttcttctct

SEQ ID NO: 149861 - DNA, 20 bp, Artificial Sequence
  Description of Artificial Sequence: Synthetic oligonucleotide
  Target: LAMA2; (+) strand; PAM type: NRG; PAM sequence: AAG
cttcttctctcagctcgtca

SEQ ID NO: 149862 - DNA, 20 bp, Artificial Sequence
  Description of Artificial Sequence: Synthetic oligonucleotide
  Target: LAMA2; (+) strand; PAM type: NRG; PAM sequence: CAG
cgtcaaagtcgttctccatc

SEQ ID NO: 149863 - DNA, 20 bp, Artificial Sequence
  Description of Artificial Sequence: Synthetic oligonucleotide
  Target: LAMA2; (+) strand; PAM type: NRG; PAM sequence: TGG
atccagctttgttccgttgc

SEQ ID NO: 149864 - DNA, 20 bp, Artificial Sequence
  Description of Artificial Sequence: Synthetic oligonucleotide
  Target: LAMA2; (+) strand; PAM type: NRG; PAM sequence: GAG
agctttgttccgttgctggt

SEQ ID NO: 149865 - DNA, 20 bp, Artificial Sequence
  Description of Artificial Sequence: Synthetic oligonucleotide
  Target: LAMA2; (+) strand; PAM type: NRG; PAM sequence: AGG
gctttgttccgttgctggtg

SEQ ID NO: 149866 - DNA, 20 bp, Artificial Sequence
  Description of Artificial Sequence: Synthetic oligonucleotide
  Target: LAMA2; (+) strand; PAM type: NRG; PAM sequence: TGG
ggtgaggaactgcgttcctt

SEQ ID NO: 149867 - DNA, 20 bp, Artificial Sequence
  Description of Artificial Sequence: Synthetic oligonucleotide
  Target: LAMA2; (+) strand; PAM type: NRG; PAM sequence: GAG
tgaggaactgcgttcctttg

SEQ ID NO: 149868 - DNA, 20 bp, Artificial Sequence
  Description of Artificial Sequence: Synthetic oligonucleotide
  Target: LAMA2; (+) strand; PAM type: NRG; PAM sequence: AGG
gaggaactgcgttcctttgg

SEQ ID NO: 149869 - DNA, 20 bp, Artificial Sequence
  Description of Artificial Sequence: Synthetic oligonucleotide
  Target: LAMA2; (+) strand; PAM type: NRG; PAM sequence: GAG
ggaactgcgttcctttggag

SEQ ID NO: 149870 - DNA, 20 bp, Artificial Sequence
  Description of Artificial Sequence: Synthetic oligonucleotide
  Target: LAMA2; (+) strand; PAM type: NRG; PAM sequence: AGG
gaactgcgttcctttggagg

SEQ ID NO: 149871 - DNA, 20 bp, Artificial Sequence
  Description of Artificial Sequence: Synthetic oligonucleotide
  Target: LAMA2; (+) strand; PAM type: NRG; PAM sequence: GAG
actgcgttcctttggaggag

SEQ ID NO: 149872 - DNA, 20 bp, Artificial Sequence
  Description of Artificial Sequence: Synthetic oligonucleotide
  Target: LAMA2; (+) strand; PAM type: NRG; PAM sequence: GAG
tgcgttcctttggaggagga

SEQ ID NO: 149873 - DNA, 20 bp, Artificial Sequence
  Description of Artificial Sequence: Synthetic oligonucleotide
  Target: LAMA2; (+) strand; PAM type: NRG; PAM sequence: AGG
gcgttcctttggaggaggag

SEQ ID NO: 149874 - DNA, 20 bp, Artificial Sequence
  Description of Artificial Sequence: Synthetic oligonucleotide
  Target: LAMA2; (+) strand; PAM type: NRG; PAM sequence: TAG
aggagaggcactctgctttt

SEQ ID NO: 149875 - DNA, 20 bp, Artificial Sequence
  Description of Artificial Sequence: Synthetic oligonucleotide
  Target: LAMA2; (+) strand; PAM type: NRG; PAM sequence: GAG
gagaggcactctgcttttta

SEQ ID NO: 149876 - DNA, 20 bp, Artificial Sequence
  Description of Artificial Sequence: Synthetic oligonucleotide
  Target: LAMA2; (+) strand; PAM type: NRG; PAM sequence: CAG
actctgctttttagagtttc

SEQ ID NO: 149877 - DNA, 20 bp, Artificial Sequence
  Description of Artificial Sequence: Synthetic oligonucleotide
  Target: LAMA2; (+) strand; PAM type: NRG; PAM sequence: TGG
ctgttttttccccatctttg

SEQ ID NO: 149878 - DNA, 20 bp, Artificial Sequence
  Description of Artificial Sequence: Synthetic oligonucleotide
  Target: LAMA2; (+) strand; PAM type: NRG; PAM sequence: TGG
tttgtggttttatctacttt

SEQ ID NO: 149879 - DNA, 20 bp, Artificial Sequence
  Description of Artificial Sequence: Synthetic oligonucleotide
  Target: LAMA2; (+) strand; PAM type: NRG; PAM sequence: TGG
ctacttttggtctttgatga

SEQ ID NO: 149880 - DNA, 20 bp, Artificial Sequence
  Description of Artificial Sequence: Synthetic oligonucleotide
  Target: LAMA2; (+) strand; PAM type: NRG; PAM sequence: CAG
tctttgatgatggtgatgta

SEQ ID NO: 149881 - DNA, 20 bp, Artificial Sequence
  Description of Artificial Sequence: Synthetic oligonucleotide
  Target: LAMA2; (+) strand; PAM type: NRG; PAM sequence: TGG
tgatgatggtgatgtacaga

SEQ ID NO: 149882 - DNA, 20 bp, Artificial Sequence
  Description of Artificial Sequence: Synthetic oligonucleotide
  Target: LAMA2; (+) strand; PAM type: NRG; PAM sequence: GGG
gatgatggtgatgtacagat

SEQ ID NO: 149883 - DNA, 20 bp, Artificial Sequence
  Description of Artificial Sequence: Synthetic oligonucleotide
  Target: LAMA2; (+) strand; PAM type: NRG; PAM sequence: TGG
gtacagatgggtttttcgtg

SEQ ID NO: 149884 - DNA, 20 bp, Artificial Sequence
  Description of Artificial Sequence: Synthetic oligonucleotide
  Target: LAMA2; (+) strand; PAM type: NRG; PAM sequence: TAG
tggatgtcctttctgtttgt

SEQ ID NO: 149885 - DNA, 20 bp, Artificial Sequence
  Description of Artificial Sequence: Synthetic oligonucleotide
  Target: LAMA2; (+) strand; PAM type: NRG; PAM sequence: CAG
tttgttagttttccttctaa

SEQ ID NO: 149886 - DNA, 20 bp, Artificial Sequence
  Description of Artificial Sequence: Synthetic oligonucleotide
  Target: LAMA2; (+) strand; PAM type: NRG; PAM sequence: CAG
ttagttttccttctaacaga

SEQ ID NO: 149887 - DNA, 20 bp, Artificial Sequence
  Description of Artificial Sequence: Synthetic oligonucleotide
  Target: LAMA2; (+) strand; PAM type: NRG; PAM sequence: AGG
tagttttccttctaacagac

SEQ ID NO: 149888 - DNA, 20 bp, Artificial Sequence
  Description of Artificial Sequence: Synthetic oligonucleotide
  Target: LAMA2; (+) strand; PAM type: NRG; PAM sequence: CAG
cttctaacagacaggaacct

SEQ ID NO: 149889 - DNA, 20 bp, Artificial Sequence
  Description of Artificial Sequence: Synthetic oligonucleotide
  Target: LAMA2; (+) strand; PAM type: NRG; PAM sequence: CAG
acagacaggaacctcagctg

SEQ ID NO: 149890 - DNA, 20 bp, Artificial Sequence
  Description of Artificial Sequence: Synthetic oligonucleotide
  Target: LAMA2; (+) strand; PAM type: NRG; PAM sequence: AGG
cagacaggaacctcagctgc

SEQ ID NO: 149891 - DNA, 20 bp, Artificial Sequence
  Description of Artificial Sequence: Synthetic oligonucleotide
  Target: LAMA2; (+) strand; PAM type: NRG; PAM sequence: GAG
gttgcaataccctgccgtgt

SEQ ID NO: 149892 - DNA, 20 bp, Artificial Sequence
  Description of Artificial Sequence: Synthetic oligonucleotide
  Target: LAMA2; (+) strand; PAM type: NRG; PAM sequence: AGG
ttgcaataccctgccgtgtg

SEQ ID NO: 149893 - DNA, 20 bp, Artificial Sequence
  Description of Artificial Sequence: Synthetic oligonucleotide
  Target: LAMA2; (+) strand; PAM type: NRG; PAM sequence: CAG
taccctgccgtgtgaggtgt

SEQ ID NO: 149894 - DNA, 20 bp, Artificial Sequence
  Description of Artificial Sequence: Synthetic oligonucleotide
  Target: LAMA2; (+) strand; PAM type: NRG; PAM sequence: TGG
aggtgtcagtgtgcccctgc

SEQ ID NO: 149895 - DNA, 20 bp, Artificial Sequence
  Description of Artificial Sequence: Synthetic oligonucleotide
  Target: LAMA2; (+) strand; PAM type: NRG; PAM sequence: GGG
ggtgtcagtgtgcccctgct

SEQ ID NO: 149896 - DNA, 20 bp, Artificial Sequence
  Description of Artificial Sequence: Synthetic oligonucleotide
  Target: LAMA2; (+) strand; PAM type: NRG; PAM sequence: GGG
gtgtcagtgtgcccctgctg

SEQ ID NO: 149897 - DNA, 20 bp, Artificial Sequence
  Description of Artificial Sequence: Synthetic oligonucleotide
  Target: LAMA2; (+) strand; PAM type: NRG; PAM sequence: GGG
tgtcagtgtgcccctgctgg

SEQ ID NO: 149898 - DNA, 20 bp, Artificial Sequence
  Description of Artificial Sequence: Synthetic oligonucleotide
  Target: LAMA2; (+) strand; PAM type: NRG; PAM sequence: GGG
gtcagtgtgcccctgctggg

SEQ ID NO: 149899 - DNA, 20 bp, Artificial Sequence
  Description of Artificial Sequence: Synthetic oligonucleotide
  Target: LAMA2; (+) strand; PAM type: NRG; PAM sequence: CAG
ccctgctggggggtgcctcc

SEQ ID NO: 149900 - DNA, 20 bp, Artificial Sequence
  Description of Artificial Sequence: Synthetic oligonucleotide
  Target: LAMA2; (+) strand; PAM type: NRG; PAM sequence: CAG
tgcctcccagttacgctgct

SEQ ID NO: 149901 - DNA, 20 bp, Artificial Sequence
  Description of Artificial Sequence: Synthetic oligonucleotide
  Target: LAMA2; (+) strand; PAM type: NRG; PAM sequence: AGG
gcctcccagttacgctgctc

SEQ ID NO: 149902 - DNA, 20 bp, Artificial Sequence
  Description of Artificial Sequence: Synthetic oligonucleotide
  Target: LAMA2; (+) strand; PAM type: NRG; PAM sequence: GGG
cctcccagttacgctgctca

SEQ ID NO: 149903 - DNA, 20 bp, Artificial Sequence
  Description of Artificial Sequence: Synthetic oligonucleotide
  Target: LAMA2; (+) strand; PAM type: NRG; PAM sequence: GGG
ctcccagttacgctgctcag

SEQ ID NO: 149904 - DNA, 20 bp, Artificial Sequence
  Description of Artificial Sequence: Synthetic oligonucleotide
  Target: LAMA2; (+) strand; PAM type: NRG; PAM sequence: CAG
cagttacgctgctcaggggt

SEQ ID NO: 149905 - DNA, 20 bp, Artificial Sequence
  Description of Artificial Sequence: Synthetic oligonucleotide
  Target: LAMA2; (+) strand; PAM type: NRG; PAM sequence: AGG
agttacgctgctcaggggtc

SEQ ID NO: 149906 - DNA, 20 bp, Artificial Sequence
  Description of Artificial Sequence: Synthetic oligonucleotide
  Target: LAMA2; (+) strand; PAM type: NRG; PAM sequence: GGG
gttacgctgctcaggggtca

SEQ ID NO: 149907 - DNA, 20 bp, Artificial Sequence
  Description of Artificial Sequence: Synthetic oligonucleotide
  Target: LAMA2; (+) strand; PAM type: NRG; PAM sequence: GGG
ttacgctgctcaggggtcag

SEQ ID NO: 149908 - DNA, 20 bp, Artificial Sequence
  Description of Artificial Sequence: Synthetic oligonucleotide
  Target: LAMA2; (+) strand; PAM type: NRG; PAM sequence: CAG
gctgctcaggggtcaggggt

SEQ ID NO: 149909 - DNA, 20 bp, Artificial Sequence
  Description of Artificial Sequence: Synthetic oligonucleotide
  Target: LAMA2; (+) strand; PAM type: NRG; PAM sequence: AGG
ctgctcaggggtcaggggtc

SEQ ID NO: 149910 - DNA, 20 bp, Artificial Sequence
  Description of Artificial Sequence: Synthetic oligonucleotide
  Target: LAMA2; (+) strand; PAM type: NRG; PAM sequence: GGG
tgctcaggggtcaggggtca

SEQ ID NO: 149911 - DNA, 20 bp, Artificial Sequence
  Description of Artificial Sequence: Synthetic oligonucleotide
  Target: LAMA2; (+) strand; PAM type: NRG; PAM sequence: GAG
caggggtcagggacccactt

SEQ ID NO: 149912 - DNA, 20 bp, Artificial Sequence
  Description of Artificial Sequence: Synthetic oligonucleotide
  Target: LAMA2; (+) strand; PAM type: NRG; PAM sequence: AGG
aggggtcagggacccacttg

SEQ ID NO: 149913 - DNA, 20 bp, Artificial Sequence
  Description of Artificial Sequence: Synthetic oligonucleotide
  Target: LAMA2; (+) strand; PAM type: NRG; PAM sequence: GAG
gggtcagggacccacttgag

SEQ ID NO: 149914 - DNA, 20 bp, Artificial Sequence
  Description of Artificial Sequence: Synthetic oligonucleotide
  Target: LAMA2; (+) strand; PAM type: NRG; PAM sequence: AGG
ggtcagggacccacttgagg

SEQ ID NO: 149915 - DNA, 20 bp, Artificial Sequence
  Description of Artificial Sequence: Synthetic oligonucleotide
  Target: LAMA2; (+) strand; PAM type: NRG; PAM sequence: CAG
cagggacccacttgaggagg

SEQ ID NO: 149916 - DNA, 20 bp, Artificial Sequence
  Description of Artificial Sequence: Synthetic oligonucleotide
  Target: LAMA2; (+) strand; PAM type: NRG; PAM sequence: TAG
ggaggcagtctgcccgttct

SEQ ID NO: 149917 - DNA, 20 bp, Artificial Sequence
  Description of Artificial Sequence: Synthetic oligonucleotide
  Target: LAMA2; (+) strand; PAM type: NRG; PAM sequence: CAG
tctgcccgttcttagatctc

SEQ ID NO: 149918 - DNA, 20 bp, Artificial Sequence
  Description of Artificial Sequence: Synthetic oligonucleotide
  Target: LAMA2; (+) strand; PAM type: NRG; PAM sequence: TGG
ttagatctccagctgcgtgc

SEQ ID NO: 149919 - DNA, 20 bp, Artificial Sequence
  Description of Artificial Sequence: Synthetic oligonucleotide
  Target: LAMA2; (+) strand; PAM type: NRG; PAM sequence: GGG
tagatctccagctgcgtgct

SEQ ID NO: 149920 - DNA, 20 bp, Artificial Sequence
  Description of Artificial Sequence: Synthetic oligonucleotide
  Target: LAMA2; (+) strand; PAM type: NRG; PAM sequence: GAG
gatctccagctgcgtgctgg

SEQ ID NO: 149921 - DNA, 20 bp, Artificial Sequence
  Description of Artificial Sequence: Synthetic oligonucleotide
  Target: LAMA2; (+) strand; PAM type: NRG; PAM sequence: AAG
gagaaccactgctctcttca

SEQ ID NO: 149922 - DNA, 20 bp, Artificial Sequence
  Description of Artificial Sequence: Synthetic oligonucleotide
  Target: LAMA2; (+) strand; PAM type: NRG; PAM sequence: CAG
actgctctcttcaaagctgt

SEQ ID NO: 149923 - DNA, 20 bp, Artificial Sequence
  Description of Artificial Sequence: Synthetic oligonucleotide
  Target: LAMA2; (+) strand; PAM type: NRG; PAM sequence: GAG
tgctctcttcaaagctgtca

SEQ ID NO: 149924 - DNA, 20 bp, Artificial Sequence
  Description of Artificial Sequence: Synthetic oligonucleotide
  Target: LAMA2; (+) strand; PAM type: NRG; PAM sequence: AGG
gctctcttcaaagctgtcag

SEQ ID NO: 149925 - DNA, 20 bp, Artificial Sequence
  Description of Artificial Sequence: Synthetic oligonucleotide
  Target: LAMA2; (+) strand; PAM type: NRG; PAM sequence: GGG
ctctcttcaaagctgtcaga

SEQ ID NO: 149926 - DNA, 20 bp, Artificial Sequence
  Description of Artificial Sequence: Synthetic oligonucleotide
  Target: LAMA2; (+) strand; PAM type: NRG; PAM sequence: AAG
aagctgtcagagggacattt

SEQ ID NO: 149927 - DNA, 20 bp, Artificial Sequence
  Description of Artificial Sequence: Synthetic oligonucleotide
  Target: LAMA2; (+) strand; PAM type: NRG; PAM sequence: CAG
cagagggacatttaagtctg

SEQ ID NO: 149928 - DNA, 20 bp, Artificial Sequence
  Description of Artificial Sequence: Synthetic oligonucleotide
  Target: LAMA2; (+) strand; PAM type: NRG; PAM sequence: GAG
gagggacatttaagtctgca

SEQ ID NO: 149929 - DNA, 20 bp, Artificial Sequence
  Description of Artificial Sequence: Synthetic oligonucleotide
  Target: LAMA2; (+) strand; PAM type: NRG; PAM sequence: AGG
agggacatttaagtctgcag

SEQ ID NO: 149930 - DNA, 20 bp, Artificial Sequence
  Description of Artificial Sequence: Synthetic oligonucleotide
  Target: LAMA2; (+) strand; PAM type: NRG; PAM sequence: CAG
gtttgtctgtgccctgcccc

SEQ ID NO: 149931 - DNA, 20 bp, Artificial Sequence
  Description of Artificial Sequence: Synthetic oligonucleotide
  Target: LAMA2; (+) strand; PAM type: NRG; PAM sequence: GAG
ttgtctgtgccctgccccca

SEQ ID NO: 149932 - DNA, 20 bp, Artificial Sequence
  Description of Artificial Sequence: Synthetic oligonucleotide
  Target: LAMA2; (+) strand; PAM type: NRG; PAM sequence: AGG
tgtctgtgccctgcccccag

SEQ ID NO: 149933 - DNA, 20 bp, Artificial Sequence
  Description of Artificial Sequence: Synthetic oligonucleotide
  Target: LAMA2; (+) strand; PAM type: NRG; PAM sequence: TGG
ctgtgccctgcccccagagg

SEQ ID NO: 149934 - DNA, 20 bp, Artificial Sequence
  Description of Artificial Sequence: Synthetic oligonucleotide
  Target: LAMA2; (+) strand; PAM type: NRG; PAM sequence: GAG
gtgccctgcccccagaggtg

SEQ ID NO: 149935 - DNA, 20 bp, Artificial Sequence
  Description of Artificial Sequence: Synthetic oligonucleotide
  Target: LAMA2; (+) strand; PAM type: NRG; PAM sequence: CAG
gcccccagaggtggagccta

SEQ ID NO: 149936 - DNA, 20 bp, Artificial Sequence
  Description of Artificial Sequence: Synthetic oligonucleotide
  Target: LAMA2; (+) strand; PAM type: NRG; PAM sequence: GAG
ccccagaggtggagcctaca

SEQ ID NO: 149937 - DNA, 20 bp, Artificial Sequence
  Description of Artificial Sequence: Synthetic oligonucleotide
  Target: LAMA2; (+) strand; PAM type: NRG; PAM sequence: AGG
cccagaggtggagcctacag

SEQ ID NO: 149938 - DNA, 20 bp, Artificial Sequence
  Description of Artificial Sequence: Synthetic oligonucleotide
  Target: LAMA2; (+) strand; PAM type: NRG; PAM sequence: CAG
agaggtggagcctacagagg

SEQ ID NO: 149939 - DNA, 20 bp, Artificial Sequence
  Description of Artificial Sequence: Synthetic oligonucleotide
  Target: LAMA2; (+) strand; PAM type: NRG; PAM sequence: AGG
gaggtggagcctacagaggc

SEQ ID NO: 149940 - DNA, 20 bp, Artificial Sequence
  Description of Artificial Sequence: Synthetic oligonucleotide
  Target: LAMA2; (+) strand; PAM type: NRG; PAM sequence: CAG
gtggagcctacagaggcagg

SEQ ID NO: 149941 - DNA, 20 bp, Artificial Sequence
  Description of Artificial Sequence: Synthetic oligonucleotide
  Target: LAMA2; (+) strand; PAM type: NRG; PAM sequence: AGG
tggagcctacagaggcaggc

SEQ ID NO: 149942 - DNA, 20 bp, Artificial Sequence
  Description of Artificial Sequence: Synthetic oligonucleotide
  Target: LAMA2; (+) strand; PAM type: NRG; PAM sequence: GAG
agaggcaggcaggcctcctt

SEQ ID NO: 149943 - DNA, 20 bp, Artificial Sequence
  Description of Artificial Sequence: Synthetic oligonucleotide
  Target: LAMA2; (+) strand; PAM type: NRG; PAM sequence: TGG
aggcaggcctccttgagctg

SEQ ID NO: 149944 - DNA, 20 bp, Artificial Sequence
  Description of Artificial Sequence: Synthetic oligonucleotide
  Target: LAMA2; (+) strand; PAM type: NRG; PAM sequence: TGG
caggcctccttgagctgtgg

SEQ ID NO: 149945 - DNA, 20 bp, Artificial Sequence
  Description of Artificial Sequence: Synthetic oligonucleotide
  Target: LAMA2; (+) strand; PAM type: NRG; PAM sequence: GGG
aggcctccttgagctgtggt

SEQ ID NO: 149946 - DNA, 20 bp, Artificial Sequence
  Description of Artificial Sequence: Synthetic oligonucleotide
  Target: LAMA2; (+) strand; PAM type: NRG; PAM sequence: CAG
gagctgtggtgggctccacc

SEQ ID NO: 149947 - DNA, 20 bp, Artificial Sequence
  Description of Artificial Sequence: Synthetic oligonucleotide
  Target: LAMA2; (+) strand; PAM type: NRG; PAM sequence: TGG
tgtggtgggctccacccagt

SEQ ID NO: 149948 - DNA, 20 bp, Artificial Sequence
  Description of Artificial Sequence: Synthetic oligonucleotide
  Target: LAMA2; (+) strand; PAM type: NRG; PAM sequence: GAG
tggtgggctccacccagttg

SEQ ID NO: 149949 - DNA, 20 bp, Artificial Sequence
  Description of Artificial Sequence: Synthetic oligonucleotide
  Target: LAMA2; (+) strand; PAM type: NRG; PAM sequence: CAG
tccacccagttggagcttcc

SEQ ID NO: 149950 - DNA, 20 bp, Artificial Sequence
  Description of Artificial Sequence: Synthetic oligonucleotide
  Target: LAMA2; (+) strand; PAM type: NRG; PAM sequence: AAG
gctgctttgtttacctaatc

SEQ ID NO: 149951 - DNA, 20 bp, Artificial Sequence
  Description of Artificial Sequence: Synthetic oligonucleotide
  Target: LAMA2; (+) strand; PAM type: NRG; PAM sequence: TGG
tttgtttacctaatcaagcc

SEQ ID NO: 149952 - DNA, 20 bp, Artificial Sequence
  Description of Artificial Sequence: Synthetic oligonucleotide
  Target: LAMA2; (+) strand; PAM type: NRG; PAM sequence: GGG
ttgtttacctaatcaagcct

SEQ ID NO: 149953 - DNA, 20 bp, Artificial Sequence
  Description of Artificial Sequence: Synthetic oligonucleotide
  Target: LAMA2; (+) strand; PAM type: NRG; PAM sequence: TGG
acctaatcaagcctgggcaa

SEQ ID NO: 149954 - DNA, 20 bp, Artificial Sequence
  Description of Artificial Sequence: Synthetic oligonucleotide
  Target: LAMA2; (+) strand; PAM type: NRG; PAM sequence: CGG
taatcaagcctgggcaatgg

SEQ ID NO: 149955 - DNA, 20 bp, Artificial Sequence
  Description of Artificial Sequence: Synthetic oligonucleotide
  Target: LAMA2; (+) strand; PAM type: NRG; PAM sequence: CAG
caatggcggcgcccctcccc

SEQ ID NO: 149956 - DNA, 20 bp, Artificial Sequence
  Description of Artificial Sequence: Synthetic oligonucleotide
  Target: LAMA2; (+) strand; PAM type: NRG; PAM sequence: CAG
ccagcctcgctgctgccttg

SEQ ID NO: 149957 - DNA, 20 bp, Artificial Sequence
  Description of Artificial Sequence: Synthetic oligonucleotide
  Target: LAMA2; (+) strand; PAM type: NRG; PAM sequence: CAG
gctgccttgcagtttgatct

SEQ ID NO: 149958 - DNA, 20 bp, Artificial Sequence
  Description of Artificial Sequence: Synthetic oligonucleotide
  Target: LAMA2; (+) strand; PAM type: NRG; PAM sequence: TAG
ttgatctcagactgctgtgc

SEQ ID NO: 149959 - DNA, 20 bp, Artificial Sequence
  Description of Artificial Sequence: Synthetic oligonucleotide
  Target: LAMA2; (+) strand; PAM type: NRG; PAM sequence: CAG
cagactgctgtgctagcaat

SEQ ID NO: 149960 - DNA, 20 bp, Artificial Sequence
  Description of Artificial Sequence: Synthetic oligonucleotide
  Target: LAMA2; (+) strand; PAM type: NRG; PAM sequence: GAG
ctgctgtgctagcaatcagc

SEQ ID NO: 149961 - DNA, 20 bp, Artificial Sequence
  Description of Artificial Sequence: Synthetic oligonucleotide
  Target: LAMA2; (+) strand; PAM type: NRG; PAM sequence: TGG
tagcaatcagcgagactcca

SEQ ID NO: 149962 - DNA, 20 bp, Artificial Sequence
  Description of Artificial Sequence: Synthetic oligonucleotide
  Target: LAMA2; (+) strand; PAM type: NRG; PAM sequence: GGG
agcaatcagcgagactccat

SEQ ID NO: 149963 - DNA, 20 bp, Artificial Sequence
  Description of Artificial Sequence: Synthetic oligonucleotide
  Target: LAMA2; (+) strand; PAM type: NRG; PAM sequence: TAG
tcagcgagactccatgggcg

SEQ ID NO: 149964 - DNA, 20 bp, Artificial Sequence
  Description of Artificial Sequence: Synthetic oligonucleotide
  Target: LAMA2; (+) strand; PAM type: NRG; PAM sequence: AGG
cagcgagactccatgggcgt

SEQ ID NO: 149965 - DNA, 20 bp, Artificial Sequence
  Description of Artificial Sequence: Synthetic oligonucleotide
  Target: LAMA2; (+) strand; PAM type: NRG; PAM sequence: AAG
ccatgggcgtaggaccctcc

SEQ ID NO: 149966 - DNA, 20 bp, Artificial Sequence
  Description of Artificial Sequence: Synthetic oligonucleotide
  Target: LAMA2; (+) strand; PAM type: NRG; PAM sequence: CAG
gggcgtaggaccctccaagc

SEQ ID NO: 149967 - DNA, 20 bp, Artificial Sequence
  Description of Artificial Sequence: Synthetic oligonucleotide
  Target: LAMA2; (+) strand; PAM type: NRG; PAM sequence: AGG
ggcgtaggaccctccaagcc

SEQ ID NO: 149968 - DNA, 20 bp, Artificial Sequence
  Description of Artificial Sequence: Synthetic oligonucleotide
  Target: LAMA2; (+) strand; PAM type: NRG; PAM sequence: CAG
aggaccctccaagccaggtg

SEQ ID NO: 149969 - DNA, 20 bp, Artificial Sequence
  Description of Artificial Sequence: Synthetic oligonucleotide
  Target: LAMA2; (+) strand; PAM type: NRG; PAM sequence: AGG
ggaccctccaagccaggtgc

SEQ ID NO: 149970 - DNA, 20 bp, Artificial Sequence
  Description of Artificial Sequence: Synthetic oligonucleotide
  Target: LAMA2; (+) strand; PAM type: NRG; PAM sequence: TGG
aggtgcaggatataatctca

SEQ ID NO: 149971 - DNA, 20 bp, Artificial Sequence
  Description of Artificial Sequence: Synthetic oligonucleotide
  Target: LAMA2; (+) strand; PAM type: NRG; PAM sequence: AAG
ctcatggttcaccgtttttt

SEQ ID NO: 149972 - DNA, 20 bp, Artificial Sequence
  Description of Artificial Sequence: Synthetic oligonucleotide
  Target: LAMA2; (+) strand; PAM type: NRG; PAM sequence: CGG
tcaccgttttttaagcccgt

SEQ ID NO: 149973 - DNA, 20 bp, Artificial Sequence
  Description of Artificial Sequence: Synthetic oligonucleotide
  Target: LAMA2; (+) strand; PAM type: NRG; PAM sequence: AAG
gttttttaagcccgtcggaa

SEQ ID NO: 149974 - DNA, 20 bp, Artificial Sequence
  Description of Artificial Sequence: Synthetic oligonucleotide
  Target: LAMA2; (+) strand; PAM type: NRG; PAM sequence: CAG
ttaagcccgtcggaaaagcg

SEQ ID NO: 149975 - DNA, 20 bp, Artificial Sequence
  Description of Artificial Sequence: Synthetic oligonucleotide
  Target: LAMA2; (+) strand; PAM type: NRG; PAM sequence: CGG
gtcggaaaagcgcagtattc

SEQ ID NO: 149976 - DNA, 20 bp, Artificial Sequence
  Description of Artificial Sequence: Synthetic oligonucleotide
  Target: LAMA2; (+) strand; PAM type: NRG; PAM sequence: TGG
ggaaaagcgcagtattccgg

SEQ ID NO: 149977 - DNA, 20 bp, Artificial Sequence
  Description of Artificial Sequence: Synthetic oligonucleotide
  Target: LAMA2; (+) strand; PAM type: NRG; PAM sequence: GGG
gaaaagcgcagtattccggt

SEQ ID NO: 149978 - DNA, 20 bp, Artificial Sequence
  Description of Artificial Sequence: Synthetic oligonucleotide
  Target: LAMA2; (+) strand; PAM type: NRG; PAM sequence: GAG
aaagcgcagtattccggtgg

SEQ ID NO: 149979 - DNA, 20 bp, Artificial Sequence
  Description of Artificial Sequence: Synthetic oligonucleotide
  Target: LAMA2; (+) strand; PAM type: NRG; PAM sequence: CAG
gtgggagtgacccgattttc

SEQ ID NO: 149980 - DNA, 20 bp, Artificial Sequence
  Description of Artificial Sequence: Synthetic oligonucleotide
  Target: LAMA2; (+) strand; PAM type: NRG; PAM sequence: AGG
tgggagtgacccgattttcc

SEQ ID NO: 149981 - DNA, 20 bp, Artificial Sequence
  Description of Artificial Sequence: Synthetic oligonucleotide
  Target: LAMA2; (+) strand; PAM type: NRG; PAM sequence: CGG
cgtcacccctttctgtgact

SEQ ID NO: 149982 - DNA, 20 bp, Artificial Sequence
  Description of Artificial Sequence: Synthetic oligonucleotide
  Target: LAMA2; (+) strand; PAM type: NRG; PAM sequence: AAG
acccctttctgtgactcgga

SEQ ID NO: 149983 - DNA, 20 bp, Artificial Sequence
  Description of Artificial Sequence: Synthetic oligonucleotide
  Target: LAMA2; (+) strand; PAM type: NRG; PAM sequence: AGG
cccctttctgtgactcggaa

SEQ ID NO: 149984 - DNA, 20 bp, Artificial Sequence
  Description of Artificial Sequence: Synthetic oligonucleotide
  Target: LAMA2; (+) strand; PAM type: NRG; PAM sequence: GGG
ccctttctgtgactcggaaa

SEQ ID NO: 149985 - DNA, 20 bp, Artificial Sequence
  Description of Artificial Sequence: Synthetic oligonucleotide
  Target: LAMA2; (+) strand; PAM type: NRG; PAM sequence: AAG
cctgaccccttgcgcttccc

SEQ ID NO: 149986 - DNA, 20 bp, Artificial Sequence
  Description of Artificial Sequence: Synthetic oligonucleotide
  Target: LAMA2; (+) strand; PAM type: NRG; PAM sequence: GAG
accccttgcgcttcccaagt

SEQ ID NO: 149987 - DNA, 20 bp, Artificial Sequence
  Description of Artificial Sequence: Synthetic oligonucleotide
  Target: LAMA2; (+) strand; PAM type: NRG; PAM sequence: AGG
ccccttgcgcttcccaagtg

SEQ ID NO: 149988 - DNA, 20 bp, Artificial Sequence
  Description of Artificial Sequence: Synthetic oligonucleotide
  Target: LAMA2; (+) strand; PAM type: NRG; PAM sequence: CGG
ggcaatgcctcgccctgctt

SEQ ID NO: 149989 - DNA, 20 bp, Artificial Sequence
  Description of Artificial Sequence: Synthetic oligonucleotide
  Target: LAMA2; (+) strand; PAM type: NRG; PAM sequence: CAG
tcgccctgcttcggctcgcg

SEQ ID NO: 149990 - DNA, 20 bp, Artificial Sequence
  Description of Artificial Sequence: Synthetic oligonucleotide
  Target: LAMA2; (+) strand; PAM type: NRG; PAM sequence: AGG
cgccctgcttcggctcgcgc

SEQ ID NO: 149991 - DNA, 20 bp, Artificial Sequence
  Description of Artificial Sequence: Synthetic oligonucleotide
  Target: LAMA2; (+) strand; PAM type: NRG; PAM sequence: GGG
gccctgcttcggctcgcgca

SEQ ID NO: 149992 - DNA, 20 bp, Artificial Sequence
  Description of Artificial Sequence: Synthetic oligonucleotide
  Target: LAMA2; (+) strand; PAM type: NRG; PAM sequence: TGG
actgacctgcgcccactgtc

SEQ ID NO: 149993 - DNA, 20 bp, Artificial Sequence
  Description of Artificial Sequence: Synthetic oligonucleotide
  Target: LAMA2; (+) strand; PAM type: NRG; PAM sequence: TAG
gcccactgtctggcattccc

SEQ ID NO: 149994 - DNA, 20 bp, Artificial Sequence
  Description of Artificial Sequence: Synthetic oligonucleotide
  Target: LAMA2; (+) strand; PAM type: NRG; PAM sequence: GAG
actgtctggcattccctagt

SEQ ID NO: 149995 - DNA, 20 bp, Artificial Sequence
  Description of Artificial Sequence: Synthetic oligonucleotide
  Target: LAMA2; (+) strand; PAM type: NRG; PAM sequence: CGG
attccctagtgagatgaacc

SEQ ID NO: 149996 - DNA, 20 bp, Artificial Sequence
  Description of Artificial Sequence: Synthetic oligonucleotide
  Target: LAMA2; (+) strand; PAM type: NRG; PAM sequence: CAG
gtgagatgaacccggtacct

SEQ ID NO: 149997 - DNA, 20 bp, Artificial Sequence
  Description of Artificial Sequence: Synthetic oligonucleotide
  Target: LAMA2; (+) strand; PAM type: NRG; PAM sequence: TGG
gatgaacccggtacctcaga

SEQ ID NO: 149998 - DNA, 20 bp, Artificial Sequence
  Description of Artificial Sequence: Synthetic oligonucleotide
  Target: LAMA2; (+) strand; PAM type: NRG; PAM sequence: CAG
cggtacctcagatggaaatg

SEQ ID NO: 149999 - DNA, 20 bp, Artificial Sequence
  Description of Artificial Sequence: Synthetic oligonucleotide
  Target: LAMA2; (+) strand; PAM type: NRG; PAM sequence: TGG
gtcttctgcgtcgctcacgc

SEQ ID NO: 150000 - DNA, 20 bp, Artificial Sequence
  Description of Artificial Sequence: Synthetic oligonucleotide
  Target: LAMA2; (+) strand; PAM type: NRG; PAM sequence: GGG
tcttctgcgtcgctcacgct

SEQ ID NO: 150001 - DNA, 20 bp, Artificial Sequence
  Description of Artificial Sequence: Synthetic oligonucleotide
  Target: LAMA2; (+) strand; PAM type: NRG; PAM sequence: GAG
ttctgcgtcgctcacgctgg

SEQ ID NO: 150002 - DNA, 20 bp, Artificial Sequence
  Description of Artificial Sequence: Synthetic oligonucleotide
  Target: LAMA2; (+) strand; PAM type: NRG; PAM sequence: TAG
gtcgctcacgctgggagctg

SEQ ID NO: 150003 - DNA, 20 bp, Artificial Sequence
  Description of Artificial Sequence: Synthetic oligonucleotide
  Target: LAMA2; (+) strand; PAM type: NRG; PAM sequence: CGG
tcacgctgggagctgtagac

SEQ ID NO: 150004 - DNA, 20 bp, Artificial Sequence
  Description of Artificial Sequence: Synthetic oligonucleotide
  Target: LAMA2; (+) strand; PAM type: NRG; PAM sequence: GAG
acgctgggagctgtagaccg

SEQ ID NO: 150005 - DNA, 20 bp, Artificial Sequence
  Description of Artificial Sequence: Synthetic oligonucleotide
  Target: LAMA2; (+) strand; PAM type: NRG; PAM sequence: TGG
tagaccggagctgttcctat

SEQ ID NO: 150006 - DNA, 20 bp, Artificial Sequence
  Description of Artificial Sequence: Synthetic oligonucleotide
  Target: LAMA2; (+) strand; PAM type: NRG; PAM sequence: GGG
agaccggagctgttcctatt

SEQ ID NO: 150007 - DNA, 20 bp, Artificial Sequence
  Description of Artificial Sequence: Synthetic oligonucleotide
  Target: LAMA2; (+) strand; PAM type: NRG; PAM sequence: TGG
ctgttcctattgggccatgt

SEQ ID NO: 150008 - DNA, 20 bp, Artificial Sequence
  Description of Artificial Sequence: Synthetic oligonucleotide
  Target: LAMA2; (+) strand; PAM type: NRG; PAM sequence: CAG
gttggctcctctccccgatt

SEQ ID NO: 150009 - DNA, 20 bp, Artificial Sequence
  Description of Artificial Sequence: Synthetic oligonucleotide
  Target: LAMA2; (+) strand; PAM type: NRG; PAM sequence: TAG
ctctccccgattcagttttt

SEQ ID NO: 150010 - DNA, 20 bp, Artificial Sequence
  Description of Artificial Sequence: Synthetic oligonucleotide
  Target: LAMA2; (+) strand; PAM type: NRG; PAM sequence: GAG
ccccgattcagttttttagt

SEQ ID NO: 150011 - DNA, 20 bp, Artificial Sequence
  Description of Artificial Sequence: Synthetic oligonucleotide
  Target: LAMA2; (+) strand; PAM type: NRG; PAM sequence: TAG
gttttttagtgagttacctt

SEQ ID NO: 150012 - DNA, 20 bp, Artificial Sequence
  Description of Artificial Sequence: Synthetic oligonucleotide
  Target: LAMA2; (+) strand; PAM type: NRG; PAM sequence: CAG
tatctaaataatattcttat

SEQ ID NO: 150013 - DNA, 20 bp, Artificial Sequence
  Description of Artificial Sequence: Synthetic oligonucleotide
  Target: LAMA2; (+) strand; PAM type: NRG; PAM sequence: AAG
ctattgactctccgtcttga

SEQ ID NO: 150014 - DNA, 20 bp, Artificial Sequence
  Description of Artificial Sequence: Synthetic oligonucleotide
  Target: LAMA2; (+) strand; PAM type: NRG; PAM sequence: AGG
tattgactctccgtcttgaa

SEQ ID NO: 150015 - DNA, 20 bp, Artificial Sequence
  Description of Artificial Sequence: Synthetic oligonucleotide
  Target: LAMA2; (+) strand; PAM type: NRG; PAM sequence: AAG
actctccgtcttgaaaggtg

SEQ ID NO: 150016 - DNA, 20 bp, Artificial Sequence
  Description of Artificial Sequence: Synthetic oligonucleotide
  Target: LAMA2; (+) strand; PAM type: NRG; PAM sequence: AAG
acgatatctttatcatgttc

SEQ ID NO: 150017 - DNA, 20 bp, Artificial Sequence
  Description of Artificial Sequence: Synthetic oligonucleotide
  Target: LAMA2; (+) strand; PAM type: NRG; PAM sequence: GAG
gatatctttatcatgttcaa

SEQ ID NO: 150018 - DNA, 20 bp, Artificial Sequence
  Description of Artificial Sequence: Synthetic oligonucleotide
  Target: LAMA2; (+) strand; PAM type: NRG; PAM sequence: GAG
tatctttatcatgttcaaga

SEQ ID NO: 150019 - DNA, 20 bp, Artificial Sequence
  Description of Artificial Sequence: Synthetic oligonucleotide
  Target: LAMA2; (+) strand; PAM type: NRG; PAM sequence: TAG
atttcatcaatgactacatt

SEQ ID NO: 150020 - DNA, 20 bp, Artificial Sequence
  Description of Artificial Sequence: Synthetic oligonucleotide
  Target: LAMA2; (+) strand; PAM type: NRG; PAM sequence: GAG
ctacatttagactttctctt

SEQ ID NO: 150021 - DNA, 20 bp, Artificial Sequence
  Description of Artificial Sequence: Synthetic oligonucleotide
  Target: LAMA2; (+) strand; PAM type: NRG; PAM sequence: AGG
tacatttagactttctcttg

SEQ ID NO: 150022 - DNA, 20 bp, Artificial Sequence
  Description of Artificial Sequence: Synthetic oligonucleotide
  Target: LAMA2; (+) strand; PAM type: NRG; PAM sequence: AAG
ctcttgaggtcctactatat

SEQ ID NO: 150023 - DNA, 20 bp, Artificial Sequence
  Description of Artificial Sequence: Synthetic oligonucleotide
  Target: LAMA2; (+) strand; PAM type: NRG; PAM sequence: AAG
ctactatataagatgtgata

SEQ ID NO: 150024 - DNA, 20 bp, Artificial Sequence
  Description of Artificial Sequence: Synthetic oligonucleotide
  Target: LAMA2; (+) strand; PAM type: NRG; PAM sequence: CAG
ctacattcttcaccacttgt

SEQ ID NO: 150025 - DNA, 20 bp, Artificial Sequence
  Description of Artificial Sequence: Synthetic oligonucleotide
  Target: LAMA2; (+) strand; PAM type: NRG; PAM sequence: AAG
atatctttgaaatcttttca

SEQ ID NO: 150026 - DNA, 20 bp, Artificial Sequence
  Description of Artificial Sequence: Synthetic oligonucleotide
  Target: LAMA2; (+) strand; PAM type: NRG; PAM sequence: CAG
aatcttttcaaagattttca

SEQ ID NO: 150027 - DNA, 20 bp, Artificial Sequence
  Description of Artificial Sequence: Synthetic oligonucleotide
  Target: LAMA2; (+) strand; PAM type: NRG; PAM sequence: CAG
aagattttcacagttacatt

SEQ ID NO: 150028 - DNA, 20 bp, Artificial Sequence
  Description of Artificial Sequence: Synthetic oligonucleotide
  Target: LAMA2; (+) strand; PAM type: NRG; PAM sequence: TGG
ttcacagttacattcagctc

SEQ ID NO: 150029 - DNA, 20 bp, Artificial Sequence
  Description of Artificial Sequence: Synthetic oligonucleotide
  Target: LAMA2; (+) strand; PAM type: NRG; PAM sequence: TAG
taatgcttataattcaaaaa

SEQ ID NO: 150030 - DNA, 20 bp, Artificial Sequence
  Description of Artificial Sequence: Synthetic oligonucleotide
  Target: LAMA2; (+) strand; PAM type: NRG; PAM sequence: AAG
aaaatagaaatataataatc

SEQ ID NO: 150031 - DNA, 20 bp, Artificial Sequence
  Description of Artificial Sequence: Synthetic oligonucleotide
  Target: LAMA2; (+) strand; PAM type: NRG; PAM sequence: TAG
caagattgtaatactgtaat

SEQ ID NO: 150032 - DNA, 20 bp, Artificial Sequence
  Description of Artificial Sequence: Synthetic oligonucleotide
  Target: LAMA2; (+) strand; PAM type: NRG; PAM sequence: CAG
tagatacatattatttgata

SEQ ID NO: 150033 - DNA, 20 bp, Artificial Sequence
  Description of Artificial Sequence: Synthetic oligonucleotide
  Target: LAMA2; (+) strand; PAM type: NRG; PAM sequence: AGG
agatacatattatttgatac

SEQ ID NO: 150034 - DNA, 20 bp, Artificial Sequence
  Description of Artificial Sequence: Synthetic oligonucleotide
  Target: LAMA2; (+) strand; PAM type: NRG; PAM sequence: TGG
acaggctcgaattgcaaaat

SEQ ID NO: 150035 - DNA, 20 bp, Artificial Sequence
  Description of Artificial Sequence: Synthetic oligonucleotide
  Target: LAMA2; (+) strand; PAM type: NRG; PAM sequence: TAG
caaaattggacacatatttg

SEQ ID NO: 150036 - DNA, 20 bp, Artificial Sequence
  Description of Artificial Sequence: Synthetic oligonucleotide
  Target: LAMA2; (+) strand; PAM type: NRG; PAM sequence: AGG
aaaattggacacatatttgt

SEQ ID NO: 150037 - DNA, 20 bp, Artificial Sequence
  Description of Artificial Sequence: Synthetic oligonucleotide
  Target: LAMA2; (+) strand; PAM type: NRG; PAM sequence: TAG
gcttgctctgataacttatt

SEQ ID NO: 150038 - DNA, 20 bp, Artificial Sequence
  Description of Artificial Sequence: Synthetic oligonucleotide
  Target: LAMA2; (+) strand; PAM type: NRG; PAM sequence: AGG
cttgctctgataacttattt

SEQ ID NO: 150039 - DNA, 20 bp, Artificial Sequence
  Description of Artificial Sequence: Synthetic oligonucleotide
  Target: LAMA2; (+) strand; PAM type: NRG; PAM sequence: AAG
ctctgataacttatttagga

SEQ ID NO: 150040 - DNA, 20 bp, Artificial Sequence
  Description of Artificial Sequence: Synthetic oligonucleotide
  Target: LAMA2; (+) strand; PAM type: NRG; PAM sequence: GAG
ctgataacttatttaggaaa

SEQ ID NO: 150041 - DNA, 20 bp, Artificial Sequence
  Description of Artificial Sequence: Synthetic oligonucleotide
  Target: LAMA2; (+) strand; PAM type: NRG; PAM sequence: AAG
acttatttaggaaagagtgt

SEQ ID NO: 150042 - DNA, 20 bp, Artificial Sequence
  Description of Artificial Sequence: Synthetic oligonucleotide
  Target: LAMA2; (+) strand; PAM type: NRG; PAM sequence: TGG
ttaggaaagagtgtaagatg

SEQ ID NO: 150043 - DNA, 20 bp, Artificial Sequence
  Description of Artificial Sequence: Synthetic oligonucleotide
  Target: LAMA2; (+) strand; PAM type: NRG; PAM sequence: TGG
gagtgtaagatgtggtctca

SEQ ID NO: 150044 - DNA, 20 bp, Artificial Sequence
  Description of Artificial Sequence: Synthetic oligonucleotide
  Target: LAMA2; (+) strand; PAM type: NRG; PAM sequence: CAG
catggtttgcacttcttcat

SEQ ID NO: 150045 - DNA, 20 bp, Artificial Sequence
  Description of Artificial Sequence: Synthetic oligonucleotide
  Target: LAMA2; (+) strand; PAM type: NRG; PAM sequence: CAG
tcttcatcagattacataac

SEQ ID NO: 150046 - DNA, 20 bp, Artificial Sequence
  Description of Artificial Sequence: Synthetic oligonucleotide
  Target: LAMA2; (+) strand; PAM type: NRG; PAM sequence: TAG
catcagattacataaccaga

SEQ ID NO: 150047 - DNA, 20 bp, Artificial Sequence
  Description of Artificial Sequence: Synthetic oligonucleotide
  Target: LAMA2; (+) strand; PAM type: NRG; PAM sequence: TAG
cagattacataaccagatag

SEQ ID NO: 150048 - DNA, 20 bp, Artificial Sequence
  Description of Artificial Sequence: Synthetic oligonucleotide
  Target: LAMA2; (+) strand; PAM type: NRG; PAM sequence: AAG
tacataaccagatagtagaa

SEQ ID NO: 150049 - DNA, 20 bp, Artificial Sequence
  Description of Artificial Sequence: Synthetic oligonucleotide
  Target: LAMA2; (+) strand; PAM type: NRG; PAM sequence: AGG
acataaccagatagtagaaa

SEQ ID NO: 150050 - DNA, 20 bp, Artificial Sequence
  Description of Artificial Sequence: Synthetic oligonucleotide
  Target: LAMA2; (+) strand; PAM type: NRG; PAM sequence: TAG
gatagtagaaaaggatattt

SEQ ID NO: 150051 - DNA, 20 bp, Artificial Sequence
  Description of Artificial Sequence: Synthetic oligonucleotide
  Target: LAMA2; (+) strand; PAM type: NRG; PAM sequence: TGG
aggatattttagtgtattac

SEQ ID NO: 150052 - DNA, 20 bp, Artificial Sequence
  Description of Artificial Sequence: Synthetic oligonucleotide
  Target: LAMA2; (+) strand; PAM type: NRG; PAM sequence: GAG
actggcattcatttgattac

SEQ ID NO: 150053 - DNA, 20 bp, Artificial Sequence
  Description of Artificial Sequence: Synthetic oligonucleotide
  Target: LAMA2; (+) strand; PAM type: NRG; PAM sequence: AGG
ctggcattcatttgattacg

SEQ ID NO: 150054 - DNA, 20 bp, Artificial Sequence
  Description of Artificial Sequence: Synthetic oligonucleotide
  Target: LAMA2; (+) strand; PAM type: NRG; PAM sequence: GGG
tggcattcatttgattacga

SEQ ID NO: 150055 - DNA, 20 bp, Artificial Sequence
  Description of Artificial Sequence: Synthetic oligonucleotide
  Target: LAMA2; (+) strand; PAM type: NRG; PAM sequence: TAG
ttcttctctgatttttcttt

SEQ ID NO: 150056 - DNA, 20 bp, Artificial Sequence
  Description of Artificial Sequence: Synthetic oligonucleotide
  Target: LAMA2; (+) strand; PAM type: NRG; PAM sequence: TAG
tagttttcttcattttcttt

SEQ ID NO: 150057 - DNA, 20 bp, Artificial Sequence
  Description of Artificial Sequence: Synthetic oligonucleotide
  Target: LAMA2; (+) strand; PAM type: NRG; PAM sequence: TAG
ttttcttcattttcttttag

SEQ ID NO: 150058 - DNA, 20 bp, Artificial Sequence
  Description of Artificial Sequence: Synthetic oligonucleotide
  Target: LAMA2; (+) strand; PAM type: NRG; PAM sequence: AAG
tcttcattttcttttagtag

SEQ ID NO: 150059 - DNA, 20 bp, Artificial Sequence
  Description of Artificial Sequence: Synthetic oligonucleotide
  Target: LAMA2; (+) strand; PAM type: NRG; PAM sequence: AGG
cttcattttcttttagtaga

SEQ ID NO: 150060 - DNA, 20 bp, Artificial Sequence
  Description of Artificial Sequence: Synthetic oligonucleotide
  Target: LAMA2; (+) strand; PAM type: NRG; PAM sequence: AAG
cattttcttttagtagaagg

SEQ ID NO: 150061 - DNA, 20 bp, Artificial Sequence
  Description of Artificial Sequence: Synthetic oligonucleotide
  Target: LAMA2; (+) strand; PAM type: NRG; PAM sequence: TAG
gaaggaagttttctcccttg

SEQ ID NO: 150062 - DNA, 20 bp, Artificial Sequence
  Description of Artificial Sequence: Synthetic oligonucleotide
  Target: LAMA2; (+) strand; PAM type: NRG; PAM sequence: AAG
tttctcccttgtagatttgt

SEQ ID NO: 150063 - DNA, 20 bp, Artificial Sequence
  Description of Artificial Sequence: Synthetic oligonucleotide
  Target: LAMA2; (+) strand; PAM type: NRG; PAM sequence: GAG
tctcccttgtagatttgtaa

SEQ ID NO: 150064 - DNA, 20 bp, Artificial Sequence
  Description of Artificial Sequence: Synthetic oligonucleotide
  Target: LAMA2; (+) strand; PAM type: NRG; PAM sequence: CAG
agcactttaaatattaaaaa

SEQ ID NO: 150065 - DNA, 20 bp, Artificial Sequence
  Description of Artificial Sequence: Synthetic oligonucleotide
  Target: LAMA2; (+) strand; PAM type: NRG; PAM sequence: TAG
ttaaatattaaaaacagtga

SEQ ID NO: 150066 - DNA, 20 bp, Artificial Sequence
  Description of Artificial Sequence: Synthetic oligonucleotide
  Target: LAMA2; (+) strand; PAM type: NRG; PAM sequence: CAG
gtatatcattttttaataat

SEQ ID NO: 150067 - DNA, 20 bp, Artificial Sequence
  Description of Artificial Sequence: Synthetic oligonucleotide
  Target: LAMA2; (+) strand; PAM type: NRG; PAM sequence: CAG
attttttaataatcagtttt

SEQ ID NO: 150068 - DNA, 20 bp, Artificial Sequence
  Description of Artificial Sequence: Synthetic oligonucleotide
  Target: LAMA2; (+) strand; PAM type: NRG; PAM sequence: TAG
tcactactgttgataatttc

SEQ ID NO: 150069 - DNA, 20 bp, Artificial Sequence
  Description of Artificial Sequence: Synthetic oligonucleotide
  Target: LAMA2; (+) strand; PAM type: NRG; PAM sequence: CAG
cttcaaaaattttatgtaat

SEQ ID NO: 150070 - DNA, 20 bp, Artificial Sequence
  Description of Artificial Sequence: Synthetic oligonucleotide
  Target: LAMA2; (+) strand; PAM type: NRG; PAM sequence: AAG
ttttatgtaatcagctgtca

SEQ ID NO: 150071 - DNA, 20 bp, Artificial Sequence
  Description of Artificial Sequence: Synthetic oligonucleotide
  Target: LAMA2; (+) strand; PAM type: NRG; PAM sequence: CAG
tgtaatcagctgtcaaagtt

SEQ ID NO: 150072 - DNA, 20 bp, Artificial Sequence
  Description of Artificial Sequence: Synthetic oligonucleotide
  Target: LAMA2; (+) strand; PAM type: NRG; PAM sequence: AGG
gtaatcagctgtcaaagttc

SEQ ID NO: 150073 - DNA, 20 bp, Artificial Sequence
  Description of Artificial Sequence: Synthetic oligonucleotide
  Target: LAMA2; (+) strand; PAM type: NRG; PAM sequence: TAG
tcttacatgctttataatcc

SEQ ID NO: 150074 - DNA, 20 bp, Artificial Sequence
  Description of Artificial Sequence: Synthetic oligonucleotide
  Target: LAMA2; (+) strand; PAM type: NRG; PAM sequence: AAG
ctagaactctcatctatccc

SEQ ID NO: 150075 - DNA, 20 bp, Artificial Sequence
  Description of Artificial Sequence: Synthetic oligonucleotide
  Target: LAMA2; (+) strand; PAM type: NRG; PAM sequence: TAG
actctcatctatcccaagat

SEQ ID NO: 150076 - DNA, 20 bp, Artificial Sequence
  Description of Artificial Sequence: Synthetic oligonucleotide
  Target: LAMA2; (+) strand; PAM type: NRG; PAM sequence: TAG
acttaattttttattccatc

SEQ ID NO: 150077 - DNA, 20 bp, Artificial Sequence
  Description of Artificial Sequence: Synthetic oligonucleotide
  Target: LAMA2; (+) strand; PAM type: NRG; PAM sequence: AAG
tttattttgttatatttcat

SEQ ID NO: 150078 - DNA, 20 bp, Artificial Sequence
  Description of Artificial Sequence: Synthetic oligonucleotide
  Target: LAMA2; (+) strand; PAM type: NRG; PAM sequence: AGG
ttattttgttatatttcata

SEQ ID NO: 150079 - DNA, 20 bp, Artificial Sequence
  Description of Artificial Sequence: Synthetic oligonucleotide
  Target: LAMA2; (+) strand; PAM type: NRG; PAM sequence: CAG
tctacatttaatattacttt

SEQ ID NO: 150080 - DNA, 20 bp, Artificial Sequence
  Description of Artificial Sequence: Synthetic oligonucleotide
  Target: LAMA2; (+) strand; PAM type: NRG; PAM sequence: TAG
taatattactttcagctctt

SEQ ID NO: 150081 - DNA, 20 bp, Artificial Sequence
  Description of Artificial Sequence: Synthetic oligonucleotide
  Target: LAMA2; (+) strand; PAM type: NRG; PAM sequence: CGG
aaatatatttattttatttt

SEQ ID NO: 150082 - DNA, 20 bp, Artificial Sequence
  Description of Artificial Sequence: Synthetic oligonucleotide
  Target: LAMA2; (+) strand; PAM type: NRG; PAM sequence: TAG
attttattttcggaatctgt

SEQ ID NO: 150083 - DNA, 20 bp, Artificial Sequence
  Description of Artificial Sequence: Synthetic oligonucleotide
  Target: LAMA2; (+) strand; PAM type: NRG; PAM sequence: AAG
ttattttcggaatctgttag

SEQ ID NO: 150084 - DNA, 20 bp, Artificial Sequence
  Description of Artificial Sequence: Synthetic oligonucleotide
  Target: LAMA2; (+) strand; PAM type: NRG; PAM sequence: GAG
gttagaagcactctgttatt

SEQ ID NO: 150085 - DNA, 20 bp, Artificial Sequence
  Description of Artificial Sequence: Synthetic oligonucleotide
  Target: LAMA2; (+) strand; PAM type: NRG; PAM sequence: GAG
agcactctgttattgagtct

SEQ ID NO: 150086 - DNA, 20 bp, Artificial Sequence
  Description of Artificial Sequence: Synthetic oligonucleotide
  Target: LAMA2; (+) strand; PAM type: NRG; PAM sequence: TGG
tcttctaactcttattcata

SEQ ID NO: 150087 - DNA, 20 bp, Artificial Sequence
  Description of Artificial Sequence: Synthetic oligonucleotide
  Target: LAMA2; (+) strand; PAM type: NRG; PAM sequence: AAG
ttcattttcttatgtttcgt

SEQ ID NO: 150088 - DNA, 20 bp, Artificial Sequence
  Description of Artificial Sequence: Synthetic oligonucleotide
  Target: LAMA2; (+) strand; PAM type: NRG; PAM sequence: TGG
gtgtgtatgtgtgtgttttg

SEQ ID NO: 150089 - DNA, 20 bp, Artificial Sequence
  Description of Artificial Sequence: Synthetic oligonucleotide
  Target: LAMA2; (+) strand; PAM type: NRG; PAM sequence: TAG
atgcgtgcatatgtatttct

SEQ ID NO: 150090 - DNA, 20 bp, Artificial Sequence
  Description of Artificial Sequence: Synthetic oligonucleotide
  Target: LAMA2; (+) strand; PAM type: NRG; PAM sequence: CAG
tatttcttagtttattcttt

SEQ ID NO: 150091 - DNA, 20 bp, Artificial Sequence
  Description of Artificial Sequence: Synthetic oligonucleotide
  Target: LAMA2; (+) strand; PAM type: NRG; PAM sequence: AAG
ttcttagtttattctttcag

SEQ ID NO: 150092 - DNA, 20 bp, Artificial Sequence
  Description of Artificial Sequence: Synthetic oligonucleotide
  Target: LAMA2; (+) strand; PAM type: NRG; PAM sequence: AAG
agaagccttgaatttacatg

SEQ ID NO: 150093 - DNA, 20 bp, Artificial Sequence
  Description of Artificial Sequence: Synthetic oligonucleotide
  Target: LAMA2; (+) strand; PAM type: NRG; PAM sequence: TAG
tgataatgacctaccttata

SEQ ID NO: 150094 - DNA, 20 bp, Artificial Sequence
  Description of Artificial Sequence: Synthetic oligonucleotide
  Target: LAMA2; (+) strand; PAM type: NRG; PAM sequence: AGG
gataatgacctaccttatat

SEQ ID NO: 150095 - DNA, 20 bp, Artificial Sequence
  Description of Artificial Sequence: Synthetic oligonucleotide
  Target: LAMA2; (+) strand; PAM type: NRG; PAM sequence: TAG
gacctaccttatataggacc

SEQ ID NO: 150096 - DNA, 20 bp, Artificial Sequence
  Description of Artificial Sequence: Synthetic oligonucleotide
  Target: LAMA2; (+) strand; PAM type: NRG; PAM sequence: TAG
aaaccatgctccctgaactg

SEQ ID NO: 150097 - DNA, 20 bp, Artificial Sequence
  Description of Artificial Sequence: Synthetic oligonucleotide
  Target: LAMA2; (+) strand; PAM type: NRG; PAM sequence: TAG
atgctccctgaactgtagtc

SEQ ID NO: 150098 - DNA, 20 bp, Artificial Sequence
  Description of Artificial Sequence: Synthetic oligonucleotide
  Target: LAMA2; (+) strand; PAM type: NRG; PAM sequence: CAG
ctgaactgtagtctagtcat

SEQ ID NO: 150099 - DNA, 20 bp, Artificial Sequence
  Description of Artificial Sequence: Synthetic oligonucleotide
  Target: LAMA2; (+) strand; PAM type: NRG; PAM sequence: CAG
gtctagtcatcagaatttgc

SEQ ID NO: 150100 - DNA, 20 bp, Artificial Sequence
  Description of Artificial Sequence: Synthetic oligonucleotide
  Target: LAMA2; (+) strand; PAM type: NRG; PAM sequence: CAG
cagaatttgccagtcaactc

SEQ ID NO: 150101 - DNA, 20 bp, Artificial Sequence
  Description of Artificial Sequence: Synthetic oligonucleotide
  Target: LAMA2; (+) strand; PAM type: NRG; PAM sequence: AGG
agaatttgccagtcaactcc

SEQ ID NO: 150102 - DNA, 20 bp, Artificial Sequence
  Description of Artificial Sequence: Synthetic oligonucleotide
  Target: LAMA2; (+) strand; PAM type: NRG; PAM sequence: AAG
tttgccagtcaactccagga

SEQ ID NO: 150103 - DNA, 20 bp, Artificial Sequence
  Description of Artificial Sequence: Synthetic oligonucleotide
  Target: LAMA2; (+) strand; PAM type: NRG; PAM sequence: AAG
ccaggaaagacattgtttta

SEQ ID NO: 150104 - DNA, 20 bp, Artificial Sequence
  Description of Artificial Sequence: Synthetic oligonucleotide
  Target: LAMA2; (+) strand; PAM type: NRG; PAM sequence: AAG
attgttttaaagaatgacgt

SEQ ID NO: 150105 - DNA, 20 bp, Artificial Sequence
  Description of Artificial Sequence: Synthetic oligonucleotide
  Target: LAMA2; (+) strand; PAM type: NRG; PAM sequence: TAG
aaagaatgacgtaagctttc

SEQ ID NO: 150106 - DNA, 20 bp, Artificial Sequence
  Description of Artificial Sequence: Synthetic oligonucleotide
  Target: LAMA2; (+) strand; PAM type: NRG; PAM sequence: AAG
gaatgacgtaagctttctag

SEQ ID NO: 150107 - DNA, 20 bp, Artificial Sequence
  Description of Artificial Sequence: Synthetic oligonucleotide
  Target: LAMA2; (+) strand; PAM type: NRG; PAM sequence: TAG
ctttctagaagtcaattttg

SEQ ID NO: 150108 - DNA, 20 bp, Artificial Sequence
  Description of Artificial Sequence: Synthetic oligonucleotide
  Target: LAMA2; (+) strand; PAM type: NRG; PAM sequence: AAG
ttttgtagtttctcatctcc

SEQ ID NO: 150109 - DNA, 20 bp, Artificial Sequence
  Description of Artificial Sequence: Synthetic oligonucleotide
  Target: LAMA2; (+) strand; PAM type: NRG; PAM sequence: AGG
tttgtagtttctcatctcca

SEQ ID NO: 150110 - DNA, 20 bp, Artificial Sequence
  Description of Artificial Sequence: Synthetic oligonucleotide
  Target: LAMA2; (+) strand; PAM type: NRG; PAM sequence: GGG
ttgtagtttctcatctccaa

SEQ ID NO: 150111 - DNA, 20 bp, Artificial Sequence
  Description of Artificial Sequence: Synthetic oligonucleotide
  Target: LAMA2; (+) strand; PAM type: NRG; PAM sequence: GGG
tgtagtttctcatctccaag

SEQ ID NO: 150112 - DNA, 20 bp, Artificial Sequence
  Description of Artificial Sequence: Synthetic oligonucleotide
  Target: LAMA2; (+) strand; PAM type: NRG; PAM sequence: CAG
ggggtttctttatttcttgc

SEQ ID NO: 150113 - DNA, 20 bp, Artificial Sequence
  Description of Artificial Sequence: Synthetic oligonucleotide
  Target: LAMA2; (+) strand; PAM type: NRG; PAM sequence: CAG
gtatcttcaactgttctgaa

SEQ ID NO: 150114 - DNA, 20 bp, Artificial Sequence
  Description of Artificial Sequence: Synthetic oligonucleotide
  Target: LAMA2; (+) strand; PAM type: NRG; PAM sequence: AGG
tatcttcaactgttctgaac

SEQ ID NO: 150115 - DNA, 20 bp, Artificial Sequence
  Description of Artificial Sequence: Synthetic oligonucleotide
  Target: LAMA2; (+) strand; PAM type: NRG; PAM sequence: GAG
tcttcaactgttctgaacag

SEQ ID NO: 150116 - DNA, 20 bp, Artificial Sequence
  Description of Artificial Sequence: Synthetic oligonucleotide
  Target: LAMA2; (+) strand; PAM type: NRG; PAM sequence: AGG
cttcaactgttctgaacagg

SEQ ID NO: 150117 - DNA, 20 bp, Artificial Sequence
  Description of Artificial Sequence: Synthetic oligonucleotide
  Target: LAMA2; (+) strand; PAM type: NRG; PAM sequence: GGG
ttcaactgttctgaacagga

SEQ ID NO: 150118 - DNA, 20 bp, Artificial Sequence
  Description of Artificial Sequence: Synthetic oligonucleotide
  Target: LAMA2; (+) strand; PAM type: NRG; PAM sequence: GGG
tcaactgttctgaacaggag

SEQ ID NO: 150119 - DNA, 20 bp, Artificial Sequence
  Description of Artificial Sequence: Synthetic oligonucleotide
  Target: LAMA2; (+) strand; PAM type: NRG; PAM sequence: TGG
tctgaacaggaggggttttt

SEQ ID NO: 150120 - DNA, 20 bp, Artificial Sequence
  Description of Artificial Sequence: Synthetic oligonucleotide
  Target: LAMA2; (+) strand; PAM type: NRG; PAM sequence: TAG
ggaggggttttttggacatc

SEQ ID NO: 150121 - DNA, 20 bp, Artificial Sequence
  Description of Artificial Sequence: Synthetic oligonucleotide
  Target: LAMA2; (+) strand; PAM type: NRG; PAM sequence: CAG
catctagtctacaatacttc

SEQ ID NO: 150122 - DNA, 20 bp, Artificial Sequence
  Description of Artificial Sequence: Synthetic oligonucleotide
  Target: LAMA2; (+) strand; PAM type: NRG; PAM sequence: AAG
tacaatacttccagaaataa

SEQ ID NO: 150123 - DNA, 20 bp, Artificial Sequence
  Description of Artificial Sequence: Synthetic oligonucleotide
  Target: LAMA2; (+) strand; PAM type: NRG; PAM sequence: AAG
tacttccagaaataaaagtt

SEQ ID NO: 150124 - DNA, 20 bp, Artificial Sequence
  Description of Artificial Sequence: Synthetic oligonucleotide
  Target: LAMA2; (+) strand; PAM type: NRG; PAM sequence: TAG
tccagaaataaaagttaaga

SEQ ID NO: 150125 - DNA, 20 bp, Artificial Sequence
  Description of Artificial Sequence: Synthetic oligonucleotide
  Target: LAMA2; (+) strand; PAM type: NRG; PAM sequence: AAG
tagacattgtttaatacatg

SEQ ID NO: 150126 - DNA, 20 bp, Artificial Sequence
  Description of Artificial Sequence: Synthetic oligonucleotide
  Target: LAMA2; (+) strand; PAM type: NRG; PAM sequence: TAG
acatgaagtacttctacatt

SEQ ID NO: 150127 - DNA, 20 bp, Artificial Sequence
  Description of Artificial Sequence: Synthetic oligonucleotide
  Target: LAMA2; (+) strand; PAM type: NRG; PAM sequence: TGG
ctacatttagcctcaatttc

SEQ ID NO: 150128 - DNA, 20 bp, Artificial Sequence
  Description of Artificial Sequence: Synthetic oligonucleotide
  Target: LAMA2; (+) strand; PAM type: NRG; PAM sequence: CAG
atttctggaaattttaacat

SEQ ID NO: 150129 - DNA, 20 bp, Artificial Sequence
  Description of Artificial Sequence: Synthetic oligonucleotide
  Target: LAMA2; (+) strand; PAM type: NRG; PAM sequence: CAG
gcaaactttattaaaattat

SEQ ID NO: 150130 - DNA, 20 bp, Artificial Sequence
  Description of Artificial Sequence: Synthetic oligonucleotide
  Target: LAMA2; (+) strand; PAM type: NRG; PAM sequence: TGG
tatcagatttatttcccatt

SEQ ID NO: 150131 - DNA, 20 bp, Artificial Sequence
  Description of Artificial Sequence: Synthetic oligonucleotide
  Target: LAMA2; (+) strand; PAM type: NRG; PAM sequence: TGG
ttatttcccatttggtctat

SEQ ID NO: 150132 - DNA, 20 bp, Artificial Sequence
  Description of Artificial Sequence: Synthetic oligonucleotide
  Target: LAMA2; (+) strand; PAM type: NRG; PAM sequence: GGG
tatttcccatttggtctatt

SEQ ID NO: 150133 - DNA, 20 bp, Artificial Sequence
  Description of Artificial Sequence: Synthetic oligonucleotide
  Target: LAMA2; (+) strand; PAM type: NRG; PAM sequence: TAG
tggtctattgggtaatctat

SEQ ID NO: 150134 - DNA, 20 bp, Artificial Sequence
  Description of Artificial Sequence: Synthetic oligonucleotide
  Target: LAMA2; (+) strand; PAM type: NRG; PAM sequence: CAG
tcaaacaatatttattttac

SEQ ID NO: 150135 - DNA, 20 bp, Artificial Sequence
  Description of Artificial Sequence: Synthetic oligonucleotide
  Target: LAMA2; (+) strand; PAM type: NRG; PAM sequence: GAG
aaacaatatttattttacca

SEQ ID NO: 150136 - DNA, 20 bp, Artificial Sequence
  Description of Artificial Sequence: Synthetic oligonucleotide
  Target: LAMA2; (+) strand; PAM type: NRG; PAM sequence: TGG
ttaccagagtatgttctact

SEQ ID NO: 150137 - DNA, 20 bp, Artificial Sequence
  Description of Artificial Sequence: Synthetic oligonucleotide
  Target: LAMA2; (+) strand; PAM type: NRG; PAM sequence: TAG
tatgttctacttggacatca

SEQ ID NO: 150138 - DNA, 20 bp, Artificial Sequence
  Description of Artificial Sequence: Synthetic oligonucleotide
  Target: LAMA2; (+) strand; PAM type: NRG; PAM sequence: GAG
tgttctacttggacatcata

SEQ ID NO: 150139 - DNA, 20 bp, Artificial Sequence
  Description of Artificial Sequence: Synthetic oligonucleotide
  Target: LAMA2; (+) strand; PAM type: NRG; PAM sequence: AGG
gttctacttggacatcatag

SEQ ID NO: 150140 - DNA, 20 bp, Artificial Sequence
  Description of Artificial Sequence: Synthetic oligonucleotide
  Target: LAMA2; (+) strand; PAM type: NRG; PAM sequence: TAG
aggatccttttaatgtactt

SEQ ID NO: 150141 - DNA, 20 bp, Artificial Sequence
  Description of Artificial Sequence: Synthetic oligonucleotide
  Target: LAMA2; (+) strand; PAM type: NRG; PAM sequence: AGG
ggatccttttaatgtacttt

SEQ ID NO: 150142 - DNA, 20 bp, Artificial Sequence
  Description of Artificial Sequence: Synthetic oligonucleotide
  Target: LAMA2; (+) strand; PAM type: NRG; PAM sequence: CAG
ttttaatgtactttaggatt

SEQ ID NO: 150143 - DNA, 20 bp, Artificial Sequence
  Description of Artificial Sequence: Synthetic oligonucleotide
  Target: LAMA2; (+) strand; PAM type: NRG; PAM sequence: TGG
atgtactttaggattcagtt

SEQ ID NO: 150144 - DNA, 20 bp, Artificial Sequence
  Description of Artificial Sequence: Synthetic oligonucleotide
  Target: LAMA2; (+) strand; PAM type: NRG; PAM sequence: TGG
agtttggtgttttgctcatc

SEQ ID NO: 150145 - DNA, 20 bp, Artificial Sequence
  Description of Artificial Sequence: Synthetic oligonucleotide
  Target: LAMA2; (+) strand; PAM type: NRG; PAM sequence: AAG
ttttgctcatctggattcat

SEQ ID NO: 150146 - DNA, 20 bp, Artificial Sequence
  Description of Artificial Sequence: Synthetic oligonucleotide
  Target: LAMA2; (+) strand; PAM type: NRG; PAM sequence: CAG
taagttaattgcctgtgact

SEQ ID NO: 150147 - DNA, 20 bp, Artificial Sequence
  Description of Artificial Sequence: Synthetic oligonucleotide
  Target: LAMA2; (+) strand; PAM type: NRG; PAM sequence: CAG
cctgtgactcagacacccac

SEQ ID NO: 150148 - DNA, 20 bp, Artificial Sequence
  Description of Artificial Sequence: Synthetic oligonucleotide
  Target: LAMA2; (+) strand; PAM type: NRG; PAM sequence: TGG
acccaccagttgtgctcctt

SEQ ID NO: 150149 - DNA, 20 bp, Artificial Sequence
  Description of Artificial Sequence: Synthetic oligonucleotide
  Target: LAMA2; (+) strand; PAM type: NRG; PAM sequence: TAG
cacttaatttctccatgcct

SEQ ID NO: 150150 - DNA, 20 bp, Artificial Sequence
  Description of Artificial Sequence: Synthetic oligonucleotide
  Target: LAMA2; (+) strand; PAM type: NRG; PAM sequence: CAG
tagttacctcatctgtgaaa

SEQ ID NO: 150151 - DNA, 20 bp, Artificial Sequence
  Description of Artificial Sequence: Synthetic oligonucleotide
  Target: LAMA2; (+) strand; PAM type: NRG; PAM sequence: AGG
agttacctcatctgtgaaac

SEQ ID NO: 150152 - DNA, 20 bp, Artificial Sequence
  Description of Artificial Sequence: Synthetic oligonucleotide
  Target: LAMA2; (+) strand; PAM type: NRG; PAM sequence: TAG
ctgtgaaacaggaaaaataa

SEQ ID NO: 150153 - DNA, 20 bp, Artificial Sequence
  Description of Artificial Sequence: Synthetic oligonucleotide
  Target: LAMA2; (+) strand; PAM type: NRG; PAM sequence: TAG
ataatagtgtctatctcata

SEQ ID NO: 150154 - DNA, 20 bp, Artificial Sequence
  Description of Artificial Sequence: Synthetic oligonucleotide
  Target: LAMA2; (+) strand; PAM type: NRG; PAM sequence: GAG
ctatctcatatagatgtttt

SEQ ID NO: 150155 - DNA, 20 bp, Artificial Sequence
  Description of Artificial Sequence: Synthetic oligonucleotide
  Target: LAMA2; (+) strand; PAM type: NRG; PAM sequence: AAG
cctgtgttttgtgtaatgct

SEQ ID NO: 150156 - DNA, 20 bp, Artificial Sequence
  Description of Artificial Sequence: Synthetic oligonucleotide
  Target: LAMA2; (+) strand; PAM type: NRG; PAM sequence: AAG
ctaagtataatgactaccat

SEQ ID NO: 150157 - DNA, 20 bp, Artificial Sequence
  Description of Artificial Sequence: Synthetic oligonucleotide
  Target: LAMA2; (+) strand; PAM type: NRG; PAM sequence: AAG
tataatgactaccataagat

SEQ ID NO: 150158 - DNA, 20 bp, Artificial Sequence
  Description of Artificial Sequence: Synthetic oligonucleotide
  Target: LAMA2; (+) strand; PAM type: NRG; PAM sequence: GAG
ccataagataagtgctattt

SEQ ID NO: 150159 - DNA, 20 bp, Artificial Sequence
  Description of Artificial Sequence: Synthetic oligonucleotide
  Target: LAMA2; (+) strand; PAM type: NRG; PAM sequence: TAG
gataagtgctatttgagtct

SEQ ID NO: 150160 - DNA, 20 bp, Artificial Sequence
  Description of Artificial Sequence: Synthetic oligonucleotide
  Target: LAMA2; (+) strand; PAM type: NRG; PAM sequence: AAG
aagtgctatttgagtcttag

SEQ ID NO: 150161 - DNA, 20 bp, Artificial Sequence
  Description of Artificial Sequence: Synthetic oligonucleotide
  Target: LAMA2; (+) strand; PAM type: NRG; PAM sequence: TGG
tcttagaagttttgtttatt

SEQ ID NO: 150162 - DNA, 20 bp, Artificial Sequence
  Description of Artificial Sequence: Synthetic oligonucleotide
  Target: LAMA2; (+) strand; PAM type: NRG; PAM sequence: GGG
cttagaagttttgtttattt

SEQ ID NO: 150163 - DNA, 20 bp, Artificial Sequence
  Description of Artificial Sequence: Synthetic oligonucleotide
  Target: LAMA2; (+) strand; PAM type: NRG; PAM sequence: GGG
ttagaagttttgtttatttg

SEQ ID NO: 150164 - DNA, 20 bp, Artificial Sequence
  Description of Artificial Sequence: Synthetic oligonucleotide
  Target: LAMA2; (+) strand; PAM type: NRG; PAM sequence: TGG
ttggggttatcatttgcatt

SEQ ID NO: 150165 - DNA, 20 bp, Artificial Sequence
  Description of Artificial Sequence: Synthetic oligonucleotide
  Target: LAMA2; (+) strand; PAM type: NRG; PAM sequence: GGG
tggggttatcatttgcattt

SEQ ID NO: 150166 - DNA, 20 bp, Artificial Sequence
  Description of Artificial Sequence: Synthetic oligonucleotide
  Target: LAMA2; (+) strand; PAM type: NRG; PAM sequence: AAG
atcatttgcatttgggtatc

SEQ ID NO: 150167 - DNA, 20 bp, Artificial Sequence
  Description of Artificial Sequence: Synthetic oligonucleotide
  Target: LAMA2; (+) strand; PAM type: NRG; PAM sequence: TAG
tttgcatttgggtatcaagt

SEQ ID NO: 150168 - DNA, 20 bp, Artificial Sequence
  Description of Artificial Sequence: Synthetic oligonucleotide
  Target: LAMA2; (+) strand; PAM type: NRG; PAM sequence: TAG
gcttcataaattgaattaca

SEQ ID NO: 150169 - DNA, 20 bp, Artificial Sequence
  Description of Artificial Sequence: Synthetic oligonucleotide
  Target: LAMA2; (+) strand; PAM type: NRG; PAM sequence: AAG
ctccatttttatatgaccat

SEQ ID NO: 150170 - DNA, 20 bp, Artificial Sequence
  Description of Artificial Sequence: Synthetic oligonucleotide
  Target: LAMA2; (+) strand; PAM type: NRG; PAM sequence: GAG
ccatttttatatgaccataa

SEQ ID NO: 150171 - DNA, 20 bp, Artificial Sequence
  Description of Artificial Sequence: Synthetic oligonucleotide
  Target: LAMA2; (+) strand; PAM type: NRG; PAM sequence: AAG
tatatgaccataagagtttc

SEQ ID NO: 150172 - DNA, 20 bp, Artificial Sequence
  Description of Artificial Sequence: Synthetic oligonucleotide
  Target: LAMA2; (+) strand; PAM type: NRG; PAM sequence: CAG
agagtttcaagttttgaaaa

SEQ ID NO: 150173 - DNA, 20 bp, Artificial Sequence
  Description of Artificial Sequence: Synthetic oligonucleotide
  Target: LAMA2; (+) strand; PAM type: NRG; PAM sequence: TAG
aacagtctgtaaaaattaac

SEQ ID NO: 150174 - DNA, 20 bp, Artificial Sequence
  Description of Artificial Sequence: Synthetic oligonucleotide
  Target: LAMA2; (+) strand; PAM type: NRG; PAM sequence: CAG
gtaaaaattaactagcatta

SEQ ID NO: 150175 - DNA, 20 bp, Artificial Sequence
  Description of Artificial Sequence: Synthetic oligonucleotide
  Target: LAMA2; (+) strand; PAM type: NRG; PAM sequence: AAG
caccgcatgttcttactcgt

SEQ ID NO: 150176 - DNA, 20 bp, Artificial Sequence
  Description of Artificial Sequence: Synthetic oligonucleotide
  Target: LAMA2; (+) strand; PAM type: NRG; PAM sequence: TGG
cgcatgttcttactcgtaag

SEQ ID NO: 150177 - DNA, 20 bp, Artificial Sequence
  Description of Artificial Sequence: Synthetic oligonucleotide
  Target: LAMA2; (+) strand; PAM type: NRG; PAM sequence: GGG
gcatgttcttactcgtaagt

SEQ ID NO: 150178 - DNA, 20 bp, Artificial Sequence
  Description of Artificial Sequence: Synthetic oligonucleotide
  Target: LAMA2; (+) strand; PAM type: NRG; PAM sequence: GAG
atgttcttactcgtaagtgg

SEQ ID NO: 150179 - DNA, 20 bp, Artificial Sequence
  Description of Artificial Sequence: Synthetic oligonucleotide
  Target: LAMA2; (+) strand; PAM type: NRG; PAM sequence: GAG
gtaagtgggagttgaacaat

SEQ ID NO: 150180 - DNA, 20 bp, Artificial Sequence
  Description of Artificial Sequence: Synthetic oligonucleotide
  Target: LAMA2; (+) strand; PAM type: NRG; PAM sequence: CAG
acaatgagaacacatgaaca

SEQ ID NO: 150181 - DNA, 20 bp, Artificial Sequence
  Description of Artificial Sequence: Synthetic oligonucleotide
  Target: LAMA2; (+) strand; PAM type: NRG; PAM sequence: CAG
tgagaacacatgaacacaga

SEQ ID NO: 150182 - DNA, 20 bp, Artificial Sequence
  Description of Artificial Sequence: Synthetic oligonucleotide
  Target: LAMA2; (+) strand; PAM type: NRG; PAM sequence: AGG
gagaacacatgaacacagac

SEQ ID NO: 150183 - DNA, 20 bp, Artificial Sequence
  Description of Artificial Sequence: Synthetic oligonucleotide
  Target: LAMA2; (+) strand; PAM type: NRG; PAM sequence: GGG
agaacacatgaacacagaca

SEQ ID NO: 150184 - DNA, 20 bp, Artificial Sequence
  Description of Artificial Sequence: Synthetic oligonucleotide
  Target: LAMA2; (+) strand; PAM type: NRG; PAM sequence: GGG
gaacacatgaacacagacag

SEQ ID NO: 150185 - DNA, 20 bp, Artificial Sequence
  Description of Artificial Sequence: Synthetic oligonucleotide
  Target: LAMA2; (+) strand; PAM type: NRG; PAM sequence: CAG
gacaggggaacatcacatgc

SEQ ID NO: 150186 - DNA, 20 bp, Artificial Sequence
  Description of Artificial Sequence: Synthetic oligonucleotide
  Target: LAMA2; (+) strand; PAM type: NRG; PAM sequence: AGG
acaggggaacatcacatgcc

SEQ ID NO: 150187 - DNA, 20 bp, Artificial Sequence
  Description of Artificial Sequence: Synthetic oligonucleotide
  Target: LAMA2; (+) strand; PAM type: NRG; PAM sequence: GGG
caggggaacatcacatgcca

SEQ ID NO: 150188 - DNA, 20 bp, Artificial Sequence
  Description of Artificial Sequence: Synthetic oligonucleotide
  Target: LAMA2; (+) strand; PAM type: NRG; PAM sequence: CAG
catcacatgccagggcctgt

SEQ ID NO: 150189 - DNA, 20 bp, Artificial Sequence
  Description of Artificial Sequence: Synthetic oligonucleotide
  Target: LAMA2; (+) strand; PAM type: NRG; PAM sequence: TGG
cacatgccagggcctgtcag

SEQ ID NO: 150190 - DNA, 20 bp, Artificial Sequence
  Description of Artificial Sequence: Synthetic oligonucleotide
  Target: LAMA2; (+) strand; PAM type: NRG; PAM sequence: GGG
acatgccagggcctgtcagt

SEQ ID NO: 150191 - DNA, 20 bp, Artificial Sequence
  Description of Artificial Sequence: Synthetic oligonucleotide
  Target: LAMA2; (+) strand; PAM type: NRG; PAM sequence: TGG
tgccagggcctgtcagtggg

SEQ ID NO: 150192 - DNA, 20 bp, Artificial Sequence
  Description of Artificial Sequence: Synthetic oligonucleotide
  Target: LAMA2; (+) strand; PAM type: NRG; PAM sequence: GGG
gccagggcctgtcagtgggt

SEQ ID NO: 150193 - DNA, 20 bp, Artificial Sequence
  Description of Artificial Sequence: Synthetic oligonucleotide
  Target: LAMA2; (+) strand; PAM type: NRG; PAM sequence: GGG
ccagggcctgtcagtgggtg

SEQ ID NO: 150194 - DNA, 20 bp, Artificial Sequence
  Description of Artificial Sequence: Synthetic oligonucleotide
  Target: LAMA2; (+) strand; PAM type: NRG; PAM sequence: GGG
cagggcctgtcagtgggtgg

SEQ ID NO: 150195 - DNA, 20 bp, Artificial Sequence
  Description of Artificial Sequence: Synthetic oligonucleotide
  Target: LAMA2; (+) strand; PAM type: NRG; PAM sequence: TAG
cctgtcagtgggtgggggtc

SEQ ID NO: 150196 - DNA, 20 bp, Artificial Sequence
  Description of Artificial Sequence: Synthetic oligonucleotide
  Target: LAMA2; (+) strand; PAM type: NRG; PAM sequence: AGG
ctgtcagtgggtgggggtct

SEQ ID NO: 150197 - DNA, 20 bp, Artificial Sequence
  Description of Artificial Sequence: Synthetic oligonucleotide
  Target: LAMA2; (+) strand; PAM type: NRG; PAM sequence: GGG
tgtcagtgggtgggggtcta

SEQ ID NO: 150198 - DNA, 20 bp, Artificial Sequence
  Description of Artificial Sequence: Synthetic oligonucleotide
  Target: LAMA2; (+) strand; PAM type: NRG; PAM sequence: GGG
gtcagtgggtgggggtctag

SEQ ID NO: 150199 - DNA, 20 bp, Artificial Sequence
  Description of Artificial Sequence: Synthetic oligonucleotide
  Target: LAMA2; (+) strand; PAM type: NRG; PAM sequence: GAG
cagtgggtgggggtctaggg

SEQ ID NO: 150200 - DNA, 20 bp, Artificial Sequence
  Description of Artificial Sequence: Synthetic oligonucleotide
  Target: LAMA2; (+) strand; PAM type: NRG; PAM sequence: AGG
agtgggtgggggtctagggg

SEQ ID NO: 150201 - DNA, 20 bp, Artificial Sequence
  Description of Artificial Sequence: Synthetic oligonucleotide
  Target: LAMA2; (+) strand; PAM type: NRG; PAM sequence: CAG
gtgggggtctaggggaggaa

SEQ ID NO: 150202 - DNA, 20 bp, Artificial Sequence
  Description of Artificial Sequence: Synthetic oligonucleotide
  Target: LAMA2; (+) strand; PAM type: NRG; PAM sequence: TAG
gtctaggggaggaacagcat

SEQ ID NO: 150203 - DNA, 20 bp, Artificial Sequence
  Description of Artificial Sequence: Synthetic oligonucleotide
  Target: LAMA2; (+) strand; PAM type: NRG; PAM sequence: AGG
tctaggggaggaacagcatt

SEQ ID NO: 150204 - DNA, 20 bp, Artificial Sequence
  Description of Artificial Sequence: Synthetic oligonucleotide
  Target: LAMA2; (+) strand; PAM type: NRG; PAM sequence: GAG
taggggaggaacagcattag

SEQ ID NO: 150205 - DNA, 20 bp, Artificial Sequence
  Description of Artificial Sequence: Synthetic oligonucleotide
  Target: LAMA2; (+) strand; PAM type: NRG; PAM sequence: TAG
attaggagaaatacctaatg

SEQ ID NO: 150206 - DNA, 20 bp, Artificial Sequence
  Description of Artificial Sequence: Synthetic oligonucleotide
  Target: LAMA2; (+) strand; PAM type: NRG; PAM sequence: CAG
gaaatacctaatgtagatga

SEQ ID NO: 150207 - DNA, 20 bp, Artificial Sequence
  Description of Artificial Sequence: Synthetic oligonucleotide
  Target: LAMA2; (+) strand; PAM type: NRG; PAM sequence: AGG
aaatacctaatgtagatgac

SEQ ID NO: 150208 - DNA, 20 bp, Artificial Sequence
  Description of Artificial Sequence: Synthetic oligonucleotide
  Target: LAMA2; (+) strand; PAM type: NRG; PAM sequence: TGG
taatgtagatgacaggtcga

SEQ ID NO: 150209 - DNA, 20 bp, Artificial Sequence
  Description of Artificial Sequence: Synthetic oligonucleotide
  Target: LAMA2; (+) strand; PAM type: NRG; PAM sequence: CAG
agatgacaggtcgatggctg

SEQ ID NO: 150210 - DNA, 20 bp, Artificial Sequence
  Description of Artificial Sequence: Synthetic oligonucleotide
  Target: LAMA2; (+) strand; PAM type: NRG; PAM sequence: TGG
atggctgcagcaaaccacca

SEQ ID NO: 150211 - DNA, 20 bp, Artificial Sequence
  Description of Artificial Sequence: Synthetic oligonucleotide
  Target: LAMA2; (+) strand; PAM type: NRG; PAM sequence: TGG
gcatacctatgtgacaaacc

SEQ ID NO: 150212 - DNA, 20 bp, Artificial Sequence
  Description of Artificial Sequence: Synthetic oligonucleotide
  Target: LAMA2; (+) strand; PAM type: NRG; PAM sequence: CAG
gatgttctgcacatgtattc

SEQ ID NO: 150213 - DNA, 20 bp, Artificial Sequence
  Description of Artificial Sequence: Synthetic oligonucleotide
  Target: LAMA2; (+) strand; PAM type: NRG; PAM sequence: AAG
cacatgtattccagaactta

SEQ ID NO: 150214 - DNA, 20 bp, Artificial Sequence
  Description of Artificial Sequence: Synthetic oligonucleotide
  Target: LAMA2; (+) strand; PAM type: NRG; PAM sequence: TGG
ctatcattaaaacatgtttg

SEQ ID NO: 150215 - DNA, 20 bp, Artificial Sequence
  Description of Artificial Sequence: Synthetic oligonucleotide
  Target: LAMA2; (+) strand; PAM type: NRG; PAM sequence: TAG
tcattaaaacatgtttgtgg

SEQ ID NO: 150216 - DNA, 20 bp, Artificial Sequence
  Description of Artificial Sequence: Synthetic oligonucleotide
  Target: LAMA2; (+) strand; PAM type: NRG; PAM sequence: TAG
cctcttttgatacccttgat

SEQ ID NO: 150217 - DNA, 20 bp, Artificial Sequence
  Description of Artificial Sequence: Synthetic oligonucleotide
  Target: LAMA2; (+) strand; PAM type: NRG; PAM sequence: TGG
tcaaatctctttacttcctg

SEQ ID NO: 150218 - DNA, 20 bp, Artificial Sequence
  Description of Artificial Sequence: Synthetic oligonucleotide
  Target: LAMA2; (+) strand; PAM type: NRG; PAM sequence: TGG
tttatctatttttaaaataa

SEQ ID NO: 150219 - DNA, 20 bp, Artificial Sequence
  Description of Artificial Sequence: Synthetic oligonucleotide
  Target: LAMA2; (+) strand; PAM type: NRG; PAM sequence: AAG
tttaaaataatggactattt

SEQ ID NO: 150220 - DNA, 20 bp, Artificial Sequence
  Description of Artificial Sequence: Synthetic oligonucleotide
  Target: LAMA2; (+) strand; PAM type: NRG; PAM sequence: AAG
aatggactatttaagcctat

SEQ ID NO: 150221 - DNA, 20 bp, Artificial Sequence
  Description of Artificial Sequence: Synthetic oligonucleotide
  Target: LAMA2; (+) strand; PAM type: NRG; PAM sequence: TGG
taagcctataagtttacttt

SEQ ID NO: 150222 - DNA, 20 bp, Artificial Sequence
  Description of Artificial Sequence: Synthetic oligonucleotide
  Target: LAMA2; (+) strand; PAM type: NRG; PAM sequence: GGG
aagcctataagtttactttt

SEQ ID NO: 150223 - DNA, 20 bp, Artificial Sequence
  Description of Artificial Sequence: Synthetic oligonucleotide
  Target: LAMA2; (+) strand; PAM type: NRG; PAM sequence: CAG
tataagtttacttttgggta

SEQ ID NO: 150224 - DNA, 20 bp, Artificial Sequence
  Description of Artificial Sequence: Synthetic oligonucleotide
  Target: LAMA2; (+) strand; PAM type: NRG; PAM sequence: AAG
ttccatactcaacaaaaatt

SEQ ID NO: 150225 - DNA, 20 bp, Artificial Sequence
  Description of Artificial Sequence: Synthetic oligonucleotide
  Target: LAMA2; (+) strand; PAM type: NRG; PAM sequence: TAG
tactgctattatattctacc

SEQ ID NO: 150226 - DNA, 20 bp, Artificial Sequence
  Description of Artificial Sequence: Synthetic oligonucleotide
  Target: LAMA2; (+) strand; PAM type: NRG; PAM sequence: TAG
gctattatattctacctaga

SEQ ID NO: 150227 - DNA, 20 bp, Artificial Sequence
  Description of Artificial Sequence: Synthetic oligonucleotide
  Target: LAMA2; (+) strand; PAM type: NRG; PAM sequence: AAG
tagctatttatttttaattg

SEQ ID NO: 150228 - DNA, 20 bp, Artificial Sequence
  Description of Artificial Sequence: Synthetic oligonucleotide
  Target: LAMA2; (+) strand; PAM type: NRG; PAM sequence: AAG
cttgattttctctttaaccc

SEQ ID NO: 150229 - DNA, 20 bp, Artificial Sequence
  Description of Artificial Sequence: Synthetic oligonucleotide
  Target: LAMA2; (+) strand; PAM type: NRG; PAM sequence: GAG
tgattttctctttaacccaa

SEQ ID NO: 150230 - DNA, 20 bp, Artificial Sequence
  Description of Artificial Sequence: Synthetic oligonucleotide
  Target: LAMA2; (+) strand; PAM type: NRG; PAM sequence: AAG
ctttaacccaagagttatta

SEQ ID NO: 150231 - DNA, 20 bp, Artificial Sequence
  Description of Artificial Sequence: Synthetic oligonucleotide
  Target: LAMA2; (+) strand; PAM type: NRG; PAM sequence: GAG
ttaacccaagagttattaaa

SEQ ID NO: 150232 - DNA, 20 bp, Artificial Sequence
  Description of Artificial Sequence: Synthetic oligonucleotide
  Target: LAMA2; (+) strand; PAM type: NRG; PAM sequence: TAG
agttattaaagagaaatatt

SEQ ID NO: 150233 - DNA, 20 bp, Artificial Sequence
  Description of Artificial Sequence: Synthetic oligonucleotide
  Target: LAMA2; (+) strand; PAM type: NRG; PAM sequence: AGG
gttattaaagagaaatattt

SEQ ID NO: 150234 - DNA, 20 bp, Artificial Sequence
  Description of Artificial Sequence: Synthetic oligonucleotide
  Target: LAMA2; (+) strand; PAM type: NRG; PAM sequence: TAG
aatatttaggcattaatttt

SEQ ID NO: 150235 - DNA, 20 bp, Artificial Sequence
  Description of Artificial Sequence: Synthetic oligonucleotide
  Target: LAMA2; (+) strand; PAM type: NRG; PAM sequence: CAG
ttaggcattaatttttagaa

SEQ ID NO: 150236 - DNA, 20 bp, Artificial Sequence
  Description of Artificial Sequence: Synthetic oligonucleotide
  Target: LAMA2; (+) strand; PAM type: NRG; PAM sequence: CAG
ctctcatcatgtttgatatt

SEQ ID NO: 150237 - DNA, 20 bp, Artificial Sequence
  Description of Artificial Sequence: Synthetic oligonucleotide
  Target: LAMA2; (+) strand; PAM type: NRG; PAM sequence: TGG
taatttaatcttaatttttg

SEQ ID NO: 150238 - DNA, 20 bp, Artificial Sequence
  Description of Artificial Sequence: Synthetic oligonucleotide
  Target: LAMA2; (+) strand; PAM type: NRG; PAM sequence: AAG
ggcatttgatacacatctaa

SEQ ID NO: 150239 - DNA, 20 bp, Artificial Sequence
  Description of Artificial Sequence: Synthetic oligonucleotide
  Target: LAMA2; (+) strand; PAM type: NRG; PAM sequence: TAG
atttgatacacatctaaaag

SEQ ID NO: 150240 - DNA, 20 bp, Artificial Sequence
  Description of Artificial Sequence: Synthetic oligonucleotide
  Target: LAMA2; (+) strand; PAM type: NRG; PAM sequence: AAG
taaaagtagtaatttatgtt

SEQ ID NO: 150241 - DNA, 20 bp, Artificial Sequence
  Description of Artificial Sequence: Synthetic oligonucleotide
  Target: LAMA2; (+) strand; PAM type: NRG; PAM sequence: AAG
gtaatttatgttaagaaaat

SEQ ID NO: 150242 - DNA, 20 bp, Artificial Sequence
  Description of Artificial Sequence: Synthetic oligonucleotide
  Target: LAMA2; (+) strand; PAM type: NRG; PAM sequence: TAG
tatgttaagaaaataagcct

SEQ ID NO: 150243 - DNA, 20 bp, Artificial Sequence
  Description of Artificial Sequence: Synthetic oligonucleotide
  Target: LAMA2; (+) strand; PAM type: NRG; PAM sequence: GAG
taatttctgctttgataatt

SEQ ID NO: 150244 - DNA, 20 bp, Artificial Sequence
  Description of Artificial Sequence: Synthetic oligonucleotide
  Target: LAMA2; (+) strand; PAM type: NRG; PAM sequence: TAG
tgataattgagtatttttta

SEQ ID NO: 150245 - DNA, 20 bp, Artificial Sequence
  Description of Artificial Sequence: Synthetic oligonucleotide
  Target: LAMA2; (+) strand; PAM type: NRG; PAM sequence: TGG
ttatagtcaatcacaaacta

SEQ ID NO: 150246 - DNA, 20 bp, Artificial Sequence
  Description of Artificial Sequence: Synthetic oligonucleotide
  Target: LAMA2; (+) strand; PAM type: NRG; PAM sequence: TAG
cacaaactatggtaaatatt

SEQ ID NO: 150247 - DNA, 20 bp, Artificial Sequence
  Description of Artificial Sequence: Synthetic oligonucleotide
  Target: LAMA2; (+) strand; PAM type: NRG; PAM sequence: TAG
aatatgtaatttgatattat

SEQ ID NO: 150248 - DNA, 20 bp, Artificial Sequence
  Description of Artificial Sequence: Synthetic oligonucleotide
  Target: LAMA2; (+) strand; PAM type: NRG; PAM sequence: AAG
tacttcatctgtaaatactt

SEQ ID NO: 150249 - DNA, 20 bp, Artificial Sequence
  Description of Artificial Sequence: Synthetic oligonucleotide
  Target: LAMA2; (+) strand; PAM type: NRG; PAM sequence: GAG
catctgtaaatacttaagat

SEQ ID NO: 150250 - DNA, 20 bp, Artificial Sequence
  Description of Artificial Sequence: Synthetic oligonucleotide
  Target: LAMA2; (+) strand; PAM type: NRG; PAM sequence: AAG
tgtaaatacttaagatgagt

SEQ ID NO: 150251 - DNA, 20 bp, Artificial Sequence
  Description of Artificial Sequence: Synthetic oligonucleotide
  Target: LAMA2; (+) strand; PAM type: NRG; PAM sequence: TAG
aatacttaagatgagtaagt

SEQ ID NO: 150252 - DNA, 20 bp, Artificial Sequence
  Description of Artificial Sequence: Synthetic oligonucleotide
  Target: LAMA2; (+) strand; PAM type: NRG; PAM sequence: CAG
gagtaagttagcatcatttt

SEQ ID NO: 150253 - DNA, 20 bp, Artificial Sequence
  Description of Artificial Sequence: Synthetic oligonucleotide
  Target: LAMA2; (+) strand; PAM type: NRG; PAM sequence: AAG
ttttcagccattgactttta

SEQ ID NO: 150254 - DNA, 20 bp, Artificial Sequence
  Description of Artificial Sequence: Synthetic oligonucleotide
  Target: LAMA2; (+) strand; PAM type: NRG; PAM sequence: TAG
catatttttgtactgataat

SEQ ID NO: 150255 - DNA, 20 bp, Artificial Sequence
  Description of Artificial Sequence: Synthetic oligonucleotide
  Target: LAMA2; (+) strand; PAM type: NRG; PAM sequence: AAG
tgataattagtgcttatttg

SEQ ID NO: 150256 - DNA, 20 bp, Artificial Sequence
  Description of Artificial Sequence: Synthetic oligonucleotide
  Target: LAMA2; (+) strand; PAM type: NRG; PAM sequence: GAG
tatttttatcaatgtaaaat

SEQ ID NO: 150257 - DNA, 20 bp, Artificial Sequence
  Description of Artificial Sequence: Synthetic oligonucleotide
  Target: LAMA2; (+) strand; PAM type: NRG; PAM sequence: GAG
tttttatcaatgtaaaatga

SEQ ID NO: 150258 - DNA, 20 bp, Artificial Sequence
  Description of Artificial Sequence: Synthetic oligonucleotide
  Target: LAMA2; (+) strand; PAM type: NRG; PAM sequence: TAG
agagcttgccttactgaacc

SEQ ID NO: 150259 - DNA, 20 bp, Artificial Sequence
  Description of Artificial Sequence: Synthetic oligonucleotide
  Target: LAMA2; (+) strand; PAM type: NRG; PAM sequence: GAG
ttactgaacctagtttattt

SEQ ID NO: 150260 - DNA, 20 bp, Artificial Sequence
  Description of Artificial Sequence: Synthetic oligonucleotide
  Target: LAMA2; (+) strand; PAM type: NRG; PAM sequence: TGG
agtttatttgagttctactt

SEQ ID NO: 150261 - DNA, 20 bp, Artificial Sequence
  Description of Artificial Sequence: Synthetic oligonucleotide
  Target: LAMA2; (+) strand; PAM type: NRG; PAM sequence: AAG
tacatgtttatgtttttaat

SEQ ID NO: 150262 - DNA, 20 bp, Artificial Sequence
  Description of Artificial Sequence: Synthetic oligonucleotide
  Target: LAMA2; (+) strand; PAM type: NRG; PAM sequence: CAG
gtttatgtttttaataagaa

SEQ ID NO: 150263 - DNA, 20 bp, Artificial Sequence
  Description of Artificial Sequence: Synthetic oligonucleotide
  Target: LAMA2; (+) strand; PAM type: NRG; PAM sequence: AAG
atgtttttaataagaacagt

SEQ ID NO: 150264 - DNA, 20 bp, Artificial Sequence
  Description of Artificial Sequence: Synthetic oligonucleotide
  Target: LAMA2; (+) strand; PAM type: NRG; PAM sequence: TAG
agtaagactgcttaactcat

SEQ ID NO: 150265 - DNA, 20 bp, Artificial Sequence
  Description of Artificial Sequence: Synthetic oligonucleotide
  Target: LAMA2; (+) strand; PAM type: NRG; PAM sequence: TAG
ttaactcattagtatgtatt

SEQ ID NO: 150266 - DNA, 20 bp, Artificial Sequence
  Description of Artificial Sequence: Synthetic oligonucleotide
  Target: LAMA2; (+) strand; PAM type: NRG; PAM sequence: TGG
tcctcctttcttctttctga

SEQ ID NO: 150267 - DNA, 20 bp, Artificial Sequence
  Description of Artificial Sequence: Synthetic oligonucleotide
  Target: LAMA2; (+) strand; PAM type: NRG; PAM sequence: CAG
gatttgcttttatctttctc

SEQ ID NO: 150268 - DNA, 20 bp, Artificial Sequence
  Description of Artificial Sequence: Synthetic oligonucleotide
  Target: LAMA2; (+) strand; PAM type: NRG; PAM sequence: AAG
ttatctttctccagattttg

SEQ ID NO: 150269 - DNA, 20 bp, Artificial Sequence
  Description of Artificial Sequence: Synthetic oligonucleotide
  Target: LAMA2; (+) strand; PAM type: NRG; PAM sequence: AGG
tatctttctccagattttga

SEQ ID NO: 150270 - DNA, 20 bp, Artificial Sequence
  Description of Artificial Sequence: Synthetic oligonucleotide
  Target: LAMA2; (+) strand; PAM type: NRG; PAM sequence: TAG
tccagattttgaaggtctgt

SEQ ID NO: 150271 - DNA, 20 bp, Artificial Sequence
  Description of Artificial Sequence: Synthetic oligonucleotide
  Target: LAMA2; (+) strand; PAM type: NRG; PAM sequence: AAG
ttatttctattttttaatca

SEQ ID NO: 150272 - DNA, 20 bp, Artificial Sequence
  Description of Artificial Sequence: Synthetic oligonucleotide
  Target: LAMA2; (+) strand; PAM type: NRG; PAM sequence: AAG
tgtatttctgtatgttaaaa

SEQ ID NO: 150273 - DNA, 20 bp, Artificial Sequence
  Description of Artificial Sequence: Synthetic oligonucleotide
  Target: LAMA2; (+) strand; PAM type: NRG; PAM sequence: TAG
atgaacacctttattttctt

SEQ ID NO: 150274 - DNA, 20 bp, Artificial Sequence
  Description of Artificial Sequence: Synthetic oligonucleotide
  Target: LAMA2; (+) strand; PAM type: NRG; PAM sequence: CAG
attttctttagtaatactgc

SEQ ID NO: 150275 - DNA, 20 bp, Artificial Sequence
  Description of Artificial Sequence: Synthetic oligonucleotide
  Target: LAMA2; (+) strand; PAM type: NRG; PAM sequence: TGG
ttctttagtaatactgccag

SEQ ID NO: 150276 - DNA, 20 bp, Artificial Sequence
  Description of Artificial Sequence: Synthetic oligonucleotide
  Target: LAMA2; (+) strand; PAM type: NRG; PAM sequence: TAG
tactgccagtggcatgttct

SEQ ID NO: 150277 - DNA, 20 bp, Artificial Sequence
  Description of Artificial Sequence: Synthetic oligonucleotide
  Target: LAMA2; (+) strand; PAM type: NRG; PAM sequence: GAG
ctgccagtggcatgttctta

SEQ ID NO: 150278 - DNA, 20 bp, Artificial Sequence
  Description of Artificial Sequence: Synthetic oligonucleotide
  Target: LAMA2; (+) strand; PAM type: NRG; PAM sequence: AAG
cattgttaaactgttatttt

SEQ ID NO: 150279 - DNA, 20 bp, Artificial Sequence
  Description of Artificial Sequence: Synthetic oligonucleotide
  Target: LAMA2; (+) strand; PAM type: NRG; PAM sequence: AAG
agtaatatgtctttattccc

SEQ ID NO: 150280 - DNA, 20 bp, Artificial Sequence
  Description of Artificial Sequence: Synthetic oligonucleotide
  Target: LAMA2; (+) strand; PAM type: NRG; PAM sequence: AGG
gtaatatgtctttattccca

SEQ ID NO: 150281 - DNA, 20 bp, Artificial Sequence
  Description of Artificial Sequence: Synthetic oligonucleotide
  Target: LAMA2; (+) strand; PAM type: NRG; PAM sequence: TAG
aggctactttgcacctgtaa

SEQ ID NO: 150282 - DNA, 20 bp, Artificial Sequence
  Description of Artificial Sequence: Synthetic oligonucleotide
  Target: LAMA2; (+) strand; PAM type: NRG; PAM sequence: TGG
actttgcacctgtaatagtc

SEQ ID NO: 150283 - DNA, 20 bp, Artificial Sequence
  Description of Artificial Sequence: Synthetic oligonucleotide
  Target: LAMA2; (+) strand; PAM type: NRG; PAM sequence: TGG
ttgcacctgtaatagtctgg

SEQ ID NO: 150284 - DNA, 20 bp, Artificial Sequence
  Description of Artificial Sequence: Synthetic oligonucleotide
  Target: LAMA2; (+) strand; PAM type: NRG; PAM sequence: GAG
gcacctgtaatagtctggtg

SEQ ID NO: 150285 - DNA, 20 bp, Artificial Sequence
  Description of Artificial Sequence: Synthetic oligonucleotide
  Target: LAMA2; (+) strand; PAM type: NRG; PAM sequence: CAG
cctgtaatagtctggtggag

SEQ ID NO: 150286 - DNA, 20 bp, Artificial Sequence
  Description of Artificial Sequence: Synthetic oligonucleotide
  Target: LAMA2; (+) strand; PAM type: NRG; PAM sequence: AGG
ctgtaatagtctggtggagc

SEQ ID NO: 150287 - DNA, 20 bp, Artificial Sequence
  Description of Artificial Sequence: Synthetic oligonucleotide
  Target: LAMA2; (+) strand; PAM type: NRG; PAM sequence: GAG
gtggagcaggcttgttccgt

SEQ ID NO: 150288 - DNA, 20 bp, Artificial Sequence
  Description of Artificial Sequence: Synthetic oligonucleotide
  Target: LAMA2; (+) strand; PAM type: NRG; PAM sequence: TAG
aggcttgttccgtgagccac

SEQ ID NO: 150289 - DNA, 20 bp, Artificial Sequence
  Description of Artificial Sequence: Synthetic oligonucleotide
  Target: LAMA2; (+) strand; PAM type: NRG; PAM sequence: TAG
actgcttattcttctcaatg

SEQ ID NO: 150290 - DNA, 20 bp, Artificial Sequence
  Description of Artificial Sequence: Synthetic oligonucleotide
  Target: LAMA2; (+) strand; PAM type: NRG; PAM sequence: CAG
tcttctcaatgtagcatcat

SEQ ID NO: 150291 - DNA, 20 bp, Artificial Sequence
  Description of Artificial Sequence: Synthetic oligonucleotide
  Target: LAMA2; (+) strand; PAM type: NRG; PAM sequence: TAG
caatgtagcatcatcagcat

SEQ ID NO: 150292 - DNA, 20 bp, Artificial Sequence
  Description of Artificial Sequence: Synthetic oligonucleotide
  Target: LAMA2; (+) strand; PAM type: NRG; PAM sequence: TGG
atcatcagcattagcgtttg

SEQ ID NO: 150293 - DNA, 20 bp, Artificial Sequence
  Description of Artificial Sequence: Synthetic oligonucleotide
  Target: LAMA2; (+) strand; PAM type: NRG; PAM sequence: TGG
cgtttgtggaaatttctcct

SEQ ID NO: 150294 - DNA, 20 bp, Artificial Sequence
  Description of Artificial Sequence: Synthetic oligonucleotide
  Target: LAMA2; (+) strand; PAM type: NRG; PAM sequence: TAG
tccttggtcattgttttcta

SEQ ID NO: 150295 - DNA, 20 bp, Artificial Sequence
  Description of Artificial Sequence: Synthetic oligonucleotide
  Target: LAMA2; (+) strand; PAM type: NRG; PAM sequence: TAG
gtcattgttttctatagcca

SEQ ID NO: 150296 - DNA, 20 bp, Artificial Sequence
  Description of Artificial Sequence: Synthetic oligonucleotide
  Target: LAMA2; (+) strand; PAM type: NRG; PAM sequence: TGG
tgttttctatagccatagtt

SEQ ID NO: 150297 - DNA, 20 bp, Artificial Sequence
  Description of Artificial Sequence: Synthetic oligonucleotide
  Target: LAMA2; (+) strand; PAM type: NRG; PAM sequence: TAG
tttctatagccatagtttgg

SEQ ID NO: 150298 - DNA, 20 bp, Artificial Sequence
  Description of Artificial Sequence: Synthetic oligonucleotide
  Target: LAMA2; (+) strand; PAM type: NRG; PAM sequence: GAG
catagtttggtagatgcttt

SEQ ID NO: 150299 - DNA, 20 bp, Artificial Sequence
  Description of Artificial Sequence: Synthetic oligonucleotide
  Target: LAMA2; (+) strand; PAM type: NRG; PAM sequence: TAG
ttaatatttctattgacact

SEQ ID NO: 150300 - DNA, 20 bp, Artificial Sequence
  Description of Artificial Sequence: Synthetic oligonucleotide
  Target: LAMA2; (+) strand; PAM type: NRG; PAM sequence: AAG
atatttctattgacacttag

SEQ ID NO: 150301 - DNA, 20 bp, Artificial Sequence
  Description of Artificial Sequence: Synthetic oligonucleotide
  Target: LAMA2; (+) strand; PAM type: NRG; PAM sequence: TAG
atgctatgttcacgtaatca

SEQ ID NO: 150302 - DNA, 20 bp, Artificial Sequence
  Description of Artificial Sequence: Synthetic oligonucleotide
  Target: LAMA2; (+) strand; PAM type: NRG; PAM sequence: AAG
tatgttcacgtaatcataga

SEQ ID NO: 150303 - DNA, 20 bp, Artificial Sequence
  Description of Artificial Sequence: Synthetic oligonucleotide
  Target: LAMA2; (+) strand; PAM type: NRG; PAM sequence: TGG
taattaaaccctctactctt

SEQ ID NO: 150304 - DNA, 20 bp, Artificial Sequence
  Description of Artificial Sequence: Synthetic oligonucleotide
  Target: LAMA2; (+) strand; PAM type: NRG; PAM sequence: TAG
aatctatttttgtgtcaaaa

SEQ ID NO: 150305 - DNA, 20 bp, Artificial Sequence
  Description of Artificial Sequence: Synthetic oligonucleotide
  Target: LAMA2; (+) strand; PAM type: NRG; PAM sequence: AAG
tgtgtcaaaatagcatttta

SEQ ID NO: 150306 - DNA, 20 bp, Artificial Sequence
  Description of Artificial Sequence: Synthetic oligonucleotide
  Target: LAMA2; (+) strand; PAM type: NRG; PAM sequence: AGG
gtgtcaaaatagcattttaa

SEQ ID NO: 150307 - DNA, 20 bp, Artificial Sequence
  Description of Artificial Sequence: Synthetic oligonucleotide
  Target: LAMA2; (+) strand; PAM type: NRG; PAM sequence: TAG
actaaattatgtacttgttt

SEQ ID NO: 150308 - DNA, 20 bp, Artificial Sequence
  Description of Artificial Sequence: Synthetic oligonucleotide
  Target: LAMA2; (+) strand; PAM type: NRG; PAM sequence: TGG
gttttagaaatgttgatatg

SEQ ID NO: 150309 - DNA, 20 bp, Artificial Sequence
  Description of Artificial Sequence: Synthetic oligonucleotide
  Target: LAMA2; (+) strand; PAM type: NRG; PAM sequence: TAG
atatgtggctcatctttctt

SEQ ID NO: 150310 - DNA, 20 bp, Artificial Sequence
  Description of Artificial Sequence: Synthetic oligonucleotide
  Target: LAMA2; (+) strand; PAM type: NRG; PAM sequence: AGG
tatgtggctcatctttcttt

SEQ ID NO: 150311 - DNA, 20 bp, Artificial Sequence
  Description of Artificial Sequence: Synthetic oligonucleotide
  Target: LAMA2; (+) strand; PAM type: NRG; PAM sequence: TGG
ggctcatctttctttaggtt

SEQ ID NO: 150312 - DNA, 20 bp, Artificial Sequence
  Description of Artificial Sequence: Synthetic oligonucleotide
  Target: LAMA2; (+) strand; PAM type: NRG; PAM sequence: TGG
ctttctttaggtttggcacc

SEQ ID NO: 150313 - DNA, 20 bp, Artificial Sequence
  Description of Artificial Sequence: Synthetic oligonucleotide
  Target: LAMA2; (+) strand; PAM type: NRG; PAM sequence: TGG
ggatcctgtcattgcaaaac

SEQ ID NO: 150314 - DNA, 20 bp, Artificial Sequence
  Description of Artificial Sequence: Synthetic oligonucleotide
  Target: LAMA2; (+) strand; PAM type: NRG; PAM sequence: TGG
tgtcattgcaaaactggttt

SEQ ID NO: 150315 - DNA, 20 bp, Artificial Sequence
  Description of Artificial Sequence: Synthetic oligonucleotide
  Target: LAMA2; (+) strand; PAM type: NRG; PAM sequence: GAG
tcattgcaaaactggttttg

SEQ ID NO: 150316 - DNA, 20 bp, Artificial Sequence
  Description of Artificial Sequence: Synthetic oligonucleotide
  Target: LAMA2; (+) strand; PAM type: NRG; PAM sequence: AGG
cattgcaaaactggttttgg

SEQ ID NO: 150317 - DNA, 20 bp, Artificial Sequence
  Description of Artificial Sequence: Synthetic oligonucleotide
  Target: LAMA2; (+) strand; PAM type: NRG; PAM sequence: GAG
aaaactggttttggaggtgt

SEQ ID NO: 150318 - DNA, 20 bp, Artificial Sequence
  Description of Artificial Sequence: Synthetic oligonucleotide
  Target: LAMA2; (+) strand; PAM type: NRG; PAM sequence: CGG
ttggaggtgtgagctgtgat

SEQ ID NO: 150319 - DNA, 20 bp, Artificial Sequence
  Description of Artificial Sequence: Synthetic oligonucleotide
  Target: LAMA2; (+) strand; PAM type: NRG; PAM sequence: CAG
gtgagctgtgatcggtgtgc

SEQ ID NO: 150320 - DNA, 20 bp, Artificial Sequence
  Description of Artificial Sequence: Synthetic oligonucleotide
  Target: LAMA2; (+) strand; PAM type: NRG; PAM sequence: AGG
tgagctgtgatcggtgtgcc

SEQ ID NO: 150321 - DNA, 20 bp, Artificial Sequence
  Description of Artificial Sequence: Synthetic oligonucleotide
  Target: LAMA2; (+) strand; PAM type: NRG; PAM sequence: GGG
gagctgtgatcggtgtgcca

SEQ ID NO: 150322 - DNA, 20 bp, Artificial Sequence
  Description of Artificial Sequence: Synthetic oligonucleotide
  Target: LAMA2; (+) strand; PAM type: NRG; PAM sequence: GGG
agctgtgatcggtgtgccag

SEQ ID NO: 150323 - DNA, 20 bp, Artificial Sequence
  Description of Artificial Sequence: Synthetic oligonucleotide
  Target: LAMA2; (+) strand; PAM type: NRG; PAM sequence: TGG
cggtgtgccaggggctacac

SEQ ID NO: 150324 - DNA, 20 bp, Artificial Sequence
  Description of Artificial Sequence: Synthetic oligonucleotide
  Target: LAMA2; (+) strand; PAM type: NRG; PAM sequence: CGG
caggggctacactggctacc

SEQ ID NO: 150325 - DNA, 20 bp, Artificial Sequence
  Description of Artificial Sequence: Synthetic oligonucleotide
  Target: LAMA2; (+) strand; PAM type: NRG; PAM sequence: AAG
cactggctacccggactgca

SEQ ID NO: 150326 - DNA, 20 bp, Artificial Sequence
  Description of Artificial Sequence: Synthetic oligonucleotide
  Target: LAMA2; (+) strand; PAM type: NRG; PAM sequence: CAG
gactgcaaagcctgtaactg

SEQ ID NO: 150327 - DNA, 20 bp, Artificial Sequence
  Description of Artificial Sequence: Synthetic oligonucleotide
  Target: LAMA2; (+) strand; PAM type: NRG; PAM sequence: TGG
tgcaaagcctgtaactgcag

SEQ ID NO: 150328 - DNA, 20 bp, Artificial Sequence
  Description of Artificial Sequence: Synthetic oligonucleotide
  Target: LAMA2; (+) strand; PAM type: NRG; PAM sequence: GGG
gcaaagcctgtaactgcagt

SEQ ID NO: 150329 - DNA, 20 bp, Artificial Sequence
  Description of Artificial Sequence: Synthetic oligonucleotide
  Target: LAMA2; (+) strand; PAM type: NRG; PAM sequence: TAG
agcctgtaactgcagtgggt

SEQ ID NO: 150330 - DNA, 20 bp, Artificial Sequence
  Description of Artificial Sequence: Synthetic oligonucleotide
  Target: LAMA2; (+) strand; PAM type: NRG; PAM sequence: AGG
gcctgtaactgcagtgggtt

SEQ ID NO: 150331 - DNA, 20 bp, Artificial Sequence
  Description of Artificial Sequence: Synthetic oligonucleotide
  Target: LAMA2; (+) strand; PAM type: NRG; PAM sequence: GGG
cctgtaactgcagtgggtta

SEQ ID NO: 150332 - DNA, 20 bp, Artificial Sequence
  Description of Artificial Sequence: Synthetic oligonucleotide
  Target: LAMA2; (+) strand; PAM type: NRG; PAM sequence: GAG
tgtaactgcagtgggttagg

SEQ ID NO: 150333 - DNA, 20 bp, Artificial Sequence
  Description of Artificial Sequence: Synthetic oligonucleotide
  Target: LAMA2; (+) strand; PAM type: NRG; PAM sequence: GAG
gtgggttagggagcaaaaat

SEQ ID NO: 150334 - DNA, 20 bp, Artificial Sequence
  Description of Artificial Sequence: Synthetic oligonucleotide
  Target: LAMA2; (+) strand; PAM type: NRG; PAM sequence: AGG
tgggttagggagcaaaaatg

SEQ ID NO: 150335 - DNA, 20 bp, Artificial Sequence
  Description of Artificial Sequence: Synthetic oligonucleotide
  Target: LAMA2; (+) strand; PAM type: NRG; PAM sequence: TGG
aaaaatgaggatccttgttt

SEQ ID NO: 150336 - DNA, 20 bp, Artificial Sequence
  Description of Artificial Sequence: Synthetic oligonucleotide
  Target: LAMA2; (+) strand; PAM type: NRG; PAM sequence: AAG
gttttggcccctgtatctgc

SEQ ID NO: 150337 - DNA, 20 bp, Artificial Sequence
  Description of Artificial Sequence: Synthetic oligonucleotide
  Target: LAMA2; (+) strand; PAM type: NRG; PAM sequence: AGG
ttttggcccctgtatctgca

SEQ ID NO: 150338 - DNA, 20 bp, Artificial Sequence
  Description of Artificial Sequence: Synthetic oligonucleotide
  Target: LAMA2; (+) strand; PAM type: NRG; PAM sequence: CAG
gcaaggtacattgtttattc

SEQ ID NO: 150339 - DNA, 20 bp, Artificial Sequence
  Description of Artificial Sequence: Synthetic oligonucleotide
  Target: LAMA2; (+) strand; PAM type: NRG; PAM sequence: AAG
tccagtaatgtcccactgtc

SEQ ID NO: 150340 - DNA, 20 bp, Artificial Sequence
  Description of Artificial Sequence: Synthetic oligonucleotide
  Target: LAMA2; (+) strand; PAM type: NRG; PAM sequence: CAG
gtaatgtcccactgtcaaga

SEQ ID NO: 150341 - DNA, 20 bp, Artificial Sequence
  Description of Artificial Sequence: Synthetic oligonucleotide
  Target: LAMA2; (+) strand; PAM type: NRG; PAM sequence: AAG
atgtcccactgtcaagacag

SEQ ID NO: 150342 - DNA, 20 bp, Artificial Sequence
  Description of Artificial Sequence: Synthetic oligonucleotide
  Target: LAMA2; (+) strand; PAM type: NRG; PAM sequence: AGG
tgtcccactgtcaagacaga

SEQ ID NO: 150343 - DNA, 20 bp, Artificial Sequence
  Description of Artificial Sequence: Synthetic oligonucleotide
  Target: LAMA2; (+) strand; PAM type: NRG; PAM sequence: TGG
agacagaaggttatttttct

SEQ ID NO: 150344 - DNA, 20 bp, Artificial Sequence
  Description of Artificial Sequence: Synthetic oligonucleotide
  Target: LAMA2; (+) strand; PAM type: NRG; PAM sequence: TGG
ggcttctctgttgatttcct

SEQ ID NO: 150345 - DNA, 20 bp, Artificial Sequence
  Description of Artificial Sequence: Synthetic oligonucleotide
  Target: LAMA2; (+) strand; PAM type: NRG; PAM sequence: AAG
ctgttgatttccttggcatt

SEQ ID NO: 150346 - DNA, 20 bp, Artificial Sequence
  Description of Artificial Sequence: Synthetic oligonucleotide
  Target: LAMA2; (+) strand; PAM type: NRG; PAM sequence: TGG
taagcaattttaatgacttc

SEQ ID NO: 150347 - DNA, 20 bp, Artificial Sequence
  Description of Artificial Sequence: Synthetic oligonucleotide
  Target: LAMA2; (+) strand; PAM type: NRG; PAM sequence: AAG
gcaattttaatgacttctgg

SEQ ID NO: 150348 - DNA, 20 bp, Artificial Sequence
  Description of Artificial Sequence: Synthetic oligonucleotide
  Target: LAMA2; (+) strand; PAM type: NRG; PAM sequence: TGG
tccataatctattctacgtg

SEQ ID NO: 150349 - DNA, 20 bp, Artificial Sequence
  Description of Artificial Sequence: Synthetic oligonucleotide
  Target: LAMA2; (+) strand; PAM type: NRG; PAM sequence: CAG
ttctacgtgtggtgacccac

SEQ ID NO: 150350 - DNA, 20 bp, Artificial Sequence
  Description of Artificial Sequence: Synthetic oligonucleotide
  Target: LAMA2; (+) strand; PAM type: NRG; PAM sequence: AGG
tctacgtgtggtgacccacc

SEQ ID NO: 150351 - DNA, 20 bp, Artificial Sequence
  Description of Artificial Sequence: Synthetic oligonucleotide
  Target: LAMA2; (+) strand; PAM type: NRG; PAM sequence: TAG
gtgacccaccaggttcactg

SEQ ID NO: 150352 - DNA, 20 bp, Artificial Sequence
  Description of Artificial Sequence: Synthetic oligonucleotide
  Target: LAMA2; (+) strand; PAM type: NRG; PAM sequence: CAG
acccaccaggttcactgtag

SEQ ID NO: 150353 - DNA, 20 bp, Artificial Sequence
  Description of Artificial Sequence: Synthetic oligonucleotide
  Target: LAMA2; (+) strand; PAM type: NRG; PAM sequence: AGG
cccaccaggttcactgtagc

SEQ ID NO: 150354 - DNA, 20 bp, Artificial Sequence
  Description of Artificial Sequence: Synthetic oligonucleotide
  Target: LAMA2; (+) strand; PAM type: NRG; PAM sequence: AAG
cactgtagcaggatgtttat

SEQ ID NO: 150355 - DNA, 20 bp, Artificial Sequence
  Description of Artificial Sequence: Synthetic oligonucleotide
  Target: LAMA2; (+) strand; PAM type: NRG; PAM sequence: AGG
actgtagcaggatgtttata

SEQ ID NO: 150356 - DNA, 20 bp, Artificial Sequence
  Description of Artificial Sequence: Synthetic oligonucleotide
  Target: LAMA2; (+) strand; PAM type: NRG; PAM sequence: AAG
tttataaggcacttatctaa

SEQ ID NO: 150357 - DNA, 20 bp, Artificial Sequence
  Description of Artificial Sequence: Synthetic oligonucleotide
  Target: LAMA2; (+) strand; PAM type: NRG; PAM sequence: CGG
tctaaaagcctacaaatgca

SEQ ID NO: 150358 - DNA, 20 bp, Artificial Sequence
  Description of Artificial Sequence: Synthetic oligonucleotide
  Target: LAMA2; (+) strand; PAM type: NRG; PAM sequence: GAG
taaaagcctacaaatgcacg

SEQ ID NO: 150359 - DNA, 20 bp, Artificial Sequence
  Description of Artificial Sequence: Synthetic oligonucleotide
  Target: LAMA2; (+) strand; PAM type: NRG; PAM sequence: AGG
aaaagcctacaaatgcacgg

SEQ ID NO: 150360 - DNA, 20 bp, Artificial Sequence
  Description of Artificial Sequence: Synthetic oligonucleotide
  Target: LAMA2; (+) strand; PAM type: NRG; PAM sequence: AAG
cggaggataaaccacgttta

SEQ ID NO: 150361 - DNA, 20 bp, Artificial Sequence
  Description of Artificial Sequence: Synthetic oligonucleotide
  Target: LAMA2; (+) strand; PAM type: NRG; PAM sequence: AGG
ggaggataaaccacgtttaa

SEQ ID NO: 150362 - DNA, 20 bp, Artificial Sequence
  Description of Artificial Sequence: Synthetic oligonucleotide
  Target: LAMA2; (+) strand; PAM type: NRG; PAM sequence: TAG
ctttcaccccattgcccaac

SEQ ID NO: 150363 - DNA, 20 bp, Artificial Sequence
  Description of Artificial Sequence: Synthetic oligonucleotide
  Target: LAMA2; (+) strand; PAM type: NRG; PAM sequence: CGG
tgtgttaatttaaaaatata

SEQ ID NO: 150364 - DNA, 20 bp, Artificial Sequence
  Description of Artificial Sequence: Synthetic oligonucleotide
  Target: LAMA2; (+) strand; PAM type: NRG; PAM sequence: TAG
aatttaaaaatatacggcac

SEQ ID NO: 150365 - DNA, 20 bp, Artificial Sequence
  Description of Artificial Sequence: Synthetic oligonucleotide
  Target: LAMA2; (+) strand; PAM type: NRG; PAM sequence: TAG
aaaatatacggcactagaaa

SEQ ID NO: 150366 - DNA, 20 bp, Artificial Sequence
  Description of Artificial Sequence: Synthetic oligonucleotide
  Target: LAMA2; (+) strand; PAM type: NRG; PAM sequence: AAG
atagcaaccctttaaaacta

SEQ ID NO: 150367 - DNA, 20 bp, Artificial Sequence
  Description of Artificial Sequence: Synthetic oligonucleotide
  Target: LAMA2; (+) strand; PAM type: NRG; PAM sequence: CAG
atctacctttgcatctaatt

SEQ ID NO: 150368 - DNA, 20 bp, Artificial Sequence
  Description of Artificial Sequence: Synthetic oligonucleotide
  Target: LAMA2; (+) strand; PAM type: NRG; PAM sequence: AAG
attcagtaatgaattctgtc

SEQ ID NO: 150369 - DNA, 20 bp, Artificial Sequence
  Description of Artificial Sequence: Synthetic oligonucleotide
  Target: LAMA2; (+) strand; PAM type: NRG; PAM sequence: AGG
ttcagtaatgaattctgtca

SEQ ID NO: 150370 - DNA, 20 bp, Artificial Sequence
  Description of Artificial Sequence: Synthetic oligonucleotide
  Target: LAMA2; (+) strand; PAM type: NRG; PAM sequence: GGG
tcagtaatgaattctgtcaa

SEQ ID NO: 150371 - DNA, 20 bp, Artificial Sequence
  Description of Artificial Sequence: Synthetic oligonucleotide
  Target: LAMA2; (+) strand; PAM type: NRG; PAM sequence: AAG
aatttttaaataatcttcta

SEQ ID NO: 150372 - DNA, 20 bp, Artificial Sequence
  Description of Artificial Sequence: Synthetic oligonucleotide
  Target: LAMA2; (+) strand; PAM type: NRG; PAM sequence: CAG
aatcttctaaagtttgaacc

SEQ ID NO: 150373 - DNA, 20 bp, Artificial Sequence
  Description of Artificial Sequence: Synthetic oligonucleotide
  Target: LAMA2; (+) strand; PAM type: NRG; PAM sequence: AAG
tctaaagtttgaacccagat

SEQ ID NO: 150374 - DNA, 20 bp, Artificial Sequence
  Description of Artificial Sequence: Synthetic oligonucleotide
  Target: LAMA2; (+) strand; PAM type: NRG; PAM sequence: AAG
ttttctgttcaattataaaa

SEQ ID NO: 150375 - DNA, 20 bp, Artificial Sequence
  Description of Artificial Sequence: Synthetic oligonucleotide
  Target: LAMA2; (+) strand; PAM type: NRG; PAM sequence: AAG
ttcaattataaaaaagtaca

SEQ ID NO: 150376 - DNA, 20 bp, Artificial Sequence
  Description of Artificial Sequence: Synthetic oligonucleotide
  Target: LAMA2; (+) strand; PAM type: NRG; PAM sequence: TGG
aaaaaagtacaaagccctaa

SEQ ID NO: 150377 - DNA, 20 bp, Artificial Sequence
  Description of Artificial Sequence: Synthetic oligonucleotide
  Target: LAMA2; (+) strand; PAM type: NRG; PAM sequence: AAG
agccctaatggaattaatta

SEQ ID NO: 150378 - DNA, 20 bp, Artificial Sequence
  Description of Artificial Sequence: Synthetic oligonucleotide
  Target: LAMA2; (+) strand; PAM type: NRG; PAM sequence: AGG
gccctaatggaattaattaa

SEQ ID NO: 150379 - DNA, 20 bp, Artificial Sequence
  Description of Artificial Sequence: Synthetic oligonucleotide
  Target: LAMA2; (+) strand; PAM type: NRG; PAM sequence: AAG
aaggctcaatattttcttcc

SEQ ID NO: 150380 - DNA, 20 bp, Artificial Sequence
  Description of Artificial Sequence: Synthetic oligonucleotide
  Target: LAMA2; (+) strand; PAM type: NRG; PAM sequence: TAG
ttttcttccaagattacttt

SEQ ID NO: 150381 - DNA, 20 bp, Artificial Sequence
  Description of Artificial Sequence: Synthetic oligonucleotide
  Target: LAMA2; (+) strand; PAM type: NRG; PAM sequence: AAG
taacaaatcatgttaacacc

SEQ ID NO: 150382 - DNA, 20 bp, Artificial Sequence
  Description of Artificial Sequence: Synthetic oligonucleotide
  Target: LAMA2; (+) strand; PAM type: NRG; PAM sequence: AGG
aacaaatcatgttaacacca

SEQ ID NO: 150383 - DNA, 20 bp, Artificial Sequence
  Description of Artificial Sequence: Synthetic oligonucleotide
  Target: LAMA2; (+) strand; PAM type: NRG; PAM sequence: GGG
acaaatcatgttaacaccaa

SEQ ID NO: 150384 - DNA, 20 bp, Artificial Sequence
  Description of Artificial Sequence: Synthetic oligonucleotide
  Target: LAMA2; (+) strand; PAM type: NRG; PAM sequence: CAG
caagggatgcattacctctg

SEQ ID NO: 150385 - DNA, 20 bp, Artificial Sequence
  Description of Artificial Sequence: Synthetic oligonucleotide
  Target: LAMA2; (+) strand; PAM type: NRG; PAM sequence: AAG
tgcagcttataaacattatg

SEQ ID NO: 150386 - DNA, 20 bp, Artificial Sequence
  Description of Artificial Sequence: Synthetic oligonucleotide
  Target: LAMA2; (+) strand; PAM type: NRG; PAM sequence: CAG
tataaacattatgaagcata

SEQ ID NO: 150387 - DNA, 20 bp, Artificial Sequence
  Description of Artificial Sequence: Synthetic oligonucleotide
  Target: LAMA2; (+) strand; PAM type: NRG; PAM sequence: AGG
ataaacattatgaagcatac

SEQ ID NO: 150388 - DNA, 20 bp, Artificial Sequence
  Description of Artificial Sequence: Synthetic oligonucleotide
  Target: LAMA2; (+) strand; PAM type: NRG; PAM sequence: AAG
tgaagcatacaggcatgcac

SEQ ID NO: 150389 - DNA, 20 bp, Artificial Sequence
  Description of Artificial Sequence: Synthetic oligonucleotide
  Target: LAMA2; (+) strand; PAM type: NRG; PAM sequence: AAG
atgcacaagtgaaaaatgaa

SEQ ID NO: 150390 - DNA, 20 bp, Artificial Sequence
  Description of Artificial Sequence: Synthetic oligonucleotide
  Target: LAMA2; (+) strand; PAM type: NRG; PAM sequence: TAG
agactgatttactttaccta

SEQ ID NO: 150391 - DNA, 20 bp, Artificial Sequence
  Description of Artificial Sequence: Synthetic oligonucleotide
  Target: LAMA2; (+) strand; PAM type: NRG; PAM sequence: GAG
tttactttacctatagtaat

SEQ ID NO: 150392 - DNA, 20 bp, Artificial Sequence
  Description of Artificial Sequence: Synthetic oligonucleotide
  Target: LAMA2; (+) strand; PAM type: NRG; PAM sequence: CAG
gagttctataacattctgac

SEQ ID NO: 150393 - DNA, 20 bp, Artificial Sequence
  Description of Artificial Sequence: Synthetic oligonucleotide
  Target: LAMA2; (+) strand; PAM type: NRG; PAM sequence: CGG
tctataacattctgaccaga

SEQ ID NO: 150394 - DNA, 20 bp, Artificial Sequence
  Description of Artificial Sequence: Synthetic oligonucleotide
  Target: LAMA2; (+) strand; PAM type: NRG; PAM sequence: TAG
cagacggtgtataactacat

SEQ ID NO: 150395 - DNA, 20 bp, Artificial Sequence
  Description of Artificial Sequence: Synthetic oligonucleotide
  Target: LAMA2; (+) strand; PAM type: NRG; PAM sequence: GAG
ggtgtataactacattagct

SEQ ID NO: 150396 - DNA, 20 bp, Artificial Sequence
  Description of Artificial Sequence: Synthetic oligonucleotide
  Target: LAMA2; (+) strand; PAM type: NRG; PAM sequence: GAG
tgtataactacattagctga

SEQ ID NO: 150397 - DNA, 20 bp, Artificial Sequence
  Description of Artificial Sequence: Synthetic oligonucleotide
  Target: LAMA2; (+) strand; PAM type: NRG; PAM sequence: AAG
gaatgaaccattctttgaaa

SEQ ID NO: 150398 - DNA, 20 bp, Artificial Sequence
  Description of Artificial Sequence: Synthetic oligonucleotide
  Target: LAMA2; (+) strand; PAM type: NRG; PAM sequence: TAG
gaaccattctttgaaaaagt

SEQ ID NO: 150399 - DNA, 20 bp, Artificial Sequence
  Description of Artificial Sequence: Synthetic oligonucleotide
  Target: LAMA2; (+) strand; PAM type: NRG; PAM sequence: AAG
ccatacttatgtaaaaatga

SEQ ID NO: 150400 - DNA, 20 bp, Artificial Sequence
  Description of Artificial Sequence: Synthetic oligonucleotide
  Target: LAMA2; (+) strand; PAM type: NRG; PAM sequence: AAG
tttttctttattttcaatta

SEQ ID NO: 150401 - DNA, 20 bp, Artificial Sequence
  Description of Artificial Sequence: Synthetic oligonucleotide
  Target: LAMA2; (+) strand; PAM type: NRG; PAM sequence: GAG
tttctttattttcaattaaa

SEQ ID NO: 150402 - DNA, 20 bp, Artificial Sequence
  Description of Artificial Sequence: Synthetic oligonucleotide
  Target: LAMA2; (+) strand; PAM type: NRG; PAM sequence: AGG
ttctttattttcaattaaag

SEQ ID NO: 150403 - DNA, 20 bp, Artificial Sequence
  Description of Artificial Sequence: Synthetic oligonucleotide
  Target: LAMA2; (+) strand; PAM type: NRG; PAM sequence: GGG
tctttattttcaattaaaga

SEQ ID NO: 150404 - DNA, 20 bp, Artificial Sequence
  Description of Artificial Sequence: Synthetic oligonucleotide
  Target: LAMA2; (+) strand; PAM type: NRG; PAM sequence: TAG
aaatatttttattaacctgt

SEQ ID NO: 150405 - DNA, 20 bp, Artificial Sequence
  Description of Artificial Sequence: Synthetic oligonucleotide
  Target: LAMA2; (+) strand; PAM type: NRG; PAM sequence: TGG
ttaacctgttagtcttatct

SEQ ID NO: 150406 - DNA, 20 bp, Artificial Sequence
  Description of Artificial Sequence: Synthetic oligonucleotide
  Target: LAMA2; (+) strand; PAM type: NRG; PAM sequence: CAG
acctgttagtcttatcttgg

SEQ ID NO: 150407 - DNA, 20 bp, Artificial Sequence
  Description of Artificial Sequence: Synthetic oligonucleotide
  Target: LAMA2; (+) strand; PAM type: NRG; PAM sequence: TAG
ggcagctataaaatattata

SEQ ID NO: 150408 - DNA, 20 bp, Artificial Sequence
  Description of Artificial Sequence: Synthetic oligonucleotide
  Target: LAMA2; (+) strand; PAM type: NRG; PAM sequence: TGG
aaatattatatagttatatt

SEQ ID NO: 150409 - DNA, 20 bp, Artificial Sequence
  Description of Artificial Sequence: Synthetic oligonucleotide
  Target: LAMA2; (+) strand; PAM type: NRG; PAM sequence: GAG
tagttatatttggtacatgt

SEQ ID NO: 150410 - DNA, 20 bp, Artificial Sequence
  Description of Artificial Sequence: Synthetic oligonucleotide
  Target: LAMA2; (+) strand; PAM type: NRG; PAM sequence: AAG
tgtgtacatatacaaccatt

SEQ ID NO: 150411 - DNA, 20 bp, Artificial Sequence
  Description of Artificial Sequence: Synthetic oligonucleotide
  Target: LAMA2; (+) strand; PAM type: NRG; PAM sequence: AAG
caaccattaagccataatat

SEQ ID NO: 150412 - DNA, 20 bp, Artificial Sequence
  Description of Artificial Sequence: Synthetic oligonucleotide
  Target: LAMA2; (+) strand; PAM type: NRG; PAM sequence: TAG
ccattaagccataatataag

SEQ ID NO: 150413 - DNA, 20 bp, Artificial Sequence
  Description of Artificial Sequence: Synthetic oligonucleotide
  Target: LAMA2; (+) strand; PAM type: NRG; PAM sequence: TAG
ataatataagtagtaaatat

SEQ ID NO: 150414 - DNA, 20 bp, Artificial Sequence
  Description of Artificial Sequence: Synthetic oligonucleotide
  Target: LAMA2; (+) strand; PAM type: NRG; PAM sequence: AAG
agtaaatattagttttaatg

SEQ ID NO: 150415 - DNA, 20 bp, Artificial Sequence
  Description of Artificial Sequence: Synthetic oligonucleotide
  Target: LAMA2; (+) strand; PAM type: NRG; PAM sequence: TGG
ttaatgaagtgtttatgaat

SEQ ID NO: 150416 - DNA, 20 bp, Artificial Sequence
  Description of Artificial Sequence: Synthetic oligonucleotide
  Target: LAMA2; (+) strand; PAM type: NRG; PAM sequence: GGG
taatgaagtgtttatgaatt

SEQ ID NO: 150417 - DNA, 20 bp, Artificial Sequence
  Description of Artificial Sequence: Synthetic oligonucleotide
  Target: LAMA2; (+) strand; PAM type: NRG; PAM sequence: AAG
aagtgtttatgaattgggac

SEQ ID NO: 150418 - DNA, 20 bp, Artificial Sequence
  Description of Artificial Sequence: Synthetic oligonucleotide
  Target: LAMA2; (+) strand; PAM type: NRG; PAM sequence: TGG
tgaattgggacaagaatgtc

SEQ ID NO: 150419 - DNA, 20 bp, Artificial Sequence
  Description of Artificial Sequence: Synthetic oligonucleotide
  Target: LAMA2; (+) strand; PAM type: NRG; PAM sequence: AAG
caagaatgtctggaaatatc

SEQ ID NO: 150420 - DNA, 20 bp, Artificial Sequence
  Description of Artificial Sequence: Synthetic oligonucleotide
  Target: LAMA2; (+) strand; PAM type: NRG; PAM sequence: TAG
caagctaaatataataataa

SEQ ID NO: 150421 - DNA, 20 bp, Artificial Sequence
  Description of Artificial Sequence: Synthetic oligonucleotide
  Target: LAMA2; (+) strand; PAM type: NRG; PAM sequence: TAG
taataataatagttacataa

SEQ ID NO: 150422 - DNA, 20 bp, Artificial Sequence
  Description of Artificial Sequence: Synthetic oligonucleotide
  Target: LAMA2; (+) strand; PAM type: NRG; PAM sequence: AGG
aataataatagttacataat

SEQ ID NO: 150423 - DNA, 20 bp, Artificial Sequence
  Description of Artificial Sequence: Synthetic oligonucleotide
  Target: LAMA2; (+) strand; PAM type: NRG; PAM sequence: CAG
ataataggtatatgttacat

SEQ ID NO: 150424 - DNA, 20 bp, Artificial Sequence
  Description of Artificial Sequence: Synthetic oligonucleotide
  Target: LAMA2; (+) strand; PAM type: NRG; PAM sequence: AGG
taataggtatatgttacatc

SEQ ID NO: 150425 - DNA, 20 bp, Artificial Sequence
  Description of Artificial Sequence: Synthetic oligonucleotide
  Target: LAMA2; (+) strand; PAM type: NRG; PAM sequence: GGG
aataggtatatgttacatca

SEQ ID NO: 150426 - DNA, 20 bp, Artificial Sequence
  Description of Artificial Sequence: Synthetic oligonucleotide
  Target: LAMA2; (+) strand; PAM type: NRG; PAM sequence: GGG
ataggtatatgttacatcag

SEQ ID NO: 150427 - DNA, 20 bp, Artificial Sequence
  Description of Artificial Sequence: Synthetic oligonucleotide
  Target: LAMA2; (+) strand; PAM type: NRG; PAM sequence: TAG
atgttacatcaggggcaatt

SEQ ID NO: 150428 - DNA, 20 bp, Artificial Sequence
  Description of Artificial Sequence: Synthetic oligonucleotide
  Target: LAMA2; (+) strand; PAM type: NRG; PAM sequence: AGG
tgttacatcaggggcaattt

SEQ ID NO: 150429 - DNA, 20 bp, Artificial Sequence
  Description of Artificial Sequence: Synthetic oligonucleotide
  Target: LAMA2; (+) strand; PAM type: NRG; PAM sequence: TGG
ctgaaataataaaactcctg

SEQ ID NO: 150430 - DNA, 20 bp, Artificial Sequence
  Description of Artificial Sequence: Synthetic oligonucleotide
  Target: LAMA2; (+) strand; PAM type: NRG; PAM sequence: CAG
taataaaactcctgtggaca

SEQ ID NO: 150431 - DNA, 20 bp, Artificial Sequence
  Description of Artificial Sequence: Synthetic oligonucleotide
  Target: LAMA2; (+) strand; PAM type: NRG; PAM sequence: AAG
aaaactcctgtggacacagt

SEQ ID NO: 150432 - DNA, 20 bp, Artificial Sequence
  Description of Artificial Sequence: Synthetic oligonucleotide
  Target: LAMA2; (+) strand; PAM type: NRG; PAM sequence: CAG
actcctgtggacacagtaag

SEQ ID NO: 150433 - DNA, 20 bp, Artificial Sequence
  Description of Artificial Sequence: Synthetic oligonucleotide
  Target: LAMA2; (+) strand; PAM type: NRG; PAM sequence: AAG
tgtggacacagtaagcagaa

SEQ ID NO: 150434 - DNA, 20 bp, Artificial Sequence
  Description of Artificial Sequence: Synthetic oligonucleotide
  Target: LAMA2; (+) strand; PAM type: NRG; PAM sequence: AAG
cagtaagcagaaaagtccac

SEQ ID NO: 150435 - DNA, 20 bp, Artificial Sequence
  Description of Artificial Sequence: Synthetic oligonucleotide
  Target: LAMA2; (+) strand; PAM type: NRG; PAM sequence: TAG
cagaaaagtccacaagccca

SEQ ID NO: 150436 - DNA, 20 bp, Artificial Sequence
  Description of Artificial Sequence: Synthetic oligonucleotide
  Target: LAMA2; (+) strand; PAM type: NRG; PAM sequence: AAG
gtccacaagcccatagtaaa

SEQ ID NO: 150437 - DNA, 20 bp, Artificial Sequence
  Description of Artificial Sequence: Synthetic oligonucleotide
  Target: LAMA2; (+) strand; PAM type: NRG; PAM sequence: TGG
agtaaaaagttgccatgtcc

SEQ ID NO: 150438 - DNA, 20 bp, Artificial Sequence
  Description of Artificial Sequence: Synthetic oligonucleotide
  Target: LAMA2; (+) strand; PAM type: NRG; PAM sequence: TAG
agttgccatgtcctggaatg

SEQ ID NO: 150439 - DNA, 20 bp, Artificial Sequence
  Description of Artificial Sequence: Synthetic oligonucleotide
  Target: LAMA2; (+) strand; PAM type: NRG; PAM sequence: GAG
tctgaaatgaaaaattgctt

SEQ ID NO: 150440 - DNA, 20 bp, Artificial Sequence
  Description of Artificial Sequence: Synthetic oligonucleotide
  Target: LAMA2; (+) strand; PAM type: NRG; PAM sequence: AAG
aaaaattgcttgagttgacc

SEQ ID NO: 150441 - DNA, 20 bp, Artificial Sequence
  Description of Artificial Sequence: Synthetic oligonucleotide
  Target: LAMA2; (+) strand; PAM type: NRG; PAM sequence: TAG
ttgagttgaccaagattgtg

SEQ ID NO: 150442 - DNA, 20 bp, Artificial Sequence
  Description of Artificial Sequence: Synthetic oligonucleotide
  Target: LAMA2; (+) strand; PAM type: NRG; PAM sequence: CAG
agttgaccaagattgtgtag

SEQ ID NO: 150443 - DNA, 20 bp, Artificial Sequence
  Description of Artificial Sequence: Synthetic oligonucleotide
  Target: LAMA2; (+) strand; PAM type: NRG; PAM sequence: GAG
aagattgtgtagcagtgtgt

SEQ ID NO: 150444 - DNA, 20 bp, Artificial Sequence
  Description of Artificial Sequence: Synthetic oligonucleotide
  Target: LAMA2; (+) strand; PAM type: NRG; PAM sequence: AAG
gtgtgagtgattgcttgctt

SEQ ID NO: 150445 - DNA, 20 bp, Artificial Sequence
  Description of Artificial Sequence: Synthetic oligonucleotide
  Target: LAMA2; (+) strand; PAM type: NRG; PAM sequence: AGG
tgtgagtgattgcttgctta

SEQ ID NO: 150446 - DNA, 20 bp, Artificial Sequence
  Description of Artificial Sequence: Synthetic oligonucleotide
  Target: LAMA2; (+) strand; PAM type: NRG; PAM sequence: TGG
ctccatcttgtatgtctctg

SEQ ID NO: 150447 - DNA, 20 bp, Artificial Sequence
  Description of Artificial Sequence: Synthetic oligonucleotide
  Target: LAMA2; (+) strand; PAM type: NRG; PAM sequence: GGG
tccatcttgtatgtctctgt

SEQ ID NO: 150448 - DNA, 20 bp, Artificial Sequence
  Description of Artificial Sequence: Synthetic oligonucleotide
  Target: LAMA2; (+) strand; PAM type: NRG; PAM sequence: CAG
tgtctctgtgggcaatcctg

SEQ ID NO: 150449 - DNA, 20 bp, Artificial Sequence
  Description of Artificial Sequence: Synthetic oligonucleotide
  Target: LAMA2; (+) strand; PAM type: NRG; PAM sequence: AGG
gtctctgtgggcaatcctgc

SEQ ID NO: 150450 - DNA, 20 bp, Artificial Sequence
  Description of Artificial Sequence: Synthetic oligonucleotide
  Target: LAMA2; (+) strand; PAM type: NRG; PAM sequence: TAG
tgggcaatcctgcaggctct

SEQ ID NO: 150451 - DNA, 20 bp, Artificial Sequence
  Description of Artificial Sequence: Synthetic oligonucleotide
  Target: LAMA2; (+) strand; PAM type: NRG; PAM sequence: TAG
ggctcttagtgcatcttctc

SEQ ID NO: 150452 - DNA, 20 bp, Artificial Sequence
  Description of Artificial Sequence: Synthetic oligonucleotide
  Target: LAMA2; (+) strand; PAM type: NRG; PAM sequence: CAG
attctcttttcaaaactcca

SEQ ID NO: 150453 - DNA, 20 bp, Artificial Sequence
  Description of Artificial Sequence: Synthetic oligonucleotide
  Target: LAMA2; (+) strand; PAM type: NRG; PAM sequence: AAG
ctttaccacttgctcaaata

SEQ ID NO: 150454 - DNA, 20 bp, Artificial Sequence
  Description of Artificial Sequence: Synthetic oligonucleotide
  Target: LAMA2; (+) strand; PAM type: NRG; PAM sequence: AGG
tttaccacttgctcaaataa

SEQ ID NO: 150455 - DNA, 20 bp, Artificial Sequence
  Description of Artificial Sequence: Synthetic oligonucleotide
  Target: LAMA2; (+) strand; PAM type: NRG; PAM sequence: CAG
ccacttgctcaaataaagga

SEQ ID NO: 150456 - DNA, 20 bp, Artificial Sequence
  Description of Artificial Sequence: Synthetic oligonucleotide
  Target: LAMA2; (+) strand; PAM type: NRG; PAM sequence: AAG
aataaaggacagtcaaaact

SEQ ID NO: 150457 - DNA, 20 bp, Artificial Sequence
  Description of Artificial Sequence: Synthetic oligonucleotide
  Target: LAMA2; (+) strand; PAM type: NRG; PAM sequence: TGG
agtcaaaactaagcttaaaa

SEQ ID NO: 150458 - DNA, 20 bp, Artificial Sequence
  Description of Artificial Sequence: Synthetic oligonucleotide
  Target: LAMA2; (+) strand; PAM type: NRG; PAM sequence: AAG
aaactaagcttaaaatggaa

SEQ ID NO: 150459 - DNA, 20 bp, Artificial Sequence
  Description of Artificial Sequence: Synthetic oligonucleotide
  Target: LAMA2; (+) strand; PAM type: NRG; PAM sequence: GAG
aaatggaaaagaaacctcct

SEQ ID NO: 150460 - DNA, 20 bp, Artificial Sequence
  Description of Artificial Sequence: Synthetic oligonucleotide
  Target: LAMA2; (+) strand; PAM type: NRG; PAM sequence: TAG
aaagaaacctcctgagtttc

SEQ ID NO: 150461 - DNA, 20 bp, Artificial Sequence
  Description of Artificial Sequence: Synthetic oligonucleotide
  Target: LAMA2; (+) strand; PAM type: NRG; PAM sequence: CAG
ctagaatatataaaatcaaa

SEQ ID NO: 150462 - DNA, 20 bp, Artificial Sequence
  Description of Artificial Sequence: Synthetic oligonucleotide
  Target: LAMA2; (+) strand; PAM type: NRG; PAM sequence: AGG
tagaatatataaaatcaaac

SEQ ID NO: 150463 - DNA, 20 bp, Artificial Sequence
  Description of Artificial Sequence: Synthetic oligonucleotide
  Target: LAMA2; (+) strand; PAM type: NRG; PAM sequence: GGG
agaatatataaaatcaaaca

SEQ ID NO: 150464 - DNA, 20 bp, Artificial Sequence
  Description of Artificial Sequence: Synthetic oligonucleotide
  Target: LAMA2; (+) strand; PAM type: NRG; PAM sequence: AAG
atatataaaatcaaacaggg

SEQ ID NO: 150465 - DNA, 20 bp, Artificial Sequence
  Description of Artificial Sequence: Synthetic oligonucleotide
  Target: LAMA2; (+) strand; PAM type: NRG; PAM sequence: AAG
atcaaacagggaagaaaaac

SEQ ID NO: 150466 - DNA, 20 bp, Artificial Sequence
  Description of Artificial Sequence: Synthetic oligonucleotide
  Target: LAMA2; (+) strand; PAM type: NRG; PAM sequence: CAG
ttctacacctaccactcata

SEQ ID NO: 150467 - DNA, 20 bp, Artificial Sequence
  Description of Artificial Sequence: Synthetic oligonucleotide
  Target: LAMA2; (+) strand; PAM type: NRG; PAM sequence: TGG
tacacctaccactcatacag

SEQ ID NO: 150468 - DNA, 20 bp, Artificial Sequence
  Description of Artificial Sequence: Synthetic oligonucleotide
  Target: LAMA2; (+) strand; PAM type: NRG; PAM sequence: TGG
actcatacagtggtgatgtc

SEQ ID NO: 150469 - DNA, 20 bp, Artificial Sequence
  Description of Artificial Sequence: Synthetic oligonucleotide
  Target: LAMA2; (+) strand; PAM type: NRG; PAM sequence: AAG
tggtgatgtctggtatttgc

SEQ ID NO: 150470 - DNA, 20 bp, Artificial Sequence
  Description of Artificial Sequence: Synthetic oligonucleotide
  Target: LAMA2; (+) strand; PAM type: NRG; PAM sequence: AGG
ggtgatgtctggtatttgca

SEQ ID NO: 150471 - DNA, 20 bp, Artificial Sequence
  Description of Artificial Sequence: Synthetic oligonucleotide
  Target: LAMA2; (+) strand; PAM type: NRG; PAM sequence: AAG
atgtctggtatttgcaagga

SEQ ID NO: 150472 - DNA, 20 bp, Artificial Sequence
  Description of Artificial Sequence: Synthetic oligonucleotide
  Target: LAMA2; (+) strand; PAM type: NRG; PAM sequence: AGG
tgtctggtatttgcaaggaa

SEQ ID NO: 150473 - DNA, 20 bp, Artificial Sequence
  Description of Artificial Sequence: Synthetic oligonucleotide
  Target: LAMA2; (+) strand; PAM type: NRG; PAM sequence: GGG
gtctggtatttgcaaggaaa

SEQ ID NO: 150474 - DNA, 20 bp, Artificial Sequence
  Description of Artificial Sequence: Synthetic oligonucleotide
  Target: LAMA2; (+) strand; PAM type: NRG; PAM sequence: GAG
ctggtatttgcaaggaaagg

SEQ ID NO: 150475 - DNA, 20 bp, Artificial Sequence
  Description of Artificial Sequence: Synthetic oligonucleotide
  Target: LAMA2; (+) strand; PAM type: NRG; PAM sequence: AAG
ttgcaaggaaagggagtaat

SEQ ID NO: 150476 - DNA, 20 bp, Artificial Sequence
  Description of Artificial Sequence: Synthetic oligonucleotide
  Target: LAMA2; (+) strand; PAM type: NRG; PAM sequence: GAG
aaggaaagggagtaataagc

SEQ ID NO: 150477 - DNA, 20 bp, Artificial Sequence
  Description of Artificial Sequence: Synthetic oligonucleotide
  Target: LAMA2; (+) strand; PAM type: NRG; PAM sequence: TGG
ataagcgagttaattttctt

SEQ ID NO: 150478 - DNA, 20 bp, Artificial Sequence
  Description of Artificial Sequence: Synthetic oligonucleotide
  Target: LAMA2; (+) strand; PAM type: NRG; PAM sequence: TAG
ttaattttctttggtaaata

SEQ ID NO: 150479 - DNA, 20 bp, Artificial Sequence
  Description of Artificial Sequence: Synthetic oligonucleotide
  Target: LAMA2; (+) strand; PAM type: NRG; PAM sequence: GAG
ttttctttggtaaatatagc

SEQ ID NO: 150480 - DNA, 20 bp, Artificial Sequence
  Description of Artificial Sequence: Synthetic oligonucleotide
  Target: LAMA2; (+) strand; PAM type: NRG; PAM sequence: AAG
ctttggtaaatatagcgaga

SEQ ID NO: 150481 - DNA, 20 bp, Artificial Sequence
  Description of Artificial Sequence: Synthetic oligonucleotide
  Target: LAMA2; (+) strand; PAM type: NRG; PAM sequence: AGG
tttggtaaatatagcgagaa

SEQ ID NO: 150482 - DNA, 20 bp, Artificial Sequence
  Description of Artificial Sequence: Synthetic oligonucleotide
  Target: LAMA2; (+) strand; PAM type: NRG; PAM sequence: TGG
gtaaatatagcgagaaaggc

SEQ ID NO: 150483 - DNA, 20 bp, Artificial Sequence
  Description of Artificial Sequence: Synthetic oligonucleotide
  Target: LAMA2; (+) strand; PAM type: NRG; PAM sequence: GAG
aaatatagcgagaaaggctg

SEQ ID NO: 150484 - DNA, 20 bp, Artificial Sequence
  Description of Artificial Sequence: Synthetic oligonucleotide
  Target: LAMA2; (+) strand; PAM type: NRG; PAM sequence: AAG
atagcgagaaaggctggagc

SEQ ID NO: 150485 - DNA, 20 bp, Artificial Sequence
  Description of Artificial Sequence: Synthetic oligonucleotide
  Target: LAMA2; (+) strand; PAM type: NRG; PAM sequence: GAG
agcgagaaaggctggagcaa

SEQ ID NO: 150486 - DNA, 20 bp, Artificial Sequence
  Description of Artificial Sequence: Synthetic oligonucleotide
  Target: LAMA2; (+) strand; PAM type: NRG; PAM sequence: GAG
cgagaaaggctggagcaaga

SEQ ID NO: 150487 - DNA, 20 bp, Artificial Sequence
  Description of Artificial Sequence: Synthetic oligonucleotide
  Target: LAMA2; (+) strand; PAM type: NRG; PAM sequence: TAG
aggctggagcaagagagctg

SEQ ID NO: 150488 - DNA, 20 bp, Artificial Sequence
  Description of Artificial Sequence: Synthetic oligonucleotide
  Target: LAMA2; (+) strand; PAM type: NRG; PAM sequence: TAG
agcaagagagctgtagtgat

SEQ ID NO: 150489 - DNA, 20 bp, Artificial Sequence
  Description of Artificial Sequence: Synthetic oligonucleotide
  Target: LAMA2; (+) strand; PAM type: NRG; PAM sequence: CAG
aagagagctgtagtgattag

SEQ ID NO: 150490 - DNA, 20 bp, Artificial Sequence
  Description of Artificial Sequence: Synthetic oligonucleotide
  Target: LAMA2; (+) strand; PAM type: NRG; PAM sequence: AGG
agagagctgtagtgattagc

SEQ ID NO: 150491 - DNA, 20 bp, Artificial Sequence
  Description of Artificial Sequence: Synthetic oligonucleotide
  Target: LAMA2; (+) strand; PAM type: NRG; PAM sequence: GGG
gagagctgtagtgattagca

SEQ ID NO: 150492 - DNA, 20 bp, Artificial Sequence
  Description of Artificial Sequence: Synthetic oligonucleotide
  Target: LAMA2; (+) strand; PAM type: NRG; PAM sequence: AAG
gtagtgattagcagggctcc

SEQ ID NO: 150493 - DNA, 20 bp, Artificial Sequence
  Description of Artificial Sequence: Synthetic oligonucleotide
  Target: LAMA2; (+) strand; PAM type: NRG; PAM sequence: AGG
tagtgattagcagggctcca

SEQ ID NO: 150494 - DNA, 20 bp, Artificial Sequence
  Description of Artificial Sequence: Synthetic oligonucleotide
  Target: LAMA2; (+) strand; PAM type: NRG; PAM sequence: GGG
agtgattagcagggctccaa

SEQ ID NO: 150495 - DNA, 20 bp, Artificial Sequence
  Description of Artificial Sequence: Synthetic oligonucleotide
  Target: LAMA2; (+) strand; PAM type: NRG; PAM sequence: AAG
attagcagggctccaaggga

SEQ ID NO: 150496 - DNA, 20 bp, Artificial Sequence
  Description of Artificial Sequence: Synthetic oligonucleotide
  Target: LAMA2; (+) strand; PAM type: NRG; PAM sequence: GAG
gctccaagggaaagcccctt

SEQ ID NO: 150497 - DNA, 20 bp, Artificial Sequence
  Description of Artificial Sequence: Synthetic oligonucleotide
  Target: LAMA2; (+) strand; PAM type: NRG; PAM sequence: CAG
agctacttactgcctgctct

SEQ ID NO: 150498 - DNA, 20 bp, Artificial Sequence
  Description of Artificial Sequence: Synthetic oligonucleotide
  Target: LAMA2; (+) strand; PAM type: NRG; PAM sequence: GAG
gccgaactcaatattgtact

SEQ ID NO: 150499 - DNA, 20 bp, Artificial Sequence
  Description of Artificial Sequence: Synthetic oligonucleotide
  Target: LAMA2; (+) strand; PAM type: NRG; PAM sequence: AAG
agaattattataatcctaat

SEQ ID NO: 150500 - DNA, 20 bp, Artificial Sequence
  Description of Artificial Sequence: Synthetic oligonucleotide
  Target: LAMA2; (+) strand; PAM type: NRG; PAM sequence: AAG
ttattataatcctaataaga

SEQ ID NO: 150501 - DNA, 20 bp, Artificial Sequence
  Description of Artificial Sequence: Synthetic oligonucleotide
  Target: LAMA2; (+) strand; PAM type: NRG; PAM sequence: TAG
taagaaagatgcctcctgtg

SEQ ID NO: 150502 - DNA, 20 bp, Artificial Sequence
  Description of Artificial Sequence: Synthetic oligonucleotide
  Target: LAMA2; (+) strand; PAM type: NRG; PAM sequence: AAG
gcctcctgtgtagacacttg

SEQ ID NO: 150503 - DNA, 20 bp, Artificial Sequence
  Description of Artificial Sequence: Synthetic oligonucleotide
  Target: LAMA2; (+) strand; PAM type: NRG; PAM sequence: CAG
tagacacttgaagctctaca

SEQ ID NO: 150504 - DNA, 20 bp, Artificial Sequence
  Description of Artificial Sequence: Synthetic oligonucleotide
  Target: LAMA2; (+) strand; PAM type: NRG; PAM sequence: CAG
aattaaaatgcaacaataaa

SEQ ID NO: 150505 - DNA, 20 bp, Artificial Sequence
  Description of Artificial Sequence: Synthetic oligonucleotide
  Target: LAMA2; (+) strand; PAM type: NRG; PAM sequence: AAG
tgcaacaataaacagcaatt

SEQ ID NO: 150506 - DNA, 20 bp, Artificial Sequence
  Description of Artificial Sequence: Synthetic oligonucleotide
  Target: LAMA2; (+) strand; PAM type: NRG; PAM sequence: AAG
cagcaattaagaaatcataa

SEQ ID NO: 150507 - DNA, 20 bp, Artificial Sequence
  Description of Artificial Sequence: Synthetic oligonucleotide
  Target: LAMA2; (+) strand; PAM type: NRG; PAM sequence: GAG
gcaattaagaaatcataaaa

SEQ ID NO: 150508 - DNA, 20 bp, Artificial Sequence
  Description of Artificial Sequence: Synthetic oligonucleotide
  Target: LAMA2; (+) strand; PAM type: NRG; PAM sequence: AAG
cataaaagagaatgaaaatt

SEQ ID NO: 150509 - DNA, 20 bp, Artificial Sequence
  Description of Artificial Sequence: Synthetic oligonucleotide
  Target: LAMA2; (+) strand; PAM type: NRG; PAM sequence: TAG
gagaatgaaaattaagtaaa

SEQ ID NO: 150510 - DNA, 20 bp, Artificial Sequence
  Description of Artificial Sequence: Synthetic oligonucleotide
  Target: LAMA2; (+) strand; PAM type: NRG; PAM sequence: TAG
ctaccatgtgatatcttaaa

SEQ ID NO: 150511 - DNA, 20 bp, Artificial Sequence
  Description of Artificial Sequence: Synthetic oligonucleotide
  Target: LAMA2; (+) strand; PAM type: NRG; PAM sequence: AAG
tatcttaaatagaaaactgt

SEQ ID NO: 150512 - DNA, 20 bp, Artificial Sequence
  Description of Artificial Sequence: Synthetic oligonucleotide
  Target: LAMA2; (+) strand; PAM type: NRG; PAM sequence: CAG
tcttataaactaaattgttt

SEQ ID NO: 150513 - DNA, 20 bp, Artificial Sequence
  Description of Artificial Sequence: Synthetic oligonucleotide
  Target: LAMA2; (+) strand; PAM type: NRG; PAM sequence: AGG
cttataaactaaattgtttc

SEQ ID NO: 150514 - DNA, 20 bp, Artificial Sequence
  Description of Artificial Sequence: Synthetic oligonucleotide
  Target: LAMA2; (+) strand; PAM type: NRG; PAM sequence: CAG
gtttcaggattaaaaacttg

SEQ ID NO: 150515 - DNA, 20 bp, Artificial Sequence
  Description of Artificial Sequence: Synthetic oligonucleotide
  Target: LAMA2; (+) strand; PAM type: NRG; PAM sequence: AAG
caggattaaaaacttgcaga

SEQ ID NO: 150516 - DNA, 20 bp, Artificial Sequence
  Description of Artificial Sequence: Synthetic oligonucleotide
  Target: LAMA2; (+) strand; PAM type: NRG; PAM sequence: AAG
attaaaaacttgcagaaagc

SEQ ID NO: 150517 - DNA, 20 bp, Artificial Sequence
  Description of Artificial Sequence: Synthetic oligonucleotide
  Target: LAMA2; (+) strand; PAM type: NRG; PAM sequence: CAG
atataacatgaattacatca

SEQ ID NO: 150518 - DNA, 20 bp, Artificial Sequence
  Description of Artificial Sequence: Synthetic oligonucleotide
  Target: LAMA2; (+) strand; PAM type: NRG; PAM sequence: GAG
atatcacaatatgccacgat

SEQ ID NO: 150519 - DNA, 20 bp, Artificial Sequence
  Description of Artificial Sequence: Synthetic oligonucleotide
  Target: LAMA2; (+) strand; PAM type: NRG; PAM sequence: AAG
gcatgcaatgtactacaatt

SEQ ID NO: 150520 - DNA, 20 bp, Artificial Sequence
  Description of Artificial Sequence: Synthetic oligonucleotide
  Target: LAMA2; (+) strand; PAM type: NRG; PAM sequence: CAG
gtactacaattaagtgccta

SEQ ID NO: 150521 - DNA, 20 bp, Artificial Sequence
  Description of Artificial Sequence: Synthetic oligonucleotide
  Target: LAMA2; (+) strand; PAM type: NRG; PAM sequence: TAG
ttaaaaaataattaataacc

SEQ ID NO: 150522 - DNA, 20 bp, Artificial Sequence
  Description of Artificial Sequence: Synthetic oligonucleotide
  Target: LAMA2; (+) strand; PAM type: NRG; PAM sequence: AAG
catacaatttaaatactgaa

SEQ ID NO: 150523 - DNA, 20 bp, Artificial Sequence
  Description of Artificial Sequence: Synthetic oligonucleotide
  Target: LAMA2; (+) strand; PAM type: NRG; PAM sequence: TAG
ttaaatactgaaaagacact

SEQ ID NO: 150524 - DNA, 20 bp, Artificial Sequence
  Description of Artificial Sequence: Synthetic oligonucleotide
  Target: LAMA2; (+) strand; PAM type: NRG; PAM sequence: TAG
tactgaaaagacacttagtg

SEQ ID NO: 150525 - DNA, 20 bp, Artificial Sequence
  Description of Artificial Sequence: Synthetic oligonucleotide
  Target: LAMA2; (+) strand; PAM type: NRG; PAM sequence: AAG
tagtgtatttaaatactgaa

SEQ ID NO: 150526 - DNA, 20 bp, Artificial Sequence
  Description of Artificial Sequence: Synthetic oligonucleotide
  Target: LAMA2; (+) strand; PAM type: NRG; PAM sequence: TAG
ttaaatactgaaaagacact

SEQ ID NO: 150527 - DNA, 20 bp, Artificial Sequence
  Description of Artificial Sequence: Synthetic oligonucleotide
  Target: LAMA2; (+) strand; PAM type: NRG; PAM sequence: TAG
tactgaaaagacacttagtg

SEQ ID NO: 150528 - DNA, 20 bp, Artificial Sequence
  Description of Artificial Sequence: Synthetic oligonucleotide
  Target: LAMA2; (+) strand; PAM type: NRG; PAM sequence: AAG
tagtgtatttaaatactgaa

SEQ ID NO: 150529 - DNA, 20 bp, Artificial Sequence
  Description of Artificial Sequence: Synthetic oligonucleotide
  Target: LAMA2; (+) strand; PAM type: NRG; PAM sequence: CAG
tgaaaagacacttaatgtaa

SEQ ID NO: 150530 - DNA, 20 bp, Artificial Sequence
  Description of Artificial Sequence: Synthetic oligonucleotide
  Target: LAMA2; (+) strand; PAM type: NRG; PAM sequence: TAG
cacaaaaacatgatttgaca

SEQ ID NO: 150531 - DNA, 20 bp, Artificial Sequence
  Description of Artificial Sequence: Synthetic oligonucleotide
  Target: LAMA2; (+) strand; PAM type: NRG; PAM sequence: CAG
atgtcaactgattgtaaaaa

SEQ ID NO: 150532 - DNA, 20 bp, Artificial Sequence
  Description of Artificial Sequence: Synthetic oligonucleotide
  Target: LAMA2; (+) strand; PAM type: NRG; PAM sequence: TGG
aactgattgtaaaaacagca

SEQ ID NO: 150533 - DNA, 20 bp, Artificial Sequence
  Description of Artificial Sequence: Synthetic oligonucleotide
  Target: LAMA2; (+) strand; PAM type: NRG; PAM sequence: AAG
catggatcaaaatgctgctt

SEQ ID NO: 150534 - DNA, 20 bp, Artificial Sequence
  Description of Artificial Sequence: Synthetic oligonucleotide
  Target: LAMA2; (+) strand; PAM type: NRG; PAM sequence: AAG
ggatcaaaatgctgcttaag

SEQ ID NO: 150535 - DNA, 20 bp, Artificial Sequence
  Description of Artificial Sequence: Synthetic oligonucleotide
  Target: LAMA2; (+) strand; PAM type: NRG; PAM sequence: AAG
aagaagcaaaattttattga

SEQ ID NO: 150536 - DNA, 20 bp, Artificial Sequence
  Description of Artificial Sequence: Synthetic oligonucleotide
  Target: LAMA2; (+) strand; PAM type: NRG; PAM sequence: TGG
ttattgaaagactaaaatat

SEQ ID NO: 150537 - DNA, 20 bp, Artificial Sequence
  Description of Artificial Sequence: Synthetic oligonucleotide
  Target: LAMA2; (+) strand; PAM type: NRG; PAM sequence: GAG
attgaaagactaaaatattg

SEQ ID NO: 150538 - DNA, 20 bp, Artificial Sequence
  Description of Artificial Sequence: Synthetic oligonucleotide
  Target: LAMA2; (+) strand; PAM type: NRG; PAM sequence: CAG
tataaattcaaattaaatga

SEQ ID NO: 150539 - DNA, 20 bp, Artificial Sequence
  Description of Artificial Sequence: Synthetic oligonucleotide
  Target: LAMA2; (+) strand; PAM type: NRG; PAM sequence: AGG
ataaattcaaattaaatgac

SEQ ID NO: 150540 - DNA, 20 bp, Artificial Sequence
  Description of Artificial Sequence: Synthetic oligonucleotide
  Target: LAMA2; (+) strand; PAM type: NRG; PAM sequence: TAG
caaattaaatgacaggtttt

SEQ ID NO: 150541 - DNA, 20 bp, Artificial Sequence
  Description of Artificial Sequence: Synthetic oligonucleotide
  Target: LAMA2; (+) strand; PAM type: NRG; PAM sequence: CAG
attaaatgacaggtttttag

SEQ ID NO: 150542 - DNA, 20 bp, Artificial Sequence
  Description of Artificial Sequence: Synthetic oligonucleotide
  Target: LAMA2; (+) strand; PAM type: NRG; PAM sequence: AAG
aaatgacaggtttttagcag

SEQ ID NO: 150543 - DNA, 20 bp, Artificial Sequence
  Description of Artificial Sequence: Synthetic oligonucleotide
  Target: LAMA2; (+) strand; PAM type: NRG; PAM sequence: AGG
aatgacaggtttttagcaga

SEQ ID NO: 150544 - DNA, 20 bp, Artificial Sequence
  Description of Artificial Sequence: Synthetic oligonucleotide
  Target: LAMA2; (+) strand; PAM type: NRG; PAM sequence: GGG
atgacaggtttttagcagaa

SEQ ID NO: 150545 - DNA, 20 bp, Artificial Sequence
  Description of Artificial Sequence: Synthetic oligonucleotide
  Target: LAMA2; (+) strand; PAM type: NRG; PAM sequence: GGG
tgacaggtttttagcagaag

SEQ ID NO: 150546 - DNA, 20 bp, Artificial Sequence
  Description of Artificial Sequence: Synthetic oligonucleotide
  Target: LAMA2; (+) strand; PAM type: NRG; PAM sequence: AAG
caggtttttagcagaagggg

SEQ ID NO: 150547 - DNA, 20 bp, Artificial Sequence
  Description of Artificial Sequence: Synthetic oligonucleotide
  Target: LAMA2; (+) strand; PAM type: NRG; PAM sequence: AAG
aaggggaagaatatatacat

SEQ ID NO: 150548 - DNA, 20 bp, Artificial Sequence
  Description of Artificial Sequence: Synthetic oligonucleotide
  Target: LAMA2; (+) strand; PAM type: NRG; PAM sequence: AAG
gtgtccatatatttctatcc

SEQ ID NO: 150549 - DNA, 20 bp, Artificial Sequence
  Description of Artificial Sequence: Synthetic oligonucleotide
  Target: LAMA2; (+) strand; PAM type: NRG; PAM sequence: TAG
ccatatatttctatccaagt

SEQ ID NO: 150550 - DNA, 20 bp, Artificial Sequence
  Description of Artificial Sequence: Synthetic oligonucleotide
  Target: LAMA2; (+) strand; PAM type: NRG; PAM sequence: AAG
ccaagttagtaactttaaat

SEQ ID NO: 150551 - DNA, 20 bp, Artificial Sequence
  Description of Artificial Sequence: Synthetic oligonucleotide
  Target: LAMA2; (+) strand; PAM type: NRG; PAM sequence: TAG
aataagtatttatctgtaaa

SEQ ID NO: 150552 - DNA, 20 bp, Artificial Sequence
  Description of Artificial Sequence: Synthetic oligonucleotide
  Target: LAMA2; (+) strand; PAM type: NRG; PAM sequence: AAG
atatgaaataatgtgtatat

SEQ ID NO: 150553 - DNA, 20 bp, Artificial Sequence
  Description of Artificial Sequence: Synthetic oligonucleotide
  Target: LAMA2; (+) strand; PAM type: NRG; PAM sequence: GAG
tctcttatactataacatat

SEQ ID NO: 150554 - DNA, 20 bp, Artificial Sequence
  Description of Artificial Sequence: Synthetic oligonucleotide
  Target: LAMA2; (+) strand; PAM type: NRG; PAM sequence: TAG
ataacatatgagtttttaaa

SEQ ID NO: 150555 - DNA, 20 bp, Artificial Sequence
  Description of Artificial Sequence: Synthetic oligonucleotide
  Target: LAMA2; (+) strand; PAM type: NRG; PAM sequence: CAG
tttaaatagtttttttttat

SEQ ID NO: 150556 - DNA, 20 bp, Artificial Sequence
  Description of Artificial Sequence: Synthetic oligonucleotide
  Target: LAMA2; (+) strand; PAM type: NRG; PAM sequence: AAG
aatagtttttttttatcaga

SEQ ID NO: 150557 - DNA, 20 bp, Artificial Sequence
  Description of Artificial Sequence: Synthetic oligonucleotide
  Target: LAMA2; (+) strand; PAM type: NRG; PAM sequence: AAG
cagaaagaaatatcttactg

SEQ ID NO: 150558 - DNA, 20 bp, Artificial Sequence
  Description of Artificial Sequence: Synthetic oligonucleotide
  Target: LAMA2; (+) strand; PAM type: NRG; PAM sequence: AAG
aaatatcttactgaagtgtg

SEQ ID NO: 150559 - DNA, 20 bp, Artificial Sequence
  Description of Artificial Sequence: Synthetic oligonucleotide
  Target: LAMA2; (+) strand; PAM type: NRG; PAM sequence: AAG
agtgtgaagacatttttaaa

SEQ ID NO: 150560 - DNA, 20 bp, Artificial Sequence
  Description of Artificial Sequence: Synthetic oligonucleotide
  Target: LAMA2; (+) strand; PAM type: NRG; PAM sequence: GAG
tgtgaagacatttttaaaaa

SEQ ID NO: 150561 - DNA, 20 bp, Artificial Sequence
  Description of Artificial Sequence: Synthetic oligonucleotide
  Target: LAMA2; (+) strand; PAM type: NRG; PAM sequence: TAG
atttttaaaaagagcttcat

SEQ ID NO: 150562 - DNA, 20 bp, Artificial Sequence
  Description of Artificial Sequence: Synthetic oligonucleotide
  Target: LAMA2; (+) strand; PAM type: NRG; PAM sequence: AGG
tttttaaaaagagcttcatt

SEQ ID NO: 150563 - DNA, 20 bp, Artificial Sequence
  Description of Artificial Sequence: Synthetic oligonucleotide
  Target: LAMA2; (+) strand; PAM type: NRG; PAM sequence: AAG
ttaaaaagagcttcattagg

SEQ ID NO: 150564 - DNA, 20 bp, Artificial Sequence
  Description of Artificial Sequence: Synthetic oligonucleotide
  Target: LAMA2; (+) strand; PAM type: NRG; PAM sequence: TGG
agagcttcattaggaagtct

SEQ ID NO: 150565 - DNA, 20 bp, Artificial Sequence
  Description of Artificial Sequence: Synthetic oligonucleotide
  Target: LAMA2; (+) strand; PAM type: NRG; PAM sequence: GGG
gagcttcattaggaagtctt

SEQ ID NO: 150566 - DNA, 20 bp, Artificial Sequence
  Description of Artificial Sequence: Synthetic oligonucleotide
  Target: LAMA2; (+) strand; PAM type: NRG; PAM sequence: GAG
ttaaatgactgctctgtgat

SEQ ID NO: 150567 - DNA, 20 bp, Artificial Sequence
  Description of Artificial Sequence: Synthetic oligonucleotide
  Target: LAMA2; (+) strand; PAM type: NRG; PAM sequence: CAG
gctctgtgatgagcccattt

SEQ ID NO: 150568 - DNA, 20 bp, Artificial Sequence
  Description of Artificial Sequence: Synthetic oligonucleotide
  Target: LAMA2; (+) strand; PAM type: NRG; PAM sequence: GAG
gtgatgagcccatttcagtt

SEQ ID NO: 150569 - DNA, 20 bp, Artificial Sequence
  Description of Artificial Sequence: Synthetic oligonucleotide
  Target: LAMA2; (+) strand; PAM type: NRG; PAM sequence: AGG
tgatgagcccatttcagttg

SEQ ID NO: 150570 - DNA, 20 bp, Artificial Sequence
  Description of Artificial Sequence: Synthetic oligonucleotide
  Target: LAMA2; (+) strand; PAM type: NRG; PAM sequence: TGG
aggctgtattatttttcctg

SEQ ID NO: 150571 - DNA, 20 bp, Artificial Sequence
  Description of Artificial Sequence: Synthetic oligonucleotide
  Target: LAMA2; (+) strand; PAM type: NRG; PAM sequence: GGG
ggctgtattatttttcctgt

SEQ ID NO: 150572 - DNA, 20 bp, Artificial Sequence
  Description of Artificial Sequence: Synthetic oligonucleotide
  Target: LAMA2; (+) strand; PAM type: NRG; PAM sequence: GAG
tgtgggtaaaatgacatact

SEQ ID NO: 150573 - DNA, 20 bp, Artificial Sequence
  Description of Artificial Sequence: Synthetic oligonucleotide
  Target: LAMA2; (+) strand; PAM type: NRG; PAM sequence: TGG
aatgacatactgagctgata

SEQ ID NO: 150574 - DNA, 20 bp, Artificial Sequence
  Description of Artificial Sequence: Synthetic oligonucleotide
  Target: LAMA2; (+) strand; PAM type: NRG; PAM sequence: CAG
cttttgctattttaaaaata

SEQ ID NO: 150575 - DNA, 20 bp, Artificial Sequence
  Description of Artificial Sequence: Synthetic oligonucleotide
  Target: LAMA2; (+) strand; PAM type: NRG; PAM sequence: TAG
acagatatgctgcataaaca

SEQ ID NO: 150576 - DNA, 20 bp, Artificial Sequence
  Description of Artificial Sequence: Synthetic oligonucleotide
  Target: LAMA2; (+) strand; PAM type: NRG; PAM sequence: TAG
tgctgcataaacatagcaaa

SEQ ID NO: 150577 - DNA, 20 bp, Artificial Sequence
  Description of Artificial Sequence: Synthetic oligonucleotide
  Target: LAMA2; (+) strand; PAM type: NRG; PAM sequence: TAG
caaatagatttataaacatt

SEQ ID NO: 150578 - DNA, 20 bp, Artificial Sequence
  Description of Artificial Sequence: Synthetic oligonucleotide
  Target: LAMA2; (+) strand; PAM type: NRG; PAM sequence: AAG
atttataaacatttagattc

SEQ ID NO: 150579 - DNA, 20 bp, Artificial Sequence
  Description of Artificial Sequence: Synthetic oligonucleotide
  Target: LAMA2; (+) strand; PAM type: NRG; PAM sequence: AAG
ataaacatttagattcaaga

SEQ ID NO: 150580 - DNA, 20 bp, Artificial Sequence
  Description of Artificial Sequence: Synthetic oligonucleotide
  Target: LAMA2; (+) strand; PAM type: NRG; PAM sequence: AAG
acatttagattcaagaaaga

SEQ ID NO: 150581 - DNA, 20 bp, Artificial Sequence
  Description of Artificial Sequence: Synthetic oligonucleotide
  Target: LAMA2; (+) strand; PAM type: NRG; PAM sequence: AGG
catttagattcaagaaagaa

SEQ ID NO: 150582 - DNA, 20 bp, Artificial Sequence
  Description of Artificial Sequence: Synthetic oligonucleotide
  Target: LAMA2; (+) strand; PAM type: NRG; PAM sequence: GGG
atttagattcaagaaagaaa

SEQ ID NO: 150583 - DNA, 20 bp, Artificial Sequence
  Description of Artificial Sequence: Synthetic oligonucleotide
  Target: LAMA2; (+) strand; PAM type: NRG; PAM sequence: TAG
aagaaagaaagggaaattcc

SEQ ID NO: 150584 - DNA, 20 bp, Artificial Sequence
  Description of Artificial Sequence: Synthetic oligonucleotide
  Target: LAMA2; (+) strand; PAM type: NRG; PAM sequence: CAG
aaagggaaattcctagatgt

SEQ ID NO: 150585 - DNA, 20 bp, Artificial Sequence
  Description of Artificial Sequence: Synthetic oligonucleotide
  Target: LAMA2; (+) strand; PAM type: NRG; PAM sequence: AAG
aattcctagatgtcagacca

SEQ ID NO: 150586 - DNA, 20 bp, Artificial Sequence
  Description of Artificial Sequence: Synthetic oligonucleotide
  Target: LAMA2; (+) strand; PAM type: NRG; PAM sequence: GAG
ttcctagatgtcagaccaaa

SEQ ID NO: 150587 - DNA, 20 bp, Artificial Sequence
  Description of Artificial Sequence: Synthetic oligonucleotide
  Target: LAMA2; (+) strand; PAM type: NRG; PAM sequence: AGG
tcctagatgtcagaccaaag

SEQ ID NO: 150588 - DNA, 20 bp, Artificial Sequence
  Description of Artificial Sequence: Synthetic oligonucleotide
  Target: LAMA2; (+) strand; PAM type: NRG; PAM sequence: GGG
cctagatgtcagaccaaaga

SEQ ID NO: 150589 - DNA, 20 bp, Artificial Sequence
  Description of Artificial Sequence: Synthetic oligonucleotide
  Target: LAMA2; (+) strand; PAM type: NRG; PAM sequence: AAG
cagaccaaagagggaaatct

SEQ ID NO: 150590 - DNA, 20 bp, Artificial Sequence
  Description of Artificial Sequence: Synthetic oligonucleotide
  Target: LAMA2; (+) strand; PAM type: NRG; PAM sequence: AAG
caaagagggaaatctaagtt

SEQ ID NO: 150591 - DNA, 20 bp, Artificial Sequence
  Description of Artificial Sequence: Synthetic oligonucleotide
  Target: LAMA2; (+) strand; PAM type: NRG; PAM sequence: AAG
gggaaatctaagttaagcat

SEQ ID NO: 150592 - DNA, 20 bp, Artificial Sequence
  Description of Artificial Sequence: Synthetic oligonucleotide
  Target: LAMA2; (+) strand; PAM type: NRG; PAM sequence: AAG
tctaagttaagcataagcaa

SEQ ID NO: 150593 - DNA, 20 bp, Artificial Sequence
  Description of Artificial Sequence: Synthetic oligonucleotide
  Target: LAMA2; (+) strand; PAM type: NRG; PAM sequence: AAG
ttaagcataagcaaaagctc

SEQ ID NO: 150594 - DNA, 20 bp, Artificial Sequence
  Description of Artificial Sequence: Synthetic oligonucleotide
  Target: LAMA2; (+) strand; PAM type: NRG; PAM sequence: GAG
gcaaaagctcaagctaaact

SEQ ID NO: 150595 - DNA, 20 bp, Artificial Sequence
  Description of Artificial Sequence: Synthetic oligonucleotide
  Target: LAMA2; (+) strand; PAM type: NRG; PAM sequence: TGG
ctcaagctaaactgagcaac

SEQ ID NO: 150596 - DNA, 20 bp, Artificial Sequence
  Description of Artificial Sequence: Synthetic oligonucleotide
  Target: LAMA2; (+) strand; PAM type: NRG; PAM sequence: GGG
tcaagctaaactgagcaact

SEQ ID NO: 150597 - DNA, 20 bp, Artificial Sequence
  Description of Artificial Sequence: Synthetic oligonucleotide
  Target: LAMA2; (+) strand; PAM type: NRG; PAM sequence: GGG
caagctaaactgagcaactg

SEQ ID NO: 150598 - DNA, 20 bp, Artificial Sequence
  Description of Artificial Sequence: Synthetic oligonucleotide
  Target: LAMA2; (+) strand; PAM type: NRG; PAM sequence: TGG
aaactgagcaactggggtca

SEQ ID NO: 150599 - DNA, 20 bp, Artificial Sequence
  Description of Artificial Sequence: Synthetic oligonucleotide
  Target: LAMA2; (+) strand; PAM type: NRG; PAM sequence: GGG
aactgagcaactggggtcat

SEQ ID NO: 150600 - DNA, 20 bp, Artificial Sequence
  Description of Artificial Sequence: Synthetic oligonucleotide
  Target: LAMA2; (+) strand; PAM type: NRG; PAM sequence: GGG
actgagcaactggggtcatg

SEQ ID NO: 150601 - DNA, 20 bp, Artificial Sequence
  Description of Artificial Sequence: Synthetic oligonucleotide
  Target: LAMA2; (+) strand; PAM type: NRG; PAM sequence: TGG
gagcaactggggtcatgggg

SEQ ID NO: 150602 - DNA, 20 bp, Artificial Sequence
  Description of Artificial Sequence: Synthetic oligonucleotide
  Target: LAMA2; (+) strand; PAM type: NRG; PAM sequence: GAG
gcaactggggtcatggggtg

SEQ ID NO: 150603 - DNA, 20 bp, Artificial Sequence
  Description of Artificial Sequence: Synthetic oligonucleotide
  Target: LAMA2; (+) strand; PAM type: NRG; PAM sequence: AGG
caactggggtcatggggtgg

SEQ ID NO: 150604 - DNA, 20 bp, Artificial Sequence
  Description of Artificial Sequence: Synthetic oligonucleotide
  Target: LAMA2; (+) strand; PAM type: NRG; PAM sequence: GGG
aactggggtcatggggtgga

SEQ ID NO: 150605 - DNA, 20 bp, Artificial Sequence
  Description of Artificial Sequence: Synthetic oligonucleotide
  Target: LAMA2; (+) strand; PAM type: NRG; PAM sequence: TGG
tggggtcatggggtggaggg

SEQ ID NO: 150606 - DNA, 20 bp, Artificial Sequence
  Description of Artificial Sequence: Synthetic oligonucleotide
  Target: LAMA2; (+) strand; PAM type: NRG; PAM sequence: GGG
ggggtcatggggtggagggt

SEQ ID NO: 150607 - DNA, 20 bp, Artificial Sequence
  Description of Artificial Sequence: Synthetic oligonucleotide
  Target: LAMA2; (+) strand; PAM type: NRG; PAM sequence: GAG
ggtcatggggtggagggtgg

SEQ ID NO: 150608 - DNA, 20 bp, Artificial Sequence
  Description of Artificial Sequence: Synthetic oligonucleotide
  Target: LAMA2; (+) strand; PAM type: NRG; PAM sequence: AAG
tggggtggagggtgggagac

SEQ ID NO: 150609 - DNA, 20 bp, Artificial Sequence
  Description of Artificial Sequence: Synthetic oligonucleotide
  Target: LAMA2; (+) strand; PAM type: NRG; PAM sequence: TAG
ggagggtgggagacaagtct

SEQ ID NO: 150610 - DNA, 20 bp, Artificial Sequence
  Description of Artificial Sequence: Synthetic oligonucleotide
  Target: LAMA2; (+) strand; PAM type: NRG; PAM sequence: AAG
gggagacaagtcttagttct

SEQ ID NO: 150611 - DNA, 20 bp, Artificial Sequence
  Description of Artificial Sequence: Synthetic oligonucleotide
  Target: LAMA2; (+) strand; PAM type: NRG; PAM sequence: CAG
acaagtcttagttctaagat

SEQ ID NO: 150612 - DNA, 20 bp, Artificial Sequence
  Description of Artificial Sequence: Synthetic oligonucleotide
  Target: LAMA2; (+) strand; PAM type: NRG; PAM sequence: AGG
caagtcttagttctaagatc

SEQ ID NO: 150613 - DNA, 20 bp, Artificial Sequence
  Description of Artificial Sequence: Synthetic oligonucleotide
  Target: LAMA2; (+) strand; PAM type: NRG; PAM sequence: GGG
aagtcttagttctaagatca

SEQ ID NO: 150614 - DNA, 20 bp, Artificial Sequence
  Description of Artificial Sequence: Synthetic oligonucleotide
  Target: LAMA2; (+) strand; PAM type: NRG; PAM sequence: AAG
tagttctaagatcagggcta

SEQ ID NO: 150615 - DNA, 20 bp, Artificial Sequence
  Description of Artificial Sequence: Synthetic oligonucleotide
  Target: LAMA2; (+) strand; PAM type: NRG; PAM sequence: TGG
ctaagatcagggctaaagtt

SEQ ID NO: 150616 - DNA, 20 bp, Artificial Sequence
  Description of Artificial Sequence: Synthetic oligonucleotide
  Target: LAMA2; (+) strand; PAM type: NRG; PAM sequence: GAG
aagatcagggctaaagtttg

SEQ ID NO: 150617 - DNA, 20 bp, Artificial Sequence
  Description of Artificial Sequence: Synthetic oligonucleotide
  Target: LAMA2; (+) strand; PAM type: NRG; PAM sequence: TAG
tggagttttaatgccctcac

SEQ ID NO: 150618 - DNA, 20 bp, Artificial Sequence
  Description of Artificial Sequence: Synthetic oligonucleotide
  Target: LAMA2; (+) strand; PAM type: NRG; PAM sequence: AGG
ggagttttaatgccctcact

SEQ ID NO: 150619 - DNA, 20 bp, Artificial Sequence
  Description of Artificial Sequence: Synthetic oligonucleotide
  Target: LAMA2; (+) strand; PAM type: NRG; PAM sequence: TAG
ccctcactaggacttgacac

SEQ ID NO: 150620 - DNA, 20 bp, Artificial Sequence
  Description of Artificial Sequence: Synthetic oligonucleotide
  Target: LAMA2; (+) strand; PAM type: NRG; PAM sequence: AGG
cctcactaggacttgacact

SEQ ID NO: 150621 - DNA, 20 bp, Artificial Sequence
  Description of Artificial Sequence: Synthetic oligonucleotide
  Target: LAMA2; (+) strand; PAM type: NRG; PAM sequence: TGG
taggacttgacactaggatt

SEQ ID NO: 150622 - DNA, 20 bp, Artificial Sequence
  Description of Artificial Sequence: Synthetic oligonucleotide
  Target: LAMA2; (+) strand; PAM type: NRG; PAM sequence: CAG
gacactaggatttggaccca

SEQ ID NO: 150623 - DNA, 20 bp, Artificial Sequence
  Description of Artificial Sequence: Synthetic oligonucleotide
  Target: LAMA2; (+) strand; PAM type: NRG; PAM sequence: CGG
ctaggatttggacccacaga

SEQ ID NO: 150624 - DNA, 20 bp, Artificial Sequence
  Description of Artificial Sequence: Synthetic oligonucleotide
  Target: LAMA2; (+) strand; PAM type: NRG; PAM sequence: CAG
ggacccacagacggaaattg

SEQ ID NO: 150625 - DNA, 20 bp, Artificial Sequence
  Description of Artificial Sequence: Synthetic oligonucleotide
  Target: LAMA2; (+) strand; PAM type: NRG; PAM sequence: AAG
aattgcagctgaactccctg

SEQ ID NO: 150626 - DNA, 20 bp, Artificial Sequence
  Description of Artificial Sequence: Synthetic oligonucleotide
  Target: LAMA2; (+) strand; PAM type: NRG; PAM sequence: CAG
tgcagctgaactccctgaag

SEQ ID NO: 150627 - DNA, 20 bp, Artificial Sequence
  Description of Artificial Sequence: Synthetic oligonucleotide
  Target: LAMA2; (+) strand; PAM type: NRG; PAM sequence: AGG
gcagctgaactccctgaagc

SEQ ID NO: 150628 - DNA, 20 bp, Artificial Sequence
  Description of Artificial Sequence: Synthetic oligonucleotide
  Target: LAMA2; (+) strand; PAM type: NRG; PAM sequence: GGG
cagctgaactccctgaagca

SEQ ID NO: 150629 - DNA, 20 bp, Artificial Sequence
  Description of Artificial Sequence: Synthetic oligonucleotide
  Target: LAMA2; (+) strand; PAM type: NRG; PAM sequence: TAG
actccctgaagcagggacac

SEQ ID NO: 150630 - DNA, 20 bp, Artificial Sequence
  Description of Artificial Sequence: Synthetic oligonucleotide
  Target: LAMA2; (+) strand; PAM type: NRG; PAM sequence: CAG
agggacactagaaatgcttt

SEQ ID NO: 150631 - DNA, 20 bp, Artificial Sequence
  Description of Artificial Sequence: Synthetic oligonucleotide
  Target: LAMA2; (+) strand; PAM type: NRG; PAM sequence: CAG
acactagaaatgctttcaga

SEQ ID NO: 150632 - DNA, 20 bp, Artificial Sequence
  Description of Artificial Sequence: Synthetic oligonucleotide
  Target: LAMA2; (+) strand; PAM type: NRG; PAM sequence: TGG
aatgctttcagacagtgaaa

SEQ ID NO: 150633 - DNA, 20 bp, Artificial Sequence
  Description of Artificial Sequence: Synthetic oligonucleotide
  Target: LAMA2; (+) strand; PAM type: NRG; PAM sequence: GGG
atgctttcagacagtgaaat

SEQ ID NO: 150634 - DNA, 20 bp, Artificial Sequence
  Description of Artificial Sequence: Synthetic oligonucleotide
  Target: LAMA2; (+) strand; PAM type: NRG; PAM sequence: GGG
tgctttcagacagtgaaatg

SEQ ID NO: 150635 - DNA, 20 bp, Artificial Sequence
  Description of Artificial Sequence: Synthetic oligonucleotide
  Target: LAMA2; (+) strand; PAM type: NRG; PAM sequence: GGG
gctttcagacagtgaaatgg

SEQ ID NO: 150636 - DNA, 20 bp, Artificial Sequence
  Description of Artificial Sequence: Synthetic oligonucleotide
  Target: LAMA2; (+) strand; PAM type: NRG; PAM sequence: TAG
tcagacagtgaaatgggggc

SEQ ID NO: 150637 - DNA, 20 bp, Artificial Sequence
  Description of Artificial Sequence: Synthetic oligonucleotide
  Target: LAMA2; (+) strand; PAM type: NRG; PAM sequence: AAG
ggctagaaaattcttcctgc

SEQ ID NO: 150638 - DNA, 20 bp, Artificial Sequence
  Description of Artificial Sequence: Synthetic oligonucleotide
  Target: LAMA2; (+) strand; PAM type: NRG; PAM sequence: CAG
aaattcttcctgcaagccta

SEQ ID NO: 150639 - DNA, 20 bp, Artificial Sequence
  Description of Artificial Sequence: Synthetic oligonucleotide
  Target: LAMA2; (+) strand; PAM type: NRG; PAM sequence: GAG
attcttcctgcaagcctaca

SEQ ID NO: 150640 - DNA, 20 bp, Artificial Sequence
  Description of Artificial Sequence: Synthetic oligonucleotide
  Target: LAMA2; (+) strand; PAM type: NRG; PAM sequence: AGG
ttcttcctgcaagcctacag

SEQ ID NO: 150641 - DNA, 20 bp, Artificial Sequence
  Description of Artificial Sequence: Synthetic oligonucleotide
  Target: LAMA2; (+) strand; PAM type: NRG; PAM sequence: CAG
ttcctgcaagcctacagagg

SEQ ID NO: 150642 - DNA, 20 bp, Artificial Sequence
  Description of Artificial Sequence: Synthetic oligonucleotide
  Target: LAMA2; (+) strand; PAM type: NRG; PAM sequence: TAG
tgcaagcctacagaggcagc

SEQ ID NO: 150643 - DNA, 20 bp, Artificial Sequence
  Description of Artificial Sequence: Synthetic oligonucleotide
  Target: LAMA2; (+) strand; PAM type: NRG; PAM sequence: TAG
cagctagaaaatttttctct

SEQ ID NO: 150644 - DNA, 20 bp, Artificial Sequence
  Description of Artificial Sequence: Synthetic oligonucleotide
  Target: LAMA2; (+) strand; PAM type: NRG; PAM sequence: AGG
agctagaaaatttttctctt

SEQ ID NO: 150645 - DNA, 20 bp, Artificial Sequence
  Description of Artificial Sequence: Synthetic oligonucleotide
  Target: LAMA2; (+) strand; PAM type: NRG; PAM sequence: GGG
gctagaaaatttttctctta

SEQ ID NO: 150646 - DNA, 20 bp, Artificial Sequence
  Description of Artificial Sequence: Synthetic oligonucleotide
  Target: LAMA2; (+) strand; PAM type: NRG; PAM sequence: GGG
ctagaaaatttttctcttag

SEQ ID NO: 150647 - DNA, 20 bp, Artificial Sequence
  Description of Artificial Sequence: Synthetic oligonucleotide
  Target: LAMA2; (+) strand; PAM type: NRG; PAM sequence: TGG
aatttttctcttaggggctc

SEQ ID NO: 150648 - DNA, 20 bp, Artificial Sequence
  Description of Artificial Sequence: Synthetic oligonucleotide
  Target: LAMA2; (+) strand; PAM type: NRG; PAM sequence: GGG
atttttctcttaggggctct

SEQ ID NO: 150649 - DNA, 20 bp, Artificial Sequence
  Description of Artificial Sequence: Synthetic oligonucleotide
  Target: LAMA2; (+) strand; PAM type: NRG; PAM sequence: TGG
tttctcttaggggctctggg

SEQ ID NO: 150650 - DNA, 20 bp, Artificial Sequence
  Description of Artificial Sequence: Synthetic oligonucleotide
  Target: LAMA2; (+) strand; PAM type: NRG; PAM sequence: GGG
ttctcttaggggctctgggt

SEQ ID NO: 150651 - DNA, 20 bp, Artificial Sequence
  Description of Artificial Sequence: Synthetic oligonucleotide
  Target: LAMA2; (+) strand; PAM type: NRG; PAM sequence: AAG
taggggctctgggtgggtaa

SEQ ID NO: 150652 - DNA, 20 bp, Artificial Sequence
  Description of Artificial Sequence: Synthetic oligonucleotide
  Target: LAMA2; (+) strand; PAM type: NRG; PAM sequence: TAG
gtaaaagttactaccttgtg

SEQ ID NO: 150653 - DNA, 20 bp, Artificial Sequence
  Description of Artificial Sequence: Synthetic oligonucleotide
  Target: LAMA2; (+) strand; PAM type: NRG; PAM sequence: AGG
taaaagttactaccttgtgt

SEQ ID NO: 150654 - DNA, 20 bp, Artificial Sequence
  Description of Artificial Sequence: Synthetic oligonucleotide
  Target: LAMA2; (+) strand; PAM type: NRG; PAM sequence: TGG
ccccaaacctgtgtgccacg

SEQ ID NO: 150655 - DNA, 20 bp, Artificial Sequence
  Description of Artificial Sequence: Synthetic oligonucleotide
  Target: LAMA2; (+) strand; PAM type: NRG; PAM sequence: GGG
cccaaacctgtgtgccacgt

SEQ ID NO: 150656 - DNA, 20 bp, Artificial Sequence
  Description of Artificial Sequence: Synthetic oligonucleotide
  Target: LAMA2; (+) strand; PAM type: NRG; PAM sequence: TGG
acctgtgtgccacgtgggaa

SEQ ID NO: 150657 - DNA, 20 bp, Artificial Sequence
  Description of Artificial Sequence: Synthetic oligonucleotide
  Target: LAMA2; (+) strand; PAM type: NRG; PAM sequence: GGG
cctgtgtgccacgtgggaat

SEQ ID NO: 150658 - DNA, 20 bp, Artificial Sequence
  Description of Artificial Sequence: Synthetic oligonucleotide
  Target: LAMA2; (+) strand; PAM type: NRG; PAM sequence: TGG
tttattctccccttatgtgc

SEQ ID NO: 150659 - DNA, 20 bp, Artificial Sequence
  Description of Artificial Sequence: Synthetic oligonucleotide
  Target: LAMA2; (+) strand; PAM type: NRG; PAM sequence: AAG
atgtgctggcattcttcaac

SEQ ID NO: 150660 - DNA, 20 bp, Artificial Sequence
  Description of Artificial Sequence: Synthetic oligonucleotide
  Target: LAMA2; (+) strand; PAM type: NRG; PAM sequence: AAG
ctggcattcttcaacaagtc

SEQ ID NO: 150661 - DNA, 20 bp, Artificial Sequence
  Description of Artificial Sequence: Synthetic oligonucleotide
  Target: LAMA2; (+) strand; PAM type: NRG; PAM sequence: AGG
tggcattcttcaacaagtca

SEQ ID NO: 150662 - DNA, 20 bp, Artificial Sequence
  Description of Artificial Sequence: Synthetic oligonucleotide
  Target: LAMA2; (+) strand; PAM type: NRG; PAM sequence: TAG
tcaaggaaatgatattccca

SEQ ID NO: 150663 - DNA, 20 bp, Artificial Sequence
  Description of Artificial Sequence: Synthetic oligonucleotide
  Target: LAMA2; (+) strand; PAM type: NRG; PAM sequence: AGG
caaggaaatgatattcccat

SEQ ID NO: 150664 - DNA, 20 bp, Artificial Sequence
  Description of Artificial Sequence: Synthetic oligonucleotide
  Target: LAMA2; (+) strand; PAM type: NRG; PAM sequence: CAG
ttcccataggaaaaataata

SEQ ID NO: 150665 - DNA, 20 bp, Artificial Sequence
  Description of Artificial Sequence: Synthetic oligonucleotide
  Target: LAMA2; (+) strand; PAM type: NRG; PAM sequence: AAG
ctgaaaatgatctcatcaca

SEQ ID NO: 150666 - DNA, 20 bp, Artificial Sequence
  Description of Artificial Sequence: Synthetic oligonucleotide
  Target: LAMA2; (+) strand; PAM type: NRG; PAM sequence: AAG
aaatgatctcatcacaaagc

SEQ ID NO: 150667 - DNA, 20 bp, Artificial Sequence
  Description of Artificial Sequence: Synthetic oligonucleotide
  Target: LAMA2; (+) strand; PAM type: NRG; PAM sequence: AAG
atctcatcacaaagcaagta

SEQ ID NO: 150668 - DNA, 20 bp, Artificial Sequence
  Description of Artificial Sequence: Synthetic oligonucleotide
  Target: LAMA2; (+) strand; PAM type: NRG; PAM sequence: AAG
aaagcaagtaaagtacacaa

SEQ ID NO: 150669 - DNA, 20 bp, Artificial Sequence
  Description of Artificial Sequence: Synthetic oligonucleotide
  Target: LAMA2; (+) strand; PAM type: NRG; PAM sequence: AGG
aagcaagtaaagtacacaaa

SEQ ID NO: 150670 - DNA, 20 bp, Artificial Sequence
  Description of Artificial Sequence: Synthetic oligonucleotide
  Target: LAMA2; (+) strand; PAM type: NRG; PAM sequence: AAG
caaaaggaaaataactacaa

SEQ ID NO: 150671 - DNA, 20 bp, Artificial Sequence
  Description of Artificial Sequence: Synthetic oligonucleotide
  Target: LAMA2; (+) strand; PAM type: NRG; PAM sequence: AGG
aaaaggaaaataactacaaa

SEQ ID NO: 150672 - DNA, 20 bp, Artificial Sequence
  Description of Artificial Sequence: Synthetic oligonucleotide
  Target: LAMA2; (+) strand; PAM type: NRG; PAM sequence: CAG
aaataactacaaaaggaaac

SEQ ID NO: 150673 - DNA, 20 bp, Artificial Sequence
  Description of Artificial Sequence: Synthetic oligonucleotide
  Target: LAMA2; (+) strand; PAM type: NRG; PAM sequence: TAG
taactacaaaaggaaaccag

SEQ ID NO: 150674 - DNA, 20 bp, Artificial Sequence
  Description of Artificial Sequence: Synthetic oligonucleotide
  Target: LAMA2; (+) strand; PAM type: NRG; PAM sequence: GAG
aaaccagtagccacaaaaat

SEQ ID NO: 150675 - DNA, 20 bp, Artificial Sequence
  Description of Artificial Sequence: Synthetic oligonucleotide
  Target: LAMA2; (+) strand; PAM type: NRG; PAM sequence: AGG
aaccagtagccacaaaaatg

SEQ ID NO: 150676 - DNA, 20 bp, Artificial Sequence
  Description of Artificial Sequence: Synthetic oligonucleotide
  Target: LAMA2; (+) strand; PAM type: NRG; PAM sequence: AAG
aatgaggatatttgtacaca

SEQ ID NO: 150677 - DNA, 20 bp, Artificial Sequence
  Description of Artificial Sequence: Synthetic oligonucleotide
  Target: LAMA2; (+) strand; PAM type: NRG; PAM sequence: TAG
gatatttgtacacaaagaac

SEQ ID NO: 150678 - DNA, 20 bp, Artificial Sequence
  Description of Artificial Sequence: Synthetic oligonucleotide
  Target: LAMA2; (+) strand; PAM type: NRG; PAM sequence: AAG
tttgtacacaaagaactaga

SEQ ID NO: 150679 - DNA, 20 bp, Artificial Sequence
  Description of Artificial Sequence: Synthetic oligonucleotide
  Target: LAMA2; (+) strand; PAM type: NRG; PAM sequence: AGG
ttgtacacaaagaactagaa

SEQ ID NO: 150680 - DNA, 20 bp, Artificial Sequence
  Description of Artificial Sequence: Synthetic oligonucleotide
  Target: LAMA2; (+) strand; PAM type: NRG; PAM sequence: GGG
tgtacacaaagaactagaaa

SEQ ID NO: 150681 - DNA, 20 bp, Artificial Sequence
  Description of Artificial Sequence: Synthetic oligonucleotide
  Target: LAMA2; (+) strand; PAM type: NRG; PAM sequence: TAG
acacaaagaactagaaaggg

SEQ ID NO: 150682 - DNA, 20 bp, Artificial Sequence
  Description of Artificial Sequence: Synthetic oligonucleotide
  Target: LAMA2; (+) strand; PAM type: NRG; PAM sequence: AAG
tttaaaatgtacaattataa

SEQ ID NO: 150683 - DNA, 20 bp, Artificial Sequence
  Description of Artificial Sequence: Synthetic oligonucleotide
  Target: LAMA2; (+) strand; PAM type: NRG; PAM sequence: TAG
tacaattataaaagcatgat

SEQ ID NO: 150684 - DNA, 20 bp, Artificial Sequence
  Description of Artificial Sequence: Synthetic oligonucleotide
  Target: LAMA2; (+) strand; PAM type: NRG; PAM sequence: AAG
aattataaaagcatgattag

SEQ ID NO: 150685 - DNA, 20 bp, Artificial Sequence
  Description of Artificial Sequence: Synthetic oligonucleotide
  Target: LAMA2; (+) strand; PAM type: NRG; PAM sequence: AAG
aaagcatgattagaagattg

SEQ ID NO: 150686 - DNA, 20 bp, Artificial Sequence
  Description of Artificial Sequence: Synthetic oligonucleotide
  Target: LAMA2; (+) strand; PAM type: NRG; PAM sequence: AAG
agaagattgaagaataaaca

SEQ ID NO: 150687 - DNA, 20 bp, Artificial Sequence
  Description of Artificial Sequence: Synthetic oligonucleotide
  Target: LAMA2; (+) strand; PAM type: NRG; PAM sequence: AAG
agattgaagaataaacaaag

SEQ ID NO: 150688 - DNA, 20 bp, Artificial Sequence
  Description of Artificial Sequence: Synthetic oligonucleotide
  Target: LAMA2; (+) strand; PAM type: NRG; PAM sequence: AGG
gattgaagaataaacaaaga

SEQ ID NO: 150689 - DNA, 20 bp, Artificial Sequence
  Description of Artificial Sequence: Synthetic oligonucleotide
  Target: LAMA2; (+) strand; PAM type: NRG; PAM sequence: TAG
aagaataaacaaagaaggaa

SEQ ID NO: 150690 - DNA, 20 bp, Artificial Sequence
  Description of Artificial Sequence: Synthetic oligonucleotide
  Target: LAMA2; (+) strand; PAM type: NRG; PAM sequence: AAG
aacaaagaaggaatagaaaa

SEQ ID NO: 150691 - DNA, 20 bp, Artificial Sequence
  Description of Artificial Sequence: Synthetic oligonucleotide
  Target: LAMA2; (+) strand; PAM type: NRG; PAM sequence: TAG
tagaaaaaagtaatataaaa

SEQ ID NO: 150692 - DNA, 20 bp, Artificial Sequence
  Description of Artificial Sequence: Synthetic oligonucleotide
  Target: LAMA2; (+) strand; PAM type: NRG; PAM sequence: AAG
gacgctatattaaaattcaa

SEQ ID NO: 150693 - DNA, 20 bp, Artificial Sequence
  Description of Artificial Sequence: Synthetic oligonucleotide
  Target: LAMA2; (+) strand; PAM type: NRG; PAM sequence: CAG
tattaaaattcaaaagtaac

SEQ ID NO: 150694 - DNA, 20 bp, Artificial Sequence
  Description of Artificial Sequence: Synthetic oligonucleotide
  Target: LAMA2; (+) strand; PAM type: NRG; PAM sequence: AGG
attaaaattcaaaagtaacc

SEQ ID NO: 150695 - DNA, 20 bp, Artificial Sequence
  Description of Artificial Sequence: Synthetic oligonucleotide
  Target: LAMA2; (+) strand; PAM type: NRG; PAM sequence: TGG
aattcaaaagtaaccaggtt

SEQ ID NO: 150696 - DNA, 20 bp, Artificial Sequence
  Description of Artificial Sequence: Synthetic oligonucleotide
  Target: LAMA2; (+) strand; PAM type: NRG; PAM sequence: AAG
aaaagtaaccaggtttggaa

SEQ ID NO: 150697 - DNA, 20 bp, Artificial Sequence
  Description of Artificial Sequence: Synthetic oligonucleotide
  Target: LAMA2; (+) strand; PAM type: NRG; PAM sequence: CAG
aaacatgtataatttacttc

SEQ ID NO: 150698 - DNA, 20 bp, Artificial Sequence
  Description of Artificial Sequence: Synthetic oligonucleotide
  Target: LAMA2; (+) strand; PAM type: NRG; PAM sequence: CAG
ccagaaatgaaaaaaatatg

SEQ ID NO: 150699 - DNA, 20 bp, Artificial Sequence
  Description of Artificial Sequence: Synthetic oligonucleotide
  Target: LAMA2; (+) strand; PAM type: NRG; PAM sequence: TGG
gaaattaaaaattcaatgat

SEQ ID NO: 150700 - DNA, 20 bp, Artificial Sequence
  Description of Artificial Sequence: Synthetic oligonucleotide
  Target: LAMA2; (+) strand; PAM type: NRG; PAM sequence: GGG
aaattaaaaattcaatgatt

SEQ ID NO: 150701 - DNA, 20 bp, Artificial Sequence
  Description of Artificial Sequence: Synthetic oligonucleotide
  Target: LAMA2; (+) strand; PAM type: NRG; PAM sequence: AAG
attcaatgattgggttaaac

SEQ ID NO: 150702 - DNA, 20 bp, Artificial Sequence
  Description of Artificial Sequence: Synthetic oligonucleotide
  Target: LAMA2; (+) strand; PAM type: NRG; PAM sequence: GAG
tcaatgattgggttaaacaa

SEQ ID NO: 150703 - DNA, 20 bp, Artificial Sequence
  Description of Artificial Sequence: Synthetic oligonucleotide
  Target: LAMA2; (+) strand; PAM type: NRG; PAM sequence: GAG
gattgggttaaacaagagat

SEQ ID NO: 150704 - DNA, 20 bp, Artificial Sequence
  Description of Artificial Sequence: Synthetic oligonucleotide
  Target: LAMA2; (+) strand; PAM type: NRG; PAM sequence: CAG
aaacaagagatgagaaactg

SEQ ID NO: 150705 - DNA, 20 bp, Artificial Sequence
  Description of Artificial Sequence: Synthetic oligonucleotide
  Target: LAMA2; (+) strand; PAM type: NRG; PAM sequence: AGG
aacaagagatgagaaactgc

SEQ ID NO: 150706 - DNA, 20 bp, Artificial Sequence
  Description of Artificial Sequence: Synthetic oligonucleotide
  Target: LAMA2; (+) strand; PAM type: NRG; PAM sequence: TAG
agagatgagaaactgcagga

SEQ ID NO: 150707 - DNA, 20 bp, Artificial Sequence
  Description of Artificial Sequence: Synthetic oligonucleotide
  Target: LAMA2; (+) strand; PAM type: NRG; PAM sequence: CAG
gaaactgcaggatagaaaat

SEQ ID NO: 150708 - DNA, 20 bp, Artificial Sequence
  Description of Artificial Sequence: Synthetic oligonucleotide
  Target: LAMA2; (+) strand; PAM type: NRG; PAM sequence: TAG
aggatagaaaatcagaaata

SEQ ID NO: 150709 - DNA, 20 bp, Artificial Sequence
  Description of Artificial Sequence: Synthetic oligonucleotide
  Target: LAMA2; (+) strand; PAM type: NRG; PAM sequence: AGG
ggatagaaaatcagaaatat

SEQ ID NO: 150710 - DNA, 20 bp, Artificial Sequence
  Description of Artificial Sequence: Synthetic oligonucleotide
  Target: LAMA2; (+) strand; PAM type: NRG; PAM sequence: TAG
aaattacctataaattgaca

SEQ ID NO: 150711 - DNA, 20 bp, Artificial Sequence
  Description of Artificial Sequence: Synthetic oligonucleotide
  Target: LAMA2; (+) strand; PAM type: NRG; PAM sequence: AGG
aattacctataaattgacat

SEQ ID NO: 150712 - DNA, 20 bp, Artificial Sequence
  Description of Artificial Sequence: Synthetic oligonucleotide
  Target: LAMA2; (+) strand; PAM type: NRG; PAM sequence: GGG
attacctataaattgacata

SEQ ID NO: 150713 - DNA, 20 bp, Artificial Sequence
  Description of Artificial Sequence: Synthetic oligonucleotide
  Target: LAMA2; (+) strand; PAM type: NRG; PAM sequence: AAG
acctataaattgacataggg

SEQ ID NO: 150714 - DNA, 20 bp, Artificial Sequence
  Description of Artificial Sequence: Synthetic oligonucleotide
  Target: LAMA2; (+) strand; PAM type: NRG; PAM sequence: CAG
atatgatgctaactgactca

SEQ ID NO: 150715 - DNA, 20 bp, Artificial Sequence
  Description of Artificial Sequence: Synthetic oligonucleotide
  Target: LAMA2; (+) strand; PAM type: NRG; PAM sequence: CAG
cacagaattgtaaaattgaa

SEQ ID NO: 150716 - DNA, 20 bp, Artificial Sequence
  Description of Artificial Sequence: Synthetic oligonucleotide
  Target: LAMA2; (+) strand; PAM type: NRG; PAM sequence: AAG
agaattgtaaaattgaacag

SEQ ID NO: 150717 - DNA, 20 bp, Artificial Sequence
  Description of Artificial Sequence: Synthetic oligonucleotide
  Target: LAMA2; (+) strand; PAM type: NRG; PAM sequence: TAG
tgtaaaattgaacagaagtt

SEQ ID NO: 150718 - DNA, 20 bp, Artificial Sequence
  Description of Artificial Sequence: Synthetic oligonucleotide
  Target: LAMA2; (+) strand; PAM type: NRG; PAM sequence: CAG
aaaattgaacagaagtttag

SEQ ID NO: 150719 - DNA, 20 bp, Artificial Sequence
  Description of Artificial Sequence: Synthetic oligonucleotide
  Target: LAMA2; (+) strand; PAM type: NRG; PAM sequence: AAG
attgaacagaagtttagcag

SEQ ID NO: 150720 - DNA, 20 bp, Artificial Sequence
  Description of Artificial Sequence: Synthetic oligonucleotide
  Target: LAMA2; (+) strand; PAM type: NRG; PAM sequence: AAG
aagtttagcagaagttgcca

SEQ ID NO: 150721 - DNA, 20 bp, Artificial Sequence
  Description of Artificial Sequence: Synthetic oligonucleotide
  Target: LAMA2; (+) strand; PAM type: NRG; PAM sequence: AAG
tttagcagaagttgccaaag

SEQ ID NO: 150722 - DNA, 20 bp, Artificial Sequence
  Description of Artificial Sequence: Synthetic oligonucleotide
  Target: LAMA2; (+) strand; PAM type: NRG; PAM sequence: GAG
tagcagaagttgccaaagaa

SEQ ID NO: 150723 - DNA, 20 bp, Artificial Sequence
  Description of Artificial Sequence: Synthetic oligonucleotide
  Target: LAMA2; (+) strand; PAM type: NRG; PAM sequence: TAG
gaagttgccaaagaagagat

SEQ ID NO: 150724 - DNA, 20 bp, Artificial Sequence
  Description of Artificial Sequence: Synthetic oligonucleotide
  Target: LAMA2; (+) strand; PAM type: NRG; PAM sequence: AAG
gttgccaaagaagagattag

SEQ ID NO: 150725 - DNA, 20 bp, Artificial Sequence
  Description of Artificial Sequence: Synthetic oligonucleotide
  Target: LAMA2; (+) strand; PAM type: NRG; PAM sequence: AAG
gccaaagaagagattagaag

SEQ ID NO: 150726 - DNA, 20 bp, Artificial Sequence
  Description of Artificial Sequence: Synthetic oligonucleotide
  Target: LAMA2; (+) strand; PAM type: NRG; PAM sequence: GAG
agaagagattagaagaagtt

SEQ ID NO: 150727 - DNA, 20 bp, Artificial Sequence
  Description of Artificial Sequence: Synthetic oligonucleotide
  Target: LAMA2; (+) strand; PAM type: NRG; PAM sequence: AGG
gaagagattagaagaagttg

SEQ ID NO: 150728 - DNA, 20 bp, Artificial Sequence
  Description of Artificial Sequence: Synthetic oligonucleotide
  Target: LAMA2; (+) strand; PAM type: NRG; PAM sequence: GGG
aagagattagaagaagttga

SEQ ID NO: 150729 - DNA, 20 bp, Artificial Sequence
  Description of Artificial Sequence: Synthetic oligonucleotide
  Target: LAMA2; (+) strand; PAM type: NRG; PAM sequence: AAG
caatattcaaaaaaataatg

SEQ ID NO: 150730 - DNA, 20 bp, Artificial Sequence
  Description of Artificial Sequence: Synthetic oligonucleotide
  Target: LAMA2; (+) strand; PAM type: NRG; PAM sequence: AGG
aatattcaaaaaaataatga

SEQ ID NO: 150731 - DNA, 20 bp, Artificial Sequence
  Description of Artificial Sequence: Synthetic oligonucleotide
  Target: LAMA2; (+) strand; PAM type: NRG; PAM sequence: GAG
tattcaaaaaaataatgaag

SEQ ID NO: 150732 - DNA, 20 bp, Artificial Sequence
  Description of Artificial Sequence: Synthetic oligonucleotide
  Target: LAMA2; (+) strand; PAM type: NRG; PAM sequence: GAG
ttcaaaaaaataatgaagga

SEQ ID NO: 150733 - DNA, 20 bp, Artificial Sequence
  Description of Artificial Sequence: Synthetic oligonucleotide
  Target: LAMA2; (+) strand; PAM type: NRG; PAM sequence: AAG
aaaaaaataatgaaggagag

SEQ ID NO: 150734 - DNA, 20 bp, Artificial Sequence
  Description of Artificial Sequence: Synthetic oligonucleotide
  Target: LAMA2; (+) strand; PAM type: NRG; PAM sequence: GAG
aaggagagaagaatgatcat

SEQ ID NO: 150735 - DNA, 20 bp, Artificial Sequence
  Description of Artificial Sequence: Synthetic oligonucleotide
  Target: LAMA2; (+) strand; PAM type: NRG; PAM sequence: CAG
taaaaactattataaatcct

SEQ ID NO: 150736 - DNA, 20 bp, Artificial Sequence
  Description of Artificial Sequence: Synthetic oligonucleotide
  Target: LAMA2; (+) strand; PAM type: NRG; PAM sequence: GAG
ctattataaatcctcagttt

SEQ ID NO: 150737 - DNA, 20 bp, Artificial Sequence
  Description of Artificial Sequence: Synthetic oligonucleotide
  Target: LAMA2; (+) strand; PAM type: NRG; PAM sequence: AGG
tattataaatcctcagtttg

SEQ ID NO: 150738 - DNA, 20 bp, Artificial Sequence
  Description of Artificial Sequence: Synthetic oligonucleotide
  Target: LAMA2; (+) strand; PAM type: NRG; PAM sequence: AAG
gtttgaggatgataaaaaat

SEQ ID NO: 150739 - DNA, 20 bp, Artificial Sequence
  Description of Artificial Sequence: Synthetic oligonucleotide
  Target: LAMA2; (+) strand; PAM type: NRG; PAM sequence: TAG
ataaaaaataagtctacccc

SEQ ID NO: 150740 - DNA, 20 bp, Artificial Sequence
  Description of Artificial Sequence: Synthetic oligonucleotide
  Target: LAMA2; (+) strand; PAM type: NRG; PAM sequence: TAG
aaaaataagtctacccctag

SEQ ID NO: 150741 - DNA, 20 bp, Artificial Sequence
  Description of Artificial Sequence: Synthetic oligonucleotide
  Target: LAMA2; (+) strand; PAM type: NRG; PAM sequence: CAG
ctagtagaaaacctgtcaac

SEQ ID NO: 150742 - DNA, 20 bp, Artificial Sequence
  Description of Artificial Sequence: Synthetic oligonucleotide
  Target: LAMA2; (+) strand; PAM type: NRG; PAM sequence: AAG
tagaaaacctgtcaaccagc

SEQ ID NO: 150743 - DNA, 20 bp, Artificial Sequence
  Description of Artificial Sequence: Synthetic oligonucleotide
  Target: LAMA2; (+) strand; PAM type: NRG; PAM sequence: AAG
acctgtcaaccagcaagaca

SEQ ID NO: 150744 - DNA, 20 bp, Artificial Sequence
  Description of Artificial Sequence: Synthetic oligonucleotide
  Target: LAMA2; (+) strand; PAM type: NRG; PAM sequence: GAG
ctgtcaaccagcaagacaaa

SEQ ID NO: 150745 - DNA, 20 bp, Artificial Sequence
  Description of Artificial Sequence: Synthetic oligonucleotide
  Target: LAMA2; (+) strand; PAM type: NRG; PAM sequence: TGG
aaagagaaaaatattaaaac

SEQ ID NO: 150746 - DNA, 20 bp, Artificial Sequence
  Description of Artificial Sequence: Synthetic oligonucleotide
  Target: LAMA2; (+) strand; PAM type: NRG; PAM sequence: GGG
aagagaaaaatattaaaact

SEQ ID NO: 150747 - DNA, 20 bp, Artificial Sequence
  Description of Artificial Sequence: Synthetic oligonucleotide
  Target: LAMA2; (+) strand; PAM type: NRG; PAM sequence: GGG
agagaaaaatattaaaactg

SEQ ID NO: 150748 - DNA, 20 bp, Artificial Sequence
  Description of Artificial Sequence: Synthetic oligonucleotide
  Target: LAMA2; (+) strand; PAM type: NRG; PAM sequence: GGG
gagaaaaatattaaaactgg

SEQ ID NO: 150749 - DNA, 20 bp, Artificial Sequence
  Description of Artificial Sequence: Synthetic oligonucleotide
  Target: LAMA2; (+) strand; PAM type: NRG; PAM sequence: GAG
ggggcaaatatctttattgt

SEQ ID NO: 150750 - DNA, 20 bp, Artificial Sequence
  Description of Artificial Sequence: Synthetic oligonucleotide
  Target: LAMA2; (+) strand; PAM type: NRG; PAM sequence: CAG
ttgtgagtgtttaccactca

SEQ ID NO: 150751 - DNA, 20 bp, Artificial Sequence
  Description of Artificial Sequence: Synthetic oligonucleotide
  Target: LAMA2; (+) strand; PAM type: NRG; PAM sequence: TGG
ccactcacagtccaacttca

SEQ ID NO: 150752 - DNA, 20 bp, Artificial Sequence
  Description of Artificial Sequence: Synthetic oligonucleotide
  Target: LAMA2; (+) strand; PAM type: NRG; PAM sequence: AAG
tcacagtccaacttcatgga

SEQ ID NO: 150753 - DNA, 20 bp, Artificial Sequence
  Description of Artificial Sequence: Synthetic oligonucleotide
  Target: LAMA2; (+) strand; PAM type: NRG; PAM sequence: TAG
attaaataatatatgtcctt

SEQ ID NO: 150754 - DNA, 20 bp, Artificial Sequence
  Description of Artificial Sequence: Synthetic oligonucleotide
  Target: LAMA2; (+) strand; PAM type: NRG; PAM sequence: AAG
aataatatatgtcctttagt

SEQ ID NO: 150755 - DNA, 20 bp, Artificial Sequence
  Description of Artificial Sequence: Synthetic oligonucleotide
  Target: LAMA2; (+) strand; PAM type: NRG; PAM sequence: AAG
agtaagaatattgaacccat

SEQ ID NO: 150756 - DNA, 20 bp, Artificial Sequence
  Description of Artificial Sequence: Synthetic oligonucleotide
  Target: LAMA2; (+) strand; PAM type: NRG; PAM sequence: CAG
agaatattgaacccataaga

SEQ ID NO: 150757 - DNA, 20 bp, Artificial Sequence
  Description of Artificial Sequence: Synthetic oligonucleotide
  Target: LAMA2; (+) strand; PAM type: NRG; PAM sequence: TAG
aacccataagacagtttcac

SEQ ID NO: 150758 - DNA, 20 bp, Artificial Sequence
  Description of Artificial Sequence: Synthetic oligonucleotide
  Target: LAMA2; (+) strand; PAM type: NRG; PAM sequence: TAG
aagacagtttcactagatta

SEQ ID NO: 150759 - DNA, 20 bp, Artificial Sequence
  Description of Artificial Sequence: Synthetic oligonucleotide
  Target: LAMA2; (+) strand; PAM type: NRG; PAM sequence: CAG
agtttcactagattatagtc

SEQ ID NO: 150760 - DNA, 20 bp, Artificial Sequence
  Description of Artificial Sequence: Synthetic oligonucleotide
  Target: LAMA2; (+) strand; PAM type: NRG; PAM sequence: AAG
ttcactagattatagtccag

SEQ ID NO: 150761 - DNA, 20 bp, Artificial Sequence
  Description of Artificial Sequence: Synthetic oligonucleotide
  Target: LAMA2; (+) strand; PAM type: NRG; PAM sequence: AAG
cagaagaatcaatctataaa

SEQ ID NO: 150762 - DNA, 20 bp, Artificial Sequence
  Description of Artificial Sequence: Synthetic oligonucleotide
  Target: LAMA2; (+) strand; PAM type: NRG; PAM sequence: CAG
aagaatcaatctataaaaag

SEQ ID NO: 150763 - DNA, 20 bp, Artificial Sequence
  Description of Artificial Sequence: Synthetic oligonucleotide
  Target: LAMA2; (+) strand; PAM type: NRG; PAM sequence: TAG
aatcaatctataaaaagcag

SEQ ID NO: 150764 - DNA, 20 bp, Artificial Sequence
  Description of Artificial Sequence: Synthetic oligonucleotide
  Target: LAMA2; (+) strand; PAM type: NRG; PAM sequence: CAG
gcagtagtatttctatatgt

SEQ ID NO: 150765 - DNA, 20 bp, Artificial Sequence
  Description of Artificial Sequence: Synthetic oligonucleotide
  Target: LAMA2; (+) strand; PAM type: NRG; PAM sequence: AAG
tatttctatatgtcagtgac

SEQ ID NO: 150766 - DNA, 20 bp, Artificial Sequence
  Description of Artificial Sequence: Synthetic oligonucleotide
  Target: LAMA2; (+) strand; PAM type: NRG; PAM sequence: TAG
aaaaatgtaataaaaatact

SEQ ID NO: 150767 - DNA, 20 bp, Artificial Sequence
  Description of Artificial Sequence: Synthetic oligonucleotide
  Target: LAMA2; (+) strand; PAM type: NRG; PAM sequence: TAG
tgtaataaaaatacttagaa

SEQ ID NO: 150768 - DNA, 20 bp, Artificial Sequence
  Description of Artificial Sequence: Synthetic oligonucleotide
  Target: LAMA2; (+) strand; PAM type: NRG; PAM sequence: AAG
ataaaaatacttagaatagc

SEQ ID NO: 150769 - DNA, 20 bp, Artificial Sequence
  Description of Artificial Sequence: Synthetic oligonucleotide
  Target: LAMA2; (+) strand; PAM type: NRG; PAM sequence: AAG
acttcatgatacctaaaaat

SEQ ID NO: 150770 - DNA, 20 bp, Artificial Sequence
  Description of Artificial Sequence: Synthetic oligonucleotide
  Target: LAMA2; (+) strand; PAM type: NRG; PAM sequence: GAG
aaataagtgtttgtaaaatt

SEQ ID NO: 150771 - DNA, 20 bp, Artificial Sequence
  Description of Artificial Sequence: Synthetic oligonucleotide
  Target: LAMA2; (+) strand; PAM type: NRG; PAM sequence: AAG
taaaattgagataattttta

SEQ ID NO: 150772 - DNA, 20 bp, Artificial Sequence
  Description of Artificial Sequence: Synthetic oligonucleotide
  Target: LAMA2; (+) strand; PAM type: NRG; PAM sequence: AGG
aaaattgagataatttttaa

SEQ ID NO: 150773 - DNA, 20 bp, Artificial Sequence
  Description of Artificial Sequence: Synthetic oligonucleotide
  Target: LAMA2; (+) strand; PAM type: NRG; PAM sequence: AAG
ataatttttaaaggttattg

SEQ ID NO: 150774 - DNA, 20 bp, Artificial Sequence
  Description of Artificial Sequence: Synthetic oligonucleotide
  Target: LAMA2; (+) strand; PAM type: NRG; PAM sequence: GAG
aagaacataaaattctaaat

SEQ ID NO: 150775 - DNA, 20 bp, Artificial Sequence
  Description of Artificial Sequence: Synthetic oligonucleotide
  Target: LAMA2; (+) strand; PAM type: NRG; PAM sequence: AGG
agaacataaaattctaaatg

SEQ ID NO: 150776 - DNA, 20 bp, Artificial Sequence
  Description of Artificial Sequence: Synthetic oligonucleotide
  Target: LAMA2; (+) strand; PAM type: NRG; PAM sequence: GAG
aacataaaattctaaatgag

SEQ ID NO: 150777 - DNA, 20 bp, Artificial Sequence
  Description of Artificial Sequence: Synthetic oligonucleotide
  Target: LAMA2; (+) strand; PAM type: NRG; PAM sequence: CAG
taaaattctaaatgaggaga

SEQ ID NO: 150778 - DNA, 20 bp, Artificial Sequence
  Description of Artificial Sequence: Synthetic oligonucleotide
  Target: LAMA2; (+) strand; PAM type: NRG; PAM sequence: GAG
ttctaaatgaggagacagct

SEQ ID NO: 150779 - DNA, 20 bp, Artificial Sequence
  Description of Artificial Sequence: Synthetic oligonucleotide
  Target: LAMA2; (+) strand; PAM type: NRG; PAM sequence: AGG
tctaaatgaggagacagctg

SEQ ID NO: 150780 - DNA, 20 bp, Artificial Sequence
  Description of Artificial Sequence: Synthetic oligonucleotide
  Target: LAMA2; (+) strand; PAM type: NRG; PAM sequence: AAG
ggagacagctgaggatcacc

SEQ ID NO: 150781 - DNA, 20 bp, Artificial Sequence
  Description of Artificial Sequence: Synthetic oligonucleotide
  Target: LAMA2; (+) strand; PAM type: NRG; PAM sequence: CAG
agctgaggatcaccaagtac

SEQ ID NO: 150782 - DNA, 20 bp, Artificial Sequence
  Description of Artificial Sequence: Synthetic oligonucleotide
  Target: LAMA2; (+) strand; PAM type: NRG; PAM sequence: TAG
atgtttaccatttctattaa

SEQ ID NO: 150783 - DNA, 20 bp, Artificial Sequence
  Description of Artificial Sequence: Synthetic oligonucleotide
  Target: LAMA2; (+) strand; PAM type: NRG; PAM sequence: GAG
gtttaccatttctattaata

SEQ ID NO: 150784 - DNA, 20 bp, Artificial Sequence
  Description of Artificial Sequence: Synthetic oligonucleotide
  Target: LAMA2; (+) strand; PAM type: NRG; PAM sequence: TAG
tttctattaatagagttaat

SEQ ID NO: 150785 - DNA, 20 bp, Artificial Sequence
  Description of Artificial Sequence: Synthetic oligonucleotide
  Target: LAMA2; (+) strand; PAM type: NRG; PAM sequence: TAG
agttaattagtaccacaatt

SEQ ID NO: 150786 - DNA, 20 bp, Artificial Sequence
  Description of Artificial Sequence: Synthetic oligonucleotide
  Target: LAMA2; (+) strand; PAM type: NRG; PAM sequence: AGG
gttaattagtaccacaattt

SEQ ID NO: 150787 - DNA, 20 bp, Artificial Sequence
  Description of Artificial Sequence: Synthetic oligonucleotide
  Target: LAMA2; (+) strand; PAM type: NRG; PAM sequence: GAG
taattagtaccacaatttag

SEQ ID NO: 150788 - DNA, 20 bp, Artificial Sequence
  Description of Artificial Sequence: Synthetic oligonucleotide
  Target: LAMA2; (+) strand; PAM type: NRG; PAM sequence: AGG
aattagtaccacaatttagg

SEQ ID NO: 150789 - DNA, 20 bp, Artificial Sequence
  Description of Artificial Sequence: Synthetic oligonucleotide
  Target: LAMA2; (+) strand; PAM type: NRG; PAM sequence: GGG
attagtaccacaatttagga

SEQ ID NO: 150790 - DNA, 20 bp, Artificial Sequence
  Description of Artificial Sequence: Synthetic oligonucleotide
  Target: LAMA2; (+) strand; PAM type: NRG; PAM sequence: TGG
cacaatttaggagggcaata

SEQ ID NO: 150791 - DNA, 20 bp, Artificial Sequence
  Description of Artificial Sequence: Synthetic oligonucleotide
  Target: LAMA2; (+) strand; PAM type: NRG; PAM sequence: TAG
gagggcaatatggtattatc

SEQ ID NO: 150792 - DNA, 20 bp, Artificial Sequence
  Description of Artificial Sequence: Synthetic oligonucleotide
  Target: LAMA2; (+) strand; PAM type: NRG; PAM sequence: AAG
ggtattatctagtatctttg

SEQ ID NO: 150793 - DNA, 20 bp, Artificial Sequence
  Description of Artificial Sequence: Synthetic oligonucleotide
  Target: LAMA2; (+) strand; PAM type: NRG; PAM sequence: AGG
gtattatctagtatctttga

SEQ ID NO: 150794 - DNA, 20 bp, Artificial Sequence
  Description of Artificial Sequence: Synthetic oligonucleotide
  Target: LAMA2; (+) strand; PAM type: NRG; PAM sequence: CAG
ggtgataaaaccctgtcaac

SEQ ID NO: 150795 - DNA, 20 bp, Artificial Sequence
  Description of Artificial Sequence: Synthetic oligonucleotide
  Target: LAMA2; (+) strand; PAM type: NRG; PAM sequence: TAG
caaaaaactcttacaatgta

SEQ ID NO: 150796 - DNA, 20 bp, Artificial Sequence
  Description of Artificial Sequence: Synthetic oligonucleotide
  Target: LAMA2; (+) strand; PAM type: NRG; PAM sequence: GAG
aaaaactcttacaatgtata

SEQ ID NO: 150797 - DNA, 20 bp, Artificial Sequence
  Description of Artificial Sequence: Synthetic oligonucleotide
  Target: LAMA2; (+) strand; PAM type: NRG; PAM sequence: GAG
gtacttactatgatgaaaat

SEQ ID NO: 150798 - DNA, 20 bp, Artificial Sequence
  Description of Artificial Sequence: Synthetic oligonucleotide
  Target: LAMA2; (+) strand; PAM type: NRG; PAM sequence: TAG
atgaaaatgagaaaaataaa

SEQ ID NO: 150799 - DNA, 20 bp, Artificial Sequence
  Description of Artificial Sequence: Synthetic oligonucleotide
  Target: LAMA2; (+) strand; PAM type: NRG; PAM sequence: TAG
taaatagcaaaaataaattg

SEQ ID NO: 150800 - DNA, 20 bp, Artificial Sequence
  Description of Artificial Sequence: Synthetic oligonucleotide
  Target: LAMA2; (+) strand; PAM type: NRG; PAM sequence: AAG
tgtttcctttaatctgataa

SEQ ID NO: 150801 - DNA, 20 bp, Artificial Sequence
  Description of Artificial Sequence: Synthetic oligonucleotide
  Target: LAMA2; (+) strand; PAM type: NRG; PAM sequence: CAG
ctttaatctgataaaagaaa

SEQ ID NO: 150802 - DNA, 20 bp, Artificial Sequence
  Description of Artificial Sequence: Synthetic oligonucleotide
  Target: LAMA2; (+) strand; PAM type: NRG; PAM sequence: AAG
tctgataaaagaaacagtta

SEQ ID NO: 150803 - DNA, 20 bp, Artificial Sequence
  Description of Artificial Sequence: Synthetic oligonucleotide
  Target: LAMA2; (+) strand; PAM type: NRG; PAM sequence: TGG
gataaaagaaacagttaaag

SEQ ID NO: 150804 - DNA, 20 bp, Artificial Sequence
  Description of Artificial Sequence: Synthetic oligonucleotide
  Target: LAMA2; (+) strand; PAM type: NRG; PAM sequence: TAG
aacagttaaagtggttgaaa

SEQ ID NO: 150805 - DNA, 20 bp, Artificial Sequence
  Description of Artificial Sequence: Synthetic oligonucleotide
  Target: LAMA2; (+) strand; PAM type: NRG; PAM sequence: CAG
gtataaaccatgataaattt

SEQ ID NO: 150806 - DNA, 20 bp, Artificial Sequence
  Description of Artificial Sequence: Synthetic oligonucleotide
  Target: LAMA2; (+) strand; PAM type: NRG; PAM sequence: CAG
atgataaatttcagaaactt

SEQ ID NO: 150807 - DNA, 20 bp, Artificial Sequence
  Description of Artificial Sequence: Synthetic oligonucleotide
  Target: LAMA2; (+) strand; PAM type: NRG; PAM sequence: AGG
tgataaatttcagaaacttc

SEQ ID NO: 150808 - DNA, 20 bp, Artificial Sequence
  Description of Artificial Sequence: Synthetic oligonucleotide
  Target: LAMA2; (+) strand; PAM type: NRG; PAM sequence: TGG
taaatttcagaaacttcagg

SEQ ID NO: 150809 - DNA, 20 bp, Artificial Sequence
  Description of Artificial Sequence: Synthetic oligonucleotide
  Target: LAMA2; (+) strand; PAM type: NRG; PAM sequence: TGG
tggaaaaaacaatgtcatta

SEQ ID NO: 150810 - DNA, 20 bp, Artificial Sequence
  Description of Artificial Sequence: Synthetic oligonucleotide
  Target: LAMA2; (+) strand; PAM type: NRG; PAM sequence: AAG
attatggtattatttatatc

SEQ ID NO: 150811 - DNA, 20 bp, Artificial Sequence
  Description of Artificial Sequence: Synthetic oligonucleotide
  Target: LAMA2; (+) strand; PAM type: NRG; PAM sequence: TAG
aaaaaatttaaatacacttg

SEQ ID NO: 150812 - DNA, 20 bp, Artificial Sequence
  Description of Artificial Sequence: Synthetic oligonucleotide
  Target: LAMA2; (+) strand; PAM type: NRG; PAM sequence: AGG
aaaaatttaaatacacttgt

SEQ ID NO: 150813 - DNA, 20 bp, Artificial Sequence
  Description of Artificial Sequence: Synthetic oligonucleotide
  Target: LAMA2; (+) strand; PAM type: NRG; PAM sequence: GGG
aaaatttaaatacacttgta

SEQ ID NO: 150814 - DNA, 20 bp, Artificial Sequence
  Description of Artificial Sequence: Synthetic oligonucleotide
  Target: LAMA2; (+) strand; PAM type: NRG; PAM sequence: AAG
tttaaatacacttgtagggt

SEQ ID NO: 150815 - DNA, 20 bp, Artificial Sequence
  Description of Artificial Sequence: Synthetic oligonucleotide
  Target: LAMA2; (+) strand; PAM type: NRG; PAM sequence: CAG
tgtagggtaagtactaattt

SEQ ID NO: 150816 - DNA, 20 bp, Artificial Sequence
  Description of Artificial Sequence: Synthetic oligonucleotide
  Target: LAMA2; (+) strand; PAM type: NRG; PAM sequence: TAG
ggtaagtactaatttcagaa

SEQ ID NO: 150817 - DNA, 20 bp, Artificial Sequence
  Description of Artificial Sequence: Synthetic oligonucleotide
  Target: LAMA2; (+) strand; PAM type: NRG; PAM sequence: TAG
aagtactaatttcagaatag

SEQ ID NO: 150818 - DNA, 20 bp, Artificial Sequence
  Description of Artificial Sequence: Synthetic oligonucleotide
  Target: LAMA2; (+) strand; PAM type: NRG; PAM sequence: TAG
ttcagaatagtagttacctc

SEQ ID NO: 150819 - DNA, 20 bp, Artificial Sequence
  Description of Artificial Sequence: Synthetic oligonucleotide
  Target: LAMA2; (+) strand; PAM type: NRG; PAM sequence: GAG
cagaatagtagttacctcta

SEQ ID NO: 150820 - DNA, 20 bp, Artificial Sequence
  Description of Artificial Sequence: Synthetic oligonucleotide
  Target: LAMA2; (+) strand; PAM type: NRG; PAM sequence: CAG
agtagttacctctagagaaa

SEQ ID NO: 150821 - DNA, 20 bp, Artificial Sequence
  Description of Artificial Sequence: Synthetic oligonucleotide
  Target: LAMA2; (+) strand; PAM type: NRG; PAM sequence: AGG
gtagttacctctagagaaac

SEQ ID NO: 150822 - DNA, 20 bp, Artificial Sequence
  Description of Artificial Sequence: Synthetic oligonucleotide
  Target: LAMA2; (+) strand; PAM type: NRG; PAM sequence: AAG
ttacctctagagaaacagga

SEQ ID NO: 150823 - DNA, 20 bp, Artificial Sequence
  Description of Artificial Sequence: Synthetic oligonucleotide
  Target: LAMA2; (+) strand; PAM type: NRG; PAM sequence: AGG
tacctctagagaaacaggaa

SEQ ID NO: 150824 - DNA, 20 bp, Artificial Sequence
  Description of Artificial Sequence: Synthetic oligonucleotide
  Target: LAMA2; (+) strand; PAM type: NRG; PAM sequence: GGG
acctctagagaaacaggaaa

SEQ ID NO: 150825 - DNA, 20 bp, Artificial Sequence
  Description of Artificial Sequence: Synthetic oligonucleotide
  Target: LAMA2; (+) strand; PAM type: NRG; PAM sequence: CAG
aaacaggaaagggaataaaa

SEQ ID NO: 150826 - DNA, 20 bp, Artificial Sequence
  Description of Artificial Sequence: Synthetic oligonucleotide
  Target: LAMA2; (+) strand; PAM type: NRG; PAM sequence: AAG
caggaaagggaataaaacag

SEQ ID NO: 150827 - DNA, 20 bp, Artificial Sequence
  Description of Artificial Sequence: Synthetic oligonucleotide
  Target: LAMA2; (+) strand; PAM type: NRG; PAM sequence: GAG
gaataaaacagaagtgaaat

SEQ ID NO: 150828 - DNA, 20 bp, Artificial Sequence
  Description of Artificial Sequence: Synthetic oligonucleotide
  Target: LAMA2; (+) strand; PAM type: NRG; PAM sequence: AAG
aatgagattcatttgtatct

SEQ ID NO: 150829 - DNA, 20 bp, Artificial Sequence
  Description of Artificial Sequence: Synthetic oligonucleotide
  Target: LAMA2; (+) strand; PAM type: NRG; PAM sequence: GAG
attgctttaaaaatatatct

SEQ ID NO: 150830 - DNA, 20 bp, Artificial Sequence
  Description of Artificial Sequence: Synthetic oligonucleotide
  Target: LAMA2; (+) strand; PAM type: NRG; PAM sequence: AGG
ttgctttaaaaatatatctg

SEQ ID NO: 150831 - DNA, 20 bp, Artificial Sequence
  Description of Artificial Sequence: Synthetic oligonucleotide
  Target: LAMA2; (+) strand; PAM type: NRG; PAM sequence: TAG
tataaatattttgttacctc

SEQ ID NO: 150832 - DNA, 20 bp, Artificial Sequence
  Description of Artificial Sequence: Synthetic oligonucleotide
  Target: LAMA2; (+) strand; PAM type: NRG; PAM sequence: AGG
ataaatattttgttacctct

SEQ ID NO: 150833 - DNA, 20 bp, Artificial Sequence
  Description of Artificial Sequence: Synthetic oligonucleotide
  Target: LAMA2; (+) strand; PAM type: NRG; PAM sequence: TGG
tttgttacctctaggttgca

SEQ ID NO: 150834 - DNA, 20 bp, Artificial Sequence
  Description of Artificial Sequence: Synthetic oligonucleotide
  Target: LAMA2; (+) strand; PAM type: NRG; PAM sequence: GGG
ttgttacctctaggttgcat

SEQ ID NO: 150835 - DNA, 20 bp, Artificial Sequence
  Description of Artificial Sequence: Synthetic oligonucleotide
  Target: LAMA2; (+) strand; PAM type: NRG; PAM sequence: AAG
ttctttaattgaatgtaaaa

SEQ ID NO: 150836 - DNA, 20 bp, Artificial Sequence
  Description of Artificial Sequence: Synthetic oligonucleotide
  Target: LAMA2; (+) strand; PAM type: NRG; PAM sequence: CAG
ttgaatgtaaaaaagaattc

SEQ ID NO: 150837 - DNA, 20 bp, Artificial Sequence
  Description of Artificial Sequence: Synthetic oligonucleotide
  Target: LAMA2; (+) strand; PAM type: NRG; PAM sequence: AAG
aaaagaattccagatttaaa

SEQ ID NO: 150838 - DNA, 20 bp, Artificial Sequence
  Description of Artificial Sequence: Synthetic oligonucleotide
  Target: LAMA2; (+) strand; PAM type: NRG; PAM sequence: GAG
aagaattccagatttaaaaa

SEQ ID NO: 150839 - DNA, 20 bp, Artificial Sequence
  Description of Artificial Sequence: Synthetic oligonucleotide
  Target: LAMA2; (+) strand; PAM type: NRG; PAM sequence: AGG
agaattccagatttaaaaag

SEQ ID NO: 150840 - DNA, 20 bp, Artificial Sequence
  Description of Artificial Sequence: Synthetic oligonucleotide
  Target: LAMA2; (+) strand; PAM type: NRG; PAM sequence: GAG
aattccagatttaaaaagag

SEQ ID NO: 150841 - DNA, 20 bp, Artificial Sequence
  Description of Artificial Sequence: Synthetic oligonucleotide
  Target: LAMA2; (+) strand; PAM type: NRG; PAM sequence: AAG
cattattacattttacacat

SEQ ID NO: 150842 - DNA, 20 bp, Artificial Sequence
  Description of Artificial Sequence: Synthetic oligonucleotide
  Target: LAMA2; (+) strand; PAM type: NRG; PAM sequence: AAG
cattatatttcaaaatgtga

SEQ ID NO: 150843 - DNA, 20 bp, Artificial Sequence
  Description of Artificial Sequence: Synthetic oligonucleotide
  Target: LAMA2; (+) strand; PAM type: NRG; PAM sequence: CAG
tatatttcaaaatgtgaaag

SEQ ID NO: 150844 - DNA, 20 bp, Artificial Sequence
  Description of Artificial Sequence: Synthetic oligonucleotide
  Target: LAMA2; (+) strand; PAM type: NRG; PAM sequence: TAG
tcaaaatgtgaaagcagtgc

SEQ ID NO: 150845 - DNA, 20 bp, Artificial Sequence
  Description of Artificial Sequence: Synthetic oligonucleotide
  Target: LAMA2; (+) strand; PAM type: NRG; PAM sequence: AAG
tgtgaaagcagtgctagctc

SEQ ID NO: 150846 - DNA, 20 bp, Artificial Sequence
  Description of Artificial Sequence: Synthetic oligonucleotide
  Target: LAMA2; (+) strand; PAM type: NRG; PAM sequence: AAG
aaatttctctcacgaattac

SEQ ID NO: 150847 - DNA, 20 bp, Artificial Sequence
  Description of Artificial Sequence: Synthetic oligonucleotide
  Target: LAMA2; (+) strand; PAM type: NRG; PAM sequence: GAG
atttctctcacgaattacaa

SEQ ID NO: 150848 - DNA, 20 bp, Artificial Sequence
  Description of Artificial Sequence: Synthetic oligonucleotide
  Target: LAMA2; (+) strand; PAM type: NRG; PAM sequence: AGG
tttctctcacgaattacaag

SEQ ID NO: 150849 - DNA, 20 bp, Artificial Sequence
  Description of Artificial Sequence: Synthetic oligonucleotide
  Target: LAMA2; (+) strand; PAM type: NRG; PAM sequence: AAG
tctcacgaattacaagaggc

SEQ ID NO: 150850 - DNA, 20 bp, Artificial Sequence
  Description of Artificial Sequence: Synthetic oligonucleotide
  Target: LAMA2; (+) strand; PAM type: NRG; PAM sequence: CAG
tacaagaggcaagtcaatct

SEQ ID NO: 150851 - DNA, 20 bp, Artificial Sequence
  Description of Artificial Sequence: Synthetic oligonucleotide
  Target: LAMA2; (+) strand; PAM type: NRG; PAM sequence: AAG
gtcaatctcagatatatgac

SEQ ID NO: 150852 - DNA, 20 bp, Artificial Sequence
  Description of Artificial Sequence: Synthetic oligonucleotide
  Target: LAMA2; (+) strand; PAM type: NRG; PAM sequence: AAG
tatgacaagtcattgactat

SEQ ID NO: 150853 - DNA, 20 bp, Artificial Sequence
  Description of Artificial Sequence: Synthetic oligonucleotide
  Target: LAMA2; (+) strand; PAM type: NRG; PAM sequence: CAG
tataagtgctgtctgactct

SEQ ID NO: 150854 - DNA, 20 bp, Artificial Sequence
  Description of Artificial Sequence: Synthetic oligonucleotide
  Target: LAMA2; (+) strand; PAM type: NRG; PAM sequence: AAG
tctcagtatttgtttatttc

SEQ ID NO: 150855 - DNA, 20 bp, Artificial Sequence
  Description of Artificial Sequence: Synthetic oligonucleotide
  Target: LAMA2; (+) strand; PAM type: NRG; PAM sequence: TAG
ttatttcaagtaccatatgc

SEQ ID NO: 150856 - DNA, 20 bp, Artificial Sequence
  Description of Artificial Sequence: Synthetic oligonucleotide
  Target: LAMA2; (+) strand; PAM type: NRG; PAM sequence: TGG
aagtaccatatgctagaaat

SEQ ID NO: 150857 - DNA, 20 bp, Artificial Sequence
  Description of Artificial Sequence: Synthetic oligonucleotide
  Target: LAMA2; (+) strand; PAM type: NRG; PAM sequence: CAG
gctagaaattggctcttttg

SEQ ID NO: 150858 - DNA, 20 bp, Artificial Sequence
  Description of Artificial Sequence: Synthetic oligonucleotide
  Target: LAMA2; (+) strand; PAM type: NRG; PAM sequence: TGG
aaattggctcttttgcagtt

SEQ ID NO: 150859 - DNA, 20 bp, Artificial Sequence
  Description of Artificial Sequence: Synthetic oligonucleotide
  Target: LAMA2; (+) strand; PAM type: NRG; PAM sequence: CAG
tcatattatttatgcaaaat

SEQ ID NO: 150860 - DNA, 20 bp, Artificial Sequence
  Description of Artificial Sequence: Synthetic oligonucleotide
  Target: LAMA2; (+) strand; PAM type: NRG; PAM sequence: TGG
attatttatgcaaaatcagt

SEQ ID NO: 150861 - DNA, 20 bp, Artificial Sequence
  Description of Artificial Sequence: Synthetic oligonucleotide
  Target: LAMA2; (+) strand; PAM type: NRG; PAM sequence: TAG
atgcaaaatcagttggtatg

SEQ ID NO: 150862 - DNA, 20 bp, Artificial Sequence
  Description of Artificial Sequence: Synthetic oligonucleotide
  Target: LAMA2; (+) strand; PAM type: NRG; PAM sequence: TAG
aatataaattgacattgatc

SEQ ID NO: 150863 - DNA, 20 bp, Artificial Sequence
  Description of Artificial Sequence: Synthetic oligonucleotide
  Target: LAMA2; (+) strand; PAM type: NRG; PAM sequence: TAG
taaattgacattgatctagt

SEQ ID NO: 150864 - DNA, 20 bp, Artificial Sequence
  Description of Artificial Sequence: Synthetic oligonucleotide
  Target: LAMA2; (+) strand; PAM type: NRG; PAM sequence: AGG
aaattgacattgatctagtt

SEQ ID NO: 150865 - DNA, 20 bp, Artificial Sequence
  Description of Artificial Sequence: Synthetic oligonucleotide
  Target: LAMA2; (+) strand; PAM type: NRG; PAM sequence: AAG
atgtgcttttatttttatca

SEQ ID NO: 150866 - DNA, 20 bp, Artificial Sequence
  Description of Artificial Sequence: Synthetic oligonucleotide
  Target: LAMA2; (+) strand; PAM type: NRG; PAM sequence: TAG
tttttatcaaagtcttataa

SEQ ID NO: 150867 - DNA, 20 bp, Artificial Sequence
  Description of Artificial Sequence: Synthetic oligonucleotide
  Target: LAMA2; (+) strand; PAM type: NRG; PAM sequence: AAG
tatcaaagtcttataataga

SEQ ID NO: 150868 - DNA, 20 bp, Artificial Sequence
  Description of Artificial Sequence: Synthetic oligonucleotide
  Target: LAMA2; (+) strand; PAM type: NRG; PAM sequence: TAG
tcttataatagaaagataaa

SEQ ID NO: 150869 - DNA, 20 bp, Artificial Sequence
  Description of Artificial Sequence: Synthetic oligonucleotide
  Target: LAMA2; (+) strand; PAM type: NRG; PAM sequence: AAG
taatagaaagataaatagtg

SEQ ID NO: 150870 - DNA, 20 bp, Artificial Sequence
  Description of Artificial Sequence: Synthetic oligonucleotide
  Target: LAMA2; (+) strand; PAM type: NRG; PAM sequence: TAG
tagaaagataaatagtgaag

SEQ ID NO: 150871 - DNA, 20 bp, Artificial Sequence
  Description of Artificial Sequence: Synthetic oligonucleotide
  Target: LAMA2; (+) strand; PAM type: NRG; PAM sequence: AAG
aaagataaatagtgaagtag

SEQ ID NO: 150872 - DNA, 20 bp, Artificial Sequence
  Description of Artificial Sequence: Synthetic oligonucleotide
  Target: LAMA2; (+) strand; PAM type: NRG; PAM sequence: TAG
taaatagtgaagtagaagac

SEQ ID NO: 150873 - DNA, 20 bp, Artificial Sequence
  Description of Artificial Sequence: Synthetic oligonucleotide
  Target: LAMA2; (+) strand; PAM type: NRG; PAM sequence: AAG
aagtagaagactagaaatca

SEQ ID NO: 150874 - DNA, 20 bp, Artificial Sequence
  Description of Artificial Sequence: Synthetic oligonucleotide
  Target: LAMA2; (+) strand; PAM type: NRG; PAM sequence: AAG
tttttattgcattttccatt

SEQ ID NO: 150875 - DNA, 20 bp, Artificial Sequence
  Description of Artificial Sequence: Synthetic oligonucleotide
  Target: LAMA2; (+) strand; PAM type: NRG; PAM sequence: CAG
cattttccattaagtcctta

SEQ ID NO: 150876 - DNA, 20 bp, Artificial Sequence
  Description of Artificial Sequence: Synthetic oligonucleotide
  Target: LAMA2; (+) strand; PAM type: NRG; PAM sequence: AGG
attttccattaagtccttac

SEQ ID NO: 150877 - DNA, 20 bp, Artificial Sequence
  Description of Artificial Sequence: Synthetic oligonucleotide
  Target: LAMA2; (+) strand; PAM type: NRG; PAM sequence: GAG
ttaagtccttacaggcccac

SEQ ID NO: 150878 - DNA, 20 bp, Artificial Sequence
  Description of Artificial Sequence: Synthetic oligonucleotide
  Target: LAMA2; (+) strand; PAM type: NRG; PAM sequence: TGG
gcccacgagactatgtgatc

SEQ ID NO: 150879 - DNA, 20 bp, Artificial Sequence
  Description of Artificial Sequence: Synthetic oligonucleotide
  Target: LAMA2; (+) strand; PAM type: NRG; PAM sequence: TGG
gagactatgtgatctggcct

SEQ ID NO: 150880 - DNA, 20 bp, Artificial Sequence
  Description of Artificial Sequence: Synthetic oligonucleotide
  Target: LAMA2; (+) strand; PAM type: NRG; PAM sequence: CAG
ctggccttggcttacctctc

SEQ ID NO: 150881 - DNA, 20 bp, Artificial Sequence
  Description of Artificial Sequence: Synthetic oligonucleotide
  Target: LAMA2; (+) strand; PAM type: NRG; PAM sequence: GAG
tacctctccagaatgttctt

SEQ ID NO: 150882 - DNA, 20 bp, Artificial Sequence
  Description of Artificial Sequence: Synthetic oligonucleotide
  Target: LAMA2; (+) strand; PAM type: NRG; PAM sequence: CAG
tccagaatgttcttgagttt

SEQ ID NO: 150883 - DNA, 20 bp, Artificial Sequence
  Description of Artificial Sequence: Synthetic oligonucleotide
  Target: LAMA2; (+) strand; PAM type: NRG; PAM sequence: CAG
gagtttcagtcactgttttt

SEQ ID NO: 150884 - DNA, 20 bp, Artificial Sequence
  Description of Artificial Sequence: Synthetic oligonucleotide
  Target: LAMA2; (+) strand; PAM type: NRG; PAM sequence: GAG
cagctttgcttaaatttctt

SEQ ID NO: 150885 - DNA, 20 bp, Artificial Sequence
  Description of Artificial Sequence: Synthetic oligonucleotide
  Target: LAMA2; (+) strand; PAM type: NRG; PAM sequence: TAG
cttaaatttcttgagtctct

SEQ ID NO: 150886 - DNA, 20 bp, Artificial Sequence
  Description of Artificial Sequence: Synthetic oligonucleotide
  Target: LAMA2; (+) strand; PAM type: NRG; PAM sequence: TAG
ttgagtctcttagttgtttg

SEQ ID NO: 150887 - DNA, 20 bp, Artificial Sequence
  Description of Artificial Sequence: Synthetic oligonucleotide
  Target: LAMA2; (+) strand; PAM type: NRG; PAM sequence: TGG
tcttagttgtttgtagcatc

SEQ ID NO: 150888 - DNA, 20 bp, Artificial Sequence
  Description of Artificial Sequence: Synthetic oligonucleotide
  Target: LAMA2; (+) strand; PAM type: NRG; PAM sequence: AAG
tgtagcatctggaattttat

SEQ ID NO: 150889 - DNA, 20 bp, Artificial Sequence
  Description of Artificial Sequence: Synthetic oligonucleotide
  Target: LAMA2; (+) strand; PAM type: NRG; PAM sequence: CAG
ggaattttataagttctatt

SEQ ID NO: 150890 - DNA, 20 bp, Artificial Sequence
  Description of Artificial Sequence: Synthetic oligonucleotide
  Target: LAMA2; (+) strand; PAM type: NRG; PAM sequence: TGG
taagttctattcagatttct

SEQ ID NO: 150891 - DNA, 20 bp, Artificial Sequence
  Description of Artificial Sequence: Synthetic oligonucleotide
  Target: LAMA2; (+) strand; PAM type: NRG; PAM sequence: GGG
aagttctattcagatttctt

SEQ ID NO: 150892 - DNA, 20 bp, Artificial Sequence
  Description of Artificial Sequence: Synthetic oligonucleotide
  Target: LAMA2; (+) strand; PAM type: NRG; PAM sequence: TAG
ttcttgggatacctcatttc

SEQ ID NO: 150893 - DNA, 20 bp, Artificial Sequence
  Description of Artificial Sequence: Synthetic oligonucleotide
  Target: LAMA2; (+) strand; PAM type: NRG; PAM sequence: TAG
tctagccctattcctttgct

SEQ ID NO: 150894 - DNA, 20 bp, Artificial Sequence
  Description of Artificial Sequence: Synthetic oligonucleotide
  Target: LAMA2; (+) strand; PAM type: NRG; PAM sequence: CAG
gccctattcctttgcttagc

SEQ ID NO: 150895 - DNA, 20 bp, Artificial Sequence
  Description of Artificial Sequence: Synthetic oligonucleotide
  Target: LAMA2; (+) strand; PAM type: NRG; PAM sequence: AGG
ccctattcctttgcttagcc

SEQ ID NO: 150896 - DNA, 20 bp, Artificial Sequence
  Description of Artificial Sequence: Synthetic oligonucleotide
  Target: LAMA2; (+) strand; PAM type: NRG; PAM sequence: TGG
gcttagccaggcatttttaa

SEQ ID NO: 150897 - DNA, 20 bp, Artificial Sequence
  Description of Artificial Sequence: Synthetic oligonucleotide
  Target: LAMA2; (+) strand; PAM type: NRG; PAM sequence: CGG
gccaggcatttttaatggct

SEQ ID NO: 150898 - DNA, 20 bp, Artificial Sequence
  Description of Artificial Sequence: Synthetic oligonucleotide
  Target: LAMA2; (+) strand; PAM type: NRG; PAM sequence: CAG
cggcttaacttcaactttct

SEQ ID NO: 150899 - DNA, 20 bp, Artificial Sequence
  Description of Artificial Sequence: Synthetic oligonucleotide
  Target: LAMA2; (+) strand; PAM type: NRG; PAM sequence: AGG
ggcttaacttcaactttctc

SEQ ID NO: 150900 - DNA, 20 bp, Artificial Sequence
  Description of Artificial Sequence: Synthetic oligonucleotide
  Target: LAMA2; (+) strand; PAM type: NRG; PAM sequence: AAG
taacttcaactttctcagga

SEQ ID NO: 150901 - DNA, 20 bp, Artificial Sequence
  Description of Artificial Sequence: Synthetic oligonucleotide
  Target: LAMA2; (+) strand; PAM type: NRG; PAM sequence: AAG
aaagctgcccctgcatcctc

SEQ ID NO: 150902 - DNA, 20 bp, Artificial Sequence
  Description of Artificial Sequence: Synthetic oligonucleotide
  Target: LAMA2; (+) strand; PAM type: NRG; PAM sequence: TGG
ctcaagtcatatcattctca

SEQ ID NO: 150903 - DNA, 20 bp, Artificial Sequence
  Description of Artificial Sequence: Synthetic oligonucleotide
  Target: LAMA2; (+) strand; PAM type: NRG; PAM sequence: GAG
ttcttttatgatctcataat

SEQ ID NO: 150904 - DNA, 20 bp, Artificial Sequence
  Description of Artificial Sequence: Synthetic oligonucleotide
  Target: LAMA2; (+) strand; PAM type: NRG; PAM sequence: TGG
ttttatgtctatcttacctc

SEQ ID NO: 150905 - DNA, 20 bp, Artificial Sequence
  Description of Artificial Sequence: Synthetic oligonucleotide
  Target: LAMA2; (+) strand; PAM type: NRG; PAM sequence: TGG
tcttacctctggtgatgata

SEQ ID NO: 150906 - DNA, 20 bp, Artificial Sequence
  Description of Artificial Sequence: Synthetic oligonucleotide
  Target: LAMA2; (+) strand; PAM type: NRG; PAM sequence: AAG
tttctttaccattgcacaat

SEQ ID NO: 150907 - DNA, 20 bp, Artificial Sequence
  Description of Artificial Sequence: Synthetic oligonucleotide
  Target: LAMA2; (+) strand; PAM type: NRG; PAM sequence: AAG
ctttaccattgcacaataag

SEQ ID NO: 150908 - DNA, 20 bp, Artificial Sequence
  Description of Artificial Sequence: Synthetic oligonucleotide
  Target: LAMA2; (+) strand; PAM type: NRG; PAM sequence: AAG
taacacaatgactcatacaa

SEQ ID NO: 150909 - DNA, 20 bp, Artificial Sequence
  Description of Artificial Sequence: Synthetic oligonucleotide
  Target: LAMA2; (+) strand; PAM type: NRG; PAM sequence: AAG
acaatgactcatacaaaaga

SEQ ID NO: 150910 - DNA, 20 bp, Artificial Sequence
  Description of Artificial Sequence: Synthetic oligonucleotide
  Target: LAMA2; (+) strand; PAM type: NRG; PAM sequence: AAG
atgactcatacaaaagaaag

SEQ ID NO: 150911 - DNA, 20 bp, Artificial Sequence
  Description of Artificial Sequence: Synthetic oligonucleotide
  Target: LAMA2; (+) strand; PAM type: NRG; PAM sequence: AGG
tgactcatacaaaagaaaga

SEQ ID NO: 150912 - DNA, 20 bp, Artificial Sequence
  Description of Artificial Sequence: Synthetic oligonucleotide
  Target: LAMA2; (+) strand; PAM type: NRG; PAM sequence: AAG
ctcatacaaaagaaagaagg

SEQ ID NO: 150913 - DNA, 20 bp, Artificial Sequence
  Description of Artificial Sequence: Synthetic oligonucleotide
  Target: LAMA2; (+) strand; PAM type: NRG; PAM sequence: AGG
tcatacaaaagaaagaagga

SEQ ID NO: 150914 - DNA, 20 bp, Artificial Sequence
  Description of Artificial Sequence: Synthetic oligonucleotide
  Target: LAMA2; (+) strand; PAM type: NRG; PAM sequence: AAG
tacaaaagaaagaaggaagg

SEQ ID NO: 150915 - DNA, 20 bp, Artificial Sequence
  Description of Artificial Sequence: Synthetic oligonucleotide
  Target: LAMA2; (+) strand; PAM type: NRG; PAM sequence: GAG
caaaagaaagaaggaaggaa

SEQ ID NO: 150916 - DNA, 20 bp, Artificial Sequence
  Description of Artificial Sequence: Synthetic oligonucleotide
  Target: LAMA2; (+) strand; PAM type: NRG; PAM sequence: AAG
aagagaactaaaatctcgtg

SEQ ID NO: 150917 - DNA, 20 bp, Artificial Sequence
  Description of Artificial Sequence: Synthetic oligonucleotide
  Target: LAMA2; (+) strand; PAM type: NRG; PAM sequence: CAG
aaaatctcgtgaagctttga

SEQ ID NO: 150918 - DNA, 20 bp, Artificial Sequence
  Description of Artificial Sequence: Synthetic oligonucleotide
  Target: LAMA2; (+) strand; PAM type: NRG; PAM sequence: TAG
gtgaagctttgacagtcatt

SEQ ID NO: 150919 - DNA, 20 bp, Artificial Sequence
  Description of Artificial Sequence: Synthetic oligonucleotide
  Target: LAMA2; (+) strand; PAM type: NRG; PAM sequence: TGG
ctgttttataatctatgaaa

SEQ ID NO: 150920 - DNA, 20 bp, Artificial Sequence
  Description of Artificial Sequence: Synthetic oligonucleotide
  Target: LAMA2; (+) strand; PAM type: NRG; PAM sequence: CAG
attgaatcttttctgcctct

SEQ ID NO: 150921 - DNA, 20 bp, Artificial Sequence
  Description of Artificial Sequence: Synthetic oligonucleotide
  Target: LAMA2; (+) strand; PAM type: NRG; PAM sequence: TAG
gaatcttttctgcctctcag

SEQ ID NO: 150922 - DNA, 20 bp, Artificial Sequence
  Description of Artificial Sequence: Synthetic oligonucleotide
  Target: LAMA2; (+) strand; PAM type: NRG; PAM sequence: AGG
aatcttttctgcctctcagt

SEQ ID NO: 150923 - DNA, 20 bp, Artificial Sequence
  Description of Artificial Sequence: Synthetic oligonucleotide
  Target: LAMA2; (+) strand; PAM type: NRG; PAM sequence: AAG
taggtataattatcacactg

SEQ ID NO: 150924 - DNA, 20 bp, Artificial Sequence
  Description of Artificial Sequence: Synthetic oligonucleotide
  Target: LAMA2; (+) strand; PAM type: NRG; PAM sequence: AAG
atcacactgaagccctgtac

SEQ ID NO: 150925 - DNA, 20 bp, Artificial Sequence
  Description of Artificial Sequence: Synthetic oligonucleotide
  Target: LAMA2; (+) strand; PAM type: NRG; PAM sequence: AAG
tgaagccctgtacaagtata

SEQ ID NO: 150926 - DNA, 20 bp, Artificial Sequence
  Description of Artificial Sequence: Synthetic oligonucleotide
  Target: LAMA2; (+) strand; PAM type: NRG; PAM sequence: TGG
gtataaccataaatacctac

SEQ ID NO: 150927 - DNA, 20 bp, Artificial Sequence
  Description of Artificial Sequence: Synthetic oligonucleotide
  Target: LAMA2; (+) strand; PAM type: NRG; PAM sequence: AAG
ttgtttatattgcttttccc

SEQ ID NO: 150928 - DNA, 20 bp, Artificial Sequence
  Description of Artificial Sequence: Synthetic oligonucleotide
  Target: LAMA2; (+) strand; PAM type: NRG; PAM sequence: TAG
tttatattgcttttcccaag

SEQ ID NO: 150929 - DNA, 20 bp, Artificial Sequence
  Description of Artificial Sequence: Synthetic oligonucleotide
  Target: LAMA2; (+) strand; PAM type: NRG; PAM sequence: GAG
tatattgcttttcccaagta

SEQ ID NO: 150930 - DNA, 20 bp, Artificial Sequence
  Description of Artificial Sequence: Synthetic oligonucleotide
  Target: LAMA2; (+) strand; PAM type: NRG; PAM sequence: AAG
tgcttttcccaagtagagat

SEQ ID NO: 150931 - DNA, 20 bp, Artificial Sequence
  Description of Artificial Sequence: Synthetic oligonucleotide
  Target: LAMA2; (+) strand; PAM type: NRG; PAM sequence: AAG
tttctgttctttttccctga

SEQ ID NO: 150932 - DNA, 20 bp, Artificial Sequence
  Description of Artificial Sequence: Synthetic oligonucleotide
  Target: LAMA2; (+) strand; PAM type: NRG; PAM sequence: AGG
ttctgttctttttccctgaa

SEQ ID NO: 150933 - DNA, 20 bp, Artificial Sequence
  Description of Artificial Sequence: Synthetic oligonucleotide
  Target: LAMA2; (+) strand; PAM type: NRG; PAM sequence: TGG
tttccctgaaaggattttta

SEQ ID NO: 150934 - DNA, 20 bp, Artificial Sequence
  Description of Artificial Sequence: Synthetic oligonucleotide
  Target: LAMA2; (+) strand; PAM type: NRG; PAM sequence: TGG
tggtgtgttaacatttttat

SEQ ID NO: 150935 - DNA, 20 bp, Artificial Sequence
  Description of Artificial Sequence: Synthetic oligonucleotide
  Target: LAMA2; (+) strand; PAM type: NRG; PAM sequence: TGG
gttaacatttttattggttt

SEQ ID NO: 150936 - DNA, 20 bp, Artificial Sequence
  Description of Artificial Sequence: Synthetic oligonucleotide
  Target: LAMA2; (+) strand; PAM type: NRG; PAM sequence: CAG
tcttctttttcatttgtgta

SEQ ID NO: 150937 - DNA, 20 bp, Artificial Sequence
  Description of Artificial Sequence: Synthetic oligonucleotide
  Target: LAMA2; (+) strand; PAM type: NRG; PAM sequence: AGG
cttctttttcatttgtgtac

SEQ ID NO: 150938 - DNA, 20 bp, Artificial Sequence
  Description of Artificial Sequence: Synthetic oligonucleotide
  Target: LAMA2; (+) strand; PAM type: NRG; PAM sequence: TGG
ttttcatttgtgtacaggaa

SEQ ID NO: 150939 - DNA, 20 bp, Artificial Sequence
  Description of Artificial Sequence: Synthetic oligonucleotide
  Target: LAMA2; (+) strand; PAM type: NRG; PAM sequence: TAG
atggtcacttcattaacttg

SEQ ID NO: 150940 - DNA, 20 bp, Artificial Sequence
  Description of Artificial Sequence: Synthetic oligonucleotide
  Target: LAMA2; (+) strand; PAM type: NRG; PAM sequence: TGG
taacttgtagacttgattcc

SEQ ID NO: 150941 - DNA, 20 bp, Artificial Sequence
  Description of Artificial Sequence: Synthetic oligonucleotide
  Target: LAMA2; (+) strand; PAM type: NRG; PAM sequence: GGG
aacttgtagacttgattcct

SEQ ID NO: 150942 - DNA, 20 bp, Artificial Sequence
  Description of Artificial Sequence: Synthetic oligonucleotide
  Target: LAMA2; (+) strand; PAM type: NRG; PAM sequence: TGG
ttcctgggcatttttacaaa

SEQ ID NO: 150943 - DNA, 20 bp, Artificial Sequence
  Description of Artificial Sequence: Synthetic oligonucleotide
  Target: LAMA2; (+) strand; PAM type: NRG; PAM sequence: CAG
ttaatcctgaatctaaatta

SEQ ID NO: 150944 - DNA, 20 bp, Artificial Sequence
  Description of Artificial Sequence: Synthetic oligonucleotide
  Target: LAMA2; (+) strand; PAM type: NRG; PAM sequence: TAG
ctgaatctaaattacagatg

SEQ ID NO: 150945 - DNA, 20 bp, Artificial Sequence
  Description of Artificial Sequence: Synthetic oligonucleotide
  Target: LAMA2; (+) strand; PAM type: NRG; PAM sequence: TGG
aattacagatgtagaatttt

SEQ ID NO: 150946 - DNA, 20 bp, Artificial Sequence
  Description of Artificial Sequence: Synthetic oligonucleotide
  Target: LAMA2; (+) strand; PAM type: NRG; PAM sequence: AAG
atgtagaatttttggcataa

SEQ ID NO: 150947 - DNA, 20 bp, Artificial Sequence
  Description of Artificial Sequence: Synthetic oligonucleotide
  Target: LAMA2; (+) strand; PAM type: NRG; PAM sequence: AGG
tgtagaatttttggcataaa

SEQ ID NO: 150948 - DNA, 20 bp, Artificial Sequence
  Description of Artificial Sequence: Synthetic oligonucleotide
  Target: LAMA2; (+) strand; PAM type: NRG; PAM sequence: CAG
tttatctcttgcaaccccta

SEQ ID NO: 150949 - DNA, 20 bp, Artificial Sequence
  Description of Artificial Sequence: Synthetic oligonucleotide
  Target: LAMA2; (+) strand; PAM type: NRG; PAM sequence: TAG
cagttcaaataatattatgt

SEQ ID NO: 150950 - DNA, 20 bp, Artificial Sequence
  Description of Artificial Sequence: Synthetic oligonucleotide
  Target: LAMA2; (+) strand; PAM type: NRG; PAM sequence: TGG
atgttagtcaattttttaca

SEQ ID NO: 150951 - DNA, 20 bp, Artificial Sequence
  Description of Artificial Sequence: Synthetic oligonucleotide
  Target: LAMA2; (+) strand; PAM type: NRG; PAM sequence: CAG
tagtcaattttttacatgga

SEQ ID NO: 150952 - DNA, 20 bp, Artificial Sequence
  Description of Artificial Sequence: Synthetic oligonucleotide
  Target: LAMA2; (+) strand; PAM type: NRG; PAM sequence: TGG
ctctctccttgaccaaattt

SEQ ID NO: 150953 - DNA, 20 bp, Artificial Sequence
  Description of Artificial Sequence: Synthetic oligonucleotide
  Target: LAMA2; (+) strand; PAM type: NRG; PAM sequence: AAG
ctccttgaccaaattttgga

SEQ ID NO: 150954 - DNA, 20 bp, Artificial Sequence
  Description of Artificial Sequence: Synthetic oligonucleotide
  Target: LAMA2; (+) strand; PAM type: NRG; PAM sequence: GAG
aattttggaaagtcttctct

SEQ ID NO: 150955 - DNA, 20 bp, Artificial Sequence
  Description of Artificial Sequence: Synthetic oligonucleotide
  Target: LAMA2; (+) strand; PAM type: NRG; PAM sequence: GAG
ctctgagtcctctttttgat

SEQ ID NO: 150956 - DNA, 20 bp, Artificial Sequence
  Description of Artificial Sequence: Synthetic oligonucleotide
  Target: LAMA2; (+) strand; PAM type: NRG; PAM sequence: AGG
tctgagtcctctttttgatg

SEQ ID NO: 150957 - DNA, 20 bp, Artificial Sequence
  Description of Artificial Sequence: Synthetic oligonucleotide
  Target: LAMA2; (+) strand; PAM type: NRG; PAM sequence: TAG
ttgacccttgtcctcaaacc

SEQ ID NO: 150958 - DNA, 20 bp, Artificial Sequence
  Description of Artificial Sequence: Synthetic oligonucleotide
  Target: LAMA2; (+) strand; PAM type: NRG; PAM sequence: TGG
ccttgtcctcaaacctagct

SEQ ID NO: 150959 - DNA, 20 bp, Artificial Sequence
  Description of Artificial Sequence: Synthetic oligonucleotide
  Target: LAMA2; (+) strand; PAM type: NRG; PAM sequence: AAG
cctcaaacctagcttggtta

SEQ ID NO: 150960 - DNA, 20 bp, Artificial Sequence
  Description of Artificial Sequence: Synthetic oligonucleotide
  Target: LAMA2; (+) strand; PAM type: NRG; PAM sequence: AAG
aaacctagcttggttaaagc

SEQ ID NO: 150961 - DNA, 20 bp, Artificial Sequence
  Description of Artificial Sequence: Synthetic oligonucleotide
  Target: LAMA2; (+) strand; PAM type: NRG; PAM sequence: AAG
gttaaagcaagaattctgct

SEQ ID NO: 150962 - DNA, 20 bp, Artificial Sequence
  Description of Artificial Sequence: Synthetic oligonucleotide
  Target: LAMA2; (+) strand; PAM type: NRG; PAM sequence: CAG
aagcaagaattctgctaagt

SEQ ID NO: 150963 - DNA, 20 bp, Artificial Sequence
  Description of Artificial Sequence: Synthetic oligonucleotide
  Target: LAMA2; (+) strand; PAM type: NRG; PAM sequence: AAG
ttctgctaagtcagtgtgtt

SEQ ID NO: 150964 - DNA, 20 bp, Artificial Sequence
  Description of Artificial Sequence: Synthetic oligonucleotide
  Target: LAMA2; (+) strand; PAM type: NRG; PAM sequence: TGG
cccttgatatctgatccctc

SEQ ID NO: 150965 - DNA, 20 bp, Artificial Sequence
  Description of Artificial Sequence: Synthetic oligonucleotide
  Target: LAMA2; (+) strand; PAM type: NRG; PAM sequence: AAG
ccctctggcctgtcttcaac

SEQ ID NO: 150966 - DNA, 20 bp, Artificial Sequence
  Description of Artificial Sequence: Synthetic oligonucleotide
  Target: LAMA2; (+) strand; PAM type: NRG; PAM sequence: TGG
caacaagaatcctgttaatt

SEQ ID NO: 150967 - DNA, 20 bp, Artificial Sequence
  Description of Artificial Sequence: Synthetic oligonucleotide
  Target: LAMA2; (+) strand; PAM type: NRG; PAM sequence: TAG
agaatcctgttaatttggtt

SEQ ID NO: 150968 - DNA, 20 bp, Artificial Sequence
  Description of Artificial Sequence: Synthetic oligonucleotide
  Target: LAMA2; (+) strand; PAM type: NRG; PAM sequence: AAG
tcctgttaatttggtttagc

SEQ ID NO: 150969 - DNA, 20 bp, Artificial Sequence
  Description of Artificial Sequence: Synthetic oligonucleotide
  Target: LAMA2; (+) strand; PAM type: NRG; PAM sequence: TGG
tcgcccctgatccttgctcg

SEQ ID NO: 150970 - DNA, 20 bp, Artificial Sequence
  Description of Artificial Sequence: Synthetic oligonucleotide
  Target: LAMA2; (+) strand; PAM type: NRG; PAM sequence: TGG
taaatctctacccttttcct

SEQ ID NO: 150971 - DNA, 20 bp, Artificial Sequence
  Description of Artificial Sequence: Synthetic oligonucleotide
  Target: LAMA2; (+) strand; PAM type: NRG; PAM sequence: TGG
cctacttgttcatgttgtat

SEQ ID NO: 150972 - DNA, 20 bp, Artificial Sequence
  Description of Artificial Sequence: Synthetic oligonucleotide
  Target: LAMA2; (+) strand; PAM type: NRG; PAM sequence: GGG
ctacttgttcatgttgtatt

SEQ ID NO: 150973 - DNA, 20 bp, Artificial Sequence
  Description of Artificial Sequence: Synthetic oligonucleotide
  Target: LAMA2; (+) strand; PAM type: NRG; PAM sequence: TGG
tgttcatgttgtattgggaa

SEQ ID NO: 150974 - DNA, 20 bp, Artificial Sequence
  Description of Artificial Sequence: Synthetic oligonucleotide
  Target: LAMA2; (+) strand; PAM type: NRG; PAM sequence: GAG
ttcatgttgtattgggaatg

SEQ ID NO: 150975 - DNA, 20 bp, Artificial Sequence
  Description of Artificial Sequence: Synthetic oligonucleotide
  Target: LAMA2; (+) strand; PAM type: NRG; PAM sequence: AGG
tcatgttgtattgggaatgg

SEQ ID NO: 150976 - DNA, 20 bp, Artificial Sequence
  Description of Artificial Sequence: Synthetic oligonucleotide
  Target: LAMA2; (+) strand; PAM type: NRG; PAM sequence: TAG
gttgtattgggaatggaggc

SEQ ID NO: 150977 - DNA, 20 bp, Artificial Sequence
  Description of Artificial Sequence: Synthetic oligonucleotide
  Target: LAMA2; (+) strand; PAM type: NRG; PAM sequence: AAG
atggaggctagttctttact

SEQ ID NO: 150978 - DNA, 20 bp, Artificial Sequence
  Description of Artificial Sequence: Synthetic oligonucleotide
  Target: LAMA2; (+) strand; PAM type: NRG; PAM sequence: AGG
tggaggctagttctttacta

SEQ ID NO: 150979 - DNA, 20 bp, Artificial Sequence
  Description of Artificial Sequence: Synthetic oligonucleotide
  Target: LAMA2; (+) strand; PAM type: NRG; PAM sequence: TAG
ttgctttttctctattgcca

SEQ ID NO: 150980 - DNA, 20 bp, Artificial Sequence
  Description of Artificial Sequence: Synthetic oligonucleotide
  Target: LAMA2; (+) strand; PAM type: NRG; PAM sequence: AAG
attgccatagtttctcactg

SEQ ID NO: 150981 - DNA, 20 bp, Artificial Sequence
  Description of Artificial Sequence: Synthetic oligonucleotide
  Target: LAMA2; (+) strand; PAM type: NRG; PAM sequence: CAG
tcatcgttttaactactgtc

SEQ ID NO: 150982 - DNA, 20 bp, Artificial Sequence
  Description of Artificial Sequence: Synthetic oligonucleotide
  Target: LAMA2; (+) strand; PAM type: NRG; PAM sequence: TGG
ttttaactactgtccagctc

SEQ ID NO: 150983 - DNA, 20 bp, Artificial Sequence
  Description of Artificial Sequence: Synthetic oligonucleotide
  Target: LAMA2; (+) strand; PAM type: NRG; PAM sequence: AAG
gttctctttcacaatattaa

SEQ ID NO: 150984 - DNA, 20 bp, Artificial Sequence
  Description of Artificial Sequence: Synthetic oligonucleotide
  Target: LAMA2; (+) strand; PAM type: NRG; PAM sequence: GAG
aagctgaacttgtgaaaatt

SEQ ID NO: 150985 - DNA, 20 bp, Artificial Sequence
  Description of Artificial Sequence: Synthetic oligonucleotide
  Target: LAMA2; (+) strand; PAM type: NRG; PAM sequence: TAG
ctaacccatcaactattatc

SEQ ID NO: 150986 - DNA, 20 bp, Artificial Sequence
  Description of Artificial Sequence: Synthetic oligonucleotide
  Target: LAMA2; (+) strand; PAM type: NRG; PAM sequence: TGG
catcaactattatctagcct

SEQ ID NO: 150987 - DNA, 20 bp, Artificial Sequence
  Description of Artificial Sequence: Synthetic oligonucleotide
  Target: LAMA2; (+) strand; PAM type: NRG; PAM sequence: AAG
actattatctagccttggaa

SEQ ID NO: 150988 - DNA, 20 bp, Artificial Sequence
  Description of Artificial Sequence: Synthetic oligonucleotide
  Target: LAMA2; (+) strand; PAM type: NRG; PAM sequence: TAG
agccttggaaaagtgtgttt

SEQ ID NO: 150989 - DNA, 20 bp, Artificial Sequence
  Description of Artificial Sequence: Synthetic oligonucleotide
  Target: LAMA2; (+) strand; PAM type: NRG; PAM sequence: AGG
gccttggaaaagtgtgtttt

SEQ ID NO: 150990 - DNA, 20 bp, Artificial Sequence
  Description of Artificial Sequence: Synthetic oligonucleotide
  Target: LAMA2; (+) strand; PAM type: NRG; PAM sequence: GAG
cttggaaaagtgtgttttag

SEQ ID NO: 150991 - DNA, 20 bp, Artificial Sequence
  Description of Artificial Sequence: Synthetic oligonucleotide
  Target: LAMA2; (+) strand; PAM type: NRG; PAM sequence: AAG
gaaaagtgtgttttaggagt

SEQ ID NO: 150992 - DNA, 20 bp, Artificial Sequence
  Description of Artificial Sequence: Synthetic oligonucleotide
  Target: LAMA2; (+) strand; PAM type: NRG; PAM sequence: TAG
ttgttaacttattttaatac

SEQ ID NO: 150993 - DNA, 20 bp, Artificial Sequence
  Description of Artificial Sequence: Synthetic oligonucleotide
  Target: LAMA2; (+) strand; PAM type: NRG; PAM sequence: AGG
tgttaacttattttaatact

SEQ ID NO: 150994 - DNA, 20 bp, Artificial Sequence
  Description of Artificial Sequence: Synthetic oligonucleotide
  Target: LAMA2; (+) strand; PAM type: NRG; PAM sequence: TAG
attttaatactaggatgcat

SEQ ID NO: 150995 - DNA, 20 bp, Artificial Sequence
  Description of Artificial Sequence: Synthetic oligonucleotide
  Target: LAMA2; (+) strand; PAM type: NRG; PAM sequence: AAG
tactaggatgcattagtcta

SEQ ID NO: 150996 - DNA, 20 bp, Artificial Sequence
  Description of Artificial Sequence: Synthetic oligonucleotide
  Target: LAMA2; (+) strand; PAM type: NRG; PAM sequence: AGG
actaggatgcattagtctaa

SEQ ID NO: 150997 - DNA, 20 bp, Artificial Sequence
  Description of Artificial Sequence: Synthetic oligonucleotide
  Target: LAMA2; (+) strand; PAM type: NRG; PAM sequence: CAG
cattagtctaaaggtcataa

SEQ ID NO: 150998 - DNA, 20 bp, Artificial Sequence
  Description of Artificial Sequence: Synthetic oligonucleotide
  Target: LAMA2; (+) strand; PAM type: NRG; PAM sequence: AAG
tagtctaaaggtcataacag

SEQ ID NO: 150999 - DNA, 20 bp, Artificial Sequence
  Description of Artificial Sequence: Synthetic oligonucleotide
  Target: LAMA2; (+) strand; PAM type: NRG; PAM sequence: AAG
ctacaaactaccaaaaaacc

SEQ ID NO: 151000 - DNA, 20 bp, Artificial Sequence
  Description of Artificial Sequence: Synthetic oligonucleotide
  Target: LAMA2; (+) strand; PAM type: NRG; PAM sequence: GAG
ccaaaaaaccaagcatgact

SEQ ID NO: 151001 - DNA, 20 bp, Artificial Sequence
  Description of Artificial Sequence: Synthetic oligonucleotide
  Target: LAMA2; (+) strand; PAM type: NRG; PAM sequence: AAG
gcatgactgagaaattcctg

SEQ ID NO: 151002 - DNA, 20 bp, Artificial Sequence
  Description of Artificial Sequence: Synthetic oligonucleotide
  Target: LAMA2; (+) strand; PAM type: NRG; PAM sequence: TGG
aaaaataacttaaatgtcac

SEQ ID NO: 151003 - DNA, 20 bp, Artificial Sequence
  Description of Artificial Sequence: Synthetic oligonucleotide
  Target: LAMA2; (+) strand; PAM type: NRG; PAM sequence: GAG
aaataacttaaatgtcactg

SEQ ID NO: 151004 - DNA, 20 bp, Artificial Sequence
  Description of Artificial Sequence: Synthetic oligonucleotide
  Target: LAMA2; (+) strand; PAM type: NRG; PAM sequence: TGG
aatgtcactggagctattcc

SEQ ID NO: 151005 - DNA, 20 bp, Artificial Sequence
  Description of Artificial Sequence: Synthetic oligonucleotide
  Target: LAMA2; (+) strand; PAM type: NRG; PAM sequence: CAG
gctattcctggtaactttgt

SEQ ID NO: 151006 - DNA, 20 bp, Artificial Sequence
  Description of Artificial Sequence: Synthetic oligonucleotide
  Target: LAMA2; (+) strand; PAM type: NRG; PAM sequence: TAG
attcctggtaactttgtcag

SEQ ID NO: 151007 - DNA, 20 bp, Artificial Sequence
  Description of Artificial Sequence: Synthetic oligonucleotide
  Target: LAMA2; (+) strand; PAM type: NRG; PAM sequence: CAG
aactttgtcagtagtactcc

SEQ ID NO: 151008 - DNA, 20 bp, Artificial Sequence
  Description of Artificial Sequence: Synthetic oligonucleotide
  Target: LAMA2; (+) strand; PAM type: NRG; PAM sequence: CAG
tcccagctgactaacaatca

SEQ ID NO: 151009 - DNA, 20 bp, Artificial Sequence
  Description of Artificial Sequence: Synthetic oligonucleotide
  Target: LAMA2; (+) strand; PAM type: NRG; PAM sequence: AAG
cagttcaatatgtactgctg

SEQ ID NO: 151010 - DNA, 20 bp, Artificial Sequence
  Description of Artificial Sequence: Synthetic oligonucleotide
  Target: LAMA2; (+) strand; PAM type: NRG; PAM sequence: TAG
tgtactgctgaagttgtacc

SEQ ID NO: 151011 - DNA, 20 bp, Artificial Sequence
  Description of Artificial Sequence: Synthetic oligonucleotide
  Target: LAMA2; (+) strand; PAM type: NRG; PAM sequence: AAG
gaagttgtacctagtttata

SEQ ID NO: 151012 - DNA, 20 bp, Artificial Sequence
  Description of Artificial Sequence: Synthetic oligonucleotide
  Target: LAMA2; (+) strand; PAM type: NRG; PAM sequence: CAG
gttgtacctagtttataaag

SEQ ID NO: 151013 - DNA, 20 bp, Artificial Sequence
  Description of Artificial Sequence: Synthetic oligonucleotide
  Target: LAMA2; (+) strand; PAM type: NRG; PAM sequence: TAG
gtacctagtttataaagcag

SEQ ID NO: 151014 - DNA, 20 bp, Artificial Sequence
  Description of Artificial Sequence: Synthetic oligonucleotide
  Target: LAMA2; (+) strand; PAM type: NRG; PAM sequence: GAG
tataaagcagtagcttctat

SEQ ID NO: 151015 - DNA, 20 bp, Artificial Sequence
  Description of Artificial Sequence: Synthetic oligonucleotide
  Target: LAMA2; (+) strand; PAM type: NRG; PAM sequence: AAG
aagcagtagcttctatgaga

SEQ ID NO: 151016 - DNA, 20 bp, Artificial Sequence
  Description of Artificial Sequence: Synthetic oligonucleotide
  Target: LAMA2; (+) strand; PAM type: NRG; PAM sequence: AAG
gcttctatgagaaagaatac

SEQ ID NO: 151017 - DNA, 20 bp, Artificial Sequence
  Description of Artificial Sequence: Synthetic oligonucleotide
  Target: LAMA2; (+) strand; PAM type: NRG; PAM sequence: CGG
gaaagaatacaagaaaacta

SEQ ID NO: 151018 - DNA, 20 bp, Artificial Sequence
  Description of Artificial Sequence: Synthetic oligonucleotide
  Target: LAMA2; (+) strand; PAM type: NRG; PAM sequence: CAG
aactacggtgactatttctc

SEQ ID NO: 151019 - DNA, 20 bp, Artificial Sequence
  Description of Artificial Sequence: Synthetic oligonucleotide
  Target: LAMA2; (+) strand; PAM type: NRG; PAM sequence: GAG
ctacggtgactatttctcca

SEQ ID NO: 151020 - DNA, 20 bp, Artificial Sequence
  Description of Artificial Sequence: Synthetic oligonucleotide
  Target: LAMA2; (+) strand; PAM type: NRG; PAM sequence: GAG
ctccagagaaaaactgtact

SEQ ID NO: 151021 - DNA, 20 bp, Artificial Sequence
  Description of Artificial Sequence: Synthetic oligonucleotide
  Target: LAMA2; (+) strand; PAM type: NRG; PAM sequence: AGG
tccagagaaaaactgtactg

SEQ ID NO: 151022 - DNA, 20 bp, Artificial Sequence
  Description of Artificial Sequence: Synthetic oligonucleotide
  Target: LAMA2; (+) strand; PAM type: NRG; PAM sequence: TAG
aaactgtactgaggaaacta

SEQ ID NO: 151023 - DNA, 20 bp, Artificial Sequence
  Description of Artificial Sequence: Synthetic oligonucleotide
  Target: LAMA2; (+) strand; PAM type: NRG; PAM sequence: AAG
actgaggaaactatagcaaa

SEQ ID NO: 151024 - DNA, 20 bp, Artificial Sequence
  Description of Artificial Sequence: Synthetic oligonucleotide
  Target: LAMA2; (+) strand; PAM type: NRG; PAM sequence: TAG
gaaaattgatgtcaacacaa

SEQ ID NO: 151025 - DNA, 20 bp, Artificial Sequence
  Description of Artificial Sequence: Synthetic oligonucleotide
  Target: LAMA2; (+) strand; PAM type: NRG; PAM sequence: AAG
acacaatagtatctcacttc

SEQ ID NO: 151026 - DNA, 20 bp, Artificial Sequence
  Description of Artificial Sequence: Synthetic oligonucleotide
  Target: LAMA2; (+) strand; PAM type: NRG; PAM sequence: AAG
cttcaagaaatcaaaaacaa

SEQ ID NO: 151027 - DNA, 20 bp, Artificial Sequence
  Description of Artificial Sequence: Synthetic oligonucleotide
  Target: LAMA2; (+) strand; PAM type: NRG; PAM sequence: TAG
aaatcaaaaacaaaagaact

SEQ ID NO: 151028 - DNA, 20 bp, Artificial Sequence
  Description of Artificial Sequence: Synthetic oligonucleotide
  Target: LAMA2; (+) strand; PAM type: NRG; PAM sequence: AAG
ctaattcaactttgttttta

SEQ ID NO: 151029 - DNA, 20 bp, Artificial Sequence
  Description of Artificial Sequence: Synthetic oligonucleotide
  Target: LAMA2; (+) strand; PAM type: NRG; PAM sequence: AGG
taattcaactttgtttttaa

SEQ ID NO: 151030 - DNA, 20 bp, Artificial Sequence
  Description of Artificial Sequence: Synthetic oligonucleotide
  Target: LAMA2; (+) strand; PAM type: NRG; PAM sequence: GGG
aattcaactttgtttttaaa

SEQ ID NO: 151031 - DNA, 20 bp, Artificial Sequence
  Description of Artificial Sequence: Synthetic oligonucleotide
  Target: LAMA2; (+) strand; PAM type: NRG; PAM sequence: AAG
aactttgtttttaaagggaa

SEQ ID NO: 151032 - DNA, 20 bp, Artificial Sequence
  Description of Artificial Sequence: Synthetic oligonucleotide
  Target: LAMA2; (+) strand; PAM type: NRG; PAM sequence: GAG
ctttgtttttaaagggaaaa

SEQ ID NO: 151033 - DNA, 20 bp, Artificial Sequence
  Description of Artificial Sequence: Synthetic oligonucleotide
  Target: LAMA2; (+) strand; PAM type: NRG; PAM sequence: AAG
ttaaagggaaaagagaacta

SEQ ID NO: 151034 - DNA, 20 bp, Artificial Sequence
  Description of Artificial Sequence: Synthetic oligonucleotide
  Target: LAMA2; (+) strand; PAM type: NRG; PAM sequence: AAG
aaagagaactaaagaaaaaa

SEQ ID NO: 151035 - DNA, 20 bp, Artificial Sequence
  Description of Artificial Sequence: Synthetic oligonucleotide
  Target: LAMA2; (+) strand; PAM type: NRG; PAM sequence: CAG
agaactaaagaaaaaaaaga

SEQ ID NO: 151036 - DNA, 20 bp, Artificial Sequence
  Description of Artificial Sequence: Synthetic oligonucleotide
  Target: LAMA2; (+) strand; PAM type: NRG; PAM sequence: TAG
aagacagccatgattttttg

SEQ ID NO: 151037 - DNA, 20 bp, Artificial Sequence
  Description of Artificial Sequence: Synthetic oligonucleotide
  Target: LAMA2; (+) strand; PAM type: NRG; PAM sequence: TAG
agccatgattttttgtagcg

SEQ ID NO: 151038 - DNA, 20 bp, Artificial Sequence
  Description of Artificial Sequence: Synthetic oligonucleotide
  Target: LAMA2; (+) strand; PAM type: NRG; PAM sequence: AGG
gccatgattttttgtagcgt

SEQ ID NO: 151039 - DNA, 20 bp, Artificial Sequence
  Description of Artificial Sequence: Synthetic oligonucleotide
  Target: LAMA2; (+) strand; PAM type: NRG; PAM sequence: GAG
gtagcgtaggccacaacatt

SEQ ID NO: 151040 - DNA, 20 bp, Artificial Sequence
  Description of Artificial Sequence: Synthetic oligonucleotide
  Target: LAMA2; (+) strand; PAM type: NRG; PAM sequence: AAG
acaacattgagctatgttca

SEQ ID NO: 151041 - DNA, 20 bp, Artificial Sequence
  Description of Artificial Sequence: Synthetic oligonucleotide
  Target: LAMA2; (+) strand; PAM type: NRG; PAM sequence: AGG
caacattgagctatgttcaa

SEQ ID NO: 151042 - DNA, 20 bp, Artificial Sequence
  Description of Artificial Sequence: Synthetic oligonucleotide
  Target: LAMA2; (+) strand; PAM type: NRG; PAM sequence: TAG
tgagctatgttcaaaggaaa

SEQ ID NO: 151043 - DNA, 20 bp, Artificial Sequence
  Description of Artificial Sequence: Synthetic oligonucleotide
  Target: LAMA2; (+) strand; PAM type: NRG; PAM sequence: AAG
tcaaaggaaatagatgtcta

SEQ ID NO: 151044 - DNA, 20 bp, Artificial Sequence
  Description of Artificial Sequence: Synthetic oligonucleotide
  Target: LAMA2; (+) strand; PAM type: NRG; PAM sequence: AAG
aagcacacatttcttcctaa

SEQ ID NO: 151045 - DNA, 20 bp, Artificial Sequence
  Description of Artificial Sequence: Synthetic oligonucleotide
  Target: LAMA2; (+) strand; PAM type: NRG; PAM sequence: TGG
cttcctaaaagaatgaaaat

SEQ ID NO: 151046 - DNA, 20 bp, Artificial Sequence
  Description of Artificial Sequence: Synthetic oligonucleotide
  Target: LAMA2; (+) strand; PAM type: NRG; PAM sequence: TGG
aagaatgaaaattggttctt

SEQ ID NO: 151047 - DNA, 20 bp, Artificial Sequence
  Description of Artificial Sequence: Synthetic oligonucleotide
  Target: LAMA2; (+) strand; PAM type: NRG; PAM sequence: GGG
agaatgaaaattggttcttt

SEQ ID NO: 151048 - DNA, 20 bp, Artificial Sequence
  Description of Artificial Sequence: Synthetic oligonucleotide
  Target: LAMA2; (+) strand; PAM type: NRG; PAM sequence: AAG
tatcatattgattttatgta

SEQ ID NO: 151049 - DNA, 20 bp, Artificial Sequence
  Description of Artificial Sequence: Synthetic oligonucleotide
  Target: LAMA2; (+) strand; PAM type: NRG; PAM sequence: AGG
atcatattgattttatgtaa

SEQ ID NO: 151050 - DNA, 20 bp, Artificial Sequence
  Description of Artificial Sequence: Synthetic oligonucleotide
  Target: LAMA2; (+) strand; PAM type: NRG; PAM sequence: TGG
tgtaaaggcaaacattcaca

SEQ ID NO: 151051 - DNA, 20 bp, Artificial Sequence
  Description of Artificial Sequence: Synthetic oligonucleotide
  Target: LAMA2; (+) strand; PAM type: NRG; PAM sequence: TGG
atctgtacataaaatatatc

SEQ ID NO: 151052 - DNA, 20 bp, Artificial Sequence
  Description of Artificial Sequence: Synthetic oligonucleotide
  Target: LAMA2; (+) strand; PAM type: NRG; PAM sequence: GAG
ctgtacataaaatatatctg

SEQ ID NO: 151053 - DNA, 20 bp, Artificial Sequence
  Description of Artificial Sequence: Synthetic oligonucleotide
  Target: LAMA2; (+) strand; PAM type: NRG; PAM sequence: AAG
aaaatatatctggagtatta

SEQ ID NO: 151054 - DNA, 20 bp, Artificial Sequence
  Description of Artificial Sequence: Synthetic oligonucleotide
  Target: LAMA2; (+) strand; PAM type: NRG; PAM sequence: TGG
tctggagtattaaagtttca

SEQ ID NO: 151055 - DNA, 20 bp, Artificial Sequence
  Description of Artificial Sequence: Synthetic oligonucleotide
  Target: LAMA2; (+) strand; PAM type: NRG; PAM sequence: TGG
ggagtattaaagtttcatgg

SEQ ID NO: 151056 - DNA, 20 bp, Artificial Sequence
  Description of Artificial Sequence: Synthetic oligonucleotide
  Target: LAMA2; (+) strand; PAM type: NRG; PAM sequence: GGG
gagtattaaagtttcatggt

SEQ ID NO: 151057 - DNA, 20 bp, Artificial Sequence
  Description of Artificial Sequence: Synthetic oligonucleotide
  Target: LAMA2; (+) strand; PAM type: NRG; PAM sequence: GGG
agtattaaagtttcatggtg

SEQ ID NO: 151058 - DNA, 20 bp, Artificial Sequence
  Description of Artificial Sequence: Synthetic oligonucleotide
  Target: LAMA2; (+) strand; PAM type: NRG; PAM sequence: TAG
attatgaaaaaatgactata

SEQ ID NO: 151059 - DNA, 20 bp, Artificial Sequence
  Description of Artificial Sequence: Synthetic oligonucleotide
  Target: LAMA2; (+) strand; PAM type: NRG; PAM sequence: AGG
ttatgaaaaaatgactatat

SEQ ID NO: 151060 - DNA, 20 bp, Artificial Sequence
  Description of Artificial Sequence: Synthetic oligonucleotide
  Target: LAMA2; (+) strand; PAM type: NRG; PAM sequence: TAG
aaatgactatataggctcca

SEQ ID NO: 151061 - DNA, 20 bp, Artificial Sequence
  Description of Artificial Sequence: Synthetic oligonucleotide
  Target: LAMA2; (+) strand; PAM type: NRG; PAM sequence: AGG
aatgactatataggctccat

SEQ ID NO: 151062 - DNA, 20 bp, Artificial Sequence
  Description of Artificial Sequence: Synthetic oligonucleotide
  Target: LAMA2; (+) strand; PAM type: NRG; PAM sequence: GGG
atgactatataggctccata

SEQ ID NO: 151063 - DNA, 20 bp, Artificial Sequence
  Description of Artificial Sequence: Synthetic oligonucleotide
  Target: LAMA2; (+) strand; PAM type: NRG; PAM sequence: TAG
agggacatgatgataaaaaa

SEQ ID NO: 151064 - DNA, 20 bp, Artificial Sequence
  Description of Artificial Sequence: Synthetic oligonucleotide
  Target: LAMA2; (+) strand; PAM type: NRG; PAM sequence: AAG
atgatgataaaaaatagatt

SEQ ID NO: 151065 - DNA, 20 bp, Artificial Sequence
  Description of Artificial Sequence: Synthetic oligonucleotide
  Target: LAMA2; (+) strand; PAM type: NRG; PAM sequence: TAG
atgataaaaaatagattaag

SEQ ID NO: 151066 - DNA, 20 bp, Artificial Sequence
  Description of Artificial Sequence: Synthetic oligonucleotide
  Target: LAMA2; (+) strand; PAM type: NRG; PAM sequence: TAG
attaagtagattgaaaacac

SEQ ID NO: 151067 - DNA, 20 bp, Artificial Sequence
  Description of Artificial Sequence: Synthetic oligonucleotide
  Target: LAMA2; (+) strand; PAM type: NRG; PAM sequence: AAG
agattgaaaacactagtcta

SEQ ID NO: 151068 - DNA, 20 bp, Artificial Sequence
  Description of Artificial Sequence: Synthetic oligonucleotide
  Target: LAMA2; (+) strand; PAM type: NRG; PAM sequence: AAG
gaaaacactagtctaaagtg

SEQ ID NO: 151069 - DNA, 20 bp, Artificial Sequence
  Description of Artificial Sequence: Synthetic oligonucleotide
  Target: LAMA2; (+) strand; PAM type: NRG; PAM sequence: GAG
gttttaatatcataatatgt

SEQ ID NO: 151070 - DNA, 20 bp, Artificial Sequence
  Description of Artificial Sequence: Synthetic oligonucleotide
  Target: LAMA2; (+) strand; PAM type: NRG; PAM sequence: AAG
cataatatgtgagaatataa

SEQ ID NO: 151071 - DNA, 20 bp, Artificial Sequence
  Description of Artificial Sequence: Synthetic oligonucleotide
  Target: LAMA2; (+) strand; PAM type: NRG; PAM sequence: TGG
aatataaaagtatttacgta

SEQ ID NO: 151072 - DNA, 20 bp, Artificial Sequence
  Description of Artificial Sequence: Synthetic oligonucleotide
  Target: LAMA2; (+) strand; PAM type: NRG; PAM sequence: TGG
tacgtatggattatttacaa

SEQ ID NO: 151073 - DNA, 20 bp, Artificial Sequence
  Description of Artificial Sequence: Synthetic oligonucleotide
  Target: LAMA2; (+) strand; PAM type: NRG; PAM sequence: TAG
caatggaaaaatgactatta

SEQ ID NO: 151074 - DNA, 20 bp, Artificial Sequence
  Description of Artificial Sequence: Synthetic oligonucleotide
  Target: LAMA2; (+) strand; PAM type: NRG; PAM sequence: TAG
attttattaatgtaattgat

SEQ ID NO: 151075 - DNA, 20 bp, Artificial Sequence
  Description of Artificial Sequence: Synthetic oligonucleotide
  Target: LAMA2; (+) strand; PAM type: NRG; PAM sequence: TGG
aatgtaattgattagaataa

SEQ ID NO: 151076 - DNA, 20 bp, Artificial Sequence
  Description of Artificial Sequence: Synthetic oligonucleotide
  Target: LAMA2; (+) strand; PAM type: NRG; PAM sequence: TAG
aattgattagaataatggta

SEQ ID NO: 151077 - DNA, 20 bp, Artificial Sequence
  Description of Artificial Sequence: Synthetic oligonucleotide
  Target: LAMA2; (+) strand; PAM type: NRG; PAM sequence: TAG
ttagaataatggtatagaaa

SEQ ID NO: 151078 - DNA, 20 bp, Artificial Sequence
  Description of Artificial Sequence: Synthetic oligonucleotide
  Target: LAMA2; (+) strand; PAM type: NRG; PAM sequence: AAG
taatggtatagaaatagcaa

SEQ ID NO: 151079 - DNA, 20 bp, Artificial Sequence
  Description of Artificial Sequence: Synthetic oligonucleotide
  Target: LAMA2; (+) strand; PAM type: NRG; PAM sequence: CAG
tggtatagaaatagcaaaag

SEQ ID NO: 151080 - DNA, 20 bp, Artificial Sequence
  Description of Artificial Sequence: Synthetic oligonucleotide
  Target: LAMA2; (+) strand; PAM type: NRG; PAM sequence: TGG
aatagcaaaagcagaatatt

SEQ ID NO: 151081 - DNA, 20 bp, Artificial Sequence
  Description of Artificial Sequence: Synthetic oligonucleotide
  Target: LAMA2; (+) strand; PAM type: NRG; PAM sequence: AAG
aaagcagaatatttggtttt

SEQ ID NO: 151082 - DNA, 20 bp, Artificial Sequence
  Description of Artificial Sequence: Synthetic oligonucleotide
  Target: LAMA2; (+) strand; PAM type: NRG; PAM sequence: TGG
tatttggttttaagaaaata

SEQ ID NO: 151083 - DNA, 20 bp, Artificial Sequence
  Description of Artificial Sequence: Synthetic oligonucleotide
  Target: LAMA2; (+) strand; PAM type: NRG; PAM sequence: AAG
ttaagaaaatatggtgatat

SEQ ID NO: 151084 - DNA, 20 bp, Artificial Sequence
  Description of Artificial Sequence: Synthetic oligonucleotide
  Target: LAMA2; (+) strand; PAM type: NRG; PAM sequence: AGG
taagaaaatatggtgatata

SEQ ID NO: 151085 - DNA, 20 bp, Artificial Sequence
  Description of Artificial Sequence: Synthetic oligonucleotide
  Target: LAMA2; (+) strand; PAM type: NRG; PAM sequence: GGG
aagaaaatatggtgatataa

SEQ ID NO: 151086 - DNA, 20 bp, Artificial Sequence
  Description of Artificial Sequence: Synthetic oligonucleotide
  Target: LAMA2; (+) strand; PAM type: NRG; PAM sequence: TAG
agggaatgaatattaatttc

SEQ ID NO: 151087 - DNA, 20 bp, Artificial Sequence
  Description of Artificial Sequence: Synthetic oligonucleotide
  Target: LAMA2; (+) strand; PAM type: NRG; PAM sequence: GAG
ggaatgaatattaatttcta

SEQ ID NO: 151088 - DNA, 20 bp, Artificial Sequence
  Description of Artificial Sequence: Synthetic oligonucleotide
  Target: LAMA2; (+) strand; PAM type: NRG; PAM sequence: TGG
atgaatattaatttctagag

SEQ ID NO: 151089 - DNA, 20 bp, Artificial Sequence
  Description of Artificial Sequence: Synthetic oligonucleotide
  Target: LAMA2; (+) strand; PAM type: NRG; PAM sequence: AAG
aatattaatttctagagtgg

SEQ ID NO: 151090 - DNA, 20 bp, Artificial Sequence
  Description of Artificial Sequence: Synthetic oligonucleotide
  Target: LAMA2; (+) strand; PAM type: NRG; PAM sequence: TAG
atttctagagtggaagtctg

SEQ ID NO: 151091 - DNA, 20 bp, Artificial Sequence
  Description of Artificial Sequence: Synthetic oligonucleotide
  Target: LAMA2; (+) strand; PAM type: NRG; PAM sequence: TAG
agtggaagtctgtagcgttc

SEQ ID NO: 151092 - DNA, 20 bp, Artificial Sequence
  Description of Artificial Sequence: Synthetic oligonucleotide
  Target: LAMA2; (+) strand; PAM type: NRG; PAM sequence: TAG
ctagaaattaccgtgtttta

SEQ ID NO: 151093 - DNA, 20 bp, Artificial Sequence
  Description of Artificial Sequence: Synthetic oligonucleotide
  Target: LAMA2; (+) strand; PAM type: NRG; PAM sequence: AGG
tagaaattaccgtgttttat

SEQ ID NO: 151094 - DNA, 20 bp, Artificial Sequence
  Description of Artificial Sequence: Synthetic oligonucleotide
  Target: LAMA2; (+) strand; PAM type: NRG; PAM sequence: TAG
ttaccgtgttttataggctg

SEQ ID NO: 151095 - DNA, 20 bp, Artificial Sequence
  Description of Artificial Sequence: Synthetic oligonucleotide
  Target: LAMA2; (+) strand; PAM type: NRG; PAM sequence: AAG
cattaaatacgcaaattgaa

SEQ ID NO: 151096 - DNA, 20 bp, Artificial Sequence
  Description of Artificial Sequence: Synthetic oligonucleotide
  Target: LAMA2; (+) strand; PAM type: NRG; PAM sequence: TGG
aaattgaaaagaatcactaa

SEQ ID NO: 151097 - DNA, 20 bp, Artificial Sequence
  Description of Artificial Sequence: Synthetic oligonucleotide
  Target: LAMA2; (+) strand; PAM type: NRG; PAM sequence: AAG
taatggactctatacaaata

SEQ ID NO: 151098 - DNA, 20 bp, Artificial Sequence
  Description of Artificial Sequence: Synthetic oligonucleotide
  Target: LAMA2; (+) strand; PAM type: NRG; PAM sequence: TGG
aagtgttaaaatgaatttat

SEQ ID NO: 151099 - DNA, 20 bp, Artificial Sequence
  Description of Artificial Sequence: Synthetic oligonucleotide
  Target: LAMA2; (+) strand; PAM type: NRG; PAM sequence: TAG
aaatgaatttattggatcaa

SEQ ID NO: 151100 - DNA, 20 bp, Artificial Sequence
  Description of Artificial Sequence: Synthetic oligonucleotide
  Target: LAMA2; (+) strand; PAM type: NRG; PAM sequence: AGG
aatgaatttattggatcaat

SEQ ID NO: 151101 - DNA, 20 bp, Artificial Sequence
  Description of Artificial Sequence: Synthetic oligonucleotide
  Target: LAMA2; (+) strand; PAM type: NRG; PAM sequence: GAG
tgaatttattggatcaatag

SEQ ID NO: 151102 - DNA, 20 bp, Artificial Sequence
  Description of Artificial Sequence: Synthetic oligonucleotide
  Target: LAMA2; (+) strand; PAM type: NRG; PAM sequence: CAG
ttggatcaataggagcttcc

SEQ ID NO: 151103 - DNA, 20 bp, Artificial Sequence
  Description of Artificial Sequence: Synthetic oligonucleotide
  Target: LAMA2; (+) strand; PAM type: NRG; PAM sequence: TAG
gatcaataggagcttcccag

SEQ ID NO: 151104 - DNA, 20 bp, Artificial Sequence
  Description of Artificial Sequence: Synthetic oligonucleotide
  Target: LAMA2; (+) strand; PAM type: NRG; PAM sequence: AGG
atcaataggagcttcccagt

SEQ ID NO: 151105 - DNA, 20 bp, Artificial Sequence
  Description of Artificial Sequence: Synthetic oligonucleotide
  Target: LAMA2; (+) strand; PAM type: NRG; PAM sequence: GAG
agcttcccagtaggaatgct

SEQ ID NO: 151106 - DNA, 20 bp, Artificial Sequence
  Description of Artificial Sequence: Synthetic oligonucleotide
  Target: LAMA2; (+) strand; PAM type: NRG; PAM sequence: GAG
cttcccagtaggaatgctga

SEQ ID NO: 151107 - DNA, 20 bp, Artificial Sequence
  Description of Artificial Sequence: Synthetic oligonucleotide
  Target: LAMA2; (+) strand; PAM type: NRG; PAM sequence: AGG
ttcccagtaggaatgctgag

SEQ ID NO: 151108 - DNA, 20 bp, Artificial Sequence
  Description of Artificial Sequence: Synthetic oligonucleotide
  Target: LAMA2; (+) strand; PAM type: NRG; PAM sequence: TAG
aggaatgctgagaggtttaa

SEQ ID NO: 151109 - DNA, 20 bp, Artificial Sequence
  Description of Artificial Sequence: Synthetic oligonucleotide
  Target: LAMA2; (+) strand; PAM type: NRG; PAM sequence: TAG
tgctgagaggtttaatagat

SEQ ID NO: 151110 - DNA, 20 bp, Artificial Sequence
  Description of Artificial Sequence: Synthetic oligonucleotide
  Target: LAMA2; (+) strand; PAM type: NRG; PAM sequence: TAG
agattagactccattttgtt

SEQ ID NO: 151111 - DNA, 20 bp, Artificial Sequence
  Description of Artificial Sequence: Synthetic oligonucleotide
  Target: LAMA2; (+) strand; PAM type: NRG; PAM sequence: CAG
ctccattttgtttagattaa

SEQ ID NO: 151112 - DNA, 20 bp, Artificial Sequence
  Description of Artificial Sequence: Synthetic oligonucleotide
  Target: LAMA2; (+) strand; PAM type: NRG; PAM sequence: AAG
ttatgtttttgcaaccattg

SEQ ID NO: 151113 - DNA, 20 bp, Artificial Sequence
  Description of Artificial Sequence: Synthetic oligonucleotide
  Target: LAMA2; (+) strand; PAM type: NRG; PAM sequence: TAG
tttttgcaaccattgaagta

SEQ ID NO: 151114 - DNA, 20 bp, Artificial Sequence
  Description of Artificial Sequence: Synthetic oligonucleotide
  Target: LAMA2; (+) strand; PAM type: NRG; PAM sequence: AAG
gaagtatagataaacaaaaa

SEQ ID NO: 151115 - DNA, 20 bp, Artificial Sequence
  Description of Artificial Sequence: Synthetic oligonucleotide
  Target: LAMA2; (+) strand; PAM type: NRG; PAM sequence: CAG
aataactttttaaaattcat

SEQ ID NO: 151116 - DNA, 20 bp, Artificial Sequence
  Description of Artificial Sequence: Synthetic oligonucleotide
  Target: LAMA2; (+) strand; PAM type: NRG; PAM sequence: TAG
tcatcagtacaaataaatta

SEQ ID NO: 151117 - DNA, 20 bp, Artificial Sequence
  Description of Artificial Sequence: Synthetic oligonucleotide
  Target: LAMA2; (+) strand; PAM type: NRG; PAM sequence: AAG
aaataaattatagaatcata

SEQ ID NO: 151118 - DNA, 20 bp, Artificial Sequence
  Description of Artificial Sequence: Synthetic oligonucleotide
  Target: LAMA2; (+) strand; PAM type: NRG; PAM sequence: AGG
aataaattatagaatcataa

SEQ ID NO: 151119 - DNA, 20 bp, Artificial Sequence
  Description of Artificial Sequence: Synthetic oligonucleotide
  Target: LAMA2; (+) strand; PAM type: NRG; PAM sequence: TAG
tatagaatcataaaggaaaa

SEQ ID NO: 151120 - DNA, 20 bp, Artificial Sequence
  Description of Artificial Sequence: Synthetic oligonucleotide
  Target: LAMA2; (+) strand; PAM type: NRG; PAM sequence: CAG
atgatgattaaaataacatt

SEQ ID NO: 151121 - DNA, 20 bp, Artificial Sequence
  Description of Artificial Sequence: Synthetic oligonucleotide
  Target: LAMA2; (+) strand; PAM type: NRG; PAM sequence: TGG
gattaaaataacattcagtc

SEQ ID NO: 151122 - DNA, 20 bp, Artificial Sequence
  Description of Artificial Sequence: Synthetic oligonucleotide
  Target: LAMA2; (+) strand; PAM type: NRG; PAM sequence: AAG
taaaataacattcagtctgg

SEQ ID NO: 151123 - DNA, 20 bp, Artificial Sequence
  Description of Artificial Sequence: Synthetic oligonucleotide
  Target: LAMA2; (+) strand; PAM type: NRG; PAM sequence: AGG
aaaataacattcagtctgga

SEQ ID NO: 151124 - DNA, 20 bp, Artificial Sequence
  Description of Artificial Sequence: Synthetic oligonucleotide
  Target: LAMA2; (+) strand; PAM type: NRG; PAM sequence: TAG
taccttcatcattcgatatt

SEQ ID NO: 151125 - DNA, 20 bp, Artificial Sequence
  Description of Artificial Sequence: Synthetic oligonucleotide
  Target: LAMA2; (+) strand; PAM type: NRG; PAM sequence: AGG
accttcatcattcgatattt

SEQ ID NO: 151126 - DNA, 20 bp, Artificial Sequence
  Description of Artificial Sequence: Synthetic oligonucleotide
  Target: LAMA2; (+) strand; PAM type: NRG; PAM sequence: TAG
ttatattcccatctatgctt

SEQ ID NO: 151127 - DNA, 20 bp, Artificial Sequence
  Description of Artificial Sequence: Synthetic oligonucleotide
  Target: LAMA2; (+) strand; PAM type: NRG; PAM sequence: AGG
tatattcccatctatgcttt

SEQ ID NO: 151128 - DNA, 20 bp, Artificial Sequence
  Description of Artificial Sequence: Synthetic oligonucleotide
  Target: LAMA2; (+) strand; PAM type: NRG; PAM sequence: GGG
atattcccatctatgcttta

SEQ ID NO: 151129 - DNA, 20 bp, Artificial Sequence
  Description of Artificial Sequence: Synthetic oligonucleotide
  Target: LAMA2; (+) strand; PAM type: NRG; PAM sequence: TGG
ctatgctttagggactgaat

SEQ ID NO: 151130 - DNA, 20 bp, Artificial Sequence
  Description of Artificial Sequence: Synthetic oligonucleotide
  Target: LAMA2; (+) strand; PAM type: NRG; PAM sequence: TGG
gctttagggactgaattgga

SEQ ID NO: 151131 - DNA, 20 bp, Artificial Sequence
  Description of Artificial Sequence: Synthetic oligonucleotide
  Target: LAMA2; (+) strand; PAM type: NRG; PAM sequence: TGG
ttagggactgaattggatgg

SEQ ID NO: 151132 - DNA, 20 bp, Artificial Sequence
  Description of Artificial Sequence: Synthetic oligonucleotide
  Target: LAMA2; (+) strand; PAM type: NRG; PAM sequence: AAG
ctgaattggatggtggtaat

SEQ ID NO: 151133 - DNA, 20 bp, Artificial Sequence
  Description of Artificial Sequence: Synthetic oligonucleotide
  Target: LAMA2; (+) strand; PAM type: NRG; PAM sequence: AGG
tgaattggatggtggtaata

SEQ ID NO: 151134 - DNA, 20 bp, Artificial Sequence
  Description of Artificial Sequence: Synthetic oligonucleotide
  Target: LAMA2; (+) strand; PAM type: NRG; PAM sequence: TGG
tggtaataaggtataatata

SEQ ID NO: 151135 - DNA, 20 bp, Artificial Sequence
  Description of Artificial Sequence: Synthetic oligonucleotide
  Target: LAMA2; (+) strand; PAM type: NRG; PAM sequence: TGG
tatggtctgtgccaatctta

SEQ ID NO: 151136 - DNA, 20 bp, Artificial Sequence
  Description of Artificial Sequence: Synthetic oligonucleotide
  Target: LAMA2; (+) strand; PAM type: NRG; PAM sequence: TGG
gtctgtgccaatcttatgga

SEQ ID NO: 151137 - DNA, 20 bp, Artificial Sequence
  Description of Artificial Sequence: Synthetic oligonucleotide
  Target: LAMA2; (+) strand; PAM type: NRG; PAM sequence: AAG
gtgccaatcttatggatggc

SEQ ID NO: 151138 - DNA, 20 bp, Artificial Sequence
  Description of Artificial Sequence: Synthetic oligonucleotide
  Target: LAMA2; (+) strand; PAM type: NRG; PAM sequence: AAG
aatcttatggatggcaagaa

SEQ ID NO: 151139 - DNA, 20 bp, Artificial Sequence
  Description of Artificial Sequence: Synthetic oligonucleotide
  Target: LAMA2; (+) strand; PAM type: NRG; PAM sequence: TGG
gcaagaaaagaacaaaatta

SEQ ID NO: 151140 - DNA, 20 bp, Artificial Sequence
  Description of Artificial Sequence: Synthetic oligonucleotide
  Target: LAMA2; (+) strand; PAM type: NRG; PAM sequence: TAG
ttatttcaataaatgccctt

SEQ ID NO: 151141 - DNA, 20 bp, Artificial Sequence
  Description of Artificial Sequence: Synthetic oligonucleotide
  Target: LAMA2; (+) strand; PAM type: NRG; PAM sequence: TAG
tttcaataaatgccctttag

SEQ ID NO: 151142 - DNA, 20 bp, Artificial Sequence
  Description of Artificial Sequence: Synthetic oligonucleotide
  Target: LAMA2; (+) strand; PAM type: NRG; PAM sequence: TGG
ttagtagatatttttacatc

SEQ ID NO: 151143 - DNA, 20 bp, Artificial Sequence
  Description of Artificial Sequence: Synthetic oligonucleotide
  Target: LAMA2; (+) strand; PAM type: NRG; PAM sequence: GAG
agtagatatttttacatctg

SEQ ID NO: 151144 - DNA, 20 bp, Artificial Sequence
  Description of Artificial Sequence: Synthetic oligonucleotide
  Target: LAMA2; (+) strand; PAM type: NRG; PAM sequence: TGG
tctggagacattctcacatc

SEQ ID NO: 151145 - DNA, 20 bp, Artificial Sequence
  Description of Artificial Sequence: Synthetic oligonucleotide
  Target: LAMA2; (+) strand; PAM type: NRG; PAM sequence: AAG
ggagacattctcacatctgg

SEQ ID NO: 151146 - DNA, 20 bp, Artificial Sequence
  Description of Artificial Sequence: Synthetic oligonucleotide
  Target: LAMA2; (+) strand; PAM type: NRG; PAM sequence: GAG
agacattctcacatctggaa

SEQ ID NO: 151147 - DNA, 20 bp, Artificial Sequence
  Description of Artificial Sequence: Synthetic oligonucleotide
  Target: LAMA2; (+) strand; PAM type: NRG; PAM sequence: AGG
gacattctcacatctggaag

SEQ ID NO: 151148 - DNA, 20 bp, Artificial Sequence
  Description of Artificial Sequence: Synthetic oligonucleotide
  Target: LAMA2; (+) strand; PAM type: NRG; PAM sequence: CAG
tctggaagaggacactgcaa

SEQ ID NO: 151149 - DNA, 20 bp, Artificial Sequence
  Description of Artificial Sequence: Synthetic oligonucleotide
  Target: LAMA2; (+) strand; PAM type: NRG; PAM sequence: TAG
ggaagaggacactgcaacag

SEQ ID NO: 151150 - DNA, 20 bp, Artificial Sequence
  Description of Artificial Sequence: Synthetic oligonucleotide
  Target: LAMA2; (+) strand; PAM type: NRG; PAM sequence: TGG
taatcttgtcatgaaaatct

SEQ ID NO: 151151 - DNA, 20 bp, Artificial Sequence
  Description of Artificial Sequence: Synthetic oligonucleotide
  Target: LAMA2; (+) strand; PAM type: NRG; PAM sequence: GGG
aatcttgtcatgaaaatctt

SEQ ID NO: 151152 - DNA, 20 bp, Artificial Sequence
  Description of Artificial Sequence: Synthetic oligonucleotide
  Target: LAMA2; (+) strand; PAM type: NRG; PAM sequence: TGG
atcttttttgctcaactccc

SEQ ID NO: 151153 - DNA, 20 bp, Artificial Sequence
  Description of Artificial Sequence: Synthetic oligonucleotide
  Target: LAMA2; (+) strand; PAM type: NRG; PAM sequence: CGG
ttctgtcttatttttttctt

SEQ ID NO: 151154 - DNA, 20 bp, Artificial Sequence
  Description of Artificial Sequence: Synthetic oligonucleotide
  Target: LAMA2; (+) strand; PAM type: NRG; PAM sequence: GGG
tctgtcttatttttttcttc

SEQ ID NO: 151155 - DNA, 20 bp, Artificial Sequence
  Description of Artificial Sequence: Synthetic oligonucleotide
  Target: LAMA2; (+) strand; PAM type: NRG; PAM sequence: GGG
ctgtcttatttttttcttcg

SEQ ID NO: 151156 - DNA, 20 bp, Artificial Sequence
  Description of Artificial Sequence: Synthetic oligonucleotide
  Target: LAMA2; (+) strand; PAM type: NRG; PAM sequence: TAG
ttatttttttcttcggggca

SEQ ID NO: 151157 - DNA, 20 bp, Artificial Sequence
  Description of Artificial Sequence: Synthetic oligonucleotide
  Target: LAMA2; (+) strand; PAM type: NRG; PAM sequence: TGG
tttttttcttcggggcatag

SEQ ID NO: 151158 - DNA, 20 bp, Artificial Sequence
  Description of Artificial Sequence: Synthetic oligonucleotide
  Target: LAMA2; (+) strand; PAM type: NRG; PAM sequence: TGG
cttcggggcatagtggacac

SEQ ID NO: 151159 - DNA, 20 bp, Artificial Sequence
  Description of Artificial Sequence: Synthetic oligonucleotide
  Target: LAMA2; (+) strand; PAM type: NRG; PAM sequence: TGG
gtggacactggtgatgaatt

SEQ ID NO: 151160 - DNA, 20 bp, Artificial Sequence
  Description of Artificial Sequence: Synthetic oligonucleotide
  Target: LAMA2; (+) strand; PAM type: NRG; PAM sequence: CAG
actggtgatgaatttggtgt

SEQ ID NO: 151161 - DNA, 20 bp, Artificial Sequence
  Description of Artificial Sequence: Synthetic oligonucleotide
  Target: LAMA2; (+) strand; PAM type: NRG; PAM sequence: CAG
gatgaatttggtgtcagatc

SEQ ID NO: 151162 - DNA, 20 bp, Artificial Sequence
  Description of Artificial Sequence: Synthetic oligonucleotide
  Target: LAMA2; (+) strand; PAM type: NRG; PAM sequence: CAG
tgttgtctgtacccctctta

SEQ ID NO: 151163 - DNA, 20 bp, Artificial Sequence
  Description of Artificial Sequence: Synthetic oligonucleotide
  Target: LAMA2; (+) strand; PAM type: NRG; PAM sequence: CAG
tgtctgtacccctcttacag

SEQ ID NO: 151164 - DNA, 20 bp, Artificial Sequence
  Description of Artificial Sequence: Synthetic oligonucleotide
  Target: LAMA2; (+) strand; PAM type: NRG; PAM sequence: AAG
ccttgtaatataattatctg

SEQ ID NO: 151165 - DNA, 20 bp, Artificial Sequence
  Description of Artificial Sequence: Synthetic oligonucleotide
  Target: LAMA2; (+) strand; PAM type: NRG; PAM sequence: CAG
ttatctgaagtccgcctcat

SEQ ID NO: 151166 - DNA, 20 bp, Artificial Sequence
  Description of Artificial Sequence: Synthetic oligonucleotide
  Target: LAMA2; (+) strand; PAM type: NRG; PAM sequence: AAG
ctgaagtccgcctcatcaga

SEQ ID NO: 151167 - DNA, 20 bp, Artificial Sequence
  Description of Artificial Sequence: Synthetic oligonucleotide
  Target: LAMA2; (+) strand; PAM type: NRG; PAM sequence: TAG
ccgcctcatcagaaagtaca

SEQ ID NO: 151168 - DNA, 20 bp, Artificial Sequence
  Description of Artificial Sequence: Synthetic oligonucleotide
  Target: LAMA2; (+) strand; PAM type: NRG; PAM sequence: AGG
cgcctcatcagaaagtacat

SEQ ID NO: 151169 - DNA, 20 bp, Artificial Sequence
  Description of Artificial Sequence: Synthetic oligonucleotide
  Target: LAMA2; (+) strand; PAM type: NRG; PAM sequence: GGG
gcctcatcagaaagtacata

SEQ ID NO: 151170 - DNA, 20 bp, Artificial Sequence
  Description of Artificial Sequence: Synthetic oligonucleotide
  Target: LAMA2; (+) strand; PAM type: NRG; PAM sequence: AAG
tatcgtgactctatttctcc

SEQ ID NO: 151171 - DNA, 20 bp, Artificial Sequence
  Description of Artificial Sequence: Synthetic oligonucleotide
  Target: LAMA2; (+) strand; PAM type: NRG; PAM sequence: TAG
cgtgactctatttctccaag

SEQ ID NO: 151172 - DNA, 20 bp, Artificial Sequence
  Description of Artificial Sequence: Synthetic oligonucleotide
  Target: LAMA2; (+) strand; PAM type: NRG; PAM sequence: AAG
ctccaagtagaaactgtgct

SEQ ID NO: 151173 - DNA, 20 bp, Artificial Sequence
  Description of Artificial Sequence: Synthetic oligonucleotide
  Target: LAMA2; (+) strand; PAM type: NRG; PAM sequence: AGG
tccaagtagaaactgtgcta

SEQ ID NO: 151174 - DNA, 20 bp, Artificial Sequence
  Description of Artificial Sequence: Synthetic oligonucleotide
  Target: LAMA2; (+) strand; PAM type: NRG; PAM sequence: GGG
ccaagtagaaactgtgctaa

SEQ ID NO: 151175 - DNA, 20 bp, Artificial Sequence
  Description of Artificial Sequence: Synthetic oligonucleotide
  Target: LAMA2; (+) strand; PAM type: NRG; PAM sequence: AAG
aaactgtgctaagggaacta

SEQ ID NO: 151176 - DNA, 20 bp, Artificial Sequence
  Description of Artificial Sequence: Synthetic oligonucleotide
  Target: LAMA2; (+) strand; PAM type: NRG; PAM sequence: AAG
ctaagggaactaaagcaaaa

SEQ ID NO: 151177 - DNA, 20 bp, Artificial Sequence
  Description of Artificial Sequence: Synthetic oligonucleotide
  Target: LAMA2; (+) strand; PAM type: NRG; PAM sequence: GAG
tcctttgctataatcctctt

SEQ ID NO: 151178 - DNA, 20 bp, Artificial Sequence
  Description of Artificial Sequence: Synthetic oligonucleotide
  Target: LAMA2; (+) strand; PAM type: NRG; PAM sequence: AGG
cctttgctataatcctcttg

SEQ ID NO: 151179 - DNA, 20 bp, Artificial Sequence
  Description of Artificial Sequence: Synthetic oligonucleotide
  Target: LAMA2; (+) strand; PAM type: NRG; PAM sequence: GGG
ctttgctataatcctcttga

SEQ ID NO: 151180 - DNA, 20 bp, Artificial Sequence
  Description of Artificial Sequence: Synthetic oligonucleotide
  Target: LAMA2; (+) strand; PAM type: NRG; PAM sequence: TAG
tatctcatatgtcttgtata

SEQ ID NO: 151181 - DNA, 20 bp, Artificial Sequence
  Description of Artificial Sequence: Synthetic oligonucleotide
  Target: LAMA2; (+) strand; PAM type: NRG; PAM sequence: TAG
ctcatatgtcttgtatatag

SEQ ID NO: 151182 - DNA, 20 bp, Artificial Sequence
  Description of Artificial Sequence: Synthetic oligonucleotide
  Target: LAMA2; (+) strand; PAM type: NRG; PAM sequence: CAG
atgtcttgtatatagtagtt

SEQ ID NO: 151183 - DNA, 20 bp, Artificial Sequence
  Description of Artificial Sequence: Synthetic oligonucleotide
  Target: LAMA2; (+) strand; PAM type: NRG; PAM sequence: GAG
gtatatagtagttcagctat

SEQ ID NO: 151184 - DNA, 20 bp, Artificial Sequence
  Description of Artificial Sequence: Synthetic oligonucleotide
  Target: LAMA2; (+) strand; PAM type: NRG; PAM sequence: AAG
gttgatgaacgaataatata

SEQ ID NO: 151185 - DNA, 20 bp, Artificial Sequence
  Description of Artificial Sequence: Synthetic oligonucleotide
  Target: LAMA2; (+) strand; PAM type: NRG; PAM sequence: AAG
aacgaataatataaagaata

SEQ ID NO: 151186 - DNA, 20 bp, Artificial Sequence
  Description of Artificial Sequence: Synthetic oligonucleotide
  Target: LAMA2; (+) strand; PAM type: NRG; PAM sequence: AAG
ataaagaataaagcaacgat

SEQ ID NO: 151187 - DNA, 20 bp, Artificial Sequence
  Description of Artificial Sequence: Synthetic oligonucleotide
  Target: LAMA2; (+) strand; PAM type: NRG; PAM sequence: GAG
aagcaacgataagaaataat

SEQ ID NO: 151188 - DNA, 20 bp, Artificial Sequence
  Description of Artificial Sequence: Synthetic oligonucleotide
  Target: LAMA2; (+) strand; PAM type: NRG; PAM sequence: CAG
caacgataagaaataatgag

SEQ ID NO: 151189 - DNA, 20 bp, Artificial Sequence
  Description of Artificial Sequence: Synthetic oligonucleotide
  Target: LAMA2; (+) strand; PAM type: NRG; PAM sequence: GAG
acgataagaaataatgagca

SEQ ID NO: 151190 - DNA, 20 bp, Artificial Sequence
  Description of Artificial Sequence: Synthetic oligonucleotide
  Target: LAMA2; (+) strand; PAM type: NRG; PAM sequence: CAG
taataatttgatattgataa

SEQ ID NO: 151191 - DNA, 20 bp, Artificial Sequence
  Description of Artificial Sequence: Synthetic oligonucleotide
  Target: LAMA2; (+) strand; PAM type: NRG; PAM sequence: GAG
ataatttgatattgataaca

SEQ ID NO: 151192 - DNA, 20 bp, Artificial Sequence
  Description of Artificial Sequence: Synthetic oligonucleotide
  Target: LAMA2; (+) strand; PAM type: NRG; PAM sequence: AGG
taatttgatattgataacag

SEQ ID NO: 151193 - DNA, 20 bp, Artificial Sequence
  Description of Artificial Sequence: Synthetic oligonucleotide
  Target: LAMA2; (+) strand; PAM type: NRG; PAM sequence: AAG
tttgatattgataacagagg

SEQ ID NO: 151194 - DNA, 20 bp, Artificial Sequence
  Description of Artificial Sequence: Synthetic oligonucleotide
  Target: LAMA2; (+) strand; PAM type: NRG; PAM sequence: AAG
agaggaagttaaattattca

SEQ ID NO: 151195 - DNA, 20 bp, Artificial Sequence
  Description of Artificial Sequence: Synthetic oligonucleotide
  Target: LAMA2; (+) strand; PAM type: NRG; PAM sequence: GAG
aggaagttaaattattcaaa

SEQ ID NO: 151196 - DNA, 20 bp, Artificial Sequence
  Description of Artificial Sequence: Synthetic oligonucleotide
  Target: LAMA2; (+) strand; PAM type: NRG; PAM sequence: AAG
attcaaagagctcaaccata

SEQ ID NO: 151197 - DNA, 20 bp, Artificial Sequence
  Description of Artificial Sequence: Synthetic oligonucleotide
  Target: LAMA2; (+) strand; PAM type: NRG; PAM sequence: CAG
caaagagctcaaccataaag

SEQ ID NO: 151198 - DNA, 20 bp, Artificial Sequence
  Description of Artificial Sequence: Synthetic oligonucleotide
  Target: LAMA2; (+) strand; PAM type: NRG; PAM sequence: TGG
gagctcaaccataaagcaga

SEQ ID NO: 151199 - DNA, 20 bp, Artificial Sequence
  Description of Artificial Sequence: Synthetic oligonucleotide
  Target: LAMA2; (+) strand; PAM type: NRG; PAM sequence: AAG
aagcagatggcttcactttc

SEQ ID NO: 151200 - DNA, 20 bp, Artificial Sequence
  Description of Artificial Sequence: Synthetic oligonucleotide
  Target: LAMA2; (+) strand; PAM type: NRG; PAM sequence: TGG
agatggcttcactttcaagc

SEQ ID NO: 151201 - DNA, 20 bp, Artificial Sequence
  Description of Artificial Sequence: Synthetic oligonucleotide
  Target: LAMA2; (+) strand; PAM type: NRG; PAM sequence: GGG
gatggcttcactttcaagct

SEQ ID NO: 151202 - DNA, 20 bp, Artificial Sequence
  Description of Artificial Sequence: Synthetic oligonucleotide
  Target: LAMA2; (+) strand; PAM type: NRG; PAM sequence: AAG
gctgggaatcaaaaaacttt

SEQ ID NO: 151203 - DNA, 20 bp, Artificial Sequence
  Description of Artificial Sequence: Synthetic oligonucleotide
  Target: LAMA2; (+) strand; PAM type: NRG; PAM sequence: TAG
aatcaaaaaactttaagtgc

SEQ ID NO: 151204 - DNA, 20 bp, Artificial Sequence
  Description of Artificial Sequence: Synthetic oligonucleotide
  Target: LAMA2; (+) strand; PAM type: NRG; PAM sequence: AAG
agtgctagaatattcatgtc

SEQ ID NO: 151205 - DNA, 20 bp, Artificial Sequence
  Description of Artificial Sequence: Synthetic oligonucleotide
  Target: LAMA2; (+) strand; PAM type: NRG; PAM sequence: GAG
tgctagaatattcatgtcaa

SEQ ID NO: 151206 - DNA, 20 bp, Artificial Sequence
  Description of Artificial Sequence: Synthetic oligonucleotide
  Target: LAMA2; (+) strand; PAM type: NRG; PAM sequence: AGG
gctagaatattcatgtcaag

SEQ ID NO: 151207 - DNA, 20 bp, Artificial Sequence
  Description of Artificial Sequence: Synthetic oligonucleotide
  Target: LAMA2; (+) strand; PAM type: NRG; PAM sequence: AAG
tcatgtcaagaggatcttcc

SEQ ID NO: 151208 - DNA, 20 bp, Artificial Sequence
  Description of Artificial Sequence: Synthetic oligonucleotide
  Target: LAMA2; (+) strand; PAM type: NRG; PAM sequence: AAG
caagaggatcttccaagaat

SEQ ID NO: 151209 - DNA, 20 bp, Artificial Sequence
  Description of Artificial Sequence: Synthetic oligonucleotide
  Target: LAMA2; (+) strand; PAM type: NRG; PAM sequence: CAG
aggatcttccaagaataagc

SEQ ID NO: 151210 - DNA, 20 bp, Artificial Sequence
  Description of Artificial Sequence: Synthetic oligonucleotide
  Target: LAMA2; (+) strand; PAM type: NRG; PAM sequence: AGG
ggatcttccaagaataagcc

SEQ ID NO: 151211 - DNA, 20 bp, Artificial Sequence
  Description of Artificial Sequence: Synthetic oligonucleotide
  Target: LAMA2; (+) strand; PAM type: NRG; PAM sequence: TAG
gaataagccaggaatgcaat

SEQ ID NO: 151212 - DNA, 20 bp, Artificial Sequence
  Description of Artificial Sequence: Synthetic oligonucleotide
  Target: LAMA2; (+) strand; PAM type: NRG; PAM sequence: AGG
aataagccaggaatgcaatt

SEQ ID NO: 151213 - DNA, 20 bp, Artificial Sequence
  Description of Artificial Sequence: Synthetic oligonucleotide
  Target: LAMA2; (+) strand; PAM type: NRG; PAM sequence: GGG
ataagccaggaatgcaatta

SEQ ID NO: 151214 - DNA, 20 bp, Artificial Sequence
  Description of Artificial Sequence: Synthetic oligonucleotide
  Target: LAMA2; (+) strand; PAM type: NRG; PAM sequence: GGG
taagccaggaatgcaattag

SEQ ID NO: 151215 - DNA, 20 bp, Artificial Sequence
  Description of Artificial Sequence: Synthetic oligonucleotide
  Target: LAMA2; (+) strand; PAM type: NRG; PAM sequence: TGG
tgcaattaggggctgactca

SEQ ID NO: 151216 - DNA, 20 bp, Artificial Sequence
  Description of Artificial Sequence: Synthetic oligonucleotide
  Target: LAMA2; (+) strand; PAM type: NRG; PAM sequence: TGG
ggctgactcatggatgacaa

SEQ ID NO: 151217 - DNA, 20 bp, Artificial Sequence
  Description of Artificial Sequence: Synthetic oligonucleotide
  Target: LAMA2; (+) strand; PAM type: NRG; PAM sequence: GAG
catggatgacaatggtcgat

SEQ ID NO: 151218 - DNA, 20 bp, Artificial Sequence
  Description of Artificial Sequence: Synthetic oligonucleotide
  Target: LAMA2; (+) strand; PAM type: NRG; PAM sequence: AAG
acaatggtcgatgagtcaca

SEQ ID NO: 151219 - DNA, 20 bp, Artificial Sequence
  Description of Artificial Sequence: Synthetic oligonucleotide
  Target: LAMA2; (+) strand; PAM type: NRG; PAM sequence: TGG
tgaaaaaacaatgatgtccc

SEQ ID NO: 151220 - DNA, 20 bp, Artificial Sequence
  Description of Artificial Sequence: Synthetic oligonucleotide
  Target: LAMA2; (+) strand; PAM type: NRG; PAM sequence: GGG
gaaaaaacaatgatgtccct

SEQ ID NO: 151221 - DNA, 20 bp, Artificial Sequence
  Description of Artificial Sequence: Synthetic oligonucleotide
  Target: LAMA2; (+) strand; PAM type: NRG; PAM sequence: GGG
aaaaaacaatgatgtccctg

SEQ ID NO: 151222 - DNA, 20 bp, Artificial Sequence
  Description of Artificial Sequence: Synthetic oligonucleotide
  Target: LAMA2; (+) strand; PAM type: NRG; PAM sequence: TAG
atgatgtccctggggacaca

SEQ ID NO: 151223 - DNA, 20 bp, Artificial Sequence
  Description of Artificial Sequence: Synthetic oligonucleotide
  Target: LAMA2; (+) strand; PAM type: NRG; PAM sequence: AAG
tgtccctggggacacataga

SEQ ID NO: 151224 - DNA, 20 bp, Artificial Sequence
  Description of Artificial Sequence: Synthetic oligonucleotide
  Target: LAMA2; (+) strand; PAM type: NRG; PAM sequence: TGG
tggggacacatagaaagaat

SEQ ID NO: 151225 - DNA, 20 bp, Artificial Sequence
  Description of Artificial Sequence: Synthetic oligonucleotide
  Target: LAMA2; (+) strand; PAM type: NRG; PAM sequence: TAG
cacatagaaagaattggaac

SEQ ID NO: 151226 - DNA, 20 bp, Artificial Sequence
  Description of Artificial Sequence: Synthetic oligonucleotide
  Target: LAMA2; (+) strand; PAM type: NRG; PAM sequence: AAG
agaattggaactagactgtc

SEQ ID NO: 151227 - DNA, 20 bp, Artificial Sequence
  Description of Artificial Sequence: Synthetic oligonucleotide
  Target: LAMA2; (+) strand; PAM type: NRG; PAM sequence: AAG
tcaagatcatatatattaac

SEQ ID NO: 151228 - DNA, 20 bp, Artificial Sequence
  Description of Artificial Sequence: Synthetic oligonucleotide
  Target: LAMA2; (+) strand; PAM type: NRG; PAM sequence: TAG
catatatattaacaagctaa

SEQ ID NO: 151229 - DNA, 20 bp, Artificial Sequence
  Description of Artificial Sequence: Synthetic oligonucleotide
  Target: LAMA2; (+) strand; PAM type: NRG; PAM sequence: AAG
atatattaacaagctaatag

SEQ ID NO: 151230 - DNA, 20 bp, Artificial Sequence
  Description of Artificial Sequence: Synthetic oligonucleotide
  Target: LAMA2; (+) strand; PAM type: NRG; PAM sequence: AGG
tatattaacaagctaataga

SEQ ID NO: 151231 - DNA, 20 bp, Artificial Sequence
  Description of Artificial Sequence: Synthetic oligonucleotide
  Target: LAMA2; (+) strand; PAM type: NRG; PAM sequence: CGG
attaacaagctaatagaagg

SEQ ID NO: 151232 - DNA, 20 bp, Artificial Sequence
  Description of Artificial Sequence: Synthetic oligonucleotide
  Target: LAMA2; (+) strand; PAM type: NRG; PAM sequence: GGG
ttaacaagctaatagaaggc

SEQ ID NO: 151233 - DNA, 20 bp, Artificial Sequence
  Description of Artificial Sequence: Synthetic oligonucleotide
  Target: LAMA2; (+) strand; PAM type: NRG; PAM sequence: TGG
taatagaaggcgggaaattt

SEQ ID NO: 151234 - DNA, 20 bp, Artificial Sequence
  Description of Artificial Sequence: Synthetic oligonucleotide
  Target: LAMA2; (+) strand; PAM type: NRG; PAM sequence: AAG
ctctatgaaaatgtgcacaa

SEQ ID NO: 151235 - DNA, 20 bp, Artificial Sequence
  Description of Artificial Sequence: Synthetic oligonucleotide
  Target: LAMA2; (+) strand; PAM type: NRG; PAM sequence: CAG
gaaaatgtgcacaaaagtcc

SEQ ID NO: 151236 - DNA, 20 bp, Artificial Sequence
  Description of Artificial Sequence: Synthetic oligonucleotide
  Target: LAMA2; (+) strand; PAM type: NRG; PAM sequence: TAG
ataaaatatactctataatg

SEQ ID NO: 151237 - DNA, 20 bp, Artificial Sequence
  Description of Artificial Sequence: Synthetic oligonucleotide
  Target: LAMA2; (+) strand; PAM type: NRG; PAM sequence: AAG
atatactctataatgtagta

SEQ ID NO: 151238 - DNA, 20 bp, Artificial Sequence
  Description of Artificial Sequence: Synthetic oligonucleotide
  Target: LAMA2; (+) strand; PAM type: NRG; PAM sequence: AAG
actctataatgtagtaaaga

SEQ ID NO: 151239 - DNA, 20 bp, Artificial Sequence
  Description of Artificial Sequence: Synthetic oligonucleotide
  Target: LAMA2; (+) strand; PAM type: NRG; PAM sequence: TAG
tgccaatgtctcacatttta

SEQ ID NO: 151240 - DNA, 20 bp, Artificial Sequence
  Description of Artificial Sequence: Synthetic oligonucleotide
  Target: LAMA2; (+) strand; PAM type: NRG; PAM sequence: AAG
ttacctgctactgtcaactt

SEQ ID NO: 151241 - DNA, 20 bp, Artificial Sequence
  Description of Artificial Sequence: Synthetic oligonucleotide
  Target: LAMA2; (+) strand; PAM type: NRG; PAM sequence: AAG
actgtcaacttaagttactc

SEQ ID NO: 151242 - DNA, 20 bp, Artificial Sequence
  Description of Artificial Sequence: Synthetic oligonucleotide
  Target: LAMA2; (+) strand; PAM type: NRG; PAM sequence: TAG
caacttaagttactcaagta

SEQ ID NO: 151243 - DNA, 20 bp, Artificial Sequence
  Description of Artificial Sequence: Synthetic oligonucleotide
  Target: LAMA2; (+) strand; PAM type: NRG; PAM sequence: AAG
ctaatgacttaccaattcct

SEQ ID NO: 151244 - DNA, 20 bp, Artificial Sequence
  Description of Artificial Sequence: Synthetic oligonucleotide
  Target: LAMA2; (+) strand; PAM type: NRG; PAM sequence: AGG
taatgacttaccaattccta

SEQ ID NO: 151245 - DNA, 20 bp, Artificial Sequence
  Description of Artificial Sequence: Synthetic oligonucleotide
  Target: LAMA2; (+) strand; PAM type: NRG; PAM sequence: TAG
aattcctaaggaatatctct

SEQ ID NO: 151246 - DNA, 20 bp, Artificial Sequence
  Description of Artificial Sequence: Synthetic oligonucleotide
  Target: LAMA2; (+) strand; PAM type: NRG; PAM sequence: AGG
attcctaaggaatatctctt

SEQ ID NO: 151247 - DNA, 20 bp, Artificial Sequence
  Description of Artificial Sequence: Synthetic oligonucleotide
  Target: LAMA2; (+) strand; PAM type: NRG; PAM sequence: TGG
ctaaggaatatctcttagga

SEQ ID NO: 151248 - DNA, 20 bp, Artificial Sequence
  Description of Artificial Sequence: Synthetic oligonucleotide
  Target: LAMA2; (+) strand; PAM type: NRG; PAM sequence: GAG
tctcttaggatggactttct

SEQ ID NO: 151249 - DNA, 20 bp, Artificial Sequence
  Description of Artificial Sequence: Synthetic oligonucleotide
  Target: LAMA2; (+) strand; PAM type: NRG; PAM sequence: AGG
ctcttaggatggactttctg

SEQ ID NO: 151250 - DNA, 20 bp, Artificial Sequence
  Description of Artificial Sequence: Synthetic oligonucleotide
  Target: LAMA2; (+) strand; PAM type: NRG; PAM sequence: GGG
tcttaggatggactttctga

SEQ ID NO: 151251 - DNA, 20 bp, Artificial Sequence
  Description of Artificial Sequence: Synthetic oligonucleotide
  Target: LAMA2; (+) strand; PAM type: NRG; PAM sequence: CAG
taggatggactttctgaggg

SEQ ID NO: 151252 - DNA, 20 bp, Artificial Sequence
  Description of Artificial Sequence: Synthetic oligonucleotide
  Target: LAMA2; (+) strand; PAM type: NRG; PAM sequence: AGG
aggatggactttctgagggc

SEQ ID NO: 151253 - DNA, 20 bp, Artificial Sequence
  Description of Artificial Sequence: Synthetic oligonucleotide
  Target: LAMA2; (+) strand; PAM type: NRG; PAM sequence: GGG
ggatggactttctgagggca

SEQ ID NO: 151254 - DNA, 20 bp, Artificial Sequence
  Description of Artificial Sequence: Synthetic oligonucleotide
  Target: LAMA2; (+) strand; PAM type: NRG; PAM sequence: TGG
actttctgagggcagggccc

SEQ ID NO: 151255 - DNA, 20 bp, Artificial Sequence
  Description of Artificial Sequence: Synthetic oligonucleotide
  Target: LAMA2; (+) strand; PAM type: NRG; PAM sequence: AAG
agggcagggccctggatctc

SEQ ID NO: 151256 - DNA, 20 bp, Artificial Sequence
  Description of Artificial Sequence: Synthetic oligonucleotide
  Target: LAMA2; (+) strand; PAM type: NRG; PAM sequence: AAG
ggccctggatctcaagtacc

SEQ ID NO: 151257 - DNA, 20 bp, Artificial Sequence
  Description of Artificial Sequence: Synthetic oligonucleotide
  Target: LAMA2; (+) strand; PAM type: NRG; PAM sequence: AAG
tggatctcaagtaccaagtg

SEQ ID NO: 151258 - DNA, 20 bp, Artificial Sequence
  Description of Artificial Sequence: Synthetic oligonucleotide
  Target: LAMA2; (+) strand; PAM type: NRG; PAM sequence: TAG
tcaagtaccaagtgaagttc

SEQ ID NO: 151259 - DNA, 20 bp, Artificial Sequence
  Description of Artificial Sequence: Synthetic oligonucleotide
  Target: LAMA2; (+) strand; PAM type: NRG; PAM sequence: CAG
ccaagtgaagttctagcata

SEQ ID NO: 151260 - DNA, 20 bp, Artificial Sequence
  Description of Artificial Sequence: Synthetic oligonucleotide
  Target: LAMA2; (+) strand; PAM type: NRG; PAM sequence: AGG
caagtgaagttctagcatac

SEQ ID NO: 151261 - DNA, 20 bp, Artificial Sequence
  Description of Artificial Sequence: Synthetic oligonucleotide
  Target: LAMA2; (+) strand; PAM type: NRG; PAM sequence: AAG
gtgaagttctagcatacagg

SEQ ID NO: 151262 - DNA, 20 bp, Artificial Sequence
  Description of Artificial Sequence: Synthetic oligonucleotide
  Target: LAMA2; (+) strand; PAM type: NRG; PAM sequence: CAG
catacaggaagtattaaata

SEQ ID NO: 151263 - DNA, 20 bp, Artificial Sequence
  Description of Artificial Sequence: Synthetic oligonucleotide
  Target: LAMA2; (+) strand; PAM type: NRG; PAM sequence: AGG
atacaggaagtattaaatac

SEQ ID NO: 151264 - DNA, 20 bp, Artificial Sequence
  Description of Artificial Sequence: Synthetic oligonucleotide
  Target: LAMA2; (+) strand; PAM type: NRG; PAM sequence: GAG
ggaagtattaaatacaggct

SEQ ID NO: 151265 - DNA, 20 bp, Artificial Sequence
  Description of Artificial Sequence: Synthetic oligonucleotide
  Target: LAMA2; (+) strand; PAM type: NRG; PAM sequence: GAG
atcccttatccaaaatgctt

SEQ ID NO: 151266 - DNA, 20 bp, Artificial Sequence
  Description of Artificial Sequence: Synthetic oligonucleotide
  Target: LAMA2; (+) strand; PAM type: NRG; PAM sequence: CAG
ttatccaaaatgcttgagac

SEQ ID NO: 151267 - DNA, 20 bp, Artificial Sequence
  Description of Artificial Sequence: Synthetic oligonucleotide
  Target: LAMA2; (+) strand; PAM type: NRG; PAM sequence: TGG
gaccagaaatgtttccgatt

SEQ ID NO: 151268 - DNA, 20 bp, Artificial Sequence
  Description of Artificial Sequence: Synthetic oligonucleotide
  Target: LAMA2; (+) strand; PAM type: NRG; PAM sequence: CGG
tttccgatttggtatttttt

SEQ ID NO: 151269 - DNA, 20 bp, Artificial Sequence
  Description of Artificial Sequence: Synthetic oligonucleotide
  Target: LAMA2; (+) strand; PAM type: NRG; PAM sequence: TGG
tttggtattttttcggattt

SEQ ID NO: 151270 - DNA, 20 bp, Artificial Sequence
  Description of Artificial Sequence: Synthetic oligonucleotide
  Target: LAMA2; (+) strand; PAM type: NRG; PAM sequence: CAG
ttcggattttggaatatttg

SEQ ID NO: 151271 - DNA, 20 bp, Artificial Sequence
  Description of Artificial Sequence: Synthetic oligonucleotide
  Target: LAMA2; (+) strand; PAM type: NRG; PAM sequence: TGG
aatatttgcagaatacatac

SEQ ID NO: 151272 - DNA, 20 bp, Artificial Sequence
  Description of Artificial Sequence: Synthetic oligonucleotide
  Target: LAMA2; (+) strand; PAM type: NRG; PAM sequence: CAG
actggctgatcattcctaat

SEQ ID NO: 151273 - DNA, 20 bp, Artificial Sequence
  Description of Artificial Sequence: Synthetic oligonucleotide
  Target: LAMA2; (+) strand; PAM type: NRG; PAM sequence: TAG
atccaaaatctgaaatgctc

SEQ ID NO: 151274 - DNA, 20 bp, Artificial Sequence
  Description of Artificial Sequence: Synthetic oligonucleotide
  Target: LAMA2; (+) strand; PAM type: NRG; PAM sequence: GAG
ctctagtgaacattccattt

SEQ ID NO: 151275 - DNA, 20 bp, Artificial Sequence
  Description of Artificial Sequence: Synthetic oligonucleotide
  Target: LAMA2; (+) strand; PAM type: NRG; PAM sequence: TAG
cattccatttgagcatcata

SEQ ID NO: 151276 - DNA, 20 bp, Artificial Sequence
  Description of Artificial Sequence: Synthetic oligonucleotide
  Target: LAMA2; (+) strand; PAM type: NRG; PAM sequence: AGG
attccatttgagcatcatat

SEQ ID NO: 151277 - DNA, 20 bp, Artificial Sequence
  Description of Artificial Sequence: Synthetic oligonucleotide
  Target: LAMA2; (+) strand; PAM type: NRG; PAM sequence: AAG
gcatcatataggtgccccca

SEQ ID NO: 151278 - DNA, 20 bp, Artificial Sequence
  Description of Artificial Sequence: Synthetic oligonucleotide
  Target: LAMA2; (+) strand; PAM type: NRG; PAM sequence: AAG
tttcaaattttgaaacattt

SEQ ID NO: 151279 - DNA, 20 bp, Artificial Sequence
  Description of Artificial Sequence: Synthetic oligonucleotide
  Target: LAMA2; (+) strand; PAM type: NRG; PAM sequence: TGG
ttttgaaacatttaagattt

SEQ ID NO: 151280 - DNA, 20 bp, Artificial Sequence
  Description of Artificial Sequence: Synthetic oligonucleotide
  Target: LAMA2; (+) strand; PAM type: NRG; PAM sequence: TAG
aagattttggattttctgat

SEQ ID NO: 151281 - DNA, 20 bp, Artificial Sequence
  Description of Artificial Sequence: Synthetic oligonucleotide
  Target: LAMA2; (+) strand; PAM type: NRG; PAM sequence: AGG
agattttggattttctgatt

SEQ ID NO: 151282 - DNA, 20 bp, Artificial Sequence
  Description of Artificial Sequence: Synthetic oligonucleotide
  Target: LAMA2; (+) strand; PAM type: NRG; PAM sequence: GGG
gattttggattttctgatta

SEQ ID NO: 151283 - DNA, 20 bp, Artificial Sequence
  Description of Artificial Sequence: Synthetic oligonucleotide
  Target: LAMA2; (+) strand; PAM type: NRG; PAM sequence: CGG
cccaatgtctttgctaacat

SEQ ID NO: 151284 - DNA, 20 bp, Artificial Sequence
  Description of Artificial Sequence: Synthetic oligonucleotide
  Target: LAMA2; (+) strand; PAM type: NRG; PAM sequence: AAG
ctcattctatctatgtccac

SEQ ID NO: 151285 - DNA, 20 bp, Artificial Sequence
  Description of Artificial Sequence: Synthetic oligonucleotide
  Target: LAMA2; (+) strand; PAM type: NRG; PAM sequence: AAG
gaatttttaaaccatgcttc

SEQ ID NO: 151286 - DNA, 20 bp, Artificial Sequence
  Description of Artificial Sequence: Synthetic oligonucleotide
  Target: LAMA2; (+) strand; PAM type: NRG; PAM sequence: AGG
aatttttaaaccatgcttca

SEQ ID NO: 151287 - DNA, 20 bp, Artificial Sequence
  Description of Artificial Sequence: Synthetic oligonucleotide
  Target: LAMA2; (+) strand; PAM type: NRG; PAM sequence: CAG
ttaaaccatgcttcaaggat

SEQ ID NO: 151288 - DNA, 20 bp, Artificial Sequence
  Description of Artificial Sequence: Synthetic oligonucleotide
  Target: LAMA2; (+) strand; PAM type: NRG; PAM sequence: AGG
taaaccatgcttcaaggatc

SEQ ID NO: 151289 - DNA, 20 bp, Artificial Sequence
  Description of Artificial Sequence: Synthetic oligonucleotide
  Target: LAMA2; (+) strand; PAM type: NRG; PAM sequence: AAG
caaactccactcctgtcata

SEQ ID NO: 151290 - DNA, 20 bp, Artificial Sequence
  Description of Artificial Sequence: Synthetic oligonucleotide
  Target: LAMA2; (+) strand; PAM type: NRG; PAM sequence: AAG
tcctgtcataaagcttcctt

SEQ ID NO: 151291 - DNA, 20 bp, Artificial Sequence
  Description of Artificial Sequence: Synthetic oligonucleotide
  Target: LAMA2; (+) strand; PAM type: NRG; PAM sequence: TAG
taaagcttccttaagcctta

SEQ ID NO: 151292 - DNA, 20 bp, Artificial Sequence
  Description of Artificial Sequence: Synthetic oligonucleotide
  Target: LAMA2; (+) strand; PAM type: NRG; PAM sequence: TAG
ttaagccttatagcaaaaat

SEQ ID NO: 151293 - DNA, 20 bp, Artificial Sequence
  Description of Artificial Sequence: Synthetic oligonucleotide
  Target: LAMA2; (+) strand; PAM type: NRG; PAM sequence: CAG
tcccgtaattatttatttct

SEQ ID NO: 151294 - DNA, 20 bp, Artificial Sequence
  Description of Artificial Sequence: Synthetic oligonucleotide
  Target: LAMA2; (+) strand; PAM type: NRG; PAM sequence: TAG
ccatattccaccttgcatta

SEQ ID NO: 151295 - DNA, 20 bp, Artificial Sequence
  Description of Artificial Sequence: Synthetic oligonucleotide
  Target: LAMA2; (+) strand; PAM type: NRG; PAM sequence: GAG
cttgcattatagttgattgt

SEQ ID NO: 151296 - DNA, 20 bp, Artificial Sequence
  Description of Artificial Sequence: Synthetic oligonucleotide
  Target: LAMA2; (+) strand; PAM type: NRG; PAM sequence: TAG
agtatatctttttacccaac

SEQ ID NO: 151297 - DNA, 20 bp, Artificial Sequence
  Description of Artificial Sequence: Synthetic oligonucleotide
  Target: LAMA2; (+) strand; PAM type: NRG; PAM sequence: TGG
ctttttacccaactagatat

SEQ ID NO: 151298 - DNA, 20 bp, Artificial Sequence
  Description of Artificial Sequence: Synthetic oligonucleotide
  Target: LAMA2; (+) strand; PAM type: NRG; PAM sequence: AAG
caactagatattggccttta

SEQ ID NO: 151299 - DNA, 20 bp, Artificial Sequence
  Description of Artificial Sequence: Synthetic oligonucleotide
  Target: LAMA2; (+) strand; PAM type: NRG; PAM sequence: CAG
tagatattggcctttaaaga

SEQ ID NO: 151300 - DNA, 20 bp, Artificial Sequence
  Description of Artificial Sequence: Synthetic oligonucleotide
  Target: LAMA2; (+) strand; PAM type: NRG; PAM sequence: AAG
tttaaagacagacttattta

SEQ ID NO: 151301 - DNA, 20 bp, Artificial Sequence
  Description of Artificial Sequence: Synthetic oligonucleotide
  Target: LAMA2; (+) strand; PAM type: NRG; PAM sequence: CAG
aagacagacttatttaaaga

SEQ ID NO: 151302 - DNA, 20 bp, Artificial Sequence
  Description of Artificial Sequence: Synthetic oligonucleotide
  Target: LAMA2; (+) strand; PAM type: NRG; PAM sequence: TAG
ccttgacttatttatcttca

SEQ ID NO: 151303 - DNA, 20 bp, Artificial Sequence
  Description of Artificial Sequence: Synthetic oligonucleotide
  Target: LAMA2; (+) strand; PAM type: NRG; PAM sequence: TAG
ttatttatcttcatagtgcc

SEQ ID NO: 151304 - DNA, 20 bp, Artificial Sequence
  Description of Artificial Sequence: Synthetic oligonucleotide
  Target: LAMA2; (+) strand; PAM type: NRG; PAM sequence: CAG
cctaccctaatgtgttgctt

SEQ ID NO: 151305 - DNA, 20 bp, Artificial Sequence
  Description of Artificial Sequence: Synthetic oligonucleotide
  Target: LAMA2; (+) strand; PAM type: NRG; PAM sequence: AGG
ctaccctaatgtgttgcttc

SEQ ID NO: 151306 - DNA, 20 bp, Artificial Sequence
  Description of Artificial Sequence: Synthetic oligonucleotide
  Target: LAMA2; (+) strand; PAM type: NRG; PAM sequence: AAG
ttatttaatcatattttttc

SEQ ID NO: 151307 - DNA, 20 bp, Artificial Sequence
  Description of Artificial Sequence: Synthetic oligonucleotide
  Target: LAMA2; (+) strand; PAM type: NRG; PAM sequence: AGG
tatttaatcatattttttca

SEQ ID NO: 151308 - DNA, 20 bp, Artificial Sequence
  Description of Artificial Sequence: Synthetic oligonucleotide
  Target: LAMA2; (+) strand; PAM type: NRG; PAM sequence: TAG
ttttttcaaggtcattttac

SEQ ID NO: 151309 - DNA, 20 bp, Artificial Sequence
  Description of Artificial Sequence: Synthetic oligonucleotide
  Target: LAMA2; (+) strand; PAM type: NRG; PAM sequence: AGG
tttttcaaggtcattttact

SEQ ID NO: 151310 - DNA, 20 bp, Artificial Sequence
  Description of Artificial Sequence: Synthetic oligonucleotide
  Target: LAMA2; (+) strand; PAM type: NRG; PAM sequence: TGG
gtcattttactaggctaaaa

SEQ ID NO: 151311 - DNA, 20 bp, Artificial Sequence
  Description of Artificial Sequence: Synthetic oligonucleotide
  Target: LAMA2; (+) strand; PAM type: NRG; PAM sequence: GAG
cattttactaggctaaaatg

SEQ ID NO: 151312 - DNA, 20 bp, Artificial Sequence
  Description of Artificial Sequence: Synthetic oligonucleotide
  Target: LAMA2; (+) strand; PAM type: NRG; PAM sequence: AAG
tactaggctaaaatggagct

SEQ ID NO: 151313 - DNA, 20 bp, Artificial Sequence
  Description of Artificial Sequence: Synthetic oligonucleotide
  Target: LAMA2; (+) strand; PAM type: NRG; PAM sequence: AGG
actaggctaaaatggagcta

SEQ ID NO: 151314 - DNA, 20 bp, Artificial Sequence
  Description of Artificial Sequence: Synthetic oligonucleotide
  Target: LAMA2; (+) strand; PAM type: NRG; PAM sequence: TAG
aaatggagctaaggaaaatg

SEQ ID NO: 151315 - DNA, 20 bp, Artificial Sequence
  Description of Artificial Sequence: Synthetic oligonucleotide
  Target: LAMA2; (+) strand; PAM type: NRG; PAM sequence: TAG
aaatttctaattgttgaact

SEQ ID NO: 151316 - DNA, 20 bp, Artificial Sequence
  Description of Artificial Sequence: Synthetic oligonucleotide
  Target: LAMA2; (+) strand; PAM type: NRG; PAM sequence: CAG
gttgaacttagtctgaatct

SEQ ID NO: 151317 - DNA, 20 bp, Artificial Sequence
  Description of Artificial Sequence: Synthetic oligonucleotide
  Target: LAMA2; (+) strand; PAM type: NRG; PAM sequence: TAG
acttagtctgaatctcagaa

SEQ ID NO: 151318 - DNA, 20 bp, Artificial Sequence
  Description of Artificial Sequence: Synthetic oligonucleotide
  Target: LAMA2; (+) strand; PAM type: NRG; PAM sequence: TGG
tagtctgaatctcagaatag

SEQ ID NO: 151319 - DNA, 20 bp, Artificial Sequence
  Description of Artificial Sequence: Synthetic oligonucleotide
  Target: LAMA2; (+) strand; PAM type: NRG; PAM sequence: AAG
tctcagaatagtggcattat

SEQ ID NO: 151320 - DNA, 20 bp, Artificial Sequence
  Description of Artificial Sequence: Synthetic oligonucleotide
  Target: LAMA2; (+) strand; PAM type: NRG; PAM sequence: TAG
ggcattataagctttcaaat

SEQ ID NO: 151321 - DNA, 20 bp, Artificial Sequence
  Description of Artificial Sequence: Synthetic oligonucleotide
  Target: LAMA2; (+) strand; PAM type: NRG; PAM sequence: GAG
cattataagctttcaaatta

SEQ ID NO: 151322 - DNA, 20 bp, Artificial Sequence
  Description of Artificial Sequence: Synthetic oligonucleotide
  Target: LAMA2; (+) strand; PAM type: NRG; PAM sequence: AAG
ttcaaattagagtaaatgaa

SEQ ID NO: 151323 - DNA, 20 bp, Artificial Sequence
  Description of Artificial Sequence: Synthetic oligonucleotide
  Target: LAMA2; (+) strand; PAM type: NRG; PAM sequence: TAG
aaattagagtaaatgaaaag

SEQ ID NO: 151324 - DNA, 20 bp, Artificial Sequence
  Description of Artificial Sequence: Synthetic oligonucleotide
  Target: LAMA2; (+) strand; PAM type: NRG; PAM sequence: TAG
agagtaaatgaaaagtagat

SEQ ID NO: 151325 - DNA, 20 bp, Artificial Sequence
  Description of Artificial Sequence: Synthetic oligonucleotide
  Target: LAMA2; (+) strand; PAM type: NRG; PAM sequence: AAG
aatgaaaagtagattagacc

SEQ ID NO: 151326 - DNA, 20 bp, Artificial Sequence
  Description of Artificial Sequence: Synthetic oligonucleotide
  Target: LAMA2; (+) strand; PAM type: NRG; PAM sequence: AAG
gtagattagaccaagcgcat

SEQ ID NO: 151327 - DNA, 20 bp, Artificial Sequence
  Description of Artificial Sequence: Synthetic oligonucleotide
  Target: LAMA2; (+) strand; PAM type: NRG; PAM sequence: CAG
agaccaagcgcataagaaca

SEQ ID NO: 151328 - DNA, 20 bp, Artificial Sequence
  Description of Artificial Sequence: Synthetic oligonucleotide
  Target: LAMA2; (+) strand; PAM type: NRG; PAM sequence: CAG
gcgcataagaacacagtata

SEQ ID NO: 151329 - DNA, 20 bp, Artificial Sequence
  Description of Artificial Sequence: Synthetic oligonucleotide
  Target: LAMA2; (+) strand; PAM type: NRG; PAM sequence: CAG
taagaacacagtatacagaa

SEQ ID NO: 151330 - DNA, 20 bp, Artificial Sequence
  Description of Artificial Sequence: Synthetic oligonucleotide
  Target: LAMA2; (+) strand; PAM type: NRG; PAM sequence: CGG
cagctgtactgtgtcctcaa

SEQ ID NO: 151331 - DNA, 20 bp, Artificial Sequence
  Description of Artificial Sequence: Synthetic oligonucleotide
  Target: LAMA2; (+) strand; PAM type: NRG; PAM sequence: GGG
agctgtactgtgtcctcaac

SEQ ID NO: 151332 - DNA, 20 bp, Artificial Sequence
  Description of Artificial Sequence: Synthetic oligonucleotide
  Target: LAMA2; (+) strand; PAM type: NRG; PAM sequence: CAG
gataaactaaatcataatta

SEQ ID NO: 151333 - DNA, 20 bp, Artificial Sequence
  Description of Artificial Sequence: Synthetic oligonucleotide
  Target: LAMA2; (+) strand; PAM type: NRG; PAM sequence: AAG
cttgcctttatactcttttg

SEQ ID NO: 151334 - DNA, 20 bp, Artificial Sequence
  Description of Artificial Sequence: Synthetic oligonucleotide
  Target: LAMA2; (+) strand; PAM type: NRG; PAM sequence: CAG
tttgaagatgctctcaactt

SEQ ID NO: 151335 - DNA, 20 bp, Artificial Sequence
  Description of Artificial Sequence: Synthetic oligonucleotide
  Target: LAMA2; (+) strand; PAM type: NRG; PAM sequence: TGG
tgctctcaacttcagtgctt

SEQ ID NO: 151336 - DNA, 20 bp, Artificial Sequence
  Description of Artificial Sequence: Synthetic oligonucleotide
  Target: LAMA2; (+) strand; PAM type: NRG; PAM sequence: GGG
gctctcaacttcagtgcttt

SEQ ID NO: 151337 - DNA, 20 bp, Artificial Sequence
  Description of Artificial Sequence: Synthetic oligonucleotide
  Target: LAMA2; (+) strand; PAM type: NRG; PAM sequence: GGG
ctctcaacttcagtgctttg

SEQ ID NO: 151338 - DNA, 20 bp, Artificial Sequence
  Description of Artificial Sequence: Synthetic oligonucleotide
  Target: LAMA2; (+) strand; PAM type: NRG; PAM sequence: AAG
ggggatttatttgtcactgt

SEQ ID NO: 151339 - DNA, 20 bp, Artificial Sequence
  Description of Artificial Sequence: Synthetic oligonucleotide
  Target: LAMA2; (+) strand; PAM type: NRG; PAM sequence: TAG
tgtcactgtaagtctgaaat

SEQ ID NO: 151340 - DNA, 20 bp, Artificial Sequence
  Description of Artificial Sequence: Synthetic oligonucleotide
  Target: LAMA2; (+) strand; PAM type: NRG; PAM sequence: TAG
aagtctgaaattagtttgat

SEQ ID NO: 151341 - DNA, 20 bp, Artificial Sequence
  Description of Artificial Sequence: Synthetic oligonucleotide
  Target: LAMA2; (+) strand; PAM type: NRG; PAM sequence: AAG
tgtctgaaatctgccttaaa

SEQ ID NO: 151342 - DNA, 20 bp, Artificial Sequence
  Description of Artificial Sequence: Synthetic oligonucleotide
  Target: LAMA2; (+) strand; PAM type: NRG; PAM sequence: AAG
tgaaatctgccttaaaaagt

SEQ ID NO: 151343 - DNA, 20 bp, Artificial Sequence
  Description of Artificial Sequence: Synthetic oligonucleotide
  Target: LAMA2; (+) strand; PAM type: NRG; PAM sequence: TGG
atctgccttaaaaagtaagc

SEQ ID NO: 151344 - DNA, 20 bp, Artificial Sequence
  Description of Artificial Sequence: Synthetic oligonucleotide
  Target: LAMA2; (+) strand; PAM type: NRG; PAM sequence: TGG
aagtaagctggcacaaatct

SEQ ID NO: 151345 - DNA, 20 bp, Artificial Sequence
  Description of Artificial Sequence: Synthetic oligonucleotide
  Target: LAMA2; (+) strand; PAM type: NRG; PAM sequence: GGG
agtaagctggcacaaatctt

SEQ ID NO: 151346 - DNA, 20 bp, Artificial Sequence
  Description of Artificial Sequence: Synthetic oligonucleotide
  Target: LAMA2; (+) strand; PAM type: NRG; PAM sequence: GGG
gtaagctggcacaaatcttg

SEQ ID NO: 151347 - DNA, 20 bp, Artificial Sequence
  Description of Artificial Sequence: Synthetic oligonucleotide
  Target: LAMA2; (+) strand; PAM type: NRG; PAM sequence: CAG
agctggcacaaatcttgggg

SEQ ID NO: 151348 - DNA, 20 bp, Artificial Sequence
  Description of Artificial Sequence: Synthetic oligonucleotide
  Target: LAMA2; (+) strand; PAM type: NRG; PAM sequence: AAG
atcttggggcagtgcttatt

SEQ ID NO: 151349 - DNA, 20 bp, Artificial Sequence
  Description of Artificial Sequence: Synthetic oligonucleotide
  Target: LAMA2; (+) strand; PAM type: NRG; PAM sequence: AGG
tcttggggcagtgcttatta

SEQ ID NO: 151350 - DNA, 20 bp, Artificial Sequence
  Description of Artificial Sequence: Synthetic oligonucleotide
  Target: LAMA2; (+) strand; PAM type: NRG; PAM sequence: TAG
tgcttattaaggttcccaca

SEQ ID NO: 151351 - DNA, 20 bp, Artificial Sequence
  Description of Artificial Sequence: Synthetic oligonucleotide
  Target: LAMA2; (+) strand; PAM type: NRG; PAM sequence: AAG
ttattaaggttcccacatag

SEQ ID NO: 151352 - DNA, 20 bp, Artificial Sequence
  Description of Artificial Sequence: Synthetic oligonucleotide
  Target: LAMA2; (+) strand; PAM type: NRG; PAM sequence: TGG
ttaaggttcccacatagaag

SEQ ID NO: 151353 - DNA, 20 bp, Artificial Sequence
  Description of Artificial Sequence: Synthetic oligonucleotide
  Target: LAMA2; (+) strand; PAM type: NRG; PAM sequence: GAG
gttcccacatagaagtggct

SEQ ID NO: 151354 - DNA, 20 bp, Artificial Sequence
  Description of Artificial Sequence: Synthetic oligonucleotide
  Target: LAMA2; (+) strand; PAM type: NRG; PAM sequence: GAG
aagtggctgagtttgtaaat

SEQ ID NO: 151355 - DNA, 20 bp, Artificial Sequence
  Description of Artificial Sequence: Synthetic oligonucleotide
  Target: LAMA2; (+) strand; PAM type: NRG; PAM sequence: TAG
ctgagtttgtaaatgagtca

SEQ ID NO: 151356 - DNA, 20 bp, Artificial Sequence
  Description of Artificial Sequence: Synthetic oligonucleotide
  Target: LAMA2; (+) strand; PAM type: NRG; PAM sequence: CAG
gtaaatgagtcatagaaatt

SEQ ID NO: 151357 - DNA, 20 bp, Artificial Sequence
  Description of Artificial Sequence: Synthetic oligonucleotide
  Target: LAMA2; (+) strand; PAM type: NRG; PAM sequence: AAG
catagaaattcagtatcaaa

SEQ ID NO: 151358 - DNA, 20 bp, Artificial Sequence
  Description of Artificial Sequence: Synthetic oligonucleotide
  Target: LAMA2; (+) strand; PAM type: NRG; PAM sequence: TGG
tttaaaacaaattattctct

SEQ ID NO: 151359 - DNA, 20 bp, Artificial Sequence
  Description of Artificial Sequence: Synthetic oligonucleotide
  Target: LAMA2; (+) strand; PAM type: NRG; PAM sequence: AAG
caaattattctcttggatat

SEQ ID NO: 151360 - DNA, 20 bp, Artificial Sequence
  Description of Artificial Sequence: Synthetic oligonucleotide
  Target: LAMA2; (+) strand; PAM type: NRG; PAM sequence: AGG
aaattattctcttggatata

SEQ ID NO: 151361 - DNA, 20 bp, Artificial Sequence
  Description of Artificial Sequence: Synthetic oligonucleotide
  Target: LAMA2; (+) strand; PAM type: NRG; PAM sequence: GAG
attattctcttggatataag

SEQ ID NO: 151362 - DNA, 20 bp, Artificial Sequence
  Description of Artificial Sequence: Synthetic oligonucleotide
  Target: LAMA2; (+) strand; PAM type: NRG; PAM sequence: AGG
ttattctcttggatataagg

SEQ ID NO: 151363 - DNA, 20 bp, Artificial Sequence
  Description of Artificial Sequence: Synthetic oligonucleotide
  Target: LAMA2; (+) strand; PAM type: NRG; PAM sequence: CAG
tgattttccttatatgttct

SEQ ID NO: 151364 - DNA, 20 bp, Artificial Sequence
  Description of Artificial Sequence: Synthetic oligonucleotide
  Target: LAMA2; (+) strand; PAM type: NRG; PAM sequence: TGG
tccctatcttctgctcaatc

SEQ ID NO: 151365 - DNA, 20 bp, Artificial Sequence
  Description of Artificial Sequence: Synthetic oligonucleotide
  Target: LAMA2; (+) strand; PAM type: NRG; PAM sequence: GGG
ccctatcttctgctcaatct

SEQ ID NO: 151366 - DNA, 20 bp, Artificial Sequence
  Description of Artificial Sequence: Synthetic oligonucleotide
  Target: LAMA2; (+) strand; PAM type: NRG; PAM sequence: AAG
gctcaatctgggtttgttta

SEQ ID NO: 151367 - DNA, 20 bp, Artificial Sequence
  Description of Artificial Sequence: Synthetic oligonucleotide
  Target: LAMA2; (+) strand; PAM type: NRG; PAM sequence: CAG
ttgtttaaagtgtttttatt

SEQ ID NO: 151368 - DNA, 20 bp, Artificial Sequence
  Description of Artificial Sequence: Synthetic oligonucleotide
  Target: LAMA2; (+) strand; PAM type: NRG; PAM sequence: TAG
ttcagctcgtactatgcgta

SEQ ID NO: 151369 - DNA, 20 bp, Artificial Sequence
  Description of Artificial Sequence: Synthetic oligonucleotide
  Target: LAMA2; (+) strand; PAM type: NRG; PAM sequence: AAG
gcatgaaaaacatgactgcc

SEQ ID NO: 151370 - DNA, 20 bp, Artificial Sequence
  Description of Artificial Sequence: Synthetic oligonucleotide
  Target: LAMA2; (+) strand; PAM type: NRG; PAM sequence: GAG
atgaaaaacatgactgccaa

SEQ ID NO: 151371 - DNA, 20 bp, Artificial Sequence
  Description of Artificial Sequence: Synthetic oligonucleotide
  Target: LAMA2; (+) strand; PAM type: NRG; PAM sequence: AAG
tgaacttaataaattttatg

SEQ ID NO: 151372 - DNA, 20 bp, Artificial Sequence
  Description of Artificial Sequence: Synthetic oligonucleotide
  Target: LAMA2; (+) strand; PAM type: NRG; PAM sequence: CAG
aattttatgaagctaatgct

SEQ ID NO: 151373 - DNA, 20 bp, Artificial Sequence
  Description of Artificial Sequence: Synthetic oligonucleotide
  Target: LAMA2; (+) strand; PAM type: NRG; PAM sequence: CAG
gctaatgctcagtgctgtac

SEQ ID NO: 151374 - DNA, 20 bp, Artificial Sequence
  Description of Artificial Sequence: Synthetic oligonucleotide
  Target: LAMA2; (+) strand; PAM type: NRG; PAM sequence: AGG
ctaatgctcagtgctgtacc

SEQ ID NO: 151375 - DNA, 20 bp, Artificial Sequence
  Description of Artificial Sequence: Synthetic oligonucleotide
  Target: LAMA2; (+) strand; PAM type: NRG; PAM sequence: CAG
caggaaccatgttattttct

SEQ ID NO: 151376 - DNA, 20 bp, Artificial Sequence
  Description of Artificial Sequence: Synthetic oligonucleotide
  Target: LAMA2; (+) strand; PAM type: NRG; PAM sequence: AAG
tgttattttctcagactata

SEQ ID NO: 151377 - DNA, 20 bp, Artificial Sequence
  Description of Artificial Sequence: Synthetic oligonucleotide
  Target: LAMA2; (+) strand; PAM type: NRG; PAM sequence: TAG
attttctcagactataaagt

SEQ ID NO: 151378 - DNA, 20 bp, Artificial Sequence
  Description of Artificial Sequence: Synthetic oligonucleotide
  Target: LAMA2; (+) strand; PAM type: NRG; PAM sequence: AAG
tctcagactataaagttagt

SEQ ID NO: 151379 - DNA, 20 bp, Artificial Sequence
  Description of Artificial Sequence: Synthetic oligonucleotide
  Target: LAMA2; (+) strand; PAM type: NRG; PAM sequence: CAG
agactataaagttagtaaga

SEQ ID NO: 151380 - DNA, 20 bp, Artificial Sequence
  Description of Artificial Sequence: Synthetic oligonucleotide
  Target: LAMA2; (+) strand; PAM type: NRG; PAM sequence: TAG
acagaatttctacctctgaa

SEQ ID NO: 151381 - DNA, 20 bp, Artificial Sequence
  Description of Artificial Sequence: Synthetic oligonucleotide
  Target: LAMA2; (+) strand; PAM type: NRG; PAM sequence: TGG
ttctacctctgaatagatta

SEQ ID NO: 151382 - DNA, 20 bp, Artificial Sequence
  Description of Artificial Sequence: Synthetic oligonucleotide
  Target: LAMA2; (+) strand; PAM type: NRG; PAM sequence: TAG
tacctctgaatagattatgg

SEQ ID NO: 151383 - DNA, 20 bp, Artificial Sequence
  Description of Artificial Sequence: Synthetic oligonucleotide
  Target: LAMA2; (+) strand; PAM type: NRG; PAM sequence: TAG
tctgaatagattatggtaga

SEQ ID NO: 151384 - DNA, 20 bp, Artificial Sequence
  Description of Artificial Sequence: Synthetic oligonucleotide
  Target: LAMA2; (+) strand; PAM type: NRG; PAM sequence: TAG
aatagattatggtagatagc

SEQ ID NO: 151385 - DNA, 20 bp, Artificial Sequence
  Description of Artificial Sequence: Synthetic oligonucleotide
  Target: LAMA2; (+) strand; PAM type: NRG; PAM sequence: GAG
tagattatggtagatagcta

SEQ ID NO: 151386 - DNA, 20 bp, Artificial Sequence
  Description of Artificial Sequence: Synthetic oligonucleotide
  Target: LAMA2; (+) strand; PAM type: NRG; PAM sequence: GAG
gattatggtagatagctaga

SEQ ID NO: 151387 - DNA, 20 bp, Artificial Sequence
  Description of Artificial Sequence: Synthetic oligonucleotide
  Target: LAMA2; (+) strand; PAM type: NRG; PAM sequence: GAG
agctagagagaacaatcttt

SEQ ID NO: 151388 - DNA, 20 bp, Artificial Sequence
  Description of Artificial Sequence: Synthetic oligonucleotide
  Target: LAMA2; (+) strand; PAM type: NRG; PAM sequence: TGG
ctttgagcaatacttttttg

SEQ ID NO: 151389 - DNA, 20 bp, Artificial Sequence
  Description of Artificial Sequence: Synthetic oligonucleotide
  Target: LAMA2; (+) strand; PAM type: NRG; PAM sequence: TAG
atacttttttgtggttgtga

SEQ ID NO: 151390 - DNA, 20 bp, Artificial Sequence
  Description of Artificial Sequence: Synthetic oligonucleotide
  Target: LAMA2; (+) strand; PAM type: NRG; PAM sequence: AGG
tacttttttgtggttgtgat

SEQ ID NO: 151391 - DNA, 20 bp, Artificial Sequence
  Description of Artificial Sequence: Synthetic oligonucleotide
  Target: LAMA2; (+) strand; PAM type: NRG; PAM sequence: GGG
acttttttgtggttgtgata

SEQ ID NO: 151392 - DNA, 20 bp, Artificial Sequence
  Description of Artificial Sequence: Synthetic oligonucleotide
  Target: LAMA2; (+) strand; PAM type: NRG; PAM sequence: CAG
ttgtgatagggtaatgtata

SEQ ID NO: 151393 - DNA, 20 bp, Artificial Sequence
  Description of Artificial Sequence: Synthetic oligonucleotide
  Target: LAMA2; (+) strand; PAM type: NRG; PAM sequence: AGG
tgtgatagggtaatgtatac

SEQ ID NO: 151394 - DNA, 20 bp, Artificial Sequence
  Description of Artificial Sequence: Synthetic oligonucleotide
  Target: LAMA2; (+) strand; PAM type: NRG; PAM sequence: GGG
gtgatagggtaatgtataca

SEQ ID NO: 151395 - DNA, 20 bp, Artificial Sequence
  Description of Artificial Sequence: Synthetic oligonucleotide
  Target: LAMA2; (+) strand; PAM type: NRG; PAM sequence: TGG
acagggccacgaaaactaca

SEQ ID NO: 151396 - DNA, 20 bp, Artificial Sequence
  Description of Artificial Sequence: Synthetic oligonucleotide
  Target: LAMA2; (+) strand; PAM type: NRG; PAM sequence: GAG
agggccacgaaaactacatg

SEQ ID NO: 151397 - DNA, 20 bp, Artificial Sequence
  Description of Artificial Sequence: Synthetic oligonucleotide
  Target: LAMA2; (+) strand; PAM type: NRG; PAM sequence: GAG
ggccacgaaaactacatgga

SEQ ID NO: 151398 - DNA, 20 bp, Artificial Sequence
  Description of Artificial Sequence: Synthetic oligonucleotide
  Target: LAMA2; (+) strand; PAM type: NRG; PAM sequence: GAG
ccacgaaaactacatggaga

SEQ ID NO: 151399 - DNA, 20 bp, Artificial Sequence
  Description of Artificial Sequence: Synthetic oligonucleotide
  Target: LAMA2; (+) strand; PAM type: NRG; PAM sequence: AAG
cgaaaactacatggagagag

SEQ ID NO: 151400 - DNA, 20 bp, Artificial Sequence
  Description of Artificial Sequence: Synthetic oligonucleotide
  Target: LAMA2; (+) strand; PAM type: NRG; PAM sequence: TAG
aactacatggagagagaagt

SEQ ID NO: 151401 - DNA, 20 bp, Artificial Sequence
  Description of Artificial Sequence: Synthetic oligonucleotide
  Target: LAMA2; (+) strand; PAM type: NRG; PAM sequence: AAG
gagagagaagttagttgtcc

SEQ ID NO: 151402 - DNA, 20 bp, Artificial Sequence
  Description of Artificial Sequence: Synthetic oligonucleotide
  Target: LAMA2; (+) strand; PAM type: NRG; PAM sequence: AGG
agagagaagttagttgtcca

SEQ ID NO: 151403 - DNA, 20 bp, Artificial Sequence
  Description of Artificial Sequence: Synthetic oligonucleotide
  Target: LAMA2; (+) strand; PAM type: NRG; PAM sequence: GGG
gagagaagttagttgtccaa

SEQ ID NO: 151404 - DNA, 20 bp, Artificial Sequence
  Description of Artificial Sequence: Synthetic oligonucleotide
  Target: LAMA2; (+) strand; PAM type: NRG; PAM sequence: AAG
gtccaagggaattttttaaa

SEQ ID NO: 151405 - DNA, 20 bp, Artificial Sequence
  Description of Artificial Sequence: Synthetic oligonucleotide
  Target: LAMA2; (+) strand; PAM type: NRG; PAM sequence: CAG
gggaattttttaaaaagcct

SEQ ID NO: 151406 - DNA, 20 bp, Artificial Sequence
  Description of Artificial Sequence: Synthetic oligonucleotide
  Target: LAMA2; (+) strand; PAM type: NRG; PAM sequence: AAG
aaagcctcagtattgataat

SEQ ID NO: 151407 - DNA, 20 bp, Artificial Sequence
  Description of Artificial Sequence: Synthetic oligonucleotide
  Target: LAMA2; (+) strand; PAM type: NRG; PAM sequence: AGG
aagcctcagtattgataata

SEQ ID NO: 151408 - DNA, 20 bp, Artificial Sequence
  Description of Artificial Sequence: Synthetic oligonucleotide
  Target: LAMA2; (+) strand; PAM type: NRG; PAM sequence: GGG
agcctcagtattgataataa

SEQ ID NO: 151409 - DNA, 20 bp, Artificial Sequence
  Description of Artificial Sequence: Synthetic oligonucleotide
  Target: LAMA2; (+) strand; PAM type: NRG; PAM sequence: AAG
tattgataataagggaattc

SEQ ID NO: 151410 - DNA, 20 bp, Artificial Sequence
  Description of Artificial Sequence: Synthetic oligonucleotide
  Target: LAMA2; (+) strand; PAM type: NRG; PAM sequence: AGG
attgataataagggaattca

SEQ ID NO: 151411 - DNA, 20 bp, Artificial Sequence
  Description of Artificial Sequence: Synthetic oligonucleotide
  Target: LAMA2; (+) strand; PAM type: NRG; PAM sequence: AAG
gataataagggaattcaagg

SEQ ID NO: 151412 - DNA, 20 bp, Artificial Sequence
  Description of Artificial Sequence: Synthetic oligonucleotide
  Target: LAMA2; (+) strand; PAM type: NRG; PAM sequence: GAG
taataagggaattcaaggaa

SEQ ID NO: 151413 - DNA, 20 bp, Artificial Sequence
  Description of Artificial Sequence: Synthetic oligonucleotide
  Target: LAMA2; (+) strand; PAM type: NRG; PAM sequence: AGG
aataagggaattcaaggaag

SEQ ID NO: 151414 - DNA, 20 bp, Artificial Sequence
  Description of Artificial Sequence: Synthetic oligonucleotide
  Target: LAMA2; (+) strand; PAM type: NRG; PAM sequence: GGG
ataagggaattcaaggaaga

SEQ ID NO: 151415 - DNA, 20 bp, Artificial Sequence
  Description of Artificial Sequence: Synthetic oligonucleotide
  Target: LAMA2; (+) strand; PAM type: NRG; PAM sequence: GGG
taagggaattcaaggaagag

SEQ ID NO: 151416 - DNA, 20 bp, Artificial Sequence
  Description of Artificial Sequence: Synthetic oligonucleotide
  Target: LAMA2; (+) strand; PAM type: NRG; PAM sequence: TAG
ttcaaggaagaggggaaatg

SEQ ID NO: 151417 - DNA, 20 bp, Artificial Sequence
  Description of Artificial Sequence: Synthetic oligonucleotide
  Target: LAMA2; (+) strand; PAM type: NRG; PAM sequence: GAG
caaggaagaggggaaatgta

SEQ ID NO: 151418 - DNA, 20 bp, Artificial Sequence
  Description of Artificial Sequence: Synthetic oligonucleotide
  Target: LAMA2; (+) strand; PAM type: NRG; PAM sequence: TAG
atgtagagaaaatgcgtatg

SEQ ID NO: 151419 - DNA, 20 bp, Artificial Sequence
  Description of Artificial Sequence: Synthetic oligonucleotide
  Target: LAMA2; (+) strand; PAM type: NRG; PAM sequence: AGG
tgtagagaaaatgcgtatgt

SEQ ID NO: 151420 - DNA, 20 bp, Artificial Sequence
  Description of Artificial Sequence: Synthetic oligonucleotide
  Target: LAMA2; (+) strand; PAM type: NRG; PAM sequence: GGG
gtagagaaaatgcgtatgta

SEQ ID NO: 151421 - DNA, 20 bp, Artificial Sequence
  Description of Artificial Sequence: Synthetic oligonucleotide
  Target: LAMA2; (+) strand; PAM type: NRG; PAM sequence: TGG
aatattacaaatctgtttcc

SEQ ID NO: 151422 - DNA, 20 bp, Artificial Sequence
  Description of Artificial Sequence: Synthetic oligonucleotide
  Target: LAMA2; (+) strand; PAM type: NRG; PAM sequence: AAG
ttacaaatctgtttcctgga

SEQ ID NO: 151423 - DNA, 20 bp, Artificial Sequence
  Description of Artificial Sequence: Synthetic oligonucleotide
  Target: LAMA2; (+) strand; PAM type: NRG; PAM sequence: CAG
caaatctgtttcctggaaag

SEQ ID NO: 151424 - DNA, 20 bp, Artificial Sequence
  Description of Artificial Sequence: Synthetic oligonucleotide
  Target: LAMA2; (+) strand; PAM type: NRG; PAM sequence: AGG
aaatctgtttcctggaaagc

SEQ ID NO: 151425 - DNA, 20 bp, Artificial Sequence
  Description of Artificial Sequence: Synthetic oligonucleotide
  Target: LAMA2; (+) strand; PAM type: NRG; PAM sequence: TAG
gaaagcaggatgccttcctt

SEQ ID NO: 151426 - DNA, 20 bp, Artificial Sequence
  Description of Artificial Sequence: Synthetic oligonucleotide
  Target: LAMA2; (+) strand; PAM type: NRG; PAM sequence: TAG
atgccttcctttagaattat

SEQ ID NO: 151427 - DNA, 20 bp, Artificial Sequence
  Description of Artificial Sequence: Synthetic oligonucleotide
  Target: LAMA2; (+) strand; PAM type: NRG; PAM sequence: AAG
ttcctttagaattattagtt

SEQ ID NO: 151428 - DNA, 20 bp, Artificial Sequence
  Description of Artificial Sequence: Synthetic oligonucleotide
  Target: LAMA2; (+) strand; PAM type: NRG; PAM sequence: GAG
gattaaccactctttaaatt

SEQ ID NO: 151429 - DNA, 20 bp, Artificial Sequence
  Description of Artificial Sequence: Synthetic oligonucleotide
  Target: LAMA2; (+) strand; PAM type: NRG; PAM sequence: GAG
ttaaccactctttaaattga

SEQ ID NO: 151430 - DNA, 20 bp, Artificial Sequence
  Description of Artificial Sequence: Synthetic oligonucleotide
  Target: LAMA2; (+) strand; PAM type: NRG; PAM sequence: TGG
cttccctgtttttcattata

SEQ ID NO: 151431 - DNA, 20 bp, Artificial Sequence
  Description of Artificial Sequence: Synthetic oligonucleotide
  Target: LAMA2; (+) strand; PAM type: NRG; PAM sequence: CAG
cctgtttttcattatatggt

SEQ ID NO: 151432 - DNA, 20 bp, Artificial Sequence
  Description of Artificial Sequence: Synthetic oligonucleotide
  Target: LAMA2; (+) strand; PAM type: NRG; PAM sequence: TGG
attatatggtcagctttcac

SEQ ID NO: 151433 - DNA, 20 bp, Artificial Sequence
  Description of Artificial Sequence: Synthetic oligonucleotide
  Target: LAMA2; (+) strand; PAM type: NRG; PAM sequence: GAG
tggtcagctttcactggcct

SEQ ID NO: 151434 - DNA, 20 bp, Artificial Sequence
  Description of Artificial Sequence: Synthetic oligonucleotide
  Target: LAMA2; (+) strand; PAM type: NRG; PAM sequence: AAG
ctggcctgagtccacatttt

SEQ ID NO: 151435 - DNA, 20 bp, Artificial Sequence
  Description of Artificial Sequence: Synthetic oligonucleotide
  Target: LAMA2; (+) strand; PAM type: NRG; PAM sequence: CAG
actatatacaaataattttt

SEQ ID NO: 151436 - DNA, 20 bp, Artificial Sequence
  Description of Artificial Sequence: Synthetic oligonucleotide
  Target: LAMA2; (+) strand; PAM type: NRG; PAM sequence: GAG
aaataatttttcagtatact

SEQ ID NO: 151437 - DNA, 20 bp, Artificial Sequence
  Description of Artificial Sequence: Synthetic oligonucleotide
  Target: LAMA2; (+) strand; PAM type: NRG; PAM sequence: GAG
ataatttttcagtatactga

SEQ ID NO: 151438 - DNA, 20 bp, Artificial Sequence
  Description of Artificial Sequence: Synthetic oligonucleotide
  Target: LAMA2; (+) strand; PAM type: NRG; PAM sequence: TAG
atttttcagtatactgagag

SEQ ID NO: 151439 - DNA, 20 bp, Artificial Sequence
  Description of Artificial Sequence: Synthetic oligonucleotide
  Target: LAMA2; (+) strand; PAM type: NRG; PAM sequence: AGG
tttttcagtatactgagagt

SEQ ID NO: 151440 - DNA, 20 bp, Artificial Sequence
  Description of Artificial Sequence: Synthetic oligonucleotide
  Target: LAMA2; (+) strand; PAM type: NRG; PAM sequence: CAG
gagagtaggattaatgaaac

SEQ ID NO: 151441 - DNA, 20 bp, Artificial Sequence
  Description of Artificial Sequence: Synthetic oligonucleotide
  Target: LAMA2; (+) strand; PAM type: NRG; PAM sequence: TGG
taggattaatgaaaccagtc

SEQ ID NO: 151442 - DNA, 20 bp, Artificial Sequence
  Description of Artificial Sequence: Synthetic oligonucleotide
  Target: LAMA2; (+) strand; PAM type: NRG; PAM sequence: GAG
ggattaatgaaaccagtctg

SEQ ID NO: 151443 - DNA, 20 bp, Artificial Sequence
  Description of Artificial Sequence: Synthetic oligonucleotide
  Target: LAMA2; (+) strand; PAM type: NRG; PAM sequence: GAG
attaatgaaaccagtctgga

SEQ ID NO: 151444 - DNA, 20 bp, Artificial Sequence
  Description of Artificial Sequence: Synthetic oligonucleotide
  Target: LAMA2; (+) strand; PAM type: NRG; PAM sequence: CAG
aatgaaaccagtctggagag

SEQ ID NO: 151445 - DNA, 20 bp, Artificial Sequence
  Description of Artificial Sequence: Synthetic oligonucleotide
  Target: LAMA2; (+) strand; PAM type: NRG; PAM sequence: CAG
accagtctggagagcagtca

SEQ ID NO: 151446 - DNA, 20 bp, Artificial Sequence
  Description of Artificial Sequence: Synthetic oligonucleotide
  Target: LAMA2; (+) strand; PAM type: NRG; PAM sequence: GAG
ctggagagcagtcacagaat

SEQ ID NO: 151447 - DNA, 20 bp, Artificial Sequence
  Description of Artificial Sequence: Synthetic oligonucleotide
  Target: LAMA2; (+) strand; PAM type: NRG; PAM sequence: TAG
gagcagtcacagaatgagaa

SEQ ID NO: 151448 - DNA, 20 bp, Artificial Sequence
  Description of Artificial Sequence: Synthetic oligonucleotide
  Target: LAMA2; (+) strand; PAM type: NRG; PAM sequence: TAG
atgagaatagatctttccca

SEQ ID NO: 151449 - DNA, 20 bp, Artificial Sequence
  Description of Artificial Sequence: Synthetic oligonucleotide
  Target: LAMA2; (+) strand; PAM type: NRG; PAM sequence: CAG
ctgattgtactgatgtgtta

SEQ ID NO: 151450 - DNA, 20 bp, Artificial Sequence
  Description of Artificial Sequence: Synthetic oligonucleotide
  Target: LAMA2; (+) strand; PAM type: NRG; PAM sequence: AAG
gttacagaaaacactgtaaa

SEQ ID NO: 151451 - DNA, 20 bp, Artificial Sequence
  Description of Artificial Sequence: Synthetic oligonucleotide
  Target: LAMA2; (+) strand; PAM type: NRG; PAM sequence: CAG
aaacactgtaaaaagttaac

SEQ ID NO: 151452 - DNA, 20 bp, Artificial Sequence
  Description of Artificial Sequence: Synthetic oligonucleotide
  Target: LAMA2; (+) strand; PAM type: NRG; PAM sequence: GAG
acactgtaaaaagttaacca

SEQ ID NO: 151453 - DNA, 20 bp, Artificial Sequence
  Description of Artificial Sequence: Synthetic oligonucleotide
  Target: LAMA2; (+) strand; PAM type: NRG; PAM sequence: AGG
cactgtaaaaagttaaccag

SEQ ID NO: 151454 - DNA, 20 bp, Artificial Sequence
  Description of Artificial Sequence: Synthetic oligonucleotide
  Target: LAMA2; (+) strand; PAM type: NRG; PAM sequence: CAG
actttatctgatctttaccc

SEQ ID NO: 151455 - DNA, 20 bp, Artificial Sequence
  Description of Artificial Sequence: Synthetic oligonucleotide
  Target: LAMA2; (+) strand; PAM type: NRG; PAM sequence: AAG
tttttaatctgaaatgtgaa

SEQ ID NO: 151456 - DNA, 20 bp, Artificial Sequence
  Description of Artificial Sequence: Synthetic oligonucleotide
  Target: LAMA2; (+) strand; PAM type: NRG; PAM sequence: TGG
atgtgaaaagtatttataac

SEQ ID NO: 151457 - DNA, 20 bp, Artificial Sequence
  Description of Artificial Sequence: Synthetic oligonucleotide
  Target: LAMA2; (+) strand; PAM type: NRG; PAM sequence: AAG
ttttaccatgaaattaaatg

SEQ ID NO: 151458 - DNA, 20 bp, Artificial Sequence
  Description of Artificial Sequence: Synthetic oligonucleotide
  Target: LAMA2; (+) strand; PAM type: NRG; PAM sequence: CAG
taaatgaagtacctcaataa

SEQ ID NO: 151459 - DNA, 20 bp, Artificial Sequence
  Description of Artificial Sequence: Synthetic oligonucleotide
  Target: LAMA2; (+) strand; PAM type: NRG; PAM sequence: CAG
gaagtacctcaataacagaa

SEQ ID NO: 151460 - DNA, 20 bp, Artificial Sequence
  Description of Artificial Sequence: Synthetic oligonucleotide
  Target: LAMA2; (+) strand; PAM type: NRG; PAM sequence: AAG
agaacagtgaactttaaatg

SEQ ID NO: 151461 - DNA, 20 bp, Artificial Sequence
  Description of Artificial Sequence: Synthetic oligonucleotide
  Target: LAMA2; (+) strand; PAM type: NRG; PAM sequence: TAG
acagtgaactttaaatgaag

SEQ ID NO: 151462 - DNA, 20 bp, Artificial Sequence
  Description of Artificial Sequence: Synthetic oligonucleotide
  Target: LAMA2; (+) strand; PAM type: NRG; PAM sequence: CAG
taaatgaagtagctcaataa

SEQ ID NO: 151463 - DNA, 20 bp, Artificial Sequence
  Description of Artificial Sequence: Synthetic oligonucleotide
  Target: LAMA2; (+) strand; PAM type: NRG; PAM sequence: CAG
gaagtagctcaataacagaa

SEQ ID NO: 151464 - DNA, 20 bp, Artificial Sequence
  Description of Artificial Sequence: Synthetic oligonucleotide
  Target: LAMA2; (+) strand; PAM type: NRG; PAM sequence: TGG
aacagaacagtgaacctaac

SEQ ID NO: 151465 - DNA, 20 bp, Artificial Sequence
  Description of Artificial Sequence: Synthetic oligonucleotide
  Target: LAMA2; (+) strand; PAM type: NRG; PAM sequence: TAG
gaacctaactggccccattt

SEQ ID NO: 151466 - DNA, 20 bp, Artificial Sequence
  Description of Artificial Sequence: Synthetic oligonucleotide
  Target: LAMA2; (+) strand; PAM type: NRG; PAM sequence: CAG
caatctaatgcattcctgca

SEQ ID NO: 151467 - DNA, 20 bp, Artificial Sequence
  Description of Artificial Sequence: Synthetic oligonucleotide
  Target: LAMA2; (+) strand; PAM type: NRG; PAM sequence: AGG
aatctaatgcattcctgcac

SEQ ID NO: 151468 - DNA, 20 bp, Artificial Sequence
  Description of Artificial Sequence: Synthetic oligonucleotide
  Target: LAMA2; (+) strand; PAM type: NRG; PAM sequence: AAG
ctctacactcaacctacatg

SEQ ID NO: 151469 - DNA, 20 bp, Artificial Sequence
  Description of Artificial Sequence: Synthetic oligonucleotide
  Target: LAMA2; (+) strand; PAM type: NRG; PAM sequence: TAG
aacctacatgaagatcaaca

SEQ ID NO: 151470 - DNA, 20 bp, Artificial Sequence
  Description of Artificial Sequence: Synthetic oligonucleotide
  Target: LAMA2; (+) strand; PAM type: NRG; PAM sequence: GAG
atcaacatagtcacttttac

SEQ ID NO: 151471 - DNA, 20 bp, Artificial Sequence
  Description of Artificial Sequence: Synthetic oligonucleotide
  Target: LAMA2; (+) strand; PAM type: NRG; PAM sequence: GAG
caacatagtcacttttacga

SEQ ID NO: 151472 - DNA, 20 bp, Artificial Sequence
  Description of Artificial Sequence: Synthetic oligonucleotide
  Target: LAMA2; (+) strand; PAM type: NRG; PAM sequence: TAG
catagtcacttttacgagag

SEQ ID NO: 151473 - DNA, 20 bp, Artificial Sequence
  Description of Artificial Sequence: Synthetic oligonucleotide
  Target: LAMA2; (+) strand; PAM type: NRG; PAM sequence: CAG
catccaataatctttctcac

SEQ ID NO: 151474 - DNA, 20 bp, Artificial Sequence
  Description of Artificial Sequence: Synthetic oligonucleotide
  Target: LAMA2; (+) strand; PAM type: NRG; PAM sequence: TAG
atctttctcaccagtgtaat

SEQ ID NO: 151475 - DNA, 20 bp, Artificial Sequence
  Description of Artificial Sequence: Synthetic oligonucleotide
  Target: LAMA2; (+) strand; PAM type: NRG; PAM sequence: AAG
ttctcaccagtgtaattaga

SEQ ID NO: 151476 - DNA, 20 bp, Artificial Sequence
  Description of Artificial Sequence: Synthetic oligonucleotide
  Target: LAMA2; (+) strand; PAM type: NRG; PAM sequence: AGG
tctcaccagtgtaattagaa

SEQ ID NO: 151477 - DNA, 20 bp, Artificial Sequence
  Description of Artificial Sequence: Synthetic oligonucleotide
  Target: LAMA2; (+) strand; PAM type: NRG; PAM sequence: CAG
cagtgtaattagaaaggata

SEQ ID NO: 151478 - DNA, 20 bp, Artificial Sequence
  Description of Artificial Sequence: Synthetic oligonucleotide
  Target: LAMA2; (+) strand; PAM type: NRG; PAM sequence: TAG
aaaggatacagcttaacaca

SEQ ID NO: 151479 - DNA, 20 bp, Artificial Sequence
  Description of Artificial Sequence: Synthetic oligonucleotide
  Target: LAMA2; (+) strand; PAM type: NRG; PAM sequence: GAG
cagcttaacacatagctttt

SEQ ID NO: 151480 - DNA, 20 bp, Artificial Sequence
  Description of Artificial Sequence: Synthetic oligonucleotide
  Target: LAMA2; (+) strand; PAM type: NRG; PAM sequence: CAG
cttaacacatagcttttgag

SEQ ID NO: 151481 - DNA, 20 bp, Artificial Sequence
  Description of Artificial Sequence: Synthetic oligonucleotide
  Target: LAMA2; (+) strand; PAM type: NRG; PAM sequence: TAG
atatcattatacgttaaata

SEQ ID NO: 151482 - DNA, 20 bp, Artificial Sequence
  Description of Artificial Sequence: Synthetic oligonucleotide
  Target: LAMA2; (+) strand; PAM type: NRG; PAM sequence: GAG
attatacgttaaatatagtt

SEQ ID NO: 151483 - DNA, 20 bp, Artificial Sequence
  Description of Artificial Sequence: Synthetic oligonucleotide
  Target: LAMA2; (+) strand; PAM type: NRG; PAM sequence: GAG
tatacgttaaatatagttga

SEQ ID NO: 151484 - DNA, 20 bp, Artificial Sequence
  Description of Artificial Sequence: Synthetic oligonucleotide
  Target: LAMA2; (+) strand; PAM type: NRG; PAM sequence: AGG
atacgttaaatatagttgag

SEQ ID NO: 151485 - DNA, 20 bp, Artificial Sequence
  Description of Artificial Sequence: Synthetic oligonucleotide
  Target: LAMA2; (+) strand; PAM type: NRG; PAM sequence: GGG
tacgttaaatatagttgaga

SEQ ID NO: 151486 - DNA, 20 bp, Artificial Sequence
  Description of Artificial Sequence: Synthetic oligonucleotide
  Target: LAMA2; (+) strand; PAM type: NRG; PAM sequence: AAG
atagttgagagggtaaaatg

SEQ ID NO: 151487 - DNA, 20 bp, Artificial Sequence
  Description of Artificial Sequence: Synthetic oligonucleotide
  Target: LAMA2; (+) strand; PAM type: NRG; PAM sequence: CAG
agggtaaaatgaagaatgta

SEQ ID NO: 151488 - DNA, 20 bp, Artificial Sequence
  Description of Artificial Sequence: Synthetic oligonucleotide
  Target: LAMA2; (+) strand; PAM type: NRG; PAM sequence: CAG
cagttaatattttccttata

SEQ ID NO: 151489 - DNA, 20 bp, Artificial Sequence
  Description of Artificial Sequence: Synthetic oligonucleotide
  Target: LAMA2; (+) strand; PAM type: NRG; PAM sequence: TGG
atattttccttatacagaca

SEQ ID NO: 151490 - DNA, 20 bp, Artificial Sequence
  Description of Artificial Sequence: Synthetic oligonucleotide
  Target: LAMA2; (+) strand; PAM type: NRG; PAM sequence: CAG
tccttatacagacatggacg

SEQ ID NO: 151491 - DNA, 20 bp, Artificial Sequence
  Description of Artificial Sequence: Synthetic oligonucleotide
  Target: LAMA2; (+) strand; PAM type: NRG; PAM sequence: AAG
ggacgcagctcataatgttg

SEQ ID NO: 151492 - DNA, 20 bp, Artificial Sequence
  Description of Artificial Sequence: Synthetic oligonucleotide
  Target: LAMA2; (+) strand; PAM type: NRG; PAM sequence: AGG
gacgcagctcataatgttga

SEQ ID NO: 151493 - DNA, 20 bp, Artificial Sequence
  Description of Artificial Sequence: Synthetic oligonucleotide
  Target: LAMA2; (+) strand; PAM type: NRG; PAM sequence: CAG
ctgatacatctctttatttg

SEQ ID NO: 151494 - DNA, 20 bp, Artificial Sequence
  Description of Artificial Sequence: Synthetic oligonucleotide
  Target: LAMA2; (+) strand; PAM type: NRG; PAM sequence: AGG
tgatacatctctttatttgc

SEQ ID NO: 151495 - DNA, 20 bp, Artificial Sequence
  Description of Artificial Sequence: Synthetic oligonucleotide
  Target: LAMA2; (+) strand; PAM type: NRG; PAM sequence: AAG
ttatttgcaggaaaatgttg

SEQ ID NO: 151496 - DNA, 20 bp, Artificial Sequence
  Description of Artificial Sequence: Synthetic oligonucleotide
  Target: LAMA2; (+) strand; PAM type: NRG; PAM sequence: AGG
tatttgcaggaaaatgttga

SEQ ID NO: 151497 - DNA, 20 bp, Artificial Sequence
  Description of Artificial Sequence: Synthetic oligonucleotide
  Target: LAMA2; (+) strand; PAM type: NRG; PAM sequence: GAG
tttgcaggaaaatgttgaag

SEQ ID NO: 151498 - DNA, 20 bp, Artificial Sequence
  Description of Artificial Sequence: Synthetic oligonucleotide
  Target: LAMA2; (+) strand; PAM type: NRG; PAM sequence: AGG
ttgcaggaaaatgttgaagg

SEQ ID NO: 151499 - DNA, 20 bp, Artificial Sequence
  Description of Artificial Sequence: Synthetic oligonucleotide
  Target: LAMA2; (+) strand; PAM type: NRG; PAM sequence: GAG
gcaggaaaatgttgaaggag

SEQ ID NO: 151500 - DNA, 20 bp, Artificial Sequence
  Description of Artificial Sequence: Synthetic oligonucleotide
  Target: LAMA2; (+) strand; PAM type: NRG; PAM sequence: TAG
aatgttgaaggaggagactg

SEQ ID NO: 151501 - DNA, 20 bp, Artificial Sequence
  Description of Artificial Sequence: Synthetic oligonucleotide
  Target: LAMA2; (+) strand; PAM type: NRG; PAM sequence: CGG
gactgtagtcgttgcaaatc

SEQ ID NO: 151502 - DNA, 20 bp, Artificial Sequence
  Description of Artificial Sequence: Synthetic oligonucleotide
  Target: LAMA2; (+) strand; PAM type: NRG; PAM sequence: AAG
atccggcttcttcaatttgc

SEQ ID NO: 151503 - DNA, 20 bp, Artificial Sequence
  Description of Artificial Sequence: Synthetic oligonucleotide
  Target: LAMA2; (+) strand; PAM type: NRG; PAM sequence: GAG
ccggcttcttcaatttgcaa

SEQ ID NO: 151504 - DNA, 20 bp, Artificial Sequence
  Description of Artificial Sequence: Synthetic oligonucleotide
  Target: LAMA2; (+) strand; PAM type: NRG; PAM sequence: AGG
cggcttcttcaatttgcaag

SEQ ID NO: 151505 - DNA, 20 bp, Artificial Sequence
  Description of Artificial Sequence: Synthetic oligonucleotide
  Target: LAMA2; (+) strand; PAM type: NRG; PAM sequence: TGG
tcaatttgcaagaggataat

SEQ ID NO: 151506 - DNA, 20 bp, Artificial Sequence
  Description of Artificial Sequence: Synthetic oligonucleotide
  Target: LAMA2; (+) strand; PAM type: NRG; PAM sequence: AAG
tttgcaagaggataattgga

SEQ ID NO: 151507 - DNA, 20 bp, Artificial Sequence
  Description of Artificial Sequence: Synthetic oligonucleotide
  Target: LAMA2; (+) strand; PAM type: NRG; PAM sequence: AGG
ttgcaagaggataattggaa

SEQ ID NO: 151508 - DNA, 20 bp, Artificial Sequence
  Description of Artificial Sequence: Synthetic oligonucleotide
  Target: LAMA2; (+) strand; PAM type: NRG; PAM sequence: GAG
ataattggaaaggctgcgat

SEQ ID NO: 151509 - DNA, 20 bp, Artificial Sequence
  Description of Artificial Sequence: Synthetic oligonucleotide
  Target: LAMA2; (+) strand; PAM type: NRG; PAM sequence: CAG
ctgcgatgagtgtttctgtt

SEQ ID NO: 151510 - DNA, 20 bp, Artificial Sequence
  Description of Artificial Sequence: Synthetic oligonucleotide
  Target: LAMA2; (+) strand; PAM type: NRG; PAM sequence: AGG
tgcgatgagtgtttctgttc

SEQ ID NO: 151511 - DNA, 20 bp, Artificial Sequence
  Description of Artificial Sequence: Synthetic oligonucleotide
  Target: LAMA2; (+) strand; PAM type: NRG; PAM sequence: GGG
gcgatgagtgtttctgttca

SEQ ID NO: 151512 - DNA, 20 bp, Artificial Sequence
  Description of Artificial Sequence: Synthetic oligonucleotide
  Target: LAMA2; (+) strand; PAM type: NRG; PAM sequence: GGG
cgatgagtgtttctgttcag

SEQ ID NO: 151513 - DNA, 20 bp, Artificial Sequence
  Description of Artificial Sequence: Synthetic oligonucleotide
  Target: LAMA2; (+) strand; PAM type: NRG; PAM sequence: CAG
ttctgttcaggggtttcaaa

SEQ ID NO: 151514 - DNA, 20 bp, Artificial Sequence
  Description of Artificial Sequence: Synthetic oligonucleotide
  Target: LAMA2; (+) strand; PAM type: NRG; PAM sequence: CAG
caggggtttcaaacagatgt

SEQ ID NO: 151515 - DNA, 20 bp, Artificial Sequence
  Description of Artificial Sequence: Synthetic oligonucleotide
  Target: LAMA2; (+) strand; PAM type: NRG; PAM sequence: GAG
ggggtttcaaacagatgtca

SEQ ID NO: 151516 - DNA, 20 bp, Artificial Sequence
  Description of Artificial Sequence: Synthetic oligonucleotide
  Target: LAMA2; (+) strand; PAM type: NRG; PAM sequence: TGG
acagatgtcagagttcctac

SEQ ID NO: 151517 - DNA, 20 bp, Artificial Sequence
  Description of Artificial Sequence: Synthetic oligonucleotide
  Target: LAMA2; (+) strand; PAM type: NRG; PAM sequence: TGG
cagagttcctactggaccta

SEQ ID NO: 151518 - DNA, 20 bp, Artificial Sequence
  Description of Artificial Sequence: Synthetic oligonucleotide
  Target: LAMA2; (+) strand; PAM type: NRG; PAM sequence: AAG
ttcctactggacctatggca

SEQ ID NO: 151519 - DNA, 20 bp, Artificial Sequence
  Description of Artificial Sequence: Synthetic oligonucleotide
  Target: LAMA2; (+) strand; PAM type: NRG; PAM sequence: AAG
tactggacctatggcaaagt

SEQ ID NO: 151520 - DNA, 20 bp, Artificial Sequence
  Description of Artificial Sequence: Synthetic oligonucleotide
  Target: LAMA2; (+) strand; PAM type: NRG; PAM sequence: AAG
ggacctatggcaaagtaagc

SEQ ID NO: 151521 - DNA, 20 bp, Artificial Sequence
  Description of Artificial Sequence: Synthetic oligonucleotide
  Target: LAMA2; (+) strand; PAM type: NRG; PAM sequence: TGG
caaagtaagcaagcaccatt

SEQ ID NO: 151522 - DNA, 20 bp, Artificial Sequence
  Description of Artificial Sequence: Synthetic oligonucleotide
  Target: LAMA2; (+) strand; PAM type: NRG; PAM sequence: CAG
tttggttctgtttgctgccc

SEQ ID NO: 151523 - DNA, 20 bp, Artificial Sequence
  Description of Artificial Sequence: Synthetic oligonucleotide
  Target: LAMA2; (+) strand; PAM type: NRG; PAM sequence: CAG
ggttctgtttgctgccccag

SEQ ID NO: 151524 - DNA, 20 bp, Artificial Sequence
  Description of Artificial Sequence: Synthetic oligonucleotide
  Target: LAMA2; (+) strand; PAM type: NRG; PAM sequence: CAG
tcgttgttcttttgtatgaa

SEQ ID NO: 151525 - DNA, 20 bp, Artificial Sequence
  Description of Artificial Sequence: Synthetic oligonucleotide
  Target: LAMA2; (+) strand; PAM type: NRG; PAM sequence: TAG
tttgtatgaacagtttctga

SEQ ID NO: 151526 - DNA, 20 bp, Artificial Sequence
  Description of Artificial Sequence: Synthetic oligonucleotide
  Target: LAMA2; (+) strand; PAM type: NRG; PAM sequence: AAG
tgatagtgaacttctacata

SEQ ID NO: 151527 - DNA, 20 bp, Artificial Sequence
  Description of Artificial Sequence: Synthetic oligonucleotide
  Target: LAMA2; (+) strand; PAM type: NRG; PAM sequence: CAG
tgaacttctacataaagtta

SEQ ID NO: 151528 - DNA, 20 bp, Artificial Sequence
  Description of Artificial Sequence: Synthetic oligonucleotide
  Target: LAMA2; (+) strand; PAM type: NRG; PAM sequence: AGG
gaacttctacataaagttac

SEQ ID NO: 151529 - DNA, 20 bp, Artificial Sequence
  Description of Artificial Sequence: Synthetic oligonucleotide
  Target: LAMA2; (+) strand; PAM type: NRG; PAM sequence: AAG
cttctacataaagttacagg

SEQ ID NO: 151530 - DNA, 20 bp, Artificial Sequence
  Description of Artificial Sequence: Synthetic oligonucleotide
  Target: LAMA2; (+) strand; PAM type: NRG; PAM sequence: AAG
ctacataaagttacaggaag

SEQ ID NO: 151531 - DNA, 20 bp, Artificial Sequence
  Description of Artificial Sequence: Synthetic oligonucleotide
  Target: LAMA2; (+) strand; PAM type: NRG; PAM sequence: TGG
aaagttacaggaagaagtaa

SEQ ID NO: 151532 - DNA, 20 bp, Artificial Sequence
  Description of Artificial Sequence: Synthetic oligonucleotide
  Target: LAMA2; (+) strand; PAM type: NRG; PAM sequence: AAG
ctgttgtgtatttttgctca

SEQ ID NO: 151533 - DNA, 20 bp, Artificial Sequence
  Description of Artificial Sequence: Synthetic oligonucleotide
  Target: LAMA2; (+) strand; PAM type: NRG; PAM sequence: GAG
tatttttgctcaaagccttt

SEQ ID NO: 151534 - DNA, 20 bp, Artificial Sequence
  Description of Artificial Sequence: Synthetic oligonucleotide
  Target: LAMA2; (+) strand; PAM type: NRG; PAM sequence: AGG
atttttgctcaaagcctttg

SEQ ID NO: 151535 - DNA, 20 bp, Artificial Sequence
  Description of Artificial Sequence: Synthetic oligonucleotide
  Target: LAMA2; (+) strand; PAM type: NRG; PAM sequence: TAG
gttgtatttgtaatattgtg

SEQ ID NO: 151536 - DNA, 20 bp, Artificial Sequence
  Description of Artificial Sequence: Synthetic oligonucleotide
  Target: LAMA2; (+) strand; PAM type: NRG; PAM sequence: TGG
atttgtaatattgtgtagac

SEQ ID NO: 151537 - DNA, 20 bp, Artificial Sequence
  Description of Artificial Sequence: Synthetic oligonucleotide
  Target: LAMA2; (+) strand; PAM type: NRG; PAM sequence: TAG
ttgtgtagactggaatttct

SEQ ID NO: 151538 - DNA, 20 bp, Artificial Sequence
  Description of Artificial Sequence: Synthetic oligonucleotide
  Target: LAMA2; (+) strand; PAM type: NRG; PAM sequence: TAG
tagactggaatttcttagaa

SEQ ID NO: 151539 - DNA, 20 bp, Artificial Sequence
  Description of Artificial Sequence: Synthetic oligonucleotide
  Target: LAMA2; (+) strand; PAM type: NRG; PAM sequence: AGG
agactggaatttcttagaat

SEQ ID NO: 151540 - DNA, 20 bp, Artificial Sequence
  Description of Artificial Sequence: Synthetic oligonucleotide
  Target: LAMA2; (+) strand; PAM type: NRG; PAM sequence: TAG
ctggaatttcttagaatagg

SEQ ID NO: 151541 - DNA, 20 bp, Artificial Sequence
  Description of Artificial Sequence: Synthetic oligonucleotide
  Target: LAMA2; (+) strand; PAM type: NRG; PAM sequence: TAG
tttcttagaataggtagaca

SEQ ID NO: 151542 - DNA, 20 bp, Artificial Sequence
  Description of Artificial Sequence: Synthetic oligonucleotide
  Target: LAMA2; (+) strand; PAM type: NRG; PAM sequence: TAG
ataggtagacatagtctttt

SEQ ID NO: 151543 - DNA, 20 bp, Artificial Sequence
  Description of Artificial Sequence: Synthetic oligonucleotide
  Target: LAMA2; (+) strand; PAM type: NRG; PAM sequence: AAG
tatgaaacaataatgcaatt

SEQ ID NO: 151544 - DNA, 20 bp, Artificial Sequence
  Description of Artificial Sequence: Synthetic oligonucleotide
  Target: LAMA2; (+) strand; PAM type: NRG; PAM sequence: AGG
atgaaacaataatgcaatta

SEQ ID NO: 151545 - DNA, 20 bp, Artificial Sequence
  Description of Artificial Sequence: Synthetic oligonucleotide
  Target: LAMA2; (+) strand; PAM type: NRG; PAM sequence: AAG
gcaattaaggtttcaactcc

SEQ ID NO: 151546 - DNA, 20 bp, Artificial Sequence
  Description of Artificial Sequence: Synthetic oligonucleotide
  Target: LAMA2; (+) strand; PAM type: NRG; PAM sequence: AGG
caattaaggtttcaactcca

SEQ ID NO: 151547 - DNA, 20 bp, Artificial Sequence
  Description of Artificial Sequence: Synthetic oligonucleotide
  Target: LAMA2; (+) strand; PAM type: NRG; PAM sequence: GGG
aattaaggtttcaactccaa

SEQ ID NO: 151548 - DNA, 20 bp, Artificial Sequence
  Description of Artificial Sequence: Synthetic oligonucleotide
  Target: LAMA2; (+) strand; PAM type: NRG; PAM sequence: AAG
actccaagggtgcatgattt

SEQ ID NO: 151549 - DNA, 20 bp, Artificial Sequence
  Description of Artificial Sequence: Synthetic oligonucleotide
  Target: LAMA2; (+) strand; PAM type: NRG; PAM sequence: GAG
tccaagggtgcatgatttaa

SEQ ID NO: 151550 - DNA, 20 bp, Artificial Sequence
  Description of Artificial Sequence: Synthetic oligonucleotide
  Target: LAMA2; (+) strand; PAM type: NRG; PAM sequence: GAG
caagggtgcatgatttaaga

SEQ ID NO: 151551 - DNA, 20 bp, Artificial Sequence
  Description of Artificial Sequence: Synthetic oligonucleotide
  Target: LAMA2; (+) strand; PAM type: NRG; PAM sequence: TAG
tgaattatattttccattac

SEQ ID NO: 151552 - DNA, 20 bp, Artificial Sequence
  Description of Artificial Sequence: Synthetic oligonucleotide
  Target: LAMA2; (+) strand; PAM type: NRG; PAM sequence: AAG
ttactagtatgttcgtatgc

SEQ ID NO: 151553 - DNA, 20 bp, Artificial Sequence
  Description of Artificial Sequence: Synthetic oligonucleotide
  Target: LAMA2; (+) strand; PAM type: NRG; PAM sequence: GAG
agtatgttcgtatgcaagtt

SEQ ID NO: 151554 - DNA, 20 bp, Artificial Sequence
  Description of Artificial Sequence: Synthetic oligonucleotide
  Target: LAMA2; (+) strand; PAM type: NRG; PAM sequence: TAG
catattatccaccaacgctt

SEQ ID NO: 151555 - DNA, 20 bp, Artificial Sequence
  Description of Artificial Sequence: Synthetic oligonucleotide
  Target: LAMA2; (+) strand; PAM type: NRG; PAM sequence: TAG
agttactatttgatgttgcc

SEQ ID NO: 151556 - DNA, 20 bp, Artificial Sequence
  Description of Artificial Sequence: Synthetic oligonucleotide
  Target: LAMA2; (+) strand; PAM type: NRG; PAM sequence: AGG
gttactatttgatgttgcct

SEQ ID NO: 151557 - DNA, 20 bp, Artificial Sequence
  Description of Artificial Sequence: Synthetic oligonucleotide
  Target: LAMA2; (+) strand; PAM type: NRG; PAM sequence: AAG
ctaggctctttcattattaa

SEQ ID NO: 151558 - DNA, 20 bp, Artificial Sequence
  Description of Artificial Sequence: Synthetic oligonucleotide
  Target: LAMA2; (+) strand; PAM type: NRG; PAM sequence: AGG
taggctctttcattattaaa

SEQ ID NO: 151559 - DNA, 20 bp, Artificial Sequence
  Description of Artificial Sequence: Synthetic oligonucleotide
  Target: LAMA2; (+) strand; PAM type: NRG; PAM sequence: GGG
aggctctttcattattaaaa

SEQ ID NO: 151560 - DNA, 20 bp, Artificial Sequence
  Description of Artificial Sequence: Synthetic oligonucleotide
  Target: LAMA2; (+) strand; PAM type: NRG; PAM sequence: GGG
ggctctttcattattaaaag

SEQ ID NO: 151561 - DNA, 20 bp, Artificial Sequence
  Description of Artificial Sequence: Synthetic oligonucleotide
  Target: LAMA2; (+) strand; PAM type: NRG; PAM sequence: TAG
ttaaaaggggacattaaata

SEQ ID NO: 151562 - DNA, 20 bp, Artificial Sequence
  Description of Artificial Sequence: Synthetic oligonucleotide
  Target: LAMA2; (+) strand; PAM type: NRG; PAM sequence: AGG
taaaaggggacattaaatat

SEQ ID NO: 151563 - DNA, 20 bp, Artificial Sequence
  Description of Artificial Sequence: Synthetic oligonucleotide
  Target: LAMA2; (+) strand; PAM type: NRG; PAM sequence: GAG
ataggcaataccttcattct

SEQ ID NO: 151564 - DNA, 20 bp, Artificial Sequence
  Description of Artificial Sequence: Synthetic oligonucleotide
  Target: LAMA2; (+) strand; PAM type: NRG; PAM sequence: TGG
gcaataccttcattctgagt

SEQ ID NO: 151565 - DNA, 20 bp, Artificial Sequence
  Description of Artificial Sequence: Synthetic oligonucleotide
  Target: LAMA2; (+) strand; PAM type: NRG; PAM sequence: TAG
ttattacttaaactatttaa

SEQ ID NO: 151566 - DNA, 20 bp, Artificial Sequence
  Description of Artificial Sequence: Synthetic oligonucleotide
  Target: LAMA2; (+) strand; PAM type: NRG; PAM sequence: AAG
tgccttttcaaatctgtgca

SEQ ID NO: 151567 - DNA, 20 bp, Artificial Sequence
  Description of Artificial Sequence: Synthetic oligonucleotide
  Target: LAMA2; (+) strand; PAM type: NRG; PAM sequence: GAG
ccttttcaaatctgtgcaaa

SEQ ID NO: 151568 - DNA, 20 bp, Artificial Sequence
  Description of Artificial Sequence: Synthetic oligonucleotide
  Target: LAMA2; (+) strand; PAM type: NRG; PAM sequence: CAG
gagcatgttgtctccctata

SEQ ID NO: 151569 - DNA, 20 bp, Artificial Sequence
  Description of Artificial Sequence: Synthetic oligonucleotide
  Target: LAMA2; (+) strand; PAM type: NRG; PAM sequence: AAG
tgttgtctccctatacagaa

SEQ ID NO: 151570 - DNA, 20 bp, Artificial Sequence
  Description of Artificial Sequence: Synthetic oligonucleotide
  Target: LAMA2; (+) strand; PAM type: NRG; PAM sequence: CAG
ctccctatacagaaaagtgt

SEQ ID NO: 151571 - DNA, 20 bp, Artificial Sequence
  Description of Artificial Sequence: Synthetic oligonucleotide
  Target: LAMA2; (+) strand; PAM type: NRG; PAM sequence: GAG
ccctatacagaaaagtgtca

SEQ ID NO: 151572 - DNA, 20 bp, Artificial Sequence
  Description of Artificial Sequence: Synthetic oligonucleotide
  Target: LAMA2; (+) strand; PAM type: NRG; PAM sequence: AGG
cctatacagaaaagtgtcag

SEQ ID NO: 151573 - DNA, 20 bp, Artificial Sequence
  Description of Artificial Sequence: Synthetic oligonucleotide
  Target: LAMA2; (+) strand; PAM type: NRG; PAM sequence: TGG
agaaaagtgtcagaggaaaa

SEQ ID NO: 151574 - DNA, 20 bp, Artificial Sequence
  Description of Artificial Sequence: Synthetic oligonucleotide
  Target: LAMA2; (+) strand; PAM type: NRG; PAM sequence: GGG
gaaaagtgtcagaggaaaat

SEQ ID NO: 151575 - DNA, 20 bp, Artificial Sequence
  Description of Artificial Sequence: Synthetic oligonucleotide
  Target: LAMA2; (+) strand; PAM type: NRG; PAM sequence: TGG
cagaggaaaatgggaccttc

SEQ ID NO: 151576 - DNA, 20 bp, Artificial Sequence
  Description of Artificial Sequence: Synthetic oligonucleotide
  Target: LAMA2; (+) strand; PAM type: NRG; PAM sequence: GGG
agaggaaaatgggaccttct

SEQ ID NO: 151577 - DNA, 20 bp, Artificial Sequence
  Description of Artificial Sequence: Synthetic oligonucleotide
  Target: LAMA2; (+) strand; PAM type: NRG; PAM sequence: CAG
gaccttctgggaatttcaca

SEQ ID NO: 151578 - DNA, 20 bp, Artificial Sequence
  Description of Artificial Sequence: Synthetic oligonucleotide
  Target: LAMA2; (+) strand; PAM type: NRG; PAM sequence: TGG
ggaatttcacacagcctgtg

SEQ ID NO: 151579 - DNA, 20 bp, Artificial Sequence
  Description of Artificial Sequence: Synthetic oligonucleotide
  Target: LAMA2; (+) strand; PAM type: NRG; PAM sequence: TGG
tttcacacagcctgtgtggc

SEQ ID NO: 151580 - DNA, 20 bp, Artificial Sequence
  Description of Artificial Sequence: Synthetic oligonucleotide
  Target: LAMA2; (+) strand; PAM type: NRG; PAM sequence: AAG
cagcctgtgtggctggactt

SEQ ID NO: 151581 - DNA, 20 bp, Artificial Sequence
  Description of Artificial Sequence: Synthetic oligonucleotide
  Target: LAMA2; (+) strand; PAM type: NRG; PAM sequence: GAG
gcctgtgtggctggacttaa

SEQ ID NO: 151582 - DNA, 20 bp, Artificial Sequence
  Description of Artificial Sequence: Synthetic oligonucleotide
  Target: LAMA2; (+) strand; PAM type: NRG; PAM sequence: CAG
tgtggctggacttaagagtg

SEQ ID NO: 151583 - DNA, 20 bp, Artificial Sequence
  Description of Artificial Sequence: Synthetic oligonucleotide
  Target: LAMA2; (+) strand; PAM type: NRG; PAM sequence: TGG
ctggacttaagagtgcagaa

SEQ ID NO: 151584 - DNA, 20 bp, Artificial Sequence
  Description of Artificial Sequence: Synthetic oligonucleotide
  Target: LAMA2; (+) strand; PAM type: NRG; PAM sequence: TAG
gacttaagagtgcagaatgg

SEQ ID NO: 151585 - DNA, 20 bp, Artificial Sequence
  Description of Artificial Sequence: Synthetic oligonucleotide
  Target: LAMA2; (+) strand; PAM type: NRG; PAM sequence: AGG
acttaagagtgcagaatggt

SEQ ID NO: 151586 - DNA, 20 bp, Artificial Sequence
  Description of Artificial Sequence: Synthetic oligonucleotide
  Target: LAMA2; (+) strand; PAM type: NRG; PAM sequence: TGG
gagtgcagaatggtaggaaa

SEQ ID NO: 151587 - DNA, 20 bp, Artificial Sequence
  Description of Artificial Sequence: Synthetic oligonucleotide
  Target: LAMA2; (+) strand; PAM type: NRG; PAM sequence: GGG
agtgcagaatggtaggaaat

SEQ ID NO: 151588 - DNA, 20 bp, Artificial Sequence
  Description of Artificial Sequence: Synthetic oligonucleotide
  Target: LAMA2; (+) strand; PAM type: NRG; PAM sequence: TGG
cagaatggtaggaaatgggc

SEQ ID NO: 151589 - DNA, 20 bp, Artificial Sequence
  Description of Artificial Sequence: Synthetic oligonucleotide
  Target: LAMA2; (+) strand; PAM type: NRG; PAM sequence: GAG
gaatggtaggaaatgggctg

SEQ ID NO: 151590 - DNA, 20 bp, Artificial Sequence
  Description of Artificial Sequence: Synthetic oligonucleotide
  Target: LAMA2; (+) strand; PAM type: NRG; PAM sequence: GAG
atggtaggaaatgggctgga

SEQ ID NO: 151591 - DNA, 20 bp, Artificial Sequence
  Description of Artificial Sequence: Synthetic oligonucleotide
  Target: LAMA2; (+) strand; PAM type: NRG; PAM sequence: GAG
ggtaggaaatgggctggaga

SEQ ID NO: 151592 - DNA, 20 bp, Artificial Sequence
  Description of Artificial Sequence: Synthetic oligonucleotide
  Target: LAMA2; (+) strand; PAM type: NRG; PAM sequence: AAG
ggaaatgggctggagagaga

SEQ ID NO: 151593 - DNA, 20 bp, Artificial Sequence
  Description of Artificial Sequence: Synthetic oligonucleotide
  Target: LAMA2; (+) strand; PAM type: NRG; PAM sequence: AAG
aatgggctggagagagaaag

SEQ ID NO: 151594 - DNA, 20 bp, Artificial Sequence
  Description of Artificial Sequence: Synthetic oligonucleotide
  Target: LAMA2; (+) strand; PAM type: NRG; PAM sequence: TAG
gctggagagagaaagaagtc

SEQ ID NO: 151595 - DNA, 20 bp, Artificial Sequence
  Description of Artificial Sequence: Synthetic oligonucleotide
  Target: LAMA2; (+) strand; PAM type: NRG; PAM sequence: CGG
gagagagaaagaagtctaga

SEQ ID NO: 151596 - DNA, 20 bp, Artificial Sequence
  Description of Artificial Sequence: Synthetic oligonucleotide
  Target: LAMA2; (+) strand; PAM type: NRG; PAM sequence: GGG
agagagaaagaagtctagac

SEQ ID NO: 151597 - DNA, 20 bp, Artificial Sequence
  Description of Artificial Sequence: Synthetic oligonucleotide
  Target: LAMA2; (+) strand; PAM type: NRG; PAM sequence: GGG
gagagaaagaagtctagacg

SEQ ID NO: 151598 - DNA, 20 bp, Artificial Sequence
  Description of Artificial Sequence: Synthetic oligonucleotide
  Target: LAMA2; (+) strand; PAM type: NRG; PAM sequence: GGG
agagaaagaagtctagacgg

SEQ ID NO: 151599 - DNA, 20 bp, Artificial Sequence
  Description of Artificial Sequence: Synthetic oligonucleotide
  Target: LAMA2; (+) strand; PAM type: NRG; PAM sequence: GAG
agaagtctagacgggggaat

SEQ ID NO: 151600 - DNA, 20 bp, Artificial Sequence
  Description of Artificial Sequence: Synthetic oligonucleotide
  Target: LAMA2; (+) strand; PAM type: NRG; PAM sequence: TAG
tagacgggggaatgagaatc

SEQ ID NO: 151601 - DNA, 20 bp, Artificial Sequence
  Description of Artificial Sequence: Synthetic oligonucleotide
  Target: LAMA2; (+) strand; PAM type: NRG; PAM sequence: TAG
gaatgagaatctagaactta

SEQ ID NO: 151602 - DNA, 20 bp, Artificial Sequence
  Description of Artificial Sequence: Synthetic oligonucleotide
  Target: LAMA2; (+) strand; PAM type: NRG; PAM sequence: AGG
aatgagaatctagaacttat

SEQ ID NO: 151603 - DNA, 20 bp, Artificial Sequence
  Description of Artificial Sequence: Synthetic oligonucleotide
  Target: LAMA2; (+) strand; PAM type: NRG; PAM sequence: GGG
atgagaatctagaacttata

SEQ ID NO: 151604 - DNA, 20 bp, Artificial Sequence
  Description of Artificial Sequence: Synthetic oligonucleotide
  Target: LAMA2; (+) strand; PAM type: NRG; PAM sequence: AAG
cttatagggttgaatatact

SEQ ID NO: 151605 - DNA, 20 bp, Artificial Sequence
  Description of Artificial Sequence: Synthetic oligonucleotide
  Target: LAMA2; (+) strand; PAM type: NRG; PAM sequence: GAG
gttgaatatactaagaattt

SEQ ID NO: 151606 - DNA, 20 bp, Artificial Sequence
  Description of Artificial Sequence: Synthetic oligonucleotide
  Target: LAMA2; (+) strand; PAM type: NRG; PAM sequence: TGG
agaatttgagatattttact

SEQ ID NO: 151607 - DNA, 20 bp, Artificial Sequence
  Description of Artificial Sequence: Synthetic oligonucleotide
  Target: LAMA2; (+) strand; PAM type: NRG; PAM sequence: GAG
aatttgagatattttacttg

SEQ ID NO: 151608 - DNA, 20 bp, Artificial Sequence
  Description of Artificial Sequence: Synthetic oligonucleotide
  Target: LAMA2; (+) strand; PAM type: NRG; PAM sequence: AAG
ttttacttggagtgtcattg

SEQ ID NO: 151609 - DNA, 20 bp, Artificial Sequence
  Description of Artificial Sequence: Synthetic oligonucleotide
  Target: LAMA2; (+) strand; PAM type: NRG; PAM sequence: AAG
gagtgtcattgaagaaattt

SEQ ID NO: 151610 - DNA, 20 bp, Artificial Sequence
  Description of Artificial Sequence: Synthetic oligonucleotide
  Target: LAMA2; (+) strand; PAM type: NRG; PAM sequence: AAG
cattgaagaaatttaagcta

SEQ ID NO: 151611 - DNA, 20 bp, Artificial Sequence
  Description of Artificial Sequence: Synthetic oligonucleotide
  Target: LAMA2; (+) strand; PAM type: NRG; PAM sequence: CAG
aagctaaagactgacattat

SEQ ID NO: 151612 - DNA, 20 bp, Artificial Sequence
  Description of Artificial Sequence: Synthetic oligonucleotide
  Target: LAMA2; (+) strand; PAM type: NRG; PAM sequence: GAG
gctaaagactgacattatca

SEQ ID NO: 151613 - DNA, 20 bp, Artificial Sequence
  Description of Artificial Sequence: Synthetic oligonucleotide
  Target: LAMA2; (+) strand; PAM type: NRG; PAM sequence: AAG
tatcagagttgtgttttata

SEQ ID NO: 151614 - DNA, 20 bp, Artificial Sequence
  Description of Artificial Sequence: Synthetic oligonucleotide
  Target: LAMA2; (+) strand; PAM type: NRG; PAM sequence: TAG
gttttataaagactactatt

SEQ ID NO: 151615 - DNA, 20 bp, Artificial Sequence
  Description of Artificial Sequence: Synthetic oligonucleotide
  Target: LAMA2; (+) strand; PAM type: NRG; PAM sequence: CAG
ttcttcctttcaactttaat

SEQ ID NO: 151616 - DNA, 20 bp, Artificial Sequence
  Description of Artificial Sequence: Synthetic oligonucleotide
  Target: LAMA2; (+) strand; PAM type: NRG; PAM sequence: CAG
atcagtgaactaatcctgaa

SEQ ID NO: 151617 - DNA, 20 bp, Artificial Sequence
  Description of Artificial Sequence: Synthetic oligonucleotide
  Target: LAMA2; (+) strand; PAM type: NRG; PAM sequence: GAG
cagtgaactaatcctgaaca

SEQ ID NO: 151618 - DNA, 20 bp, Artificial Sequence
  Description of Artificial Sequence: Synthetic oligonucleotide
  Target: LAMA2; (+) strand; PAM type: NRG; PAM sequence: CAG
taaaatattttctctgcctg

SEQ ID NO: 151619 - DNA, 20 bp, Artificial Sequence
  Description of Artificial Sequence: Synthetic oligonucleotide
  Target: LAMA2; (+) strand; PAM type: NRG; PAM sequence: AAG
tctctgcctgcagtgctttt

SEQ ID NO: 151620 - DNA, 20 bp, Artificial Sequence
  Description of Artificial Sequence: Synthetic oligonucleotide
  Target: LAMA2; (+) strand; PAM type: NRG; PAM sequence: AAG
gcctgcagtgcttttaagtc

SEQ ID NO: 151621 - DNA, 20 bp, Artificial Sequence
  Description of Artificial Sequence: Synthetic oligonucleotide
  Target: LAMA2; (+) strand; PAM type: NRG; PAM sequence: CAG
gttatcaactgtattgcttt

SEQ ID NO: 151622 - DNA, 20 bp, Artificial Sequence
  Description of Artificial Sequence: Synthetic oligonucleotide
  Target: LAMA2; (+) strand; PAM type: NRG; PAM sequence: GAG
tatcaactgtattgctttca

SEQ ID NO: 151623 - DNA, 20 bp, Artificial Sequence
  Description of Artificial Sequence: Synthetic oligonucleotide
  Target: LAMA2; (+) strand; PAM type: NRG; PAM sequence: CAG
caactgtattgctttcagag

SEQ ID NO: 151624 - DNA, 20 bp, Artificial Sequence
  Description of Artificial Sequence: Synthetic oligonucleotide
  Target: LAMA2; (+) strand; PAM type: NRG; PAM sequence: AAG
tgctttcagagcagacttca

SEQ ID NO: 151625 - DNA, 20 bp, Artificial Sequence
  Description of Artificial Sequence: Synthetic oligonucleotide
  Target: LAMA2; (+) strand; PAM type: NRG; PAM sequence: CAG
agacttcaaagaatcaacca

SEQ ID NO: 151626 - DNA, 20 bp, Artificial Sequence
  Description of Artificial Sequence: Synthetic oligonucleotide
  Target: LAMA2; (+) strand; PAM type: NRG; PAM sequence: TGG
ttcaaagaatcaaccacaga

SEQ ID NO: 151627 - DNA, 20 bp, Artificial Sequence
  Description of Artificial Sequence: Synthetic oligonucleotide
  Target: LAMA2; (+) strand; PAM type: NRG; PAM sequence: TAG
atcaaccacagatggacatc

SEQ ID NO: 151628 - DNA, 20 bp, Artificial Sequence
  Description of Artificial Sequence: Synthetic oligonucleotide
  Target: LAMA2; (+) strand; PAM type: NRG; PAM sequence: AAG
aacttcctcttttgtttata

SEQ ID NO: 151629 - DNA, 20 bp, Artificial Sequence
  Description of Artificial Sequence: Synthetic oligonucleotide
  Target: LAMA2; (+) strand; PAM type: NRG; PAM sequence: CAG
taaagtcccaccccaccctc

SEQ ID NO: 151630 - DNA, 20 bp, Artificial Sequence
  Description of Artificial Sequence: Synthetic oligonucleotide
  Target: LAMA2; (+) strand; PAM type: NRG; PAM sequence: TAG
cctccagactgccccactga

SEQ ID NO: 151631 - DNA, 20 bp, Artificial Sequence
  Description of Artificial Sequence: Synthetic oligonucleotide
  Target: LAMA2; (+) strand; PAM type: NRG; PAM sequence: AAG
actgccccactgatagatca

SEQ ID NO: 151632 - DNA, 20 bp, Artificial Sequence
  Description of Artificial Sequence: Synthetic oligonucleotide
  Target: LAMA2; (+) strand; PAM type: NRG; PAM sequence: TAG
actgatagatcaaagtttca

SEQ ID NO: 151633 - DNA, 20 bp, Artificial Sequence
  Description of Artificial Sequence: Synthetic oligonucleotide
  Target: LAMA2; (+) strand; PAM type: NRG; PAM sequence: CAG
atagatcaaagtttcatagc

SEQ ID NO: 151634 - DNA, 20 bp, Artificial Sequence
  Description of Artificial Sequence: Synthetic oligonucleotide
  Target: LAMA2; (+) strand; PAM type: NRG; PAM sequence: AAG
tcaaagtttcatagccagcc

SEQ ID NO: 151635 - DNA, 20 bp, Artificial Sequence
  Description of Artificial Sequence: Synthetic oligonucleotide
  Target: LAMA2; (+) strand; PAM type: NRG; PAM sequence: AGG
caaagtttcatagccagcca

SEQ ID NO: 151636 - DNA, 20 bp, Artificial Sequence
  Description of Artificial Sequence: Synthetic oligonucleotide
  Target: LAMA2; (+) strand; PAM type: NRG; PAM sequence: GGG
aaagtttcatagccagccaa

SEQ ID NO: 151637 - DNA, 20 bp, Artificial Sequence
  Description of Artificial Sequence: Synthetic oligonucleotide
  Target: LAMA2; (+) strand; PAM type: NRG; PAM sequence: GGG
aagtttcatagccagccaag

SEQ ID NO: 151638 - DNA, 20 bp, Artificial Sequence
  Description of Artificial Sequence: Synthetic oligonucleotide
  Target: LAMA2; (+) strand; PAM type: NRG; PAM sequence: CAG
tttcatagccagccaagggg

SEQ ID NO: 151639 - DNA, 20 bp, Artificial Sequence
  Description of Artificial Sequence: Synthetic oligonucleotide
  Target: LAMA2; (+) strand; PAM type: NRG; PAM sequence: GAG
tcatagccagccaaggggca

SEQ ID NO: 151640 - DNA, 20 bp, Artificial Sequence
  Description of Artificial Sequence: Synthetic oligonucleotide
  Target: LAMA2; (+) strand; PAM type: NRG; PAM sequence: TGG
agccagccaaggggcagagc

SEQ ID NO: 151641 - DNA, 20 bp, Artificial Sequence
  Description of Artificial Sequence: Synthetic oligonucleotide
  Target: LAMA2; (+) strand; PAM type: NRG; PAM sequence: AAG
aaggggcagagctggtactc

SEQ ID NO: 151642 - DNA, 20 bp, Artificial Sequence
  Description of Artificial Sequence: Synthetic oligonucleotide
  Target: LAMA2; (+) strand; PAM type: NRG; PAM sequence: CAG
ggtactcaagctttgatcat

SEQ ID NO: 151643 - DNA, 20 bp, Artificial Sequence
  Description of Artificial Sequence: Synthetic oligonucleotide
  Target: LAMA2; (+) strand; PAM type: NRG; PAM sequence: TAG
aagctttgatcatcagatgc

SEQ ID NO: 151644 - DNA, 20 bp, Artificial Sequence
  Description of Artificial Sequence: Synthetic oligonucleotide
  Target: LAMA2; (+) strand; PAM type: NRG; PAM sequence: GAG
gctttgatcatcagatgcta

SEQ ID NO: 151645 - DNA, 20 bp, Artificial Sequence
  Description of Artificial Sequence: Synthetic oligonucleotide
  Target: LAMA2; (+) strand; PAM type: NRG; PAM sequence: CAG
atcatcagatgctagagaca

SEQ ID NO: 151646 - DNA, 20 bp, Artificial Sequence
  Description of Artificial Sequence: Synthetic oligonucleotide
  Target: LAMA2; (+) strand; PAM type: NRG; PAM sequence: AAG
caactgtcttacaatgcctc

SEQ ID NO: 151647 - DNA, 20 bp, Artificial Sequence
  Description of Artificial Sequence: Synthetic oligonucleotide
  Target: LAMA2; (+) strand; PAM type: NRG; PAM sequence: AGG
aactgtcttacaatgcctca

SEQ ID NO: 151648 - DNA, 20 bp, Artificial Sequence
  Description of Artificial Sequence: Synthetic oligonucleotide
  Target: LAMA2; (+) strand; PAM type: NRG; PAM sequence: GGG
actgtcttacaatgcctcaa

SEQ ID NO: 151649 - DNA, 20 bp, Artificial Sequence
  Description of Artificial Sequence: Synthetic oligonucleotide
  Target: LAMA2; (+) strand; PAM type: NRG; PAM sequence: TAG
caatgcctcaagggtgacgt

SEQ ID NO: 151650 - DNA, 20 bp, Artificial Sequence
  Description of Artificial Sequence: Synthetic oligonucleotide
  Target: LAMA2; (+) strand; PAM type: NRG; PAM sequence: AAG
gcctcaagggtgacgttaga

SEQ ID NO: 151651 - DNA, 20 bp, Artificial Sequence
  Description of Artificial Sequence: Synthetic oligonucleotide
  Target: LAMA2; (+) strand; PAM type: NRG; PAM sequence: AGG
cctcaagggtgacgttagaa

SEQ ID NO: 151652 - DNA, 20 bp, Artificial Sequence
  Description of Artificial Sequence: Synthetic oligonucleotide
  Target: LAMA2; (+) strand; PAM type: NRG; PAM sequence: GGG
ctcaagggtgacgttagaaa

SEQ ID NO: 151653 - DNA, 20 bp, Artificial Sequence
  Description of Artificial Sequence: Synthetic oligonucleotide
  Target: LAMA2; (+) strand; PAM type: NRG; PAM sequence: AAG
aagggtgacgttagaaaggg

SEQ ID NO: 151654 - DNA, 20 bp, Artificial Sequence
  Description of Artificial Sequence: Synthetic oligonucleotide
  Target: LAMA2; (+) strand; PAM type: NRG; PAM sequence: AAG
gttagaaagggaagaaatgc

SEQ ID NO: 151655 - DNA, 20 bp, Artificial Sequence
  Description of Artificial Sequence: Synthetic oligonucleotide
  Target: LAMA2; (+) strand; PAM type: NRG; PAM sequence: AGG
ttagaaagggaagaaatgca

SEQ ID NO: 151656 - DNA, 20 bp, Artificial Sequence
  Description of Artificial Sequence: Synthetic oligonucleotide
  Target: LAMA2; (+) strand; PAM type: NRG; PAM sequence: CAG
ggaatatattacttgttgtc

SEQ ID NO: 151657 - DNA, 20 bp, Artificial Sequence
  Description of Artificial Sequence: Synthetic oligonucleotide
  Target: LAMA2; (+) strand; PAM type: NRG; PAM sequence: AAG
tatattacttgttgtccaga

SEQ ID NO: 151658 - DNA, 20 bp, Artificial Sequence
  Description of Artificial Sequence: Synthetic oligonucleotide
  Target: LAMA2; (+) strand; PAM type: NRG; PAM sequence: CAG
cttgttgtccagaaagtcaa

SEQ ID NO: 151659 - DNA, 20 bp, Artificial Sequence
  Description of Artificial Sequence: Synthetic oligonucleotide
  Target: LAMA2; (+) strand; PAM type: NRG; PAM sequence: AGG
ttgttgtccagaaagtcaac

SEQ ID NO: 151660 - DNA, 20 bp, Artificial Sequence
  Description of Artificial Sequence: Synthetic oligonucleotide
  Target: LAMA2; (+) strand; PAM type: NRG; PAM sequence: TGG
gaaagtcaacaggttgtacc

SEQ ID NO: 151661 - DNA, 20 bp, Artificial Sequence
  Description of Artificial Sequence: Synthetic oligonucleotide
  Target: LAMA2; (+) strand; PAM type: NRG; PAM sequence: AAG
tttctatttctcatttaact

SEQ ID NO: 151662 - DNA, 20 bp, Artificial Sequence
  Description of Artificial Sequence: Synthetic oligonucleotide
  Target: LAMA2; (+) strand; PAM type: NRG; PAM sequence: AGG
ttctatttctcatttaacta

SEQ ID NO: 151663 - DNA, 20 bp, Artificial Sequence
  Description of Artificial Sequence: Synthetic oligonucleotide
  Target: LAMA2; (+) strand; PAM type: NRG; PAM sequence: GGG
tctatttctcatttaactaa

SEQ ID NO: 151664 - DNA, 20 bp, Artificial Sequence
  Description of Artificial Sequence: Synthetic oligonucleotide
  Target: LAMA2; (+) strand; PAM type: NRG; PAM sequence: CAG
tcatttaactaagggaattg

SEQ ID NO: 151665 - DNA, 20 bp, Artificial Sequence
  Description of Artificial Sequence: Synthetic oligonucleotide
  Target: LAMA2; (+) strand; PAM type: NRG; PAM sequence: CAG
agggaattgcagtgattcca

SEQ ID NO: 151666 - DNA, 20 bp, Artificial Sequence
  Description of Artificial Sequence: Synthetic oligonucleotide
  Target: LAMA2; (+) strand; PAM type: NRG; PAM sequence: TGG
ttgcagtgattccacagctt

SEQ ID NO: 151667 - DNA, 20 bp, Artificial Sequence
  Description of Artificial Sequence: Synthetic oligonucleotide
  Target: LAMA2; (+) strand; PAM type: NRG; PAM sequence: GGG
tgcagtgattccacagcttt

SEQ ID NO: 151668 - DNA, 20 bp, Artificial Sequence
  Description of Artificial Sequence: Synthetic oligonucleotide
  Target: LAMA2; (+) strand; PAM type: NRG; PAM sequence: AAG
tgattccacagctttgggat

SEQ ID NO: 151669 - DNA, 20 bp, Artificial Sequence
  Description of Artificial Sequence: Synthetic oligonucleotide
  Target: LAMA2; (+) strand; PAM type: NRG; PAM sequence: CAG
ttccacagctttgggataag

SEQ ID NO: 151670 - DNA, 20 bp, Artificial Sequence
  Description of Artificial Sequence: Synthetic oligonucleotide
  Target: LAMA2; (+) strand; PAM type: NRG; PAM sequence: GAG
ccacagctttgggataagca

SEQ ID NO: 151671 - DNA, 20 bp, Artificial Sequence
  Description of Artificial Sequence: Synthetic oligonucleotide
  Target: LAMA2; (+) strand; PAM type: NRG; PAM sequence: TAG
ttgggataagcagagtcaaa

SEQ ID NO: 151672 - DNA, 20 bp, Artificial Sequence
  Description of Artificial Sequence: Synthetic oligonucleotide
  Target: LAMA2; (+) strand; PAM type: NRG; PAM sequence: AAG
gcagagtcaaatagtctatg

SEQ ID NO: 151673 - DNA, 20 bp, Artificial Sequence
  Description of Artificial Sequence: Synthetic oligonucleotide
  Target: LAMA2; (+) strand; PAM type: NRG; PAM sequence: CAG
agaaattttaaaaaatattt

SEQ ID NO: 151674 - DNA, 20 bp, Artificial Sequence
  Description of Artificial Sequence: Synthetic oligonucleotide
  Target: LAMA2; (+) strand; PAM type: NRG; PAM sequence: TAG
taaaaaatatttcagccaca

SEQ ID NO: 151675 - DNA, 20 bp, Artificial Sequence
  Description of Artificial Sequence: Synthetic oligonucleotide
  Target: LAMA2; (+) strand; PAM type: NRG; PAM sequence: GAG
aaaaatatttcagccacata

SEQ ID NO: 151676 - DNA, 20 bp, Artificial Sequence
  Description of Artificial Sequence: Synthetic oligonucleotide
  Target: LAMA2; (+) strand; PAM type: NRG; PAM sequence: TAG
cagccacatagagtcaccct

SEQ ID NO: 151677 - DNA, 20 bp, Artificial Sequence
  Description of Artificial Sequence: Synthetic oligonucleotide
  Target: LAMA2; (+) strand; PAM type: NRG; PAM sequence: AAG
ttcccatcacccacaacatg

SEQ ID NO: 151678 - DNA, 20 bp, Artificial Sequence
  Description of Artificial Sequence: Synthetic oligonucleotide
  Target: LAMA2; (+) strand; PAM type: NRG; PAM sequence: CAG
ccatcacccacaacatgaag

SEQ ID NO: 151679 - DNA, 20 bp, Artificial Sequence
  Description of Artificial Sequence: Synthetic oligonucleotide
  Target: LAMA2; (+) strand; PAM type: NRG; PAM sequence: TAG
tgaagcagctcatgcatgtc

SEQ ID NO: 151680 - DNA, 20 bp, Artificial Sequence
  Description of Artificial Sequence: Synthetic oligonucleotide
  Target: LAMA2; (+) strand; PAM type: NRG; PAM sequence: TAG
agcagctcatgcatgtctag

SEQ ID NO: 151681 - DNA, 20 bp, Artificial Sequence
  Description of Artificial Sequence: Synthetic oligonucleotide
  Target: LAMA2; (+) strand; PAM type: NRG; PAM sequence: AGG
gcagctcatgcatgtctagt

SEQ ID NO: 151682 - DNA, 20 bp, Artificial Sequence
  Description of Artificial Sequence: Synthetic oligonucleotide
  Target: LAMA2; (+) strand; PAM type: NRG; PAM sequence: TGG
atgcatgtctagtaggttcc

SEQ ID NO: 151683 - DNA, 20 bp, Artificial Sequence
  Description of Artificial Sequence: Synthetic oligonucleotide
  Target: LAMA2; (+) strand; PAM type: NRG; PAM sequence: TAG
catgtctagtaggttcctgg

SEQ ID NO: 151684 - DNA, 20 bp, Artificial Sequence
  Description of Artificial Sequence: Synthetic oligonucleotide
  Target: LAMA2; (+) strand; PAM type: NRG; PAM sequence: TGG
tctagtaggttcctggtagc

SEQ ID NO: 151685 - DNA, 20 bp, Artificial Sequence
  Description of Artificial Sequence: Synthetic oligonucleotide
  Target: LAMA2; (+) strand; PAM type: NRG; PAM sequence: AAG
ttcctggtagctggtaccct

SEQ ID NO: 151686 - DNA, 20 bp, Artificial Sequence
  Description of Artificial Sequence: Synthetic oligonucleotide
  Target: LAMA2; (+) strand; PAM type: NRG; PAM sequence: CAG
tagctggtaccctaagccct

SEQ ID NO: 151687 - DNA, 20 bp, Artificial Sequence
  Description of Artificial Sequence: Synthetic oligonucleotide
  Target: LAMA2; (+) strand; PAM type: NRG; PAM sequence: CAG
taccctaagccctcagtaat

SEQ ID NO: 151688 - DNA, 20 bp, Artificial Sequence
  Description of Artificial Sequence: Synthetic oligonucleotide
  Target: LAMA2; (+) strand; PAM type: NRG; PAM sequence: TAG
aatcagtgttttgtcctgac

SEQ ID NO: 151689 - DNA, 20 bp, Artificial Sequence
  Description of Artificial Sequence: Synthetic oligonucleotide
  Target: LAMA2; (+) strand; PAM type: NRG; PAM sequence: AGG
atcagtgttttgtcctgact

SEQ ID NO: 151690 - DNA, 20 bp, Artificial Sequence
  Description of Artificial Sequence: Synthetic oligonucleotide
  Target: LAMA2; (+) strand; PAM type: NRG; PAM sequence: TAG
agtgttttgtcctgactagg

SEQ ID NO: 151691 - DNA, 20 bp, Artificial Sequence
  Description of Artificial Sequence: Synthetic oligonucleotide
  Target: LAMA2; (+) strand; PAM type: NRG; PAM sequence: AGG
gtgttttgtcctgactaggt

SEQ ID NO: 151692 - DNA, 20 bp, Artificial Sequence
  Description of Artificial Sequence: Synthetic oligonucleotide
  Target: LAMA2; (+) strand; PAM type: NRG; PAM sequence: TAG
ctaggtaggatgctttaaat

SEQ ID NO: 151693 - DNA, 20 bp, Artificial Sequence
  Description of Artificial Sequence: Synthetic oligonucleotide
  Target: LAMA2; (+) strand; PAM type: NRG; PAM sequence: GAG
aggtaggatgctttaaatta

SEQ ID NO: 151694 - DNA, 20 bp, Artificial Sequence
  Description of Artificial Sequence: Synthetic oligonucleotide
  Target: LAMA2; (+) strand; PAM type: NRG; PAM sequence: AGG
ggtaggatgctttaaattag

SEQ ID NO: 151695 - DNA, 20 bp, Artificial Sequence
  Description of Artificial Sequence: Synthetic oligonucleotide
  Target: LAMA2; (+) strand; PAM type: NRG; PAM sequence: TAG
gatgctttaaattagaggtg

SEQ ID NO: 151696 - DNA, 20 bp, Artificial Sequence
  Description of Artificial Sequence: Synthetic oligonucleotide
  Target: LAMA2; (+) strand; PAM type: NRG; PAM sequence: TAG
ttaaattagaggtgtagctg

SEQ ID NO: 151697 - DNA, 20 bp, Artificial Sequence
  Description of Artificial Sequence: Synthetic oligonucleotide
  Target: LAMA2; (+) strand; PAM type: NRG; PAM sequence: AGG
taaattagaggtgtagctgt

SEQ ID NO: 151698 - DNA, 20 bp, Artificial Sequence
  Description of Artificial Sequence: Synthetic oligonucleotide
  Target: LAMA2; (+) strand; PAM type: NRG; PAM sequence: TGG
tgtagctgtaggcctgacct

SEQ ID NO: 151699 - DNA, 20 bp, Artificial Sequence
  Description of Artificial Sequence: Synthetic oligonucleotide
  Target: LAMA2; (+) strand; PAM type: NRG; PAM sequence: AAG
tgtaggcctgaccttggctg

SEQ ID NO: 151700 - DNA, 20 bp, Artificial Sequence
  Description of Artificial Sequence: Synthetic oligonucleotide
  Target: LAMA2; (+) strand; PAM type: NRG; PAM sequence: AAG
ctgaccttggctgaagcata

SEQ ID NO: 151701 - DNA, 20 bp, Artificial Sequence
  Description of Artificial Sequence: Synthetic oligonucleotide
  Target: LAMA2; (+) strand; PAM type: NRG; PAM sequence: CAG
aacaaatcattatgcattcc

SEQ ID NO: 151702 - DNA, 20 bp, Artificial Sequence
  Description of Artificial Sequence: Synthetic oligonucleotide
  Target: LAMA2; (+) strand; PAM type: NRG; PAM sequence: AAG
cattcccagattcctccttt

SEQ ID NO: 151703 - DNA, 20 bp, Artificial Sequence
  Description of Artificial Sequence: Synthetic oligonucleotide
  Target: LAMA2; (+) strand; PAM type: NRG; PAM sequence: AGG
attcccagattcctccttta

SEQ ID NO: 151704 - DNA, 20 bp, Artificial Sequence
  Description of Artificial Sequence: Synthetic oligonucleotide
  Target: LAMA2; (+) strand; PAM type: NRG; PAM sequence: TGG
tttaaggttccttccatttc

SEQ ID NO: 151705 - DNA, 20 bp, Artificial Sequence
  Description of Artificial Sequence: Synthetic oligonucleotide
  Target: LAMA2; (+) strand; PAM type: NRG; PAM sequence: GGG
ttaaggttccttccatttct

SEQ ID NO: 151706 - DNA, 20 bp, Artificial Sequence
  Description of Artificial Sequence: Synthetic oligonucleotide
  Target: LAMA2; (+) strand; PAM type: NRG; PAM sequence: CAG
ggttccttccatttctgggc

SEQ ID NO: 151707 - DNA, 20 bp, Artificial Sequence
  Description of Artificial Sequence: Synthetic oligonucleotide
  Target: LAMA2; (+) strand; PAM type: NRG; PAM sequence: AGG
gttccttccatttctgggcc

SEQ ID NO: 151708 - DNA, 20 bp, Artificial Sequence
  Description of Artificial Sequence: Synthetic oligonucleotide
  Target: LAMA2; (+) strand; PAM type: NRG; PAM sequence: GGG
ttccttccatttctgggcca

SEQ ID NO: 151709 - DNA, 20 bp, Artificial Sequence
  Description of Artificial Sequence: Synthetic oligonucleotide
  Target: LAMA2; (+) strand; PAM type: NRG; PAM sequence: TAG
ccatttctgggccagggatc

SEQ ID NO: 151710 - DNA, 20 bp, Artificial Sequence
  Description of Artificial Sequence: Synthetic oligonucleotide
  Target: LAMA2; (+) strand; PAM type: NRG; PAM sequence: AGG
catttctgggccagggatct

SEQ ID NO: 151711 - DNA, 20 bp, Artificial Sequence
  Description of Artificial Sequence: Synthetic oligonucleotide
  Target: LAMA2; (+) strand; PAM type: NRG; PAM sequence: TAG
tgggccagggatctaggctg

SEQ ID NO: 151712 - DNA, 20 bp, Artificial Sequence
  Description of Artificial Sequence: Synthetic oligonucleotide
  Target: LAMA2; (+) strand; PAM type: NRG; PAM sequence: AGG
gggccagggatctaggctgt

SEQ ID NO: 151713 - DNA, 20 bp, Artificial Sequence
  Description of Artificial Sequence: Synthetic oligonucleotide
  Target: LAMA2; (+) strand; PAM type: NRG; PAM sequence: CAG
atctaggctgtaggtcccca

SEQ ID NO: 151714 - DNA, 20 bp, Artificial Sequence
  Description of Artificial Sequence: Synthetic oligonucleotide
  Target: LAMA2; (+) strand; PAM type: NRG; PAM sequence: AAG
agcacttctgaccctatctg

SEQ ID NO: 151715 - DNA, 20 bp, Artificial Sequence
  Description of Artificial Sequence: Synthetic oligonucleotide
  Target: LAMA2; (+) strand; PAM type: NRG; PAM sequence: AGG
gcacttctgaccctatctga

SEQ ID NO: 151716 - DNA, 20 bp, Artificial Sequence
  Description of Artificial Sequence: Synthetic oligonucleotide
  Target: LAMA2; (+) strand; PAM type: NRG; PAM sequence: CAG
cctatctgaaggaatacata

SEQ ID NO: 151717 - DNA, 20 bp, Artificial Sequence
  Description of Artificial Sequence: Synthetic oligonucleotide
  Target: LAMA2; (+) strand; PAM type: NRG; PAM sequence: CAG
aggaatacatacagtattgc

SEQ ID NO: 151718 - DNA, 20 bp, Artificial Sequence
  Description of Artificial Sequence: Synthetic oligonucleotide
  Target: LAMA2; (+) strand; PAM type: NRG; PAM sequence: AGG
ggaatacatacagtattgcc

SEQ ID NO: 151719 - DNA, 20 bp, Artificial Sequence
  Description of Artificial Sequence: Synthetic oligonucleotide
  Target: LAMA2; (+) strand; PAM type: NRG; PAM sequence: TAG
agtattgccaggtgttgtca

SEQ ID NO: 151720 - DNA, 20 bp, Artificial Sequence
  Description of Artificial Sequence: Synthetic oligonucleotide
  Target: LAMA2; (+) strand; PAM type: NRG; PAM sequence: AAG
ccaggtgttgtcatagcacc

SEQ ID NO: 151721 - DNA, 20 bp, Artificial Sequence
  Description of Artificial Sequence: Synthetic oligonucleotide
  Target: LAMA2; (+) strand; PAM type: NRG; PAM sequence: AGG
caggtgttgtcatagcacca

SEQ ID NO: 151722 - DNA, 20 bp, Artificial Sequence
  Description of Artificial Sequence: Synthetic oligonucleotide
  Target: LAMA2; (+) strand; PAM type: NRG; PAM sequence: TGG
tgttgtcatagcaccaaggc

SEQ ID NO: 151723 - DNA, 20 bp, Artificial Sequence
  Description of Artificial Sequence: Synthetic oligonucleotide
  Target: LAMA2; (+) strand; PAM type: NRG; PAM sequence: TGG
tgtcatagcaccaaggctgg

SEQ ID NO: 151724 - DNA, 20 bp, Artificial Sequence
  Description of Artificial Sequence: Synthetic oligonucleotide
  Target: LAMA2; (+) strand; PAM type: NRG; PAM sequence: GGG
gtcatagcaccaaggctggt

SEQ ID NO: 151725 - DNA, 20 bp, Artificial Sequence
  Description of Artificial Sequence: Synthetic oligonucleotide
  Target: LAMA2; (+) strand; PAM type: NRG; PAM sequence: AAG
tggtgggttcaaatatcctt

SEQ ID NO: 151726 - DNA, 20 bp, Artificial Sequence
  Description of Artificial Sequence: Synthetic oligonucleotide
  Target: LAMA2; (+) strand; PAM type: NRG; PAM sequence: AAG
tcaaatatccttaagcctca

SEQ ID NO: 151727 - DNA, 20 bp, Artificial Sequence
  Description of Artificial Sequence: Synthetic oligonucleotide
  Target: LAMA2; (+) strand; PAM type: NRG; PAM sequence: TAG
aatatccttaagcctcaaag

SEQ ID NO: 151728 - DNA, 20 bp, Artificial Sequence
  Description of Artificial Sequence: Synthetic oligonucleotide
  Target: LAMA2; (+) strand; PAM type: NRG; PAM sequence: AAG
ctcaaagtagaaattttaaa

SEQ ID NO: 151729 - DNA, 20 bp, Artificial Sequence
  Description of Artificial Sequence: Synthetic oligonucleotide
  Target: LAMA2; (+) strand; PAM type: NRG; PAM sequence: TGG
aaagtagaaattttaaaaag

SEQ ID NO: 151730 - DNA, 20 bp, Artificial Sequence
  Description of Artificial Sequence: Synthetic oligonucleotide
  Target: LAMA2; (+) strand; PAM type: NRG; PAM sequence: GGG
aagtagaaattttaaaaagt

SEQ ID NO: 151731 - DNA, 20 bp, Artificial Sequence
  Description of Artificial Sequence: Synthetic oligonucleotide
  Target: LAMA2; (+) strand; PAM type: NRG; PAM sequence: GAG
gtagaaattttaaaaagtgg

SEQ ID NO: 151732 - DNA, 20 bp, Artificial Sequence
  Description of Artificial Sequence: Synthetic oligonucleotide
  Target: LAMA2; (+) strand; PAM type: NRG; PAM sequence: AGG
tagaaattttaaaaagtggg

SEQ ID NO: 151733 - DNA, 20 bp, Artificial Sequence
  Description of Artificial Sequence: Synthetic oligonucleotide
  Target: LAMA2; (+) strand; PAM type: NRG; PAM sequence: GGG
agaaattttaaaaagtggga

SEQ ID NO: 151734 - DNA, 20 bp, Artificial Sequence
  Description of Artificial Sequence: Synthetic oligonucleotide
  Target: LAMA2; (+) strand; PAM type: NRG; PAM sequence: GGG
gaaattttaaaaagtgggag

SEQ ID NO: 151735 - DNA, 20 bp, Artificial Sequence
  Description of Artificial Sequence: Synthetic oligonucleotide
  Target: LAMA2; (+) strand; PAM type: NRG; PAM sequence: TGG
attttaaaaagtgggagggg

SEQ ID NO: 151736 - DNA, 20 bp, Artificial Sequence
  Description of Artificial Sequence: Synthetic oligonucleotide
  Target: LAMA2; (+) strand; PAM type: NRG; PAM sequence: CAG
ctgaatgaaacaccaccttt

SEQ ID NO: 151737 - DNA, 20 bp, Artificial Sequence
  Description of Artificial Sequence: Synthetic oligonucleotide
  Target: LAMA2; (+) strand; PAM type: NRG; PAM sequence: AGG
tgaatgaaacaccacctttc

SEQ ID NO: 151738 - DNA, 20 bp, Artificial Sequence
  Description of Artificial Sequence: Synthetic oligonucleotide
  Target: LAMA2; (+) strand; PAM type: NRG; PAM sequence: TAG
ccacctttcaggtacttgca

SEQ ID NO: 151739 - DNA, 20 bp, Artificial Sequence
  Description of Artificial Sequence: Synthetic oligonucleotide
  Target: LAMA2; (+) strand; PAM type: NRG; PAM sequence: CAG
atacatacgcaatacttttt

SEQ ID NO: 151740 - DNA, 20 bp, Artificial Sequence
  Description of Artificial Sequence: Synthetic oligonucleotide
  Target: LAMA2; (+) strand; PAM type: NRG; PAM sequence: AGG
tacatacgcaatactttttc

SEQ ID NO: 151741 - DNA, 20 bp, Artificial Sequence
  Description of Artificial Sequence: Synthetic oligonucleotide
  Target: LAMA2; (+) strand; PAM type: NRG; PAM sequence: AAG
tttcaggttgttttttccaa

SEQ ID NO: 151742 - DNA, 20 bp, Artificial Sequence
  Description of Artificial Sequence: Synthetic oligonucleotide
  Target: LAMA2; (+) strand; PAM type: NRG; PAM sequence: TAG
caaaagcaacaataaactac

SEQ ID NO: 151743 - DNA, 20 bp, Artificial Sequence
  Description of Artificial Sequence: Synthetic oligonucleotide
  Target: LAMA2; (+) strand; PAM type: NRG; PAM sequence: TGG
aagcaacaataaactactag

SEQ ID NO: 151744 - DNA, 20 bp, Artificial Sequence
  Description of Artificial Sequence: Synthetic oligonucleotide
  Target: LAMA2; (+) strand; PAM type: NRG; PAM sequence: GAG
gcaacaataaactactagtg

SEQ ID NO: 151745 - DNA, 20 bp, Artificial Sequence
  Description of Artificial Sequence: Synthetic oligonucleotide
  Target: LAMA2; (+) strand; PAM type: NRG; PAM sequence: CGG
tactagtggagtaaaaaata

SEQ ID NO: 151746 - DNA, 20 bp, Artificial Sequence
  Description of Artificial Sequence: Synthetic oligonucleotide
  Target: LAMA2; (+) strand; PAM type: NRG; PAM sequence: AAG
agtaaaaaatacggaactga

SEQ ID NO: 151747 - DNA, 20 bp, Artificial Sequence
  Description of Artificial Sequence: Synthetic oligonucleotide
  Target: LAMA2; (+) strand; PAM type: NRG; PAM sequence: AAG
gaaagtccaactgtttgatt

SEQ ID NO: 151748 - DNA, 20 bp, Artificial Sequence
  Description of Artificial Sequence: Synthetic oligonucleotide
  Target: LAMA2; (+) strand; PAM type: NRG; PAM sequence: GAG
tataaccattgtatgacttt

SEQ ID NO: 151749 - DNA, 20 bp, Artificial Sequence
  Description of Artificial Sequence: Synthetic oligonucleotide
  Target: LAMA2; (+) strand; PAM type: NRG; PAM sequence: AAG
ttgagtgaatttctattttt

SEQ ID NO: 151750 - DNA, 20 bp, Artificial Sequence
  Description of Artificial Sequence: Synthetic oligonucleotide
  Target: LAMA2; (+) strand; PAM type: NRG; PAM sequence: AAG
gtgaatttctatttttaaga

SEQ ID NO: 151751 - DNA, 20 bp, Artificial Sequence
  Description of Artificial Sequence: Synthetic oligonucleotide
  Target: LAMA2; (+) strand; PAM type: NRG; PAM sequence: TGG
aatttctatttttaagaaag

SEQ ID NO: 151752 - DNA, 20 bp, Artificial Sequence
  Description of Artificial Sequence: Synthetic oligonucleotide
  Target: LAMA2; (+) strand; PAM type: NRG; PAM sequence: TGG
atttttaagaaagtggtatt

SEQ ID NO: 151753 - DNA, 20 bp, Artificial Sequence
  Description of Artificial Sequence: Synthetic oligonucleotide
  Target: LAMA2; (+) strand; PAM type: NRG; PAM sequence: AAG
tggaaccacaattttttaaa

SEQ ID NO: 151754 - DNA, 20 bp, Artificial Sequence
  Description of Artificial Sequence: Synthetic oligonucleotide
  Target: LAMA2; (+) strand; PAM type: NRG; PAM sequence: TAG
ccacaattttttaaaaagca

SEQ ID NO: 151755 - DNA, 20 bp, Artificial Sequence
  Description of Artificial Sequence: Synthetic oligonucleotide
  Target: LAMA2; (+) strand; PAM type: NRG; PAM sequence: AGG
cacaattttttaaaaagcat

SEQ ID NO: 151756 - DNA, 20 bp, Artificial Sequence
  Description of Artificial Sequence: Synthetic oligonucleotide
  Target: LAMA2; (+) strand; PAM type: NRG; PAM sequence: CAG
aagcataggttcaatgaaaa

SEQ ID NO: 151757 - DNA, 20 bp, Artificial Sequence
  Description of Artificial Sequence: Synthetic oligonucleotide
  Target: LAMA2; (+) strand; PAM type: NRG; PAM sequence: TAG
tcaatgaaaacagattatta

SEQ ID NO: 151758 - DNA, 20 bp, Artificial Sequence
  Description of Artificial Sequence: Synthetic oligonucleotide
  Target: LAMA2; (+) strand; PAM type: NRG; PAM sequence: TGG
cagattattatagaatacct

SEQ ID NO: 151759 - DNA, 20 bp, Artificial Sequence
  Description of Artificial Sequence: Synthetic oligonucleotide
  Target: LAMA2; (+) strand; PAM type: NRG; PAM sequence: TAG
tagaataccttggaaactcc

SEQ ID NO: 151760 - DNA, 20 bp, Artificial Sequence
  Description of Artificial Sequence: Synthetic oligonucleotide
  Target: LAMA2; (+) strand; PAM type: NRG; PAM sequence: AAG
tggaaactcctagaaacatc

SEQ ID NO: 151761 - DNA, 20 bp, Artificial Sequence
  Description of Artificial Sequence: Synthetic oligonucleotide
  Target: LAMA2; (+) strand; PAM type: NRG; PAM sequence: AGG
ggaaactcctagaaacatca

SEQ ID NO: 151762 - DNA, 20 bp, Artificial Sequence
  Description of Artificial Sequence: Synthetic oligonucleotide
  Target: LAMA2; (+) strand; PAM type: NRG; PAM sequence: TGG
caaggaaaaaaaataaacaa

SEQ ID NO: 151763 - DNA, 20 bp, Artificial Sequence
  Description of Artificial Sequence: Synthetic oligonucleotide
  Target: LAMA2; (+) strand; PAM type: NRG; PAM sequence: AAG
ggaaaaaaaataaacaatgg

SEQ ID NO: 151764 - DNA, 20 bp, Artificial Sequence
  Description of Artificial Sequence: Synthetic oligonucleotide
  Target: LAMA2; (+) strand; PAM type: NRG; PAM sequence: GAG
taaacaatggaagcctatgt

SEQ ID NO: 151765 - DNA, 20 bp, Artificial Sequence
  Description of Artificial Sequence: Synthetic oligonucleotide
  Target: LAMA2; (+) strand; PAM type: NRG; PAM sequence: CAG
ctaatgatattcataatgct

SEQ ID NO: 151766 - DNA, 20 bp, Artificial Sequence
  Description of Artificial Sequence: Synthetic oligonucleotide
  Target: LAMA2; (+) strand; PAM type: NRG; PAM sequence: AGG
taatgatattcataatgctc

SEQ ID NO: 151767 - DNA, 20 bp, Artificial Sequence
  Description of Artificial Sequence: Synthetic oligonucleotide
  Target: LAMA2; (+) strand; PAM type: NRG; PAM sequence: TGG
ggtttttttctaaatgtttg

SEQ ID NO: 151768 - DNA, 20 bp, Artificial Sequence
  Description of Artificial Sequence: Synthetic oligonucleotide
  Target: LAMA2; (+) strand; PAM type: NRG; PAM sequence: TGG
ttttctaaatgtttgtggtt

SEQ ID NO: 151769 - DNA, 20 bp, Artificial Sequence
  Description of Artificial Sequence: Synthetic oligonucleotide
  Target: LAMA2; (+) strand; PAM type: NRG; PAM sequence: AAG
tttttgtttttaatttccaa

SEQ ID NO: 151770 - DNA, 20 bp, Artificial Sequence
  Description of Artificial Sequence: Synthetic oligonucleotide
  Target: LAMA2; (+) strand; PAM type: NRG; PAM sequence: TGG
ttgtttttaatttccaaaag

SEQ ID NO: 151771 - DNA, 20 bp, Artificial Sequence
  Description of Artificial Sequence: Synthetic oligonucleotide
  Target: LAMA2; (+) strand; PAM type: NRG; PAM sequence: CAG
tttccaaaagtggacacgac

SEQ ID NO: 151772 - DNA, 20 bp, Artificial Sequence
  Description of Artificial Sequence: Synthetic oligonucleotide
  Target: LAMA2; (+) strand; PAM type: NRG; PAM sequence: AGG
ttccaaaagtggacacgacc

SEQ ID NO: 151773 - DNA, 20 bp, Artificial Sequence
  Description of Artificial Sequence: Synthetic oligonucleotide
  Target: LAMA2; (+) strand; PAM type: NRG; PAM sequence: AAG
ggacacgaccaggaacatga

SEQ ID NO: 151774 - DNA, 20 bp, Artificial Sequence
  Description of Artificial Sequence: Synthetic oligonucleotide
  Target: LAMA2; (+) strand; PAM type: NRG; PAM sequence: GAG
acacgaccaggaacatgaaa

SEQ ID NO: 151775 - DNA, 20 bp, Artificial Sequence
  Description of Artificial Sequence: Synthetic oligonucleotide
  Target: LAMA2; (+) strand; PAM type: NRG; PAM sequence: AAG
accaggaacatgaaagagaa

SEQ ID NO: 151776 - DNA, 20 bp, Artificial Sequence
  Description of Artificial Sequence: Synthetic oligonucleotide
  Target: LAMA2; (+) strand; PAM type: NRG; PAM sequence: CAG
aggaacatgaaagagaaaag

SEQ ID NO: 151777 - DNA, 20 bp, Artificial Sequence
  Description of Artificial Sequence: Synthetic oligonucleotide
  Target: LAMA2; (+) strand; PAM type: NRG; PAM sequence: TAG
tgaaagagaaaagcagctga

SEQ ID NO: 151778 - DNA, 20 bp, Artificial Sequence
  Description of Artificial Sequence: Synthetic oligonucleotide
  Target: LAMA2; (+) strand; PAM type: NRG; PAM sequence: AAG
gatgactgtgtgttttctct

SEQ ID NO: 151779 - DNA, 20 bp, Artificial Sequence
  Description of Artificial Sequence: Synthetic oligonucleotide
  Target: LAMA2; (+) strand; PAM type: NRG; PAM sequence: AAG
gtgtgttttctctaagatac

SEQ ID NO: 151780 - DNA, 20 bp, Artificial Sequence
  Description of Artificial Sequence: Synthetic oligonucleotide
  Target: LAMA2; (+) strand; PAM type: NRG; PAM sequence: GAG
ttctctaagatacaagatat

SEQ ID NO: 151781 - DNA, 20 bp, Artificial Sequence
  Description of Artificial Sequence: Synthetic oligonucleotide
  Target: LAMA2; (+) strand; PAM type: NRG; PAM sequence: TGG
tctaagatacaagatatgag

SEQ ID NO: 151782 - DNA, 20 bp, Artificial Sequence
  Description of Artificial Sequence: Synthetic oligonucleotide
  Target: LAMA2; (+) strand; PAM type: NRG; PAM sequence: TGG
agatacaagatatgagtggc

SEQ ID NO: 151783 - DNA, 20 bp, Artificial Sequence
  Description of Artificial Sequence: Synthetic oligonucleotide
  Target: LAMA2; (+) strand; PAM type: NRG; PAM sequence: TGG
tggtatctgactgaccttcc

SEQ ID NO: 151784 - DNA, 20 bp, Artificial Sequence
  Description of Artificial Sequence: Synthetic oligonucleotide
  Target: LAMA2; (+) strand; PAM type: NRG; PAM sequence: GAG
tgaccttcctggccgcattc

SEQ ID NO: 151785 - DNA, 20 bp, Artificial Sequence
  Description of Artificial Sequence: Synthetic oligonucleotide
  Target: LAMA2; (+) strand; PAM type: NRG; PAM sequence: TGG
ccttcctggccgcattcgag

SEQ ID NO: 151786 - DNA, 20 bp, Artificial Sequence
  Description of Artificial Sequence: Synthetic oligonucleotide
  Target: LAMA2; (+) strand; PAM type: NRG; PAM sequence: CAG
gccgcattcgagtggctccc

SEQ ID NO: 151787 - DNA, 20 bp, Artificial Sequence
  Description of Artificial Sequence: Synthetic oligonucleotide
  Target: LAMA2; (+) strand; PAM type: NRG; PAM sequence: CAG
gcattcgagtggctccccag

SEQ ID NO: 151788 - DNA, 20 bp, Artificial Sequence
  Description of Artificial Sequence: Synthetic oligonucleotide
  Target: LAMA2; (+) strand; PAM type: NRG; PAM sequence: AGG
cattcgagtggctccccagc

SEQ ID NO: 151789 - DNA, 20 bp, Artificial Sequence
  Description of Artificial Sequence: Synthetic oligonucleotide
  Target: LAMA2; (+) strand; PAM type: NRG; PAM sequence: TGG
ggctccccagcaggacgact

SEQ ID NO: 151790 - DNA, 20 bp, Artificial Sequence
  Description of Artificial Sequence: Synthetic oligonucleotide
  Target: LAMA2; (+) strand; PAM type: NRG; PAM sequence: CAG
aggacgacttggactcacct

SEQ ID NO: 151791 - DNA, 20 bp, Artificial Sequence
  Description of Artificial Sequence: Synthetic oligonucleotide
  Target: LAMA2; (+) strand; PAM type: NRG; PAM sequence: CAG
acgacttggactcacctcag

SEQ ID NO: 151792 - DNA, 20 bp, Artificial Sequence
  Description of Artificial Sequence: Synthetic oligonucleotide
  Target: LAMA2; (+) strand; PAM type: NRG; PAM sequence: CAG
ttggactcacctcagcagat

SEQ ID NO: 151793 - DNA, 20 bp, Artificial Sequence
  Description of Artificial Sequence: Synthetic oligonucleotide
  Target: LAMA2; (+) strand; PAM type: NRG; PAM sequence: CAG
tcacctcagcagatcagcat

SEQ ID NO: 151794 - DNA, 20 bp, Artificial Sequence
  Description of Artificial Sequence: Synthetic oligonucleotide
  Target: LAMA2; (+) strand; PAM type: NRG; PAM sequence: CGG
gcagatcagcatcagtaacg

SEQ ID NO: 151795 - DNA, 20 bp, Artificial Sequence
  Description of Artificial Sequence: Synthetic oligonucleotide
  Target: LAMA2; (+) strand; PAM type: NRG; PAM sequence: GAG
agatcagcatcagtaacgcg

SEQ ID NO: 151796 - DNA, 20 bp, Artificial Sequence
  Description of Artificial Sequence: Synthetic oligonucleotide
  Target: LAMA2; (+) strand; PAM type: NRG; PAM sequence: AGG
gatcagcatcagtaacgcgg

SEQ ID NO: 151797 - DNA, 20 bp, Artificial Sequence
  Description of Artificial Sequence: Synthetic oligonucleotide
  Target: LAMA2; (+) strand; PAM type: NRG; PAM sequence: CGG
gcatcagtaacgcggaggcc

SEQ ID NO: 151798 - DNA, 20 bp, Artificial Sequence
  Description of Artificial Sequence: Synthetic oligonucleotide
  Target: LAMA2; (+) strand; PAM type: NRG; PAM sequence: AAG
cagtaacgcggaggcccggc

SEQ ID NO: 151799 - DNA, 20 bp, Artificial Sequence
  Description of Artificial Sequence: Synthetic oligonucleotide
  Target: LAMA2; (+) strand; PAM type: NRG; PAM sequence: CAG
gcccggcaagccctgccgca

SEQ ID NO: 151800 - DNA, 20 bp, Artificial Sequence
  Description of Artificial Sequence: Synthetic oligonucleotide
  Target: LAMA2; (+) strand; PAM type: NRG; PAM sequence: TGG
ccctgccgcacagctactac

SEQ ID NO: 151801 - DNA, 20 bp, Artificial Sequence
  Description of Artificial Sequence: Synthetic oligonucleotide
  Target: LAMA2; (+) strand; PAM type: NRG; PAM sequence: GAG
ctgccgcacagctactactg

SEQ ID NO: 151802 - DNA, 20 bp, Artificial Sequence
  Description of Artificial Sequence: Synthetic oligonucleotide
  Target: LAMA2; (+) strand; PAM type: NRG; PAM sequence: CGG
cagctactactggagcgcgc

SEQ ID NO: 151803 - DNA, 20 bp, Artificial Sequence
  Description of Artificial Sequence: Synthetic oligonucleotide
  Target: LAMA2; (+) strand; PAM type: NRG; PAM sequence: TGG
gagcgcgccggctccctatc

SEQ ID NO: 151804 - DNA, 20 bp, Artificial Sequence
  Description of Artificial Sequence: Synthetic oligonucleotide
  Target: LAMA2; (+) strand; PAM type: NRG; PAM sequence: GGG
agcgcgccggctccctatct

SEQ ID NO: 151805 - DNA, 20 bp, Artificial Sequence
  Description of Artificial Sequence: Synthetic oligonucleotide
  Target: LAMA2; (+) strand; PAM type: NRG; PAM sequence: AAG
ggctccctatctgggaaaca

SEQ ID NO: 151806 - DNA, 20 bp, Artificial Sequence
  Description of Artificial Sequence: Synthetic oligonucleotide
  Target: LAMA2; (+) strand; PAM type: NRG; PAM sequence: AAG
ccctatctgggaaacaaagt

SEQ ID NO: 151807 - DNA, 20 bp, Artificial Sequence
  Description of Artificial Sequence: Synthetic oligonucleotide
  Target: LAMA2; (+) strand; PAM type: NRG; PAM sequence: GAG
tgctttaactgactgatcgt

SEQ ID NO: 151808 - DNA, 20 bp, Artificial Sequence
  Description of Artificial Sequence: Synthetic oligonucleotide
  Target: LAMA2; (+) strand; PAM type: NRG; PAM sequence: TGG
taactgactgatcgtgagaa

SEQ ID NO: 151809 - DNA, 20 bp, Artificial Sequence
  Description of Artificial Sequence: Synthetic oligonucleotide
  Target: LAMA2; (+) strand; PAM type: NRG; PAM sequence: GGG
aactgactgatcgtgagaat

SEQ ID NO: 151810 - DNA, 20 bp, Artificial Sequence
  Description of Artificial Sequence: Synthetic oligonucleotide
  Target: LAMA2; (+) strand; PAM type: NRG; PAM sequence: TAG
ctgatcgtgagaatgggttt

SEQ ID NO: 151811 - DNA, 20 bp, Artificial Sequence
  Description of Artificial Sequence: Synthetic oligonucleotide
  Target: LAMA2; (+) strand; PAM type: NRG; PAM sequence: TGG
tcgtgagaatgggttttagt

SEQ ID NO: 151812 - DNA, 20 bp, Artificial Sequence
  Description of Artificial Sequence: Synthetic oligonucleotide
  Target: LAMA2; (+) strand; PAM type: NRG; PAM sequence: AAG
tttagttggtaattctttta

SEQ ID NO: 151813 - DNA, 20 bp, Artificial Sequence
  Description of Artificial Sequence: Synthetic oligonucleotide
  Target: LAMA2; (+) strand; PAM type: NRG; PAM sequence: AAG
gttggtaattcttttaaaga

SEQ ID NO: 151814 - DNA, 20 bp, Artificial Sequence
  Description of Artificial Sequence: Synthetic oligonucleotide
  Target: LAMA2; (+) strand; PAM type: NRG; PAM sequence: TGG
aaatcaaatacacactgaat

SEQ ID NO: 151815 - DNA, 20 bp, Artificial Sequence
  Description of Artificial Sequence: Synthetic oligonucleotide
  Target: LAMA2; (+) strand; PAM type: NRG; PAM sequence: CAG
tacacactgaattggattgc

SEQ ID NO: 151816 - DNA, 20 bp, Artificial Sequence
  Description of Artificial Sequence: Synthetic oligonucleotide
  Target: LAMA2; (+) strand; PAM type: NRG; PAM sequence: CAG
ctgaattggattgccagaac

SEQ ID NO: 151817 - DNA, 20 bp, Artificial Sequence
  Description of Artificial Sequence: Synthetic oligonucleotide
  Target: LAMA2; (+) strand; PAM type: NRG; PAM sequence: GAG
agaaccagctaaatcacatt

SEQ ID NO: 151818 - DNA, 20 bp, Artificial Sequence
  Description of Artificial Sequence: Synthetic oligonucleotide
  Target: LAMA2; (+) strand; PAM type: NRG; PAM sequence: TGG
ccagctaaatcacattgagt

SEQ ID NO: 151819 - DNA, 20 bp, Artificial Sequence
  Description of Artificial Sequence: Synthetic oligonucleotide
  Target: LAMA2; (+) strand; PAM type: NRG; PAM sequence: GGG
cagctaaatcacattgagtt

SEQ ID NO: 151820 - DNA, 20 bp, Artificial Sequence
  Description of Artificial Sequence: Synthetic oligonucleotide
  Target: LAMA2; (+) strand; PAM type: NRG; PAM sequence: AAG
gcgtttcttccatgttgcac

SEQ ID NO: 151821 - DNA, 20 bp, Artificial Sequence
  Description of Artificial Sequence: Synthetic oligonucleotide
  Target: LAMA2; (+) strand; PAM type: NRG; PAM sequence: AAG
ccatgttgcacaagacctta

SEQ ID NO: 151822 - DNA, 20 bp, Artificial Sequence
  Description of Artificial Sequence: Synthetic oligonucleotide
  Target: LAMA2; (+) strand; PAM type: NRG; PAM sequence: GAG
atgttgcacaagaccttaaa

SEQ ID NO: 151823 - DNA, 20 bp, Artificial Sequence
  Description of Artificial Sequence: Synthetic oligonucleotide
  Target: LAMA2; (+) strand; PAM type: NRG; PAM sequence: CGG
cacaagaccttaaagagcca

SEQ ID NO: 151824 - DNA, 20 bp, Artificial Sequence
  Description of Artificial Sequence: Synthetic oligonucleotide
  Target: LAMA2; (+) strand; PAM type: NRG; PAM sequence: TAG
ccttaatatgcaactttgta

SEQ ID NO: 151825 - DNA, 20 bp, Artificial Sequence
  Description of Artificial Sequence: Synthetic oligonucleotide
  Target: LAMA2; (+) strand; PAM type: NRG; PAM sequence: TGG
ttctatgtaaactttttgaa

SEQ ID NO: 151826 - DNA, 20 bp, Artificial Sequence
  Description of Artificial Sequence: Synthetic oligonucleotide
  Target: LAMA2; (+) strand; PAM type: NRG; PAM sequence: GGG
tctatgtaaactttttgaat

SEQ ID NO: 151827 - DNA, 20 bp, Artificial Sequence
  Description of Artificial Sequence: Synthetic oligonucleotide
  Target: LAMA2; (+) strand; PAM type: NRG; PAM sequence: AAG
aatgggcaaataaattaatg

SEQ ID NO: 151828 - DNA, 20 bp, Artificial Sequence
  Description of Artificial Sequence: Synthetic oligonucleotide
  Target: LAMA2; (+) strand; PAM type: NRG; PAM sequence: TAG
aaataaattaatgaagccgc

SEQ ID NO: 151829 - DNA, 20 bp, Artificial Sequence
  Description of Artificial Sequence: Synthetic oligonucleotide
  Target: LAMA2; (+) strand; PAM type: NRG; PAM sequence: AAG
gccgctagtgtattttcgta

SEQ ID NO: 151830 - DNA, 20 bp, Artificial Sequence
  Description of Artificial Sequence: Synthetic oligonucleotide
  Target: LAMA2; (+) strand; PAM type: NRG; PAM sequence: TAG
tattttcgtaaagcaaatta

SEQ ID NO: 151831 - DNA, 20 bp, Artificial Sequence
  Description of Artificial Sequence: Synthetic oligonucleotide
  Target: LAMA2; (+) strand; PAM type: NRG; PAM sequence: AGG
attttcgtaaagcaaattat

SEQ ID NO: 151832 - DNA, 20 bp, Artificial Sequence
  Description of Artificial Sequence: Synthetic oligonucleotide
  Target: LAMA2; (+) strand; PAM type: NRG; PAM sequence: TGG
gtaaagcaaattataggtat

SEQ ID NO: 151833 - DNA, 20 bp, Artificial Sequence
  Description of Artificial Sequence: Synthetic oligonucleotide
  Target: LAMA2; (+) strand; PAM type: NRG; PAM sequence: AAG
aagcaaattataggtattgg

SEQ ID NO: 151834 - DNA, 20 bp, Artificial Sequence
  Description of Artificial Sequence: Synthetic oligonucleotide
  Target: LAMA2; (+) strand; PAM type: NRG; PAM sequence: AAG
ctgtgttgtgtttatgtgaa

SEQ ID NO: 151835 - DNA, 20 bp, Artificial Sequence
  Description of Artificial Sequence: Synthetic oligonucleotide
  Target: LAMA2; (+) strand; PAM type: NRG; PAM sequence: GAG
gtgttgtgtttatgtgaaaa

SEQ ID NO: 151836 - DNA, 20 bp, Artificial Sequence
  Description of Artificial Sequence: Synthetic oligonucleotide
  Target: LAMA2; (+) strand; PAM type: NRG; PAM sequence: TGG
atgtgaaaagagctgttttc

SEQ ID NO: 151837 - DNA, 20 bp, Artificial Sequence
  Description of Artificial Sequence: Synthetic oligonucleotide
  Target: LAMA2; (+) strand; PAM type: NRG; PAM sequence: GAG
gtgaaaagagctgttttctg

SEQ ID NO: 151838 - DNA, 20 bp, Artificial Sequence
  Description of Artificial Sequence: Synthetic oligonucleotide
  Target: LAMA2; (+) strand; PAM type: NRG; PAM sequence: TGG
ctgttttctggagttgtctg

SEQ ID NO: 151839 - DNA, 20 bp, Artificial Sequence
  Description of Artificial Sequence: Synthetic oligonucleotide
  Target: LAMA2; (+) strand; PAM type: NRG; PAM sequence: TGG
ttttctggagttgtctgtgg

SEQ ID NO: 151840 - DNA, 20 bp, Artificial Sequence
  Description of Artificial Sequence: Synthetic oligonucleotide
  Target: LAMA2; (+) strand; PAM type: NRG; PAM sequence: GGG
tttctggagttgtctgtggt

SEQ ID NO: 151841 - DNA, 20 bp, Artificial Sequence
  Description of Artificial Sequence: Synthetic oligonucleotide
  Target: LAMA2; (+) strand; PAM type: NRG; PAM sequence: AAG
ctgtggtgggatacttacta

SEQ ID NO: 151842 - DNA, 20 bp, Artificial Sequence
  Description of Artificial Sequence: Synthetic oligonucleotide
  Target: LAMA2; (+) strand; PAM type: NRG; PAM sequence: CGG
cttactaaagtttttctcat

SEQ ID NO: 151843 - DNA, 20 bp, Artificial Sequence
  Description of Artificial Sequence: Synthetic oligonucleotide
  Target: LAMA2; (+) strand; PAM type: NRG; PAM sequence: CAG
ttcatttcaaaactgatact

SEQ ID NO: 151844 - DNA, 20 bp, Artificial Sequence
  Description of Artificial Sequence: Synthetic oligonucleotide
  Target: LAMA2; (+) strand; PAM type: NRG; PAM sequence: AGG
tcatttcaaaactgatactc

SEQ ID NO: 151845 - DNA, 20 bp, Artificial Sequence
  Description of Artificial Sequence: Synthetic oligonucleotide
  Target: LAMA2; (+) strand; PAM type: NRG; PAM sequence: GAG
atttcaaaactgatactcag

SEQ ID NO: 151846 - DNA, 20 bp, Artificial Sequence
  Description of Artificial Sequence: Synthetic oligonucleotide
  Target: LAMA2; (+) strand; PAM type: NRG; PAM sequence: TGG
tacctgatatgaatgttaat

SEQ ID NO: 151847 - DNA, 20 bp, Artificial Sequence
  Description of Artificial Sequence: Synthetic oligonucleotide
  Target: LAMA2; (+) strand; PAM type: NRG; PAM sequence: AAG
gatatgaatgttaattggaa

SEQ ID NO: 151848 - DNA, 20 bp, Artificial Sequence
  Description of Artificial Sequence: Synthetic oligonucleotide
  Target: LAMA2; (+) strand; PAM type: NRG; PAM sequence: GAG
actaattaaatgcttgccat

SEQ ID NO: 151849 - DNA, 20 bp, Artificial Sequence
  Description of Artificial Sequence: Synthetic oligonucleotide
  Target: LAMA2; (+) strand; PAM type: NRG; PAM sequence: AGG
ctaattaaatgcttgccatg

SEQ ID NO: 151850 - DNA, 20 bp, Artificial Sequence
  Description of Artificial Sequence: Synthetic oligonucleotide
  Target: LAMA2; (+) strand; PAM type: NRG; PAM sequence: TGG
tatgtaaacaacatatttgc

SEQ ID NO: 151851 - DNA, 20 bp, Artificial Sequence
  Description of Artificial Sequence: Synthetic oligonucleotide
  Target: LAMA2; (+) strand; PAM type: NRG; PAM sequence: GAG
tgtaaacaacatatttgctg

SEQ ID NO: 151852 - DNA, 20 bp, Artificial Sequence
  Description of Artificial Sequence: Synthetic oligonucleotide
  Target: LAMA2; (+) strand; PAM type: NRG; PAM sequence: CAG
acaacatatttgctggagct

SEQ ID NO: 151853 - DNA, 20 bp, Artificial Sequence
  Description of Artificial Sequence: Synthetic oligonucleotide
  Target: LAMA2; (+) strand; PAM type: NRG; PAM sequence: AGG
caacatatttgctggagctc

SEQ ID NO: 151854 - DNA, 20 bp, Artificial Sequence
  Description of Artificial Sequence: Synthetic oligonucleotide
  Target: LAMA2; (+) strand; PAM type: NRG; PAM sequence: CAG
catatttgctggagctcagg

SEQ ID NO: 151855 - DNA, 20 bp, Artificial Sequence
  Description of Artificial Sequence: Synthetic oligonucleotide
  Target: LAMA2; (+) strand; PAM type: NRG; PAM sequence: AAG
tcaggcagaaactaccctaa

SEQ ID NO: 151856 - DNA, 20 bp, Artificial Sequence
  Description of Artificial Sequence: Synthetic oligonucleotide
  Target: LAMA2; (+) strand; PAM type: NRG; PAM sequence: CAG
agaaactaccctaaaagtgc

SEQ ID NO: 151857 - DNA, 20 bp, Artificial Sequence
  Description of Artificial Sequence: Synthetic oligonucleotide
  Target: LAMA2; (+) strand; PAM type: NRG; PAM sequence: TGG
ctaccctaaaagtgccagat

SEQ ID NO: 151858 - DNA, 20 bp, Artificial Sequence
  Description of Artificial Sequence: Synthetic oligonucleotide
  Target: LAMA2; (+) strand; PAM type: NRG; PAM sequence: AAG
ccctaaaagtgccagattgg

SEQ ID NO: 151859 - DNA, 20 bp, Artificial Sequence
  Description of Artificial Sequence: Synthetic oligonucleotide
  Target: LAMA2; (+) strand; PAM type: NRG; PAM sequence: AAG
ttggaagcacgtttgtttta

SEQ ID NO: 151860 - DNA, 20 bp, Artificial Sequence
  Description of Artificial Sequence: Synthetic oligonucleotide
  Target: LAMA2; (+) strand; PAM type: NRG; PAM sequence: CAG
cacatatgtaaaaacataca

SEQ ID NO: 151861 - DNA, 20 bp, Artificial Sequence
  Description of Artificial Sequence: Synthetic oligonucleotide
  Target: LAMA2; (+) strand; PAM type: NRG; PAM sequence: TAG
catacacagataaacaaatg

SEQ ID NO: 151862 - DNA, 20 bp, Artificial Sequence
  Description of Artificial Sequence: Synthetic oligonucleotide
  Target: LAMA2; (+) strand; PAM type: NRG; PAM sequence: CAG
acacagataaacaaatgtag

SEQ ID NO: 151863 - DNA, 20 bp, Artificial Sequence
  Description of Artificial Sequence: Synthetic oligonucleotide
  Target: LAMA2; (+) strand; PAM type: NRG; PAM sequence: CAG
ataaacaaatgtagcagcct

SEQ ID NO: 151864 - DNA, 20 bp, Artificial Sequence
  Description of Artificial Sequence: Synthetic oligonucleotide
  Target: LAMA2; (+) strand; PAM type: NRG; PAM sequence: CAG
atgtagcagcctcagaaata

SEQ ID NO: 151865 - DNA, 20 bp, Artificial Sequence
  Description of Artificial Sequence: Synthetic oligonucleotide
  Target: LAMA2; (+) strand; PAM type: NRG; PAM sequence: AGG
tgtagcagcctcagaaatac

SEQ ID NO: 151866 - DNA, 20 bp, Artificial Sequence
  Description of Artificial Sequence: Synthetic oligonucleotide
  Target: LAMA2; (+) strand; PAM type: NRG; PAM sequence: TGG
aggcttatttttttctgttg

SEQ ID NO: 151867 - DNA, 20 bp, Artificial Sequence
  Description of Artificial Sequence: Synthetic oligonucleotide
  Target: LAMA2; (+) strand; PAM type: NRG; PAM sequence: TAG
tgttgtggattacttctatc

SEQ ID NO: 151868 - DNA, 20 bp, Artificial Sequence
  Description of Artificial Sequence: Synthetic oligonucleotide
  Target: LAMA2; (+) strand; PAM type: NRG; PAM sequence: TAG
gtggattacttctatctaga

SEQ ID NO: 151869 - DNA, 20 bp, Artificial Sequence
  Description of Artificial Sequence: Synthetic oligonucleotide
  Target: LAMA2; (+) strand; PAM type: NRG; PAM sequence: TGG
ttctatctagatagatatcc

SEQ ID NO: 151870 - DNA, 20 bp, Artificial Sequence
  Description of Artificial Sequence: Synthetic oligonucleotide
  Target: LAMA2; (+) strand; PAM type: NRG; PAM sequence: GGG
tctatctagatagatatcct

SEQ ID NO: 151871 - DNA, 20 bp, Artificial Sequence
  Description of Artificial Sequence: Synthetic oligonucleotide
  Target: LAMA2; (+) strand; PAM type: NRG; PAM sequence: GGG
ctatctagatagatatcctg

SEQ ID NO: 151872 - DNA, 20 bp, Artificial Sequence
  Description of Artificial Sequence: Synthetic oligonucleotide
  Target: LAMA2; (+) strand; PAM type: NRG; PAM sequence: TAG
tagatagatatcctggggtt

SEQ ID NO: 151873 - DNA, 20 bp, Artificial Sequence
  Description of Artificial Sequence: Synthetic oligonucleotide
  Target: LAMA2; (+) strand; PAM type: NRG; PAM sequence: TGG
tatcttgcctaatactttgt

SEQ ID NO: 151874 - DNA, 20 bp, Artificial Sequence
  Description of Artificial Sequence: Synthetic oligonucleotide
  Target: LAMA2; (+) strand; PAM type: NRG; PAM sequence: TGG
actttgttggaaacaaaatt

SEQ ID NO: 151875 - DNA, 20 bp, Artificial Sequence
  Description of Artificial Sequence: Synthetic oligonucleotide
  Target: LAMA2; (+) strand; PAM type: NRG; PAM sequence: AAG
aatacttgcttgttctgtga

SEQ ID NO: 151876 - DNA, 20 bp, Artificial Sequence
  Description of Artificial Sequence: Synthetic oligonucleotide
  Target: LAMA2; (+) strand; PAM type: NRG; PAM sequence: CAG
tgtgaaagttaataccttct

SEQ ID NO: 151877 - DNA, 20 bp, Artificial Sequence
  Description of Artificial Sequence: Synthetic oligonucleotide
  Target: LAMA2; (+) strand; PAM type: NRG; PAM sequence: TAG
gttaataccttctcagctga

SEQ ID NO: 151878 - DNA, 20 bp, Artificial Sequence
  Description of Artificial Sequence: Synthetic oligonucleotide
  Target: LAMA2; (+) strand; PAM type: NRG; PAM sequence: CAG
gttaaaatacctgatcacac

SEQ ID NO: 151879 - DNA, 20 bp, Artificial Sequence
  Description of Artificial Sequence: Synthetic oligonucleotide
  Target: LAMA2; (+) strand; PAM type: NRG; PAM sequence: AAG
aaaatacctgatcacaccag

SEQ ID NO: 151880 - DNA, 20 bp, Artificial Sequence
  Description of Artificial Sequence: Synthetic oligonucleotide
  Target: LAMA2; (+) strand; PAM type: NRG; PAM sequence: AGG
aaatacctgatcacaccaga

SEQ ID NO: 151881 - DNA, 20 bp, Artificial Sequence
  Description of Artificial Sequence: Synthetic oligonucleotide
  Target: LAMA2; (+) strand; PAM type: NRG; PAM sequence: TGG
gatcacaccagaaggtgtga

SEQ ID NO: 151882 - DNA, 20 bp, Artificial Sequence
  Description of Artificial Sequence: Synthetic oligonucleotide
  Target: LAMA2; (+) strand; PAM type: NRG; PAM sequence: GGG
atcacaccagaaggtgtgat

SEQ ID NO: 151883 - DNA, 20 bp, Artificial Sequence
  Description of Artificial Sequence: Synthetic oligonucleotide
  Target: LAMA2; (+) strand; PAM type: NRG; PAM sequence: AAG
ttcctaaattaatgttgttt

SEQ ID NO: 151884 - DNA, 20 bp, Artificial Sequence
  Description of Artificial Sequence: Synthetic oligonucleotide
  Target: LAMA2; (+) strand; PAM type: NRG; PAM sequence: TAG
aaattaatgttgtttaagcc

SEQ ID NO: 151885 - DNA, 20 bp, Artificial Sequence
  Description of Artificial Sequence: Synthetic oligonucleotide
  Target: LAMA2; (+) strand; PAM type: NRG; PAM sequence: TAG
agtttacacctaacaaaata

SEQ ID NO: 151886 - DNA, 20 bp, Artificial Sequence
  Description of Artificial Sequence: Synthetic oligonucleotide
  Target: LAMA2; (+) strand; PAM type: NRG; PAM sequence: AAG
aaaatatagcattatttatg

SEQ ID NO: 151887 - DNA, 20 bp, Artificial Sequence
  Description of Artificial Sequence: Synthetic oligonucleotide
  Target: LAMA2; (+) strand; PAM type: NRG; PAM sequence: AAG
tgaagaaatcataattgatt

SEQ ID NO: 151888 - DNA, 20 bp, Artificial Sequence
  Description of Artificial Sequence: Synthetic oligonucleotide
  Target: LAMA2; (+) strand; PAM type: NRG; PAM sequence: AAG
ataattgattaagcaaataa

SEQ ID NO: 151889 - DNA, 20 bp, Artificial Sequence
  Description of Artificial Sequence: Synthetic oligonucleotide
  Target: LAMA2; (+) strand; PAM type: NRG; PAM sequence: TAG
agcaaataaaagtatgttta

SEQ ID NO: 151890 - DNA, 20 bp, Artificial Sequence
  Description of Artificial Sequence: Synthetic oligonucleotide
  Target: LAMA2; (+) strand; PAM type: NRG; PAM sequence: CAG
aataaaagtatgtttatagt

SEQ ID NO: 151891 - DNA, 20 bp, Artificial Sequence
  Description of Artificial Sequence: Synthetic oligonucleotide
  Target: LAMA2; (+) strand; PAM type: NRG; PAM sequence: TGG
aaaagtatgtttatagtcag

SEQ ID NO: 151892 - DNA, 20 bp, Artificial Sequence
  Description of Artificial Sequence: Synthetic oligonucleotide
  Target: LAMA2; (+) strand; PAM type: NRG; PAM sequence: GAG
ggttttcttgcatgacatgt

SEQ ID NO: 151893 - DNA, 20 bp, Artificial Sequence
  Description of Artificial Sequence: Synthetic oligonucleotide
  Target: LAMA2; (+) strand; PAM type: NRG; PAM sequence: TAG
atgacatgtgagtattgaaa

SEQ ID NO: 151894 - DNA, 20 bp, Artificial Sequence
  Description of Artificial Sequence: Synthetic oligonucleotide
  Target: LAMA2; (+) strand; PAM type: NRG; PAM sequence: TAG
agtattgaaatagaaaaact

SEQ ID NO: 151895 - DNA, 20 bp, Artificial Sequence
  Description of Artificial Sequence: Synthetic oligonucleotide
  Target: LAMA2; (+) strand; PAM type: NRG; PAM sequence: CAG
ttagtatctcatatgctact

SEQ ID NO: 151896 - DNA, 20 bp, Artificial Sequence
  Description of Artificial Sequence: Synthetic oligonucleotide
  Target: LAMA2; (+) strand; PAM type: NRG; PAM sequence: TGG
ctcatatgctactcagtgaa

SEQ ID NO: 151897 - DNA, 20 bp, Artificial Sequence
  Description of Artificial Sequence: Synthetic oligonucleotide
  Target: LAMA2; (+) strand; PAM type: NRG; PAM sequence: GGG
tcatatgctactcagtgaat

SEQ ID NO: 151898 - DNA, 20 bp, Artificial Sequence
  Description of Artificial Sequence: Synthetic oligonucleotide
  Target: LAMA2; (+) strand; PAM type: NRG; PAM sequence: TGG
gctactcagtgaatgggaac

SEQ ID NO: 151899 - DNA, 20 bp, Artificial Sequence
  Description of Artificial Sequence: Synthetic oligonucleotide
  Target: LAMA2; (+) strand; PAM type: NRG; PAM sequence: TGG
actcagtgaatgggaactgg

SEQ ID NO: 151900 - DNA, 20 bp, Artificial Sequence
  Description of Artificial Sequence: Synthetic oligonucleotide
  Target: LAMA2; (+) strand; PAM type: NRG; PAM sequence: TGG
tgaatgggaactggtggtgt

SEQ ID NO: 151901 - DNA, 20 bp, Artificial Sequence
  Description of Artificial Sequence: Synthetic oligonucleotide
  Target: LAMA2; (+) strand; PAM type: NRG; PAM sequence: TGG
tgggaactggtggtgttggc

SEQ ID NO: 151902 - DNA, 20 bp, Artificial Sequence
  Description of Artificial Sequence: Synthetic oligonucleotide
  Target: LAMA2; (+) strand; PAM type: NRG; PAM sequence: TGG
gttgaaacacttttaactta

SEQ ID NO: 151903 - DNA, 20 bp, Artificial Sequence
  Description of Artificial Sequence: Synthetic oligonucleotide
  Target: LAMA2; (+) strand; PAM type: NRG; PAM sequence: CAG
aaacacttttaacttatggc

SEQ ID NO: 151904 - DNA, 20 bp, Artificial Sequence
  Description of Artificial Sequence: Synthetic oligonucleotide
  Target: LAMA2; (+) strand; PAM type: NRG; PAM sequence: CAG
ggccagtttcttatatttaa

SEQ ID NO: 151905 - DNA, 20 bp, Artificial Sequence
  Description of Artificial Sequence: Synthetic oligonucleotide
  Target: LAMA2; (+) strand; PAM type: NRG; PAM sequence: AAG
aaaaatgtgtaaatgtctaa

SEQ ID NO: 151906 - DNA, 20 bp, Artificial Sequence
  Description of Artificial Sequence: Synthetic oligonucleotide
  Target: LAMA2; (+) strand; PAM type: NRG; PAM sequence: AAG
tttcaatgaacatgtatttt

SEQ ID NO: 151907 - DNA, 20 bp, Artificial Sequence
  Description of Artificial Sequence: Synthetic oligonucleotide
  Target: LAMA2; (+) strand; PAM type: NRG; PAM sequence: GAG
tcaatgaacatgtattttaa

SEQ ID NO: 151908 - DNA, 20 bp, Artificial Sequence
  Description of Artificial Sequence: Synthetic oligonucleotide
  Target: LAMA2; (+) strand; PAM type: NRG; PAM sequence: CAG
tgaacatgtattttaagaga

SEQ ID NO: 151909 - DNA, 20 bp, Artificial Sequence
  Description of Artificial Sequence: Synthetic oligonucleotide
  Target: LAMA2; (+) strand; PAM type: NRG; PAM sequence: GAG
aacatgtattttaagagaca

SEQ ID NO: 151910 - DNA, 20 bp, Artificial Sequence
  Description of Artificial Sequence: Synthetic oligonucleotide
  Target: LAMA2; (+) strand; PAM type: NRG; PAM sequence: TAG
gtatgttgcataaaattcaa

SEQ ID NO: 151911 - DNA, 20 bp, Artificial Sequence
  Description of Artificial Sequence: Synthetic oligonucleotide
  Target: LAMA2; (+) strand; PAM type: NRG; PAM sequence: AAG
cgaattaaacttttatttgc

SEQ ID NO: 151912 - DNA, 20 bp, Artificial Sequence
  Description of Artificial Sequence: Synthetic oligonucleotide
  Target: LAMA2; (+) strand; PAM type: NRG; PAM sequence: AGG
gaattaaacttttatttgca

SEQ ID NO: 151913 - DNA, 20 bp, Artificial Sequence
  Description of Artificial Sequence: Synthetic oligonucleotide
  Target: LAMA2; (+) strand; PAM type: NRG; PAM sequence: CAG
tttatttgcaaggcccttta

SEQ ID NO: 151914 - DNA, 20 bp, Artificial Sequence
  Description of Artificial Sequence: Synthetic oligonucleotide
  Target: LAMA2; (+) strand; PAM type: NRG; PAM sequence: AAG
tttgcaaggccctttacagc

SEQ ID NO: 151915 - DNA, 20 bp, Artificial Sequence
  Description of Artificial Sequence: Synthetic oligonucleotide
  Target: LAMA2; (+) strand; PAM type: NRG; PAM sequence: AAG
gcaaggccctttacagcaag

SEQ ID NO: 151916 - DNA, 20 bp, Artificial Sequence
  Description of Artificial Sequence: Synthetic oligonucleotide
  Target: LAMA2; (+) strand; PAM type: NRG; PAM sequence: TAG
tcattttatcctattctatt

SEQ ID NO: 151917 - DNA, 20 bp, Artificial Sequence
  Description of Artificial Sequence: Synthetic oligonucleotide
  Target: LAMA2; (+) strand; PAM type: NRG; PAM sequence: AGG
cattttatcctattctattt

SEQ ID NO: 151918 - DNA, 20 bp, Artificial Sequence
  Description of Artificial Sequence: Synthetic oligonucleotide
  Target: LAMA2; (+) strand; PAM type: NRG; PAM sequence: TGG
ctattctatttaggaaactc

SEQ ID NO: 151919 - DNA, 20 bp, Artificial Sequence
  Description of Artificial Sequence: Synthetic oligonucleotide
  Target: LAMA2; (+) strand; PAM type: NRG; PAM sequence: AAG
ggaaactctggtattcccaa

SEQ ID NO: 151920 - DNA, 20 bp, Artificial Sequence
  Description of Artificial Sequence: Synthetic oligonucleotide
  Target: LAMA2; (+) strand; PAM type: NRG; PAM sequence: CAG
gtattcccaaaagaacaaaa

SEQ ID NO: 151921 - DNA, 20 bp, Artificial Sequence
  Description of Artificial Sequence: Synthetic oligonucleotide
  Target: LAMA2; (+) strand; PAM type: NRG; PAM sequence: AAG
aaaagaacaaaacagcacat

SEQ ID NO: 151922 - DNA, 20 bp, Artificial Sequence
  Description of Artificial Sequence: Synthetic oligonucleotide
  Target: LAMA2; (+) strand; PAM type: NRG; PAM sequence: GAG
aatttaaaaaaaaaacaact

SEQ ID NO: 151923 - DNA, 20 bp, Artificial Sequence
  Description of Artificial Sequence: Synthetic oligonucleotide
  Target: LAMA2; (+) strand; PAM type: NRG; PAM sequence: GAG
tttaaaaaaaaaacaactga

SEQ ID NO: 151924 - DNA, 20 bp, Artificial Sequence
  Description of Artificial Sequence: Synthetic oligonucleotide
  Target: LAMA2; (+) strand; PAM type: NRG; PAM sequence: AAG
aaaaaacaactgagagctcc

SEQ ID NO: 151925 - DNA, 20 bp, Artificial Sequence
  Description of Artificial Sequence: Synthetic oligonucleotide
  Target: LAMA2; (+) strand; PAM type: NRG; PAM sequence: AAG
aaacaactgagagctccaag

SEQ ID NO: 151926 - DNA, 20 bp, Artificial Sequence
  Description of Artificial Sequence: Synthetic oligonucleotide
  Target: LAMA2; (+) strand; PAM type: NRG; PAM sequence: GAG
acaactgagagctccaagaa

SEQ ID NO: 151927 - DNA, 20 bp, Artificial Sequence
  Description of Artificial Sequence: Synthetic oligonucleotide
  Target: LAMA2; (+) strand; PAM type: NRG; PAM sequence: TAG
gagagctccaagaagagcct

SEQ ID NO: 151928 - DNA, 20 bp, Artificial Sequence
  Description of Artificial Sequence: Synthetic oligonucleotide
  Target: LAMA2; (+) strand; PAM type: NRG; PAM sequence: AGG
agagctccaagaagagcctt

SEQ ID NO: 151929 - DNA, 20 bp, Artificial Sequence
  Description of Artificial Sequence: Synthetic oligonucleotide
  Target: LAMA2; (+) strand; PAM type: NRG; PAM sequence: TGG
gaagagccttaggtcaaaat

SEQ ID NO: 151930 - DNA, 20 bp, Artificial Sequence
  Description of Artificial Sequence: Synthetic oligonucleotide
  Target: LAMA2; (+) strand; PAM type: NRG; PAM sequence: CAG
ggtcaaaattggatgaattt

SEQ ID NO: 151931 - DNA, 20 bp, Artificial Sequence
  Description of Artificial Sequence: Synthetic oligonucleotide
  Target: LAMA2; (+) strand; PAM type: NRG; PAM sequence: GAG
tcaaaattggatgaatttca

SEQ ID NO: 151932 - DNA, 20 bp, Artificial Sequence
  Description of Artificial Sequence: Synthetic oligonucleotide
  Target: LAMA2; (+) strand; PAM type: NRG; PAM sequence: AGG
caaaattggatgaatttcag

SEQ ID NO: 151933 - DNA, 20 bp, Artificial Sequence
  Description of Artificial Sequence: Synthetic oligonucleotide
  Target: LAMA2; (+) strand; PAM type: NRG; PAM sequence: TGG
aggccttatttcttatatga

SEQ ID NO: 151934 - DNA, 20 bp, Artificial Sequence
  Description of Artificial Sequence: Synthetic oligonucleotide
  Target: LAMA2; (+) strand; PAM type: NRG; PAM sequence: AAG
atgatggcaacacttaatta

SEQ ID NO: 151935 - DNA, 20 bp, Artificial Sequence
  Description of Artificial Sequence: Synthetic oligonucleotide
  Target: LAMA2; (+) strand; PAM type: NRG; PAM sequence: TAG
atggcaacacttaattaaag

SEQ ID NO: 151936 - DNA, 20 bp, Artificial Sequence
  Description of Artificial Sequence: Synthetic oligonucleotide
  Target: LAMA2; (+) strand; PAM type: NRG; PAM sequence: TAG
ttaattaaagtagcttataa

SEQ ID NO: 151937 - DNA, 20 bp, Artificial Sequence
  Description of Artificial Sequence: Synthetic oligonucleotide
  Target: LAMA2; (+) strand; PAM type: NRG; PAM sequence: CAG
ataatagaaatattctttac

SEQ ID NO: 151938 - DNA, 20 bp, Artificial Sequence
  Description of Artificial Sequence: Synthetic oligonucleotide
  Target: LAMA2; (+) strand; PAM type: NRG; PAM sequence: TGG
attttccatcctttcttctt

SEQ ID NO: 151939 - DNA, 20 bp, Artificial Sequence
  Description of Artificial Sequence: Synthetic oligonucleotide
  Target: LAMA2; (+) strand; PAM type: NRG; PAM sequence: TGG
atatgcatttttttttctgt

SEQ ID NO: 151940 - DNA, 20 bp, Artificial Sequence
  Description of Artificial Sequence: Synthetic oligonucleotide
  Target: LAMA2; (+) strand; PAM type: NRG; PAM sequence: CAG
ttggctgacaatcaaactga

SEQ ID NO: 151941 - DNA, 20 bp, Artificial Sequence
  Description of Artificial Sequence: Synthetic oligonucleotide
  Target: LAMA2; (+) strand; PAM type: NRG; PAM sequence: AAG
gctgacaatcaaactgacag

SEQ ID NO: 151942 - DNA, 20 bp, Artificial Sequence
  Description of Artificial Sequence: Synthetic oligonucleotide
  Target: LAMA2; (+) strand; PAM type: NRG; PAM sequence: AGG
ctgacaatcaaactgacaga

SEQ ID NO: 151943 - DNA, 20 bp, Artificial Sequence
  Description of Artificial Sequence: Synthetic oligonucleotide
  Target: LAMA2; (+) strand; PAM type: NRG; PAM sequence: AAG
caatcaaactgacagaagga

SEQ ID NO: 151944 - DNA, 20 bp, Artificial Sequence
  Description of Artificial Sequence: Synthetic oligonucleotide
  Target: LAMA2; (+) strand; PAM type: NRG; PAM sequence: AAG
caaactgacagaaggaaagc

SEQ ID NO: 151945 - DNA, 20 bp, Artificial Sequence
  Description of Artificial Sequence: Synthetic oligonucleotide
  Target: LAMA2; (+) strand; PAM type: NRG; PAM sequence: TGG
acagaaggaaagcaagcaaa

SEQ ID NO: 151946 - DNA, 20 bp, Artificial Sequence
  Description of Artificial Sequence: Synthetic oligonucleotide
  Target: LAMA2; (+) strand; PAM type: NRG; PAM sequence: CGG
aagcaagcaaatggaatatt

SEQ ID NO: 151947 - DNA, 20 bp, Artificial Sequence
  Description of Artificial Sequence: Synthetic oligonucleotide
  Target: LAMA2; (+) strand; PAM type: NRG; PAM sequence: TAG
caagcaaatggaatattcgg

SEQ ID NO: 151948 - DNA, 20 bp, Artificial Sequence
  Description of Artificial Sequence: Synthetic oligonucleotide
  Target: LAMA2; (+) strand; PAM type: NRG; PAM sequence: CAG
aatggaatattcggtagaat

SEQ ID NO: 151949 - DNA, 20 bp, Artificial Sequence
  Description of Artificial Sequence: Synthetic oligonucleotide
  Target: LAMA2; (+) strand; PAM type: NRG; PAM sequence: AAG
tattcggtagaatcagaaca

SEQ ID NO: 151950 - DNA, 20 bp, Artificial Sequence
  Description of Artificial Sequence: Synthetic oligonucleotide
  Target: LAMA2; (+) strand; PAM type: NRG; PAM sequence: TGG
tagaatcagaacaaagaatt

SEQ ID NO: 151951 - DNA, 20 bp, Artificial Sequence
  Description of Artificial Sequence: Synthetic oligonucleotide
  Target: LAMA2; (+) strand; PAM type: NRG; PAM sequence: TAG
aaagaatttggacatcccat

SEQ ID NO: 151952 - DNA, 20 bp, Artificial Sequence
  Description of Artificial Sequence: Synthetic oligonucleotide
  Target: LAMA2; (+) strand; PAM type: NRG; PAM sequence: TAG
gaatttggacatcccattag

SEQ ID NO: 151953 - DNA, 20 bp, Artificial Sequence
  Description of Artificial Sequence: Synthetic oligonucleotide
  Target: LAMA2; (+) strand; PAM type: NRG; PAM sequence: TGG
gacatcccattagtagttgt

SEQ ID NO: 151954 - DNA, 20 bp, Artificial Sequence
  Description of Artificial Sequence: Synthetic oligonucleotide
  Target: LAMA2; (+) strand; PAM type: NRG; PAM sequence: AAG
ttagtagttgttggttcccg

SEQ ID NO: 151955 - DNA, 20 bp, Artificial Sequence
  Description of Artificial Sequence: Synthetic oligonucleotide
  Target: LAMA2; (+) strand; PAM type: NRG; PAM sequence: TGG
gaagataacttcccttatcc

SEQ ID NO: 151956 - DNA, 20 bp, Artificial Sequence
  Description of Artificial Sequence: Synthetic oligonucleotide
  Target: LAMA2; (+) strand; PAM type: NRG; PAM sequence: CAG
aatatttttcttataaccca

SEQ ID NO: 151957 - DNA, 20 bp, Artificial Sequence
  Description of Artificial Sequence: Synthetic oligonucleotide
  Target: LAMA2; (+) strand; PAM type: NRG; PAM sequence: AAG
ttttcttataacccacagtg

SEQ ID NO: 151958 - DNA, 20 bp, Artificial Sequence
  Description of Artificial Sequence: Synthetic oligonucleotide
  Target: LAMA2; (+) strand; PAM type: NRG; PAM sequence: CAG
cctgtactgccgtttccatt

SEQ ID NO: 151959 - DNA, 20 bp, Artificial Sequence
  Description of Artificial Sequence: Synthetic oligonucleotide
  Target: LAMA2; (+) strand; PAM type: NRG; PAM sequence: CAG
agtgaacaaaataacattaa

SEQ ID NO: 151960 - DNA, 20 bp, Artificial Sequence
  Description of Artificial Sequence: Synthetic oligonucleotide
  Target: LAMA2; (+) strand; PAM type: NRG; PAM sequence: AGG
gtgaacaaaataacattaac

SEQ ID NO: 151961 - DNA, 20 bp, Artificial Sequence
  Description of Artificial Sequence: Synthetic oligonucleotide
  Target: LAMA2; (+) strand; PAM type: NRG; PAM sequence: GGG
tgaacaaaataacattaaca

SEQ ID NO: 151962 - DNA, 20 bp, Artificial Sequence
  Description of Artificial Sequence: Synthetic oligonucleotide
  Target: LAMA2; (+) strand; PAM type: NRG; PAM sequence: CGG
gtgtgcaaattgtttgaata

SEQ ID NO: 151963 - DNA, 20 bp, Artificial Sequence
  Description of Artificial Sequence: Synthetic oligonucleotide
  Target: LAMA2; (+) strand; PAM type: NRG; PAM sequence: GAG
gtgcaaattgtttgaatacg

SEQ ID NO: 151964 - DNA, 20 bp, Artificial Sequence
  Description of Artificial Sequence: Synthetic oligonucleotide
  Target: LAMA2; (+) strand; PAM type: NRG; PAM sequence: AGG
tgcaaattgtttgaatacgg

SEQ ID NO: 151965 - DNA, 20 bp, Artificial Sequence
  Description of Artificial Sequence: Synthetic oligonucleotide
  Target: LAMA2; (+) strand; PAM type: NRG; PAM sequence: TGG
aggacatttttaatgtaacg

SEQ ID NO: 151966 - DNA, 20 bp, Artificial Sequence
  Description of Artificial Sequence: Synthetic oligonucleotide
  Target: LAMA2; (+) strand; PAM type: NRG; PAM sequence: AAG
acatttttaatgtaacgtgg

SEQ ID NO: 151967 - DNA, 20 bp, Artificial Sequence
  Description of Artificial Sequence: Synthetic oligonucleotide
  Target: LAMA2; (+) strand; PAM type: NRG; PAM sequence: TGG
taatgtaacgtggaagccct

SEQ ID NO: 151968 - DNA, 20 bp, Artificial Sequence
  Description of Artificial Sequence: Synthetic oligonucleotide
  Target: LAMA2; (+) strand; PAM type: NRG; PAM sequence: TGG
tgtaacgtggaagcccttgg

SEQ ID NO: 151969 - DNA, 20 bp, Artificial Sequence
  Description of Artificial Sequence: Synthetic oligonucleotide
  Target: LAMA2; (+) strand; PAM type: NRG; PAM sequence: CAG
agcccttggtggtttactgt

SEQ ID NO: 151970 - DNA, 20 bp, Artificial Sequence
  Description of Artificial Sequence: Synthetic oligonucleotide
  Target: LAMA2; (+) strand; PAM type: NRG; PAM sequence: AGG
gcccttggtggtttactgtc

SEQ ID NO: 151971 - DNA, 20 bp, Artificial Sequence
  Description of Artificial Sequence: Synthetic oligonucleotide
  Target: LAMA2; (+) strand; PAM type: NRG; PAM sequence: CAG
tggtttactgtcaggcatct

SEQ ID NO: 151972 - DNA, 20 bp, Artificial Sequence
  Description of Artificial Sequence: Synthetic oligonucleotide
  Target: LAMA2; (+) strand; PAM type: NRG; PAM sequence: AAG
tgatactacaataatactgc

SEQ ID NO: 151973 - DNA, 20 bp, Artificial Sequence
  Description of Artificial Sequence: Synthetic oligonucleotide
  Target: LAMA2; (+) strand; PAM type: NRG; PAM sequence: CAG
acaataatactgcaagctct

SEQ ID NO: 151974 - DNA, 20 bp, Artificial Sequence
  Description of Artificial Sequence: Synthetic oligonucleotide
  Target: LAMA2; (+) strand; PAM type: NRG; PAM sequence: CAG
caagctctcagaaattacca

SEQ ID NO: 151975 - DNA, 20 bp, Artificial Sequence
  Description of Artificial Sequence: Synthetic oligonucleotide
  Target: LAMA2; (+) strand; PAM type: NRG; PAM sequence: TAG
atgtcacatcacgtaaatta

SEQ ID NO: 151976 - DNA, 20 bp, Artificial Sequence
  Description of Artificial Sequence: Synthetic oligonucleotide
  Target: LAMA2; (+) strand; PAM type: NRG; PAM sequence: TAG
tatagtcatgatgacatgct

SEQ ID NO: 151977 - DNA, 20 bp, Artificial Sequence
  Description of Artificial Sequence: Synthetic oligonucleotide
  Target: LAMA2; (+) strand; PAM type: NRG; PAM sequence: TGG
tcatgatgacatgcttagct

SEQ ID NO: 151978 - DNA, 20 bp, Artificial Sequence
  Description of Artificial Sequence: Synthetic oligonucleotide
  Target: LAMA2; (+) strand; PAM type: NRG; PAM sequence: AAG
ggttgatttaatatcttgct

SEQ ID NO: 151979 - DNA, 20 bp, Artificial Sequence
  Description of Artificial Sequence: Synthetic oligonucleotide
  Target: LAMA2; (+) strand; PAM type: NRG; PAM sequence: AGG
gttgatttaatatcttgcta

SEQ ID NO: 151980 - DNA, 20 bp, Artificial Sequence
  Description of Artificial Sequence: Synthetic oligonucleotide
  Target: LAMA2; (+) strand; PAM type: NRG; PAM sequence: AAG
gatttaatatcttgctaagg

SEQ ID NO: 151981 - DNA, 20 bp, Artificial Sequence
  Description of Artificial Sequence: Synthetic oligonucleotide
  Target: LAMA2; (+) strand; PAM type: NRG; PAM sequence: TGG
ttaatatcttgctaaggaag

SEQ ID NO: 151982 - DNA, 20 bp, Artificial Sequence
  Description of Artificial Sequence: Synthetic oligonucleotide
  Target: LAMA2; (+) strand; PAM type: NRG; PAM sequence: TAG
gctaaggaagtggaaaattg

SEQ ID NO: 151983 - DNA, 20 bp, Artificial Sequence
  Description of Artificial Sequence: Synthetic oligonucleotide
  Target: LAMA2; (+) strand; PAM type: NRG; PAM sequence: AGG
ctaaggaagtggaaaattgt

SEQ ID NO: 151984 - DNA, 20 bp, Artificial Sequence
  Description of Artificial Sequence: Synthetic oligonucleotide
  Target: LAMA2; (+) strand; PAM type: NRG; PAM sequence: GGG
taaggaagtggaaaattgta

SEQ ID NO: 151985 - DNA, 20 bp, Artificial Sequence
  Description of Artificial Sequence: Synthetic oligonucleotide
  Target: LAMA2; (+) strand; PAM type: NRG; PAM sequence: TGG
ggaaaattgtagggccttgt

SEQ ID NO: 151986 - DNA, 20 bp, Artificial Sequence
  Description of Artificial Sequence: Synthetic oligonucleotide
  Target: LAMA2; (+) strand; PAM type: NRG; PAM sequence: AAG
ccttgttggtaaattcaata

SEQ ID NO: 151987 - DNA, 20 bp, Artificial Sequence
  Description of Artificial Sequence: Synthetic oligonucleotide
  Target: LAMA2; (+) strand; PAM type: NRG; PAM sequence: TAG
aataaagccacttttctaaa

SEQ ID NO: 151988 - DNA, 20 bp, Artificial Sequence
  Description of Artificial Sequence: Synthetic oligonucleotide
  Target: LAMA2; (+) strand; PAM type: NRG; PAM sequence: GAG
agccacttttctaaatagtt

SEQ ID NO: 151989 - DNA, 20 bp, Artificial Sequence
  Description of Artificial Sequence: Synthetic oligonucleotide
  Target: LAMA2; (+) strand; PAM type: NRG; PAM sequence: AGG
gccacttttctaaatagttg

SEQ ID NO: 151990 - DNA, 20 bp, Artificial Sequence
  Description of Artificial Sequence: Synthetic oligonucleotide
  Target: LAMA2; (+) strand; PAM type: NRG; PAM sequence: CAG
gttgaggctaaattctttac

SEQ ID NO: 151991 - DNA, 20 bp, Artificial Sequence
  Description of Artificial Sequence: Synthetic oligonucleotide
  Target: LAMA2; (+) strand; PAM type: NRG; PAM sequence: CAG
ccagtaattgctgttcgaat

SEQ ID NO: 151992 - DNA, 20 bp, Artificial Sequence
  Description of Artificial Sequence: Synthetic oligonucleotide
  Target: LAMA2; (+) strand; PAM type: NRG; PAM sequence: CAG
gttcgaatcagaaccattgc

SEQ ID NO: 151993 - DNA, 20 bp, Artificial Sequence
  Description of Artificial Sequence: Synthetic oligonucleotide
  Target: LAMA2; (+) strand; PAM type: NRG; PAM sequence: CAG
gaaccattgccagaatctga

SEQ ID NO: 151994 - DNA, 20 bp, Artificial Sequence
  Description of Artificial Sequence: Synthetic oligonucleotide
  Target: LAMA2; (+) strand; PAM type: NRG; PAM sequence: TAG
ttgccagaatctgacagaaa

SEQ ID NO: 151995 - DNA, 20 bp, Artificial Sequence
  Description of Artificial Sequence: Synthetic oligonucleotide
  Target: LAMA2; (+) strand; PAM type: NRG; PAM sequence: AAG
tctgacagaaatagcgtatc

SEQ ID NO: 151996 - DNA, 20 bp, Artificial Sequence
  Description of Artificial Sequence: Synthetic oligonucleotide
  Target: LAMA2; (+) strand; PAM type: NRG; PAM sequence: AAG
gaaatagcgtatcaagatac

SEQ ID NO: 151997 - DNA, 20 bp, Artificial Sequence
  Description of Artificial Sequence: Synthetic oligonucleotide
  Target: LAMA2; (+) strand; PAM type: NRG; PAM sequence: CAG
attttatttacatccatgac

SEQ ID NO: 151998 - DNA, 20 bp, Artificial Sequence
  Description of Artificial Sequence: Synthetic oligonucleotide
  Target: LAMA2; (+) strand; PAM type: NRG; PAM sequence: AGG
ttttatttacatccatgacc

SEQ ID NO: 151999 - DNA, 20 bp, Artificial Sequence
  Description of Artificial Sequence: Synthetic oligonucleotide
  Target: LAMA2; (+) strand; PAM type: NRG; PAM sequence: GAG
ttatttacatccatgaccag

SEQ ID NO: 152000 - DNA, 20 bp, Artificial Sequence
  Description of Artificial Sequence: Synthetic oligonucleotide
  Target: LAMA2; (+) strand; PAM type: NRG; PAM sequence: TGG
catccatgaccaggagtcta

SEQ ID NO: 152001 - DNA, 20 bp, Artificial Sequence
  Description of Artificial Sequence: Synthetic oligonucleotide
  Target: LAMA2; (+) strand; PAM type: NRG; PAM sequence: TAG
taatccttcctctgcttttt

SEQ ID NO: 152002 - DNA, 20 bp, Artificial Sequence
  Description of Artificial Sequence: Synthetic oligonucleotide
  Target: LAMA2; (+) strand; PAM type: NRG; PAM sequence: TGG
ttttagtgttatttcctaat

SEQ ID NO: 152003 - DNA, 20 bp, Artificial Sequence
  Description of Artificial Sequence: Synthetic oligonucleotide
  Target: LAMA2; (+) strand; PAM type: NRG; PAM sequence: GAG
tcctaattggaaaaaattat

SEQ ID NO: 152004 - DNA, 20 bp, Artificial Sequence
  Description of Artificial Sequence: Synthetic oligonucleotide
  Target: LAMA2; (+) strand; PAM type: NRG; PAM sequence: TAG
aaaaaattatgagatgctat

SEQ ID NO: 152005 - DNA, 20 bp, Artificial Sequence
  Description of Artificial Sequence: Synthetic oligonucleotide
  Target: LAMA2; (+) strand; PAM type: NRG; PAM sequence: CAG
ttttcctaaatatttatata

SEQ ID NO: 152006 - DNA, 20 bp, Artificial Sequence
  Description of Artificial Sequence: Synthetic oligonucleotide
  Target: LAMA2; (+) strand; PAM type: NRG; PAM sequence: AAG
cagactttcaaacattttcc

SEQ ID NO: 152007 - DNA, 20 bp, Artificial Sequence
  Description of Artificial Sequence: Synthetic oligonucleotide
  Target: LAMA2; (+) strand; PAM type: NRG; PAM sequence: TGG
caaacattttccaagttgct

SEQ ID NO: 152008 - DNA, 20 bp, Artificial Sequence
  Description of Artificial Sequence: Synthetic oligonucleotide
  Target: LAMA2; (+) strand; PAM type: NRG; PAM sequence: AAG
tttccaagttgcttggttat

SEQ ID NO: 152009 - DNA, 20 bp, Artificial Sequence
  Description of Artificial Sequence: Synthetic oligonucleotide
  Target: LAMA2; (+) strand; PAM type: NRG; PAM sequence: AGG
ttccaagttgcttggttata

SEQ ID NO: 152010 - DNA, 20 bp, Artificial Sequence
  Description of Artificial Sequence: Synthetic oligonucleotide
  Target: LAMA2; (+) strand; PAM type: NRG; PAM sequence: CAG
ggttataaggcttcttctaa

SEQ ID NO: 152011 - DNA, 20 bp, Artificial Sequence
  Description of Artificial Sequence: Synthetic oligonucleotide
  Target: LAMA2; (+) strand; PAM type: NRG; PAM sequence: AAG
tataaggcttcttctaacag

SEQ ID NO: 152012 - DNA, 20 bp, Artificial Sequence
  Description of Artificial Sequence: Synthetic oligonucleotide
  Target: LAMA2; (+) strand; PAM type: NRG; PAM sequence: AGG
ataaggcttcttctaacaga

SEQ ID NO: 152013 - DNA, 20 bp, Artificial Sequence
  Description of Artificial Sequence: Synthetic oligonucleotide
  Target: LAMA2; (+) strand; PAM type: NRG; PAM sequence: GGG
taaggcttcttctaacagaa

SEQ ID NO: 152014 - DNA, 20 bp, Artificial Sequence
  Description of Artificial Sequence: Synthetic oligonucleotide
  Target: LAMA2; (+) strand; PAM type: NRG; PAM sequence: TGG
ctgtgcatgttctcttataa

SEQ ID NO: 152015 - DNA, 20 bp, Artificial Sequence
  Description of Artificial Sequence: Synthetic oligonucleotide
  Target: LAMA2; (+) strand; PAM type: NRG; PAM sequence: GAG
gtgcatgttctcttataatg

SEQ ID NO: 152016 - DNA, 20 bp, Artificial Sequence
  Description of Artificial Sequence: Synthetic oligonucleotide
  Target: LAMA2; (+) strand; PAM type: NRG; PAM sequence: TAG
acatgctgttattctttttt

SEQ ID NO: 152017 - DNA, 20 bp, Artificial Sequence
  Description of Artificial Sequence: Synthetic oligonucleotide
  Target: LAMA2; (+) strand; PAM type: NRG; PAM sequence: AGG
catgctgttattcttttttt

SEQ ID NO: 152018 - DNA, 20 bp, Artificial Sequence
  Description of Artificial Sequence: Synthetic oligonucleotide
  Target: LAMA2; (+) strand; PAM type: NRG; PAM sequence: GAG
tgctgttattctttttttag

SEQ ID NO: 152019 - DNA, 20 bp, Artificial Sequence
  Description of Artificial Sequence: Synthetic oligonucleotide
  Target: LAMA2; (+) strand; PAM type: NRG; PAM sequence: AAG
agcctaatcccaaataataa

SEQ ID NO: 152020 - DNA, 20 bp, Artificial Sequence
  Description of Artificial Sequence: Synthetic oligonucleotide
  Target: LAMA2; (+) strand; PAM type: NRG; PAM sequence: TGG
ctaatcccaaataataaaag

SEQ ID NO: 152021 - DNA, 20 bp, Artificial Sequence
  Description of Artificial Sequence: Synthetic oligonucleotide
  Target: LAMA2; (+) strand; PAM type: NRG; PAM sequence: TGG
aataataaaagtggctcaca

SEQ ID NO: 152022 - DNA, 20 bp, Artificial Sequence
  Description of Artificial Sequence: Synthetic oligonucleotide
  Target: LAMA2; (+) strand; PAM type: NRG; PAM sequence: GGG
ataataaaagtggctcacat

SEQ ID NO: 152023 - DNA, 20 bp, Artificial Sequence
  Description of Artificial Sequence: Synthetic oligonucleotide
  Target: LAMA2; (+) strand; PAM type: NRG; PAM sequence: TGG
gggacacatttttgctaaca

SEQ ID NO: 152024 - DNA, 20 bp, Artificial Sequence
  Description of Artificial Sequence: Synthetic oligonucleotide
  Target: LAMA2; (+) strand; PAM type: NRG; PAM sequence: TGG
tgctaacatggatgtctgcc

SEQ ID NO: 152025 - DNA, 20 bp, Artificial Sequence
  Description of Artificial Sequence: Synthetic oligonucleotide
  Target: LAMA2; (+) strand; PAM type: NRG; PAM sequence: AAG
gcctggttgtaataaaactc

SEQ ID NO: 152026 - DNA, 20 bp, Artificial Sequence
  Description of Artificial Sequence: Synthetic oligonucleotide
  Target: LAMA2; (+) strand; PAM type: NRG; PAM sequence: TAG
gtaataaaactcaagaatac

SEQ ID NO: 152027 - DNA, 20 bp, Artificial Sequence
  Description of Artificial Sequence: Synthetic oligonucleotide
  Target: LAMA2; (+) strand; PAM type: NRG; PAM sequence: TAG
ctcaagaatactagccaatt

SEQ ID NO: 152028 - DNA, 20 bp, Artificial Sequence
  Description of Artificial Sequence: Synthetic oligonucleotide
  Target: LAMA2; (+) strand; PAM type: NRG; PAM sequence: AAG
gaatactagccaatttagca

SEQ ID NO: 152029 - DNA, 20 bp, Artificial Sequence
  Description of Artificial Sequence: Synthetic oligonucleotide
  Target: LAMA2; (+) strand; PAM type: NRG; PAM sequence: AGG
aatactagccaatttagcaa

SEQ ID NO: 152030 - DNA, 20 bp, Artificial Sequence
  Description of Artificial Sequence: Synthetic oligonucleotide
  Target: LAMA2; (+) strand; PAM type: NRG; PAM sequence: GAG
tactagccaatttagcaaag

SEQ ID NO: 152031 - DNA, 20 bp, Artificial Sequence
  Description of Artificial Sequence: Synthetic oligonucleotide
  Target: LAMA2; (+) strand; PAM type: NRG; PAM sequence: TGG
ttttcacatttttactgttt

SEQ ID NO: 152032 - DNA, 20 bp, Artificial Sequence
  Description of Artificial Sequence: Synthetic oligonucleotide
  Target: LAMA2; (+) strand; PAM type: NRG; PAM sequence: AAG
tttactgttttggaataatg

SEQ ID NO: 152033 - DNA, 20 bp, Artificial Sequence
  Description of Artificial Sequence: Synthetic oligonucleotide
  Target: LAMA2; (+) strand; PAM type: NRG; PAM sequence: AAG
gttttggaataatgaagtat

SEQ ID NO: 152034 - DNA, 20 bp, Artificial Sequence
  Description of Artificial Sequence: Synthetic oligonucleotide
  Target: LAMA2; (+) strand; PAM type: NRG; PAM sequence: AAG
tggaataatgaagtataagt

SEQ ID NO: 152035 - DNA, 20 bp, Artificial Sequence
  Description of Artificial Sequence: Synthetic oligonucleotide
  Target: LAMA2; (+) strand; PAM type: NRG; PAM sequence: AAG
aagtataagtaagtgattat

SEQ ID NO: 152036 - DNA, 20 bp, Artificial Sequence
  Description of Artificial Sequence: Synthetic oligonucleotide
  Target: LAMA2; (+) strand; PAM type: NRG; PAM sequence: TGG
agtgattataagtgtatgtg

SEQ ID NO: 152037 - DNA, 20 bp, Artificial Sequence
  Description of Artificial Sequence: Synthetic oligonucleotide
  Target: LAMA2; (+) strand; PAM type: NRG; PAM sequence: TGG
ataagtgtatgtgtggataa

SEQ ID NO: 152038 - DNA, 20 bp, Artificial Sequence
  Description of Artificial Sequence: Synthetic oligonucleotide
  Target: LAMA2; (+) strand; PAM type: NRG; PAM sequence: GAG
tgtatgtgtggataatggat

SEQ ID NO: 152039 - DNA, 20 bp, Artificial Sequence
  Description of Artificial Sequence: Synthetic oligonucleotide
  Target: LAMA2; (+) strand; PAM type: NRG; PAM sequence: AGG
gtatgtgtggataatggatg

SEQ ID NO: 152040 - DNA, 20 bp, Artificial Sequence
  Description of Artificial Sequence: Synthetic oligonucleotide
  Target: LAMA2; (+) strand; PAM type: NRG; PAM sequence: TAG
tgtggataatggatgaggcc

SEQ ID NO: 152041 - DNA, 20 bp, Artificial Sequence
  Description of Artificial Sequence: Synthetic oligonucleotide
  Target: LAMA2; (+) strand; PAM type: NRG; PAM sequence: AGG
gtggataatggatgaggcct

SEQ ID NO: 152042 - DNA, 20 bp, Artificial Sequence
  Description of Artificial Sequence: Synthetic oligonucleotide
  Target: LAMA2; (+) strand; PAM type: NRG; PAM sequence: TAG
ggatgaggcctaggaaaact

SEQ ID NO: 152043 - DNA, 20 bp, Artificial Sequence
  Description of Artificial Sequence: Synthetic oligonucleotide
  Target: LAMA2; (+) strand; PAM type: NRG; PAM sequence: CAG
ttctatttttgaaattccca

SEQ ID NO: 152044 - DNA, 20 bp, Artificial Sequence
  Description of Artificial Sequence: Synthetic oligonucleotide
  Target: LAMA2; (+) strand; PAM type: NRG; PAM sequence: CAG
ttttgaaattcccacagtct

SEQ ID NO: 152045 - DNA, 20 bp, Artificial Sequence
  Description of Artificial Sequence: Synthetic oligonucleotide
  Target: LAMA2; (+) strand; PAM type: NRG; PAM sequence: TAG
gaaattcccacagtctcagc

SEQ ID NO: 152046 - DNA, 20 bp, Artificial Sequence
  Description of Artificial Sequence: Synthetic oligonucleotide
  Target: LAMA2; (+) strand; PAM type: NRG; PAM sequence: AGG
aaattcccacagtctcagct

SEQ ID NO: 152047 - DNA, 20 bp, Artificial Sequence
  Description of Artificial Sequence: Synthetic oligonucleotide
  Target: LAMA2; (+) strand; PAM type: NRG; PAM sequence: GAG
attcccacagtctcagctag

SEQ ID NO: 152048 - DNA, 20 bp, Artificial Sequence
  Description of Artificial Sequence: Synthetic oligonucleotide
  Target: LAMA2; (+) strand; PAM type: NRG; PAM sequence: CAG
caattttttcccctatgtac

SEQ ID NO: 152049 - DNA, 20 bp, Artificial Sequence
  Description of Artificial Sequence: Synthetic oligonucleotide
  Target: LAMA2; (+) strand; PAM type: NRG; PAM sequence: TGG
cctatgtaccagtgaatatt

SEQ ID NO: 152050 - DNA, 20 bp, Artificial Sequence
  Description of Artificial Sequence: Synthetic oligonucleotide
  Target: LAMA2; (+) strand; PAM type: NRG; PAM sequence: TGG
cagtgaatatttggcacaac

SEQ ID NO: 152051 - DNA, 20 bp, Artificial Sequence
  Description of Artificial Sequence: Synthetic oligonucleotide
  Target: LAMA2; (+) strand; PAM type: NRG; PAM sequence: CAG
tgaatatttggcacaactgg

SEQ ID NO: 152052 - DNA, 20 bp, Artificial Sequence
  Description of Artificial Sequence: Synthetic oligonucleotide
  Target: LAMA2; (+) strand; PAM type: NRG; PAM sequence: AAG
ttggcacaactggcagaatc

SEQ ID NO: 152053 - DNA, 20 bp, Artificial Sequence
  Description of Artificial Sequence: Synthetic oligonucleotide
  Target: LAMA2; (+) strand; PAM type: NRG; PAM sequence: TAG
ttttcccgcctcgttcttga

SEQ ID NO: 152054 - DNA, 20 bp, Artificial Sequence
  Description of Artificial Sequence: Synthetic oligonucleotide
  Target: LAMA2; (+) strand; PAM type: NRG; PAM sequence: AAG
cgcctcgttcttgatagtca

SEQ ID NO: 152055 - DNA, 20 bp, Artificial Sequence
  Description of Artificial Sequence: Synthetic oligonucleotide
  Target: LAMA2; (+) strand; PAM type: NRG; PAM sequence: GAG
cctcgttcttgatagtcaaa

SEQ ID NO: 152056 - DNA, 20 bp, Artificial Sequence
  Description of Artificial Sequence: Synthetic oligonucleotide
  Target: LAMA2; (+) strand; PAM type: NRG; PAM sequence: CAG
atagtcaaagagaattaaat

SEQ ID NO: 152057 - DNA, 20 bp, Artificial Sequence
  Description of Artificial Sequence: Synthetic oligonucleotide
  Target: LAMA2; (+) strand; PAM type: NRG; PAM sequence: AGG
tagtcaaagagaattaaatc

SEQ ID NO: 152058 - DNA, 20 bp, Artificial Sequence
  Description of Artificial Sequence: Synthetic oligonucleotide
  Target: LAMA2; (+) strand; PAM type: NRG; PAM sequence: CAG
agaattaaatcaggcaccca

SEQ ID NO: 152059 - DNA, 20 bp, Artificial Sequence
  Description of Artificial Sequence: Synthetic oligonucleotide
  Target: LAMA2; (+) strand; PAM type: NRG; PAM sequence: AGG
gaattaaatcaggcacccac

SEQ ID NO: 152060 - DNA, 20 bp, Artificial Sequence
  Description of Artificial Sequence: Synthetic oligonucleotide
  Target: LAMA2; (+) strand; PAM type: NRG; PAM sequence: GGG
aattaaatcaggcacccaca

SEQ ID NO: 152061 - DNA, 20 bp, Artificial Sequence
  Description of Artificial Sequence: Synthetic oligonucleotide
  Target: LAMA2; (+) strand; PAM type: NRG; PAM sequence: TAG
aggcacccacagggctatcc

SEQ ID NO: 152062 - DNA, 20 bp, Artificial Sequence
  Description of Artificial Sequence: Synthetic oligonucleotide
  Target: LAMA2; (+) strand; PAM type: NRG; PAM sequence: AGG
ggcacccacagggctatcct

SEQ ID NO: 152063 - DNA, 20 bp, Artificial Sequence
  Description of Artificial Sequence: Synthetic oligonucleotide
  Target: LAMA2; (+) strand; PAM type: NRG; PAM sequence: TGG
catttcattttcaaaatgct

SEQ ID NO: 152064 - DNA, 20 bp, Artificial Sequence
  Description of Artificial Sequence: Synthetic oligonucleotide
  Target: LAMA2; (+) strand; PAM type: NRG; PAM sequence: TGG
gcttggcaaatgttaatgct

SEQ ID NO: 152065 - DNA, 20 bp, Artificial Sequence
  Description of Artificial Sequence: Synthetic oligonucleotide
  Target: LAMA2; (+) strand; PAM type: NRG; PAM sequence: TAG
caaatgttaatgcttggttt

SEQ ID NO: 152066 - DNA, 20 bp, Artificial Sequence
  Description of Artificial Sequence: Synthetic oligonucleotide
  Target: LAMA2; (+) strand; PAM type: NRG; PAM sequence: AGG
aaatgttaatgcttggtttt

SEQ ID NO: 152067 - DNA, 20 bp, Artificial Sequence
  Description of Artificial Sequence: Synthetic oligonucleotide
  Target: LAMA2; (+) strand; PAM type: NRG; PAM sequence: GGG
aatgttaatgcttggtttta

SEQ ID NO: 152068 - DNA, 20 bp, Artificial Sequence
  Description of Artificial Sequence: Synthetic oligonucleotide
  Target: LAMA2; (+) strand; PAM type: NRG; PAM sequence: AAG
tggttttagggcatttgttt

SEQ ID NO: 152069 - DNA, 20 bp, Artificial Sequence
  Description of Artificial Sequence: Synthetic oligonucleotide
  Target: LAMA2; (+) strand; PAM type: NRG; PAM sequence: TAG
agggcatttgtttaagcaac

SEQ ID NO: 152070 - DNA, 20 bp, Artificial Sequence
  Description of Artificial Sequence: Synthetic oligonucleotide
  Target: LAMA2; (+) strand; PAM type: NRG; PAM sequence: AGG
gggcatttgtttaagcaact

SEQ ID NO: 152071 - DNA, 20 bp, Artificial Sequence
  Description of Artificial Sequence: Synthetic oligonucleotide
  Target: LAMA2; (+) strand; PAM type: NRG; PAM sequence: CAG
catttgtttaagcaactagg

SEQ ID NO: 152072 - DNA, 20 bp, Artificial Sequence
  Description of Artificial Sequence: Synthetic oligonucleotide
  Target: LAMA2; (+) strand; PAM type: NRG; PAM sequence: CAG
ttgtttaagcaactaggcag

SEQ ID NO: 152073 - DNA, 20 bp, Artificial Sequence
  Description of Artificial Sequence: Synthetic oligonucleotide
  Target: LAMA2; (+) strand; PAM type: NRG; PAM sequence: TGG
tttaagcaactaggcagcag

SEQ ID NO: 152074 - DNA, 20 bp, Artificial Sequence
  Description of Artificial Sequence: Synthetic oligonucleotide
  Target: LAMA2; (+) strand; PAM type: NRG; PAM sequence: AAG
agcaactaggcagcagtgga

SEQ ID NO: 152075 - DNA, 20 bp, Artificial Sequence
  Description of Artificial Sequence: Synthetic oligonucleotide
  Target: LAMA2; (+) strand; PAM type: NRG; PAM sequence: GAG
caactaggcagcagtggaaa

SEQ ID NO: 152076 - DNA, 20 bp, Artificial Sequence
  Description of Artificial Sequence: Synthetic oligonucleotide
  Target: LAMA2; (+) strand; PAM type: NRG; PAM sequence: TAG
taggcagcagtggaaagagc

SEQ ID NO: 152077 - DNA, 20 bp, Artificial Sequence
  Description of Artificial Sequence: Synthetic oligonucleotide
  Target: LAMA2; (+) strand; PAM type: NRG; PAM sequence: GAG
ggcagcagtggaaagagcta

SEQ ID NO: 152078 - DNA, 20 bp, Artificial Sequence
  Description of Artificial Sequence: Synthetic oligonucleotide
  Target: LAMA2; (+) strand; PAM type: NRG; PAM sequence: AGG
gcagcagtggaaagagctag

SEQ ID NO: 152079 - DNA, 20 bp, Artificial Sequence
  Description of Artificial Sequence: Synthetic oligonucleotide
  Target: LAMA2; (+) strand; PAM type: NRG; PAM sequence: AAG
gtggaaagagctagaggaca

SEQ ID NO: 152080 - DNA, 20 bp, Artificial Sequence
  Description of Artificial Sequence: Synthetic oligonucleotide
  Target: LAMA2; (+) strand; PAM type: NRG; PAM sequence: TGG
tagaggacaaagaatcctgc

SEQ ID NO: 152081 - DNA, 20 bp, Artificial Sequence
  Description of Artificial Sequence: Synthetic oligonucleotide
  Target: LAMA2; (+) strand; PAM type: NRG; PAM sequence: CAG
agaatcctgctggtttgctg

SEQ ID NO: 152082 - DNA, 20 bp, Artificial Sequence
  Description of Artificial Sequence: Synthetic oligonucleotide
  Target: LAMA2; (+) strand; PAM type: NRG; PAM sequence: AGG
gaatcctgctggtttgctgc

SEQ ID NO: 152083 - DNA, 20 bp, Artificial Sequence
  Description of Artificial Sequence: Synthetic oligonucleotide
  Target: LAMA2; (+) strand; PAM type: NRG; PAM sequence: CAG
tgctggtttgctgcaggcta

SEQ ID NO: 152084 - DNA, 20 bp, Artificial Sequence
  Description of Artificial Sequence: Synthetic oligonucleotide
  Target: LAMA2; (+) strand; PAM type: NRG; PAM sequence: CAG
tgctgcaggctacagctatt

SEQ ID NO: 152085 - DNA, 20 bp, Artificial Sequence
  Description of Artificial Sequence: Synthetic oligonucleotide
  Target: LAMA2; (+) strand; PAM type: NRG; PAM sequence: CAG
aggctacagctattcagaaa

SEQ ID NO: 152086 - DNA, 20 bp, Artificial Sequence
  Description of Artificial Sequence: Synthetic oligonucleotide
  Target: LAMA2; (+) strand; PAM type: NRG; PAM sequence: TGG
acagctattcagaaacagtt

SEQ ID NO: 152087 - DNA, 20 bp, Artificial Sequence
  Description of Artificial Sequence: Synthetic oligonucleotide
  Target: LAMA2; (+) strand; PAM type: NRG; PAM sequence: GGG
cagctattcagaaacagttt

SEQ ID NO: 152088 - DNA, 20 bp, Artificial Sequence
  Description of Artificial Sequence: Synthetic oligonucleotide
  Target: LAMA2; (+) strand; PAM type: NRG; PAM sequence: CAG
cagaaacagtttgggaattt

SEQ ID NO: 152089 - DNA, 20 bp, Artificial Sequence
  Description of Artificial Sequence: Synthetic oligonucleotide
  Target: LAMA2; (+) strand; PAM type: NRG; PAM sequence: GAG
gaaacagtttgggaatttca

SEQ ID NO: 152090 - DNA, 20 bp, Artificial Sequence
  Description of Artificial Sequence: Synthetic oligonucleotide
  Target: LAMA2; (+) strand; PAM type: NRG; PAM sequence: TGG
cagtttgggaatttcagagt

SEQ ID NO: 152091 - DNA, 20 bp, Artificial Sequence
  Description of Artificial Sequence: Synthetic oligonucleotide
  Target: LAMA2; (+) strand; PAM type: NRG; PAM sequence: GGG
agtttgggaatttcagagtt

SEQ ID NO: 152092 - DNA, 20 bp, Artificial Sequence
  Description of Artificial Sequence: Synthetic oligonucleotide
  Target: LAMA2; (+) strand; PAM type: NRG; PAM sequence: TAG
gttgggataatttactgccc

SEQ ID NO: 152093 - DNA, 20 bp, Artificial Sequence
  Description of Artificial Sequence: Synthetic oligonucleotide
  Target: LAMA2; (+) strand; PAM type: NRG; PAM sequence: AAG
atttactgccctagtaaact

SEQ ID NO: 152094 - DNA, 20 bp, Artificial Sequence
  Description of Artificial Sequence: Synthetic oligonucleotide
  Target: LAMA2; (+) strand; PAM type: NRG; PAM sequence: TGG
cctagtaaactaagtgctac

SEQ ID NO: 152095 - DNA, 20 bp, Artificial Sequence
  Description of Artificial Sequence: Synthetic oligonucleotide
  Target: LAMA2; (+) strand; PAM type: NRG; PAM sequence: CAG
gtgctactggaacattgcaa

SEQ ID NO: 152096 - DNA, 20 bp, Artificial Sequence
  Description of Artificial Sequence: Synthetic oligonucleotide
  Target: LAMA2; (+) strand; PAM type: NRG; PAM sequence: AAG
attgcaacagtcatttgctt

SEQ ID NO: 152097 - DNA, 20 bp, Artificial Sequence
  Description of Artificial Sequence: Synthetic oligonucleotide
  Target: LAMA2; (+) strand; PAM type: NRG; PAM sequence: AGG
ttgcaacagtcatttgctta

SEQ ID NO: 152098 - DNA, 20 bp, Artificial Sequence
  Description of Artificial Sequence: Synthetic oligonucleotide
  Target: LAMA2; (+) strand; PAM type: NRG; PAM sequence: TAG
tcatttgcttaaggttgccc

SEQ ID NO: 152099 - DNA, 20 bp, Artificial Sequence
  Description of Artificial Sequence: Synthetic oligonucleotide
  Target: LAMA2; (+) strand; PAM type: NRG; PAM sequence: TGG
tttgcttaaggttgccctag

SEQ ID NO: 152100 - DNA, 20 bp, Artificial Sequence
  Description of Artificial Sequence: Synthetic oligonucleotide
  Target: LAMA2; (+) strand; PAM type: NRG; PAM sequence: TAG
gttgccctagtggtctgaaa

SEQ ID NO: 152101 - DNA, 20 bp, Artificial Sequence
  Description of Artificial Sequence: Synthetic oligonucleotide
  Target: LAMA2; (+) strand; PAM type: NRG; PAM sequence: GAG
cctagtggtctgaaatagtt

SEQ ID NO: 152102 - DNA, 20 bp, Artificial Sequence
  Description of Artificial Sequence: Synthetic oligonucleotide
  Target: LAMA2; (+) strand; PAM type: NRG; PAM sequence: AGG
ctagtggtctgaaatagttg

SEQ ID NO: 152103 - DNA, 20 bp, Artificial Sequence
  Description of Artificial Sequence: Synthetic oligonucleotide
  Target: LAMA2; (+) strand; PAM type: NRG; PAM sequence: CAG
gtggtctgaaatagttgagg

SEQ ID NO: 152104 - DNA, 20 bp, Artificial Sequence
  Description of Artificial Sequence: Synthetic oligonucleotide
  Target: LAMA2; (+) strand; PAM type: NRG; PAM sequence: AAG
atagttgaggcagcttccaa

SEQ ID NO: 152105 - DNA, 20 bp, Artificial Sequence
  Description of Artificial Sequence: Synthetic oligonucleotide
  Target: LAMA2; (+) strand; PAM type: NRG; PAM sequence: AAG
caattctctttgcatctgta

SEQ ID NO: 152106 - DNA, 20 bp, Artificial Sequence
  Description of Artificial Sequence: Synthetic oligonucleotide
  Target: LAMA2; (+) strand; PAM type: NRG; PAM sequence: TGG
tctttgcatctgtaaagttc

SEQ ID NO: 152107 - DNA, 20 bp, Artificial Sequence
  Description of Artificial Sequence: Synthetic oligonucleotide
  Target: LAMA2; (+) strand; PAM type: NRG; PAM sequence: GGG
ctttgcatctgtaaagttct

SEQ ID NO: 152108 - DNA, 20 bp, Artificial Sequence
  Description of Artificial Sequence: Synthetic oligonucleotide
  Target: LAMA2; (+) strand; PAM type: NRG; PAM sequence: GAG
ttgcatctgtaaagttctgg

SEQ ID NO: 152109 - DNA, 20 bp, Artificial Sequence
  Description of Artificial Sequence: Synthetic oligonucleotide
  Target: LAMA2; (+) strand; PAM type: NRG; PAM sequence: AAG
catctgtaaagttctgggag

SEQ ID NO: 152110 - DNA, 20 bp, Artificial Sequence
  Description of Artificial Sequence: Synthetic oligonucleotide
  Target: LAMA2; (+) strand; PAM type: NRG; PAM sequence: TAG
tgtaaagttctgggagaagc

SEQ ID NO: 152111 - DNA, 20 bp, Artificial Sequence
  Description of Artificial Sequence: Synthetic oligonucleotide
  Target: LAMA2; (+) strand; PAM type: NRG; PAM sequence: TGG
agttctgggagaagctagct

SEQ ID NO: 152112 - DNA, 20 bp, Artificial Sequence
  Description of Artificial Sequence: Synthetic oligonucleotide
  Target: LAMA2; (+) strand; PAM type: NRG; PAM sequence: AAG
gctgttcctgcattaccatt

SEQ ID NO: 152113 - DNA, 20 bp, Artificial Sequence
  Description of Artificial Sequence: Synthetic oligonucleotide
  Target: LAMA2; (+) strand; PAM type: NRG; PAM sequence: AGG
ctgttcctgcattaccatta

SEQ ID NO: 152114 - DNA, 20 bp, Artificial Sequence
  Description of Artificial Sequence: Synthetic oligonucleotide
  Target: LAMA2; (+) strand; PAM type: NRG; PAM sequence: CAG
caaaacctgcttattttcta

SEQ ID NO: 152115 - DNA, 20 bp, Artificial Sequence
  Description of Artificial Sequence: Synthetic oligonucleotide
  Target: LAMA2; (+) strand; PAM type: NRG; PAM sequence: TAG
ttatgctatctttctgtttc

SEQ ID NO: 152116 - DNA, 20 bp, Artificial Sequence
  Description of Artificial Sequence: Synthetic oligonucleotide
  Target: LAMA2; (+) strand; PAM type: NRG; PAM sequence: TAG
ctatctttctgtttctagct

SEQ ID NO: 152117 - DNA, 20 bp, Artificial Sequence
  Description of Artificial Sequence: Synthetic oligonucleotide
  Target: LAMA2; (+) strand; PAM type: NRG; PAM sequence: GAG
atctttctgtttctagctta

SEQ ID NO: 152118 - DNA, 20 bp, Artificial Sequence
  Description of Artificial Sequence: Synthetic oligonucleotide
  Target: LAMA2; (+) strand; PAM type: NRG; PAM sequence: AAG
tttctgtttctagcttagag

SEQ ID NO: 152119 - DNA, 20 bp, Artificial Sequence
  Description of Artificial Sequence: Synthetic oligonucleotide
  Target: LAMA2; (+) strand; PAM type: NRG; PAM sequence: TAG
agcctttaaatttgttcata

SEQ ID NO: 152120 - DNA, 20 bp, Artificial Sequence
  Description of Artificial Sequence: Synthetic oligonucleotide
  Target: LAMA2; (+) strand; PAM type: NRG; PAM sequence: AAG
aatttgttcatatagttgcc

SEQ ID NO: 152121 - DNA, 20 bp, Artificial Sequence
  Description of Artificial Sequence: Synthetic oligonucleotide
  Target: LAMA2; (+) strand; PAM type: NRG; PAM sequence: TAG
atagttgccaagaataccta

SEQ ID NO: 152122 - DNA, 20 bp, Artificial Sequence
  Description of Artificial Sequence: Synthetic oligonucleotide
  Target: LAMA2; (+) strand; PAM type: NRG; PAM sequence: TAG
tgccaagaatacctatagtc

SEQ ID NO: 152123 - DNA, 20 bp, Artificial Sequence
  Description of Artificial Sequence: Synthetic oligonucleotide
  Target: LAMA2; (+) strand; PAM type: NRG; PAM sequence: AAG
gaatacctatagtctagttt

SEQ ID NO: 152124 - DNA, 20 bp, Artificial Sequence
  Description of Artificial Sequence: Synthetic oligonucleotide
  Target: LAMA2; (+) strand; PAM type: NRG; PAM sequence: TAG
gtctagtttaagatgcacat

SEQ ID NO: 152125 - DNA, 20 bp, Artificial Sequence
  Description of Artificial Sequence: Synthetic oligonucleotide
  Target: LAMA2; (+) strand; PAM type: NRG; PAM sequence: AGG
tctagtttaagatgcacatt

SEQ ID NO: 152126 - DNA, 20 bp, Artificial Sequence
  Description of Artificial Sequence: Synthetic oligonucleotide
  Target: LAMA2; (+) strand; PAM type: NRG; PAM sequence: GAG
tagtttaagatgcacattag

SEQ ID NO: 152127 - DNA, 20 bp, Artificial Sequence
  Description of Artificial Sequence: Synthetic oligonucleotide
  Target: LAMA2; (+) strand; PAM type: NRG; PAM sequence: GAG
gtttaagatgcacattagga

SEQ ID NO: 152128 - DNA, 20 bp, Artificial Sequence
  Description of Artificial Sequence: Synthetic oligonucleotide
  Target: LAMA2; (+) strand; PAM type: NRG; PAM sequence: TAG
aggagagtctgctgacataa

SEQ ID NO: 152129 - DNA, 20 bp, Artificial Sequence
  Description of Artificial Sequence: Synthetic oligonucleotide
  Target: LAMA2; (+) strand; PAM type: NRG; PAM sequence: TGG
tctgctgacataatagcatc

SEQ ID NO: 152130 - DNA, 20 bp, Artificial Sequence
  Description of Artificial Sequence: Synthetic oligonucleotide
  Target: LAMA2; (+) strand; PAM type: NRG; PAM sequence: AAG
taatagcatctggcttctaa

SEQ ID NO: 152131 - DNA, 20 bp, Artificial Sequence
  Description of Artificial Sequence: Synthetic oligonucleotide
  Target: LAMA2; (+) strand; PAM type: NRG; PAM sequence: TGG
tggcttctaaaagtaatctc

SEQ ID NO: 152132 - DNA, 20 bp, Artificial Sequence
  Description of Artificial Sequence: Synthetic oligonucleotide
  Target: LAMA2; (+) strand; PAM type: NRG; PAM sequence: CGG
tgactttccattctacttca

SEQ ID NO: 152133 - DNA, 20 bp, Artificial Sequence
  Description of Artificial Sequence: Synthetic oligonucleotide
  Target: LAMA2; (+) strand; PAM type: NRG; PAM sequence: AAG
acttcacggatctcaaatta

SEQ ID NO: 152134 - DNA, 20 bp, Artificial Sequence
  Description of Artificial Sequence: Synthetic oligonucleotide
  Target: LAMA2; (+) strand; PAM type: NRG; PAM sequence: TAG
cggatctcaaattaaagcta

SEQ ID NO: 152135 - DNA, 20 bp, Artificial Sequence
  Description of Artificial Sequence: Synthetic oligonucleotide
  Target: LAMA2; (+) strand; PAM type: NRG; PAM sequence: AAG
aaattaaagctatagatttg

SEQ ID NO: 152136 - DNA, 20 bp, Artificial Sequence
  Description of Artificial Sequence: Synthetic oligonucleotide
  Target: LAMA2; (+) strand; PAM type: NRG; PAM sequence: AAG
ttaaagctatagatttgaag

SEQ ID NO: 152137 - DNA, 20 bp, Artificial Sequence
  Description of Artificial Sequence: Synthetic oligonucleotide
  Target: LAMA2; (+) strand; PAM type: NRG; PAM sequence: AGG
taaagctatagatttgaaga

SEQ ID NO: 152138 - DNA, 20 bp, Artificial Sequence
  Description of Artificial Sequence: Synthetic oligonucleotide
  Target: LAMA2; (+) strand; PAM type: NRG; PAM sequence: GAG
gaagaaggaaactgatattt

SEQ ID NO: 152139 - DNA, 20 bp, Artificial Sequence
  Description of Artificial Sequence: Synthetic oligonucleotide
  Target: LAMA2; (+) strand; PAM type: NRG; PAM sequence: TAG
aaactgatatttgagatttg

SEQ ID NO: 152140 - DNA, 20 bp, Artificial Sequence
  Description of Artificial Sequence: Synthetic oligonucleotide
  Target: LAMA2; (+) strand; PAM type: NRG; PAM sequence: AGG
aactgatatttgagatttgt

SEQ ID NO: 152141 - DNA, 20 bp, Artificial Sequence
  Description of Artificial Sequence: Synthetic oligonucleotide
  Target: LAMA2; (+) strand; PAM type: NRG; PAM sequence: CAG
gatatttgagatttgtagga

SEQ ID NO: 152142 - DNA, 20 bp, Artificial Sequence
  Description of Artificial Sequence: Synthetic oligonucleotide
  Target: LAMA2; (+) strand; PAM type: NRG; PAM sequence: AGG
atatttgagatttgtaggac

SEQ ID NO: 152143 - DNA, 20 bp, Artificial Sequence
  Description of Artificial Sequence: Synthetic oligonucleotide
  Target: LAMA2; (+) strand; PAM type: NRG; PAM sequence: GGG
tatttgagatttgtaggaca

SEQ ID NO: 152144 - DNA, 20 bp, Artificial Sequence
  Description of Artificial Sequence: Synthetic oligonucleotide
  Target: LAMA2; (+) strand; PAM type: NRG; PAM sequence: TAG
ttgagatttgtaggacaggg

SEQ ID NO: 152145 - DNA, 20 bp, Artificial Sequence
  Description of Artificial Sequence: Synthetic oligonucleotide
  Target: LAMA2; (+) strand; PAM type: NRG; PAM sequence: AAG
gggtagatctcatcatataa

SEQ ID NO: 152146 - DNA, 20 bp, Artificial Sequence
  Description of Artificial Sequence: Synthetic oligonucleotide
  Target: LAMA2; (+) strand; PAM type: NRG; PAM sequence: AAG
tagatctcatcatataaaag

SEQ ID NO: 152147 - DNA, 20 bp, Artificial Sequence
  Description of Artificial Sequence: Synthetic oligonucleotide
  Target: LAMA2; (+) strand; PAM type: NRG; PAM sequence: AAG
acacaaacaaacaaaactct

SEQ ID NO: 152148 - DNA, 20 bp, Artificial Sequence
  Description of Artificial Sequence: Synthetic oligonucleotide
  Target: LAMA2; (+) strand; PAM type: NRG; PAM sequence: TAG
ctctaagaaattgttttttt

SEQ ID NO: 152149 - DNA, 20 bp, Artificial Sequence
  Description of Artificial Sequence: Synthetic oligonucleotide
  Target: LAMA2; (+) strand; PAM type: NRG; PAM sequence: AGG
tctaagaaattgtttttttt

SEQ ID NO: 152150 - DNA, 20 bp, Artificial Sequence
  Description of Artificial Sequence: Synthetic oligonucleotide
  Target: LAMA2; (+) strand; PAM type: NRG; PAM sequence: CAG
attgttttttttaggttgct

SEQ ID NO: 152151 - DNA, 20 bp, Artificial Sequence
  Description of Artificial Sequence: Synthetic oligonucleotide
  Target: LAMA2; (+) strand; PAM type: NRG; PAM sequence: GAG
gttgctcagaaatgcccatt

SEQ ID NO: 152152 - DNA, 20 bp, Artificial Sequence
  Description of Artificial Sequence: Synthetic oligonucleotide
  Target: LAMA2; (+) strand; PAM type: NRG; PAM sequence: TGG
ctcagaaatgcccattgagt

SEQ ID NO: 152153 - DNA, 20 bp, Artificial Sequence
  Description of Artificial Sequence: Synthetic oligonucleotide
  Target: LAMA2; (+) strand; PAM type: NRG; PAM sequence: TGG
tgcccattgagttggatttg

SEQ ID NO: 152154 - DNA, 20 bp, Artificial Sequence
  Description of Artificial Sequence: Synthetic oligonucleotide
  Target: LAMA2; (+) strand; PAM type: NRG; PAM sequence: GGG
gcccattgagttggatttgt

SEQ ID NO: 152155 - DNA, 20 bp, Artificial Sequence
  Description of Artificial Sequence: Synthetic oligonucleotide
  Target: LAMA2; (+) strand; PAM type: NRG; PAM sequence: GAG
ccattgagttggatttgtgg

SEQ ID NO: 152156 - DNA, 20 bp, Artificial Sequence
  Description of Artificial Sequence: Synthetic oligonucleotide
  Target: LAMA2; (+) strand; PAM type: NRG; PAM sequence: AAG
gttggatttgtgggagttga

SEQ ID NO: 152157 - DNA, 20 bp, Artificial Sequence
  Description of Artificial Sequence: Synthetic oligonucleotide
  Target: LAMA2; (+) strand; PAM type: NRG; PAM sequence: GAG
aatatgttccactctccttt

SEQ ID NO: 152158 - DNA, 20 bp, Artificial Sequence
  Description of Artificial Sequence: Synthetic oligonucleotide
  Target: LAMA2; (+) strand; PAM type: NRG; PAM sequence: CAG
atgttccactctcctttgag

SEQ ID NO: 152159 - DNA, 20 bp, Artificial Sequence
  Description of Artificial Sequence: Synthetic oligonucleotide
  Target: LAMA2; (+) strand; PAM type: NRG; PAM sequence: TAG
tttgtgacttctttgctcca

SEQ ID NO: 152160 - DNA, 20 bp, Artificial Sequence
  Description of Artificial Sequence: Synthetic oligonucleotide
  Target: LAMA2; (+) strand; PAM type: NRG; PAM sequence: CAG
ccatagtcctcaaaattatt

SEQ ID NO: 152161 - DNA, 20 bp, Artificial Sequence
  Description of Artificial Sequence: Synthetic oligonucleotide
  Target: LAMA2; (+) strand; PAM type: NRG; PAM sequence: AAG
tagtcctcaaaattattcag

SEQ ID NO: 152162 - DNA, 20 bp, Artificial Sequence
  Description of Artificial Sequence: Synthetic oligonucleotide
  Target: LAMA2; (+) strand; PAM type: NRG; PAM sequence: TGG
tcctcaaaattattcagaag

SEQ ID NO: 152163 - DNA, 20 bp, Artificial Sequence
  Description of Artificial Sequence: Synthetic oligonucleotide
  Target: LAMA2; (+) strand; PAM type: NRG; PAM sequence: GAG
ctcaaaattattcagaagtg

SEQ ID NO: 152164 - DNA, 20 bp, Artificial Sequence
  Description of Artificial Sequence: Synthetic oligonucleotide
  Target: LAMA2; (+) strand; PAM type: NRG; PAM sequence: TGG
acttcctcctatttaaatct

SEQ ID NO: 152165 - DNA, 20 bp, Artificial Sequence
  Description of Artificial Sequence: Synthetic oligonucleotide
  Target: LAMA2; (+) strand; PAM type: NRG; PAM sequence: TGG
tatttaaatcttggattaaa

SEQ ID NO: 152166 - DNA, 20 bp, Artificial Sequence
  Description of Artificial Sequence: Synthetic oligonucleotide
  Target: LAMA2; (+) strand; PAM type: NRG; PAM sequence: GGG
atttaaatcttggattaaat

SEQ ID NO: 152167 - DNA, 20 bp, Artificial Sequence
  Description of Artificial Sequence: Synthetic oligonucleotide
  Target: LAMA2; (+) strand; PAM type: NRG; PAM sequence: TAG
aaatcttggattaaatgggt

SEQ ID NO: 152168 - DNA, 20 bp, Artificial Sequence
  Description of Artificial Sequence: Synthetic oligonucleotide
  Target: LAMA2; (+) strand; PAM type: NRG; PAM sequence: AAG
ttggattaaatgggttagtt

SEQ ID NO: 152169 - DNA, 20 bp, Artificial Sequence
  Description of Artificial Sequence: Synthetic oligonucleotide
  Target: LAMA2; (+) strand; PAM type: NRG; PAM sequence: AAG
gattaaatgggttagttaag

SEQ ID NO: 152170 - DNA, 20 bp, Artificial Sequence
  Description of Artificial Sequence: Synthetic oligonucleotide
  Target: LAMA2; (+) strand; PAM type: NRG; PAM sequence: AAG
agttaagaagatcattatgc

SEQ ID NO: 152171 - DNA, 20 bp, Artificial Sequence
  Description of Artificial Sequence: Synthetic oligonucleotide
  Target: LAMA2; (+) strand; PAM type: NRG; PAM sequence: AAG
agaagatcattatgcaagtg

SEQ ID NO: 152172 - DNA, 20 bp, Artificial Sequence
  Description of Artificial Sequence: Synthetic oligonucleotide
  Target: LAMA2; (+) strand; PAM type: NRG; PAM sequence: TGG
atcattatgcaagtgaagaa

SEQ ID NO: 152173 - DNA, 20 bp, Artificial Sequence
  Description of Artificial Sequence: Synthetic oligonucleotide
  Target: LAMA2; (+) strand; PAM type: NRG; PAM sequence: TGG
tatgcaagtgaagaatggta

SEQ ID NO: 152174 - DNA, 20 bp, Artificial Sequence
  Description of Artificial Sequence: Synthetic oligonucleotide
  Target: LAMA2; (+) strand; PAM type: NRG; PAM sequence: AAG
gaagaatggtatggctataa

SEQ ID NO: 152175 - DNA, 20 bp, Artificial Sequence
  Description of Artificial Sequence: Synthetic oligonucleotide
  Target: LAMA2; (+) strand; PAM type: NRG; PAM sequence: TAG
ggtatggctataaaagtaaa

SEQ ID NO: 152176 - DNA, 20 bp, Artificial Sequence
  Description of Artificial Sequence: Synthetic oligonucleotide
  Target: LAMA2; (+) strand; PAM type: NRG; PAM sequence: AGG
gtatggctataaaagtaaat

SEQ ID NO: 152177 - DNA, 20 bp, Artificial Sequence
  Description of Artificial Sequence: Synthetic oligonucleotide
  Target: LAMA2; (+) strand; PAM type: NRG; PAM sequence: TGG
taaataggataaatcaactg

SEQ ID NO: 152178 - DNA, 20 bp, Artificial Sequence
  Description of Artificial Sequence: Synthetic oligonucleotide
  Target: LAMA2; (+) strand; PAM type: NRG; PAM sequence: CAG
tgattttttattccataaat

SEQ ID NO: 152179 - DNA, 20 bp, Artificial Sequence
  Description of Artificial Sequence: Synthetic oligonucleotide
  Target: LAMA2; (+) strand; PAM type: NRG; PAM sequence: AAG
tccataaatcagatcccatc

SEQ ID NO: 152180 - DNA, 20 bp, Artificial Sequence
  Description of Artificial Sequence: Synthetic oligonucleotide
  Target: LAMA2; (+) strand; PAM type: NRG; PAM sequence: TGG
agatcccatcaagactaact

SEQ ID NO: 152181 - DNA, 20 bp, Artificial Sequence
  Description of Artificial Sequence: Synthetic oligonucleotide
  Target: LAMA2; (+) strand; PAM type: NRG; PAM sequence: TGG
catcaagactaacttggcaa

SEQ ID NO: 152182 - DNA, 20 bp, Artificial Sequence
  Description of Artificial Sequence: Synthetic oligonucleotide
  Target: LAMA2; (+) strand; PAM type: NRG; PAM sequence: GAG
tcaagactaacttggcaatg

SEQ ID NO: 152183 - DNA, 20 bp, Artificial Sequence
  Description of Artificial Sequence: Synthetic oligonucleotide
  Target: LAMA2; (+) strand; PAM type: NRG; PAM sequence: TAG
agactaacttggcaatggag

SEQ ID NO: 152184 - DNA, 20 bp, Artificial Sequence
  Description of Artificial Sequence: Synthetic oligonucleotide
  Target: LAMA2; (+) strand; PAM type: NRG; PAM sequence: CAG
acttggcaatggagtagaac

SEQ ID NO: 152185 - DNA, 20 bp, Artificial Sequence
  Description of Artificial Sequence: Synthetic oligonucleotide
  Target: LAMA2; (+) strand; PAM type: NRG; PAM sequence: AGG
cttggcaatggagtagaacc

SEQ ID NO: 152186 - DNA, 20 bp, Artificial Sequence
  Description of Artificial Sequence: Synthetic oligonucleotide
  Target: LAMA2; (+) strand; PAM type: NRG; PAM sequence: AAG
ggcaatggagtagaaccagg

SEQ ID NO: 152187 - DNA, 20 bp, Artificial Sequence
  Description of Artificial Sequence: Synthetic oligonucleotide
  Target: LAMA2; (+) strand; PAM type: NRG; PAM sequence: AAG
aatggagtagaaccaggaag

SEQ ID NO: 152188 - DNA, 20 bp, Artificial Sequence
  Description of Artificial Sequence: Synthetic oligonucleotide
  Target: LAMA2; (+) strand; PAM type: NRG; PAM sequence: AGG
atggagtagaaccaggaaga

SEQ ID NO: 152189 - DNA, 20 bp, Artificial Sequence
  Description of Artificial Sequence: Synthetic oligonucleotide
  Target: LAMA2; (+) strand; PAM type: NRG; PAM sequence: TAG
caggaagaaggtttgctgcc

SEQ ID NO: 152190 - DNA, 20 bp, Artificial Sequence
  Description of Artificial Sequence: Synthetic oligonucleotide
  Target: LAMA2; (+) strand; PAM type: NRG; PAM sequence: AAG
taaaccaaaaataaaattct

SEQ ID NO: 152191 - DNA, 20 bp, Artificial Sequence
  Description of Artificial Sequence: Synthetic oligonucleotide
  Target: LAMA2; (+) strand; PAM type: NRG; PAM sequence: CGG
ttctaagacccctgactgaa

SEQ ID NO: 152192 - DNA, 20 bp, Artificial Sequence
  Description of Artificial Sequence: Synthetic oligonucleotide
  Target: LAMA2; (+) strand; PAM type: NRG; PAM sequence: TGG
gactgaacggacccccttct

SEQ ID NO: 152193 - DNA, 20 bp, Artificial Sequence
  Description of Artificial Sequence: Synthetic oligonucleotide
  Target: LAMA2; (+) strand; PAM type: NRG; PAM sequence: AAG
aacggacccccttcttggcc

SEQ ID NO: 152194 - DNA, 20 bp, Artificial Sequence
  Description of Artificial Sequence: Synthetic oligonucleotide
  Target: LAMA2; (+) strand; PAM type: NRG; PAM sequence: AGG
acggacccccttcttggcca

SEQ ID NO: 152195 - DNA, 20 bp, Artificial Sequence
  Description of Artificial Sequence: Synthetic oligonucleotide
  Target: LAMA2; (+) strand; PAM type: NRG; PAM sequence: GGG
cggacccccttcttggccaa

SEQ ID NO: 152196 - DNA, 20 bp, Artificial Sequence
  Description of Artificial Sequence: Synthetic oligonucleotide
  Target: LAMA2; (+) strand; PAM type: NRG; PAM sequence: AAG
tcttggccaagggaatccca

SEQ ID NO: 152197 - DNA, 20 bp, Artificial Sequence
  Description of Artificial Sequence: Synthetic oligonucleotide
  Target: LAMA2; (+) strand; PAM type: NRG; PAM sequence: AAG
gggaatcccaaagaaaccta

SEQ ID NO: 152198 - DNA, 20 bp, Artificial Sequence
  Description of Artificial Sequence: Synthetic oligonucleotide
  Target: LAMA2; (+) strand; PAM type: NRG; PAM sequence: TGG
ctaaagaaacctgaacatca

SEQ ID NO: 152199 - DNA, 20 bp, Artificial Sequence
  Description of Artificial Sequence: Synthetic oligonucleotide
  Target: LAMA2; (+) strand; PAM type: NRG; PAM sequence: GGG
taaagaaacctgaacatcat

SEQ ID NO: 152200 - DNA, 20 bp, Artificial Sequence
  Description of Artificial Sequence: Synthetic oligonucleotide
  Target: LAMA2; (+) strand; PAM type: NRG; PAM sequence: AAG
agaaacctgaacatcatggg

SEQ ID NO: 152201 - DNA, 20 bp, Artificial Sequence
  Description of Artificial Sequence: Synthetic oligonucleotide
  Target: LAMA2; (+) strand; PAM type: NRG; PAM sequence: AGG
gaaacctgaacatcatggga

SEQ ID NO: 152202 - DNA, 20 bp, Artificial Sequence
  Description of Artificial Sequence: Synthetic oligonucleotide
  Target: LAMA2; (+) strand; PAM type: NRG; PAM sequence: GGG
aaacctgaacatcatgggaa

SEQ ID NO: 152203 - DNA, 20 bp, Artificial Sequence
  Description of Artificial Sequence: Synthetic oligonucleotide
  Target: LAMA2; (+) strand; PAM type: NRG; PAM sequence: TGG
tcattataccctgctccctt

SEQ ID NO: 152204 - DNA, 20 bp, Artificial Sequence
  Description of Artificial Sequence: Synthetic oligonucleotide
  Target: LAMA2; (+) strand; PAM type: NRG; PAM sequence: GAG
attataccctgctccctttg

SEQ ID NO: 152205 - DNA, 20 bp, Artificial Sequence
  Description of Artificial Sequence: Synthetic oligonucleotide
  Target: LAMA2; (+) strand; PAM type: NRG; PAM sequence: TAG
accctgctccctttggagtt

SEQ ID NO: 152206 - DNA, 20 bp, Artificial Sequence
  Description of Artificial Sequence: Synthetic oligonucleotide
  Target: LAMA2; (+) strand; PAM type: NRG; PAM sequence: CAG
cctttggagtttagacacca

SEQ ID NO: 152207 - DNA, 20 bp, Artificial Sequence
  Description of Artificial Sequence: Synthetic oligonucleotide
  Target: LAMA2; (+) strand; PAM type: NRG; PAM sequence: CAG
gtttagacaccacagaccaa

SEQ ID NO: 152208 - DNA, 20 bp, Artificial Sequence
  Description of Artificial Sequence: Synthetic oligonucleotide
  Target: LAMA2; (+) strand; PAM type: NRG; PAM sequence: CAG
gaccaacagtaacattaaaa

SEQ ID NO: 152209 - DNA, 20 bp, Artificial Sequence
  Description of Artificial Sequence: Synthetic oligonucleotide
  Target: LAMA2; (+) strand; PAM type: NRG; PAM sequence: GAG
ccaacagtaacattaaaaca

SEQ ID NO: 152210 - DNA, 20 bp, Artificial Sequence
  Description of Artificial Sequence: Synthetic oligonucleotide
  Target: LAMA2; (+) strand; PAM type: NRG; PAM sequence: TAG
acagagattttaaaactgac

SEQ ID NO: 152211 - DNA, 20 bp, Artificial Sequence
  Description of Artificial Sequence: Synthetic oligonucleotide
  Target: LAMA2; (+) strand; PAM type: NRG; PAM sequence: CAG
agattttaaaactgactaga

SEQ ID NO: 152212 - DNA, 20 bp, Artificial Sequence
  Description of Artificial Sequence: Synthetic oligonucleotide
  Target: LAMA2; (+) strand; PAM type: NRG; PAM sequence: CAG
ctgactagacagacacttta

SEQ ID NO: 152213 - DNA, 20 bp, Artificial Sequence
  Description of Artificial Sequence: Synthetic oligonucleotide
  Target: LAMA2; (+) strand; PAM type: NRG; PAM sequence: AAG
gacagacactttacagcaac

SEQ ID NO: 152214 - DNA, 20 bp, Artificial Sequence
  Description of Artificial Sequence: Synthetic oligonucleotide
  Target: LAMA2; (+) strand; PAM type: NRG; PAM sequence: TGG
accaaattctaacctcactc

SEQ ID NO: 152215 - DNA, 20 bp, Artificial Sequence
  Description of Artificial Sequence: Synthetic oligonucleotide
  Target: LAMA2; (+) strand; PAM type: NRG; PAM sequence: TAG
attctaacctcactctggta

SEQ ID NO: 152216 - DNA, 20 bp, Artificial Sequence
  Description of Artificial Sequence: Synthetic oligonucleotide
  Target: LAMA2; (+) strand; PAM type: NRG; PAM sequence: CAG
tctggtatagcataacataa

SEQ ID NO: 152217 - DNA, 20 bp, Artificial Sequence
  Description of Artificial Sequence: Synthetic oligonucleotide
  Target: LAMA2; (+) strand; PAM type: NRG; PAM sequence: TAG
gtatagcataacataacaga

SEQ ID NO: 152218 - DNA, 20 bp, Artificial Sequence
  Description of Artificial Sequence: Synthetic oligonucleotide
  Target: LAMA2; (+) strand; PAM type: NRG; PAM sequence: CAG
tagcataacataacagatag

SEQ ID NO: 152219 - DNA, 20 bp, Artificial Sequence
  Description of Artificial Sequence: Synthetic oligonucleotide
  Target: LAMA2; (+) strand; PAM type: NRG; PAM sequence: AGG
agcataacataacagatagc

SEQ ID NO: 152220 - DNA, 20 bp, Artificial Sequence
  Description of Artificial Sequence: Synthetic oligonucleotide
  Target: LAMA2; (+) strand; PAM type: NRG; PAM sequence: AAG
taacagatagcaggccctaa

SEQ ID NO: 152221 - DNA, 20 bp, Artificial Sequence
  Description of Artificial Sequence: Synthetic oligonucleotide
  Target: LAMA2; (+) strand; PAM type: NRG; PAM sequence: AAG
gcaggccctaaaagaaatca

SEQ ID NO: 152222 - DNA, 20 bp, Artificial Sequence
  Description of Artificial Sequence: Synthetic oligonucleotide
  Target: LAMA2; (+) strand; PAM type: NRG; PAM sequence: AAG
tattctgaaatgaccttgca

SEQ ID NO: 152223 - DNA, 20 bp, Artificial Sequence
  Description of Artificial Sequence: Synthetic oligonucleotide
  Target: LAMA2; (+) strand; PAM type: NRG; PAM sequence: TGG
gaccttgcaaagctgtctct

SEQ ID NO: 152224 - DNA, 20 bp, Artificial Sequence
  Description of Artificial Sequence: Synthetic oligonucleotide
  Target: LAMA2; (+) strand; PAM type: NRG; PAM sequence: GGG
accttgcaaagctgtctctt

SEQ ID NO: 152225 - DNA, 20 bp, Artificial Sequence
  Description of Artificial Sequence: Synthetic oligonucleotide
  Target: LAMA2; (+) strand; PAM type: NRG; PAM sequence: GGG
ccttgcaaagctgtctcttg

SEQ ID NO: 152226 - DNA, 20 bp, Artificial Sequence
  Description of Artificial Sequence: Synthetic oligonucleotide
  Target: LAMA2; (+) strand; PAM type: NRG; PAM sequence: TAG
ttggggaaatttgcattcta

SEQ ID NO: 152227 - DNA, 20 bp, Artificial Sequence
  Description of Artificial Sequence: Synthetic oligonucleotide
  Target: LAMA2; (+) strand; PAM type: NRG; PAM sequence: GAG
ggggaaatttgcattctata

SEQ ID NO: 152228 - DNA, 20 bp, Artificial Sequence
  Description of Artificial Sequence: Synthetic oligonucleotide
  Target: LAMA2; (+) strand; PAM type: NRG; PAM sequence: AAG
gagaatctccttcccttact

SEQ ID NO: 152229 - DNA, 20 bp, Artificial Sequence
  Description of Artificial Sequence: Synthetic oligonucleotide
  Target: LAMA2; (+) strand; PAM type: NRG; PAM sequence: TGG
ttcccttactaagtcttttc

SEQ ID NO: 152230 - DNA, 20 bp, Artificial Sequence
  Description of Artificial Sequence: Synthetic oligonucleotide
  Target: LAMA2; (+) strand; PAM type: NRG; PAM sequence: GAG
cccttactaagtcttttctg

SEQ ID NO: 152231 - DNA, 20 bp, Artificial Sequence
  Description of Artificial Sequence: Synthetic oligonucleotide
  Target: LAMA2; (+) strand; PAM type: NRG; PAM sequence: GAG
cttactaagtcttttctgga

SEQ ID NO: 152232 - DNA, 20 bp, Artificial Sequence
  Description of Artificial Sequence: Synthetic oligonucleotide
  Target: LAMA2; (+) strand; PAM type: NRG; PAM sequence: CAG
ctaagtcttttctggagagt

SEQ ID NO: 152233 - DNA, 20 bp, Artificial Sequence
  Description of Artificial Sequence: Synthetic oligonucleotide
  Target: LAMA2; (+) strand; PAM type: NRG; PAM sequence: AAG
tggagagtcagatacctttt

SEQ ID NO: 152234 - DNA, 20 bp, Artificial Sequence
  Description of Artificial Sequence: Synthetic oligonucleotide
  Target: LAMA2; (+) strand; PAM type: NRG; PAM sequence: AGG
ggagagtcagatacctttta

SEQ ID NO: 152235 - DNA, 20 bp, Artificial Sequence
  Description of Artificial Sequence: Synthetic oligonucleotide
  Target: LAMA2; (+) strand; PAM type: NRG; PAM sequence: TGG
gtcagataccttttaaggtc

SEQ ID NO: 152236 - DNA, 20 bp, Artificial Sequence
  Description of Artificial Sequence: Synthetic oligonucleotide
  Target: LAMA2; (+) strand; PAM type: NRG; PAM sequence: AAG
gataccttttaaggtctggc

SEQ ID NO: 152237 - DNA, 20 bp, Artificial Sequence
  Description of Artificial Sequence: Synthetic oligonucleotide
  Target: LAMA2; (+) strand; PAM type: NRG; PAM sequence: GAG
taccttttaaggtctggcaa

SEQ ID NO: 152238 - DNA, 20 bp, Artificial Sequence
  Description of Artificial Sequence: Synthetic oligonucleotide
  Target: LAMA2; (+) strand; PAM type: NRG; PAM sequence: CAG
tggcaagagacattcaccat

SEQ ID NO: 152239 - DNA, 20 bp, Artificial Sequence
  Description of Artificial Sequence: Synthetic oligonucleotide
  Target: LAMA2; (+) strand; PAM type: NRG; PAM sequence: GAG
ctactttaccctactacctt

SEQ ID NO: 152240 - DNA, 20 bp, Artificial Sequence
  Description of Artificial Sequence: Synthetic oligonucleotide
  Target: LAMA2; (+) strand; PAM type: NRG; PAM sequence: AGG
tactttaccctactaccttg

SEQ ID NO: 152241 - DNA, 20 bp, Artificial Sequence
  Description of Artificial Sequence: Synthetic oligonucleotide
  Target: LAMA2; (+) strand; PAM type: NRG; PAM sequence: AAG
tgaggcttcatctacatgac

SEQ ID NO: 152242 - DNA, 20 bp, Artificial Sequence
  Description of Artificial Sequence: Synthetic oligonucleotide
  Target: LAMA2; (+) strand; PAM type: NRG; PAM sequence: TGG
catctacatgacaagaaccg

SEQ ID NO: 152243 - DNA, 20 bp, Artificial Sequence
  Description of Artificial Sequence: Synthetic oligonucleotide
  Target: LAMA2; (+) strand; PAM type: NRG; PAM sequence: AAG
acaacccactctcttaactc

SEQ ID NO: 152244 - DNA, 20 bp, Artificial Sequence
  Description of Artificial Sequence: Synthetic oligonucleotide
  Target: LAMA2; (+) strand; PAM type: NRG; PAM sequence: CAG
tcaagctgacttcaactgtt

SEQ ID NO: 152245 - DNA, 20 bp, Artificial Sequence
  Description of Artificial Sequence: Synthetic oligonucleotide
  Target: LAMA2; (+) strand; PAM type: NRG; PAM sequence: AGG
caagctgacttcaactgttc

SEQ ID NO: 152246 - DNA, 20 bp, Artificial Sequence
  Description of Artificial Sequence: Synthetic oligonucleotide
  Target: LAMA2; (+) strand; PAM type: NRG; PAM sequence: CAG
gctgacttcaactgttcagg

SEQ ID NO: 152247 - DNA, 20 bp, Artificial Sequence
  Description of Artificial Sequence: Synthetic oligonucleotide
  Target: LAMA2; (+) strand; PAM type: NRG; PAM sequence: CAG
ttactctttcgaccaattgc

SEQ ID NO: 152248 - DNA, 20 bp, Artificial Sequence
  Description of Artificial Sequence: Synthetic oligonucleotide
  Target: LAMA2; (+) strand; PAM type: NRG; PAM sequence: CAG
tctttcgaccaattgccagt

SEQ ID NO: 152249 - DNA, 20 bp, Artificial Sequence
  Description of Artificial Sequence: Synthetic oligonucleotide
  Target: LAMA2; (+) strand; PAM type: NRG; PAM sequence: TGG
ctttgaatccatcaatgact

SEQ ID NO: 152250 - DNA, 20 bp, Artificial Sequence
  Description of Artificial Sequence: Synthetic oligonucleotide
  Target: LAMA2; (+) strand; PAM type: NRG; PAM sequence: AAG
tgaatccatcaatgacttgg

SEQ ID NO: 152251 - DNA, 20 bp, Artificial Sequence
  Description of Artificial Sequence: Synthetic oligonucleotide
  Target: LAMA2; (+) strand; PAM type: NRG; PAM sequence: AAG
ggaagcccccacctcgcttc

SEQ ID NO: 152252 - DNA, 20 bp, Artificial Sequence
  Description of Artificial Sequence: Synthetic oligonucleotide
  Target: LAMA2; (+) strand; PAM type: NRG; PAM sequence: TGG
ttcaagatgtcctacttttc

SEQ ID NO: 152253 - DNA, 20 bp, Artificial Sequence
  Description of Artificial Sequence: Synthetic oligonucleotide
  Target: LAMA2; (+) strand; PAM type: NRG; PAM sequence: GGG
tcaagatgtcctacttttct

SEQ ID NO: 152254 - DNA, 20 bp, Artificial Sequence
  Description of Artificial Sequence: Synthetic oligonucleotide
  Target: LAMA2; (+) strand; PAM type: NRG; PAM sequence: TAG
ggccgaaccaatgtgtaact

SEQ ID NO: 152255 - DNA, 20 bp, Artificial Sequence
  Description of Artificial Sequence: Synthetic oligonucleotide
  Target: LAMA2; (+) strand; PAM type: NRG; PAM sequence: TGG
accaatgtgtaacttagtac

SEQ ID NO: 152256 - DNA, 20 bp, Artificial Sequence
  Description of Artificial Sequence: Synthetic oligonucleotide
  Target: LAMA2; (+) strand; PAM type: NRG; PAM sequence: AAG
tccctaaaatatataacgcc

SEQ ID NO: 152257 - DNA, 20 bp, Artificial Sequence
  Description of Artificial Sequence: Synthetic oligonucleotide
  Target: LAMA2; (+) strand; PAM type: NRG; PAM sequence: CAG
tataacgccaagctgtaacc

SEQ ID NO: 152258 - DNA, 20 bp, Artificial Sequence
  Description of Artificial Sequence: Synthetic oligonucleotide
  Target: LAMA2; (+) strand; PAM type: NRG; PAM sequence: TGG
agctgtaacccagtcatctt

SEQ ID NO: 152259 - DNA, 20 bp, Artificial Sequence
  Description of Artificial Sequence: Synthetic oligonucleotide
  Target: LAMA2; (+) strand; PAM type: NRG; PAM sequence: CAG
tcatctttggcacatattct

SEQ ID NO: 152260 - DNA, 20 bp, Artificial Sequence
  Description of Artificial Sequence: Synthetic oligonucleotide
  Target: LAMA2; (+) strand; PAM type: NRG; PAM sequence: AGG
catctttggcacatattctc

SEQ ID NO: 152261 - DNA, 20 bp, Artificial Sequence
  Description of Artificial Sequence: Synthetic oligonucleotide
  Target: LAMA2; (+) strand; PAM type: NRG; PAM sequence: AAG
acatattctcaggacctcct

SEQ ID NO: 152262 - DNA, 20 bp, Artificial Sequence
  Description of Artificial Sequence: Synthetic oligonucleotide
  Target: LAMA2; (+) strand; PAM type: NRG; PAM sequence: AGG
catattctcaggacctccta

SEQ ID NO: 152263 - DNA, 20 bp, Artificial Sequence
  Description of Artificial Sequence: Synthetic oligonucleotide
  Target: LAMA2; (+) strand; PAM type: NRG; PAM sequence: CAG
gacctcctaaggctgtgtca

SEQ ID NO: 152264 - DNA, 20 bp, Artificial Sequence
  Description of Artificial Sequence: Synthetic oligonucleotide
  Target: LAMA2; (+) strand; PAM type: NRG; PAM sequence: AGG
acctcctaaggctgtgtcac

SEQ ID NO: 152265 - DNA, 20 bp, Artificial Sequence
  Description of Artificial Sequence: Synthetic oligonucleotide
  Target: LAMA2; (+) strand; PAM type: NRG; PAM sequence: TGG
taaggctgtgtcacaggcca

SEQ ID NO: 152266 - DNA, 20 bp, Artificial Sequence
  Description of Artificial Sequence: Synthetic oligonucleotide
  Target: LAMA2; (+) strand; PAM type: NRG; PAM sequence: GAG
aataaacctctaaattgatt

SEQ ID NO: 152267 - DNA, 20 bp, Artificial Sequence
  Description of Artificial Sequence: Synthetic oligonucleotide
  Target: LAMA2; (+) strand; PAM type: NRG; PAM sequence: TGG
gacctgtttctgatactttt

SEQ ID NO: 152268 - DNA, 20 bp, Artificial Sequence
  Description of Artificial Sequence: Synthetic oligonucleotide
  Target: LAMA2; (+) strand; PAM type: NRG; PAM sequence: AAG
tttttggtttacaaattgtt

SEQ ID NO: 152269 - DNA, 20 bp, Artificial Sequence
  Description of Artificial Sequence: Synthetic oligonucleotide
  Target: LAMA2; (+) strand; PAM type: NRG; PAM sequence: AGG
ttttggtttacaaattgtta

SEQ ID NO: 152270 - DNA, 20 bp, Artificial Sequence
  Description of Artificial Sequence: Synthetic oligonucleotide
  Target: LAMA2; (+) strand; PAM type: NRG; PAM sequence: GAG
acaaattgttaaggataaat

SEQ ID NO: 152271 - DNA, 20 bp, Artificial Sequence
  Description of Artificial Sequence: Synthetic oligonucleotide
  Target: LAMA2; (+) strand; PAM type: NRG; PAM sequence: AAG
ttaaggataaatgagaaaat

SEQ ID NO: 152272 - DNA, 20 bp, Artificial Sequence
  Description of Artificial Sequence: Synthetic oligonucleotide
  Target: LAMA2; (+) strand; PAM type: NRG; PAM sequence: AAG
attaaaaaacaaaaaaaatc

SEQ ID NO: 152273 - DNA, 20 bp, Artificial Sequence
  Description of Artificial Sequence: Synthetic oligonucleotide
  Target: LAMA2; (+) strand; PAM type: NRG; PAM sequence: AGG
ttaaaaaacaaaaaaaatca

SEQ ID NO: 152274 - DNA, 20 bp, Artificial Sequence
  Description of Artificial Sequence: Synthetic oligonucleotide
  Target: LAMA2; (+) strand; PAM type: NRG; PAM sequence: TAG
aaggactcatttatttccca

SEQ ID NO: 152275 - DNA, 20 bp, Artificial Sequence
  Description of Artificial Sequence: Synthetic oligonucleotide
  Target: LAMA2; (+) strand; PAM type: NRG; PAM sequence: TAG
tttatttcccatagctatga

SEQ ID NO: 152276 - DNA, 20 bp, Artificial Sequence
  Description of Artificial Sequence: Synthetic oligonucleotide
  Target: LAMA2; (+) strand; PAM type: NRG; PAM sequence: AAG
tgatagaatctgctgtgtaa

SEQ ID NO: 152277 - DNA, 20 bp, Artificial Sequence
  Description of Artificial Sequence: Synthetic oligonucleotide
  Target: LAMA2; (+) strand; PAM type: NRG; PAM sequence: CAG
gtgtaaaagtaacacaaatg

SEQ ID NO: 152278 - DNA, 20 bp, Artificial Sequence
  Description of Artificial Sequence: Synthetic oligonucleotide
  Target: LAMA2; (+) strand; PAM type: NRG; PAM sequence: AGG
tgtaaaagtaacacaaatgc

SEQ ID NO: 152279 - DNA, 20 bp, Artificial Sequence
  Description of Artificial Sequence: Synthetic oligonucleotide
  Target: LAMA2; (+) strand; PAM type: NRG; PAM sequence: GAG
taaaagtaacacaaatgcag

SEQ ID NO: 152280 - DNA, 20 bp, Artificial Sequence
  Description of Artificial Sequence: Synthetic oligonucleotide
  Target: LAMA2; (+) strand; PAM type: NRG; PAM sequence: AAG
taacacaaatgcaggagctc

SEQ ID NO: 152281 - DNA, 20 bp, Artificial Sequence
  Description of Artificial Sequence: Synthetic oligonucleotide
  Target: LAMA2; (+) strand; PAM type: NRG; PAM sequence: AGG
aacacaaatgcaggagctca

SEQ ID NO: 152282 - DNA, 20 bp, Artificial Sequence
  Description of Artificial Sequence: Synthetic oligonucleotide
  Target: LAMA2; (+) strand; PAM type: NRG; PAM sequence: TAG
caggagctcaaggtcaaaca

SEQ ID NO: 152283 - DNA, 20 bp, Artificial Sequence
  Description of Artificial Sequence: Synthetic oligonucleotide
  Target: LAMA2; (+) strand; PAM type: NRG; PAM sequence: AAG
ttttcctaattaaatttata

SEQ ID NO: 152284 - DNA, 20 bp, Artificial Sequence
  Description of Artificial Sequence: Synthetic oligonucleotide
  Target: LAMA2; (+) strand; PAM type: NRG; PAM sequence: TAG
taattaaatttataaagcat

SEQ ID NO: 152285 - DNA, 20 bp, Artificial Sequence
  Description of Artificial Sequence: Synthetic oligonucleotide
  Target: LAMA2; (+) strand; PAM type: NRG; PAM sequence: AAG
gttaaaaattgttatataaa

SEQ ID NO: 152286 - DNA, 20 bp, Artificial Sequence
  Description of Artificial Sequence: Synthetic oligonucleotide
  Target: LAMA2; (+) strand; PAM type: NRG; PAM sequence: CAG
tattcacatgcatctgtcta

SEQ ID NO: 152287 - DNA, 20 bp, Artificial Sequence
  Description of Artificial Sequence: Synthetic oligonucleotide
  Target: LAMA2; (+) strand; PAM type: NRG; PAM sequence: TAG
ttcgtcaactgaatgaatac

SEQ ID NO: 152288 - DNA, 20 bp, Artificial Sequence
  Description of Artificial Sequence: Synthetic oligonucleotide
  Target: LAMA2; (+) strand; PAM type: NRG; PAM sequence: TAG
tcaactgaatgaatactaga

SEQ ID NO: 152289 - DNA, 20 bp, Artificial Sequence
  Description of Artificial Sequence: Synthetic oligonucleotide
  Target: LAMA2; (+) strand; PAM type: NRG; PAM sequence: AGG
caactgaatgaatactagat

SEQ ID NO: 152290 - DNA, 20 bp, Artificial Sequence
  Description of Artificial Sequence: Synthetic oligonucleotide
  Target: LAMA2; (+) strand; PAM type: NRG; PAM sequence: GAG
actgaatgaatactagatag

SEQ ID NO: 152291 - DNA, 20 bp, Artificial Sequence
  Description of Artificial Sequence: Synthetic oligonucleotide
  Target: LAMA2; (+) strand; PAM type: NRG; PAM sequence: GAG
tccatttaataaaaactctt

SEQ ID NO: 152292 - DNA, 20 bp, Artificial Sequence
  Description of Artificial Sequence: Synthetic oligonucleotide
  Target: LAMA2; (+) strand; PAM type: NRG; PAM sequence: TAG
aactcttgagaaaaataaaa

SEQ ID NO: 152293 - DNA, 20 bp, Artificial Sequence
  Description of Artificial Sequence: Synthetic oligonucleotide
  Target: LAMA2; (+) strand; PAM type: NRG; PAM sequence: CAG
aaataaaatagcttacttaa

SEQ ID NO: 152294 - DNA, 20 bp, Artificial Sequence
  Description of Artificial Sequence: Synthetic oligonucleotide
  Target: LAMA2; (+) strand; PAM type: NRG; PAM sequence: GAG
cttaacagtaatttcaatgt

SEQ ID NO: 152295 - DNA, 20 bp, Artificial Sequence
  Description of Artificial Sequence: Synthetic oligonucleotide
  Target: LAMA2; (+) strand; PAM type: NRG; PAM sequence: TGG
acagtaatttcaatgtgagt

SEQ ID NO: 152296 - DNA, 20 bp, Artificial Sequence
  Description of Artificial Sequence: Synthetic oligonucleotide
  Target: LAMA2; (+) strand; PAM type: NRG; PAM sequence: TGG
atgtgagttggtttgtgatg

SEQ ID NO: 152297 - DNA, 20 bp, Artificial Sequence
  Description of Artificial Sequence: Synthetic oligonucleotide
  Target: LAMA2; (+) strand; PAM type: NRG; PAM sequence: TGG
gagttggtttgtgatgtggt

SEQ ID NO: 152298 - DNA, 20 bp, Artificial Sequence
  Description of Artificial Sequence: Synthetic oligonucleotide
  Target: LAMA2; (+) strand; PAM type: NRG; PAM sequence: TAG
gcaacaaaacttacgtaatc

SEQ ID NO: 152299 - DNA, 20 bp, Artificial Sequence
  Description of Artificial Sequence: Synthetic oligonucleotide
  Target: LAMA2; (+) strand; PAM type: NRG; PAM sequence: AGG
caacaaaacttacgtaatct

SEQ ID NO: 152300 - DNA, 20 bp, Artificial Sequence
  Description of Artificial Sequence: Synthetic oligonucleotide
  Target: LAMA2; (+) strand; PAM type: NRG; PAM sequence: GGG
aacaaaacttacgtaatcta

SEQ ID NO: 152301 - DNA, 20 bp, Artificial Sequence
  Description of Artificial Sequence: Synthetic oligonucleotide
  Target: LAMA2; (+) strand; PAM type: NRG; PAM sequence: TGG
tacgtaatctagggctacat

SEQ ID NO: 152302 - DNA, 20 bp, Artificial Sequence
  Description of Artificial Sequence: Synthetic oligonucleotide
  Target: LAMA2; (+) strand; PAM type: NRG; PAM sequence: CAG
gtaatctagggctacattgg

SEQ ID NO: 152303 - DNA, 20 bp, Artificial Sequence
  Description of Artificial Sequence: Synthetic oligonucleotide
  Target: LAMA2; (+) strand; PAM type: NRG; PAM sequence: AGG
taatctagggctacattggc

SEQ ID NO: 152304 - DNA, 20 bp, Artificial Sequence
  Description of Artificial Sequence: Synthetic oligonucleotide
  Target: LAMA2; (+) strand; PAM type: NRG; PAM sequence: TGG
ctacattggcaggaatttac

SEQ ID NO: 152305 - DNA, 20 bp, Artificial Sequence
  Description of Artificial Sequence: Synthetic oligonucleotide
  Target: LAMA2; (+) strand; PAM type: NRG; PAM sequence: CAG
attggcaggaatttactggt

SEQ ID NO: 152306 - DNA, 20 bp, Artificial Sequence
  Description of Artificial Sequence: Synthetic oligonucleotide
  Target: LAMA2; (+) strand; PAM type: NRG; PAM sequence: AGG
ttggcaggaatttactggtc

SEQ ID NO: 152307 - DNA, 20 bp, Artificial Sequence
  Description of Artificial Sequence: Synthetic oligonucleotide
  Target: LAMA2; (+) strand; PAM type: NRG; PAM sequence: AAG
ggaatttactggtcaggaca

SEQ ID NO: 152308 - DNA, 20 bp, Artificial Sequence
  Description of Artificial Sequence: Synthetic oligonucleotide
  Target: LAMA2; (+) strand; PAM type: NRG; PAM sequence: AGG
gaatttactggtcaggacaa

SEQ ID NO: 152309 - DNA, 20 bp, Artificial Sequence
  Description of Artificial Sequence: Synthetic oligonucleotide
  Target: LAMA2; (+) strand; PAM type: NRG; PAM sequence: GAG
atttactggtcaggacaaag

SEQ ID NO: 152310 - DNA, 20 bp, Artificial Sequence
  Description of Artificial Sequence: Synthetic oligonucleotide
  Target: LAMA2; (+) strand; PAM type: NRG; PAM sequence: AGG
tttactggtcaggacaaagg

SEQ ID NO: 152311 - DNA, 20 bp, Artificial Sequence
  Description of Artificial Sequence: Synthetic oligonucleotide
  Target: LAMA2; (+) strand; PAM type: NRG; PAM sequence: TAG
actggtcaggacaaaggagg

SEQ ID NO: 152312 - DNA, 20 bp, Artificial Sequence
  Description of Artificial Sequence: Synthetic oligonucleotide
  Target: LAMA2; (+) strand; PAM type: NRG; PAM sequence: CAG
caaaggaggtagtgtttata

SEQ ID NO: 152313 - DNA, 20 bp, Artificial Sequence
  Description of Artificial Sequence: Synthetic oligonucleotide
  Target: LAMA2; (+) strand; PAM type: NRG; PAM sequence: TAG
tattaaatattattaatatt

SEQ ID NO: 152314 - DNA, 20 bp, Artificial Sequence
  Description of Artificial Sequence: Synthetic oligonucleotide
  Target: LAMA2; (+) strand; PAM type: NRG; PAM sequence: AAG
tttgttaatatacatgaccc

SEQ ID NO: 152315 - DNA, 20 bp, Artificial Sequence
  Description of Artificial Sequence: Synthetic oligonucleotide
  Target: LAMA2; (+) strand; PAM type: NRG; PAM sequence: CAG
atatacatgacccaagtcat

SEQ ID NO: 152316 - DNA, 20 bp, Artificial Sequence
  Description of Artificial Sequence: Synthetic oligonucleotide
  Target: LAMA2; (+) strand; PAM type: NRG; PAM sequence: AAG
aagtcatcagctaataaacc

SEQ ID NO: 152317 - DNA, 20 bp, Artificial Sequence
  Description of Artificial Sequence: Synthetic oligonucleotide
  Target: LAMA2; (+) strand; PAM type: NRG; PAM sequence: TAG
ataaaccaagaaatccaaat

SEQ ID NO: 152318 - DNA, 20 bp, Artificial Sequence
  Description of Artificial Sequence: Synthetic oligonucleotide
  Target: LAMA2; (+) strand; PAM type: NRG; PAM sequence: AGG
taaaccaagaaatccaaatt

SEQ ID NO: 152319 - DNA, 20 bp, Artificial Sequence
  Description of Artificial Sequence: Synthetic oligonucleotide
  Target: LAMA2; (+) strand; PAM type: NRG; PAM sequence: AAG
accaagaaatccaaattagg

SEQ ID NO: 152320 - DNA, 20 bp, Artificial Sequence
  Description of Artificial Sequence: Synthetic oligonucleotide
  Target: LAMA2; (+) strand; PAM type: NRG; PAM sequence: TAG
aaatccaaattaggaagaaa

SEQ ID NO: 152321 - DNA, 20 bp, Artificial Sequence
  Description of Artificial Sequence: Synthetic oligonucleotide
  Target: LAMA2; (+) strand; PAM type: NRG; PAM sequence: GAG
atccaaattaggaagaaata

SEQ ID NO: 152322 - DNA, 20 bp, Artificial Sequence
  Description of Artificial Sequence: Synthetic oligonucleotide
  Target: LAMA2; (+) strand; PAM type: NRG; PAM sequence: CAG
aaattaggaagaaatagagc

SEQ ID NO: 152323 - DNA, 20 bp, Artificial Sequence
  Description of Artificial Sequence: Synthetic oligonucleotide
  Target: LAMA2; (+) strand; PAM type: NRG; PAM sequence: AGG
aattaggaagaaatagagcc

SEQ ID NO: 152324 - DNA, 20 bp, Artificial Sequence
  Description of Artificial Sequence: Synthetic oligonucleotide
  Target: LAMA2; (+) strand; PAM type: NRG; PAM sequence: CAG
atagagccaggattacaatc

SEQ ID NO: 152325 - DNA, 20 bp, Artificial Sequence
  Description of Artificial Sequence: Synthetic oligonucleotide
  Target: LAMA2; (+) strand; PAM type: NRG; PAM sequence: TAG
ttacaatccagatgtgtcta

SEQ ID NO: 152326 - DNA, 20 bp, Artificial Sequence
  Description of Artificial Sequence: Synthetic oligonucleotide
  Target: LAMA2; (+) strand; PAM type: NRG; PAM sequence: CAG
gatgtgtctatagcccattc

SEQ ID NO: 152327 - DNA, 20 bp, Artificial Sequence
  Description of Artificial Sequence: Synthetic oligonucleotide
  Target: LAMA2; (+) strand; PAM type: NRG; PAM sequence: AAG
gtctatagcccattccagtt

SEQ ID NO: 152328 - DNA, 20 bp, Artificial Sequence
  Description of Artificial Sequence: Synthetic oligonucleotide
  Target: LAMA2; (+) strand; PAM type: NRG; PAM sequence: CAG
cagttaagcattttttcaat

SEQ ID NO: 152329 - DNA, 20 bp, Artificial Sequence
  Description of Artificial Sequence: Synthetic oligonucleotide
  Target: LAMA2; (+) strand; PAM type: NRG; PAM sequence: AAG
aagcattttttcaatcagtt

SEQ ID NO: 152330 - DNA, 20 bp, Artificial Sequence
  Description of Artificial Sequence: Synthetic oligonucleotide
  Target: LAMA2; (+) strand; PAM type: NRG; PAM sequence: TAG
tttcaatcagttaagtttat

SEQ ID NO: 152331 - DNA, 20 bp, Artificial Sequence
  Description of Artificial Sequence: Synthetic oligonucleotide
  Target: LAMA2; (+) strand; PAM type: NRG; PAM sequence: AAG
ttaagtttattagttcttgc

SEQ ID NO: 152332 - DNA, 20 bp, Artificial Sequence
  Description of Artificial Sequence: Synthetic oligonucleotide
  Target: LAMA2; (+) strand; PAM type: NRG; PAM sequence: AGG
taagtttattagttcttgca

SEQ ID NO: 152333 - DNA, 20 bp, Artificial Sequence
  Description of Artificial Sequence: Synthetic oligonucleotide
  Target: LAMA2; (+) strand; PAM type: NRG; PAM sequence: TGG
tcttgcaaggcattgatctt

SEQ ID NO: 152334 - DNA, 20 bp, Artificial Sequence
  Description of Artificial Sequence: Synthetic oligonucleotide
  Target: LAMA2; (+) strand; PAM type: NRG; PAM sequence: TAG
caaggcattgatctttggaa

SEQ ID NO: 152335 - DNA, 20 bp, Artificial Sequence
  Description of Artificial Sequence: Synthetic oligonucleotide
  Target: LAMA2; (+) strand; PAM type: NRG; PAM sequence: GAG
aggcattgatctttggaata

SEQ ID NO: 152336 - DNA, 20 bp, Artificial Sequence
  Description of Artificial Sequence: Synthetic oligonucleotide
  Target: LAMA2; (+) strand; PAM type: NRG; PAM sequence: AAG
tctttggaatagagatgctg

SEQ ID NO: 152337 - DNA, 20 bp, Artificial Sequence
  Description of Artificial Sequence: Synthetic oligonucleotide
  Target: LAMA2; (+) strand; PAM type: NRG; PAM sequence: CAG
ttggaatagagatgctgaag

SEQ ID NO: 152338 - DNA, 20 bp, Artificial Sequence
  Description of Artificial Sequence: Synthetic oligonucleotide
  Target: LAMA2; (+) strand; PAM type: NRG; PAM sequence: AAG
tgctgaagcagcttattcaa

SEQ ID NO: 152339 - DNA, 20 bp, Artificial Sequence
  Description of Artificial Sequence: Synthetic oligonucleotide
  Target: LAMA2; (+) strand; PAM type: NRG; PAM sequence: AAG
gaagcagcttattcaaaaga

SEQ ID NO: 152340 - DNA, 20 bp, Artificial Sequence
  Description of Artificial Sequence: Synthetic oligonucleotide
  Target: LAMA2; (+) strand; PAM type: NRG; PAM sequence: AGG
aagcagcttattcaaaagaa

SEQ ID NO: 152341 - DNA, 20 bp, Artificial Sequence
  Description of Artificial Sequence: Synthetic oligonucleotide
  Target: LAMA2; (+) strand; PAM type: NRG; PAM sequence: GGG
agcagcttattcaaaagaaa

SEQ ID NO: 152342 - DNA, 20 bp, Artificial Sequence
  Description of Artificial Sequence: Synthetic oligonucleotide
  Target: LAMA2; (+) strand; PAM type: NRG; PAM sequence: AAG
tcaaaagaaagggaacgaca

SEQ ID NO: 152343 - DNA, 20 bp, Artificial Sequence
  Description of Artificial Sequence: Synthetic oligonucleotide
  Target: LAMA2; (+) strand; PAM type: NRG; PAM sequence: GAG
ttataaaaatacaaatgaat

SEQ ID NO: 152344 - DNA, 20 bp, Artificial Sequence
  Description of Artificial Sequence: Synthetic oligonucleotide
  Target: LAMA2; (+) strand; PAM type: NRG; PAM sequence: TAG
agatgaataacaaatgtcaa

SEQ ID NO: 152345 - DNA, 20 bp, Artificial Sequence
  Description of Artificial Sequence: Synthetic oligonucleotide
  Target: LAMA2; (+) strand; PAM type: NRG; PAM sequence: GAG
atgaataacaaatgtcaata

SEQ ID NO: 152346 - DNA, 20 bp, Artificial Sequence
  Description of Artificial Sequence: Synthetic oligonucleotide
  Target: LAMA2; (+) strand; PAM type: NRG; PAM sequence: AGG
tgaataacaaatgtcaatag

SEQ ID NO: 152347 - DNA, 20 bp, Artificial Sequence
  Description of Artificial Sequence: Synthetic oligonucleotide
  Target: LAMA2; (+) strand; PAM type: NRG; PAM sequence: GGG
gaataacaaatgtcaataga

SEQ ID NO: 152348 - DNA, 20 bp, Artificial Sequence
  Description of Artificial Sequence: Synthetic oligonucleotide
  Target: LAMA2; (+) strand; PAM type: NRG; PAM sequence: GGG
aataacaaatgtcaatagag

SEQ ID NO: 152349 - DNA, 20 bp, Artificial Sequence
  Description of Artificial Sequence: Synthetic oligonucleotide
  Target: LAMA2; (+) strand; PAM type: NRG; PAM sequence: AAG
agaggggacacaaatccaac

SEQ ID NO: 152350 - DNA, 20 bp, Artificial Sequence
  Description of Artificial Sequence: Synthetic oligonucleotide
  Target: LAMA2; (+) strand; PAM type: NRG; PAM sequence: TGG
aatccaacaagttttttaaa

SEQ ID NO: 152351 - DNA, 20 bp, Artificial Sequence
  Description of Artificial Sequence: Synthetic oligonucleotide
  Target: LAMA2; (+) strand; PAM type: NRG; PAM sequence: AAG
aagttttttaaatggtttca

SEQ ID NO: 152352 - DNA, 20 bp, Artificial Sequence
  Description of Artificial Sequence: Synthetic oligonucleotide
  Target: LAMA2; (+) strand; PAM type: NRG; PAM sequence: TGG
tttaaatggtttcaaagctc

SEQ ID NO: 152353 - DNA, 20 bp, Artificial Sequence
  Description of Artificial Sequence: Synthetic oligonucleotide
  Target: LAMA2; (+) strand; PAM type: NRG; PAM sequence: AAG
aatggtttcaaagctctggc

SEQ ID NO: 152354 - DNA, 20 bp, Artificial Sequence
  Description of Artificial Sequence: Synthetic oligonucleotide
  Target: LAMA2; (+) strand; PAM type: NRG; PAM sequence: AAG
aagctctggcaagattaatc

SEQ ID NO: 152355 - DNA, 20 bp, Artificial Sequence
  Description of Artificial Sequence: Synthetic oligonucleotide
  Target: LAMA2; (+) strand; PAM type: NRG; PAM sequence: TGG
aagattaatcaagcaaaacg

SEQ ID NO: 152356 - DNA, 20 bp, Artificial Sequence
  Description of Artificial Sequence: Synthetic oligonucleotide
  Target: LAMA2; (+) strand; PAM type: NRG; PAM sequence: GGG
agattaatcaagcaaaacgt

SEQ ID NO: 152357 - DNA, 20 bp, Artificial Sequence
  Description of Artificial Sequence: Synthetic oligonucleotide
  Target: LAMA2; (+) strand; PAM type: NRG; PAM sequence: TAG
aaaacacaaataaacaattt

SEQ ID NO: 152358 - DNA, 20 bp, Artificial Sequence
  Description of Artificial Sequence: Synthetic oligonucleotide
  Target: LAMA2; (+) strand; PAM type: NRG; PAM sequence: TGG
caattttagaaatgtaaaaa

SEQ ID NO: 152359 - DNA, 20 bp, Artificial Sequence
  Description of Artificial Sequence: Synthetic oligonucleotide
  Target: LAMA2; (+) strand; PAM type: NRG; PAM sequence: GGG
aattttagaaatgtaaaaat

SEQ ID NO: 152360 - DNA, 20 bp, Artificial Sequence
  Description of Artificial Sequence: Synthetic oligonucleotide
  Target: LAMA2; (+) strand; PAM type: NRG; PAM sequence: AAG
tacttcaaaaataaacaaat

SEQ ID NO: 152361 - DNA, 20 bp, Artificial Sequence
  Description of Artificial Sequence: Synthetic oligonucleotide
  Target: LAMA2; (+) strand; PAM type: NRG; PAM sequence: AGG
acttcaaaaataaacaaata

SEQ ID NO: 152362 - DNA, 20 bp, Artificial Sequence
  Description of Artificial Sequence: Synthetic oligonucleotide
  Target: LAMA2; (+) strand; PAM type: NRG; PAM sequence: AAG
tcaaaaataaacaaataagg

SEQ ID NO: 152363 - DNA, 20 bp, Artificial Sequence
  Description of Artificial Sequence: Synthetic oligonucleotide
  Target: LAMA2; (+) strand; PAM type: NRG; PAM sequence: CAG
ataaacaaataaggaagtat

SEQ ID NO: 152364 - DNA, 20 bp, Artificial Sequence
  Description of Artificial Sequence: Synthetic oligonucleotide
  Target: LAMA2; (+) strand; PAM type: NRG; PAM sequence: AAG
tatcagaaaataaacaaatt

SEQ ID NO: 152365 - DNA, 20 bp, Artificial Sequence
  Description of Artificial Sequence: Synthetic oligonucleotide
  Target: LAMA2; (+) strand; PAM type: NRG; PAM sequence: GAG
tcagaaaataaacaaattaa

SEQ ID NO: 152366 - DNA, 20 bp, Artificial Sequence
  Description of Artificial Sequence: Synthetic oligonucleotide
  Target: LAMA2; (+) strand; PAM type: NRG; PAM sequence: AAG
tatgaaaatttacacacaat

SEQ ID NO: 152367 - DNA, 20 bp, Artificial Sequence
  Description of Artificial Sequence: Synthetic oligonucleotide
  Target: LAMA2; (+) strand; PAM type: NRG; PAM sequence: TAG
cacacaataagaatacaatt

SEQ ID NO: 152368 - DNA, 20 bp, Artificial Sequence
  Description of Artificial Sequence: Synthetic oligonucleotide
  Target: LAMA2; (+) strand; PAM type: NRG; PAM sequence: AAG
ataagaatacaatttagaaa

SEQ ID NO: 152369 - DNA, 20 bp, Artificial Sequence
  Description of Artificial Sequence: Synthetic oligonucleotide
  Target: LAMA2; (+) strand; PAM type: NRG; PAM sequence: AGG
taagaatacaatttagaaaa

SEQ ID NO: 152370 - DNA, 20 bp, Artificial Sequence
  Description of Artificial Sequence: Synthetic oligonucleotide
  Target: LAMA2; (+) strand; PAM type: NRG; PAM sequence: TAG
tagaaaaaggaatatccttc

SEQ ID NO: 152371 - DNA, 20 bp, Artificial Sequence
  Description of Artificial Sequence: Synthetic oligonucleotide
  Target: LAMA2; (+) strand; PAM type: NRG; PAM sequence: AGG
agaaaaaggaatatccttct

SEQ ID NO: 152372 - DNA, 20 bp, Artificial Sequence
  Description of Artificial Sequence: Synthetic oligonucleotide
  Target: LAMA2; (+) strand; PAM type: NRG; PAM sequence: AAG
aacttaaaaaaactgactca

SEQ ID NO: 152373 - DNA, 20 bp, Artificial Sequence
  Description of Artificial Sequence: Synthetic oligonucleotide
  Target: LAMA2; (+) strand; PAM type: NRG; PAM sequence: CAG
agaaaaaaaatctataatgt

SEQ ID NO: 152374 - DNA, 20 bp, Artificial Sequence
  Description of Artificial Sequence: Synthetic oligonucleotide
  Target: LAMA2; (+) strand; PAM type: NRG; PAM sequence: AAG
ataatgtcagataaacatta

SEQ ID NO: 152375 - DNA, 20 bp, Artificial Sequence
  Description of Artificial Sequence: Synthetic oligonucleotide
  Target: LAMA2; (+) strand; PAM type: NRG; PAM sequence: CAG
aaacattaaagtaattgaat

SEQ ID NO: 152376 - DNA, 20 bp, Artificial Sequence
  Description of Artificial Sequence: Synthetic oligonucleotide
  Target: LAMA2; (+) strand; PAM type: NRG; PAM sequence: CAG
cattaaagtaattgaatcag

SEQ ID NO: 152377 - DNA, 20 bp, Artificial Sequence
  Description of Artificial Sequence: Synthetic oligonucleotide
  Target: LAMA2; (+) strand; PAM type: NRG; PAM sequence: AAG
gtcaaataaaccttccaatg

SEQ ID NO: 152378 - DNA, 20 bp, Artificial Sequence
  Description of Artificial Sequence: Synthetic oligonucleotide
  Target: LAMA2; (+) strand; PAM type: NRG; PAM sequence: AAG
cttccaatgaagttaactcc

SEQ ID NO: 152379 - DNA, 20 bp, Artificial Sequence
  Description of Artificial Sequence: Synthetic oligonucleotide
  Target: LAMA2; (+) strand; PAM type: NRG; PAM sequence: AAG
ctccaagcctattgatttgc

SEQ ID NO: 152380 - DNA, 20 bp, Artificial Sequence
  Description of Artificial Sequence: Synthetic oligonucleotide
  Target: LAMA2; (+) strand; PAM type: NRG; PAM sequence: CAG
gcaaaattatacaaactttc

SEQ ID NO: 152381 - DNA, 20 bp, Artificial Sequence
  Description of Artificial Sequence: Synthetic oligonucleotide
  Target: LAMA2; (+) strand; PAM type: NRG; PAM sequence: GAG
aaaattatacaaactttcca

SEQ ID NO: 152382 - DNA, 20 bp, Artificial Sequence
  Description of Artificial Sequence: Synthetic oligonucleotide
  Target: LAMA2; (+) strand; PAM type: NRG; PAM sequence: TAG
tatacaaactttccagagaa

SEQ ID NO: 152383 - DNA, 20 bp, Artificial Sequence
  Description of Artificial Sequence: Synthetic oligonucleotide
  Target: LAMA2; (+) strand; PAM type: NRG; PAM sequence: TGG
tttccagagaatagaacaac

SEQ ID NO: 152384 - DNA, 20 bp, Artificial Sequence
  Description of Artificial Sequence: Synthetic oligonucleotide
  Target: LAMA2; (+) strand; PAM type: NRG; PAM sequence: GGG
ttccagagaatagaacaact

SEQ ID NO: 152385 - DNA, 20 bp, Artificial Sequence
  Description of Artificial Sequence: Synthetic oligonucleotide
  Target: LAMA2; (+) strand; PAM type: NRG; PAM sequence: TGG
actcctcacataattttatg

SEQ ID NO: 152386 - DNA, 20 bp, Artificial Sequence
  Description of Artificial Sequence: Synthetic oligonucleotide
  Target: LAMA2; (+) strand; PAM type: NRG; PAM sequence: AAG
gcttgatataaaatcttgac

SEQ ID NO: 152387 - DNA, 20 bp, Artificial Sequence
  Description of Artificial Sequence: Synthetic oligonucleotide
  Target: LAMA2; (+) strand; PAM type: NRG; PAM sequence: GAG
ttgatataaaatcttgacaa

SEQ ID NO: 152388 - DNA, 20 bp, Artificial Sequence
  Description of Artificial Sequence: Synthetic oligonucleotide
  Target: LAMA2; (+) strand; PAM type: NRG; PAM sequence: AGG
tgatataaaatcttgacaag

SEQ ID NO: 152389 - DNA, 20 bp, Artificial Sequence
  Description of Artificial Sequence: Synthetic oligonucleotide
  Target: LAMA2; (+) strand; PAM type: NRG; PAM sequence: AAG
atcttgacaagaggactatg

SEQ ID NO: 152390 - DNA, 20 bp, Artificial Sequence
  Description of Artificial Sequence: Synthetic oligonucleotide
  Target: LAMA2; (+) strand; PAM type: NRG; PAM sequence: AAG
ttgacaagaggactatgaag

SEQ ID NO: 152391 - DNA, 20 bp, Artificial Sequence
  Description of Artificial Sequence: Synthetic oligonucleotide
  Target: LAMA2; (+) strand; PAM type: NRG; PAM sequence: AAG
aagaagaaaacccctaccca

SEQ ID NO: 152392 - DNA, 20 bp, Artificial Sequence
  Description of Artificial Sequence: Synthetic oligonucleotide
  Target: LAMA2; (+) strand; PAM type: NRG; PAM sequence: TAG
cccaaagtcactcatgaacg

SEQ ID NO: 152393 - DNA, 20 bp, Artificial Sequence
  Description of Artificial Sequence: Synthetic oligonucleotide
  Target: LAMA2; (+) strand; PAM type: NRG; PAM sequence: CAG
tattaacaacccaaatccat

SEQ ID NO: 152394 - DNA, 20 bp, Artificial Sequence
  Description of Artificial Sequence: Synthetic oligonucleotide
  Target: LAMA2; (+) strand; PAM type: NRG; PAM sequence: TAG
aatccatcagtttataaaaa

SEQ ID NO: 152395 - DNA, 20 bp, Artificial Sequence
  Description of Artificial Sequence: Synthetic oligonucleotide
  Target: LAMA2; (+) strand; PAM type: NRG; PAM sequence: CAG
catcagtttataaaaatagt

SEQ ID NO: 152396 - DNA, 20 bp, Artificial Sequence
  Description of Artificial Sequence: Synthetic oligonucleotide
  Target: LAMA2; (+) strand; PAM type: NRG; PAM sequence: AGG
atcagtttataaaaatagtc

SEQ ID NO: 152397 - DNA, 20 bp, Artificial Sequence
  Description of Artificial Sequence: Synthetic oligonucleotide
  Target: LAMA2; (+) strand; PAM type: NRG; PAM sequence: TGG
taaaaatagtcaggctaaat

SEQ ID NO: 152398 - DNA, 20 bp, Artificial Sequence
  Description of Artificial Sequence: Synthetic oligonucleotide
  Target: LAMA2; (+) strand; PAM type: NRG; PAM sequence: AAG
atagtcaggctaaattggcc

SEQ ID NO: 152399 - DNA, 20 bp, Artificial Sequence
  Description of Artificial Sequence: Synthetic oligonucleotide
  Target: LAMA2; (+) strand; PAM type: NRG; PAM sequence: TGG
gtcaggctaaattggccaag

SEQ ID NO: 152400 - DNA, 20 bp, Artificial Sequence
  Description of Artificial Sequence: Synthetic oligonucleotide
  Target: LAMA2; (+) strand; PAM type: NRG; PAM sequence: GAG
ggattttatcatccgtgttt

SEQ ID NO: 152401 - DNA, 20 bp, Artificial Sequence
  Description of Artificial Sequence: Synthetic oligonucleotide
  Target: LAMA2; (+) strand; PAM type: NRG; PAM sequence: AGG
gattttatcatccgtgtttg

SEQ ID NO: 152402 - DNA, 20 bp, Artificial Sequence
  Description of Artificial Sequence: Synthetic oligonucleotide
  Target: LAMA2; (+) strand; PAM type: NRG; PAM sequence: TAG
gtttgaggttactttaaaat

SEQ ID NO: 152403 - DNA, 20 bp, Artificial Sequence
  Description of Artificial Sequence: Synthetic oligonucleotide
  Target: LAMA2; (+) strand; PAM type: NRG; PAM sequence: CAG
ttactttaaaattagaaaac

SEQ ID NO: 152404 - DNA, 20 bp, Artificial Sequence
  Description of Artificial Sequence: Synthetic oligonucleotide
  Target: LAMA2; (+) strand; PAM type: NRG; PAM sequence: AAG
taaaattagaaaaccagttt

SEQ ID NO: 152405 - DNA, 20 bp, Artificial Sequence
  Description of Artificial Sequence: Synthetic oligonucleotide
  Target: LAMA2; (+) strand; PAM type: NRG; PAM sequence: AAG
tgaccatattgactgattaa

SEQ ID NO: 152406 - DNA, 20 bp, Artificial Sequence
  Description of Artificial Sequence: Synthetic oligonucleotide
  Target: LAMA2; (+) strand; PAM type: NRG; PAM sequence: GAG
accatattgactgattaaaa

SEQ ID NO: 152407 - DNA, 20 bp, Artificial Sequence
  Description of Artificial Sequence: Synthetic oligonucleotide
  Target: LAMA2; (+) strand; PAM type: NRG; PAM sequence: TAG
aaaaaaatcaattatctcaa

SEQ ID NO: 152408 - DNA, 20 bp, Artificial Sequence
  Description of Artificial Sequence: Synthetic oligonucleotide
  Target: LAMA2; (+) strand; PAM type: NRG; PAM sequence: CAG
atcaattatctcaatagaca

SEQ ID NO: 152409 - DNA, 20 bp, Artificial Sequence
  Description of Artificial Sequence: Synthetic oligonucleotide
  Target: LAMA2; (+) strand; PAM type: NRG; PAM sequence: AAG
tatctcaatagacacagaaa

SEQ ID NO: 152410 - DNA, 20 bp, Artificial Sequence
  Description of Artificial Sequence: Synthetic oligonucleotide
  Target: LAMA2; (+) strand; PAM type: NRG; PAM sequence: TGG
aatagacacagaaaaagaaa

SEQ ID NO: 152411 - DNA, 20 bp, Artificial Sequence
  Description of Artificial Sequence: Synthetic oligonucleotide
  Target: LAMA2; (+) strand; PAM type: NRG; PAM sequence: GGG
atagacacagaaaaagaaat

SEQ ID NO: 152412 - DNA, 20 bp, Artificial Sequence
  Description of Artificial Sequence: Synthetic oligonucleotide
  Target: LAMA2; (+) strand; PAM type: NRG; PAM sequence: TAG
gtctgaaaaattttgaaaac

SEQ ID NO: 152413 - DNA, 20 bp, Artificial Sequence
  Description of Artificial Sequence: Synthetic oligonucleotide
  Target: LAMA2; (+) strand; PAM type: NRG; PAM sequence: TGG
aaaattttgaaaactagaat

SEQ ID NO: 152414 - DNA, 20 bp, Artificial Sequence
  Description of Artificial Sequence: Synthetic oligonucleotide
  Target: LAMA2; (+) strand; PAM type: NRG; PAM sequence: AAG
tttgaaaactagaattggaa

SEQ ID NO: 152415 - DNA, 20 bp, Artificial Sequence
  Description of Artificial Sequence: Synthetic oligonucleotide
  Target: LAMA2; (+) strand; PAM type: NRG; PAM sequence: AAG
gaaaagcactttaactgatg

SEQ ID NO: 152416 - DNA, 20 bp, Artificial Sequence
  Description of Artificial Sequence: Synthetic oligonucleotide
  Target: LAMA2; (+) strand; PAM type: NRG; PAM sequence: AGG
aaaagcactttaactgatga

SEQ ID NO: 152417 - DNA, 20 bp, Artificial Sequence
  Description of Artificial Sequence: Synthetic oligonucleotide
  Target: LAMA2; (+) strand; PAM type: NRG; PAM sequence: TAG
gctatctacataaaaatcaa

SEQ ID NO: 152418 - DNA, 20 bp, Artificial Sequence
  Description of Artificial Sequence: Synthetic oligonucleotide
  Target: LAMA2; (+) strand; PAM type: NRG; PAM sequence: AAG
tatttaatataaaatgttca

SEQ ID NO: 152419 - DNA, 20 bp, Artificial Sequence
  Description of Artificial Sequence: Synthetic oligonucleotide
  Target: LAMA2; (+) strand; PAM type: NRG; PAM sequence: AAG
aaatgttcaaagtattgttt

SEQ ID NO: 152420 - DNA, 20 bp, Artificial Sequence
  Description of Artificial Sequence: Synthetic oligonucleotide
  Target: LAMA2; (+) strand; PAM type: NRG; PAM sequence: TAG
actcccacttaacattgtgc

SEQ ID NO: 152421 - DNA, 20 bp, Artificial Sequence
  Description of Artificial Sequence: Synthetic oligonucleotide
  Target: LAMA2; (+) strand; PAM type: NRG; PAM sequence: AAG
cccacttaacattgtgctag

SEQ ID NO: 152422 - DNA, 20 bp, Artificial Sequence
  Description of Artificial Sequence: Synthetic oligonucleotide
  Target: LAMA2; (+) strand; PAM type: NRG; PAM sequence: TGG
taacattgtgctagaagatg

SEQ ID NO: 152423 - DNA, 20 bp, Artificial Sequence
  Description of Artificial Sequence: Synthetic oligonucleotide
  Target: LAMA2; (+) strand; PAM type: NRG; PAM sequence: CAG
attgtgctagaagatgtgga

SEQ ID NO: 152424 - DNA, 20 bp, Artificial Sequence
  Description of Artificial Sequence: Synthetic oligonucleotide
  Target: LAMA2; (+) strand; PAM type: NRG; PAM sequence: CAG
gctagaagatgtggacagtg

SEQ ID NO: 152425 - DNA, 20 bp, Artificial Sequence
  Description of Artificial Sequence: Synthetic oligonucleotide
  Target: LAMA2; (+) strand; PAM type: NRG; PAM sequence: TAG
agaagatgtggacagtgcag

SEQ ID NO: 152426 - DNA, 20 bp, Artificial Sequence
  Description of Artificial Sequence: Synthetic oligonucleotide
  Target: LAMA2; (+) strand; PAM type: NRG; PAM sequence: TAG
gatgtggacagtgcagtaga

SEQ ID NO: 152427 - DNA, 20 bp, Artificial Sequence
  Description of Artificial Sequence: Synthetic oligonucleotide
  Target: LAMA2; (+) strand; PAM type: NRG; PAM sequence: AGG
atgtggacagtgcagtagat

SEQ ID NO: 152428 - DNA, 20 bp, Artificial Sequence
  Description of Artificial Sequence: Synthetic oligonucleotide
  Target: LAMA2; (+) strand; PAM type: NRG; PAM sequence: TAG
tagataggaaataaaatata

SEQ ID NO: 152429 - DNA, 20 bp, Artificial Sequence
  Description of Artificial Sequence: Synthetic oligonucleotide
  Target: LAMA2; (+) strand; PAM type: NRG; PAM sequence: AGG
agataggaaataaaatatat

SEQ ID NO: 152430 - DNA, 20 bp, Artificial Sequence
  Description of Artificial Sequence: Synthetic oligonucleotide
  Target: LAMA2; (+) strand; PAM type: NRG; PAM sequence: GGG
gataggaaataaaatatata

SEQ ID NO: 152431 - DNA, 20 bp, Artificial Sequence
  Description of Artificial Sequence: Synthetic oligonucleotide
  Target: LAMA2; (+) strand; PAM type: NRG; PAM sequence: CAG
gaaataaaatatatagggat

SEQ ID NO: 152432 - DNA, 20 bp, Artificial Sequence
  Description of Artificial Sequence: Synthetic oligonucleotide
  Target: LAMA2; (+) strand; PAM type: NRG; PAM sequence: AAG
taaaatatatagggatcaga

SEQ ID NO: 152433 - DNA, 20 bp, Artificial Sequence
  Description of Artificial Sequence: Synthetic oligonucleotide
  Target: LAMA2; (+) strand; PAM type: NRG; PAM sequence: AGG
aaaatatatagggatcagaa

SEQ ID NO: 152434 - DNA, 20 bp, Artificial Sequence
  Description of Artificial Sequence: Synthetic oligonucleotide
  Target: LAMA2; (+) strand; PAM type: NRG; PAM sequence: AAG
atatatagggatcagaaagg

SEQ ID NO: 152435 - DNA, 20 bp, Artificial Sequence
  Description of Artificial Sequence: Synthetic oligonucleotide
  Target: LAMA2; (+) strand; PAM type: NRG; PAM sequence: TAG
gaagaaataaaactcactta

SEQ ID NO: 152436 - DNA, 20 bp, Artificial Sequence
  Description of Artificial Sequence: Synthetic oligonucleotide
  Target: LAMA2; (+) strand; PAM type: NRG; PAM sequence: AAG
acttatctgcttgtaaaatc

SEQ ID NO: 152437 - DNA, 20 bp, Artificial Sequence
  Description of Artificial Sequence: Synthetic oligonucleotide
  Target: LAMA2; (+) strand; PAM type: NRG; PAM sequence: GAG
ttatctgcttgtaaaatcaa

SEQ ID NO: 152438 - DNA, 20 bp, Artificial Sequence
  Description of Artificial Sequence: Synthetic oligonucleotide
  Target: LAMA2; (+) strand; PAM type: NRG; PAM sequence: CAG
tgtaaaatcaagagaatcta

SEQ ID NO: 152439 - DNA, 20 bp, Artificial Sequence
  Description of Artificial Sequence: Synthetic oligonucleotide
  Target: LAMA2; (+) strand; PAM type: NRG; PAM sequence: CAG
tctacagacaaattcttaat

SEQ ID NO: 152440 - DNA, 20 bp, Artificial Sequence
  Description of Artificial Sequence: Synthetic oligonucleotide
  Target: LAMA2; (+) strand; PAM type: NRG; PAM sequence: GAG
cagacaaattcttaatcagt

SEQ ID NO: 152441 - DNA, 20 bp, Artificial Sequence
  Description of Artificial Sequence: Synthetic oligonucleotide
  Target: LAMA2; (+) strand; PAM type: NRG; PAM sequence: AAG
ttcttaatcagtgagtcaat

SEQ ID NO: 152442 - DNA, 20 bp, Artificial Sequence
  Description of Artificial Sequence: Synthetic oligonucleotide
  Target: LAMA2; (+) strand; PAM type: NRG; PAM sequence: AGG
tcttaatcagtgagtcaata

SEQ ID NO: 152443 - DNA, 20 bp, Artificial Sequence
  Description of Artificial Sequence: Synthetic oligonucleotide
  Target: LAMA2; (+) strand; PAM type: NRG; PAM sequence: GAG
ttaatcagtgagtcaataag

SEQ ID NO: 152444 - DNA, 20 bp, Artificial Sequence
  Description of Artificial Sequence: Synthetic oligonucleotide
  Target: LAMA2; (+) strand; PAM type: NRG; PAM sequence: AAG
tatgcaaaattaatatacaa

SEQ ID NO: 152445 - DNA, 20 bp, Artificial Sequence
  Description of Artificial Sequence: Synthetic oligonucleotide
  Target: LAMA2; (+) strand; PAM type: NRG; PAM sequence: AAG
acttttcaaaaaaaattttt

SEQ ID NO: 152446 - DNA, 20 bp, Artificial Sequence
  Description of Artificial Sequence: Synthetic oligonucleotide
  Target: LAMA2; (+) strand; PAM type: NRG; PAM sequence: GAG
ttttcaaaaaaaatttttaa

SEQ ID NO: 152447 - DNA, 20 bp, Artificial Sequence
  Description of Artificial Sequence: Synthetic oligonucleotide
  Target: LAMA2; (+) strand; PAM type: NRG; PAM sequence: AGG
tttcaaaaaaaatttttaag

SEQ ID NO: 152448 - DNA, 20 bp, Artificial Sequence
  Description of Artificial Sequence: Synthetic oligonucleotide
  Target: LAMA2; (+) strand; PAM type: NRG; PAM sequence: TAG
ttttaagaggccatgtataa

SEQ ID NO: 152449 - DNA, 20 bp, Artificial Sequence
  Description of Artificial Sequence: Synthetic oligonucleotide
  Target: LAMA2; (+) strand; PAM type: NRG; PAM sequence: TAG
ataatagcaatacatataaa

SEQ ID NO: 152450 - DNA, 20 bp, Artificial Sequence
  Description of Artificial Sequence: Synthetic oligonucleotide
  Target: LAMA2; (+) strand; PAM type: NRG; PAM sequence: AAG
caatacatataaatagtacc

SEQ ID NO: 152451 - DNA, 20 bp, Artificial Sequence
  Description of Artificial Sequence: Synthetic oligonucleotide
  Target: LAMA2; (+) strand; PAM type: NRG; PAM sequence: AGG
aatacatataaatagtacca

SEQ ID NO: 152452 - DNA, 20 bp, Artificial Sequence
  Description of Artificial Sequence: Synthetic oligonucleotide
  Target: LAMA2; (+) strand; PAM type: NRG; PAM sequence: TAG
agtaccaaggattaaatttg

SEQ ID NO: 152453 - DNA, 20 bp, Artificial Sequence
  Description of Artificial Sequence: Synthetic oligonucleotide
  Target: LAMA2; (+) strand; PAM type: NRG; PAM sequence: AGG
gtaccaaggattaaatttgt

SEQ ID NO: 152454 - DNA, 20 bp, Artificial Sequence
  Description of Artificial Sequence: Synthetic oligonucleotide
  Target: LAMA2; (+) strand; PAM type: NRG; PAM sequence: GGG
taccaaggattaaatttgta

SEQ ID NO: 152455 - DNA, 20 bp, Artificial Sequence
  Description of Artificial Sequence: Synthetic oligonucleotide
  Target: LAMA2; (+) strand; PAM type: NRG; PAM sequence: AAG
aggattaaatttgtagggaa

SEQ ID NO: 152456 - DNA, 20 bp, Artificial Sequence
  Description of Artificial Sequence: Synthetic oligonucleotide
  Target: LAMA2; (+) strand; PAM type: NRG; PAM sequence: TGG
aatttgtagggaaaagccaa

SEQ ID NO: 152457 - DNA, 20 bp, Artificial Sequence
  Description of Artificial Sequence: Synthetic oligonucleotide
  Target: LAMA2; (+) strand; PAM type: NRG; PAM sequence: AAG
gtagggaaaagccaatggcc

SEQ ID NO: 152458 - DNA, 20 bp, Artificial Sequence
  Description of Artificial Sequence: Synthetic oligonucleotide
  Target: LAMA2; (+) strand; PAM type: NRG; PAM sequence: AAG
caatggccaagaataatcaa

SEQ ID NO: 152459 - DNA, 20 bp, Artificial Sequence
  Description of Artificial Sequence: Synthetic oligonucleotide
  Target: LAMA2; (+) strand; PAM type: NRG; PAM sequence: TAG
agaataatcaaaagaaatta

SEQ ID NO: 152460 - DNA, 20 bp, Artificial Sequence
  Description of Artificial Sequence: Synthetic oligonucleotide
  Target: LAMA2; (+) strand; PAM type: NRG; PAM sequence: TGG
taatcaaaagaaattataga

SEQ ID NO: 152461 - DNA, 20 bp, Artificial Sequence
  Description of Artificial Sequence: Synthetic oligonucleotide
  Target: LAMA2; (+) strand; PAM type: NRG; PAM sequence: GGG
aatcaaaagaaattatagat

SEQ ID NO: 152462 - DNA, 20 bp, Artificial Sequence
  Description of Artificial Sequence: Synthetic oligonucleotide
  Target: LAMA2; (+) strand; PAM type: NRG; PAM sequence: GGG
atcaaaagaaattatagatg

SEQ ID NO: 152463 - DNA, 20 bp, Artificial Sequence
  Description of Artificial Sequence: Synthetic oligonucleotide
  Target: LAMA2; (+) strand; PAM type: NRG; PAM sequence: TGG
aaattatagatggggtgcga

SEQ ID NO: 152464 - DNA, 20 bp, Artificial Sequence
  Description of Artificial Sequence: Synthetic oligonucleotide
  Target: LAMA2; (+) strand; PAM type: NRG; PAM sequence: CAG
atggctcacatatgtaatcc

SEQ ID NO: 152465 - DNA, 20 bp, Artificial Sequence
  Description of Artificial Sequence: Synthetic oligonucleotide
  Target: LAMA2; (+) strand; PAM type: NRG; PAM sequence: TGG
catatgtaatcccagcactt

SEQ ID NO: 152466 - DNA, 20 bp, Artificial Sequence
  Description of Artificial Sequence: Synthetic oligonucleotide
  Target: LAMA2; (+) strand; PAM type: NRG; PAM sequence: GGG
atatgtaatcccagcacttt

SEQ ID NO: 152467 - DNA, 20 bp, Artificial Sequence
  Description of Artificial Sequence: Synthetic oligonucleotide
  Target: LAMA2; (+) strand; PAM type: NRG; PAM sequence: GAG
atgtaatcccagcactttgg

SEQ ID NO: 152468 - DNA, 20 bp, Artificial Sequence
  Description of Artificial Sequence: Synthetic oligonucleotide
  Target: LAMA2; (+) strand; PAM type: NRG; PAM sequence: AGG
tgtaatcccagcactttggg

SEQ ID NO: 152469 - DNA, 20 bp, Artificial Sequence
  Description of Artificial Sequence: Synthetic oligonucleotide
  Target: LAMA2; (+) strand; PAM type: NRG; PAM sequence: AAG
tcccagcactttgggaggcc

SEQ ID NO: 152470 - DNA, 20 bp, Artificial Sequence
  Description of Artificial Sequence: Synthetic oligonucleotide
  Target: LAMA2; (+) strand; PAM type: NRG; PAM sequence: AGG
cccagcactttgggaggcca

SEQ ID NO: 152471 - DNA, 20 bp, Artificial Sequence
  Description of Artificial Sequence: Synthetic oligonucleotide
  Target: LAMA2; (+) strand; PAM type: NRG; PAM sequence: TAG
agcactttgggaggccaagg

SEQ ID NO: 152472 - DNA, 20 bp, Artificial Sequence
  Description of Artificial Sequence: Synthetic oligonucleotide
  Target: LAMA2; (+) strand; PAM type: NRG; PAM sequence: AGG
gcactttgggaggccaaggt

SEQ ID NO: 152473 - DNA, 20 bp, Artificial Sequence
  Description of Artificial Sequence: Synthetic oligonucleotide
  Target: LAMA2; (+) strand; PAM type: NRG; PAM sequence: TGG
ctttgggaggccaaggtagg

SEQ ID NO: 152474 - DNA, 20 bp, Artificial Sequence
  Description of Artificial Sequence: Synthetic oligonucleotide
  Target: LAMA2; (+) strand; PAM type: NRG; PAM sequence: GAG
ccaaggtaggtggatcacct

SEQ ID NO: 152475 - DNA, 20 bp, Artificial Sequence
  Description of Artificial Sequence: Synthetic oligonucleotide
  Target: LAMA2; (+) strand; PAM type: NRG; PAM sequence: AGG
caaggtaggtggatcacctg

SEQ ID NO: 152476 - DNA, 20 bp, Artificial Sequence
  Description of Artificial Sequence: Synthetic oligonucleotide
  Target: LAMA2; (+) strand; PAM type: NRG; PAM sequence: CAG
gtaggtggatcacctgaggt

SEQ ID NO: 152477 - DNA, 20 bp, Artificial Sequence
  Description of Artificial Sequence: Synthetic oligonucleotide
  Target: LAMA2; (+) strand; PAM type: NRG; PAM sequence: AAG
ggtggatcacctgaggtcag

SEQ ID NO: 152478 - DNA, 20 bp, Artificial Sequence
  Description of Artificial Sequence: Synthetic oligonucleotide
  Target: LAMA2; (+) strand; PAM type: NRG; PAM sequence: GAG
tcacctgaggtcagaagttc

SEQ ID NO: 152479 - DNA, 20 bp, Artificial Sequence
  Description of Artificial Sequence: Synthetic oligonucleotide
  Target: LAMA2; (+) strand; PAM type: NRG; PAM sequence: TGG
tcagaagttcgagaccaccc

SEQ ID NO: 152480 - DNA, 20 bp, Artificial Sequence
  Description of Artificial Sequence: Synthetic oligonucleotide
  Target: LAMA2; (+) strand; PAM type: NRG; PAM sequence: TGG
cgagaccaccctggccaaca

SEQ ID NO: 152481 - DNA, 20 bp, Artificial Sequence
  Description of Artificial Sequence: Synthetic oligonucleotide
  Target: LAMA2; (+) strand; PAM type: NRG; PAM sequence: TAG
tctactaaaaatacaaaaat

SEQ ID NO: 152482 - DNA, 20 bp, Artificial Sequence
  Description of Artificial Sequence: Synthetic oligonucleotide
  Target: LAMA2; (+) strand; PAM type: NRG; PAM sequence: CAG
ctaaaaatacaaaaattagc

SEQ ID NO: 152483 - DNA, 20 bp, Artificial Sequence
  Description of Artificial Sequence: Synthetic oligonucleotide
  Target: LAMA2; (+) strand; PAM type: NRG; PAM sequence: AGG
taaaaatacaaaaattagcc

SEQ ID NO: 152484 - DNA, 20 bp, Artificial Sequence
  Description of Artificial Sequence: Synthetic oligonucleotide
  Target: LAMA2; (+) strand; PAM type: NRG; PAM sequence: TGG
atacaaaaattagccaggtg

SEQ ID NO: 152485 - DNA, 20 bp, Artificial Sequence
  Description of Artificial Sequence: Synthetic oligonucleotide
  Target: LAMA2; (+) strand; PAM type: NRG; PAM sequence: CAG
gtgacaaacgcctgcaatcc

SEQ ID NO: 152486 - DNA, 20 bp, Artificial Sequence
  Description of Artificial Sequence: Synthetic oligonucleotide
  Target: LAMA2; (+) strand; PAM type: NRG; PAM sequence: CGG
cgcctgcaatcccagctact

SEQ ID NO: 152487 - DNA, 20 bp, Artificial Sequence
  Description of Artificial Sequence: Synthetic oligonucleotide
  Target: LAMA2; (+) strand; PAM type: NRG; PAM sequence: GGG
gcctgcaatcccagctactc

SEQ ID NO: 152488 - DNA, 20 bp, Artificial Sequence
  Description of Artificial Sequence: Synthetic oligonucleotide
  Target: LAMA2; (+) strand; PAM type: NRG; PAM sequence: GAG
ctgcaatcccagctactcgg

SEQ ID NO: 152489 - DNA, 20 bp, Artificial Sequence
  Description of Artificial Sequence: Synthetic oligonucleotide
  Target: LAMA2; (+) strand; PAM type: NRG; PAM sequence: AGG
tgcaatcccagctactcggg

SEQ ID NO: 152490 - DNA, 20 bp, Artificial Sequence
  Description of Artificial Sequence: Synthetic oligonucleotide
  Target: LAMA2; (+) strand; PAM type: NRG; PAM sequence: AAG
gctactcgggaggctgatgc

SEQ ID NO: 152491 - DNA, 20 bp, Artificial Sequence
  Description of Artificial Sequence: Synthetic oligonucleotide
  Target: LAMA2; (+) strand; PAM type: NRG; PAM sequence: GAG
tactcgggaggctgatgcaa

SEQ ID NO: 152492 - DNA, 20 bp, Artificial Sequence
  Description of Artificial Sequence: Synthetic oligonucleotide
  Target: LAMA2; (+) strand; PAM type: NRG; PAM sequence: TGG
gctgatgcaagagaattgct

SEQ ID NO: 152493 - DNA, 20 bp, Artificial Sequence
  Description of Artificial Sequence: Synthetic oligonucleotide
  Target: LAMA2; (+) strand; PAM type: NRG; PAM sequence: CAG
gcaagagaattgcttggacc

SEQ ID NO: 152494 - DNA, 20 bp, Artificial Sequence
  Description of Artificial Sequence: Synthetic oligonucleotide
  Target: LAMA2; (+) strand; PAM type: NRG; PAM sequence: AGG
caagagaattgcttggaccc

SEQ ID NO: 152495 - DNA, 20 bp, Artificial Sequence
  Description of Artificial Sequence: Synthetic oligonucleotide
  Target: LAMA2; (+) strand; PAM type: NRG; PAM sequence: GAG
agagaattgcttggacccag

SEQ ID NO: 152496 - DNA, 20 bp, Artificial Sequence
  Description of Artificial Sequence: Synthetic oligonucleotide
  Target: LAMA2; (+) strand; PAM type: NRG; PAM sequence: AGG
gagaattgcttggacccagg

SEQ ID NO: 152497 - DNA, 20 bp, Artificial Sequence
  Description of Artificial Sequence: Synthetic oligonucleotide
  Target: LAMA2; (+) strand; PAM type: NRG; PAM sequence: CAG
aattgcttggacccaggagg

SEQ ID NO: 152498 - DNA, 20 bp, Artificial Sequence
  Description of Artificial Sequence: Synthetic oligonucleotide
  Target: LAMA2; (+) strand; PAM type: NRG; PAM sequence: GAG
ttgcttggacccaggaggca

SEQ ID NO: 152499 - DNA, 20 bp, Artificial Sequence
  Description of Artificial Sequence: Synthetic oligonucleotide
  Target: LAMA2; (+) strand; PAM type: NRG; PAM sequence: AGG
tgcttggacccaggaggcag

SEQ ID NO: 152500 - DNA, 20 bp, Artificial Sequence
  Description of Artificial Sequence: Synthetic oligonucleotide
  Target: LAMA2; (+) strand; PAM type: NRG; PAM sequence: CAG
gacccaggaggcagaggctg

SEQ ID NO: 152501 - DNA, 20 bp, Artificial Sequence
  Description of Artificial Sequence: Synthetic oligonucleotide
  Target: LAMA2; (+) strand; PAM type: NRG; PAM sequence: GAG
caggaggcagaggctgcagt

SEQ ID NO: 152502 - DNA, 20 bp, Artificial Sequence
  Description of Artificial Sequence: Synthetic oligonucleotide
  Target: LAMA2; (+) strand; PAM type: NRG; PAM sequence: AAG
ggcagaggctgcagtgagcc

SEQ ID NO: 152503 - DNA, 20 bp, Artificial Sequence
  Description of Artificial Sequence: Synthetic oligonucleotide
  Target: LAMA2; (+) strand; PAM type: NRG; PAM sequence: TGG
aggctgcagtgagccaagat

SEQ ID NO: 152504 - DNA, 20 bp, Artificial Sequence
  Description of Artificial Sequence: Synthetic oligonucleotide
  Target: LAMA2; (+) strand; PAM type: NRG; PAM sequence: GGG
ggctgcagtgagccaagatt

SEQ ID NO: 152505 - DNA, 20 bp, Artificial Sequence
  Description of Artificial Sequence: Synthetic oligonucleotide
  Target: LAMA2; (+) strand; PAM type: NRG; PAM sequence: CAG
aagattgggtcactgcactc

SEQ ID NO: 152506 - DNA, 20 bp, Artificial Sequence
  Description of Artificial Sequence: Synthetic oligonucleotide
  Target: LAMA2; (+) strand; PAM type: NRG; PAM sequence: TGG
tgggtcactgcactccagcc

SEQ ID NO: 152507 - DNA, 20 bp, Artificial Sequence
  Description of Artificial Sequence: Synthetic oligonucleotide
  Target: LAMA2; (+) strand; PAM type: NRG; PAM sequence: GGG
gggtcactgcactccagcct

SEQ ID NO: 152508 - DNA, 20 bp, Artificial Sequence
  Description of Artificial Sequence: Synthetic oligonucleotide
  Target: LAMA2; (+) strand; PAM type: NRG; PAM sequence: GGG
ggtcactgcactccagcctg

SEQ ID NO: 152509 - DNA, 20 bp, Artificial Sequence
  Description of Artificial Sequence: Synthetic oligonucleotide
  Target: LAMA2; (+) strand; PAM type: NRG; PAM sequence: TAG
ctgcactccagcctggggca

SEQ ID NO: 152510 - DNA, 20 bp, Artificial Sequence
  Description of Artificial Sequence: Synthetic oligonucleotide
  Target: LAMA2; (+) strand; PAM type: NRG; PAM sequence: GAG
gcactccagcctggggcata

SEQ ID NO: 152511 - DNA, 20 bp, Artificial Sequence
  Description of Artificial Sequence: Synthetic oligonucleotide
  Target: LAMA2; (+) strand; PAM type: NRG; PAM sequence: GAG
tccagcctggggcatagagc

SEQ ID NO: 152512 - DNA, 20 bp, Artificial Sequence
  Description of Artificial Sequence: Synthetic oligonucleotide
  Target: LAMA2; (+) strand; PAM type: NRG; PAM sequence: GAG
atgcatatatgtatatatgt

SEQ ID NO: 152513 - DNA, 20 bp, Artificial Sequence
  Description of Artificial Sequence: Synthetic oligonucleotide
  Target: LAMA2; (+) strand; PAM type: NRG; PAM sequence: TAG
tgtgtgtatatatatatatt

SEQ ID NO: 152514 - DNA, 20 bp, Artificial Sequence
  Description of Artificial Sequence: Synthetic oligonucleotide
  Target: LAMA2; (+) strand; PAM type: NRG; PAM sequence: AAG
atatatatttagaaattcta

SEQ ID NO: 152515 - DNA, 20 bp, Artificial Sequence
  Description of Artificial Sequence: Synthetic oligonucleotide
  Target: LAMA2; (+) strand; PAM type: NRG; PAM sequence: AGG
tatatatttagaaattctaa

SEQ ID NO: 152516 - DNA, 20 bp, Artificial Sequence
  Description of Artificial Sequence: Synthetic oligonucleotide
  Target: LAMA2; (+) strand; PAM type: NRG; PAM sequence: AAG
tatttagaaattctaaagga

SEQ ID NO: 152517 - DNA, 20 bp, Artificial Sequence
  Description of Artificial Sequence: Synthetic oligonucleotide
  Target: LAMA2; (+) strand; PAM type: NRG; PAM sequence: AAG
ttagaaattctaaaggaaag

SEQ ID NO: 152518 - DNA, 20 bp, Artificial Sequence
  Description of Artificial Sequence: Synthetic oligonucleotide
  Target: LAMA2; (+) strand; PAM type: NRG; PAM sequence: TGG
gaaattctaaaggaaagaag

SEQ ID NO: 152519 - DNA, 20 bp, Artificial Sequence
  Description of Artificial Sequence: Synthetic oligonucleotide
  Target: LAMA2; (+) strand; PAM type: NRG; PAM sequence: GGG
aaattctaaaggaaagaagt

SEQ ID NO: 152520 - DNA, 20 bp, Artificial Sequence
  Description of Artificial Sequence: Synthetic oligonucleotide
  Target: LAMA2; (+) strand; PAM type: NRG; PAM sequence: GGG
aattctaaaggaaagaagtg

SEQ ID NO: 152521 - DNA, 20 bp, Artificial Sequence
  Description of Artificial Sequence: Synthetic oligonucleotide
  Target: LAMA2; (+) strand; PAM type: NRG; PAM sequence: TGG
aggaaagaagtggggctttt

SEQ ID NO: 152522 - DNA, 20 bp, Artificial Sequence
  Description of Artificial Sequence: Synthetic oligonucleotide
  Target: LAMA2; (+) strand; PAM type: NRG; PAM sequence: AAG
aagaagtggggctttttgga

SEQ ID NO: 152523 - DNA, 20 bp, Artificial Sequence
  Description of Artificial Sequence: Synthetic oligonucleotide
  Target: LAMA2; (+) strand; PAM type: NRG; PAM sequence: AGG
agaagtggggctttttggaa

SEQ ID NO: 152524 - DNA, 20 bp, Artificial Sequence
  Description of Artificial Sequence: Synthetic oligonucleotide
  Target: LAMA2; (+) strand; PAM type: NRG; PAM sequence: GGG
gaagtggggctttttggaaa

SEQ ID NO: 152525 - DNA, 20 bp, Artificial Sequence
  Description of Artificial Sequence: Synthetic oligonucleotide
  Target: LAMA2; (+) strand; PAM type: NRG; PAM sequence: TAG
ggggctttttggaaagggat

SEQ ID NO: 152526 - DNA, 20 bp, Artificial Sequence
  Description of Artificial Sequence: Synthetic oligonucleotide
  Target: LAMA2; (+) strand; PAM type: NRG; PAM sequence: AGG
gggctttttggaaagggatt

SEQ ID NO: 152527 - DNA, 20 bp, Artificial Sequence
  Description of Artificial Sequence: Synthetic oligonucleotide
  Target: LAMA2; (+) strand; PAM type: NRG; PAM sequence: GAG
ttggaaagggattaggtcat

SEQ ID NO: 152528 - DNA, 20 bp, Artificial Sequence
  Description of Artificial Sequence: Synthetic oligonucleotide
  Target: LAMA2; (+) strand; PAM type: NRG; PAM sequence: AGG
tggaaagggattaggtcatg

SEQ ID NO: 152529 - DNA, 20 bp, Artificial Sequence
  Description of Artificial Sequence: Synthetic oligonucleotide
  Target: LAMA2; (+) strand; PAM type: NRG; PAM sequence: GGG
ggaaagggattaggtcatga

SEQ ID NO: 152530 - DNA, 20 bp, Artificial Sequence
  Description of Artificial Sequence: Synthetic oligonucleotide
  Target: LAMA2; (+) strand; PAM type: NRG; PAM sequence: TGG
agggttctaatctccatgaa

SEQ ID NO: 152531 - DNA, 20 bp, Artificial Sequence
  Description of Artificial Sequence: Synthetic oligonucleotide
  Target: LAMA2; (+) strand; PAM type: NRG; PAM sequence: AAG
tgaaaatcttatctgatata

SEQ ID NO: 152532 - DNA, 20 bp, Artificial Sequence
  Description of Artificial Sequence: Synthetic oligonucleotide
  Target: LAMA2; (+) strand; PAM type: NRG; PAM sequence: GAG
aaaatcttatctgatataaa

SEQ ID NO: 152533 - DNA, 20 bp, Artificial Sequence
  Description of Artificial Sequence: Synthetic oligonucleotide
  Target: LAMA2; (+) strand; PAM type: NRG; PAM sequence: TAG
tcttatctgatataaagagt

SEQ ID NO: 152534 - DNA, 20 bp, Artificial Sequence
  Description of Artificial Sequence: Synthetic oligonucleotide
  Target: LAMA2; (+) strand; PAM type: NRG; PAM sequence: AGG
cttatctgatataaagagtt

SEQ ID NO: 152535 - DNA, 20 bp, Artificial Sequence
  Description of Artificial Sequence: Synthetic oligonucleotide
  Target: LAMA2; (+) strand; PAM type: NRG; PAM sequence: AAG
agagttaggacttactttaa

SEQ ID NO: 152536 - DNA, 20 bp, Artificial Sequence
  Description of Artificial Sequence: Synthetic oligonucleotide
  Target: LAMA2; (+) strand; PAM type: NRG; PAM sequence: AAG
ctttaaaagatataatgact

SEQ ID NO: 152537 - DNA, 20 bp, Artificial Sequence
  Description of Artificial Sequence: Synthetic oligonucleotide
  Target: LAMA2; (+) strand; PAM type: NRG; PAM sequence: AGG
tttaaaagatataatgacta

SEQ ID NO: 152538 - DNA, 20 bp, Artificial Sequence
  Description of Artificial Sequence: Synthetic oligonucleotide
  Target: LAMA2; (+) strand; PAM type: NRG; PAM sequence: CAG
tgactaaggcaaaatgctat

SEQ ID NO: 152539 - DNA, 20 bp, Artificial Sequence
  Description of Artificial Sequence: Synthetic oligonucleotide
  Target: LAMA2; (+) strand; PAM type: NRG; PAM sequence: TAG
tcagtgtgaaaataaaccaa

SEQ ID NO: 152540 - DNA, 20 bp, Artificial Sequence
  Description of Artificial Sequence: Synthetic oligonucleotide
  Target: LAMA2; (+) strand; PAM type: NRG; PAM sequence: TAG
aaccaatagacctgaaaaaa

SEQ ID NO: 152541 - DNA, 20 bp, Artificial Sequence
  Description of Artificial Sequence: Synthetic oligonucleotide
  Target: LAMA2; (+) strand; PAM type: NRG; PAM sequence: TAG
agacctgaaaaaatagccca

SEQ ID NO: 152542 - DNA, 20 bp, Artificial Sequence
  Description of Artificial Sequence: Synthetic oligonucleotide
  Target: LAMA2; (+) strand; PAM type: NRG; PAM sequence: TAG
gcccatagatatcacataca

SEQ ID NO: 152543 - DNA, 20 bp, Artificial Sequence
  Description of Artificial Sequence: Synthetic oligonucleotide
  Target: LAMA2; (+) strand; PAM type: NRG; PAM sequence: TAG
atacttaacttttattgaaa

SEQ ID NO: 152544 - DNA, 20 bp, Artificial Sequence
  Description of Artificial Sequence: Synthetic oligonucleotide
  Target: LAMA2; (+) strand; PAM type: NRG; PAM sequence: AGG
tacttaacttttattgaaat

SEQ ID NO: 152545 - DNA, 20 bp, Artificial Sequence
  Description of Artificial Sequence: Synthetic oligonucleotide
  Target: LAMA2; (+) strand; PAM type: NRG; PAM sequence: CAG
ttttattgaaataggcattg

SEQ ID NO: 152546 - DNA, 20 bp, Artificial Sequence
  Description of Artificial Sequence: Synthetic oligonucleotide
  Target: LAMA2; (+) strand; PAM type: NRG; PAM sequence: TGG
gcattgcagatcaatgacaa

SEQ ID NO: 152547 - DNA, 20 bp, Artificial Sequence
  Description of Artificial Sequence: Synthetic oligonucleotide
  Target: LAMA2; (+) strand; PAM type: NRG; PAM sequence: GGG
cattgcagatcaatgacaat

SEQ ID NO: 152548 - DNA, 20 bp, Artificial Sequence
  Description of Artificial Sequence: Synthetic oligonucleotide
  Target: LAMA2; (+) strand; PAM type: NRG; PAM sequence: TAG
gcagatcaatgacaatggga

SEQ ID NO: 152549 - DNA, 20 bp, Artificial Sequence
  Description of Artificial Sequence: Synthetic oligonucleotide
  Target: LAMA2; (+) strand; PAM type: NRG; PAM sequence: CAG
acaatgggatagaccctata

SEQ ID NO: 152550 - DNA, 20 bp, Artificial Sequence
  Description of Artificial Sequence: Synthetic oligonucleotide
  Target: LAMA2; (+) strand; PAM type: NRG; PAM sequence: TGG
gatagaccctatacagtaaa

SEQ ID NO: 152551 - DNA, 20 bp, Artificial Sequence
  Description of Artificial Sequence: Synthetic oligonucleotide
  Target: LAMA2; (+) strand; PAM type: NRG; PAM sequence: TGG
accctatacagtaaatggtc

SEQ ID NO: 152552 - DNA, 20 bp, Artificial Sequence
  Description of Artificial Sequence: Synthetic oligonucleotide
  Target: LAMA2; (+) strand; PAM type: NRG; PAM sequence: TAG
gtctggtaccactgattatc

SEQ ID NO: 152553 - DNA, 20 bp, Artificial Sequence
  Description of Artificial Sequence: Synthetic oligonucleotide
  Target: LAMA2; (+) strand; PAM type: NRG; PAM sequence: GAG
ctggtaccactgattatcta

SEQ ID NO: 152554 - DNA, 20 bp, Artificial Sequence
  Description of Artificial Sequence: Synthetic oligonucleotide
  Target: LAMA2; (+) strand; PAM type: NRG; PAM sequence: AAG
aattttcaaaaattatgcta

SEQ ID NO: 152555 - DNA, 20 bp, Artificial Sequence
  Description of Artificial Sequence: Synthetic oligonucleotide
  Target: LAMA2; (+) strand; PAM type: NRG; PAM sequence: AAG
gctaaagacaaacctttata

SEQ ID NO: 152556 - DNA, 20 bp, Artificial Sequence
  Description of Artificial Sequence: Synthetic oligonucleotide
  Target: LAMA2; (+) strand; PAM type: NRG; PAM sequence: GAG
ctttataaagacaacacatt

SEQ ID NO: 152557 - DNA, 20 bp, Artificial Sequence
  Description of Artificial Sequence: Synthetic oligonucleotide
  Target: LAMA2; (+) strand; PAM type: NRG; PAM sequence: TAG
tcctgaccataattgaataa

SEQ ID NO: 152558 - DNA, 20 bp, Artificial Sequence
  Description of Artificial Sequence: Synthetic oligonucleotide
  Target: LAMA2; (+) strand; PAM type: NRG; PAM sequence: TAG
cataattgaataatagtatc

SEQ ID NO: 152559 - DNA, 20 bp, Artificial Sequence
  Description of Artificial Sequence: Synthetic oligonucleotide
  Target: LAMA2; (+) strand; PAM type: NRG; PAM sequence: AAG
atctaccttaaacaacaaca

SEQ ID NO: 152560 - DNA, 20 bp, Artificial Sequence
  Description of Artificial Sequence: Synthetic oligonucleotide
  Target: LAMA2; (+) strand; PAM type: NRG; PAM sequence: GAG
cttaaacaacaacaaagcct

SEQ ID NO: 152561 - DNA, 20 bp, Artificial Sequence
  Description of Artificial Sequence: Synthetic oligonucleotide
  Target: LAMA2; (+) strand; PAM type: NRG; PAM sequence: AGG
ttaaacaacaacaaagcctg

SEQ ID NO: 152562 - DNA, 20 bp, Artificial Sequence
  Description of Artificial Sequence: Synthetic oligonucleotide
  Target: LAMA2; (+) strand; PAM type: NRG; PAM sequence: GGG
taaacaacaacaaagcctga

SEQ ID NO: 152563 - DNA, 20 bp, Artificial Sequence
  Description of Artificial Sequence: Synthetic oligonucleotide
  Target: LAMA2; (+) strand; PAM type: NRG; PAM sequence: GGG
aaacaacaacaaagcctgag

SEQ ID NO: 152564 - DNA, 20 bp, Artificial Sequence
  Description of Artificial Sequence: Synthetic oligonucleotide
  Target: LAMA2; (+) strand; PAM type: NRG; PAM sequence: GGG
aacaacaacaaagcctgagg

SEQ ID NO: 152565 - DNA, 20 bp, Artificial Sequence
  Description of Artificial Sequence: Synthetic oligonucleotide
  Target: LAMA2; (+) strand; PAM type: NRG; PAM sequence: TGG
agcctgagggggaaaaaatg

SEQ ID NO: 152566 - DNA, 20 bp, Artificial Sequence
  Description of Artificial Sequence: Synthetic oligonucleotide
  Target: LAMA2; (+) strand; PAM type: NRG; PAM sequence: CAG
ggggaaaaaatgtggaacaa

SEQ ID NO: 152567 - DNA, 20 bp, Artificial Sequence
  Description of Artificial Sequence: Synthetic oligonucleotide
  Target: LAMA2; (+) strand; PAM type: NRG; PAM sequence: TAG
aaatgtggaacaacagtttt

SEQ ID NO: 152568 - DNA, 20 bp, Artificial Sequence
  Description of Artificial Sequence: Synthetic oligonucleotide
  Target: LAMA2; (+) strand; PAM type: NRG; PAM sequence: CAG
agtttttagacactcttcca

SEQ ID NO: 152569 - DNA, 20 bp, Artificial Sequence
  Description of Artificial Sequence: Synthetic oligonucleotide
  Target: LAMA2; (+) strand; PAM type: NRG; PAM sequence: TAG
tttagacactcttccacaga

SEQ ID NO: 152570 - DNA, 20 bp, Artificial Sequence
  Description of Artificial Sequence: Synthetic oligonucleotide
  Target: LAMA2; (+) strand; PAM type: NRG; PAM sequence: AAG
taaaactgtgatctctgaaa

SEQ ID NO: 152571 - DNA, 20 bp, Artificial Sequence
  Description of Artificial Sequence: Synthetic oligonucleotide
  Target: LAMA2; (+) strand; PAM type: NRG; PAM sequence: GAG
aaactgtgatctctgaaaaa

SEQ ID NO: 152572 - DNA, 20 bp, Artificial Sequence
  Description of Artificial Sequence: Synthetic oligonucleotide
  Target: LAMA2; (+) strand; PAM type: NRG; PAM sequence: TGG
ctctgaaaaagagaaacaaa

SEQ ID NO: 152573 - DNA, 20 bp, Artificial Sequence
  Description of Artificial Sequence: Synthetic oligonucleotide
  Target: LAMA2; (+) strand; PAM type: NRG; PAM sequence: GGG
tctgaaaaagagaaacaaat

SEQ ID NO: 152574 - DNA, 20 bp, Artificial Sequence
  Description of Artificial Sequence: Synthetic oligonucleotide
  Target: LAMA2; (+) strand; PAM type: NRG; PAM sequence: GGG
ctgaaaaagagaaacaaatg

SEQ ID NO: 152575 - DNA, 20 bp, Artificial Sequence
  Description of Artificial Sequence: Synthetic oligonucleotide
  Target: LAMA2; (+) strand; PAM type: NRG; PAM sequence: GAG
aaaagagaaacaaatggggt

SEQ ID NO: 152576 - DNA, 20 bp, Artificial Sequence
  Description of Artificial Sequence: Synthetic oligonucleotide
  Target: LAMA2; (+) strand; PAM type: NRG; PAM sequence: AGG
aaagagaaacaaatggggtg

SEQ ID NO: 152577 - DNA, 20 bp, Artificial Sequence
  Description of Artificial Sequence: Synthetic oligonucleotide
  Target: LAMA2; (+) strand; PAM type: NRG; PAM sequence: AAG
gtgaggtttacaattgcccc

SEQ ID NO: 152578 - DNA, 20 bp, Artificial Sequence
  Description of Artificial Sequence: Synthetic oligonucleotide
  Target: LAMA2; (+) strand; PAM type: NRG; PAM sequence: TGG
attgccccaagattattgcc

SEQ ID NO: 152579 - DNA, 20 bp, Artificial Sequence
  Description of Artificial Sequence: Synthetic oligonucleotide
  Target: LAMA2; (+) strand; PAM type: NRG; PAM sequence: GGG
ttgccccaagattattgcct

SEQ ID NO: 152580 - DNA, 20 bp, Artificial Sequence
  Description of Artificial Sequence: Synthetic oligonucleotide
  Target: LAMA2; (+) strand; PAM type: NRG; PAM sequence: GGG
tgccccaagattattgcctg

SEQ ID NO: 152581 - DNA, 20 bp, Artificial Sequence
  Description of Artificial Sequence: Synthetic oligonucleotide
  Target: LAMA2; (+) strand; PAM type: NRG; PAM sequence: CAG
ccaagattattgcctgggga

SEQ ID NO: 152582 - DNA, 20 bp, Artificial Sequence
  Description of Artificial Sequence: Synthetic oligonucleotide
  Target: LAMA2; (+) strand; PAM type: NRG; PAM sequence: CAG
tattgcctggggacagtctc

SEQ ID NO: 152583 - DNA, 20 bp, Artificial Sequence
  Description of Artificial Sequence: Synthetic oligonucleotide
  Target: LAMA2; (+) strand; PAM type: NRG; PAM sequence: AGG
attgcctggggacagtctcc

SEQ ID NO: 152584 - DNA, 20 bp, Artificial Sequence
  Description of Artificial Sequence: Synthetic oligonucleotide
  Target: LAMA2; (+) strand; PAM type: NRG; PAM sequence: GGG
ttgcctggggacagtctcca

SEQ ID NO: 152585 - DNA, 20 bp, Artificial Sequence
  Description of Artificial Sequence: Synthetic oligonucleotide
  Target: LAMA2; (+) strand; PAM type: NRG; PAM sequence: AAG
tggggacagtctccagggtg

SEQ ID NO: 152586 - DNA, 20 bp, Artificial Sequence
  Description of Artificial Sequence: Synthetic oligonucleotide
  Target: LAMA2; (+) strand; PAM type: NRG; PAM sequence: TGG
gtctccagggtgaagtgcat

SEQ ID NO: 152587 - DNA, 20 bp, Artificial Sequence
  Description of Artificial Sequence: Synthetic oligonucleotide
  Target: LAMA2; (+) strand; PAM type: NRG; PAM sequence: GAG
gtgaagtgcattggtatatt

SEQ ID NO: 152588 - DNA, 20 bp, Artificial Sequence
  Description of Artificial Sequence: Synthetic oligonucleotide
  Target: LAMA2; (+) strand; PAM type: NRG; PAM sequence: AAG
gcattggtatattgagaaaa

SEQ ID NO: 152589 - DNA, 20 bp, Artificial Sequence
  Description of Artificial Sequence: Synthetic oligonucleotide
  Target: LAMA2; (+) strand; PAM type: NRG; PAM sequence: CAG
attgagaaaaaagccaaaca

SEQ ID NO: 152590 - DNA, 20 bp, Artificial Sequence
  Description of Artificial Sequence: Synthetic oligonucleotide
  Target: LAMA2; (+) strand; PAM type: NRG; PAM sequence: TGG
gaaaaaagccaaacacagcc

SEQ ID NO: 152591 - DNA, 20 bp, Artificial Sequence
  Description of Artificial Sequence: Synthetic oligonucleotide
  Target: LAMA2; (+) strand; PAM type: NRG; PAM sequence: AAG
gcctggccttgccaaattga

SEQ ID NO: 152592 - DNA, 20 bp, Artificial Sequence
  Description of Artificial Sequence: Synthetic oligonucleotide
  Target: LAMA2; (+) strand; PAM type: NRG; PAM sequence: CAG
ggccttgccaaattgaaaga

SEQ ID NO: 152593 - DNA, 20 bp, Artificial Sequence
  Description of Artificial Sequence: Synthetic oligonucleotide
  Target: LAMA2; (+) strand; PAM type: NRG; PAM sequence: GAG
ccttgccaaattgaaagaca

SEQ ID NO: 152594 - DNA, 20 bp, Artificial Sequence
  Description of Artificial Sequence: Synthetic oligonucleotide
  Target: LAMA2; (+) strand; PAM type: NRG; PAM sequence: AGG
cttgccaaattgaaagacag

SEQ ID NO: 152595 - DNA, 20 bp, Artificial Sequence
  Description of Artificial Sequence: Synthetic oligonucleotide
  Target: LAMA2; (+) strand; PAM type: NRG; PAM sequence: TAG
ccaaattgaaagacagaggt

SEQ ID NO: 152596 - DNA, 20 bp, Artificial Sequence
  Description of Artificial Sequence: Synthetic oligonucleotide
  Target: LAMA2; (+) strand; PAM type: NRG; PAM sequence: AGG
caaattgaaagacagaggtt

SEQ ID NO: 152597 - DNA, 20 bp, Artificial Sequence
  Description of Artificial Sequence: Synthetic oligonucleotide
  Target: LAMA2; (+) strand; PAM type: NRG; PAM sequence: GGG
aaattgaaagacagaggtta

SEQ ID NO: 152598 - DNA, 20 bp, Artificial Sequence
  Description of Artificial Sequence: Synthetic oligonucleotide
  Target: LAMA2; (+) strand; PAM type: NRG; PAM sequence: TGG
aagacagaggttagggttca

SEQ ID NO: 152599 - DNA, 20 bp, Artificial Sequence
  Description of Artificial Sequence: Synthetic oligonucleotide
  Target: LAMA2; (+) strand; PAM type: NRG; PAM sequence: GAG
gacagaggttagggttcatg

SEQ ID NO: 152600 - DNA, 20 bp, Artificial Sequence
  Description of Artificial Sequence: Synthetic oligonucleotide
  Target: LAMA2; (+) strand; PAM type: NRG; PAM sequence: AGG
acagaggttagggttcatgg

SEQ ID NO: 152601 - DNA, 20 bp, Artificial Sequence
  Description of Artificial Sequence: Synthetic oligonucleotide
  Target: LAMA2; (+) strand; PAM type: NRG; PAM sequence: AAG
ggttagggttcatggaggcc

SEQ ID NO: 152602 - DNA, 20 bp, Artificial Sequence
  Description of Artificial Sequence: Synthetic oligonucleotide
  Target: LAMA2; (+) strand; PAM type: NRG; PAM sequence: AGG
gttagggttcatggaggcca

SEQ ID NO: 152603 - DNA, 20 bp, Artificial Sequence
  Description of Artificial Sequence: Synthetic oligonucleotide
  Target: LAMA2; (+) strand; PAM type: NRG; PAM sequence: CAG
agggttcatggaggccaagg

SEQ ID NO: 152604 - DNA, 20 bp, Artificial Sequence
  Description of Artificial Sequence: Synthetic oligonucleotide
  Target: LAMA2; (+) strand; PAM type: NRG; PAM sequence: TAG
ttcatggaggccaaggcagc

SEQ ID NO: 152605 - DNA, 20 bp, Artificial Sequence
  Description of Artificial Sequence: Synthetic oligonucleotide
  Target: LAMA2; (+) strand; PAM type: NRG; PAM sequence: GAG
ccaaggcagctagcatttgt

SEQ ID NO: 152606 - DNA, 20 bp, Artificial Sequence
  Description of Artificial Sequence: Synthetic oligonucleotide
  Target: LAMA2; (+) strand; PAM type: NRG; PAM sequence: AGG
caaggcagctagcatttgtg

SEQ ID NO: 152607 - DNA, 20 bp, Artificial Sequence
  Description of Artificial Sequence: Synthetic oligonucleotide
  Target: LAMA2; (+) strand; PAM type: NRG; PAM sequence: CAG
ggcagctagcatttgtgagg

SEQ ID NO: 152608 - DNA, 20 bp, Artificial Sequence
  Description of Artificial Sequence: Synthetic oligonucleotide
  Target: LAMA2; (+) strand; PAM type: NRG; PAM sequence: AAG
gcatttgtgaggcagcatac

SEQ ID NO: 152609 - DNA, 20 bp, Artificial Sequence
  Description of Artificial Sequence: Synthetic oligonucleotide
  Target: LAMA2; (+) strand; PAM type: NRG; PAM sequence: AGG
catttgtgaggcagcataca

SEQ ID NO: 152610 - DNA, 20 bp, Artificial Sequence
  Description of Artificial Sequence: Synthetic oligonucleotide
  Target: LAMA2; (+) strand; PAM type: NRG; PAM sequence: GGG
atttgtgaggcagcatacaa

SEQ ID NO: 152611 - DNA, 20 bp, Artificial Sequence
  Description of Artificial Sequence: Synthetic oligonucleotide
  Target: LAMA2; (+) strand; PAM type: NRG; PAM sequence: AAG
tgtgaggcagcatacaaggg

SEQ ID NO: 152612 - DNA, 20 bp, Artificial Sequence
  Description of Artificial Sequence: Synthetic oligonucleotide
  Target: LAMA2; (+) strand; PAM type: NRG; PAM sequence: GAG
tgaggcagcatacaagggaa

SEQ ID NO: 152613 - DNA, 20 bp, Artificial Sequence
  Description of Artificial Sequence: Synthetic oligonucleotide
  Target: LAMA2; (+) strand; PAM type: NRG; PAM sequence: AGG
gaggcagcatacaagggaag

SEQ ID NO: 152614 - DNA, 20 bp, Artificial Sequence
  Description of Artificial Sequence: Synthetic oligonucleotide
  Target: LAMA2; (+) strand; PAM type: NRG; PAM sequence: CAG
gaagaggaacctgacctgca

SEQ ID NO: 152615 - DNA, 20 bp, Artificial Sequence
  Description of Artificial Sequence: Synthetic oligonucleotide
  Target: LAMA2; (+) strand; PAM type: NRG; PAM sequence: GAG
agaggaacctgacctgcaca

SEQ ID NO: 152616 - DNA, 20 bp, Artificial Sequence
  Description of Artificial Sequence: Synthetic oligonucleotide
  Target: LAMA2; (+) strand; PAM type: NRG; PAM sequence: GAG
aggaacctgacctgcacaga

SEQ ID NO: 152617 - DNA, 20 bp, Artificial Sequence
  Description of Artificial Sequence: Synthetic oligonucleotide
  Target: LAMA2; (+) strand; PAM type: NRG; PAM sequence: GAG
gaacctgacctgcacagaga

SEQ ID NO: 152618 - DNA, 20 bp, Artificial Sequence
  Description of Artificial Sequence: Synthetic oligonucleotide
  Target: LAMA2; (+) strand; PAM type: NRG; PAM sequence: GAG
acctgacctgcacagagaga

SEQ ID NO: 152619 - DNA, 20 bp, Artificial Sequence
  Description of Artificial Sequence: Synthetic oligonucleotide
  Target: LAMA2; (+) strand; PAM type: NRG; PAM sequence: GAG
acctgcacagagagagagac

SEQ ID NO: 152620 - DNA, 20 bp, Artificial Sequence
  Description of Artificial Sequence: Synthetic oligonucleotide
  Target: LAMA2; (+) strand; PAM type: NRG; PAM sequence: AGG
cctgcacagagagagagacg

SEQ ID NO: 152621 - DNA, 20 bp, Artificial Sequence
  Description of Artificial Sequence: Synthetic oligonucleotide
  Target: LAMA2; (+) strand; PAM type: NRG; PAM sequence: GAG
tgcacagagagagagacgag

SEQ ID NO: 152622 - DNA, 20 bp, Artificial Sequence
  Description of Artificial Sequence: Synthetic oligonucleotide
  Target: LAMA2; (+) strand; PAM type: NRG; PAM sequence: GAG
cacagagagagagacgagga

SEQ ID NO: 152623 - DNA, 20 bp, Artificial Sequence
  Description of Artificial Sequence: Synthetic oligonucleotide
  Target: LAMA2; (+) strand; PAM type: NRG; PAM sequence: GAG
cagagagagagacgaggaga

SEQ ID NO: 152624 - DNA, 20 bp, Artificial Sequence
  Description of Artificial Sequence: Synthetic oligonucleotide
  Target: LAMA2; (+) strand; PAM type: NRG; PAM sequence: CAG
gagagacgaggagagagctg

SEQ ID NO: 152625 - DNA, 20 bp, Artificial Sequence
  Description of Artificial Sequence: Synthetic oligonucleotide
  Target: LAMA2; (+) strand; PAM type: NRG; PAM sequence: AAG
gagagctgcagctatctgca

SEQ ID NO: 152626 - DNA, 20 bp, Artificial Sequence
  Description of Artificial Sequence: Synthetic oligonucleotide
  Target: LAMA2; (+) strand; PAM type: NRG; PAM sequence: GAG
gagctgcagctatctgcaaa

SEQ ID NO: 152627 - DNA, 20 bp, Artificial Sequence
  Description of Artificial Sequence: Synthetic oligonucleotide
  Target: LAMA2; (+) strand; PAM type: NRG; PAM sequence: CGG
agctatctgcaaagagaaac

SEQ ID NO: 152628 - DNA, 20 bp, Artificial Sequence
  Description of Artificial Sequence: Synthetic oligonucleotide
  Target: LAMA2; (+) strand; PAM type: NRG; PAM sequence: GAG
ctatctgcaaagagaaaccg

SEQ ID NO: 152629 - DNA, 20 bp, Artificial Sequence
  Description of Artificial Sequence: Synthetic oligonucleotide
  Target: LAMA2; (+) strand; PAM type: NRG; PAM sequence: GAG
caaagagaaaccggagtact

SEQ ID NO: 152630 - DNA, 20 bp, Artificial Sequence
  Description of Artificial Sequence: Synthetic oligonucleotide
  Target: LAMA2; (+) strand; PAM type: NRG; PAM sequence: AAG
actgagttgcaaatatgtga

SEQ ID NO: 152631 - DNA, 20 bp, Artificial Sequence
  Description of Artificial Sequence: Synthetic oligonucleotide
  Target: LAMA2; (+) strand; PAM type: NRG; PAM sequence: AAG
tatgtgaaagaaaactacct

SEQ ID NO: 152632 - DNA, 20 bp, Artificial Sequence
  Description of Artificial Sequence: Synthetic oligonucleotide
  Target: LAMA2; (+) strand; PAM type: NRG; PAM sequence: AGG
atgtgaaagaaaactaccta

SEQ ID NO: 152633 - DNA, 20 bp, Artificial Sequence
  Description of Artificial Sequence: Synthetic oligonucleotide
  Target: LAMA2; (+) strand; PAM type: NRG; PAM sequence: AAG
aaactacctaaggctaatga

SEQ ID NO: 152634 - DNA, 20 bp, Artificial Sequence
  Description of Artificial Sequence: Synthetic oligonucleotide
  Target: LAMA2; (+) strand; PAM type: NRG; PAM sequence: AAG
ctaatgaaagaatcactaaa

SEQ ID NO: 152635 - DNA, 20 bp, Artificial Sequence
  Description of Artificial Sequence: Synthetic oligonucleotide
  Target: LAMA2; (+) strand; PAM type: NRG; PAM sequence: TAG
atgaaagaatcactaaaaag

SEQ ID NO: 152636 - DNA, 20 bp, Artificial Sequence
  Description of Artificial Sequence: Synthetic oligonucleotide
  Target: LAMA2; (+) strand; PAM type: NRG; PAM sequence: AAG
aagaatcactaaaaagtagt

SEQ ID NO: 152637 - DNA, 20 bp, Artificial Sequence
  Description of Artificial Sequence: Synthetic oligonucleotide
  Target: LAMA2; (+) strand; PAM type: NRG; PAM sequence: GAG
gaatcactaaaaagtagtaa

SEQ ID NO: 152638 - DNA, 20 bp, Artificial Sequence
  Description of Artificial Sequence: Synthetic oligonucleotide
  Target: LAMA2; (+) strand; PAM type: NRG; PAM sequence: GAG
tagtaagagaaacaattcct

SEQ ID NO: 152639 - DNA, 20 bp, Artificial Sequence
  Description of Artificial Sequence: Synthetic oligonucleotide
  Target: LAMA2; (+) strand; PAM type: NRG; PAM sequence: CAG
aaacaattcctgagctgata

SEQ ID NO: 152640 - DNA, 20 bp, Artificial Sequence
  Description of Artificial Sequence: Synthetic oligonucleotide
  Target: LAMA2; (+) strand; PAM type: NRG; PAM sequence: AGG
aacaattcctgagctgatac

SEQ ID NO: 152641 - DNA, 20 bp, Artificial Sequence
  Description of Artificial Sequence: Synthetic oligonucleotide
  Target: LAMA2; (+) strand; PAM type: NRG; PAM sequence: GGG
acaattcctgagctgataca

SEQ ID NO: 152642 - DNA, 20 bp, Artificial Sequence
  Description of Artificial Sequence: Synthetic oligonucleotide
  Target: LAMA2; (+) strand; PAM type: NRG; PAM sequence: TAG
agctgatacagggctgctaa

SEQ ID NO: 152643 - DNA, 20 bp, Artificial Sequence
  Description of Artificial Sequence: Synthetic oligonucleotide
  Target: LAMA2; (+) strand; PAM type: NRG; PAM sequence: AAG
gtttattttcctaacaccca

SEQ ID NO: 152644 - DNA, 20 bp, Artificial Sequence
  Description of Artificial Sequence: Synthetic oligonucleotide
  Target: LAMA2; (+) strand; PAM type: NRG; PAM sequence: TGG
tattttcctaacacccaaag

SEQ ID NO: 152645 - DNA, 20 bp, Artificial Sequence
  Description of Artificial Sequence: Synthetic oligonucleotide
  Target: LAMA2; (+) strand; PAM type: NRG; PAM sequence: AAG
ccaaagtggaatgtcttcat

SEQ ID NO: 152646 - DNA, 20 bp, Artificial Sequence
  Description of Artificial Sequence: Synthetic oligonucleotide
  Target: LAMA2; (+) strand; PAM type: NRG; PAM sequence: GAG
aaagtggaatgtcttcataa

SEQ ID NO: 152647 - DNA, 20 bp, Artificial Sequence
  Description of Artificial Sequence: Synthetic oligonucleotide
  Target: LAMA2; (+) strand; PAM type: NRG; PAM sequence: AGG
aagtggaatgtcttcataag

SEQ ID NO: 152648 - DNA, 20 bp, Artificial Sequence
  Description of Artificial Sequence: Synthetic oligonucleotide
  Target: LAMA2; (+) strand; PAM type: NRG; PAM sequence: GGG
agtggaatgtcttcataaga

SEQ ID NO: 152649 - DNA, 20 bp, Artificial Sequence
  Description of Artificial Sequence: Synthetic oligonucleotide
  Target: LAMA2; (+) strand; PAM type: NRG; PAM sequence: TAG
cttcataagagggactaaat

SEQ ID NO: 152650 - DNA, 20 bp, Artificial Sequence
  Description of Artificial Sequence: Synthetic oligonucleotide
  Target: LAMA2; (+) strand; PAM type: NRG; PAM sequence: AAG
ctaaattagctccaaactac

SEQ ID NO: 152651 - DNA, 20 bp, Artificial Sequence
  Description of Artificial Sequence: Synthetic oligonucleotide
  Target: LAMA2; (+) strand; PAM type: NRG; PAM sequence: TAG
ctccaaactacaagctactc

SEQ ID NO: 152652 - DNA, 20 bp, Artificial Sequence
  Description of Artificial Sequence: Synthetic oligonucleotide
  Target: LAMA2; (+) strand; PAM type: NRG; PAM sequence: AGG
tccaaactacaagctactct

SEQ ID NO: 152653 - DNA, 20 bp, Artificial Sequence
  Description of Artificial Sequence: Synthetic oligonucleotide
  Target: LAMA2; (+) strand; PAM type: NRG; PAM sequence: CAG
accccaacaaatcttgaaaa

SEQ ID NO: 152654 - DNA, 20 bp, Artificial Sequence
  Description of Artificial Sequence: Synthetic oligonucleotide
  Target: LAMA2; (+) strand; PAM type: NRG; PAM sequence: AAG
aatcttgaaaacagccttaa

SEQ ID NO: 152655 - DNA, 20 bp, Artificial Sequence
  Description of Artificial Sequence: Synthetic oligonucleotide
  Target: LAMA2; (+) strand; PAM type: NRG; PAM sequence: AAG
cttgaaaacagccttaaaag

SEQ ID NO: 152656 - DNA, 20 bp, Artificial Sequence
  Description of Artificial Sequence: Synthetic oligonucleotide
  Target: LAMA2; (+) strand; PAM type: NRG; PAM sequence: CAG
caaataaattaactgcatgc

SEQ ID NO: 152657 - DNA, 20 bp, Artificial Sequence
  Description of Artificial Sequence: Synthetic oligonucleotide
  Target: LAMA2; (+) strand; PAM type: NRG; PAM sequence: AAG
attaactgcatgccagaaca

SEQ ID NO: 152658 - DNA, 20 bp, Artificial Sequence
  Description of Artificial Sequence: Synthetic oligonucleotide
  Target: LAMA2; (+) strand; PAM type: NRG; PAM sequence: CAG
tatttaattacaacaaaatc

SEQ ID NO: 152659 - DNA, 20 bp, Artificial Sequence
  Description of Artificial Sequence: Synthetic oligonucleotide
  Target: LAMA2; (+) strand; PAM type: NRG; PAM sequence: TGG
aatgtaaaattcatgatgtt

SEQ ID NO: 152660 - DNA, 20 bp, Artificial Sequence
  Description of Artificial Sequence: Synthetic oligonucleotide
  Target: LAMA2; (+) strand; PAM type: NRG; PAM sequence: CAG
ggcatcaaatcaaaaactac

SEQ ID NO: 152661 - DNA, 20 bp, Artificial Sequence
  Description of Artificial Sequence: Synthetic oligonucleotide
  Target: LAMA2; (+) strand; PAM type: NRG; PAM sequence: AGG
gcatcaaatcaaaaactacc

SEQ ID NO: 152662 - DNA, 20 bp, Artificial Sequence
  Description of Artificial Sequence: Synthetic oligonucleotide
  Target: LAMA2; (+) strand; PAM type: NRG; PAM sequence: AAG
aaactaccaggtacataaac

SEQ ID NO: 152663 - DNA, 20 bp, Artificial Sequence
  Description of Artificial Sequence: Synthetic oligonucleotide
  Target: LAMA2; (+) strand; PAM type: NRG; PAM sequence: CAG
ctaccaggtacataaacaag

SEQ ID NO: 152664 - DNA, 20 bp, Artificial Sequence
  Description of Artificial Sequence: Synthetic oligonucleotide
  Target: LAMA2; (+) strand; PAM type: NRG; PAM sequence: GAG
accaggtacataaacaagca

SEQ ID NO: 152665 - DNA, 20 bp, Artificial Sequence
  Description of Artificial Sequence: Synthetic oligonucleotide
  Target: LAMA2; (+) strand; PAM type: NRG; PAM sequence: AAG
cataaacaagcagagcatat

SEQ ID NO: 152666 - DNA, 20 bp, Artificial Sequence
  Description of Artificial Sequence: Synthetic oligonucleotide
  Target: LAMA2; (+) strand; PAM type: NRG; PAM sequence: CAG
cagagcatataagccactac

SEQ ID NO: 152667 - DNA, 20 bp, Artificial Sequence
  Description of Artificial Sequence: Synthetic oligonucleotide
  Target: LAMA2; (+) strand; PAM type: NRG; PAM sequence: AGG
agagcatataagccactacc

SEQ ID NO: 152668 - DNA, 20 bp, Artificial Sequence
  Description of Artificial Sequence: Synthetic oligonucleotide
  Target: LAMA2; (+) strand; PAM type: NRG; PAM sequence: GAG
agcatataagccactaccag

SEQ ID NO: 152669 - DNA, 20 bp, Artificial Sequence
  Description of Artificial Sequence: Synthetic oligonucleotide
  Target: LAMA2; (+) strand; PAM type: NRG; PAM sequence: AGG
gcatataagccactaccagg

SEQ ID NO: 152670 - DNA, 20 bp, Artificial Sequence
  Description of Artificial Sequence: Synthetic oligonucleotide
  Target: LAMA2; (+) strand; PAM type: NRG; PAM sequence: TGG
ccaggaggaaaatcaatcaa

SEQ ID NO: 152671 - DNA, 20 bp, Artificial Sequence
  Description of Artificial Sequence: Synthetic oligonucleotide
  Target: LAMA2; (+) strand; PAM type: NRG; PAM sequence: CAG
ggaaaatcaatcaatggaaa

SEQ ID NO: 152672 - DNA, 20 bp, Artificial Sequence
  Description of Artificial Sequence: Synthetic oligonucleotide
  Target: LAMA2; (+) strand; PAM type: NRG; PAM sequence: TGG
aatggaaacagaaccccaaa

SEQ ID NO: 152673 - DNA, 20 bp, Artificial Sequence
  Description of Artificial Sequence: Synthetic oligonucleotide
  Target: LAMA2; (+) strand; PAM type: NRG; PAM sequence: AAG
gaaacagaaccccaaatggc

SEQ ID NO: 152674 - DNA, 20 bp, Artificial Sequence
  Description of Artificial Sequence: Synthetic oligonucleotide
  Target: LAMA2; (+) strand; PAM type: NRG; PAM sequence: AAG
aatggcaagaaaatcatgtc

SEQ ID NO: 152675 - DNA, 20 bp, Artificial Sequence
  Description of Artificial Sequence: Synthetic oligonucleotide
  Target: LAMA2; (+) strand; PAM type: NRG; PAM sequence: CAG
aaaatcatgtcaagatatat

SEQ ID NO: 152676 - DNA, 20 bp, Artificial Sequence
  Description of Artificial Sequence: Synthetic oligonucleotide
  Target: LAMA2; (+) strand; PAM type: NRG; PAM sequence: AAG
atcagaatcaaattattaaa

SEQ ID NO: 152677 - DNA, 20 bp, Artificial Sequence
  Description of Artificial Sequence: Synthetic oligonucleotide
  Target: LAMA2; (+) strand; PAM type: NRG; PAM sequence: CAG
gaatcaaattattaaaaaga

SEQ ID NO: 152678 - DNA, 20 bp, Artificial Sequence
  Description of Artificial Sequence: Synthetic oligonucleotide
  Target: LAMA2; (+) strand; PAM type: NRG; PAM sequence: TGG
ttattaaaaagacagataac

SEQ ID NO: 152679 - DNA, 20 bp, Artificial Sequence
  Description of Artificial Sequence: Synthetic oligonucleotide
  Target: LAMA2; (+) strand; PAM type: NRG; PAM sequence: AAG
agataactggaaaattgtaa

SEQ ID NO: 152680 - DNA, 20 bp, Artificial Sequence
  Description of Artificial Sequence: Synthetic oligonucleotide
  Target: LAMA2; (+) strand; PAM type: NRG; PAM sequence: CAG
tggaaaattgtaaaagcaat

SEQ ID NO: 152681 - DNA, 20 bp, Artificial Sequence
  Description of Artificial Sequence: Synthetic oligonucleotide
  Target: LAMA2; (+) strand; PAM type: NRG; PAM sequence: TGG
caatcagaaaaaaactaaca

SEQ ID NO: 152682 - DNA, 20 bp, Artificial Sequence
  Description of Artificial Sequence: Synthetic oligonucleotide
  Target: LAMA2; (+) strand; PAM type: NRG; PAM sequence: CAG
cagaaaaaaactaacatggc

SEQ ID NO: 152683 - DNA, 20 bp, Artificial Sequence
  Description of Artificial Sequence: Synthetic oligonucleotide
  Target: LAMA2; (+) strand; PAM type: NRG; PAM sequence: AGG
agaaaaaaactaacatggcc

SEQ ID NO: 152684 - DNA, 20 bp, Artificial Sequence
  Description of Artificial Sequence: Synthetic oligonucleotide
  Target: LAMA2; (+) strand; PAM type: NRG; PAM sequence: CGG
aaaactaacatggccaggcg

SEQ ID NO: 152685 - DNA, 20 bp, Artificial Sequence
  Description of Artificial Sequence: Synthetic oligonucleotide
  Target: LAMA2; (+) strand; PAM type: NRG; PAM sequence: TGG
actaacatggccaggcgcgg

SEQ ID NO: 152686 - DNA, 20 bp, Artificial Sequence
  Description of Artificial Sequence: Synthetic oligonucleotide
  Target: LAMA2; (+) strand; PAM type: NRG; PAM sequence: CAG
gtggctcatgcctgtaatcc

SEQ ID NO: 152687 - DNA, 20 bp, Artificial Sequence
  Description of Artificial Sequence: Synthetic oligonucleotide
  Target: LAMA2; (+) strand; PAM type: NRG; PAM sequence: TGG
tgcctgtaatcccagcactt

SEQ ID NO: 152688 - DNA, 20 bp, Artificial Sequence
  Description of Artificial Sequence: Synthetic oligonucleotide
  Target: LAMA2; (+) strand; PAM type: NRG; PAM sequence: GGG
gcctgtaatcccagcacttt

SEQ ID NO: 152689 - DNA, 20 bp, Artificial Sequence
  Description of Artificial Sequence: Synthetic oligonucleotide
  Target: LAMA2; (+) strand; PAM type: NRG; PAM sequence: GAG
ctgtaatcccagcactttgg

SEQ ID NO: 152690 - DNA, 20 bp, Artificial Sequence
  Description of Artificial Sequence: Synthetic oligonucleotide
  Target: LAMA2; (+) strand; PAM type: NRG; PAM sequence: AGG
tgtaatcccagcactttggg

SEQ ID NO: 152691 - DNA, 20 bp, Artificial Sequence
  Description of Artificial Sequence: Synthetic oligonucleotide
  Target: LAMA2; (+) strand; PAM type: NRG; PAM sequence: AAG
tcccagcactttgggaggcc

SEQ ID NO: 152692 - DNA, 20 bp, Artificial Sequence
  Description of Artificial Sequence: Synthetic oligonucleotide
  Target: LAMA2; (+) strand; PAM type: NRG; PAM sequence: AGG
cccagcactttgggaggcca

SEQ ID NO: 152693 - DNA, 20 bp, Artificial Sequence
  Description of Artificial Sequence: Synthetic oligonucleotide
  Target: LAMA2; (+) strand; PAM type: NRG; PAM sequence: CAG
agcactttgggaggccaagg

SEQ ID NO: 152694 - DNA, 20 bp, Artificial Sequence
  Description of Artificial Sequence: Synthetic oligonucleotide
  Target: LAMA2; (+) strand; PAM type: NRG; PAM sequence: AGG
gcactttgggaggccaaggc

SEQ ID NO: 152695 - DNA, 20 bp, Artificial Sequence
  Description of Artificial Sequence: Synthetic oligonucleotide
  Target: LAMA2; (+) strand; PAM type: NRG; PAM sequence: TGG
ctttgggaggccaaggcagg

SEQ ID NO: 152696 - DNA, 20 bp, Artificial Sequence
  Description of Artificial Sequence: Synthetic oligonucleotide
  Target: LAMA2; (+) strand; PAM type: NRG; PAM sequence: GAG
ggccaaggcaggtggatcac

SEQ ID NO: 152697 - DNA, 20 bp, Artificial Sequence
  Description of Artificial Sequence: Synthetic oligonucleotide
  Target: LAMA2; (+) strand; PAM type: NRG; PAM sequence: AGG
gccaaggcaggtggatcacg

SEQ ID NO: 152698 - DNA, 20 bp, Artificial Sequence
  Description of Artificial Sequence: Synthetic oligonucleotide
  Target: LAMA2; (+) strand; PAM type: NRG; PAM sequence: CAG
aggcaggtggatcacgaggt

SEQ ID NO: 152699 - DNA, 20 bp, Artificial Sequence
  Description of Artificial Sequence: Synthetic oligonucleotide
  Target: LAMA2; (+) strand; PAM type: NRG; PAM sequence: AGG
ggcaggtggatcacgaggtc

SEQ ID NO: 152700 - DNA, 20 bp, Artificial Sequence
  Description of Artificial Sequence: Synthetic oligonucleotide
  Target: LAMA2; (+) strand; PAM type: NRG; PAM sequence: GAG
caggtggatcacgaggtcag

SEQ ID NO: 152701 - DNA, 20 bp, Artificial Sequence
  Description of Artificial Sequence: Synthetic oligonucleotide
  Target: LAMA2; (+) strand; PAM type: NRG; PAM sequence: AAG
gatcacgaggtcaggagttc

SEQ ID NO: 152702 - DNA, 20 bp, Artificial Sequence
  Description of Artificial Sequence: Synthetic oligonucleotide
  Target: LAMA2; (+) strand; PAM type: NRG; PAM sequence: CAG
cgaggtcaggagttcaagac

SEQ ID NO: 152703 - DNA, 20 bp, Artificial Sequence
  Description of Artificial Sequence: Synthetic oligonucleotide
  Target: LAMA2; (+) strand; PAM type: NRG; PAM sequence: TGG
tcaggagttcaagaccagcc

SEQ ID NO: 152704 - DNA, 20 bp, Artificial Sequence
  Description of Artificial Sequence: Synthetic oligonucleotide
  Target: LAMA2; (+) strand; PAM type: NRG; PAM sequence: TGG
caagaccagcctggccaata

SEQ ID NO: 152705 - DNA, 20 bp, Artificial Sequence
  Description of Artificial Sequence: Synthetic oligonucleotide
  Target: LAMA2; (+) strand; PAM type: NRG; PAM sequence: TAG
tctactaaaaatacaaaaat

SEQ ID NO: 152706 - DNA, 20 bp, Artificial Sequence
  Description of Artificial Sequence: Synthetic oligonucleotide
  Target: LAMA2; (+) strand; PAM type: NRG; PAM sequence: TGG
ctaaaaatacaaaaattagc

SEQ ID NO: 152707 - DNA, 20 bp, Artificial Sequence
  Description of Artificial Sequence: Synthetic oligonucleotide
  Target: LAMA2; (+) strand; PAM type: NRG; PAM sequence: GGG
taaaaatacaaaaattagct

SEQ ID NO: 152708 - DNA, 20 bp, Artificial Sequence
  Description of Artificial Sequence: Synthetic oligonucleotide
  Target: LAMA2; (+) strand; PAM type: NRG; PAM sequence: TGG
atacaaaaattagctgggca

SEQ ID NO: 152709 - DNA, 20 bp, Artificial Sequence
  Description of Artificial Sequence: Synthetic oligonucleotide
  Target: LAMA2; (+) strand; PAM type: NRG; PAM sequence: TGG
caaaaattagctgggcatgg

SEQ ID NO: 152710 - DNA, 20 bp, Artificial Sequence
  Description of Artificial Sequence: Synthetic oligonucleotide
  Target: LAMA2; (+) strand; PAM type: NRG; PAM sequence: TAG
ggcatggtggtgcacacctg

SEQ ID NO: 152711 - DNA, 20 bp, Artificial Sequence
  Description of Artificial Sequence: Synthetic oligonucleotide
  Target: LAMA2; (+) strand; PAM type: NRG; PAM sequence: CAG
gtggtgcacacctgtagtcc

SEQ ID NO: 152712 - DNA, 20 bp, Artificial Sequence
  Description of Artificial Sequence: Synthetic oligonucleotide
  Target: LAMA2; (+) strand; PAM type: NRG; PAM sequence: CAG
cacctgtagtcccagctgct

SEQ ID NO: 152713 - DNA, 20 bp, Artificial Sequence
  Description of Artificial Sequence: Synthetic oligonucleotide
  Target: LAMA2; (+) strand; PAM type: NRG; PAM sequence: AGG
acctgtagtcccagctgctc

SEQ ID NO: 152714 - DNA, 20 bp, Artificial Sequence
  Description of Artificial Sequence: Synthetic oligonucleotide
  Target: LAMA2; (+) strand; PAM type: NRG; PAM sequence: GAG
ctgtagtcccagctgctcag

SEQ ID NO: 152715 - DNA, 20 bp, Artificial Sequence
  Description of Artificial Sequence: Synthetic oligonucleotide
  Target: LAMA2; (+) strand; PAM type: NRG; PAM sequence: AGG
tgtagtcccagctgctcagg

SEQ ID NO: 152716 - DNA, 20 bp, Artificial Sequence
  Description of Artificial Sequence: Synthetic oligonucleotide
  Target: LAMA2; (+) strand; PAM type: NRG; PAM sequence: GAG
tcccagctgctcaggaggct

SEQ ID NO: 152717 - DNA, 20 bp, Artificial Sequence
  Description of Artificial Sequence: Synthetic oligonucleotide
  Target: LAMA2; (+) strand; PAM type: NRG; PAM sequence: AGG
cccagctgctcaggaggctg

SEQ ID NO: 152718 - DNA, 20 bp, Artificial Sequence
  Description of Artificial Sequence: Synthetic oligonucleotide
  Target: LAMA2; (+) strand; PAM type: NRG; PAM sequence: CAG
agctgctcaggaggctgagg

SEQ ID NO: 152719 - DNA, 20 bp, Artificial Sequence
  Description of Artificial Sequence: Synthetic oligonucleotide
  Target: LAMA2; (+) strand; PAM type: NRG; PAM sequence: AGG
gctgctcaggaggctgaggc

SEQ ID NO: 152720 - DNA, 20 bp, Artificial Sequence
  Description of Artificial Sequence: Synthetic oligonucleotide
  Target: LAMA2; (+) strand; PAM type: NRG; PAM sequence: GAG
tgctcaggaggctgaggcag

SEQ ID NO: 152721 - DNA, 20 bp, Artificial Sequence
  Description of Artificial Sequence: Synthetic oligonucleotide
  Target: LAMA2; (+) strand; PAM type: NRG; PAM sequence: TGG
gcaggagaatcacttgaacc

SEQ ID NO: 152722 - DNA, 20 bp, Artificial Sequence
  Description of Artificial Sequence: Synthetic oligonucleotide
  Target: LAMA2; (+) strand; PAM type: NRG; PAM sequence: GGG
caggagaatcacttgaacct

SEQ ID NO: 152723 - DNA, 20 bp, Artificial Sequence
  Description of Artificial Sequence: Synthetic oligonucleotide
  Target: LAMA2; (+) strand; PAM type: NRG; PAM sequence: GAG
ggagaatcacttgaacctgg

SEQ ID NO: 152724 - DNA, 20 bp, Artificial Sequence
  Description of Artificial Sequence: Synthetic oligonucleotide
  Target: LAMA2; (+) strand; PAM type: NRG; PAM sequence: AGG
gagaatcacttgaacctggg

SEQ ID NO: 152725 - DNA, 20 bp, Artificial Sequence
  Description of Artificial Sequence: Synthetic oligonucleotide
  Target: LAMA2; (+) strand; PAM type: NRG; PAM sequence: TGG
cacttgaacctgggaggcga

SEQ ID NO: 152726 - DNA, 20 bp, Artificial Sequence
  Description of Artificial Sequence: Synthetic oligonucleotide
  Target: LAMA2; (+) strand; PAM type: NRG; PAM sequence: CAG
aacctgggaggcgatggttt

SEQ ID NO: 152727 - DNA, 20 bp, Artificial Sequence
  Description of Artificial Sequence: Synthetic oligonucleotide
  Target: LAMA2; (+) strand; PAM type: NRG; PAM sequence: GAG
tgggaggcgatggtttcagt

SEQ ID NO: 152728 - DNA, 20 bp, Artificial Sequence
  Description of Artificial Sequence: Synthetic oligonucleotide
  Target: LAMA2; (+) strand; PAM type: NRG; PAM sequence: GAG
ggcgatggtttcagtgagcc

SEQ ID NO: 152729 - DNA, 20 bp, Artificial Sequence
  Description of Artificial Sequence: Synthetic oligonucleotide
  Target: LAMA2; (+) strand; PAM type: NRG; PAM sequence: CAG
gagatcataccactgcactc

SEQ ID NO: 152730 - DNA, 20 bp, Artificial Sequence
  Description of Artificial Sequence: Synthetic oligonucleotide
  Target: LAMA2; (+) strand; PAM type: NRG; PAM sequence: AAG
ataccactgcactccagcct

SEQ ID NO: 152731 - DNA, 20 bp, Artificial Sequence
  Description of Artificial Sequence: Synthetic oligonucleotide
  Target: LAMA2; (+) strand; PAM type: NRG; PAM sequence: CAG
ctgcactccagcctaagcaa

SEQ ID NO: 152732 - DNA, 20 bp, Artificial Sequence
  Description of Artificial Sequence: Synthetic oligonucleotide
  Target: LAMA2; (+) strand; PAM type: NRG; PAM sequence: GAG
gcactccagcctaagcaaca

SEQ ID NO: 152733 - DNA, 20 bp, Artificial Sequence
  Description of Artificial Sequence: Synthetic oligonucleotide
  Target: LAMA2; (+) strand; PAM type: NRG; PAM sequence: GAG
tccagcctaagcaacagagc

SEQ ID NO: 152734 - DNA, 20 bp, Artificial Sequence
  Description of Artificial Sequence: Synthetic oligonucleotide
  Target: LAMA2; (+) strand; PAM type: NRG; PAM sequence: GAG
cagcctaagcaacagagcga

SEQ ID NO: 152735 - DNA, 20 bp, Artificial Sequence
  Description of Artificial Sequence: Synthetic oligonucleotide
  Target: LAMA2; (+) strand; PAM type: NRG; PAM sequence: AAG
aaaaaaaaaaaaaaaaaaaa

SEQ ID NO: 152736 - DNA, 20 bp, Artificial Sequence
  Description of Artificial Sequence: Synthetic oligonucleotide
  Target: LAMA2; (+) strand; PAM type: NRG; PAM sequence: AAG
aaaaaaaaaaaaaaaaagaa

SEQ ID NO: 152737 - DNA, 20 bp, Artificial Sequence
  Description of Artificial Sequence: Synthetic oligonucleotide
  Target: LAMA2; (+) strand; PAM type: NRG; PAM sequence: AAG
aaaaaaaaaaaagaaaagaa

SEQ ID NO: 152738 - DNA, 20 bp, Artificial Sequence
  Description of Artificial Sequence: Synthetic oligonucleotide
  Target: LAMA2; (+) strand; PAM type: NRG; PAM sequence: CAG
gaaaagaaaagaaaacacaa

SEQ ID NO: 152739 - DNA, 20 bp, Artificial Sequence
  Description of Artificial Sequence: Synthetic oligonucleotide
  Target: LAMA2; (+) strand; PAM type: NRG; PAM sequence: AGG
aaaagaaaagaaaacacaac

SEQ ID NO: 152740 - DNA, 20 bp, Artificial Sequence
  Description of Artificial Sequence: Synthetic oligonucleotide
  Target: LAMA2; (+) strand; PAM type: NRG; PAM sequence: CAG
aaaagaaaacacaacaggtg

SEQ ID NO: 152741 - DNA, 20 bp, Artificial Sequence
  Description of Artificial Sequence: Synthetic oligonucleotide
  Target: LAMA2; (+) strand; PAM type: NRG; PAM sequence: GAG
aagaaaacacaacaggtgca

SEQ ID NO: 152742 - DNA, 20 bp, Artificial Sequence
  Description of Artificial Sequence: Synthetic oligonucleotide
  Target: LAMA2; (+) strand; PAM type: NRG; PAM sequence: AGG
agaaaacacaacaggtgcag

SEQ ID NO: 152743 - DNA, 20 bp, Artificial Sequence
  Description of Artificial Sequence: Synthetic oligonucleotide
  Target: LAMA2; (+) strand; PAM type: NRG; PAM sequence: AAG
acaacaggtgcagaggaaca

SEQ ID NO: 152744 - DNA, 20 bp, Artificial Sequence
  Description of Artificial Sequence: Synthetic oligonucleotide
  Target: LAMA2; (+) strand; PAM type: NRG; PAM sequence: AAG
aggtgcagaggaacaaagat

SEQ ID NO: 152745 - DNA, 20 bp, Artificial Sequence
  Description of Artificial Sequence: Synthetic oligonucleotide
  Target: LAMA2; (+) strand; PAM type: NRG; PAM sequence: AGG
ggtgcagaggaacaaagata

SEQ ID NO: 152746 - DNA, 20 bp, Artificial Sequence
  Description of Artificial Sequence: Synthetic oligonucleotide
  Target: LAMA2; (+) strand; PAM type: NRG; PAM sequence: AAG
gcagaggaacaaagataagg

SEQ ID NO: 152747 - DNA, 20 bp, Artificial Sequence
  Description of Artificial Sequence: Synthetic oligonucleotide
  Target: LAMA2; (+) strand; PAM type: NRG; PAM sequence: TAG
ggaacaaagataaggaagaa

SEQ ID NO: 152748 - DNA, 20 bp, Artificial Sequence
  Description of Artificial Sequence: Synthetic oligonucleotide
  Target: LAMA2; (+) strand; PAM type: NRG; PAM sequence: CAG
aaggaagaatagtttcttgt

SEQ ID NO: 152749 - DNA, 20 bp, Artificial Sequence
  Description of Artificial Sequence: Synthetic oligonucleotide
  Target: LAMA2; (+) strand; PAM type: NRG; PAM sequence: TGG
ttgtcagaccctatatgcta

SEQ ID NO: 152750 - DNA, 20 bp, Artificial Sequence
  Description of Artificial Sequence: Synthetic oligonucleotide
  Target: LAMA2; (+) strand; PAM type: NRG; PAM sequence: TGG
atatgctatggtccaaatgt

SEQ ID NO: 152751 - DNA, 20 bp, Artificial Sequence
  Description of Artificial Sequence: Synthetic oligonucleotide
  Target: LAMA2; (+) strand; PAM type: NRG; PAM sequence: TGG
tccccctaaaacttatatgc

SEQ ID NO: 152752 - DNA, 20 bp, Artificial Sequence
  Description of Artificial Sequence: Synthetic oligonucleotide
  Target: LAMA2; (+) strand; PAM type: NRG; PAM sequence: TAG
gaacctaatgcctaatgtga

SEQ ID NO: 152753 - DNA, 20 bp, Artificial Sequence
  Description of Artificial Sequence: Synthetic oligonucleotide
  Target: LAMA2; (+) strand; PAM type: NRG; PAM sequence: TAG
atgcctaatgtgatagtatt

SEQ ID NO: 152754 - DNA, 20 bp, Artificial Sequence
  Description of Artificial Sequence: Synthetic oligonucleotide
  Target: LAMA2; (+) strand; PAM type: NRG; PAM sequence: GAG
gcctaatgtgatagtattta

SEQ ID NO: 152755 - DNA, 20 bp, Artificial Sequence
  Description of Artificial Sequence: Synthetic oligonucleotide
  Target: LAMA2; (+) strand; PAM type: NRG; PAM sequence: AGG
cctaatgtgatagtatttag

SEQ ID NO: 152756 - DNA, 20 bp, Artificial Sequence
  Description of Artificial Sequence: Synthetic oligonucleotide
  Target: LAMA2; (+) strand; PAM type: NRG; PAM sequence: TGG
aatgtgatagtatttagagg

SEQ ID NO: 152757 - DNA, 20 bp, Artificial Sequence
  Description of Artificial Sequence: Synthetic oligonucleotide
  Target: LAMA2; (+) strand; PAM type: NRG; PAM sequence: GGG
atgtgatagtatttagaggt

SEQ ID NO: 152758 - DNA, 20 bp, Artificial Sequence
  Description of Artificial Sequence: Synthetic oligonucleotide
  Target: LAMA2; (+) strand; PAM type: NRG; PAM sequence: GGG
tgtgatagtatttagaggtg

SEQ ID NO: 152759 - DNA, 20 bp, Artificial Sequence
  Description of Artificial Sequence: Synthetic oligonucleotide
  Target: LAMA2; (+) strand; PAM type: NRG; PAM sequence: TGG
gtatttagaggtggggcttt

SEQ ID NO: 152760 - DNA, 20 bp, Artificial Sequence
  Description of Artificial Sequence: Synthetic oligonucleotide
  Target: LAMA2; (+) strand; PAM type: NRG; PAM sequence: GGG
tatttagaggtggggctttt

SEQ ID NO: 152761 - DNA, 20 bp, Artificial Sequence
  Description of Artificial Sequence: Synthetic oligonucleotide
  Target: LAMA2; (+) strand; PAM type: NRG; PAM sequence: GGG
atttagaggtggggcttttg

SEQ ID NO: 152762 - DNA, 20 bp, Artificial Sequence
  Description of Artificial Sequence: Synthetic oligonucleotide
  Target: LAMA2; (+) strand; PAM type: NRG; PAM sequence: GGG
tttagaggtggggcttttgg

SEQ ID NO: 152763 - DNA, 20 bp, Artificial Sequence
  Description of Artificial Sequence: Synthetic oligonucleotide
  Target: LAMA2; (+) strand; PAM type: NRG; PAM sequence: GAG
tagaggtggggcttttgggg

SEQ ID NO: 152764 - DNA, 20 bp, Artificial Sequence
  Description of Artificial Sequence: Synthetic oligonucleotide
  Target: LAMA2; (+) strand; PAM type: NRG; PAM sequence: AAG
gggcttttgggggagtgatt

SEQ ID NO: 152765 - DNA, 20 bp, Artificial Sequence
  Description of Artificial Sequence: Synthetic oligonucleotide
  Target: LAMA2; (+) strand; PAM type: NRG; PAM sequence: GAG
tgggggagtgattaagtcat

SEQ ID NO: 152766 - DNA, 20 bp, Artificial Sequence
  Description of Artificial Sequence: Synthetic oligonucleotide
  Target: LAMA2; (+) strand; PAM type: NRG; PAM sequence: AGG
gggggagtgattaagtcatg

SEQ ID NO: 152767 - DNA, 20 bp, Artificial Sequence
  Description of Artificial Sequence: Synthetic oligonucleotide
  Target: LAMA2; (+) strand; PAM type: NRG; PAM sequence: GGG
ggggagtgattaagtcatga

SEQ ID NO: 152768 - DNA, 20 bp, Artificial Sequence
  Description of Artificial Sequence: Synthetic oligonucleotide
  Target: LAMA2; (+) strand; PAM type: NRG; PAM sequence: TGG
agggctctaatctccatgaa

SEQ ID NO: 152769 - DNA, 20 bp, Artificial Sequence
  Description of Artificial Sequence: Synthetic oligonucleotide
  Target: LAMA2; (+) strand; PAM type: NRG; PAM sequence: GGG
gggctctaatctccatgaat

SEQ ID NO: 152770 - DNA, 20 bp, Artificial Sequence
  Description of Artificial Sequence: Synthetic oligonucleotide
  Target: LAMA2; (+) strand; PAM type: NRG; PAM sequence: AAG
tgggattaacatccttacaa

SEQ ID NO: 152771 - DNA, 20 bp, Artificial Sequence
  Description of Artificial Sequence: Synthetic oligonucleotide
  Target: LAMA2; (+) strand; PAM type: NRG; PAM sequence: GAG
ggattaacatccttacaaaa

SEQ ID NO: 152772 - DNA, 20 bp, Artificial Sequence
  Description of Artificial Sequence: Synthetic oligonucleotide
  Target: LAMA2; (+) strand; PAM type: NRG; PAM sequence: AGG
gattaacatccttacaaaag

SEQ ID NO: 152773 - DNA, 20 bp, Artificial Sequence
  Description of Artificial Sequence: Synthetic oligonucleotide
  Target: LAMA2; (+) strand; PAM type: NRG; PAM sequence: GAG
acatccttacaaaagaggtt

SEQ ID NO: 152774 - DNA, 20 bp, Artificial Sequence
  Description of Artificial Sequence: Synthetic oligonucleotide
  Target: LAMA2; (+) strand; PAM type: NRG; PAM sequence: AGG
catccttacaaaagaggttg

SEQ ID NO: 152775 - DNA, 20 bp, Artificial Sequence
  Description of Artificial Sequence: Synthetic oligonucleotide
  Target: LAMA2; (+) strand; PAM type: NRG; PAM sequence: AAG
cttgccctttcctttacgtg

SEQ ID NO: 152776 - DNA, 20 bp, Artificial Sequence
  Description of Artificial Sequence: Synthetic oligonucleotide
  Target: LAMA2; (+) strand; PAM type: NRG; PAM sequence: AGG
ttgccctttcctttacgtga

SEQ ID NO: 152777 - DNA, 20 bp, Artificial Sequence
  Description of Artificial Sequence: Synthetic oligonucleotide
  Target: LAMA2; (+) strand; PAM type: NRG; PAM sequence: GGG
tgccctttcctttacgtgaa

SEQ ID NO: 152778 - DNA, 20 bp, Artificial Sequence
  Description of Artificial Sequence: Synthetic oligonucleotide
  Target: LAMA2; (+) strand; PAM type: NRG; PAM sequence: GGG
gccctttcctttacgtgaag

SEQ ID NO: 152779 - DNA, 20 bp, Artificial Sequence
  Description of Artificial Sequence: Synthetic oligonucleotide
  Target: LAMA2; (+) strand; PAM type: NRG; PAM sequence: CAG
ctttcctttacgtgaagggg

SEQ ID NO: 152780 - DNA, 20 bp, Artificial Sequence
  Description of Artificial Sequence: Synthetic oligonucleotide
  Target: LAMA2; (+) strand; PAM type: NRG; PAM sequence: AAG
cctttacgtgaaggggcagc

SEQ ID NO: 152781 - DNA, 20 bp, Artificial Sequence
  Description of Artificial Sequence: Synthetic oligonucleotide
  Target: LAMA2; (+) strand; PAM type: NRG; PAM sequence: AGG
ctttacgtgaaggggcagca

SEQ ID NO: 152782 - DNA, 20 bp, Artificial Sequence
  Description of Artificial Sequence: Synthetic oligonucleotide
  Target: LAMA2; (+) strand; PAM type: NRG; PAM sequence: GAG
ttacgtgaaggggcagcaag

SEQ ID NO: 152783 - DNA, 20 bp, Artificial Sequence
  Description of Artificial Sequence: Synthetic oligonucleotide
  Target: LAMA2; (+) strand; PAM type: NRG; PAM sequence: AGG
tacgtgaaggggcagcaagg

SEQ ID NO: 152784 - DNA, 20 bp, Artificial Sequence
  Description of Artificial Sequence: Synthetic oligonucleotide
  Target: LAMA2; (+) strand; PAM type: NRG; PAM sequence: TGG
gcagcaaggaggtaccacct

SEQ ID NO: 152785 - DNA, 20 bp, Artificial Sequence
  Description of Artificial Sequence: Synthetic oligonucleotide
  Target: LAMA2; (+) strand; PAM type: NRG; PAM sequence: AAG
gcaaggaggtaccaccttgg

SEQ ID NO: 152786 - DNA, 20 bp, Artificial Sequence
  Description of Artificial Sequence: Synthetic oligonucleotide
  Target: LAMA2; (+) strand; PAM type: NRG; PAM sequence: CAG
aggaggtaccaccttggaag

SEQ ID NO: 152787 - DNA, 20 bp, Artificial Sequence
  Description of Artificial Sequence: Synthetic oligonucleotide
  Target: LAMA2; (+) strand; PAM type: NRG; PAM sequence: GAG
gaggtaccaccttggaagca

SEQ ID NO: 152788 - DNA, 20 bp, Artificial Sequence
  Description of Artificial Sequence: Synthetic oligonucleotide
  Target: LAMA2; (+) strand; PAM type: NRG; PAM sequence: GAG
ggtaccaccttggaagcaga

SEQ ID NO: 152789 - DNA, 20 bp, Artificial Sequence
  Description of Artificial Sequence: Synthetic oligonucleotide
  Target: LAMA2; (+) strand; PAM type: NRG; PAM sequence: AAG
ccaccttggaagcagagagc

SEQ ID NO: 152790 - DNA, 20 bp, Artificial Sequence
  Description of Artificial Sequence: Synthetic oligonucleotide
  Target: LAMA2; (+) strand; PAM type: NRG; PAM sequence: TGG
acatcaaatctgctgatgcc

SEQ ID NO: 152791 - DNA, 20 bp, Artificial Sequence
  Description of Artificial Sequence: Synthetic oligonucleotide
  Target: LAMA2; (+) strand; PAM type: NRG; PAM sequence: TGG
atctgctgatgcctggatct

SEQ ID NO: 152792 - DNA, 20 bp, Artificial Sequence
  Description of Artificial Sequence: Synthetic oligonucleotide
  Target: LAMA2; (+) strand; PAM type: NRG; PAM sequence: TAG
tgcctggatcttggatttcc

SEQ ID NO: 152793 - DNA, 20 bp, Artificial Sequence
  Description of Artificial Sequence: Synthetic oligonucleotide
  Target: LAMA2; (+) strand; PAM type: NRG; PAM sequence: CAG
atcttggatttcctagtctc

SEQ ID NO: 152794 - DNA, 20 bp, Artificial Sequence
  Description of Artificial Sequence: Synthetic oligonucleotide
  Target: LAMA2; (+) strand; PAM type: NRG; PAM sequence: GAG
ttcctagtctccagcactgt

SEQ ID NO: 152795 - DNA, 20 bp, Artificial Sequence
  Description of Artificial Sequence: Synthetic oligonucleotide
  Target: LAMA2; (+) strand; PAM type: NRG; PAM sequence: CAG
ctagtctccagcactgtgag

SEQ ID NO: 152796 - DNA, 20 bp, Artificial Sequence
  Description of Artificial Sequence: Synthetic oligonucleotide
  Target: LAMA2; (+) strand; PAM type: NRG; PAM sequence: TAG
tttaatgcttaaaaactacc

SEQ ID NO: 152797 - DNA, 20 bp, Artificial Sequence
  Description of Artificial Sequence: Synthetic oligonucleotide
  Target: LAMA2; (+) strand; PAM type: NRG; PAM sequence: TAG
tagtccctgttattttgttg

SEQ ID NO: 152798 - DNA, 20 bp, Artificial Sequence
  Description of Artificial Sequence: Synthetic oligonucleotide
  Target: LAMA2; (+) strand; PAM type: NRG; PAM sequence: CAG
tccctgttattttgttgtag

SEQ ID NO: 152799 - DNA, 20 bp, Artificial Sequence
  Description of Artificial Sequence: Synthetic oligonucleotide
  Target: LAMA2; (+) strand; PAM type: NRG; PAM sequence: CAG
ttgtagcagcctgaatgcat

SEQ ID NO: 152800 - DNA, 20 bp, Artificial Sequence
  Description of Artificial Sequence: Synthetic oligonucleotide
  Target: LAMA2; (+) strand; PAM type: NRG; PAM sequence: AAG
aatgcatcagtacactttgc

SEQ ID NO: 152801 - DNA, 20 bp, Artificial Sequence
  Description of Artificial Sequence: Synthetic oligonucleotide
  Target: LAMA2; (+) strand; PAM type: NRG; PAM sequence: CAG
catcagtacactttgcaagc

SEQ ID NO: 152802 - DNA, 20 bp, Artificial Sequence
  Description of Artificial Sequence: Synthetic oligonucleotide
  Target: LAMA2; (+) strand; PAM type: NRG; PAM sequence: CAG
ttgcaagccagaatacaata

SEQ ID NO: 152803 - DNA, 20 bp, Artificial Sequence
  Description of Artificial Sequence: Synthetic oligonucleotide
  Target: LAMA2; (+) strand; PAM type: NRG; PAM sequence: GAG
gcaagccagaatacaataca

SEQ ID NO: 152804 - DNA, 20 bp, Artificial Sequence
  Description of Artificial Sequence: Synthetic oligonucleotide
  Target: LAMA2; (+) strand; PAM type: NRG; PAM sequence: AAG
tacaatacagagatatgtta

SEQ ID NO: 152805 - DNA, 20 bp, Artificial Sequence
  Description of Artificial Sequence: Synthetic oligonucleotide
  Target: LAMA2; (+) strand; PAM type: NRG; PAM sequence: TAG
acagagatatgttaaagtat

SEQ ID NO: 152806 - DNA, 20 bp, Artificial Sequence
  Description of Artificial Sequence: Synthetic oligonucleotide
  Target: LAMA2; (+) strand; PAM type: NRG; PAM sequence: AGG
cagagatatgttaaagtatt

SEQ ID NO: 152807 - DNA, 20 bp, Artificial Sequence
  Description of Artificial Sequence: Synthetic oligonucleotide
  Target: LAMA2; (+) strand; PAM type: NRG; PAM sequence: AAG
gtattaggaaaaaacaacgc

SEQ ID NO: 152808 - DNA, 20 bp, Artificial Sequence
  Description of Artificial Sequence: Synthetic oligonucleotide
  Target: LAMA2; (+) strand; PAM type: NRG; PAM sequence: CAG
atgaacaaaacaaatactat

SEQ ID NO: 152809 - DNA, 20 bp, Artificial Sequence
  Description of Artificial Sequence: Synthetic oligonucleotide
  Target: LAMA2; (+) strand; PAM type: NRG; PAM sequence: CAG
atcagtctataattctttac

SEQ ID NO: 152810 - DNA, 20 bp, Artificial Sequence
  Description of Artificial Sequence: Synthetic oligonucleotide
  Target: LAMA2; (+) strand; PAM type: NRG; PAM sequence: AGG
tcagtctataattctttacc

SEQ ID NO: 152811 - DNA, 20 bp, Artificial Sequence
  Description of Artificial Sequence: Synthetic oligonucleotide
  Target: LAMA2; (+) strand; PAM type: NRG; PAM sequence: AAG
aaaaatgtcttccaaaactg

SEQ ID NO: 152812 - DNA, 20 bp, Artificial Sequence
  Description of Artificial Sequence: Synthetic oligonucleotide
  Target: LAMA2; (+) strand; PAM type: NRG; PAM sequence: AAG
ccaaaactgaagaaaaaaca

SEQ ID NO: 152813 - DNA, 20 bp, Artificial Sequence
  Description of Artificial Sequence: Synthetic oligonucleotide
  Target: LAMA2; (+) strand; PAM type: NRG; PAM sequence: CAG
agaaaaaacaaagattgttt

SEQ ID NO: 152814 - DNA, 20 bp, Artificial Sequence
  Description of Artificial Sequence: Synthetic oligonucleotide
  Target: LAMA2; (+) strand; PAM type: NRG; PAM sequence: GAG
aaaaaacaaagattgtttca

SEQ ID NO: 152815 - DNA, 20 bp, Artificial Sequence
  Description of Artificial Sequence: Synthetic oligonucleotide
  Target: LAMA2; (+) strand; PAM type: NRG; PAM sequence: TAG
caaagattgtttcagagaaa

SEQ ID NO: 152816 - DNA, 20 bp, Artificial Sequence
  Description of Artificial Sequence: Synthetic oligonucleotide
  Target: LAMA2; (+) strand; PAM type: NRG; PAM sequence: AAG
agattgtttcagagaaatag

SEQ ID NO: 152817 - DNA, 20 bp, Artificial Sequence
  Description of Artificial Sequence: Synthetic oligonucleotide
  Target: LAMA2; (+) strand; PAM type: NRG; PAM sequence: AAG
ttcagagaaatagaagttga

SEQ ID NO: 152818 - DNA, 20 bp, Artificial Sequence
  Description of Artificial Sequence: Synthetic oligonucleotide
  Target: LAMA2; (+) strand; PAM type: NRG; PAM sequence: CAG
gaagttgaaagaatgtgtca

SEQ ID NO: 152819 - DNA, 20 bp, Artificial Sequence
  Description of Artificial Sequence: Synthetic oligonucleotide
  Target: LAMA2; (+) strand; PAM type: NRG; PAM sequence: AAG
tgtcacagactgatgtacac

SEQ ID NO: 152820 - DNA, 20 bp, Artificial Sequence
  Description of Artificial Sequence: Synthetic oligonucleotide
  Target: LAMA2; (+) strand; PAM type: NRG; PAM sequence: AAG
cacagactgatgtacacaag

SEQ ID NO: 152821 - DNA, 20 bp, Artificial Sequence
  Description of Artificial Sequence: Synthetic oligonucleotide
  Target: LAMA2; (+) strand; PAM type: NRG; PAM sequence: TAG
gatgtacacaagaagaaatg

SEQ ID NO: 152822 - DNA, 20 bp, Artificial Sequence
  Description of Artificial Sequence: Synthetic oligonucleotide
  Target: LAMA2; (+) strand; PAM type: NRG; PAM sequence: AAG
tacacaagaagaaatgtaga

SEQ ID NO: 152823 - DNA, 20 bp, Artificial Sequence
  Description of Artificial Sequence: Synthetic oligonucleotide
  Target: LAMA2; (+) strand; PAM type: NRG; PAM sequence: CAG
aagaaatgtagaaagttctt

SEQ ID NO: 152824 - DNA, 20 bp, Artificial Sequence
  Description of Artificial Sequence: Synthetic oligonucleotide
  Target: LAMA2; (+) strand; PAM type: NRG; PAM sequence: AGG
agaaatgtagaaagttcttc

SEQ ID NO: 152825 - DNA, 20 bp, Artificial Sequence
  Description of Artificial Sequence: Synthetic oligonucleotide
  Target: LAMA2; (+) strand; PAM type: NRG; PAM sequence: AAG
gtagaaagttcttcaggcaa

SEQ ID NO: 152826 - DNA, 20 bp, Artificial Sequence
  Description of Artificial Sequence: Synthetic oligonucleotide
  Target: LAMA2; (+) strand; PAM type: NRG; PAM sequence: CAG
aggcaaaagaaaaatgttac

SEQ ID NO: 152827 - DNA, 20 bp, Artificial Sequence
  Description of Artificial Sequence: Synthetic oligonucleotide
  Target: LAMA2; (+) strand; PAM type: NRG; PAM sequence: TGG
aaaagaaaaatgttaccaga

SEQ ID NO: 152828 - DNA, 20 bp, Artificial Sequence
  Description of Artificial Sequence: Synthetic oligonucleotide
  Target: LAMA2; (+) strand; PAM type: NRG; PAM sequence: TAG
tggaaatttactcctacaaa

SEQ ID NO: 152829 - DNA, 20 bp, Artificial Sequence
  Description of Artificial Sequence: Synthetic oligonucleotide
  Target: LAMA2; (+) strand; PAM type: NRG; PAM sequence: AAG
tactcctacaaatagaaatt

SEQ ID NO: 152830 - DNA, 20 bp, Artificial Sequence
  Description of Artificial Sequence: Synthetic oligonucleotide
  Target: LAMA2; (+) strand; PAM type: NRG; PAM sequence: CAG
tagaaattaagtgtatcaaa

SEQ ID NO: 152831 - DNA, 20 bp, Artificial Sequence
  Description of Artificial Sequence: Synthetic oligonucleotide
  Target: LAMA2; (+) strand; PAM type: NRG; PAM sequence: AGG
agaaattaagtgtatcaaac

SEQ ID NO: 152832 - DNA, 20 bp, Artificial Sequence
  Description of Artificial Sequence: Synthetic oligonucleotide
  Target: LAMA2; (+) strand; PAM type: NRG; PAM sequence: TAG
aagtgtatcaaacaggtgaa

SEQ ID NO: 152833 - DNA, 20 bp, Artificial Sequence
  Description of Artificial Sequence: Synthetic oligonucleotide
  Target: LAMA2; (+) strand; PAM type: NRG; PAM sequence: TAG
gaatagcaatgctttgtcac

SEQ ID NO: 152834 - DNA, 20 bp, Artificial Sequence
  Description of Artificial Sequence: Synthetic oligonucleotide
  Target: LAMA2; (+) strand; PAM type: NRG; PAM sequence: TAG
caatgctttgtcactagtgc

SEQ ID NO: 152835 - DNA, 20 bp, Artificial Sequence
  Description of Artificial Sequence: Synthetic oligonucleotide
  Target: LAMA2; (+) strand; PAM type: NRG; PAM sequence: AAG
tcactagtgctagctgtcac

SEQ ID NO: 152836 - DNA, 20 bp, Artificial Sequence
  Description of Artificial Sequence: Synthetic oligonucleotide
  Target: LAMA2; (+) strand; PAM type: NRG; PAM sequence: TAG
gctagctgtcacaagacctc

SEQ ID NO: 152837 - DNA, 20 bp, Artificial Sequence
  Description of Artificial Sequence: Synthetic oligonucleotide
  Target: LAMA2; (+) strand; PAM type: NRG; PAM sequence: CAG
gctgtcacaagacctctagc

SEQ ID NO: 152838 - DNA, 20 bp, Artificial Sequence
  Description of Artificial Sequence: Synthetic oligonucleotide
  Target: LAMA2; (+) strand; PAM type: NRG; PAM sequence: CAG
cctctagccagtcatgtttt

SEQ ID NO: 152839 - DNA, 20 bp, Artificial Sequence
  Description of Artificial Sequence: Synthetic oligonucleotide
  Target: LAMA2; (+) strand; PAM type: NRG; PAM sequence: TAG
gccagtcatgttttcagctg

SEQ ID NO: 152840 - DNA, 20 bp, Artificial Sequence
  Description of Artificial Sequence: Synthetic oligonucleotide
  Target: LAMA2; (+) strand; PAM type: NRG; PAM sequence: AGG
ccagtcatgttttcagctgt

SEQ ID NO: 152841 - DNA, 20 bp, Artificial Sequence
  Description of Artificial Sequence: Synthetic oligonucleotide
  Target: LAMA2; (+) strand; PAM type: NRG; PAM sequence: GGG
cagtcatgttttcagctgta

SEQ ID NO: 152842 - DNA, 20 bp, Artificial Sequence
  Description of Artificial Sequence: Synthetic oligonucleotide
  Target: LAMA2; (+) strand; PAM type: NRG; PAM sequence: TGG
agctgtagggcctaacacca

SEQ ID NO: 152843 - DNA, 20 bp, Artificial Sequence
  Description of Artificial Sequence: Synthetic oligonucleotide
  Target: LAMA2; (+) strand; PAM type: NRG; PAM sequence: AAG
tagggcctaacaccatggtt

SEQ ID NO: 152844 - DNA, 20 bp, Artificial Sequence
  Description of Artificial Sequence: Synthetic oligonucleotide
  Target: LAMA2; (+) strand; PAM type: NRG; PAM sequence: AGG
agggcctaacaccatggtta

SEQ ID NO: 152845 - DNA, 20 bp, Artificial Sequence
  Description of Artificial Sequence: Synthetic oligonucleotide
  Target: LAMA2; (+) strand; PAM type: NRG; PAM sequence: TGG
ctaacaccatggttaaggaa

SEQ ID NO: 152846 - DNA, 20 bp, Artificial Sequence
  Description of Artificial Sequence: Synthetic oligonucleotide
  Target: LAMA2; (+) strand; PAM type: NRG; PAM sequence: AAG
tacctaaatacacaaactta

SEQ ID NO: 152847 - DNA, 20 bp, Artificial Sequence
  Description of Artificial Sequence: Synthetic oligonucleotide
  Target: LAMA2; (+) strand; PAM type: NRG; PAM sequence: TAG
ctaaatacacaaacttaaag

SEQ ID NO: 152848 - DNA, 20 bp, Artificial Sequence
  Description of Artificial Sequence: Synthetic oligonucleotide
  Target: LAMA2; (+) strand; PAM type: NRG; PAM sequence: AAG
tgtataaaattttccctctg

SEQ ID NO: 152849 - DNA, 20 bp, Artificial Sequence
  Description of Artificial Sequence: Synthetic oligonucleotide
  Target: LAMA2; (+) strand; PAM type: NRG; PAM sequence: AAG
tttccctctgaagttttaaa

SEQ ID NO: 152850 - DNA, 20 bp, Artificial Sequence
  Description of Artificial Sequence: Synthetic oligonucleotide
  Target: LAMA2; (+) strand; PAM type: NRG; PAM sequence: AAG
cctctgaagttttaaaaaga

SEQ ID NO: 152851 - DNA, 20 bp, Artificial Sequence
  Description of Artificial Sequence: Synthetic oligonucleotide
  Target: LAMA2; (+) strand; PAM type: NRG; PAM sequence: TGG
gaagttttaaaaagaaagac

SEQ ID NO: 152852 - DNA, 20 bp, Artificial Sequence
  Description of Artificial Sequence: Synthetic oligonucleotide
  Target: LAMA2; (+) strand; PAM type: NRG; PAM sequence: GGG
aagttttaaaaagaaagact

SEQ ID NO: 152853 - DNA, 20 bp, Artificial Sequence
  Description of Artificial Sequence: Synthetic oligonucleotide
  Target: LAMA2; (+) strand; PAM type: NRG; PAM sequence: AAG
aaaaagaaagactgggttgt

SEQ ID NO: 152854 - DNA, 20 bp, Artificial Sequence
  Description of Artificial Sequence: Synthetic oligonucleotide
  Target: LAMA2; (+) strand; PAM type: NRG; PAM sequence: AAG
aagaaagactgggttgtaag

SEQ ID NO: 152855 - DNA, 20 bp, Artificial Sequence
  Description of Artificial Sequence: Synthetic oligonucleotide
  Target: LAMA2; (+) strand; PAM type: NRG; PAM sequence: GAG
gaaagactgggttgtaagaa

SEQ ID NO: 152856 - DNA, 20 bp, Artificial Sequence
  Description of Artificial Sequence: Synthetic oligonucleotide
  Target: LAMA2; (+) strand; PAM type: NRG; PAM sequence: AAG
gttgtaagaagagtataaaa

SEQ ID NO: 152857 - DNA, 20 bp, Artificial Sequence
  Description of Artificial Sequence: Synthetic oligonucleotide
  Target: LAMA2; (+) strand; PAM type: NRG; PAM sequence: AGG
ttgtaagaagagtataaaaa

SEQ ID NO: 152858 - DNA, 20 bp, Artificial Sequence
  Description of Artificial Sequence: Synthetic oligonucleotide
  Target: LAMA2; (+) strand; PAM type: NRG; PAM sequence: CAG
ataaaaaaggcttgcttctc

SEQ ID NO: 152859 - DNA, 20 bp, Artificial Sequence
  Description of Artificial Sequence: Synthetic oligonucleotide
  Target: LAMA2; (+) strand; PAM type: NRG; PAM sequence: AAG
catttctcatttcaaactta

SEQ ID NO: 152860 - DNA, 20 bp, Artificial Sequence
  Description of Artificial Sequence: Synthetic oligonucleotide
  Target: LAMA2; (+) strand; PAM type: NRG; PAM sequence: AAG
tctcatttcaaacttaaaga

SEQ ID NO: 152861 - DNA, 20 bp, Artificial Sequence
  Description of Artificial Sequence: Synthetic oligonucleotide
  Target: LAMA2; (+) strand; PAM type: NRG; PAM sequence: CAG
caaacttaaagaaagaaaac

SEQ ID NO: 152862 - DNA, 20 bp, Artificial Sequence
  Description of Artificial Sequence: Synthetic oligonucleotide
  Target: LAMA2; (+) strand; PAM type: NRG; PAM sequence: AAG
gaaaaccagcaccaatttga

SEQ ID NO: 152863 - DNA, 20 bp, Artificial Sequence
  Description of Artificial Sequence: Synthetic oligonucleotide
  Target: LAMA2; (+) strand; PAM type: NRG; PAM sequence: TAG
aaacttcacgttgttttctg

SEQ ID NO: 152864 - DNA, 20 bp, Artificial Sequence
  Description of Artificial Sequence: Synthetic oligonucleotide
  Target: LAMA2; (+) strand; PAM type: NRG; PAM sequence: CAG
cgttgttttctgtagctttt

SEQ ID NO: 152865 - DNA, 20 bp, Artificial Sequence
  Description of Artificial Sequence: Synthetic oligonucleotide
  Target: LAMA2; (+) strand; PAM type: NRG; PAM sequence: CGG
ttacactcatgttctatgtg

SEQ ID NO: 152866 - DNA, 20 bp, Artificial Sequence
  Description of Artificial Sequence: Synthetic oligonucleotide
  Target: LAMA2; (+) strand; PAM type: NRG; PAM sequence: CAG
ctcatgttctatgtgcggct

SEQ ID NO: 152867 - DNA, 20 bp, Artificial Sequence
  Description of Artificial Sequence: Synthetic oligonucleotide
  Target: LAMA2; (+) strand; PAM type: NRG; PAM sequence: TGG
atgttctatgtgcggctcag

SEQ ID NO: 152868 - DNA, 20 bp, Artificial Sequence
  Description of Artificial Sequence: Synthetic oligonucleotide
  Target: LAMA2; (+) strand; PAM type: NRG; PAM sequence: GGG
tgttctatgtgcggctcagt

SEQ ID NO: 152869 - DNA, 20 bp, Artificial Sequence
  Description of Artificial Sequence: Synthetic oligonucleotide
  Target: LAMA2; (+) strand; PAM type: NRG; PAM sequence: GGG
gttctatgtgcggctcagtg

SEQ ID NO: 152870 - DNA, 20 bp, Artificial Sequence
  Description of Artificial Sequence: Synthetic oligonucleotide
  Target: LAMA2; (+) strand; PAM type: NRG; PAM sequence: CAG
agtggggaactatctgtatc

SEQ ID NO: 152871 - DNA, 20 bp, Artificial Sequence
  Description of Artificial Sequence: Synthetic oligonucleotide
  Target: LAMA2; (+) strand; PAM type: NRG; PAM sequence: TGG
ggggaactatctgtatccag

SEQ ID NO: 152872 - DNA, 20 bp, Artificial Sequence
  Description of Artificial Sequence: Synthetic oligonucleotide
  Target: LAMA2; (+) strand; PAM type: NRG; PAM sequence: TGG
atctgtatccagtggattgt

SEQ ID NO: 152873 - DNA, 20 bp, Artificial Sequence
  Description of Artificial Sequence: Synthetic oligonucleotide
  Target: LAMA2; (+) strand; PAM type: NRG; PAM sequence: TAG
gattgttggttctgacacac

SEQ ID NO: 152874 - DNA, 20 bp, Artificial Sequence
  Description of Artificial Sequence: Synthetic oligonucleotide
  Target: LAMA2; (+) strand; PAM type: NRG; PAM sequence: TGG
cacactagcctacgtgcata

SEQ ID NO: 152875 - DNA, 20 bp, Artificial Sequence
  Description of Artificial Sequence: Synthetic oligonucleotide
  Target: LAMA2; (+) strand; PAM type: NRG; PAM sequence: GGG
acactagcctacgtgcatat

SEQ ID NO: 152876 - DNA, 20 bp, Artificial Sequence
  Description of Artificial Sequence: Synthetic oligonucleotide
  Target: LAMA2; (+) strand; PAM type: NRG; PAM sequence: GGG
cactagcctacgtgcatatg

SEQ ID NO: 152877 - DNA, 20 bp, Artificial Sequence
  Description of Artificial Sequence: Synthetic oligonucleotide
  Target: LAMA2; (+) strand; PAM type: NRG; PAM sequence: TGG
tggggcaacccccaacatgc

SEQ ID NO: 152878 - DNA, 20 bp, Artificial Sequence
  Description of Artificial Sequence: Synthetic oligonucleotide
  Target: LAMA2; (+) strand; PAM type: NRG; PAM sequence: TAG
ctggcccctgccacttgcaa

SEQ ID NO: 152879 - DNA, 20 bp, Artificial Sequence
  Description of Artificial Sequence: Synthetic oligonucleotide
  Target: LAMA2; (+) strand; PAM type: NRG; PAM sequence: CAG
ccctgccacttgcaatagat

SEQ ID NO: 152880 - DNA, 20 bp, Artificial Sequence
  Description of Artificial Sequence: Synthetic oligonucleotide
  Target: LAMA2; (+) strand; PAM type: NRG; PAM sequence: TGG
tagatcagacccaccccttg

SEQ ID NO: 152881 - DNA, 20 bp, Artificial Sequence
  Description of Artificial Sequence: Synthetic oligonucleotide
  Target: LAMA2; (+) strand; PAM type: NRG; PAM sequence: GAG
cagacccaccccttgtggtt

SEQ ID NO: 152882 - DNA, 20 bp, Artificial Sequence
  Description of Artificial Sequence: Synthetic oligonucleotide
  Target: LAMA2; (+) strand; PAM type: NRG; PAM sequence: GAG
cccaccccttgtggttgagt

SEQ ID NO: 152883 - DNA, 20 bp, Artificial Sequence
  Description of Artificial Sequence: Synthetic oligonucleotide
  Target: LAMA2; (+) strand; PAM type: NRG; PAM sequence: AGG
ccaccccttgtggttgagtg

SEQ ID NO: 152884 - DNA, 20 bp, Artificial Sequence
  Description of Artificial Sequence: Synthetic oligonucleotide
  Target: LAMA2; (+) strand; PAM type: NRG; PAM sequence: CAG
ccccttgtggttgagtgagg

SEQ ID NO: 152885 - DNA, 20 bp, Artificial Sequence
  Description of Artificial Sequence: Synthetic oligonucleotide
  Target: LAMA2; (+) strand; PAM type: NRG; PAM sequence: TGG
tattatgtcaattctaaacc

SEQ ID NO: 152886 - DNA, 20 bp, Artificial Sequence
  Description of Artificial Sequence: Synthetic oligonucleotide
  Target: LAMA2; (+) strand; PAM type: NRG; PAM sequence: GAG
gcattttgtttactgttgtt

SEQ ID NO: 152887 - DNA, 20 bp, Artificial Sequence
  Description of Artificial Sequence: Synthetic oligonucleotide
  Target: LAMA2; (+) strand; PAM type: NRG; PAM sequence: TGG
ttactgttgttgagtgttgt

SEQ ID NO: 152888 - DNA, 20 bp, Artificial Sequence
  Description of Artificial Sequence: Synthetic oligonucleotide
  Target: LAMA2; (+) strand; PAM type: NRG; PAM sequence: TAG
ctgttgttgagtgttgttgg

SEQ ID NO: 152889 - DNA, 20 bp, Artificial Sequence
  Description of Artificial Sequence: Synthetic oligonucleotide
  Target: LAMA2; (+) strand; PAM type: NRG; PAM sequence: TGG
ttgttgagtgttgttggtag

SEQ ID NO: 152890 - DNA, 20 bp, Artificial Sequence
  Description of Artificial Sequence: Synthetic oligonucleotide
  Target: LAMA2; (+) strand; PAM type: NRG; PAM sequence: GGG
tgttgagtgttgttggtagt

SEQ ID NO: 152891 - DNA, 20 bp, Artificial Sequence
  Description of Artificial Sequence: Synthetic oligonucleotide
  Target: LAMA2; (+) strand; PAM type: NRG; PAM sequence: GAG
ttgagtgttgttggtagtgg

SEQ ID NO: 152892 - DNA, 20 bp, Artificial Sequence
  Description of Artificial Sequence: Synthetic oligonucleotide
  Target: LAMA2; (+) strand; PAM type: NRG; PAM sequence: AAG
agtgttgttggtagtgggag

SEQ ID NO: 152893 - DNA, 20 bp, Artificial Sequence
  Description of Artificial Sequence: Synthetic oligonucleotide
  Target: LAMA2; (+) strand; PAM type: NRG; PAM sequence: TAG
ttggtagtgggagaagaaaa

SEQ ID NO: 152894 - DNA, 20 bp, Artificial Sequence
  Description of Artificial Sequence: Synthetic oligonucleotide
  Target: LAMA2; (+) strand; PAM type: NRG; PAM sequence: AGG
tggtagtgggagaagaaaat

SEQ ID NO: 152895 - DNA, 20 bp, Artificial Sequence
  Description of Artificial Sequence: Synthetic oligonucleotide
  Target: LAMA2; (+) strand; PAM type: NRG; PAM sequence: CAG
tgggagaagaaaataggtca

SEQ ID NO: 152896 - DNA, 20 bp, Artificial Sequence
  Description of Artificial Sequence: Synthetic oligonucleotide
  Target: LAMA2; (+) strand; PAM type: NRG; PAM sequence: CAG
agaagaaaataggtcacaga

SEQ ID NO: 152897 - DNA, 20 bp, Artificial Sequence
  Description of Artificial Sequence: Synthetic oligonucleotide
  Target: LAMA2; (+) strand; PAM type: NRG; PAM sequence: AAG
aataggtcacagacagtgtg

SEQ ID NO: 152898 - DNA, 20 bp, Artificial Sequence
  Description of Artificial Sequence: Synthetic oligonucleotide
  Target: LAMA2; (+) strand; PAM type: NRG; PAM sequence: AAG
cacagacagtgtgaagacac

SEQ ID NO: 152899 - DNA, 20 bp, Artificial Sequence
  Description of Artificial Sequence: Synthetic oligonucleotide
  Target: LAMA2; (+) strand; PAM type: NRG; PAM sequence: AGG
acagacagtgtgaagacaca

SEQ ID NO: 152900 - DNA, 20 bp, Artificial Sequence
  Description of Artificial Sequence: Synthetic oligonucleotide
  Target: LAMA2; (+) strand; PAM type: NRG; PAM sequence: GAG
agacagtgtgaagacacaag

SEQ ID NO: 152901 - DNA, 20 bp, Artificial Sequence
  Description of Artificial Sequence: Synthetic oligonucleotide
  Target: LAMA2; (+) strand; PAM type: NRG; PAM sequence: AAG
cagtgtgaagacacaaggag

SEQ ID NO: 152902 - DNA, 20 bp, Artificial Sequence
  Description of Artificial Sequence: Synthetic oligonucleotide
  Target: LAMA2; (+) strand; PAM type: NRG; PAM sequence: CAG
gtgaagacacaaggagaaga

SEQ ID NO: 152903 - DNA, 20 bp, Artificial Sequence
  Description of Artificial Sequence: Synthetic oligonucleotide
  Target: LAMA2; (+) strand; PAM type: NRG; PAM sequence: AAG
aggagaagacagccatctac

SEQ ID NO: 152904 - DNA, 20 bp, Artificial Sequence
  Description of Artificial Sequence: Synthetic oligonucleotide
  Target: LAMA2; (+) strand; PAM type: NRG; PAM sequence: AAG
aagacagccatctacaagct

SEQ ID NO: 152905 - DNA, 20 bp, Artificial Sequence
  Description of Artificial Sequence: Synthetic oligonucleotide
  Target: LAMA2; (+) strand; PAM type: NRG; PAM sequence: AGG
agacagccatctacaagcta

SEQ ID NO: 152906 - DNA, 20 bp, Artificial Sequence
  Description of Artificial Sequence: Synthetic oligonucleotide
  Target: LAMA2; (+) strand; PAM type: NRG; PAM sequence: GAG
acagccatctacaagctaag

SEQ ID NO: 152907 - DNA, 20 bp, Artificial Sequence
  Description of Artificial Sequence: Synthetic oligonucleotide
  Target: LAMA2; (+) strand; PAM type: NRG; PAM sequence: GAG
agccatctacaagctaagga

SEQ ID NO: 152908 - DNA, 20 bp, Artificial Sequence
  Description of Artificial Sequence: Synthetic oligonucleotide
  Target: LAMA2; (+) strand; PAM type: NRG; PAM sequence: GAG
ccatctacaagctaaggaga

SEQ ID NO: 152909 - DNA, 20 bp, Artificial Sequence
  Description of Artificial Sequence: Synthetic oligonucleotide
  Target: LAMA2; (+) strand; PAM type: NRG; PAM sequence: AGG
catctacaagctaaggagag

SEQ ID NO: 152910 - DNA, 20 bp, Artificial Sequence
  Description of Artificial Sequence: Synthetic oligonucleotide
  Target: LAMA2; (+) strand; PAM type: NRG; PAM sequence: GGG
atctacaagctaaggagaga

SEQ ID NO: 152911 - DNA, 20 bp, Artificial Sequence
  Description of Artificial Sequence: Synthetic oligonucleotide
  Target: LAMA2; (+) strand; PAM type: NRG; PAM sequence: CAG
ctaaggagagagggctgcaa

SEQ ID NO: 152912 - DNA, 20 bp, Artificial Sequence
  Description of Artificial Sequence: Synthetic oligonucleotide
  Target: LAMA2; (+) strand; PAM type: NRG; PAM sequence: TAG
tgcaacagcttaattccttg

SEQ ID NO: 152913 - DNA, 20 bp, Artificial Sequence
  Description of Artificial Sequence: Synthetic oligonucleotide
  Target: LAMA2; (+) strand; PAM type: NRG; PAM sequence: AAG
aattccttgtagtgttcata

SEQ ID NO: 152914 - DNA, 20 bp, Artificial Sequence
  Description of Artificial Sequence: Synthetic oligonucleotide
  Target: LAMA2; (+) strand; PAM type: NRG; PAM sequence: CAG
taaagaaccaatcctgctga

SEQ ID NO: 152915 - DNA, 20 bp, Artificial Sequence
  Description of Artificial Sequence: Synthetic oligonucleotide
  Target: LAMA2; (+) strand; PAM type: NRG; PAM sequence: TAG
gctgacagcttgatctcaca

SEQ ID NO: 152916 - DNA, 20 bp, Artificial Sequence
  Description of Artificial Sequence: Synthetic oligonucleotide
  Target: LAMA2; (+) strand; PAM type: NRG; PAM sequence: GAG
ttttcctccttgatttccat

SEQ ID NO: 152917 - DNA, 20 bp, Artificial Sequence
  Description of Artificial Sequence: Synthetic oligonucleotide
  Target: LAMA2; (+) strand; PAM type: NRG; PAM sequence: TGG
tccttgatttccatgagaat

SEQ ID NO: 152918 - DNA, 20 bp, Artificial Sequence
  Description of Artificial Sequence: Synthetic oligonucleotide
  Target: LAMA2; (+) strand; PAM type: NRG; PAM sequence: GGG
ccttgatttccatgagaatt

SEQ ID NO: 152919 - DNA, 20 bp, Artificial Sequence
  Description of Artificial Sequence: Synthetic oligonucleotide
  Target: LAMA2; (+) strand; PAM type: NRG; PAM sequence: AAG
tttccatgagaattgggtga

SEQ ID NO: 152920 - DNA, 20 bp, Artificial Sequence
  Description of Artificial Sequence: Synthetic oligonucleotide
  Target: LAMA2; (+) strand; PAM type: NRG; PAM sequence: AAG
gtgaaagctattactcatat

SEQ ID NO: 152921 - DNA, 20 bp, Artificial Sequence
  Description of Artificial Sequence: Synthetic oligonucleotide
  Target: LAMA2; (+) strand; PAM type: NRG; PAM sequence: CGG
aaagctattactcatataag

SEQ ID NO: 152922 - DNA, 20 bp, Artificial Sequence
  Description of Artificial Sequence: Synthetic oligonucleotide
  Target: LAMA2; (+) strand; PAM type: NRG; PAM sequence: TGG
acctgattctctcatttttg

SEQ ID NO: 152923 - DNA, 20 bp, Artificial Sequence
  Description of Artificial Sequence: Synthetic oligonucleotide
  Target: LAMA2; (+) strand; PAM type: NRG; PAM sequence: TAG
tttttgtggttacctttgat

SEQ ID NO: 152924 - DNA, 20 bp, Artificial Sequence
  Description of Artificial Sequence: Synthetic oligonucleotide
  Target: LAMA2; (+) strand; PAM type: NRG; PAM sequence: TGG
gttacctttgattagtgttt

SEQ ID NO: 152925 - DNA, 20 bp, Artificial Sequence
  Description of Artificial Sequence: Synthetic oligonucleotide
  Target: LAMA2; (+) strand; PAM type: NRG; PAM sequence: CAG
tttggtctttatgcgtttca

SEQ ID NO: 152926 - DNA, 20 bp, Artificial Sequence
  Description of Artificial Sequence: Synthetic oligonucleotide
  Target: LAMA2; (+) strand; PAM type: NRG; PAM sequence: TGG
cacagacctgattcaaatgc

SEQ ID NO: 152927 - DNA, 20 bp, Artificial Sequence
  Description of Artificial Sequence: Synthetic oligonucleotide
  Target: LAMA2; (+) strand; PAM type: NRG; PAM sequence: TAG
atgctggatctctgctttat

SEQ ID NO: 152928 - DNA, 20 bp, Artificial Sequence
  Description of Artificial Sequence: Synthetic oligonucleotide
  Target: LAMA2; (+) strand; PAM type: NRG; PAM sequence: TGG
ctttattagctttgtgatct

SEQ ID NO: 152929 - DNA, 20 bp, Artificial Sequence
  Description of Artificial Sequence: Synthetic oligonucleotide
  Target: LAMA2; (+) strand; PAM type: NRG; PAM sequence: TAG
cttggacatatcccttaatc

SEQ ID NO: 152930 - DNA, 20 bp, Artificial Sequence
  Description of Artificial Sequence: Synthetic oligonucleotide
  Target: LAMA2; (+) strand; PAM type: NRG; PAM sequence: GAG
acatatcccttaatctagtt

SEQ ID NO: 152931 - DNA, 20 bp, Artificial Sequence
  Description of Artificial Sequence: Synthetic oligonucleotide
  Target: LAMA2; (+) strand; PAM type: NRG; PAM sequence: CAG
atcccttaatctagttgagc

SEQ ID NO: 152932 - DNA, 20 bp, Artificial Sequence
  Description of Artificial Sequence: Synthetic oligonucleotide
  Target: LAMA2; (+) strand; PAM type: NRG; PAM sequence: GAG
attctcattatctgcaaaat

SEQ ID NO: 152933 - DNA, 20 bp, Artificial Sequence
  Description of Artificial Sequence: Synthetic oligonucleotide
  Target: LAMA2; (+) strand; PAM type: NRG; PAM sequence: AGG
ttctcattatctgcaaaatg

SEQ ID NO: 152934 - DNA, 20 bp, Artificial Sequence
  Description of Artificial Sequence: Synthetic oligonucleotide
  Target: LAMA2; (+) strand; PAM type: NRG; PAM sequence: TAG
tatctgcaaaatgaggcttc

SEQ ID NO: 152935 - DNA, 20 bp, Artificial Sequence
  Description of Artificial Sequence: Synthetic oligonucleotide
  Target: LAMA2; (+) strand; PAM type: NRG; PAM sequence: CAG
atgaggcttctagcacccct

SEQ ID NO: 152936 - DNA, 20 bp, Artificial Sequence
  Description of Artificial Sequence: Synthetic oligonucleotide
  Target: LAMA2; (+) strand; PAM type: NRG; PAM sequence: AAG
gcacccctcagaattgtaca

SEQ ID NO: 152937 - DNA, 20 bp, Artificial Sequence
  Description of Artificial Sequence: Synthetic oligonucleotide
  Target: LAMA2; (+) strand; PAM type: NRG; PAM sequence: TAG
aaagctctcgaaaatgtcct

SEQ ID NO: 152938 - DNA, 20 bp, Artificial Sequence
  Description of Artificial Sequence: Synthetic oligonucleotide
  Target: LAMA2; (+) strand; PAM type: NRG; PAM sequence: CAG
tcgaaaatgtccttagcaca

SEQ ID NO: 152939 - DNA, 20 bp, Artificial Sequence
  Description of Artificial Sequence: Synthetic oligonucleotide
  Target: LAMA2; (+) strand; PAM type: NRG; PAM sequence: AAG
aaaatgtccttagcacacag

SEQ ID NO: 152940 - DNA, 20 bp, Artificial Sequence
  Description of Artificial Sequence: Synthetic oligonucleotide
  Target: LAMA2; (+) strand; PAM type: NRG; PAM sequence: TAG
aattgctttatgaatttctg

SEQ ID NO: 152941 - DNA, 20 bp, Artificial Sequence
  Description of Artificial Sequence: Synthetic oligonucleotide
  Target: LAMA2; (+) strand; PAM type: NRG; PAM sequence: CAG
atttctgtagttgtatgctg

SEQ ID NO: 152942 - DNA, 20 bp, Artificial Sequence
  Description of Artificial Sequence: Synthetic oligonucleotide
  Target: LAMA2; (+) strand; PAM type: NRG; PAM sequence: TGG
tatgctgcagtaatttattt

SEQ ID NO: 152943 - DNA, 20 bp, Artificial Sequence
  Description of Artificial Sequence: Synthetic oligonucleotide
  Target: LAMA2; (+) strand; PAM type: NRG; PAM sequence: GAG
tgctgcagtaatttattttg

SEQ ID NO: 152944 - DNA, 20 bp, Artificial Sequence
  Description of Artificial Sequence: Synthetic oligonucleotide
  Target: LAMA2; (+) strand; PAM type: NRG; PAM sequence: CAG
tttggagatcttccttatat

SEQ ID NO: 152945 - DNA, 20 bp, Artificial Sequence
  Description of Artificial Sequence: Synthetic oligonucleotide
  Target: LAMA2; (+) strand; PAM type: NRG; PAM sequence: AAG
gatcttccttatatcagtaa

SEQ ID NO: 152946 - DNA, 20 bp, Artificial Sequence
  Description of Artificial Sequence: Synthetic oligonucleotide
  Target: LAMA2; (+) strand; PAM type: NRG; PAM sequence: TAG
actttgtcacctgtctgaca

SEQ ID NO: 152947 - DNA, 20 bp, Artificial Sequence
  Description of Artificial Sequence: Synthetic oligonucleotide
  Target: LAMA2; (+) strand; PAM type: NRG; PAM sequence: TGG
cacctgtctgacatagtatc

SEQ ID NO: 152948 - DNA, 20 bp, Artificial Sequence
  Description of Artificial Sequence: Synthetic oligonucleotide
  Target: LAMA2; (+) strand; PAM type: NRG; PAM sequence: TGG
ctgtctgacatagtatctgg

SEQ ID NO: 152949 - DNA, 20 bp, Artificial Sequence
  Description of Artificial Sequence: Synthetic oligonucleotide
  Target: LAMA2; (+) strand; PAM type: NRG; PAM sequence: TAG
tctgacatagtatctggtgg

SEQ ID NO: 152950 - DNA, 20 bp, Artificial Sequence
  Description of Artificial Sequence: Synthetic oligonucleotide
  Target: LAMA2; (+) strand; PAM type: NRG; PAM sequence: AAG
acatagtatctggtggtagt

SEQ ID NO: 152951 - DNA, 20 bp, Artificial Sequence
  Description of Artificial Sequence: Synthetic oligonucleotide
  Target: LAMA2; (+) strand; PAM type: NRG; PAM sequence: AGG
catagtatctggtggtagta

SEQ ID NO: 152952 - DNA, 20 bp, Artificial Sequence
  Description of Artificial Sequence: Synthetic oligonucleotide
  Target: LAMA2; (+) strand; PAM type: NRG; PAM sequence: AAG
tatctggtggtagtaaggat

SEQ ID NO: 152953 - DNA, 20 bp, Artificial Sequence
  Description of Artificial Sequence: Synthetic oligonucleotide
  Target: LAMA2; (+) strand; PAM type: NRG; PAM sequence: CAG
taaaaataaaaattgacaat

SEQ ID NO: 152954 - DNA, 20 bp, Artificial Sequence
  Description of Artificial Sequence: Synthetic oligonucleotide
  Target: LAMA2; (+) strand; PAM type: NRG; PAM sequence: GAG
aaaataaaaattgacaatca

SEQ ID NO: 152955 - DNA, 20 bp, Artificial Sequence
  Description of Artificial Sequence: Synthetic oligonucleotide
  Target: LAMA2; (+) strand; PAM type: NRG; PAM sequence: GAG
aataaaaattgacaatcaga

SEQ ID NO: 152956 - DNA, 20 bp, Artificial Sequence
  Description of Artificial Sequence: Synthetic oligonucleotide
  Target: LAMA2; (+) strand; PAM type: NRG; PAM sequence: GAG
taaaaattgacaatcagaga

SEQ ID NO: 152957 - DNA, 20 bp, Artificial Sequence
  Description of Artificial Sequence: Synthetic oligonucleotide
  Target: LAMA2; (+) strand; PAM type: NRG; PAM sequence: TAG
caatcagagagagttaattt

SEQ ID NO: 152958 - DNA, 20 bp, Artificial Sequence
  Description of Artificial Sequence: Synthetic oligonucleotide
  Target: LAMA2; (+) strand; PAM type: NRG; PAM sequence: AAG
cagagagagttaattttagc

SEQ ID NO: 152959 - DNA, 20 bp, Artificial Sequence
  Description of Artificial Sequence: Synthetic oligonucleotide
  Target: LAMA2; (+) strand; PAM type: NRG; PAM sequence: TAG
agttaattttagcaagtacg

SEQ ID NO: 152960 - DNA, 20 bp, Artificial Sequence
  Description of Artificial Sequence: Synthetic oligonucleotide
  Target: LAMA2; (+) strand; PAM type: NRG; PAM sequence: TGG
cgtagattatatgcctttaa

SEQ ID NO: 152961 - DNA, 20 bp, Artificial Sequence
  Description of Artificial Sequence: Synthetic oligonucleotide
  Target: LAMA2; (+) strand; PAM type: NRG; PAM sequence: CAG
agattatatgcctttaatgg

SEQ ID NO: 152962 - DNA, 20 bp, Artificial Sequence
  Description of Artificial Sequence: Synthetic oligonucleotide
  Target: LAMA2; (+) strand; PAM type: NRG; PAM sequence: CAG
tgcctttaatggcagctttg

SEQ ID NO: 152963 - DNA, 20 bp, Artificial Sequence
  Description of Artificial Sequence: Synthetic oligonucleotide
  Target: LAMA2; (+) strand; PAM type: NRG; PAM sequence: AAG
ttaatggcagctttgcagca

SEQ ID NO: 152964 - DNA, 20 bp, Artificial Sequence
  Description of Artificial Sequence: Synthetic oligonucleotide
  Target: LAMA2; (+) strand; PAM type: NRG; PAM sequence: CAG
agtgcaaaacataaataaat

SEQ ID NO: 152965 - DNA, 20 bp, Artificial Sequence
  Description of Artificial Sequence: Synthetic oligonucleotide
  Target: LAMA2; (+) strand; PAM type: NRG; PAM sequence: CAG
acataaataaatcagttaac

SEQ ID NO: 152966 - DNA, 20 bp, Artificial Sequence
  Description of Artificial Sequence: Synthetic oligonucleotide
  Target: LAMA2; (+) strand; PAM type: NRG; PAM sequence: CAG
ccagatttgtgaaatacccg

SEQ ID NO: 152967 - DNA, 20 bp, Artificial Sequence
  Description of Artificial Sequence: Synthetic oligonucleotide
  Target: LAMA2; (+) strand; PAM type: NRG; PAM sequence: GAG
agatttgtgaaatacccgca

SEQ ID NO: 152968 - DNA, 20 bp, Artificial Sequence
  Description of Artificial Sequence: Synthetic oligonucleotide
  Target: LAMA2; (+) strand; PAM type: NRG; PAM sequence: TAG
gaaatacccgcagagtgttt

SEQ ID NO: 152969 - DNA, 20 bp, Artificial Sequence
  Description of Artificial Sequence: Synthetic oligonucleotide
  Target: LAMA2; (+) strand; PAM type: NRG; PAM sequence: AAG
gtgttttagactttattttg

SEQ ID NO: 152970 - DNA, 20 bp, Artificial Sequence
  Description of Artificial Sequence: Synthetic oligonucleotide
  Target: LAMA2; (+) strand; PAM type: NRG; PAM sequence: AGG
tgttttagactttattttga

SEQ ID NO: 152971 - DNA, 20 bp, Artificial Sequence
  Description of Artificial Sequence: Synthetic oligonucleotide
  Target: LAMA2; (+) strand; PAM type: NRG; PAM sequence: TAG
ttattttgaaggtgccaaat

SEQ ID NO: 152972 - DNA, 20 bp, Artificial Sequence
  Description of Artificial Sequence: Synthetic oligonucleotide
  Target: LAMA2; (+) strand; PAM type: NRG; PAM sequence: GAG
attttgaaggtgccaaatta

SEQ ID NO: 152973 - DNA, 20 bp, Artificial Sequence
  Description of Artificial Sequence: Synthetic oligonucleotide
  Target: LAMA2; (+) strand; PAM type: NRG; PAM sequence: AAG
gcatcgcttcatgtcttccc

SEQ ID NO: 152974 - DNA, 20 bp, Artificial Sequence
  Description of Artificial Sequence: Synthetic oligonucleotide
  Target: LAMA2; (+) strand; PAM type: NRG; PAM sequence: TGG
tctctgcttcactgacaacc

SEQ ID NO: 152975 - DNA, 20 bp, Artificial Sequence
  Description of Artificial Sequence: Synthetic oligonucleotide
  Target: LAMA2; (+) strand; PAM type: NRG; PAM sequence: CAG
ctgcttcactgacaacctgg

SEQ ID NO: 152976 - DNA, 20 bp, Artificial Sequence
  Description of Artificial Sequence: Synthetic oligonucleotide
  Target: LAMA2; (+) strand; PAM type: NRG; PAM sequence: AAG
cactgacaacctggcagtga

SEQ ID NO: 152977 - DNA, 20 bp, Artificial Sequence
  Description of Artificial Sequence: Synthetic oligonucleotide
  Target: LAMA2; (+) strand; PAM type: NRG; PAM sequence: AGG
actgacaacctggcagtgaa

SEQ ID NO: 152978 - DNA, 20 bp, Artificial Sequence
  Description of Artificial Sequence: Synthetic oligonucleotide
  Target: LAMA2; (+) strand; PAM type: NRG; PAM sequence: GGG
ctgacaacctggcagtgaaa

SEQ ID NO: 152979 - DNA, 20 bp, Artificial Sequence
  Description of Artificial Sequence: Synthetic oligonucleotide
  Target: LAMA2; (+) strand; PAM type: NRG; PAM sequence: GAG
cctggcagtgaaagggattt

SEQ ID NO: 152980 - DNA, 20 bp, Artificial Sequence
  Description of Artificial Sequence: Synthetic oligonucleotide
  Target: LAMA2; (+) strand; PAM type: NRG; PAM sequence: AGG
ctggcagtgaaagggatttg

SEQ ID NO: 152981 - DNA, 20 bp, Artificial Sequence
  Description of Artificial Sequence: Synthetic oligonucleotide
  Target: LAMA2; (+) strand; PAM type: NRG; PAM sequence: CAG
gatttgaggtttgtgcccat

SEQ ID NO: 152982 - DNA, 20 bp, Artificial Sequence
  Description of Artificial Sequence: Synthetic oligonucleotide
  Target: LAMA2; (+) strand; PAM type: NRG; PAM sequence: TAG
tgtgcccatcagtaactaat

SEQ ID NO: 152983 - DNA, 20 bp, Artificial Sequence
  Description of Artificial Sequence: Synthetic oligonucleotide
  Target: LAMA2; (+) strand; PAM type: NRG; PAM sequence: GAG
tgcccatcagtaactaatta

SEQ ID NO: 152984 - DNA, 20 bp, Artificial Sequence
  Description of Artificial Sequence: Synthetic oligonucleotide
  Target: LAMA2; (+) strand; PAM type: NRG; PAM sequence: AAG
ccatcagtaactaattagag

SEQ ID NO: 152985 - DNA, 20 bp, Artificial Sequence
  Description of Artificial Sequence: Synthetic oligonucleotide
  Target: LAMA2; (+) strand; PAM type: NRG; PAM sequence: TAG
agagaagtaaatgttataac

SEQ ID NO: 152986 - DNA, 20 bp, Artificial Sequence
  Description of Artificial Sequence: Synthetic oligonucleotide
  Target: LAMA2; (+) strand; PAM type: NRG; PAM sequence: CAG
aagtaaatgttataactagt

SEQ ID NO: 152987 - DNA, 20 bp, Artificial Sequence
  Description of Artificial Sequence: Synthetic oligonucleotide
  Target: LAMA2; (+) strand; PAM type: NRG; PAM sequence: TGG
tataactagtcagtattctg

SEQ ID NO: 152988 - DNA, 20 bp, Artificial Sequence
  Description of Artificial Sequence: Synthetic oligonucleotide
  Target: LAMA2; (+) strand; PAM type: NRG; PAM sequence: TGG
agtattctgtggctacaatg

SEQ ID NO: 152989 - DNA, 20 bp, Artificial Sequence
  Description of Artificial Sequence: Synthetic oligonucleotide
  Target: LAMA2; (+) strand; PAM type: NRG; PAM sequence: AAG
ttctgtggctacaatgtggc

SEQ ID NO: 152990 - DNA, 20 bp, Artificial Sequence
  Description of Artificial Sequence: Synthetic oligonucleotide
  Target: LAMA2; (+) strand; PAM type: NRG; PAM sequence: AAG
caagttaaaataatatcctt

SEQ ID NO: 152991 - DNA, 20 bp, Artificial Sequence
  Description of Artificial Sequence: Synthetic oligonucleotide
  Target: LAMA2; (+) strand; PAM type: NRG; PAM sequence: AGG
aagttaaaataatatcctta

SEQ ID NO: 152992 - DNA, 20 bp, Artificial Sequence
  Description of Artificial Sequence: Synthetic oligonucleotide
  Target: LAMA2; (+) strand; PAM type: NRG; PAM sequence: TGG
ttaaaataatatccttaagg

SEQ ID NO: 152993 - DNA, 20 bp, Artificial Sequence
  Description of Artificial Sequence: Synthetic oligonucleotide
  Target: LAMA2; (+) strand; PAM type: NRG; PAM sequence: GGG
taaaataatatccttaaggt

SEQ ID NO: 152994 - DNA, 20 bp, Artificial Sequence
  Description of Artificial Sequence: Synthetic oligonucleotide
  Target: LAMA2; (+) strand; PAM type: NRG; PAM sequence: TGG
gggcgctaacgcaatatgac

SEQ ID NO: 152995 - DNA, 20 bp, Artificial Sequence
  Description of Artificial Sequence: Synthetic oligonucleotide
  Target: LAMA2; (+) strand; PAM type: NRG; PAM sequence: AAG
tccttatgaaaaaaaaaaaa

SEQ ID NO: 152996 - DNA, 20 bp, Artificial Sequence
  Description of Artificial Sequence: Synthetic oligonucleotide
  Target: LAMA2; (+) strand; PAM type: NRG; PAM sequence: AGG
ccttatgaaaaaaaaaaaaa

SEQ ID NO: 152997 - DNA, 20 bp, Artificial Sequence
  Description of Artificial Sequence: Synthetic oligonucleotide
  Target: LAMA2; (+) strand; PAM type: NRG; PAM sequence: TGG
aaaaaaaaaaaaggacaatt

SEQ ID NO: 152998 - DNA, 20 bp, Artificial Sequence
  Description of Artificial Sequence: Synthetic oligonucleotide
  Target: LAMA2; (+) strand; PAM type: NRG; PAM sequence: GAG
aaaaaaaaaaggacaatttg

SEQ ID NO: 152999 - DNA, 20 bp, Artificial Sequence
  Description of Artificial Sequence: Synthetic oligonucleotide
  Target: LAMA2; (+) strand; PAM type: NRG; PAM sequence: CAG
tttggagataaacacaccga

SEQ ID NO: 153000 - DNA, 20 bp, Artificial Sequence
  Description of Artificial Sequence: Synthetic oligonucleotide
  Target: LAMA2; (+) strand; PAM type: NRG; PAM sequence: AGG
ttggagataaacacaccgac

SEQ ID NO: 153001 - DNA, 20 bp, Artificial Sequence
  Description of Artificial Sequence: Synthetic oligonucleotide
  Target: LAMA2; (+) strand; PAM type: NRG; PAM sequence: GGG
tggagataaacacaccgaca

SEQ ID NO: 153002 - DNA, 20 bp, Artificial Sequence
  Description of Artificial Sequence: Synthetic oligonucleotide
  Target: LAMA2; (+) strand; PAM type: NRG; PAM sequence: TGG
acaccatgtgaacatgatga

SEQ ID NO: 153003 - DNA, 20 bp, Artificial Sequence
  Description of Artificial Sequence: Synthetic oligonucleotide
  Target: LAMA2; (+) strand; PAM type: NRG; PAM sequence: AAG
acatgatgatggccattcac

SEQ ID NO: 153004 - DNA, 20 bp, Artificial Sequence
  Description of Artificial Sequence: Synthetic oligonucleotide
  Target: LAMA2; (+) strand; PAM type: NRG; PAM sequence: AAG
atgatggccattcacaagca

SEQ ID NO: 153005 - DNA, 20 bp, Artificial Sequence
  Description of Artificial Sequence: Synthetic oligonucleotide
  Target: LAMA2; (+) strand; PAM type: NRG; PAM sequence: AGG
tgatggccattcacaagcaa

SEQ ID NO: 153006 - DNA, 20 bp, Artificial Sequence
  Description of Artificial Sequence: Synthetic oligonucleotide
  Target: LAMA2; (+) strand; PAM type: NRG; PAM sequence: GAG
atggccattcacaagcaaag

SEQ ID NO: 153007 - DNA, 20 bp, Artificial Sequence
  Description of Artificial Sequence: Synthetic oligonucleotide
  Target: LAMA2; (+) strand; PAM type: NRG; PAM sequence: GAG
ggccattcacaagcaaagga

SEQ ID NO: 153008 - DNA, 20 bp, Artificial Sequence
  Description of Artificial Sequence: Synthetic oligonucleotide
  Target: LAMA2; (+) strand; PAM type: NRG; PAM sequence: GAG
ccattcacaagcaaaggaga

SEQ ID NO: 153009 - DNA, 20 bp, Artificial Sequence
  Description of Artificial Sequence: Synthetic oligonucleotide
  Target: LAMA2; (+) strand; PAM type: NRG; PAM sequence: AGG
cattcacaagcaaaggagag

SEQ ID NO: 153010 - DNA, 20 bp, Artificial Sequence
  Description of Artificial Sequence: Synthetic oligonucleotide
  Target: LAMA2; (+) strand; PAM type: NRG; PAM sequence: TGG
acaagcaaaggagagaggcc

SEQ ID NO: 153011 - DNA, 20 bp, Artificial Sequence
  Description of Artificial Sequence: Synthetic oligonucleotide
  Target: LAMA2; (+) strand; PAM type: NRG; PAM sequence: CAG
caaaggagagaggcctggaa

SEQ ID NO: 153012 - DNA, 20 bp, Artificial Sequence
  Description of Artificial Sequence: Synthetic oligonucleotide
  Target: LAMA2; (+) strand; PAM type: NRG; PAM sequence: TAG
ggcctggaacagattcctct

SEQ ID NO: 153013 - DNA, 20 bp, Artificial Sequence
  Description of Artificial Sequence: Synthetic oligonucleotide
  Target: LAMA2; (+) strand; PAM type: NRG; PAM sequence: AAG
cagattcctcttagccctca

SEQ ID NO: 153014 - DNA, 20 bp, Artificial Sequence
  Description of Artificial Sequence: Synthetic oligonucleotide
  Target: LAMA2; (+) strand; PAM type: NRG; PAM sequence: AGG
agattcctcttagccctcaa

SEQ ID NO: 153015 - DNA, 20 bp, Artificial Sequence
  Description of Artificial Sequence: Synthetic oligonucleotide
  Target: LAMA2; (+) strand; PAM type: NRG; PAM sequence: GGG
gattcctcttagccctcaaa

SEQ ID NO: 153016 - DNA, 20 bp, Artificial Sequence
  Description of Artificial Sequence: Synthetic oligonucleotide
  Target: LAMA2; (+) strand; PAM type: NRG; PAM sequence: CAG
ccctgccgataccttgattt

SEQ ID NO: 153017 - DNA, 20 bp, Artificial Sequence
  Description of Artificial Sequence: Synthetic oligonucleotide
  Target: LAMA2; (+) strand; PAM type: NRG; PAM sequence: TAG
ataccttgatttcagacttg

SEQ ID NO: 153018 - DNA, 20 bp, Artificial Sequence
  Description of Artificial Sequence: Synthetic oligonucleotide
  Target: LAMA2; (+) strand; PAM type: NRG; PAM sequence: TAG
gatttcagacttgtagcctc

SEQ ID NO: 153019 - DNA, 20 bp, Artificial Sequence
  Description of Artificial Sequence: Synthetic oligonucleotide
  Target: LAMA2; (+) strand; PAM type: NRG; PAM sequence: AAG
acaatacatttctgttgtat

SEQ ID NO: 153020 - DNA, 20 bp, Artificial Sequence
  Description of Artificial Sequence: Synthetic oligonucleotide
  Target: LAMA2; (+) strand; PAM type: NRG; PAM sequence: CAG
tttctgttgtataagccacc

SEQ ID NO: 153021 - DNA, 20 bp, Artificial Sequence
  Description of Artificial Sequence: Synthetic oligonucleotide
  Target: LAMA2; (+) strand; PAM type: NRG; PAM sequence: TGG
tgtataagccacccagtcta

SEQ ID NO: 153022 - DNA, 20 bp, Artificial Sequence
  Description of Artificial Sequence: Synthetic oligonucleotide
  Target: LAMA2; (+) strand; PAM type: NRG; PAM sequence: TGG
cagtctatggtattttatta

SEQ ID NO: 153023 - DNA, 20 bp, Artificial Sequence
  Description of Artificial Sequence: Synthetic oligonucleotide
  Target: LAMA2; (+) strand; PAM type: NRG; PAM sequence: CAG
tctatggtattttattatgg

SEQ ID NO: 153024 - DNA, 20 bp, Artificial Sequence
  Description of Artificial Sequence: Synthetic oligonucleotide
  Target: LAMA2; (+) strand; PAM type: NRG; PAM sequence: TAG
gtattttattatggcagccc

SEQ ID NO: 153025 - DNA, 20 bp, Artificial Sequence
  Description of Artificial Sequence: Synthetic oligonucleotide
  Target: LAMA2; (+) strand; PAM type: NRG; PAM sequence: AAG
tatatatataaaacaaataa

SEQ ID NO: 153026 - DNA, 20 bp, Artificial Sequence
  Description of Artificial Sequence: Synthetic oligonucleotide
  Target: LAMA2; (+) strand; PAM type: NRG; PAM sequence: AGG
atatatataaaacaaataaa

SEQ ID NO: 153027 - DNA, 20 bp, Artificial Sequence
  Description of Artificial Sequence: Synthetic oligonucleotide
  Target: LAMA2; (+) strand; PAM type: NRG; PAM sequence: AAG
gtgactctctctaatgtata

SEQ ID NO: 153028 - DNA, 20 bp, Artificial Sequence
  Description of Artificial Sequence: Synthetic oligonucleotide
  Target: LAMA2; (+) strand; PAM type: NRG; PAM sequence: AAG
actctctctaatgtataaag

SEQ ID NO: 153029 - DNA, 20 bp, Artificial Sequence
  Description of Artificial Sequence: Synthetic oligonucleotide
  Target: LAMA2; (+) strand; PAM type: NRG; PAM sequence: AAG
tctaatgtataaagaagtta

SEQ ID NO: 153030 - DNA, 20 bp, Artificial Sequence
  Description of Artificial Sequence: Synthetic oligonucleotide
  Target: LAMA2; (+) strand; PAM type: NRG; PAM sequence: CAG
gaagttaaagaaattgataa

SEQ ID NO: 153031 - DNA, 20 bp, Artificial Sequence
  Description of Artificial Sequence: Synthetic oligonucleotide
  Target: LAMA2; (+) strand; PAM type: NRG; PAM sequence: AAG
ttaaagaaattgataacaga

SEQ ID NO: 153032 - DNA, 20 bp, Artificial Sequence
  Description of Artificial Sequence: Synthetic oligonucleotide
  Target: LAMA2; (+) strand; PAM type: NRG; PAM sequence: AGG
taaagaaattgataacagaa

SEQ ID NO: 153033 - DNA, 20 bp, Artificial Sequence
  Description of Artificial Sequence: Synthetic oligonucleotide
  Target: LAMA2; (+) strand; PAM type: NRG; PAM sequence: CAG
gaaattgataacagaaaggc

SEQ ID NO: 153034 - DNA, 20 bp, Artificial Sequence
  Description of Artificial Sequence: Synthetic oligonucleotide
  Target: LAMA2; (+) strand; PAM type: NRG; PAM sequence: CAG
attgataacagaaaggccag

SEQ ID NO: 153035 - DNA, 20 bp, Artificial Sequence
  Description of Artificial Sequence: Synthetic oligonucleotide
  Target: LAMA2; (+) strand; PAM type: NRG; PAM sequence: CAG
cagaaaggccagcagtccaa

SEQ ID NO: 153036 - DNA, 20 bp, Artificial Sequence
  Description of Artificial Sequence: Synthetic oligonucleotide
  Target: LAMA2; (+) strand; PAM type: NRG; PAM sequence: GAG
gcagtccaacagaaatgaat

SEQ ID NO: 153037 - DNA, 20 bp, Artificial Sequence
  Description of Artificial Sequence: Synthetic oligonucleotide
  Target: LAMA2; (+) strand; PAM type: NRG; PAM sequence: CAG
gtccaacagaaatgaatgag

SEQ ID NO: 153038 - DNA, 20 bp, Artificial Sequence
  Description of Artificial Sequence: Synthetic oligonucleotide
  Target: LAMA2; (+) strand; PAM type: NRG; PAM sequence: TAG
agaaatgaatgagcagttta

SEQ ID NO: 153039 - DNA, 20 bp, Artificial Sequence
  Description of Artificial Sequence: Synthetic oligonucleotide
  Target: LAMA2; (+) strand; PAM type: NRG; PAM sequence: GAG
aaatgaatgagcagtttata

SEQ ID NO: 153040 - DNA, 20 bp, Artificial Sequence
  Description of Artificial Sequence: Synthetic oligonucleotide
  Target: LAMA2; (+) strand; PAM type: NRG; PAM sequence: AAG
tgaatgagcagtttatagag

SEQ ID NO: 153041 - DNA, 20 bp, Artificial Sequence
  Description of Artificial Sequence: Synthetic oligonucleotide
  Target: LAMA2; (+) strand; PAM type: NRG; PAM sequence: AGG
gaatgagcagtttatagaga

SEQ ID NO: 153042 - DNA, 20 bp, Artificial Sequence
  Description of Artificial Sequence: Synthetic oligonucleotide
  Target: LAMA2; (+) strand; PAM type: NRG; PAM sequence: TGG
tatagagaaggaaatttaaa

SEQ ID NO: 153043 - DNA, 20 bp, Artificial Sequence
  Description of Artificial Sequence: Synthetic oligonucleotide
  Target: LAMA2; (+) strand; PAM type: NRG; PAM sequence: CGG
tggctcttaaatgtatgaaa

SEQ ID NO: 153044 - DNA, 20 bp, Artificial Sequence
  Description of Artificial Sequence: Synthetic oligonucleotide
  Target: LAMA2; (+) strand; PAM type: NRG; PAM sequence: TAG
acggtactcaacccgactca

SEQ ID NO: 153045 - DNA, 20 bp, Artificial Sequence
  Description of Artificial Sequence: Synthetic oligonucleotide
  Target: LAMA2; (+) strand; PAM type: NRG; PAM sequence: GAG
catagtatgctaactacact

SEQ ID NO: 153046 - DNA, 20 bp, Artificial Sequence
  Description of Artificial Sequence: Synthetic oligonucleotide
  Target: LAMA2; (+) strand; PAM type: NRG; PAM sequence: TAG
aatcattgtcttctaacata

SEQ ID NO: 153047 - DNA, 20 bp, Artificial Sequence
  Description of Artificial Sequence: Synthetic oligonucleotide
  Target: LAMA2; (+) strand; PAM type: NRG; PAM sequence: AGG
atcattgtcttctaacatat

SEQ ID NO: 153048 - DNA, 20 bp, Artificial Sequence
  Description of Artificial Sequence: Synthetic oligonucleotide
  Target: LAMA2; (+) strand; PAM type: NRG; PAM sequence: AAG
ttgtcttctaacatatagga

SEQ ID NO: 153049 - DNA, 20 bp, Artificial Sequence
  Description of Artificial Sequence: Synthetic oligonucleotide
  Target: LAMA2; (+) strand; PAM type: NRG; PAM sequence: TGG
aataacacatgccattcctg

SEQ ID NO: 153050 - DNA, 20 bp, Artificial Sequence
  Description of Artificial Sequence: Synthetic oligonucleotide
  Target: LAMA2; (+) strand; PAM type: NRG; PAM sequence: CAG
tgccattcctgtggcttctt

SEQ ID NO: 153051 - DNA, 20 bp, Artificial Sequence
  Description of Artificial Sequence: Synthetic oligonucleotide
  Target: LAMA2; (+) strand; PAM type: NRG; PAM sequence: AGG
gccattcctgtggcttcttc

SEQ ID NO: 153052 - DNA, 20 bp, Artificial Sequence
  Description of Artificial Sequence: Synthetic oligonucleotide
  Target: LAMA2; (+) strand; PAM type: NRG; PAM sequence: AAG
ctgtggcttcttcaggaaca

SEQ ID NO: 153053 - DNA, 20 bp, Artificial Sequence
  Description of Artificial Sequence: Synthetic oligonucleotide
  Target: LAMA2; (+) strand; PAM type: NRG; PAM sequence: AGG
tgtggcttcttcaggaacaa

SEQ ID NO: 153054 - DNA, 20 bp, Artificial Sequence
  Description of Artificial Sequence: Synthetic oligonucleotide
  Target: LAMA2; (+) strand; PAM type: NRG; PAM sequence: TGG
gaacaaaggtcctcctaaat

SEQ ID NO: 153055 - DNA, 20 bp, Artificial Sequence
  Description of Artificial Sequence: Synthetic oligonucleotide
  Target: LAMA2; (+) strand; PAM type: NRG; PAM sequence: TAG
caaaggtcctcctaaattgg

SEQ ID NO: 153056 - DNA, 20 bp, Artificial Sequence
  Description of Artificial Sequence: Synthetic oligonucleotide
  Target: LAMA2; (+) strand; PAM type: NRG; PAM sequence: AAG
caatccaaaaaaaaaatcca

SEQ ID NO: 153057 - DNA, 20 bp, Artificial Sequence
  Description of Artificial Sequence: Synthetic oligonucleotide
  Target: LAMA2; (+) strand; PAM type: NRG; PAM sequence: TAG
aaaaaaaaaatccaaagtta

SEQ ID NO: 153058 - DNA, 20 bp, Artificial Sequence
  Description of Artificial Sequence: Synthetic oligonucleotide
  Target: LAMA2; (+) strand; PAM type: NRG; PAM sequence: TGG
aaaaaatccaaagttatagc

SEQ ID NO: 153059 - DNA, 20 bp, Artificial Sequence
  Description of Artificial Sequence: Synthetic oligonucleotide
  Target: LAMA2; (+) strand; PAM type: NRG; PAM sequence: GGG
aaaaatccaaagttatagct

SEQ ID NO: 153060 - DNA, 20 bp, Artificial Sequence
  Description of Artificial Sequence: Synthetic oligonucleotide
  Target: LAMA2; (+) strand; PAM type: NRG; PAM sequence: CAG
aatccaaagttatagctggg

SEQ ID NO: 153061 - DNA, 20 bp, Artificial Sequence
  Description of Artificial Sequence: Synthetic oligonucleotide
  Target: LAMA2; (+) strand; PAM type: NRG; PAM sequence: AGG
atccaaagttatagctgggc

SEQ ID NO: 153062 - DNA, 20 bp, Artificial Sequence
  Description of Artificial Sequence: Synthetic oligonucleotide
  Target: LAMA2; (+) strand; PAM type: NRG; PAM sequence: GGG
tccaaagttatagctgggca

SEQ ID NO: 153063 - DNA, 20 bp, Artificial Sequence
  Description of Artificial Sequence: Synthetic oligonucleotide
  Target: LAMA2; (+) strand; PAM type: NRG; PAM sequence: TGG
aaagttatagctgggcaggg

SEQ ID NO: 153064 - DNA, 20 bp, Artificial Sequence
  Description of Artificial Sequence: Synthetic oligonucleotide
  Target: LAMA2; (+) strand; PAM type: NRG; PAM sequence: CAG
gtggctcatgcctgtaatcc

SEQ ID NO: 153065 - DNA, 20 bp, Artificial Sequence
  Description of Artificial Sequence: Synthetic oligonucleotide
  Target: LAMA2; (+) strand; PAM type: NRG; PAM sequence: TGG
tgcctgtaatcccagcactt

SEQ ID NO: 153066 - DNA, 20 bp, Artificial Sequence
  Description of Artificial Sequence: Synthetic oligonucleotide
  Target: LAMA2; (+) strand; PAM type: NRG; PAM sequence: GGG
gcctgtaatcccagcacttt

SEQ ID NO: 153067 - DNA, 20 bp, Artificial Sequence
  Description of Artificial Sequence: Synthetic oligonucleotide
  Target: LAMA2; (+) strand; PAM type: NRG; PAM sequence: GAG
ctgtaatcccagcactttgg

SEQ ID NO: 153068 - DNA, 20 bp, Artificial Sequence
  Description of Artificial Sequence: Synthetic oligonucleotide
  Target: LAMA2; (+) strand; PAM type: NRG; PAM sequence: AGG
tgtaatcccagcactttggg

SEQ ID NO: 153069 - DNA, 20 bp, Artificial Sequence
  Description of Artificial Sequence: Synthetic oligonucleotide
  Target: LAMA2; (+) strand; PAM type: NRG; PAM sequence: GAG
tcccagcactttgggaggct

SEQ ID NO: 153070 - DNA, 20 bp, Artificial Sequence
  Description of Artificial Sequence: Synthetic oligonucleotide
  Target: LAMA2; (+) strand; PAM type: NRG; PAM sequence: AGG
cccagcactttgggaggctg

SEQ ID NO: 153071 - DNA, 20 bp, Artificial Sequence
  Description of Artificial Sequence: Synthetic oligonucleotide
  Target: LAMA2; (+) strand; PAM type: NRG; PAM sequence: CAG
agcactttgggaggctgagg

SEQ ID NO: 153072 - DNA, 20 bp, Artificial Sequence
  Description of Artificial Sequence: Synthetic oligonucleotide
  Target: LAMA2; (+) strand; PAM type: NRG; PAM sequence: TGG
ctttgggaggctgaggcaga

SEQ ID NO: 153073 - DNA, 20 bp, Artificial Sequence
  Description of Artificial Sequence: Synthetic oligonucleotide
  Target: LAMA2; (+) strand; PAM type: NRG; PAM sequence: CAG
aggcagatggatcacgacgt

SEQ ID NO: 153074 - DNA, 20 bp, Artificial Sequence
  Description of Artificial Sequence: Synthetic oligonucleotide
  Target: LAMA2; (+) strand; PAM type: NRG; PAM sequence: AGG
ggcagatggatcacgacgtc

SEQ ID NO: 153075 - DNA, 20 bp, Artificial Sequence
  Description of Artificial Sequence: Synthetic oligonucleotide
  Target: LAMA2; (+) strand; PAM type: NRG; PAM sequence: GAG
cagatggatcacgacgtcag

SEQ ID NO: 153076 - DNA, 20 bp, Artificial Sequence
  Description of Artificial Sequence: Synthetic oligonucleotide
  Target: LAMA2; (+) strand; PAM type: NRG; PAM sequence: TGG
tggatcacgacgtcaggaga

SEQ ID NO: 153077 - DNA, 20 bp, Artificial Sequence
  Description of Artificial Sequence: Synthetic oligonucleotide
  Target: LAMA2; (+) strand; PAM type: NRG; PAM sequence: GAG
gatcacgacgtcaggagatg

SEQ ID NO: 153078 - DNA, 20 bp, Artificial Sequence
  Description of Artificial Sequence: Synthetic oligonucleotide
  Target: LAMA2; (+) strand; PAM type: NRG; PAM sequence: TGG
tcaggagatggagaccatcc

SEQ ID NO: 153079 - DNA, 20 bp, Artificial Sequence
  Description of Artificial Sequence: Synthetic oligonucleotide
  Target: LAMA2; (+) strand; PAM type: NRG; PAM sequence: TGG
ggagaccatcctggttaaca

SEQ ID NO: 153080 - DNA, 20 bp, Artificial Sequence
  Description of Artificial Sequence: Synthetic oligonucleotide
  Target: LAMA2; (+) strand; PAM type: NRG; PAM sequence: TAG
ctaaaaaaaatacaaaaaat

SEQ ID NO: 153081 - DNA, 20 bp, Artificial Sequence
  Description of Artificial Sequence: Synthetic oligonucleotide
  Target: LAMA2; (+) strand; PAM type: NRG; PAM sequence: TGG
aaaaaatacaaaaaattagc

SEQ ID NO: 153082 - DNA, 20 bp, Artificial Sequence
  Description of Artificial Sequence: Synthetic oligonucleotide
  Target: LAMA2; (+) strand; PAM type: NRG; PAM sequence: TAG
tacaaaaaattagctggacc

SEQ ID NO: 153083 - DNA, 20 bp, Artificial Sequence
  Description of Artificial Sequence: Synthetic oligonucleotide
  Target: LAMA2; (+) strand; PAM type: NRG; PAM sequence: TGG
aaaaaattagctggacctag

SEQ ID NO: 153084 - DNA, 20 bp, Artificial Sequence
  Description of Artificial Sequence: Synthetic oligonucleotide
  Target: LAMA2; (+) strand; PAM type: NRG; PAM sequence: TAG
gacctagtggcacacgcctg

SEQ ID NO: 153085 - DNA, 20 bp, Artificial Sequence
  Description of Artificial Sequence: Synthetic oligonucleotide
  Target: LAMA2; (+) strand; PAM type: NRG; PAM sequence: CAG
gtggcacacgcctgtagtcc

SEQ ID NO: 153086 - DNA, 20 bp, Artificial Sequence
  Description of Artificial Sequence: Synthetic oligonucleotide
  Target: LAMA2; (+) strand; PAM type: NRG; PAM sequence: GAG
gcctgtagtcccagctactt

SEQ ID NO: 153087 - DNA, 20 bp, Artificial Sequence
  Description of Artificial Sequence: Synthetic oligonucleotide
  Target: LAMA2; (+) strand; PAM type: NRG; PAM sequence: GAG
ctgtagtcccagctacttga

SEQ ID NO: 153088 - DNA, 20 bp, Artificial Sequence
  Description of Artificial Sequence: Synthetic oligonucleotide
  Target: LAMA2; (+) strand; PAM type: NRG; PAM sequence: AGG
tgtagtcccagctacttgag

SEQ ID NO: 153089 - DNA, 20 bp, Artificial Sequence
  Description of Artificial Sequence: Synthetic oligonucleotide
  Target: LAMA2; (+) strand; PAM type: NRG; PAM sequence: GAG
tcccagctacttgagaggct

SEQ ID NO: 153090 - DNA, 20 bp, Artificial Sequence
  Description of Artificial Sequence: Synthetic oligonucleotide
  Target: LAMA2; (+) strand; PAM type: NRG; PAM sequence: AGG
cccagctacttgagaggctg

SEQ ID NO: 153091 - DNA, 20 bp, Artificial Sequence
  Description of Artificial Sequence: Synthetic oligonucleotide
  Target: LAMA2; (+) strand; PAM type: NRG; PAM sequence: CAG
agctacttgagaggctgagg

SEQ ID NO: 153092 - DNA, 20 bp, Artificial Sequence
  Description of Artificial Sequence: Synthetic oligonucleotide
  Target: LAMA2; (+) strand; PAM type: NRG; PAM sequence: AGG
gctacttgagaggctgaggc

SEQ ID NO: 153093 - DNA, 20 bp, Artificial Sequence
  Description of Artificial Sequence: Synthetic oligonucleotide
  Target: LAMA2; (+) strand; PAM type: NRG; PAM sequence: GAG
tacttgagaggctgaggcag

SEQ ID NO: 153094 - DNA, 20 bp, Artificial Sequence
  Description of Artificial Sequence: Synthetic oligonucleotide
  Target: LAMA2; (+) strand; PAM type: NRG; PAM sequence: CAG
gcaggagaatcgcttgaatc

SEQ ID NO: 153095 - DNA, 20 bp, Artificial Sequence
  Description of Artificial Sequence: Synthetic oligonucleotide
  Target: LAMA2; (+) strand; PAM type: NRG; PAM sequence: AGG
caggagaatcgcttgaatcc

SEQ ID NO: 153096 - DNA, 20 bp, Artificial Sequence
  Description of Artificial Sequence: Synthetic oligonucleotide
  Target: LAMA2; (+) strand; PAM type: NRG; PAM sequence: GAG
ggagaatcgcttgaatccag

SEQ ID NO: 153097 - DNA, 20 bp, Artificial Sequence
  Description of Artificial Sequence: Synthetic oligonucleotide
  Target: LAMA2; (+) strand; PAM type: NRG; PAM sequence: AGG
gagaatcgcttgaatccagg

SEQ ID NO: 153098 - DNA, 20 bp, Artificial Sequence
  Description of Artificial Sequence: Synthetic oligonucleotide
  Target: LAMA2; (+) strand; PAM type: NRG; PAM sequence: CAG
aatcgcttgaatccaggagg

SEQ ID NO: 153099 - DNA, 20 bp, Artificial Sequence
  Description of Artificial Sequence: Synthetic oligonucleotide
  Target: LAMA2; (+) strand; PAM type: NRG; PAM sequence: GAG
tcgcttgaatccaggaggca

SEQ ID NO: 153100 - DNA, 20 bp, Artificial Sequence
  Description of Artificial Sequence: Synthetic oligonucleotide
  Target: LAMA2; (+) strand; PAM type: NRG; PAM sequence: AGG
cgcttgaatccaggaggcag

SEQ ID NO: 153101 - DNA, 20 bp, Artificial Sequence
  Description of Artificial Sequence: Synthetic oligonucleotide
  Target: LAMA2; (+) strand; PAM type: NRG; PAM sequence: CAG
aatccaggaggcagaggttg

SEQ ID NO: 153102 - DNA, 20 bp, Artificial Sequence
  Description of Artificial Sequence: Synthetic oligonucleotide
  Target: LAMA2; (+) strand; PAM type: NRG; PAM sequence: GAG
caggaggcagaggttgcagt

SEQ ID NO: 153103 - DNA, 20 bp, Artificial Sequence
  Description of Artificial Sequence: Synthetic oligonucleotide
  Target: LAMA2; (+) strand; PAM type: NRG; PAM sequence: CAG
gaggcagaggttgcagtgag

SEQ ID NO: 153104 - DNA, 20 bp, Artificial Sequence
  Description of Artificial Sequence: Synthetic oligonucleotide
  Target: LAMA2; (+) strand; PAM type: NRG; PAM sequence: GAG
ggcagaggttgcagtgagca

SEQ ID NO: 153105 - DNA, 20 bp, Artificial Sequence
  Description of Artificial Sequence: Synthetic oligonucleotide
  Target: LAMA2; (+) strand; PAM type: NRG; PAM sequence: CAG
gagatcatgccactacactc

SEQ ID NO: 153106 - DNA, 20 bp, Artificial Sequence
  Description of Artificial Sequence: Synthetic oligonucleotide
  Target: LAMA2; (+) strand; PAM type: NRG; PAM sequence: TGG
catgccactacactccagcc

SEQ ID NO: 153107 - DNA, 20 bp, Artificial Sequence
  Description of Artificial Sequence: Synthetic oligonucleotide
  Target: LAMA2; (+) strand; PAM type: NRG; PAM sequence: GGG
atgccactacactccagcct

SEQ ID NO: 153108 - DNA, 20 bp, Artificial Sequence
  Description of Artificial Sequence: Synthetic oligonucleotide
  Target: LAMA2; (+) strand; PAM type: NRG; PAM sequence: CAG
ctacactccagcctgggtga

SEQ ID NO: 153109 - DNA, 20 bp, Artificial Sequence
  Description of Artificial Sequence: Synthetic oligonucleotide
  Target: LAMA2; (+) strand; PAM type: NRG; PAM sequence: GAG
acactccagcctgggtgaca

SEQ ID NO: 153110 - DNA, 20 bp, Artificial Sequence
  Description of Artificial Sequence: Synthetic oligonucleotide
  Target: LAMA2; (+) strand; PAM type: NRG; PAM sequence: AAG
tccagcctgggtgacagagc

SEQ ID NO: 153111 - DNA, 20 bp, Artificial Sequence
  Description of Artificial Sequence: Synthetic oligonucleotide
  Target: LAMA2; (+) strand; PAM type: NRG; PAM sequence: AGG
ccagcctgggtgacagagca

SEQ ID NO: 153112 - DNA, 20 bp, Artificial Sequence
  Description of Artificial Sequence: Synthetic oligonucleotide
  Target: LAMA2; (+) strand; PAM type: NRG; PAM sequence: GGG
cagcctgggtgacagagcaa

SEQ ID NO: 153113 - DNA, 20 bp, Artificial Sequence
  Description of Artificial Sequence: Synthetic oligonucleotide
  Target: LAMA2; (+) strand; PAM type: NRG; PAM sequence: AAG
ggattccatctcaaaaaaaa

SEQ ID NO: 153114 - DNA, 20 bp, Artificial Sequence
  Description of Artificial Sequence: Synthetic oligonucleotide
  Target: LAMA2; (+) strand; PAM type: NRG; PAM sequence: AAG
atctcaaaaaaaaaagaaaa

SEQ ID NO: 153115 - DNA, 20 bp, Artificial Sequence
  Description of Artificial Sequence: Synthetic oligonucleotide
  Target: LAMA2; (+) strand; PAM type: NRG; PAM sequence: AAG
aaaaaagaaaaaaaaatcca

SEQ ID NO: 153116 - DNA, 20 bp, Artificial Sequence
  Description of Artificial Sequence: Synthetic oligonucleotide
  Target: LAMA2; (+) strand; PAM type: NRG; PAM sequence: CAG
aatccaaagttataaatgca

SEQ ID NO: 153117 - DNA, 20 bp, Artificial Sequence
  Description of Artificial Sequence: Synthetic oligonucleotide
  Target: LAMA2; (+) strand; PAM type: NRG; PAM sequence: TGG
agtcttacatacttctcttc

SEQ ID NO: 153118 - DNA, 20 bp, Artificial Sequence
  Description of Artificial Sequence: Synthetic oligonucleotide
  Target: LAMA2; (+) strand; PAM type: NRG; PAM sequence: GGG
gtcttacatacttctcttct

SEQ ID NO: 153119 - DNA, 20 bp, Artificial Sequence
  Description of Artificial Sequence: Synthetic oligonucleotide
  Target: LAMA2; (+) strand; PAM type: NRG; PAM sequence: AAG
cttctgggaatttattctgt

SEQ ID NO: 153120 - DNA, 20 bp, Artificial Sequence
  Description of Artificial Sequence: Synthetic oligonucleotide
  Target: LAMA2; (+) strand; PAM type: NRG; PAM sequence: AAG
tgtgaaatgacatatatgca

SEQ ID NO: 153121 - DNA, 20 bp, Artificial Sequence
  Description of Artificial Sequence: Synthetic oligonucleotide
  Target: LAMA2; (+) strand; PAM type: NRG; PAM sequence: CAG
atatgcaaagtgattcattc

SEQ ID NO: 153122 - DNA, 20 bp, Artificial Sequence
  Description of Artificial Sequence: Synthetic oligonucleotide
  Target: LAMA2; (+) strand; PAM type: NRG; PAM sequence: AAG
tgtttgtaattgtcaccaca

SEQ ID NO: 153123 - DNA, 20 bp, Artificial Sequence
  Description of Artificial Sequence: Synthetic oligonucleotide
  Target: LAMA2; (+) strand; PAM type: NRG; PAM sequence: GAG
ccacaaagctgccaatcact

SEQ ID NO: 153124 - DNA, 20 bp, Artificial Sequence
  Description of Artificial Sequence: Synthetic oligonucleotide
  Target: LAMA2; (+) strand; PAM type: NRG; PAM sequence: GAG
acaaagctgccaatcactga

SEQ ID NO: 153125 - DNA, 20 bp, Artificial Sequence
  Description of Artificial Sequence: Synthetic oligonucleotide
  Target: LAMA2; (+) strand; PAM type: NRG; PAM sequence: GAG
cactgagagactgattaaat

SEQ ID NO: 153126 - DNA, 20 bp, Artificial Sequence
  Description of Artificial Sequence: Synthetic oligonucleotide
  Target: LAMA2; (+) strand; PAM type: NRG; PAM sequence: TGG
gagactgattaaatgagttt

SEQ ID NO: 153127 - DNA, 20 bp, Artificial Sequence
  Description of Artificial Sequence: Synthetic oligonucleotide
  Target: LAMA2; (+) strand; PAM type: NRG; PAM sequence: AAG
acactataaaattattaaaa

SEQ ID NO: 153128 - DNA, 20 bp, Artificial Sequence
  Description of Artificial Sequence: Synthetic oligonucleotide
  Target: LAMA2; (+) strand; PAM type: NRG; PAM sequence: AGG
cactataaaattattaaaaa

SEQ ID NO: 153129 - DNA, 20 bp, Artificial Sequence
  Description of Artificial Sequence: Synthetic oligonucleotide
  Target: LAMA2; (+) strand; PAM type: NRG; PAM sequence: AAG
tataaaattattaaaaaagg

SEQ ID NO: 153130 - DNA, 20 bp, Artificial Sequence
  Description of Artificial Sequence: Synthetic oligonucleotide
  Target: LAMA2; (+) strand; PAM type: NRG; PAM sequence: AGG
ataaaattattaaaaaagga

SEQ ID NO: 153131 - DNA, 20 bp, Artificial Sequence
  Description of Artificial Sequence: Synthetic oligonucleotide
  Target: LAMA2; (+) strand; PAM type: NRG; PAM sequence: AAG
aaattattaaaaaaggaagg

SEQ ID NO: 153132 - DNA, 20 bp, Artificial Sequence
  Description of Artificial Sequence: Synthetic oligonucleotide
  Target: LAMA2; (+) strand; PAM type: NRG; PAM sequence: TGG
aagatttttgtataataata

SEQ ID NO: 153133 - DNA, 20 bp, Artificial Sequence
  Description of Artificial Sequence: Synthetic oligonucleotide
  Target: LAMA2; (+) strand; PAM type: NRG; PAM sequence: AAG
ataataatatggaatgatcc

SEQ ID NO: 153134 - DNA, 20 bp, Artificial Sequence
  Description of Artificial Sequence: Synthetic oligonucleotide
  Target: LAMA2; (+) strand; PAM type: NRG; PAM sequence: AGG
taataatatggaatgatcca

SEQ ID NO: 153135 - DNA, 20 bp, Artificial Sequence
  Description of Artificial Sequence: Synthetic oligonucleotide
  Target: LAMA2; (+) strand; PAM type: NRG; PAM sequence: TAG
tattttaaataaattaaact

SEQ ID NO: 153136 - DNA, 20 bp, Artificial Sequence
  Description of Artificial Sequence: Synthetic oligonucleotide
  Target: LAMA2; (+) strand; PAM type: NRG; PAM sequence: AGG
attttaaataaattaaactt

SEQ ID NO: 153137 - DNA, 20 bp, Artificial Sequence
  Description of Artificial Sequence: Synthetic oligonucleotide
  Target: LAMA2; (+) strand; PAM type: NRG; PAM sequence: GAG
tttaaataaattaaacttag

SEQ ID NO: 153138 - DNA, 20 bp, Artificial Sequence
  Description of Artificial Sequence: Synthetic oligonucleotide
  Target: LAMA2; (+) strand; PAM type: NRG; PAM sequence: AGG
ttaaataaattaaacttagg

SEQ ID NO: 153139 - DNA, 20 bp, Artificial Sequence
  Description of Artificial Sequence: Synthetic oligonucleotide
  Target: LAMA2; (+) strand; PAM type: NRG; PAM sequence: CAG
ataaattaaacttaggaggc

SEQ ID NO: 153140 - DNA, 20 bp, Artificial Sequence
  Description of Artificial Sequence: Synthetic oligonucleotide
  Target: LAMA2; (+) strand; PAM type: NRG; PAM sequence: AGG
taaattaaacttaggaggcc

SEQ ID NO: 153141 - DNA, 20 bp, Artificial Sequence
  Description of Artificial Sequence: Synthetic oligonucleotide
  Target: LAMA2; (+) strand; PAM type: NRG; PAM sequence: TGG
acttaggaggccaggtgcac

SEQ ID NO: 153142 - DNA, 20 bp, Artificial Sequence
  Description of Artificial Sequence: Synthetic oligonucleotide
  Target: LAMA2; (+) strand; PAM type: NRG; PAM sequence: TGG
gcctgtaatcccaacacttt

SEQ ID NO: 153143 - DNA, 20 bp, Artificial Sequence
  Description of Artificial Sequence: Synthetic oligonucleotide
  Target: LAMA2; (+) strand; PAM type: NRG; PAM sequence: TGG
tgtaatcccaacacttttgg

SEQ ID NO: 153144 - DNA, 20 bp, Artificial Sequence
  Description of Artificial Sequence: Synthetic oligonucleotide
  Target: LAMA2; (+) strand; PAM type: NRG; PAM sequence: GAG
tcccaacacttttggtggtt

SEQ ID NO: 153145 - DNA, 20 bp, Artificial Sequence
  Description of Artificial Sequence: Synthetic oligonucleotide
  Target: LAMA2; (+) strand; PAM type: NRG; PAM sequence: CAG
aacacttttggtggttgaga

SEQ ID NO: 153146 - DNA, 20 bp, Artificial Sequence
  Description of Artificial Sequence: Synthetic oligonucleotide
  Target: LAMA2; (+) strand; PAM type: NRG; PAM sequence: AGG
acacttttggtggttgagac

SEQ ID NO: 153147 - DNA, 20 bp, Artificial Sequence
  Description of Artificial Sequence: Synthetic oligonucleotide
  Target: LAMA2; (+) strand; PAM type: NRG; PAM sequence: CAG
cttttggtggttgagacagg

SEQ ID NO: 153148 - DNA, 20 bp, Artificial Sequence
  Description of Artificial Sequence: Synthetic oligonucleotide
  Target: LAMA2; (+) strand; PAM type: NRG; PAM sequence: TGG
ggttgagacaggcagatcac

SEQ ID NO: 153149 - DNA, 20 bp, Artificial Sequence
  Description of Artificial Sequence: Synthetic oligonucleotide
  Target: LAMA2; (+) strand; PAM type: NRG; PAM sequence: GAG
ttgagacaggcagatcactg

SEQ ID NO: 153150 - DNA, 20 bp, Artificial Sequence
  Description of Artificial Sequence: Synthetic oligonucleotide
  Target: LAMA2; (+) strand; PAM type: NRG; PAM sequence: CAG
acaggcagatcactggagac

SEQ ID NO: 153151 - DNA, 20 bp, Artificial Sequence
  Description of Artificial Sequence: Synthetic oligonucleotide
  Target: LAMA2; (+) strand; PAM type: NRG; PAM sequence: AGG
caggcagatcactggagacc

SEQ ID NO: 153152 - DNA, 20 bp, Artificial Sequence
  Description of Artificial Sequence: Synthetic oligonucleotide
  Target: LAMA2; (+) strand; PAM type: NRG; PAM sequence: GAG
ggcagatcactggagaccag

SEQ ID NO: 153153 - DNA, 20 bp, Artificial Sequence
  Description of Artificial Sequence: Synthetic oligonucleotide
  Target: LAMA2; (+) strand; PAM type: NRG; PAM sequence: AAG
tcactggagaccaggagttc

SEQ ID NO: 153154 - DNA, 20 bp, Artificial Sequence
  Description of Artificial Sequence: Synthetic oligonucleotide
  Target: LAMA2; (+) strand; PAM type: NRG; PAM sequence: CAG
ggagaccaggagttcaagac

SEQ ID NO: 153155 - DNA, 20 bp, Artificial Sequence
  Description of Artificial Sequence: Synthetic oligonucleotide
  Target: LAMA2; (+) strand; PAM type: NRG; PAM sequence: TGG
ccaggagttcaagaccagcc

SEQ ID NO: 153156 - DNA, 20 bp, Artificial Sequence
  Description of Artificial Sequence: Synthetic oligonucleotide
  Target: LAMA2; (+) strand; PAM type: NRG; PAM sequence: TGG
caagaccagcctggccaaca

SEQ ID NO: 153157 - DNA, 20 bp, Artificial Sequence
  Description of Artificial Sequence: Synthetic oligonucleotide
  Target: LAMA2; (+) strand; PAM type: NRG; PAM sequence: TAG
tctactaaaaatacaaaaat

SEQ ID NO: 153158 - DNA, 20 bp, Artificial Sequence
  Description of Artificial Sequence: Synthetic oligonucleotide
  Target: LAMA2; (+) strand; PAM type: NRG; PAM sequence: CGG
actaaaaatacaaaaattag

SEQ ID NO: 153159 - DNA, 20 bp, Artificial Sequence
  Description of Artificial Sequence: Synthetic oligonucleotide
  Target: LAMA2; (+) strand; PAM type: NRG; PAM sequence: GGG
ctaaaaatacaaaaattagc

SEQ ID NO: 153160 - DNA, 20 bp, Artificial Sequence
  Description of Artificial Sequence: Synthetic oligonucleotide
  Target: LAMA2; (+) strand; PAM type: NRG; PAM sequence: TGG
aatacaaaaattagcgggtg

SEQ ID NO: 153161 - DNA, 20 bp, Artificial Sequence
  Description of Artificial Sequence: Synthetic oligonucleotide
  Target: LAMA2; (+) strand; PAM type: NRG; PAM sequence: TGG
acaaaaattagcgggtgtgg

SEQ ID NO: 153162 - DNA, 20 bp, Artificial Sequence
  Description of Artificial Sequence: Synthetic oligonucleotide
  Target: LAMA2; (+) strand; PAM type: NRG; PAM sequence: TAG
ggtgtggtggtgtgtgcatg

SEQ ID NO: 153163 - DNA, 20 bp, Artificial Sequence
  Description of Artificial Sequence: Synthetic oligonucleotide
  Target: LAMA2; (+) strand; PAM type: NRG; PAM sequence: CAG
gtgcatgtagtccccactac

SEQ ID NO: 153164 - DNA, 20 bp, Artificial Sequence
  Description of Artificial Sequence: Synthetic oligonucleotide
  Target: LAMA2; (+) strand; PAM type: NRG; PAM sequence: AGG
tgcatgtagtccccactacc

SEQ ID NO: 153165 - DNA, 20 bp, Artificial Sequence
  Description of Artificial Sequence: Synthetic oligonucleotide
  Target: LAMA2; (+) strand; PAM type: NRG; PAM sequence: GGG
gcatgtagtccccactacca

SEQ ID NO: 153166 - DNA, 20 bp, Artificial Sequence
  Description of Artificial Sequence: Synthetic oligonucleotide
  Target: LAMA2; (+) strand; PAM type: NRG; PAM sequence: GAG
atgtagtccccactaccagg

SEQ ID NO: 153167 - DNA, 20 bp, Artificial Sequence
  Description of Artificial Sequence: Synthetic oligonucleotide
  Target: LAMA2; (+) strand; PAM type: NRG; PAM sequence: AGG
tgtagtccccactaccaggg

SEQ ID NO: 153168 - DNA, 20 bp, Artificial Sequence
  Description of Artificial Sequence: Synthetic oligonucleotide
  Target: LAMA2; (+) strand; PAM type: NRG; PAM sequence: GAG
tccccactaccagggaggct

SEQ ID NO: 153169 - DNA, 20 bp, Artificial Sequence
  Description of Artificial Sequence: Synthetic oligonucleotide
  Target: LAMA2; (+) strand; PAM type: NRG; PAM sequence: AGG
ccccactaccagggaggctg

SEQ ID NO: 153170 - DNA, 20 bp, Artificial Sequence
  Description of Artificial Sequence: Synthetic oligonucleotide
  Target: LAMA2; (+) strand; PAM type: NRG; PAM sequence: GAG
taccagggaggctgaggcat

SEQ ID NO: 153171 - DNA, 20 bp, Artificial Sequence
  Description of Artificial Sequence: Synthetic oligonucleotide
  Target: LAMA2; (+) strand; PAM type: NRG; PAM sequence: CGG
catgagaatcacctgaactc

SEQ ID NO: 153172 - DNA, 20 bp, Artificial Sequence
  Description of Artificial Sequence: Synthetic oligonucleotide
  Target: LAMA2; (+) strand; PAM type: NRG; PAM sequence: GAG
tgagaatcacctgaactccg

SEQ ID NO: 153173 - DNA, 20 bp, Artificial Sequence
  Description of Artificial Sequence: Synthetic oligonucleotide
  Target: LAMA2; (+) strand; PAM type: NRG; PAM sequence: AGG
gagaatcacctgaactccgg

SEQ ID NO: 153174 - DNA, 20 bp, Artificial Sequence
  Description of Artificial Sequence: Synthetic oligonucleotide
  Target: LAMA2; (+) strand; PAM type: NRG; PAM sequence: CGG
aatcacctgaactccggagg

SEQ ID NO: 153175 - DNA, 20 bp, Artificial Sequence
  Description of Artificial Sequence: Synthetic oligonucleotide
  Target: LAMA2; (+) strand; PAM type: NRG; PAM sequence: GAG
tcacctgaactccggaggcg

SEQ ID NO: 153176 - DNA, 20 bp, Artificial Sequence
  Description of Artificial Sequence: Synthetic oligonucleotide
  Target: LAMA2; (+) strand; PAM type: NRG; PAM sequence: CAG
aactccggaggcggagattg

SEQ ID NO: 153177 - DNA, 20 bp, Artificial Sequence
  Description of Artificial Sequence: Synthetic oligonucleotide
  Target: LAMA2; (+) strand; PAM type: NRG; PAM sequence: GAG
ccggaggcggagattgcagt

SEQ ID NO: 153178 - DNA, 20 bp, Artificial Sequence
  Description of Artificial Sequence: Synthetic oligonucleotide
  Target: LAMA2; (+) strand; PAM type: NRG; PAM sequence: CAG
gaaattgtgccactgcactc

SEQ ID NO: 153179 - DNA, 20 bp, Artificial Sequence
  Description of Artificial Sequence: Synthetic oligonucleotide
  Target: LAMA2; (+) strand; PAM type: NRG; PAM sequence: TGG
tgtgccactgcactccagcc

SEQ ID NO: 153180 - DNA, 20 bp, Artificial Sequence
  Description of Artificial Sequence: Synthetic oligonucleotide
  Target: LAMA2; (+) strand; PAM type: NRG; PAM sequence: GGG
gtgccactgcactccagcct

SEQ ID NO: 153181 - DNA, 20 bp, Artificial Sequence
  Description of Artificial Sequence: Synthetic oligonucleotide
  Target: LAMA2; (+) strand; PAM type: NRG; PAM sequence: CAG
ctgcactccagcctgggtga

SEQ ID NO: 153182 - DNA, 20 bp, Artificial Sequence
  Description of Artificial Sequence: Synthetic oligonucleotide
  Target: LAMA2; (+) strand; PAM type: NRG; PAM sequence: GAG
tccagcctgggtgacagact

SEQ ID NO: 153183 - DNA, 20 bp, Artificial Sequence
  Description of Artificial Sequence: Synthetic oligonucleotide
  Target: LAMA2; (+) strand; PAM type: NRG; PAM sequence: AAG
agactccatctcaaaaaaaa

SEQ ID NO: 153184 - DNA, 20 bp, Artificial Sequence
  Description of Artificial Sequence: Synthetic oligonucleotide
  Target: LAMA2; (+) strand; PAM type: NRG; PAM sequence: AAG
tccatctcaaaaaaaaaaga

SEQ ID NO: 153185 - DNA, 20 bp, Artificial Sequence
  Description of Artificial Sequence: Synthetic oligonucleotide
  Target: LAMA2; (+) strand; PAM type: NRG; PAM sequence: AGG
ccatctcaaaaaaaaaagaa

SEQ ID NO: 153186 - DNA, 20 bp, Artificial Sequence
  Description of Artificial Sequence: Synthetic oligonucleotide
  Target: LAMA2; (+) strand; PAM type: NRG; PAM sequence: AAG
tcaaaaaaaaaagaaaggaa

SEQ ID NO: 153187 - DNA, 20 bp, Artificial Sequence
  Description of Artificial Sequence: Synthetic oligonucleotide
  Target: LAMA2; (+) strand; PAM type: NRG; PAM sequence: AAG
aaaagaaaggaaaagaaaaa

SEQ ID NO: 153188 - DNA, 20 bp, Artificial Sequence
  Description of Artificial Sequence: Synthetic oligonucleotide
  Target: LAMA2; (+) strand; PAM type: NRG; PAM sequence: AGG
aaagaaaggaaaagaaaaaa

SEQ ID NO: 153189 - DNA, 20 bp, Artificial Sequence
  Description of Artificial Sequence: Synthetic oligonucleotide
  Target: LAMA2; (+) strand; PAM type: NRG; PAM sequence: AAG
gaaaggaaaagaaaaaaagg

SEQ ID NO: 153190 - DNA, 20 bp, Artificial Sequence
  Description of Artificial Sequence: Synthetic oligonucleotide
  Target: LAMA2; (+) strand; PAM type: NRG; PAM sequence: AGG
aaaggaaaagaaaaaaagga

SEQ ID NO: 153191 - DNA, 20 bp, Artificial Sequence
  Description of Artificial Sequence: Synthetic oligonucleotide
  Target: LAMA2; (+) strand; PAM type: NRG; PAM sequence: GGG
aaggaaaagaaaaaaaggaa

SEQ ID NO: 153192 - DNA, 20 bp, Artificial Sequence
  Description of Artificial Sequence: Synthetic oligonucleotide
  Target: LAMA2; (+) strand; PAM type: NRG; PAM sequence: AAG
gaaaagaaaaaaaggaaggg

SEQ ID NO: 153193 - DNA, 20 bp, Artificial Sequence
  Description of Artificial Sequence: Synthetic oligonucleotide
  Target: LAMA2; (+) strand; PAM type: NRG; PAM sequence: AGG
aaaagaaaaaaaggaaggga

SEQ ID NO: 153194 - DNA, 20 bp, Artificial Sequence
  Description of Artificial Sequence: Synthetic oligonucleotide
  Target: LAMA2; (+) strand; PAM type: NRG; PAM sequence: GGG
aaagaaaaaaaggaagggaa

SEQ ID NO: 153195 - DNA, 20 bp, Artificial Sequence
  Description of Artificial Sequence: Synthetic oligonucleotide
  Target: LAMA2; (+) strand; PAM type: NRG; PAM sequence: AAG
gaaaaaaaggaagggaaggg

SEQ ID NO: 153196 - DNA, 20 bp, Artificial Sequence
  Description of Artificial Sequence: Synthetic oligonucleotide
  Target: LAMA2; (+) strand; PAM type: NRG; PAM sequence: AGG
aaaaaaaggaagggaaggga

SEQ ID NO: 153197 - DNA, 20 bp, Artificial Sequence
  Description of Artificial Sequence: Synthetic oligonucleotide
  Target: LAMA2; (+) strand; PAM type: NRG; PAM sequence: GGG
aaaaaaggaagggaagggaa

SEQ ID NO: 153198 - DNA, 20 bp, Artificial Sequence
  Description of Artificial Sequence: Synthetic oligonucleotide
  Target: LAMA2; (+) strand; PAM type: NRG; PAM sequence: AAG
aaggaagggaagggaaggga

SEQ ID NO: 153199 - DNA, 20 bp, Artificial Sequence
  Description of Artificial Sequence: Synthetic oligonucleotide
  Target: LAMA2; (+) strand; PAM type: NRG; PAM sequence: AGG
aggaagggaagggaagggaa

SEQ ID NO: 153200 - DNA, 20 bp, Artificial Sequence
  Description of Artificial Sequence: Synthetic oligonucleotide
  Target: LAMA2; (+) strand; PAM type: NRG; PAM sequence: AAG
agggaagggaagggaaagga

SEQ ID NO: 153201 - DNA, 20 bp, Artificial Sequence
  Description of Artificial Sequence: Synthetic oligonucleotide
  Target: LAMA2; (+) strand; PAM type: NRG; PAM sequence: AGG
gggaagggaagggaaaggaa

SEQ ID NO: 153202 - DNA, 20 bp, Artificial Sequence
  Description of Artificial Sequence: Synthetic oligonucleotide
  Target: LAMA2; (+) strand; PAM type: NRG; PAM sequence: AAG
agggaagggaaaggaaagga

SEQ ID NO: 153203 - DNA, 20 bp, Artificial Sequence
  Description of Artificial Sequence: Synthetic oligonucleotide
  Target: LAMA2; (+) strand; PAM type: NRG; PAM sequence: AGG
gggaagggaaaggaaaggaa

SEQ ID NO: 153204 - DNA, 20 bp, Artificial Sequence
  Description of Artificial Sequence: Synthetic oligonucleotide
  Target: LAMA2; (+) strand; PAM type: NRG; PAM sequence: GAG
gaagggaaaggaaaggaaag

SEQ ID NO: 153205 - DNA, 20 bp, Artificial Sequence
  Description of Artificial Sequence: Synthetic oligonucleotide
  Target: LAMA2; (+) strand; PAM type: NRG; PAM sequence: AGG
aagggaaaggaaaggaaagg

SEQ ID NO: 153206 - DNA, 20 bp, Artificial Sequence
  Description of Artificial Sequence: Synthetic oligonucleotide
  Target: LAMA2; (+) strand; PAM type: NRG; PAM sequence: AAG
ggaaaggaaaggaaaggagg

SEQ ID NO: 153207 - DNA, 20 bp, Artificial Sequence
  Description of Artificial Sequence: Synthetic oligonucleotide
  Target: LAMA2; (+) strand; PAM type: NRG; PAM sequence: AGG
gaaaggaaaggaaaggagga

SEQ ID NO: 153208 - DNA, 20 bp, Artificial Sequence
  Description of Artificial Sequence: Synthetic oligonucleotide
  Target: LAMA2; (+) strand; PAM type: NRG; PAM sequence: AAG
aggaaaggaaaggaggaagg

SEQ ID NO: 153209 - DNA, 20 bp, Artificial Sequence
  Description of Artificial Sequence: Synthetic oligonucleotide
  Target: LAMA2; (+) strand; PAM type: NRG; PAM sequence: AGG
ggaaaggaaaggaggaagga

SEQ ID NO: 153210 - DNA, 20 bp, Artificial Sequence
  Description of Artificial Sequence: Synthetic oligonucleotide
  Target: LAMA2; (+) strand; PAM type: NRG; PAM sequence: GGG
gaaaggaaaggaggaaggaa

SEQ ID NO: 153211 - DNA, 20 bp, Artificial Sequence
  Description of Artificial Sequence: Synthetic oligonucleotide
  Target: LAMA2; (+) strand; PAM type: NRG; PAM sequence: GAG
aaggaaaggaggaaggaagg

SEQ ID NO: 153212 - DNA, 20 bp, Artificial Sequence
  Description of Artificial Sequence: Synthetic oligonucleotide
  Target: LAMA2; (+) strand; PAM type: NRG; PAM sequence: AGG
aggaaaggaggaaggaaggg

SEQ ID NO: 153213 - DNA, 20 bp, Artificial Sequence
  Description of Artificial Sequence: Synthetic oligonucleotide
  Target: LAMA2; (+) strand; PAM type: NRG; PAM sequence: GGG
ggaaaggaggaaggaaggga

SEQ ID NO: 153214 - DNA, 20 bp, Artificial Sequence
  Description of Artificial Sequence: Synthetic oligonucleotide
  Target: LAMA2; (+) strand; PAM type: NRG; PAM sequence: GAG
aaaggaggaaggaagggagg

SEQ ID NO: 153215 - DNA, 20 bp, Artificial Sequence
  Description of Artificial Sequence: Synthetic oligonucleotide
  Target: LAMA2; (+) strand; PAM type: NRG; PAM sequence: AGG
aaggaggaaggaagggaggg

SEQ ID NO: 153216 - DNA, 20 bp, Artificial Sequence
  Description of Artificial Sequence: Synthetic oligonucleotide
  Target: LAMA2; (+) strand; PAM type: NRG; PAM sequence: GGG
aggaggaaggaagggaggga

SEQ ID NO: 153217 - DNA, 20 bp, Artificial Sequence
  Description of Artificial Sequence: Synthetic oligonucleotide
  Target: LAMA2; (+) strand; PAM type: NRG; PAM sequence: GAG
gaggaaggaagggagggagg

SEQ ID NO: 153218 - DNA, 20 bp, Artificial Sequence
  Description of Artificial Sequence: Synthetic oligonucleotide
  Target: LAMA2; (+) strand; PAM type: NRG; PAM sequence: AGG
aggaaggaagggagggaggg

SEQ ID NO: 153219 - DNA, 20 bp, Artificial Sequence
  Description of Artificial Sequence: Synthetic oligonucleotide
  Target: LAMA2; (+) strand; PAM type: NRG; PAM sequence: GGG
ggaaggaagggagggaggga

SEQ ID NO: 153220 - DNA, 20 bp, Artificial Sequence
  Description of Artificial Sequence: Synthetic oligonucleotide
  Target: LAMA2; (+) strand; PAM type: NRG; PAM sequence: GAG
aaggaagggagggagggagg

SEQ ID NO: 153221 - DNA, 20 bp, Artificial Sequence
  Description of Artificial Sequence: Synthetic oligonucleotide
  Target: LAMA2; (+) strand; PAM type: NRG; PAM sequence: AGG
aggaagggagggagggaggg

SEQ ID NO: 153222 - DNA, 20 bp, Artificial Sequence
  Description of Artificial Sequence: Synthetic oligonucleotide
  Target: LAMA2; (+) strand; PAM type: NRG; PAM sequence: AAG
aagggagggagggagggagg

SEQ ID NO: 153223 - DNA, 20 bp, Artificial Sequence
  Description of Artificial Sequence: Synthetic oligonucleotide
  Target: LAMA2; (+) strand; PAM type: NRG; PAM sequence: AGG
agggagggagggagggagga

SEQ ID NO: 153224 - DNA, 20 bp, Artificial Sequence
  Description of Artificial Sequence: Synthetic oligonucleotide
  Target: LAMA2; (+) strand; PAM type: NRG; PAM sequence: AAG
gagggagggagggaggaagg

SEQ ID NO: 153225 - DNA, 20 bp, Artificial Sequence
  Description of Artificial Sequence: Synthetic oligonucleotide
  Target: LAMA2; (+) strand; PAM type: NRG; PAM sequence: AGG
agggagggagggaggaagga

SEQ ID NO: 153226 - DNA, 20 bp, Artificial Sequence
  Description of Artificial Sequence: Synthetic oligonucleotide
  Target: LAMA2; (+) strand; PAM type: NRG; PAM sequence: AAG
gagggagggaggaaggaagg

SEQ ID NO: 153227 - DNA, 20 bp, Artificial Sequence
  Description of Artificial Sequence: Synthetic oligonucleotide
  Target: LAMA2; (+) strand; PAM type: NRG; PAM sequence: AGG
agggagggaggaaggaagga

SEQ ID NO: 153228 - DNA, 20 bp, Artificial Sequence
  Description of Artificial Sequence: Synthetic oligonucleotide
  Target: LAMA2; (+) strand; PAM type: NRG; PAM sequence: AAG
gagggaggaaggaaggaagg

SEQ ID NO: 153229 - DNA, 20 bp, Artificial Sequence
  Description of Artificial Sequence: Synthetic oligonucleotide
  Target: LAMA2; (+) strand; PAM type: NRG; PAM sequence: AGG
agggaggaaggaaggaagga

SEQ ID NO: 153230 - DNA, 20 bp, Artificial Sequence
  Description of Artificial Sequence: Synthetic oligonucleotide
  Target: LAMA2; (+) strand; PAM type: NRG; PAM sequence: AAG
gaggaaggaaggaaggaagg

SEQ ID NO: 153231 - DNA, 20 bp, Artificial Sequence
  Description of Artificial Sequence: Synthetic oligonucleotide
  Target: LAMA2; (+) strand; PAM type: NRG; PAM sequence: AGG
aggaaggaaggaaggaagga

SEQ ID NO: 153232 - DNA, 20 bp, Artificial Sequence
  Description of Artificial Sequence: Synthetic oligonucleotide
  Target: LAMA2; (+) strand; PAM type: NRG; PAM sequence: AAG
aaggaaggaaggaaggaagg

SEQ ID NO: 153233 - DNA, 20 bp, Artificial Sequence
  Description of Artificial Sequence: Synthetic oligonucleotide
  Target: LAMA2; (+) strand; PAM type: NRG; PAM sequence: AGG
aggaaggaaggaaggaagga

SEQ ID NO: 153234 - DNA, 20 bp, Artificial Sequence
  Description of Artificial Sequence: Synthetic oligonucleotide
  Target: LAMA2; (+) strand; PAM type: NRG; PAM sequence: AAG
aaggaaggaaggaaggaagg

SEQ ID NO: 153235 - DNA, 20 bp, Artificial Sequence
  Description of Artificial Sequence: Synthetic oligonucleotide
  Target: LAMA2; (+) strand; PAM type: NRG; PAM sequence: AGG
aggaaggaaggaaggaagga

SEQ ID NO: 153236 - DNA, 20 bp, Artificial Sequence
  Description of Artificial Sequence: Synthetic oligonucleotide
  Target: LAMA2; (+) strand; PAM type: NRG; PAM sequence: AAG
aaggaaggaaggaaggaagg

SEQ ID NO: 153237 - DNA, 20 bp, Artificial Sequence
  Description of Artificial Sequence: Synthetic oligonucleotide
  Target: LAMA2; (+) strand; PAM type: NRG; PAM sequence: AGG
aggaaggaaggaaggaagga

SEQ ID NO: 153238 - DNA, 20 bp, Artificial Sequence
  Description of Artificial Sequence: Synthetic oligonucleotide
  Target: LAMA2; (+) strand; PAM type: NRG; PAM sequence: AAG
aaggaaggaaggaaggaagg

SEQ ID NO: 153239 - DNA, 20 bp, Artificial Sequence
  Description of Artificial Sequence: Synthetic oligonucleotide
  Target: LAMA2; (+) strand; PAM type: NRG; PAM sequence: AGG
aggaaggaaggaaggaagga

SEQ ID NO: 153240 - DNA, 20 bp, Artificial Sequence
  Description of Artificial Sequence: Synthetic oligonucleotide
  Target: LAMA2; (+) strand; PAM type: NRG; PAM sequence: AAG
aaggaaggaaggaaggaagg

SEQ ID NO: 153241 - DNA, 20 bp, Artificial Sequence
  Description of Artificial Sequence: Synthetic oligonucleotide
  Target: LAMA2; (+) strand; PAM type: NRG; PAM sequence: AGG
aggaaggaaggaaggaagga

SEQ ID NO: 153242 - DNA, 20 bp, Artificial Sequence
  Description of Artificial Sequence: Synthetic oligonucleotide
  Target: LAMA2; (+) strand; PAM type: NRG; PAM sequence: AAG
aaggaaggaaggaaggaagg

SEQ ID NO: 153243 - DNA, 20 bp, Artificial Sequence
  Description of Artificial Sequence: Synthetic oligonucleotide
  Target: LAMA2; (+) strand; PAM type: NRG; PAM sequence: AGG
aggaaggaaggaaggaagga

SEQ ID NO: 153244 - DNA, 20 bp, Artificial Sequence
  Description of Artificial Sequence: Synthetic oligonucleotide
  Target: LAMA2; (+) strand; PAM type: NRG; PAM sequence: AAG
aaggaaggaaggaaggaagg

SEQ ID NO: 153245 - DNA, 20 bp, Artificial Sequence
  Description of Artificial Sequence: Synthetic oligonucleotide
  Target: LAMA2; (+) strand; PAM type: NRG; PAM sequence: AGG
aggaaggaaggaaggaagga

SEQ ID NO: 153246 - DNA, 20 bp, Artificial Sequence
  Description of Artificial Sequence: Synthetic oligonucleotide
  Target: LAMA2; (+) strand; PAM type: NRG; PAM sequence: AAG
aaggaaggaaggaaggaagg

SEQ ID NO: 153247 - DNA, 20 bp, Artificial Sequence
  Description of Artificial Sequence: Synthetic oligonucleotide
  Target: LAMA2; (+) strand; PAM type: NRG; PAM sequence: AGG
aggaaggaaggaaggaagga

SEQ ID NO: 153248 - DNA, 20 bp, Artificial Sequence
  Description of Artificial Sequence: Synthetic oligonucleotide
  Target: LAMA2; (+) strand; PAM type: NRG; PAM sequence: AAG
aaggaaggaaggaaggaagg

SEQ ID NO: 153249 - DNA, 20 bp, Artificial Sequence
  Description of Artificial Sequence: Synthetic oligonucleotide
  Target: LAMA2; (+) strand; PAM type: NRG; PAM sequence: AGG
aggaaggaaggaaggaagga

SEQ ID NO: 153250 - DNA, 20 bp, Artificial Sequence
  Description of Artificial Sequence: Synthetic oligonucleotide
  Target: LAMA2; (+) strand; PAM type: NRG; PAM sequence: TAG
ggaaggaaggaaattaaacc

SEQ ID NO: 153251 - DNA, 20 bp, Artificial Sequence
  Description of Artificial Sequence: Synthetic oligonucleotide
  Target: LAMA2; (+) strand; PAM type: NRG; PAM sequence: AGG
gaaggaaggaaattaaacct

SEQ ID NO: 153252 - DNA, 20 bp, Artificial Sequence
  Description of Artificial Sequence: Synthetic oligonucleotide
  Target: LAMA2; (+) strand; PAM type: NRG; PAM sequence: AAG
ggaaattaaacctaggaaca

SEQ ID NO: 153253 - DNA, 20 bp, Artificial Sequence
  Description of Artificial Sequence: Synthetic oligonucleotide
  Target: LAMA2; (+) strand; PAM type: NRG; PAM sequence: TAG
aattaaacctaggaacaaag

SEQ ID NO: 153254 - DNA, 20 bp, Artificial Sequence
  Description of Artificial Sequence: Synthetic oligonucleotide
  Target: LAMA2; (+) strand; PAM type: NRG; PAM sequence: AAG
tgactactatttgtctttta

SEQ ID NO: 153255 - DNA, 20 bp, Artificial Sequence
  Description of Artificial Sequence: Synthetic oligonucleotide
  Target: LAMA2; (+) strand; PAM type: NRG; PAM sequence: TGG
ctactatttgtcttttaaag

SEQ ID NO: 153256 - DNA, 20 bp, Artificial Sequence
  Description of Artificial Sequence: Synthetic oligonucleotide
  Target: LAMA2; (+) strand; PAM type: NRG; PAM sequence: GAG
actatttgtcttttaaagtg

SEQ ID NO: 153257 - DNA, 20 bp, Artificial Sequence
  Description of Artificial Sequence: Synthetic oligonucleotide
  Target: LAMA2; (+) strand; PAM type: NRG; PAM sequence: AAG
gaatatgtccttgtaattat

SEQ ID NO: 153258 - DNA, 20 bp, Artificial Sequence
  Description of Artificial Sequence: Synthetic oligonucleotide
  Target: LAMA2; (+) strand; PAM type: NRG; PAM sequence: AGG
aatatgtccttgtaattata

SEQ ID NO: 153259 - DNA, 20 bp, Artificial Sequence
  Description of Artificial Sequence: Synthetic oligonucleotide
  Target: LAMA2; (+) strand; PAM type: NRG; PAM sequence: TAG
cttgtaattataaggtgact

SEQ ID NO: 153260 - DNA, 20 bp, Artificial Sequence
  Description of Artificial Sequence: Synthetic oligonucleotide
  Target: LAMA2; (+) strand; PAM type: NRG; PAM sequence: TAG
tataaggtgacttagctatt

SEQ ID NO: 153261 - DNA, 20 bp, Artificial Sequence
  Description of Artificial Sequence: Synthetic oligonucleotide
  Target: LAMA2; (+) strand; PAM type: NRG; PAM sequence: GAG
taaggtgacttagctattta

SEQ ID NO: 153262 - DNA, 20 bp, Artificial Sequence
  Description of Artificial Sequence: Synthetic oligonucleotide
  Target: LAMA2; (+) strand; PAM type: NRG; PAM sequence: TAG
tagctatttagagtcacatc

SEQ ID NO: 153263 - DNA, 20 bp, Artificial Sequence
  Description of Artificial Sequence: Synthetic oligonucleotide
  Target: LAMA2; (+) strand; PAM type: NRG; PAM sequence: AAG
tcacatctagcatttgcatc

SEQ ID NO: 153264 - DNA, 20 bp, Artificial Sequence
  Description of Artificial Sequence: Synthetic oligonucleotide
  Target: LAMA2; (+) strand; PAM type: NRG; PAM sequence: AGG
cacatctagcatttgcatca

SEQ ID NO: 153265 - DNA, 20 bp, Artificial Sequence
  Description of Artificial Sequence: Synthetic oligonucleotide
  Target: LAMA2; (+) strand; PAM type: NRG; PAM sequence: GAG
tctagcatttgcatcaaggt

SEQ ID NO: 153266 - DNA, 20 bp, Artificial Sequence
  Description of Artificial Sequence: Synthetic oligonucleotide
  Target: LAMA2; (+) strand; PAM type: NRG; PAM sequence: AAG
tcaaggtgagtttgtctcaa

SEQ ID NO: 153267 - DNA, 20 bp, Artificial Sequence
  Description of Artificial Sequence: Synthetic oligonucleotide
  Target: LAMA2; (+) strand; PAM type: NRG; PAM sequence: TAG
ttgtctcaaaagctctgttc

SEQ ID NO: 153268 - DNA, 20 bp, Artificial Sequence
  Description of Artificial Sequence: Synthetic oligonucleotide
  Target: LAMA2; (+) strand; PAM type: NRG; PAM sequence: AAG
tctgttctagtgccccactc

SEQ ID NO: 153269 - DNA, 20 bp, Artificial Sequence
  Description of Artificial Sequence: Synthetic oligonucleotide
  Target: LAMA2; (+) strand; PAM type: NRG; PAM sequence: CAG
tctagtgccccactcaagaa

SEQ ID NO: 153270 - DNA, 20 bp, Artificial Sequence
  Description of Artificial Sequence: Synthetic oligonucleotide
  Target: LAMA2; (+) strand; PAM type: NRG; PAM sequence: AAG
agatattgtcaaatttgtaa

SEQ ID NO: 153271 - DNA, 20 bp, Artificial Sequence
  Description of Artificial Sequence: Synthetic oligonucleotide
  Target: LAMA2; (+) strand; PAM type: NRG; PAM sequence: TGG
tttgtaaaagatattttaac

SEQ ID NO: 153272 - DNA, 20 bp, Artificial Sequence
  Description of Artificial Sequence: Synthetic oligonucleotide
  Target: LAMA2; (+) strand; PAM type: NRG; PAM sequence: TAG
aaaagatattttaactggaa

SEQ ID NO: 153273 - DNA, 20 bp, Artificial Sequence
  Description of Artificial Sequence: Synthetic oligonucleotide
  Target: LAMA2; (+) strand; PAM type: NRG; PAM sequence: AAG
aactattgcttttctattct

SEQ ID NO: 153274 - DNA, 20 bp, Artificial Sequence
  Description of Artificial Sequence: Synthetic oligonucleotide
  Target: LAMA2; (+) strand; PAM type: NRG; PAM sequence: AAG
ctttaatatgatcacttaat

SEQ ID NO: 153275 - DNA, 20 bp, Artificial Sequence
  Description of Artificial Sequence: Synthetic oligonucleotide
  Target: LAMA2; (+) strand; PAM type: NRG; PAM sequence: TGG
cctatctgctaaaaattgtt

SEQ ID NO: 153276 - DNA, 20 bp, Artificial Sequence
  Description of Artificial Sequence: Synthetic oligonucleotide
  Target: LAMA2; (+) strand; PAM type: NRG; PAM sequence: AAG
tggcatgtttaattgatcac

SEQ ID NO: 153277 - DNA, 20 bp, Artificial Sequence
  Description of Artificial Sequence: Synthetic oligonucleotide
  Target: LAMA2; (+) strand; PAM type: NRG; PAM sequence: AGG
ggcatgtttaattgatcaca

SEQ ID NO: 153278 - DNA, 20 bp, Artificial Sequence
  Description of Artificial Sequence: Synthetic oligonucleotide
  Target: LAMA2; (+) strand; PAM type: NRG; PAM sequence: TAG
attgatcacaaggatttgaa

SEQ ID NO: 153279 - DNA, 20 bp, Artificial Sequence
  Description of Artificial Sequence: Synthetic oligonucleotide
  Target: LAMA2; (+) strand; PAM type: NRG; PAM sequence: AAG
aatagcactcttatcttttc

SEQ ID NO: 153280 - DNA, 20 bp, Artificial Sequence
  Description of Artificial Sequence: Synthetic oligonucleotide
  Target: LAMA2; (+) strand; PAM type: NRG; PAM sequence: AAG
ttatcttttcaagtatcttc

SEQ ID NO: 153281 - DNA, 20 bp, Artificial Sequence
  Description of Artificial Sequence: Synthetic oligonucleotide
  Target: LAMA2; (+) strand; PAM type: NRG; PAM sequence: CAG
cttcaagaaattcttatttt

SEQ ID NO: 153282 - DNA, 20 bp, Artificial Sequence
  Description of Artificial Sequence: Synthetic oligonucleotide
  Target: LAMA2; (+) strand; PAM type: NRG; PAM sequence: CAG
caagaaattcttattttcag

SEQ ID NO: 153283 - DNA, 20 bp, Artificial Sequence
  Description of Artificial Sequence: Synthetic oligonucleotide
  Target: LAMA2; (+) strand; PAM type: NRG; PAM sequence: AGG
aagaaattcttattttcagc

SEQ ID NO: 153284 - DNA, 20 bp, Artificial Sequence
  Description of Artificial Sequence: Synthetic oligonucleotide
  Target: LAMA2; (+) strand; PAM type: NRG; PAM sequence: GGG
agaaattcttattttcagca

SEQ ID NO: 153285 - DNA, 20 bp, Artificial Sequence
  Description of Artificial Sequence: Synthetic oligonucleotide
  Target: LAMA2; (+) strand; PAM type: NRG; PAM sequence: GAG
tattttcagcagggcatgtt

SEQ ID NO: 153286 - DNA, 20 bp, Artificial Sequence
  Description of Artificial Sequence: Synthetic oligonucleotide
  Target: LAMA2; (+) strand; PAM type: NRG; PAM sequence: AGG
attttcagcagggcatgttg

SEQ ID NO: 153287 - DNA, 20 bp, Artificial Sequence
  Description of Artificial Sequence: Synthetic oligonucleotide
  Target: LAMA2; (+) strand; PAM type: NRG; PAM sequence: AAG
gggcatgttgaggaaacata

SEQ ID NO: 153288 - DNA, 20 bp, Artificial Sequence
  Description of Artificial Sequence: Synthetic oligonucleotide
  Target: LAMA2; (+) strand; PAM type: NRG; PAM sequence: CAG
tgtcttctcatcacttccaa

SEQ ID NO: 153289 - DNA, 20 bp, Artificial Sequence
  Description of Artificial Sequence: Synthetic oligonucleotide
  Target: LAMA2; (+) strand; PAM type: NRG; PAM sequence: TAG
cttctcatcacttccaacag

SEQ ID NO: 153290 - DNA, 20 bp, Artificial Sequence
  Description of Artificial Sequence: Synthetic oligonucleotide
  Target: LAMA2; (+) strand; PAM type: NRG; PAM sequence: GAG
cacttccaacagtagccact

SEQ ID NO: 153291 - DNA, 20 bp, Artificial Sequence
  Description of Artificial Sequence: Synthetic oligonucleotide
  Target: LAMA2; (+) strand; PAM type: NRG; PAM sequence: AAG
caacagtagccactgagtca

SEQ ID NO: 153292 - DNA, 20 bp, Artificial Sequence
  Description of Artificial Sequence: Synthetic oligonucleotide
  Target: LAMA2; (+) strand; PAM type: NRG; PAM sequence: CAG
cagtagccactgagtcaaag

SEQ ID NO: 153293 - DNA, 20 bp, Artificial Sequence
  Description of Artificial Sequence: Synthetic oligonucleotide
  Target: LAMA2; (+) strand; PAM type: NRG; PAM sequence: AAG
ctctttccttactttttcta

SEQ ID NO: 153294 - DNA, 20 bp, Artificial Sequence
  Description of Artificial Sequence: Synthetic oligonucleotide
  Target: LAMA2; (+) strand; PAM type: NRG; PAM sequence: TAG
ctaaagctctccctctatat

SEQ ID NO: 153295 - DNA, 20 bp, Artificial Sequence
  Description of Artificial Sequence: Synthetic oligonucleotide
  Target: LAMA2; (+) strand; PAM type: NRG; PAM sequence: GAG
cctctatattagctgtgtct

SEQ ID NO: 153296 - DNA, 20 bp, Artificial Sequence
  Description of Artificial Sequence: Synthetic oligonucleotide
  Target: LAMA2; (+) strand; PAM type: NRG; PAM sequence: CAG
attagctgtgtctgagattg

SEQ ID NO: 153297 - DNA, 20 bp, Artificial Sequence
  Description of Artificial Sequence: Synthetic oligonucleotide
  Target: LAMA2; (+) strand; PAM type: NRG; PAM sequence: AGG
ttagctgtgtctgagattgc

SEQ ID NO: 153298 - DNA, 20 bp, Artificial Sequence
  Description of Artificial Sequence: Synthetic oligonucleotide
  Target: LAMA2; (+) strand; PAM type: NRG; PAM sequence: CAG
gctgtgtctgagattgcagg

SEQ ID NO: 153299 - DNA, 20 bp, Artificial Sequence
  Description of Artificial Sequence: Synthetic oligonucleotide
  Target: LAMA2; (+) strand; PAM type: NRG; PAM sequence: TGG
ggcagttaaaatccaacatt

SEQ ID NO: 153300 - DNA, 20 bp, Artificial Sequence
  Description of Artificial Sequence: Synthetic oligonucleotide
  Target: LAMA2; (+) strand; PAM type: NRG; PAM sequence: AAG
caacatttggcacactgaaa

SEQ ID NO: 153301 - DNA, 20 bp, Artificial Sequence
  Description of Artificial Sequence: Synthetic oligonucleotide
  Target: LAMA2; (+) strand; PAM type: NRG; PAM sequence: AGG
aacatttggcacactgaaaa

SEQ ID NO: 153302 - DNA, 20 bp, Artificial Sequence
  Description of Artificial Sequence: Synthetic oligonucleotide
  Target: LAMA2; (+) strand; PAM type: NRG; PAM sequence: GGG
acatttggcacactgaaaaa

SEQ ID NO: 153303 - DNA, 20 bp, Artificial Sequence
  Description of Artificial Sequence: Synthetic oligonucleotide
  Target: LAMA2; (+) strand; PAM type: NRG; PAM sequence: GGG
catttggcacactgaaaaag

SEQ ID NO: 153304 - DNA, 20 bp, Artificial Sequence
  Description of Artificial Sequence: Synthetic oligonucleotide
  Target: LAMA2; (+) strand; PAM type: NRG; PAM sequence: TAG
ctgaaaaaggggctatgtga

SEQ ID NO: 153305 - DNA, 20 bp, Artificial Sequence
  Description of Artificial Sequence: Synthetic oligonucleotide
  Target: LAMA2; (+) strand; PAM type: NRG; PAM sequence: AGG
tgaaaaaggggctatgtgat

SEQ ID NO: 153306 - DNA, 20 bp, Artificial Sequence
  Description of Artificial Sequence: Synthetic oligonucleotide
  Target: LAMA2; (+) strand; PAM type: NRG; PAM sequence: GGG
gaaaaaggggctatgtgata

SEQ ID NO: 153307 - DNA, 20 bp, Artificial Sequence
  Description of Artificial Sequence: Synthetic oligonucleotide
  Target: LAMA2; (+) strand; PAM type: NRG; PAM sequence: CAG
aaatgtgatgaattattaaa

SEQ ID NO: 153308 - DNA, 20 bp, Artificial Sequence
  Description of Artificial Sequence: Synthetic oligonucleotide
  Target: LAMA2; (+) strand; PAM type: NRG; PAM sequence: AGG
aatgtgatgaattattaaac

SEQ ID NO: 153309 - DNA, 20 bp, Artificial Sequence
  Description of Artificial Sequence: Synthetic oligonucleotide
  Target: LAMA2; (+) strand; PAM type: NRG; PAM sequence: TAG
gtgatgaattattaaacagg

SEQ ID NO: 153310 - DNA, 20 bp, Artificial Sequence
  Description of Artificial Sequence: Synthetic oligonucleotide
  Target: LAMA2; (+) strand; PAM type: NRG; PAM sequence: TGG
ttattaaacaggtagtttgt

SEQ ID NO: 153311 - DNA, 20 bp, Artificial Sequence
  Description of Artificial Sequence: Synthetic oligonucleotide
  Target: LAMA2; (+) strand; PAM type: NRG; PAM sequence: GGG
tattaaacaggtagtttgtt

SEQ ID NO: 153312 - DNA, 20 bp, Artificial Sequence
  Description of Artificial Sequence: Synthetic oligonucleotide
  Target: LAMA2; (+) strand; PAM type: NRG; PAM sequence: AAG
tgattgaaaattacctgtga

SEQ ID NO: 153313 - DNA, 20 bp, Artificial Sequence
  Description of Artificial Sequence: Synthetic oligonucleotide
  Target: LAMA2; (+) strand; PAM type: NRG; PAM sequence: GAG
attgaaaattacctgtgaaa

SEQ ID NO: 153314 - DNA, 20 bp, Artificial Sequence
  Description of Artificial Sequence: Synthetic oligonucleotide
  Target: LAMA2; (+) strand; PAM type: NRG; PAM sequence: GAG
gaaagagtgcttatctcctt

SEQ ID NO: 153315 - DNA, 20 bp, Artificial Sequence
  Description of Artificial Sequence: Synthetic oligonucleotide
  Target: LAMA2; (+) strand; PAM type: NRG; PAM sequence: AGG
aaagagtgcttatctccttg

SEQ ID NO: 153316 - DNA, 20 bp, Artificial Sequence
  Description of Artificial Sequence: Synthetic oligonucleotide
  Target: LAMA2; (+) strand; PAM type: NRG; PAM sequence: AAG
atctccttgaggcacatcga

SEQ ID NO: 153317 - DNA, 20 bp, Artificial Sequence
  Description of Artificial Sequence: Synthetic oligonucleotide
  Target: LAMA2; (+) strand; PAM type: NRG; PAM sequence: CGG
tgaggcacatcgaaagctga

SEQ ID NO: 153318 - DNA, 20 bp, Artificial Sequence
  Description of Artificial Sequence: Synthetic oligonucleotide
  Target: LAMA2; (+) strand; PAM type: NRG; PAM sequence: GAG
catcgaaagctgacggaatt

SEQ ID NO: 153319 - DNA, 20 bp, Artificial Sequence
  Description of Artificial Sequence: Synthetic oligonucleotide
  Target: LAMA2; (+) strand; PAM type: NRG; PAM sequence: TAG
gctgacggaattgagccaat

SEQ ID NO: 153320 - DNA, 20 bp, Artificial Sequence
  Description of Artificial Sequence: Synthetic oligonucleotide
  Target: LAMA2; (+) strand; PAM type: NRG; PAM sequence: GAG
agactgactgtctcttcaat

SEQ ID NO: 153321 - DNA, 20 bp, Artificial Sequence
  Description of Artificial Sequence: Synthetic oligonucleotide
  Target: LAMA2; (+) strand; PAM type: NRG; PAM sequence: TGG
aatgagttgtgacctatcaa

SEQ ID NO: 153322 - DNA, 20 bp, Artificial Sequence
  Description of Artificial Sequence: Synthetic oligonucleotide
  Target: LAMA2; (+) strand; PAM type: NRG; PAM sequence: TAG
ttgtgacctatcaatggtaa

SEQ ID NO: 153323 - DNA, 20 bp, Artificial Sequence
  Description of Artificial Sequence: Synthetic oligonucleotide
  Target: LAMA2; (+) strand; PAM type: NRG; PAM sequence: AAG
tgaacccatctctcaaactg

SEQ ID NO: 153324 - DNA, 20 bp, Artificial Sequence
  Description of Artificial Sequence: Synthetic oligonucleotide
  Target: LAMA2; (+) strand; PAM type: NRG; PAM sequence: GAG
catctctcaaactgaagcct

SEQ ID NO: 153325 - DNA, 20 bp, Artificial Sequence
  Description of Artificial Sequence: Synthetic oligonucleotide
  Target: LAMA2; (+) strand; PAM type: NRG; PAM sequence: CAG
tgaagcctgagtacacactt

SEQ ID NO: 153326 - DNA, 20 bp, Artificial Sequence
  Description of Artificial Sequence: Synthetic oligonucleotide
  Target: LAMA2; (+) strand; PAM type: NRG; PAM sequence: CAG
agcctgagtacacacttcag

SEQ ID NO: 153327 - DNA, 20 bp, Artificial Sequence
  Description of Artificial Sequence: Synthetic oligonucleotide
  Target: LAMA2; (+) strand; PAM type: NRG; PAM sequence: GAG
cagcagttgccttgaatcat

SEQ ID NO: 153328 - DNA, 20 bp, Artificial Sequence
  Description of Artificial Sequence: Synthetic oligonucleotide
  Target: LAMA2; (+) strand; PAM type: NRG; PAM sequence: AGG
agcagttgccttgaatcatg

SEQ ID NO: 153329 - DNA, 20 bp, Artificial Sequence
  Description of Artificial Sequence: Synthetic oligonucleotide
  Target: LAMA2; (+) strand; PAM type: NRG; PAM sequence: CAG
aggccattgcctctcaactt

SEQ ID NO: 153330 - DNA, 20 bp, Artificial Sequence
  Description of Artificial Sequence: Synthetic oligonucleotide
  Target: LAMA2; (+) strand; PAM type: NRG; PAM sequence: CAG
gcctctcaacttcagatcga

SEQ ID NO: 153331 - DNA, 20 bp, Artificial Sequence
  Description of Artificial Sequence: Synthetic oligonucleotide
  Target: LAMA2; (+) strand; PAM type: NRG; PAM sequence: CAG
tctcaacttcagatcgacag

SEQ ID NO: 153332 - DNA, 20 bp, Artificial Sequence
  Description of Artificial Sequence: Synthetic oligonucleotide
  Target: LAMA2; (+) strand; PAM type: NRG; PAM sequence: CAG
cttcagatcgacagcagtga

SEQ ID NO: 153333 - DNA, 20 bp, Artificial Sequence
  Description of Artificial Sequence: Synthetic oligonucleotide
  Target: LAMA2; (+) strand; PAM type: NRG; PAM sequence: CAG
atcgacagcagtgacagcca

SEQ ID NO: 153334 - DNA, 20 bp, Artificial Sequence
  Description of Artificial Sequence: Synthetic oligonucleotide
  Target: LAMA2; (+) strand; PAM type: NRG; PAM sequence: AGG
tcgacagcagtgacagccac

SEQ ID NO: 153335 - DNA, 20 bp, Artificial Sequence
  Description of Artificial Sequence: Synthetic oligonucleotide
  Target: LAMA2; (+) strand; PAM type: NRG; PAM sequence: GAG
gacagcagtgacagccacag

SEQ ID NO: 153336 - DNA, 20 bp, Artificial Sequence
  Description of Artificial Sequence: Synthetic oligonucleotide
  Target: LAMA2; (+) strand; PAM type: NRG; PAM sequence: CAG
agcagtgacagccacaggag

SEQ ID NO: 153337 - DNA, 20 bp, Artificial Sequence
  Description of Artificial Sequence: Synthetic oligonucleotide
  Target: LAMA2; (+) strand; PAM type: NRG; PAM sequence: GAG
cagtgacagccacaggagca

SEQ ID NO: 153338 - DNA, 20 bp, Artificial Sequence
  Description of Artificial Sequence: Synthetic oligonucleotide
  Target: LAMA2; (+) strand; PAM type: NRG; PAM sequence: GAG
gtgacagccacaggagcaga

SEQ ID NO: 153339 - DNA, 20 bp, Artificial Sequence
  Description of Artificial Sequence: Synthetic oligonucleotide
  Target: LAMA2; (+) strand; PAM type: NRG; PAM sequence: TAG
gagcagagagcatgcatgac

SEQ ID NO: 153340 - DNA, 20 bp, Artificial Sequence
  Description of Artificial Sequence: Synthetic oligonucleotide
  Target: LAMA2; (+) strand; PAM type: NRG; PAM sequence: CAG
agagcatgcatgactagaca

SEQ ID NO: 153341 - DNA, 20 bp, Artificial Sequence
  Description of Artificial Sequence: Synthetic oligonucleotide
  Target: LAMA2; (+) strand; PAM type: NRG; PAM sequence: CAG
acacagatgattgttttact

SEQ ID NO: 153342 - DNA, 20 bp, Artificial Sequence
  Description of Artificial Sequence: Synthetic oligonucleotide
  Target: LAMA2; (+) strand; PAM type: NRG; PAM sequence: CAG
tactcagatgaatatattta

SEQ ID NO: 153343 - DNA, 20 bp, Artificial Sequence
  Description of Artificial Sequence: Synthetic oligonucleotide
  Target: LAMA2; (+) strand; PAM type: NRG; PAM sequence: AAG
tatatttacagctatttcca

SEQ ID NO: 153344 - DNA, 20 bp, Artificial Sequence
  Description of Artificial Sequence: Synthetic oligonucleotide
  Target: LAMA2; (+) strand; PAM type: NRG; PAM sequence: CGG
tacagctatttccaaagaaa

SEQ ID NO: 153345 - DNA, 20 bp, Artificial Sequence
  Description of Artificial Sequence: Synthetic oligonucleotide
  Target: LAMA2; (+) strand; PAM type: NRG; PAM sequence: GGG
acagctatttccaaagaaac

SEQ ID NO: 153346 - DNA, 20 bp, Artificial Sequence
  Description of Artificial Sequence: Synthetic oligonucleotide
  Target: LAMA2; (+) strand; PAM type: NRG; PAM sequence: TAG
ttgtgtattcgtatctgaaa

SEQ ID NO: 153347 - DNA, 20 bp, Artificial Sequence
  Description of Artificial Sequence: Synthetic oligonucleotide
  Target: LAMA2; (+) strand; PAM type: NRG; PAM sequence: TAG
ccatatgacgtttccttcat

SEQ ID NO: 153348 - DNA, 20 bp, Artificial Sequence
  Description of Artificial Sequence: Synthetic oligonucleotide
  Target: LAMA2; (+) strand; PAM type: NRG; PAM sequence: AGG
catatgacgtttccttcatt

SEQ ID NO: 153349 - DNA, 20 bp, Artificial Sequence
  Description of Artificial Sequence: Synthetic oligonucleotide
  Target: LAMA2; (+) strand; PAM type: NRG; PAM sequence: AAG
atgacgtttccttcattagg

SEQ ID NO: 153350 - DNA, 20 bp, Artificial Sequence
  Description of Artificial Sequence: Synthetic oligonucleotide
  Target: LAMA2; (+) strand; PAM type: NRG; PAM sequence: GAG
gacgtttccttcattaggaa

SEQ ID NO: 153351 - DNA, 20 bp, Artificial Sequence
  Description of Artificial Sequence: Synthetic oligonucleotide
  Target: LAMA2; (+) strand; PAM type: NRG; PAM sequence: TGG
ttaggaagagaacccctccc

SEQ ID NO: 153352 - DNA, 20 bp, Artificial Sequence
  Description of Artificial Sequence: Synthetic oligonucleotide
  Target: LAMA2; (+) strand; PAM type: NRG; PAM sequence: TAG
agagaacccctccctggctg

SEQ ID NO: 153353 - DNA, 20 bp, Artificial Sequence
  Description of Artificial Sequence: Synthetic oligonucleotide
  Target: LAMA2; (+) strand; PAM type: NRG; PAM sequence: TGG
ctgtagcattctgaaataac

SEQ ID NO: 153354 - DNA, 20 bp, Artificial Sequence
  Description of Artificial Sequence: Synthetic oligonucleotide
  Target: LAMA2; (+) strand; PAM type: NRG; PAM sequence: AAG
tctgaaataactggattttg

SEQ ID NO: 153355 - DNA, 20 bp, Artificial Sequence
  Description of Artificial Sequence: Synthetic oligonucleotide
  Target: LAMA2; (+) strand; PAM type: NRG; PAM sequence: AGG
ctgaaataactggattttga

SEQ ID NO: 153356 - DNA, 20 bp, Artificial Sequence
  Description of Artificial Sequence: Synthetic oligonucleotide
  Target: LAMA2; (+) strand; PAM type: NRG; PAM sequence: GAG
ttttaatttctcattcttgt

SEQ ID NO: 153357 - DNA, 20 bp, Artificial Sequence
  Description of Artificial Sequence: Synthetic oligonucleotide
  Target: LAMA2; (+) strand; PAM type: NRG; PAM sequence: TGG
gtgagtaataactcaactcc

SEQ ID NO: 153358 - DNA, 20 bp, Artificial Sequence
  Description of Artificial Sequence: Synthetic oligonucleotide
  Target: LAMA2; (+) strand; PAM type: NRG; PAM sequence: AAG
taataactcaactcctggtt

SEQ ID NO: 153359 - DNA, 20 bp, Artificial Sequence
  Description of Artificial Sequence: Synthetic oligonucleotide
  Target: LAMA2; (+) strand; PAM type: NRG; PAM sequence: CAG
ctcctggttaagtaaaattt

SEQ ID NO: 153360 - DNA, 20 bp, Artificial Sequence
  Description of Artificial Sequence: Synthetic oligonucleotide
  Target: LAMA2; (+) strand; PAM type: NRG; PAM sequence: TAG
agaataaaaatattgtttta

SEQ ID NO: 153361 - DNA, 20 bp, Artificial Sequence
  Description of Artificial Sequence: Synthetic oligonucleotide
  Target: LAMA2; (+) strand; PAM type: NRG; PAM sequence: AAG
aaaaatattgttttatagta

SEQ ID NO: 153362 - DNA, 20 bp, Artificial Sequence
  Description of Artificial Sequence: Synthetic oligonucleotide
  Target: LAMA2; (+) strand; PAM type: NRG; PAM sequence: AAG
gatgcttgtaatatcaaaac

SEQ ID NO: 153363 - DNA, 20 bp, Artificial Sequence
  Description of Artificial Sequence: Synthetic oligonucleotide
  Target: LAMA2; (+) strand; PAM type: NRG; PAM sequence: TGG
ttcacattttatatttgatg

SEQ ID NO: 153364 - DNA, 20 bp, Artificial Sequence
  Description of Artificial Sequence: Synthetic oligonucleotide
  Target: LAMA2; (+) strand; PAM type: NRG; PAM sequence: GGG
tcacattttatatttgatgt

SEQ ID NO: 153365 - DNA, 20 bp, Artificial Sequence
  Description of Artificial Sequence: Synthetic oligonucleotide
  Target: LAMA2; (+) strand; PAM type: NRG; PAM sequence: TGG
attttatatttgatgtgggt

SEQ ID NO: 153366 - DNA, 20 bp, Artificial Sequence
  Description of Artificial Sequence: Synthetic oligonucleotide
  Target: LAMA2; (+) strand; PAM type: NRG; PAM sequence: GAG
tttatatttgatgtgggttg

SEQ ID NO: 153367 - DNA, 20 bp, Artificial Sequence
  Description of Artificial Sequence: Synthetic oligonucleotide
  Target: LAMA2; (+) strand; PAM type: NRG; PAM sequence: AGG
ttatatttgatgtgggttgg

SEQ ID NO: 153368 - DNA, 20 bp, Artificial Sequence
  Description of Artificial Sequence: Synthetic oligonucleotide
  Target: LAMA2; (+) strand; PAM type: NRG; PAM sequence: GAG
atatttgatgtgggttggag

SEQ ID NO: 153369 - DNA, 20 bp, Artificial Sequence
  Description of Artificial Sequence: Synthetic oligonucleotide
  Target: LAMA2; (+) strand; PAM type: NRG; PAM sequence: TAG
tgtgggttggaggagcccct

SEQ ID NO: 153370 - DNA, 20 bp, Artificial Sequence
  Description of Artificial Sequence: Synthetic oligonucleotide
  Target: LAMA2; (+) strand; PAM type: NRG; PAM sequence: GAG
tgggttggaggagcccctta

SEQ ID NO: 153371 - DNA, 20 bp, Artificial Sequence
  Description of Artificial Sequence: Synthetic oligonucleotide
  Target: LAMA2; (+) strand; PAM type: NRG; PAM sequence: TAG
tagagattcttttttctttg

SEQ ID NO: 153372 - DNA, 20 bp, Artificial Sequence
  Description of Artificial Sequence: Synthetic oligonucleotide
  Target: LAMA2; (+) strand; PAM type: NRG; PAM sequence: GAG
gagattcttttttctttgta

SEQ ID NO: 153373 - DNA, 20 bp, Artificial Sequence
  Description of Artificial Sequence: Synthetic oligonucleotide
  Target: LAMA2; (+) strand; PAM type: NRG; PAM sequence: AAG
attcttttttctttgtagag

SEQ ID NO: 153374 - DNA, 20 bp, Artificial Sequence
  Description of Artificial Sequence: Synthetic oligonucleotide
  Target: LAMA2; (+) strand; PAM type: NRG; PAM sequence: TAG
ttctttgtagagaagttttg

SEQ ID NO: 153375 - DNA, 20 bp, Artificial Sequence
  Description of Artificial Sequence: Synthetic oligonucleotide
  Target: LAMA2; (+) strand; PAM type: NRG; PAM sequence: GAG
ctttgtagagaagttttgta

SEQ ID NO: 153376 - DNA, 20 bp, Artificial Sequence
  Description of Artificial Sequence: Synthetic oligonucleotide
  Target: LAMA2; (+) strand; PAM type: NRG; PAM sequence: TAG
agaagttttgtagagatcaa

SEQ ID NO: 153377 - DNA, 20 bp, Artificial Sequence
  Description of Artificial Sequence: Synthetic oligonucleotide
  Target: LAMA2; (+) strand; PAM type: NRG; PAM sequence: AAG
tttgtagagatcaatagtgt

SEQ ID NO: 153378 - DNA, 20 bp, Artificial Sequence
  Description of Artificial Sequence: Synthetic oligonucleotide
  Target: LAMA2; (+) strand; PAM type: NRG; PAM sequence: AAG
caatagtgtaagaatcatac

SEQ ID NO: 153379 - DNA, 20 bp, Artificial Sequence
  Description of Artificial Sequence: Synthetic oligonucleotide
  Target: LAMA2; (+) strand; PAM type: NRG; PAM sequence: TAG
aagaatcatacaagtgtaaa

SEQ ID NO: 153380 - DNA, 20 bp, Artificial Sequence
  Description of Artificial Sequence: Synthetic oligonucleotide
  Target: LAMA2; (+) strand; PAM type: NRG; PAM sequence: AAG
aaaatatttgaaaattcttt

SEQ ID NO: 153381 - DNA, 20 bp, Artificial Sequence
  Description of Artificial Sequence: Synthetic oligonucleotide
  Target: LAMA2; (+) strand; PAM type: NRG; PAM sequence: TAG
atatttgaaaattctttaag

SEQ ID NO: 153382 - DNA, 20 bp, Artificial Sequence
  Description of Artificial Sequence: Synthetic oligonucleotide
  Target: LAMA2; (+) strand; PAM type: NRG; PAM sequence: TGG
tttaagtagttactgaaatt

SEQ ID NO: 153383 - DNA, 20 bp, Artificial Sequence
  Description of Artificial Sequence: Synthetic oligonucleotide
  Target: LAMA2; (+) strand; PAM type: NRG; PAM sequence: AAG
agtagttactgaaatttggt

SEQ ID NO: 153384 - DNA, 20 bp, Artificial Sequence
  Description of Artificial Sequence: Synthetic oligonucleotide
  Target: LAMA2; (+) strand; PAM type: NRG; PAM sequence: TAG
tatattgatacattttgttt

SEQ ID NO: 153385 - DNA, 20 bp, Artificial Sequence
  Description of Artificial Sequence: Synthetic oligonucleotide
  Target: LAMA2; (+) strand; PAM type: NRG; PAM sequence: AAG
attgatacattttgttttag

SEQ ID NO: 153386 - DNA, 20 bp, Artificial Sequence
  Description of Artificial Sequence: Synthetic oligonucleotide
  Target: LAMA2; (+) strand; PAM type: NRG; PAM sequence: TAG
acattttgttttagaagaat

SEQ ID NO: 153387 - DNA, 20 bp, Artificial Sequence
  Description of Artificial Sequence: Synthetic oligonucleotide
  Target: LAMA2; (+) strand; PAM type: NRG; PAM sequence: AGG
cattttgttttagaagaatt

SEQ ID NO: 153388 - DNA, 20 bp, Artificial Sequence
  Description of Artificial Sequence: Synthetic oligonucleotide
  Target: LAMA2; (+) strand; PAM type: NRG; PAM sequence: GAG
ttttgttttagaagaattag

SEQ ID NO: 153389 - DNA, 20 bp, Artificial Sequence
  Description of Artificial Sequence: Synthetic oligonucleotide
  Target: LAMA2; (+) strand; PAM type: NRG; PAM sequence: AAG
tttagaagaattaggagcaa

SEQ ID NO: 153390 - DNA, 20 bp, Artificial Sequence
  Description of Artificial Sequence: Synthetic oligonucleotide
  Target: LAMA2; (+) strand; PAM type: NRG; PAM sequence: AGG
ttagaagaattaggagcaaa

SEQ ID NO: 153391 - DNA, 20 bp, Artificial Sequence
  Description of Artificial Sequence: Synthetic oligonucleotide
  Target: LAMA2; (+) strand; PAM type: NRG; PAM sequence: GGG
tagaagaattaggagcaaaa

SEQ ID NO: 153392 - DNA, 20 bp, Artificial Sequence
  Description of Artificial Sequence: Synthetic oligonucleotide
  Target: LAMA2; (+) strand; PAM type: NRG; PAM sequence: CAG
tataatgaaatacaatcttc

SEQ ID NO: 153393 - DNA, 20 bp, Artificial Sequence
  Description of Artificial Sequence: Synthetic oligonucleotide
  Target: LAMA2; (+) strand; PAM type: NRG; PAM sequence: AAG
acaatcttccagttcctaat

SEQ ID NO: 153394 - DNA, 20 bp, Artificial Sequence
  Description of Artificial Sequence: Synthetic oligonucleotide
  Target: LAMA2; (+) strand; PAM type: NRG; PAM sequence: TAG
ttccagttcctaataagtat

SEQ ID NO: 153395 - DNA, 20 bp, Artificial Sequence
  Description of Artificial Sequence: Synthetic oligonucleotide
  Target: LAMA2; (+) strand; PAM type: NRG; PAM sequence: TAG
aataagtattagacacctgt

SEQ ID NO: 153396 - DNA, 20 bp, Artificial Sequence
  Description of Artificial Sequence: Synthetic oligonucleotide
  Target: LAMA2; (+) strand; PAM type: NRG; PAM sequence: GAG
aacttcccaaaaatacccct

SEQ ID NO: 153397 - DNA, 20 bp, Artificial Sequence
  Description of Artificial Sequence: Synthetic oligonucleotide
  Target: LAMA2; (+) strand; PAM type: NRG; PAM sequence: TGG
tgagaaaaaaaaaaacctgt

SEQ ID NO: 153398 - DNA, 20 bp, Artificial Sequence
  Description of Artificial Sequence: Synthetic oligonucleotide
  Target: LAMA2; (+) strand; PAM type: NRG; PAM sequence: AAG
aaaaaaaaaacctgttggtc

SEQ ID NO: 153399 - DNA, 20 bp, Artificial Sequence
  Description of Artificial Sequence: Synthetic oligonucleotide
  Target: LAMA2; (+) strand; PAM type: NRG; PAM sequence: AAG
aaaaaacctgttggtcaaga

SEQ ID NO: 153400 - DNA, 20 bp, Artificial Sequence
  Description of Artificial Sequence: Synthetic oligonucleotide
  Target: LAMA2; (+) strand; PAM type: NRG; PAM sequence: AAG
gttggtcaagaaagttcacg

SEQ ID NO: 153401 - DNA, 20 bp, Artificial Sequence
  Description of Artificial Sequence: Synthetic oligonucleotide
  Target: LAMA2; (+) strand; PAM type: NRG; PAM sequence: CAG
gaaagttcacgaagttatta

SEQ ID NO: 153402 - DNA, 20 bp, Artificial Sequence
  Description of Artificial Sequence: Synthetic oligonucleotide
  Target: LAMA2; (+) strand; PAM type: NRG; PAM sequence: AAG
acgaagttattacagtaaac

SEQ ID NO: 153403 - DNA, 20 bp, Artificial Sequence
  Description of Artificial Sequence: Synthetic oligonucleotide
  Target: LAMA2; (+) strand; PAM type: NRG; PAM sequence: TAG
gaacatcaccttgatattct

SEQ ID NO: 153404 - DNA, 20 bp, Artificial Sequence
  Description of Artificial Sequence: Synthetic oligonucleotide
  Target: LAMA2; (+) strand; PAM type: NRG; PAM sequence: CAG
tgatattcttagtaatgtct

SEQ ID NO: 153405 - DNA, 20 bp, Artificial Sequence
  Description of Artificial Sequence: Synthetic oligonucleotide
  Target: LAMA2; (+) strand; PAM type: NRG; PAM sequence: AAG
tattcttagtaatgtctcag

SEQ ID NO: 153406 - DNA, 20 bp, Artificial Sequence
  Description of Artificial Sequence: Synthetic oligonucleotide
  Target: LAMA2; (+) strand; PAM type: NRG; PAM sequence: AGG
attcttagtaatgtctcaga

SEQ ID NO: 153407 - DNA, 20 bp, Artificial Sequence
  Description of Artificial Sequence: Synthetic oligonucleotide
  Target: LAMA2; (+) strand; PAM type: NRG; PAM sequence: GAG
ttagtaatgtctcagaaggt

SEQ ID NO: 153408 - DNA, 20 bp, Artificial Sequence
  Description of Artificial Sequence: Synthetic oligonucleotide
  Target: LAMA2; (+) strand; PAM type: NRG; PAM sequence: AGG
tagtaatgtctcagaaggtg

SEQ ID NO: 153409 - DNA, 20 bp, Artificial Sequence
  Description of Artificial Sequence: Synthetic oligonucleotide
  Target: LAMA2; (+) strand; PAM type: NRG; PAM sequence: GGG
agtaatgtctcagaaggtga

SEQ ID NO: 153410 - DNA, 20 bp, Artificial Sequence
  Description of Artificial Sequence: Synthetic oligonucleotide
  Target: LAMA2; (+) strand; PAM type: NRG; PAM sequence: CAG
atgtctcagaaggtgagggt

SEQ ID NO: 153411 - DNA, 20 bp, Artificial Sequence
  Description of Artificial Sequence: Synthetic oligonucleotide
  Target: LAMA2; (+) strand; PAM type: NRG; PAM sequence: AGG
tgtctcagaaggtgagggtc

SEQ ID NO: 153412 - DNA, 20 bp, Artificial Sequence
  Description of Artificial Sequence: Synthetic oligonucleotide
  Target: LAMA2; (+) strand; PAM type: NRG; PAM sequence: GGG
gtctcagaaggtgagggtca

SEQ ID NO: 153413 - DNA, 20 bp, Artificial Sequence
  Description of Artificial Sequence: Synthetic oligonucleotide
  Target: LAMA2; (+) strand; PAM type: NRG; PAM sequence: GGG
tctcagaaggtgagggtcag

SEQ ID NO: 153414 - DNA, 20 bp, Artificial Sequence
  Description of Artificial Sequence: Synthetic oligonucleotide
  Target: LAMA2; (+) strand; PAM type: NRG; PAM sequence: AAG
cagaaggtgagggtcagggg

SEQ ID NO: 153415 - DNA, 20 bp, Artificial Sequence
  Description of Artificial Sequence: Synthetic oligonucleotide
  Target: LAMA2; (+) strand; PAM type: NRG; PAM sequence: CAG
gggtcaggggaagatattta

SEQ ID NO: 153416 - DNA, 20 bp, Artificial Sequence
  Description of Artificial Sequence: Synthetic oligonucleotide
  Target: LAMA2; (+) strand; PAM type: NRG; PAM sequence: AGG
ggtcaggggaagatatttac

SEQ ID NO: 153417 - DNA, 20 bp, Artificial Sequence
  Description of Artificial Sequence: Synthetic oligonucleotide
  Target: LAMA2; (+) strand; PAM type: NRG; PAM sequence: TAG
gggaagatatttacaggctt

SEQ ID NO: 153418 - DNA, 20 bp, Artificial Sequence
  Description of Artificial Sequence: Synthetic oligonucleotide
  Target: LAMA2; (+) strand; PAM type: NRG; PAM sequence: AGG
ggaagatatttacaggcttt

SEQ ID NO: 153419 - DNA, 20 bp, Artificial Sequence
  Description of Artificial Sequence: Synthetic oligonucleotide
  Target: LAMA2; (+) strand; PAM type: NRG; PAM sequence: GGG
gaagatatttacaggcttta

SEQ ID NO: 153420 - DNA, 20 bp, Artificial Sequence
  Description of Artificial Sequence: Synthetic oligonucleotide
  Target: LAMA2; (+) strand; PAM type: NRG; PAM sequence: AAG
tatttacaggctttagggaa

SEQ ID NO: 153421 - DNA, 20 bp, Artificial Sequence
  Description of Artificial Sequence: Synthetic oligonucleotide
  Target: LAMA2; (+) strand; PAM type: NRG; PAM sequence: AGG
atttacaggctttagggaaa

SEQ ID NO: 153422 - DNA, 20 bp, Artificial Sequence
  Description of Artificial Sequence: Synthetic oligonucleotide
  Target: LAMA2; (+) strand; PAM type: NRG; PAM sequence: TGG
acaggctttagggaaaaggc

SEQ ID NO: 153423 - DNA, 20 bp, Artificial Sequence
  Description of Artificial Sequence: Synthetic oligonucleotide
  Target: LAMA2; (+) strand; PAM type: NRG; PAM sequence: AAG
ggaaaaggctggttgatttc

SEQ ID NO: 153424 - DNA, 20 bp, Artificial Sequence
  Description of Artificial Sequence: Synthetic oligonucleotide
  Target: LAMA2; (+) strand; PAM type: NRG; PAM sequence: AGG
gaaaaggctggttgatttca

SEQ ID NO: 153425 - DNA, 20 bp, Artificial Sequence
  Description of Artificial Sequence: Synthetic oligonucleotide
  Target: LAMA2; (+) strand; PAM type: NRG; PAM sequence: GAG
ttgatttcaaggcaaatctt

SEQ ID NO: 153426 - DNA, 20 bp, Artificial Sequence
  Description of Artificial Sequence: Synthetic oligonucleotide
  Target: LAMA2; (+) strand; PAM type: NRG; PAM sequence: GAG
tttcaaggcaaatcttgagt

SEQ ID NO: 153427 - DNA, 20 bp, Artificial Sequence
  Description of Artificial Sequence: Synthetic oligonucleotide
  Target: LAMA2; (+) strand; PAM type: NRG; PAM sequence: GAG
tcaaggcaaatcttgagtga

SEQ ID NO: 153428 - DNA, 20 bp, Artificial Sequence
  Description of Artificial Sequence: Synthetic oligonucleotide
  Target: LAMA2; (+) strand; PAM type: NRG; PAM sequence: AGG
caaggcaaatcttgagtgag

SEQ ID NO: 153429 - DNA, 20 bp, Artificial Sequence
  Description of Artificial Sequence: Synthetic oligonucleotide
  Target: LAMA2; (+) strand; PAM type: NRG; PAM sequence: GGG
aaggcaaatcttgagtgaga

SEQ ID NO: 153430 - DNA, 20 bp, Artificial Sequence
  Description of Artificial Sequence: Synthetic oligonucleotide
  Target: LAMA2; (+) strand; PAM type: NRG; PAM sequence: TGG
aatcttgagtgagagggaac

SEQ ID NO: 153431 - DNA, 20 bp, Artificial Sequence
  Description of Artificial Sequence: Synthetic oligonucleotide
  Target: LAMA2; (+) strand; PAM type: NRG; PAM sequence: TGG
ttgagtgagagggaactggt

SEQ ID NO: 153432 - DNA, 20 bp, Artificial Sequence
  Description of Artificial Sequence: Synthetic oligonucleotide
  Target: LAMA2; (+) strand; PAM type: NRG; PAM sequence: GGG
tgagtgagagggaactggtt

SEQ ID NO: 153433 - DNA, 20 bp, Artificial Sequence
  Description of Artificial Sequence: Synthetic oligonucleotide
  Target: LAMA2; (+) strand; PAM type: NRG; PAM sequence: CAG
gggaactggttgggattctg

SEQ ID NO: 153434 - DNA, 20 bp, Artificial Sequence
  Description of Artificial Sequence: Synthetic oligonucleotide
  Target: LAMA2; (+) strand; PAM type: NRG; PAM sequence: AGG
ggaactggttgggattctgc

SEQ ID NO: 153435 - DNA, 20 bp, Artificial Sequence
  Description of Artificial Sequence: Synthetic oligonucleotide
  Target: LAMA2; (+) strand; PAM type: NRG; PAM sequence: GGG
gaactggttgggattctgca

SEQ ID NO: 153436 - DNA, 20 bp, Artificial Sequence
  Description of Artificial Sequence: Synthetic oligonucleotide
  Target: LAMA2; (+) strand; PAM type: NRG; PAM sequence: TAG
ctgcagggtttattatataa

SEQ ID NO: 153437 - DNA, 20 bp, Artificial Sequence
  Description of Artificial Sequence: Synthetic oligonucleotide
  Target: LAMA2; (+) strand; PAM type: NRG; PAM sequence: TGG
ggtttattatataatagttt

SEQ ID NO: 153438 - DNA, 20 bp, Artificial Sequence
  Description of Artificial Sequence: Synthetic oligonucleotide
  Target: LAMA2; (+) strand; PAM type: NRG; PAM sequence: CAG
aatagttttggatttgtcac

SEQ ID NO: 153439 - DNA, 20 bp, Artificial Sequence
  Description of Artificial Sequence: Synthetic oligonucleotide
  Target: LAMA2; (+) strand; PAM type: NRG; PAM sequence: GAG
tagttttggatttgtcacca

SEQ ID NO: 153440 - DNA, 20 bp, Artificial Sequence
  Description of Artificial Sequence: Synthetic oligonucleotide
  Target: LAMA2; (+) strand; PAM type: NRG; PAM sequence: AAG
accagagtgaacaaacattg

SEQ ID NO: 153441 - DNA, 20 bp, Artificial Sequence
  Description of Artificial Sequence: Synthetic oligonucleotide
  Target: LAMA2; (+) strand; PAM type: NRG; PAM sequence: GAG
aacattgaagaacatgttat

SEQ ID NO: 153442 - DNA, 20 bp, Artificial Sequence
  Description of Artificial Sequence: Synthetic oligonucleotide
  Target: LAMA2; (+) strand; PAM type: NRG; PAM sequence: AAG
agaacatgttatgagtctat

SEQ ID NO: 153443 - DNA, 20 bp, Artificial Sequence
  Description of Artificial Sequence: Synthetic oligonucleotide
  Target: LAMA2; (+) strand; PAM type: NRG; PAM sequence: AGG
gaacatgttatgagtctata

SEQ ID NO: 153444 - DNA, 20 bp, Artificial Sequence
  Description of Artificial Sequence: Synthetic oligonucleotide
  Target: LAMA2; (+) strand; PAM type: NRG; PAM sequence: AAG
catgttatgagtctataagg

SEQ ID NO: 153445 - DNA, 20 bp, Artificial Sequence
  Description of Artificial Sequence: Synthetic oligonucleotide
  Target: LAMA2; (+) strand; PAM type: NRG; PAM sequence: TAG
ttatgagtctataaggaagt

SEQ ID NO: 153446 - DNA, 20 bp, Artificial Sequence
  Description of Artificial Sequence: Synthetic oligonucleotide
  Target: LAMA2; (+) strand; PAM type: NRG; PAM sequence: TAG
agtctataaggaagttagct

SEQ ID NO: 153447 - DNA, 20 bp, Artificial Sequence
  Description of Artificial Sequence: Synthetic oligonucleotide
  Target: LAMA2; (+) strand; PAM type: NRG; PAM sequence: TGG
tataaggaagttagcttaga

SEQ ID NO: 153448 - DNA, 20 bp, Artificial Sequence
  Description of Artificial Sequence: Synthetic oligonucleotide
  Target: LAMA2; (+) strand; PAM type: NRG; PAM sequence: CAG
aagttagcttagatggatca

SEQ ID NO: 153449 - DNA, 20 bp, Artificial Sequence
  Description of Artificial Sequence: Synthetic oligonucleotide
  Target: LAMA2; (+) strand; PAM type: NRG; PAM sequence: GAG
gttagcttagatggatcaca

SEQ ID NO: 153450 - DNA, 20 bp, Artificial Sequence
  Description of Artificial Sequence: Synthetic oligonucleotide
  Target: LAMA2; (+) strand; PAM type: NRG; PAM sequence: CAG
agcttagatggatcacagag

SEQ ID NO: 153451 - DNA, 20 bp, Artificial Sequence
  Description of Artificial Sequence: Synthetic oligonucleotide
  Target: LAMA2; (+) strand; PAM type: NRG; PAM sequence: AAG
agatggatcacagagcagac

SEQ ID NO: 153452 - DNA, 20 bp, Artificial Sequence
  Description of Artificial Sequence: Synthetic oligonucleotide
  Target: LAMA2; (+) strand; PAM type: NRG; PAM sequence: AGG
gatggatcacagagcagaca

SEQ ID NO: 153453 - DNA, 20 bp, Artificial Sequence
  Description of Artificial Sequence: Synthetic oligonucleotide
  Target: LAMA2; (+) strand; PAM type: NRG; PAM sequence: TGG
cagagcagacaaggttttct

SEQ ID NO: 153454 - DNA, 20 bp, Artificial Sequence
  Description of Artificial Sequence: Synthetic oligonucleotide
  Target: LAMA2; (+) strand; PAM type: NRG; PAM sequence: GAG
gagcagacaaggttttcttg

SEQ ID NO: 153455 - DNA, 20 bp, Artificial Sequence
  Description of Artificial Sequence: Synthetic oligonucleotide
  Target: LAMA2; (+) strand; PAM type: NRG; PAM sequence: CAG
gttttcttggagattgctca

SEQ ID NO: 153456 - DNA, 20 bp, Artificial Sequence
  Description of Artificial Sequence: Synthetic oligonucleotide
  Target: LAMA2; (+) strand; PAM type: NRG; PAM sequence: TAG
tgctcacagcattcttaaaa

SEQ ID NO: 153457 - DNA, 20 bp, Artificial Sequence
  Description of Artificial Sequence: Synthetic oligonucleotide
  Target: LAMA2; (+) strand; PAM type: NRG; PAM sequence: AGG
gctcacagcattcttaaaat

SEQ ID NO: 153458 - DNA, 20 bp, Artificial Sequence
  Description of Artificial Sequence: Synthetic oligonucleotide
  Target: LAMA2; (+) strand; PAM type: NRG; PAM sequence: GGG
ctcacagcattcttaaaata

SEQ ID NO: 153459 - DNA, 20 bp, Artificial Sequence
  Description of Artificial Sequence: Synthetic oligonucleotide
  Target: LAMA2; (+) strand; PAM type: NRG; PAM sequence: GGG
tcacagcattcttaaaatag

SEQ ID NO: 153460 - DNA, 20 bp, Artificial Sequence
  Description of Artificial Sequence: Synthetic oligonucleotide
  Target: LAMA2; (+) strand; PAM type: NRG; PAM sequence: GGG
cacagcattcttaaaatagg

SEQ ID NO: 153461 - DNA, 20 bp, Artificial Sequence
  Description of Artificial Sequence: Synthetic oligonucleotide
  Target: LAMA2; (+) strand; PAM type: NRG; PAM sequence: TGG
agcattcttaaaataggggg

SEQ ID NO: 153462 - DNA, 20 bp, Artificial Sequence
  Description of Artificial Sequence: Synthetic oligonucleotide
  Target: LAMA2; (+) strand; PAM type: NRG; PAM sequence: CAG
gtggacatttttcttactcc

SEQ ID NO: 153463 - DNA, 20 bp, Artificial Sequence
  Description of Artificial Sequence: Synthetic oligonucleotide
  Target: LAMA2; (+) strand; PAM type: NRG; PAM sequence: TAG
ttcttactcccagcattatt

SEQ ID NO: 153464 - DNA, 20 bp, Artificial Sequence
  Description of Artificial Sequence: Synthetic oligonucleotide
  Target: LAMA2; (+) strand; PAM type: NRG; PAM sequence: CAG
actcccagcattatttagca

SEQ ID NO: 153465 - DNA, 20 bp, Artificial Sequence
  Description of Artificial Sequence: Synthetic oligonucleotide
  Target: LAMA2; (+) strand; PAM type: NRG; PAM sequence: AGG
ctcccagcattatttagcac

SEQ ID NO: 153466 - DNA, 20 bp, Artificial Sequence
  Description of Artificial Sequence: Synthetic oligonucleotide
  Target: LAMA2; (+) strand; PAM type: NRG; PAM sequence: AAG
cagcattatttagcacagga

SEQ ID NO: 153467 - DNA, 20 bp, Artificial Sequence
  Description of Artificial Sequence: Synthetic oligonucleotide
  Target: LAMA2; (+) strand; PAM type: NRG; PAM sequence: AGG
agcattatttagcacaggaa

SEQ ID NO: 153468 - DNA, 20 bp, Artificial Sequence
  Description of Artificial Sequence: Synthetic oligonucleotide
  Target: LAMA2; (+) strand; PAM type: NRG; PAM sequence: TAG
cacaggaaaggaaattgtgt

SEQ ID NO: 153469 - DNA, 20 bp, Artificial Sequence
  Description of Artificial Sequence: Synthetic oligonucleotide
  Target: LAMA2; (+) strand; PAM type: NRG; PAM sequence: TAG
aaaggaaattgtgttagcgt

SEQ ID NO: 153470 - DNA, 20 bp, Artificial Sequence
  Description of Artificial Sequence: Synthetic oligonucleotide
  Target: LAMA2; (+) strand; PAM type: NRG; PAM sequence: AAG
ggaaattgtgttagcgttag

SEQ ID NO: 153471 - DNA, 20 bp, Artificial Sequence
  Description of Artificial Sequence: Synthetic oligonucleotide
  Target: LAMA2; (+) strand; PAM type: NRG; PAM sequence: TAG
agaagaaattgtgtttgctt

SEQ ID NO: 153472 - DNA, 20 bp, Artificial Sequence
  Description of Artificial Sequence: Synthetic oligonucleotide
  Target: LAMA2; (+) strand; PAM type: NRG; PAM sequence: CAG
tgtgtttgctttagttctta

SEQ ID NO: 153473 - DNA, 20 bp, Artificial Sequence
  Description of Artificial Sequence: Synthetic oligonucleotide
  Target: LAMA2; (+) strand; PAM type: NRG; PAM sequence: TAG
taatatgaatacctacttta

SEQ ID NO: 153474 - DNA, 20 bp, Artificial Sequence
  Description of Artificial Sequence: Synthetic oligonucleotide
  Target: LAMA2; (+) strand; PAM type: NRG; PAM sequence: GAG
ctactttatagtgttatttt

SEQ ID NO: 153475 - DNA, 20 bp, Artificial Sequence
  Description of Artificial Sequence: Synthetic oligonucleotide
  Target: LAMA2; (+) strand; PAM type: NRG; PAM sequence: AGG
tactttatagtgttattttg

SEQ ID NO: 153476 - DNA, 20 bp, Artificial Sequence
  Description of Artificial Sequence: Synthetic oligonucleotide
  Target: LAMA2; (+) strand; PAM type: NRG; PAM sequence: GGG
actttatagtgttattttga

SEQ ID NO: 153477 - DNA, 20 bp, Artificial Sequence
  Description of Artificial Sequence: Synthetic oligonucleotide
  Target: LAMA2; (+) strand; PAM type: NRG; PAM sequence: GAG
tgttattttgagggttaaat

SEQ ID NO: 153478 - DNA, 20 bp, Artificial Sequence
  Description of Artificial Sequence: Synthetic oligonucleotide
  Target: LAMA2; (+) strand; PAM type: NRG; PAM sequence: CAG
taaatgagttaacacatatg

SEQ ID NO: 153479 - DNA, 20 bp, Artificial Sequence
  Description of Artificial Sequence: Synthetic oligonucleotide
  Target: LAMA2; (+) strand; PAM type: NRG; PAM sequence: AAG
ttaacacatatgcagtactc

SEQ ID NO: 153480 - DNA, 20 bp, Artificial Sequence
  Description of Artificial Sequence: Synthetic oligonucleotide
  Target: LAMA2; (+) strand; PAM type: NRG; PAM sequence: TGG
cacatatgcagtactcaaga

SEQ ID NO: 153481 - DNA, 20 bp, Artificial Sequence
  Description of Artificial Sequence: Synthetic oligonucleotide
  Target: LAMA2; (+) strand; PAM type: NRG; PAM sequence: AAG
agatggtgtctgaaaatgat

SEQ ID NO: 153482 - DNA, 20 bp, Artificial Sequence
  Description of Artificial Sequence: Synthetic oligonucleotide
  Target: LAMA2; (+) strand; PAM type: NRG; PAM sequence: TGG
gtctgaaaatgataagcatt

SEQ ID NO: 153483 - DNA, 20 bp, Artificial Sequence
  Description of Artificial Sequence: Synthetic oligonucleotide
  Target: LAMA2; (+) strand; PAM type: NRG; PAM sequence: TAG
aaatgataagcatttggtat

SEQ ID NO: 153484 - DNA, 20 bp, Artificial Sequence
  Description of Artificial Sequence: Synthetic oligonucleotide
  Target: LAMA2; (+) strand; PAM type: NRG; PAM sequence: TGG
ctattattattaactccaac

SEQ ID NO: 153485 - DNA, 20 bp, Artificial Sequence
  Description of Artificial Sequence: Synthetic oligonucleotide
  Target: LAMA2; (+) strand; PAM type: NRG; PAM sequence: GGG
tattattattaactccaact

SEQ ID NO: 153486 - DNA, 20 bp, Artificial Sequence
  Description of Artificial Sequence: Synthetic oligonucleotide
  Target: LAMA2; (+) strand; PAM type: NRG; PAM sequence: GAG
actccaactgggcttaattt

SEQ ID NO: 153487 - DNA, 20 bp, Artificial Sequence
  Description of Artificial Sequence: Synthetic oligonucleotide
  Target: LAMA2; (+) strand; PAM type: NRG; PAM sequence: AGG
ctccaactgggcttaatttg

SEQ ID NO: 153488 - DNA, 20 bp, Artificial Sequence
  Description of Artificial Sequence: Synthetic oligonucleotide
  Target: LAMA2; (+) strand; PAM type: NRG; PAM sequence: CAG
aactgggcttaatttgaggt

SEQ ID NO: 153489 - DNA, 20 bp, Artificial Sequence
  Description of Artificial Sequence: Synthetic oligonucleotide
  Target: LAMA2; (+) strand; PAM type: NRG; PAM sequence: AGG
actgggcttaatttgaggtc

SEQ ID NO: 153490 - DNA, 20 bp, Artificial Sequence
  Description of Artificial Sequence: Synthetic oligonucleotide
  Target: LAMA2; (+) strand; PAM type: NRG; PAM sequence: TAG
gcattattttgttgaaattt

SEQ ID NO: 153491 - DNA, 20 bp, Artificial Sequence
  Description of Artificial Sequence: Synthetic oligonucleotide
  Target: LAMA2; (+) strand; PAM type: NRG; PAM sequence: AAG
tattttgttgaaattttaga

SEQ ID NO: 153492 - DNA, 20 bp, Artificial Sequence
  Description of Artificial Sequence: Synthetic oligonucleotide
  Target: LAMA2; (+) strand; PAM type: NRG; PAM sequence: CAG
agactcccctcacacataaa

SEQ ID NO: 153493 - DNA, 20 bp, Artificial Sequence
  Description of Artificial Sequence: Synthetic oligonucleotide
  Target: LAMA2; (+) strand; PAM type: NRG; PAM sequence: CAG
tcccctcacacataaacaga

SEQ ID NO: 153494 - DNA, 20 bp, Artificial Sequence
  Description of Artificial Sequence: Synthetic oligonucleotide
  Target: LAMA2; (+) strand; PAM type: NRG; PAM sequence: AAG
ctcacacataaacagacaga

SEQ ID NO: 153495 - DNA, 20 bp, Artificial Sequence
  Description of Artificial Sequence: Synthetic oligonucleotide
  Target: LAMA2; (+) strand; PAM type: NRG; PAM sequence: GAG
cacacataaacagacagaaa

SEQ ID NO: 153496 - DNA, 20 bp, Artificial Sequence
  Description of Artificial Sequence: Synthetic oligonucleotide
  Target: LAMA2; (+) strand; PAM type: NRG; PAM sequence: GAG
cacataaacagacagaaaga

SEQ ID NO: 153497 - DNA, 20 bp, Artificial Sequence
  Description of Artificial Sequence: Synthetic oligonucleotide
  Target: LAMA2; (+) strand; PAM type: NRG; PAM sequence: GAG
cataaacagacagaaagaga

SEQ ID NO: 153498 - DNA, 20 bp, Artificial Sequence
  Description of Artificial Sequence: Synthetic oligonucleotide
  Target: LAMA2; (+) strand; PAM type: NRG; PAM sequence: GAG
taaacagacagaaagagaga

SEQ ID NO: 153499 - DNA, 20 bp, Artificial Sequence
  Description of Artificial Sequence: Synthetic oligonucleotide
  Target: LAMA2; (+) strand; PAM type: NRG; PAM sequence: AGG
aaacagacagaaagagagag

SEQ ID NO: 153500 - DNA, 20 bp, Artificial Sequence
  Description of Artificial Sequence: Synthetic oligonucleotide
  Target: LAMA2; (+) strand; PAM type: NRG; PAM sequence: AAG
cagacagaaagagagagagg

SEQ ID NO: 153501 - DNA, 20 bp, Artificial Sequence
  Description of Artificial Sequence: Synthetic oligonucleotide
  Target: LAMA2; (+) strand; PAM type: NRG; PAM sequence: AAG
cagaaagagagagaggaaga

SEQ ID NO: 153502 - DNA, 20 bp, Artificial Sequence
  Description of Artificial Sequence: Synthetic oligonucleotide
  Target: LAMA2; (+) strand; PAM type: NRG; PAM sequence: AAG
aaagagagagaggaagaaag

SEQ ID NO: 153503 - DNA, 20 bp, Artificial Sequence
  Description of Artificial Sequence: Synthetic oligonucleotide
  Target: LAMA2; (+) strand; PAM type: NRG; PAM sequence: AAG
gagagaggaagaaagaagaa

SEQ ID NO: 153504 - DNA, 20 bp, Artificial Sequence
  Description of Artificial Sequence: Synthetic oligonucleotide
  Target: LAMA2; (+) strand; PAM type: NRG; PAM sequence: GAG
gagaggaagaaagaagaaaa

SEQ ID NO: 153505 - DNA, 20 bp, Artificial Sequence
  Description of Artificial Sequence: Synthetic oligonucleotide
  Target: LAMA2; (+) strand; PAM type: NRG; PAM sequence: GAG
gaggaagaaagaagaaaaga

SEQ ID NO: 153506 - DNA, 20 bp, Artificial Sequence
  Description of Artificial Sequence: Synthetic oligonucleotide
  Target: LAMA2; (+) strand; PAM type: NRG; PAM sequence: GAG
ggaagaaagaagaaaagaga

SEQ ID NO: 153507 - DNA, 20 bp, Artificial Sequence
  Description of Artificial Sequence: Synthetic oligonucleotide
  Target: LAMA2; (+) strand; PAM type: NRG; PAM sequence: TAG
gaaagaagaaaagagagaga

SEQ ID NO: 153508 - DNA, 20 bp, Artificial Sequence
  Description of Artificial Sequence: Synthetic oligonucleotide
  Target: LAMA2; (+) strand; PAM type: NRG; PAM sequence: GAG
aagaagaaaagagagagata

SEQ ID NO: 153509 - DNA, 20 bp, Artificial Sequence
  Description of Artificial Sequence: Synthetic oligonucleotide
  Target: LAMA2; (+) strand; PAM type: NRG; PAM sequence: GAG
gaagaaaagagagagataga

SEQ ID NO: 153510 - DNA, 20 bp, Artificial Sequence
  Description of Artificial Sequence: Synthetic oligonucleotide
  Target: LAMA2; (+) strand; PAM type: NRG; PAM sequence: GAG
agaaaagagagagatagaga

SEQ ID NO: 153511 - DNA, 20 bp, Artificial Sequence
  Description of Artificial Sequence: Synthetic oligonucleotide
  Target: LAMA2; (+) strand; PAM type: NRG; PAM sequence: AGG
gaaaagagagagatagagag

SEQ ID NO: 153512 - DNA, 20 bp, Artificial Sequence
  Description of Artificial Sequence: Synthetic oligonucleotide
  Target: LAMA2; (+) strand; PAM type: NRG; PAM sequence: CAG
aagagagagatagagagagg

SEQ ID NO: 153513 - DNA, 20 bp, Artificial Sequence
  Description of Artificial Sequence: Synthetic oligonucleotide
  Target: LAMA2; (+) strand; PAM type: NRG; PAM sequence: AAG
gagagatagagagaggcaga

SEQ ID NO: 153514 - DNA, 20 bp, Artificial Sequence
  Description of Artificial Sequence: Synthetic oligonucleotide
  Target: LAMA2; (+) strand; PAM type: NRG; PAM sequence: GAG
gagatagagagaggcagaaa

SEQ ID NO: 153515 - DNA, 20 bp, Artificial Sequence
  Description of Artificial Sequence: Synthetic oligonucleotide
  Target: LAMA2; (+) strand; PAM type: NRG; PAM sequence: AAG
gagagaggcagaaagagaaa

SEQ ID NO: 153516 - DNA, 20 bp, Artificial Sequence
  Description of Artificial Sequence: Synthetic oligonucleotide
  Target: LAMA2; (+) strand; PAM type: NRG; PAM sequence: AAG
gaggcagaaagagaaaaaga

SEQ ID NO: 153517 - DNA, 20 bp, Artificial Sequence
  Description of Artificial Sequence: Synthetic oligonucleotide
  Target: LAMA2; (+) strand; PAM type: NRG; PAM sequence: AAG
cagaaagagaaaaagaaaga

SEQ ID NO: 153518 - DNA, 20 bp, Artificial Sequence
  Description of Artificial Sequence: Synthetic oligonucleotide
  Target: LAMA2; (+) strand; PAM type: NRG; PAM sequence: GAG
gaaagagaaaaagaaagaaa

SEQ ID NO: 153519 - DNA, 20 bp, Artificial Sequence
  Description of Artificial Sequence: Synthetic oligonucleotide
  Target: LAMA2; (+) strand; PAM type: NRG; PAM sequence: GAG
aagagaaaaagaaagaaaga

SEQ ID NO: 153520 - DNA, 20 bp, Artificial Sequence
  Description of Artificial Sequence: Synthetic oligonucleotide
  Target: LAMA2; (+) strand; PAM type: NRG; PAM sequence: AAG
gaaaaagaaagaaagagaga

SEQ ID NO: 153521 - DNA, 20 bp, Artificial Sequence
  Description of Artificial Sequence: Synthetic oligonucleotide
  Target: LAMA2; (+) strand; PAM type: NRG; PAM sequence: AAG
agaaagaaagagagaaagaa

SEQ ID NO: 153522 - DNA, 20 bp, Artificial Sequence
  Description of Artificial Sequence: Synthetic oligonucleotide
  Target: LAMA2; (+) strand; PAM type: NRG; PAM sequence: AGG
gaaagaaagagagaaagaaa

SEQ ID NO: 153523 - DNA, 20 bp, Artificial Sequence
  Description of Artificial Sequence: Synthetic oligonucleotide
  Target: LAMA2; (+) strand; PAM type: NRG; PAM sequence: AAG
agaaagagagaaagaaaagg

SEQ ID NO: 153524 - DNA, 20 bp, Artificial Sequence
  Description of Artificial Sequence: Synthetic oligonucleotide
  Target: LAMA2; (+) strand; PAM type: NRG; PAM sequence: GAG
aaagagagaaagaaaaggaa

SEQ ID NO: 153525 - DNA, 20 bp, Artificial Sequence
  Description of Artificial Sequence: Synthetic oligonucleotide
  Target: LAMA2; (+) strand; PAM type: NRG; PAM sequence: AAG
agagaaagaaaaggaagaga

SEQ ID NO: 153526 - DNA, 20 bp, Artificial Sequence
  Description of Artificial Sequence: Synthetic oligonucleotide
  Target: LAMA2; (+) strand; PAM type: NRG; PAM sequence: AAG
aaagaaaaggaagagaaaga

SEQ ID NO: 153527 - DNA, 20 bp, Artificial Sequence
  Description of Artificial Sequence: Synthetic oligonucleotide
  Target: LAMA2; (+) strand; PAM type: NRG; PAM sequence: AAG
aaaaggaagagaaagaaaga

SEQ ID NO: 153528 - DNA, 20 bp, Artificial Sequence
  Description of Artificial Sequence: Synthetic oligonucleotide
  Target: LAMA2; (+) strand; PAM type: NRG; PAM sequence: GAG
aaggaagagaaagaaagaaa

SEQ ID NO: 153529 - DNA, 20 bp, Artificial Sequence
  Description of Artificial Sequence: Synthetic oligonucleotide
  Target: LAMA2; (+) strand; PAM type: NRG; PAM sequence: AAG
aagagaaagaaagaaagaga

SEQ ID NO: 153530 - DNA, 20 bp, Artificial Sequence
  Description of Artificial Sequence: Synthetic oligonucleotide
  Target: LAMA2; (+) strand; PAM type: NRG; PAM sequence: AAG
gaaagaaagaaagagaaaga

SEQ ID NO: 153531 - DNA, 20 bp, Artificial Sequence
  Description of Artificial Sequence: Synthetic oligonucleotide
  Target: LAMA2; (+) strand; PAM type: NRG; PAM sequence: GAG
aagaaagaaagagaaagaaa

SEQ ID NO: 153532 - DNA, 20 bp, Artificial Sequence
  Description of Artificial Sequence: Synthetic oligonucleotide
  Target: LAMA2; (+) strand; PAM type: NRG; PAM sequence: AAG
aagaaagagaaagaaagaga

SEQ ID NO: 153533 - DNA, 20 bp, Artificial Sequence
  Description of Artificial Sequence: Synthetic oligonucleotide
  Target: LAMA2; (+) strand; PAM type: NRG; PAM sequence: AAG
aagagaaagaaagagaaaga

SEQ ID NO: 153534 - DNA, 20 bp, Artificial Sequence
  Description of Artificial Sequence: Synthetic oligonucleotide
  Target: LAMA2; (+) strand; PAM type: NRG; PAM sequence: AGG
agagaaagaaagagaaagaa

SEQ ID NO: 153535 - DNA, 20 bp, Artificial Sequence
  Description of Artificial Sequence: Synthetic oligonucleotide
  Target: LAMA2; (+) strand; PAM type: NRG; PAM sequence: GAG
agaaagaaagagaaagaaag

SEQ ID NO: 153536 - DNA, 20 bp, Artificial Sequence
  Description of Artificial Sequence: Synthetic oligonucleotide
  Target: LAMA2; (+) strand; PAM type: NRG; PAM sequence: AGG
gaaagaaagagaaagaaagg

SEQ ID NO: 153537 - DNA, 20 bp, Artificial Sequence
  Description of Artificial Sequence: Synthetic oligonucleotide
  Target: LAMA2; (+) strand; PAM type: NRG; PAM sequence: AAG
agaaagagaaagaaaggagg

SEQ ID NO: 153538 - DNA, 20 bp, Artificial Sequence
  Description of Artificial Sequence: Synthetic oligonucleotide
  Target: LAMA2; (+) strand; PAM type: NRG; PAM sequence: AGG
gaaagagaaagaaaggagga

SEQ ID NO: 153539 - DNA, 20 bp, Artificial Sequence
  Description of Artificial Sequence: Synthetic oligonucleotide
  Target: LAMA2; (+) strand; PAM type: NRG; PAM sequence: AAG
gagaaagaaaggaggaagga

SEQ ID NO: 153540 - DNA, 20 bp, Artificial Sequence
  Description of Artificial Sequence: Synthetic oligonucleotide
  Target: LAMA2; (+) strand; PAM type: NRG; PAM sequence: AAG
aaagaaaggaggaaggaaag

SEQ ID NO: 153541 - DNA, 20 bp, Artificial Sequence
  Description of Artificial Sequence: Synthetic oligonucleotide
  Target: LAMA2; (+) strand; PAM type: NRG; PAM sequence: GAG
agaaaggaggaaggaaagaa

SEQ ID NO: 153542 - DNA, 20 bp, Artificial Sequence
  Description of Artificial Sequence: Synthetic oligonucleotide
  Target: LAMA2; (+) strand; PAM type: NRG; PAM sequence: GAG
aaaggaggaaggaaagaaga

SEQ ID NO: 153543 - DNA, 20 bp, Artificial Sequence
  Description of Artificial Sequence: Synthetic oligonucleotide
  Target: LAMA2; (+) strand; PAM type: NRG; PAM sequence: AGG
aaggaggaaggaaagaagag

SEQ ID NO: 153544 - DNA, 20 bp, Artificial Sequence
  Description of Artificial Sequence: Synthetic oligonucleotide
  Target: LAMA2; (+) strand; PAM type: NRG; PAM sequence: GGG
aggaggaaggaaagaagaga

SEQ ID NO: 153545 - DNA, 20 bp, Artificial Sequence
  Description of Artificial Sequence: Synthetic oligonucleotide
  Target: LAMA2; (+) strand; PAM type: NRG; PAM sequence: GAG
gaggaaggaaagaagagagg

SEQ ID NO: 153546 - DNA, 20 bp, Artificial Sequence
  Description of Artificial Sequence: Synthetic oligonucleotide
  Target: LAMA2; (+) strand; PAM type: NRG; PAM sequence: AAG
aaggaaagaagagagggaga

SEQ ID NO: 153547 - DNA, 20 bp, Artificial Sequence
  Description of Artificial Sequence: Synthetic oligonucleotide
  Target: LAMA2; (+) strand; PAM type: NRG; PAM sequence: TGG
aagaagagagggagaaagaa

SEQ ID NO: 153548 - DNA, 20 bp, Artificial Sequence
  Description of Artificial Sequence: Synthetic oligonucleotide
  Target: LAMA2; (+) strand; PAM type: NRG; PAM sequence: AAG
aagagagggagaaagaatgg

SEQ ID NO: 153549 - DNA, 20 bp, Artificial Sequence
  Description of Artificial Sequence: Synthetic oligonucleotide
  Target: LAMA2; (+) strand; PAM type: NRG; PAM sequence: AAG
gagggagaaagaatggaaga

SEQ ID NO: 153550 - DNA, 20 bp, Artificial Sequence
  Description of Artificial Sequence: Synthetic oligonucleotide
  Target: LAMA2; (+) strand; PAM type: NRG; PAM sequence: AAG
gagaaagaatggaagaaaga

SEQ ID NO: 153551 - DNA, 20 bp, Artificial Sequence
  Description of Artificial Sequence: Synthetic oligonucleotide
  Target: LAMA2; (+) strand; PAM type: NRG; PAM sequence: AAG
aagaatggaagaaagaaaga

SEQ ID NO: 153552 - DNA, 20 bp, Artificial Sequence
  Description of Artificial Sequence: Synthetic oligonucleotide
  Target: LAMA2; (+) strand; PAM type: NRG; PAM sequence: AAG
aatggaagaaagaaagaaag

SEQ ID NO: 153553 - DNA, 20 bp, Artificial Sequence
  Description of Artificial Sequence: Synthetic oligonucleotide
  Target: LAMA2; (+) strand; PAM type: NRG; PAM sequence: AAG
gaagaaagaaagaaagaaga

SEQ ID NO: 153554 - DNA, 20 bp, Artificial Sequence
  Description of Artificial Sequence: Synthetic oligonucleotide
  Target: LAMA2; (+) strand; PAM type: NRG; PAM sequence: AAG
aaagaaagaaagaagaaaga

SEQ ID NO: 153555 - DNA, 20 bp, Artificial Sequence
  Description of Artificial Sequence: Synthetic oligonucleotide
  Target: LAMA2; (+) strand; PAM type: NRG; PAM sequence: AAG
gaaagaaagaagaaagaaag

SEQ ID NO: 153556 - DNA, 20 bp, Artificial Sequence
  Description of Artificial Sequence: Synthetic oligonucleotide
  Target: LAMA2; (+) strand; PAM type: NRG; PAM sequence: AGG
aaagaaagaagaaagaaaga

SEQ ID NO: 153557 - DNA, 20 bp, Artificial Sequence
  Description of Artificial Sequence: Synthetic oligonucleotide
  Target: LAMA2; (+) strand; PAM type: NRG; PAM sequence: AAG
gaaagaagaaagaaagaagg

SEQ ID NO: 153558 - DNA, 20 bp, Artificial Sequence
  Description of Artificial Sequence: Synthetic oligonucleotide
  Target: LAMA2; (+) strand; PAM type: NRG; PAM sequence: AGG
aaagaagaaagaaagaagga

SEQ ID NO: 153559 - DNA, 20 bp, Artificial Sequence
  Description of Artificial Sequence: Synthetic oligonucleotide
  Target: LAMA2; (+) strand; PAM type: NRG; PAM sequence: AAG
gaagaaagaaagaaggaagg

SEQ ID NO: 153560 - DNA, 20 bp, Artificial Sequence
  Description of Artificial Sequence: Synthetic oligonucleotide
  Target: LAMA2; (+) strand; PAM type: NRG; PAM sequence: GAG
agaaagaaagaaggaaggaa

SEQ ID NO: 153561 - DNA, 20 bp, Artificial Sequence
  Description of Artificial Sequence: Synthetic oligonucleotide
  Target: LAMA2; (+) strand; PAM type: NRG; PAM sequence: GAG
aaagaaagaaggaaggaaga

SEQ ID NO: 153562 - DNA, 20 bp, Artificial Sequence
  Description of Artificial Sequence: Synthetic oligonucleotide
  Target: LAMA2; (+) strand; PAM type: NRG; PAM sequence: AGG
aagaaagaaggaaggaagag

SEQ ID NO: 153563 - DNA, 20 bp, Artificial Sequence
  Description of Artificial Sequence: Synthetic oligonucleotide
  Target: LAMA2; (+) strand; PAM type: NRG; PAM sequence: GGG
agaaagaaggaaggaagaga

SEQ ID NO: 153564 - DNA, 20 bp, Artificial Sequence
  Description of Artificial Sequence: Synthetic oligonucleotide
  Target: LAMA2; (+) strand; PAM type: NRG; PAM sequence: GAG
aaagaaggaaggaagagagg

SEQ ID NO: 153565 - DNA, 20 bp, Artificial Sequence
  Description of Artificial Sequence: Synthetic oligonucleotide
  Target: LAMA2; (+) strand; PAM type: NRG; PAM sequence: AAG
aaggaaggaagagagggaga

SEQ ID NO: 153566 - DNA, 20 bp, Artificial Sequence
  Description of Artificial Sequence: Synthetic oligonucleotide
  Target: LAMA2; (+) strand; PAM type: NRG; PAM sequence: AAG
aaggaagagagggagaaaga

SEQ ID NO: 153567 - DNA, 20 bp, Artificial Sequence
  Description of Artificial Sequence: Synthetic oligonucleotide
  Target: LAMA2; (+) strand; PAM type: NRG; PAM sequence: GAG
ggaagagagggagaaagaaa

SEQ ID NO: 153568 - DNA, 20 bp, Artificial Sequence
  Description of Artificial Sequence: Synthetic oligonucleotide
  Target: LAMA2; (+) strand; PAM type: NRG; PAM sequence: AAG
gagagggagaaagaaagaga

SEQ ID NO: 153569 - DNA, 20 bp, Artificial Sequence
  Description of Artificial Sequence: Synthetic oligonucleotide
  Target: LAMA2; (+) strand; PAM type: NRG; PAM sequence: GAG
gagggagaaagaaagagaaa

SEQ ID NO: 153570 - DNA, 20 bp, Artificial Sequence
  Description of Artificial Sequence: Synthetic oligonucleotide
  Target: LAMA2; (+) strand; PAM type: NRG; PAM sequence: AAG
ggagaaagaaagagaaagag

SEQ ID NO: 153571 - DNA, 20 bp, Artificial Sequence
  Description of Artificial Sequence: Synthetic oligonucleotide
  Target: LAMA2; (+) strand; PAM type: NRG; PAM sequence: AGG
gagaaagaaagagaaagaga

SEQ ID NO: 153572 - DNA, 20 bp, Artificial Sequence
  Description of Artificial Sequence: Synthetic oligonucleotide
  Target: LAMA2; (+) strand; PAM type: NRG; PAM sequence: AAG
aagaaagagaaagagaagga

SEQ ID NO: 153573 - DNA, 20 bp, Artificial Sequence
  Description of Artificial Sequence: Synthetic oligonucleotide
  Target: LAMA2; (+) strand; PAM type: NRG; PAM sequence: AAG
aagagaaagagaaggaaaga

SEQ ID NO: 153574 - DNA, 20 bp, Artificial Sequence
  Description of Artificial Sequence: Synthetic oligonucleotide
  Target: LAMA2; (+) strand; PAM type: NRG; PAM sequence: AAG
aagagaaggaaagaaagaaa

SEQ ID NO: 153575 - DNA, 20 bp, Artificial Sequence
  Description of Artificial Sequence: Synthetic oligonucleotide
  Target: LAMA2; (+) strand; PAM type: NRG; PAM sequence: AGG
agagaaggaaagaaagaaaa

SEQ ID NO: 153576 - DNA, 20 bp, Artificial Sequence
  Description of Artificial Sequence: Synthetic oligonucleotide
  Target: LAMA2; (+) strand; PAM type: NRG; PAM sequence: AAG
gaaggaaagaaagaaaaagg

SEQ ID NO: 153577 - DNA, 20 bp, Artificial Sequence
  Description of Artificial Sequence: Synthetic oligonucleotide
  Target: LAMA2; (+) strand; PAM type: NRG; PAM sequence: AGG
aaggaaagaaagaaaaagga

SEQ ID NO: 153578 - DNA, 20 bp, Artificial Sequence
  Description of Artificial Sequence: Synthetic oligonucleotide
  Target: LAMA2; (+) strand; PAM type: NRG; PAM sequence: AAG
gaaagaaagaaaaaggaagg

SEQ ID NO: 153579 - DNA, 20 bp, Artificial Sequence
  Description of Artificial Sequence: Synthetic oligonucleotide
  Target: LAMA2; (+) strand; PAM type: NRG; PAM sequence: AGG
aaagaaagaaaaaggaagga

SEQ ID NO: 153580 - DNA, 20 bp, Artificial Sequence
  Description of Artificial Sequence: Synthetic oligonucleotide
  Target: LAMA2; (+) strand; PAM type: NRG; PAM sequence: AAG
gaaagaaaaaggaaggaagg

SEQ ID NO: 153581 - DNA, 20 bp, Artificial Sequence
  Description of Artificial Sequence: Synthetic oligonucleotide
  Target: LAMA2; (+) strand; PAM type: NRG; PAM sequence: AGG
aaagaaaaaggaaggaagga

SEQ ID NO: 153582 - DNA, 20 bp, Artificial Sequence
  Description of Artificial Sequence: Synthetic oligonucleotide
  Target: LAMA2; (+) strand; PAM type: NRG; PAM sequence: AAG
aaaaggaaggaaggaaggaa

SEQ ID NO: 153583 - DNA, 20 bp, Artificial Sequence
  Description of Artificial Sequence: Synthetic oligonucleotide
  Target: LAMA2; (+) strand; PAM type: NRG; PAM sequence: AGG
aaaggaaggaaggaaggaaa

SEQ ID NO: 153584 - DNA, 20 bp, Artificial Sequence
  Description of Artificial Sequence: Synthetic oligonucleotide
  Target: LAMA2; (+) strand; PAM type: NRG; PAM sequence: GGG
aaggaaggaaggaaggaaaa

SEQ ID NO: 153585 - DNA, 20 bp, Artificial Sequence
  Description of Artificial Sequence: Synthetic oligonucleotide
  Target: LAMA2; (+) strand; PAM type: NRG; PAM sequence: GAG
ggaaggaaggaaggaaaagg

SEQ ID NO: 153586 - DNA, 20 bp, Artificial Sequence
  Description of Artificial Sequence: Synthetic oligonucleotide
  Target: LAMA2; (+) strand; PAM type: NRG; PAM sequence: AGG
gaaggaaggaaggaaaaggg

SEQ ID NO: 153587 - DNA, 20 bp, Artificial Sequence
  Description of Artificial Sequence: Synthetic oligonucleotide
  Target: LAMA2; (+) strand; PAM type: NRG; PAM sequence: GGG
aaggaaggaaggaaaaggga

SEQ ID NO: 153588 - DNA, 20 bp, Artificial Sequence
  Description of Artificial Sequence: Synthetic oligonucleotide
  Target: LAMA2; (+) strand; PAM type: NRG; PAM sequence: GAG
ggaaggaaggaaaagggagg

SEQ ID NO: 153589 - DNA, 20 bp, Artificial Sequence
  Description of Artificial Sequence: Synthetic oligonucleotide
  Target: LAMA2; (+) strand; PAM type: NRG; PAM sequence: AGG
gaaggaaggaaaagggaggg

SEQ ID NO: 153590 - DNA, 20 bp, Artificial Sequence
  Description of Artificial Sequence: Synthetic oligonucleotide
  Target: LAMA2; (+) strand; PAM type: NRG; PAM sequence: GGG
aaggaaggaaaagggaggga

SEQ ID NO: 153591 - DNA, 20 bp, Artificial Sequence
  Description of Artificial Sequence: Synthetic oligonucleotide
  Target: LAMA2; (+) strand; PAM type: NRG; PAM sequence: GAG
ggaaggaaaagggagggagg

SEQ ID NO: 153592 - DNA, 20 bp, Artificial Sequence
  Description of Artificial Sequence: Synthetic oligonucleotide
  Target: LAMA2; (+) strand; PAM type: NRG; PAM sequence: AGG
gaaggaaaagggagggaggg

SEQ ID NO: 153593 - DNA, 20 bp, Artificial Sequence
  Description of Artificial Sequence: Synthetic oligonucleotide
  Target: LAMA2; (+) strand; PAM type: NRG; PAM sequence: GGG
aaggaaaagggagggaggga

SEQ ID NO: 153594 - DNA, 20 bp, Artificial Sequence
  Description of Artificial Sequence: Synthetic oligonucleotide
  Target: LAMA2; (+) strand; PAM type: NRG; PAM sequence: AAG
gaaaagggagggagggaggg

SEQ ID NO: 153595 - DNA, 20 bp, Artificial Sequence
  Description of Artificial Sequence: Synthetic oligonucleotide
  Target: LAMA2; (+) strand; PAM type: NRG; PAM sequence: AGG
aaaagggagggagggaggga

SEQ ID NO: 153596 - DNA, 20 bp, Artificial Sequence
  Description of Artificial Sequence: Synthetic oligonucleotide
  Target: LAMA2; (+) strand; PAM type: NRG; PAM sequence: AAG
agggagggagggagggaagg

SEQ ID NO: 153597 - DNA, 20 bp, Artificial Sequence
  Description of Artificial Sequence: Synthetic oligonucleotide
  Target: LAMA2; (+) strand; PAM type: NRG; PAM sequence: AGG
gggagggagggagggaagga

SEQ ID NO: 153598 - DNA, 20 bp, Artificial Sequence
  Description of Artificial Sequence: Synthetic oligonucleotide
  Target: LAMA2; (+) strand; PAM type: NRG; PAM sequence: GAG
gagggagggagggaaggaag

SEQ ID NO: 153599 - DNA, 20 bp, Artificial Sequence
  Description of Artificial Sequence: Synthetic oligonucleotide
  Target: LAMA2; (+) strand; PAM type: NRG; PAM sequence: AGG
agggagggagggaaggaagg

SEQ ID NO: 153600 - DNA, 20 bp, Artificial Sequence
  Description of Artificial Sequence: Synthetic oligonucleotide
  Target: LAMA2; (+) strand; PAM type: NRG; PAM sequence: GGG
gggagggagggaaggaagga

SEQ ID NO: 153601 - DNA, 20 bp, Artificial Sequence
  Description of Artificial Sequence: Synthetic oligonucleotide
  Target: LAMA2; (+) strand; PAM type: NRG; PAM sequence: GAG
gagggagggaaggaaggagg

SEQ ID NO: 153602 - DNA, 20 bp, Artificial Sequence
  Description of Artificial Sequence: Synthetic oligonucleotide
  Target: LAMA2; (+) strand; PAM type: NRG; PAM sequence: AGG
agggagggaaggaaggaggg

SEQ ID NO: 153603 - DNA, 20 bp, Artificial Sequence
  Description of Artificial Sequence: Synthetic oligonucleotide
  Target: LAMA2; (+) strand; PAM type: NRG; PAM sequence: GGG
gggagggaaggaaggaggga

SEQ ID NO: 153604 - DNA, 20 bp, Artificial Sequence
  Description of Artificial Sequence: Synthetic oligonucleotide
  Target: LAMA2; (+) strand; PAM type: NRG; PAM sequence: GAG
gagggaaggaaggagggagg

SEQ ID NO: 153605 - DNA, 20 bp, Artificial Sequence
  Description of Artificial Sequence: Synthetic oligonucleotide
  Target: LAMA2; (+) strand; PAM type: NRG; PAM sequence: AGG
agggaaggaaggagggaggg

SEQ ID NO: 153606 - DNA, 20 bp, Artificial Sequence
  Description of Artificial Sequence: Synthetic oligonucleotide
  Target: LAMA2; (+) strand; PAM type: NRG; PAM sequence: AAG
gaaggaaggagggagggagg

SEQ ID NO: 153607 - DNA, 20 bp, Artificial Sequence
  Description of Artificial Sequence: Synthetic oligonucleotide
  Target: LAMA2; (+) strand; PAM type: NRG; PAM sequence: AGG
aaggaaggagggagggagga

SEQ ID NO: 153608 - DNA, 20 bp, Artificial Sequence
  Description of Artificial Sequence: Synthetic oligonucleotide
  Target: LAMA2; (+) strand; PAM type: NRG; PAM sequence: AAG
gaaggagggagggaggaagg

SEQ ID NO: 153609 - DNA, 20 bp, Artificial Sequence
  Description of Artificial Sequence: Synthetic oligonucleotide
  Target: LAMA2; (+) strand; PAM type: NRG; PAM sequence: AGG
aaggagggagggaggaagga

SEQ ID NO: 153610 - DNA, 20 bp, Artificial Sequence
  Description of Artificial Sequence: Synthetic oligonucleotide
  Target: LAMA2; (+) strand; PAM type: NRG; PAM sequence: AAG
gagggagggaggaaggaagg

SEQ ID NO: 153611 - DNA, 20 bp, Artificial Sequence
  Description of Artificial Sequence: Synthetic oligonucleotide
  Target: LAMA2; (+) strand; PAM type: NRG; PAM sequence: GAG
gggagggaggaaggaaggaa

SEQ ID NO: 153612 - DNA, 20 bp, Artificial Sequence
  Description of Artificial Sequence: Synthetic oligonucleotide
  Target: LAMA2; (+) strand; PAM type: NRG; PAM sequence: AGG
ggagggaggaaggaaggaag

SEQ ID NO: 153613 - DNA, 20 bp, Artificial Sequence
  Description of Artificial Sequence: Synthetic oligonucleotide
  Target: LAMA2; (+) strand; PAM type: NRG; PAM sequence: AAG
gggaggaaggaaggaagagg

SEQ ID NO: 153614 - DNA, 20 bp, Artificial Sequence
  Description of Artificial Sequence: Synthetic oligonucleotide
  Target: LAMA2; (+) strand; PAM type: NRG; PAM sequence: CAG
aggaaggaaggaagaggaag

SEQ ID NO: 153615 - DNA, 20 bp, Artificial Sequence
  Description of Artificial Sequence: Synthetic oligonucleotide
  Target: LAMA2; (+) strand; PAM type: NRG; PAM sequence: AGG
ggaaggaaggaagaggaagc

SEQ ID NO: 153616 - DNA, 20 bp, Artificial Sequence
  Description of Artificial Sequence: Synthetic oligonucleotide
  Target: LAMA2; (+) strand; PAM type: NRG; PAM sequence: GGG
gaaggaaggaagaggaagca

SEQ ID NO: 153617 - DNA, 20 bp, Artificial Sequence
  Description of Artificial Sequence: Synthetic oligonucleotide
  Target: LAMA2; (+) strand; PAM type: NRG; PAM sequence: GAG
aggaaggaagaggaagcagg

SEQ ID NO: 153618 - DNA, 20 bp, Artificial Sequence
  Description of Artificial Sequence: Synthetic oligonucleotide
  Target: LAMA2; (+) strand; PAM type: NRG; PAM sequence: AGG
ggaaggaagaggaagcaggg

SEQ ID NO: 153619 - DNA, 20 bp, Artificial Sequence
  Description of Artificial Sequence: Synthetic oligonucleotide
  Target: LAMA2; (+) strand; PAM type: NRG; PAM sequence: GGG
gaaggaagaggaagcaggga

SEQ ID NO: 153620 - DNA, 20 bp, Artificial Sequence
  Description of Artificial Sequence: Synthetic oligonucleotide
  Target: LAMA2; (+) strand; PAM type: NRG; PAM sequence: AAG
gaagaggaagcagggagggc

SEQ ID NO: 153621 - DNA, 20 bp, Artificial Sequence
  Description of Artificial Sequence: Synthetic oligonucleotide
  Target: LAMA2; (+) strand; PAM type: NRG; PAM sequence: AGG
aagaggaagcagggagggca

SEQ ID NO: 153622 - DNA, 20 bp, Artificial Sequence
  Description of Artificial Sequence: Synthetic oligonucleotide
  Target: LAMA2; (+) strand; PAM type: NRG; PAM sequence: AAG
ggaagcagggagggcaagga

SEQ ID NO: 153623 - DNA, 20 bp, Artificial Sequence
  Description of Artificial Sequence: Synthetic oligonucleotide
  Target: LAMA2; (+) strand; PAM type: NRG; PAM sequence: AGG
gaagcagggagggcaaggaa

SEQ ID NO: 153624 - DNA, 20 bp, Artificial Sequence
  Description of Artificial Sequence: Synthetic oligonucleotide
  Target: LAMA2; (+) strand; PAM type: NRG; PAM sequence: TGG
gggcaaggaaaggaaaacaa

SEQ ID NO: 153625 - DNA, 20 bp, Artificial Sequence
  Description of Artificial Sequence: Synthetic oligonucleotide
  Target: LAMA2; (+) strand; PAM type: NRG; PAM sequence: AAG
aaggaaaggaaaacaatgga

SEQ ID NO: 153626 - DNA, 20 bp, Artificial Sequence
  Description of Artificial Sequence: Synthetic oligonucleotide
  Target: LAMA2; (+) strand; PAM type: NRG; PAM sequence: AAG
ggaaaacaatggaaagaata

SEQ ID NO: 153627 - DNA, 20 bp, Artificial Sequence
  Description of Artificial Sequence: Synthetic oligonucleotide
  Target: LAMA2; (+) strand; PAM type: NRG; PAM sequence: CAG
aaagaataaagaaataaatg

SEQ ID NO: 153628 - DNA, 20 bp, Artificial Sequence
  Description of Artificial Sequence: Synthetic oligonucleotide
  Target: LAMA2; (+) strand; PAM type: NRG; PAM sequence: CAG
gaataaagaaataaatgcag

SEQ ID NO: 153629 - DNA, 20 bp, Artificial Sequence
  Description of Artificial Sequence: Synthetic oligonucleotide
  Target: LAMA2; (+) strand; PAM type: NRG; PAM sequence: AGG
aataaagaaataaatgcagc

SEQ ID NO: 153630 - DNA, 20 bp, Artificial Sequence
  Description of Artificial Sequence: Synthetic oligonucleotide
  Target: LAMA2; (+) strand; PAM type: NRG; PAM sequence: AAG
aagaaataaatgcagcagga

SEQ ID NO: 153631 - DNA, 20 bp, Artificial Sequence
  Description of Artificial Sequence: Synthetic oligonucleotide
  Target: LAMA2; (+) strand; PAM type: NRG; PAM sequence: AGG
agaaataaatgcagcaggaa

SEQ ID NO: 153632 - DNA, 20 bp, Artificial Sequence
  Description of Artificial Sequence: Synthetic oligonucleotide
  Target: LAMA2; (+) strand; PAM type: NRG; PAM sequence: AAG
aaatgcagcaggaaaggaaa

SEQ ID NO: 153633 - DNA, 20 bp, Artificial Sequence
  Description of Artificial Sequence: Synthetic oligonucleotide
  Target: LAMA2; (+) strand; PAM type: NRG; PAM sequence: TAG
cagcaggaaaggaaaaagaa

SEQ ID NO: 153634 - DNA, 20 bp, Artificial Sequence
  Description of Artificial Sequence: Synthetic oligonucleotide
  Target: LAMA2; (+) strand; PAM type: NRG; PAM sequence: AGG
agcaggaaaggaaaaagaat

SEQ ID NO: 153635 - DNA, 20 bp, Artificial Sequence
  Description of Artificial Sequence: Synthetic oligonucleotide
  Target: LAMA2; (+) strand; PAM type: NRG; PAM sequence: AAG
aggaaaggaaaaagaatagg

SEQ ID NO: 153636 - DNA, 20 bp, Artificial Sequence
  Description of Artificial Sequence: Synthetic oligonucleotide
  Target: LAMA2; (+) strand; PAM type: NRG; PAM sequence: TAG
gctcatatctgtctaatttt

SEQ ID NO: 153637 - DNA, 20 bp, Artificial Sequence
  Description of Artificial Sequence: Synthetic oligonucleotide
  Target: LAMA2; (+) strand; PAM type: NRG; PAM sequence: AGG
ctcatatctgtctaattttt

SEQ ID NO: 153638 - DNA, 20 bp, Artificial Sequence
  Description of Artificial Sequence: Synthetic oligonucleotide
  Target: LAMA2; (+) strand; PAM type: NRG; PAM sequence: GGG
tcatatctgtctaattttta

SEQ ID NO: 153639 - DNA, 20 bp, Artificial Sequence
  Description of Artificial Sequence: Synthetic oligonucleotide
  Target: LAMA2; (+) strand; PAM type: NRG; PAM sequence: AAG
ttagggtattttgatataca

SEQ ID NO: 153640 - DNA, 20 bp, Artificial Sequence
  Description of Artificial Sequence: Synthetic oligonucleotide
  Target: LAMA2; (+) strand; PAM type: NRG; PAM sequence: CAG
tatacaaagtaactgactgt

SEQ ID NO: 153641 - DNA, 20 bp, Artificial Sequence
  Description of Artificial Sequence: Synthetic oligonucleotide
  Target: LAMA2; (+) strand; PAM type: NRG; PAM sequence: AGG
atacaaagtaactgactgtc

SEQ ID NO: 153642 - DNA, 20 bp, Artificial Sequence
  Description of Artificial Sequence: Synthetic oligonucleotide
  Target: LAMA2; (+) strand; PAM type: NRG; PAM sequence: TAG
ctgactgtcaggacctgtct

SEQ ID NO: 153643 - DNA, 20 bp, Artificial Sequence
  Description of Artificial Sequence: Synthetic oligonucleotide
  Target: LAMA2; (+) strand; PAM type: NRG; PAM sequence: GAG
gactgtcaggacctgtctta

SEQ ID NO: 153644 - DNA, 20 bp, Artificial Sequence
  Description of Artificial Sequence: Synthetic oligonucleotide
  Target: LAMA2; (+) strand; PAM type: NRG; PAM sequence: TGG
gacctgtcttagagatgatc

SEQ ID NO: 153645 - DNA, 20 bp, Artificial Sequence
  Description of Artificial Sequence: Synthetic oligonucleotide
  Target: LAMA2; (+) strand; PAM type: NRG; PAM sequence: TAG
ctgtcttagagatgatctgg

SEQ ID NO: 153646 - DNA, 20 bp, Artificial Sequence
  Description of Artificial Sequence: Synthetic oligonucleotide
  Target: LAMA2; (+) strand; PAM type: NRG; PAM sequence: AGG
tgtcttagagatgatctggt

SEQ ID NO: 153647 - DNA, 20 bp, Artificial Sequence
  Description of Artificial Sequence: Synthetic oligonucleotide
  Target: LAMA2; (+) strand; PAM type: NRG; PAM sequence: CAG
ttagagatgatctggtagga

SEQ ID NO: 153648 - DNA, 20 bp, Artificial Sequence
  Description of Artificial Sequence: Synthetic oligonucleotide
  Target: LAMA2; (+) strand; PAM type: NRG; PAM sequence: TGG
tgatctggtaggacagtaaa

SEQ ID NO: 153649 - DNA, 20 bp, Artificial Sequence
  Description of Artificial Sequence: Synthetic oligonucleotide
  Target: LAMA2; (+) strand; PAM type: NRG; PAM sequence: CAG
cagtaaatggcttttctttc

SEQ ID NO: 153650 - DNA, 20 bp, Artificial Sequence
  Description of Artificial Sequence: Synthetic oligonucleotide
  Target: LAMA2; (+) strand; PAM type: NRG; PAM sequence: TGG
ttttctttccagttttcatc

SEQ ID NO: 153651 - DNA, 20 bp, Artificial Sequence
  Description of Artificial Sequence: Synthetic oligonucleotide
  Target: LAMA2; (+) strand; PAM type: NRG; PAM sequence: GGG
tttctttccagttttcatct

SEQ ID NO: 153652 - DNA, 20 bp, Artificial Sequence
  Description of Artificial Sequence: Synthetic oligonucleotide
  Target: LAMA2; (+) strand; PAM type: NRG; PAM sequence: TGG
ttccagttttcatctgggac

SEQ ID NO: 153653 - DNA, 20 bp, Artificial Sequence
  Description of Artificial Sequence: Synthetic oligonucleotide
  Target: LAMA2; (+) strand; PAM type: NRG; PAM sequence: GGG
tccagttttcatctgggact

SEQ ID NO: 153654 - DNA, 20 bp, Artificial Sequence
  Description of Artificial Sequence: Synthetic oligonucleotide
  Target: LAMA2; (+) strand; PAM type: NRG; PAM sequence: AAG
ttcatctgggactgggtttg

SEQ ID NO: 153655 - DNA, 20 bp, Artificial Sequence
  Description of Artificial Sequence: Synthetic oligonucleotide
  Target: LAMA2; (+) strand; PAM type: NRG; PAM sequence: CAG
actgggtttgaagtgatcat

SEQ ID NO: 153656 - DNA, 20 bp, Artificial Sequence
  Description of Artificial Sequence: Synthetic oligonucleotide
  Target: LAMA2; (+) strand; PAM type: NRG; PAM sequence: CAG
tttgaagtgatcatcagcct

SEQ ID NO: 153657 - DNA, 20 bp, Artificial Sequence
  Description of Artificial Sequence: Synthetic oligonucleotide
  Target: LAMA2; (+) strand; PAM type: NRG; PAM sequence: TGG
gatcatcagcctcagtgttc

SEQ ID NO: 153658 - DNA, 20 bp, Artificial Sequence
  Description of Artificial Sequence: Synthetic oligonucleotide
  Target: LAMA2; (+) strand; PAM type: NRG; PAM sequence: AAG
agcctcagtgttctggaaat

SEQ ID NO: 153659 - DNA, 20 bp, Artificial Sequence
  Description of Artificial Sequence: Synthetic oligonucleotide
  Target: LAMA2; (+) strand; PAM type: NRG; PAM sequence: TGG
ataagtcatttataatgaaa

SEQ ID NO: 153660 - DNA, 20 bp, Artificial Sequence
  Description of Artificial Sequence: Synthetic oligonucleotide
  Target: LAMA2; (+) strand; PAM type: NRG; PAM sequence: TGG
catttataatgaaatggaac

SEQ ID NO: 153661 - DNA, 20 bp, Artificial Sequence
  Description of Artificial Sequence: Synthetic oligonucleotide
  Target: LAMA2; (+) strand; PAM type: NRG; PAM sequence: CAG
atggaactggaaataaccca

SEQ ID NO: 153662 - DNA, 20 bp, Artificial Sequence
  Description of Artificial Sequence: Synthetic oligonucleotide
  Target: LAMA2; (+) strand; PAM type: NRG; PAM sequence: AAG
ggaaataacccacagacaaa

SEQ ID NO: 153663 - DNA, 20 bp, Artificial Sequence
  Description of Artificial Sequence: Synthetic oligonucleotide
  Target: LAMA2; (+) strand; PAM type: NRG; PAM sequence: AAG
ccacagacaaaaagctttgc

SEQ ID NO: 153664 - DNA, 20 bp, Artificial Sequence
  Description of Artificial Sequence: Synthetic oligonucleotide
  Target: LAMA2; (+) strand; PAM type: NRG; PAM sequence: AAG
aaaagctttgcaagccattg

SEQ ID NO: 153665 - DNA, 20 bp, Artificial Sequence
  Description of Artificial Sequence: Synthetic oligonucleotide
  Target: LAMA2; (+) strand; PAM type: NRG; PAM sequence: TAG
gcaagccattgaagttcccc

SEQ ID NO: 153666 - DNA, 20 bp, Artificial Sequence
  Description of Artificial Sequence: Synthetic oligonucleotide
  Target: LAMA2; (+) strand; PAM type: NRG; PAM sequence: AGG
caagccattgaagttcccct

SEQ ID NO: 153667 - DNA, 20 bp, Artificial Sequence
  Description of Artificial Sequence: Synthetic oligonucleotide
  Target: LAMA2; (+) strand; PAM type: NRG; PAM sequence: AAG
cctaggccatttactgcctt

SEQ ID NO: 153668 - DNA, 20 bp, Artificial Sequence
  Description of Artificial Sequence: Synthetic oligonucleotide
  Target: LAMA2; (+) strand; PAM type: NRG; PAM sequence: CAG
gctcgtttttactcatactg

SEQ ID NO: 153669 - DNA, 20 bp, Artificial Sequence
  Description of Artificial Sequence: Synthetic oligonucleotide
  Target: LAMA2; (+) strand; PAM type: NRG; PAM sequence: AGG
ctcgtttttactcatactgc

SEQ ID NO: 153670 - DNA, 20 bp, Artificial Sequence
  Description of Artificial Sequence: Synthetic oligonucleotide
  Target: LAMA2; (+) strand; PAM type: NRG; PAM sequence: AAG
actcatactgcaggaaaaaa

SEQ ID NO: 153671 - DNA, 20 bp, Artificial Sequence
  Description of Artificial Sequence: Synthetic oligonucleotide
  Target: LAMA2; (+) strand; PAM type: NRG; PAM sequence: GAG
tcatactgcaggaaaaaaaa

SEQ ID NO: 153672 - DNA, 20 bp, Artificial Sequence
  Description of Artificial Sequence: Synthetic oligonucleotide
  Target: LAMA2; (+) strand; PAM type: NRG; PAM sequence: GAG
actgcaggaaaaaaaagagt

SEQ ID NO: 153673 - DNA, 20 bp, Artificial Sequence
  Description of Artificial Sequence: Synthetic oligonucleotide
  Target: LAMA2; (+) strand; PAM type: NRG; PAM sequence: TAG
gcaggaaaaaaaagagtgag

SEQ ID NO: 153674 - DNA, 20 bp, Artificial Sequence
  Description of Artificial Sequence: Synthetic oligonucleotide
  Target: LAMA2; (+) strand; PAM type: NRG; PAM sequence: AGG
caggaaaaaaaagagtgagt

SEQ ID NO: 153675 - DNA, 20 bp, Artificial Sequence
  Description of Artificial Sequence: Synthetic oligonucleotide
  Target: LAMA2; (+) strand; PAM type: NRG; PAM sequence: GGG
aggaaaaaaaagagtgagta

SEQ ID NO: 153676 - DNA, 20 bp, Artificial Sequence
  Description of Artificial Sequence: Synthetic oligonucleotide
  Target: LAMA2; (+) strand; PAM type: NRG; PAM sequence: GAG
gaaaaaaaagagtgagtagg

SEQ ID NO: 153677 - DNA, 20 bp, Artificial Sequence
  Description of Artificial Sequence: Synthetic oligonucleotide
  Target: LAMA2; (+) strand; PAM type: NRG; PAM sequence: AGG
aaaaaaaagagtgagtaggg

SEQ ID NO: 153678 - DNA, 20 bp, Artificial Sequence
  Description of Artificial Sequence: Synthetic oligonucleotide
  Target: LAMA2; (+) strand; PAM type: NRG; PAM sequence: TGG
aaaaagagtgagtagggagg

SEQ ID NO: 153679 - DNA, 20 bp, Artificial Sequence
  Description of Artificial Sequence: Synthetic oligonucleotide
  Target: LAMA2; (+) strand; PAM type: NRG; PAM sequence: AAG
atatcacataattttaaatt

SEQ ID NO: 153680 - DNA, 20 bp, Artificial Sequence
  Description of Artificial Sequence: Synthetic oligonucleotide
  Target: LAMA2; (+) strand; PAM type: NRG; PAM sequence: TGG
aattttaaattaagatgtga

SEQ ID NO: 153681 - DNA, 20 bp, Artificial Sequence
  Description of Artificial Sequence: Synthetic oligonucleotide
  Target: LAMA2; (+) strand; PAM type: NRG; PAM sequence: AAG
gatgtgatggttttatataa

SEQ ID NO: 153682 - DNA, 20 bp, Artificial Sequence
  Description of Artificial Sequence: Synthetic oligonucleotide
  Target: LAMA2; (+) strand; PAM type: NRG; PAM sequence: AAG
ttattttgctttttttgttc

SEQ ID NO: 153683 - DNA, 20 bp, Artificial Sequence
  Description of Artificial Sequence: Synthetic oligonucleotide
  Target: LAMA2; (+) strand; PAM type: NRG; PAM sequence: AAG
ttgctttttttgttcaagac

SEQ ID NO: 153684 - DNA, 20 bp, Artificial Sequence
  Description of Artificial Sequence: Synthetic oligonucleotide
  Target: LAMA2; (+) strand; PAM type: NRG; PAM sequence: CAG
ttttttgttcaagacaagta

SEQ ID NO: 153685 - DNA, 20 bp, Artificial Sequence
  Description of Artificial Sequence: Synthetic oligonucleotide
  Target: LAMA2; (+) strand; PAM type: NRG; PAM sequence: AGG
tttttgttcaagacaagtac

SEQ ID NO: 153686 - DNA, 20 bp, Artificial Sequence
  Description of Artificial Sequence: Synthetic oligonucleotide
  Target: LAMA2; (+) strand; PAM type: NRG; PAM sequence: GGG
ttttgttcaagacaagtaca

SEQ ID NO: 153687 - DNA, 20 bp, Artificial Sequence
  Description of Artificial Sequence: Synthetic oligonucleotide
  Target: LAMA2; (+) strand; PAM type: NRG; PAM sequence: AAG
atatgttaatatctaatctt

SEQ ID NO: 153688 - DNA, 20 bp, Artificial Sequence
  Description of Artificial Sequence: Synthetic oligonucleotide
  Target: LAMA2; (+) strand; PAM type: NRG; PAM sequence: TAG
aactcttttgaaactttacc

SEQ ID NO: 153689 - DNA, 20 bp, Artificial Sequence
  Description of Artificial Sequence: Synthetic oligonucleotide
  Target: LAMA2; (+) strand; PAM type: NRG; PAM sequence: TAG
aaactttacctagaaaatga

SEQ ID NO: 153690 - DNA, 20 bp, Artificial Sequence
  Description of Artificial Sequence: Synthetic oligonucleotide
  Target: LAMA2; (+) strand; PAM type: NRG; PAM sequence: GAG
actttacctagaaaatgata

SEQ ID NO: 153691 - DNA, 20 bp, Artificial Sequence
  Description of Artificial Sequence: Synthetic oligonucleotide
  Target: LAMA2; (+) strand; PAM type: NRG; PAM sequence: TAG
atttaatgtgtctcacaatc

SEQ ID NO: 153692 - DNA, 20 bp, Artificial Sequence
  Description of Artificial Sequence: Synthetic oligonucleotide
  Target: LAMA2; (+) strand; PAM type: NRG; PAM sequence: CAG
taatgtgtctcacaatctag

SEQ ID NO: 153693 - DNA, 20 bp, Artificial Sequence
  Description of Artificial Sequence: Synthetic oligonucleotide
  Target: LAMA2; (+) strand; PAM type: NRG; PAM sequence: GAG
atgtgtctcacaatctagca

SEQ ID NO: 153694 - DNA, 20 bp, Artificial Sequence
  Description of Artificial Sequence: Synthetic oligonucleotide
  Target: LAMA2; (+) strand; PAM type: NRG; PAM sequence: TGG
ctcacaatctagcagagatt

SEQ ID NO: 153695 - DNA, 20 bp, Artificial Sequence
  Description of Artificial Sequence: Synthetic oligonucleotide
  Target: LAMA2; (+) strand; PAM type: NRG; PAM sequence: GAG
cacaatctagcagagatttg

SEQ ID NO: 153696 - DNA, 20 bp, Artificial Sequence
  Description of Artificial Sequence: Synthetic oligonucleotide
  Target: LAMA2; (+) strand; PAM type: NRG; PAM sequence: AGG
acaatctagcagagatttgg

SEQ ID NO: 153697 - DNA, 20 bp, Artificial Sequence
  Description of Artificial Sequence: Synthetic oligonucleotide
  Target: LAMA2; (+) strand; PAM type: NRG; PAM sequence: GGG
caatctagcagagatttgga

SEQ ID NO: 153698 - DNA, 20 bp, Artificial Sequence
  Description of Artificial Sequence: Synthetic oligonucleotide
  Target: LAMA2; (+) strand; PAM type: NRG; PAM sequence: TGG
agcagagatttggagggtga

SEQ ID NO: 153699 - DNA, 20 bp, Artificial Sequence
  Description of Artificial Sequence: Synthetic oligonucleotide
  Target: LAMA2; (+) strand; PAM type: NRG; PAM sequence: TAG
gagatttggagggtgatgga

SEQ ID NO: 153700 - DNA, 20 bp, Artificial Sequence
  Description of Artificial Sequence: Synthetic oligonucleotide
  Target: LAMA2; (+) strand; PAM type: NRG; PAM sequence: AAG
tggagggtgatggatagaat

SEQ ID NO: 153701 - DNA, 20 bp, Artificial Sequence
  Description of Artificial Sequence: Synthetic oligonucleotide
  Target: LAMA2; (+) strand; PAM type: NRG; PAM sequence: AGG
ggagggtgatggatagaata

SEQ ID NO: 153702 - DNA, 20 bp, Artificial Sequence
  Description of Artificial Sequence: Synthetic oligonucleotide
  Target: LAMA2; (+) strand; PAM type: NRG; PAM sequence: GGG
gagggtgatggatagaataa

SEQ ID NO: 153703 - DNA, 20 bp, Artificial Sequence
  Description of Artificial Sequence: Synthetic oligonucleotide
  Target: LAMA2; (+) strand; PAM type: NRG; PAM sequence: AAG
atagaataagggcttaacac

SEQ ID NO: 153704 - DNA, 20 bp, Artificial Sequence
  Description of Artificial Sequence: Synthetic oligonucleotide
  Target: LAMA2; (+) strand; PAM type: NRG; PAM sequence: AAG
gaaataatttctgttgtaca

SEQ ID NO: 153705 - DNA, 20 bp, Artificial Sequence
  Description of Artificial Sequence: Synthetic oligonucleotide
  Target: LAMA2; (+) strand; PAM type: NRG; PAM sequence: GAG
ttctgttgtacaaagctcat

SEQ ID NO: 153706 - DNA, 20 bp, Artificial Sequence
  Description of Artificial Sequence: Synthetic oligonucleotide
  Target: LAMA2; (+) strand; PAM type: NRG; PAM sequence: TGG
aagctcatgagcttcatgca

SEQ ID NO: 153707 - DNA, 20 bp, Artificial Sequence
  Description of Artificial Sequence: Synthetic oligonucleotide
  Target: LAMA2; (+) strand; PAM type: NRG; PAM sequence: AAG
atgagcttcatgcatggtga

SEQ ID NO: 153708 - DNA, 20 bp, Artificial Sequence
  Description of Artificial Sequence: Synthetic oligonucleotide
  Target: LAMA2; (+) strand; PAM type: NRG; PAM sequence: TAG
catgcatggtgaaagatatt

SEQ ID NO: 153709 - DNA, 20 bp, Artificial Sequence
  Description of Artificial Sequence: Synthetic oligonucleotide
  Target: LAMA2; (+) strand; PAM type: NRG; PAM sequence: AGG
atgcatggtgaaagatattt

SEQ ID NO: 153710 - DNA, 20 bp, Artificial Sequence
  Description of Artificial Sequence: Synthetic oligonucleotide
  Target: LAMA2; (+) strand; PAM type: NRG; PAM sequence: AAG
ggtgaaagatatttaggcta

SEQ ID NO: 153711 - DNA, 20 bp, Artificial Sequence
  Description of Artificial Sequence: Synthetic oligonucleotide
  Target: LAMA2; (+) strand; PAM type: NRG; PAM sequence: CAG
taaagaaaatgttaactatg

SEQ ID NO: 153712 - DNA, 20 bp, Artificial Sequence
  Description of Artificial Sequence: Synthetic oligonucleotide
  Target: LAMA2; (+) strand; PAM type: NRG; PAM sequence: AGG
aaagaaaatgttaactatgc

SEQ ID NO: 153713 - DNA, 20 bp, Artificial Sequence
  Description of Artificial Sequence: Synthetic oligonucleotide
  Target: LAMA2; (+) strand; PAM type: NRG; PAM sequence: GGG
aagaaaatgttaactatgca

SEQ ID NO: 153714 - DNA, 20 bp, Artificial Sequence
  Description of Artificial Sequence: Synthetic oligonucleotide
  Target: LAMA2; (+) strand; PAM type: NRG; PAM sequence: CAG
gcagggaatgaaactcgtga

SEQ ID NO: 153715 - DNA, 20 bp, Artificial Sequence
  Description of Artificial Sequence: Synthetic oligonucleotide
  Target: LAMA2; (+) strand; PAM type: NRG; PAM sequence: CAG
cagcttgatcccataaaact

SEQ ID NO: 153716 - DNA, 20 bp, Artificial Sequence
  Description of Artificial Sequence: Synthetic oligonucleotide
  Target: LAMA2; (+) strand; PAM type: NRG; PAM sequence: AAG
ttgatcccataaaactcagc

SEQ ID NO: 153717 - DNA, 20 bp, Artificial Sequence
  Description of Artificial Sequence: Synthetic oligonucleotide
  Target: LAMA2; (+) strand; PAM type: NRG; PAM sequence: AGG
tgatcccataaaactcagca

SEQ ID NO: 153718 - DNA, 20 bp, Artificial Sequence
  Description of Artificial Sequence: Synthetic oligonucleotide
  Target: LAMA2; (+) strand; PAM type: NRG; PAM sequence: GAG
ccataaaactcagcaaggat

SEQ ID NO: 153719 - DNA, 20 bp, Artificial Sequence
  Description of Artificial Sequence: Synthetic oligonucleotide
  Target: LAMA2; (+) strand; PAM type: NRG; PAM sequence: AGG
cataaaactcagcaaggatg

SEQ ID NO: 153720 - DNA, 20 bp, Artificial Sequence
  Description of Artificial Sequence: Synthetic oligonucleotide
  Target: LAMA2; (+) strand; PAM type: NRG; PAM sequence: TAG
ctctgcatccctgatttata

SEQ ID NO: 153721 - DNA, 20 bp, Artificial Sequence
  Description of Artificial Sequence: Synthetic oligonucleotide
  Target: LAMA2; (+) strand; PAM type: NRG; PAM sequence: CAG
catccctgatttatatagta

SEQ ID NO: 153722 - DNA, 20 bp, Artificial Sequence
  Description of Artificial Sequence: Synthetic oligonucleotide
  Target: LAMA2; (+) strand; PAM type: NRG; PAM sequence: AAG
tagtacagtatgtttattta

SEQ ID NO: 153723 - DNA, 20 bp, Artificial Sequence
  Description of Artificial Sequence: Synthetic oligonucleotide
  Target: LAMA2; (+) strand; PAM type: NRG; PAM sequence: AGG
agtacagtatgtttatttaa

SEQ ID NO: 153724 - DNA, 20 bp, Artificial Sequence
  Description of Artificial Sequence: Synthetic oligonucleotide
  Target: LAMA2; (+) strand; PAM type: NRG; PAM sequence: GAG
tacagtatgtttatttaaag

SEQ ID NO: 153725 - DNA, 20 bp, Artificial Sequence
  Description of Artificial Sequence: Synthetic oligonucleotide
  Target: LAMA2; (+) strand; PAM type: NRG; PAM sequence: AAG
tatgtttatttaaaggagat

SEQ ID NO: 153726 - DNA, 20 bp, Artificial Sequence
  Description of Artificial Sequence: Synthetic oligonucleotide
  Target: LAMA2; (+) strand; PAM type: NRG; PAM sequence: CAG
tttatttaaaggagataagc

SEQ ID NO: 153727 - DNA, 20 bp, Artificial Sequence
  Description of Artificial Sequence: Synthetic oligonucleotide
  Target: LAMA2; (+) strand; PAM type: NRG; PAM sequence: AGG
ttatttaaaggagataagcc

SEQ ID NO: 153728 - DNA, 20 bp, Artificial Sequence
  Description of Artificial Sequence: Synthetic oligonucleotide
  Target: LAMA2; (+) strand; PAM type: NRG; PAM sequence: AAG
taaaggagataagccaggtt

SEQ ID NO: 153729 - DNA, 20 bp, Artificial Sequence
  Description of Artificial Sequence: Synthetic oligonucleotide
  Target: LAMA2; (+) strand; PAM type: NRG; PAM sequence: AGG
aaaggagataagccaggtta

SEQ ID NO: 153730 - DNA, 20 bp, Artificial Sequence
  Description of Artificial Sequence: Synthetic oligonucleotide
  Target: LAMA2; (+) strand; PAM type: NRG; PAM sequence: GGG
aaggagataagccaggttaa

SEQ ID NO: 153731 - DNA, 20 bp, Artificial Sequence
  Description of Artificial Sequence: Synthetic oligonucleotide
  Target: LAMA2; (+) strand; PAM type: NRG; PAM sequence: GGG
aggagataagccaggttaag

SEQ ID NO: 153732 - DNA, 20 bp, Artificial Sequence
  Description of Artificial Sequence: Synthetic oligonucleotide
  Target: LAMA2; (+) strand; PAM type: NRG; PAM sequence: CAG
ataagccaggttaaggggtt

SEQ ID NO: 153733 - DNA, 20 bp, Artificial Sequence
  Description of Artificial Sequence: Synthetic oligonucleotide
  Target: LAMA2; (+) strand; PAM type: NRG; PAM sequence: TAG
aattaactcctttaaaaatc

SEQ ID NO: 153734 - DNA, 20 bp, Artificial Sequence
  Description of Artificial Sequence: Synthetic oligonucleotide
  Target: LAMA2; (+) strand; PAM type: NRG; PAM sequence: AAG
aaatctagttattgctatga

SEQ ID NO: 153735 - DNA, 20 bp, Artificial Sequence
  Description of Artificial Sequence: Synthetic oligonucleotide
  Target: LAMA2; (+) strand; PAM type: NRG; PAM sequence: AAG
tattgctatgaaagtctctc

SEQ ID NO: 153736 - DNA, 20 bp, Artificial Sequence
  Description of Artificial Sequence: Synthetic oligonucleotide
  Target: LAMA2; (+) strand; PAM type: NRG; PAM sequence: CGG
ctatgaaagtctctcaagtg

SEQ ID NO: 153737 - DNA, 20 bp, Artificial Sequence
  Description of Artificial Sequence: Synthetic oligonucleotide
  Target: LAMA2; (+) strand; PAM type: NRG; PAM sequence: CAG
agtctctcaagtgcggtgct

SEQ ID NO: 153738 - DNA, 20 bp, Artificial Sequence
  Description of Artificial Sequence: Synthetic oligonucleotide
  Target: LAMA2; (+) strand; PAM type: NRG; PAM sequence: AGG
gtctctcaagtgcggtgctc

SEQ ID NO: 153739 - DNA, 20 bp, Artificial Sequence
  Description of Artificial Sequence: Synthetic oligonucleotide
  Target: LAMA2; (+) strand; PAM type: NRG; PAM sequence: CAG
gtgctcaggcttttttgcat

SEQ ID NO: 153740 - DNA, 20 bp, Artificial Sequence
  Description of Artificial Sequence: Synthetic oligonucleotide
  Target: LAMA2; (+) strand; PAM type: NRG; PAM sequence: TGG
gcttttttgcatcagtcatc

SEQ ID NO: 153741 - DNA, 20 bp, Artificial Sequence
  Description of Artificial Sequence: Synthetic oligonucleotide
  Target: LAMA2; (+) strand; PAM type: NRG; PAM sequence: GAG
ttttttgcatcagtcatctg

SEQ ID NO: 153742 - DNA, 20 bp, Artificial Sequence
  Description of Artificial Sequence: Synthetic oligonucleotide
  Target: LAMA2; (+) strand; PAM type: NRG; PAM sequence: TGG
ttatttaaaatgtttattat

SEQ ID NO: 153743 - DNA, 20 bp, Artificial Sequence
  Description of Artificial Sequence: Synthetic oligonucleotide
  Target: LAMA2; (+) strand; PAM type: NRG; PAM sequence: CGG
ttaaaatgtttattattggc

SEQ ID NO: 153744 - DNA, 20 bp, Artificial Sequence
  Description of Artificial Sequence: Synthetic oligonucleotide
  Target: LAMA2; (+) strand; PAM type: NRG; PAM sequence: GGG
taaaatgtttattattggcc

SEQ ID NO: 153745 - DNA, 20 bp, Artificial Sequence
  Description of Artificial Sequence: Synthetic oligonucleotide
  Target: LAMA2; (+) strand; PAM type: NRG; PAM sequence: CGG
tgtttattattggccgggcg

SEQ ID NO: 153746 - DNA, 20 bp, Artificial Sequence
  Description of Artificial Sequence: Synthetic oligonucleotide
  Target: LAMA2; (+) strand; PAM type: NRG; PAM sequence: TGG
ttattattggccgggcgcgg

SEQ ID NO: 153747 - DNA, 20 bp, Artificial Sequence
  Description of Artificial Sequence: Synthetic oligonucleotide
  Target: LAMA2; (+) strand; PAM type: NRG; PAM sequence: CAG
gtggctcacgcctgtaatcc

SEQ ID NO: 153748 - DNA, 20 bp, Artificial Sequence
  Description of Artificial Sequence: Synthetic oligonucleotide
  Target: LAMA2; (+) strand; PAM type: NRG; PAM sequence: TGG
cgcctgtaatcccagcactt

SEQ ID NO: 153749 - DNA, 20 bp, Artificial Sequence
  Description of Artificial Sequence: Synthetic oligonucleotide
  Target: LAMA2; (+) strand; PAM type: NRG; PAM sequence: GGG
gcctgtaatcccagcacttt

SEQ ID NO: 153750 - DNA, 20 bp, Artificial Sequence
  Description of Artificial Sequence: Synthetic oligonucleotide
  Target: LAMA2; (+) strand; PAM type: NRG; PAM sequence: GAG
ctgtaatcccagcactttgg

SEQ ID NO: 153751 - DNA, 20 bp, Artificial Sequence
  Description of Artificial Sequence: Synthetic oligonucleotide
  Target: LAMA2; (+) strand; PAM type: NRG; PAM sequence: AGG
tgtaatcccagcactttggg

SEQ ID NO: 153752 - DNA, 20 bp, Artificial Sequence
  Description of Artificial Sequence: Synthetic oligonucleotide
  Target: LAMA2; (+) strand; PAM type: NRG; PAM sequence: GAG
tcccagcactttgggaggct

SEQ ID NO: 153753 - DNA, 20 bp, Artificial Sequence
  Description of Artificial Sequence: Synthetic oligonucleotide
  Target: LAMA2; (+) strand; PAM type: NRG; PAM sequence: AGG
cccagcactttgggaggctg

SEQ ID NO: 153754 - DNA, 20 bp, Artificial Sequence
  Description of Artificial Sequence: Synthetic oligonucleotide
  Target: LAMA2; (+) strand; PAM type: NRG; PAM sequence: CGG
agcactttgggaggctgagg

SEQ ID NO: 153755 - DNA, 20 bp, Artificial Sequence
  Description of Artificial Sequence: Synthetic oligonucleotide
  Target: LAMA2; (+) strand; PAM type: NRG; PAM sequence: GGG
gcactttgggaggctgaggc

SEQ ID NO: 153756 - DNA, 20 bp, Artificial Sequence
  Description of Artificial Sequence: Synthetic oligonucleotide
  Target: LAMA2; (+) strand; PAM type: NRG; PAM sequence: CGG
ctttgggaggctgaggcggg

SEQ ID NO: 153757 - DNA, 20 bp, Artificial Sequence
  Description of Artificial Sequence: Synthetic oligonucleotide
  Target: LAMA2; (+) strand; PAM type: NRG; PAM sequence: GAG
ggctgaggcgggcggataac

SEQ ID NO: 153758 - DNA, 20 bp, Artificial Sequence
  Description of Artificial Sequence: Synthetic oligonucleotide
  Target: LAMA2; (+) strand; PAM type: NRG; PAM sequence: AGG
gctgaggcgggcggataacg

SEQ ID NO: 153759 - DNA, 20 bp, Artificial Sequence
  Description of Artificial Sequence: Synthetic oligonucleotide
  Target: LAMA2; (+) strand; PAM type: NRG; PAM sequence: CAG
aggcgggcggataacgaggt

SEQ ID NO: 153760 - DNA, 20 bp, Artificial Sequence
  Description of Artificial Sequence: Synthetic oligonucleotide
  Target: LAMA2; (+) strand; PAM type: NRG; PAM sequence: AGG
ggcgggcggataacgaggtc

SEQ ID NO: 153761 - DNA, 20 bp, Artificial Sequence
  Description of Artificial Sequence: Synthetic oligonucleotide
  Target: LAMA2; (+) strand; PAM type: NRG; PAM sequence: GAG
cgggcggataacgaggtcag

SEQ ID NO: 153762 - DNA, 20 bp, Artificial Sequence
  Description of Artificial Sequence: Synthetic oligonucleotide
  Target: LAMA2; (+) strand; PAM type: NRG; PAM sequence: GAG
gataacgaggtcaggagatc

SEQ ID NO: 153763 - DNA, 20 bp, Artificial Sequence
  Description of Artificial Sequence: Synthetic oligonucleotide
  Target: LAMA2; (+) strand; PAM type: NRG; PAM sequence: TGG
tcaggagatcgagaccatcc

SEQ ID NO: 153764 - DNA, 20 bp, Artificial Sequence
  Description of Artificial Sequence: Synthetic oligonucleotide
  Target: LAMA2; (+) strand; PAM type: NRG; PAM sequence: TAG
tactaaatatacataaaaat

SEQ ID NO: 153765 - DNA, 20 bp, Artificial Sequence
  Description of Artificial Sequence: Synthetic oligonucleotide
  Target: LAMA2; (+) strand; PAM type: NRG; PAM sequence: CAG
aaatatacataaaaattagc

SEQ ID NO: 153766 - DNA, 20 bp, Artificial Sequence
  Description of Artificial Sequence: Synthetic oligonucleotide
  Target: LAMA2; (+) strand; PAM type: NRG; PAM sequence: AGG
aatatacataaaaattagcc

SEQ ID NO: 153767 - DNA, 20 bp, Artificial Sequence
  Description of Artificial Sequence: Synthetic oligonucleotide
  Target: LAMA2; (+) strand; PAM type: NRG; PAM sequence: CAG
atacataaaaattagccagg

SEQ ID NO: 153768 - DNA, 20 bp, Artificial Sequence
  Description of Artificial Sequence: Synthetic oligonucleotide
  Target: LAMA2; (+) strand; PAM type: NRG; PAM sequence: AGG
tacataaaaattagccaggc

SEQ ID NO: 153769 - DNA, 20 bp, Artificial Sequence
  Description of Artificial Sequence: Synthetic oligonucleotide
  Target: LAMA2; (+) strand; PAM type: NRG; PAM sequence: GGG
acataaaaattagccaggca

SEQ ID NO: 153770 - DNA, 20 bp, Artificial Sequence
  Description of Artificial Sequence: Synthetic oligonucleotide
  Target: LAMA2; (+) strand; PAM type: NRG; PAM sequence: TAG
taaaaattagccaggcaggg

SEQ ID NO: 153771 - DNA, 20 bp, Artificial Sequence
  Description of Artificial Sequence: Synthetic oligonucleotide
  Target: LAMA2; (+) strand; PAM type: NRG; PAM sequence: CGG
aaattagccaggcagggtag

SEQ ID NO: 153772 - DNA, 20 bp, Artificial Sequence
  Description of Artificial Sequence: Synthetic oligonucleotide
  Target: LAMA2; (+) strand; PAM type: NRG; PAM sequence: GGG
aattagccaggcagggtagc

SEQ ID NO: 153773 - DNA, 20 bp, Artificial Sequence
  Description of Artificial Sequence: Synthetic oligonucleotide
  Target: LAMA2; (+) strand; PAM type: NRG; PAM sequence: CAG
gtagcgggcacctgtaatcc

SEQ ID NO: 153774 - DNA, 20 bp, Artificial Sequence
  Description of Artificial Sequence: Synthetic oligonucleotide
  Target: LAMA2; (+) strand; PAM type: NRG; PAM sequence: CGG
cacctgtaatcccagctact

SEQ ID NO: 153775 - DNA, 20 bp, Artificial Sequence
  Description of Artificial Sequence: Synthetic oligonucleotide
  Target: LAMA2; (+) strand; PAM type: NRG; PAM sequence: GGG
acctgtaatcccagctactc

SEQ ID NO: 153776 - DNA, 20 bp, Artificial Sequence
  Description of Artificial Sequence: Synthetic oligonucleotide
  Target: LAMA2; (+) strand; PAM type: NRG; PAM sequence: GAG
ctgtaatcccagctactcgg

SEQ ID NO: 153777 - DNA, 20 bp, Artificial Sequence
  Description of Artificial Sequence: Synthetic oligonucleotide
  Target: LAMA2; (+) strand; PAM type: NRG; PAM sequence: AGG
tgtaatcccagctactcggg

SEQ ID NO: 153778 - DNA, 20 bp, Artificial Sequence
  Description of Artificial Sequence: Synthetic oligonucleotide
  Target: LAMA2; (+) strand; PAM type: NRG; PAM sequence: GAG
tcccagctactcgggaggct

SEQ ID NO: 153779 - DNA, 20 bp, Artificial Sequence
  Description of Artificial Sequence: Synthetic oligonucleotide
  Target: LAMA2; (+) strand; PAM type: NRG; PAM sequence: AGG
cccagctactcgggaggctg

SEQ ID NO: 153780 - DNA, 20 bp, Artificial Sequence
  Description of Artificial Sequence: Synthetic oligonucleotide
  Target: LAMA2; (+) strand; PAM type: NRG; PAM sequence: CAG
agctactcgggaggctgagg

SEQ ID NO: 153781 - DNA, 20 bp, Artificial Sequence
  Description of Artificial Sequence: Synthetic oligonucleotide
  Target: LAMA2; (+) strand; PAM type: NRG; PAM sequence: AGG
gctactcgggaggctgaggc

SEQ ID NO: 153782 - DNA, 20 bp, Artificial Sequence
  Description of Artificial Sequence: Synthetic oligonucleotide
  Target: LAMA2; (+) strand; PAM type: NRG; PAM sequence: GAG
tactcgggaggctgaggcag

SEQ ID NO: 153783 - DNA, 20 bp, Artificial Sequence
  Description of Artificial Sequence: Synthetic oligonucleotide
  Target: LAMA2; (+) strand; PAM type: NRG; PAM sequence: AAG
tgaggcaggagaatgacgtg

SEQ ID NO: 153784 - DNA, 20 bp, Artificial Sequence
  Description of Artificial Sequence: Synthetic oligonucleotide
  Target: LAMA2; (+) strand; PAM type: NRG; PAM sequence: CGG
gcaggagaatgacgtgaagc

SEQ ID NO: 153785 - DNA, 20 bp, Artificial Sequence
  Description of Artificial Sequence: Synthetic oligonucleotide
  Target: LAMA2; (+) strand; PAM type: NRG; PAM sequence: GGG
caggagaatgacgtgaagcc

SEQ ID NO: 153786 - DNA, 20 bp, Artificial Sequence
  Description of Artificial Sequence: Synthetic oligonucleotide
  Target: LAMA2; (+) strand; PAM type: NRG; PAM sequence: GAG
ggagaatgacgtgaagccgg

SEQ ID NO: 153787 - DNA, 20 bp, Artificial Sequence
  Description of Artificial Sequence: Synthetic oligonucleotide
  Target: LAMA2; (+) strand; PAM type: NRG; PAM sequence: AGG
gagaatgacgtgaagccggg

SEQ ID NO: 153788 - DNA, 20 bp, Artificial Sequence
  Description of Artificial Sequence: Synthetic oligonucleotide
  Target: LAMA2; (+) strand; PAM type: NRG; PAM sequence: TGG
aatgacgtgaagccgggagg

SEQ ID NO: 153789 - DNA, 20 bp, Artificial Sequence
  Description of Artificial Sequence: Synthetic oligonucleotide
  Target: LAMA2; (+) strand; PAM type: NRG; PAM sequence: GAG
tgacgtgaagccgggaggtg

SEQ ID NO: 153790 - DNA, 20 bp, Artificial Sequence
  Description of Artificial Sequence: Synthetic oligonucleotide
  Target: LAMA2; (+) strand; PAM type: NRG; PAM sequence: CAG
aagccgggaggtggagcttg

SEQ ID NO: 153791 - DNA, 20 bp, Artificial Sequence
  Description of Artificial Sequence: Synthetic oligonucleotide
  Target: LAMA2; (+) strand; PAM type: NRG; PAM sequence: GAG
cgggaggtggagcttgcagt

SEQ ID NO: 153792 - DNA, 20 bp, Artificial Sequence
  Description of Artificial Sequence: Synthetic oligonucleotide
  Target: LAMA2; (+) strand; PAM type: NRG; PAM sequence: CAG
gtgatcgcgccactgcactc

SEQ ID NO: 153793 - DNA, 20 bp, Artificial Sequence
  Description of Artificial Sequence: Synthetic oligonucleotide
  Target: LAMA2; (+) strand; PAM type: NRG; PAM sequence: CGG
cgcgccactgcactccagcc

SEQ ID NO: 153794 - DNA, 20 bp, Artificial Sequence
  Description of Artificial Sequence: Synthetic oligonucleotide
  Target: LAMA2; (+) strand; PAM type: NRG; PAM sequence: GGG
gcgccactgcactccagccc

SEQ ID NO: 153795 - DNA, 20 bp, Artificial Sequence
  Description of Artificial Sequence: Synthetic oligonucleotide
  Target: LAMA2; (+) strand; PAM type: NRG; PAM sequence: CAG
ctgcactccagcccgggcga

SEQ ID NO: 153796 - DNA, 20 bp, Artificial Sequence
  Description of Artificial Sequence: Synthetic oligonucleotide
  Target: LAMA2; (+) strand; PAM type: NRG; PAM sequence: GAG
gcactccagcccgggcgaca

SEQ ID NO: 153797 - DNA, 20 bp, Artificial Sequence
  Description of Artificial Sequence: Synthetic oligonucleotide
  Target: LAMA2; (+) strand; PAM type: NRG; PAM sequence: GAG
tccagcccgggcgacagagc

SEQ ID NO: 153798 - DNA, 20 bp, Artificial Sequence
  Description of Artificial Sequence: Synthetic oligonucleotide
  Target: LAMA2; (+) strand; PAM type: NRG; PAM sequence: TGG
tttactattgacccttactc

SEQ ID NO: 153799 - DNA, 20 bp, Artificial Sequence
  Description of Artificial Sequence: Synthetic oligonucleotide
  Target: LAMA2; (+) strand; PAM type: NRG; PAM sequence: CAG
ttactctggattcacttatc

SEQ ID NO: 153800 - DNA, 20 bp, Artificial Sequence
  Description of Artificial Sequence: Synthetic oligonucleotide
  Target: LAMA2; (+) strand; PAM type: NRG; PAM sequence: AAG
ctctggattcacttatccag

SEQ ID NO: 153801 - DNA, 20 bp, Artificial Sequence
  Description of Artificial Sequence: Synthetic oligonucleotide
  Target: LAMA2; (+) strand; PAM type: NRG; PAM sequence: TGG
attcacttatccagaagatc

SEQ ID NO: 153802 - DNA, 20 bp, Artificial Sequence
  Description of Artificial Sequence: Synthetic oligonucleotide
  Target: LAMA2; (+) strand; PAM type: NRG; PAM sequence: GGG
ttcacttatccagaagatct

SEQ ID NO: 153803 - DNA, 20 bp, Artificial Sequence
  Description of Artificial Sequence: Synthetic oligonucleotide
  Target: LAMA2; (+) strand; PAM type: NRG; PAM sequence: GGG
tcacttatccagaagatctg

SEQ ID NO: 153804 - DNA, 20 bp, Artificial Sequence
  Description of Artificial Sequence: Synthetic oligonucleotide
  Target: LAMA2; (+) strand; PAM type: NRG; PAM sequence: CAG
gggaaatctacgtttttaat

SEQ ID NO: 153805 - DNA, 20 bp, Artificial Sequence
  Description of Artificial Sequence: Synthetic oligonucleotide
  Target: LAMA2; (+) strand; PAM type: NRG; PAM sequence: AAG
acgtttttaatcagctcccc

SEQ ID NO: 153806 - DNA, 20 bp, Artificial Sequence
  Description of Artificial Sequence: Synthetic oligonucleotide
  Target: LAMA2; (+) strand; PAM type: NRG; PAM sequence: AAG
ccaagtgattatttacccat

SEQ ID NO: 153807 - DNA, 20 bp, Artificial Sequence
  Description of Artificial Sequence: Synthetic oligonucleotide
  Target: LAMA2; (+) strand; PAM type: NRG; PAM sequence: TGG
attatttacccataagaatt

SEQ ID NO: 153808 - DNA, 20 bp, Artificial Sequence
  Description of Artificial Sequence: Synthetic oligonucleotide
  Target: LAMA2; (+) strand; PAM type: NRG; PAM sequence: GGG
ttatttacccataagaattt

SEQ ID NO: 153809 - DNA, 20 bp, Artificial Sequence
  Description of Artificial Sequence: Synthetic oligonucleotide
  Target: LAMA2; (+) strand; PAM type: NRG; PAM sequence: GGG
tatttacccataagaatttg

SEQ ID NO: 153810 - DNA, 20 bp, Artificial Sequence
  Description of Artificial Sequence: Synthetic oligonucleotide
  Target: LAMA2; (+) strand; PAM type: NRG; PAM sequence: GGG
atttacccataagaatttgg

SEQ ID NO: 153811 - DNA, 20 bp, Artificial Sequence
  Description of Artificial Sequence: Synthetic oligonucleotide
  Target: LAMA2; (+) strand; PAM type: NRG; PAM sequence: GGG
tttacccataagaatttggg

SEQ ID NO: 153812 - DNA, 20 bp, Artificial Sequence
  Description of Artificial Sequence: Synthetic oligonucleotide
  Target: LAMA2; (+) strand; PAM type: NRG; PAM sequence: CAG
tactgatgattaattatctg

SEQ ID NO: 153813 - DNA, 20 bp, Artificial Sequence
  Description of Artificial Sequence: Synthetic oligonucleotide
  Target: LAMA2; (+) strand; PAM type: NRG; PAM sequence: TAG
gatgattaattatctgcaga

SEQ ID NO: 153814 - DNA, 20 bp, Artificial Sequence
  Description of Artificial Sequence: Synthetic oligonucleotide
  Target: LAMA2; (+) strand; PAM type: NRG; PAM sequence: TAG
attatctgcagatagttccc

SEQ ID NO: 153815 - DNA, 20 bp, Artificial Sequence
  Description of Artificial Sequence: Synthetic oligonucleotide
  Target: LAMA2; (+) strand; PAM type: NRG; PAM sequence: AAG
tccctagactttgactttcc

SEQ ID NO: 153816 - DNA, 20 bp, Artificial Sequence
  Description of Artificial Sequence: Synthetic oligonucleotide
  Target: LAMA2; (+) strand; PAM type: NRG; PAM sequence: AGG
ccctagactttgactttcca

SEQ ID NO: 153817 - DNA, 20 bp, Artificial Sequence
  Description of Artificial Sequence: Synthetic oligonucleotide
  Target: LAMA2; (+) strand; PAM type: NRG; PAM sequence: CAG
caaacaaacaaaaaaacctg

SEQ ID NO: 153818 - DNA, 20 bp, Artificial Sequence
  Description of Artificial Sequence: Synthetic oligonucleotide
  Target: LAMA2; (+) strand; PAM type: NRG; PAM sequence: TAG
aaaaacctgcagtatgcttt

SEQ ID NO: 153819 - DNA, 20 bp, Artificial Sequence
  Description of Artificial Sequence: Synthetic oligonucleotide
  Target: LAMA2; (+) strand; PAM type: NRG; PAM sequence: CAG
gtatgcttttagtctgaatt

SEQ ID NO: 153820 - DNA, 20 bp, Artificial Sequence
  Description of Artificial Sequence: Synthetic oligonucleotide
  Target: LAMA2; (+) strand; PAM type: NRG; PAM sequence: AGG
tatgcttttagtctgaattc

SEQ ID NO: 153821 - DNA, 20 bp, Artificial Sequence
  Description of Artificial Sequence: Synthetic oligonucleotide
  Target: LAMA2; (+) strand; PAM type: NRG; PAM sequence: GGG
atgcttttagtctgaattca

SEQ ID NO: 153822 - DNA, 20 bp, Artificial Sequence
  Description of Artificial Sequence: Synthetic oligonucleotide
  Target: LAMA2; (+) strand; PAM type: NRG; PAM sequence: TAG
ggattgactttcttatccaa

SEQ ID NO: 153823 - DNA, 20 bp, Artificial Sequence
  Description of Artificial Sequence: Synthetic oligonucleotide
  Target: LAMA2; (+) strand; PAM type: NRG; PAM sequence: AAG
tccaatagtctatcctgtac

SEQ ID NO: 153824 - DNA, 20 bp, Artificial Sequence
  Description of Artificial Sequence: Synthetic oligonucleotide
  Target: LAMA2; (+) strand; PAM type: NRG; PAM sequence: AGG
ccaatagtctatcctgtaca

SEQ ID NO: 153825 - DNA, 20 bp, Artificial Sequence
  Description of Artificial Sequence: Synthetic oligonucleotide
  Target: LAMA2; (+) strand; PAM type: NRG; PAM sequence: GGG
caatagtctatcctgtacaa

SEQ ID NO: 153826 - DNA, 20 bp, Artificial Sequence
  Description of Artificial Sequence: Synthetic oligonucleotide
  Target: LAMA2; (+) strand; PAM type: NRG; PAM sequence: TAG
gaaccctaaaataacctcgt

SEQ ID NO: 153827 - DNA, 20 bp, Artificial Sequence
  Description of Artificial Sequence: Synthetic oligonucleotide
  Target: LAMA2; (+) strand; PAM type: NRG; PAM sequence: AAG
aacctcgttagccaccacca

SEQ ID NO: 153828 - DNA, 20 bp, Artificial Sequence
  Description of Artificial Sequence: Synthetic oligonucleotide
  Target: LAMA2; (+) strand; PAM type: NRG; PAM sequence: TAG
aatttatttatcaatctcat

SEQ ID NO: 153829 - DNA, 20 bp, Artificial Sequence
  Description of Artificial Sequence: Synthetic oligonucleotide
  Target: LAMA2; (+) strand; PAM type: NRG; PAM sequence: TGG
caccaaccacacatttacat

SEQ ID NO: 153830 - DNA, 20 bp, Artificial Sequence
  Description of Artificial Sequence: Synthetic oligonucleotide
  Target: LAMA2; (+) strand; PAM type: NRG; PAM sequence: TAG
cattggaataaaatgaatct

SEQ ID NO: 153831 - DNA, 20 bp, Artificial Sequence
  Description of Artificial Sequence: Synthetic oligonucleotide
  Target: LAMA2; (+) strand; PAM type: NRG; PAM sequence: AAG
ggaataaaatgaatcttaga

SEQ ID NO: 153832 - DNA, 20 bp, Artificial Sequence
  Description of Artificial Sequence: Synthetic oligonucleotide
  Target: LAMA2; (+) strand; PAM type: NRG; PAM sequence: CAG
ataaaatgaatcttagaaag

SEQ ID NO: 153833 - DNA, 20 bp, Artificial Sequence
  Description of Artificial Sequence: Synthetic oligonucleotide
  Target: LAMA2; (+) strand; PAM type: NRG; PAM sequence: AAG
ttagaaagcagctattttta

SEQ ID NO: 153834 - DNA, 20 bp, Artificial Sequence
  Description of Artificial Sequence: Synthetic oligonucleotide
  Target: LAMA2; (+) strand; PAM type: NRG; PAM sequence: CAG
agcagctatttttaaagaaa

SEQ ID NO: 153835 - DNA, 20 bp, Artificial Sequence
  Description of Artificial Sequence: Synthetic oligonucleotide
  Target: LAMA2; (+) strand; PAM type: NRG; PAM sequence: AGG
gcagctatttttaaagaaac

SEQ ID NO: 153836 - DNA, 20 bp, Artificial Sequence
  Description of Artificial Sequence: Synthetic oligonucleotide
  Target: LAMA2; (+) strand; PAM type: NRG; PAM sequence: AAG
gctatttttaaagaaacagg

SEQ ID NO: 153837 - DNA, 20 bp, Artificial Sequence
  Description of Artificial Sequence: Synthetic oligonucleotide
  Target: LAMA2; (+) strand; PAM type: NRG; PAM sequence: TGG
aacatgtactgccattaatt

SEQ ID NO: 153838 - DNA, 20 bp, Artificial Sequence
  Description of Artificial Sequence: Synthetic oligonucleotide
  Target: LAMA2; (+) strand; PAM type: NRG; PAM sequence: TGG
gtactgccattaatttggaa

SEQ ID NO: 153839 - DNA, 20 bp, Artificial Sequence
  Description of Artificial Sequence: Synthetic oligonucleotide
  Target: LAMA2; (+) strand; PAM type: NRG; PAM sequence: GGG
tactgccattaatttggaat

SEQ ID NO: 153840 - DNA, 20 bp, Artificial Sequence
  Description of Artificial Sequence: Synthetic oligonucleotide
  Target: LAMA2; (+) strand; PAM type: NRG; PAM sequence: GAG
ctgccattaatttggaatgg

SEQ ID NO: 153841 - DNA, 20 bp, Artificial Sequence
  Description of Artificial Sequence: Synthetic oligonucleotide
  Target: LAMA2; (+) strand; PAM type: NRG; PAM sequence: GAG
gccattaatttggaatggga

SEQ ID NO: 153842 - DNA, 20 bp, Artificial Sequence
  Description of Artificial Sequence: Synthetic oligonucleotide
  Target: LAMA2; (+) strand; PAM type: NRG; PAM sequence: AAG
ttaatttggaatgggagaga

SEQ ID NO: 153843 - DNA, 20 bp, Artificial Sequence
  Description of Artificial Sequence: Synthetic oligonucleotide
  Target: LAMA2; (+) strand; PAM type: NRG; PAM sequence: AGG
taatttggaatgggagagaa

SEQ ID NO: 153844 - DNA, 20 bp, Artificial Sequence
  Description of Artificial Sequence: Synthetic oligonucleotide
  Target: LAMA2; (+) strand; PAM type: NRG; PAM sequence: GAG
atttggaatgggagagaaag

SEQ ID NO: 153845 - DNA, 20 bp, Artificial Sequence
  Description of Artificial Sequence: Synthetic oligonucleotide
  Target: LAMA2; (+) strand; PAM type: NRG; PAM sequence: TGG
aatgggagagaaaggagact

SEQ ID NO: 153846 - DNA, 20 bp, Artificial Sequence
  Description of Artificial Sequence: Synthetic oligonucleotide
  Target: LAMA2; (+) strand; PAM type: NRG; PAM sequence: CAG
gggagagaaaggagacttgg

SEQ ID NO: 153847 - DNA, 20 bp, Artificial Sequence
  Description of Artificial Sequence: Synthetic oligonucleotide
  Target: LAMA2; (+) strand; PAM type: NRG; PAM sequence: CAG
gaaaggagacttggcagaac

SEQ ID NO: 153848 - DNA, 20 bp, Artificial Sequence
  Description of Artificial Sequence: Synthetic oligonucleotide
  Target: LAMA2; (+) strand; PAM type: NRG; PAM sequence: GAG
gcagaaccagaatattgcgt

SEQ ID NO: 153849 - DNA, 20 bp, Artificial Sequence
  Description of Artificial Sequence: Synthetic oligonucleotide
  Target: LAMA2; (+) strand; PAM type: NRG; PAM sequence: AGG
cagaaccagaatattgcgtg

SEQ ID NO: 153850 - DNA, 20 bp, Artificial Sequence
  Description of Artificial Sequence: Synthetic oligonucleotide
  Target: LAMA2; (+) strand; PAM type: NRG; PAM sequence: AAG
agaatattgcgtgaggattg

SEQ ID NO: 153851 - DNA, 20 bp, Artificial Sequence
  Description of Artificial Sequence: Synthetic oligonucleotide
  Target: LAMA2; (+) strand; PAM type: NRG; PAM sequence: TAG
tattgcgtgaggattgaaga

SEQ ID NO: 153852 - DNA, 20 bp, Artificial Sequence
  Description of Artificial Sequence: Synthetic oligonucleotide
  Target: LAMA2; (+) strand; PAM type: NRG; PAM sequence: CAG
gtgaggattgaagatagctt

SEQ ID NO: 153853 - DNA, 20 bp, Artificial Sequence
  Description of Artificial Sequence: Synthetic oligonucleotide
  Target: LAMA2; (+) strand; PAM type: NRG; PAM sequence: TAG
ttgaagatagcttcagattc

SEQ ID NO: 153854 - DNA, 20 bp, Artificial Sequence
  Description of Artificial Sequence: Synthetic oligonucleotide
  Target: LAMA2; (+) strand; PAM type: NRG; PAM sequence: AAG
aagatagcttcagattctag

SEQ ID NO: 153855 - DNA, 20 bp, Artificial Sequence
  Description of Artificial Sequence: Synthetic oligonucleotide
  Target: LAMA2; (+) strand; PAM type: NRG; PAM sequence: GAG
gatagcttcagattctagaa

SEQ ID NO: 153856 - DNA, 20 bp, Artificial Sequence
  Description of Artificial Sequence: Synthetic oligonucleotide
  Target: LAMA2; (+) strand; PAM type: NRG; PAM sequence: TAG
tcagattctagaagagtttc

SEQ ID NO: 153857 - DNA, 20 bp, Artificial Sequence
  Description of Artificial Sequence: Synthetic oligonucleotide
  Target: LAMA2; (+) strand; PAM type: NRG; PAM sequence: CAG
tctttctgaatatgtgttaa

SEQ ID NO: 153858 - DNA, 20 bp, Artificial Sequence
  Description of Artificial Sequence: Synthetic oligonucleotide
  Target: LAMA2; (+) strand; PAM type: NRG; PAM sequence: GAG
tgttaacagtttcgctgttt

SEQ ID NO: 153859 - DNA, 20 bp, Artificial Sequence
  Description of Artificial Sequence: Synthetic oligonucleotide
  Target: LAMA2; (+) strand; PAM type: NRG; PAM sequence: TAG
gtttgagctctgctacccac

SEQ ID NO: 153860 - DNA, 20 bp, Artificial Sequence
  Description of Artificial Sequence: Synthetic oligonucleotide
  Target: LAMA2; (+) strand; PAM type: NRG; PAM sequence: CAG
gagctctgctacccactagc

SEQ ID NO: 153861 - DNA, 20 bp, Artificial Sequence
  Description of Artificial Sequence: Synthetic oligonucleotide
  Target: LAMA2; (+) strand; PAM type: NRG; PAM sequence: CAG
ccactagccagttataaaca

SEQ ID NO: 153862 - DNA, 20 bp, Artificial Sequence
  Description of Artificial Sequence: Synthetic oligonucleotide
  Target: LAMA2; (+) strand; PAM type: NRG; PAM sequence: AGG
cactagccagttataaacac

SEQ ID NO: 153863 - DNA, 20 bp, Artificial Sequence
  Description of Artificial Sequence: Synthetic oligonucleotide
  Target: LAMA2; (+) strand; PAM type: NRG; PAM sequence: AAG
agccagttataaacacaggt

SEQ ID NO: 153864 - DNA, 20 bp, Artificial Sequence
  Description of Artificial Sequence: Synthetic oligonucleotide
  Target: LAMA2; (+) strand; PAM type: NRG; PAM sequence: CAG
aggtaagacccttaacttca

SEQ ID NO: 153865 - DNA, 20 bp, Artificial Sequence
  Description of Artificial Sequence: Synthetic oligonucleotide
  Target: LAMA2; (+) strand; PAM type: NRG; PAM sequence: AGG
ggtaagacccttaacttcac

SEQ ID NO: 153866 - DNA, 20 bp, Artificial Sequence
  Description of Artificial Sequence: Synthetic oligonucleotide
  Target: LAMA2; (+) strand; PAM type: NRG; PAM sequence: GGG
gtaagacccttaacttcaca

SEQ ID NO: 153867 - DNA, 20 bp, Artificial Sequence
  Description of Artificial Sequence: Synthetic oligonucleotide
  Target: LAMA2; (+) strand; PAM type: NRG; PAM sequence: TGG
cttaacttcacagggcctgt

SEQ ID NO: 153868 - DNA, 20 bp, Artificial Sequence
  Description of Artificial Sequence: Synthetic oligonucleotide
  Target: LAMA2; (+) strand; PAM type: NRG; PAM sequence: GGG
ttaacttcacagggcctgtt

SEQ ID NO: 153869 - DNA, 20 bp, Artificial Sequence
  Description of Artificial Sequence: Synthetic oligonucleotide
  Target: LAMA2; (+) strand; PAM type: NRG; PAM sequence: AAG
acttcacagggcctgttggg

SEQ ID NO: 153870 - DNA, 20 bp, Artificial Sequence
  Description of Artificial Sequence: Synthetic oligonucleotide
  Target: LAMA2; (+) strand; PAM type: NRG; PAM sequence: GAG
ttcacagggcctgttgggaa

SEQ ID NO: 153871 - DNA, 20 bp, Artificial Sequence
  Description of Artificial Sequence: Synthetic oligonucleotide
  Target: LAMA2; (+) strand; PAM type: NRG; PAM sequence: AGG
tcacagggcctgttgggaag

SEQ ID NO: 153872 - DNA, 20 bp, Artificial Sequence
  Description of Artificial Sequence: Synthetic oligonucleotide
  Target: LAMA2; (+) strand; PAM type: NRG; PAM sequence: TAG
gggaagaggttataattttt

SEQ ID NO: 153873 - DNA, 20 bp, Artificial Sequence
  Description of Artificial Sequence: Synthetic oligonucleotide
  Target: LAMA2; (+) strand; PAM type: NRG; PAM sequence: CAG
aggttataattttttagcaa

SEQ ID NO: 153874 - DNA, 20 bp, Artificial Sequence
  Description of Artificial Sequence: Synthetic oligonucleotide
  Target: LAMA2; (+) strand; PAM type: NRG; PAM sequence: TAG
ttttcaaacaaaatcctaat

SEQ ID NO: 153875 - DNA, 20 bp, Artificial Sequence
  Description of Artificial Sequence: Synthetic oligonucleotide
  Target: LAMA2; (+) strand; PAM type: NRG; PAM sequence: AAG
acccaaaaacaaacaaaata

SEQ ID NO: 153876 - DNA, 20 bp, Artificial Sequence
  Description of Artificial Sequence: Synthetic oligonucleotide
  Target: LAMA2; (+) strand; PAM type: NRG; PAM sequence: AGG
cccaaaaacaaacaaaataa

SEQ ID NO: 153877 - DNA, 20 bp, Artificial Sequence
  Description of Artificial Sequence: Synthetic oligonucleotide
  Target: LAMA2; (+) strand; PAM type: NRG; PAM sequence: TGG
aacaaaataaaggattcaaa

SEQ ID NO: 153878 - DNA, 20 bp, Artificial Sequence
  Description of Artificial Sequence: Synthetic oligonucleotide
  Target: LAMA2; (+) strand; PAM type: NRG; PAM sequence: GGG
acaaaataaaggattcaaat

SEQ ID NO: 153879 - DNA, 20 bp, Artificial Sequence
  Description of Artificial Sequence: Synthetic oligonucleotide
  Target: LAMA2; (+) strand; PAM type: NRG; PAM sequence: TGG
aaggattcaaatgggtgaca

SEQ ID NO: 153880 - DNA, 20 bp, Artificial Sequence
  Description of Artificial Sequence: Synthetic oligonucleotide
  Target: LAMA2; (+) strand; PAM type: NRG; PAM sequence: CAG
attcaaatgggtgacatggc

SEQ ID NO: 153881 - DNA, 20 bp, Artificial Sequence
  Description of Artificial Sequence: Synthetic oligonucleotide
  Target: LAMA2; (+) strand; PAM type: NRG; PAM sequence: TGG
atgggtgacatggccagtcc

SEQ ID NO: 153882 - DNA, 20 bp, Artificial Sequence
  Description of Artificial Sequence: Synthetic oligonucleotide
  Target: LAMA2; (+) strand; PAM type: NRG; PAM sequence: CAG
gacatggccagtcctggtta

SEQ ID NO: 153883 - DNA, 20 bp, Artificial Sequence
  Description of Artificial Sequence: Synthetic oligonucleotide
  Target: LAMA2; (+) strand; PAM type: NRG; PAM sequence: GAG
gccagtcctggttacagtat

SEQ ID NO: 153884 - DNA, 20 bp, Artificial Sequence
  Description of Artificial Sequence: Synthetic oligonucleotide
  Target: LAMA2; (+) strand; PAM type: NRG; PAM sequence: CAG
gtcctggttacagtatgaga

SEQ ID NO: 153885 - DNA, 20 bp, Artificial Sequence
  Description of Artificial Sequence: Synthetic oligonucleotide
  Target: LAMA2; (+) strand; PAM type: NRG; PAM sequence: CGG
ttacagtatgagacagatgc

SEQ ID NO: 153886 - DNA, 20 bp, Artificial Sequence
  Description of Artificial Sequence: Synthetic oligonucleotide
  Target: LAMA2; (+) strand; PAM type: NRG; PAM sequence: CGG
tatgagacagatgccggtta

SEQ ID NO: 153887 - DNA, 20 bp, Artificial Sequence
  Description of Artificial Sequence: Synthetic oligonucleotide
  Target: LAMA2; (+) strand; PAM type: NRG; PAM sequence: TGG
gagacagatgccggttacgg

SEQ ID NO: 153888 - DNA, 20 bp, Artificial Sequence
  Description of Artificial Sequence: Synthetic oligonucleotide
  Target: LAMA2; (+) strand; PAM type: NRG; PAM sequence: GGG
agacagatgccggttacggt

SEQ ID NO: 153889 - DNA, 20 bp, Artificial Sequence
  Description of Artificial Sequence: Synthetic oligonucleotide
  Target: LAMA2; (+) strand; PAM type: NRG; PAM sequence: CAG
atgccggttacggtgggcaa

SEQ ID NO: 153890 - DNA, 20 bp, Artificial Sequence
  Description of Artificial Sequence: Synthetic oligonucleotide
  Target: LAMA2; (+) strand; PAM type: NRG; PAM sequence: CAG
ggttacggtgggcaacagaa

SEQ ID NO: 153891 - DNA, 20 bp, Artificial Sequence
  Description of Artificial Sequence: Synthetic oligonucleotide
  Target: LAMA2; (+) strand; PAM type: NRG; PAM sequence: TGG
gtgggcaacagaacagatgc

SEQ ID NO: 153892 - DNA, 20 bp, Artificial Sequence
  Description of Artificial Sequence: Synthetic oligonucleotide
  Target: LAMA2; (+) strand; PAM type: NRG; PAM sequence: CAG
aacagaacagatgctggcta

SEQ ID NO: 153893 - DNA, 20 bp, Artificial Sequence
  Description of Artificial Sequence: Synthetic oligonucleotide
  Target: LAMA2; (+) strand; PAM type: NRG; PAM sequence: TGG
agaacagatgctggctacag

SEQ ID NO: 153894 - DNA, 20 bp, Artificial Sequence
  Description of Artificial Sequence: Synthetic oligonucleotide
  Target: LAMA2; (+) strand; PAM type: NRG; PAM sequence: CAG
atgctggctacagtggtcga

SEQ ID NO: 153895 - DNA, 20 bp, Artificial Sequence
  Description of Artificial Sequence: Synthetic oligonucleotide
  Target: LAMA2; (+) strand; PAM type: NRG; PAM sequence: GAG
gctggctacagtggtcgaca

SEQ ID NO: 153896 - DNA, 20 bp, Artificial Sequence
  Description of Artificial Sequence: Synthetic oligonucleotide
  Target: LAMA2; (+) strand; PAM type: NRG; PAM sequence: TAG
gtggtcgacagagttcattt

SEQ ID NO: 153897 - DNA, 20 bp, Artificial Sequence
  Description of Artificial Sequence: Synthetic oligonucleotide
  Target: LAMA2; (+) strand; PAM type: NRG; PAM sequence: AAG
gacagagttcattttagttc

SEQ ID NO: 153898 - DNA, 20 bp, Artificial Sequence
  Description of Artificial Sequence: Synthetic oligonucleotide
  Target: LAMA2; (+) strand; PAM type: NRG; PAM sequence: CAG
agagttcattttagttcaag

SEQ ID NO: 153899 - DNA, 20 bp, Artificial Sequence
  Description of Artificial Sequence: Synthetic oligonucleotide
  Target: LAMA2; (+) strand; PAM type: NRG; PAM sequence: AAG
gttcattttagttcaagcag

SEQ ID NO: 153900 - DNA, 20 bp, Artificial Sequence
  Description of Artificial Sequence: Synthetic oligonucleotide
  Target: LAMA2; (+) strand; PAM type: NRG; PAM sequence: AGG
ttcattttagttcaagcaga

SEQ ID NO: 153901 - DNA, 20 bp, Artificial Sequence
  Description of Artificial Sequence: Synthetic oligonucleotide
  Target: LAMA2; (+) strand; PAM type: NRG; PAM sequence: TAG
attttagttcaagcagaagg

SEQ ID NO: 153902 - DNA, 20 bp, Artificial Sequence
  Description of Artificial Sequence: Synthetic oligonucleotide
  Target: LAMA2; (+) strand; PAM type: NRG; PAM sequence: AGG
ttttagttcaagcagaaggt

SEQ ID NO: 153903 - DNA, 20 bp, Artificial Sequence
  Description of Artificial Sequence: Synthetic oligonucleotide
  Target: LAMA2; (+) strand; PAM type: NRG; PAM sequence: GGG
tttagttcaagcagaaggta

SEQ ID NO: 153904 - DNA, 20 bp, Artificial Sequence
  Description of Artificial Sequence: Synthetic oligonucleotide
  Target: LAMA2; (+) strand; PAM type: NRG; PAM sequence: TGG
gttcaagcagaaggtagggc

SEQ ID NO: 153905 - DNA, 20 bp, Artificial Sequence
  Description of Artificial Sequence: Synthetic oligonucleotide
  Target: LAMA2; (+) strand; PAM type: NRG; PAM sequence: CAG
ggtagggctggtgcttgtta

SEQ ID NO: 153906 - DNA, 20 bp, Artificial Sequence
  Description of Artificial Sequence: Synthetic oligonucleotide
  Target: LAMA2; (+) strand; PAM type: NRG; PAM sequence: TGG
agggctggtgcttgttacag

SEQ ID NO: 153907 - DNA, 20 bp, Artificial Sequence
  Description of Artificial Sequence: Synthetic oligonucleotide
  Target: LAMA2; (+) strand; PAM type: NRG; PAM sequence: CAG
ctggtgcttgttacagtggc

SEQ ID NO: 153908 - DNA, 20 bp, Artificial Sequence
  Description of Artificial Sequence: Synthetic oligonucleotide
  Target: LAMA2; (+) strand; PAM type: NRG; PAM sequence: TAG
gtgcttgttacagtggccag

SEQ ID NO: 153909 - DNA, 20 bp, Artificial Sequence
  Description of Artificial Sequence: Synthetic oligonucleotide
  Target: LAMA2; (+) strand; PAM type: NRG; PAM sequence: AGG
tgcttgttacagtggccagt

SEQ ID NO: 153910 - DNA, 20 bp, Artificial Sequence
  Description of Artificial Sequence: Synthetic oligonucleotide
  Target: LAMA2; (+) strand; PAM type: NRG; PAM sequence: TGG
gttacagtggccagtaggcc

SEQ ID NO: 153911 - DNA, 20 bp, Artificial Sequence
  Description of Artificial Sequence: Synthetic oligonucleotide
  Target: LAMA2; (+) strand; PAM type: NRG; PAM sequence: TGG
tggccagtaggcctggtttc

SEQ ID NO: 153912 - DNA, 20 bp, Artificial Sequence
  Description of Artificial Sequence: Synthetic oligonucleotide
  Target: LAMA2; (+) strand; PAM type: NRG; PAM sequence: TAG
gtaggcctggtttctggtta

SEQ ID NO: 153913 - DNA, 20 bp, Artificial Sequence
  Description of Artificial Sequence: Synthetic oligonucleotide
  Target: LAMA2; (+) strand; PAM type: NRG; PAM sequence: TGG
tggtttctggttatagcaca

SEQ ID NO: 153914 - DNA, 20 bp, Artificial Sequence
  Description of Artificial Sequence: Synthetic oligonucleotide
  Target: LAMA2; (+) strand; PAM type: NRG; PAM sequence: CAG
tttctggttatagcacatgg

SEQ ID NO: 153915 - DNA, 20 bp, Artificial Sequence
  Description of Artificial Sequence: Synthetic oligonucleotide
  Target: LAMA2; (+) strand; PAM type: NRG; PAM sequence: GAG
tctggttatagcacatggca

SEQ ID NO: 153916 - DNA, 20 bp, Artificial Sequence
  Description of Artificial Sequence: Synthetic oligonucleotide
  Target: LAMA2; (+) strand; PAM type: NRG; PAM sequence: TAG
gttatagcacatggcagagt

SEQ ID NO: 153917 - DNA, 20 bp, Artificial Sequence
  Description of Artificial Sequence: Synthetic oligonucleotide
  Target: LAMA2; (+) strand; PAM type: NRG; PAM sequence: AGG
ttatagcacatggcagagtt

SEQ ID NO: 153918 - DNA, 20 bp, Artificial Sequence
  Description of Artificial Sequence: Synthetic oligonucleotide
  Target: LAMA2; (+) strand; PAM type: NRG; PAM sequence: GAG
atagcacatggcagagttag

SEQ ID NO: 153919 - DNA, 20 bp, Artificial Sequence
  Description of Artificial Sequence: Synthetic oligonucleotide
  Target: LAMA2; (+) strand; PAM type: NRG; PAM sequence: CGG
ctacctacattatgtcccca

SEQ ID NO: 153920 - DNA, 20 bp, Artificial Sequence
  Description of Artificial Sequence: Synthetic oligonucleotide
  Target: LAMA2; (+) strand; PAM type: NRG; PAM sequence: TGG
tgtccccacggcctcatctg

SEQ ID NO: 153921 - DNA, 20 bp, Artificial Sequence
  Description of Artificial Sequence: Synthetic oligonucleotide
  Target: LAMA2; (+) strand; PAM type: NRG; PAM sequence: AAG
ctcatctgtggtttccccat

SEQ ID NO: 153922 - DNA, 20 bp, Artificial Sequence
  Description of Artificial Sequence: Synthetic oligonucleotide
  Target: LAMA2; (+) strand; PAM type: NRG; PAM sequence: TGG
cccataagaaaactaccttt

SEQ ID NO: 153923 - DNA, 20 bp, Artificial Sequence
  Description of Artificial Sequence: Synthetic oligonucleotide
  Target: LAMA2; (+) strand; PAM type: NRG; PAM sequence: GGG
ccataagaaaactacctttt

SEQ ID NO: 153924 - DNA, 20 bp, Artificial Sequence
  Description of Artificial Sequence: Synthetic oligonucleotide
  Target: LAMA2; (+) strand; PAM type: NRG; PAM sequence: CAG
ttgggaaaacatgatacaaa

SEQ ID NO: 153925 - DNA, 20 bp, Artificial Sequence
  Description of Artificial Sequence: Synthetic oligonucleotide
  Target: LAMA2; (+) strand; PAM type: NRG; PAM sequence: CAG
aaaacatgatacaaacagat

SEQ ID NO: 153926 - DNA, 20 bp, Artificial Sequence
  Description of Artificial Sequence: Synthetic oligonucleotide
  Target: LAMA2; (+) strand; PAM type: NRG; PAM sequence: AGG
aaacatgatacaaacagatc

SEQ ID NO: 153927 - DNA, 20 bp, Artificial Sequence
  Description of Artificial Sequence: Synthetic oligonucleotide
  Target: LAMA2; (+) strand; PAM type: NRG; PAM sequence: TAG
tacaaacagatcaggtgaat

SEQ ID NO: 153928 - DNA, 20 bp, Artificial Sequence
  Description of Artificial Sequence: Synthetic oligonucleotide
  Target: LAMA2; (+) strand; PAM type: NRG; PAM sequence: AAG
aaacagatcaggtgaattag

SEQ ID NO: 153929 - DNA, 20 bp, Artificial Sequence
  Description of Artificial Sequence: Synthetic oligonucleotide
  Target: LAMA2; (+) strand; PAM type: NRG; PAM sequence: AGG
aacagatcaggtgaattaga

SEQ ID NO: 153930 - DNA, 20 bp, Artificial Sequence
  Description of Artificial Sequence: Synthetic oligonucleotide
  Target: LAMA2; (+) strand; PAM type: NRG; PAM sequence: CAG
gtgaattagaaggtctcctg

SEQ ID NO: 153931 - DNA, 20 bp, Artificial Sequence
  Description of Artificial Sequence: Synthetic oligonucleotide
  Target: LAMA2; (+) strand; PAM type: NRG; PAM sequence: CAG
gccaaatataatcttacact

SEQ ID NO: 153932 - DNA, 20 bp, Artificial Sequence
  Description of Artificial Sequence: Synthetic oligonucleotide
  Target: LAMA2; (+) strand; PAM type: NRG; PAM sequence: TGG
ataaataaccctacaaaata

SEQ ID NO: 153933 - DNA, 20 bp, Artificial Sequence
  Description of Artificial Sequence: Synthetic oligonucleotide
  Target: LAMA2; (+) strand; PAM type: NRG; PAM sequence: AAG
taaccctacaaaatatggta

SEQ ID NO: 153934 - DNA, 20 bp, Artificial Sequence
  Description of Artificial Sequence: Synthetic oligonucleotide
  Target: LAMA2; (+) strand; PAM type: NRG; PAM sequence: AAG
actccatgacaacaattgaa

SEQ ID NO: 153935 - DNA, 20 bp, Artificial Sequence
  Description of Artificial Sequence: Synthetic oligonucleotide
  Target: LAMA2; (+) strand; PAM type: NRG; PAM sequence: CAG
gaaaagaaaataattgcact

SEQ ID NO: 153936 - DNA, 20 bp, Artificial Sequence
  Description of Artificial Sequence: Synthetic oligonucleotide
  Target: LAMA2; (+) strand; PAM type: NRG; PAM sequence: GAG
gaaaataattgcactcagct

SEQ ID NO: 153937 - DNA, 20 bp, Artificial Sequence
  Description of Artificial Sequence: Synthetic oligonucleotide
  Target: LAMA2; (+) strand; PAM type: NRG; PAM sequence: TAG
gctgagctattgtccatatc

SEQ ID NO: 153938 - DNA, 20 bp, Artificial Sequence
  Description of Artificial Sequence: Synthetic oligonucleotide
  Target: LAMA2; (+) strand; PAM type: NRG; PAM sequence: CAG
gcactgatgatacacaaacc

SEQ ID NO: 153939 - DNA, 20 bp, Artificial Sequence
  Description of Artificial Sequence: Synthetic oligonucleotide
  Target: LAMA2; (+) strand; PAM type: NRG; PAM sequence: CAG
atgatacacaaacccagcca

SEQ ID NO: 153940 - DNA, 20 bp, Artificial Sequence
  Description of Artificial Sequence: Synthetic oligonucleotide
  Target: LAMA2; (+) strand; PAM type: NRG; PAM sequence: TGG
aaacccagccacagaaaatg

SEQ ID NO: 153941 - DNA, 20 bp, Artificial Sequence
  Description of Artificial Sequence: Synthetic oligonucleotide
  Target: LAMA2; (+) strand; PAM type: NRG; PAM sequence: CAG
acagaaaatgtggcatgtgt

SEQ ID NO: 153942 - DNA, 20 bp, Artificial Sequence
  Description of Artificial Sequence: Synthetic oligonucleotide
  Target: LAMA2; (+) strand; PAM type: NRG; PAM sequence: GAG
agaaaatgtggcatgtgtca

SEQ ID NO: 153943 - DNA, 20 bp, Artificial Sequence
  Description of Artificial Sequence: Synthetic oligonucleotide
  Target: LAMA2; (+) strand; PAM type: NRG; PAM sequence: AAG
atgtggcatgtgtcagagca

SEQ ID NO: 153944 - DNA, 20 bp, Artificial Sequence
  Description of Artificial Sequence: Synthetic oligonucleotide
  Target: LAMA2; (+) strand; PAM type: NRG; PAM sequence: TAG
atgtgtcagagcaaagcaac

SEQ ID NO: 153945 - DNA, 20 bp, Artificial Sequence
  Description of Artificial Sequence: Synthetic oligonucleotide
  Target: LAMA2; (+) strand; PAM type: NRG; PAM sequence: AAG
caaagcaactagaatgattc

SEQ ID NO: 153946 - DNA, 20 bp, Artificial Sequence
  Description of Artificial Sequence: Synthetic oligonucleotide
  Target: LAMA2; (+) strand; PAM type: NRG; PAM sequence: CAG
gaatgattcaagacactgaa

SEQ ID NO: 153947 - DNA, 20 bp, Artificial Sequence
  Description of Artificial Sequence: Synthetic oligonucleotide
  Target: LAMA2; (+) strand; PAM type: NRG; PAM sequence: CAG
gattcaagacactgaacagc

SEQ ID NO: 153948 - DNA, 20 bp, Artificial Sequence
  Description of Artificial Sequence: Synthetic oligonucleotide
  Target: LAMA2; (+) strand; PAM type: NRG; PAM sequence: AAG
acactgaacagccagtgttc

SEQ ID NO: 153949 - DNA, 20 bp, Artificial Sequence
  Description of Artificial Sequence: Synthetic oligonucleotide
  Target: LAMA2; (+) strand; PAM type: NRG; PAM sequence: CAG
gtaatttcttacctatatta

SEQ ID NO: 153950 - DNA, 20 bp, Artificial Sequence
  Description of Artificial Sequence: Synthetic oligonucleotide
  Target: LAMA2; (+) strand; PAM type: NRG; PAM sequence: AGG
taatttcttacctatattac

SEQ ID NO: 153951 - DNA, 20 bp, Artificial Sequence
  Description of Artificial Sequence: Synthetic oligonucleotide
  Target: LAMA2; (+) strand; PAM type: NRG; PAM sequence: TGG
tgaaatgttattcacatacc

SEQ ID NO: 153952 - DNA, 20 bp, Artificial Sequence
  Description of Artificial Sequence: Synthetic oligonucleotide
  Target: LAMA2; (+) strand; PAM type: NRG; PAM sequence: TGG
aatgttattcacatacctgg

SEQ ID NO: 153953 - DNA, 20 bp, Artificial Sequence
  Description of Artificial Sequence: Synthetic oligonucleotide
  Target: LAMA2; (+) strand; PAM type: NRG; PAM sequence: GAG
tgttattcacatacctggtg

SEQ ID NO: 153954 - DNA, 20 bp, Artificial Sequence
  Description of Artificial Sequence: Synthetic oligonucleotide
  Target: LAMA2; (+) strand; PAM type: NRG; PAM sequence: AAG
tattcacatacctggtggag

SEQ ID NO: 153955 - DNA, 20 bp, Artificial Sequence
  Description of Artificial Sequence: Synthetic oligonucleotide
  Target: LAMA2; (+) strand; PAM type: NRG; PAM sequence: TAG
aaactcaaatttgattacct

SEQ ID NO: 153956 - DNA, 20 bp, Artificial Sequence
  Description of Artificial Sequence: Synthetic oligonucleotide
  Target: LAMA2; (+) strand; PAM type: NRG; PAM sequence: CAG
tagtcctctgcttaaaattt

SEQ ID NO: 153957 - DNA, 20 bp, Artificial Sequence
  Description of Artificial Sequence: Synthetic oligonucleotide
  Target: LAMA2; (+) strand; PAM type: NRG; PAM sequence: AAG
atttcagtgtctttcaatga

SEQ ID NO: 153958 - DNA, 20 bp, Artificial Sequence
  Description of Artificial Sequence: Synthetic oligonucleotide
  Target: LAMA2; (+) strand; PAM type: NRG; PAM sequence: CAG
agtgtctttcaatgaaagct

SEQ ID NO: 153959 - DNA, 20 bp, Artificial Sequence
  Description of Artificial Sequence: Synthetic oligonucleotide
  Target: LAMA2; (+) strand; PAM type: NRG; PAM sequence: GAG
tgtctttcaatgaaagctca

SEQ ID NO: 153960 - DNA, 20 bp, Artificial Sequence
  Description of Artificial Sequence: Synthetic oligonucleotide
  Target: LAMA2; (+) strand; PAM type: NRG; PAM sequence: TGG
tgaaagctcagagaccattc

SEQ ID NO: 153961 - DNA, 20 bp, Artificial Sequence
  Description of Artificial Sequence: Synthetic oligonucleotide
  Target: LAMA2; (+) strand; PAM type: NRG; PAM sequence: CAG
ctggacttataactcccttg

SEQ ID NO: 153962 - DNA, 20 bp, Artificial Sequence
  Description of Artificial Sequence: Synthetic oligonucleotide
  Target: LAMA2; (+) strand; PAM type: NRG; PAM sequence: CAG
cttataactcccttgcagct

SEQ ID NO: 153963 - DNA, 20 bp, Artificial Sequence
  Description of Artificial Sequence: Synthetic oligonucleotide
  Target: LAMA2; (+) strand; PAM type: NRG; PAM sequence: AAG
ataactcccttgcagctcag

SEQ ID NO: 153964 - DNA, 20 bp, Artificial Sequence
  Description of Artificial Sequence: Synthetic oligonucleotide
  Target: LAMA2; (+) strand; PAM type: NRG; PAM sequence: AGG
taactcccttgcagctcaga

SEQ ID NO: 153965 - DNA, 20 bp, Artificial Sequence
  Description of Artificial Sequence: Synthetic oligonucleotide
  Target: LAMA2; (+) strand; PAM type: NRG; PAM sequence: GGG
aactcccttgcagctcagaa

SEQ ID NO: 153966 - DNA, 20 bp, Artificial Sequence
  Description of Artificial Sequence: Synthetic oligonucleotide
  Target: LAMA2; (+) strand; PAM type: NRG; PAM sequence: TGG
tgcagctcagaagggacccg

SEQ ID NO: 153967 - DNA, 20 bp, Artificial Sequence
  Description of Artificial Sequence: Synthetic oligonucleotide
  Target: LAMA2; (+) strand; PAM type: NRG; PAM sequence: CAG
ctcagaagggacccgtggtc

SEQ ID NO: 153968 - DNA, 20 bp, Artificial Sequence
  Description of Artificial Sequence: Synthetic oligonucleotide
  Target: LAMA2; (+) strand; PAM type: NRG; PAM sequence: TGG
tccagtaattaaaatgcccg

SEQ ID NO: 153969 - DNA, 20 bp, Artificial Sequence
  Description of Artificial Sequence: Synthetic oligonucleotide
  Target: LAMA2; (+) strand; PAM type: NRG; PAM sequence: AAG
gtaattaaaatgcccgtggt

SEQ ID NO: 153970 - DNA, 20 bp, Artificial Sequence
  Description of Artificial Sequence: Synthetic oligonucleotide
  Target: LAMA2; (+) strand; PAM type: NRG; PAM sequence: CAG
ttcttctcacaatgtccctt

SEQ ID NO: 153971 - DNA, 20 bp, Artificial Sequence
  Description of Artificial Sequence: Synthetic oligonucleotide
  Target: LAMA2; (+) strand; PAM type: NRG; PAM sequence: CGG
ctcacaatgtcccttcagta

SEQ ID NO: 153972 - DNA, 20 bp, Artificial Sequence
  Description of Artificial Sequence: Synthetic oligonucleotide
  Target: LAMA2; (+) strand; PAM type: NRG; PAM sequence: GGG
tcacaatgtcccttcagtac

SEQ ID NO: 153973 - DNA, 20 bp, Artificial Sequence
  Description of Artificial Sequence: Synthetic oligonucleotide
  Target: LAMA2; (+) strand; PAM type: NRG; PAM sequence: GAG
tttctttctaccattttcct

SEQ ID NO: 153974 - DNA, 20 bp, Artificial Sequence
  Description of Artificial Sequence: Synthetic oligonucleotide
  Target: LAMA2; (+) strand; PAM type: NRG; PAM sequence: TAG
tttcctgagtaattaccttc

SEQ ID NO: 153975 - DNA, 20 bp, Artificial Sequence
  Description of Artificial Sequence: Synthetic oligonucleotide
  Target: LAMA2; (+) strand; PAM type: NRG; PAM sequence: AAG
ccttctagtcatcattcaaa

SEQ ID NO: 153976 - DNA, 20 bp, Artificial Sequence
  Description of Artificial Sequence: Synthetic oligonucleotide
  Target: LAMA2; (+) strand; PAM type: NRG; PAM sequence: AAG
tcatcattcaaaaagcattt

SEQ ID NO: 153977 - DNA, 20 bp, Artificial Sequence
  Description of Artificial Sequence: Synthetic oligonucleotide
  Target: LAMA2; (+) strand; PAM type: NRG; PAM sequence: TAG
catttaagcattgaattcta

SEQ ID NO: 153978 - DNA, 20 bp, Artificial Sequence
  Description of Artificial Sequence: Synthetic oligonucleotide
  Target: LAMA2; (+) strand; PAM type: NRG; PAM sequence: AGG
atttaagcattgaattctat

SEQ ID NO: 153979 - DNA, 20 bp, Artificial Sequence
  Description of Artificial Sequence: Synthetic oligonucleotide
  Target: LAMA2; (+) strand; PAM type: NRG; PAM sequence: CAG
tttctaatcaccctatcccc

SEQ ID NO: 153980 - DNA, 20 bp, Artificial Sequence
  Description of Artificial Sequence: Synthetic oligonucleotide
  Target: LAMA2; (+) strand; PAM type: NRG; PAM sequence: TGG
atcaccctatcccccagctc

SEQ ID NO: 153981 - DNA, 20 bp, Artificial Sequence
  Description of Artificial Sequence: Synthetic oligonucleotide
  Target: LAMA2; (+) strand; PAM type: NRG; PAM sequence: GAG
cctatcccccagctctggct

SEQ ID NO: 153982 - DNA, 20 bp, Artificial Sequence
  Description of Artificial Sequence: Synthetic oligonucleotide
  Target: LAMA2; (+) strand; PAM type: NRG; PAM sequence: TAG
tcccccagctctggctgagt

SEQ ID NO: 153983 - DNA, 20 bp, Artificial Sequence
  Description of Artificial Sequence: Synthetic oligonucleotide
  Target: LAMA2; (+) strand; PAM type: NRG; PAM sequence: AGG
cccccagctctggctgagtt

SEQ ID NO: 153984 - DNA, 20 bp, Artificial Sequence
  Description of Artificial Sequence: Synthetic oligonucleotide
  Target: LAMA2; (+) strand; PAM type: NRG; PAM sequence: AAG
tctctgcacaattcccatga

SEQ ID NO: 153985 - DNA, 20 bp, Artificial Sequence
  Description of Artificial Sequence: Synthetic oligonucleotide
  Target: LAMA2; (+) strand; PAM type: NRG; PAM sequence: CAG
ccatgaaagcacctaccacc

SEQ ID NO: 153986 - DNA, 20 bp, Artificial Sequence
  Description of Artificial Sequence: Synthetic oligonucleotide
  Target: LAMA2; (+) strand; PAM type: NRG; PAM sequence: CAG
tgaaagcacctaccacccag

SEQ ID NO: 153987 - DNA, 20 bp, Artificial Sequence
  Description of Artificial Sequence: Synthetic oligonucleotide
  Target: LAMA2; (+) strand; PAM type: NRG; PAM sequence: AGG
gaaagcacctaccacccagc

SEQ ID NO: 153988 - DNA, 20 bp, Artificial Sequence
  Description of Artificial Sequence: Synthetic oligonucleotide
  Target: LAMA2; (+) strand; PAM type: NRG; PAM sequence: CAG
agcacctaccacccagcagg

SEQ ID NO: 153989 - DNA, 20 bp, Artificial Sequence
  Description of Artificial Sequence: Synthetic oligonucleotide
  Target: LAMA2; (+) strand; PAM type: NRG; PAM sequence: TGG
ctcactaaactgcaaattcc

SEQ ID NO: 153990 - DNA, 20 bp, Artificial Sequence
  Description of Artificial Sequence: Synthetic oligonucleotide
  Target: LAMA2; (+) strand; PAM type: NRG; PAM sequence: GAG
ctaaactgcaaattcctggt

SEQ ID NO: 153991 - DNA, 20 bp, Artificial Sequence
  Description of Artificial Sequence: Synthetic oligonucleotide
  Target: LAMA2; (+) strand; PAM type: NRG; PAM sequence: TGG
aattcctggtgagtgacaac

SEQ ID NO: 153992 - DNA, 20 bp, Artificial Sequence
  Description of Artificial Sequence: Synthetic oligonucleotide
  Target: LAMA2; (+) strand; PAM type: NRG; PAM sequence: TAG
tctattcttcttctaacctc

SEQ ID NO: 153993 - DNA, 20 bp, Artificial Sequence
  Description of Artificial Sequence: Synthetic oligonucleotide
  Target: LAMA2; (+) strand; PAM type: NRG; PAM sequence: TAG
ttcttctaacctctagaacc

SEQ ID NO: 153994 - DNA, 20 bp, Artificial Sequence
  Description of Artificial Sequence: Synthetic oligonucleotide
  Target: LAMA2; (+) strand; PAM type: NRG; PAM sequence: CAG
ttctaacctctagaacctag

SEQ ID NO: 153995 - DNA, 20 bp, Artificial Sequence
  Description of Artificial Sequence: Synthetic oligonucleotide
  Target: LAMA2; (+) strand; PAM type: NRG; PAM sequence: TGG
tagaacctagcagattgctt

SEQ ID NO: 153996 - DNA, 20 bp, Artificial Sequence
  Description of Artificial Sequence: Synthetic oligonucleotide
  Target: LAMA2; (+) strand; PAM type: NRG; PAM sequence: GAG
gaacctagcagattgctttg

SEQ ID NO: 153997 - DNA, 20 bp, Artificial Sequence
  Description of Artificial Sequence: Synthetic oligonucleotide
  Target: LAMA2; (+) strand; PAM type: NRG; PAM sequence: TAG
gcagattgctttggagacct

SEQ ID NO: 153998 - DNA, 20 bp, Artificial Sequence
  Description of Artificial Sequence: Synthetic oligonucleotide
  Target: LAMA2; (+) strand; PAM type: NRG; PAM sequence: AGG
cagattgctttggagacctt

SEQ ID NO: 153999 - DNA, 20 bp, Artificial Sequence
  Description of Artificial Sequence: Synthetic oligonucleotide
  Target: LAMA2; (+) strand; PAM type: NRG; PAM sequence: GAG
gaacttaataattctttgtt

SEQ ID NO: 154000 - DNA, 20 bp, Artificial Sequence
  Description of Artificial Sequence: Synthetic oligonucleotide
  Target: LAMA2; (+) strand; PAM type: NRG; PAM sequence: AAG
aattctttgttgagtgaata

SEQ ID NO: 154001 - DNA, 20 bp, Artificial Sequence
  Description of Artificial Sequence: Synthetic oligonucleotide
  Target: LAMA2; (+) strand; PAM type: NRG; PAM sequence: AGG
attctttgttgagtgaataa

SEQ ID NO: 154002 - DNA, 20 bp, Artificial Sequence
  Description of Artificial Sequence: Synthetic oligonucleotide
  Target: LAMA2; (+) strand; PAM type: NRG; PAM sequence: GGG
ttctttgttgagtgaataaa

SEQ ID NO: 154003 - DNA, 20 bp, Artificial Sequence
  Description of Artificial Sequence: Synthetic oligonucleotide
  Target: LAMA2; (+) strand; PAM type: NRG; PAM sequence: TGG
gaataaagggatgctttttg

SEQ ID NO: 154004 - DNA, 20 bp, Artificial Sequence
  Description of Artificial Sequence: Synthetic oligonucleotide
  Target: LAMA2; (+) strand; PAM type: NRG; PAM sequence: CAG
aaagggatgctttttgtgga

SEQ ID NO: 154005 - DNA, 20 bp, Artificial Sequence
  Description of Artificial Sequence: Synthetic oligonucleotide
  Target: LAMA2; (+) strand; PAM type: NRG; PAM sequence: CAG
gggatgctttttgtggacag

SEQ ID NO: 154006 - DNA, 20 bp, Artificial Sequence
  Description of Artificial Sequence: Synthetic oligonucleotide
  Target: LAMA2; (+) strand; PAM type: NRG; PAM sequence: AAG
agttatttctgtttacacaa

SEQ ID NO: 154007 - DNA, 20 bp, Artificial Sequence
  Description of Artificial Sequence: Synthetic oligonucleotide
  Target: LAMA2; (+) strand; PAM type: NRG; PAM sequence: AAG
tttctgtttacacaaaagat

SEQ ID NO: 154008 - DNA, 20 bp, Artificial Sequence
  Description of Artificial Sequence: Synthetic oligonucleotide
  Target: LAMA2; (+) strand; PAM type: NRG; PAM sequence: GAG
tctgtttacacaaaagataa

SEQ ID NO: 154009 - DNA, 20 bp, Artificial Sequence
  Description of Artificial Sequence: Synthetic oligonucleotide
  Target: LAMA2; (+) strand; PAM type: NRG; PAM sequence: CAG
acaaaagataagagaaaata

SEQ ID NO: 154010 - DNA, 20 bp, Artificial Sequence
  Description of Artificial Sequence: Synthetic oligonucleotide
  Target: LAMA2; (+) strand; PAM type: NRG; PAM sequence: AGG
caaaagataagagaaaatac

SEQ ID NO: 154011 - DNA, 20 bp, Artificial Sequence
  Description of Artificial Sequence: Synthetic oligonucleotide
  Target: LAMA2; (+) strand; PAM type: NRG; PAM sequence: AAG
aaaaatttgaaacttacaaa

SEQ ID NO: 154012 - DNA, 20 bp, Artificial Sequence
  Description of Artificial Sequence: Synthetic oligonucleotide
  Target: LAMA2; (+) strand; PAM type: NRG; PAM sequence: TGG
ttgaaacttacaaaaagtgt

SEQ ID NO: 154013 - DNA, 20 bp, Artificial Sequence
  Description of Artificial Sequence: Synthetic oligonucleotide
  Target: LAMA2; (+) strand; PAM type: NRG; PAM sequence: AAG
ttacaaaaagtgttggattt

SEQ ID NO: 154014 - DNA, 20 bp, Artificial Sequence
  Description of Artificial Sequence: Synthetic oligonucleotide
  Target: LAMA2; (+) strand; PAM type: NRG; PAM sequence: TGG
tttaagttcctttgtctgtc

SEQ ID NO: 154015 - DNA, 20 bp, Artificial Sequence
  Description of Artificial Sequence: Synthetic oligonucleotide
  Target: LAMA2; (+) strand; PAM type: NRG; PAM sequence: AAG
gatttccgaaatatttttaa

SEQ ID NO: 154016 - DNA, 20 bp, Artificial Sequence
  Description of Artificial Sequence: Synthetic oligonucleotide
  Target: LAMA2; (+) strand; PAM type: NRG; PAM sequence: TGG
tatttttaaaagattttttc

SEQ ID NO: 154017 - DNA, 20 bp, Artificial Sequence
  Description of Artificial Sequence: Synthetic oligonucleotide
  Target: LAMA2; (+) strand; PAM type: NRG; PAM sequence: GGG
atttttaaaagattttttct

SEQ ID NO: 154018 - DNA, 20 bp, Artificial Sequence
  Description of Artificial Sequence: Synthetic oligonucleotide
  Target: LAMA2; (+) strand; PAM type: NRG; PAM sequence: AAG
gattttttctgggatcattt

SEQ ID NO: 154019 - DNA, 20 bp, Artificial Sequence
  Description of Artificial Sequence: Synthetic oligonucleotide
  Target: LAMA2; (+) strand; PAM type: NRG; PAM sequence: AGG
attttttctgggatcattta

SEQ ID NO: 154020 - DNA, 20 bp, Artificial Sequence
  Description of Artificial Sequence: Synthetic oligonucleotide
  Target: LAMA2; (+) strand; PAM type: NRG; PAM sequence: CAG
catttaaggcctcatctgtt

SEQ ID NO: 154021 - DNA, 20 bp, Artificial Sequence
  Description of Artificial Sequence: Synthetic oligonucleotide
  Target: LAMA2; (+) strand; PAM type: NRG; PAM sequence: AAG
ggcctcatctgttcagaacc

SEQ ID NO: 154022 - DNA, 20 bp, Artificial Sequence
  Description of Artificial Sequence: Synthetic oligonucleotide
  Target: LAMA2; (+) strand; PAM type: NRG; PAM sequence: AGG
gcctcatctgttcagaacca

SEQ ID NO: 154023 - DNA, 20 bp, Artificial Sequence
  Description of Artificial Sequence: Synthetic oligonucleotide
  Target: LAMA2; (+) strand; PAM type: NRG; PAM sequence: GGG
cctcatctgttcagaaccaa

SEQ ID NO: 154024 - DNA, 20 bp, Artificial Sequence
  Description of Artificial Sequence: Synthetic oligonucleotide
  Target: LAMA2; (+) strand; PAM type: NRG; PAM sequence: GGG
ctcatctgttcagaaccaag

SEQ ID NO: 154025 - DNA, 20 bp, Artificial Sequence
  Description of Artificial Sequence: Synthetic oligonucleotide
  Target: LAMA2; (+) strand; PAM type: NRG; PAM sequence: GAG
catctgttcagaaccaaggg

SEQ ID NO: 154026 - DNA, 20 bp, Artificial Sequence
  Description of Artificial Sequence: Synthetic oligonucleotide
  Target: LAMA2; (+) strand; PAM type: NRG; PAM sequence: AGG
atctgttcagaaccaagggg

SEQ ID NO: 154027 - DNA, 20 bp, Artificial Sequence
  Description of Artificial Sequence: Synthetic oligonucleotide
  Target: LAMA2; (+) strand; PAM type: NRG; PAM sequence: TAG
aaccaaggggaggaccgaaa

SEQ ID NO: 154028 - DNA, 20 bp, Artificial Sequence
  Description of Artificial Sequence: Synthetic oligonucleotide
  Target: LAMA2; (+) strand; PAM type: NRG; PAM sequence: CAG
tagtatgccaaattcttttc

SEQ ID NO: 154029 - DNA, 20 bp, Artificial Sequence
  Description of Artificial Sequence: Synthetic oligonucleotide
  Target: LAMA2; (+) strand; PAM type: NRG; PAM sequence: GAG
ttccagccctcaaattttat

SEQ ID NO: 154030 - DNA, 20 bp, Artificial Sequence
  Description of Artificial Sequence: Synthetic oligonucleotide
  Target: LAMA2; (+) strand; PAM type: NRG; PAM sequence: GAG
ccctcaaattttatgagcct

SEQ ID NO: 154031 - DNA, 20 bp, Artificial Sequence
  Description of Artificial Sequence: Synthetic oligonucleotide
  Target: LAMA2; (+) strand; PAM type: NRG; PAM sequence: TGG
tgagcctgagttgcattgtg

SEQ ID NO: 154032 - DNA, 20 bp, Artificial Sequence
  Description of Artificial Sequence: Synthetic oligonucleotide
  Target: LAMA2; (+) strand; PAM type: NRG; PAM sequence: GGG
gagcctgagttgcattgtgt

SEQ ID NO: 154033 - DNA, 20 bp, Artificial Sequence
  Description of Artificial Sequence: Synthetic oligonucleotide
  Target: LAMA2; (+) strand; PAM type: NRG; PAM sequence: AAG
gagttgcattgtgtgggtaa

SEQ ID NO: 154034 - DNA, 20 bp, Artificial Sequence
  Description of Artificial Sequence: Synthetic oligonucleotide
  Target: LAMA2; (+) strand; PAM type: NRG; PAM sequence: TGG
ggtaaaagtcttgtgctctg

SEQ ID NO: 154035 - DNA, 20 bp, Artificial Sequence
  Description of Artificial Sequence: Synthetic oligonucleotide
  Target: LAMA2; (+) strand; PAM type: NRG; PAM sequence: CAG
aagtcttgtgctctgtggat

SEQ ID NO: 154036 - DNA, 20 bp, Artificial Sequence
  Description of Artificial Sequence: Synthetic oligonucleotide
  Target: LAMA2; (+) strand; PAM type: NRG; PAM sequence: AGG
agtcttgtgctctgtggatc

SEQ ID NO: 154037 - DNA, 20 bp, Artificial Sequence
  Description of Artificial Sequence: Synthetic oligonucleotide
  Target: LAMA2; (+) strand; PAM type: NRG; PAM sequence: GAG
tcttgtgctctgtggatcag

SEQ ID NO: 154038 - DNA, 20 bp, Artificial Sequence
  Description of Artificial Sequence: Synthetic oligonucleotide
  Target: LAMA2; (+) strand; PAM type: NRG; PAM sequence: AGG
cttgtgctctgtggatcagg

SEQ ID NO: 154039 - DNA, 20 bp, Artificial Sequence
  Description of Artificial Sequence: Synthetic oligonucleotide
  Target: LAMA2; (+) strand; PAM type: NRG; PAM sequence: AAG
gtgctctgtggatcaggagg

SEQ ID NO: 154040 - DNA, 20 bp, Artificial Sequence
  Description of Artificial Sequence: Synthetic oligonucleotide
  Target: LAMA2; (+) strand; PAM type: NRG; PAM sequence: TAG
tctgtggatcaggaggaagt

SEQ ID NO: 154041 - DNA, 20 bp, Artificial Sequence
  Description of Artificial Sequence: Synthetic oligonucleotide
  Target: LAMA2; (+) strand; PAM type: NRG; PAM sequence: TGG
caggaggaagttagatgttt

SEQ ID NO: 154042 - DNA, 20 bp, Artificial Sequence
  Description of Artificial Sequence: Synthetic oligonucleotide
  Target: LAMA2; (+) strand; PAM type: NRG; PAM sequence: TAG
agatgttttggatatttaca

SEQ ID NO: 154043 - DNA, 20 bp, Artificial Sequence
  Description of Artificial Sequence: Synthetic oligonucleotide
  Target: LAMA2; (+) strand; PAM type: NRG; PAM sequence: AAG
tggatatttacatagaaaca

SEQ ID NO: 154044 - DNA, 20 bp, Artificial Sequence
  Description of Artificial Sequence: Synthetic oligonucleotide
  Target: LAMA2; (+) strand; PAM type: NRG; PAM sequence: AAG
acatagaaacaaagaatttg

SEQ ID NO: 154045 - DNA, 20 bp, Artificial Sequence
  Description of Artificial Sequence: Synthetic oligonucleotide
  Target: LAMA2; (+) strand; PAM type: NRG; PAM sequence: TGG
gaaacaaagaatttgaagac

SEQ ID NO: 154046 - DNA, 20 bp, Artificial Sequence
  Description of Artificial Sequence: Synthetic oligonucleotide
  Target: LAMA2; (+) strand; PAM type: NRG; PAM sequence: AAG
caaagaatttgaagactgga

SEQ ID NO: 154047 - DNA, 20 bp, Artificial Sequence
  Description of Artificial Sequence: Synthetic oligonucleotide
  Target: LAMA2; (+) strand; PAM type: NRG; PAM sequence: GAG
ttgaagactggaaagaactt

SEQ ID NO: 154048 - DNA, 20 bp, Artificial Sequence
  Description of Artificial Sequence: Synthetic oligonucleotide
  Target: LAMA2; (+) strand; PAM type: NRG; PAM sequence: CAG
aagactggaaagaacttgag

SEQ ID NO: 154049 - DNA, 20 bp, Artificial Sequence
  Description of Artificial Sequence: Synthetic oligonucleotide
  Target: LAMA2; (+) strand; PAM type: NRG; PAM sequence: AGG
agactggaaagaacttgagc

SEQ ID NO: 154050 - DNA, 20 bp, Artificial Sequence
  Description of Artificial Sequence: Synthetic oligonucleotide
  Target: LAMA2; (+) strand; PAM type: NRG; PAM sequence: GAG
ctattaaatgtgttttgtgt

SEQ ID NO: 154051 - DNA, 20 bp, Artificial Sequence
  Description of Artificial Sequence: Synthetic oligonucleotide
  Target: LAMA2; (+) strand; PAM type: NRG; PAM sequence: TGG
taaatgtgttttgtgtgaga

SEQ ID NO: 154052 - DNA, 20 bp, Artificial Sequence
  Description of Artificial Sequence: Synthetic oligonucleotide
  Target: LAMA2; (+) strand; PAM type: NRG; PAM sequence: TGG
gttttcaccctgtgttcttg

SEQ ID NO: 154053 - DNA, 20 bp, Artificial Sequence
  Description of Artificial Sequence: Synthetic oligonucleotide
  Target: LAMA2; (+) strand; PAM type: NRG; PAM sequence: TAG
ttcttgtggttcctccatgc

SEQ ID NO: 154054 - DNA, 20 bp, Artificial Sequence
  Description of Artificial Sequence: Synthetic oligonucleotide
  Target: LAMA2; (+) strand; PAM type: NRG; PAM sequence: AGG
tcttgtggttcctccatgct

SEQ ID NO: 154055 - DNA, 20 bp, Artificial Sequence
  Description of Artificial Sequence: Synthetic oligonucleotide
  Target: LAMA2; (+) strand; PAM type: NRG; PAM sequence: GGG
cttgtggttcctccatgcta

SEQ ID NO: 154056 - DNA, 20 bp, Artificial Sequence
  Description of Artificial Sequence: Synthetic oligonucleotide
  Target: LAMA2; (+) strand; PAM type: NRG; PAM sequence: GGG
ttgtggttcctccatgctag

SEQ ID NO: 154057 - DNA, 20 bp, Artificial Sequence
  Description of Artificial Sequence: Synthetic oligonucleotide
  Target: LAMA2; (+) strand; PAM type: NRG; PAM sequence: CAG
tggttcctccatgctagggg

SEQ ID NO: 154058 - DNA, 20 bp, Artificial Sequence
  Description of Artificial Sequence: Synthetic oligonucleotide
  Target: LAMA2; (+) strand; PAM type: NRG; PAM sequence: AGG
ggttcctccatgctaggggc

SEQ ID NO: 154059 - DNA, 20 bp, Artificial Sequence
  Description of Artificial Sequence: Synthetic oligonucleotide
  Target: LAMA2; (+) strand; PAM type: NRG; PAM sequence: GAG
ttcctccatgctaggggcag

SEQ ID NO: 154060 - DNA, 20 bp, Artificial Sequence
  Description of Artificial Sequence: Synthetic oligonucleotide
  Target: LAMA2; (+) strand; PAM type: NRG; PAM sequence: AGG
tcctccatgctaggggcagg

SEQ ID NO: 154061 - DNA, 20 bp, Artificial Sequence
  Description of Artificial Sequence: Synthetic oligonucleotide
  Target: LAMA2; (+) strand; PAM type: NRG; PAM sequence: TAG
tccatgctaggggcaggagg

SEQ ID NO: 154062 - DNA, 20 bp, Artificial Sequence
  Description of Artificial Sequence: Synthetic oligonucleotide
  Target: LAMA2; (+) strand; PAM type: NRG; PAM sequence: AGG
ccatgctaggggcaggaggt

SEQ ID NO: 154063 - DNA, 20 bp, Artificial Sequence
  Description of Artificial Sequence: Synthetic oligonucleotide
  Target: LAMA2; (+) strand; PAM type: NRG; PAM sequence: TGG
gctaggggcaggaggtagga

SEQ ID NO: 154064 - DNA, 20 bp, Artificial Sequence
  Description of Artificial Sequence: Synthetic oligonucleotide
  Target: LAMA2; (+) strand; PAM type: NRG; PAM sequence: GAG
taggggcaggaggtaggatg

SEQ ID NO: 154065 - DNA, 20 bp, Artificial Sequence
  Description of Artificial Sequence: Synthetic oligonucleotide
  Target: LAMA2; (+) strand; PAM type: NRG; PAM sequence: CAG
gggcaggaggtaggatggag

SEQ ID NO: 154066 - DNA, 20 bp, Artificial Sequence
  Description of Artificial Sequence: Synthetic oligonucleotide
  Target: LAMA2; (+) strand; PAM type: NRG; PAM sequence: TAG
aggaggtaggatggagcaga

SEQ ID NO: 154067 - DNA, 20 bp, Artificial Sequence
  Description of Artificial Sequence: Synthetic oligonucleotide
  Target: LAMA2; (+) strand; PAM type: NRG; PAM sequence: AGG
ggaggtaggatggagcagat

SEQ ID NO: 154068 - DNA, 20 bp, Artificial Sequence
  Description of Artificial Sequence: Synthetic oligonucleotide
  Target: LAMA2; (+) strand; PAM type: NRG; PAM sequence: GGG
gaggtaggatggagcagata

SEQ ID NO: 154069 - DNA, 20 bp, Artificial Sequence
  Description of Artificial Sequence: Synthetic oligonucleotide
  Target: LAMA2; (+) strand; PAM type: NRG; PAM sequence: GAG
ggtaggatggagcagatagg

SEQ ID NO: 154070 - DNA, 20 bp, Artificial Sequence
  Description of Artificial Sequence: Synthetic oligonucleotide
  Target: LAMA2; (+) strand; PAM type: NRG; PAM sequence: CGG
agtctcttttcctcttaaac

SEQ ID NO: 154071 - DNA, 20 bp, Artificial Sequence
  Description of Artificial Sequence: Synthetic oligonucleotide
  Target: LAMA2; (+) strand; PAM type: NRG; PAM sequence: CAG
ccggatgttttttttaaaat

SEQ ID NO: 154072 - DNA, 20 bp, Artificial Sequence
  Description of Artificial Sequence: Synthetic oligonucleotide
  Target: LAMA2; (+) strand; PAM type: NRG; PAM sequence: GAG
taaaatcagttttatatgtt

SEQ ID NO: 154073 - DNA, 20 bp, Artificial Sequence
  Description of Artificial Sequence: Synthetic oligonucleotide
  Target: LAMA2; (+) strand; PAM type: NRG; PAM sequence: GAG
aaatcagttttatatgttga

SEQ ID NO: 154074 - DNA, 20 bp, Artificial Sequence
  Description of Artificial Sequence: Synthetic oligonucleotide
  Target: LAMA2; (+) strand; PAM type: NRG; PAM sequence: TGG
ttttatatgttgagagtcca

SEQ ID NO: 154075 - DNA, 20 bp, Artificial Sequence
  Description of Artificial Sequence: Synthetic oligonucleotide
  Target: LAMA2; (+) strand; PAM type: NRG; PAM sequence: TGG
tatgttgagagtccatggaa

SEQ ID NO: 154076 - DNA, 20 bp, Artificial Sequence
  Description of Artificial Sequence: Synthetic oligonucleotide
  Target: LAMA2; (+) strand; PAM type: NRG; PAM sequence: TGG
agagtccatggaatggaatg

SEQ ID NO: 154077 - DNA, 20 bp, Artificial Sequence
  Description of Artificial Sequence: Synthetic oligonucleotide
  Target: LAMA2; (+) strand; PAM type: NRG; PAM sequence: GAG
tggaatggaatgtggaaact

SEQ ID NO: 154078 - DNA, 20 bp, Artificial Sequence
  Description of Artificial Sequence: Synthetic oligonucleotide
  Target: LAMA2; (+) strand; PAM type: NRG; PAM sequence: AAG
tgtggaaactgagaccctga

SEQ ID NO: 154079 - DNA, 20 bp, Artificial Sequence
  Description of Artificial Sequence: Synthetic oligonucleotide
  Target: LAMA2; (+) strand; PAM type: NRG; PAM sequence: AAG
aactgagaccctgaaagatt

SEQ ID NO: 154080 - DNA, 20 bp, Artificial Sequence
  Description of Artificial Sequence: Synthetic oligonucleotide
  Target: LAMA2; (+) strand; PAM type: NRG; PAM sequence: AAG
aagattaagtcacttgaaca

SEQ ID NO: 154081 - DNA, 20 bp, Artificial Sequence
  Description of Artificial Sequence: Synthetic oligonucleotide
  Target: LAMA2; (+) strand; PAM type: NRG; PAM sequence: CAG
gtcacttgaacaaagatata

SEQ ID NO: 154082 - DNA, 20 bp, Artificial Sequence
  Description of Artificial Sequence: Synthetic oligonucleotide
  Target: LAMA2; (+) strand; PAM type: NRG; PAM sequence: CAG
acaaagatatacagcttctc

SEQ ID NO: 154083 - DNA, 20 bp, Artificial Sequence
  Description of Artificial Sequence: Synthetic oligonucleotide
  Target: LAMA2; (+) strand; PAM type: NRG; PAM sequence: GAG
aaagatatacagcttctcca

SEQ ID NO: 154084 - DNA, 20 bp, Artificial Sequence
  Description of Artificial Sequence: Synthetic oligonucleotide
  Target: LAMA2; (+) strand; PAM type: NRG; PAM sequence: CAG
tatacagcttctccagagac

SEQ ID NO: 154085 - DNA, 20 bp, Artificial Sequence
  Description of Artificial Sequence: Synthetic oligonucleotide
  Target: LAMA2; (+) strand; PAM type: NRG; PAM sequence: AGG
atacagcttctccagagacc

SEQ ID NO: 154086 - DNA, 20 bp, Artificial Sequence
  Description of Artificial Sequence: Synthetic oligonucleotide
  Target: LAMA2; (+) strand; PAM type: NRG; PAM sequence: CAG
cagcttctccagagaccagg

SEQ ID NO: 154087 - DNA, 20 bp, Artificial Sequence
  Description of Artificial Sequence: Synthetic oligonucleotide
  Target: LAMA2; (+) strand; PAM type: NRG; PAM sequence: TAG
tccagagaccaggcagacac

SEQ ID NO: 154088 - DNA, 20 bp, Artificial Sequence
  Description of Artificial Sequence: Synthetic oligonucleotide
  Target: LAMA2; (+) strand; PAM type: NRG; PAM sequence: AGG
ccagagaccaggcagacact

SEQ ID NO: 154089 - DNA, 20 bp, Artificial Sequence
  Description of Artificial Sequence: Synthetic oligonucleotide
  Target: LAMA2; (+) strand; PAM type: NRG; PAM sequence: CAG
tgatttcctgacttccactg

SEQ ID NO: 154090 - DNA, 20 bp, Artificial Sequence
  Description of Artificial Sequence: Synthetic oligonucleotide
  Target: LAMA2; (+) strand; PAM type: NRG; PAM sequence: GAG
atctcttaccatttttctat

SEQ ID NO: 154091 - DNA, 20 bp, Artificial Sequence
  Description of Artificial Sequence: Synthetic oligonucleotide
  Target: LAMA2; (+) strand; PAM type: NRG; PAM sequence: GAG
ctcttaccatttttctatga

SEQ ID NO: 154092 - DNA, 20 bp, Artificial Sequence
  Description of Artificial Sequence: Synthetic oligonucleotide
  Target: LAMA2; (+) strand; PAM type: NRG; PAM sequence: AAG
ttctatgagagtcataaaaa

SEQ ID NO: 154093 - DNA, 20 bp, Artificial Sequence
  Description of Artificial Sequence: Synthetic oligonucleotide
  Target: LAMA2; (+) strand; PAM type: NRG; PAM sequence: CAG
gagagtcataaaaaaagaat

SEQ ID NO: 154094 - DNA, 20 bp, Artificial Sequence
  Description of Artificial Sequence: Synthetic oligonucleotide
  Target: LAMA2; (+) strand; PAM type: NRG; PAM sequence: TAG
agaatcagctatttactttc

SEQ ID NO: 154095 - DNA, 20 bp, Artificial Sequence
  Description of Artificial Sequence: Synthetic oligonucleotide
  Target: LAMA2; (+) strand; PAM type: NRG; PAM sequence: AAG
cagctatttactttctagtc

SEQ ID NO: 154096 - DNA, 20 bp, Artificial Sequence
  Description of Artificial Sequence: Synthetic oligonucleotide
  Target: LAMA2; (+) strand; PAM type: NRG; PAM sequence: AGG
agctatttactttctagtca

SEQ ID NO: 154097 - DNA, 20 bp, Artificial Sequence
  Description of Artificial Sequence: Synthetic oligonucleotide
  Target: LAMA2; (+) strand; PAM type: NRG; PAM sequence: TGG
tatttactttctagtcaagg

SEQ ID NO: 154098 - DNA, 20 bp, Artificial Sequence
  Description of Artificial Sequence: Synthetic oligonucleotide
  Target: LAMA2; (+) strand; PAM type: NRG; PAM sequence: GGG
atttactttctagtcaaggt

SEQ ID NO: 154099 - DNA, 20 bp, Artificial Sequence
  Description of Artificial Sequence: Synthetic oligonucleotide
  Target: LAMA2; (+) strand; PAM type: NRG; PAM sequence: AAG
agtcaaggtgggttaaaatc

SEQ ID NO: 154100 - DNA, 20 bp, Artificial Sequence
  Description of Artificial Sequence: Synthetic oligonucleotide
  Target: LAMA2; (+) strand; PAM type: NRG; PAM sequence: CGG
ttgttttcaaacatcgattt

SEQ ID NO: 154101 - DNA, 20 bp, Artificial Sequence
  Description of Artificial Sequence: Synthetic oligonucleotide
  Target: LAMA2; (+) strand; PAM type: NRG; PAM sequence: GGG
tgttttcaaacatcgatttc

SEQ ID NO: 154102 - DNA, 20 bp, Artificial Sequence
  Description of Artificial Sequence: Synthetic oligonucleotide
  Target: LAMA2; (+) strand; PAM type: NRG; PAM sequence: GAG
attaaaaaattcacttaact

SEQ ID NO: 154103 - DNA, 20 bp, Artificial Sequence
  Description of Artificial Sequence: Synthetic oligonucleotide
  Target: LAMA2; (+) strand; PAM type: NRG; PAM sequence: TAG
gagtttaatttgctttcact

SEQ ID NO: 154104 - DNA, 20 bp, Artificial Sequence
  Description of Artificial Sequence: Synthetic oligonucleotide
  Target: LAMA2; (+) strand; PAM type: NRG; PAM sequence: AGG
agtttaatttgctttcactt

SEQ ID NO: 154105 - DNA, 20 bp, Artificial Sequence
  Description of Artificial Sequence: Synthetic oligonucleotide
  Target: LAMA2; (+) strand; PAM type: NRG; PAM sequence: AAG
ttaatttgctttcacttagg

SEQ ID NO: 154106 - DNA, 20 bp, Artificial Sequence
  Description of Artificial Sequence: Synthetic oligonucleotide
  Target: LAMA2; (+) strand; PAM type: NRG; PAM sequence: CAG
atttgctttcacttaggaag

SEQ ID NO: 154107 - DNA, 20 bp, Artificial Sequence
  Description of Artificial Sequence: Synthetic oligonucleotide
  Target: LAMA2; (+) strand; PAM type: NRG; PAM sequence: AAG
ttaggaagcagctgcctttc

SEQ ID NO: 154108 - DNA, 20 bp, Artificial Sequence
  Description of Artificial Sequence: Synthetic oligonucleotide
  Target: LAMA2; (+) strand; PAM type: NRG; PAM sequence: CAG
tttcaagataataaaataaa

SEQ ID NO: 154109 - DNA, 20 bp, Artificial Sequence
  Description of Artificial Sequence: Synthetic oligonucleotide
  Target: LAMA2; (+) strand; PAM type: NRG; PAM sequence: TGG
taaacagatacaataatatt

SEQ ID NO: 154110 - DNA, 20 bp, Artificial Sequence
  Description of Artificial Sequence: Synthetic oligonucleotide
  Target: LAMA2; (+) strand; PAM type: NRG; PAM sequence: CAG
cagatacaataatatttggt

SEQ ID NO: 154111 - DNA, 20 bp, Artificial Sequence
  Description of Artificial Sequence: Synthetic oligonucleotide
  Target: LAMA2; (+) strand; PAM type: NRG; PAM sequence: TGG
caataatatttggtcagctg

SEQ ID NO: 154112 - DNA, 20 bp, Artificial Sequence
  Description of Artificial Sequence: Synthetic oligonucleotide
  Target: LAMA2; (+) strand; PAM type: NRG; PAM sequence: TAG
atgtttgatttaatgttgtt

SEQ ID NO: 154113 - DNA, 20 bp, Artificial Sequence
  Description of Artificial Sequence: Synthetic oligonucleotide
  Target: LAMA2; (+) strand; PAM type: NRG; PAM sequence: TGG
tttaatgttgtttagtttgc

SEQ ID NO: 154114 - DNA, 20 bp, Artificial Sequence
  Description of Artificial Sequence: Synthetic oligonucleotide
  Target: LAMA2; (+) strand; PAM type: NRG; PAM sequence: AAG
gattccaaaatattctctgc

SEQ ID NO: 154115 - DNA, 20 bp, Artificial Sequence
  Description of Artificial Sequence: Synthetic oligonucleotide
  Target: LAMA2; (+) strand; PAM type: NRG; PAM sequence: GAG
ttccaaaatattctctgcaa

SEQ ID NO: 154116 - DNA, 20 bp, Artificial Sequence
  Description of Artificial Sequence: Synthetic oligonucleotide
  Target: LAMA2; (+) strand; PAM type: NRG; PAM sequence: AAG
caaaatattctctgcaagag

SEQ ID NO: 154117 - DNA, 20 bp, Artificial Sequence
  Description of Artificial Sequence: Synthetic oligonucleotide
  Target: LAMA2; (+) strand; PAM type: NRG; PAM sequence: AAG
agagaagcatacacattcta

SEQ ID NO: 154118 - DNA, 20 bp, Artificial Sequence
  Description of Artificial Sequence: Synthetic oligonucleotide
  Target: LAMA2; (+) strand; PAM type: NRG; PAM sequence: TAG
aaatgtttattatgatgtcc

SEQ ID NO: 154119 - DNA, 20 bp, Artificial Sequence
  Description of Artificial Sequence: Synthetic oligonucleotide
  Target: LAMA2; (+) strand; PAM type: NRG; PAM sequence: GAG
atgtttattatgatgtccta

SEQ ID NO: 154120 - DNA, 20 bp, Artificial Sequence
  Description of Artificial Sequence: Synthetic oligonucleotide
  Target: LAMA2; (+) strand; PAM type: NRG; PAM sequence: AGG
tgtttattatgatgtcctag

SEQ ID NO: 154121 - DNA, 20 bp, Artificial Sequence
  Description of Artificial Sequence: Synthetic oligonucleotide
  Target: LAMA2; (+) strand; PAM type: NRG; PAM sequence: TGG
ttattatgatgtcctagagg

SEQ ID NO: 154122 - DNA, 20 bp, Artificial Sequence
  Description of Artificial Sequence: Synthetic oligonucleotide
  Target: LAMA2; (+) strand; PAM type: NRG; PAM sequence: GAG
tctgttgctgtgcataccct

SEQ ID NO: 154123 - DNA, 20 bp, Artificial Sequence
  Description of Artificial Sequence: Synthetic oligonucleotide
  Target: LAMA2; (+) strand; PAM type: NRG; PAM sequence: CAG
gttgctgtgcataccctgag

SEQ ID NO: 154124 - DNA, 20 bp, Artificial Sequence
  Description of Artificial Sequence: Synthetic oligonucleotide
  Target: LAMA2; (+) strand; PAM type: NRG; PAM sequence: TGG
gagcagacttgacattgctt

SEQ ID NO: 154125 - DNA, 20 bp, Artificial Sequence
  Description of Artificial Sequence: Synthetic oligonucleotide
  Target: LAMA2; (+) strand; PAM type: NRG; PAM sequence: AAG
cagacttgacattgctttgg

SEQ ID NO: 154126 - DNA, 20 bp, Artificial Sequence
  Description of Artificial Sequence: Synthetic oligonucleotide
  Target: LAMA2; (+) strand; PAM type: NRG; PAM sequence: TAG
tggaagcacatattttctga

SEQ ID NO: 154127 - DNA, 20 bp, Artificial Sequence
  Description of Artificial Sequence: Synthetic oligonucleotide
  Target: LAMA2; (+) strand; PAM type: NRG; PAM sequence: CAG
tctcataatctaaaattttt

SEQ ID NO: 154128 - DNA, 20 bp, Artificial Sequence
  Description of Artificial Sequence: Synthetic oligonucleotide
  Target: LAMA2; (+) strand; PAM type: NRG; PAM sequence: AAG
cataatctaaaatttttcag

SEQ ID NO: 154129 - DNA, 20 bp, Artificial Sequence
  Description of Artificial Sequence: Synthetic oligonucleotide
  Target: LAMA2; (+) strand; PAM type: NRG; PAM sequence: AAG
aaatttttcagaagtgacaa

SEQ ID NO: 154130 - DNA, 20 bp, Artificial Sequence
  Description of Artificial Sequence: Synthetic oligonucleotide
  Target: LAMA2; (+) strand; PAM type: NRG; PAM sequence: TGG
tttttcagaagtgacaaaag

SEQ ID NO: 154131 - DNA, 20 bp, Artificial Sequence
  Description of Artificial Sequence: Synthetic oligonucleotide
  Target: LAMA2; (+) strand; PAM type: NRG; PAM sequence: GGG
ttttcagaagtgacaaaagt

SEQ ID NO: 154132 - DNA, 20 bp, Artificial Sequence
  Description of Artificial Sequence: Synthetic oligonucleotide
  Target: LAMA2; (+) strand; PAM type: NRG; PAM sequence: GGG
tttcagaagtgacaaaagtg

SEQ ID NO: 154133 - DNA, 20 bp, Artificial Sequence
  Description of Artificial Sequence: Synthetic oligonucleotide
  Target: LAMA2; (+) strand; PAM type: NRG; PAM sequence: AAG
tccatgattttgctttttcc

SEQ ID NO: 154134 - DNA, 20 bp, Artificial Sequence
  Description of Artificial Sequence: Synthetic oligonucleotide
  Target: LAMA2; (+) strand; PAM type: NRG; PAM sequence: TAG
gctttttccaagatgtcatg

SEQ ID NO: 154135 - DNA, 20 bp, Artificial Sequence
  Description of Artificial Sequence: Synthetic oligonucleotide
  Target: LAMA2; (+) strand; PAM type: NRG; PAM sequence: TAG
tttccaagatgtcatgtagt

SEQ ID NO: 154136 - DNA, 20 bp, Artificial Sequence
  Description of Artificial Sequence: Synthetic oligonucleotide
  Target: LAMA2; (+) strand; PAM type: NRG; PAM sequence: CAG
catacaatgtgttgtctttt

SEQ ID NO: 154137 - DNA, 20 bp, Artificial Sequence
  Description of Artificial Sequence: Synthetic oligonucleotide
  Target: LAMA2; (+) strand; PAM type: NRG; PAM sequence: AGG
atacaatgtgttgtcttttc

SEQ ID NO: 154138 - DNA, 20 bp, Artificial Sequence
  Description of Artificial Sequence: Synthetic oligonucleotide
  Target: LAMA2; (+) strand; PAM type: NRG; PAM sequence: TGG
aatgtgttgtcttttcaggt

SEQ ID NO: 154139 - DNA, 20 bp, Artificial Sequence
  Description of Artificial Sequence: Synthetic oligonucleotide
  Target: LAMA2; (+) strand; PAM type: NRG; PAM sequence: TAG
tcaggttggcttttttcact

SEQ ID NO: 154140 - DNA, 20 bp, Artificial Sequence
  Description of Artificial Sequence: Synthetic oligonucleotide
  Target: LAMA2; (+) strand; PAM type: NRG; PAM sequence: AAG
tcacttagcaatatgcctgt

SEQ ID NO: 154141 - DNA, 20 bp, Artificial Sequence
  Description of Artificial Sequence: Synthetic oligonucleotide
  Target: LAMA2; (+) strand; PAM type: NRG; PAM sequence: AGG
cacttagcaatatgcctgta

SEQ ID NO: 154142 - DNA, 20 bp, Artificial Sequence
  Description of Artificial Sequence: Synthetic oligonucleotide
  Target: LAMA2; (+) strand; PAM type: NRG; PAM sequence: TAG
cttgataattcatttctttt

SEQ ID NO: 154143 - DNA, 20 bp, Artificial Sequence
  Description of Artificial Sequence: Synthetic oligonucleotide
  Target: LAMA2; (+) strand; PAM type: NRG; PAM sequence: TGG
ctgaatactattttgttgtc

SEQ ID NO: 154144 - DNA, 20 bp, Artificial Sequence
  Description of Artificial Sequence: Synthetic oligonucleotide
  Target: LAMA2; (+) strand; PAM type: NRG; PAM sequence: CAG
ttgttgtctggatataacca

SEQ ID NO: 154145 - DNA, 20 bp, Artificial Sequence
  Description of Artificial Sequence: Synthetic oligonucleotide
  Target: LAMA2; (+) strand; PAM type: NRG; PAM sequence: TGG
tcctgcttgctaccatgttc

SEQ ID NO: 154146 - DNA, 20 bp, Artificial Sequence
  Description of Artificial Sequence: Synthetic oligonucleotide
  Target: LAMA2; (+) strand; PAM type: NRG; PAM sequence: AAG
atgttctggcaatatgaatc

SEQ ID NO: 154147 - DNA, 20 bp, Artificial Sequence
  Description of Artificial Sequence: Synthetic oligonucleotide
  Target: LAMA2; (+) strand; PAM type: NRG; PAM sequence: AAG
gctataaacacttatgtgat

SEQ ID NO: 154148 - DNA, 20 bp, Artificial Sequence
  Description of Artificial Sequence: Synthetic oligonucleotide
  Target: LAMA2; (+) strand; PAM type: NRG; PAM sequence: TGG
cttatgtgataagtcttgtg

SEQ ID NO: 154149 - DNA, 20 bp, Artificial Sequence
  Description of Artificial Sequence: Synthetic oligonucleotide
  Target: LAMA2; (+) strand; PAM type: NRG; PAM sequence: TGG
atataaatattcaacttatt

SEQ ID NO: 154150 - DNA, 20 bp, Artificial Sequence
  Description of Artificial Sequence: Synthetic oligonucleotide
  Target: LAMA2; (+) strand; PAM type: NRG; PAM sequence: GGG
tataaatattcaacttattt

SEQ ID NO: 154151 - DNA, 20 bp, Artificial Sequence
  Description of Artificial Sequence: Synthetic oligonucleotide
  Target: LAMA2; (+) strand; PAM type: NRG; PAM sequence: AAG
acttatttgggtaaatacca

SEQ ID NO: 154152 - DNA, 20 bp, Artificial Sequence
  Description of Artificial Sequence: Synthetic oligonucleotide
  Target: LAMA2; (+) strand; PAM type: NRG; PAM sequence: GAG
ttatttgggtaaataccaaa

SEQ ID NO: 154153 - DNA, 20 bp, Artificial Sequence
  Description of Artificial Sequence: Synthetic oligonucleotide
  Target: LAMA2; (+) strand; PAM type: NRG; PAM sequence: TGG
ataccaaagagtgcaattac

SEQ ID NO: 154154 - DNA, 20 bp, Artificial Sequence
  Description of Artificial Sequence: Synthetic oligonucleotide
  Target: LAMA2; (+) strand; PAM type: NRG; PAM sequence: TGG
agtgcaattactggatcata

SEQ ID NO: 154155 - DNA, 20 bp, Artificial Sequence
  Description of Artificial Sequence: Synthetic oligonucleotide
  Target: LAMA2; (+) strand; PAM type: NRG; PAM sequence: CAG
caattactggatcatatggt

SEQ ID NO: 154156 - DNA, 20 bp, Artificial Sequence
  Description of Artificial Sequence: Synthetic oligonucleotide
  Target: LAMA2; (+) strand; PAM type: NRG; PAM sequence: GAG
attactggatcatatggtca

SEQ ID NO: 154157 - DNA, 20 bp, Artificial Sequence
  Description of Artificial Sequence: Synthetic oligonucleotide
  Target: LAMA2; (+) strand; PAM type: NRG; PAM sequence: TAG
atcatatggtcagagcatgc

SEQ ID NO: 154158 - DNA, 20 bp, Artificial Sequence
  Description of Artificial Sequence: Synthetic oligonucleotide
  Target: LAMA2; (+) strand; PAM type: NRG; PAM sequence: TGG
tgccaaactatcttccaata

SEQ ID NO: 154159 - DNA, 20 bp, Artificial Sequence
  Description of Artificial Sequence: Synthetic oligonucleotide
  Target: LAMA2; (+) strand; PAM type: NRG; PAM sequence: CAG
gtataattttgcattctcac

SEQ ID NO: 154160 - DNA, 20 bp, Artificial Sequence
  Description of Artificial Sequence: Synthetic oligonucleotide
  Target: LAMA2; (+) strand; PAM type: NRG; PAM sequence: AAG
cattctcaccagcaatgaac

SEQ ID NO: 154161 - DNA, 20 bp, Artificial Sequence
  Description of Artificial Sequence: Synthetic oligonucleotide
  Target: LAMA2; (+) strand; PAM type: NRG; PAM sequence: GAG
ttctcaccagcaatgaacaa

SEQ ID NO: 154162 - DNA, 20 bp, Artificial Sequence
  Description of Artificial Sequence: Synthetic oligonucleotide
  Target: LAMA2; (+) strand; PAM type: NRG; PAM sequence: CAG
ctgtttctccacattctcac

SEQ ID NO: 154163 - DNA, 20 bp, Artificial Sequence
  Description of Artificial Sequence: Synthetic oligonucleotide
  Target: LAMA2; (+) strand; PAM type: NRG; PAM sequence: TAG
atttcatattgtcaatgttt

SEQ ID NO: 154164 - DNA, 20 bp, Artificial Sequence
  Description of Artificial Sequence: Synthetic oligonucleotide
  Target: LAMA2; (+) strand; PAM type: NRG; PAM sequence: CAG
attgtcaatgttttagacat

SEQ ID NO: 154165 - DNA, 20 bp, Artificial Sequence
  Description of Artificial Sequence: Synthetic oligonucleotide
  Target: LAMA2; (+) strand; PAM type: NRG; PAM sequence: TAG
ttagacatcagctattctaa

SEQ ID NO: 154166 - DNA, 20 bp, Artificial Sequence
  Description of Artificial Sequence: Synthetic oligonucleotide
  Target: LAMA2; (+) strand; PAM type: NRG; PAM sequence: TAG
cagctattctaatagatatg

SEQ ID NO: 154167 - DNA, 20 bp, Artificial Sequence
  Description of Artificial Sequence: Synthetic oligonucleotide
  Target: LAMA2; (+) strand; PAM type: NRG; PAM sequence: TGG
ctattctaatagatatgtag

SEQ ID NO: 154168 - DNA, 20 bp, Artificial Sequence
  Description of Artificial Sequence: Synthetic oligonucleotide
  Target: LAMA2; (+) strand; PAM type: NRG; PAM sequence: AAG
ttgaaattctctaatgatgt

SEQ ID NO: 154169 - DNA, 20 bp, Artificial Sequence
  Description of Artificial Sequence: Synthetic oligonucleotide
  Target: LAMA2; (+) strand; PAM type: NRG; PAM sequence: GAG
ctctaatgatgtaagatgat

SEQ ID NO: 154170 - DNA, 20 bp, Artificial Sequence
  Description of Artificial Sequence: Synthetic oligonucleotide
  Target: LAMA2; (+) strand; PAM type: NRG; PAM sequence: AAG
cttattttccatctgtatat

SEQ ID NO: 154171 - DNA, 20 bp, Artificial Sequence
  Description of Artificial Sequence: Synthetic oligonucleotide
  Target: LAMA2; (+) strand; PAM type: NRG; PAM sequence: GAG
atctgtatataagctttgct

SEQ ID NO: 154172 - DNA, 20 bp, Artificial Sequence
  Description of Artificial Sequence: Synthetic oligonucleotide
  Target: LAMA2; (+) strand; PAM type: NRG; PAM sequence: AGG
tctgtatataagctttgctg

SEQ ID NO: 154173 - DNA, 20 bp, Artificial Sequence
  Description of Artificial Sequence: Synthetic oligonucleotide
  Target: LAMA2; (+) strand; PAM type: NRG; PAM sequence: TAG
gctttgctgaggtatctgtt

SEQ ID NO: 154174 - DNA, 20 bp, Artificial Sequence
  Description of Artificial Sequence: Synthetic oligonucleotide
  Target: LAMA2; (+) strand; PAM type: NRG; PAM sequence: GAG
aaatttattttcttgttgtt

SEQ ID NO: 154175 - DNA, 20 bp, Artificial Sequence
  Description of Artificial Sequence: Synthetic oligonucleotide
  Target: LAMA2; (+) strand; PAM type: NRG; PAM sequence: AAG
ttttcttgttgttgagattt

SEQ ID NO: 154176 - DNA, 20 bp, Artificial Sequence
  Description of Artificial Sequence: Synthetic oligonucleotide
  Target: LAMA2; (+) strand; PAM type: NRG; PAM sequence: GAG
ttcttgttgttgagatttaa

SEQ ID NO: 154177 - DNA, 20 bp, Artificial Sequence
  Description of Artificial Sequence: Synthetic oligonucleotide
  Target: LAMA2; (+) strand; PAM type: NRG; PAM sequence: TGG
taagagttctttgtatgttt

SEQ ID NO: 154178 - DNA, 20 bp, Artificial Sequence
  Description of Artificial Sequence: Synthetic oligonucleotide
  Target: LAMA2; (+) strand; PAM type: NRG; PAM sequence: CAG
ttgtatgttttggaccatat

SEQ ID NO: 154179 - DNA, 20 bp, Artificial Sequence
  Description of Artificial Sequence: Synthetic oligonucleotide
  Target: LAMA2; (+) strand; PAM type: NRG; PAM sequence: AGG
tgtatgttttggaccatatc

SEQ ID NO: 154180 - DNA, 20 bp, Artificial Sequence
  Description of Artificial Sequence: Synthetic oligonucleotide
  Target: LAMA2; (+) strand; PAM type: NRG; PAM sequence: TGG
tgcaaatattttcttgcaaa

SEQ ID NO: 154181 - DNA, 20 bp, Artificial Sequence
  Description of Artificial Sequence: Synthetic oligonucleotide
  Target: LAMA2; (+) strand; PAM type: NRG; PAM sequence: TAG
aaatattttcttgcaaatgg

SEQ ID NO: 154182 - DNA, 20 bp, Artificial Sequence
  Description of Artificial Sequence: Synthetic oligonucleotide
  Target: LAMA2; (+) strand; PAM type: NRG; PAM sequence: CAG
agtttctcttattctcttca

SEQ ID NO: 154183 - DNA, 20 bp, Artificial Sequence
  Description of Artificial Sequence: Synthetic oligonucleotide
  Target: LAMA2; (+) strand; PAM type: NRG; PAM sequence: CAG
tctcttcacagtgtctttca

SEQ ID NO: 154184 - DNA, 20 bp, Artificial Sequence
  Description of Artificial Sequence: Synthetic oligonucleotide
  Target: LAMA2; (+) strand; PAM type: NRG; PAM sequence: GAG
tcttcacagtgtctttcaca

SEQ ID NO: 154185 - DNA, 20 bp, Artificial Sequence
  Description of Artificial Sequence: Synthetic oligonucleotide
  Target: LAMA2; (+) strand; PAM type: NRG; PAM sequence: AAG
tcacagtgtctttcacagag

SEQ ID NO: 154186 - DNA, 20 bp, Artificial Sequence
  Description of Artificial Sequence: Synthetic oligonucleotide
  Target: LAMA2; (+) strand; PAM type: NRG; PAM sequence: TGG
taaaatgaatttttatttca

SEQ ID NO: 154187 - DNA, 20 bp, Artificial Sequence
  Description of Artificial Sequence: Synthetic oligonucleotide
  Target: LAMA2; (+) strand; PAM type: NRG; PAM sequence: TAG
tatttcatggatcttgactt

SEQ ID NO: 154188 - DNA, 20 bp, Artificial Sequence
  Description of Artificial Sequence: Synthetic oligonucleotide
  Target: LAMA2; (+) strand; PAM type: NRG; PAM sequence: AAG
tgactttagtgttatatata

SEQ ID NO: 154189 - DNA, 20 bp, Artificial Sequence
  Description of Artificial Sequence: Synthetic oligonucleotide
  Target: LAMA2; (+) strand; PAM type: NRG; PAM sequence: GAG
actttagtgttatatataaa

SEQ ID NO: 154190 - DNA, 20 bp, Artificial Sequence
  Description of Artificial Sequence: Synthetic oligonucleotide
  Target: LAMA2; (+) strand; PAM type: NRG; PAM sequence: CAG
ataaagagttactgcaaact

SEQ ID NO: 154191 - DNA, 20 bp, Artificial Sequence
  Description of Artificial Sequence: Synthetic oligonucleotide
  Target: LAMA2; (+) strand; PAM type: NRG; PAM sequence: AGG
taaagagttactgcaaactc

SEQ ID NO: 154192 - DNA, 20 bp, Artificial Sequence
  Description of Artificial Sequence: Synthetic oligonucleotide
  Target: LAMA2; (+) strand; PAM type: NRG; PAM sequence: GGG
aaagagttactgcaaactca

SEQ ID NO: 154193 - DNA, 20 bp, Artificial Sequence
  Description of Artificial Sequence: Synthetic oligonucleotide
  Target: LAMA2; (+) strand; PAM type: NRG; PAM sequence: TAG
actgcaaactcagggttatt

SEQ ID NO: 154194 - DNA, 20 bp, Artificial Sequence
  Description of Artificial Sequence: Synthetic oligonucleotide
  Target: LAMA2; (+) strand; PAM type: NRG; PAM sequence: AAG
tttcttctatgttatcttcc

SEQ ID NO: 154195 - DNA, 20 bp, Artificial Sequence
  Description of Artificial Sequence: Synthetic oligonucleotide
  Target: LAMA2; (+) strand; PAM type: NRG; PAM sequence: GAG
tcttctatgttatcttccaa

SEQ ID NO: 154196 - DNA, 20 bp, Artificial Sequence
  Description of Artificial Sequence: Synthetic oligonucleotide
  Target: LAMA2; (+) strand; PAM type: NRG; PAM sequence: TAG
atgttatcttccaagagtca

SEQ ID NO: 154197 - DNA, 20 bp, Artificial Sequence
  Description of Artificial Sequence: Synthetic oligonucleotide
  Target: LAMA2; (+) strand; PAM type: NRG; PAM sequence: GAG
cattttatatgatccatttt

SEQ ID NO: 154198 - DNA, 20 bp, Artificial Sequence
  Description of Artificial Sequence: Synthetic oligonucleotide
  Target: LAMA2; (+) strand; PAM type: NRG; PAM sequence: AGG
attttatatgatccattttg

SEQ ID NO: 154199 - DNA, 20 bp, Artificial Sequence
  Description of Artificial Sequence: Synthetic oligonucleotide
  Target: LAMA2; (+) strand; PAM type: NRG; PAM sequence: GAG
cattttgtgttaatttttgt

SEQ ID NO: 154200 - DNA, 20 bp, Artificial Sequence
  Description of Artificial Sequence: Synthetic oligonucleotide
  Target: LAMA2; (+) strand; PAM type: NRG; PAM sequence: AGG
attttgtgttaatttttgtg

SEQ ID NO: 154201 - DNA, 20 bp, Artificial Sequence
  Description of Artificial Sequence: Synthetic oligonucleotide
  Target: LAMA2; (+) strand; PAM type: NRG; PAM sequence: GGG
ttttgtgttaatttttgtga

SEQ ID NO: 154202 - DNA, 20 bp, Artificial Sequence
  Description of Artificial Sequence: Synthetic oligonucleotide
  Target: LAMA2; (+) strand; PAM type: NRG; PAM sequence: AAG
gcatttatgtattttttcac

SEQ ID NO: 154203 - DNA, 20 bp, Artificial Sequence
  Description of Artificial Sequence: Synthetic oligonucleotide
  Target: LAMA2; (+) strand; PAM type: NRG; PAM sequence: CAG
tattttttcacaagttatct

SEQ ID NO: 154204 - DNA, 20 bp, Artificial Sequence
  Description of Artificial Sequence: Synthetic oligonucleotide
  Target: LAMA2; (+) strand; PAM type: NRG; PAM sequence: CAG
tcaattttctgttgctataa

SEQ ID NO: 154205 - DNA, 20 bp, Artificial Sequence
  Description of Artificial Sequence: Synthetic oligonucleotide
  Target: LAMA2; (+) strand; PAM type: NRG; PAM sequence: GAG
gttgctataacagaatacct

SEQ ID NO: 154206 - DNA, 20 bp, Artificial Sequence
  Description of Artificial Sequence: Synthetic oligonucleotide
  Target: LAMA2; (+) strand; PAM type: NRG; PAM sequence: TAG
tataacagaatacctgagac

SEQ ID NO: 154207 - DNA, 20 bp, Artificial Sequence
  Description of Artificial Sequence: Synthetic oligonucleotide
  Target: LAMA2; (+) strand; PAM type: NRG; PAM sequence: AGG
ataacagaatacctgagact

SEQ ID NO: 154208 - DNA, 20 bp, Artificial Sequence
  Description of Artificial Sequence: Synthetic oligonucleotide
  Target: LAMA2; (+) strand; PAM type: NRG; PAM sequence: AAG
ctgagactaggtaatttata

SEQ ID NO: 154209 - DNA, 20 bp, Artificial Sequence
  Description of Artificial Sequence: Synthetic oligonucleotide
  Target: LAMA2; (+) strand; PAM type: NRG; PAM sequence: AGG
tgagactaggtaatttataa

SEQ ID NO: 154210 - DNA, 20 bp, Artificial Sequence
  Description of Artificial Sequence: Synthetic oligonucleotide
  Target: LAMA2; (+) strand; PAM type: NRG; PAM sequence: GAG
agactaggtaatttataaag

SEQ ID NO: 154211 - DNA, 20 bp, Artificial Sequence
  Description of Artificial Sequence: Synthetic oligonucleotide
  Target: LAMA2; (+) strand; PAM type: NRG; PAM sequence: GAG
actaggtaatttataaagga

SEQ ID NO: 154212 - DNA, 20 bp, Artificial Sequence
  Description of Artificial Sequence: Synthetic oligonucleotide
  Target: LAMA2; (+) strand; PAM type: NRG; PAM sequence: GAG
taggtaatttataaaggaga

SEQ ID NO: 154213 - DNA, 20 bp, Artificial Sequence
  Description of Artificial Sequence: Synthetic oligonucleotide
  Target: LAMA2; (+) strand; PAM type: NRG; PAM sequence: TAG
ataaaggagagagttctatt

SEQ ID NO: 154214 - DNA, 20 bp, Artificial Sequence
  Description of Artificial Sequence: Synthetic oligonucleotide
  Target: LAMA2; (+) strand; PAM type: NRG; PAM sequence: TGG
ttctatttagcttgtgatcc

SEQ ID NO: 154215 - DNA, 20 bp, Artificial Sequence
  Description of Artificial Sequence: Synthetic oligonucleotide
  Target: LAMA2; (+) strand; PAM type: NRG; PAM sequence: GGG
tctatttagcttgtgatcct

SEQ ID NO: 154216 - DNA, 20 bp, Artificial Sequence
  Description of Artificial Sequence: Synthetic oligonucleotide
  Target: LAMA2; (+) strand; PAM type: NRG; PAM sequence: GAG
tatttagcttgtgatcctgg

SEQ ID NO: 154217 - DNA, 20 bp, Artificial Sequence
  Description of Artificial Sequence: Synthetic oligonucleotide
  Target: LAMA2; (+) strand; PAM type: NRG; PAM sequence: TAG
tgtgatcctgggagcttgac

SEQ ID NO: 154218 - DNA, 20 bp, Artificial Sequence
  Description of Artificial Sequence: Synthetic oligonucleotide
  Target: LAMA2; (+) strand; PAM type: NRG; PAM sequence: AGG
gtgatcctgggagcttgact

SEQ ID NO: 154219 - DNA, 20 bp, Artificial Sequence
  Description of Artificial Sequence: Synthetic oligonucleotide
  Target: LAMA2; (+) strand; PAM type: NRG; PAM sequence: GAG
gatcctgggagcttgactag

SEQ ID NO: 154220 - DNA, 20 bp, Artificial Sequence
  Description of Artificial Sequence: Synthetic oligonucleotide
  Target: LAMA2; (+) strand; PAM type: NRG; PAM sequence: AAG
ggagcttgactaggagatcc

SEQ ID NO: 154221 - DNA, 20 bp, Artificial Sequence
  Description of Artificial Sequence: Synthetic oligonucleotide
  Target: LAMA2; (+) strand; PAM type: NRG; PAM sequence: TAG
cttgactaggagatccaagt

SEQ ID NO: 154222 - DNA, 20 bp, Artificial Sequence
  Description of Artificial Sequence: Synthetic oligonucleotide
  Target: LAMA2; (+) strand; PAM type: NRG; PAM sequence: AGG
ttgactaggagatccaagtt

SEQ ID NO: 154223 - DNA, 20 bp, Artificial Sequence
  Description of Artificial Sequence: Synthetic oligonucleotide
  Target: LAMA2; (+) strand; PAM type: NRG; PAM sequence: CAG
ctaggagatccaagttagga

SEQ ID NO: 154224 - DNA, 20 bp, Artificial Sequence
  Description of Artificial Sequence: Synthetic oligonucleotide
  Target: LAMA2; (+) strand; PAM type: NRG; PAM sequence: AGG
taggagatccaagttaggac

SEQ ID NO: 154225 - DNA, 20 bp, Artificial Sequence
  Description of Artificial Sequence: Synthetic oligonucleotide
  Target: LAMA2; (+) strand; PAM type: NRG; PAM sequence: TGG
caagttaggacaggtgcatt

SEQ ID NO: 154226 - DNA, 20 bp, Artificial Sequence
  Description of Artificial Sequence: Synthetic oligonucleotide
  Target: LAMA2; (+) strand; PAM type: NRG; PAM sequence: AAG
taggacaggtgcatttggtc

SEQ ID NO: 154227 - DNA, 20 bp, Artificial Sequence
  Description of Artificial Sequence: Synthetic oligonucleotide
  Target: LAMA2; (+) strand; PAM type: NRG; PAM sequence: TGG
aggtgcatttggtcaagttc

SEQ ID NO: 154228 - DNA, 20 bp, Artificial Sequence
  Description of Artificial Sequence: Synthetic oligonucleotide
  Target: LAMA2; (+) strand; PAM type: NRG; PAM sequence: GAG
gcatttggtcaagttctggt

SEQ ID NO: 154229 - DNA, 20 bp, Artificial Sequence
  Description of Artificial Sequence: Synthetic oligonucleotide
  Target: LAMA2; (+) strand; PAM type: NRG; PAM sequence: GAG
atttggtcaagttctggtga

SEQ ID NO: 154230 - DNA, 20 bp, Artificial Sequence
  Description of Artificial Sequence: Synthetic oligonucleotide
  Target: LAMA2; (+) strand; PAM type: NRG; PAM sequence: TGG
tcttgtgctgcatcttaaca

SEQ ID NO: 154231 - DNA, 20 bp, Artificial Sequence
  Description of Artificial Sequence: Synthetic oligonucleotide
  Target: LAMA2; (+) strand; PAM type: NRG; PAM sequence: TGG
tgtgctgcatcttaacatgg

SEQ ID NO: 154232 - DNA, 20 bp, Artificial Sequence
  Description of Artificial Sequence: Synthetic oligonucleotide
  Target: LAMA2; (+) strand; PAM type: NRG; PAM sequence: GAG
tgctgcatcttaacatggtg

SEQ ID NO: 154233 - DNA, 20 bp, Artificial Sequence
  Description of Artificial Sequence: Synthetic oligonucleotide
  Target: LAMA2; (+) strand; PAM type: NRG; PAM sequence: AAG
tgcatcttaacatggtggag

SEQ ID NO: 154234 - DNA, 20 bp, Artificial Sequence
  Description of Artificial Sequence: Synthetic oligonucleotide
  Target: LAMA2; (+) strand; PAM type: NRG; PAM sequence: TGG
atcttaacatggtggagaag

SEQ ID NO: 154235 - DNA, 20 bp, Artificial Sequence
  Description of Artificial Sequence: Synthetic oligonucleotide
  Target: LAMA2; (+) strand; PAM type: NRG; PAM sequence: AAG
ttaacatggtggagaagtgg

SEQ ID NO: 154236 - DNA, 20 bp, Artificial Sequence
  Description of Artificial Sequence: Synthetic oligonucleotide
  Target: LAMA2; (+) strand; PAM type: NRG; PAM sequence: AAG
tggtggagaagtggaagaaa

SEQ ID NO: 154237 - DNA, 20 bp, Artificial Sequence
  Description of Artificial Sequence: Synthetic oligonucleotide
  Target: LAMA2; (+) strand; PAM type: NRG; PAM sequence: TGG
tggagaagtggaagaaaaag

SEQ ID NO: 154238 - DNA, 20 bp, Artificial Sequence
  Description of Artificial Sequence: Synthetic oligonucleotide
  Target: LAMA2; (+) strand; PAM type: NRG; PAM sequence: GGG
ggagaagtggaagaaaaagt

SEQ ID NO: 154239 - DNA, 20 bp, Artificial Sequence
  Description of Artificial Sequence: Synthetic oligonucleotide
  Target: LAMA2; (+) strand; PAM type: NRG; PAM sequence: AAG
tgtgcaaaatgaccaaacac

SEQ ID NO: 154240 - DNA, 20 bp, Artificial Sequence
  Description of Artificial Sequence: Synthetic oligonucleotide
  Target: LAMA2; (+) strand; PAM type: NRG; PAM sequence: GAG
tgcaaaatgaccaaacacaa

SEQ ID NO: 154241 - DNA, 20 bp, Artificial Sequence
  Description of Artificial Sequence: Synthetic oligonucleotide
  Target: LAMA2; (+) strand; PAM type: NRG; PAM sequence: AGG
gcaaaatgaccaaacacaag

SEQ ID NO: 154242 - DNA, 20 bp, Artificial Sequence
  Description of Artificial Sequence: Synthetic oligonucleotide
  Target: LAMA2; (+) strand; PAM type: NRG; PAM sequence: GGG
caaaatgaccaaacacaaga

SEQ ID NO: 154243 - DNA, 20 bp, Artificial Sequence
  Description of Artificial Sequence: Synthetic oligonucleotide
  Target: LAMA2; (+) strand; PAM type: NRG; PAM sequence: GAG
aaatgaccaaacacaagagg

SEQ ID NO: 154244 - DNA, 20 bp, Artificial Sequence
  Description of Artificial Sequence: Synthetic oligonucleotide
  Target: LAMA2; (+) strand; PAM type: NRG; PAM sequence: GAG
ctttttaacaacccaccctc

SEQ ID NO: 154245 - DNA, 20 bp, Artificial Sequence
  Description of Artificial Sequence: Synthetic oligonucleotide
  Target: LAMA2; (+) strand; PAM type: NRG; PAM sequence: AGG
tttttaacaacccaccctcg

SEQ ID NO: 154246 - DNA, 20 bp, Artificial Sequence
  Description of Artificial Sequence: Synthetic oligonucleotide
  Target: LAMA2; (+) strand; PAM type: NRG; PAM sequence: TAG
ttaacaacccaccctcgagg

SEQ ID NO: 154247 - DNA, 20 bp, Artificial Sequence
  Description of Artificial Sequence: Synthetic oligonucleotide
  Target: LAMA2; (+) strand; PAM type: NRG; PAM sequence: CAG
caccctcgaggtagctaatc

SEQ ID NO: 154248 - DNA, 20 bp, Artificial Sequence
  Description of Artificial Sequence: Synthetic oligonucleotide
  Target: LAMA2; (+) strand; PAM type: NRG; PAM sequence: AAG
ggtagctaatccagtcctac

SEQ ID NO: 154249 - DNA, 20 bp, Artificial Sequence
  Description of Artificial Sequence: Synthetic oligonucleotide
  Target: LAMA2; (+) strand; PAM type: NRG; PAM sequence: GAG
tagctaatccagtcctacaa

SEQ ID NO: 154250 - DNA, 20 bp, Artificial Sequence
  Description of Artificial Sequence: Synthetic oligonucleotide
  Target: LAMA2; (+) strand; PAM type: NRG; PAM sequence: AAG
taatccagtcctacaagagc

SEQ ID NO: 154251 - DNA, 20 bp, Artificial Sequence
  Description of Artificial Sequence: Synthetic oligonucleotide
  Target: LAMA2; (+) strand; PAM type: NRG; PAM sequence: AAG
caagagcaagaactcactct

SEQ ID NO: 154252 - DNA, 20 bp, Artificial Sequence
  Description of Artificial Sequence: Synthetic oligonucleotide
  Target: LAMA2; (+) strand; PAM type: NRG; PAM sequence: AAG
agcaagaactcactctaaga

SEQ ID NO: 154253 - DNA, 20 bp, Artificial Sequence
  Description of Artificial Sequence: Synthetic oligonucleotide
  Target: LAMA2; (+) strand; PAM type: NRG; PAM sequence: AGG
gcaagaactcactctaagaa

SEQ ID NO: 154254 - DNA, 20 bp, Artificial Sequence
  Description of Artificial Sequence: Synthetic oligonucleotide
  Target: LAMA2; (+) strand; PAM type: NRG; PAM sequence: AAG
aaaaacctaatcacctctcc

SEQ ID NO: 154255 - DNA, 20 bp, Artificial Sequence
  Description of Artificial Sequence: Synthetic oligonucleotide
  Target: LAMA2; (+) strand; PAM type: NRG; PAM sequence: AGG
aaaacctaatcacctctcca

SEQ ID NO: 154256 - DNA, 20 bp, Artificial Sequence
  Description of Artificial Sequence: Synthetic oligonucleotide
  Target: LAMA2; (+) strand; PAM type: NRG; PAM sequence: TAG
acctctcaacatcaccccat

SEQ ID NO: 154257 - DNA, 20 bp, Artificial Sequence
  Description of Artificial Sequence: Synthetic oligonucleotide
  Target: LAMA2; (+) strand; PAM type: NRG; PAM sequence: AGG
cctctcaacatcaccccatt

SEQ ID NO: 154258 - DNA, 20 bp, Artificial Sequence
  Description of Artificial Sequence: Synthetic oligonucleotide
  Target: LAMA2; (+) strand; PAM type: NRG; PAM sequence: TGG
ttaggaaccaaacctcacta

SEQ ID NO: 154259 - DNA, 20 bp, Artificial Sequence
  Description of Artificial Sequence: Synthetic oligonucleotide
  Target: LAMA2; (+) strand; PAM type: NRG; PAM sequence: CAG
accataacacaaatgatgtc

SEQ ID NO: 154260 - DNA, 20 bp, Artificial Sequence
  Description of Artificial Sequence: Synthetic oligonucleotide
  Target: LAMA2; (+) strand; PAM type: NRG; PAM sequence: TAG
caaatgatgtccagtttttc

SEQ ID NO: 154261 - DNA, 20 bp, Artificial Sequence
  Description of Artificial Sequence: Synthetic oligonucleotide
  Target: LAMA2; (+) strand; PAM type: NRG; PAM sequence: AAG
ttccctttgctcctttgtga

SEQ ID NO: 154262 - DNA, 20 bp, Artificial Sequence
  Description of Artificial Sequence: Synthetic oligonucleotide
  Target: LAMA2; (+) strand; PAM type: NRG; PAM sequence: CAG
tttgctcctttgtgaaagat

SEQ ID NO: 154263 - DNA, 20 bp, Artificial Sequence
  Description of Artificial Sequence: Synthetic oligonucleotide
  Target: LAMA2; (+) strand; PAM type: NRG; PAM sequence: TGG
ctcctttgtgaaagatcaga

SEQ ID NO: 154264 - DNA, 20 bp, Artificial Sequence
  Description of Artificial Sequence: Synthetic oligonucleotide
  Target: LAMA2; (+) strand; PAM type: NRG; PAM sequence: CGG
atcagatggccatattcatg

SEQ ID NO: 154265 - DNA, 20 bp, Artificial Sequence
  Description of Artificial Sequence: Synthetic oligonucleotide
  Target: LAMA2; (+) strand; PAM type: NRG; PAM sequence: GGG
tcagatggccatattcatgc

SEQ ID NO: 154266 - DNA, 20 bp, Artificial Sequence
  Description of Artificial Sequence: Synthetic oligonucleotide
  Target: LAMA2; (+) strand; PAM type: NRG; PAM sequence: TGG
tattcatgcgggtgtatttc

SEQ ID NO: 154267 - DNA, 20 bp, Artificial Sequence
  Description of Artificial Sequence: Synthetic oligonucleotide
  Target: LAMA2; (+) strand; PAM type: NRG; PAM sequence: GGG
attcatgcgggtgtatttct

SEQ ID NO: 154268 - DNA, 20 bp, Artificial Sequence
  Description of Artificial Sequence: Synthetic oligonucleotide
  Target: LAMA2; (+) strand; PAM type: NRG; PAM sequence: TGG
atgcgggtgtatttctgggc

SEQ ID NO: 154269 - DNA, 20 bp, Artificial Sequence
  Description of Artificial Sequence: Synthetic oligonucleotide
  Target: LAMA2; (+) strand; PAM type: NRG; PAM sequence: AAG
ctattctgttccattgatct

SEQ ID NO: 154270 - DNA, 20 bp, Artificial Sequence
  Description of Artificial Sequence: Synthetic oligonucleotide
  Target: LAMA2; (+) strand; PAM type: NRG; PAM sequence: CAG
ctaagtgacttttttctgac

SEQ ID NO: 154271 - DNA, 20 bp, Artificial Sequence
  Description of Artificial Sequence: Synthetic oligonucleotide
  Target: LAMA2; (+) strand; PAM type: NRG; PAM sequence: TAG
ctatattgtcttgataacta

SEQ ID NO: 154272 - DNA, 20 bp, Artificial Sequence
  Description of Artificial Sequence: Synthetic oligonucleotide
  Target: LAMA2; (+) strand; PAM type: NRG; PAM sequence: AAG
gataactatagttttatact

SEQ ID NO: 154273 - DNA, 20 bp, Artificial Sequence
  Description of Artificial Sequence: Synthetic oligonucleotide
  Target: LAMA2; (+) strand; PAM type: NRG; PAM sequence: AAG
tagttttatactaagtcttg

SEQ ID NO: 154274 - DNA, 20 bp, Artificial Sequence
  Description of Artificial Sequence: Synthetic oligonucleotide
  Target: LAMA2; (+) strand; PAM type: NRG; PAM sequence: TGG
tttatactaagtcttgaagt

SEQ ID NO: 154275 - DNA, 20 bp, Artificial Sequence
  Description of Artificial Sequence: Synthetic oligonucleotide
  Target: LAMA2; (+) strand; PAM type: NRG; PAM sequence: GGG
ttatactaagtcttgaagtt

SEQ ID NO: 154276 - DNA, 20 bp, Artificial Sequence
  Description of Artificial Sequence: Synthetic oligonucleotide
  Target: LAMA2; (+) strand; PAM type: NRG; PAM sequence: TAG
tactaagtcttgaagttggg

SEQ ID NO: 154277 - DNA, 20 bp, Artificial Sequence
  Description of Artificial Sequence: Synthetic oligonucleotide
  Target: LAMA2; (+) strand; PAM type: NRG; PAM sequence: TAG
gtcttgaagttgggtagtgt

SEQ ID NO: 154278 - DNA, 20 bp, Artificial Sequence
  Description of Artificial Sequence: Synthetic oligonucleotide
  Target: LAMA2; (+) strand; PAM type: NRG; PAM sequence: AAG
ttgggtagtgttagctttac

SEQ ID NO: 154279 - DNA, 20 bp, Artificial Sequence
  Description of Artificial Sequence: Synthetic oligonucleotide
  Target: LAMA2; (+) strand; PAM type: NRG; PAM sequence: TGG
aatattatttaatgatgtgt

SEQ ID NO: 154280 - DNA, 20 bp, Artificial Sequence
  Description of Artificial Sequence: Synthetic oligonucleotide
  Target: LAMA2; (+) strand; PAM type: NRG; PAM sequence: TGG
aatgatgtgttggctgttct

SEQ ID NO: 154281 - DNA, 20 bp, Artificial Sequence
  Description of Artificial Sequence: Synthetic oligonucleotide
  Target: LAMA2; (+) strand; PAM type: NRG; PAM sequence: TAG
tttcctctccatataaattt

SEQ ID NO: 154282 - DNA, 20 bp, Artificial Sequence
  Description of Artificial Sequence: Synthetic oligonucleotide
  Target: LAMA2; (+) strand; PAM type: NRG; PAM sequence: CAG
ctccatataaattttagaat

SEQ ID NO: 154283 - DNA, 20 bp, Artificial Sequence
  Description of Artificial Sequence: Synthetic oligonucleotide
  Target: LAMA2; (+) strand; PAM type: NRG; PAM sequence: TGG
atatccaaaaaataacttgc

SEQ ID NO: 154284 - DNA, 20 bp, Artificial Sequence
  Description of Artificial Sequence: Synthetic oligonucleotide
  Target: LAMA2; (+) strand; PAM type: NRG; PAM sequence: GGG
tatccaaaaaataacttgct

SEQ ID NO: 154285 - DNA, 20 bp, Artificial Sequence
  Description of Artificial Sequence: Synthetic oligonucleotide
  Target: LAMA2; (+) strand; PAM type: NRG; PAM sequence: TGG
taacttgctgggattttgac

SEQ ID NO: 154286 - DNA, 20 bp, Artificial Sequence
  Description of Artificial Sequence: Synthetic oligonucleotide
  Target: LAMA2; (+) strand; PAM type: NRG; PAM sequence: GGG
aacttgctgggattttgact

SEQ ID NO: 154287 - DNA, 20 bp, Artificial Sequence
  Description of Artificial Sequence: Synthetic oligonucleotide
  Target: LAMA2; (+) strand; PAM type: NRG; PAM sequence: TGG
taccttgaatctacacaaat

SEQ ID NO: 154288 - DNA, 20 bp, Artificial Sequence
  Description of Artificial Sequence: Synthetic oligonucleotide
  Target: LAMA2; (+) strand; PAM type: NRG; PAM sequence: GGG
accttgaatctacacaaatt

SEQ ID NO: 154289 - DNA, 20 bp, Artificial Sequence
  Description of Artificial Sequence: Synthetic oligonucleotide
  Target: LAMA2; (+) strand; PAM type: NRG; PAM sequence: AAG
ttgaatctacacaaattggg

SEQ ID NO: 154290 - DNA, 20 bp, Artificial Sequence
  Description of Artificial Sequence: Synthetic oligonucleotide
  Target: LAMA2; (+) strand; PAM type: NRG; PAM sequence: GAG
aagaactgacatcctacctt

SEQ ID NO: 154291 - DNA, 20 bp, Artificial Sequence
  Description of Artificial Sequence: Synthetic oligonucleotide
  Target: LAMA2; (+) strand; PAM type: NRG; PAM sequence: TGG
accttgagtcttcctattta

SEQ ID NO: 154292 - DNA, 20 bp, Artificial Sequence
  Description of Artificial Sequence: Synthetic oligonucleotide
  Target: LAMA2; (+) strand; PAM type: NRG; PAM sequence: TGG
agtcttcctatttatggaca

SEQ ID NO: 154293 - DNA, 20 bp, Artificial Sequence
  Description of Artificial Sequence: Synthetic oligonucleotide
  Target: LAMA2; (+) strand; PAM type: NRG; PAM sequence: TGG
ttttctttgatttctttcac

SEQ ID NO: 154294 - DNA, 20 bp, Artificial Sequence
  Description of Artificial Sequence: Synthetic oligonucleotide
  Target: LAMA2; (+) strand; PAM type: NRG; PAM sequence: GAG
ttctttgatttctttcactg

SEQ ID NO: 154295 - DNA, 20 bp, Artificial Sequence
  Description of Artificial Sequence: Synthetic oligonucleotide
  Target: LAMA2; (+) strand; PAM type: NRG; PAM sequence: TAG
tttctttcactggagtttta

SEQ ID NO: 154296 - DNA, 20 bp, Artificial Sequence
  Description of Artificial Sequence: Synthetic oligonucleotide
  Target: LAMA2; (+) strand; PAM type: NRG; PAM sequence: TAG
gttttatagttttcctcata

SEQ ID NO: 154297 - DNA, 20 bp, Artificial Sequence
  Description of Artificial Sequence: Synthetic oligonucleotide
  Target: LAMA2; (+) strand; PAM type: NRG; PAM sequence: TAG
agattttgtacataatttgt

SEQ ID NO: 154298 - DNA, 20 bp, Artificial Sequence
  Description of Artificial Sequence: Synthetic oligonucleotide
  Target: LAMA2; (+) strand; PAM type: NRG; PAM sequence: AAG
aatttgttagatttatattg

SEQ ID NO: 154299 - DNA, 20 bp, Artificial Sequence
  Description of Artificial Sequence: Synthetic oligonucleotide
  Target: LAMA2; (+) strand; PAM type: NRG; PAM sequence: TGG
atttatattgaagtgttttg

SEQ ID NO: 154300 - DNA, 20 bp, Artificial Sequence
  Description of Artificial Sequence: Synthetic oligonucleotide
  Target: LAMA2; (+) strand; PAM type: NRG; PAM sequence: GAG
ttatattgaagtgttttgtg

SEQ ID NO: 154301 - DNA, 20 bp, Artificial Sequence
  Description of Artificial Sequence: Synthetic oligonucleotide
  Target: LAMA2; (+) strand; PAM type: NRG; PAM sequence: TAG
aagtgttttgtggagcatgc

SEQ ID NO: 154302 - DNA, 20 bp, Artificial Sequence
  Description of Artificial Sequence: Synthetic oligonucleotide
  Target: LAMA2; (+) strand; PAM type: NRG; PAM sequence: TGG
gtggagcatgctagtataaa

SEQ ID NO: 154303 - DNA, 20 bp, Artificial Sequence
  Description of Artificial Sequence: Synthetic oligonucleotide
  Target: LAMA2; (+) strand; PAM type: NRG; PAM sequence: TAG
caattttctttgctaatata

SEQ ID NO: 154304 - DNA, 20 bp, Artificial Sequence
  Description of Artificial Sequence: Synthetic oligonucleotide
  Target: LAMA2; (+) strand; PAM type: NRG; PAM sequence: AGG
aattttctttgctaatatat

SEQ ID NO: 154305 - DNA, 20 bp, Artificial Sequence
  Description of Artificial Sequence: Synthetic oligonucleotide
  Target: LAMA2; (+) strand; PAM type: NRG; PAM sequence: AAG
ttctttgctaatatatagga

SEQ ID NO: 154306 - DNA, 20 bp, Artificial Sequence
  Description of Artificial Sequence: Synthetic oligonucleotide
  Target: LAMA2; (+) strand; PAM type: NRG; PAM sequence: CAG
ttttataccacctttttctt

SEQ ID NO: 154307 - DNA, 20 bp, Artificial Sequence
  Description of Artificial Sequence: Synthetic oligonucleotide
  Target: LAMA2; (+) strand; PAM type: NRG; PAM sequence: CAG
ataccacctttttcttcaga

SEQ ID NO: 154308 - DNA, 20 bp, Artificial Sequence
  Description of Artificial Sequence: Synthetic oligonucleotide
  Target: LAMA2; (+) strand; PAM type: NRG; PAM sequence: TGG
cacctttttcttcagacaga

SEQ ID NO: 154309 - DNA, 20 bp, Artificial Sequence
  Description of Artificial Sequence: Synthetic oligonucleotide
  Target: LAMA2; (+) strand; PAM type: NRG; PAM sequence: AAG
ttcttcagacagatggaatc

SEQ ID NO: 154310 - DNA, 20 bp, Artificial Sequence
  Description of Artificial Sequence: Synthetic oligonucleotide
  Target: LAMA2; (+) strand; PAM type: NRG; PAM sequence: TAG
acagatggaatcaagtgact

SEQ ID NO: 154311 - DNA, 20 bp, Artificial Sequence
  Description of Artificial Sequence: Synthetic oligonucleotide
  Target: LAMA2; (+) strand; PAM type: NRG; PAM sequence: TGG
gaatcaagtgacttagaaat

SEQ ID NO: 154312 - DNA, 20 bp, Artificial Sequence
  Description of Artificial Sequence: Synthetic oligonucleotide
  Target: LAMA2; (+) strand; PAM type: NRG; PAM sequence: GAG
ttggctttgttgctctgcct

SEQ ID NO: 154313 - DNA, 20 bp, Artificial Sequence
  Description of Artificial Sequence: Synthetic oligonucleotide
  Target: LAMA2; (+) strand; PAM type: NRG; PAM sequence: GAG
aaaattctcatcttccttct

SEQ ID NO: 154314 - DNA, 20 bp, Artificial Sequence
  Description of Artificial Sequence: Synthetic oligonucleotide
  Target: LAMA2; (+) strand; PAM type: NRG; PAM sequence: AAG
aaccataacctacatatctc

SEQ ID NO: 154315 - DNA, 20 bp, Artificial Sequence
  Description of Artificial Sequence: Synthetic oligonucleotide
  Target: LAMA2; (+) strand; PAM type: NRG; PAM sequence: AGG
accataacctacatatctca

SEQ ID NO: 154316 - DNA, 20 bp, Artificial Sequence
  Description of Artificial Sequence: Synthetic oligonucleotide
  Target: LAMA2; (+) strand; PAM type: NRG; PAM sequence: TAG
acctacatatctcaaggtta

SEQ ID NO: 154317 - DNA, 20 bp, Artificial Sequence
  Description of Artificial Sequence: Synthetic oligonucleotide
  Target: LAMA2; (+) strand; PAM type: NRG; PAM sequence: CAG
caaaatccttgtaatgctta

SEQ ID NO: 154318 - DNA, 20 bp, Artificial Sequence
  Description of Artificial Sequence: Synthetic oligonucleotide
  Target: LAMA2; (+) strand; PAM type: NRG; PAM sequence: AAG
ttgtaatgcttacagtctaa

SEQ ID NO: 154319 - DNA, 20 bp, Artificial Sequence
  Description of Artificial Sequence: Synthetic oligonucleotide
  Target: LAMA2; (+) strand; PAM type: NRG; PAM sequence: AAG
tacagtctaaaagactaaat

SEQ ID NO: 154320 - DNA, 20 bp, Artificial Sequence
  Description of Artificial Sequence: Synthetic oligonucleotide
  Target: LAMA2; (+) strand; PAM type: NRG; PAM sequence: AGG
acagtctaaaagactaaata

SEQ ID NO: 154321 - DNA, 20 bp, Artificial Sequence
  Description of Artificial Sequence: Synthetic oligonucleotide
  Target: LAMA2; (+) strand; PAM type: NRG; PAM sequence: AAG
aaaagactaaataaggcctc

SEQ ID NO: 154322 - DNA, 20 bp, Artificial Sequence
  Description of Artificial Sequence: Synthetic oligonucleotide
  Target: LAMA2; (+) strand; PAM type: NRG; PAM sequence: GAG
aagactaaataaggcctcaa

SEQ ID NO: 154323 - DNA, 20 bp, Artificial Sequence
  Description of Artificial Sequence: Synthetic oligonucleotide
  Target: LAMA2; (+) strand; PAM type: NRG; PAM sequence: CAG
ctcaagagattattcaaaat

SEQ ID NO: 154324 - DNA, 20 bp, Artificial Sequence
  Description of Artificial Sequence: Synthetic oligonucleotide
  Target: LAMA2; (+) strand; PAM type: NRG; PAM sequence: GAG
caagagattattcaaaatca

SEQ ID NO: 154325 - DNA, 20 bp, Artificial Sequence
  Description of Artificial Sequence: Synthetic oligonucleotide
  Target: LAMA2; (+) strand; PAM type: NRG; PAM sequence: CAG
aaatcagagttgttgattcc

SEQ ID NO: 154326 - DNA, 20 bp, Artificial Sequence
  Description of Artificial Sequence: Synthetic oligonucleotide
  Target: LAMA2; (+) strand; PAM type: NRG; PAM sequence: TAG
tcagagttgttgattcccag

SEQ ID NO: 154327 - DNA, 20 bp, Artificial Sequence
  Description of Artificial Sequence: Synthetic oligonucleotide
  Target: LAMA2; (+) strand; PAM type: NRG; PAM sequence: GAG
agagttgttgattcccagta

SEQ ID NO: 154328 - DNA, 20 bp, Artificial Sequence
  Description of Artificial Sequence: Synthetic oligonucleotide
  Target: LAMA2; (+) strand; PAM type: NRG; PAM sequence: AAG
tgattcccagtagagtcata

SEQ ID NO: 154329 - DNA, 20 bp, Artificial Sequence
  Description of Artificial Sequence: Synthetic oligonucleotide
  Target: LAMA2; (+) strand; PAM type: NRG; PAM sequence: AGG
gattcccagtagagtcataa

SEQ ID NO: 154330 - DNA, 20 bp, Artificial Sequence
  Description of Artificial Sequence: Synthetic oligonucleotide
  Target: LAMA2; (+) strand; PAM type: NRG; PAM sequence: GGG
attcccagtagagtcataaa

SEQ ID NO: 154331 - DNA, 20 bp, Artificial Sequence
  Description of Artificial Sequence: Synthetic oligonucleotide
  Target: LAMA2; (+) strand; PAM type: NRG; PAM sequence: TAG
cataaagggctatgttatgt

SEQ ID NO: 154332 - DNA, 20 bp, Artificial Sequence
  Description of Artificial Sequence: Synthetic oligonucleotide
  Target: LAMA2; (+) strand; PAM type: NRG; PAM sequence: AAG
gcaattctaatcctatatca

SEQ ID NO: 154333 - DNA, 20 bp, Artificial Sequence
  Description of Artificial Sequence: Synthetic oligonucleotide
  Target: LAMA2; (+) strand; PAM type: NRG; PAM sequence: AAG
acttccactcccccatatct

SEQ ID NO: 154334 - DNA, 20 bp, Artificial Sequence
  Description of Artificial Sequence: Synthetic oligonucleotide
  Target: LAMA2; (+) strand; PAM type: NRG; PAM sequence: AGG
cttccactcccccatatcta

SEQ ID NO: 154335 - DNA, 20 bp, Artificial Sequence
  Description of Artificial Sequence: Synthetic oligonucleotide
  Target: LAMA2; (+) strand; PAM type: NRG; PAM sequence: GAG
tccactcccccatatctaag

SEQ ID NO: 154336 - DNA, 20 bp, Artificial Sequence
  Description of Artificial Sequence: Synthetic oligonucleotide
  Target: LAMA2; (+) strand; PAM type: NRG; PAM sequence: AGG
ccactcccccatatctaagg

SEQ ID NO: 154337 - DNA, 20 bp, Artificial Sequence
  Description of Artificial Sequence: Synthetic oligonucleotide
  Target: LAMA2; (+) strand; PAM type: NRG; PAM sequence: CAG
tctaaggaggtttccctcaa

SEQ ID NO: 154338 - DNA, 20 bp, Artificial Sequence
  Description of Artificial Sequence: Synthetic oligonucleotide
  Target: LAMA2; (+) strand; PAM type: NRG; PAM sequence: CAG
caacagttgaaaaataactg

SEQ ID NO: 154339 - DNA, 20 bp, Artificial Sequence
  Description of Artificial Sequence: Synthetic oligonucleotide
  Target: LAMA2; (+) strand; PAM type: NRG; PAM sequence: AAG
gccacaaaaatgcatttctg

SEQ ID NO: 154340 - DNA, 20 bp, Artificial Sequence
  Description of Artificial Sequence: Synthetic oligonucleotide
  Target: LAMA2; (+) strand; PAM type: NRG; PAM sequence: AGG
ccacaaaaatgcatttctga

SEQ ID NO: 154341 - DNA, 20 bp, Artificial Sequence
  Description of Artificial Sequence: Synthetic oligonucleotide
  Target: LAMA2; (+) strand; PAM type: NRG; PAM sequence: CAG
tgcatttctgaaggatgctg

SEQ ID NO: 154342 - DNA, 20 bp, Artificial Sequence
  Description of Artificial Sequence: Synthetic oligonucleotide
  Target: LAMA2; (+) strand; PAM type: NRG; PAM sequence: GAG
catttctgaaggatgctgca

SEQ ID NO: 154343 - DNA, 20 bp, Artificial Sequence
  Description of Artificial Sequence: Synthetic oligonucleotide
  Target: LAMA2; (+) strand; PAM type: NRG; PAM sequence: GAG
tttctgaaggatgctgcaga

SEQ ID NO: 154344 - DNA, 20 bp, Artificial Sequence
  Description of Artificial Sequence: Synthetic oligonucleotide
  Target: LAMA2; (+) strand; PAM type: NRG; PAM sequence: AAG
cagagagatatatatttctt

SEQ ID NO: 154345 - DNA, 20 bp, Artificial Sequence
  Description of Artificial Sequence: Synthetic oligonucleotide
  Target: LAMA2; (+) strand; PAM type: NRG; PAM sequence: CAG
agatatatatttcttaagcc

SEQ ID NO: 154346 - DNA, 20 bp, Artificial Sequence
  Description of Artificial Sequence: Synthetic oligonucleotide
  Target: LAMA2; (+) strand; PAM type: NRG; PAM sequence: AAG
ccagctcatatctatttctc

SEQ ID NO: 154347 - DNA, 20 bp, Artificial Sequence
  Description of Artificial Sequence: Synthetic oligonucleotide
  Target: LAMA2; (+) strand; PAM type: NRG; PAM sequence: AGG
cagctcatatctatttctca

SEQ ID NO: 154348 - DNA, 20 bp, Artificial Sequence
  Description of Artificial Sequence: Synthetic oligonucleotide
  Target: LAMA2; (+) strand; PAM type: NRG; PAM sequence: TAG
ctcaaggctgtgtgatatca

SEQ ID NO: 154349 - DNA, 20 bp, Artificial Sequence
  Description of Artificial Sequence: Synthetic oligonucleotide
  Target: LAMA2; (+) strand; PAM type: NRG; PAM sequence: TGG
tgatatcatagaatgaatga

SEQ ID NO: 154350 - DNA, 20 bp, Artificial Sequence
  Description of Artificial Sequence: Synthetic oligonucleotide
  Target: LAMA2; (+) strand; PAM type: NRG; PAM sequence: GAG
atatcatagaatgaatgatg

SEQ ID NO: 154351 - DNA, 20 bp, Artificial Sequence
  Description of Artificial Sequence: Synthetic oligonucleotide
  Target: LAMA2; (+) strand; PAM type: NRG; PAM sequence: CAG
atatttatttatttatttat

SEQ ID NO: 154352 - DNA, 20 bp, Artificial Sequence
  Description of Artificial Sequence: Synthetic oligonucleotide
  Target: LAMA2; (+) strand; PAM type: NRG; PAM sequence: TAG
ataaatctgatttaattttt

SEQ ID NO: 154353 - DNA, 20 bp, Artificial Sequence
  Description of Artificial Sequence: Synthetic oligonucleotide
  Target: LAMA2; (+) strand; PAM type: NRG; PAM sequence: TAG
attttttagaacttaacatt

SEQ ID NO: 154354 - DNA, 20 bp, Artificial Sequence
  Description of Artificial Sequence: Synthetic oligonucleotide
  Target: LAMA2; (+) strand; PAM type: NRG; PAM sequence: TAG
ttttagaacttaacatttag

SEQ ID NO: 154355 - DNA, 20 bp, Artificial Sequence
  Description of Artificial Sequence: Synthetic oligonucleotide
  Target: LAMA2; (+) strand; PAM type: NRG; PAM sequence: GAG
acttaacatttagtagctgt

SEQ ID NO: 154356 - DNA, 20 bp, Artificial Sequence
  Description of Artificial Sequence: Synthetic oligonucleotide
  Target: LAMA2; (+) strand; PAM type: NRG; PAM sequence: CAG
ttagtagctgtgagatctta

SEQ ID NO: 154357 - DNA, 20 bp, Artificial Sequence
  Description of Artificial Sequence: Synthetic oligonucleotide
  Target: LAMA2; (+) strand; PAM type: NRG; PAM sequence: GAG
agtagctgtgagatcttaca
